United States Patent Application Publication US 2019/0048337 A1 - sequence listing, part 17

SEQ ID NO: 554198 - RNA, 18 nt, Artificial Sequence
  Synthetic
agaaauucuaaacugguc

SEQ ID NO: 554199 - RNA, 19 nt, Artificial Sequence
  Synthetic
uagaaauucuaaacugguc

SEQ ID NO: 554200 - RNA, 20 nt, Artificial Sequence
  Synthetic
auagaaauucuaaacugguc

SEQ ID NO: 554201 - RNA, 21 nt, Artificial Sequence
  Synthetic
uauagaaauucuaaacugguc

SEQ ID NO: 554202 - RNA, 22 nt, Artificial Sequence
  Synthetic
uuauagaaauucuaaacugguc

SEQ ID NO: 554203 - RNA, 23 nt, Artificial Sequence
  Synthetic
uuuauagaaauucuaaacugguc

SEQ ID NO: 554204 - RNA, 24 nt, Artificial Sequence
  Synthetic
cuuuauagaaauucuaaacugguc

SEQ ID NO: 554205 - RNA, 18 nt, Artificial Sequence
  Synthetic
augguucccagacugguc

SEQ ID NO: 554206 - RNA, 19 nt, Artificial Sequence
  Synthetic
uaugguucccagacugguc

SEQ ID NO: 554207 - RNA, 20 nt, Artificial Sequence
  Synthetic
cuaugguucccagacugguc

SEQ ID NO: 554208 - RNA, 21 nt, Artificial Sequence
  Synthetic
gcuaugguucccagacugguc

SEQ ID NO: 554209 - RNA, 22 nt, Artificial Sequence
  Synthetic
ugcuaugguucccagacugguc

SEQ ID NO: 554210 - RNA, 23 nt, Artificial Sequence
  Synthetic
uugcuaugguucccagacugguc

SEQ ID NO: 554211 - RNA, 24 nt, Artificial Sequence
  Synthetic
cuugcuaugguucccagacugguc

SEQ ID NO: 554212 - RNA, 18 nt, Artificial Sequence
  Synthetic
auacuuuggugacugguc

SEQ ID NO: 554213 - RNA, 19 nt, Artificial Sequence
  Synthetic
uauacuuuggugacugguc

SEQ ID NO: 554214 - RNA, 20 nt, Artificial Sequence
  Synthetic
uuauacuuuggugacugguc

SEQ ID NO: 554215 - RNA, 21 nt, Artificial Sequence
  Synthetic
uuuauacuuuggugacugguc

SEQ ID NO: 554216 - RNA, 22 nt, Artificial Sequence
  Synthetic
guuuauacuuuggugacugguc

SEQ ID NO: 554217 - RNA, 23 nt, Artificial Sequence
  Synthetic
gguuuauacuuuggugacugguc

SEQ ID NO: 554218 - RNA, 24 nt, Artificial Sequence
  Synthetic
agguuuauacuuuggugacugguc

SEQ ID NO: 554219 - RNA, 18 nt, Artificial Sequence
  Synthetic
caguugaagauacugguc

SEQ ID NO: 554220 - RNA, 19 nt, Artificial Sequence
  Synthetic
acaguugaagauacugguc

SEQ ID NO: 554221 - RNA, 20 nt, Artificial Sequence
  Synthetic
gacaguugaagauacugguc

SEQ ID NO: 554222 - RNA, 21 nt, Artificial Sequence
  Synthetic
agacaguugaagauacugguc

SEQ ID NO: 554223 - RNA, 22 nt, Artificial Sequence
  Synthetic
cagacaguugaagauacugguc

SEQ ID NO: 554224 - RNA, 23 nt, Artificial Sequence
  Synthetic
ucagacaguugaagauacugguc

SEQ ID NO: 554225 - RNA, 24 nt, Artificial Sequence
  Synthetic
aucagacaguugaagauacugguc

SEQ ID NO: 554226 - RNA, 18 nt, Artificial Sequence
  Synthetic
auauuggcaaagcugguc

SEQ ID NO: 554227 - RNA, 19 nt, Artificial Sequence
  Synthetic
cauauuggcaaagcugguc

SEQ ID NO: 554228 - RNA, 20 nt, Artificial Sequence
  Synthetic
ccauauuggcaaagcugguc

SEQ ID NO: 554229 - RNA, 21 nt, Artificial Sequence
  Synthetic
accauauuggcaaagcugguc

SEQ ID NO: 554230 - RNA, 22 nt, Artificial Sequence
  Synthetic
caccauauuggcaaagcugguc

SEQ ID NO: 554231 - RNA, 23 nt, Artificial Sequence
  Synthetic
ucaccauauuggcaaagcugguc

SEQ ID NO: 554232 - RNA, 24 nt, Artificial Sequence
  Synthetic
uucaccauauuggcaaagcugguc

SEQ ID NO: 554233 - RNA, 18 nt, Artificial Sequence
  Synthetic
uaugugcccaagcugguc

SEQ ID NO: 554234 - RNA, 19 nt, Artificial Sequence
  Synthetic
cuaugugcccaagcugguc

SEQ ID NO: 554235 - RNA, 20 nt, Artificial Sequence
  Synthetic
gcuaugugcccaagcugguc

SEQ ID NO: 554236 - RNA, 21 nt, Artificial Sequence
  Synthetic
ugcuaugugcccaagcugguc

SEQ ID NO: 554237 - RNA, 22 nt, Artificial Sequence
  Synthetic
uugcuaugugcccaagcugguc

SEQ ID NO: 554238 - RNA, 23 nt, Artificial Sequence
  Synthetic
guugcuaugugcccaagcugguc

SEQ ID NO: 554239 - RNA, 24 nt, Artificial Sequence
  Synthetic
uguugcuaugugcccaagcugguc

SEQ ID NO: 554240 - RNA, 18 nt, Artificial Sequence
  Synthetic
aauuaaagacagcugguc

SEQ ID NO: 554241 - RNA, 19 nt, Artificial Sequence
  Synthetic
caauuaaagacagcugguc

SEQ ID NO: 554242 - RNA, 20 nt, Artificial Sequence
  Synthetic
ccaauuaaagacagcugguc

SEQ ID NO: 554243 - RNA, 21 nt, Artificial Sequence
  Synthetic
accaauuaaagacagcugguc

SEQ ID NO: 554244 - RNA, 22 nt, Artificial Sequence
  Synthetic
uaccaauuaaagacagcugguc

SEQ ID NO: 554245 - RNA, 23 nt, Artificial Sequence
  Synthetic
auaccaauuaaagacagcugguc

SEQ ID NO: 554246 - RNA, 24 nt, Artificial Sequence
  Synthetic
cauaccaauuaaagacagcugguc

SEQ ID NO: 554247 - RNA, 18 nt, Artificial Sequence
  Synthetic
aaguugaccaggcugguc

SEQ ID NO: 554248 - RNA, 19 nt, Artificial Sequence
  Synthetic
caaguugaccaggcugguc

SEQ ID NO: 554249 - RNA, 20 nt, Artificial Sequence
  Synthetic
ucaaguugaccaggcugguc

SEQ ID NO: 554250 - RNA, 21 nt, Artificial Sequence
  Synthetic
aucaaguugaccaggcugguc

SEQ ID NO: 554251 - RNA, 22 nt, Artificial Sequence
  Synthetic
caucaaguugaccaggcugguc

SEQ ID NO: 554252 - RNA, 23 nt, Artificial Sequence
  Synthetic
ucaucaaguugaccaggcugguc

SEQ ID NO: 554253 - RNA, 24 nt, Artificial Sequence
  Synthetic
uucaucaaguugaccaggcugguc

SEQ ID NO: 554254 - RNA, 18 nt, Artificial Sequence
  Synthetic
guguuacccaggcugguc

SEQ ID NO: 554255 - RNA, 19 nt, Artificial Sequence
  Synthetic
uguguuacccaggcugguc

SEQ ID NO: 554256 - RNA, 20 nt, Artificial Sequence
  Synthetic
cuguguuacccaggcugguc

SEQ ID NO: 554257 - RNA, 21 nt, Artificial Sequence
  Synthetic
gcuguguuacccaggcugguc

SEQ ID NO: 554258 - RNA, 22 nt, Artificial Sequence
  Synthetic
cgcuguguuacccaggcugguc

SEQ ID NO: 554259 - RNA, 23 nt, Artificial Sequence
  Synthetic
ucgcuguguuacccaggcugguc

SEQ ID NO: 554260 - RNA, 24 nt, Artificial Sequence
  Synthetic
cucgcuguguuacccaggcugguc

SEQ ID NO: 554261 - RNA, 21 nt, Artificial Sequence
  Synthetic
gccauguugcccaggcugguc

SEQ ID NO: 554262 - RNA, 22 nt, Artificial Sequence
  Synthetic
ugccauguugcccaggcugguc

SEQ ID NO: 554263 - RNA, 23 nt, Artificial Sequence
  Synthetic
uugccauguugcccaggcugguc

SEQ ID NO: 554264 - RNA, 24 nt, Artificial Sequence
  Synthetic
cuugccauguugcccaggcugguc

SEQ ID NO: 554265 - RNA, 18 nt, Artificial Sequence
  Synthetic
augcuggccaggcugguc

SEQ ID NO: 554266 - RNA, 19 nt, Artificial Sequence
  Synthetic
caugcuggccaggcugguc

SEQ ID NO: 554267 - RNA, 20 nt, Artificial Sequence
  Synthetic
ccaugcuggccaggcugguc

SEQ ID NO: 554268 - RNA, 21 nt, Artificial Sequence
  Synthetic
gccaugcuggccaggcugguc

SEQ ID NO: 554269 - RNA, 22 nt, Artificial Sequence
  Synthetic
cgccaugcuggccaggcugguc

SEQ ID NO: 554270 - RNA, 23 nt, Artificial Sequence
  Synthetic
ucgccaugcuggccaggcugguc

SEQ ID NO: 554271 - RNA, 24 nt, Artificial Sequence
  Synthetic
uucgccaugcuggccaggcugguc

SEQ ID NO: 554272 - RNA, 18 nt, Artificial Sequence
  Synthetic
accuuggccaggcugguc

SEQ ID NO: 554273 - RNA, 19 nt, Artificial Sequence
  Synthetic
caccuuggccaggcugguc

SEQ ID NO: 554274 - RNA, 20 nt, Artificial Sequence
  Synthetic
ucaccuuggccaggcugguc

SEQ ID NO: 554275 - RNA, 21 nt, Artificial Sequence
  Synthetic
aucaccuuggccaggcugguc

SEQ ID NO: 554276 - RNA, 22 nt, Artificial Sequence
  Synthetic
caucaccuuggccaggcugguc

SEQ ID NO: 554277 - RNA, 23 nt, Artificial Sequence
  Synthetic
ucaucaccuuggccaggcugguc

SEQ ID NO: 554278 - RNA, 24 nt, Artificial Sequence
  Synthetic
uucaucaccuuggccaggcugguc

SEQ ID NO: 554279 - RNA, 22 nt, Artificial Sequence
  Synthetic
uaccacguuggccaggcugguc

SEQ ID NO: 554280 - RNA, 23 nt, Artificial Sequence
  Synthetic
uuaccacguuggccaggcugguc

SEQ ID NO: 554281 - RNA, 24 nt, Artificial Sequence
  Synthetic
uuuaccacguuggccaggcugguc

SEQ ID NO: 554282 - RNA, 19 nt, Artificial Sequence
  Synthetic
aauguuggccaggcugguc

SEQ ID NO: 554283 - RNA, 20 nt, Artificial Sequence
  Synthetic
caauguuggccaggcugguc

SEQ ID NO: 554284 - RNA, 21 nt, Artificial Sequence
  Synthetic
acaauguuggccaggcugguc

SEQ ID NO: 554285 - RNA, 22 nt, Artificial Sequence
  Synthetic
gacaauguuggccaggcugguc

SEQ ID NO: 554286 - RNA, 23 nt, Artificial Sequence
  Synthetic
ugacaauguuggccaggcugguc

SEQ ID NO: 554287 - RNA, 24 nt, Artificial Sequence
  Synthetic
uugacaauguuggccaggcugguc

SEQ ID NO: 554288 - RNA, 21 nt, Artificial Sequence
  Synthetic
accauguuggccaggcugguc

SEQ ID NO: 554289 - RNA, 22 nt, Artificial Sequence
  Synthetic
uaccauguuggccaggcugguc

SEQ ID NO: 554290 - RNA, 23 nt, Artificial Sequence
  Synthetic
uuaccauguuggccaggcugguc

SEQ ID NO: 554291 - RNA, 24 nt, Artificial Sequence
  Synthetic
uuuaccauguuggccaggcugguc

SEQ ID NO: 554292 - RNA, 21 nt, Artificial Sequence
  Synthetic
gccauguuggccaggcugguc

SEQ ID NO: 554293 - RNA, 22 nt, Artificial Sequence
  Synthetic
cgccauguuggccaggcugguc

SEQ ID NO: 554294 - RNA, 23 nt, Artificial Sequence
  Synthetic
ucgccauguuggccaggcugguc

SEQ ID NO: 554295 - RNA, 24 nt, Artificial Sequence
  Synthetic
uucgccauguuggccaggcugguc

SEQ ID NO: 554296 - RNA, 18 nt, Artificial Sequence
  Synthetic
uuguuggccaggcugguc

SEQ ID NO: 554297 - RNA, 19 nt, Artificial Sequence
  Synthetic
cuuguuggccaggcugguc

SEQ ID NO: 554298 - RNA, 20 nt, Artificial Sequence
  Synthetic
ccuuguuggccaggcugguc

SEQ ID NO: 554299 - RNA, 21 nt, Artificial Sequence
  Synthetic
accuuguuggccaggcugguc

SEQ ID NO: 554300 - RNA, 22 nt, Artificial Sequence
  Synthetic
caccuuguuggccaggcugguc

SEQ ID NO: 554301 - RNA, 23 nt, Artificial Sequence
  Synthetic
ucaccuuguuggccaggcugguc

SEQ ID NO: 554302 - RNA, 24 nt, Artificial Sequence
  Synthetic
uucaccuuguuggccaggcugguc

SEQ ID NO: 554303 - RNA, 18 nt, Artificial Sequence
  Synthetic
auuuuacucaggcugguc

SEQ ID NO: 554304 - RNA, 19 nt, Artificial Sequence
  Synthetic
uauuuuacucaggcugguc

SEQ ID NO: 554305 - RNA, 20 nt, Artificial Sequence
  Synthetic
cuauuuuacucaggcugguc

SEQ ID NO: 554306 - RNA, 21 nt, Artificial Sequence
  Synthetic
ccuauuuuacucaggcugguc

SEQ ID NO: 554307 - RNA, 22 nt, Artificial Sequence
  Synthetic
gccuauuuuacucaggcugguc

SEQ ID NO: 554308 - RNA, 23 nt, Artificial Sequence
  Synthetic
ggccuauuuuacucaggcugguc

SEQ ID NO: 554309 - RNA, 24 nt, Artificial Sequence
  Synthetic
aggccuauuuuacucaggcugguc

SEQ ID NO: 554310 - RNA, 21 nt, Artificial Sequence
  Synthetic
gccauguuggucaggcugguc

SEQ ID NO: 554311 - RNA, 22 nt, Artificial Sequence
  Synthetic
cgccauguuggucaggcugguc

SEQ ID NO: 554312 - RNA, 23 nt, Artificial Sequence
  Synthetic
ucgccauguuggucaggcugguc

SEQ ID NO: 554313 - RNA, 24 nt, Artificial Sequence
  Synthetic
uucgccauguuggucaggcugguc

SEQ ID NO: 554314 - RNA, 18 nt, Artificial Sequence
  Synthetic
uuuuugcugaggcugguc

SEQ ID NO: 554315 - RNA, 19 nt, Artificial Sequence
  Synthetic
uuuuuugcugaggcugguc

SEQ ID NO: 554316 - RNA, 20 nt, Artificial Sequence
  Synthetic
cuuuuuugcugaggcugguc

SEQ ID NO: 554317 - RNA, 21 nt, Artificial Sequence
  Synthetic
acuuuuuugcugaggcugguc

SEQ ID NO: 554318 - RNA, 22 nt, Artificial Sequence
  Synthetic
cacuuuuuugcugaggcugguc

SEQ ID NO: 554319 - RNA, 23 nt, Artificial Sequence
  Synthetic
ucacuuuuuugcugaggcugguc

SEQ ID NO: 554320 - RNA, 24 nt, Artificial Sequence
  Synthetic
cucacuuuuuugcugaggcugguc

SEQ ID NO: 554321 - RNA, 18 nt, Artificial Sequence
  Synthetic
aaguuggcuaggcugguc

SEQ ID NO: 554322 - RNA, 19 nt, Artificial Sequence
  Synthetic
caaguuggcuaggcugguc

SEQ ID NO: 554323 - RNA, 20 nt, Artificial Sequence
  Synthetic
ccaaguuggcuaggcugguc

SEQ ID NO: 554324 - RNA, 21 nt, Artificial Sequence
  Synthetic
accaaguuggcuaggcugguc

SEQ ID NO: 554325 - RNA, 22 nt, Artificial Sequence
  Synthetic
caccaaguuggcuaggcugguc

SEQ ID NO: 554326 - RNA, 23 nt, Artificial Sequence
  Synthetic
ucaccaaguuggcuaggcugguc

SEQ ID NO: 554327 - RNA, 24 nt, Artificial Sequence
  Synthetic
uucaccaaguuggcuaggcugguc

SEQ ID NO: 554328 - RNA, 18 nt, Artificial Sequence
  Synthetic
augccaauacugcugguc

SEQ ID NO: 554329 - RNA, 19 nt, Artificial Sequence
  Synthetic
aaugccaauacugcugguc

SEQ ID NO: 554330 - RNA, 20 nt, Artificial Sequence
  Synthetic
aaaugccaauacugcugguc

SEQ ID NO: 554331 - RNA, 21 nt, Artificial Sequence
  Synthetic
aaaaugccaauacugcugguc

SEQ ID NO: 554332 - RNA, 22 nt, Artificial Sequence
  Synthetic
aaaaaugccaauacugcugguc

SEQ ID NO: 554333 - RNA, 23 nt, Artificial Sequence
  Synthetic
aaaaaaugccaauacugcugguc

SEQ ID NO: 554334 - RNA, 24 nt, Artificial Sequence
  Synthetic
aaaaaaaugccaauacugcugguc

SEQ ID NO: 554335 - RNA, 18 nt, Artificial Sequence
  Synthetic
auguugcucagucugguc

SEQ ID NO: 554336 - RNA, 19 nt, Artificial Sequence
  Synthetic
cauguugcucagucugguc

SEQ ID NO: 554337 - RNA, 20 nt, Artificial Sequence
  Synthetic
ccauguugcucagucugguc

SEQ ID NO: 554338 - RNA, 21 nt, Artificial Sequence
  Synthetic
uccauguugcucagucugguc

SEQ ID NO: 554339 - RNA, 22 nt, Artificial Sequence
  Synthetic
cuccauguugcucagucugguc

SEQ ID NO: 554340 - RNA, 23 nt, Artificial Sequence
  Synthetic
ucuccauguugcucagucugguc

SEQ ID NO: 554341 - RNA, 24 nt, Artificial Sequence
  Synthetic
uucuccauguugcucagucugguc

SEQ ID NO: 554342 - RNA, 18 nt, Artificial Sequence
  Synthetic
cacuuuauuauggugguc

SEQ ID NO: 554343 - RNA, 19 nt, Artificial Sequence
  Synthetic
ucacuuuauuauggugguc

SEQ ID NO: 554344 - RNA, 20 nt, Artificial Sequence
  Synthetic
cucacuuuauuauggugguc

SEQ ID NO: 554345 - RNA, 21 nt, Artificial Sequence
  Synthetic
acucacuuuauuauggugguc

SEQ ID NO: 554346 - RNA, 22 nt, Artificial Sequence
  Synthetic
gacucacuuuauuauggugguc

SEQ ID NO: 554347 - RNA, 23 nt, Artificial Sequence
  Synthetic
ugacucacuuuauuauggugguc

SEQ ID NO: 554348 - RNA, 24 nt, Artificial Sequence
  Synthetic
gugacucacuuuauuauggugguc

SEQ ID NO: 554349 - RNA, 18 nt, Artificial Sequence
  Synthetic
auuucuuaaaaugugguc

SEQ ID NO: 554350 - RNA, 19 nt, Artificial Sequence
  Synthetic
uauuucuuaaaaugugguc

SEQ ID NO: 554351 - RNA, 20 nt, Artificial Sequence
  Synthetic
auauuucuuaaaaugugguc

SEQ ID NO: 554352 - RNA, 21 nt, Artificial Sequence
  Synthetic
gauauuucuuaaaaugugguc

SEQ ID NO: 554353 - RNA, 22 nt, Artificial Sequence
  Synthetic
cgauauuucuuaaaaugugguc

SEQ ID NO: 554354 - RNA, 23 nt, Artificial Sequence
  Synthetic
ucgauauuucuuaaaaugugguc

SEQ ID NO: 554355 - RNA, 24 nt, Artificial Sequence
  Synthetic
aucgauauuucuuaaaaugugguc

SEQ ID NO: 554356 - RNA, 18 nt, Artificial Sequence
  Synthetic
auuuccuuaaaugugguc

SEQ ID NO: 554357 - RNA, 19 nt, Artificial Sequence
  Synthetic
uauuuccuuaaaugugguc

SEQ ID NO: 554358 - RNA, 20 nt, Artificial Sequence
  Synthetic
guauuuccuuaaaugugguc

SEQ ID NO: 554359 - RNA, 21 nt, Artificial Sequence
  Synthetic
aguauuuccuuaaaugugguc

SEQ ID NO: 554360 - RNA, 22 nt, Artificial Sequence
  Synthetic
caguauuuccuuaaaugugguc

SEQ ID NO: 554361 - RNA, 23 nt, Artificial Sequence
  Synthetic
acaguauuuccuuaaaugugguc

SEQ ID NO: 554362 - RNA, 24 nt, Artificial Sequence
  Synthetic
aacaguauuuccuuaaaugugguc

SEQ ID NO: 554363 - RNA, 18 nt, Artificial Sequence
  Synthetic
cagcuuucccuugugguc

SEQ ID NO: 554364 - RNA, 19 nt, Artificial Sequence
  Synthetic
ccagcuuucccuugugguc

SEQ ID NO: 554365 - RNA, 20 nt, Artificial Sequence
  Synthetic
accagcuuucccuugugguc

SEQ ID NO: 554366 - RNA, 21 nt, Artificial Sequence
  Synthetic
uaccagcuuucccuugugguc

SEQ ID NO: 554367 - RNA, 22 nt, Artificial Sequence
  Synthetic
cuaccagcuuucccuugugguc

SEQ ID NO: 554368 - RNA, 23 nt, Artificial Sequence
  Synthetic
acuaccagcuuucccuugugguc

SEQ ID NO: 554369 - RNA, 24 nt, Artificial Sequence
  Synthetic
cacuaccagcuuucccuugugguc

SEQ ID NO: 554370 - RNA, 18 nt, Artificial Sequence
  Synthetic
cgaguuuacugauugguc

SEQ ID NO: 554371 - RNA, 19 nt, Artificial Sequence
  Synthetic
ccgaguuuacugauugguc

SEQ ID NO: 554372 - RNA, 20 nt, Artificial Sequence
  Synthetic
accgaguuuacugauugguc

SEQ ID NO: 554373 - RNA, 21 nt, Artificial Sequence
  Synthetic
aaccgaguuuacugauugguc

SEQ ID NO: 554374 - RNA, 22 nt, Artificial Sequence
  Synthetic
uaaccgaguuuacugauugguc

SEQ ID NO: 554375 - RNA, 23 nt, Artificial Sequence
  Synthetic
uuaaccgaguuuacugauugguc

SEQ ID NO: 554376 - RNA, 24 nt, Artificial Sequence
  Synthetic
auuaaccgaguuuacugauugguc

SEQ ID NO: 554377 - RNA, 18 nt, Artificial Sequence
  Synthetic
uauuaaguccacuugguc

SEQ ID NO: 554378 - RNA, 19 nt, Artificial Sequence
  Synthetic
cuauuaaguccacuugguc

SEQ ID NO: 554379 - RNA, 20 nt, Artificial Sequence
  Synthetic
ucuauuaaguccacuugguc

SEQ ID NO: 554380 - RNA, 21 nt, Artificial Sequence
  Synthetic
gucuauuaaguccacuugguc

SEQ ID NO: 554381 - RNA, 22 nt, Artificial Sequence
  Synthetic
ugucuauuaaguccacuugguc

SEQ ID NO: 554382 - RNA, 23 nt, Artificial Sequence
  Synthetic
augucuauuaaguccacuugguc

SEQ ID NO: 554383 - RNA, 24 nt, Artificial Sequence
  Synthetic
gaugucuauuaaguccacuugguc

SEQ ID NO: 554384 - RNA, 18 nt, Artificial Sequence
  Synthetic
ucuccuuauggguugguc

SEQ ID NO: 554385 - RNA, 19 nt, Artificial Sequence
  Synthetic
aucuccuuauggguugguc

SEQ ID NO: 554386 - RNA, 20 nt, Artificial Sequence
  Synthetic
caucuccuuauggguugguc

SEQ ID NO: 554387 - RNA, 21 nt, Artificial Sequence
  Synthetic
ucaucuccuuauggguugguc

SEQ ID NO: 554388 - RNA, 22 nt, Artificial Sequence
  Synthetic
aucaucuccuuauggguugguc

SEQ ID NO: 554389 - RNA, 23 nt, Artificial Sequence
  Synthetic
gaucaucuccuuauggguugguc

SEQ ID NO: 554390 - RNA, 24 nt, Artificial Sequence
  Synthetic
agaucaucuccuuauggguugguc

SEQ ID NO: 554391 - RNA, 18 nt, Artificial Sequence
  Synthetic
auuuuuuuuguuuugguc

SEQ ID NO: 554392 - RNA, 19 nt, Artificial Sequence
  Synthetic
cauuuuuuuuguuuugguc

SEQ ID NO: 554393 - RNA, 20 nt, Artificial Sequence
  Synthetic
ucauuuuuuuuguuuugguc

SEQ ID NO: 554394 - RNA, 21 nt, Artificial Sequence
  Synthetic
aucauuuuuuuuguuuugguc

SEQ ID NO: 554395 - RNA, 22 nt, Artificial Sequence
  Synthetic
uaucauuuuuuuuguuuugguc

SEQ ID NO: 554396 - RNA, 23 nt, Artificial Sequence
  Synthetic
auaucauuuuuuuuguuuugguc

SEQ ID NO: 554397 - RNA, 24 nt, Artificial Sequence
  Synthetic
aauaucauuuuuuuuguuuugguc

SEQ ID NO: 554398 - RNA, 18 nt, Artificial Sequence
  Synthetic
cuccagaaagaaaauguc

SEQ ID NO: 554399 - RNA, 19 nt, Artificial Sequence
  Synthetic
ucuccagaaagaaaauguc

SEQ ID NO: 554400 - RNA, 20 nt, Artificial Sequence
  Synthetic
gucuccagaaagaaaauguc

SEQ ID NO: 554401 - RNA, 21 nt, Artificial Sequence
  Synthetic
ugucuccagaaagaaaauguc

SEQ ID NO: 554402 - RNA, 22 nt, Artificial Sequence
  Synthetic
uugucuccagaaagaaaauguc

SEQ ID NO: 554403 - RNA, 23 nt, Artificial Sequence
  Synthetic
cuugucuccagaaagaaaauguc

SEQ ID NO: 554404 - RNA, 24 nt, Artificial Sequence
  Synthetic
ccuugucuccagaaagaaaauguc

SEQ ID NO: 554405 - RNA, 18 nt, Artificial Sequence
  Synthetic
gggacauuuggaaauguc

SEQ ID NO: 554406 - RNA, 19 nt, Artificial Sequence
  Synthetic
agggacauuuggaaauguc

SEQ ID NO: 554407 - RNA, 20 nt, Artificial Sequence
  Synthetic
aagggacauuuggaaauguc

SEQ ID NO: 554408 - RNA, 21 nt, Artificial Sequence
  Synthetic
caagggacauuuggaaauguc

SEQ ID NO: 554409 - RNA, 22 nt, Artificial Sequence
  Synthetic
ccaagggacauuuggaaauguc

SEQ ID NO: 554410 - RNA, 23 nt, Artificial Sequence
  Synthetic
cccaagggacauuuggaaauguc

SEQ ID NO: 554411 - RNA, 24 nt, Artificial Sequence
  Synthetic
ccccaagggacauuuggaaauguc

SEQ ID NO: 554412 - RNA, 18 nt, Artificial Sequence
  Synthetic
uuuagcauuuuaaauguc

SEQ ID NO: 554413 - RNA, 19 nt, Artificial Sequence
  Synthetic
auuuagcauuuuaaauguc

SEQ ID NO: 554414 - RNA, 20 nt, Artificial Sequence
  Synthetic
cauuuagcauuuuaaauguc

SEQ ID NO: 554415 - RNA, 21 nt, Artificial Sequence
  Synthetic
gcauuuagcauuuuaaauguc

SEQ ID NO: 554416 - RNA, 22 nt, Artificial Sequence
  Synthetic
ugcauuuagcauuuuaaauguc

SEQ ID NO: 554417 - RNA, 23 nt, Artificial Sequence
  Synthetic
uugcauuuagcauuuuaaauguc

SEQ ID NO: 554418 - RNA, 24 nt, Artificial Sequence
  Synthetic
guugcauuuagcauuuuaaauguc

SEQ ID NO: 554419 - RNA, 18 nt, Artificial Sequence
  Synthetic
gagauaaggaacaauguc

SEQ ID NO: 554420 - RNA, 19 nt, Artificial Sequence
  Synthetic
ggagauaaggaacaauguc

SEQ ID NO: 554421 - RNA, 20 nt, Artificial Sequence
  Synthetic
gggagauaaggaacaauguc

SEQ ID NO: 554422 - RNA, 21 nt, Artificial Sequence
  Synthetic
agggagauaaggaacaauguc

SEQ ID NO: 554423 - RNA, 22 nt, Artificial Sequence
  Synthetic
uagggagauaaggaacaauguc

SEQ ID NO: 554424 - RNA, 23 nt, Artificial Sequence
  Synthetic
auagggagauaaggaacaauguc

SEQ ID NO: 554425 - RNA, 24 nt, Artificial Sequence
  Synthetic
aauagggagauaaggaacaauguc

SEQ ID NO: 554426 - RNA, 18 nt, Artificial Sequence
  Synthetic
caaaugcauggcaauguc

SEQ ID NO: 554427 - RNA, 19 nt, Artificial Sequence
  Synthetic
acaaaugcauggcaauguc

SEQ ID NO: 554428 - RNA, 20 nt, Artificial Sequence
  Synthetic
uacaaaugcauggcaauguc

SEQ ID NO: 554429 - RNA, 21 nt, Artificial Sequence
  Synthetic
uuacaaaugcauggcaauguc

SEQ ID NO: 554430 - RNA, 22 nt, Artificial Sequence
  Synthetic
guuacaaaugcauggcaauguc

SEQ ID NO: 554431 - RNA, 23 nt, Artificial Sequence
  Synthetic
gguuacaaaugcauggcaauguc

SEQ ID NO: 554432 - RNA, 24 nt, Artificial Sequence
  Synthetic
agguuacaaaugcauggcaauguc

SEQ ID NO: 554433 - RNA, 18 nt, Artificial Sequence
  Synthetic
caguaucauuagaauguc

SEQ ID NO: 554434 - RNA, 19 nt, Artificial Sequence
  Synthetic
acaguaucauuagaauguc

SEQ ID NO: 554435 - RNA, 20 nt, Artificial Sequence
  Synthetic
aacaguaucauuagaauguc

SEQ ID NO: 554436 - RNA, 21 nt, Artificial Sequence
  Synthetic
caacaguaucauuagaauguc

SEQ ID NO: 554437 - RNA, 22 nt, Artificial Sequence
  Synthetic
acaacaguaucauuagaauguc

SEQ ID NO: 554438 - RNA, 23 nt, Artificial Sequence
  Synthetic
aacaacaguaucauuagaauguc

SEQ ID NO: 554439 - RNA, 24 nt, Artificial Sequence
  Synthetic
gaacaacaguaucauuagaauguc

SEQ ID NO: 554440 - RNA, 18 nt, Artificial Sequence
  Synthetic
uccagaaaaaguaauguc

SEQ ID NO: 554441 - RNA, 19 nt, Artificial Sequence
  Synthetic
guccagaaaaaguaauguc

SEQ ID NO: 554442 - RNA, 20 nt, Artificial Sequence
  Synthetic
uguccagaaaaaguaauguc

SEQ ID NO: 554443 - RNA, 21 nt, Artificial Sequence
  Synthetic
guguccagaaaaaguaauguc

SEQ ID NO: 554444 - RNA, 22 nt, Artificial Sequence
  Synthetic
cguguccagaaaaaguaauguc

SEQ ID NO: 554445 - RNA, 23 nt, Artificial Sequence
  Synthetic
acguguccagaaaaaguaauguc

SEQ ID NO: 554446 - RNA, 24 nt, Artificial Sequence
  Synthetic
uacguguccagaaaaaguaauguc

SEQ ID NO: 554447 - RNA, 18 nt, Artificial Sequence
  Synthetic
acaagaauauuuaauguc

SEQ ID NO: 554448 - RNA, 19 nt, Artificial Sequence
  Synthetic
aacaagaauauuuaauguc

SEQ ID NO: 554449 - RNA, 20 nt, Artificial Sequence
  Synthetic
aaacaagaauauuuaauguc

SEQ ID NO: 554450 - RNA, 21 nt, Artificial Sequence
  Synthetic
caaacaagaauauuuaauguc

SEQ ID NO: 554451 - RNA, 22 nt, Artificial Sequence
  Synthetic
acaaacaagaauauuuaauguc

SEQ ID NO: 554452 - RNA, 23 nt, Artificial Sequence
  Synthetic
gacaaacaagaauauuuaauguc

SEQ ID NO: 554453 - RNA, 24 nt, Artificial Sequence
  Synthetic
agacaaacaagaauauuuaauguc

SEQ ID NO: 554454 - RNA, 18 nt, Artificial Sequence
  Synthetic
uugcaucuugcacauguc

SEQ ID NO: 554455 - RNA, 19 nt, Artificial Sequence
  Synthetic
cuugcaucuugcacauguc

SEQ ID NO: 554456 - RNA, 20 nt, Artificial Sequence
  Synthetic
ucuugcaucuugcacauguc

SEQ ID NO: 554457 - RNA, 21 nt, Artificial Sequence
  Synthetic
cucuugcaucuugcacauguc

SEQ ID NO: 554458 - RNA, 22 nt, Artificial Sequence
  Synthetic
ucucuugcaucuugcacauguc

SEQ ID NO: 554459 - RNA, 23 nt, Artificial Sequence
  Synthetic
aucucuugcaucuugcacauguc

SEQ ID NO: 554460 - RNA, 24 nt, Artificial Sequence
  Synthetic
uaucucuugcaucuugcacauguc

SEQ ID NO: 554461 - RNA, 18 nt, Artificial Sequence
  Synthetic
cuuuuuuggauacauguc

SEQ ID NO: 554462 - RNA, 19 nt, Artificial Sequence
  Synthetic
ucuuuuuuggauacauguc

SEQ ID NO: 554463 - RNA, 20 nt, Artificial Sequence
  Synthetic
cucuuuuuuggauacauguc

SEQ ID NO: 554464 - RNA, 21 nt, Artificial Sequence
  Synthetic
gcucuuuuuuggauacauguc

SEQ ID NO: 554465 - RNA, 22 nt, Artificial Sequence
  Synthetic
agcucuuuuuuggauacauguc

SEQ ID NO: 554466 - RNA, 23 nt, Artificial Sequence
  Synthetic
gagcucuuuuuuggauacauguc

SEQ ID NO: 554467 - RNA, 24 nt, Artificial Sequence
  Synthetic
ggagcucuuuuuuggauacauguc

SEQ ID NO: 554468 - RNA, 18 nt, Artificial Sequence
  Synthetic
aaacucagcaaucauguc

SEQ ID NO: 554469 - RNA, 19 nt, Artificial Sequence
  Synthetic
gaaacucagcaaucauguc

SEQ ID NO: 554470 - RNA, 20 nt, Artificial Sequence
  Synthetic
ggaaacucagcaaucauguc

SEQ ID NO: 554471 - RNA, 21 nt, Artificial Sequence
  Synthetic
uggaaacucagcaaucauguc

SEQ ID NO: 554472 - RNA, 22 nt, Artificial Sequence
  Synthetic
uuggaaacucagcaaucauguc

SEQ ID NO: 554473 - RNA, 23 nt, Artificial Sequence
  Synthetic
auuggaaacucagcaaucauguc

SEQ ID NO: 554474 - RNA, 24 nt, Artificial Sequence
  Synthetic
aauuggaaacucagcaaucauguc

SEQ ID NO: 554475 - RNA, 18 nt, Artificial Sequence
  Synthetic
gauaauuaucaucauguc

SEQ ID NO: 554476 - RNA, 19 nt, Artificial Sequence
  Synthetic
agauaauuaucaucauguc

SEQ ID NO: 554477 - RNA, 20 nt, Artificial Sequence
  Synthetic
gagauaauuaucaucauguc

SEQ ID NO: 554478 - RNA, 21 nt, Artificial Sequence
  Synthetic
ugagauaauuaucaucauguc

SEQ ID NO: 554479 - RNA, 22 nt, Artificial Sequence
  Synthetic
cugagauaauuaucaucauguc

SEQ ID NO: 554480 - RNA, 23 nt, Artificial Sequence
  Synthetic
ccugagauaauuaucaucauguc

SEQ ID NO: 554481 - RNA, 24 nt, Artificial Sequence
  Synthetic
accugagauaauuaucaucauguc

SEQ ID NO: 554482 - RNA, 18 nt, Artificial Sequence
  Synthetic
ucagcagcaaaagauguc

SEQ ID NO: 554483 - RNA, 19 nt, Artificial Sequence
  Synthetic
uucagcagcaaaagauguc

SEQ ID NO: 554484 - RNA, 20 nt, Artificial Sequence
  Synthetic
uuucagcagcaaaagauguc

SEQ ID NO: 554485 - RNA, 21 nt, Artificial Sequence
  Synthetic
auuucagcagcaaaagauguc

SEQ ID NO: 554486 - RNA, 22 nt, Artificial Sequence
  Synthetic
uauuucagcagcaaaagauguc

SEQ ID NO: 554487 - RNA, 23 nt, Artificial Sequence
  Synthetic
uuauuucagcagcaaaagauguc

SEQ ID NO: 554488 - RNA, 24 nt, Artificial Sequence
  Synthetic
uuuauuucagcagcaaaagauguc

SEQ ID NO: 554489 - RNA, 18 nt, Artificial Sequence
  Synthetic
uguuggaagcaagauguc

SEQ ID NO: 554490 - RNA, 19 nt, Artificial Sequence
  Synthetic
auguuggaagcaagauguc

SEQ ID NO: 554491 - RNA, 20 nt, Artificial Sequence
  Synthetic
uauguuggaagcaagauguc

SEQ ID NO: 554492 - RNA, 21 nt, Artificial Sequence
  Synthetic
uuauguuggaagcaagauguc

SEQ ID NO: 554493 - RNA, 22 nt, Artificial Sequence
  Synthetic
cuuauguuggaagcaagauguc

SEQ ID NO: 554494 - RNA, 23 nt, Artificial Sequence
  Synthetic
ucuuauguuggaagcaagauguc

SEQ ID NO: 554495 - RNA, 24 nt, Artificial Sequence
  Synthetic
uucuuauguuggaagcaagauguc

SEQ ID NO: 554496 - RNA, 18 nt, Artificial Sequence
  Synthetic
uuucaguuauaagauguc

SEQ ID NO: 554497 - RNA, 19 nt, Artificial Sequence
  Synthetic
cuuucaguuauaagauguc

SEQ ID NO: 554498 - RNA, 20 nt, Artificial Sequence
  Synthetic
acuuucaguuauaagauguc

SEQ ID NO: 554499 - RNA, 21 nt, Artificial Sequence
  Synthetic
aacuuucaguuauaagauguc

SEQ ID NO: 554500 - RNA, 22 nt, Artificial Sequence
  Synthetic
aaacuuucaguuauaagauguc

SEQ ID NO: 554501 - RNA, 23 nt, Artificial Sequence
  Synthetic
caaacuuucaguuauaagauguc

SEQ ID NO: 554502 - RNA, 24 nt, Artificial Sequence
  Synthetic
acaaacuuucaguuauaagauguc

SEQ ID NO: 554503 - RNA, 18 nt, Artificial Sequence
  Synthetic
ccauaauccccagauguc

SEQ ID NO: 554504 - RNA, 19 nt, Artificial Sequence
  Synthetic
cccauaauccccagauguc

SEQ ID NO: 554505 - RNA, 20 nt, Artificial Sequence
  Synthetic
ucccauaauccccagauguc

SEQ ID NO: 554506 - RNA, 21 nt, Artificial Sequence
  Synthetic
uucccauaauccccagauguc

SEQ ID NO: 554507 - RNA, 22 nt, Artificial Sequence
  Synthetic
guucccauaauccccagauguc

SEQ ID NO: 554508 - RNA, 23 nt, Artificial Sequence
  Synthetic
aguucccauaauccccagauguc

SEQ ID NO: 554509 - RNA, 24 nt, Artificial Sequence
  Synthetic
caguucccauaauccccagauguc

SEQ ID NO: 554510 - RNA, 18 nt, Artificial Sequence
  Synthetic
cugugcaccugagauguc

SEQ ID NO: 554511 - RNA, 19 nt, Artificial Sequence
  Synthetic
ccugugcaccugagauguc

SEQ ID NO: 554512 - RNA, 20 nt, Artificial Sequence
  Synthetic
uccugugcaccugagauguc

SEQ ID NO: 554513 - RNA, 21 nt, Artificial Sequence
  Synthetic
uuccugugcaccugagauguc

SEQ ID NO: 554514 - RNA, 22 nt, Artificial Sequence
  Synthetic
cuuccugugcaccugagauguc

SEQ ID NO: 554515 - RNA, 23 nt, Artificial Sequence
  Synthetic
ccuuccugugcaccugagauguc

SEQ ID NO: 554516 - RNA, 24 nt, Artificial Sequence
  Synthetic
uccuuccugugcaccugagauguc

SEQ ID NO: 554517 - RNA, 18 nt, Artificial Sequence
  Synthetic
gccuaaaacauagauguc

SEQ ID NO: 554518 - RNA, 19 nt, Artificial Sequence
  Synthetic
ugccuaaaacauagauguc

SEQ ID NO: 554519 - RNA, 20 nt, Artificial Sequence
  Synthetic
uugccuaaaacauagauguc

SEQ ID NO: 554520 - RNA, 21 nt, Artificial Sequence
  Synthetic
uuugccuaaaacauagauguc

SEQ ID NO: 554521 - RNA, 22 nt, Artificial Sequence
  Synthetic
uuuugccuaaaacauagauguc

SEQ ID NO: 554522 - RNA, 23 nt, Artificial Sequence
  Synthetic
auuuugccuaaaacauagauguc

SEQ ID NO: 554523 - RNA, 24 nt, Artificial Sequence
  Synthetic
aauuuugccuaaaacauagauguc

SEQ ID NO: 554524 - RNA, 18 nt, Artificial Sequence
  Synthetic
ggucuccauuuagauguc

SEQ ID NO: 554525 - RNA, 19 nt, Artificial Sequence
  Synthetic
aggucuccauuuagauguc

SEQ ID NO: 554526 - RNA, 20 nt, Artificial Sequence
  Synthetic
uaggucuccauuuagauguc

SEQ ID NO: 554527 - RNA, 21 nt, Artificial Sequence
  Synthetic
uuaggucuccauuuagauguc

SEQ ID NO: 554528 - RNA, 22 nt, Artificial Sequence
  Synthetic
cuuaggucuccauuuagauguc

SEQ ID NO: 554529 - RNA, 23 nt, Artificial Sequence
  Synthetic
ucuuaggucuccauuuagauguc

SEQ ID NO: 554530 - RNA, 24 nt, Artificial Sequence
  Synthetic
cucuuaggucuccauuuagauguc

SEQ ID NO: 554531 - RNA, 18 nt, Artificial Sequence
  Synthetic
ucuuggaauguggauguc

SEQ ID NO: 554532 - RNA, 19 nt, Artificial Sequence
  Synthetic
uucuuggaauguggauguc

SEQ ID NO: 554533 - RNA, 20 nt, Artificial Sequence
  Synthetic
cuucuuggaauguggauguc

SEQ ID NO: 554534 - RNA, 21 nt, Artificial Sequence
  Synthetic
ccuucuuggaauguggauguc

SEQ ID NO: 554535 - RNA, 22 nt, Artificial Sequence
  Synthetic
uccuucuuggaauguggauguc

SEQ ID NO: 554536 - RNA, 23 nt, Artificial Sequence
  Synthetic
auccuucuuggaauguggauguc

SEQ ID NO: 554537 - RNA, 24 nt, Artificial Sequence
  Synthetic
cauccuucuuggaauguggauguc

SEQ ID NO: 554538 - RNA, 18 nt, Artificial Sequence
  Synthetic
caucugccuacugauguc

SEQ ID NO: 554539 - RNA, 19 nt, Artificial Sequence
  Synthetic
acaucugccuacugauguc

SEQ ID NO: 554540 - RNA, 20 nt, Artificial Sequence
  Synthetic
uacaucugccuacugauguc

SEQ ID NO: 554541 - RNA, 21 nt, Artificial Sequence
  Synthetic
cuacaucugccuacugauguc

SEQ ID NO: 554542 - RNA, 22 nt, Artificial Sequence
  Synthetic
gcuacaucugccuacugauguc

SEQ ID NO: 554543 - RNA, 23 nt, Artificial Sequence
  Synthetic
ugcuacaucugccuacugauguc

SEQ ID NO: 554544 - RNA, 24 nt, Artificial Sequence
  Synthetic
uugcuacaucugccuacugauguc

SEQ ID NO: 554545 - RNA, 18 nt, Artificial Sequence
  Synthetic
ggaaggaaugcugauguc

SEQ ID NO: 554546 - RNA, 19 nt, Artificial Sequence
  Synthetic
gggaaggaaugcugauguc

SEQ ID NO: 554547 - RNA, 20 nt, Artificial Sequence
  Synthetic
ggggaaggaaugcugauguc

SEQ ID NO: 554548 - RNA, 21 nt, Artificial Sequence
  Synthetic
uggggaaggaaugcugauguc

SEQ ID NO: 554549 - RNA, 22 nt, Artificial Sequence
  Synthetic
uuggggaaggaaugcugauguc

SEQ ID NO: 554550 - RNA, 23 nt, Artificial Sequence
  Synthetic
cuuggggaaggaaugcugauguc

SEQ ID NO: 554551 - RNA, 24 nt, Artificial Sequence
  Synthetic
ccuuggggaaggaaugcugauguc

SEQ ID NO: 554552 - RNA, 18 nt, Artificial Sequence
  Synthetic
ugacuugcgauugauguc

SEQ ID NO: 554553 - RNA, 19 nt, Artificial Sequence
  Synthetic
cugacuugcgauugauguc

SEQ ID NO: 554554 - RNA, 20 nt, Artificial Sequence
  Synthetic
acugacuugcgauugauguc

SEQ ID NO: 554555 - RNA, 21 nt, Artificial Sequence
  Synthetic
uacugacuugcgauugauguc

SEQ ID NO: 554556 - RNA, 22 nt, Artificial Sequence
  Synthetic
cuacugacuugcgauugauguc

SEQ ID NO: 554557 - RNA, 23 nt, Artificial Sequence
  Synthetic
ucuacugacuugcgauugauguc

SEQ ID NO: 554558 - RNA, 24 nt, Artificial Sequence
  Synthetic
aucuacugacuugcgauugauguc

SEQ ID NO: 554559 - RNA, 18 nt, Artificial Sequence
  Synthetic
aauugacauaaauauguc

SEQ ID NO: 554560 - RNA, 19 nt, Artificial Sequence
  Synthetic
aaauugacauaaauauguc

SEQ ID NO: 554561 - RNA, 20 nt, Artificial Sequence
  Synthetic
uaaauugacauaaauauguc

SEQ ID NO: 554562 - RNA, 21 nt, Artificial Sequence
  Synthetic
uuaaauugacauaaauauguc

SEQ ID NO: 554563 - RNA, 22 nt, Artificial Sequence
  Synthetic
guuaaauugacauaaauauguc

SEQ ID NO: 554564 - RNA, 23 nt, Artificial Sequence
  Synthetic
uguuaaauugacauaaauauguc

SEQ ID NO: 554565 - RNA, 24 nt, Artificial Sequence
  Synthetic
auguuaaauugacauaaauauguc

SEQ ID NO: 554566 - RNA, 18 nt, Artificial Sequence
  Synthetic
caguauaaacaauauguc

SEQ ID NO: 554567 - RNA, 19 nt, Artificial Sequence
  Synthetic
gcaguauaaacaauauguc

SEQ ID NO: 554568 - RNA, 20 nt, Artificial Sequence
  Synthetic
ugcaguauaaacaauauguc

SEQ ID NO: 554569 - RNA, 21 nt, Artificial Sequence
  Synthetic
uugcaguauaaacaauauguc

SEQ ID NO: 554570 - RNA, 22 nt, Artificial Sequence
  Synthetic
auugcaguauaaacaauauguc

SEQ ID NO: 554571 - RNA, 23 nt, Artificial Sequence
  Synthetic
aauugcaguauaaacaauauguc

SEQ ID NO: 554572 - RNA, 24 nt, Artificial Sequence
  Synthetic
uaauugcaguauaaacaauauguc

SEQ ID NO: 554573 - RNA, 18 nt, Artificial Sequence
  Synthetic
cuagaaaacaacuauguc

SEQ ID NO: 554574 - RNA, 19 nt, Artificial Sequence
  Synthetic
ucuagaaaacaacuauguc

SEQ ID NO: 554575 - RNA, 20 nt, Artificial Sequence
  Synthetic
uucuagaaaacaacuauguc

SEQ ID NO: 554576 - RNA, 21 nt, Artificial Sequence
  Synthetic
uuucuagaaaacaacuauguc

SEQ ID NO: 554577 - RNA, 22 nt, Artificial Sequence
  Synthetic
cuuucuagaaaacaacuauguc

SEQ ID NO: 554578 - RNA, 23 nt, Artificial Sequence
  Synthetic
ucuuucuagaaaacaacuauguc

SEQ ID NO: 554579 - RNA, 24 nt, Artificial Sequence
  Synthetic
uucuuucuagaaaacaacuauguc

SEQ ID NO: 554580 - RNA, 18 nt, Artificial Sequence
  Synthetic
ugugauagacucuauguc

SEQ ID NO: 554581 - RNA, 19 nt, Artificial Sequence
  Synthetic
cugugauagacucuauguc

SEQ ID NO: 554582 - RNA, 20 nt, Artificial Sequence
  Synthetic
ucugugauagacucuauguc

SEQ ID NO: 554583 - RNA, 21 nt, Artificial Sequence
  Synthetic
cucugugauagacucuauguc

SEQ ID NO: 554584 - RNA, 22 nt, Artificial Sequence
  Synthetic
gcucugugauagacucuauguc

SEQ ID NO: 554585 - RNA, 23 nt, Artificial Sequence
  Synthetic
ugcucugugauagacucuauguc

SEQ ID NO: 554586 - RNA, 24 nt, Artificial Sequence
  Synthetic
cugcucugugauagacucuauguc

SEQ ID NO: 554587 - RNA, 18 nt, Artificial Sequence
  Synthetic
guuuguuucuuguauguc

SEQ ID NO: 554588 - RNA, 19 nt, Artificial Sequence
  Synthetic
gguuuguuucuuguauguc

SEQ ID NO: 554589 - RNA, 20 nt, Artificial Sequence
  Synthetic
ggguuuguuucuuguauguc

SEQ ID NO: 554590 - RNA, 21 nt, Artificial Sequence
  Synthetic
uggguuuguuucuuguauguc

SEQ ID NO: 554591 - RNA, 22 nt, Artificial Sequence
  Synthetic
uuggguuuguuucuuguauguc

SEQ ID NO: 554592 - RNA, 23 nt, Artificial Sequence
  Synthetic
auuggguuuguuucuuguauguc

SEQ ID NO: 554593 - RNA, 24 nt, Artificial Sequence
  Synthetic
uauuggguuuguuucuuguauguc

SEQ ID NO: 554594 - RNA, 18 nt, Artificial Sequence
  Synthetic
uuacuuuuuuauuauguc

SEQ ID NO: 554595 - RNA, 19 nt, Artificial Sequence
  Synthetic
uuuacuuuuuuauuauguc

SEQ ID NO: 554596 - RNA, 20 nt, Artificial Sequence
  Synthetic
guuuacuuuuuuauuauguc

SEQ ID NO: 554597 - RNA, 21 nt, Artificial Sequence
  Synthetic
aguuuacuuuuuuauuauguc

SEQ ID NO: 554598 - RNA, 22 nt, Artificial Sequence
  Synthetic
uaguuuacuuuuuuauuauguc

SEQ ID NO: 554599 - RNA, 23 nt, Artificial Sequence
  Synthetic
uuaguuuacuuuuuuauuauguc

SEQ ID NO: 554600 - RNA, 24 nt, Artificial Sequence
  Synthetic
auuaguuuacuuuuuuauuauguc

SEQ ID NO: 554601 - RNA, 18 nt, Artificial Sequence
  Synthetic
cuagcuuucuuuuauguc

SEQ ID NO: 554602 - RNA, 19 nt, Artificial Sequence
  Synthetic
ucuagcuuucuuuuauguc

SEQ ID NO: 554603 - RNA, 20 nt, Artificial Sequence
  Synthetic
uucuagcuuucuuuuauguc

SEQ ID NO: 554604 - RNA, 21 nt, Artificial Sequence
  Synthetic
cuucuagcuuucuuuuauguc

SEQ ID NO: 554605 - RNA, 22 nt, Artificial Sequence
  Synthetic
gcuucuagcuuucuuuuauguc

SEQ ID NO: 554606 - RNA, 23 nt, Artificial Sequence
  Synthetic
ugcuucuagcuuucuuuuauguc

SEQ ID NO: 554607 - RNA, 24 nt, Artificial Sequence
  Synthetic
uugcuucuagcuuucuuuuauguc

SEQ ID NO: 554608 - RNA, 18 nt, Artificial Sequence
  Synthetic
aacuugggagaaacuguc

SEQ ID NO: 554609 - RNA, 19 nt, Artificial Sequence
  Synthetic
uaacuugggagaaacuguc

SEQ ID NO: 554610 - RNA, 20 nt, Artificial Sequence
  Synthetic
auaacuugggagaaacuguc

SEQ ID NO: 554611 - RNA, 21 nt, Artificial Sequence
  Synthetic
uauaacuugggagaaacuguc

SEQ ID NO: 554612 - RNA, 22 nt, Artificial Sequence
  Synthetic
uuauaacuugggagaaacuguc

SEQ ID NO: 554613 - RNA, 23 nt, Artificial Sequence
  Synthetic
uuuauaacuugggagaaacuguc

SEQ ID NO: 554614 - RNA, 24 nt, Artificial Sequence
  Synthetic
uuuuauaacuugggagaaacuguc

SEQ ID NO: 554615 - RNA, 18 nt, Artificial Sequence
  Synthetic
aagagaagcaacacuguc

SEQ ID NO: 554616 - RNA, 19 nt, Artificial Sequence
  Synthetic
uaagagaagcaacacuguc

SEQ ID NO: 554617 - RNA, 20 nt, Artificial Sequence
  Synthetic
uuaagagaagcaacacuguc

SEQ ID NO: 554618 - RNA, 21 nt, Artificial Sequence
  Synthetic
uuuaagagaagcaacacuguc

SEQ ID NO: 554619 - RNA, 22 nt, Artificial Sequence
  Synthetic
auuuaagagaagcaacacuguc

SEQ ID NO: 554620 - RNA, 23 nt, Artificial Sequence
  Synthetic
aauuuaagagaagcaacacuguc

SEQ ID NO: 554621 - RNA, 24 nt, Artificial Sequence
  Synthetic
gaauuuaagagaagcaacacuguc

SEQ ID NO: 554622 - RNA, 18 nt, Artificial Sequence
  Synthetic
caacuaaaccacacuguc

SEQ ID NO: 554623 - RNA, 19 nt, Artificial Sequence
  Synthetic
ucaacuaaaccacacuguc

SEQ ID NO: 554624 - RNA, 20 nt, Artificial Sequence
  Synthetic
uucaacuaaaccacacuguc

SEQ ID NO: 554625 - RNA, 21 nt, Artificial Sequence
  Synthetic
uuucaacuaaaccacacuguc

SEQ ID NO: 554626 - RNA, 22 nt, Artificial Sequence
  Synthetic
guuucaacuaaaccacacuguc

SEQ ID NO: 554627 - RNA, 23 nt, Artificial Sequence
  Synthetic
aguuucaacuaaaccacacuguc

SEQ ID NO: 554628 - RNA, 24 nt, Artificial Sequence
  Synthetic
caguuucaacuaaaccacacuguc

SEQ ID NO: 554629 - RNA, 18 nt, Artificial Sequence
  Synthetic
aagaacuaggacacuguc

SEQ ID NO: 554630 - RNA, 19 nt, Artificial Sequence
  Synthetic
uaagaacuaggacacuguc

SEQ ID NO: 554631 - RNA, 20 nt, Artificial Sequence
  Synthetic
auaagaacuaggacacuguc

SEQ ID NO: 554632 - RNA, 21 nt, Artificial Sequence
  Synthetic
gauaagaacuaggacacuguc

SEQ ID NO: 554633 - RNA, 22 nt, Artificial Sequence
  Synthetic
agauaagaacuaggacacuguc

SEQ ID NO: 554634 - RNA, 23 nt, Artificial Sequence
  Synthetic
aagauaagaacuaggacacuguc

SEQ ID NO: 554635 - RNA, 24 nt, Artificial Sequence
  Synthetic
aaagauaagaacuaggacacuguc

SEQ ID NO: 554636 - RNA, 18 nt, Artificial Sequence
  Synthetic
uuggucugcagcacuguc

SEQ ID NO: 554637 - RNA, 19 nt, Artificial Sequence
  Synthetic
uuuggucugcagcacuguc

SEQ ID NO: 554638 - RNA, 20 nt, Artificial Sequence
  Synthetic
uuuuggucugcagcacuguc

SEQ ID NO: 554639 - RNA, 21 nt, Artificial Sequence
  Synthetic
cuuuuggucugcagcacuguc

SEQ ID NO: 554640 - RNA, 22 nt, Artificial Sequence
  Synthetic
acuuuuggucugcagcacuguc

SEQ ID NO: 554641 - RNA, 23 nt, Artificial Sequence
  Synthetic
aacuuuuggucugcagcacuguc

SEQ ID NO: 554642 - RNA, 24 nt, Artificial Sequence
  Synthetic
aaacuuuuggucugcagcacuguc

SEQ ID NO: 554643 - RNA, 18 nt, Artificial Sequence
  Synthetic
cuaauaacugguacuguc

SEQ ID NO: 554644 - RNA, 19 nt, Artificial Sequence
  Synthetic
ucuaauaacugguacuguc

SEQ ID NO: 554645 - RNA, 20 nt, Artificial Sequence
  Synthetic
uucuaauaacugguacuguc

SEQ ID NO: 554646 - RNA, 21 nt, Artificial Sequence
  Synthetic
uuucuaauaacugguacuguc

SEQ ID NO: 554647 - RNA, 22 nt, Artificial Sequence
  Synthetic
auuucuaauaacugguacuguc

SEQ ID NO: 554648 - RNA, 23 nt, Artificial Sequence
  Synthetic
uauuucuaauaacugguacuguc

SEQ ID NO: 554649 - RNA, 24 nt, Artificial Sequence
  Synthetic
uuauuucuaauaacugguacuguc

SEQ ID NO: 554650 - RNA, 18 nt, Artificial Sequence
  Synthetic
auuuauauaguuacuguc

SEQ ID NO: 554651 - RNA, 19 nt, Artificial Sequence
  Synthetic
aauuuauauaguuacuguc

SEQ ID NO: 554652 - RNA, 20 nt, Artificial Sequence
  Synthetic
uaauuuauauaguuacuguc

SEQ ID NO: 554653 - RNA, 21 nt, Artificial Sequence
  Synthetic
uuaauuuauauaguuacuguc

SEQ ID NO: 554654 - RNA, 22 nt, Artificial Sequence
  Synthetic
uuuaauuuauauaguuacuguc

SEQ ID NO: 554655 - RNA, 23 nt, Artificial Sequence
  Synthetic
uuuuaauuuauauaguuacuguc

SEQ ID NO: 554656 - RNA, 24 nt, Artificial Sequence
  Synthetic
auuuuaauuuauauaguuacuguc

SEQ ID NO: 554657 - RNA, 18 nt, Artificial Sequence
  Synthetic
aagcuauguugcccuguc

SEQ ID NO: 554658 - RNA, 19 nt, Artificial Sequence
  Synthetic
aaagcuauguugcccuguc

SEQ ID NO: 554659 - RNA, 20 nt, Artificial Sequence
  Synthetic
aaaagcuauguugcccuguc

SEQ ID NO: 554660 - RNA, 21 nt, Artificial Sequence
  Synthetic
aaaaagcuauguugcccuguc

SEQ ID NO: 554661 - RNA, 22 nt, Artificial Sequence
  Synthetic
caaaaagcuauguugcccuguc

SEQ ID NO: 554662 - RNA, 23 nt, Artificial Sequence
  Synthetic
gcaaaaagcuauguugcccuguc

SEQ ID NO: 554663 - RNA, 24 nt, Artificial Sequence
  Synthetic
ugcaaaaagcuauguugcccuguc

SEQ ID NO: 554664 - RNA, 21 nt, Artificial Sequence
  Synthetic
caucacacacuggggccuguc

SEQ ID NO: 554665 - RNA, 22 nt, Artificial Sequence
  Synthetic
acaucacacacuggggccuguc

SEQ ID NO: 554666 - RNA, 23 nt, Artificial Sequence
  Synthetic
aacaucacacacuggggccuguc

SEQ ID NO: 554667 - RNA, 24 nt, Artificial Sequence
  Synthetic
caacaucacacacuggggccuguc

SEQ ID NO: 554668 - RNA, 24 nt, Artificial Sequence
  Synthetic
gaacaucacacacuggggccuguc

SEQ ID NO: 554669 - RNA, 18 nt, Artificial Sequence
  Synthetic
uugauuaaauguccuguc

SEQ ID NO: 554670 - RNA, 19 nt, Artificial Sequence
  Synthetic
uuugauuaaauguccuguc

SEQ ID NO: 554671 - RNA, 20 nt, Artificial Sequence
  Synthetic
cuuugauuaaauguccuguc

SEQ ID NO: 554672 - RNA, 21 nt, Artificial Sequence
  Synthetic
ucuuugauuaaauguccuguc

SEQ ID NO: 554673 - RNA, 22 nt, Artificial Sequence
  Synthetic
cucuuugauuaaauguccuguc

SEQ ID NO: 554674 - RNA, 23 nt, Artificial Sequence
  Synthetic
ccucuuugauuaaauguccuguc

SEQ ID NO: 554675 - RNA, 24 nt, Artificial Sequence
  Synthetic
uccucuuugauuaaauguccuguc

SEQ ID NO: 554676 - RNA, 18 nt, Artificial Sequence
  Synthetic
uugcuugucugcucuguc

SEQ ID NO: 554677 - RNA, 19 nt, Artificial Sequence
  Synthetic
uuugcuugucugcucuguc

SEQ ID NO: 554678 - RNA, 20 nt, Artificial Sequence
  Synthetic
uuuugcuugucugcucuguc

SEQ ID NO: 554679 - RNA, 21 nt, Artificial Sequence
  Synthetic
cuuuugcuugucugcucuguc

SEQ ID NO: 554680 - RNA, 22 nt, Artificial Sequence
  Synthetic
ccuuuugcuugucugcucuguc

SEQ ID NO: 554681 - RNA, 23 nt, Artificial Sequence
  Synthetic
uccuuuugcuugucugcucuguc

SEQ ID NO: 554682 - RNA, 24 nt, Artificial Sequence
  Synthetic
cuccuuuugcuugucugcucuguc

SEQ ID NO: 554683 - RNA, 18 nt, Artificial Sequence
  Synthetic
uucagugucaagucuguc

SEQ ID NO: 554684 - RNA, 19 nt, Artificial Sequence
  Synthetic
guucagugucaagucuguc

SEQ ID NO: 554685 - RNA, 20 nt, Artificial Sequence
  Synthetic
gguucagugucaagucuguc

SEQ ID NO: 554686 - RNA, 21 nt, Artificial Sequence
  Synthetic
ugguucagugucaagucuguc

SEQ ID NO: 554687 - RNA, 22 nt, Artificial Sequence
  Synthetic
gugguucagugucaagucuguc

SEQ ID NO: 554688 - RNA, 23 nt, Artificial Sequence
  Synthetic
ugugguucagugucaagucuguc

SEQ ID NO: 554689 - RNA, 24 nt, Artificial Sequence
  Synthetic
uugugguucagugucaagucuguc

SEQ ID NO: 554690 - RNA, 18 nt, Artificial Sequence
  Synthetic
cauuccugggagucuguc

SEQ ID NO: 554691 - RNA, 19 nt, Artificial Sequence
  Synthetic
acauuccugggagucuguc

SEQ ID NO: 554692 - RNA, 20 nt, Artificial Sequence
  Synthetic
cacauuccugggagucuguc

SEQ ID NO: 554693 - RNA, 21 nt, Artificial Sequence
  Synthetic
gcacauuccugggagucuguc

SEQ ID NO: 554694 - RNA, 22 nt, Artificial Sequence
  Synthetic
agcacauuccugggagucuguc

SEQ ID NO: 554695 - RNA, 23 nt, Artificial Sequence
  Synthetic
cagcacauuccugggagucuguc

SEQ ID NO: 554696 - RNA, 24 nt, Artificial Sequence
  Synthetic
ccagcacauuccugggagucuguc

SEQ ID NO: 554697 - RNA, 18 nt, Artificial Sequence
  Synthetic
aaauuguucuauucuguc

SEQ ID NO: 554698 - RNA, 19 nt, Artificial Sequence
  Synthetic
aaaauuguucuauucuguc

SEQ ID NO: 554699 - RNA, 20 nt, Artificial Sequence
  Synthetic
uaaaauuguucuauucuguc

SEQ ID NO: 554700 - RNA, 21 nt, Artificial Sequence
  Synthetic
auaaaauuguucuauucuguc

SEQ ID NO: 554701 - RNA, 22 nt, Artificial Sequence
  Synthetic
uauaaaauuguucuauucuguc

SEQ ID NO: 554702 - RNA, 23 nt, Artificial Sequence
  Synthetic
auauaaaauuguucuauucuguc

SEQ ID NO: 554703 - RNA, 24 nt, Artificial Sequence
  Synthetic
aauauaaaauuguucuauucuguc

SEQ ID NO: 554704 - RNA, 18 nt, Artificial Sequence
  Synthetic
auuucaauauuuucuguc

SEQ ID NO: 554705 - RNA, 19 nt, Artificial Sequence
  Synthetic
aauuucaauauuuucuguc

SEQ ID NO: 554706 - RNA, 20 nt, Artificial Sequence
  Synthetic
uaauuucaauauuuucuguc

SEQ ID NO: 554707 - RNA, 21 nt, Artificial Sequence
  Synthetic
uuaauuucaauauuuucuguc

SEQ ID NO: 554708 - RNA, 22 nt, Artificial Sequence
  Synthetic
uuuaauuucaauauuuucuguc

SEQ ID NO: 554709 - RNA, 23 nt, Artificial Sequence
  Synthetic
uuuuaauuucaauauuuucuguc

SEQ ID NO: 554710 - RNA, 24 nt, Artificial Sequence
  Synthetic
guuuuaauuucaauauuuucuguc

SEQ ID NO: 554711 - RNA, 18 nt, Artificial Sequence
  Synthetic
acugucugugaaaguguc

SEQ ID NO: 554712 - RNA, 19 nt, Artificial Sequence
  Synthetic
uacugucugugaaaguguc

SEQ ID NO: 554713 - RNA, 20 nt, Artificial Sequence
  Synthetic
auacugucugugaaaguguc

SEQ ID NO: 554714 - RNA, 21 nt, Artificial Sequence
  Synthetic
aauacugucugugaaaguguc

SEQ ID NO: 554715 - RNA, 22 nt, Artificial Sequence
  Synthetic
gaauacugucugugaaaguguc

SEQ ID NO: 554716 - RNA, 23 nt, Artificial Sequence
  Synthetic
ggaauacugucugugaaaguguc

SEQ ID NO: 554717 - RNA, 24 nt, Artificial Sequence
  Synthetic
gggaauacugucugugaaaguguc

SEQ ID NO: 554718 - RNA, 18 nt, Artificial Sequence
  Synthetic
gaggauuuugaaaguguc

SEQ ID NO: 554719 - RNA, 19 nt, Artificial Sequence
  Synthetic
ggaggauuuugaaaguguc

SEQ ID NO: 554720 - RNA, 20 nt, Artificial Sequence
  Synthetic
uggaggauuuugaaaguguc

SEQ ID NO: 554721 - RNA, 21 nt, Artificial Sequence
  Synthetic
uuggaggauuuugaaaguguc

SEQ ID NO: 554722 - RNA, 22 nt, Artificial Sequence
  Synthetic
uuuggaggauuuugaaaguguc

SEQ ID NO: 554723 - RNA, 23 nt, Artificial Sequence
  Synthetic
uuuuggaggauuuugaaaguguc

SEQ ID NO: 554724 - RNA, 24 nt, Artificial Sequence
  Synthetic
guuuuggaggauuuugaaaguguc

SEQ ID NO: 554725 - RNA, 18 nt, Artificial Sequence
  Synthetic
gacagaguuccaaguguc

SEQ ID NO: 554726 - RNA, 19 nt, Artificial Sequence
  Synthetic
agacagaguuccaaguguc

SEQ ID NO: 554727 - RNA, 20 nt, Artificial Sequence
  Synthetic
uagacagaguuccaaguguc

SEQ ID NO: 554728 - RNA, 21 nt, Artificial Sequence
  Synthetic
auagacagaguuccaaguguc

SEQ ID NO: 554729 - RNA, 22 nt, Artificial Sequence
  Synthetic
gauagacagaguuccaaguguc

SEQ ID NO: 554730 - RNA, 23 nt, Artificial Sequence
  Synthetic
ggauagacagaguuccaaguguc

SEQ ID NO: 554731 - RNA, 24 nt, Artificial Sequence
  Synthetic
gggauagacagaguuccaaguguc

SEQ ID NO: 554732 - RNA, 18 nt, Artificial Sequence
  Synthetic
uaauuucaaucaaguguc

SEQ ID NO: 554733 - RNA, 19 nt, Artificial Sequence
  Synthetic
cuaauuucaaucaaguguc

SEQ ID NO: 554734 - RNA, 20 nt, Artificial Sequence
  Synthetic
ccuaauuucaaucaaguguc

SEQ ID NO: 554735 - RNA, 21 nt, Artificial Sequence
  Synthetic
cccuaauuucaaucaaguguc

SEQ ID NO: 554736 - RNA, 22 nt, Artificial Sequence
  Synthetic
acccuaauuucaaucaaguguc

SEQ ID NO: 554737 - RNA, 23 nt, Artificial Sequence
  Synthetic
uacccuaauuucaaucaaguguc

SEQ ID NO: 554738 - RNA, 24 nt, Artificial Sequence
  Synthetic
auacccuaauuucaaucaaguguc

SEQ ID NO: 554739 - RNA, 18 nt, Artificial Sequence
  Synthetic
augguagacauaaguguc

SEQ ID NO: 554740 - RNA, 19 nt, Artificial Sequence
  Synthetic
aaugguagacauaaguguc

SEQ ID NO: 554741 - RNA, 20 nt, Artificial Sequence
  Synthetic
gaaugguagacauaaguguc

SEQ ID NO: 554742 - RNA, 21 nt, Artificial Sequence
  Synthetic
agaaugguagacauaaguguc

SEQ ID NO: 554743 - RNA, 22 nt, Artificial Sequence
  Synthetic
cagaaugguagacauaaguguc

SEQ ID NO: 554744 - RNA, 23 nt, Artificial Sequence
  Synthetic
ucagaaugguagacauaaguguc

SEQ ID NO: 554745 - RNA, 24 nt, Artificial Sequence
  Synthetic
aucagaaugguagacauaaguguc

SEQ ID NO: 554746 - RNA, 18 nt, Artificial Sequence
  Synthetic
uccacugcuauaaguguc

SEQ ID NO: 554747 - RNA, 19 nt, Artificial Sequence
  Synthetic
guccacugcuauaaguguc

SEQ ID NO: 554748 - RNA, 20 nt, Artificial Sequence
  Synthetic
gguccacugcuauaaguguc

SEQ ID NO: 554749 - RNA, 21 nt, Artificial Sequence
  Synthetic
cgguccacugcuauaaguguc

SEQ ID NO: 554750 - RNA, 22 nt, Artificial Sequence
  Synthetic
acgguccacugcuauaaguguc

SEQ ID NO: 554751 - RNA, 23 nt, Artificial Sequence
  Synthetic
uacgguccacugcuauaaguguc

SEQ ID NO: 554752 - RNA, 24 nt, Artificial Sequence
  Synthetic
cuacgguccacugcuauaaguguc

SEQ ID NO: 554753 - RNA, 18 nt, Artificial Sequence
  Synthetic
ugaugaagacagaguguc

SEQ ID NO: 554754 - RNA, 19 nt, Artificial Sequence
  Synthetic
uugaugaagacagaguguc

SEQ ID NO: 554755 - RNA, 20 nt, Artificial Sequence
  Synthetic
guugaugaagacagaguguc

SEQ ID NO: 554756 - RNA, 21 nt, Artificial Sequence
  Synthetic
uguugaugaagacagaguguc

SEQ ID NO: 554757 - RNA, 22 nt, Artificial Sequence
  Synthetic
auguugaugaagacagaguguc

SEQ ID NO: 554758 - RNA, 23 nt, Artificial Sequence
  Synthetic
aauguugaugaagacagaguguc

SEQ ID NO: 554759 - RNA, 24 nt, Artificial Sequence
  Synthetic
gaauguugaugaagacagaguguc

SEQ ID NO: 554760 - RNA, 18 nt, Artificial Sequence
  Synthetic
guacuaugauagaguguc

SEQ ID NO: 554761 - RNA, 19 nt, Artificial Sequence
  Synthetic
gguacuaugauagaguguc

SEQ ID NO: 554762 - RNA, 20 nt, Artificial Sequence
  Synthetic
ggguacuaugauagaguguc

SEQ ID NO: 554763 - RNA, 21 nt, Artificial Sequence
  Synthetic
gggguacuaugauagaguguc

SEQ ID NO: 554764 - RNA, 22 nt, Artificial Sequence
  Synthetic
ggggguacuaugauagaguguc

SEQ ID NO: 554765 - RNA, 23 nt, Artificial Sequence
  Synthetic
gggggguacuaugauagaguguc

SEQ ID NO: 554766 - RNA, 24 nt, Artificial Sequence
  Synthetic
ggggggguacuaugauagaguguc

SEQ ID NO: 554767 - RNA, 18 nt, Artificial Sequence
  Synthetic
uugcuuuauuguaguguc

SEQ ID NO: 554768 - RNA, 19 nt, Artificial Sequence
  Synthetic
cuugcuuuauuguaguguc

SEQ ID NO: 554769 - RNA, 20 nt, Artificial Sequence
  Synthetic
ccuugcuuuauuguaguguc

SEQ ID NO: 554770 - RNA, 21 nt, Artificial Sequence
  Synthetic
uccuugcuuuauuguaguguc

SEQ ID NO: 554771 - RNA, 22 nt, Artificial Sequence
  Synthetic
uuccuugcuuuauuguaguguc

SEQ ID NO: 554772 - RNA, 23 nt, Artificial Sequence
  Synthetic
uuuccuugcuuuauuguaguguc

SEQ ID NO: 554773 - RNA, 24 nt, Artificial Sequence
  Synthetic
uuuuccuugcuuuauuguaguguc

SEQ ID NO: 554774 - RNA, 18 nt, Artificial Sequence
  Synthetic
ccauaauccccacguguc

SEQ ID NO: 554775 - RNA, 19 nt, Artificial Sequence
  Synthetic
uccauaauccccacguguc

SEQ ID NO: 554776 - RNA, 20 nt, Artificial Sequence
  Synthetic
cuccauaauccccacguguc

SEQ ID NO: 554777 - RNA, 21 nt, Artificial Sequence
  Synthetic
ccuccauaauccccacguguc

SEQ ID NO: 554778 - RNA, 22 nt, Artificial Sequence
  Synthetic
accuccauaauccccacguguc

SEQ ID NO: 554779 - RNA, 23 nt, Artificial Sequence
  Synthetic
aaccuccauaauccccacguguc

SEQ ID NO: 554780 - RNA, 24 nt, Artificial Sequence
  Synthetic
uaaccuccauaauccccacguguc

SEQ ID NO: 554781 - RNA, 18 nt, Artificial Sequence
  Synthetic
agguccauccuacguguc

SEQ ID NO: 554782 - RNA, 19 nt, Artificial Sequence
  Synthetic
aagguccauccuacguguc

SEQ ID NO: 554783 - RNA, 20 nt, Artificial Sequence
  Synthetic
caagguccauccuacguguc

SEQ ID NO: 554784 - RNA, 21 nt, Artificial Sequence
  Synthetic
gcaagguccauccuacguguc

SEQ ID NO: 554785 - RNA, 22 nt, Artificial Sequence
  Synthetic
ugcaagguccauccuacguguc

SEQ ID NO: 554786 - RNA, 23 nt, Artificial Sequence
  Synthetic
augcaagguccauccuacguguc

SEQ ID NO: 554787 - RNA, 24 nt, Artificial Sequence
  Synthetic
uaugcaagguccauccuacguguc

SEQ ID NO: 554788 - RNA, 18 nt, Artificial Sequence
  Synthetic
uauuuaauaaaugguguc

SEQ ID NO: 554789 - RNA, 19 nt, Artificial Sequence
  Synthetic
cuauuuaauaaaugguguc

SEQ ID NO: 554790 - RNA, 20 nt, Artificial Sequence
  Synthetic
ccuauuuaauaaaugguguc

SEQ ID NO: 554791 - RNA, 21 nt, Artificial Sequence
  Synthetic
cccuauuuaauaaaugguguc

SEQ ID NO: 554792 - RNA, 22 nt, Artificial Sequence
  Synthetic
ucccuauuuaauaaaugguguc

SEQ ID NO: 554793 - RNA, 23 nt, Artificial Sequence
  Synthetic
uucccuauuuaauaaaugguguc

SEQ ID NO: 554794 - RNA, 24 nt, Artificial Sequence
  Synthetic
auucccuauuuaauaaaugguguc

SEQ ID NO: 554795 - RNA, 18 nt, Artificial Sequence
  Synthetic
cuaaauuccucugguguc

SEQ ID NO: 554796 - RNA, 19 nt, Artificial Sequence
  Synthetic
ucuaaauuccucugguguc

SEQ ID NO: 554797 - RNA, 20 nt, Artificial Sequence
  Synthetic
uucuaaauuccucugguguc

SEQ ID NO: 554798 - RNA, 21 nt, Artificial Sequence
  Synthetic
cuucuaaauuccucugguguc

SEQ ID NO: 554799 - RNA, 22 nt, Artificial Sequence
  Synthetic
ucuucuaaauuccucugguguc

SEQ ID NO: 554800 - RNA, 23 nt, Artificial Sequence
  Synthetic
uucuucuaaauuccucugguguc

SEQ ID NO: 554801 - RNA, 24 nt, Artificial Sequence
  Synthetic
uuucuucuaaauuccucugguguc

SEQ ID NO: 554802 - RNA, 18 nt, Artificial Sequence
  Synthetic
agaggggaguuugguguc

SEQ ID NO: 554803 - RNA, 19 nt, Artificial Sequence
  Synthetic
cagaggggaguuugguguc

SEQ ID NO: 554804 - RNA, 20 nt, Artificial Sequence
  Synthetic
ucagaggggaguuugguguc

SEQ ID NO: 554805 - RNA, 21 nt, Artificial Sequence
  Synthetic
gucagaggggaguuugguguc

SEQ ID NO: 554806 - RNA, 22 nt, Artificial Sequence
  Synthetic
agucagaggggaguuugguguc

SEQ ID NO: 554807 - RNA, 23 nt, Artificial Sequence
  Synthetic
aagucagaggggaguuugguguc

SEQ ID NO: 554808 - RNA, 24 nt, Artificial Sequence
  Synthetic
gaagucagaggggaguuugguguc

SEQ ID NO: 554809 - RNA, 18 nt, Artificial Sequence
  Synthetic
gggggaaaugaauguguc

SEQ ID NO: 554810 - RNA, 19 nt, Artificial Sequence
  Synthetic
agggggaaaugaauguguc

SEQ ID NO: 554811 - RNA, 20 nt, Artificial Sequence
  Synthetic
uagggggaaaugaauguguc

SEQ ID NO: 554812 - RNA, 21 nt, Artificial Sequence
  Synthetic
auagggggaaaugaauguguc

SEQ ID NO: 554813 - RNA, 22 nt, Artificial Sequence
  Synthetic
cauagggggaaaugaauguguc

SEQ ID NO: 554814 - RNA, 23 nt, Artificial Sequence
  Synthetic
ccauagggggaaaugaauguguc

SEQ ID NO: 554815 - RNA, 24 nt, Artificial Sequence
  Synthetic
uccauagggggaaaugaauguguc

SEQ ID NO: 554816 - RNA, 18 nt, Artificial Sequence
  Synthetic
ccauaauccccauguguc

SEQ ID NO: 554817 - RNA, 19 nt, Artificial Sequence
  Synthetic
cccauaauccccauguguc

SEQ ID NO: 554818 - RNA, 20 nt, Artificial Sequence
  Synthetic
ucccauaauccccauguguc

SEQ ID NO: 554819 - RNA, 21 nt, Artificial Sequence
  Synthetic
cucccauaauccccauguguc

SEQ ID NO: 554820 - RNA, 22 nt, Artificial Sequence
  Synthetic
gcucccauaauccccauguguc

SEQ ID NO: 554821 - RNA, 23 nt, Artificial Sequence
  Synthetic
agcucccauaauccccauguguc

SEQ ID NO: 554822 - RNA, 24 nt, Artificial Sequence
  Synthetic
uagcucccauaauccccauguguc

SEQ ID NO: 554823 - RNA, 21 nt, Artificial Sequence
  Synthetic
ucuugggagaguguauguguc

SEQ ID NO: 554824 - RNA, 22 nt, Artificial Sequence
  Synthetic
gucuugggagaguguauguguc

SEQ ID NO: 554825 - RNA, 23 nt, Artificial Sequence
  Synthetic
agucuugggagaguguauguguc

SEQ ID NO: 554826 - RNA, 24 nt, Artificial Sequence
  Synthetic
uagucuugggagaguguauguguc

SEQ ID NO: 554827 - RNA, 24 nt, Artificial Sequence
  Synthetic
uagucuugggaggguguauguguc

SEQ ID NO: 554828 - RNA, 18 nt, Artificial Sequence
  Synthetic
agacaccuuuuauguguc

SEQ ID NO: 554829 - RNA, 19 nt, Artificial Sequence
  Synthetic
aagacaccuuuuauguguc

SEQ ID NO: 554830 - RNA, 20 nt, Artificial Sequence
  Synthetic
aaagacaccuuuuauguguc

SEQ ID NO: 554831 - RNA, 21 nt, Artificial Sequence
  Synthetic
gaaagacaccuuuuauguguc

SEQ ID NO: 554832 - RNA, 22 nt, Artificial Sequence
  Synthetic
agaaagacaccuuuuauguguc

SEQ ID NO: 554833 - RNA, 23 nt, Artificial Sequence
  Synthetic
cagaaagacaccuuuuauguguc

SEQ ID NO: 554834 - RNA, 24 nt, Artificial Sequence
  Synthetic
acagaaagacaccuuuuauguguc

SEQ ID NO: 554835 - RNA, 18 nt, Artificial Sequence
  Synthetic
cucagccuccaguguguc

SEQ ID NO: 554836 - RNA, 19 nt, Artificial Sequence
  Synthetic
ccucagccuccaguguguc

SEQ ID NO: 554837 - RNA, 20 nt, Artificial Sequence
  Synthetic
gccucagccuccaguguguc

SEQ ID NO: 554838 - RNA, 21 nt, Artificial Sequence
  Synthetic
ugccucagccuccaguguguc

SEQ ID NO: 554839 - RNA, 22 nt, Artificial Sequence
  Synthetic
cugccucagccuccaguguguc

SEQ ID NO: 554840 - RNA, 23 nt, Artificial Sequence
  Synthetic
ccugccucagccuccaguguguc

SEQ ID NO: 554841 - RNA, 24 nt, Artificial Sequence
  Synthetic
uccugccucagccuccaguguguc

SEQ ID NO: 554842 - RNA, 18 nt, Artificial Sequence
  Synthetic
ccaaauauucauuguguc

SEQ ID NO: 554843 - RNA, 19 nt, Artificial Sequence
  Synthetic
gccaaauauucauuguguc

SEQ ID NO: 554844 - RNA, 20 nt, Artificial Sequence
  Synthetic
ugccaaauauucauuguguc

SEQ ID NO: 554845 - RNA, 21 nt, Artificial Sequence
  Synthetic
cugccaaauauucauuguguc

SEQ ID NO: 554846 - RNA, 22 nt, Artificial Sequence
  Synthetic
acugccaaauauucauuguguc

SEQ ID NO: 554847 - RNA, 23 nt, Artificial Sequence
  Synthetic
aacugccaaauauucauuguguc

SEQ ID NO: 554848 - RNA, 24 nt, Artificial Sequence
  Synthetic
uaacugccaaauauucauuguguc

SEQ ID NO: 554849 - RNA, 18 nt, Artificial Sequence
  Synthetic
acagagugagauuguguc

SEQ ID NO: 554850 - RNA, 19 nt, Artificial Sequence
  Synthetic
aacagagugagauuguguc

SEQ ID NO: 554851 - RNA, 20 nt, Artificial Sequence
  Synthetic
caacagagugagauuguguc

SEQ ID NO: 554852 - RNA, 21 nt, Artificial Sequence
  Synthetic
gcaacagagugagauuguguc

SEQ ID NO: 554853 - RNA, 22 nt, Artificial Sequence
  Synthetic
ggcaacagagugagauuguguc

SEQ ID NO: 554854 - RNA, 23 nt, Artificial Sequence
  Synthetic
gggcaacagagugagauuguguc

SEQ ID NO: 554855 - RNA, 24 nt, Artificial Sequence
  Synthetic
ugggcaacagagugagauuguguc

SEQ ID NO: 554856 - RNA, 24 nt, Artificial Sequence
  Synthetic
uuguuacauagguaaacuuguguc

SEQ ID NO: 554857 - RNA, 18 nt, Artificial Sequence
  Synthetic
aauaaaaaaauuuguguc

SEQ ID NO: 554858 - RNA, 19 nt, Artificial Sequence
  Synthetic
gaauaaaaaaauuuguguc

SEQ ID NO: 554859 - RNA, 20 nt, Artificial Sequence
  Synthetic
agaauaaaaaaauuuguguc

SEQ ID NO: 554860 - RNA, 21 nt, Artificial Sequence
  Synthetic
gagaauaaaaaaauuuguguc

SEQ ID NO: 554861 - RNA, 22 nt, Artificial Sequence
  Synthetic
agagaauaaaaaaauuuguguc

SEQ ID NO: 554862 - RNA, 23 nt, Artificial Sequence
  Synthetic
gagagaauaaaaaaauuuguguc

SEQ ID NO: 554863 - RNA, 24 nt, Artificial Sequence
  Synthetic
agagagaauaaaaaaauuuguguc

SEQ ID NO: 554864 - RNA, 18 nt, Artificial Sequence
  Synthetic
guccccaaguaaauuguc

SEQ ID NO: 554865 - RNA, 19 nt, Artificial Sequence
  Synthetic
uguccccaaguaaauuguc

SEQ ID NO: 554866 - RNA, 20 nt, Artificial Sequence
  Synthetic
guguccccaaguaaauuguc

SEQ ID NO: 554867 - RNA, 21 nt, Artificial Sequence
  Synthetic
uguguccccaaguaaauuguc

SEQ ID NO: 554868 - RNA, 22 nt, Artificial Sequence
  Synthetic
uuguguccccaaguaaauuguc

SEQ ID NO: 554869 - RNA, 23 nt, Artificial Sequence
  Synthetic
uuuguguccccaaguaaauuguc

SEQ ID NO: 554870 - RNA, 24 nt, Artificial Sequence
  Synthetic
auuuguguccccaaguaaauuguc

SEQ ID NO: 554871 - RNA, 18 nt, Artificial Sequence
  Synthetic
acuggaagaagaauuguc

SEQ ID NO: 554872 - RNA, 19 nt, Artificial Sequence
  Synthetic
cacuggaagaagaauuguc

SEQ ID NO: 554873 - RNA, 20 nt, Artificial Sequence
  Synthetic
acacuggaagaagaauuguc

SEQ ID NO: 554874 - RNA, 21 nt, Artificial Sequence
  Synthetic
cacacuggaagaagaauuguc

SEQ ID NO: 554875 - RNA, 22 nt, Artificial Sequence
  Synthetic
ccacacuggaagaagaauuguc

SEQ ID NO: 554876 - RNA, 23 nt, Artificial Sequence
  Synthetic
gccacacuggaagaagaauuguc

SEQ ID NO: 554877 - RNA, 24 nt, Artificial Sequence
  Synthetic
ggccacacuggaagaagaauuguc

SEQ ID NO: 554878 - RNA, 18 nt, Artificial Sequence
  Synthetic
uaugauuguauaauuguc

SEQ ID NO: 554879 - RNA, 19 nt, Artificial Sequence
  Synthetic
uuaugauuguauaauuguc

SEQ ID NO: 554880 - RNA, 20 nt, Artificial Sequence
  Synthetic
auuaugauuguauaauuguc

SEQ ID NO: 554881 - RNA, 21 nt, Artificial Sequence
  Synthetic
cauuaugauuguauaauuguc

SEQ ID NO: 554882 - RNA, 22 nt, Artificial Sequence
  Synthetic
ucauuaugauuguauaauuguc

SEQ ID NO: 554883 - RNA, 23 nt, Artificial Sequence
  Synthetic
aucauuaugauuguauaauuguc

SEQ ID NO: 554884 - RNA, 24 nt, Artificial Sequence
  Synthetic
uaucauuaugauuguauaauuguc

SEQ ID NO: 554885 - RNA, 18 nt, Artificial Sequence
  Synthetic
cuguucgaucuaauuguc

SEQ ID NO: 554886 - RNA, 19 nt, Artificial Sequence
  Synthetic
acuguucgaucuaauuguc

SEQ ID NO: 554887 - RNA, 20 nt, Artificial Sequence
  Synthetic
uacuguucgaucuaauuguc

SEQ ID NO: 554888 - RNA, 21 nt, Artificial Sequence
  Synthetic
auacuguucgaucuaauuguc

SEQ ID NO: 554889 - RNA, 22 nt, Artificial Sequence
  Synthetic
aauacuguucgaucuaauuguc

SEQ ID NO: 554890 - RNA, 23 nt, Artificial Sequence
  Synthetic
uaauacuguucgaucuaauuguc

SEQ ID NO: 554891 - RNA, 24 nt, Artificial Sequence
  Synthetic
uuaauacuguucgaucuaauuguc

SEQ ID NO: 554892 - RNA, 18 nt, Artificial Sequence
  Synthetic
uguuuuauggacauuguc

SEQ ID NO: 554893 - RNA, 19 nt, Artificial Sequence
  Synthetic
cuguuuuauggacauuguc

SEQ ID NO: 554894 - RNA, 20 nt, Artificial Sequence
  Synthetic
gcuguuuuauggacauuguc

SEQ ID NO: 554895 - RNA, 21 nt, Artificial Sequence
  Synthetic
cgcuguuuuauggacauuguc

SEQ ID NO: 554896 - RNA, 22 nt, Artificial Sequence
  Synthetic
ucgcuguuuuauggacauuguc

SEQ ID NO: 554897 - RNA, 23 nt, Artificial Sequence
  Synthetic
cucgcuguuuuauggacauuguc

SEQ ID NO: 554898 - RNA, 24 nt, Artificial Sequence
  Synthetic
gcucgcuguuuuauggacauuguc

SEQ ID NO: 554899 - RNA, 18 nt, Artificial Sequence
  Synthetic
ggcauuuuucccauuguc

SEQ ID NO: 554900 - RNA, 19 nt, Artificial Sequence
  Synthetic
aggcauuuuucccauuguc

SEQ ID NO: 554901 - RNA, 20 nt, Artificial Sequence
  Synthetic
aaggcauuuuucccauuguc

SEQ ID NO: 554902 - RNA, 21 nt, Artificial Sequence
  Synthetic
gaaggcauuuuucccauuguc

SEQ ID NO: 554903 - RNA, 22 nt, Artificial Sequence
  Synthetic
ugaaggcauuuuucccauuguc

SEQ ID NO: 554904 - RNA, 23 nt, Artificial Sequence
  Synthetic
gugaaggcauuuuucccauuguc

SEQ ID NO: 554905 - RNA, 24 nt, Artificial Sequence
  Synthetic
agugaaggcauuuuucccauuguc

SEQ ID NO: 554906 - RNA, 18 nt, Artificial Sequence
  Synthetic
uugcaguuuggcauuguc

SEQ ID NO: 554907 - RNA, 19 nt, Artificial Sequence
  Synthetic
auugcaguuuggcauuguc

SEQ ID NO: 554908 - RNA, 20 nt, Artificial Sequence
  Synthetic
cauugcaguuuggcauuguc

SEQ ID NO: 554909 - RNA, 21 nt, Artificial Sequence
  Synthetic
ccauugcaguuuggcauuguc

SEQ ID NO: 554910 - RNA, 22 nt, Artificial Sequence
  Synthetic
cccauugcaguuuggcauuguc

SEQ ID NO: 554911 - RNA, 23 nt, Artificial Sequence
  Synthetic
gcccauugcaguuuggcauuguc

SEQ ID NO: 554912 - RNA, 24 nt, Artificial Sequence
  Synthetic
ugcccauugcaguuuggcauuguc

SEQ ID NO: 554913 - RNA, 18 nt, Artificial Sequence
  Synthetic
acacagccaaagauuguc

SEQ ID NO: 554914 - RNA, 19 nt, Artificial Sequence
  Synthetic
aacacagccaaagauuguc

SEQ ID NO: 554915 - RNA, 20 nt, Artificial Sequence
  Synthetic
aaacacagccaaagauuguc

SEQ ID NO: 554916 - RNA, 21 nt, Artificial Sequence
  Synthetic
caaacacagccaaagauuguc

SEQ ID NO: 554917 - RNA, 22 nt, Artificial Sequence
  Synthetic
gcaaacacagccaaagauuguc

SEQ ID NO: 554918 - RNA, 23 nt, Artificial Sequence
  Synthetic
ugcaaacacagccaaagauuguc

SEQ ID NO: 554919 - RNA, 24 nt, Artificial Sequence
  Synthetic
augcaaacacagccaaagauuguc

SEQ ID NO: 554920 - RNA, 18 nt, Artificial Sequence
  Synthetic
uuucaccuugggauuguc

SEQ ID NO: 554921 - RNA, 19 nt, Artificial Sequence
  Synthetic
uuuucaccuugggauuguc

SEQ ID NO: 554922 - RNA, 20 nt, Artificial Sequence
  Synthetic
cuuuucaccuugggauuguc

SEQ ID NO: 554923 - RNA, 21 nt, Artificial Sequence
  Synthetic
ccuuuucaccuugggauuguc

SEQ ID NO: 554924 - RNA, 22 nt, Artificial Sequence
  Synthetic
accuuuucaccuugggauuguc

SEQ ID NO: 554925 - RNA, 23 nt, Artificial Sequence
  Synthetic
aaccuuuucaccuugggauuguc

SEQ ID NO: 554926 - RNA, 24 nt, Artificial Sequence
  Synthetic
aaaccuuuucaccuugggauuguc

SEQ ID NO: 554927 - RNA, 18 nt, Artificial Sequence
  Synthetic
ccugauauuacuauuguc

SEQ ID NO: 554928 - RNA, 19 nt, Artificial Sequence
  Synthetic
cccugauauuacuauuguc

SEQ ID NO: 554929 - RNA, 20 nt, Artificial Sequence
  Synthetic
ucccugauauuacuauuguc

SEQ ID NO: 554930 - RNA, 21 nt, Artificial Sequence
  Synthetic
gucccugauauuacuauuguc

SEQ ID NO: 554931 - RNA, 22 nt, Artificial Sequence
  Synthetic
ugucccugauauuacuauuguc

SEQ ID NO: 554932 - RNA, 23 nt, Artificial Sequence
  Synthetic
gugucccugauauuacuauuguc

SEQ ID NO: 554933 - RNA, 24 nt, Artificial Sequence
  Synthetic
agugucccugauauuacuauuguc

SEQ ID NO: 554934 - RNA, 18 nt, Artificial Sequence
  Synthetic
cacauacuuccuauuguc

SEQ ID NO: 554935 - RNA, 19 nt, Artificial Sequence
  Synthetic
gcacauacuuccuauuguc

SEQ ID NO: 554936 - RNA, 20 nt, Artificial Sequence
  Synthetic
ugcacauacuuccuauuguc

SEQ ID NO: 554937 - RNA, 21 nt, Artificial Sequence
  Synthetic
augcacauacuuccuauuguc

SEQ ID NO: 554938 - RNA, 22 nt, Artificial Sequence
  Synthetic
gaugcacauacuuccuauuguc

SEQ ID NO: 554939 - RNA, 23 nt, Artificial Sequence
  Synthetic
ugaugcacauacuuccuauuguc

SEQ ID NO: 554940 - RNA, 24 nt, Artificial Sequence
  Synthetic
uugaugcacauacuuccuauuguc

SEQ ID NO: 554941 - RNA, 18 nt, Artificial Sequence
  Synthetic
uacguuauauaccuuguc

SEQ ID NO: 554942 - RNA, 19 nt, Artificial Sequence
  Synthetic
auacguuauauaccuuguc

SEQ ID NO: 554943 - RNA, 20 nt, Artificial Sequence
  Synthetic
uauacguuauauaccuuguc

SEQ ID NO: 554944 - RNA, 21 nt, Artificial Sequence
  Synthetic
auauacguuauauaccuuguc

SEQ ID NO: 554945 - RNA, 22 nt, Artificial Sequence
  Synthetic
uauauacguuauauaccuuguc

SEQ ID NO: 554946 - RNA, 23 nt, Artificial Sequence
  Synthetic
auauauacguuauauaccuuguc

SEQ ID NO: 554947 - RNA, 24 nt, Artificial Sequence
  Synthetic
gauauauacguuauauaccuuguc

SEQ ID NO: 554948 - RNA, 18 nt, Artificial Sequence
  Synthetic
gcacauaaugagcuuguc

SEQ ID NO: 554949 - RNA, 19 nt, Artificial Sequence
  Synthetic
agcacauaaugagcuuguc

SEQ ID NO: 554950 - RNA, 20 nt, Artificial Sequence
  Synthetic
gagcacauaaugagcuuguc

SEQ ID NO: 554951 - RNA, 21 nt, Artificial Sequence
  Synthetic
agagcacauaaugagcuuguc

SEQ ID NO: 554952 - RNA, 22 nt, Artificial Sequence
  Synthetic
cagagcacauaaugagcuuguc

SEQ ID NO: 554953 - RNA, 23 nt, Artificial Sequence
  Synthetic
ucagagcacauaaugagcuuguc

SEQ ID NO: 554954 - RNA, 24 nt, Artificial Sequence
  Synthetic
aucagagcacauaaugagcuuguc

SEQ ID NO: 554955 - RNA, 18 nt, Artificial Sequence
  Synthetic
aucaaauaguagcuuguc

SEQ ID NO: 554956 - RNA, 19 nt, Artificial Sequence
  Synthetic
caucaaauaguagcuuguc

SEQ ID NO: 554957 - RNA, 20 nt, Artificial Sequence
  Synthetic
gcaucaaauaguagcuuguc

SEQ ID NO: 554958 - RNA, 21 nt, Artificial Sequence
  Synthetic
agcaucaaauaguagcuuguc

SEQ ID NO: 554959 - RNA, 22 nt, Artificial Sequence
  Synthetic
gagcaucaaauaguagcuuguc

SEQ ID NO: 554960 - RNA, 23 nt, Artificial Sequence
  Synthetic
ggagcaucaaauaguagcuuguc

SEQ ID NO: 554961 - RNA, 24 nt, Artificial Sequence
  Synthetic
aggagcaucaaauaguagcuuguc

SEQ ID NO: 554962 - RNA, 18 nt, Artificial Sequence
  Synthetic
ccaugccuccggcuuguc

SEQ ID NO: 554963 - RNA, 19 nt, Artificial Sequence
  Synthetic
accaugccuccggcuuguc

SEQ ID NO: 554964 - RNA, 20 nt, Artificial Sequence
  Synthetic
gaccaugccuccggcuuguc

SEQ ID NO: 554965 - RNA, 21 nt, Artificial Sequence
  Synthetic
ugaccaugccuccggcuuguc

SEQ ID NO: 554966 - RNA, 22 nt, Artificial Sequence
  Synthetic
cugaccaugccuccggcuuguc

SEQ ID NO: 554967 - RNA, 23 nt, Artificial Sequence
  Synthetic
ucugaccaugccuccggcuuguc

SEQ ID NO: 554968 - RNA, 24 nt, Artificial Sequence
  Synthetic
cucugaccaugccuccggcuuguc

SEQ ID NO: 554969 - RNA, 18 nt, Artificial Sequence
  Synthetic
acucauagguugcuuguc

SEQ ID NO: 554970 - RNA, 19 nt, Artificial Sequence
  Synthetic
aacucauagguugcuuguc

SEQ ID NO: 554971 - RNA, 20 nt, Artificial Sequence
  Synthetic
aaacucauagguugcuuguc

SEQ ID NO: 554972 - RNA, 21 nt, Artificial Sequence
  Synthetic
aaaacucauagguugcuuguc

SEQ ID NO: 554973 - RNA, 22 nt, Artificial Sequence
  Synthetic
caaaacucauagguugcuuguc

SEQ ID NO: 554974 - RNA, 23 nt, Artificial Sequence
  Synthetic
gcaaaacucauagguugcuuguc

SEQ ID NO: 554975 - RNA, 24 nt, Artificial Sequence
  Synthetic
ggcaaaacucauagguugcuuguc

SEQ ID NO: 554976 - RNA, 18 nt, Artificial Sequence
  Synthetic
ggauaauuauuucuuguc

SEQ ID NO: 554977 - RNA, 19 nt, Artificial Sequence
  Synthetic
uggauaauuauuucuuguc

SEQ ID NO: 554978 - RNA, 20 nt, Artificial Sequence
  Synthetic
cuggauaauuauuucuuguc

SEQ ID NO: 554979 - RNA, 21 nt, Artificial Sequence
  Synthetic
acuggauaauuauuucuuguc

SEQ ID NO: 554980 - RNA, 22 nt, Artificial Sequence
  Synthetic
gacuggauaauuauuucuuguc

SEQ ID NO: 554981 - RNA, 23 nt, Artificial Sequence
  Synthetic
ggacuggauaauuauuucuuguc

SEQ ID NO: 554982 - RNA, 24 nt, Artificial Sequence
  Synthetic
gggacuggauaauuauuucuuguc

SEQ ID NO: 554983 - RNA, 18 nt, Artificial Sequence
  Synthetic
gaaaaagagaaaguuguc

SEQ ID NO: 554984 - RNA, 19 nt, Artificial Sequence
  Synthetic
ugaaaaagagaaaguuguc

SEQ ID NO: 554985 - RNA, 20 nt, Artificial Sequence
  Synthetic
augaaaaagagaaaguuguc

SEQ ID NO: 554986 - RNA, 21 nt, Artificial Sequence
  Synthetic
gaugaaaaagagaaaguuguc

SEQ ID NO: 554987 - RNA, 22 nt, Artificial Sequence
  Synthetic
agaugaaaaagagaaaguuguc

SEQ ID NO: 554988 - RNA, 23 nt, Artificial Sequence
  Synthetic
gagaugaaaaagagaaaguuguc

SEQ ID NO: 554989 - RNA, 24 nt, Artificial Sequence
  Synthetic
ggagaugaaaaagagaaaguuguc

SEQ ID NO: 554990 - RNA, 18 nt, Artificial Sequence
  Synthetic
auuuucucagcaguuguc

SEQ ID NO: 554991 - RNA, 19 nt, Artificial Sequence
  Synthetic
cauuuucucagcaguuguc

SEQ ID NO: 554992 - RNA, 20 nt, Artificial Sequence
  Synthetic
acauuuucucagcaguuguc

SEQ ID NO: 554993 - RNA, 21 nt, Artificial Sequence
  Synthetic
uacauuuucucagcaguuguc

SEQ ID NO: 554994 - RNA, 22 nt, Artificial Sequence
  Synthetic
guacauuuucucagcaguuguc

SEQ ID NO: 554995 - RNA, 23 nt, Artificial Sequence
  Synthetic
uguacauuuucucagcaguuguc

SEQ ID NO: 554996 - RNA, 24 nt, Artificial Sequence
  Synthetic
uuguacauuuucucagcaguuguc

SEQ ID NO: 554997 - RNA, 18 nt, Artificial Sequence
  Synthetic
gcuaaacagugcguuguc

SEQ ID NO: 554998 - RNA, 19 nt, Artificial Sequence
  Synthetic
agcuaaacagugcguuguc

SEQ ID NO: 554999 - RNA, 20 nt, Artificial Sequence
  Synthetic
gagcuaaacagugcguuguc

SEQ ID NO: 555000 - RNA, 21 nt, Artificial Sequence
  Synthetic
ggagcuaaacagugcguuguc

SEQ ID NO: 555001 - RNA, 22 nt, Artificial Sequence
  Synthetic
uggagcuaaacagugcguuguc

SEQ ID NO: 555002 - RNA, 23 nt, Artificial Sequence
  Synthetic
guggagcuaaacagugcguuguc

SEQ ID NO: 555003 - RNA, 24 nt, Artificial Sequence
  Synthetic
uguggagcuaaacagugcguuguc

SEQ ID NO: 555004 - RNA, 18 nt, Artificial Sequence
  Synthetic
ucucuuuccccuguuguc

SEQ ID NO: 555005 - RNA, 19 nt, Artificial Sequence
  Synthetic
cucucuuuccccuguuguc

SEQ ID NO: 555006 - RNA, 20 nt, Artificial Sequence
  Synthetic
ucucucuuuccccuguuguc

SEQ ID NO: 555007 - RNA, 21 nt, Artificial Sequence
  Synthetic
cucucucuuuccccuguuguc

SEQ ID NO: 555008 - RNA, 22 nt, Artificial Sequence
  Synthetic
ucucucucuuuccccuguuguc

SEQ ID NO: 555009 - RNA, 23 nt, Artificial Sequence
  Synthetic
cucucucucuuuccccuguuguc

SEQ ID NO: 555010 - RNA, 24 nt, Artificial Sequence
  Synthetic
ucucucucucuuuccccuguuguc

SEQ ID NO: 555011 - RNA, 18 nt, Artificial Sequence
  Synthetic
ggcacuguuccuguuguc

SEQ ID NO: 555012 - RNA, 19 nt, Artificial Sequence
  Synthetic
uggcacuguuccuguuguc

SEQ ID NO: 555013 - RNA, 20 nt, Artificial Sequence
  Synthetic
uuggcacuguuccuguuguc

SEQ ID NO: 555014 - RNA, 21 nt, Artificial Sequence
  Synthetic
uuuggcacuguuccuguuguc

SEQ ID NO: 555015 - RNA, 22 nt, Artificial Sequence
  Synthetic
auuuggcacuguuccuguuguc

SEQ ID NO: 555016 - RNA, 23 nt, Artificial Sequence
  Synthetic
gauuuggcacuguuccuguuguc

SEQ ID NO: 555017 - RNA, 24 nt, Artificial Sequence
  Synthetic
ggauuuggcacuguuccuguuguc

SEQ ID NO: 555018 - RNA, 18 nt, Artificial Sequence
  Synthetic
gagucaaccuuuguuguc

SEQ ID NO: 555019 - RNA, 19 nt, Artificial Sequence
  Synthetic
ggagucaaccuuuguuguc

SEQ ID NO: 555020 - RNA, 20 nt, Artificial Sequence
  Synthetic
uggagucaaccuuuguuguc

SEQ ID NO: 555021 - RNA, 21 nt, Artificial Sequence
  Synthetic
auggagucaaccuuuguuguc

SEQ ID NO: 555022 - RNA, 22 nt, Artificial Sequence
  Synthetic
aauggagucaaccuuuguuguc

SEQ ID NO: 555023 - RNA, 23 nt, Artificial Sequence
  Synthetic
uaauggagucaaccuuuguuguc

SEQ ID NO: 555024 - RNA, 24 nt, Artificial Sequence
  Synthetic
uuaauggagucaaccuuuguuguc

SEQ ID NO: 555025 - RNA, 18 nt, Artificial Sequence
  Synthetic
cacaaaucaguauuuguc

SEQ ID NO: 555026 - RNA, 19 nt, Artificial Sequence
  Synthetic
ucacaaaucaguauuuguc

SEQ ID NO: 555027 - RNA, 20 nt, Artificial Sequence
  Synthetic
uucacaaaucaguauuuguc

SEQ ID NO: 555028 - RNA, 21 nt, Artificial Sequence
  Synthetic
auucacaaaucaguauuuguc

SEQ ID NO: 555029 - RNA, 22 nt, Artificial Sequence
  Synthetic
aauucacaaaucaguauuuguc

SEQ ID NO: 555030 - RNA, 23 nt, Artificial Sequence
  Synthetic
uaauucacaaaucaguauuuguc

SEQ ID NO: 555031 - RNA, 24 nt, Artificial Sequence
  Synthetic
uuaauucacaaaucaguauuuguc

SEQ ID NO: 555032 - RNA, 18 nt, Artificial Sequence
  Synthetic
gugguguugaccuuuguc

SEQ ID NO: 555033 - RNA, 19 nt, Artificial Sequence
  Synthetic
agugguguugaccuuuguc

SEQ ID NO: 555034 - RNA, 20 nt, Artificial Sequence
  Synthetic
gagugguguugaccuuuguc

SEQ ID NO: 555035 - RNA, 21 nt, Artificial Sequence
  Synthetic
agagugguguugaccuuuguc

SEQ ID NO: 555036 - RNA, 22 nt, Artificial Sequence
  Synthetic
gagagugguguugaccuuuguc

SEQ ID NO: 555037 - RNA, 23 nt, Artificial Sequence
  Synthetic
ggagagugguguugaccuuuguc

SEQ ID NO: 555038 - RNA, 24 nt, Artificial Sequence
  Synthetic
gggagagugguguugaccuuuguc

SEQ ID NO: 555039 - RNA, 18 nt, Artificial Sequence
  Synthetic
cgccauauugccuuuguc

SEQ ID NO: 555040 - RNA, 19 nt, Artificial Sequence
  Synthetic
ccgccauauugccuuuguc

SEQ ID NO: 555041 - RNA, 20 nt, Artificial Sequence
  Synthetic
accgccauauugccuuuguc

SEQ ID NO: 555042 - RNA, 21 nt, Artificial Sequence
  Synthetic
aaccgccauauugccuuuguc

SEQ ID NO: 555043 - RNA, 22 nt, Artificial Sequence
  Synthetic
aaaccgccauauugccuuuguc

SEQ ID NO: 555044 - RNA, 23 nt, Artificial Sequence
  Synthetic
gaaaccgccauauugccuuuguc

SEQ ID NO: 555045 - RNA, 24 nt, Artificial Sequence
  Synthetic
ugaaaccgccauauugccuuuguc

SEQ ID NO: 555046 - RNA, 18 nt, Artificial Sequence
  Synthetic
cuuuuuguuuccuuuguc

SEQ ID NO: 555047 - RNA, 19 nt, Artificial Sequence
  Synthetic
gcuuuuuguuuccuuuguc

SEQ ID NO: 555048 - RNA, 20 nt, Artificial Sequence
  Synthetic
cgcuuuuuguuuccuuuguc

SEQ ID NO: 555049 - RNA, 21 nt, Artificial Sequence
  Synthetic
acgcuuuuuguuuccuuuguc

SEQ ID NO: 555050 - RNA, 22 nt, Artificial Sequence
  Synthetic
cacgcuuuuuguuuccuuuguc

SEQ ID NO: 555051 - RNA, 23 nt, Artificial Sequence
  Synthetic
gcacgcuuuuuguuuccuuuguc

SEQ ID NO: 555052 - RNA, 24 nt, Artificial Sequence
  Synthetic
ugcacgcuuuuuguuuccuuuguc

SEQ ID NO: 555053 - RNA, 18 nt, Artificial Sequence
  Synthetic
cagugaaucuucuuuguc

SEQ ID NO: 555054 - RNA, 19 nt, Artificial Sequence
  Synthetic
acagugaaucuucuuuguc

SEQ ID NO: 555055 - RNA, 20 nt, Artificial Sequence
  Synthetic
gacagugaaucuucuuuguc

SEQ ID NO: 555056 - RNA, 21 nt, Artificial Sequence
  Synthetic
cgacagugaaucuucuuuguc

SEQ ID NO: 555057 - RNA, 22 nt, Artificial Sequence
  Synthetic
ucgacagugaaucuucuuuguc

SEQ ID NO: 555058 - RNA, 23 nt, Artificial Sequence
  Synthetic
cucgacagugaaucuucuuuguc

SEQ ID NO: 555059 - RNA, 24 nt, Artificial Sequence
  Synthetic
ccucgacagugaaucuucuuuguc

SEQ ID NO: 555060 - RNA, 18 nt, Artificial Sequence
  Synthetic
caagucauguucuuuguc

SEQ ID NO: 555061 - RNA, 19 nt, Artificial Sequence
  Synthetic
ccaagucauguucuuuguc

SEQ ID NO: 555062 - RNA, 20 nt, Artificial Sequence
  Synthetic
cccaagucauguucuuuguc

SEQ ID NO: 555063 - RNA, 21 nt, Artificial Sequence
  Synthetic
ccccaagucauguucuuuguc

SEQ ID NO: 555064 - RNA, 22 nt, Artificial Sequence
  Synthetic
uccccaagucauguucuuuguc

SEQ ID NO: 555065 - RNA, 23 nt, Artificial Sequence
  Synthetic
cuccccaagucauguucuuuguc

SEQ ID NO: 555066 - RNA, 24 nt, Artificial Sequence
  Synthetic
ucuccccaagucauguucuuuguc

SEQ ID NO: 555067 - RNA, 18 nt, Artificial Sequence
  Synthetic
uuacuauuuuaguuuguc

SEQ ID NO: 555068 - RNA, 19 nt, Artificial Sequence
  Synthetic
uuuacuauuuuaguuuguc

SEQ ID NO: 555069 - RNA, 20 nt, Artificial Sequence
  Synthetic
uuuuacuauuuuaguuuguc

SEQ ID NO: 555070 - RNA, 21 nt, Artificial Sequence
  Synthetic
auuuuacuauuuuaguuuguc

SEQ ID NO: 555071 - RNA, 22 nt, Artificial Sequence
  Synthetic
uauuuuacuauuuuaguuuguc

SEQ ID NO: 555072 - RNA, 23 nt, Artificial Sequence
  Synthetic
guauuuuacuauuuuaguuuguc

SEQ ID NO: 555073 - RNA, 24 nt, Artificial Sequence
  Synthetic
aguauuuuacuauuuuaguuuguc

SEQ ID NO: 555074 - RNA, 18 nt, Artificial Sequence
  Synthetic
aauguauuucauuuuguc

SEQ ID NO: 555075 - RNA, 19 nt, Artificial Sequence
  Synthetic
aaauguauuucauuuuguc

SEQ ID NO: 555076 - RNA, 20 nt, Artificial Sequence
  Synthetic
uaaauguauuucauuuuguc

SEQ ID NO: 555077 - RNA, 21 nt, Artificial Sequence
  Synthetic
uuaaauguauuucauuuuguc

SEQ ID NO: 555078 - RNA, 22 nt, Artificial Sequence
  Synthetic
uuuaaauguauuucauuuuguc

SEQ ID NO: 555079 - RNA, 23 nt, Artificial Sequence
  Synthetic
uuuuaaauguauuucauuuuguc

SEQ ID NO: 555080 - RNA, 24 nt, Artificial Sequence
  Synthetic
guuuuaaauguauuucauuuuguc

SEQ ID NO: 555081 - RNA, 18 nt, Artificial Sequence
  Synthetic
aagaaauaaacuuuuguc

SEQ ID NO: 555082 - RNA, 19 nt, Artificial Sequence
  Synthetic
aaagaaauaaacuuuuguc

SEQ ID NO: 555083 - RNA, 20 nt, Artificial Sequence
  Synthetic
caaagaaauaaacuuuuguc

SEQ ID NO: 555084 - RNA, 21 nt, Artificial Sequence
  Synthetic
acaaagaaauaaacuuuuguc

SEQ ID NO: 555085 - RNA, 22 nt, Artificial Sequence
  Synthetic
uacaaagaaauaaacuuuuguc

SEQ ID NO: 555086 - RNA, 23 nt, Artificial Sequence
  Synthetic
uuacaaagaaauaaacuuuuguc

SEQ ID NO: 555087 - RNA, 24 nt, Artificial Sequence
  Synthetic
cuuacaaagaaauaaacuuuuguc

SEQ ID NO: 555088 - RNA, 18 nt, Artificial Sequence
  Synthetic
ugcaucuacacuuuuguc

SEQ ID NO: 555089 - RNA, 19 nt, Artificial Sequence
  Synthetic
uugcaucuacacuuuuguc

SEQ ID NO: 555090 - RNA, 20 nt, Artificial Sequence
  Synthetic
cuugcaucuacacuuuuguc

SEQ ID NO: 555091 - RNA, 21 nt, Artificial Sequence
  Synthetic
ucuugcaucuacacuuuuguc

SEQ ID NO: 555092 - RNA, 22 nt, Artificial Sequence
  Synthetic
cucuugcaucuacacuuuuguc

SEQ ID NO: 555093 - RNA, 23 nt, Artificial Sequence
  Synthetic
ccucuugcaucuacacuuuuguc

SEQ ID NO: 555094 - RNA, 24 nt, Artificial Sequence
  Synthetic
uccucuugcaucuacacuuuuguc

SEQ ID NO: 555095 - RNA, 18 nt, Artificial Sequence
  Synthetic
cuuaaggauaaaaaauuc

SEQ ID NO: 555096 - RNA, 19 nt, Artificial Sequence
  Synthetic
ucuuaaggauaaaaaauuc

SEQ ID NO: 555097 - RNA, 20 nt, Artificial Sequence
  Synthetic
aucuuaaggauaaaaaauuc

SEQ ID NO: 555098 - RNA, 21 nt, Artificial Sequence
  Synthetic
uaucuuaaggauaaaaaauuc

SEQ ID NO: 555099 - RNA, 22 nt, Artificial Sequence
  Synthetic
uuaucuuaaggauaaaaaauuc

SEQ ID NO: 555100 - RNA, 23 nt, Artificial Sequence
  Synthetic
guuaucuuaaggauaaaaaauuc

SEQ ID NO: 555101 - RNA, 24 nt, Artificial Sequence
  Synthetic
uguuaucuuaaggauaaaaaauuc

SEQ ID NO: 555102 - RNA, 18 nt, Artificial Sequence
  Synthetic
cagaaacuuaaaaaauuc

SEQ ID NO: 555103 - RNA, 19 nt, Artificial Sequence
  Synthetic
ucagaaacuuaaaaaauuc

SEQ ID NO: 555104 - RNA, 20 nt, Artificial Sequence
  Synthetic
aucagaaacuuaaaaaauuc

SEQ ID NO: 555105 - RNA, 21 nt, Artificial Sequence
  Synthetic
aaucagaaacuuaaaaaauuc

SEQ ID NO: 555106 - RNA, 22 nt, Artificial Sequence
  Synthetic
aaaucagaaacuuaaaaaauuc

SEQ ID NO: 555107 - RNA, 23 nt, Artificial Sequence
  Synthetic
gaaaucagaaacuuaaaaaauuc

SEQ ID NO: 555108 - RNA, 24 nt, Artificial Sequence
  Synthetic
agaaaucagaaacuuaaaaaauuc

SEQ ID NO: 555109 - RNA, 18 nt, Artificial Sequence
  Synthetic
aaugcaaaggaaaaauuc

SEQ ID NO: 555110 - RNA, 19 nt, Artificial Sequence
  Synthetic
gaaugcaaaggaaaaauuc

SEQ ID NO: 555111 - RNA, 20 nt, Artificial Sequence
  Synthetic
ugaaugcaaaggaaaaauuc

SEQ ID NO: 555112 - RNA, 21 nt, Artificial Sequence
  Synthetic
gugaaugcaaaggaaaaauuc

SEQ ID NO: 555113 - RNA, 22 nt, Artificial Sequence
  Synthetic
ugugaaugcaaaggaaaaauuc

SEQ ID NO: 555114 - RNA, 23 nt, Artificial Sequence
  Synthetic
uugugaaugcaaaggaaaaauuc

SEQ ID NO: 555115 - RNA, 24 nt, Artificial Sequence
  Synthetic
guugugaaugcaaaggaaaaauuc

SEQ ID NO: 555116 - RNA, 18 nt, Artificial Sequence
  Synthetic
auauguugugaaaaauuc

SEQ ID NO: 555117 - RNA, 19 nt, Artificial Sequence
  Synthetic
uauauguugugaaaaauuc

SEQ ID NO: 555118 - RNA, 20 nt, Artificial Sequence
  Synthetic
auauauguugugaaaaauuc

SEQ ID NO: 555119 - RNA, 21 nt, Artificial Sequence
  Synthetic
uauauauguugugaaaaauuc

SEQ ID NO: 555120 - RNA, 22 nt, Artificial Sequence
  Synthetic
guauauauguugugaaaaauuc

SEQ ID NO: 555121 - RNA, 23 nt, Artificial Sequence
  Synthetic
uguauauauguugugaaaaauuc

SEQ ID NO: 555122 - RNA, 24 nt, Artificial Sequence
  Synthetic
auguauauauguugugaaaaauuc

SEQ ID NO: 555123 - RNA, 18 nt, Artificial Sequence
  Synthetic
uuuguuugauaaaaauuc

SEQ ID NO: 555124 - RNA, 19 nt, Artificial Sequence
  Synthetic
auuuguuugauaaaaauuc

SEQ ID NO: 555125 - RNA, 20 nt, Artificial Sequence
  Synthetic
cauuuguuugauaaaaauuc

SEQ ID NO: 555126 - RNA, 21 nt, Artificial Sequence
  Synthetic
ucauuuguuugauaaaaauuc

SEQ ID NO: 555127 - RNA, 22 nt, Artificial Sequence
  Synthetic
uucauuuguuugauaaaaauuc

SEQ ID NO: 555128 - RNA, 23 nt, Artificial Sequence
  Synthetic
guucauuuguuugauaaaaauuc

SEQ ID NO: 555129 - RNA, 24 nt, Artificial Sequence
  Synthetic
uguucauuuguuugauaaaaauuc

SEQ ID NO: 555130 - RNA, 18 nt, Artificial Sequence
  Synthetic
uucuugguaacaaaauuc

SEQ ID NO: 555131 - RNA, 19 nt, Artificial Sequence
  Synthetic
uuucuugguaacaaaauuc

SEQ ID NO: 555132 - RNA, 20 nt, Artificial Sequence
  Synthetic
uuuucuugguaacaaaauuc

SEQ ID NO: 555133 - RNA, 21 nt, Artificial Sequence
  Synthetic
uuuuucuugguaacaaaauuc

SEQ ID NO: 555134 - RNA, 22 nt, Artificial Sequence
  Synthetic
uuuuuucuugguaacaaaauuc

SEQ ID NO: 555135 - RNA, 23 nt, Artificial Sequence
  Synthetic
uuuuuuucuugguaacaaaauuc

SEQ ID NO: 555136 - RNA, 24 nt, Artificial Sequence
  Synthetic
uuuuuuuucuugguaacaaaauuc

SEQ ID NO: 555137 - RNA, 18 nt, Artificial Sequence
  Synthetic
uaacagaucucaaaauuc

SEQ ID NO: 555138 - RNA, 19 nt, Artificial Sequence
  Synthetic
uuaacagaucucaaaauuc

SEQ ID NO: 555139 - RNA, 20 nt, Artificial Sequence
  Synthetic
uuuaacagaucucaaaauuc

SEQ ID NO: 555140 - RNA, 21 nt, Artificial Sequence
  Synthetic
guuuaacagaucucaaaauuc

SEQ ID NO: 555141 - RNA, 22 nt, Artificial Sequence
  Synthetic
uguuuaacagaucucaaaauuc

SEQ ID NO: 555142 - RNA, 23 nt, Artificial Sequence
  Synthetic
guguuuaacagaucucaaaauuc

SEQ ID NO: 555143 - RNA, 24 nt, Artificial Sequence
  Synthetic
uguguuuaacagaucucaaaauuc

SEQ ID NO: 555144 - RNA, 18 nt, Artificial Sequence
  Synthetic
cacccaagcugaaaauuc

SEQ ID NO: 555145 - RNA, 19 nt, Artificial Sequence
  Synthetic
ccacccaagcugaaaauuc

SEQ ID NO: 555146 - RNA, 20 nt, Artificial Sequence
  Synthetic
cccacccaagcugaaaauuc

SEQ ID NO: 555147 - RNA, 21 nt, Artificial Sequence
  Synthetic
ccccacccaagcugaaaauuc

SEQ ID NO: 555148 - RNA, 22 nt, Artificial Sequence
  Synthetic
accccacccaagcugaaaauuc

SEQ ID NO: 555149 - RNA, 23 nt, Artificial Sequence
  Synthetic
caccccacccaagcugaaaauuc

SEQ ID NO: 555150 - RNA, 24 nt, Artificial Sequence
  Synthetic
ccaccccacccaagcugaaaauuc

SEQ ID NO: 555151 - RNA, 18 nt, Artificial Sequence
  Synthetic
cuuucaaaaauaaaauuc

SEQ ID NO: 555152 - RNA, 19 nt, Artificial Sequence
  Synthetic
ucuuucaaaaauaaaauuc

SEQ ID NO: 555153 - RNA, 20 nt, Artificial Sequence
  Synthetic
gucuuucaaaaauaaaauuc

SEQ ID NO: 555154 - RNA, 21 nt, Artificial Sequence
  Synthetic
ugucuuucaaaaauaaaauuc

SEQ ID NO: 555155 - RNA, 22 nt, Artificial Sequence
  Synthetic
uugucuuucaaaaauaaaauuc

SEQ ID NO: 555156 - RNA, 23 nt, Artificial Sequence
  Synthetic
cuugucuuucaaaaauaaaauuc

SEQ ID NO: 555157 - RNA, 24 nt, Artificial Sequence
  Synthetic
ucuugucuuucaaaaauaaaauuc

SEQ ID NO: 555158 - RNA, 18 nt, Artificial Sequence
  Synthetic
aaacaggaauacaaauuc

SEQ ID NO: 555159 - RNA, 19 nt, Artificial Sequence
  Synthetic
uaaacaggaauacaaauuc

SEQ ID NO: 555160 - RNA, 20 nt, Artificial Sequence
  Synthetic
cuaaacaggaauacaaauuc

SEQ ID NO: 555161 - RNA, 21 nt, Artificial Sequence
  Synthetic
ucuaaacaggaauacaaauuc

SEQ ID NO: 555162 - RNA, 22 nt, Artificial Sequence
  Synthetic
aucuaaacaggaauacaaauuc

SEQ ID NO: 555163 - RNA, 23 nt, Artificial Sequence
  Synthetic
gaucuaaacaggaauacaaauuc

SEQ ID NO: 555164 - RNA, 24 nt, Artificial Sequence
  Synthetic
agaucuaaacaggaauacaaauuc

SEQ ID NO: 555165 - RNA, 18 nt, Artificial Sequence
  Synthetic
auuuucucucccaaauuc

SEQ ID NO: 555166 - RNA, 19 nt, Artificial Sequence
  Synthetic
cauuuucucucccaaauuc

SEQ ID NO: 555167 - RNA, 20 nt, Artificial Sequence
  Synthetic
ucauuuucucucccaaauuc

SEQ ID NO: 555168 - RNA, 21 nt, Artificial Sequence
  Synthetic
uucauuuucucucccaaauuc

SEQ ID NO: 555169 - RNA, 22 nt, Artificial Sequence
  Synthetic
uuucauuuucucucccaaauuc

SEQ ID NO: 555170 - RNA, 23 nt, Artificial Sequence
  Synthetic
uuuucauuuucucucccaaauuc

SEQ ID NO: 555171 - RNA, 24 nt, Artificial Sequence
  Synthetic
auuuucauuuucucucccaaauuc

SEQ ID NO: 555172 - RNA, 18 nt, Artificial Sequence
  Synthetic
ugaagcacaaucaaauuc

SEQ ID NO: 555173 - RNA, 19 nt, Artificial Sequence
  Synthetic
augaagcacaaucaaauuc

SEQ ID NO: 555174 - RNA, 20 nt, Artificial Sequence
  Synthetic
aaugaagcacaaucaaauuc

SEQ ID NO: 555175 - RNA, 21 nt, Artificial Sequence
  Synthetic
caaugaagcacaaucaaauuc

SEQ ID NO: 555176 - RNA, 22 nt, Artificial Sequence
  Synthetic
ucaaugaagcacaaucaaauuc

SEQ ID NO: 555177 - RNA, 23 nt, Artificial Sequence
  Synthetic
uucaaugaagcacaaucaaauuc

SEQ ID NO: 555178 - RNA, 24 nt, Artificial Sequence
  Synthetic
uuucaaugaagcacaaucaaauuc

SEQ ID NO: 555179 - RNA, 18 nt, Artificial Sequence
  Synthetic
ggucaaaagaagaaauuc

SEQ ID NO: 555180 - RNA, 19 nt, Artificial Sequence
  Synthetic
gggucaaaagaagaaauuc

SEQ ID NO: 555181 - RNA, 20 nt, Artificial Sequence
  Synthetic
ugggucaaaagaagaaauuc

SEQ ID NO: 555182 - RNA, 21 nt, Artificial Sequence
  Synthetic
uugggucaaaagaagaaauuc

SEQ ID NO: 555183 - RNA, 22 nt, Artificial Sequence
  Synthetic
auugggucaaaagaagaaauuc

SEQ ID NO: 555184 - RNA, 23 nt, Artificial Sequence
  Synthetic
uauugggucaaaagaagaaauuc

SEQ ID NO: 555185 - RNA, 24 nt, Artificial Sequence
  Synthetic
uuauugggucaaaagaagaaauuc

SEQ ID NO: 555186 - RNA, 18 nt, Artificial Sequence
  Synthetic
caguucuccuggaaauuc

SEQ ID NO: 555187 - RNA, 19 nt, Artificial Sequence
  Synthetic
ucaguucuccuggaaauuc

SEQ ID NO: 555188 - RNA, 20 nt, Artificial Sequence
  Synthetic
uucaguucuccuggaaauuc

SEQ ID NO: 555189 - RNA, 21 nt, Artificial Sequence
  Synthetic
guucaguucuccuggaaauuc

SEQ ID NO: 555190 - RNA, 22 nt, Artificial Sequence
  Synthetic
aguucaguucuccuggaaauuc

SEQ ID NO: 555191 - RNA, 23 nt, Artificial Sequence
  Synthetic
caguucaguucuccuggaaauuc

SEQ ID NO: 555192 - RNA, 24 nt, Artificial Sequence
  Synthetic
ucaguucaguucuccuggaaauuc

SEQ ID NO: 555193 - RNA, 18 nt, Artificial Sequence
  Synthetic
ggaaguccugugaaauuc

SEQ ID NO: 555194 - RNA, 19 nt, Artificial Sequence
  Synthetic
uggaaguccugugaaauuc

SEQ ID NO: 555195 - RNA, 20 nt, Artificial Sequence
  Synthetic
cuggaaguccugugaaauuc

SEQ ID NO: 555196 - RNA, 21 nt, Artificial Sequence
  Synthetic
gcuggaaguccugugaaauuc

SEQ ID NO: 555197 - RNA, 22 nt, Artificial Sequence
  Synthetic
ggcuggaaguccugugaaauuc

SEQ ID NO: 555198 - RNA, 23 nt, Artificial Sequence
  Synthetic
gggcuggaaguccugugaaauuc

SEQ ID NO: 555199 - RNA, 24 nt, Artificial Sequence
  Synthetic
ugggcuggaaguccugugaaauuc

SEQ ID NO: 555200 - RNA, 18 nt, Artificial Sequence
  Synthetic
agauaucccuugaaauuc

SEQ ID NO: 555201 - RNA, 19 nt, Artificial Sequence
  Synthetic
cagauaucccuugaaauuc

SEQ ID NO: 555202 - RNA, 20 nt, Artificial Sequence
  Synthetic
ucagauaucccuugaaauuc

SEQ ID NO: 555203 - RNA, 21 nt, Artificial Sequence
  Synthetic
gucagauaucccuugaaauuc

SEQ ID NO: 555204 - RNA, 22 nt, Artificial Sequence
  Synthetic
ggucagauaucccuugaaauuc

SEQ ID NO: 555205 - RNA, 23 nt, Artificial Sequence
  Synthetic
aggucagauaucccuugaaauuc

SEQ ID NO: 555206 - RNA, 24 nt, Artificial Sequence
  Synthetic
caggucagauaucccuugaaauuc

SEQ ID NO: 555207 - RNA, 18 nt, Artificial Sequence
  Synthetic
gaaagaaccaauaaauuc

SEQ ID NO: 555208 - RNA, 19 nt, Artificial Sequence
  Synthetic
ugaaagaaccaauaaauuc

SEQ ID NO: 555209 - RNA, 20 nt, Artificial Sequence
  Synthetic
uugaaagaaccaauaaauuc

SEQ ID NO: 555210 - RNA, 21 nt, Artificial Sequence
  Synthetic
cuugaaagaaccaauaaauuc

SEQ ID NO: 555211 - RNA, 22 nt, Artificial Sequence
  Synthetic
ucuugaaagaaccaauaaauuc

SEQ ID NO: 555212 - RNA, 23 nt, Artificial Sequence
  Synthetic
uucuugaaagaaccaauaaauuc

SEQ ID NO: 555213 - RNA, 24 nt, Artificial Sequence
  Synthetic
guucuugaaagaaccaauaaauuc

SEQ ID NO: 555214 - RNA, 18 nt, Artificial Sequence
  Synthetic
agcaagaacgauaaauuc

SEQ ID NO: 555215 - RNA, 19 nt, Artificial Sequence
  Synthetic
aagcaagaacgauaaauuc

SEQ ID NO: 555216 - RNA, 20 nt, Artificial Sequence
  Synthetic
gaagcaagaacgauaaauuc

SEQ ID NO: 555217 - RNA, 21 nt, Artificial Sequence
  Synthetic
ugaagcaagaacgauaaauuc

SEQ ID NO: 555218 - RNA, 22 nt, Artificial Sequence
  Synthetic
augaagcaagaacgauaaauuc

SEQ ID NO: 555219 - RNA, 23 nt, Artificial Sequence
  Synthetic
gaugaagcaagaacgauaaauuc

SEQ ID NO: 555220 - RNA, 24 nt, Artificial Sequence
  Synthetic
ugaugaagcaagaacgauaaauuc

SEQ ID NO: 555221 - RNA, 18 nt, Artificial Sequence
  Synthetic
gaaaaaauggauaaauuc

SEQ ID NO: 555222 - RNA, 19 nt, Artificial Sequence
  Synthetic
agaaaaaauggauaaauuc

SEQ ID NO: 555223 - RNA, 20 nt, Artificial Sequence
  Synthetic
uagaaaaaauggauaaauuc

SEQ ID NO: 555224 - RNA, 21 nt, Artificial Sequence
  Synthetic
cuagaaaaaauggauaaauuc

SEQ ID NO: 555225 - RNA, 22 nt, Artificial Sequence
  Synthetic
ucuagaaaaaauggauaaauuc

SEQ ID NO: 555226 - RNA, 23 nt, Artificial Sequence
  Synthetic
aucuagaaaaaauggauaaauuc

SEQ ID NO: 555227 - RNA, 24 nt, Artificial Sequence
  Synthetic
aaucuagaaaaaauggauaaauuc

SEQ ID NO: 555228 - RNA, 18 nt, Artificial Sequence
  Synthetic
aaacaaguggauaaauuc

SEQ ID NO: 555229 - RNA, 19 nt, Artificial Sequence
  Synthetic
aaaacaaguggauaaauuc

SEQ ID NO: 555230 - RNA, 20 nt, Artificial Sequence
  Synthetic
gaaaacaaguggauaaauuc

SEQ ID NO: 555231 - RNA, 21 nt, Artificial Sequence
  Synthetic
ugaaaacaaguggauaaauuc

SEQ ID NO: 555232 - RNA, 22 nt, Artificial Sequence
  Synthetic
augaaaacaaguggauaaauuc

SEQ ID NO: 555233 - RNA, 23 nt, Artificial Sequence
  Synthetic
aaugaaaacaaguggauaaauuc

SEQ ID NO: 555234 - RNA, 24 nt, Artificial Sequence
  Synthetic
aaaugaaaacaaguggauaaauuc

SEQ ID NO: 555235 - RNA, 18 nt, Artificial Sequence
  Synthetic
acccacaggcuuaaauuc

SEQ ID NO: 555236 - RNA, 19 nt, Artificial Sequence
  Synthetic
gacccacaggcuuaaauuc

SEQ ID NO: 555237 - RNA, 20 nt, Artificial Sequence
  Synthetic
ugacccacaggcuuaaauuc

SEQ ID NO: 555238 - RNA, 21 nt, Artificial Sequence
  Synthetic
augacccacaggcuuaaauuc

SEQ ID NO: 555239 - RNA, 22 nt, Artificial Sequence
  Synthetic
aaugacccacaggcuuaaauuc

SEQ ID NO: 555240 - RNA, 23 nt, Artificial Sequence
  Synthetic
caaugacccacaggcuuaaauuc

SEQ ID NO: 555241 - RNA, 24 nt, Artificial Sequence
  Synthetic
acaaugacccacaggcuuaaauuc

SEQ ID NO: 555242 - RNA, 18 nt, Artificial Sequence
  Synthetic
uuaauucuguuuaaauuc

SEQ ID NO: 555243 - RNA, 19 nt, Artificial Sequence
  Synthetic
auuaauucuguuuaaauuc

SEQ ID NO: 555244 - RNA, 20 nt, Artificial Sequence
  Synthetic
cauuaauucuguuuaaauuc

SEQ ID NO: 555245 - RNA, 21 nt, Artificial Sequence
  Synthetic
acauuaauucuguuuaaauuc

SEQ ID NO: 555246 - RNA, 22 nt, Artificial Sequence
  Synthetic
aacauuaauucuguuuaaauuc

SEQ ID NO: 555247 - RNA, 23 nt, Artificial Sequence
  Synthetic
aaacauuaauucuguuuaaauuc

SEQ ID NO: 555248 - RNA, 24 nt, Artificial Sequence
  Synthetic
uaaacauuaauucuguuuaaauuc

SEQ ID NO: 555249 - RNA, 18 nt, Artificial Sequence
  Synthetic
uuuaggaacaaacaauuc

SEQ ID NO: 555250 - RNA, 19 nt, Artificial Sequence
  Synthetic
auuuaggaacaaacaauuc

SEQ ID NO: 555251 - RNA, 20 nt, Artificial Sequence
  Synthetic
cauuuaggaacaaacaauuc

SEQ ID NO: 555252 - RNA, 21 nt, Artificial Sequence
  Synthetic
ucauuuaggaacaaacaauuc

SEQ ID NO: 555253 - RNA, 22 nt, Artificial Sequence
  Synthetic
cucauuuaggaacaaacaauuc

SEQ ID NO: 555254 - RNA, 23 nt, Artificial Sequence
  Synthetic
ucucauuuaggaacaaacaauuc

SEQ ID NO: 555255 - RNA, 24 nt, Artificial Sequence
  Synthetic
gucucauuuaggaacaaacaauuc

SEQ ID NO: 555256 - RNA, 18 nt, Artificial Sequence
  Synthetic
gcuauugauucacaauuc

SEQ ID NO: 555257 - RNA, 19 nt, Artificial Sequence
  Synthetic
ugcuauugauucacaauuc

SEQ ID NO: 555258 - RNA, 20 nt, Artificial Sequence
  Synthetic
cugcuauugauucacaauuc

SEQ ID NO: 555259 - RNA, 21 nt, Artificial Sequence
  Synthetic
acugcuauugauucacaauuc

SEQ ID NO: 555260 - RNA, 22 nt, Artificial Sequence
  Synthetic
cacugcuauugauucacaauuc

SEQ ID NO: 555261 - RNA, 23 nt, Artificial Sequence
  Synthetic
ccacugcuauugauucacaauuc

SEQ ID NO: 555262 - RNA, 24 nt, Artificial Sequence
  Synthetic
uccacugcuauugauucacaauuc

SEQ ID NO: 555263 - RNA, 18 nt, Artificial Sequence
  Synthetic
caauacaauguacaauuc

SEQ ID NO: 555264 - RNA, 19 nt, Artificial Sequence
  Synthetic
gcaauacaauguacaauuc

SEQ ID NO: 555265 - RNA, 20 nt, Artificial Sequence
  Synthetic
agcaauacaauguacaauuc

SEQ ID NO: 555266 - RNA, 21 nt, Artificial Sequence
  Synthetic
gagcaauacaauguacaauuc

SEQ ID NO: 555267 - RNA, 22 nt, Artificial Sequence
  Synthetic
agagcaauacaauguacaauuc

SEQ ID NO: 555268 - RNA, 23 nt, Artificial Sequence
  Synthetic
aagagcaauacaauguacaauuc

SEQ ID NO: 555269 - RNA, 24 nt, Artificial Sequence
  Synthetic
aaagagcaauacaauguacaauuc

SEQ ID NO: 555270 - RNA, 18 nt, Artificial Sequence
  Synthetic
acauuucugaaccaauuc

SEQ ID NO: 555271 - RNA, 19 nt, Artificial Sequence
  Synthetic
uacauuucugaaccaauuc

SEQ ID NO: 555272 - RNA, 20 nt, Artificial Sequence
  Synthetic
uuacauuucugaaccaauuc

SEQ ID NO: 555273 - RNA, 21 nt, Artificial Sequence
  Synthetic
guuacauuucugaaccaauuc

SEQ ID NO: 555274 - RNA, 22 nt, Artificial Sequence
  Synthetic
aguuacauuucugaaccaauuc

SEQ ID NO: 555275 - RNA, 23 nt, Artificial Sequence
  Synthetic
caguuacauuucugaaccaauuc

SEQ ID NO: 555276 - RNA, 24 nt, Artificial Sequence
  Synthetic
acaguuacauuucugaaccaauuc

SEQ ID NO: 555277 - RNA, 18 nt, Artificial Sequence
  Synthetic
cgugccacucuccaauuc

SEQ ID NO: 555278 - RNA, 19 nt, Artificial Sequence
  Synthetic
ucgugccacucuccaauuc

SEQ ID NO: 555279 - RNA, 20 nt, Artificial Sequence
  Synthetic
uucgugccacucuccaauuc

SEQ ID NO: 555280 - RNA, 21 nt, Artificial Sequence
  Synthetic
auucgugccacucuccaauuc

SEQ ID NO: 555281 - RNA, 22 nt, Artificial Sequence
  Synthetic
cauucgugccacucuccaauuc

SEQ ID NO: 555282 - RNA, 23 nt, Artificial Sequence
  Synthetic
acauucgugccacucuccaauuc

SEQ ID NO: 555283 - RNA, 24 nt, Artificial Sequence
  Synthetic
uacauucgugccacucuccaauuc

SEQ ID NO: 555284 - RNA, 18 nt, Artificial Sequence
  Synthetic
uauugagucuuccaauuc

SEQ ID NO: 555285 - RNA, 19 nt, Artificial Sequence
  Synthetic
guauugagucuuccaauuc

SEQ ID NO: 555286 - RNA, 20 nt, Artificial Sequence
  Synthetic
aguauugagucuuccaauuc

SEQ ID NO: 555287 - RNA, 21 nt, Artificial Sequence
  Synthetic
caguauugagucuuccaauuc

SEQ ID NO: 555288 - RNA, 22 nt, Artificial Sequence
  Synthetic
ucaguauugagucuuccaauuc

SEQ ID NO: 555289 - RNA, 23 nt, Artificial Sequence
  Synthetic
aucaguauugagucuuccaauuc

SEQ ID NO: 555290 - RNA, 24 nt, Artificial Sequence
  Synthetic
uaucaguauugagucuuccaauuc

SEQ ID NO: 555291 - RNA, 18 nt, Artificial Sequence
  Synthetic
uguacauguuggcaauuc

SEQ ID NO: 555292 - RNA, 19 nt, Artificial Sequence
  Synthetic
uuguacauguuggcaauuc

SEQ ID NO: 555293 - RNA, 20 nt, Artificial Sequence
  Synthetic
uuuguacauguuggcaauuc

SEQ ID NO: 555294 - RNA, 21 nt, Artificial Sequence
  Synthetic
uuuuguacauguuggcaauuc

SEQ ID NO: 555295 - RNA, 22 nt, Artificial Sequence
  Synthetic
guuuuguacauguuggcaauuc

SEQ ID NO: 555296 - RNA, 23 nt, Artificial Sequence
  Synthetic
gguuuuguacauguuggcaauuc

SEQ ID NO: 555297 - RNA, 24 nt, Artificial Sequence
  Synthetic
ugguuuuguacauguuggcaauuc

SEQ ID NO: 555298 - RNA, 18 nt, Artificial Sequence
  Synthetic
uucuccugucaucaauuc

SEQ ID NO: 555299 - RNA, 19 nt, Artificial Sequence
  Synthetic
auucuccugucaucaauuc

SEQ ID NO: 555300 - RNA, 20 nt, Artificial Sequence
  Synthetic
uauucuccugucaucaauuc

SEQ ID NO: 555301 - RNA, 21 nt, Artificial Sequence
  Synthetic
guauucuccugucaucaauuc

SEQ ID NO: 555302 - RNA, 22 nt, Artificial Sequence
  Synthetic
uguauucuccugucaucaauuc

SEQ ID NO: 555303 - RNA, 23 nt, Artificial Sequence
  Synthetic
auguauucuccugucaucaauuc

SEQ ID NO: 555304 - RNA, 24 nt, Artificial Sequence
  Synthetic
uauguauucuccugucaucaauuc

SEQ ID NO: 555305 - RNA, 18 nt, Artificial Sequence
  Synthetic
gaaaggugcagucaauuc

SEQ ID NO: 555306 - RNA, 19 nt, Artificial Sequence
  Synthetic
ugaaaggugcagucaauuc

SEQ ID NO: 555307 - RNA, 20 nt, Artificial Sequence
  Synthetic
uugaaaggugcagucaauuc

SEQ ID NO: 555308 - RNA, 21 nt, Artificial Sequence
  Synthetic
uuugaaaggugcagucaauuc

SEQ ID NO: 555309 - RNA, 22 nt, Artificial Sequence
  Synthetic
uuuugaaaggugcagucaauuc

SEQ ID NO: 555310 - RNA, 23 nt, Artificial Sequence
  Synthetic
guuuugaaaggugcagucaauuc

SEQ ID NO: 555311 - RNA, 24 nt, Artificial Sequence
  Synthetic
uguuuugaaaggugcagucaauuc

SEQ ID NO: 555312 - RNA, 18 nt, Artificial Sequence
  Synthetic
cagggacuuuuucaauuc

SEQ ID NO: 555313 - RNA, 19 nt, Artificial Sequence
  Synthetic
ccagggacuuuuucaauuc

SEQ ID NO: 555314 - RNA, 20 nt, Artificial Sequence
  Synthetic
uccagggacuuuuucaauuc

SEQ ID NO: 555315 - RNA, 21 nt, Artificial Sequence
  Synthetic
guccagggacuuuuucaauuc

SEQ ID NO: 555316 - RNA, 22 nt, Artificial Sequence
  Synthetic
uguccagggacuuuuucaauuc

SEQ ID NO: 555317 - RNA, 23 nt, Artificial Sequence
  Synthetic
auguccagggacuuuuucaauuc

SEQ ID NO: 555318 - RNA, 24 nt, Artificial Sequence
  Synthetic
aauguccagggacuuuuucaauuc

SEQ ID NO: 555319 - RNA, 18 nt, Artificial Sequence
  Synthetic
aggcucaggaaagaauuc

SEQ ID NO: 555320 - RNA, 19 nt, Artificial Sequence
  Synthetic
uaggcucaggaaagaauuc

SEQ ID NO: 555321 - RNA, 20 nt, Artificial Sequence
  Synthetic
auaggcucaggaaagaauuc

SEQ ID NO: 555322 - RNA, 21 nt, Artificial Sequence
  Synthetic
cauaggcucaggaaagaauuc

SEQ ID NO: 555323 - RNA, 22 nt, Artificial Sequence
  Synthetic
ucauaggcucaggaaagaauuc

SEQ ID NO: 555324 - RNA, 23 nt, Artificial Sequence
  Synthetic
gucauaggcucaggaaagaauuc

SEQ ID NO: 555325 - RNA, 24 nt, Artificial Sequence
  Synthetic
ggucauaggcucaggaaagaauuc

SEQ ID NO: 555326 - RNA, 18 nt, Artificial Sequence
  Synthetic
ugaauuccguaagaauuc

SEQ ID NO: 555327 - RNA, 19 nt, Artificial Sequence
  Synthetic
augaauuccguaagaauuc

SEQ ID NO: 555328 - RNA, 20 nt, Artificial Sequence
  Synthetic
aaugaauuccguaagaauuc

SEQ ID NO: 555329 - RNA, 21 nt, Artificial Sequence
  Synthetic
uaaugaauuccguaagaauuc

SEQ ID NO: 555330 - RNA, 22 nt, Artificial Sequence
  Synthetic
uuaaugaauuccguaagaauuc

SEQ ID NO: 555331 - RNA, 23 nt, Artificial Sequence
  Synthetic
auuaaugaauuccguaagaauuc

SEQ ID NO: 555332 - RNA, 24 nt, Artificial Sequence
  Synthetic
gauuaaugaauuccguaagaauuc

SEQ ID NO: 555333 - RNA, 18 nt, Artificial Sequence
  Synthetic
gguuaacuuagagaauuc

SEQ ID NO: 555334 - RNA, 19 nt, Artificial Sequence
  Synthetic
ggguuaacuuagagaauuc

SEQ ID NO: 555335 - RNA, 20 nt, Artificial Sequence
  Synthetic
uggguuaacuuagagaauuc

SEQ ID NO: 555336 - RNA, 21 nt, Artificial Sequence
  Synthetic
guggguuaacuuagagaauuc

SEQ ID NO: 555337 - RNA, 22 nt, Artificial Sequence
  Synthetic
gguggguuaacuuagagaauuc

SEQ ID NO: 555338 - RNA, 23 nt, Artificial Sequence
  Synthetic
agguggguuaacuuagagaauuc

SEQ ID NO: 555339 - RNA, 24 nt, Artificial Sequence
  Synthetic
uagguggguuaacuuagagaauuc

SEQ ID NO: 555340 - RNA, 18 nt, Artificial Sequence
  Synthetic
auuaaaaacguagaauuc

SEQ ID NO: 555341 - RNA, 19 nt, Artificial Sequence
  Synthetic
aauuaaaaacguagaauuc

SEQ ID NO: 555342 - RNA, 20 nt, Artificial Sequence
  Synthetic
uaauuaaaaacguagaauuc

SEQ ID NO: 555343 - RNA, 21 nt, Artificial Sequence
  Synthetic
uuaauuaaaaacguagaauuc

SEQ ID NO: 555344 - RNA, 22 nt, Artificial Sequence
  Synthetic
auuaauuaaaaacguagaauuc

SEQ ID NO: 555345 - RNA, 23 nt, Artificial Sequence
  Synthetic
uauuaauuaaaaacguagaauuc

SEQ ID NO: 555346 - RNA, 24 nt, Artificial Sequence
  Synthetic
cuauuaauuaaaaacguagaauuc

SEQ ID NO: 555347 - RNA, 18 nt, Artificial Sequence
  Synthetic
cuuuggaagguagaauuc

SEQ ID NO: 555348 - RNA, 19 nt, Artificial Sequence
  Synthetic
ccuuuggaagguagaauuc

SEQ ID NO: 555349 - RNA, 20 nt, Artificial Sequence
  Synthetic
accuuuggaagguagaauuc

SEQ ID NO: 555350 - RNA, 21 nt, Artificial Sequence
  Synthetic
uaccuuuggaagguagaauuc

SEQ ID NO: 555351 - RNA, 22 nt, Artificial Sequence
  Synthetic
cuaccuuuggaagguagaauuc

SEQ ID NO: 555352 - RNA, 23 nt, Artificial Sequence
  Synthetic
ccuaccuuuggaagguagaauuc

SEQ ID NO: 555353 - RNA, 24 nt, Artificial Sequence
  Synthetic
uccuaccuuuggaagguagaauuc

SEQ ID NO: 555354 - RNA, 18 nt, Artificial Sequence
  Synthetic
uaaagaagaaaggaauuc

SEQ ID NO: 555355 - RNA, 19 nt, Artificial Sequence
  Synthetic
guaaagaagaaaggaauuc

SEQ ID NO: 555356 - RNA, 20 nt, Artificial Sequence
  Synthetic
uguaaagaagaaaggaauuc

SEQ ID NO: 555357 - RNA, 21 nt, Artificial Sequence
  Synthetic
guguaaagaagaaaggaauuc

SEQ ID NO: 555358 - RNA, 22 nt, Artificial Sequence
  Synthetic
gguguaaagaagaaaggaauuc

SEQ ID NO: 555359 - RNA, 23 nt, Artificial Sequence
  Synthetic
ugguguaaagaagaaaggaauuc

SEQ ID NO: 555360 - RNA, 24 nt, Artificial Sequence
  Synthetic
uugguguaaagaagaaaggaauuc

SEQ ID NO: 555361 - RNA, 18 nt, Artificial Sequence
  Synthetic
aauaaaacuuaggaauuc

SEQ ID NO: 555362 - RNA, 19 nt, Artificial Sequence
  Synthetic
gaauaaaacuuaggaauuc

SEQ ID NO: 555363 - RNA, 20 nt, Artificial Sequence
  Synthetic
ggaauaaaacuuaggaauuc

SEQ ID NO: 555364 - RNA, 21 nt, Artificial Sequence
  Synthetic
aggaauaaaacuuaggaauuc

SEQ ID NO: 555365 - RNA, 22 nt, Artificial Sequence
  Synthetic
gaggaauaaaacuuaggaauuc

SEQ ID NO: 555366 - RNA, 23 nt, Artificial Sequence
  Synthetic
ggaggaauaaaacuuaggaauuc

SEQ ID NO: 555367 - RNA, 24 nt, Artificial Sequence
  Synthetic
aggaggaauaaaacuuaggaauuc

SEQ ID NO: 555368 - RNA, 18 nt, Artificial Sequence
  Synthetic
auugggauuacggaauuc

SEQ ID NO: 555369 - RNA, 19 nt, Artificial Sequence
  Synthetic
uauugggauuacggaauuc

SEQ ID NO: 555370 - RNA, 20 nt, Artificial Sequence
  Synthetic
cuauugggauuacggaauuc

SEQ ID NO: 555371 - RNA, 21 nt, Artificial Sequence
  Synthetic
gcuauugggauuacggaauuc

SEQ ID NO: 555372 - RNA, 22 nt, Artificial Sequence
  Synthetic
ugcuauugggauuacggaauuc

SEQ ID NO: 555373 - RNA, 23 nt, Artificial Sequence
  Synthetic
cugcuauugggauuacggaauuc

SEQ ID NO: 555374 - RNA, 24 nt, Artificial Sequence
  Synthetic
ccugcuauugggauuacggaauuc

SEQ ID NO: 555375 - RNA, 18 nt, Artificial Sequence
  Synthetic
aaguuacuuacugaauuc

SEQ ID NO: 555376 - RNA, 19 nt, Artificial Sequence
  Synthetic
gaaguuacuuacugaauuc

SEQ ID NO: 555377 - RNA, 20 nt, Artificial Sequence
  Synthetic
agaaguuacuuacugaauuc

SEQ ID NO: 555378 - RNA, 21 nt, Artificial Sequence
  Synthetic
aagaaguuacuuacugaauuc

SEQ ID NO: 555379 - RNA, 22 nt, Artificial Sequence
  Synthetic
uaagaaguuacuuacugaauuc

SEQ ID NO: 555380 - RNA, 23 nt, Artificial Sequence
  Synthetic
uuaagaaguuacuuacugaauuc

SEQ ID NO: 555381 - RNA, 24 nt, Artificial Sequence
  Synthetic
guuaagaaguuacuuacugaauuc

SEQ ID NO: 555382 - RNA, 18 nt, Artificial Sequence
  Synthetic
cguggcagccuugaauuc

SEQ ID NO: 555383 - RNA, 19 nt, Artificial Sequence
  Synthetic
ucguggcagccuugaauuc

SEQ ID NO: 555384 - RNA, 20 nt, Artificial Sequence
  Synthetic
cucguggcagccuugaauuc

SEQ ID NO: 555385 - RNA, 21 nt, Artificial Sequence
  Synthetic
gcucguggcagccuugaauuc

SEQ ID NO: 555386 - RNA, 22 nt, Artificial Sequence
  Synthetic
ggcucguggcagccuugaauuc

SEQ ID NO: 555387 - RNA, 23 nt, Artificial Sequence
  Synthetic
uggcucguggcagccuugaauuc

SEQ ID NO: 555388 - RNA, 24 nt, Artificial Sequence
  Synthetic
auggcucguggcagccuugaauuc

SEQ ID NO: 555389 - RNA, 18 nt, Artificial Sequence
  Synthetic
uacauugaaaaauaauuc

SEQ ID NO: 555390 - RNA, 19 nt, Artificial Sequence
  Synthetic
uuacauugaaaaauaauuc

SEQ ID NO: 555391 - RNA, 20 nt, Artificial Sequence
  Synthetic
guuacauugaaaaauaauuc

SEQ ID NO: 555392 - RNA, 21 nt, Artificial Sequence
  Synthetic
uguuacauugaaaaauaauuc

SEQ ID NO: 555393 - RNA, 22 nt, Artificial Sequence
  Synthetic
cuguuacauugaaaaauaauuc

SEQ ID NO: 555394 - RNA, 23 nt, Artificial Sequence
  Synthetic
ucuguuacauugaaaaauaauuc

SEQ ID NO: 555395 - RNA, 24 nt, Artificial Sequence
  Synthetic
uucuguuacauugaaaaauaauuc

SEQ ID NO: 555396 - RNA, 18 nt, Artificial Sequence
  Synthetic
cccuggaacacauaauuc

SEQ ID NO: 555397 - RNA, 19 nt, Artificial Sequence
  Synthetic
acccuggaacacauaauuc

SEQ ID NO: 555398 - RNA, 20 nt, Artificial Sequence
  Synthetic
gacccuggaacacauaauuc

SEQ ID NO: 555399 - RNA, 21 nt, Artificial Sequence
  Synthetic
ugacccuggaacacauaauuc

SEQ ID NO: 555400 - RNA, 22 nt, Artificial Sequence
  Synthetic
cugacccuggaacacauaauuc

SEQ ID NO: 555401 - RNA, 23 nt, Artificial Sequence
  Synthetic
acugacccuggaacacauaauuc

SEQ ID NO: 555402 - RNA, 24 nt, Artificial Sequence
  Synthetic
cacugacccuggaacacauaauuc

SEQ ID NO: 555403 - RNA, 18 nt, Artificial Sequence
  Synthetic
acacuuugaagauaauuc

SEQ ID NO: 555404 - RNA, 19 nt, Artificial Sequence
  Synthetic
aacacuuugaagauaauuc

SEQ ID NO: 555405 - RNA, 20 nt, Artificial Sequence
  Synthetic
uaacacuuugaagauaauuc

SEQ ID NO: 555406 - RNA, 21 nt, Artificial Sequence
  Synthetic
uuaacacuuugaagauaauuc

SEQ ID NO: 555407 - RNA, 22 nt, Artificial Sequence
  Synthetic
auuaacacuuugaagauaauuc

SEQ ID NO: 555408 - RNA, 23 nt, Artificial Sequence
  Synthetic
gauuaacacuuugaagauaauuc

SEQ ID NO: 555409 - RNA, 24 nt, Artificial Sequence
  Synthetic
cgauuaacacuuugaagauaauuc

SEQ ID NO: 555410 - RNA, 18 nt, Artificial Sequence
  Synthetic
aacuuaguuuuauaauuc

SEQ ID NO: 555411 - RNA, 19 nt, Artificial Sequence
  Synthetic
caacuuaguuuuauaauuc

SEQ ID NO: 555412 - RNA, 20 nt, Artificial Sequence
  Synthetic
ucaacuuaguuuuauaauuc

SEQ ID NO: 555413 - RNA, 21 nt, Artificial Sequence
  Synthetic
uucaacuuaguuuuauaauuc

SEQ ID NO: 555414 - RNA, 22 nt, Artificial Sequence
  Synthetic
cuucaacuuaguuuuauaauuc

SEQ ID NO: 555415 - RNA, 23 nt, Artificial Sequence
  Synthetic
acuucaacuuaguuuuauaauuc

SEQ ID NO: 555416 - RNA, 24 nt, Artificial Sequence
  Synthetic
gacuucaacuuaguuuuauaauuc

SEQ ID NO: 555417 - RNA, 18 nt, Artificial Sequence
  Synthetic
auggaaugcugcuaauuc

SEQ ID NO: 555418 - RNA, 19 nt, Artificial Sequence
  Synthetic
aauggaaugcugcuaauuc

SEQ ID NO: 555419 - RNA, 20 nt, Artificial Sequence
  Synthetic
caauggaaugcugcuaauuc

SEQ ID NO: 555420 - RNA, 21 nt, Artificial Sequence
  Synthetic
acaauggaaugcugcuaauuc

SEQ ID NO: 555421 - RNA, 22 nt, Artificial Sequence
  Synthetic
cacaauggaaugcugcuaauuc

SEQ ID NO: 555422 - RNA, 23 nt, Artificial Sequence
  Synthetic
ucacaauggaaugcugcuaauuc

SEQ ID NO: 555423 - RNA, 24 nt, Artificial Sequence
  Synthetic
uucacaauggaaugcugcuaauuc

SEQ ID NO: 555424 - RNA, 18 nt, Artificial Sequence
  Synthetic
auuuuuauuugcuaauuc

SEQ ID NO: 555425 - RNA, 19 nt, Artificial Sequence
  Synthetic
uauuuuuauuugcuaauuc

SEQ ID NO: 555426 - RNA, 20 nt, Artificial Sequence
  Synthetic
auauuuuuauuugcuaauuc

SEQ ID NO: 555427 - RNA, 21 nt, Artificial Sequence
  Synthetic
cauauuuuuauuugcuaauuc

SEQ ID NO: 555428 - RNA, 22 nt, Artificial Sequence
  Synthetic
ucauauuuuuauuugcuaauuc

SEQ ID NO: 555429 - RNA, 23 nt, Artificial Sequence
  Synthetic
uucauauuuuuauuugcuaauuc

SEQ ID NO: 555430 - RNA, 24 nt, Artificial Sequence
  Synthetic
uuucauauuuuuauuugcuaauuc

SEQ ID NO: 555431 - RNA, 18 nt, Artificial Sequence
  Synthetic
gagguaauguucuaauuc

SEQ ID NO: 555432 - RNA, 19 nt, Artificial Sequence
  Synthetic
ugagguaauguucuaauuc

SEQ ID NO: 555433 - RNA, 20 nt, Artificial Sequence
  Synthetic
cugagguaauguucuaauuc

SEQ ID NO: 555434 - RNA, 21 nt, Artificial Sequence
  Synthetic
ccugagguaauguucuaauuc

SEQ ID NO: 555435 - RNA, 22 nt, Artificial Sequence
  Synthetic
uccugagguaauguucuaauuc

SEQ ID NO: 555436 - RNA, 23 nt, Artificial Sequence
  Synthetic
cuccugagguaauguucuaauuc

SEQ ID NO: 555437 - RNA, 24 nt, Artificial Sequence
  Synthetic
gcuccugagguaauguucuaauuc

SEQ ID NO: 555438 - RNA, 18 nt, Artificial Sequence
  Synthetic
agccaccugaaguaauuc

SEQ ID NO: 555439 - RNA, 19 nt, Artificial Sequence
  Synthetic
aagccaccugaaguaauuc

SEQ ID NO: 555440 - RNA, 20 nt, Artificial Sequence
  Synthetic
aaagccaccugaaguaauuc

SEQ ID NO: 555441 - RNA, 21 nt, Artificial Sequence
  Synthetic
caaagccaccugaaguaauuc

SEQ ID NO: 555442 - RNA, 22 nt, Artificial Sequence
  Synthetic
ucaaagccaccugaaguaauuc

SEQ ID NO: 555443 - RNA, 23 nt, Artificial Sequence
  Synthetic
aucaaagccaccugaaguaauuc

SEQ ID NO: 555444 - RNA, 24 nt, Artificial Sequence
  Synthetic
aaucaaagccaccugaaguaauuc

SEQ ID NO: 555445 - RNA, 18 nt, Artificial Sequence
  Synthetic
uucucuacccaguaauuc

SEQ ID NO: 555446 - RNA, 19 nt, Artificial Sequence
  Synthetic
uuucucuacccaguaauuc

SEQ ID NO: 555447 - RNA, 20 nt, Artificial Sequence
  Synthetic
uuuucucuacccaguaauuc

SEQ ID NO: 555448 - RNA, 21 nt, Artificial Sequence
  Synthetic
cuuuucucuacccaguaauuc

SEQ ID NO: 555449 - RNA, 22 nt, Artificial Sequence
  Synthetic
gcuuuucucuacccaguaauuc

SEQ ID NO: 555450 - RNA, 23 nt, Artificial Sequence
  Synthetic
agcuuuucucuacccaguaauuc

SEQ ID NO: 555451 - RNA, 24 nt, Artificial Sequence
  Synthetic
cagcuuuucucuacccaguaauuc

SEQ ID NO: 555452 - RNA, 18 nt, Artificial Sequence
  Synthetic
gcaccauuucuguaauuc

SEQ ID NO: 555453 - RNA, 19 nt, Artificial Sequence
  Synthetic
agcaccauuucuguaauuc

SEQ ID NO: 555454 - RNA, 20 nt, Artificial Sequence
  Synthetic
cagcaccauuucuguaauuc

SEQ ID NO: 555455 - RNA, 21 nt, Artificial Sequence
  Synthetic
ucagcaccauuucuguaauuc

SEQ ID NO: 555456 - RNA, 22 nt, Artificial Sequence
  Synthetic
uucagcaccauuucuguaauuc

SEQ ID NO: 555457 - RNA, 23 nt, Artificial Sequence
  Synthetic
uuucagcaccauuucuguaauuc

SEQ ID NO: 555458 - RNA, 24 nt, Artificial Sequence
  Synthetic
auuucagcaccauuucuguaauuc

SEQ ID NO: 555459 - RNA, 18 nt, Artificial Sequence
  Synthetic
uuguaucagacuuaauuc

SEQ ID NO: 555460 - RNA, 19 nt, Artificial Sequence
  Synthetic
uuuguaucagacuuaauuc

SEQ ID NO: 555461 - RNA, 20 nt, Artificial Sequence
  Synthetic
auuuguaucagacuuaauuc

SEQ ID NO: 555462 - RNA, 21 nt, Artificial Sequence
  Synthetic
aauuuguaucagacuuaauuc

SEQ ID NO: 555463 - RNA, 22 nt, Artificial Sequence
  Synthetic
uaauuuguaucagacuuaauuc

SEQ ID NO: 555464 - RNA, 23 nt, Artificial Sequence
  Synthetic
auaauuuguaucagacuuaauuc

SEQ ID NO: 555465 - RNA, 24 nt, Artificial Sequence
  Synthetic
aauaauuuguaucagacuuaauuc

SEQ ID NO: 555466 - RNA, 18 nt, Artificial Sequence
  Synthetic
cagcaacuagcuuaauuc

SEQ ID NO: 555467 - RNA, 19 nt, Artificial Sequence
  Synthetic
ucagcaacuagcuuaauuc

SEQ ID NO: 555468 - RNA, 20 nt, Artificial Sequence
  Synthetic
cucagcaacuagcuuaauuc

SEQ ID NO: 555469 - RNA, 21 nt, Artificial Sequence
  Synthetic
ucucagcaacuagcuuaauuc

SEQ ID NO: 555470 - RNA, 22 nt, Artificial Sequence
  Synthetic
cucucagcaacuagcuuaauuc

SEQ ID NO: 555471 - RNA, 23 nt, Artificial Sequence
  Synthetic
ccucucagcaacuagcuuaauuc

SEQ ID NO: 555472 - RNA, 24 nt, Artificial Sequence
  Synthetic
cccucucagcaacuagcuuaauuc

SEQ ID NO: 555473 - RNA, 18 nt, Artificial Sequence
  Synthetic
augccucuugcuuaauuc

SEQ ID NO: 555474 - RNA, 19 nt, Artificial Sequence
  Synthetic
aaugccucuugcuuaauuc

SEQ ID NO: 555475 - RNA, 20 nt, Artificial Sequence
  Synthetic
aaaugccucuugcuuaauuc

SEQ ID NO: 555476 - RNA, 21 nt, Artificial Sequence
  Synthetic
caaaugccucuugcuuaauuc

SEQ ID NO: 555477 - RNA, 22 nt, Artificial Sequence
  Synthetic
ucaaaugccucuugcuuaauuc

SEQ ID NO: 555478 - RNA, 23 nt, Artificial Sequence
  Synthetic
aucaaaugccucuugcuuaauuc

SEQ ID NO: 555479 - RNA, 24 nt, Artificial Sequence
  Synthetic
aaucaaaugccucuugcuuaauuc

SEQ ID NO: 555480 - RNA, 18 nt, Artificial Sequence
  Synthetic
aagcccagagguuaauuc

SEQ ID NO: 555481 - RNA, 19 nt, Artificial Sequence
  Synthetic
caagcccagagguuaauuc

SEQ ID NO: 555482 - RNA, 20 nt, Artificial Sequence
  Synthetic
ccaagcccagagguuaauuc

SEQ ID NO: 555483 - RNA, 21 nt, Artificial Sequence
  Synthetic
accaagcccagagguuaauuc

SEQ ID NO: 555484 - RNA, 22 nt, Artificial Sequence
  Synthetic
aaccaagcccagagguuaauuc

SEQ ID NO: 555485 - RNA, 23 nt, Artificial Sequence
  Synthetic
gaaccaagcccagagguuaauuc

SEQ ID NO: 555486 - RNA, 24 nt, Artificial Sequence
  Synthetic
ggaaccaagcccagagguuaauuc

SEQ ID NO: 555487 - RNA, 18 nt, Artificial Sequence
  Synthetic
aauauauuuuuuuaauuc

SEQ ID NO: 555488 - RNA, 19 nt, Artificial Sequence
  Synthetic
aaauauauuuuuuuaauuc

SEQ ID NO: 555489 - RNA, 20 nt, Artificial Sequence
  Synthetic
aaaauauauuuuuuuaauuc

SEQ ID NO: 555490 - RNA, 21 nt, Artificial Sequence
  Synthetic
aaaaauauauuuuuuuaauuc

SEQ ID NO: 555491 - RNA, 22 nt, Artificial Sequence
  Synthetic
uaaaaauauauuuuuuuaauuc

SEQ ID NO: 555492 - RNA, 23 nt, Artificial Sequence
  Synthetic
cuaaaaauauauuuuuuuaauuc

SEQ ID NO: 555493 - RNA, 24 nt, Artificial Sequence
  Synthetic
ccuaaaaauauauuuuuuuaauuc

SEQ ID NO: 555494 - RNA, 18 nt, Artificial Sequence
  Synthetic
ccauggagaaaaacauuc

SEQ ID NO: 555495 - RNA, 19 nt, Artificial Sequence
  Synthetic
cccauggagaaaaacauuc

SEQ ID NO: 555496 - RNA, 20 nt, Artificial Sequence
  Synthetic
acccauggagaaaaacauuc

SEQ ID NO: 555497 - RNA, 21 nt, Artificial Sequence
  Synthetic
cacccauggagaaaaacauuc

SEQ ID NO: 555498 - RNA, 22 nt, Artificial Sequence
  Synthetic
gcacccauggagaaaaacauuc

SEQ ID NO: 555499 - RNA, 23 nt, Artificial Sequence
  Synthetic
agcacccauggagaaaaacauuc

SEQ ID NO: 555500 - RNA, 24 nt, Artificial Sequence
  Synthetic
aagcacccauggagaaaaacauuc

SEQ ID NO: 555501 - RNA, 18 nt, Artificial Sequence
  Synthetic
ugagagaugaaaacauuc

SEQ ID NO: 555502 - RNA, 19 nt, Artificial Sequence
  Synthetic
uugagagaugaaaacauuc

SEQ ID NO: 555503 - RNA, 20 nt, Artificial Sequence
  Synthetic
uuugagagaugaaaacauuc

SEQ ID NO: 555504 - RNA, 21 nt, Artificial Sequence
  Synthetic
auuugagagaugaaaacauuc

SEQ ID NO: 555505 - RNA, 22 nt, Artificial Sequence
  Synthetic
gauuugagagaugaaaacauuc

SEQ ID NO: 555506 - RNA, 23 nt, Artificial Sequence
  Synthetic
ggauuugagagaugaaaacauuc

SEQ ID NO: 555507 - RNA, 24 nt, Artificial Sequence
  Synthetic
cggauuugagagaugaaaacauuc

SEQ ID NO: 555508 - RNA, 18 nt, Artificial Sequence
  Synthetic
agaugccaugaaacauuc

SEQ ID NO: 555509 - RNA, 19 nt, Artificial Sequence
  Synthetic
gagaugccaugaaacauuc

SEQ ID NO: 555510 - RNA, 20 nt, Artificial Sequence
  Synthetic
ggagaugccaugaaacauuc

SEQ ID NO: 555511 - RNA, 21 nt, Artificial Sequence
  Synthetic
cggagaugccaugaaacauuc

SEQ ID NO: 555512 - RNA, 22 nt, Artificial Sequence
  Synthetic
gcggagaugccaugaaacauuc

SEQ ID NO: 555513 - RNA, 23 nt, Artificial Sequence
  Synthetic
ugcggagaugccaugaaacauuc

SEQ ID NO: 555514 - RNA, 24 nt, Artificial Sequence
  Synthetic
uugcggagaugccaugaaacauuc

SEQ ID NO: 555515 - RNA, 18 nt, Artificial Sequence
  Synthetic
augcagcaaagaacauuc

SEQ ID NO: 555516 - RNA, 19 nt, Artificial Sequence
  Synthetic
gaugcagcaaagaacauuc

SEQ ID NO: 555517 - RNA, 20 nt, Artificial Sequence
  Synthetic
agaugcagcaaagaacauuc

SEQ ID NO: 555518 - RNA, 21 nt, Artificial Sequence
  Synthetic
gagaugcagcaaagaacauuc

SEQ ID NO: 555519 - RNA, 22 nt, Artificial Sequence
  Synthetic
agagaugcagcaaagaacauuc

SEQ ID NO: 555520 - RNA, 23 nt, Artificial Sequence
  Synthetic
aagagaugcagcaaagaacauuc

SEQ ID NO: 555521 - RNA, 24 nt, Artificial Sequence
  Synthetic
uaagagaugcagcaaagaacauuc

SEQ ID NO: 555522 - RNA, 18 nt, Artificial Sequence
  Synthetic
acaauuuacagaacauuc

SEQ ID NO: 555523 - RNA, 19 nt, Artificial Sequence
  Synthetic
uacaauuuacagaacauuc

SEQ ID NO: 555524 - RNA, 20 nt, Artificial Sequence
  Synthetic
cuacaauuuacagaacauuc

SEQ ID NO: 555525 - RNA, 21 nt, Artificial Sequence
  Synthetic
ucuacaauuuacagaacauuc

SEQ ID NO: 555526 - RNA, 22 nt, Artificial Sequence
  Synthetic
aucuacaauuuacagaacauuc

SEQ ID NO: 555527 - RNA, 23 nt, Artificial Sequence
  Synthetic
caucuacaauuuacagaacauuc

SEQ ID NO: 555528 - RNA, 24 nt, Artificial Sequence
  Synthetic
ucaucuacaauuuacagaacauuc

SEQ ID NO: 555529 - RNA, 18 nt, Artificial Sequence
  Synthetic
cucuaaguccuaacauuc

SEQ ID NO: 555530 - RNA, 19 nt, Artificial Sequence
  Synthetic
gcucuaaguccuaacauuc

SEQ ID NO: 555531 - RNA, 20 nt, Artificial Sequence
  Synthetic
ggcucuaaguccuaacauuc

SEQ ID NO: 555532 - RNA, 21 nt, Artificial Sequence
  Synthetic
aggcucuaaguccuaacauuc

SEQ ID NO: 555533 - RNA, 22 nt, Artificial Sequence
  Synthetic
gaggcucuaaguccuaacauuc

SEQ ID NO: 555534 - RNA, 23 nt, Artificial Sequence
  Synthetic
agaggcucuaaguccuaacauuc

SEQ ID NO: 555535 - RNA, 24 nt, Artificial Sequence
  Synthetic
uagaggcucuaaguccuaacauuc

SEQ ID NO: 555536 - RNA, 18 nt, Artificial Sequence
  Synthetic
aagagucucaacacauuc

SEQ ID NO: 555537 - RNA, 19 nt, Artificial Sequence
  Synthetic
gaagagucucaacacauuc

SEQ ID NO: 555538 - RNA, 20 nt, Artificial Sequence
  Synthetic
agaagagucucaacacauuc

SEQ ID NO: 555539 - RNA, 21 nt, Artificial Sequence
  Synthetic
cagaagagucucaacacauuc

SEQ ID NO: 555540 - RNA, 22 nt, Artificial Sequence
  Synthetic
ucagaagagucucaacacauuc

SEQ ID NO: 555541 - RNA, 23 nt, Artificial Sequence
  Synthetic
uucagaagagucucaacacauuc

SEQ ID NO: 555542 - RNA, 24 nt, Artificial Sequence
  Synthetic
auucagaagagucucaacacauuc

SEQ ID NO: 555543 - RNA, 18 nt, Artificial Sequence
  Synthetic
cacagcaccagcacauuc

SEQ ID NO: 555544 - RNA, 19 nt, Artificial Sequence
  Synthetic
ccacagcaccagcacauuc

SEQ ID NO: 555545 - RNA, 20 nt, Artificial Sequence
  Synthetic
cccacagcaccagcacauuc

SEQ ID NO: 555546 - RNA, 21 nt, Artificial Sequence
  Synthetic
gcccacagcaccagcacauuc

SEQ ID NO: 555547 - RNA, 22 nt, Artificial Sequence
  Synthetic
ggcccacagcaccagcacauuc

SEQ ID NO: 555548 - RNA, 23 nt, Artificial Sequence
  Synthetic
uggcccacagcaccagcacauuc

SEQ ID NO: 555549 - RNA, 24 nt, Artificial Sequence
  Synthetic
uuggcccacagcaccagcacauuc

SEQ ID NO: 555550 - RNA, 18 nt, Artificial Sequence
  Synthetic
cugacaacuuucacauuc

SEQ ID NO: 555551 - RNA, 19 nt, Artificial Sequence
  Synthetic
acugacaacuuucacauuc

SEQ ID NO: 555552 - RNA, 20 nt, Artificial Sequence
  Synthetic
gacugacaacuuucacauuc

SEQ ID NO: 555553 - RNA, 21 nt, Artificial Sequence
  Synthetic
agacugacaacuuucacauuc

SEQ ID NO: 555554 - RNA, 22 nt, Artificial Sequence
  Synthetic
uagacugacaacuuucacauuc

SEQ ID NO: 555555 - RNA, 23 nt, Artificial Sequence
  Synthetic
auagacugacaacuuucacauuc

SEQ ID NO: 555556 - RNA, 24 nt, Artificial Sequence
  Synthetic
uauagacugacaacuuucacauuc

SEQ ID NO: 555557 - RNA, 18 nt, Artificial Sequence
  Synthetic
aguguuguuuucacauuc

SEQ ID NO: 555558 - RNA, 19 nt, Artificial Sequence
  Synthetic
aaguguuguuuucacauuc

SEQ ID NO: 555559 - RNA, 20 nt, Artificial Sequence
  Synthetic
uaaguguuguuuucacauuc

SEQ ID NO: 555560 - RNA, 21 nt, Artificial Sequence
  Synthetic
guaaguguuguuuucacauuc

SEQ ID NO: 555561 - RNA, 22 nt, Artificial Sequence
  Synthetic
aguaaguguuguuuucacauuc

SEQ ID NO: 555562 - RNA, 23 nt, Artificial Sequence
  Synthetic
aaguaaguguuguuuucacauuc

SEQ ID NO: 555563 - RNA, 24 nt, Artificial Sequence
  Synthetic
aaaguaaguguuguuuucacauuc

SEQ ID NO: 555564 - RNA, 18 nt, Artificial Sequence
  Synthetic
ggggaaaauaagacauuc

SEQ ID NO: 555565 - RNA, 19 nt, Artificial Sequence
  Synthetic
uggggaaaauaagacauuc

SEQ ID NO: 555566 - RNA, 20 nt, Artificial Sequence
  Synthetic
auggggaaaauaagacauuc

SEQ ID NO: 555567 - RNA, 21 nt, Artificial Sequence
  Synthetic
gauggggaaaauaagacauuc

SEQ ID NO: 555568 - RNA, 22 nt, Artificial Sequence
  Synthetic
agauggggaaaauaagacauuc

SEQ ID NO: 555569 - RNA, 23 nt, Artificial Sequence
  Synthetic
aagauggggaaaauaagacauuc

SEQ ID NO: 555570 - RNA, 24 nt, Artificial Sequence
  Synthetic
aaagauggggaaaauaagacauuc

SEQ ID NO: 555571 - RNA, 18 nt, Artificial Sequence
  Synthetic
aauugaaauaagacauuc

SEQ ID NO: 555572 - RNA, 19 nt, Artificial Sequence
  Synthetic
aaauugaaauaagacauuc

SEQ ID NO: 555573 - RNA, 20 nt, Artificial Sequence
  Synthetic
gaaauugaaauaagacauuc

SEQ ID NO: 555574 - RNA, 21 nt, Artificial Sequence
  Synthetic
ugaaauugaaauaagacauuc

SEQ ID NO: 555575 - RNA, 22 nt, Artificial Sequence
  Synthetic
augaaauugaaauaagacauuc

SEQ ID NO: 555576 - RNA, 23 nt, Artificial Sequence
  Synthetic
caugaaauugaaauaagacauuc

SEQ ID NO: 555577 - RNA, 24 nt, Artificial Sequence
  Synthetic
gcaugaaauugaaauaagacauuc

SEQ ID NO: 555578 - RNA, 18 nt, Artificial Sequence
  Synthetic
gaggaaauggauacauuc

SEQ ID NO: 555579 - RNA, 19 nt, Artificial Sequence
  Synthetic
agaggaaauggauacauuc

SEQ ID NO: 555580 - RNA, 20 nt, Artificial Sequence
  Synthetic
uagaggaaauggauacauuc

SEQ ID NO: 555581 - RNA, 21 nt, Artificial Sequence
  Synthetic
cuagaggaaauggauacauuc

SEQ ID NO: 555582 - RNA, 22 nt, Artificial Sequence
  Synthetic
ucuagaggaaauggauacauuc

SEQ ID NO: 555583 - RNA, 23 nt, Artificial Sequence
  Synthetic
aucuagaggaaauggauacauuc

SEQ ID NO: 555584 - RNA, 24 nt, Artificial Sequence
  Synthetic
aaucuagaggaaauggauacauuc

SEQ ID NO: 555585 - RNA, 18 nt, Artificial Sequence
  Synthetic
augugucauaguacauuc

SEQ ID NO: 555586 - RNA, 19 nt, Artificial Sequence
  Synthetic
gaugugucauaguacauuc

SEQ ID NO: 555587 - RNA, 20 nt, Artificial Sequence
  Synthetic
ggaugugucauaguacauuc

SEQ ID NO: 555588 - RNA, 21 nt, Artificial Sequence
  Synthetic
uggaugugucauaguacauuc

SEQ ID NO: 555589 - RNA, 22 nt, Artificial Sequence
  Synthetic
auggaugugucauaguacauuc

SEQ ID NO: 555590 - RNA, 23 nt, Artificial Sequence
  Synthetic
cauggaugugucauaguacauuc

SEQ ID NO: 555591 - RNA, 24 nt, Artificial Sequence
  Synthetic
ccauggaugugucauaguacauuc

SEQ ID NO: 555592 - RNA, 18 nt, Artificial Sequence
  Synthetic
uuuaugucucuuacauuc

SEQ ID NO: 555593 - RNA, 19 nt, Artificial Sequence
  Synthetic
auuuaugucucuuacauuc

SEQ ID NO: 555594 - RNA, 20 nt, Artificial Sequence
  Synthetic
gauuuaugucucuuacauuc

SEQ ID NO: 555595 - RNA, 21 nt, Artificial Sequence
  Synthetic
ugauuuaugucucuuacauuc

SEQ ID NO: 555596 - RNA, 22 nt, Artificial Sequence
  Synthetic
augauuuaugucucuuacauuc

SEQ ID NO: 555597 - RNA, 23 nt, Artificial Sequence
  Synthetic
aaugauuuaugucucuuacauuc

SEQ ID NO: 555598 - RNA, 24 nt, Artificial Sequence
  Synthetic
aaaugauuuaugucucuuacauuc

SEQ ID NO: 555599 - RNA, 18 nt, Artificial Sequence
  Synthetic
caccuguuucuuacauuc

SEQ ID NO: 555600 - RNA, 19 nt, Artificial Sequence
  Synthetic
gcaccuguuucuuacauuc

SEQ ID NO: 555601 - RNA, 20 nt, Artificial Sequence
  Synthetic
ugcaccuguuucuuacauuc

SEQ ID NO: 555602 - RNA, 21 nt, Artificial Sequence
  Synthetic
cugcaccuguuucuuacauuc

SEQ ID NO: 555603 - RNA, 22 nt, Artificial Sequence
  Synthetic
acugcaccuguuucuuacauuc

SEQ ID NO: 555604 - RNA, 23 nt, Artificial Sequence
  Synthetic
cacugcaccuguuucuuacauuc

SEQ ID NO: 555605 - RNA, 24 nt, Artificial Sequence
  Synthetic
ucacugcaccuguuucuuacauuc

SEQ ID NO: 555606 - RNA, 18 nt, Artificial Sequence
  Synthetic
uuaaauggauuuacauuc

SEQ ID NO: 555607 - RNA, 19 nt, Artificial Sequence
  Synthetic
guuaaauggauuuacauuc

SEQ ID NO: 555608 - RNA, 20 nt, Artificial Sequence
  Synthetic
uguuaaauggauuuacauuc

SEQ ID NO: 555609 - RNA, 21 nt, Artificial Sequence
  Synthetic
auguuaaauggauuuacauuc

SEQ ID NO: 555610 - RNA, 22 nt, Artificial Sequence
  Synthetic
uauguuaaauggauuuacauuc

SEQ ID NO: 555611 - RNA, 23 nt, Artificial Sequence
  Synthetic
auauguuaaauggauuuacauuc

SEQ ID NO: 555612 - RNA, 24 nt, Artificial Sequence
  Synthetic
uauauguuaaauggauuuacauuc

SEQ ID NO: 555613 - RNA, 18 nt, Artificial Sequence
  Synthetic
gauccuguauuuacauuc

SEQ ID NO: 555614 - RNA, 19 nt, Artificial Sequence
  Synthetic
ggauccuguauuuacauuc

SEQ ID NO: 555615 - RNA, 20 nt, Artificial Sequence
  Synthetic
uggauccuguauuuacauuc

SEQ ID NO: 555616 - RNA, 21 nt, Artificial Sequence
  Synthetic
uuggauccuguauuuacauuc

SEQ ID NO: 555617 - RNA, 22 nt, Artificial Sequence
  Synthetic
cuuggauccuguauuuacauuc

SEQ ID NO: 555618 - RNA, 23 nt, Artificial Sequence
  Synthetic
ccuuggauccuguauuuacauuc

SEQ ID NO: 555619 - RNA, 24 nt, Artificial Sequence
  Synthetic
uccuuggauccuguauuuacauuc

SEQ ID NO: 555620 - RNA, 18 nt, Artificial Sequence
  Synthetic
auuauuugaaaaccauuc

SEQ ID NO: 555621 - RNA, 19 nt, Artificial Sequence
  Synthetic
cauuauuugaaaaccauuc

SEQ ID NO: 555622 - RNA, 20 nt, Artificial Sequence
  Synthetic
ucauuauuugaaaaccauuc

SEQ ID NO: 555623 - RNA, 21 nt, Artificial Sequence
  Synthetic
uucauuauuugaaaaccauuc

SEQ ID NO: 555624 - RNA, 22 nt, Artificial Sequence
  Synthetic
uuucauuauuugaaaaccauuc

SEQ ID NO: 555625 - RNA, 23 nt, Artificial Sequence
  Synthetic
uuuucauuauuugaaaaccauuc

SEQ ID NO: 555626 - RNA, 24 nt, Artificial Sequence
  Synthetic
guuuucauuauuugaaaaccauuc

SEQ ID NO: 555627 - RNA, 18 nt, Artificial Sequence
  Synthetic
acuagauauguaccauuc

SEQ ID NO: 555628 - RNA, 19 nt, Artificial Sequence
  Synthetic
gacuagauauguaccauuc

SEQ ID NO: 555629 - RNA, 20 nt, Artificial Sequence
  Synthetic
agacuagauauguaccauuc

SEQ ID NO: 555630 - RNA, 21 nt, Artificial Sequence
  Synthetic
uagacuagauauguaccauuc

SEQ ID NO: 555631 - RNA, 22 nt, Artificial Sequence
  Synthetic
auagacuagauauguaccauuc

SEQ ID NO: 555632 - RNA, 23 nt, Artificial Sequence
  Synthetic
cauagacuagauauguaccauuc

SEQ ID NO: 555633 - RNA, 24 nt, Artificial Sequence
  Synthetic
ucauagacuagauauguaccauuc

SEQ ID NO: 555634 - RNA, 18 nt, Artificial Sequence
  Synthetic
cauucuuagaacccauuc

SEQ ID NO: 555635 - RNA, 19 nt, Artificial Sequence
  Synthetic
ucauucuuagaacccauuc

SEQ ID NO: 555636 - RNA, 20 nt, Artificial Sequence
  Synthetic
cucauucuuagaacccauuc

SEQ ID NO: 555637 - RNA, 21 nt, Artificial Sequence
  Synthetic
ccucauucuuagaacccauuc

SEQ ID NO: 555638 - RNA, 22 nt, Artificial Sequence
  Synthetic
uccucauucuuagaacccauuc

SEQ ID NO: 555639 - RNA, 23 nt, Artificial Sequence
  Synthetic
uuccucauucuuagaacccauuc

SEQ ID NO: 555640 - RNA, 24 nt, Artificial Sequence
  Synthetic
uuuccucauucuuagaacccauuc

SEQ ID NO: 555641 - RNA, 18 nt, Artificial Sequence
  Synthetic
caaggucagcauccauuc

SEQ ID NO: 555642 - RNA, 19 nt, Artificial Sequence
  Synthetic
acaaggucagcauccauuc

SEQ ID NO: 555643 - RNA, 20 nt, Artificial Sequence
  Synthetic
gacaaggucagcauccauuc

SEQ ID NO: 555644 - RNA, 21 nt, Artificial Sequence
  Synthetic
ugacaaggucagcauccauuc

SEQ ID NO: 555645 - RNA, 22 nt, Artificial Sequence
  Synthetic
augacaaggucagcauccauuc

SEQ ID NO: 555646 - RNA, 23 nt, Artificial Sequence
  Synthetic
aaugacaaggucagcauccauuc

SEQ ID NO: 555647 - RNA, 24 nt, Artificial Sequence
  Synthetic
caaugacaaggucagcauccauuc

SEQ ID NO: 555648 - RNA, 18 nt, Artificial Sequence
  Synthetic
cuaagcagcaaagcauuc

SEQ ID NO: 555649 - RNA, 19 nt, Artificial Sequence
  Synthetic
ucuaagcagcaaagcauuc

SEQ ID NO: 555650 - RNA, 20 nt, Artificial Sequence
  Synthetic
uucuaagcagcaaagcauuc

SEQ ID NO: 555651 - RNA, 21 nt, Artificial Sequence
  Synthetic
uuucuaagcagcaaagcauuc

SEQ ID NO: 555652 - RNA, 22 nt, Artificial Sequence
  Synthetic
auuucuaagcagcaaagcauuc

SEQ ID NO: 555653 - RNA, 23 nt, Artificial Sequence
  Synthetic
aauuucuaagcagcaaagcauuc

SEQ ID NO: 555654 - RNA, 24 nt, Artificial Sequence
  Synthetic
aaauuucuaagcagcaaagcauuc

SEQ ID NO: 555655 - RNA, 18 nt, Artificial Sequence
  Synthetic
agguagaaacaagcauuc

SEQ ID NO: 555656 - RNA, 19 nt, Artificial Sequence
  Synthetic
aagguagaaacaagcauuc

SEQ ID NO: 555657 - RNA, 20 nt, Artificial Sequence
  Synthetic
aaagguagaaacaagcauuc

SEQ ID NO: 555658 - RNA, 21 nt, Artificial Sequence
  Synthetic
uaaagguagaaacaagcauuc

SEQ ID NO: 555659 - RNA, 22 nt, Artificial Sequence
  Synthetic
uuaaagguagaaacaagcauuc

SEQ ID NO: 555660 - RNA, 23 nt, Artificial Sequence
  Synthetic
uuuaaagguagaaacaagcauuc

SEQ ID NO: 555661 - RNA, 24 nt, Artificial Sequence
  Synthetic
auuuaaagguagaaacaagcauuc

SEQ ID NO: 555662 - RNA, 18 nt, Artificial Sequence
  Synthetic
acaucaaaaauagcauuc

SEQ ID NO: 555663 - RNA, 19 nt, Artificial Sequence
  Synthetic
gacaucaaaaauagcauuc

SEQ ID NO: 555664 - RNA, 20 nt, Artificial Sequence
  Synthetic
agacaucaaaaauagcauuc

SEQ ID NO: 555665 - RNA, 21 nt, Artificial Sequence
  Synthetic
gagacaucaaaaauagcauuc

SEQ ID NO: 555666 - RNA, 22 nt, Artificial Sequence
  Synthetic
agagacaucaaaaauagcauuc

SEQ ID NO: 555667 - RNA, 23 nt, Artificial Sequence
  Synthetic
uagagacaucaaaaauagcauuc

SEQ ID NO: 555668 - RNA, 24 nt, Artificial Sequence
  Synthetic
guagagacaucaaaaauagcauuc

SEQ ID NO: 555669 - RNA, 18 nt, Artificial Sequence
  Synthetic
auuauuuuucaugcauuc

SEQ ID NO: 555670 - RNA, 19 nt, Artificial Sequence
  Synthetic
uauuauuuuucaugcauuc

SEQ ID NO: 555671 - RNA, 20 nt, Artificial Sequence
  Synthetic
uuauuauuuuucaugcauuc

SEQ ID NO: 555672 - RNA, 21 nt, Artificial Sequence
  Synthetic
uuuauuauuuuucaugcauuc

SEQ ID NO: 555673 - RNA, 22 nt, Artificial Sequence
  Synthetic
auuuauuauuuuucaugcauuc

SEQ ID NO: 555674 - RNA, 23 nt, Artificial Sequence
  Synthetic
cauuuauuauuuuucaugcauuc

SEQ ID NO: 555675 - RNA, 24 nt, Artificial Sequence
  Synthetic
acauuuauuauuuuucaugcauuc

SEQ ID NO: 555676 - RNA, 18 nt, Artificial Sequence
  Synthetic
cauucauuaccugcauuc

SEQ ID NO: 555677 - RNA, 19 nt, Artificial Sequence
  Synthetic
acauucauuaccugcauuc

SEQ ID NO: 555678 - RNA, 20 nt, Artificial Sequence
  Synthetic
cacauucauuaccugcauuc

SEQ ID NO: 555679 - RNA, 21 nt, Artificial Sequence
  Synthetic
acacauucauuaccugcauuc

SEQ ID NO: 555680 - RNA, 22 nt, Artificial Sequence
  Synthetic
aacacauucauuaccugcauuc

SEQ ID NO: 555681 - RNA, 23 nt, Artificial Sequence
  Synthetic
aaacacauucauuaccugcauuc

SEQ ID NO: 555682 - RNA, 24 nt, Artificial Sequence
  Synthetic
aaaacacauucauuaccugcauuc

SEQ ID NO: 555683 - RNA, 18 nt, Artificial Sequence
  Synthetic
ucuauaauugcugcauuc

SEQ ID NO: 555684 - RNA, 19 nt, Artificial Sequence
  Synthetic
uucuauaauugcugcauuc

SEQ ID NO: 555685 - RNA, 20 nt, Artificial Sequence
  Synthetic
guucuauaauugcugcauuc

SEQ ID NO: 555686 - RNA, 21 nt, Artificial Sequence
  Synthetic
uguucuauaauugcugcauuc

SEQ ID NO: 555687 - RNA, 22 nt, Artificial Sequence
  Synthetic
uuguucuauaauugcugcauuc

SEQ ID NO: 555688 - RNA, 23 nt, Artificial Sequence
  Synthetic
auuguucuauaauugcugcauuc

SEQ ID NO: 555689 - RNA, 24 nt, Artificial Sequence
  Synthetic
aauuguucuauaauugcugcauuc

SEQ ID NO: 555690 - RNA, 18 nt, Artificial Sequence
  Synthetic
uacuucaacugugcauuc

SEQ ID NO: 555691 - RNA, 19 nt, Artificial Sequence
  Synthetic
guacuucaacugugcauuc

SEQ ID NO: 555692 - RNA, 20 nt, Artificial Sequence
  Synthetic
cguacuucaacugugcauuc

SEQ ID NO: 555693 - RNA, 21 nt, Artificial Sequence
  Synthetic
ucguacuucaacugugcauuc

SEQ ID NO: 555694 - RNA, 22 nt, Artificial Sequence
  Synthetic
aucguacuucaacugugcauuc

SEQ ID NO: 555695 - RNA, 23 nt, Artificial Sequence
  Synthetic
aaucguacuucaacugugcauuc

SEQ ID NO: 555696 - RNA, 24 nt, Artificial Sequence
  Synthetic
aaaucguacuucaacugugcauuc

SEQ ID NO: 555697 - RNA, 18 nt, Artificial Sequence
  Synthetic
uuguguuugugugcauuc

SEQ ID NO: 555698 - RNA, 19 nt, Artificial Sequence
  Synthetic
cuuguguuugugugcauuc

SEQ ID NO: 555699 - RNA, 20 nt, Artificial Sequence
  Synthetic
gcuuguguuugugugcauuc

SEQ ID NO: 555700 - RNA, 21 nt, Artificial Sequence
  Synthetic
ugcuuguguuugugugcauuc

SEQ ID NO: 555701 - RNA, 22 nt, Artificial Sequence
  Synthetic
augcuuguguuugugugcauuc

SEQ ID NO: 555702 - RNA, 23 nt, Artificial Sequence
  Synthetic
uaugcuuguguuugugugcauuc

SEQ ID NO: 555703 - RNA, 24 nt, Artificial Sequence
  Synthetic
auaugcuuguguuugugugcauuc

SEQ ID NO: 555704 - RNA, 18 nt, Artificial Sequence
  Synthetic
agcccaagucuugcauuc

SEQ ID NO: 555705 - RNA, 19 nt, Artificial Sequence
  Synthetic
uagcccaagucuugcauuc

SEQ ID NO: 555706 - RNA, 20 nt, Artificial Sequence
  Synthetic
auagcccaagucuugcauuc

SEQ ID NO: 555707 - RNA, 21 nt, Artificial Sequence
  Synthetic
uauagcccaagucuugcauuc

SEQ ID NO: 555708 - RNA, 22 nt, Artificial Sequence
  Synthetic
guauagcccaagucuugcauuc

SEQ ID NO: 555709 - RNA, 23 nt, Artificial Sequence
  Synthetic
gguauagcccaagucuugcauuc

SEQ ID NO: 555710 - RNA, 24 nt, Artificial Sequence
  Synthetic
ggguauagcccaagucuugcauuc

SEQ ID NO: 555711 - RNA, 18 nt, Artificial Sequence
  Synthetic
uuuuagcauacaucauuc

SEQ ID NO: 555712 - RNA, 19 nt, Artificial Sequence
  Synthetic
auuuuagcauacaucauuc

SEQ ID NO: 555713 - RNA, 20 nt, Artificial Sequence
  Synthetic
aauuuuagcauacaucauuc

SEQ ID NO: 555714 - RNA, 21 nt, Artificial Sequence
  Synthetic
uaauuuuagcauacaucauuc

SEQ ID NO: 555715 - RNA, 22 nt, Artificial Sequence
  Synthetic
uuaauuuuagcauacaucauuc

SEQ ID NO: 555716 - RNA, 23 nt, Artificial Sequence
  Synthetic
uuuaauuuuagcauacaucauuc

SEQ ID NO: 555717 - RNA, 24 nt, Artificial Sequence
  Synthetic
cuuuaauuuuagcauacaucauuc

SEQ ID NO: 555718 - RNA, 18 nt, Artificial Sequence
  Synthetic
ucaccaaagggaucauuc

SEQ ID NO: 555719 - RNA, 19 nt, Artificial Sequence
  Synthetic
gucaccaaagggaucauuc

SEQ ID NO: 555720 - RNA, 20 nt, Artificial Sequence
  Synthetic
ugucaccaaagggaucauuc

SEQ ID NO: 555721 - RNA, 21 nt, Artificial Sequence
  Synthetic
uugucaccaaagggaucauuc

SEQ ID NO: 555722 - RNA, 22 nt, Artificial Sequence
  Synthetic
cuugucaccaaagggaucauuc

SEQ ID NO: 555723 - RNA, 23 nt, Artificial Sequence
  Synthetic
acuugucaccaaagggaucauuc

SEQ ID NO: 555724 - RNA, 24 nt, Artificial Sequence
  Synthetic
aacuugucaccaaagggaucauuc

SEQ ID NO: 555725 - RNA, 18 nt, Artificial Sequence
  Synthetic
uacacucugggaucauuc

SEQ ID NO: 555726 - RNA, 19 nt, Artificial Sequence
  Synthetic
cuacacucugggaucauuc

SEQ ID NO: 555727 - RNA, 20 nt, Artificial Sequence
  Synthetic
gcuacacucugggaucauuc

SEQ ID NO: 555728 - RNA, 21 nt, Artificial Sequence
  Synthetic
agcuacacucugggaucauuc

SEQ ID NO: 555729 - RNA, 22 nt, Artificial Sequence
  Synthetic
uagcuacacucugggaucauuc

SEQ ID NO: 555730 - RNA, 23 nt, Artificial Sequence
  Synthetic
uuagcuacacucugggaucauuc

SEQ ID NO: 555731 - RNA, 24 nt, Artificial Sequence
  Synthetic
cuuagcuacacucugggaucauuc

SEQ ID NO: 555732 - RNA, 18 nt, Artificial Sequence
  Synthetic
acauggauucuaucauuc

SEQ ID NO: 555733 - RNA, 19 nt, Artificial Sequence
  Synthetic
uacauggauucuaucauuc

SEQ ID NO: 555734 - RNA, 20 nt, Artificial Sequence
  Synthetic
cuacauggauucuaucauuc

SEQ ID NO: 555735 - RNA, 21 nt, Artificial Sequence
  Synthetic
ucuacauggauucuaucauuc

SEQ ID NO: 555736 - RNA, 22 nt, Artificial Sequence
  Synthetic
gucuacauggauucuaucauuc

SEQ ID NO: 555737 - RNA, 23 nt, Artificial Sequence
  Synthetic
ugucuacauggauucuaucauuc

SEQ ID NO: 555738 - RNA, 24 nt, Artificial Sequence
  Synthetic
gugucuacauggauucuaucauuc

SEQ ID NO: 555739 - RNA, 18 nt, Artificial Sequence
  Synthetic
ucgccuucuaacucauuc

SEQ ID NO: 555740 - RNA, 19 nt, Artificial Sequence
  Synthetic
cucgccuucuaacucauuc

SEQ ID NO: 555741 - RNA, 20 nt, Artificial Sequence
  Synthetic
ucucgccuucuaacucauuc

SEQ ID NO: 555742 - RNA, 21 nt, Artificial Sequence
  Synthetic
uucucgccuucuaacucauuc

SEQ ID NO: 555743 - RNA, 22 nt, Artificial Sequence
  Synthetic
cuucucgccuucuaacucauuc

SEQ ID NO: 555744 - RNA, 23 nt, Artificial Sequence
  Synthetic
ccuucucgccuucuaacucauuc

SEQ ID NO: 555745 - RNA, 24 nt, Artificial Sequence
  Synthetic
uccuucucgccuucuaacucauuc

SEQ ID NO: 555746 - RNA, 18 nt, Artificial Sequence
  Synthetic
uuccaggaauucucauuc

SEQ ID NO: 555747 - RNA, 19 nt, Artificial Sequence
  Synthetic
guuccaggaauucucauuc

SEQ ID NO: 555748 - RNA, 20 nt, Artificial Sequence
  Synthetic
uguuccaggaauucucauuc

SEQ ID NO: 555749 - RNA, 21 nt, Artificial Sequence
  Synthetic
cuguuccaggaauucucauuc

SEQ ID NO: 555750 - RNA, 22 nt, Artificial Sequence
  Synthetic
ucuguuccaggaauucucauuc

SEQ ID NO: 555751 - RNA, 23 nt, Artificial Sequence
  Synthetic
aucuguuccaggaauucucauuc

SEQ ID NO: 555752 - RNA, 24 nt, Artificial Sequence
  Synthetic
gaucuguuccaggaauucucauuc

SEQ ID NO: 555753 - RNA, 18 nt, Artificial Sequence
  Synthetic
ucauuucuauucucauuc

SEQ ID NO: 555754 - RNA, 19 nt, Artificial Sequence
  Synthetic
uucauuucuauucucauuc

SEQ ID NO: 555755 - RNA, 20 nt, Artificial Sequence
  Synthetic
uuucauuucuauucucauuc

SEQ ID NO: 555756 - RNA, 21 nt, Artificial Sequence
  Synthetic
cuuucauuucuauucucauuc

SEQ ID NO: 555757 - RNA, 22 nt, Artificial Sequence
  Synthetic
ucuuucauuucuauucucauuc

SEQ ID NO: 555758 - RNA, 23 nt, Artificial Sequence
  Synthetic
uucuuucauuucuauucucauuc

SEQ ID NO: 555759 - RNA, 24 nt, Artificial Sequence
  Synthetic
cuucuuucauuucuauucucauuc

SEQ ID NO: 555760 - RNA, 18 nt, Artificial Sequence
  Synthetic
uugauugcuuucucauuc

SEQ ID NO: 555761 - RNA, 19 nt, Artificial Sequence
  Synthetic
cuugauugcuuucucauuc

SEQ ID NO: 555762 - RNA, 20 nt, Artificial Sequence
  Synthetic
ucuugauugcuuucucauuc

SEQ ID NO: 555763 - RNA, 21 nt, Artificial Sequence
  Synthetic
uucuugauugcuuucucauuc

SEQ ID NO: 555764 - RNA, 22 nt, Artificial Sequence
  Synthetic
cuucuugauugcuuucucauuc

SEQ ID NO: 555765 - RNA, 23 nt, Artificial Sequence
  Synthetic
ucuucuugauugcuuucucauuc

SEQ ID NO: 555766 - RNA, 24 nt, Artificial Sequence
  Synthetic
aucuucuugauugcuuucucauuc

SEQ ID NO: 555767 - RNA, 18 nt, Artificial Sequence
  Synthetic
uuuauccagcagucauuc

SEQ ID NO: 555768 - RNA, 19 nt, Artificial Sequence
  Synthetic
auuuauccagcagucauuc

SEQ ID NO: 555769 - RNA, 20 nt, Artificial Sequence
  Synthetic
uauuuauccagcagucauuc

SEQ ID NO: 555770 - RNA, 21 nt, Artificial Sequence
  Synthetic
uuauuuauccagcagucauuc

SEQ ID NO: 555771 - RNA, 22 nt, Artificial Sequence
  Synthetic
cuuauuuauccagcagucauuc

SEQ ID NO: 555772 - RNA, 23 nt, Artificial Sequence
  Synthetic
ccuuauuuauccagcagucauuc

SEQ ID NO: 555773 - RNA, 24 nt, Artificial Sequence
  Synthetic
uccuuauuuauccagcagucauuc

SEQ ID NO: 555774 - RNA, 18 nt, Artificial Sequence
  Synthetic
acacauaucucuucauuc

SEQ ID NO: 555775 - RNA, 19 nt, Artificial Sequence
  Synthetic
aacacauaucucuucauuc

SEQ ID NO: 555776 - RNA, 20 nt, Artificial Sequence
  Synthetic
aaacacauaucucuucauuc

SEQ ID NO: 555777 - RNA, 21 nt, Artificial Sequence
  Synthetic
aaaacacauaucucuucauuc

SEQ ID NO: 555778 - RNA, 22 nt, Artificial Sequence
  Synthetic
aaaaacacauaucucuucauuc

SEQ ID NO: 555779 - RNA, 23 nt, Artificial Sequence
  Synthetic
aaaaaacacauaucucuucauuc

SEQ ID NO: 555780 - RNA, 24 nt, Artificial Sequence
  Synthetic
caaaaaacacauaucucuucauuc

SEQ ID NO: 555781 - RNA, 18 nt, Artificial Sequence
  Synthetic
aguggcggugguucauuc

SEQ ID NO: 555782 - RNA, 19 nt, Artificial Sequence
  Synthetic
caguggcggugguucauuc

SEQ ID NO: 555783 - RNA, 20 nt, Artificial Sequence
  Synthetic
gcaguggcggugguucauuc

SEQ ID NO: 555784 - RNA, 21 nt, Artificial Sequence
  Synthetic
ugcaguggcggugguucauuc

SEQ ID NO: 555785 - RNA, 22 nt, Artificial Sequence
  Synthetic
uugcaguggcggugguucauuc

SEQ ID NO: 555786 - RNA, 23 nt, Artificial Sequence
  Synthetic
uuugcaguggcggugguucauuc

SEQ ID NO: 555787 - RNA, 24 nt, Artificial Sequence
  Synthetic
guuugcaguggcggugguucauuc

SEQ ID NO: 555788 - RNA, 18 nt, Artificial Sequence
  Synthetic
cacauccacuguucauuc

SEQ ID NO: 555789 - RNA, 19 nt, Artificial Sequence
  Synthetic
gcacauccacuguucauuc

SEQ ID NO: 555790 - RNA, 20 nt, Artificial Sequence
  Synthetic
agcacauccacuguucauuc

SEQ ID NO: 555791 - RNA, 21 nt, Artificial Sequence
  Synthetic
aagcacauccacuguucauuc

SEQ ID NO: 555792 - RNA, 22 nt, Artificial Sequence
  Synthetic
uaagcacauccacuguucauuc

SEQ ID NO: 555793 - RNA, 23 nt, Artificial Sequence
  Synthetic
auaagcacauccacuguucauuc

SEQ ID NO: 555794 - RNA, 24 nt, Artificial Sequence
  Synthetic
aauaagcacauccacuguucauuc

SEQ ID NO: 555795 - RNA, 18 nt, Artificial Sequence
  Synthetic
aaauuaacuauuucauuc

SEQ ID NO: 555796 - RNA, 19 nt, Artificial Sequence
  Synthetic
gaaauuaacuauuucauuc

SEQ ID NO: 555797 - RNA, 20 nt, Artificial Sequence
  Synthetic
ggaaauuaacuauuucauuc

SEQ ID NO: 555798 - RNA, 21 nt, Artificial Sequence
  Synthetic
gggaaauuaacuauuucauuc

SEQ ID NO: 555799 - RNA, 22 nt, Artificial Sequence
  Synthetic
ggggaaauuaacuauuucauuc

SEQ ID NO: 555800 - RNA, 23 nt, Artificial Sequence
  Synthetic
aggggaaauuaacuauuucauuc

SEQ ID NO: 555801 - RNA, 24 nt, Artificial Sequence
  Synthetic
aaggggaaauuaacuauuucauuc

SEQ ID NO: 555802 - RNA, 18 nt, Artificial Sequence
  Synthetic
uaucagaaugaaagauuc

SEQ ID NO: 555803 - RNA, 19 nt, Artificial Sequence
  Synthetic
cuaucagaaugaaagauuc

SEQ ID NO: 555804 - RNA, 20 nt, Artificial Sequence
  Synthetic
acuaucagaaugaaagauuc

SEQ ID NO: 555805 - RNA, 21 nt, Artificial Sequence
  Synthetic
cacuaucagaaugaaagauuc

SEQ ID NO: 555806 - RNA, 22 nt, Artificial Sequence
  Synthetic
acacuaucagaaugaaagauuc

SEQ ID NO: 555807 - RNA, 23 nt, Artificial Sequence
  Synthetic
uacacuaucagaaugaaagauuc

SEQ ID NO: 555808 - RNA, 24 nt, Artificial Sequence
  Synthetic
uuacacuaucagaaugaaagauuc

SEQ ID NO: 555809 - RNA, 18 nt, Artificial Sequence
  Synthetic
uugggauaugaaagauuc

SEQ ID NO: 555810 - RNA, 19 nt, Artificial Sequence
  Synthetic
uuugggauaugaaagauuc

SEQ ID NO: 555811 - RNA, 20 nt, Artificial Sequence
  Synthetic
uuuugggauaugaaagauuc

SEQ ID NO: 555812 - RNA, 21 nt, Artificial Sequence
  Synthetic
cuuuugggauaugaaagauuc

SEQ ID NO: 555813 - RNA, 22 nt, Artificial Sequence
  Synthetic
ucuuuugggauaugaaagauuc

SEQ ID NO: 555814 - RNA, 23 nt, Artificial Sequence
  Synthetic
aucuuuugggauaugaaagauuc

SEQ ID NO: 555815 - RNA, 24 nt, Artificial Sequence
  Synthetic
caucuuuugggauaugaaagauuc

SEQ ID NO: 555816 - RNA, 18 nt, Artificial Sequence
  Synthetic
uaguguuguauaagauuc

SEQ ID NO: 555817 - RNA, 19 nt, Artificial Sequence
  Synthetic
guaguguuguauaagauuc

SEQ ID NO: 555818 - RNA, 20 nt, Artificial Sequence
  Synthetic
uguaguguuguauaagauuc

SEQ ID NO: 555819 - RNA, 21 nt, Artificial Sequence
  Synthetic
cuguaguguuguauaagauuc

SEQ ID NO: 555820 - RNA, 22 nt, Artificial Sequence
  Synthetic
acuguaguguuguauaagauuc

SEQ ID NO: 555821 - RNA, 23 nt, Artificial Sequence
  Synthetic
uacuguaguguuguauaagauuc

SEQ ID NO: 555822 - RNA, 24 nt, Artificial Sequence
  Synthetic
auacuguaguguuguauaagauuc

SEQ ID NO: 555823 - RNA, 18 nt, Artificial Sequence
  Synthetic
cuaaacaaacuaagauuc

SEQ ID NO: 555824 - RNA, 19 nt, Artificial Sequence
  Synthetic
gcuaaacaaacuaagauuc

SEQ ID NO: 555825 - RNA, 20 nt, Artificial Sequence
  Synthetic
agcuaaacaaacuaagauuc

SEQ ID NO: 555826 - RNA, 21 nt, Artificial Sequence
  Synthetic
aagcuaaacaaacuaagauuc

SEQ ID NO: 555827 - RNA, 22 nt, Artificial Sequence
  Synthetic
aaagcuaaacaaacuaagauuc

SEQ ID NO: 555828 - RNA, 23 nt, Artificial Sequence
  Synthetic
aaaagcuaaacaaacuaagauuc

SEQ ID NO: 555829 - RNA, 24 nt, Artificial Sequence
  Synthetic
aaaaagcuaaacaaacuaagauuc

SEQ ID NO: 555830 - RNA, 18 nt, Artificial Sequence
  Synthetic
gagcugugaaacagauuc

SEQ ID NO: 555831 - RNA, 19 nt, Artificial Sequence
  Synthetic
agagcugugaaacagauuc

SEQ ID NO: 555832 - RNA, 20 nt, Artificial Sequence
  Synthetic
aagagcugugaaacagauuc

SEQ ID NO: 555833 - RNA, 21 nt, Artificial Sequence
  Synthetic
uaagagcugugaaacagauuc

SEQ ID NO: 555834 - RNA, 22 nt, Artificial Sequence
  Synthetic
uuaagagcugugaaacagauuc

SEQ ID NO: 555835 - RNA, 23 nt, Artificial Sequence
  Synthetic
cuuaagagcugugaaacagauuc

SEQ ID NO: 555836 - RNA, 24 nt, Artificial Sequence
  Synthetic
gcuuaagagcugugaaacagauuc

SEQ ID NO: 555837 - RNA, 18 nt, Artificial Sequence
  Synthetic
uguuaaaugcacagauuc

SEQ ID NO: 555838 - RNA, 19 nt, Artificial Sequence
  Synthetic
auguuaaaugcacagauuc

SEQ ID NO: 555839 - RNA, 20 nt, Artificial Sequence
  Synthetic
aauguuaaaugcacagauuc

SEQ ID NO: 555840 - RNA, 21 nt, Artificial Sequence
  Synthetic
aaauguuaaaugcacagauuc

SEQ ID NO: 555841 - RNA, 22 nt, Artificial Sequence
  Synthetic
gaaauguuaaaugcacagauuc

SEQ ID NO: 555842 - RNA, 23 nt, Artificial Sequence
  Synthetic
ugaaauguuaaaugcacagauuc

SEQ ID NO: 555843 - RNA, 24 nt, Artificial Sequence
  Synthetic
augaaauguuaaaugcacagauuc

SEQ ID NO: 555844 - RNA, 18 nt, Artificial Sequence
  Synthetic
cuaccauauuacagauuc

SEQ ID NO: 555845 - RNA, 19 nt, Artificial Sequence
  Synthetic
gcuaccauauuacagauuc

SEQ ID NO: 555846 - RNA, 20 nt, Artificial Sequence
  Synthetic
agcuaccauauuacagauuc

SEQ ID NO: 555847 - RNA, 21 nt, Artificial Sequence
  Synthetic
aagcuaccauauuacagauuc

SEQ ID NO: 555848 - RNA, 22 nt, Artificial Sequence
  Synthetic
gaagcuaccauauuacagauuc

SEQ ID NO: 555849 - RNA, 23 nt, Artificial Sequence
  Synthetic
agaagcuaccauauuacagauuc

SEQ ID NO: 555850 - RNA, 24 nt, Artificial Sequence
  Synthetic
aagaagcuaccauauuacagauuc

SEQ ID NO: 555851 - RNA, 18 nt, Artificial Sequence
  Synthetic
gcaauacauuccagauuc

SEQ ID NO: 555852 - RNA, 19 nt, Artificial Sequence
  Synthetic
ugcaauacauuccagauuc

SEQ ID NO: 555853 - RNA, 20 nt, Artificial Sequence
  Synthetic
cugcaauacauuccagauuc

SEQ ID NO: 555854 - RNA, 21 nt, Artificial Sequence
  Synthetic
ucugcaauacauuccagauuc

SEQ ID NO: 555855 - RNA, 22 nt, Artificial Sequence
  Synthetic
aucugcaauacauuccagauuc

SEQ ID NO: 555856 - RNA, 23 nt, Artificial Sequence
  Synthetic
caucugcaauacauuccagauuc

SEQ ID NO: 555857 - RNA, 24 nt, Artificial Sequence
  Synthetic
acaucugcaauacauuccagauuc

SEQ ID NO: 555858 - RNA, 18 nt, Artificial Sequence
  Synthetic
aggccaacguucagauuc

SEQ ID NO: 555859 - RNA, 19 nt, Artificial Sequence
  Synthetic
caggccaacguucagauuc

SEQ ID NO: 555860 - RNA, 20 nt, Artificial Sequence
  Synthetic
gcaggccaacguucagauuc

SEQ ID NO: 555861 - RNA, 21 nt, Artificial Sequence
  Synthetic
ggcaggccaacguucagauuc

SEQ ID NO: 555862 - RNA, 22 nt, Artificial Sequence
  Synthetic
aggcaggccaacguucagauuc

SEQ ID NO: 555863 - RNA, 23 nt, Artificial Sequence
  Synthetic
aaggcaggccaacguucagauuc

SEQ ID NO: 555864 - RNA, 24 nt, Artificial Sequence
  Synthetic
uaaggcaggccaacguucagauuc

SEQ ID NO: 555865 - RNA, 18 nt, Artificial Sequence
  Synthetic
uuuaggugccugagauuc

SEQ ID NO: 555866 - RNA, 19 nt, Artificial Sequence
  Synthetic
uuuuaggugccugagauuc

SEQ ID NO: 555867 - RNA, 20 nt, Artificial Sequence
  Synthetic
uuuuuaggugccugagauuc

SEQ ID NO: 555868 - RNA, 21 nt, Artificial Sequence
  Synthetic
auuuuuaggugccugagauuc

SEQ ID NO: 555869 - RNA, 22 nt, Artificial Sequence
  Synthetic
uauuuuuaggugccugagauuc

SEQ ID NO: 555870 - RNA, 23 nt, Artificial Sequence
  Synthetic
uuauuuuuaggugccugagauuc

SEQ ID NO: 555871 - RNA, 24 nt, Artificial Sequence
  Synthetic
auuauuuuuaggugccugagauuc

SEQ ID NO: 555872 - RNA, 18 nt, Artificial Sequence
  Synthetic
aauguuguugauagauuc

SEQ ID NO: 555873 - RNA, 19 nt, Artificial Sequence
  Synthetic
uaauguuguugauagauuc

SEQ ID NO: 555874 - RNA, 20 nt, Artificial Sequence
  Synthetic
uuaauguuguugauagauuc

SEQ ID NO: 555875 - RNA, 21 nt, Artificial Sequence
  Synthetic
auuaauguuguugauagauuc

SEQ ID NO: 555876 - RNA, 22 nt, Artificial Sequence
  Synthetic
aauuaauguuguugauagauuc

SEQ ID NO: 555877 - RNA, 23 nt, Artificial Sequence
  Synthetic
caauuaauguuguugauagauuc

SEQ ID NO: 555878 - RNA, 24 nt, Artificial Sequence
  Synthetic
ucaauuaauguuguugauagauuc

SEQ ID NO: 555879 - RNA, 18 nt, Artificial Sequence
  Synthetic
ugagcaaacuguagauuc

SEQ ID NO: 555880 - RNA, 19 nt, Artificial Sequence
  Synthetic
uugagcaaacuguagauuc

SEQ ID NO: 555881 - RNA, 20 nt, Artificial Sequence
  Synthetic
cuugagcaaacuguagauuc

SEQ ID NO: 555882 - RNA, 21 nt, Artificial Sequence
  Synthetic
ccuugagcaaacuguagauuc

SEQ ID NO: 555883 - RNA, 22 nt, Artificial Sequence
  Synthetic
accuugagcaaacuguagauuc

SEQ ID NO: 555884 - RNA, 23 nt, Artificial Sequence
  Synthetic
aaccuugagcaaacuguagauuc

SEQ ID NO: 555885 - RNA, 24 nt, Artificial Sequence
  Synthetic
gaaccuugagcaaacuguagauuc

SEQ ID NO: 555886 - RNA, 18 nt, Artificial Sequence
  Synthetic
acgguaugacuuagauuc

SEQ ID NO: 555887 - RNA, 19 nt, Artificial Sequence
  Synthetic
gacgguaugacuuagauuc

SEQ ID NO: 555888 - RNA, 20 nt, Artificial Sequence
  Synthetic
agacgguaugacuuagauuc

SEQ ID NO: 555889 - RNA, 21 nt, Artificial Sequence
  Synthetic
uagacgguaugacuuagauuc

SEQ ID NO: 555890 - RNA, 22 nt, Artificial Sequence
  Synthetic
guagacgguaugacuuagauuc

SEQ ID NO: 555891 - RNA, 23 nt, Artificial Sequence
  Synthetic
uguagacgguaugacuuagauuc

SEQ ID NO: 555892 - RNA, 24 nt, Artificial Sequence
  Synthetic
auguagacgguaugacuuagauuc

SEQ ID NO: 555893 - RNA, 18 nt, Artificial Sequence
  Synthetic
gauggguggaaacgauuc

SEQ ID NO: 555894 - RNA, 19 nt, Artificial Sequence
  Synthetic
ggauggguggaaacgauuc

SEQ ID NO: 555895 - RNA, 20 nt, Artificial Sequence
  Synthetic
uggauggguggaaacgauuc

SEQ ID NO: 555896 - RNA, 21 nt, Artificial Sequence
  Synthetic
auggauggguggaaacgauuc

SEQ ID NO: 555897 - RNA, 22 nt, Artificial Sequence
  Synthetic
aauggauggguggaaacgauuc

SEQ ID NO: 555898 - RNA, 23 nt, Artificial Sequence
  Synthetic
aaauggauggguggaaacgauuc

SEQ ID NO: 555899 - RNA, 24 nt, Artificial Sequence
  Synthetic
gaaauggauggguggaaacgauuc

SEQ ID NO: 555900 - RNA, 18 nt, Artificial Sequence
  Synthetic
uguguguacacacgauuc

SEQ ID NO: 555901 - RNA, 19 nt, Artificial Sequence
  Synthetic
guguguguacacacgauuc

SEQ ID NO: 555902 - RNA, 20 nt, Artificial Sequence
  Synthetic
uguguguguacacacgauuc

SEQ ID NO: 555903 - RNA, 21 nt, Artificial Sequence
  Synthetic
guguguguguacacacgauuc

SEQ ID NO: 555904 - RNA, 22 nt, Artificial Sequence
  Synthetic
uguguguguguacacacgauuc

SEQ ID NO: 555905 - RNA, 23 nt, Artificial Sequence
  Synthetic
guguguguguguacacacgauuc

SEQ ID NO: 555906 - RNA, 24 nt, Artificial Sequence
  Synthetic
uguguguguguguacacacgauuc

SEQ ID NO: 555907 - RNA, 18 nt, Artificial Sequence
  Synthetic
agcaacuccugacgauuc

SEQ ID NO: 555908 - RNA, 19 nt, Artificial Sequence
  Synthetic
aagcaacuccugacgauuc

SEQ ID NO: 555909 - RNA, 20 nt, Artificial Sequence
  Synthetic
caagcaacuccugacgauuc

SEQ ID NO: 555910 - RNA, 21 nt, Artificial Sequence
  Synthetic
acaagcaacuccugacgauuc

SEQ ID NO: 555911 - RNA, 22 nt, Artificial Sequence
  Synthetic
cacaagcaacuccugacgauuc

SEQ ID NO: 555912 - RNA, 23 nt, Artificial Sequence
  Synthetic
ucacaagcaacuccugacgauuc

SEQ ID NO: 555913 - RNA, 24 nt, Artificial Sequence
  Synthetic
uucacaagcaacuccugacgauuc

SEQ ID NO: 555914 - RNA, 18 nt, Artificial Sequence
  Synthetic
aaaucuuaaaagggauuc

SEQ ID NO: 555915 - RNA, 19 nt, Artificial Sequence
  Synthetic
gaaaucuuaaaagggauuc

SEQ ID NO: 555916 - RNA, 20 nt, Artificial Sequence
  Synthetic
agaaaucuuaaaagggauuc

SEQ ID NO: 555917 - RNA, 21 nt, Artificial Sequence
  Synthetic
uagaaaucuuaaaagggauuc

SEQ ID NO: 555918 - RNA, 22 nt, Artificial Sequence
  Synthetic
cuagaaaucuuaaaagggauuc

SEQ ID NO: 555919 - RNA, 23 nt, Artificial Sequence
  Synthetic
ucuagaaaucuuaaaagggauuc

SEQ ID NO: 555920 - RNA, 24 nt, Artificial Sequence
  Synthetic
aucuagaaaucuuaaaagggauuc

SEQ ID NO: 555921 - RNA, 18 nt, Artificial Sequence
  Synthetic
ucaugaaccaagggauuc

SEQ ID NO: 555922 - RNA, 19 nt, Artificial Sequence
  Synthetic
uucaugaaccaagggauuc

SEQ ID NO: 555923 - RNA, 20 nt, Artificial Sequence
  Synthetic
auucaugaaccaagggauuc

SEQ ID NO: 555924 - RNA, 21 nt, Artificial Sequence
  Synthetic
cauucaugaaccaagggauuc

SEQ ID NO: 555925 - RNA, 22 nt, Artificial Sequence
  Synthetic
acauucaugaaccaagggauuc

SEQ ID NO: 555926 - RNA, 23 nt, Artificial Sequence
  Synthetic
uacauucaugaaccaagggauuc

SEQ ID NO: 555927 - RNA, 24 nt, Artificial Sequence
  Synthetic
uuacauucaugaaccaagggauuc

SEQ ID NO: 555928 - RNA, 18 nt, Artificial Sequence
  Synthetic
gcuugaugucauggauuc

SEQ ID NO: 555929 - RNA, 19 nt, Artificial Sequence
  Synthetic
agcuugaugucauggauuc

SEQ ID NO: 555930 - RNA, 20 nt, Artificial Sequence
  Synthetic
uagcuugaugucauggauuc

SEQ ID NO: 555931 - RNA, 21 nt, Artificial Sequence
  Synthetic
uuagcuugaugucauggauuc

SEQ ID NO: 555932 - RNA, 22 nt, Artificial Sequence
  Synthetic
guuagcuugaugucauggauuc

SEQ ID NO: 555933 - RNA, 23 nt, Artificial Sequence
  Synthetic
aguuagcuugaugucauggauuc

SEQ ID NO: 555934 - RNA, 24 nt, Artificial Sequence
  Synthetic
uaguuagcuugaugucauggauuc

SEQ ID NO: 555935 - RNA, 18 nt, Artificial Sequence
  Synthetic
gagccgacacuuggauuc

SEQ ID NO: 555936 - RNA, 19 nt, Artificial Sequence
  Synthetic
agagccgacacuuggauuc

SEQ ID NO: 555937 - RNA, 20 nt, Artificial Sequence
  Synthetic
uagagccgacacuuggauuc

SEQ ID NO: 555938 - RNA, 21 nt, Artificial Sequence
  Synthetic
uuagagccgacacuuggauuc

SEQ ID NO: 555939 - RNA, 22 nt, Artificial Sequence
  Synthetic
guuagagccgacacuuggauuc

SEQ ID NO: 555940 - RNA, 23 nt, Artificial Sequence
  Synthetic
uguuagagccgacacuuggauuc

SEQ ID NO: 555941 - RNA, 24 nt, Artificial Sequence
  Synthetic
uuguuagagccgacacuuggauuc

SEQ ID NO: 555942 - RNA, 18 nt, Artificial Sequence
  Synthetic
auauauaugucaugauuc

SEQ ID NO: 555943 - RNA, 19 nt, Artificial Sequence
  Synthetic
uauauauaugucaugauuc

SEQ ID NO: 555944 - RNA, 20 nt, Artificial Sequence
  Synthetic
auauauauaugucaugauuc

SEQ ID NO: 555945 - RNA, 21 nt, Artificial Sequence
  Synthetic
uauauauauaugucaugauuc

SEQ ID NO: 555946 - RNA, 22 nt, Artificial Sequence
  Synthetic
auauauauauaugucaugauuc

SEQ ID NO: 555947 - RNA, 23 nt, Artificial Sequence
  Synthetic
cauauauauauaugucaugauuc

SEQ ID NO: 555948 - RNA, 24 nt, Artificial Sequence
  Synthetic
gcauauauauauaugucaugauuc

SEQ ID NO: 555949 - RNA, 18 nt, Artificial Sequence
  Synthetic
gucccauuuuacugauuc

SEQ ID NO: 555950 - RNA, 19 nt, Artificial Sequence
  Synthetic
ugucccauuuuacugauuc

SEQ ID NO: 555951 - RNA, 20 nt, Artificial Sequence
  Synthetic
gugucccauuuuacugauuc

SEQ ID NO: 555952 - RNA, 21 nt, Artificial Sequence
  Synthetic
ugugucccauuuuacugauuc

SEQ ID NO: 555953 - RNA, 22 nt, Artificial Sequence
  Synthetic
gugugucccauuuuacugauuc

SEQ ID NO: 555954 - RNA, 23 nt, Artificial Sequence
  Synthetic
agugugucccauuuuacugauuc

SEQ ID NO: 555955 - RNA, 24 nt, Artificial Sequence
  Synthetic
cagugugucccauuuuacugauuc

SEQ ID NO: 555956 - RNA, 18 nt, Artificial Sequence
  Synthetic
cguuaggaucgcugauuc

SEQ ID NO: 555957 - RNA, 19 nt, Artificial Sequence
  Synthetic
acguuaggaucgcugauuc

SEQ ID NO: 555958 - RNA, 20 nt, Artificial Sequence
  Synthetic
aacguuaggaucgcugauuc

SEQ ID NO: 555959 - RNA, 21 nt, Artificial Sequence
  Synthetic
gaacguuaggaucgcugauuc

SEQ ID NO: 555960 - RNA, 22 nt, Artificial Sequence
  Synthetic
ggaacguuaggaucgcugauuc

SEQ ID NO: 555961 - RNA, 23 nt, Artificial Sequence
  Synthetic
gggaacguuaggaucgcugauuc

SEQ ID NO: 555962 - RNA, 24 nt, Artificial Sequence
  Synthetic
agggaacguuaggaucgcugauuc

SEQ ID NO: 555963 - RNA, 18 nt, Artificial Sequence
  Synthetic
acagaaggaaagugauuc

SEQ ID NO: 555964 - RNA, 19 nt, Artificial Sequence
  Synthetic
cacagaaggaaagugauuc

SEQ ID NO: 555965 - RNA, 20 nt, Artificial Sequence
  Synthetic
ccacagaaggaaagugauuc

SEQ ID NO: 555966 - RNA, 21 nt, Artificial Sequence
  Synthetic
accacagaaggaaagugauuc

SEQ ID NO: 555967 - RNA, 22 nt, Artificial Sequence
  Synthetic
aaccacagaaggaaagugauuc

SEQ ID NO: 555968 - RNA, 23 nt, Artificial Sequence
  Synthetic
aaaccacagaaggaaagugauuc

SEQ ID NO: 555969 - RNA, 24 nt, Artificial Sequence
  Synthetic
uaaaccacagaaggaaagugauuc

SEQ ID NO: 555970 - RNA, 18 nt, Artificial Sequence
  Synthetic
agggguugcuagugauuc

SEQ ID NO: 555971 - RNA, 19 nt, Artificial Sequence
  Synthetic
uagggguugcuagugauuc

SEQ ID NO: 555972 - RNA, 20 nt, Artificial Sequence
  Synthetic
uuagggguugcuagugauuc

SEQ ID NO: 555973 - RNA, 21 nt, Artificial Sequence
  Synthetic
auuagggguugcuagugauuc

SEQ ID NO: 555974 - RNA, 22 nt, Artificial Sequence
  Synthetic
gauuagggguugcuagugauuc

SEQ ID NO: 555975 - RNA, 23 nt, Artificial Sequence
  Synthetic
agauuagggguugcuagugauuc

SEQ ID NO: 555976 - RNA, 24 nt, Artificial Sequence
  Synthetic
cagauuagggguugcuagugauuc

SEQ ID NO: 555977 - RNA, 18 nt, Artificial Sequence
  Synthetic
aguuuugggaugugauuc

SEQ ID NO: 555978 - RNA, 19 nt, Artificial Sequence
  Synthetic
uaguuuugggaugugauuc

SEQ ID NO: 555979 - RNA, 20 nt, Artificial Sequence
  Synthetic
guaguuuugggaugugauuc

SEQ ID NO: 555980 - RNA, 21 nt, Artificial Sequence
  Synthetic
aguaguuuugggaugugauuc

SEQ ID NO: 555981 - RNA, 22 nt, Artificial Sequence
  Synthetic
aaguaguuuugggaugugauuc

SEQ ID NO: 555982 - RNA, 23 nt, Artificial Sequence
  Synthetic
caaguaguuuugggaugugauuc

SEQ ID NO: 555983 - RNA, 24 nt, Artificial Sequence
  Synthetic
ucaaguaguuuugggaugugauuc

SEQ ID NO: 555984 - RNA, 18 nt, Artificial Sequence
  Synthetic
guuuuuaaguugugauuc

SEQ ID NO: 555985 - RNA, 19 nt, Artificial Sequence
  Synthetic
gguuuuuaaguugugauuc

SEQ ID NO: 555986 - RNA, 20 nt, Artificial Sequence
  Synthetic
agguuuuuaaguugugauuc

SEQ ID NO: 555987 - RNA, 21 nt, Artificial Sequence
  Synthetic
gagguuuuuaaguugugauuc

SEQ ID NO: 555988 - RNA, 22 nt, Artificial Sequence
  Synthetic
agagguuuuuaaguugugauuc

SEQ ID NO: 555989 - RNA, 23 nt, Artificial Sequence
  Synthetic
cagagguuuuuaaguugugauuc

SEQ ID NO: 555990 - RNA, 24 nt, Artificial Sequence
  Synthetic
gcagagguuuuuaaguugugauuc

SEQ ID NO: 555991 - RNA, 18 nt, Artificial Sequence
  Synthetic
gagaagauuacuugauuc

SEQ ID NO: 555992 - RNA, 19 nt, Artificial Sequence
  Synthetic
ugagaagauuacuugauuc

SEQ ID NO: 555993 - RNA, 20 nt, Artificial Sequence
  Synthetic
gugagaagauuacuugauuc

SEQ ID NO: 555994 - RNA, 21 nt, Artificial Sequence
  Synthetic
ggugagaagauuacuugauuc

SEQ ID NO: 555995 - RNA, 22 nt, Artificial Sequence
  Synthetic
aggugagaagauuacuugauuc

SEQ ID NO: 555996 - RNA, 23 nt, Artificial Sequence
  Synthetic
gaggugagaagauuacuugauuc

SEQ ID NO: 555997 - RNA, 24 nt, Artificial Sequence
  Synthetic
ugaggugagaagauuacuugauuc

SEQ ID NO: 555998 - RNA, 18 nt, Artificial Sequence
  Synthetic
auccaauucucuugauuc

SEQ ID NO: 555999 - RNA, 19 nt, Artificial Sequence
  Synthetic
gauccaauucucuugauuc

SEQ ID NO: 556000 - RNA, 20 nt, Artificial Sequence
  Synthetic
ggauccaauucucuugauuc

SEQ ID NO: 556001 - RNA, 21 nt, Artificial Sequence
  Synthetic
uggauccaauucucuugauuc

SEQ ID NO: 556002 - RNA, 22 nt, Artificial Sequence
  Synthetic
auggauccaauucucuugauuc

SEQ ID NO: 556003 - RNA, 23 nt, Artificial Sequence
  Synthetic
aauggauccaauucucuugauuc

SEQ ID NO: 556004 - RNA, 24 nt, Artificial Sequence
  Synthetic
aaauggauccaauucucuugauuc

SEQ ID NO: 556005 - RNA, 18 nt, Artificial Sequence
  Synthetic
uaaggcugaaaaauauuc

SEQ ID NO: 556006 - RNA, 19 nt, Artificial Sequence
  Synthetic
uuaaggcugaaaaauauuc

SEQ ID NO: 556007 - RNA, 20 nt, Artificial Sequence
  Synthetic
uuuaaggcugaaaaauauuc

SEQ ID NO: 556008 - RNA, 21 nt, Artificial Sequence
  Synthetic
uuuuaaggcugaaaaauauuc

SEQ ID NO: 556009 - RNA, 22 nt, Artificial Sequence
  Synthetic
uuuuuaaggcugaaaaauauuc

SEQ ID NO: 556010 - RNA, 23 nt, Artificial Sequence
  Synthetic
cuuuuuaaggcugaaaaauauuc

SEQ ID NO: 556011 - RNA, 24 nt, Artificial Sequence
  Synthetic
ucuuuuuaaggcugaaaaauauuc

SEQ ID NO: 556012 - RNA, 18 nt, Artificial Sequence
  Synthetic
uacagauauaaaauauuc

SEQ ID NO: 556013 - RNA, 19 nt, Artificial Sequence
  Synthetic
guacagauauaaaauauuc

SEQ ID NO: 556014 - RNA, 20 nt, Artificial Sequence
  Synthetic
uguacagauauaaaauauuc

SEQ ID NO: 556015 - RNA, 21 nt, Artificial Sequence
  Synthetic
guguacagauauaaaauauuc

SEQ ID NO: 556016 - RNA, 22 nt, Artificial Sequence
  Synthetic
gguguacagauauaaaauauuc

SEQ ID NO: 556017 - RNA, 23 nt, Artificial Sequence
  Synthetic
agguguacagauauaaaauauuc

SEQ ID NO: 556018 - RNA, 24 nt, Artificial Sequence
  Synthetic
cagguguacagauauaaaauauuc

SEQ ID NO: 556019 - RNA, 18 nt, Artificial Sequence
  Synthetic
gaacaucaauaaauauuc

SEQ ID NO: 556020 - RNA, 19 nt, Artificial Sequence
  Synthetic
ggaacaucaauaaauauuc

SEQ ID NO: 556021 - RNA, 20 nt, Artificial Sequence
  Synthetic
uggaacaucaauaaauauuc

SEQ ID NO: 556022 - RNA, 21 nt, Artificial Sequence
  Synthetic
uuggaacaucaauaaauauuc

SEQ ID NO: 556023 - RNA, 22 nt, Artificial Sequence
  Synthetic
uuuggaacaucaauaaauauuc

SEQ ID NO: 556024 - RNA, 23 nt, Artificial Sequence
  Synthetic
guuuggaacaucaauaaauauuc

SEQ ID NO: 556025 - RNA, 24 nt, Artificial Sequence
  Synthetic
uguuuggaacaucaauaaauauuc

SEQ ID NO: 556026 - RNA, 18 nt, Artificial Sequence
  Synthetic
ucauuugagacaauauuc

SEQ ID NO: 556027 - RNA, 19 nt, Artificial Sequence
  Synthetic
gucauuugagacaauauuc

SEQ ID NO: 556028 - RNA, 20 nt, Artificial Sequence
  Synthetic
agucauuugagacaauauuc

SEQ ID NO: 556029 - RNA, 21 nt, Artificial Sequence
  Synthetic
cagucauuugagacaauauuc

SEQ ID NO: 556030 - RNA, 22 nt, Artificial Sequence
  Synthetic
ccagucauuugagacaauauuc

SEQ ID NO: 556031 - RNA, 23 nt, Artificial Sequence
  Synthetic
gccagucauuugagacaauauuc

SEQ ID NO: 556032 - RNA, 24 nt, Artificial Sequence
  Synthetic
agccagucauuugagacaauauuc

SEQ ID NO: 556033 - RNA, 18 nt, Artificial Sequence
  Synthetic
cauaacaugacaauauuc

SEQ ID NO: 556034 - RNA, 19 nt, Artificial Sequence
  Synthetic
acauaacaugacaauauuc

SEQ ID NO: 556035 - RNA, 20 nt, Artificial Sequence
  Synthetic
aacauaacaugacaauauuc

SEQ ID NO: 556036 - RNA, 21 nt, Artificial Sequence
  Synthetic
aaacauaacaugacaauauuc

SEQ ID NO: 556037 - RNA, 22 nt, Artificial Sequence
  Synthetic
aaaacauaacaugacaauauuc

SEQ ID NO: 556038 - RNA, 23 nt, Artificial Sequence
  Synthetic
uaaaacauaacaugacaauauuc

SEQ ID NO: 556039 - RNA, 24 nt, Artificial Sequence
  Synthetic
uuaaaacauaacaugacaauauuc

SEQ ID NO: 556040 - RNA, 18 nt, Artificial Sequence
  Synthetic
aaaagauacccaauauuc

SEQ ID NO: 556041 - RNA, 19 nt, Artificial Sequence
  Synthetic
caaaagauacccaauauuc

SEQ ID NO: 556042 - RNA, 20 nt, Artificial Sequence
  Synthetic
ccaaaagauacccaauauuc

SEQ ID NO: 556043 - RNA, 21 nt, Artificial Sequence
  Synthetic
accaaaagauacccaauauuc

SEQ ID NO: 556044 - RNA, 22 nt, Artificial Sequence
  Synthetic
gaccaaaagauacccaauauuc

SEQ ID NO: 556045 - RNA, 23 nt, Artificial Sequence
  Synthetic
ggaccaaaagauacccaauauuc

SEQ ID NO: 556046 - RNA, 24 nt, Artificial Sequence
  Synthetic
aggaccaaaagauacccaauauuc

SEQ ID NO: 556047 - RNA, 18 nt, Artificial Sequence
  Synthetic
uucccacagaacauauuc

SEQ ID NO: 556048 - RNA, 19 nt, Artificial Sequence
  Synthetic
auucccacagaacauauuc

SEQ ID NO: 556049 - RNA, 20 nt, Artificial Sequence
  Synthetic
uauucccacagaacauauuc

SEQ ID NO: 556050 - RNA, 21 nt, Artificial Sequence
  Synthetic
auauucccacagaacauauuc

SEQ ID NO: 556051 - RNA, 22 nt, Artificial Sequence
  Synthetic
uauauucccacagaacauauuc

SEQ ID NO: 556052 - RNA, 23 nt, Artificial Sequence
  Synthetic
guauauucccacagaacauauuc

SEQ ID NO: 556053 - RNA, 24 nt, Artificial Sequence
  Synthetic
aguauauucccacagaacauauuc

SEQ ID NO: 556054 - RNA, 18 nt, Artificial Sequence
  Synthetic
gcaaagaaauacauauuc

SEQ ID NO: 556055 - RNA, 19 nt, Artificial Sequence
  Synthetic
ugcaaagaaauacauauuc

SEQ ID NO: 556056 - RNA, 20 nt, Artificial Sequence
  Synthetic
gugcaaagaaauacauauuc

SEQ ID NO: 556057 - RNA, 21 nt, Artificial Sequence
  Synthetic
ugugcaaagaaauacauauuc

SEQ ID NO: 556058 - RNA, 22 nt, Artificial Sequence
  Synthetic
augugcaaagaaauacauauuc

SEQ ID NO: 556059 - RNA, 23 nt, Artificial Sequence
  Synthetic
uaugugcaaagaaauacauauuc

SEQ ID NO: 556060 - RNA, 24 nt, Artificial Sequence
  Synthetic
uuaugugcaaagaaauacauauuc

SEQ ID NO: 556061 - RNA, 18 nt, Artificial Sequence
  Synthetic
gcaaaacagaagauauuc

SEQ ID NO: 556062 - RNA, 19 nt, Artificial Sequence
  Synthetic
agcaaaacagaagauauuc

SEQ ID NO: 556063 - RNA, 20 nt, Artificial Sequence
  Synthetic
aagcaaaacagaagauauuc

SEQ ID NO: 556064 - RNA, 21 nt, Artificial Sequence
  Synthetic
gaagcaaaacagaagauauuc

SEQ ID NO: 556065 - RNA, 22 nt, Artificial Sequence
  Synthetic
ugaagcaaaacagaagauauuc

SEQ ID NO: 556066 - RNA, 23 nt, Artificial Sequence
  Synthetic
augaagcaaaacagaagauauuc

SEQ ID NO: 556067 - RNA, 24 nt, Artificial Sequence
  Synthetic
aaugaagcaaaacagaagauauuc

SEQ ID NO: 556068 - RNA, 18 nt, Artificial Sequence
  Synthetic
gagcacagccugauauuc

SEQ ID NO: 556069 - RNA, 19 nt, Artificial Sequence
  Synthetic
ugagcacagccugauauuc

SEQ ID NO: 556070 - RNA, 20 nt, Artificial Sequence
  Synthetic
augagcacagccugauauuc

SEQ ID NO: 556071 - RNA, 21 nt, Artificial Sequence
  Synthetic
uaugagcacagccugauauuc

SEQ ID NO: 556072 - RNA, 22 nt, Artificial Sequence
  Synthetic
uuaugagcacagccugauauuc

SEQ ID NO: 556073 - RNA, 23 nt, Artificial Sequence
  Synthetic
uuuaugagcacagccugauauuc

SEQ ID NO: 556074 - RNA, 24 nt, Artificial Sequence
  Synthetic
uuuuaugagcacagccugauauuc

SEQ ID NO: 556075 - RNA, 18 nt, Artificial Sequence
  Synthetic
caaagaaggcugauauuc

SEQ ID NO: 556076 - RNA, 19 nt, Artificial Sequence
  Synthetic
ccaaagaaggcugauauuc

SEQ ID NO: 556077 - RNA, 20 nt, Artificial Sequence
  Synthetic
gccaaagaaggcugauauuc

SEQ ID NO: 556078 - RNA, 21 nt, Artificial Sequence
  Synthetic
agccaaagaaggcugauauuc

SEQ ID NO: 556079 - RNA, 22 nt, Artificial Sequence
  Synthetic
gagccaaagaaggcugauauuc

SEQ ID NO: 556080 - RNA, 23 nt, Artificial Sequence
  Synthetic
ugagccaaagaaggcugauauuc

SEQ ID NO: 556081 - RNA, 24 nt, Artificial Sequence
  Synthetic
augagccaaagaaggcugauauuc

SEQ ID NO: 556082 - RNA, 18 nt, Artificial Sequence
  Synthetic
auauaaugauauauauuc

SEQ ID NO: 556083 - RNA, 19 nt, Artificial Sequence
  Synthetic
uauauaaugauauauauuc

SEQ ID NO: 556084 - RNA, 20 nt, Artificial Sequence
  Synthetic
auauauaaugauauauauuc

SEQ ID NO: 556085 - RNA, 21 nt, Artificial Sequence
  Synthetic
uauauauaaugauauauauuc

SEQ ID NO: 556086 - RNA, 22 nt, Artificial Sequence
  Synthetic
uuauauauaaugauauauauuc

SEQ ID NO: 556087 - RNA, 23 nt, Artificial Sequence
  Synthetic
uuuauauauaaugauauauauuc

SEQ ID NO: 556088 - RNA, 24 nt, Artificial Sequence
  Synthetic
uuuuauauauaaugauauauauuc

SEQ ID NO: 556089 - RNA, 18 nt, Artificial Sequence
  Synthetic
aaguacacaaguauauuc

SEQ ID NO: 556090 - RNA, 19 nt, Artificial Sequence
  Synthetic
uaaguacacaaguauauuc

SEQ ID NO: 556091 - RNA, 20 nt, Artificial Sequence
  Synthetic
uuaaguacacaaguauauuc

SEQ ID NO: 556092 - RNA, 21 nt, Artificial Sequence
  Synthetic
auuaaguacacaaguauauuc

SEQ ID NO: 556093 - RNA, 22 nt, Artificial Sequence
  Synthetic
cauuaaguacacaaguauauuc

SEQ ID NO: 556094 - RNA, 23 nt, Artificial Sequence
  Synthetic
ccauuaaguacacaaguauauuc

SEQ ID NO: 556095 - RNA, 24 nt, Artificial Sequence
  Synthetic
accauuaaguacacaaguauauuc

SEQ ID NO: 556096 - RNA, 18 nt, Artificial Sequence
  Synthetic
gacuagucagguauauuc

SEQ ID NO: 556097 - RNA, 19 nt, Artificial Sequence
  Synthetic
ggacuagucagguauauuc

SEQ ID NO: 556098 - RNA, 20 nt, Artificial Sequence
  Synthetic
aggacuagucagguauauuc

SEQ ID NO: 556099 - RNA, 21 nt, Artificial Sequence
  Synthetic
uaggacuagucagguauauuc

SEQ ID NO: 556100 - RNA, 22 nt, Artificial Sequence
  Synthetic
auaggacuagucagguauauuc

SEQ ID NO: 556101 - RNA, 23 nt, Artificial Sequence
  Synthetic
aauaggacuagucagguauauuc

SEQ ID NO: 556102 - RNA, 24 nt, Artificial Sequence
  Synthetic
gaauaggacuagucagguauauuc

SEQ ID NO: 556103 - RNA, 18 nt, Artificial Sequence
  Synthetic
auauagaauuguauauuc

SEQ ID NO: 556104 - RNA, 19 nt, Artificial Sequence
  Synthetic
uauauagaauuguauauuc

SEQ ID NO: 556105 - RNA, 20 nt, Artificial Sequence
  Synthetic
guauauagaauuguauauuc

SEQ ID NO: 556106 - RNA, 21 nt, Artificial Sequence
  Synthetic
aguauauagaauuguauauuc

SEQ ID NO: 556107 - RNA, 22 nt, Artificial Sequence
  Synthetic
caguauauagaauuguauauuc

SEQ ID NO: 556108 - RNA, 23 nt, Artificial Sequence
  Synthetic
ucaguauauagaauuguauauuc

SEQ ID NO: 556109 - RNA, 24 nt, Artificial Sequence
  Synthetic
cucaguauauagaauuguauauuc

SEQ ID NO: 556110 - RNA, 18 nt, Artificial Sequence
  Synthetic
ccuggaccaauuauauuc

SEQ ID NO: 556111 - RNA, 19 nt, Artificial Sequence
  Synthetic
cccuggaccaauuauauuc

SEQ ID NO: 556112 - RNA, 20 nt, Artificial Sequence
  Synthetic
gcccuggaccaauuauauuc

SEQ ID NO: 556113 - RNA, 21 nt, Artificial Sequence
  Synthetic
ggcccuggaccaauuauauuc

SEQ ID NO: 556114 - RNA, 22 nt, Artificial Sequence
  Synthetic
uggcccuggaccaauuauauuc

SEQ ID NO: 556115 - RNA, 23 nt, Artificial Sequence
  Synthetic
cuggcccuggaccaauuauauuc

SEQ ID NO: 556116 - RNA, 24 nt, Artificial Sequence
  Synthetic
ucuggcccuggaccaauuauauuc

SEQ ID NO: 556117 - RNA, 18 nt, Artificial Sequence
  Synthetic
uaagggucaauuauauuc

SEQ ID NO: 556118 - RNA, 19 nt, Artificial Sequence
  Synthetic
uuaagggucaauuauauuc

SEQ ID NO: 556119 - RNA, 20 nt, Artificial Sequence
  Synthetic
uuuaagggucaauuauauuc

SEQ ID NO: 556120 - RNA, 21 nt, Artificial Sequence
  Synthetic
auuuaagggucaauuauauuc

SEQ ID NO: 556121 - RNA, 22 nt, Artificial Sequence
  Synthetic
aauuuaagggucaauuauauuc

SEQ ID NO: 556122 - RNA, 23 nt, Artificial Sequence
  Synthetic
gaauuuaagggucaauuauauuc

SEQ ID NO: 556123 - RNA, 24 nt, Artificial Sequence
  Synthetic
agaauuuaagggucaauuauauuc

SEQ ID NO: 556124 - RNA, 18 nt, Artificial Sequence
  Synthetic
cagcacuaggcacuauuc

SEQ ID NO: 556125 - RNA, 19 nt, Artificial Sequence
  Synthetic
ucagcacuaggcacuauuc

SEQ ID NO: 556126 - RNA, 20 nt, Artificial Sequence
  Synthetic
uucagcacuaggcacuauuc

SEQ ID NO: 556127 - RNA, 21 nt, Artificial Sequence
  Synthetic
uuucagcacuaggcacuauuc

SEQ ID NO: 556128 - RNA, 22 nt, Artificial Sequence
  Synthetic
uuuucagcacuaggcacuauuc

SEQ ID NO: 556129 - RNA, 23 nt, Artificial Sequence
  Synthetic
uuuuucagcacuaggcacuauuc

SEQ ID NO: 556130 - RNA, 24 nt, Artificial Sequence
  Synthetic
auuuuucagcacuaggcacuauuc

SEQ ID NO: 556131 - RNA, 18 nt, Artificial Sequence
  Synthetic
augguugugauacuauuc

SEQ ID NO: 556132 - RNA, 19 nt, Artificial Sequence
  Synthetic
gaugguugugauacuauuc

SEQ ID NO: 556133 - RNA, 20 nt, Artificial Sequence
  Synthetic
agaugguugugauacuauuc

SEQ ID NO: 556134 - RNA, 21 nt, Artificial Sequence
  Synthetic
cagaugguugugauacuauuc

SEQ ID NO: 556135 - RNA, 22 nt, Artificial Sequence
  Synthetic
gcagaugguugugauacuauuc

SEQ ID NO: 556136 - RNA, 23 nt, Artificial Sequence
  Synthetic
agcagaugguugugauacuauuc

SEQ ID NO: 556137 - RNA, 24 nt, Artificial Sequence
  Synthetic
aagcagaugguugugauacuauuc

SEQ ID NO: 556138 - RNA, 18 nt, Artificial Sequence
  Synthetic
agaauuuucacccuauuc

SEQ ID NO: 556139 - RNA, 19 nt, Artificial Sequence
  Synthetic
cagaauuuucacccuauuc

SEQ ID NO: 556140 - RNA, 20 nt, Artificial Sequence
  Synthetic
ucagaauuuucacccuauuc

SEQ ID NO: 556141 - RNA, 21 nt, Artificial Sequence
  Synthetic
cucagaauuuucacccuauuc

SEQ ID NO: 556142 - RNA, 22 nt, Artificial Sequence
  Synthetic
ucucagaauuuucacccuauuc

SEQ ID NO: 556143 - RNA, 23 nt, Artificial Sequence
  Synthetic
aucucagaauuuucacccuauuc

SEQ ID NO: 556144 - RNA, 24 nt, Artificial Sequence
  Synthetic
aaucucagaauuuucacccuauuc

SEQ ID NO: 556145 - RNA, 18 nt, Artificial Sequence
  Synthetic
auuauuucuucccuauuc

SEQ ID NO: 556146 - RNA, 19 nt, Artificial Sequence
  Synthetic
aauuauuucuucccuauuc

SEQ ID NO: 556147 - RNA, 20 nt, Artificial Sequence
  Synthetic
aaauuauuucuucccuauuc

SEQ ID NO: 556148 - RNA, 21 nt, Artificial Sequence
  Synthetic
aaaauuauuucuucccuauuc

SEQ ID NO: 556149 - RNA, 22 nt, Artificial Sequence
  Synthetic
uaaaauuauuucuucccuauuc

SEQ ID NO: 556150 - RNA, 23 nt, Artificial Sequence
  Synthetic
cuaaaauuauuucuucccuauuc

SEQ ID NO: 556151 - RNA, 24 nt, Artificial Sequence
  Synthetic
ccuaaaauuauuucuucccuauuc

SEQ ID NO: 556152 - RNA, 18 nt, Artificial Sequence
  Synthetic
agaggaaguagccuauuc

SEQ ID NO: 556153 - RNA, 19 nt, Artificial Sequence
  Synthetic
aagaggaaguagccuauuc

SEQ ID NO: 556154 - RNA, 20 nt, Artificial Sequence
  Synthetic
aaagaggaaguagccuauuc

SEQ ID NO: 556155 - RNA, 21 nt, Artificial Sequence
  Synthetic
aaaagaggaaguagccuauuc

SEQ ID NO: 556156 - RNA, 22 nt, Artificial Sequence
  Synthetic
aaaaagaggaaguagccuauuc

SEQ ID NO: 556157 - RNA, 23 nt, Artificial Sequence
  Synthetic
aaaaaagaggaaguagccuauuc

SEQ ID NO: 556158 - RNA, 24 nt, Artificial Sequence
  Synthetic
aaaaaaagaggaaguagccuauuc

SEQ ID NO: 556159 - RNA, 18 nt, Artificial Sequence
  Synthetic
uuuauugagugccuauuc

SEQ ID NO: 556160 - RNA, 19 nt, Artificial Sequence
  Synthetic
auuuauugagugccuauuc

SEQ ID NO: 556161 - RNA, 20 nt, Artificial Sequence
  Synthetic
uauuuauugagugccuauuc

SEQ ID NO: 556162 - RNA, 21 nt, Artificial Sequence
  Synthetic
cuauuuauugagugccuauuc

SEQ ID NO: 556163 - RNA, 22 nt, Artificial Sequence
  Synthetic
acuauuuauugagugccuauuc

SEQ ID NO: 556164 - RNA, 23 nt, Artificial Sequence
  Synthetic
cacuauuuauugagugccuauuc

SEQ ID NO: 556165 - RNA, 24 nt, Artificial Sequence
  Synthetic
ccacuauuuauugagugccuauuc

SEQ ID NO: 556166 - RNA, 18 nt, Artificial Sequence
  Synthetic
cacaccuacauccuauuc

SEQ ID NO: 556167 - RNA, 19 nt, Artificial Sequence
  Synthetic
acacaccuacauccuauuc

SEQ ID NO: 556168 - RNA, 20 nt, Artificial Sequence
  Synthetic
cacacaccuacauccuauuc

SEQ ID NO: 556169 - RNA, 21 nt, Artificial Sequence
  Synthetic
acacacaccuacauccuauuc

SEQ ID NO: 556170 - RNA, 22 nt, Artificial Sequence
  Synthetic
cacacacaccuacauccuauuc

SEQ ID NO: 556171 - RNA, 23 nt, Artificial Sequence
  Synthetic
acacacacaccuacauccuauuc

SEQ ID NO: 556172 - RNA, 24 nt, Artificial Sequence
  Synthetic
cacacacacaccuacauccuauuc

SEQ ID NO: 556173 - RNA, 18 nt, Artificial Sequence
  Synthetic
guguuuguaaagcuauuc

SEQ ID NO: 556174 - RNA, 19 nt, Artificial Sequence
  Synthetic
uguguuuguaaagcuauuc

SEQ ID NO: 556175 - RNA, 20 nt, Artificial Sequence
  Synthetic
cuguguuuguaaagcuauuc

SEQ ID NO: 556176 - RNA, 21 nt, Artificial Sequence
  Synthetic
gcuguguuuguaaagcuauuc

SEQ ID NO: 556177 - RNA, 22 nt, Artificial Sequence
  Synthetic
cgcuguguuuguaaagcuauuc

SEQ ID NO: 556178 - RNA, 23 nt, Artificial Sequence
  Synthetic
gcgcuguguuuguaaagcuauuc

SEQ ID NO: 556179 - RNA, 24 nt, Artificial Sequence
  Synthetic
agcgcuguguuuguaaagcuauuc

SEQ ID NO: 556180 - RNA, 18 nt, Artificial Sequence
  Synthetic
cuguaaucccagcuauuc

SEQ ID NO: 556181 - RNA, 19 nt, Artificial Sequence
  Synthetic
ccuguaaucccagcuauuc

SEQ ID NO: 556182 - RNA, 20 nt, Artificial Sequence
  Synthetic
accuguaaucccagcuauuc

SEQ ID NO: 556183 - RNA, 21 nt, Artificial Sequence
  Synthetic
caccuguaaucccagcuauuc

SEQ ID NO: 556184 - RNA, 22 nt, Artificial Sequence
  Synthetic
acaccuguaaucccagcuauuc

SEQ ID NO: 556185 - RNA, 23 nt, Artificial Sequence
  Synthetic
cacaccuguaaucccagcuauuc

SEQ ID NO: 556186 - RNA, 24 nt, Artificial Sequence
  Synthetic
gcacaccuguaaucccagcuauuc

SEQ ID NO: 556187 - RNA, 18 nt, Artificial Sequence
  Synthetic
auugguuaagugcuauuc

SEQ ID NO: 556188 - RNA, 19 nt, Artificial Sequence
  Synthetic
cauugguuaagugcuauuc

SEQ ID NO: 556189 - RNA, 20 nt, Artificial Sequence
  Synthetic
ccauugguuaagugcuauuc

SEQ ID NO: 556190 - RNA, 21 nt, Artificial Sequence
  Synthetic
uccauugguuaagugcuauuc

SEQ ID NO: 556191 - RNA, 22 nt, Artificial Sequence
  Synthetic
guccauugguuaagugcuauuc

SEQ ID NO: 556192 - RNA, 23 nt, Artificial Sequence
  Synthetic
uguccauugguuaagugcuauuc

SEQ ID NO: 556193 - RNA, 24 nt, Artificial Sequence
  Synthetic
uuguccauugguuaagugcuauuc

SEQ ID NO: 556194 - RNA, 18 nt, Artificial Sequence
  Synthetic
uggcgccccuugcuauuc

SEQ ID NO: 556195 - RNA, 19 nt, Artificial Sequence
  Synthetic
auggcgccccuugcuauuc

SEQ ID NO: 556196 - RNA, 20 nt, Artificial Sequence
  Synthetic
cauggcgccccuugcuauuc

SEQ ID NO: 556197 - RNA, 21 nt, Artificial Sequence
  Synthetic
gcauggcgccccuugcuauuc

SEQ ID NO: 556198 - RNA, 22 nt, Artificial Sequence
  Synthetic
agcauggcgccccuugcuauuc

SEQ ID NO: 556199 - RNA, 23 nt, Artificial Sequence
  Synthetic
gagcauggcgccccuugcuauuc

SEQ ID NO: 556200 - RNA, 24 nt, Artificial Sequence
  Synthetic
agagcauggcgccccuugcuauuc

SEQ ID NO: 556201 - RNA, 18 nt, Artificial Sequence
  Synthetic
gcaucuauguugcuauuc

SEQ ID NO: 556202 - RNA, 19 nt, Artificial Sequence
  Synthetic
agcaucuauguugcuauuc

SEQ ID NO: 556203 - RNA, 20 nt, Artificial Sequence
  Synthetic
aagcaucuauguugcuauuc

SEQ ID NO: 556204 - RNA, 21 nt, Artificial Sequence
  Synthetic
uaagcaucuauguugcuauuc

SEQ ID NO: 556205 - RNA, 22 nt, Artificial Sequence
  Synthetic
guaagcaucuauguugcuauuc

SEQ ID NO: 556206 - RNA, 23 nt, Artificial Sequence
  Synthetic
aguaagcaucuauguugcuauuc

SEQ ID NO: 556207 - RNA, 24 nt, Artificial Sequence
  Synthetic
aaguaagcaucuauguugcuauuc

SEQ ID NO: 556208 - RNA, 18 nt, Artificial Sequence
  Synthetic
aaucaccuugcucuauuc

SEQ ID NO: 556209 - RNA, 19 nt, Artificial Sequence
  Synthetic
caaucaccuugcucuauuc

SEQ ID NO: 556210 - RNA, 20 nt, Artificial Sequence
  Synthetic
acaaucaccuugcucuauuc

SEQ ID NO: 556211 - RNA, 21 nt, Artificial Sequence
  Synthetic
cacaaucaccuugcucuauuc

SEQ ID NO: 556212 - RNA, 22 nt, Artificial Sequence
  Synthetic
acacaaucaccuugcucuauuc

SEQ ID NO: 556213 - RNA, 23 nt, Artificial Sequence
  Synthetic
aacacaaucaccuugcucuauuc

SEQ ID NO: 556214 - RNA, 24 nt, Artificial Sequence
  Synthetic
aaacacaaucaccuugcucuauuc

SEQ ID NO: 556215 - RNA, 18 nt, Artificial Sequence
  Synthetic
agguaguuaugucuauuc

SEQ ID NO: 556216 - RNA, 19 nt, Artificial Sequence
  Synthetic
aagguaguuaugucuauuc

SEQ ID NO: 556217 - RNA, 20 nt, Artificial Sequence
  Synthetic
aaagguaguuaugucuauuc

SEQ ID NO: 556218 - RNA, 21 nt, Artificial Sequence
  Synthetic
uaaagguaguuaugucuauuc

SEQ ID NO: 556219 - RNA, 22 nt, Artificial Sequence
  Synthetic
uuaaagguaguuaugucuauuc

SEQ ID NO: 556220 - RNA, 23 nt, Artificial Sequence
  Synthetic
auuaaagguaguuaugucuauuc

SEQ ID NO: 556221 - RNA, 24 nt, Artificial Sequence
  Synthetic
uauuaaagguaguuaugucuauuc

SEQ ID NO: 556222 - RNA, 18 nt, Artificial Sequence
  Synthetic
ccugauugccuucuauuc

SEQ ID NO: 556223 - RNA, 19 nt, Artificial Sequence
  Synthetic
uccugauugccuucuauuc

SEQ ID NO: 556224 - RNA, 20 nt, Artificial Sequence
  Synthetic
cuccugauugccuucuauuc

SEQ ID NO: 556225 - RNA, 21 nt, Artificial Sequence
  Synthetic
ucuccugauugccuucuauuc

SEQ ID NO: 556226 - RNA, 22 nt, Artificial Sequence
  Synthetic
cucuccugauugccuucuauuc

SEQ ID NO: 556227 - RNA, 23 nt, Artificial Sequence
  Synthetic
ucucuccugauugccuucuauuc

SEQ ID NO: 556228 - RNA, 24 nt, Artificial Sequence
  Synthetic
uucucuccugauugccuucuauuc

SEQ ID NO: 556229 - RNA, 18 nt, Artificial Sequence
  Synthetic
agaacccaguuucuauuc

SEQ ID NO: 556230 - RNA, 19 nt, Artificial Sequence
  Synthetic
uagaacccaguuucuauuc

SEQ ID NO: 556231 - RNA, 20 nt, Artificial Sequence
  Synthetic
auagaacccaguuucuauuc

SEQ ID NO: 556232 - RNA, 21 nt, Artificial Sequence
  Synthetic
aauagaacccaguuucuauuc

SEQ ID NO: 556233 - RNA, 22 nt, Artificial Sequence
  Synthetic
caauagaacccaguuucuauuc

SEQ ID NO: 556234 - RNA, 23 nt, Artificial Sequence
  Synthetic
ucaauagaacccaguuucuauuc

SEQ ID NO: 556235 - RNA, 24 nt, Artificial Sequence
  Synthetic
gucaauagaacccaguuucuauuc

SEQ ID NO: 556236 - RNA, 18 nt, Artificial Sequence
  Synthetic
aagauuuauuuucuauuc

SEQ ID NO: 556237 - RNA, 19 nt, Artificial Sequence
  Synthetic
aaagauuuauuuucuauuc

SEQ ID NO: 556238 - RNA, 20 nt, Artificial Sequence
  Synthetic
aaaagauuuauuuucuauuc

SEQ ID NO: 556239 - RNA, 21 nt, Artificial Sequence
  Synthetic
gaaaagauuuauuuucuauuc

SEQ ID NO: 556240 - RNA, 22 nt, Artificial Sequence
  Synthetic
ugaaaagauuuauuuucuauuc

SEQ ID NO: 556241 - RNA, 23 nt, Artificial Sequence
  Synthetic
uugaaaagauuuauuuucuauuc

SEQ ID NO: 556242 - RNA, 24 nt, Artificial Sequence
  Synthetic
uuugaaaagauuuauuuucuauuc

SEQ ID NO: 556243 - RNA, 18 nt, Artificial Sequence
  Synthetic
cuuaaaaagaaaguauuc

SEQ ID NO: 556244 - RNA, 19 nt, Artificial Sequence
  Synthetic
ccuuaaaaagaaaguauuc

SEQ ID NO: 556245 - RNA, 20 nt, Artificial Sequence
  Synthetic
gccuuaaaaagaaaguauuc

SEQ ID NO: 556246 - RNA, 21 nt, Artificial Sequence
  Synthetic
ugccuuaaaaagaaaguauuc

SEQ ID NO: 556247 - RNA, 22 nt, Artificial Sequence
  Synthetic
uugccuuaaaaagaaaguauuc

SEQ ID NO: 556248 - RNA, 23 nt, Artificial Sequence
  Synthetic
uuugccuuaaaaagaaaguauuc

SEQ ID NO: 556249 - RNA, 24 nt, Artificial Sequence
  Synthetic
cuuugccuuaaaaagaaaguauuc

SEQ ID NO: 556250 - RNA, 18 nt, Artificial Sequence
  Synthetic
auugaaucuccaguauuc

SEQ ID NO: 556251 - RNA, 19 nt, Artificial Sequence
  Synthetic
cauugaaucuccaguauuc

SEQ ID NO: 556252 - RNA, 20 nt, Artificial Sequence
  Synthetic
ucauugaaucuccaguauuc

SEQ ID NO: 556253 - RNA, 21 nt, Artificial Sequence
  Synthetic
aucauugaaucuccaguauuc

SEQ ID NO: 556254 - RNA, 22 nt, Artificial Sequence
  Synthetic
uaucauugaaucuccaguauuc

SEQ ID NO: 556255 - RNA, 23 nt, Artificial Sequence
  Synthetic
uuaucauugaaucuccaguauuc

SEQ ID NO: 556256 - RNA, 24 nt, Artificial Sequence
  Synthetic
guuaucauugaaucuccaguauuc

SEQ ID NO: 556257 - RNA, 18 nt, Artificial Sequence
  Synthetic
agugaaaaaucaguauuc

SEQ ID NO: 556258 - RNA, 19 nt, Artificial Sequence
  Synthetic
cagugaaaaaucaguauuc

SEQ ID NO: 556259 - RNA, 20 nt, Artificial Sequence
  Synthetic
gcagugaaaaaucaguauuc

SEQ ID NO: 556260 - RNA, 21 nt, Artificial Sequence
  Synthetic
agcagugaaaaaucaguauuc

SEQ ID NO: 556261 - RNA, 22 nt, Artificial Sequence
  Synthetic
gagcagugaaaaaucaguauuc

SEQ ID NO: 556262 - RNA, 23 nt, Artificial Sequence
  Synthetic
ugagcagugaaaaaucaguauuc

SEQ ID NO: 556263 - RNA, 24 nt, Artificial Sequence
  Synthetic
uugagcagugaaaaaucaguauuc

SEQ ID NO: 556264 - RNA, 18 nt, Artificial Sequence
  Synthetic
ugugagucuugaguauuc

SEQ ID NO: 556265 - RNA, 19 nt, Artificial Sequence
  Synthetic
augugagucuugaguauuc

SEQ ID NO: 556266 - RNA, 20 nt, Artificial Sequence
  Synthetic
caugugagucuugaguauuc

SEQ ID NO: 556267 - RNA, 21 nt, Artificial Sequence
  Synthetic
ucaugugagucuugaguauuc

SEQ ID NO: 556268 - RNA, 22 nt, Artificial Sequence
  Synthetic
aucaugugagucuugaguauuc

SEQ ID NO: 556269 - RNA, 23 nt, Artificial Sequence
  Synthetic
aaucaugugagucuugaguauuc

SEQ ID NO: 556270 - RNA, 24 nt, Artificial Sequence
  Synthetic
caaucaugugagucuugaguauuc

SEQ ID NO: 556271 - RNA, 18 nt, Artificial Sequence
  Synthetic
gaaagacgaaggguauuc

SEQ ID NO: 556272 - RNA, 19 nt, Artificial Sequence
  Synthetic
agaaagacgaaggguauuc

SEQ ID NO: 556273 - RNA, 20 nt, Artificial Sequence
  Synthetic
aagaaagacgaaggguauuc

SEQ ID NO: 556274 - RNA, 21 nt, Artificial Sequence
  Synthetic
gaagaaagacgaaggguauuc

SEQ ID NO: 556275 - RNA, 22 nt, Artificial Sequence
  Synthetic
ugaagaaagacgaaggguauuc

SEQ ID NO: 556276 - RNA, 23 nt, Artificial Sequence
  Synthetic
augaagaaagacgaaggguauuc

SEQ ID NO: 556277 - RNA, 24 nt, Artificial Sequence
  Synthetic
gaugaagaaagacgaaggguauuc

SEQ ID NO: 556278 - RNA, 18 nt, Artificial Sequence
  Synthetic
caucagugugcuguauuc

SEQ ID NO: 556279 - RNA, 19 nt, Artificial Sequence
  Synthetic
ccaucagugugcuguauuc

SEQ ID NO: 556280 - RNA, 20 nt, Artificial Sequence
  Synthetic
cccaucagugugcuguauuc

SEQ ID NO: 556281 - RNA, 21 nt, Artificial Sequence
  Synthetic
acccaucagugugcuguauuc

SEQ ID NO: 556282 - RNA, 22 nt, Artificial Sequence
  Synthetic
gacccaucagugugcuguauuc

SEQ ID NO: 556283 - RNA, 23 nt, Artificial Sequence
  Synthetic
agacccaucagugugcuguauuc

SEQ ID NO: 556284 - RNA, 24 nt, Artificial Sequence
  Synthetic
aagacccaucagugugcuguauuc

SEQ ID NO: 556285 - RNA, 18 nt, Artificial Sequence
  Synthetic
ugccauucucuuguauuc

SEQ ID NO: 556286 - RNA, 19 nt, Artificial Sequence
  Synthetic
uugccauucucuuguauuc

SEQ ID NO: 556287 - RNA, 20 nt, Artificial Sequence
  Synthetic
uuugccauucucuuguauuc

SEQ ID NO: 556288 - RNA, 21 nt, Artificial Sequence
  Synthetic
cuuugccauucucuuguauuc

SEQ ID NO: 556289 - RNA, 22 nt, Artificial Sequence
  Synthetic
gcuuugccauucucuuguauuc

SEQ ID NO: 556290 - RNA, 23 nt, Artificial Sequence
  Synthetic
ugcuuugccauucucuuguauuc

SEQ ID NO: 556291 - RNA, 24 nt, Artificial Sequence
  Synthetic
gugcuuugccauucucuuguauuc

SEQ ID NO: 556292 - RNA, 18 nt, Artificial Sequence
  Synthetic
uguaugucaaaauuauuc

SEQ ID NO: 556293 - RNA, 19 nt, Artificial Sequence
  Synthetic
auguaugucaaaauuauuc

SEQ ID NO: 556294 - RNA, 20 nt, Artificial Sequence
  Synthetic
uauguaugucaaaauuauuc

SEQ ID NO: 556295 - RNA, 21 nt, Artificial Sequence
  Synthetic
auauguaugucaaaauuauuc

SEQ ID NO: 556296 - RNA, 22 nt, Artificial Sequence
  Synthetic
cauauguaugucaaaauuauuc

SEQ ID NO: 556297 - RNA, 23 nt, Artificial Sequence
  Synthetic
acauauguaugucaaaauuauuc

SEQ ID NO: 556298 - RNA, 24 nt, Artificial Sequence
  Synthetic
uacauauguaugucaaaauuauuc

SEQ ID NO: 556299 - RNA, 18 nt, Artificial Sequence
  Synthetic
aaggugugauaauuauuc

SEQ ID NO: 556300 - RNA, 19 nt, Artificial Sequence
  Synthetic
gaaggugugauaauuauuc

SEQ ID NO: 556301 - RNA, 20 nt, Artificial Sequence
  Synthetic
ugaaggugugauaauuauuc

SEQ ID NO: 556302 - RNA, 21 nt, Artificial Sequence
  Synthetic
uugaaggugugauaauuauuc

SEQ ID NO: 556303 - RNA, 22 nt, Artificial Sequence
  Synthetic
uuugaaggugugauaauuauuc

SEQ ID NO: 556304 - RNA, 23 nt, Artificial Sequence
  Synthetic
uuuugaaggugugauaauuauuc

SEQ ID NO: 556305 - RNA, 24 nt, Artificial Sequence
  Synthetic
uuuuugaaggugugauaauuauuc

SEQ ID NO: 556306 - RNA, 18 nt, Artificial Sequence
  Synthetic
aaugaaacaacauuauuc

SEQ ID NO: 556307 - RNA, 19 nt, Artificial Sequence
  Synthetic
caaugaaacaacauuauuc

SEQ ID NO: 556308 - RNA, 20 nt, Artificial Sequence
  Synthetic
ucaaugaaacaacauuauuc

SEQ ID NO: 556309 - RNA, 21 nt, Artificial Sequence
  Synthetic
cucaaugaaacaacauuauuc

SEQ ID NO: 556310 - RNA, 22 nt, Artificial Sequence
  Synthetic
gcucaaugaaacaacauuauuc

SEQ ID NO: 556311 - RNA, 23 nt, Artificial Sequence
  Synthetic
ugcucaaugaaacaacauuauuc

SEQ ID NO: 556312 - RNA, 24 nt, Artificial Sequence
  Synthetic
augcucaaugaaacaacauuauuc

SEQ ID NO: 556313 - RNA, 18 nt, Artificial Sequence
  Synthetic
uucuaugaacacuuauuc

SEQ ID NO: 556314 - RNA, 19 nt, Artificial Sequence
  Synthetic
cuucuaugaacacuuauuc

SEQ ID NO: 556315 - RNA, 20 nt, Artificial Sequence
  Synthetic
ccuucuaugaacacuuauuc

SEQ ID NO: 556316 - RNA, 21 nt, Artificial Sequence
  Synthetic
cccuucuaugaacacuuauuc

SEQ ID NO: 556317 - RNA, 22 nt, Artificial Sequence
  Synthetic
ucccuucuaugaacacuuauuc

SEQ ID NO: 556318 - RNA, 23 nt, Artificial Sequence
  Synthetic
cucccuucuaugaacacuuauuc

SEQ ID NO: 556319 - RNA, 24 nt, Artificial Sequence
  Synthetic
ccucccuucuaugaacacuuauuc

SEQ ID NO: 556320 - RNA, 18 nt, Artificial Sequence
  Synthetic
caugaacaugacuuauuc

SEQ ID NO: 556321 - RNA, 19 nt, Artificial Sequence
  Synthetic
gcaugaacaugacuuauuc

SEQ ID NO: 556322 - RNA, 20 nt, Artificial Sequence
  Synthetic
agcaugaacaugacuuauuc

SEQ ID NO: 556323 - RNA, 21 nt, Artificial Sequence
  Synthetic
aagcaugaacaugacuuauuc

SEQ ID NO: 556324 - RNA, 22 nt, Artificial Sequence
  Synthetic
aaagcaugaacaugacuuauuc

SEQ ID NO: 556325 - RNA, 23 nt, Artificial Sequence
  Synthetic
aaaagcaugaacaugacuuauuc

SEQ ID NO: 556326 - RNA, 24 nt, Artificial Sequence
  Synthetic
caaaagcaugaacaugacuuauuc

SEQ ID NO: 556327 - RNA, 18 nt, Artificial Sequence
  Synthetic
gguguuuaguacuuauuc

SEQ ID NO: 556328 - RNA, 19 nt, Artificial Sequence
  Synthetic
ugguguuuaguacuuauuc

SEQ ID NO: 556329 - RNA, 20 nt, Artificial Sequence
  Synthetic
cugguguuuaguacuuauuc

SEQ ID NO: 556330 - RNA, 21 nt, Artificial Sequence
  Synthetic
acugguguuuaguacuuauuc

SEQ ID NO: 556331 - RNA, 22 nt, Artificial Sequence
  Synthetic
uacugguguuuaguacuuauuc

SEQ ID NO: 556332 - RNA, 23 nt, Artificial Sequence
  Synthetic
auacugguguuuaguacuuauuc

SEQ ID NO: 556333 - RNA, 24 nt, Artificial Sequence
  Synthetic
aauacugguguuuaguacuuauuc

SEQ ID NO: 556334 - RNA, 18 nt, Artificial Sequence
  Synthetic
gaaauaaauagguuauuc

SEQ ID NO: 556335 - RNA, 19 nt, Artificial Sequence
  Synthetic
ugaaauaaauagguuauuc

SEQ ID NO: 556336 - RNA, 20 nt, Artificial Sequence
  Synthetic
cugaaauaaauagguuauuc

SEQ ID NO: 556337 - RNA, 21 nt, Artificial Sequence
  Synthetic
acugaaauaaauagguuauuc

SEQ ID NO: 556338 - RNA, 22 nt, Artificial Sequence
  Synthetic
uacugaaauaaauagguuauuc

SEQ ID NO: 556339 - RNA, 23 nt, Artificial Sequence
  Synthetic
auacugaaauaaauagguuauuc

SEQ ID NO: 556340 - RNA, 24 nt, Artificial Sequence
  Synthetic
aauacugaaauaaauagguuauuc

SEQ ID NO: 556341 - RNA, 18 nt, Artificial Sequence
  Synthetic
uuuauuucaauguuauuc

SEQ ID NO: 556342 - RNA, 19 nt, Artificial Sequence
  Synthetic
cuuuauuucaauguuauuc

SEQ ID NO: 556343 - RNA, 20 nt, Artificial Sequence
  Synthetic
ucuuuauuucaauguuauuc

SEQ ID NO: 556344 - RNA, 21 nt, Artificial Sequence
  Synthetic
aucuuuauuucaauguuauuc

SEQ ID NO: 556345 - RNA, 22 nt, Artificial Sequence
  Synthetic
gaucuuuauuucaauguuauuc

SEQ ID NO: 556346 - RNA, 23 nt, Artificial Sequence
  Synthetic
agaucuuuauuucaauguuauuc

SEQ ID NO: 556347 - RNA, 24 nt, Artificial Sequence
  Synthetic
aagaucuuuauuucaauguuauuc

SEQ ID NO: 556348 - RNA, 18 nt, Artificial Sequence
  Synthetic
aaaaaugaaguguuauuc

SEQ ID NO: 556349 - RNA, 19 nt, Artificial Sequence
  Synthetic
caaaaaugaaguguuauuc

SEQ ID NO: 556350 - RNA, 20 nt, Artificial Sequence
  Synthetic
ccaaaaaugaaguguuauuc

SEQ ID NO: 556351 - RNA, 21 nt, Artificial Sequence
  Synthetic
uccaaaaaugaaguguuauuc

SEQ ID NO: 556352 - RNA, 22 nt, Artificial Sequence
  Synthetic
uuccaaaaaugaaguguuauuc

SEQ ID NO: 556353 - RNA, 23 nt, Artificial Sequence
  Synthetic
guuccaaaaaugaaguguuauuc

SEQ ID NO: 556354 - RNA, 24 nt, Artificial Sequence
  Synthetic
gguuccaaaaaugaaguguuauuc

SEQ ID NO: 556355 - RNA, 18 nt, Artificial Sequence
  Synthetic
gccauauaggauuuauuc

SEQ ID NO: 556356 - RNA, 19 nt, Artificial Sequence
  Synthetic
agccauauaggauuuauuc

SEQ ID NO: 556357 - RNA, 20 nt, Artificial Sequence
  Synthetic
gagccauauaggauuuauuc

SEQ ID NO: 556358 - RNA, 21 nt, Artificial Sequence
  Synthetic
agagccauauaggauuuauuc

SEQ ID NO: 556359 - RNA, 22 nt, Artificial Sequence
  Synthetic
gagagccauauaggauuuauuc

SEQ ID NO: 556360 - RNA, 23 nt, Artificial Sequence
  Synthetic
cgagagccauauaggauuuauuc

SEQ ID NO: 556361 - RNA, 24 nt, Artificial Sequence
  Synthetic
acgagagccauauaggauuuauuc

SEQ ID NO: 556362 - RNA, 18 nt, Artificial Sequence
  Synthetic
agggggggauauuuauuc

SEQ ID NO: 556363 - RNA, 19 nt, Artificial Sequence
  Synthetic
gagggggggauauuuauuc

SEQ ID NO: 556364 - RNA, 20 nt, Artificial Sequence
  Synthetic
ggagggggggauauuuauuc

SEQ ID NO: 556365 - RNA, 21 nt, Artificial Sequence
  Synthetic
aggagggggggauauuuauuc

SEQ ID NO: 556366 - RNA, 22 nt, Artificial Sequence
  Synthetic
aaggagggggggauauuuauuc

SEQ ID NO: 556367 - RNA, 23 nt, Artificial Sequence
  Synthetic
aaaggagggggggauauuuauuc

SEQ ID NO: 556368 - RNA, 24 nt, Artificial Sequence
  Synthetic
uaaaggagggggggauauuuauuc

SEQ ID NO: 556369 - RNA, 18 nt, Artificial Sequence
  Synthetic
ccauuacuuuauuuauuc

SEQ ID NO: 556370 - RNA, 19 nt, Artificial Sequence
  Synthetic
accauuacuuuauuuauuc

SEQ ID NO: 556371 - RNA, 20 nt, Artificial Sequence
  Synthetic
aaccauuacuuuauuuauuc

SEQ ID NO: 556372 - RNA, 21 nt, Artificial Sequence
  Synthetic
aaaccauuacuuuauuuauuc

SEQ ID NO: 556373 - RNA, 22 nt, Artificial Sequence
  Synthetic
gaaaccauuacuuuauuuauuc

SEQ ID NO: 556374 - RNA, 23 nt, Artificial Sequence
  Synthetic
ugaaaccauuacuuuauuuauuc

SEQ ID NO: 556375 - RNA, 24 nt, Artificial Sequence
  Synthetic
augaaaccauuacuuuauuuauuc

SEQ ID NO: 556376 - RNA, 18 nt, Artificial Sequence
  Synthetic
auacauuugacuuuauuc

SEQ ID NO: 556377 - RNA, 19 nt, Artificial Sequence
  Synthetic
aauacauuugacuuuauuc

SEQ ID NO: 556378 - RNA, 20 nt, Artificial Sequence
  Synthetic
caauacauuugacuuuauuc

SEQ ID NO: 556379 - RNA, 21 nt, Artificial Sequence
  Synthetic
acaauacauuugacuuuauuc

SEQ ID NO: 556380 - RNA, 22 nt, Artificial Sequence
  Synthetic
aacaauacauuugacuuuauuc

SEQ ID NO: 556381 - RNA, 23 nt, Artificial Sequence
  Synthetic
caacaauacauuugacuuuauuc

SEQ ID NO: 556382 - RNA, 24 nt, Artificial Sequence
  Synthetic
ucaacaauacauuugacuuuauuc

SEQ ID NO: 556383 - RNA, 18 nt, Artificial Sequence
  Synthetic
auguauauagguuuauuc

SEQ ID NO: 556384 - RNA, 19 nt, Artificial Sequence
  Synthetic
cauguauauagguuuauuc

SEQ ID NO: 556385 - RNA, 20 nt, Artificial Sequence
  Synthetic
ccauguauauagguuuauuc

SEQ ID NO: 556386 - RNA, 21 nt, Artificial Sequence
  Synthetic
gccauguauauagguuuauuc

SEQ ID NO: 556387 - RNA, 22 nt, Artificial Sequence
  Synthetic
ggccauguauauagguuuauuc

SEQ ID NO: 556388 - RNA, 23 nt, Artificial Sequence
  Synthetic
aggccauguauauagguuuauuc

SEQ ID NO: 556389 - RNA, 24 nt, Artificial Sequence
  Synthetic
aaggccauguauauagguuuauuc

SEQ ID NO: 556390 - RNA, 18 nt, Artificial Sequence
  Synthetic
cuuauuuuuuuuuuauuc

SEQ ID NO: 556391 - RNA, 19 nt, Artificial Sequence
  Synthetic
acuuauuuuuuuuuuauuc

SEQ ID NO: 556392 - RNA, 20 nt, Artificial Sequence
  Synthetic
uacuuauuuuuuuuuuauuc

SEQ ID NO: 556393 - RNA, 21 nt, Artificial Sequence
  Synthetic
uuacuuauuuuuuuuuuauuc

SEQ ID NO: 556394 - RNA, 22 nt, Artificial Sequence
  Synthetic
uuuacuuauuuuuuuuuuauuc

SEQ ID NO: 556395 - RNA, 23 nt, Artificial Sequence
  Synthetic
uuuuacuuauuuuuuuuuuauuc

SEQ ID NO: 556396 - RNA, 24 nt, Artificial Sequence
  Synthetic
auuuuacuuauuuuuuuuuuauuc

SEQ ID NO: 556397 - RNA, 18 nt, Artificial Sequence
  Synthetic
auaaauuaaaaaaacuuc

SEQ ID NO: 556398 - RNA, 19 nt, Artificial Sequence
  Synthetic
aauaaauuaaaaaaacuuc

SEQ ID NO: 556399 - RNA, 20 nt, Artificial Sequence
  Synthetic
caauaaauuaaaaaaacuuc

SEQ ID NO: 556400 - RNA, 21 nt, Artificial Sequence
  Synthetic
acaauaaauuaaaaaaacuuc

SEQ ID NO: 556401 - RNA, 22 nt, Artificial Sequence
  Synthetic
uacaauaaauuaaaaaaacuuc

SEQ ID NO: 556402 - RNA, 23 nt, Artificial Sequence
  Synthetic
auacaauaaauuaaaaaaacuuc

SEQ ID NO: 556403 - RNA, 24 nt, Artificial Sequence
  Synthetic
aauacaauaaauuaaaaaaacuuc

SEQ ID NO: 556404 - RNA, 18 nt, Artificial Sequence
  Synthetic
acaacauagaaaaacuuc

SEQ ID NO: 556405 - RNA, 19 nt, Artificial Sequence
  Synthetic
cacaacauagaaaaacuuc

SEQ ID NO: 556406 - RNA, 20 nt, Artificial Sequence
  Synthetic
acacaacauagaaaaacuuc

SEQ ID NO: 556407 - RNA, 21 nt, Artificial Sequence
  Synthetic
aacacaacauagaaaaacuuc

SEQ ID NO: 556408 - RNA, 22 nt, Artificial Sequence
  Synthetic
aaacacaacauagaaaaacuuc

SEQ ID NO: 556409 - RNA, 23 nt, Artificial Sequence
  Synthetic
aaaacacaacauagaaaaacuuc

SEQ ID NO: 556410 - RNA, 24 nt, Artificial Sequence
  Synthetic
gaaaacacaacauagaaaaacuuc

SEQ ID NO: 556411 - RNA, 18 nt, Artificial Sequence
  Synthetic
aagcugcgugaaaacuuc

SEQ ID NO: 556412 - RNA, 19 nt, Artificial Sequence
  Synthetic
uaagcugcgugaaaacuuc

SEQ ID NO: 556413 - RNA, 20 nt, Artificial Sequence
  Synthetic
cuaagcugcgugaaaacuuc

SEQ ID NO: 556414 - RNA, 21 nt, Artificial Sequence
  Synthetic
acuaagcugcgugaaaacuuc

SEQ ID NO: 556415 - RNA, 22 nt, Artificial Sequence
  Synthetic
uacuaagcugcgugaaaacuuc

SEQ ID NO: 556416 - RNA, 23 nt, Artificial Sequence
  Synthetic
auacuaagcugcgugaaaacuuc

SEQ ID NO: 556417 - RNA, 24 nt, Artificial Sequence
  Synthetic
uauacuaagcugcgugaaaacuuc

SEQ ID NO: 556418 - RNA, 18 nt, Artificial Sequence
  Synthetic
auauguaaauaaaacuuc

SEQ ID NO: 556419 - RNA, 19 nt, Artificial Sequence
  Synthetic
uauauguaaauaaaacuuc

SEQ ID NO: 556420 - RNA, 20 nt, Artificial Sequence
  Synthetic
auauauguaaauaaaacuuc

SEQ ID NO: 556421 - RNA, 21 nt, Artificial Sequence
  Synthetic
aauauauguaaauaaaacuuc

SEQ ID NO: 556422 - RNA, 22 nt, Artificial Sequence
  Synthetic
caauauauguaaauaaaacuuc

SEQ ID NO: 556423 - RNA, 23 nt, Artificial Sequence
  Synthetic
ucaauauauguaaauaaaacuuc

SEQ ID NO: 556424 - RNA, 24 nt, Artificial Sequence
  Synthetic
aucaauauauguaaauaaaacuuc

SEQ ID NO: 556425 - RNA, 18 nt, Artificial Sequence
  Synthetic
ccuucacaguaaaacuuc

SEQ ID NO: 556426 - RNA, 19 nt, Artificial Sequence
  Synthetic
cccuucacaguaaaacuuc

SEQ ID NO: 556427 - RNA, 20 nt, Artificial Sequence
  Synthetic
ccccuucacaguaaaacuuc

SEQ ID NO: 556428 - RNA, 21 nt, Artificial Sequence
  Synthetic
gccccuucacaguaaaacuuc

SEQ ID NO: 556429 - RNA, 22 nt, Artificial Sequence
  Synthetic
ugccccuucacaguaaaacuuc

SEQ ID NO: 556430 - RNA, 23 nt, Artificial Sequence
  Synthetic
gugccccuucacaguaaaacuuc

SEQ ID NO: 556431 - RNA, 24 nt, Artificial Sequence
  Synthetic
ugugccccuucacaguaaaacuuc

SEQ ID NO: 556432 - RNA, 18 nt, Artificial Sequence
  Synthetic
gaagcauauuaaaacuuc

SEQ ID NO: 556433 - RNA, 19 nt, Artificial Sequence
  Synthetic
agaagcauauuaaaacuuc

SEQ ID NO: 556434 - RNA, 20 nt, Artificial Sequence
  Synthetic
uagaagcauauuaaaacuuc

SEQ ID NO: 556435 - RNA, 21 nt, Artificial Sequence
  Synthetic
uuagaagcauauuaaaacuuc

SEQ ID NO: 556436 - RNA, 22 nt, Artificial Sequence
  Synthetic
cuuagaagcauauuaaaacuuc

SEQ ID NO: 556437 - RNA, 23 nt, Artificial Sequence
  Synthetic
acuuagaagcauauuaaaacuuc

SEQ ID NO: 556438 - RNA, 24 nt, Artificial Sequence
  Synthetic
cacuuagaagcauauuaaaacuuc

SEQ ID NO: 556439 - RNA, 18 nt, Artificial Sequence
  Synthetic
gagcuccuaggaaacuuc

SEQ ID NO: 556440 - RNA, 19 nt, Artificial Sequence
  Synthetic
agagcuccuaggaaacuuc

SEQ ID NO: 556441 - RNA, 20 nt, Artificial Sequence
  Synthetic
aagagcuccuaggaaacuuc

SEQ ID NO: 556442 - RNA, 21 nt, Artificial Sequence
  Synthetic
aaagagcuccuaggaaacuuc

SEQ ID NO: 556443 - RNA, 22 nt, Artificial Sequence
  Synthetic
aaaagagcuccuaggaaacuuc

SEQ ID NO: 556444 - RNA, 23 nt, Artificial Sequence
  Synthetic
gaaaagagcuccuaggaaacuuc

SEQ ID NO: 556445 - RNA, 24 nt, Artificial Sequence
  Synthetic
ggaaaagagcuccuaggaaacuuc

SEQ ID NO: 556446 - RNA, 18 nt, Artificial Sequence
  Synthetic
aauaaauacugcaacuuc

SEQ ID NO: 556447 - RNA, 19 nt, Artificial Sequence
  Synthetic
aaauaaauacugcaacuuc

SEQ ID NO: 556448 - RNA, 20 nt, Artificial Sequence
  Synthetic
uaaauaaauacugcaacuuc

SEQ ID NO: 556449 - RNA, 21 nt, Artificial Sequence
  Synthetic
uuaaauaaauacugcaacuuc

SEQ ID NO: 556450 - RNA, 22 nt, Artificial Sequence
  Synthetic
uuuaaauaaauacugcaacuuc

SEQ ID NO: 556451 - RNA, 23 nt, Artificial Sequence
  Synthetic
uuuuaaauaaauacugcaacuuc

SEQ ID NO: 556452 - RNA, 24 nt, Artificial Sequence
  Synthetic
auuuuaaauaaauacugcaacuuc

SEQ ID NO: 556453 - RNA, 18 nt, Artificial Sequence
  Synthetic
ucuuagacguucaacuuc

SEQ ID NO: 556454 - RNA, 19 nt, Artificial Sequence
  Synthetic
aucuuagacguucaacuuc

SEQ ID NO: 556455 - RNA, 20 nt, Artificial Sequence
  Synthetic
aaucuuagacguucaacuuc

SEQ ID NO: 556456 - RNA, 21 nt, Artificial Sequence
  Synthetic
uaaucuuagacguucaacuuc

SEQ ID NO: 556457 - RNA, 22 nt, Artificial Sequence
  Synthetic
uuaaucuuagacguucaacuuc

SEQ ID NO: 556458 - RNA, 23 nt, Artificial Sequence
  Synthetic
cuuaaucuuagacguucaacuuc

SEQ ID NO: 556459 - RNA, 24 nt, Artificial Sequence
  Synthetic
ccuuaaucuuagacguucaacuuc

SEQ ID NO: 556460 - RNA, 18 nt, Artificial Sequence
  Synthetic
gugucucaaaggaacuuc

SEQ ID NO: 556461 - RNA, 19 nt, Artificial Sequence
  Synthetic
ugugucucaaaggaacuuc

SEQ ID NO: 556462 - RNA, 20 nt, Artificial Sequence
  Synthetic
cugugucucaaaggaacuuc

SEQ ID NO: 556463 - RNA, 21 nt, Artificial Sequence
  Synthetic
acugugucucaaaggaacuuc

SEQ ID NO: 556464 - RNA, 22 nt, Artificial Sequence
  Synthetic
gacugugucucaaaggaacuuc

SEQ ID NO: 556465 - RNA, 23 nt, Artificial Sequence
  Synthetic
ugacugugucucaaaggaacuuc

SEQ ID NO: 556466 - RNA, 24 nt, Artificial Sequence
  Synthetic
augacugugucucaaaggaacuuc

SEQ ID NO: 556467 - RNA, 18 nt, Artificial Sequence
  Synthetic
uguagugucuggaacuuc

SEQ ID NO: 556468 - RNA, 19 nt, Artificial Sequence
  Synthetic
uuguagugucuggaacuuc

SEQ ID NO: 556469 - RNA, 20 nt, Artificial Sequence
  Synthetic
auuguagugucuggaacuuc

SEQ ID NO: 556470 - RNA, 21 nt, Artificial Sequence
  Synthetic
uauuguagugucuggaacuuc

SEQ ID NO: 556471 - RNA, 22 nt, Artificial Sequence
  Synthetic
uuauuguagugucuggaacuuc

SEQ ID NO: 556472 - RNA, 23 nt, Artificial Sequence
  Synthetic
uuuauuguagugucuggaacuuc

SEQ ID NO: 556473 - RNA, 24 nt, Artificial Sequence
  Synthetic
cuuuauuguagugucuggaacuuc

SEQ ID NO: 556474 - RNA, 18 nt, Artificial Sequence
  Synthetic
agcccagcagugaacuuc

SEQ ID NO: 556475 - RNA, 19 nt, Artificial Sequence
  Synthetic
uagcccagcagugaacuuc

SEQ ID NO: 556476 - RNA, 20 nt, Artificial Sequence
  Synthetic
uuagcccagcagugaacuuc

SEQ ID NO: 556477 - RNA, 21 nt, Artificial Sequence
  Synthetic
cuuagcccagcagugaacuuc

SEQ ID NO: 556478 - RNA, 22 nt, Artificial Sequence
  Synthetic
acuuagcccagcagugaacuuc

SEQ ID NO: 556479 - RNA, 23 nt, Artificial Sequence
  Synthetic
cacuuagcccagcagugaacuuc

SEQ ID NO: 556480 - RNA, 24 nt, Artificial Sequence
  Synthetic
ucacuuagcccagcagugaacuuc

SEQ ID NO: 556481 - RNA, 18 nt, Artificial Sequence
  Synthetic
uaaaacuaagauaacuuc

SEQ ID NO: 556482 - RNA, 19 nt, Artificial Sequence
  Synthetic
uuaaaacuaagauaacuuc

SEQ ID NO: 556483 - RNA, 20 nt, Artificial Sequence
  Synthetic
uuuaaaacuaagauaacuuc

SEQ ID NO: 556484 - RNA, 21 nt, Artificial Sequence
  Synthetic
cuuuaaaacuaagauaacuuc

SEQ ID NO: 556485 - RNA, 22 nt, Artificial Sequence
  Synthetic
ccuuuaaaacuaagauaacuuc

SEQ ID NO: 556486 - RNA, 23 nt, Artificial Sequence
  Synthetic
cccuuuaaaacuaagauaacuuc

SEQ ID NO: 556487 - RNA, 24 nt, Artificial Sequence
  Synthetic
acccuuuaaaacuaagauaacuuc

SEQ ID NO: 556488 - RNA, 18 nt, Artificial Sequence
  Synthetic
guccaguuucuuaacuuc

SEQ ID NO: 556489 - RNA, 19 nt, Artificial Sequence
  Synthetic
gguccaguuucuuaacuuc

SEQ ID NO: 556490 - RNA, 20 nt, Artificial Sequence
  Synthetic
ugguccaguuucuuaacuuc

SEQ ID NO: 556491 - RNA, 21 nt, Artificial Sequence
  Synthetic
uugguccaguuucuuaacuuc

SEQ ID NO: 556492 - RNA, 22 nt, Artificial Sequence
  Synthetic
guugguccaguuucuuaacuuc

SEQ ID NO: 556493 - RNA, 23 nt, Artificial Sequence
  Synthetic
uguugguccaguuucuuaacuuc

SEQ ID NO: 556494 - RNA, 24 nt, Artificial Sequence
  Synthetic
auguugguccaguuucuuaacuuc

SEQ ID NO: 556495 - RNA, 18 nt, Artificial Sequence
  Synthetic
guguuacaaauacacuuc

SEQ ID NO: 556496 - RNA, 19 nt, Artificial Sequence
  Synthetic
uguguuacaaauacacuuc

SEQ ID NO: 556497 - RNA, 20 nt, Artificial Sequence
  Synthetic
cuguguuacaaauacacuuc

SEQ ID NO: 556498 - RNA, 21 nt, Artificial Sequence
  Synthetic
acuguguuacaaauacacuuc

SEQ ID NO: 556499 - RNA, 22 nt, Artificial Sequence
  Synthetic
aacuguguuacaaauacacuuc

SEQ ID NO: 556500 - RNA, 23 nt, Artificial Sequence
  Synthetic
gaacuguguuacaaauacacuuc

SEQ ID NO: 556501 - RNA, 24 nt, Artificial Sequence
  Synthetic
ugaacuguguuacaaauacacuuc

SEQ ID NO: 556502 - RNA, 18 nt, Artificial Sequence
  Synthetic
uauacaggaacagacuuc

SEQ ID NO: 556503 - RNA, 19 nt, Artificial Sequence
  Synthetic
uuauacaggaacagacuuc

SEQ ID NO: 556504 - RNA, 20 nt, Artificial Sequence
  Synthetic
guuauacaggaacagacuuc

SEQ ID NO: 556505 - RNA, 21 nt, Artificial Sequence
  Synthetic
gguuauacaggaacagacuuc

SEQ ID NO: 556506 - RNA, 22 nt, Artificial Sequence
  Synthetic
agguuauacaggaacagacuuc

SEQ ID NO: 556507 - RNA, 23 nt, Artificial Sequence
  Synthetic
cagguuauacaggaacagacuuc

SEQ ID NO: 556508 - RNA, 24 nt, Artificial Sequence
  Synthetic
ucagguuauacaggaacagacuuc

SEQ ID NO: 556509 - RNA, 18 nt, Artificial Sequence
  Synthetic
cucuuaugugcagacuuc

SEQ ID NO: 556510 - RNA, 19 nt, Artificial Sequence
  Synthetic
acucuuaugugcagacuuc

SEQ ID NO: 556511 - RNA, 20 nt, Artificial Sequence
  Synthetic
aacucuuaugugcagacuuc

SEQ ID NO: 556512 - RNA, 21 nt, Artificial Sequence
  Synthetic
aaacucuuaugugcagacuuc

SEQ ID NO: 556513 - RNA, 22 nt, Artificial Sequence
  Synthetic
gaaacucuuaugugcagacuuc

SEQ ID NO: 556514 - RNA, 23 nt, Artificial Sequence
  Synthetic
ugaaacucuuaugugcagacuuc

SEQ ID NO: 556515 - RNA, 24 nt, Artificial Sequence
  Synthetic
uugaaacucuuaugugcagacuuc

SEQ ID NO: 556516 - RNA, 18 nt, Artificial Sequence
  Synthetic
cucauugucucagacuuc

SEQ ID NO: 556517 - RNA, 19 nt, Artificial Sequence
  Synthetic
acucauugucucagacuuc

SEQ ID NO: 556518 - RNA, 20 nt, Artificial Sequence
  Synthetic
aacucauugucucagacuuc

SEQ ID NO: 556519 - RNA, 21 nt, Artificial Sequence
  Synthetic
aaacucauugucucagacuuc

SEQ ID NO: 556520 - RNA, 22 nt, Artificial Sequence
  Synthetic
aaaacucauugucucagacuuc

SEQ ID NO: 556521 - RNA, 23 nt, Artificial Sequence
  Synthetic
caaaacucauugucucagacuuc

SEQ ID NO: 556522 - RNA, 24 nt, Artificial Sequence
  Synthetic
acaaaacucauugucucagacuuc

SEQ ID NO: 556523 - RNA, 18 nt, Artificial Sequence
  Synthetic
auuuugcaugacgacuuc

SEQ ID NO: 556524 - RNA, 19 nt, Artificial Sequence
  Synthetic
aauuuugcaugacgacuuc

SEQ ID NO: 556525 - RNA, 20 nt, Artificial Sequence
  Synthetic
caauuuugcaugacgacuuc

SEQ ID NO: 556526 - RNA, 21 nt, Artificial Sequence
  Synthetic
ucaauuuugcaugacgacuuc

SEQ ID NO: 556527 - RNA, 22 nt, Artificial Sequence
  Synthetic
uucaauuuugcaugacgacuuc

SEQ ID NO: 556528 - RNA, 23 nt, Artificial Sequence
  Synthetic
uuucaauuuugcaugacgacuuc

SEQ ID NO: 556529 - RNA, 24 nt, Artificial Sequence
  Synthetic
uuuucaauuuugcaugacgacuuc

SEQ ID NO: 556530 - RNA, 18 nt, Artificial Sequence
  Synthetic
aagagcuuaacugacuuc

SEQ ID NO: 556531 - RNA, 19 nt, Artificial Sequence
  Synthetic
caagagcuuaacugacuuc

SEQ ID NO: 556532 - RNA, 20 nt, Artificial Sequence
  Synthetic
ucaagagcuuaacugacuuc

SEQ ID NO: 556533 - RNA, 21 nt, Artificial Sequence
  Synthetic
uucaagagcuuaacugacuuc

SEQ ID NO: 556534 - RNA, 22 nt, Artificial Sequence
  Synthetic
auucaagagcuuaacugacuuc

SEQ ID NO: 556535 - RNA, 23 nt, Artificial Sequence
  Synthetic
gauucaagagcuuaacugacuuc

SEQ ID NO: 556536 - RNA, 24 nt, Artificial Sequence
  Synthetic
agauucaagagcuuaacugacuuc

SEQ ID NO: 556537 - RNA, 18 nt, Artificial Sequence
  Synthetic
gaguauuccaaauacuuc

SEQ ID NO: 556538 - RNA, 19 nt, Artificial Sequence
  Synthetic
agaguauuccaaauacuuc

SEQ ID NO: 556539 - RNA, 20 nt, Artificial Sequence
  Synthetic
gagaguauuccaaauacuuc

SEQ ID NO: 556540 - RNA, 21 nt, Artificial Sequence
  Synthetic
cgagaguauuccaaauacuuc

SEQ ID NO: 556541 - RNA, 22 nt, Artificial Sequence
  Synthetic
ucgagaguauuccaaauacuuc

SEQ ID NO: 556542 - RNA, 23 nt, Artificial Sequence
  Synthetic
aucgagaguauuccaaauacuuc

SEQ ID NO: 556543 - RNA, 24 nt, Artificial Sequence
  Synthetic
aaucgagaguauuccaaauacuuc

SEQ ID NO: 556544 - RNA, 18 nt, Artificial Sequence
  Synthetic
auacgcuuucuauacuuc

SEQ ID NO: 556545 - RNA, 19 nt, Artificial Sequence
  Synthetic
cauacgcuuucuauacuuc

SEQ ID NO: 556546 - RNA, 20 nt, Artificial Sequence
  Synthetic
ucauacgcuuucuauacuuc

SEQ ID NO: 556547 - RNA, 21 nt, Artificial Sequence
  Synthetic
uucauacgcuuucuauacuuc

SEQ ID NO: 556548 - RNA, 22 nt, Artificial Sequence
  Synthetic
uuucauacgcuuucuauacuuc

SEQ ID NO: 556549 - RNA, 23 nt, Artificial Sequence
  Synthetic
cuuucauacgcuuucuauacuuc

SEQ ID NO: 556550 - RNA, 24 nt, Artificial Sequence
  Synthetic
ccuuucauacgcuuucuauacuuc

SEQ ID NO: 556551 - RNA, 18 nt, Artificial Sequence
  Synthetic
ccuuaguaugccuacuuc

SEQ ID NO: 556552 - RNA, 19 nt, Artificial Sequence
  Synthetic
uccuuaguaugccuacuuc

SEQ ID NO: 556553 - RNA, 20 nt, Artificial Sequence
  Synthetic
uuccuuaguaugccuacuuc

SEQ ID NO: 556554 - RNA, 21 nt, Artificial Sequence
  Synthetic
uuuccuuaguaugccuacuuc

SEQ ID NO: 556555 - RNA, 22 nt, Artificial Sequence
  Synthetic
cuuuccuuaguaugccuacuuc

SEQ ID NO: 556556 - RNA, 23 nt, Artificial Sequence
  Synthetic
ucuuuccuuaguaugccuacuuc

SEQ ID NO: 556557 - RNA, 24 nt, Artificial Sequence
  Synthetic
gucuuuccuuaguaugccuacuuc

SEQ ID NO: 556558 - RNA, 18 nt, Artificial Sequence
  Synthetic
cugucucuucucuacuuc

SEQ ID NO: 556559 - RNA, 19 nt, Artificial Sequence
  Synthetic
acugucucuucucuacuuc

SEQ ID NO: 556560 - RNA, 20 nt, Artificial Sequence
  Synthetic
aacugucucuucucuacuuc

SEQ ID NO: 556561 - RNA, 21 nt, Artificial Sequence
  Synthetic
uaacugucucuucucuacuuc

SEQ ID NO: 556562 - RNA, 22 nt, Artificial Sequence
  Synthetic
uuaacugucucuucucuacuuc

SEQ ID NO: 556563 - RNA, 23 nt, Artificial Sequence
  Synthetic
auuaacugucucuucucuacuuc

SEQ ID NO: 556564 - RNA, 24 nt, Artificial Sequence
  Synthetic
uauuaacugucucuucucuacuuc

SEQ ID NO: 556565 - RNA, 18 nt, Artificial Sequence
  Synthetic
aauuuaucuaaguacuuc

SEQ ID NO: 556566 - RNA, 19 nt, Artificial Sequence
  Synthetic
uaauuuaucuaaguacuuc

SEQ ID NO: 556567 - RNA, 20 nt, Artificial Sequence
  Synthetic
uuaauuuaucuaaguacuuc

SEQ ID NO: 556568 - RNA, 21 nt, Artificial Sequence
  Synthetic
guuaauuuaucuaaguacuuc

SEQ ID NO: 556569 - RNA, 22 nt, Artificial Sequence
  Synthetic
aguuaauuuaucuaaguacuuc

SEQ ID NO: 556570 - RNA, 23 nt, Artificial Sequence
  Synthetic
gaguuaauuuaucuaaguacuuc

SEQ ID NO: 556571 - RNA, 24 nt, Artificial Sequence
  Synthetic
ugaguuaauuuaucuaaguacuuc

SEQ ID NO: 556572 - RNA, 18 nt, Artificial Sequence
  Synthetic
cucuccuacugguacuuc

SEQ ID NO: 556573 - RNA, 19 nt, Artificial Sequence
  Synthetic
acucuccuacugguacuuc

SEQ ID NO: 556574 - RNA, 20 nt, Artificial Sequence
  Synthetic
cacucuccuacugguacuuc

SEQ ID NO: 556575 - RNA, 21 nt, Artificial Sequence
  Synthetic
ccacucuccuacugguacuuc

SEQ ID NO: 556576 - RNA, 22 nt, Artificial Sequence
  Synthetic
cccacucuccuacugguacuuc

SEQ ID NO: 556577 - RNA, 23 nt, Artificial Sequence
  Synthetic
ucccacucuccuacugguacuuc

SEQ ID NO: 556578 - RNA, 24 nt, Artificial Sequence
  Synthetic
gucccacucuccuacugguacuuc

SEQ ID NO: 556579 - RNA, 18 nt, Artificial Sequence
  Synthetic
aaugucacuauguacuuc

SEQ ID NO: 556580 - RNA, 19 nt, Artificial Sequence
  Synthetic
gaaugucacuauguacuuc

SEQ ID NO: 556581 - RNA, 20 nt, Artificial Sequence
  Synthetic
agaaugucacuauguacuuc

SEQ ID NO: 556582 - RNA, 21 nt, Artificial Sequence
  Synthetic
aagaaugucacuauguacuuc

SEQ ID NO: 556583 - RNA, 22 nt, Artificial Sequence
  Synthetic
gaagaaugucacuauguacuuc

SEQ ID NO: 556584 - RNA, 23 nt, Artificial Sequence
  Synthetic
ggaagaaugucacuauguacuuc

SEQ ID NO: 556585 - RNA, 24 nt, Artificial Sequence
  Synthetic
uggaagaaugucacuauguacuuc

SEQ ID NO: 556586 - RNA, 18 nt, Artificial Sequence
  Synthetic
aauacgaccuauuacuuc

SEQ ID NO: 556587 - RNA, 19 nt, Artificial Sequence
  Synthetic
aaauacgaccuauuacuuc

SEQ ID NO: 556588 - RNA, 20 nt, Artificial Sequence
  Synthetic
aaaauacgaccuauuacuuc

SEQ ID NO: 556589 - RNA, 21 nt, Artificial Sequence
  Synthetic
caaaauacgaccuauuacuuc

SEQ ID NO: 556590 - RNA, 22 nt, Artificial Sequence
  Synthetic
acaaaauacgaccuauuacuuc

SEQ ID NO: 556591 - RNA, 23 nt, Artificial Sequence
  Synthetic
cacaaaauacgaccuauuacuuc

SEQ ID NO: 556592 - RNA, 24 nt, Artificial Sequence
  Synthetic
acacaaaauacgaccuauuacuuc

SEQ ID NO: 556593 - RNA, 18 nt, Artificial Sequence
  Synthetic
agggucacugguuacuuc

SEQ ID NO: 556594 - RNA, 19 nt, Artificial Sequence
  Synthetic
aagggucacugguuacuuc

SEQ ID NO: 556595 - RNA, 20 nt, Artificial Sequence
  Synthetic
aaagggucacugguuacuuc

SEQ ID NO: 556596 - RNA, 21 nt, Artificial Sequence
  Synthetic
caaagggucacugguuacuuc

SEQ ID NO: 556597 - RNA, 22 nt, Artificial Sequence
  Synthetic
ucaaagggucacugguuacuuc

SEQ ID NO: 556598 - RNA, 23 nt, Artificial Sequence
  Synthetic
uucaaagggucacugguuacuuc

SEQ ID NO: 556599 - RNA, 24 nt, Artificial Sequence
  Synthetic
uuucaaagggucacugguuacuuc

SEQ ID NO: 556600 - RNA, 18 nt, Artificial Sequence
  Synthetic
acuucgaccaaaaccuuc

SEQ ID NO: 556601 - RNA, 19 nt, Artificial Sequence
  Synthetic
aacuucgaccaaaaccuuc

SEQ ID NO: 556602 - RNA, 20 nt, Artificial Sequence
  Synthetic
aaacuucgaccaaaaccuuc

SEQ ID NO: 556603 - RNA, 21 nt, Artificial Sequence
  Synthetic
aaaacuucgaccaaaaccuuc

SEQ ID NO: 556604 - RNA, 22 nt, Artificial Sequence
  Synthetic
caaaacuucgaccaaaaccuuc

SEQ ID NO: 556605 - RNA, 23 nt, Artificial Sequence
  Synthetic
gcaaaacuucgaccaaaaccuuc

SEQ ID NO: 556606 - RNA, 24 nt, Artificial Sequence
  Synthetic
ggcaaaacuucgaccaaaaccuuc

SEQ ID NO: 556607 - RNA, 18 nt, Artificial Sequence
  Synthetic
gugaccagggaaaccuuc

SEQ ID NO: 556608 - RNA, 19 nt, Artificial Sequence
  Synthetic
ggugaccagggaaaccuuc

SEQ ID NO: 556609 - RNA, 20 nt, Artificial Sequence
  Synthetic
gggugaccagggaaaccuuc

SEQ ID NO: 556610 - RNA, 21 nt, Artificial Sequence
  Synthetic
ggggugaccagggaaaccuuc

SEQ ID NO: 556611 - RNA, 22 nt, Artificial Sequence
  Synthetic
gggggugaccagggaaaccuuc

SEQ ID NO: 556612 - RNA, 23 nt, Artificial Sequence
  Synthetic
agggggugaccagggaaaccuuc

SEQ ID NO: 556613 - RNA, 24 nt, Artificial Sequence
  Synthetic
gagggggugaccagggaaaccuuc

SEQ ID NO: 556614 - RNA, 18 nt, Artificial Sequence
  Synthetic
acuguaguuccaaccuuc

SEQ ID NO: 556615 - RNA, 19 nt, Artificial Sequence
  Synthetic
uacuguaguuccaaccuuc

SEQ ID NO: 556616 - RNA, 20 nt, Artificial Sequence
  Synthetic
auacuguaguuccaaccuuc

SEQ ID NO: 556617 - RNA, 21 nt, Artificial Sequence
  Synthetic
gauacuguaguuccaaccuuc

SEQ ID NO: 556618 - RNA, 22 nt, Artificial Sequence
  Synthetic
ggauacuguaguuccaaccuuc

SEQ ID NO: 556619 - RNA, 23 nt, Artificial Sequence
  Synthetic
uggauacuguaguuccaaccuuc

SEQ ID NO: 556620 - RNA, 24 nt, Artificial Sequence
  Synthetic
cuggauacuguaguuccaaccuuc

SEQ ID NO: 556621 - RNA, 18 nt, Artificial Sequence
  Synthetic
acgcaauuauuaaccuuc

SEQ ID NO: 556622 - RNA, 19 nt, Artificial Sequence
  Synthetic
cacgcaauuauuaaccuuc

SEQ ID NO: 556623 - RNA, 20 nt, Artificial Sequence
  Synthetic
gcacgcaauuauuaaccuuc

SEQ ID NO: 556624 - RNA, 21 nt, Artificial Sequence
  Synthetic
cgcacgcaauuauuaaccuuc

SEQ ID NO: 556625 - RNA, 22 nt, Artificial Sequence
  Synthetic
acgcacgcaauuauuaaccuuc

SEQ ID NO: 556626 - RNA, 23 nt, Artificial Sequence
  Synthetic
cacgcacgcaauuauuaaccuuc

SEQ ID NO: 556627 - RNA, 24 nt, Artificial Sequence
  Synthetic
acacgcacgcaauuauuaaccuuc

SEQ ID NO: 556628 - RNA, 18 nt, Artificial Sequence
  Synthetic
gggauuauauacaccuuc

SEQ ID NO: 556629 - RNA, 19 nt, Artificial Sequence
  Synthetic
ugggauuauauacaccuuc

SEQ ID NO: 556630 - RNA, 20 nt, Artificial Sequence
  Synthetic
gugggauuauauacaccuuc

SEQ ID NO: 556631 - RNA, 21 nt, Artificial Sequence
  Synthetic
ggugggauuauauacaccuuc

SEQ ID NO: 556632 - RNA, 22 nt, Artificial Sequence
  Synthetic
uggugggauuauauacaccuuc

SEQ ID NO: 556633 - RNA, 23 nt, Artificial Sequence
  Synthetic
auggugggauuauauacaccuuc

SEQ ID NO: 556634 - RNA, 24 nt, Artificial Sequence
  Synthetic
cauggugggauuauauacaccuuc

SEQ ID NO: 556635 - RNA, 18 nt, Artificial Sequence
  Synthetic
ccuucuuuuuccaccuuc

SEQ ID NO: 556636 - RNA, 19 nt, Artificial Sequence
  Synthetic
cccuucuuuuuccaccuuc

SEQ ID NO: 556637 - RNA, 20 nt, Artificial Sequence
  Synthetic
ucccuucuuuuuccaccuuc

SEQ ID NO: 556638 - RNA, 21 nt, Artificial Sequence
  Synthetic
uucccuucuuuuuccaccuuc

SEQ ID NO: 556639 - RNA, 22 nt, Artificial Sequence
  Synthetic
uuucccuucuuuuuccaccuuc

SEQ ID NO: 556640 - RNA, 23 nt, Artificial Sequence
  Synthetic
uuuucccuucuuuuuccaccuuc

SEQ ID NO: 556641 - RNA, 24 nt, Artificial Sequence
  Synthetic
auuuucccuucuuuuuccaccuuc

SEQ ID NO: 556642 - RNA, 18 nt, Artificial Sequence
  Synthetic
uguguauguaucaccuuc

SEQ ID NO: 556643 - RNA, 19 nt, Artificial Sequence
  Synthetic
guguguauguaucaccuuc

SEQ ID NO: 556644 - RNA, 20 nt, Artificial Sequence
  Synthetic
uguguguauguaucaccuuc

SEQ ID NO: 556645 - RNA, 21 nt, Artificial Sequence
  Synthetic
cuguguguauguaucaccuuc

SEQ ID NO: 556646 - RNA, 22 nt, Artificial Sequence
  Synthetic
gcuguguguauguaucaccuuc

SEQ ID NO: 556647 - RNA, 23 nt, Artificial Sequence
  Synthetic
ggcuguguguauguaucaccuuc

SEQ ID NO: 556648 - RNA, 24 nt, Artificial Sequence
  Synthetic
uggcuguguguauguaucaccuuc

SEQ ID NO: 556649 - RNA, 18 nt, Artificial Sequence
  Synthetic
gaaugaguugggaccuuc

SEQ ID NO: 556650 - RNA, 19 nt, Artificial Sequence
  Synthetic
agaaugaguugggaccuuc

SEQ ID NO: 556651 - RNA, 20 nt, Artificial Sequence
  Synthetic
cagaaugaguugggaccuuc

SEQ ID NO: 556652 - RNA, 21 nt, Artificial Sequence
  Synthetic
ucagaaugaguugggaccuuc

SEQ ID NO: 556653 - RNA, 22 nt, Artificial Sequence
  Synthetic
uucagaaugaguugggaccuuc

SEQ ID NO: 556654 - RNA, 23 nt, Artificial Sequence
  Synthetic
cuucagaaugaguugggaccuuc

SEQ ID NO: 556655 - RNA, 24 nt, Artificial Sequence
  Synthetic
ccuucagaaugaguugggaccuuc

SEQ ID NO: 556656 - RNA, 18 nt, Artificial Sequence
  Synthetic
ggaaaauuauggaccuuc

SEQ ID NO: 556657 - RNA, 19 nt, Artificial Sequence
  Synthetic
uggaaaauuauggaccuuc

SEQ ID NO: 556658 - RNA, 20 nt, Artificial Sequence
  Synthetic
auggaaaauuauggaccuuc

SEQ ID NO: 556659 - RNA, 21 nt, Artificial Sequence
  Synthetic
uauggaaaauuauggaccuuc

SEQ ID NO: 556660 - RNA, 22 nt, Artificial Sequence
  Synthetic
uuauggaaaauuauggaccuuc

SEQ ID NO: 556661 - RNA, 23 nt, Artificial Sequence
  Synthetic
auuauggaaaauuauggaccuuc

SEQ ID NO: 556662 - RNA, 24 nt, Artificial Sequence
  Synthetic
uauuauggaaaauuauggaccuuc

SEQ ID NO: 556663 - RNA, 18 nt, Artificial Sequence
  Synthetic
uuccagacaucacccuuc

SEQ ID NO: 556664 - RNA, 19 nt, Artificial Sequence
  Synthetic
uuuccagacaucacccuuc

SEQ ID NO: 556665 - RNA, 20 nt, Artificial Sequence
  Synthetic
auuuccagacaucacccuuc

SEQ ID NO: 556666 - RNA, 21 nt, Artificial Sequence
  Synthetic
cauuuccagacaucacccuuc

SEQ ID NO: 556667 - RNA, 22 nt, Artificial Sequence
  Synthetic
ucauuuccagacaucacccuuc

SEQ ID NO: 556668 - RNA, 23 nt, Artificial Sequence
  Synthetic
aucauuuccagacaucacccuuc

SEQ ID NO: 556669 - RNA, 24 nt, Artificial Sequence
  Synthetic
uaucauuuccagacaucacccuuc

SEQ ID NO: 556670 - RNA, 18 nt, Artificial Sequence
  Synthetic
aguauaaguugacccuuc

SEQ ID NO: 556671 - RNA, 19 nt, Artificial Sequence
  Synthetic
aaguauaaguugacccuuc

SEQ ID NO: 556672 - RNA, 20 nt, Artificial Sequence
  Synthetic
caaguauaaguugacccuuc

SEQ ID NO: 556673 - RNA, 21 nt, Artificial Sequence
  Synthetic
ucaaguauaaguugacccuuc

SEQ ID NO: 556674 - RNA, 22 nt, Artificial Sequence
  Synthetic
uucaaguauaaguugacccuuc

SEQ ID NO: 556675 - RNA, 23 nt, Artificial Sequence
  Synthetic
auucaaguauaaguugacccuuc

SEQ ID NO: 556676 - RNA, 24 nt, Artificial Sequence
  Synthetic
gauucaaguauaaguugacccuuc

SEQ ID NO: 556677 - RNA, 18 nt, Artificial Sequence
  Synthetic
gcuguaagcaagcccuuc

SEQ ID NO: 556678 - RNA, 19 nt, Artificial Sequence
  Synthetic
agcuguaagcaagcccuuc

SEQ ID NO: 556679 - RNA, 20 nt, Artificial Sequence
  Synthetic
gagcuguaagcaagcccuuc

SEQ ID NO: 556680 - RNA, 21 nt, Artificial Sequence
  Synthetic
ugagcuguaagcaagcccuuc

SEQ ID NO: 556681 - RNA, 22 nt, Artificial Sequence
  Synthetic
uugagcuguaagcaagcccuuc

SEQ ID NO: 556682 - RNA, 23 nt, Artificial Sequence
  Synthetic
guugagcuguaagcaagcccuuc

SEQ ID NO: 556683 - RNA, 24 nt, Artificial Sequence
  Synthetic
aguugagcuguaagcaagcccuuc

SEQ ID NO: 556684 - RNA, 18 nt, Artificial Sequence
  Synthetic
aauggcuuaaugcccuuc

SEQ ID NO: 556685 - RNA, 19 nt, Artificial Sequence
  Synthetic
gaauggcuuaaugcccuuc

SEQ ID NO: 556686 - RNA, 20 nt, Artificial Sequence
  Synthetic
ugaauggcuuaaugcccuuc

SEQ ID NO: 556687 - RNA, 21 nt, Artificial Sequence
  Synthetic
uugaauggcuuaaugcccuuc

SEQ ID NO: 556688 - RNA, 22 nt, Artificial Sequence
  Synthetic
cuugaauggcuuaaugcccuuc

SEQ ID NO: 556689 - RNA, 23 nt, Artificial Sequence
  Synthetic
ucuugaauggcuuaaugcccuuc

SEQ ID NO: 556690 - RNA, 24 nt, Artificial Sequence
  Synthetic
uucuugaauggcuuaaugcccuuc

SEQ ID NO: 556691 - RNA, 18 nt, Artificial Sequence
  Synthetic
uauaagcgcuaucccuuc

SEQ ID NO: 556692 - RNA, 19 nt, Artificial Sequence
  Synthetic
uuauaagcgcuaucccuuc

SEQ ID NO: 556693 - RNA, 20 nt, Artificial Sequence
  Synthetic
uuuauaagcgcuaucccuuc

SEQ ID NO: 556694 - RNA, 21 nt, Artificial Sequence
  Synthetic
uuuuauaagcgcuaucccuuc

SEQ ID NO: 556695 - RNA, 22 nt, Artificial Sequence
  Synthetic
uuuuuauaagcgcuaucccuuc

SEQ ID NO: 556696 - RNA, 23 nt, Artificial Sequence
  Synthetic
uuuuuuauaagcgcuaucccuuc

SEQ ID NO: 556697 - RNA, 24 nt, Artificial Sequence
  Synthetic
uuuuuuuauaagcgcuaucccuuc

SEQ ID NO: 556698 - RNA, 18 nt, Artificial Sequence
  Synthetic
ucaacugucagucccuuc

SEQ ID NO: 556699 - RNA, 19 nt, Artificial Sequence
  Synthetic
uucaacugucagucccuuc

SEQ ID NO: 556700 - RNA, 20 nt, Artificial Sequence
  Synthetic
cuucaacugucagucccuuc

SEQ ID NO: 556701 - RNA, 21 nt, Artificial Sequence
  Synthetic
ucuucaacugucagucccuuc

SEQ ID NO: 556702 - RNA, 22 nt, Artificial Sequence
  Synthetic
uucuucaacugucagucccuuc

SEQ ID NO: 556703 - RNA, 23 nt, Artificial Sequence
  Synthetic
auucuucaacugucagucccuuc

SEQ ID NO: 556704 - RNA, 24 nt, Artificial Sequence
  Synthetic
cauucuucaacugucagucccuuc

SEQ ID NO: 556705 - RNA, 18 nt, Artificial Sequence
  Synthetic
acaaggaaaaaagccuuc

SEQ ID NO: 556706 - RNA, 19 nt, Artificial Sequence
  Synthetic
gacaaggaaaaaagccuuc

SEQ ID NO: 556707 - RNA, 20 nt, Artificial Sequence
  Synthetic
agacaaggaaaaaagccuuc

SEQ ID NO: 556708 - RNA, 21 nt, Artificial Sequence
  Synthetic
aagacaaggaaaaaagccuuc

SEQ ID NO: 556709 - RNA, 22 nt, Artificial Sequence
  Synthetic
uaagacaaggaaaaaagccuuc

SEQ ID NO: 556710 - RNA, 23 nt, Artificial Sequence
  Synthetic
uuaagacaaggaaaaaagccuuc

SEQ ID NO: 556711 - RNA, 24 nt, Artificial Sequence
  Synthetic
auuaagacaaggaaaaaagccuuc

SEQ ID NO: 556712 - RNA, 18 nt, Artificial Sequence
  Synthetic
aguguauaauaggccuuc

SEQ ID NO: 556713 - RNA, 19 nt, Artificial Sequence
  Synthetic
aaguguauaauaggccuuc

SEQ ID NO: 556714 - RNA, 20 nt, Artificial Sequence
  Synthetic
aaaguguauaauaggccuuc

SEQ ID NO: 556715 - RNA, 21 nt, Artificial Sequence
  Synthetic
caaaguguauaauaggccuuc

SEQ ID NO: 556716 - RNA, 22 nt, Artificial Sequence
  Synthetic
gcaaaguguauaauaggccuuc

SEQ ID NO: 556717 - RNA, 23 nt, Artificial Sequence
  Synthetic
ugcaaaguguauaauaggccuuc

SEQ ID NO: 556718 - RNA, 24 nt, Artificial Sequence
  Synthetic
uugcaaaguguauaauaggccuuc

SEQ ID NO: 556719 - RNA, 18 nt, Artificial Sequence
  Synthetic
agaaaaucaaaugccuuc

SEQ ID NO: 556720 - RNA, 19 nt, Artificial Sequence
  Synthetic
uagaaaaucaaaugccuuc

SEQ ID NO: 556721 - RNA, 20 nt, Artificial Sequence
  Synthetic
uuagaaaaucaaaugccuuc

SEQ ID NO: 556722 - RNA, 21 nt, Artificial Sequence
  Synthetic
guuagaaaaucaaaugccuuc

SEQ ID NO: 556723 - RNA, 22 nt, Artificial Sequence
  Synthetic
gguuagaaaaucaaaugccuuc

SEQ ID NO: 556724 - RNA, 23 nt, Artificial Sequence
  Synthetic
agguuagaaaaucaaaugccuuc

SEQ ID NO: 556725 - RNA, 24 nt, Artificial Sequence
  Synthetic
gagguuagaaaaucaaaugccuuc

SEQ ID NO: 556726 - RNA, 18 nt, Artificial Sequence
  Synthetic
ggacccccuacugccuuc

SEQ ID NO: 556727 - RNA, 19 nt, Artificial Sequence
  Synthetic
gggacccccuacugccuuc

SEQ ID NO: 556728 - RNA, 20 nt, Artificial Sequence
  Synthetic
agggacccccuacugccuuc

SEQ ID NO: 556729 - RNA, 21 nt, Artificial Sequence
  Synthetic
cagggacccccuacugccuuc

SEQ ID NO: 556730 - RNA, 22 nt, Artificial Sequence
  Synthetic
ccagggacccccuacugccuuc

SEQ ID NO: 556731 - RNA, 23 nt, Artificial Sequence
  Synthetic
accagggacccccuacugccuuc

SEQ ID NO: 556732 - RNA, 24 nt, Artificial Sequence
  Synthetic
gaccagggacccccuacugccuuc

SEQ ID NO: 556733 - RNA, 18 nt, Artificial Sequence
  Synthetic
caugaaggcucugccuuc

SEQ ID NO: 556734 - RNA, 19 nt, Artificial Sequence
  Synthetic
acaugaaggcucugccuuc

SEQ ID NO: 556735 - RNA, 20 nt, Artificial Sequence
  Synthetic
gacaugaaggcucugccuuc

SEQ ID NO: 556736 - RNA, 21 nt, Artificial Sequence
  Synthetic
ggacaugaaggcucugccuuc

SEQ ID NO: 556737 - RNA, 22 nt, Artificial Sequence
  Synthetic
aggacaugaaggcucugccuuc

SEQ ID NO: 556738 - RNA, 23 nt, Artificial Sequence
  Synthetic
uaggacaugaaggcucugccuuc

SEQ ID NO: 556739 - RNA, 24 nt, Artificial Sequence
  Synthetic
uuaggacaugaaggcucugccuuc

SEQ ID NO: 556740 - RNA, 18 nt, Artificial Sequence
  Synthetic
cuaaaguucguugccuuc

SEQ ID NO: 556741 - RNA, 19 nt, Artificial Sequence
  Synthetic
gcuaaaguucguugccuuc

SEQ ID NO: 556742 - RNA, 20 nt, Artificial Sequence
  Synthetic
ugcuaaaguucguugccuuc

SEQ ID NO: 556743 - RNA, 21 nt, Artificial Sequence
  Synthetic
uugcuaaaguucguugccuuc

SEQ ID NO: 556744 - RNA, 22 nt, Artificial Sequence
  Synthetic
cuugcuaaaguucguugccuuc

SEQ ID NO: 556745 - RNA, 23 nt, Artificial Sequence
  Synthetic
ucuugcuaaaguucguugccuuc

SEQ ID NO: 556746 - RNA, 24 nt, Artificial Sequence
  Synthetic
aucuugcuaaaguucguugccuuc

SEQ ID NO: 556747 - RNA, 18 nt, Artificial Sequence
  Synthetic
gacuaaaccaaauccuuc

SEQ ID NO: 556748 - RNA, 19 nt, Artificial Sequence
  Synthetic
agacuaaaccaaauccuuc

SEQ ID NO: 556749 - RNA, 20 nt, Artificial Sequence
  Synthetic
uagacuaaaccaaauccuuc

SEQ ID NO: 556750 - RNA, 21 nt, Artificial Sequence
  Synthetic
uuagacuaaaccaaauccuuc

SEQ ID NO: 556751 - RNA, 22 nt, Artificial Sequence
  Synthetic
auuagacuaaaccaaauccuuc

SEQ ID NO: 556752 - RNA, 23 nt, Artificial Sequence
  Synthetic
gauuagacuaaaccaaauccuuc

SEQ ID NO: 556753 - RNA, 24 nt, Artificial Sequence
  Synthetic
ggauuagacuaaaccaaauccuuc

SEQ ID NO: 556754 - RNA, 18 nt, Artificial Sequence
  Synthetic
ggccuucuuacauccuuc

SEQ ID NO: 556755 - RNA, 19 nt, Artificial Sequence
  Synthetic
uggccuucuuacauccuuc

SEQ ID NO: 556756 - RNA, 20 nt, Artificial Sequence
  Synthetic
cuggccuucuuacauccuuc

SEQ ID NO: 556757 - RNA, 21 nt, Artificial Sequence
  Synthetic
ucuggccuucuuacauccuuc

SEQ ID NO: 556758 - RNA, 22 nt, Artificial Sequence
  Synthetic
uucuggccuucuuacauccuuc

SEQ ID NO: 556759 - RNA, 23 nt, Artificial Sequence
  Synthetic
cuucuggccuucuuacauccuuc

SEQ ID NO: 556760 - RNA, 24 nt, Artificial Sequence
  Synthetic
ucuucuggccuucuuacauccuuc

SEQ ID NO: 556761 - RNA, 18 nt, Artificial Sequence
  Synthetic
auuaaaucccuauccuuc

SEQ ID NO: 556762 - RNA, 19 nt, Artificial Sequence
  Synthetic
uauuaaaucccuauccuuc

SEQ ID NO: 556763 - RNA, 20 nt, Artificial Sequence
  Synthetic
uuauuaaaucccuauccuuc

SEQ ID NO: 556764 - RNA, 21 nt, Artificial Sequence
  Synthetic
auuauuaaaucccuauccuuc

SEQ ID NO: 556765 - RNA, 22 nt, Artificial Sequence
  Synthetic
gauuauuaaaucccuauccuuc

SEQ ID NO: 556766 - RNA, 23 nt, Artificial Sequence
  Synthetic
agauuauuaaaucccuauccuuc

SEQ ID NO: 556767 - RNA, 24 nt, Artificial Sequence
  Synthetic
gagauuauuaaaucccuauccuuc

SEQ ID NO: 556768 - RNA, 18 nt, Artificial Sequence
  Synthetic
ucauggucauccuccuuc

SEQ ID NO: 556769 - RNA, 19 nt, Artificial Sequence
  Synthetic
uucauggucauccuccuuc

SEQ ID NO: 556770 - RNA, 20 nt, Artificial Sequence
  Synthetic
cuucauggucauccuccuuc

SEQ ID NO: 556771 - RNA, 21 nt, Artificial Sequence
  Synthetic
ccuucauggucauccuccuuc

SEQ ID NO: 556772 - RNA, 22 nt, Artificial Sequence
  Synthetic
accuucauggucauccuccuuc

SEQ ID NO: 556773 - RNA, 23 nt, Artificial Sequence
  Synthetic
gaccuucauggucauccuccuuc

SEQ ID NO: 556774 - RNA, 24 nt, Artificial Sequence
  Synthetic
agaccuucauggucauccuccuuc

SEQ ID NO: 556775 - RNA, 18 nt, Artificial Sequence
  Synthetic
ggagauuauuccuccuuc

SEQ ID NO: 556776 - RNA, 19 nt, Artificial Sequence
  Synthetic
uggagauuauuccuccuuc

SEQ ID NO: 556777 - RNA, 20 nt, Artificial Sequence
  Synthetic
uuggagauuauuccuccuuc

SEQ ID NO: 556778 - RNA, 21 nt, Artificial Sequence
  Synthetic
cuuggagauuauuccuccuuc

SEQ ID NO: 556779 - RNA, 22 nt, Artificial Sequence
  Synthetic
gcuuggagauuauuccuccuuc

SEQ ID NO: 556780 - RNA, 23 nt, Artificial Sequence
  Synthetic
ggcuuggagauuauuccuccuuc

SEQ ID NO: 556781 - RNA, 24 nt, Artificial Sequence
  Synthetic
gggcuuggagauuauuccuccuuc

SEQ ID NO: 556782 - RNA, 18 nt, Artificial Sequence
  Synthetic
gcauuauaaagcuccuuc

SEQ ID NO: 556783 - RNA, 19 nt, Artificial Sequence
  Synthetic
ugcauuauaaagcuccuuc

SEQ ID NO: 556784 - RNA, 20 nt, Artificial Sequence
  Synthetic
uugcauuauaaagcuccuuc

SEQ ID NO: 556785 - RNA, 21 nt, Artificial Sequence
  Synthetic
guugcauuauaaagcuccuuc

SEQ ID NO: 556786 - RNA, 22 nt, Artificial Sequence
  Synthetic
uguugcauuauaaagcuccuuc

SEQ ID NO: 556787 - RNA, 23 nt, Artificial Sequence
  Synthetic
uuguugcauuauaaagcuccuuc

SEQ ID NO: 556788 - RNA, 24 nt, Artificial Sequence
  Synthetic
uuuguugcauuauaaagcuccuuc

SEQ ID NO: 556789 - RNA, 18 nt, Artificial Sequence
  Synthetic
uucauggaaaucuccuuc

SEQ ID NO: 556790 - RNA, 19 nt, Artificial Sequence
  Synthetic
uuucauggaaaucuccuuc

SEQ ID NO: 556791 - RNA, 20 nt, Artificial Sequence
  Synthetic
cuuucauggaaaucuccuuc

SEQ ID NO: 556792 - RNA, 21 nt, Artificial Sequence
  Synthetic
acuuucauggaaaucuccuuc

SEQ ID NO: 556793 - RNA, 22 nt, Artificial Sequence
  Synthetic
aacuuucauggaaaucuccuuc

SEQ ID NO: 556794 - RNA, 23 nt, Artificial Sequence
  Synthetic
uaacuuucauggaaaucuccuuc

SEQ ID NO: 556795 - RNA, 24 nt, Artificial Sequence
  Synthetic
cuaacuuucauggaaaucuccuuc

SEQ ID NO: 556796 - RNA, 18 nt, Artificial Sequence
  Synthetic
guaauacuacucuccuuc

SEQ ID NO: 556797 - RNA, 19 nt, Artificial Sequence
  Synthetic
gguaauacuacucuccuuc

SEQ ID NO: 556798 - RNA, 20 nt, Artificial Sequence
  Synthetic
ugguaauacuacucuccuuc

SEQ ID NO: 556799 - RNA, 21 nt, Artificial Sequence
  Synthetic
augguaauacuacucuccuuc

SEQ ID NO: 556800 - RNA, 22 nt, Artificial Sequence
  Synthetic
uaugguaauacuacucuccuuc

SEQ ID NO: 556801 - RNA, 23 nt, Artificial Sequence
  Synthetic
guaugguaauacuacucuccuuc

SEQ ID NO: 556802 - RNA, 24 nt, Artificial Sequence
  Synthetic
uguaugguaauacuacucuccuuc

SEQ ID NO: 556803 - RNA, 18 nt, Artificial Sequence
  Synthetic
ugccacaaguucuccuuc

SEQ ID NO: 556804 - RNA, 19 nt, Artificial Sequence
  Synthetic
augccacaaguucuccuuc

SEQ ID NO: 556805 - RNA, 20 nt, Artificial Sequence
  Synthetic
uaugccacaaguucuccuuc

SEQ ID NO: 556806 - RNA, 21 nt, Artificial Sequence
  Synthetic
guaugccacaaguucuccuuc

SEQ ID NO: 556807 - RNA, 22 nt, Artificial Sequence
  Synthetic
aguaugccacaaguucuccuuc

SEQ ID NO: 556808 - RNA, 23 nt, Artificial Sequence
  Synthetic
aaguaugccacaaguucuccuuc

SEQ ID NO: 556809 - RNA, 24 nt, Artificial Sequence
  Synthetic
uaaguaugccacaaguucuccuuc

SEQ ID NO: 556810 - RNA, 18 nt, Artificial Sequence
  Synthetic
cucuuuaugcaguccuuc

SEQ ID NO: 556811 - RNA, 19 nt, Artificial Sequence
  Synthetic
ccucuuuaugcaguccuuc

SEQ ID NO: 556812 - RNA, 20 nt, Artificial Sequence
  Synthetic
accucuuuaugcaguccuuc

SEQ ID NO: 556813 - RNA, 21 nt, Artificial Sequence
  Synthetic
gaccucuuuaugcaguccuuc

SEQ ID NO: 556814 - RNA, 22 nt, Artificial Sequence
  Synthetic
ugaccucuuuaugcaguccuuc

SEQ ID NO: 556815 - RNA, 23 nt, Artificial Sequence
  Synthetic
augaccucuuuaugcaguccuuc

SEQ ID NO: 556816 - RNA, 24 nt, Artificial Sequence
  Synthetic
aaugaccucuuuaugcaguccuuc

SEQ ID NO: 556817 - RNA, 18 nt, Artificial Sequence
  Synthetic
uuccaccuucaguccuuc

SEQ ID NO: 556818 - RNA, 19 nt, Artificial Sequence
  Synthetic
auuccaccuucaguccuuc

SEQ ID NO: 556819 - RNA, 20 nt, Artificial Sequence
  Synthetic
aauuccaccuucaguccuuc

SEQ ID NO: 556820 - RNA, 21 nt, Artificial Sequence
  Synthetic
caauuccaccuucaguccuuc

SEQ ID NO: 556821 - RNA, 22 nt, Artificial Sequence
  Synthetic
ccaauuccaccuucaguccuuc

SEQ ID NO: 556822 - RNA, 23 nt, Artificial Sequence
  Synthetic
uccaauuccaccuucaguccuuc

SEQ ID NO: 556823 - RNA, 24 nt, Artificial Sequence
  Synthetic
uuccaauuccaccuucaguccuuc

SEQ ID NO: 556824 - RNA, 18 nt, Artificial Sequence
  Synthetic
aaguugcugccguccuuc

SEQ ID NO: 556825 - RNA, 19 nt, Artificial Sequence
  Synthetic
aaaguugcugccguccuuc

SEQ ID NO: 556826 - RNA, 20 nt, Artificial Sequence
  Synthetic
gaaaguugcugccguccuuc

SEQ ID NO: 556827 - RNA, 21 nt, Artificial Sequence
  Synthetic
agaaaguugcugccguccuuc

SEQ ID NO: 556828 - RNA, 22 nt, Artificial Sequence
  Synthetic
aagaaaguugcugccguccuuc

SEQ ID NO: 556829 - RNA, 23 nt, Artificial Sequence
  Synthetic
caagaaaguugcugccguccuuc

SEQ ID NO: 556830 - RNA, 24 nt, Artificial Sequence
  Synthetic
acaagaaaguugcugccguccuuc

SEQ ID NO: 556831 - RNA, 18 nt, Artificial Sequence
  Synthetic
uaaauuagaaauuccuuc

SEQ ID NO: 556832 - RNA, 19 nt, Artificial Sequence
  Synthetic
auaaauuagaaauuccuuc

SEQ ID NO: 556833 - RNA, 20 nt, Artificial Sequence
  Synthetic
cauaaauuagaaauuccuuc

SEQ ID NO: 556834 - RNA, 21 nt, Artificial Sequence
  Synthetic
ccauaaauuagaaauuccuuc

SEQ ID NO: 556835 - RNA, 22 nt, Artificial Sequence
  Synthetic
cccauaaauuagaaauuccuuc

SEQ ID NO: 556836 - RNA, 23 nt, Artificial Sequence
  Synthetic
acccauaaauuagaaauuccuuc

SEQ ID NO: 556837 - RNA, 24 nt, Artificial Sequence
  Synthetic
cacccauaaauuagaaauuccuuc

SEQ ID NO: 556838 - RNA, 18 nt, Artificial Sequence
  Synthetic
auguuuagugauuccuuc

SEQ ID NO: 556839 - RNA, 19 nt, Artificial Sequence
  Synthetic
cauguuuagugauuccuuc

SEQ ID NO: 556840 - RNA, 20 nt, Artificial Sequence
  Synthetic
ccauguuuagugauuccuuc

SEQ ID NO: 556841 - RNA, 21 nt, Artificial Sequence
  Synthetic
uccauguuuagugauuccuuc

SEQ ID NO: 556842 - RNA, 22 nt, Artificial Sequence
  Synthetic
uuccauguuuagugauuccuuc

SEQ ID NO: 556843 - RNA, 23 nt, Artificial Sequence
  Synthetic
uuuccauguuuagugauuccuuc

SEQ ID NO: 556844 - RNA, 24 nt, Artificial Sequence
  Synthetic
cuuuccauguuuagugauuccuuc

SEQ ID NO: 556845 - RNA, 18 nt, Artificial Sequence
  Synthetic
cugucuucaauuuccuuc

SEQ ID NO: 556846 - RNA, 19 nt, Artificial Sequence
  Synthetic
ccugucuucaauuuccuuc

SEQ ID NO: 556847 - RNA, 20 nt, Artificial Sequence
  Synthetic
uccugucuucaauuuccuuc

SEQ ID NO: 556848 - RNA, 21 nt, Artificial Sequence
  Synthetic
cuccugucuucaauuuccuuc

SEQ ID NO: 556849 - RNA, 22 nt, Artificial Sequence
  Synthetic
ccuccugucuucaauuuccuuc

SEQ ID NO: 556850 - RNA, 23 nt, Artificial Sequence
  Synthetic
accuccugucuucaauuuccuuc

SEQ ID NO: 556851 - RNA, 24 nt, Artificial Sequence
  Synthetic
uaccuccugucuucaauuuccuuc

SEQ ID NO: 556852 - RNA, 18 nt, Artificial Sequence
  Synthetic
gaaagacaaguuuccuuc

SEQ ID NO: 556853 - RNA, 19 nt, Artificial Sequence
  Synthetic
agaaagacaaguuuccuuc

SEQ ID NO: 556854 - RNA, 20 nt, Artificial Sequence
  Synthetic
gagaaagacaaguuuccuuc

SEQ ID NO: 556855 - RNA, 21 nt, Artificial Sequence
  Synthetic
agagaaagacaaguuuccuuc

SEQ ID NO: 556856 - RNA, 22 nt, Artificial Sequence
  Synthetic
cagagaaagacaaguuuccuuc

SEQ ID NO: 556857 - RNA, 23 nt, Artificial Sequence
  Synthetic
ucagagaaagacaaguuuccuuc

SEQ ID NO: 556858 - RNA, 24 nt, Artificial Sequence
  Synthetic
uucagagaaagacaaguuuccuuc

SEQ ID NO: 556859 - RNA, 18 nt, Artificial Sequence
  Synthetic
aaccaagauguuuccuuc

SEQ ID NO: 556860 - RNA, 19 nt, Artificial Sequence
  Synthetic
aaaccaagauguuuccuuc

SEQ ID NO: 556861 - RNA, 20 nt, Artificial Sequence
  Synthetic
aaaaccaagauguuuccuuc

SEQ ID NO: 556862 - RNA, 21 nt, Artificial Sequence
  Synthetic
gaaaaccaagauguuuccuuc

SEQ ID NO: 556863 - RNA, 22 nt, Artificial Sequence
  Synthetic
ugaaaaccaagauguuuccuuc

SEQ ID NO: 556864 - RNA, 23 nt, Artificial Sequence
  Synthetic
gugaaaaccaagauguuuccuuc

SEQ ID NO: 556865 - RNA, 24 nt, Artificial Sequence
  Synthetic
ugugaaaaccaagauguuuccuuc

SEQ ID NO: 556866 - RNA, 18 nt, Artificial Sequence
  Synthetic
cuauuacauuuuuccuuc

SEQ ID NO: 556867 - RNA, 19 nt, Artificial Sequence
  Synthetic
gcuauuacauuuuuccuuc

SEQ ID NO: 556868 - RNA, 20 nt, Artificial Sequence
  Synthetic
ggcuauuacauuuuuccuuc

SEQ ID NO: 556869 - RNA, 21 nt, Artificial Sequence
  Synthetic
gggcuauuacauuuuuccuuc

SEQ ID NO: 556870 - RNA, 22 nt, Artificial Sequence
  Synthetic
ugggcuauuacauuuuuccuuc

SEQ ID NO: 556871 - RNA, 23 nt, Artificial Sequence
  Synthetic
augggcuauuacauuuuuccuuc

SEQ ID NO: 556872 - RNA, 24 nt, Artificial Sequence
  Synthetic
caugggcuauuacauuuuuccuuc

SEQ ID NO: 556873 - RNA, 18 nt, Artificial Sequence
  Synthetic
gaggaugcuuuuuccuuc

SEQ ID NO: 556874 - RNA, 19 nt, Artificial Sequence
  Synthetic
agaggaugcuuuuuccuuc

SEQ ID NO: 556875 - RNA, 20 nt, Artificial Sequence
  Synthetic
gagaggaugcuuuuuccuuc

SEQ ID NO: 556876 - RNA, 21 nt, Artificial Sequence
  Synthetic
ugagaggaugcuuuuuccuuc

SEQ ID NO: 556877 - RNA, 22 nt, Artificial Sequence
  Synthetic
gugagaggaugcuuuuuccuuc

SEQ ID NO: 556878 - RNA, 23 nt, Artificial Sequence
  Synthetic
agugagaggaugcuuuuuccuuc

SEQ ID NO: 556879 - RNA, 24 nt, Artificial Sequence
  Synthetic
aagugagaggaugcuuuuuccuuc

SEQ ID NO: 556880 - RNA, 18 nt, Artificial Sequence
  Synthetic
aaaaucgggaaaagcuuc

SEQ ID NO: 556881 - RNA, 19 nt, Artificial Sequence
  Synthetic
gaaaaucgggaaaagcuuc

SEQ ID NO: 556882 - RNA, 20 nt, Artificial Sequence
  Synthetic
agaaaaucgggaaaagcuuc

SEQ ID NO: 556883 - RNA, 21 nt, Artificial Sequence
  Synthetic
aagaaaaucgggaaaagcuuc

SEQ ID NO: 556884 - RNA, 22 nt, Artificial Sequence
  Synthetic
gaagaaaaucgggaaaagcuuc

SEQ ID NO: 556885 - RNA, 23 nt, Artificial Sequence
  Synthetic
ggaagaaaaucgggaaaagcuuc

SEQ ID NO: 556886 - RNA, 24 nt, Artificial Sequence
  Synthetic
gggaagaaaaucgggaaaagcuuc

SEQ ID NO: 556887 - RNA, 18 nt, Artificial Sequence
  Synthetic
aauccaaaggaaagcuuc

SEQ ID NO: 556888 - RNA, 19 nt, Artificial Sequence
  Synthetic
aaauccaaaggaaagcuuc

SEQ ID NO: 556889 - RNA, 20 nt, Artificial Sequence
  Synthetic
gaaauccaaaggaaagcuuc

SEQ ID NO: 556890 - RNA, 21 nt, Artificial Sequence
  Synthetic
agaaauccaaaggaaagcuuc

SEQ ID NO: 556891 - RNA, 22 nt, Artificial Sequence
  Synthetic
gagaaauccaaaggaaagcuuc

SEQ ID NO: 556892 - RNA, 23 nt, Artificial Sequence
  Synthetic
ugagaaauccaaaggaaagcuuc

SEQ ID NO: 556893 - RNA, 24 nt, Artificial Sequence
  Synthetic
augagaaauccaaaggaaagcuuc

SEQ ID NO: 556894 - RNA, 18 nt, Artificial Sequence
  Synthetic
gugggaguguaaagcuuc

SEQ ID NO: 556895 - RNA, 19 nt, Artificial Sequence
  Synthetic
ugugggaguguaaagcuuc

SEQ ID NO: 556896 - RNA, 20 nt, Artificial Sequence
  Synthetic
augugggaguguaaagcuuc

SEQ ID NO: 556897 - RNA, 21 nt, Artificial Sequence
  Synthetic
uaugugggaguguaaagcuuc

SEQ ID NO: 556898 - RNA, 22 nt, Artificial Sequence
  Synthetic
guaugugggaguguaaagcuuc

SEQ ID NO: 556899 - RNA, 23 nt, Artificial Sequence
  Synthetic
aguaugugggaguguaaagcuuc

SEQ ID NO: 556900 - RNA, 24 nt, Artificial Sequence
  Synthetic
caguaugugggaguguaaagcuuc

SEQ ID NO: 556901 - RNA, 18 nt, Artificial Sequence
  Synthetic
gauuaucuugcaagcuuc

SEQ ID NO: 556902 - RNA, 19 nt, Artificial Sequence
  Synthetic
ugauuaucuugcaagcuuc

SEQ ID NO: 556903 - RNA, 20 nt, Artificial Sequence
  Synthetic
uugauuaucuugcaagcuuc

SEQ ID NO: 556904 - RNA, 21 nt, Artificial Sequence
  Synthetic
auugauuaucuugcaagcuuc

SEQ ID NO: 556905 - RNA, 22 nt, Artificial Sequence
  Synthetic
uauugauuaucuugcaagcuuc

SEQ ID NO: 556906 - RNA, 23 nt, Artificial Sequence
  Synthetic
auauugauuaucuugcaagcuuc

SEQ ID NO: 556907 - RNA, 24 nt, Artificial Sequence
  Synthetic
uauauugauuaucuugcaagcuuc

SEQ ID NO: 556908 - RNA, 18 nt, Artificial Sequence
  Synthetic
gccacgacuggaagcuuc

SEQ ID NO: 556909 - RNA, 19 nt, Artificial Sequence
  Synthetic
ugccacgacuggaagcuuc

SEQ ID NO: 556910 - RNA, 20 nt, Artificial Sequence
  Synthetic
cugccacgacuggaagcuuc

SEQ ID NO: 556911 - RNA, 21 nt, Artificial Sequence
  Synthetic
ucugccacgacuggaagcuuc

SEQ ID NO: 556912 - RNA, 22 nt, Artificial Sequence
  Synthetic
uucugccacgacuggaagcuuc

SEQ ID NO: 556913 - RNA, 23 nt, Artificial Sequence
  Synthetic
cuucugccacgacuggaagcuuc

SEQ ID NO: 556914 - RNA, 24 nt, Artificial Sequence
  Synthetic
ccuucugccacgacuggaagcuuc

SEQ ID NO: 556915 - RNA, 18 nt, Artificial Sequence
  Synthetic
gcuccaagcuuaagcuuc

SEQ ID NO: 556916 - RNA, 19 nt, Artificial Sequence
  Synthetic
agcuccaagcuuaagcuuc

SEQ ID NO: 556917 - RNA, 20 nt, Artificial Sequence
  Synthetic
cagcuccaagcuuaagcuuc

SEQ ID NO: 556918 - RNA, 21 nt, Artificial Sequence
  Synthetic
ccagcuccaagcuuaagcuuc

SEQ ID NO: 556919 - RNA, 22 nt, Artificial Sequence
  Synthetic
gccagcuccaagcuuaagcuuc

SEQ ID NO: 556920 - RNA, 23 nt, Artificial Sequence
  Synthetic
agccagcuccaagcuuaagcuuc

SEQ ID NO: 556921 - RNA, 24 nt, Artificial Sequence
  Synthetic
gagccagcuccaagcuuaagcuuc

SEQ ID NO: 556922 - RNA, 18 nt, Artificial Sequence
  Synthetic
ucaaccaggaccagcuuc

SEQ ID NO: 556923 - RNA, 19 nt, Artificial Sequence
  Synthetic
cucaaccaggaccagcuuc

SEQ ID NO: 556924 - RNA, 20 nt, Artificial Sequence
  Synthetic
ccucaaccaggaccagcuuc

SEQ ID NO: 556925 - RNA, 21 nt, Artificial Sequence
  Synthetic
accucaaccaggaccagcuuc

SEQ ID NO: 556926 - RNA, 22 nt, Artificial Sequence
  Synthetic
gaccucaaccaggaccagcuuc

SEQ ID NO: 556927 - RNA, 23 nt, Artificial Sequence
  Synthetic
agaccucaaccaggaccagcuuc

SEQ ID NO: 556928 - RNA, 24 nt, Artificial Sequence
  Synthetic
aagaccucaaccaggaccagcuuc

SEQ ID NO: 556929 - RNA, 18 nt, Artificial Sequence
  Synthetic
ugccuacagcccagcuuc

SEQ ID NO: 556930 - RNA, 19 nt, Artificial Sequence
  Synthetic
augccuacagcccagcuuc

SEQ ID NO: 556931 - RNA, 20 nt, Artificial Sequence
  Synthetic
aaugccuacagcccagcuuc

SEQ ID NO: 556932 - RNA, 21 nt, Artificial Sequence
  Synthetic
gaaugccuacagcccagcuuc

SEQ ID NO: 556933 - RNA, 22 nt, Artificial Sequence
  Synthetic
agaaugccuacagcccagcuuc

SEQ ID NO: 556934 - RNA, 23 nt, Artificial Sequence
  Synthetic
gagaaugccuacagcccagcuuc

SEQ ID NO: 556935 - RNA, 24 nt, Artificial Sequence
  Synthetic
ugagaaugccuacagcccagcuuc

SEQ ID NO: 556936 - RNA, 18 nt, Artificial Sequence
  Synthetic
uagcuggcaagcagcuuc

SEQ ID NO: 556937 - RNA, 19 nt, Artificial Sequence
  Synthetic
auagcuggcaagcagcuuc

SEQ ID NO: 556938 - RNA, 20 nt, Artificial Sequence
  Synthetic
uauagcuggcaagcagcuuc

SEQ ID NO: 556939 - RNA, 21 nt, Artificial Sequence
  Synthetic
cuauagcuggcaagcagcuuc

SEQ ID NO: 556940 - RNA, 22 nt, Artificial Sequence
  Synthetic
ucuauagcuggcaagcagcuuc

SEQ ID NO: 556941 - RNA, 23 nt, Artificial Sequence
  Synthetic
uucuauagcuggcaagcagcuuc

SEQ ID NO: 556942 - RNA, 24 nt, Artificial Sequence
  Synthetic
uuucuauagcuggcaagcagcuuc

SEQ ID NO: 556943 - RNA, 18 nt, Artificial Sequence
  Synthetic
aucuccuuucucagcuuc

SEQ ID NO: 556944 - RNA, 19 nt, Artificial Sequence
  Synthetic
aaucuccuuucucagcuuc

SEQ ID NO: 556945 - RNA, 20 nt, Artificial Sequence
  Synthetic
gaaucuccuuucucagcuuc

SEQ ID NO: 556946 - RNA, 21 nt, Artificial Sequence
  Synthetic
ugaaucuccuuucucagcuuc

SEQ ID NO: 556947 - RNA, 22 nt, Artificial Sequence
  Synthetic
gugaaucuccuuucucagcuuc

SEQ ID NO: 556948 - RNA, 23 nt, Artificial Sequence
  Synthetic
ugugaaucuccuuucucagcuuc

SEQ ID NO: 556949 - RNA, 24 nt, Artificial Sequence
  Synthetic
uugugaaucuccuuucucagcuuc

SEQ ID NO: 556950 - RNA, 18 nt, Artificial Sequence
  Synthetic
ugauauagaaugagcuuc

SEQ ID NO: 556951 - RNA, 19 nt, Artificial Sequence
  Synthetic
gugauauagaaugagcuuc

SEQ ID NO: 556952 - RNA, 20 nt, Artificial Sequence
  Synthetic
ugugauauagaaugagcuuc

SEQ ID NO: 556953 - RNA, 21 nt, Artificial Sequence
  Synthetic
gugugauauagaaugagcuuc

SEQ ID NO: 556954 - RNA, 22 nt, Artificial Sequence
  Synthetic
ugugugauauagaaugagcuuc

SEQ ID NO: 556955 - RNA, 23 nt, Artificial Sequence
  Synthetic
augugugauauagaaugagcuuc

SEQ ID NO: 556956 - RNA, 24 nt, Artificial Sequence
  Synthetic
aaugugugauauagaaugagcuuc

SEQ ID NO: 556957 - RNA, 18 nt, Artificial Sequence
  Synthetic
aacgugucacugagcuuc

SEQ ID NO: 556958 - RNA, 19 nt, Artificial Sequence
  Synthetic
gaacgugucacugagcuuc

SEQ ID NO: 556959 - RNA, 20 nt, Artificial Sequence
  Synthetic
ugaacgugucacugagcuuc

SEQ ID NO: 556960 - RNA, 21 nt, Artificial Sequence
  Synthetic
cugaacgugucacugagcuuc

SEQ ID NO: 556961 - RNA, 22 nt, Artificial Sequence
  Synthetic
ccugaacgugucacugagcuuc

SEQ ID NO: 556962 - RNA, 23 nt, Artificial Sequence
  Synthetic
cccugaacgugucacugagcuuc

SEQ ID NO: 556963 - RNA, 24 nt, Artificial Sequence
  Synthetic
gcccugaacgugucacugagcuuc

SEQ ID NO: 556964 - RNA, 18 nt, Artificial Sequence
  Synthetic
agauccuagaauagcuuc

SEQ ID NO: 556965 - RNA, 19 nt, Artificial Sequence
  Synthetic
aagauccuagaauagcuuc

SEQ ID NO: 556966 - RNA, 20 nt, Artificial Sequence
  Synthetic
aaagauccuagaauagcuuc

SEQ ID NO: 556967 - RNA, 21 nt, Artificial Sequence
  Synthetic
gaaagauccuagaauagcuuc

SEQ ID NO: 556968 - RNA, 22 nt, Artificial Sequence
  Synthetic
agaaagauccuagaauagcuuc

SEQ ID NO: 556969 - RNA, 23 nt, Artificial Sequence
  Synthetic
gagaaagauccuagaauagcuuc

SEQ ID NO: 556970 - RNA, 24 nt, Artificial Sequence
  Synthetic
ugagaaagauccuagaauagcuuc

SEQ ID NO: 556971 - RNA, 18 nt, Artificial Sequence
  Synthetic
guugcugaaacaggcuuc

SEQ ID NO: 556972 - RNA, 19 nt, Artificial Sequence
  Synthetic
aguugcugaaacaggcuuc

SEQ ID NO: 556973 - RNA, 20 nt, Artificial Sequence
  Synthetic
caguugcugaaacaggcuuc

SEQ ID NO: 556974 - RNA, 21 nt, Artificial Sequence
  Synthetic
acaguugcugaaacaggcuuc

SEQ ID NO: 556975 - RNA, 22 nt, Artificial Sequence
  Synthetic
cacaguugcugaaacaggcuuc

SEQ ID NO: 556976 - RNA, 23 nt, Artificial Sequence
  Synthetic
acacaguugcugaaacaggcuuc

SEQ ID NO: 556977 - RNA, 24 nt, Artificial Sequence
  Synthetic
uacacaguugcugaaacaggcuuc

SEQ ID NO: 556978 - RNA, 18 nt, Artificial Sequence
  Synthetic
cauuagaccauaggcuuc

SEQ ID NO: 556979 - RNA, 19 nt, Artificial Sequence
  Synthetic
acauuagaccauaggcuuc

SEQ ID NO: 556980 - RNA, 20 nt, Artificial Sequence
  Synthetic
aacauuagaccauaggcuuc

SEQ ID NO: 556981 - RNA, 21 nt, Artificial Sequence
  Synthetic
caacauuagaccauaggcuuc

SEQ ID NO: 556982 - RNA, 22 nt, Artificial Sequence
  Synthetic
ucaacauuagaccauaggcuuc

SEQ ID NO: 556983 - RNA, 23 nt, Artificial Sequence
  Synthetic
uucaacauuagaccauaggcuuc

SEQ ID NO: 556984 - RNA, 24 nt, Artificial Sequence
  Synthetic
auucaacauuagaccauaggcuuc

SEQ ID NO: 556985 - RNA, 18 nt, Artificial Sequence
  Synthetic
cuuuugcccauaggcuuc

SEQ ID NO: 556986 - RNA, 19 nt, Artificial Sequence
  Synthetic
ucuuuugcccauaggcuuc

SEQ ID NO: 556987 - RNA, 20 nt, Artificial Sequence
  Synthetic
uucuuuugcccauaggcuuc

SEQ ID NO: 556988 - RNA, 21 nt, Artificial Sequence
  Synthetic
guucuuuugcccauaggcuuc

SEQ ID NO: 556989 - RNA, 22 nt, Artificial Sequence
  Synthetic
uguucuuuugcccauaggcuuc

SEQ ID NO: 556990 - RNA, 23 nt, Artificial Sequence
  Synthetic
uuguucuuuugcccauaggcuuc

SEQ ID NO: 556991 - RNA, 24 nt, Artificial Sequence
  Synthetic
auuguucuuuugcccauaggcuuc

SEQ ID NO: 556992 - RNA, 18 nt, Artificial Sequence
  Synthetic
ugaauaggcaagggcuuc

SEQ ID NO: 556993 - RNA, 19 nt, Artificial Sequence
  Synthetic
uugaauaggcaagggcuuc

SEQ ID NO: 556994 - RNA, 20 nt, Artificial Sequence
  Synthetic
guugaauaggcaagggcuuc

SEQ ID NO: 556995 - RNA, 21 nt, Artificial Sequence
  Synthetic
uguugaauaggcaagggcuuc

SEQ ID NO: 556996 - RNA, 22 nt, Artificial Sequence
  Synthetic
uuguugaauaggcaagggcuuc

SEQ ID NO: 556997 - RNA, 23 nt, Artificial Sequence
  Synthetic
cuuguugaauaggcaagggcuuc

SEQ ID NO: 556998 - RNA, 24 nt, Artificial Sequence
  Synthetic
gcuuguugaauaggcaagggcuuc

SEQ ID NO: 556999 - RNA, 18 nt, Artificial Sequence
  Synthetic
ucaagaccagauggcuuc

SEQ ID NO: 557000 - RNA, 19 nt, Artificial Sequence
  Synthetic
cucaagaccagauggcuuc

SEQ ID NO: 557001 - RNA, 20 nt, Artificial Sequence
  Synthetic
gcucaagaccagauggcuuc

SEQ ID NO: 557002 - RNA, 21 nt, Artificial Sequence
  Synthetic
agcucaagaccagauggcuuc

SEQ ID NO: 557003 - RNA, 22 nt, Artificial Sequence
  Synthetic
aagcucaagaccagauggcuuc

SEQ ID NO: 557004 - RNA, 23 nt, Artificial Sequence
  Synthetic
aaagcucaagaccagauggcuuc

SEQ ID NO: 557005 - RNA, 24 nt, Artificial Sequence
  Synthetic
gaaagcucaagaccagauggcuuc

SEQ ID NO: 557006 - RNA, 18 nt, Artificial Sequence
  Synthetic
ucacuuacaucaugcuuc

SEQ ID NO: 557007 - RNA, 19 nt, Artificial Sequence
  Synthetic
gucacuuacaucaugcuuc

SEQ ID NO: 557008 - RNA, 20 nt, Artificial Sequence
  Synthetic
ugucacuuacaucaugcuuc

SEQ ID NO: 557009 - RNA, 21 nt, Artificial Sequence
  Synthetic
cugucacuuacaucaugcuuc

SEQ ID NO: 557010 - RNA, 22 nt, Artificial Sequence
  Synthetic
ucugucacuuacaucaugcuuc

SEQ ID NO: 557011 - RNA, 23 nt, Artificial Sequence
  Synthetic
cucugucacuuacaucaugcuuc

SEQ ID NO: 557012 - RNA, 24 nt, Artificial Sequence
  Synthetic
ucucugucacuuacaucaugcuuc

SEQ ID NO: 557013 - RNA, 18 nt, Artificial Sequence
  Synthetic
uacauucacaacugcuuc

SEQ ID NO: 557014 - RNA, 19 nt, Artificial Sequence
  Synthetic
uuacauucacaacugcuuc

SEQ ID NO: 557015 - RNA, 20 nt, Artificial Sequence
  Synthetic
uuuacauucacaacugcuuc

SEQ ID NO: 557016 - RNA, 21 nt, Artificial Sequence
  Synthetic
auuuacauucacaacugcuuc

SEQ ID NO: 557017 - RNA, 22 nt, Artificial Sequence
  Synthetic
gauuuacauucacaacugcuuc

SEQ ID NO: 557018 - RNA, 23 nt, Artificial Sequence
  Synthetic
agauuuacauucacaacugcuuc

SEQ ID NO: 557019 - RNA, 24 nt, Artificial Sequence
  Synthetic
uagauuuacauucacaacugcuuc

SEQ ID NO: 557020 - RNA, 18 nt, Artificial Sequence
  Synthetic
aaacaagacuacugcuuc

SEQ ID NO: 557021 - RNA, 19 nt, Artificial Sequence
  Synthetic
gaaacaagacuacugcuuc

SEQ ID NO: 557022 - RNA, 20 nt, Artificial Sequence
  Synthetic
ugaaacaagacuacugcuuc

SEQ ID NO: 557023 - RNA, 21 nt, Artificial Sequence
  Synthetic
augaaacaagacuacugcuuc

SEQ ID NO: 557024 - RNA, 22 nt, Artificial Sequence
  Synthetic
caugaaacaagacuacugcuuc

SEQ ID NO: 557025 - RNA, 23 nt, Artificial Sequence
  Synthetic
ccaugaaacaagacuacugcuuc

SEQ ID NO: 557026 - RNA, 24 nt, Artificial Sequence
  Synthetic
accaugaaacaagacuacugcuuc

SEQ ID NO: 557027 - RNA, 18 nt, Artificial Sequence
  Synthetic
uuaaauacacccugcuuc

SEQ ID NO: 557028 - RNA, 19 nt, Artificial Sequence
  Synthetic
uuuaaauacacccugcuuc

SEQ ID NO: 557029 - RNA, 20 nt, Artificial Sequence
  Synthetic
cuuuaaauacacccugcuuc

SEQ ID NO: 557030 - RNA, 21 nt, Artificial Sequence
  Synthetic
ucuuuaaauacacccugcuuc

SEQ ID NO: 557031 - RNA, 22 nt, Artificial Sequence
  Synthetic
gucuuuaaauacacccugcuuc

SEQ ID NO: 557032 - RNA, 23 nt, Artificial Sequence
  Synthetic
agucuuuaaauacacccugcuuc

SEQ ID NO: 557033 - RNA, 24 nt, Artificial Sequence
  Synthetic
cagucuuuaaauacacccugcuuc

SEQ ID NO: 557034 - RNA, 18 nt, Artificial Sequence
  Synthetic
ccgcuuacccucugcuuc

SEQ ID NO: 557035 - RNA, 19 nt, Artificial Sequence
  Synthetic
gccgcuuacccucugcuuc

SEQ ID NO: 557036 - RNA, 20 nt, Artificial Sequence
  Synthetic
ugccgcuuacccucugcuuc

SEQ ID NO: 557037 - RNA, 21 nt, Artificial Sequence
  Synthetic
augccgcuuacccucugcuuc

SEQ ID NO: 557038 - RNA, 22 nt, Artificial Sequence
  Synthetic
aaugccgcuuacccucugcuuc

SEQ ID NO: 557039 - RNA, 23 nt, Artificial Sequence
  Synthetic
aaaugccgcuuacccucugcuuc

SEQ ID NO: 557040 - RNA, 24 nt, Artificial Sequence
  Synthetic
gaaaugccgcuuacccucugcuuc

SEQ ID NO: 557041 - RNA, 18 nt, Artificial Sequence
  Synthetic
gaaggccauacgugcuuc

SEQ ID NO: 557042 - RNA, 19 nt, Artificial Sequence
  Synthetic
ugaaggccauacgugcuuc

SEQ ID NO: 557043 - RNA, 20 nt, Artificial Sequence
  Synthetic
cugaaggccauacgugcuuc

SEQ ID NO: 557044 - RNA, 21 nt, Artificial Sequence
  Synthetic
ccugaaggccauacgugcuuc

SEQ ID NO: 557045 - RNA, 22 nt, Artificial Sequence
  Synthetic
cccugaaggccauacgugcuuc

SEQ ID NO: 557046 - RNA, 23 nt, Artificial Sequence
  Synthetic
ccccugaaggccauacgugcuuc

SEQ ID NO: 557047 - RNA, 24 nt, Artificial Sequence
  Synthetic
uccccugaaggccauacgugcuuc

SEQ ID NO: 557048 - RNA, 18 nt, Artificial Sequence
  Synthetic
caaguuguaaauugcuuc

SEQ ID NO: 557049 - RNA, 19 nt, Artificial Sequence
  Synthetic
acaaguuguaaauugcuuc

SEQ ID NO: 557050 - RNA, 20 nt, Artificial Sequence
  Synthetic
cacaaguuguaaauugcuuc

SEQ ID NO: 557051 - RNA, 21 nt, Artificial Sequence
  Synthetic
ucacaaguuguaaauugcuuc

SEQ ID NO: 557052 - RNA, 22 nt, Artificial Sequence
  Synthetic
cucacaaguuguaaauugcuuc

SEQ ID NO: 557053 - RNA, 23 nt, Artificial Sequence
  Synthetic
ccucacaaguuguaaauugcuuc

SEQ ID NO: 557054 - RNA, 24 nt, Artificial Sequence
  Synthetic
gccucacaaguuguaaauugcuuc

SEQ ID NO: 557055 - RNA, 18 nt, Artificial Sequence
  Synthetic
aaaacaaaacauugcuuc

SEQ ID NO: 557056 - RNA, 19 nt, Artificial Sequence
  Synthetic
uaaaacaaaacauugcuuc

SEQ ID NO: 557057 - RNA, 20 nt, Artificial Sequence
  Synthetic
cuaaaacaaaacauugcuuc

SEQ ID NO: 557058 - RNA, 21 nt, Artificial Sequence
  Synthetic
gcuaaaacaaaacauugcuuc

SEQ ID NO: 557059 - RNA, 22 nt, Artificial Sequence
  Synthetic
agcuaaaacaaaacauugcuuc

SEQ ID NO: 557060 - RNA, 23 nt, Artificial Sequence
  Synthetic
cagcuaaaacaaaacauugcuuc

SEQ ID NO: 557061 - RNA, 24 nt, Artificial Sequence
  Synthetic
ucagcuaaaacaaaacauugcuuc

SEQ ID NO: 557062 - RNA, 18 nt, Artificial Sequence
  Synthetic
agccagaaggauugcuuc

SEQ ID NO: 557063 - RNA, 19 nt, Artificial Sequence
  Synthetic
uagccagaaggauugcuuc

SEQ ID NO: 557064 - RNA, 20 nt, Artificial Sequence
  Synthetic
uuagccagaaggauugcuuc

SEQ ID NO: 557065 - RNA, 21 nt, Artificial Sequence
  Synthetic
cuuagccagaaggauugcuuc

SEQ ID NO: 557066 - RNA, 22 nt, Artificial Sequence
  Synthetic
ucuuagccagaaggauugcuuc

SEQ ID NO: 557067 - RNA, 23 nt, Artificial Sequence
  Synthetic
aucuuagccagaaggauugcuuc

SEQ ID NO: 557068 - RNA, 24 nt, Artificial Sequence
  Synthetic
aaucuuagccagaaggauugcuuc

SEQ ID NO: 557069 - RNA, 18 nt, Artificial Sequence
  Synthetic
gagauauugauuugcuuc

SEQ ID NO: 557070 - RNA, 19 nt, Artificial Sequence
  Synthetic
ugagauauugauuugcuuc

SEQ ID NO: 557071 - RNA, 20 nt, Artificial Sequence
  Synthetic
gugagauauugauuugcuuc

SEQ ID NO: 557072 - RNA, 21 nt, Artificial Sequence
  Synthetic
ggugagauauugauuugcuuc

SEQ ID NO: 557073 - RNA, 22 nt, Artificial Sequence
  Synthetic
aggugagauauugauuugcuuc

SEQ ID NO: 557074 - RNA, 23 nt, Artificial Sequence
  Synthetic
aaggugagauauugauuugcuuc

SEQ ID NO: 557075 - RNA, 24 nt, Artificial Sequence
  Synthetic
aaaggugagauauugauuugcuuc

SEQ ID NO: 557076 - RNA, 18 nt, Artificial Sequence
  Synthetic
ccccucccaaaaaucuuc

SEQ ID NO: 557077 - RNA, 19 nt, Artificial Sequence
  Synthetic
cccccucccaaaaaucuuc

SEQ ID NO: 557078 - RNA, 20 nt, Artificial Sequence
  Synthetic
ucccccucccaaaaaucuuc

SEQ ID NO: 557079 - RNA, 21 nt, Artificial Sequence
  Synthetic
uucccccucccaaaaaucuuc

SEQ ID NO: 557080 - RNA, 22 nt, Artificial Sequence
  Synthetic
uuucccccucccaaaaaucuuc

SEQ ID NO: 557081 - RNA, 23 nt, Artificial Sequence
  Synthetic
cuuucccccucccaaaaaucuuc

SEQ ID NO: 557082 - RNA, 24 nt, Artificial Sequence
  Synthetic
gcuuucccccucccaaaaaucuuc

SEQ ID NO: 557083 - RNA, 18 nt, Artificial Sequence
  Synthetic
gguaaacugaaaaucuuc

SEQ ID NO: 557084 - RNA, 19 nt, Artificial Sequence
  Synthetic
ggguaaacugaaaaucuuc

SEQ ID NO: 557085 - RNA, 20 nt, Artificial Sequence
  Synthetic
uggguaaacugaaaaucuuc

SEQ ID NO: 557086 - RNA, 21 nt, Artificial Sequence
  Synthetic
cuggguaaacugaaaaucuuc

SEQ ID NO: 557087 - RNA, 22 nt, Artificial Sequence
  Synthetic
ucuggguaaacugaaaaucuuc

SEQ ID NO: 557088 - RNA, 23 nt, Artificial Sequence
  Synthetic
aucuggguaaacugaaaaucuuc

SEQ ID NO: 557089 - RNA, 24 nt, Artificial Sequence
  Synthetic
gaucuggguaaacugaaaaucuuc

SEQ ID NO: 557090 - RNA, 18 nt, Artificial Sequence
  Synthetic
uugcuuucuaaaaucuuc

SEQ ID NO: 557091 - RNA, 19 nt, Artificial Sequence
  Synthetic
auugcuuucuaaaaucuuc

SEQ ID NO: 557092 - RNA, 20 nt, Artificial Sequence
  Synthetic
aauugcuuucuaaaaucuuc

SEQ ID NO: 557093 - RNA, 21 nt, Artificial Sequence
  Synthetic
uaauugcuuucuaaaaucuuc

SEQ ID NO: 557094 - RNA, 22 nt, Artificial Sequence
  Synthetic
auaauugcuuucuaaaaucuuc

SEQ ID NO: 557095 - RNA, 23 nt, Artificial Sequence
  Synthetic
uauaauugcuuucuaaaaucuuc

SEQ ID NO: 557096 - RNA, 24 nt, Artificial Sequence
  Synthetic
uuauaauugcuuucuaaaaucuuc

SEQ ID NO: 557097 - RNA, 18 nt, Artificial Sequence
  Synthetic
gucuuuagagaaaucuuc

SEQ ID NO: 557098 - RNA, 19 nt, Artificial Sequence
  Synthetic
ggucuuuagagaaaucuuc

SEQ ID NO: 557099 - RNA, 20 nt, Artificial Sequence
  Synthetic
uggucuuuagagaaaucuuc

SEQ ID NO: 557100 - RNA, 21 nt, Artificial Sequence
  Synthetic
uuggucuuuagagaaaucuuc

SEQ ID NO: 557101 - RNA, 22 nt, Artificial Sequence
  Synthetic
uuuggucuuuagagaaaucuuc

SEQ ID NO: 557102 - RNA, 23 nt, Artificial Sequence
  Synthetic
cuuuggucuuuagagaaaucuuc

SEQ ID NO: 557103 - RNA, 24 nt, Artificial Sequence
  Synthetic
ccuuuggucuuuagagaaaucuuc

SEQ ID NO: 557104 - RNA, 18 nt, Artificial Sequence
  Synthetic
gugcuuuauuaaaucuuc

SEQ ID NO: 557105 - RNA, 19 nt, Artificial Sequence
  Synthetic
cgugcuuuauuaaaucuuc

SEQ ID NO: 557106 - RNA, 20 nt, Artificial Sequence
  Synthetic
gcgugcuuuauuaaaucuuc

SEQ ID NO: 557107 - RNA, 21 nt, Artificial Sequence
  Synthetic
agcgugcuuuauuaaaucuuc

SEQ ID NO: 557108 - RNA, 22 nt, Artificial Sequence
  Synthetic
uagcgugcuuuauuaaaucuuc

SEQ ID NO: 557109 - RNA, 23 nt, Artificial Sequence
  Synthetic
cuagcgugcuuuauuaaaucuuc

SEQ ID NO: 557110 - RNA, 24 nt, Artificial Sequence
  Synthetic
acuagcgugcuuuauuaaaucuuc

SEQ ID NO: 557111 - RNA, 18 nt, Artificial Sequence
  Synthetic
ggaaaacaaacaaucuuc

SEQ ID NO: 557112 - RNA, 19 nt, Artificial Sequence
  Synthetic
aggaaaacaaacaaucuuc

SEQ ID NO: 557113 - RNA, 20 nt, Artificial Sequence
  Synthetic
aaggaaaacaaacaaucuuc

SEQ ID NO: 557114 - RNA, 21 nt, Artificial Sequence
  Synthetic
uaaggaaaacaaacaaucuuc

SEQ ID NO: 557115 - RNA, 22 nt, Artificial Sequence
  Synthetic
guaaggaaaacaaacaaucuuc

SEQ ID NO: 557116 - RNA, 23 nt, Artificial Sequence
  Synthetic
uguaaggaaaacaaacaaucuuc

SEQ ID NO: 557117 - RNA, 24 nt, Artificial Sequence
  Synthetic
cuguaaggaaaacaaacaaucuuc

SEQ ID NO: 557118 - RNA, 18 nt, Artificial Sequence
  Synthetic
uaacagcccuuaaucuuc

SEQ ID NO: 557119 - RNA, 19 nt, Artificial Sequence
  Synthetic
auaacagcccuuaaucuuc

SEQ ID NO: 557120 - RNA, 20 nt, Artificial Sequence
  Synthetic
cauaacagcccuuaaucuuc

SEQ ID NO: 557121 - RNA, 21 nt, Artificial Sequence
  Synthetic
gcauaacagcccuuaaucuuc

SEQ ID NO: 557122 - RNA, 22 nt, Artificial Sequence
  Synthetic
agcauaacagcccuuaaucuuc

SEQ ID NO: 557123 - RNA, 23 nt, Artificial Sequence
  Synthetic
uagcauaacagcccuuaaucuuc

SEQ ID NO: 557124 - RNA, 24 nt, Artificial Sequence
  Synthetic
cuagcauaacagcccuuaaucuuc

SEQ ID NO: 557125 - RNA, 18 nt, Artificial Sequence
  Synthetic
cuggggauuaacaucuuc

SEQ ID NO: 557126 - RNA, 19 nt, Artificial Sequence
  Synthetic
ucuggggauuaacaucuuc

SEQ ID NO: 557127 - RNA, 20 nt, Artificial Sequence
  Synthetic
uucuggggauuaacaucuuc

SEQ ID NO: 557128 - RNA, 21 nt, Artificial Sequence
  Synthetic
guucuggggauuaacaucuuc

SEQ ID NO: 557129 - RNA, 22 nt, Artificial Sequence
  Synthetic
gguucuggggauuaacaucuuc

SEQ ID NO: 557130 - RNA, 23 nt, Artificial Sequence
  Synthetic
agguucuggggauuaacaucuuc

SEQ ID NO: 557131 - RNA, 24 nt, Artificial Sequence
  Synthetic
cagguucuggggauuaacaucuuc

SEQ ID NO: 557132 - RNA, 18 nt, Artificial Sequence
  Synthetic
uuacucaugcccaucuuc

SEQ ID NO: 557133 - RNA, 19 nt, Artificial Sequence
  Synthetic
guuacucaugcccaucuuc

SEQ ID NO: 557134 - RNA, 20 nt, Artificial Sequence
  Synthetic
uguuacucaugcccaucuuc

SEQ ID NO: 557135 - RNA, 21 nt, Artificial Sequence
  Synthetic
uuguuacucaugcccaucuuc

SEQ ID NO: 557136 - RNA, 22 nt, Artificial Sequence
  Synthetic
cuuguuacucaugcccaucuuc

SEQ ID NO: 557137 - RNA, 23 nt, Artificial Sequence
  Synthetic
ccuuguuacucaugcccaucuuc

SEQ ID NO: 557138 - RNA, 24 nt, Artificial Sequence
  Synthetic
uccuuguuacucaugcccaucuuc

SEQ ID NO: 557139 - RNA, 18 nt, Artificial Sequence
  Synthetic
uuacaccacuccaucuuc

SEQ ID NO: 557140 - RNA, 19 nt, Artificial Sequence
  Synthetic
auuacaccacuccaucuuc

SEQ ID NO: 557141 - RNA, 20 nt, Artificial Sequence
  Synthetic
aauuacaccacuccaucuuc

SEQ ID NO: 557142 - RNA, 21 nt, Artificial Sequence
  Synthetic
uaauuacaccacuccaucuuc

SEQ ID NO: 557143 - RNA, 22 nt, Artificial Sequence
  Synthetic
guaauuacaccacuccaucuuc

SEQ ID NO: 557144 - RNA, 23 nt, Artificial Sequence
  Synthetic
gguaauuacaccacuccaucuuc

SEQ ID NO: 557145 - RNA, 24 nt, Artificial Sequence
  Synthetic
ugguaauuacaccacuccaucuuc

SEQ ID NO: 557146 - RNA, 18 nt, Artificial Sequence
  Synthetic
uaacuugugaagaucuuc

SEQ ID NO: 557147 - RNA, 19 nt, Artificial Sequence
  Synthetic
guaacuugugaagaucuuc

SEQ ID NO: 557148 - RNA, 20 nt, Artificial Sequence
  Synthetic
aguaacuugugaagaucuuc

SEQ ID NO: 557149 - RNA, 21 nt, Artificial Sequence
  Synthetic
uaguaacuugugaagaucuuc

SEQ ID NO: 557150 - RNA, 22 nt, Artificial Sequence
  Synthetic
auaguaacuugugaagaucuuc

SEQ ID NO: 557151 - RNA, 23 nt, Artificial Sequence
  Synthetic
uauaguaacuugugaagaucuuc

SEQ ID NO: 557152 - RNA, 24 nt, Artificial Sequence
  Synthetic
uuauaguaacuugugaagaucuuc

SEQ ID NO: 557153 - RNA, 18 nt, Artificial Sequence
  Synthetic
guuagagcauagaucuuc

SEQ ID NO: 557154 - RNA, 19 nt, Artificial Sequence
  Synthetic
gguuagagcauagaucuuc

SEQ ID NO: 557155 - RNA, 20 nt, Artificial Sequence
  Synthetic
ggguuagagcauagaucuuc

SEQ ID NO: 557156 - RNA, 21 nt, Artificial Sequence
  Synthetic
aggguuagagcauagaucuuc

SEQ ID NO: 557157 - RNA, 22 nt, Artificial Sequence
  Synthetic
caggguuagagcauagaucuuc

SEQ ID NO: 557158 - RNA, 23 nt, Artificial Sequence
  Synthetic
gcaggguuagagcauagaucuuc

SEQ ID NO: 557159 - RNA, 24 nt, Artificial Sequence
  Synthetic
agcaggguuagagcauagaucuuc

SEQ ID NO: 557160 - RNA, 18 nt, Artificial Sequence
  Synthetic
ggcuggcugaauaucuuc

SEQ ID NO: 557161 - RNA, 19 nt, Artificial Sequence
  Synthetic
gggcuggcugaauaucuuc

SEQ ID NO: 557162 - RNA, 20 nt, Artificial Sequence
  Synthetic
ugggcuggcugaauaucuuc

SEQ ID NO: 557163 - RNA, 21 nt, Artificial Sequence
  Synthetic
uugggcuggcugaauaucuuc

SEQ ID NO: 557164 - RNA, 22 nt, Artificial Sequence
  Synthetic
uuugggcuggcugaauaucuuc

SEQ ID NO: 557165 - RNA, 23 nt, Artificial Sequence
  Synthetic
cuuugggcuggcugaauaucuuc

SEQ ID NO: 557166 - RNA, 24 nt, Artificial Sequence
  Synthetic
ccuuugggcuggcugaauaucuuc

SEQ ID NO: 557167 - RNA, 18 nt, Artificial Sequence
  Synthetic
gguaauuaauauaucuuc

SEQ ID NO: 557168 - RNA, 19 nt, Artificial Sequence
  Synthetic
agguaauuaauauaucuuc

SEQ ID NO: 557169 - RNA, 20 nt, Artificial Sequence
  Synthetic
aagguaauuaauauaucuuc

SEQ ID NO: 557170 - RNA, 21 nt, Artificial Sequence
  Synthetic
gaagguaauuaauauaucuuc

SEQ ID NO: 557171 - RNA, 22 nt, Artificial Sequence
  Synthetic
agaagguaauuaauauaucuuc

SEQ ID NO: 557172 - RNA, 23 nt, Artificial Sequence
  Synthetic
cagaagguaauuaauauaucuuc

SEQ ID NO: 557173 - RNA, 24 nt, Artificial Sequence
  Synthetic
acagaagguaauuaauauaucuuc

SEQ ID NO: 557174 - RNA, 18 nt, Artificial Sequence
  Synthetic
uaauuccauuaacucuuc

SEQ ID NO: 557175 - RNA, 19 nt, Artificial Sequence
  Synthetic
cuaauuccauuaacucuuc

SEQ ID NO: 557176 - RNA, 20 nt, Artificial Sequence
  Synthetic
acuaauuccauuaacucuuc

SEQ ID NO: 557177 - RNA, 21 nt, Artificial Sequence
  Synthetic
cacuaauuccauuaacucuuc

SEQ ID NO: 557178 - RNA, 22 nt, Artificial Sequence
  Synthetic
ucacuaauuccauuaacucuuc

SEQ ID NO: 557179 - RNA, 23 nt, Artificial Sequence
  Synthetic
cucacuaauuccauuaacucuuc

SEQ ID NO: 557180 - RNA, 24 nt, Artificial Sequence
  Synthetic
gcucacuaauuccauuaacucuuc

SEQ ID NO: 557181 - RNA, 19 nt, Artificial Sequence
  Synthetic
cgaugugaaggaccucuuc

SEQ ID NO: 557182 - RNA, 20 nt, Artificial Sequence
  Synthetic
gcgaugugaaggaccucuuc

SEQ ID NO: 557183 - RNA, 21 nt, Artificial Sequence
  Synthetic
agcgaugugaaggaccucuuc

SEQ ID NO: 557184 - RNA, 22 nt, Artificial Sequence
  Synthetic
aagcgaugugaaggaccucuuc

SEQ ID NO: 557185 - RNA, 23 nt, Artificial Sequence
  Synthetic
caagcgaugugaaggaccucuuc

SEQ ID NO: 557186 - RNA, 24 nt, Artificial Sequence
  Synthetic
acaagcgaugugaaggaccucuuc

SEQ ID NO: 557187 - RNA, 21 nt, Artificial Sequence
  Synthetic
agggaugugaaggaccucuuc

SEQ ID NO: 557188 - RNA, 22 nt, Artificial Sequence
  Synthetic
aagggaugugaaggaccucuuc

SEQ ID NO: 557189 - RNA, 23 nt, Artificial Sequence
  Synthetic
caagggaugugaaggaccucuuc

SEQ ID NO: 557190 - RNA, 24 nt, Artificial Sequence
  Synthetic
acaagggaugugaaggaccucuuc

SEQ ID NO: 557191 - RNA, 18 nt, Artificial Sequence
  Synthetic
acauacuugucccucuuc

SEQ ID NO: 557192 - RNA, 19 nt, Artificial Sequence
  Synthetic
gacauacuugucccucuuc

SEQ ID NO: 557193 - RNA, 20 nt, Artificial Sequence
  Synthetic
agacauacuugucccucuuc

SEQ ID NO: 557194 - RNA, 21 nt, Artificial Sequence
  Synthetic
uagacauacuugucccucuuc

SEQ ID NO: 557195 - RNA, 22 nt, Artificial Sequence
  Synthetic
guagacauacuugucccucuuc

SEQ ID NO: 557196 - RNA, 23 nt, Artificial Sequence
  Synthetic
uguagacauacuugucccucuuc

SEQ ID NO: 557197 - RNA, 24 nt, Artificial Sequence
  Synthetic
uuguagacauacuugucccucuuc

SEQ ID NO: 557198 - RNA, 18 nt, Artificial Sequence
  Synthetic
gaugugaagggccucuuc

SEQ ID NO: 557199 - RNA, 19 nt, Artificial Sequence
  Synthetic
ggaugugaagggccucuuc

SEQ ID NO: 557200 - RNA, 20 nt, Artificial Sequence
  Synthetic
gggaugugaagggccucuuc

SEQ ID NO: 557201 - RNA, 21 nt, Artificial Sequence
  Synthetic
agggaugugaagggccucuuc

SEQ ID NO: 557202 - RNA, 22 nt, Artificial Sequence
  Synthetic
aagggaugugaagggccucuuc

SEQ ID NO: 557203 - RNA, 23 nt, Artificial Sequence
  Synthetic
caagggaugugaagggccucuuc

SEQ ID NO: 557204 - RNA, 24 nt, Artificial Sequence
  Synthetic
gcaagggaugugaagggccucuuc

SEQ ID NO: 557205 - RNA, 18 nt, Artificial Sequence
  Synthetic
uaucuggauauccucuuc

SEQ ID NO: 557206 - RNA, 19 nt, Artificial Sequence
  Synthetic
cuaucuggauauccucuuc

SEQ ID NO: 557207 - RNA, 20 nt, Artificial Sequence
  Synthetic
gcuaucuggauauccucuuc

SEQ ID NO: 557208 - RNA, 21 nt, Artificial Sequence
  Synthetic
agcuaucuggauauccucuuc

SEQ ID NO: 557209 - RNA, 22 nt, Artificial Sequence
  Synthetic
cagcuaucuggauauccucuuc

SEQ ID NO: 557210 - RNA, 23 nt, Artificial Sequence
  Synthetic
ccagcuaucuggauauccucuuc

SEQ ID NO: 557211 - RNA, 24 nt, Artificial Sequence
  Synthetic
uccagcuaucuggauauccucuuc

SEQ ID NO: 557212 - RNA, 18 nt, Artificial Sequence
  Synthetic
gugaauauauuccucuuc

SEQ ID NO: 557213 - RNA, 19 nt, Artificial Sequence
  Synthetic
ggugaauauauuccucuuc

SEQ ID NO: 557214 - RNA, 20 nt, Artificial Sequence
  Synthetic
uggugaauauauuccucuuc

SEQ ID NO: 557215 - RNA, 21 nt, Artificial Sequence
  Synthetic
auggugaauauauuccucuuc

SEQ ID NO: 557216 - RNA, 22 nt, Artificial Sequence
  Synthetic
aauggugaauauauuccucuuc

SEQ ID NO: 557217 - RNA, 23 nt, Artificial Sequence
  Synthetic
caauggugaauauauuccucuuc

SEQ ID NO: 557218 - RNA, 24 nt, Artificial Sequence
  Synthetic
ccaauggugaauauauuccucuuc

SEQ ID NO: 557219 - RNA, 18 nt, Artificial Sequence
  Synthetic
ucagaugcuaugcucuuc

SEQ ID NO: 557220 - RNA, 19 nt, Artificial Sequence
  Synthetic
uucagaugcuaugcucuuc

SEQ ID NO: 557221 - RNA, 20 nt, Artificial Sequence
  Synthetic
auucagaugcuaugcucuuc

SEQ ID NO: 557222 - RNA, 21 nt, Artificial Sequence
  Synthetic
aauucagaugcuaugcucuuc

SEQ ID NO: 557223 - RNA, 22 nt, Artificial Sequence
  Synthetic
aaauucagaugcuaugcucuuc

SEQ ID NO: 557224 - RNA, 23 nt, Artificial Sequence
  Synthetic
uaaauucagaugcuaugcucuuc

SEQ ID NO: 557225 - RNA, 24 nt, Artificial Sequence
  Synthetic
auaaauucagaugcuaugcucuuc

SEQ ID NO: 557226 - RNA, 18 nt, Artificial Sequence
  Synthetic
uuggaacauaaucucuuc

SEQ ID NO: 557227 - RNA, 19 nt, Artificial Sequence
  Synthetic
auuggaacauaaucucuuc

SEQ ID NO: 557228 - RNA, 20 nt, Artificial Sequence
  Synthetic
cauuggaacauaaucucuuc

SEQ ID NO: 557229 - RNA, 21 nt, Artificial Sequence
  Synthetic
ucauuggaacauaaucucuuc

SEQ ID NO: 557230 - RNA, 22 nt, Artificial Sequence
  Synthetic
aucauuggaacauaaucucuuc

SEQ ID NO: 557231 - RNA, 23 nt, Artificial Sequence
  Synthetic
caucauuggaacauaaucucuuc

SEQ ID NO: 557232 - RNA, 24 nt, Artificial Sequence
  Synthetic
acaucauuggaacauaaucucuuc

SEQ ID NO: 557233 - RNA, 18 nt, Artificial Sequence
  Synthetic
aagacugcuccucucuuc

SEQ ID NO: 557234 - RNA, 19 nt, Artificial Sequence
  Synthetic
gaagacugcuccucucuuc

SEQ ID NO: 557235 - RNA, 20 nt, Artificial Sequence
  Synthetic
agaagacugcuccucucuuc

SEQ ID NO: 557236 - RNA, 21 nt, Artificial Sequence
  Synthetic
cagaagacugcuccucucuuc

SEQ ID NO: 557237 - RNA, 22 nt, Artificial Sequence
  Synthetic
acagaagacugcuccucucuuc

SEQ ID NO: 557238 - RNA, 23 nt, Artificial Sequence
  Synthetic
cacagaagacugcuccucucuuc

SEQ ID NO: 557239 - RNA, 24 nt, Artificial Sequence
  Synthetic
gcacagaagacugcuccucucuuc

SEQ ID NO: 557240 - RNA, 18 nt, Artificial Sequence
  Synthetic
cugcugacuauucucuuc

SEQ ID NO: 557241 - RNA, 19 nt, Artificial Sequence
  Synthetic
gcugcugacuauucucuuc

SEQ ID NO: 557242 - RNA, 20 nt, Artificial Sequence
  Synthetic
ugcugcugacuauucucuuc

SEQ ID NO: 557243 - RNA, 21 nt, Artificial Sequence
  Synthetic
gugcugcugacuauucucuuc

SEQ ID NO: 557244 - RNA, 22 nt, Artificial Sequence
  Synthetic
ggugcugcugacuauucucuuc

SEQ ID NO: 557245 - RNA, 23 nt, Artificial Sequence
  Synthetic
uggugcugcugacuauucucuuc

SEQ ID NO: 557246 - RNA, 24 nt, Artificial Sequence
  Synthetic
cuggugcugcugacuauucucuuc

SEQ ID NO: 557247 - RNA, 18 nt, Artificial Sequence
  Synthetic
aaaaagggcuaagucuuc

SEQ ID NO: 557248 - RNA, 19 nt, Artificial Sequence
  Synthetic
gaaaaagggcuaagucuuc

SEQ ID NO: 557249 - RNA, 20 nt, Artificial Sequence
  Synthetic
ugaaaaagggcuaagucuuc

SEQ ID NO: 557250 - RNA, 21 nt, Artificial Sequence
  Synthetic
augaaaaagggcuaagucuuc

SEQ ID NO: 557251 - RNA, 22 nt, Artificial Sequence
  Synthetic
aaugaaaaagggcuaagucuuc

SEQ ID NO: 557252 - RNA, 23 nt, Artificial Sequence
  Synthetic
gaaugaaaaagggcuaagucuuc

SEQ ID NO: 557253 - RNA, 24 nt, Artificial Sequence
  Synthetic
agaaugaaaaagggcuaagucuuc

SEQ ID NO: 557254 - RNA, 18 nt, Artificial Sequence
  Synthetic
uagguguggcaggucuuc

SEQ ID NO: 557255 - RNA, 19 nt, Artificial Sequence
  Synthetic
guagguguggcaggucuuc

SEQ ID NO: 557256 - RNA, 20 nt, Artificial Sequence
  Synthetic
aguagguguggcaggucuuc

SEQ ID NO: 557257 - RNA, 21 nt, Artificial Sequence
  Synthetic
gaguagguguggcaggucuuc

SEQ ID NO: 557258 - RNA, 22 nt, Artificial Sequence
  Synthetic
agaguagguguggcaggucuuc

SEQ ID NO: 557259 - RNA, 23 nt, Artificial Sequence
  Synthetic
gagaguagguguggcaggucuuc

SEQ ID NO: 557260 - RNA, 24 nt, Artificial Sequence
  Synthetic
agagaguagguguggcaggucuuc

SEQ ID NO: 557261 - RNA, 18 nt, Artificial Sequence
  Synthetic
gugaaaaaucaugucuuc

SEQ ID NO: 557262 - RNA, 19 nt, Artificial Sequence
  Synthetic
ugugaaaaaucaugucuuc

SEQ ID NO: 557263 - RNA, 20 nt, Artificial Sequence
  Synthetic
augugaaaaaucaugucuuc

SEQ ID NO: 557264 - RNA, 21 nt, Artificial Sequence
  Synthetic
gaugugaaaaaucaugucuuc

SEQ ID NO: 557265 - RNA, 22 nt, Artificial Sequence
  Synthetic
ugaugugaaaaaucaugucuuc

SEQ ID NO: 557266 - RNA, 23 nt, Artificial Sequence
  Synthetic
augaugugaaaaaucaugucuuc

SEQ ID NO: 557267 - RNA, 24 nt, Artificial Sequence
  Synthetic
gaugaugugaaaaaucaugucuuc

SEQ ID NO: 557268 - RNA, 18 nt, Artificial Sequence
  Synthetic
uugucccaucaauucuuc

SEQ ID NO: 557269 - RNA, 19 nt, Artificial Sequence
  Synthetic
auugucccaucaauucuuc

SEQ ID NO: 557270 - RNA, 20 nt, Artificial Sequence
  Synthetic
cauugucccaucaauucuuc

SEQ ID NO: 557271 - RNA, 21 nt, Artificial Sequence
  Synthetic
acauugucccaucaauucuuc

SEQ ID NO: 557272 - RNA, 22 nt, Artificial Sequence
  Synthetic
cacauugucccaucaauucuuc

SEQ ID NO: 557273 - RNA, 23 nt, Artificial Sequence
  Synthetic
acacauugucccaucaauucuuc

SEQ ID NO: 557274 - RNA, 24 nt, Artificial Sequence
  Synthetic
cacacauugucccaucaauucuuc

SEQ ID NO: 557275 - RNA, 18 nt, Artificial Sequence
  Synthetic
ccaugugaauaauucuuc

SEQ ID NO: 557276 - RNA, 19 nt, Artificial Sequence
  Synthetic
uccaugugaauaauucuuc

SEQ ID NO: 557277 - RNA, 20 nt, Artificial Sequence
  Synthetic
uuccaugugaauaauucuuc

SEQ ID NO: 557278 - RNA, 21 nt, Artificial Sequence
  Synthetic
auuccaugugaauaauucuuc

SEQ ID NO: 557279 - RNA, 22 nt, Artificial Sequence
  Synthetic
gauuccaugugaauaauucuuc

SEQ ID NO: 557280 - RNA, 23 nt, Artificial Sequence
  Synthetic
ugauuccaugugaauaauucuuc

SEQ ID NO: 557281 - RNA, 24 nt, Artificial Sequence
  Synthetic
uugauuccaugugaauaauucuuc

SEQ ID NO: 557282 - RNA, 18 nt, Artificial Sequence
  Synthetic
caagauaaagcauucuuc

SEQ ID NO: 557283 - RNA, 19 nt, Artificial Sequence
  Synthetic
gcaagauaaagcauucuuc

SEQ ID NO: 557284 - RNA, 20 nt, Artificial Sequence
  Synthetic
agcaagauaaagcauucuuc

SEQ ID NO: 557285 - RNA, 21 nt, Artificial Sequence
  Synthetic
aagcaagauaaagcauucuuc

SEQ ID NO: 557286 - RNA, 22 nt, Artificial Sequence
  Synthetic
gaagcaagauaaagcauucuuc

SEQ ID NO: 557287 - RNA, 23 nt, Artificial Sequence
  Synthetic
ugaagcaagauaaagcauucuuc

SEQ ID NO: 557288 - RNA, 24 nt, Artificial Sequence
  Synthetic
augaagcaagauaaagcauucuuc

SEQ ID NO: 557289 - RNA, 18 nt, Artificial Sequence
  Synthetic
uucagcuugugauucuuc

SEQ ID NO: 557290 - RNA, 19 nt, Artificial Sequence
  Synthetic
auucagcuugugauucuuc

SEQ ID NO: 557291 - RNA, 20 nt, Artificial Sequence
  Synthetic
uauucagcuugugauucuuc

SEQ ID NO: 557292 - RNA, 21 nt, Artificial Sequence
  Synthetic
uuauucagcuugugauucuuc

SEQ ID NO: 557293 - RNA, 22 nt, Artificial Sequence
  Synthetic
cuuauucagcuugugauucuuc

SEQ ID NO: 557294 - RNA, 23 nt, Artificial Sequence
  Synthetic
acuuauucagcuugugauucuuc

SEQ ID NO: 557295 - RNA, 24 nt, Artificial Sequence
  Synthetic
aacuuauucagcuugugauucuuc

SEQ ID NO: 557296 - RNA, 18 nt, Artificial Sequence
  Synthetic
uuuaugcaucauuucuuc

SEQ ID NO: 557297 - RNA, 19 nt, Artificial Sequence
  Synthetic
uuuuaugcaucauuucuuc

SEQ ID NO: 557298 - RNA, 20 nt, Artificial Sequence
  Synthetic
uuuuuaugcaucauuucuuc

SEQ ID NO: 557299 - RNA, 21 nt, Artificial Sequence
  Synthetic
guuuuuaugcaucauuucuuc

SEQ ID NO: 557300 - RNA, 22 nt, Artificial Sequence
  Synthetic
aguuuuuaugcaucauuucuuc

SEQ ID NO: 557301 - RNA, 23 nt, Artificial Sequence
  Synthetic
uaguuuuuaugcaucauuucuuc

SEQ ID NO: 557302 - RNA, 24 nt, Artificial Sequence
  Synthetic
uuaguuuuuaugcaucauuucuuc

SEQ ID NO: 557303 - RNA, 18 nt, Artificial Sequence
  Synthetic
agagcaaauucuuucuuc

SEQ ID NO: 557304 - RNA, 19 nt, Artificial Sequence
  Synthetic
uagagcaaauucuuucuuc

SEQ ID NO: 557305 - RNA, 20 nt, Artificial Sequence
  Synthetic
guagagcaaauucuuucuuc

SEQ ID NO: 557306 - RNA, 21 nt, Artificial Sequence
  Synthetic
aguagagcaaauucuuucuuc

SEQ ID NO: 557307 - RNA, 22 nt, Artificial Sequence
  Synthetic
aaguagagcaaauucuuucuuc

SEQ ID NO: 557308 - RNA, 23 nt, Artificial Sequence
  Synthetic
caaguagagcaaauucuuucuuc

SEQ ID NO: 557309 - RNA, 24 nt, Artificial Sequence
  Synthetic
ccaaguagagcaaauucuuucuuc

SEQ ID NO: 557310 - RNA, 18 nt, Artificial Sequence
  Synthetic
acauugaaaaguuucuuc

SEQ ID NO: 557311 - RNA, 19 nt, Artificial Sequence
  Synthetic
aacauugaaaaguuucuuc

SEQ ID NO: 557312 - RNA, 20 nt, Artificial Sequence
  Synthetic
aaacauugaaaaguuucuuc

SEQ ID NO: 557313 - RNA, 21 nt, Artificial Sequence
  Synthetic
caaacauugaaaaguuucuuc

SEQ ID NO: 557314 - RNA, 22 nt, Artificial Sequence
  Synthetic
gcaaacauugaaaaguuucuuc

SEQ ID NO: 557315 - RNA, 23 nt, Artificial Sequence
  Synthetic
ugcaaacauugaaaaguuucuuc

SEQ ID NO: 557316 - RNA, 24 nt, Artificial Sequence
  Synthetic
augcaaacauugaaaaguuucuuc

SEQ ID NO: 557317 - RNA, 18 nt, Artificial Sequence
  Synthetic
caccaucaucguuucuuc

SEQ ID NO: 557318 - RNA, 19 nt, Artificial Sequence
  Synthetic
ucaccaucaucguuucuuc

SEQ ID NO: 557319 - RNA, 20 nt, Artificial Sequence
  Synthetic
aucaccaucaucguuucuuc

SEQ ID NO: 557320 - RNA, 21 nt, Artificial Sequence
  Synthetic
caucaccaucaucguuucuuc

SEQ ID NO: 557321 - RNA, 22 nt, Artificial Sequence
  Synthetic
ucaucaccaucaucguuucuuc

SEQ ID NO: 557322 - RNA, 23 nt, Artificial Sequence
  Synthetic
gucaucaccaucaucguuucuuc

SEQ ID NO: 557323 - RNA, 24 nt, Artificial Sequence
  Synthetic
agucaucaccaucaucguuucuuc

SEQ ID NO: 557324 - RNA, 18 nt, Artificial Sequence
  Synthetic
gcacuuuuaauuuucuuc

SEQ ID NO: 557325 - RNA, 19 nt, Artificial Sequence
  Synthetic
agcacuuuuaauuuucuuc

SEQ ID NO: 557326 - RNA, 20 nt, Artificial Sequence
  Synthetic
uagcacuuuuaauuuucuuc

SEQ ID NO: 557327 - RNA, 21 nt, Artificial Sequence
  Synthetic
guagcacuuuuaauuuucuuc

SEQ ID NO: 557328 - RNA, 22 nt, Artificial Sequence
  Synthetic
aguagcacuuuuaauuuucuuc

SEQ ID NO: 557329 - RNA, 23 nt, Artificial Sequence
  Synthetic
gaguagcacuuuuaauuuucuuc

SEQ ID NO: 557330 - RNA, 24 nt, Artificial Sequence
  Synthetic
agaguagcacuuuuaauuuucuuc

SEQ ID NO: 557331 - RNA, 18 nt, Artificial Sequence
  Synthetic
ucuucauaaaaaaaguuc

SEQ ID NO: 557332 - RNA, 19 nt, Artificial Sequence
  Synthetic
cucuucauaaaaaaaguuc

SEQ ID NO: 557333 - RNA, 20 nt, Artificial Sequence
  Synthetic
gcucuucauaaaaaaaguuc

SEQ ID NO: 557334 - RNA, 21 nt, Artificial Sequence
  Synthetic
ggcucuucauaaaaaaaguuc

SEQ ID NO: 557335 - RNA, 22 nt, Artificial Sequence
  Synthetic
aggcucuucauaaaaaaaguuc

SEQ ID NO: 557336 - RNA, 23 nt, Artificial Sequence
  Synthetic
uaggcucuucauaaaaaaaguuc

SEQ ID NO: 557337 - RNA, 24 nt, Artificial Sequence
  Synthetic
guaggcucuucauaaaaaaaguuc

SEQ ID NO: 557338 - RNA, 18 nt, Artificial Sequence
  Synthetic
aggucuuugucaaaguuc

SEQ ID NO: 557339 - RNA, 19 nt, Artificial Sequence
  Synthetic
aaggucuuugucaaaguuc

SEQ ID NO: 557340 - RNA, 20 nt, Artificial Sequence
  Synthetic
aaaggucuuugucaaaguuc

SEQ ID NO: 557341 - RNA, 21 nt, Artificial Sequence
  Synthetic
aaaaggucuuugucaaaguuc

SEQ ID NO: 557342 - RNA, 22 nt, Artificial Sequence
  Synthetic
uaaaaggucuuugucaaaguuc

SEQ ID NO: 557343 - RNA, 23 nt, Artificial Sequence
  Synthetic
guaaaaggucuuugucaaaguuc

SEQ ID NO: 557344 - RNA, 24 nt, Artificial Sequence
  Synthetic
uguaaaaggucuuugucaaaguuc

SEQ ID NO: 557345 - RNA, 18 nt, Artificial Sequence
  Synthetic
cccaggcacauaaaguuc

SEQ ID NO: 557346 - RNA, 19 nt, Artificial Sequence
  Synthetic
ucccaggcacauaaaguuc

SEQ ID NO: 557347 - RNA, 20 nt, Artificial Sequence
  Synthetic
uucccaggcacauaaaguuc

SEQ ID NO: 557348 - RNA, 21 nt, Artificial Sequence
  Synthetic
uuucccaggcacauaaaguuc

SEQ ID NO: 557349 - RNA, 22 nt, Artificial Sequence
  Synthetic
cuuucccaggcacauaaaguuc

SEQ ID NO: 557350 - RNA, 23 nt, Artificial Sequence
  Synthetic
acuuucccaggcacauaaaguuc

SEQ ID NO: 557351 - RNA, 24 nt, Artificial Sequence
  Synthetic
uacuuucccaggcacauaaaguuc

SEQ ID NO: 557352 - RNA, 18 nt, Artificial Sequence
  Synthetic
aaguaaguuaccaaguuc

SEQ ID NO: 557353 - RNA, 19 nt, Artificial Sequence
  Synthetic
gaaguaaguuaccaaguuc

SEQ ID NO: 557354 - RNA, 20 nt, Artificial Sequence
  Synthetic
ggaaguaaguuaccaaguuc

SEQ ID NO: 557355 - RNA, 21 nt, Artificial Sequence
  Synthetic
uggaaguaaguuaccaaguuc

SEQ ID NO: 557356 - RNA, 22 nt, Artificial Sequence
  Synthetic
cuggaaguaaguuaccaaguuc

SEQ ID NO: 557357 - RNA, 23 nt, Artificial Sequence
  Synthetic
ucuggaaguaaguuaccaaguuc

SEQ ID NO: 557358 - RNA, 24 nt, Artificial Sequence
  Synthetic
aucuggaaguaaguuaccaaguuc

SEQ ID NO: 557359 - RNA, 18 nt, Artificial Sequence
  Synthetic
guaaucccaaagaaguuc

SEQ ID NO: 557360 - RNA, 19 nt, Artificial Sequence
  Synthetic
aguaaucccaaagaaguuc

SEQ ID NO: 557361 - RNA, 20 nt, Artificial Sequence
  Synthetic
gaguaaucccaaagaaguuc

SEQ ID NO: 557362 - RNA, 21 nt, Artificial Sequence
  Synthetic
agaguaaucccaaagaaguuc

SEQ ID NO: 557363 - RNA, 22 nt, Artificial Sequence
  Synthetic
cagaguaaucccaaagaaguuc

SEQ ID NO: 557364 - RNA, 23 nt, Artificial Sequence
  Synthetic
acagaguaaucccaaagaaguuc

SEQ ID NO: 557365 - RNA, 24 nt, Artificial Sequence
  Synthetic
cacagaguaaucccaaagaaguuc

SEQ ID NO: 557366 - RNA, 18 nt, Artificial Sequence
  Synthetic
cccaugggucagaaguuc

SEQ ID NO: 557367 - RNA, 19 nt, Artificial Sequence
  Synthetic
gcccaugggucagaaguuc

SEQ ID NO: 557368 - RNA, 20 nt, Artificial Sequence
  Synthetic
agcccaugggucagaaguuc

SEQ ID NO: 557369 - RNA, 21 nt, Artificial Sequence
  Synthetic
aagcccaugggucagaaguuc

SEQ ID NO: 557370 - RNA, 22 nt, Artificial Sequence
  Synthetic
gaagcccaugggucagaaguuc

SEQ ID NO: 557371 - RNA, 23 nt, Artificial Sequence
  Synthetic
ugaagcccaugggucagaaguuc

SEQ ID NO: 557372 - RNA, 24 nt, Artificial Sequence
  Synthetic
uugaagcccaugggucagaaguuc

SEQ ID NO: 557373 - RNA, 18 nt, Artificial Sequence
  Synthetic
augaagaaacugaaguuc

SEQ ID NO: 557374 - RNA, 19 nt, Artificial Sequence
  Synthetic
aaugaagaaacugaaguuc

SEQ ID NO: 557375 - RNA, 20 nt, Artificial Sequence
  Synthetic
caaugaagaaacugaaguuc

SEQ ID NO: 557376 - RNA, 21 nt, Artificial Sequence
  Synthetic
ucaaugaagaaacugaaguuc

SEQ ID NO: 557377 - RNA, 22 nt, Artificial Sequence
  Synthetic
uucaaugaagaaacugaaguuc

SEQ ID NO: 557378 - RNA, 23 nt, Artificial Sequence
  Synthetic
uuucaaugaagaaacugaaguuc

SEQ ID NO: 557379 - RNA, 24 nt, Artificial Sequence
  Synthetic
cuuucaaugaagaaacugaaguuc

SEQ ID NO: 557380 - RNA, 18 nt, Artificial Sequence
  Synthetic
agcauuuugguuaaguuc

SEQ ID NO: 557381 - RNA, 19 nt, Artificial Sequence
  Synthetic
aagcauuuugguuaaguuc

SEQ ID NO: 557382 - RNA, 20 nt, Artificial Sequence
  Synthetic
caagcauuuugguuaaguuc

SEQ ID NO: 557383 - RNA, 21 nt, Artificial Sequence
  Synthetic
ccaagcauuuugguuaaguuc

SEQ ID NO: 557384 - RNA, 22 nt, Artificial Sequence
  Synthetic
gccaagcauuuugguuaaguuc

SEQ ID NO: 557385 - RNA, 23 nt, Artificial Sequence
  Synthetic
agccaagcauuuugguuaaguuc

SEQ ID NO: 557386 - RNA, 24 nt, Artificial Sequence
  Synthetic
cagccaagcauuuugguuaaguuc

SEQ ID NO: 557387 - RNA, 18 nt, Artificial Sequence
  Synthetic
uuauuauacuuuaaguuc

SEQ ID NO: 557388 - RNA, 19 nt, Artificial Sequence
  Synthetic
uuuauuauacuuuaaguuc

SEQ ID NO: 557389 - RNA, 20 nt, Artificial Sequence
  Synthetic
uuuuauuauacuuuaaguuc

SEQ ID NO: 557390 - RNA, 21 nt, Artificial Sequence
  Synthetic
uuuuuauuauacuuuaaguuc

SEQ ID NO: 557391 - RNA, 22 nt, Artificial Sequence
  Synthetic
uuuuuuauuauacuuuaaguuc

SEQ ID NO: 557392 - RNA, 23 nt, Artificial Sequence
  Synthetic
uuuuuuuauuauacuuuaaguuc

SEQ ID NO: 557393 - RNA, 24 nt, Artificial Sequence
  Synthetic
uuuuuuuuauuauacuuuaaguuc

SEQ ID NO: 557394 - RNA, 18 nt, Artificial Sequence
  Synthetic
uuuuuaaauuuuaaguuc

SEQ ID NO: 557395 - RNA, 19 nt, Artificial Sequence
  Synthetic
uuuuuuaaauuuuaaguuc

SEQ ID NO: 557396 - RNA, 20 nt, Artificial Sequence
  Synthetic
guuuuuuaaauuuuaaguuc

SEQ ID NO: 557397 - RNA, 21 nt, Artificial Sequence
  Synthetic
aguuuuuuaaauuuuaaguuc

SEQ ID NO: 557398 - RNA, 22 nt, Artificial Sequence
  Synthetic
aaguuuuuuaaauuuuaaguuc

SEQ ID NO: 557399 - RNA, 23 nt, Artificial Sequence
  Synthetic
aaaguuuuuuaaauuuuaaguuc

SEQ ID NO: 557400 - RNA, 24 nt, Artificial Sequence
  Synthetic
uaaaguuuuuuaaauuuuaaguuc

SEQ ID NO: 557401 - RNA, 18 nt, Artificial Sequence
  Synthetic
auaugcauuuuuaaguuc

SEQ ID NO: 557402 - RNA, 19 nt, Artificial Sequence
  Synthetic
aauaugcauuuuuaaguuc

SEQ ID NO: 557403 - RNA, 20 nt, Artificial Sequence
  Synthetic
caauaugcauuuuuaaguuc

SEQ ID NO: 557404 - RNA, 21 nt, Artificial Sequence
  Synthetic
gcaauaugcauuuuuaaguuc

SEQ ID NO: 557405 - RNA, 22 nt, Artificial Sequence
  Synthetic
ggcaauaugcauuuuuaaguuc

SEQ ID NO: 557406 - RNA, 23 nt, Artificial Sequence
  Synthetic
aggcaauaugcauuuuuaaguuc

SEQ ID NO: 557407 - RNA, 24 nt, Artificial Sequence
  Synthetic
gaggcaauaugcauuuuuaaguuc

SEQ ID NO: 557408 - RNA, 18 nt, Artificial Sequence
  Synthetic
aaaugauaacaacaguuc

SEQ ID NO: 557409 - RNA, 19 nt, Artificial Sequence
  Synthetic
caaaugauaacaacaguuc

SEQ ID NO: 557410 - RNA, 20 nt, Artificial Sequence
  Synthetic
acaaaugauaacaacaguuc

SEQ ID NO: 557411 - RNA, 21 nt, Artificial Sequence
  Synthetic
uacaaaugauaacaacaguuc

SEQ ID NO: 557412 - RNA, 22 nt, Artificial Sequence
  Synthetic
auacaaaugauaacaacaguuc

SEQ ID NO: 557413 - RNA, 23 nt, Artificial Sequence
  Synthetic
aauacaaaugauaacaacaguuc

SEQ ID NO: 557414 - RNA, 24 nt, Artificial Sequence
  Synthetic
caauacaaaugauaacaacaguuc

SEQ ID NO: 557415 - RNA, 18 nt, Artificial Sequence
  Synthetic
uguauucacucacaguuc

SEQ ID NO: 557416 - RNA, 19 nt, Artificial Sequence
  Synthetic
auguauucacucacaguuc

SEQ ID NO: 557417 - RNA, 20 nt, Artificial Sequence
  Synthetic
aauguauucacucacaguuc

SEQ ID NO: 557418 - RNA, 21 nt, Artificial Sequence
  Synthetic
caauguauucacucacaguuc

SEQ ID NO: 557419 - RNA, 22 nt, Artificial Sequence
  Synthetic
ccaauguauucacucacaguuc

SEQ ID NO: 557420 - RNA, 23 nt, Artificial Sequence
  Synthetic
accaauguauucacucacaguuc

SEQ ID NO: 557421 - RNA, 24 nt, Artificial Sequence
  Synthetic
uaccaauguauucacucacaguuc

SEQ ID NO: 557422 - RNA, 18 nt, Artificial Sequence
  Synthetic
uggcagaaaguacaguuc

SEQ ID NO: 557423 - RNA, 19 nt, Artificial Sequence
  Synthetic
guggcagaaaguacaguuc

SEQ ID NO: 557424 - RNA, 20 nt, Artificial Sequence
  Synthetic
gguggcagaaaguacaguuc

SEQ ID NO: 557425 - RNA, 21 nt, Artificial Sequence
  Synthetic
agguggcagaaaguacaguuc

SEQ ID NO: 557426 - RNA, 22 nt, Artificial Sequence
  Synthetic
uagguggcagaaaguacaguuc

SEQ ID NO: 557427 - RNA, 23 nt, Artificial Sequence
  Synthetic
uuagguggcagaaaguacaguuc

SEQ ID NO: 557428 - RNA, 24 nt, Artificial Sequence
  Synthetic
guuagguggcagaaaguacaguuc

SEQ ID NO: 557429 - RNA, 18 nt, Artificial Sequence
  Synthetic
ccaacagcugcccaguuc

SEQ ID NO: 557430 - RNA, 19 nt, Artificial Sequence
  Synthetic
uccaacagcugcccaguuc

SEQ ID NO: 557431 - RNA, 20 nt, Artificial Sequence
  Synthetic
uuccaacagcugcccaguuc

SEQ ID NO: 557432 - RNA, 21 nt, Artificial Sequence
  Synthetic
guuccaacagcugcccaguuc

SEQ ID NO: 557433 - RNA, 22 nt, Artificial Sequence
  Synthetic
gguuccaacagcugcccaguuc

SEQ ID NO: 557434 - RNA, 23 nt, Artificial Sequence
  Synthetic
ugguuccaacagcugcccaguuc

SEQ ID NO: 557435 - RNA, 24 nt, Artificial Sequence
  Synthetic
uugguuccaacagcugcccaguuc

SEQ ID NO: 557436 - RNA, 18 nt, Artificial Sequence
  Synthetic
agccacguauuccaguuc

SEQ ID NO: 557437 - RNA, 19 nt, Artificial Sequence
  Synthetic
aagccacguauuccaguuc

SEQ ID NO: 557438 - RNA, 20 nt, Artificial Sequence
  Synthetic
caagccacguauuccaguuc

SEQ ID NO: 557439 - RNA, 21 nt, Artificial Sequence
  Synthetic
ccaagccacguauuccaguuc

SEQ ID NO: 557440 - RNA, 22 nt, Artificial Sequence
  Synthetic
uccaagccacguauuccaguuc

SEQ ID NO: 557441 - RNA, 23 nt, Artificial Sequence
  Synthetic
uuccaagccacguauuccaguuc

SEQ ID NO: 557442 - RNA, 24 nt, Artificial Sequence
  Synthetic
uuuccaagccacguauuccaguuc

SEQ ID NO: 557443 - RNA, 18 nt, Artificial Sequence
  Synthetic
caagagaaguugcaguuc

SEQ ID NO: 557444 - RNA, 19 nt, Artificial Sequence
  Synthetic
ccaagagaaguugcaguuc

SEQ ID NO: 557445 - RNA, 20 nt, Artificial Sequence
  Synthetic
accaagagaaguugcaguuc

SEQ ID NO: 557446 - RNA, 21 nt, Artificial Sequence
  Synthetic
aaccaagagaaguugcaguuc

SEQ ID NO: 557447 - RNA, 22 nt, Artificial Sequence
  Synthetic
aaaccaagagaaguugcaguuc

SEQ ID NO: 557448 - RNA, 23 nt, Artificial Sequence
  Synthetic
uaaaccaagagaaguugcaguuc

SEQ ID NO: 557449 - RNA, 24 nt, Artificial Sequence
  Synthetic
uuaaaccaagagaaguugcaguuc

SEQ ID NO: 557450 - RNA, 18 nt, Artificial Sequence
  Synthetic
uagaagucuaaucaguuc

SEQ ID NO: 557451 - RNA, 19 nt, Artificial Sequence
  Synthetic
cuagaagucuaaucaguuc

SEQ ID NO: 557452 - RNA, 20 nt, Artificial Sequence
  Synthetic
gcuagaagucuaaucaguuc

SEQ ID NO: 557453 - RNA, 21 nt, Artificial Sequence
  Synthetic
agcuagaagucuaaucaguuc

SEQ ID NO: 557454 - RNA, 22 nt, Artificial Sequence
  Synthetic
aagcuagaagucuaaucaguuc

SEQ ID NO: 557455 - RNA, 23 nt, Artificial Sequence
  Synthetic
gaagcuagaagucuaaucaguuc

SEQ ID NO: 557456 - RNA, 24 nt, Artificial Sequence
  Synthetic
agaagcuagaagucuaaucaguuc

SEQ ID NO: 557457 - RNA, 18 nt, Artificial Sequence
  Synthetic
gggagaaacccucaguuc

SEQ ID NO: 557458 - RNA, 19 nt, Artificial Sequence
  Synthetic
ugggagaaacccucaguuc

SEQ ID NO: 557459 - RNA, 20 nt, Artificial Sequence
  Synthetic
augggagaaacccucaguuc

SEQ ID NO: 557460 - RNA, 21 nt, Artificial Sequence
  Synthetic
aaugggagaaacccucaguuc

SEQ ID NO: 557461 - RNA, 22 nt, Artificial Sequence
  Synthetic
aaaugggagaaacccucaguuc

SEQ ID NO: 557462 - RNA, 23 nt, Artificial Sequence
  Synthetic
aaaaugggagaaacccucaguuc

SEQ ID NO: 557463 - RNA, 24 nt, Artificial Sequence
  Synthetic
uaaaaugggagaaacccucaguuc

SEQ ID NO: 557464 - RNA, 18 nt, Artificial Sequence
  Synthetic
ggaauccauccucaguuc

SEQ ID NO: 557465 - RNA, 19 nt, Artificial Sequence
  Synthetic
cggaauccauccucaguuc

SEQ ID NO: 557466 - RNA, 20 nt, Artificial Sequence
  Synthetic
acggaauccauccucaguuc

SEQ ID NO: 557467 - RNA, 21 nt, Artificial Sequence
  Synthetic
uacggaauccauccucaguuc

SEQ ID NO: 557468 - RNA, 22 nt, Artificial Sequence
  Synthetic
cuacggaauccauccucaguuc

SEQ ID NO: 557469 - RNA, 23 nt, Artificial Sequence
  Synthetic
ucuacggaauccauccucaguuc

SEQ ID NO: 557470 - RNA, 24 nt, Artificial Sequence
  Synthetic
uucuacggaauccauccucaguuc

SEQ ID NO: 557471 - RNA, 18 nt, Artificial Sequence
  Synthetic
gaaagccacugucaguuc

SEQ ID NO: 557472 - RNA, 19 nt, Artificial Sequence
  Synthetic
ugaaagccacugucaguuc

SEQ ID NO: 557473 - RNA, 20 nt, Artificial Sequence
  Synthetic
augaaagccacugucaguuc

SEQ ID NO: 557474 - RNA, 21 nt, Artificial Sequence
  Synthetic
aaugaaagccacugucaguuc

SEQ ID NO: 557475 - RNA, 22 nt, Artificial Sequence
  Synthetic
gaaugaaagccacugucaguuc

SEQ ID NO: 557476 - RNA, 23 nt, Artificial Sequence
  Synthetic
ugaaugaaagccacugucaguuc

SEQ ID NO: 557477 - RNA, 24 nt, Artificial Sequence
  Synthetic
augaaugaaagccacugucaguuc

SEQ ID NO: 557478 - RNA, 18 nt, Artificial Sequence
  Synthetic
gcuugaggccaagaguuc

SEQ ID NO: 557479 - RNA, 19 nt, Artificial Sequence
  Synthetic
ugcuugaggccaagaguuc

SEQ ID NO: 557480 - RNA, 20 nt, Artificial Sequence
  Synthetic
uugcuugaggccaagaguuc

SEQ ID NO: 557481 - RNA, 21 nt, Artificial Sequence
  Synthetic
auugcuugaggccaagaguuc

SEQ ID NO: 557482 - RNA, 22 nt, Artificial Sequence
  Synthetic
aauugcuugaggccaagaguuc

SEQ ID NO: 557483 - RNA, 23 nt, Artificial Sequence
  Synthetic
gaauugcuugaggccaagaguuc

SEQ ID NO: 557484 - RNA, 24 nt, Artificial Sequence
  Synthetic
agaauugcuugaggccaagaguuc

SEQ ID NO: 557485 - RNA, 18 nt, Artificial Sequence
  Synthetic
gcaagaugagaagaguuc

SEQ ID NO: 557486 - RNA, 19 nt, Artificial Sequence
  Synthetic
ugcaagaugagaagaguuc

SEQ ID NO: 557487 - RNA, 20 nt, Artificial Sequence
  Synthetic
uugcaagaugagaagaguuc

SEQ ID NO: 557488 - RNA, 21 nt, Artificial Sequence
  Synthetic
uuugcaagaugagaagaguuc

SEQ ID NO: 557489 - RNA, 22 nt, Artificial Sequence
  Synthetic
uuuugcaagaugagaagaguuc

SEQ ID NO: 557490 - RNA, 23 nt, Artificial Sequence
  Synthetic
guuuugcaagaugagaagaguuc

SEQ ID NO: 557491 - RNA, 24 nt, Artificial Sequence
  Synthetic
aguuuugcaagaugagaagaguuc

SEQ ID NO: 557492 - RNA, 18 nt, Artificial Sequence
  Synthetic
gcuugagccccggaguuc

SEQ ID NO: 557493 - RNA, 19 nt, Artificial Sequence
  Synthetic
ugcuugagccccggaguuc

SEQ ID NO: 557494 - RNA, 20 nt, Artificial Sequence
  Synthetic
cugcuugagccccggaguuc

SEQ ID NO: 557495 - RNA, 21 nt, Artificial Sequence
  Synthetic
acugcuugagccccggaguuc

SEQ ID NO: 557496 - RNA, 22 nt, Artificial Sequence
  Synthetic
gacugcuugagccccggaguuc

SEQ ID NO: 557497 - RNA, 23 nt, Artificial Sequence
  Synthetic
ggacugcuugagccccggaguuc

SEQ ID NO: 557498 - RNA, 24 nt, Artificial Sequence
  Synthetic
uggacugcuugagccccggaguuc

SEQ ID NO: 557499 - RNA, 18 nt, Artificial Sequence
  Synthetic
gaagaagcugaugaguuc

SEQ ID NO: 557500 - RNA, 19 nt, Artificial Sequence
  Synthetic
ugaagaagcugaugaguuc

SEQ ID NO: 557501 - RNA, 20 nt, Artificial Sequence
  Synthetic
gugaagaagcugaugaguuc

SEQ ID NO: 557502 - RNA, 21 nt, Artificial Sequence
  Synthetic
ugugaagaagcugaugaguuc

SEQ ID NO: 557503 - RNA, 22 nt, Artificial Sequence
  Synthetic
cugugaagaagcugaugaguuc

SEQ ID NO: 557504 - RNA, 23 nt, Artificial Sequence
  Synthetic
ucugugaagaagcugaugaguuc

SEQ ID NO: 557505 - RNA, 24 nt, Artificial Sequence
  Synthetic
cucugugaagaagcugaugaguuc

SEQ ID NO: 557506 - RNA, 18 nt, Artificial Sequence
  Synthetic
uuaaauugguaugaguuc

SEQ ID NO: 557507 - RNA, 19 nt, Artificial Sequence
  Synthetic
uuuaaauugguaugaguuc

SEQ ID NO: 557508 - RNA, 20 nt, Artificial Sequence
  Synthetic
guuuaaauugguaugaguuc

SEQ ID NO: 557509 - RNA, 21 nt, Artificial Sequence
  Synthetic
aguuuaaauugguaugaguuc

SEQ ID NO: 557510 - RNA, 22 nt, Artificial Sequence
  Synthetic
aaguuuaaauugguaugaguuc

SEQ ID NO: 557511 - RNA, 23 nt, Artificial Sequence
  Synthetic
gaaguuuaaauugguaugaguuc

SEQ ID NO: 557512 - RNA, 24 nt, Artificial Sequence
  Synthetic
ggaaguuuaaauugguaugaguuc

SEQ ID NO: 557513 - RNA, 18 nt, Artificial Sequence
  Synthetic
cuuuuucuaacugaguuc

SEQ ID NO: 557514 - RNA, 19 nt, Artificial Sequence
  Synthetic
ucuuuuucuaacugaguuc

SEQ ID NO: 557515 - RNA, 20 nt, Artificial Sequence
  Synthetic
cucuuuuucuaacugaguuc

SEQ ID NO: 557516 - RNA, 21 nt, Artificial Sequence
  Synthetic
ucucuuuuucuaacugaguuc

SEQ ID NO: 557517 - RNA, 22 nt, Artificial Sequence
  Synthetic
uucucuuuuucuaacugaguuc

SEQ ID NO: 557518 - RNA, 23 nt, Artificial Sequence
  Synthetic
uuucucuuuuucuaacugaguuc

SEQ ID NO: 557519 - RNA, 24 nt, Artificial Sequence
  Synthetic
uuuucucuuuuucuaacugaguuc

SEQ ID NO: 557520 - RNA, 18 nt, Artificial Sequence
  Synthetic
ugcauuuugccugaguuc

SEQ ID NO: 557521 - RNA, 19 nt, Artificial Sequence
  Synthetic
gugcauuuugccugaguuc

SEQ ID NO: 557522 - RNA, 20 nt, Artificial Sequence
  Synthetic
agugcauuuugccugaguuc

SEQ ID NO: 557523 - RNA, 21 nt, Artificial Sequence
  Synthetic
gagugcauuuugccugaguuc

SEQ ID NO: 557524 - RNA, 22 nt, Artificial Sequence
  Synthetic
agagugcauuuugccugaguuc

SEQ ID NO: 557525 - RNA, 23 nt, Artificial Sequence
  Synthetic
cagagugcauuuugccugaguuc

SEQ ID NO: 557526 - RNA, 24 nt, Artificial Sequence
  Synthetic
ucagagugcauuuugccugaguuc

SEQ ID NO: 557527 - RNA, 18 nt, Artificial Sequence
  Synthetic
augauagcagcugaguuc

SEQ ID NO: 557528 - RNA, 19 nt, Artificial Sequence
  Synthetic
caugauagcagcugaguuc

SEQ ID NO: 557529 - RNA, 20 nt, Artificial Sequence
  Synthetic
ucaugauagcagcugaguuc

SEQ ID NO: 557530 - RNA, 21 nt, Artificial Sequence
  Synthetic
cucaugauagcagcugaguuc

SEQ ID NO: 557531 - RNA, 22 nt, Artificial Sequence
  Synthetic
ccucaugauagcagcugaguuc

SEQ ID NO: 557532 - RNA, 23 nt, Artificial Sequence
  Synthetic
uccucaugauagcagcugaguuc

SEQ ID NO: 557533 - RNA, 24 nt, Artificial Sequence
  Synthetic
guccucaugauagcagcugaguuc

SEQ ID NO: 557534 - RNA, 18 nt, Artificial Sequence
  Synthetic
acauggauggaauaguuc

SEQ ID NO: 557535 - RNA, 19 nt, Artificial Sequence
  Synthetic
gacauggauggaauaguuc

SEQ ID NO: 557536 - RNA, 20 nt, Artificial Sequence
  Synthetic
ugacauggauggaauaguuc

SEQ ID NO: 557537 - RNA, 21 nt, Artificial Sequence
  Synthetic
cugacauggauggaauaguuc

SEQ ID NO: 557538 - RNA, 22 nt, Artificial Sequence
  Synthetic
acugacauggauggaauaguuc

SEQ ID NO: 557539 - RNA, 23 nt, Artificial Sequence
  Synthetic
cacugacauggauggaauaguuc

SEQ ID NO: 557540 - RNA, 24 nt, Artificial Sequence
  Synthetic
acacugacauggauggaauaguuc

SEQ ID NO: 557541 - RNA, 18 nt, Artificial Sequence
  Synthetic
aaaacuccauaauaguuc

SEQ ID NO: 557542 - RNA, 19 nt, Artificial Sequence
  Synthetic
caaaacuccauaauaguuc

SEQ ID NO: 557543 - RNA, 20 nt, Artificial Sequence
  Synthetic
acaaaacuccauaauaguuc

SEQ ID NO: 557544 - RNA, 21 nt, Artificial Sequence
  Synthetic
aacaaaacuccauaauaguuc

SEQ ID NO: 557545 - RNA, 22 nt, Artificial Sequence
  Synthetic
uaacaaaacuccauaauaguuc

SEQ ID NO: 557546 - RNA, 23 nt, Artificial Sequence
  Synthetic
auaacaaaacuccauaauaguuc

SEQ ID NO: 557547 - RNA, 24 nt, Artificial Sequence
  Synthetic
cauaacaaaacuccauaauaguuc

SEQ ID NO: 557548 - RNA, 18 nt, Artificial Sequence
  Synthetic
auaugagaaacauaguuc

SEQ ID NO: 557549 - RNA, 19 nt, Artificial Sequence
  Synthetic
aauaugagaaacauaguuc

SEQ ID NO: 557550 - RNA, 20 nt, Artificial Sequence
  Synthetic
uaauaugagaaacauaguuc

SEQ ID NO: 557551 - RNA, 21 nt, Artificial Sequence
  Synthetic
cuaauaugagaaacauaguuc

SEQ ID NO: 557552 - RNA, 22 nt, Artificial Sequence
  Synthetic
ucuaauaugagaaacauaguuc

SEQ ID NO: 557553 - RNA, 23 nt, Artificial Sequence
  Synthetic
cucuaauaugagaaacauaguuc

SEQ ID NO: 557554 - RNA, 24 nt, Artificial Sequence
  Synthetic
gcucuaauaugagaaacauaguuc

SEQ ID NO: 557555 - RNA, 18 nt, Artificial Sequence
  Synthetic
acaacuuauacauaguuc

SEQ ID NO: 557556 - RNA, 19 nt, Artificial Sequence
  Synthetic
aacaacuuauacauaguuc

SEQ ID NO: 557557 - RNA, 20 nt, Artificial Sequence
  Synthetic
gaacaacuuauacauaguuc

SEQ ID NO: 557558 - RNA, 21 nt, Artificial Sequence
  Synthetic
agaacaacuuauacauaguuc

SEQ ID NO: 557559 - RNA, 22 nt, Artificial Sequence
  Synthetic
uagaacaacuuauacauaguuc

SEQ ID NO: 557560 - RNA, 23 nt, Artificial Sequence
  Synthetic
uuagaacaacuuauacauaguuc

SEQ ID NO: 557561 - RNA, 24 nt, Artificial Sequence
  Synthetic
uuuagaacaacuuauacauaguuc

SEQ ID NO: 557562 - RNA, 18 nt, Artificial Sequence
  Synthetic
aauuaaaagugauaguuc

SEQ ID NO: 557563 - RNA, 19 nt, Artificial Sequence
  Synthetic
caauuaaaagugauaguuc

SEQ ID NO: 557564 - RNA, 20 nt, Artificial Sequence
  Synthetic
acaauuaaaagugauaguuc

SEQ ID NO: 557565 - RNA, 21 nt, Artificial Sequence
  Synthetic
aacaauuaaaagugauaguuc

SEQ ID NO: 557566 - RNA, 22 nt, Artificial Sequence
  Synthetic
aaacaauuaaaagugauaguuc

SEQ ID NO: 557567 - RNA, 23 nt, Artificial Sequence
  Synthetic
uaaacaauuaaaagugauaguuc

SEQ ID NO: 557568 - RNA, 24 nt, Artificial Sequence
  Synthetic
uuaaacaauuaaaagugauaguuc

SEQ ID NO: 557569 - RNA, 18 nt, Artificial Sequence
  Synthetic
uuucggcauauauaguuc

SEQ ID NO: 557570 - RNA, 19 nt, Artificial Sequence
  Synthetic
auuucggcauauauaguuc

SEQ ID NO: 557571 - RNA, 20 nt, Artificial Sequence
  Synthetic
uauuucggcauauauaguuc

SEQ ID NO: 557572 - RNA, 21 nt, Artificial Sequence
  Synthetic
uuauuucggcauauauaguuc

SEQ ID NO: 557573 - RNA, 22 nt, Artificial Sequence
  Synthetic
uuuauuucggcauauauaguuc

SEQ ID NO: 557574 - RNA, 23 nt, Artificial Sequence
  Synthetic
auuuauuucggcauauauaguuc

SEQ ID NO: 557575 - RNA, 24 nt, Artificial Sequence
  Synthetic
cauuuauuucggcauauauaguuc

SEQ ID NO: 557576 - RNA, 18 nt, Artificial Sequence
  Synthetic
ugauuuggacuauaguuc

SEQ ID NO: 557577 - RNA, 19 nt, Artificial Sequence
  Synthetic
augauuuggacuauaguuc

SEQ ID NO: 557578 - RNA, 20 nt, Artificial Sequence
  Synthetic
uaugauuuggacuauaguuc

SEQ ID NO: 557579 - RNA, 21 nt, Artificial Sequence
  Synthetic
guaugauuuggacuauaguuc

SEQ ID NO: 557580 - RNA, 22 nt, Artificial Sequence
  Synthetic
gguaugauuuggacuauaguuc

SEQ ID NO: 557581 - RNA, 23 nt, Artificial Sequence
  Synthetic
ggguaugauuuggacuauaguuc

SEQ ID NO: 557582 - RNA, 24 nt, Artificial Sequence
  Synthetic
aggguaugauuuggacuauaguuc

SEQ ID NO: 557583 - RNA, 18 nt, Artificial Sequence
  Synthetic
cuuugcacuguauaguuc

SEQ ID NO: 557584 - RNA, 19 nt, Artificial Sequence
  Synthetic
ucuuugcacuguauaguuc

SEQ ID NO: 557585 - RNA, 20 nt, Artificial Sequence
  Synthetic
uucuuugcacuguauaguuc

SEQ ID NO: 557586 - RNA, 21 nt, Artificial Sequence
  Synthetic
uuucuuugcacuguauaguuc

SEQ ID NO: 557587 - RNA, 22 nt, Artificial Sequence
  Synthetic
cuuucuuugcacuguauaguuc

SEQ ID NO: 557588 - RNA, 23 nt, Artificial Sequence
  Synthetic
ucuuucuuugcacuguauaguuc

SEQ ID NO: 557589 - RNA, 24 nt, Artificial Sequence
  Synthetic
aucuuucuuugcacuguauaguuc

SEQ ID NO: 557590 - RNA, 18 nt, Artificial Sequence
  Synthetic
auuuauugcuuauaguuc

SEQ ID NO: 557591 - RNA, 19 nt, Artificial Sequence
  Synthetic
aauuuauugcuuauaguuc

SEQ ID NO: 557592 - RNA, 20 nt, Artificial Sequence
  Synthetic
gaauuuauugcuuauaguuc

SEQ ID NO: 557593 - RNA, 21 nt, Artificial Sequence
  Synthetic
agaauuuauugcuuauaguuc

SEQ ID NO: 557594 - RNA, 22 nt, Artificial Sequence
  Synthetic
cagaauuuauugcuuauaguuc

SEQ ID NO: 557595 - RNA, 23 nt, Artificial Sequence
  Synthetic
acagaauuuauugcuuauaguuc

SEQ ID NO: 557596 - RNA, 24 nt, Artificial Sequence
  Synthetic
aacagaauuuauugcuuauaguuc

SEQ ID NO: 557597 - RNA, 18 nt, Artificial Sequence
  Synthetic
ggucaugcugccuaguuc

SEQ ID NO: 557598 - RNA, 19 nt, Artificial Sequence
  Synthetic
uggucaugcugccuaguuc

SEQ ID NO: 557599 - RNA, 20 nt, Artificial Sequence
  Synthetic
cuggucaugcugccuaguuc

SEQ ID NO: 557600 - RNA, 21 nt, Artificial Sequence
  Synthetic
ucuggucaugcugccuaguuc

SEQ ID NO: 557601 - RNA, 22 nt, Artificial Sequence
  Synthetic
cucuggucaugcugccuaguuc

SEQ ID NO: 557602 - RNA, 23 nt, Artificial Sequence
  Synthetic
ucucuggucaugcugccuaguuc

SEQ ID NO: 557603 - RNA, 24 nt, Artificial Sequence
  Synthetic
aucucuggucaugcugccuaguuc

SEQ ID NO: 557604 - RNA, 18 nt, Artificial Sequence
  Synthetic
acaguccuuaaguaguuc

SEQ ID NO: 557605 - RNA, 19 nt, Artificial Sequence
  Synthetic
aacaguccuuaaguaguuc

SEQ ID NO: 557606 - RNA, 20 nt, Artificial Sequence
  Synthetic
aaacaguccuuaaguaguuc

SEQ ID NO: 557607 - RNA, 21 nt, Artificial Sequence
  Synthetic
aaaacaguccuuaaguaguuc

SEQ ID NO: 557608 - RNA, 22 nt, Artificial Sequence
  Synthetic
uaaaacaguccuuaaguaguuc

SEQ ID NO: 557609 - RNA, 23 nt, Artificial Sequence
  Synthetic
auaaaacaguccuuaaguaguuc

SEQ ID NO: 557610 - RNA, 24 nt, Artificial Sequence
  Synthetic
cauaaaacaguccuuaaguaguuc

SEQ ID NO: 557611 - RNA, 18 nt, Artificial Sequence
  Synthetic
cucuaguacagguaguuc

SEQ ID NO: 557612 - RNA, 19 nt, Artificial Sequence
  Synthetic
ucucuaguacagguaguuc

SEQ ID NO: 557613 - RNA, 20 nt, Artificial Sequence
  Synthetic
uucucuaguacagguaguuc

SEQ ID NO: 557614 - RNA, 21 nt, Artificial Sequence
  Synthetic
cuucucuaguacagguaguuc

SEQ ID NO: 557615 - RNA, 22 nt, Artificial Sequence
  Synthetic
ucuucucuaguacagguaguuc

SEQ ID NO: 557616 - RNA, 23 nt, Artificial Sequence
  Synthetic
gucuucucuaguacagguaguuc

SEQ ID NO: 557617 - RNA, 24 nt, Artificial Sequence
  Synthetic
ugucuucucuaguacagguaguuc

SEQ ID NO: 557618 - RNA, 18 nt, Artificial Sequence
  Synthetic
uuaaaccucauguaguuc

SEQ ID NO: 557619 - RNA, 19 nt, Artificial Sequence
  Synthetic
auuaaaccucauguaguuc

SEQ ID NO: 557620 - RNA, 20 nt, Artificial Sequence
  Synthetic
aauuaaaccucauguaguuc

SEQ ID NO: 557621 - RNA, 21 nt, Artificial Sequence
  Synthetic
aaauuaaaccucauguaguuc

SEQ ID NO: 557622 - RNA, 22 nt, Artificial Sequence
  Synthetic
uaaauuaaaccucauguaguuc

SEQ ID NO: 557623 - RNA, 23 nt, Artificial Sequence
  Synthetic
auaaauuaaaccucauguaguuc

SEQ ID NO: 557624 - RNA, 24 nt, Artificial Sequence
  Synthetic
aauaaauuaaaccucauguaguuc

SEQ ID NO: 557625 - RNA, 18 nt, Artificial Sequence
  Synthetic
uugcuugaacauuaguuc

SEQ ID NO: 557626 - RNA, 19 nt, Artificial Sequence
  Synthetic
auugcuugaacauuaguuc

SEQ ID NO: 557627 - RNA, 20 nt, Artificial Sequence
  Synthetic
aauugcuugaacauuaguuc

SEQ ID NO: 557628 - RNA, 21 nt, Artificial Sequence
  Synthetic
aaauugcuugaacauuaguuc

SEQ ID NO: 557629 - RNA, 22 nt, Artificial Sequence
  Synthetic
uaaauugcuugaacauuaguuc

SEQ ID NO: 557630 - RNA, 23 nt, Artificial Sequence
  Synthetic
cuaaauugcuugaacauuaguuc

SEQ ID NO: 557631 - RNA, 24 nt, Artificial Sequence
  Synthetic
ccuaaauugcuugaacauuaguuc

SEQ ID NO: 557632 - RNA, 18 nt, Artificial Sequence
  Synthetic
uucucagggucugcguuc

SEQ ID NO: 557633 - RNA, 19 nt, Artificial Sequence
  Synthetic
guucucagggucugcguuc

SEQ ID NO: 557634 - RNA, 20 nt, Artificial Sequence
  Synthetic
uguucucagggucugcguuc

SEQ ID NO: 557635 - RNA, 21 nt, Artificial Sequence
  Synthetic
cuguucucagggucugcguuc

SEQ ID NO: 557636 - RNA, 22 nt, Artificial Sequence
  Synthetic
ccuguucucagggucugcguuc

SEQ ID NO: 557637 - RNA, 23 nt, Artificial Sequence
  Synthetic
cccuguucucagggucugcguuc

SEQ ID NO: 557638 - RNA, 24 nt, Artificial Sequence
  Synthetic
ccccuguucucagggucugcguuc

SEQ ID NO: 557639 - RNA, 18 nt, Artificial Sequence
  Synthetic
aaguauuuuaugucguuc

SEQ ID NO: 557640 - RNA, 19 nt, Artificial Sequence
  Synthetic
caaguauuuuaugucguuc

SEQ ID NO: 557641 - RNA, 20 nt, Artificial Sequence
  Synthetic
ucaaguauuuuaugucguuc

SEQ ID NO: 557642 - RNA, 21 nt, Artificial Sequence
  Synthetic
uucaaguauuuuaugucguuc

SEQ ID NO: 557643 - RNA, 22 nt, Artificial Sequence
  Synthetic
auucaaguauuuuaugucguuc

SEQ ID NO: 557644 - RNA, 23 nt, Artificial Sequence
  Synthetic
aauucaaguauuuuaugucguuc

SEQ ID NO: 557645 - RNA, 24 nt, Artificial Sequence
  Synthetic
aaauucaaguauuuuaugucguuc

SEQ ID NO: 557646 - RNA, 18 nt, Artificial Sequence
  Synthetic
agguccguggcuucguuc

SEQ ID NO: 557647 - RNA, 19 nt, Artificial Sequence
  Synthetic
gagguccguggcuucguuc

SEQ ID NO: 557648 - RNA, 20 nt, Artificial Sequence
  Synthetic
agagguccguggcuucguuc

SEQ ID NO: 557649 - RNA, 21 nt, Artificial Sequence
  Synthetic
cagagguccguggcuucguuc

SEQ ID NO: 557650 - RNA, 22 nt, Artificial Sequence
  Synthetic
gcagagguccguggcuucguuc

SEQ ID NO: 557651 - RNA, 23 nt, Artificial Sequence
  Synthetic
cgcagagguccguggcuucguuc

SEQ ID NO: 557652 - RNA, 24 nt, Artificial Sequence
  Synthetic
ccgcagagguccguggcuucguuc

SEQ ID NO: 557653 - RNA, 18 nt, Artificial Sequence
  Synthetic
agggccucgauuucguuc

SEQ ID NO: 557654 - RNA, 19 nt, Artificial Sequence
  Synthetic
cagggccucgauuucguuc

SEQ ID NO: 557655 - RNA, 20 nt, Artificial Sequence
  Synthetic
ucagggccucgauuucguuc

SEQ ID NO: 557656 - RNA, 21 nt, Artificial Sequence
  Synthetic
uucagggccucgauuucguuc

SEQ ID NO: 557657 - RNA, 22 nt, Artificial Sequence
  Synthetic
uuucagggccucgauuucguuc

SEQ ID NO: 557658 - RNA, 23 nt, Artificial Sequence
  Synthetic
uuuucagggccucgauuucguuc

SEQ ID NO: 557659 - RNA, 24 nt, Artificial Sequence
  Synthetic
cuuuucagggccucgauuucguuc

SEQ ID NO: 557660 - RNA, 18 nt, Artificial Sequence
  Synthetic
caaacaguggcaagguuc

SEQ ID NO: 557661 - RNA, 19 nt, Artificial Sequence
  Synthetic
ucaaacaguggcaagguuc

SEQ ID NO: 557662 - RNA, 20 nt, Artificial Sequence
  Synthetic
gucaaacaguggcaagguuc

SEQ ID NO: 557663 - RNA, 21 nt, Artificial Sequence
  Synthetic
ggucaaacaguggcaagguuc

SEQ ID NO: 557664 - RNA, 22 nt, Artificial Sequence
  Synthetic
aggucaaacaguggcaagguuc

SEQ ID NO: 557665 - RNA, 23 nt, Artificial Sequence
  Synthetic
uaggucaaacaguggcaagguuc

SEQ ID NO: 557666 - RNA, 24 nt, Artificial Sequence
  Synthetic
auaggucaaacaguggcaagguuc

SEQ ID NO: 557667 - RNA, 18 nt, Artificial Sequence
  Synthetic
ccacagcagagaagguuc

SEQ ID NO: 557668 - RNA, 19 nt, Artificial Sequence
  Synthetic
uccacagcagagaagguuc

SEQ ID NO: 557669 - RNA, 20 nt, Artificial Sequence
  Synthetic
uuccacagcagagaagguuc

SEQ ID NO: 557670 - RNA, 21 nt, Artificial Sequence
  Synthetic
guuccacagcagagaagguuc

SEQ ID NO: 557671 - RNA, 22 nt, Artificial Sequence
  Synthetic
uguuccacagcagagaagguuc

SEQ ID NO: 557672 - RNA, 23 nt, Artificial Sequence
  Synthetic
auguuccacagcagagaagguuc

SEQ ID NO: 557673 - RNA, 24 nt, Artificial Sequence
  Synthetic
aauguuccacagcagagaagguuc

SEQ ID NO: 557674 - RNA, 18 nt, Artificial Sequence
  Synthetic
gucaaaaauaacagguuc

SEQ ID NO: 557675 - RNA, 19 nt, Artificial Sequence
  Synthetic
agucaaaaauaacagguuc

SEQ ID NO: 557676 - RNA, 20 nt, Artificial Sequence
  Synthetic
uagucaaaaauaacagguuc

SEQ ID NO: 557677 - RNA, 21 nt, Artificial Sequence
  Synthetic
auagucaaaaauaacagguuc

SEQ ID NO: 557678 - RNA, 22 nt, Artificial Sequence
  Synthetic
aauagucaaaaauaacagguuc

SEQ ID NO: 557679 - RNA, 23 nt, Artificial Sequence
  Synthetic
aaauagucaaaaauaacagguuc

SEQ ID NO: 557680 - RNA, 24 nt, Artificial Sequence
  Synthetic
uaaauagucaaaaauaacagguuc

SEQ ID NO: 557681 - RNA, 18 nt, Artificial Sequence
  Synthetic
uaacauauucacagguuc

SEQ ID NO: 557682 - RNA, 19 nt, Artificial Sequence
  Synthetic
guaacauauucacagguuc

SEQ ID NO: 557683 - RNA, 20 nt, Artificial Sequence
  Synthetic
gguaacauauucacagguuc

SEQ ID NO: 557684 - RNA, 21 nt, Artificial Sequence
  Synthetic
agguaacauauucacagguuc

SEQ ID NO: 557685 - RNA, 22 nt, Artificial Sequence
  Synthetic
aagguaacauauucacagguuc

SEQ ID NO: 557686 - RNA, 23 nt, Artificial Sequence
  Synthetic
uaagguaacauauucacagguuc

SEQ ID NO: 557687 - RNA, 24 nt, Artificial Sequence
  Synthetic
guaagguaacauauucacagguuc

SEQ ID NO: 557688 - RNA, 18 nt, Artificial Sequence
  Synthetic
cagcauauucacagguuc

SEQ ID NO: 557689 - RNA, 19 nt, Artificial Sequence
  Synthetic
acagcauauucacagguuc

SEQ ID NO: 557690 - RNA, 20 nt, Artificial Sequence
  Synthetic
cacagcauauucacagguuc

SEQ ID NO: 557691 - RNA, 21 nt, Artificial Sequence
  Synthetic
gcacagcauauucacagguuc

SEQ ID NO: 557692 - RNA, 22 nt, Artificial Sequence
  Synthetic
agcacagcauauucacagguuc

SEQ ID NO: 557693 - RNA, 23 nt, Artificial Sequence
  Synthetic
gagcacagcauauucacagguuc

SEQ ID NO: 557694 - RNA, 24 nt, Artificial Sequence
  Synthetic
ggagcacagcauauucacagguuc

SEQ ID NO: 557695 - RNA, 18 nt, Artificial Sequence
  Synthetic
uuauaugggaccagguuc

SEQ ID NO: 557696 - RNA, 19 nt, Artificial Sequence
  Synthetic
uuuauaugggaccagguuc

SEQ ID NO: 557697 - RNA, 20 nt, Artificial Sequence
  Synthetic
uuuuauaugggaccagguuc

SEQ ID NO: 557698 - RNA, 21 nt, Artificial Sequence
  Synthetic
auuuuauaugggaccagguuc

SEQ ID NO: 557699 - RNA, 22 nt, Artificial Sequence
  Synthetic
gauuuuauaugggaccagguuc

SEQ ID NO: 557700 - RNA, 23 nt, Artificial Sequence
  Synthetic
ggauuuuauaugggaccagguuc

SEQ ID NO: 557701 - RNA, 24 nt, Artificial Sequence
  Synthetic
gggauuuuauaugggaccagguuc

SEQ ID NO: 557702 - RNA, 18 nt, Artificial Sequence
  Synthetic
accuccgccuccagguuc

SEQ ID NO: 557703 - RNA, 19 nt, Artificial Sequence
  Synthetic
aaccuccgccuccagguuc

SEQ ID NO: 557704 - RNA, 20 nt, Artificial Sequence
  Synthetic
caaccuccgccuccagguuc

SEQ ID NO: 557705 - RNA, 21 nt, Artificial Sequence
  Synthetic
gcaaccuccgccuccagguuc

SEQ ID NO: 557706 - RNA, 22 nt, Artificial Sequence
  Synthetic
ugcaaccuccgccuccagguuc

SEQ ID NO: 557707 - RNA, 23 nt, Artificial Sequence
  Synthetic
cugcaaccuccgccuccagguuc

SEQ ID NO: 557708 - RNA, 24 nt, Artificial Sequence
  Synthetic
acugcaaccuccgccuccagguuc

SEQ ID NO: 557709 - RNA, 18 nt, Artificial Sequence
  Synthetic
gauuauauuagcagguuc

SEQ ID NO: 557710 - RNA, 19 nt, Artificial Sequence
  Synthetic
cgauuauauuagcagguuc

SEQ ID NO: 557711 - RNA, 20 nt, Artificial Sequence
  Synthetic
ccgauuauauuagcagguuc

SEQ ID NO: 557712 - RNA, 21 nt, Artificial Sequence
  Synthetic
uccgauuauauuagcagguuc

SEQ ID NO: 557713 - RNA, 22 nt, Artificial Sequence
  Synthetic
guccgauuauauuagcagguuc

SEQ ID NO: 557714 - RNA, 23 nt, Artificial Sequence
  Synthetic
uguccgauuauauuagcagguuc

SEQ ID NO: 557715 - RNA, 24 nt, Artificial Sequence
  Synthetic
uuguccgauuauauuagcagguuc

SEQ ID NO: 557716 - RNA, 18 nt, Artificial Sequence
  Synthetic
gaguccuggccuagguuc

SEQ ID NO: 557717 - RNA, 19 nt, Artificial Sequence
  Synthetic
ugaguccuggccuagguuc

SEQ ID NO: 557718 - RNA, 20 nt, Artificial Sequence
  Synthetic
cugaguccuggccuagguuc

SEQ ID NO: 557719 - RNA, 21 nt, Artificial Sequence
  Synthetic
ucugaguccuggccuagguuc

SEQ ID NO: 557720 - RNA, 22 nt, Artificial Sequence
  Synthetic
uucugaguccuggccuagguuc

SEQ ID NO: 557721 - RNA, 23 nt, Artificial Sequence
  Synthetic
uuucugaguccuggccuagguuc

SEQ ID NO: 557722 - RNA, 24 nt, Artificial Sequence
  Synthetic
auuucugaguccuggccuagguuc

SEQ ID NO: 557723 - RNA, 18 nt, Artificial Sequence
  Synthetic
aacugaacuccuagguuc

SEQ ID NO: 557724 - RNA, 19 nt, Artificial Sequence
  Synthetic
gaacugaacuccuagguuc

SEQ ID NO: 557725 - RNA, 20 nt, Artificial Sequence
  Synthetic
ugaacugaacuccuagguuc

SEQ ID NO: 557726 - RNA, 21 nt, Artificial Sequence
  Synthetic
uugaacugaacuccuagguuc

SEQ ID NO: 557727 - RNA, 22 nt, Artificial Sequence
  Synthetic
cuugaacugaacuccuagguuc

SEQ ID NO: 557728 - RNA, 23 nt, Artificial Sequence
  Synthetic
ccuugaacugaacuccuagguuc

SEQ ID NO: 557729 - RNA, 24 nt, Artificial Sequence
  Synthetic
gccuugaacugaacuccuagguuc

SEQ ID NO: 557730 - RNA, 18 nt, Artificial Sequence
  Synthetic
aaacacugaucuagguuc

SEQ ID NO: 557731 - RNA, 19 nt, Artificial Sequence
  Synthetic
caaacacugaucuagguuc

SEQ ID NO: 557732 - RNA, 20 nt, Artificial Sequence
  Synthetic
ccaaacacugaucuagguuc

SEQ ID NO: 557733 - RNA, 21 nt, Artificial Sequence
  Synthetic
gccaaacacugaucuagguuc

SEQ ID NO: 557734 - RNA, 22 nt, Artificial Sequence
  Synthetic
ugccaaacacugaucuagguuc

SEQ ID NO: 557735 - RNA, 23 nt, Artificial Sequence
  Synthetic
gugccaaacacugaucuagguuc

SEQ ID NO: 557736 - RNA, 24 nt, Artificial Sequence
  Synthetic
ugugccaaacacugaucuagguuc

SEQ ID NO: 557737 - RNA, 18 nt, Artificial Sequence
  Synthetic
uaauuuuccauuagguuc

SEQ ID NO: 557738 - RNA, 19 nt, Artificial Sequence
  Synthetic
guaauuuuccauuagguuc

SEQ ID NO: 557739 - RNA, 20 nt, Artificial Sequence
  Synthetic
uguaauuuuccauuagguuc

SEQ ID NO: 557740 - RNA, 21 nt, Artificial Sequence
  Synthetic
cuguaauuuuccauuagguuc

SEQ ID NO: 557741 - RNA, 22 nt, Artificial Sequence
  Synthetic
ucuguaauuuuccauuagguuc

SEQ ID NO: 557742 - RNA, 23 nt, Artificial Sequence
  Synthetic
aucuguaauuuuccauuagguuc

SEQ ID NO: 557743 - RNA, 24 nt, Artificial Sequence
  Synthetic
uaucuguaauuuuccauuagguuc

SEQ ID NO: 557744 - RNA, 18 nt, Artificial Sequence
  Synthetic
gcaaauucauagggguuc

SEQ ID NO: 557745 - RNA, 19 nt, Artificial Sequence
  Synthetic
agcaaauucauagggguuc

SEQ ID NO: 557746 - RNA, 20 nt, Artificial Sequence
  Synthetic
aagcaaauucauagggguuc

SEQ ID NO: 557747 - RNA, 21 nt, Artificial Sequence
  Synthetic
aaagcaaauucauagggguuc

SEQ ID NO: 557748 - RNA, 22 nt, Artificial Sequence
  Synthetic
uaaagcaaauucauagggguuc

SEQ ID NO: 557749 - RNA, 23 nt, Artificial Sequence
  Synthetic
cuaaagcaaauucauagggguuc

SEQ ID NO: 557750 - RNA, 24 nt, Artificial Sequence
  Synthetic
ucuaaagcaaauucauagggguuc

SEQ ID NO: 557751 - RNA, 18 nt, Artificial Sequence
  Synthetic
ccucugccuccuggguuc

SEQ ID NO: 557752 - RNA, 19 nt, Artificial Sequence
  Synthetic
gccucugccuccuggguuc

SEQ ID NO: 557753 - RNA, 20 nt, Artificial Sequence
  Synthetic
agccucugccuccuggguuc

SEQ ID NO: 557754 - RNA, 21 nt, Artificial Sequence
  Synthetic
cagccucugccuccuggguuc

SEQ ID NO: 557755 - RNA, 22 nt, Artificial Sequence
  Synthetic
gcagccucugccuccuggguuc

SEQ ID NO: 557756 - RNA, 23 nt, Artificial Sequence
  Synthetic
ugcagccucugccuccuggguuc

SEQ ID NO: 557757 - RNA, 24 nt, Artificial Sequence
  Synthetic
cugcagccucugccuccuggguuc

SEQ ID NO: 557758 - RNA, 18 nt, Artificial Sequence
  Synthetic
ccuccaguuccuggguuc

SEQ ID NO: 557759 - RNA, 19 nt, Artificial Sequence
  Synthetic
uccuccaguuccuggguuc

SEQ ID NO: 557760 - RNA, 20 nt, Artificial Sequence
  Synthetic
uuccuccaguuccuggguuc

SEQ ID NO: 557761 - RNA, 21 nt, Artificial Sequence
  Synthetic
cuuccuccaguuccuggguuc

SEQ ID NO: 557762 - RNA, 22 nt, Artificial Sequence
  Synthetic
gcuuccuccaguuccuggguuc

SEQ ID NO: 557763 - RNA, 23 nt, Artificial Sequence
  Synthetic
ugcuuccuccaguuccuggguuc

SEQ ID NO: 557764 - RNA, 24 nt, Artificial Sequence
  Synthetic
cugcuuccuccaguuccuggguuc

SEQ ID NO: 557765 - RNA, 18 nt, Artificial Sequence
  Synthetic
ccuccgccugcuggguuc

SEQ ID NO: 557766 - RNA, 19 nt, Artificial Sequence
  Synthetic
accuccgccugcuggguuc

SEQ ID NO: 557767 - RNA, 20 nt, Artificial Sequence
  Synthetic
aaccuccgccugcuggguuc

SEQ ID NO: 557768 - RNA, 21 nt, Artificial Sequence
  Synthetic
caaccuccgccugcuggguuc

SEQ ID NO: 557769 - RNA, 22 nt, Artificial Sequence
  Synthetic
gcaaccuccgccugcuggguuc

SEQ ID NO: 557770 - RNA, 23 nt, Artificial Sequence
  Synthetic
ugcaaccuccgccugcuggguuc

SEQ ID NO: 557771 - RNA, 24 nt, Artificial Sequence
  Synthetic
cugcaaccuccgccugcuggguuc

SEQ ID NO: 557772 - RNA, 18 nt, Artificial Sequence
  Synthetic
aauuuacccaguggguuc

SEQ ID NO: 557773 - RNA, 19 nt, Artificial Sequence
  Synthetic
aaauuuacccaguggguuc

SEQ ID NO: 557774 - RNA, 20 nt, Artificial Sequence
  Synthetic
uaaauuuacccaguggguuc

SEQ ID NO: 557775 - RNA, 21 nt, Artificial Sequence
  Synthetic
auaaauuuacccaguggguuc

SEQ ID NO: 557776 - RNA, 22 nt, Artificial Sequence
  Synthetic
cauaaauuuacccaguggguuc

SEQ ID NO: 557777 - RNA, 23 nt, Artificial Sequence
  Synthetic
gcauaaauuuacccaguggguuc

SEQ ID NO: 557778 - RNA, 24 nt, Artificial Sequence
  Synthetic
agcauaaauuuacccaguggguuc

SEQ ID NO: 557779 - RNA, 18 nt, Artificial Sequence
  Synthetic
aaucuagagaguggguuc

SEQ ID NO: 557780 - RNA, 19 nt, Artificial Sequence
  Synthetic
aaaucuagagaguggguuc

SEQ ID NO: 557781 - RNA, 20 nt, Artificial Sequence
  Synthetic
aaaaucuagagaguggguuc

SEQ ID NO: 557782 - RNA, 21 nt, Artificial Sequence
  Synthetic
caaaaucuagagaguggguuc

SEQ ID NO: 557783 - RNA, 22 nt, Artificial Sequence
  Synthetic
acaaaaucuagagaguggguuc

SEQ ID NO: 557784 - RNA, 23 nt, Artificial Sequence
  Synthetic
aacaaaaucuagagaguggguuc

SEQ ID NO: 557785 - RNA, 24 nt, Artificial Sequence
  Synthetic
caacaaaaucuagagaguggguuc

SEQ ID NO: 557786 - RNA, 18 nt, Artificial Sequence
  Synthetic
ugaauuuuuaaaugguuc

SEQ ID NO: 557787 - RNA, 19 nt, Artificial Sequence
  Synthetic
gugaauuuuuaaaugguuc

SEQ ID NO: 557788 - RNA, 20 nt, Artificial Sequence
  Synthetic
agugaauuuuuaaaugguuc

SEQ ID NO: 557789 - RNA, 21 nt, Artificial Sequence
  Synthetic
aagugaauuuuuaaaugguuc

SEQ ID NO: 557790 - RNA, 22 nt, Artificial Sequence
  Synthetic
aaagugaauuuuuaaaugguuc

SEQ ID NO: 557791 - RNA, 23 nt, Artificial Sequence
  Synthetic
uaaagugaauuuuuaaaugguuc

SEQ ID NO: 557792 - RNA, 24 nt, Artificial Sequence
  Synthetic
auaaagugaauuuuuaaaugguuc

SEQ ID NO: 557793 - RNA, 18 nt, Artificial Sequence
  Synthetic
uaauucuguaucugguuc

SEQ ID NO: 557794 - RNA, 19 nt, Artificial Sequence
  Synthetic
guaauucuguaucugguuc

SEQ ID NO: 557795 - RNA, 20 nt, Artificial Sequence
  Synthetic
uguaauucuguaucugguuc

SEQ ID NO: 557796 - RNA, 21 nt, Artificial Sequence
  Synthetic
uuguaauucuguaucugguuc

SEQ ID NO: 557797 - RNA, 22 nt, Artificial Sequence
  Synthetic
auuguaauucuguaucugguuc

SEQ ID NO: 557798 - RNA, 23 nt, Artificial Sequence
  Synthetic
aauuguaauucuguaucugguuc

SEQ ID NO: 557799 - RNA, 24 nt, Artificial Sequence
  Synthetic
uaauuguaauucuguaucugguuc

SEQ ID NO: 557800 - RNA, 18 nt, Artificial Sequence
  Synthetic
ggcucuuccucgugguuc

SEQ ID NO: 557801 - RNA, 19 nt, Artificial Sequence
  Synthetic
gggcucuuccucgugguuc

SEQ ID NO: 557802 - RNA, 20 nt, Artificial Sequence
  Synthetic
ggggcucuuccucgugguuc

SEQ ID NO: 557803 - RNA, 21 nt, Artificial Sequence
  Synthetic
cggggcucuuccucgugguuc

SEQ ID NO: 557804 - RNA, 22 nt, Artificial Sequence
  Synthetic
ccggggcucuuccucgugguuc

SEQ ID NO: 557805 - RNA, 23 nt, Artificial Sequence
  Synthetic
uccggggcucuuccucgugguuc

SEQ ID NO: 557806 - RNA, 24 nt, Artificial Sequence
  Synthetic
uuccggggcucuuccucgugguuc

SEQ ID NO: 557807 - RNA, 18 nt, Artificial Sequence
  Synthetic
acagugcaguggugguuc

SEQ ID NO: 557808 - RNA, 19 nt, Artificial Sequence
  Synthetic
cacagugcaguggugguuc

SEQ ID NO: 557809 - RNA, 20 nt, Artificial Sequence
  Synthetic
gcacagugcaguggugguuc

SEQ ID NO: 557810 - RNA, 21 nt, Artificial Sequence
  Synthetic
cgcacagugcaguggugguuc

SEQ ID NO: 557811 - RNA, 22 nt, Artificial Sequence
  Synthetic
acgcacagugcaguggugguuc

SEQ ID NO: 557812 - RNA, 23 nt, Artificial Sequence
  Synthetic
aacgcacagugcaguggugguuc

SEQ ID NO: 557813 - RNA, 24 nt, Artificial Sequence
  Synthetic
aaacgcacagugcaguggugguuc

SEQ ID NO: 557814 - RNA, 18 nt, Artificial Sequence
  Synthetic
aucucauccucuugguuc

SEQ ID NO: 557815 - RNA, 19 nt, Artificial Sequence
  Synthetic
aaucucauccucuugguuc

SEQ ID NO: 557816 - RNA, 20 nt, Artificial Sequence
  Synthetic
uaaucucauccucuugguuc

SEQ ID NO: 557817 - RNA, 21 nt, Artificial Sequence
  Synthetic
auaaucucauccucuugguuc

SEQ ID NO: 557818 - RNA, 22 nt, Artificial Sequence
  Synthetic
gauaaucucauccucuugguuc

SEQ ID NO: 557819 - RNA, 23 nt, Artificial Sequence
  Synthetic
agauaaucucauccucuugguuc

SEQ ID NO: 557820 - RNA, 24 nt, Artificial Sequence
  Synthetic
aagauaaucucauccucuugguuc

SEQ ID NO: 557821 - RNA, 18 nt, Artificial Sequence
  Synthetic
gagagaaauaguugguuc

SEQ ID NO: 557822 - RNA, 19 nt, Artificial Sequence
  Synthetic
agagagaaauaguugguuc

SEQ ID NO: 557823 - RNA, 20 nt, Artificial Sequence
  Synthetic
aagagagaaauaguugguuc

SEQ ID NO: 557824 - RNA, 21 nt, Artificial Sequence
  Synthetic
aaagagagaaauaguugguuc

SEQ ID NO: 557825 - RNA, 22 nt, Artificial Sequence
  Synthetic
aaaagagagaaauaguugguuc

SEQ ID NO: 557826 - RNA, 23 nt, Artificial Sequence
  Synthetic
aaaaagagagaaauaguugguuc

SEQ ID NO: 557827 - RNA, 24 nt, Artificial Sequence
  Synthetic
caaaaagagagaaauaguugguuc

SEQ ID NO: 557828 - RNA, 18 nt, Artificial Sequence
  Synthetic
uuuauuuaguuuugguuc

SEQ ID NO: 557829 - RNA, 19 nt, Artificial Sequence
  Synthetic
auuuauuuaguuuugguuc

SEQ ID NO: 557830 - RNA, 20 nt, Artificial Sequence
  Synthetic
cauuuauuuaguuuugguuc

SEQ ID NO: 557831 - RNA, 21 nt, Artificial Sequence
  Synthetic
acauuuauuuaguuuugguuc

SEQ ID NO: 557832 - RNA, 22 nt, Artificial Sequence
  Synthetic
cacauuuauuuaguuuugguuc

SEQ ID NO: 557833 - RNA, 23 nt, Artificial Sequence
  Synthetic
gcacauuuauuuaguuuugguuc

SEQ ID NO: 557834 - RNA, 24 nt, Artificial Sequence
  Synthetic
agcacauuuauuuaguuuugguuc

SEQ ID NO: 557835 - RNA, 18 nt, Artificial Sequence
  Synthetic
gagggucucaaaauguuc

SEQ ID NO: 557836 - RNA, 19 nt, Artificial Sequence
  Synthetic
ugagggucucaaaauguuc

SEQ ID NO: 557837 - RNA, 20 nt, Artificial Sequence
  Synthetic
gugagggucucaaaauguuc

SEQ ID NO: 557838 - RNA, 21 nt, Artificial Sequence
  Synthetic
agugagggucucaaaauguuc

SEQ ID NO: 557839 - RNA, 22 nt, Artificial Sequence
  Synthetic
gagugagggucucaaaauguuc

SEQ ID NO: 557840 - RNA, 23 nt, Artificial Sequence
  Synthetic
agagugagggucucaaaauguuc

SEQ ID NO: 557841 - RNA, 24 nt, Artificial Sequence
  Synthetic
uagagugagggucucaaaauguuc

SEQ ID NO: 557842 - RNA, 18 nt, Artificial Sequence
  Synthetic
acuuaaccuaaaauguuc

SEQ ID NO: 557843 - RNA, 19 nt, Artificial Sequence
  Synthetic
aacuuaaccuaaaauguuc

SEQ ID NO: 557844 - RNA, 20 nt, Artificial Sequence
  Synthetic
aaacuuaaccuaaaauguuc

SEQ ID NO: 557845 - RNA, 21 nt, Artificial Sequence
  Synthetic
aaaacuuaaccuaaaauguuc

SEQ ID NO: 557846 - RNA, 22 nt, Artificial Sequence
  Synthetic
uaaaacuuaaccuaaaauguuc

SEQ ID NO: 557847 - RNA, 23 nt, Artificial Sequence
  Synthetic
uuaaaacuuaaccuaaaauguuc

SEQ ID NO: 557848 - RNA, 24 nt, Artificial Sequence
  Synthetic
uuuaaaacuuaaccuaaaauguuc

SEQ ID NO: 557849 - RNA, 18 nt, Artificial Sequence
  Synthetic
uauggccucuaaauguuc

SEQ ID NO: 557850 - RNA, 19 nt, Artificial Sequence
  Synthetic
cuauggccucuaaauguuc

SEQ ID NO: 557851 - RNA, 20 nt, Artificial Sequence
  Synthetic
acuauggccucuaaauguuc

SEQ ID NO: 557852 - RNA, 21 nt, Artificial Sequence
  Synthetic
uacuauggccucuaaauguuc

SEQ ID NO: 557853 - RNA, 22 nt, Artificial Sequence
  Synthetic
guacuauggccucuaaauguuc

SEQ ID NO: 557854 - RNA, 23 nt, Artificial Sequence
  Synthetic
cguacuauggccucuaaauguuc

SEQ ID NO: 557855 - RNA, 24 nt, Artificial Sequence
  Synthetic
ccguacuauggccucuaaauguuc

SEQ ID NO: 557856 - RNA, 18 nt, Artificial Sequence
  Synthetic
uguucucugucaauguuc

SEQ ID NO: 557857 - RNA, 19 nt, Artificial Sequence
  Synthetic
uuguucucugucaauguuc

SEQ ID NO: 557858 - RNA, 20 nt, Artificial Sequence
  Synthetic
cuuguucucugucaauguuc

SEQ ID NO: 557859 - RNA, 21 nt, Artificial Sequence
  Synthetic
gcuuguucucugucaauguuc

SEQ ID NO: 557860 - RNA, 22 nt, Artificial Sequence
  Synthetic
agcuuguucucugucaauguuc

SEQ ID NO: 557861 - RNA, 23 nt, Artificial Sequence
  Synthetic
uagcuuguucucugucaauguuc

SEQ ID NO: 557862 - RNA, 24 nt, Artificial Sequence
  Synthetic
auagcuuguucucugucaauguuc

SEQ ID NO: 557863 - RNA, 18 nt, Artificial Sequence
  Synthetic
auuucacuuuucauguuc

SEQ ID NO: 557864 - RNA, 19 nt, Artificial Sequence
  Synthetic
gauuucacuuuucauguuc

SEQ ID NO: 557865 - RNA, 20 nt, Artificial Sequence
  Synthetic
agauuucacuuuucauguuc

SEQ ID NO: 557866 - RNA, 21 nt, Artificial Sequence
  Synthetic
uagauuucacuuuucauguuc

SEQ ID NO: 557867 - RNA, 22 nt, Artificial Sequence
  Synthetic
auagauuucacuuuucauguuc

SEQ ID NO: 557868 - RNA, 23 nt, Artificial Sequence
  Synthetic
uauagauuucacuuuucauguuc

SEQ ID NO: 557869 - RNA, 24 nt, Artificial Sequence
  Synthetic
auauagauuucacuuuucauguuc

SEQ ID NO: 557870 - RNA, 18 nt, Artificial Sequence
  Synthetic
agcuaauaugagauguuc

SEQ ID NO: 557871 - RNA, 19 nt, Artificial Sequence
  Synthetic
uagcuaauaugagauguuc

SEQ ID NO: 557872 - RNA, 20 nt, Artificial Sequence
  Synthetic
auagcuaauaugagauguuc

SEQ ID NO: 557873 - RNA, 21 nt, Artificial Sequence
  Synthetic
aauagcuaauaugagauguuc

SEQ ID NO: 557874 - RNA, 22 nt, Artificial Sequence
  Synthetic
aaauagcuaauaugagauguuc

SEQ ID NO: 557875 - RNA, 23 nt, Artificial Sequence
  Synthetic
gaaauagcuaauaugagauguuc

SEQ ID NO: 557876 - RNA, 24 nt, Artificial Sequence
  Synthetic
ugaaauagcuaauaugagauguuc

SEQ ID NO: 557877 - RNA, 18 nt, Artificial Sequence
  Synthetic
aucaaacuguagauguuc

SEQ ID NO: 557878 - RNA, 19 nt, Artificial Sequence
  Synthetic
caucaaacuguagauguuc

SEQ ID NO: 557879 - RNA, 20 nt, Artificial Sequence
  Synthetic
gcaucaaacuguagauguuc

SEQ ID NO: 557880 - RNA, 21 nt, Artificial Sequence
  Synthetic
ggcaucaaacuguagauguuc

SEQ ID NO: 557881 - RNA, 22 nt, Artificial Sequence
  Synthetic
aggcaucaaacuguagauguuc

SEQ ID NO: 557882 - RNA, 23 nt, Artificial Sequence
  Synthetic
gaggcaucaaacuguagauguuc

SEQ ID NO: 557883 - RNA, 24 nt, Artificial Sequence
  Synthetic
ugaggcaucaaacuguagauguuc

SEQ ID NO: 557884 - RNA, 18 nt, Artificial Sequence
  Synthetic
ggagcagcacggauguuc

SEQ ID NO: 557885 - RNA, 19 nt, Artificial Sequence
  Synthetic
aggagcagcacggauguuc

SEQ ID NO: 557886 - RNA, 20 nt, Artificial Sequence
  Synthetic
caggagcagcacggauguuc

SEQ ID NO: 557887 - RNA, 21 nt, Artificial Sequence
  Synthetic
acaggagcagcacggauguuc

SEQ ID NO: 557888 - RNA, 22 nt, Artificial Sequence
  Synthetic
aacaggagcagcacggauguuc

SEQ ID NO: 557889 - RNA, 23 nt, Artificial Sequence
  Synthetic
aaacaggagcagcacggauguuc

SEQ ID NO: 557890 - RNA, 24 nt, Artificial Sequence
  Synthetic
caaacaggagcagcacggauguuc

SEQ ID NO: 557891 - RNA, 18 nt, Artificial Sequence
  Synthetic
ugaagugaugggauguuc

SEQ ID NO: 557892 - RNA, 19 nt, Artificial Sequence
  Synthetic
cugaagugaugggauguuc

SEQ ID NO: 557893 - RNA, 20 nt, Artificial Sequence
  Synthetic
ucugaagugaugggauguuc

SEQ ID NO: 557894 - RNA, 21 nt, Artificial Sequence
  Synthetic
uucugaagugaugggauguuc

SEQ ID NO: 557895 - RNA, 22 nt, Artificial Sequence
  Synthetic
auucugaagugaugggauguuc

SEQ ID NO: 557896 - RNA, 23 nt, Artificial Sequence
  Synthetic
gauucugaagugaugggauguuc

SEQ ID NO: 557897 - RNA, 24 nt, Artificial Sequence
  Synthetic
agauucugaagugaugggauguuc

SEQ ID NO: 557898 - RNA, 18 nt, Artificial Sequence
  Synthetic
aacgucuagcugauguuc

SEQ ID NO: 557899 - RNA, 19 nt, Artificial Sequence
  Synthetic
aaacgucuagcugauguuc

SEQ ID NO: 557900 - RNA, 20 nt, Artificial Sequence
  Synthetic
gaaacgucuagcugauguuc

SEQ ID NO: 557901 - RNA, 21 nt, Artificial Sequence
  Synthetic
ggaaacgucuagcugauguuc

SEQ ID NO: 557902 - RNA, 22 nt, Artificial Sequence
  Synthetic
gggaaacgucuagcugauguuc

SEQ ID NO: 557903 - RNA, 23 nt, Artificial Sequence
  Synthetic
agggaaacgucuagcugauguuc

SEQ ID NO: 557904 - RNA, 24 nt, Artificial Sequence
  Synthetic
aagggaaacgucuagcugauguuc

SEQ ID NO: 557905 - RNA, 18 nt, Artificial Sequence
  Synthetic
gagaaugaccauauguuc

SEQ ID NO: 557906 - RNA, 19 nt, Artificial Sequence
  Synthetic
agagaaugaccauauguuc

SEQ ID NO: 557907 - RNA, 20 nt, Artificial Sequence
  Synthetic
aagagaaugaccauauguuc

SEQ ID NO: 557908 - RNA, 21 nt, Artificial Sequence
  Synthetic
aaagagaaugaccauauguuc

SEQ ID NO: 557909 - RNA, 22 nt, Artificial Sequence
  Synthetic
aaaagagaaugaccauauguuc

SEQ ID NO: 557910 - RNA, 23 nt, Artificial Sequence
  Synthetic
aaaaagagaaugaccauauguuc

SEQ ID NO: 557911 - RNA, 24 nt, Artificial Sequence
  Synthetic
uaaaaagagaaugaccauauguuc

SEQ ID NO: 557912 - RNA, 18 nt, Artificial Sequence
  Synthetic
uauuuacaaaguauguuc

SEQ ID NO: 557913 - RNA, 19 nt, Artificial Sequence
  Synthetic
cuauuuacaaaguauguuc

SEQ ID NO: 557914 - RNA, 20 nt, Artificial Sequence
  Synthetic
ccuauuuacaaaguauguuc

SEQ ID NO: 557915 - RNA, 21 nt, Artificial Sequence
  Synthetic
uccuauuuacaaaguauguuc

SEQ ID NO: 557916 - RNA, 22 nt, Artificial Sequence
  Synthetic
uuccuauuuacaaaguauguuc

SEQ ID NO: 557917 - RNA, 23 nt, Artificial Sequence
  Synthetic
guuccuauuuacaaaguauguuc

SEQ ID NO: 557918 - RNA, 24 nt, Artificial Sequence
  Synthetic
aguuccuauuuacaaaguauguuc

SEQ ID NO: 557919 - RNA, 18 nt, Artificial Sequence
  Synthetic
gacaggaggaguauguuc

SEQ ID NO: 557920 - RNA, 19 nt, Artificial Sequence
  Synthetic
agacaggaggaguauguuc

SEQ ID NO: 557921 - RNA, 20 nt, Artificial Sequence
  Synthetic
uagacaggaggaguauguuc

SEQ ID NO: 557922 - RNA, 21 nt, Artificial Sequence
  Synthetic
uuagacaggaggaguauguuc

SEQ ID NO: 557923 - RNA, 22 nt, Artificial Sequence
  Synthetic
auuagacaggaggaguauguuc

SEQ ID NO: 557924 - RNA, 23 nt, Artificial Sequence
  Synthetic
aauuagacaggaggaguauguuc

SEQ ID NO: 557925 - RNA, 24 nt, Artificial Sequence
  Synthetic
caauuagacaggaggaguauguuc

SEQ ID NO: 557926 - RNA, 18 nt, Artificial Sequence
  Synthetic
aauaauggugguauguuc

SEQ ID NO: 557927 - RNA, 19 nt, Artificial Sequence
  Synthetic
aaauaauggugguauguuc

SEQ ID NO: 557928 - RNA, 20 nt, Artificial Sequence
  Synthetic
gaaauaauggugguauguuc

SEQ ID NO: 557929 - RNA, 21 nt, Artificial Sequence
  Synthetic
agaaauaauggugguauguuc

SEQ ID NO: 557930 - RNA, 22 nt, Artificial Sequence
  Synthetic
aagaaauaauggugguauguuc

SEQ ID NO: 557931 - RNA, 23 nt, Artificial Sequence
  Synthetic
uaagaaauaauggugguauguuc

SEQ ID NO: 557932 - RNA, 24 nt, Artificial Sequence
  Synthetic
auaagaaauaauggugguauguuc

SEQ ID NO: 557933 - RNA, 18 nt, Artificial Sequence
  Synthetic
cagaacuuuuguauguuc

SEQ ID NO: 557934 - RNA, 19 nt, Artificial Sequence
  Synthetic
acagaacuuuuguauguuc

SEQ ID NO: 557935 - RNA, 20 nt, Artificial Sequence
  Synthetic
gacagaacuuuuguauguuc

SEQ ID NO: 557936 - RNA, 21 nt, Artificial Sequence
  Synthetic
ugacagaacuuuuguauguuc

SEQ ID NO: 557937 - RNA, 22 nt, Artificial Sequence
  Synthetic
uugacagaacuuuuguauguuc

SEQ ID NO: 557938 - RNA, 23 nt, Artificial Sequence
  Synthetic
uuugacagaacuuuuguauguuc

SEQ ID NO: 557939 - RNA, 24 nt, Artificial Sequence
  Synthetic
uuuugacagaacuuuuguauguuc

SEQ ID NO: 557940 - RNA, 18 nt, Artificial Sequence
  Synthetic
aguucaaacauuauguuc

SEQ ID NO: 557941 - RNA, 19 nt, Artificial Sequence
  Synthetic
caguucaaacauuauguuc

SEQ ID NO: 557942 - RNA, 20 nt, Artificial Sequence
  Synthetic
acaguucaaacauuauguuc

SEQ ID NO: 557943 - RNA, 21 nt, Artificial Sequence
  Synthetic
aacaguucaaacauuauguuc

SEQ ID NO: 557944 - RNA, 22 nt, Artificial Sequence
  Synthetic
uaacaguucaaacauuauguuc

SEQ ID NO: 557945 - RNA, 23 nt, Artificial Sequence
  Synthetic
guaacaguucaaacauuauguuc

SEQ ID NO: 557946 - RNA, 24 nt, Artificial Sequence
  Synthetic
uguaacaguucaaacauuauguuc

SEQ ID NO: 557947 - RNA, 18 nt, Artificial Sequence
  Synthetic
cuugguuucauuauguuc

SEQ ID NO: 557948 - RNA, 19 nt, Artificial Sequence
  Synthetic
gcuugguuucauuauguuc

SEQ ID NO: 557949 - RNA, 20 nt, Artificial Sequence
  Synthetic
agcuugguuucauuauguuc

SEQ ID NO: 557950 - RNA, 21 nt, Artificial Sequence
  Synthetic
uagcuugguuucauuauguuc

SEQ ID NO: 557951 - RNA, 22 nt, Artificial Sequence
  Synthetic
cuagcuugguuucauuauguuc

SEQ ID NO: 557952 - RNA, 23 nt, Artificial Sequence
  Synthetic
ucuagcuugguuucauuauguuc

SEQ ID NO: 557953 - RNA, 24 nt, Artificial Sequence
  Synthetic
uucuagcuugguuucauuauguuc

SEQ ID NO: 557954 - RNA, 18 nt, Artificial Sequence
  Synthetic
caccucacuuuuauguuc

SEQ ID NO: 557955 - RNA, 19 nt, Artificial Sequence
  Synthetic
ccaccucacuuuuauguuc

SEQ ID NO: 557956 - RNA, 20 nt, Artificial Sequence
  Synthetic
accaccucacuuuuauguuc

SEQ ID NO: 557957 - RNA, 21 nt, Artificial Sequence
  Synthetic
uaccaccucacuuuuauguuc

SEQ ID NO: 557958 - RNA, 22 nt, Artificial Sequence
  Synthetic
uuaccaccucacuuuuauguuc

SEQ ID NO: 557959 - RNA, 23 nt, Artificial Sequence
  Synthetic
uuuaccaccucacuuuuauguuc

SEQ ID NO: 557960 - RNA, 24 nt, Artificial Sequence
  Synthetic
uuuuaccaccucacuuuuauguuc

SEQ ID NO: 557961 - RNA, 18 nt, Artificial Sequence
  Synthetic
ccggccgaguaacuguuc

SEQ ID NO: 557962 - RNA, 19 nt, Artificial Sequence
  Synthetic
cccggccgaguaacuguuc

SEQ ID NO: 557963 - RNA, 20 nt, Artificial Sequence
  Synthetic
gcccggccgaguaacuguuc

SEQ ID NO: 557964 - RNA, 21 nt, Artificial Sequence
  Synthetic
cgcccggccgaguaacuguuc

SEQ ID NO: 557965 - RNA, 22 nt, Artificial Sequence
  Synthetic
gcgcccggccgaguaacuguuc

SEQ ID NO: 557966 - RNA, 23 nt, Artificial Sequence
  Synthetic
cgcgcccggccgaguaacuguuc

SEQ ID NO: 557967 - RNA, 24 nt, Artificial Sequence
  Synthetic
ccgcgcccggccgaguaacuguuc

SEQ ID NO: 557968 - RNA, 18 nt, Artificial Sequence
  Synthetic
aacuacaaaccacuguuc

SEQ ID NO: 557969 - RNA, 19 nt, Artificial Sequence
  Synthetic
gaacuacaaaccacuguuc

SEQ ID NO: 557970 - RNA, 20 nt, Artificial Sequence
  Synthetic
agaacuacaaaccacuguuc

SEQ ID NO: 557971 - RNA, 21 nt, Artificial Sequence
  Synthetic
gagaacuacaaaccacuguuc

SEQ ID NO: 557972 - RNA, 22 nt, Artificial Sequence
  Synthetic
ggagaacuacaaaccacuguuc

SEQ ID NO: 557973 - RNA, 23 nt, Artificial Sequence
  Synthetic
aggagaacuacaaaccacuguuc

SEQ ID NO: 557974 - RNA, 24 nt, Artificial Sequence
  Synthetic
aaggagaacuacaaaccacuguuc

SEQ ID NO: 557975 - RNA, 18 nt, Artificial Sequence
  Synthetic
agacaagaggcacuguuc

SEQ ID NO: 557976 - RNA, 19 nt, Artificial Sequence
  Synthetic
cagacaagaggcacuguuc

SEQ ID NO: 557977 - RNA, 20 nt, Artificial Sequence
  Synthetic
gcagacaagaggcacuguuc

SEQ ID NO: 557978 - RNA, 21 nt, Artificial Sequence
  Synthetic
ggcagacaagaggcacuguuc

SEQ ID NO: 557979 - RNA, 22 nt, Artificial Sequence
  Synthetic
aggcagacaagaggcacuguuc

SEQ ID NO: 557980 - RNA, 23 nt, Artificial Sequence
  Synthetic
caggcagacaagaggcacuguuc

SEQ ID NO: 557981 - RNA, 24 nt, Artificial Sequence
  Synthetic
ucaggcagacaagaggcacuguuc

SEQ ID NO: 557982 - RNA, 18 nt, Artificial Sequence
  Synthetic
guguaccgcaggcuguuc

SEQ ID NO: 557983 - RNA, 19 nt, Artificial Sequence
  Synthetic
uguguaccgcaggcuguuc

SEQ ID NO: 557984 - RNA, 20 nt, Artificial Sequence
  Synthetic
auguguaccgcaggcuguuc

SEQ ID NO: 557985 - RNA, 21 nt, Artificial Sequence
  Synthetic
aauguguaccgcaggcuguuc

SEQ ID NO: 557986 - RNA, 22 nt, Artificial Sequence
  Synthetic
aaauguguaccgcaggcuguuc

SEQ ID NO: 557987 - RNA, 23 nt, Artificial Sequence
  Synthetic
aaaauguguaccgcaggcuguuc

SEQ ID NO: 557988 - RNA, 24 nt, Artificial Sequence
  Synthetic
caaaauguguaccgcaggcuguuc

SEQ ID NO: 557989 - RNA, 18 nt, Artificial Sequence
  Synthetic
auuuuuuugcugcuguuc

SEQ ID NO: 557990 - RNA, 19 nt, Artificial Sequence
  Synthetic
uauuuuuuugcugcuguuc

SEQ ID NO: 557991 - RNA, 20 nt, Artificial Sequence
  Synthetic
guauuuuuuugcugcuguuc

SEQ ID NO: 557992 - RNA, 21 nt, Artificial Sequence
  Synthetic
uguauuuuuuugcugcuguuc

SEQ ID NO: 557993 - RNA, 22 nt, Artificial Sequence
  Synthetic
uuguauuuuuuugcugcuguuc

SEQ ID NO: 557994 - RNA, 23 nt, Artificial Sequence
  Synthetic
uuuguauuuuuuugcugcuguuc

SEQ ID NO: 557995 - RNA, 24 nt, Artificial Sequence
  Synthetic
uuuuguauuuuuuugcugcuguuc

SEQ ID NO: 557996 - RNA, 18 nt, Artificial Sequence
  Synthetic
aagugcuaggugcuguuc

SEQ ID NO: 557997 - RNA, 19 nt, Artificial Sequence
  Synthetic
uaagugcuaggugcuguuc

SEQ ID NO: 557998 - RNA, 20 nt, Artificial Sequence
  Synthetic
uuaagugcuaggugcuguuc

SEQ ID NO: 557999 - RNA, 21 nt, Artificial Sequence
  Synthetic
uuuaagugcuaggugcuguuc

SEQ ID NO: 558000 - RNA, 22 nt, Artificial Sequence
  Synthetic
cuuuaagugcuaggugcuguuc

SEQ ID NO: 558001 - RNA, 23 nt, Artificial Sequence
  Synthetic
ccuuuaagugcuaggugcuguuc

SEQ ID NO: 558002 - RNA, 24 nt, Artificial Sequence
  Synthetic
accuuuaagugcuaggugcuguuc

SEQ ID NO: 558003 - RNA, 18 nt, Artificial Sequence
  Synthetic
ccagucucuuugcuguuc

SEQ ID NO: 558004 - RNA, 19 nt, Artificial Sequence
  Synthetic
accagucucuuugcuguuc

SEQ ID NO: 558005 - RNA, 20 nt, Artificial Sequence
  Synthetic
aaccagucucuuugcuguuc

SEQ ID NO: 558006 - RNA, 21 nt, Artificial Sequence
  Synthetic
caaccagucucuuugcuguuc

SEQ ID NO: 558007 - RNA, 22 nt, Artificial Sequence
  Synthetic
ucaaccagucucuuugcuguuc

SEQ ID NO: 558008 - RNA, 23 nt, Artificial Sequence
  Synthetic
aucaaccagucucuuugcuguuc

SEQ ID NO: 558009 - RNA, 24 nt, Artificial Sequence
  Synthetic
uaucaaccagucucuuugcuguuc

SEQ ID NO: 558010 - RNA, 18 nt, Artificial Sequence
  Synthetic
cugugaauccaucuguuc

SEQ ID NO: 558011 - RNA, 19 nt, Artificial Sequence
  Synthetic
gcugugaauccaucuguuc

SEQ ID NO: 558012 - RNA, 20 nt, Artificial Sequence
  Synthetic
agcugugaauccaucuguuc

SEQ ID NO: 558013 - RNA, 21 nt, Artificial Sequence
  Synthetic
cagcugugaauccaucuguuc

SEQ ID NO: 558014 - RNA, 22 nt, Artificial Sequence
  Synthetic
ucagcugugaauccaucuguuc

SEQ ID NO: 558015 - RNA, 23 nt, Artificial Sequence
  Synthetic
uucagcugugaauccaucuguuc

SEQ ID NO: 558016 - RNA, 24 nt, Artificial Sequence
  Synthetic
auucagcugugaauccaucuguuc

SEQ ID NO: 558017 - RNA, 18 nt, Artificial Sequence
  Synthetic
uauuugaaugaucuguuc

SEQ ID NO: 558018 - RNA, 19 nt, Artificial Sequence
  Synthetic
cuauuugaaugaucuguuc

SEQ ID NO: 558019 - RNA, 20 nt, Artificial Sequence
  Synthetic
ccuauuugaaugaucuguuc

SEQ ID NO: 558020 - RNA, 21 nt, Artificial Sequence
  Synthetic
uccuauuugaaugaucuguuc

SEQ ID NO: 558021 - RNA, 22 nt, Artificial Sequence
  Synthetic
guccuauuugaaugaucuguuc

SEQ ID NO: 558022 - RNA, 23 nt, Artificial Sequence
  Synthetic
aguccuauuugaaugaucuguuc

SEQ ID NO: 558023 - RNA, 24 nt, Artificial Sequence
  Synthetic
uaguccuauuugaaugaucuguuc

SEQ ID NO: 558024 - RNA, 18 nt, Artificial Sequence
  Synthetic
ccuguucaaagucuguuc

SEQ ID NO: 558025 - RNA, 19 nt, Artificial Sequence
  Synthetic
gccuguucaaagucuguuc

SEQ ID NO: 558026 - RNA, 20 nt, Artificial Sequence
  Synthetic
agccuguucaaagucuguuc

SEQ ID NO: 558027 - RNA, 21 nt, Artificial Sequence
  Synthetic
gagccuguucaaagucuguuc

SEQ ID NO: 558028 - RNA, 22 nt, Artificial Sequence
  Synthetic
agagccuguucaaagucuguuc

SEQ ID NO: 558029 - RNA, 23 nt, Artificial Sequence
  Synthetic
aagagccuguucaaagucuguuc

SEQ ID NO: 558030 - RNA, 24 nt, Artificial Sequence
  Synthetic
uaagagccuguucaaagucuguuc

SEQ ID NO: 558031 - RNA, 18 nt, Artificial Sequence
  Synthetic
aucaaagcauuucuguuc

SEQ ID NO: 558032 - RNA, 19 nt, Artificial Sequence
  Synthetic
aaucaaagcauuucuguuc

SEQ ID NO: 558033 - RNA, 20 nt, Artificial Sequence
  Synthetic
aaaucaaagcauuucuguuc

SEQ ID NO: 558034 - RNA, 21 nt, Artificial Sequence
  Synthetic
uaaaucaaagcauuucuguuc

SEQ ID NO: 558035 - RNA, 22 nt, Artificial Sequence
  Synthetic
uuaaaucaaagcauuucuguuc

SEQ ID NO: 558036 - RNA, 23 nt, Artificial Sequence
  Synthetic
guuaaaucaaagcauuucuguuc

SEQ ID NO: 558037 - RNA, 24 nt, Artificial Sequence
  Synthetic
aguuaaaucaaagcauuucuguuc

SEQ ID NO: 558038 - RNA, 18 nt, Artificial Sequence
  Synthetic
gaaagauaacaaguguuc

SEQ ID NO: 558039 - RNA, 19 nt, Artificial Sequence
  Synthetic
ugaaagauaacaaguguuc

SEQ ID NO: 558040 - RNA, 20 nt, Artificial Sequence
  Synthetic
uugaaagauaacaaguguuc

SEQ ID NO: 558041 - RNA, 21 nt, Artificial Sequence
  Synthetic
guugaaagauaacaaguguuc

SEQ ID NO: 558042 - RNA, 22 nt, Artificial Sequence
  Synthetic
aguugaaagauaacaaguguuc

SEQ ID NO: 558043 - RNA, 23 nt, Artificial Sequence
  Synthetic
aaguugaaagauaacaaguguuc

SEQ ID NO: 558044 - RNA, 24 nt, Artificial Sequence
  Synthetic
aaaguugaaagauaacaaguguuc

SEQ ID NO: 558045 - RNA, 18 nt, Artificial Sequence
  Synthetic
uauguuacagaaguguuc

SEQ ID NO: 558046 - RNA, 19 nt, Artificial Sequence
  Synthetic
uuauguuacagaaguguuc

SEQ ID NO: 558047 - RNA, 20 nt, Artificial Sequence
  Synthetic
auuauguuacagaaguguuc

SEQ ID NO: 558048 - RNA, 21 nt, Artificial Sequence
  Synthetic
cauuauguuacagaaguguuc

SEQ ID NO: 558049 - RNA, 22 nt, Artificial Sequence
  Synthetic
ccauuauguuacagaaguguuc

SEQ ID NO: 558050 - RNA, 23 nt, Artificial Sequence
  Synthetic
gccauuauguuacagaaguguuc

SEQ ID NO: 558051 - RNA, 24 nt, Artificial Sequence
  Synthetic
ugccauuauguuacagaaguguuc

SEQ ID NO: 558052 - RNA, 18 nt, Artificial Sequence
  Synthetic
agaugauaugaaguguuc

SEQ ID NO: 558053 - RNA, 19 nt, Artificial Sequence
  Synthetic
gagaugauaugaaguguuc

SEQ ID NO: 558054 - RNA, 20 nt, Artificial Sequence
  Synthetic
agagaugauaugaaguguuc

SEQ ID NO: 558055 - RNA, 21 nt, Artificial Sequence
  Synthetic
uagagaugauaugaaguguuc

SEQ ID NO: 558056 - RNA, 22 nt, Artificial Sequence
  Synthetic
cuagagaugauaugaaguguuc

SEQ ID NO: 558057 - RNA, 23 nt, Artificial Sequence
  Synthetic
ucuagagaugauaugaaguguuc

SEQ ID NO: 558058 - RNA, 24 nt, Artificial Sequence
  Synthetic
aucuagagaugauaugaaguguuc

SEQ ID NO: 558059 - RNA, 18 nt, Artificial Sequence
  Synthetic
ucuguauuuacaguguuc

SEQ ID NO: 558060 - RNA, 19 nt, Artificial Sequence
  Synthetic
uucuguauuuacaguguuc

SEQ ID NO: 558061 - RNA, 20 nt, Artificial Sequence
  Synthetic
uuucuguauuuacaguguuc

SEQ ID NO: 558062 - RNA, 21 nt, Artificial Sequence
  Synthetic
cuuucuguauuuacaguguuc

SEQ ID NO: 558063 - RNA, 22 nt, Artificial Sequence
  Synthetic
acuuucuguauuuacaguguuc

SEQ ID NO: 558064 - RNA, 23 nt, Artificial Sequence
  Synthetic
aacuuucuguauuuacaguguuc

SEQ ID NO: 558065 - RNA, 24 nt, Artificial Sequence
  Synthetic
aaacuuucuguauuuacaguguuc

SEQ ID NO: 558066 - RNA, 18 nt, Artificial Sequence
  Synthetic
cagaggccaugaguguuc

SEQ ID NO: 558067 - RNA, 19 nt, Artificial Sequence
  Synthetic
gcagaggccaugaguguuc

SEQ ID NO: 558068 - RNA, 20 nt, Artificial Sequence
  Synthetic
agcagaggccaugaguguuc

SEQ ID NO: 558069 - RNA, 21 nt, Artificial Sequence
  Synthetic
gagcagaggccaugaguguuc

SEQ ID NO: 558070 - RNA, 22 nt, Artificial Sequence
  Synthetic
ggagcagaggccaugaguguuc

SEQ ID NO: 558071 - RNA, 23 nt, Artificial Sequence
  Synthetic
aggagcagaggccaugaguguuc

SEQ ID NO: 558072 - RNA, 24 nt, Artificial Sequence
  Synthetic
caggagcagaggccaugaguguuc

SEQ ID NO: 558073 - RNA, 18 nt, Artificial Sequence
  Synthetic
ccucugcucuagguguuc

SEQ ID NO: 558074 - RNA, 19 nt, Artificial Sequence
  Synthetic
accucugcucuagguguuc

SEQ ID NO: 558075 - RNA, 20 nt, Artificial Sequence
  Synthetic
gaccucugcucuagguguuc

SEQ ID NO: 558076 - RNA, 21 nt, Artificial Sequence
  Synthetic
ugaccucugcucuagguguuc

SEQ ID NO: 558077 - RNA, 22 nt, Artificial Sequence
  Synthetic
cugaccucugcucuagguguuc

SEQ ID NO: 558078 - RNA, 23 nt, Artificial Sequence
  Synthetic
gcugaccucugcucuagguguuc

SEQ ID NO: 558079 - RNA, 24 nt, Artificial Sequence
  Synthetic
ugcugaccucugcucuagguguuc

SEQ ID NO: 558080 - RNA, 18 nt, Artificial Sequence
  Synthetic
caguaaacuuugguguuc

SEQ ID NO: 558081 - RNA, 19 nt, Artificial Sequence
  Synthetic
ucaguaaacuuugguguuc

SEQ ID NO: 558082 - RNA, 20 nt, Artificial Sequence
  Synthetic
uucaguaaacuuugguguuc

SEQ ID NO: 558083 - RNA, 21 nt, Artificial Sequence
  Synthetic
uuucaguaaacuuugguguuc

SEQ ID NO: 558084 - RNA, 22 nt, Artificial Sequence
  Synthetic
uuuucaguaaacuuugguguuc

SEQ ID NO: 558085 - RNA, 23 nt, Artificial Sequence
  Synthetic
cuuuucaguaaacuuugguguuc

SEQ ID NO: 558086 - RNA, 24 nt, Artificial Sequence
  Synthetic
acuuuucaguaaacuuugguguuc

SEQ ID NO: 558087 - RNA, 18 nt, Artificial Sequence
  Synthetic
cuuuucuuaaauguguuc

SEQ ID NO: 558088 - RNA, 19 nt, Artificial Sequence
  Synthetic
ucuuuucuuaaauguguuc

SEQ ID NO: 558089 - RNA, 20 nt, Artificial Sequence
  Synthetic
aucuuuucuuaaauguguuc

SEQ ID NO: 558090 - RNA, 21 nt, Artificial Sequence
  Synthetic
aaucuuuucuuaaauguguuc

SEQ ID NO: 558091 - RNA, 22 nt, Artificial Sequence
  Synthetic
aaaucuuuucuuaaauguguuc

SEQ ID NO: 558092 - RNA, 23 nt, Artificial Sequence
  Synthetic
aaaaucuuuucuuaaauguguuc

SEQ ID NO: 558093 - RNA, 24 nt, Artificial Sequence
  Synthetic
aaaaaucuuuucuuaaauguguuc

SEQ ID NO: 558094 - RNA, 18 nt, Artificial Sequence
  Synthetic
agugaauuaacuguguuc

SEQ ID NO: 558095 - RNA, 19 nt, Artificial Sequence
  Synthetic
aagugaauuaacuguguuc

SEQ ID NO: 558096 - RNA, 20 nt, Artificial Sequence
  Synthetic
caagugaauuaacuguguuc

SEQ ID NO: 558097 - RNA, 21 nt, Artificial Sequence
  Synthetic
ccaagugaauuaacuguguuc

SEQ ID NO: 558098 - RNA, 22 nt, Artificial Sequence
  Synthetic
uccaagugaauuaacuguguuc

SEQ ID NO: 558099 - RNA, 23 nt, Artificial Sequence
  Synthetic
uuccaagugaauuaacuguguuc

SEQ ID NO: 558100 - RNA, 24 nt, Artificial Sequence
  Synthetic
uuuccaagugaauuaacuguguuc

SEQ ID NO: 558101 - RNA, 18 nt, Artificial Sequence
  Synthetic
uuaggaucuacuguguuc

SEQ ID NO: 558102 - RNA, 19 nt, Artificial Sequence
  Synthetic
uuuaggaucuacuguguuc

SEQ ID NO: 558103 - RNA, 20 nt, Artificial Sequence
  Synthetic
auuuaggaucuacuguguuc

SEQ ID NO: 558104 - RNA, 21 nt, Artificial Sequence
  Synthetic
gauuuaggaucuacuguguuc

SEQ ID NO: 558105 - RNA, 22 nt, Artificial Sequence
  Synthetic
cgauuuaggaucuacuguguuc

SEQ ID NO: 558106 - RNA, 23 nt, Artificial Sequence
  Synthetic
ucgauuuaggaucuacuguguuc

SEQ ID NO: 558107 - RNA, 24 nt, Artificial Sequence
  Synthetic
aucgauuuaggaucuacuguguuc

SEQ ID NO: 558108 - RNA, 18 nt, Artificial Sequence
  Synthetic
uucaagauaauauuguuc

SEQ ID NO: 558109 - RNA, 19 nt, Artificial Sequence
  Synthetic
auucaagauaauauuguuc

SEQ ID NO: 558110 - RNA, 20 nt, Artificial Sequence
  Synthetic
uauucaagauaauauuguuc

SEQ ID NO: 558111 - RNA, 21 nt, Artificial Sequence
  Synthetic
auauucaagauaauauuguuc

SEQ ID NO: 558112 - RNA, 22 nt, Artificial Sequence
  Synthetic
gauauucaagauaauauuguuc

SEQ ID NO: 558113 - RNA, 23 nt, Artificial Sequence
  Synthetic
agauauucaagauaauauuguuc

SEQ ID NO: 558114 - RNA, 24 nt, Artificial Sequence
  Synthetic
gagauauucaagauaauauuguuc

SEQ ID NO: 558115 - RNA, 18 nt, Artificial Sequence
  Synthetic
gggagugaaaauuuguuc

SEQ ID NO: 558116 - RNA, 19 nt, Artificial Sequence
  Synthetic
agggagugaaaauuuguuc

SEQ ID NO: 558117 - RNA, 20 nt, Artificial Sequence
  Synthetic
aagggagugaaaauuuguuc

SEQ ID NO: 558118 - RNA, 21 nt, Artificial Sequence
  Synthetic
caagggagugaaaauuuguuc

SEQ ID NO: 558119 - RNA, 22 nt, Artificial Sequence
  Synthetic
ccaagggagugaaaauuuguuc

SEQ ID NO: 558120 - RNA, 23 nt, Artificial Sequence
  Synthetic
cccaagggagugaaaauuuguuc

SEQ ID NO: 558121 - RNA, 24 nt, Artificial Sequence
  Synthetic
ccccaagggagugaaaauuuguuc

SEQ ID NO: 558122 - RNA, 18 nt, Artificial Sequence
  Synthetic
gccagcagagguuuguuc

SEQ ID NO: 558123 - RNA, 19 nt, Artificial Sequence
  Synthetic
agccagcagagguuuguuc

SEQ ID NO: 558124 - RNA, 20 nt, Artificial Sequence
  Synthetic
aagccagcagagguuuguuc

SEQ ID NO: 558125 - RNA, 21 nt, Artificial Sequence
  Synthetic
gaagccagcagagguuuguuc

SEQ ID NO: 558126 - RNA, 22 nt, Artificial Sequence
  Synthetic
ggaagccagcagagguuuguuc

SEQ ID NO: 558127 - RNA, 23 nt, Artificial Sequence
  Synthetic
uggaagccagcagagguuuguuc

SEQ ID NO: 558128 - RNA, 24 nt, Artificial Sequence
  Synthetic
uuggaagccagcagagguuuguuc

SEQ ID NO: 558129 - RNA, 18 nt, Artificial Sequence
  Synthetic
cucauacaguuuuuguuc

SEQ ID NO: 558130 - RNA, 19 nt, Artificial Sequence
  Synthetic
gcucauacaguuuuuguuc

SEQ ID NO: 558131 - RNA, 20 nt, Artificial Sequence
  Synthetic
agcucauacaguuuuuguuc

SEQ ID NO: 558132 - RNA, 21 nt, Artificial Sequence
  Synthetic
aagcucauacaguuuuuguuc

SEQ ID NO: 558133 - RNA, 22 nt, Artificial Sequence
  Synthetic
gaagcucauacaguuuuuguuc

SEQ ID NO: 558134 - RNA, 23 nt, Artificial Sequence
  Synthetic
ugaagcucauacaguuuuuguuc

SEQ ID NO: 558135 - RNA, 24 nt, Artificial Sequence
  Synthetic
uugaagcucauacaguuuuuguuc

SEQ ID NO: 558136 - RNA, 18 nt, Artificial Sequence
  Synthetic
ucaggaaagacaaauuuc

SEQ ID NO: 558137 - RNA, 19 nt, Artificial Sequence
  Synthetic
gucaggaaagacaaauuuc

SEQ ID NO: 558138 - RNA, 20 nt, Artificial Sequence
  Synthetic
ugucaggaaagacaaauuuc

SEQ ID NO: 558139 - RNA, 21 nt, Artificial Sequence
  Synthetic
cugucaggaaagacaaauuuc

SEQ ID NO: 558140 - RNA, 22 nt, Artificial Sequence
  Synthetic
acugucaggaaagacaaauuuc

SEQ ID NO: 558141 - RNA, 23 nt, Artificial Sequence
  Synthetic
cacugucaggaaagacaaauuuc

SEQ ID NO: 558142 - RNA, 24 nt, Artificial Sequence
  Synthetic
acacugucaggaaagacaaauuuc

SEQ ID NO: 558143 - RNA, 18 nt, Artificial Sequence
  Synthetic
gugugcuauucaaauuuc

SEQ ID NO: 558144 - RNA, 19 nt, Artificial Sequence
  Synthetic
ugugugcuauucaaauuuc

SEQ ID NO: 558145 - RNA, 20 nt, Artificial Sequence
  Synthetic
cugugugcuauucaaauuuc

SEQ ID NO: 558146 - RNA, 21 nt, Artificial Sequence
  Synthetic
acugugugcuauucaaauuuc

SEQ ID NO: 558147 - RNA, 22 nt, Artificial Sequence
  Synthetic
uacugugugcuauucaaauuuc

SEQ ID NO: 558148 - RNA, 23 nt, Artificial Sequence
  Synthetic
auacugugugcuauucaaauuuc

SEQ ID NO: 558149 - RNA, 24 nt, Artificial Sequence
  Synthetic
aauacugugugcuauucaaauuuc

SEQ ID NO: 558150 - RNA, 18 nt, Artificial Sequence
  Synthetic
gaaugcguuucaaauuuc

SEQ ID NO: 558151 - RNA, 19 nt, Artificial Sequence
  Synthetic
agaaugcguuucaaauuuc

SEQ ID NO: 558152 - RNA, 20 nt, Artificial Sequence
  Synthetic
gagaaugcguuucaaauuuc

SEQ ID NO: 558153 - RNA, 21 nt, Artificial Sequence
  Synthetic
ugagaaugcguuucaaauuuc

SEQ ID NO: 558154 - RNA, 22 nt, Artificial Sequence
  Synthetic
cugagaaugcguuucaaauuuc

SEQ ID NO: 558155 - RNA, 23 nt, Artificial Sequence
  Synthetic
ccugagaaugcguuucaaauuuc

SEQ ID NO: 558156 - RNA, 24 nt, Artificial Sequence
  Synthetic
uccugagaaugcguuucaaauuuc

SEQ ID NO: 558157 - RNA, 18 nt, Artificial Sequence
  Synthetic
gaggaguguagaaauuuc

SEQ ID NO: 558158 - RNA, 19 nt, Artificial Sequence
  Synthetic
ugaggaguguagaaauuuc

SEQ ID NO: 558159 - RNA, 20 nt, Artificial Sequence
  Synthetic
augaggaguguagaaauuuc

SEQ ID NO: 558160 - RNA, 21 nt, Artificial Sequence
  Synthetic
aaugaggaguguagaaauuuc

SEQ ID NO: 558161 - RNA, 22 nt, Artificial Sequence
  Synthetic
aaaugaggaguguagaaauuuc

SEQ ID NO: 558162 - RNA, 23 nt, Artificial Sequence
  Synthetic
gaaaugaggaguguagaaauuuc

SEQ ID NO: 558163 - RNA, 24 nt, Artificial Sequence
  Synthetic
ggaaaugaggaguguagaaauuuc

SEQ ID NO: 558164 - RNA, 18 nt, Artificial Sequence
  Synthetic
gcagauucacuaaauuuc

SEQ ID NO: 558165 - RNA, 19 nt, Artificial Sequence
  Synthetic
ggcagauucacuaaauuuc

SEQ ID NO: 558166 - RNA, 20 nt, Artificial Sequence
  Synthetic
aggcagauucacuaaauuuc

SEQ ID NO: 558167 - RNA, 21 nt, Artificial Sequence
  Synthetic
aaggcagauucacuaaauuuc

SEQ ID NO: 558168 - RNA, 22 nt, Artificial Sequence
  Synthetic
aaaggcagauucacuaaauuuc

SEQ ID NO: 558169 - RNA, 23 nt, Artificial Sequence
  Synthetic
caaaggcagauucacuaaauuuc

SEQ ID NO: 558170 - RNA, 24 nt, Artificial Sequence
  Synthetic
gcaaaggcagauucacuaaauuuc

SEQ ID NO: 558171 - RNA, 18 nt, Artificial Sequence
  Synthetic
uucauaucccuaaauuuc

SEQ ID NO: 558172 - RNA, 19 nt, Artificial Sequence
  Synthetic
cuucauaucccuaaauuuc

SEQ ID NO: 558173 - RNA, 20 nt, Artificial Sequence
  Synthetic
acuucauaucccuaaauuuc

SEQ ID NO: 558174 - RNA, 21 nt, Artificial Sequence
  Synthetic
uacuucauaucccuaaauuuc

SEQ ID NO: 558175 - RNA, 22 nt, Artificial Sequence
  Synthetic
uuacuucauaucccuaaauuuc

SEQ ID NO: 558176 - RNA, 23 nt, Artificial Sequence
  Synthetic
uuuacuucauaucccuaaauuuc

SEQ ID NO: 558177 - RNA, 24 nt, Artificial Sequence
  Synthetic
uuuuacuucauaucccuaaauuuc

SEQ ID NO: 558178 - RNA, 18 nt, Artificial Sequence
  Synthetic
uaaauggaaaacaauuuc

SEQ ID NO: 558179 - RNA, 19 nt, Artificial Sequence
  Synthetic
auaaauggaaaacaauuuc

SEQ ID NO: 558180 - RNA, 20 nt, Artificial Sequence
  Synthetic
aauaaauggaaaacaauuuc

SEQ ID NO: 558181 - RNA, 21 nt, Artificial Sequence
  Synthetic
aaauaaauggaaaacaauuuc

SEQ ID NO: 558182 - RNA, 22 nt, Artificial Sequence
  Synthetic
aaaauaaauggaaaacaauuuc

SEQ ID NO: 558183 - RNA, 23 nt, Artificial Sequence
  Synthetic
aaaaauaaauggaaaacaauuuc

SEQ ID NO: 558184 - RNA, 24 nt, Artificial Sequence
  Synthetic
uaaaaauaaauggaaaacaauuuc

SEQ ID NO: 558185 - RNA, 18 nt, Artificial Sequence
  Synthetic
ucuaaaggacacaauuuc

SEQ ID NO: 558186 - RNA, 19 nt, Artificial Sequence
  Synthetic
uucuaaaggacacaauuuc

SEQ ID NO: 558187 - RNA, 20 nt, Artificial Sequence
  Synthetic
guucuaaaggacacaauuuc

SEQ ID NO: 558188 - RNA, 21 nt, Artificial Sequence
  Synthetic
aguucuaaaggacacaauuuc

SEQ ID NO: 558189 - RNA, 22 nt, Artificial Sequence
  Synthetic
caguucuaaaggacacaauuuc

SEQ ID NO: 558190 - RNA, 23 nt, Artificial Sequence
  Synthetic
ccaguucuaaaggacacaauuuc

SEQ ID NO: 558191 - RNA, 24 nt, Artificial Sequence
  Synthetic
gccaguucuaaaggacacaauuuc

SEQ ID NO: 558192 - RNA, 18 nt, Artificial Sequence
  Synthetic
aaagggccaugcaauuuc

SEQ ID NO: 558193 - RNA, 19 nt, Artificial Sequence
  Synthetic
uaaagggccaugcaauuuc

SEQ ID NO: 558194 - RNA, 20 nt, Artificial Sequence
  Synthetic
cuaaagggccaugcaauuuc

SEQ ID NO: 558195 - RNA, 21 nt, Artificial Sequence
  Synthetic
ucuaaagggccaugcaauuuc

SEQ ID NO: 558196 - RNA, 22 nt, Artificial Sequence
  Synthetic
cucuaaagggccaugcaauuuc

SEQ ID NO: 558197 - RNA, 23 nt, Artificial Sequence
  Synthetic
ucucuaaagggccaugcaauuuc

SEQ ID NO: 558198 - RNA, 24 nt, Artificial Sequence
  Synthetic
gucucuaaagggccaugcaauuuc

SEQ ID NO: 558199 - RNA, 18 nt, Artificial Sequence
  Synthetic
gugacaaccaagaauuuc

SEQ ID NO: 558200 - RNA, 19 nt, Artificial Sequence
  Synthetic
ugugacaaccaagaauuuc

SEQ ID NO: 558201 - RNA, 20 nt, Artificial Sequence
  Synthetic
augugacaaccaagaauuuc

SEQ ID NO: 558202 - RNA, 21 nt, Artificial Sequence
  Synthetic
aaugugacaaccaagaauuuc

SEQ ID NO: 558203 - RNA, 22 nt, Artificial Sequence
  Synthetic
caaugugacaaccaagaauuuc

SEQ ID NO: 558204 - RNA, 23 nt, Artificial Sequence
  Synthetic
ccaaugugacaaccaagaauuuc

SEQ ID NO: 558205 - RNA, 24 nt, Artificial Sequence
  Synthetic
cccaaugugacaaccaagaauuuc

SEQ ID NO: 558206 - RNA, 18 nt, Artificial Sequence
  Synthetic
cuacugaaucagaauuuc

SEQ ID NO: 558207 - RNA, 19 nt, Artificial Sequence
  Synthetic
ucuacugaaucagaauuuc

SEQ ID NO: 558208 - RNA, 20 nt, Artificial Sequence
  Synthetic
gucuacugaaucagaauuuc

SEQ ID NO: 558209 - RNA, 21 nt, Artificial Sequence
  Synthetic
agucuacugaaucagaauuuc

SEQ ID NO: 558210 - RNA, 22 nt, Artificial Sequence
  Synthetic
aagucuacugaaucagaauuuc

SEQ ID NO: 558211 - RNA, 23 nt, Artificial Sequence
  Synthetic
uaagucuacugaaucagaauuuc

SEQ ID NO: 558212 - RNA, 24 nt, Artificial Sequence
  Synthetic
cuaagucuacugaaucagaauuuc

SEQ ID NO: 558213 - RNA, 18 nt, Artificial Sequence
  Synthetic
auaggaggucagaauuuc

SEQ ID NO: 558214 - RNA, 19 nt, Artificial Sequence
  Synthetic
cauaggaggucagaauuuc

SEQ ID NO: 558215 - RNA, 20 nt, Artificial Sequence
  Synthetic
ccauaggaggucagaauuuc

SEQ ID NO: 558216 - RNA, 21 nt, Artificial Sequence
  Synthetic
cccauaggaggucagaauuuc

SEQ ID NO: 558217 - RNA, 22 nt, Artificial Sequence
  Synthetic
ucccauaggaggucagaauuuc

SEQ ID NO: 558218 - RNA, 23 nt, Artificial Sequence
  Synthetic
cucccauaggaggucagaauuuc

SEQ ID NO: 558219 - RNA, 24 nt, Artificial Sequence
  Synthetic
acucccauaggaggucagaauuuc

SEQ ID NO: 558220 - RNA, 18 nt, Artificial Sequence
  Synthetic
ucaacgaucuugaauuuc

SEQ ID NO: 558221 - RNA, 19 nt, Artificial Sequence
  Synthetic
uucaacgaucuugaauuuc

SEQ ID NO: 558222 - RNA, 20 nt, Artificial Sequence
  Synthetic
auucaacgaucuugaauuuc

SEQ ID NO: 558223 - RNA, 21 nt, Artificial Sequence
  Synthetic
gauucaacgaucuugaauuuc

SEQ ID NO: 558224 - RNA, 22 nt, Artificial Sequence
  Synthetic
agauucaacgaucuugaauuuc

SEQ ID NO: 558225 - RNA, 23 nt, Artificial Sequence
  Synthetic
gagauucaacgaucuugaauuuc

SEQ ID NO: 558226 - RNA, 24 nt, Artificial Sequence
  Synthetic
agagauucaacgaucuugaauuuc

SEQ ID NO: 558227 - RNA, 18 nt, Artificial Sequence
  Synthetic
aauaauuugaauaauuuc

SEQ ID NO: 558228 - RNA, 19 nt, Artificial Sequence
  Synthetic
caauaauuugaauaauuuc

SEQ ID NO: 558229 - RNA, 20 nt, Artificial Sequence
  Synthetic
acaauaauuugaauaauuuc

SEQ ID NO: 558230 - RNA, 21 nt, Artificial Sequence
  Synthetic
gacaauaauuugaauaauuuc

SEQ ID NO: 558231 - RNA, 22 nt, Artificial Sequence
  Synthetic
agacaauaauuugaauaauuuc

SEQ ID NO: 558232 - RNA, 23 nt, Artificial Sequence
  Synthetic
aagacaauaauuugaauaauuuc

SEQ ID NO: 558233 - RNA, 24 nt, Artificial Sequence
  Synthetic
aaagacaauaauuugaauaauuuc

SEQ ID NO: 558234 - RNA, 18 nt, Artificial Sequence
  Synthetic
cagcucuccccuaauuuc

SEQ ID NO: 558235 - RNA, 19 nt, Artificial Sequence
  Synthetic
ucagcucuccccuaauuuc

SEQ ID NO: 558236 - RNA, 20 nt, Artificial Sequence
  Synthetic
cucagcucuccccuaauuuc

SEQ ID NO: 558237 - RNA, 21 nt, Artificial Sequence
  Synthetic
ucucagcucuccccuaauuuc

SEQ ID NO: 558238 - RNA, 22 nt, Artificial Sequence
  Synthetic
aucucagcucuccccuaauuuc

SEQ ID NO: 558239 - RNA, 23 nt, Artificial Sequence
  Synthetic
gaucucagcucuccccuaauuuc

SEQ ID NO: 558240 - RNA, 24 nt, Artificial Sequence
  Synthetic
ggaucucagcucuccccuaauuuc

SEQ ID NO: 558241 - RNA, 18 nt, Artificial Sequence
  Synthetic
aaucaaaauauuaauuuc

SEQ ID NO: 558242 - RNA, 19 nt, Artificial Sequence
  Synthetic
caaucaaaauauuaauuuc

SEQ ID NO: 558243 - RNA, 20 nt, Artificial Sequence
  Synthetic
acaaucaaaauauuaauuuc

SEQ ID NO: 558244 - RNA, 21 nt, Artificial Sequence
  Synthetic
uacaaucaaaauauuaauuuc

SEQ ID NO: 558245 - RNA, 22 nt, Artificial Sequence
  Synthetic
auacaaucaaaauauuaauuuc

SEQ ID NO: 558246 - RNA, 23 nt, Artificial Sequence
  Synthetic
uauacaaucaaaauauuaauuuc

SEQ ID NO: 558247 - RNA, 24 nt, Artificial Sequence
  Synthetic
auauacaaucaaaauauuaauuuc

SEQ ID NO: 558248 - RNA, 18 nt, Artificial Sequence
  Synthetic
aggguuggucuuaauuuc

SEQ ID NO: 558249 - RNA, 19 nt, Artificial Sequence
  Synthetic
uaggguuggucuuaauuuc

SEQ ID NO: 558250 - RNA, 20 nt, Artificial Sequence
  Synthetic
cuaggguuggucuuaauuuc

SEQ ID NO: 558251 - RNA, 21 nt, Artificial Sequence
  Synthetic
gcuaggguuggucuuaauuuc

SEQ ID NO: 558252 - RNA, 22 nt, Artificial Sequence
  Synthetic
ugcuaggguuggucuuaauuuc

SEQ ID NO: 558253 - RNA, 23 nt, Artificial Sequence
  Synthetic
uugcuaggguuggucuuaauuuc

SEQ ID NO: 558254 - RNA, 24 nt, Artificial Sequence
  Synthetic
auugcuaggguuggucuuaauuuc

SEQ ID NO: 558255 - RNA, 18 nt, Artificial Sequence
  Synthetic
cuuuuuaaauaacauuuc

SEQ ID NO: 558256 - RNA, 19 nt, Artificial Sequence
  Synthetic
acuuuuuaaauaacauuuc

SEQ ID NO: 558257 - RNA, 20 nt, Artificial Sequence
  Synthetic
gacuuuuuaaauaacauuuc

SEQ ID NO: 558258 - RNA, 21 nt, Artificial Sequence
  Synthetic
ugacuuuuuaaauaacauuuc

SEQ ID NO: 558259 - RNA, 22 nt, Artificial Sequence
  Synthetic
cugacuuuuuaaauaacauuuc

SEQ ID NO: 558260 - RNA, 23 nt, Artificial Sequence
  Synthetic
ucugacuuuuuaaauaacauuuc

SEQ ID NO: 558261 - RNA, 24 nt, Artificial Sequence
  Synthetic
uucugacuuuuuaaauaacauuuc

SEQ ID NO: 558262 - RNA, 18 nt, Artificial Sequence
  Synthetic
aaccuaaugucacauuuc

SEQ ID NO: 558263 - RNA, 19 nt, Artificial Sequence
  Synthetic
caaccuaaugucacauuuc

SEQ ID NO: 558264 - RNA, 20 nt, Artificial Sequence
  Synthetic
acaaccuaaugucacauuuc

SEQ ID NO: 558265 - RNA, 21 nt, Artificial Sequence
  Synthetic
gacaaccuaaugucacauuuc

SEQ ID NO: 558266 - RNA, 22 nt, Artificial Sequence
  Synthetic
ugacaaccuaaugucacauuuc

SEQ ID NO: 558267 - RNA, 23 nt, Artificial Sequence
  Synthetic
uugacaaccuaaugucacauuuc

SEQ ID NO: 558268 - RNA, 24 nt, Artificial Sequence
  Synthetic
auugacaaccuaaugucacauuuc

SEQ ID NO: 558269 - RNA, 18 nt, Artificial Sequence
  Synthetic
gcuggugcuucacauuuc

SEQ ID NO: 558270 - RNA, 19 nt, Artificial Sequence
  Synthetic
agcuggugcuucacauuuc

SEQ ID NO: 558271 - RNA, 20 nt, Artificial Sequence
  Synthetic
uagcuggugcuucacauuuc

SEQ ID NO: 558272 - RNA, 21 nt, Artificial Sequence
  Synthetic
guagcuggugcuucacauuuc

SEQ ID NO: 558273 - RNA, 22 nt, Artificial Sequence
  Synthetic
aguagcuggugcuucacauuuc

SEQ ID NO: 558274 - RNA, 23 nt, Artificial Sequence
  Synthetic
caguagcuggugcuucacauuuc

SEQ ID NO: 558275 - RNA, 24 nt, Artificial Sequence
  Synthetic
gcaguagcuggugcuucacauuuc

SEQ ID NO: 558276 - RNA, 18 nt, Artificial Sequence
  Synthetic
cuacauuguucacauuuc

SEQ ID NO: 558277 - RNA, 19 nt, Artificial Sequence
  Synthetic
ucuacauuguucacauuuc

SEQ ID NO: 558278 - RNA, 20 nt, Artificial Sequence
  Synthetic
uucuacauuguucacauuuc

SEQ ID NO: 558279 - RNA, 21 nt, Artificial Sequence
  Synthetic
auucuacauuguucacauuuc

SEQ ID NO: 558280 - RNA, 22 nt, Artificial Sequence
  Synthetic
uauucuacauuguucacauuuc

SEQ ID NO: 558281 - RNA, 23 nt, Artificial Sequence
  Synthetic
uuauucuacauuguucacauuuc

SEQ ID NO: 558282 - RNA, 24 nt, Artificial Sequence
  Synthetic
guuauucuacauuguucacauuuc

SEQ ID NO: 558283 - RNA, 18 nt, Artificial Sequence
  Synthetic
uaugacugaauacauuuc

SEQ ID NO: 558284 - RNA, 19 nt, Artificial Sequence
  Synthetic
cuaugacugaauacauuuc

SEQ ID NO: 558285 - RNA, 20 nt, Artificial Sequence
  Synthetic
gcuaugacugaauacauuuc

SEQ ID NO: 558286 - RNA, 21 nt, Artificial Sequence
  Synthetic
agcuaugacugaauacauuuc

SEQ ID NO: 558287 - RNA, 22 nt, Artificial Sequence
  Synthetic
cagcuaugacugaauacauuuc

SEQ ID NO: 558288 - RNA, 23 nt, Artificial Sequence
  Synthetic
gcagcuaugacugaauacauuuc

SEQ ID NO: 558289 - RNA, 24 nt, Artificial Sequence
  Synthetic
ggcagcuaugacugaauacauuuc

SEQ ID NO: 558290 - RNA, 18 nt, Artificial Sequence
  Synthetic
auaucaaacauacauuuc

SEQ ID NO: 558291 - RNA, 19 nt, Artificial Sequence
  Synthetic
uauaucaaacauacauuuc

SEQ ID NO: 558292 - RNA, 20 nt, Artificial Sequence
  Synthetic
auauaucaaacauacauuuc

SEQ ID NO: 558293 - RNA, 21 nt, Artificial Sequence
  Synthetic
aauauaucaaacauacauuuc

SEQ ID NO: 558294 - RNA, 22 nt, Artificial Sequence
  Synthetic
uaauauaucaaacauacauuuc

SEQ ID NO: 558295 - RNA, 23 nt, Artificial Sequence
  Synthetic
uuaauauaucaaacauacauuuc

SEQ ID NO: 558296 - RNA, 24 nt, Artificial Sequence
  Synthetic
uuuaauauaucaaacauacauuuc

SEQ ID NO: 558297 - RNA, 18 nt, Artificial Sequence
  Synthetic
ccuuauuauuuacauuuc

SEQ ID NO: 558298 - RNA, 19 nt, Artificial Sequence
  Synthetic
uccuuauuauuuacauuuc

SEQ ID NO: 558299 - RNA, 20 nt, Artificial Sequence
  Synthetic
cuccuuauuauuuacauuuc

SEQ ID NO: 558300 - RNA, 21 nt, Artificial Sequence
  Synthetic
ccuccuuauuauuuacauuuc

SEQ ID NO: 558301 - RNA, 22 nt, Artificial Sequence
  Synthetic
accuccuuauuauuuacauuuc

SEQ ID NO: 558302 - RNA, 23 nt, Artificial Sequence
  Synthetic
uaccuccuuauuauuuacauuuc

SEQ ID NO: 558303 - RNA, 24 nt, Artificial Sequence
  Synthetic
auaccuccuuauuauuuacauuuc

SEQ ID NO: 558304 - RNA, 18 nt, Artificial Sequence
  Synthetic
uucuaauuuucccauuuc

SEQ ID NO: 558305 - RNA, 19 nt, Artificial Sequence
  Synthetic
uuucuaauuuucccauuuc

SEQ ID NO: 558306 - RNA, 20 nt, Artificial Sequence
  Synthetic
auuucuaauuuucccauuuc

SEQ ID NO: 558307 - RNA, 21 nt, Artificial Sequence
  Synthetic
cauuucuaauuuucccauuuc

SEQ ID NO: 558308 - RNA, 22 nt, Artificial Sequence
  Synthetic
acauuucuaauuuucccauuuc

SEQ ID NO: 558309 - RNA, 23 nt, Artificial Sequence
  Synthetic
aacauuucuaauuuucccauuuc

SEQ ID NO: 558310 - RNA, 24 nt, Artificial Sequence
  Synthetic
aaacauuucuaauuuucccauuuc

SEQ ID NO: 558311 - RNA, 18 nt, Artificial Sequence
  Synthetic
uuucuuuuugagcauuuc

SEQ ID NO: 558312 - RNA, 19 nt, Artificial Sequence
  Synthetic
auuucuuuuugagcauuuc

SEQ ID NO: 558313 - RNA, 20 nt, Artificial Sequence
  Synthetic
gauuucuuuuugagcauuuc

SEQ ID NO: 558314 - RNA, 21 nt, Artificial Sequence
  Synthetic
ugauuucuuuuugagcauuuc

SEQ ID NO: 558315 - RNA, 22 nt, Artificial Sequence
  Synthetic
cugauuucuuuuugagcauuuc

SEQ ID NO: 558316 - RNA, 23 nt, Artificial Sequence
  Synthetic
gcugauuucuuuuugagcauuuc

SEQ ID NO: 558317 - RNA, 24 nt, Artificial Sequence
  Synthetic
agcugauuucuuuuugagcauuuc

SEQ ID NO: 558318 - RNA, 18 nt, Artificial Sequence
  Synthetic
auuuagugaaaucauuuc

SEQ ID NO: 558319 - RNA, 19 nt, Artificial Sequence
  Synthetic
uauuuagugaaaucauuuc

SEQ ID NO: 558320 - RNA, 20 nt, Artificial Sequence
  Synthetic
cuauuuagugaaaucauuuc

SEQ ID NO: 558321 - RNA, 21 nt, Artificial Sequence
  Synthetic
acuauuuagugaaaucauuuc

SEQ ID NO: 558322 - RNA, 22 nt, Artificial Sequence
  Synthetic
cacuauuuagugaaaucauuuc

SEQ ID NO: 558323 - RNA, 23 nt, Artificial Sequence
  Synthetic
ucacuauuuagugaaaucauuuc

SEQ ID NO: 558324 - RNA, 24 nt, Artificial Sequence
  Synthetic
uucacuauuuagugaaaucauuuc

SEQ ID NO: 558325 - RNA, 18 nt, Artificial Sequence
  Synthetic
gaaugaggauaucauuuc

SEQ ID NO: 558326 - RNA, 19 nt, Artificial Sequence
  Synthetic
agaaugaggauaucauuuc

SEQ ID NO: 558327 - RNA, 20 nt, Artificial Sequence
  Synthetic
aagaaugaggauaucauuuc

SEQ ID NO: 558328 - RNA, 21 nt, Artificial Sequence
  Synthetic
caagaaugaggauaucauuuc

SEQ ID NO: 558329 - RNA, 22 nt, Artificial Sequence
  Synthetic
acaagaaugaggauaucauuuc

SEQ ID NO: 558330 - RNA, 23 nt, Artificial Sequence
  Synthetic
gacaagaaugaggauaucauuuc

SEQ ID NO: 558331 - RNA, 24 nt, Artificial Sequence
  Synthetic
agacaagaaugaggauaucauuuc

SEQ ID NO: 558332 - RNA, 18 nt, Artificial Sequence
  Synthetic
guucauucaagucauuuc

SEQ ID NO: 558333 - RNA, 19 nt, Artificial Sequence
  Synthetic
uguucauucaagucauuuc

SEQ ID NO: 558334 - RNA, 20 nt, Artificial Sequence
  Synthetic
guguucauucaagucauuuc

SEQ ID NO: 558335 - RNA, 21 nt, Artificial Sequence
  Synthetic
gguguucauucaagucauuuc

SEQ ID NO: 558336 - RNA, 22 nt, Artificial Sequence
  Synthetic
cgguguucauucaagucauuuc

SEQ ID NO: 558337 - RNA, 23 nt, Artificial Sequence
  Synthetic
ucgguguucauucaagucauuuc

SEQ ID NO: 558338 - RNA, 24 nt, Artificial Sequence
  Synthetic
uucgguguucauucaagucauuuc

SEQ ID NO: 558339 - RNA, 18 nt, Artificial Sequence
  Synthetic
acuguauuuggucauuuc

SEQ ID NO: 558340 - RNA, 19 nt, Artificial Sequence
  Synthetic
aacuguauuuggucauuuc

SEQ ID NO: 558341 - RNA, 20 nt, Artificial Sequence
  Synthetic
aaacuguauuuggucauuuc

SEQ ID NO: 558342 - RNA, 21 nt, Artificial Sequence
  Synthetic
aaaacuguauuuggucauuuc

SEQ ID NO: 558343 - RNA, 22 nt, Artificial Sequence
  Synthetic
gaaaacuguauuuggucauuuc

SEQ ID NO: 558344 - RNA, 23 nt, Artificial Sequence
  Synthetic
ugaaaacuguauuuggucauuuc

SEQ ID NO: 558345 - RNA, 24 nt, Artificial Sequence
  Synthetic
augaaaacuguauuuggucauuuc

SEQ ID NO: 558346 - RNA, 18 nt, Artificial Sequence
  Synthetic
agcaagaagauucauuuc

SEQ ID NO: 558347 - RNA, 19 nt, Artificial Sequence
  Synthetic
aagcaagaagauucauuuc

SEQ ID NO: 558348 - RNA, 20 nt, Artificial Sequence
  Synthetic
gaagcaagaagauucauuuc

SEQ ID NO: 558349 - RNA, 21 nt, Artificial Sequence
  Synthetic
ggaagcaagaagauucauuuc

SEQ ID NO: 558350 - RNA, 22 nt, Artificial Sequence
  Synthetic
gggaagcaagaagauucauuuc

SEQ ID NO: 558351 - RNA, 23 nt, Artificial Sequence
  Synthetic
agggaagcaagaagauucauuuc

SEQ ID NO: 558352 - RNA, 24 nt, Artificial Sequence
  Synthetic
aagggaagcaagaagauucauuuc

SEQ ID NO: 558353 - RNA, 18 nt, Artificial Sequence
  Synthetic
uauguacuuauucauuuc

SEQ ID NO: 558354 - RNA, 19 nt, Artificial Sequence
  Synthetic
auauguacuuauucauuuc

SEQ ID NO: 558355 - RNA, 20 nt, Artificial Sequence
  Synthetic
aauauguacuuauucauuuc

SEQ ID NO: 558356 - RNA, 21 nt, Artificial Sequence
  Synthetic
aaauauguacuuauucauuuc

SEQ ID NO: 558357 - RNA, 22 nt, Artificial Sequence
  Synthetic
caaauauguacuuauucauuuc

SEQ ID NO: 558358 - RNA, 23 nt, Artificial Sequence
  Synthetic
ucaaauauguacuuauucauuuc

SEQ ID NO: 558359 - RNA, 24 nt, Artificial Sequence
  Synthetic
aucaaauauguacuuauucauuuc

SEQ ID NO: 558360 - RNA, 18 nt, Artificial Sequence
  Synthetic
auuauaauacuucauuuc

SEQ ID NO: 558361 - RNA, 19 nt, Artificial Sequence
  Synthetic
cauuauaauacuucauuuc

SEQ ID NO: 558362 - RNA, 20 nt, Artificial Sequence
  Synthetic
acauuauaauacuucauuuc

SEQ ID NO: 558363 - RNA, 21 nt, Artificial Sequence
  Synthetic
aacauuauaauacuucauuuc

SEQ ID NO: 558364 - RNA, 22 nt, Artificial Sequence
  Synthetic
aaacauuauaauacuucauuuc

SEQ ID NO: 558365 - RNA, 23 nt, Artificial Sequence
  Synthetic
aaaacauuauaauacuucauuuc

SEQ ID NO: 558366 - RNA, 24 nt, Artificial Sequence
  Synthetic
uaaaacauuauaauacuucauuuc

SEQ ID NO: 558367 - RNA, 18 nt, Artificial Sequence
  Synthetic
aauagacuuguucauuuc

SEQ ID NO: 558368 - RNA, 19 nt, Artificial Sequence
  Synthetic
aaauagacuuguucauuuc

SEQ ID NO: 558369 - RNA, 20 nt, Artificial Sequence
  Synthetic
aaaauagacuuguucauuuc

SEQ ID NO: 558370 - RNA, 21 nt, Artificial Sequence
  Synthetic
caaaauagacuuguucauuuc

SEQ ID NO: 558371 - RNA, 22 nt, Artificial Sequence
  Synthetic
ucaaaauagacuuguucauuuc

SEQ ID NO: 558372 - RNA, 23 nt, Artificial Sequence
  Synthetic
gucaaaauagacuuguucauuuc

SEQ ID NO: 558373 - RNA, 24 nt, Artificial Sequence
  Synthetic
agucaaaauagacuuguucauuuc

SEQ ID NO: 558374 - RNA, 18 nt, Artificial Sequence
  Synthetic
agugguuuaaaagauuuc

SEQ ID NO: 558375 - RNA, 19 nt, Artificial Sequence
  Synthetic
cagugguuuaaaagauuuc

SEQ ID NO: 558376 - RNA, 20 nt, Artificial Sequence
  Synthetic
ccagugguuuaaaagauuuc

SEQ ID NO: 558377 - RNA, 21 nt, Artificial Sequence
  Synthetic
uccagugguuuaaaagauuuc

SEQ ID NO: 558378 - RNA, 22 nt, Artificial Sequence
  Synthetic
uuccagugguuuaaaagauuuc

SEQ ID NO: 558379 - RNA, 23 nt, Artificial Sequence
  Synthetic
uuuccagugguuuaaaagauuuc

SEQ ID NO: 558380 - RNA, 24 nt, Artificial Sequence
  Synthetic
auuuccagugguuuaaaagauuuc

SEQ ID NO: 558381 - RNA, 18 nt, Artificial Sequence
  Synthetic
caaaaugaaccagauuuc

SEQ ID NO: 558382 - RNA, 19 nt, Artificial Sequence
  Synthetic
acaaaaugaaccagauuuc

SEQ ID NO: 558383 - RNA, 20 nt, Artificial Sequence
  Synthetic
uacaaaaugaaccagauuuc

SEQ ID NO: 558384 - RNA, 21 nt, Artificial Sequence
  Synthetic
auacaaaaugaaccagauuuc

SEQ ID NO: 558385 - RNA, 22 nt, Artificial Sequence
  Synthetic
aauacaaaaugaaccagauuuc

SEQ ID NO: 558386 - RNA, 23 nt, Artificial Sequence
  Synthetic
uaauacaaaaugaaccagauuuc

SEQ ID NO: 558387 - RNA, 24 nt, Artificial Sequence
  Synthetic
uuaauacaaaaugaaccagauuuc

SEQ ID NO: 558388 - RNA, 18 nt, Artificial Sequence
  Synthetic
uacagucuaccagauuuc

SEQ ID NO: 558389 - RNA, 19 nt, Artificial Sequence
  Synthetic
uuacagucuaccagauuuc

SEQ ID NO: 558390 - RNA, 20 nt, Artificial Sequence
  Synthetic
cuuacagucuaccagauuuc

SEQ ID NO: 558391 - RNA, 21 nt, Artificial Sequence
  Synthetic
gcuuacagucuaccagauuuc

SEQ ID NO: 558392 - RNA, 22 nt, Artificial Sequence
  Synthetic
ggcuuacagucuaccagauuuc

SEQ ID NO: 558393 - RNA, 23 nt, Artificial Sequence
  Synthetic
gggcuuacagucuaccagauuuc

SEQ ID NO: 558394 - RNA, 24 nt, Artificial Sequence
  Synthetic
ugggcuuacagucuaccagauuuc

SEQ ID NO: 558395 - RNA, 18 nt, Artificial Sequence
  Synthetic
uuuuugaaaauagauuuc

SEQ ID NO: 558396 - RNA, 19 nt, Artificial Sequence
  Synthetic
auuuuugaaaauagauuuc

SEQ ID NO: 558397 - RNA, 20 nt, Artificial Sequence
  Synthetic
uauuuuugaaaauagauuuc

SEQ ID NO: 558398 - RNA, 21 nt, Artificial Sequence
  Synthetic
auauuuuugaaaauagauuuc

SEQ ID NO: 558399 - RNA, 22 nt, Artificial Sequence
  Synthetic
uauauuuuugaaaauagauuuc

SEQ ID NO: 558400 - RNA, 23 nt, Artificial Sequence
  Synthetic
guauauuuuugaaaauagauuuc

SEQ ID NO: 558401 - RNA, 24 nt, Artificial Sequence
  Synthetic
aguauauuuuugaaaauagauuuc

SEQ ID NO: 558402 - RNA, 18 nt, Artificial Sequence
  Synthetic
auguuagaaauagauuuc

SEQ ID NO: 558403 - RNA, 19 nt, Artificial Sequence
  Synthetic
gauguuagaaauagauuuc

SEQ ID NO: 558404 - RNA, 20 nt, Artificial Sequence
  Synthetic
agauguuagaaauagauuuc

SEQ ID NO: 558405 - RNA, 21 nt, Artificial Sequence
  Synthetic
cagauguuagaaauagauuuc

SEQ ID NO: 558406 - RNA, 22 nt, Artificial Sequence
  Synthetic
ucagauguuagaaauagauuuc

SEQ ID NO: 558407 - RNA, 23 nt, Artificial Sequence
  Synthetic
aucagauguuagaaauagauuuc

SEQ ID NO: 558408 - RNA, 24 nt, Artificial Sequence
  Synthetic
aaucagauguuagaaauagauuuc

SEQ ID NO: 558409 - RNA, 18 nt, Artificial Sequence
  Synthetic
aacuuacugcuagauuuc

SEQ ID NO: 558410 - RNA, 19 nt, Artificial Sequence
  Synthetic
caacuuacugcuagauuuc

SEQ ID NO: 558411 - RNA, 20 nt, Artificial Sequence
  Synthetic
ucaacuuacugcuagauuuc

SEQ ID NO: 558412 - RNA, 21 nt, Artificial Sequence
  Synthetic
uucaacuuacugcuagauuuc

SEQ ID NO: 558413 - RNA, 22 nt, Artificial Sequence
  Synthetic
cuucaacuuacugcuagauuuc

SEQ ID NO: 558414 - RNA, 23 nt, Artificial Sequence
  Synthetic
ucuucaacuuacugcuagauuuc

SEQ ID NO: 558415 - RNA, 24 nt, Artificial Sequence
  Synthetic
uucuucaacuuacugcuagauuuc

SEQ ID NO: 558416 - RNA, 18 nt, Artificial Sequence
  Synthetic
aaaauaugaguagauuuc

SEQ ID NO: 558417 - RNA, 19 nt, Artificial Sequence
  Synthetic
caaaauaugaguagauuuc

SEQ ID NO: 558418 - RNA, 20 nt, Artificial Sequence
  Synthetic
acaaaauaugaguagauuuc

SEQ ID NO: 558419 - RNA, 21 nt, Artificial Sequence
  Synthetic
aacaaaauaugaguagauuuc

SEQ ID NO: 558420 - RNA, 22 nt, Artificial Sequence
  Synthetic
uaacaaaauaugaguagauuuc

SEQ ID NO: 558421 - RNA, 23 nt, Artificial Sequence
  Synthetic
auaacaaaauaugaguagauuuc

SEQ ID NO: 558422 - RNA, 24 nt, Artificial Sequence
  Synthetic
aauaacaaaauaugaguagauuuc

SEQ ID NO: 558423 - RNA, 18 nt, Artificial Sequence
  Synthetic
uugaggaauaucgauuuc

SEQ ID NO: 558424 - RNA, 19 nt, Artificial Sequence
  Synthetic
uuugaggaauaucgauuuc

SEQ ID NO: 558425 - RNA, 20 nt, Artificial Sequence
  Synthetic
cuuugaggaauaucgauuuc

SEQ ID NO: 558426 - RNA, 21 nt, Artificial Sequence
  Synthetic
gcuuugaggaauaucgauuuc

SEQ ID NO: 558427 - RNA, 22 nt, Artificial Sequence
  Synthetic
agcuuugaggaauaucgauuuc

SEQ ID NO: 558428 - RNA, 23 nt, Artificial Sequence
  Synthetic
aagcuuugaggaauaucgauuuc

SEQ ID NO: 558429 - RNA, 24 nt, Artificial Sequence
  Synthetic
caagcuuugaggaauaucgauuuc

SEQ ID NO: 558430 - RNA, 18 nt, Artificial Sequence
  Synthetic
uaauaguuuuaggauuuc

SEQ ID NO: 558431 - RNA, 19 nt, Artificial Sequence
  Synthetic
cuaauaguuuuaggauuuc

SEQ ID NO: 558432 - RNA, 20 nt, Artificial Sequence
  Synthetic
acuaauaguuuuaggauuuc

SEQ ID NO: 558433 - RNA, 21 nt, Artificial Sequence
  Synthetic
gacuaauaguuuuaggauuuc

SEQ ID NO: 558434 - RNA, 22 nt, Artificial Sequence
  Synthetic
cgacuaauaguuuuaggauuuc

SEQ ID NO: 558435 - RNA, 23 nt, Artificial Sequence
  Synthetic
gcgacuaauaguuuuaggauuuc

SEQ ID NO: 558436 - RNA, 24 nt, Artificial Sequence
  Synthetic
agcgacuaauaguuuuaggauuuc

SEQ ID NO: 558437 - RNA, 18 nt, Artificial Sequence
  Synthetic
auccaaauaauggauuuc

SEQ ID NO: 558438 - RNA, 19 nt, Artificial Sequence
  Synthetic
cauccaaauaauggauuuc

SEQ ID NO: 558439 - RNA, 20 nt, Artificial Sequence
  Synthetic
acauccaaauaauggauuuc

SEQ ID NO: 558440 - RNA, 21 nt, Artificial Sequence
  Synthetic
aacauccaaauaauggauuuc

SEQ ID NO: 558441 - RNA, 22 nt, Artificial Sequence
  Synthetic
aaacauccaaauaauggauuuc

SEQ ID NO: 558442 - RNA, 23 nt, Artificial Sequence
  Synthetic
aaaacauccaaauaauggauuuc

SEQ ID NO: 558443 - RNA, 24 nt, Artificial Sequence
  Synthetic
gaaaacauccaaauaauggauuuc

SEQ ID NO: 558444 - RNA, 18 nt, Artificial Sequence
  Synthetic
cuucagaauauggauuuc

SEQ ID NO: 558445 - RNA, 19 nt, Artificial Sequence
  Synthetic
acuucagaauauggauuuc

SEQ ID NO: 558446 - RNA, 20 nt, Artificial Sequence
  Synthetic
uacuucagaauauggauuuc

SEQ ID NO: 558447 - RNA, 21 nt, Artificial Sequence
  Synthetic
guacuucagaauauggauuuc

SEQ ID NO: 558448 - RNA, 22 nt, Artificial Sequence
  Synthetic
uguacuucagaauauggauuuc

SEQ ID NO: 558449 - RNA, 23 nt, Artificial Sequence
  Synthetic
cuguacuucagaauauggauuuc

SEQ ID NO: 558450 - RNA, 24 nt, Artificial Sequence
  Synthetic
acuguacuucagaauauggauuuc

SEQ ID NO: 558451 - RNA, 18 nt, Artificial Sequence
  Synthetic
aaguaagcuuuggauuuc

SEQ ID NO: 558452 - RNA, 19 nt, Artificial Sequence
  Synthetic
uaaguaagcuuuggauuuc

SEQ ID NO: 558453 - RNA, 20 nt, Artificial Sequence
  Synthetic
auaaguaagcuuuggauuuc

SEQ ID NO: 558454 - RNA, 21 nt, Artificial Sequence
  Synthetic
uauaaguaagcuuuggauuuc

SEQ ID NO: 558455 - RNA, 22 nt, Artificial Sequence
  Synthetic
auauaaguaagcuuuggauuuc

SEQ ID NO: 558456 - RNA, 23 nt, Artificial Sequence
  Synthetic
aauauaaguaagcuuuggauuuc

SEQ ID NO: 558457 - RNA, 24 nt, Artificial Sequence
  Synthetic
aaauauaaguaagcuuuggauuuc

SEQ ID NO: 558458 - RNA, 18 nt, Artificial Sequence
  Synthetic
caaacaauaugugauuuc

SEQ ID NO: 558459 - RNA, 19 nt, Artificial Sequence
  Synthetic
acaaacaauaugugauuuc

SEQ ID NO: 558460 - RNA, 20 nt, Artificial Sequence
  Synthetic
aacaaacaauaugugauuuc

SEQ ID NO: 558461 - RNA, 21 nt, Artificial Sequence
  Synthetic
aaacaaacaauaugugauuuc

SEQ ID NO: 558462 - RNA, 22 nt, Artificial Sequence
  Synthetic
caaacaaacaauaugugauuuc

SEQ ID NO: 558463 - RNA, 23 nt, Artificial Sequence
  Synthetic
acaaacaaacaauaugugauuuc

SEQ ID NO: 558464 - RNA, 24 nt, Artificial Sequence
  Synthetic
aacaaacaaacaauaugugauuuc

SEQ ID NO: 558465 - RNA, 18 nt, Artificial Sequence
  Synthetic
aaaauugauauugauuuc

SEQ ID NO: 558466 - RNA, 19 nt, Artificial Sequence
  Synthetic
uaaaauugauauugauuuc

SEQ ID NO: 558467 - RNA, 20 nt, Artificial Sequence
  Synthetic
auaaaauugauauugauuuc

SEQ ID NO: 558468 - RNA, 21 nt, Artificial Sequence
  Synthetic
cauaaaauugauauugauuuc

SEQ ID NO: 558469 - RNA, 22 nt, Artificial Sequence
  Synthetic
acauaaaauugauauugauuuc

SEQ ID NO: 558470 - RNA, 23 nt, Artificial Sequence
  Synthetic
uacauaaaauugauauugauuuc

SEQ ID NO: 558471 - RNA, 24 nt, Artificial Sequence
  Synthetic
uuacauaaaauugauauugauuuc

SEQ ID NO: 558472 - RNA, 18 nt, Artificial Sequence
  Synthetic
aaauuaaaaaaauauuuc

SEQ ID NO: 558473 - RNA, 19 nt, Artificial Sequence
  Synthetic
aaaauuaaaaaaauauuuc

SEQ ID NO: 558474 - RNA, 20 nt, Artificial Sequence
  Synthetic
aaaaauuaaaaaaauauuuc

SEQ ID NO: 558475 - RNA, 21 nt, Artificial Sequence
  Synthetic
uaaaaauuaaaaaaauauuuc

SEQ ID NO: 558476 - RNA, 22 nt, Artificial Sequence
  Synthetic
uuaaaaauuaaaaaaauauuuc

SEQ ID NO: 558477 - RNA, 23 nt, Artificial Sequence
  Synthetic
auuaaaaauuaaaaaaauauuuc

SEQ ID NO: 558478 - RNA, 24 nt, Artificial Sequence
  Synthetic
aauuaaaaauuaaaaaaauauuuc

SEQ ID NO: 558479 - RNA, 18 nt, Artificial Sequence
  Synthetic
cuuaguaguaaauauuuc

SEQ ID NO: 558480 - RNA, 19 nt, Artificial Sequence
  Synthetic
ccuuaguaguaaauauuuc

SEQ ID NO: 558481 - RNA, 20 nt, Artificial Sequence
  Synthetic
cccuuaguaguaaauauuuc

SEQ ID NO: 558482 - RNA, 21 nt, Artificial Sequence
  Synthetic
ccccuuaguaguaaauauuuc

SEQ ID NO: 558483 - RNA, 22 nt, Artificial Sequence
  Synthetic
uccccuuaguaguaaauauuuc

SEQ ID NO: 558484 - RNA, 23 nt, Artificial Sequence
  Synthetic
guccccuuaguaguaaauauuuc

SEQ ID NO: 558485 - RNA, 24 nt, Artificial Sequence
  Synthetic
uguccccuuaguaguaaauauuuc

SEQ ID NO: 558486 - RNA, 18 nt, Artificial Sequence
  Synthetic
uuuugcagucaauauuuc

SEQ ID NO: 558487 - RNA, 19 nt, Artificial Sequence
  Synthetic
auuuugcagucaauauuuc

SEQ ID NO: 558488 - RNA, 20 nt, Artificial Sequence
  Synthetic
gauuuugcagucaauauuuc

SEQ ID NO: 558489 - RNA, 21 nt, Artificial Sequence
  Synthetic
agauuuugcagucaauauuuc

SEQ ID NO: 558490 - RNA, 22 nt, Artificial Sequence
  Synthetic
uagauuuugcagucaauauuuc

SEQ ID NO: 558491 - RNA, 23 nt, Artificial Sequence
  Synthetic
auagauuuugcagucaauauuuc

SEQ ID NO: 558492 - RNA, 24 nt, Artificial Sequence
  Synthetic
cauagauuuugcagucaauauuuc

SEQ ID NO: 558493 - RNA, 18 nt, Artificial Sequence
  Synthetic
ugccuucuguaauauuuc

SEQ ID NO: 558494 - RNA, 19 nt, Artificial Sequence
  Synthetic
uugccuucuguaauauuuc

SEQ ID NO: 558495 - RNA, 20 nt, Artificial Sequence
  Synthetic
uuugccuucuguaauauuuc

SEQ ID NO: 558496 - RNA, 21 nt, Artificial Sequence
  Synthetic
uuuugccuucuguaauauuuc

SEQ ID NO: 558497 - RNA, 22 nt, Artificial Sequence
  Synthetic
uuuuugccuucuguaauauuuc

SEQ ID NO: 558498 - RNA, 23 nt, Artificial Sequence
  Synthetic
auuuuugccuucuguaauauuuc

SEQ ID NO: 558499 - RNA, 24 nt, Artificial Sequence
  Synthetic
aauuuuugccuucuguaauauuuc

SEQ ID NO: 558500 - RNA, 18 nt, Artificial Sequence
  Synthetic
gagacuucuuaauauuuc

SEQ ID NO: 558501 - RNA, 19 nt, Artificial Sequence
  Synthetic
ugagacuucuuaauauuuc

SEQ ID NO: 558502 - RNA, 20 nt, Artificial Sequence
  Synthetic
gugagacuucuuaauauuuc

SEQ ID NO: 558503 - RNA, 21 nt, Artificial Sequence
  Synthetic
ugugagacuucuuaauauuuc

SEQ ID NO: 558504 - RNA, 22 nt, Artificial Sequence
  Synthetic
augugagacuucuuaauauuuc

SEQ ID NO: 558505 - RNA, 23 nt, Artificial Sequence
  Synthetic
caugugagacuucuuaauauuuc

SEQ ID NO: 558506 - RNA, 24 nt, Artificial Sequence
  Synthetic
ucaugugagacuucuuaauauuuc

SEQ ID NO: 558507 - RNA, 18 nt, Artificial Sequence
  Synthetic
cuucauguuuaauauuuc

SEQ ID NO: 558508 - RNA, 19 nt, Artificial Sequence
  Synthetic
gcuucauguuuaauauuuc

SEQ ID NO: 558509 - RNA, 20 nt, Artificial Sequence
  Synthetic
agcuucauguuuaauauuuc

SEQ ID NO: 558510 - RNA, 21 nt, Artificial Sequence
  Synthetic
uagcuucauguuuaauauuuc

SEQ ID NO: 558511 - RNA, 22 nt, Artificial Sequence
  Synthetic
guagcuucauguuuaauauuuc

SEQ ID NO: 558512 - RNA, 23 nt, Artificial Sequence
  Synthetic
gguagcuucauguuuaauauuuc

SEQ ID NO: 558513 - RNA, 24 nt, Artificial Sequence
  Synthetic
ugguagcuucauguuuaauauuuc

SEQ ID NO: 558514 - RNA, 18 nt, Artificial Sequence
  Synthetic
cacaucgucccauauuuc

SEQ ID NO: 558515 - RNA, 19 nt, Artificial Sequence
  Synthetic
ucacaucgucccauauuuc

SEQ ID NO: 558516 - RNA, 20 nt, Artificial Sequence
  Synthetic
uucacaucgucccauauuuc

SEQ ID NO: 558517 - RNA, 21 nt, Artificial Sequence
  Synthetic
uuucacaucgucccauauuuc

SEQ ID NO: 558518 - RNA, 22 nt, Artificial Sequence
  Synthetic
uuuucacaucgucccauauuuc

SEQ ID NO: 558519 - RNA, 23 nt, Artificial Sequence
  Synthetic
cuuuucacaucgucccauauuuc

SEQ ID NO: 558520 - RNA, 24 nt, Artificial Sequence
  Synthetic
ucuuuucacaucgucccauauuuc

SEQ ID NO: 558521 - RNA, 18 nt, Artificial Sequence
  Synthetic
aaagcuucucuauauuuc

SEQ ID NO: 558522 - RNA, 19 nt, Artificial Sequence
  Synthetic
uaaagcuucucuauauuuc

SEQ ID NO: 558523 - RNA, 20 nt, Artificial Sequence
  Synthetic
uuaaagcuucucuauauuuc

SEQ ID NO: 558524 - RNA, 21 nt, Artificial Sequence
  Synthetic
cuuaaagcuucucuauauuuc

SEQ ID NO: 558525 - RNA, 22 nt, Artificial Sequence
  Synthetic
ucuuaaagcuucucuauauuuc

SEQ ID NO: 558526 - RNA, 23 nt, Artificial Sequence
  Synthetic
gucuuaaagcuucucuauauuuc

SEQ ID NO: 558527 - RNA, 24 nt, Artificial Sequence
  Synthetic
agucuuaaagcuucucuauauuuc

SEQ ID NO: 558528 - RNA, 18 nt, Artificial Sequence
  Synthetic
agguaguacuccuauuuc

SEQ ID NO: 558529 - RNA, 19 nt, Artificial Sequence
  Synthetic
cagguaguacuccuauuuc

SEQ ID NO: 558530 - RNA, 20 nt, Artificial Sequence
  Synthetic
ucagguaguacuccuauuuc

SEQ ID NO: 558531 - RNA, 21 nt, Artificial Sequence
  Synthetic
uucagguaguacuccuauuuc

SEQ ID NO: 558532 - RNA, 22 nt, Artificial Sequence
  Synthetic
cuucagguaguacuccuauuuc

SEQ ID NO: 558533 - RNA, 23 nt, Artificial Sequence
  Synthetic
ucuucagguaguacuccuauuuc

SEQ ID NO: 558534 - RNA, 24 nt, Artificial Sequence
  Synthetic
gucuucagguaguacuccuauuuc

SEQ ID NO: 558535 - RNA, 18 nt, Artificial Sequence
  Synthetic
ucuaucuuagucuauuuc

SEQ ID NO: 558536 - RNA, 19 nt, Artificial Sequence
  Synthetic
cucuaucuuagucuauuuc

SEQ ID NO: 558537 - RNA, 20 nt, Artificial Sequence
  Synthetic
ucucuaucuuagucuauuuc

SEQ ID NO: 558538 - RNA, 21 nt, Artificial Sequence
  Synthetic
cucucuaucuuagucuauuuc

SEQ ID NO: 558539 - RNA, 22 nt, Artificial Sequence
  Synthetic
acucucuaucuuagucuauuuc

SEQ ID NO: 558540 - RNA, 23 nt, Artificial Sequence
  Synthetic
aacucucuaucuuagucuauuuc

SEQ ID NO: 558541 - RNA, 24 nt, Artificial Sequence
  Synthetic
caacucucuaucuuagucuauuuc

SEQ ID NO: 558542 - RNA, 18 nt, Artificial Sequence
  Synthetic
caacuuaaucaguauuuc

SEQ ID NO: 558543 - RNA, 19 nt, Artificial Sequence
  Synthetic
ccaacuuaaucaguauuuc

SEQ ID NO: 558544 - RNA, 20 nt, Artificial Sequence
  Synthetic
accaacuuaaucaguauuuc

SEQ ID NO: 558545 - RNA, 21 nt, Artificial Sequence
  Synthetic
gaccaacuuaaucaguauuuc

SEQ ID NO: 558546 - RNA, 22 nt, Artificial Sequence
  Synthetic
agaccaacuuaaucaguauuuc

SEQ ID NO: 558547 - RNA, 23 nt, Artificial Sequence
  Synthetic
cagaccaacuuaaucaguauuuc

SEQ ID NO: 558548 - RNA, 24 nt, Artificial Sequence
  Synthetic
ccagaccaacuuaaucaguauuuc

SEQ ID NO: 558549 - RNA, 18 nt, Artificial Sequence
  Synthetic
auauuuuugauguauuuc

SEQ ID NO: 558550 - RNA, 19 nt, Artificial Sequence
  Synthetic
uauauuuuugauguauuuc

SEQ ID NO: 558551 - RNA, 20 nt, Artificial Sequence
  Synthetic
auauauuuuugauguauuuc

SEQ ID NO: 558552 - RNA, 21 nt, Artificial Sequence
  Synthetic
aauauauuuuugauguauuuc

SEQ ID NO: 558553 - RNA, 22 nt, Artificial Sequence
  Synthetic
aaauauauuuuugauguauuuc

SEQ ID NO: 558554 - RNA, 23 nt, Artificial Sequence
  Synthetic
aaaauauauuuuugauguauuuc

SEQ ID NO: 558555 - RNA, 24 nt, Artificial Sequence
  Synthetic
gaaaauauauuuuugauguauuuc

SEQ ID NO: 558556 - RNA, 18 nt, Artificial Sequence
  Synthetic
caguaaaagcauuauuuc

SEQ ID NO: 558557 - RNA, 19 nt, Artificial Sequence
  Synthetic
gcaguaaaagcauuauuuc

SEQ ID NO: 558558 - RNA, 20 nt, Artificial Sequence
  Synthetic
ugcaguaaaagcauuauuuc

SEQ ID NO: 558559 - RNA, 21 nt, Artificial Sequence
  Synthetic
augcaguaaaagcauuauuuc

SEQ ID NO: 558560 - RNA, 22 nt, Artificial Sequence
  Synthetic
uaugcaguaaaagcauuauuuc

SEQ ID NO: 558561 - RNA, 23 nt, Artificial Sequence
  Synthetic
auaugcaguaaaagcauuauuuc

SEQ ID NO: 558562 - RNA, 24 nt, Artificial Sequence
  Synthetic
aauaugcaguaaaagcauuauuuc

SEQ ID NO: 558563 - RNA, 18 nt, Artificial Sequence
  Synthetic
ccugauggagauuauuuc

SEQ ID NO: 558564 - RNA, 19 nt, Artificial Sequence
  Synthetic
accugauggagauuauuuc

SEQ ID NO: 558565 - RNA, 20 nt, Artificial Sequence
  Synthetic
uaccugauggagauuauuuc

SEQ ID NO: 558566 - RNA, 21 nt, Artificial Sequence
  Synthetic
uuaccugauggagauuauuuc

SEQ ID NO: 558567 - RNA, 22 nt, Artificial Sequence
  Synthetic
auuaccugauggagauuauuuc

SEQ ID NO: 558568 - RNA, 23 nt, Artificial Sequence
  Synthetic
cauuaccugauggagauuauuuc

SEQ ID NO: 558569 - RNA, 24 nt, Artificial Sequence
  Synthetic
gcauuaccugauggagauuauuuc

SEQ ID NO: 558570 - RNA, 18 nt, Artificial Sequence
  Synthetic
aaaauuguggauuauuuc

SEQ ID NO: 558571 - RNA, 19 nt, Artificial Sequence
  Synthetic
gaaaauuguggauuauuuc

SEQ ID NO: 558572 - RNA, 20 nt, Artificial Sequence
  Synthetic
ugaaaauuguggauuauuuc

SEQ ID NO: 558573 - RNA, 21 nt, Artificial Sequence
  Synthetic
uugaaaauuguggauuauuuc

SEQ ID NO: 558574 - RNA, 22 nt, Artificial Sequence
  Synthetic
guugaaaauuguggauuauuuc

SEQ ID NO: 558575 - RNA, 23 nt, Artificial Sequence
  Synthetic
aguugaaaauuguggauuauuuc

SEQ ID NO: 558576 - RNA, 24 nt, Artificial Sequence
  Synthetic
caguugaaaauuguggauuauuuc

SEQ ID NO: 558577 - RNA, 18 nt, Artificial Sequence
  Synthetic
cuugcaaaauauuauuuc

SEQ ID NO: 558578 - RNA, 19 nt, Artificial Sequence
  Synthetic
ccuugcaaaauauuauuuc

SEQ ID NO: 558579 - RNA, 20 nt, Artificial Sequence
  Synthetic
uccuugcaaaauauuauuuc

SEQ ID NO: 558580 - RNA, 21 nt, Artificial Sequence
  Synthetic
guccuugcaaaauauuauuuc

SEQ ID NO: 558581 - RNA, 22 nt, Artificial Sequence
  Synthetic
cguccuugcaaaauauuauuuc

SEQ ID NO: 558582 - RNA, 23 nt, Artificial Sequence
  Synthetic
ucguccuugcaaaauauuauuuc

SEQ ID NO: 558583 - RNA, 24 nt, Artificial Sequence
  Synthetic
aucguccuugcaaaauauuauuuc

SEQ ID NO: 558584 - RNA, 18 nt, Artificial Sequence
  Synthetic
cuacuuuugacuuauuuc

SEQ ID NO: 558585 - RNA, 19 nt, Artificial Sequence
  Synthetic
gcuacuuuugacuuauuuc

SEQ ID NO: 558586 - RNA, 20 nt, Artificial Sequence
  Synthetic
ugcuacuuuugacuuauuuc

SEQ ID NO: 558587 - RNA, 21 nt, Artificial Sequence
  Synthetic
uugcuacuuuugacuuauuuc

SEQ ID NO: 558588 - RNA, 22 nt, Artificial Sequence
  Synthetic
cuugcuacuuuugacuuauuuc

SEQ ID NO: 558589 - RNA, 23 nt, Artificial Sequence
  Synthetic
ucuugcuacuuuugacuuauuuc

SEQ ID NO: 558590 - RNA, 24 nt, Artificial Sequence
  Synthetic
gucuugcuacuuuugacuuauuuc

SEQ ID NO: 558591 - RNA, 18 nt, Artificial Sequence
  Synthetic
ugcuggaucucuuauuuc

SEQ ID NO: 558592 - RNA, 19 nt, Artificial Sequence
  Synthetic
uugcuggaucucuuauuuc

SEQ ID NO: 558593 - RNA, 20 nt, Artificial Sequence
  Synthetic
auugcuggaucucuuauuuc

SEQ ID NO: 558594 - RNA, 21 nt, Artificial Sequence
  Synthetic
cauugcuggaucucuuauuuc

SEQ ID NO: 558595 - RNA, 22 nt, Artificial Sequence
  Synthetic
ucauugcuggaucucuuauuuc

SEQ ID NO: 558596 - RNA, 23 nt, Artificial Sequence
  Synthetic
uucauugcuggaucucuuauuuc

SEQ ID NO: 558597 - RNA, 24 nt, Artificial Sequence
  Synthetic
uuucauugcuggaucucuuauuuc

SEQ ID NO: 558598 - RNA, 18 nt, Artificial Sequence
  Synthetic
aggaggagaaguuauuuc

SEQ ID NO: 558599 - RNA, 19 nt, Artificial Sequence
  Synthetic
uaggaggagaaguuauuuc

SEQ ID NO: 558600 - RNA, 20 nt, Artificial Sequence
  Synthetic
auaggaggagaaguuauuuc

SEQ ID NO: 558601 - RNA, 21 nt, Artificial Sequence
  Synthetic
uauaggaggagaaguuauuuc

SEQ ID NO: 558602 - RNA, 22 nt, Artificial Sequence
  Synthetic
uuauaggaggagaaguuauuuc

SEQ ID NO: 558603 - RNA, 23 nt, Artificial Sequence
  Synthetic
auuauaggaggagaaguuauuuc

SEQ ID NO: 558604 - RNA, 24 nt, Artificial Sequence
  Synthetic
uauuauaggaggagaaguuauuuc

SEQ ID NO: 558605 - RNA, 18 nt, Artificial Sequence
  Synthetic
gaaauuuaaauuuauuuc

SEQ ID NO: 558606 - RNA, 19 nt, Artificial Sequence
  Synthetic
ggaaauuuaaauuuauuuc

SEQ ID NO: 558607 - RNA, 20 nt, Artificial Sequence
  Synthetic
aggaaauuuaaauuuauuuc

SEQ ID NO: 558608 - RNA, 21 nt, Artificial Sequence
  Synthetic
caggaaauuuaaauuuauuuc

SEQ ID NO: 558609 - RNA, 22 nt, Artificial Sequence
  Synthetic
acaggaaauuuaaauuuauuuc

SEQ ID NO: 558610 - RNA, 23 nt, Artificial Sequence
  Synthetic
uacaggaaauuuaaauuuauuuc

SEQ ID NO: 558611 - RNA, 24 nt, Artificial Sequence
  Synthetic
uuacaggaaauuuaaauuuauuuc

SEQ ID NO: 558612 - RNA, 18 nt, Artificial Sequence
  Synthetic
uuuaaccauauuuauuuc

SEQ ID NO: 558613 - RNA, 19 nt, Artificial Sequence
  Synthetic
uuuuaaccauauuuauuuc

SEQ ID NO: 558614 - RNA, 20 nt, Artificial Sequence
  Synthetic
uuuuuaaccauauuuauuuc

SEQ ID NO: 558615 - RNA, 21 nt, Artificial Sequence
  Synthetic
auuuuuaaccauauuuauuuc

SEQ ID NO: 558616 - RNA, 22 nt, Artificial Sequence
  Synthetic
cauuuuuaaccauauuuauuuc

SEQ ID NO: 558617 - RNA, 23 nt, Artificial Sequence
  Synthetic
acauuuuuaaccauauuuauuuc

SEQ ID NO: 558618 - RNA, 24 nt, Artificial Sequence
  Synthetic
cacauuuuuaaccauauuuauuuc

SEQ ID NO: 558619 - RNA, 18 nt, Artificial Sequence
  Synthetic
uaugauugucuuuauuuc

SEQ ID NO: 558620 - RNA, 19 nt, Artificial Sequence
  Synthetic
uuaugauugucuuuauuuc

SEQ ID NO: 558621 - RNA, 20 nt, Artificial Sequence
  Synthetic
uuuaugauugucuuuauuuc

SEQ ID NO: 558622 - RNA, 21 nt, Artificial Sequence
  Synthetic
auuuaugauugucuuuauuuc

SEQ ID NO: 558623 - RNA, 22 nt, Artificial Sequence
  Synthetic
aauuuaugauugucuuuauuuc

SEQ ID NO: 558624 - RNA, 23 nt, Artificial Sequence
  Synthetic
aaauuuaugauugucuuuauuuc

SEQ ID NO: 558625 - RNA, 24 nt, Artificial Sequence
  Synthetic
aaaauuuaugauugucuuuauuuc

SEQ ID NO: 558626 - RNA, 18 nt, Artificial Sequence
  Synthetic
augccauacgaaacuuuc

SEQ ID NO: 558627 - RNA, 19 nt, Artificial Sequence
  Synthetic
aaugccauacgaaacuuuc

SEQ ID NO: 558628 - RNA, 20 nt, Artificial Sequence
  Synthetic
caaugccauacgaaacuuuc

SEQ ID NO: 558629 - RNA, 21 nt, Artificial Sequence
  Synthetic
gcaaugccauacgaaacuuuc

SEQ ID NO: 558630 - RNA, 22 nt, Artificial Sequence
  Synthetic
agcaaugccauacgaaacuuuc

SEQ ID NO: 558631 - RNA, 23 nt, Artificial Sequence
  Synthetic
uagcaaugccauacgaaacuuuc

SEQ ID NO: 558632 - RNA, 24 nt, Artificial Sequence
  Synthetic
auagcaaugccauacgaaacuuuc

SEQ ID NO: 558633 - RNA, 18 nt, Artificial Sequence
  Synthetic
uugauccugugaacuuuc

SEQ ID NO: 558634 - RNA, 19 nt, Artificial Sequence
  Synthetic
guugauccugugaacuuuc

SEQ ID NO: 558635 - RNA, 20 nt, Artificial Sequence
  Synthetic
gguugauccugugaacuuuc

SEQ ID NO: 558636 - RNA, 21 nt, Artificial Sequence
  Synthetic
ggguugauccugugaacuuuc

SEQ ID NO: 558637 - RNA, 22 nt, Artificial Sequence
  Synthetic
aggguugauccugugaacuuuc

SEQ ID NO: 558638 - RNA, 23 nt, Artificial Sequence
  Synthetic
aaggguugauccugugaacuuuc

SEQ ID NO: 558639 - RNA, 24 nt, Artificial Sequence
  Synthetic
uaaggguugauccugugaacuuuc

SEQ ID NO: 558640 - RNA, 18 nt, Artificial Sequence
  Synthetic
gucuuccuucuaacuuuc

SEQ ID NO: 558641 - RNA, 19 nt, Artificial Sequence
  Synthetic
cgucuuccuucuaacuuuc

SEQ ID NO: 558642 - RNA, 20 nt, Artificial Sequence
  Synthetic
ucgucuuccuucuaacuuuc

SEQ ID NO: 558643 - RNA, 21 nt, Artificial Sequence
  Synthetic
uucgucuuccuucuaacuuuc

SEQ ID NO: 558644 - RNA, 22 nt, Artificial Sequence
  Synthetic
cuucgucuuccuucuaacuuuc

SEQ ID NO: 558645 - RNA, 23 nt, Artificial Sequence
  Synthetic
ucuucgucuuccuucuaacuuuc

SEQ ID NO: 558646 - RNA, 24 nt, Artificial Sequence
  Synthetic
aucuucgucuuccuucuaacuuuc

SEQ ID NO: 558647 - RNA, 18 nt, Artificial Sequence
  Synthetic
gugggcacuguaacuuuc

SEQ ID NO: 558648 - RNA, 19 nt, Artificial Sequence
  Synthetic
ugugggcacuguaacuuuc

SEQ ID NO: 558649 - RNA, 20 nt, Artificial Sequence
  Synthetic
uugugggcacuguaacuuuc

SEQ ID NO: 558650 - RNA, 21 nt, Artificial Sequence
  Synthetic
uuugugggcacuguaacuuuc

SEQ ID NO: 558651 - RNA, 22 nt, Artificial Sequence
  Synthetic
auuugugggcacuguaacuuuc

SEQ ID NO: 558652 - RNA, 23 nt, Artificial Sequence
  Synthetic
gauuugugggcacuguaacuuuc

SEQ ID NO: 558653 - RNA, 24 nt, Artificial Sequence
  Synthetic
agauuugugggcacuguaacuuuc

SEQ ID NO: 558654 - RNA, 18 nt, Artificial Sequence
  Synthetic
augaggaacuuaacuuuc

SEQ ID NO: 558655 - RNA, 19 nt, Artificial Sequence
  Synthetic
gaugaggaacuuaacuuuc

SEQ ID NO: 558656 - RNA, 20 nt, Artificial Sequence
  Synthetic
agaugaggaacuuaacuuuc

SEQ ID NO: 558657 - RNA, 21 nt, Artificial Sequence
  Synthetic
uagaugaggaacuuaacuuuc

SEQ ID NO: 558658 - RNA, 22 nt, Artificial Sequence
  Synthetic
auagaugaggaacuuaacuuuc

SEQ ID NO: 558659 - RNA, 23 nt, Artificial Sequence
  Synthetic
uauagaugaggaacuuaacuuuc

SEQ ID NO: 558660 - RNA, 24 nt, Artificial Sequence
  Synthetic
uuauagaugaggaacuuaacuuuc

SEQ ID NO: 558661 - RNA, 18 nt, Artificial Sequence
  Synthetic
gggaaagaauucacuuuc

SEQ ID NO: 558662 - RNA, 19 nt, Artificial Sequence
  Synthetic
cgggaaagaauucacuuuc

SEQ ID NO: 558663 - RNA, 20 nt, Artificial Sequence
  Synthetic
acgggaaagaauucacuuuc

SEQ ID NO: 558664 - RNA, 21 nt, Artificial Sequence
  Synthetic
aacgggaaagaauucacuuuc

SEQ ID NO: 558665 - RNA, 22 nt, Artificial Sequence
  Synthetic
aaacgggaaagaauucacuuuc

SEQ ID NO: 558666 - RNA, 23 nt, Artificial Sequence
  Synthetic
caaacgggaaagaauucacuuuc

SEQ ID NO: 558667 - RNA, 24 nt, Artificial Sequence
  Synthetic
gcaaacgggaaagaauucacuuuc

SEQ ID NO: 558668 - RNA, 18 nt, Artificial Sequence
  Synthetic
uugcuaauggagacuuuc

SEQ ID NO: 558669 - RNA, 19 nt, Artificial Sequence
  Synthetic
auugcuaauggagacuuuc

SEQ ID NO: 558670 - RNA, 20 nt, Artificial Sequence
  Synthetic
aauugcuaauggagacuuuc

SEQ ID NO: 558671 - RNA, 21 nt, Artificial Sequence
  Synthetic
gaauugcuaauggagacuuuc

SEQ ID NO: 558672 - RNA, 22 nt, Artificial Sequence
  Synthetic
ugaauugcuaauggagacuuuc

SEQ ID NO: 558673 - RNA, 23 nt, Artificial Sequence
  Synthetic
augaauugcuaauggagacuuuc

SEQ ID NO: 558674 - RNA, 24 nt, Artificial Sequence
  Synthetic
uaugaauugcuaauggagacuuuc

SEQ ID NO: 558675 - RNA, 18 nt, Artificial Sequence
  Synthetic
gagcuguauaggacuuuc

SEQ ID NO: 558676 - RNA, 19 nt, Artificial Sequence
  Synthetic
ugagcuguauaggacuuuc

SEQ ID NO: 558677 - RNA, 20 nt, Artificial Sequence
  Synthetic
augagcuguauaggacuuuc

SEQ ID NO: 558678 - RNA, 21 nt, Artificial Sequence
  Synthetic
aaugagcuguauaggacuuuc

SEQ ID NO: 558679 - RNA, 22 nt, Artificial Sequence
  Synthetic
aaaugagcuguauaggacuuuc

SEQ ID NO: 558680 - RNA, 23 nt, Artificial Sequence
  Synthetic
caaaugagcuguauaggacuuuc

SEQ ID NO: 558681 - RNA, 24 nt, Artificial Sequence
  Synthetic
ccaaaugagcuguauaggacuuuc

SEQ ID NO: 558682 - RNA, 18 nt, Artificial Sequence
  Synthetic
gacgguaccuugacuuuc

SEQ ID NO: 558683 - RNA, 19 nt, Artificial Sequence
  Synthetic
agacgguaccuugacuuuc

SEQ ID NO: 558684 - RNA, 20 nt, Artificial Sequence
  Synthetic
uagacgguaccuugacuuuc

SEQ ID NO: 558685 - RNA, 21 nt, Artificial Sequence
  Synthetic
guagacgguaccuugacuuuc

SEQ ID NO: 558686 - RNA, 22 nt, Artificial Sequence
  Synthetic
aguagacgguaccuugacuuuc

SEQ ID NO: 558687 - RNA, 23 nt, Artificial Sequence
  Synthetic
aaguagacgguaccuugacuuuc

SEQ ID NO: 558688 - RNA, 24 nt, Artificial Sequence
  Synthetic
gaaguagacgguaccuugacuuuc

SEQ ID NO: 558689 - RNA, 18 nt, Artificial Sequence
  Synthetic
guaguugcccauacuuuc

SEQ ID NO: 558690 - RNA, 19 nt, Artificial Sequence
  Synthetic
aguaguugcccauacuuuc

SEQ ID NO: 558691 - RNA, 20 nt, Artificial Sequence
  Synthetic
gaguaguugcccauacuuuc

SEQ ID NO: 558692 - RNA, 21 nt, Artificial Sequence
  Synthetic
ggaguaguugcccauacuuuc

SEQ ID NO: 558693 - RNA, 22 nt, Artificial Sequence
  Synthetic
uggaguaguugcccauacuuuc

SEQ ID NO: 558694 - RNA, 23 nt, Artificial Sequence
  Synthetic
guggaguaguugcccauacuuuc

SEQ ID NO: 558695 - RNA, 24 nt, Artificial Sequence
  Synthetic
uguggaguaguugcccauacuuuc

SEQ ID NO: 558696 - RNA, 18 nt, Artificial Sequence
  Synthetic
aaaaccauuaguacuuuc

SEQ ID NO: 558697 - RNA, 19 nt, Artificial Sequence
  Synthetic
uaaaaccauuaguacuuuc

SEQ ID NO: 558698 - RNA, 20 nt, Artificial Sequence
  Synthetic
cuaaaaccauuaguacuuuc

SEQ ID NO: 558699 - RNA, 21 nt, Artificial Sequence
  Synthetic
ccuaaaaccauuaguacuuuc

SEQ ID NO: 558700 - RNA, 22 nt, Artificial Sequence
  Synthetic
cccuaaaaccauuaguacuuuc

SEQ ID NO: 558701 - RNA, 23 nt, Artificial Sequence
  Synthetic
ucccuaaaaccauuaguacuuuc

SEQ ID NO: 558702 - RNA, 24 nt, Artificial Sequence
  Synthetic
uucccuaaaaccauuaguacuuuc

SEQ ID NO: 558703 - RNA, 18 nt, Artificial Sequence
  Synthetic
uuuaguuuucuuacuuuc

SEQ ID NO: 558704 - RNA, 19 nt, Artificial Sequence
  Synthetic
auuuaguuuucuuacuuuc

SEQ ID NO: 558705 - RNA, 20 nt, Artificial Sequence
  Synthetic
uauuuaguuuucuuacuuuc

SEQ ID NO: 558706 - RNA, 21 nt, Artificial Sequence
  Synthetic
uuauuuaguuuucuuacuuuc

SEQ ID NO: 558707 - RNA, 22 nt, Artificial Sequence
  Synthetic
guuauuuaguuuucuuacuuuc

SEQ ID NO: 558708 - RNA, 23 nt, Artificial Sequence
  Synthetic
aguuauuuaguuuucuuacuuuc

SEQ ID NO: 558709 - RNA, 24 nt, Artificial Sequence
  Synthetic
caguuauuuaguuuucuuacuuuc

SEQ ID NO: 558710 - RNA, 18 nt, Artificial Sequence
  Synthetic
uaagucacauaaccuuuc

SEQ ID NO: 558711 - RNA, 19 nt, Artificial Sequence
  Synthetic
auaagucacauaaccuuuc

SEQ ID NO: 558712 - RNA, 20 nt, Artificial Sequence
  Synthetic
aauaagucacauaaccuuuc

SEQ ID NO: 558713 - RNA, 21 nt, Artificial Sequence
  Synthetic
aaauaagucacauaaccuuuc

SEQ ID NO: 558714 - RNA, 22 nt, Artificial Sequence
  Synthetic
caaauaagucacauaaccuuuc

SEQ ID NO: 558715 - RNA, 23 nt, Artificial Sequence
  Synthetic
ucaaauaagucacauaaccuuuc

SEQ ID NO: 558716 - RNA, 24 nt, Artificial Sequence
  Synthetic
cucaaauaagucacauaaccuuuc

SEQ ID NO: 558717 - RNA, 18 nt, Artificial Sequence
  Synthetic
uuuugaaaagcaccuuuc

SEQ ID NO: 558718 - RNA, 19 nt, Artificial Sequence
  Synthetic
uuuuugaaaagcaccuuuc

SEQ ID NO: 558719 - RNA, 20 nt, Artificial Sequence
  Synthetic
guuuuugaaaagcaccuuuc

SEQ ID NO: 558720 - RNA, 21 nt, Artificial Sequence
  Synthetic
uguuuuugaaaagcaccuuuc

SEQ ID NO: 558721 - RNA, 22 nt, Artificial Sequence
  Synthetic
cuguuuuugaaaagcaccuuuc

SEQ ID NO: 558722 - RNA, 23 nt, Artificial Sequence
  Synthetic
acuguuuuugaaaagcaccuuuc

SEQ ID NO: 558723 - RNA, 24 nt, Artificial Sequence
  Synthetic
aacuguuuuugaaaagcaccuuuc

SEQ ID NO: 558724 - RNA, 18 nt, Artificial Sequence
  Synthetic
agggaaguuucaccuuuc

SEQ ID NO: 558725 - RNA, 19 nt, Artificial Sequence
  Synthetic
aagggaaguuucaccuuuc

SEQ ID NO: 558726 - RNA, 20 nt, Artificial Sequence
  Synthetic
gaagggaaguuucaccuuuc

SEQ ID NO: 558727 - RNA, 21 nt, Artificial Sequence
  Synthetic
ugaagggaaguuucaccuuuc

SEQ ID NO: 558728 - RNA, 22 nt, Artificial Sequence
  Synthetic
uugaagggaaguuucaccuuuc

SEQ ID NO: 558729 - RNA, 23 nt, Artificial Sequence
  Synthetic
auugaagggaaguuucaccuuuc

SEQ ID NO: 558730 - RNA, 24 nt, Artificial Sequence
  Synthetic
cauugaagggaaguuucaccuuuc

SEQ ID NO: 558731 - RNA, 18 nt, Artificial Sequence
  Synthetic
ugggauugucacccuuuc

SEQ ID NO: 558732 - RNA, 19 nt, Artificial Sequence
  Synthetic
cugggauugucacccuuuc

SEQ ID NO: 558733 - RNA, 20 nt, Artificial Sequence
  Synthetic
acugggauugucacccuuuc

SEQ ID NO: 558734 - RNA, 21 nt, Artificial Sequence
  Synthetic
aacugggauugucacccuuuc

SEQ ID NO: 558735 - RNA, 22 nt, Artificial Sequence
  Synthetic
aaacugggauugucacccuuuc

SEQ ID NO: 558736 - RNA, 23 nt, Artificial Sequence
  Synthetic
aaaacugggauugucacccuuuc

SEQ ID NO: 558737 - RNA, 24 nt, Artificial Sequence
  Synthetic
caaaacugggauugucacccuuuc

SEQ ID NO: 558738 - RNA, 18 nt, Artificial Sequence
  Synthetic
ugacuucaguccccuuuc

SEQ ID NO: 558739 - RNA, 19 nt, Artificial Sequence
  Synthetic
cugacuucaguccccuuuc

SEQ ID NO: 558740 - RNA, 20 nt, Artificial Sequence
  Synthetic
ccugacuucaguccccuuuc

SEQ ID NO: 558741 - RNA, 21 nt, Artificial Sequence
  Synthetic
cccugacuucaguccccuuuc

SEQ ID NO: 558742 - RNA, 22 nt, Artificial Sequence
  Synthetic
ucccugacuucaguccccuuuc

SEQ ID NO: 558743 - RNA, 23 nt, Artificial Sequence
  Synthetic
cucccugacuucaguccccuuuc

SEQ ID NO: 558744 - RNA, 24 nt, Artificial Sequence
  Synthetic
gcucccugacuucaguccccuuuc

SEQ ID NO: 558745 - RNA, 18 nt, Artificial Sequence
  Synthetic
cuccuuugauucccuuuc

SEQ ID NO: 558746 - RNA, 19 nt, Artificial Sequence
  Synthetic
ucuccuuugauucccuuuc

SEQ ID NO: 558747 - RNA, 20 nt, Artificial Sequence
  Synthetic
uucuccuuugauucccuuuc

SEQ ID NO: 558748 - RNA, 21 nt, Artificial Sequence
  Synthetic
uuucuccuuugauucccuuuc

SEQ ID NO: 558749 - RNA, 22 nt, Artificial Sequence
  Synthetic
uuuucuccuuugauucccuuuc

SEQ ID NO: 558750 - RNA, 23 nt, Artificial Sequence
  Synthetic
auuuucuccuuugauucccuuuc

SEQ ID NO: 558751 - RNA, 24 nt, Artificial Sequence
  Synthetic
aauuuucuccuuugauucccuuuc

SEQ ID NO: 558752 - RNA, 18 nt, Artificial Sequence
  Synthetic
auagaaugagagccuuuc

SEQ ID NO: 558753 - RNA, 19 nt, Artificial Sequence
  Synthetic
aauagaaugagagccuuuc

SEQ ID NO: 558754 - RNA, 20 nt, Artificial Sequence
  Synthetic
uaauagaaugagagccuuuc

SEQ ID NO: 558755 - RNA, 21 nt, Artificial Sequence
  Synthetic
cuaauagaaugagagccuuuc

SEQ ID NO: 558756 - RNA, 22 nt, Artificial Sequence
  Synthetic
ucuaauagaaugagagccuuuc

SEQ ID NO: 558757 - RNA, 23 nt, Artificial Sequence
  Synthetic
uucuaauagaaugagagccuuuc

SEQ ID NO: 558758 - RNA, 24 nt, Artificial Sequence
  Synthetic
cuucuaauagaaugagagccuuuc

SEQ ID NO: 558759 - RNA, 18 nt, Artificial Sequence
  Synthetic
ccacugucguggccuuuc

SEQ ID NO: 558760 - RNA, 19 nt, Artificial Sequence
  Synthetic
cccacugucguggccuuuc

SEQ ID NO: 558761 - RNA, 20 nt, Artificial Sequence
  Synthetic
ccccacugucguggccuuuc

SEQ ID NO: 558762 - RNA, 21 nt, Artificial Sequence
  Synthetic
gccccacugucguggccuuuc

SEQ ID NO: 558763 - RNA, 22 nt, Artificial Sequence
  Synthetic
agccccacugucguggccuuuc

SEQ ID NO: 558764 - RNA, 23 nt, Artificial Sequence
  Synthetic
uagccccacugucguggccuuuc

SEQ ID NO: 558765 - RNA, 24 nt, Artificial Sequence
  Synthetic
cuagccccacugucguggccuuuc

SEQ ID NO: 558766 - RNA, 18 nt, Artificial Sequence
  Synthetic
ucuuuacaacugccuuuc

SEQ ID NO: 558767 - RNA, 19 nt, Artificial Sequence
  Synthetic
uucuuuacaacugccuuuc

SEQ ID NO: 558768 - RNA, 20 nt, Artificial Sequence
  Synthetic
auucuuuacaacugccuuuc

SEQ ID NO: 558769 - RNA, 21 nt, Artificial Sequence
  Synthetic
cauucuuuacaacugccuuuc

SEQ ID NO: 558770 - RNA, 22 nt, Artificial Sequence
  Synthetic
ccauucuuuacaacugccuuuc

SEQ ID NO: 558771 - RNA, 23 nt, Artificial Sequence
  Synthetic
accauucuuuacaacugccuuuc

SEQ ID NO: 558772 - RNA, 24 nt, Artificial Sequence
  Synthetic
uaccauucuuuacaacugccuuuc

SEQ ID NO: 558773 - RNA, 18 nt, Artificial Sequence
  Synthetic
gagagaaacuugccuuuc

SEQ ID NO: 558774 - RNA, 19 nt, Artificial Sequence
  Synthetic
ggagagaaacuugccuuuc

SEQ ID NO: 558775 - RNA, 20 nt, Artificial Sequence
  Synthetic
uggagagaaacuugccuuuc

SEQ ID NO: 558776 - RNA, 21 nt, Artificial Sequence
  Synthetic
auggagagaaacuugccuuuc

SEQ ID NO: 558777 - RNA, 22 nt, Artificial Sequence
  Synthetic
gauggagagaaacuugccuuuc

SEQ ID NO: 558778 - RNA, 23 nt, Artificial Sequence
  Synthetic
agauggagagaaacuugccuuuc

SEQ ID NO: 558779 - RNA, 24 nt, Artificial Sequence
  Synthetic
aagauggagagaaacuugccuuuc

SEQ ID NO: 558780 - RNA, 18 nt, Artificial Sequence
  Synthetic
guggcaucuccuccuuuc

SEQ ID NO: 558781 - RNA, 19 nt, Artificial Sequence
  Synthetic
uguggcaucuccuccuuuc

SEQ ID NO: 558782 - RNA, 20 nt, Artificial Sequence
  Synthetic
auguggcaucuccuccuuuc

SEQ ID NO: 558783 - RNA, 21 nt, Artificial Sequence
  Synthetic
gauguggcaucuccuccuuuc

SEQ ID NO: 558784 - RNA, 22 nt, Artificial Sequence
  Synthetic
cgauguggcaucuccuccuuuc

SEQ ID NO: 558785 - RNA, 23 nt, Artificial Sequence
  Synthetic
gcgauguggcaucuccuccuuuc

SEQ ID NO: 558786 - RNA, 24 nt, Artificial Sequence
  Synthetic
ugcgauguggcaucuccuccuuuc

SEQ ID NO: 558787 - RNA, 18 nt, Artificial Sequence
  Synthetic
gucauuucuucuccuuuc

SEQ ID NO: 558788 - RNA, 19 nt, Artificial Sequence
  Synthetic
ugucauuucuucuccuuuc

SEQ ID NO: 558789 - RNA, 20 nt, Artificial Sequence
  Synthetic
augucauuucuucuccuuuc

SEQ ID NO: 558790 - RNA, 21 nt, Artificial Sequence
  Synthetic
uaugucauuucuucuccuuuc

SEQ ID NO: 558791 - RNA, 22 nt, Artificial Sequence
  Synthetic
uuaugucauuucuucuccuuuc

SEQ ID NO: 558792 - RNA, 23 nt, Artificial Sequence
  Synthetic
auuaugucauuucuucuccuuuc

SEQ ID NO: 558793 - RNA, 24 nt, Artificial Sequence
  Synthetic
uauuaugucauuucuucuccuuuc

SEQ ID NO: 558794 - RNA, 18 nt, Artificial Sequence
  Synthetic
ucaagcaaaaguccuuuc

SEQ ID NO: 558795 - RNA, 19 nt, Artificial Sequence
  Synthetic
uucaagcaaaaguccuuuc

SEQ ID NO: 558796 - RNA, 20 nt, Artificial Sequence
  Synthetic
uuucaagcaaaaguccuuuc

SEQ ID NO: 558797 - RNA, 21 nt, Artificial Sequence
  Synthetic
auuucaagcaaaaguccuuuc

SEQ ID NO: 558798 - RNA, 22 nt, Artificial Sequence
  Synthetic
gauuucaagcaaaaguccuuuc

SEQ ID NO: 558799 - RNA, 23 nt, Artificial Sequence
  Synthetic
ugauuucaagcaaaaguccuuuc

SEQ ID NO: 558800 - RNA, 24 nt, Artificial Sequence
  Synthetic
gugauuucaagcaaaaguccuuuc

SEQ ID NO: 558801 - RNA, 18 nt, Artificial Sequence
  Synthetic
aauagcugguuuccuuuc

SEQ ID NO: 558802 - RNA, 19 nt, Artificial Sequence
  Synthetic
gaauagcugguuuccuuuc

SEQ ID NO: 558803 - RNA, 20 nt, Artificial Sequence
  Synthetic
ggaauagcugguuuccuuuc

SEQ ID NO: 558804 - RNA, 21 nt, Artificial Sequence
  Synthetic
uggaauagcugguuuccuuuc

SEQ ID NO: 558805 - RNA, 22 nt, Artificial Sequence
  Synthetic
uuggaauagcugguuuccuuuc

SEQ ID NO: 558806 - RNA, 23 nt, Artificial Sequence
  Synthetic
uuuggaauagcugguuuccuuuc

SEQ ID NO: 558807 - RNA, 24 nt, Artificial Sequence
  Synthetic
uuuuggaauagcugguuuccuuuc

SEQ ID NO: 558808 - RNA, 18 nt, Artificial Sequence
  Synthetic
gagggcaaggaagcuuuc

SEQ ID NO: 558809 - RNA, 19 nt, Artificial Sequence
  Synthetic
ggagggcaaggaagcuuuc

SEQ ID NO: 558810 - RNA, 20 nt, Artificial Sequence
  Synthetic
gggagggcaaggaagcuuuc

SEQ ID NO: 558811 - RNA, 21 nt, Artificial Sequence
  Synthetic
ugggagggcaaggaagcuuuc

SEQ ID NO: 558812 - RNA, 22 nt, Artificial Sequence
  Synthetic
gugggagggcaaggaagcuuuc

SEQ ID NO: 558813 - RNA, 23 nt, Artificial Sequence
  Synthetic
ggugggagggcaaggaagcuuuc

SEQ ID NO: 558814 - RNA, 24 nt, Artificial Sequence
  Synthetic
uggugggagggcaaggaagcuuuc

SEQ ID NO: 558815 - RNA, 18 nt, Artificial Sequence
  Synthetic
gccgaaggggacgcuuuc

SEQ ID NO: 558816 - RNA, 19 nt, Artificial Sequence
  Synthetic
ggccgaaggggacgcuuuc

SEQ ID NO: 558817 - RNA, 20 nt, Artificial Sequence
  Synthetic
cggccgaaggggacgcuuuc

SEQ ID NO: 558818 - RNA, 21 nt, Artificial Sequence
  Synthetic
acggccgaaggggacgcuuuc

SEQ ID NO: 558819 - RNA, 22 nt, Artificial Sequence
  Synthetic
gacggccgaaggggacgcuuuc

SEQ ID NO: 558820 - RNA, 23 nt, Artificial Sequence
  Synthetic
ugacggccgaaggggacgcuuuc

SEQ ID NO: 558821 - RNA, 24 nt, Artificial Sequence
  Synthetic
uugacggccgaaggggacgcuuuc

SEQ ID NO: 558822 - RNA, 18 nt, Artificial Sequence
  Synthetic
uagaauauuuaggcuuuc

SEQ ID NO: 558823 - RNA, 19 nt, Artificial Sequence
  Synthetic
guagaauauuuaggcuuuc

SEQ ID NO: 558824 - RNA, 20 nt, Artificial Sequence
  Synthetic
uguagaauauuuaggcuuuc

SEQ ID NO: 558825 - RNA, 21 nt, Artificial Sequence
  Synthetic
guguagaauauuuaggcuuuc

SEQ ID NO: 558826 - RNA, 22 nt, Artificial Sequence
  Synthetic
gguguagaauauuuaggcuuuc

SEQ ID NO: 558827 - RNA, 23 nt, Artificial Sequence
  Synthetic
ggguguagaauauuuaggcuuuc

SEQ ID NO: 558828 - RNA, 24 nt, Artificial Sequence
  Synthetic
aggguguagaauauuuaggcuuuc

SEQ ID NO: 558829 - RNA, 18 nt, Artificial Sequence
  Synthetic
gaaauguucuuggcuuuc

SEQ ID NO: 558830 - RNA, 19 nt, Artificial Sequence
  Synthetic
agaaauguucuuggcuuuc

SEQ ID NO: 558831 - RNA, 20 nt, Artificial Sequence
  Synthetic
aagaaauguucuuggcuuuc

SEQ ID NO: 558832 - RNA, 21 nt, Artificial Sequence
  Synthetic
aaagaaauguucuuggcuuuc

SEQ ID NO: 558833 - RNA, 22 nt, Artificial Sequence
  Synthetic
caaagaaauguucuuggcuuuc

SEQ ID NO: 558834 - RNA, 23 nt, Artificial Sequence
  Synthetic
acaaagaaauguucuuggcuuuc

SEQ ID NO: 558835 - RNA, 24 nt, Artificial Sequence
  Synthetic
gacaaagaaauguucuuggcuuuc

SEQ ID NO: 558836 - RNA, 18 nt, Artificial Sequence
  Synthetic
uuuuaagaaaaugcuuuc

SEQ ID NO: 558837 - RNA, 19 nt, Artificial Sequence
  Synthetic
cuuuuaagaaaaugcuuuc

SEQ ID NO: 558838 - RNA, 20 nt, Artificial Sequence
  Synthetic
gcuuuuaagaaaaugcuuuc

SEQ ID NO: 558839 - RNA, 21 nt, Artificial Sequence
  Synthetic
ugcuuuuaagaaaaugcuuuc

SEQ ID NO: 558840 - RNA, 22 nt, Artificial Sequence
  Synthetic
uugcuuuuaagaaaaugcuuuc

SEQ ID NO: 558841 - RNA, 23 nt, Artificial Sequence
  Synthetic
cuugcuuuuaagaaaaugcuuuc

SEQ ID NO: 558842 - RNA, 24 nt, Artificial Sequence
  Synthetic
acuugcuuuuaagaaaaugcuuuc

SEQ ID NO: 558843 - RNA, 18 nt, Artificial Sequence
  Synthetic
aggccugguaaugcuuuc

SEQ ID NO: 558844 - RNA, 19 nt, Artificial Sequence
  Synthetic
aaggccugguaaugcuuuc

SEQ ID NO: 558845 - RNA, 20 nt, Artificial Sequence
  Synthetic
caaggccugguaaugcuuuc

SEQ ID NO: 558846 - RNA, 21 nt, Artificial Sequence
  Synthetic
gcaaggccugguaaugcuuuc

SEQ ID NO: 558847 - RNA, 22 nt, Artificial Sequence
  Synthetic
ggcaaggccugguaaugcuuuc

SEQ ID NO: 558848 - RNA, 23 nt, Artificial Sequence
  Synthetic
aggcaaggccugguaaugcuuuc

SEQ ID NO: 558849 - RNA, 24 nt, Artificial Sequence
  Synthetic
gaggcaaggccugguaaugcuuuc

SEQ ID NO: 558850 - RNA, 18 nt, Artificial Sequence
  Synthetic
uucucagaaucugcuuuc

SEQ ID NO: 558851 - RNA, 19 nt, Artificial Sequence
  Synthetic
uuucucagaaucugcuuuc

SEQ ID NO: 558852 - RNA, 20 nt, Artificial Sequence
  Synthetic
cuuucucagaaucugcuuuc

SEQ ID NO: 558853 - RNA, 21 nt, Artificial Sequence
  Synthetic
acuuucucagaaucugcuuuc

SEQ ID NO: 558854 - RNA, 22 nt, Artificial Sequence
  Synthetic
cacuuucucagaaucugcuuuc

SEQ ID NO: 558855 - RNA, 23 nt, Artificial Sequence
  Synthetic
ucacuuucucagaaucugcuuuc

SEQ ID NO: 558856 - RNA, 24 nt, Artificial Sequence
  Synthetic
aucacuuucucagaaucugcuuuc

SEQ ID NO: 558857 - RNA, 18 nt, Artificial Sequence
  Synthetic
cucugaaauucugcuuuc

SEQ ID NO: 558858 - RNA, 19 nt, Artificial Sequence
  Synthetic
acucugaaauucugcuuuc

SEQ ID NO: 558859 - RNA, 20 nt, Artificial Sequence
  Synthetic
cacucugaaauucugcuuuc

SEQ ID NO: 558860 - RNA, 21 nt, Artificial Sequence
  Synthetic
ccacucugaaauucugcuuuc

SEQ ID NO: 558861 - RNA, 22 nt, Artificial Sequence
  Synthetic
cccacucugaaauucugcuuuc

SEQ ID NO: 558862 - RNA, 23 nt, Artificial Sequence
  Synthetic
acccacucugaaauucugcuuuc

SEQ ID NO: 558863 - RNA, 24 nt, Artificial Sequence
  Synthetic
cacccacucugaaauucugcuuuc

SEQ ID NO: 558864 - RNA, 18 nt, Artificial Sequence
  Synthetic
ugagaauuaauugcuuuc

SEQ ID NO: 558865 - RNA, 19 nt, Artificial Sequence
  Synthetic
cugagaauuaauugcuuuc

SEQ ID NO: 558866 - RNA, 20 nt, Artificial Sequence
  Synthetic
acugagaauuaauugcuuuc

SEQ ID NO: 558867 - RNA, 21 nt, Artificial Sequence
  Synthetic
aacugagaauuaauugcuuuc

SEQ ID NO: 558868 - RNA, 22 nt, Artificial Sequence
  Synthetic
aaacugagaauuaauugcuuuc

SEQ ID NO: 558869 - RNA, 23 nt, Artificial Sequence
  Synthetic
aaaacugagaauuaauugcuuuc

SEQ ID NO: 558870 - RNA, 24 nt, Artificial Sequence
  Synthetic
aaaaacugagaauuaauugcuuuc

SEQ ID NO: 558871 - RNA, 18 nt, Artificial Sequence
  Synthetic
caaggcaauacaucuuuc

SEQ ID NO: 558872 - RNA, 19 nt, Artificial Sequence
  Synthetic
ucaaggcaauacaucuuuc

SEQ ID NO: 558873 - RNA, 20 nt, Artificial Sequence
  Synthetic
gucaaggcaauacaucuuuc

SEQ ID NO: 558874 - RNA, 21 nt, Artificial Sequence
  Synthetic
agucaaggcaauacaucuuuc

SEQ ID NO: 558875 - RNA, 22 nt, Artificial Sequence
  Synthetic
aagucaaggcaauacaucuuuc

SEQ ID NO: 558876 - RNA, 23 nt, Artificial Sequence
  Synthetic
uaagucaaggcaauacaucuuuc

SEQ ID NO: 558877 - RNA, 24 nt, Artificial Sequence
  Synthetic
auaagucaaggcaauacaucuuuc

SEQ ID NO: 558878 - RNA, 18 nt, Artificial Sequence
  Synthetic
gucagucugucaucuuuc

SEQ ID NO: 558879 - RNA, 19 nt, Artificial Sequence
  Synthetic
agucagucugucaucuuuc

SEQ ID NO: 558880 - RNA, 20 nt, Artificial Sequence
  Synthetic
aagucagucugucaucuuuc

SEQ ID NO: 558881 - RNA, 21 nt, Artificial Sequence
  Synthetic
uaagucagucugucaucuuuc

SEQ ID NO: 558882 - RNA, 22 nt, Artificial Sequence
  Synthetic
uuaagucagucugucaucuuuc

SEQ ID NO: 558883 - RNA, 23 nt, Artificial Sequence
  Synthetic
auuaagucagucugucaucuuuc

SEQ ID NO: 558884 - RNA, 24 nt, Artificial Sequence
  Synthetic
aauuaagucagucugucaucuuuc

SEQ ID NO: 558885 - RNA, 18 nt, Artificial Sequence
  Synthetic
caaguuuagugaucuuuc

SEQ ID NO: 558886 - RNA, 19 nt, Artificial Sequence
  Synthetic
gcaaguuuagugaucuuuc

SEQ ID NO: 558887 - RNA, 20 nt, Artificial Sequence
  Synthetic
ugcaaguuuagugaucuuuc

SEQ ID NO: 558888 - RNA, 21 nt, Artificial Sequence
  Synthetic
cugcaaguuuagugaucuuuc

SEQ ID NO: 558889 - RNA, 22 nt, Artificial Sequence
  Synthetic
acugcaaguuuagugaucuuuc

SEQ ID NO: 558890 - RNA, 23 nt, Artificial Sequence
  Synthetic
aacugcaaguuuagugaucuuuc

SEQ ID NO: 558891 - RNA, 24 nt, Artificial Sequence
  Synthetic
gaacugcaaguuuagugaucuuuc

SEQ ID NO: 558892 - RNA, 18 nt, Artificial Sequence
  Synthetic
aaauaacccuuaucuuuc

SEQ ID NO: 558893 - RNA, 19 nt, Artificial Sequence
  Synthetic
uaaauaacccuuaucuuuc

SEQ ID NO: 558894 - RNA, 20 nt, Artificial Sequence
  Synthetic
uuaaauaacccuuaucuuuc

SEQ ID NO: 558895 - RNA, 21 nt, Artificial Sequence
  Synthetic
uuuaaauaacccuuaucuuuc

SEQ ID NO: 558896 - RNA, 22 nt, Artificial Sequence
  Synthetic
auuuaaauaacccuuaucuuuc

SEQ ID NO: 558897 - RNA, 23 nt, Artificial Sequence
  Synthetic
aauuuaaauaacccuuaucuuuc

SEQ ID NO: 558898 - RNA, 24 nt, Artificial Sequence
  Synthetic
uaauuuaaauaacccuuaucuuuc

SEQ ID NO: 558899 - RNA, 18 nt, Artificial Sequence
  Synthetic
uucagauccuacucuuuc

SEQ ID NO: 558900 - RNA, 19 nt, Artificial Sequence
  Synthetic
auucagauccuacucuuuc

SEQ ID NO: 558901 - RNA, 20 nt, Artificial Sequence
  Synthetic
aauucagauccuacucuuuc

SEQ ID NO: 558902 - RNA, 21 nt, Artificial Sequence
  Synthetic
caauucagauccuacucuuuc

SEQ ID NO: 558903 - RNA, 22 nt, Artificial Sequence
  Synthetic
ccaauucagauccuacucuuuc

SEQ ID NO: 558904 - RNA, 23 nt, Artificial Sequence
  Synthetic
gccaauucagauccuacucuuuc

SEQ ID NO: 558905 - RNA, 24 nt, Artificial Sequence
  Synthetic
ggccaauucagauccuacucuuuc

SEQ ID NO: 558906 - RNA, 18 nt, Artificial Sequence
  Synthetic
auaaaaguacccucuuuc

SEQ ID NO: 558907 - RNA, 19 nt, Artificial Sequence
  Synthetic
cauaaaaguacccucuuuc

SEQ ID NO: 558908 - RNA, 20 nt, Artificial Sequence
  Synthetic
gcauaaaaguacccucuuuc

SEQ ID NO: 558909 - RNA, 21 nt, Artificial Sequence
  Synthetic
agcauaaaaguacccucuuuc

SEQ ID NO: 558910 - RNA, 22 nt, Artificial Sequence
  Synthetic
uagcauaaaaguacccucuuuc

SEQ ID NO: 558911 - RNA, 23 nt, Artificial Sequence
  Synthetic
uuagcauaaaaguacccucuuuc

SEQ ID NO: 558912 - RNA, 24 nt, Artificial Sequence
  Synthetic
guuagcauaaaaguacccucuuuc

SEQ ID NO: 558913 - RNA, 18 nt, Artificial Sequence
  Synthetic
cuggccuuucccucuuuc

SEQ ID NO: 558914 - RNA, 19 nt, Artificial Sequence
  Synthetic
ucuggccuuucccucuuuc

SEQ ID NO: 558915 - RNA, 20 nt, Artificial Sequence
  Synthetic
aucuggccuuucccucuuuc

SEQ ID NO: 558916 - RNA, 21 nt, Artificial Sequence
  Synthetic
uaucuggccuuucccucuuuc

SEQ ID NO: 558917 - RNA, 22 nt, Artificial Sequence
  Synthetic
uuaucuggccuuucccucuuuc

SEQ ID NO: 558918 - RNA, 23 nt, Artificial Sequence
  Synthetic
auuaucuggccuuucccucuuuc

SEQ ID NO: 558919 - RNA, 24 nt, Artificial Sequence
  Synthetic
cauuaucuggccuuucccucuuuc

SEQ ID NO: 558920 - RNA, 18 nt, Artificial Sequence
  Synthetic
cuacucugaggcucuuuc

SEQ ID NO: 558921 - RNA, 19 nt, Artificial Sequence
  Synthetic
acuacucugaggcucuuuc

SEQ ID NO: 558922 - RNA, 20 nt, Artificial Sequence
  Synthetic
gacuacucugaggcucuuuc

SEQ ID NO: 558923 - RNA, 21 nt, Artificial Sequence
  Synthetic
ugacuacucugaggcucuuuc

SEQ ID NO: 558924 - RNA, 22 nt, Artificial Sequence
  Synthetic
cugacuacucugaggcucuuuc

SEQ ID NO: 558925 - RNA, 23 nt, Artificial Sequence
  Synthetic
ucugacuacucugaggcucuuuc

SEQ ID NO: 558926 - RNA, 24 nt, Artificial Sequence
  Synthetic
aucugacuacucugaggcucuuuc

SEQ ID NO: 558927 - RNA, 18 nt, Artificial Sequence
  Synthetic
caucuaaucaugucuuuc

SEQ ID NO: 558928 - RNA, 19 nt, Artificial Sequence
  Synthetic
ccaucuaaucaugucuuuc

SEQ ID NO: 558929 - RNA, 20 nt, Artificial Sequence
  Synthetic
cccaucuaaucaugucuuuc

SEQ ID NO: 558930 - RNA, 21 nt, Artificial Sequence
  Synthetic
ccccaucuaaucaugucuuuc

SEQ ID NO: 558931 - RNA, 22 nt, Artificial Sequence
  Synthetic
uccccaucuaaucaugucuuuc

SEQ ID NO: 558932 - RNA, 23 nt, Artificial Sequence
  Synthetic
uuccccaucuaaucaugucuuuc

SEQ ID NO: 558933 - RNA, 24 nt, Artificial Sequence
  Synthetic
uuuccccaucuaaucaugucuuuc

SEQ ID NO: 558934 - RNA, 18 nt, Artificial Sequence
  Synthetic
aaguggcaucugucuuuc

SEQ ID NO: 558935 - RNA, 19 nt, Artificial Sequence
  Synthetic
caaguggcaucugucuuuc

SEQ ID NO: 558936 - RNA, 20 nt, Artificial Sequence
  Synthetic
ucaaguggcaucugucuuuc

SEQ ID NO: 558937 - RNA, 21 nt, Artificial Sequence
  Synthetic
gucaaguggcaucugucuuuc

SEQ ID NO: 558938 - RNA, 22 nt, Artificial Sequence
  Synthetic
agucaaguggcaucugucuuuc

SEQ ID NO: 558939 - RNA, 23 nt, Artificial Sequence
  Synthetic
gagucaaguggcaucugucuuuc

SEQ ID NO: 558940 - RNA, 24 nt, Artificial Sequence
  Synthetic
cgagucaaguggcaucugucuuuc

SEQ ID NO: 558941 - RNA, 18 nt, Artificial Sequence
  Synthetic
aucuugaugaauucuuuc

SEQ ID NO: 558942 - RNA, 19 nt, Artificial Sequence
  Synthetic
gaucuugaugaauucuuuc

SEQ ID NO: 558943 - RNA, 20 nt, Artificial Sequence
  Synthetic
ugaucuugaugaauucuuuc

SEQ ID NO: 558944 - RNA, 21 nt, Artificial Sequence
  Synthetic
cugaucuugaugaauucuuuc

SEQ ID NO: 558945 - RNA, 22 nt, Artificial Sequence
  Synthetic
ucugaucuugaugaauucuuuc

SEQ ID NO: 558946 - RNA, 23 nt, Artificial Sequence
  Synthetic
cucugaucuugaugaauucuuuc

SEQ ID NO: 558947 - RNA, 24 nt, Artificial Sequence
  Synthetic
ucucugaucuugaugaauucuuuc

SEQ ID NO: 558948 - RNA, 18 nt, Artificial Sequence
  Synthetic
acugaucuagauucuuuc

SEQ ID NO: 558949 - RNA, 19 nt, Artificial Sequence
  Synthetic
cacugaucuagauucuuuc

SEQ ID NO: 558950 - RNA, 20 nt, Artificial Sequence
  Synthetic
gcacugaucuagauucuuuc

SEQ ID NO: 558951 - RNA, 21 nt, Artificial Sequence
  Synthetic
agcacugaucuagauucuuuc

SEQ ID NO: 558952 - RNA, 22 nt, Artificial Sequence
  Synthetic
aagcacugaucuagauucuuuc

SEQ ID NO: 558953 - RNA, 23 nt, Artificial Sequence
  Synthetic
aaagcacugaucuagauucuuuc

SEQ ID NO: 558954 - RNA, 24 nt, Artificial Sequence
  Synthetic
gaaagcacugaucuagauucuuuc

SEQ ID NO: 558955 - RNA, 18 nt, Artificial Sequence
  Synthetic
auauuguuaucuucuuuc

SEQ ID NO: 558956 - RNA, 19 nt, Artificial Sequence
  Synthetic
aauauuguuaucuucuuuc

SEQ ID NO: 558957 - RNA, 20 nt, Artificial Sequence
  Synthetic
uaauauuguuaucuucuuuc

SEQ ID NO: 558958 - RNA, 21 nt, Artificial Sequence
  Synthetic
cuaauauuguuaucuucuuuc

SEQ ID NO: 558959 - RNA, 22 nt, Artificial Sequence
  Synthetic
ucuaauauuguuaucuucuuuc

SEQ ID NO: 558960 - RNA, 23 nt, Artificial Sequence
  Synthetic
cucuaauauuguuaucuucuuuc

SEQ ID NO: 558961 - RNA, 24 nt, Artificial Sequence
  Synthetic
ccucuaauauuguuaucuucuuuc

SEQ ID NO: 558962 - RNA, 18 nt, Artificial Sequence
  Synthetic
ccuauaacuguuucuuuc

SEQ ID NO: 558963 - RNA, 19 nt, Artificial Sequence
  Synthetic
accuauaacuguuucuuuc

SEQ ID NO: 558964 - RNA, 20 nt, Artificial Sequence
  Synthetic
aaccuauaacuguuucuuuc

SEQ ID NO: 558965 - RNA, 21 nt, Artificial Sequence
  Synthetic
uaaccuauaacuguuucuuuc

SEQ ID NO: 558966 - RNA, 22 nt, Artificial Sequence
  Synthetic
auaaccuauaacuguuucuuuc

SEQ ID NO: 558967 - RNA, 23 nt, Artificial Sequence
  Synthetic
uauaaccuauaacuguuucuuuc

SEQ ID NO: 558968 - RNA, 24 nt, Artificial Sequence
  Synthetic
uuauaaccuauaacuguuucuuuc

SEQ ID NO: 558969 - RNA, 18 nt, Artificial Sequence
  Synthetic
uggguucuuguuucuuuc

SEQ ID NO: 558970 - RNA, 19 nt, Artificial Sequence
  Synthetic
guggguucuuguuucuuuc

SEQ ID NO: 558971 - RNA, 20 nt, Artificial Sequence
  Synthetic
gguggguucuuguuucuuuc

SEQ ID NO: 558972 - RNA, 21 nt, Artificial Sequence
  Synthetic
ugguggguucuuguuucuuuc

SEQ ID NO: 558973 - RNA, 22 nt, Artificial Sequence
  Synthetic
uugguggguucuuguuucuuuc

SEQ ID NO: 558974 - RNA, 23 nt, Artificial Sequence
  Synthetic
uuugguggguucuuguuucuuuc

SEQ ID NO: 558975 - RNA, 24 nt, Artificial Sequence
  Synthetic
uuuugguggguucuuguuucuuuc

SEQ ID NO: 558976 - RNA, 18 nt, Artificial Sequence
  Synthetic
acuguuuuguuuucuuuc

SEQ ID NO: 558977 - RNA, 19 nt, Artificial Sequence
  Synthetic
uacuguuuuguuuucuuuc

SEQ ID NO: 558978 - RNA, 20 nt, Artificial Sequence
  Synthetic
guacuguuuuguuuucuuuc

SEQ ID NO: 558979 - RNA, 21 nt, Artificial Sequence
  Synthetic
gguacuguuuuguuuucuuuc

SEQ ID NO: 558980 - RNA, 22 nt, Artificial Sequence
  Synthetic
ggguacuguuuuguuuucuuuc

SEQ ID NO: 558981 - RNA, 23 nt, Artificial Sequence
  Synthetic
gggguacuguuuuguuuucuuuc

SEQ ID NO: 558982 - RNA, 24 nt, Artificial Sequence
  Synthetic
agggguacuguuuuguuuucuuuc

SEQ ID NO: 558983 - RNA, 18 nt, Artificial Sequence
  Synthetic
agauauucuuaaaguuuc

SEQ ID NO: 558984 - RNA, 19 nt, Artificial Sequence
  Synthetic
cagauauucuuaaaguuuc

SEQ ID NO: 558985 - RNA, 20 nt, Artificial Sequence
  Synthetic
acagauauucuuaaaguuuc

SEQ ID NO: 558986 - RNA, 21 nt, Artificial Sequence
  Synthetic
gacagauauucuuaaaguuuc

SEQ ID NO: 558987 - RNA, 22 nt, Artificial Sequence
  Synthetic
agacagauauucuuaaaguuuc

SEQ ID NO: 558988 - RNA, 23 nt, Artificial Sequence
  Synthetic
aagacagauauucuuaaaguuuc

SEQ ID NO: 558989 - RNA, 24 nt, Artificial Sequence
  Synthetic
aaagacagauauucuuaaaguuuc

SEQ ID NO: 558990 - RNA, 18 nt, Artificial Sequence
  Synthetic
accaugauuauaaguuuc

SEQ ID NO: 558991 - RNA, 19 nt, Artificial Sequence
  Synthetic
caccaugauuauaaguuuc

SEQ ID NO: 558992 - RNA, 20 nt, Artificial Sequence
  Synthetic
ccaccaugauuauaaguuuc

SEQ ID NO: 558993 - RNA, 21 nt, Artificial Sequence
  Synthetic
uccaccaugauuauaaguuuc

SEQ ID NO: 558994 - RNA, 22 nt, Artificial Sequence
  Synthetic
uuccaccaugauuauaaguuuc

SEQ ID NO: 558995 - RNA, 23 nt, Artificial Sequence
  Synthetic
uuuccaccaugauuauaaguuuc

SEQ ID NO: 558996 - RNA, 24 nt, Artificial Sequence
  Synthetic
cuuuccaccaugauuauaaguuuc

SEQ ID NO: 558997 - RNA, 21 nt, Artificial Sequence
  Synthetic
ucugccaugauuguaaguuuc

SEQ ID NO: 558998 - RNA, 22 nt, Artificial Sequence
  Synthetic
aucugccaugauuguaaguuuc

SEQ ID NO: 558999 - RNA, 23 nt, Artificial Sequence
  Synthetic
caucugccaugauuguaaguuuc

SEQ ID NO: 559000 - RNA, 24 nt, Artificial Sequence
  Synthetic
ccaucugccaugauuguaaguuuc

SEQ ID NO: 559001 - RNA, 18 nt, Artificial Sequence
  Synthetic
acagugauuguaaguuuc

SEQ ID NO: 559002 - RNA, 19 nt, Artificial Sequence
  Synthetic
cacagugauuguaaguuuc

SEQ ID NO: 559003 - RNA, 20 nt, Artificial Sequence
  Synthetic
ccacagugauuguaaguuuc

SEQ ID NO: 559004 - RNA, 21 nt, Artificial Sequence
  Synthetic
uccacagugauuguaaguuuc

SEQ ID NO: 559005 - RNA, 22 nt, Artificial Sequence
  Synthetic
uuccacagugauuguaaguuuc

SEQ ID NO: 559006 - RNA, 23 nt, Artificial Sequence
  Synthetic
cuuccacagugauuguaaguuuc

SEQ ID NO: 559007 - RNA, 24 nt, Artificial Sequence
  Synthetic
gcuuccacagugauuguaaguuuc

SEQ ID NO: 559008 - RNA, 18 nt, Artificial Sequence
  Synthetic
uuuauuucuuuaaguuuc

SEQ ID NO: 559009 - RNA, 19 nt, Artificial Sequence
  Synthetic
cuuuauuucuuuaaguuuc

SEQ ID NO: 559010 - RNA, 20 nt, Artificial Sequence
  Synthetic
ucuuuauuucuuuaaguuuc

SEQ ID NO: 559011 - RNA, 21 nt, Artificial Sequence
  Synthetic
gucuuuauuucuuuaaguuuc

SEQ ID NO: 559012 - RNA, 22 nt, Artificial Sequence
  Synthetic
ugucuuuauuucuuuaaguuuc

SEQ ID NO: 559013 - RNA, 23 nt, Artificial Sequence
  Synthetic
uugucuuuauuucuuuaaguuuc

SEQ ID NO: 559014 - RNA, 24 nt, Artificial Sequence
  Synthetic
uuugucuuuauuucuuuaaguuuc

SEQ ID NO: 559015 - RNA, 18 nt, Artificial Sequence
  Synthetic
gccaugauuuuaaguuuc

SEQ ID NO: 559016 - RNA, 19 nt, Artificial Sequence
  Synthetic
ugccaugauuuuaaguuuc

SEQ ID NO: 559017 - RNA, 20 nt, Artificial Sequence
  Synthetic
cugccaugauuuuaaguuuc

SEQ ID NO: 559018 - RNA, 21 nt, Artificial Sequence
  Synthetic
ucugccaugauuuuaaguuuc

SEQ ID NO: 559019 - RNA, 22 nt, Artificial Sequence
  Synthetic
uucugccaugauuuuaaguuuc

SEQ ID NO: 559020 - RNA, 23 nt, Artificial Sequence
  Synthetic
uuucugccaugauuuuaaguuuc

SEQ ID NO: 559021 - RNA, 24 nt, Artificial Sequence
  Synthetic
uuuucugccaugauuuuaaguuuc

SEQ ID NO: 559022 - RNA, 18 nt, Artificial Sequence
  Synthetic
gcacuuuaaaacaguuuc

SEQ ID NO: 559023 - RNA, 19 nt, Artificial Sequence
  Synthetic
ugcacuuuaaaacaguuuc

SEQ ID NO: 559024 - RNA, 20 nt, Artificial Sequence
  Synthetic
cugcacuuuaaaacaguuuc

SEQ ID NO: 559025 - RNA, 21 nt, Artificial Sequence
  Synthetic
ucugcacuuuaaaacaguuuc

SEQ ID NO: 559026 - RNA, 22 nt, Artificial Sequence
  Synthetic
uucugcacuuuaaaacaguuuc

SEQ ID NO: 559027 - RNA, 23 nt, Artificial Sequence
  Synthetic
cuucugcacuuuaaaacaguuuc

SEQ ID NO: 559028 - RNA, 24 nt, Artificial Sequence
  Synthetic
ucuucugcacuuuaaaacaguuuc

SEQ ID NO: 559029 - RNA, 18 nt, Artificial Sequence
  Synthetic
cuaacuaaguacaguuuc

SEQ ID NO: 559030 - RNA, 19 nt, Artificial Sequence
  Synthetic
gcuaacuaaguacaguuuc

SEQ ID NO: 559031 - RNA, 20 nt, Artificial Sequence
  Synthetic
agcuaacuaaguacaguuuc

SEQ ID NO: 559032 - RNA, 21 nt, Artificial Sequence
  Synthetic
uagcuaacuaaguacaguuuc

SEQ ID NO: 559033 - RNA, 22 nt, Artificial Sequence
  Synthetic
auagcuaacuaaguacaguuuc

SEQ ID NO: 559034 - RNA, 23 nt, Artificial Sequence
  Synthetic
uauagcuaacuaaguacaguuuc

SEQ ID NO: 559035 - RNA, 24 nt, Artificial Sequence
  Synthetic
cuauagcuaacuaaguacaguuuc

SEQ ID NO: 559036 - RNA, 18 nt, Artificial Sequence
  Synthetic
uacuaaaauuacaguuuc

SEQ ID NO: 559037 - RNA, 19 nt, Artificial Sequence
  Synthetic
uuacuaaaauuacaguuuc

SEQ ID NO: 559038 - RNA, 20 nt, Artificial Sequence
  Synthetic
cuuacuaaaauuacaguuuc

SEQ ID NO: 559039 - RNA, 21 nt, Artificial Sequence
  Synthetic
gcuuacuaaaauuacaguuuc

SEQ ID NO: 559040 - RNA, 22 nt, Artificial Sequence
  Synthetic
ugcuuacuaaaauuacaguuuc

SEQ ID NO: 559041 - RNA, 23 nt, Artificial Sequence
  Synthetic
cugcuuacuaaaauuacaguuuc

SEQ ID NO: 559042 - RNA, 24 nt, Artificial Sequence
  Synthetic
ccugcuuacuaaaauuacaguuuc

SEQ ID NO: 559043 - RNA, 18 nt, Artificial Sequence
  Synthetic
ucagaagcuugcaguuuc

SEQ ID NO: 559044 - RNA, 19 nt, Artificial Sequence
  Synthetic
uucagaagcuugcaguuuc

SEQ ID NO: 559045 - RNA, 20 nt, Artificial Sequence
  Synthetic
auucagaagcuugcaguuuc

SEQ ID NO: 559046 - RNA, 21 nt, Artificial Sequence
  Synthetic
gauucagaagcuugcaguuuc

SEQ ID NO: 559047 - RNA, 22 nt, Artificial Sequence
  Synthetic
ugauucagaagcuugcaguuuc

SEQ ID NO: 559048 - RNA, 23 nt, Artificial Sequence
  Synthetic
augauucagaagcuugcaguuuc

SEQ ID NO: 559049 - RNA, 24 nt, Artificial Sequence
  Synthetic
aaugauucagaagcuugcaguuuc

SEQ ID NO: 559050 - RNA, 18 nt, Artificial Sequence
  Synthetic
aacugcuauuucaguuuc

SEQ ID NO: 559051 - RNA, 19 nt, Artificial Sequence
  Synthetic
gaacugcuauuucaguuuc

SEQ ID NO: 559052 - RNA, 20 nt, Artificial Sequence
  Synthetic
ugaacugcuauuucaguuuc

SEQ ID NO: 559053 - RNA, 21 nt, Artificial Sequence
  Synthetic
uugaacugcuauuucaguuuc

SEQ ID NO: 559054 - RNA, 22 nt, Artificial Sequence
  Synthetic
cuugaacugcuauuucaguuuc

SEQ ID NO: 559055 - RNA, 23 nt, Artificial Sequence
  Synthetic
gcuugaacugcuauuucaguuuc

SEQ ID NO: 559056 - RNA, 24 nt, Artificial Sequence
  Synthetic
agcuugaacugcuauuucaguuuc

SEQ ID NO: 559057 - RNA, 18 nt, Artificial Sequence
  Synthetic
uaaaauaaagagaguuuc

SEQ ID NO: 559058 - RNA, 19 nt, Artificial Sequence
  Synthetic
auaaaauaaagagaguuuc

SEQ ID NO: 559059 - RNA, 20 nt, Artificial Sequence
  Synthetic
gauaaaauaaagagaguuuc

SEQ ID NO: 559060 - RNA, 21 nt, Artificial Sequence
  Synthetic
ugauaaaauaaagagaguuuc

SEQ ID NO: 559061 - RNA, 22 nt, Artificial Sequence
  Synthetic
uugauaaaauaaagagaguuuc

SEQ ID NO: 559062 - RNA, 23 nt, Artificial Sequence
  Synthetic
auugauaaaauaaagagaguuuc

SEQ ID NO: 559063 - RNA, 24 nt, Artificial Sequence
  Synthetic
aauugauaaaauaaagagaguuuc

SEQ ID NO: 559064 - RNA, 18 nt, Artificial Sequence
  Synthetic
uaaaaccagaauaguuuc

SEQ ID NO: 559065 - RNA, 19 nt, Artificial Sequence
  Synthetic
uuaaaaccagaauaguuuc

SEQ ID NO: 559066 - RNA, 20 nt, Artificial Sequence
  Synthetic
guuaaaaccagaauaguuuc

SEQ ID NO: 559067 - RNA, 21 nt, Artificial Sequence
  Synthetic
uguuaaaaccagaauaguuuc

SEQ ID NO: 559068 - RNA, 22 nt, Artificial Sequence
  Synthetic
auguuaaaaccagaauaguuuc

SEQ ID NO: 559069 - RNA, 23 nt, Artificial Sequence
  Synthetic
gauguuaaaaccagaauaguuuc

SEQ ID NO: 559070 - RNA, 24 nt, Artificial Sequence
  Synthetic
cgauguuaaaaccagaauaguuuc

SEQ ID NO: 559071 - RNA, 18 nt, Artificial Sequence
  Synthetic
ugaggugguaauaguuuc

SEQ ID NO: 559072 - RNA, 19 nt, Artificial Sequence
  Synthetic
uugaggugguaauaguuuc

SEQ ID NO: 559073 - RNA, 20 nt, Artificial Sequence
  Synthetic
cuugaggugguaauaguuuc

SEQ ID NO: 559074 - RNA, 21 nt, Artificial Sequence
  Synthetic
ccuugaggugguaauaguuuc

SEQ ID NO: 559075 - RNA, 22 nt, Artificial Sequence
  Synthetic
cccuugaggugguaauaguuuc

SEQ ID NO: 559076 - RNA, 23 nt, Artificial Sequence
  Synthetic
gcccuugaggugguaauaguuuc

SEQ ID NO: 559077 - RNA, 24 nt, Artificial Sequence
  Synthetic
agcccuugaggugguaauaguuuc

SEQ ID NO: 559078 - RNA, 18 nt, Artificial Sequence
  Synthetic
gaaaggggacauaguuuc

SEQ ID NO: 559079 - RNA, 19 nt, Artificial Sequence
  Synthetic
ugaaaggggacauaguuuc

SEQ ID NO: 559080 - RNA, 20 nt, Artificial Sequence
  Synthetic
gugaaaggggacauaguuuc

SEQ ID NO: 559081 - RNA, 21 nt, Artificial Sequence
  Synthetic
ugugaaaggggacauaguuuc

SEQ ID NO: 559082 - RNA, 22 nt, Artificial Sequence
  Synthetic
cugugaaaggggacauaguuuc

SEQ ID NO: 559083 - RNA, 23 nt, Artificial Sequence
  Synthetic
acugugaaaggggacauaguuuc

SEQ ID NO: 559084 - RNA, 24 nt, Artificial Sequence
  Synthetic
uacugugaaaggggacauaguuuc

SEQ ID NO: 559085 - RNA, 18 nt, Artificial Sequence
  Synthetic
aauugugaguuuaguuuc

SEQ ID NO: 559086 - RNA, 19 nt, Artificial Sequence
  Synthetic
aaauugugaguuuaguuuc

SEQ ID NO: 559087 - RNA, 20 nt, Artificial Sequence
  Synthetic
uaaauugugaguuuaguuuc

SEQ ID NO: 559088 - RNA, 21 nt, Artificial Sequence
  Synthetic
auaaauugugaguuuaguuuc

SEQ ID NO: 559089 - RNA, 22 nt, Artificial Sequence
  Synthetic
cauaaauugugaguuuaguuuc

SEQ ID NO: 559090 - RNA, 23 nt, Artificial Sequence
  Synthetic
ucauaaauugugaguuuaguuuc

SEQ ID NO: 559091 - RNA, 24 nt, Artificial Sequence
  Synthetic
cucauaaauugugaguuuaguuuc

SEQ ID NO: 559092 - RNA, 18 nt, Artificial Sequence
  Synthetic
uuuggaaugaaagguuuc

SEQ ID NO: 559093 - RNA, 19 nt, Artificial Sequence
  Synthetic
guuuggaaugaaagguuuc

SEQ ID NO: 559094 - RNA, 20 nt, Artificial Sequence
  Synthetic
aguuuggaaugaaagguuuc

SEQ ID NO: 559095 - RNA, 21 nt, Artificial Sequence
  Synthetic
uaguuuggaaugaaagguuuc

SEQ ID NO: 559096 - RNA, 22 nt, Artificial Sequence
  Synthetic
guaguuuggaaugaaagguuuc

SEQ ID NO: 559097 - RNA, 23 nt, Artificial Sequence
  Synthetic
uguaguuuggaaugaaagguuuc

SEQ ID NO: 559098 - RNA, 24 nt, Artificial Sequence
  Synthetic
auguaguuuggaaugaaagguuuc

SEQ ID NO: 559099 - RNA, 18 nt, Artificial Sequence
  Synthetic
uaucacuucugggguuuc

SEQ ID NO: 559100 - RNA, 19 nt, Artificial Sequence
  Synthetic
auaucacuucugggguuuc

SEQ ID NO: 559101 - RNA, 20 nt, Artificial Sequence
  Synthetic
aauaucacuucugggguuuc

SEQ ID NO: 559102 - RNA, 21 nt, Artificial Sequence
  Synthetic
aaauaucacuucugggguuuc

SEQ ID NO: 559103 - RNA, 22 nt, Artificial Sequence
  Synthetic
caaauaucacuucugggguuuc

SEQ ID NO: 559104 - RNA, 23 nt, Artificial Sequence
  Synthetic
ucaaauaucacuucugggguuuc

SEQ ID NO: 559105 - RNA, 24 nt, Artificial Sequence
  Synthetic
gucaaauaucacuucugggguuuc

SEQ ID NO: 559106 - RNA, 18 nt, Artificial Sequence
  Synthetic
uucaagauaauggguuuc

SEQ ID NO: 559107 - RNA, 19 nt, Artificial Sequence
  Synthetic
auucaagauaauggguuuc

SEQ ID NO: 559108 - RNA, 20 nt, Artificial Sequence
  Synthetic
cauucaagauaauggguuuc

SEQ ID NO: 559109 - RNA, 21 nt, Artificial Sequence
  Synthetic
acauucaagauaauggguuuc

SEQ ID NO: 559110 - RNA, 22 nt, Artificial Sequence
  Synthetic
aacauucaagauaauggguuuc

SEQ ID NO: 559111 - RNA, 23 nt, Artificial Sequence
  Synthetic
aaacauucaagauaauggguuuc

SEQ ID NO: 559112 - RNA, 24 nt, Artificial Sequence
  Synthetic
aaaacauucaagauaauggguuuc

SEQ ID NO: 559113 - RNA, 18 nt, Artificial Sequence
  Synthetic
ggaggcaaaaaugguuuc

SEQ ID NO: 559114 - RNA, 19 nt, Artificial Sequence
  Synthetic
aggaggcaaaaaugguuuc

SEQ ID NO: 559115 - RNA, 20 nt, Artificial Sequence
  Synthetic
uaggaggcaaaaaugguuuc

SEQ ID NO: 559116 - RNA, 21 nt, Artificial Sequence
  Synthetic
cuaggaggcaaaaaugguuuc

SEQ ID NO: 559117 - RNA, 22 nt, Artificial Sequence
  Synthetic
ucuaggaggcaaaaaugguuuc

SEQ ID NO: 559118 - RNA, 23 nt, Artificial Sequence
  Synthetic
gucuaggaggcaaaaaugguuuc

SEQ ID NO: 559119 - RNA, 24 nt, Artificial Sequence
  Synthetic
ggucuaggaggcaaaaaugguuuc

SEQ ID NO: 559120 - RNA, 18 nt, Artificial Sequence
  Synthetic
ggaaggcaaaaugguuuc

SEQ ID NO: 559121 - RNA, 19 nt, Artificial Sequence
  Synthetic
aggaaggcaaaaugguuuc

SEQ ID NO: 559122 - RNA, 20 nt, Artificial Sequence
  Synthetic
uaggaaggcaaaaugguuuc

SEQ ID NO: 559123 - RNA, 21 nt, Artificial Sequence
  Synthetic
cuaggaaggcaaaaugguuuc

SEQ ID NO: 559124 - RNA, 22 nt, Artificial Sequence
  Synthetic
ccuaggaaggcaaaaugguuuc

SEQ ID NO: 559125 - RNA, 23 nt, Artificial Sequence
  Synthetic
gccuaggaaggcaaaaugguuuc

SEQ ID NO: 559126 - RNA, 24 nt, Artificial Sequence
  Synthetic
ggccuaggaaggcaaaaugguuuc

SEQ ID NO: 559127 - RNA, 18 nt, Artificial Sequence
  Synthetic
aagugaccaacugguuuc

SEQ ID NO: 559128 - RNA, 19 nt, Artificial Sequence
  Synthetic
gaagugaccaacugguuuc

SEQ ID NO: 559129 - RNA, 20 nt, Artificial Sequence
  Synthetic
ggaagugaccaacugguuuc

SEQ ID NO: 559130 - RNA, 21 nt, Artificial Sequence
  Synthetic
uggaagugaccaacugguuuc

SEQ ID NO: 559131 - RNA, 22 nt, Artificial Sequence
  Synthetic
uuggaagugaccaacugguuuc

SEQ ID NO: 559132 - RNA, 23 nt, Artificial Sequence
  Synthetic
auuggaagugaccaacugguuuc

SEQ ID NO: 559133 - RNA, 24 nt, Artificial Sequence
  Synthetic
aauuggaagugaccaacugguuuc

SEQ ID NO: 559134 - RNA, 18 nt, Artificial Sequence
  Synthetic
auuuuaggcucugguuuc

SEQ ID NO: 559135 - RNA, 19 nt, Artificial Sequence
  Synthetic
cauuuuaggcucugguuuc

SEQ ID NO: 559136 - RNA, 20 nt, Artificial Sequence
  Synthetic
acauuuuaggcucugguuuc

SEQ ID NO: 559137 - RNA, 21 nt, Artificial Sequence
  Synthetic
aacauuuuaggcucugguuuc

SEQ ID NO: 559138 - RNA, 22 nt, Artificial Sequence
  Synthetic
caacauuuuaggcucugguuuc

SEQ ID NO: 559139 - RNA, 23 nt, Artificial Sequence
  Synthetic
gcaacauuuuaggcucugguuuc

SEQ ID NO: 559140 - RNA, 24 nt, Artificial Sequence
  Synthetic
ggcaacauuuuaggcucugguuuc

SEQ ID NO: 559141 - RNA, 18 nt, Artificial Sequence
  Synthetic
uuaccuaucagugguuuc

SEQ ID NO: 559142 - RNA, 19 nt, Artificial Sequence
  Synthetic
uuuaccuaucagugguuuc

SEQ ID NO: 559143 - RNA, 20 nt, Artificial Sequence
  Synthetic
uuuuaccuaucagugguuuc

SEQ ID NO: 559144 - RNA, 21 nt, Artificial Sequence
  Synthetic
cuuuuaccuaucagugguuuc

SEQ ID NO: 559145 - RNA, 22 nt, Artificial Sequence
  Synthetic
gcuuuuaccuaucagugguuuc

SEQ ID NO: 559146 - RNA, 23 nt, Artificial Sequence
  Synthetic
ugcuuuuaccuaucagugguuuc

SEQ ID NO: 559147 - RNA, 24 nt, Artificial Sequence
  Synthetic
gugcuuuuaccuaucagugguuuc

SEQ ID NO: 559148 - RNA, 18 nt, Artificial Sequence
  Synthetic
aaauagaauggugguuuc

SEQ ID NO: 559149 - RNA, 19 nt, Artificial Sequence
  Synthetic
gaaauagaauggugguuuc

SEQ ID NO: 559150 - RNA, 20 nt, Artificial Sequence
  Synthetic
ggaaauagaauggugguuuc

SEQ ID NO: 559151 - RNA, 21 nt, Artificial Sequence
  Synthetic
aggaaauagaauggugguuuc

SEQ ID NO: 559152 - RNA, 22 nt, Artificial Sequence
  Synthetic
caggaaauagaauggugguuuc

SEQ ID NO: 559153 - RNA, 23 nt, Artificial Sequence
  Synthetic
acaggaaauagaauggugguuuc

SEQ ID NO: 559154 - RNA, 24 nt, Artificial Sequence
  Synthetic
gacaggaaauagaauggugguuuc

SEQ ID NO: 559155 - RNA, 18 nt, Artificial Sequence
  Synthetic
gagcacugcugugguuuc

SEQ ID NO: 559156 - RNA, 19 nt, Artificial Sequence
  Synthetic
ugagcacugcugugguuuc

SEQ ID NO: 559157 - RNA, 20 nt, Artificial Sequence
  Synthetic
uugagcacugcugugguuuc

SEQ ID NO: 559158 - RNA, 21 nt, Artificial Sequence
  Synthetic
auugagcacugcugugguuuc

SEQ ID NO: 559159 - RNA, 22 nt, Artificial Sequence
  Synthetic
aauugagcacugcugugguuuc

SEQ ID NO: 559160 - RNA, 23 nt, Artificial Sequence
  Synthetic
caauugagcacugcugugguuuc

SEQ ID NO: 559161 - RNA, 24 nt, Artificial Sequence
  Synthetic
acaauugagcacugcugugguuuc

SEQ ID NO: 559162 - RNA, 18 nt, Artificial Sequence
  Synthetic
uucauuuucuuugguuuc

SEQ ID NO: 559163 - RNA, 19 nt, Artificial Sequence
  Synthetic
auucauuuucuuugguuuc

SEQ ID NO: 559164 - RNA, 20 nt, Artificial Sequence
  Synthetic
gauucauuuucuuugguuuc

SEQ ID NO: 559165 - RNA, 21 nt, Artificial Sequence
  Synthetic
ugauucauuuucuuugguuuc

SEQ ID NO: 559166 - RNA, 22 nt, Artificial Sequence
  Synthetic
gugauucauuuucuuugguuuc

SEQ ID NO: 559167 - RNA, 23 nt, Artificial Sequence
  Synthetic
agugauucauuuucuuugguuuc

SEQ ID NO: 559168 - RNA, 24 nt, Artificial Sequence
  Synthetic
cagugauucauuuucuuugguuuc

SEQ ID NO: 559169 - RNA, 18 nt, Artificial Sequence
  Synthetic
uauaucagugaauguuuc

SEQ ID NO: 559170 - RNA, 19 nt, Artificial Sequence
  Synthetic
uuauaucagugaauguuuc

SEQ ID NO: 559171 - RNA, 20 nt, Artificial Sequence
  Synthetic
cuuauaucagugaauguuuc

SEQ ID NO: 559172 - RNA, 21 nt, Artificial Sequence
  Synthetic
gcuuauaucagugaauguuuc

SEQ ID NO: 559173 - RNA, 22 nt, Artificial Sequence
  Synthetic
ggcuuauaucagugaauguuuc

SEQ ID NO: 559174 - RNA, 23 nt, Artificial Sequence
  Synthetic
uggcuuauaucagugaauguuuc

SEQ ID NO: 559175 - RNA, 24 nt, Artificial Sequence
  Synthetic
auggcuuauaucagugaauguuuc

SEQ ID NO: 559176 - RNA, 18 nt, Artificial Sequence
  Synthetic
caagcagaccacuguuuc

SEQ ID NO: 559177 - RNA, 19 nt, Artificial Sequence
  Synthetic
acaagcagaccacuguuuc

SEQ ID NO: 559178 - RNA, 20 nt, Artificial Sequence
  Synthetic
aacaagcagaccacuguuuc

SEQ ID NO: 559179 - RNA, 21 nt, Artificial Sequence
  Synthetic
caacaagcagaccacuguuuc

SEQ ID NO: 559180 - RNA, 22 nt, Artificial Sequence
  Synthetic
ucaacaagcagaccacuguuuc

SEQ ID NO: 559181 - RNA, 23 nt, Artificial Sequence
  Synthetic
uucaacaagcagaccacuguuuc

SEQ ID NO: 559182 - RNA, 24 nt, Artificial Sequence
  Synthetic
cuucaacaagcagaccacuguuuc

SEQ ID NO: 559183 - RNA, 18 nt, Artificial Sequence
  Synthetic
cuacauugacucuguuuc

SEQ ID NO: 559184 - RNA, 19 nt, Artificial Sequence
  Synthetic
acuacauugacucuguuuc

SEQ ID NO: 559185 - RNA, 20 nt, Artificial Sequence
  Synthetic
cacuacauugacucuguuuc

SEQ ID NO: 559186 - RNA, 21 nt, Artificial Sequence
  Synthetic
ucacuacauugacucuguuuc

SEQ ID NO: 559187 - RNA, 22 nt, Artificial Sequence
  Synthetic
aucacuacauugacucuguuuc

SEQ ID NO: 559188 - RNA, 23 nt, Artificial Sequence
  Synthetic
aaucacuacauugacucuguuuc

SEQ ID NO: 559189 - RNA, 24 nt, Artificial Sequence
  Synthetic
uaaucacuacauugacucuguuuc

SEQ ID NO: 559190 - RNA, 18 nt, Artificial Sequence
  Synthetic
caagcaggccaguguuuc

SEQ ID NO: 559191 - RNA, 19 nt, Artificial Sequence
  Synthetic
ucaagcaggccaguguuuc

SEQ ID NO: 559192 - RNA, 20 nt, Artificial Sequence
  Synthetic
cucaagcaggccaguguuuc

SEQ ID NO: 559193 - RNA, 21 nt, Artificial Sequence
  Synthetic
ucucaagcaggccaguguuuc

SEQ ID NO: 559194 - RNA, 22 nt, Artificial Sequence
  Synthetic
aucucaagcaggccaguguuuc

SEQ ID NO: 559195 - RNA, 23 nt, Artificial Sequence
  Synthetic
aaucucaagcaggccaguguuuc

SEQ ID NO: 559196 - RNA, 24 nt, Artificial Sequence
  Synthetic
gaaucucaagcaggccaguguuuc

SEQ ID NO: 559197 - RNA, 18 nt, Artificial Sequence
  Synthetic
aagagagggaauuguuuc

SEQ ID NO: 559198 - RNA, 19 nt, Artificial Sequence
  Synthetic
aaagagagggaauuguuuc

SEQ ID NO: 559199 - RNA, 20 nt, Artificial Sequence
  Synthetic
uaaagagagggaauuguuuc

SEQ ID NO: 559200 - RNA, 21 nt, Artificial Sequence
  Synthetic
auaaagagagggaauuguuuc

SEQ ID NO: 559201 - RNA, 22 nt, Artificial Sequence
  Synthetic
gauaaagagagggaauuguuuc

SEQ ID NO: 559202 - RNA, 23 nt, Artificial Sequence
  Synthetic
ggauaaagagagggaauuguuuc

SEQ ID NO: 559203 - RNA, 24 nt, Artificial Sequence
  Synthetic
gggauaaagagagggaauuguuuc

SEQ ID NO: 559204 - RNA, 18 nt, Artificial Sequence
  Synthetic
aacagaaguuauuguuuc

SEQ ID NO: 559205 - RNA, 19 nt, Artificial Sequence
  Synthetic
caacagaaguuauuguuuc

SEQ ID NO: 559206 - RNA, 20 nt, Artificial Sequence
  Synthetic
ucaacagaaguuauuguuuc

SEQ ID NO: 559207 - RNA, 21 nt, Artificial Sequence
  Synthetic
uucaacagaaguuauuguuuc

SEQ ID NO: 559208 - RNA, 22 nt, Artificial Sequence
  Synthetic
cuucaacagaaguuauuguuuc

SEQ ID NO: 559209 - RNA, 23 nt, Artificial Sequence
  Synthetic
gcuucaacagaaguuauuguuuc

SEQ ID NO: 559210 - RNA, 24 nt, Artificial Sequence
  Synthetic
agcuucaacagaaguuauuguuuc

SEQ ID NO: 559211 - RNA, 18 nt, Artificial Sequence
  Synthetic
uuugguacuccuuguuuc

SEQ ID NO: 559212 - RNA, 19 nt, Artificial Sequence
  Synthetic
cuuugguacuccuuguuuc

SEQ ID NO: 559213 - RNA, 20 nt, Artificial Sequence
  Synthetic
ccuuugguacuccuuguuuc

SEQ ID NO: 559214 - RNA, 21 nt, Artificial Sequence
  Synthetic
cccuuugguacuccuuguuuc

SEQ ID NO: 559215 - RNA, 22 nt, Artificial Sequence
  Synthetic
ccccuuugguacuccuuguuuc

SEQ ID NO: 559216 - RNA, 23 nt, Artificial Sequence
  Synthetic
uccccuuugguacuccuuguuuc

SEQ ID NO: 559217 - RNA, 24 nt, Artificial Sequence
  Synthetic
cuccccuuugguacuccuuguuuc

SEQ ID NO: 559218 - RNA, 18 nt, Artificial Sequence
  Synthetic
uuacauaaaauuuguuuc

SEQ ID NO: 559219 - RNA, 19 nt, Artificial Sequence
  Synthetic
auuacauaaaauuuguuuc

SEQ ID NO: 559220 - RNA, 20 nt, Artificial Sequence
  Synthetic
cauuacauaaaauuuguuuc

SEQ ID NO: 559221 - RNA, 21 nt, Artificial Sequence
  Synthetic
ucauuacauaaaauuuguuuc

SEQ ID NO: 559222 - RNA, 22 nt, Artificial Sequence
  Synthetic
uucauuacauaaaauuuguuuc

SEQ ID NO: 559223 - RNA, 23 nt, Artificial Sequence
  Synthetic
uuucauuacauaaaauuuguuuc

SEQ ID NO: 559224 - RNA, 24 nt, Artificial Sequence
  Synthetic
uuuucauuacauaaaauuuguuuc

SEQ ID NO: 559225 - RNA, 18 nt, Artificial Sequence
  Synthetic
guuaauggcauuuguuuc

SEQ ID NO: 559226 - RNA, 19 nt, Artificial Sequence
  Synthetic
gguuaauggcauuuguuuc

SEQ ID NO: 559227 - RNA, 20 nt, Artificial Sequence
  Synthetic
ggguuaauggcauuuguuuc

SEQ ID NO: 559228 - RNA, 21 nt, Artificial Sequence
  Synthetic
aggguuaauggcauuuguuuc

SEQ ID NO: 559229 - RNA, 22 nt, Artificial Sequence
  Synthetic
gaggguuaauggcauuuguuuc

SEQ ID NO: 559230 - RNA, 23 nt, Artificial Sequence
  Synthetic
ggaggguuaauggcauuuguuuc

SEQ ID NO: 559231 - RNA, 24 nt, Artificial Sequence
  Synthetic
aggaggguuaauggcauuuguuuc

SEQ ID NO: 559232 - RNA, 18 nt, Artificial Sequence
  Synthetic
ggaaauaauuuuuguuuc

SEQ ID NO: 559233 - RNA, 19 nt, Artificial Sequence
  Synthetic
uggaaauaauuuuuguuuc

SEQ ID NO: 559234 - RNA, 20 nt, Artificial Sequence
  Synthetic
auggaaauaauuuuuguuuc

SEQ ID NO: 559235 - RNA, 21 nt, Artificial Sequence
  Synthetic
uauggaaauaauuuuuguuuc

SEQ ID NO: 559236 - RNA, 22 nt, Artificial Sequence
  Synthetic
uuauggaaauaauuuuuguuuc

SEQ ID NO: 559237 - RNA, 23 nt, Artificial Sequence
  Synthetic
uuuauggaaauaauuuuuguuuc

SEQ ID NO: 559238 - RNA, 24 nt, Artificial Sequence
  Synthetic
cuuuauggaaauaauuuuuguuuc

SEQ ID NO: 559239 - RNA, 18 nt, Artificial Sequence
  Synthetic
ucauaauagaaaauuuuc

SEQ ID NO: 559240 - RNA, 19 nt, Artificial Sequence
  Synthetic
aucauaauagaaaauuuuc

SEQ ID NO: 559241 - RNA, 20 nt, Artificial Sequence
  Synthetic
aaucauaauagaaaauuuuc

SEQ ID NO: 559242 - RNA, 21 nt, Artificial Sequence
  Synthetic
caaucauaauagaaaauuuuc

SEQ ID NO: 559243 - RNA, 22 nt, Artificial Sequence
  Synthetic
acaaucauaauagaaaauuuuc

SEQ ID NO: 559244 - RNA, 23 nt, Artificial Sequence
  Synthetic
aacaaucauaauagaaaauuuuc

SEQ ID NO: 559245 - RNA, 24 nt, Artificial Sequence
  Synthetic
aaacaaucauaauagaaaauuuuc

SEQ ID NO: 559246 - RNA, 18 nt, Artificial Sequence
  Synthetic
gauauucaugaaauuuuc

SEQ ID NO: 559247 - RNA, 19 nt, Artificial Sequence
  Synthetic
ugauauucaugaaauuuuc

SEQ ID NO: 559248 - RNA, 20 nt, Artificial Sequence
  Synthetic
cugauauucaugaaauuuuc

SEQ ID NO: 559249 - RNA, 21 nt, Artificial Sequence
  Synthetic
ccugauauucaugaaauuuuc

SEQ ID NO: 559250 - RNA, 22 nt, Artificial Sequence
  Synthetic
gccugauauucaugaaauuuuc

SEQ ID NO: 559251 - RNA, 23 nt, Artificial Sequence
  Synthetic
agccugauauucaugaaauuuuc

SEQ ID NO: 559252 - RNA, 24 nt, Artificial Sequence
  Synthetic
cagccugauauucaugaaauuuuc

SEQ ID NO: 559253 - RNA, 18 nt, Artificial Sequence
  Synthetic
aaaguauguuaaauuuuc

SEQ ID NO: 559254 - RNA, 19 nt, Artificial Sequence
  Synthetic
uaaaguauguuaaauuuuc

SEQ ID NO: 559255 - RNA, 20 nt, Artificial Sequence
  Synthetic
auaaaguauguuaaauuuuc

SEQ ID NO: 559256 - RNA, 21 nt, Artificial Sequence
  Synthetic
gauaaaguauguuaaauuuuc

SEQ ID NO: 559257 - RNA, 22 nt, Artificial Sequence
  Synthetic
agauaaaguauguuaaauuuuc

SEQ ID NO: 559258 - RNA, 23 nt, Artificial Sequence
  Synthetic
cagauaaaguauguuaaauuuuc

SEQ ID NO: 559259 - RNA, 24 nt, Artificial Sequence
  Synthetic
acagauaaaguauguuaaauuuuc

SEQ ID NO: 559260 - RNA, 18 nt, Artificial Sequence
  Synthetic
auauaguuuuaaauuuuc

SEQ ID NO: 559261 - RNA, 19 nt, Artificial Sequence
  Synthetic
cauauaguuuuaaauuuuc

SEQ ID NO: 559262 - RNA, 20 nt, Artificial Sequence
  Synthetic
ucauauaguuuuaaauuuuc

SEQ ID NO: 559263 - RNA, 21 nt, Artificial Sequence
  Synthetic
aucauauaguuuuaaauuuuc

SEQ ID NO: 559264 - RNA, 22 nt, Artificial Sequence
  Synthetic
uaucauauaguuuuaaauuuuc

SEQ ID NO: 559265 - RNA, 23 nt, Artificial Sequence
  Synthetic
guaucauauaguuuuaaauuuuc

SEQ ID NO: 559266 - RNA, 24 nt, Artificial Sequence
  Synthetic
uguaucauauaguuuuaaauuuuc

SEQ ID NO: 559267 - RNA, 18 nt, Artificial Sequence
  Synthetic
acauuuuccagaauuuuc

SEQ ID NO: 559268 - RNA, 19 nt, Artificial Sequence
  Synthetic
uacauuuuccagaauuuuc

SEQ ID NO: 559269 - RNA, 20 nt, Artificial Sequence
  Synthetic
cuacauuuuccagaauuuuc

SEQ ID NO: 559270 - RNA, 21 nt, Artificial Sequence
  Synthetic
acuacauuuuccagaauuuuc

SEQ ID NO: 559271 - RNA, 22 nt, Artificial Sequence
  Synthetic
uacuacauuuuccagaauuuuc

SEQ ID NO: 559272 - RNA, 23 nt, Artificial Sequence
  Synthetic
uuacuacauuuuccagaauuuuc

SEQ ID NO: 559273 - RNA, 24 nt, Artificial Sequence
  Synthetic
auuacuacauuuuccagaauuuuc

SEQ ID NO: 559274 - RNA, 18 nt, Artificial Sequence
  Synthetic
acuguacagugaauuuuc

SEQ ID NO: 559275 - RNA, 19 nt, Artificial Sequence
  Synthetic
aacuguacagugaauuuuc

SEQ ID NO: 559276 - RNA, 20 nt, Artificial Sequence
  Synthetic
aaacuguacagugaauuuuc

SEQ ID NO: 559277 - RNA, 21 nt, Artificial Sequence
  Synthetic
aaaacuguacagugaauuuuc

SEQ ID NO: 559278 - RNA, 22 nt, Artificial Sequence
  Synthetic
uaaaacuguacagugaauuuuc

SEQ ID NO: 559279 - RNA, 23 nt, Artificial Sequence
  Synthetic
guaaaacuguacagugaauuuuc

SEQ ID NO: 559280 - RNA, 24 nt, Artificial Sequence
  Synthetic
aguaaaacuguacagugaauuuuc

SEQ ID NO: 559281 - RNA, 18 nt, Artificial Sequence
  Synthetic
uuuaaaauucuaauuuuc

SEQ ID NO: 559282 - RNA, 19 nt, Artificial Sequence
  Synthetic
auuuaaaauucuaauuuuc

SEQ ID NO: 559283 - RNA, 20 nt, Artificial Sequence
  Synthetic
cauuuaaaauucuaauuuuc

SEQ ID NO: 559284 - RNA, 21 nt, Artificial Sequence
  Synthetic
gcauuuaaaauucuaauuuuc

SEQ ID NO: 559285 - RNA, 22 nt, Artificial Sequence
  Synthetic
ggcauuuaaaauucuaauuuuc

SEQ ID NO: 559286 - RNA, 23 nt, Artificial Sequence
  Synthetic
uggcauuuaaaauucuaauuuuc

SEQ ID NO: 559287 - RNA, 24 nt, Artificial Sequence
  Synthetic
cuggcauuuaaaauucuaauuuuc

SEQ ID NO: 559288 - RNA, 18 nt, Artificial Sequence
  Synthetic
guguauuuauuaauuuuc

SEQ ID NO: 559289 - RNA, 19 nt, Artificial Sequence
  Synthetic
aguguauuuauuaauuuuc

SEQ ID NO: 559290 - RNA, 20 nt, Artificial Sequence
  Synthetic
caguguauuuauuaauuuuc

SEQ ID NO: 559291 - RNA, 21 nt, Artificial Sequence
  Synthetic
acaguguauuuauuaauuuuc

SEQ ID NO: 559292 - RNA, 22 nt, Artificial Sequence
  Synthetic
aacaguguauuuauuaauuuuc

SEQ ID NO: 559293 - RNA, 23 nt, Artificial Sequence
  Synthetic
aaacaguguauuuauuaauuuuc

SEQ ID NO: 559294 - RNA, 24 nt, Artificial Sequence
  Synthetic
aaaacaguguauuuauuaauuuuc

SEQ ID NO: 559295 - RNA, 18 nt, Artificial Sequence
  Synthetic
gugguaccaaacauuuuc

SEQ ID NO: 559296 - RNA, 19 nt, Artificial Sequence
  Synthetic
agugguaccaaacauuuuc

SEQ ID NO: 559297 - RNA, 20 nt, Artificial Sequence
  Synthetic
aagugguaccaaacauuuuc

SEQ ID NO: 559298 - RNA, 21 nt, Artificial Sequence
  Synthetic
caagugguaccaaacauuuuc

SEQ ID NO: 559299 - RNA, 22 nt, Artificial Sequence
  Synthetic
ccaagugguaccaaacauuuuc

SEQ ID NO: 559300 - RNA, 23 nt, Artificial Sequence
  Synthetic
uccaagugguaccaaacauuuuc

SEQ ID NO: 559301 - RNA, 24 nt, Artificial Sequence
  Synthetic
uuccaagugguaccaaacauuuuc

SEQ ID NO: 559302 - RNA, 18 nt, Artificial Sequence
  Synthetic
ucaaaccauaacauuuuc

SEQ ID NO: 559303 - RNA, 19 nt, Artificial Sequence
  Synthetic
cucaaaccauaacauuuuc

SEQ ID NO: 559304 - RNA, 20 nt, Artificial Sequence
  Synthetic
ccucaaaccauaacauuuuc

SEQ ID NO: 559305 - RNA, 21 nt, Artificial Sequence
  Synthetic
uccucaaaccauaacauuuuc

SEQ ID NO: 559306 - RNA, 22 nt, Artificial Sequence
  Synthetic
uuccucaaaccauaacauuuuc

SEQ ID NO: 559307 - RNA, 23 nt, Artificial Sequence
  Synthetic
uuuccucaaaccauaacauuuuc

SEQ ID NO: 559308 - RNA, 24 nt, Artificial Sequence
  Synthetic
uuuuccucaaaccauaacauuuuc

SEQ ID NO: 559309 - RNA, 18 nt, Artificial Sequence
  Synthetic
uggcaugaacacauuuuc

SEQ ID NO: 559310 - RNA, 19 nt, Artificial Sequence
  Synthetic
auggcaugaacacauuuuc

SEQ ID NO: 559311 - RNA, 20 nt, Artificial Sequence
  Synthetic
cauggcaugaacacauuuuc

SEQ ID NO: 559312 - RNA, 21 nt, Artificial Sequence
  Synthetic
ccauggcaugaacacauuuuc

SEQ ID NO: 559313 - RNA, 22 nt, Artificial Sequence
  Synthetic
gccauggcaugaacacauuuuc

SEQ ID NO: 559314 - RNA, 23 nt, Artificial Sequence
  Synthetic
agccauggcaugaacacauuuuc

SEQ ID NO: 559315 - RNA, 24 nt, Artificial Sequence
  Synthetic
cagccauggcaugaacacauuuuc

SEQ ID NO: 559316 - RNA, 21 nt, Artificial Sequence
  Synthetic
agaaaagaaaaacccauuuuc

SEQ ID NO: 559317 - RNA, 22 nt, Artificial Sequence
  Synthetic
uagaaaagaaaaacccauuuuc

SEQ ID NO: 559318 - RNA, 23 nt, Artificial Sequence
  Synthetic
guagaaaagaaaaacccauuuuc

SEQ ID NO: 559319 - RNA, 24 nt, Artificial Sequence
  Synthetic
aguagaaaagaaaaacccauuuuc

SEQ ID NO: 559320 - RNA, 18 nt, Artificial Sequence
  Synthetic
agaaaggaggccauuuuc

SEQ ID NO: 559321 - RNA, 19 nt, Artificial Sequence
  Synthetic
aagaaaggaggccauuuuc

SEQ ID NO: 559322 - RNA, 20 nt, Artificial Sequence
  Synthetic
aaagaaaggaggccauuuuc

SEQ ID NO: 559323 - RNA, 21 nt, Artificial Sequence
  Synthetic
aaaagaaaggaggccauuuuc

SEQ ID NO: 559324 - RNA, 22 nt, Artificial Sequence
  Synthetic
aaaaagaaaggaggccauuuuc

SEQ ID NO: 559325 - RNA, 23 nt, Artificial Sequence
  Synthetic
caaaaagaaaggaggccauuuuc

SEQ ID NO: 559326 - RNA, 24 nt, Artificial Sequence
  Synthetic
gcaaaaagaaaggaggccauuuuc

SEQ ID NO: 559327 - RNA, 18 nt, Artificial Sequence
  Synthetic
aacugugaacucauuuuc

SEQ ID NO: 559328 - RNA, 19 nt, Artificial Sequence
  Synthetic
aaacugugaacucauuuuc

SEQ ID NO: 559329 - RNA, 20 nt, Artificial Sequence
  Synthetic
gaaacugugaacucauuuuc

SEQ ID NO: 559330 - RNA, 21 nt, Artificial Sequence
  Synthetic
ggaaacugugaacucauuuuc

SEQ ID NO: 559331 - RNA, 22 nt, Artificial Sequence
  Synthetic
gggaaacugugaacucauuuuc

SEQ ID NO: 559332 - RNA, 23 nt, Artificial Sequence
  Synthetic
ugggaaacugugaacucauuuuc

SEQ ID NO: 559333 - RNA, 24 nt, Artificial Sequence
  Synthetic
cugggaaacugugaacucauuuuc

SEQ ID NO: 559334 - RNA, 18 nt, Artificial Sequence
  Synthetic
uauacuagccucauuuuc

SEQ ID NO: 559335 - RNA, 19 nt, Artificial Sequence
  Synthetic
auauacuagccucauuuuc

SEQ ID NO: 559336 - RNA, 20 nt, Artificial Sequence
  Synthetic
aauauacuagccucauuuuc

SEQ ID NO: 559337 - RNA, 21 nt, Artificial Sequence
  Synthetic
gaauauacuagccucauuuuc

SEQ ID NO: 559338 - RNA, 22 nt, Artificial Sequence
  Synthetic
agaauauacuagccucauuuuc

SEQ ID NO: 559339 - RNA, 23 nt, Artificial Sequence
  Synthetic
aagaauauacuagccucauuuuc

SEQ ID NO: 559340 - RNA, 24 nt, Artificial Sequence
  Synthetic
aaagaauauacuagccucauuuuc

SEQ ID NO: 559341 - RNA, 18 nt, Artificial Sequence
  Synthetic
guuaaucuauucauuuuc

SEQ ID NO: 559342 - RNA, 19 nt, Artificial Sequence
  Synthetic
aguuaaucuauucauuuuc

SEQ ID NO: 559343 - RNA, 20 nt, Artificial Sequence
  Synthetic
caguuaaucuauucauuuuc

SEQ ID NO: 559344 - RNA, 21 nt, Artificial Sequence
  Synthetic
ccaguuaaucuauucauuuuc

SEQ ID NO: 559345 - RNA, 22 nt, Artificial Sequence
  Synthetic
uccaguuaaucuauucauuuuc

SEQ ID NO: 559346 - RNA, 23 nt, Artificial Sequence
  Synthetic
uuccaguuaaucuauucauuuuc

SEQ ID NO: 559347 - RNA, 24 nt, Artificial Sequence
  Synthetic
guuccaguuaaucuauucauuuuc

SEQ ID NO: 559348 - RNA, 18 nt, Artificial Sequence
  Synthetic
aaaacuaagaugauuuuc

SEQ ID NO: 559349 - RNA, 19 nt, Artificial Sequence
  Synthetic
aaaaacuaagaugauuuuc

SEQ ID NO: 559350 - RNA, 20 nt, Artificial Sequence
  Synthetic
uaaaaacuaagaugauuuuc

SEQ ID NO: 559351 - RNA, 21 nt, Artificial Sequence
  Synthetic
auaaaaacuaagaugauuuuc

SEQ ID NO: 559352 - RNA, 22 nt, Artificial Sequence
  Synthetic
gauaaaaacuaagaugauuuuc

SEQ ID NO: 559353 - RNA, 23 nt, Artificial Sequence
  Synthetic
agauaaaaacuaagaugauuuuc

SEQ ID NO: 559354 - RNA, 24 nt, Artificial Sequence
  Synthetic
aagauaaaaacuaagaugauuuuc

SEQ ID NO: 559355 - RNA, 18 nt, Artificial Sequence
  Synthetic
gagaacacugauauuuuc

SEQ ID NO: 559356 - RNA, 19 nt, Artificial Sequence
  Synthetic
ugagaacacugauauuuuc

SEQ ID NO: 559357 - RNA, 20 nt, Artificial Sequence
  Synthetic
uugagaacacugauauuuuc

SEQ ID NO: 559358 - RNA, 21 nt, Artificial Sequence
  Synthetic
cuugagaacacugauauuuuc

SEQ ID NO: 559359 - RNA, 22 nt, Artificial Sequence
  Synthetic
ccuugagaacacugauauuuuc

SEQ ID NO: 559360 - RNA, 23 nt, Artificial Sequence
  Synthetic
cccuugagaacacugauauuuuc

SEQ ID NO: 559361 - RNA, 24 nt, Artificial Sequence
  Synthetic
ucccuugagaacacugauauuuuc

SEQ ID NO: 559362 - RNA, 18 nt, Artificial Sequence
  Synthetic
aaaauaagaacuauuuuc

SEQ ID NO: 559363 - RNA, 19 nt, Artificial Sequence
  Synthetic
gaaaauaagaacuauuuuc

SEQ ID NO: 559364 - RNA, 20 nt, Artificial Sequence
  Synthetic
agaaaauaagaacuauuuuc

SEQ ID NO: 559365 - RNA, 21 nt, Artificial Sequence
  Synthetic
aagaaaauaagaacuauuuuc

SEQ ID NO: 559366 - RNA, 22 nt, Artificial Sequence
  Synthetic
aaagaaaauaagaacuauuuuc

SEQ ID NO: 559367 - RNA, 23 nt, Artificial Sequence
  Synthetic
uaaagaaaauaagaacuauuuuc

SEQ ID NO: 559368 - RNA, 24 nt, Artificial Sequence
  Synthetic
guaaagaaaauaagaacuauuuuc

SEQ ID NO: 559369 - RNA, 18 nt, Artificial Sequence
  Synthetic
gugggaccagcuauuuuc

SEQ ID NO: 559370 - RNA, 19 nt, Artificial Sequence
  Synthetic
ugugggaccagcuauuuuc

SEQ ID NO: 559371 - RNA, 20 nt, Artificial Sequence
  Synthetic
cugugggaccagcuauuuuc

SEQ ID NO: 559372 - RNA, 21 nt, Artificial Sequence
  Synthetic
acugugggaccagcuauuuuc

SEQ ID NO: 559373 - RNA, 22 nt, Artificial Sequence
  Synthetic
uacugugggaccagcuauuuuc

SEQ ID NO: 559374 - RNA, 23 nt, Artificial Sequence
  Synthetic
auacugugggaccagcuauuuuc

SEQ ID NO: 559375 - RNA, 24 nt, Artificial Sequence
  Synthetic
gauacugugggaccagcuauuuuc

SEQ ID NO: 559376 - RNA, 18 nt, Artificial Sequence
  Synthetic
gugauuuuagcuauuuuc

SEQ ID NO: 559377 - RNA, 19 nt, Artificial Sequence
  Synthetic
ggugauuuuagcuauuuuc

SEQ ID NO: 559378 - RNA, 20 nt, Artificial Sequence
  Synthetic
aggugauuuuagcuauuuuc

SEQ ID NO: 559379 - RNA, 21 nt, Artificial Sequence
  Synthetic
uaggugauuuuagcuauuuuc

SEQ ID NO: 559380 - RNA, 22 nt, Artificial Sequence
  Synthetic
uuaggugauuuuagcuauuuuc

SEQ ID NO: 559381 - RNA, 23 nt, Artificial Sequence
  Synthetic
guuaggugauuuuagcuauuuuc

SEQ ID NO: 559382 - RNA, 24 nt, Artificial Sequence
  Synthetic
aguuaggugauuuuagcuauuuuc

SEQ ID NO: 559383 - RNA, 18 nt, Artificial Sequence
  Synthetic
uaagaucacgguauuuuc

SEQ ID NO: 559384 - RNA, 19 nt, Artificial Sequence
  Synthetic
guaagaucacgguauuuuc

SEQ ID NO: 559385 - RNA, 20 nt, Artificial Sequence
  Synthetic
uguaagaucacgguauuuuc

SEQ ID NO: 559386 - RNA, 21 nt, Artificial Sequence
  Synthetic
auguaagaucacgguauuuuc

SEQ ID NO: 559387 - RNA, 22 nt, Artificial Sequence
  Synthetic
aauguaagaucacgguauuuuc

SEQ ID NO: 559388 - RNA, 23 nt, Artificial Sequence
  Synthetic
caauguaagaucacgguauuuuc

SEQ ID NO: 559389 - RNA, 24 nt, Artificial Sequence
  Synthetic
acaauguaagaucacgguauuuuc

SEQ ID NO: 559390 - RNA, 18 nt, Artificial Sequence
  Synthetic
uucuguuaaauuauuuuc

SEQ ID NO: 559391 - RNA, 19 nt, Artificial Sequence
  Synthetic
uuucuguuaaauuauuuuc

SEQ ID NO: 559392 - RNA, 20 nt, Artificial Sequence
  Synthetic
guuucuguuaaauuauuuuc

SEQ ID NO: 559393 - RNA, 21 nt, Artificial Sequence
  Synthetic
aguuucuguuaaauuauuuuc

SEQ ID NO: 559394 - RNA, 22 nt, Artificial Sequence
  Synthetic
uaguuucuguuaaauuauuuuc

SEQ ID NO: 559395 - RNA, 23 nt, Artificial Sequence
  Synthetic
uuaguuucuguuaaauuauuuuc

SEQ ID NO: 559396 - RNA, 24 nt, Artificial Sequence
  Synthetic
auuaguuucuguuaaauuauuuuc

SEQ ID NO: 559397 - RNA, 18 nt, Artificial Sequence
  Synthetic
ugccaugguucacuuuuc

SEQ ID NO: 559398 - RNA, 19 nt, Artificial Sequence
  Synthetic
gugccaugguucacuuuuc

SEQ ID NO: 559399 - RNA, 20 nt, Artificial Sequence
  Synthetic
ugugccaugguucacuuuuc

SEQ ID NO: 559400 - RNA, 21 nt, Artificial Sequence
  Synthetic
uugugccaugguucacuuuuc

SEQ ID NO: 559401 - RNA, 22 nt, Artificial Sequence
  Synthetic
uuugugccaugguucacuuuuc

SEQ ID NO: 559402 - RNA, 23 nt, Artificial Sequence
  Synthetic
uuuugugccaugguucacuuuuc

SEQ ID NO: 559403 - RNA, 24 nt, Artificial Sequence
  Synthetic
uuuuugugccaugguucacuuuuc

SEQ ID NO: 559404 - RNA, 18 nt, Artificial Sequence
  Synthetic
ugggguccgagacuuuuc

SEQ ID NO: 559405 - RNA, 19 nt, Artificial Sequence
  Synthetic
augggguccgagacuuuuc

SEQ ID NO: 559406 - RNA, 20 nt, Artificial Sequence
  Synthetic
uaugggguccgagacuuuuc

SEQ ID NO: 559407 - RNA, 21 nt, Artificial Sequence
  Synthetic
guaugggguccgagacuuuuc

SEQ ID NO: 559408 - RNA, 22 nt, Artificial Sequence
  Synthetic
gguaugggguccgagacuuuuc

SEQ ID NO: 559409 - RNA, 23 nt, Artificial Sequence
  Synthetic
ugguaugggguccgagacuuuuc

SEQ ID NO: 559410 - RNA, 24 nt, Artificial Sequence
  Synthetic
uugguaugggguccgagacuuuuc

SEQ ID NO: 559411 - RNA, 18 nt, Artificial Sequence
  Synthetic
aacacuguuggacuuuuc

SEQ ID NO: 559412 - RNA, 19 nt, Artificial Sequence
  Synthetic
uaacacuguuggacuuuuc

SEQ ID NO: 559413 - RNA, 20 nt, Artificial Sequence
  Synthetic
guaacacuguuggacuuuuc

SEQ ID NO: 559414 - RNA, 21 nt, Artificial Sequence
  Synthetic
gguaacacuguuggacuuuuc

SEQ ID NO: 559415 - RNA, 22 nt, Artificial Sequence
  Synthetic
ugguaacacuguuggacuuuuc

SEQ ID NO: 559416 - RNA, 23 nt, Artificial Sequence
  Synthetic
uugguaacacuguuggacuuuuc

SEQ ID NO: 559417 - RNA, 24 nt, Artificial Sequence
  Synthetic
uuugguaacacuguuggacuuuuc

SEQ ID NO: 559418 - RNA, 18 nt, Artificial Sequence
  Synthetic
uuaguuggaaaccuuuuc

SEQ ID NO: 559419 - RNA, 19 nt, Artificial Sequence
  Synthetic
auuaguuggaaaccuuuuc

SEQ ID NO: 559420 - RNA, 20 nt, Artificial Sequence
  Synthetic
aauuaguuggaaaccuuuuc

SEQ ID NO: 559421 - RNA, 21 nt, Artificial Sequence
  Synthetic
caauuaguuggaaaccuuuuc

SEQ ID NO: 559422 - RNA, 22 nt, Artificial Sequence
  Synthetic
ucaauuaguuggaaaccuuuuc

SEQ ID NO: 559423 - RNA, 23 nt, Artificial Sequence
  Synthetic
aucaauuaguuggaaaccuuuuc

SEQ ID NO: 559424 - RNA, 24 nt, Artificial Sequence
  Synthetic
aaucaauuaguuggaaaccuuuuc

SEQ ID NO: 559425 - RNA, 18 nt, Artificial Sequence
  Synthetic
agcuuauuugaccuuuuc

SEQ ID NO: 559426 - RNA, 19 nt, Artificial Sequence
  Synthetic
cagcuuauuugaccuuuuc

SEQ ID NO: 559427 - RNA, 20 nt, Artificial Sequence
  Synthetic
ucagcuuauuugaccuuuuc

SEQ ID NO: 559428 - RNA, 21 nt, Artificial Sequence
  Synthetic
uucagcuuauuugaccuuuuc

SEQ ID NO: 559429 - RNA, 22 nt, Artificial Sequence
  Synthetic
uuucagcuuauuugaccuuuuc

SEQ ID NO: 559430 - RNA, 23 nt, Artificial Sequence
  Synthetic
uuuucagcuuauuugaccuuuuc

SEQ ID NO: 559431 - RNA, 24 nt, Artificial Sequence
  Synthetic
uuuuucagcuuauuugaccuuuuc

SEQ ID NO: 559432 - RNA, 18 nt, Artificial Sequence
  Synthetic
uuauguaaaugccuuuuc

SEQ ID NO: 559433 - RNA, 19 nt, Artificial Sequence
  Synthetic
uuuauguaaaugccuuuuc

SEQ ID NO: 559434 - RNA, 20 nt, Artificial Sequence
  Synthetic
guuuauguaaaugccuuuuc

SEQ ID NO: 559435 - RNA, 21 nt, Artificial Sequence
  Synthetic
aguuuauguaaaugccuuuuc

SEQ ID NO: 559436 - RNA, 22 nt, Artificial Sequence
  Synthetic
uaguuuauguaaaugccuuuuc

SEQ ID NO: 559437 - RNA, 23 nt, Artificial Sequence
  Synthetic
auaguuuauguaaaugccuuuuc

SEQ ID NO: 559438 - RNA, 24 nt, Artificial Sequence
  Synthetic
gauaguuuauguaaaugccuuuuc

SEQ ID NO: 559439 - RNA, 18 nt, Artificial Sequence
  Synthetic
agagaaaagugccuuuuc

SEQ ID NO: 559440 - RNA, 19 nt, Artificial Sequence
  Synthetic
aagagaaaagugccuuuuc

SEQ ID NO: 559441 - RNA, 20 nt, Artificial Sequence
  Synthetic
aaagagaaaagugccuuuuc

SEQ ID NO: 559442 - RNA, 21 nt, Artificial Sequence
  Synthetic
aaaagagaaaagugccuuuuc

SEQ ID NO: 559443 - RNA, 22 nt, Artificial Sequence
  Synthetic
uaaaagagaaaagugccuuuuc

SEQ ID NO: 559444 - RNA, 23 nt, Artificial Sequence
  Synthetic
uuaaaagagaaaagugccuuuuc

SEQ ID NO: 559445 - RNA, 24 nt, Artificial Sequence
  Synthetic
cuuaaaagagaaaagugccuuuuc

SEQ ID NO: 559446 - RNA, 18 nt, Artificial Sequence
  Synthetic
ccaaaggcuugccuuuuc

SEQ ID NO: 559447 - RNA, 19 nt, Artificial Sequence
  Synthetic
gccaaaggcuugccuuuuc

SEQ ID NO: 559448 - RNA, 20 nt, Artificial Sequence
  Synthetic
ugccaaaggcuugccuuuuc

SEQ ID NO: 559449 - RNA, 21 nt, Artificial Sequence
  Synthetic
cugccaaaggcuugccuuuuc

SEQ ID NO: 559450 - RNA, 22 nt, Artificial Sequence
  Synthetic
ucugccaaaggcuugccuuuuc

SEQ ID NO: 559451 - RNA, 23 nt, Artificial Sequence
  Synthetic
uucugccaaaggcuugccuuuuc

SEQ ID NO: 559452 - RNA, 24 nt, Artificial Sequence
  Synthetic
cuucugccaaaggcuugccuuuuc

SEQ ID NO: 559453 - RNA, 18 nt, Artificial Sequence
  Synthetic
uuuauuucuguccuuuuc

SEQ ID NO: 559454 - RNA, 19 nt, Artificial Sequence
  Synthetic
uuuuauuucuguccuuuuc

SEQ ID NO: 559455 - RNA, 20 nt, Artificial Sequence
  Synthetic
auuuuauuucuguccuuuuc

SEQ ID NO: 559456 - RNA, 21 nt, Artificial Sequence
  Synthetic
uauuuuauuucuguccuuuuc

SEQ ID NO: 559457 - RNA, 22 nt, Artificial Sequence
  Synthetic
guauuuuauuucuguccuuuuc

SEQ ID NO: 559458 - RNA, 23 nt, Artificial Sequence
  Synthetic
aguauuuuauuucuguccuuuuc

SEQ ID NO: 559459 - RNA, 24 nt, Artificial Sequence
  Synthetic
aaguauuuuauuucuguccuuuuc

SEQ ID NO: 559460 - RNA, 18 nt, Artificial Sequence
  Synthetic
uugaauuuugaucuuuuc

SEQ ID NO: 559461 - RNA, 19 nt, Artificial Sequence
  Synthetic
uuugaauuuugaucuuuuc

SEQ ID NO: 559462 - RNA, 20 nt, Artificial Sequence
  Synthetic
uuuugaauuuugaucuuuuc

SEQ ID NO: 559463 - RNA, 21 nt, Artificial Sequence
  Synthetic
auuuugaauuuugaucuuuuc

SEQ ID NO: 559464 - RNA, 22 nt, Artificial Sequence
  Synthetic
aauuuugaauuuugaucuuuuc

SEQ ID NO: 559465 - RNA, 23 nt, Artificial Sequence
  Synthetic
aaauuuugaauuuugaucuuuuc

SEQ ID NO: 559466 - RNA, 24 nt, Artificial Sequence
  Synthetic
caaauuuugaauuuugaucuuuuc

SEQ ID NO: 559467 - RNA, 18 nt, Artificial Sequence
  Synthetic
gaggaggacggucuuuuc

SEQ ID NO: 559468 - RNA, 19 nt, Artificial Sequence
  Synthetic
agaggaggacggucuuuuc

SEQ ID NO: 559469 - RNA, 20 nt, Artificial Sequence
  Synthetic
aagaggaggacggucuuuuc

SEQ ID NO: 559470 - RNA, 21 nt, Artificial Sequence
  Synthetic
uaagaggaggacggucuuuuc

SEQ ID NO: 559471 - RNA, 22 nt, Artificial Sequence
  Synthetic
uuaagaggaggacggucuuuuc

SEQ ID NO: 559472 - RNA, 23 nt, Artificial Sequence
  Synthetic
auuaagaggaggacggucuuuuc

SEQ ID NO: 559473 - RNA, 24 nt, Artificial Sequence
  Synthetic
cauuaagaggaggacggucuuuuc

SEQ ID NO: 559474 - RNA, 18 nt, Artificial Sequence
  Synthetic
uauaauugcuuucuuuuc

SEQ ID NO: 559475 - RNA, 19 nt, Artificial Sequence
  Synthetic
auauaauugcuuucuuuuc

SEQ ID NO: 559476 - RNA, 20 nt, Artificial Sequence
  Synthetic
uauauaauugcuuucuuuuc

SEQ ID NO: 559477 - RNA, 21 nt, Artificial Sequence
  Synthetic
auauauaauugcuuucuuuuc

SEQ ID NO: 559478 - RNA, 22 nt, Artificial Sequence
  Synthetic
cauauauaauugcuuucuuuuc

SEQ ID NO: 559479 - RNA, 23 nt, Artificial Sequence
  Synthetic
acauauauaauugcuuucuuuuc

SEQ ID NO: 559480 - RNA, 24 nt, Artificial Sequence
  Synthetic
aacauauauaauugcuuucuuuuc

SEQ ID NO: 559481 - RNA, 18 nt, Artificial Sequence
  Synthetic
aucuguaguuuucuuuuc

SEQ ID NO: 559482 - RNA, 19 nt, Artificial Sequence
  Synthetic
gaucuguaguuuucuuuuc

SEQ ID NO: 559483 - RNA, 20 nt, Artificial Sequence
  Synthetic
agaucuguaguuuucuuuuc

SEQ ID NO: 559484 - RNA, 21 nt, Artificial Sequence
  Synthetic
cagaucuguaguuuucuuuuc

SEQ ID NO: 559485 - RNA, 22 nt, Artificial Sequence
  Synthetic
acagaucuguaguuuucuuuuc

SEQ ID NO: 559486 - RNA, 23 nt, Artificial Sequence
  Synthetic
uacagaucuguaguuuucuuuuc

SEQ ID NO: 559487 - RNA, 24 nt, Artificial Sequence
  Synthetic
uuacagaucuguaguuuucuuuuc

SEQ ID NO: 559488 - RNA, 18 nt, Artificial Sequence
  Synthetic
aggccugguaaaguuuuc

SEQ ID NO: 559489 - RNA, 19 nt, Artificial Sequence
  Synthetic
gaggccugguaaaguuuuc

SEQ ID NO: 559490 - RNA, 20 nt, Artificial Sequence
  Synthetic
ugaggccugguaaaguuuuc

SEQ ID NO: 559491 - RNA, 21 nt, Artificial Sequence
  Synthetic
uugaggccugguaaaguuuuc

SEQ ID NO: 559492 - RNA, 22 nt, Artificial Sequence
  Synthetic
cuugaggccugguaaaguuuuc

SEQ ID NO: 559493 - RNA, 23 nt, Artificial Sequence
  Synthetic
ccuugaggccugguaaaguuuuc

SEQ ID NO: 559494 - RNA, 24 nt, Artificial Sequence
  Synthetic
cccuugaggccugguaaaguuuuc

SEQ ID NO: 559495 - RNA, 18 nt, Artificial Sequence
  Synthetic
gcauauuaacaaguuuuc

SEQ ID NO: 559496 - RNA, 19 nt, Artificial Sequence
  Synthetic
ugcauauuaacaaguuuuc

SEQ ID NO: 559497 - RNA, 20 nt, Artificial Sequence
  Synthetic
cugcauauuaacaaguuuuc

SEQ ID NO: 559498 - RNA, 21 nt, Artificial Sequence
  Synthetic
ucugcauauuaacaaguuuuc

SEQ ID NO: 559499 - RNA, 22 nt, Artificial Sequence
  Synthetic
aucugcauauuaacaaguuuuc

SEQ ID NO: 559500 - RNA, 23 nt, Artificial Sequence
  Synthetic
caucugcauauuaacaaguuuuc

SEQ ID NO: 559501 - RNA, 24 nt, Artificial Sequence
  Synthetic
ucaucugcauauuaacaaguuuuc

SEQ ID NO: 559502 - RNA, 18 nt, Artificial Sequence
  Synthetic
ggcacauuuuaaguuuuc

SEQ ID NO: 559503 - RNA, 19 nt, Artificial Sequence
  Synthetic
aggcacauuuuaaguuuuc

SEQ ID NO: 559504 - RNA, 20 nt, Artificial Sequence
  Synthetic
caggcacauuuuaaguuuuc

SEQ ID NO: 559505 - RNA, 21 nt, Artificial Sequence
  Synthetic
gcaggcacauuuuaaguuuuc

SEQ ID NO: 559506 - RNA, 22 nt, Artificial Sequence
  Synthetic
ugcaggcacauuuuaaguuuuc

SEQ ID NO: 559507 - RNA, 23 nt, Artificial Sequence
  Synthetic
augcaggcacauuuuaaguuuuc

SEQ ID NO: 559508 - RNA, 24 nt, Artificial Sequence
  Synthetic
caugcaggcacauuuuaaguuuuc

SEQ ID NO: 559509 - RNA, 18 nt, Artificial Sequence
  Synthetic
uugccuaacucaguuuuc

SEQ ID NO: 559510 - RNA, 19 nt, Artificial Sequence
  Synthetic
guugccuaacucaguuuuc

SEQ ID NO: 559511 - RNA, 20 nt, Artificial Sequence
  Synthetic
uguugccuaacucaguuuuc

SEQ ID NO: 559512 - RNA, 21 nt, Artificial Sequence
  Synthetic
uuguugccuaacucaguuuuc

SEQ ID NO: 559513 - RNA, 22 nt, Artificial Sequence
  Synthetic
guuguugccuaacucaguuuuc

SEQ ID NO: 559514 - RNA, 23 nt, Artificial Sequence
  Synthetic
uguuguugccuaacucaguuuuc

SEQ ID NO: 559515 - RNA, 24 nt, Artificial Sequence
  Synthetic
uuguuguugccuaacucaguuuuc

SEQ ID NO: 559516 - RNA, 18 nt, Artificial Sequence
  Synthetic
ucaggcaauucaguuuuc

SEQ ID NO: 559517 - RNA, 19 nt, Artificial Sequence
  Synthetic
uucaggcaauucaguuuuc

SEQ ID NO: 559518 - RNA, 20 nt, Artificial Sequence
  Synthetic
uuucaggcaauucaguuuuc

SEQ ID NO: 559519 - RNA, 21 nt, Artificial Sequence
  Synthetic
uuuucaggcaauucaguuuuc

SEQ ID NO: 559520 - RNA, 22 nt, Artificial Sequence
  Synthetic
uuuuucaggcaauucaguuuuc

SEQ ID NO: 559521 - RNA, 23 nt, Artificial Sequence
  Synthetic
uuuuuucaggcaauucaguuuuc

SEQ ID NO: 559522 - RNA, 24 nt, Artificial Sequence
  Synthetic
uuuuuuucaggcaauucaguuuuc

SEQ ID NO: 559523 - RNA, 18 nt, Artificial Sequence
  Synthetic
agaacaaauagaguuuuc

SEQ ID NO: 559524 - RNA, 19 nt, Artificial Sequence
  Synthetic
cagaacaaauagaguuuuc

SEQ ID NO: 559525 - RNA, 20 nt, Artificial Sequence
  Synthetic
ucagaacaaauagaguuuuc

SEQ ID NO: 559526 - RNA, 21 nt, Artificial Sequence
  Synthetic
aucagaacaaauagaguuuuc

SEQ ID NO: 559527 - RNA, 22 nt, Artificial Sequence
  Synthetic
caucagaacaaauagaguuuuc

SEQ ID NO: 559528 - RNA, 23 nt, Artificial Sequence
  Synthetic
ccaucagaacaaauagaguuuuc

SEQ ID NO: 559529 - RNA, 24 nt, Artificial Sequence
  Synthetic
accaucagaacaaauagaguuuuc

SEQ ID NO: 559530 - RNA, 18 nt, Artificial Sequence
  Synthetic
aauaauuuaugaguuuuc

SEQ ID NO: 559531 - RNA, 19 nt, Artificial Sequence
  Synthetic
gaauaauuuaugaguuuuc

SEQ ID NO: 559532 - RNA, 20 nt, Artificial Sequence
  Synthetic
agaauaauuuaugaguuuuc

SEQ ID NO: 559533 - RNA, 21 nt, Artificial Sequence
  Synthetic
aagaauaauuuaugaguuuuc

SEQ ID NO: 559534 - RNA, 22 nt, Artificial Sequence
  Synthetic
aaagaauaauuuaugaguuuuc

SEQ ID NO: 559535 - RNA, 23 nt, Artificial Sequence
  Synthetic
aaaagaauaauuuaugaguuuuc

SEQ ID NO: 559536 - RNA, 24 nt, Artificial Sequence
  Synthetic
caaaagaauaauuuaugaguuuuc

SEQ ID NO: 559537 - RNA, 18 nt, Artificial Sequence
  Synthetic
uguagugagugaguuuuc

SEQ ID NO: 559538 - RNA, 19 nt, Artificial Sequence
  Synthetic
guguagugagugaguuuuc

SEQ ID NO: 559539 - RNA, 20 nt, Artificial Sequence
  Synthetic
aguguagugagugaguuuuc

SEQ ID NO: 559540 - RNA, 21 nt, Artificial Sequence
  Synthetic
caguguagugagugaguuuuc

SEQ ID NO: 559541 - RNA, 22 nt, Artificial Sequence
  Synthetic
ucaguguagugagugaguuuuc

SEQ ID NO: 559542 - RNA, 23 nt, Artificial Sequence
  Synthetic
cucaguguagugagugaguuuuc

SEQ ID NO: 559543 - RNA, 24 nt, Artificial Sequence
  Synthetic
ccucaguguagugagugaguuuuc

SEQ ID NO: 559544 - RNA, 18 nt, Artificial Sequence
  Synthetic
augucuuuuaucguuuuc

SEQ ID NO: 559545 - RNA, 19 nt, Artificial Sequence
  Synthetic
caugucuuuuaucguuuuc

SEQ ID NO: 559546 - RNA, 20 nt, Artificial Sequence
  Synthetic
ucaugucuuuuaucguuuuc

SEQ ID NO: 559547 - RNA, 21 nt, Artificial Sequence
  Synthetic
uucaugucuuuuaucguuuuc

SEQ ID NO: 559548 - RNA, 22 nt, Artificial Sequence
  Synthetic
guucaugucuuuuaucguuuuc

SEQ ID NO: 559549 - RNA, 23 nt, Artificial Sequence
  Synthetic
uguucaugucuuuuaucguuuuc

SEQ ID NO: 559550 - RNA, 24 nt, Artificial Sequence
  Synthetic
cuguucaugucuuuuaucguuuuc

SEQ ID NO: 559551 - RNA, 18 nt, Artificial Sequence
  Synthetic
uugguguacaugguuuuc

SEQ ID NO: 559552 - RNA, 19 nt, Artificial Sequence
  Synthetic
uuugguguacaugguuuuc

SEQ ID NO: 559553 - RNA, 20 nt, Artificial Sequence
  Synthetic
cuuugguguacaugguuuuc

SEQ ID NO: 559554 - RNA, 21 nt, Artificial Sequence
  Synthetic
ucuuugguguacaugguuuuc

SEQ ID NO: 559555 - RNA, 22 nt, Artificial Sequence
  Synthetic
uucuuugguguacaugguuuuc

SEQ ID NO: 559556 - RNA, 23 nt, Artificial Sequence
  Synthetic
uuucuuugguguacaugguuuuc

SEQ ID NO: 559557 - RNA, 24 nt, Artificial Sequence
  Synthetic
uuuucuuugguguacaugguuuuc

SEQ ID NO: 559558 - RNA, 18 nt, Artificial Sequence
  Synthetic
ucuuauuuggauguuuuc

SEQ ID NO: 559559 - RNA, 19 nt, Artificial Sequence
  Synthetic
aucuuauuuggauguuuuc

SEQ ID NO: 559560 - RNA, 20 nt, Artificial Sequence
  Synthetic
aaucuuauuuggauguuuuc

SEQ ID NO: 559561 - RNA, 21 nt, Artificial Sequence
  Synthetic
caaucuuauuuggauguuuuc

SEQ ID NO: 559562 - RNA, 22 nt, Artificial Sequence
  Synthetic
ccaaucuuauuuggauguuuuc

SEQ ID NO: 559563 - RNA, 23 nt, Artificial Sequence
  Synthetic
uccaaucuuauuuggauguuuuc

SEQ ID NO: 559564 - RNA, 24 nt, Artificial Sequence
  Synthetic
auccaaucuuauuuggauguuuuc

SEQ ID NO: 559565 - RNA, 18 nt, Artificial Sequence
  Synthetic
aaugcaacuuauguuuuc

SEQ ID NO: 559566 - RNA, 19 nt, Artificial Sequence
  Synthetic
uaaugcaacuuauguuuuc

SEQ ID NO: 559567 - RNA, 20 nt, Artificial Sequence
  Synthetic
uuaaugcaacuuauguuuuc

SEQ ID NO: 559568 - RNA, 21 nt, Artificial Sequence
  Synthetic
auuaaugcaacuuauguuuuc

SEQ ID NO: 559569 - RNA, 22 nt, Artificial Sequence
  Synthetic
gauuaaugcaacuuauguuuuc

SEQ ID NO: 559570 - RNA, 23 nt, Artificial Sequence
  Synthetic
ugauuaaugcaacuuauguuuuc

SEQ ID NO: 559571 - RNA, 24 nt, Artificial Sequence
  Synthetic
cugauuaaugcaacuuauguuuuc

SEQ ID NO: 559572 - RNA, 18 nt, Artificial Sequence
  Synthetic
uuuucuguuuauguuuuc

SEQ ID NO: 559573 - RNA, 19 nt, Artificial Sequence
  Synthetic
auuuucuguuuauguuuuc

SEQ ID NO: 559574 - RNA, 20 nt, Artificial Sequence
  Synthetic
aauuuucuguuuauguuuuc

SEQ ID NO: 559575 - RNA, 21 nt, Artificial Sequence
  Synthetic
aaauuuucuguuuauguuuuc

SEQ ID NO: 559576 - RNA, 22 nt, Artificial Sequence
  Synthetic
gaaauuuucuguuuauguuuuc

SEQ ID NO: 559577 - RNA, 23 nt, Artificial Sequence
  Synthetic
ggaaauuuucuguuuauguuuuc

SEQ ID NO: 559578 - RNA, 24 nt, Artificial Sequence
  Synthetic
uggaaauuuucuguuuauguuuuc

SEQ ID NO: 559579 - RNA, 18 nt, Artificial Sequence
  Synthetic
aguggccauucuguuuuc

SEQ ID NO: 559580 - RNA, 19 nt, Artificial Sequence
  Synthetic
aaguggccauucuguuuuc

SEQ ID NO: 559581 - RNA, 20 nt, Artificial Sequence
  Synthetic
uaaguggccauucuguuuuc

SEQ ID NO: 559582 - RNA, 21 nt, Artificial Sequence
  Synthetic
cuaaguggccauucuguuuuc

SEQ ID NO: 559583 - RNA, 22 nt, Artificial Sequence
  Synthetic
ucuaaguggccauucuguuuuc

SEQ ID NO: 559584 - RNA, 23 nt, Artificial Sequence
  Synthetic
uucuaaguggccauucuguuuuc

SEQ ID NO: 559585 - RNA, 24 nt, Artificial Sequence
  Synthetic
auucuaaguggccauucuguuuuc

SEQ ID NO: 559586 - RNA, 18 nt, Artificial Sequence
  Synthetic
gcaaaacaaaguguuuuc

SEQ ID NO: 559587 - RNA, 19 nt, Artificial Sequence
  Synthetic
agcaaaacaaaguguuuuc

SEQ ID NO: 559588 - RNA, 20 nt, Artificial Sequence
  Synthetic
gagcaaaacaaaguguuuuc

SEQ ID NO: 559589 - RNA, 21 nt, Artificial Sequence
  Synthetic
ugagcaaaacaaaguguuuuc

SEQ ID NO: 559590 - RNA, 22 nt, Artificial Sequence
  Synthetic
augagcaaaacaaaguguuuuc

SEQ ID NO: 559591 - RNA, 23 nt, Artificial Sequence
  Synthetic
gaugagcaaaacaaaguguuuuc

SEQ ID NO: 559592 - RNA, 24 nt, Artificial Sequence
  Synthetic
agaugagcaaaacaaaguguuuuc

SEQ ID NO: 559593 - RNA, 18 nt, Artificial Sequence
  Synthetic
cuaaugggauguguuuuc

SEQ ID NO: 559594 - RNA, 19 nt, Artificial Sequence
  Synthetic
ucuaaugggauguguuuuc

SEQ ID NO: 559595 - RNA, 20 nt, Artificial Sequence
  Synthetic
aucuaaugggauguguuuuc

SEQ ID NO: 559596 - RNA, 21 nt, Artificial Sequence
  Synthetic
gaucuaaugggauguguuuuc

SEQ ID NO: 559597 - RNA, 22 nt, Artificial Sequence
  Synthetic
ugaucuaaugggauguguuuuc

SEQ ID NO: 559598 - RNA, 23 nt, Artificial Sequence
  Synthetic
augaucuaaugggauguguuuuc

SEQ ID NO: 559599 - RNA, 24 nt, Artificial Sequence
  Synthetic
aaugaucuaaugggauguguuuuc

SEQ ID NO: 559600 - RNA, 18 nt, Artificial Sequence
  Synthetic
acguaucguaaauuuuuc

SEQ ID NO: 559601 - RNA, 19 nt, Artificial Sequence
  Synthetic
aacguaucguaaauuuuuc

SEQ ID NO: 559602 - RNA, 20 nt, Artificial Sequence
  Synthetic
gaacguaucguaaauuuuuc

SEQ ID NO: 559603 - RNA, 21 nt, Artificial Sequence
  Synthetic
ugaacguaucguaaauuuuuc

SEQ ID NO: 559604 - RNA, 22 nt, Artificial Sequence
  Synthetic
uugaacguaucguaaauuuuuc

SEQ ID NO: 559605 - RNA, 23 nt, Artificial Sequence
  Synthetic
guugaacguaucguaaauuuuuc

SEQ ID NO: 559606 - RNA, 24 nt, Artificial Sequence
  Synthetic
aguugaacguaucguaaauuuuuc

SEQ ID NO: 559607 - RNA, 18 nt, Artificial Sequence
  Synthetic
uaguaacuuaaauuuuuc

SEQ ID NO: 559608 - RNA, 19 nt, Artificial Sequence
  Synthetic
auaguaacuuaaauuuuuc

SEQ ID NO: 559609 - RNA, 20 nt, Artificial Sequence
  Synthetic
aauaguaacuuaaauuuuuc

SEQ ID NO: 559610 - RNA, 21 nt, Artificial Sequence
  Synthetic
uaauaguaacuuaaauuuuuc

SEQ ID NO: 559611 - RNA, 22 nt, Artificial Sequence
  Synthetic
auaauaguaacuuaaauuuuuc

SEQ ID NO: 559612 - RNA, 23 nt, Artificial Sequence
  Synthetic
aauaauaguaacuuaaauuuuuc

SEQ ID NO: 559613 - RNA, 24 nt, Artificial Sequence
  Synthetic
aaauaauaguaacuuaaauuuuuc

SEQ ID NO: 559614 - RNA, 18 nt, Artificial Sequence
  Synthetic
aaauuaauagaauuuuuc

SEQ ID NO: 559615 - RNA, 19 nt, Artificial Sequence
  Synthetic
aaaauuaauagaauuuuuc

SEQ ID NO: 559616 - RNA, 20 nt, Artificial Sequence
  Synthetic
gaaaauuaauagaauuuuuc

SEQ ID NO: 559617 - RNA, 21 nt, Artificial Sequence
  Synthetic
ugaaaauuaauagaauuuuuc

SEQ ID NO: 559618 - RNA, 22 nt, Artificial Sequence
  Synthetic
cugaaaauuaauagaauuuuuc

SEQ ID NO: 559619 - RNA, 23 nt, Artificial Sequence
  Synthetic
acugaaaauuaauagaauuuuuc

SEQ ID NO: 559620 - RNA, 24 nt, Artificial Sequence
  Synthetic
uacugaaaauuaauagaauuuuuc

SEQ ID NO: 559621 - RNA, 18 nt, Artificial Sequence
  Synthetic
acuuuugucucauuuuuc

SEQ ID NO: 559622 - RNA, 19 nt, Artificial Sequence
  Synthetic
gacuuuugucucauuuuuc

SEQ ID NO: 559623 - RNA, 20 nt, Artificial Sequence
  Synthetic
ugacuuuugucucauuuuuc

SEQ ID NO: 559624 - RNA, 21 nt, Artificial Sequence
  Synthetic
cugacuuuugucucauuuuuc

SEQ ID NO: 559625 - RNA, 22 nt, Artificial Sequence
  Synthetic
acugacuuuugucucauuuuuc

SEQ ID NO: 559626 - RNA, 23 nt, Artificial Sequence
  Synthetic
cacugacuuuugucucauuuuuc

SEQ ID NO: 559627 - RNA, 24 nt, Artificial Sequence
  Synthetic
ucacugacuuuugucucauuuuuc

SEQ ID NO: 559628 - RNA, 18 nt, Artificial Sequence
  Synthetic
acauguuugugauuuuuc

SEQ ID NO: 559629 - RNA, 19 nt, Artificial Sequence
  Synthetic
gacauguuugugauuuuuc

SEQ ID NO: 559630 - RNA, 20 nt, Artificial Sequence
  Synthetic
agacauguuugugauuuuuc

SEQ ID NO: 559631 - RNA, 21 nt, Artificial Sequence
  Synthetic
gagacauguuugugauuuuuc

SEQ ID NO: 559632 - RNA, 22 nt, Artificial Sequence
  Synthetic
agagacauguuugugauuuuuc

SEQ ID NO: 559633 - RNA, 23 nt, Artificial Sequence
  Synthetic
aagagacauguuugugauuuuuc

SEQ ID NO: 559634 - RNA, 24 nt, Artificial Sequence
  Synthetic
caagagacauguuugugauuuuuc

SEQ ID NO: 559635 - RNA, 18 nt, Artificial Sequence
  Synthetic
aguauuacuugauuuuuc

SEQ ID NO: 559636 - RNA, 19 nt, Artificial Sequence
  Synthetic
uaguauuacuugauuuuuc

SEQ ID NO: 559637 - RNA, 20 nt, Artificial Sequence
  Synthetic
uuaguauuacuugauuuuuc

SEQ ID NO: 559638 - RNA, 21 nt, Artificial Sequence
  Synthetic
uuuaguauuacuugauuuuuc

SEQ ID NO: 559639 - RNA, 22 nt, Artificial Sequence
  Synthetic
guuuaguauuacuugauuuuuc

SEQ ID NO: 559640 - RNA, 23 nt, Artificial Sequence
  Synthetic
aguuuaguauuacuugauuuuuc

SEQ ID NO: 559641 - RNA, 24 nt, Artificial Sequence
  Synthetic
uaguuuaguauuacuugauuuuuc

SEQ ID NO: 559642 - RNA, 18 nt, Artificial Sequence
  Synthetic
gucagaggccuauuuuuc

SEQ ID NO: 559643 - RNA, 19 nt, Artificial Sequence
  Synthetic
agucagaggccuauuuuuc

SEQ ID NO: 559644 - RNA, 20 nt, Artificial Sequence
  Synthetic
gagucagaggccuauuuuuc

SEQ ID NO: 559645 - RNA, 21 nt, Artificial Sequence
  Synthetic
ggagucagaggccuauuuuuc

SEQ ID NO: 559646 - RNA, 22 nt, Artificial Sequence
  Synthetic
uggagucagaggccuauuuuuc

SEQ ID NO: 559647 - RNA, 23 nt, Artificial Sequence
  Synthetic
uuggagucagaggccuauuuuuc

SEQ ID NO: 559648 - RNA, 24 nt, Artificial Sequence
  Synthetic
uuuggagucagaggccuauuuuuc

SEQ ID NO: 559649 - RNA, 18 nt, Artificial Sequence
  Synthetic
uguugagauuuauuuuuc

SEQ ID NO: 559650 - RNA, 19 nt, Artificial Sequence
  Synthetic
guguugagauuuauuuuuc

SEQ ID NO: 559651 - RNA, 20 nt, Artificial Sequence
  Synthetic
uguguugagauuuauuuuuc

SEQ ID NO: 559652 - RNA, 21 nt, Artificial Sequence
  Synthetic
cuguguugagauuuauuuuuc

SEQ ID NO: 559653 - RNA, 22 nt, Artificial Sequence
  Synthetic
ucuguguugagauuuauuuuuc

SEQ ID NO: 559654 - RNA, 23 nt, Artificial Sequence
  Synthetic
cucuguguugagauuuauuuuuc

SEQ ID NO: 559655 - RNA, 24 nt, Artificial Sequence
  Synthetic
acucuguguugagauuuauuuuuc

SEQ ID NO: 559656 - RNA, 18 nt, Artificial Sequence
  Synthetic
ucuauuuuuaacuuuuuc

SEQ ID NO: 559657 - RNA, 19 nt, Artificial Sequence
  Synthetic
uucuauuuuuaacuuuuuc

SEQ ID NO: 559658 - RNA, 20 nt, Artificial Sequence
  Synthetic
guucuauuuuuaacuuuuuc

SEQ ID NO: 559659 - RNA, 21 nt, Artificial Sequence
  Synthetic
aguucuauuuuuaacuuuuuc

SEQ ID NO: 559660 - RNA, 22 nt, Artificial Sequence
  Synthetic
uaguucuauuuuuaacuuuuuc

SEQ ID NO: 559661 - RNA, 23 nt, Artificial Sequence
  Synthetic
guaguucuauuuuuaacuuuuuc

SEQ ID NO: 559662 - RNA, 24 nt, Artificial Sequence
  Synthetic
gguaguucuauuuuuaacuuuuuc

SEQ ID NO: 559663 - RNA, 18 nt, Artificial Sequence
  Synthetic
uuauauaccuacuuuuuc

SEQ ID NO: 559664 - RNA, 19 nt, Artificial Sequence
  Synthetic
auuauauaccuacuuuuuc

SEQ ID NO: 559665 - RNA, 20 nt, Artificial Sequence
  Synthetic
aauuauauaccuacuuuuuc

SEQ ID NO: 559666 - RNA, 21 nt, Artificial Sequence
  Synthetic
uaauuauauaccuacuuuuuc

SEQ ID NO: 559667 - RNA, 22 nt, Artificial Sequence
  Synthetic
uuaauuauauaccuacuuuuuc

SEQ ID NO: 559668 - RNA, 23 nt, Artificial Sequence
  Synthetic
auuaauuauauaccuacuuuuuc

SEQ ID NO: 559669 - RNA, 24 nt, Artificial Sequence
  Synthetic
uauuaauuauauaccuacuuuuuc

SEQ ID NO: 559670 - RNA, 18 nt, Artificial Sequence
  Synthetic
ucuaaauguuacuuuuuc

SEQ ID NO: 559671 - RNA, 19 nt, Artificial Sequence
  Synthetic
cucuaaauguuacuuuuuc

SEQ ID NO: 559672 - RNA, 20 nt, Artificial Sequence
  Synthetic
ccucuaaauguuacuuuuuc

SEQ ID NO: 559673 - RNA, 21 nt, Artificial Sequence
  Synthetic
accucuaaauguuacuuuuuc

SEQ ID NO: 559674 - RNA, 22 nt, Artificial Sequence
  Synthetic
caccucuaaauguuacuuuuuc

SEQ ID NO: 559675 - RNA, 23 nt, Artificial Sequence
  Synthetic
acaccucuaaauguuacuuuuuc

SEQ ID NO: 559676 - RNA, 24 nt, Artificial Sequence
  Synthetic
gacaccucuaaauguuacuuuuuc

SEQ ID NO: 559677 - RNA, 18 nt, Artificial Sequence
  Synthetic
uagaccuguuacuuuuuc

SEQ ID NO: 559678 - RNA, 19 nt, Artificial Sequence
  Synthetic
guagaccuguuacuuuuuc

SEQ ID NO: 559679 - RNA, 20 nt, Artificial Sequence
  Synthetic
aguagaccuguuacuuuuuc

SEQ ID NO: 559680 - RNA, 21 nt, Artificial Sequence
  Synthetic
gaguagaccuguuacuuuuuc

SEQ ID NO: 559681 - RNA, 22 nt, Artificial Sequence
  Synthetic
agaguagaccuguuacuuuuuc

SEQ ID NO: 559682 - RNA, 23 nt, Artificial Sequence
  Synthetic
aagaguagaccuguuacuuuuuc

SEQ ID NO: 559683 - RNA, 24 nt, Artificial Sequence
  Synthetic
aaagaguagaccuguuacuuuuuc

SEQ ID NO: 559684 - RNA, 18 nt, Artificial Sequence
  Synthetic
ggaugacuccccuuuuuc

SEQ ID NO: 559685 - RNA, 19 nt, Artificial Sequence
  Synthetic
aggaugacuccccuuuuuc

SEQ ID NO: 559686 - RNA, 20 nt, Artificial Sequence
  Synthetic
uaggaugacuccccuuuuuc

SEQ ID NO: 559687 - RNA, 21 nt, Artificial Sequence
  Synthetic
auaggaugacuccccuuuuuc

SEQ ID NO: 559688 - RNA, 22 nt, Artificial Sequence
  Synthetic
gauaggaugacuccccuuuuuc

SEQ ID NO: 559689 - RNA, 23 nt, Artificial Sequence
  Synthetic
ggauaggaugacuccccuuuuuc

SEQ ID NO: 559690 - RNA, 24 nt, Artificial Sequence
  Synthetic
cggauaggaugacuccccuuuuuc

SEQ ID NO: 559691 - RNA, 18 nt, Artificial Sequence
  Synthetic
accucauucagcuuuuuc

SEQ ID NO: 559692 - RNA, 19 nt, Artificial Sequence
  Synthetic
uaccucauucagcuuuuuc

SEQ ID NO: 559693 - RNA, 20 nt, Artificial Sequence
  Synthetic
cuaccucauucagcuuuuuc

SEQ ID NO: 559694 - RNA, 21 nt, Artificial Sequence
  Synthetic
ccuaccucauucagcuuuuuc

SEQ ID NO: 559695 - RNA, 22 nt, Artificial Sequence
  Synthetic
gccuaccucauucagcuuuuuc

SEQ ID NO: 559696 - RNA, 23 nt, Artificial Sequence
  Synthetic
ugccuaccucauucagcuuuuuc

SEQ ID NO: 559697 - RNA, 24 nt, Artificial Sequence
  Synthetic
cugccuaccucauucagcuuuuuc

SEQ ID NO: 559698 - RNA, 18 nt, Artificial Sequence
  Synthetic
acuguaucuugcuuuuuc

SEQ ID NO: 559699 - RNA, 19 nt, Artificial Sequence
  Synthetic
gacuguaucuugcuuuuuc

SEQ ID NO: 559700 - RNA, 20 nt, Artificial Sequence
  Synthetic
ggacuguaucuugcuuuuuc

SEQ ID NO: 559701 - RNA, 21 nt, Artificial Sequence
  Synthetic
aggacuguaucuugcuuuuuc

SEQ ID NO: 559702 - RNA, 22 nt, Artificial Sequence
  Synthetic
aaggacuguaucuugcuuuuuc

SEQ ID NO: 559703 - RNA, 23 nt, Artificial Sequence
  Synthetic
caaggacuguaucuugcuuuuuc

SEQ ID NO: 559704 - RNA, 24 nt, Artificial Sequence
  Synthetic
ucaaggacuguaucuugcuuuuuc

SEQ ID NO: 559705 - RNA, 18 nt, Artificial Sequence
  Synthetic
aauccauuuuucuuuuuc

SEQ ID NO: 559706 - RNA, 19 nt, Artificial Sequence
  Synthetic
caauccauuuuucuuuuuc

SEQ ID NO: 559707 - RNA, 20 nt, Artificial Sequence
  Synthetic
ccaauccauuuuucuuuuuc

SEQ ID NO: 559708 - RNA, 21 nt, Artificial Sequence
  Synthetic
cccaauccauuuuucuuuuuc

SEQ ID NO: 559709 - RNA, 22 nt, Artificial Sequence
  Synthetic
ucccaauccauuuuucuuuuuc

SEQ ID NO: 559710 - RNA, 23 nt, Artificial Sequence
  Synthetic
cucccaauccauuuuucuuuuuc

SEQ ID NO: 559711 - RNA, 24 nt, Artificial Sequence
  Synthetic
ccucccaauccauuuuucuuuuuc

SEQ ID NO: 559712 - RNA, 18 nt, Artificial Sequence
  Synthetic
uuuccuaacaaguuuuuc

SEQ ID NO: 559713 - RNA, 19 nt, Artificial Sequence
  Synthetic
cuuuccuaacaaguuuuuc

SEQ ID NO: 559714 - RNA, 20 nt, Artificial Sequence
  Synthetic
ucuuuccuaacaaguuuuuc

SEQ ID NO: 559715 - RNA, 21 nt, Artificial Sequence
  Synthetic
aucuuuccuaacaaguuuuuc

SEQ ID NO: 559716 - RNA, 22 nt, Artificial Sequence
  Synthetic
gaucuuuccuaacaaguuuuuc

SEQ ID NO: 559717 - RNA, 23 nt, Artificial Sequence
  Synthetic
ggaucuuuccuaacaaguuuuuc

SEQ ID NO: 559718 - RNA, 24 nt, Artificial Sequence
  Synthetic
uggaucuuuccuaacaaguuuuuc

SEQ ID NO: 559719 - RNA, 18 nt, Artificial Sequence
  Synthetic
aaacuuccaggguuuuuc

SEQ ID NO: 559720 - RNA, 19 nt, Artificial Sequence
  Synthetic
caaacuuccaggguuuuuc

SEQ ID NO: 559721 - RNA, 20 nt, Artificial Sequence
  Synthetic
gcaaacuuccaggguuuuuc

SEQ ID NO: 559722 - RNA, 21 nt, Artificial Sequence
  Synthetic
ugcaaacuuccaggguuuuuc

SEQ ID NO: 559723 - RNA, 22 nt, Artificial Sequence
  Synthetic
cugcaaacuuccaggguuuuuc

SEQ ID NO: 559724 - RNA, 23 nt, Artificial Sequence
  Synthetic
gcugcaaacuuccaggguuuuuc

SEQ ID NO: 559725 - RNA, 24 nt, Artificial Sequence
  Synthetic
ggcugcaaacuuccaggguuuuuc

SEQ ID NO: 559726 - RNA, 18 nt, Artificial Sequence
  Synthetic
aagggcacuugguuuuuc

SEQ ID NO: 559727 - RNA, 19 nt, Artificial Sequence
  Synthetic
gaagggcacuugguuuuuc

SEQ ID NO: 559728 - RNA, 20 nt, Artificial Sequence
  Synthetic
ugaagggcacuugguuuuuc

SEQ ID NO: 559729 - RNA, 21 nt, Artificial Sequence
  Synthetic
uugaagggcacuugguuuuuc

SEQ ID NO: 559730 - RNA, 22 nt, Artificial Sequence
  Synthetic
cuugaagggcacuugguuuuuc

SEQ ID NO: 559731 - RNA, 23 nt, Artificial Sequence
  Synthetic
acuugaagggcacuugguuuuuc

SEQ ID NO: 559732 - RNA, 24 nt, Artificial Sequence
  Synthetic
cacuugaagggcacuugguuuuuc

SEQ ID NO: 559733 - RNA, 18 nt, Artificial Sequence
  Synthetic
gucauaauuauguuuuuc

SEQ ID NO: 559734 - RNA, 19 nt, Artificial Sequence
  Synthetic
ugucauaauuauguuuuuc

SEQ ID NO: 559735 - RNA, 20 nt, Artificial Sequence
  Synthetic
gugucauaauuauguuuuuc

SEQ ID NO: 559736 - RNA, 21 nt, Artificial Sequence
  Synthetic
ugugucauaauuauguuuuuc

SEQ ID NO: 559737 - RNA, 22 nt, Artificial Sequence
  Synthetic
augugucauaauuauguuuuuc

SEQ ID NO: 559738 - RNA, 23 nt, Artificial Sequence
  Synthetic
caugugucauaauuauguuuuuc

SEQ ID NO: 559739 - RNA, 24 nt, Artificial Sequence
  Synthetic
gcaugugucauaauuauguuuuuc

SEQ ID NO: 559740 - RNA, 18 nt, Artificial Sequence
  Synthetic
cugaaaaauguguuuuuc

SEQ ID NO: 559741 - RNA, 19 nt, Artificial Sequence
  Synthetic
acugaaaaauguguuuuuc

SEQ ID NO: 559742 - RNA, 20 nt, Artificial Sequence
  Synthetic
aacugaaaaauguguuuuuc

SEQ ID NO: 559743 - RNA, 21 nt, Artificial Sequence
  Synthetic
gaacugaaaaauguguuuuuc

SEQ ID NO: 559744 - RNA, 22 nt, Artificial Sequence
  Synthetic
ugaacugaaaaauguguuuuuc

SEQ ID NO: 559745 - RNA, 23 nt, Artificial Sequence
  Synthetic
augaacugaaaaauguguuuuuc

SEQ ID NO: 559746 - RNA, 24 nt, Artificial Sequence
  Synthetic
caugaacugaaaaauguguuuuuc

SEQ ID NO: 559747 - RNA, 18 nt, Artificial Sequence
  Synthetic
auaauacuauuguuuuuc

SEQ ID NO: 559748 - RNA, 19 nt, Artificial Sequence
  Synthetic
gauaauacuauuguuuuuc

SEQ ID NO: 559749 - RNA, 20 nt, Artificial Sequence
  Synthetic
cgauaauacuauuguuuuuc

SEQ ID NO: 559750 - RNA, 21 nt, Artificial Sequence
  Synthetic
ucgauaauacuauuguuuuuc

SEQ ID NO: 559751 - RNA, 22 nt, Artificial Sequence
  Synthetic
uucgauaauacuauuguuuuuc

SEQ ID NO: 559752 - RNA, 23 nt, Artificial Sequence
  Synthetic
uuucgauaauacuauuguuuuuc

SEQ ID NO: 559753 - RNA, 24 nt, Artificial Sequence
  Synthetic
uuuucgauaauacuauuguuuuuc

SEQ ID NO: 559754 - RNA, 18 nt, Artificial Sequence
  Synthetic
uaaugagacuuguuuuuc

SEQ ID NO: 559755 - RNA, 19 nt, Artificial Sequence
  Synthetic
uuaaugagacuuguuuuuc

SEQ ID NO: 559756 - RNA, 20 nt, Artificial Sequence
  Synthetic
auuaaugagacuuguuuuuc

SEQ ID NO: 559757 - RNA, 21 nt, Artificial Sequence
  Synthetic
gauuaaugagacuuguuuuuc

SEQ ID NO: 559758 - RNA, 22 nt, Artificial Sequence
  Synthetic
agauuaaugagacuuguuuuuc

SEQ ID NO: 559759 - RNA, 23 nt, Artificial Sequence
  Synthetic
cagauuaaugagacuuguuuuuc

SEQ ID NO: 559760 - RNA, 24 nt, Artificial Sequence
  Synthetic
acagauuaaugagacuuguuuuuc

SEQ ID NO: 559761 - RNA, 18 nt, Artificial Sequence
  Synthetic
ugcugcuuuuuguuuuuc

SEQ ID NO: 559762 - RNA, 19 nt, Artificial Sequence
  Synthetic
cugcugcuuuuuguuuuuc

SEQ ID NO: 559763 - RNA, 20 nt, Artificial Sequence
  Synthetic
gcugcugcuuuuuguuuuuc

SEQ ID NO: 559764 - RNA, 21 nt, Artificial Sequence
  Synthetic
agcugcugcuuuuuguuuuuc

SEQ ID NO: 559765 - RNA, 22 nt, Artificial Sequence
  Synthetic
gagcugcugcuuuuuguuuuuc

SEQ ID NO: 559766 - RNA, 23 nt, Artificial Sequence
  Synthetic
agagcugcugcuuuuuguuuuuc

SEQ ID NO: 559767 - RNA, 24 nt, Artificial Sequence
  Synthetic
cagagcugcugcuuuuuguuuuuc

SEQ ID NO: 559768 - RNA, 18 nt, Artificial Sequence
  Synthetic
uuucugggaaauuuuuuc

SEQ ID NO: 559769 - RNA, 19 nt, Artificial Sequence
  Synthetic
uuuucugggaaauuuuuuc

SEQ ID NO: 559770 - RNA, 20 nt, Artificial Sequence
  Synthetic
uuuuucugggaaauuuuuuc

SEQ ID NO: 559771 - RNA, 21 nt, Artificial Sequence
  Synthetic
auuuuucugggaaauuuuuuc

SEQ ID NO: 559772 - RNA, 22 nt, Artificial Sequence
  Synthetic
gauuuuucugggaaauuuuuuc

SEQ ID NO: 559773 - RNA, 23 nt, Artificial Sequence
  Synthetic
ugauuuuucugggaaauuuuuuc

SEQ ID NO: 559774 - RNA, 24 nt, Artificial Sequence
  Synthetic
gugauuuuucugggaaauuuuuuc

SEQ ID NO: 559775 - RNA, 18 nt, Artificial Sequence
  Synthetic
aacuugucuucuuuuuuc

SEQ ID NO: 559776 - RNA, 19 nt, Artificial Sequence
  Synthetic
aaacuugucuucuuuuuuc

SEQ ID NO: 559777 - RNA, 20 nt, Artificial Sequence
  Synthetic
aaaacuugucuucuuuuuuc

SEQ ID NO: 559778 - RNA, 21 nt, Artificial Sequence
  Synthetic
uaaaacuugucuucuuuuuuc

SEQ ID NO: 559779 - RNA, 22 nt, Artificial Sequence
  Synthetic
auaaaacuugucuucuuuuuuc

SEQ ID NO: 559780 - RNA, 23 nt, Artificial Sequence
  Synthetic
aauaaaacuugucuucuuuuuuc

SEQ ID NO: 559781 - RNA, 24 nt, Artificial Sequence
  Synthetic
aaauaaaacuugucuucuuuuuuc

SEQ ID NO: 559782 - RNA, 18 nt, Artificial Sequence
  Synthetic
ggaaagauaauuuuuuuc

SEQ ID NO: 559783 - RNA, 19 nt, Artificial Sequence
  Synthetic
uggaaagauaauuuuuuuc

SEQ ID NO: 559784 - RNA, 20 nt, Artificial Sequence
  Synthetic
uuggaaagauaauuuuuuuc

SEQ ID NO: 559785 - RNA, 21 nt, Artificial Sequence
  Synthetic
uuuggaaagauaauuuuuuuc

SEQ ID NO: 559786 - RNA, 22 nt, Artificial Sequence
  Synthetic
auuuggaaagauaauuuuuuuc

SEQ ID NO: 559787 - RNA, 23 nt, Artificial Sequence
  Synthetic
aauuuggaaagauaauuuuuuuc

SEQ ID NO: 559788 - RNA, 24 nt, Artificial Sequence
  Synthetic
uaauuuggaaagauaauuuuuuuc

SEQ ID NO: 559789 - RNA, 18 nt, Artificial Sequence
  Synthetic
cauauccuacuuuuuuuc

SEQ ID NO: 559790 - RNA, 19 nt, Artificial Sequence
  Synthetic
ccauauccuacuuuuuuuc

SEQ ID NO: 559791 - RNA, 20 nt, Artificial Sequence
  Synthetic
uccauauccuacuuuuuuuc

SEQ ID NO: 559792 - RNA, 21 nt, Artificial Sequence
  Synthetic
uuccauauccuacuuuuuuuc

SEQ ID NO: 559793 - RNA, 22 nt, Artificial Sequence
  Synthetic
auuccauauccuacuuuuuuuc

SEQ ID NO: 559794 - RNA, 23 nt, Artificial Sequence
  Synthetic
aauuccauauccuacuuuuuuuc

SEQ ID NO: 559795 - RNA, 24 nt, Artificial Sequence
  Synthetic
uaauuccauauccuacuuuuuuuc

SEQ ID NO: 559796 - RNA, 18 nt, Artificial Sequence
  Synthetic
uuagcccaucuuuuuuuc

SEQ ID NO: 559797 - RNA, 19 nt, Artificial Sequence
  Synthetic
uuuagcccaucuuuuuuuc

SEQ ID NO: 559798 - RNA, 20 nt, Artificial Sequence
  Synthetic
uuuuagcccaucuuuuuuuc

SEQ ID NO: 559799 - RNA, 21 nt, Artificial Sequence
  Synthetic
cuuuuagcccaucuuuuuuuc

SEQ ID NO: 559800 - RNA, 22 nt, Artificial Sequence
  Synthetic
ucuuuuagcccaucuuuuuuuc

SEQ ID NO: 559801 - RNA, 23 nt, Artificial Sequence
  Synthetic
aucuuuuagcccaucuuuuuuuc

SEQ ID NO: 559802 - RNA, 24 nt, Artificial Sequence
  Synthetic
caucuuuuagcccaucuuuuuuuc

SEQ ID NO: 559803 - RNA, 18 nt, Artificial Sequence
  Synthetic
caacauucucuuuuuuuc

SEQ ID NO: 559804 - RNA, 19 nt, Artificial Sequence
  Synthetic
acaacauucucuuuuuuuc

SEQ ID NO: 559805 - RNA, 20 nt, Artificial Sequence
  Synthetic
aacaacauucucuuuuuuuc

SEQ ID NO: 559806 - RNA, 21 nt, Artificial Sequence
  Synthetic
uaacaacauucucuuuuuuuc

SEQ ID NO: 559807 - RNA, 22 nt, Artificial Sequence
  Synthetic
uuaacaacauucucuuuuuuuc

SEQ ID NO: 559808 - RNA, 23 nt, Artificial Sequence
  Synthetic
uuuaacaacauucucuuuuuuuc

SEQ ID NO: 559809 - RNA, 24 nt, Artificial Sequence
  Synthetic
cuuuaacaacauucucuuuuuuuc

SEQ ID NO: 559810 - RNA, 18 nt, Artificial Sequence
  Synthetic
ucuuccuuucuuuuuuuc

SEQ ID NO: 559811 - RNA, 19 nt, Artificial Sequence
  Synthetic
uucuuccuuucuuuuuuuc

SEQ ID NO: 559812 - RNA, 20 nt, Artificial Sequence
  Synthetic
uuucuuccuuucuuuuuuuc

SEQ ID NO: 559813 - RNA, 21 nt, Artificial Sequence
  Synthetic
cuuucuuccuuucuuuuuuuc

SEQ ID NO: 559814 - RNA, 22 nt, Artificial Sequence
  Synthetic
ucuuucuuccuuucuuuuuuuc

SEQ ID NO: 559815 - RNA, 23 nt, Artificial Sequence
  Synthetic
uucuuucuuccuuucuuuuuuuc

SEQ ID NO: 559816 - RNA, 24 nt, Artificial Sequence
  Synthetic
uuucuuucuuccuuucuuuuuuuc

SEQ ID NO: 559817 - RNA, 18 nt, Artificial Sequence
  Synthetic
aaggacuacuuuuuuuuc

SEQ ID NO: 559818 - RNA, 19 nt, Artificial Sequence
  Synthetic
uaaggacuacuuuuuuuuc

SEQ ID NO: 559819 - RNA, 20 nt, Artificial Sequence
  Synthetic
uuaaggacuacuuuuuuuuc

SEQ ID NO: 559820 - RNA, 21 nt, Artificial Sequence
  Synthetic
auuaaggacuacuuuuuuuuc

SEQ ID NO: 559821 - RNA, 22 nt, Artificial Sequence
  Synthetic
aauuaaggacuacuuuuuuuuc

SEQ ID NO: 559822 - RNA, 23 nt, Artificial Sequence
  Synthetic
caauuaaggacuacuuuuuuuuc

SEQ ID NO: 559823 - RNA, 24 nt, Artificial Sequence
  Synthetic
ucaauuaaggacuacuuuuuuuuc

SEQ ID NO: 559824 - RNA, 18 nt, Artificial Sequence
  Synthetic
agauauuuuuuuuuuuuc

SEQ ID NO: 559825 - RNA, 19 nt, Artificial Sequence
  Synthetic
uagauauuuuuuuuuuuuc

SEQ ID NO: 559826 - RNA, 20 nt, Artificial Sequence
  Synthetic
auagauauuuuuuuuuuuuc

SEQ ID NO: 559827 - RNA, 21 nt, Artificial Sequence
  Synthetic
uauagauauuuuuuuuuuuuc

SEQ ID NO: 559828 - RNA, 22 nt, Artificial Sequence
  Synthetic
cuauagauauuuuuuuuuuuuc

SEQ ID NO: 559829 - RNA, 23 nt, Artificial Sequence
  Synthetic
ucuauagauauuuuuuuuuuuuc

SEQ ID NO: 559830 - RNA, 24 nt, Artificial Sequence
  Synthetic
uucuauagauauuuuuuuuuuuuc

SEQ ID NO: 559831 - RNA, 18 nt, Artificial Sequence
  Synthetic
uguuuuuuuuuuuuuuuc

SEQ ID NO: 559832 - RNA, 19 nt, Artificial Sequence
  Synthetic
uuguuuuuuuuuuuuuuuc

SEQ ID NO: 559833 - RNA, 20 nt, Artificial Sequence
  Synthetic
uuuguuuuuuuuuuuuuuuc

SEQ ID NO: 559834 - RNA, 21 nt, Artificial Sequence
  Synthetic
uuuuguuuuuuuuuuuuuuuc

SEQ ID NO: 559835 - RNA, 22 nt, Artificial Sequence
  Synthetic
auuuuguuuuuuuuuuuuuuuc

SEQ ID NO: 559836 - RNA, 23 nt, Artificial Sequence
  Synthetic
uauuuuguuuuuuuuuuuuuuuc

SEQ ID NO: 559837 - RNA, 24 nt, Artificial Sequence
  Synthetic
auauuuuguuuuuuuuuuuuuuuc

SEQ ID NO: 559838 - RNA, 18 nt, Artificial Sequence
  Synthetic
agugaaaaaaaaaaaaag

SEQ ID NO: 559839 - RNA, 19 nt, Artificial Sequence
  Synthetic
aagugaaaaaaaaaaaaag

SEQ ID NO: 559840 - RNA, 20 nt, Artificial Sequence
  Synthetic
aaagugaaaaaaaaaaaaag

SEQ ID NO: 559841 - RNA, 21 nt, Artificial Sequence
  Synthetic
aaaagugaaaaaaaaaaaaag

SEQ ID NO: 559842 - RNA, 22 nt, Artificial Sequence
  Synthetic
uaaaagugaaaaaaaaaaaaag

SEQ ID NO: 559843 - RNA, 23 nt, Artificial Sequence
  Synthetic
auaaaagugaaaaaaaaaaaaag

SEQ ID NO: 559844 - RNA, 24 nt, Artificial Sequence
  Synthetic
aauaaaagugaaaaaaaaaaaaag

SEQ ID NO: 559845 - RNA, 18 nt, Artificial Sequence
  Synthetic
caaaacaaaaaaaaaaag

SEQ ID NO: 559846 - RNA, 19 nt, Artificial Sequence
  Synthetic
acaaaacaaaaaaaaaaag

SEQ ID NO: 559847 - RNA, 20 nt, Artificial Sequence
  Synthetic
aacaaaacaaaaaaaaaaag

SEQ ID NO: 559848 - RNA, 21 nt, Artificial Sequence
  Synthetic
aaacaaaacaaaaaaaaaaag

SEQ ID NO: 559849 - RNA, 22 nt, Artificial Sequence
  Synthetic
aaaacaaaacaaaaaaaaaaag

SEQ ID NO: 559850 - RNA, 23 nt, Artificial Sequence
  Synthetic
aaaaacaaaacaaaaaaaaaaag

SEQ ID NO: 559851 - RNA, 24 nt, Artificial Sequence
  Synthetic
aaaaaacaaaacaaaaaaaaaaag

SEQ ID NO: 559852 - RNA, 18 nt, Artificial Sequence
  Synthetic
ccugucuccaaaaaaaag

SEQ ID NO: 559853 - RNA, 19 nt, Artificial Sequence
  Synthetic
cccugucuccaaaaaaaag

SEQ ID NO: 559854 - RNA, 20 nt, Artificial Sequence
  Synthetic
acccugucuccaaaaaaaag

SEQ ID NO: 559855 - RNA, 21 nt, Artificial Sequence
  Synthetic
gacccugucuccaaaaaaaag

SEQ ID NO: 559856 - RNA, 22 nt, Artificial Sequence
  Synthetic
ugacccugucuccaaaaaaaag

SEQ ID NO: 559857 - RNA, 23 nt, Artificial Sequence
  Synthetic
augacccugucuccaaaaaaaag

SEQ ID NO: 559858 - RNA, 24 nt, Artificial Sequence
  Synthetic
uaugacccugucuccaaaaaaaag

SEQ ID NO: 559859 - RNA, 18 nt, Artificial Sequence
  Synthetic
auggagaagaaaaaaaag

SEQ ID NO: 559860 - RNA, 19 nt, Artificial Sequence
  Synthetic
uauggagaagaaaaaaaag

SEQ ID NO: 559861 - RNA, 20 nt, Artificial Sequence
  Synthetic
auauggagaagaaaaaaaag

SEQ ID NO: 559862 - RNA, 21 nt, Artificial Sequence
  Synthetic
gauauggagaagaaaaaaaag

SEQ ID NO: 559863 - RNA, 22 nt, Artificial Sequence
  Synthetic
ggauauggagaagaaaaaaaag

SEQ ID NO: 559864 - RNA, 23 nt, Artificial Sequence
  Synthetic
uggauauggagaagaaaaaaaag

SEQ ID NO: 559865 - RNA, 24 nt, Artificial Sequence
  Synthetic
auggauauggagaagaaaaaaaag

SEQ ID NO: 559866 - RNA, 18 nt, Artificial Sequence
  Synthetic
aauugaaaacaaaaaaag

SEQ ID NO: 559867 - RNA, 19 nt, Artificial Sequence
  Synthetic
uaauugaaaacaaaaaaag

SEQ ID NO: 559868 - RNA, 20 nt, Artificial Sequence
  Synthetic
guaauugaaaacaaaaaaag

SEQ ID NO: 559869 - RNA, 21 nt, Artificial Sequence
  Synthetic
aguaauugaaaacaaaaaaag

SEQ ID NO: 559870 - RNA, 22 nt, Artificial Sequence
  Synthetic
caguaauugaaaacaaaaaaag

SEQ ID NO: 559871 - RNA, 23 nt, Artificial Sequence
  Synthetic
ucaguaauugaaaacaaaaaaag

SEQ ID NO: 559872 - RNA, 24 nt, Artificial Sequence
  Synthetic
uucaguaauugaaaacaaaaaaag

SEQ ID NO: 559873 - RNA, 18 nt, Artificial Sequence
  Synthetic
acugucacacaaaaaaag

SEQ ID NO: 559874 - RNA, 19 nt, Artificial Sequence
  Synthetic
uacugucacacaaaaaaag

SEQ ID NO: 559875 - RNA, 20 nt, Artificial Sequence
  Synthetic
uuacugucacacaaaaaaag

SEQ ID NO: 559876 - RNA, 21 nt, Artificial Sequence
  Synthetic
guuacugucacacaaaaaaag

SEQ ID NO: 559877 - RNA, 22 nt, Artificial Sequence
  Synthetic
uguuacugucacacaaaaaaag

SEQ ID NO: 559878 - RNA, 23 nt, Artificial Sequence
  Synthetic
auguuacugucacacaaaaaaag

SEQ ID NO: 559879 - RNA, 24 nt, Artificial Sequence
  Synthetic
aauguuacugucacacaaaaaaag

SEQ ID NO: 559880 - RNA, 18 nt, Artificial Sequence
  Synthetic
acucggccacaaaaaaag

SEQ ID NO: 559881 - RNA, 19 nt, Artificial Sequence
  Synthetic
uacucggccacaaaaaaag

SEQ ID NO: 559882 - RNA, 20 nt, Artificial Sequence
  Synthetic
uuacucggccacaaaaaaag

SEQ ID NO: 559883 - RNA, 21 nt, Artificial Sequence
  Synthetic
auuacucggccacaaaaaaag

SEQ ID NO: 559884 - RNA, 22 nt, Artificial Sequence
  Synthetic
uauuacucggccacaaaaaaag

SEQ ID NO: 559885 - RNA, 23 nt, Artificial Sequence
  Synthetic
uuauuacucggccacaaaaaaag

SEQ ID NO: 559886 - RNA, 24 nt, Artificial Sequence
  Synthetic
auuauuacucggccacaaaaaaag

SEQ ID NO: 559887 - RNA, 18 nt, Artificial Sequence
  Synthetic
agugagugggaaaaaaag

SEQ ID NO: 559888 - RNA, 19 nt, Artificial Sequence
  Synthetic
gagugagugggaaaaaaag

SEQ ID NO: 559889 - RNA, 20 nt, Artificial Sequence
  Synthetic
ggagugagugggaaaaaaag

SEQ ID NO: 559890 - RNA, 21 nt, Artificial Sequence
  Synthetic
uggagugagugggaaaaaaag

SEQ ID NO: 559891 - RNA, 22 nt, Artificial Sequence
  Synthetic
auggagugagugggaaaaaaag

SEQ ID NO: 559892 - RNA, 23 nt, Artificial Sequence
  Synthetic
aauggagugagugggaaaaaaag

SEQ ID NO: 559893 - RNA, 24 nt, Artificial Sequence
  Synthetic
aaauggagugagugggaaaaaaag

SEQ ID NO: 559894 - RNA, 18 nt, Artificial Sequence
  Synthetic
augucuuuggaaaaaaag

SEQ ID NO: 559895 - RNA, 19 nt, Artificial Sequence
  Synthetic
aaugucuuuggaaaaaaag

SEQ ID NO: 559896 - RNA, 20 nt, Artificial Sequence
  Synthetic
aaaugucuuuggaaaaaaag

SEQ ID NO: 559897 - RNA, 21 nt, Artificial Sequence
  Synthetic
caaaugucuuuggaaaaaaag

SEQ ID NO: 559898 - RNA, 22 nt, Artificial Sequence
  Synthetic
gcaaaugucuuuggaaaaaaag

SEQ ID NO: 559899 - RNA, 23 nt, Artificial Sequence
  Synthetic
ugcaaaugucuuuggaaaaaaag

SEQ ID NO: 559900 - RNA, 24 nt, Artificial Sequence
  Synthetic
augcaaaugucuuuggaaaaaaag

SEQ ID NO: 559901 - RNA, 18 nt, Artificial Sequence
  Synthetic
agagacuacuaaaaaaag

SEQ ID NO: 559902 - RNA, 19 nt, Artificial Sequence
  Synthetic
cagagacuacuaaaaaaag

SEQ ID NO: 559903 - RNA, 20 nt, Artificial Sequence
  Synthetic
acagagacuacuaaaaaaag

SEQ ID NO: 559904 - RNA, 21 nt, Artificial Sequence
  Synthetic
uacagagacuacuaaaaaaag

SEQ ID NO: 559905 - RNA, 22 nt, Artificial Sequence
  Synthetic
cuacagagacuacuaaaaaaag

SEQ ID NO: 559906 - RNA, 23 nt, Artificial Sequence
  Synthetic
ccuacagagacuacuaaaaaaag

SEQ ID NO: 559907 - RNA, 24 nt, Artificial Sequence
  Synthetic
accuacagagacuacuaaaaaaag

SEQ ID NO: 559908 - RNA, 18 nt, Artificial Sequence
  Synthetic
ugugcaguuuaaaaaaag

SEQ ID NO: 559909 - RNA, 19 nt, Artificial Sequence
  Synthetic
augugcaguuuaaaaaaag

SEQ ID NO: 559910 - RNA, 20 nt, Artificial Sequence
  Synthetic
uaugugcaguuuaaaaaaag

SEQ ID NO: 559911 - RNA, 21 nt, Artificial Sequence
  Synthetic
guaugugcaguuuaaaaaaag

SEQ ID NO: 559912 - RNA, 22 nt, Artificial Sequence
  Synthetic
uguaugugcaguuuaaaaaaag

SEQ ID NO: 559913 - RNA, 23 nt, Artificial Sequence
  Synthetic
uuguaugugcaguuuaaaaaaag

SEQ ID NO: 559914 - RNA, 24 nt, Artificial Sequence
  Synthetic
uuuguaugugcaguuuaaaaaaag

SEQ ID NO: 559915 - RNA, 18 nt, Artificial Sequence
  Synthetic
aaagaagguccaaaaaag

SEQ ID NO: 559916 - RNA, 19 nt, Artificial Sequence
  Synthetic
aaaagaagguccaaaaaag

SEQ ID NO: 559917 - RNA, 20 nt, Artificial Sequence
  Synthetic
gaaaagaagguccaaaaaag

SEQ ID NO: 559918 - RNA, 21 nt, Artificial Sequence
  Synthetic
ugaaaagaagguccaaaaaag

SEQ ID NO: 559919 - RNA, 22 nt, Artificial Sequence
  Synthetic
gugaaaagaagguccaaaaaag

SEQ ID NO: 559920 - RNA, 23 nt, Artificial Sequence
  Synthetic
ugugaaaagaagguccaaaaaag

SEQ ID NO: 559921 - RNA, 24 nt, Artificial Sequence
  Synthetic
gugugaaaagaagguccaaaaaag

SEQ ID NO: 559922 - RNA, 18 nt, Artificial Sequence
  Synthetic
auuccuacaucaaaaaag

SEQ ID NO: 559923 - RNA, 19 nt, Artificial Sequence
  Synthetic
aauuccuacaucaaaaaag

SEQ ID NO: 559924 - RNA, 20 nt, Artificial Sequence
  Synthetic
aaauuccuacaucaaaaaag

SEQ ID NO: 559925 - RNA, 21 nt, Artificial Sequence
  Synthetic
uaaauuccuacaucaaaaaag

SEQ ID NO: 559926 - RNA, 22 nt, Artificial Sequence
  Synthetic
auaaauuccuacaucaaaaaag

SEQ ID NO: 559927 - RNA, 23 nt, Artificial Sequence
  Synthetic
aauaaauuccuacaucaaaaaag

SEQ ID NO: 559928 - RNA, 24 nt, Artificial Sequence
  Synthetic
caauaaauuccuacaucaaaaaag

SEQ ID NO: 559929 - RNA, 18 nt, Artificial Sequence
  Synthetic
accagaaugagaaaaaag

SEQ ID NO: 559930 - RNA, 19 nt, Artificial Sequence
  Synthetic
uaccagaaugagaaaaaag

SEQ ID NO: 559931 - RNA, 20 nt, Artificial Sequence
  Synthetic
guaccagaaugagaaaaaag

SEQ ID NO: 559932 - RNA, 21 nt, Artificial Sequence
  Synthetic
aguaccagaaugagaaaaaag

SEQ ID NO: 559933 - RNA, 22 nt, Artificial Sequence
  Synthetic
aaguaccagaaugagaaaaaag

SEQ ID NO: 559934 - RNA, 23 nt, Artificial Sequence
  Synthetic
uaaguaccagaaugagaaaaaag

SEQ ID NO: 559935 - RNA, 24 nt, Artificial Sequence
  Synthetic
auaaguaccagaaugagaaaaaag

SEQ ID NO: 559936 - RNA, 18 nt, Artificial Sequence
  Synthetic
ucaucagugagaaaaaag

SEQ ID NO: 559937 - RNA, 19 nt, Artificial Sequence
  Synthetic
uucaucagugagaaaaaag

SEQ ID NO: 559938 - RNA, 20 nt, Artificial Sequence
  Synthetic
cuucaucagugagaaaaaag

SEQ ID NO: 559939 - RNA, 21 nt, Artificial Sequence
  Synthetic
acuucaucagugagaaaaaag

SEQ ID NO: 559940 - RNA, 22 nt, Artificial Sequence
  Synthetic
aacuucaucagugagaaaaaag

SEQ ID NO: 559941 - RNA, 23 nt, Artificial Sequence
  Synthetic
gaacuucaucagugagaaaaaag

SEQ ID NO: 559942 - RNA, 24 nt, Artificial Sequence
  Synthetic
agaacuucaucagugagaaaaaag

SEQ ID NO: 559943 - RNA, 18 nt, Artificial Sequence
  Synthetic
uugcaaaaaggaaaaaag

SEQ ID NO: 559944 - RNA, 19 nt, Artificial Sequence
  Synthetic
uuugcaaaaaggaaaaaag

SEQ ID NO: 559945 - RNA, 20 nt, Artificial Sequence
  Synthetic
uuuugcaaaaaggaaaaaag

SEQ ID NO: 559946 - RNA, 21 nt, Artificial Sequence
  Synthetic
uuuuugcaaaaaggaaaaaag

SEQ ID NO: 559947 - RNA, 22 nt, Artificial Sequence
  Synthetic
guuuuugcaaaaaggaaaaaag

SEQ ID NO: 559948 - RNA, 23 nt, Artificial Sequence
  Synthetic
gguuuuugcaaaaaggaaaaaag

SEQ ID NO: 559949 - RNA, 24 nt, Artificial Sequence
  Synthetic
ggguuuuugcaaaaaggaaaaaag

SEQ ID NO: 559950 - RNA, 18 nt, Artificial Sequence
  Synthetic
agaggaaaagacaaaaag

SEQ ID NO: 559951 - RNA, 19 nt, Artificial Sequence
  Synthetic
uagaggaaaagacaaaaag

SEQ ID NO: 559952 - RNA, 20 nt, Artificial Sequence
  Synthetic
cuagaggaaaagacaaaaag

SEQ ID NO: 559953 - RNA, 21 nt, Artificial Sequence
  Synthetic
acuagaggaaaagacaaaaag

SEQ ID NO: 559954 - RNA, 22 nt, Artificial Sequence
  Synthetic
gacuagaggaaaagacaaaaag

SEQ ID NO: 559955 - RNA, 23 nt, Artificial Sequence
  Synthetic
agacuagaggaaaagacaaaaag

SEQ ID NO: 559956 - RNA, 24 nt, Artificial Sequence
  Synthetic
aagacuagaggaaaagacaaaaag

SEQ ID NO: 559957 - RNA, 18 nt, Artificial Sequence
  Synthetic
uaaguuucauacaaaaag

SEQ ID NO: 559958 - RNA, 19 nt, Artificial Sequence
  Synthetic
auaaguuucauacaaaaag

SEQ ID NO: 559959 - RNA, 20 nt, Artificial Sequence
  Synthetic
aauaaguuucauacaaaaag

SEQ ID NO: 559960 - RNA, 21 nt, Artificial Sequence
  Synthetic
gaauaaguuucauacaaaaag

SEQ ID NO: 559961 - RNA, 22 nt, Artificial Sequence
  Synthetic
ggaauaaguuucauacaaaaag

SEQ ID NO: 559962 - RNA, 23 nt, Artificial Sequence
  Synthetic
uggaauaaguuucauacaaaaag

SEQ ID NO: 559963 - RNA, 24 nt, Artificial Sequence
  Synthetic
uuggaauaaguuucauacaaaaag

SEQ ID NO: 559964 - RNA, 18 nt, Artificial Sequence
  Synthetic
aauguuucccccaaaaag

SEQ ID NO: 559965 - RNA, 19 nt, Artificial Sequence
  Synthetic
gaauguuucccccaaaaag

SEQ ID NO: 559966 - RNA, 20 nt, Artificial Sequence
  Synthetic
agaauguuucccccaaaaag

SEQ ID NO: 559967 - RNA, 21 nt, Artificial Sequence
  Synthetic
uagaauguuucccccaaaaag

SEQ ID NO: 559968 - RNA, 22 nt, Artificial Sequence
  Synthetic
uuagaauguuucccccaaaaag

SEQ ID NO: 559969 - RNA, 23 nt, Artificial Sequence
  Synthetic
uuuagaauguuucccccaaaaag

SEQ ID NO: 559970 - RNA, 24 nt, Artificial Sequence
  Synthetic
auuuagaauguuucccccaaaaag

SEQ ID NO: 559971 - RNA, 18 nt, Artificial Sequence
  Synthetic
guguuaaaugccaaaaag

SEQ ID NO: 559972 - RNA, 19 nt, Artificial Sequence
  Synthetic
uguguuaaaugccaaaaag

SEQ ID NO: 559973 - RNA, 20 nt, Artificial Sequence
  Synthetic
uuguguuaaaugccaaaaag

SEQ ID NO: 559974 - RNA, 21 nt, Artificial Sequence
  Synthetic
uuuguguuaaaugccaaaaag

SEQ ID NO: 559975 - RNA, 22 nt, Artificial Sequence
  Synthetic
uuuuguguuaaaugccaaaaag

SEQ ID NO: 559976 - RNA, 23 nt, Artificial Sequence
  Synthetic
guuuuguguuaaaugccaaaaag

SEQ ID NO: 559977 - RNA, 24 nt, Artificial Sequence
  Synthetic
aguuuuguguuaaaugccaaaaag

SEQ ID NO: 559978 - RNA, 18 nt, Artificial Sequence
  Synthetic
uucuagcuguccaaaaag

SEQ ID NO: 559979 - RNA, 19 nt, Artificial Sequence
  Synthetic
uuucuagcuguccaaaaag

SEQ ID NO: 559980 - RNA, 20 nt, Artificial Sequence
  Synthetic
guuucuagcuguccaaaaag

SEQ ID NO: 559981 - RNA, 21 nt, Artificial Sequence
  Synthetic
gguuucuagcuguccaaaaag

SEQ ID NO: 559982 - RNA, 22 nt, Artificial Sequence
  Synthetic
agguuucuagcuguccaaaaag

SEQ ID NO: 559983 - RNA, 23 nt, Artificial Sequence
  Synthetic
aagguuucuagcuguccaaaaag

SEQ ID NO: 559984 - RNA, 24 nt, Artificial Sequence
  Synthetic
gaagguuucuagcuguccaaaaag

SEQ ID NO: 559985 - RNA, 18 nt, Artificial Sequence
  Synthetic
uuggcuauuaucaaaaag

SEQ ID NO: 559986 - RNA, 19 nt, Artificial Sequence
  Synthetic
auuggcuauuaucaaaaag

SEQ ID NO: 559987 - RNA, 20 nt, Artificial Sequence
  Synthetic
gauuggcuauuaucaaaaag

SEQ ID NO: 559988 - RNA, 21 nt, Artificial Sequence
  Synthetic
ggauuggcuauuaucaaaaag

SEQ ID NO: 559989 - RNA, 22 nt, Artificial Sequence
  Synthetic
uggauuggcuauuaucaaaaag

SEQ ID NO: 559990 - RNA, 23 nt, Artificial Sequence
  Synthetic
uuggauuggcuauuaucaaaaag

SEQ ID NO: 559991 - RNA, 24 nt, Artificial Sequence
  Synthetic
uuuggauuggcuauuaucaaaaag

SEQ ID NO: 559992 - RNA, 18 nt, Artificial Sequence
  Synthetic
aggagaaaccucaaaaag

SEQ ID NO: 559993 - RNA, 19 nt, Artificial Sequence
  Synthetic
gaggagaaaccucaaaaag

SEQ ID NO: 559994 - RNA, 20 nt, Artificial Sequence
  Synthetic
ggaggagaaaccucaaaaag

SEQ ID NO: 559995 - RNA, 21 nt, Artificial Sequence
  Synthetic
cggaggagaaaccucaaaaag

SEQ ID NO: 559996 - RNA, 22 nt, Artificial Sequence
  Synthetic
gcggaggagaaaccucaaaaag

SEQ ID NO: 559997 - RNA, 23 nt, Artificial Sequence
  Synthetic
agcggaggagaaaccucaaaaag

SEQ ID NO: 559998 - RNA, 24 nt, Artificial Sequence
  Synthetic
aagcggaggagaaaccucaaaaag

SEQ ID NO: 559999 - RNA, 18 nt, Artificial Sequence
  Synthetic
gaaaaugggcucaaaaag

SEQ ID NO: 560000 - RNA, 19 nt, Artificial Sequence
  Synthetic
agaaaaugggcucaaaaag

SEQ ID NO: 560001 - RNA, 20 nt, Artificial Sequence
  Synthetic
cagaaaaugggcucaaaaag

SEQ ID NO: 560002 - RNA, 21 nt, Artificial Sequence
  Synthetic
ccagaaaaugggcucaaaaag

SEQ ID NO: 560003 - RNA, 22 nt, Artificial Sequence
  Synthetic
gccagaaaaugggcucaaaaag

SEQ ID NO: 560004 - RNA, 23 nt, Artificial Sequence
  Synthetic
ugccagaaaaugggcucaaaaag

SEQ ID NO: 560005 - RNA, 24 nt, Artificial Sequence
  Synthetic
augccagaaaaugggcucaaaaag

SEQ ID NO: 560006 - RNA, 21 nt, Artificial Sequence
  Synthetic
uauuccaaucaauagaaaaag

SEQ ID NO: 560007 - RNA, 22 nt, Artificial Sequence
  Synthetic
cuauuccaaucaauagaaaaag

SEQ ID NO: 560008 - RNA, 23 nt, Artificial Sequence
  Synthetic
acuauuccaaucaauagaaaaag

SEQ ID NO: 560009 - RNA, 24 nt, Artificial Sequence
  Synthetic
aacuauuccaaucaauagaaaaag

SEQ ID NO: 560010 - RNA, 18 nt, Artificial Sequence
  Synthetic
ucaaagacuuagaaaaag

SEQ ID NO: 560011 - RNA, 19 nt, Artificial Sequence
  Synthetic
cucaaagacuuagaaaaag

SEQ ID NO: 560012 - RNA, 20 nt, Artificial Sequence
  Synthetic
ccucaaagacuuagaaaaag

SEQ ID NO: 560013 - RNA, 21 nt, Artificial Sequence
  Synthetic
uccucaaagacuuagaaaaag

SEQ ID NO: 560014 - RNA, 22 nt, Artificial Sequence
  Synthetic
uuccucaaagacuuagaaaaag

SEQ ID NO: 560015 - RNA, 23 nt, Artificial Sequence
  Synthetic
cuuccucaaagacuuagaaaaag

SEQ ID NO: 560016 - RNA, 24 nt, Artificial Sequence
  Synthetic
ucuuccucaaagacuuagaaaaag

SEQ ID NO: 560017 - RNA, 18 nt, Artificial Sequence
  Synthetic
guuaaauuuuagaaaaag

SEQ ID NO: 560018 - RNA, 19 nt, Artificial Sequence
  Synthetic
aguuaaauuuuagaaaaag

SEQ ID NO: 560019 - RNA, 20 nt, Artificial Sequence
  Synthetic
aaguuaaauuuuagaaaaag

SEQ ID NO: 560020 - RNA, 21 nt, Artificial Sequence
  Synthetic
aaaguuaaauuuuagaaaaag

SEQ ID NO: 560021 - RNA, 22 nt, Artificial Sequence
  Synthetic
caaaguuaaauuuuagaaaaag

SEQ ID NO: 560022 - RNA, 23 nt, Artificial Sequence
  Synthetic
ucaaaguuaaauuuuagaaaaag

SEQ ID NO: 560023 - RNA, 24 nt, Artificial Sequence
  Synthetic
gucaaaguuaaauuuuagaaaaag

SEQ ID NO: 560024 - RNA, 18 nt, Artificial Sequence
  Synthetic
cucucuugcaggaaaaag

SEQ ID NO: 560025 - RNA, 19 nt, Artificial Sequence
  Synthetic
ucucucuugcaggaaaaag

SEQ ID NO: 560026 - RNA, 20 nt, Artificial Sequence
  Synthetic
uucucucuugcaggaaaaag

SEQ ID NO: 560027 - RNA, 21 nt, Artificial Sequence
  Synthetic
uuucucucuugcaggaaaaag

SEQ ID NO: 560028 - RNA, 22 nt, Artificial Sequence
  Synthetic
uuuucucucuugcaggaaaaag

SEQ ID NO: 560029 - RNA, 23 nt, Artificial Sequence
  Synthetic
cuuuucucucuugcaggaaaaag

SEQ ID NO: 560030 - RNA, 24 nt, Artificial Sequence
  Synthetic
acuuuucucucuugcaggaaaaag

SEQ ID NO: 560031 - RNA, 18 nt, Artificial Sequence
  Synthetic
ugggguuggaggaaaaag

SEQ ID NO: 560032 - RNA, 19 nt, Artificial Sequence
  Synthetic
cugggguuggaggaaaaag

SEQ ID NO: 560033 - RNA, 20 nt, Artificial Sequence
  Synthetic
acugggguuggaggaaaaag

SEQ ID NO: 560034 - RNA, 21 nt, Artificial Sequence
  Synthetic
gacugggguuggaggaaaaag

SEQ ID NO: 560035 - RNA, 22 nt, Artificial Sequence
  Synthetic
ugacugggguuggaggaaaaag

SEQ ID NO: 560036 - RNA, 23 nt, Artificial Sequence
  Synthetic
augacugggguuggaggaaaaag

SEQ ID NO: 560037 - RNA, 24 nt, Artificial Sequence
  Synthetic
gaugacugggguuggaggaaaaag

SEQ ID NO: 560038 - RNA, 18 nt, Artificial Sequence
  Synthetic
uuuuaauccuggaaaaag

SEQ ID NO: 560039 - RNA, 19 nt, Artificial Sequence
  Synthetic
auuuuaauccuggaaaaag

SEQ ID NO: 560040 - RNA, 20 nt, Artificial Sequence
  Synthetic
aauuuuaauccuggaaaaag

SEQ ID NO: 560041 - RNA, 21 nt, Artificial Sequence
  Synthetic
uaauuuuaauccuggaaaaag

SEQ ID NO: 560042 - RNA, 22 nt, Artificial Sequence
  Synthetic
auaauuuuaauccuggaaaaag

SEQ ID NO: 560043 - RNA, 23 nt, Artificial Sequence
  Synthetic
gauaauuuuaauccuggaaaaag

SEQ ID NO: 560044 - RNA, 24 nt, Artificial Sequence
  Synthetic
agauaauuuuaauccuggaaaaag

SEQ ID NO: 560045 - RNA, 18 nt, Artificial Sequence
  Synthetic
auaguauuauugaaaaag

SEQ ID NO: 560046 - RNA, 19 nt, Artificial Sequence
  Synthetic
uauaguauuauugaaaaag

SEQ ID NO: 560047 - RNA, 20 nt, Artificial Sequence
  Synthetic
auauaguauuauugaaaaag

SEQ ID NO: 560048 - RNA, 21 nt, Artificial Sequence
  Synthetic
aauauaguauuauugaaaaag

SEQ ID NO: 560049 - RNA, 22 nt, Artificial Sequence
  Synthetic
aaauauaguauuauugaaaaag

SEQ ID NO: 560050 - RNA, 23 nt, Artificial Sequence
  Synthetic
caaauauaguauuauugaaaaag

SEQ ID NO: 560051 - RNA, 24 nt, Artificial Sequence
  Synthetic
acaaauauaguauuauugaaaaag

SEQ ID NO: 560052 - RNA, 18 nt, Artificial Sequence
  Synthetic
acucaccauuugaaaaag

SEQ ID NO: 560053 - RNA, 19 nt, Artificial Sequence
  Synthetic
aacucaccauuugaaaaag

SEQ ID NO: 560054 - RNA, 20 nt, Artificial Sequence
  Synthetic
gaacucaccauuugaaaaag

SEQ ID NO: 560055 - RNA, 21 nt, Artificial Sequence
  Synthetic
ugaacucaccauuugaaaaag

SEQ ID NO: 560056 - RNA, 22 nt, Artificial Sequence
  Synthetic
cugaacucaccauuugaaaaag

SEQ ID NO: 560057 - RNA, 23 nt, Artificial Sequence
  Synthetic
acugaacucaccauuugaaaaag

SEQ ID NO: 560058 - RNA, 24 nt, Artificial Sequence
  Synthetic
uacugaacucaccauuugaaaaag

SEQ ID NO: 560059 - RNA, 18 nt, Artificial Sequence
  Synthetic
aucauacaaaauaaaaag

SEQ ID NO: 560060 - RNA, 19 nt, Artificial Sequence
  Synthetic
gaucauacaaaauaaaaag

SEQ ID NO: 560061 - RNA, 20 nt, Artificial Sequence
  Synthetic
ugaucauacaaaauaaaaag

SEQ ID NO: 560062 - RNA, 21 nt, Artificial Sequence
  Synthetic
uugaucauacaaaauaaaaag

SEQ ID NO: 560063 - RNA, 22 nt, Artificial Sequence
  Synthetic
cuugaucauacaaaauaaaaag

SEQ ID NO: 560064 - RNA, 23 nt, Artificial Sequence
  Synthetic
ucuugaucauacaaaauaaaaag

SEQ ID NO: 560065 - RNA, 24 nt, Artificial Sequence
  Synthetic
aucuugaucauacaaaauaaaaag

SEQ ID NO: 560066 - RNA, 18 nt, Artificial Sequence
  Synthetic
aaauaacauaauaaaaag

SEQ ID NO: 560067 - RNA, 19 nt, Artificial Sequence
  Synthetic
uaaauaacauaauaaaaag

SEQ ID NO: 560068 - RNA, 20 nt, Artificial Sequence
  Synthetic
uuaaauaacauaauaaaaag

SEQ ID NO: 560069 - RNA, 21 nt, Artificial Sequence
  Synthetic
uuuaaauaacauaauaaaaag

SEQ ID NO: 560070 - RNA, 22 nt, Artificial Sequence
  Synthetic
auuuaaauaacauaauaaaaag

SEQ ID NO: 560071 - RNA, 23 nt, Artificial Sequence
  Synthetic
gauuuaaauaacauaauaaaaag

SEQ ID NO: 560072 - RNA, 24 nt, Artificial Sequence
  Synthetic
ggauuuaaauaacauaauaaaaag

SEQ ID NO: 560073 - RNA, 18 nt, Artificial Sequence
  Synthetic
gaaauuggagauaaaaag

SEQ ID NO: 560074 - RNA, 19 nt, Artificial Sequence
  Synthetic
agaaauuggagauaaaaag

SEQ ID NO: 560075 - RNA, 20 nt, Artificial Sequence
  Synthetic
aagaaauuggagauaaaaag

SEQ ID NO: 560076 - RNA, 21 nt, Artificial Sequence
  Synthetic
gaagaaauuggagauaaaaag

SEQ ID NO: 560077 - RNA, 22 nt, Artificial Sequence
  Synthetic
ggaagaaauuggagauaaaaag

SEQ ID NO: 560078 - RNA, 23 nt, Artificial Sequence
  Synthetic
aggaagaaauuggagauaaaaag

SEQ ID NO: 560079 - RNA, 24 nt, Artificial Sequence
  Synthetic
gaggaagaaauuggagauaaaaag

SEQ ID NO: 560080 - RNA, 18 nt, Artificial Sequence
  Synthetic
ggaaaacagccuaaaaag

SEQ ID NO: 560081 - RNA, 19 nt, Artificial Sequence
  Synthetic
uggaaaacagccuaaaaag

SEQ ID NO: 560082 - RNA, 20 nt, Artificial Sequence
  Synthetic
uuggaaaacagccuaaaaag

SEQ ID NO: 560083 - RNA, 21 nt, Artificial Sequence
  Synthetic
cuuggaaaacagccuaaaaag

SEQ ID NO: 560084 - RNA, 22 nt, Artificial Sequence
  Synthetic
ucuuggaaaacagccuaaaaag

SEQ ID NO: 560085 - RNA, 23 nt, Artificial Sequence
  Synthetic
cucuuggaaaacagccuaaaaag

SEQ ID NO: 560086 - RNA, 24 nt, Artificial Sequence
  Synthetic
acucuuggaaaacagccuaaaaag

SEQ ID NO: 560087 - RNA, 18 nt, Artificial Sequence
  Synthetic
gccaaacaacuuaaaaag

SEQ ID NO: 560088 - RNA, 19 nt, Artificial Sequence
  Synthetic
agccaaacaacuuaaaaag

SEQ ID NO: 560089 - RNA, 20 nt, Artificial Sequence
  Synthetic
aagccaaacaacuuaaaaag

SEQ ID NO: 560090 - RNA, 21 nt, Artificial Sequence
  Synthetic
aaagccaaacaacuuaaaaag

SEQ ID NO: 560091 - RNA, 22 nt, Artificial Sequence
  Synthetic
aaaagccaaacaacuuaaaaag

SEQ ID NO: 560092 - RNA, 23 nt, Artificial Sequence
  Synthetic
aaaaagccaaacaacuuaaaaag

SEQ ID NO: 560093 - RNA, 24 nt, Artificial Sequence
  Synthetic
uaaaaagccaaacaacuuaaaaag

SEQ ID NO: 560094 - RNA, 18 nt, Artificial Sequence
  Synthetic
ggauacaacuuuaaaaag

SEQ ID NO: 560095 - RNA, 19 nt, Artificial Sequence
  Synthetic
cggauacaacuuuaaaaag

SEQ ID NO: 560096 - RNA, 20 nt, Artificial Sequence
  Synthetic
acggauacaacuuuaaaaag

SEQ ID NO: 560097 - RNA, 21 nt, Artificial Sequence
  Synthetic
uacggauacaacuuuaaaaag

SEQ ID NO: 560098 - RNA, 22 nt, Artificial Sequence
  Synthetic
auacggauacaacuuuaaaaag

SEQ ID NO: 560099 - RNA, 23 nt, Artificial Sequence
  Synthetic
cauacggauacaacuuuaaaaag

SEQ ID NO: 560100 - RNA, 24 nt, Artificial Sequence
  Synthetic
acauacggauacaacuuuaaaaag

SEQ ID NO: 560101 - RNA, 18 nt, Artificial Sequence
  Synthetic
aaucaugauuuuaaaaag

SEQ ID NO: 560102 - RNA, 19 nt, Artificial Sequence
  Synthetic
aaaucaugauuuuaaaaag

SEQ ID NO: 560103 - RNA, 20 nt, Artificial Sequence
  Synthetic
caaaucaugauuuuaaaaag

SEQ ID NO: 560104 - RNA, 21 nt, Artificial Sequence
  Synthetic
acaaaucaugauuuuaaaaag

SEQ ID NO: 560105 - RNA, 22 nt, Artificial Sequence
  Synthetic
aacaaaucaugauuuuaaaaag

SEQ ID NO: 560106 - RNA, 23 nt, Artificial Sequence
  Synthetic
aaacaaaucaugauuuuaaaaag

SEQ ID NO: 560107 - RNA, 24 nt, Artificial Sequence
  Synthetic
uaaacaaaucaugauuuuaaaaag

SEQ ID NO: 560108 - RNA, 18 nt, Artificial Sequence
  Synthetic
cuguaauauuuuaaaaag

SEQ ID NO: 560109 - RNA, 19 nt, Artificial Sequence
  Synthetic
ccuguaauauuuuaaaaag

SEQ ID NO: 560110 - RNA, 20 nt, Artificial Sequence
  Synthetic
uccuguaauauuuuaaaaag

SEQ ID NO: 560111 - RNA, 21 nt, Artificial Sequence
  Synthetic
uuccuguaauauuuuaaaaag

SEQ ID NO: 560112 - RNA, 22 nt, Artificial Sequence
  Synthetic
auuccuguaauauuuuaaaaag

SEQ ID NO: 560113 - RNA, 23 nt, Artificial Sequence
  Synthetic
cauuccuguaauauuuuaaaaag

SEQ ID NO: 560114 - RNA, 24 nt, Artificial Sequence
  Synthetic
ccauuccuguaauauuuuaaaaag

SEQ ID NO: 560115 - RNA, 18 nt, Artificial Sequence
  Synthetic
uuuuuauauuuuaaaaag

SEQ ID NO: 560116 - RNA, 19 nt, Artificial Sequence
  Synthetic
auuuuuauauuuuaaaaag

SEQ ID NO: 560117 - RNA, 20 nt, Artificial Sequence
  Synthetic
gauuuuuauauuuuaaaaag

SEQ ID NO: 560118 - RNA, 21 nt, Artificial Sequence
  Synthetic
agauuuuuauauuuuaaaaag

SEQ ID NO: 560119 - RNA, 22 nt, Artificial Sequence
  Synthetic
gagauuuuuauauuuuaaaaag

SEQ ID NO: 560120 - RNA, 23 nt, Artificial Sequence
  Synthetic
ggagauuuuuauauuuuaaaaag

SEQ ID NO: 560121 - RNA, 24 nt, Artificial Sequence
  Synthetic
gggagauuuuuauauuuuaaaaag

SEQ ID NO: 560122 - RNA, 18 nt, Artificial Sequence
  Synthetic
caaguuagucaacaaaag

SEQ ID NO: 560123 - RNA, 19 nt, Artificial Sequence
  Synthetic
ccaaguuagucaacaaaag

SEQ ID NO: 560124 - RNA, 20 nt, Artificial Sequence
  Synthetic
gccaaguuagucaacaaaag

SEQ ID NO: 560125 - RNA, 21 nt, Artificial Sequence
  Synthetic
agccaaguuagucaacaaaag

SEQ ID NO: 560126 - RNA, 22 nt, Artificial Sequence
  Synthetic
uagccaaguuagucaacaaaag

SEQ ID NO: 560127 - RNA, 23 nt, Artificial Sequence
  Synthetic
guagccaaguuagucaacaaaag

SEQ ID NO: 560128 - RNA, 24 nt, Artificial Sequence
  Synthetic
gguagccaaguuagucaacaaaag

SEQ ID NO: 560129 - RNA, 18 nt, Artificial Sequence
  Synthetic
augcucuggacacaaaag

SEQ ID NO: 560130 - RNA, 19 nt, Artificial Sequence
  Synthetic
uaugcucuggacacaaaag

SEQ ID NO: 560131 - RNA, 20 nt, Artificial Sequence
  Synthetic
uuaugcucuggacacaaaag

SEQ ID NO: 560132 - RNA, 21 nt, Artificial Sequence
  Synthetic
cuuaugcucuggacacaaaag

SEQ ID NO: 560133 - RNA, 22 nt, Artificial Sequence
  Synthetic
ucuuaugcucuggacacaaaag

SEQ ID NO: 560134 - RNA, 23 nt, Artificial Sequence
  Synthetic
gucuuaugcucuggacacaaaag

SEQ ID NO: 560135 - RNA, 24 nt, Artificial Sequence
  Synthetic
agucuuaugcucuggacacaaaag

SEQ ID NO: 560136 - RNA, 18 nt, Artificial Sequence
  Synthetic
ucacaauguacacaaaag

SEQ ID NO: 560137 - RNA, 19 nt, Artificial Sequence
  Synthetic
aucacaauguacacaaaag

SEQ ID NO: 560138 - RNA, 20 nt, Artificial Sequence
  Synthetic
uaucacaauguacacaaaag

SEQ ID NO: 560139 - RNA, 21 nt, Artificial Sequence
  Synthetic
uuaucacaauguacacaaaag

SEQ ID NO: 560140 - RNA, 22 nt, Artificial Sequence
  Synthetic
uuuaucacaauguacacaaaag

SEQ ID NO: 560141 - RNA, 23 nt, Artificial Sequence
  Synthetic
guuuaucacaauguacacaaaag

SEQ ID NO: 560142 - RNA, 24 nt, Artificial Sequence
  Synthetic
aguuuaucacaauguacacaaaag

SEQ ID NO: 560143 - RNA, 18 nt, Artificial Sequence
  Synthetic
uaaauaucaucacaaaag

SEQ ID NO: 560144 - RNA, 19 nt, Artificial Sequence
  Synthetic
guaaauaucaucacaaaag

SEQ ID NO: 560145 - RNA, 20 nt, Artificial Sequence
  Synthetic
aguaaauaucaucacaaaag

SEQ ID NO: 560146 - RNA, 21 nt, Artificial Sequence
  Synthetic
gaguaaauaucaucacaaaag

SEQ ID NO: 560147 - RNA, 22 nt, Artificial Sequence
  Synthetic
ugaguaaauaucaucacaaaag

SEQ ID NO: 560148 - RNA, 23 nt, Artificial Sequence
  Synthetic
augaguaaauaucaucacaaaag

SEQ ID NO: 560149 - RNA, 24 nt, Artificial Sequence
  Synthetic
uaugaguaaauaucaucacaaaag

SEQ ID NO: 560150 - RNA, 18 nt, Artificial Sequence
  Synthetic
acucuuuccugacaaaag

SEQ ID NO: 560151 - RNA, 19 nt, Artificial Sequence
  Synthetic
aacucuuuccugacaaaag

SEQ ID NO: 560152 - RNA, 20 nt, Artificial Sequence
  Synthetic
aaacucuuuccugacaaaag

SEQ ID NO: 560153 - RNA, 21 nt, Artificial Sequence
  Synthetic
caaacucuuuccugacaaaag

SEQ ID NO: 560154 - RNA, 22 nt, Artificial Sequence
  Synthetic
ucaaacucuuuccugacaaaag

SEQ ID NO: 560155 - RNA, 23 nt, Artificial Sequence
  Synthetic
uucaaacucuuuccugacaaaag

SEQ ID NO: 560156 - RNA, 24 nt, Artificial Sequence
  Synthetic
auucaaacucuuuccugacaaaag

SEQ ID NO: 560157 - RNA, 18 nt, Artificial Sequence
  Synthetic
gaaacgagaauacaaaag

SEQ ID NO: 560158 - RNA, 19 nt, Artificial Sequence
  Synthetic
ugaaacgagaauacaaaag

SEQ ID NO: 560159 - RNA, 20 nt, Artificial Sequence
  Synthetic
augaaacgagaauacaaaag

SEQ ID NO: 560160 - RNA, 21 nt, Artificial Sequence
  Synthetic
uaugaaacgagaauacaaaag

SEQ ID NO: 560161 - RNA, 22 nt, Artificial Sequence
  Synthetic
auaugaaacgagaauacaaaag

SEQ ID NO: 560162 - RNA, 23 nt, Artificial Sequence
  Synthetic
gauaugaaacgagaauacaaaag

SEQ ID NO: 560163 - RNA, 24 nt, Artificial Sequence
  Synthetic
ggauaugaaacgagaauacaaaag

SEQ ID NO: 560164 - RNA, 18 nt, Artificial Sequence
  Synthetic
ucuuaucuuagccaaaag

SEQ ID NO: 560165 - RNA, 19 nt, Artificial Sequence
  Synthetic
uucuuaucuuagccaaaag

SEQ ID NO: 560166 - RNA, 20 nt, Artificial Sequence
  Synthetic
uuucuuaucuuagccaaaag

SEQ ID NO: 560167 - RNA, 21 nt, Artificial Sequence
  Synthetic
uuuucuuaucuuagccaaaag

SEQ ID NO: 560168 - RNA, 22 nt, Artificial Sequence
  Synthetic
auuuucuuaucuuagccaaaag

SEQ ID NO: 560169 - RNA, 23 nt, Artificial Sequence
  Synthetic
cauuuucuuaucuuagccaaaag

SEQ ID NO: 560170 - RNA, 24 nt, Artificial Sequence
  Synthetic
acauuuucuuaucuuagccaaaag

SEQ ID NO: 560171 - RNA, 18 nt, Artificial Sequence
  Synthetic
gggaaaaguggccaaaag

SEQ ID NO: 560172 - RNA, 19 nt, Artificial Sequence
  Synthetic
agggaaaaguggccaaaag

SEQ ID NO: 560173 - RNA, 20 nt, Artificial Sequence
  Synthetic
gagggaaaaguggccaaaag

SEQ ID NO: 560174 - RNA, 21 nt, Artificial Sequence
  Synthetic
ggagggaaaaguggccaaaag

SEQ ID NO: 560175 - RNA, 22 nt, Artificial Sequence
  Synthetic
gggagggaaaaguggccaaaag

SEQ ID NO: 560176 - RNA, 23 nt, Artificial Sequence
  Synthetic
ggggagggaaaaguggccaaaag

SEQ ID NO: 560177 - RNA, 24 nt, Artificial Sequence
  Synthetic
aggggagggaaaaguggccaaaag

SEQ ID NO: 560178 - RNA, 18 nt, Artificial Sequence
  Synthetic
caaguaauuugccaaaag

SEQ ID NO: 560179 - RNA, 19 nt, Artificial Sequence
  Synthetic
ccaaguaauuugccaaaag

SEQ ID NO: 560180 - RNA, 20 nt, Artificial Sequence
  Synthetic
gccaaguaauuugccaaaag

SEQ ID NO: 560181 - RNA, 21 nt, Artificial Sequence
  Synthetic
ggccaaguaauuugccaaaag

SEQ ID NO: 560182 - RNA, 22 nt, Artificial Sequence
  Synthetic
aggccaaguaauuugccaaaag

SEQ ID NO: 560183 - RNA, 23 nt, Artificial Sequence
  Synthetic
gaggccaaguaauuugccaaaag

SEQ ID NO: 560184 - RNA, 24 nt, Artificial Sequence
  Synthetic
agaggccaaguaauuugccaaaag

SEQ ID NO: 560185 - RNA, 18 nt, Artificial Sequence
  Synthetic
gaaacaaagaagcaaaag

SEQ ID NO: 560186 - RNA, 19 nt, Artificial Sequence
  Synthetic
ugaaacaaagaagcaaaag

SEQ ID NO: 560187 - RNA, 20 nt, Artificial Sequence
  Synthetic
cugaaacaaagaagcaaaag

SEQ ID NO: 560188 - RNA, 21 nt, Artificial Sequence
  Synthetic
ucugaaacaaagaagcaaaag

SEQ ID NO: 560189 - RNA, 22 nt, Artificial Sequence
  Synthetic
gucugaaacaaagaagcaaaag

SEQ ID NO: 560190 - RNA, 23 nt, Artificial Sequence
  Synthetic
ugucugaaacaaagaagcaaaag

SEQ ID NO: 560191 - RNA, 24 nt, Artificial Sequence
  Synthetic
uugucugaaacaaagaagcaaaag

SEQ ID NO: 560192 - RNA, 18 nt, Artificial Sequence
  Synthetic
cauaauugguagcaaaag

SEQ ID NO: 560193 - RNA, 19 nt, Artificial Sequence
  Synthetic
acauaauugguagcaaaag

SEQ ID NO: 560194 - RNA, 20 nt, Artificial Sequence
  Synthetic
aacauaauugguagcaaaag

SEQ ID NO: 560195 - RNA, 21 nt, Artificial Sequence
  Synthetic
gaacauaauugguagcaaaag

SEQ ID NO: 560196 - RNA, 22 nt, Artificial Sequence
  Synthetic
agaacauaauugguagcaaaag

SEQ ID NO: 560197 - RNA, 23 nt, Artificial Sequence
  Synthetic
aagaacauaauugguagcaaaag

SEQ ID NO: 560198 - RNA, 24 nt, Artificial Sequence
  Synthetic
uaagaacauaauugguagcaaaag

SEQ ID NO: 560199 - RNA, 18 nt, Artificial Sequence
  Synthetic
guaaaaagaaggcaaaag

SEQ ID NO: 560200 - RNA, 19 nt, Artificial Sequence
  Synthetic
aguaaaaagaaggcaaaag

SEQ ID NO: 560201 - RNA, 20 nt, Artificial Sequence
  Synthetic
aaguaaaaagaaggcaaaag

SEQ ID NO: 560202 - RNA, 21 nt, Artificial Sequence
  Synthetic
aaaguaaaaagaaggcaaaag

SEQ ID NO: 560203 - RNA, 22 nt, Artificial Sequence
  Synthetic
gaaaguaaaaagaaggcaaaag

SEQ ID NO: 560204 - RNA, 23 nt, Artificial Sequence
  Synthetic
cgaaaguaaaaagaaggcaaaag

SEQ ID NO: 560205 - RNA, 24 nt, Artificial Sequence
  Synthetic
acgaaaguaaaaagaaggcaaaag

SEQ ID NO: 560206 - RNA, 18 nt, Artificial Sequence
  Synthetic
uuuuuuuuuuugcaaaag

SEQ ID NO: 560207 - RNA, 19 nt, Artificial Sequence
  Synthetic
uuuuuuuuuuuugcaaaag

SEQ ID NO: 560208 - RNA, 20 nt, Artificial Sequence
  Synthetic
uuuuuuuuuuuuugcaaaag

SEQ ID NO: 560209 - RNA, 21 nt, Artificial Sequence
  Synthetic
guuuuuuuuuuuuugcaaaag

SEQ ID NO: 560210 - RNA, 22 nt, Artificial Sequence
  Synthetic
uguuuuuuuuuuuuugcaaaag

SEQ ID NO: 560211 - RNA, 23 nt, Artificial Sequence
  Synthetic
uuguuuuuuuuuuuuugcaaaag

SEQ ID NO: 560212 - RNA, 24 nt, Artificial Sequence
  Synthetic
uuuguuuuuuuuuuuuugcaaaag

SEQ ID NO: 560213 - RNA, 18 nt, Artificial Sequence
  Synthetic
gaccuggaaccucaaaag

SEQ ID NO: 560214 - RNA, 19 nt, Artificial Sequence
  Synthetic
ggaccuggaaccucaaaag

SEQ ID NO: 560215 - RNA, 20 nt, Artificial Sequence
  Synthetic
cggaccuggaaccucaaaag

SEQ ID NO: 560216 - RNA, 21 nt, Artificial Sequence
  Synthetic
acggaccuggaaccucaaaag

SEQ ID NO: 560217 - RNA, 22 nt, Artificial Sequence
  Synthetic
gacggaccuggaaccucaaaag

SEQ ID NO: 560218 - RNA, 23 nt, Artificial Sequence
  Synthetic
agacggaccuggaaccucaaaag

SEQ ID NO: 560219 - RNA, 24 nt, Artificial Sequence
  Synthetic
aagacggaccuggaaccucaaaag

SEQ ID NO: 560220 - RNA, 18 nt, Artificial Sequence
  Synthetic
acccuggcaagucaaaag

SEQ ID NO: 560221 - RNA, 19 nt, Artificial Sequence
  Synthetic
cacccuggcaagucaaaag

SEQ ID NO: 560222 - RNA, 20 nt, Artificial Sequence
  Synthetic
ucacccuggcaagucaaaag

SEQ ID NO: 560223 - RNA, 21 nt, Artificial Sequence
  Synthetic
aucacccuggcaagucaaaag

SEQ ID NO: 560224 - RNA, 22 nt, Artificial Sequence
  Synthetic
uaucacccuggcaagucaaaag

SEQ ID NO: 560225 - RNA, 23 nt, Artificial Sequence
  Synthetic
auaucacccuggcaagucaaaag

SEQ ID NO: 560226 - RNA, 24 nt, Artificial Sequence
  Synthetic
uauaucacccuggcaagucaaaag

SEQ ID NO: 560227 - RNA, 18 nt, Artificial Sequence
  Synthetic
caauuauugggucaaaag

SEQ ID NO: 560228 - RNA, 19 nt, Artificial Sequence
  Synthetic
acaauuauugggucaaaag

SEQ ID NO: 560229 - RNA, 20 nt, Artificial Sequence
  Synthetic
aacaauuauugggucaaaag

SEQ ID NO: 560230 - RNA, 21 nt, Artificial Sequence
  Synthetic
aaacaauuauugggucaaaag

SEQ ID NO: 560231 - RNA, 22 nt, Artificial Sequence
  Synthetic
uaaacaauuauugggucaaaag

SEQ ID NO: 560232 - RNA, 23 nt, Artificial Sequence
  Synthetic
cuaaacaauuauugggucaaaag

SEQ ID NO: 560233 - RNA, 24 nt, Artificial Sequence
  Synthetic
ccuaaacaauuauugggucaaaag

SEQ ID NO: 560234 - RNA, 18 nt, Artificial Sequence
  Synthetic
ggugcuagaugucaaaag

SEQ ID NO: 560235 - RNA, 19 nt, Artificial Sequence
  Synthetic
aggugcuagaugucaaaag

SEQ ID NO: 560236 - RNA, 20 nt, Artificial Sequence
  Synthetic
caggugcuagaugucaaaag

SEQ ID NO: 560237 - RNA, 21 nt, Artificial Sequence
  Synthetic
gcaggugcuagaugucaaaag

SEQ ID NO: 560238 - RNA, 22 nt, Artificial Sequence
  Synthetic
agcaggugcuagaugucaaaag

SEQ ID NO: 560239 - RNA, 23 nt, Artificial Sequence
  Synthetic
cagcaggugcuagaugucaaaag

SEQ ID NO: 560240 - RNA, 24 nt, Artificial Sequence
  Synthetic
acagcaggugcuagaugucaaaag

SEQ ID NO: 560241 - RNA, 18 nt, Artificial Sequence
  Synthetic
guaggaagacuucaaaag

SEQ ID NO: 560242 - RNA, 19 nt, Artificial Sequence
  Synthetic
uguaggaagacuucaaaag

SEQ ID NO: 560243 - RNA, 20 nt, Artificial Sequence
  Synthetic
cuguaggaagacuucaaaag

SEQ ID NO: 560244 - RNA, 21 nt, Artificial Sequence
  Synthetic
gcuguaggaagacuucaaaag

SEQ ID NO: 560245 - RNA, 22 nt, Artificial Sequence
  Synthetic
ggcuguaggaagacuucaaaag

SEQ ID NO: 560246 - RNA, 23 nt, Artificial Sequence
  Synthetic
uggcuguaggaagacuucaaaag

SEQ ID NO: 560247 - RNA, 24 nt, Artificial Sequence
  Synthetic
uuggcuguaggaagacuucaaaag

SEQ ID NO: 560248 - RNA, 18 nt, Artificial Sequence
  Synthetic
acauacucaaaagaaaag

SEQ ID NO: 560249 - RNA, 19 nt, Artificial Sequence
  Synthetic
uacauacucaaaagaaaag

SEQ ID NO: 560250 - RNA, 20 nt, Artificial Sequence
  Synthetic
guacauacucaaaagaaaag

SEQ ID NO: 560251 - RNA, 21 nt, Artificial Sequence
  Synthetic
gguacauacucaaaagaaaag

SEQ ID NO: 560252 - RNA, 22 nt, Artificial Sequence
  Synthetic
ggguacauacucaaaagaaaag

SEQ ID NO: 560253 - RNA, 23 nt, Artificial Sequence
  Synthetic
uggguacauacucaaaagaaaag

SEQ ID NO: 560254 - RNA, 24 nt, Artificial Sequence
  Synthetic
cuggguacauacucaaaagaaaag

SEQ ID NO: 560255 - RNA, 18 nt, Artificial Sequence
  Synthetic
uaagauagaaaagaaaag

SEQ ID NO: 560256 - RNA, 19 nt, Artificial Sequence
  Synthetic
uuaagauagaaaagaaaag

SEQ ID NO: 560257 - RNA, 20 nt, Artificial Sequence
  Synthetic
uuuaagauagaaaagaaaag

SEQ ID NO: 560258 - RNA, 21 nt, Artificial Sequence
  Synthetic
auuuaagauagaaaagaaaag

SEQ ID NO: 560259 - RNA, 22 nt, Artificial Sequence
  Synthetic
gauuuaagauagaaaagaaaag

SEQ ID NO: 560260 - RNA, 23 nt, Artificial Sequence
  Synthetic
ugauuuaagauagaaaagaaaag

SEQ ID NO: 560261 - RNA, 24 nt, Artificial Sequence
  Synthetic
cugauuuaagauagaaaagaaaag

SEQ ID NO: 560262 - RNA, 18 nt, Artificial Sequence
  Synthetic
uacuuguggcaagaaaag

SEQ ID NO: 560263 - RNA, 19 nt, Artificial Sequence
  Synthetic
uuacuuguggcaagaaaag

SEQ ID NO: 560264 - RNA, 20 nt, Artificial Sequence
  Synthetic
auuacuuguggcaagaaaag

SEQ ID NO: 560265 - RNA, 21 nt, Artificial Sequence
  Synthetic
uauuacuuguggcaagaaaag

SEQ ID NO: 560266 - RNA, 22 nt, Artificial Sequence
  Synthetic
uuauuacuuguggcaagaaaag

SEQ ID NO: 560267 - RNA, 23 nt, Artificial Sequence
  Synthetic
guuauuacuuguggcaagaaaag

SEQ ID NO: 560268 - RNA, 24 nt, Artificial Sequence
  Synthetic
uguuauuacuuguggcaagaaaag

SEQ ID NO: 560269 - RNA, 18 nt, Artificial Sequence
  Synthetic
gaaauuguagaagaaaag

SEQ ID NO: 560270 - RNA, 19 nt, Artificial Sequence
  Synthetic
ggaaauuguagaagaaaag

SEQ ID NO: 560271 - RNA, 20 nt, Artificial Sequence
  Synthetic
aggaaauuguagaagaaaag

SEQ ID NO: 560272 - RNA, 21 nt, Artificial Sequence
  Synthetic
gaggaaauuguagaagaaaag

SEQ ID NO: 560273 - RNA, 22 nt, Artificial Sequence
  Synthetic
ugaggaaauuguagaagaaaag

SEQ ID NO: 560274 - RNA, 23 nt, Artificial Sequence
  Synthetic
gugaggaaauuguagaagaaaag

SEQ ID NO: 560275 - RNA, 24 nt, Artificial Sequence
  Synthetic
ggugaggaaauuguagaagaaaag

SEQ ID NO: 560276 - RNA, 18 nt, Artificial Sequence
  Synthetic
ggaauggaggaagaaaag

SEQ ID NO: 560277 - RNA, 19 nt, Artificial Sequence
  Synthetic
aggaauggaggaagaaaag

SEQ ID NO: 560278 - RNA, 20 nt, Artificial Sequence
  Synthetic
aaggaauggaggaagaaaag

SEQ ID NO: 560279 - RNA, 21 nt, Artificial Sequence
  Synthetic
gaaggaauggaggaagaaaag

SEQ ID NO: 560280 - RNA, 22 nt, Artificial Sequence
  Synthetic
ggaaggaauggaggaagaaaag

SEQ ID NO: 560281 - RNA, 23 nt, Artificial Sequence
  Synthetic
aggaaggaauggaggaagaaaag

SEQ ID NO: 560282 - RNA, 24 nt, Artificial Sequence
  Synthetic
gaggaaggaauggaggaagaaaag

SEQ ID NO: 560283 - RNA, 18 nt, Artificial Sequence
  Synthetic
uuuccuuuugaagaaaag

SEQ ID NO: 560284 - RNA, 19 nt, Artificial Sequence
  Synthetic
uuuuccuuuugaagaaaag

SEQ ID NO: 560285 - RNA, 20 nt, Artificial Sequence
  Synthetic
cuuuuccuuuugaagaaaag

SEQ ID NO: 560286 - RNA, 21 nt, Artificial Sequence
  Synthetic
ccuuuuccuuuugaagaaaag

SEQ ID NO: 560287 - RNA, 22 nt, Artificial Sequence
  Synthetic
gccuuuuccuuuugaagaaaag

SEQ ID NO: 560288 - RNA, 23 nt, Artificial Sequence
  Synthetic
agccuuuuccuuuugaagaaaag

SEQ ID NO: 560289 - RNA, 24 nt, Artificial Sequence
  Synthetic
cagccuuuuccuuuugaagaaaag

SEQ ID NO: 560290 - RNA, 18 nt, Artificial Sequence
  Synthetic
auccaucucacagaaaag

SEQ ID NO: 560291 - RNA, 19 nt, Artificial Sequence
  Synthetic
uauccaucucacagaaaag

SEQ ID NO: 560292 - RNA, 20 nt, Artificial Sequence
  Synthetic
cuauccaucucacagaaaag

SEQ ID NO: 560293 - RNA, 21 nt, Artificial Sequence
  Synthetic
acuauccaucucacagaaaag

SEQ ID NO: 560294 - RNA, 22 nt, Artificial Sequence
  Synthetic
cacuauccaucucacagaaaag

SEQ ID NO: 560295 - RNA, 23 nt, Artificial Sequence
  Synthetic
acacuauccaucucacagaaaag

SEQ ID NO: 560296 - RNA, 24 nt, Artificial Sequence
  Synthetic
uacacuauccaucucacagaaaag

SEQ ID NO: 560297 - RNA, 18 nt, Artificial Sequence
  Synthetic
cugagauagagagaaaag

SEQ ID NO: 560298 - RNA, 19 nt, Artificial Sequence
  Synthetic
gcugagauagagagaaaag

SEQ ID NO: 560299 - RNA, 20 nt, Artificial Sequence
  Synthetic
ugcugagauagagagaaaag

SEQ ID NO: 560300 - RNA, 21 nt, Artificial Sequence
  Synthetic
gugcugagauagagagaaaag

SEQ ID NO: 560301 - RNA, 22 nt, Artificial Sequence
  Synthetic
ugugcugagauagagagaaaag

SEQ ID NO: 560302 - RNA, 23 nt, Artificial Sequence
  Synthetic
augugcugagauagagagaaaag

SEQ ID NO: 560303 - RNA, 24 nt, Artificial Sequence
  Synthetic
uaugugcugagauagagagaaaag

SEQ ID NO: 560304 - RNA, 18 nt, Artificial Sequence
  Synthetic
cuaucgaagggagaaaag

SEQ ID NO: 560305 - RNA, 19 nt, Artificial Sequence
  Synthetic
ccuaucgaagggagaaaag

SEQ ID NO: 560306 - RNA, 20 nt, Artificial Sequence
  Synthetic
uccuaucgaagggagaaaag

SEQ ID NO: 560307 - RNA, 21 nt, Artificial Sequence
  Synthetic
uuccuaucgaagggagaaaag

SEQ ID NO: 560308 - RNA, 22 nt, Artificial Sequence
  Synthetic
uuuccuaucgaagggagaaaag

SEQ ID NO: 560309 - RNA, 23 nt, Artificial Sequence
  Synthetic
uuuuccuaucgaagggagaaaag

SEQ ID NO: 560310 - RNA, 24 nt, Artificial Sequence
  Synthetic
uuuuuccuaucgaagggagaaaag

SEQ ID NO: 560311 - RNA, 18 nt, Artificial Sequence
  Synthetic
caaauuccuggagaaaag

SEQ ID NO: 560312 - RNA, 19 nt, Artificial Sequence
  Synthetic
ucaaauuccuggagaaaag

SEQ ID NO: 560313 - RNA, 20 nt, Artificial Sequence
  Synthetic
aucaaauuccuggagaaaag

SEQ ID NO: 560314 - RNA, 21 nt, Artificial Sequence
  Synthetic
aaucaaauuccuggagaaaag

SEQ ID NO: 560315 - RNA, 22 nt, Artificial Sequence
  Synthetic
caaucaaauuccuggagaaaag

SEQ ID NO: 560316 - RNA, 23 nt, Artificial Sequence
  Synthetic
acaaucaaauuccuggagaaaag

SEQ ID NO: 560317 - RNA, 24 nt, Artificial Sequence
  Synthetic
cacaaucaaauuccuggagaaaag

SEQ ID NO: 560318 - RNA, 18 nt, Artificial Sequence
  Synthetic
cacuuagauauagaaaag

SEQ ID NO: 560319 - RNA, 19 nt, Artificial Sequence
  Synthetic
ucacuuagauauagaaaag

SEQ ID NO: 560320 - RNA, 20 nt, Artificial Sequence
  Synthetic
uucacuuagauauagaaaag

SEQ ID NO: 560321 - RNA, 21 nt, Artificial Sequence
  Synthetic
uuucacuuagauauagaaaag

SEQ ID NO: 560322 - RNA, 22 nt, Artificial Sequence
  Synthetic
uuuucacuuagauauagaaaag

SEQ ID NO: 560323 - RNA, 23 nt, Artificial Sequence
  Synthetic
uuuuucacuuagauauagaaaag

SEQ ID NO: 560324 - RNA, 24 nt, Artificial Sequence
  Synthetic
uuuuuucacuuagauauagaaaag

SEQ ID NO: 560325 - RNA, 18 nt, Artificial Sequence
  Synthetic
gugugauugcuagaaaag

SEQ ID NO: 560326 - RNA, 19 nt, Artificial Sequence
  Synthetic
agugugauugcuagaaaag

SEQ ID NO: 560327 - RNA, 20 nt, Artificial Sequence
  Synthetic
aagugugauugcuagaaaag

SEQ ID NO: 560328 - RNA, 21 nt, Artificial Sequence
  Synthetic
uaagugugauugcuagaaaag

SEQ ID NO: 560329 - RNA, 22 nt, Artificial Sequence
  Synthetic
uuaagugugauugcuagaaaag

SEQ ID NO: 560330 - RNA, 23 nt, Artificial Sequence
  Synthetic
uuuaagugugauugcuagaaaag

SEQ ID NO: 560331 - RNA, 24 nt, Artificial Sequence
  Synthetic
uuuuaagugugauugcuagaaaag

SEQ ID NO: 560332 - RNA, 18 nt, Artificial Sequence
  Synthetic
aacaugaaucuagaaaag

SEQ ID NO: 560333 - RNA, 19 nt, Artificial Sequence
  Synthetic
aaacaugaaucuagaaaag

SEQ ID NO: 560334 - RNA, 20 nt, Artificial Sequence
  Synthetic
aaaacaugaaucuagaaaag

SEQ ID NO: 560335 - RNA, 21 nt, Artificial Sequence
  Synthetic
gaaaacaugaaucuagaaaag

SEQ ID NO: 560336 - RNA, 22 nt, Artificial Sequence
  Synthetic
ggaaaacaugaaucuagaaaag

SEQ ID NO: 560337 - RNA, 23 nt, Artificial Sequence
  Synthetic
gggaaaacaugaaucuagaaaag

SEQ ID NO: 560338 - RNA, 24 nt, Artificial Sequence
  Synthetic
ugggaaaacaugaaucuagaaaag

SEQ ID NO: 560339 - RNA, 18 nt, Artificial Sequence
  Synthetic
gacaaaagcuuagaaaag

SEQ ID NO: 560340 - RNA, 19 nt, Artificial Sequence
  Synthetic
agacaaaagcuuagaaaag

SEQ ID NO: 560341 - RNA, 20 nt, Artificial Sequence
  Synthetic
aagacaaaagcuuagaaaag

SEQ ID NO: 560342 - RNA, 21 nt, Artificial Sequence
  Synthetic
aaagacaaaagcuuagaaaag

SEQ ID NO: 560343 - RNA, 22 nt, Artificial Sequence
  Synthetic
aaaagacaaaagcuuagaaaag

SEQ ID NO: 560344 - RNA, 23 nt, Artificial Sequence
  Synthetic
uaaaagacaaaagcuuagaaaag

SEQ ID NO: 560345 - RNA, 24 nt, Artificial Sequence
  Synthetic
cuaaaagacaaaagcuuagaaaag

SEQ ID NO: 560346 - RNA, 18 nt, Artificial Sequence
  Synthetic
uuuucugagaaggaaaag

SEQ ID NO: 560347 - RNA, 19 nt, Artificial Sequence
  Synthetic
uuuuucugagaaggaaaag

SEQ ID NO: 560348 - RNA, 20 nt, Artificial Sequence
  Synthetic
cuuuuucugagaaggaaaag

SEQ ID NO: 560349 - RNA, 21 nt, Artificial Sequence
  Synthetic
ucuuuuucugagaaggaaaag

SEQ ID NO: 560350 - RNA, 22 nt, Artificial Sequence
  Synthetic
uucuuuuucugagaaggaaaag

SEQ ID NO: 560351 - RNA, 23 nt, Artificial Sequence
  Synthetic
uuucuuuuucugagaaggaaaag

SEQ ID NO: 560352 - RNA, 24 nt, Artificial Sequence
  Synthetic
uuuucuuuuucugagaaggaaaag

SEQ ID NO: 560353 - RNA, 18 nt, Artificial Sequence
  Synthetic
accuaaaguaaggaaaag

SEQ ID NO: 560354 - RNA, 19 nt, Artificial Sequence
  Synthetic
uaccuaaaguaaggaaaag

SEQ ID NO: 560355 - RNA, 20 nt, Artificial Sequence
  Synthetic
auaccuaaaguaaggaaaag

SEQ ID NO: 560356 - RNA, 21 nt, Artificial Sequence
  Synthetic
gauaccuaaaguaaggaaaag

SEQ ID NO: 560357 - RNA, 22 nt, Artificial Sequence
  Synthetic
agauaccuaaaguaaggaaaag

SEQ ID NO: 560358 - RNA, 23 nt, Artificial Sequence
  Synthetic
cagauaccuaaaguaaggaaaag

SEQ ID NO: 560359 - RNA, 24 nt, Artificial Sequence
  Synthetic
ccagauaccuaaaguaaggaaaag

SEQ ID NO: 560360 - RNA, 18 nt, Artificial Sequence
  Synthetic
aucuggccucaggaaaag

SEQ ID NO: 560361 - RNA, 19 nt, Artificial Sequence
  Synthetic
aaucuggccucaggaaaag

SEQ ID NO: 560362 - RNA, 20 nt, Artificial Sequence
  Synthetic
aaaucuggccucaggaaaag

SEQ ID NO: 560363 - RNA, 21 nt, Artificial Sequence
  Synthetic
gaaaucuggccucaggaaaag

SEQ ID NO: 560364 - RNA, 22 nt, Artificial Sequence
  Synthetic
ggaaaucuggccucaggaaaag

SEQ ID NO: 560365 - RNA, 23 nt, Artificial Sequence
  Synthetic
gggaaaucuggccucaggaaaag

SEQ ID NO: 560366 - RNA, 24 nt, Artificial Sequence
  Synthetic
ggggaaaucuggccucaggaaaag

SEQ ID NO: 560367 - RNA, 18 nt, Artificial Sequence
  Synthetic
uuaauguaugaggaaaag

SEQ ID NO: 560368 - RNA, 19 nt, Artificial Sequence
  Synthetic
guuaauguaugaggaaaag

SEQ ID NO: 560369 - RNA, 20 nt, Artificial Sequence
  Synthetic
uguuaauguaugaggaaaag

SEQ ID NO: 560370 - RNA, 21 nt, Artificial Sequence
  Synthetic
uuguuaauguaugaggaaaag

SEQ ID NO: 560371 - RNA, 22 nt, Artificial Sequence
  Synthetic
uuuguuaauguaugaggaaaag

SEQ ID NO: 560372 - RNA, 23 nt, Artificial Sequence
  Synthetic
uuuuguuaauguaugaggaaaag

SEQ ID NO: 560373 - RNA, 24 nt, Artificial Sequence
  Synthetic
cuuuuguuaauguaugaggaaaag

SEQ ID NO: 560374 - RNA, 18 nt, Artificial Sequence
  Synthetic
auaaacagugaggaaaag

SEQ ID NO: 560375 - RNA, 19 nt, Artificial Sequence
  Synthetic
uauaaacagugaggaaaag

SEQ ID NO: 560376 - RNA, 20 nt, Artificial Sequence
  Synthetic
guauaaacagugaggaaaag

SEQ ID NO: 560377 - RNA, 21 nt, Artificial Sequence
  Synthetic
uguauaaacagugaggaaaag

SEQ ID NO: 560378 - RNA, 22 nt, Artificial Sequence
  Synthetic
cuguauaaacagugaggaaaag

SEQ ID NO: 560379 - RNA, 23 nt, Artificial Sequence
  Synthetic
acuguauaaacagugaggaaaag

SEQ ID NO: 560380 - RNA, 24 nt, Artificial Sequence
  Synthetic
aacuguauaaacagugaggaaaag

SEQ ID NO: 560381 - RNA, 21 nt, Artificial Sequence
  Synthetic
aggguauucaauuaggaaaag

SEQ ID NO: 560382 - RNA, 22 nt, Artificial Sequence
  Synthetic
aaggguauucaauuaggaaaag

SEQ ID NO: 560383 - RNA, 23 nt, Artificial Sequence
  Synthetic
aaaggguauucaauuaggaaaag

SEQ ID NO: 560384 - RNA, 24 nt, Artificial Sequence
  Synthetic
uaaaggguauucaauuaggaaaag

SEQ ID NO: 560385 - RNA, 18 nt, Artificial Sequence
  Synthetic
uguggacacagggaaaag

SEQ ID NO: 560386 - RNA, 19 nt, Artificial Sequence
  Synthetic
auguggacacagggaaaag

SEQ ID NO: 560387 - RNA, 20 nt, Artificial Sequence
  Synthetic
aauguggacacagggaaaag

SEQ ID NO: 560388 - RNA, 21 nt, Artificial Sequence
  Synthetic
caauguggacacagggaaaag

SEQ ID NO: 560389 - RNA, 22 nt, Artificial Sequence
  Synthetic
acaauguggacacagggaaaag

SEQ ID NO: 560390 - RNA, 23 nt, Artificial Sequence
  Synthetic
aacaauguggacacagggaaaag

SEQ ID NO: 560391 - RNA, 24 nt, Artificial Sequence
  Synthetic
aaacaauguggacacagggaaaag

SEQ ID NO: 560392 - RNA, 18 nt, Artificial Sequence
  Synthetic
agaacacagcuggaaaag

SEQ ID NO: 560393 - RNA, 19 nt, Artificial Sequence
  Synthetic
gagaacacagcuggaaaag

SEQ ID NO: 560394 - RNA, 20 nt, Artificial Sequence
  Synthetic
agagaacacagcuggaaaag

SEQ ID NO: 560395 - RNA, 21 nt, Artificial Sequence
  Synthetic
gagagaacacagcuggaaaag

SEQ ID NO: 560396 - RNA, 22 nt, Artificial Sequence
  Synthetic
agagagaacacagcuggaaaag

SEQ ID NO: 560397 - RNA, 23 nt, Artificial Sequence
  Synthetic
cagagagaacacagcuggaaaag

SEQ ID NO: 560398 - RNA, 24 nt, Artificial Sequence
  Synthetic
gcagagagaacacagcuggaaaag

SEQ ID NO: 560399 - RNA, 18 nt, Artificial Sequence
  Synthetic
caccugucaaaugaaaag

SEQ ID NO: 560400 - RNA, 19 nt, Artificial Sequence
  Synthetic
ucaccugucaaaugaaaag

SEQ ID NO: 560401 - RNA, 20 nt, Artificial Sequence
  Synthetic
cucaccugucaaaugaaaag

SEQ ID NO: 560402 - RNA, 21 nt, Artificial Sequence
  Synthetic
ucucaccugucaaaugaaaag

SEQ ID NO: 560403 - RNA, 22 nt, Artificial Sequence
  Synthetic
uucucaccugucaaaugaaaag

SEQ ID NO: 560404 - RNA, 23 nt, Artificial Sequence
  Synthetic
uuucucaccugucaaaugaaaag

SEQ ID NO: 560405 - RNA, 24 nt, Artificial Sequence
  Synthetic
auuucucaccugucaaaugaaaag

SEQ ID NO: 560406 - RNA, 18 nt, Artificial Sequence
  Synthetic
uguauugaacaugaaaag

SEQ ID NO: 560407 - RNA, 19 nt, Artificial Sequence
  Synthetic
cuguauugaacaugaaaag

SEQ ID NO: 560408 - RNA, 20 nt, Artificial Sequence
  Synthetic
acuguauugaacaugaaaag

SEQ ID NO: 560409 - RNA, 21 nt, Artificial Sequence
  Synthetic
uacuguauugaacaugaaaag

SEQ ID NO: 560410 - RNA, 22 nt, Artificial Sequence
  Synthetic
auacuguauugaacaugaaaag

SEQ ID NO: 560411 - RNA, 23 nt, Artificial Sequence
  Synthetic
aauacuguauugaacaugaaaag

SEQ ID NO: 560412 - RNA, 24 nt, Artificial Sequence
  Synthetic
gaauacuguauugaacaugaaaag

SEQ ID NO: 560413 - RNA, 18 nt, Artificial Sequence
  Synthetic
uaugcgagacaugaaaag

SEQ ID NO: 560414 - RNA, 19 nt, Artificial Sequence
  Synthetic
auaugcgagacaugaaaag

SEQ ID NO: 560415 - RNA, 20 nt, Artificial Sequence
  Synthetic
uauaugcgagacaugaaaag

SEQ ID NO: 560416 - RNA, 21 nt, Artificial Sequence
  Synthetic
auauaugcgagacaugaaaag

SEQ ID NO: 560417 - RNA, 22 nt, Artificial Sequence
  Synthetic
gauauaugcgagacaugaaaag

SEQ ID NO: 560418 - RNA, 23 nt, Artificial Sequence
  Synthetic
agauauaugcgagacaugaaaag

SEQ ID NO: 560419 - RNA, 24 nt, Artificial Sequence
  Synthetic
gagauauaugcgagacaugaaaag

SEQ ID NO: 560420 - RNA, 18 nt, Artificial Sequence
  Synthetic
aauuaagucucugaaaag

SEQ ID NO: 560421 - RNA, 19 nt, Artificial Sequence
  Synthetic
aaauuaagucucugaaaag

SEQ ID NO: 560422 - RNA, 20 nt, Artificial Sequence
  Synthetic
gaaauuaagucucugaaaag

SEQ ID NO: 560423 - RNA, 21 nt, Artificial Sequence
  Synthetic
agaaauuaagucucugaaaag

SEQ ID NO: 560424 - RNA, 22 nt, Artificial Sequence
  Synthetic
cagaaauuaagucucugaaaag

SEQ ID NO: 560425 - RNA, 23 nt, Artificial Sequence
  Synthetic
acagaaauuaagucucugaaaag

SEQ ID NO: 560426 - RNA, 24 nt, Artificial Sequence
  Synthetic
aacagaaauuaagucucugaaaag

SEQ ID NO: 560427 - RNA, 18 nt, Artificial Sequence
  Synthetic
auuuuccauucugaaaag

SEQ ID NO: 560428 - RNA, 19 nt, Artificial Sequence
  Synthetic
gauuuuccauucugaaaag

SEQ ID NO: 560429 - RNA, 20 nt, Artificial Sequence
  Synthetic
ggauuuuccauucugaaaag

SEQ ID NO: 560430 - RNA, 21 nt, Artificial Sequence
  Synthetic
aggauuuuccauucugaaaag

SEQ ID NO: 560431 - RNA, 22 nt, Artificial Sequence
  Synthetic
gaggauuuuccauucugaaaag

SEQ ID NO: 560432 - RNA, 23 nt, Artificial Sequence
  Synthetic
ugaggauuuuccauucugaaaag

SEQ ID NO: 560433 - RNA, 24 nt, Artificial Sequence
  Synthetic
cugaggauuuuccauucugaaaag

SEQ ID NO: 560434 - RNA, 18 nt, Artificial Sequence
  Synthetic
uaugauggcauugaaaag

SEQ ID NO: 560435 - RNA, 19 nt, Artificial Sequence
  Synthetic
guaugauggcauugaaaag

SEQ ID NO: 560436 - RNA, 20 nt, Artificial Sequence
  Synthetic
gguaugauggcauugaaaag

SEQ ID NO: 560437 - RNA, 21 nt, Artificial Sequence
  Synthetic
ugguaugauggcauugaaaag

SEQ ID NO: 560438 - RNA, 22 nt, Artificial Sequence
  Synthetic
uugguaugauggcauugaaaag

SEQ ID NO: 560439 - RNA, 23 nt, Artificial Sequence
  Synthetic
uuugguaugauggcauugaaaag

SEQ ID NO: 560440 - RNA, 24 nt, Artificial Sequence
  Synthetic
uuuugguaugauggcauugaaaag

SEQ ID NO: 560441 - RNA, 18 nt, Artificial Sequence
  Synthetic
uaccauuauguugaaaag

SEQ ID NO: 560442 - RNA, 19 nt, Artificial Sequence
  Synthetic
uuaccauuauguugaaaag

SEQ ID NO: 560443 - RNA, 20 nt, Artificial Sequence
  Synthetic
auuaccauuauguugaaaag

SEQ ID NO: 560444 - RNA, 21 nt, Artificial Sequence
  Synthetic
cauuaccauuauguugaaaag

SEQ ID NO: 560445 - RNA, 22 nt, Artificial Sequence
  Synthetic
ucauuaccauuauguugaaaag

SEQ ID NO: 560446 - RNA, 23 nt, Artificial Sequence
  Synthetic
aucauuaccauuauguugaaaag

SEQ ID NO: 560447 - RNA, 24 nt, Artificial Sequence
  Synthetic
caucauuaccauuauguugaaaag

SEQ ID NO: 560448 - RNA, 18 nt, Artificial Sequence
  Synthetic
ggaccauuuguugaaaag

SEQ ID NO: 560449 - RNA, 19 nt, Artificial Sequence
  Synthetic
aggaccauuuguugaaaag

SEQ ID NO: 560450 - RNA, 20 nt, Artificial Sequence
  Synthetic
caggaccauuuguugaaaag

SEQ ID NO: 560451 - RNA, 21 nt, Artificial Sequence
  Synthetic
gcaggaccauuuguugaaaag

SEQ ID NO: 560452 - RNA, 22 nt, Artificial Sequence
  Synthetic
ugcaggaccauuuguugaaaag

SEQ ID NO: 560453 - RNA, 23 nt, Artificial Sequence
  Synthetic
cugcaggaccauuuguugaaaag

SEQ ID NO: 560454 - RNA, 24 nt, Artificial Sequence
  Synthetic
ucugcaggaccauuuguugaaaag

SEQ ID NO: 560455 - RNA, 18 nt, Artificial Sequence
  Synthetic
auaaaaaauuuugaaaag

SEQ ID NO: 560456 - RNA, 19 nt, Artificial Sequence
  Synthetic
gauaaaaaauuuugaaaag

SEQ ID NO: 560457 - RNA, 20 nt, Artificial Sequence
  Synthetic
agauaaaaaauuuugaaaag

SEQ ID NO: 560458 - RNA, 21 nt, Artificial Sequence
  Synthetic
aagauaaaaaauuuugaaaag

SEQ ID NO: 560459 - RNA, 22 nt, Artificial Sequence
  Synthetic
aaagauaaaaaauuuugaaaag

SEQ ID NO: 560460 - RNA, 23 nt, Artificial Sequence
  Synthetic
uaaagauaaaaaauuuugaaaag

SEQ ID NO: 560461 - RNA, 24 nt, Artificial Sequence
  Synthetic
uuaaagauaaaaaauuuugaaaag

SEQ ID NO: 560462 - RNA, 18 nt, Artificial Sequence
  Synthetic
cugaaucuaaaauaaaag

SEQ ID NO: 560463 - RNA, 19 nt, Artificial Sequence
  Synthetic
gcugaaucuaaaauaaaag

SEQ ID NO: 560464 - RNA, 20 nt, Artificial Sequence
  Synthetic
cgcugaaucuaaaauaaaag

SEQ ID NO: 560465 - RNA, 21 nt, Artificial Sequence
  Synthetic
ccgcugaaucuaaaauaaaag

SEQ ID NO: 560466 - RNA, 22 nt, Artificial Sequence
  Synthetic
cccgcugaaucuaaaauaaaag

SEQ ID NO: 560467 - RNA, 23 nt, Artificial Sequence
  Synthetic
acccgcugaaucuaaaauaaaag

SEQ ID NO: 560468 - RNA, 24 nt, Artificial Sequence
  Synthetic
uacccgcugaaucuaaaauaaaag

SEQ ID NO: 560469 - RNA, 18 nt, Artificial Sequence
  Synthetic
aauuacuagaaauaaaag

SEQ ID NO: 560470 - RNA, 19 nt, Artificial Sequence
  Synthetic
aaauuacuagaaauaaaag

SEQ ID NO: 560471 - RNA, 20 nt, Artificial Sequence
  Synthetic
aaaauuacuagaaauaaaag

SEQ ID NO: 560472 - RNA, 21 nt, Artificial Sequence
  Synthetic
aaaaauuacuagaaauaaaag

SEQ ID NO: 560473 - RNA, 22 nt, Artificial Sequence
  Synthetic
uaaaaauuacuagaaauaaaag

SEQ ID NO: 560474 - RNA, 23 nt, Artificial Sequence
  Synthetic
guaaaaauuacuagaaauaaaag

SEQ ID NO: 560475 - RNA, 24 nt, Artificial Sequence
  Synthetic
gguaaaaauuacuagaaauaaaag

SEQ ID NO: 560476 - RNA, 18 nt, Artificial Sequence
  Synthetic
cccuugucuaaauaaaag

SEQ ID NO: 560477 - RNA, 19 nt, Artificial Sequence
  Synthetic
ucccuugucuaaauaaaag

SEQ ID NO: 560478 - RNA, 20 nt, Artificial Sequence
  Synthetic
uucccuugucuaaauaaaag

SEQ ID NO: 560479 - RNA, 21 nt, Artificial Sequence
  Synthetic
cuucccuugucuaaauaaaag

SEQ ID NO: 560480 - RNA, 22 nt, Artificial Sequence
  Synthetic
gcuucccuugucuaaauaaaag

SEQ ID NO: 560481 - RNA, 23 nt, Artificial Sequence
  Synthetic
ugcuucccuugucuaaauaaaag

SEQ ID NO: 560482 - RNA, 24 nt, Artificial Sequence
  Synthetic
gugcuucccuugucuaaauaaaag

SEQ ID NO: 560483 - RNA, 18 nt, Artificial Sequence
  Synthetic
uuuuuuucuaaauaaaag

SEQ ID NO: 560484 - RNA, 19 nt, Artificial Sequence
  Synthetic
cuuuuuuucuaaauaaaag

SEQ ID NO: 560485 - RNA, 20 nt, Artificial Sequence
  Synthetic
ucuuuuuuucuaaauaaaag

SEQ ID NO: 560486 - RNA, 21 nt, Artificial Sequence
  Synthetic
uucuuuuuuucuaaauaaaag

SEQ ID NO: 560487 - RNA, 22 nt, Artificial Sequence
  Synthetic
auucuuuuuuucuaaauaaaag

SEQ ID NO: 560488 - RNA, 23 nt, Artificial Sequence
  Synthetic
cauucuuuuuuucuaaauaaaag

SEQ ID NO: 560489 - RNA, 24 nt, Artificial Sequence
  Synthetic
ccauucuuuuuuucuaaauaaaag

SEQ ID NO: 560490 - RNA, 18 nt, Artificial Sequence
  Synthetic
uuaauacgcuaauaaaag

SEQ ID NO: 560491 - RNA, 19 nt, Artificial Sequence
  Synthetic
guuaauacgcuaauaaaag

SEQ ID NO: 560492 - RNA, 20 nt, Artificial Sequence
  Synthetic
uguuaauacgcuaauaaaag

SEQ ID NO: 560493 - RNA, 21 nt, Artificial Sequence
  Synthetic
auguuaauacgcuaauaaaag

SEQ ID NO: 560494 - RNA, 22 nt, Artificial Sequence
  Synthetic
uauguuaauacgcuaauaaaag

SEQ ID NO: 560495 - RNA, 23 nt, Artificial Sequence
  Synthetic
guauguuaauacgcuaauaaaag

SEQ ID NO: 560496 - RNA, 24 nt, Artificial Sequence
  Synthetic
aguauguuaauacgcuaauaaaag

SEQ ID NO: 560497 - RNA, 18 nt, Artificial Sequence
  Synthetic
auaugaaagagauaaaag

SEQ ID NO: 560498 - RNA, 19 nt, Artificial Sequence
  Synthetic
uauaugaaagagauaaaag

SEQ ID NO: 560499 - RNA, 20 nt, Artificial Sequence
  Synthetic
auauaugaaagagauaaaag

SEQ ID NO: 560500 - RNA, 21 nt, Artificial Sequence
  Synthetic
aauauaugaaagagauaaaag

SEQ ID NO: 560501 - RNA, 22 nt, Artificial Sequence
  Synthetic
gaauauaugaaagagauaaaag

SEQ ID NO: 560502 - RNA, 23 nt, Artificial Sequence
  Synthetic
ggaauauaugaaagagauaaaag

SEQ ID NO: 560503 - RNA, 24 nt, Artificial Sequence
  Synthetic
uggaauauaugaaagagauaaaag

SEQ ID NO: 560504 - RNA, 18 nt, Artificial Sequence
  Synthetic
ucuuuaacaggauaaaag

SEQ ID NO: 560505 - RNA, 19 nt, Artificial Sequence
  Synthetic
gucuuuaacaggauaaaag

SEQ ID NO: 560506 - RNA, 20 nt, Artificial Sequence
  Synthetic
ugucuuuaacaggauaaaag

SEQ ID NO: 560507 - RNA, 21 nt, Artificial Sequence
  Synthetic
gugucuuuaacaggauaaaag

SEQ ID NO: 560508 - RNA, 22 nt, Artificial Sequence
  Synthetic
ugugucuuuaacaggauaaaag

SEQ ID NO: 560509 - RNA, 23 nt, Artificial Sequence
  Synthetic
augugucuuuaacaggauaaaag

SEQ ID NO: 560510 - RNA, 24 nt, Artificial Sequence
  Synthetic
uaugugucuuuaacaggauaaaag

SEQ ID NO: 560511 - RNA, 18 nt, Artificial Sequence
  Synthetic
guaaauuauggauaaaag

SEQ ID NO: 560512 - RNA, 19 nt, Artificial Sequence
  Synthetic
aguaaauuauggauaaaag

SEQ ID NO: 560513 - RNA, 20 nt, Artificial Sequence
  Synthetic
uaguaaauuauggauaaaag

SEQ ID NO: 560514 - RNA, 21 nt, Artificial Sequence
  Synthetic
uuaguaaauuauggauaaaag

SEQ ID NO: 560515 - RNA, 22 nt, Artificial Sequence
  Synthetic
cuuaguaaauuauggauaaaag

SEQ ID NO: 560516 - RNA, 23 nt, Artificial Sequence
  Synthetic
gcuuaguaaauuauggauaaaag

SEQ ID NO: 560517 - RNA, 24 nt, Artificial Sequence
  Synthetic
ugcuuaguaaauuauggauaaaag

SEQ ID NO: 560518 - RNA, 18 nt, Artificial Sequence
  Synthetic
uugguucccuuauaaaag

SEQ ID NO: 560519 - RNA, 19 nt, Artificial Sequence
  Synthetic
uuugguucccuuauaaaag

SEQ ID NO: 560520 - RNA, 20 nt, Artificial Sequence
  Synthetic
guuugguucccuuauaaaag

SEQ ID NO: 560521 - RNA, 21 nt, Artificial Sequence
  Synthetic
gguuugguucccuuauaaaag

SEQ ID NO: 560522 - RNA, 22 nt, Artificial Sequence
  Synthetic
ggguuugguucccuuauaaaag

SEQ ID NO: 560523 - RNA, 23 nt, Artificial Sequence
  Synthetic
uggguuugguucccuuauaaaag

SEQ ID NO: 560524 - RNA, 24 nt, Artificial Sequence
  Synthetic
guggguuugguucccuuauaaaag

SEQ ID NO: 560525 - RNA, 18 nt, Artificial Sequence
  Synthetic
uaggaacucgacuaaaag

SEQ ID NO: 560526 - RNA, 19 nt, Artificial Sequence
  Synthetic
uuaggaacucgacuaaaag

SEQ ID NO: 560527 - RNA, 20 nt, Artificial Sequence
  Synthetic
uuuaggaacucgacuaaaag

SEQ ID NO: 560528 - RNA, 21 nt, Artificial Sequence
  Synthetic
cuuuaggaacucgacuaaaag

SEQ ID NO: 560529 - RNA, 22 nt, Artificial Sequence
  Synthetic
acuuuaggaacucgacuaaaag

SEQ ID NO: 560530 - RNA, 23 nt, Artificial Sequence
  Synthetic
aacuuuaggaacucgacuaaaag

SEQ ID NO: 560531 - RNA, 24 nt, Artificial Sequence
  Synthetic
caacuuuaggaacucgacuaaaag

SEQ ID NO: 560532 - RNA, 18 nt, Artificial Sequence
  Synthetic
aucacuuaaggcuaaaag

SEQ ID NO: 560533 - RNA, 19 nt, Artificial Sequence
  Synthetic
uaucacuuaaggcuaaaag

SEQ ID NO: 560534 - RNA, 20 nt, Artificial Sequence
  Synthetic
uuaucacuuaaggcuaaaag

SEQ ID NO: 560535 - RNA, 21 nt, Artificial Sequence
  Synthetic
auuaucacuuaaggcuaaaag

SEQ ID NO: 560536 - RNA, 22 nt, Artificial Sequence
  Synthetic
aauuaucacuuaaggcuaaaag

SEQ ID NO: 560537 - RNA, 23 nt, Artificial Sequence
  Synthetic
gaauuaucacuuaaggcuaaaag

SEQ ID NO: 560538 - RNA, 24 nt, Artificial Sequence
  Synthetic
ggaauuaucacuuaaggcuaaaag

SEQ ID NO: 560539 - RNA, 18 nt, Artificial Sequence
  Synthetic
auauagaaaaucuaaaag

SEQ ID NO: 560540 - RNA, 19 nt, Artificial Sequence
  Synthetic
cauauagaaaaucuaaaag

SEQ ID NO: 560541 - RNA, 20 nt, Artificial Sequence
  Synthetic
gcauauagaaaaucuaaaag

SEQ ID NO: 560542 - RNA, 21 nt, Artificial Sequence
  Synthetic
cgcauauagaaaaucuaaaag

SEQ ID NO: 560543 - RNA, 22 nt, Artificial Sequence
  Synthetic
ccgcauauagaaaaucuaaaag

SEQ ID NO: 560544 - RNA, 23 nt, Artificial Sequence
  Synthetic
accgcauauagaaaaucuaaaag

SEQ ID NO: 560545 - RNA, 24 nt, Artificial Sequence
  Synthetic
aaccgcauauagaaaaucuaaaag

SEQ ID NO: 560546 - RNA, 18 nt, Artificial Sequence
  Synthetic
accuucuguaucuaaaag

SEQ ID NO: 560547 - RNA, 19 nt, Artificial Sequence
  Synthetic
caccuucuguaucuaaaag

SEQ ID NO: 560548 - RNA, 20 nt, Artificial Sequence
  Synthetic
gcaccuucuguaucuaaaag

SEQ ID NO: 560549 - RNA, 21 nt, Artificial Sequence
  Synthetic
ugcaccuucuguaucuaaaag

SEQ ID NO: 560550 - RNA, 22 nt, Artificial Sequence
  Synthetic
augcaccuucuguaucuaaaag

SEQ ID NO: 560551 - RNA, 23 nt, Artificial Sequence
  Synthetic
caugcaccuucuguaucuaaaag

SEQ ID NO: 560552 - RNA, 24 nt, Artificial Sequence
  Synthetic
acaugcaccuucuguaucuaaaag

SEQ ID NO: 560553 - RNA, 18 nt, Artificial Sequence
  Synthetic
uccaaaaaacucuaaaag

SEQ ID NO: 560554 - RNA, 19 nt, Artificial Sequence
  Synthetic
auccaaaaaacucuaaaag

SEQ ID NO: 560555 - RNA, 20 nt, Artificial Sequence
  Synthetic
aauccaaaaaacucuaaaag

SEQ ID NO: 560556 - RNA, 21 nt, Artificial Sequence
  Synthetic
aaauccaaaaaacucuaaaag

SEQ ID NO: 560557 - RNA, 22 nt, Artificial Sequence
  Synthetic
aaaauccaaaaaacucuaaaag

SEQ ID NO: 560558 - RNA, 23 nt, Artificial Sequence
  Synthetic
caaaauccaaaaaacucuaaaag

SEQ ID NO: 560559 - RNA, 24 nt, Artificial Sequence
  Synthetic
ccaaaauccaaaaaacucuaaaag

SEQ ID NO: 560560 - RNA, 18 nt, Artificial Sequence
  Synthetic
aucagacuugucuaaaag

SEQ ID NO: 560561 - RNA, 19 nt, Artificial Sequence
  Synthetic
uaucagacuugucuaaaag

SEQ ID NO: 560562 - RNA, 20 nt, Artificial Sequence
  Synthetic
auaucagacuugucuaaaag

SEQ ID NO: 560563 - RNA, 21 nt, Artificial Sequence
  Synthetic
aauaucagacuugucuaaaag

SEQ ID NO: 560564 - RNA, 22 nt, Artificial Sequence
  Synthetic
caauaucagacuugucuaaaag

SEQ ID NO: 560565 - RNA, 23 nt, Artificial Sequence
  Synthetic
gcaauaucagacuugucuaaaag

SEQ ID NO: 560566 - RNA, 24 nt, Artificial Sequence
  Synthetic
agcaauaucagacuugucuaaaag

SEQ ID NO: 560567 - RNA, 18 nt, Artificial Sequence
  Synthetic
gaagucauuuucuaaaag

SEQ ID NO: 560568 - RNA, 19 nt, Artificial Sequence
  Synthetic
ggaagucauuuucuaaaag

SEQ ID NO: 560569 - RNA, 20 nt, Artificial Sequence
  Synthetic
gggaagucauuuucuaaaag

SEQ ID NO: 560570 - RNA, 21 nt, Artificial Sequence
  Synthetic
ugggaagucauuuucuaaaag

SEQ ID NO: 560571 - RNA, 22 nt, Artificial Sequence
  Synthetic
uugggaagucauuuucuaaaag

SEQ ID NO: 560572 - RNA, 23 nt, Artificial Sequence
  Synthetic
uuugggaagucauuuucuaaaag

SEQ ID NO: 560573 - RNA, 24 nt, Artificial Sequence
  Synthetic
cuuugggaagucauuuucuaaaag

SEQ ID NO: 560574 - RNA, 18 nt, Artificial Sequence
  Synthetic
caucuaugaaaguaaaag

SEQ ID NO: 560575 - RNA, 19 nt, Artificial Sequence
  Synthetic
ucaucuaugaaaguaaaag

SEQ ID NO: 560576 - RNA, 20 nt, Artificial Sequence
  Synthetic
cucaucuaugaaaguaaaag

SEQ ID NO: 560577 - RNA, 21 nt, Artificial Sequence
  Synthetic
ucucaucuaugaaaguaaaag

SEQ ID NO: 560578 - RNA, 22 nt, Artificial Sequence
  Synthetic
aucucaucuaugaaaguaaaag

SEQ ID NO: 560579 - RNA, 23 nt, Artificial Sequence
  Synthetic
uaucucaucuaugaaaguaaaag

SEQ ID NO: 560580 - RNA, 24 nt, Artificial Sequence
  Synthetic
uuaucucaucuaugaaaguaaaag

SEQ ID NO: 560581 - RNA, 18 nt, Artificial Sequence
  Synthetic
aaguacaauuuguaaaag

SEQ ID NO: 560582 - RNA, 19 nt, Artificial Sequence
  Synthetic
uaaguacaauuuguaaaag

SEQ ID NO: 560583 - RNA, 20 nt, Artificial Sequence
  Synthetic
auaaguacaauuuguaaaag

SEQ ID NO: 560584 - RNA, 21 nt, Artificial Sequence
  Synthetic
aauaaguacaauuuguaaaag

SEQ ID NO: 560585 - RNA, 22 nt, Artificial Sequence
  Synthetic
aaauaaguacaauuuguaaaag

SEQ ID NO: 560586 - RNA, 23 nt, Artificial Sequence
  Synthetic
aaaauaaguacaauuuguaaaag

SEQ ID NO: 560587 - RNA, 24 nt, Artificial Sequence
  Synthetic
aaaaauaaguacaauuuguaaaag

SEQ ID NO: 560588 - RNA, 18 nt, Artificial Sequence
  Synthetic
uaauuuuuuaauuaaaag

SEQ ID NO: 560589 - RNA, 19 nt, Artificial Sequence
  Synthetic
auaauuuuuuaauuaaaag

SEQ ID NO: 560590 - RNA, 20 nt, Artificial Sequence
  Synthetic
aauaauuuuuuaauuaaaag

SEQ ID NO: 560591 - RNA, 21 nt, Artificial Sequence
  Synthetic
gaauaauuuuuuaauuaaaag

SEQ ID NO: 560592 - RNA, 22 nt, Artificial Sequence
  Synthetic
ugaauaauuuuuuaauuaaaag

SEQ ID NO: 560593 - RNA, 23 nt, Artificial Sequence
  Synthetic
gugaauaauuuuuuaauuaaaag

SEQ ID NO: 560594 - RNA, 24 nt, Artificial Sequence
  Synthetic
agugaauaauuuuuuaauuaaaag

SEQ ID NO: 560595 - RNA, 18 nt, Artificial Sequence
  Synthetic
aucuuccucuauuaaaag

SEQ ID NO: 560596 - RNA, 19 nt, Artificial Sequence
  Synthetic
caucuuccucuauuaaaag

SEQ ID NO: 560597 - RNA, 20 nt, Artificial Sequence
  Synthetic
gcaucuuccucuauuaaaag

SEQ ID NO: 560598 - RNA, 21 nt, Artificial Sequence
  Synthetic
agcaucuuccucuauuaaaag

SEQ ID NO: 560599 - RNA, 22 nt, Artificial Sequence
  Synthetic
cagcaucuuccucuauuaaaag

SEQ ID NO: 560600 - RNA, 23 nt, Artificial Sequence
  Synthetic
acagcaucuuccucuauuaaaag

SEQ ID NO: 560601 - RNA, 24 nt, Artificial Sequence
  Synthetic
uacagcaucuuccucuauuaaaag

SEQ ID NO: 560602 - RNA, 18 nt, Artificial Sequence
  Synthetic
ugacucuguccuuaaaag

SEQ ID NO: 560603 - RNA, 19 nt, Artificial Sequence
  Synthetic
augacucuguccuuaaaag

SEQ ID NO: 560604 - RNA, 20 nt, Artificial Sequence
  Synthetic
uaugacucuguccuuaaaag

SEQ ID NO: 560605 - RNA, 21 nt, Artificial Sequence
  Synthetic
auaugacucuguccuuaaaag

SEQ ID NO: 560606 - RNA, 22 nt, Artificial Sequence
  Synthetic
aauaugacucuguccuuaaaag

SEQ ID NO: 560607 - RNA, 23 nt, Artificial Sequence
  Synthetic
caauaugacucuguccuuaaaag

SEQ ID NO: 560608 - RNA, 24 nt, Artificial Sequence
  Synthetic
ccaauaugacucuguccuuaaaag

SEQ ID NO: 560609 - RNA, 18 nt, Artificial Sequence
  Synthetic
gcagcaacagcuuaaaag

SEQ ID NO: 560610 - RNA, 19 nt, Artificial Sequence
  Synthetic
agcagcaacagcuuaaaag

SEQ ID NO: 560611 - RNA, 20 nt, Artificial Sequence
  Synthetic
aagcagcaacagcuuaaaag

SEQ ID NO: 560612 - RNA, 21 nt, Artificial Sequence
  Synthetic
aaagcagcaacagcuuaaaag

SEQ ID NO: 560613 - RNA, 22 nt, Artificial Sequence
  Synthetic
uaaagcagcaacagcuuaaaag

SEQ ID NO: 560614 - RNA, 23 nt, Artificial Sequence
  Synthetic
uuaaagcagcaacagcuuaaaag

SEQ ID NO: 560615 - RNA, 24 nt, Artificial Sequence
  Synthetic
cuuaaagcagcaacagcuuaaaag

SEQ ID NO: 560616 - RNA, 18 nt, Artificial Sequence
  Synthetic
cauguucucgcuuaaaag

SEQ ID NO: 560617 - RNA, 19 nt, Artificial Sequence
  Synthetic
gcauguucucgcuuaaaag

SEQ ID NO: 560618 - RNA, 20 nt, Artificial Sequence
  Synthetic
ugcauguucucgcuuaaaag

SEQ ID NO: 560619 - RNA, 21 nt, Artificial Sequence
  Synthetic
cugcauguucucgcuuaaaag

SEQ ID NO: 560620 - RNA, 22 nt, Artificial Sequence
  Synthetic
acugcauguucucgcuuaaaag

SEQ ID NO: 560621 - RNA, 23 nt, Artificial Sequence
  Synthetic
uacugcauguucucgcuuaaaag

SEQ ID NO: 560622 - RNA, 24 nt, Artificial Sequence
  Synthetic
guacugcauguucucgcuuaaaag

SEQ ID NO: 560623 - RNA, 18 nt, Artificial Sequence
  Synthetic
uuuuaaagaaguuaaaag

SEQ ID NO: 560624 - RNA, 19 nt, Artificial Sequence
  Synthetic
cuuuuaaagaaguuaaaag

SEQ ID NO: 560625 - RNA, 20 nt, Artificial Sequence
  Synthetic
ucuuuuaaagaaguuaaaag

SEQ ID NO: 560626 - RNA, 21 nt, Artificial Sequence
  Synthetic
gucuuuuaaagaaguuaaaag

SEQ ID NO: 560627 - RNA, 22 nt, Artificial Sequence
  Synthetic
ggucuuuuaaagaaguuaaaag

SEQ ID NO: 560628 - RNA, 23 nt, Artificial Sequence
  Synthetic
aggucuuuuaaagaaguuaaaag

SEQ ID NO: 560629 - RNA, 24 nt, Artificial Sequence
  Synthetic
uaggucuuuuaaagaaguuaaaag

SEQ ID NO: 560630 - RNA, 18 nt, Artificial Sequence
  Synthetic
aaggacauugguuaaaag

SEQ ID NO: 560631 - RNA, 19 nt, Artificial Sequence
  Synthetic
aaaggacauugguuaaaag

SEQ ID NO: 560632 - RNA, 20 nt, Artificial Sequence
  Synthetic
aaaaggacauugguuaaaag

SEQ ID NO: 560633 - RNA, 21 nt, Artificial Sequence
  Synthetic
aaaaaggacauugguuaaaag

SEQ ID NO: 560634 - RNA, 22 nt, Artificial Sequence
  Synthetic
uaaaaaggacauugguuaaaag

SEQ ID NO: 560635 - RNA, 23 nt, Artificial Sequence
  Synthetic
uuaaaaaggacauugguuaaaag

SEQ ID NO: 560636 - RNA, 24 nt, Artificial Sequence
  Synthetic
auuaaaaaggacauugguuaaaag

SEQ ID NO: 560637 - RNA, 18 nt, Artificial Sequence
  Synthetic
ggaggcuuuuguuaaaag

SEQ ID NO: 560638 - RNA, 19 nt, Artificial Sequence
  Synthetic
aggaggcuuuuguuaaaag

SEQ ID NO: 560639 - RNA, 20 nt, Artificial Sequence
  Synthetic
caggaggcuuuuguuaaaag

SEQ ID NO: 560640 - RNA, 21 nt, Artificial Sequence
  Synthetic
ccaggaggcuuuuguuaaaag

SEQ ID NO: 560641 - RNA, 22 nt, Artificial Sequence
  Synthetic
gccaggaggcuuuuguuaaaag

SEQ ID NO: 560642 - RNA, 23 nt, Artificial Sequence
  Synthetic
ugccaggaggcuuuuguuaaaag

SEQ ID NO: 560643 - RNA, 24 nt, Artificial Sequence
  Synthetic
uugccaggaggcuuuuguuaaaag

SEQ ID NO: 560644 - RNA, 18 nt, Artificial Sequence
  Synthetic
uaaaaaccaauuuaaaag

SEQ ID NO: 560645 - RNA, 19 nt, Artificial Sequence
  Synthetic
auaaaaaccaauuuaaaag

SEQ ID NO: 560646 - RNA, 20 nt, Artificial Sequence
  Synthetic
uauaaaaaccaauuuaaaag

SEQ ID NO: 560647 - RNA, 21 nt, Artificial Sequence
  Synthetic
guauaaaaaccaauuuaaaag

SEQ ID NO: 560648 - RNA, 22 nt, Artificial Sequence
  Synthetic
aguauaaaaaccaauuuaaaag

SEQ ID NO: 560649 - RNA, 23 nt, Artificial Sequence
  Synthetic
uaguauaaaaaccaauuuaaaag

SEQ ID NO: 560650 - RNA, 24 nt, Artificial Sequence
  Synthetic
auaguauaaaaaccaauuuaaaag

SEQ ID NO: 560651 - RNA, 18 nt, Artificial Sequence
  Synthetic
acaacuuaucuuuaaaag

SEQ ID NO: 560652 - RNA, 19 nt, Artificial Sequence
  Synthetic
uacaacuuaucuuuaaaag

SEQ ID NO: 560653 - RNA, 20 nt, Artificial Sequence
  Synthetic
uuacaacuuaucuuuaaaag

SEQ ID NO: 560654 - RNA, 21 nt, Artificial Sequence
  Synthetic
guuacaacuuaucuuuaaaag

SEQ ID NO: 560655 - RNA, 22 nt, Artificial Sequence
  Synthetic
aguuacaacuuaucuuuaaaag

SEQ ID NO: 560656 - RNA, 23 nt, Artificial Sequence
  Synthetic
gaguuacaacuuaucuuuaaaag

SEQ ID NO: 560657 - RNA, 24 nt, Artificial Sequence
  Synthetic
agaguuacaacuuaucuuuaaaag

SEQ ID NO: 560658 - RNA, 18 nt, Artificial Sequence
  Synthetic
cuauuugcauuuuaaaag

SEQ ID NO: 560659 - RNA, 19 nt, Artificial Sequence
  Synthetic
gcuauuugcauuuuaaaag

SEQ ID NO: 560660 - RNA, 20 nt, Artificial Sequence
  Synthetic
ugcuauuugcauuuuaaaag

SEQ ID NO: 560661 - RNA, 21 nt, Artificial Sequence
  Synthetic
gugcuauuugcauuuuaaaag

SEQ ID NO: 560662 - RNA, 22 nt, Artificial Sequence
  Synthetic
ggugcuauuugcauuuuaaaag

SEQ ID NO: 560663 - RNA, 23 nt, Artificial Sequence
  Synthetic
gggugcuauuugcauuuuaaaag

SEQ ID NO: 560664 - RNA, 24 nt, Artificial Sequence
  Synthetic
agggugcuauuugcauuuuaaaag

SEQ ID NO: 560665 - RNA, 18 nt, Artificial Sequence
  Synthetic
ugaagagcuuuuuaaaag

SEQ ID NO: 560666 - RNA, 19 nt, Artificial Sequence
  Synthetic
uugaagagcuuuuuaaaag

SEQ ID NO: 560667 - RNA, 20 nt, Artificial Sequence
  Synthetic
auugaagagcuuuuuaaaag

SEQ ID NO: 560668 - RNA, 21 nt, Artificial Sequence
  Synthetic
aauugaagagcuuuuuaaaag

SEQ ID NO: 560669 - RNA, 22 nt, Artificial Sequence
  Synthetic
aaauugaagagcuuuuuaaaag

SEQ ID NO: 560670 - RNA, 23 nt, Artificial Sequence
  Synthetic
aaaauugaagagcuuuuuaaaag

SEQ ID NO: 560671 - RNA, 24 nt, Artificial Sequence
  Synthetic
caaaauugaagagcuuuuuaaaag

SEQ ID NO: 560672 - RNA, 18 nt, Artificial Sequence
  Synthetic
aucauccagaaaacaaag

SEQ ID NO: 560673 - RNA, 19 nt, Artificial Sequence
  Synthetic
caucauccagaaaacaaag

SEQ ID NO: 560674 - RNA, 20 nt, Artificial Sequence
  Synthetic
ucaucauccagaaaacaaag

SEQ ID NO: 560675 - RNA, 21 nt, Artificial Sequence
  Synthetic
aucaucauccagaaaacaaag

SEQ ID NO: 560676 - RNA, 22 nt, Artificial Sequence
  Synthetic
aaucaucauccagaaaacaaag

SEQ ID NO: 560677 - RNA, 23 nt, Artificial Sequence
  Synthetic
aaaucaucauccagaaaacaaag

SEQ ID NO: 560678 - RNA, 24 nt, Artificial Sequence
  Synthetic
uaaaucaucauccagaaaacaaag

SEQ ID NO: 560679 - RNA, 18 nt, Artificial Sequence
  Synthetic
uuacaguaauaaacaaag

SEQ ID NO: 560680 - RNA, 19 nt, Artificial Sequence
  Synthetic
auuacaguaauaaacaaag

SEQ ID NO: 560681 - RNA, 20 nt, Artificial Sequence
  Synthetic
cauuacaguaauaaacaaag

SEQ ID NO: 560682 - RNA, 21 nt, Artificial Sequence
  Synthetic
ucauuacaguaauaaacaaag

SEQ ID NO: 560683 - RNA, 22 nt, Artificial Sequence
  Synthetic
aucauuacaguaauaaacaaag

SEQ ID NO: 560684 - RNA, 23 nt, Artificial Sequence
  Synthetic
aaucauuacaguaauaaacaaag

SEQ ID NO: 560685 - RNA, 24 nt, Artificial Sequence
  Synthetic
gaaucauuacaguaauaaacaaag

SEQ ID NO: 560686 - RNA, 18 nt, Artificial Sequence
  Synthetic
uuagcuuuauaaacaaag

SEQ ID NO: 560687 - RNA, 19 nt, Artificial Sequence
  Synthetic
uuuagcuuuauaaacaaag

SEQ ID NO: 560688 - RNA, 20 nt, Artificial Sequence
  Synthetic
uuuuagcuuuauaaacaaag

SEQ ID NO: 560689 - RNA, 21 nt, Artificial Sequence
  Synthetic
cuuuuagcuuuauaaacaaag

SEQ ID NO: 560690 - RNA, 22 nt, Artificial Sequence
  Synthetic
gcuuuuagcuuuauaaacaaag

SEQ ID NO: 560691 - RNA, 23 nt, Artificial Sequence
  Synthetic
ugcuuuuagcuuuauaaacaaag

SEQ ID NO: 560692 - RNA, 24 nt, Artificial Sequence
  Synthetic
uugcuuuuagcuuuauaaacaaag

SEQ ID NO: 560693 - RNA, 18 nt, Artificial Sequence
  Synthetic
uugaagugcuaaacaaag

SEQ ID NO: 560694 - RNA, 19 nt, Artificial Sequence
  Synthetic
guugaagugcuaaacaaag

SEQ ID NO: 560695 - RNA, 20 nt, Artificial Sequence
  Synthetic
aguugaagugcuaaacaaag

SEQ ID NO: 560696 - RNA, 21 nt, Artificial Sequence
  Synthetic
gaguugaagugcuaaacaaag

SEQ ID NO: 560697 - RNA, 22 nt, Artificial Sequence
  Synthetic
agaguugaagugcuaaacaaag

SEQ ID NO: 560698 - RNA, 23 nt, Artificial Sequence
  Synthetic
gagaguugaagugcuaaacaaag

SEQ ID NO: 560699 - RNA, 24 nt, Artificial Sequence
  Synthetic
agagaguugaagugcuaaacaaag

SEQ ID NO: 560700 - RNA, 18 nt, Artificial Sequence
  Synthetic
gaugagauguaaacaaag

SEQ ID NO: 560701 - RNA, 19 nt, Artificial Sequence
  Synthetic
agaugagauguaaacaaag

SEQ ID NO: 560702 - RNA, 20 nt, Artificial Sequence
  Synthetic
aagaugagauguaaacaaag

SEQ ID NO: 560703 - RNA, 21 nt, Artificial Sequence
  Synthetic
gaagaugagauguaaacaaag

SEQ ID NO: 560704 - RNA, 22 nt, Artificial Sequence
  Synthetic
agaagaugagauguaaacaaag

SEQ ID NO: 560705 - RNA, 23 nt, Artificial Sequence
  Synthetic
cagaagaugagauguaaacaaag

SEQ ID NO: 560706 - RNA, 24 nt, Artificial Sequence
  Synthetic
ccagaagaugagauguaaacaaag

SEQ ID NO: 560707 - RNA, 21 nt, Artificial Sequence
  Synthetic
uccuaagccaaaagaacaaag

SEQ ID NO: 560708 - RNA, 22 nt, Artificial Sequence
  Synthetic
auccuaagccaaaagaacaaag

SEQ ID NO: 560709 - RNA, 23 nt, Artificial Sequence
  Synthetic
aauccuaagccaaaagaacaaag

SEQ ID NO: 560710 - RNA, 24 nt, Artificial Sequence
  Synthetic
caauccuaagccaaaagaacaaag

SEQ ID NO: 560711 - RNA, 21 nt, Artificial Sequence
  Synthetic
uccugagccaaaagaacaaag

SEQ ID NO: 560712 - RNA, 22 nt, Artificial Sequence
  Synthetic
auccugagccaaaagaacaaag

SEQ ID NO: 560713 - RNA, 23 nt, Artificial Sequence
  Synthetic
aauccugagccaaaagaacaaag

SEQ ID NO: 560714 - RNA, 24 nt, Artificial Sequence
  Synthetic
caauccugagccaaaagaacaaag

SEQ ID NO: 560715 - RNA, 18 nt, Artificial Sequence
  Synthetic
ugaauaggaagaacaaag

SEQ ID NO: 560716 - RNA, 19 nt, Artificial Sequence
  Synthetic
uugaauaggaagaacaaag

SEQ ID NO: 560717 - RNA, 20 nt, Artificial Sequence
  Synthetic
cuugaauaggaagaacaaag

SEQ ID NO: 560718 - RNA, 21 nt, Artificial Sequence
  Synthetic
ucuugaauaggaagaacaaag

SEQ ID NO: 560719 - RNA, 22 nt, Artificial Sequence
  Synthetic
aucuugaauaggaagaacaaag

SEQ ID NO: 560720 - RNA, 23 nt, Artificial Sequence
  Synthetic
aaucuugaauaggaagaacaaag

SEQ ID NO: 560721 - RNA, 24 nt, Artificial Sequence
  Synthetic
caaucuugaauaggaagaacaaag

SEQ ID NO: 560722 - RNA, 18 nt, Artificial Sequence
  Synthetic
agaucguugagaacaaag

SEQ ID NO: 560723 - RNA, 19 nt, Artificial Sequence
  Synthetic
aagaucguugagaacaaag

SEQ ID NO: 560724 - RNA, 20 nt, Artificial Sequence
  Synthetic
aaagaucguugagaacaaag

SEQ ID NO: 560725 - RNA, 21 nt, Artificial Sequence
  Synthetic
gaaagaucguugagaacaaag

SEQ ID NO: 560726 - RNA, 22 nt, Artificial Sequence
  Synthetic
ugaaagaucguugagaacaaag

SEQ ID NO: 560727 - RNA, 23 nt, Artificial Sequence
  Synthetic
cugaaagaucguugagaacaaag

SEQ ID NO: 560728 - RNA, 24 nt, Artificial Sequence
  Synthetic
acugaaagaucguugagaacaaag

SEQ ID NO: 560729 - RNA, 18 nt, Artificial Sequence
  Synthetic
ucucagcagggaacaaag

SEQ ID NO: 560730 - RNA, 19 nt, Artificial Sequence
  Synthetic
aucucagcagggaacaaag

SEQ ID NO: 560731 - RNA, 20 nt, Artificial Sequence
  Synthetic
uaucucagcagggaacaaag

SEQ ID NO: 560732 - RNA, 21 nt, Artificial Sequence
  Synthetic
guaucucagcagggaacaaag

SEQ ID NO: 560733 - RNA, 22 nt, Artificial Sequence
  Synthetic
uguaucucagcagggaacaaag

SEQ ID NO: 560734 - RNA, 23 nt, Artificial Sequence
  Synthetic
uuguaucucagcagggaacaaag

SEQ ID NO: 560735 - RNA, 24 nt, Artificial Sequence
  Synthetic
guuguaucucagcagggaacaaag

SEQ ID NO: 560736 - RNA, 19 nt, Artificial Sequence
  Synthetic
gucucagcagggaacaaag

SEQ ID NO: 560737 - RNA, 20 nt, Artificial Sequence
  Synthetic
ugucucagcagggaacaaag

SEQ ID NO: 560738 - RNA, 21 nt, Artificial Sequence
  Synthetic
gugucucagcagggaacaaag

SEQ ID NO: 560739 - RNA, 22 nt, Artificial Sequence
  Synthetic
ugugucucagcagggaacaaag

SEQ ID NO: 560740 - RNA, 23 nt, Artificial Sequence
  Synthetic
cugugucucagcagggaacaaag

SEQ ID NO: 560741 - RNA, 24 nt, Artificial Sequence
  Synthetic
gcugugucucagcagggaacaaag

SEQ ID NO: 560742 - RNA, 18 nt, Artificial Sequence
  Synthetic
uaaguaaaaugaacaaag

SEQ ID NO: 560743 - RNA, 19 nt, Artificial Sequence
  Synthetic
cuaaguaaaaugaacaaag

SEQ ID NO: 560744 - RNA, 20 nt, Artificial Sequence
  Synthetic
ccuaaguaaaaugaacaaag

SEQ ID NO: 560745 - RNA, 21 nt, Artificial Sequence
  Synthetic
uccuaaguaaaaugaacaaag

SEQ ID NO: 560746 - RNA, 22 nt, Artificial Sequence
  Synthetic
auccuaaguaaaaugaacaaag

SEQ ID NO: 560747 - RNA, 23 nt, Artificial Sequence
  Synthetic
aauccuaaguaaaaugaacaaag

SEQ ID NO: 560748 - RNA, 24 nt, Artificial Sequence
  Synthetic
caauccuaaguaaaaugaacaaag

SEQ ID NO: 560749 - RNA, 18 nt, Artificial Sequence
  Synthetic
aauaacgaaugaacaaag

SEQ ID NO: 560750 - RNA, 19 nt, Artificial Sequence
  Synthetic
caauaacgaaugaacaaag

SEQ ID NO: 560751 - RNA, 20 nt, Artificial Sequence
  Synthetic
gcaauaacgaaugaacaaag

SEQ ID NO: 560752 - RNA, 21 nt, Artificial Sequence
  Synthetic
agcaauaacgaaugaacaaag

SEQ ID NO: 560753 - RNA, 22 nt, Artificial Sequence
  Synthetic
aagcaauaacgaaugaacaaag

SEQ ID NO: 560754 - RNA, 23 nt, Artificial Sequence
  Synthetic
aaagcaauaacgaaugaacaaag

SEQ ID NO: 560755 - RNA, 24 nt, Artificial Sequence
  Synthetic
aaaagcaauaacgaaugaacaaag

SEQ ID NO: 560756 - RNA, 18 nt, Artificial Sequence
  Synthetic
aaucuugaaauaacaaag

SEQ ID NO: 560757 - RNA, 19 nt, Artificial Sequence
  Synthetic
gaaucuugaaauaacaaag

SEQ ID NO: 560758 - RNA, 20 nt, Artificial Sequence
  Synthetic
agaaucuugaaauaacaaag

SEQ ID NO: 560759 - RNA, 21 nt, Artificial Sequence
  Synthetic
aagaaucuugaaauaacaaag

SEQ ID NO: 560760 - RNA, 22 nt, Artificial Sequence
  Synthetic
aaagaaucuugaaauaacaaag

SEQ ID NO: 560761 - RNA, 23 nt, Artificial Sequence
  Synthetic
caaagaaucuugaaauaacaaag

SEQ ID NO: 560762 - RNA, 24 nt, Artificial Sequence
  Synthetic
ucaaagaaucuugaaauaacaaag

SEQ ID NO: 560763 - RNA, 18 nt, Artificial Sequence
  Synthetic
uaagcaagaauaacaaag

SEQ ID NO: 560764 - RNA, 19 nt, Artificial Sequence
  Synthetic
cuaagcaagaauaacaaag

SEQ ID NO: 560765 - RNA, 20 nt, Artificial Sequence
  Synthetic
ccuaagcaagaauaacaaag

SEQ ID NO: 560766 - RNA, 21 nt, Artificial Sequence
  Synthetic
uccuaagcaagaauaacaaag

SEQ ID NO: 560767 - RNA, 22 nt, Artificial Sequence
  Synthetic
auccuaagcaagaauaacaaag

SEQ ID NO: 560768 - RNA, 23 nt, Artificial Sequence
  Synthetic
aauccuaagcaagaauaacaaag

SEQ ID NO: 560769 - RNA, 24 nt, Artificial Sequence
  Synthetic
aaauccuaagcaagaauaacaaag

SEQ ID NO: 560770 - RNA, 18 nt, Artificial Sequence
  Synthetic
augcaaaugauaacaaag

SEQ ID NO: 560771 - RNA, 19 nt, Artificial Sequence
  Synthetic
caugcaaaugauaacaaag

SEQ ID NO: 560772 - RNA, 20 nt, Artificial Sequence
  Synthetic
acaugcaaaugauaacaaag

SEQ ID NO: 560773 - RNA, 21 nt, Artificial Sequence
  Synthetic
aacaugcaaaugauaacaaag

SEQ ID NO: 560774 - RNA, 22 nt, Artificial Sequence
  Synthetic
gaacaugcaaaugauaacaaag

SEQ ID NO: 560775 - RNA, 23 nt, Artificial Sequence
  Synthetic
ugaacaugcaaaugauaacaaag

SEQ ID NO: 560776 - RNA, 24 nt, Artificial Sequence
  Synthetic
gugaacaugcaaaugauaacaaag

SEQ ID NO: 560777 - RNA, 18 nt, Artificial Sequence
  Synthetic
ucccugucacuaacaaag

SEQ ID NO: 560778 - RNA, 19 nt, Artificial Sequence
  Synthetic
aucccugucacuaacaaag

SEQ ID NO: 560779 - RNA, 20 nt, Artificial Sequence
  Synthetic
aaucccugucacuaacaaag

SEQ ID NO: 560780 - RNA, 21 nt, Artificial Sequence
  Synthetic
aaaucccugucacuaacaaag

SEQ ID NO: 560781 - RNA, 22 nt, Artificial Sequence
  Synthetic
uaaaucccugucacuaacaaag

SEQ ID NO: 560782 - RNA, 23 nt, Artificial Sequence
  Synthetic
uuaaaucccugucacuaacaaag

SEQ ID NO: 560783 - RNA, 24 nt, Artificial Sequence
  Synthetic
uuuaaaucccugucacuaacaaag

SEQ ID NO: 560784 - RNA, 18 nt, Artificial Sequence
  Synthetic
gaaacauggcuaacaaag

SEQ ID NO: 560785 - RNA, 19 nt, Artificial Sequence
  Synthetic
ugaaacauggcuaacaaag

SEQ ID NO: 560786 - RNA, 20 nt, Artificial Sequence
  Synthetic
augaaacauggcuaacaaag

SEQ ID NO: 560787 - RNA, 21 nt, Artificial Sequence
  Synthetic
aaugaaacauggcuaacaaag

SEQ ID NO: 560788 - RNA, 22 nt, Artificial Sequence
  Synthetic
caaugaaacauggcuaacaaag

SEQ ID NO: 560789 - RNA, 23 nt, Artificial Sequence
  Synthetic
ucaaugaaacauggcuaacaaag

SEQ ID NO: 560790 - RNA, 24 nt, Artificial Sequence
  Synthetic
cucaaugaaacauggcuaacaaag

SEQ ID NO: 560791 - RNA, 18 nt, Artificial Sequence
  Synthetic
uuauuuuuauuaacaaag

SEQ ID NO: 560792 - RNA, 19 nt, Artificial Sequence
  Synthetic
cuuauuuuuauuaacaaag

SEQ ID NO: 560793 - RNA, 20 nt, Artificial Sequence
  Synthetic
ucuuauuuuuauuaacaaag

SEQ ID NO: 560794 - RNA, 21 nt, Artificial Sequence
  Synthetic
gucuuauuuuuauuaacaaag

SEQ ID NO: 560795 - RNA, 22 nt, Artificial Sequence
  Synthetic
ggucuuauuuuuauuaacaaag

SEQ ID NO: 560796 - RNA, 23 nt, Artificial Sequence
  Synthetic
gggucuuauuuuuauuaacaaag

SEQ ID NO: 560797 - RNA, 24 nt, Artificial Sequence
  Synthetic
agggucuuauuuuuauuaacaaag

SEQ ID NO: 560798 - RNA, 18 nt, Artificial Sequence
  Synthetic
guacauaugaacacaaag

SEQ ID NO: 560799 - RNA, 19 nt, Artificial Sequence
  Synthetic
aguacauaugaacacaaag

SEQ ID NO: 560800 - RNA, 20 nt, Artificial Sequence
  Synthetic
gaguacauaugaacacaaag

SEQ ID NO: 560801 - RNA, 21 nt, Artificial Sequence
  Synthetic
ugaguacauaugaacacaaag

SEQ ID NO: 560802 - RNA, 22 nt, Artificial Sequence
  Synthetic
cugaguacauaugaacacaaag

SEQ ID NO: 560803 - RNA, 23 nt, Artificial Sequence
  Synthetic
acugaguacauaugaacacaaag

SEQ ID NO: 560804 - RNA, 24 nt, Artificial Sequence
  Synthetic
cacugaguacauaugaacacaaag

SEQ ID NO: 560805 - RNA, 18 nt, Artificial Sequence
  Synthetic
acagaaagacacacaaag

SEQ ID NO: 560806 - RNA, 19 nt, Artificial Sequence
  Synthetic
cacagaaagacacacaaag

SEQ ID NO: 560807 - RNA, 20 nt, Artificial Sequence
  Synthetic
acacagaaagacacacaaag

SEQ ID NO: 560808 - RNA, 21 nt, Artificial Sequence
  Synthetic
gacacagaaagacacacaaag

SEQ ID NO: 560809 - RNA, 22 nt, Artificial Sequence
  Synthetic
ggacacagaaagacacacaaag

SEQ ID NO: 560810 - RNA, 23 nt, Artificial Sequence
  Synthetic
uggacacagaaagacacacaaag

SEQ ID NO: 560811 - RNA, 24 nt, Artificial Sequence
  Synthetic
guggacacagaaagacacacaaag

SEQ ID NO: 560812 - RNA, 18 nt, Artificial Sequence
  Synthetic
gauauuuagaccacaaag

SEQ ID NO: 560813 - RNA, 19 nt, Artificial Sequence
  Synthetic
ugauauuuagaccacaaag

SEQ ID NO: 560814 - RNA, 20 nt, Artificial Sequence
  Synthetic
cugauauuuagaccacaaag

SEQ ID NO: 560815 - RNA, 21 nt, Artificial Sequence
  Synthetic
acugauauuuagaccacaaag

SEQ ID NO: 560816 - RNA, 22 nt, Artificial Sequence
  Synthetic
uacugauauuuagaccacaaag

SEQ ID NO: 560817 - RNA, 23 nt, Artificial Sequence
  Synthetic
auacugauauuuagaccacaaag

SEQ ID NO: 560818 - RNA, 24 nt, Artificial Sequence
  Synthetic
cauacugauauuuagaccacaaag

SEQ ID NO: 560819 - RNA, 18 nt, Artificial Sequence
  Synthetic
caacucaaacccacaaag

SEQ ID NO: 560820 - RNA, 19 nt, Artificial Sequence
  Synthetic
ucaacucaaacccacaaag

SEQ ID NO: 560821 - RNA, 20 nt, Artificial Sequence
  Synthetic
uucaacucaaacccacaaag

SEQ ID NO: 560822 - RNA, 21 nt, Artificial Sequence
  Synthetic
uuucaacucaaacccacaaag

SEQ ID NO: 560823 - RNA, 22 nt, Artificial Sequence
  Synthetic
guuucaacucaaacccacaaag

SEQ ID NO: 560824 - RNA, 23 nt, Artificial Sequence
  Synthetic
aguuucaacucaaacccacaaag

SEQ ID NO: 560825 - RNA, 24 nt, Artificial Sequence
  Synthetic
aaguuucaacucaaacccacaaag

SEQ ID NO: 560826 - RNA, 18 nt, Artificial Sequence
  Synthetic
aacgggagaugcacaaag

SEQ ID NO: 560827 - RNA, 19 nt, Artificial Sequence
  Synthetic
aaacgggagaugcacaaag

SEQ ID NO: 560828 - RNA, 20 nt, Artificial Sequence
  Synthetic
gaaacgggagaugcacaaag

SEQ ID NO: 560829 - RNA, 21 nt, Artificial Sequence
  Synthetic
ugaaacgggagaugcacaaag

SEQ ID NO: 560830 - RNA, 22 nt, Artificial Sequence
  Synthetic
cugaaacgggagaugcacaaag

SEQ ID NO: 560831 - RNA, 23 nt, Artificial Sequence
  Synthetic
acugaaacgggagaugcacaaag

SEQ ID NO: 560832 - RNA, 24 nt, Artificial Sequence
  Synthetic
uacugaaacgggagaugcacaaag

SEQ ID NO: 560833 - RNA, 18 nt, Artificial Sequence
  Synthetic
auccuucucugcacaaag

SEQ ID NO: 560834 - RNA, 19 nt, Artificial Sequence
  Synthetic
uauccuucucugcacaaag

SEQ ID NO: 560835 - RNA, 20 nt, Artificial Sequence
  Synthetic
cuauccuucucugcacaaag

SEQ ID NO: 560836 - RNA, 21 nt, Artificial Sequence
  Synthetic
ccuauccuucucugcacaaag

SEQ ID NO: 560837 - RNA, 22 nt, Artificial Sequence
  Synthetic
uccuauccuucucugcacaaag

SEQ ID NO: 560838 - RNA, 23 nt, Artificial Sequence
  Synthetic
uuccuauccuucucugcacaaag

SEQ ID NO: 560839 - RNA, 24 nt, Artificial Sequence
  Synthetic
auuccuauccuucucugcacaaag

SEQ ID NO: 560840 - RNA, 18 nt, Artificial Sequence
  Synthetic
ucuauuuucuucacaaag

SEQ ID NO: 560841 - RNA, 19 nt, Artificial Sequence
  Synthetic
gucuauuuucuucacaaag

SEQ ID NO: 560842 - RNA, 20 nt, Artificial Sequence
  Synthetic
agucuauuuucuucacaaag

SEQ ID NO: 560843 - RNA, 21 nt, Artificial Sequence
  Synthetic
uagucuauuuucuucacaaag

SEQ ID NO: 560844 - RNA, 22 nt, Artificial Sequence
  Synthetic
uuagucuauuuucuucacaaag

SEQ ID NO: 560845 - RNA, 23 nt, Artificial Sequence
  Synthetic
uuuagucuauuuucuucacaaag

SEQ ID NO: 560846 - RNA, 24 nt, Artificial Sequence
  Synthetic
uuuuagucuauuuucuucacaaag

SEQ ID NO: 560847 - RNA, 18 nt, Artificial Sequence
  Synthetic
cuggagagaaagacaaag

SEQ ID NO: 560848 - RNA, 19 nt, Artificial Sequence
  Synthetic
gcuggagagaaagacaaag

SEQ ID NO: 560849 - RNA, 20 nt, Artificial Sequence
  Synthetic
ggcuggagagaaagacaaag

SEQ ID NO: 560850 - RNA, 21 nt, Artificial Sequence
  Synthetic
gggcuggagagaaagacaaag

SEQ ID NO: 560851 - RNA, 22 nt, Artificial Sequence
  Synthetic
ggggcuggagagaaagacaaag

SEQ ID NO: 560852 - RNA, 23 nt, Artificial Sequence
  Synthetic
aggggcuggagagaaagacaaag

SEQ ID NO: 560853 - RNA, 24 nt, Artificial Sequence
  Synthetic
aaggggcuggagagaaagacaaag

SEQ ID NO: 560854 - RNA, 18 nt, Artificial Sequence
  Synthetic
uagggagaggggacaaag

SEQ ID NO: 560855 - RNA, 19 nt, Artificial Sequence
  Synthetic
guagggagaggggacaaag

SEQ ID NO: 560856 - RNA, 20 nt, Artificial Sequence
  Synthetic
aguagggagaggggacaaag

SEQ ID NO: 560857 - RNA, 21 nt, Artificial Sequence
  Synthetic
gaguagggagaggggacaaag

SEQ ID NO: 560858 - RNA, 22 nt, Artificial Sequence
  Synthetic
ggaguagggagaggggacaaag

SEQ ID NO: 560859 - RNA, 23 nt, Artificial Sequence
  Synthetic
aggaguagggagaggggacaaag

SEQ ID NO: 560860 - RNA, 24 nt, Artificial Sequence
  Synthetic
uaggaguagggagaggggacaaag

SEQ ID NO: 560861 - RNA, 18 nt, Artificial Sequence
  Synthetic
ucuaccagagauacaaag

SEQ ID NO: 560862 - RNA, 19 nt, Artificial Sequence
  Synthetic
uucuaccagagauacaaag

SEQ ID NO: 560863 - RNA, 20 nt, Artificial Sequence
  Synthetic
auucuaccagagauacaaag

SEQ ID NO: 560864 - RNA, 21 nt, Artificial Sequence
  Synthetic
aauucuaccagagauacaaag

SEQ ID NO: 560865 - RNA, 22 nt, Artificial Sequence
  Synthetic
gaauucuaccagagauacaaag

SEQ ID NO: 560866 - RNA, 23 nt, Artificial Sequence
  Synthetic
ugaauucuaccagagauacaaag

SEQ ID NO: 560867 - RNA, 24 nt, Artificial Sequence
  Synthetic
cugaauucuaccagagauacaaag

SEQ ID NO: 560868 - RNA, 18 nt, Artificial Sequence
  Synthetic
uuuuugcugcuuacaaag

SEQ ID NO: 560869 - RNA, 19 nt, Artificial Sequence
  Synthetic
auuuuugcugcuuacaaag

SEQ ID NO: 560870 - RNA, 20 nt, Artificial Sequence
  Synthetic
uauuuuugcugcuuacaaag

SEQ ID NO: 560871 - RNA, 21 nt, Artificial Sequence
  Synthetic
uuauuuuugcugcuuacaaag

SEQ ID NO: 560872 - RNA, 22 nt, Artificial Sequence
  Synthetic
cuuauuuuugcugcuuacaaag

SEQ ID NO: 560873 - RNA, 23 nt, Artificial Sequence
  Synthetic
acuuauuuuugcugcuuacaaag

SEQ ID NO: 560874 - RNA, 24 nt, Artificial Sequence
  Synthetic
aacuuauuuuugcugcuuacaaag

SEQ ID NO: 560875 - RNA, 18 nt, Artificial Sequence
  Synthetic
acauuaaaaaaaccaaag

SEQ ID NO: 560876 - RNA, 19 nt, Artificial Sequence
  Synthetic
aacauuaaaaaaaccaaag

SEQ ID NO: 560877 - RNA, 20 nt, Artificial Sequence
  Synthetic
gaacauuaaaaaaaccaaag

SEQ ID NO: 560878 - RNA, 21 nt, Artificial Sequence
  Synthetic
ugaacauuaaaaaaaccaaag

SEQ ID NO: 560879 - RNA, 22 nt, Artificial Sequence
  Synthetic
uugaacauuaaaaaaaccaaag

SEQ ID NO: 560880 - RNA, 23 nt, Artificial Sequence
  Synthetic
uuugaacauuaaaaaaaccaaag

SEQ ID NO: 560881 - RNA, 24 nt, Artificial Sequence
  Synthetic
cuuugaacauuaaaaaaaccaaag

SEQ ID NO: 560882 - RNA, 18 nt, Artificial Sequence
  Synthetic
cacauaaccaaaccaaag

SEQ ID NO: 560883 - RNA, 19 nt, Artificial Sequence
  Synthetic
acacauaaccaaaccaaag

SEQ ID NO: 560884 - RNA, 20 nt, Artificial Sequence
  Synthetic
aacacauaaccaaaccaaag

SEQ ID NO: 560885 - RNA, 21 nt, Artificial Sequence
  Synthetic
aaacacauaaccaaaccaaag

SEQ ID NO: 560886 - RNA, 22 nt, Artificial Sequence
  Synthetic
caaacacauaaccaaaccaaag

SEQ ID NO: 560887 - RNA, 23 nt, Artificial Sequence
  Synthetic
gcaaacacauaaccaaaccaaag

SEQ ID NO: 560888 - RNA, 24 nt, Artificial Sequence
  Synthetic
ggcaaacacauaaccaaaccaaag

SEQ ID NO: 560889 - RNA, 18 nt, Artificial Sequence
  Synthetic
uguacuaaaauaccaaag

SEQ ID NO: 560890 - RNA, 19 nt, Artificial Sequence
  Synthetic
guguacuaaaauaccaaag

SEQ ID NO: 560891 - RNA, 20 nt, Artificial Sequence
  Synthetic
aguguacuaaaauaccaaag

SEQ ID NO: 560892 - RNA, 21 nt, Artificial Sequence
  Synthetic
aaguguacuaaaauaccaaag

SEQ ID NO: 560893 - RNA, 22 nt, Artificial Sequence
  Synthetic
uaaguguacuaaaauaccaaag

SEQ ID NO: 560894 - RNA, 23 nt, Artificial Sequence
  Synthetic
auaaguguacuaaaauaccaaag

SEQ ID NO: 560895 - RNA, 24 nt, Artificial Sequence
  Synthetic
cauaaguguacuaaaauaccaaag

SEQ ID NO: 560896 - RNA, 21 nt, Artificial Sequence
  Synthetic
agcaucauucugauaccaaag

SEQ ID NO: 560897 - RNA, 22 nt, Artificial Sequence
  Synthetic
cagcaucauucugauaccaaag

SEQ ID NO: 560898 - RNA, 23 nt, Artificial Sequence
  Synthetic
ccagcaucauucugauaccaaag

SEQ ID NO: 560899 - RNA, 24 nt, Artificial Sequence
  Synthetic
gccagcaucauucugauaccaaag

SEQ ID NO: 560900 - RNA, 18 nt, Artificial Sequence
  Synthetic
uccuaauagaccccaaag

SEQ ID NO: 560901 - RNA, 19 nt, Artificial Sequence
  Synthetic
guccuaauagaccccaaag

SEQ ID NO: 560902 - RNA, 20 nt, Artificial Sequence
  Synthetic
aguccuaauagaccccaaag

SEQ ID NO: 560903 - RNA, 21 nt, Artificial Sequence
  Synthetic
aaguccuaauagaccccaaag

SEQ ID NO: 560904 - RNA, 22 nt, Artificial Sequence
  Synthetic
aaaguccuaauagaccccaaag

SEQ ID NO: 560905 - RNA, 23 nt, Artificial Sequence
  Synthetic
caaaguccuaauagaccccaaag

SEQ ID NO: 560906 - RNA, 24 nt, Artificial Sequence
  Synthetic
ccaaaguccuaauagaccccaaag

SEQ ID NO: 560907 - RNA, 18 nt, Artificial Sequence
  Synthetic
cucuucuuaggcccaaag

SEQ ID NO: 560908 - RNA, 19 nt, Artificial Sequence
  Synthetic
acucuucuuaggcccaaag

SEQ ID NO: 560909 - RNA, 20 nt, Artificial Sequence
  Synthetic
aacucuucuuaggcccaaag

SEQ ID NO: 560910 - RNA, 21 nt, Artificial Sequence
  Synthetic
caacucuucuuaggcccaaag

SEQ ID NO: 560911 - RNA, 22 nt, Artificial Sequence
  Synthetic
ucaacucuucuuaggcccaaag

SEQ ID NO: 560912 - RNA, 23 nt, Artificial Sequence
  Synthetic
gucaacucuucuuaggcccaaag

SEQ ID NO: 560913 - RNA, 24 nt, Artificial Sequence
  Synthetic
ugucaacucuucuuaggcccaaag

SEQ ID NO: 560914 - RNA, 18 nt, Artificial Sequence
  Synthetic
uggccaaccaugccaaag

SEQ ID NO: 560915 - RNA, 19 nt, Artificial Sequence
  Synthetic
uuggccaaccaugccaaag

SEQ ID NO: 560916 - RNA, 20 nt, Artificial Sequence
  Synthetic
cuuggccaaccaugccaaag

SEQ ID NO: 560917 - RNA, 21 nt, Artificial Sequence
  Synthetic
acuuggccaaccaugccaaag

SEQ ID NO: 560918 - RNA, 22 nt, Artificial Sequence
  Synthetic
cacuuggccaaccaugccaaag

SEQ ID NO: 560919 - RNA, 23 nt, Artificial Sequence
  Synthetic
acacuuggccaaccaugccaaag

SEQ ID NO: 560920 - RNA, 24 nt, Artificial Sequence
  Synthetic
cacacuuggccaaccaugccaaag

SEQ ID NO: 560921 - RNA, 18 nt, Artificial Sequence
  Synthetic
cauagggugaugccaaag

SEQ ID NO: 560922 - RNA, 19 nt, Artificial Sequence
  Synthetic
ccauagggugaugccaaag

SEQ ID NO: 560923 - RNA, 20 nt, Artificial Sequence
  Synthetic
uccauagggugaugccaaag

SEQ ID NO: 560924 - RNA, 21 nt, Artificial Sequence
  Synthetic
auccauagggugaugccaaag

SEQ ID NO: 560925 - RNA, 22 nt, Artificial Sequence
  Synthetic
cauccauagggugaugccaaag

SEQ ID NO: 560926 - RNA, 23 nt, Artificial Sequence
  Synthetic
ccauccauagggugaugccaaag

SEQ ID NO: 560927 - RNA, 24 nt, Artificial Sequence
  Synthetic
uccauccauagggugaugccaaag

SEQ ID NO: 560928 - RNA, 18 nt, Artificial Sequence
  Synthetic
gugucuugguugccaaag

SEQ ID NO: 560929 - RNA, 19 nt, Artificial Sequence
  Synthetic
agugucuugguugccaaag

SEQ ID NO: 560930 - RNA, 20 nt, Artificial Sequence
  Synthetic
cagugucuugguugccaaag

SEQ ID NO: 560931 - RNA, 21 nt, Artificial Sequence
  Synthetic
ucagugucuugguugccaaag

SEQ ID NO: 560932 - RNA, 22 nt, Artificial Sequence
  Synthetic
cucagugucuugguugccaaag

SEQ ID NO: 560933 - RNA, 23 nt, Artificial Sequence
  Synthetic
acucagugucuugguugccaaag

SEQ ID NO: 560934 - RNA, 24 nt, Artificial Sequence
  Synthetic
aacucagugucuugguugccaaag

SEQ ID NO: 560935 - RNA, 18 nt, Artificial Sequence
  Synthetic
aaaaaauaaaauccaaag

SEQ ID NO: 560936 - RNA, 19 nt, Artificial Sequence
  Synthetic
caaaaaauaaaauccaaag

SEQ ID NO: 560937 - RNA, 20 nt, Artificial Sequence
  Synthetic
acaaaaaauaaaauccaaag

SEQ ID NO: 560938 - RNA, 21 nt, Artificial Sequence
  Synthetic
aacaaaaaauaaaauccaaag

SEQ ID NO: 560939 - RNA, 22 nt, Artificial Sequence
  Synthetic
uaacaaaaaauaaaauccaaag

SEQ ID NO: 560940 - RNA, 23 nt, Artificial Sequence
  Synthetic
uuaacaaaaaauaaaauccaaag

SEQ ID NO: 560941 - RNA, 24 nt, Artificial Sequence
  Synthetic
auuaacaaaaaauaaaauccaaag

SEQ ID NO: 560942 - RNA, 18 nt, Artificial Sequence
  Synthetic
aaguuucuagauccaaag

SEQ ID NO: 560943 - RNA, 19 nt, Artificial Sequence
  Synthetic
aaaguuucuagauccaaag

SEQ ID NO: 560944 - RNA, 20 nt, Artificial Sequence
  Synthetic
aaaaguuucuagauccaaag

SEQ ID NO: 560945 - RNA, 21 nt, Artificial Sequence
  Synthetic
aaaaaguuucuagauccaaag

SEQ ID NO: 560946 - RNA, 22 nt, Artificial Sequence
  Synthetic
caaaaaguuucuagauccaaag

SEQ ID NO: 560947 - RNA, 23 nt, Artificial Sequence
  Synthetic
ucaaaaaguuucuagauccaaag

SEQ ID NO: 560948 - RNA, 24 nt, Artificial Sequence
  Synthetic
uucaaaaaguuucuagauccaaag

SEQ ID NO: 560949 - RNA, 18 nt, Artificial Sequence
  Synthetic
cugguagacuauccaaag

SEQ ID NO: 560950 - RNA, 19 nt, Artificial Sequence
  Synthetic
ucugguagacuauccaaag

SEQ ID NO: 560951 - RNA, 20 nt, Artificial Sequence
  Synthetic
aucugguagacuauccaaag

SEQ ID NO: 560952 - RNA, 21 nt, Artificial Sequence
  Synthetic
aaucugguagacuauccaaag

SEQ ID NO: 560953 - RNA, 22 nt, Artificial Sequence
  Synthetic
aaaucugguagacuauccaaag

SEQ ID NO: 560954 - RNA, 23 nt, Artificial Sequence
  Synthetic
uaaaucugguagacuauccaaag

SEQ ID NO: 560955 - RNA, 24 nt, Artificial Sequence
  Synthetic
auaaaucugguagacuauccaaag

SEQ ID NO: 560956 - RNA, 18 nt, Artificial Sequence
  Synthetic
aacgucuuuccuccaaag

SEQ ID NO: 560957 - RNA, 19 nt, Artificial Sequence
  Synthetic
aaacgucuuuccuccaaag

SEQ ID NO: 560958 - RNA, 20 nt, Artificial Sequence
  Synthetic
uaaacgucuuuccuccaaag

SEQ ID NO: 560959 - RNA, 21 nt, Artificial Sequence
  Synthetic
uuaaacgucuuuccuccaaag

SEQ ID NO: 560960 - RNA, 22 nt, Artificial Sequence
  Synthetic
uuuaaacgucuuuccuccaaag

SEQ ID NO: 560961 - RNA, 23 nt, Artificial Sequence
  Synthetic
auuuaaacgucuuuccuccaaag

SEQ ID NO: 560962 - RNA, 24 nt, Artificial Sequence
  Synthetic
gauuuaaacgucuuuccuccaaag

SEQ ID NO: 560963 - RNA, 18 nt, Artificial Sequence
  Synthetic
gagagggcauguccaaag

SEQ ID NO: 560964 - RNA, 19 nt, Artificial Sequence
  Synthetic
ggagagggcauguccaaag

SEQ ID NO: 560965 - RNA, 20 nt, Artificial Sequence
  Synthetic
aggagagggcauguccaaag

SEQ ID NO: 560966 - RNA, 21 nt, Artificial Sequence
  Synthetic
aaggagagggcauguccaaag

SEQ ID NO: 560967 - RNA, 22 nt, Artificial Sequence
  Synthetic
caaggagagggcauguccaaag

SEQ ID NO: 560968 - RNA, 23 nt, Artificial Sequence
  Synthetic
acaaggagagggcauguccaaag

SEQ ID NO: 560969 - RNA, 24 nt, Artificial Sequence
  Synthetic
aacaaggagagggcauguccaaag

SEQ ID NO: 560970 - RNA, 18 nt, Artificial Sequence
  Synthetic
aacugcuuauguccaaag

SEQ ID NO: 560971 - RNA, 19 nt, Artificial Sequence
  Synthetic
aaacugcuuauguccaaag

SEQ ID NO: 560972 - RNA, 20 nt, Artificial Sequence
  Synthetic
aaaacugcuuauguccaaag

SEQ ID NO: 560973 - RNA, 21 nt, Artificial Sequence
  Synthetic
uaaaacugcuuauguccaaag

SEQ ID NO: 560974 - RNA, 22 nt, Artificial Sequence
  Synthetic
uuaaaacugcuuauguccaaag

SEQ ID NO: 560975 - RNA, 23 nt, Artificial Sequence
  Synthetic
guuaaaacugcuuauguccaaag

SEQ ID NO: 560976 - RNA, 24 nt, Artificial Sequence
  Synthetic
aguuaaaacugcuuauguccaaag

SEQ ID NO: 560977 - RNA, 18 nt, Artificial Sequence
  Synthetic
uaauauaaaugagcaaag

SEQ ID NO: 560978 - RNA, 19 nt, Artificial Sequence
  Synthetic
uuaauauaaaugagcaaag

SEQ ID NO: 560979 - RNA, 20 nt, Artificial Sequence
  Synthetic
auuaauauaaaugagcaaag

SEQ ID NO: 560980 - RNA, 21 nt, Artificial Sequence
  Synthetic
aauuaauauaaaugagcaaag

SEQ ID NO: 560981 - RNA, 22 nt, Artificial Sequence
  Synthetic
caauuaauauaaaugagcaaag

SEQ ID NO: 560982 - RNA, 23 nt, Artificial Sequence
  Synthetic
gcaauuaauauaaaugagcaaag

SEQ ID NO: 560983 - RNA, 24 nt, Artificial Sequence
  Synthetic
agcaauuaauauaaaugagcaaag

SEQ ID NO: 560984 - RNA, 18 nt, Artificial Sequence
  Synthetic
uccacuagcugagcaaag

SEQ ID NO: 560985 - RNA, 19 nt, Artificial Sequence
  Synthetic
uuccacuagcugagcaaag

SEQ ID NO: 560986 - RNA, 20 nt, Artificial Sequence
  Synthetic
auuccacuagcugagcaaag

SEQ ID NO: 560987 - RNA, 21 nt, Artificial Sequence
  Synthetic
gauuccacuagcugagcaaag

SEQ ID NO: 560988 - RNA, 22 nt, Artificial Sequence
  Synthetic
ggauuccacuagcugagcaaag

SEQ ID NO: 560989 - RNA, 23 nt, Artificial Sequence
  Synthetic
uggauuccacuagcugagcaaag

SEQ ID NO: 560990 - RNA, 24 nt, Artificial Sequence
  Synthetic
auggauuccacuagcugagcaaag

SEQ ID NO: 560991 - RNA, 18 nt, Artificial Sequence
  Synthetic
gcaguaagcaaggcaaag

SEQ ID NO: 560992 - RNA, 19 nt, Artificial Sequence
  Synthetic
agcaguaagcaaggcaaag

SEQ ID NO: 560993 - RNA, 20 nt, Artificial Sequence
  Synthetic
aagcaguaagcaaggcaaag

SEQ ID NO: 560994 - RNA, 21 nt, Artificial Sequence
  Synthetic
uaagcaguaagcaaggcaaag

SEQ ID NO: 560995 - RNA, 22 nt, Artificial Sequence
  Synthetic
auaagcaguaagcaaggcaaag

SEQ ID NO: 560996 - RNA, 23 nt, Artificial Sequence
  Synthetic
aauaagcaguaagcaaggcaaag

SEQ ID NO: 560997 - RNA, 24 nt, Artificial Sequence
  Synthetic
caauaagcaguaagcaaggcaaag

SEQ ID NO: 560998 - RNA, 22 nt, Artificial Sequence
  Synthetic
guaagcaguaagcaaggcaaag

SEQ ID NO: 560999 - RNA, 23 nt, Artificial Sequence
  Synthetic
aguaagcaguaagcaaggcaaag

SEQ ID NO: 561000 - RNA, 24 nt, Artificial Sequence
  Synthetic
caguaagcaguaagcaaggcaaag

SEQ ID NO: 561001 - RNA, 18 nt, Artificial Sequence
  Synthetic
uguuauuucaaggcaaag

SEQ ID NO: 561002 - RNA, 19 nt, Artificial Sequence
  Synthetic
uuguuauuucaaggcaaag

SEQ ID NO: 561003 - RNA, 20 nt, Artificial Sequence
  Synthetic
guuguuauuucaaggcaaag

SEQ ID NO: 561004 - RNA, 21 nt, Artificial Sequence
  Synthetic
uguuguuauuucaaggcaaag

SEQ ID NO: 561005 - RNA, 22 nt, Artificial Sequence
  Synthetic
uuguuguuauuucaaggcaaag

SEQ ID NO: 561006 - RNA, 23 nt, Artificial Sequence
  Synthetic
uuuguuguuauuucaaggcaaag

SEQ ID NO: 561007 - RNA, 24 nt, Artificial Sequence
  Synthetic
cuuuguuguuauuucaaggcaaag

SEQ ID NO: 561008 - RNA, 18 nt, Artificial Sequence
  Synthetic
ucauggcagaaggcaaag

SEQ ID NO: 561009 - RNA, 19 nt, Artificial Sequence
  Synthetic
aucauggcagaaggcaaag

SEQ ID NO: 561010 - RNA, 20 nt, Artificial Sequence
  Synthetic
aaucauggcagaaggcaaag

SEQ ID NO: 561011 - RNA, 21 nt, Artificial Sequence
  Synthetic
caaucauggcagaaggcaaag

SEQ ID NO: 561012 - RNA, 22 nt, Artificial Sequence
  Synthetic
acaaucauggcagaaggcaaag

SEQ ID NO: 561013 - RNA, 23 nt, Artificial Sequence
  Synthetic
cacaaucauggcagaaggcaaag

SEQ ID NO: 561014 - RNA, 24 nt, Artificial Sequence
  Synthetic
ucacaaucauggcagaaggcaaag

SEQ ID NO: 561015 - RNA, 18 nt, Artificial Sequence
  Synthetic
ccaugguggaaggcaaag

SEQ ID NO: 561016 - RNA, 19 nt, Artificial Sequence
  Synthetic
accaugguggaaggcaaag

SEQ ID NO: 561017 - RNA, 20 nt, Artificial Sequence
  Synthetic
aaccaugguggaaggcaaag

SEQ ID NO: 561018 - RNA, 21 nt, Artificial Sequence
  Synthetic
caaccaugguggaaggcaaag

SEQ ID NO: 561019 - RNA, 22 nt, Artificial Sequence
  Synthetic
ccaaccaugguggaaggcaaag

SEQ ID NO: 561020 - RNA, 23 nt, Artificial Sequence
  Synthetic
accaaccaugguggaaggcaaag

SEQ ID NO: 561021 - RNA, 24 nt, Artificial Sequence
  Synthetic
aaccaaccaugguggaaggcaaag

SEQ ID NO: 561022 - RNA, 18 nt, Artificial Sequence
  Synthetic
auaaggagagaggcaaag

SEQ ID NO: 561023 - RNA, 19 nt, Artificial Sequence
  Synthetic
aauaaggagagaggcaaag

SEQ ID NO: 561024 - RNA, 20 nt, Artificial Sequence
  Synthetic
gaauaaggagagaggcaaag

SEQ ID NO: 561025 - RNA, 21 nt, Artificial Sequence
  Synthetic
ggaauaaggagagaggcaaag

SEQ ID NO: 561026 - RNA, 22 nt, Artificial Sequence
  Synthetic
aggaauaaggagagaggcaaag

SEQ ID NO: 561027 - RNA, 23 nt, Artificial Sequence
  Synthetic
aaggaauaaggagagaggcaaag

SEQ ID NO: 561028 - RNA, 24 nt, Artificial Sequence
  Synthetic
aaaggaauaaggagagaggcaaag

SEQ ID NO: 561029 - RNA, 18 nt, Artificial Sequence
  Synthetic
aauccuucucuggcaaag

SEQ ID NO: 561030 - RNA, 19 nt, Artificial Sequence
  Synthetic
aaauccuucucuggcaaag

SEQ ID NO: 561031 - RNA, 20 nt, Artificial Sequence
  Synthetic
aaaauccuucucuggcaaag

SEQ ID NO: 561032 - RNA, 21 nt, Artificial Sequence
  Synthetic
aaaaauccuucucuggcaaag

SEQ ID NO: 561033 - RNA, 22 nt, Artificial Sequence
  Synthetic
aaaaaauccuucucuggcaaag

SEQ ID NO: 561034 - RNA, 23 nt, Artificial Sequence
  Synthetic
aaaaaaauccuucucuggcaaag

SEQ ID NO: 561035 - RNA, 24 nt, Artificial Sequence
  Synthetic
uaaaaaaauccuucucuggcaaag

SEQ ID NO: 561036 - RNA, 18 nt, Artificial Sequence
  Synthetic
uuccuuggcuuggcaaag

SEQ ID NO: 561037 - RNA, 19 nt, Artificial Sequence
  Synthetic
cuuccuuggcuuggcaaag

SEQ ID NO: 561038 - RNA, 20 nt, Artificial Sequence
  Synthetic
ucuuccuuggcuuggcaaag

SEQ ID NO: 561039 - RNA, 21 nt, Artificial Sequence
  Synthetic
cucuuccuuggcuuggcaaag

SEQ ID NO: 561040 - RNA, 22 nt, Artificial Sequence
  Synthetic
ccucuuccuuggcuuggcaaag

SEQ ID NO: 561041 - RNA, 23 nt, Artificial Sequence
  Synthetic
cccucuuccuuggcuuggcaaag

SEQ ID NO: 561042 - RNA, 24 nt, Artificial Sequence
  Synthetic
gcccucuuccuuggcuuggcaaag

SEQ ID NO: 561043 - RNA, 18 nt, Artificial Sequence
  Synthetic
uucaaaaacgaugcaaag

SEQ ID NO: 561044 - RNA, 19 nt, Artificial Sequence
  Synthetic
guucaaaaacgaugcaaag

SEQ ID NO: 561045 - RNA, 20 nt, Artificial Sequence
  Synthetic
uguucaaaaacgaugcaaag

SEQ ID NO: 561046 - RNA, 21 nt, Artificial Sequence
  Synthetic
uuguucaaaaacgaugcaaag

SEQ ID NO: 561047 - RNA, 22 nt, Artificial Sequence
  Synthetic
uuuguucaaaaacgaugcaaag

SEQ ID NO: 561048 - RNA, 23 nt, Artificial Sequence
  Synthetic
cuuuguucaaaaacgaugcaaag

SEQ ID NO: 561049 - RNA, 24 nt, Artificial Sequence
  Synthetic
ccuuuguucaaaaacgaugcaaag

SEQ ID NO: 561050 - RNA, 18 nt, Artificial Sequence
  Synthetic
aaaguguagccugcaaag

SEQ ID NO: 561051 - RNA, 19 nt, Artificial Sequence
  Synthetic
aaaaguguagccugcaaag

SEQ ID NO: 561052 - RNA, 20 nt, Artificial Sequence
  Synthetic
gaaaaguguagccugcaaag

SEQ ID NO: 561053 - RNA, 21 nt, Artificial Sequence
  Synthetic
ggaaaaguguagccugcaaag

SEQ ID NO: 561054 - RNA, 22 nt, Artificial Sequence
  Synthetic
aggaaaaguguagccugcaaag

SEQ ID NO: 561055 - RNA, 23 nt, Artificial Sequence
  Synthetic
aaggaaaaguguagccugcaaag

SEQ ID NO: 561056 - RNA, 24 nt, Artificial Sequence
  Synthetic
gaaggaaaaguguagccugcaaag

SEQ ID NO: 561057 - RNA, 18 nt, Artificial Sequence
  Synthetic
ucuaccagaggugcaaag

SEQ ID NO: 561058 - RNA, 19 nt, Artificial Sequence
  Synthetic
uucuaccagaggugcaaag

SEQ ID NO: 561059 - RNA, 20 nt, Artificial Sequence
  Synthetic
auucuaccagaggugcaaag

SEQ ID NO: 561060 - RNA, 21 nt, Artificial Sequence
  Synthetic
aauucuaccagaggugcaaag

SEQ ID NO: 561061 - RNA, 22 nt, Artificial Sequence
  Synthetic
gaauucuaccagaggugcaaag

SEQ ID NO: 561062 - RNA, 23 nt, Artificial Sequence
  Synthetic
cgaauucuaccagaggugcaaag

SEQ ID NO: 561063 - RNA, 24 nt, Artificial Sequence
  Synthetic
ccgaauucuaccagaggugcaaag

SEQ ID NO: 561064 - RNA, 18 nt, Artificial Sequence
  Synthetic
agacuaaugauugcaaag

SEQ ID NO: 561065 - RNA, 19 nt, Artificial Sequence
  Synthetic
gagacuaaugauugcaaag

SEQ ID NO: 561066 - RNA, 20 nt, Artificial Sequence
  Synthetic
ggagacuaaugauugcaaag

SEQ ID NO: 561067 - RNA, 21 nt, Artificial Sequence
  Synthetic
gggagacuaaugauugcaaag

SEQ ID NO: 561068 - RNA, 22 nt, Artificial Sequence
  Synthetic
ugggagacuaaugauugcaaag

SEQ ID NO: 561069 - RNA, 23 nt, Artificial Sequence
  Synthetic
uugggagacuaaugauugcaaag

SEQ ID NO: 561070 - RNA, 24 nt, Artificial Sequence
  Synthetic
cuugggagacuaaugauugcaaag

SEQ ID NO: 561071 - RNA, 18 nt, Artificial Sequence
  Synthetic
auuuugugaaaaucaaag

SEQ ID NO: 561072 - RNA, 19 nt, Artificial Sequence
  Synthetic
uauuuugugaaaaucaaag

SEQ ID NO: 561073 - RNA, 20 nt, Artificial Sequence
  Synthetic
uuauuuugugaaaaucaaag

SEQ ID NO: 561074 - RNA, 21 nt, Artificial Sequence
  Synthetic
uuuauuuugugaaaaucaaag

SEQ ID NO: 561075 - RNA, 22 nt, Artificial Sequence
  Synthetic
uuuuauuuugugaaaaucaaag

SEQ ID NO: 561076 - RNA, 23 nt, Artificial Sequence
  Synthetic
cuuuuauuuugugaaaaucaaag

SEQ ID NO: 561077 - RNA, 24 nt, Artificial Sequence
  Synthetic
ccuuuuauuuugugaaaaucaaag

SEQ ID NO: 561078 - RNA, 18 nt, Artificial Sequence
  Synthetic
cugaaucuaaaaucaaag

SEQ ID NO: 561079 - RNA, 19 nt, Artificial Sequence
  Synthetic
ccugaaucuaaaaucaaag

SEQ ID NO: 561080 - RNA, 20 nt, Artificial Sequence
  Synthetic
cccugaaucuaaaaucaaag

SEQ ID NO: 561081 - RNA, 21 nt, Artificial Sequence
  Synthetic
ucccugaaucuaaaaucaaag

SEQ ID NO: 561082 - RNA, 22 nt, Artificial Sequence
  Synthetic
cucccugaaucuaaaaucaaag

SEQ ID NO: 561083 - RNA, 23 nt, Artificial Sequence
  Synthetic
acucccugaaucuaaaaucaaag

SEQ ID NO: 561084 - RNA, 24 nt, Artificial Sequence
  Synthetic
uacucccugaaucuaaaaucaaag

SEQ ID NO: 561085 - RNA, 18 nt, Artificial Sequence
  Synthetic
uauauaccuaaaucaaag

SEQ ID NO: 561086 - RNA, 19 nt, Artificial Sequence
  Synthetic
cuauauaccuaaaucaaag

SEQ ID NO: 561087 - RNA, 20 nt, Artificial Sequence
  Synthetic
acuauauaccuaaaucaaag

SEQ ID NO: 561088 - RNA, 21 nt, Artificial Sequence
  Synthetic
gacuauauaccuaaaucaaag

SEQ ID NO: 561089 - RNA, 22 nt, Artificial Sequence
  Synthetic
agacuauauaccuaaaucaaag

SEQ ID NO: 561090 - RNA, 23 nt, Artificial Sequence
  Synthetic
aagacuauauaccuaaaucaaag

SEQ ID NO: 561091 - RNA, 24 nt, Artificial Sequence
  Synthetic
aaagacuauauaccuaaaucaaag

SEQ ID NO: 561092 - RNA, 18 nt, Artificial Sequence
  Synthetic
ucagauacgcaaucaaag

SEQ ID NO: 561093 - RNA, 19 nt, Artificial Sequence
  Synthetic
uucagauacgcaaucaaag

SEQ ID NO: 561094 - RNA, 20 nt, Artificial Sequence
  Synthetic
auucagauacgcaaucaaag

SEQ ID NO: 561095 - RNA, 21 nt, Artificial Sequence
  Synthetic
gauucagauacgcaaucaaag

SEQ ID NO: 561096 - RNA, 22 nt, Artificial Sequence
  Synthetic
ugauucagauacgcaaucaaag

SEQ ID NO: 561097 - RNA, 23 nt, Artificial Sequence
  Synthetic
gugauucagauacgcaaucaaag

SEQ ID NO: 561098 - RNA, 24 nt, Artificial Sequence
  Synthetic
ggugauucagauacgcaaucaaag

SEQ ID NO: 561099 - RNA, 18 nt, Artificial Sequence
  Synthetic
aaauaacaaagaucaaag

SEQ ID NO: 561100 - RNA, 19 nt, Artificial Sequence
  Synthetic
gaaauaacaaagaucaaag

SEQ ID NO: 561101 - RNA, 20 nt, Artificial Sequence
  Synthetic
agaaauaacaaagaucaaag

SEQ ID NO: 561102 - RNA, 21 nt, Artificial Sequence
  Synthetic
aagaaauaacaaagaucaaag

SEQ ID NO: 561103 - RNA, 22 nt, Artificial Sequence
  Synthetic
aaagaaauaacaaagaucaaag

SEQ ID NO: 561104 - RNA, 23 nt, Artificial Sequence
  Synthetic
aaaagaaauaacaaagaucaaag

SEQ ID NO: 561105 - RNA, 24 nt, Artificial Sequence
  Synthetic
gaaaagaaauaacaaagaucaaag

SEQ ID NO: 561106 - RNA, 18 nt, Artificial Sequence
  Synthetic
cuauuacaaagcucaaag

SEQ ID NO: 561107 - RNA, 19 nt, Artificial Sequence
  Synthetic
acuauuacaaagcucaaag

SEQ ID NO: 561108 - RNA, 20 nt, Artificial Sequence
  Synthetic
uacuauuacaaagcucaaag

SEQ ID NO: 561109 - RNA, 21 nt, Artificial Sequence
  Synthetic
auacuauuacaaagcucaaag

SEQ ID NO: 561110 - RNA, 22 nt, Artificial Sequence
  Synthetic
gauacuauuacaaagcucaaag

SEQ ID NO: 561111 - RNA, 23 nt, Artificial Sequence
  Synthetic
ggauacuauuacaaagcucaaag

SEQ ID NO: 561112 - RNA, 24 nt, Artificial Sequence
  Synthetic
uggauacuauuacaaagcucaaag

SEQ ID NO: 561113 - RNA, 18 nt, Artificial Sequence
  Synthetic
augugccuuagcucaaag

SEQ ID NO: 561114 - RNA, 19 nt, Artificial Sequence
  Synthetic
uaugugccuuagcucaaag

SEQ ID NO: 561115 - RNA, 20 nt, Artificial Sequence
  Synthetic
auaugugccuuagcucaaag

SEQ ID NO: 561116 - RNA, 21 nt, Artificial Sequence
  Synthetic
aauaugugccuuagcucaaag

SEQ ID NO: 561117 - RNA, 22 nt, Artificial Sequence
  Synthetic
uaauaugugccuuagcucaaag

SEQ ID NO: 561118 - RNA, 23 nt, Artificial Sequence
  Synthetic
guaauaugugccuuagcucaaag

SEQ ID NO: 561119 - RNA, 24 nt, Artificial Sequence
  Synthetic
uguaauaugugccuuagcucaaag

SEQ ID NO: 561120 - RNA, 18 nt, Artificial Sequence
  Synthetic
gccuaauuuggcucaaag

SEQ ID NO: 561121 - RNA, 19 nt, Artificial Sequence
  Synthetic
ggccuaauuuggcucaaag

SEQ ID NO: 561122 - RNA, 20 nt, Artificial Sequence
  Synthetic
aggccuaauuuggcucaaag

SEQ ID NO: 561123 - RNA, 21 nt, Artificial Sequence
  Synthetic
gaggccuaauuuggcucaaag

SEQ ID NO: 561124 - RNA, 22 nt, Artificial Sequence
  Synthetic
agaggccuaauuuggcucaaag

SEQ ID NO: 561125 - RNA, 23 nt, Artificial Sequence
  Synthetic
uagaggccuaauuuggcucaaag

SEQ ID NO: 561126 - RNA, 24 nt, Artificial Sequence
  Synthetic
auagaggccuaauuuggcucaaag

SEQ ID NO: 561127 - RNA, 18 nt, Artificial Sequence
  Synthetic
gaaggauuagagucaaag

SEQ ID NO: 561128 - RNA, 19 nt, Artificial Sequence
  Synthetic
agaaggauuagagucaaag

SEQ ID NO: 561129 - RNA, 20 nt, Artificial Sequence
  Synthetic
uagaaggauuagagucaaag

SEQ ID NO: 561130 - RNA, 21 nt, Artificial Sequence
  Synthetic
uuagaaggauuagagucaaag

SEQ ID NO: 561131 - RNA, 22 nt, Artificial Sequence
  Synthetic
uuuagaaggauuagagucaaag

SEQ ID NO: 561132 - RNA, 23 nt, Artificial Sequence
  Synthetic
cuuuagaaggauuagagucaaag

SEQ ID NO: 561133 - RNA, 24 nt, Artificial Sequence
  Synthetic
acuuuagaaggauuagagucaaag

SEQ ID NO: 561134 - RNA, 18 nt, Artificial Sequence
  Synthetic
aauccccaggugucaaag

SEQ ID NO: 561135 - RNA, 19 nt, Artificial Sequence
  Synthetic
uaauccccaggugucaaag

SEQ ID NO: 561136 - RNA, 20 nt, Artificial Sequence
  Synthetic
auaauccccaggugucaaag

SEQ ID NO: 561137 - RNA, 21 nt, Artificial Sequence
  Synthetic
cauaauccccaggugucaaag

SEQ ID NO: 561138 - RNA, 22 nt, Artificial Sequence
  Synthetic
ccauaauccccaggugucaaag

SEQ ID NO: 561139 - RNA, 23 nt, Artificial Sequence
  Synthetic
cccauaauccccaggugucaaag

SEQ ID NO: 561140 - RNA, 24 nt, Artificial Sequence
  Synthetic
ccccauaauccccaggugucaaag

SEQ ID NO: 561141 - RNA, 18 nt, Artificial Sequence
  Synthetic
ccuucaagguugucaaag

SEQ ID NO: 561142 - RNA, 19 nt, Artificial Sequence
  Synthetic
gccuucaagguugucaaag

SEQ ID NO: 561143 - RNA, 20 nt, Artificial Sequence
  Synthetic
ugccuucaagguugucaaag

SEQ ID NO: 561144 - RNA, 21 nt, Artificial Sequence
  Synthetic
gugccuucaagguugucaaag

SEQ ID NO: 561145 - RNA, 22 nt, Artificial Sequence
  Synthetic
agugccuucaagguugucaaag

SEQ ID NO: 561146 - RNA, 23 nt, Artificial Sequence
  Synthetic
aagugccuucaagguugucaaag

SEQ ID NO: 561147 - RNA, 24 nt, Artificial Sequence
  Synthetic
caagugccuucaagguugucaaag

SEQ ID NO: 561148 - RNA, 18 nt, Artificial Sequence
  Synthetic
uuagugguuaauucaaag

SEQ ID NO: 561149 - RNA, 19 nt, Artificial Sequence
  Synthetic
uuuagugguuaauucaaag

SEQ ID NO: 561150 - RNA, 20 nt, Artificial Sequence
  Synthetic
cuuuagugguuaauucaaag

SEQ ID NO: 561151 - RNA, 21 nt, Artificial Sequence
  Synthetic
gcuuuagugguuaauucaaag

SEQ ID NO: 561152 - RNA, 22 nt, Artificial Sequence
  Synthetic
ggcuuuagugguuaauucaaag

SEQ ID NO: 561153 - RNA, 23 nt, Artificial Sequence
  Synthetic
uggcuuuagugguuaauucaaag

SEQ ID NO: 561154 - RNA, 24 nt, Artificial Sequence
  Synthetic
cuggcuuuagugguuaauucaaag

SEQ ID NO: 561155 - RNA, 18 nt, Artificial Sequence
  Synthetic
gagguuauacauucaaag

SEQ ID NO: 561156 - RNA, 19 nt, Artificial Sequence
  Synthetic
agagguuauacauucaaag

SEQ ID NO: 561157 - RNA, 20 nt, Artificial Sequence
  Synthetic
uagagguuauacauucaaag

SEQ ID NO: 561158 - RNA, 21 nt, Artificial Sequence
  Synthetic
cuagagguuauacauucaaag

SEQ ID NO: 561159 - RNA, 22 nt, Artificial Sequence
  Synthetic
ucuagagguuauacauucaaag

SEQ ID NO: 561160 - RNA, 23 nt, Artificial Sequence
  Synthetic
uucuagagguuauacauucaaag

SEQ ID NO: 561161 - RNA, 24 nt, Artificial Sequence
  Synthetic
auucuagagguuauacauucaaag

SEQ ID NO: 561162 - RNA, 18 nt, Artificial Sequence
  Synthetic
uuuaguauaacuucaaag

SEQ ID NO: 561163 - RNA, 19 nt, Artificial Sequence
  Synthetic
cuuuaguauaacuucaaag

SEQ ID NO: 561164 - RNA, 20 nt, Artificial Sequence
  Synthetic
gcuuuaguauaacuucaaag

SEQ ID NO: 561165 - RNA, 21 nt, Artificial Sequence
  Synthetic
agcuuuaguauaacuucaaag

SEQ ID NO: 561166 - RNA, 22 nt, Artificial Sequence
  Synthetic
aagcuuuaguauaacuucaaag

SEQ ID NO: 561167 - RNA, 23 nt, Artificial Sequence
  Synthetic
uaagcuuuaguauaacuucaaag

SEQ ID NO: 561168 - RNA, 24 nt, Artificial Sequence
  Synthetic
cuaagcuuuaguauaacuucaaag

SEQ ID NO: 561169 - RNA, 18 nt, Artificial Sequence
  Synthetic
gaugcauuuacuucaaag

SEQ ID NO: 561170 - RNA, 19 nt, Artificial Sequence
  Synthetic
ugaugcauuuacuucaaag

SEQ ID NO: 561171 - RNA, 20 nt, Artificial Sequence
  Synthetic
gugaugcauuuacuucaaag

SEQ ID NO: 561172 - RNA, 21 nt, Artificial Sequence
  Synthetic
agugaugcauuuacuucaaag

SEQ ID NO: 561173 - RNA, 22 nt, Artificial Sequence
  Synthetic
aagugaugcauuuacuucaaag

SEQ ID NO: 561174 - RNA, 23 nt, Artificial Sequence
  Synthetic
uaagugaugcauuuacuucaaag

SEQ ID NO: 561175 - RNA, 24 nt, Artificial Sequence
  Synthetic
auaagugaugcauuuacuucaaag

SEQ ID NO: 561176 - RNA, 18 nt, Artificial Sequence
  Synthetic
cugugaagcucuucaaag

SEQ ID NO: 561177 - RNA, 19 nt, Artificial Sequence
  Synthetic
acugugaagcucuucaaag

SEQ ID NO: 561178 - RNA, 20 nt, Artificial Sequence
  Synthetic
gacugugaagcucuucaaag

SEQ ID NO: 561179 - RNA, 21 nt, Artificial Sequence
  Synthetic
agacugugaagcucuucaaag

SEQ ID NO: 561180 - RNA, 22 nt, Artificial Sequence
  Synthetic
aagacugugaagcucuucaaag

SEQ ID NO: 561181 - RNA, 23 nt, Artificial Sequence
  Synthetic
caagacugugaagcucuucaaag

SEQ ID NO: 561182 - RNA, 24 nt, Artificial Sequence
  Synthetic
ccaagacugugaagcucuucaaag

SEQ ID NO: 561183 - RNA, 18 nt, Artificial Sequence
  Synthetic
uuuucagaaguuucaaag

SEQ ID NO: 561184 - RNA, 19 nt, Artificial Sequence
  Synthetic
cuuuucagaaguuucaaag

SEQ ID NO: 561185 - RNA, 20 nt, Artificial Sequence
  Synthetic
ccuuuucagaaguuucaaag

SEQ ID NO: 561186 - RNA, 21 nt, Artificial Sequence
  Synthetic
gccuuuucagaaguuucaaag

SEQ ID NO: 561187 - RNA, 22 nt, Artificial Sequence
  Synthetic
ugccuuuucagaaguuucaaag

SEQ ID NO: 561188 - RNA, 23 nt, Artificial Sequence
  Synthetic
cugccuuuucagaaguuucaaag

SEQ ID NO: 561189 - RNA, 24 nt, Artificial Sequence
  Synthetic
ucugccuuuucagaaguuucaaag

SEQ ID NO: 561190 - RNA, 18 nt, Artificial Sequence
  Synthetic
agaugauuuuuuucaaag

SEQ ID NO: 561191 - RNA, 19 nt, Artificial Sequence
  Synthetic
cagaugauuuuuuucaaag

SEQ ID NO: 561192 - RNA, 20 nt, Artificial Sequence
  Synthetic
gcagaugauuuuuuucaaag

SEQ ID NO: 561193 - RNA, 21 nt, Artificial Sequence
  Synthetic
agcagaugauuuuuuucaaag

SEQ ID NO: 561194 - RNA, 22 nt, Artificial Sequence
  Synthetic
cagcagaugauuuuuuucaaag

SEQ ID NO: 561195 - RNA, 23 nt, Artificial Sequence
  Synthetic
gcagcagaugauuuuuuucaaag

SEQ ID NO: 561196 - RNA, 24 nt, Artificial Sequence
  Synthetic
agcagcagaugauuuuuuucaaag

SEQ ID NO: 561197 - RNA, 18 nt, Artificial Sequence
  Synthetic
aaaagaaaaaaaagaaag

SEQ ID NO: 561198 - RNA, 19 nt, Artificial Sequence
  Synthetic
aaaaagaaaaaaaagaaag

SEQ ID NO: 561199 - RNA, 20 nt, Artificial Sequence
  Synthetic
gaaaaagaaaaaaaagaaag

SEQ ID NO: 561200 - RNA, 21 nt, Artificial Sequence
  Synthetic
agaaaaagaaaaaaaagaaag

SEQ ID NO: 561201 - RNA, 22 nt, Artificial Sequence
  Synthetic
aagaaaaagaaaaaaaagaaag

SEQ ID NO: 561202 - RNA, 23 nt, Artificial Sequence
  Synthetic
aaagaaaaagaaaaaaaagaaag

SEQ ID NO: 561203 - RNA, 24 nt, Artificial Sequence
  Synthetic
aaaagaaaaagaaaaaaaagaaag

SEQ ID NO: 561204 - RNA, 18 nt, Artificial Sequence
  Synthetic
uaauaauaaaaaagaaag

SEQ ID NO: 561205 - RNA, 19 nt, Artificial Sequence
  Synthetic
auaauaauaaaaaagaaag

SEQ ID NO: 561206 - RNA, 20 nt, Artificial Sequence
  Synthetic
uauaauaauaaaaaagaaag

SEQ ID NO: 561207 - RNA, 21 nt, Artificial Sequence
  Synthetic
guauaauaauaaaaaagaaag

SEQ ID NO: 561208 - RNA, 22 nt, Artificial Sequence
  Synthetic
aguauaauaauaaaaaagaaag

SEQ ID NO: 561209 - RNA, 23 nt, Artificial Sequence
  Synthetic
aaguauaauaauaaaaaagaaag

SEQ ID NO: 561210 - RNA, 24 nt, Artificial Sequence
  Synthetic
aaaguauaauaauaaaaaagaaag

SEQ ID NO: 561211 - RNA, 18 nt, Artificial Sequence
  Synthetic
auacacuaaaaaagaaag

SEQ ID NO: 561212 - RNA, 19 nt, Artificial Sequence
  Synthetic
gauacacuaaaaaagaaag

SEQ ID NO: 561213 - RNA, 20 nt, Artificial Sequence
  Synthetic
agauacacuaaaaaagaaag

SEQ ID NO: 561214 - RNA, 21 nt, Artificial Sequence
  Synthetic
gagauacacuaaaaaagaaag

SEQ ID NO: 561215 - RNA, 22 nt, Artificial Sequence
  Synthetic
agagauacacuaaaaaagaaag

SEQ ID NO: 561216 - RNA, 23 nt, Artificial Sequence
  Synthetic
aagagauacacuaaaaaagaaag

SEQ ID NO: 561217 - RNA, 24 nt, Artificial Sequence
  Synthetic
aaagagauacacuaaaaaagaaag

SEQ ID NO: 561218 - RNA, 18 nt, Artificial Sequence
  Synthetic
ggaggagcaaaaagaaag

SEQ ID NO: 561219 - RNA, 19 nt, Artificial Sequence
  Synthetic
gggaggagcaaaaagaaag

SEQ ID NO: 561220 - RNA, 20 nt, Artificial Sequence
  Synthetic
ggggaggagcaaaaagaaag

SEQ ID NO: 561221 - RNA, 21 nt, Artificial Sequence
  Synthetic
aggggaggagcaaaaagaaag

SEQ ID NO: 561222 - RNA, 22 nt, Artificial Sequence
  Synthetic
aaggggaggagcaaaaagaaag

SEQ ID NO: 561223 - RNA, 23 nt, Artificial Sequence
  Synthetic
aaaggggaggagcaaaaagaaag

SEQ ID NO: 561224 - RNA, 24 nt, Artificial Sequence
  Synthetic
uaaaggggaggagcaaaaagaaag

SEQ ID NO: 561225 - RNA, 18 nt, Artificial Sequence
  Synthetic
ggggagucaaaaagaaag

SEQ ID NO: 561226 - RNA, 19 nt, Artificial Sequence
  Synthetic
gggggagucaaaaagaaag

SEQ ID NO: 561227 - RNA, 20 nt, Artificial Sequence
  Synthetic
ggggggagucaaaaagaaag

SEQ ID NO: 561228 - RNA, 21 nt, Artificial Sequence
  Synthetic
gggggggagucaaaaagaaag

SEQ ID NO: 561229 - RNA, 22 nt, Artificial Sequence
  Synthetic
ugggggggagucaaaaagaaag

SEQ ID NO: 561230 - RNA, 23 nt, Artificial Sequence
  Synthetic
augggggggagucaaaaagaaag

SEQ ID NO: 561231 - RNA, 24 nt, Artificial Sequence
  Synthetic
gaugggggggagucaaaaagaaag

SEQ ID NO: 561232 - RNA, 18 nt, Artificial Sequence
  Synthetic
gcaaaacggaaaagaaag

SEQ ID NO: 561233 - RNA, 19 nt, Artificial Sequence
  Synthetic
ugcaaaacggaaaagaaag

SEQ ID NO: 561234 - RNA, 20 nt, Artificial Sequence
  Synthetic
augcaaaacggaaaagaaag

SEQ ID NO: 561235 - RNA, 21 nt, Artificial Sequence
  Synthetic
caugcaaaacggaaaagaaag

SEQ ID NO: 561236 - RNA, 22 nt, Artificial Sequence
  Synthetic
ucaugcaaaacggaaaagaaag

SEQ ID NO: 561237 - RNA, 23 nt, Artificial Sequence
  Synthetic
gucaugcaaaacggaaaagaaag

SEQ ID NO: 561238 - RNA, 24 nt, Artificial Sequence
  Synthetic
ugucaugcaaaacggaaaagaaag

SEQ ID NO: 561239 - RNA, 18 nt, Artificial Sequence
  Synthetic
uucccuuguaaaagaaag

SEQ ID NO: 561240 - RNA, 19 nt, Artificial Sequence
  Synthetic
guucccuuguaaaagaaag

SEQ ID NO: 561241 - RNA, 20 nt, Artificial Sequence
  Synthetic
gguucccuuguaaaagaaag

SEQ ID NO: 561242 - RNA, 21 nt, Artificial Sequence
  Synthetic
ggguucccuuguaaaagaaag

SEQ ID NO: 561243 - RNA, 22 nt, Artificial Sequence
  Synthetic
aggguucccuuguaaaagaaag

SEQ ID NO: 561244 - RNA, 23 nt, Artificial Sequence
  Synthetic
aaggguucccuuguaaaagaaag

SEQ ID NO: 561245 - RNA, 24 nt, Artificial Sequence
  Synthetic
uaaggguucccuuguaaaagaaag

SEQ ID NO: 561246 - RNA, 18 nt, Artificial Sequence
  Synthetic
uucaaguuucaaagaaag

SEQ ID NO: 561247 - RNA, 19 nt, Artificial Sequence
  Synthetic
uuucaaguuucaaagaaag

SEQ ID NO: 561248 - RNA, 20 nt, Artificial Sequence
  Synthetic
auuucaaguuucaaagaaag

SEQ ID NO: 561249 - RNA, 21 nt, Artificial Sequence
  Synthetic
cauuucaaguuucaaagaaag

SEQ ID NO: 561250 - RNA, 22 nt, Artificial Sequence
  Synthetic
ccauuucaaguuucaaagaaag

SEQ ID NO: 561251 - RNA, 23 nt, Artificial Sequence
  Synthetic
gccauuucaaguuucaaagaaag

SEQ ID NO: 561252 - RNA, 24 nt, Artificial Sequence
  Synthetic
ugccauuucaaguuucaaagaaag

SEQ ID NO: 561253 - RNA, 18 nt, Artificial Sequence
  Synthetic
agaaagaaagaaagaaag

SEQ ID NO: 561254 - RNA, 19 nt, Artificial Sequence
  Synthetic
aagaaagaaagaaagaaag

SEQ ID NO: 561255 - RNA, 20 nt, Artificial Sequence
  Synthetic
aaagaaagaaagaaagaaag

SEQ ID NO: 561256 - RNA, 21 nt, Artificial Sequence
  Synthetic
gaaagaaagaaagaaagaaag

SEQ ID NO: 561257 - RNA, 22 nt, Artificial Sequence
  Synthetic
agaaagaaagaaagaaagaaag

SEQ ID NO: 561258 - RNA, 23 nt, Artificial Sequence
  Synthetic
aagaaagaaagaaagaaagaaag

SEQ ID NO: 561259 - RNA, 24 nt, Artificial Sequence
  Synthetic
aaagaaagaaagaaagaaagaaag

SEQ ID NO: 561260 - RNA, 18 nt, Artificial Sequence
  Synthetic
aaagagaaagaaagaaag

SEQ ID NO: 561261 - RNA, 19 nt, Artificial Sequence
  Synthetic
gaaagagaaagaaagaaag

SEQ ID NO: 561262 - RNA, 20 nt, Artificial Sequence
  Synthetic
agaaagagaaagaaagaaag

SEQ ID NO: 561263 - RNA, 21 nt, Artificial Sequence
  Synthetic
aagaaagagaaagaaagaaag

SEQ ID NO: 561264 - RNA, 22 nt, Artificial Sequence
  Synthetic
aaagaaagagaaagaaagaaag

SEQ ID NO: 561265 - RNA, 23 nt, Artificial Sequence
  Synthetic
gaaagaaagagaaagaaagaaag

SEQ ID NO: 561266 - RNA, 24 nt, Artificial Sequence
  Synthetic
agaaagaaagagaaagaaagaaag

SEQ ID NO: 561267 - RNA, 18 nt, Artificial Sequence
  Synthetic
aaaaaagaagaaagaaag

SEQ ID NO: 561268 - RNA, 19 nt, Artificial Sequence
  Synthetic
aaaaaaagaagaaagaaag

SEQ ID NO: 561269 - RNA, 20 nt, Artificial Sequence
  Synthetic
aaaaaaaagaagaaagaaag

SEQ ID NO: 561270 - RNA, 21 nt, Artificial Sequence
  Synthetic
aaaaaaaaagaagaaagaaag

SEQ ID NO: 561271 - RNA, 22 nt, Artificial Sequence
  Synthetic
aaaaaaaaaagaagaaagaaag

SEQ ID NO: 561272 - RNA, 23 nt, Artificial Sequence
  Synthetic
aaaaaaaaaaagaagaaagaaag

SEQ ID NO: 561273 - RNA, 24 nt, Artificial Sequence
  Synthetic
aaaaaaaaaaaagaagaaagaaag

SEQ ID NO: 561274 - RNA, 18 nt, Artificial Sequence
  Synthetic
aaguagagaacaagaaag

SEQ ID NO: 561275 - RNA, 19 nt, Artificial Sequence
  Synthetic
gaaguagagaacaagaaag

SEQ ID NO: 561276 - RNA, 20 nt, Artificial Sequence
  Synthetic
agaaguagagaacaagaaag

SEQ ID NO: 561277 - RNA, 21 nt, Artificial Sequence
  Synthetic
aagaaguagagaacaagaaag

SEQ ID NO: 561278 - RNA, 22 nt, Artificial Sequence
  Synthetic
gaagaaguagagaacaagaaag

SEQ ID NO: 561279 - RNA, 23 nt, Artificial Sequence
  Synthetic
agaagaaguagagaacaagaaag

SEQ ID NO: 561280 - RNA, 24 nt, Artificial Sequence
  Synthetic
cagaagaaguagagaacaagaaag

SEQ ID NO: 561281 - RNA, 18 nt, Artificial Sequence
  Synthetic
ggaauaauaacaagaaag

SEQ ID NO: 561282 - RNA, 19 nt, Artificial Sequence
  Synthetic
gggaauaauaacaagaaag

SEQ ID NO: 561283 - RNA, 20 nt, Artificial Sequence
  Synthetic
ugggaauaauaacaagaaag

SEQ ID NO: 561284 - RNA, 21 nt, Artificial Sequence
  Synthetic
augggaauaauaacaagaaag

SEQ ID NO: 561285 - RNA, 22 nt, Artificial Sequence
  Synthetic
aaugggaauaauaacaagaaag

SEQ ID NO: 561286 - RNA, 23 nt, Artificial Sequence
  Synthetic
aaaugggaauaauaacaagaaag

SEQ ID NO: 561287 - RNA, 24 nt, Artificial Sequence
  Synthetic
caaaugggaauaauaacaagaaag

SEQ ID NO: 561288 - RNA, 18 nt, Artificial Sequence
  Synthetic
gugaaggaaagaagaaag

SEQ ID NO: 561289 - RNA, 19 nt, Artificial Sequence
  Synthetic
agugaaggaaagaagaaag

SEQ ID NO: 561290 - RNA, 20 nt, Artificial Sequence
  Synthetic
aagugaaggaaagaagaaag

SEQ ID NO: 561291 - RNA, 21 nt, Artificial Sequence
  Synthetic
gaagugaaggaaagaagaaag

SEQ ID NO: 561292 - RNA, 22 nt, Artificial Sequence
  Synthetic
cgaagugaaggaaagaagaaag

SEQ ID NO: 561293 - RNA, 23 nt, Artificial Sequence
  Synthetic
acgaagugaaggaaagaagaaag

SEQ ID NO: 561294 - RNA, 24 nt, Artificial Sequence
  Synthetic
gacgaagugaaggaaagaagaaag

SEQ ID NO: 561295 - RNA, 18 nt, Artificial Sequence
  Synthetic
auaaacuaaagaagaaag

SEQ ID NO: 561296 - RNA, 19 nt, Artificial Sequence
  Synthetic
cauaaacuaaagaagaaag

SEQ ID NO: 561297 - RNA, 20 nt, Artificial Sequence
  Synthetic
ccauaaacuaaagaagaaag

SEQ ID NO: 561298 - RNA, 21 nt, Artificial Sequence
  Synthetic
uccauaaacuaaagaagaaag

SEQ ID NO: 561299 - RNA, 22 nt, Artificial Sequence
  Synthetic
cuccauaaacuaaagaagaaag

SEQ ID NO: 561300 - RNA, 23 nt, Artificial Sequence
  Synthetic
acuccauaaacuaaagaagaaag

SEQ ID NO: 561301 - RNA, 24 nt, Artificial Sequence
  Synthetic
gacuccauaaacuaaagaagaaag

SEQ ID NO: 561302 - RNA, 18 nt, Artificial Sequence
  Synthetic
caggauaagagaagaaag

SEQ ID NO: 561303 - RNA, 19 nt, Artificial Sequence
  Synthetic
acaggauaagagaagaaag

SEQ ID NO: 561304 - RNA, 20 nt, Artificial Sequence
  Synthetic
cacaggauaagagaagaaag

SEQ ID NO: 561305 - RNA, 21 nt, Artificial Sequence
  Synthetic
ccacaggauaagagaagaaag

SEQ ID NO: 561306 - RNA, 22 nt, Artificial Sequence
  Synthetic
uccacaggauaagagaagaaag

SEQ ID NO: 561307 - RNA, 23 nt, Artificial Sequence
  Synthetic
cuccacaggauaagagaagaaag

SEQ ID NO: 561308 - RNA, 24 nt, Artificial Sequence
  Synthetic
ccuccacaggauaagagaagaaag

SEQ ID NO: 561309 - RNA, 18 nt, Artificial Sequence
  Synthetic
gaaguuagaugaagaaag

SEQ ID NO: 561310 - RNA, 19 nt, Artificial Sequence
  Synthetic
ggaaguuagaugaagaaag

SEQ ID NO: 561311 - RNA, 20 nt, Artificial Sequence
  Synthetic
uggaaguuagaugaagaaag

SEQ ID NO: 561312 - RNA, 21 nt, Artificial Sequence
  Synthetic
guggaaguuagaugaagaaag

SEQ ID NO: 561313 - RNA, 22 nt, Artificial Sequence
  Synthetic
aguggaaguuagaugaagaaag

SEQ ID NO: 561314 - RNA, 23 nt, Artificial Sequence
  Synthetic
gaguggaaguuagaugaagaaag

SEQ ID NO: 561315 - RNA, 24 nt, Artificial Sequence
  Synthetic
ugaguggaaguuagaugaagaaag

SEQ ID NO: 561316 - RNA, 18 nt, Artificial Sequence
  Synthetic
aaagagguuugaagaaag

SEQ ID NO: 561317 - RNA, 19 nt, Artificial Sequence
  Synthetic
uaaagagguuugaagaaag

SEQ ID NO: 561318 - RNA, 20 nt, Artificial Sequence
  Synthetic
cuaaagagguuugaagaaag

SEQ ID NO: 561319 - RNA, 21 nt, Artificial Sequence
  Synthetic
gcuaaagagguuugaagaaag

SEQ ID NO: 561320 - RNA, 22 nt, Artificial Sequence
  Synthetic
agcuaaagagguuugaagaaag

SEQ ID NO: 561321 - RNA, 23 nt, Artificial Sequence
  Synthetic
aagcuaaagagguuugaagaaag

SEQ ID NO: 561322 - RNA, 24 nt, Artificial Sequence
  Synthetic
aaagcuaaagagguuugaagaaag

SEQ ID NO: 561323 - RNA, 18 nt, Artificial Sequence
  Synthetic
cugacugccaacagaaag

SEQ ID NO: 561324 - RNA, 19 nt, Artificial Sequence
  Synthetic
gcugacugccaacagaaag

SEQ ID NO: 561325 - RNA, 20 nt, Artificial Sequence
  Synthetic
ugcugacugccaacagaaag

SEQ ID NO: 561326 - RNA, 21 nt, Artificial Sequence
  Synthetic
cugcugacugccaacagaaag

SEQ ID NO: 561327 - RNA, 22 nt, Artificial Sequence
  Synthetic
gcugcugacugccaacagaaag

SEQ ID NO: 561328 - RNA, 23 nt, Artificial Sequence
  Synthetic
ggcugcugacugccaacagaaag

SEQ ID NO: 561329 - RNA, 24 nt, Artificial Sequence
  Synthetic
uggcugcugacugccaacagaaag

SEQ ID NO: 561330 - RNA, 18 nt, Artificial Sequence
  Synthetic
aauauauugcacagaaag

SEQ ID NO: 561331 - RNA, 19 nt, Artificial Sequence
  Synthetic
caauauauugcacagaaag

SEQ ID NO: 561332 - RNA, 20 nt, Artificial Sequence
  Synthetic
acaauauauugcacagaaag

SEQ ID NO: 561333 - RNA, 21 nt, Artificial Sequence
  Synthetic
uacaauauauugcacagaaag

SEQ ID NO: 561334 - RNA, 22 nt, Artificial Sequence
  Synthetic
auacaauauauugcacagaaag

SEQ ID NO: 561335 - RNA, 23 nt, Artificial Sequence
  Synthetic
uauacaauauauugcacagaaag

SEQ ID NO: 561336 - RNA, 24 nt, Artificial Sequence
  Synthetic
auauacaauauauugcacagaaag

SEQ ID NO: 561337 - RNA, 18 nt, Artificial Sequence
  Synthetic
ggaagaagaaccagaaag

SEQ ID NO: 561338 - RNA, 19 nt, Artificial Sequence
  Synthetic
aggaagaagaaccagaaag

SEQ ID NO: 561339 - RNA, 20 nt, Artificial Sequence
  Synthetic
gaggaagaagaaccagaaag

SEQ ID NO: 561340 - RNA, 21 nt, Artificial Sequence
  Synthetic
ggaggaagaagaaccagaaag

SEQ ID NO: 561341 - RNA, 22 nt, Artificial Sequence
  Synthetic
uggaggaagaagaaccagaaag

SEQ ID NO: 561342 - RNA, 23 nt, Artificial Sequence
  Synthetic
uuggaggaagaagaaccagaaag

SEQ ID NO: 561343 - RNA, 24 nt, Artificial Sequence
  Synthetic
uuuggaggaagaagaaccagaaag

SEQ ID NO: 561344 - RNA, 18 nt, Artificial Sequence
  Synthetic
cccuguccccccagaaag

SEQ ID NO: 561345 - RNA, 19 nt, Artificial Sequence
  Synthetic
ucccuguccccccagaaag

SEQ ID NO: 561346 - RNA, 20 nt, Artificial Sequence
  Synthetic
aucccuguccccccagaaag

SEQ ID NO: 561347 - RNA, 21 nt, Artificial Sequence
  Synthetic
uaucccuguccccccagaaag

SEQ ID NO: 561348 - RNA, 22 nt, Artificial Sequence
  Synthetic
auaucccuguccccccagaaag

SEQ ID NO: 561349 - RNA, 23 nt, Artificial Sequence
  Synthetic
cauaucccuguccccccagaaag

SEQ ID NO: 561350 - RNA, 24 nt, Artificial Sequence
  Synthetic
ucauaucccuguccccccagaaag

SEQ ID NO: 561351 - RNA, 18 nt, Artificial Sequence
  Synthetic
cccaaaguuagcagaaag

SEQ ID NO: 561352 - RNA, 19 nt, Artificial Sequence
  Synthetic
gcccaaaguuagcagaaag

SEQ ID NO: 561353 - RNA, 20 nt, Artificial Sequence
  Synthetic
agcccaaaguuagcagaaag

SEQ ID NO: 561354 - RNA, 21 nt, Artificial Sequence
  Synthetic
aagcccaaaguuagcagaaag

SEQ ID NO: 561355 - RNA, 22 nt, Artificial Sequence
  Synthetic
uaagcccaaaguuagcagaaag

SEQ ID NO: 561356 - RNA, 23 nt, Artificial Sequence
  Synthetic
uuaagcccaaaguuagcagaaag

SEQ ID NO: 561357 - RNA, 24 nt, Artificial Sequence
  Synthetic
auuaagcccaaaguuagcagaaag

SEQ ID NO: 561358 - RNA, 18 nt, Artificial Sequence
  Synthetic
gugucauuuagcagaaag

SEQ ID NO: 561359 - RNA, 19 nt, Artificial Sequence
  Synthetic
agugucauuuagcagaaag

SEQ ID NO: 561360 - RNA, 20 nt, Artificial Sequence
  Synthetic
gagugucauuuagcagaaag

SEQ ID NO: 561361 - RNA, 21 nt, Artificial Sequence
  Synthetic
ugagugucauuuagcagaaag

SEQ ID NO: 561362 - RNA, 22 nt, Artificial Sequence
  Synthetic
uugagugucauuuagcagaaag

SEQ ID NO: 561363 - RNA, 23 nt, Artificial Sequence
  Synthetic
auugagugucauuuagcagaaag

SEQ ID NO: 561364 - RNA, 24 nt, Artificial Sequence
  Synthetic
gauugagugucauuuagcagaaag

SEQ ID NO: 561365 - RNA, 18 nt, Artificial Sequence
  Synthetic
uugugggcuggcagaaag

SEQ ID NO: 561366 - RNA, 19 nt, Artificial Sequence
  Synthetic
uuugugggcuggcagaaag

SEQ ID NO: 561367 - RNA, 20 nt, Artificial Sequence
  Synthetic
uuuugugggcuggcagaaag

SEQ ID NO: 561368 - RNA, 21 nt, Artificial Sequence
  Synthetic
cuuuugugggcuggcagaaag

SEQ ID NO: 561369 - RNA, 22 nt, Artificial Sequence
  Synthetic
ccuuuugugggcuggcagaaag

SEQ ID NO: 561370 - RNA, 23 nt, Artificial Sequence
  Synthetic
uccuuuugugggcuggcagaaag

SEQ ID NO: 561371 - RNA, 24 nt, Artificial Sequence
  Synthetic
uuccuuuugugggcuggcagaaag

SEQ ID NO: 561372 - RNA, 18 nt, Artificial Sequence
  Synthetic
aguuucaaugucagaaag

SEQ ID NO: 561373 - RNA, 19 nt, Artificial Sequence
  Synthetic
aaguuucaaugucagaaag

SEQ ID NO: 561374 - RNA, 20 nt, Artificial Sequence
  Synthetic
aaaguuucaaugucagaaag

SEQ ID NO: 561375 - RNA, 21 nt, Artificial Sequence
  Synthetic
uaaaguuucaaugucagaaag

SEQ ID NO: 561376 - RNA, 22 nt, Artificial Sequence
  Synthetic
uuaaaguuucaaugucagaaag

SEQ ID NO: 561377 - RNA, 23 nt, Artificial Sequence
  Synthetic
uuuaaaguuucaaugucagaaag

SEQ ID NO: 561378 - RNA, 24 nt, Artificial Sequence
  Synthetic
uuuuaaaguuucaaugucagaaag

SEQ ID NO: 561379 - RNA, 18 nt, Artificial Sequence
  Synthetic
cuccauaaaaagagaaag

SEQ ID NO: 561380 - RNA, 19 nt, Artificial Sequence
  Synthetic
acuccauaaaaagagaaag

SEQ ID NO: 561381 - RNA, 20 nt, Artificial Sequence
  Synthetic
aacuccauaaaaagagaaag

SEQ ID NO: 561382 - RNA, 21 nt, Artificial Sequence
  Synthetic
gaacuccauaaaaagagaaag

SEQ ID NO: 561383 - RNA, 22 nt, Artificial Sequence
  Synthetic
ugaacuccauaaaaagagaaag

SEQ ID NO: 561384 - RNA, 23 nt, Artificial Sequence
  Synthetic
gugaacuccauaaaaagagaaag

SEQ ID NO: 561385 - RNA, 24 nt, Artificial Sequence
  Synthetic
agugaacuccauaaaaagagaaag

SEQ ID NO: 561386 - RNA, 18 nt, Artificial Sequence
  Synthetic
uucagaggaaagagaaag

SEQ ID NO: 561387 - RNA, 19 nt, Artificial Sequence
  Synthetic
uuucagaggaaagagaaag

SEQ ID NO: 561388 - RNA, 20 nt, Artificial Sequence
  Synthetic
auuucagaggaaagagaaag

SEQ ID NO: 561389 - RNA, 21 nt, Artificial Sequence
  Synthetic
aauuucagaggaaagagaaag

SEQ ID NO: 561390 - RNA, 22 nt, Artificial Sequence
  Synthetic
aaauuucagaggaaagagaaag

SEQ ID NO: 561391 - RNA, 23 nt, Artificial Sequence
  Synthetic
gaaauuucagaggaaagagaaag

SEQ ID NO: 561392 - RNA, 24 nt, Artificial Sequence
  Synthetic
ggaaauuucagaggaaagagaaag

SEQ ID NO: 561393 - RNA, 18 nt, Artificial Sequence
  Synthetic
aaugccuacaagagaaag

SEQ ID NO: 561394 - RNA, 19 nt, Artificial Sequence
  Synthetic
aaaugccuacaagagaaag

SEQ ID NO: 561395 - RNA, 20 nt, Artificial Sequence
  Synthetic
uaaaugccuacaagagaaag

SEQ ID NO: 561396 - RNA, 21 nt, Artificial Sequence
  Synthetic
cuaaaugccuacaagagaaag

SEQ ID NO: 561397 - RNA, 22 nt, Artificial Sequence
  Synthetic
acuaaaugccuacaagagaaag

SEQ ID NO: 561398 - RNA, 23 nt, Artificial Sequence
  Synthetic
cacuaaaugccuacaagagaaag

SEQ ID NO: 561399 - RNA, 24 nt, Artificial Sequence
  Synthetic
gcacuaaaugccuacaagagaaag

SEQ ID NO: 561400 - RNA, 18 nt, Artificial Sequence
  Synthetic
aaaugugcagagagaaag

SEQ ID NO: 561401 - RNA, 19 nt, Artificial Sequence
  Synthetic
aaaaugugcagagagaaag

SEQ ID NO: 561402 - RNA, 20 nt, Artificial Sequence
  Synthetic
caaaaugugcagagagaaag

SEQ ID NO: 561403 - RNA, 21 nt, Artificial Sequence
  Synthetic
ucaaaaugugcagagagaaag

SEQ ID NO: 561404 - RNA, 22 nt, Artificial Sequence
  Synthetic
cucaaaaugugcagagagaaag

SEQ ID NO: 561405 - RNA, 23 nt, Artificial Sequence
  Synthetic
acucaaaaugugcagagagaaag

SEQ ID NO: 561406 - RNA, 24 nt, Artificial Sequence
  Synthetic
uacucaaaaugugcagagagaaag

SEQ ID NO: 561407 - RNA, 18 nt, Artificial Sequence
  Synthetic
augggaagagagagaaag

SEQ ID NO: 561408 - RNA, 19 nt, Artificial Sequence
  Synthetic
gaugggaagagagagaaag

SEQ ID NO: 561409 - RNA, 20 nt, Artificial Sequence
  Synthetic
ggaugggaagagagagaaag

SEQ ID NO: 561410 - RNA, 21 nt, Artificial Sequence
  Synthetic
cggaugggaagagagagaaag

SEQ ID NO: 561411 - RNA, 22 nt, Artificial Sequence
  Synthetic
gcggaugggaagagagagaaag

SEQ ID NO: 561412 - RNA, 23 nt, Artificial Sequence
  Synthetic
agcggaugggaagagagagaaag

SEQ ID NO: 561413 - RNA, 24 nt, Artificial Sequence
  Synthetic
uagcggaugggaagagagagaaag

SEQ ID NO: 561414 - RNA, 18 nt, Artificial Sequence
  Synthetic
cagugaggggagagaaag

SEQ ID NO: 561415 - RNA, 19 nt, Artificial Sequence
  Synthetic
ccagugaggggagagaaag

SEQ ID NO: 561416 - RNA, 20 nt, Artificial Sequence
  Synthetic
cccagugaggggagagaaag

SEQ ID NO: 561417 - RNA, 21 nt, Artificial Sequence
  Synthetic
ucccagugaggggagagaaag

SEQ ID NO: 561418 - RNA, 22 nt, Artificial Sequence
  Synthetic
aucccagugaggggagagaaag

SEQ ID NO: 561419 - RNA, 23 nt, Artificial Sequence
  Synthetic
uaucccagugaggggagagaaag

SEQ ID NO: 561420 - RNA, 24 nt, Artificial Sequence
  Synthetic
uuaucccagugaggggagagaaag

SEQ ID NO: 561421 - RNA, 18 nt, Artificial Sequence
  Synthetic
uuguagauggagagaaag

SEQ ID NO: 561422 - RNA, 19 nt, Artificial Sequence
  Synthetic
cuuguagauggagagaaag

SEQ ID NO: 561423 - RNA, 20 nt, Artificial Sequence
  Synthetic
gcuuguagauggagagaaag

SEQ ID NO: 561424 - RNA, 21 nt, Artificial Sequence
  Synthetic
agcuuguagauggagagaaag

SEQ ID NO: 561425 - RNA, 22 nt, Artificial Sequence
  Synthetic
aagcuuguagauggagagaaag

SEQ ID NO: 561426 - RNA, 23 nt, Artificial Sequence
  Synthetic
gaagcuuguagauggagagaaag

SEQ ID NO: 561427 - RNA, 24 nt, Artificial Sequence
  Synthetic
ugaagcuuguagauggagagaaag

SEQ ID NO: 561428 - RNA, 18 nt, Artificial Sequence
  Synthetic
aagggaaaauagagaaag

SEQ ID NO: 561429 - RNA, 19 nt, Artificial Sequence
  Synthetic
uaagggaaaauagagaaag

SEQ ID NO: 561430 - RNA, 20 nt, Artificial Sequence
  Synthetic
guaagggaaaauagagaaag

SEQ ID NO: 561431 - RNA, 21 nt, Artificial Sequence
  Synthetic
uguaagggaaaauagagaaag

SEQ ID NO: 561432 - RNA, 22 nt, Artificial Sequence
  Synthetic
cuguaagggaaaauagagaaag

SEQ ID NO: 561433 - RNA, 23 nt, Artificial Sequence
  Synthetic
acuguaagggaaaauagagaaag

SEQ ID NO: 561434 - RNA, 24 nt, Artificial Sequence
  Synthetic
gacuguaagggaaaauagagaaag

SEQ ID NO: 561435 - RNA, 18 nt, Artificial Sequence
  Synthetic
caaugauccuugagaaag

SEQ ID NO: 561436 - RNA, 19 nt, Artificial Sequence
  Synthetic
gcaaugauccuugagaaag

SEQ ID NO: 561437 - RNA, 20 nt, Artificial Sequence
  Synthetic
ugcaaugauccuugagaaag

SEQ ID NO: 561438 - RNA, 21 nt, Artificial Sequence
  Synthetic
cugcaaugauccuugagaaag

SEQ ID NO: 561439 - RNA, 22 nt, Artificial Sequence
  Synthetic
ucugcaaugauccuugagaaag

SEQ ID NO: 561440 - RNA, 23 nt, Artificial Sequence
  Synthetic
cucugcaaugauccuugagaaag

SEQ ID NO: 561441 - RNA, 24 nt, Artificial Sequence
  Synthetic
gcucugcaaugauccuugagaaag

SEQ ID NO: 561442 - RNA, 18 nt, Artificial Sequence
  Synthetic
agucccuuagauagaaag

SEQ ID NO: 561443 - RNA, 19 nt, Artificial Sequence
  Synthetic
aagucccuuagauagaaag

SEQ ID NO: 561444 - RNA, 20 nt, Artificial Sequence
  Synthetic
gaagucccuuagauagaaag

SEQ ID NO: 561445 - RNA, 21 nt, Artificial Sequence
  Synthetic
agaagucccuuagauagaaag

SEQ ID NO: 561446 - RNA, 22 nt, Artificial Sequence
  Synthetic
gagaagucccuuagauagaaag

SEQ ID NO: 561447 - RNA, 23 nt, Artificial Sequence
  Synthetic
agagaagucccuuagauagaaag

SEQ ID NO: 561448 - RNA, 24 nt, Artificial Sequence
  Synthetic
cagagaagucccuuagauagaaag

SEQ ID NO: 561449 - RNA, 18 nt, Artificial Sequence
  Synthetic
cuagccauacguagaaag

SEQ ID NO: 561450 - RNA, 19 nt, Artificial Sequence
  Synthetic
gcuagccauacguagaaag

SEQ ID NO: 561451 - RNA, 20 nt, Artificial Sequence
  Synthetic
ggcuagccauacguagaaag

SEQ ID NO: 561452 - RNA, 21 nt, Artificial Sequence
  Synthetic
uggcuagccauacguagaaag

SEQ ID NO: 561453 - RNA, 22 nt, Artificial Sequence
  Synthetic
uuggcuagccauacguagaaag

SEQ ID NO: 561454 - RNA, 23 nt, Artificial Sequence
  Synthetic
auuggcuagccauacguagaaag

SEQ ID NO: 561455 - RNA, 24 nt, Artificial Sequence
  Synthetic
aauuggcuagccauacguagaaag

SEQ ID NO: 561456 - RNA, 18 nt, Artificial Sequence
  Synthetic
cucuaugggauuagaaag

SEQ ID NO: 561457 - RNA, 19 nt, Artificial Sequence
  Synthetic
gcucuaugggauuagaaag

SEQ ID NO: 561458 - RNA, 20 nt, Artificial Sequence
  Synthetic
ggcucuaugggauuagaaag

SEQ ID NO: 561459 - RNA, 21 nt, Artificial Sequence
  Synthetic
aggcucuaugggauuagaaag

SEQ ID NO: 561460 - RNA, 22 nt, Artificial Sequence
  Synthetic
caggcucuaugggauuagaaag

SEQ ID NO: 561461 - RNA, 23 nt, Artificial Sequence
  Synthetic
gcaggcucuaugggauuagaaag

SEQ ID NO: 561462 - RNA, 24 nt, Artificial Sequence
  Synthetic
ggcaggcucuaugggauuagaaag

SEQ ID NO: 561463 - RNA, 18 nt, Artificial Sequence
  Synthetic
aauucgaauauuagaaag

SEQ ID NO: 561464 - RNA, 19 nt, Artificial Sequence
  Synthetic
caauucgaauauuagaaag

SEQ ID NO: 561465 - RNA, 20 nt, Artificial Sequence
  Synthetic
gcaauucgaauauuagaaag

SEQ ID NO: 561466 - RNA, 21 nt, Artificial Sequence
  Synthetic
agcaauucgaauauuagaaag

SEQ ID NO: 561467 - RNA, 22 nt, Artificial Sequence
  Synthetic
gagcaauucgaauauuagaaag

SEQ ID NO: 561468 - RNA, 23 nt, Artificial Sequence
  Synthetic
ugagcaauucgaauauuagaaag

SEQ ID NO: 561469 - RNA, 24 nt, Artificial Sequence
  Synthetic
augagcaauucgaauauuagaaag

SEQ ID NO: 561470 - RNA, 18 nt, Artificial Sequence
  Synthetic
aggcaacugcuuagaaag

SEQ ID NO: 561471 - RNA, 19 nt, Artificial Sequence
  Synthetic
aaggcaacugcuuagaaag

SEQ ID NO: 561472 - RNA, 20 nt, Artificial Sequence
  Synthetic
aaaggcaacugcuuagaaag

SEQ ID NO: 561473 - RNA, 21 nt, Artificial Sequence
  Synthetic
gaaaggcaacugcuuagaaag

SEQ ID NO: 561474 - RNA, 22 nt, Artificial Sequence
  Synthetic
agaaaggcaacugcuuagaaag

SEQ ID NO: 561475 - RNA, 23 nt, Artificial Sequence
  Synthetic
aagaaaggcaacugcuuagaaag

SEQ ID NO: 561476 - RNA, 24 nt, Artificial Sequence
  Synthetic
uaagaaaggcaacugcuuagaaag

SEQ ID NO: 561477 - RNA, 18 nt, Artificial Sequence
  Synthetic
aggcaagugguuagaaag

SEQ ID NO: 561478 - RNA, 19 nt, Artificial Sequence
  Synthetic
aaggcaagugguuagaaag

SEQ ID NO: 561479 - RNA, 20 nt, Artificial Sequence
  Synthetic
aaaggcaagugguuagaaag

SEQ ID NO: 561480 - RNA, 21 nt, Artificial Sequence
  Synthetic
aaaaggcaagugguuagaaag

SEQ ID NO: 561481 - RNA, 22 nt, Artificial Sequence
  Synthetic
gaaaaggcaagugguuagaaag

SEQ ID NO: 561482 - RNA, 23 nt, Artificial Sequence
  Synthetic
agaaaaggcaagugguuagaaag

SEQ ID NO: 561483 - RNA, 24 nt, Artificial Sequence
  Synthetic
uagaaaaggcaagugguuagaaag

SEQ ID NO: 561484 - RNA, 18 nt, Artificial Sequence
  Synthetic
acugaucucaaaggaaag

SEQ ID NO: 561485 - RNA, 19 nt, Artificial Sequence
  Synthetic
cacugaucucaaaggaaag

SEQ ID NO: 561486 - RNA, 20 nt, Artificial Sequence
  Synthetic
gcacugaucucaaaggaaag

SEQ ID NO: 561487 - RNA, 21 nt, Artificial Sequence
  Synthetic
agcacugaucucaaaggaaag

SEQ ID NO: 561488 - RNA, 22 nt, Artificial Sequence
  Synthetic
gagcacugaucucaaaggaaag

SEQ ID NO: 561489 - RNA, 23 nt, Artificial Sequence
  Synthetic
agagcacugaucucaaaggaaag

SEQ ID NO: 561490 - RNA, 24 nt, Artificial Sequence
  Synthetic
gagagcacugaucucaaaggaaag

SEQ ID NO: 561491 - RNA, 18 nt, Artificial Sequence
  Synthetic
aaagaaaggaaaggaaag

SEQ ID NO: 561492 - RNA, 19 nt, Artificial Sequence
  Synthetic
aaaagaaaggaaaggaaag

SEQ ID NO: 561493 - RNA, 20 nt, Artificial Sequence
  Synthetic
caaaagaaaggaaaggaaag

SEQ ID NO: 561494 - RNA, 21 nt, Artificial Sequence
  Synthetic
acaaaagaaaggaaaggaaag

SEQ ID NO: 561495 - RNA, 22 nt, Artificial Sequence
  Synthetic
aacaaaagaaaggaaaggaaag

SEQ ID NO: 561496 - RNA, 23 nt, Artificial Sequence
  Synthetic
aaacaaaagaaaggaaaggaaag

SEQ ID NO: 561497 - RNA, 24 nt, Artificial Sequence
  Synthetic
gaaacaaaagaaaggaaaggaaag

SEQ ID NO: 561498 - RNA, 18 nt, Artificial Sequence
  Synthetic
aagauuaaccaaggaaag

SEQ ID NO: 561499 - RNA, 19 nt, Artificial Sequence
  Synthetic
caagauuaaccaaggaaag

SEQ ID NO: 561500 - RNA, 20 nt, Artificial Sequence
  Synthetic
gcaagauuaaccaaggaaag

SEQ ID NO: 561501 - RNA, 21 nt, Artificial Sequence
  Synthetic
agcaagauuaaccaaggaaag

SEQ ID NO: 561502 - RNA, 22 nt, Artificial Sequence
  Synthetic
uagcaagauuaaccaaggaaag

SEQ ID NO: 561503 - RNA, 23 nt, Artificial Sequence
  Synthetic
uuagcaagauuaaccaaggaaag

SEQ ID NO: 561504 - RNA, 24 nt, Artificial Sequence
  Synthetic
auuagcaagauuaaccaaggaaag

SEQ ID NO: 561505 - RNA, 18 nt, Artificial Sequence
  Synthetic
agaaaggaagaaggaaag

SEQ ID NO: 561506 - RNA, 19 nt, Artificial Sequence
  Synthetic
cagaaaggaagaaggaaag

SEQ ID NO: 561507 - RNA, 20 nt, Artificial Sequence
  Synthetic
acagaaaggaagaaggaaag

SEQ ID NO: 561508 - RNA, 21 nt, Artificial Sequence
  Synthetic
gacagaaaggaagaaggaaag

SEQ ID NO: 561509 - RNA, 22 nt, Artificial Sequence
  Synthetic
agacagaaaggaagaaggaaag

SEQ ID NO: 561510 - RNA, 23 nt, Artificial Sequence
  Synthetic
aagacagaaaggaagaaggaaag

SEQ ID NO: 561511 - RNA, 24 nt, Artificial Sequence
  Synthetic
aaagacagaaaggaagaaggaaag

SEQ ID NO: 561512 - RNA, 18 nt, Artificial Sequence
  Synthetic
aaauugggggaaggaaag

SEQ ID NO: 561513 - RNA, 19 nt, Artificial Sequence
  Synthetic
caaauugggggaaggaaag

SEQ ID NO: 561514 - RNA, 20 nt, Artificial Sequence
  Synthetic
ucaaauugggggaaggaaag

SEQ ID NO: 561515 - RNA, 21 nt, Artificial Sequence
  Synthetic
gucaaauugggggaaggaaag

SEQ ID NO: 561516 - RNA, 22 nt, Artificial Sequence
  Synthetic
ggucaaauugggggaaggaaag

SEQ ID NO: 561517 - RNA, 23 nt, Artificial Sequence
  Synthetic
uggucaaauugggggaaggaaag

SEQ ID NO: 561518 - RNA, 24 nt, Artificial Sequence
  Synthetic
cuggucaaauugggggaaggaaag

SEQ ID NO: 561519 - RNA, 18 nt, Artificial Sequence
  Synthetic
aagugaacugaaggaaag

SEQ ID NO: 561520 - RNA, 19 nt, Artificial Sequence
  Synthetic
gaagugaacugaaggaaag

SEQ ID NO: 561521 - RNA, 20 nt, Artificial Sequence
  Synthetic
ugaagugaacugaaggaaag

SEQ ID NO: 561522 - RNA, 21 nt, Artificial Sequence
  Synthetic
uugaagugaacugaaggaaag

SEQ ID NO: 561523 - RNA, 22 nt, Artificial Sequence
  Synthetic
cuugaagugaacugaaggaaag

SEQ ID NO: 561524 - RNA, 23 nt, Artificial Sequence
  Synthetic
ucuugaagugaacugaaggaaag

SEQ ID NO: 561525 - RNA, 24 nt, Artificial Sequence
  Synthetic
uucuugaagugaacugaaggaaag

SEQ ID NO: 561526 - RNA, 18 nt, Artificial Sequence
  Synthetic
ugacgaagugaaggaaag

SEQ ID NO: 561527 - RNA, 19 nt, Artificial Sequence
  Synthetic
uugacgaagugaaggaaag

SEQ ID NO: 561528 - RNA, 20 nt, Artificial Sequence
  Synthetic
guugacgaagugaaggaaag

SEQ ID NO: 561529 - RNA, 21 nt, Artificial Sequence
  Synthetic
aguugacgaagugaaggaaag

SEQ ID NO: 561530 - RNA, 22 nt, Artificial Sequence
  Synthetic
aaguugacgaagugaaggaaag

SEQ ID NO: 561531 - RNA, 23 nt, Artificial Sequence
  Synthetic
gaaguugacgaagugaaggaaag

SEQ ID NO: 561532 - RNA, 24 nt, Artificial Sequence
  Synthetic
agaaguugacgaagugaaggaaag

SEQ ID NO: 561533 - RNA, 18 nt, Artificial Sequence
  Synthetic
cuguagggaacaggaaag

SEQ ID NO: 561534 - RNA, 19 nt, Artificial Sequence
  Synthetic
acuguagggaacaggaaag

SEQ ID NO: 561535 - RNA, 20 nt, Artificial Sequence
  Synthetic
cacuguagggaacaggaaag

SEQ ID NO: 561536 - RNA, 21 nt, Artificial Sequence
  Synthetic
acacuguagggaacaggaaag

SEQ ID NO: 561537 - RNA, 22 nt, Artificial Sequence
  Synthetic
aacacuguagggaacaggaaag

SEQ ID NO: 561538 - RNA, 23 nt, Artificial Sequence
  Synthetic
aaacacuguagggaacaggaaag

SEQ ID NO: 561539 - RNA, 24 nt, Artificial Sequence
  Synthetic
gaaacacuguagggaacaggaaag

SEQ ID NO: 561540 - RNA, 18 nt, Artificial Sequence
  Synthetic
cucggggagagaggaaag

SEQ ID NO: 561541 - RNA, 19 nt, Artificial Sequence
  Synthetic
gcucggggagagaggaaag

SEQ ID NO: 561542 - RNA, 20 nt, Artificial Sequence
  Synthetic
agcucggggagagaggaaag

SEQ ID NO: 561543 - RNA, 21 nt, Artificial Sequence
  Synthetic
gagcucggggagagaggaaag

SEQ ID NO: 561544 - RNA, 22 nt, Artificial Sequence
  Synthetic
ggagcucggggagagaggaaag

SEQ ID NO: 561545 - RNA, 23 nt, Artificial Sequence
  Synthetic
uggagcucggggagagaggaaag

SEQ ID NO: 561546 - RNA, 24 nt, Artificial Sequence
  Synthetic
cuggagcucggggagagaggaaag

SEQ ID NO: 561547 - RNA, 18 nt, Artificial Sequence
  Synthetic
gaaaagaagggaggaaag

SEQ ID NO: 561548 - RNA, 19 nt, Artificial Sequence
  Synthetic
agaaaagaagggaggaaag

SEQ ID NO: 561549 - RNA, 20 nt, Artificial Sequence
  Synthetic
aagaaaagaagggaggaaag

SEQ ID NO: 561550 - RNA, 21 nt, Artificial Sequence
  Synthetic
gaagaaaagaagggaggaaag

SEQ ID NO: 561551 - RNA, 22 nt, Artificial Sequence
  Synthetic
ggaagaaaagaagggaggaaag

SEQ ID NO: 561552 - RNA, 23 nt, Artificial Sequence
  Synthetic
aggaagaaaagaagggaggaaag

SEQ ID NO: 561553 - RNA, 24 nt, Artificial Sequence
  Synthetic
gaggaagaaaagaagggaggaaag

SEQ ID NO: 561554 - RNA, 18 nt, Artificial Sequence
  Synthetic
uuucuauuuggaggaaag

SEQ ID NO: 561555 - RNA, 19 nt, Artificial Sequence
  Synthetic
auuucuauuuggaggaaag

SEQ ID NO: 561556 - RNA, 20 nt, Artificial Sequence
  Synthetic
cauuucuauuuggaggaaag

SEQ ID NO: 561557 - RNA, 21 nt, Artificial Sequence
  Synthetic
ucauuucuauuuggaggaaag

SEQ ID NO: 561558 - RNA, 22 nt, Artificial Sequence
  Synthetic
gucauuucuauuuggaggaaag

SEQ ID NO: 561559 - RNA, 23 nt, Artificial Sequence
  Synthetic
cgucauuucuauuuggaggaaag

SEQ ID NO: 561560 - RNA, 24 nt, Artificial Sequence
  Synthetic
acgucauuucuauuuggaggaaag

SEQ ID NO: 561561 - RNA, 18 nt, Artificial Sequence
  Synthetic
auucuacuaauaggaaag

SEQ ID NO: 561562 - RNA, 19 nt, Artificial Sequence
  Synthetic
uauucuacuaauaggaaag

SEQ ID NO: 561563 - RNA, 20 nt, Artificial Sequence
  Synthetic
guauucuacuaauaggaaag

SEQ ID NO: 561564 - RNA, 21 nt, Artificial Sequence
  Synthetic
aguauucuacuaauaggaaag

SEQ ID NO: 561565 - RNA, 22 nt, Artificial Sequence
  Synthetic
aaguauucuacuaauaggaaag

SEQ ID NO: 561566 - RNA, 23 nt, Artificial Sequence
  Synthetic
uaaguauucuacuaauaggaaag

SEQ ID NO: 561567 - RNA, 24 nt, Artificial Sequence
  Synthetic
uuaaguauucuacuaauaggaaag

SEQ ID NO: 561568 - RNA, 18 nt, Artificial Sequence
  Synthetic
gaagagcaucuaggaaag

SEQ ID NO: 561569 - RNA, 19 nt, Artificial Sequence
  Synthetic
ggaagagcaucuaggaaag

SEQ ID NO: 561570 - RNA, 20 nt, Artificial Sequence
  Synthetic
gggaagagcaucuaggaaag

SEQ ID NO: 561571 - RNA, 21 nt, Artificial Sequence
  Synthetic
agggaagagcaucuaggaaag

SEQ ID NO: 561572 - RNA, 22 nt, Artificial Sequence
  Synthetic
aagggaagagcaucuaggaaag

SEQ ID NO: 561573 - RNA, 23 nt, Artificial Sequence
  Synthetic
caagggaagagcaucuaggaaag

SEQ ID NO: 561574 - RNA, 24 nt, Artificial Sequence
  Synthetic
gcaagggaagagcaucuaggaaag

SEQ ID NO: 561575 - RNA, 18 nt, Artificial Sequence
  Synthetic
cauucagggaacggaaag

SEQ ID NO: 561576 - RNA, 19 nt, Artificial Sequence
  Synthetic
acauucagggaacggaaag

SEQ ID NO: 561577 - RNA, 20 nt, Artificial Sequence
  Synthetic
uacauucagggaacggaaag

SEQ ID NO: 561578 - RNA, 21 nt, Artificial Sequence
  Synthetic
uuacauucagggaacggaaag

SEQ ID NO: 561579 - RNA, 22 nt, Artificial Sequence
  Synthetic
cuuacauucagggaacggaaag

SEQ ID NO: 561580 - RNA, 23 nt, Artificial Sequence
  Synthetic
ucuuacauucagggaacggaaag

SEQ ID NO: 561581 - RNA, 24 nt, Artificial Sequence
  Synthetic
uucuuacauucagggaacggaaag

SEQ ID NO: 561582 - RNA, 18 nt, Artificial Sequence
  Synthetic
ugcuucccauacggaaag

SEQ ID NO: 561583 - RNA, 19 nt, Artificial Sequence
  Synthetic
uugcuucccauacggaaag

SEQ ID NO: 561584 - RNA, 20 nt, Artificial Sequence
  Synthetic
auugcuucccauacggaaag

SEQ ID NO: 561585 - RNA, 21 nt, Artificial Sequence
  Synthetic
uauugcuucccauacggaaag

SEQ ID NO: 561586 - RNA, 22 nt, Artificial Sequence
  Synthetic
guauugcuucccauacggaaag

SEQ ID NO: 561587 - RNA, 23 nt, Artificial Sequence
  Synthetic
uguauugcuucccauacggaaag

SEQ ID NO: 561588 - RNA, 24 nt, Artificial Sequence
  Synthetic
auguauugcuucccauacggaaag

SEQ ID NO: 561589 - RNA, 18 nt, Artificial Sequence
  Synthetic
augaauaaagagggaaag

SEQ ID NO: 561590 - RNA, 19 nt, Artificial Sequence
  Synthetic
caugaauaaagagggaaag

SEQ ID NO: 561591 - RNA, 20 nt, Artificial Sequence
  Synthetic
acaugaauaaagagggaaag

SEQ ID NO: 561592 - RNA, 21 nt, Artificial Sequence
  Synthetic
aacaugaauaaagagggaaag

SEQ ID NO: 561593 - RNA, 22 nt, Artificial Sequence
  Synthetic
uaacaugaauaaagagggaaag

SEQ ID NO: 561594 - RNA, 23 nt, Artificial Sequence
  Synthetic
guaacaugaauaaagagggaaag

SEQ ID NO: 561595 - RNA, 24 nt, Artificial Sequence
  Synthetic
uguaacaugaauaaagagggaaag

SEQ ID NO: 561596 - RNA, 18 nt, Artificial Sequence
  Synthetic
uagguauaagagggaaag

SEQ ID NO: 561597 - RNA, 19 nt, Artificial Sequence
  Synthetic
guagguauaagagggaaag

SEQ ID NO: 561598 - RNA, 20 nt, Artificial Sequence
  Synthetic
aguagguauaagagggaaag

SEQ ID NO: 561599 - RNA, 21 nt, Artificial Sequence
  Synthetic
aaguagguauaagagggaaag

SEQ ID NO: 561600 - RNA, 22 nt, Artificial Sequence
  Synthetic
uaaguagguauaagagggaaag

SEQ ID NO: 561601 - RNA, 23 nt, Artificial Sequence
  Synthetic
cuaaguagguauaagagggaaag

SEQ ID NO: 561602 - RNA, 24 nt, Artificial Sequence
  Synthetic
ccuaaguagguauaagagggaaag

SEQ ID NO: 561603 - RNA, 18 nt, Artificial Sequence
  Synthetic
uuugcaccucggggaaag

SEQ ID NO: 561604 - RNA, 19 nt, Artificial Sequence
  Synthetic
guuugcaccucggggaaag

SEQ ID NO: 561605 - RNA, 20 nt, Artificial Sequence
  Synthetic
aguuugcaccucggggaaag

SEQ ID NO: 561606 - RNA, 21 nt, Artificial Sequence
  Synthetic
caguuugcaccucggggaaag

SEQ ID NO: 561607 - RNA, 22 nt, Artificial Sequence
  Synthetic
gcaguuugcaccucggggaaag

SEQ ID NO: 561608 - RNA, 23 nt, Artificial Sequence
  Synthetic
agcaguuugcaccucggggaaag

SEQ ID NO: 561609 - RNA, 24 nt, Artificial Sequence
  Synthetic
gagcaguuugcaccucggggaaag

SEQ ID NO: 561610 - RNA, 18 nt, Artificial Sequence
  Synthetic
guagugguagggggaaag

SEQ ID NO: 561611 - RNA, 19 nt, Artificial Sequence
  Synthetic
gguagugguagggggaaag

SEQ ID NO: 561612 - RNA, 20 nt, Artificial Sequence
  Synthetic
ggguagugguagggggaaag

SEQ ID NO: 561613 - RNA, 21 nt, Artificial Sequence
  Synthetic
aggguagugguagggggaaag

SEQ ID NO: 561614 - RNA, 22 nt, Artificial Sequence
  Synthetic
aaggguagugguagggggaaag

SEQ ID NO: 561615 - RNA, 23 nt, Artificial Sequence
  Synthetic
gaaggguagugguagggggaaag

SEQ ID NO: 561616 - RNA, 24 nt, Artificial Sequence
  Synthetic
ggaaggguagugguagggggaaag

SEQ ID NO: 561617 - RNA, 18 nt, Artificial Sequence
  Synthetic
auacuucuccauggaaag

SEQ ID NO: 561618 - RNA, 19 nt, Artificial Sequence
  Synthetic
gauacuucuccauggaaag

SEQ ID NO: 561619 - RNA, 20 nt, Artificial Sequence
  Synthetic
ugauacuucuccauggaaag

SEQ ID NO: 561620 - RNA, 21 nt, Artificial Sequence
  Synthetic
uugauacuucuccauggaaag

SEQ ID NO: 561621 - RNA, 22 nt, Artificial Sequence
  Synthetic
uuugauacuucuccauggaaag

SEQ ID NO: 561622 - RNA, 23 nt, Artificial Sequence
  Synthetic
uuuugauacuucuccauggaaag

SEQ ID NO: 561623 - RNA, 24 nt, Artificial Sequence
  Synthetic
uuuuugauacuucuccauggaaag

SEQ ID NO: 561624 - RNA, 18 nt, Artificial Sequence
  Synthetic
uaguaguaguauggaaag

SEQ ID NO: 561625 - RNA, 19 nt, Artificial Sequence
  Synthetic
guaguaguaguauggaaag

SEQ ID NO: 561626 - RNA, 20 nt, Artificial Sequence
  Synthetic
aguaguaguaguauggaaag

SEQ ID NO: 561627 - RNA, 21 nt, Artificial Sequence
  Synthetic
uaguaguaguaguauggaaag

SEQ ID NO: 561628 - RNA, 22 nt, Artificial Sequence
  Synthetic
guaguaguaguaguauggaaag

SEQ ID NO: 561629 - RNA, 23 nt, Artificial Sequence
  Synthetic
gguaguaguaguaguauggaaag

SEQ ID NO: 561630 - RNA, 24 nt, Artificial Sequence
  Synthetic
ugguaguaguaguaguauggaaag

SEQ ID NO: 561631 - RNA, 18 nt, Artificial Sequence
  Synthetic
ugauugaauccuggaaag

SEQ ID NO: 561632 - RNA, 19 nt, Artificial Sequence
  Synthetic
gugauugaauccuggaaag

SEQ ID NO: 561633 - RNA, 20 nt, Artificial Sequence
  Synthetic
ugugauugaauccuggaaag

SEQ ID NO: 561634 - RNA, 21 nt, Artificial Sequence
  Synthetic
uugugauugaauccuggaaag

SEQ ID NO: 561635 - RNA, 22 nt, Artificial Sequence
  Synthetic
auugugauugaauccuggaaag

SEQ ID NO: 561636 - RNA, 23 nt, Artificial Sequence
  Synthetic
aauugugauugaauccuggaaag

SEQ ID NO: 561637 - RNA, 24 nt, Artificial Sequence
  Synthetic
caauugugauugaauccuggaaag

SEQ ID NO: 561638 - RNA, 18 nt, Artificial Sequence
  Synthetic
ugugagagaucuggaaag

SEQ ID NO: 561639 - RNA, 19 nt, Artificial Sequence
  Synthetic
uugugagagaucuggaaag

SEQ ID NO: 561640 - RNA, 20 nt, Artificial Sequence
  Synthetic
cuugugagagaucuggaaag

SEQ ID NO: 561641 - RNA, 21 nt, Artificial Sequence
  Synthetic
acuugugagagaucuggaaag

SEQ ID NO: 561642 - RNA, 22 nt, Artificial Sequence
  Synthetic
uacuugugagagaucuggaaag

SEQ ID NO: 561643 - RNA, 23 nt, Artificial Sequence
  Synthetic
auacuugugagagaucuggaaag

SEQ ID NO: 561644 - RNA, 24 nt, Artificial Sequence
  Synthetic
uauacuugugagagaucuggaaag

SEQ ID NO: 561645 - RNA, 18 nt, Artificial Sequence
  Synthetic
aguaugcaagguggaaag

SEQ ID NO: 561646 - RNA, 19 nt, Artificial Sequence
  Synthetic
uaguaugcaagguggaaag

SEQ ID NO: 561647 - RNA, 20 nt, Artificial Sequence
  Synthetic
auaguaugcaagguggaaag

SEQ ID NO: 561648 - RNA, 21 nt, Artificial Sequence
  Synthetic
uauaguaugcaagguggaaag

SEQ ID NO: 561649 - RNA, 22 nt, Artificial Sequence
  Synthetic
auauaguaugcaagguggaaag

SEQ ID NO: 561650 - RNA, 23 nt, Artificial Sequence
  Synthetic
uauauaguaugcaagguggaaag

SEQ ID NO: 561651 - RNA, 24 nt, Artificial Sequence
  Synthetic
uuauauaguaugcaagguggaaag

SEQ ID NO: 561652 - RNA, 18 nt, Artificial Sequence
  Synthetic
uguggucauuguggaaag

SEQ ID NO: 561653 - RNA, 19 nt, Artificial Sequence
  Synthetic
uuguggucauuguggaaag

SEQ ID NO: 561654 - RNA, 20 nt, Artificial Sequence
  Synthetic
cuuguggucauuguggaaag

SEQ ID NO: 561655 - RNA, 21 nt, Artificial Sequence
  Synthetic
acuuguggucauuguggaaag

SEQ ID NO: 561656 - RNA, 22 nt, Artificial Sequence
  Synthetic
aacuuguggucauuguggaaag

SEQ ID NO: 561657 - RNA, 23 nt, Artificial Sequence
  Synthetic
uaacuuguggucauuguggaaag

SEQ ID NO: 561658 - RNA, 24 nt, Artificial Sequence
  Synthetic
auaacuuguggucauuguggaaag

SEQ ID NO: 561659 - RNA, 18 nt, Artificial Sequence
  Synthetic
uugaagcaaauuggaaag

SEQ ID NO: 561660 - RNA, 19 nt, Artificial Sequence
  Synthetic
uuugaagcaaauuggaaag

SEQ ID NO: 561661 - RNA, 20 nt, Artificial Sequence
  Synthetic
auuugaagcaaauuggaaag

SEQ ID NO: 561662 - RNA, 21 nt, Artificial Sequence
  Synthetic
cauuugaagcaaauuggaaag

SEQ ID NO: 561663 - RNA, 22 nt, Artificial Sequence
  Synthetic
gcauuugaagcaaauuggaaag

SEQ ID NO: 561664 - RNA, 23 nt, Artificial Sequence
  Synthetic
agcauuugaagcaaauuggaaag

SEQ ID NO: 561665 - RNA, 24 nt, Artificial Sequence
  Synthetic
cagcauuugaagcaaauuggaaag

SEQ ID NO: 561666 - RNA, 18 nt, Artificial Sequence
  Synthetic
ugccaccuguuuggaaag

SEQ ID NO: 561667 - RNA, 19 nt, Artificial Sequence
  Synthetic
gugccaccuguuuggaaag

SEQ ID NO: 561668 - RNA, 20 nt, Artificial Sequence
  Synthetic
ggugccaccuguuuggaaag

SEQ ID NO: 561669 - RNA, 21 nt, Artificial Sequence
  Synthetic
uggugccaccuguuuggaaag

SEQ ID NO: 561670 - RNA, 22 nt, Artificial Sequence
  Synthetic
guggugccaccuguuuggaaag

SEQ ID NO: 561671 - RNA, 23 nt, Artificial Sequence
  Synthetic
uguggugccaccuguuuggaaag

SEQ ID NO: 561672 - RNA, 24 nt, Artificial Sequence
  Synthetic
uuguggugccaccuguuuggaaag

SEQ ID NO: 561673 - RNA, 18 nt, Artificial Sequence
  Synthetic
uaaaucuaaaaaugaaag

SEQ ID NO: 561674 - RNA, 19 nt, Artificial Sequence
  Synthetic
auaaaucuaaaaaugaaag

SEQ ID NO: 561675 - RNA, 20 nt, Artificial Sequence
  Synthetic
gauaaaucuaaaaaugaaag

SEQ ID NO: 561676 - RNA, 21 nt, Artificial Sequence
  Synthetic
ggauaaaucuaaaaaugaaag

SEQ ID NO: 561677 - RNA, 22 nt, Artificial Sequence
  Synthetic
aggauaaaucuaaaaaugaaag

SEQ ID NO: 561678 - RNA, 23 nt, Artificial Sequence
  Synthetic
caggauaaaucuaaaaaugaaag

SEQ ID NO: 561679 - RNA, 24 nt, Artificial Sequence
  Synthetic
gcaggauaaaucuaaaaaugaaag

SEQ ID NO: 561680 - RNA, 18 nt, Artificial Sequence
  Synthetic
uaaaaucagaaaugaaag

SEQ ID NO: 561681 - RNA, 19 nt, Artificial Sequence
  Synthetic
guaaaaucagaaaugaaag

SEQ ID NO: 561682 - RNA, 20 nt, Artificial Sequence
  Synthetic
aguaaaaucagaaaugaaag

SEQ ID NO: 561683 - RNA, 21 nt, Artificial Sequence
  Synthetic
aaguaaaaucagaaaugaaag

SEQ ID NO: 561684 - RNA, 22 nt, Artificial Sequence
  Synthetic
uaaguaaaaucagaaaugaaag

SEQ ID NO: 561685 - RNA, 23 nt, Artificial Sequence
  Synthetic
auaaguaaaaucagaaaugaaag

SEQ ID NO: 561686 - RNA, 24 nt, Artificial Sequence
  Synthetic
aauaaguaaaaucagaaaugaaag

SEQ ID NO: 561687 - RNA, 18 nt, Artificial Sequence
  Synthetic
gguaaugggaaaugaaag

SEQ ID NO: 561688 - RNA, 19 nt, Artificial Sequence
  Synthetic
ugguaaugggaaaugaaag

SEQ ID NO: 561689 - RNA, 20 nt, Artificial Sequence
  Synthetic
uugguaaugggaaaugaaag

SEQ ID NO: 561690 - RNA, 21 nt, Artificial Sequence
  Synthetic
uuugguaaugggaaaugaaag

SEQ ID NO: 561691 - RNA, 22 nt, Artificial Sequence
  Synthetic
uuuugguaaugggaaaugaaag

SEQ ID NO: 561692 - RNA, 23 nt, Artificial Sequence
  Synthetic
auuuugguaaugggaaaugaaag

SEQ ID NO: 561693 - RNA, 24 nt, Artificial Sequence
  Synthetic
aauuuugguaaugggaaaugaaag

SEQ ID NO: 561694 - RNA, 18 nt, Artificial Sequence
  Synthetic
uacuuaugacaaugaaag

SEQ ID NO: 561695 - RNA, 19 nt, Artificial Sequence
  Synthetic
auacuuaugacaaugaaag

SEQ ID NO: 561696 - RNA, 20 nt, Artificial Sequence
  Synthetic
aauacuuaugacaaugaaag

SEQ ID NO: 561697 - RNA, 21 nt, Artificial Sequence
  Synthetic
gaauacuuaugacaaugaaag

SEQ ID NO: 561698 - RNA, 22 nt, Artificial Sequence
  Synthetic
ggaauacuuaugacaaugaaag

SEQ ID NO: 561699 - RNA, 23 nt, Artificial Sequence
  Synthetic
uggaauacuuaugacaaugaaag

SEQ ID NO: 561700 - RNA, 24 nt, Artificial Sequence
  Synthetic
guggaauacuuaugacaaugaaag

SEQ ID NO: 561701 - RNA, 18 nt, Artificial Sequence
  Synthetic
gcuguaaagacaugaaag

SEQ ID NO: 561702 - RNA, 19 nt, Artificial Sequence
  Synthetic
ugcuguaaagacaugaaag

SEQ ID NO: 561703 - RNA, 20 nt, Artificial Sequence
  Synthetic
uugcuguaaagacaugaaag

SEQ ID NO: 561704 - RNA, 21 nt, Artificial Sequence
  Synthetic
guugcuguaaagacaugaaag

SEQ ID NO: 561705 - RNA, 22 nt, Artificial Sequence
  Synthetic
uguugcuguaaagacaugaaag

SEQ ID NO: 561706 - RNA, 23 nt, Artificial Sequence
  Synthetic
auguugcuguaaagacaugaaag

SEQ ID NO: 561707 - RNA, 24 nt, Artificial Sequence
  Synthetic
cauguugcuguaaagacaugaaag

SEQ ID NO: 561708 - RNA, 18 nt, Artificial Sequence
  Synthetic
guauggaggggaugaaag

SEQ ID NO: 561709 - RNA, 19 nt, Artificial Sequence
  Synthetic
cguauggaggggaugaaag

SEQ ID NO: 561710 - RNA, 20 nt, Artificial Sequence
  Synthetic
acguauggaggggaugaaag

SEQ ID NO: 561711 - RNA, 21 nt, Artificial Sequence
  Synthetic
cacguauggaggggaugaaag

SEQ ID NO: 561712 - RNA, 22 nt, Artificial Sequence
  Synthetic
ccacguauggaggggaugaaag

SEQ ID NO: 561713 - RNA, 23 nt, Artificial Sequence
  Synthetic
accacguauggaggggaugaaag

SEQ ID NO: 561714 - RNA, 24 nt, Artificial Sequence
  Synthetic
aaccacguauggaggggaugaaag

SEQ ID NO: 561715 - RNA, 18 nt, Artificial Sequence
  Synthetic
aacuccaaaauaugaaag

SEQ ID NO: 561716 - RNA, 19 nt, Artificial Sequence
  Synthetic
gaacuccaaaauaugaaag

SEQ ID NO: 561717 - RNA, 20 nt, Artificial Sequence
  Synthetic
agaacuccaaaauaugaaag

SEQ ID NO: 561718 - RNA, 21 nt, Artificial Sequence
  Synthetic
aagaacuccaaaauaugaaag

SEQ ID NO: 561719 - RNA, 22 nt, Artificial Sequence
  Synthetic
uaagaacuccaaaauaugaaag

SEQ ID NO: 561720 - RNA, 23 nt, Artificial Sequence
  Synthetic
cuaagaacuccaaaauaugaaag

SEQ ID NO: 561721 - RNA, 24 nt, Artificial Sequence
  Synthetic
ucuaagaacuccaaaauaugaaag

SEQ ID NO: 561722 - RNA, 18 nt, Artificial Sequence
  Synthetic
aaaacaauuauaugaaag

SEQ ID NO: 561723 - RNA, 19 nt, Artificial Sequence
  Synthetic
aaaaacaauuauaugaaag

SEQ ID NO: 561724 - RNA, 20 nt, Artificial Sequence
  Synthetic
caaaaacaauuauaugaaag

SEQ ID NO: 561725 - RNA, 21 nt, Artificial Sequence
  Synthetic
acaaaaacaauuauaugaaag

SEQ ID NO: 561726 - RNA, 22 nt, Artificial Sequence
  Synthetic
aacaaaaacaauuauaugaaag

SEQ ID NO: 561727 - RNA, 23 nt, Artificial Sequence
  Synthetic
aaacaaaaacaauuauaugaaag

SEQ ID NO: 561728 - RNA, 24 nt, Artificial Sequence
  Synthetic
aaaacaaaaacaauuauaugaaag

SEQ ID NO: 561729 - RNA, 18 nt, Artificial Sequence
  Synthetic
aacucuauacuaugaaag

SEQ ID NO: 561730 - RNA, 19 nt, Artificial Sequence
  Synthetic
gaacucuauacuaugaaag

SEQ ID NO: 561731 - RNA, 20 nt, Artificial Sequence
  Synthetic
agaacucuauacuaugaaag

SEQ ID NO: 561732 - RNA, 21 nt, Artificial Sequence
  Synthetic
aagaacucuauacuaugaaag

SEQ ID NO: 561733 - RNA, 22 nt, Artificial Sequence
  Synthetic
caagaacucuauacuaugaaag

SEQ ID NO: 561734 - RNA, 23 nt, Artificial Sequence
  Synthetic
gcaagaacucuauacuaugaaag

SEQ ID NO: 561735 - RNA, 24 nt, Artificial Sequence
  Synthetic
agcaagaacucuauacuaugaaag

SEQ ID NO: 561736 - RNA, 18 nt, Artificial Sequence
  Synthetic
ugacuuuugcuaugaaag

SEQ ID NO: 561737 - RNA, 19 nt, Artificial Sequence
  Synthetic
cugacuuuugcuaugaaag

SEQ ID NO: 561738 - RNA, 20 nt, Artificial Sequence
  Synthetic
acugacuuuugcuaugaaag

SEQ ID NO: 561739 - RNA, 21 nt, Artificial Sequence
  Synthetic
cacugacuuuugcuaugaaag

SEQ ID NO: 561740 - RNA, 22 nt, Artificial Sequence
  Synthetic
ucacugacuuuugcuaugaaag

SEQ ID NO: 561741 - RNA, 23 nt, Artificial Sequence
  Synthetic
aucacugacuuuugcuaugaaag

SEQ ID NO: 561742 - RNA, 24 nt, Artificial Sequence
  Synthetic
uaucacugacuuuugcuaugaaag

SEQ ID NO: 561743 - RNA, 18 nt, Artificial Sequence
  Synthetic
auauauguuuuaugaaag

SEQ ID NO: 561744 - RNA, 19 nt, Artificial Sequence
  Synthetic
aauauauguuuuaugaaag

SEQ ID NO: 561745 - RNA, 20 nt, Artificial Sequence
  Synthetic
caauauauguuuuaugaaag

SEQ ID NO: 561746 - RNA, 21 nt, Artificial Sequence
  Synthetic
acaauauauguuuuaugaaag

SEQ ID NO: 561747 - RNA, 22 nt, Artificial Sequence
  Synthetic
uacaauauauguuuuaugaaag

SEQ ID NO: 561748 - RNA, 23 nt, Artificial Sequence
  Synthetic
uuacaauauauguuuuaugaaag

SEQ ID NO: 561749 - RNA, 24 nt, Artificial Sequence
  Synthetic
auuacaauauauguuuuaugaaag

SEQ ID NO: 561750 - RNA, 18 nt, Artificial Sequence
  Synthetic
ucugagagaaccugaaag

SEQ ID NO: 561751 - RNA, 19 nt, Artificial Sequence
  Synthetic
aucugagagaaccugaaag

SEQ ID NO: 561752 - RNA, 20 nt, Artificial Sequence
  Synthetic
gaucugagagaaccugaaag

SEQ ID NO: 561753 - RNA, 21 nt, Artificial Sequence
  Synthetic
agaucugagagaaccugaaag

SEQ ID NO: 561754 - RNA, 22 nt, Artificial Sequence
  Synthetic
gagaucugagagaaccugaaag

SEQ ID NO: 561755 - RNA, 23 nt, Artificial Sequence
  Synthetic
agagaucugagagaaccugaaag

SEQ ID NO: 561756 - RNA, 24 nt, Artificial Sequence
  Synthetic
gagagaucugagagaaccugaaag

SEQ ID NO: 561757 - RNA, 18 nt, Artificial Sequence
  Synthetic
uaaaacaaauccugaaag

SEQ ID NO: 561758 - RNA, 19 nt, Artificial Sequence
  Synthetic
auaaaacaaauccugaaag

SEQ ID NO: 561759 - RNA, 20 nt, Artificial Sequence
  Synthetic
aauaaaacaaauccugaaag

SEQ ID NO: 561760 - RNA, 21 nt, Artificial Sequence
  Synthetic
aaauaaaacaaauccugaaag

SEQ ID NO: 561761 - RNA, 22 nt, Artificial Sequence
  Synthetic
aaaauaaaacaaauccugaaag

SEQ ID NO: 561762 - RNA, 23 nt, Artificial Sequence
  Synthetic
aaaaauaaaacaaauccugaaag

SEQ ID NO: 561763 - RNA, 24 nt, Artificial Sequence
  Synthetic
aaaaaauaaaacaaauccugaaag

SEQ ID NO: 561764 - RNA, 18 nt, Artificial Sequence
  Synthetic
guaacauaaaagugaaag

SEQ ID NO: 561765 - RNA, 19 nt, Artificial Sequence
  Synthetic
cguaacauaaaagugaaag

SEQ ID NO: 561766 - RNA, 20 nt, Artificial Sequence
  Synthetic
ccguaacauaaaagugaaag

SEQ ID NO: 561767 - RNA, 21 nt, Artificial Sequence
  Synthetic
uccguaacauaaaagugaaag

SEQ ID NO: 561768 - RNA, 22 nt, Artificial Sequence
  Synthetic
cuccguaacauaaaagugaaag

SEQ ID NO: 561769 - RNA, 23 nt, Artificial Sequence
  Synthetic
ucuccguaacauaaaagugaaag

SEQ ID NO: 561770 - RNA, 24 nt, Artificial Sequence
  Synthetic
cucuccguaacauaaaagugaaag

SEQ ID NO: 561771 - RNA, 18 nt, Artificial Sequence
  Synthetic
uaguguuacaagugaaag

SEQ ID NO: 561772 - RNA, 19 nt, Artificial Sequence
  Synthetic
auaguguuacaagugaaag

SEQ ID NO: 561773 - RNA, 20 nt, Artificial Sequence
  Synthetic
cauaguguuacaagugaaag

SEQ ID NO: 561774 - RNA, 21 nt, Artificial Sequence
  Synthetic
gcauaguguuacaagugaaag

SEQ ID NO: 561775 - RNA, 22 nt, Artificial Sequence
  Synthetic
ugcauaguguuacaagugaaag

SEQ ID NO: 561776 - RNA, 23 nt, Artificial Sequence
  Synthetic
cugcauaguguuacaagugaaag

SEQ ID NO: 561777 - RNA, 24 nt, Artificial Sequence
  Synthetic
ccugcauaguguuacaagugaaag

SEQ ID NO: 561778 - RNA, 18 nt, Artificial Sequence
  Synthetic
ugcccaaagcagugaaag

SEQ ID NO: 561779 - RNA, 19 nt, Artificial Sequence
  Synthetic
uugcccaaagcagugaaag

SEQ ID NO: 561780 - RNA, 20 nt, Artificial Sequence
  Synthetic
guugcccaaagcagugaaag

SEQ ID NO: 561781 - RNA, 21 nt, Artificial Sequence
  Synthetic
uguugcccaaagcagugaaag

SEQ ID NO: 561782 - RNA, 22 nt, Artificial Sequence
  Synthetic
cuguugcccaaagcagugaaag

SEQ ID NO: 561783 - RNA, 23 nt, Artificial Sequence
  Synthetic
gcuguugcccaaagcagugaaag

SEQ ID NO: 561784 - RNA, 24 nt, Artificial Sequence
  Synthetic
agcuguugcccaaagcagugaaag

SEQ ID NO: 561785 - RNA, 18 nt, Artificial Sequence
  Synthetic
uugaaccuagagugaaag

SEQ ID NO: 561786 - RNA, 19 nt, Artificial Sequence
  Synthetic
uuugaaccuagagugaaag

SEQ ID NO: 561787 - RNA, 20 nt, Artificial Sequence
  Synthetic
auuugaaccuagagugaaag

SEQ ID NO: 561788 - RNA, 21 nt, Artificial Sequence
  Synthetic
gauuugaaccuagagugaaag

SEQ ID NO: 561789 - RNA, 22 nt, Artificial Sequence
  Synthetic
ugauuugaaccuagagugaaag

SEQ ID NO: 561790 - RNA, 23 nt, Artificial Sequence
  Synthetic
augauuugaaccuagagugaaag

SEQ ID NO: 561791 - RNA, 24 nt, Artificial Sequence
  Synthetic
aaugauuugaaccuagagugaaag

SEQ ID NO: 561792 - RNA, 18 nt, Artificial Sequence
  Synthetic
caaacggacaggugaaag

SEQ ID NO: 561793 - RNA, 19 nt, Artificial Sequence
  Synthetic
acaaacggacaggugaaag

SEQ ID NO: 561794 - RNA, 20 nt, Artificial Sequence
  Synthetic
aacaaacggacaggugaaag

SEQ ID NO: 561795 - RNA, 21 nt, Artificial Sequence
  Synthetic
uaacaaacggacaggugaaag

SEQ ID NO: 561796 - RNA, 22 nt, Artificial Sequence
  Synthetic
cuaacaaacggacaggugaaag

SEQ ID NO: 561797 - RNA, 23 nt, Artificial Sequence
  Synthetic
acuaacaaacggacaggugaaag

SEQ ID NO: 561798 - RNA, 24 nt, Artificial Sequence
  Synthetic
cacuaacaaacggacaggugaaag

SEQ ID NO: 561799 - RNA, 18 nt, Artificial Sequence
  Synthetic
agacugaauuugugaaag

SEQ ID NO: 561800 - RNA, 19 nt, Artificial Sequence
  Synthetic
aagacugaauuugugaaag

SEQ ID NO: 561801 - RNA, 20 nt, Artificial Sequence
  Synthetic
gaagacugaauuugugaaag

SEQ ID NO: 561802 - RNA, 21 nt, Artificial Sequence
  Synthetic
ugaagacugaauuugugaaag

SEQ ID NO: 561803 - RNA, 22 nt, Artificial Sequence
  Synthetic
augaagacugaauuugugaaag

SEQ ID NO: 561804 - RNA, 23 nt, Artificial Sequence
  Synthetic
aaugaagacugaauuugugaaag

SEQ ID NO: 561805 - RNA, 24 nt, Artificial Sequence
  Synthetic
gaaugaagacugaauuugugaaag

SEQ ID NO: 561806 - RNA, 18 nt, Artificial Sequence
  Synthetic
uuuuuaauuuugugaaag

SEQ ID NO: 561807 - RNA, 19 nt, Artificial Sequence
  Synthetic
uuuuuuaauuuugugaaag

SEQ ID NO: 561808 - RNA, 20 nt, Artificial Sequence
  Synthetic
uuuuuuuaauuuugugaaag

SEQ ID NO: 561809 - RNA, 21 nt, Artificial Sequence
  Synthetic
guuuuuuuaauuuugugaaag

SEQ ID NO: 561810 - RNA, 22 nt, Artificial Sequence
  Synthetic
gguuuuuuuaauuuugugaaag

SEQ ID NO: 561811 - RNA, 23 nt, Artificial Sequence
  Synthetic
agguuuuuuuaauuuugugaaag

SEQ ID NO: 561812 - RNA, 24 nt, Artificial Sequence
  Synthetic
cagguuuuuuuaauuuugugaaag

SEQ ID NO: 561813 - RNA, 18 nt, Artificial Sequence
  Synthetic
gauuuuuuuaauugaaag

SEQ ID NO: 561814 - RNA, 19 nt, Artificial Sequence
  Synthetic
agauuuuuuuaauugaaag

SEQ ID NO: 561815 - RNA, 20 nt, Artificial Sequence
  Synthetic
gagauuuuuuuaauugaaag

SEQ ID NO: 561816 - RNA, 21 nt, Artificial Sequence
  Synthetic
agagauuuuuuuaauugaaag

SEQ ID NO: 561817 - RNA, 22 nt, Artificial Sequence
  Synthetic
uagagauuuuuuuaauugaaag

SEQ ID NO: 561818 - RNA, 23 nt, Artificial Sequence
  Synthetic
auagagauuuuuuuaauugaaag

SEQ ID NO: 561819 - RNA, 24 nt, Artificial Sequence
  Synthetic
uauagagauuuuuuuaauugaaag

SEQ ID NO: 561820 - RNA, 18 nt, Artificial Sequence
  Synthetic
uuaaguguucauugaaag

SEQ ID NO: 561821 - RNA, 19 nt, Artificial Sequence
  Synthetic
cuuaaguguucauugaaag

SEQ ID NO: 561822 - RNA, 20 nt, Artificial Sequence
  Synthetic
ucuuaaguguucauugaaag

SEQ ID NO: 561823 - RNA, 21 nt, Artificial Sequence
  Synthetic
uucuuaaguguucauugaaag

SEQ ID NO: 561824 - RNA, 22 nt, Artificial Sequence
  Synthetic
cuucuuaaguguucauugaaag

SEQ ID NO: 561825 - RNA, 23 nt, Artificial Sequence
  Synthetic
ccuucuuaaguguucauugaaag

SEQ ID NO: 561826 - RNA, 24 nt, Artificial Sequence
  Synthetic
cccuucuuaaguguucauugaaag

SEQ ID NO: 561827 - RNA, 18 nt, Artificial Sequence
  Synthetic
aguaauaagacuugaaag

SEQ ID NO: 561828 - RNA, 19 nt, Artificial Sequence
  Synthetic
aaguaauaagacuugaaag

SEQ ID NO: 561829 - RNA, 20 nt, Artificial Sequence
  Synthetic
uaaguaauaagacuugaaag

SEQ ID NO: 561830 - RNA, 21 nt, Artificial Sequence
  Synthetic
uuaaguaauaagacuugaaag

SEQ ID NO: 561831 - RNA, 22 nt, Artificial Sequence
  Synthetic
uuuaaguaauaagacuugaaag

SEQ ID NO: 561832 - RNA, 23 nt, Artificial Sequence
  Synthetic
auuuaaguaauaagacuugaaag

SEQ ID NO: 561833 - RNA, 24 nt, Artificial Sequence
  Synthetic
gauuuaaguaauaagacuugaaag

SEQ ID NO: 561834 - RNA, 18 nt, Artificial Sequence
  Synthetic
cacaucagaaguugaaag

SEQ ID NO: 561835 - RNA, 19 nt, Artificial Sequence
  Synthetic
ucacaucagaaguugaaag

SEQ ID NO: 561836 - RNA, 20 nt, Artificial Sequence
  Synthetic
aucacaucagaaguugaaag

SEQ ID NO: 561837 - RNA, 21 nt, Artificial Sequence
  Synthetic
aaucacaucagaaguugaaag

SEQ ID NO: 561838 - RNA, 22 nt, Artificial Sequence
  Synthetic
gaaucacaucagaaguugaaag

SEQ ID NO: 561839 - RNA, 23 nt, Artificial Sequence
  Synthetic
agaaucacaucagaaguugaaag

SEQ ID NO: 561840 - RNA, 24 nt, Artificial Sequence
  Synthetic
uagaaucacaucagaaguugaaag

SEQ ID NO: 561841 - RNA, 18 nt, Artificial Sequence
  Synthetic
uucaaauauauuugaaag

SEQ ID NO: 561842 - RNA, 19 nt, Artificial Sequence
  Synthetic
uuucaaauauauuugaaag

SEQ ID NO: 561843 - RNA, 20 nt, Artificial Sequence
  Synthetic
auuucaaauauauuugaaag

SEQ ID NO: 561844 - RNA, 21 nt, Artificial Sequence
  Synthetic
gauuucaaauauauuugaaag

SEQ ID NO: 561845 - RNA, 22 nt, Artificial Sequence
  Synthetic
agauuucaaauauauuugaaag

SEQ ID NO: 561846 - RNA, 23 nt, Artificial Sequence
  Synthetic
aagauuucaaauauauuugaaag

SEQ ID NO: 561847 - RNA, 24 nt, Artificial Sequence
  Synthetic
uaagauuucaaauauauuugaaag

SEQ ID NO: 561848 - RNA, 18 nt, Artificial Sequence
  Synthetic
ugcaaagcccuuugaaag

SEQ ID NO: 561849 - RNA, 19 nt, Artificial Sequence
  Synthetic
augcaaagcccuuugaaag

SEQ ID NO: 561850 - RNA, 20 nt, Artificial Sequence
  Synthetic
aaugcaaagcccuuugaaag

SEQ ID NO: 561851 - RNA, 21 nt, Artificial Sequence
  Synthetic
gaaugcaaagcccuuugaaag

SEQ ID NO: 561852 - RNA, 22 nt, Artificial Sequence
  Synthetic
ugaaugcaaagcccuuugaaag

SEQ ID NO: 561853 - RNA, 23 nt, Artificial Sequence
  Synthetic
cugaaugcaaagcccuuugaaag

SEQ ID NO: 561854 - RNA, 24 nt, Artificial Sequence
  Synthetic
ucugaaugcaaagcccuuugaaag

SEQ ID NO: 561855 - RNA, 18 nt, Artificial Sequence
  Synthetic
cauucaguuguuugaaag

SEQ ID NO: 561856 - RNA, 19 nt, Artificial Sequence
  Synthetic
ccauucaguuguuugaaag

SEQ ID NO: 561857 - RNA, 20 nt, Artificial Sequence
  Synthetic
uccauucaguuguuugaaag

SEQ ID NO: 561858 - RNA, 21 nt, Artificial Sequence
  Synthetic
uuccauucaguuguuugaaag

SEQ ID NO: 561859 - RNA, 22 nt, Artificial Sequence
  Synthetic
uuuccauucaguuguuugaaag

SEQ ID NO: 561860 - RNA, 23 nt, Artificial Sequence
  Synthetic
cuuuccauucaguuguuugaaag

SEQ ID NO: 561861 - RNA, 24 nt, Artificial Sequence
  Synthetic
acuuuccauucaguuguuugaaag

SEQ ID NO: 561862 - RNA, 18 nt, Artificial Sequence
  Synthetic
augugaguguuuugaaag

SEQ ID NO: 561863 - RNA, 19 nt, Artificial Sequence
  Synthetic
gaugugaguguuuugaaag

SEQ ID NO: 561864 - RNA, 20 nt, Artificial Sequence
  Synthetic
ugaugugaguguuuugaaag

SEQ ID NO: 561865 - RNA, 21 nt, Artificial Sequence
  Synthetic
augaugugaguguuuugaaag

SEQ ID NO: 561866 - RNA, 22 nt, Artificial Sequence
  Synthetic
aaugaugugaguguuuugaaag

SEQ ID NO: 561867 - RNA, 23 nt, Artificial Sequence
  Synthetic
caaugaugugaguguuuugaaag

SEQ ID NO: 561868 - RNA, 24 nt, Artificial Sequence
  Synthetic
acaaugaugugaguguuuugaaag

SEQ ID NO: 561869 - RNA, 18 nt, Artificial Sequence
  Synthetic
acuagaagaaaaauaaag

SEQ ID NO: 561870 - RNA, 19 nt, Artificial Sequence
  Synthetic
uacuagaagaaaaauaaag

SEQ ID NO: 561871 - RNA, 20 nt, Artificial Sequence
  Synthetic
uuacuagaagaaaaauaaag

SEQ ID NO: 561872 - RNA, 21 nt, Artificial Sequence
  Synthetic
uuuacuagaagaaaaauaaag

SEQ ID NO: 561873 - RNA, 22 nt, Artificial Sequence
  Synthetic
uuuuacuagaagaaaaauaaag

SEQ ID NO: 561874 - RNA, 23 nt, Artificial Sequence
  Synthetic
guuuuacuagaagaaaaauaaag

SEQ ID NO: 561875 - RNA, 24 nt, Artificial Sequence
  Synthetic
uguuuuacuagaagaaaaauaaag

SEQ ID NO: 561876 - RNA, 18 nt, Artificial Sequence
  Synthetic
gaagaguacaaaauaaag

SEQ ID NO: 561877 - RNA, 19 nt, Artificial Sequence
  Synthetic
ggaagaguacaaaauaaag

SEQ ID NO: 561878 - RNA, 20 nt, Artificial Sequence
  Synthetic
aggaagaguacaaaauaaag

SEQ ID NO: 561879 - RNA, 21 nt, Artificial Sequence
  Synthetic
caggaagaguacaaaauaaag

SEQ ID NO: 561880 - RNA, 22 nt, Artificial Sequence
  Synthetic
ucaggaagaguacaaaauaaag

SEQ ID NO: 561881 - RNA, 23 nt, Artificial Sequence
  Synthetic
uucaggaagaguacaaaauaaag

SEQ ID NO: 561882 - RNA, 24 nt, Artificial Sequence
  Synthetic
uuucaggaagaguacaaaauaaag

SEQ ID NO: 561883 - RNA, 18 nt, Artificial Sequence
  Synthetic
uaucacauuaaaauaaag

SEQ ID NO: 561884 - RNA, 19 nt, Artificial Sequence
  Synthetic
uuaucacauuaaaauaaag

SEQ ID NO: 561885 - RNA, 20 nt, Artificial Sequence
  Synthetic
uuuaucacauuaaaauaaag

SEQ ID NO: 561886 - RNA, 21 nt, Artificial Sequence
  Synthetic
uuuuaucacauuaaaauaaag

SEQ ID NO: 561887 - RNA, 22 nt, Artificial Sequence
  Synthetic
auuuuaucacauuaaaauaaag

SEQ ID NO: 561888 - RNA, 23 nt, Artificial Sequence
  Synthetic
cauuuuaucacauuaaaauaaag

SEQ ID NO: 561889 - RNA, 24 nt, Artificial Sequence
  Synthetic
acauuuuaucacauuaaaauaaag

SEQ ID NO: 561890 - RNA, 18 nt, Artificial Sequence
  Synthetic
aucaaccaacaaauaaag

SEQ ID NO: 561891 - RNA, 19 nt, Artificial Sequence
  Synthetic
uaucaaccaacaaauaaag

SEQ ID NO: 561892 - RNA, 20 nt, Artificial Sequence
  Synthetic
uuaucaaccaacaaauaaag

SEQ ID NO: 561893 - RNA, 21 nt, Artificial Sequence
  Synthetic
auuaucaaccaacaaauaaag

SEQ ID NO: 561894 - RNA, 22 nt, Artificial Sequence
  Synthetic
cauuaucaaccaacaaauaaag

SEQ ID NO: 561895 - RNA, 23 nt, Artificial Sequence
  Synthetic
ccauuaucaaccaacaaauaaag

SEQ ID NO: 561896 - RNA, 24 nt, Artificial Sequence
  Synthetic
cccauuaucaaccaacaaauaaag

SEQ ID NO: 561897 - RNA, 18 nt, Artificial Sequence
  Synthetic
uuaaaugaggaaauaaag

SEQ ID NO: 561898 - RNA, 19 nt, Artificial Sequence
  Synthetic
cuuaaaugaggaaauaaag

SEQ ID NO: 561899 - RNA, 20 nt, Artificial Sequence
  Synthetic
gcuuaaaugaggaaauaaag

SEQ ID NO: 561900 - RNA, 21 nt, Artificial Sequence
  Synthetic
ugcuuaaaugaggaaauaaag

SEQ ID NO: 561901 - RNA, 22 nt, Artificial Sequence
  Synthetic
uugcuuaaaugaggaaauaaag

SEQ ID NO: 561902 - RNA, 23 nt, Artificial Sequence
  Synthetic
uuugcuuaaaugaggaaauaaag

SEQ ID NO: 561903 - RNA, 24 nt, Artificial Sequence
  Synthetic
auuugcuuaaaugaggaaauaaag

SEQ ID NO: 561904 - RNA, 18 nt, Artificial Sequence
  Synthetic
uaaaauugagcaauaaag

SEQ ID NO: 561905 - RNA, 19 nt, Artificial Sequence
  Synthetic
auaaaauugagcaauaaag

SEQ ID NO: 561906 - RNA, 20 nt, Artificial Sequence
  Synthetic
aauaaaauugagcaauaaag

SEQ ID NO: 561907 - RNA, 21 nt, Artificial Sequence
  Synthetic
uaauaaaauugagcaauaaag

SEQ ID NO: 561908 - RNA, 22 nt, Artificial Sequence
  Synthetic
guaauaaaauugagcaauaaag

SEQ ID NO: 561909 - RNA, 23 nt, Artificial Sequence
  Synthetic
gguaauaaaauugagcaauaaag

SEQ ID NO: 561910 - RNA, 24 nt, Artificial Sequence
  Synthetic
ugguaauaaaauugagcaauaaag

SEQ ID NO: 561911 - RNA, 18 nt, Artificial Sequence
  Synthetic
aagagaacuagaauaaag

SEQ ID NO: 561912 - RNA, 19 nt, Artificial Sequence
  Synthetic
caagagaacuagaauaaag

SEQ ID NO: 561913 - RNA, 20 nt, Artificial Sequence
  Synthetic
gcaagagaacuagaauaaag

SEQ ID NO: 561914 - RNA, 21 nt, Artificial Sequence
  Synthetic
ugcaagagaacuagaauaaag

SEQ ID NO: 561915 - RNA, 22 nt, Artificial Sequence
  Synthetic
uugcaagagaacuagaauaaag

SEQ ID NO: 561916 - RNA, 23 nt, Artificial Sequence
  Synthetic
auugcaagagaacuagaauaaag

SEQ ID NO: 561917 - RNA, 24 nt, Artificial Sequence
  Synthetic
aauugcaagagaacuagaauaaag

SEQ ID NO: 561918 - RNA, 18 nt, Artificial Sequence
  Synthetic
aauguaacaugaauaaag

SEQ ID NO: 561919 - RNA, 19 nt, Artificial Sequence
  Synthetic
uaauguaacaugaauaaag

SEQ ID NO: 561920 - RNA, 20 nt, Artificial Sequence
  Synthetic
auaauguaacaugaauaaag

SEQ ID NO: 561921 - RNA, 21 nt, Artificial Sequence
  Synthetic
aauaauguaacaugaauaaag

SEQ ID NO: 561922 - RNA, 22 nt, Artificial Sequence
  Synthetic
gaauaauguaacaugaauaaag

SEQ ID NO: 561923 - RNA, 23 nt, Artificial Sequence
  Synthetic
ugaauaauguaacaugaauaaag

SEQ ID NO: 561924 - RNA, 24 nt, Artificial Sequence
  Synthetic
cugaauaauguaacaugaauaaag

SEQ ID NO: 561925 - RNA, 18 nt, Artificial Sequence
  Synthetic
uuuuuuuaaauaauaaag

SEQ ID NO: 561926 - RNA, 19 nt, Artificial Sequence
  Synthetic
guuuuuuuaaauaauaaag

SEQ ID NO: 561927 - RNA, 20 nt, Artificial Sequence
  Synthetic
aguuuuuuuaaauaauaaag

SEQ ID NO: 561928 - RNA, 21 nt, Artificial Sequence
  Synthetic
caguuuuuuuaaauaauaaag

SEQ ID NO: 561929 - RNA, 22 nt, Artificial Sequence
  Synthetic
gcaguuuuuuuaaauaauaaag

SEQ ID NO: 561930 - RNA, 23 nt, Artificial Sequence
  Synthetic
agcaguuuuuuuaaauaauaaag

SEQ ID NO: 561931 - RNA, 24 nt, Artificial Sequence
  Synthetic
uagcaguuuuuuuaaauaauaaag

SEQ ID NO: 561932 - RNA, 18 nt, Artificial Sequence
  Synthetic
cuaguaagacuaauaaag

SEQ ID NO: 561933 - RNA, 19 nt, Artificial Sequence
  Synthetic
gcuaguaagacuaauaaag

SEQ ID NO: 561934 - RNA, 20 nt, Artificial Sequence
  Synthetic
cgcuaguaagacuaauaaag

SEQ ID NO: 561935 - RNA, 21 nt, Artificial Sequence
  Synthetic
ccgcuaguaagacuaauaaag

SEQ ID NO: 561936 - RNA, 22 nt, Artificial Sequence
  Synthetic
accgcuaguaagacuaauaaag

SEQ ID NO: 561937 - RNA, 23 nt, Artificial Sequence
  Synthetic
gaccgcuaguaagacuaauaaag

SEQ ID NO: 561938 - RNA, 24 nt, Artificial Sequence
  Synthetic
agaccgcuaguaagacuaauaaag

SEQ ID NO: 561939 - RNA, 18 nt, Artificial Sequence
  Synthetic
cuagccagacuaauaaag

SEQ ID NO: 561940 - RNA, 19 nt, Artificial Sequence
  Synthetic
acuagccagacuaauaaag

SEQ ID NO: 561941 - RNA, 20 nt, Artificial Sequence
  Synthetic
cacuagccagacuaauaaag

SEQ ID NO: 561942 - RNA, 21 nt, Artificial Sequence
  Synthetic
ccacuagccagacuaauaaag

SEQ ID NO: 561943 - RNA, 22 nt, Artificial Sequence
  Synthetic
accacuagccagacuaauaaag

SEQ ID NO: 561944 - RNA, 23 nt, Artificial Sequence
  Synthetic
gaccacuagccagacuaauaaag

SEQ ID NO: 561945 - RNA, 24 nt, Artificial Sequence
  Synthetic
agaccacuagccagacuaauaaag

SEQ ID NO: 561946 - RNA, 18 nt, Artificial Sequence
  Synthetic
aaagguuccaacauaaag

SEQ ID NO: 561947 - RNA, 19 nt, Artificial Sequence
  Synthetic
gaaagguuccaacauaaag

SEQ ID NO: 561948 - RNA, 20 nt, Artificial Sequence
  Synthetic
ggaaagguuccaacauaaag

SEQ ID NO: 561949 - RNA, 21 nt, Artificial Sequence
  Synthetic
uggaaagguuccaacauaaag

SEQ ID NO: 561950 - RNA, 22 nt, Artificial Sequence
  Synthetic
cuggaaagguuccaacauaaag

SEQ ID NO: 561951 - RNA, 23 nt, Artificial Sequence
  Synthetic
ucuggaaagguuccaacauaaag

SEQ ID NO: 561952 - RNA, 24 nt, Artificial Sequence
  Synthetic
uucuggaaagguuccaacauaaag

SEQ ID NO: 561953 - RNA, 18 nt, Artificial Sequence
  Synthetic
accagcaaggacauaaag

SEQ ID NO: 561954 - RNA, 19 nt, Artificial Sequence
  Synthetic
gaccagcaaggacauaaag

SEQ ID NO: 561955 - RNA, 20 nt, Artificial Sequence
  Synthetic
agaccagcaaggacauaaag

SEQ ID NO: 561956 - RNA, 21 nt, Artificial Sequence
  Synthetic
cagaccagcaaggacauaaag

SEQ ID NO: 561957 - RNA, 22 nt, Artificial Sequence
  Synthetic
ucagaccagcaaggacauaaag

SEQ ID NO: 561958 - RNA, 23 nt, Artificial Sequence
  Synthetic
gucagaccagcaaggacauaaag

SEQ ID NO: 561959 - RNA, 24 nt, Artificial Sequence
  Synthetic
ugucagaccagcaaggacauaaag

SEQ ID NO: 561960 - RNA, 18 nt, Artificial Sequence
  Synthetic
accacaugacccauaaag

SEQ ID NO: 561961 - RNA, 19 nt, Artificial Sequence
  Synthetic
gaccacaugacccauaaag

SEQ ID NO: 561962 - RNA, 20 nt, Artificial Sequence
  Synthetic
ugaccacaugacccauaaag

SEQ ID NO: 561963 - RNA, 21 nt, Artificial Sequence
  Synthetic
uugaccacaugacccauaaag

SEQ ID NO: 561964 - RNA, 22 nt, Artificial Sequence
  Synthetic
guugaccacaugacccauaaag

SEQ ID NO: 561965 - RNA, 23 nt, Artificial Sequence
  Synthetic
aguugaccacaugacccauaaag

SEQ ID NO: 561966 - RNA, 24 nt, Artificial Sequence
  Synthetic
gaguugaccacaugacccauaaag

SEQ ID NO: 561967 - RNA, 18 nt, Artificial Sequence
  Synthetic
uauaguuaagccauaaag

SEQ ID NO: 561968 - RNA, 19 nt, Artificial Sequence
  Synthetic
auauaguuaagccauaaag

SEQ ID NO: 561969 - RNA, 20 nt, Artificial Sequence
  Synthetic
gauauaguuaagccauaaag

SEQ ID NO: 561970 - RNA, 21 nt, Artificial Sequence
  Synthetic
ugauauaguuaagccauaaag

SEQ ID NO: 561971 - RNA, 22 nt, Artificial Sequence
  Synthetic
cugauauaguuaagccauaaag

SEQ ID NO: 561972 - RNA, 23 nt, Artificial Sequence
  Synthetic
ucugauauaguuaagccauaaag

SEQ ID NO: 561973 - RNA, 24 nt, Artificial Sequence
  Synthetic
gucugauauaguuaagccauaaag

SEQ ID NO: 561974 - RNA, 18 nt, Artificial Sequence
  Synthetic
acauucgugagcauaaag

SEQ ID NO: 561975 - RNA, 19 nt, Artificial Sequence
  Synthetic
cacauucgugagcauaaag

SEQ ID NO: 561976 - RNA, 20 nt, Artificial Sequence
  Synthetic
acacauucgugagcauaaag

SEQ ID NO: 561977 - RNA, 21 nt, Artificial Sequence
  Synthetic
aacacauucgugagcauaaag

SEQ ID NO: 561978 - RNA, 22 nt, Artificial Sequence
  Synthetic
caacacauucgugagcauaaag

SEQ ID NO: 561979 - RNA, 23 nt, Artificial Sequence
  Synthetic
ucaacacauucgugagcauaaag

SEQ ID NO: 561980 - RNA, 24 nt, Artificial Sequence
  Synthetic
cucaacacauucgugagcauaaag

SEQ ID NO: 561981 - RNA, 18 nt, Artificial Sequence
  Synthetic
aagaaagguagcauaaag

SEQ ID NO: 561982 - RNA, 19 nt, Artificial Sequence
  Synthetic
gaagaaagguagcauaaag

SEQ ID NO: 561983 - RNA, 20 nt, Artificial Sequence
  Synthetic
agaagaaagguagcauaaag

SEQ ID NO: 561984 - RNA, 21 nt, Artificial Sequence
  Synthetic
gagaagaaagguagcauaaag

SEQ ID NO: 561985 - RNA, 22 nt, Artificial Sequence
  Synthetic
ugagaagaaagguagcauaaag

SEQ ID NO: 561986 - RNA, 23 nt, Artificial Sequence
  Synthetic
gugagaagaaagguagcauaaag

SEQ ID NO: 561987 - RNA, 24 nt, Artificial Sequence
  Synthetic
agugagaagaaagguagcauaaag

SEQ ID NO: 561988 - RNA, 18 nt, Artificial Sequence
  Synthetic
agcaacuggaucauaaag

SEQ ID NO: 561989 - RNA, 19 nt, Artificial Sequence
  Synthetic
aagcaacuggaucauaaag

SEQ ID NO: 561990 - RNA, 20 nt, Artificial Sequence
  Synthetic
aaagcaacuggaucauaaag

SEQ ID NO: 561991 - RNA, 21 nt, Artificial Sequence
  Synthetic
aaaagcaacuggaucauaaag

SEQ ID NO: 561992 - RNA, 22 nt, Artificial Sequence
  Synthetic
caaaagcaacuggaucauaaag

SEQ ID NO: 561993 - RNA, 23 nt, Artificial Sequence
  Synthetic
ucaaaagcaacuggaucauaaag

SEQ ID NO: 561994 - RNA, 24 nt, Artificial Sequence
  Synthetic
uucaaaagcaacuggaucauaaag

SEQ ID NO: 561995 - RNA, 18 nt, Artificial Sequence
  Synthetic
cuauuucaaaagauaaag

SEQ ID NO: 561996 - RNA, 19 nt, Artificial Sequence
  Synthetic
acuauuucaaaagauaaag

SEQ ID NO: 561997 - RNA, 20 nt, Artificial Sequence
  Synthetic
aacuauuucaaaagauaaag

SEQ ID NO: 561998 - RNA, 21 nt, Artificial Sequence
  Synthetic
aaacuauuucaaaagauaaag

SEQ ID NO: 561999 - RNA, 22 nt, Artificial Sequence
  Synthetic
gaaacuauuucaaaagauaaag

SEQ ID NO: 562000 - RNA, 23 nt, Artificial Sequence
  Synthetic
ugaaacuauuucaaaagauaaag

SEQ ID NO: 562001 - RNA, 24 nt, Artificial Sequence
  Synthetic
augaaacuauuucaaaagauaaag

SEQ ID NO: 562002 - RNA, 18 nt, Artificial Sequence
  Synthetic
auacucaagaagauaaag

SEQ ID NO: 562003 - RNA, 19 nt, Artificial Sequence
  Synthetic
aauacucaagaagauaaag

SEQ ID NO: 562004 - RNA, 20 nt, Artificial Sequence
  Synthetic
aaauacucaagaagauaaag

SEQ ID NO: 562005 - RNA, 21 nt, Artificial Sequence
  Synthetic
uaaauacucaagaagauaaag

SEQ ID NO: 562006 - RNA, 22 nt, Artificial Sequence
  Synthetic
auaaauacucaagaagauaaag

SEQ ID NO: 562007 - RNA, 23 nt, Artificial Sequence
  Synthetic
aauaaauacucaagaagauaaag

SEQ ID NO: 562008 - RNA, 24 nt, Artificial Sequence
  Synthetic
aaauaaauacucaagaagauaaag

SEQ ID NO: 562009 - RNA, 18 nt, Artificial Sequence
  Synthetic
ggauaagcucagauaaag

SEQ ID NO: 562010 - RNA, 19 nt, Artificial Sequence
  Synthetic
uggauaagcucagauaaag

SEQ ID NO: 562011 - RNA, 20 nt, Artificial Sequence
  Synthetic
auggauaagcucagauaaag

SEQ ID NO: 562012 - RNA, 21 nt, Artificial Sequence
  Synthetic
uauggauaagcucagauaaag

SEQ ID NO: 562013 - RNA, 22 nt, Artificial Sequence
  Synthetic
guauggauaagcucagauaaag

SEQ ID NO: 562014 - RNA, 23 nt, Artificial Sequence
  Synthetic
aguauggauaagcucagauaaag

SEQ ID NO: 562015 - RNA, 24 nt, Artificial Sequence
  Synthetic
gaguauggauaagcucagauaaag

SEQ ID NO: 562016 - RNA, 18 nt, Artificial Sequence
  Synthetic
uauuuuaaaaggauaaag

SEQ ID NO: 562017 - RNA, 19 nt, Artificial Sequence
  Synthetic
auauuuuaaaaggauaaag

SEQ ID NO: 562018 - RNA, 20 nt, Artificial Sequence
  Synthetic
uauauuuuaaaaggauaaag

SEQ ID NO: 562019 - RNA, 21 nt, Artificial Sequence
  Synthetic
auauauuuuaaaaggauaaag

SEQ ID NO: 562020 - RNA, 22 nt, Artificial Sequence
  Synthetic
aauauauuuuaaaaggauaaag

SEQ ID NO: 562021 - RNA, 23 nt, Artificial Sequence
  Synthetic
uaauauauuuuaaaaggauaaag

SEQ ID NO: 562022 - RNA, 24 nt, Artificial Sequence
  Synthetic
auaauauauuuuaaaaggauaaag

SEQ ID NO: 562023 - RNA, 18 nt, Artificial Sequence
  Synthetic
aagaaaugaaggauaaag

SEQ ID NO: 562024 - RNA, 19 nt, Artificial Sequence
  Synthetic
gaagaaaugaaggauaaag

SEQ ID NO: 562025 - RNA, 20 nt, Artificial Sequence
  Synthetic
ggaagaaaugaaggauaaag

SEQ ID NO: 562026 - RNA, 21 nt, Artificial Sequence
  Synthetic
aggaagaaaugaaggauaaag

SEQ ID NO: 562027 - RNA, 22 nt, Artificial Sequence
  Synthetic
aaggaagaaaugaaggauaaag

SEQ ID NO: 562028 - RNA, 23 nt, Artificial Sequence
  Synthetic
gaaggaagaaaugaaggauaaag

SEQ ID NO: 562029 - RNA, 24 nt, Artificial Sequence
  Synthetic
ggaaggaagaaaugaaggauaaag

SEQ ID NO: 562030 - RNA, 18 nt, Artificial Sequence
  Synthetic
ccuagaaaacugauaaag

SEQ ID NO: 562031 - RNA, 19 nt, Artificial Sequence
  Synthetic
cccuagaaaacugauaaag

SEQ ID NO: 562032 - RNA, 20 nt, Artificial Sequence
  Synthetic
ucccuagaaaacugauaaag

SEQ ID NO: 562033 - RNA, 21 nt, Artificial Sequence
  Synthetic
cucccuagaaaacugauaaag

SEQ ID NO: 562034 - RNA, 22 nt, Artificial Sequence
  Synthetic
ucucccuagaaaacugauaaag

SEQ ID NO: 562035 - RNA, 23 nt, Artificial Sequence
  Synthetic
uucucccuagaaaacugauaaag

SEQ ID NO: 562036 - RNA, 24 nt, Artificial Sequence
  Synthetic
cuucucccuagaaaacugauaaag

SEQ ID NO: 562037 - RNA, 18 nt, Artificial Sequence
  Synthetic
uacaugaaacugauaaag

SEQ ID NO: 562038 - RNA, 19 nt, Artificial Sequence
  Synthetic
guacaugaaacugauaaag

SEQ ID NO: 562039 - RNA, 20 nt, Artificial Sequence
  Synthetic
gguacaugaaacugauaaag

SEQ ID NO: 562040 - RNA, 21 nt, Artificial Sequence
  Synthetic
agguacaugaaacugauaaag

SEQ ID NO: 562041 - RNA, 22 nt, Artificial Sequence
  Synthetic
uagguacaugaaacugauaaag

SEQ ID NO: 562042 - RNA, 23 nt, Artificial Sequence
  Synthetic
guagguacaugaaacugauaaag

SEQ ID NO: 562043 - RNA, 24 nt, Artificial Sequence
  Synthetic
aguagguacaugaaacugauaaag

SEQ ID NO: 562044 - RNA, 18 nt, Artificial Sequence
  Synthetic
aaagagguugugauaaag

SEQ ID NO: 562045 - RNA, 19 nt, Artificial Sequence
  Synthetic
aaaagagguugugauaaag

SEQ ID NO: 562046 - RNA, 20 nt, Artificial Sequence
  Synthetic
aaaaagagguugugauaaag

SEQ ID NO: 562047 - RNA, 21 nt, Artificial Sequence
  Synthetic
aaaaaagagguugugauaaag

SEQ ID NO: 562048 - RNA, 22 nt, Artificial Sequence
  Synthetic
uaaaaaagagguugugauaaag

SEQ ID NO: 562049 - RNA, 23 nt, Artificial Sequence
  Synthetic
uuaaaaaagagguugugauaaag

SEQ ID NO: 562050 - RNA, 24 nt, Artificial Sequence
  Synthetic
uuuaaaaaagagguugugauaaag

SEQ ID NO: 562051 - RNA, 18 nt, Artificial Sequence
  Synthetic
auaaauguggauauaaag

SEQ ID NO: 562052 - RNA, 19 nt, Artificial Sequence
  Synthetic
aauaaauguggauauaaag

SEQ ID NO: 562053 - RNA, 20 nt, Artificial Sequence
  Synthetic
gaauaaauguggauauaaag

SEQ ID NO: 562054 - RNA, 21 nt, Artificial Sequence
  Synthetic
ugaauaaauguggauauaaag

SEQ ID NO: 562055 - RNA, 22 nt, Artificial Sequence
  Synthetic
uugaauaaauguggauauaaag

SEQ ID NO: 562056 - RNA, 23 nt, Artificial Sequence
  Synthetic
cuugaauaaauguggauauaaag

SEQ ID NO: 562057 - RNA, 24 nt, Artificial Sequence
  Synthetic
acuugaauaaauguggauauaaag

SEQ ID NO: 562058 - RNA, 18 nt, Artificial Sequence
  Synthetic
guuagaagaacuauaaag

SEQ ID NO: 562059 - RNA, 19 nt, Artificial Sequence
  Synthetic
aguuagaagaacuauaaag

SEQ ID NO: 562060 - RNA, 20 nt, Artificial Sequence
  Synthetic
aaguuagaagaacuauaaag

SEQ ID NO: 562061 - RNA, 21 nt, Artificial Sequence
  Synthetic
caaguuagaagaacuauaaag

SEQ ID NO: 562062 - RNA, 22 nt, Artificial Sequence
  Synthetic
acaaguuagaagaacuauaaag

SEQ ID NO: 562063 - RNA, 23 nt, Artificial Sequence
  Synthetic
gacaaguuagaagaacuauaaag

SEQ ID NO: 562064 - RNA, 24 nt, Artificial Sequence
  Synthetic
ggacaaguuagaagaacuauaaag

SEQ ID NO: 562065 - RNA, 18 nt, Artificial Sequence
  Synthetic
auuuuguaagcuauaaag

SEQ ID NO: 562066 - RNA, 19 nt, Artificial Sequence
  Synthetic
aauuuuguaagcuauaaag

SEQ ID NO: 562067 - RNA, 20 nt, Artificial Sequence
  Synthetic
uaauuuuguaagcuauaaag

SEQ ID NO: 562068 - RNA, 21 nt, Artificial Sequence
  Synthetic
auaauuuuguaagcuauaaag

SEQ ID NO: 562069 - RNA, 22 nt, Artificial Sequence
  Synthetic
uauaauuuuguaagcuauaaag

SEQ ID NO: 562070 - RNA, 23 nt, Artificial Sequence
  Synthetic
auauaauuuuguaagcuauaaag

SEQ ID NO: 562071 - RNA, 24 nt, Artificial Sequence
  Synthetic
aauauaauuuuguaagcuauaaag

SEQ ID NO: 562072 - RNA, 18 nt, Artificial Sequence
  Synthetic
guuuauucagcuauaaag

SEQ ID NO: 562073 - RNA, 19 nt, Artificial Sequence
  Synthetic
aguuuauucagcuauaaag

SEQ ID NO: 562074 - RNA, 20 nt, Artificial Sequence
  Synthetic
caguuuauucagcuauaaag

SEQ ID NO: 562075 - RNA, 21 nt, Artificial Sequence
  Synthetic
ucaguuuauucagcuauaaag

SEQ ID NO: 562076 - RNA, 22 nt, Artificial Sequence
  Synthetic
cucaguuuauucagcuauaaag

SEQ ID NO: 562077 - RNA, 23 nt, Artificial Sequence
  Synthetic
gcucaguuuauucagcuauaaag

SEQ ID NO: 562078 - RNA, 24 nt, Artificial Sequence
  Synthetic
ggcucaguuuauucagcuauaaag

SEQ ID NO: 562079 - RNA, 18 nt, Artificial Sequence
  Synthetic
guaguagaauguauaaag

SEQ ID NO: 562080 - RNA, 19 nt, Artificial Sequence
  Synthetic
aguaguagaauguauaaag

SEQ ID NO: 562081 - RNA, 20 nt, Artificial Sequence
  Synthetic
caguaguagaauguauaaag

SEQ ID NO: 562082 - RNA, 21 nt, Artificial Sequence
  Synthetic
gcaguaguagaauguauaaag

SEQ ID NO: 562083 - RNA, 22 nt, Artificial Sequence
  Synthetic
agcaguaguagaauguauaaag

SEQ ID NO: 562084 - RNA, 23 nt, Artificial Sequence
  Synthetic
aagcaguaguagaauguauaaag

SEQ ID NO: 562085 - RNA, 24 nt, Artificial Sequence
  Synthetic
gaagcaguaguagaauguauaaag

SEQ ID NO: 562086 - RNA, 18 nt, Artificial Sequence
  Synthetic
ugaggagcaaaacuaaag

SEQ ID NO: 562087 - RNA, 19 nt, Artificial Sequence
  Synthetic
cugaggagcaaaacuaaag

SEQ ID NO: 562088 - RNA, 20 nt, Artificial Sequence
  Synthetic
gcugaggagcaaaacuaaag

SEQ ID NO: 562089 - RNA, 21 nt, Artificial Sequence
  Synthetic
ugcugaggagcaaaacuaaag

SEQ ID NO: 562090 - RNA, 22 nt, Artificial Sequence
  Synthetic
gugcugaggagcaaaacuaaag

SEQ ID NO: 562091 - RNA, 23 nt, Artificial Sequence
  Synthetic
agugcugaggagcaaaacuaaag

SEQ ID NO: 562092 - RNA, 24 nt, Artificial Sequence
  Synthetic
aagugcugaggagcaaaacuaaag

SEQ ID NO: 562093 - RNA, 18 nt, Artificial Sequence
  Synthetic
ucuuuuggaaaacuaaag

SEQ ID NO: 562094 - RNA, 19 nt, Artificial Sequence
  Synthetic
cucuuuuggaaaacuaaag

SEQ ID NO: 562095 - RNA, 20 nt, Artificial Sequence
  Synthetic
acucuuuuggaaaacuaaag

SEQ ID NO: 562096 - RNA, 21 nt, Artificial Sequence
  Synthetic
aacucuuuuggaaaacuaaag

SEQ ID NO: 562097 - RNA, 22 nt, Artificial Sequence
  Synthetic
aaacucuuuuggaaaacuaaag

SEQ ID NO: 562098 - RNA, 23 nt, Artificial Sequence
  Synthetic
caaacucuuuuggaaaacuaaag

SEQ ID NO: 562099 - RNA, 24 nt, Artificial Sequence
  Synthetic
ucaaacucuuuuggaaaacuaaag

SEQ ID NO: 562100 - RNA, 18 nt, Artificial Sequence
  Synthetic
agacuccauaaacuaaag

SEQ ID NO: 562101 - RNA, 19 nt, Artificial Sequence
  Synthetic
aagacuccauaaacuaaag

SEQ ID NO: 562102 - RNA, 20 nt, Artificial Sequence
  Synthetic
caagacuccauaaacuaaag

SEQ ID NO: 562103 - RNA, 21 nt, Artificial Sequence
  Synthetic
acaagacuccauaaacuaaag

SEQ ID NO: 562104 - RNA, 22 nt, Artificial Sequence
  Synthetic
cacaagacuccauaaacuaaag

SEQ ID NO: 562105 - RNA, 23 nt, Artificial Sequence
  Synthetic
ccacaagacuccauaaacuaaag

SEQ ID NO: 562106 - RNA, 24 nt, Artificial Sequence
  Synthetic
uccacaagacuccauaaacuaaag

SEQ ID NO: 562107 - RNA, 18 nt, Artificial Sequence
  Synthetic
gguguuagagaacuaaag

SEQ ID NO: 562108 - RNA, 19 nt, Artificial Sequence
  Synthetic
ggguguuagagaacuaaag

SEQ ID NO: 562109 - RNA, 20 nt, Artificial Sequence
  Synthetic
aggguguuagagaacuaaag

SEQ ID NO: 562110 - RNA, 21 nt, Artificial Sequence
  Synthetic
gaggguguuagagaacuaaag

SEQ ID NO: 562111 - RNA, 22 nt, Artificial Sequence
  Synthetic
agaggguguuagagaacuaaag

SEQ ID NO: 562112 - RNA, 23 nt, Artificial Sequence
  Synthetic
aagaggguguuagagaacuaaag

SEQ ID NO: 562113 - RNA, 24 nt, Artificial Sequence
  Synthetic
gaagaggguguuagagaacuaaag

SEQ ID NO: 562114 - RNA, 18 nt, Artificial Sequence
  Synthetic
guuugauuuuuacuaaag

SEQ ID NO: 562115 - RNA, 19 nt, Artificial Sequence
  Synthetic
aguuugauuuuuacuaaag

SEQ ID NO: 562116 - RNA, 20 nt, Artificial Sequence
  Synthetic
uaguuugauuuuuacuaaag

SEQ ID NO: 562117 - RNA, 21 nt, Artificial Sequence
  Synthetic
uuaguuugauuuuuacuaaag

SEQ ID NO: 562118 - RNA, 22 nt, Artificial Sequence
  Synthetic
guuaguuugauuuuuacuaaag

SEQ ID NO: 562119 - RNA, 23 nt, Artificial Sequence
  Synthetic
uguuaguuugauuuuuacuaaag

SEQ ID NO: 562120 - RNA, 24 nt, Artificial Sequence
  Synthetic
uuguuaguuugauuuuuacuaaag

SEQ ID NO: 562121 - RNA, 18 nt, Artificial Sequence
  Synthetic
gugguucucuuccuaaag

SEQ ID NO: 562122 - RNA, 19 nt, Artificial Sequence
  Synthetic
ggugguucucuuccuaaag

SEQ ID NO: 562123 - RNA, 20 nt, Artificial Sequence
  Synthetic
aggugguucucuuccuaaag

SEQ ID NO: 562124 - RNA, 21 nt, Artificial Sequence
  Synthetic
aaggugguucucuuccuaaag

SEQ ID NO: 562125 - RNA, 22 nt, Artificial Sequence
  Synthetic
aaaggugguucucuuccuaaag

SEQ ID NO: 562126 - RNA, 23 nt, Artificial Sequence
  Synthetic
aaaaggugguucucuuccuaaag

SEQ ID NO: 562127 - RNA, 24 nt, Artificial Sequence
  Synthetic
aaaaaggugguucucuuccuaaag

SEQ ID NO: 562128 - RNA, 18 nt, Artificial Sequence
  Synthetic
ggaaacccagggcuaaag

SEQ ID NO: 562129 - RNA, 19 nt, Artificial Sequence
  Synthetic
uggaaacccagggcuaaag

SEQ ID NO: 562130 - RNA, 20 nt, Artificial Sequence
  Synthetic
uuggaaacccagggcuaaag

SEQ ID NO: 562131 - RNA, 21 nt, Artificial Sequence
  Synthetic
guuggaaacccagggcuaaag

SEQ ID NO: 562132 - RNA, 22 nt, Artificial Sequence
  Synthetic
gguuggaaacccagggcuaaag

SEQ ID NO: 562133 - RNA, 23 nt, Artificial Sequence
  Synthetic
ggguuggaaacccagggcuaaag

SEQ ID NO: 562134 - RNA, 24 nt, Artificial Sequence
  Synthetic
gggguuggaaacccagggcuaaag

SEQ ID NO: 562135 - RNA, 18 nt, Artificial Sequence
  Synthetic
gaaggcaaauggcuaaag

SEQ ID NO: 562136 - RNA, 19 nt, Artificial Sequence
  Synthetic
ugaaggcaaauggcuaaag

SEQ ID NO: 562137 - RNA, 20 nt, Artificial Sequence
  Synthetic
augaaggcaaauggcuaaag

SEQ ID NO: 562138 - RNA, 21 nt, Artificial Sequence
  Synthetic
uaugaaggcaaauggcuaaag

SEQ ID NO: 562139 - RNA, 22 nt, Artificial Sequence
  Synthetic
auaugaaggcaaauggcuaaag

SEQ ID NO: 562140 - RNA, 23 nt, Artificial Sequence
  Synthetic
uauaugaaggcaaauggcuaaag

SEQ ID NO: 562141 - RNA, 24 nt, Artificial Sequence
  Synthetic
auauaugaaggcaaauggcuaaag

SEQ ID NO: 562142 - RNA, 18 nt, Artificial Sequence
  Synthetic
uucagauggaugcuaaag

SEQ ID NO: 562143 - RNA, 19 nt, Artificial Sequence
  Synthetic
cuucagauggaugcuaaag

SEQ ID NO: 562144 - RNA, 20 nt, Artificial Sequence
  Synthetic
ccuucagauggaugcuaaag

SEQ ID NO: 562145 - RNA, 21 nt, Artificial Sequence
  Synthetic
accuucagauggaugcuaaag

SEQ ID NO: 562146 - RNA, 22 nt, Artificial Sequence
  Synthetic
caccuucagauggaugcuaaag

SEQ ID NO: 562147 - RNA, 23 nt, Artificial Sequence
  Synthetic
acaccuucagauggaugcuaaag

SEQ ID NO: 562148 - RNA, 24 nt, Artificial Sequence
  Synthetic
aacaccuucagauggaugcuaaag

SEQ ID NO: 562149 - RNA, 18 nt, Artificial Sequence
  Synthetic
acaagacaacugcuaaag

SEQ ID NO: 562150 - RNA, 19 nt, Artificial Sequence
  Synthetic
aacaagacaacugcuaaag

SEQ ID NO: 562151 - RNA, 20 nt, Artificial Sequence
  Synthetic
gaacaagacaacugcuaaag

SEQ ID NO: 562152 - RNA, 21 nt, Artificial Sequence
  Synthetic
ugaacaagacaacugcuaaag

SEQ ID NO: 562153 - RNA, 22 nt, Artificial Sequence
  Synthetic
gugaacaagacaacugcuaaag

SEQ ID NO: 562154 - RNA, 23 nt, Artificial Sequence
  Synthetic
ugugaacaagacaacugcuaaag

SEQ ID NO: 562155 - RNA, 24 nt, Artificial Sequence
  Synthetic
uugugaacaagacaacugcuaaag

SEQ ID NO: 562156 - RNA, 18 nt, Artificial Sequence
  Synthetic
uauguuggccugcuaaag

SEQ ID NO: 562157 - RNA, 19 nt, Artificial Sequence
  Synthetic
guauguuggccugcuaaag

SEQ ID NO: 562158 - RNA, 20 nt, Artificial Sequence
  Synthetic
aguauguuggccugcuaaag

SEQ ID NO: 562159 - RNA, 21 nt, Artificial Sequence
  Synthetic
gaguauguuggccugcuaaag

SEQ ID NO: 562160 - RNA, 22 nt, Artificial Sequence
  Synthetic
ugaguauguuggccugcuaaag

SEQ ID NO: 562161 - RNA, 23 nt, Artificial Sequence
  Synthetic
uugaguauguuggccugcuaaag

SEQ ID NO: 562162 - RNA, 24 nt, Artificial Sequence
  Synthetic
cuugaguauguuggccugcuaaag

SEQ ID NO: 562163 - RNA, 18 nt, Artificial Sequence
  Synthetic
uccacaagagugcuaaag

SEQ ID NO: 562164 - RNA, 19 nt, Artificial Sequence
  Synthetic
auccacaagagugcuaaag

SEQ ID NO: 562165 - RNA, 20 nt, Artificial Sequence
  Synthetic
gauccacaagagugcuaaag

SEQ ID NO: 562166 - RNA, 21 nt, Artificial Sequence
  Synthetic
ggauccacaagagugcuaaag

SEQ ID NO: 562167 - RNA, 22 nt, Artificial Sequence
  Synthetic
uggauccacaagagugcuaaag

SEQ ID NO: 562168 - RNA, 23 nt, Artificial Sequence
  Synthetic
uuggauccacaagagugcuaaag

SEQ ID NO: 562169 - RNA, 24 nt, Artificial Sequence
  Synthetic
auuggauccacaagagugcuaaag

SEQ ID NO: 562170 - RNA, 18 nt, Artificial Sequence
  Synthetic
aaaaugucucaucuaaag

SEQ ID NO: 562171 - RNA, 19 nt, Artificial Sequence
  Synthetic
uaaaaugucucaucuaaag

SEQ ID NO: 562172 - RNA, 20 nt, Artificial Sequence
  Synthetic
uuaaaaugucucaucuaaag

SEQ ID NO: 562173 - RNA, 21 nt, Artificial Sequence
  Synthetic
guuaaaaugucucaucuaaag

SEQ ID NO: 562174 - RNA, 22 nt, Artificial Sequence
  Synthetic
gguuaaaaugucucaucuaaag

SEQ ID NO: 562175 - RNA, 23 nt, Artificial Sequence
  Synthetic
ugguuaaaaugucucaucuaaag

SEQ ID NO: 562176 - RNA, 24 nt, Artificial Sequence
  Synthetic
uugguuaaaaugucucaucuaaag

SEQ ID NO: 562177 - RNA, 18 nt, Artificial Sequence
  Synthetic
gucaaggguuaaguaaag

SEQ ID NO: 562178 - RNA, 19 nt, Artificial Sequence
  Synthetic
agucaaggguuaaguaaag

SEQ ID NO: 562179 - RNA, 20 nt, Artificial Sequence
  Synthetic
gagucaaggguuaaguaaag

SEQ ID NO: 562180 - RNA, 21 nt, Artificial Sequence
  Synthetic
ugagucaaggguuaaguaaag

SEQ ID NO: 562181 - RNA, 22 nt, Artificial Sequence
  Synthetic
augagucaaggguuaaguaaag

SEQ ID NO: 562182 - RNA, 23 nt, Artificial Sequence
  Synthetic
caugagucaaggguuaaguaaag

SEQ ID NO: 562183 - RNA, 24 nt, Artificial Sequence
  Synthetic
gcaugagucaaggguuaaguaaag

SEQ ID NO: 562184 - RNA, 18 nt, Artificial Sequence
  Synthetic
guauucauaucaguaaag

SEQ ID NO: 562185 - RNA, 19 nt, Artificial Sequence
  Synthetic
uguauucauaucaguaaag

SEQ ID NO: 562186 - RNA, 20 nt, Artificial Sequence
  Synthetic
auguauucauaucaguaaag

SEQ ID NO: 562187 - RNA, 21 nt, Artificial Sequence
  Synthetic
aauguauucauaucaguaaag

SEQ ID NO: 562188 - RNA, 22 nt, Artificial Sequence
  Synthetic
aaauguauucauaucaguaaag

SEQ ID NO: 562189 - RNA, 23 nt, Artificial Sequence
  Synthetic
aaaauguauucauaucaguaaag

SEQ ID NO: 562190 - RNA, 24 nt, Artificial Sequence
  Synthetic
uaaaauguauucauaucaguaaag

SEQ ID NO: 562191 - RNA, 18 nt, Artificial Sequence
  Synthetic
caugggaauggaguaaag

SEQ ID NO: 562192 - RNA, 19 nt, Artificial Sequence
  Synthetic
gcaugggaauggaguaaag

SEQ ID NO: 562193 - RNA, 20 nt, Artificial Sequence
  Synthetic
agcaugggaauggaguaaag

SEQ ID NO: 562194 - RNA, 21 nt, Artificial Sequence
  Synthetic
uagcaugggaauggaguaaag

SEQ ID NO: 562195 - RNA, 22 nt, Artificial Sequence
  Synthetic
auagcaugggaauggaguaaag

SEQ ID NO: 562196 - RNA, 23 nt, Artificial Sequence
  Synthetic
aauagcaugggaauggaguaaag

SEQ ID NO: 562197 - RNA, 24 nt, Artificial Sequence
  Synthetic
gaauagcaugggaauggaguaaag

SEQ ID NO: 562198 - RNA, 18 nt, Artificial Sequence
  Synthetic
aauuacucaugaguaaag

SEQ ID NO: 562199 - RNA, 19 nt, Artificial Sequence
  Synthetic
aaauuacucaugaguaaag

SEQ ID NO: 562200 - RNA, 20 nt, Artificial Sequence
  Synthetic
aaaauuacucaugaguaaag

SEQ ID NO: 562201 - RNA, 21 nt, Artificial Sequence
  Synthetic
aaaaauuacucaugaguaaag

SEQ ID NO: 562202 - RNA, 22 nt, Artificial Sequence
  Synthetic
caaaaauuacucaugaguaaag

SEQ ID NO: 562203 - RNA, 23 nt, Artificial Sequence
  Synthetic
ccaaaaauuacucaugaguaaag

SEQ ID NO: 562204 - RNA, 24 nt, Artificial Sequence
  Synthetic
gccaaaaauuacucaugaguaaag

SEQ ID NO: 562205 - RNA, 18 nt, Artificial Sequence
  Synthetic
augacugcuuuaguaaag

SEQ ID NO: 562206 - RNA, 19 nt, Artificial Sequence
  Synthetic
aaugacugcuuuaguaaag

SEQ ID NO: 562207 - RNA, 20 nt, Artificial Sequence
  Synthetic
uaaugacugcuuuaguaaag

SEQ ID NO: 562208 - RNA, 21 nt, Artificial Sequence
  Synthetic
uuaaugacugcuuuaguaaag

SEQ ID NO: 562209 - RNA, 22 nt, Artificial Sequence
  Synthetic
uuuaaugacugcuuuaguaaag

SEQ ID NO: 562210 - RNA, 23 nt, Artificial Sequence
  Synthetic
uuuuaaugacugcuuuaguaaag

SEQ ID NO: 562211 - RNA, 24 nt, Artificial Sequence
  Synthetic
auuuuaaugacugcuuuaguaaag

SEQ ID NO: 562212 - RNA, 18 nt, Artificial Sequence
  Synthetic
uuacuauuuuuaguaaag

SEQ ID NO: 562213 - RNA, 19 nt, Artificial Sequence
  Synthetic
uuuacuauuuuuaguaaag

SEQ ID NO: 562214 - RNA, 20 nt, Artificial Sequence
  Synthetic
uuuuacuauuuuuaguaaag

SEQ ID NO: 562215 - RNA, 21 nt, Artificial Sequence
  Synthetic
auuuuacuauuuuuaguaaag

SEQ ID NO: 562216 - RNA, 22 nt, Artificial Sequence
  Synthetic
aauuuuacuauuuuuaguaaag

SEQ ID NO: 562217 - RNA, 23 nt, Artificial Sequence
  Synthetic
uaauuuuacuauuuuuaguaaag

SEQ ID NO: 562218 - RNA, 24 nt, Artificial Sequence
  Synthetic
cuaauuuuacuauuuuuaguaaag

SEQ ID NO: 562219 - RNA, 18 nt, Artificial Sequence
  Synthetic
aucagagagaagguaaag

SEQ ID NO: 562220 - RNA, 19 nt, Artificial Sequence
  Synthetic
aaucagagagaagguaaag

SEQ ID NO: 562221 - RNA, 20 nt, Artificial Sequence
  Synthetic
gaaucagagagaagguaaag

SEQ ID NO: 562222 - RNA, 21 nt, Artificial Sequence
  Synthetic
agaaucagagagaagguaaag

SEQ ID NO: 562223 - RNA, 22 nt, Artificial Sequence
  Synthetic
cagaaucagagagaagguaaag

SEQ ID NO: 562224 - RNA, 23 nt, Artificial Sequence
  Synthetic
ucagaaucagagagaagguaaag

SEQ ID NO: 562225 - RNA, 24 nt, Artificial Sequence
  Synthetic
uucagaaucagagagaagguaaag

SEQ ID NO: 562226 - RNA, 18 nt, Artificial Sequence
  Synthetic
aaccaugguaagguaaag

SEQ ID NO: 562227 - RNA, 19 nt, Artificial Sequence
  Synthetic
uaaccaugguaagguaaag

SEQ ID NO: 562228 - RNA, 20 nt, Artificial Sequence
  Synthetic
auaaccaugguaagguaaag

SEQ ID NO: 562229 - RNA, 21 nt, Artificial Sequence
  Synthetic
aauaaccaugguaagguaaag

SEQ ID NO: 562230 - RNA, 22 nt, Artificial Sequence
  Synthetic
uaauaaccaugguaagguaaag

SEQ ID NO: 562231 - RNA, 23 nt, Artificial Sequence
  Synthetic
cuaauaaccaugguaagguaaag

SEQ ID NO: 562232 - RNA, 24 nt, Artificial Sequence
  Synthetic
acuaauaaccaugguaagguaaag

SEQ ID NO: 562233 - RNA, 18 nt, Artificial Sequence
  Synthetic
gaaauaggggcgguaaag

SEQ ID NO: 562234 - RNA, 19 nt, Artificial Sequence
  Synthetic
ugaaauaggggcgguaaag

SEQ ID NO: 562235 - RNA, 20 nt, Artificial Sequence
  Synthetic
cugaaauaggggcgguaaag

SEQ ID NO: 562236 - RNA, 21 nt, Artificial Sequence
  Synthetic
ccugaaauaggggcgguaaag

SEQ ID NO: 562237 - RNA, 22 nt, Artificial Sequence
  Synthetic
gccugaaauaggggcgguaaag

SEQ ID NO: 562238 - RNA, 23 nt, Artificial Sequence
  Synthetic
agccugaaauaggggcgguaaag

SEQ ID NO: 562239 - RNA, 24 nt, Artificial Sequence
  Synthetic
uagccugaaauaggggcgguaaag

SEQ ID NO: 562240 - RNA, 18 nt, Artificial Sequence
  Synthetic
auuauuccuaggguaaag

SEQ ID NO: 562241 - RNA, 19 nt, Artificial Sequence
  Synthetic
uauuauuccuaggguaaag

SEQ ID NO: 562242 - RNA, 20 nt, Artificial Sequence
  Synthetic
uuauuauuccuaggguaaag

SEQ ID NO: 562243 - RNA, 21 nt, Artificial Sequence
  Synthetic
guuauuauuccuaggguaaag

SEQ ID NO: 562244 - RNA, 22 nt, Artificial Sequence
  Synthetic
uguuauuauuccuaggguaaag

SEQ ID NO: 562245 - RNA, 23 nt, Artificial Sequence
  Synthetic
guguuauuauuccuaggguaaag

SEQ ID NO: 562246 - RNA, 24 nt, Artificial Sequence
  Synthetic
uguguuauuauuccuaggguaaag

SEQ ID NO: 562247 - RNA, 18 nt, Artificial Sequence
  Synthetic
agaguagagcugguaaag

SEQ ID NO: 562248 - RNA, 19 nt, Artificial Sequence
  Synthetic
cagaguagagcugguaaag

SEQ ID NO: 562249 - RNA, 20 nt, Artificial Sequence
  Synthetic
ccagaguagagcugguaaag

SEQ ID NO: 562250 - RNA, 21 nt, Artificial Sequence
  Synthetic
uccagaguagagcugguaaag

SEQ ID NO: 562251 - RNA, 22 nt, Artificial Sequence
  Synthetic
uuccagaguagagcugguaaag

SEQ ID NO: 562252 - RNA, 23 nt, Artificial Sequence
  Synthetic
cuuccagaguagagcugguaaag

SEQ ID NO: 562253 - RNA, 24 nt, Artificial Sequence
  Synthetic
ccuuccagaguagagcugguaaag

SEQ ID NO: 562254 - RNA, 18 nt, Artificial Sequence
  Synthetic
uggcaauccaauguaaag

SEQ ID NO: 562255 - RNA, 19 nt, Artificial Sequence
  Synthetic
auggcaauccaauguaaag

SEQ ID NO: 562256 - RNA, 20 nt, Artificial Sequence
  Synthetic
aauggcaauccaauguaaag

SEQ ID NO: 562257 - RNA, 21 nt, Artificial Sequence
  Synthetic
uaauggcaauccaauguaaag

SEQ ID NO: 562258 - RNA, 22 nt, Artificial Sequence
  Synthetic
auaauggcaauccaauguaaag

SEQ ID NO: 562259 - RNA, 23 nt, Artificial Sequence
  Synthetic
aauaauggcaauccaauguaaag

SEQ ID NO: 562260 - RNA, 24 nt, Artificial Sequence
  Synthetic
gaauaauggcaauccaauguaaag

SEQ ID NO: 562261 - RNA, 18 nt, Artificial Sequence
  Synthetic
auuaaauguaauguaaag

SEQ ID NO: 562262 - RNA, 19 nt, Artificial Sequence
  Synthetic
aauuaaauguaauguaaag

SEQ ID NO: 562263 - RNA, 20 nt, Artificial Sequence
  Synthetic
gaauuaaauguaauguaaag

SEQ ID NO: 562264 - RNA, 21 nt, Artificial Sequence
  Synthetic
agaauuaaauguaauguaaag

SEQ ID NO: 562265 - RNA, 22 nt, Artificial Sequence
  Synthetic
aagaauuaaauguaauguaaag

SEQ ID NO: 562266 - RNA, 23 nt, Artificial Sequence
  Synthetic
aaagaauuaaauguaauguaaag

SEQ ID NO: 562267 - RNA, 24 nt, Artificial Sequence
  Synthetic
gaaagaauuaaauguaauguaaag

SEQ ID NO: 562268 - RNA, 18 nt, Artificial Sequence
  Synthetic
ggaagguagcauguaaag

SEQ ID NO: 562269 - RNA, 19 nt, Artificial Sequence
  Synthetic
aggaagguagcauguaaag

SEQ ID NO: 562270 - RNA, 20 nt, Artificial Sequence
  Synthetic
gaggaagguagcauguaaag

SEQ ID NO: 562271 - RNA, 21 nt, Artificial Sequence
  Synthetic
agaggaagguagcauguaaag

SEQ ID NO: 562272 - RNA, 22 nt, Artificial Sequence
  Synthetic
aagaggaagguagcauguaaag

SEQ ID NO: 562273 - RNA, 23 nt, Artificial Sequence
  Synthetic
uaagaggaagguagcauguaaag

SEQ ID NO: 562274 - RNA, 24 nt, Artificial Sequence
  Synthetic
uuaagaggaagguagcauguaaag

SEQ ID NO: 562275 - RNA, 18 nt, Artificial Sequence
  Synthetic
aauucggaagguguaaag

SEQ ID NO: 562276 - RNA, 19 nt, Artificial Sequence
  Synthetic
gaauucggaagguguaaag

SEQ ID NO: 562277 - RNA, 20 nt, Artificial Sequence
  Synthetic
ugaauucggaagguguaaag

SEQ ID NO: 562278 - RNA, 21 nt, Artificial Sequence
  Synthetic
uugaauucggaagguguaaag

SEQ ID NO: 562279 - RNA, 22 nt, Artificial Sequence
  Synthetic
guugaauucggaagguguaaag

SEQ ID NO: 562280 - RNA, 23 nt, Artificial Sequence
  Synthetic
uguugaauucggaagguguaaag

SEQ ID NO: 562281 - RNA, 24 nt, Artificial Sequence
  Synthetic
guguugaauucggaagguguaaag

SEQ ID NO: 562282 - RNA, 18 nt, Artificial Sequence
  Synthetic
uugguuuuggguguaaag

SEQ ID NO: 562283 - RNA, 19 nt, Artificial Sequence
  Synthetic
uuugguuuuggguguaaag

SEQ ID NO: 562284 - RNA, 20 nt, Artificial Sequence
  Synthetic
uuuugguuuuggguguaaag

SEQ ID NO: 562285 - RNA, 21 nt, Artificial Sequence
  Synthetic
cuuuugguuuuggguguaaag

SEQ ID NO: 562286 - RNA, 22 nt, Artificial Sequence
  Synthetic
acuuuugguuuuggguguaaag

SEQ ID NO: 562287 - RNA, 23 nt, Artificial Sequence
  Synthetic
gacuuuugguuuuggguguaaag

SEQ ID NO: 562288 - RNA, 24 nt, Artificial Sequence
  Synthetic
ugacuuuugguuuuggguguaaag

SEQ ID NO: 562289 - RNA, 18 nt, Artificial Sequence
  Synthetic
aaaaagcuugguguaaag

SEQ ID NO: 562290 - RNA, 19 nt, Artificial Sequence
  Synthetic
aaaaaagcuugguguaaag

SEQ ID NO: 562291 - RNA, 20 nt, Artificial Sequence
  Synthetic
aaaaaaagcuugguguaaag

SEQ ID NO: 562292 - RNA, 21 nt, Artificial Sequence
  Synthetic
gaaaaaaagcuugguguaaag

SEQ ID NO: 562293 - RNA, 22 nt, Artificial Sequence
  Synthetic
agaaaaaaagcuugguguaaag

SEQ ID NO: 562294 - RNA, 23 nt, Artificial Sequence
  Synthetic
gagaaaaaaagcuugguguaaag

SEQ ID NO: 562295 - RNA, 24 nt, Artificial Sequence
  Synthetic
agagaaaaaaagcuugguguaaag

SEQ ID NO: 562296 - RNA, 18 nt, Artificial Sequence
  Synthetic
uccacugcaaaauuaaag

SEQ ID NO: 562297 - RNA, 19 nt, Artificial Sequence
  Synthetic
uuccacugcaaaauuaaag

SEQ ID NO: 562298 - RNA, 20 nt, Artificial Sequence
  Synthetic
uuuccacugcaaaauuaaag

SEQ ID NO: 562299 - RNA, 21 nt, Artificial Sequence
  Synthetic
auuuccacugcaaaauuaaag

SEQ ID NO: 562300 - RNA, 22 nt, Artificial Sequence
  Synthetic
uauuuccacugcaaaauuaaag

SEQ ID NO: 562301 - RNA, 23 nt, Artificial Sequence
  Synthetic
uuauuuccacugcaaaauuaaag

SEQ ID NO: 562302 - RNA, 24 nt, Artificial Sequence
  Synthetic
uuuauuuccacugcaaaauuaaag

SEQ ID NO: 562303 - RNA, 18 nt, Artificial Sequence
  Synthetic
uaaggaaugaaauuaaag

SEQ ID NO: 562304 - RNA, 19 nt, Artificial Sequence
  Synthetic
uuaaggaaugaaauuaaag

SEQ ID NO: 562305 - RNA, 20 nt, Artificial Sequence
  Synthetic
auuaaggaaugaaauuaaag

SEQ ID NO: 562306 - RNA, 21 nt, Artificial Sequence
  Synthetic
aauuaaggaaugaaauuaaag

SEQ ID NO: 562307 - RNA, 22 nt, Artificial Sequence
  Synthetic
aaauuaaggaaugaaauuaaag

SEQ ID NO: 562308 - RNA, 23 nt, Artificial Sequence
  Synthetic
gaaauuaaggaaugaaauuaaag

SEQ ID NO: 562309 - RNA, 24 nt, Artificial Sequence
  Synthetic
ggaaauuaaggaaugaaauuaaag

SEQ ID NO: 562310 - RNA, 18 nt, Artificial Sequence
  Synthetic
acacaucaaacauuaaag

SEQ ID NO: 562311 - RNA, 19 nt, Artificial Sequence
  Synthetic
cacacaucaaacauuaaag

SEQ ID NO: 562312 - RNA, 20 nt, Artificial Sequence
  Synthetic
ucacacaucaaacauuaaag

SEQ ID NO: 562313 - RNA, 21 nt, Artificial Sequence
  Synthetic
uucacacaucaaacauuaaag

SEQ ID NO: 562314 - RNA, 22 nt, Artificial Sequence
  Synthetic
uuucacacaucaaacauuaaag

SEQ ID NO: 562315 - RNA, 23 nt, Artificial Sequence
  Synthetic
uuuucacacaucaaacauuaaag

SEQ ID NO: 562316 - RNA, 24 nt, Artificial Sequence
  Synthetic
uuuuucacacaucaaacauuaaag

SEQ ID NO: 562317 - RNA, 18 nt, Artificial Sequence
  Synthetic
acaaauuugugauuaaag

SEQ ID NO: 562318 - RNA, 19 nt, Artificial Sequence
  Synthetic
gacaaauuugugauuaaag

SEQ ID NO: 562319 - RNA, 20 nt, Artificial Sequence
  Synthetic
ggacaaauuugugauuaaag

SEQ ID NO: 562320 - RNA, 21 nt, Artificial Sequence
  Synthetic
gggacaaauuugugauuaaag

SEQ ID NO: 562321 - RNA, 22 nt, Artificial Sequence
  Synthetic
ugggacaaauuugugauuaaag

SEQ ID NO: 562322 - RNA, 23 nt, Artificial Sequence
  Synthetic
cugggacaaauuugugauuaaag

SEQ ID NO: 562323 - RNA, 24 nt, Artificial Sequence
  Synthetic
ucugggacaaauuugugauuaaag

SEQ ID NO: 562324 - RNA, 18 nt, Artificial Sequence
  Synthetic
uuauuauuauuauuaaag

SEQ ID NO: 562325 - RNA, 19 nt, Artificial Sequence
  Synthetic
auuauuauuauuauuaaag

SEQ ID NO: 562326 - RNA, 20 nt, Artificial Sequence
  Synthetic
uauuauuauuauuauuaaag

SEQ ID NO: 562327 - RNA, 21 nt, Artificial Sequence
  Synthetic
uuauuauuauuauuauuaaag

SEQ ID NO: 562328 - RNA, 22 nt, Artificial Sequence
  Synthetic
auuauuauuauuauuauuaaag

SEQ ID NO: 562329 - RNA, 23 nt, Artificial Sequence
  Synthetic
aauuauuauuauuauuauuaaag

SEQ ID NO: 562330 - RNA, 24 nt, Artificial Sequence
  Synthetic
aaauuauuauuauuauuauuaaag

SEQ ID NO: 562331 - RNA, 18 nt, Artificial Sequence
  Synthetic
uagaaaauaaacuuaaag

SEQ ID NO: 562332 - RNA, 19 nt, Artificial Sequence
  Synthetic
uuagaaaauaaacuuaaag

SEQ ID NO: 562333 - RNA, 20 nt, Artificial Sequence
  Synthetic
guuagaaaauaaacuuaaag

SEQ ID NO: 562334 - RNA, 21 nt, Artificial Sequence
  Synthetic
uguuagaaaauaaacuuaaag

SEQ ID NO: 562335 - RNA, 22 nt, Artificial Sequence
  Synthetic
auguuagaaaauaaacuuaaag

SEQ ID NO: 562336 - RNA, 23 nt, Artificial Sequence
  Synthetic
cauguuagaaaauaaacuuaaag

SEQ ID NO: 562337 - RNA, 24 nt, Artificial Sequence
  Synthetic
ccauguuagaaaauaaacuuaaag

SEQ ID NO: 562338 - RNA, 18 nt, Artificial Sequence
  Synthetic
aagcucuccaccuuaaag

SEQ ID NO: 562339 - RNA, 19 nt, Artificial Sequence
  Synthetic
gaagcucuccaccuuaaag

SEQ ID NO: 562340 - RNA, 20 nt, Artificial Sequence
  Synthetic
ggaagcucuccaccuuaaag

SEQ ID NO: 562341 - RNA, 21 nt, Artificial Sequence
  Synthetic
uggaagcucuccaccuuaaag

SEQ ID NO: 562342 - RNA, 22 nt, Artificial Sequence
  Synthetic
auggaagcucuccaccuuaaag

SEQ ID NO: 562343 - RNA, 23 nt, Artificial Sequence
  Synthetic
uauggaagcucuccaccuuaaag

SEQ ID NO: 562344 - RNA, 24 nt, Artificial Sequence
  Synthetic
cuauggaagcucuccaccuuaaag

SEQ ID NO: 562345 - RNA, 18 nt, Artificial Sequence
  Synthetic
agucaugaaaucuuaaag

SEQ ID NO: 562346 - RNA, 19 nt, Artificial Sequence
  Synthetic
cagucaugaaaucuuaaag

SEQ ID NO: 562347 - RNA, 20 nt, Artificial Sequence
  Synthetic
gcagucaugaaaucuuaaag

SEQ ID NO: 562348 - RNA, 21 nt, Artificial Sequence
  Synthetic
ugcagucaugaaaucuuaaag

SEQ ID NO: 562349 - RNA, 22 nt, Artificial Sequence
  Synthetic
cugcagucaugaaaucuuaaag

SEQ ID NO: 562350 - RNA, 23 nt, Artificial Sequence
  Synthetic
ucugcagucaugaaaucuuaaag

SEQ ID NO: 562351 - RNA, 24 nt, Artificial Sequence
  Synthetic
aucugcagucaugaaaucuuaaag

SEQ ID NO: 562352 - RNA, 18 nt, Artificial Sequence
  Synthetic
aaacuuucuaucuuaaag

SEQ ID NO: 562353 - RNA, 19 nt, Artificial Sequence
  Synthetic
aaaacuuucuaucuuaaag

SEQ ID NO: 562354 - RNA, 20 nt, Artificial Sequence
  Synthetic
gaaaacuuucuaucuuaaag

SEQ ID NO: 562355 - RNA, 21 nt, Artificial Sequence
  Synthetic
ggaaaacuuucuaucuuaaag

SEQ ID NO: 562356 - RNA, 22 nt, Artificial Sequence
  Synthetic
gggaaaacuuucuaucuuaaag

SEQ ID NO: 562357 - RNA, 23 nt, Artificial Sequence
  Synthetic
cgggaaaacuuucuaucuuaaag

SEQ ID NO: 562358 - RNA, 24 nt, Artificial Sequence
  Synthetic
gcgggaaaacuuucuaucuuaaag

SEQ ID NO: 562359 - RNA, 18 nt, Artificial Sequence
  Synthetic
aggucagggcucuuaaag

SEQ ID NO: 562360 - RNA, 19 nt, Artificial Sequence
  Synthetic
uaggucagggcucuuaaag

SEQ ID NO: 562361 - RNA, 20 nt, Artificial Sequence
  Synthetic
cuaggucagggcucuuaaag

SEQ ID NO: 562362 - RNA, 21 nt, Artificial Sequence
  Synthetic
ucuaggucagggcucuuaaag

SEQ ID NO: 562363 - RNA, 22 nt, Artificial Sequence
  Synthetic
gucuaggucagggcucuuaaag

SEQ ID NO: 562364 - RNA, 23 nt, Artificial Sequence
  Synthetic
agucuaggucagggcucuuaaag

SEQ ID NO: 562365 - RNA, 24 nt, Artificial Sequence
  Synthetic
aagucuaggucagggcucuuaaag

SEQ ID NO: 562366 - RNA, 18 nt, Artificial Sequence
  Synthetic
aguaaccuacaguuaaag

SEQ ID NO: 562367 - RNA, 19 nt, Artificial Sequence
  Synthetic
gaguaaccuacaguuaaag

SEQ ID NO: 562368 - RNA, 20 nt, Artificial Sequence
  Synthetic
ugaguaaccuacaguuaaag

SEQ ID NO: 562369 - RNA, 21 nt, Artificial Sequence
  Synthetic
augaguaaccuacaguuaaag

SEQ ID NO: 562370 - RNA, 22 nt, Artificial Sequence
  Synthetic
aaugaguaaccuacaguuaaag

SEQ ID NO: 562371 - RNA, 23 nt, Artificial Sequence
  Synthetic
aaaugaguaaccuacaguuaaag

SEQ ID NO: 562372 - RNA, 24 nt, Artificial Sequence
  Synthetic
caaaugaguaaccuacaguuaaag

SEQ ID NO: 562373 - RNA, 18 nt, Artificial Sequence
  Synthetic
ggguagggcccguuaaag

SEQ ID NO: 562374 - RNA, 19 nt, Artificial Sequence
  Synthetic
uggguagggcccguuaaag

SEQ ID NO: 562375 - RNA, 20 nt, Artificial Sequence
  Synthetic
uuggguagggcccguuaaag

SEQ ID NO: 562376 - RNA, 21 nt, Artificial Sequence
  Synthetic
cuuggguagggcccguuaaag

SEQ ID NO: 562377 - RNA, 22 nt, Artificial Sequence
  Synthetic
ucuuggguagggcccguuaaag

SEQ ID NO: 562378 - RNA, 23 nt, Artificial Sequence
  Synthetic
gucuuggguagggcccguuaaag

SEQ ID NO: 562379 - RNA, 24 nt, Artificial Sequence
  Synthetic
agucuuggguagggcccguuaaag

SEQ ID NO: 562380 - RNA, 18 nt, Artificial Sequence
  Synthetic
augugcaguguguuaaag

SEQ ID NO: 562381 - RNA, 19 nt, Artificial Sequence
  Synthetic
aaugugcaguguguuaaag

SEQ ID NO: 562382 - RNA, 20 nt, Artificial Sequence
  Synthetic
caaugugcaguguguuaaag

SEQ ID NO: 562383 - RNA, 21 nt, Artificial Sequence
  Synthetic
ucaaugugcaguguguuaaag

SEQ ID NO: 562384 - RNA, 22 nt, Artificial Sequence
  Synthetic
gucaaugugcaguguguuaaag

SEQ ID NO: 562385 - RNA, 23 nt, Artificial Sequence
  Synthetic
agucaaugugcaguguguuaaag

SEQ ID NO: 562386 - RNA, 24 nt, Artificial Sequence
  Synthetic
aagucaaugugcaguguguuaaag

SEQ ID NO: 562387 - RNA, 18 nt, Artificial Sequence
  Synthetic
gaaagaagucauuuaaag

SEQ ID NO: 562388 - RNA, 19 nt, Artificial Sequence
  Synthetic
ugaaagaagucauuuaaag

SEQ ID NO: 562389 - RNA, 20 nt, Artificial Sequence
  Synthetic
cugaaagaagucauuuaaag

SEQ ID NO: 562390 - RNA, 21 nt, Artificial Sequence
  Synthetic
acugaaagaagucauuuaaag

SEQ ID NO: 562391 - RNA, 22 nt, Artificial Sequence
  Synthetic
aacugaaagaagucauuuaaag

SEQ ID NO: 562392 - RNA, 23 nt, Artificial Sequence
  Synthetic
aaacugaaagaagucauuuaaag

SEQ ID NO: 562393 - RNA, 24 nt, Artificial Sequence
  Synthetic
uaaacugaaagaagucauuuaaag

SEQ ID NO: 562394 - RNA, 18 nt, Artificial Sequence
  Synthetic
aucuuggcaaguuuaaag

SEQ ID NO: 562395 - RNA, 19 nt, Artificial Sequence
  Synthetic
caucuuggcaaguuuaaag

SEQ ID NO: 562396 - RNA, 20 nt, Artificial Sequence
  Synthetic
acaucuuggcaaguuuaaag

SEQ ID NO: 562397 - RNA, 21 nt, Artificial Sequence
  Synthetic
gacaucuuggcaaguuuaaag

SEQ ID NO: 562398 - RNA, 22 nt, Artificial Sequence
  Synthetic
agacaucuuggcaaguuuaaag

SEQ ID NO: 562399 - RNA, 23 nt, Artificial Sequence
  Synthetic
aagacaucuuggcaaguuuaaag

SEQ ID NO: 562400 - RNA, 24 nt, Artificial Sequence
  Synthetic
gaagacaucuuggcaaguuuaaag

SEQ ID NO: 562401 - RNA, 18 nt, Artificial Sequence
  Synthetic
ccacugaaagguuuaaag

SEQ ID NO: 562402 - RNA, 19 nt, Artificial Sequence
  Synthetic
uccacugaaagguuuaaag

SEQ ID NO: 562403 - RNA, 20 nt, Artificial Sequence
  Synthetic
auccacugaaagguuuaaag

SEQ ID NO: 562404 - RNA, 21 nt, Artificial Sequence
  Synthetic
aauccacugaaagguuuaaag

SEQ ID NO: 562405 - RNA, 22 nt, Artificial Sequence
  Synthetic
gaauccacugaaagguuuaaag

SEQ ID NO: 562406 - RNA, 23 nt, Artificial Sequence
  Synthetic
ggaauccacugaaagguuuaaag

SEQ ID NO: 562407 - RNA, 24 nt, Artificial Sequence
  Synthetic
gggaauccacugaaagguuuaaag

SEQ ID NO: 562408 - RNA, 18 nt, Artificial Sequence
  Synthetic
acugaacaaauuuuaaag

SEQ ID NO: 562409 - RNA, 19 nt, Artificial Sequence
  Synthetic
uacugaacaaauuuuaaag

SEQ ID NO: 562410 - RNA, 20 nt, Artificial Sequence
  Synthetic
guacugaacaaauuuuaaag

SEQ ID NO: 562411 - RNA, 21 nt, Artificial Sequence
  Synthetic
aguacugaacaaauuuuaaag

SEQ ID NO: 562412 - RNA, 22 nt, Artificial Sequence
  Synthetic
gaguacugaacaaauuuuaaag

SEQ ID NO: 562413 - RNA, 23 nt, Artificial Sequence
  Synthetic
agaguacugaacaaauuuuaaag

SEQ ID NO: 562414 - RNA, 24 nt, Artificial Sequence
  Synthetic
gagaguacugaacaaauuuuaaag

SEQ ID NO: 562415 - RNA, 18 nt, Artificial Sequence
  Synthetic
guuauuagaauuuuaaag

SEQ ID NO: 562416 - RNA, 19 nt, Artificial Sequence
  Synthetic
aguuauuagaauuuuaaag

SEQ ID NO: 562417 - RNA, 20 nt, Artificial Sequence
  Synthetic
gaguuauuagaauuuuaaag

SEQ ID NO: 562418 - RNA, 21 nt, Artificial Sequence
  Synthetic
agaguuauuagaauuuuaaag

SEQ ID NO: 562419 - RNA, 22 nt, Artificial Sequence
  Synthetic
uagaguuauuagaauuuuaaag

SEQ ID NO: 562420 - RNA, 23 nt, Artificial Sequence
  Synthetic
auagaguuauuagaauuuuaaag

SEQ ID NO: 562421 - RNA, 24 nt, Artificial Sequence
  Synthetic
aauagaguuauuagaauuuuaaag

SEQ ID NO: 562422 - RNA, 18 nt, Artificial Sequence
  Synthetic
uccaguaccauuuuaaag

SEQ ID NO: 562423 - RNA, 19 nt, Artificial Sequence
  Synthetic
uuccaguaccauuuuaaag

SEQ ID NO: 562424 - RNA, 20 nt, Artificial Sequence
  Synthetic
cuuccaguaccauuuuaaag

SEQ ID NO: 562425 - RNA, 21 nt, Artificial Sequence
  Synthetic
ccuuccaguaccauuuuaaag

SEQ ID NO: 562426 - RNA, 22 nt, Artificial Sequence
  Synthetic
uccuuccaguaccauuuuaaag

SEQ ID NO: 562427 - RNA, 23 nt, Artificial Sequence
  Synthetic
auccuuccaguaccauuuuaaag

SEQ ID NO: 562428 - RNA, 24 nt, Artificial Sequence
  Synthetic
uauccuuccaguaccauuuuaaag

SEQ ID NO: 562429 - RNA, 18 nt, Artificial Sequence
  Synthetic
gugcccacuguuuuaaag

SEQ ID NO: 562430 - RNA, 19 nt, Artificial Sequence
  Synthetic
ggugcccacuguuuuaaag

SEQ ID NO: 562431 - RNA, 20 nt, Artificial Sequence
  Synthetic
uggugcccacuguuuuaaag

SEQ ID NO: 562432 - RNA, 21 nt, Artificial Sequence
  Synthetic
auggugcccacuguuuuaaag

SEQ ID NO: 562433 - RNA, 22 nt, Artificial Sequence
  Synthetic
uauggugcccacuguuuuaaag

SEQ ID NO: 562434 - RNA, 23 nt, Artificial Sequence
  Synthetic
auauggugcccacuguuuuaaag

SEQ ID NO: 562435 - RNA, 24 nt, Artificial Sequence
  Synthetic
aauauggugcccacuguuuuaaag

SEQ ID NO: 562436 - RNA, 18 nt, Artificial Sequence
  Synthetic
uagaauuaauuuuuaaag

SEQ ID NO: 562437 - RNA, 19 nt, Artificial Sequence
  Synthetic
uuagaauuaauuuuuaaag

SEQ ID NO: 562438 - RNA, 20 nt, Artificial Sequence
  Synthetic
guuagaauuaauuuuuaaag

SEQ ID NO: 562439 - RNA, 21 nt, Artificial Sequence
  Synthetic
aguuagaauuaauuuuuaaag

SEQ ID NO: 562440 - RNA, 22 nt, Artificial Sequence
  Synthetic
aaguuagaauuaauuuuuaaag

SEQ ID NO: 562441 - RNA, 23 nt, Artificial Sequence
  Synthetic
aaaguuagaauuaauuuuuaaag

SEQ ID NO: 562442 - RNA, 24 nt, Artificial Sequence
  Synthetic
uaaaguuagaauuaauuuuuaaag

SEQ ID NO: 562443 - RNA, 18 nt, Artificial Sequence
  Synthetic
cuacuguuauuuuuaaag

SEQ ID NO: 562444 - RNA, 19 nt, Artificial Sequence
  Synthetic
acuacuguuauuuuuaaag

SEQ ID NO: 562445 - RNA, 20 nt, Artificial Sequence
  Synthetic
aacuacuguuauuuuuaaag

SEQ ID NO: 562446 - RNA, 21 nt, Artificial Sequence
  Synthetic
aaacuacuguuauuuuuaaag

SEQ ID NO: 562447 - RNA, 22 nt, Artificial Sequence
  Synthetic
aaaacuacuguuauuuuuaaag

SEQ ID NO: 562448 - RNA, 23 nt, Artificial Sequence
  Synthetic
aaaaacuacuguuauuuuuaaag

SEQ ID NO: 562449 - RNA, 24 nt, Artificial Sequence
  Synthetic
uaaaaacuacuguuauuuuuaaag

SEQ ID NO: 562450 - RNA, 18 nt, Artificial Sequence
  Synthetic
ccuguuuaguuuuuaaag

SEQ ID NO: 562451 - RNA, 19 nt, Artificial Sequence
  Synthetic
gccuguuuaguuuuuaaag

SEQ ID NO: 562452 - RNA, 20 nt, Artificial Sequence
  Synthetic
ugccuguuuaguuuuuaaag

SEQ ID NO: 562453 - RNA, 21 nt, Artificial Sequence
  Synthetic
augccuguuuaguuuuuaaag

SEQ ID NO: 562454 - RNA, 22 nt, Artificial Sequence
  Synthetic
aaugccuguuuaguuuuuaaag

SEQ ID NO: 562455 - RNA, 23 nt, Artificial Sequence
  Synthetic
aaaugccuguuuaguuuuuaaag

SEQ ID NO: 562456 - RNA, 24 nt, Artificial Sequence
  Synthetic
aaaaugccuguuuaguuuuuaaag

SEQ ID NO: 562457 - RNA, 18 nt, Artificial Sequence
  Synthetic
gaaauugauuuuuuaaag

SEQ ID NO: 562458 - RNA, 19 nt, Artificial Sequence
  Synthetic
ggaaauugauuuuuuaaag

SEQ ID NO: 562459 - RNA, 20 nt, Artificial Sequence
  Synthetic
cggaaauugauuuuuuaaag

SEQ ID NO: 562460 - RNA, 21 nt, Artificial Sequence
  Synthetic
ucggaaauugauuuuuuaaag

SEQ ID NO: 562461 - RNA, 22 nt, Artificial Sequence
  Synthetic
gucggaaauugauuuuuuaaag

SEQ ID NO: 562462 - RNA, 23 nt, Artificial Sequence
  Synthetic
ugucggaaauugauuuuuuaaag

SEQ ID NO: 562463 - RNA, 24 nt, Artificial Sequence
  Synthetic
cugucggaaauugauuuuuuaaag

SEQ ID NO: 562464 - RNA, 18 nt, Artificial Sequence
  Synthetic
uaauuacuuuuuuuaaag

SEQ ID NO: 562465 - RNA, 19 nt, Artificial Sequence
  Synthetic
auaauuacuuuuuuuaaag

SEQ ID NO: 562466 - RNA, 20 nt, Artificial Sequence
  Synthetic
uauaauuacuuuuuuuaaag

SEQ ID NO: 562467 - RNA, 21 nt, Artificial Sequence
  Synthetic
cuauaauuacuuuuuuuaaag

SEQ ID NO: 562468 - RNA, 22 nt, Artificial Sequence
  Synthetic
gcuauaauuacuuuuuuuaaag

SEQ ID NO: 562469 - RNA, 23 nt, Artificial Sequence
  Synthetic
ggcuauaauuacuuuuuuuaaag

SEQ ID NO: 562470 - RNA, 24 nt, Artificial Sequence
  Synthetic
uggcuauaauuacuuuuuuuaaag

SEQ ID NO: 562471 - RNA, 18 nt, Artificial Sequence
  Synthetic
caaaagcaacaaaacaag

SEQ ID NO: 562472 - RNA, 19 nt, Artificial Sequence
  Synthetic
acaaaagcaacaaaacaag

SEQ ID NO: 562473 - RNA, 20 nt, Artificial Sequence
  Synthetic
aacaaaagcaacaaaacaag

SEQ ID NO: 562474 - RNA, 21 nt, Artificial Sequence
  Synthetic
uaacaaaagcaacaaaacaag

SEQ ID NO: 562475 - RNA, 22 nt, Artificial Sequence
  Synthetic
uuaacaaaagcaacaaaacaag

SEQ ID NO: 562476 - RNA, 23 nt, Artificial Sequence
  Synthetic
auuaacaaaagcaacaaaacaag

SEQ ID NO: 562477 - RNA, 24 nt, Artificial Sequence
  Synthetic
cauuaacaaaagcaacaaaacaag

SEQ ID NO: 562478 - RNA, 18 nt, Artificial Sequence
  Synthetic
aaacaaaggcaaaacaag

SEQ ID NO: 562479 - RNA, 19 nt, Artificial Sequence
  Synthetic
aaaacaaaggcaaaacaag

SEQ ID NO: 562480 - RNA, 20 nt, Artificial Sequence
  Synthetic
aaaaacaaaggcaaaacaag

SEQ ID NO: 562481 - RNA, 21 nt, Artificial Sequence
  Synthetic
aaaaaacaaaggcaaaacaag

SEQ ID NO: 562482 - RNA, 22 nt, Artificial Sequence
  Synthetic
gaaaaaacaaaggcaaaacaag

SEQ ID NO: 562483 - RNA, 23 nt, Artificial Sequence
  Synthetic
agaaaaaacaaaggcaaaacaag

SEQ ID NO: 562484 - RNA, 24 nt, Artificial Sequence
  Synthetic
aagaaaaaacaaaggcaaaacaag

SEQ ID NO: 562485 - RNA, 18 nt, Artificial Sequence
  Synthetic
gagaauauuuaaaacaag

SEQ ID NO: 562486 - RNA, 19 nt, Artificial Sequence
  Synthetic
ugagaauauuuaaaacaag

SEQ ID NO: 562487 - RNA, 20 nt, Artificial Sequence
  Synthetic
augagaauauuuaaaacaag

SEQ ID NO: 562488 - RNA, 21 nt, Artificial Sequence
  Synthetic
gaugagaauauuuaaaacaag

SEQ ID NO: 562489 - RNA, 22 nt, Artificial Sequence
  Synthetic
agaugagaauauuuaaaacaag

SEQ ID NO: 562490 - RNA, 23 nt, Artificial Sequence
  Synthetic
aagaugagaauauuuaaaacaag

SEQ ID NO: 562491 - RNA, 24 nt, Artificial Sequence
  Synthetic
gaagaugagaauauuuaaaacaag

SEQ ID NO: 562492 - RNA, 18 nt, Artificial Sequence
  Synthetic
acaugugacccaaacaag

SEQ ID NO: 562493 - RNA, 19 nt, Artificial Sequence
  Synthetic
aacaugugacccaaacaag

SEQ ID NO: 562494 - RNA, 20 nt, Artificial Sequence
  Synthetic
uaacaugugacccaaacaag

SEQ ID NO: 562495 - RNA, 21 nt, Artificial Sequence
  Synthetic
uuaacaugugacccaaacaag

SEQ ID NO: 562496 - RNA, 22 nt, Artificial Sequence
  Synthetic
auuaacaugugacccaaacaag

SEQ ID NO: 562497 - RNA, 23 nt, Artificial Sequence
  Synthetic
uauuaacaugugacccaaacaag

SEQ ID NO: 562498 - RNA, 24 nt, Artificial Sequence
  Synthetic
guauuaacaugugacccaaacaag

SEQ ID NO: 562499 - RNA, 18 nt, Artificial Sequence
  Synthetic
guaacaaugagaaacaag

SEQ ID NO: 562500 - RNA, 19 nt, Artificial Sequence
  Synthetic
gguaacaaugagaaacaag

SEQ ID NO: 562501 - RNA, 20 nt, Artificial Sequence
  Synthetic
ugguaacaaugagaaacaag

SEQ ID NO: 562502 - RNA, 21 nt, Artificial Sequence
  Synthetic
augguaacaaugagaaacaag

SEQ ID NO: 562503 - RNA, 22 nt, Artificial Sequence
  Synthetic
aaugguaacaaugagaaacaag

SEQ ID NO: 562504 - RNA, 23 nt, Artificial Sequence
  Synthetic
aaaugguaacaaugagaaacaag

SEQ ID NO: 562505 - RNA, 24 nt, Artificial Sequence
  Synthetic
caaaugguaacaaugagaaacaag

SEQ ID NO: 562506 - RNA, 18 nt, Artificial Sequence
  Synthetic
uuacauaggauaaacaag

SEQ ID NO: 562507 - RNA, 19 nt, Artificial Sequence
  Synthetic
auuacauaggauaaacaag

SEQ ID NO: 562508 - RNA, 20 nt, Artificial Sequence
  Synthetic
gauuacauaggauaaacaag

SEQ ID NO: 562509 - RNA, 21 nt, Artificial Sequence
  Synthetic
ugauuacauaggauaaacaag

SEQ ID NO: 562510 - RNA, 22 nt, Artificial Sequence
  Synthetic
augauuacauaggauaaacaag

SEQ ID NO: 562511 - RNA, 23 nt, Artificial Sequence
  Synthetic
aaugauuacauaggauaaacaag

SEQ ID NO: 562512 - RNA, 24 nt, Artificial Sequence
  Synthetic
aaaugauuacauaggauaaacaag

SEQ ID NO: 562513 - RNA, 18 nt, Artificial Sequence
  Synthetic
cuaaaaguguuaaacaag

SEQ ID NO: 562514 - RNA, 19 nt, Artificial Sequence
  Synthetic
ccuaaaaguguuaaacaag

SEQ ID NO: 562515 - RNA, 20 nt, Artificial Sequence
  Synthetic
uccuaaaaguguuaaacaag

SEQ ID NO: 562516 - RNA, 21 nt, Artificial Sequence
  Synthetic
auccuaaaaguguuaaacaag

SEQ ID NO: 562517 - RNA, 22 nt, Artificial Sequence
  Synthetic
aauccuaaaaguguuaaacaag

SEQ ID NO: 562518 - RNA, 23 nt, Artificial Sequence
  Synthetic
aaauccuaaaaguguuaaacaag

SEQ ID NO: 562519 - RNA, 24 nt, Artificial Sequence
  Synthetic
aaaauccuaaaaguguuaaacaag

SEQ ID NO: 562520 - RNA, 18 nt, Artificial Sequence
  Synthetic
agggcugcaaacaacaag

SEQ ID NO: 562521 - RNA, 19 nt, Artificial Sequence
  Synthetic
uagggcugcaaacaacaag

SEQ ID NO: 562522 - RNA, 20 nt, Artificial Sequence
  Synthetic
uuagggcugcaaacaacaag

SEQ ID NO: 562523 - RNA, 21 nt, Artificial Sequence
  Synthetic
uuuagggcugcaaacaacaag

SEQ ID NO: 562524 - RNA, 22 nt, Artificial Sequence
  Synthetic
uuuuagggcugcaaacaacaag

SEQ ID NO: 562525 - RNA, 23 nt, Artificial Sequence
  Synthetic
auuuuagggcugcaaacaacaag

SEQ ID NO: 562526 - RNA, 24 nt, Artificial Sequence
  Synthetic
aauuuuagggcugcaaacaacaag

SEQ ID NO: 562527 - RNA, 18 nt, Artificial Sequence
  Synthetic
gaucccucccacaacaag

SEQ ID NO: 562528 - RNA, 19 nt, Artificial Sequence
  Synthetic
ggaucccucccacaacaag

SEQ ID NO: 562529 - RNA, 20 nt, Artificial Sequence
  Synthetic
uggaucccucccacaacaag

SEQ ID NO: 562530 - RNA, 21 nt, Artificial Sequence
  Synthetic
cuggaucccucccacaacaag

SEQ ID NO: 562531 - RNA, 22 nt, Artificial Sequence
  Synthetic
acuggaucccucccacaacaag

SEQ ID NO: 562532 - RNA, 23 nt, Artificial Sequence
  Synthetic
cacuggaucccucccacaacaag

SEQ ID NO: 562533 - RNA, 24 nt, Artificial Sequence
  Synthetic
ccacuggaucccucccacaacaag

SEQ ID NO: 562534 - RNA, 18 nt, Artificial Sequence
  Synthetic
agggaucaauucaacaag

SEQ ID NO: 562535 - RNA, 19 nt, Artificial Sequence
  Synthetic
aagggaucaauucaacaag

SEQ ID NO: 562536 - RNA, 20 nt, Artificial Sequence
  Synthetic
aaagggaucaauucaacaag

SEQ ID NO: 562537 - RNA, 21 nt, Artificial Sequence
  Synthetic
uaaagggaucaauucaacaag

SEQ ID NO: 562538 - RNA, 22 nt, Artificial Sequence
  Synthetic
guaaagggaucaauucaacaag

SEQ ID NO: 562539 - RNA, 23 nt, Artificial Sequence
  Synthetic
gguaaagggaucaauucaacaag

SEQ ID NO: 562540 - RNA, 24 nt, Artificial Sequence
  Synthetic
ugguaaagggaucaauucaacaag

SEQ ID NO: 562541 - RNA, 18 nt, Artificial Sequence
  Synthetic
uagagcauaaagaacaag

SEQ ID NO: 562542 - RNA, 19 nt, Artificial Sequence
  Synthetic
cuagagcauaaagaacaag

SEQ ID NO: 562543 - RNA, 20 nt, Artificial Sequence
  Synthetic
ucuagagcauaaagaacaag

SEQ ID NO: 562544 - RNA, 21 nt, Artificial Sequence
  Synthetic
uucuagagcauaaagaacaag

SEQ ID NO: 562545 - RNA, 22 nt, Artificial Sequence
  Synthetic
uuucuagagcauaaagaacaag

SEQ ID NO: 562546 - RNA, 23 nt, Artificial Sequence
  Synthetic
guuucuagagcauaaagaacaag

SEQ ID NO: 562547 - RNA, 24 nt, Artificial Sequence
  Synthetic
uguuucuagagcauaaagaacaag

SEQ ID NO: 562548 - RNA, 18 nt, Artificial Sequence
  Synthetic
uuuauuuuuaagaacaag

SEQ ID NO: 562549 - RNA, 19 nt, Artificial Sequence
  Synthetic
uuuuauuuuuaagaacaag

SEQ ID NO: 562550 - RNA, 20 nt, Artificial Sequence
  Synthetic
uuuuuauuuuuaagaacaag

SEQ ID NO: 562551 - RNA, 21 nt, Artificial Sequence
  Synthetic
guuuuuauuuuuaagaacaag

SEQ ID NO: 562552 - RNA, 22 nt, Artificial Sequence
  Synthetic
aguuuuuauuuuuaagaacaag

SEQ ID NO: 562553 - RNA, 23 nt, Artificial Sequence
  Synthetic
aaguuuuuauuuuuaagaacaag

SEQ ID NO: 562554 - RNA, 24 nt, Artificial Sequence
  Synthetic
aaaguuuuuauuuuuaagaacaag

SEQ ID NO: 562555 - RNA, 18 nt, Artificial Sequence
  Synthetic
cuacaagaacagaacaag

SEQ ID NO: 562556 - RNA, 19 nt, Artificial Sequence
  Synthetic
ucuacaagaacagaacaag

SEQ ID NO: 562557 - RNA, 20 nt, Artificial Sequence
  Synthetic
uucuacaagaacagaacaag

SEQ ID NO: 562558 - RNA, 21 nt, Artificial Sequence
  Synthetic
uuucuacaagaacagaacaag

SEQ ID NO: 562559 - RNA, 22 nt, Artificial Sequence
  Synthetic
cuuucuacaagaacagaacaag

SEQ ID NO: 562560 - RNA, 23 nt, Artificial Sequence
  Synthetic
ccuuucuacaagaacagaacaag

SEQ ID NO: 562561 - RNA, 24 nt, Artificial Sequence
  Synthetic
uccuuucuacaagaacagaacaag

SEQ ID NO: 562562 - RNA, 18 nt, Artificial Sequence
  Synthetic
uuaaaucuauagaacaag

SEQ ID NO: 562563 - RNA, 19 nt, Artificial Sequence
  Synthetic
auuaaaucuauagaacaag

SEQ ID NO: 562564 - RNA, 20 nt, Artificial Sequence
  Synthetic
cauuaaaucuauagaacaag

SEQ ID NO: 562565 - RNA, 21 nt, Artificial Sequence
  Synthetic
gcauuaaaucuauagaacaag

SEQ ID NO: 562566 - RNA, 22 nt, Artificial Sequence
  Synthetic
ugcauuaaaucuauagaacaag

SEQ ID NO: 562567 - RNA, 23 nt, Artificial Sequence
  Synthetic
uugcauuaaaucuauagaacaag

SEQ ID NO: 562568 - RNA, 24 nt, Artificial Sequence
  Synthetic
auugcauuaaaucuauagaacaag

SEQ ID NO: 562569 - RNA, 18 nt, Artificial Sequence
  Synthetic
cuucaugagaggaacaag

SEQ ID NO: 562570 - RNA, 19 nt, Artificial Sequence
  Synthetic
gcuucaugagaggaacaag

SEQ ID NO: 562571 - RNA, 20 nt, Artificial Sequence
  Synthetic
ugcuucaugagaggaacaag

SEQ ID NO: 562572 - RNA, 21 nt, Artificial Sequence
  Synthetic
uugcuucaugagaggaacaag

SEQ ID NO: 562573 - RNA, 22 nt, Artificial Sequence
  Synthetic
uuugcuucaugagaggaacaag

SEQ ID NO: 562574 - RNA, 23 nt, Artificial Sequence
  Synthetic
auuugcuucaugagaggaacaag

SEQ ID NO: 562575 - RNA, 24 nt, Artificial Sequence
  Synthetic
gauuugcuucaugagaggaacaag

SEQ ID NO: 562576 - RNA, 18 nt, Artificial Sequence
  Synthetic
gucuccaaagggaacaag

SEQ ID NO: 562577 - RNA, 19 nt, Artificial Sequence
  Synthetic
ggucuccaaagggaacaag

SEQ ID NO: 562578 - RNA, 20 nt, Artificial Sequence
  Synthetic
uggucuccaaagggaacaag

SEQ ID NO: 562579 - RNA, 21 nt, Artificial Sequence
  Synthetic
guggucuccaaagggaacaag

SEQ ID NO: 562580 - RNA, 22 nt, Artificial Sequence
  Synthetic
uguggucuccaaagggaacaag

SEQ ID NO: 562581 - RNA, 23 nt, Artificial Sequence
  Synthetic
auguggucuccaaagggaacaag

SEQ ID NO: 562582 - RNA, 24 nt, Artificial Sequence
  Synthetic
uauguggucuccaaagggaacaag

SEQ ID NO: 562583 - RNA, 18 nt, Artificial Sequence
  Synthetic
ugaacaccugggaacaag

SEQ ID NO: 562584 - RNA, 19 nt, Artificial Sequence
  Synthetic
augaacaccugggaacaag

SEQ ID NO: 562585 - RNA, 20 nt, Artificial Sequence
  Synthetic
caugaacaccugggaacaag

SEQ ID NO: 562586 - RNA, 21 nt, Artificial Sequence
  Synthetic
ucaugaacaccugggaacaag

SEQ ID NO: 562587 - RNA, 22 nt, Artificial Sequence
  Synthetic
aucaugaacaccugggaacaag

SEQ ID NO: 562588 - RNA, 23 nt, Artificial Sequence
  Synthetic
caucaugaacaccugggaacaag

SEQ ID NO: 562589 - RNA, 24 nt, Artificial Sequence
  Synthetic
gcaucaugaacaccugggaacaag

SEQ ID NO: 562590 - RNA, 18 nt, Artificial Sequence
  Synthetic
gaaauagaaaauaacaag

SEQ ID NO: 562591 - RNA, 19 nt, Artificial Sequence
  Synthetic
ggaaauagaaaauaacaag

SEQ ID NO: 562592 - RNA, 20 nt, Artificial Sequence
  Synthetic
aggaaauagaaaauaacaag

SEQ ID NO: 562593 - RNA, 21 nt, Artificial Sequence
  Synthetic
gaggaaauagaaaauaacaag

SEQ ID NO: 562594 - RNA, 22 nt, Artificial Sequence
  Synthetic
agaggaaauagaaaauaacaag

SEQ ID NO: 562595 - RNA, 23 nt, Artificial Sequence
  Synthetic
cagaggaaauagaaaauaacaag

SEQ ID NO: 562596 - RNA, 24 nt, Artificial Sequence
  Synthetic
acagaggaaauagaaaauaacaag

SEQ ID NO: 562597 - RNA, 18 nt, Artificial Sequence
  Synthetic
uaguucccuuauaacaag

SEQ ID NO: 562598 - RNA, 19 nt, Artificial Sequence
  Synthetic
uuaguucccuuauaacaag

SEQ ID NO: 562599 - RNA, 20 nt, Artificial Sequence
  Synthetic
auuaguucccuuauaacaag

SEQ ID NO: 562600 - RNA, 21 nt, Artificial Sequence
  Synthetic
aauuaguucccuuauaacaag

SEQ ID NO: 562601 - RNA, 22 nt, Artificial Sequence
  Synthetic
gaauuaguucccuuauaacaag

SEQ ID NO: 562602 - RNA, 23 nt, Artificial Sequence
  Synthetic
ggaauuaguucccuuauaacaag

SEQ ID NO: 562603 - RNA, 24 nt, Artificial Sequence
  Synthetic
uggaauuaguucccuuauaacaag

SEQ ID NO: 562604 - RNA, 18 nt, Artificial Sequence
  Synthetic
accauccuggcuaacaag

SEQ ID NO: 562605 - RNA, 19 nt, Artificial Sequence
  Synthetic
gaccauccuggcuaacaag

SEQ ID NO: 562606 - RNA, 20 nt, Artificial Sequence
  Synthetic
agaccauccuggcuaacaag

SEQ ID NO: 562607 - RNA, 21 nt, Artificial Sequence
  Synthetic
gagaccauccuggcuaacaag

SEQ ID NO: 562608 - RNA, 22 nt, Artificial Sequence
  Synthetic
cgagaccauccuggcuaacaag

SEQ ID NO: 562609 - RNA, 23 nt, Artificial Sequence
  Synthetic
ucgagaccauccuggcuaacaag

SEQ ID NO: 562610 - RNA, 24 nt, Artificial Sequence
  Synthetic
aucgagaccauccuggcuaacaag

SEQ ID NO: 562611 - RNA, 18 nt, Artificial Sequence
  Synthetic
uaugaaaauucuaacaag

SEQ ID NO: 562612 - RNA, 19 nt, Artificial Sequence
  Synthetic
guaugaaaauucuaacaag

SEQ ID NO: 562613 - RNA, 20 nt, Artificial Sequence
  Synthetic
uguaugaaaauucuaacaag

SEQ ID NO: 562614 - RNA, 21 nt, Artificial Sequence
  Synthetic
uuguaugaaaauucuaacaag

SEQ ID NO: 562615 - RNA, 22 nt, Artificial Sequence
  Synthetic
uuuguaugaaaauucuaacaag

SEQ ID NO: 562616 - RNA, 23 nt, Artificial Sequence
  Synthetic
auuuguaugaaaauucuaacaag

SEQ ID NO: 562617 - RNA, 24 nt, Artificial Sequence
  Synthetic
cauuuguaugaaaauucuaacaag

SEQ ID NO: 562618 - RNA, 18 nt, Artificial Sequence
  Synthetic
auuaaaaagaaacacaag

SEQ ID NO: 562619 - RNA, 19 nt, Artificial Sequence
  Synthetic
aauuaaaaagaaacacaag

SEQ ID NO: 562620 - RNA, 20 nt, Artificial Sequence
  Synthetic
caauuaaaaagaaacacaag

SEQ ID NO: 562621 - RNA, 21 nt, Artificial Sequence
  Synthetic
acaauuaaaaagaaacacaag

SEQ ID NO: 562622 - RNA, 22 nt, Artificial Sequence
  Synthetic
aacaauuaaaaagaaacacaag

SEQ ID NO: 562623 - RNA, 23 nt, Artificial Sequence
  Synthetic
aaacaauuaaaaagaaacacaag

SEQ ID NO: 562624 - RNA, 24 nt, Artificial Sequence
  Synthetic
gaaacaauuaaaaagaaacacaag

SEQ ID NO: 562625 - RNA, 18 nt, Artificial Sequence
  Synthetic
aaaaugcuccaacacaag

SEQ ID NO: 562626 - RNA, 19 nt, Artificial Sequence
  Synthetic
aaaaaugcuccaacacaag

SEQ ID NO: 562627 - RNA, 20 nt, Artificial Sequence
  Synthetic
aaaaaaugcuccaacacaag

SEQ ID NO: 562628 - RNA, 21 nt, Artificial Sequence
  Synthetic
aaaaaaaugcuccaacacaag

SEQ ID NO: 562629 - RNA, 22 nt, Artificial Sequence
  Synthetic
gaaaaaaaugcuccaacacaag

SEQ ID NO: 562630 - RNA, 23 nt, Artificial Sequence
  Synthetic
ugaaaaaaaugcuccaacacaag

SEQ ID NO: 562631 - RNA, 24 nt, Artificial Sequence
  Synthetic
augaaaaaaaugcuccaacacaag

SEQ ID NO: 562632 - RNA, 18 nt, Artificial Sequence
  Synthetic
uacuagaaguaacacaag

SEQ ID NO: 562633 - RNA, 19 nt, Artificial Sequence
  Synthetic
uuacuagaaguaacacaag

SEQ ID NO: 562634 - RNA, 20 nt, Artificial Sequence
  Synthetic
auuacuagaaguaacacaag

SEQ ID NO: 562635 - RNA, 21 nt, Artificial Sequence
  Synthetic
uauuacuagaaguaacacaag

SEQ ID NO: 562636 - RNA, 22 nt, Artificial Sequence
  Synthetic
auauuacuagaaguaacacaag

SEQ ID NO: 562637 - RNA, 23 nt, Artificial Sequence
  Synthetic
gauauuacuagaaguaacacaag

SEQ ID NO: 562638 - RNA, 24 nt, Artificial Sequence
  Synthetic
ggauauuacuagaaguaacacaag

SEQ ID NO: 562639 - RNA, 18 nt, Artificial Sequence
  Synthetic
caugaagucucacacaag

SEQ ID NO: 562640 - RNA, 19 nt, Artificial Sequence
  Synthetic
acaugaagucucacacaag

SEQ ID NO: 562641 - RNA, 20 nt, Artificial Sequence
  Synthetic
uacaugaagucucacacaag

SEQ ID NO: 562642 - RNA, 21 nt, Artificial Sequence
  Synthetic
guacaugaagucucacacaag

SEQ ID NO: 562643 - RNA, 22 nt, Artificial Sequence
  Synthetic
cguacaugaagucucacacaag

SEQ ID NO: 562644 - RNA, 23 nt, Artificial Sequence
  Synthetic
ccguacaugaagucucacacaag

SEQ ID NO: 562645 - RNA, 24 nt, Artificial Sequence
  Synthetic
accguacaugaagucucacacaag

SEQ ID NO: 562646 - RNA, 18 nt, Artificial Sequence
  Synthetic
uucaaaggacaccacaag

SEQ ID NO: 562647 - RNA, 19 nt, Artificial Sequence
  Synthetic
auucaaaggacaccacaag

SEQ ID NO: 562648 - RNA, 20 nt, Artificial Sequence
  Synthetic
uauucaaaggacaccacaag

SEQ ID NO: 562649 - RNA, 21 nt, Artificial Sequence
  Synthetic
auauucaaaggacaccacaag

SEQ ID NO: 562650 - RNA, 22 nt, Artificial Sequence
  Synthetic
cauauucaaaggacaccacaag

SEQ ID NO: 562651 - RNA, 23 nt, Artificial Sequence
  Synthetic
gcauauucaaaggacaccacaag

SEQ ID NO: 562652 - RNA, 24 nt, Artificial Sequence
  Synthetic
ugcauauucaaaggacaccacaag

SEQ ID NO: 562653 - RNA, 18 nt, Artificial Sequence
  Synthetic
uuguuccaggcccacaag

SEQ ID NO: 562654 - RNA, 19 nt, Artificial Sequence
  Synthetic
auuguuccaggcccacaag

SEQ ID NO: 562655 - RNA, 20 nt, Artificial Sequence
  Synthetic
cauuguuccaggcccacaag

SEQ ID NO: 562656 - RNA, 21 nt, Artificial Sequence
  Synthetic
ccauuguuccaggcccacaag

SEQ ID NO: 562657 - RNA, 22 nt, Artificial Sequence
  Synthetic
accauuguuccaggcccacaag

SEQ ID NO: 562658 - RNA, 23 nt, Artificial Sequence
  Synthetic
caccauuguuccaggcccacaag

SEQ ID NO: 562659 - RNA, 24 nt, Artificial Sequence
  Synthetic
acaccauuguuccaggcccacaag

SEQ ID NO: 562660 - RNA, 18 nt, Artificial Sequence
  Synthetic
cuugaacacagccacaag

SEQ ID NO: 562661 - RNA, 19 nt, Artificial Sequence
  Synthetic
ccuugaacacagccacaag

SEQ ID NO: 562662 - RNA, 20 nt, Artificial Sequence
  Synthetic
accuugaacacagccacaag

SEQ ID NO: 562663 - RNA, 21 nt, Artificial Sequence
  Synthetic
caccuugaacacagccacaag

SEQ ID NO: 562664 - RNA, 22 nt, Artificial Sequence
  Synthetic
ccaccuugaacacagccacaag

SEQ ID NO: 562665 - RNA, 23 nt, Artificial Sequence
  Synthetic
cccaccuugaacacagccacaag

SEQ ID NO: 562666 - RNA, 24 nt, Artificial Sequence
  Synthetic
ccccaccuugaacacagccacaag

SEQ ID NO: 562667 - RNA, 18 nt, Artificial Sequence
  Synthetic
acauggcagagccacaag

SEQ ID NO: 562668 - RNA, 19 nt, Artificial Sequence
  Synthetic
gacauggcagagccacaag

SEQ ID NO: 562669 - RNA, 20 nt, Artificial Sequence
  Synthetic
ugacauggcagagccacaag

SEQ ID NO: 562670 - RNA, 21 nt, Artificial Sequence
  Synthetic
uugacauggcagagccacaag

SEQ ID NO: 562671 - RNA, 22 nt, Artificial Sequence
  Synthetic
guugacauggcagagccacaag

SEQ ID NO: 562672 - RNA, 23 nt, Artificial Sequence
  Synthetic
uguugacauggcagagccacaag

SEQ ID NO: 562673 - RNA, 24 nt, Artificial Sequence
  Synthetic
auguugacauggcagagccacaag

SEQ ID NO: 562674 - RNA, 18 nt, Artificial Sequence
  Synthetic
uuccgauguagucacaag

SEQ ID NO: 562675 - RNA, 19 nt, Artificial Sequence
  Synthetic
auuccgauguagucacaag

SEQ ID NO: 562676 - RNA, 20 nt, Artificial Sequence
  Synthetic
aauuccgauguagucacaag

SEQ ID NO: 562677 - RNA, 21 nt, Artificial Sequence
  Synthetic
aaauuccgauguagucacaag

SEQ ID NO: 562678 - RNA, 22 nt, Artificial Sequence
  Synthetic
aaaauuccgauguagucacaag

SEQ ID NO: 562679 - RNA, 23 nt, Artificial Sequence
  Synthetic
caaaauuccgauguagucacaag

SEQ ID NO: 562680 - RNA, 24 nt, Artificial Sequence
  Synthetic
gcaaaauuccgauguagucacaag

SEQ ID NO: 562681 - RNA, 18 nt, Artificial Sequence
  Synthetic
aaacuaaaaugucacaag

SEQ ID NO: 562682 - RNA, 19 nt, Artificial Sequence
  Synthetic
caaacuaaaaugucacaag

SEQ ID NO: 562683 - RNA, 20 nt, Artificial Sequence
  Synthetic
ccaaacuaaaaugucacaag

SEQ ID NO: 562684 - RNA, 21 nt, Artificial Sequence
  Synthetic
uccaaacuaaaaugucacaag

SEQ ID NO: 562685 - RNA, 22 nt, Artificial Sequence
  Synthetic
auccaaacuaaaaugucacaag

SEQ ID NO: 562686 - RNA, 23 nt, Artificial Sequence
  Synthetic
aauccaaacuaaaaugucacaag

SEQ ID NO: 562687 - RNA, 24 nt, Artificial Sequence
  Synthetic
aaauccaaacuaaaaugucacaag

SEQ ID NO: 562688 - RNA, 18 nt, Artificial Sequence
  Synthetic
ugaaggucagaagacaag

SEQ ID NO: 562689 - RNA, 19 nt, Artificial Sequence
  Synthetic
gugaaggucagaagacaag

SEQ ID NO: 562690 - RNA, 20 nt, Artificial Sequence
  Synthetic
agugaaggucagaagacaag

SEQ ID NO: 562691 - RNA, 21 nt, Artificial Sequence
  Synthetic
aagugaaggucagaagacaag

SEQ ID NO: 562692 - RNA, 22 nt, Artificial Sequence
  Synthetic
uaagugaaggucagaagacaag

SEQ ID NO: 562693 - RNA, 23 nt, Artificial Sequence
  Synthetic
auaagugaaggucagaagacaag

SEQ ID NO: 562694 - RNA, 24 nt, Artificial Sequence
  Synthetic
cauaagugaaggucagaagacaag

SEQ ID NO: 562695 - RNA, 18 nt, Artificial Sequence
  Synthetic
ggaaaagaaacagacaag

SEQ ID NO: 562696 - RNA, 19 nt, Artificial Sequence
  Synthetic
aggaaaagaaacagacaag

SEQ ID NO: 562697 - RNA, 20 nt, Artificial Sequence
  Synthetic
aaggaaaagaaacagacaag

SEQ ID NO: 562698 - RNA, 21 nt, Artificial Sequence
  Synthetic
uaaggaaaagaaacagacaag

SEQ ID NO: 562699 - RNA, 22 nt, Artificial Sequence
  Synthetic
guaaggaaaagaaacagacaag

SEQ ID NO: 562700 - RNA, 23 nt, Artificial Sequence
  Synthetic
gguaaggaaaagaaacagacaag

SEQ ID NO: 562701 - RNA, 24 nt, Artificial Sequence
  Synthetic
ugguaaggaaaagaaacagacaag

SEQ ID NO: 562702 - RNA, 18 nt, Artificial Sequence
  Synthetic
cuuaaagaccuagacaag

SEQ ID NO: 562703 - RNA, 19 nt, Artificial Sequence
  Synthetic
acuuaaagaccuagacaag

SEQ ID NO: 562704 - RNA, 20 nt, Artificial Sequence
  Synthetic
aacuuaaagaccuagacaag

SEQ ID NO: 562705 - RNA, 21 nt, Artificial Sequence
  Synthetic
caacuuaaagaccuagacaag

SEQ ID NO: 562706 - RNA, 22 nt, Artificial Sequence
  Synthetic
gcaacuuaaagaccuagacaag

SEQ ID NO: 562707 - RNA, 23 nt, Artificial Sequence
  Synthetic
ugcaacuuaaagaccuagacaag

SEQ ID NO: 562708 - RNA, 24 nt, Artificial Sequence
  Synthetic
augcaacuuaaagaccuagacaag

SEQ ID NO: 562709 - RNA, 18 nt, Artificial Sequence
  Synthetic
auuuuccagguagacaag

SEQ ID NO: 562710 - RNA, 19 nt, Artificial Sequence
  Synthetic
aauuuuccagguagacaag

SEQ ID NO: 562711 - RNA, 20 nt, Artificial Sequence
  Synthetic
gaauuuuccagguagacaag

SEQ ID NO: 562712 - RNA, 21 nt, Artificial Sequence
  Synthetic
ugaauuuuccagguagacaag

SEQ ID NO: 562713 - RNA, 22 nt, Artificial Sequence
  Synthetic
uugaauuuuccagguagacaag

SEQ ID NO: 562714 - RNA, 23 nt, Artificial Sequence
  Synthetic
guugaauuuuccagguagacaag

SEQ ID NO: 562715 - RNA, 24 nt, Artificial Sequence
  Synthetic
aguugaauuuuccagguagacaag

SEQ ID NO: 562716 - RNA, 18 nt, Artificial Sequence
  Synthetic
ucaaugaaaaucgacaag

SEQ ID NO: 562717 - RNA, 19 nt, Artificial Sequence
  Synthetic
uucaaugaaaaucgacaag

SEQ ID NO: 562718 - RNA, 20 nt, Artificial Sequence
  Synthetic
auucaaugaaaaucgacaag

SEQ ID NO: 562719 - RNA, 21 nt, Artificial Sequence
  Synthetic
gauucaaugaaaaucgacaag

SEQ ID NO: 562720 - RNA, 22 nt, Artificial Sequence
  Synthetic
ggauucaaugaaaaucgacaag

SEQ ID NO: 562721 - RNA, 23 nt, Artificial Sequence
  Synthetic
gggauucaaugaaaaucgacaag

SEQ ID NO: 562722 - RNA, 24 nt, Artificial Sequence
  Synthetic
ggggauucaaugaaaaucgacaag

SEQ ID NO: 562723 - RNA, 18 nt, Artificial Sequence
  Synthetic
aauacucuaacugacaag

SEQ ID NO: 562724 - RNA, 19 nt, Artificial Sequence
  Synthetic
aaauacucuaacugacaag

SEQ ID NO: 562725 - RNA, 20 nt, Artificial Sequence
  Synthetic
aaaauacucuaacugacaag

SEQ ID NO: 562726 - RNA, 21 nt, Artificial Sequence
  Synthetic
aaaaauacucuaacugacaag

SEQ ID NO: 562727 - RNA, 22 nt, Artificial Sequence
  Synthetic
aaaaaauacucuaacugacaag

SEQ ID NO: 562728 - RNA, 23 nt, Artificial Sequence
  Synthetic
uaaaaaauacucuaacugacaag

SEQ ID NO: 562729 - RNA, 24 nt, Artificial Sequence
  Synthetic
cuaaaaaauacucuaacugacaag

SEQ ID NO: 562730 - RNA, 18 nt, Artificial Sequence
  Synthetic
auaaacaaaugugacaag

SEQ ID NO: 562731 - RNA, 19 nt, Artificial Sequence
  Synthetic
uauaaacaaaugugacaag

SEQ ID NO: 562732 - RNA, 20 nt, Artificial Sequence
  Synthetic
cuauaaacaaaugugacaag

SEQ ID NO: 562733 - RNA, 21 nt, Artificial Sequence
  Synthetic
gcuauaaacaaaugugacaag

SEQ ID NO: 562734 - RNA, 22 nt, Artificial Sequence
  Synthetic
ggcuauaaacaaaugugacaag

SEQ ID NO: 562735 - RNA, 23 nt, Artificial Sequence
  Synthetic
gggcuauaaacaaaugugacaag

SEQ ID NO: 562736 - RNA, 24 nt, Artificial Sequence
  Synthetic
ugggcuauaaacaaaugugacaag

SEQ ID NO: 562737 - RNA, 18 nt, Artificial Sequence
  Synthetic
aaaccaaaaauugacaag

SEQ ID NO: 562738 - RNA, 19 nt, Artificial Sequence
  Synthetic
aaaaccaaaaauugacaag

SEQ ID NO: 562739 - RNA, 20 nt, Artificial Sequence
  Synthetic
caaaaccaaaaauugacaag

SEQ ID NO: 562740 - RNA, 21 nt, Artificial Sequence
  Synthetic
acaaaaccaaaaauugacaag

SEQ ID NO: 562741 - RNA, 22 nt, Artificial Sequence
  Synthetic
aacaaaaccaaaaauugacaag

SEQ ID NO: 562742 - RNA, 23 nt, Artificial Sequence
  Synthetic
uaacaaaaccaaaaauugacaag

SEQ ID NO: 562743 - RNA, 24 nt, Artificial Sequence
  Synthetic
auaacaaaaccaaaaauugacaag

SEQ ID NO: 562744 - RNA, 18 nt, Artificial Sequence
  Synthetic
ucacccuaaauugacaag

SEQ ID NO: 562745 - RNA, 19 nt, Artificial Sequence
  Synthetic
uucacccuaaauugacaag

SEQ ID NO: 562746 - RNA, 20 nt, Artificial Sequence
  Synthetic
uuucacccuaaauugacaag

SEQ ID NO: 562747 - RNA, 21 nt, Artificial Sequence
  Synthetic
uuuucacccuaaauugacaag

SEQ ID NO: 562748 - RNA, 22 nt, Artificial Sequence
  Synthetic
auuuucacccuaaauugacaag

SEQ ID NO: 562749 - RNA, 23 nt, Artificial Sequence
  Synthetic
cauuuucacccuaaauugacaag

SEQ ID NO: 562750 - RNA, 24 nt, Artificial Sequence
  Synthetic
acauuuucacccuaaauugacaag

SEQ ID NO: 562751 - RNA, 18 nt, Artificial Sequence
  Synthetic
auaaaaagcuuugacaag

SEQ ID NO: 562752 - RNA, 19 nt, Artificial Sequence
  Synthetic
cauaaaaagcuuugacaag

SEQ ID NO: 562753 - RNA, 20 nt, Artificial Sequence
  Synthetic
gcauaaaaagcuuugacaag

SEQ ID NO: 562754 - RNA, 21 nt, Artificial Sequence
  Synthetic
ugcauaaaaagcuuugacaag

SEQ ID NO: 562755 - RNA, 22 nt, Artificial Sequence
  Synthetic
uugcauaaaaagcuuugacaag

SEQ ID NO: 562756 - RNA, 23 nt, Artificial Sequence
  Synthetic
guugcauaaaaagcuuugacaag

SEQ ID NO: 562757 - RNA, 24 nt, Artificial Sequence
  Synthetic
aguugcauaaaaagcuuugacaag

SEQ ID NO: 562758 - RNA, 18 nt, Artificial Sequence
  Synthetic
acagucugcacauacaag

SEQ ID NO: 562759 - RNA, 19 nt, Artificial Sequence
  Synthetic
uacagucugcacauacaag

SEQ ID NO: 562760 - RNA, 20 nt, Artificial Sequence
  Synthetic
uuacagucugcacauacaag

SEQ ID NO: 562761 - RNA, 21 nt, Artificial Sequence
  Synthetic
uuuacagucugcacauacaag

SEQ ID NO: 562762 - RNA, 22 nt, Artificial Sequence
  Synthetic
auuuacagucugcacauacaag

SEQ ID NO: 562763 - RNA, 23 nt, Artificial Sequence
  Synthetic
uauuuacagucugcacauacaag

SEQ ID NO: 562764 - RNA, 24 nt, Artificial Sequence
  Synthetic
auauuuacagucugcacauacaag

SEQ ID NO: 562765 - RNA, 18 nt, Artificial Sequence
  Synthetic
agggugcagagauacaag

SEQ ID NO: 562766 - RNA, 19 nt, Artificial Sequence
  Synthetic
aagggugcagagauacaag

SEQ ID NO: 562767 - RNA, 20 nt, Artificial Sequence
  Synthetic
gaagggugcagagauacaag

SEQ ID NO: 562768 - RNA, 21 nt, Artificial Sequence
  Synthetic
agaagggugcagagauacaag

SEQ ID NO: 562769 - RNA, 22 nt, Artificial Sequence
  Synthetic
cagaagggugcagagauacaag

SEQ ID NO: 562770 - RNA, 23 nt, Artificial Sequence
  Synthetic
ucagaagggugcagagauacaag

SEQ ID NO: 562771 - RNA, 24 nt, Artificial Sequence
  Synthetic
aucagaagggugcagagauacaag

SEQ ID NO: 562772 - RNA, 18 nt, Artificial Sequence
  Synthetic
uaaucugaaauauacaag

SEQ ID NO: 562773 - RNA, 19 nt, Artificial Sequence
  Synthetic
cuaaucugaaauauacaag

SEQ ID NO: 562774 - RNA, 20 nt, Artificial Sequence
  Synthetic
ucuaaucugaaauauacaag

SEQ ID NO: 562775 - RNA, 21 nt, Artificial Sequence
  Synthetic
cucuaaucugaaauauacaag

SEQ ID NO: 562776 - RNA, 22 nt, Artificial Sequence
  Synthetic
gcucuaaucugaaauauacaag

SEQ ID NO: 562777 - RNA, 23 nt, Artificial Sequence
  Synthetic
agcucuaaucugaaauauacaag

SEQ ID NO: 562778 - RNA, 24 nt, Artificial Sequence
  Synthetic
aagcucuaaucugaaauauacaag

SEQ ID NO: 562779 - RNA, 18 nt, Artificial Sequence
  Synthetic
uucaacaaugacuacaag

SEQ ID NO: 562780 - RNA, 19 nt, Artificial Sequence
  Synthetic
uuucaacaaugacuacaag

SEQ ID NO: 562781 - RNA, 20 nt, Artificial Sequence
  Synthetic
cuuucaacaaugacuacaag

SEQ ID NO: 562782 - RNA, 21 nt, Artificial Sequence
  Synthetic
ccuuucaacaaugacuacaag

SEQ ID NO: 562783 - RNA, 22 nt, Artificial Sequence
  Synthetic
uccuuucaacaaugacuacaag

SEQ ID NO: 562784 - RNA, 23 nt, Artificial Sequence
  Synthetic
guccuuucaacaaugacuacaag

SEQ ID NO: 562785 - RNA, 24 nt, Artificial Sequence
  Synthetic
uguccuuucaacaaugacuacaag

SEQ ID NO: 562786 - RNA, 21 nt, Artificial Sequence
  Synthetic
gaauucuaccagagguacaag

SEQ ID NO: 562787 - RNA, 22 nt, Artificial Sequence
  Synthetic
cgaauucuaccagagguacaag

SEQ ID NO: 562788 - RNA, 23 nt, Artificial Sequence
  Synthetic
ccgaauucuaccagagguacaag

SEQ ID NO: 562789 - RNA, 24 nt, Artificial Sequence
  Synthetic
gccgaauucuaccagagguacaag

SEQ ID NO: 562790 - RNA, 18 nt, Artificial Sequence
  Synthetic
ggauuugcaguguacaag

SEQ ID NO: 562791 - RNA, 19 nt, Artificial Sequence
  Synthetic
uggauuugcaguguacaag

SEQ ID NO: 562792 - RNA, 20 nt, Artificial Sequence
  Synthetic
auggauuugcaguguacaag

SEQ ID NO: 562793 - RNA, 21 nt, Artificial Sequence
  Synthetic
aauggauuugcaguguacaag

SEQ ID NO: 562794 - RNA, 22 nt, Artificial Sequence
  Synthetic
uaauggauuugcaguguacaag

SEQ ID NO: 562795 - RNA, 23 nt, Artificial Sequence
  Synthetic
uuaauggauuugcaguguacaag

SEQ ID NO: 562796 - RNA, 24 nt, Artificial Sequence
  Synthetic
uuuaauggauuugcaguguacaag

SEQ ID NO: 562797 - RNA, 18 nt, Artificial Sequence
  Synthetic
aaaggagaaaauuacaag

SEQ ID NO: 562798 - RNA, 19 nt, Artificial Sequence
  Synthetic
uaaaggagaaaauuacaag

SEQ ID NO: 562799 - RNA, 20 nt, Artificial Sequence
  Synthetic
cuaaaggagaaaauuacaag

SEQ ID NO: 562800 - RNA, 21 nt, Artificial Sequence
  Synthetic
acuaaaggagaaaauuacaag

SEQ ID NO: 562801 - RNA, 22 nt, Artificial Sequence
  Synthetic
aacuaaaggagaaaauuacaag

SEQ ID NO: 562802 - RNA, 23 nt, Artificial Sequence
  Synthetic
gaacuaaaggagaaaauuacaag

SEQ ID NO: 562803 - RNA, 24 nt, Artificial Sequence
  Synthetic
agaacuaaaggagaaaauuacaag

SEQ ID NO: 562804 - RNA, 18 nt, Artificial Sequence
  Synthetic
uaucagagauauuacaag

SEQ ID NO: 562805 - RNA, 19 nt, Artificial Sequence
  Synthetic
auaucagagauauuacaag

SEQ ID NO: 562806 - RNA, 20 nt, Artificial Sequence
  Synthetic
uauaucagagauauuacaag

SEQ ID NO: 562807 - RNA, 21 nt, Artificial Sequence
  Synthetic
guauaucagagauauuacaag

SEQ ID NO: 562808 - RNA, 22 nt, Artificial Sequence
  Synthetic
uguauaucagagauauuacaag

SEQ ID NO: 562809 - RNA, 23 nt, Artificial Sequence
  Synthetic
auguauaucagagauauuacaag

SEQ ID NO: 562810 - RNA, 24 nt, Artificial Sequence
  Synthetic
cauguauaucagagauauuacaag

SEQ ID NO: 562811 - RNA, 18 nt, Artificial Sequence
  Synthetic
cauguucucacuuacaag

SEQ ID NO: 562812 - RNA, 19 nt, Artificial Sequence
  Synthetic
gcauguucucacuuacaag

SEQ ID NO: 562813 - RNA, 20 nt, Artificial Sequence
  Synthetic
ugcauguucucacuuacaag

SEQ ID NO: 562814 - RNA, 21 nt, Artificial Sequence
  Synthetic
uugcauguucucacuuacaag

SEQ ID NO: 562815 - RNA, 22 nt, Artificial Sequence
  Synthetic
auugcauguucucacuuacaag

SEQ ID NO: 562816 - RNA, 23 nt, Artificial Sequence
  Synthetic
uauugcauguucucacuuacaag

SEQ ID NO: 562817 - RNA, 24 nt, Artificial Sequence
  Synthetic
auauugcauguucucacuuacaag

SEQ ID NO: 562818 - RNA, 18 nt, Artificial Sequence
  Synthetic
aaaugaagaauuuacaag

SEQ ID NO: 562819 - RNA, 19 nt, Artificial Sequence
  Synthetic
gaaaugaagaauuuacaag

SEQ ID NO: 562820 - RNA, 20 nt, Artificial Sequence
  Synthetic
ugaaaugaagaauuuacaag

SEQ ID NO: 562821 - RNA, 21 nt, Artificial Sequence
  Synthetic
gugaaaugaagaauuuacaag

SEQ ID NO: 562822 - RNA, 22 nt, Artificial Sequence
  Synthetic
ugugaaaugaagaauuuacaag

SEQ ID NO: 562823 - RNA, 23 nt, Artificial Sequence
  Synthetic
augugaaaugaagaauuuacaag

SEQ ID NO: 562824 - RNA, 24 nt, Artificial Sequence
  Synthetic
uaugugaaaugaagaauuuacaag

SEQ ID NO: 562825 - RNA, 18 nt, Artificial Sequence
  Synthetic
gaaaugcaccaaaccaag

SEQ ID NO: 562826 - RNA, 19 nt, Artificial Sequence
  Synthetic
ugaaaugcaccaaaccaag

SEQ ID NO: 562827 - RNA, 20 nt, Artificial Sequence
  Synthetic
gugaaaugcaccaaaccaag

SEQ ID NO: 562828 - RNA, 21 nt, Artificial Sequence
  Synthetic
agugaaaugcaccaaaccaag

SEQ ID NO: 562829 - RNA, 22 nt, Artificial Sequence
  Synthetic
aagugaaaugcaccaaaccaag

SEQ ID NO: 562830 - RNA, 23 nt, Artificial Sequence
  Synthetic
aaagugaaaugcaccaaaccaag

SEQ ID NO: 562831 - RNA, 24 nt, Artificial Sequence
  Synthetic
caaagugaaaugcaccaaaccaag

SEQ ID NO: 562832 - RNA, 18 nt, Artificial Sequence
  Synthetic
uuaaagguagaaaccaag

SEQ ID NO: 562833 - RNA, 19 nt, Artificial Sequence
  Synthetic
auuaaagguagaaaccaag

SEQ ID NO: 562834 - RNA, 20 nt, Artificial Sequence
  Synthetic
cauuaaagguagaaaccaag

SEQ ID NO: 562835 - RNA, 21 nt, Artificial Sequence
  Synthetic
ucauuaaagguagaaaccaag

SEQ ID NO: 562836 - RNA, 22 nt, Artificial Sequence
  Synthetic
aucauuaaagguagaaaccaag

SEQ ID NO: 562837 - RNA, 23 nt, Artificial Sequence
  Synthetic
aaucauuaaagguagaaaccaag

SEQ ID NO: 562838 - RNA, 24 nt, Artificial Sequence
  Synthetic
caaucauuaaagguagaaaccaag

SEQ ID NO: 562839 - RNA, 18 nt, Artificial Sequence
  Synthetic
uggauggugucaaccaag

SEQ ID NO: 562840 - RNA, 19 nt, Artificial Sequence
  Synthetic
cuggauggugucaaccaag

SEQ ID NO: 562841 - RNA, 20 nt, Artificial Sequence
  Synthetic
ucuggauggugucaaccaag

SEQ ID NO: 562842 - RNA, 21 nt, Artificial Sequence
  Synthetic
gucuggauggugucaaccaag

SEQ ID NO: 562843 - RNA, 22 nt, Artificial Sequence
  Synthetic
ugucuggauggugucaaccaag

SEQ ID NO: 562844 - RNA, 23 nt, Artificial Sequence
  Synthetic
cugucuggauggugucaaccaag

SEQ ID NO: 562845 - RNA, 24 nt, Artificial Sequence
  Synthetic
gcugucuggauggugucaaccaag

SEQ ID NO: 562846 - RNA, 18 nt, Artificial Sequence
  Synthetic
guggagaauggaaccaag

SEQ ID NO: 562847 - RNA, 19 nt, Artificial Sequence
  Synthetic
uguggagaauggaaccaag

SEQ ID NO: 562848 - RNA, 20 nt, Artificial Sequence
  Synthetic
auguggagaauggaaccaag

SEQ ID NO: 562849 - RNA, 21 nt, Artificial Sequence
  Synthetic
gauguggagaauggaaccaag

SEQ ID NO: 562850 - RNA, 22 nt, Artificial Sequence
  Synthetic
ugauguggagaauggaaccaag

SEQ ID NO: 562851 - RNA, 23 nt, Artificial Sequence
  Synthetic
gugauguggagaauggaaccaag

SEQ ID NO: 562852 - RNA, 24 nt, Artificial Sequence
  Synthetic
agugauguggagaauggaaccaag

SEQ ID NO: 562853 - RNA, 18 nt, Artificial Sequence
  Synthetic
gcaagcacacuaaccaag

SEQ ID NO: 562854 - RNA, 19 nt, Artificial Sequence
  Synthetic
agcaagcacacuaaccaag

SEQ ID NO: 562855 - RNA, 20 nt, Artificial Sequence
  Synthetic
gagcaagcacacuaaccaag

SEQ ID NO: 562856 - RNA, 21 nt, Artificial Sequence
  Synthetic
ugagcaagcacacuaaccaag

SEQ ID NO: 562857 - RNA, 22 nt, Artificial Sequence
  Synthetic
cugagcaagcacacuaaccaag

SEQ ID NO: 562858 - RNA, 23 nt, Artificial Sequence
  Synthetic
ucugagcaagcacacuaaccaag

SEQ ID NO: 562859 - RNA, 24 nt, Artificial Sequence
  Synthetic
aucugagcaagcacacuaaccaag

SEQ ID NO: 562860 - RNA, 18 nt, Artificial Sequence
  Synthetic
gccauuuuugucaccaag

SEQ ID NO: 562861 - RNA, 19 nt, Artificial Sequence
  Synthetic
ggccauuuuugucaccaag

SEQ ID NO: 562862 - RNA, 20 nt, Artificial Sequence
  Synthetic
aggccauuuuugucaccaag

SEQ ID NO: 562863 - RNA, 21 nt, Artificial Sequence
  Synthetic
caggccauuuuugucaccaag

SEQ ID NO: 562864 - RNA, 22 nt, Artificial Sequence
  Synthetic
ucaggccauuuuugucaccaag

SEQ ID NO: 562865 - RNA, 23 nt, Artificial Sequence
  Synthetic
uucaggccauuuuugucaccaag

SEQ ID NO: 562866 - RNA, 24 nt, Artificial Sequence
  Synthetic
cuucaggccauuuuugucaccaag

SEQ ID NO: 562867 - RNA, 18 nt, Artificial Sequence
  Synthetic
auugucagauucaccaag

SEQ ID NO: 562868 - RNA, 19 nt, Artificial Sequence
  Synthetic
aauugucagauucaccaag

SEQ ID NO: 562869 - RNA, 20 nt, Artificial Sequence
  Synthetic
uaauugucagauucaccaag

SEQ ID NO: 562870 - RNA, 21 nt, Artificial Sequence
  Synthetic
auaauugucagauucaccaag

SEQ ID NO: 562871 - RNA, 22 nt, Artificial Sequence
  Synthetic
cauaauugucagauucaccaag

SEQ ID NO: 562872 - RNA, 23 nt, Artificial Sequence
  Synthetic
acauaauugucagauucaccaag

SEQ ID NO: 562873 - RNA, 24 nt, Artificial Sequence
  Synthetic
cacauaauugucagauucaccaag

SEQ ID NO: 562874 - RNA, 18 nt, Artificial Sequence
  Synthetic
agaaguaaggagaccaag

SEQ ID NO: 562875 - RNA, 19 nt, Artificial Sequence
  Synthetic
uagaaguaaggagaccaag

SEQ ID NO: 562876 - RNA, 20 nt, Artificial Sequence
  Synthetic
auagaaguaaggagaccaag

SEQ ID NO: 562877 - RNA, 21 nt, Artificial Sequence
  Synthetic
aauagaaguaaggagaccaag

SEQ ID NO: 562878 - RNA, 22 nt, Artificial Sequence
  Synthetic
gaauagaaguaaggagaccaag

SEQ ID NO: 562879 - RNA, 23 nt, Artificial Sequence
  Synthetic
ggaauagaaguaaggagaccaag

SEQ ID NO: 562880 - RNA, 24 nt, Artificial Sequence
  Synthetic
gggaauagaaguaaggagaccaag

SEQ ID NO: 562881 - RNA, 18 nt, Artificial Sequence
  Synthetic
cuauuaugcuugaccaag

SEQ ID NO: 562882 - RNA, 19 nt, Artificial Sequence
  Synthetic
acuauuaugcuugaccaag

SEQ ID NO: 562883 - RNA, 20 nt, Artificial Sequence
  Synthetic
aacuauuaugcuugaccaag

SEQ ID NO: 562884 - RNA, 21 nt, Artificial Sequence
  Synthetic
gaacuauuaugcuugaccaag

SEQ ID NO: 562885 - RNA, 22 nt, Artificial Sequence
  Synthetic
agaacuauuaugcuugaccaag

SEQ ID NO: 562886 - RNA, 23 nt, Artificial Sequence
  Synthetic
uagaacuauuaugcuugaccaag

SEQ ID NO: 562887 - RNA, 24 nt, Artificial Sequence
  Synthetic
auagaacuauuaugcuugaccaag

SEQ ID NO: 562888 - RNA, 18 nt, Artificial Sequence
  Synthetic
uguuuggguuugaccaag

SEQ ID NO: 562889 - RNA, 19 nt, Artificial Sequence
  Synthetic
cuguuuggguuugaccaag

SEQ ID NO: 562890 - RNA, 20 nt, Artificial Sequence
  Synthetic
ucuguuuggguuugaccaag

SEQ ID NO: 562891 - RNA, 21 nt, Artificial Sequence
  Synthetic
uucuguuuggguuugaccaag

SEQ ID NO: 562892 - RNA, 22 nt, Artificial Sequence
  Synthetic
uuucuguuuggguuugaccaag

SEQ ID NO: 562893 - RNA, 23 nt, Artificial Sequence
  Synthetic
uuuucuguuuggguuugaccaag

SEQ ID NO: 562894 - RNA, 24 nt, Artificial Sequence
  Synthetic
guuuucuguuuggguuugaccaag

SEQ ID NO: 562895 - RNA, 18 nt, Artificial Sequence
  Synthetic
uuucugucuacuaccaag

SEQ ID NO: 562896 - RNA, 19 nt, Artificial Sequence
  Synthetic
auuucugucuacuaccaag

SEQ ID NO: 562897 - RNA, 20 nt, Artificial Sequence
  Synthetic
aauuucugucuacuaccaag

SEQ ID NO: 562898 - RNA, 21 nt, Artificial Sequence
  Synthetic
uaauuucugucuacuaccaag

SEQ ID NO: 562899 - RNA, 22 nt, Artificial Sequence
  Synthetic
uuaauuucugucuacuaccaag

SEQ ID NO: 562900 - RNA, 23 nt, Artificial Sequence
  Synthetic
guuaauuucugucuacuaccaag

SEQ ID NO: 562901 - RNA, 24 nt, Artificial Sequence
  Synthetic
aguuaauuucugucuacuaccaag

SEQ ID NO: 562902 - RNA, 18 nt, Artificial Sequence
  Synthetic
augaaagaauguaccaag

SEQ ID NO: 562903 - RNA, 19 nt, Artificial Sequence
  Synthetic
caugaaagaauguaccaag

SEQ ID NO: 562904 - RNA, 20 nt, Artificial Sequence
  Synthetic
ucaugaaagaauguaccaag

SEQ ID NO: 562905 - RNA, 21 nt, Artificial Sequence
  Synthetic
aucaugaaagaauguaccaag

SEQ ID NO: 562906 - RNA, 22 nt, Artificial Sequence
  Synthetic
gaucaugaaagaauguaccaag

SEQ ID NO: 562907 - RNA, 23 nt, Artificial Sequence
  Synthetic
ugaucaugaaagaauguaccaag

SEQ ID NO: 562908 - RNA, 24 nt, Artificial Sequence
  Synthetic
augaucaugaaagaauguaccaag

SEQ ID NO: 562909 - RNA, 18 nt, Artificial Sequence
  Synthetic
acggccuuguguaccaag

SEQ ID NO: 562910 - RNA, 19 nt, Artificial Sequence
  Synthetic
aacggccuuguguaccaag

SEQ ID NO: 562911 - RNA, 20 nt, Artificial Sequence
  Synthetic
gaacggccuuguguaccaag

SEQ ID NO: 562912 - RNA, 21 nt, Artificial Sequence
  Synthetic
ugaacggccuuguguaccaag

SEQ ID NO: 562913 - RNA, 22 nt, Artificial Sequence
  Synthetic
augaacggccuuguguaccaag

SEQ ID NO: 562914 - RNA, 23 nt, Artificial Sequence
  Synthetic
caugaacggccuuguguaccaag

SEQ ID NO: 562915 - RNA, 24 nt, Artificial Sequence
  Synthetic
ccaugaacggccuuguguaccaag

SEQ ID NO: 562916 - RNA, 18 nt, Artificial Sequence
  Synthetic
agugccaccccacccaag

SEQ ID NO: 562917 - RNA, 19 nt, Artificial Sequence
  Synthetic
aagugccaccccacccaag

SEQ ID NO: 562918 - RNA, 20 nt, Artificial Sequence
  Synthetic
gaagugccaccccacccaag

SEQ ID NO: 562919 - RNA, 21 nt, Artificial Sequence
  Synthetic
agaagugccaccccacccaag

SEQ ID NO: 562920 - RNA, 22 nt, Artificial Sequence
  Synthetic
aagaagugccaccccacccaag

SEQ ID NO: 562921 - RNA, 23 nt, Artificial Sequence
  Synthetic
gaagaagugccaccccacccaag

SEQ ID NO: 562922 - RNA, 24 nt, Artificial Sequence
  Synthetic
ugaagaagugccaccccacccaag

SEQ ID NO: 562923 - RNA, 18 nt, Artificial Sequence
  Synthetic
ggagguguccuacccaag

SEQ ID NO: 562924 - RNA, 19 nt, Artificial Sequence
  Synthetic
uggagguguccuacccaag

SEQ ID NO: 562925 - RNA, 20 nt, Artificial Sequence
  Synthetic
uuggagguguccuacccaag

SEQ ID NO: 562926 - RNA, 21 nt, Artificial Sequence
  Synthetic
auuggagguguccuacccaag

SEQ ID NO: 562927 - RNA, 22 nt, Artificial Sequence
  Synthetic
cauuggagguguccuacccaag

SEQ ID NO: 562928 - RNA, 23 nt, Artificial Sequence
  Synthetic
gcauuggagguguccuacccaag

SEQ ID NO: 562929 - RNA, 24 nt, Artificial Sequence
  Synthetic
ugcauuggagguguccuacccaag

SEQ ID NO: 562930 - RNA, 18 nt, Artificial Sequence
  Synthetic
uaaaggagaacccccaag

SEQ ID NO: 562931 - RNA, 19 nt, Artificial Sequence
  Synthetic
uuaaaggagaacccccaag

SEQ ID NO: 562932 - RNA, 20 nt, Artificial Sequence
  Synthetic
uuuaaaggagaacccccaag

SEQ ID NO: 562933 - RNA, 21 nt, Artificial Sequence
  Synthetic
uuuuaaaggagaacccccaag

SEQ ID NO: 562934 - RNA, 22 nt, Artificial Sequence
  Synthetic
auuuuaaaggagaacccccaag

SEQ ID NO: 562935 - RNA, 23 nt, Artificial Sequence
  Synthetic
cauuuuaaaggagaacccccaag

SEQ ID NO: 562936 - RNA, 24 nt, Artificial Sequence
  Synthetic
ccauuuuaaaggagaacccccaag

SEQ ID NO: 562937 - RNA, 18 nt, Artificial Sequence
  Synthetic
ggaugcauuuuccccaag

SEQ ID NO: 562938 - RNA, 19 nt, Artificial Sequence
  Synthetic
cggaugcauuuuccccaag

SEQ ID NO: 562939 - RNA, 20 nt, Artificial Sequence
  Synthetic
ccggaugcauuuuccccaag

SEQ ID NO: 562940 - RNA, 21 nt, Artificial Sequence
  Synthetic
cccggaugcauuuuccccaag

SEQ ID NO: 562941 - RNA, 22 nt, Artificial Sequence
  Synthetic
ucccggaugcauuuuccccaag

SEQ ID NO: 562942 - RNA, 23 nt, Artificial Sequence
  Synthetic
uucccggaugcauuuuccccaag

SEQ ID NO: 562943 - RNA, 24 nt, Artificial Sequence
  Synthetic
uuucccggaugcauuuuccccaag

SEQ ID NO: 562944 - RNA, 18 nt, Artificial Sequence
  Synthetic
ggaauagggaggcccaag

SEQ ID NO: 562945 - RNA, 19 nt, Artificial Sequence
  Synthetic
gggaauagggaggcccaag

SEQ ID NO: 562946 - RNA, 20 nt, Artificial Sequence
  Synthetic
agggaauagggaggcccaag

SEQ ID NO: 562947 - RNA, 21 nt, Artificial Sequence
  Synthetic
cagggaauagggaggcccaag

SEQ ID NO: 562948 - RNA, 22 nt, Artificial Sequence
  Synthetic
ucagggaauagggaggcccaag

SEQ ID NO: 562949 - RNA, 23 nt, Artificial Sequence
  Synthetic
cucagggaauagggaggcccaag

SEQ ID NO: 562950 - RNA, 24 nt, Artificial Sequence
  Synthetic
ucucagggaauagggaggcccaag

SEQ ID NO: 562951 - RNA, 18 nt, Artificial Sequence
  Synthetic
cucacccugcugcccaag

SEQ ID NO: 562952 - RNA, 19 nt, Artificial Sequence
  Synthetic
ucucacccugcugcccaag

SEQ ID NO: 562953 - RNA, 20 nt, Artificial Sequence
  Synthetic
gucucacccugcugcccaag

SEQ ID NO: 562954 - RNA, 21 nt, Artificial Sequence
  Synthetic
ggucucacccugcugcccaag

SEQ ID NO: 562955 - RNA, 22 nt, Artificial Sequence
  Synthetic
gggucucacccugcugcccaag

SEQ ID NO: 562956 - RNA, 23 nt, Artificial Sequence
  Synthetic
agggucucacccugcugcccaag

SEQ ID NO: 562957 - RNA, 24 nt, Artificial Sequence
  Synthetic
cagggucucacccugcugcccaag

SEQ ID NO: 562958 - RNA, 18 nt, Artificial Sequence
  Synthetic
agacuauuauaucccaag

SEQ ID NO: 562959 - RNA, 19 nt, Artificial Sequence
  Synthetic
aagacuauuauaucccaag

SEQ ID NO: 562960 - RNA, 20 nt, Artificial Sequence
  Synthetic
uaagacuauuauaucccaag

SEQ ID NO: 562961 - RNA, 21 nt, Artificial Sequence
  Synthetic
uuaagacuauuauaucccaag

SEQ ID NO: 562962 - RNA, 22 nt, Artificial Sequence
  Synthetic
cuuaagacuauuauaucccaag

SEQ ID NO: 562963 - RNA, 23 nt, Artificial Sequence
  Synthetic
ccuuaagacuauuauaucccaag

SEQ ID NO: 562964 - RNA, 24 nt, Artificial Sequence
  Synthetic
uccuuaagacuauuauaucccaag

SEQ ID NO: 562965 - RNA, 18 nt, Artificial Sequence
  Synthetic
ucaauguauuuucccaag

SEQ ID NO: 562966 - RNA, 19 nt, Artificial Sequence
  Synthetic
gucaauguauuuucccaag

SEQ ID NO: 562967 - RNA, 20 nt, Artificial Sequence
  Synthetic
agucaauguauuuucccaag

SEQ ID NO: 562968 - RNA, 21 nt, Artificial Sequence
  Synthetic
aagucaauguauuuucccaag

SEQ ID NO: 562969 - RNA, 22 nt, Artificial Sequence
  Synthetic
caagucaauguauuuucccaag

SEQ ID NO: 562970 - RNA, 23 nt, Artificial Sequence
  Synthetic
ccaagucaauguauuuucccaag

SEQ ID NO: 562971 - RNA, 24 nt, Artificial Sequence
  Synthetic
gccaagucaauguauuuucccaag

SEQ ID NO: 562972 - RNA, 18 nt, Artificial Sequence
  Synthetic
gaggucuccccagccaag

SEQ ID NO: 562973 - RNA, 19 nt, Artificial Sequence
  Synthetic
ugaggucuccccagccaag

SEQ ID NO: 562974 - RNA, 20 nt, Artificial Sequence
  Synthetic
gugaggucuccccagccaag

SEQ ID NO: 562975 - RNA, 21 nt, Artificial Sequence
  Synthetic
ugugaggucuccccagccaag

SEQ ID NO: 562976 - RNA, 22 nt, Artificial Sequence
  Synthetic
uugugaggucuccccagccaag

SEQ ID NO: 562977 - RNA, 23 nt, Artificial Sequence
  Synthetic
guugugaggucuccccagccaag

SEQ ID NO: 562978 - RNA, 24 nt, Artificial Sequence
  Synthetic
aguugugaggucuccccagccaag

SEQ ID NO: 562979 - RNA, 18 nt, Artificial Sequence
  Synthetic
ucacuagaacuagccaag

SEQ ID NO: 562980 - RNA, 19 nt, Artificial Sequence
  Synthetic
uucacuagaacuagccaag

SEQ ID NO: 562981 - RNA, 20 nt, Artificial Sequence
  Synthetic
uuucacuagaacuagccaag

SEQ ID NO: 562982 - RNA, 21 nt, Artificial Sequence
  Synthetic
guuucacuagaacuagccaag

SEQ ID NO: 562983 - RNA, 22 nt, Artificial Sequence
  Synthetic
uguuucacuagaacuagccaag

SEQ ID NO: 562984 - RNA, 23 nt, Artificial Sequence
  Synthetic
cuguuucacuagaacuagccaag

SEQ ID NO: 562985 - RNA, 24 nt, Artificial Sequence
  Synthetic
ucuguuucacuagaacuagccaag

SEQ ID NO: 562986 - RNA, 18 nt, Artificial Sequence
  Synthetic
gcacugugggaggccaag

SEQ ID NO: 562987 - RNA, 19 nt, Artificial Sequence
  Synthetic
agcacugugggaggccaag

SEQ ID NO: 562988 - RNA, 20 nt, Artificial Sequence
  Synthetic
cagcacugugggaggccaag

SEQ ID NO: 562989 - RNA, 21 nt, Artificial Sequence
  Synthetic
ccagcacugugggaggccaag

SEQ ID NO: 562990 - RNA, 22 nt, Artificial Sequence
  Synthetic
cccagcacugugggaggccaag

SEQ ID NO: 562991 - RNA, 23 nt, Artificial Sequence
  Synthetic
ucccagcacugugggaggccaag

SEQ ID NO: 562992 - RNA, 24 nt, Artificial Sequence
  Synthetic
aucccagcacugugggaggccaag

SEQ ID NO: 562993 - RNA, 18 nt, Artificial Sequence
  Synthetic
ggacuuugggaggccaag

SEQ ID NO: 562994 - RNA, 19 nt, Artificial Sequence
  Synthetic
aggacuuugggaggccaag

SEQ ID NO: 562995 - RNA, 20 nt, Artificial Sequence
  Synthetic
caggacuuugggaggccaag

SEQ ID NO: 562996 - RNA, 21 nt, Artificial Sequence
  Synthetic
ccaggacuuugggaggccaag

SEQ ID NO: 562997 - RNA, 22 nt, Artificial Sequence
  Synthetic
cccaggacuuugggaggccaag

SEQ ID NO: 562998 - RNA, 23 nt, Artificial Sequence
  Synthetic
ucccaggacuuugggaggccaag

SEQ ID NO: 562999 - RNA, 24 nt, Artificial Sequence
  Synthetic
aucccaggacuuugggaggccaag

SEQ ID NO: 563000 - RNA, 18 nt, Artificial Sequence
  Synthetic
gcauuuugggaggccaag

SEQ ID NO: 563001 - RNA, 19 nt, Artificial Sequence
  Synthetic
ggcauuuugggaggccaag

SEQ ID NO: 563002 - RNA, 20 nt, Artificial Sequence
  Synthetic
cggcauuuugggaggccaag

SEQ ID NO: 563003 - RNA, 21 nt, Artificial Sequence
  Synthetic
ucggcauuuugggaggccaag

SEQ ID NO: 563004 - RNA, 22 nt, Artificial Sequence
  Synthetic
cucggcauuuugggaggccaag

SEQ ID NO: 563005 - RNA, 23 nt, Artificial Sequence
  Synthetic
ucucggcauuuugggaggccaag

SEQ ID NO: 563006 - RNA, 24 nt, Artificial Sequence
  Synthetic
aucucggcauuuugggaggccaag

SEQ ID NO: 563007 - RNA, 18 nt, Artificial Sequence
  Synthetic
acaccaguggaggccaag

SEQ ID NO: 563008 - RNA, 19 nt, Artificial Sequence
  Synthetic
aacaccaguggaggccaag

SEQ ID NO: 563009 - RNA, 20 nt, Artificial Sequence
  Synthetic
gaacaccaguggaggccaag

SEQ ID NO: 563010 - RNA, 21 nt, Artificial Sequence
  Synthetic
ugaacaccaguggaggccaag

SEQ ID NO: 563011 - RNA, 22 nt, Artificial Sequence
  Synthetic
gugaacaccaguggaggccaag

SEQ ID NO: 563012 - RNA, 23 nt, Artificial Sequence
  Synthetic
agugaacaccaguggaggccaag

SEQ ID NO: 563013 - RNA, 24 nt, Artificial Sequence
  Synthetic
aagugaacaccaguggaggccaag

SEQ ID NO: 563014 - RNA, 18 nt, Artificial Sequence
  Synthetic
cagguagaaaaugccaag

SEQ ID NO: 563015 - RNA, 19 nt, Artificial Sequence
  Synthetic
ccagguagaaaaugccaag

SEQ ID NO: 563016 - RNA, 20 nt, Artificial Sequence
  Synthetic
uccagguagaaaaugccaag

SEQ ID NO: 563017 - RNA, 21 nt, Artificial Sequence
  Synthetic
uuccagguagaaaaugccaag

SEQ ID NO: 563018 - RNA, 22 nt, Artificial Sequence
  Synthetic
guuccagguagaaaaugccaag

SEQ ID NO: 563019 - RNA, 23 nt, Artificial Sequence
  Synthetic
aguuccagguagaaaaugccaag

SEQ ID NO: 563020 - RNA, 24 nt, Artificial Sequence
  Synthetic
gaguuccagguagaaaaugccaag

SEQ ID NO: 563021 - RNA, 18 nt, Artificial Sequence
  Synthetic
uguugugcuuaugccaag

SEQ ID NO: 563022 - RNA, 19 nt, Artificial Sequence
  Synthetic
guguugugcuuaugccaag

SEQ ID NO: 563023 - RNA, 20 nt, Artificial Sequence
  Synthetic
aguguugugcuuaugccaag

SEQ ID NO: 563024 - RNA, 21 nt, Artificial Sequence
  Synthetic
aaguguugugcuuaugccaag

SEQ ID NO: 563025 - RNA, 22 nt, Artificial Sequence
  Synthetic
gaaguguugugcuuaugccaag

SEQ ID NO: 563026 - RNA, 23 nt, Artificial Sequence
  Synthetic
ggaaguguugugcuuaugccaag

SEQ ID NO: 563027 - RNA, 24 nt, Artificial Sequence
  Synthetic
aggaaguguugugcuuaugccaag

SEQ ID NO: 563028 - RNA, 18 nt, Artificial Sequence
  Synthetic
ggauaggcaaaguccaag

SEQ ID NO: 563029 - RNA, 19 nt, Artificial Sequence
  Synthetic
gggauaggcaaaguccaag

SEQ ID NO: 563030 - RNA, 20 nt, Artificial Sequence
  Synthetic
ugggauaggcaaaguccaag

SEQ ID NO: 563031 - RNA, 21 nt, Artificial Sequence
  Synthetic
cugggauaggcaaaguccaag

SEQ ID NO: 563032 - RNA, 22 nt, Artificial Sequence
  Synthetic
ucugggauaggcaaaguccaag

SEQ ID NO: 563033 - RNA, 23 nt, Artificial Sequence
  Synthetic
aucugggauaggcaaaguccaag

SEQ ID NO: 563034 - RNA, 24 nt, Artificial Sequence
  Synthetic
aaucugggauaggcaaaguccaag

SEQ ID NO: 563035 - RNA, 18 nt, Artificial Sequence
  Synthetic
uaucauuggaaguccaag

SEQ ID NO: 563036 - RNA, 19 nt, Artificial Sequence
  Synthetic
guaucauuggaaguccaag

SEQ ID NO: 563037 - RNA, 20 nt, Artificial Sequence
  Synthetic
gguaucauuggaaguccaag

SEQ ID NO: 563038 - RNA, 21 nt, Artificial Sequence
  Synthetic
ugguaucauuggaaguccaag

SEQ ID NO: 563039 - RNA, 22 nt, Artificial Sequence
  Synthetic
cugguaucauuggaaguccaag

SEQ ID NO: 563040 - RNA, 23 nt, Artificial Sequence
  Synthetic
acugguaucauuggaaguccaag

SEQ ID NO: 563041 - RNA, 24 nt, Artificial Sequence
  Synthetic
cacugguaucauuggaaguccaag

SEQ ID NO: 563042 - RNA, 18 nt, Artificial Sequence
  Synthetic
ggacuuugggaguccaag

SEQ ID NO: 563043 - RNA, 19 nt, Artificial Sequence
  Synthetic
aggacuuugggaguccaag

SEQ ID NO: 563044 - RNA, 20 nt, Artificial Sequence
  Synthetic
caggacuuugggaguccaag

SEQ ID NO: 563045 - RNA, 21 nt, Artificial Sequence
  Synthetic
ccaggacuuugggaguccaag

SEQ ID NO: 563046 - RNA, 22 nt, Artificial Sequence
  Synthetic
cccaggacuuugggaguccaag

SEQ ID NO: 563047 - RNA, 23 nt, Artificial Sequence
  Synthetic
ucccaggacuuugggaguccaag

SEQ ID NO: 563048 - RNA, 24 nt, Artificial Sequence
  Synthetic
aucccaggacuuugggaguccaag

SEQ ID NO: 563049 - RNA, 18 nt, Artificial Sequence
  Synthetic
agggaucauguguccaag

SEQ ID NO: 563050 - RNA, 19 nt, Artificial Sequence
  Synthetic
gagggaucauguguccaag

SEQ ID NO: 563051 - RNA, 20 nt, Artificial Sequence
  Synthetic
ugagggaucauguguccaag

SEQ ID NO: 563052 - RNA, 21 nt, Artificial Sequence
  Synthetic
augagggaucauguguccaag

SEQ ID NO: 563053 - RNA, 22 nt, Artificial Sequence
  Synthetic
uaugagggaucauguguccaag

SEQ ID NO: 563054 - RNA, 23 nt, Artificial Sequence
  Synthetic
uuaugagggaucauguguccaag

SEQ ID NO: 563055 - RNA, 24 nt, Artificial Sequence
  Synthetic
uuuaugagggaucauguguccaag

SEQ ID NO: 563056 - RNA, 18 nt, Artificial Sequence
  Synthetic
acuaaguagaauuccaag

SEQ ID NO: 563057 - RNA, 19 nt, Artificial Sequence
  Synthetic
gacuaaguagaauuccaag

SEQ ID NO: 563058 - RNA, 20 nt, Artificial Sequence
  Synthetic
ugacuaaguagaauuccaag

SEQ ID NO: 563059 - RNA, 21 nt, Artificial Sequence
  Synthetic
cugacuaaguagaauuccaag

SEQ ID NO: 563060 - RNA, 22 nt, Artificial Sequence
  Synthetic
ucugacuaaguagaauuccaag

SEQ ID NO: 563061 - RNA, 23 nt, Artificial Sequence
  Synthetic
aucugacuaaguagaauuccaag

SEQ ID NO: 563062 - RNA, 24 nt, Artificial Sequence
  Synthetic
uaucugacuaaguagaauuccaag

SEQ ID NO: 563063 - RNA, 18 nt, Artificial Sequence
  Synthetic
gcuagagaacauuccaag

SEQ ID NO: 563064 - RNA, 19 nt, Artificial Sequence
  Synthetic
ugcuagagaacauuccaag

SEQ ID NO: 563065 - RNA, 20 nt, Artificial Sequence
  Synthetic
augcuagagaacauuccaag

SEQ ID NO: 563066 - RNA, 21 nt, Artificial Sequence
  Synthetic
uaugcuagagaacauuccaag

SEQ ID NO: 563067 - RNA, 22 nt, Artificial Sequence
  Synthetic
guaugcuagagaacauuccaag

SEQ ID NO: 563068 - RNA, 23 nt, Artificial Sequence
  Synthetic
aguaugcuagagaacauuccaag

SEQ ID NO: 563069 - RNA, 24 nt, Artificial Sequence
  Synthetic
gaguaugcuagagaacauuccaag

SEQ ID NO: 563070 - RNA, 18 nt, Artificial Sequence
  Synthetic
gagagaauguauuccaag

SEQ ID NO: 563071 - RNA, 19 nt, Artificial Sequence
  Synthetic
agagagaauguauuccaag

SEQ ID NO: 563072 - RNA, 20 nt, Artificial Sequence
  Synthetic
cagagagaauguauuccaag

SEQ ID NO: 563073 - RNA, 21 nt, Artificial Sequence
  Synthetic
gcagagagaauguauuccaag

SEQ ID NO: 563074 - RNA, 22 nt, Artificial Sequence
  Synthetic
ggcagagagaauguauuccaag

SEQ ID NO: 563075 - RNA, 23 nt, Artificial Sequence
  Synthetic
cggcagagagaauguauuccaag

SEQ ID NO: 563076 - RNA, 24 nt, Artificial Sequence
  Synthetic
acggcagagagaauguauuccaag

SEQ ID NO: 563077 - RNA, 18 nt, Artificial Sequence
  Synthetic
guuagaagugguuccaag

SEQ ID NO: 563078 - RNA, 19 nt, Artificial Sequence
  Synthetic
aguuagaagugguuccaag

SEQ ID NO: 563079 - RNA, 20 nt, Artificial Sequence
  Synthetic
caguuagaagugguuccaag

SEQ ID NO: 563080 - RNA, 21 nt, Artificial Sequence
  Synthetic
acaguuagaagugguuccaag

SEQ ID NO: 563081 - RNA, 22 nt, Artificial Sequence
  Synthetic
gacaguuagaagugguuccaag

SEQ ID NO: 563082 - RNA, 23 nt, Artificial Sequence
  Synthetic
ggacaguuagaagugguuccaag

SEQ ID NO: 563083 - RNA, 24 nt, Artificial Sequence
  Synthetic
aggacaguuagaagugguuccaag

SEQ ID NO: 563084 - RNA, 18 nt, Artificial Sequence
  Synthetic
ugaaauuauuuuuccaag

SEQ ID NO: 563085 - RNA, 19 nt, Artificial Sequence
  Synthetic
gugaaauuauuuuuccaag

SEQ ID NO: 563086 - RNA, 20 nt, Artificial Sequence
  Synthetic
ugugaaauuauuuuuccaag

SEQ ID NO: 563087 - RNA, 21 nt, Artificial Sequence
  Synthetic
uugugaaauuauuuuuccaag

SEQ ID NO: 563088 - RNA, 22 nt, Artificial Sequence
  Synthetic
cuugugaaauuauuuuuccaag

SEQ ID NO: 563089 - RNA, 23 nt, Artificial Sequence
  Synthetic
ucuugugaaauuauuuuuccaag

SEQ ID NO: 563090 - RNA, 24 nt, Artificial Sequence
  Synthetic
cucuugugaaauuauuuuuccaag

SEQ ID NO: 563091 - RNA, 18 nt, Artificial Sequence
  Synthetic
uuuuuuuuuuuuuccaag

SEQ ID NO: 563092 - RNA, 19 nt, Artificial Sequence
  Synthetic
uuuuuuuuuuuuuuccaag

SEQ ID NO: 563093 - RNA, 20 nt, Artificial Sequence
  Synthetic
uuuuuuuuuuuuuuuccaag

SEQ ID NO: 563094 - RNA, 21 nt, Artificial Sequence
  Synthetic
uuuuuuuuuuuuuuuuccaag

SEQ ID NO: 563095 - RNA, 22 nt, Artificial Sequence
  Synthetic
uuuuuuuuuuuuuuuuuccaag

SEQ ID NO: 563096 - RNA, 23 nt, Artificial Sequence
  Synthetic
cuuuuuuuuuuuuuuuuuccaag

SEQ ID NO: 563097 - RNA, 24 nt, Artificial Sequence
  Synthetic
ccuuuuuuuuuuuuuuuuuccaag

SEQ ID NO: 563098 - RNA, 18 nt, Artificial Sequence
  Synthetic
augggaaccaaaagcaag

SEQ ID NO: 563099 - RNA, 19 nt, Artificial Sequence
  Synthetic
aaugggaaccaaaagcaag

SEQ ID NO: 563100 - RNA, 20 nt, Artificial Sequence
  Synthetic
aaaugggaaccaaaagcaag

SEQ ID NO: 563101 - RNA, 21 nt, Artificial Sequence
  Synthetic
caaaugggaaccaaaagcaag

SEQ ID NO: 563102 - RNA, 22 nt, Artificial Sequence
  Synthetic
gcaaaugggaaccaaaagcaag

SEQ ID NO: 563103 - RNA, 23 nt, Artificial Sequence
  Synthetic
ugcaaaugggaaccaaaagcaag

SEQ ID NO: 563104 - RNA, 24 nt, Artificial Sequence
  Synthetic
augcaaaugggaaccaaaagcaag

SEQ ID NO: 563105 - RNA, 18 nt, Artificial Sequence
  Synthetic
acaacugaagaaagcaag

SEQ ID NO: 563106 - RNA, 19 nt, Artificial Sequence
  Synthetic
uacaacugaagaaagcaag

SEQ ID NO: 563107 - RNA, 20 nt, Artificial Sequence
  Synthetic
uuacaacugaagaaagcaag

SEQ ID NO: 563108 - RNA, 21 nt, Artificial Sequence
  Synthetic
uuuacaacugaagaaagcaag

SEQ ID NO: 563109 - RNA, 22 nt, Artificial Sequence
  Synthetic
uuuuacaacugaagaaagcaag

SEQ ID NO: 563110 - RNA, 23 nt, Artificial Sequence
  Synthetic
auuuuacaacugaagaaagcaag

SEQ ID NO: 563111 - RNA, 24 nt, Artificial Sequence
  Synthetic
gauuuuacaacugaagaaagcaag

SEQ ID NO: 563112 - RNA, 18 nt, Artificial Sequence
  Synthetic
gcgagugcugaaagcaag

SEQ ID NO: 563113 - RNA, 19 nt, Artificial Sequence
  Synthetic
ugcgagugcugaaagcaag

SEQ ID NO: 563114 - RNA, 20 nt, Artificial Sequence
  Synthetic
cugcgagugcugaaagcaag

SEQ ID NO: 563115 - RNA, 21 nt, Artificial Sequence
  Synthetic
gcugcgagugcugaaagcaag

SEQ ID NO: 563116 - RNA, 22 nt, Artificial Sequence
  Synthetic
ggcugcgagugcugaaagcaag

SEQ ID NO: 563117 - RNA, 23 nt, Artificial Sequence
  Synthetic
gggcugcgagugcugaaagcaag

SEQ ID NO: 563118 - RNA, 24 nt, Artificial Sequence
  Synthetic
ugggcugcgagugcugaaagcaag

SEQ ID NO: 563119 - RNA, 18 nt, Artificial Sequence
  Synthetic
acagggugaacaagcaag

SEQ ID NO: 563120 - RNA, 19 nt, Artificial Sequence
  Synthetic
uacagggugaacaagcaag

SEQ ID NO: 563121 - RNA, 20 nt, Artificial Sequence
  Synthetic
auacagggugaacaagcaag

SEQ ID NO: 563122 - RNA, 21 nt, Artificial Sequence
  Synthetic
uauacagggugaacaagcaag

SEQ ID NO: 563123 - RNA, 22 nt, Artificial Sequence
  Synthetic
guauacagggugaacaagcaag

SEQ ID NO: 563124 - RNA, 23 nt, Artificial Sequence
  Synthetic
gguauacagggugaacaagcaag

SEQ ID NO: 563125 - RNA, 24 nt, Artificial Sequence
  Synthetic
agguauacagggugaacaagcaag

SEQ ID NO: 563126 - RNA, 18 nt, Artificial Sequence
  Synthetic
auacgaggauacagcaag

SEQ ID NO: 563127 - RNA, 19 nt, Artificial Sequence
  Synthetic
cauacgaggauacagcaag

SEQ ID NO: 563128 - RNA, 20 nt, Artificial Sequence
  Synthetic
acauacgaggauacagcaag

SEQ ID NO: 563129 - RNA, 21 nt, Artificial Sequence
  Synthetic
aacauacgaggauacagcaag

SEQ ID NO: 563130 - RNA, 22 nt, Artificial Sequence
  Synthetic
caacauacgaggauacagcaag

SEQ ID NO: 563131 - RNA, 23 nt, Artificial Sequence
  Synthetic
ccaacauacgaggauacagcaag

SEQ ID NO: 563132 - RNA, 24 nt, Artificial Sequence
  Synthetic
cccaacauacgaggauacagcaag

SEQ ID NO: 563133 - RNA, 18 nt, Artificial Sequence
  Synthetic
caguauuucaucagcaag

SEQ ID NO: 563134 - RNA, 19 nt, Artificial Sequence
  Synthetic
gcaguauuucaucagcaag

SEQ ID NO: 563135 - RNA, 20 nt, Artificial Sequence
  Synthetic
ggcaguauuucaucagcaag

SEQ ID NO: 563136 - RNA, 21 nt, Artificial Sequence
  Synthetic
uggcaguauuucaucagcaag

SEQ ID NO: 563137 - RNA, 22 nt, Artificial Sequence
  Synthetic
guggcaguauuucaucagcaag

SEQ ID NO: 563138 - RNA, 23 nt, Artificial Sequence
  Synthetic
uguggcaguauuucaucagcaag

SEQ ID NO: 563139 - RNA, 24 nt, Artificial Sequence
  Synthetic
auguggcaguauuucaucagcaag

SEQ ID NO: 563140 - RNA, 18 nt, Artificial Sequence
  Synthetic
uuuaugaaagucagcaag

SEQ ID NO: 563141 - RNA, 19 nt, Artificial Sequence
  Synthetic
guuuaugaaagucagcaag

SEQ ID NO: 563142 - RNA, 20 nt, Artificial Sequence
  Synthetic
aguuuaugaaagucagcaag

SEQ ID NO: 563143 - RNA, 21 nt, Artificial Sequence
  Synthetic
aaguuuaugaaagucagcaag

SEQ ID NO: 563144 - RNA, 22 nt, Artificial Sequence
  Synthetic
gaaguuuaugaaagucagcaag

SEQ ID NO: 563145 - RNA, 23 nt, Artificial Sequence
  Synthetic
agaaguuuaugaaagucagcaag

SEQ ID NO: 563146 - RNA, 24 nt, Artificial Sequence
  Synthetic
uagaaguuuaugaaagucagcaag

SEQ ID NO: 563147 - RNA, 18 nt, Artificial Sequence
  Synthetic
agauuuacagucagcaag

SEQ ID NO: 563148 - RNA, 19 nt, Artificial Sequence
  Synthetic
aagauuuacagucagcaag

SEQ ID NO: 563149 - RNA, 20 nt, Artificial Sequence
  Synthetic
caagauuuacagucagcaag

SEQ ID NO: 563150 - RNA, 21 nt, Artificial Sequence
  Synthetic
ccaagauuuacagucagcaag

SEQ ID NO: 563151 - RNA, 22 nt, Artificial Sequence
  Synthetic
cccaagauuuacagucagcaag

SEQ ID NO: 563152 - RNA, 23 nt, Artificial Sequence
  Synthetic
ucccaagauuuacagucagcaag

SEQ ID NO: 563153 - RNA, 24 nt, Artificial Sequence
  Synthetic
gucccaagauuuacagucagcaag

SEQ ID NO: 563154 - RNA, 18 nt, Artificial Sequence
  Synthetic
ccuuuuaagaagagcaag

SEQ ID NO: 563155 - RNA, 19 nt, Artificial Sequence
  Synthetic
uccuuuuaagaagagcaag

SEQ ID NO: 563156 - RNA, 20 nt, Artificial Sequence
  Synthetic
guccuuuuaagaagagcaag

SEQ ID NO: 563157 - RNA, 21 nt, Artificial Sequence
  Synthetic
uguccuuuuaagaagagcaag

SEQ ID NO: 563158 - RNA, 22 nt, Artificial Sequence
  Synthetic
guguccuuuuaagaagagcaag

SEQ ID NO: 563159 - RNA, 23 nt, Artificial Sequence
  Synthetic
aguguccuuuuaagaagagcaag

SEQ ID NO: 563160 - RNA, 24 nt, Artificial Sequence
  Synthetic
uaguguccuuuuaagaagagcaag

SEQ ID NO: 563161 - RNA, 18 nt, Artificial Sequence
  Synthetic
auaaauugaaggagcaag

SEQ ID NO: 563162 - RNA, 19 nt, Artificial Sequence
  Synthetic
aauaaauugaaggagcaag

SEQ ID NO: 563163 - RNA, 20 nt, Artificial Sequence
  Synthetic
gaauaaauugaaggagcaag

SEQ ID NO: 563164 - RNA, 21 nt, Artificial Sequence
  Synthetic
agaauaaauugaaggagcaag

SEQ ID NO: 563165 - RNA, 22 nt, Artificial Sequence
  Synthetic
gagaauaaauugaaggagcaag

SEQ ID NO: 563166 - RNA, 23 nt, Artificial Sequence
  Synthetic
agagaauaaauugaaggagcaag

SEQ ID NO: 563167 - RNA, 24 nt, Artificial Sequence
  Synthetic
uagagaauaaauugaaggagcaag

SEQ ID NO: 563168 - RNA, 18 nt, Artificial Sequence
  Synthetic
uggaaucuagugagcaag

SEQ ID NO: 563169 - RNA, 19 nt, Artificial Sequence
  Synthetic
guggaaucuagugagcaag

SEQ ID NO: 563170 - RNA, 20 nt, Artificial Sequence
  Synthetic
aguggaaucuagugagcaag

SEQ ID NO: 563171 - RNA, 21 nt, Artificial Sequence
  Synthetic
gaguggaaucuagugagcaag

SEQ ID NO: 563172 - RNA, 22 nt, Artificial Sequence
  Synthetic
ugaguggaaucuagugagcaag

SEQ ID NO: 563173 - RNA, 23 nt, Artificial Sequence
  Synthetic
gugaguggaaucuagugagcaag

SEQ ID NO: 563174 - RNA, 24 nt, Artificial Sequence
  Synthetic
ggugaguggaaucuagugagcaag

SEQ ID NO: 563175 - RNA, 18 nt, Artificial Sequence
  Synthetic
acugcuaugauuagcaag

SEQ ID NO: 563176 - RNA, 19 nt, Artificial Sequence
  Synthetic
aacugcuaugauuagcaag

SEQ ID NO: 563177 - RNA, 20 nt, Artificial Sequence
  Synthetic
uaacugcuaugauuagcaag

SEQ ID NO: 563178 - RNA, 21 nt, Artificial Sequence
  Synthetic
auaacugcuaugauuagcaag

SEQ ID NO: 563179 - RNA, 22 nt, Artificial Sequence
  Synthetic
gauaacugcuaugauuagcaag

SEQ ID NO: 563180 - RNA, 23 nt, Artificial Sequence
  Synthetic
ggauaacugcuaugauuagcaag

SEQ ID NO: 563181 - RNA, 24 nt, Artificial Sequence
  Synthetic
aggauaacugcuaugauuagcaag

SEQ ID NO: 563182 - RNA, 18 nt, Artificial Sequence
  Synthetic
agauaaguaguuagcaag

SEQ ID NO: 563183 - RNA, 19 nt, Artificial Sequence
  Synthetic
aagauaaguaguuagcaag

SEQ ID NO: 563184 - RNA, 20 nt, Artificial Sequence
  Synthetic
gaagauaaguaguuagcaag

SEQ ID NO: 563185 - RNA, 21 nt, Artificial Sequence
  Synthetic
agaagauaaguaguuagcaag

SEQ ID NO: 563186 - RNA, 22 nt, Artificial Sequence
  Synthetic
uagaagauaaguaguuagcaag

SEQ ID NO: 563187 - RNA, 23 nt, Artificial Sequence
  Synthetic
uuagaagauaaguaguuagcaag

SEQ ID NO: 563188 - RNA, 24 nt, Artificial Sequence
  Synthetic
auuagaagauaaguaguuagcaag

SEQ ID NO: 563189 - RNA, 18 nt, Artificial Sequence
  Synthetic
agauaucuaguaggcaag

SEQ ID NO: 563190 - RNA, 19 nt, Artificial Sequence
  Synthetic
aagauaucuaguaggcaag

SEQ ID NO: 563191 - RNA, 20 nt, Artificial Sequence
  Synthetic
uaagauaucuaguaggcaag

SEQ ID NO: 563192 - RNA, 21 nt, Artificial Sequence
  Synthetic
uuaagauaucuaguaggcaag

SEQ ID NO: 563193 - RNA, 22 nt, Artificial Sequence
  Synthetic
guuaagauaucuaguaggcaag

SEQ ID NO: 563194 - RNA, 23 nt, Artificial Sequence
  Synthetic
aguuaagauaucuaguaggcaag

SEQ ID NO: 563195 - RNA, 24 nt, Artificial Sequence
  Synthetic
aaguuaagauaucuaguaggcaag

SEQ ID NO: 563196 - RNA, 18 nt, Artificial Sequence
  Synthetic
uuagaucugaagggcaag

SEQ ID NO: 563197 - RNA, 19 nt, Artificial Sequence
  Synthetic
auuagaucugaagggcaag

SEQ ID NO: 563198 - RNA, 20 nt, Artificial Sequence
  Synthetic
uauuagaucugaagggcaag

SEQ ID NO: 563199 - RNA, 21 nt, Artificial Sequence
  Synthetic
uuauuagaucugaagggcaag

SEQ ID NO: 563200 - RNA, 22 nt, Artificial Sequence
  Synthetic
guuauuagaucugaagggcaag

SEQ ID NO: 563201 - RNA, 23 nt, Artificial Sequence
  Synthetic
aguuauuagaucugaagggcaag

SEQ ID NO: 563202 - RNA, 24 nt, Artificial Sequence
  Synthetic
gaguuauuagaucugaagggcaag

SEQ ID NO: 563203 - RNA, 18 nt, Artificial Sequence
  Synthetic
uggcggguggggggcaag

SEQ ID NO: 563204 - RNA, 19 nt, Artificial Sequence
  Synthetic
uuggcggguggggggcaag

SEQ ID NO: 563205 - RNA, 20 nt, Artificial Sequence
  Synthetic
guuggcggguggggggcaag

SEQ ID NO: 563206 - RNA, 21 nt, Artificial Sequence
  Synthetic
uguuggcggguggggggcaag

SEQ ID NO: 563207 - RNA, 22 nt, Artificial Sequence
  Synthetic
cuguuggcggguggggggcaag

SEQ ID NO: 563208 - RNA, 23 nt, Artificial Sequence
  Synthetic
ccuguuggcggguggggggcaag

SEQ ID NO: 563209 - RNA, 24 nt, Artificial Sequence
  Synthetic
gccuguuggcggguggggggcaag

SEQ ID NO: 563210 - RNA, 18 nt, Artificial Sequence
  Synthetic
uauauccaagauggcaag

SEQ ID NO: 563211 - RNA, 19 nt, Artificial Sequence
  Synthetic
guauauccaagauggcaag

SEQ ID NO: 563212 - RNA, 20 nt, Artificial Sequence
  Synthetic
aguauauccaagauggcaag

SEQ ID NO: 563213 - RNA, 21 nt, Artificial Sequence
  Synthetic
aaguauauccaagauggcaag

SEQ ID NO: 563214 - RNA, 22 nt, Artificial Sequence
  Synthetic
gaaguauauccaagauggcaag

SEQ ID NO: 563215 - RNA, 23 nt, Artificial Sequence
  Synthetic
agaaguauauccaagauggcaag

SEQ ID NO: 563216 - RNA, 24 nt, Artificial Sequence
  Synthetic
cagaaguauauccaagauggcaag

SEQ ID NO: 563217 - RNA, 18 nt, Artificial Sequence
  Synthetic
caaaaaccaacuggcaag

SEQ ID NO: 563218 - RNA, 19 nt, Artificial Sequence
  Synthetic
ccaaaaaccaacuggcaag

SEQ ID NO: 563219 - RNA, 20 nt, Artificial Sequence
  Synthetic
accaaaaaccaacuggcaag

SEQ ID NO: 563220 - RNA, 21 nt, Artificial Sequence
  Synthetic
gaccaaaaaccaacuggcaag

SEQ ID NO: 563221 - RNA, 22 nt, Artificial Sequence
  Synthetic
agaccaaaaaccaacuggcaag

SEQ ID NO: 563222 - RNA, 23 nt, Artificial Sequence
  Synthetic
aagaccaaaaaccaacuggcaag

SEQ ID NO: 563223 - RNA, 24 nt, Artificial Sequence
  Synthetic
gaagaccaaaaaccaacuggcaag

SEQ ID NO: 563224 - RNA, 18 nt, Artificial Sequence
  Synthetic
ccuuuacaagguggcaag

SEQ ID NO: 563225 - RNA, 19 nt, Artificial Sequence
  Synthetic
uccuuuacaagguggcaag

SEQ ID NO: 563226 - RNA, 20 nt, Artificial Sequence
  Synthetic
cuccuuuacaagguggcaag

SEQ ID NO: 563227 - RNA, 21 nt, Artificial Sequence
  Synthetic
ccuccuuuacaagguggcaag

SEQ ID NO: 563228 - RNA, 22 nt, Artificial Sequence
  Synthetic
accuccuuuacaagguggcaag

SEQ ID NO: 563229 - RNA, 23 nt, Artificial Sequence
  Synthetic
caccuccuuuacaagguggcaag

SEQ ID NO: 563230 - RNA, 24 nt, Artificial Sequence
  Synthetic
gcaccuccuuuacaagguggcaag

SEQ ID NO: 563231 - RNA, 18 nt, Artificial Sequence
  Synthetic
aacucaaaguguggcaag

SEQ ID NO: 563232 - RNA, 19 nt, Artificial Sequence
  Synthetic
aaacucaaaguguggcaag

SEQ ID NO: 563233 - RNA, 20 nt, Artificial Sequence
  Synthetic
aaaacucaaaguguggcaag

SEQ ID NO: 563234 - RNA, 21 nt, Artificial Sequence
  Synthetic
caaaacucaaaguguggcaag

SEQ ID NO: 563235 - RNA, 22 nt, Artificial Sequence
  Synthetic
ccaaaacucaaaguguggcaag

SEQ ID NO: 563236 - RNA, 23 nt, Artificial Sequence
  Synthetic
accaaaacucaaaguguggcaag

SEQ ID NO: 563237 - RNA, 24 nt, Artificial Sequence
  Synthetic
aaccaaaacucaaaguguggcaag

SEQ ID NO: 563238 - RNA, 18 nt, Artificial Sequence
  Synthetic
gcaaacuaucaaugcaag

SEQ ID NO: 563239 - RNA, 19 nt, Artificial Sequence
  Synthetic
ggcaaacuaucaaugcaag

SEQ ID NO: 563240 - RNA, 20 nt, Artificial Sequence
  Synthetic
aggcaaacuaucaaugcaag

SEQ ID NO: 563241 - RNA, 21 nt, Artificial Sequence
  Synthetic
caggcaaacuaucaaugcaag

SEQ ID NO: 563242 - RNA, 22 nt, Artificial Sequence
  Synthetic
ucaggcaaacuaucaaugcaag

SEQ ID NO: 563243 - RNA, 23 nt, Artificial Sequence
  Synthetic
uucaggcaaacuaucaaugcaag

SEQ ID NO: 563244 - RNA, 24 nt, Artificial Sequence
  Synthetic
uuucaggcaaacuaucaaugcaag

SEQ ID NO: 563245 - RNA, 18 nt, Artificial Sequence
  Synthetic
caacucccagcaugcaag

SEQ ID NO: 563246 - RNA, 19 nt, Artificial Sequence
  Synthetic
gcaacucccagcaugcaag

SEQ ID NO: 563247 - RNA, 20 nt, Artificial Sequence
  Synthetic
ggcaacucccagcaugcaag

SEQ ID NO: 563248 - RNA, 21 nt, Artificial Sequence
  Synthetic
gggcaacucccagcaugcaag

SEQ ID NO: 563249 - RNA, 22 nt, Artificial Sequence
  Synthetic
ugggcaacucccagcaugcaag

SEQ ID NO: 563250 - RNA, 23 nt, Artificial Sequence
  Synthetic
augggcaacucccagcaugcaag

SEQ ID NO: 563251 - RNA, 24 nt, Artificial Sequence
  Synthetic
caugggcaacucccagcaugcaag

SEQ ID NO: 563252 - RNA, 18 nt, Artificial Sequence
  Synthetic
aaggauuugauaugcaag

SEQ ID NO: 563253 - RNA, 19 nt, Artificial Sequence
  Synthetic
caaggauuugauaugcaag

SEQ ID NO: 563254 - RNA, 20 nt, Artificial Sequence
  Synthetic
acaaggauuugauaugcaag

SEQ ID NO: 563255 - RNA, 21 nt, Artificial Sequence
  Synthetic
aacaaggauuugauaugcaag

SEQ ID NO: 563256 - RNA, 22 nt, Artificial Sequence
  Synthetic
aaacaaggauuugauaugcaag

SEQ ID NO: 563257 - RNA, 23 nt, Artificial Sequence
  Synthetic
aaaacaaggauuugauaugcaag

SEQ ID NO: 563258 - RNA, 24 nt, Artificial Sequence
  Synthetic
gaaaacaaggauuugauaugcaag

SEQ ID NO: 563259 - RNA, 18 nt, Artificial Sequence
  Synthetic
auuuauauaguaugcaag

SEQ ID NO: 563260 - RNA, 19 nt, Artificial Sequence
  Synthetic
gauuuauauaguaugcaag

SEQ ID NO: 563261 - RNA, 20 nt, Artificial Sequence
  Synthetic
agauuuauauaguaugcaag

SEQ ID NO: 563262 - RNA, 21 nt, Artificial Sequence
  Synthetic
uagauuuauauaguaugcaag

SEQ ID NO: 563263 - RNA, 22 nt, Artificial Sequence
  Synthetic
uuagauuuauauaguaugcaag

SEQ ID NO: 563264 - RNA, 23 nt, Artificial Sequence
  Synthetic
guuagauuuauauaguaugcaag

SEQ ID NO: 563265 - RNA, 24 nt, Artificial Sequence
  Synthetic
uguuagauuuauauaguaugcaag

SEQ ID NO: 563266 - RNA, 18 nt, Artificial Sequence
  Synthetic
aaaugaacguuaugcaag

SEQ ID NO: 563267 - RNA, 19 nt, Artificial Sequence
  Synthetic
caaaugaacguuaugcaag

SEQ ID NO: 563268 - RNA, 20 nt, Artificial Sequence
  Synthetic
gcaaaugaacguuaugcaag

SEQ ID NO: 563269 - RNA, 21 nt, Artificial Sequence
  Synthetic
ugcaaaugaacguuaugcaag

SEQ ID NO: 563270 - RNA, 22 nt, Artificial Sequence
  Synthetic
gugcaaaugaacguuaugcaag

SEQ ID NO: 563271 - RNA, 23 nt, Artificial Sequence
  Synthetic
cgugcaaaugaacguuaugcaag

SEQ ID NO: 563272 - RNA, 24 nt, Artificial Sequence
  Synthetic
acgugcaaaugaacguuaugcaag

SEQ ID NO: 563273 - RNA, 18 nt, Artificial Sequence
  Synthetic
uauggauccaccugcaag

SEQ ID NO: 563274 - RNA, 19 nt, Artificial Sequence
  Synthetic
cuauggauccaccugcaag

SEQ ID NO: 563275 - RNA, 20 nt, Artificial Sequence
  Synthetic
ccuauggauccaccugcaag

SEQ ID NO: 563276 - RNA, 21 nt, Artificial Sequence
  Synthetic
gccuauggauccaccugcaag

SEQ ID NO: 563277 - RNA, 22 nt, Artificial Sequence
  Synthetic
ugccuauggauccaccugcaag

SEQ ID NO: 563278 - RNA, 23 nt, Artificial Sequence
  Synthetic
uugccuauggauccaccugcaag

SEQ ID NO: 563279 - RNA, 24 nt, Artificial Sequence
  Synthetic
uuugccuauggauccaccugcaag

SEQ ID NO: 563280 - RNA, 18 nt, Artificial Sequence
  Synthetic
aguuuuaaccccugcaag

SEQ ID NO: 563281 - RNA, 19 nt, Artificial Sequence
  Synthetic
aaguuuuaaccccugcaag

SEQ ID NO: 563282 - RNA, 20 nt, Artificial Sequence
  Synthetic
gaaguuuuaaccccugcaag

SEQ ID NO: 563283 - RNA, 21 nt, Artificial Sequence
  Synthetic
ugaaguuuuaaccccugcaag

SEQ ID NO: 563284 - RNA, 22 nt, Artificial Sequence
  Synthetic
uugaaguuuuaaccccugcaag

SEQ ID NO: 563285 - RNA, 23 nt, Artificial Sequence
  Synthetic
guugaaguuuuaaccccugcaag

SEQ ID NO: 563286 - RNA, 24 nt, Artificial Sequence
  Synthetic
uguugaaguuuuaaccccugcaag

SEQ ID NO: 563287 - RNA, 18 nt, Artificial Sequence
  Synthetic
cuaaagaagcccugcaag

SEQ ID NO: 563288 - RNA, 19 nt, Artificial Sequence
  Synthetic
ucuaaagaagcccugcaag

SEQ ID NO: 563289 - RNA, 20 nt, Artificial Sequence
  Synthetic
aucuaaagaagcccugcaag

SEQ ID NO: 563290 - RNA, 21 nt, Artificial Sequence
  Synthetic
uaucuaaagaagcccugcaag

SEQ ID NO: 563291 - RNA, 22 nt, Artificial Sequence
  Synthetic
auaucuaaagaagcccugcaag

SEQ ID NO: 563292 - RNA, 23 nt, Artificial Sequence
  Synthetic
aauaucuaaagaagcccugcaag

SEQ ID NO: 563293 - RNA, 24 nt, Artificial Sequence
  Synthetic
caauaucuaaagaagcccugcaag

SEQ ID NO: 563294 - RNA, 18 nt, Artificial Sequence
  Synthetic
uccagccugcucugcaag

SEQ ID NO: 563295 - RNA, 19 nt, Artificial Sequence
  Synthetic
uuccagccugcucugcaag

SEQ ID NO: 563296 - RNA, 20 nt, Artificial Sequence
  Synthetic
cuuccagccugcucugcaag

SEQ ID NO: 563297 - RNA, 21 nt, Artificial Sequence
  Synthetic
gcuuccagccugcucugcaag

SEQ ID NO: 563298 - RNA, 22 nt, Artificial Sequence
  Synthetic
agcuuccagccugcucugcaag

SEQ ID NO: 563299 - RNA, 23 nt, Artificial Sequence
  Synthetic
cagcuuccagccugcucugcaag

SEQ ID NO: 563300 - RNA, 24 nt, Artificial Sequence
  Synthetic
ccagcuuccagccugcucugcaag

SEQ ID NO: 563301 - RNA, 18 nt, Artificial Sequence
  Synthetic
ggucauguugucugcaag

SEQ ID NO: 563302 - RNA, 19 nt, Artificial Sequence
  Synthetic
aggucauguugucugcaag

SEQ ID NO: 563303 - RNA, 20 nt, Artificial Sequence
  Synthetic
aaggucauguugucugcaag

SEQ ID NO: 563304 - RNA, 21 nt, Artificial Sequence
  Synthetic
caaggucauguugucugcaag

SEQ ID NO: 563305 - RNA, 22 nt, Artificial Sequence
  Synthetic
acaaggucauguugucugcaag

SEQ ID NO: 563306 - RNA, 23 nt, Artificial Sequence
  Synthetic
uacaaggucauguugucugcaag

SEQ ID NO: 563307 - RNA, 24 nt, Artificial Sequence
  Synthetic
uuacaaggucauguugucugcaag

SEQ ID NO: 563308 - RNA, 18 nt, Artificial Sequence
  Synthetic
gaagauacuacuugcaag

SEQ ID NO: 563309 - RNA, 19 nt, Artificial Sequence
  Synthetic
cgaagauacuacuugcaag

SEQ ID NO: 563310 - RNA, 20 nt, Artificial Sequence
  Synthetic
acgaagauacuacuugcaag

SEQ ID NO: 563311 - RNA, 21 nt, Artificial Sequence
  Synthetic
aacgaagauacuacuugcaag

SEQ ID NO: 563312 - RNA, 22 nt, Artificial Sequence
  Synthetic
gaacgaagauacuacuugcaag

SEQ ID NO: 563313 - RNA, 23 nt, Artificial Sequence
  Synthetic
ugaacgaagauacuacuugcaag

SEQ ID NO: 563314 - RNA, 24 nt, Artificial Sequence
  Synthetic
cugaacgaagauacuacuugcaag

SEQ ID NO: 563315 - RNA, 18 nt, Artificial Sequence
  Synthetic
guuggaaguaguugcaag

SEQ ID NO: 563316 - RNA, 19 nt, Artificial Sequence
  Synthetic
gguuggaaguaguugcaag

SEQ ID NO: 563317 - RNA, 20 nt, Artificial Sequence
  Synthetic
agguuggaaguaguugcaag

SEQ ID NO: 563318 - RNA, 21 nt, Artificial Sequence
  Synthetic
cagguuggaaguaguugcaag

SEQ ID NO: 563319 - RNA, 22 nt, Artificial Sequence
  Synthetic
acagguuggaaguaguugcaag

SEQ ID NO: 563320 - RNA, 23 nt, Artificial Sequence
  Synthetic
aacagguuggaaguaguugcaag

SEQ ID NO: 563321 - RNA, 24 nt, Artificial Sequence
  Synthetic
aaacagguuggaaguaguugcaag

SEQ ID NO: 563322 - RNA, 18 nt, Artificial Sequence
  Synthetic
gagugagaggguugcaag

SEQ ID NO: 563323 - RNA, 19 nt, Artificial Sequence
  Synthetic
agagugagaggguugcaag

SEQ ID NO: 563324 - RNA, 20 nt, Artificial Sequence
  Synthetic
gagagugagaggguugcaag

SEQ ID NO: 563325 - RNA, 21 nt, Artificial Sequence
  Synthetic
agagagugagaggguugcaag

SEQ ID NO: 563326 - RNA, 22 nt, Artificial Sequence
  Synthetic
aagagagugagaggguugcaag

SEQ ID NO: 563327 - RNA, 23 nt, Artificial Sequence
  Synthetic
uaagagagugagaggguugcaag

SEQ ID NO: 563328 - RNA, 24 nt, Artificial Sequence
  Synthetic
guaagagagugagaggguugcaag

SEQ ID NO: 563329 - RNA, 18 nt, Artificial Sequence
  Synthetic
gaguuucaguuuugcaag

SEQ ID NO: 563330 - RNA, 19 nt, Artificial Sequence
  Synthetic
agaguuucaguuuugcaag

SEQ ID NO: 563331 - RNA, 20 nt, Artificial Sequence
  Synthetic
uagaguuucaguuuugcaag

SEQ ID NO: 563332 - RNA, 21 nt, Artificial Sequence
  Synthetic
auagaguuucaguuuugcaag

SEQ ID NO: 563333 - RNA, 22 nt, Artificial Sequence
  Synthetic
cauagaguuucaguuuugcaag

SEQ ID NO: 563334 - RNA, 23 nt, Artificial Sequence
  Synthetic
acauagaguuucaguuuugcaag

SEQ ID NO: 563335 - RNA, 24 nt, Artificial Sequence
  Synthetic
gacauagaguuucaguuuugcaag

SEQ ID NO: 563336 - RNA, 18 nt, Artificial Sequence
  Synthetic
aaagagaucaaaaucaag

SEQ ID NO: 563337 - RNA, 19 nt, Artificial Sequence
  Synthetic
aaaagagaucaaaaucaag

SEQ ID NO: 563338 - RNA, 20 nt, Artificial Sequence
  Synthetic
caaaagagaucaaaaucaag

SEQ ID NO: 563339 - RNA, 21 nt, Artificial Sequence
  Synthetic
acaaaagagaucaaaaucaag

SEQ ID NO: 563340 - RNA, 22 nt, Artificial Sequence
  Synthetic
uacaaaagagaucaaaaucaag

SEQ ID NO: 563341 - RNA, 23 nt, Artificial Sequence
  Synthetic
auacaaaagagaucaaaaucaag

SEQ ID NO: 563342 - RNA, 24 nt, Artificial Sequence
  Synthetic
cauacaaaagagaucaaaaucaag

SEQ ID NO: 563343 - RNA, 18 nt, Artificial Sequence
  Synthetic
gcagcauauaaaaucaag

SEQ ID NO: 563344 - RNA, 19 nt, Artificial Sequence
  Synthetic
ugcagcauauaaaaucaag

SEQ ID NO: 563345 - RNA, 20 nt, Artificial Sequence
  Synthetic
uugcagcauauaaaaucaag

SEQ ID NO: 563346 - RNA, 21 nt, Artificial Sequence
  Synthetic
auugcagcauauaaaaucaag

SEQ ID NO: 563347 - RNA, 22 nt, Artificial Sequence
  Synthetic
uauugcagcauauaaaaucaag

SEQ ID NO: 563348 - RNA, 23 nt, Artificial Sequence
  Synthetic
cuauugcagcauauaaaaucaag

SEQ ID NO: 563349 - RNA, 24 nt, Artificial Sequence
  Synthetic
acuauugcagcauauaaaaucaag

SEQ ID NO: 563350 - RNA, 18 nt, Artificial Sequence
  Synthetic
cuccuaguuuaaaucaag

SEQ ID NO: 563351 - RNA, 19 nt, Artificial Sequence
  Synthetic
ccuccuaguuuaaaucaag

SEQ ID NO: 563352 - RNA, 20 nt, Artificial Sequence
  Synthetic
cccuccuaguuuaaaucaag

SEQ ID NO: 563353 - RNA, 21 nt, Artificial Sequence
  Synthetic
acccuccuaguuuaaaucaag

SEQ ID NO: 563354 - RNA, 22 nt, Artificial Sequence
  Synthetic
aacccuccuaguuuaaaucaag

SEQ ID NO: 563355 - RNA, 23 nt, Artificial Sequence
  Synthetic
caacccuccuaguuuaaaucaag

SEQ ID NO: 563356 - RNA, 24 nt, Artificial Sequence
  Synthetic
acaacccuccuaguuuaaaucaag

SEQ ID NO: 563357 - RNA, 18 nt, Artificial Sequence
  Synthetic
aaugugaaaaucaucaag

SEQ ID NO: 563358 - RNA, 19 nt, Artificial Sequence
  Synthetic
caaugugaaaaucaucaag

SEQ ID NO: 563359 - RNA, 20 nt, Artificial Sequence
  Synthetic
acaaugugaaaaucaucaag

SEQ ID NO: 563360 - RNA, 21 nt, Artificial Sequence
  Synthetic
uacaaugugaaaaucaucaag

SEQ ID NO: 563361 - RNA, 22 nt, Artificial Sequence
  Synthetic
uuacaaugugaaaaucaucaag

SEQ ID NO: 563362 - RNA, 23 nt, Artificial Sequence
  Synthetic
auuacaaugugaaaaucaucaag

SEQ ID NO: 563363 - RNA, 24 nt, Artificial Sequence
  Synthetic
aauuacaaugugaaaaucaucaag

SEQ ID NO: 563364 - RNA, 18 nt, Artificial Sequence
  Synthetic
uuggagucagagaucaag

SEQ ID NO: 563365 - RNA, 19 nt, Artificial Sequence
  Synthetic
cuuggagucagagaucaag

SEQ ID NO: 563366 - RNA, 20 nt, Artificial Sequence
  Synthetic
ccuuggagucagagaucaag

SEQ ID NO: 563367 - RNA, 21 nt, Artificial Sequence
  Synthetic
uccuuggagucagagaucaag

SEQ ID NO: 563368 - RNA, 22 nt, Artificial Sequence
  Synthetic
uuccuuggagucagagaucaag

SEQ ID NO: 563369 - RNA, 23 nt, Artificial Sequence
  Synthetic
guuccuuggagucagagaucaag

SEQ ID NO: 563370 - RNA, 24 nt, Artificial Sequence
  Synthetic
uguuccuuggagucagagaucaag

SEQ ID NO: 563371 - RNA, 18 nt, Artificial Sequence
  Synthetic
acgauggcugugaucaag

SEQ ID NO: 563372 - RNA, 19 nt, Artificial Sequence
  Synthetic
uacgauggcugugaucaag

SEQ ID NO: 563373 - RNA, 20 nt, Artificial Sequence
  Synthetic
uuacgauggcugugaucaag

SEQ ID NO: 563374 - RNA, 21 nt, Artificial Sequence
  Synthetic
auuacgauggcugugaucaag

SEQ ID NO: 563375 - RNA, 22 nt, Artificial Sequence
  Synthetic
aauuacgauggcugugaucaag

SEQ ID NO: 563376 - RNA, 23 nt, Artificial Sequence
  Synthetic
gaauuacgauggcugugaucaag

SEQ ID NO: 563377 - RNA, 24 nt, Artificial Sequence
  Synthetic
agaauuacgauggcugugaucaag

SEQ ID NO: 563378 - RNA, 18 nt, Artificial Sequence
  Synthetic
aagcaagucaauaucaag

SEQ ID NO: 563379 - RNA, 19 nt, Artificial Sequence
  Synthetic
gaagcaagucaauaucaag

SEQ ID NO: 563380 - RNA, 20 nt, Artificial Sequence
  Synthetic
ugaagcaagucaauaucaag

SEQ ID NO: 563381 - RNA, 21 nt, Artificial Sequence
  Synthetic
cugaagcaagucaauaucaag

SEQ ID NO: 563382 - RNA, 22 nt, Artificial Sequence
  Synthetic
ucugaagcaagucaauaucaag

SEQ ID NO: 563383 - RNA, 23 nt, Artificial Sequence
  Synthetic
cucugaagcaagucaauaucaag

SEQ ID NO: 563384 - RNA, 24 nt, Artificial Sequence
  Synthetic
ucucugaagcaagucaauaucaag

SEQ ID NO: 563385 - RNA, 18 nt, Artificial Sequence
  Synthetic
aggucaaagaaacucaag

SEQ ID NO: 563386 - RNA, 19 nt, Artificial Sequence
  Synthetic
gaggucaaagaaacucaag

SEQ ID NO: 563387 - RNA, 20 nt, Artificial Sequence
  Synthetic
ugaggucaaagaaacucaag

SEQ ID NO: 563388 - RNA, 21 nt, Artificial Sequence
  Synthetic
augaggucaaagaaacucaag

SEQ ID NO: 563389 - RNA, 22 nt, Artificial Sequence
  Synthetic
uaugaggucaaagaaacucaag

SEQ ID NO: 563390 - RNA, 23 nt, Artificial Sequence
  Synthetic
uuaugaggucaaagaaacucaag

SEQ ID NO: 563391 - RNA, 24 nt, Artificial Sequence
  Synthetic
guuaugaggucaaagaaacucaag

SEQ ID NO: 563392 - RNA, 21 nt, Artificial Sequence
  Synthetic
auauacaaaaauuaacucaag

SEQ ID NO: 563393 - RNA, 22 nt, Artificial Sequence
  Synthetic
cauauacaaaaauuaacucaag

SEQ ID NO: 563394 - RNA, 23 nt, Artificial Sequence
  Synthetic
ccauauacaaaaauuaacucaag

SEQ ID NO: 563395 - RNA, 24 nt, Artificial Sequence
  Synthetic
accauauacaaaaauuaacucaag

SEQ ID NO: 563396 - RNA, 18 nt, Artificial Sequence
  Synthetic
aguacccagccacucaag

SEQ ID NO: 563397 - RNA, 19 nt, Artificial Sequence
  Synthetic
gaguacccagccacucaag

SEQ ID NO: 563398 - RNA, 20 nt, Artificial Sequence
  Synthetic
ggaguacccagccacucaag

SEQ ID NO: 563399 - RNA, 21 nt, Artificial Sequence
  Synthetic
uggaguacccagccacucaag

SEQ ID NO: 563400 - RNA, 22 nt, Artificial Sequence
  Synthetic
auggaguacccagccacucaag

SEQ ID NO: 563401 - RNA, 23 nt, Artificial Sequence
  Synthetic
uauggaguacccagccacucaag

SEQ ID NO: 563402 - RNA, 24 nt, Artificial Sequence
  Synthetic
uuauggaguacccagccacucaag

SEQ ID NO: 563403 - RNA, 18 nt, Artificial Sequence
  Synthetic
gaauuggacaaccucaag

SEQ ID NO: 563404 - RNA, 19 nt, Artificial Sequence
  Synthetic
agaauuggacaaccucaag

SEQ ID NO: 563405 - RNA, 20 nt, Artificial Sequence
  Synthetic
uagaauuggacaaccucaag

SEQ ID NO: 563406 - RNA, 21 nt, Artificial Sequence
  Synthetic
auagaauuggacaaccucaag

SEQ ID NO: 563407 - RNA, 22 nt, Artificial Sequence
  Synthetic
gauagaauuggacaaccucaag

SEQ ID NO: 563408 - RNA, 23 nt, Artificial Sequence
  Synthetic
ugauagaauuggacaaccucaag

SEQ ID NO: 563409 - RNA, 24 nt, Artificial Sequence
  Synthetic
uugauagaauuggacaaccucaag

SEQ ID NO: 563410 - RNA, 18 nt, Artificial Sequence
  Synthetic
uaauggauaucccucaag

SEQ ID NO: 563411 - RNA, 19 nt, Artificial Sequence
  Synthetic
cuaauggauaucccucaag

SEQ ID NO: 563412 - RNA, 20 nt, Artificial Sequence
  Synthetic
acuaauggauaucccucaag

SEQ ID NO: 563413 - RNA, 21 nt, Artificial Sequence
  Synthetic
aacuaauggauaucccucaag

SEQ ID NO: 563414 - RNA, 22 nt, Artificial Sequence
  Synthetic
uaacuaauggauaucccucaag

SEQ ID NO: 563415 - RNA, 23 nt, Artificial Sequence
  Synthetic
uuaacuaauggauaucccucaag

SEQ ID NO: 563416 - RNA, 24 nt, Artificial Sequence
  Synthetic
cuuaacuaauggauaucccucaag

SEQ ID NO: 563417 - RNA, 18 nt, Artificial Sequence
  Synthetic
acuuaaagaaagcucaag

SEQ ID NO: 563418 - RNA, 19 nt, Artificial Sequence
  Synthetic
uacuuaaagaaagcucaag

SEQ ID NO: 563419 - RNA, 20 nt, Artificial Sequence
  Synthetic
guacuuaaagaaagcucaag

SEQ ID NO: 563420 - RNA, 21 nt, Artificial Sequence
  Synthetic
aguacuuaaagaaagcucaag

SEQ ID NO: 563421 - RNA, 22 nt, Artificial Sequence
  Synthetic
aaguacuuaaagaaagcucaag

SEQ ID NO: 563422 - RNA, 23 nt, Artificial Sequence
  Synthetic
caaguacuuaaagaaagcucaag

SEQ ID NO: 563423 - RNA, 24 nt, Artificial Sequence
  Synthetic
acaaguacuuaaagaaagcucaag

SEQ ID NO: 563424 - RNA, 18 nt, Artificial Sequence
  Synthetic
gauucaaauaagcucaag

SEQ ID NO: 563425 - RNA, 19 nt, Artificial Sequence
  Synthetic
agauucaaauaagcucaag

SEQ ID NO: 563426 - RNA, 20 nt, Artificial Sequence
  Synthetic
aagauucaaauaagcucaag

SEQ ID NO: 563427 - RNA, 21 nt, Artificial Sequence
  Synthetic
gaagauucaaauaagcucaag

SEQ ID NO: 563428 - RNA, 22 nt, Artificial Sequence
  Synthetic
agaagauucaaauaagcucaag

SEQ ID NO: 563429 - RNA, 23 nt, Artificial Sequence
  Synthetic
gagaagauucaaauaagcucaag

SEQ ID NO: 563430 - RNA, 24 nt, Artificial Sequence
  Synthetic
agagaagauucaaauaagcucaag

SEQ ID NO: 563431 - RNA, 18 nt, Artificial Sequence
  Synthetic
uaacaugcucagcucaag

SEQ ID NO: 563432 - RNA, 19 nt, Artificial Sequence
  Synthetic
auaacaugcucagcucaag

SEQ ID NO: 563433 - RNA, 20 nt, Artificial Sequence
  Synthetic
cauaacaugcucagcucaag

SEQ ID NO: 563434 - RNA, 21 nt, Artificial Sequence
  Synthetic
ucauaacaugcucagcucaag

SEQ ID NO: 563435 - RNA, 22 nt, Artificial Sequence
  Synthetic
gucauaacaugcucagcucaag

SEQ ID NO: 563436 - RNA, 23 nt, Artificial Sequence
  Synthetic
ugucauaacaugcucagcucaag

SEQ ID NO: 563437 - RNA, 24 nt, Artificial Sequence
  Synthetic
augucauaacaugcucagcucaag

SEQ ID NO: 563438 - RNA, 18 nt, Artificial Sequence
  Synthetic
aaauauuccuggcucaag

SEQ ID NO: 563439 - RNA, 19 nt, Artificial Sequence
  Synthetic
gaaauauuccuggcucaag

SEQ ID NO: 563440 - RNA, 20 nt, Artificial Sequence
  Synthetic
ugaaauauuccuggcucaag

SEQ ID NO: 563441 - RNA, 21 nt, Artificial Sequence
  Synthetic
gugaaauauuccuggcucaag

SEQ ID NO: 563442 - RNA, 22 nt, Artificial Sequence
  Synthetic
agugaaauauuccuggcucaag

SEQ ID NO: 563443 - RNA, 23 nt, Artificial Sequence
  Synthetic
cagugaaauauuccuggcucaag

SEQ ID NO: 563444 - RNA, 24 nt, Artificial Sequence
  Synthetic
acagugaaauauuccuggcucaag

SEQ ID NO: 563445 - RNA, 18 nt, Artificial Sequence
  Synthetic
cgccacucaaaucucaag

SEQ ID NO: 563446 - RNA, 19 nt, Artificial Sequence
  Synthetic
ccgccacucaaaucucaag

SEQ ID NO: 563447 - RNA, 20 nt, Artificial Sequence
  Synthetic
gccgccacucaaaucucaag

SEQ ID NO: 563448 - RNA, 21 nt, Artificial Sequence
  Synthetic
ugccgccacucaaaucucaag

SEQ ID NO: 563449 - RNA, 22 nt, Artificial Sequence
  Synthetic
uugccgccacucaaaucucaag

SEQ ID NO: 563450 - RNA, 23 nt, Artificial Sequence
  Synthetic
uuugccgccacucaaaucucaag

SEQ ID NO: 563451 - RNA, 24 nt, Artificial Sequence
  Synthetic
auuugccgccacucaaaucucaag

SEQ ID NO: 563452 - RNA, 18 nt, Artificial Sequence
  Synthetic
aggaaagccuaucucaag

SEQ ID NO: 563453 - RNA, 19 nt, Artificial Sequence
  Synthetic
uaggaaagccuaucucaag

SEQ ID NO: 563454 - RNA, 20 nt, Artificial Sequence
  Synthetic
auaggaaagccuaucucaag

SEQ ID NO: 563455 - RNA, 21 nt, Artificial Sequence
  Synthetic
gauaggaaagccuaucucaag

SEQ ID NO: 563456 - RNA, 22 nt, Artificial Sequence
  Synthetic
agauaggaaagccuaucucaag

SEQ ID NO: 563457 - RNA, 23 nt, Artificial Sequence
  Synthetic
aagauaggaaagccuaucucaag

SEQ ID NO: 563458 - RNA, 24 nt, Artificial Sequence
  Synthetic
aaagauaggaaagccuaucucaag

SEQ ID NO: 563459 - RNA, 18 nt, Artificial Sequence
  Synthetic
gaaauaaaaaaagucaag

SEQ ID NO: 563460 - RNA, 19 nt, Artificial Sequence
  Synthetic
agaaauaaaaaaagucaag

SEQ ID NO: 563461 - RNA, 20 nt, Artificial Sequence
  Synthetic
uagaaauaaaaaaagucaag

SEQ ID NO: 563462 - RNA, 21 nt, Artificial Sequence
  Synthetic
uuagaaauaaaaaaagucaag

SEQ ID NO: 563463 - RNA, 22 nt, Artificial Sequence
  Synthetic
guuagaaauaaaaaaagucaag

SEQ ID NO: 563464 - RNA, 23 nt, Artificial Sequence
  Synthetic
gguuagaaauaaaaaaagucaag

SEQ ID NO: 563465 - RNA, 24 nt, Artificial Sequence
  Synthetic
ggguuagaaauaaaaaaagucaag

SEQ ID NO: 563466 - RNA, 18 nt, Artificial Sequence
  Synthetic
uagauuguaaaagucaag

SEQ ID NO: 563467 - RNA, 19 nt, Artificial Sequence
  Synthetic
cuagauuguaaaagucaag

SEQ ID NO: 563468 - RNA, 20 nt, Artificial Sequence
  Synthetic
gcuagauuguaaaagucaag

SEQ ID NO: 563469 - RNA, 21 nt, Artificial Sequence
  Synthetic
ugcuagauuguaaaagucaag

SEQ ID NO: 563470 - RNA, 22 nt, Artificial Sequence
  Synthetic
uugcuagauuguaaaagucaag

SEQ ID NO: 563471 - RNA, 23 nt, Artificial Sequence
  Synthetic
uuugcuagauuguaaaagucaag

SEQ ID NO: 563472 - RNA, 24 nt, Artificial Sequence
  Synthetic
auuugcuagauuguaaaagucaag

SEQ ID NO: 563473 - RNA, 18 nt, Artificial Sequence
  Synthetic
cuguaaaggaaagucaag

SEQ ID NO: 563474 - RNA, 19 nt, Artificial Sequence
  Synthetic
ucuguaaaggaaagucaag

SEQ ID NO: 563475 - RNA, 20 nt, Artificial Sequence
  Synthetic
aucuguaaaggaaagucaag

SEQ ID NO: 563476 - RNA, 21 nt, Artificial Sequence
  Synthetic
uaucuguaaaggaaagucaag

SEQ ID NO: 563477 - RNA, 22 nt, Artificial Sequence
  Synthetic
uuaucuguaaaggaaagucaag

SEQ ID NO: 563478 - RNA, 23 nt, Artificial Sequence
  Synthetic
guuaucuguaaaggaaagucaag

SEQ ID NO: 563479 - RNA, 24 nt, Artificial Sequence
  Synthetic
gguuaucuguaaaggaaagucaag

SEQ ID NO: 563480 - RNA, 18 nt, Artificial Sequence
  Synthetic
uuucaauguacagucaag

SEQ ID NO: 563481 - RNA, 19 nt, Artificial Sequence
  Synthetic
auuucaauguacagucaag

SEQ ID NO: 563482 - RNA, 20 nt, Artificial Sequence
  Synthetic
gauuucaauguacagucaag

SEQ ID NO: 563483 - RNA, 21 nt, Artificial Sequence
  Synthetic
ugauuucaauguacagucaag

SEQ ID NO: 563484 - RNA, 22 nt, Artificial Sequence
  Synthetic
gugauuucaauguacagucaag

SEQ ID NO: 563485 - RNA, 23 nt, Artificial Sequence
  Synthetic
ggugauuucaauguacagucaag

SEQ ID NO: 563486 - RNA, 24 nt, Artificial Sequence
  Synthetic
aggugauuucaauguacagucaag

SEQ ID NO: 563487 - RNA, 18 nt, Artificial Sequence
  Synthetic
guaagaaucaaggucaag

SEQ ID NO: 563488 - RNA, 19 nt, Artificial Sequence
  Synthetic
gguaagaaucaaggucaag

SEQ ID NO: 563489 - RNA, 20 nt, Artificial Sequence
  Synthetic
agguaagaaucaaggucaag

SEQ ID NO: 563490 - RNA, 21 nt, Artificial Sequence
  Synthetic
gagguaagaaucaaggucaag

SEQ ID NO: 563491 - RNA, 22 nt, Artificial Sequence
  Synthetic
ggagguaagaaucaaggucaag

SEQ ID NO: 563492 - RNA, 23 nt, Artificial Sequence
  Synthetic
aggagguaagaaucaaggucaag

SEQ ID NO: 563493 - RNA, 24 nt, Artificial Sequence
  Synthetic
uaggagguaagaaucaaggucaag

SEQ ID NO: 563494 - RNA, 18 nt, Artificial Sequence
  Synthetic
gauaagaaaaaugucaag

SEQ ID NO: 563495 - RNA, 19 nt, Artificial Sequence
  Synthetic
ggauaagaaaaaugucaag

SEQ ID NO: 563496 - RNA, 20 nt, Artificial Sequence
  Synthetic
gggauaagaaaaaugucaag

SEQ ID NO: 563497 - RNA, 21 nt, Artificial Sequence
  Synthetic
ggggauaagaaaaaugucaag

SEQ ID NO: 563498 - RNA, 22 nt, Artificial Sequence
  Synthetic
aggggauaagaaaaaugucaag

SEQ ID NO: 563499 - RNA, 23 nt, Artificial Sequence
  Synthetic
aaggggauaagaaaaaugucaag

SEQ ID NO: 563500 - RNA, 24 nt, Artificial Sequence
  Synthetic
aaaggggauaagaaaaaugucaag

SEQ ID NO: 563501 - RNA, 18 nt, Artificial Sequence
  Synthetic
ugacauaaauaugucaag

SEQ ID NO: 563502 - RNA, 19 nt, Artificial Sequence
  Synthetic
uugacauaaauaugucaag

SEQ ID NO: 563503 - RNA, 20 nt, Artificial Sequence
  Synthetic
auugacauaaauaugucaag

SEQ ID NO: 563504 - RNA, 21 nt, Artificial Sequence
  Synthetic
aauugacauaaauaugucaag

SEQ ID NO: 563505 - RNA, 22 nt, Artificial Sequence
  Synthetic
aaauugacauaaauaugucaag

SEQ ID NO: 563506 - RNA, 23 nt, Artificial Sequence
  Synthetic
uaaauugacauaaauaugucaag

SEQ ID NO: 563507 - RNA, 24 nt, Artificial Sequence
  Synthetic
uuaaauugacauaaauaugucaag

SEQ ID NO: 563508 - RNA, 18 nt, Artificial Sequence
  Synthetic
ugaaaagaggcugucaag

SEQ ID NO: 563509 - RNA, 19 nt, Artificial Sequence
  Synthetic
gugaaaagaggcugucaag

SEQ ID NO: 563510 - RNA, 20 nt, Artificial Sequence
  Synthetic
agugaaaagaggcugucaag

SEQ ID NO: 563511 - RNA, 21 nt, Artificial Sequence
  Synthetic
gagugaaaagaggcugucaag

SEQ ID NO: 563512 - RNA, 22 nt, Artificial Sequence
  Synthetic
agagugaaaagaggcugucaag

SEQ ID NO: 563513 - RNA, 23 nt, Artificial Sequence
  Synthetic
gagagugaaaagaggcugucaag

SEQ ID NO: 563514 - RNA, 24 nt, Artificial Sequence
  Synthetic
ugagagugaaaagaggcugucaag

SEQ ID NO: 563515 - RNA, 18 nt, Artificial Sequence
  Synthetic
cagcuaugcagugucaag

SEQ ID NO: 563516 - RNA, 19 nt, Artificial Sequence
  Synthetic
acagcuaugcagugucaag

SEQ ID NO: 563517 - RNA, 20 nt, Artificial Sequence
  Synthetic
aacagcuaugcagugucaag

SEQ ID NO: 563518 - RNA, 21 nt, Artificial Sequence
  Synthetic
caacagcuaugcagugucaag

SEQ ID NO: 563519 - RNA, 22 nt, Artificial Sequence
  Synthetic
ccaacagcuaugcagugucaag

SEQ ID NO: 563520 - RNA, 23 nt, Artificial Sequence
  Synthetic
gccaacagcuaugcagugucaag

SEQ ID NO: 563521 - RNA, 24 nt, Artificial Sequence
  Synthetic
cgccaacagcuaugcagugucaag

SEQ ID NO: 563522 - RNA, 18 nt, Artificial Sequence
  Synthetic
caaaagaagaaauucaag

SEQ ID NO: 563523 - RNA, 19 nt, Artificial Sequence
  Synthetic
ucaaaagaagaaauucaag

SEQ ID NO: 563524 - RNA, 20 nt, Artificial Sequence
  Synthetic
gucaaaagaagaaauucaag

SEQ ID NO: 563525 - RNA, 21 nt, Artificial Sequence
  Synthetic
ggucaaaagaagaaauucaag

SEQ ID NO: 563526 - RNA, 22 nt, Artificial Sequence
  Synthetic
gggucaaaagaagaaauucaag

SEQ ID NO: 563527 - RNA, 23 nt, Artificial Sequence
  Synthetic
ugggucaaaagaagaaauucaag

SEQ ID NO: 563528 - RNA, 24 nt, Artificial Sequence
  Synthetic
uugggucaaaagaagaaauucaag

SEQ ID NO: 563529 - RNA, 18 nt, Artificial Sequence
  Synthetic
uggagauuacaauucaag

SEQ ID NO: 563530 - RNA, 19 nt, Artificial Sequence
  Synthetic
uuggagauuacaauucaag

SEQ ID NO: 563531 - RNA, 20 nt, Artificial Sequence
  Synthetic
uuuggagauuacaauucaag

SEQ ID NO: 563532 - RNA, 21 nt, Artificial Sequence
  Synthetic
uuuuggagauuacaauucaag

SEQ ID NO: 563533 - RNA, 22 nt, Artificial Sequence
  Synthetic
auuuuggagauuacaauucaag

SEQ ID NO: 563534 - RNA, 23 nt, Artificial Sequence
  Synthetic
gauuuuggagauuacaauucaag

SEQ ID NO: 563535 - RNA, 24 nt, Artificial Sequence
  Synthetic
ggauuuuggagauuacaauucaag

SEQ ID NO: 563536 - RNA, 18 nt, Artificial Sequence
  Synthetic
cagggauuacaauucaag

SEQ ID NO: 563537 - RNA, 19 nt, Artificial Sequence
  Synthetic
acagggauuacaauucaag

SEQ ID NO: 563538 - RNA, 20 nt, Artificial Sequence
  Synthetic
uacagggauuacaauucaag

SEQ ID NO: 563539 - RNA, 21 nt, Artificial Sequence
  Synthetic
uuacagggauuacaauucaag

SEQ ID NO: 563540 - RNA, 22 nt, Artificial Sequence
  Synthetic
auuacagggauuacaauucaag

SEQ ID NO: 563541 - RNA, 23 nt, Artificial Sequence
  Synthetic
aauuacagggauuacaauucaag

SEQ ID NO: 563542 - RNA, 24 nt, Artificial Sequence
  Synthetic
gaauuacagggauuacaauucaag

SEQ ID NO: 563543 - RNA, 18 nt, Artificial Sequence
  Synthetic
augggaguagaauucaag

SEQ ID NO: 563544 - RNA, 19 nt, Artificial Sequence
  Synthetic
uaugggaguagaauucaag

SEQ ID NO: 563545 - RNA, 20 nt, Artificial Sequence
  Synthetic
uuaugggaguagaauucaag

SEQ ID NO: 563546 - RNA, 21 nt, Artificial Sequence
  Synthetic
auuaugggaguagaauucaag

SEQ ID NO: 563547 - RNA, 22 nt, Artificial Sequence
  Synthetic
aauuaugggaguagaauucaag

SEQ ID NO: 563548 - RNA, 23 nt, Artificial Sequence
  Synthetic
gaauuaugggaguagaauucaag

SEQ ID NO: 563549 - RNA, 24 nt, Artificial Sequence
  Synthetic
ggaauuaugggaguagaauucaag

SEQ ID NO: 563550 - RNA, 18 nt, Artificial Sequence
  Synthetic
ggauuaccauaauucaag

SEQ ID NO: 563551 - RNA, 19 nt, Artificial Sequence
  Synthetic
gggauuaccauaauucaag

SEQ ID NO: 563552 - RNA, 20 nt, Artificial Sequence
  Synthetic
ggggauuaccauaauucaag

SEQ ID NO: 563553 - RNA, 21 nt, Artificial Sequence
  Synthetic
uggggauuaccauaauucaag

SEQ ID NO: 563554 - RNA, 22 nt, Artificial Sequence
  Synthetic
guggggauuaccauaauucaag

SEQ ID NO: 563555 - RNA, 23 nt, Artificial Sequence
  Synthetic
uguggggauuaccauaauucaag

SEQ ID NO: 563556 - RNA, 24 nt, Artificial Sequence
  Synthetic
auguggggauuaccauaauucaag

SEQ ID NO: 563557 - RNA, 21 nt, Artificial Sequence
  Synthetic
gaugugaaggaccucuucaag

SEQ ID NO: 563558 - RNA, 22 nt, Artificial Sequence
  Synthetic
cgaugugaaggaccucuucaag

SEQ ID NO: 563559 - RNA, 23 nt, Artificial Sequence
  Synthetic
gcgaugugaaggaccucuucaag

SEQ ID NO: 563560 - RNA, 24 nt, Artificial Sequence
  Synthetic
agcgaugugaaggaccucuucaag

SEQ ID NO: 563561 - RNA, 22 nt, Artificial Sequence
  Synthetic
ggaugugaaggaccucuucaag

SEQ ID NO: 563562 - RNA, 23 nt, Artificial Sequence
  Synthetic
gggaugugaaggaccucuucaag

SEQ ID NO: 563563 - RNA, 24 nt, Artificial Sequence
  Synthetic
agggaugugaaggaccucuucaag

SEQ ID NO: 563564 - RNA, 18 nt, Artificial Sequence
  Synthetic
gugaagggccucuucaag

SEQ ID NO: 563565 - RNA, 19 nt, Artificial Sequence
  Synthetic
ugugaagggccucuucaag

SEQ ID NO: 563566 - RNA, 20 nt, Artificial Sequence
  Synthetic
augugaagggccucuucaag

SEQ ID NO: 563567 - RNA, 21 nt, Artificial Sequence
  Synthetic
gaugugaagggccucuucaag

SEQ ID NO: 563568 - RNA, 22 nt, Artificial Sequence
  Synthetic
ggaugugaagggccucuucaag

SEQ ID NO: 563569 - RNA, 23 nt, Artificial Sequence
  Synthetic
gggaugugaagggccucuucaag

SEQ ID NO: 563570 - RNA, 24 nt, Artificial Sequence
  Synthetic
agggaugugaagggccucuucaag

SEQ ID NO: 563571 - RNA, 18 nt, Artificial Sequence
  Synthetic
auguuuucugucuucaag

SEQ ID NO: 563572 - RNA, 19 nt, Artificial Sequence
  Synthetic
uauguuuucugucuucaag

SEQ ID NO: 563573 - RNA, 20 nt, Artificial Sequence
  Synthetic
uuauguuuucugucuucaag

SEQ ID NO: 563574 - RNA, 21 nt, Artificial Sequence
  Synthetic
guuauguuuucugucuucaag

SEQ ID NO: 563575 - RNA, 22 nt, Artificial Sequence
  Synthetic
gguuauguuuucugucuucaag

SEQ ID NO: 563576 - RNA, 23 nt, Artificial Sequence
  Synthetic
ugguuauguuuucugucuucaag

SEQ ID NO: 563577 - RNA, 24 nt, Artificial Sequence
  Synthetic
augguuauguuuucugucuucaag

SEQ ID NO: 563578 - RNA, 18 nt, Artificial Sequence
  Synthetic
ugaaaguuguucuucaag

SEQ ID NO: 563579 - RNA, 19 nt, Artificial Sequence
  Synthetic
uugaaaguuguucuucaag

SEQ ID NO: 563580 - RNA, 20 nt, Artificial Sequence
  Synthetic
uuugaaaguuguucuucaag

SEQ ID NO: 563581 - RNA, 21 nt, Artificial Sequence
  Synthetic
guuugaaaguuguucuucaag

SEQ ID NO: 563582 - RNA, 22 nt, Artificial Sequence
  Synthetic
uguuugaaaguuguucuucaag

SEQ ID NO: 563583 - RNA, 23 nt, Artificial Sequence
  Synthetic
uuguuugaaaguuguucuucaag

SEQ ID NO: 563584 - RNA, 24 nt, Artificial Sequence
  Synthetic
uuuguuugaaaguuguucuucaag

SEQ ID NO: 563585 - RNA, 18 nt, Artificial Sequence
  Synthetic
guuaaugcacuguucaag

SEQ ID NO: 563586 - RNA, 19 nt, Artificial Sequence
  Synthetic
gguuaaugcacuguucaag

SEQ ID NO: 563587 - RNA, 20 nt, Artificial Sequence
  Synthetic
ugguuaaugcacuguucaag

SEQ ID NO: 563588 - RNA, 21 nt, Artificial Sequence
  Synthetic
cugguuaaugcacuguucaag

SEQ ID NO: 563589 - RNA, 22 nt, Artificial Sequence
  Synthetic
ucugguuaaugcacuguucaag

SEQ ID NO: 563590 - RNA, 23 nt, Artificial Sequence
  Synthetic
uucugguuaaugcacuguucaag

SEQ ID NO: 563591 - RNA, 24 nt, Artificial Sequence
  Synthetic
uuucugguuaaugcacuguucaag

SEQ ID NO: 563592 - RNA, 18 nt, Artificial Sequence
  Synthetic
accacacaaaauuucaag

SEQ ID NO: 563593 - RNA, 19 nt, Artificial Sequence
  Synthetic
gaccacacaaaauuucaag

SEQ ID NO: 563594 - RNA, 20 nt, Artificial Sequence
  Synthetic
agaccacacaaaauuucaag

SEQ ID NO: 563595 - RNA, 21 nt, Artificial Sequence
  Synthetic
aagaccacacaaaauuucaag

SEQ ID NO: 563596 - RNA, 22 nt, Artificial Sequence
  Synthetic
uaagaccacacaaaauuucaag

SEQ ID NO: 563597 - RNA, 23 nt, Artificial Sequence
  Synthetic
guaagaccacacaaaauuucaag

SEQ ID NO: 563598 - RNA, 24 nt, Artificial Sequence
  Synthetic
uguaagaccacacaaaauuucaag

SEQ ID NO: 563599 - RNA, 18 nt, Artificial Sequence
  Synthetic
gaguguagaaauuucaag

SEQ ID NO: 563600 - RNA, 19 nt, Artificial Sequence
  Synthetic
ggaguguagaaauuucaag

SEQ ID NO: 563601 - RNA, 20 nt, Artificial Sequence
  Synthetic
aggaguguagaaauuucaag

SEQ ID NO: 563602 - RNA, 21 nt, Artificial Sequence
  Synthetic
gaggaguguagaaauuucaag

SEQ ID NO: 563603 - RNA, 22 nt, Artificial Sequence
  Synthetic
ugaggaguguagaaauuucaag

SEQ ID NO: 563604 - RNA, 23 nt, Artificial Sequence
  Synthetic
augaggaguguagaaauuucaag

SEQ ID NO: 563605 - RNA, 24 nt, Artificial Sequence
  Synthetic
aaugaggaguguagaaauuucaag

SEQ ID NO: 563606 - RNA, 18 nt, Artificial Sequence
  Synthetic
gugcuccucaauuucaag

SEQ ID NO: 563607 - RNA, 19 nt, Artificial Sequence
  Synthetic
cgugcuccucaauuucaag

SEQ ID NO: 563608 - RNA, 20 nt, Artificial Sequence
  Synthetic
acgugcuccucaauuucaag

SEQ ID NO: 563609 - RNA, 21 nt, Artificial Sequence
  Synthetic
cacgugcuccucaauuucaag

SEQ ID NO: 563610 - RNA, 22 nt, Artificial Sequence
  Synthetic
ucacgugcuccucaauuucaag

SEQ ID NO: 563611 - RNA, 23 nt, Artificial Sequence
  Synthetic
aucacgugcuccucaauuucaag

SEQ ID NO: 563612 - RNA, 24 nt, Artificial Sequence
  Synthetic
aaucacgugcuccucaauuucaag

SEQ ID NO: 563613 - RNA, 18 nt, Artificial Sequence
  Synthetic
cuaauggagacuuucaag

SEQ ID NO: 563614 - RNA, 19 nt, Artificial Sequence
  Synthetic
gcuaauggagacuuucaag

SEQ ID NO: 563615 - RNA, 20 nt, Artificial Sequence
  Synthetic
ugcuaauggagacuuucaag

SEQ ID NO: 563616 - RNA, 21 nt, Artificial Sequence
  Synthetic
uugcuaauggagacuuucaag

SEQ ID NO: 563617 - RNA, 22 nt, Artificial Sequence
  Synthetic
auugcuaauggagacuuucaag

SEQ ID NO: 563618 - RNA, 23 nt, Artificial Sequence
  Synthetic
aauugcuaauggagacuuucaag

SEQ ID NO: 563619 - RNA, 24 nt, Artificial Sequence
  Synthetic
gaauugcuaauggagacuuucaag

SEQ ID NO: 563620 - RNA, 18 nt, Artificial Sequence
  Synthetic
agaaguuauuguuucaag

SEQ ID NO: 563621 - RNA, 19 nt, Artificial Sequence
  Synthetic
cagaaguuauuguuucaag

SEQ ID NO: 563622 - RNA, 20 nt, Artificial Sequence
  Synthetic
acagaaguuauuguuucaag

SEQ ID NO: 563623 - RNA, 21 nt, Artificial Sequence
  Synthetic
aacagaaguuauuguuucaag

SEQ ID NO: 563624 - RNA, 22 nt, Artificial Sequence
  Synthetic
caacagaaguuauuguuucaag

SEQ ID NO: 563625 - RNA, 23 nt, Artificial Sequence
  Synthetic
ucaacagaaguuauuguuucaag

SEQ ID NO: 563626 - RNA, 24 nt, Artificial Sequence
  Synthetic
uucaacagaaguuauuguuucaag

SEQ ID NO: 563627 - RNA, 18 nt, Artificial Sequence
  Synthetic
cacugcuuuauuuucaag

SEQ ID NO: 563628 - RNA, 19 nt, Artificial Sequence
  Synthetic
ccacugcuuuauuuucaag

SEQ ID NO: 563629 - RNA, 20 nt, Artificial Sequence
  Synthetic
cccacugcuuuauuuucaag

SEQ ID NO: 563630 - RNA, 21 nt, Artificial Sequence
  Synthetic
gcccacugcuuuauuuucaag

SEQ ID NO: 563631 - RNA, 22 nt, Artificial Sequence
  Synthetic
agcccacugcuuuauuuucaag

SEQ ID NO: 563632 - RNA, 23 nt, Artificial Sequence
  Synthetic
cagcccacugcuuuauuuucaag

SEQ ID NO: 563633 - RNA, 24 nt, Artificial Sequence
  Synthetic
ccagcccacugcuuuauuuucaag

SEQ ID NO: 563634 - RNA, 18 nt, Artificial Sequence
  Synthetic
uuuggacuuguuuucaag

SEQ ID NO: 563635 - RNA, 19 nt, Artificial Sequence
  Synthetic
uuuuggacuuguuuucaag

SEQ ID NO: 563636 - RNA, 20 nt, Artificial Sequence
  Synthetic
guuuuggacuuguuuucaag

SEQ ID NO: 563637 - RNA, 21 nt, Artificial Sequence
  Synthetic
uguuuuggacuuguuuucaag

SEQ ID NO: 563638 - RNA, 22 nt, Artificial Sequence
  Synthetic
uuguuuuggacuuguuuucaag

SEQ ID NO: 563639 - RNA, 23 nt, Artificial Sequence
  Synthetic
uuuguuuuggacuuguuuucaag

SEQ ID NO: 563640 - RNA, 24 nt, Artificial Sequence
  Synthetic
guuuguuuuggacuuguuuucaag

SEQ ID NO: 563641 - RNA, 18 nt, Artificial Sequence
  Synthetic
uaacuuaaauuuuucaag

SEQ ID NO: 563642 - RNA, 19 nt, Artificial Sequence
  Synthetic
guaacuuaaauuuuucaag

SEQ ID NO: 563643 - RNA, 20 nt, Artificial Sequence
  Synthetic
aguaacuuaaauuuuucaag

SEQ ID NO: 563644 - RNA, 21 nt, Artificial Sequence
  Synthetic
uaguaacuuaaauuuuucaag

SEQ ID NO: 563645 - RNA, 22 nt, Artificial Sequence
  Synthetic
auaguaacuuaaauuuuucaag

SEQ ID NO: 563646 - RNA, 23 nt, Artificial Sequence
  Synthetic
aauaguaacuuaaauuuuucaag

SEQ ID NO: 563647 - RNA, 24 nt, Artificial Sequence
  Synthetic
uaauaguaacuuaaauuuuucaag

SEQ ID NO: 563648 - RNA, 18 nt, Artificial Sequence
  Synthetic
aacaaaaaaaaaaagaag

SEQ ID NO: 563649 - RNA, 19 nt, Artificial Sequence
  Synthetic
aaacaaaaaaaaaaagaag

SEQ ID NO: 563650 - RNA, 20 nt, Artificial Sequence
  Synthetic
aaaacaaaaaaaaaaagaag

SEQ ID NO: 563651 - RNA, 21 nt, Artificial Sequence
  Synthetic
caaaacaaaaaaaaaaagaag

SEQ ID NO: 563652 - RNA, 22 nt, Artificial Sequence
  Synthetic
acaaaacaaaaaaaaaaagaag

SEQ ID NO: 563653 - RNA, 23 nt, Artificial Sequence
  Synthetic
aacaaaacaaaaaaaaaaagaag

SEQ ID NO: 563654 - RNA, 24 nt, Artificial Sequence
  Synthetic
aaacaaaacaaaaaaaaaaagaag

SEQ ID NO: 563655 - RNA, 18 nt, Artificial Sequence
  Synthetic
uggaauacaaaaaagaag

SEQ ID NO: 563656 - RNA, 19 nt, Artificial Sequence
  Synthetic
uuggaauacaaaaaagaag

SEQ ID NO: 563657 - RNA, 20 nt, Artificial Sequence
  Synthetic
uuuggaauacaaaaaagaag

SEQ ID NO: 563658 - RNA, 21 nt, Artificial Sequence
  Synthetic
cuuuggaauacaaaaaagaag

SEQ ID NO: 563659 - RNA, 22 nt, Artificial Sequence
  Synthetic
acuuuggaauacaaaaaagaag

SEQ ID NO: 563660 - RNA, 23 nt, Artificial Sequence
  Synthetic
aacuuuggaauacaaaaaagaag

SEQ ID NO: 563661 - RNA, 24 nt, Artificial Sequence
  Synthetic
aaacuuuggaauacaaaaaagaag

SEQ ID NO: 563662 - RNA, 18 nt, Artificial Sequence
  Synthetic
ucuggacgacaaaagaag

SEQ ID NO: 563663 - RNA, 19 nt, Artificial Sequence
  Synthetic
cucuggacgacaaaagaag

SEQ ID NO: 563664 - RNA, 20 nt, Artificial Sequence
  Synthetic
gcucuggacgacaaaagaag

SEQ ID NO: 563665 - RNA, 21 nt, Artificial Sequence
  Synthetic
agcucuggacgacaaaagaag

SEQ ID NO: 563666 - RNA, 22 nt, Artificial Sequence
  Synthetic
uagcucuggacgacaaaagaag

SEQ ID NO: 563667 - RNA, 23 nt, Artificial Sequence
  Synthetic
cuagcucuggacgacaaaagaag

SEQ ID NO: 563668 - RNA, 24 nt, Artificial Sequence
  Synthetic
gcuagcucuggacgacaaaagaag

SEQ ID NO: 563669 - RNA, 18 nt, Artificial Sequence
  Synthetic
agggugaugccaaagaag

SEQ ID NO: 563670 - RNA, 19 nt, Artificial Sequence
  Synthetic
uagggugaugccaaagaag

SEQ ID NO: 563671 - RNA, 20 nt, Artificial Sequence
  Synthetic
auagggugaugccaaagaag

SEQ ID NO: 563672 - RNA, 21 nt, Artificial Sequence
  Synthetic
cauagggugaugccaaagaag

SEQ ID NO: 563673 - RNA, 22 nt, Artificial Sequence
  Synthetic
ccauagggugaugccaaagaag

SEQ ID NO: 563674 - RNA, 23 nt, Artificial Sequence
  Synthetic
uccauagggugaugccaaagaag

SEQ ID NO: 563675 - RNA, 24 nt, Artificial Sequence
  Synthetic
auccauagggugaugccaaagaag

SEQ ID NO: 563676 - RNA, 18 nt, Artificial Sequence
  Synthetic
ugccuacacagaaagaag

SEQ ID NO: 563677 - RNA, 19 nt, Artificial Sequence
  Synthetic
augccuacacagaaagaag

SEQ ID NO: 563678 - RNA, 20 nt, Artificial Sequence
  Synthetic
gaugccuacacagaaagaag

SEQ ID NO: 563679 - RNA, 21 nt, Artificial Sequence
  Synthetic
ggaugccuacacagaaagaag

SEQ ID NO: 563680 - RNA, 22 nt, Artificial Sequence
  Synthetic
gggaugccuacacagaaagaag

SEQ ID NO: 563681 - RNA, 23 nt, Artificial Sequence
  Synthetic
ugggaugccuacacagaaagaag

SEQ ID NO: 563682 - RNA, 24 nt, Artificial Sequence
  Synthetic
cugggaugccuacacagaaagaag

SEQ ID NO: 563683 - RNA, 18 nt, Artificial Sequence
  Synthetic
ugccuggauauaaagaag

SEQ ID NO: 563684 - RNA, 19 nt, Artificial Sequence
  Synthetic
augccuggauauaaagaag

SEQ ID NO: 563685 - RNA, 20 nt, Artificial Sequence
  Synthetic
uaugccuggauauaaagaag

SEQ ID NO: 563686 - RNA, 21 nt, Artificial Sequence
  Synthetic
auaugccuggauauaaagaag

SEQ ID NO: 563687 - RNA, 22 nt, Artificial Sequence
  Synthetic
uauaugccuggauauaaagaag

SEQ ID NO: 563688 - RNA, 23 nt, Artificial Sequence
  Synthetic
uuauaugccuggauauaaagaag

SEQ ID NO: 563689 - RNA, 24 nt, Artificial Sequence
  Synthetic
uuuauaugccuggauauaaagaag

SEQ ID NO: 563690 - RNA, 18 nt, Artificial Sequence
  Synthetic
gagcuguggguaaagaag

SEQ ID NO: 563691 - RNA, 19 nt, Artificial Sequence
  Synthetic
ugagcuguggguaaagaag

SEQ ID NO: 563692 - RNA, 20 nt, Artificial Sequence
  Synthetic
gugagcuguggguaaagaag

SEQ ID NO: 563693 - RNA, 21 nt, Artificial Sequence
  Synthetic
agugagcuguggguaaagaag

SEQ ID NO: 563694 - RNA, 22 nt, Artificial Sequence
  Synthetic
aagugagcuguggguaaagaag

SEQ ID NO: 563695 - RNA, 23 nt, Artificial Sequence
  Synthetic
aaagugagcuguggguaaagaag

SEQ ID NO: 563696 - RNA, 24 nt, Artificial Sequence
  Synthetic
aaaagugagcuguggguaaagaag

SEQ ID NO: 563697 - RNA, 18 nt, Artificial Sequence
  Synthetic
aaauggauuguaaagaag

SEQ ID NO: 563698 - RNA, 19 nt, Artificial Sequence
  Synthetic
aaaauggauuguaaagaag

SEQ ID NO: 563699 - RNA, 20 nt, Artificial Sequence
  Synthetic
caaaauggauuguaaagaag

SEQ ID NO: 563700 - RNA, 21 nt, Artificial Sequence
  Synthetic
ucaaaauggauuguaaagaag

SEQ ID NO: 563701 - RNA, 22 nt, Artificial Sequence
  Synthetic
uucaaaauggauuguaaagaag

SEQ ID NO: 563702 - RNA, 23 nt, Artificial Sequence
  Synthetic
guucaaaauggauuguaaagaag

SEQ ID NO: 563703 - RNA, 24 nt, Artificial Sequence
  Synthetic
aguucaaaauggauuguaaagaag

SEQ ID NO: 563704 - RNA, 18 nt, Artificial Sequence
  Synthetic
uuggcaaguuuaaagaag

SEQ ID NO: 563705 - RNA, 19 nt, Artificial Sequence
  Synthetic
cuuggcaaguuuaaagaag

SEQ ID NO: 563706 - RNA, 20 nt, Artificial Sequence
  Synthetic
ucuuggcaaguuuaaagaag

SEQ ID NO: 563707 - RNA, 21 nt, Artificial Sequence
  Synthetic
aucuuggcaaguuuaaagaag

SEQ ID NO: 563708 - RNA, 22 nt, Artificial Sequence
  Synthetic
caucuuggcaaguuuaaagaag

SEQ ID NO: 563709 - RNA, 23 nt, Artificial Sequence
  Synthetic
acaucuuggcaaguuuaaagaag

SEQ ID NO: 563710 - RNA, 24 nt, Artificial Sequence
  Synthetic
gacaucuuggcaaguuuaaagaag

SEQ ID NO: 563711 - RNA, 18 nt, Artificial Sequence
  Synthetic
aacuuaagagccaagaag

SEQ ID NO: 563712 - RNA, 19 nt, Artificial Sequence
  Synthetic
aaacuuaagagccaagaag

SEQ ID NO: 563713 - RNA, 20 nt, Artificial Sequence
  Synthetic
gaaacuuaagagccaagaag

SEQ ID NO: 563714 - RNA, 21 nt, Artificial Sequence
  Synthetic
agaaacuuaagagccaagaag

SEQ ID NO: 563715 - RNA, 22 nt, Artificial Sequence
  Synthetic
uagaaacuuaagagccaagaag

SEQ ID NO: 563716 - RNA, 23 nt, Artificial Sequence
  Synthetic
auagaaacuuaagagccaagaag

SEQ ID NO: 563717 - RNA, 24 nt, Artificial Sequence
  Synthetic
gauagaaacuuaagagccaagaag

SEQ ID NO: 563718 - RNA, 18 nt, Artificial Sequence
  Synthetic
agagaacauuccaagaag

SEQ ID NO: 563719 - RNA, 19 nt, Artificial Sequence
  Synthetic
uagagaacauuccaagaag

SEQ ID NO: 563720 - RNA, 20 nt, Artificial Sequence
  Synthetic
cuagagaacauuccaagaag

SEQ ID NO: 563721 - RNA, 21 nt, Artificial Sequence
  Synthetic
gcuagagaacauuccaagaag

SEQ ID NO: 563722 - RNA, 22 nt, Artificial Sequence
  Synthetic
ugcuagagaacauuccaagaag

SEQ ID NO: 563723 - RNA, 23 nt, Artificial Sequence
  Synthetic
augcuagagaacauuccaagaag

SEQ ID NO: 563724 - RNA, 24 nt, Artificial Sequence
  Synthetic
uaugcuagagaacauuccaagaag

SEQ ID NO: 563725 - RNA, 18 nt, Artificial Sequence
  Synthetic
uaaaauauagucaagaag

SEQ ID NO: 563726 - RNA, 19 nt, Artificial Sequence
  Synthetic
uuaaaauauagucaagaag

SEQ ID NO: 563727 - RNA, 20 nt, Artificial Sequence
  Synthetic
guuaaaauauagucaagaag

SEQ ID NO: 563728 - RNA, 21 nt, Artificial Sequence
  Synthetic
uguuaaaauauagucaagaag

SEQ ID NO: 563729 - RNA, 22 nt, Artificial Sequence
  Synthetic
auguuaaaauauagucaagaag

SEQ ID NO: 563730 - RNA, 23 nt, Artificial Sequence
  Synthetic
aauguuaaaauauagucaagaag

SEQ ID NO: 563731 - RNA, 24 nt, Artificial Sequence
  Synthetic
caauguuaaaauauagucaagaag

SEQ ID NO: 563732 - RNA, 18 nt, Artificial Sequence
  Synthetic
ugggaguggaagaagaag

SEQ ID NO: 563733 - RNA, 19 nt, Artificial Sequence
  Synthetic
augggaguggaagaagaag

SEQ ID NO: 563734 - RNA, 20 nt, Artificial Sequence
  Synthetic
aaugggaguggaagaagaag

SEQ ID NO: 563735 - RNA, 21 nt, Artificial Sequence
  Synthetic
uaaugggaguggaagaagaag

SEQ ID NO: 563736 - RNA, 22 nt, Artificial Sequence
  Synthetic
uuaaugggaguggaagaagaag

SEQ ID NO: 563737 - RNA, 23 nt, Artificial Sequence
  Synthetic
guuaaugggaguggaagaagaag

SEQ ID NO: 563738 - RNA, 24 nt, Artificial Sequence
  Synthetic
gguuaaugggaguggaagaagaag

SEQ ID NO: 563739 - RNA, 18 nt, Artificial Sequence
  Synthetic
gcaaagacucagaagaag

SEQ ID NO: 563740 - RNA, 19 nt, Artificial Sequence
  Synthetic
agcaaagacucagaagaag

SEQ ID NO: 563741 - RNA, 20 nt, Artificial Sequence
  Synthetic
aagcaaagacucagaagaag

SEQ ID NO: 563742 - RNA, 21 nt, Artificial Sequence
  Synthetic
gaagcaaagacucagaagaag

SEQ ID NO: 563743 - RNA, 22 nt, Artificial Sequence
  Synthetic
ggaagcaaagacucagaagaag

SEQ ID NO: 563744 - RNA, 23 nt, Artificial Sequence
  Synthetic
uggaagcaaagacucagaagaag

SEQ ID NO: 563745 - RNA, 24 nt, Artificial Sequence
  Synthetic
guggaagcaaagacucagaagaag

SEQ ID NO: 563746 - RNA, 18 nt, Artificial Sequence
  Synthetic
ucuggcuuagagaagaag

SEQ ID NO: 563747 - RNA, 19 nt, Artificial Sequence
  Synthetic
uucuggcuuagagaagaag

SEQ ID NO: 563748 - RNA, 20 nt, Artificial Sequence
  Synthetic
uuucuggcuuagagaagaag

SEQ ID NO: 563749 - RNA, 21 nt, Artificial Sequence
  Synthetic
guuucuggcuuagagaagaag

SEQ ID NO: 563750 - RNA, 22 nt, Artificial Sequence
  Synthetic
gguuucuggcuuagagaagaag

SEQ ID NO: 563751 - RNA, 23 nt, Artificial Sequence
  Synthetic
ggguuucuggcuuagagaagaag

SEQ ID NO: 563752 - RNA, 24 nt, Artificial Sequence
  Synthetic
uggguuucuggcuuagagaagaag

SEQ ID NO: 563753 - RNA, 18 nt, Artificial Sequence
  Synthetic
acccaaggggagaagaag

SEQ ID NO: 563754 - RNA, 19 nt, Artificial Sequence
  Synthetic
uacccaaggggagaagaag

SEQ ID NO: 563755 - RNA, 20 nt, Artificial Sequence
  Synthetic
cuacccaaggggagaagaag

SEQ ID NO: 563756 - RNA, 21 nt, Artificial Sequence
  Synthetic
ccuacccaaggggagaagaag

SEQ ID NO: 563757 - RNA, 22 nt, Artificial Sequence
  Synthetic
uccuacccaaggggagaagaag

SEQ ID NO: 563758 - RNA, 23 nt, Artificial Sequence
  Synthetic
guccuacccaaggggagaagaag

SEQ ID NO: 563759 - RNA, 24 nt, Artificial Sequence
  Synthetic
uguccuacccaaggggagaagaag

SEQ ID NO: 563760 - RNA, 18 nt, Artificial Sequence
  Synthetic
ggcaggcagaggaagaag

SEQ ID NO: 563761 - RNA, 19 nt, Artificial Sequence
  Synthetic
uggcaggcagaggaagaag

SEQ ID NO: 563762 - RNA, 20 nt, Artificial Sequence
  Synthetic
auggcaggcagaggaagaag

SEQ ID NO: 563763 - RNA, 21 nt, Artificial Sequence
  Synthetic
aauggcaggcagaggaagaag

SEQ ID NO: 563764 - RNA, 22 nt, Artificial Sequence
  Synthetic
gaauggcaggcagaggaagaag

SEQ ID NO: 563765 - RNA, 23 nt, Artificial Sequence
  Synthetic
ggaauggcaggcagaggaagaag

SEQ ID NO: 563766 - RNA, 24 nt, Artificial Sequence
  Synthetic
gggaauggcaggcagaggaagaag

SEQ ID NO: 563767 - RNA, 18 nt, Artificial Sequence
  Synthetic
agggaaguggggaagaag

SEQ ID NO: 563768 - RNA, 19 nt, Artificial Sequence
  Synthetic
aagggaaguggggaagaag

SEQ ID NO: 563769 - RNA, 20 nt, Artificial Sequence
  Synthetic
uaagggaaguggggaagaag

SEQ ID NO: 563770 - RNA, 21 nt, Artificial Sequence
  Synthetic
auaagggaaguggggaagaag

SEQ ID NO: 563771 - RNA, 22 nt, Artificial Sequence
  Synthetic
aauaagggaaguggggaagaag

SEQ ID NO: 563772 - RNA, 23 nt, Artificial Sequence
  Synthetic
gaauaagggaaguggggaagaag

SEQ ID NO: 563773 - RNA, 24 nt, Artificial Sequence
  Synthetic
ugaauaagggaaguggggaagaag

SEQ ID NO: 563774 - RNA, 18 nt, Artificial Sequence
  Synthetic
uaaugggaguggaagaag

SEQ ID NO: 563775 - RNA, 19 nt, Artificial Sequence
  Synthetic
uuaaugggaguggaagaag

SEQ ID NO: 563776 - RNA, 20 nt, Artificial Sequence
  Synthetic
guuaaugggaguggaagaag

SEQ ID NO: 563777 - RNA, 21 nt, Artificial Sequence
  Synthetic
gguuaaugggaguggaagaag

SEQ ID NO: 563778 - RNA, 22 nt, Artificial Sequence
  Synthetic
ggguuaaugggaguggaagaag

SEQ ID NO: 563779 - RNA, 23 nt, Artificial Sequence
  Synthetic
aggguuaaugggaguggaagaag

SEQ ID NO: 563780 - RNA, 24 nt, Artificial Sequence
  Synthetic
aaggguuaaugggaguggaagaag

SEQ ID NO: 563781 - RNA, 18 nt, Artificial Sequence
  Synthetic
guguguugggugaagaag

SEQ ID NO: 563782 - RNA, 19 nt, Artificial Sequence
  Synthetic
uguguguugggugaagaag

SEQ ID NO: 563783 - RNA, 20 nt, Artificial Sequence
  Synthetic
cuguguguugggugaagaag

SEQ ID NO: 563784 - RNA, 21 nt, Artificial Sequence
  Synthetic
acuguguguugggugaagaag

SEQ ID NO: 563785 - RNA, 22 nt, Artificial Sequence
  Synthetic
gacuguguguugggugaagaag

SEQ ID NO: 563786 - RNA, 23 nt, Artificial Sequence
  Synthetic
ugacuguguguugggugaagaag

SEQ ID NO: 563787 - RNA, 24 nt, Artificial Sequence
  Synthetic
gugacuguguguugggugaagaag

SEQ ID NO: 563788 - RNA, 18 nt, Artificial Sequence
  Synthetic
uacagagcugugaagaag

SEQ ID NO: 563789 - RNA, 19 nt, Artificial Sequence
  Synthetic
uuacagagcugugaagaag

SEQ ID NO: 563790 - RNA, 20 nt, Artificial Sequence
  Synthetic
cuuacagagcugugaagaag

SEQ ID NO: 563791 - RNA, 21 nt, Artificial Sequence
  Synthetic
ucuuacagagcugugaagaag

SEQ ID NO: 563792 - RNA, 22 nt, Artificial Sequence
  Synthetic
uucuuacagagcugugaagaag

SEQ ID NO: 563793 - RNA, 23 nt, Artificial Sequence
  Synthetic
cuucuuacagagcugugaagaag

SEQ ID NO: 563794 - RNA, 24 nt, Artificial Sequence
  Synthetic
ccuucuuacagagcugugaagaag

SEQ ID NO: 563795 - RNA, 18 nt, Artificial Sequence
  Synthetic
ggcauggagaauaagaag

SEQ ID NO: 563796 - RNA, 19 nt, Artificial Sequence
  Synthetic
aggcauggagaauaagaag

SEQ ID NO: 563797 - RNA, 20 nt, Artificial Sequence
  Synthetic
gaggcauggagaauaagaag

SEQ ID NO: 563798 - RNA, 21 nt, Artificial Sequence
  Synthetic
ugaggcauggagaauaagaag

SEQ ID NO: 563799 - RNA, 22 nt, Artificial Sequence
  Synthetic
augaggcauggagaauaagaag

SEQ ID NO: 563800 - RNA, 23 nt, Artificial Sequence
  Synthetic
gaugaggcauggagaauaagaag

SEQ ID NO: 563801 - RNA, 24 nt, Artificial Sequence
  Synthetic
agaugaggcauggagaauaagaag

SEQ ID NO: 563802 - RNA, 18 nt, Artificial Sequence
  Synthetic
aagaauuuagauaagaag

SEQ ID NO: 563803 - RNA, 19 nt, Artificial Sequence
  Synthetic
caagaauuuagauaagaag

SEQ ID NO: 563804 - RNA, 20 nt, Artificial Sequence
  Synthetic
ucaagaauuuagauaagaag

SEQ ID NO: 563805 - RNA, 21 nt, Artificial Sequence
  Synthetic
cucaagaauuuagauaagaag

SEQ ID NO: 563806 - RNA, 22 nt, Artificial Sequence
  Synthetic
ccucaagaauuuagauaagaag

SEQ ID NO: 563807 - RNA, 23 nt, Artificial Sequence
  Synthetic
cccucaagaauuuagauaagaag

SEQ ID NO: 563808 - RNA, 24 nt, Artificial Sequence
  Synthetic
acccucaagaauuuagauaagaag

SEQ ID NO: 563809 - RNA, 18 nt, Artificial Sequence
  Synthetic
gauuuuuaaaguaagaag

SEQ ID NO: 563810 - RNA, 19 nt, Artificial Sequence
  Synthetic
ggauuuuuaaaguaagaag

SEQ ID NO: 563811 - RNA, 20 nt, Artificial Sequence
  Synthetic
gggauuuuuaaaguaagaag

SEQ ID NO: 563812 - RNA, 21 nt, Artificial Sequence
  Synthetic
ugggauuuuuaaaguaagaag

SEQ ID NO: 563813 - RNA, 22 nt, Artificial Sequence
  Synthetic
uugggauuuuuaaaguaagaag

SEQ ID NO: 563814 - RNA, 23 nt, Artificial Sequence
  Synthetic
auugggauuuuuaaaguaagaag

SEQ ID NO: 563815 - RNA, 24 nt, Artificial Sequence
  Synthetic
aauugggauuuuuaaaguaagaag

SEQ ID NO: 563816 - RNA, 18 nt, Artificial Sequence
  Synthetic
caaaugggaaguaagaag

SEQ ID NO: 563817 - RNA, 19 nt, Artificial Sequence
  Synthetic
gcaaaugggaaguaagaag

SEQ ID NO: 563818 - RNA, 20 nt, Artificial Sequence
  Synthetic
agcaaaugggaaguaagaag

SEQ ID NO: 563819 - RNA, 21 nt, Artificial Sequence
  Synthetic
uagcaaaugggaaguaagaag

SEQ ID NO: 563820 - RNA, 22 nt, Artificial Sequence
  Synthetic
uuagcaaaugggaaguaagaag

SEQ ID NO: 563821 - RNA, 23 nt, Artificial Sequence
  Synthetic
guuagcaaaugggaaguaagaag

SEQ ID NO: 563822 - RNA, 24 nt, Artificial Sequence
  Synthetic
gguuagcaaaugggaaguaagaag

SEQ ID NO: 563823 - RNA, 18 nt, Artificial Sequence
  Synthetic
augaacaacaguaagaag

SEQ ID NO: 563824 - RNA, 19 nt, Artificial Sequence
  Synthetic
aaugaacaacaguaagaag

SEQ ID NO: 563825 - RNA, 20 nt, Artificial Sequence
  Synthetic
caaugaacaacaguaagaag

SEQ ID NO: 563826 - RNA, 21 nt, Artificial Sequence
  Synthetic
gcaaugaacaacaguaagaag

SEQ ID NO: 563827 - RNA, 22 nt, Artificial Sequence
  Synthetic
agcaaugaacaacaguaagaag

SEQ ID NO: 563828 - RNA, 23 nt, Artificial Sequence
  Synthetic
cagcaaugaacaacaguaagaag

SEQ ID NO: 563829 - RNA, 24 nt, Artificial Sequence
  Synthetic
ccagcaaugaacaacaguaagaag

SEQ ID NO: 563830 - RNA, 18 nt, Artificial Sequence
  Synthetic
aaugagauguguaagaag

SEQ ID NO: 563831 - RNA, 19 nt, Artificial Sequence
  Synthetic
aaaugagauguguaagaag

SEQ ID NO: 563832 - RNA, 20 nt, Artificial Sequence
  Synthetic
gaaaugagauguguaagaag

SEQ ID NO: 563833 - RNA, 21 nt, Artificial Sequence
  Synthetic
agaaaugagauguguaagaag

SEQ ID NO: 563834 - RNA, 22 nt, Artificial Sequence
  Synthetic
gagaaaugagauguguaagaag

SEQ ID NO: 563835 - RNA, 23 nt, Artificial Sequence
  Synthetic
ggagaaaugagauguguaagaag

SEQ ID NO: 563836 - RNA, 24 nt, Artificial Sequence
  Synthetic
uggagaaaugagauguguaagaag

SEQ ID NO: 563837 - RNA, 18 nt, Artificial Sequence
  Synthetic
acaacuuugauuaagaag

SEQ ID NO: 563838 - RNA, 19 nt, Artificial Sequence
  Synthetic
uacaacuuugauuaagaag

SEQ ID NO: 563839 - RNA, 20 nt, Artificial Sequence
  Synthetic
uuacaacuuugauuaagaag

SEQ ID NO: 563840 - RNA, 21 nt, Artificial Sequence
  Synthetic
uuuacaacuuugauuaagaag

SEQ ID NO: 563841 - RNA, 22 nt, Artificial Sequence
  Synthetic
auuuacaacuuugauuaagaag

SEQ ID NO: 563842 - RNA, 23 nt, Artificial Sequence
  Synthetic
uauuuacaacuuugauuaagaag

SEQ ID NO: 563843 - RNA, 24 nt, Artificial Sequence
  Synthetic
auauuuacaacuuugauuaagaag

SEQ ID NO: 563844 - RNA, 18 nt, Artificial Sequence
  Synthetic
ucccuaccauuuaagaag

SEQ ID NO: 563845 - RNA, 19 nt, Artificial Sequence
  Synthetic
cucccuaccauuuaagaag

SEQ ID NO: 563846 - RNA, 20 nt, Artificial Sequence
  Synthetic
ccucccuaccauuuaagaag

SEQ ID NO: 563847 - RNA, 21 nt, Artificial Sequence
  Synthetic
accucccuaccauuuaagaag

SEQ ID NO: 563848 - RNA, 22 nt, Artificial Sequence
  Synthetic
uaccucccuaccauuuaagaag

SEQ ID NO: 563849 - RNA, 23 nt, Artificial Sequence
  Synthetic
cuaccucccuaccauuuaagaag

SEQ ID NO: 563850 - RNA, 24 nt, Artificial Sequence
  Synthetic
ucuaccucccuaccauuuaagaag

SEQ ID NO: 563851 - RNA, 18 nt, Artificial Sequence
  Synthetic
ccauccuaaaaacagaag

SEQ ID NO: 563852 - RNA, 19 nt, Artificial Sequence
  Synthetic
gccauccuaaaaacagaag

SEQ ID NO: 563853 - RNA, 20 nt, Artificial Sequence
  Synthetic
ugccauccuaaaaacagaag

SEQ ID NO: 563854 - RNA, 21 nt, Artificial Sequence
  Synthetic
cugccauccuaaaaacagaag

SEQ ID NO: 563855 - RNA, 22 nt, Artificial Sequence
  Synthetic
ucugccauccuaaaaacagaag

SEQ ID NO: 563856 - RNA, 23 nt, Artificial Sequence
  Synthetic
cucugccauccuaaaaacagaag

SEQ ID NO: 563857 - RNA, 24 nt, Artificial Sequence
  Synthetic
ucucugccauccuaaaaacagaag

SEQ ID NO: 563858 - RNA, 18 nt, Artificial Sequence
  Synthetic
uucaagcaagaacagaag

SEQ ID NO: 563859 - RNA, 19 nt, Artificial Sequence
  Synthetic
uuucaagcaagaacagaag

SEQ ID NO: 563860 - RNA, 20 nt, Artificial Sequence
  Synthetic
auuucaagcaagaacagaag

SEQ ID NO: 563861 - RNA, 21 nt, Artificial Sequence
  Synthetic
aauuucaagcaagaacagaag

SEQ ID NO: 563862 - RNA, 22 nt, Artificial Sequence
  Synthetic
caauuucaagcaagaacagaag

SEQ ID NO: 563863 - RNA, 23 nt, Artificial Sequence
  Synthetic
ccaauuucaagcaagaacagaag

SEQ ID NO: 563864 - RNA, 24 nt, Artificial Sequence
  Synthetic
uccaauuucaagcaagaacagaag

SEQ ID NO: 563865 - RNA, 18 nt, Artificial Sequence
  Synthetic
ggggguuuugaacagaag

SEQ ID NO: 563866 - RNA, 19 nt, Artificial Sequence
  Synthetic
uggggguuuugaacagaag

SEQ ID NO: 563867 - RNA, 20 nt, Artificial Sequence
  Synthetic
uuggggguuuugaacagaag

SEQ ID NO: 563868 - RNA, 21 nt, Artificial Sequence
  Synthetic
auuggggguuuugaacagaag

SEQ ID NO: 563869 - RNA, 22 nt, Artificial Sequence
  Synthetic
cauuggggguuuugaacagaag

SEQ ID NO: 563870 - RNA, 23 nt, Artificial Sequence
  Synthetic
gcauuggggguuuugaacagaag

SEQ ID NO: 563871 - RNA, 24 nt, Artificial Sequence
  Synthetic
agcauuggggguuuugaacagaag

SEQ ID NO: 563872 - RNA, 18 nt, Artificial Sequence
  Synthetic
gcaggcaaggcacagaag

SEQ ID NO: 563873 - RNA, 19 nt, Artificial Sequence
  Synthetic
ugcaggcaaggcacagaag

SEQ ID NO: 563874 - RNA, 20 nt, Artificial Sequence
  Synthetic
cugcaggcaaggcacagaag

SEQ ID NO: 563875 - RNA, 21 nt, Artificial Sequence
  Synthetic
acugcaggcaaggcacagaag

SEQ ID NO: 563876 - RNA, 22 nt, Artificial Sequence
  Synthetic
uacugcaggcaaggcacagaag

SEQ ID NO: 563877 - RNA, 23 nt, Artificial Sequence
  Synthetic
cuacugcaggcaaggcacagaag

SEQ ID NO: 563878 - RNA, 24 nt, Artificial Sequence
  Synthetic
ucuacugcaggcaaggcacagaag

SEQ ID NO: 563879 - RNA, 18 nt, Artificial Sequence
  Synthetic
caugacacuucacagaag

SEQ ID NO: 563880 - RNA, 19 nt, Artificial Sequence
  Synthetic
ccaugacacuucacagaag

SEQ ID NO: 563881 - RNA, 20 nt, Artificial Sequence
  Synthetic
uccaugacacuucacagaag

SEQ ID NO: 563882 - RNA, 21 nt, Artificial Sequence
  Synthetic
cuccaugacacuucacagaag

SEQ ID NO: 563883 - RNA, 22 nt, Artificial Sequence
  Synthetic
ccuccaugacacuucacagaag

SEQ ID NO: 563884 - RNA, 23 nt, Artificial Sequence
  Synthetic
uccuccaugacacuucacagaag

SEQ ID NO: 563885 - RNA, 24 nt, Artificial Sequence
  Synthetic
auccuccaugacacuucacagaag

SEQ ID NO: 563886 - RNA, 18 nt, Artificial Sequence
  Synthetic
gauaagaggggacagaag

SEQ ID NO: 563887 - RNA, 19 nt, Artificial Sequence
  Synthetic
agauaagaggggacagaag

SEQ ID NO: 563888 - RNA, 20 nt, Artificial Sequence
  Synthetic
cagauaagaggggacagaag

SEQ ID NO: 563889 - RNA, 21 nt, Artificial Sequence
  Synthetic
ucagauaagaggggacagaag

SEQ ID NO: 563890 - RNA, 22 nt, Artificial Sequence
  Synthetic
gucagauaagaggggacagaag

SEQ ID NO: 563891 - RNA, 23 nt, Artificial Sequence
  Synthetic
ggucagauaagaggggacagaag

SEQ ID NO: 563892 - RNA, 24 nt, Artificial Sequence
  Synthetic
aggucagauaagaggggacagaag

SEQ ID NO: 563893 - RNA, 18 nt, Artificial Sequence
  Synthetic
uuacgaccuugacagaag

SEQ ID NO: 563894 - RNA, 19 nt, Artificial Sequence
  Synthetic
guuacgaccuugacagaag

SEQ ID NO: 563895 - RNA, 20 nt, Artificial Sequence
  Synthetic
uguuacgaccuugacagaag

SEQ ID NO: 563896 - RNA, 21 nt, Artificial Sequence
  Synthetic
auguuacgaccuugacagaag

SEQ ID NO: 563897 - RNA, 22 nt, Artificial Sequence
  Synthetic
uauguuacgaccuugacagaag

SEQ ID NO: 563898 - RNA, 23 nt, Artificial Sequence
  Synthetic
auauguuacgaccuugacagaag

SEQ ID NO: 563899 - RNA, 24 nt, Artificial Sequence
  Synthetic
uauauguuacgaccuugacagaag

SEQ ID NO: 563900 - RNA, 18 nt, Artificial Sequence
  Synthetic
uagacuaggcuacagaag

SEQ ID NO: 563901 - RNA, 19 nt, Artificial Sequence
  Synthetic
guagacuaggcuacagaag

SEQ ID NO: 563902 - RNA, 20 nt, Artificial Sequence
  Synthetic
gguagacuaggcuacagaag

SEQ ID NO: 563903 - RNA, 21 nt, Artificial Sequence
  Synthetic
ugguagacuaggcuacagaag

SEQ ID NO: 563904 - RNA, 22 nt, Artificial Sequence
  Synthetic
augguagacuaggcuacagaag

SEQ ID NO: 563905 - RNA, 23 nt, Artificial Sequence
  Synthetic
aaugguagacuaggcuacagaag

SEQ ID NO: 563906 - RNA, 24 nt, Artificial Sequence
  Synthetic
caaugguagacuaggcuacagaag

SEQ ID NO: 563907 - RNA, 18 nt, Artificial Sequence
  Synthetic
caggaagagaaccagaag

SEQ ID NO: 563908 - RNA, 19 nt, Artificial Sequence
  Synthetic
ccaggaagagaaccagaag

SEQ ID NO: 563909 - RNA, 20 nt, Artificial Sequence
  Synthetic
cccaggaagagaaccagaag

SEQ ID NO: 563910 - RNA, 21 nt, Artificial Sequence
  Synthetic
acccaggaagagaaccagaag

SEQ ID NO: 563911 - RNA, 22 nt, Artificial Sequence
  Synthetic
gacccaggaagagaaccagaag

SEQ ID NO: 563912 - RNA, 23 nt, Artificial Sequence
  Synthetic
agacccaggaagagaaccagaag

SEQ ID NO: 563913 - RNA, 24 nt, Artificial Sequence
  Synthetic
cagacccaggaagagaaccagaag

SEQ ID NO: 563914 - RNA, 18 nt, Artificial Sequence
  Synthetic
accuggggcuaccagaag

SEQ ID NO: 563915 - RNA, 19 nt, Artificial Sequence
  Synthetic
caccuggggcuaccagaag

SEQ ID NO: 563916 - RNA, 20 nt, Artificial Sequence
  Synthetic
acaccuggggcuaccagaag

SEQ ID NO: 563917 - RNA, 21 nt, Artificial Sequence
  Synthetic
aacaccuggggcuaccagaag

SEQ ID NO: 563918 - RNA, 22 nt, Artificial Sequence
  Synthetic
gaacaccuggggcuaccagaag

SEQ ID NO: 563919 - RNA, 23 nt, Artificial Sequence
  Synthetic
ggaacaccuggggcuaccagaag

SEQ ID NO: 563920 - RNA, 24 nt, Artificial Sequence
  Synthetic
aggaacaccuggggcuaccagaag

SEQ ID NO: 563921 - RNA, 18 nt, Artificial Sequence
  Synthetic
gauagccaaagccagaag

SEQ ID NO: 563922 - RNA, 19 nt, Artificial Sequence
  Synthetic
ggauagccaaagccagaag

SEQ ID NO: 563923 - RNA, 20 nt, Artificial Sequence
  Synthetic
aggauagccaaagccagaag

SEQ ID NO: 563924 - RNA, 21 nt, Artificial Sequence
  Synthetic
caggauagccaaagccagaag

SEQ ID NO: 563925 - RNA, 22 nt, Artificial Sequence
  Synthetic
acaggauagccaaagccagaag

SEQ ID NO: 563926 - RNA, 23 nt, Artificial Sequence
  Synthetic
aacaggauagccaaagccagaag

SEQ ID NO: 563927 - RNA, 24 nt, Artificial Sequence
  Synthetic
aaacaggauagccaaagccagaag

SEQ ID NO: 563928 - RNA, 18 nt, Artificial Sequence
  Synthetic
uaaauaagaugccagaag

SEQ ID NO: 563929 - RNA, 19 nt, Artificial Sequence
  Synthetic
guaaauaagaugccagaag

SEQ ID NO: 563930 - RNA, 20 nt, Artificial Sequence
  Synthetic
uguaaauaagaugccagaag

SEQ ID NO: 563931 - RNA, 21 nt, Artificial Sequence
  Synthetic
guguaaauaagaugccagaag

SEQ ID NO: 563932 - RNA, 22 nt, Artificial Sequence
  Synthetic
aguguaaauaagaugccagaag

SEQ ID NO: 563933 - RNA, 23 nt, Artificial Sequence
  Synthetic
uaguguaaauaagaugccagaag

SEQ ID NO: 563934 - RNA, 24 nt, Artificial Sequence
  Synthetic
uuaguguaaauaagaugccagaag

SEQ ID NO: 563935 - RNA, 18 nt, Artificial Sequence
  Synthetic
ugauaauuauuccagaag

SEQ ID NO: 563936 - RNA, 19 nt, Artificial Sequence
  Synthetic
gugauaauuauuccagaag

SEQ ID NO: 563937 - RNA, 20 nt, Artificial Sequence
  Synthetic
ugugauaauuauuccagaag

SEQ ID NO: 563938 - RNA, 21 nt, Artificial Sequence
  Synthetic
gugugauaauuauuccagaag

SEQ ID NO: 563939 - RNA, 22 nt, Artificial Sequence
  Synthetic
ggugugauaauuauuccagaag

SEQ ID NO: 563940 - RNA, 23 nt, Artificial Sequence
  Synthetic
aggugugauaauuauuccagaag

SEQ ID NO: 563941 - RNA, 24 nt, Artificial Sequence
  Synthetic
aaggugugauaauuauuccagaag

SEQ ID NO: 563942 - RNA, 18 nt, Artificial Sequence
  Synthetic
ccaacuggcaagcagaag

SEQ ID NO: 563943 - RNA, 19 nt, Artificial Sequence
  Synthetic
accaacuggcaagcagaag

SEQ ID NO: 563944 - RNA, 20 nt, Artificial Sequence
  Synthetic
aaccaacuggcaagcagaag

SEQ ID NO: 563945 - RNA, 21 nt, Artificial Sequence
  Synthetic
aaaccaacuggcaagcagaag

SEQ ID NO: 563946 - RNA, 22 nt, Artificial Sequence
  Synthetic
aaaaccaacuggcaagcagaag

SEQ ID NO: 563947 - RNA, 23 nt, Artificial Sequence
  Synthetic
aaaaaccaacuggcaagcagaag

SEQ ID NO: 563948 - RNA, 24 nt, Artificial Sequence
  Synthetic
caaaaaccaacuggcaagcagaag

SEQ ID NO: 563949 - RNA, 18 nt, Artificial Sequence
  Synthetic
cuaauacagcagcagaag

SEQ ID NO: 563950 - RNA, 19 nt, Artificial Sequence
  Synthetic
gcuaauacagcagcagaag

SEQ ID NO: 563951 - RNA, 20 nt, Artificial Sequence
  Synthetic
agcuaauacagcagcagaag

SEQ ID NO: 563952 - RNA, 21 nt, Artificial Sequence
  Synthetic
gagcuaauacagcagcagaag

SEQ ID NO: 563953 - RNA, 22 nt, Artificial Sequence
  Synthetic
agagcuaauacagcagcagaag

SEQ ID NO: 563954 - RNA, 23 nt, Artificial Sequence
  Synthetic
gagagcuaauacagcagcagaag

SEQ ID NO: 563955 - RNA, 24 nt, Artificial Sequence
  Synthetic
agagagcuaauacagcagcagaag

SEQ ID NO: 563956 - RNA, 18 nt, Artificial Sequence
  Synthetic
ccggcgaaauagcagaag

SEQ ID NO: 563957 - RNA, 19 nt, Artificial Sequence
  Synthetic
accggcgaaauagcagaag

SEQ ID NO: 563958 - RNA, 20 nt, Artificial Sequence
  Synthetic
caccggcgaaauagcagaag

SEQ ID NO: 563959 - RNA, 21 nt, Artificial Sequence
  Synthetic
gcaccggcgaaauagcagaag

SEQ ID NO: 563960 - RNA, 22 nt, Artificial Sequence
  Synthetic
ugcaccggcgaaauagcagaag

SEQ ID NO: 563961 - RNA, 23 nt, Artificial Sequence
  Synthetic
augcaccggcgaaauagcagaag

SEQ ID NO: 563962 - RNA, 24 nt, Artificial Sequence
  Synthetic
caugcaccggcgaaauagcagaag

SEQ ID NO: 563963 - RNA, 18 nt, Artificial Sequence
  Synthetic
agcugguuucugcagaag

SEQ ID NO: 563964 - RNA, 19 nt, Artificial Sequence
  Synthetic
uagcugguuucugcagaag

SEQ ID NO: 563965 - RNA, 20 nt, Artificial Sequence
  Synthetic
cuagcugguuucugcagaag

SEQ ID NO: 563966 - RNA, 21 nt, Artificial Sequence
  Synthetic
gcuagcugguuucugcagaag

SEQ ID NO: 563967 - RNA, 22 nt, Artificial Sequence
  Synthetic
ggcuagcugguuucugcagaag

SEQ ID NO: 563968 - RNA, 23 nt, Artificial Sequence
  Synthetic
gggcuagcugguuucugcagaag

SEQ ID NO: 563969 - RNA, 24 nt, Artificial Sequence
  Synthetic
agggcuagcugguuucugcagaag

SEQ ID NO: 563970 - RNA, 18 nt, Artificial Sequence
  Synthetic
agguugugauugcagaag

SEQ ID NO: 563971 - RNA, 19 nt, Artificial Sequence
  Synthetic
aagguugugauugcagaag

SEQ ID NO: 563972 - RNA, 20 nt, Artificial Sequence
  Synthetic
uaagguugugauugcagaag

SEQ ID NO: 563973 - RNA, 21 nt, Artificial Sequence
  Synthetic
uuaagguugugauugcagaag

SEQ ID NO: 563974 - RNA, 22 nt, Artificial Sequence
  Synthetic
guuaagguugugauugcagaag

SEQ ID NO: 563975 - RNA, 23 nt, Artificial Sequence
  Synthetic
uguuaagguugugauugcagaag

SEQ ID NO: 563976 - RNA, 24 nt, Artificial Sequence
  Synthetic
uuguuaagguugugauugcagaag

SEQ ID NO: 563977 - RNA, 18 nt, Artificial Sequence
  Synthetic
acagauuauaaucagaag

SEQ ID NO: 563978 - RNA, 19 nt, Artificial Sequence
  Synthetic
cacagauuauaaucagaag

SEQ ID NO: 563979 - RNA, 20 nt, Artificial Sequence
  Synthetic
acacagauuauaaucagaag

SEQ ID NO: 563980 - RNA, 21 nt, Artificial Sequence
  Synthetic
uacacagauuauaaucagaag

SEQ ID NO: 563981 - RNA, 22 nt, Artificial Sequence
  Synthetic
uuacacagauuauaaucagaag

SEQ ID NO: 563982 - RNA, 23 nt, Artificial Sequence
  Synthetic
cuuacacagauuauaaucagaag

SEQ ID NO: 563983 - RNA, 24 nt, Artificial Sequence
  Synthetic
gcuuacacagauuauaaucagaag

SEQ ID NO: 563984 - RNA, 18 nt, Artificial Sequence
  Synthetic
auagaaucacaucagaag

SEQ ID NO: 563985 - RNA, 19 nt, Artificial Sequence
  Synthetic
gauagaaucacaucagaag

SEQ ID NO: 563986 - RNA, 20 nt, Artificial Sequence
  Synthetic
ggauagaaucacaucagaag

SEQ ID NO: 563987 - RNA, 21 nt, Artificial Sequence
  Synthetic
uggauagaaucacaucagaag

SEQ ID NO: 563988 - RNA, 22 nt, Artificial Sequence
  Synthetic
auggauagaaucacaucagaag

SEQ ID NO: 563989 - RNA, 23 nt, Artificial Sequence
  Synthetic
uauggauagaaucacaucagaag

SEQ ID NO: 563990 - RNA, 24 nt, Artificial Sequence
  Synthetic
auauggauagaaucacaucagaag

SEQ ID NO: 563991 - RNA, 18 nt, Artificial Sequence
  Synthetic
aaguuuggccaucagaag

SEQ ID NO: 563992 - RNA, 19 nt, Artificial Sequence
  Synthetic
aaaguuuggccaucagaag

SEQ ID NO: 563993 - RNA, 20 nt, Artificial Sequence
  Synthetic
caaaguuuggccaucagaag

SEQ ID NO: 563994 - RNA, 21 nt, Artificial Sequence
  Synthetic
acaaaguuuggccaucagaag

SEQ ID NO: 563995 - RNA, 22 nt, Artificial Sequence
  Synthetic
cacaaaguuuggccaucagaag

SEQ ID NO: 563996 - RNA, 23 nt, Artificial Sequence
  Synthetic
ucacaaaguuuggccaucagaag

SEQ ID NO: 563997 - RNA, 24 nt, Artificial Sequence
  Synthetic
uucacaaaguuuggccaucagaag

SEQ ID NO: 563998 - RNA, 18 nt, Artificial Sequence
  Synthetic
uuucucauuccucagaag

SEQ ID NO: 563999 - RNA, 19 nt, Artificial Sequence
  Synthetic
uuuucucauuccucagaag

SEQ ID NO: 564000 - RNA, 20 nt, Artificial Sequence
  Synthetic
uuuuucucauuccucagaag

SEQ ID NO: 564001 - RNA, 21 nt, Artificial Sequence
  Synthetic
uuuuuucucauuccucagaag

SEQ ID NO: 564002 - RNA, 22 nt, Artificial Sequence
  Synthetic
uuuuuuucucauuccucagaag

SEQ ID NO: 564003 - RNA, 23 nt, Artificial Sequence
  Synthetic
uuuuuuuucucauuccucagaag

SEQ ID NO: 564004 - RNA, 24 nt, Artificial Sequence
  Synthetic
uuuuuuuuucucauuccucagaag

SEQ ID NO: 564005 - RNA, 18 nt, Artificial Sequence
  Synthetic
aagauacagagucagaag

SEQ ID NO: 564006 - RNA, 19 nt, Artificial Sequence
  Synthetic
gaagauacagagucagaag

SEQ ID NO: 564007 - RNA, 20 nt, Artificial Sequence
  Synthetic
ggaagauacagagucagaag

SEQ ID NO: 564008 - RNA, 21 nt, Artificial Sequence
  Synthetic
aggaagauacagagucagaag

SEQ ID NO: 564009 - RNA, 22 nt, Artificial Sequence
  Synthetic
gaggaagauacagagucagaag

SEQ ID NO: 564010 - RNA, 23 nt, Artificial Sequence
  Synthetic
ggaggaagauacagagucagaag

SEQ ID NO: 564011 - RNA, 24 nt, Artificial Sequence
  Synthetic
gggaggaagauacagagucagaag

SEQ ID NO: 564012 - RNA, 18 nt, Artificial Sequence
  Synthetic
auaacauauggucagaag

SEQ ID NO: 564013 - RNA, 19 nt, Artificial Sequence
  Synthetic
cauaacauauggucagaag

SEQ ID NO: 564014 - RNA, 20 nt, Artificial Sequence
  Synthetic
gcauaacauauggucagaag

SEQ ID NO: 564015 - RNA, 21 nt, Artificial Sequence
  Synthetic
agcauaacauauggucagaag

SEQ ID NO: 564016 - RNA, 22 nt, Artificial Sequence
  Synthetic
cagcauaacauauggucagaag

SEQ ID NO: 564017 - RNA, 23 nt, Artificial Sequence
  Synthetic
gcagcauaacauauggucagaag

SEQ ID NO: 564018 - RNA, 24 nt, Artificial Sequence
  Synthetic
ggcagcauaacauauggucagaag

SEQ ID NO: 564019 - RNA, 18 nt, Artificial Sequence
  Synthetic
gguuuaagaauucagaag

SEQ ID NO: 564020 - RNA, 19 nt, Artificial Sequence
  Synthetic
ugguuuaagaauucagaag

SEQ ID NO: 564021 - RNA, 20 nt, Artificial Sequence
  Synthetic
uugguuuaagaauucagaag

SEQ ID NO: 564022 - RNA, 21 nt, Artificial Sequence
  Synthetic
uuugguuuaagaauucagaag

SEQ ID NO: 564023 - RNA, 22 nt, Artificial Sequence
  Synthetic
uuuugguuuaagaauucagaag

SEQ ID NO: 564024 - RNA, 23 nt, Artificial Sequence
  Synthetic
auuuugguuuaagaauucagaag

SEQ ID NO: 564025 - RNA, 24 nt, Artificial Sequence
  Synthetic
cauuuugguuuaagaauucagaag

SEQ ID NO: 564026 - RNA, 18 nt, Artificial Sequence
  Synthetic
aaaaacgaacaagagaag

SEQ ID NO: 564027 - RNA, 19 nt, Artificial Sequence
  Synthetic
gaaaaacgaacaagagaag

SEQ ID NO: 564028 - RNA, 20 nt, Artificial Sequence
  Synthetic
ggaaaaacgaacaagagaag

SEQ ID NO: 564029 - RNA, 21 nt, Artificial Sequence
  Synthetic
aggaaaaacgaacaagagaag

SEQ ID NO: 564030 - RNA, 22 nt, Artificial Sequence
  Synthetic
caggaaaaacgaacaagagaag

SEQ ID NO: 564031 - RNA, 23 nt, Artificial Sequence
  Synthetic
ccaggaaaaacgaacaagagaag

SEQ ID NO: 564032 - RNA, 24 nt, Artificial Sequence
  Synthetic
uccaggaaaaacgaacaagagaag

SEQ ID NO: 564033 - RNA, 18 nt, Artificial Sequence
  Synthetic
uggagguaggaagagaag

SEQ ID NO: 564034 - RNA, 19 nt, Artificial Sequence
  Synthetic
cuggagguaggaagagaag

SEQ ID NO: 564035 - RNA, 20 nt, Artificial Sequence
  Synthetic
gcuggagguaggaagagaag

SEQ ID NO: 564036 - RNA, 21 nt, Artificial Sequence
  Synthetic
agcuggagguaggaagagaag

SEQ ID NO: 564037 - RNA, 22 nt, Artificial Sequence
  Synthetic
gagcuggagguaggaagagaag

SEQ ID NO: 564038 - RNA, 23 nt, Artificial Sequence
  Synthetic
agagcuggagguaggaagagaag

SEQ ID NO: 564039 - RNA, 24 nt, Artificial Sequence
  Synthetic
cagagcuggagguaggaagagaag

SEQ ID NO: 564040 - RNA, 18 nt, Artificial Sequence
  Synthetic
cugagaggcgcagagaag

SEQ ID NO: 564041 - RNA, 19 nt, Artificial Sequence
  Synthetic
gcugagaggcgcagagaag

SEQ ID NO: 564042 - RNA, 20 nt, Artificial Sequence
  Synthetic
agcugagaggcgcagagaag

SEQ ID NO: 564043 - RNA, 21 nt, Artificial Sequence
  Synthetic
gagcugagaggcgcagagaag

SEQ ID NO: 564044 - RNA, 22 nt, Artificial Sequence
  Synthetic
ugagcugagaggcgcagagaag

SEQ ID NO: 564045 - RNA, 23 nt, Artificial Sequence
  Synthetic
cugagcugagaggcgcagagaag

SEQ ID NO: 564046 - RNA, 24 nt, Artificial Sequence
  Synthetic
acugagcugagaggcgcagagaag

SEQ ID NO: 564047 - RNA, 18 nt, Artificial Sequence
  Synthetic
cacacaauaucagagaag

SEQ ID NO: 564048 - RNA, 19 nt, Artificial Sequence
  Synthetic
ccacacaauaucagagaag

SEQ ID NO: 564049 - RNA, 20 nt, Artificial Sequence
  Synthetic
cccacacaauaucagagaag

SEQ ID NO: 564050 - RNA, 21 nt, Artificial Sequence
  Synthetic
acccacacaauaucagagaag

SEQ ID NO: 564051 - RNA, 22 nt, Artificial Sequence
  Synthetic
cacccacacaauaucagagaag

SEQ ID NO: 564052 - RNA, 23 nt, Artificial Sequence
  Synthetic
ucacccacacaauaucagagaag

SEQ ID NO: 564053 - RNA, 24 nt, Artificial Sequence
  Synthetic
aucacccacacaauaucagagaag

SEQ ID NO: 564054 - RNA, 18 nt, Artificial Sequence
  Synthetic
aauaaugcuucagagaag

SEQ ID NO: 564055 - RNA, 19 nt, Artificial Sequence
  Synthetic
gaauaaugcuucagagaag

SEQ ID NO: 564056 - RNA, 20 nt, Artificial Sequence
  Synthetic
ugaauaaugcuucagagaag

SEQ ID NO: 564057 - RNA, 21 nt, Artificial Sequence
  Synthetic
gugaauaaugcuucagagaag

SEQ ID NO: 564058 - RNA, 22 nt, Artificial Sequence
  Synthetic
ugugaauaaugcuucagagaag

SEQ ID NO: 564059 - RNA, 23 nt, Artificial Sequence
  Synthetic
cugugaauaaugcuucagagaag

SEQ ID NO: 564060 - RNA, 24 nt, Artificial Sequence
  Synthetic
acugugaauaaugcuucagagaag

SEQ ID NO: 564061 - RNA, 18 nt, Artificial Sequence
  Synthetic
gagagagagagagagaag

SEQ ID NO: 564062 - RNA, 19 nt, Artificial Sequence
  Synthetic
agagagagagagagagaag

SEQ ID NO: 564063 - RNA, 20 nt, Artificial Sequence
  Synthetic
gagagagagagagagagaag

SEQ ID NO: 564064 - RNA, 21 nt, Artificial Sequence
  Synthetic
agagagagagagagagagaag

SEQ ID NO: 564065 - RNA, 22 nt, Artificial Sequence
  Synthetic
gagagagagagagagagagaag

SEQ ID NO: 564066 - RNA, 23 nt, Artificial Sequence
  Synthetic
agagagagagagagagagagaag

SEQ ID NO: 564067 - RNA, 24 nt, Artificial Sequence
  Synthetic
gagagagagagagagagagagaag

SEQ ID NO: 564068 - RNA, 18 nt, Artificial Sequence
  Synthetic
aaaagggagugagagaag

SEQ ID NO: 564069 - RNA, 19 nt, Artificial Sequence
  Synthetic
aaaaagggagugagagaag

SEQ ID NO: 564070 - RNA, 20 nt, Artificial Sequence
  Synthetic
gaaaaagggagugagagaag

SEQ ID NO: 564071 - RNA, 21 nt, Artificial Sequence
  Synthetic
agaaaaagggagugagagaag

SEQ ID NO: 564072 - RNA, 22 nt, Artificial Sequence
  Synthetic
aagaaaaagggagugagagaag

SEQ ID NO: 564073 - RNA, 23 nt, Artificial Sequence
  Synthetic
uaagaaaaagggagugagagaag

SEQ ID NO: 564074 - RNA, 24 nt, Artificial Sequence
  Synthetic
uuaagaaaaagggagugagagaag

SEQ ID NO: 564075 - RNA, 18 nt, Artificial Sequence
  Synthetic
aaugaaagacuagagaag

SEQ ID NO: 564076 - RNA, 19 nt, Artificial Sequence
  Synthetic
gaaugaaagacuagagaag

SEQ ID NO: 564077 - RNA, 20 nt, Artificial Sequence
  Synthetic
ugaaugaaagacuagagaag

SEQ ID NO: 564078 - RNA, 21 nt, Artificial Sequence
  Synthetic
augaaugaaagacuagagaag

SEQ ID NO: 564079 - RNA, 22 nt, Artificial Sequence
  Synthetic
gaugaaugaaagacuagagaag

SEQ ID NO: 564080 - RNA, 23 nt, Artificial Sequence
  Synthetic
agaugaaugaaagacuagagaag

SEQ ID NO: 564081 - RNA, 24 nt, Artificial Sequence
  Synthetic
aagaugaaugaaagacuagagaag

SEQ ID NO: 564082 - RNA, 18 nt, Artificial Sequence
  Synthetic
gcugacgcuguagagaag

SEQ ID NO: 564083 - RNA, 19 nt, Artificial Sequence
  Synthetic
ugcugacgcuguagagaag

SEQ ID NO: 564084 - RNA, 20 nt, Artificial Sequence
  Synthetic
cugcugacgcuguagagaag

SEQ ID NO: 564085 - RNA, 21 nt, Artificial Sequence
  Synthetic
gcugcugacgcuguagagaag

SEQ ID NO: 564086 - RNA, 22 nt, Artificial Sequence
  Synthetic
ugcugcugacgcuguagagaag

SEQ ID NO: 564087 - RNA, 23 nt, Artificial Sequence
  Synthetic
augcugcugacgcuguagagaag

SEQ ID NO: 564088 - RNA, 24 nt, Artificial Sequence
  Synthetic
gaugcugcugacgcuguagagaag

SEQ ID NO: 564089 - RNA, 18 nt, Artificial Sequence
  Synthetic
uggaaguguuuagagaag

SEQ ID NO: 564090 - RNA, 19 nt, Artificial Sequence
  Synthetic
auggaaguguuuagagaag

SEQ ID NO: 564091 - RNA, 20 nt, Artificial Sequence
  Synthetic
gauggaaguguuuagagaag

SEQ ID NO: 564092 - RNA, 21 nt, Artificial Sequence
  Synthetic
agauggaaguguuuagagaag

SEQ ID NO: 564093 - RNA, 22 nt, Artificial Sequence
  Synthetic
uagauggaaguguuuagagaag

SEQ ID NO: 564094 - RNA, 23 nt, Artificial Sequence
  Synthetic
guagauggaaguguuuagagaag

SEQ ID NO: 564095 - RNA, 24 nt, Artificial Sequence
  Synthetic
aguagauggaaguguuuagagaag

SEQ ID NO: 564096 - RNA, 18 nt, Artificial Sequence
  Synthetic
ucuuaucuaugcgagaag

SEQ ID NO: 564097 - RNA, 19 nt, Artificial Sequence
  Synthetic
uucuuaucuaugcgagaag

SEQ ID NO: 564098 - RNA, 20 nt, Artificial Sequence
  Synthetic
auucuuaucuaugcgagaag

SEQ ID NO: 564099 - RNA, 21 nt, Artificial Sequence
  Synthetic
aauucuuaucuaugcgagaag

SEQ ID NO: 564100 - RNA, 22 nt, Artificial Sequence
  Synthetic
uaauucuuaucuaugcgagaag

SEQ ID NO: 564101 - RNA, 23 nt, Artificial Sequence
  Synthetic
uuaauucuuaucuaugcgagaag

SEQ ID NO: 564102 - RNA, 24 nt, Artificial Sequence
  Synthetic
guuaauucuuaucuaugcgagaag

SEQ ID NO: 564103 - RNA, 18 nt, Artificial Sequence
  Synthetic
aaagaaaaacaggagaag

SEQ ID NO: 564104 - RNA, 19 nt, Artificial Sequence
  Synthetic
aaaagaaaaacaggagaag

SEQ ID NO: 564105 - RNA, 20 nt, Artificial Sequence
  Synthetic
aaaaagaaaaacaggagaag

SEQ ID NO: 564106 - RNA, 21 nt, Artificial Sequence
  Synthetic
aaaaaagaaaaacaggagaag

SEQ ID NO: 564107 - RNA, 22 nt, Artificial Sequence
  Synthetic
caaaaaagaaaaacaggagaag

SEQ ID NO: 564108 - RNA, 23 nt, Artificial Sequence
  Synthetic
ucaaaaaagaaaaacaggagaag

SEQ ID NO: 564109 - RNA, 24 nt, Artificial Sequence
  Synthetic
aucaaaaaagaaaaacaggagaag

SEQ ID NO: 564110 - RNA, 18 nt, Artificial Sequence
  Synthetic
guauucaauuaggagaag

SEQ ID NO: 564111 - RNA, 19 nt, Artificial Sequence
  Synthetic
gguauucaauuaggagaag

SEQ ID NO: 564112 - RNA, 20 nt, Artificial Sequence
  Synthetic
ggguauucaauuaggagaag

SEQ ID NO: 564113 - RNA, 21 nt, Artificial Sequence
  Synthetic
aggguauucaauuaggagaag

SEQ ID NO: 564114 - RNA, 22 nt, Artificial Sequence
  Synthetic
aaggguauucaauuaggagaag

SEQ ID NO: 564115 - RNA, 23 nt, Artificial Sequence
  Synthetic
aaaggguauucaauuaggagaag

SEQ ID NO: 564116 - RNA, 24 nt, Artificial Sequence
  Synthetic
uaaaggguauucaauuaggagaag

SEQ ID NO: 564117 - RNA, 18 nt, Artificial Sequence
  Synthetic
gagacuuauuaggagaag

SEQ ID NO: 564118 - RNA, 19 nt, Artificial Sequence
  Synthetic
agagacuuauuaggagaag

SEQ ID NO: 564119 - RNA, 20 nt, Artificial Sequence
  Synthetic
aagagacuuauuaggagaag

SEQ ID NO: 564120 - RNA, 21 nt, Artificial Sequence
  Synthetic
uaagagacuuauuaggagaag

SEQ ID NO: 564121 - RNA, 22 nt, Artificial Sequence
  Synthetic
auaagagacuuauuaggagaag

SEQ ID NO: 564122 - RNA, 23 nt, Artificial Sequence
  Synthetic
aauaagagacuuauuaggagaag

SEQ ID NO: 564123 - RNA, 24 nt, Artificial Sequence
  Synthetic
uaauaagagacuuauuaggagaag

SEQ ID NO: 564124 - RNA, 18 nt, Artificial Sequence
  Synthetic
ccaagauuaagggagaag

SEQ ID NO: 564125 - RNA, 19 nt, Artificial Sequence
  Synthetic
accaagauuaagggagaag

SEQ ID NO: 564126 - RNA, 20 nt, Artificial Sequence
  Synthetic
aaccaagauuaagggagaag

SEQ ID NO: 564127 - RNA, 21 nt, Artificial Sequence
  Synthetic
uaaccaagauuaagggagaag

SEQ ID NO: 564128 - RNA, 22 nt, Artificial Sequence
  Synthetic
uuaaccaagauuaagggagaag

SEQ ID NO: 564129 - RNA, 23 nt, Artificial Sequence
  Synthetic
auuaaccaagauuaagggagaag

SEQ ID NO: 564130 - RNA, 24 nt, Artificial Sequence
  Synthetic
cauuaaccaagauuaagggagaag

SEQ ID NO: 564131 - RNA, 18 nt, Artificial Sequence
  Synthetic
agcuggccaggggagaag

SEQ ID NO: 564132 - RNA, 19 nt, Artificial Sequence
  Synthetic
cagcuggccaggggagaag

SEQ ID NO: 564133 - RNA, 20 nt, Artificial Sequence
  Synthetic
gcagcuggccaggggagaag

SEQ ID NO: 564134 - RNA, 21 nt, Artificial Sequence
  Synthetic
agcagcuggccaggggagaag

SEQ ID NO: 564135 - RNA, 22 nt, Artificial Sequence
  Synthetic
uagcagcuggccaggggagaag

SEQ ID NO: 564136 - RNA, 23 nt, Artificial Sequence
  Synthetic
guagcagcuggccaggggagaag

SEQ ID NO: 564137 - RNA, 24 nt, Artificial Sequence
  Synthetic
aguagcagcuggccaggggagaag

SEQ ID NO: 564138 - RNA, 18 nt, Artificial Sequence
  Synthetic
agcuauacacuggagaag

SEQ ID NO: 564139 - RNA, 19 nt, Artificial Sequence
  Synthetic
aagcuauacacuggagaag

SEQ ID NO: 564140 - RNA, 20 nt, Artificial Sequence
  Synthetic
caagcuauacacuggagaag

SEQ ID NO: 564141 - RNA, 21 nt, Artificial Sequence
  Synthetic
gcaagcuauacacuggagaag

SEQ ID NO: 564142 - RNA, 22 nt, Artificial Sequence
  Synthetic
ugcaagcuauacacuggagaag

SEQ ID NO: 564143 - RNA, 23 nt, Artificial Sequence
  Synthetic
uugcaagcuauacacuggagaag

SEQ ID NO: 564144 - RNA, 24 nt, Artificial Sequence
  Synthetic
cuugcaagcuauacacuggagaag

SEQ ID NO: 564145 - RNA, 18 nt, Artificial Sequence
  Synthetic
augauaugaguggagaag

SEQ ID NO: 564146 - RNA, 19 nt, Artificial Sequence
  Synthetic
uaugauaugaguggagaag

SEQ ID NO: 564147 - RNA, 20 nt, Artificial Sequence
  Synthetic
guaugauaugaguggagaag

SEQ ID NO: 564148 - RNA, 21 nt, Artificial Sequence
  Synthetic
uguaugauaugaguggagaag

SEQ ID NO: 564149 - RNA, 22 nt, Artificial Sequence
  Synthetic
guguaugauaugaguggagaag

SEQ ID NO: 564150 - RNA, 23 nt, Artificial Sequence
  Synthetic
uguguaugauaugaguggagaag

SEQ ID NO: 564151 - RNA, 24 nt, Artificial Sequence
  Synthetic
guguguaugauaugaguggagaag

SEQ ID NO: 564152 - RNA, 18 nt, Artificial Sequence
  Synthetic
agcacgaccuuggagaag

SEQ ID NO: 564153 - RNA, 19 nt, Artificial Sequence
  Synthetic
cagcacgaccuuggagaag

SEQ ID NO: 564154 - RNA, 20 nt, Artificial Sequence
  Synthetic
gcagcacgaccuuggagaag

SEQ ID NO: 564155 - RNA, 21 nt, Artificial Sequence
  Synthetic
ggcagcacgaccuuggagaag

SEQ ID NO: 564156 - RNA, 22 nt, Artificial Sequence
  Synthetic
aggcagcacgaccuuggagaag

SEQ ID NO: 564157 - RNA, 23 nt, Artificial Sequence
  Synthetic
gaggcagcacgaccuuggagaag

SEQ ID NO: 564158 - RNA, 24 nt, Artificial Sequence
  Synthetic
ggaggcagcacgaccuuggagaag

SEQ ID NO: 564159 - RNA, 18 nt, Artificial Sequence
  Synthetic
accguauagaaugagaag

SEQ ID NO: 564160 - RNA, 19 nt, Artificial Sequence
  Synthetic
aaccguauagaaugagaag

SEQ ID NO: 564161 - RNA, 20 nt, Artificial Sequence
  Synthetic
aaaccguauagaaugagaag

SEQ ID NO: 564162 - RNA, 21 nt, Artificial Sequence
  Synthetic
gaaaccguauagaaugagaag

SEQ ID NO: 564163 - RNA, 22 nt, Artificial Sequence
  Synthetic
ggaaaccguauagaaugagaag

SEQ ID NO: 564164 - RNA, 23 nt, Artificial Sequence
  Synthetic
gggaaaccguauagaaugagaag

SEQ ID NO: 564165 - RNA, 24 nt, Artificial Sequence
  Synthetic
agggaaaccguauagaaugagaag

SEQ ID NO: 564166 - RNA, 18 nt, Artificial Sequence
  Synthetic
ccuuagcuggaugagaag

SEQ ID NO: 564167 - RNA, 19 nt, Artificial Sequence
  Synthetic
gccuuagcuggaugagaag

SEQ ID NO: 564168 - RNA, 20 nt, Artificial Sequence
  Synthetic
agccuuagcuggaugagaag

SEQ ID NO: 564169 - RNA, 21 nt, Artificial Sequence
  Synthetic
aagccuuagcuggaugagaag

SEQ ID NO: 564170 - RNA, 22 nt, Artificial Sequence
  Synthetic
gaagccuuagcuggaugagaag

SEQ ID NO: 564171 - RNA, 23 nt, Artificial Sequence
  Synthetic
agaagccuuagcuggaugagaag

SEQ ID NO: 564172 - RNA, 24 nt, Artificial Sequence
  Synthetic
uagaagccuuagcuggaugagaag

SEQ ID NO: 564173 - RNA, 18 nt, Artificial Sequence
  Synthetic
cacacgcgaacugagaag

SEQ ID NO: 564174 - RNA, 19 nt, Artificial Sequence
  Synthetic
ccacacgcgaacugagaag

SEQ ID NO: 564175 - RNA, 20 nt, Artificial Sequence
  Synthetic
accacacgcgaacugagaag

SEQ ID NO: 564176 - RNA, 21 nt, Artificial Sequence
  Synthetic
aaccacacgcgaacugagaag

SEQ ID NO: 564177 - RNA, 22 nt, Artificial Sequence
  Synthetic
uaaccacacgcgaacugagaag

SEQ ID NO: 564178 - RNA, 23 nt, Artificial Sequence
  Synthetic
uuaaccacacgcgaacugagaag

SEQ ID NO: 564179 - RNA, 24 nt, Artificial Sequence
  Synthetic
auuaaccacacgcgaacugagaag

SEQ ID NO: 564180 - RNA, 18 nt, Artificial Sequence
  Synthetic
ugugcuugcccugagaag

SEQ ID NO: 564181 - RNA, 19 nt, Artificial Sequence
  Synthetic
augugcuugcccugagaag

SEQ ID NO: 564182 - RNA, 20 nt, Artificial Sequence
  Synthetic
gaugugcuugcccugagaag

SEQ ID NO: 564183 - RNA, 21 nt, Artificial Sequence
  Synthetic
ggaugugcuugcccugagaag

SEQ ID NO: 564184 - RNA, 22 nt, Artificial Sequence
  Synthetic
aggaugugcuugcccugagaag

SEQ ID NO: 564185 - RNA, 23 nt, Artificial Sequence
  Synthetic
aaggaugugcuugcccugagaag

SEQ ID NO: 564186 - RNA, 24 nt, Artificial Sequence
  Synthetic
aaaggaugugcuugcccugagaag

SEQ ID NO: 564187 - RNA, 18 nt, Artificial Sequence
  Synthetic
gauaucaaacuugagaag

SEQ ID NO: 564188 - RNA, 19 nt, Artificial Sequence
  Synthetic
ggauaucaaacuugagaag

SEQ ID NO: 564189 - RNA, 20 nt, Artificial Sequence
  Synthetic
aggauaucaaacuugagaag

SEQ ID NO: 564190 - RNA, 21 nt, Artificial Sequence
  Synthetic
aaggauaucaaacuugagaag

SEQ ID NO: 564191 - RNA, 22 nt, Artificial Sequence
  Synthetic
caaggauaucaaacuugagaag

SEQ ID NO: 564192 - RNA, 23 nt, Artificial Sequence
  Synthetic
ccaaggauaucaaacuugagaag

SEQ ID NO: 564193 - RNA, 24 nt, Artificial Sequence
  Synthetic
uccaaggauaucaaacuugagaag

SEQ ID NO: 564194 - RNA, 18 nt, Artificial Sequence
  Synthetic
auccuccuagaauagaag

SEQ ID NO: 564195 - RNA, 19 nt, Artificial Sequence
  Synthetic
cauccuccuagaauagaag

SEQ ID NO: 564196 - RNA, 20 nt, Artificial Sequence
  Synthetic
acauccuccuagaauagaag

SEQ ID NO: 564197 - RNA, 21 nt, Artificial Sequence
  Synthetic
aacauccuccuagaauagaag

SEQ ID NO: 564198 - RNA, 22 nt, Artificial Sequence
  Synthetic
aaacauccuccuagaauagaag

SEQ ID NO: 564199 - RNA, 23 nt, Artificial Sequence
  Synthetic
caaacauccuccuagaauagaag

SEQ ID NO: 564200 - RNA, 24 nt, Artificial Sequence
  Synthetic
acaaacauccuccuagaauagaag

SEQ ID NO: 564201 - RNA, 18 nt, Artificial Sequence
  Synthetic
ggcuuugagacauagaag

SEQ ID NO: 564202 - RNA, 19 nt, Artificial Sequence
  Synthetic
uggcuuugagacauagaag

SEQ ID NO: 564203 - RNA, 20 nt, Artificial Sequence
  Synthetic
auggcuuugagacauagaag

SEQ ID NO: 564204 - RNA, 21 nt, Artificial Sequence
  Synthetic
gauggcuuugagacauagaag

SEQ ID NO: 564205 - RNA, 22 nt, Artificial Sequence
  Synthetic
agauggcuuugagacauagaag

SEQ ID NO: 564206 - RNA, 23 nt, Artificial Sequence
  Synthetic
gagauggcuuugagacauagaag

SEQ ID NO: 564207 - RNA, 24 nt, Artificial Sequence
  Synthetic
ugagauggcuuugagacauagaag

SEQ ID NO: 564208 - RNA, 18 nt, Artificial Sequence
  Synthetic
uuagaacaaccauagaag

SEQ ID NO: 564209 - RNA, 19 nt, Artificial Sequence
  Synthetic
auuagaacaaccauagaag

SEQ ID NO: 564210 - RNA, 20 nt, Artificial Sequence
  Synthetic
uauuagaacaaccauagaag

SEQ ID NO: 564211 - RNA, 21 nt, Artificial Sequence
  Synthetic
uuauuagaacaaccauagaag

SEQ ID NO: 564212 - RNA, 22 nt, Artificial Sequence
  Synthetic
cuuauuagaacaaccauagaag

SEQ ID NO: 564213 - RNA, 23 nt, Artificial Sequence
  Synthetic
ucuuauuagaacaaccauagaag

SEQ ID NO: 564214 - RNA, 24 nt, Artificial Sequence
  Synthetic
uucuuauuagaacaaccauagaag

SEQ ID NO: 564215 - RNA, 18 nt, Artificial Sequence
  Synthetic
cugcugagcugauagaag

SEQ ID NO: 564216 - RNA, 19 nt, Artificial Sequence
  Synthetic
gcugcugagcugauagaag

SEQ ID NO: 564217 - RNA, 20 nt, Artificial Sequence
  Synthetic
cgcugcugagcugauagaag

SEQ ID NO: 564218 - RNA, 21 nt, Artificial Sequence
  Synthetic
ccgcugcugagcugauagaag

SEQ ID NO: 564219 - RNA, 22 nt, Artificial Sequence
  Synthetic
accgcugcugagcugauagaag

SEQ ID NO: 564220 - RNA, 23 nt, Artificial Sequence
  Synthetic
uaccgcugcugagcugauagaag

SEQ ID NO: 564221 - RNA, 24 nt, Artificial Sequence
  Synthetic
auaccgcugcugagcugauagaag

SEQ ID NO: 564222 - RNA, 18 nt, Artificial Sequence
  Synthetic
acuuaaaaaguauagaag

SEQ ID NO: 564223 - RNA, 19 nt, Artificial Sequence
  Synthetic
gacuuaaaaaguauagaag

SEQ ID NO: 564224 - RNA, 20 nt, Artificial Sequence
  Synthetic
ugacuuaaaaaguauagaag

SEQ ID NO: 564225 - RNA, 21 nt, Artificial Sequence
  Synthetic
gugacuuaaaaaguauagaag

SEQ ID NO: 564226 - RNA, 22 nt, Artificial Sequence
  Synthetic
ggugacuuaaaaaguauagaag

SEQ ID NO: 564227 - RNA, 23 nt, Artificial Sequence
  Synthetic
aggugacuuaaaaaguauagaag

SEQ ID NO: 564228 - RNA, 24 nt, Artificial Sequence
  Synthetic
aaggugacuuaaaaaguauagaag

SEQ ID NO: 564229 - RNA, 18 nt, Artificial Sequence
  Synthetic
uuacaaggacacuagaag

SEQ ID NO: 564230 - RNA, 19 nt, Artificial Sequence
  Synthetic
uuuacaaggacacuagaag

SEQ ID NO: 564231 - RNA, 20 nt, Artificial Sequence
  Synthetic
auuuacaaggacacuagaag

SEQ ID NO: 564232 - RNA, 21 nt, Artificial Sequence
  Synthetic
cauuuacaaggacacuagaag

SEQ ID NO: 564233 - RNA, 22 nt, Artificial Sequence
  Synthetic
gcauuuacaaggacacuagaag

SEQ ID NO: 564234 - RNA, 23 nt, Artificial Sequence
  Synthetic
agcauuuacaaggacacuagaag

SEQ ID NO: 564235 - RNA, 24 nt, Artificial Sequence
  Synthetic
cagcauuuacaaggacacuagaag

SEQ ID NO: 564236 - RNA, 18 nt, Artificial Sequence
  Synthetic
uagaguuuggacuagaag

SEQ ID NO: 564237 - RNA, 19 nt, Artificial Sequence
  Synthetic
cuagaguuuggacuagaag

SEQ ID NO: 564238 - RNA, 20 nt, Artificial Sequence
  Synthetic
acuagaguuuggacuagaag

SEQ ID NO: 564239 - RNA, 21 nt, Artificial Sequence
  Synthetic
aacuagaguuuggacuagaag

SEQ ID NO: 564240 - RNA, 22 nt, Artificial Sequence
  Synthetic
uaacuagaguuuggacuagaag

SEQ ID NO: 564241 - RNA, 23 nt, Artificial Sequence
  Synthetic
auaacuagaguuuggacuagaag

SEQ ID NO: 564242 - RNA, 24 nt, Artificial Sequence
  Synthetic
gauaacuagaguuuggacuagaag

SEQ ID NO: 564243 - RNA, 18 nt, Artificial Sequence
  Synthetic
guuucaaauggcuagaag

SEQ ID NO: 564244 - RNA, 19 nt, Artificial Sequence
  Synthetic
aguuucaaauggcuagaag

SEQ ID NO: 564245 - RNA, 20 nt, Artificial Sequence
  Synthetic
aaguuucaaauggcuagaag

SEQ ID NO: 564246 - RNA, 21 nt, Artificial Sequence
  Synthetic
gaaguuucaaauggcuagaag

SEQ ID NO: 564247 - RNA, 22 nt, Artificial Sequence
  Synthetic
agaaguuucaaauggcuagaag

SEQ ID NO: 564248 - RNA, 23 nt, Artificial Sequence
  Synthetic
uagaaguuucaaauggcuagaag

SEQ ID NO: 564249 - RNA, 24 nt, Artificial Sequence
  Synthetic
auagaaguuucaaauggcuagaag

SEQ ID NO: 564250 - RNA, 18 nt, Artificial Sequence
  Synthetic
uuacaaucauaguagaag

SEQ ID NO: 564251 - RNA, 19 nt, Artificial Sequence
  Synthetic
cuuacaaucauaguagaag

SEQ ID NO: 564252 - RNA, 20 nt, Artificial Sequence
  Synthetic
acuuacaaucauaguagaag

SEQ ID NO: 564253 - RNA, 21 nt, Artificial Sequence
  Synthetic
aacuuacaaucauaguagaag

SEQ ID NO: 564254 - RNA, 22 nt, Artificial Sequence
  Synthetic
aaacuuacaaucauaguagaag

SEQ ID NO: 564255 - RNA, 23 nt, Artificial Sequence
  Synthetic
gaaacuuacaaucauaguagaag

SEQ ID NO: 564256 - RNA, 24 nt, Artificial Sequence
  Synthetic
ggaaacuuacaaucauaguagaag

SEQ ID NO: 564257 - RNA, 18 nt, Artificial Sequence
  Synthetic
auaucugaguaguagaag

SEQ ID NO: 564258 - RNA, 19 nt, Artificial Sequence
  Synthetic
cauaucugaguaguagaag

SEQ ID NO: 564259 - RNA, 20 nt, Artificial Sequence
  Synthetic
acauaucugaguaguagaag

SEQ ID NO: 564260 - RNA, 21 nt, Artificial Sequence
  Synthetic
gacauaucugaguaguagaag

SEQ ID NO: 564261 - RNA, 22 nt, Artificial Sequence
  Synthetic
agacauaucugaguaguagaag

SEQ ID NO: 564262 - RNA, 23 nt, Artificial Sequence
  Synthetic
uagacauaucugaguaguagaag

SEQ ID NO: 564263 - RNA, 24 nt, Artificial Sequence
  Synthetic
guagacauaucugaguaguagaag

SEQ ID NO: 564264 - RNA, 18 nt, Artificial Sequence
  Synthetic
gguagaguguaguagaag

SEQ ID NO: 564265 - RNA, 19 nt, Artificial Sequence
  Synthetic
ggguagaguguaguagaag

SEQ ID NO: 564266 - RNA, 20 nt, Artificial Sequence
  Synthetic
aggguagaguguaguagaag

SEQ ID NO: 564267 - RNA, 21 nt, Artificial Sequence
  Synthetic
aaggguagaguguaguagaag

SEQ ID NO: 564268 - RNA, 22 nt, Artificial Sequence
  Synthetic
aaaggguagaguguaguagaag

SEQ ID NO: 564269 - RNA, 23 nt, Artificial Sequence
  Synthetic
gaaaggguagaguguaguagaag

SEQ ID NO: 564270 - RNA, 24 nt, Artificial Sequence
  Synthetic
agaaaggguagaguguaguagaag

SEQ ID NO: 564271 - RNA, 18 nt, Artificial Sequence
  Synthetic
uguguaauaagguagaag

SEQ ID NO: 564272 - RNA, 19 nt, Artificial Sequence
  Synthetic
uuguguaauaagguagaag

SEQ ID NO: 564273 - RNA, 20 nt, Artificial Sequence
  Synthetic
auuguguaauaagguagaag

SEQ ID NO: 564274 - RNA, 21 nt, Artificial Sequence
  Synthetic
cauuguguaauaagguagaag

SEQ ID NO: 564275 - RNA, 22 nt, Artificial Sequence
  Synthetic
ucauuguguaauaagguagaag

SEQ ID NO: 564276 - RNA, 23 nt, Artificial Sequence
  Synthetic
cucauuguguaauaagguagaag

SEQ ID NO: 564277 - RNA, 24 nt, Artificial Sequence
  Synthetic
acucauuguguaauaagguagaag

SEQ ID NO: 564278 - RNA, 18 nt, Artificial Sequence
  Synthetic
augcuaugaggguagaag

SEQ ID NO: 564279 - RNA, 19 nt, Artificial Sequence
  Synthetic
aaugcuaugaggguagaag

SEQ ID NO: 564280 - RNA, 20 nt, Artificial Sequence
  Synthetic
uaaugcuaugaggguagaag

SEQ ID NO: 564281 - RNA, 21 nt, Artificial Sequence
  Synthetic
cuaaugcuaugaggguagaag

SEQ ID NO: 564282 - RNA, 22 nt, Artificial Sequence
  Synthetic
ucuaaugcuaugaggguagaag

SEQ ID NO: 564283 - RNA, 23 nt, Artificial Sequence
  Synthetic
cucuaaugcuaugaggguagaag

SEQ ID NO: 564284 - RNA, 24 nt, Artificial Sequence
  Synthetic
ucucuaaugcuaugaggguagaag

SEQ ID NO: 564285 - RNA, 18 nt, Artificial Sequence
  Synthetic
cugcagggggcuacgaag

SEQ ID NO: 564286 - RNA, 19 nt, Artificial Sequence
  Synthetic
acugcagggggcuacgaag

SEQ ID NO: 564287 - RNA, 20 nt, Artificial Sequence
  Synthetic
uacugcagggggcuacgaag

SEQ ID NO: 564288 - RNA, 21 nt, Artificial Sequence
  Synthetic
auacugcagggggcuacgaag

SEQ ID NO: 564289 - RNA, 22 nt, Artificial Sequence
  Synthetic
gauacugcagggggcuacgaag

SEQ ID NO: 564290 - RNA, 23 nt, Artificial Sequence
  Synthetic
agauacugcagggggcuacgaag

SEQ ID NO: 564291 - RNA, 24 nt, Artificial Sequence
  Synthetic
uagauacugcagggggcuacgaag

SEQ ID NO: 564292 - RNA, 18 nt, Artificial Sequence
  Synthetic
gacaacaacaaaccgaag

SEQ ID NO: 564293 - RNA, 19 nt, Artificial Sequence
  Synthetic
cgacaacaacaaaccgaag

SEQ ID NO: 564294 - RNA, 20 nt, Artificial Sequence
  Synthetic
acgacaacaacaaaccgaag

SEQ ID NO: 564295 - RNA, 21 nt, Artificial Sequence
  Synthetic
aacgacaacaacaaaccgaag

SEQ ID NO: 564296 - RNA, 22 nt, Artificial Sequence
  Synthetic
caacgacaacaacaaaccgaag

SEQ ID NO: 564297 - RNA, 23 nt, Artificial Sequence
  Synthetic
acaacgacaacaacaaaccgaag

SEQ ID NO: 564298 - RNA, 24 nt, Artificial Sequence
  Synthetic
aacaacgacaacaacaaaccgaag

SEQ ID NO: 564299 - RNA, 18 nt, Artificial Sequence
  Synthetic
cuaauccuucacccgaag

SEQ ID NO: 564300 - RNA, 19 nt, Artificial Sequence
  Synthetic
acuaauccuucacccgaag

SEQ ID NO: 564301 - RNA, 20 nt, Artificial Sequence
  Synthetic
aacuaauccuucacccgaag

SEQ ID NO: 564302 - RNA, 21 nt, Artificial Sequence
  Synthetic
aaacuaauccuucacccgaag

SEQ ID NO: 564303 - RNA, 22 nt, Artificial Sequence
  Synthetic
aaaacuaauccuucacccgaag

SEQ ID NO: 564304 - RNA, 23 nt, Artificial Sequence
  Synthetic
gaaaacuaauccuucacccgaag

SEQ ID NO: 564305 - RNA, 24 nt, Artificial Sequence
  Synthetic
agaaaacuaauccuucacccgaag

SEQ ID NO: 564306 - RNA, 18 nt, Artificial Sequence
  Synthetic
gcuauaauguagccgaag

SEQ ID NO: 564307 - RNA, 19 nt, Artificial Sequence
  Synthetic
agcuauaauguagccgaag

SEQ ID NO: 564308 - RNA, 20 nt, Artificial Sequence
  Synthetic
cagcuauaauguagccgaag

SEQ ID NO: 564309 - RNA, 21 nt, Artificial Sequence
  Synthetic
gcagcuauaauguagccgaag

SEQ ID NO: 564310 - RNA, 22 nt, Artificial Sequence
  Synthetic
agcagcuauaauguagccgaag

SEQ ID NO: 564311 - RNA, 23 nt, Artificial Sequence
  Synthetic
aagcagcuauaauguagccgaag

SEQ ID NO: 564312 - RNA, 24 nt, Artificial Sequence
  Synthetic
uaagcagcuauaauguagccgaag

SEQ ID NO: 564313 - RNA, 18 nt, Artificial Sequence
  Synthetic
gcuuguagguuuccgaag

SEQ ID NO: 564314 - RNA, 19 nt, Artificial Sequence
  Synthetic
ugcuuguagguuuccgaag

SEQ ID NO: 564315 - RNA, 20 nt, Artificial Sequence
  Synthetic
augcuuguagguuuccgaag

SEQ ID NO: 564316 - RNA, 21 nt, Artificial Sequence
  Synthetic
gaugcuuguagguuuccgaag

SEQ ID NO: 564317 - RNA, 22 nt, Artificial Sequence
  Synthetic
agaugcuuguagguuuccgaag

SEQ ID NO: 564318 - RNA, 23 nt, Artificial Sequence
  Synthetic
uagaugcuuguagguuuccgaag

SEQ ID NO: 564319 - RNA, 24 nt, Artificial Sequence
  Synthetic
uuagaugcuuguagguuuccgaag

SEQ ID NO: 564320 - RNA, 18 nt, Artificial Sequence
  Synthetic
guguaguuccaaucgaag

SEQ ID NO: 564321 - RNA, 19 nt, Artificial Sequence
  Synthetic
aguguaguuccaaucgaag

SEQ ID NO: 564322 - RNA, 20 nt, Artificial Sequence
  Synthetic
uaguguaguuccaaucgaag

SEQ ID NO: 564323 - RNA, 21 nt, Artificial Sequence
  Synthetic
auaguguaguuccaaucgaag

SEQ ID NO: 564324 - RNA, 22 nt, Artificial Sequence
  Synthetic
gauaguguaguuccaaucgaag

SEQ ID NO: 564325 - RNA, 23 nt, Artificial Sequence
  Synthetic
ugauaguguaguuccaaucgaag

SEQ ID NO: 564326 - RNA, 24 nt, Artificial Sequence
  Synthetic
cugauaguguaguuccaaucgaag

SEQ ID NO: 564327 - RNA, 18 nt, Artificial Sequence
  Synthetic
aauuaaaaaaaaaggaag

SEQ ID NO: 564328 - RNA, 19 nt, Artificial Sequence
  Synthetic
aaauuaaaaaaaaaggaag

SEQ ID NO: 564329 - RNA, 20 nt, Artificial Sequence
  Synthetic
gaaauuaaaaaaaaaggaag

SEQ ID NO: 564330 - RNA, 21 nt, Artificial Sequence
  Synthetic
agaaauuaaaaaaaaaggaag

SEQ ID NO: 564331 - RNA, 22 nt, Artificial Sequence
  Synthetic
cagaaauuaaaaaaaaaggaag

SEQ ID NO: 564332 - RNA, 23 nt, Artificial Sequence
  Synthetic
acagaaauuaaaaaaaaaggaag

SEQ ID NO: 564333 - RNA, 24 nt, Artificial Sequence
  Synthetic
aacagaaauuaaaaaaaaaggaag

SEQ ID NO: 564334 - RNA, 18 nt, Artificial Sequence
  Synthetic
ugcuuagcaaaaaggaag

SEQ ID NO: 564335 - RNA, 19 nt, Artificial Sequence
  Synthetic
cugcuuagcaaaaaggaag

SEQ ID NO: 564336 - RNA, 20 nt, Artificial Sequence
  Synthetic
acugcuuagcaaaaaggaag

SEQ ID NO: 564337 - RNA, 21 nt, Artificial Sequence
  Synthetic
aacugcuuagcaaaaaggaag

SEQ ID NO: 564338 - RNA, 22 nt, Artificial Sequence
  Synthetic
gaacugcuuagcaaaaaggaag

SEQ ID NO: 564339 - RNA, 23 nt, Artificial Sequence
  Synthetic
agaacugcuuagcaaaaaggaag

SEQ ID NO: 564340 - RNA, 24 nt, Artificial Sequence
  Synthetic
gagaacugcuuagcaaaaaggaag

SEQ ID NO: 564341 - RNA, 18 nt, Artificial Sequence
  Synthetic
aaaaagacagaaaggaag

SEQ ID NO: 564342 - RNA, 19 nt, Artificial Sequence
  Synthetic
gaaaaagacagaaaggaag

SEQ ID NO: 564343 - RNA, 20 nt, Artificial Sequence
  Synthetic
ggaaaaagacagaaaggaag

SEQ ID NO: 564344 - RNA, 21 nt, Artificial Sequence
  Synthetic
uggaaaaagacagaaaggaag

SEQ ID NO: 564345 - RNA, 22 nt, Artificial Sequence
  Synthetic
uuggaaaaagacagaaaggaag

SEQ ID NO: 564346 - RNA, 23 nt, Artificial Sequence
  Synthetic
uuuggaaaaagacagaaaggaag

SEQ ID NO: 564347 - RNA, 24 nt, Artificial Sequence
  Synthetic
guuuggaaaaagacagaaaggaag

SEQ ID NO: 564348 - RNA, 18 nt, Artificial Sequence
  Synthetic
gaaggaaaggaaaggaag

SEQ ID NO: 564349 - RNA, 19 nt, Artificial Sequence
  Synthetic
agaaggaaaggaaaggaag

SEQ ID NO: 564350 - RNA, 20 nt, Artificial Sequence
  Synthetic
cagaaggaaaggaaaggaag

SEQ ID NO: 564351 - RNA, 21 nt, Artificial Sequence
  Synthetic
acagaaggaaaggaaaggaag

SEQ ID NO: 564352 - RNA, 22 nt, Artificial Sequence
  Synthetic
aacagaaggaaaggaaaggaag

SEQ ID NO: 564353 - RNA, 23 nt, Artificial Sequence
  Synthetic
gaacagaaggaaaggaaaggaag

SEQ ID NO: 564354 - RNA, 24 nt, Artificial Sequence
  Synthetic
ggaacagaaggaaaggaaaggaag

SEQ ID NO: 564355 - RNA, 18 nt, Artificial Sequence
  Synthetic
augacccuggaaaggaag

SEQ ID NO: 564356 - RNA, 19 nt, Artificial Sequence
  Synthetic
aaugacccuggaaaggaag

SEQ ID NO: 564357 - RNA, 20 nt, Artificial Sequence
  Synthetic
aaaugacccuggaaaggaag

SEQ ID NO: 564358 - RNA, 21 nt, Artificial Sequence
  Synthetic
uaaaugacccuggaaaggaag

SEQ ID NO: 564359 - RNA, 22 nt, Artificial Sequence
  Synthetic
uuaaaugacccuggaaaggaag

SEQ ID NO: 564360 - RNA, 23 nt, Artificial Sequence
  Synthetic
uuuaaaugacccuggaaaggaag

SEQ ID NO: 564361 - RNA, 24 nt, Artificial Sequence
  Synthetic
uuuuaaaugacccuggaaaggaag

SEQ ID NO: 564362 - RNA, 18 nt, Artificial Sequence
  Synthetic
aaaaaaaacucaaggaag

SEQ ID NO: 564363 - RNA, 19 nt, Artificial Sequence
  Synthetic
aaaaaaaaacucaaggaag

SEQ ID NO: 564364 - RNA, 20 nt, Artificial Sequence
  Synthetic
aaaaaaaaaacucaaggaag

SEQ ID NO: 564365 - RNA, 21 nt, Artificial Sequence
  Synthetic
uaaaaaaaaaacucaaggaag

SEQ ID NO: 564366 - RNA, 22 nt, Artificial Sequence
  Synthetic
uuaaaaaaaaaacucaaggaag

SEQ ID NO: 564367 - RNA, 23 nt, Artificial Sequence
  Synthetic
cuuaaaaaaaaaacucaaggaag

SEQ ID NO: 564368 - RNA, 24 nt, Artificial Sequence
  Synthetic
gcuuaaaaaaaaaacucaaggaag

SEQ ID NO: 564369 - RNA, 18 nt, Artificial Sequence
  Synthetic
agcaauaacucaaggaag

SEQ ID NO: 564370 - RNA, 19 nt, Artificial Sequence
  Synthetic
aagcaauaacucaaggaag

SEQ ID NO: 564371 - RNA, 20 nt, Artificial Sequence
  Synthetic
uaagcaauaacucaaggaag

SEQ ID NO: 564372 - RNA, 21 nt, Artificial Sequence
  Synthetic
cuaagcaauaacucaaggaag

SEQ ID NO: 564373 - RNA, 22 nt, Artificial Sequence
  Synthetic
ucuaagcaauaacucaaggaag

SEQ ID NO: 564374 - RNA, 23 nt, Artificial Sequence
  Synthetic
aucuaagcaauaacucaaggaag

SEQ ID NO: 564375 - RNA, 24 nt, Artificial Sequence
  Synthetic
caucuaagcaauaacucaaggaag

SEQ ID NO: 564376 - RNA, 18 nt, Artificial Sequence
  Synthetic
cagcuauuuucaaggaag

SEQ ID NO: 564377 - RNA, 19 nt, Artificial Sequence
  Synthetic
ccagcuauuuucaaggaag

SEQ ID NO: 564378 - RNA, 20 nt, Artificial Sequence
  Synthetic
accagcuauuuucaaggaag

SEQ ID NO: 564379 - RNA, 21 nt, Artificial Sequence
  Synthetic
gaccagcuauuuucaaggaag

SEQ ID NO: 564380 - RNA, 22 nt, Artificial Sequence
  Synthetic
ggaccagcuauuuucaaggaag

SEQ ID NO: 564381 - RNA, 23 nt, Artificial Sequence
  Synthetic
gggaccagcuauuuucaaggaag

SEQ ID NO: 564382 - RNA, 24 nt, Artificial Sequence
  Synthetic
ugggaccagcuauuuucaaggaag

SEQ ID NO: 564383 - RNA, 18 nt, Artificial Sequence
  Synthetic
auguuggggagaaggaag

SEQ ID NO: 564384 - RNA, 19 nt, Artificial Sequence
  Synthetic
cauguuggggagaaggaag

SEQ ID NO: 564385 - RNA, 20 nt, Artificial Sequence
  Synthetic
ucauguuggggagaaggaag

SEQ ID NO: 564386 - RNA, 21 nt, Artificial Sequence
  Synthetic
cucauguuggggagaaggaag

SEQ ID NO: 564387 - RNA, 22 nt, Artificial Sequence
  Synthetic
ccucauguuggggagaaggaag

SEQ ID NO: 564388 - RNA, 23 nt, Artificial Sequence
  Synthetic
cccucauguuggggagaaggaag

SEQ ID NO: 564389 - RNA, 24 nt, Artificial Sequence
  Synthetic
acccucauguuggggagaaggaag

SEQ ID NO: 564390 - RNA, 18 nt, Artificial Sequence
  Synthetic
ggcaguaagggaaggaag

SEQ ID NO: 564391 - RNA, 19 nt, Artificial Sequence
  Synthetic
aggcaguaagggaaggaag

SEQ ID NO: 564392 - RNA, 20 nt, Artificial Sequence
  Synthetic
caggcaguaagggaaggaag

SEQ ID NO: 564393 - RNA, 21 nt, Artificial Sequence
  Synthetic
ccaggcaguaagggaaggaag

SEQ ID NO: 564394 - RNA, 22 nt, Artificial Sequence
  Synthetic
gccaggcaguaagggaaggaag

SEQ ID NO: 564395 - RNA, 23 nt, Artificial Sequence
  Synthetic
agccaggcaguaagggaaggaag

SEQ ID NO: 564396 - RNA, 24 nt, Artificial Sequence
  Synthetic
aagccaggcaguaagggaaggaag

SEQ ID NO: 564397 - RNA, 18 nt, Artificial Sequence
  Synthetic
uauauuauucuaaggaag

SEQ ID NO: 564398 - RNA, 19 nt, Artificial Sequence
  Synthetic
auauauuauucuaaggaag

SEQ ID NO: 564399 - RNA, 20 nt, Artificial Sequence
  Synthetic
aauauauuauucuaaggaag

SEQ ID NO: 564400 - RNA, 21 nt, Artificial Sequence
  Synthetic
aaauauauuauucuaaggaag

SEQ ID NO: 564401 - RNA, 22 nt, Artificial Sequence
  Synthetic
aaaauauauuauucuaaggaag

SEQ ID NO: 564402 - RNA, 23 nt, Artificial Sequence
  Synthetic
uaaaauauauuauucuaaggaag

SEQ ID NO: 564403 - RNA, 24 nt, Artificial Sequence
  Synthetic
auaaaauauauuauucuaaggaag

SEQ ID NO: 564404 - RNA, 18 nt, Artificial Sequence
  Synthetic
aaacgcaguguaaggaag

SEQ ID NO: 564405 - RNA, 19 nt, Artificial Sequence
  Synthetic
aaaacgcaguguaaggaag

SEQ ID NO: 564406 - RNA, 20 nt, Artificial Sequence
  Synthetic
uaaaacgcaguguaaggaag

SEQ ID NO: 564407 - RNA, 21 nt, Artificial Sequence
  Synthetic
uuaaaacgcaguguaaggaag

SEQ ID NO: 564408 - RNA, 22 nt, Artificial Sequence
  Synthetic
cuuaaaacgcaguguaaggaag

SEQ ID NO: 564409 - RNA, 23 nt, Artificial Sequence
  Synthetic
acuuaaaacgcaguguaaggaag

SEQ ID NO: 564410 - RNA, 24 nt, Artificial Sequence
  Synthetic
gacuuaaaacgcaguguaaggaag

SEQ ID NO: 564411 - RNA, 18 nt, Artificial Sequence
  Synthetic
aucuccagauuaaggaag

SEQ ID NO: 564412 - RNA, 19 nt, Artificial Sequence
  Synthetic
caucuccagauuaaggaag

SEQ ID NO: 564413 - RNA, 20 nt, Artificial Sequence
  Synthetic
gcaucuccagauuaaggaag

SEQ ID NO: 564414 - RNA, 21 nt, Artificial Sequence
  Synthetic
agcaucuccagauuaaggaag

SEQ ID NO: 564415 - RNA, 22 nt, Artificial Sequence
  Synthetic
uagcaucuccagauuaaggaag

SEQ ID NO: 564416 - RNA, 23 nt, Artificial Sequence
  Synthetic
uuagcaucuccagauuaaggaag

SEQ ID NO: 564417 - RNA, 24 nt, Artificial Sequence
  Synthetic
auuagcaucuccagauuaaggaag

SEQ ID NO: 564418 - RNA, 18 nt, Artificial Sequence
  Synthetic
auauagcugcacaggaag

SEQ ID NO: 564419 - RNA, 19 nt, Artificial Sequence
  Synthetic
uauauagcugcacaggaag

SEQ ID NO: 564420 - RNA, 20 nt, Artificial Sequence
  Synthetic
auauauagcugcacaggaag

SEQ ID NO: 564421 - RNA, 21 nt, Artificial Sequence
  Synthetic
uauauauagcugcacaggaag

SEQ ID NO: 564422 - RNA, 22 nt, Artificial Sequence
  Synthetic
auauauauagcugcacaggaag

SEQ ID NO: 564423 - RNA, 23 nt, Artificial Sequence
  Synthetic
uauauauauagcugcacaggaag

SEQ ID NO: 564424 - RNA, 24 nt, Artificial Sequence
  Synthetic
auauauauauagcugcacaggaag

SEQ ID NO: 564425 - RNA, 18 nt, Artificial Sequence
  Synthetic
acacauggucacaggaag

SEQ ID NO: 564426 - RNA, 19 nt, Artificial Sequence
  Synthetic
aacacauggucacaggaag

SEQ ID NO: 564427 - RNA, 20 nt, Artificial Sequence
  Synthetic
gaacacauggucacaggaag

SEQ ID NO: 564428 - RNA, 21 nt, Artificial Sequence
  Synthetic
agaacacauggucacaggaag

SEQ ID NO: 564429 - RNA, 22 nt, Artificial Sequence
  Synthetic
gagaacacauggucacaggaag

SEQ ID NO: 564430 - RNA, 23 nt, Artificial Sequence
  Synthetic
ugagaacacauggucacaggaag

SEQ ID NO: 564431 - RNA, 24 nt, Artificial Sequence
  Synthetic
augagaacacauggucacaggaag

SEQ ID NO: 564432 - RNA, 18 nt, Artificial Sequence
  Synthetic
acaugcaaagacaggaag

SEQ ID NO: 564433 - RNA, 19 nt, Artificial Sequence
  Synthetic
aacaugcaaagacaggaag

SEQ ID NO: 564434 - RNA, 20 nt, Artificial Sequence
  Synthetic
gaacaugcaaagacaggaag

SEQ ID NO: 564435 - RNA, 21 nt, Artificial Sequence
  Synthetic
ggaacaugcaaagacaggaag

SEQ ID NO: 564436 - RNA, 22 nt, Artificial Sequence
  Synthetic
uggaacaugcaaagacaggaag

SEQ ID NO: 564437 - RNA, 23 nt, Artificial Sequence
  Synthetic
auggaacaugcaaagacaggaag

SEQ ID NO: 564438 - RNA, 24 nt, Artificial Sequence
  Synthetic
cauggaacaugcaaagacaggaag

SEQ ID NO: 564439 - RNA, 18 nt, Artificial Sequence
  Synthetic
agaugcaaguacaggaag

SEQ ID NO: 564440 - RNA, 19 nt, Artificial Sequence
  Synthetic
gagaugcaaguacaggaag

SEQ ID NO: 564441 - RNA, 20 nt, Artificial Sequence
  Synthetic
agagaugcaaguacaggaag

SEQ ID NO: 564442 - RNA, 21 nt, Artificial Sequence
  Synthetic
aagagaugcaaguacaggaag

SEQ ID NO: 564443 - RNA, 22 nt, Artificial Sequence
  Synthetic
aaagagaugcaaguacaggaag

SEQ ID NO: 564444 - RNA, 23 nt, Artificial Sequence
  Synthetic
caaagagaugcaaguacaggaag

SEQ ID NO: 564445 - RNA, 24 nt, Artificial Sequence
  Synthetic
gcaaagagaugcaaguacaggaag

SEQ ID NO: 564446 - RNA, 18 nt, Artificial Sequence
  Synthetic
caucugcaaaccaggaag

SEQ ID NO: 564447 - RNA, 19 nt, Artificial Sequence
  Synthetic
ccaucugcaaaccaggaag

SEQ ID NO: 564448 - RNA, 20 nt, Artificial Sequence
  Synthetic
gccaucugcaaaccaggaag

SEQ ID NO: 564449 - RNA, 21 nt, Artificial Sequence
  Synthetic
agccaucugcaaaccaggaag

SEQ ID NO: 564450 - RNA, 22 nt, Artificial Sequence
  Synthetic
aagccaucugcaaaccaggaag

SEQ ID NO: 564451 - RNA, 23 nt, Artificial Sequence
  Synthetic
gaagccaucugcaaaccaggaag

SEQ ID NO: 564452 - RNA, 24 nt, Artificial Sequence
  Synthetic
ggaagccaucugcaaaccaggaag

SEQ ID NO: 564453 - RNA, 18 nt, Artificial Sequence
  Synthetic
ucccagcuacccaggaag

SEQ ID NO: 564454 - RNA, 19 nt, Artificial Sequence
  Synthetic
gucccagcuacccaggaag

SEQ ID NO: 564455 - RNA, 20 nt, Artificial Sequence
  Synthetic
agucccagcuacccaggaag

SEQ ID NO: 564456 - RNA, 21 nt, Artificial Sequence
  Synthetic
uagucccagcuacccaggaag

SEQ ID NO: 564457 - RNA, 22 nt, Artificial Sequence
  Synthetic
guagucccagcuacccaggaag

SEQ ID NO: 564458 - RNA, 23 nt, Artificial Sequence
  Synthetic
aguagucccagcuacccaggaag

SEQ ID NO: 564459 - RNA, 24 nt, Artificial Sequence
  Synthetic
uaguagucccagcuacccaggaag

SEQ ID NO: 564460 - RNA, 18 nt, Artificial Sequence
  Synthetic
ucacuugaccccaggaag

SEQ ID NO: 564461 - RNA, 19 nt, Artificial Sequence
  Synthetic
aucacuugaccccaggaag

SEQ ID NO: 564462 - RNA, 20 nt, Artificial Sequence
  Synthetic
aaucacuugaccccaggaag

SEQ ID NO: 564463 - RNA, 21 nt, Artificial Sequence
  Synthetic
gaaucacuugaccccaggaag

SEQ ID NO: 564464 - RNA, 22 nt, Artificial Sequence
  Synthetic
agaaucacuugaccccaggaag

SEQ ID NO: 564465 - RNA, 23 nt, Artificial Sequence
  Synthetic
gagaaucacuugaccccaggaag

SEQ ID NO: 564466 - RNA, 24 nt, Artificial Sequence
  Synthetic
ggagaaucacuugaccccaggaag

SEQ ID NO: 564467 - RNA, 18 nt, Artificial Sequence
  Synthetic
gaaggguauuccaggaag

SEQ ID NO: 564468 - RNA, 19 nt, Artificial Sequence
  Synthetic
cgaaggguauuccaggaag

SEQ ID NO: 564469 - RNA, 20 nt, Artificial Sequence
  Synthetic
acgaaggguauuccaggaag

SEQ ID NO: 564470 - RNA, 21 nt, Artificial Sequence
  Synthetic
gacgaaggguauuccaggaag

SEQ ID NO: 564471 - RNA, 22 nt, Artificial Sequence
  Synthetic
agacgaaggguauuccaggaag

SEQ ID NO: 564472 - RNA, 23 nt, Artificial Sequence
  Synthetic
aagacgaaggguauuccaggaag

SEQ ID NO: 564473 - RNA, 24 nt, Artificial Sequence
  Synthetic
aaagacgaaggguauuccaggaag

SEQ ID NO: 564474 - RNA, 18 nt, Artificial Sequence
  Synthetic
acaccuggacgcaggaag

SEQ ID NO: 564475 - RNA, 19 nt, Artificial Sequence
  Synthetic
aacaccuggacgcaggaag

SEQ ID NO: 564476 - RNA, 20 nt, Artificial Sequence
  Synthetic
gaacaccuggacgcaggaag

SEQ ID NO: 564477 - RNA, 21 nt, Artificial Sequence
  Synthetic
agaacaccuggacgcaggaag

SEQ ID NO: 564478 - RNA, 22 nt, Artificial Sequence
  Synthetic
gagaacaccuggacgcaggaag

SEQ ID NO: 564479 - RNA, 23 nt, Artificial Sequence
  Synthetic
ugagaacaccuggacgcaggaag

SEQ ID NO: 564480 - RNA, 24 nt, Artificial Sequence
  Synthetic
augagaacaccuggacgcaggaag

SEQ ID NO: 564481 - RNA, 18 nt, Artificial Sequence
  Synthetic
uuccugcaagucaggaag

SEQ ID NO: 564482 - RNA, 19 nt, Artificial Sequence
  Synthetic
cuuccugcaagucaggaag

SEQ ID NO: 564483 - RNA, 20 nt, Artificial Sequence
  Synthetic
acuuccugcaagucaggaag

SEQ ID NO: 564484 - RNA, 21 nt, Artificial Sequence
  Synthetic
aacuuccugcaagucaggaag

SEQ ID NO: 564485 - RNA, 22 nt, Artificial Sequence
  Synthetic
uaacuuccugcaagucaggaag

SEQ ID NO: 564486 - RNA, 23 nt, Artificial Sequence
  Synthetic
uuaacuuccugcaagucaggaag

SEQ ID NO: 564487 - RNA, 24 nt, Artificial Sequence
  Synthetic
auuaacuuccugcaagucaggaag

SEQ ID NO: 564488 - RNA, 18 nt, Artificial Sequence
  Synthetic
uggggacuacagaggaag

SEQ ID NO: 564489 - RNA, 19 nt, Artificial Sequence
  Synthetic
cuggggacuacagaggaag

SEQ ID NO: 564490 - RNA, 20 nt, Artificial Sequence
  Synthetic
acuggggacuacagaggaag

SEQ ID NO: 564491 - RNA, 21 nt, Artificial Sequence
  Synthetic
cacuggggacuacagaggaag

SEQ ID NO: 564492 - RNA, 22 nt, Artificial Sequence
  Synthetic
acacuggggacuacagaggaag

SEQ ID NO: 564493 - RNA, 23 nt, Artificial Sequence
  Synthetic
gacacuggggacuacagaggaag

SEQ ID NO: 564494 - RNA, 24 nt, Artificial Sequence
  Synthetic
agacacuggggacuacagaggaag

SEQ ID NO: 564495 - RNA, 18 nt, Artificial Sequence
  Synthetic
uuuguagcagagaggaag

SEQ ID NO: 564496 - RNA, 19 nt, Artificial Sequence
  Synthetic
auuuguagcagagaggaag

SEQ ID NO: 564497 - RNA, 20 nt, Artificial Sequence
  Synthetic
aauuuguagcagagaggaag

SEQ ID NO: 564498 - RNA, 21 nt, Artificial Sequence
  Synthetic
uaauuuguagcagagaggaag

SEQ ID NO: 564499 - RNA, 22 nt, Artificial Sequence
  Synthetic
auaauuuguagcagagaggaag

SEQ ID NO: 564500 - RNA, 23 nt, Artificial Sequence
  Synthetic
uauaauuuguagcagagaggaag

SEQ ID NO: 564501 - RNA, 24 nt, Artificial Sequence
  Synthetic
guauaauuuguagcagagaggaag

SEQ ID NO: 564502 - RNA, 18 nt, Artificial Sequence
  Synthetic
uuugggaggccgaggaag

SEQ ID NO: 564503 - RNA, 19 nt, Artificial Sequence
  Synthetic
cuuugggaggccgaggaag

SEQ ID NO: 564504 - RNA, 20 nt, Artificial Sequence
  Synthetic
acuuugggaggccgaggaag

SEQ ID NO: 564505 - RNA, 21 nt, Artificial Sequence
  Synthetic
cacuuugggaggccgaggaag

SEQ ID NO: 564506 - RNA, 22 nt, Artificial Sequence
  Synthetic
gcacuuugggaggccgaggaag

SEQ ID NO: 564507 - RNA, 23 nt, Artificial Sequence
  Synthetic
agcacuuugggaggccgaggaag

SEQ ID NO: 564508 - RNA, 24 nt, Artificial Sequence
  Synthetic
uagcacuuugggaggccgaggaag

SEQ ID NO: 564509 - RNA, 18 nt, Artificial Sequence
  Synthetic
agggagggagggaggaag

SEQ ID NO: 564510 - RNA, 19 nt, Artificial Sequence
  Synthetic
gagggagggagggaggaag

SEQ ID NO: 564511 - RNA, 20 nt, Artificial Sequence
  Synthetic
ggagggagggagggaggaag

SEQ ID NO: 564512 - RNA, 21 nt, Artificial Sequence
  Synthetic
gggagggagggagggaggaag

SEQ ID NO: 564513 - RNA, 22 nt, Artificial Sequence
  Synthetic
agggagggagggagggaggaag

SEQ ID NO: 564514 - RNA, 23 nt, Artificial Sequence
  Synthetic
cagggagggagggagggaggaag

SEQ ID NO: 564515 - RNA, 24 nt, Artificial Sequence
  Synthetic
ucagggagggagggagggaggaag

SEQ ID NO: 564516 - RNA, 18 nt, Artificial Sequence
  Synthetic
uguagaugggggaggaag

SEQ ID NO: 564517 - RNA, 19 nt, Artificial Sequence
  Synthetic
guguagaugggggaggaag

SEQ ID NO: 564518 - RNA, 20 nt, Artificial Sequence
  Synthetic
uguguagaugggggaggaag

SEQ ID NO: 564519 - RNA, 21 nt, Artificial Sequence
  Synthetic
guguguagaugggggaggaag

SEQ ID NO: 564520 - RNA, 22 nt, Artificial Sequence
  Synthetic
uguguguagaugggggaggaag

SEQ ID NO: 564521 - RNA, 23 nt, Artificial Sequence
  Synthetic
auguguguagaugggggaggaag

SEQ ID NO: 564522 - RNA, 24 nt, Artificial Sequence
  Synthetic
uauguguguagaugggggaggaag

SEQ ID NO: 564523 - RNA, 18 nt, Artificial Sequence
  Synthetic
cauccgauugggaggaag

SEQ ID NO: 564524 - RNA, 19 nt, Artificial Sequence
  Synthetic
acauccgauugggaggaag

SEQ ID NO: 564525 - RNA, 20 nt, Artificial Sequence
  Synthetic
uacauccgauugggaggaag

SEQ ID NO: 564526 - RNA, 21 nt, Artificial Sequence
  Synthetic
uuacauccgauugggaggaag

SEQ ID NO: 564527 - RNA, 22 nt, Artificial Sequence
  Synthetic
cuuacauccgauugggaggaag

SEQ ID NO: 564528 - RNA, 23 nt, Artificial Sequence
  Synthetic
ccuuacauccgauugggaggaag

SEQ ID NO: 564529 - RNA, 24 nt, Artificial Sequence
  Synthetic
accuuacauccgauugggaggaag

SEQ ID NO: 564530 - RNA, 18 nt, Artificial Sequence
  Synthetic
acuuccauuuggaggaag

SEQ ID NO: 564531 - RNA, 19 nt, Artificial Sequence
  Synthetic
uacuuccauuuggaggaag

SEQ ID NO: 564532 - RNA, 20 nt, Artificial Sequence
  Synthetic
uuacuuccauuuggaggaag

SEQ ID NO: 564533 - RNA, 21 nt, Artificial Sequence
  Synthetic
uuuacuuccauuuggaggaag

SEQ ID NO: 564534 - RNA, 22 nt, Artificial Sequence
  Synthetic
uuuuacuuccauuuggaggaag

SEQ ID NO: 564535 - RNA, 23 nt, Artificial Sequence
  Synthetic
uuuuuacuuccauuuggaggaag

SEQ ID NO: 564536 - RNA, 24 nt, Artificial Sequence
  Synthetic
cuuuuuacuuccauuuggaggaag

SEQ ID NO: 564537 - RNA, 18 nt, Artificial Sequence
  Synthetic
acugugaaaaugaggaag

SEQ ID NO: 564538 - RNA, 19 nt, Artificial Sequence
  Synthetic
gacugugaaaaugaggaag

SEQ ID NO: 564539 - RNA, 20 nt, Artificial Sequence
  Synthetic
ugacugugaaaaugaggaag

SEQ ID NO: 564540 - RNA, 21 nt, Artificial Sequence
  Synthetic
augacugugaaaaugaggaag

SEQ ID NO: 564541 - RNA, 22 nt, Artificial Sequence
  Synthetic
aaugacugugaaaaugaggaag

SEQ ID NO: 564542 - RNA, 23 nt, Artificial Sequence
  Synthetic
aaaugacugugaaaaugaggaag

SEQ ID NO: 564543 - RNA, 24 nt, Artificial Sequence
  Synthetic
aaaaugacugugaaaaugaggaag

SEQ ID NO: 564544 - RNA, 18 nt, Artificial Sequence
  Synthetic
cucaaacugcugaggaag

SEQ ID NO: 564545 - RNA, 19 nt, Artificial Sequence
  Synthetic
gcucaaacugcugaggaag

SEQ ID NO: 564546 - RNA, 20 nt, Artificial Sequence
  Synthetic
cgcucaaacugcugaggaag

SEQ ID NO: 564547 - RNA, 21 nt, Artificial Sequence
  Synthetic
ccgcucaaacugcugaggaag

SEQ ID NO: 564548 - RNA, 22 nt, Artificial Sequence
  Synthetic
cccgcucaaacugcugaggaag

SEQ ID NO: 564549 - RNA, 23 nt, Artificial Sequence
  Synthetic
ccccgcucaaacugcugaggaag

SEQ ID NO: 564550 - RNA, 24 nt, Artificial Sequence
  Synthetic
accccgcucaaacugcugaggaag

SEQ ID NO: 564551 - RNA, 18 nt, Artificial Sequence
  Synthetic
ugacagugugugaggaag

SEQ ID NO: 564552 - RNA, 19 nt, Artificial Sequence
  Synthetic
uugacagugugugaggaag

SEQ ID NO: 564553 - RNA, 20 nt, Artificial Sequence
  Synthetic
cuugacagugugugaggaag

SEQ ID NO: 564554 - RNA, 21 nt, Artificial Sequence
  Synthetic
gcuugacagugugugaggaag

SEQ ID NO: 564555 - RNA, 22 nt, Artificial Sequence
  Synthetic
agcuugacagugugugaggaag

SEQ ID NO: 564556 - RNA, 23 nt, Artificial Sequence
  Synthetic
aagcuugacagugugugaggaag

SEQ ID NO: 564557 - RNA, 24 nt, Artificial Sequence
  Synthetic
caagcuugacagugugugaggaag

SEQ ID NO: 564558 - RNA, 18 nt, Artificial Sequence
  Synthetic
cuagaaaaauauaggaag

SEQ ID NO: 564559 - RNA, 19 nt, Artificial Sequence
  Synthetic
ucuagaaaaauauaggaag

SEQ ID NO: 564560 - RNA, 20 nt, Artificial Sequence
  Synthetic
aucuagaaaaauauaggaag

SEQ ID NO: 564561 - RNA, 21 nt, Artificial Sequence
  Synthetic
aaucuagaaaaauauaggaag

SEQ ID NO: 564562 - RNA, 22 nt, Artificial Sequence
  Synthetic
gaaucuagaaaaauauaggaag

SEQ ID NO: 564563 - RNA, 23 nt, Artificial Sequence
  Synthetic
agaaucuagaaaaauauaggaag

SEQ ID NO: 564564 - RNA, 24 nt, Artificial Sequence
  Synthetic
aagaaucuagaaaaauauaggaag

SEQ ID NO: 564565 - RNA, 18 nt, Artificial Sequence
  Synthetic
cuggggaaggcuaggaag

SEQ ID NO: 564566 - RNA, 19 nt, Artificial Sequence
  Synthetic
ccuggggaaggcuaggaag

SEQ ID NO: 564567 - RNA, 20 nt, Artificial Sequence
  Synthetic
uccuggggaaggcuaggaag

SEQ ID NO: 564568 - RNA, 21 nt, Artificial Sequence
  Synthetic
cuccuggggaaggcuaggaag

SEQ ID NO: 564569 - RNA, 22 nt, Artificial Sequence
  Synthetic
ccuccuggggaaggcuaggaag

SEQ ID NO: 564570 - RNA, 23 nt, Artificial Sequence
  Synthetic
uccuccuggggaaggcuaggaag

SEQ ID NO: 564571 - RNA, 24 nt, Artificial Sequence
  Synthetic
auccuccuggggaaggcuaggaag

SEQ ID NO: 564572 - RNA, 18 nt, Artificial Sequence
  Synthetic
ggugaugacauuaggaag

SEQ ID NO: 564573 - RNA, 19 nt, Artificial Sequence
  Synthetic
aggugaugacauuaggaag

SEQ ID NO: 564574 - RNA, 20 nt, Artificial Sequence
  Synthetic
aaggugaugacauuaggaag

SEQ ID NO: 564575 - RNA, 21 nt, Artificial Sequence
  Synthetic
caaggugaugacauuaggaag

SEQ ID NO: 564576 - RNA, 22 nt, Artificial Sequence
  Synthetic
ucaaggugaugacauuaggaag

SEQ ID NO: 564577 - RNA, 23 nt, Artificial Sequence
  Synthetic
cucaaggugaugacauuaggaag

SEQ ID NO: 564578 - RNA, 24 nt, Artificial Sequence
  Synthetic
ccucaaggugaugacauuaggaag

SEQ ID NO: 564579 - RNA, 18 nt, Artificial Sequence
  Synthetic
agauggauguuuaggaag

SEQ ID NO: 564580 - RNA, 19 nt, Artificial Sequence
  Synthetic
aagauggauguuuaggaag

SEQ ID NO: 564581 - RNA, 20 nt, Artificial Sequence
  Synthetic
aaagauggauguuuaggaag

SEQ ID NO: 564582 - RNA, 21 nt, Artificial Sequence
  Synthetic
gaaagauggauguuuaggaag

SEQ ID NO: 564583 - RNA, 22 nt, Artificial Sequence
  Synthetic
ggaaagauggauguuuaggaag

SEQ ID NO: 564584 - RNA, 23 nt, Artificial Sequence
  Synthetic
aggaaagauggauguuuaggaag

SEQ ID NO: 564585 - RNA, 24 nt, Artificial Sequence
  Synthetic
aaggaaagauggauguuuaggaag

SEQ ID NO: 564586 - RNA, 18 nt, Artificial Sequence
  Synthetic
agagcucaguuacggaag

SEQ ID NO: 564587 - RNA, 19 nt, Artificial Sequence
  Synthetic
aagagcucaguuacggaag

SEQ ID NO: 564588 - RNA, 20 nt, Artificial Sequence
  Synthetic
uaagagcucaguuacggaag

SEQ ID NO: 564589 - RNA, 21 nt, Artificial Sequence
  Synthetic
cuaagagcucaguuacggaag

SEQ ID NO: 564590 - RNA, 22 nt, Artificial Sequence
  Synthetic
ccuaagagcucaguuacggaag

SEQ ID NO: 564591 - RNA, 23 nt, Artificial Sequence
  Synthetic
cccuaagagcucaguuacggaag

SEQ ID NO: 564592 - RNA, 24 nt, Artificial Sequence
  Synthetic
acccuaagagcucaguuacggaag

SEQ ID NO: 564593 - RNA, 18 nt, Artificial Sequence
  Synthetic
accaaaggccuccggaag

SEQ ID NO: 564594 - RNA, 19 nt, Artificial Sequence
  Synthetic
aaccaaaggccuccggaag

SEQ ID NO: 564595 - RNA, 20 nt, Artificial Sequence
  Synthetic
uaaccaaaggccuccggaag

SEQ ID NO: 564596 - RNA, 21 nt, Artificial Sequence
  Synthetic
uuaaccaaaggccuccggaag

SEQ ID NO: 564597 - RNA, 22 nt, Artificial Sequence
  Synthetic
uuuaaccaaaggccuccggaag

SEQ ID NO: 564598 - RNA, 23 nt, Artificial Sequence
  Synthetic
guuuaaccaaaggccuccggaag

SEQ ID NO: 564599 - RNA, 24 nt, Artificial Sequence
  Synthetic
gguuuaaccaaaggccuccggaag

SEQ ID NO: 564600 - RNA, 18 nt, Artificial Sequence
  Synthetic
acauggaaacagcggaag

SEQ ID NO: 564601 - RNA, 19 nt, Artificial Sequence
  Synthetic
uacauggaaacagcggaag

SEQ ID NO: 564602 - RNA, 20 nt, Artificial Sequence
  Synthetic
cuacauggaaacagcggaag

SEQ ID NO: 564603 - RNA, 21 nt, Artificial Sequence
  Synthetic
ucuacauggaaacagcggaag

SEQ ID NO: 564604 - RNA, 22 nt, Artificial Sequence
  Synthetic
aucuacauggaaacagcggaag

SEQ ID NO: 564605 - RNA, 23 nt, Artificial Sequence
  Synthetic
caucuacauggaaacagcggaag

SEQ ID NO: 564606 - RNA, 24 nt, Artificial Sequence
  Synthetic
ucaucuacauggaaacagcggaag

SEQ ID NO: 564607 - RNA, 18 nt, Artificial Sequence
  Synthetic
gaaauggggucucggaag

SEQ ID NO: 564608 - RNA, 19 nt, Artificial Sequence
  Synthetic
ugaaauggggucucggaag

SEQ ID NO: 564609 - RNA, 20 nt, Artificial Sequence
  Synthetic
cugaaauggggucucggaag

SEQ ID NO: 564610 - RNA, 21 nt, Artificial Sequence
  Synthetic
ucugaaauggggucucggaag

SEQ ID NO: 564611 - RNA, 22 nt, Artificial Sequence
  Synthetic
cucugaaauggggucucggaag

SEQ ID NO: 564612 - RNA, 23 nt, Artificial Sequence
  Synthetic
ccucugaaauggggucucggaag

SEQ ID NO: 564613 - RNA, 24 nt, Artificial Sequence
  Synthetic
uccucugaaauggggucucggaag

SEQ ID NO: 564614 - RNA, 18 nt, Artificial Sequence
  Synthetic
uuauguuuaaaagggaag

SEQ ID NO: 564615 - RNA, 19 nt, Artificial Sequence
  Synthetic
auuauguuuaaaagggaag

SEQ ID NO: 564616 - RNA, 20 nt, Artificial Sequence
  Synthetic
aauuauguuuaaaagggaag

SEQ ID NO: 564617 - RNA, 21 nt, Artificial Sequence
  Synthetic
aaauuauguuuaaaagggaag

SEQ ID NO: 564618 - RNA, 22 nt, Artificial Sequence
  Synthetic
gaaauuauguuuaaaagggaag

SEQ ID NO: 564619 - RNA, 23 nt, Artificial Sequence
  Synthetic
ggaaauuauguuuaaaagggaag

SEQ ID NO: 564620 - RNA, 24 nt, Artificial Sequence
  Synthetic
uggaaauuauguuuaaaagggaag

SEQ ID NO: 564621 - RNA, 18 nt, Artificial Sequence
  Synthetic
ucaaguugagaagggaag

SEQ ID NO: 564622 - RNA, 19 nt, Artificial Sequence
  Synthetic
aucaaguugagaagggaag

SEQ ID NO: 564623 - RNA, 20 nt, Artificial Sequence
  Synthetic
gaucaaguugagaagggaag

SEQ ID NO: 564624 - RNA, 21 nt, Artificial Sequence
  Synthetic
ugaucaaguugagaagggaag

SEQ ID NO: 564625 - RNA, 22 nt, Artificial Sequence
  Synthetic
gugaucaaguugagaagggaag

SEQ ID NO: 564626 - RNA, 23 nt, Artificial Sequence
  Synthetic
ugugaucaaguugagaagggaag

SEQ ID NO: 564627 - RNA, 24 nt, Artificial Sequence
  Synthetic
cugugaucaaguugagaagggaag

SEQ ID NO: 564628 - RNA, 18 nt, Artificial Sequence
  Synthetic
aagggaagggaagggaag

SEQ ID NO: 564629 - RNA, 19 nt, Artificial Sequence
  Synthetic
gaagggaagggaagggaag

SEQ ID NO: 564630 - RNA, 20 nt, Artificial Sequence
  Synthetic
ggaagggaagggaagggaag

SEQ ID NO: 564631 - RNA, 21 nt, Artificial Sequence
  Synthetic
gggaagggaagggaagggaag

SEQ ID NO: 564632 - RNA, 22 nt, Artificial Sequence
  Synthetic
agggaagggaagggaagggaag

SEQ ID NO: 564633 - RNA, 23 nt, Artificial Sequence
  Synthetic
gagggaagggaagggaagggaag

SEQ ID NO: 564634 - RNA, 24 nt, Artificial Sequence
  Synthetic
ggagggaagggaagggaagggaag

SEQ ID NO: 564635 - RNA, 18 nt, Artificial Sequence
  Synthetic
gaggggagggaagggaag

SEQ ID NO: 564636 - RNA, 19 nt, Artificial Sequence
  Synthetic
agaggggagggaagggaag

SEQ ID NO: 564637 - RNA, 20 nt, Artificial Sequence
  Synthetic
gagaggggagggaagggaag

SEQ ID NO: 564638 - RNA, 21 nt, Artificial Sequence
  Synthetic
ggagaggggagggaagggaag

SEQ ID NO: 564639 - RNA, 22 nt, Artificial Sequence
  Synthetic
aggagaggggagggaagggaag

SEQ ID NO: 564640 - RNA, 23 nt, Artificial Sequence
  Synthetic
aaggagaggggagggaagggaag

SEQ ID NO: 564641 - RNA, 24 nt, Artificial Sequence
  Synthetic
gaaggagaggggagggaagggaag

SEQ ID NO: 564642 - RNA, 18 nt, Artificial Sequence
  Synthetic
caucuaugggaagggaag

SEQ ID NO: 564643 - RNA, 19 nt, Artificial Sequence
  Synthetic
ucaucuaugggaagggaag

SEQ ID NO: 564644 - RNA, 20 nt, Artificial Sequence
  Synthetic
gucaucuaugggaagggaag

SEQ ID NO: 564645 - RNA, 21 nt, Artificial Sequence
  Synthetic
ugucaucuaugggaagggaag

SEQ ID NO: 564646 - RNA, 22 nt, Artificial Sequence
  Synthetic
augucaucuaugggaagggaag

SEQ ID NO: 564647 - RNA, 23 nt, Artificial Sequence
  Synthetic
gaugucaucuaugggaagggaag

SEQ ID NO: 564648 - RNA, 24 nt, Artificial Sequence
  Synthetic
ugaugucaucuaugggaagggaag

SEQ ID NO: 564649 - RNA, 18 nt, Artificial Sequence
  Synthetic
aucuaugaauaagggaag

SEQ ID NO: 564650 - RNA, 19 nt, Artificial Sequence
  Synthetic
aaucuaugaauaagggaag

SEQ ID NO: 564651 - RNA, 20 nt, Artificial Sequence
  Synthetic
gaaucuaugaauaagggaag

SEQ ID NO: 564652 - RNA, 21 nt, Artificial Sequence
  Synthetic
ugaaucuaugaauaagggaag

SEQ ID NO: 564653 - RNA, 22 nt, Artificial Sequence
  Synthetic
augaaucuaugaauaagggaag

SEQ ID NO: 564654 - RNA, 23 nt, Artificial Sequence
  Synthetic
caugaaucuaugaauaagggaag

SEQ ID NO: 564655 - RNA, 24 nt, Artificial Sequence
  Synthetic
gcaugaaucuaugaauaagggaag

SEQ ID NO: 564656 - RNA, 18 nt, Artificial Sequence
  Synthetic
aauagggaaacagggaag

SEQ ID NO: 564657 - RNA, 19 nt, Artificial Sequence
  Synthetic
aaauagggaaacagggaag

SEQ ID NO: 564658 - RNA, 20 nt, Artificial Sequence
  Synthetic
aaaauagggaaacagggaag

SEQ ID NO: 564659 - RNA, 21 nt, Artificial Sequence
  Synthetic
gaaaauagggaaacagggaag

SEQ ID NO: 564660 - RNA, 22 nt, Artificial Sequence
  Synthetic
agaaaauagggaaacagggaag

SEQ ID NO: 564661 - RNA, 23 nt, Artificial Sequence
  Synthetic
gagaaaauagggaaacagggaag

SEQ ID NO: 564662 - RNA, 24 nt, Artificial Sequence
  Synthetic
agagaaaauagggaaacagggaag

SEQ ID NO: 564663 - RNA, 18 nt, Artificial Sequence
  Synthetic
uauuagcugccagggaag

SEQ ID NO: 564664 - RNA, 19 nt, Artificial Sequence
  Synthetic
auauuagcugccagggaag

SEQ ID NO: 564665 - RNA, 20 nt, Artificial Sequence
  Synthetic
aauauuagcugccagggaag

SEQ ID NO: 564666 - RNA, 21 nt, Artificial Sequence
  Synthetic
caauauuagcugccagggaag

SEQ ID NO: 564667 - RNA, 22 nt, Artificial Sequence
  Synthetic
acaauauuagcugccagggaag

SEQ ID NO: 564668 - RNA, 23 nt, Artificial Sequence
  Synthetic
uacaauauuagcugccagggaag

SEQ ID NO: 564669 - RNA, 24 nt, Artificial Sequence
  Synthetic
auacaauauuagcugccagggaag

SEQ ID NO: 564670 - RNA, 18 nt, Artificial Sequence
  Synthetic
uuaacggggucagggaag

SEQ ID NO: 564671 - RNA, 19 nt, Artificial Sequence
  Synthetic
auuaacggggucagggaag

SEQ ID NO: 564672 - RNA, 20 nt, Artificial Sequence
  Synthetic
gauuaacggggucagggaag

SEQ ID NO: 564673 - RNA, 21 nt, Artificial Sequence
  Synthetic
ggauuaacggggucagggaag

SEQ ID NO: 564674 - RNA, 22 nt, Artificial Sequence
  Synthetic
gggauuaacggggucagggaag

SEQ ID NO: 564675 - RNA, 23 nt, Artificial Sequence
  Synthetic
ugggauuaacggggucagggaag

SEQ ID NO: 564676 - RNA, 24 nt, Artificial Sequence
  Synthetic
cugggauuaacggggucagggaag

SEQ ID NO: 564677 - RNA, 18 nt, Artificial Sequence
  Synthetic
gugaaagugucagggaag

SEQ ID NO: 564678 - RNA, 19 nt, Artificial Sequence
  Synthetic
ugugaaagugucagggaag

SEQ ID NO: 564679 - RNA, 20 nt, Artificial Sequence
  Synthetic
cugugaaagugucagggaag

SEQ ID NO: 564680 - RNA, 21 nt, Artificial Sequence
  Synthetic
ucugugaaagugucagggaag

SEQ ID NO: 564681 - RNA, 22 nt, Artificial Sequence
  Synthetic
gucugugaaagugucagggaag

SEQ ID NO: 564682 - RNA, 23 nt, Artificial Sequence
  Synthetic
ugucugugaaagugucagggaag

SEQ ID NO: 564683 - RNA, 24 nt, Artificial Sequence
  Synthetic
cugucugugaaagugucagggaag

SEQ ID NO: 564684 - RNA, 18 nt, Artificial Sequence
  Synthetic
aaugagugaggagggaag

SEQ ID NO: 564685 - RNA, 19 nt, Artificial Sequence
  Synthetic
gaaugagugaggagggaag

SEQ ID NO: 564686 - RNA, 20 nt, Artificial Sequence
  Synthetic
agaaugagugaggagggaag

SEQ ID NO: 564687 - RNA, 21 nt, Artificial Sequence
  Synthetic
gagaaugagugaggagggaag

SEQ ID NO: 564688 - RNA, 22 nt, Artificial Sequence
  Synthetic
ggagaaugagugaggagggaag

SEQ ID NO: 564689 - RNA, 23 nt, Artificial Sequence
  Synthetic
aggagaaugagugaggagggaag

SEQ ID NO: 564690 - RNA, 24 nt, Artificial Sequence
  Synthetic
aaggagaaugagugaggagggaag

SEQ ID NO: 564691 - RNA, 18 nt, Artificial Sequence
  Synthetic
aguaacuccggagggaag

SEQ ID NO: 564692 - RNA, 19 nt, Artificial Sequence
  Synthetic
aaguaacuccggagggaag

SEQ ID NO: 564693 - RNA, 20 nt, Artificial Sequence
  Synthetic
uaaguaacuccggagggaag

SEQ ID NO: 564694 - RNA, 21 nt, Artificial Sequence
  Synthetic
cuaaguaacuccggagggaag

SEQ ID NO: 564695 - RNA, 22 nt, Artificial Sequence
  Synthetic
gcuaaguaacuccggagggaag

SEQ ID NO: 564696 - RNA, 23 nt, Artificial Sequence
  Synthetic
agcuaaguaacuccggagggaag

SEQ ID NO: 564697 - RNA, 24 nt, Artificial Sequence
  Synthetic
gagcuaaguaacuccggagggaag

SEQ ID NO: 564698 - RNA, 18 nt, Artificial Sequence
  Synthetic
gugagguagugagggaag

SEQ ID NO: 564699 - RNA, 19 nt, Artificial Sequence
  Synthetic
ugugagguagugagggaag

SEQ ID NO: 564700 - RNA, 20 nt, Artificial Sequence
  Synthetic
uugugagguagugagggaag

SEQ ID NO: 564701 - RNA, 21 nt, Artificial Sequence
  Synthetic
uuugugagguagugagggaag

SEQ ID NO: 564702 - RNA, 22 nt, Artificial Sequence
  Synthetic
uuuugugagguagugagggaag

SEQ ID NO: 564703 - RNA, 23 nt, Artificial Sequence
  Synthetic
uuuuugugagguagugagggaag

SEQ ID NO: 564704 - RNA, 24 nt, Artificial Sequence
  Synthetic
cuuuuugugagguagugagggaag

SEQ ID NO: 564705 - RNA, 18 nt, Artificial Sequence
  Synthetic
gaaagcaggauagggaag

SEQ ID NO: 564706 - RNA, 19 nt, Artificial Sequence
  Synthetic
ugaaagcaggauagggaag

SEQ ID NO: 564707 - RNA, 20 nt, Artificial Sequence
  Synthetic
augaaagcaggauagggaag

SEQ ID NO: 564708 - RNA, 21 nt, Artificial Sequence
  Synthetic
aaugaaagcaggauagggaag

SEQ ID NO: 564709 - RNA, 22 nt, Artificial Sequence
  Synthetic
gaaugaaagcaggauagggaag

SEQ ID NO: 564710 - RNA, 23 nt, Artificial Sequence
  Synthetic
agaaugaaagcaggauagggaag

SEQ ID NO: 564711 - RNA, 24 nt, Artificial Sequence
  Synthetic
aagaaugaaagcaggauagggaag

SEQ ID NO: 564712 - RNA, 18 nt, Artificial Sequence
  Synthetic
ccuagugagguagggaag

SEQ ID NO: 564713 - RNA, 19 nt, Artificial Sequence
  Synthetic
uccuagugagguagggaag

SEQ ID NO: 564714 - RNA, 20 nt, Artificial Sequence
  Synthetic
auccuagugagguagggaag

SEQ ID NO: 564715 - RNA, 21 nt, Artificial Sequence
  Synthetic
cauccuagugagguagggaag

SEQ ID NO: 564716 - RNA, 22 nt, Artificial Sequence
  Synthetic
acauccuagugagguagggaag

SEQ ID NO: 564717 - RNA, 23 nt, Artificial Sequence
  Synthetic
aacauccuagugagguagggaag

SEQ ID NO: 564718 - RNA, 24 nt, Artificial Sequence
  Synthetic
caacauccuagugagguagggaag

SEQ ID NO: 564719 - RNA, 19 nt, Artificial Sequence
  Synthetic
aucccagcuacucgggaag

SEQ ID NO: 564720 - RNA, 20 nt, Artificial Sequence
  Synthetic
aaucccagcuacucgggaag

SEQ ID NO: 564721 - RNA, 21 nt, Artificial Sequence
  Synthetic
uaaucccagcuacucgggaag

SEQ ID NO: 564722 - RNA, 22 nt, Artificial Sequence
  Synthetic
guaaucccagcuacucgggaag

SEQ ID NO: 564723 - RNA, 23 nt, Artificial Sequence
  Synthetic
uguaaucccagcuacucgggaag

SEQ ID NO: 564724 - RNA, 24 nt, Artificial Sequence
  Synthetic
cuguaaucccagcuacucgggaag

SEQ ID NO: 564725 - RNA, 18 nt, Artificial Sequence
  Synthetic
uguccuuaaaaggggaag

SEQ ID NO: 564726 - RNA, 19 nt, Artificial Sequence
  Synthetic
cuguccuuaaaaggggaag

SEQ ID NO: 564727 - RNA, 20 nt, Artificial Sequence
  Synthetic
ucuguccuuaaaaggggaag

SEQ ID NO: 564728 - RNA, 21 nt, Artificial Sequence
  Synthetic
cucuguccuuaaaaggggaag

SEQ ID NO: 564729 - RNA, 22 nt, Artificial Sequence
  Synthetic
acucuguccuuaaaaggggaag

SEQ ID NO: 564730 - RNA, 23 nt, Artificial Sequence
  Synthetic
gacucuguccuuaaaaggggaag

SEQ ID NO: 564731 - RNA, 24 nt, Artificial Sequence
  Synthetic
ugacucuguccuuaaaaggggaag

SEQ ID NO: 564732 - RNA, 18 nt, Artificial Sequence
  Synthetic
uuuuguauuaaggggaag

SEQ ID NO: 564733 - RNA, 19 nt, Artificial Sequence
  Synthetic
cuuuuguauuaaggggaag

SEQ ID NO: 564734 - RNA, 20 nt, Artificial Sequence
  Synthetic
gcuuuuguauuaaggggaag

SEQ ID NO: 564735 - RNA, 21 nt, Artificial Sequence
  Synthetic
ggcuuuuguauuaaggggaag

SEQ ID NO: 564736 - RNA, 22 nt, Artificial Sequence
  Synthetic
gggcuuuuguauuaaggggaag

SEQ ID NO: 564737 - RNA, 23 nt, Artificial Sequence
  Synthetic
ggggcuuuuguauuaaggggaag

SEQ ID NO: 564738 - RNA, 24 nt, Artificial Sequence
  Synthetic
uggggcuuuuguauuaaggggaag

SEQ ID NO: 564739 - RNA, 18 nt, Artificial Sequence
  Synthetic
uacucaagucaggggaag

SEQ ID NO: 564740 - RNA, 19 nt, Artificial Sequence
  Synthetic
auacucaagucaggggaag

SEQ ID NO: 564741 - RNA, 20 nt, Artificial Sequence
  Synthetic
aauacucaagucaggggaag

SEQ ID NO: 564742 - RNA, 21 nt, Artificial Sequence
  Synthetic
aaauacucaagucaggggaag

SEQ ID NO: 564743 - RNA, 22 nt, Artificial Sequence
  Synthetic
gaaauacucaagucaggggaag

SEQ ID NO: 564744 - RNA, 23 nt, Artificial Sequence
  Synthetic
agaaauacucaagucaggggaag

SEQ ID NO: 564745 - RNA, 24 nt, Artificial Sequence
  Synthetic
gagaaauacucaagucaggggaag

SEQ ID NO: 564746 - RNA, 18 nt, Artificial Sequence
  Synthetic
ggaaauauugaggggaag

SEQ ID NO: 564747 - RNA, 19 nt, Artificial Sequence
  Synthetic
uggaaauauugaggggaag

SEQ ID NO: 564748 - RNA, 20 nt, Artificial Sequence
  Synthetic
auggaaauauugaggggaag

SEQ ID NO: 564749 - RNA, 21 nt, Artificial Sequence
  Synthetic
gauggaaauauugaggggaag

SEQ ID NO: 564750 - RNA, 22 nt, Artificial Sequence
  Synthetic
ggauggaaauauugaggggaag

SEQ ID NO: 564751 - RNA, 23 nt, Artificial Sequence
  Synthetic
gggauggaaauauugaggggaag

SEQ ID NO: 564752 - RNA, 24 nt, Artificial Sequence
  Synthetic
agggauggaaauauugaggggaag

SEQ ID NO: 564753 - RNA, 18 nt, Artificial Sequence
  Synthetic
cuuccuuaauaggggaag

SEQ ID NO: 564754 - RNA, 19 nt, Artificial Sequence
  Synthetic
ucuuccuuaauaggggaag

SEQ ID NO: 564755 - RNA, 20 nt, Artificial Sequence
  Synthetic
uucuuccuuaauaggggaag

SEQ ID NO: 564756 - RNA, 21 nt, Artificial Sequence
  Synthetic
cuucuuccuuaauaggggaag

SEQ ID NO: 564757 - RNA, 22 nt, Artificial Sequence
  Synthetic
ucuucuuccuuaauaggggaag

SEQ ID NO: 564758 - RNA, 23 nt, Artificial Sequence
  Synthetic
cucuucuuccuuaauaggggaag

SEQ ID NO: 564759 - RNA, 24 nt, Artificial Sequence
  Synthetic
acucuucuuccuuaauaggggaag

SEQ ID NO: 564760 - RNA, 18 nt, Artificial Sequence
  Synthetic
auagaagcuuaggggaag

SEQ ID NO: 564761 - RNA, 19 nt, Artificial Sequence
  Synthetic
cauagaagcuuaggggaag

SEQ ID NO: 564762 - RNA, 20 nt, Artificial Sequence
  Synthetic
acauagaagcuuaggggaag

SEQ ID NO: 564763 - RNA, 21 nt, Artificial Sequence
  Synthetic
aacauagaagcuuaggggaag

SEQ ID NO: 564764 - RNA, 22 nt, Artificial Sequence
  Synthetic
uaacauagaagcuuaggggaag

SEQ ID NO: 564765 - RNA, 23 nt, Artificial Sequence
  Synthetic
guaacauagaagcuuaggggaag

SEQ ID NO: 564766 - RNA, 24 nt, Artificial Sequence
  Synthetic
aguaacauagaagcuuaggggaag

SEQ ID NO: 564767 - RNA, 18 nt, Artificial Sequence
  Synthetic
gguagggguuaggggaag

SEQ ID NO: 564768 - RNA, 19 nt, Artificial Sequence
  Synthetic
ggguagggguuaggggaag

SEQ ID NO: 564769 - RNA, 20 nt, Artificial Sequence
  Synthetic
cggguagggguuaggggaag

SEQ ID NO: 564770 - RNA, 21 nt, Artificial Sequence
  Synthetic
gcggguagggguuaggggaag

SEQ ID NO: 564771 - RNA, 22 nt, Artificial Sequence
  Synthetic
agcggguagggguuaggggaag

SEQ ID NO: 564772 - RNA, 23 nt, Artificial Sequence
  Synthetic
aagcggguagggguuaggggaag

SEQ ID NO: 564773 - RNA, 24 nt, Artificial Sequence
  Synthetic
aaagcggguagggguuaggggaag

SEQ ID NO: 564774 - RNA, 18 nt, Artificial Sequence
  Synthetic
cugugggguggggggaag

SEQ ID NO: 564775 - RNA, 19 nt, Artificial Sequence
  Synthetic
gcugugggguggggggaag

SEQ ID NO: 564776 - RNA, 20 nt, Artificial Sequence
  Synthetic
ugcugugggguggggggaag

SEQ ID NO: 564777 - RNA, 21 nt, Artificial Sequence
  Synthetic
cugcugugggguggggggaag

SEQ ID NO: 564778 - RNA, 22 nt, Artificial Sequence
  Synthetic
acugcugugggguggggggaag

SEQ ID NO: 564779 - RNA, 23 nt, Artificial Sequence
  Synthetic
gacugcugugggguggggggaag

SEQ ID NO: 564780 - RNA, 24 nt, Artificial Sequence
  Synthetic
ggacugcugugggguggggggaag

SEQ ID NO: 564781 - RNA, 18 nt, Artificial Sequence
  Synthetic
agaugagggcuggggaag

SEQ ID NO: 564782 - RNA, 19 nt, Artificial Sequence
  Synthetic
uagaugagggcuggggaag

SEQ ID NO: 564783 - RNA, 20 nt, Artificial Sequence
  Synthetic
auagaugagggcuggggaag

SEQ ID NO: 564784 - RNA, 21 nt, Artificial Sequence
  Synthetic
aauagaugagggcuggggaag

SEQ ID NO: 564785 - RNA, 22 nt, Artificial Sequence
  Synthetic
aaauagaugagggcuggggaag

SEQ ID NO: 564786 - RNA, 23 nt, Artificial Sequence
  Synthetic
gaaauagaugagggcuggggaag

SEQ ID NO: 564787 - RNA, 24 nt, Artificial Sequence
  Synthetic
ugaaauagaugagggcuggggaag

SEQ ID NO: 564788 - RNA, 18 nt, Artificial Sequence
  Synthetic
uacaauucauuggggaag

SEQ ID NO: 564789 - RNA, 19 nt, Artificial Sequence
  Synthetic
auacaauucauuggggaag

SEQ ID NO: 564790 - RNA, 20 nt, Artificial Sequence
  Synthetic
aauacaauucauuggggaag

SEQ ID NO: 564791 - RNA, 21 nt, Artificial Sequence
  Synthetic
gaauacaauucauuggggaag

SEQ ID NO: 564792 - RNA, 22 nt, Artificial Sequence
  Synthetic
agaauacaauucauuggggaag

SEQ ID NO: 564793 - RNA, 23 nt, Artificial Sequence
  Synthetic
uagaauacaauucauuggggaag

SEQ ID NO: 564794 - RNA, 24 nt, Artificial Sequence
  Synthetic
uuagaauacaauucauuggggaag

SEQ ID NO: 564795 - RNA, 18 nt, Artificial Sequence
  Synthetic
uugcaaauuuuggggaag

SEQ ID NO: 564796 - RNA, 19 nt, Artificial Sequence
  Synthetic
cuugcaaauuuuggggaag

SEQ ID NO: 564797 - RNA, 20 nt, Artificial Sequence
  Synthetic
ccuugcaaauuuuggggaag

SEQ ID NO: 564798 - RNA, 21 nt, Artificial Sequence
  Synthetic
cccuugcaaauuuuggggaag

SEQ ID NO: 564799 - RNA, 22 nt, Artificial Sequence
  Synthetic
ccccuugcaaauuuuggggaag

SEQ ID NO: 564800 - RNA, 23 nt, Artificial Sequence
  Synthetic
uccccuugcaaauuuuggggaag

SEQ ID NO: 564801 - RNA, 24 nt, Artificial Sequence
  Synthetic
uuccccuugcaaauuuuggggaag

SEQ ID NO: 564802 - RNA, 18 nt, Artificial Sequence
  Synthetic
caucugugacaugggaag

SEQ ID NO: 564803 - RNA, 19 nt, Artificial Sequence
  Synthetic
ucaucugugacaugggaag

SEQ ID NO: 564804 - RNA, 20 nt, Artificial Sequence
  Synthetic
gucaucugugacaugggaag

SEQ ID NO: 564805 - RNA, 21 nt, Artificial Sequence
  Synthetic
ggucaucugugacaugggaag

SEQ ID NO: 564806 - RNA, 22 nt, Artificial Sequence
  Synthetic
uggucaucugugacaugggaag

SEQ ID NO: 564807 - RNA, 23 nt, Artificial Sequence
  Synthetic
cuggucaucugugacaugggaag

SEQ ID NO: 564808 - RNA, 24 nt, Artificial Sequence
  Synthetic
ucuggucaucugugacaugggaag

SEQ ID NO: 564809 - RNA, 18 nt, Artificial Sequence
  Synthetic
uugaaauuaagugggaag

SEQ ID NO: 564810 - RNA, 19 nt, Artificial Sequence
  Synthetic
cuugaaauuaagugggaag

SEQ ID NO: 564811 - RNA, 20 nt, Artificial Sequence
  Synthetic
gcuugaaauuaagugggaag

SEQ ID NO: 564812 - RNA, 21 nt, Artificial Sequence
  Synthetic
ugcuugaaauuaagugggaag

SEQ ID NO: 564813 - RNA, 22 nt, Artificial Sequence
  Synthetic
cugcuugaaauuaagugggaag

SEQ ID NO: 564814 - RNA, 23 nt, Artificial Sequence
  Synthetic
ccugcuugaaauuaagugggaag

SEQ ID NO: 564815 - RNA, 24 nt, Artificial Sequence
  Synthetic
accugcuugaaauuaagugggaag

SEQ ID NO: 564816 - RNA, 18 nt, Artificial Sequence
  Synthetic
guggcucucagugggaag

SEQ ID NO: 564817 - RNA, 19 nt, Artificial Sequence
  Synthetic
aguggcucucagugggaag

SEQ ID NO: 564818 - RNA, 20 nt, Artificial Sequence
  Synthetic
aaguggcucucagugggaag

SEQ ID NO: 564819 - RNA, 21 nt, Artificial Sequence
  Synthetic
aaaguggcucucagugggaag

SEQ ID NO: 564820 - RNA, 22 nt, Artificial Sequence
  Synthetic
gaaaguggcucucagugggaag

SEQ ID NO: 564821 - RNA, 23 nt, Artificial Sequence
  Synthetic
ugaaaguggcucucagugggaag

SEQ ID NO: 564822 - RNA, 24 nt, Artificial Sequence
  Synthetic
augaaaguggcucucagugggaag

SEQ ID NO: 564823 - RNA, 18 nt, Artificial Sequence
  Synthetic
acuaguagaugugggaag

SEQ ID NO: 564824 - RNA, 19 nt, Artificial Sequence
  Synthetic
gacuaguagaugugggaag

SEQ ID NO: 564825 - RNA, 20 nt, Artificial Sequence
  Synthetic
ggacuaguagaugugggaag

SEQ ID NO: 564826 - RNA, 21 nt, Artificial Sequence
  Synthetic
cggacuaguagaugugggaag

SEQ ID NO: 564827 - RNA, 22 nt, Artificial Sequence
  Synthetic
gcggacuaguagaugugggaag

SEQ ID NO: 564828 - RNA, 23 nt, Artificial Sequence
  Synthetic
cgcggacuaguagaugugggaag

SEQ ID NO: 564829 - RNA, 24 nt, Artificial Sequence
  Synthetic
ccgcggacuaguagaugugggaag

SEQ ID NO: 564830 - RNA, 18 nt, Artificial Sequence
  Synthetic
gugcagagaguugggaag

SEQ ID NO: 564831 - RNA, 19 nt, Artificial Sequence
  Synthetic
ugugcagagaguugggaag

SEQ ID NO: 564832 - RNA, 20 nt, Artificial Sequence
  Synthetic
augugcagagaguugggaag

SEQ ID NO: 564833 - RNA, 21 nt, Artificial Sequence
  Synthetic
caugugcagagaguugggaag

SEQ ID NO: 564834 - RNA, 22 nt, Artificial Sequence
  Synthetic
acaugugcagagaguugggaag

SEQ ID NO: 564835 - RNA, 23 nt, Artificial Sequence
  Synthetic
aacaugugcagagaguugggaag

SEQ ID NO: 564836 - RNA, 24 nt, Artificial Sequence
  Synthetic
aaacaugugcagagaguugggaag

SEQ ID NO: 564837 - RNA, 18 nt, Artificial Sequence
  Synthetic
uuccagugcuuugggaag

SEQ ID NO: 564838 - RNA, 19 nt, Artificial Sequence
  Synthetic
auuccagugcuuugggaag

SEQ ID NO: 564839 - RNA, 20 nt, Artificial Sequence
  Synthetic
aauuccagugcuuugggaag

SEQ ID NO: 564840 - RNA, 21 nt, Artificial Sequence
  Synthetic
gaauuccagugcuuugggaag

SEQ ID NO: 564841 - RNA, 22 nt, Artificial Sequence
  Synthetic
ggaauuccagugcuuugggaag

SEQ ID NO: 564842 - RNA, 23 nt, Artificial Sequence
  Synthetic
uggaauuccagugcuuugggaag

SEQ ID NO: 564843 - RNA, 24 nt, Artificial Sequence
  Synthetic
cuggaauuccagugcuuugggaag

SEQ ID NO: 564844 - RNA, 18 nt, Artificial Sequence
  Synthetic
ucgucauauuuugggaag

SEQ ID NO: 564845 - RNA, 19 nt, Artificial Sequence
  Synthetic
gucgucauauuuugggaag

SEQ ID NO: 564846 - RNA, 20 nt, Artificial Sequence
  Synthetic
ugucgucauauuuugggaag

SEQ ID NO: 564847 - RNA, 21 nt, Artificial Sequence
  Synthetic
uugucgucauauuuugggaag

SEQ ID NO: 564848 - RNA, 22 nt, Artificial Sequence
  Synthetic
auugucgucauauuuugggaag

SEQ ID NO: 564849 - RNA, 23 nt, Artificial Sequence
  Synthetic
uauugucgucauauuuugggaag

SEQ ID NO: 564850 - RNA, 24 nt, Artificial Sequence
  Synthetic
cuauugucgucauauuuugggaag

SEQ ID NO: 564851 - RNA, 18 nt, Artificial Sequence
  Synthetic
ggguaucagcaauggaag

SEQ ID NO: 564852 - RNA, 19 nt, Artificial Sequence
  Synthetic
aggguaucagcaauggaag

SEQ ID NO: 564853 - RNA, 20 nt, Artificial Sequence
  Synthetic
aaggguaucagcaauggaag

SEQ ID NO: 564854 - RNA, 21 nt, Artificial Sequence
  Synthetic
aaaggguaucagcaauggaag

SEQ ID NO: 564855 - RNA, 22 nt, Artificial Sequence
  Synthetic
gaaaggguaucagcaauggaag

SEQ ID NO: 564856 - RNA, 23 nt, Artificial Sequence
  Synthetic
agaaaggguaucagcaauggaag

SEQ ID NO: 564857 - RNA, 24 nt, Artificial Sequence
  Synthetic
aagaaaggguaucagcaauggaag

SEQ ID NO: 564858 - RNA, 18 nt, Artificial Sequence
  Synthetic
uugcaggcuuaauggaag

SEQ ID NO: 564859 - RNA, 19 nt, Artificial Sequence
  Synthetic
auugcaggcuuaauggaag

SEQ ID NO: 564860 - RNA, 20 nt, Artificial Sequence
  Synthetic
uauugcaggcuuaauggaag

SEQ ID NO: 564861 - RNA, 21 nt, Artificial Sequence
  Synthetic
auauugcaggcuuaauggaag

SEQ ID NO: 564862 - RNA, 22 nt, Artificial Sequence
  Synthetic
gauauugcaggcuuaauggaag

SEQ ID NO: 564863 - RNA, 23 nt, Artificial Sequence
  Synthetic
ggauauugcaggcuuaauggaag

SEQ ID NO: 564864 - RNA, 24 nt, Artificial Sequence
  Synthetic
cggauauugcaggcuuaauggaag

SEQ ID NO: 564865 - RNA, 18 nt, Artificial Sequence
  Synthetic
gcacuucuuacauggaag

SEQ ID NO: 564866 - RNA, 19 nt, Artificial Sequence
  Synthetic
ggcacuucuuacauggaag

SEQ ID NO: 564867 - RNA, 20 nt, Artificial Sequence
  Synthetic
aggcacuucuuacauggaag

SEQ ID NO: 564868 - RNA, 21 nt, Artificial Sequence
  Synthetic
aaggcacuucuuacauggaag

SEQ ID NO: 564869 - RNA, 22 nt, Artificial Sequence
  Synthetic
aaaggcacuucuuacauggaag

SEQ ID NO: 564870 - RNA, 23 nt, Artificial Sequence
  Synthetic
gaaaggcacuucuuacauggaag

SEQ ID NO: 564871 - RNA, 24 nt, Artificial Sequence
  Synthetic
ugaaaggcacuucuuacauggaag

SEQ ID NO: 564872 - RNA, 18 nt, Artificial Sequence
  Synthetic
auuacuugaaacuggaag

SEQ ID NO: 564873 - RNA, 19 nt, Artificial Sequence
  Synthetic
aauuacuugaaacuggaag

SEQ ID NO: 564874 - RNA, 20 nt, Artificial Sequence
  Synthetic
gaauuacuugaaacuggaag

SEQ ID NO: 564875 - RNA, 21 nt, Artificial Sequence
  Synthetic
agaauuacuugaaacuggaag

SEQ ID NO: 564876 - RNA, 22 nt, Artificial Sequence
  Synthetic
gagaauuacuugaaacuggaag

SEQ ID NO: 564877 - RNA, 23 nt, Artificial Sequence
  Synthetic
ggagaauuacuugaaacuggaag

SEQ ID NO: 564878 - RNA, 24 nt, Artificial Sequence
  Synthetic
aggagaauuacuugaaacuggaag

SEQ ID NO: 564879 - RNA, 18 nt, Artificial Sequence
  Synthetic
gagagaagacacuggaag

SEQ ID NO: 564880 - RNA, 19 nt, Artificial Sequence
  Synthetic
agagagaagacacuggaag

SEQ ID NO: 564881 - RNA, 20 nt, Artificial Sequence
  Synthetic
cagagagaagacacuggaag

SEQ ID NO: 564882 - RNA, 21 nt, Artificial Sequence
  Synthetic
gcagagagaagacacuggaag

SEQ ID NO: 564883 - RNA, 22 nt, Artificial Sequence
  Synthetic
agcagagagaagacacuggaag

SEQ ID NO: 564884 - RNA, 23 nt, Artificial Sequence
  Synthetic
aagcagagagaagacacuggaag

SEQ ID NO: 564885 - RNA, 24 nt, Artificial Sequence
  Synthetic
aaagcagagagaagacacuggaag

SEQ ID NO: 564886 - RNA, 18 nt, Artificial Sequence
  Synthetic
guggggaaagacuggaag

SEQ ID NO: 564887 - RNA, 19 nt, Artificial Sequence
  Synthetic
aguggggaaagacuggaag

SEQ ID NO: 564888 - RNA, 20 nt, Artificial Sequence
  Synthetic
aaguggggaaagacuggaag

SEQ ID NO: 564889 - RNA, 21 nt, Artificial Sequence
  Synthetic
uaaguggggaaagacuggaag

SEQ ID NO: 564890 - RNA, 22 nt, Artificial Sequence
  Synthetic
guaaguggggaaagacuggaag

SEQ ID NO: 564891 - RNA, 23 nt, Artificial Sequence
  Synthetic
uguaaguggggaaagacuggaag

SEQ ID NO: 564892 - RNA, 24 nt, Artificial Sequence
  Synthetic
guguaaguggggaaagacuggaag

SEQ ID NO: 564893 - RNA, 18 nt, Artificial Sequence
  Synthetic
ccuuucuauugcuggaag

SEQ ID NO: 564894 - RNA, 19 nt, Artificial Sequence
  Synthetic
uccuuucuauugcuggaag

SEQ ID NO: 564895 - RNA, 20 nt, Artificial Sequence
  Synthetic
uuccuuucuauugcuggaag

SEQ ID NO: 564896 - RNA, 21 nt, Artificial Sequence
  Synthetic
uuuccuuucuauugcuggaag

SEQ ID NO: 564897 - RNA, 22 nt, Artificial Sequence
  Synthetic
uuuuccuuucuauugcuggaag

SEQ ID NO: 564898 - RNA, 23 nt, Artificial Sequence
  Synthetic
uuuuuccuuucuauugcuggaag

SEQ ID NO: 564899 - RNA, 24 nt, Artificial Sequence
  Synthetic
uuuuuuccuuucuauugcuggaag

SEQ ID NO: 564900 - RNA, 18 nt, Artificial Sequence
  Synthetic
acaugcugaaucuggaag

SEQ ID NO: 564901 - RNA, 19 nt, Artificial Sequence
  Synthetic
cacaugcugaaucuggaag

SEQ ID NO: 564902 - RNA, 20 nt, Artificial Sequence
  Synthetic
ucacaugcugaaucuggaag

SEQ ID NO: 564903 - RNA, 21 nt, Artificial Sequence
  Synthetic
uucacaugcugaaucuggaag

SEQ ID NO: 564904 - RNA, 22 nt, Artificial Sequence
  Synthetic
cuucacaugcugaaucuggaag

SEQ ID NO: 564905 - RNA, 23 nt, Artificial Sequence
  Synthetic
acuucacaugcugaaucuggaag

SEQ ID NO: 564906 - RNA, 24 nt, Artificial Sequence
  Synthetic
uacuucacaugcugaaucuggaag

SEQ ID NO: 564907 - RNA, 18 nt, Artificial Sequence
  Synthetic
caguuacggaaguggaag

SEQ ID NO: 564908 - RNA, 19 nt, Artificial Sequence
  Synthetic
ucaguuacggaaguggaag

SEQ ID NO: 564909 - RNA, 20 nt, Artificial Sequence
  Synthetic
cucaguuacggaaguggaag

SEQ ID NO: 564910 - RNA, 21 nt, Artificial Sequence
  Synthetic
gcucaguuacggaaguggaag

SEQ ID NO: 564911 - RNA, 22 nt, Artificial Sequence
  Synthetic
agcucaguuacggaaguggaag

SEQ ID NO: 564912 - RNA, 23 nt, Artificial Sequence
  Synthetic
gagcucaguuacggaaguggaag

SEQ ID NO: 564913 - RNA, 24 nt, Artificial Sequence
  Synthetic
agagcucaguuacggaaguggaag

SEQ ID NO: 564914 - RNA, 18 nt, Artificial Sequence
  Synthetic
gagauagguaaguggaag

SEQ ID NO: 564915 - RNA, 19 nt, Artificial Sequence
  Synthetic
ggagauagguaaguggaag

SEQ ID NO: 564916 - RNA, 20 nt, Artificial Sequence
  Synthetic
aggagauagguaaguggaag

SEQ ID NO: 564917 - RNA, 21 nt, Artificial Sequence
  Synthetic
aaggagauagguaaguggaag

SEQ ID NO: 564918 - RNA, 22 nt, Artificial Sequence
  Synthetic
aaaggagauagguaaguggaag

SEQ ID NO: 564919 - RNA, 23 nt, Artificial Sequence
  Synthetic
aaaaggagauagguaaguggaag

SEQ ID NO: 564920 - RNA, 24 nt, Artificial Sequence
  Synthetic
aaaaaggagauagguaaguggaag

SEQ ID NO: 564921 - RNA, 18 nt, Artificial Sequence
  Synthetic
gguuaaugggaguggaag

SEQ ID NO: 564922 - RNA, 19 nt, Artificial Sequence
  Synthetic
ggguuaaugggaguggaag

SEQ ID NO: 564923 - RNA, 20 nt, Artificial Sequence
  Synthetic
aggguuaaugggaguggaag

SEQ ID NO: 564924 - RNA, 21 nt, Artificial Sequence
  Synthetic
aaggguuaaugggaguggaag

SEQ ID NO: 564925 - RNA, 22 nt, Artificial Sequence
  Synthetic
caaggguuaaugggaguggaag

SEQ ID NO: 564926 - RNA, 23 nt, Artificial Sequence
  Synthetic
acaaggguuaaugggaguggaag

SEQ ID NO: 564927 - RNA, 24 nt, Artificial Sequence
  Synthetic
aacaaggguuaaugggaguggaag

SEQ ID NO: 564928 - RNA, 18 nt, Artificial Sequence
  Synthetic
cugaggagugaguggaag

SEQ ID NO: 564929 - RNA, 19 nt, Artificial Sequence
  Synthetic
gcugaggagugaguggaag

SEQ ID NO: 564930 - RNA, 20 nt, Artificial Sequence
  Synthetic
agcugaggagugaguggaag

SEQ ID NO: 564931 - RNA, 21 nt, Artificial Sequence
  Synthetic
uagcugaggagugaguggaag

SEQ ID NO: 564932 - RNA, 22 nt, Artificial Sequence
  Synthetic
auagcugaggagugaguggaag

SEQ ID NO: 564933 - RNA, 23 nt, Artificial Sequence
  Synthetic
cauagcugaggagugaguggaag

SEQ ID NO: 564934 - RNA, 24 nt, Artificial Sequence
  Synthetic
gcauagcugaggagugaguggaag

SEQ ID NO: 564935 - RNA, 18 nt, Artificial Sequence
  Synthetic
uuggguaauuaguggaag

SEQ ID NO: 564936 - RNA, 19 nt, Artificial Sequence
  Synthetic
uuuggguaauuaguggaag

SEQ ID NO: 564937 - RNA, 20 nt, Artificial Sequence
  Synthetic
uuuuggguaauuaguggaag

SEQ ID NO: 564938 - RNA, 21 nt, Artificial Sequence
  Synthetic
uuuuuggguaauuaguggaag

SEQ ID NO: 564939 - RNA, 22 nt, Artificial Sequence
  Synthetic
auuuuuggguaauuaguggaag

SEQ ID NO: 564940 - RNA, 23 nt, Artificial Sequence
  Synthetic
uauuuuuggguaauuaguggaag

SEQ ID NO: 564941 - RNA, 24 nt, Artificial Sequence
  Synthetic
auauuuuuggguaauuaguggaag

SEQ ID NO: 564942 - RNA, 18 nt, Artificial Sequence
  Synthetic
ggggacagcauguggaag

SEQ ID NO: 564943 - RNA, 19 nt, Artificial Sequence
  Synthetic
gggggacagcauguggaag

SEQ ID NO: 564944 - RNA, 20 nt, Artificial Sequence
  Synthetic
ugggggacagcauguggaag

SEQ ID NO: 564945 - RNA, 21 nt, Artificial Sequence
  Synthetic
gugggggacagcauguggaag

SEQ ID NO: 564946 - RNA, 22 nt, Artificial Sequence
  Synthetic
agugggggacagcauguggaag

SEQ ID NO: 564947 - RNA, 23 nt, Artificial Sequence
  Synthetic
cagugggggacagcauguggaag

SEQ ID NO: 564948 - RNA, 24 nt, Artificial Sequence
  Synthetic
ccagugggggacagcauguggaag

SEQ ID NO: 564949 - RNA, 18 nt, Artificial Sequence
  Synthetic
guuuccacucuguggaag

SEQ ID NO: 564950 - RNA, 19 nt, Artificial Sequence
  Synthetic
aguuuccacucuguggaag

SEQ ID NO: 564951 - RNA, 20 nt, Artificial Sequence
  Synthetic
caguuuccacucuguggaag

SEQ ID NO: 564952 - RNA, 21 nt, Artificial Sequence
  Synthetic
gcaguuuccacucuguggaag

SEQ ID NO: 564953 - RNA, 22 nt, Artificial Sequence
  Synthetic
agcaguuuccacucuguggaag

SEQ ID NO: 564954 - RNA, 23 nt, Artificial Sequence
  Synthetic
aagcaguuuccacucuguggaag

SEQ ID NO: 564955 - RNA, 24 nt, Artificial Sequence
  Synthetic
aaagcaguuuccacucuguggaag

SEQ ID NO: 564956 - RNA, 18 nt, Artificial Sequence
  Synthetic
uagaaucaauuguggaag

SEQ ID NO: 564957 - RNA, 19 nt, Artificial Sequence
  Synthetic
uuagaaucaauuguggaag

SEQ ID NO: 564958 - RNA, 20 nt, Artificial Sequence
  Synthetic
cuuagaaucaauuguggaag

SEQ ID NO: 564959 - RNA, 21 nt, Artificial Sequence
  Synthetic
ccuuagaaucaauuguggaag

SEQ ID NO: 564960 - RNA, 22 nt, Artificial Sequence
  Synthetic
accuuagaaucaauuguggaag

SEQ ID NO: 564961 - RNA, 23 nt, Artificial Sequence
  Synthetic
gaccuuagaaucaauuguggaag

SEQ ID NO: 564962 - RNA, 24 nt, Artificial Sequence
  Synthetic
ugaccuuagaaucaauuguggaag

SEQ ID NO: 564963 - RNA, 18 nt, Artificial Sequence
  Synthetic
gaaaugaauuuguggaag

SEQ ID NO: 564964 - RNA, 19 nt, Artificial Sequence
  Synthetic
agaaaugaauuuguggaag

SEQ ID NO: 564965 - RNA, 20 nt, Artificial Sequence
  Synthetic
uagaaaugaauuuguggaag

SEQ ID NO: 564966 - RNA, 21 nt, Artificial Sequence
  Synthetic
uuagaaaugaauuuguggaag

SEQ ID NO: 564967 - RNA, 22 nt, Artificial Sequence
  Synthetic
uuuagaaaugaauuuguggaag

SEQ ID NO: 564968 - RNA, 23 nt, Artificial Sequence
  Synthetic
auuuagaaaugaauuuguggaag

SEQ ID NO: 564969 - RNA, 24 nt, Artificial Sequence
  Synthetic
uauuuagaaaugaauuuguggaag

SEQ ID NO: 564970 - RNA, 18 nt, Artificial Sequence
  Synthetic
ucaaaagcaaauuggaag

SEQ ID NO: 564971 - RNA, 19 nt, Artificial Sequence
  Synthetic
gucaaaagcaaauuggaag

SEQ ID NO: 564972 - RNA, 20 nt, Artificial Sequence
  Synthetic
agucaaaagcaaauuggaag

SEQ ID NO: 564973 - RNA, 21 nt, Artificial Sequence
  Synthetic
uagucaaaagcaaauuggaag

SEQ ID NO: 564974 - RNA, 22 nt, Artificial Sequence
  Synthetic
auagucaaaagcaaauuggaag

SEQ ID NO: 564975 - RNA, 23 nt, Artificial Sequence
  Synthetic
aauagucaaaagcaaauuggaag

SEQ ID NO: 564976 - RNA, 24 nt, Artificial Sequence
  Synthetic
caauagucaaaagcaaauuggaag

SEQ ID NO: 564977 - RNA, 18 nt, Artificial Sequence
  Synthetic
cacguagacaauuggaag

SEQ ID NO: 564978 - RNA, 19 nt, Artificial Sequence
  Synthetic
ccacguagacaauuggaag

SEQ ID NO: 564979 - RNA, 20 nt, Artificial Sequence
  Synthetic
gccacguagacaauuggaag

SEQ ID NO: 564980 - RNA, 21 nt, Artificial Sequence
  Synthetic
agccacguagacaauuggaag

SEQ ID NO: 564981 - RNA, 22 nt, Artificial Sequence
  Synthetic
uagccacguagacaauuggaag

SEQ ID NO: 564982 - RNA, 23 nt, Artificial Sequence
  Synthetic
uuagccacguagacaauuggaag

SEQ ID NO: 564983 - RNA, 24 nt, Artificial Sequence
  Synthetic
uuuagccacguagacaauuggaag

SEQ ID NO: 564984 - RNA, 18 nt, Artificial Sequence
  Synthetic
gucucuaggaguuggaag

SEQ ID NO: 564985 - RNA, 19 nt, Artificial Sequence
  Synthetic
ugucucuaggaguuggaag

SEQ ID NO: 564986 - RNA, 20 nt, Artificial Sequence
  Synthetic
uugucucuaggaguuggaag

SEQ ID NO: 564987 - RNA, 21 nt, Artificial Sequence
  Synthetic
guugucucuaggaguuggaag

SEQ ID NO: 564988 - RNA, 22 nt, Artificial Sequence
  Synthetic
uguugucucuaggaguuggaag

SEQ ID NO: 564989 - RNA, 23 nt, Artificial Sequence
  Synthetic
uuguugucucuaggaguuggaag

SEQ ID NO: 564990 - RNA, 24 nt, Artificial Sequence
  Synthetic
uuuguugucucuaggaguuggaag

SEQ ID NO: 564991 - RNA, 18 nt, Artificial Sequence
  Synthetic
acaacagcauguuggaag

SEQ ID NO: 564992 - RNA, 19 nt, Artificial Sequence
  Synthetic
aacaacagcauguuggaag

SEQ ID NO: 564993 - RNA, 20 nt, Artificial Sequence
  Synthetic
caacaacagcauguuggaag

SEQ ID NO: 564994 - RNA, 21 nt, Artificial Sequence
  Synthetic
gcaacaacagcauguuggaag

SEQ ID NO: 564995 - RNA, 22 nt, Artificial Sequence
  Synthetic
agcaacaacagcauguuggaag

SEQ ID NO: 564996 - RNA, 23 nt, Artificial Sequence
  Synthetic
gagcaacaacagcauguuggaag

SEQ ID NO: 564997 - RNA, 24 nt, Artificial Sequence
  Synthetic
agagcaacaacagcauguuggaag

SEQ ID NO: 564998 - RNA, 18 nt, Artificial Sequence
  Synthetic
acuauaggaaaaaugaag

SEQ ID NO: 564999 - RNA, 19 nt, Artificial Sequence
  Synthetic
cacuauaggaaaaaugaag

SEQ ID NO: 565000 - RNA, 20 nt, Artificial Sequence
  Synthetic
ucacuauaggaaaaaugaag

SEQ ID NO: 565001 - RNA, 21 nt, Artificial Sequence
  Synthetic
gucacuauaggaaaaaugaag

SEQ ID NO: 565002 - RNA, 22 nt, Artificial Sequence
  Synthetic
agucacuauaggaaaaaugaag

SEQ ID NO: 565003 - RNA, 23 nt, Artificial Sequence
  Synthetic
aagucacuauaggaaaaaugaag

SEQ ID NO: 565004 - RNA, 24 nt, Artificial Sequence
  Synthetic
aaagucacuauaggaaaaaugaag

SEQ ID NO: 565005 - RNA, 18 nt, Artificial Sequence
  Synthetic
uuggagacagaaaugaag

SEQ ID NO: 565006 - RNA, 19 nt, Artificial Sequence
  Synthetic
auuggagacagaaaugaag

SEQ ID NO: 565007 - RNA, 20 nt, Artificial Sequence
  Synthetic
cauuggagacagaaaugaag

SEQ ID NO: 565008 - RNA, 21 nt, Artificial Sequence
  Synthetic
gcauuggagacagaaaugaag

SEQ ID NO: 565009 - RNA, 22 nt, Artificial Sequence
  Synthetic
ugcauuggagacagaaaugaag

SEQ ID NO: 565010 - RNA, 23 nt, Artificial Sequence
  Synthetic
augcauuggagacagaaaugaag

SEQ ID NO: 565011 - RNA, 24 nt, Artificial Sequence
  Synthetic
aaugcauuggagacagaaaugaag

SEQ ID NO: 565012 - RNA, 18 nt, Artificial Sequence
  Synthetic
cccagugaauaaaugaag

SEQ ID NO: 565013 - RNA, 19 nt, Artificial Sequence
  Synthetic
ccccagugaauaaaugaag

SEQ ID NO: 565014 - RNA, 20 nt, Artificial Sequence
  Synthetic
accccagugaauaaaugaag

SEQ ID NO: 565015 - RNA, 21 nt, Artificial Sequence
  Synthetic
uaccccagugaauaaaugaag

SEQ ID NO: 565016 - RNA, 22 nt, Artificial Sequence
  Synthetic
cuaccccagugaauaaaugaag

SEQ ID NO: 565017 - RNA, 23 nt, Artificial Sequence
  Synthetic
ccuaccccagugaauaaaugaag

SEQ ID NO: 565018 - RNA, 24 nt, Artificial Sequence
  Synthetic
accuaccccagugaauaaaugaag

SEQ ID NO: 565019 - RNA, 18 nt, Artificial Sequence
  Synthetic
gauaaaugauaaaugaag

SEQ ID NO: 565020 - RNA, 19 nt, Artificial Sequence
  Synthetic
agauaaaugauaaaugaag

SEQ ID NO: 565021 - RNA, 20 nt, Artificial Sequence
  Synthetic
cagauaaaugauaaaugaag

SEQ ID NO: 565022 - RNA, 21 nt, Artificial Sequence
  Synthetic
ucagauaaaugauaaaugaag

SEQ ID NO: 565023 - RNA, 22 nt, Artificial Sequence
  Synthetic
aucagauaaaugauaaaugaag

SEQ ID NO: 565024 - RNA, 23 nt, Artificial Sequence
  Synthetic
gaucagauaaaugauaaaugaag

SEQ ID NO: 565025 - RNA, 24 nt, Artificial Sequence
  Synthetic
ugaucagauaaaugauaaaugaag

SEQ ID NO: 565026 - RNA, 18 nt, Artificial Sequence
  Synthetic
aagcagaacuaaaugaag

SEQ ID NO: 565027 - RNA, 19 nt, Artificial Sequence
  Synthetic
aaagcagaacuaaaugaag

SEQ ID NO: 565028 - RNA, 20 nt, Artificial Sequence
  Synthetic
caaagcagaacuaaaugaag

SEQ ID NO: 565029 - RNA, 21 nt, Artificial Sequence
  Synthetic
ucaaagcagaacuaaaugaag

SEQ ID NO: 565030 - RNA, 22 nt, Artificial Sequence
  Synthetic
aucaaagcagaacuaaaugaag

SEQ ID NO: 565031 - RNA, 23 nt, Artificial Sequence
  Synthetic
gaucaaagcagaacuaaaugaag

SEQ ID NO: 565032 - RNA, 24 nt, Artificial Sequence
  Synthetic
agaucaaagcagaacuaaaugaag

SEQ ID NO: 565033 - RNA, 18 nt, Artificial Sequence
  Synthetic
cacaugaggccaaugaag

SEQ ID NO: 565034 - RNA, 19 nt, Artificial Sequence
  Synthetic
ccacaugaggccaaugaag

SEQ ID NO: 565035 - RNA, 20 nt, Artificial Sequence
  Synthetic
accacaugaggccaaugaag

SEQ ID NO: 565036 - RNA, 21 nt, Artificial Sequence
  Synthetic
uaccacaugaggccaaugaag

SEQ ID NO: 565037 - RNA, 22 nt, Artificial Sequence
  Synthetic
cuaccacaugaggccaaugaag

SEQ ID NO: 565038 - RNA, 23 nt, Artificial Sequence
  Synthetic
ucuaccacaugaggccaaugaag

SEQ ID NO: 565039 - RNA, 24 nt, Artificial Sequence
  Synthetic
uucuaccacaugaggccaaugaag

SEQ ID NO: 565040 - RNA, 18 nt, Artificial Sequence
  Synthetic
uuucuuguugcaaugaag

SEQ ID NO: 565041 - RNA, 19 nt, Artificial Sequence
  Synthetic
uuuucuuguugcaaugaag

SEQ ID NO: 565042 - RNA, 20 nt, Artificial Sequence
  Synthetic
cuuuucuuguugcaaugaag

SEQ ID NO: 565043 - RNA, 21 nt, Artificial Sequence
  Synthetic
ucuuuucuuguugcaaugaag

SEQ ID NO: 565044 - RNA, 22 nt, Artificial Sequence
  Synthetic
cucuuuucuuguugcaaugaag

SEQ ID NO: 565045 - RNA, 23 nt, Artificial Sequence
  Synthetic
ucucuuuucuuguugcaaugaag

SEQ ID NO: 565046 - RNA, 24 nt, Artificial Sequence
  Synthetic
uucucuuuucuuguugcaaugaag

SEQ ID NO: 565047 - RNA, 18 nt, Artificial Sequence
  Synthetic
gcaugaucaagaaugaag

SEQ ID NO: 565048 - RNA, 19 nt, Artificial Sequence
  Synthetic
ggcaugaucaagaaugaag

SEQ ID NO: 565049 - RNA, 20 nt, Artificial Sequence
  Synthetic
aggcaugaucaagaaugaag

SEQ ID NO: 565050 - RNA, 21 nt, Artificial Sequence
  Synthetic
uaggcaugaucaagaaugaag

SEQ ID NO: 565051 - RNA, 22 nt, Artificial Sequence
  Synthetic
uuaggcaugaucaagaaugaag

SEQ ID NO: 565052 - RNA, 23 nt, Artificial Sequence
  Synthetic
guuaggcaugaucaagaaugaag

SEQ ID NO: 565053 - RNA, 24 nt, Artificial Sequence
  Synthetic
uguuaggcaugaucaagaaugaag

SEQ ID NO: 565054 - RNA, 18 nt, Artificial Sequence
  Synthetic
ggaaaaacaugaaugaag

SEQ ID NO: 565055 - RNA, 19 nt, Artificial Sequence
  Synthetic
gggaaaaacaugaaugaag

SEQ ID NO: 565056 - RNA, 20 nt, Artificial Sequence
  Synthetic
ugggaaaaacaugaaugaag

SEQ ID NO: 565057 - RNA, 21 nt, Artificial Sequence
  Synthetic
gugggaaaaacaugaaugaag

SEQ ID NO: 565058 - RNA, 22 nt, Artificial Sequence
  Synthetic
agugggaaaaacaugaaugaag

SEQ ID NO: 565059 - RNA, 23 nt, Artificial Sequence
  Synthetic
cagugggaaaaacaugaaugaag

SEQ ID NO: 565060 - RNA, 24 nt, Artificial Sequence
  Synthetic
gcagugggaaaaacaugaaugaag

SEQ ID NO: 565061 - RNA, 18 nt, Artificial Sequence
  Synthetic
ccuuauaaaauaaugaag

SEQ ID NO: 565062 - RNA, 19 nt, Artificial Sequence
  Synthetic
cccuuauaaaauaaugaag

SEQ ID NO: 565063 - RNA, 20 nt, Artificial Sequence
  Synthetic
ucccuuauaaaauaaugaag

SEQ ID NO: 565064 - RNA, 21 nt, Artificial Sequence
  Synthetic
cucccuuauaaaauaaugaag

SEQ ID NO: 565065 - RNA, 22 nt, Artificial Sequence
  Synthetic
ucucccuuauaaaauaaugaag

SEQ ID NO: 565066 - RNA, 23 nt, Artificial Sequence
  Synthetic
uucucccuuauaaaauaaugaag

SEQ ID NO: 565067 - RNA, 24 nt, Artificial Sequence
  Synthetic
uuucucccuuauaaaauaaugaag

SEQ ID NO: 565068 - RNA, 18 nt, Artificial Sequence
  Synthetic
gcguugguguuaaugaag

SEQ ID NO: 565069 - RNA, 19 nt, Artificial Sequence
  Synthetic
ugcguugguguuaaugaag

SEQ ID NO: 565070 - RNA, 20 nt, Artificial Sequence
  Synthetic
cugcguugguguuaaugaag

SEQ ID NO: 565071 - RNA, 21 nt, Artificial Sequence
  Synthetic
acugcguugguguuaaugaag

SEQ ID NO: 565072 - RNA, 22 nt, Artificial Sequence
  Synthetic
aacugcguugguguuaaugaag

SEQ ID NO: 565073 - RNA, 23 nt, Artificial Sequence
  Synthetic
uaacugcguugguguuaaugaag

SEQ ID NO: 565074 - RNA, 24 nt, Artificial Sequence
  Synthetic
uuaacugcguugguguuaaugaag

SEQ ID NO: 565075 - RNA, 18 nt, Artificial Sequence
  Synthetic
ggcacucaacgcaugaag

SEQ ID NO: 565076 - RNA, 19 nt, Artificial Sequence
  Synthetic
gggcacucaacgcaugaag

SEQ ID NO: 565077 - RNA, 20 nt, Artificial Sequence
  Synthetic
agggcacucaacgcaugaag

SEQ ID NO: 565078 - RNA, 21 nt, Artificial Sequence
  Synthetic
gagggcacucaacgcaugaag

SEQ ID NO: 565079 - RNA, 22 nt, Artificial Sequence
  Synthetic
ugagggcacucaacgcaugaag

SEQ ID NO: 565080 - RNA, 23 nt, Artificial Sequence
  Synthetic
augagggcacucaacgcaugaag

SEQ ID NO: 565081 - RNA, 24 nt, Artificial Sequence
  Synthetic
caugagggcacucaacgcaugaag

SEQ ID NO: 565082 - RNA, 18 nt, Artificial Sequence
  Synthetic
aauaccuacugcaugaag

SEQ ID NO: 565083 - RNA, 19 nt, Artificial Sequence
  Synthetic
gaauaccuacugcaugaag

SEQ ID NO: 565084 - RNA, 20 nt, Artificial Sequence
  Synthetic
cgaauaccuacugcaugaag

SEQ ID NO: 565085 - RNA, 21 nt, Artificial Sequence
  Synthetic
acgaauaccuacugcaugaag

SEQ ID NO: 565086 - RNA, 22 nt, Artificial Sequence
  Synthetic
aacgaauaccuacugcaugaag

SEQ ID NO: 565087 - RNA, 23 nt, Artificial Sequence
  Synthetic
aaacgaauaccuacugcaugaag

SEQ ID NO: 565088 - RNA, 24 nt, Artificial Sequence
  Synthetic
aaaacgaauaccuacugcaugaag

SEQ ID NO: 565089 - RNA, 18 nt, Artificial Sequence
  Synthetic
agaggaaaggucaugaag

SEQ ID NO: 565090 - RNA, 19 nt, Artificial Sequence
  Synthetic
cagaggaaaggucaugaag

SEQ ID NO: 565091 - RNA, 20 nt, Artificial Sequence
  Synthetic
acagaggaaaggucaugaag

SEQ ID NO: 565092 - RNA, 21 nt, Artificial Sequence
  Synthetic
cacagaggaaaggucaugaag

SEQ ID NO: 565093 - RNA, 22 nt, Artificial Sequence
  Synthetic
acacagaggaaaggucaugaag

SEQ ID NO: 565094 - RNA, 23 nt, Artificial Sequence
  Synthetic
uacacagaggaaaggucaugaag

SEQ ID NO: 565095 - RNA, 24 nt, Artificial Sequence
  Synthetic
auacacagaggaaaggucaugaag

SEQ ID NO: 565096 - RNA, 18 nt, Artificial Sequence
  Synthetic
ugguagcaaaagaugaag

SEQ ID NO: 565097 - RNA, 19 nt, Artificial Sequence
  Synthetic
uugguagcaaaagaugaag

SEQ ID NO: 565098 - RNA, 20 nt, Artificial Sequence
  Synthetic
auugguagcaaaagaugaag

SEQ ID NO: 565099 - RNA, 21 nt, Artificial Sequence
  Synthetic
aauugguagcaaaagaugaag

SEQ ID NO: 565100 - RNA, 22 nt, Artificial Sequence
  Synthetic
uaauugguagcaaaagaugaag

SEQ ID NO: 565101 - RNA, 23 nt, Artificial Sequence
  Synthetic
auaauugguagcaaaagaugaag

SEQ ID NO: 565102 - RNA, 24 nt, Artificial Sequence
  Synthetic
cauaauugguagcaaaagaugaag

SEQ ID NO: 565103 - RNA, 18 nt, Artificial Sequence
  Synthetic
uuuuguuaaaagaugaag

SEQ ID NO: 565104 - RNA, 19 nt, Artificial Sequence
  Synthetic
cuuuuguuaaaagaugaag

SEQ ID NO: 565105 - RNA, 20 nt, Artificial Sequence
  Synthetic
gcuuuuguuaaaagaugaag

SEQ ID NO: 565106 - RNA, 21 nt, Artificial Sequence
  Synthetic
ggcuuuuguuaaaagaugaag

SEQ ID NO: 565107 - RNA, 22 nt, Artificial Sequence
  Synthetic
aggcuuuuguuaaaagaugaag

SEQ ID NO: 565108 - RNA, 23 nt, Artificial Sequence
  Synthetic
gaggcuuuuguuaaaagaugaag

SEQ ID NO: 565109 - RNA, 24 nt, Artificial Sequence
  Synthetic
ggaggcuuuuguuaaaagaugaag

SEQ ID NO: 565110 - RNA, 18 nt, Artificial Sequence
  Synthetic
gcacggacauggaugaag

SEQ ID NO: 565111 - RNA, 19 nt, Artificial Sequence
  Synthetic
ugcacggacauggaugaag

SEQ ID NO: 565112 - RNA, 20 nt, Artificial Sequence
  Synthetic
uugcacggacauggaugaag

SEQ ID NO: 565113 - RNA, 21 nt, Artificial Sequence
  Synthetic
uuugcacggacauggaugaag

SEQ ID NO: 565114 - RNA, 22 nt, Artificial Sequence
  Synthetic
cuuugcacggacauggaugaag

SEQ ID NO: 565115 - RNA, 23 nt, Artificial Sequence
  Synthetic
ccuuugcacggacauggaugaag

SEQ ID NO: 565116 - RNA, 24 nt, Artificial Sequence
  Synthetic
uccuuugcacggacauggaugaag

SEQ ID NO: 565117 - RNA, 18 nt, Artificial Sequence
  Synthetic
gaagggacauggaugaag

SEQ ID NO: 565118 - RNA, 19 nt, Artificial Sequence
  Synthetic
ugaagggacauggaugaag

SEQ ID NO: 565119 - RNA, 20 nt, Artificial Sequence
  Synthetic
uugaagggacauggaugaag

SEQ ID NO: 565120 - RNA, 21 nt, Artificial Sequence
  Synthetic
uuugaagggacauggaugaag

SEQ ID NO: 565121 - RNA, 22 nt, Artificial Sequence
  Synthetic
cuuugaagggacauggaugaag

SEQ ID NO: 565122 - RNA, 23 nt, Artificial Sequence
  Synthetic
ccuuugaagggacauggaugaag

SEQ ID NO: 565123 - RNA, 24 nt, Artificial Sequence
  Synthetic
uccuuugaagggacauggaugaag

SEQ ID NO: 565124 - RNA, 19 nt, Artificial Sequence
  Synthetic
ugcagggacauggaugaag

SEQ ID NO: 565125 - RNA, 20 nt, Artificial Sequence
  Synthetic
uugcagggacauggaugaag

SEQ ID NO: 565126 - RNA, 21 nt, Artificial Sequence
  Synthetic
uuugcagggacauggaugaag

SEQ ID NO: 565127 - RNA, 22 nt, Artificial Sequence
  Synthetic
cuuugcagggacauggaugaag

SEQ ID NO: 565128 - RNA, 23 nt, Artificial Sequence
  Synthetic
ccuuugcagggacauggaugaag

SEQ ID NO: 565129 - RNA, 24 nt, Artificial Sequence
  Synthetic
uccuuugcagggacauggaugaag

SEQ ID NO: 565130 - RNA, 21 nt, Artificial Sequence
  Synthetic
uuuguagggacauggaugaag

SEQ ID NO: 565131 - RNA, 22 nt, Artificial Sequence
  Synthetic
cuuuguagggacauggaugaag

SEQ ID NO: 565132 - RNA, 23 nt, Artificial Sequence
  Synthetic
ccuuuguagggacauggaugaag

SEQ ID NO: 565133 - RNA, 24 nt, Artificial Sequence
  Synthetic
uccuuuguagggacauggaugaag

SEQ ID NO: 565134 - RNA, 18 nt, Artificial Sequence
  Synthetic
auccaccgauggaugaag

SEQ ID NO: 565135 - RNA, 19 nt, Artificial Sequence
  Synthetic
aauccaccgauggaugaag

SEQ ID NO: 565136 - RNA, 20 nt, Artificial Sequence
  Synthetic
uaauccaccgauggaugaag

SEQ ID NO: 565137 - RNA, 21 nt, Artificial Sequence
  Synthetic
cuaauccaccgauggaugaag

SEQ ID NO: 565138 - RNA, 22 nt, Artificial Sequence
  Synthetic
ucuaauccaccgauggaugaag

SEQ ID NO: 565139 - RNA, 23 nt, Artificial Sequence
  Synthetic
uucuaauccaccgauggaugaag

SEQ ID NO: 565140 - RNA, 24 nt, Artificial Sequence
  Synthetic
auucuaauccaccgauggaugaag

SEQ ID NO: 565141 - RNA, 18 nt, Artificial Sequence
  Synthetic
uuagagccguggaugaag

SEQ ID NO: 565142 - RNA, 19 nt, Artificial Sequence
  Synthetic
auuagagccguggaugaag

SEQ ID NO: 565143 - RNA, 20 nt, Artificial Sequence
  Synthetic
aauuagagccguggaugaag

SEQ ID NO: 565144 - RNA, 21 nt, Artificial Sequence
  Synthetic
uaauuagagccguggaugaag

SEQ ID NO: 565145 - RNA, 22 nt, Artificial Sequence
  Synthetic
cuaauuagagccguggaugaag

SEQ ID NO: 565146 - RNA, 23 nt, Artificial Sequence
  Synthetic
acuaauuagagccguggaugaag

SEQ ID NO: 565147 - RNA, 24 nt, Artificial Sequence
  Synthetic
uacuaauuagagccguggaugaag

SEQ ID NO: 565148 - RNA, 18 nt, Artificial Sequence
  Synthetic
auucagugacugaugaag

SEQ ID NO: 565149 - RNA, 19 nt, Artificial Sequence
  Synthetic
cauucagugacugaugaag

SEQ ID NO: 565150 - RNA, 20 nt, Artificial Sequence
  Synthetic
ucauucagugacugaugaag

SEQ ID NO: 565151 - RNA, 21 nt, Artificial Sequence
  Synthetic
cucauucagugacugaugaag

SEQ ID NO: 565152 - RNA, 22 nt, Artificial Sequence
  Synthetic
ccucauucagugacugaugaag

SEQ ID NO: 565153 - RNA, 23 nt, Artificial Sequence
  Synthetic
cccucauucagugacugaugaag

SEQ ID NO: 565154 - RNA, 24 nt, Artificial Sequence
  Synthetic
gcccucauucagugacugaugaag

SEQ ID NO: 565155 - RNA, 18 nt, Artificial Sequence
  Synthetic
aacauaauauugaugaag

SEQ ID NO: 565156 - RNA, 19 nt, Artificial Sequence
  Synthetic
uaacauaauauugaugaag

SEQ ID NO: 565157 - RNA, 20 nt, Artificial Sequence
  Synthetic
auaacauaauauugaugaag

SEQ ID NO: 565158 - RNA, 21 nt, Artificial Sequence
  Synthetic
cauaacauaauauugaugaag

SEQ ID NO: 565159 - RNA, 22 nt, Artificial Sequence
  Synthetic
gcauaacauaauauugaugaag

SEQ ID NO: 565160 - RNA, 23 nt, Artificial Sequence
  Synthetic
agcauaacauaauauugaugaag

SEQ ID NO: 565161 - RNA, 24 nt, Artificial Sequence
  Synthetic
uagcauaacauaauauugaugaag

SEQ ID NO: 565162 - RNA, 18 nt, Artificial Sequence
  Synthetic
cuuuccuuucuuaugaag

SEQ ID NO: 565163 - RNA, 19 nt, Artificial Sequence
  Synthetic
ucuuuccuuucuuaugaag

SEQ ID NO: 565164 - RNA, 20 nt, Artificial Sequence
  Synthetic
gucuuuccuuucuuaugaag

SEQ ID NO: 565165 - RNA, 21 nt, Artificial Sequence
  Synthetic
agucuuuccuuucuuaugaag

SEQ ID NO: 565166 - RNA, 22 nt, Artificial Sequence
  Synthetic
uagucuuuccuuucuuaugaag

SEQ ID NO: 565167 - RNA, 23 nt, Artificial Sequence
  Synthetic
uuagucuuuccuuucuuaugaag

SEQ ID NO: 565168 - RNA, 24 nt, Artificial Sequence
  Synthetic
uuuagucuuuccuuucuuaugaag

SEQ ID NO: 565169 - RNA, 18 nt, Artificial Sequence
  Synthetic
ucuauacaaguuaugaag

SEQ ID NO: 565170 - RNA, 19 nt, Artificial Sequence
  Synthetic
cucuauacaaguuaugaag

SEQ ID NO: 565171 - RNA, 20 nt, Artificial Sequence
  Synthetic
ucucuauacaaguuaugaag

SEQ ID NO: 565172 - RNA, 21 nt, Artificial Sequence
  Synthetic
uucucuauacaaguuaugaag

SEQ ID NO: 565173 - RNA, 22 nt, Artificial Sequence
  Synthetic
cuucucuauacaaguuaugaag

SEQ ID NO: 565174 - RNA, 23 nt, Artificial Sequence
  Synthetic
ucuucucuauacaaguuaugaag

SEQ ID NO: 565175 - RNA, 24 nt, Artificial Sequence
  Synthetic
uucuucucuauacaaguuaugaag

SEQ ID NO: 565176 - RNA, 18 nt, Artificial Sequence
  Synthetic
uucuaucaacaacugaag

SEQ ID NO: 565177 - RNA, 19 nt, Artificial Sequence
  Synthetic
cuucuaucaacaacugaag

SEQ ID NO: 565178 - RNA, 20 nt, Artificial Sequence
  Synthetic
ccuucuaucaacaacugaag

SEQ ID NO: 565179 - RNA, 21 nt, Artificial Sequence
  Synthetic
accuucuaucaacaacugaag

SEQ ID NO: 565180 - RNA, 22 nt, Artificial Sequence
  Synthetic
uaccuucuaucaacaacugaag

SEQ ID NO: 565181 - RNA, 23 nt, Artificial Sequence
  Synthetic
auaccuucuaucaacaacugaag

SEQ ID NO: 565182 - RNA, 24 nt, Artificial Sequence
  Synthetic
aauaccuucuaucaacaacugaag

SEQ ID NO: 565183 - RNA, 18 nt, Artificial Sequence
  Synthetic
caagugaaagaacugaag

SEQ ID NO: 565184 - RNA, 19 nt, Artificial Sequence
  Synthetic
acaagugaaagaacugaag

SEQ ID NO: 565185 - RNA, 20 nt, Artificial Sequence
  Synthetic
gacaagugaaagaacugaag

SEQ ID NO: 565186 - RNA, 21 nt, Artificial Sequence
  Synthetic
agacaagugaaagaacugaag

SEQ ID NO: 565187 - RNA, 22 nt, Artificial Sequence
  Synthetic
aagacaagugaaagaacugaag

SEQ ID NO: 565188 - RNA, 23 nt, Artificial Sequence
  Synthetic
aaagacaagugaaagaacugaag

SEQ ID NO: 565189 - RNA, 24 nt, Artificial Sequence
  Synthetic
gaaagacaagugaaagaacugaag

SEQ ID NO: 565190 - RNA, 18 nt, Artificial Sequence
  Synthetic
uguuuguaugaacugaag

SEQ ID NO: 565191 - RNA, 19 nt, Artificial Sequence
  Synthetic
auguuuguaugaacugaag

SEQ ID NO: 565192 - RNA, 20 nt, Artificial Sequence
  Synthetic
aauguuuguaugaacugaag

SEQ ID NO: 565193 - RNA, 21 nt, Artificial Sequence
  Synthetic
uaauguuuguaugaacugaag

SEQ ID NO: 565194 - RNA, 22 nt, Artificial Sequence
  Synthetic
guaauguuuguaugaacugaag

SEQ ID NO: 565195 - RNA, 23 nt, Artificial Sequence
  Synthetic
uguaauguuuguaugaacugaag

SEQ ID NO: 565196 - RNA, 24 nt, Artificial Sequence
  Synthetic
uuguaauguuuguaugaacugaag

SEQ ID NO: 565197 - RNA, 18 nt, Artificial Sequence
  Synthetic
ucuacuuagucacugaag

SEQ ID NO: 565198 - RNA, 19 nt, Artificial Sequence
  Synthetic
cucuacuuagucacugaag

SEQ ID NO: 565199 - RNA, 20 nt, Artificial Sequence
  Synthetic
ccucuacuuagucacugaag

SEQ ID NO: 565200 - RNA, 21 nt, Artificial Sequence
  Synthetic
uccucuacuuagucacugaag

SEQ ID NO: 565201 - RNA, 22 nt, Artificial Sequence
  Synthetic
uuccucuacuuagucacugaag

SEQ ID NO: 565202 - RNA, 23 nt, Artificial Sequence
  Synthetic
guuccucuacuuagucacugaag

SEQ ID NO: 565203 - RNA, 24 nt, Artificial Sequence
  Synthetic
uguuccucuacuuagucacugaag

SEQ ID NO: 565204 - RNA, 18 nt, Artificial Sequence
  Synthetic
uucauaaaaauacugaag

SEQ ID NO: 565205 - RNA, 19 nt, Artificial Sequence
  Synthetic
uuucauaaaaauacugaag

SEQ ID NO: 565206 - RNA, 20 nt, Artificial Sequence
  Synthetic
uuuucauaaaaauacugaag

SEQ ID NO: 565207 - RNA, 21 nt, Artificial Sequence
  Synthetic
auuuucauaaaaauacugaag

SEQ ID NO: 565208 - RNA, 22 nt, Artificial Sequence
  Synthetic
uauuuucauaaaaauacugaag

SEQ ID NO: 565209 - RNA, 23 nt, Artificial Sequence
  Synthetic
auauuuucauaaaaauacugaag

SEQ ID NO: 565210 - RNA, 24 nt, Artificial Sequence
  Synthetic
cauauuuucauaaaaauacugaag

SEQ ID NO: 565211 - RNA, 18 nt, Artificial Sequence
  Synthetic
uagcaacaccaccugaag

SEQ ID NO: 565212 - RNA, 19 nt, Artificial Sequence
  Synthetic
uuagcaacaccaccugaag

SEQ ID NO: 565213 - RNA, 20 nt, Artificial Sequence
  Synthetic
auuagcaacaccaccugaag

SEQ ID NO: 565214 - RNA, 21 nt, Artificial Sequence
  Synthetic
cauuagcaacaccaccugaag

SEQ ID NO: 565215 - RNA, 22 nt, Artificial Sequence
  Synthetic
ucauuagcaacaccaccugaag

SEQ ID NO: 565216 - RNA, 23 nt, Artificial Sequence
  Synthetic
uucauuagcaacaccaccugaag

SEQ ID NO: 565217 - RNA, 24 nt, Artificial Sequence
  Synthetic
cuucauuagcaacaccaccugaag

SEQ ID NO: 565218 - RNA, 18 nt, Artificial Sequence
  Synthetic
guugggaccuuccugaag

SEQ ID NO: 565219 - RNA, 19 nt, Artificial Sequence
  Synthetic
aguugggaccuuccugaag

SEQ ID NO: 565220 - RNA, 20 nt, Artificial Sequence
  Synthetic
gaguugggaccuuccugaag

SEQ ID NO: 565221 - RNA, 21 nt, Artificial Sequence
  Synthetic
ugaguugggaccuuccugaag

SEQ ID NO: 565222 - RNA, 22 nt, Artificial Sequence
  Synthetic
augaguugggaccuuccugaag

SEQ ID NO: 565223 - RNA, 23 nt, Artificial Sequence
  Synthetic
aaugaguugggaccuuccugaag

SEQ ID NO: 565224 - RNA, 24 nt, Artificial Sequence
  Synthetic
gaaugaguugggaccuuccugaag

SEQ ID NO: 565225 - RNA, 18 nt, Artificial Sequence
  Synthetic
uguggcugugagcugaag

SEQ ID NO: 565226 - RNA, 19 nt, Artificial Sequence
  Synthetic
guguggcugugagcugaag

SEQ ID NO: 565227 - RNA, 20 nt, Artificial Sequence
  Synthetic
aguguggcugugagcugaag

SEQ ID NO: 565228 - RNA, 21 nt, Artificial Sequence
  Synthetic
gaguguggcugugagcugaag

SEQ ID NO: 565229 - RNA, 22 nt, Artificial Sequence
  Synthetic
ggaguguggcugugagcugaag

SEQ ID NO: 565230 - RNA, 23 nt, Artificial Sequence
  Synthetic
aggaguguggcugugagcugaag

SEQ ID NO: 565231 - RNA, 24 nt, Artificial Sequence
  Synthetic
gaggaguguggcugugagcugaag

SEQ ID NO: 565232 - RNA, 18 nt, Artificial Sequence
  Synthetic
uucacauuugagcugaag

SEQ ID NO: 565233 - RNA, 19 nt, Artificial Sequence
  Synthetic
auucacauuugagcugaag

SEQ ID NO: 565234 - RNA, 20 nt, Artificial Sequence
  Synthetic
uauucacauuugagcugaag

SEQ ID NO: 565235 - RNA, 21 nt, Artificial Sequence
  Synthetic
cuauucacauuugagcugaag

SEQ ID NO: 565236 - RNA, 22 nt, Artificial Sequence
  Synthetic
gcuauucacauuugagcugaag

SEQ ID NO: 565237 - RNA, 23 nt, Artificial Sequence
  Synthetic
ugcuauucacauuugagcugaag

SEQ ID NO: 565238 - RNA, 24 nt, Artificial Sequence
  Synthetic
uugcuauucacauuugagcugaag

SEQ ID NO: 565239 - RNA, 18 nt, Artificial Sequence
  Synthetic
cuacucaggaggcugaag

SEQ ID NO: 565240 - RNA, 19 nt, Artificial Sequence
  Synthetic
gcuacucaggaggcugaag

SEQ ID NO: 565241 - RNA, 20 nt, Artificial Sequence
  Synthetic
agcuacucaggaggcugaag

SEQ ID NO: 565242 - RNA, 21 nt, Artificial Sequence
  Synthetic
cagcuacucaggaggcugaag

SEQ ID NO: 565243 - RNA, 22 nt, Artificial Sequence
  Synthetic
ccagcuacucaggaggcugaag

SEQ ID NO: 565244 - RNA, 23 nt, Artificial Sequence
  Synthetic
cccagcuacucaggaggcugaag

SEQ ID NO: 565245 - RNA, 24 nt, Artificial Sequence
  Synthetic
ucccagcuacucaggaggcugaag

SEQ ID NO: 565246 - RNA, 18 nt, Artificial Sequence
  Synthetic
cuacucaguaggcugaag

SEQ ID NO: 565247 - RNA, 19 nt, Artificial Sequence
  Synthetic
gcuacucaguaggcugaag

SEQ ID NO: 565248 - RNA, 20 nt, Artificial Sequence
  Synthetic
ggcuacucaguaggcugaag

SEQ ID NO: 565249 - RNA, 21 nt, Artificial Sequence
  Synthetic
uggcuacucaguaggcugaag

SEQ ID NO: 565250 - RNA, 22 nt, Artificial Sequence
  Synthetic
cuggcuacucaguaggcugaag

SEQ ID NO: 565251 - RNA, 23 nt, Artificial Sequence
  Synthetic
ccuggcuacucaguaggcugaag

SEQ ID NO: 565252 - RNA, 24 nt, Artificial Sequence
  Synthetic
uccuggcuacucaguaggcugaag

SEQ ID NO: 565253 - RNA, 18 nt, Artificial Sequence
  Synthetic
caguuucuucaucugaag

SEQ ID NO: 565254 - RNA, 19 nt, Artificial Sequence
  Synthetic
ucaguuucuucaucugaag

SEQ ID NO: 565255 - RNA, 20 nt, Artificial Sequence
  Synthetic
uucaguuucuucaucugaag

SEQ ID NO: 565256 - RNA, 21 nt, Artificial Sequence
  Synthetic
cuucaguuucuucaucugaag

SEQ ID NO: 565257 - RNA, 22 nt, Artificial Sequence
  Synthetic
gcuucaguuucuucaucugaag

SEQ ID NO: 565258 - RNA, 23 nt, Artificial Sequence
  Synthetic
ugcuucaguuucuucaucugaag

SEQ ID NO: 565259 - RNA, 24 nt, Artificial Sequence
  Synthetic
gugcuucaguuucuucaucugaag

SEQ ID NO: 565260 - RNA, 18 nt, Artificial Sequence
  Synthetic
cagagaagucuucugaag

SEQ ID NO: 565261 - RNA, 19 nt, Artificial Sequence
  Synthetic
ccagagaagucuucugaag

SEQ ID NO: 565262 - RNA, 20 nt, Artificial Sequence
  Synthetic
uccagagaagucuucugaag

SEQ ID NO: 565263 - RNA, 21 nt, Artificial Sequence
  Synthetic
cuccagagaagucuucugaag

SEQ ID NO: 565264 - RNA, 22 nt, Artificial Sequence
  Synthetic
ccuccagagaagucuucugaag

SEQ ID NO: 565265 - RNA, 23 nt, Artificial Sequence
  Synthetic
accuccagagaagucuucugaag

SEQ ID NO: 565266 - RNA, 24 nt, Artificial Sequence
  Synthetic
caccuccagagaagucuucugaag

SEQ ID NO: 565267 - RNA, 18 nt, Artificial Sequence
  Synthetic
gauucaacaguucugaag

SEQ ID NO: 565268 - RNA, 19 nt, Artificial Sequence
  Synthetic
ugauucaacaguucugaag

SEQ ID NO: 565269 - RNA, 20 nt, Artificial Sequence
  Synthetic
cugauucaacaguucugaag

SEQ ID NO: 565270 - RNA, 21 nt, Artificial Sequence
  Synthetic
ucugauucaacaguucugaag

SEQ ID NO: 565271 - RNA, 22 nt, Artificial Sequence
  Synthetic
uucugauucaacaguucugaag

SEQ ID NO: 565272 - RNA, 23 nt, Artificial Sequence
  Synthetic
auucugauucaacaguucugaag

SEQ ID NO: 565273 - RNA, 24 nt, Artificial Sequence
  Synthetic
gauucugauucaacaguucugaag

SEQ ID NO: 565274 - RNA, 18 nt, Artificial Sequence
  Synthetic
aguaaaugguuucugaag

SEQ ID NO: 565275 - RNA, 19 nt, Artificial Sequence
  Synthetic
caguaaaugguuucugaag

SEQ ID NO: 565276 - RNA, 20 nt, Artificial Sequence
  Synthetic
acaguaaaugguuucugaag

SEQ ID NO: 565277 - RNA, 21 nt, Artificial Sequence
  Synthetic
cacaguaaaugguuucugaag

SEQ ID NO: 565278 - RNA, 22 nt, Artificial Sequence
  Synthetic
ccacaguaaaugguuucugaag

SEQ ID NO: 565279 - RNA, 23 nt, Artificial Sequence
  Synthetic
cccacaguaaaugguuucugaag

SEQ ID NO: 565280 - RNA, 24 nt, Artificial Sequence
  Synthetic
gcccacaguaaaugguuucugaag

SEQ ID NO: 565281 - RNA, 18 nt, Artificial Sequence
  Synthetic
uugcuugccaaagugaag

SEQ ID NO: 565282 - RNA, 19 nt, Artificial Sequence
  Synthetic
cuugcuugccaaagugaag

SEQ ID NO: 565283 - RNA, 20 nt, Artificial Sequence
  Synthetic
ucuugcuugccaaagugaag

SEQ ID NO: 565284 - RNA, 21 nt, Artificial Sequence
  Synthetic
aucuugcuugccaaagugaag

SEQ ID NO: 565285 - RNA, 22 nt, Artificial Sequence
  Synthetic
uaucuugcuugccaaagugaag

SEQ ID NO: 565286 - RNA, 23 nt, Artificial Sequence
  Synthetic
guaucuugcuugccaaagugaag

SEQ ID NO: 565287 - RNA, 24 nt, Artificial Sequence
  Synthetic
aguaucuugcuugccaaagugaag

SEQ ID NO: 565288 - RNA, 18 nt, Artificial Sequence
  Synthetic
cagcuucucaaagugaag

SEQ ID NO: 565289 - RNA, 19 nt, Artificial Sequence
  Synthetic
acagcuucucaaagugaag

SEQ ID NO: 565290 - RNA, 20 nt, Artificial Sequence
  Synthetic
aacagcuucucaaagugaag

SEQ ID NO: 565291 - RNA, 21 nt, Artificial Sequence
  Synthetic
aaacagcuucucaaagugaag

SEQ ID NO: 565292 - RNA, 22 nt, Artificial Sequence
  Synthetic
aaaacagcuucucaaagugaag

SEQ ID NO: 565293 - RNA, 23 nt, Artificial Sequence
  Synthetic
aaaaacagcuucucaaagugaag

SEQ ID NO: 565294 - RNA, 24 nt, Artificial Sequence
  Synthetic
aaaaaacagcuucucaaagugaag

SEQ ID NO: 565295 - RNA, 18 nt, Artificial Sequence
  Synthetic
ugcaauucuaaagugaag

SEQ ID NO: 565296 - RNA, 19 nt, Artificial Sequence
  Synthetic
uugcaauucuaaagugaag

SEQ ID NO: 565297 - RNA, 20 nt, Artificial Sequence
  Synthetic
cuugcaauucuaaagugaag

SEQ ID NO: 565298 - RNA, 21 nt, Artificial Sequence
  Synthetic
ucuugcaauucuaaagugaag

SEQ ID NO: 565299 - RNA, 22 nt, Artificial Sequence
  Synthetic
aucuugcaauucuaaagugaag

SEQ ID NO: 565300 - RNA, 23 nt, Artificial Sequence
  Synthetic
aaucuugcaauucuaaagugaag

SEQ ID NO: 565301 - RNA, 24 nt, Artificial Sequence
  Synthetic
aaaucuugcaauucuaaagugaag

SEQ ID NO: 565302 - RNA, 18 nt, Artificial Sequence
  Synthetic
uaagcuucauaagugaag

SEQ ID NO: 565303 - RNA, 19 nt, Artificial Sequence
  Synthetic
cuaagcuucauaagugaag

SEQ ID NO: 565304 - RNA, 20 nt, Artificial Sequence
  Synthetic
acuaagcuucauaagugaag

SEQ ID NO: 565305 - RNA, 21 nt, Artificial Sequence
  Synthetic
aacuaagcuucauaagugaag

SEQ ID NO: 565306 - RNA, 22 nt, Artificial Sequence
  Synthetic
aaacuaagcuucauaagugaag

SEQ ID NO: 565307 - RNA, 23 nt, Artificial Sequence
  Synthetic
caaacuaagcuucauaagugaag

SEQ ID NO: 565308 - RNA, 24 nt, Artificial Sequence
  Synthetic
ccaaacuaagcuucauaagugaag

SEQ ID NO: 565309 - RNA, 18 nt, Artificial Sequence
  Synthetic
aagaagugcccagugaag

SEQ ID NO: 565310 - RNA, 19 nt, Artificial Sequence
  Synthetic
gaagaagugcccagugaag

SEQ ID NO: 565311 - RNA, 20 nt, Artificial Sequence
  Synthetic
ggaagaagugcccagugaag

SEQ ID NO: 565312 - RNA, 21 nt, Artificial Sequence
  Synthetic
aggaagaagugcccagugaag

SEQ ID NO: 565313 - RNA, 22 nt, Artificial Sequence
  Synthetic
caggaagaagugcccagugaag

SEQ ID NO: 565314 - RNA, 23 nt, Artificial Sequence
  Synthetic
gcaggaagaagugcccagugaag

SEQ ID NO: 565315 - RNA, 24 nt, Artificial Sequence
  Synthetic
ggcaggaagaagugcccagugaag

SEQ ID NO: 565316 - RNA, 18 nt, Artificial Sequence
  Synthetic
ggggcuguagcagugaag

SEQ ID NO: 565317 - RNA, 19 nt, Artificial Sequence
  Synthetic
aggggcuguagcagugaag

SEQ ID NO: 565318 - RNA, 20 nt, Artificial Sequence
  Synthetic
caggggcuguagcagugaag

SEQ ID NO: 565319 - RNA, 21 nt, Artificial Sequence
  Synthetic
gcaggggcuguagcagugaag

SEQ ID NO: 565320 - RNA, 22 nt, Artificial Sequence
  Synthetic
ugcaggggcuguagcagugaag

SEQ ID NO: 565321 - RNA, 23 nt, Artificial Sequence
  Synthetic
gugcaggggcuguagcagugaag

SEQ ID NO: 565322 - RNA, 24 nt, Artificial Sequence
  Synthetic
ggugcaggggcuguagcagugaag

SEQ ID NO: 565323 - RNA, 18 nt, Artificial Sequence
  Synthetic
cucuucauuucagugaag

SEQ ID NO: 565324 - RNA, 19 nt, Artificial Sequence
  Synthetic
acucuucauuucagugaag

SEQ ID NO: 565325 - RNA, 20 nt, Artificial Sequence
  Synthetic
aacucuucauuucagugaag

SEQ ID NO: 565326 - RNA, 21 nt, Artificial Sequence
  Synthetic
aaacucuucauuucagugaag

SEQ ID NO: 565327 - RNA, 22 nt, Artificial Sequence
  Synthetic
caaacucuucauuucagugaag

SEQ ID NO: 565328 - RNA, 23 nt, Artificial Sequence
  Synthetic
ucaaacucuucauuucagugaag

SEQ ID NO: 565329 - RNA, 24 nt, Artificial Sequence
  Synthetic
gucaaacucuucauuucagugaag

SEQ ID NO: 565330 - RNA, 18 nt, Artificial Sequence
  Synthetic
acaagacccagagugaag

SEQ ID NO: 565331 - RNA, 19 nt, Artificial Sequence
  Synthetic
aacaagacccagagugaag

SEQ ID NO: 565332 - RNA, 20 nt, Artificial Sequence
  Synthetic
uaacaagacccagagugaag

SEQ ID NO: 565333 - RNA, 21 nt, Artificial Sequence
  Synthetic
guaacaagacccagagugaag

SEQ ID NO: 565334 - RNA, 22 nt, Artificial Sequence
  Synthetic
gguaacaagacccagagugaag

SEQ ID NO: 565335 - RNA, 23 nt, Artificial Sequence
  Synthetic
agguaacaagacccagagugaag

SEQ ID NO: 565336 - RNA, 24 nt, Artificial Sequence
  Synthetic
gagguaacaagacccagagugaag

SEQ ID NO: 565337 - RNA, 18 nt, Artificial Sequence
  Synthetic
uuuucauuuuuagugaag

SEQ ID NO: 565338 - RNA, 19 nt, Artificial Sequence
  Synthetic
uuuuucauuuuuagugaag

SEQ ID NO: 565339 - RNA, 20 nt, Artificial Sequence
  Synthetic
auuuuucauuuuuagugaag

SEQ ID NO: 565340 - RNA, 21 nt, Artificial Sequence
  Synthetic
aauuuuucauuuuuagugaag

SEQ ID NO: 565341 - RNA, 22 nt, Artificial Sequence
  Synthetic
caauuuuucauuuuuagugaag

SEQ ID NO: 565342 - RNA, 23 nt, Artificial Sequence
  Synthetic
ucaauuuuucauuuuuagugaag

SEQ ID NO: 565343 - RNA, 24 nt, Artificial Sequence
  Synthetic
cucaauuuuucauuuuuagugaag

SEQ ID NO: 565344 - RNA, 18 nt, Artificial Sequence
  Synthetic
agagccaagaaggugaag

SEQ ID NO: 565345 - RNA, 19 nt, Artificial Sequence
  Synthetic
aagagccaagaaggugaag

SEQ ID NO: 565346 - RNA, 20 nt, Artificial Sequence
  Synthetic
uaagagccaagaaggugaag

SEQ ID NO: 565347 - RNA, 21 nt, Artificial Sequence
  Synthetic
uuaagagccaagaaggugaag

SEQ ID NO: 565348 - RNA, 22 nt, Artificial Sequence
  Synthetic
cuuaagagccaagaaggugaag

SEQ ID NO: 565349 - RNA, 23 nt, Artificial Sequence
  Synthetic
acuuaagagccaagaaggugaag

SEQ ID NO: 565350 - RNA, 24 nt, Artificial Sequence
  Synthetic
aacuuaagagccaagaaggugaag

SEQ ID NO: 565351 - RNA, 18 nt, Artificial Sequence
  Synthetic
acuguguguugggugaag

SEQ ID NO: 565352 - RNA, 19 nt, Artificial Sequence
  Synthetic
gacuguguguugggugaag

SEQ ID NO: 565353 - RNA, 20 nt, Artificial Sequence
  Synthetic
ugacuguguguugggugaag

SEQ ID NO: 565354 - RNA, 21 nt, Artificial Sequence
  Synthetic
gugacuguguguugggugaag

SEQ ID NO: 565355 - RNA, 22 nt, Artificial Sequence
  Synthetic
agugacuguguguugggugaag

SEQ ID NO: 565356 - RNA, 23 nt, Artificial Sequence
  Synthetic
cagugacuguguguugggugaag

SEQ ID NO: 565357 - RNA, 24 nt, Artificial Sequence
  Synthetic
ucagugacuguguguugggugaag

SEQ ID NO: 565358 - RNA, 18 nt, Artificial Sequence
  Synthetic
agcuaaaagguggugaag

SEQ ID NO: 565359 - RNA, 19 nt, Artificial Sequence
  Synthetic
aagcuaaaagguggugaag

SEQ ID NO: 565360 - RNA, 20 nt, Artificial Sequence
  Synthetic
caagcuaaaagguggugaag

SEQ ID NO: 565361 - RNA, 21 nt, Artificial Sequence
  Synthetic
ccaagcuaaaagguggugaag

SEQ ID NO: 565362 - RNA, 22 nt, Artificial Sequence
  Synthetic
accaagcuaaaagguggugaag

SEQ ID NO: 565363 - RNA, 23 nt, Artificial Sequence
  Synthetic
caccaagcuaaaagguggugaag

SEQ ID NO: 565364 - RNA, 24 nt, Artificial Sequence
  Synthetic
ucaccaagcuaaaagguggugaag

SEQ ID NO: 565365 - RNA, 18 nt, Artificial Sequence
  Synthetic
gugcugggaaaugugaag

SEQ ID NO: 565366 - RNA, 19 nt, Artificial Sequence
  Synthetic
ugugcugggaaaugugaag

SEQ ID NO: 565367 - RNA, 20 nt, Artificial Sequence
  Synthetic
cugugcugggaaaugugaag

SEQ ID NO: 565368 - RNA, 21 nt, Artificial Sequence
  Synthetic
ccugugcugggaaaugugaag

SEQ ID NO: 565369 - RNA, 22 nt, Artificial Sequence
  Synthetic
uccugugcugggaaaugugaag

SEQ ID NO: 565370 - RNA, 23 nt, Artificial Sequence
  Synthetic
uuccugugcugggaaaugugaag

SEQ ID NO: 565371 - RNA, 24 nt, Artificial Sequence
  Synthetic
guuccugugcugggaaaugugaag

SEQ ID NO: 565372 - RNA, 18 nt, Artificial Sequence
  Synthetic
uccugcugccaugugaag

SEQ ID NO: 565373 - RNA, 19 nt, Artificial Sequence
  Synthetic
uuccugcugccaugugaag

SEQ ID NO: 565374 - RNA, 20 nt, Artificial Sequence
  Synthetic
cuuccugcugccaugugaag

SEQ ID NO: 565375 - RNA, 21 nt, Artificial Sequence
  Synthetic
ccuuccugcugccaugugaag

SEQ ID NO: 565376 - RNA, 22 nt, Artificial Sequence
  Synthetic
uccuuccugcugccaugugaag

SEQ ID NO: 565377 - RNA, 23 nt, Artificial Sequence
  Synthetic
cuccuuccugcugccaugugaag

SEQ ID NO: 565378 - RNA, 24 nt, Artificial Sequence
  Synthetic
ccuccuuccugcugccaugugaag

SEQ ID NO: 565379 - RNA, 18 nt, Artificial Sequence
  Synthetic
uuuauuuccucugugaag

SEQ ID NO: 565380 - RNA, 19 nt, Artificial Sequence
  Synthetic
uuuuauuuccucugugaag

SEQ ID NO: 565381 - RNA, 20 nt, Artificial Sequence
  Synthetic
guuuuauuuccucugugaag

SEQ ID NO: 565382 - RNA, 21 nt, Artificial Sequence
  Synthetic
gguuuuauuuccucugugaag

SEQ ID NO: 565383 - RNA, 22 nt, Artificial Sequence
  Synthetic
ggguuuuauuuccucugugaag

SEQ ID NO: 565384 - RNA, 23 nt, Artificial Sequence
  Synthetic
gggguuuuauuuccucugugaag

SEQ ID NO: 565385 - RNA, 24 nt, Artificial Sequence
  Synthetic
agggguuuuauuuccucugugaag

SEQ ID NO: 565386 - RNA, 21 nt, Artificial Sequence
  Synthetic
ggaagggggaggggugugaag

SEQ ID NO: 565387 - RNA, 22 nt, Artificial Sequence
  Synthetic
gggaagggggaggggugugaag

SEQ ID NO: 565388 - RNA, 23 nt, Artificial Sequence
  Synthetic
ggggaagggggaggggugugaag

SEQ ID NO: 565389 - RNA, 24 nt, Artificial Sequence
  Synthetic
uggggaagggggaggggugugaag

SEQ ID NO: 565390 - RNA, 21 nt, Artificial Sequence
  Synthetic
ugaagggggaggggugugaag

SEQ ID NO: 565391 - RNA, 22 nt, Artificial Sequence
  Synthetic
gugaagggggaggggugugaag

SEQ ID NO: 565392 - RNA, 23 nt, Artificial Sequence
  Synthetic
ugugaagggggaggggugugaag

SEQ ID NO: 565393 - RNA, 24 nt, Artificial Sequence
  Synthetic
gugugaagggggaggggugugaag

SEQ ID NO: 565394 - RNA, 18 nt, Artificial Sequence
  Synthetic
auugugcagaaauugaag

SEQ ID NO: 565395 - RNA, 19 nt, Artificial Sequence
  Synthetic
aauugugcagaaauugaag

SEQ ID NO: 565396 - RNA, 20 nt, Artificial Sequence
  Synthetic
gaauugugcagaaauugaag

SEQ ID NO: 565397 - RNA, 21 nt, Artificial Sequence
  Synthetic
agaauugugcagaaauugaag

SEQ ID NO: 565398 - RNA, 22 nt, Artificial Sequence
  Synthetic
aagaauugugcagaaauugaag

SEQ ID NO: 565399 - RNA, 23 nt, Artificial Sequence
  Synthetic
aaagaauugugcagaaauugaag

SEQ ID NO: 565400 - RNA, 24 nt, Artificial Sequence
  Synthetic
aaaagaauugugcagaaauugaag

SEQ ID NO: 565401 - RNA, 18 nt, Artificial Sequence
  Synthetic
uuucuucuuuuauugaag

SEQ ID NO: 565402 - RNA, 19 nt, Artificial Sequence
  Synthetic
cuuucuucuuuuauugaag

SEQ ID NO: 565403 - RNA, 20 nt, Artificial Sequence
  Synthetic
gcuuucuucuuuuauugaag

SEQ ID NO: 565404 - RNA, 21 nt, Artificial Sequence
  Synthetic
ugcuuucuucuuuuauugaag

SEQ ID NO: 565405 - RNA, 22 nt, Artificial Sequence
  Synthetic
augcuuucuucuuuuauugaag

SEQ ID NO: 565406 - RNA, 23 nt, Artificial Sequence
  Synthetic
caugcuuucuucuuuuauugaag

SEQ ID NO: 565407 - RNA, 24 nt, Artificial Sequence
  Synthetic
ucaugcuuucuucuuuuauugaag

SEQ ID NO: 565408 - RNA, 18 nt, Artificial Sequence
  Synthetic
aaaaguaagcacuugaag

SEQ ID NO: 565409 - RNA, 19 nt, Artificial Sequence
  Synthetic
caaaaguaagcacuugaag

SEQ ID NO: 565410 - RNA, 20 nt, Artificial Sequence
  Synthetic
ucaaaaguaagcacuugaag

SEQ ID NO: 565411 - RNA, 21 nt, Artificial Sequence
  Synthetic
aucaaaaguaagcacuugaag

SEQ ID NO: 565412 - RNA, 22 nt, Artificial Sequence
  Synthetic
uaucaaaaguaagcacuugaag

SEQ ID NO: 565413 - RNA, 23 nt, Artificial Sequence
  Synthetic
guaucaaaaguaagcacuugaag

SEQ ID NO: 565414 - RNA, 24 nt, Artificial Sequence
  Synthetic
gguaucaaaaguaagcacuugaag

SEQ ID NO: 565415 - RNA, 18 nt, Artificial Sequence
  Synthetic
uccacauuucacuugaag

SEQ ID NO: 565416 - RNA, 19 nt, Artificial Sequence
  Synthetic
auccacauuucacuugaag

SEQ ID NO: 565417 - RNA, 20 nt, Artificial Sequence
  Synthetic
aauccacauuucacuugaag

SEQ ID NO: 565418 - RNA, 21 nt, Artificial Sequence
  Synthetic
aaauccacauuucacuugaag

SEQ ID NO: 565419 - RNA, 22 nt, Artificial Sequence
  Synthetic
aaaauccacauuucacuugaag

SEQ ID NO: 565420 - RNA, 23 nt, Artificial Sequence
  Synthetic
uaaaauccacauuucacuugaag

SEQ ID NO: 565421 - RNA, 24 nt, Artificial Sequence
  Synthetic
auaaaauccacauuucacuugaag

SEQ ID NO: 565422 - RNA, 18 nt, Artificial Sequence
  Synthetic
auuuaaucuaccuugaag

SEQ ID NO: 565423 - RNA, 19 nt, Artificial Sequence
  Synthetic
aauuuaaucuaccuugaag

SEQ ID NO: 565424 - RNA, 20 nt, Artificial Sequence
  Synthetic
gaauuuaaucuaccuugaag

SEQ ID NO: 565425 - RNA, 21 nt, Artificial Sequence
  Synthetic
agaauuuaaucuaccuugaag

SEQ ID NO: 565426 - RNA, 22 nt, Artificial Sequence
  Synthetic
aagaauuuaaucuaccuugaag

SEQ ID NO: 565427 - RNA, 23 nt, Artificial Sequence
  Synthetic
aaagaauuuaaucuaccuugaag

SEQ ID NO: 565428 - RNA, 24 nt, Artificial Sequence
  Synthetic
caaagaauuuaaucuaccuugaag

SEQ ID NO: 565429 - RNA, 18 nt, Artificial Sequence
  Synthetic
gcugccauaagcuugaag

SEQ ID NO: 565430 - RNA, 19 nt, Artificial Sequence
  Synthetic
ugcugccauaagcuugaag

SEQ ID NO: 565431 - RNA, 20 nt, Artificial Sequence
  Synthetic
uugcugccauaagcuugaag

SEQ ID NO: 565432 - RNA, 21 nt, Artificial Sequence
  Synthetic
uuugcugccauaagcuugaag

SEQ ID NO: 565433 - RNA, 22 nt, Artificial Sequence
  Synthetic
auuugcugccauaagcuugaag

SEQ ID NO: 565434 - RNA, 23 nt, Artificial Sequence
  Synthetic
aauuugcugccauaagcuugaag

SEQ ID NO: 565435 - RNA, 24 nt, Artificial Sequence
  Synthetic
uaauuugcugccauaagcuugaag

SEQ ID NO: 565436 - RNA, 18 nt, Artificial Sequence
  Synthetic
cuaacccacaucuugaag

SEQ ID NO: 565437 - RNA, 19 nt, Artificial Sequence
  Synthetic
acuaacccacaucuugaag

SEQ ID NO: 565438 - RNA, 20 nt, Artificial Sequence
  Synthetic
uacuaacccacaucuugaag

SEQ ID NO: 565439 - RNA, 21 nt, Artificial Sequence
  Synthetic
cuacuaacccacaucuugaag

SEQ ID NO: 565440 - RNA, 22 nt, Artificial Sequence
  Synthetic
ucuacuaacccacaucuugaag

SEQ ID NO: 565441 - RNA, 23 nt, Artificial Sequence
  Synthetic
cucuacuaacccacaucuugaag

SEQ ID NO: 565442 - RNA, 24 nt, Artificial Sequence
  Synthetic
gcucuacuaacccacaucuugaag

SEQ ID NO: 565443 - RNA, 18 nt, Artificial Sequence
  Synthetic
gagauaagagucuugaag

SEQ ID NO: 565444 - RNA, 19 nt, Artificial Sequence
  Synthetic
ggagauaagagucuugaag

SEQ ID NO: 565445 - RNA, 20 nt, Artificial Sequence
  Synthetic
aggagauaagagucuugaag

SEQ ID NO: 565446 - RNA, 21 nt, Artificial Sequence
  Synthetic
aaggagauaagagucuugaag

SEQ ID NO: 565447 - RNA, 22 nt, Artificial Sequence
  Synthetic
aaaggagauaagagucuugaag

SEQ ID NO: 565448 - RNA, 23 nt, Artificial Sequence
  Synthetic
caaaggagauaagagucuugaag

SEQ ID NO: 565449 - RNA, 24 nt, Artificial Sequence
  Synthetic
ucaaaggagauaagagucuugaag

SEQ ID NO: 565450 - RNA, 18 nt, Artificial Sequence
  Synthetic
agaaaggaauucuugaag

SEQ ID NO: 565451 - RNA, 19 nt, Artificial Sequence
  Synthetic
aagaaaggaauucuugaag

SEQ ID NO: 565452 - RNA, 20 nt, Artificial Sequence
  Synthetic
gaagaaaggaauucuugaag

SEQ ID NO: 565453 - RNA, 21 nt, Artificial Sequence
  Synthetic
agaagaaaggaauucuugaag

SEQ ID NO: 565454 - RNA, 22 nt, Artificial Sequence
  Synthetic
aagaagaaaggaauucuugaag

SEQ ID NO: 565455 - RNA, 23 nt, Artificial Sequence
  Synthetic
aaagaagaaaggaauucuugaag

SEQ ID NO: 565456 - RNA, 24 nt, Artificial Sequence
  Synthetic
uaaagaagaaaggaauucuugaag

SEQ ID NO: 565457 - RNA, 18 nt, Artificial Sequence
  Synthetic
ucuaaucaguucuugaag

SEQ ID NO: 565458 - RNA, 19 nt, Artificial Sequence
  Synthetic
gucuaaucaguucuugaag

SEQ ID NO: 565459 - RNA, 20 nt, Artificial Sequence
  Synthetic
agucuaaucaguucuugaag

SEQ ID NO: 565460 - RNA, 21 nt, Artificial Sequence
  Synthetic
aagucuaaucaguucuugaag

SEQ ID NO: 565461 - RNA, 22 nt, Artificial Sequence
  Synthetic
gaagucuaaucaguucuugaag

SEQ ID NO: 565462 - RNA, 23 nt, Artificial Sequence
  Synthetic
agaagucuaaucaguucuugaag

SEQ ID NO: 565463 - RNA, 24 nt, Artificial Sequence
  Synthetic
uagaagucuaaucaguucuugaag

SEQ ID NO: 565464 - RNA, 18 nt, Artificial Sequence
  Synthetic
aauugcacauuguugaag

SEQ ID NO: 565465 - RNA, 19 nt, Artificial Sequence
  Synthetic
aaauugcacauuguugaag

SEQ ID NO: 565466 - RNA, 20 nt, Artificial Sequence
  Synthetic
uaaauugcacauuguugaag

SEQ ID NO: 565467 - RNA, 21 nt, Artificial Sequence
  Synthetic
auaaauugcacauuguugaag

SEQ ID NO: 565468 - RNA, 22 nt, Artificial Sequence
  Synthetic
gauaaauugcacauuguugaag

SEQ ID NO: 565469 - RNA, 23 nt, Artificial Sequence
  Synthetic
ggauaaauugcacauuguugaag

SEQ ID NO: 565470 - RNA, 24 nt, Artificial Sequence
  Synthetic
aggauaaauugcacauuguugaag

SEQ ID NO: 565471 - RNA, 18 nt, Artificial Sequence
  Synthetic
agucaguacaauuugaag

SEQ ID NO: 565472 - RNA, 19 nt, Artificial Sequence
  Synthetic
gagucaguacaauuugaag

SEQ ID NO: 565473 - RNA, 20 nt, Artificial Sequence
  Synthetic
agagucaguacaauuugaag

SEQ ID NO: 565474 - RNA, 21 nt, Artificial Sequence
  Synthetic
uagagucaguacaauuugaag

SEQ ID NO: 565475 - RNA, 22 nt, Artificial Sequence
  Synthetic
guagagucaguacaauuugaag

SEQ ID NO: 565476 - RNA, 23 nt, Artificial Sequence
  Synthetic
gguagagucaguacaauuugaag

SEQ ID NO: 565477 - RNA, 24 nt, Artificial Sequence
  Synthetic
agguagagucaguacaauuugaag

SEQ ID NO: 565478 - RNA, 18 nt, Artificial Sequence
  Synthetic
aaguaaauuaauuugaag

SEQ ID NO: 565479 - RNA, 19 nt, Artificial Sequence
  Synthetic
gaaguaaauuaauuugaag

SEQ ID NO: 565480 - RNA, 20 nt, Artificial Sequence
  Synthetic
ggaaguaaauuaauuugaag

SEQ ID NO: 565481 - RNA, 21 nt, Artificial Sequence
  Synthetic
aggaaguaaauuaauuugaag

SEQ ID NO: 565482 - RNA, 22 nt, Artificial Sequence
  Synthetic
uaggaaguaaauuaauuugaag

SEQ ID NO: 565483 - RNA, 23 nt, Artificial Sequence
  Synthetic
auaggaaguaaauuaauuugaag

SEQ ID NO: 565484 - RNA, 24 nt, Artificial Sequence
  Synthetic
aauaggaaguaaauuaauuugaag

SEQ ID NO: 565485 - RNA, 18 nt, Artificial Sequence
  Synthetic
aaucugccaacuuugaag

SEQ ID NO: 565486 - RNA, 19 nt, Artificial Sequence
  Synthetic
aaaucugccaacuuugaag

SEQ ID NO: 565487 - RNA, 20 nt, Artificial Sequence
  Synthetic
caaaucugccaacuuugaag

SEQ ID NO: 565488 - RNA, 21 nt, Artificial Sequence
  Synthetic
ucaaaucugccaacuuugaag

SEQ ID NO: 565489 - RNA, 22 nt, Artificial Sequence
  Synthetic
cucaaaucugccaacuuugaag

SEQ ID NO: 565490 - RNA, 23 nt, Artificial Sequence
  Synthetic
ucucaaaucugccaacuuugaag

SEQ ID NO: 565491 - RNA, 24 nt, Artificial Sequence
  Synthetic
aucucaaaucugccaacuuugaag

SEQ ID NO: 565492 - RNA, 18 nt, Artificial Sequence
  Synthetic
caaaaaagguguuugaag

SEQ ID NO: 565493 - RNA, 19 nt, Artificial Sequence
  Synthetic
ucaaaaaagguguuugaag

SEQ ID NO: 565494 - RNA, 20 nt, Artificial Sequence
  Synthetic
gucaaaaaagguguuugaag

SEQ ID NO: 565495 - RNA, 21 nt, Artificial Sequence
  Synthetic
agucaaaaaagguguuugaag

SEQ ID NO: 565496 - RNA, 22 nt, Artificial Sequence
  Synthetic
aagucaaaaaagguguuugaag

SEQ ID NO: 565497 - RNA, 23 nt, Artificial Sequence
  Synthetic
gaagucaaaaaagguguuugaag

SEQ ID NO: 565498 - RNA, 24 nt, Artificial Sequence
  Synthetic
ugaagucaaaaaagguguuugaag

SEQ ID NO: 565499 - RNA, 18 nt, Artificial Sequence
  Synthetic
aaugugaaccuuuugaag

SEQ ID NO: 565500 - RNA, 19 nt, Artificial Sequence
  Synthetic
uaaugugaaccuuuugaag

SEQ ID NO: 565501 - RNA, 20 nt, Artificial Sequence
  Synthetic
uuaaugugaaccuuuugaag

SEQ ID NO: 565502 - RNA, 21 nt, Artificial Sequence
  Synthetic
auuaaugugaaccuuuugaag

SEQ ID NO: 565503 - RNA, 22 nt, Artificial Sequence
  Synthetic
aauuaaugugaaccuuuugaag

SEQ ID NO: 565504 - RNA, 23 nt, Artificial Sequence
  Synthetic
aaauuaaugugaaccuuuugaag

SEQ ID NO: 565505 - RNA, 24 nt, Artificial Sequence
  Synthetic
aaaauuaaugugaaccuuuugaag

SEQ ID NO: 565506 - RNA, 18 nt, Artificial Sequence
  Synthetic
gauucaacaguuuugaag

SEQ ID NO: 565507 - RNA, 19 nt, Artificial Sequence
  Synthetic
ugauucaacaguuuugaag

SEQ ID NO: 565508 - RNA, 20 nt, Artificial Sequence
  Synthetic
cugauucaacaguuuugaag

SEQ ID NO: 565509 - RNA, 21 nt, Artificial Sequence
  Synthetic
ucugauucaacaguuuugaag

SEQ ID NO: 565510 - RNA, 22 nt, Artificial Sequence
  Synthetic
uucugauucaacaguuuugaag

SEQ ID NO: 565511 - RNA, 23 nt, Artificial Sequence
  Synthetic
auucugauucaacaguuuugaag

SEQ ID NO: 565512 - RNA, 24 nt, Artificial Sequence
  Synthetic
gauucugauucaacaguuuugaag

SEQ ID NO: 565513 - RNA, 18 nt, Artificial Sequence
  Synthetic
uuugggaaaaaaaauaag

SEQ ID NO: 565514 - RNA, 19 nt, Artificial Sequence
  Synthetic
uuuugggaaaaaaaauaag

SEQ ID NO: 565515 - RNA, 20 nt, Artificial Sequence
  Synthetic
auuuugggaaaaaaaauaag

SEQ ID NO: 565516 - RNA, 21 nt, Artificial Sequence
  Synthetic
gauuuugggaaaaaaaauaag

SEQ ID NO: 565517 - RNA, 22 nt, Artificial Sequence
  Synthetic
agauuuugggaaaaaaaauaag

SEQ ID NO: 565518 - RNA, 23 nt, Artificial Sequence
  Synthetic
aagauuuugggaaaaaaaauaag

SEQ ID NO: 565519 - RNA, 24 nt, Artificial Sequence
  Synthetic
uaagauuuugggaaaaaaaauaag

SEQ ID NO: 565520 - RNA, 18 nt, Artificial Sequence
  Synthetic
gagauaaaaagaaauaag

SEQ ID NO: 565521 - RNA, 19 nt, Artificial Sequence
  Synthetic
agagauaaaaagaaauaag

SEQ ID NO: 565522 - RNA, 20 nt, Artificial Sequence
  Synthetic
uagagauaaaaagaaauaag

SEQ ID NO: 565523 - RNA, 21 nt, Artificial Sequence
  Synthetic
guagagauaaaaagaaauaag

SEQ ID NO: 565524 - RNA, 22 nt, Artificial Sequence
  Synthetic
gguagagauaaaaagaaauaag

SEQ ID NO: 565525 - RNA, 23 nt, Artificial Sequence
  Synthetic
agguagagauaaaaagaaauaag

SEQ ID NO: 565526 - RNA, 24 nt, Artificial Sequence
  Synthetic
gagguagagauaaaaagaaauaag

SEQ ID NO: 565527 - RNA, 18 nt, Artificial Sequence
  Synthetic
cguagaaagagaaauaag

SEQ ID NO: 565528 - RNA, 19 nt, Artificial Sequence
  Synthetic
ccguagaaagagaaauaag

SEQ ID NO: 565529 - RNA, 20 nt, Artificial Sequence
  Synthetic
gccguagaaagagaaauaag

SEQ ID NO: 565530 - RNA, 21 nt, Artificial Sequence
  Synthetic
ugccguagaaagagaaauaag

SEQ ID NO: 565531 - RNA, 22 nt, Artificial Sequence
  Synthetic
cugccguagaaagagaaauaag

SEQ ID NO: 565532 - RNA, 23 nt, Artificial Sequence
  Synthetic
gcugccguagaaagagaaauaag

SEQ ID NO: 565533 - RNA, 24 nt, Artificial Sequence
  Synthetic
agcugccguagaaagagaaauaag

SEQ ID NO: 565534 - RNA, 18 nt, Artificial Sequence
  Synthetic
gcuuaagagggaaauaag

SEQ ID NO: 565535 - RNA, 19 nt, Artificial Sequence
  Synthetic
ugcuuaagagggaaauaag

SEQ ID NO: 565536 - RNA, 20 nt, Artificial Sequence
  Synthetic
uugcuuaagagggaaauaag

SEQ ID NO: 565537 - RNA, 21 nt, Artificial Sequence
  Synthetic
auugcuuaagagggaaauaag

SEQ ID NO: 565538 - RNA, 22 nt, Artificial Sequence
  Synthetic
cauugcuuaagagggaaauaag

SEQ ID NO: 565539 - RNA, 23 nt, Artificial Sequence
  Synthetic
acauugcuuaagagggaaauaag

SEQ ID NO: 565540 - RNA, 24 nt, Artificial Sequence
  Synthetic
aacauugcuuaagagggaaauaag

SEQ ID NO: 565541 - RNA, 18 nt, Artificial Sequence
  Synthetic
aaaacuccuguaaauaag

SEQ ID NO: 565542 - RNA, 19 nt, Artificial Sequence
  Synthetic
gaaaacuccuguaaauaag

SEQ ID NO: 565543 - RNA, 20 nt, Artificial Sequence
  Synthetic
agaaaacuccuguaaauaag

SEQ ID NO: 565544 - RNA, 21 nt, Artificial Sequence
  Synthetic
cagaaaacuccuguaaauaag

SEQ ID NO: 565545 - RNA, 22 nt, Artificial Sequence
  Synthetic
acagaaaacuccuguaaauaag

SEQ ID NO: 565546 - RNA, 23 nt, Artificial Sequence
  Synthetic
aacagaaaacuccuguaaauaag

SEQ ID NO: 565547 - RNA, 24 nt, Artificial Sequence
  Synthetic
aaacagaaaacuccuguaaauaag

SEQ ID NO: 565548 - RNA, 18 nt, Artificial Sequence
  Synthetic
caaaauuaauacaauaag

SEQ ID NO: 565549 - RNA, 19 nt, Artificial Sequence
  Synthetic
acaaaauuaauacaauaag

SEQ ID NO: 565550 - RNA, 20 nt, Artificial Sequence
  Synthetic
aacaaaauuaauacaauaag

SEQ ID NO: 565551 - RNA, 21 nt, Artificial Sequence
  Synthetic
uaacaaaauuaauacaauaag

SEQ ID NO: 565552 - RNA, 22 nt, Artificial Sequence
  Synthetic
auaacaaaauuaauacaauaag

SEQ ID NO: 565553 - RNA, 23 nt, Artificial Sequence
  Synthetic
cauaacaaaauuaauacaauaag

SEQ ID NO: 565554 - RNA, 24 nt, Artificial Sequence
  Synthetic
gcauaacaaaauuaauacaauaag

SEQ ID NO: 565555 - RNA, 18 nt, Artificial Sequence
  Synthetic
aaaagccucaucaauaag

SEQ ID NO: 565556 - RNA, 19 nt, Artificial Sequence
  Synthetic
gaaaagccucaucaauaag

SEQ ID NO: 565557 - RNA, 20 nt, Artificial Sequence
  Synthetic
agaaaagccucaucaauaag

SEQ ID NO: 565558 - RNA, 21 nt, Artificial Sequence
  Synthetic
cagaaaagccucaucaauaag

SEQ ID NO: 565559 - RNA, 22 nt, Artificial Sequence
  Synthetic
acagaaaagccucaucaauaag

SEQ ID NO: 565560 - RNA, 23 nt, Artificial Sequence
  Synthetic
aacagaaaagccucaucaauaag

SEQ ID NO: 565561 - RNA, 24 nt, Artificial Sequence
  Synthetic
uaacagaaaagccucaucaauaag

SEQ ID NO: 565562 - RNA, 18 nt, Artificial Sequence
  Synthetic
caaaauuuggagaauaag

SEQ ID NO: 565563 - RNA, 19 nt, Artificial Sequence
  Synthetic
ucaaaauuuggagaauaag

SEQ ID NO: 565564 - RNA, 20 nt, Artificial Sequence
  Synthetic
aucaaaauuuggagaauaag

SEQ ID NO: 565565 - RNA, 21 nt, Artificial Sequence
  Synthetic
aaucaaaauuuggagaauaag

SEQ ID NO: 565566 - RNA, 22 nt, Artificial Sequence
  Synthetic
gaaucaaaauuuggagaauaag

SEQ ID NO: 565567 - RNA, 23 nt, Artificial Sequence
  Synthetic
ugaaucaaaauuuggagaauaag

SEQ ID NO: 565568 - RNA, 24 nt, Artificial Sequence
  Synthetic
augaaucaaaauuuggagaauaag

SEQ ID NO: 565569 - RNA, 18 nt, Artificial Sequence
  Synthetic
aaaaaaaaaaggaauaag

SEQ ID NO: 565570 - RNA, 19 nt, Artificial Sequence
  Synthetic
aaaaaaaaaaaggaauaag

SEQ ID NO: 565571 - RNA, 20 nt, Artificial Sequence
  Synthetic
aaaaaaaaaaaaggaauaag

SEQ ID NO: 565572 - RNA, 21 nt, Artificial Sequence
  Synthetic
aaaaaaaaaaaaaggaauaag

SEQ ID NO: 565573 - RNA, 22 nt, Artificial Sequence
  Synthetic
aaaaaaaaaaaaaaggaauaag

SEQ ID NO: 565574 - RNA, 23 nt, Artificial Sequence
  Synthetic
aaaaaaaaaaaaaaaggaauaag

SEQ ID NO: 565575 - RNA, 24 nt, Artificial Sequence
  Synthetic
aaaaaaaaaaaaaaaaggaauaag

SEQ ID NO: 565576 - RNA, 18 nt, Artificial Sequence
  Synthetic
gacaucaccaauaauaag

SEQ ID NO: 565577 - RNA, 19 nt, Artificial Sequence
  Synthetic
ugacaucaccaauaauaag

SEQ ID NO: 565578 - RNA, 20 nt, Artificial Sequence
  Synthetic
gugacaucaccaauaauaag

SEQ ID NO: 565579 - RNA, 21 nt, Artificial Sequence
  Synthetic
ugugacaucaccaauaauaag

SEQ ID NO: 565580 - RNA, 22 nt, Artificial Sequence
  Synthetic
augugacaucaccaauaauaag

SEQ ID NO: 565581 - RNA, 23 nt, Artificial Sequence
  Synthetic
uaugugacaucaccaauaauaag

SEQ ID NO: 565582 - RNA, 24 nt, Artificial Sequence
  Synthetic
uuaugugacaucaccaauaauaag

SEQ ID NO: 565583 - RNA, 18 nt, Artificial Sequence
  Synthetic
acagugguccauaauaag

SEQ ID NO: 565584 - RNA, 19 nt, Artificial Sequence
  Synthetic
gacagugguccauaauaag

SEQ ID NO: 565585 - RNA, 20 nt, Artificial Sequence
  Synthetic
ugacagugguccauaauaag

SEQ ID NO: 565586 - RNA, 21 nt, Artificial Sequence
  Synthetic
uugacagugguccauaauaag

SEQ ID NO: 565587 - RNA, 22 nt, Artificial Sequence
  Synthetic
guugacagugguccauaauaag

SEQ ID NO: 565588 - RNA, 23 nt, Artificial Sequence
  Synthetic
aguugacagugguccauaauaag

SEQ ID NO: 565589 - RNA, 24 nt, Artificial Sequence
  Synthetic
gaguugacagugguccauaauaag

SEQ ID NO: 565590 - RNA, 18 nt, Artificial Sequence
  Synthetic
uaaaacuauuauaauaag

SEQ ID NO: 565591 - RNA, 19 nt, Artificial Sequence
  Synthetic
uuaaaacuauuauaauaag

SEQ ID NO: 565592 - RNA, 20 nt, Artificial Sequence
  Synthetic
uuuaaaacuauuauaauaag

SEQ ID NO: 565593 - RNA, 21 nt, Artificial Sequence
  Synthetic
auuuaaaacuauuauaauaag

SEQ ID NO: 565594 - RNA, 22 nt, Artificial Sequence
  Synthetic
aauuuaaaacuauuauaauaag

SEQ ID NO: 565595 - RNA, 23 nt, Artificial Sequence
  Synthetic
aaauuuaaaacuauuauaauaag

SEQ ID NO: 565596 - RNA, 24 nt, Artificial Sequence
  Synthetic
uaaauuuaaaacuauuauaauaag

SEQ ID NO: 565597 - RNA, 18 nt, Artificial Sequence
  Synthetic
uuuaaagccccacauaag

SEQ ID NO: 565598 - RNA, 19 nt, Artificial Sequence
  Synthetic
auuuaaagccccacauaag

SEQ ID NO: 565599 - RNA, 20 nt, Artificial Sequence
  Synthetic
uauuuaaagccccacauaag

SEQ ID NO: 565600 - RNA, 21 nt, Artificial Sequence
  Synthetic
auauuuaaagccccacauaag

SEQ ID NO: 565601 - RNA, 22 nt, Artificial Sequence
  Synthetic
cauauuuaaagccccacauaag

SEQ ID NO: 565602 - RNA, 23 nt, Artificial Sequence
  Synthetic
acauauuuaaagccccacauaag

SEQ ID NO: 565603 - RNA, 24 nt, Artificial Sequence
  Synthetic
aacauauuuaaagccccacauaag

SEQ ID NO: 565604 - RNA, 18 nt, Artificial Sequence
  Synthetic
auuuggaagccacauaag

SEQ ID NO: 565605 - RNA, 19 nt, Artificial Sequence
  Synthetic
aauuuggaagccacauaag

SEQ ID NO: 565606 - RNA, 20 nt, Artificial Sequence
  Synthetic
uaauuuggaagccacauaag

SEQ ID NO: 565607 - RNA, 21 nt, Artificial Sequence
  Synthetic
auaauuuggaagccacauaag

SEQ ID NO: 565608 - RNA, 22 nt, Artificial Sequence
  Synthetic
aauaauuuggaagccacauaag

SEQ ID NO: 565609 - RNA, 23 nt, Artificial Sequence
  Synthetic
gaauaauuuggaagccacauaag

SEQ ID NO: 565610 - RNA, 24 nt, Artificial Sequence
  Synthetic
agaauaauuuggaagccacauaag

SEQ ID NO: 565611 - RNA, 18 nt, Artificial Sequence
  Synthetic
cuuuuccuuagacauaag

SEQ ID NO: 565612 - RNA, 19 nt, Artificial Sequence
  Synthetic
acuuuuccuuagacauaag

SEQ ID NO: 565613 - RNA, 20 nt, Artificial Sequence
  Synthetic
uacuuuuccuuagacauaag

SEQ ID NO: 565614 - RNA, 21 nt, Artificial Sequence
  Synthetic
guacuuuuccuuagacauaag

SEQ ID NO: 565615 - RNA, 22 nt, Artificial Sequence
  Synthetic
aguacuuuuccuuagacauaag

SEQ ID NO: 565616 - RNA, 23 nt, Artificial Sequence
  Synthetic
uaguacuuuuccuuagacauaag

SEQ ID NO: 565617 - RNA, 24 nt, Artificial Sequence
  Synthetic
auaguacuuuuccuuagacauaag

SEQ ID NO: 565618 - RNA, 18 nt, Artificial Sequence
  Synthetic
cagcaaacaugacauaag

SEQ ID NO: 565619 - RNA, 19 nt, Artificial Sequence
  Synthetic
ucagcaaacaugacauaag

SEQ ID NO: 565620 - RNA, 20 nt, Artificial Sequence
  Synthetic
aucagcaaacaugacauaag

SEQ ID NO: 565621 - RNA, 21 nt, Artificial Sequence
  Synthetic
uaucagcaaacaugacauaag

SEQ ID NO: 565622 - RNA, 22 nt, Artificial Sequence
  Synthetic
guaucagcaaacaugacauaag

SEQ ID NO: 565623 - RNA, 23 nt, Artificial Sequence
  Synthetic
gguaucagcaaacaugacauaag

SEQ ID NO: 565624 - RNA, 24 nt, Artificial Sequence
  Synthetic
agguaucagcaaacaugacauaag

SEQ ID NO: 565625 - RNA, 18 nt, Artificial Sequence
  Synthetic
aucacuugaacccauaag

SEQ ID NO: 565626 - RNA, 19 nt, Artificial Sequence
  Synthetic
aaucacuugaacccauaag

SEQ ID NO: 565627 - RNA, 20 nt, Artificial Sequence
  Synthetic
gaaucacuugaacccauaag

SEQ ID NO: 565628 - RNA, 21 nt, Artificial Sequence
  Synthetic
agaaucacuugaacccauaag

SEQ ID NO: 565629 - RNA, 22 nt, Artificial Sequence
  Synthetic
aagaaucacuugaacccauaag

SEQ ID NO: 565630 - RNA, 23 nt, Artificial Sequence
  Synthetic
gaagaaucacuugaacccauaag

SEQ ID NO: 565631 - RNA, 24 nt, Artificial Sequence
  Synthetic
agaagaaucacuugaacccauaag

SEQ ID NO: 565632 - RNA, 18 nt, Artificial Sequence
  Synthetic
cauauucucacccauaag

SEQ ID NO: 565633 - RNA, 19 nt, Artificial Sequence
  Synthetic
acauauucucacccauaag

SEQ ID NO: 565634 - RNA, 20 nt, Artificial Sequence
  Synthetic
cacauauucucacccauaag

SEQ ID NO: 565635 - RNA, 21 nt, Artificial Sequence
  Synthetic
ccacauauucucacccauaag

SEQ ID NO: 565636 - RNA, 22 nt, Artificial Sequence
  Synthetic
accacauauucucacccauaag

SEQ ID NO: 565637 - RNA, 23 nt, Artificial Sequence
  Synthetic
caccacauauucucacccauaag

SEQ ID NO: 565638 - RNA, 24 nt, Artificial Sequence
  Synthetic
acaccacauauucucacccauaag

SEQ ID NO: 565639 - RNA, 18 nt, Artificial Sequence
  Synthetic
guauuucuucuccauaag

SEQ ID NO: 565640 - RNA, 19 nt, Artificial Sequence
  Synthetic
uguauuucuucuccauaag

SEQ ID NO: 565641 - RNA, 20 nt, Artificial Sequence
  Synthetic
auguauuucuucuccauaag

SEQ ID NO: 565642 - RNA, 21 nt, Artificial Sequence
  Synthetic
cauguauuucuucuccauaag

SEQ ID NO: 565643 - RNA, 22 nt, Artificial Sequence
  Synthetic
gcauguauuucuucuccauaag

SEQ ID NO: 565644 - RNA, 23 nt, Artificial Sequence
  Synthetic
agcauguauuucuucuccauaag

SEQ ID NO: 565645 - RNA, 24 nt, Artificial Sequence
  Synthetic
aagcauguauuucuucuccauaag

SEQ ID NO: 565646 - RNA, 18 nt, Artificial Sequence
  Synthetic
auucagacauggcauaag

SEQ ID NO: 565647 - RNA, 19 nt, Artificial Sequence
  Synthetic
uauucagacauggcauaag

SEQ ID NO: 565648 - RNA, 20 nt, Artificial Sequence
  Synthetic
auauucagacauggcauaag

SEQ ID NO: 565649 - RNA, 21 nt, Artificial Sequence
  Synthetic
uauauucagacauggcauaag

SEQ ID NO: 565650 - RNA, 22 nt, Artificial Sequence
  Synthetic
auauauucagacauggcauaag

SEQ ID NO: 565651 - RNA, 23 nt, Artificial Sequence
  Synthetic
cauauauucagacauggcauaag

SEQ ID NO: 565652 - RNA, 24 nt, Artificial Sequence
  Synthetic
gcauauauucagacauggcauaag

SEQ ID NO: 565653 - RNA, 18 nt, Artificial Sequence
  Synthetic
uuaccaucguggcauaag

SEQ ID NO: 565654 - RNA, 19 nt, Artificial Sequence
  Synthetic
cuuaccaucguggcauaag

SEQ ID NO: 565655 - RNA, 20 nt, Artificial Sequence
  Synthetic
acuuaccaucguggcauaag

SEQ ID NO: 565656 - RNA, 21 nt, Artificial Sequence
  Synthetic
aacuuaccaucguggcauaag

SEQ ID NO: 565657 - RNA, 22 nt, Artificial Sequence
  Synthetic
aaacuuaccaucguggcauaag

SEQ ID NO: 565658 - RNA, 23 nt, Artificial Sequence
  Synthetic
gaaacuuaccaucguggcauaag

SEQ ID NO: 565659 - RNA, 24 nt, Artificial Sequence
  Synthetic
ggaaacuuaccaucguggcauaag

SEQ ID NO: 565660 - RNA, 18 nt, Artificial Sequence
  Synthetic
ccccuacucuugcauaag

SEQ ID NO: 565661 - RNA, 19 nt, Artificial Sequence
  Synthetic
accccuacucuugcauaag

SEQ ID NO: 565662 - RNA, 20 nt, Artificial Sequence
  Synthetic
caccccuacucuugcauaag

SEQ ID NO: 565663 - RNA, 21 nt, Artificial Sequence
  Synthetic
acaccccuacucuugcauaag

SEQ ID NO: 565664 - RNA, 22 nt, Artificial Sequence
  Synthetic
cacaccccuacucuugcauaag

SEQ ID NO: 565665 - RNA, 23 nt, Artificial Sequence
  Synthetic
ucacaccccuacucuugcauaag

SEQ ID NO: 565666 - RNA, 24 nt, Artificial Sequence
  Synthetic
aucacaccccuacucuugcauaag

SEQ ID NO: 565667 - RNA, 18 nt, Artificial Sequence
  Synthetic
ugaaaaacccaucauaag

SEQ ID NO: 565668 - RNA, 19 nt, Artificial Sequence
  Synthetic
uugaaaaacccaucauaag

SEQ ID NO: 565669 - RNA, 20 nt, Artificial Sequence
  Synthetic
auugaaaaacccaucauaag

SEQ ID NO: 565670 - RNA, 21 nt, Artificial Sequence
  Synthetic
aauugaaaaacccaucauaag

SEQ ID NO: 565671 - RNA, 22 nt, Artificial Sequence
  Synthetic
aaauugaaaaacccaucauaag

SEQ ID NO: 565672 - RNA, 23 nt, Artificial Sequence
  Synthetic
uaaauugaaaaacccaucauaag

SEQ ID NO: 565673 - RNA, 24 nt, Artificial Sequence
  Synthetic
auaaauugaaaaacccaucauaag

SEQ ID NO: 565674 - RNA, 18 nt, Artificial Sequence
  Synthetic
auguaagcccaucauaag

SEQ ID NO: 565675 - RNA, 19 nt, Artificial Sequence
  Synthetic
aauguaagcccaucauaag

SEQ ID NO: 565676 - RNA, 20 nt, Artificial Sequence
  Synthetic
aaauguaagcccaucauaag

SEQ ID NO: 565677 - RNA, 21 nt, Artificial Sequence
  Synthetic
uaaauguaagcccaucauaag

SEQ ID NO: 565678 - RNA, 22 nt, Artificial Sequence
  Synthetic
cuaaauguaagcccaucauaag

SEQ ID NO: 565679 - RNA, 23 nt, Artificial Sequence
  Synthetic
ucuaaauguaagcccaucauaag

SEQ ID NO: 565680 - RNA, 24 nt, Artificial Sequence
  Synthetic
aucuaaauguaagcccaucauaag

SEQ ID NO: 565681 - RNA, 18 nt, Artificial Sequence
  Synthetic
cauggucucacucauaag

SEQ ID NO: 565682 - RNA, 19 nt, Artificial Sequence
  Synthetic
gcauggucucacucauaag

SEQ ID NO: 565683 - RNA, 20 nt, Artificial Sequence
  Synthetic
ugcauggucucacucauaag

SEQ ID NO: 565684 - RNA, 21 nt, Artificial Sequence
  Synthetic
cugcauggucucacucauaag

SEQ ID NO: 565685 - RNA, 22 nt, Artificial Sequence
  Synthetic
acugcauggucucacucauaag

SEQ ID NO: 565686 - RNA, 23 nt, Artificial Sequence
  Synthetic
cacugcauggucucacucauaag

SEQ ID NO: 565687 - RNA, 24 nt, Artificial Sequence
  Synthetic
acacugcauggucucacucauaag

SEQ ID NO: 565688 - RNA, 18 nt, Artificial Sequence
  Synthetic
aagugggugccucauaag

SEQ ID NO: 565689 - RNA, 19 nt, Artificial Sequence
  Synthetic
uaagugggugccucauaag

SEQ ID NO: 565690 - RNA, 20 nt, Artificial Sequence
  Synthetic
auaagugggugccucauaag

SEQ ID NO: 565691 - RNA, 21 nt, Artificial Sequence
  Synthetic
gauaagugggugccucauaag

SEQ ID NO: 565692 - RNA, 22 nt, Artificial Sequence
  Synthetic
cgauaagugggugccucauaag

SEQ ID NO: 565693 - RNA, 23 nt, Artificial Sequence
  Synthetic
ucgauaagugggugccucauaag

SEQ ID NO: 565694 - RNA, 24 nt, Artificial Sequence
  Synthetic
cucgauaagugggugccucauaag

SEQ ID NO: 565695 - RNA, 18 nt, Artificial Sequence
  Synthetic
gcacaauguugucauaag

SEQ ID NO: 565696 - RNA, 19 nt, Artificial Sequence
  Synthetic
agcacaauguugucauaag

SEQ ID NO: 565697 - RNA, 20 nt, Artificial Sequence
  Synthetic
aagcacaauguugucauaag

SEQ ID NO: 565698 - RNA, 21 nt, Artificial Sequence
  Synthetic
uaagcacaauguugucauaag

SEQ ID NO: 565699 - RNA, 22 nt, Artificial Sequence
  Synthetic
auaagcacaauguugucauaag

SEQ ID NO: 565700 - RNA, 23 nt, Artificial Sequence
  Synthetic
aauaagcacaauguugucauaag

SEQ ID NO: 565701 - RNA, 24 nt, Artificial Sequence
  Synthetic
caauaagcacaauguugucauaag

SEQ ID NO: 565702 - RNA, 18 nt, Artificial Sequence
  Synthetic
aaucuccucauucauaag

SEQ ID NO: 565703 - RNA, 19 nt, Artificial Sequence
  Synthetic
caaucuccucauucauaag

SEQ ID NO: 565704 - RNA, 20 nt, Artificial Sequence
  Synthetic
ucaaucuccucauucauaag

SEQ ID NO: 565705 - RNA, 21 nt, Artificial Sequence
  Synthetic
cucaaucuccucauucauaag

SEQ ID NO: 565706 - RNA, 22 nt, Artificial Sequence
  Synthetic
acucaaucuccucauucauaag

SEQ ID NO: 565707 - RNA, 23 nt, Artificial Sequence
  Synthetic
gacucaaucuccucauucauaag

SEQ ID NO: 565708 - RNA, 24 nt, Artificial Sequence
  Synthetic
agacucaaucuccucauucauaag

SEQ ID NO: 565709 - RNA, 18 nt, Artificial Sequence
  Synthetic
aaugaaguugaagauaag

SEQ ID NO: 565710 - RNA, 19 nt, Artificial Sequence
  Synthetic
gaaugaaguugaagauaag

SEQ ID NO: 565711 - RNA, 20 nt, Artificial Sequence
  Synthetic
ugaaugaaguugaagauaag

SEQ ID NO: 565712 - RNA, 21 nt, Artificial Sequence
  Synthetic
augaaugaaguugaagauaag

SEQ ID NO: 565713 - RNA, 22 nt, Artificial Sequence
  Synthetic
caugaaugaaguugaagauaag

SEQ ID NO: 565714 - RNA, 23 nt, Artificial Sequence
  Synthetic
acaugaaugaaguugaagauaag

SEQ ID NO: 565715 - RNA, 24 nt, Artificial Sequence
  Synthetic
aacaugaaugaaguugaagauaag

SEQ ID NO: 565716 - RNA, 18 nt, Artificial Sequence
  Synthetic
aaaaaaaggucagauaag

SEQ ID NO: 565717 - RNA, 19 nt, Artificial Sequence
  Synthetic
aaaaaaaaggucagauaag

SEQ ID NO: 565718 - RNA, 20 nt, Artificial Sequence
  Synthetic
gaaaaaaaaggucagauaag

SEQ ID NO: 565719 - RNA, 21 nt, Artificial Sequence
  Synthetic
ggaaaaaaaaggucagauaag

SEQ ID NO: 565720 - RNA, 22 nt, Artificial Sequence
  Synthetic
aggaaaaaaaaggucagauaag

SEQ ID NO: 565721 - RNA, 23 nt, Artificial Sequence
  Synthetic
caggaaaaaaaaggucagauaag

SEQ ID NO: 565722 - RNA, 24 nt, Artificial Sequence
  Synthetic
acaggaaaaaaaaggucagauaag

SEQ ID NO: 565723 - RNA, 18 nt, Artificial Sequence
  Synthetic
uauaugauuucagauaag

SEQ ID NO: 565724 - RNA, 19 nt, Artificial Sequence
  Synthetic
uuauaugauuucagauaag

SEQ ID NO: 565725 - RNA, 20 nt, Artificial Sequence
  Synthetic
uuuauaugauuucagauaag

SEQ ID NO: 565726 - RNA, 21 nt, Artificial Sequence
  Synthetic
cuuuauaugauuucagauaag

SEQ ID NO: 565727 - RNA, 22 nt, Artificial Sequence
  Synthetic
ucuuuauaugauuucagauaag

SEQ ID NO: 565728 - RNA, 23 nt, Artificial Sequence
  Synthetic
aucuuuauaugauuucagauaag

SEQ ID NO: 565729 - RNA, 24 nt, Artificial Sequence
  Synthetic
caucuuuauaugauuucagauaag

SEQ ID NO: 565730 - RNA, 18 nt, Artificial Sequence
  Synthetic
aaaacaaaacuagauaag

SEQ ID NO: 565731 - RNA, 19 nt, Artificial Sequence
  Synthetic
aaaaacaaaacuagauaag

SEQ ID NO: 565732 - RNA, 20 nt, Artificial Sequence
  Synthetic
caaaaacaaaacuagauaag

SEQ ID NO: 565733 - RNA, 21 nt, Artificial Sequence
  Synthetic
acaaaaacaaaacuagauaag

SEQ ID NO: 565734 - RNA, 22 nt, Artificial Sequence
  Synthetic
aacaaaaacaaaacuagauaag

SEQ ID NO: 565735 - RNA, 23 nt, Artificial Sequence
  Synthetic
caacaaaaacaaaacuagauaag

SEQ ID NO: 565736 - RNA, 24 nt, Artificial Sequence
  Synthetic
ccaacaaaaacaaaacuagauaag

SEQ ID NO: 565737 - RNA, 18 nt, Artificial Sequence
  Synthetic
accaaucaaguagauaag

SEQ ID NO: 565738 - RNA, 19 nt, Artificial Sequence
  Synthetic
uaccaaucaaguagauaag

SEQ ID NO: 565739 - RNA, 20 nt, Artificial Sequence
  Synthetic
uuaccaaucaaguagauaag

SEQ ID NO: 565740 - RNA, 21 nt, Artificial Sequence
  Synthetic
cuuaccaaucaaguagauaag

SEQ ID NO: 565741 - RNA, 22 nt, Artificial Sequence
  Synthetic
gcuuaccaaucaaguagauaag

SEQ ID NO: 565742 - RNA, 23 nt, Artificial Sequence
  Synthetic
ugcuuaccaaucaaguagauaag

SEQ ID NO: 565743 - RNA, 24 nt, Artificial Sequence
  Synthetic
cugcuuaccaaucaaguagauaag

SEQ ID NO: 565744 - RNA, 18 nt, Artificial Sequence
  Synthetic
cucaagaauuuagauaag

SEQ ID NO: 565745 - RNA, 19 nt, Artificial Sequence
  Synthetic
ccucaagaauuuagauaag

SEQ ID NO: 565746 - RNA, 20 nt, Artificial Sequence
  Synthetic
cccucaagaauuuagauaag

SEQ ID NO: 565747 - RNA, 21 nt, Artificial Sequence
  Synthetic
acccucaagaauuuagauaag

SEQ ID NO: 565748 - RNA, 22 nt, Artificial Sequence
  Synthetic
gacccucaagaauuuagauaag

SEQ ID NO: 565749 - RNA, 23 nt, Artificial Sequence
  Synthetic
ugacccucaagaauuuagauaag

SEQ ID NO: 565750 - RNA, 24 nt, Artificial Sequence
  Synthetic
gugacccucaagaauuuagauaag

SEQ ID NO: 565751 - RNA, 18 nt, Artificial Sequence
  Synthetic
uagugaaugacugauaag

SEQ ID NO: 565752 - RNA, 19 nt, Artificial Sequence
  Synthetic
auagugaaugacugauaag

SEQ ID NO: 565753 - RNA, 20 nt, Artificial Sequence
  Synthetic
gauagugaaugacugauaag

SEQ ID NO: 565754 - RNA, 21 nt, Artificial Sequence
  Synthetic
agauagugaaugacugauaag

SEQ ID NO: 565755 - RNA, 22 nt, Artificial Sequence
  Synthetic
aagauagugaaugacugauaag

SEQ ID NO: 565756 - RNA, 23 nt, Artificial Sequence
  Synthetic
aaagauagugaaugacugauaag

SEQ ID NO: 565757 - RNA, 24 nt, Artificial Sequence
  Synthetic
caaagauagugaaugacugauaag

SEQ ID NO: 565758 - RNA, 18 nt, Artificial Sequence
  Synthetic
uagcaccauaaauauaag

SEQ ID NO: 565759 - RNA, 19 nt, Artificial Sequence
  Synthetic
uuagcaccauaaauauaag

SEQ ID NO: 565760 - RNA, 20 nt, Artificial Sequence
  Synthetic
auuagcaccauaaauauaag

SEQ ID NO: 565761 - RNA, 21 nt, Artificial Sequence
  Synthetic
uauuagcaccauaaauauaag

SEQ ID NO: 565762 - RNA, 22 nt, Artificial Sequence
  Synthetic
auauuagcaccauaaauauaag

SEQ ID NO: 565763 - RNA, 23 nt, Artificial Sequence
  Synthetic
cauauuagcaccauaaauauaag

SEQ ID NO: 565764 - RNA, 24 nt, Artificial Sequence
  Synthetic
acauauuagcaccauaaauauaag

SEQ ID NO: 565765 - RNA, 18 nt, Artificial Sequence
  Synthetic
auuauuuuuuaauauaag

SEQ ID NO: 565766 - RNA, 19 nt, Artificial Sequence
  Synthetic
aauuauuuuuuaauauaag

SEQ ID NO: 565767 - RNA, 20 nt, Artificial Sequence
  Synthetic
gaauuauuuuuuaauauaag

SEQ ID NO: 565768 - RNA, 21 nt, Artificial Sequence
  Synthetic
agaauuauuuuuuaauauaag

SEQ ID NO: 565769 - RNA, 22 nt, Artificial Sequence
  Synthetic
aagaauuauuuuuuaauauaag

SEQ ID NO: 565770 - RNA, 23 nt, Artificial Sequence
  Synthetic
uaagaauuauuuuuuaauauaag

SEQ ID NO: 565771 - RNA, 24 nt, Artificial Sequence
  Synthetic
uuaagaauuauuuuuuaauauaag

SEQ ID NO: 565772 - RNA, 18 nt, Artificial Sequence
  Synthetic
uuuggacguacauauaag

SEQ ID NO: 565773 - RNA, 19 nt, Artificial Sequence
  Synthetic
cuuuggacguacauauaag

SEQ ID NO: 565774 - RNA, 20 nt, Artificial Sequence
  Synthetic
ccuuuggacguacauauaag

SEQ ID NO: 565775 - RNA, 21 nt, Artificial Sequence
  Synthetic
accuuuggacguacauauaag

SEQ ID NO: 565776 - RNA, 22 nt, Artificial Sequence
  Synthetic
uaccuuuggacguacauauaag

SEQ ID NO: 565777 - RNA, 23 nt, Artificial Sequence
  Synthetic
uuaccuuuggacguacauauaag

SEQ ID NO: 565778 - RNA, 24 nt, Artificial Sequence
  Synthetic
guuaccuuuggacguacauauaag

SEQ ID NO: 565779 - RNA, 18 nt, Artificial Sequence
  Synthetic
cuauuguaugucuauaag

SEQ ID NO: 565780 - RNA, 19 nt, Artificial Sequence
  Synthetic
ccuauuguaugucuauaag

SEQ ID NO: 565781 - RNA, 20 nt, Artificial Sequence
  Synthetic
accuauuguaugucuauaag

SEQ ID NO: 565782 - RNA, 21 nt, Artificial Sequence
  Synthetic
uaccuauuguaugucuauaag

SEQ ID NO: 565783 - RNA, 22 nt, Artificial Sequence
  Synthetic
guaccuauuguaugucuauaag

SEQ ID NO: 565784 - RNA, 23 nt, Artificial Sequence
  Synthetic
aguaccuauuguaugucuauaag

SEQ ID NO: 565785 - RNA, 24 nt, Artificial Sequence
  Synthetic
aaguaccuauuguaugucuauaag

SEQ ID NO: 565786 - RNA, 18 nt, Artificial Sequence
  Synthetic
cgugaugugagguauaag

SEQ ID NO: 565787 - RNA, 19 nt, Artificial Sequence
  Synthetic
acgugaugugagguauaag

SEQ ID NO: 565788 - RNA, 20 nt, Artificial Sequence
  Synthetic
gacgugaugugagguauaag

SEQ ID NO: 565789 - RNA, 21 nt, Artificial Sequence
  Synthetic
agacgugaugugagguauaag

SEQ ID NO: 565790 - RNA, 22 nt, Artificial Sequence
  Synthetic
uagacgugaugugagguauaag

SEQ ID NO: 565791 - RNA, 23 nt, Artificial Sequence
  Synthetic
guagacgugaugugagguauaag

SEQ ID NO: 565792 - RNA, 24 nt, Artificial Sequence
  Synthetic
aguagacgugaugugagguauaag

SEQ ID NO: 565793 - RNA, 18 nt, Artificial Sequence
  Synthetic
cuccuaaguagguauaag

SEQ ID NO: 565794 - RNA, 19 nt, Artificial Sequence
  Synthetic
ccuccuaaguagguauaag

SEQ ID NO: 565795 - RNA, 20 nt, Artificial Sequence
  Synthetic
uccuccuaaguagguauaag

SEQ ID NO: 565796 - RNA, 21 nt, Artificial Sequence
  Synthetic
guccuccuaaguagguauaag

SEQ ID NO: 565797 - RNA, 22 nt, Artificial Sequence
  Synthetic
gguccuccuaaguagguauaag

SEQ ID NO: 565798 - RNA, 23 nt, Artificial Sequence
  Synthetic
ggguccuccuaaguagguauaag

SEQ ID NO: 565799 - RNA, 24 nt, Artificial Sequence
  Synthetic
aggguccuccuaaguagguauaag

SEQ ID NO: 565800 - RNA, 18 nt, Artificial Sequence
  Synthetic
cauuuuugaguguauaag

SEQ ID NO: 565801 - RNA, 19 nt, Artificial Sequence
  Synthetic
acauuuuugaguguauaag

SEQ ID NO: 565802 - RNA, 20 nt, Artificial Sequence
  Synthetic
aacauuuuugaguguauaag

SEQ ID NO: 565803 - RNA, 21 nt, Artificial Sequence
  Synthetic
aaacauuuuugaguguauaag

SEQ ID NO: 565804 - RNA, 22 nt, Artificial Sequence
  Synthetic
aaaacauuuuugaguguauaag

SEQ ID NO: 565805 - RNA, 23 nt, Artificial Sequence
  Synthetic
aaaaacauuuuugaguguauaag

SEQ ID NO: 565806 - RNA, 24 nt, Artificial Sequence
  Synthetic
aaaaaacauuuuugaguguauaag

SEQ ID NO: 565807 - RNA, 18 nt, Artificial Sequence
  Synthetic
guguuuuauuuguauaag

SEQ ID NO: 565808 - RNA, 19 nt, Artificial Sequence
  Synthetic
uguguuuuauuuguauaag

SEQ ID NO: 565809 - RNA, 20 nt, Artificial Sequence
  Synthetic
cuguguuuuauuuguauaag

SEQ ID NO: 565810 - RNA, 21 nt, Artificial Sequence
  Synthetic
ucuguguuuuauuuguauaag

SEQ ID NO: 565811 - RNA, 22 nt, Artificial Sequence
  Synthetic
uucuguguuuuauuuguauaag

SEQ ID NO: 565812 - RNA, 23 nt, Artificial Sequence
  Synthetic
uuucuguguuuuauuuguauaag

SEQ ID NO: 565813 - RNA, 24 nt, Artificial Sequence
  Synthetic
uuuucuguguuuuauuuguauaag

SEQ ID NO: 565814 - RNA, 18 nt, Artificial Sequence
  Synthetic
ugacauuucaauuauaag

SEQ ID NO: 565815 - RNA, 19 nt, Artificial Sequence
  Synthetic
augacauuucaauuauaag

SEQ ID NO: 565816 - RNA, 20 nt, Artificial Sequence
  Synthetic
gaugacauuucaauuauaag

SEQ ID NO: 565817 - RNA, 21 nt, Artificial Sequence
  Synthetic
ugaugacauuucaauuauaag

SEQ ID NO: 565818 - RNA, 22 nt, Artificial Sequence
  Synthetic
cugaugacauuucaauuauaag

SEQ ID NO: 565819 - RNA, 23 nt, Artificial Sequence
  Synthetic
ucugaugacauuucaauuauaag

SEQ ID NO: 565820 - RNA, 24 nt, Artificial Sequence
  Synthetic
uucugaugacauuucaauuauaag

SEQ ID NO: 565821 - RNA, 18 nt, Artificial Sequence
  Synthetic
ccauuuccuaauuauaag

SEQ ID NO: 565822 - RNA, 19 nt, Artificial Sequence
  Synthetic
accauuuccuaauuauaag

SEQ ID NO: 565823 - RNA, 20 nt, Artificial Sequence
  Synthetic
caccauuuccuaauuauaag

SEQ ID NO: 565824 - RNA, 21 nt, Artificial Sequence
  Synthetic
ucaccauuuccuaauuauaag

SEQ ID NO: 565825 - RNA, 22 nt, Artificial Sequence
  Synthetic
gucaccauuuccuaauuauaag

SEQ ID NO: 565826 - RNA, 23 nt, Artificial Sequence
  Synthetic
ggucaccauuuccuaauuauaag

SEQ ID NO: 565827 - RNA, 24 nt, Artificial Sequence
  Synthetic
aggucaccauuuccuaauuauaag

SEQ ID NO: 565828 - RNA, 18 nt, Artificial Sequence
  Synthetic
cucaaagcacauuauaag

SEQ ID NO: 565829 - RNA, 19 nt, Artificial Sequence
  Synthetic
ucucaaagcacauuauaag

SEQ ID NO: 565830 - RNA, 20 nt, Artificial Sequence
  Synthetic
aucucaaagcacauuauaag

SEQ ID NO: 565831 - RNA, 21 nt, Artificial Sequence
  Synthetic
uaucucaaagcacauuauaag

SEQ ID NO: 565832 - RNA, 22 nt, Artificial Sequence
  Synthetic
auaucucaaagcacauuauaag

SEQ ID NO: 565833 - RNA, 23 nt, Artificial Sequence
  Synthetic
uauaucucaaagcacauuauaag

SEQ ID NO: 565834 - RNA, 24 nt, Artificial Sequence
  Synthetic
auauaucucaaagcacauuauaag

SEQ ID NO: 565835 - RNA, 18 nt, Artificial Sequence
  Synthetic
accauagaucauuauaag

SEQ ID NO: 565836 - RNA, 19 nt, Artificial Sequence
  Synthetic
aaccauagaucauuauaag

SEQ ID NO: 565837 - RNA, 20 nt, Artificial Sequence
  Synthetic
caaccauagaucauuauaag

SEQ ID NO: 565838 - RNA, 21 nt, Artificial Sequence
  Synthetic
ccaaccauagaucauuauaag

SEQ ID NO: 565839 - RNA, 22 nt, Artificial Sequence
  Synthetic
uccaaccauagaucauuauaag

SEQ ID NO: 565840 - RNA, 23 nt, Artificial Sequence
  Synthetic
auccaaccauagaucauuauaag

SEQ ID NO: 565841 - RNA, 24 nt, Artificial Sequence
  Synthetic
uauccaaccauagaucauuauaag

SEQ ID NO: 565842 - RNA, 18 nt, Artificial Sequence
  Synthetic
uauauucucacuuauaag

SEQ ID NO: 565843 - RNA, 19 nt, Artificial Sequence
  Synthetic
auauauucucacuuauaag

SEQ ID NO: 565844 - RNA, 20 nt, Artificial Sequence
  Synthetic
cauauauucucacuuauaag

SEQ ID NO: 565845 - RNA, 21 nt, Artificial Sequence
  Synthetic
ccauauauucucacuuauaag

SEQ ID NO: 565846 - RNA, 22 nt, Artificial Sequence
  Synthetic
accauauauucucacuuauaag

SEQ ID NO: 565847 - RNA, 23 nt, Artificial Sequence
  Synthetic
uaccauauauucucacuuauaag

SEQ ID NO: 565848 - RNA, 24 nt, Artificial Sequence
  Synthetic
auaccauauauucucacuuauaag

SEQ ID NO: 565849 - RNA, 19 nt, Artificial Sequence
  Synthetic
auauguucucacuuauaag

SEQ ID NO: 565850 - RNA, 20 nt, Artificial Sequence
  Synthetic
uauauguucucacuuauaag

SEQ ID NO: 565851 - RNA, 21 nt, Artificial Sequence
  Synthetic
cuauauguucucacuuauaag

SEQ ID NO: 565852 - RNA, 22 nt, Artificial Sequence
  Synthetic
acuauauguucucacuuauaag

SEQ ID NO: 565853 - RNA, 23 nt, Artificial Sequence
  Synthetic
cacuauauguucucacuuauaag

SEQ ID NO: 565854 - RNA, 24 nt, Artificial Sequence
  Synthetic
acacuauauguucucacuuauaag

SEQ ID NO: 565855 - RNA, 18 nt, Artificial Sequence
  Synthetic
uucucacuuacuuauaag

SEQ ID NO: 565856 - RNA, 19 nt, Artificial Sequence
  Synthetic
guucucacuuacuuauaag

SEQ ID NO: 565857 - RNA, 20 nt, Artificial Sequence
  Synthetic
uguucucacuuacuuauaag

SEQ ID NO: 565858 - RNA, 21 nt, Artificial Sequence
  Synthetic
auguucucacuuacuuauaag

SEQ ID NO: 565859 - RNA, 22 nt, Artificial Sequence
  Synthetic
cauguucucacuuacuuauaag

SEQ ID NO: 565860 - RNA, 23 nt, Artificial Sequence
  Synthetic
acauguucucacuuacuuauaag

SEQ ID NO: 565861 - RNA, 24 nt, Artificial Sequence
  Synthetic
cacauguucucacuuacuuauaag

SEQ ID NO: 565862 - RNA, 18 nt, Artificial Sequence
  Synthetic
cauguucucauuuauaag

SEQ ID NO: 565863 - RNA, 19 nt, Artificial Sequence
  Synthetic
ccauguucucauuuauaag

SEQ ID NO: 565864 - RNA, 20 nt, Artificial Sequence
  Synthetic
cccauguucucauuuauaag

SEQ ID NO: 565865 - RNA, 21 nt, Artificial Sequence
  Synthetic
ccccauguucucauuuauaag

SEQ ID NO: 565866 - RNA, 22 nt, Artificial Sequence
  Synthetic
accccauguucucauuuauaag

SEQ ID NO: 565867 - RNA, 23 nt, Artificial Sequence
  Synthetic
uaccccauguucucauuuauaag

SEQ ID NO: 565868 - RNA, 24 nt, Artificial Sequence
  Synthetic
auaccccauguucucauuuauaag

SEQ ID NO: 565869 - RNA, 18 nt, Artificial Sequence
  Synthetic
cuccuucuccuuuauaag

SEQ ID NO: 565870 - RNA, 19 nt, Artificial Sequence
  Synthetic
ccuccuucuccuuuauaag

SEQ ID NO: 565871 - RNA, 20 nt, Artificial Sequence
  Synthetic
gccuccuucuccuuuauaag

SEQ ID NO: 565872 - RNA, 21 nt, Artificial Sequence
  Synthetic
agccuccuucuccuuuauaag

SEQ ID NO: 565873 - RNA, 22 nt, Artificial Sequence
  Synthetic
cagccuccuucuccuuuauaag

SEQ ID NO: 565874 - RNA, 23 nt, Artificial Sequence
  Synthetic
gcagccuccuucuccuuuauaag

SEQ ID NO: 565875 - RNA, 24 nt, Artificial Sequence
  Synthetic
agcagccuccuucuccuuuauaag

SEQ ID NO: 565876 - RNA, 18 nt, Artificial Sequence
  Synthetic
caauuuuacuuuuauaag

SEQ ID NO: 565877 - RNA, 19 nt, Artificial Sequence
  Synthetic
ccaauuuuacuuuuauaag

SEQ ID NO: 565878 - RNA, 20 nt, Artificial Sequence
  Synthetic
uccaauuuuacuuuuauaag

SEQ ID NO: 565879 - RNA, 21 nt, Artificial Sequence
  Synthetic
uuccaauuuuacuuuuauaag

SEQ ID NO: 565880 - RNA, 22 nt, Artificial Sequence
  Synthetic
auuccaauuuuacuuuuauaag

SEQ ID NO: 565881 - RNA, 23 nt, Artificial Sequence
  Synthetic
aauuccaauuuuacuuuuauaag

SEQ ID NO: 565882 - RNA, 24 nt, Artificial Sequence
  Synthetic
aaauuccaauuuuacuuuuauaag

SEQ ID NO: 565883 - RNA, 18 nt, Artificial Sequence
  Synthetic
acuaauucagaaacuaag

SEQ ID NO: 565884 - RNA, 19 nt, Artificial Sequence
  Synthetic
gacuaauucagaaacuaag

SEQ ID NO: 565885 - RNA, 20 nt, Artificial Sequence
  Synthetic
agacuaauucagaaacuaag

SEQ ID NO: 565886 - RNA, 21 nt, Artificial Sequence
  Synthetic
uagacuaauucagaaacuaag

SEQ ID NO: 565887 - RNA, 22 nt, Artificial Sequence
  Synthetic
uuagacuaauucagaaacuaag

SEQ ID NO: 565888 - RNA, 23 nt, Artificial Sequence
  Synthetic
cuuagacuaauucagaaacuaag

SEQ ID NO: 565889 - RNA, 24 nt, Artificial Sequence
  Synthetic
acuuagacuaauucagaaacuaag

SEQ ID NO: 565890 - RNA, 18 nt, Artificial Sequence
  Synthetic
ggaaaaaaguaaacuaag

SEQ ID NO: 565891 - RNA, 19 nt, Artificial Sequence
  Synthetic
gggaaaaaaguaaacuaag

SEQ ID NO: 565892 - RNA, 20 nt, Artificial Sequence
  Synthetic
agggaaaaaaguaaacuaag

SEQ ID NO: 565893 - RNA, 21 nt, Artificial Sequence
  Synthetic
cagggaaaaaaguaaacuaag

SEQ ID NO: 565894 - RNA, 22 nt, Artificial Sequence
  Synthetic
acagggaaaaaaguaaacuaag

SEQ ID NO: 565895 - RNA, 23 nt, Artificial Sequence
  Synthetic
aacagggaaaaaaguaaacuaag

SEQ ID NO: 565896 - RNA, 24 nt, Artificial Sequence
  Synthetic
uaacagggaaaaaaguaaacuaag

SEQ ID NO: 565897 - RNA, 18 nt, Artificial Sequence
  Synthetic
ccuugagcaagaacuaag

SEQ ID NO: 565898 - RNA, 19 nt, Artificial Sequence
  Synthetic
gccuugagcaagaacuaag

SEQ ID NO: 565899 - RNA, 20 nt, Artificial Sequence
  Synthetic
ugccuugagcaagaacuaag

SEQ ID NO: 565900 - RNA, 21 nt, Artificial Sequence
  Synthetic
uugccuugagcaagaacuaag

SEQ ID NO: 565901 - RNA, 22 nt, Artificial Sequence
  Synthetic
cuugccuugagcaagaacuaag

SEQ ID NO: 565902 - RNA, 23 nt, Artificial Sequence
  Synthetic
acuugccuugagcaagaacuaag

SEQ ID NO: 565903 - RNA, 24 nt, Artificial Sequence
  Synthetic
gacuugccuugagcaagaacuaag

SEQ ID NO: 565904 - RNA, 18 nt, Artificial Sequence
  Synthetic
gauuuuaucaucacuaag

SEQ ID NO: 565905 - RNA, 19 nt, Artificial Sequence
  Synthetic
ugauuuuaucaucacuaag

SEQ ID NO: 565906 - RNA, 20 nt, Artificial Sequence
  Synthetic
uugauuuuaucaucacuaag

SEQ ID NO: 565907 - RNA, 21 nt, Artificial Sequence
  Synthetic
auugauuuuaucaucacuaag

SEQ ID NO: 565908 - RNA, 22 nt, Artificial Sequence
  Synthetic
aauugauuuuaucaucacuaag

SEQ ID NO: 565909 - RNA, 23 nt, Artificial Sequence
  Synthetic
aaauugauuuuaucaucacuaag

SEQ ID NO: 565910 - RNA, 24 nt, Artificial Sequence
  Synthetic
caaauugauuuuaucaucacuaag

SEQ ID NO: 565911 - RNA, 18 nt, Artificial Sequence
  Synthetic
uuccccuggaggacuaag

SEQ ID NO: 565912 - RNA, 19 nt, Artificial Sequence
  Synthetic
auuccccuggaggacuaag

SEQ ID NO: 565913 - RNA, 20 nt, Artificial Sequence
  Synthetic
cauuccccuggaggacuaag

SEQ ID NO: 565914 - RNA, 21 nt, Artificial Sequence
  Synthetic
gcauuccccuggaggacuaag

SEQ ID NO: 565915 - RNA, 22 nt, Artificial Sequence
  Synthetic
ugcauuccccuggaggacuaag

SEQ ID NO: 565916 - RNA, 23 nt, Artificial Sequence
  Synthetic
augcauuccccuggaggacuaag

SEQ ID NO: 565917 - RNA, 24 nt, Artificial Sequence
  Synthetic
caugcauuccccuggaggacuaag

SEQ ID NO: 565918 - RNA, 18 nt, Artificial Sequence
  Synthetic
uuccuuucaaugacuaag

SEQ ID NO: 565919 - RNA, 19 nt, Artificial Sequence
  Synthetic
cuuccuuucaaugacuaag

SEQ ID NO: 565920 - RNA, 20 nt, Artificial Sequence
  Synthetic
ccuuccuuucaaugacuaag

SEQ ID NO: 565921 - RNA, 21 nt, Artificial Sequence
  Synthetic
accuuccuuucaaugacuaag

SEQ ID NO: 565922 - RNA, 22 nt, Artificial Sequence
  Synthetic
aaccuuccuuucaaugacuaag

SEQ ID NO: 565923 - RNA, 23 nt, Artificial Sequence
  Synthetic
uaaccuuccuuucaaugacuaag

SEQ ID NO: 565924 - RNA, 24 nt, Artificial Sequence
  Synthetic
uuaaccuuccuuucaaugacuaag

SEQ ID NO: 565925 - RNA, 18 nt, Artificial Sequence
  Synthetic
ccaaguaaugaaccuaag

SEQ ID NO: 565926 - RNA, 19 nt, Artificial Sequence
  Synthetic
cccaaguaaugaaccuaag

SEQ ID NO: 565927 - RNA, 20 nt, Artificial Sequence
  Synthetic
ccccaaguaaugaaccuaag

SEQ ID NO: 565928 - RNA, 21 nt, Artificial Sequence
  Synthetic
cccccaaguaaugaaccuaag

SEQ ID NO: 565929 - RNA, 22 nt, Artificial Sequence
  Synthetic
ccccccaaguaaugaaccuaag

SEQ ID NO: 565930 - RNA, 23 nt, Artificial Sequence
  Synthetic
gccccccaaguaaugaaccuaag

SEQ ID NO: 565931 - RNA, 24 nt, Artificial Sequence
  Synthetic
agccccccaaguaaugaaccuaag

SEQ ID NO: 565932 - RNA, 18 nt, Artificial Sequence
  Synthetic
ccacaagcaaacccuaag

SEQ ID NO: 565933 - RNA, 19 nt, Artificial Sequence
  Synthetic
accacaagcaaacccuaag

SEQ ID NO: 565934 - RNA, 20 nt, Artificial Sequence
  Synthetic
caccacaagcaaacccuaag

SEQ ID NO: 565935 - RNA, 21 nt, Artificial Sequence
  Synthetic
ccaccacaagcaaacccuaag

SEQ ID NO: 565936 - RNA, 22 nt, Artificial Sequence
  Synthetic
uccaccacaagcaaacccuaag

SEQ ID NO: 565937 - RNA, 23 nt, Artificial Sequence
  Synthetic
cuccaccacaagcaaacccuaag

SEQ ID NO: 565938 - RNA, 24 nt, Artificial Sequence
  Synthetic
ucuccaccacaagcaaacccuaag

SEQ ID NO: 565939 - RNA, 18 nt, Artificial Sequence
  Synthetic
gggaaagaacgcccuaag

SEQ ID NO: 565940 - RNA, 19 nt, Artificial Sequence
  Synthetic
cgggaaagaacgcccuaag

SEQ ID NO: 565941 - RNA, 20 nt, Artificial Sequence
  Synthetic
gcgggaaagaacgcccuaag

SEQ ID NO: 565942 - RNA, 21 nt, Artificial Sequence
  Synthetic
ugcgggaaagaacgcccuaag

SEQ ID NO: 565943 - RNA, 22 nt, Artificial Sequence
  Synthetic
uugcgggaaagaacgcccuaag

SEQ ID NO: 565944 - RNA, 23 nt, Artificial Sequence
  Synthetic
auugcgggaaagaacgcccuaag

SEQ ID NO: 565945 - RNA, 24 nt, Artificial Sequence
  Synthetic
uauugcgggaaagaacgcccuaag

SEQ ID NO: 565946 - RNA, 18 nt, Artificial Sequence
  Synthetic
gaggugaccuggccuaag

SEQ ID NO: 565947 - RNA, 19 nt, Artificial Sequence
  Synthetic
agaggugaccuggccuaag

SEQ ID NO: 565948 - RNA, 20 nt, Artificial Sequence
  Synthetic
cagaggugaccuggccuaag

SEQ ID NO: 565949 - RNA, 21 nt, Artificial Sequence
  Synthetic
gcagaggugaccuggccuaag

SEQ ID NO: 565950 - RNA, 22 nt, Artificial Sequence
  Synthetic
ggcagaggugaccuggccuaag

SEQ ID NO: 565951 - RNA, 23 nt, Artificial Sequence
  Synthetic
gggcagaggugaccuggccuaag

SEQ ID NO: 565952 - RNA, 24 nt, Artificial Sequence
  Synthetic
agggcagaggugaccuggccuaag

SEQ ID NO: 565953 - RNA, 18 nt, Artificial Sequence
  Synthetic
agguucuguuugccuaag

SEQ ID NO: 565954 - RNA, 19 nt, Artificial Sequence
  Synthetic
aagguucuguuugccuaag

SEQ ID NO: 565955 - RNA, 20 nt, Artificial Sequence
  Synthetic
gaagguucuguuugccuaag

SEQ ID NO: 565956 - RNA, 21 nt, Artificial Sequence
  Synthetic
cgaagguucuguuugccuaag

SEQ ID NO: 565957 - RNA, 22 nt, Artificial Sequence
  Synthetic
acgaagguucuguuugccuaag

SEQ ID NO: 565958 - RNA, 23 nt, Artificial Sequence
  Synthetic
aacgaagguucuguuugccuaag

SEQ ID NO: 565959 - RNA, 24 nt, Artificial Sequence
  Synthetic
aaacgaagguucuguuugccuaag

SEQ ID NO: 565960 - RNA, 18 nt, Artificial Sequence
  Synthetic
acacaaucccauccuaag

SEQ ID NO: 565961 - RNA, 19 nt, Artificial Sequence
  Synthetic
gacacaaucccauccuaag

SEQ ID NO: 565962 - RNA, 20 nt, Artificial Sequence
  Synthetic
ggacacaaucccauccuaag

SEQ ID NO: 565963 - RNA, 21 nt, Artificial Sequence
  Synthetic
aggacacaaucccauccuaag

SEQ ID NO: 565964 - RNA, 22 nt, Artificial Sequence
  Synthetic
caggacacaaucccauccuaag

SEQ ID NO: 565965 - RNA, 23 nt, Artificial Sequence
  Synthetic
ucaggacacaaucccauccuaag

SEQ ID NO: 565966 - RNA, 24 nt, Artificial Sequence
  Synthetic
aucaggacacaaucccauccuaag

SEQ ID NO: 565967 - RNA, 18 nt, Artificial Sequence
  Synthetic
aaauaaaaauauccuaag

SEQ ID NO: 565968 - RNA, 19 nt, Artificial Sequence
  Synthetic
aaaauaaaaauauccuaag

SEQ ID NO: 565969 - RNA, 20 nt, Artificial Sequence
  Synthetic
uaaaauaaaaauauccuaag

SEQ ID NO: 565970 - RNA, 21 nt, Artificial Sequence
  Synthetic
guaaaauaaaaauauccuaag

SEQ ID NO: 565971 - RNA, 22 nt, Artificial Sequence
  Synthetic
uguaaaauaaaaauauccuaag

SEQ ID NO: 565972 - RNA, 23 nt, Artificial Sequence
  Synthetic
uuguaaaauaaaaauauccuaag

SEQ ID NO: 565973 - RNA, 24 nt, Artificial Sequence
  Synthetic
auuguaaaauaaaaauauccuaag

SEQ ID NO: 565974 - RNA, 18 nt, Artificial Sequence
  Synthetic
uucaagugagcuccuaag

SEQ ID NO: 565975 - RNA, 19 nt, Artificial Sequence
  Synthetic
uuucaagugagcuccuaag

SEQ ID NO: 565976 - RNA, 20 nt, Artificial Sequence
  Synthetic
uuuucaagugagcuccuaag

SEQ ID NO: 565977 - RNA, 21 nt, Artificial Sequence
  Synthetic
uuuuucaagugagcuccuaag

SEQ ID NO: 565978 - RNA, 22 nt, Artificial Sequence
  Synthetic
uuuuuucaagugagcuccuaag

SEQ ID NO: 565979 - RNA, 23 nt, Artificial Sequence
  Synthetic
cuuuuuucaagugagcuccuaag

SEQ ID NO: 565980 - RNA, 24 nt, Artificial Sequence
  Synthetic
ccuuuuuucaagugagcuccuaag

SEQ ID NO: 565981 - RNA, 18 nt, Artificial Sequence
  Synthetic
ucaggguagguuccuaag

SEQ ID NO: 565982 - RNA, 19 nt, Artificial Sequence
  Synthetic
cucaggguagguuccuaag

SEQ ID NO: 565983 - RNA, 20 nt, Artificial Sequence
  Synthetic
gcucaggguagguuccuaag

SEQ ID NO: 565984 - RNA, 21 nt, Artificial Sequence
  Synthetic
agcucaggguagguuccuaag

SEQ ID NO: 565985 - RNA, 22 nt, Artificial Sequence
  Synthetic
uagcucaggguagguuccuaag

SEQ ID NO: 565986 - RNA, 23 nt, Artificial Sequence
  Synthetic
auagcucaggguagguuccuaag

SEQ ID NO: 565987 - RNA, 24 nt, Artificial Sequence
  Synthetic
uauagcucaggguagguuccuaag

SEQ ID NO: 565988 - RNA, 18 nt, Artificial Sequence
  Synthetic
auauacuuuuuuccuaag

SEQ ID NO: 565989 - RNA, 19 nt, Artificial Sequence
  Synthetic
uauauacuuuuuuccuaag

SEQ ID NO: 565990 - RNA, 20 nt, Artificial Sequence
  Synthetic
auauauacuuuuuuccuaag

SEQ ID NO: 565991 - RNA, 21 nt, Artificial Sequence
  Synthetic
aauauauacuuuuuuccuaag

SEQ ID NO: 565992 - RNA, 22 nt, Artificial Sequence
  Synthetic
gaauauauacuuuuuuccuaag

SEQ ID NO: 565993 - RNA, 23 nt, Artificial Sequence
  Synthetic
agaauauauacuuuuuuccuaag

SEQ ID NO: 565994 - RNA, 24 nt, Artificial Sequence
  Synthetic
cagaauauauacuuuuuuccuaag

SEQ ID NO: 565995 - RNA, 18 nt, Artificial Sequence
  Synthetic
caauauguacuagcuaag

SEQ ID NO: 565996 - RNA, 19 nt, Artificial Sequence
  Synthetic
acaauauguacuagcuaag

SEQ ID NO: 565997 - RNA, 20 nt, Artificial Sequence
  Synthetic
uacaauauguacuagcuaag

SEQ ID NO: 565998 - RNA, 21 nt, Artificial Sequence
  Synthetic
guacaauauguacuagcuaag

SEQ ID NO: 565999 - RNA, 22 nt, Artificial Sequence
  Synthetic
aguacaauauguacuagcuaag

SEQ ID NO: 566000 - RNA, 23 nt, Artificial Sequence
  Synthetic
gaguacaauauguacuagcuaag

SEQ ID NO: 566001 - RNA, 24 nt, Artificial Sequence
  Synthetic
ugaguacaauauguacuagcuaag

SEQ ID NO: 566002 - RNA, 18 nt, Artificial Sequence
  Synthetic
aaggccugaaaggcuaag

SEQ ID NO: 566003 - RNA, 19 nt, Artificial Sequence
  Synthetic
caaggccugaaaggcuaag

SEQ ID NO: 566004 - RNA, 20 nt, Artificial Sequence
  Synthetic
ucaaggccugaaaggcuaag

SEQ ID NO: 566005 - RNA, 21 nt, Artificial Sequence
  Synthetic
cucaaggccugaaaggcuaag

SEQ ID NO: 566006 - RNA, 22 nt, Artificial Sequence
  Synthetic
ccucaaggccugaaaggcuaag

SEQ ID NO: 566007 - RNA, 23 nt, Artificial Sequence
  Synthetic
uccucaaggccugaaaggcuaag

SEQ ID NO: 566008 - RNA, 24 nt, Artificial Sequence
  Synthetic
cuccucaaggccugaaaggcuaag

SEQ ID NO: 566009 - RNA, 18 nt, Artificial Sequence
  Synthetic
agcaaaagcaaggcuaag

SEQ ID NO: 566010 - RNA, 19 nt, Artificial Sequence
  Synthetic
cagcaaaagcaaggcuaag

SEQ ID NO: 566011 - RNA, 20 nt, Artificial Sequence
  Synthetic
acagcaaaagcaaggcuaag

SEQ ID NO: 566012 - RNA, 21 nt, Artificial Sequence
  Synthetic
uacagcaaaagcaaggcuaag

SEQ ID NO: 566013 - RNA, 22 nt, Artificial Sequence
  Synthetic
auacagcaaaagcaaggcuaag

SEQ ID NO: 566014 - RNA, 23 nt, Artificial Sequence
  Synthetic
gauacagcaaaagcaaggcuaag

SEQ ID NO: 566015 - RNA, 24 nt, Artificial Sequence
  Synthetic
ggauacagcaaaagcaaggcuaag

SEQ ID NO: 566016 - RNA, 18 nt, Artificial Sequence
  Synthetic
gugauaugcuaggcuaag

SEQ ID NO: 566017 - RNA, 19 nt, Artificial Sequence
  Synthetic
ugugauaugcuaggcuaag

SEQ ID NO: 566018 - RNA, 20 nt, Artificial Sequence
  Synthetic
cugugauaugcuaggcuaag

SEQ ID NO: 566019 - RNA, 21 nt, Artificial Sequence
  Synthetic
ucugugauaugcuaggcuaag

SEQ ID NO: 566020 - RNA, 22 nt, Artificial Sequence
  Synthetic
cucugugauaugcuaggcuaag

SEQ ID NO: 566021 - RNA, 23 nt, Artificial Sequence
  Synthetic
ucucugugauaugcuaggcuaag

SEQ ID NO: 566022 - RNA, 24 nt, Artificial Sequence
  Synthetic
aucucugugauaugcuaggcuaag

SEQ ID NO: 566023 - RNA, 18 nt, Artificial Sequence
  Synthetic
uucaaaagaauggcuaag

SEQ ID NO: 566024 - RNA, 19 nt, Artificial Sequence
  Synthetic
auucaaaagaauggcuaag

SEQ ID NO: 566025 - RNA, 20 nt, Artificial Sequence
  Synthetic
cauucaaaagaauggcuaag

SEQ ID NO: 566026 - RNA, 21 nt, Artificial Sequence
  Synthetic
ccauucaaaagaauggcuaag

SEQ ID NO: 566027 - RNA, 22 nt, Artificial Sequence
  Synthetic
uccauucaaaagaauggcuaag

SEQ ID NO: 566028 - RNA, 23 nt, Artificial Sequence
  Synthetic
auccauucaaaagaauggcuaag

SEQ ID NO: 566029 - RNA, 24 nt, Artificial Sequence
  Synthetic
cauccauucaaaagaauggcuaag

SEQ ID NO: 566030 - RNA, 18 nt, Artificial Sequence
  Synthetic
ccaggauugauggcuaag

SEQ ID NO: 566031 - RNA, 19 nt, Artificial Sequence
  Synthetic
uccaggauugauggcuaag

SEQ ID NO: 566032 - RNA, 20 nt, Artificial Sequence
  Synthetic
guccaggauugauggcuaag

SEQ ID NO: 566033 - RNA, 21 nt, Artificial Sequence
  Synthetic
uguccaggauugauggcuaag

SEQ ID NO: 566034 - RNA, 22 nt, Artificial Sequence
  Synthetic
cuguccaggauugauggcuaag

SEQ ID NO: 566035 - RNA, 23 nt, Artificial Sequence
  Synthetic
ucuguccaggauugauggcuaag

SEQ ID NO: 566036 - RNA, 24 nt, Artificial Sequence
  Synthetic
uucuguccaggauugauggcuaag

SEQ ID NO: 566037 - RNA, 18 nt, Artificial Sequence
  Synthetic
ggaaggguaaaugcuaag

SEQ ID NO: 566038 - RNA, 19 nt, Artificial Sequence
  Synthetic
aggaaggguaaaugcuaag

SEQ ID NO: 566039 - RNA, 20 nt, Artificial Sequence
  Synthetic
caggaaggguaaaugcuaag

SEQ ID NO: 566040 - RNA, 21 nt, Artificial Sequence
  Synthetic
gcaggaaggguaaaugcuaag

SEQ ID NO: 566041 - RNA, 22 nt, Artificial Sequence
  Synthetic
agcaggaaggguaaaugcuaag

SEQ ID NO: 566042 - RNA, 23 nt, Artificial Sequence
  Synthetic
uagcaggaaggguaaaugcuaag

SEQ ID NO: 566043 - RNA, 24 nt, Artificial Sequence
  Synthetic
auagcaggaaggguaaaugcuaag

SEQ ID NO: 566044 - RNA, 18 nt, Artificial Sequence
  Synthetic
ggcauaguagaugcuaag

SEQ ID NO: 566045 - RNA, 19 nt, Artificial Sequence
  Synthetic
uggcauaguagaugcuaag

SEQ ID NO: 566046 - RNA, 20 nt, Artificial Sequence
  Synthetic
cuggcauaguagaugcuaag

SEQ ID NO: 566047 - RNA, 21 nt, Artificial Sequence
  Synthetic
acuggcauaguagaugcuaag

SEQ ID NO: 566048 - RNA, 22 nt, Artificial Sequence
  Synthetic
gacuggcauaguagaugcuaag

SEQ ID NO: 566049 - RNA, 23 nt, Artificial Sequence
  Synthetic
cgacuggcauaguagaugcuaag

SEQ ID NO: 566050 - RNA, 24 nt, Artificial Sequence
  Synthetic
acgacuggcauaguagaugcuaag

SEQ ID NO: 566051 - RNA, 18 nt, Artificial Sequence
  Synthetic
uucguaaacacugcuaag

SEQ ID NO: 566052 - RNA, 19 nt, Artificial Sequence
  Synthetic
auucguaaacacugcuaag

SEQ ID NO: 566053 - RNA, 20 nt, Artificial Sequence
  Synthetic
uauucguaaacacugcuaag

SEQ ID NO: 566054 - RNA, 21 nt, Artificial Sequence
  Synthetic
auauucguaaacacugcuaag

SEQ ID NO: 566055 - RNA, 22 nt, Artificial Sequence
  Synthetic
uauauucguaaacacugcuaag

SEQ ID NO: 566056 - RNA, 23 nt, Artificial Sequence
  Synthetic
uuauauucguaaacacugcuaag

SEQ ID NO: 566057 - RNA, 24 nt, Artificial Sequence
  Synthetic
auuauauucguaaacacugcuaag

SEQ ID NO: 566058 - RNA, 18 nt, Artificial Sequence
  Synthetic
agcaaaaacagugcuaag

SEQ ID NO: 566059 - RNA, 19 nt, Artificial Sequence
  Synthetic
cagcaaaaacagugcuaag

SEQ ID NO: 566060 - RNA, 20 nt, Artificial Sequence
  Synthetic
acagcaaaaacagugcuaag

SEQ ID NO: 566061 - RNA, 21 nt, Artificial Sequence
  Synthetic
uacagcaaaaacagugcuaag

SEQ ID NO: 566062 - RNA, 22 nt, Artificial Sequence
  Synthetic
auacagcaaaaacagugcuaag

SEQ ID NO: 566063 - RNA, 23 nt, Artificial Sequence
  Synthetic
gauacagcaaaaacagugcuaag

SEQ ID NO: 566064 - RNA, 24 nt, Artificial Sequence
  Synthetic
agauacagcaaaaacagugcuaag

SEQ ID NO: 566065 - RNA, 18 nt, Artificial Sequence
  Synthetic
agcaaaagcagugcuaag

SEQ ID NO: 566066 - RNA, 19 nt, Artificial Sequence
  Synthetic
uagcaaaagcagugcuaag

SEQ ID NO: 566067 - RNA, 20 nt, Artificial Sequence
  Synthetic
guagcaaaagcagugcuaag

SEQ ID NO: 566068 - RNA, 21 nt, Artificial Sequence
  Synthetic
gguagcaaaagcagugcuaag

SEQ ID NO: 566069 - RNA, 22 nt, Artificial Sequence
  Synthetic
ggguagcaaaagcagugcuaag

SEQ ID NO: 566070 - RNA, 23 nt, Artificial Sequence
  Synthetic
gggguagcaaaagcagugcuaag

SEQ ID NO: 566071 - RNA, 24 nt, Artificial Sequence
  Synthetic
ggggguagcaaaagcagugcuaag

SEQ ID NO: 566072 - RNA, 18 nt, Artificial Sequence
  Synthetic
ggaaggcugagugcuaag

SEQ ID NO: 566073 - RNA, 19 nt, Artificial Sequence
  Synthetic
aggaaggcugagugcuaag

SEQ ID NO: 566074 - RNA, 20 nt, Artificial Sequence
  Synthetic
uaggaaggcugagugcuaag

SEQ ID NO: 566075 - RNA, 21 nt, Artificial Sequence
  Synthetic
auaggaaggcugagugcuaag

SEQ ID NO: 566076 - RNA, 22 nt, Artificial Sequence
  Synthetic
uauaggaaggcugagugcuaag

SEQ ID NO: 566077 - RNA, 23 nt, Artificial Sequence
  Synthetic
uuauaggaaggcugagugcuaag

SEQ ID NO: 566078 - RNA, 24 nt, Artificial Sequence
  Synthetic
uuuauaggaaggcugagugcuaag

SEQ ID NO: 566079 - RNA, 18 nt, Artificial Sequence
  Synthetic
ugaagucacuuugcuaag

SEQ ID NO: 566080 - RNA, 19 nt, Artificial Sequence
  Synthetic
uugaagucacuuugcuaag

SEQ ID NO: 566081 - RNA, 20 nt, Artificial Sequence
  Synthetic
uuugaagucacuuugcuaag

SEQ ID NO: 566082 - RNA, 21 nt, Artificial Sequence
  Synthetic
auuugaagucacuuugcuaag

SEQ ID NO: 566083 - RNA, 22 nt, Artificial Sequence
  Synthetic
uauuugaagucacuuugcuaag

SEQ ID NO: 566084 - RNA, 23 nt, Artificial Sequence
  Synthetic
guauuugaagucacuuugcuaag

SEQ ID NO: 566085 - RNA, 24 nt, Artificial Sequence
  Synthetic
uguauuugaagucacuuugcuaag

SEQ ID NO: 566086 - RNA, 18 nt, Artificial Sequence
  Synthetic
aguguuuugaaaucuaag

SEQ ID NO: 566087 - RNA, 19 nt, Artificial Sequence
  Synthetic
uaguguuuugaaaucuaag

SEQ ID NO: 566088 - RNA, 20 nt, Artificial Sequence
  Synthetic
auaguguuuugaaaucuaag

SEQ ID NO: 566089 - RNA, 21 nt, Artificial Sequence
  Synthetic
gauaguguuuugaaaucuaag

SEQ ID NO: 566090 - RNA, 22 nt, Artificial Sequence
  Synthetic
agauaguguuuugaaaucuaag

SEQ ID NO: 566091 - RNA, 23 nt, Artificial Sequence
  Synthetic
gagauaguguuuugaaaucuaag

SEQ ID NO: 566092 - RNA, 24 nt, Artificial Sequence
  Synthetic
agagauaguguuuugaaaucuaag

SEQ ID NO: 566093 - RNA, 18 nt, Artificial Sequence
  Synthetic
auuuuugagacaucuaag

SEQ ID NO: 566094 - RNA, 19 nt, Artificial Sequence
  Synthetic
uauuuuugagacaucuaag

SEQ ID NO: 566095 - RNA, 20 nt, Artificial Sequence
  Synthetic
uuauuuuugagacaucuaag

SEQ ID NO: 566096 - RNA, 21 nt, Artificial Sequence
  Synthetic
auuauuuuugagacaucuaag

SEQ ID NO: 566097 - RNA, 22 nt, Artificial Sequence
  Synthetic
gauuauuuuugagacaucuaag

SEQ ID NO: 566098 - RNA, 23 nt, Artificial Sequence
  Synthetic
agauuauuuuugagacaucuaag

SEQ ID NO: 566099 - RNA, 24 nt, Artificial Sequence
  Synthetic
gagauuauuuuugagacaucuaag

SEQ ID NO: 566100 - RNA, 18 nt, Artificial Sequence
  Synthetic
uuugcauuuacaucuaag

SEQ ID NO: 566101 - RNA, 19 nt, Artificial Sequence
  Synthetic
auuugcauuuacaucuaag

SEQ ID NO: 566102 - RNA, 20 nt, Artificial Sequence
  Synthetic
gauuugcauuuacaucuaag

SEQ ID NO: 566103 - RNA, 21 nt, Artificial Sequence
  Synthetic
agauuugcauuuacaucuaag

SEQ ID NO: 566104 - RNA, 22 nt, Artificial Sequence
  Synthetic
cagauuugcauuuacaucuaag

SEQ ID NO: 566105 - RNA, 23 nt, Artificial Sequence
  Synthetic
acagauuugcauuuacaucuaag

SEQ ID NO: 566106 - RNA, 24 nt, Artificial Sequence
  Synthetic
aacagauuugcauuuacaucuaag

SEQ ID NO: 566107 - RNA, 18 nt, Artificial Sequence
  Synthetic
caauaacacauaucuaag

SEQ ID NO: 566108 - RNA, 19 nt, Artificial Sequence
  Synthetic
ccaauaacacauaucuaag

SEQ ID NO: 566109 - RNA, 20 nt, Artificial Sequence
  Synthetic
cccaauaacacauaucuaag

SEQ ID NO: 566110 - RNA, 21 nt, Artificial Sequence
  Synthetic
ucccaauaacacauaucuaag

SEQ ID NO: 566111 - RNA, 22 nt, Artificial Sequence
  Synthetic
uucccaauaacacauaucuaag

SEQ ID NO: 566112 - RNA, 23 nt, Artificial Sequence
  Synthetic
uuucccaauaacacauaucuaag

SEQ ID NO: 566113 - RNA, 24 nt, Artificial Sequence
  Synthetic
uuuucccaauaacacauaucuaag

SEQ ID NO: 566114 - RNA, 18 nt, Artificial Sequence
  Synthetic
gacuuuggggacucuaag

SEQ ID NO: 566115 - RNA, 19 nt, Artificial Sequence
  Synthetic
ggacuuuggggacucuaag

SEQ ID NO: 566116 - RNA, 20 nt, Artificial Sequence
  Synthetic
uggacuuuggggacucuaag

SEQ ID NO: 566117 - RNA, 21 nt, Artificial Sequence
  Synthetic
auggacuuuggggacucuaag

SEQ ID NO: 566118 - RNA, 22 nt, Artificial Sequence
  Synthetic
aauggacuuuggggacucuaag

SEQ ID NO: 566119 - RNA, 23 nt, Artificial Sequence
  Synthetic
caauggacuuuggggacucuaag

SEQ ID NO: 566120 - RNA, 24 nt, Artificial Sequence
  Synthetic
acaauggacuuuggggacucuaag

SEQ ID NO: 566121 - RNA, 18 nt, Artificial Sequence
  Synthetic
aaagccauauacucuaag

SEQ ID NO: 566122 - RNA, 19 nt, Artificial Sequence
  Synthetic
aaaagccauauacucuaag

SEQ ID NO: 566123 - RNA, 20 nt, Artificial Sequence
  Synthetic
uaaaagccauauacucuaag

SEQ ID NO: 566124 - RNA, 21 nt, Artificial Sequence
  Synthetic
guaaaagccauauacucuaag

SEQ ID NO: 566125 - RNA, 22 nt, Artificial Sequence
  Synthetic
aguaaaagccauauacucuaag

SEQ ID NO: 566126 - RNA, 23 nt, Artificial Sequence
  Synthetic
caguaaaagccauauacucuaag

SEQ ID NO: 566127 - RNA, 24 nt, Artificial Sequence
  Synthetic
acaguaaaagccauauacucuaag

SEQ ID NO: 566128 - RNA, 18 nt, Artificial Sequence
  Synthetic
aagcauuagcccucuaag

SEQ ID NO: 566129 - RNA, 19 nt, Artificial Sequence
  Synthetic
aaagcauuagcccucuaag

SEQ ID NO: 566130 - RNA, 20 nt, Artificial Sequence
  Synthetic
gaaagcauuagcccucuaag

SEQ ID NO: 566131 - RNA, 21 nt, Artificial Sequence
  Synthetic
ggaaagcauuagcccucuaag

SEQ ID NO: 566132 - RNA, 22 nt, Artificial Sequence
  Synthetic
aggaaagcauuagcccucuaag

SEQ ID NO: 566133 - RNA, 23 nt, Artificial Sequence
  Synthetic
uaggaaagcauuagcccucuaag

SEQ ID NO: 566134 - RNA, 24 nt, Artificial Sequence
  Synthetic
uuaggaaagcauuagcccucuaag

SEQ ID NO: 566135 - RNA, 18 nt, Artificial Sequence
  Synthetic
uagaaaguuaucucuaag

SEQ ID NO: 566136 - RNA, 19 nt, Artificial Sequence
  Synthetic
cuagaaaguuaucucuaag

SEQ ID NO: 566137 - RNA, 20 nt, Artificial Sequence
  Synthetic
ccuagaaaguuaucucuaag

SEQ ID NO: 566138 - RNA, 21 nt, Artificial Sequence
  Synthetic
uccuagaaaguuaucucuaag

SEQ ID NO: 566139 - RNA, 22 nt, Artificial Sequence
  Synthetic
uuccuagaaaguuaucucuaag

SEQ ID NO: 566140 - RNA, 23 nt, Artificial Sequence
  Synthetic
uuuccuagaaaguuaucucuaag

SEQ ID NO: 566141 - RNA, 24 nt, Artificial Sequence
  Synthetic
uuuuccuagaaaguuaucucuaag

SEQ ID NO: 566142 - RNA, 18 nt, Artificial Sequence
  Synthetic
uuucuguuuaagucuaag

SEQ ID NO: 566143 - RNA, 19 nt, Artificial Sequence
  Synthetic
guuucuguuuaagucuaag

SEQ ID NO: 566144 - RNA, 20 nt, Artificial Sequence
  Synthetic
uguuucuguuuaagucuaag

SEQ ID NO: 566145 - RNA, 21 nt, Artificial Sequence
  Synthetic
guguuucuguuuaagucuaag

SEQ ID NO: 566146 - RNA, 22 nt, Artificial Sequence
  Synthetic
aguguuucuguuuaagucuaag

SEQ ID NO: 566147 - RNA, 23 nt, Artificial Sequence
  Synthetic
uaguguuucuguuuaagucuaag

SEQ ID NO: 566148 - RNA, 24 nt, Artificial Sequence
  Synthetic
uuaguguuucuguuuaagucuaag

SEQ ID NO: 566149 - RNA, 18 nt, Artificial Sequence
  Synthetic
uugagagacaguucuaag

SEQ ID NO: 566150 - RNA, 19 nt, Artificial Sequence
  Synthetic
cuugagagacaguucuaag

SEQ ID NO: 566151 - RNA, 20 nt, Artificial Sequence
  Synthetic
acuugagagacaguucuaag

SEQ ID NO: 566152 - RNA, 21 nt, Artificial Sequence
  Synthetic
gacuugagagacaguucuaag

SEQ ID NO: 566153 - RNA, 22 nt, Artificial Sequence
  Synthetic
agacuugagagacaguucuaag

SEQ ID NO: 566154 - RNA, 23 nt, Artificial Sequence
  Synthetic
aagacuugagagacaguucuaag

SEQ ID NO: 566155 - RNA, 24 nt, Artificial Sequence
  Synthetic
uaagacuugagagacaguucuaag

SEQ ID NO: 566156 - RNA, 18 nt, Artificial Sequence
  Synthetic
auauaaccuguuucuaag

SEQ ID NO: 566157 - RNA, 19 nt, Artificial Sequence
  Synthetic
aauauaaccuguuucuaag

SEQ ID NO: 566158 - RNA, 20 nt, Artificial Sequence
  Synthetic
gaauauaaccuguuucuaag

SEQ ID NO: 566159 - RNA, 21 nt, Artificial Sequence
  Synthetic
ggaauauaaccuguuucuaag

SEQ ID NO: 566160 - RNA, 22 nt, Artificial Sequence
  Synthetic
uggaauauaaccuguuucuaag

SEQ ID NO: 566161 - RNA, 23 nt, Artificial Sequence
  Synthetic
uuggaauauaaccuguuucuaag

SEQ ID NO: 566162 - RNA, 24 nt, Artificial Sequence
  Synthetic
uuuggaauauaaccuguuucuaag

SEQ ID NO: 566163 - RNA, 18 nt, Artificial Sequence
  Synthetic
gcauguacuuuuucuaag

SEQ ID NO: 566164 - RNA, 19 nt, Artificial Sequence
  Synthetic
agcauguacuuuuucuaag

SEQ ID NO: 566165 - RNA, 20 nt, Artificial Sequence
  Synthetic
gagcauguacuuuuucuaag

SEQ ID NO: 566166 - RNA, 21 nt, Artificial Sequence
  Synthetic
agagcauguacuuuuucuaag

SEQ ID NO: 566167 - RNA, 22 nt, Artificial Sequence
  Synthetic
cagagcauguacuuuuucuaag

SEQ ID NO: 566168 - RNA, 23 nt, Artificial Sequence
  Synthetic
ucagagcauguacuuuuucuaag

SEQ ID NO: 566169 - RNA, 24 nt, Artificial Sequence
  Synthetic
gucagagcauguacuuuuucuaag

SEQ ID NO: 566170 - RNA, 18 nt, Artificial Sequence
  Synthetic
gaaaaaacaaaaaguaag

SEQ ID NO: 566171 - RNA, 19 nt, Artificial Sequence
  Synthetic
agaaaaaacaaaaaguaag

SEQ ID NO: 566172 - RNA, 20 nt, Artificial Sequence
  Synthetic
uagaaaaaacaaaaaguaag

SEQ ID NO: 566173 - RNA, 21 nt, Artificial Sequence
  Synthetic
guagaaaaaacaaaaaguaag

SEQ ID NO: 566174 - RNA, 22 nt, Artificial Sequence
  Synthetic
aguagaaaaaacaaaaaguaag

SEQ ID NO: 566175 - RNA, 23 nt, Artificial Sequence
  Synthetic
gaguagaaaaaacaaaaaguaag

SEQ ID NO: 566176 - RNA, 24 nt, Artificial Sequence
  Synthetic
ugaguagaaaaaacaaaaaguaag

SEQ ID NO: 566177 - RNA, 18 nt, Artificial Sequence
  Synthetic
ugggauuuuuaaaguaag

SEQ ID NO: 566178 - RNA, 19 nt, Artificial Sequence
  Synthetic
uugggauuuuuaaaguaag

SEQ ID NO: 566179 - RNA, 20 nt, Artificial Sequence
  Synthetic
auugggauuuuuaaaguaag

SEQ ID NO: 566180 - RNA, 21 nt, Artificial Sequence
  Synthetic
aauugggauuuuuaaaguaag

SEQ ID NO: 566181 - RNA, 22 nt, Artificial Sequence
  Synthetic
gaauugggauuuuuaaaguaag

SEQ ID NO: 566182 - RNA, 23 nt, Artificial Sequence
  Synthetic
ugaauugggauuuuuaaaguaag

SEQ ID NO: 566183 - RNA, 24 nt, Artificial Sequence
  Synthetic
augaauugggauuuuuaaaguaag

SEQ ID NO: 566184 - RNA, 18 nt, Artificial Sequence
  Synthetic
gaaagugaggcaaguaag

SEQ ID NO: 566185 - RNA, 19 nt, Artificial Sequence
  Synthetic
ugaaagugaggcaaguaag

SEQ ID NO: 566186 - RNA, 20 nt, Artificial Sequence
  Synthetic
uugaaagugaggcaaguaag

SEQ ID NO: 566187 - RNA, 21 nt, Artificial Sequence
  Synthetic
cuugaaagugaggcaaguaag

SEQ ID NO: 566188 - RNA, 22 nt, Artificial Sequence
  Synthetic
acuugaaagugaggcaaguaag

SEQ ID NO: 566189 - RNA, 23 nt, Artificial Sequence
  Synthetic
aacuugaaagugaggcaaguaag

SEQ ID NO: 566190 - RNA, 24 nt, Artificial Sequence
  Synthetic
gaacuugaaagugaggcaaguaag

SEQ ID NO: 566191 - RNA, 18 nt, Artificial Sequence
  Synthetic
cacauaaugucaaguaag

SEQ ID NO: 566192 - RNA, 19 nt, Artificial Sequence
  Synthetic
ccacauaaugucaaguaag

SEQ ID NO: 566193 - RNA, 20 nt, Artificial Sequence
  Synthetic
cccacauaaugucaaguaag

SEQ ID NO: 566194 - RNA, 21 nt, Artificial Sequence
  Synthetic
acccacauaaugucaaguaag

SEQ ID NO: 566195 - RNA, 22 nt, Artificial Sequence
  Synthetic
uacccacauaaugucaaguaag

SEQ ID NO: 566196 - RNA, 23 nt, Artificial Sequence
  Synthetic
uuacccacauaaugucaaguaag

SEQ ID NO: 566197 - RNA, 24 nt, Artificial Sequence
  Synthetic
auuacccacauaaugucaaguaag

SEQ ID NO: 566198 - RNA, 18 nt, Artificial Sequence
  Synthetic
uccuagguuggaaguaag

SEQ ID NO: 566199 - RNA, 19 nt, Artificial Sequence
  Synthetic
cuccuagguuggaaguaag

SEQ ID NO: 566200 - RNA, 20 nt, Artificial Sequence
  Synthetic
ucuccuagguuggaaguaag

SEQ ID NO: 566201 - RNA, 21 nt, Artificial Sequence
  Synthetic
aucuccuagguuggaaguaag

SEQ ID NO: 566202 - RNA, 22 nt, Artificial Sequence
  Synthetic
gaucuccuagguuggaaguaag

SEQ ID NO: 566203 - RNA, 23 nt, Artificial Sequence
  Synthetic
agaucuccuagguuggaaguaag

SEQ ID NO: 566204 - RNA, 24 nt, Artificial Sequence
  Synthetic
aagaucuccuagguuggaaguaag

SEQ ID NO: 566205 - RNA, 18 nt, Artificial Sequence
  Synthetic
auucuagggaacaguaag

SEQ ID NO: 566206 - RNA, 19 nt, Artificial Sequence
  Synthetic
cauucuagggaacaguaag

SEQ ID NO: 566207 - RNA, 20 nt, Artificial Sequence
  Synthetic
gcauucuagggaacaguaag

SEQ ID NO: 566208 - RNA, 21 nt, Artificial Sequence
  Synthetic
agcauucuagggaacaguaag

SEQ ID NO: 566209 - RNA, 22 nt, Artificial Sequence
  Synthetic
aagcauucuagggaacaguaag

SEQ ID NO: 566210 - RNA, 23 nt, Artificial Sequence
  Synthetic
caagcauucuagggaacaguaag

SEQ ID NO: 566211 - RNA, 24 nt, Artificial Sequence
  Synthetic
acaagcauucuagggaacaguaag

SEQ ID NO: 566212 - RNA, 18 nt, Artificial Sequence
  Synthetic
uuuuuucuuggcaguaag

SEQ ID NO: 566213 - RNA, 19 nt, Artificial Sequence
  Synthetic
uuuuuuucuuggcaguaag

SEQ ID NO: 566214 - RNA, 20 nt, Artificial Sequence
  Synthetic
uuuuuuuucuuggcaguaag

SEQ ID NO: 566215 - RNA, 21 nt, Artificial Sequence
  Synthetic
guuuuuuuucuuggcaguaag

SEQ ID NO: 566216 - RNA, 22 nt, Artificial Sequence
  Synthetic
aguuuuuuuucuuggcaguaag

SEQ ID NO: 566217 - RNA, 23 nt, Artificial Sequence
  Synthetic
aaguuuuuuuucuuggcaguaag

SEQ ID NO: 566218 - RNA, 24 nt, Artificial Sequence
  Synthetic
aaaguuuuuuuucuuggcaguaag

SEQ ID NO: 566219 - RNA, 18 nt, Artificial Sequence
  Synthetic
ggcagaggcugcaguaag

SEQ ID NO: 566220 - RNA, 19 nt, Artificial Sequence
  Synthetic
aggcagaggcugcaguaag

SEQ ID NO: 566221 - RNA, 20 nt, Artificial Sequence
  Synthetic
aaggcagaggcugcaguaag

SEQ ID NO: 566222 - RNA, 21 nt, Artificial Sequence
  Synthetic
gaaggcagaggcugcaguaag

SEQ ID NO: 566223 - RNA, 22 nt, Artificial Sequence
  Synthetic
ggaaggcagaggcugcaguaag

SEQ ID NO: 566224 - RNA, 23 nt, Artificial Sequence
  Synthetic
uggaaggcagaggcugcaguaag

SEQ ID NO: 566225 - RNA, 24 nt, Artificial Sequence
  Synthetic
guggaaggcagaggcugcaguaag

SEQ ID NO: 566226 - RNA, 18 nt, Artificial Sequence
  Synthetic
acauaugcccucaguaag

SEQ ID NO: 566227 - RNA, 19 nt, Artificial Sequence
  Synthetic
aacauaugcccucaguaag

SEQ ID NO: 566228 - RNA, 20 nt, Artificial Sequence
  Synthetic
gaacauaugcccucaguaag

SEQ ID NO: 566229 - RNA, 21 nt, Artificial Sequence
  Synthetic
ugaacauaugcccucaguaag

SEQ ID NO: 566230 - RNA, 22 nt, Artificial Sequence
  Synthetic
augaacauaugcccucaguaag

SEQ ID NO: 566231 - RNA, 23 nt, Artificial Sequence
  Synthetic
uaugaacauaugcccucaguaag

SEQ ID NO: 566232 - RNA, 24 nt, Artificial Sequence
  Synthetic
cuaugaacauaugcccucaguaag

SEQ ID NO: 566233 - RNA, 18 nt, Artificial Sequence
  Synthetic
aagauuaaaaagaguaag

SEQ ID NO: 566234 - RNA, 19 nt, Artificial Sequence
  Synthetic
aaagauuaaaaagaguaag

SEQ ID NO: 566235 - RNA, 20 nt, Artificial Sequence
  Synthetic
gaaagauuaaaaagaguaag

SEQ ID NO: 566236 - RNA, 21 nt, Artificial Sequence
  Synthetic
agaaagauuaaaaagaguaag

SEQ ID NO: 566237 - RNA, 22 nt, Artificial Sequence
  Synthetic
aagaaagauuaaaaagaguaag

SEQ ID NO: 566238 - RNA, 23 nt, Artificial Sequence
  Synthetic
gaagaaagauuaaaaagaguaag

SEQ ID NO: 566239 - RNA, 24 nt, Artificial Sequence
  Synthetic
ugaagaaagauuaaaaagaguaag

SEQ ID NO: 566240 - RNA, 18 nt, Artificial Sequence
  Synthetic
uaucaggaacagaguaag

SEQ ID NO: 566241 - RNA, 19 nt, Artificial Sequence
  Synthetic
uuaucaggaacagaguaag

SEQ ID NO: 566242 - RNA, 20 nt, Artificial Sequence
  Synthetic
guuaucaggaacagaguaag

SEQ ID NO: 566243 - RNA, 21 nt, Artificial Sequence
  Synthetic
uguuaucaggaacagaguaag

SEQ ID NO: 566244 - RNA, 22 nt, Artificial Sequence
  Synthetic
uuguuaucaggaacagaguaag

SEQ ID NO: 566245 - RNA, 23 nt, Artificial Sequence
  Synthetic
uuuguuaucaggaacagaguaag

SEQ ID NO: 566246 - RNA, 24 nt, Artificial Sequence
  Synthetic
uuuuguuaucaggaacagaguaag

SEQ ID NO: 566247 - RNA, 18 nt, Artificial Sequence
  Synthetic
aaauauuuagagaguaag

SEQ ID NO: 566248 - RNA, 19 nt, Artificial Sequence
  Synthetic
gaaauauuuagagaguaag

SEQ ID NO: 566249 - RNA, 20 nt, Artificial Sequence
  Synthetic
cgaaauauuuagagaguaag

SEQ ID NO: 566250 - RNA, 21 nt, Artificial Sequence
  Synthetic
ccgaaauauuuagagaguaag

SEQ ID NO: 566251 - RNA, 22 nt, Artificial Sequence
  Synthetic
uccgaaauauuuagagaguaag

SEQ ID NO: 566252 - RNA, 23 nt, Artificial Sequence
  Synthetic
uuccgaaauauuuagagaguaag

SEQ ID NO: 566253 - RNA, 24 nt, Artificial Sequence
  Synthetic
auuccgaaauauuuagagaguaag

SEQ ID NO: 566254 - RNA, 18 nt, Artificial Sequence
  Synthetic
agagaauaugagaguaag

SEQ ID NO: 566255 - RNA, 19 nt, Artificial Sequence
  Synthetic
aagagaauaugagaguaag

SEQ ID NO: 566256 - RNA, 20 nt, Artificial Sequence
  Synthetic
gaagagaauaugagaguaag

SEQ ID NO: 566257 - RNA, 21 nt, Artificial Sequence
  Synthetic
agaagagaauaugagaguaag

SEQ ID NO: 566258 - RNA, 22 nt, Artificial Sequence
  Synthetic
aagaagagaauaugagaguaag

SEQ ID NO: 566259 - RNA, 23 nt, Artificial Sequence
  Synthetic
gaagaagagaauaugagaguaag

SEQ ID NO: 566260 - RNA, 24 nt, Artificial Sequence
  Synthetic
agaagaagagaauaugagaguaag

SEQ ID NO: 566261 - RNA, 18 nt, Artificial Sequence
  Synthetic
aagcauaaaaauaguaag

SEQ ID NO: 566262 - RNA, 19 nt, Artificial Sequence
  Synthetic
uaagcauaaaaauaguaag

SEQ ID NO: 566263 - RNA, 20 nt, Artificial Sequence
  Synthetic
uuaagcauaaaaauaguaag

SEQ ID NO: 566264 - RNA, 21 nt, Artificial Sequence
  Synthetic
guuaagcauaaaaauaguaag

SEQ ID NO: 566265 - RNA, 22 nt, Artificial Sequence
  Synthetic
uguuaagcauaaaaauaguaag

SEQ ID NO: 566266 - RNA, 23 nt, Artificial Sequence
  Synthetic
guguuaagcauaaaaauaguaag

SEQ ID NO: 566267 - RNA, 24 nt, Artificial Sequence
  Synthetic
aguguuaagcauaaaaauaguaag

SEQ ID NO: 566268 - RNA, 18 nt, Artificial Sequence
  Synthetic
uaaaaaugauauaguaag

SEQ ID NO: 566269 - RNA, 19 nt, Artificial Sequence
  Synthetic
uuaaaaaugauauaguaag

SEQ ID NO: 566270 - RNA, 20 nt, Artificial Sequence
  Synthetic
cuuaaaaaugauauaguaag

SEQ ID NO: 566271 - RNA, 21 nt, Artificial Sequence
  Synthetic
gcuuaaaaaugauauaguaag

SEQ ID NO: 566272 - RNA, 22 nt, Artificial Sequence
  Synthetic
ugcuuaaaaaugauauaguaag

SEQ ID NO: 566273 - RNA, 23 nt, Artificial Sequence
  Synthetic
cugcuuaaaaaugauauaguaag

SEQ ID NO: 566274 - RNA, 24 nt, Artificial Sequence
  Synthetic
acugcuuaaaaaugauauaguaag

SEQ ID NO: 566275 - RNA, 18 nt, Artificial Sequence
  Synthetic
agagcuugaguuaguaag

SEQ ID NO: 566276 - RNA, 19 nt, Artificial Sequence
  Synthetic
uagagcuugaguuaguaag

SEQ ID NO: 566277 - RNA, 20 nt, Artificial Sequence
  Synthetic
uuagagcuugaguuaguaag

SEQ ID NO: 566278 - RNA, 21 nt, Artificial Sequence
  Synthetic
uuuagagcuugaguuaguaag

SEQ ID NO: 566279 - RNA, 22 nt, Artificial Sequence
  Synthetic
cuuuagagcuugaguuaguaag

SEQ ID NO: 566280 - RNA, 23 nt, Artificial Sequence
  Synthetic
gcuuuagagcuugaguuaguaag

SEQ ID NO: 566281 - RNA, 24 nt, Artificial Sequence
  Synthetic
agcuuuagagcuugaguuaguaag

SEQ ID NO: 566282 - RNA, 18 nt, Artificial Sequence
  Synthetic
augucuucauaacguaag

SEQ ID NO: 566283 - RNA, 19 nt, Artificial Sequence
  Synthetic
aaugucuucauaacguaag

SEQ ID NO: 566284 - RNA, 20 nt, Artificial Sequence
  Synthetic
uaaugucuucauaacguaag

SEQ ID NO: 566285 - RNA, 21 nt, Artificial Sequence
  Synthetic
uuaaugucuucauaacguaag

SEQ ID NO: 566286 - RNA, 22 nt, Artificial Sequence
  Synthetic
cuuaaugucuucauaacguaag

SEQ ID NO: 566287 - RNA, 23 nt, Artificial Sequence
  Synthetic
gcuuaaugucuucauaacguaag

SEQ ID NO: 566288 - RNA, 24 nt, Artificial Sequence
  Synthetic
cgcuuaaugucuucauaacguaag

SEQ ID NO: 566289 - RNA, 18 nt, Artificial Sequence
  Synthetic
uggccaaugaagcguaag

SEQ ID NO: 566290 - RNA, 19 nt, Artificial Sequence
  Synthetic
cuggccaaugaagcguaag

SEQ ID NO: 566291 - RNA, 20 nt, Artificial Sequence
  Synthetic
ucuggccaaugaagcguaag

SEQ ID NO: 566292 - RNA, 21 nt, Artificial Sequence
  Synthetic
aucuggccaaugaagcguaag

SEQ ID NO: 566293 - RNA, 22 nt, Artificial Sequence
  Synthetic
caucuggccaaugaagcguaag

SEQ ID NO: 566294 - RNA, 23 nt, Artificial Sequence
  Synthetic
acaucuggccaaugaagcguaag

SEQ ID NO: 566295 - RNA, 24 nt, Artificial Sequence
  Synthetic
gacaucuggccaaugaagcguaag

SEQ ID NO: 566296 - RNA, 18 nt, Artificial Sequence
  Synthetic
cauggacucacucguaag

SEQ ID NO: 566297 - RNA, 19 nt, Artificial Sequence
  Synthetic
gcauggacucacucguaag

SEQ ID NO: 566298 - RNA, 20 nt, Artificial Sequence
  Synthetic
ugcauggacucacucguaag

SEQ ID NO: 566299 - RNA, 21 nt, Artificial Sequence
  Synthetic
cugcauggacucacucguaag

SEQ ID NO: 566300 - RNA, 22 nt, Artificial Sequence
  Synthetic
acugcauggacucacucguaag

SEQ ID NO: 566301 - RNA, 23 nt, Artificial Sequence
  Synthetic
cacugcauggacucacucguaag

SEQ ID NO: 566302 - RNA, 24 nt, Artificial Sequence
  Synthetic
acacugcauggacucacucguaag

SEQ ID NO: 566303 - RNA, 18 nt, Artificial Sequence
  Synthetic
cauguucucacucguaag

SEQ ID NO: 566304 - RNA, 19 nt, Artificial Sequence
  Synthetic
gcauguucucacucguaag

SEQ ID NO: 566305 - RNA, 20 nt, Artificial Sequence
  Synthetic
ugcauguucucacucguaag

SEQ ID NO: 566306 - RNA, 21 nt, Artificial Sequence
  Synthetic
cugcauguucucacucguaag

SEQ ID NO: 566307 - RNA, 22 nt, Artificial Sequence
  Synthetic
acugcauguucucacucguaag

SEQ ID NO: 566308 - RNA, 23 nt, Artificial Sequence
  Synthetic
cacugcauguucucacucguaag

SEQ ID NO: 566309 - RNA, 24 nt, Artificial Sequence
  Synthetic
gcacugcauguucucacucguaag

SEQ ID NO: 566310 - RNA, 18 nt, Artificial Sequence
  Synthetic
uauguucucacucguaag

SEQ ID NO: 566311 - RNA, 19 nt, Artificial Sequence
  Synthetic
auauguucucacucguaag

SEQ ID NO: 566312 - RNA, 20 nt, Artificial Sequence
  Synthetic
cauauguucucacucguaag

SEQ ID NO: 566313 - RNA, 21 nt, Artificial Sequence
  Synthetic
ccauauguucucacucguaag

SEQ ID NO: 566314 - RNA, 22 nt, Artificial Sequence
  Synthetic
accauauguucucacucguaag

SEQ ID NO: 566315 - RNA, 23 nt, Artificial Sequence
  Synthetic
uaccauauguucucacucguaag

SEQ ID NO: 566316 - RNA, 24 nt, Artificial Sequence
  Synthetic
auaccauauguucucacucguaag

SEQ ID NO: 566317 - RNA, 18 nt, Artificial Sequence
  Synthetic
guggccaucaaagguaag

SEQ ID NO: 566318 - RNA, 19 nt, Artificial Sequence
  Synthetic
uguggccaucaaagguaag

SEQ ID NO: 566319 - RNA, 20 nt, Artificial Sequence
  Synthetic
guguggccaucaaagguaag

SEQ ID NO: 566320 - RNA, 21 nt, Artificial Sequence
  Synthetic
cguguggccaucaaagguaag

SEQ ID NO: 566321 - RNA, 22 nt, Artificial Sequence
  Synthetic
acguguggccaucaaagguaag

SEQ ID NO: 566322 - RNA, 23 nt, Artificial Sequence
  Synthetic
uacguguggccaucaaagguaag

SEQ ID NO: 566323 - RNA, 24 nt, Artificial Sequence
  Synthetic
cuacguguggccaucaaagguaag

SEQ ID NO: 566324 - RNA, 18 nt, Artificial Sequence
  Synthetic
gccccuguaccagguaag

SEQ ID NO: 566325 - RNA, 19 nt, Artificial Sequence
  Synthetic
agccccuguaccagguaag

SEQ ID NO: 566326 - RNA, 20 nt, Artificial Sequence
  Synthetic
gagccccuguaccagguaag

SEQ ID NO: 566327 - RNA, 21 nt, Artificial Sequence
  Synthetic
agagccccuguaccagguaag

SEQ ID NO: 566328 - RNA, 22 nt, Artificial Sequence
  Synthetic
aagagccccuguaccagguaag

SEQ ID NO: 566329 - RNA, 23 nt, Artificial Sequence
  Synthetic
gaagagccccuguaccagguaag

SEQ ID NO: 566330 - RNA, 24 nt, Artificial Sequence
  Synthetic
ugaagagccccuguaccagguaag

SEQ ID NO: 566331 - RNA, 18 nt, Artificial Sequence
  Synthetic
auaaagaggugagguaag

SEQ ID NO: 566332 - RNA, 19 nt, Artificial Sequence
  Synthetic
cauaaagaggugagguaag

SEQ ID NO: 566333 - RNA, 20 nt, Artificial Sequence
  Synthetic
gcauaaagaggugagguaag

SEQ ID NO: 566334 - RNA, 21 nt, Artificial Sequence
  Synthetic
ggcauaaagaggugagguaag

SEQ ID NO: 566335 - RNA, 22 nt, Artificial Sequence
  Synthetic
gggcauaaagaggugagguaag

SEQ ID NO: 566336 - RNA, 23 nt, Artificial Sequence
  Synthetic
ugggcauaaagaggugagguaag

SEQ ID NO: 566337 - RNA, 24 nt, Artificial Sequence
  Synthetic
augggcauaaagaggugagguaag

SEQ ID NO: 566338 - RNA, 18 nt, Artificial Sequence
  Synthetic
aaaaaggagauagguaag

SEQ ID NO: 566339 - RNA, 19 nt, Artificial Sequence
  Synthetic
gaaaaaggagauagguaag

SEQ ID NO: 566340 - RNA, 20 nt, Artificial Sequence
  Synthetic
ggaaaaaggagauagguaag

SEQ ID NO: 566341 - RNA, 21 nt, Artificial Sequence
  Synthetic
uggaaaaaggagauagguaag

SEQ ID NO: 566342 - RNA, 22 nt, Artificial Sequence
  Synthetic
auggaaaaaggagauagguaag

SEQ ID NO: 566343 - RNA, 23 nt, Artificial Sequence
  Synthetic
cauggaaaaaggagauagguaag

SEQ ID NO: 566344 - RNA, 24 nt, Artificial Sequence
  Synthetic
ucauggaaaaaggagauagguaag

SEQ ID NO: 566345 - RNA, 18 nt, Artificial Sequence
  Synthetic
ucaauaaagcuagguaag

SEQ ID NO: 566346 - RNA, 19 nt, Artificial Sequence
  Synthetic
uucaauaaagcuagguaag

SEQ ID NO: 566347 - RNA, 20 nt, Artificial Sequence
  Synthetic
cuucaauaaagcuagguaag

SEQ ID NO: 566348 - RNA, 21 nt, Artificial Sequence
  Synthetic
acuucaauaaagcuagguaag

SEQ ID NO: 566349 - RNA, 22 nt, Artificial Sequence
  Synthetic
uacuucaauaaagcuagguaag

SEQ ID NO: 566350 - RNA, 23 nt, Artificial Sequence
  Synthetic
auacuucaauaaagcuagguaag

SEQ ID NO: 566351 - RNA, 24 nt, Artificial Sequence
  Synthetic
uauacuucaauaaagcuagguaag

SEQ ID NO: 566352 - RNA, 18 nt, Artificial Sequence
  Synthetic
ccgaucaagaccgguaag

SEQ ID NO: 566353 - RNA, 19 nt, Artificial Sequence
  Synthetic
accgaucaagaccgguaag

SEQ ID NO: 566354 - RNA, 20 nt, Artificial Sequence
  Synthetic
aaccgaucaagaccgguaag

SEQ ID NO: 566355 - RNA, 21 nt, Artificial Sequence
  Synthetic
caaccgaucaagaccgguaag

SEQ ID NO: 566356 - RNA, 22 nt, Artificial Sequence
  Synthetic
acaaccgaucaagaccgguaag

SEQ ID NO: 566357 - RNA, 23 nt, Artificial Sequence
  Synthetic
gacaaccgaucaagaccgguaag

SEQ ID NO: 566358 - RNA, 24 nt, Artificial Sequence
  Synthetic
ugacaaccgaucaagaccgguaag

SEQ ID NO: 566359 - RNA, 18 nt, Artificial Sequence
  Synthetic
acaugaauuaaggguaag

SEQ ID NO: 566360 - RNA, 19 nt, Artificial Sequence
  Synthetic
aacaugaauuaaggguaag

SEQ ID NO: 566361 - RNA, 20 nt, Artificial Sequence
  Synthetic
aaacaugaauuaaggguaag

SEQ ID NO: 566362 - RNA, 21 nt, Artificial Sequence
  Synthetic
aaaacaugaauuaaggguaag

SEQ ID NO: 566363 - RNA, 22 nt, Artificial Sequence
  Synthetic
gaaaacaugaauuaaggguaag

SEQ ID NO: 566364 - RNA, 23 nt, Artificial Sequence
  Synthetic
ugaaaacaugaauuaaggguaag

SEQ ID NO: 566365 - RNA, 24 nt, Artificial Sequence
  Synthetic
augaaaacaugaauuaaggguaag

SEQ ID NO: 566366 - RNA, 18 nt, Artificial Sequence
  Synthetic
uucagaaaagaauguaag

SEQ ID NO: 566367 - RNA, 19 nt, Artificial Sequence
  Synthetic
uuucagaaaagaauguaag

SEQ ID NO: 566368 - RNA, 20 nt, Artificial Sequence
  Synthetic
uuuucagaaaagaauguaag

SEQ ID NO: 566369 - RNA, 21 nt, Artificial Sequence
  Synthetic
uuuuucagaaaagaauguaag

SEQ ID NO: 566370 - RNA, 22 nt, Artificial Sequence
  Synthetic
auuuuucagaaaagaauguaag

SEQ ID NO: 566371 - RNA, 23 nt, Artificial Sequence
  Synthetic
cauuuuucagaaaagaauguaag

SEQ ID NO: 566372 - RNA, 24 nt, Artificial Sequence
  Synthetic
gcauuuuucagaaaagaauguaag

SEQ ID NO: 566373 - RNA, 18 nt, Artificial Sequence
  Synthetic
caggacaaaaacuguaag

SEQ ID NO: 566374 - RNA, 19 nt, Artificial Sequence
  Synthetic
ucaggacaaaaacuguaag

SEQ ID NO: 566375 - RNA, 20 nt, Artificial Sequence
  Synthetic
aucaggacaaaaacuguaag

SEQ ID NO: 566376 - RNA, 21 nt, Artificial Sequence
  Synthetic
uaucaggacaaaaacuguaag

SEQ ID NO: 566377 - RNA, 22 nt, Artificial Sequence
  Synthetic
auaucaggacaaaaacuguaag

SEQ ID NO: 566378 - RNA, 23 nt, Artificial Sequence
  Synthetic
gauaucaggacaaaaacuguaag

SEQ ID NO: 566379 - RNA, 24 nt, Artificial Sequence
  Synthetic
cgauaucaggacaaaaacuguaag

SEQ ID NO: 566380 - RNA, 18 nt, Artificial Sequence
  Synthetic
cuguuaugaaacuguaag

SEQ ID NO: 566381 - RNA, 19 nt, Artificial Sequence
  Synthetic
ucuguuaugaaacuguaag

SEQ ID NO: 566382 - RNA, 20 nt, Artificial Sequence
  Synthetic
cucuguuaugaaacuguaag

SEQ ID NO: 566383 - RNA, 21 nt, Artificial Sequence
  Synthetic
ccucuguuaugaaacuguaag

SEQ ID NO: 566384 - RNA, 22 nt, Artificial Sequence
  Synthetic
uccucuguuaugaaacuguaag

SEQ ID NO: 566385 - RNA, 23 nt, Artificial Sequence
  Synthetic
cuccucuguuaugaaacuguaag

SEQ ID NO: 566386 - RNA, 24 nt, Artificial Sequence
  Synthetic
ucuccucuguuaugaaacuguaag

SEQ ID NO: 566387 - RNA, 18 nt, Artificial Sequence
  Synthetic
ggauauacucacuguaag

SEQ ID NO: 566388 - RNA, 19 nt, Artificial Sequence
  Synthetic
uggauauacucacuguaag

SEQ ID NO: 566389 - RNA, 20 nt, Artificial Sequence
  Synthetic
cuggauauacucacuguaag

SEQ ID NO: 566390 - RNA, 21 nt, Artificial Sequence
  Synthetic
ucuggauauacucacuguaag

SEQ ID NO: 566391 - RNA, 22 nt, Artificial Sequence
  Synthetic
aucuggauauacucacuguaag

SEQ ID NO: 566392 - RNA, 23 nt, Artificial Sequence
  Synthetic
uaucuggauauacucacuguaag

SEQ ID NO: 566393 - RNA, 24 nt, Artificial Sequence
  Synthetic
auaucuggauauacucacuguaag

SEQ ID NO: 566394 - RNA, 18 nt, Artificial Sequence
  Synthetic
ucaggagaagaguguaag

SEQ ID NO: 566395 - RNA, 19 nt, Artificial Sequence
  Synthetic
aucaggagaagaguguaag

SEQ ID NO: 566396 - RNA, 20 nt, Artificial Sequence
  Synthetic
gaucaggagaagaguguaag

SEQ ID NO: 566397 - RNA, 21 nt, Artificial Sequence
  Synthetic
agaucaggagaagaguguaag

SEQ ID NO: 566398 - RNA, 22 nt, Artificial Sequence
  Synthetic
gagaucaggagaagaguguaag

SEQ ID NO: 566399 - RNA, 23 nt, Artificial Sequence
  Synthetic
ggagaucaggagaagaguguaag

SEQ ID NO: 566400 - RNA, 24 nt, Artificial Sequence
  Synthetic
uggagaucaggagaagaguguaag

SEQ ID NO: 566401 - RNA, 18 nt, Artificial Sequence
  Synthetic
ugauucaguggguguaag

SEQ ID NO: 566402 - RNA, 19 nt, Artificial Sequence
  Synthetic
uugauucaguggguguaag

SEQ ID NO: 566403 - RNA, 20 nt, Artificial Sequence
  Synthetic
uuugauucaguggguguaag

SEQ ID NO: 566404 - RNA, 21 nt, Artificial Sequence
  Synthetic
uuuugauucaguggguguaag

SEQ ID NO: 566405 - RNA, 22 nt, Artificial Sequence
  Synthetic
cuuuugauucaguggguguaag

SEQ ID NO: 566406 - RNA, 23 nt, Artificial Sequence
  Synthetic
gcuuuugauucaguggguguaag

SEQ ID NO: 566407 - RNA, 24 nt, Artificial Sequence
  Synthetic
ugcuuuugauucaguggguguaag

SEQ ID NO: 566408 - RNA, 18 nt, Artificial Sequence
  Synthetic
ggagaaauaugguguaag

SEQ ID NO: 566409 - RNA, 19 nt, Artificial Sequence
  Synthetic
aggagaaauaugguguaag

SEQ ID NO: 566410 - RNA, 20 nt, Artificial Sequence
  Synthetic
caggagaaauaugguguaag

SEQ ID NO: 566411 - RNA, 21 nt, Artificial Sequence
  Synthetic
ccaggagaaauaugguguaag

SEQ ID NO: 566412 - RNA, 22 nt, Artificial Sequence
  Synthetic
accaggagaaauaugguguaag

SEQ ID NO: 566413 - RNA, 23 nt, Artificial Sequence
  Synthetic
caccaggagaaauaugguguaag

SEQ ID NO: 566414 - RNA, 24 nt, Artificial Sequence
  Synthetic
ucaccaggagaaauaugguguaag

SEQ ID NO: 566415 - RNA, 18 nt, Artificial Sequence
  Synthetic
guggccggcuuguguaag

SEQ ID NO: 566416 - RNA, 19 nt, Artificial Sequence
  Synthetic
aguggccggcuuguguaag

SEQ ID NO: 566417 - RNA, 20 nt, Artificial Sequence
  Synthetic
uaguggccggcuuguguaag

SEQ ID NO: 566418 - RNA, 21 nt, Artificial Sequence
  Synthetic
auaguggccggcuuguguaag

SEQ ID NO: 566419 - RNA, 22 nt, Artificial Sequence
  Synthetic
uauaguggccggcuuguguaag

SEQ ID NO: 566420 - RNA, 23 nt, Artificial Sequence
  Synthetic
uuauaguggccggcuuguguaag

SEQ ID NO: 566421 - RNA, 24 nt, Artificial Sequence
  Synthetic
auuauaguggccggcuuguguaag

SEQ ID NO: 566422 - RNA, 18 nt, Artificial Sequence
  Synthetic
ggaucaacaaauuguaag

SEQ ID NO: 566423 - RNA, 19 nt, Artificial Sequence
  Synthetic
gggaucaacaaauuguaag

SEQ ID NO: 566424 - RNA, 20 nt, Artificial Sequence
  Synthetic
ugggaucaacaaauuguaag

SEQ ID NO: 566425 - RNA, 21 nt, Artificial Sequence
  Synthetic
gugggaucaacaaauuguaag

SEQ ID NO: 566426 - RNA, 22 nt, Artificial Sequence
  Synthetic
agugggaucaacaaauuguaag

SEQ ID NO: 566427 - RNA, 23 nt, Artificial Sequence
  Synthetic
aagugggaucaacaaauuguaag

SEQ ID NO: 566428 - RNA, 24 nt, Artificial Sequence
  Synthetic
caagugggaucaacaaauuguaag

SEQ ID NO: 566429 - RNA, 18 nt, Artificial Sequence
  Synthetic
uagcaaugaucuuguaag

SEQ ID NO: 566430 - RNA, 19 nt, Artificial Sequence
  Synthetic
uuagcaaugaucuuguaag

SEQ ID NO: 566431 - RNA, 20 nt, Artificial Sequence
  Synthetic
auuagcaaugaucuuguaag

SEQ ID NO: 566432 - RNA, 21 nt, Artificial Sequence
  Synthetic
cauuagcaaugaucuuguaag

SEQ ID NO: 566433 - RNA, 22 nt, Artificial Sequence
  Synthetic
acauuagcaaugaucuuguaag

SEQ ID NO: 566434 - RNA, 23 nt, Artificial Sequence
  Synthetic
uacauuagcaaugaucuuguaag

SEQ ID NO: 566435 - RNA, 24 nt, Artificial Sequence
  Synthetic
auacauuagcaaugaucuuguaag

SEQ ID NO: 566436 - RNA, 18 nt, Artificial Sequence
  Synthetic
auuuuaaucauuuguaag

SEQ ID NO: 566437 - RNA, 19 nt, Artificial Sequence
  Synthetic
cauuuuaaucauuuguaag

SEQ ID NO: 566438 - RNA, 20 nt, Artificial Sequence
  Synthetic
gcauuuuaaucauuuguaag

SEQ ID NO: 566439 - RNA, 21 nt, Artificial Sequence
  Synthetic
agcauuuuaaucauuuguaag

SEQ ID NO: 566440 - RNA, 22 nt, Artificial Sequence
  Synthetic
aagcauuuuaaucauuuguaag

SEQ ID NO: 566441 - RNA, 23 nt, Artificial Sequence
  Synthetic
gaagcauuuuaaucauuuguaag

SEQ ID NO: 566442 - RNA, 24 nt, Artificial Sequence
  Synthetic
ggaagcauuuuaaucauuuguaag

SEQ ID NO: 566443 - RNA, 18 nt, Artificial Sequence
  Synthetic
acuacccauauuuguaag

SEQ ID NO: 566444 - RNA, 19 nt, Artificial Sequence
  Synthetic
uacuacccauauuuguaag

SEQ ID NO: 566445 - RNA, 20 nt, Artificial Sequence
  Synthetic
auacuacccauauuuguaag

SEQ ID NO: 566446 - RNA, 21 nt, Artificial Sequence
  Synthetic
aauacuacccauauuuguaag

SEQ ID NO: 566447 - RNA, 22 nt, Artificial Sequence
  Synthetic
aaauacuacccauauuuguaag

SEQ ID NO: 566448 - RNA, 23 nt, Artificial Sequence
  Synthetic
gaaauacuacccauauuuguaag

SEQ ID NO: 566449 - RNA, 24 nt, Artificial Sequence
  Synthetic
agaaauacuacccauauuuguaag

SEQ ID NO: 566450 - RNA, 18 nt, Artificial Sequence
  Synthetic
gucuaugaagaaauuaag

SEQ ID NO: 566451 - RNA, 19 nt, Artificial Sequence
  Synthetic
ggucuaugaagaaauuaag

SEQ ID NO: 566452 - RNA, 20 nt, Artificial Sequence
  Synthetic
gggucuaugaagaaauuaag

SEQ ID NO: 566453 - RNA, 21 nt, Artificial Sequence
  Synthetic
ugggucuaugaagaaauuaag

SEQ ID NO: 566454 - RNA, 22 nt, Artificial Sequence
  Synthetic
cugggucuaugaagaaauuaag

SEQ ID NO: 566455 - RNA, 23 nt, Artificial Sequence
  Synthetic
acugggucuaugaagaaauuaag

SEQ ID NO: 566456 - RNA, 24 nt, Artificial Sequence
  Synthetic
cacugggucuaugaagaaauuaag

SEQ ID NO: 566457 - RNA, 18 nt, Artificial Sequence
  Synthetic
aaccugcuugaaauuaag

SEQ ID NO: 566458 - RNA, 19 nt, Artificial Sequence
  Synthetic
aaaccugcuugaaauuaag

SEQ ID NO: 566459 - RNA, 20 nt, Artificial Sequence
  Synthetic
gaaaccugcuugaaauuaag

SEQ ID NO: 566460 - RNA, 21 nt, Artificial Sequence
  Synthetic
agaaaccugcuugaaauuaag

SEQ ID NO: 566461 - RNA, 22 nt, Artificial Sequence
  Synthetic
gagaaaccugcuugaaauuaag

SEQ ID NO: 566462 - RNA, 23 nt, Artificial Sequence
  Synthetic
cgagaaaccugcuugaaauuaag

SEQ ID NO: 566463 - RNA, 24 nt, Artificial Sequence
  Synthetic
ucgagaaaccugcuugaaauuaag

SEQ ID NO: 566464 - RNA, 18 nt, Artificial Sequence
  Synthetic
gauauugcgacaauuaag

SEQ ID NO: 566465 - RNA, 19 nt, Artificial Sequence
  Synthetic
agauauugcgacaauuaag

SEQ ID NO: 566466 - RNA, 20 nt, Artificial Sequence
  Synthetic
gagauauugcgacaauuaag

SEQ ID NO: 566467 - RNA, 21 nt, Artificial Sequence
  Synthetic
ugagauauugcgacaauuaag

SEQ ID NO: 566468 - RNA, 22 nt, Artificial Sequence
  Synthetic
cugagauauugcgacaauuaag

SEQ ID NO: 566469 - RNA, 23 nt, Artificial Sequence
  Synthetic
acugagauauugcgacaauuaag

SEQ ID NO: 566470 - RNA, 24 nt, Artificial Sequence
  Synthetic
aacugagauauugcgacaauuaag

SEQ ID NO: 566471 - RNA, 18 nt, Artificial Sequence
  Synthetic
aaaugaauaugaauuaag

SEQ ID NO: 566472 - RNA, 19 nt, Artificial Sequence
  Synthetic
uaaaugaauaugaauuaag

SEQ ID NO: 566473 - RNA, 20 nt, Artificial Sequence
  Synthetic
guaaaugaauaugaauuaag

SEQ ID NO: 566474 - RNA, 21 nt, Artificial Sequence
  Synthetic
aguaaaugaauaugaauuaag

SEQ ID NO: 566475 - RNA, 22 nt, Artificial Sequence
  Synthetic
caguaaaugaauaugaauuaag

SEQ ID NO: 566476 - RNA, 23 nt, Artificial Sequence
  Synthetic
ucaguaaaugaauaugaauuaag

SEQ ID NO: 566477 - RNA, 24 nt, Artificial Sequence
  Synthetic
uucaguaaaugaauaugaauuaag

SEQ ID NO: 566478 - RNA, 18 nt, Artificial Sequence
  Synthetic
cuggguauuuccauuaag

SEQ ID NO: 566479 - RNA, 19 nt, Artificial Sequence
  Synthetic
ccuggguauuuccauuaag

SEQ ID NO: 566480 - RNA, 20 nt, Artificial Sequence
  Synthetic
accuggguauuuccauuaag

SEQ ID NO: 566481 - RNA, 21 nt, Artificial Sequence
  Synthetic
aaccuggguauuuccauuaag

SEQ ID NO: 566482 - RNA, 22 nt, Artificial Sequence
  Synthetic
aaaccuggguauuuccauuaag

SEQ ID NO: 566483 - RNA, 23 nt, Artificial Sequence
  Synthetic
aaaaccuggguauuuccauuaag

SEQ ID NO: 566484 - RNA, 24 nt, Artificial Sequence
  Synthetic
gaaaaccuggguauuuccauuaag

SEQ ID NO: 566485 - RNA, 18 nt, Artificial Sequence
  Synthetic
uauguuuauuagauuaag

SEQ ID NO: 566486 - RNA, 19 nt, Artificial Sequence
  Synthetic
guauguuuauuagauuaag

SEQ ID NO: 566487 - RNA, 20 nt, Artificial Sequence
  Synthetic
uguauguuuauuagauuaag

SEQ ID NO: 566488 - RNA, 21 nt, Artificial Sequence
  Synthetic
guguauguuuauuagauuaag

SEQ ID NO: 566489 - RNA, 22 nt, Artificial Sequence
  Synthetic
gguguauguuuauuagauuaag

SEQ ID NO: 566490 - RNA, 23 nt, Artificial Sequence
  Synthetic
ggguguauguuuauuagauuaag

SEQ ID NO: 566491 - RNA, 24 nt, Artificial Sequence
  Synthetic
gggguguauguuuauuagauuaag

SEQ ID NO: 566492 - RNA, 18 nt, Artificial Sequence
  Synthetic
ccccucccugugauuaag

SEQ ID NO: 566493 - RNA, 19 nt, Artificial Sequence
  Synthetic
cccccucccugugauuaag

SEQ ID NO: 566494 - RNA, 20 nt, Artificial Sequence
  Synthetic
acccccucccugugauuaag

SEQ ID NO: 566495 - RNA, 21 nt, Artificial Sequence
  Synthetic
aacccccucccugugauuaag

SEQ ID NO: 566496 - RNA, 22 nt, Artificial Sequence
  Synthetic
aaacccccucccugugauuaag

SEQ ID NO: 566497 - RNA, 23 nt, Artificial Sequence
  Synthetic
aaaacccccucccugugauuaag

SEQ ID NO: 566498 - RNA, 24 nt, Artificial Sequence
  Synthetic
aaaaacccccucccugugauuaag

SEQ ID NO: 566499 - RNA, 18 nt, Artificial Sequence
  Synthetic
acaucugguaauauuaag

SEQ ID NO: 566500 - RNA, 19 nt, Artificial Sequence
  Synthetic
uacaucugguaauauuaag

SEQ ID NO: 566501 - RNA, 20 nt, Artificial Sequence
  Synthetic
cuacaucugguaauauuaag

SEQ ID NO: 566502 - RNA, 21 nt, Artificial Sequence
  Synthetic
gcuacaucugguaauauuaag

SEQ ID NO: 566503 - RNA, 22 nt, Artificial Sequence
  Synthetic
ugcuacaucugguaauauuaag

SEQ ID NO: 566504 - RNA, 23 nt, Artificial Sequence
  Synthetic
augcuacaucugguaauauuaag

SEQ ID NO: 566505 - RNA, 24 nt, Artificial Sequence
  Synthetic
gaugcuacaucugguaauauuaag

SEQ ID NO: 566506 - RNA, 18 nt, Artificial Sequence
  Synthetic
auuccucucucuauuaag

SEQ ID NO: 566507 - RNA, 19 nt, Artificial Sequence
  Synthetic
uauuccucucucuauuaag

SEQ ID NO: 566508 - RNA, 20 nt, Artificial Sequence
  Synthetic
auauuccucucucuauuaag

SEQ ID NO: 566509 - RNA, 21 nt, Artificial Sequence
  Synthetic
aauauuccucucucuauuaag

SEQ ID NO: 566510 - RNA, 22 nt, Artificial Sequence
  Synthetic
caauauuccucucucuauuaag

SEQ ID NO: 566511 - RNA, 23 nt, Artificial Sequence
  Synthetic
acaauauuccucucucuauuaag

SEQ ID NO: 566512 - RNA, 24 nt, Artificial Sequence
  Synthetic
aacaauauuccucucucuauuaag

SEQ ID NO: 566513 - RNA, 18 nt, Artificial Sequence
  Synthetic
uggggcuuuuguauuaag

SEQ ID NO: 566514 - RNA, 19 nt, Artificial Sequence
  Synthetic
auggggcuuuuguauuaag

SEQ ID NO: 566515 - RNA, 20 nt, Artificial Sequence
  Synthetic
aauggggcuuuuguauuaag

SEQ ID NO: 566516 - RNA, 21 nt, Artificial Sequence
  Synthetic
aaauggggcuuuuguauuaag

SEQ ID NO: 566517 - RNA, 22 nt, Artificial Sequence
  Synthetic
aaaauggggcuuuuguauuaag

SEQ ID NO: 566518 - RNA, 23 nt, Artificial Sequence
  Synthetic
gaaaauggggcuuuuguauuaag

SEQ ID NO: 566519 - RNA, 24 nt, Artificial Sequence
  Synthetic
ugaaaauggggcuuuuguauuaag

SEQ ID NO: 566520 - RNA, 18 nt, Artificial Sequence
  Synthetic
aaauuggugauuauuaag

SEQ ID NO: 566521 - RNA, 19 nt, Artificial Sequence
  Synthetic
caaauuggugauuauuaag

SEQ ID NO: 566522 - RNA, 20 nt, Artificial Sequence
  Synthetic
ucaaauuggugauuauuaag

SEQ ID NO: 566523 - RNA, 21 nt, Artificial Sequence
  Synthetic
aucaaauuggugauuauuaag

SEQ ID NO: 566524 - RNA, 22 nt, Artificial Sequence
  Synthetic
uaucaaauuggugauuauuaag

SEQ ID NO: 566525 - RNA, 23 nt, Artificial Sequence
  Synthetic
guaucaaauuggugauuauuaag

SEQ ID NO: 566526 - RNA, 24 nt, Artificial Sequence
  Synthetic
aguaucaaauuggugauuauuaag

SEQ ID NO: 566527 - RNA, 18 nt, Artificial Sequence
  Synthetic
uccauucauccacuuaag

SEQ ID NO: 566528 - RNA, 19 nt, Artificial Sequence
  Synthetic
guccauucauccacuuaag

SEQ ID NO: 566529 - RNA, 20 nt, Artificial Sequence
  Synthetic
gguccauucauccacuuaag

SEQ ID NO: 566530 - RNA, 21 nt, Artificial Sequence
  Synthetic
ugguccauucauccacuuaag

SEQ ID NO: 566531 - RNA, 22 nt, Artificial Sequence
  Synthetic
gugguccauucauccacuuaag

SEQ ID NO: 566532 - RNA, 23 nt, Artificial Sequence
  Synthetic
ggugguccauucauccacuuaag

SEQ ID NO: 566533 - RNA, 24 nt, Artificial Sequence
  Synthetic
aggugguccauucauccacuuaag

SEQ ID NO: 566534 - RNA, 18 nt, Artificial Sequence
  Synthetic
acgauggugucacuuaag

SEQ ID NO: 566535 - RNA, 19 nt, Artificial Sequence
  Synthetic
uacgauggugucacuuaag

SEQ ID NO: 566536 - RNA, 20 nt, Artificial Sequence
  Synthetic
auacgauggugucacuuaag

SEQ ID NO: 566537 - RNA, 21 nt, Artificial Sequence
  Synthetic
uauacgauggugucacuuaag

SEQ ID NO: 566538 - RNA, 22 nt, Artificial Sequence
  Synthetic
uuauacgauggugucacuuaag

SEQ ID NO: 566539 - RNA, 23 nt, Artificial Sequence
  Synthetic
uuuauacgauggugucacuuaag

SEQ ID NO: 566540 - RNA, 24 nt, Artificial Sequence
  Synthetic
auuuauacgauggugucacuuaag

SEQ ID NO: 566541 - RNA, 18 nt, Artificial Sequence
  Synthetic
gagaaagguugacuuaag

SEQ ID NO: 566542 - RNA, 19 nt, Artificial Sequence
  Synthetic
ugagaaagguugacuuaag

SEQ ID NO: 566543 - RNA, 20 nt, Artificial Sequence
  Synthetic
uugagaaagguugacuuaag

SEQ ID NO: 566544 - RNA, 21 nt, Artificial Sequence
  Synthetic
auugagaaagguugacuuaag

SEQ ID NO: 566545 - RNA, 22 nt, Artificial Sequence
  Synthetic
gauugagaaagguugacuuaag

SEQ ID NO: 566546 - RNA, 23 nt, Artificial Sequence
  Synthetic
ggauugagaaagguugacuuaag

SEQ ID NO: 566547 - RNA, 24 nt, Artificial Sequence
  Synthetic
uggauugagaaagguugacuuaag

SEQ ID NO: 566548 - RNA, 18 nt, Artificial Sequence
  Synthetic
agaucuguuugacuuaag

SEQ ID NO: 566549 - RNA, 19 nt, Artificial Sequence
  Synthetic
gagaucuguuugacuuaag

SEQ ID NO: 566550 - RNA, 20 nt, Artificial Sequence
  Synthetic
ggagaucuguuugacuuaag

SEQ ID NO: 566551 - RNA, 21 nt, Artificial Sequence
  Synthetic
aggagaucuguuugacuuaag

SEQ ID NO: 566552 - RNA, 22 nt, Artificial Sequence
  Synthetic
aaggagaucuguuugacuuaag

SEQ ID NO: 566553 - RNA, 23 nt, Artificial Sequence
  Synthetic
uaaggagaucuguuugacuuaag

SEQ ID NO: 566554 - RNA, 24 nt, Artificial Sequence
  Synthetic
uuaaggagaucuguuugacuuaag

SEQ ID NO: 566555 - RNA, 18 nt, Artificial Sequence
  Synthetic
uuacaaauauuacuuaag

SEQ ID NO: 566556 - RNA, 19 nt, Artificial Sequence
  Synthetic
guuacaaauauuacuuaag

SEQ ID NO: 566557 - RNA, 20 nt, Artificial Sequence
  Synthetic
uguuacaaauauuacuuaag

SEQ ID NO: 566558 - RNA, 21 nt, Artificial Sequence
  Synthetic
auguuacaaauauuacuuaag

SEQ ID NO: 566559 - RNA, 22 nt, Artificial Sequence
  Synthetic
uauguuacaaauauuacuuaag

SEQ ID NO: 566560 - RNA, 23 nt, Artificial Sequence
  Synthetic
uuauguuacaaauauuacuuaag

SEQ ID NO: 566561 - RNA, 24 nt, Artificial Sequence
  Synthetic
uuuauguuacaaauauuacuuaag

SEQ ID NO: 566562 - RNA, 18 nt, Artificial Sequence
  Synthetic
cuacguuuucaccuuaag

SEQ ID NO: 566563 - RNA, 19 nt, Artificial Sequence
  Synthetic
gcuacguuuucaccuuaag

SEQ ID NO: 566564 - RNA, 20 nt, Artificial Sequence
  Synthetic
agcuacguuuucaccuuaag

SEQ ID NO: 566565 - RNA, 21 nt, Artificial Sequence
  Synthetic
gagcuacguuuucaccuuaag

SEQ ID NO: 566566 - RNA, 22 nt, Artificial Sequence
  Synthetic
agagcuacguuuucaccuuaag

SEQ ID NO: 566567 - RNA, 23 nt, Artificial Sequence
  Synthetic
gagagcuacguuuucaccuuaag

SEQ ID NO: 566568 - RNA, 24 nt, Artificial Sequence
  Synthetic
ggagagcuacguuuucaccuuaag

SEQ ID NO: 566569 - RNA, 18 nt, Artificial Sequence
  Synthetic
aagcuaaauucccuuaag

SEQ ID NO: 566570 - RNA, 19 nt, Artificial Sequence
  Synthetic
gaagcuaaauucccuuaag

SEQ ID NO: 566571 - RNA, 20 nt, Artificial Sequence
  Synthetic
agaagcuaaauucccuuaag

SEQ ID NO: 566572 - RNA, 21 nt, Artificial Sequence
  Synthetic
cagaagcuaaauucccuuaag

SEQ ID NO: 566573 - RNA, 22 nt, Artificial Sequence
  Synthetic
acagaagcuaaauucccuuaag

SEQ ID NO: 566574 - RNA, 23 nt, Artificial Sequence
  Synthetic
uacagaagcuaaauucccuuaag

SEQ ID NO: 566575 - RNA, 24 nt, Artificial Sequence
  Synthetic
cuacagaagcuaaauucccuuaag

SEQ ID NO: 566576 - RNA, 18 nt, Artificial Sequence
  Synthetic
cuauuuuauagccuuaag

SEQ ID NO: 566577 - RNA, 19 nt, Artificial Sequence
  Synthetic
acuauuuuauagccuuaag

SEQ ID NO: 566578 - RNA, 20 nt, Artificial Sequence
  Synthetic
cacuauuuuauagccuuaag

SEQ ID NO: 566579 - RNA, 21 nt, Artificial Sequence
  Synthetic
ccacuauuuuauagccuuaag

SEQ ID NO: 566580 - RNA, 22 nt, Artificial Sequence
  Synthetic
accacuauuuuauagccuuaag

SEQ ID NO: 566581 - RNA, 23 nt, Artificial Sequence
  Synthetic
gaccacuauuuuauagccuuaag

SEQ ID NO: 566582 - RNA, 24 nt, Artificial Sequence
  Synthetic
ggaccacuauuuuauagccuuaag

SEQ ID NO: 566583 - RNA, 18 nt, Artificial Sequence
  Synthetic
uuuuaaauaaugcuuaag

SEQ ID NO: 566584 - RNA, 19 nt, Artificial Sequence
  Synthetic
guuuuaaauaaugcuuaag

SEQ ID NO: 566585 - RNA, 20 nt, Artificial Sequence
  Synthetic
uguuuuaaauaaugcuuaag

SEQ ID NO: 566586 - RNA, 21 nt, Artificial Sequence
  Synthetic
uuguuuuaaauaaugcuuaag

SEQ ID NO: 566587 - RNA, 22 nt, Artificial Sequence
  Synthetic
uuuguuuuaaauaaugcuuaag

SEQ ID NO: 566588 - RNA, 23 nt, Artificial Sequence
  Synthetic
uuuuguuuuaaauaaugcuuaag

SEQ ID NO: 566589 - RNA, 24 nt, Artificial Sequence
  Synthetic
uuuuuguuuuaaauaaugcuuaag

SEQ ID NO: 566590 - RNA, 18 nt, Artificial Sequence
  Synthetic
ccaagaagcaugcuuaag

SEQ ID NO: 566591 - RNA, 19 nt, Artificial Sequence
  Synthetic
gccaagaagcaugcuuaag

SEQ ID NO: 566592 - RNA, 20 nt, Artificial Sequence
  Synthetic
agccaagaagcaugcuuaag

SEQ ID NO: 566593 - RNA, 21 nt, Artificial Sequence
  Synthetic
cagccaagaagcaugcuuaag

SEQ ID NO: 566594 - RNA, 22 nt, Artificial Sequence
  Synthetic
ccagccaagaagcaugcuuaag

SEQ ID NO: 566595 - RNA, 23 nt, Artificial Sequence
  Synthetic
uccagccaagaagcaugcuuaag

SEQ ID NO: 566596 - RNA, 24 nt, Artificial Sequence
  Synthetic
uuccagccaagaagcaugcuuaag

SEQ ID NO: 566597 - RNA, 18 nt, Artificial Sequence
  Synthetic
gagugaacauugcuuaag

SEQ ID NO: 566598 - RNA, 19 nt, Artificial Sequence
  Synthetic
ggagugaacauugcuuaag

SEQ ID NO: 566599 - RNA, 20 nt, Artificial Sequence
  Synthetic
aggagugaacauugcuuaag

SEQ ID NO: 566600 - RNA, 21 nt, Artificial Sequence
  Synthetic
aaggagugaacauugcuuaag

SEQ ID NO: 566601 - RNA, 22 nt, Artificial Sequence
  Synthetic
gaaggagugaacauugcuuaag

SEQ ID NO: 566602 - RNA, 23 nt, Artificial Sequence
  Synthetic
ugaaggagugaacauugcuuaag

SEQ ID NO: 566603 - RNA, 24 nt, Artificial Sequence
  Synthetic
uugaaggagugaacauugcuuaag

SEQ ID NO: 566604 - RNA, 18 nt, Artificial Sequence
  Synthetic
uggaaacuauugcuuaag

SEQ ID NO: 566605 - RNA, 19 nt, Artificial Sequence
  Synthetic
uuggaaacuauugcuuaag

SEQ ID NO: 566606 - RNA, 20 nt, Artificial Sequence
  Synthetic
guuggaaacuauugcuuaag

SEQ ID NO: 566607 - RNA, 21 nt, Artificial Sequence
  Synthetic
uguuggaaacuauugcuuaag

SEQ ID NO: 566608 - RNA, 22 nt, Artificial Sequence
  Synthetic
guguuggaaacuauugcuuaag

SEQ ID NO: 566609 - RNA, 23 nt, Artificial Sequence
  Synthetic
gguguuggaaacuauugcuuaag

SEQ ID NO: 566610 - RNA, 24 nt, Artificial Sequence
  Synthetic
ggguguuggaaacuauugcuuaag

SEQ ID NO: 566611 - RNA, 18 nt, Artificial Sequence
  Synthetic
uuuuuucaguugcuuaag

SEQ ID NO: 566612 - RNA, 19 nt, Artificial Sequence
  Synthetic
auuuuuucaguugcuuaag

SEQ ID NO: 566613 - RNA, 20 nt, Artificial Sequence
  Synthetic
uauuuuuucaguugcuuaag

SEQ ID NO: 566614 - RNA, 21 nt, Artificial Sequence
  Synthetic
guauuuuuucaguugcuuaag

SEQ ID NO: 566615 - RNA, 22 nt, Artificial Sequence
  Synthetic
uguauuuuuucaguugcuuaag

SEQ ID NO: 566616 - RNA, 23 nt, Artificial Sequence
  Synthetic
guguauuuuuucaguugcuuaag

SEQ ID NO: 566617 - RNA, 24 nt, Artificial Sequence
  Synthetic
uguguauuuuuucaguugcuuaag

SEQ ID NO: 566618 - RNA, 18 nt, Artificial Sequence
  Synthetic
uccuuacuuuugcuuaag

SEQ ID NO: 566619 - RNA, 19 nt, Artificial Sequence
  Synthetic
cuccuuacuuuugcuuaag

SEQ ID NO: 566620 - RNA, 20 nt, Artificial Sequence
  Synthetic
acuccuuacuuuugcuuaag

SEQ ID NO: 566621 - RNA, 21 nt, Artificial Sequence
  Synthetic
gacuccuuacuuuugcuuaag

SEQ ID NO: 566622 - RNA, 22 nt, Artificial Sequence
  Synthetic
ugacuccuuacuuuugcuuaag

SEQ ID NO: 566623 - RNA, 23 nt, Artificial Sequence
  Synthetic
gugacuccuuacuuuugcuuaag

SEQ ID NO: 566624 - RNA, 24 nt, Artificial Sequence
  Synthetic
agugacuccuuacuuuugcuuaag

SEQ ID NO: 566625 - RNA, 18 nt, Artificial Sequence
  Synthetic
uuuuuucuacuucuuaag

SEQ ID NO: 566626 - RNA, 19 nt, Artificial Sequence
  Synthetic
auuuuuucuacuucuuaag

SEQ ID NO: 566627 - RNA, 20 nt, Artificial Sequence
  Synthetic
aauuuuuucuacuucuuaag

SEQ ID NO: 566628 - RNA, 21 nt, Artificial Sequence
  Synthetic
caauuuuuucuacuucuuaag

SEQ ID NO: 566629 - RNA, 22 nt, Artificial Sequence
  Synthetic
ccaauuuuuucuacuucuuaag

SEQ ID NO: 566630 - RNA, 23 nt, Artificial Sequence
  Synthetic
accaauuuuuucuacuucuuaag

SEQ ID NO: 566631 - RNA, 24 nt, Artificial Sequence
  Synthetic
aaccaauuuuuucuacuucuuaag

SEQ ID NO: 566632 - RNA, 18 nt, Artificial Sequence
  Synthetic
cagggcaagaaaguuaag

SEQ ID NO: 566633 - RNA, 19 nt, Artificial Sequence
  Synthetic
acagggcaagaaaguuaag

SEQ ID NO: 566634 - RNA, 20 nt, Artificial Sequence
  Synthetic
gacagggcaagaaaguuaag

SEQ ID NO: 566635 - RNA, 21 nt, Artificial Sequence
  Synthetic
agacagggcaagaaaguuaag

SEQ ID NO: 566636 - RNA, 22 nt, Artificial Sequence
  Synthetic
aagacagggcaagaaaguuaag

SEQ ID NO: 566637 - RNA, 23 nt, Artificial Sequence
  Synthetic
gaagacagggcaagaaaguuaag

SEQ ID NO: 566638 - RNA, 24 nt, Artificial Sequence
  Synthetic
ggaagacagggcaagaaaguuaag

SEQ ID NO: 566639 - RNA, 18 nt, Artificial Sequence
  Synthetic
guaauuucugaaguuaag

SEQ ID NO: 566640 - RNA, 19 nt, Artificial Sequence
  Synthetic
aguaauuucugaaguuaag

SEQ ID NO: 566641 - RNA, 20 nt, Artificial Sequence
  Synthetic
caguaauuucugaaguuaag

SEQ ID NO: 566642 - RNA, 21 nt, Artificial Sequence
  Synthetic
ucaguaauuucugaaguuaag

SEQ ID NO: 566643 - RNA, 22 nt, Artificial Sequence
  Synthetic
uucaguaauuucugaaguuaag

SEQ ID NO: 566644 - RNA, 23 nt, Artificial Sequence
  Synthetic
cuucaguaauuucugaaguuaag

SEQ ID NO: 566645 - RNA, 24 nt, Artificial Sequence
  Synthetic
ucuucaguaauuucugaaguuaag

SEQ ID NO: 566646 - RNA, 18 nt, Artificial Sequence
  Synthetic
aacauacaucuaguuaag

SEQ ID NO: 566647 - RNA, 19 nt, Artificial Sequence
  Synthetic
aaacauacaucuaguuaag

SEQ ID NO: 566648 - RNA, 20 nt, Artificial Sequence
  Synthetic
aaaacauacaucuaguuaag

SEQ ID NO: 566649 - RNA, 21 nt, Artificial Sequence
  Synthetic
uaaaacauacaucuaguuaag

SEQ ID NO: 566650 - RNA, 22 nt, Artificial Sequence
  Synthetic
guaaaacauacaucuaguuaag

SEQ ID NO: 566651 - RNA, 23 nt, Artificial Sequence
  Synthetic
aguaaaacauacaucuaguuaag

SEQ ID NO: 566652 - RNA, 24 nt, Artificial Sequence
  Synthetic
gaguaaaacauacaucuaguuaag

SEQ ID NO: 566653 - RNA, 18 nt, Artificial Sequence
  Synthetic
uccuuacuucucguuaag

SEQ ID NO: 566654 - RNA, 19 nt, Artificial Sequence
  Synthetic
cuccuuacuucucguuaag

SEQ ID NO: 566655 - RNA, 20 nt, Artificial Sequence
  Synthetic
acuccuuacuucucguuaag

SEQ ID NO: 566656 - RNA, 21 nt, Artificial Sequence
  Synthetic
gacuccuuacuucucguuaag

SEQ ID NO: 566657 - RNA, 22 nt, Artificial Sequence
  Synthetic
ugacuccuuacuucucguuaag

SEQ ID NO: 566658 - RNA, 23 nt, Artificial Sequence
  Synthetic
gugacuccuuacuucucguuaag

SEQ ID NO: 566659 - RNA, 24 nt, Artificial Sequence
  Synthetic
agugacuccuuacuucucguuaag

SEQ ID NO: 566660 - RNA, 18 nt, Artificial Sequence
  Synthetic
uuuagaaccaagguuaag

SEQ ID NO: 566661 - RNA, 19 nt, Artificial Sequence
  Synthetic
cuuuagaaccaagguuaag

SEQ ID NO: 566662 - RNA, 20 nt, Artificial Sequence
  Synthetic
acuuuagaaccaagguuaag

SEQ ID NO: 566663 - RNA, 21 nt, Artificial Sequence
  Synthetic
aacuuuagaaccaagguuaag

SEQ ID NO: 566664 - RNA, 22 nt, Artificial Sequence
  Synthetic
aaacuuuagaaccaagguuaag

SEQ ID NO: 566665 - RNA, 23 nt, Artificial Sequence
  Synthetic
aaaacuuuagaaccaagguuaag

SEQ ID NO: 566666 - RNA, 24 nt, Artificial Sequence
  Synthetic
gaaaacuuuagaaccaagguuaag

SEQ ID NO: 566667 - RNA, 18 nt, Artificial Sequence
  Synthetic
cagaacugcaggguuaag

SEQ ID NO: 566668 - RNA, 19 nt, Artificial Sequence
  Synthetic
ucagaacugcaggguuaag

SEQ ID NO: 566669 - RNA, 20 nt, Artificial Sequence
  Synthetic
uucagaacugcaggguuaag

SEQ ID NO: 566670 - RNA, 21 nt, Artificial Sequence
  Synthetic
guucagaacugcaggguuaag

SEQ ID NO: 566671 - RNA, 22 nt, Artificial Sequence
  Synthetic
gguucagaacugcaggguuaag

SEQ ID NO: 566672 - RNA, 23 nt, Artificial Sequence
  Synthetic
ugguucagaacugcaggguuaag

SEQ ID NO: 566673 - RNA, 24 nt, Artificial Sequence
  Synthetic
cugguucagaacugcaggguuaag

SEQ ID NO: 566674 - RNA, 18 nt, Artificial Sequence
  Synthetic
gccucugauacauuuaag

SEQ ID NO: 566675 - RNA, 19 nt, Artificial Sequence
  Synthetic
ugccucugauacauuuaag

SEQ ID NO: 566676 - RNA, 20 nt, Artificial Sequence
  Synthetic
uugccucugauacauuuaag

SEQ ID NO: 566677 - RNA, 21 nt, Artificial Sequence
  Synthetic
guugccucugauacauuuaag

SEQ ID NO: 566678 - RNA, 22 nt, Artificial Sequence
  Synthetic
aguugccucugauacauuuaag

SEQ ID NO: 566679 - RNA, 23 nt, Artificial Sequence
  Synthetic
gaguugccucugauacauuuaag

SEQ ID NO: 566680 - RNA, 24 nt, Artificial Sequence
  Synthetic
ugaguugccucugauacauuuaag

SEQ ID NO: 566681 - RNA, 18 nt, Artificial Sequence
  Synthetic
aaaaccaaaccauuuaag

SEQ ID NO: 566682 - RNA, 19 nt, Artificial Sequence
  Synthetic
gaaaaccaaaccauuuaag

SEQ ID NO: 566683 - RNA, 20 nt, Artificial Sequence
  Synthetic
agaaaaccaaaccauuuaag

SEQ ID NO: 566684 - RNA, 21 nt, Artificial Sequence
  Synthetic
cagaaaaccaaaccauuuaag

SEQ ID NO: 566685 - RNA, 22 nt, Artificial Sequence
  Synthetic
acagaaaaccaaaccauuuaag

SEQ ID NO: 566686 - RNA, 23 nt, Artificial Sequence
  Synthetic
cacagaaaaccaaaccauuuaag

SEQ ID NO: 566687 - RNA, 24 nt, Artificial Sequence
  Synthetic
gcacagaaaaccaaaccauuuaag

SEQ ID NO: 566688 - RNA, 18 nt, Artificial Sequence
  Synthetic
gaaaaagugcuauuuaag

SEQ ID NO: 566689 - RNA, 19 nt, Artificial Sequence
  Synthetic
agaaaaagugcuauuuaag

SEQ ID NO: 566690 - RNA, 20 nt, Artificial Sequence
  Synthetic
aagaaaaagugcuauuuaag

SEQ ID NO: 566691 - RNA, 21 nt, Artificial Sequence
  Synthetic
caagaaaaagugcuauuuaag

SEQ ID NO: 566692 - RNA, 22 nt, Artificial Sequence
  Synthetic
acaagaaaaagugcuauuuaag

SEQ ID NO: 566693 - RNA, 23 nt, Artificial Sequence
  Synthetic
cacaagaaaaagugcuauuuaag

SEQ ID NO: 566694 - RNA, 24 nt, Artificial Sequence
  Synthetic
ucacaagaaaaagugcuauuuaag

SEQ ID NO: 566695 - RNA, 18 nt, Artificial Sequence
  Synthetic
gaaaauucagacuuuaag

SEQ ID NO: 566696 - RNA, 19 nt, Artificial Sequence
  Synthetic
ugaaaauucagacuuuaag

SEQ ID NO: 566697 - RNA, 20 nt, Artificial Sequence
  Synthetic
uugaaaauucagacuuuaag

SEQ ID NO: 566698 - RNA, 21 nt, Artificial Sequence
  Synthetic
cuugaaaauucagacuuuaag

SEQ ID NO: 566699 - RNA, 22 nt, Artificial Sequence
  Synthetic
ccuugaaaauucagacuuuaag

SEQ ID NO: 566700 - RNA, 23 nt, Artificial Sequence
  Synthetic
cccuugaaaauucagacuuuaag

SEQ ID NO: 566701 - RNA, 24 nt, Artificial Sequence
  Synthetic
gcccuugaaaauucagacuuuaag

SEQ ID NO: 566702 - RNA, 18 nt, Artificial Sequence
  Synthetic
gaauauaaugccuuuaag

SEQ ID NO: 566703 - RNA, 19 nt, Artificial Sequence
  Synthetic
ggaauauaaugccuuuaag

SEQ ID NO: 566704 - RNA, 20 nt, Artificial Sequence
  Synthetic
gggaauauaaugccuuuaag

SEQ ID NO: 566705 - RNA, 21 nt, Artificial Sequence
  Synthetic
ggggaauauaaugccuuuaag

SEQ ID NO: 566706 - RNA, 22 nt, Artificial Sequence
  Synthetic
gggggaauauaaugccuuuaag

SEQ ID NO: 566707 - RNA, 23 nt, Artificial Sequence
  Synthetic
cgggggaauauaaugccuuuaag

SEQ ID NO: 566708 - RNA, 24 nt, Artificial Sequence
  Synthetic
ucgggggaauauaaugccuuuaag

SEQ ID NO: 566709 - RNA, 18 nt, Artificial Sequence
  Synthetic
uaguuuaauuccuuuaag

SEQ ID NO: 566710 - RNA, 19 nt, Artificial Sequence
  Synthetic
auaguuuaauuccuuuaag

SEQ ID NO: 566711 - RNA, 20 nt, Artificial Sequence
  Synthetic
aauaguuuaauuccuuuaag

SEQ ID NO: 566712 - RNA, 21 nt, Artificial Sequence
  Synthetic
aaauaguuuaauuccuuuaag

SEQ ID NO: 566713 - RNA, 22 nt, Artificial Sequence
  Synthetic
aaaauaguuuaauuccuuuaag

SEQ ID NO: 566714 - RNA, 23 nt, Artificial Sequence
  Synthetic
aaaaauaguuuaauuccuuuaag

SEQ ID NO: 566715 - RNA, 24 nt, Artificial Sequence
  Synthetic
gaaaaauaguuuaauuccuuuaag

SEQ ID NO: 566716 - RNA, 18 nt, Artificial Sequence
  Synthetic
gugugugcuuucuuuaag

SEQ ID NO: 566717 - RNA, 19 nt, Artificial Sequence
  Synthetic
cgugugugcuuucuuuaag

SEQ ID NO: 566718 - RNA, 20 nt, Artificial Sequence
  Synthetic
acgugugugcuuucuuuaag

SEQ ID NO: 566719 - RNA, 21 nt, Artificial Sequence
  Synthetic
uacgugugugcuuucuuuaag

SEQ ID NO: 566720 - RNA, 22 nt, Artificial Sequence
  Synthetic
guacgugugugcuuucuuuaag

SEQ ID NO: 566721 - RNA, 23 nt, Artificial Sequence
  Synthetic
cguacgugugugcuuucuuuaag

SEQ ID NO: 566722 - RNA, 24 nt, Artificial Sequence
  Synthetic
gcguacgugugugcuuucuuuaag

SEQ ID NO: 566723 - RNA, 18 nt, Artificial Sequence
  Synthetic
acaacaguuccguuuaag

SEQ ID NO: 566724 - RNA, 19 nt, Artificial Sequence
  Synthetic
aacaacaguuccguuuaag

SEQ ID NO: 566725 - RNA, 20 nt, Artificial Sequence
  Synthetic
gaacaacaguuccguuuaag

SEQ ID NO: 566726 - RNA, 21 nt, Artificial Sequence
  Synthetic
ggaacaacaguuccguuuaag

SEQ ID NO: 566727 - RNA, 22 nt, Artificial Sequence
  Synthetic
uggaacaacaguuccguuuaag

SEQ ID NO: 566728 - RNA, 23 nt, Artificial Sequence
  Synthetic
auggaacaacaguuccguuuaag

SEQ ID NO: 566729 - RNA, 24 nt, Artificial Sequence
  Synthetic
gauggaacaacaguuccguuuaag

SEQ ID NO: 566730 - RNA, 18 nt, Artificial Sequence
  Synthetic
caguaaaaucuguuuaag

SEQ ID NO: 566731 - RNA, 19 nt, Artificial Sequence
  Synthetic
ucaguaaaaucuguuuaag

SEQ ID NO: 566732 - RNA, 20 nt, Artificial Sequence
  Synthetic
uucaguaaaaucuguuuaag

SEQ ID NO: 566733 - RNA, 21 nt, Artificial Sequence
  Synthetic
auucaguaaaaucuguuuaag

SEQ ID NO: 566734 - RNA, 22 nt, Artificial Sequence
  Synthetic
cauucaguaaaaucuguuuaag

SEQ ID NO: 566735 - RNA, 23 nt, Artificial Sequence
  Synthetic
acauucaguaaaaucuguuuaag

SEQ ID NO: 566736 - RNA, 24 nt, Artificial Sequence
  Synthetic
uacauucaguaaaaucuguuuaag

SEQ ID NO: 566737 - RNA, 18 nt, Artificial Sequence
  Synthetic
uaauuuucaaauuuuaag

SEQ ID NO: 566738 - RNA, 19 nt, Artificial Sequence
  Synthetic
uuaauuuucaaauuuuaag

SEQ ID NO: 566739 - RNA, 20 nt, Artificial Sequence
  Synthetic
auuaauuuucaaauuuuaag

SEQ ID NO: 566740 - RNA, 21 nt, Artificial Sequence
  Synthetic
cauuaauuuucaaauuuuaag

SEQ ID NO: 566741 - RNA, 22 nt, Artificial Sequence
  Synthetic
acauuaauuuucaaauuuuaag

SEQ ID NO: 566742 - RNA, 23 nt, Artificial Sequence
  Synthetic
aacauuaauuuucaaauuuuaag

SEQ ID NO: 566743 - RNA, 24 nt, Artificial Sequence
  Synthetic
uaacauuaauuuucaaauuuuaag

SEQ ID NO: 566744 - RNA, 18 nt, Artificial Sequence
  Synthetic
aaccuuaugaauuuuaag

SEQ ID NO: 566745 - RNA, 19 nt, Artificial Sequence
  Synthetic
aaaccuuaugaauuuuaag

SEQ ID NO: 566746 - RNA, 20 nt, Artificial Sequence
  Synthetic
uaaaccuuaugaauuuuaag

SEQ ID NO: 566747 - RNA, 21 nt, Artificial Sequence
  Synthetic
auaaaccuuaugaauuuuaag

SEQ ID NO: 566748 - RNA, 22 nt, Artificial Sequence
  Synthetic
aauaaaccuuaugaauuuuaag

SEQ ID NO: 566749 - RNA, 23 nt, Artificial Sequence
  Synthetic
gaauaaaccuuaugaauuuuaag

SEQ ID NO: 566750 - RNA, 24 nt, Artificial Sequence
  Synthetic
ggaauaaaccuuaugaauuuuaag

SEQ ID NO: 566751 - RNA, 18 nt, Artificial Sequence
  Synthetic
augacagugcauuuuaag

SEQ ID NO: 566752 - RNA, 19 nt, Artificial Sequence
  Synthetic
aaugacagugcauuuuaag

SEQ ID NO: 566753 - RNA, 20 nt, Artificial Sequence
  Synthetic
gaaugacagugcauuuuaag

SEQ ID NO: 566754 - RNA, 21 nt, Artificial Sequence
  Synthetic
ugaaugacagugcauuuuaag

SEQ ID NO: 566755 - RNA, 22 nt, Artificial Sequence
  Synthetic
uugaaugacagugcauuuuaag

SEQ ID NO: 566756 - RNA, 23 nt, Artificial Sequence
  Synthetic
guugaaugacagugcauuuuaag

SEQ ID NO: 566757 - RNA, 24 nt, Artificial Sequence
  Synthetic
gguugaaugacagugcauuuuaag

SEQ ID NO: 566758 - RNA, 18 nt, Artificial Sequence
  Synthetic
cuacugaaggauuuuaag

SEQ ID NO: 566759 - RNA, 19 nt, Artificial Sequence
  Synthetic
gcuacugaaggauuuuaag

SEQ ID NO: 566760 - RNA, 20 nt, Artificial Sequence
  Synthetic
agcuacugaaggauuuuaag

SEQ ID NO: 566761 - RNA, 21 nt, Artificial Sequence
  Synthetic
aagcuacugaaggauuuuaag

SEQ ID NO: 566762 - RNA, 22 nt, Artificial Sequence
  Synthetic
gaagcuacugaaggauuuuaag

SEQ ID NO: 566763 - RNA, 23 nt, Artificial Sequence
  Synthetic
ggaagcuacugaaggauuuuaag

SEQ ID NO: 566764 - RNA, 24 nt, Artificial Sequence
  Synthetic
gggaagcuacugaaggauuuuaag

SEQ ID NO: 566765 - RNA, 18 nt, Artificial Sequence
  Synthetic
agaaaucuguauuuuaag

SEQ ID NO: 566766 - RNA, 19 nt, Artificial Sequence
  Synthetic
gagaaaucuguauuuuaag

SEQ ID NO: 566767 - RNA, 20 nt, Artificial Sequence
  Synthetic
ugagaaaucuguauuuuaag

SEQ ID NO: 566768 - RNA, 21 nt, Artificial Sequence
  Synthetic
cugagaaaucuguauuuuaag

SEQ ID NO: 566769 - RNA, 22 nt, Artificial Sequence
  Synthetic
ucugagaaaucuguauuuuaag

SEQ ID NO: 566770 - RNA, 23 nt, Artificial Sequence
  Synthetic
uucugagaaaucuguauuuuaag

SEQ ID NO: 566771 - RNA, 24 nt, Artificial Sequence
  Synthetic
guucugagaaaucuguauuuuaag

SEQ ID NO: 566772 - RNA, 18 nt, Artificial Sequence
  Synthetic
cuaauuuuguauuuuaag

SEQ ID NO: 566773 - RNA, 19 nt, Artificial Sequence
  Synthetic
gcuaauuuuguauuuuaag

SEQ ID NO: 566774 - RNA, 20 nt, Artificial Sequence
  Synthetic
ggcuaauuuuguauuuuaag

SEQ ID NO: 566775 - RNA, 21 nt, Artificial Sequence
  Synthetic
uggcuaauuuuguauuuuaag

SEQ ID NO: 566776 - RNA, 22 nt, Artificial Sequence
  Synthetic
cuggcuaauuuuguauuuuaag

SEQ ID NO: 566777 - RNA, 23 nt, Artificial Sequence
  Synthetic
ccuggcuaauuuuguauuuuaag

SEQ ID NO: 566778 - RNA, 24 nt, Artificial Sequence
  Synthetic
gccuggcuaauuuuguauuuuaag

SEQ ID NO: 566779 - RNA, 18 nt, Artificial Sequence
  Synthetic
aaccauguuuauuuuaag

SEQ ID NO: 566780 - RNA, 19 nt, Artificial Sequence
  Synthetic
caaccauguuuauuuuaag

SEQ ID NO: 566781 - RNA, 20 nt, Artificial Sequence
  Synthetic
acaaccauguuuauuuuaag

SEQ ID NO: 566782 - RNA, 21 nt, Artificial Sequence
  Synthetic
uacaaccauguuuauuuuaag

SEQ ID NO: 566783 - RNA, 22 nt, Artificial Sequence
  Synthetic
cuacaaccauguuuauuuuaag

SEQ ID NO: 566784 - RNA, 23 nt, Artificial Sequence
  Synthetic
ucuacaaccauguuuauuuuaag

SEQ ID NO: 566785 - RNA, 24 nt, Artificial Sequence
  Synthetic
gucuacaaccauguuuauuuuaag

SEQ ID NO: 566786 - RNA, 18 nt, Artificial Sequence
  Synthetic
ggucaacccacuuuuaag

SEQ ID NO: 566787 - RNA, 19 nt, Artificial Sequence
  Synthetic
uggucaacccacuuuuaag

SEQ ID NO: 566788 - RNA, 20 nt, Artificial Sequence
  Synthetic
guggucaacccacuuuuaag

SEQ ID NO: 566789 - RNA, 21 nt, Artificial Sequence
  Synthetic
aguggucaacccacuuuuaag

SEQ ID NO: 566790 - RNA, 22 nt, Artificial Sequence
  Synthetic
gaguggucaacccacuuuuaag

SEQ ID NO: 566791 - RNA, 23 nt, Artificial Sequence
  Synthetic
agaguggucaacccacuuuuaag

SEQ ID NO: 566792 - RNA, 24 nt, Artificial Sequence
  Synthetic
uagaguggucaacccacuuuuaag

SEQ ID NO: 566793 - RNA, 18 nt, Artificial Sequence
  Synthetic
gauuaguguccuuuuaag

SEQ ID NO: 566794 - RNA, 19 nt, Artificial Sequence
  Synthetic
ggauuaguguccuuuuaag

SEQ ID NO: 566795 - RNA, 20 nt, Artificial Sequence
  Synthetic
uggauuaguguccuuuuaag

SEQ ID NO: 566796 - RNA, 21 nt, Artificial Sequence
  Synthetic
uuggauuaguguccuuuuaag

SEQ ID NO: 566797 - RNA, 22 nt, Artificial Sequence
  Synthetic
auuggauuaguguccuuuuaag

SEQ ID NO: 566798 - RNA, 23 nt, Artificial Sequence
  Synthetic
aauuggauuaguguccuuuuaag

SEQ ID NO: 566799 - RNA, 24 nt, Artificial Sequence
  Synthetic
uaauuggauuaguguccuuuuaag

SEQ ID NO: 566800 - RNA, 18 nt, Artificial Sequence
  Synthetic
ggaacagaguguuuuaag

SEQ ID NO: 566801 - RNA, 19 nt, Artificial Sequence
  Synthetic
aggaacagaguguuuuaag

SEQ ID NO: 566802 - RNA, 20 nt, Artificial Sequence
  Synthetic
aaggaacagaguguuuuaag

SEQ ID NO: 566803 - RNA, 21 nt, Artificial Sequence
  Synthetic
caaggaacagaguguuuuaag

SEQ ID NO: 566804 - RNA, 22 nt, Artificial Sequence
  Synthetic
gcaaggaacagaguguuuuaag

SEQ ID NO: 566805 - RNA, 23 nt, Artificial Sequence
  Synthetic
agcaaggaacagaguguuuuaag

SEQ ID NO: 566806 - RNA, 24 nt, Artificial Sequence
  Synthetic
aagcaaggaacagaguguuuuaag

SEQ ID NO: 566807 - RNA, 18 nt, Artificial Sequence
  Synthetic
ugcucuucacuuuuuaag

SEQ ID NO: 566808 - RNA, 19 nt, Artificial Sequence
  Synthetic
cugcucuucacuuuuuaag

SEQ ID NO: 566809 - RNA, 20 nt, Artificial Sequence
  Synthetic
ucugcucuucacuuuuuaag

SEQ ID NO: 566810 - RNA, 21 nt, Artificial Sequence
  Synthetic
aucugcucuucacuuuuuaag

SEQ ID NO: 566811 - RNA, 22 nt, Artificial Sequence
  Synthetic
caucugcucuucacuuuuuaag

SEQ ID NO: 566812 - RNA, 23 nt, Artificial Sequence
  Synthetic
ccaucugcucuucacuuuuuaag

SEQ ID NO: 566813 - RNA, 24 nt, Artificial Sequence
  Synthetic
uccaucugcucuucacuuuuuaag

SEQ ID NO: 566814 - RNA, 18 nt, Artificial Sequence
  Synthetic
uccuuagucuuuuuuaag

SEQ ID NO: 566815 - RNA, 19 nt, Artificial Sequence
  Synthetic
cuccuuagucuuuuuuaag

SEQ ID NO: 566816 - RNA, 20 nt, Artificial Sequence
  Synthetic
ucuccuuagucuuuuuuaag

SEQ ID NO: 566817 - RNA, 21 nt, Artificial Sequence
  Synthetic
aucuccuuagucuuuuuuaag

SEQ ID NO: 566818 - RNA, 22 nt, Artificial Sequence
  Synthetic
uaucuccuuagucuuuuuuaag

SEQ ID NO: 566819 - RNA, 23 nt, Artificial Sequence
  Synthetic
guaucuccuuagucuuuuuuaag

SEQ ID NO: 566820 - RNA, 24 nt, Artificial Sequence
  Synthetic
cguaucuccuuagucuuuuuuaag

SEQ ID NO: 566821 - RNA, 18 nt, Artificial Sequence
  Synthetic
agcucccgguuuuuuaag

SEQ ID NO: 566822 - RNA, 19 nt, Artificial Sequence
  Synthetic
cagcucccgguuuuuuaag

SEQ ID NO: 566823 - RNA, 20 nt, Artificial Sequence
  Synthetic
ccagcucccgguuuuuuaag

SEQ ID NO: 566824 - RNA, 21 nt, Artificial Sequence
  Synthetic
accagcucccgguuuuuuaag

SEQ ID NO: 566825 - RNA, 22 nt, Artificial Sequence
  Synthetic
caccagcucccgguuuuuuaag

SEQ ID NO: 566826 - RNA, 23 nt, Artificial Sequence
  Synthetic
ccaccagcucccgguuuuuuaag

SEQ ID NO: 566827 - RNA, 24 nt, Artificial Sequence
  Synthetic
uccaccagcucccgguuuuuuaag

SEQ ID NO: 566828 - RNA, 18 nt, Artificial Sequence
  Synthetic
cuuuuuuuuuuuuuuaag

SEQ ID NO: 566829 - RNA, 19 nt, Artificial Sequence
  Synthetic
ucuuuuuuuuuuuuuuaag

SEQ ID NO: 566830 - RNA, 20 nt, Artificial Sequence
  Synthetic
cucuuuuuuuuuuuuuuaag

SEQ ID NO: 566831 - RNA, 21 nt, Artificial Sequence
  Synthetic
ccucuuuuuuuuuuuuuuaag

SEQ ID NO: 566832 - RNA, 22 nt, Artificial Sequence
  Synthetic
uccucuuuuuuuuuuuuuuaag

SEQ ID NO: 566833 - RNA, 23 nt, Artificial Sequence
  Synthetic
uuccucuuuuuuuuuuuuuuaag

SEQ ID NO: 566834 - RNA, 24 nt, Artificial Sequence
  Synthetic
guuccucuuuuuuuuuuuuuuaag

SEQ ID NO: 566835 - RNA, 18 nt, Artificial Sequence
  Synthetic
agcaagauaaaaaaacag

SEQ ID NO: 566836 - RNA, 19 nt, Artificial Sequence
  Synthetic
gagcaagauaaaaaaacag

SEQ ID NO: 566837 - RNA, 20 nt, Artificial Sequence
  Synthetic
ggagcaagauaaaaaaacag

SEQ ID NO: 566838 - RNA, 21 nt, Artificial Sequence
  Synthetic
gggagcaagauaaaaaaacag

SEQ ID NO: 566839 - RNA, 22 nt, Artificial Sequence
  Synthetic
agggagcaagauaaaaaaacag

SEQ ID NO: 566840 - RNA, 23 nt, Artificial Sequence
  Synthetic
uagggagcaagauaaaaaaacag

SEQ ID NO: 566841 - RNA, 24 nt, Artificial Sequence
  Synthetic
cuagggagcaagauaaaaaaacag

SEQ ID NO: 566842 - RNA, 18 nt, Artificial Sequence
  Synthetic
gagcaugugcaaaaacag

SEQ ID NO: 566843 - RNA, 19 nt, Artificial Sequence
  Synthetic
agagcaugugcaaaaacag

SEQ ID NO: 566844 - RNA, 20 nt, Artificial Sequence
  Synthetic
aagagcaugugcaaaaacag

SEQ ID NO: 566845 - RNA, 21 nt, Artificial Sequence
  Synthetic
aaagagcaugugcaaaaacag

SEQ ID NO: 566846 - RNA, 22 nt, Artificial Sequence
  Synthetic
aaaagagcaugugcaaaaacag

SEQ ID NO: 566847 - RNA, 23 nt, Artificial Sequence
  Synthetic
uaaaagagcaugugcaaaaacag

SEQ ID NO: 566848 - RNA, 24 nt, Artificial Sequence
  Synthetic
guaaaagagcaugugcaaaaacag

SEQ ID NO: 566849 - RNA, 18 nt, Artificial Sequence
  Synthetic
aucaaaaaagaaaaacag

SEQ ID NO: 566850 - RNA, 19 nt, Artificial Sequence
  Synthetic
uaucaaaaaagaaaaacag

SEQ ID NO: 566851 - RNA, 20 nt, Artificial Sequence
  Synthetic
auaucaaaaaagaaaaacag

SEQ ID NO: 566852 - RNA, 21 nt, Artificial Sequence
  Synthetic
cauaucaaaaaagaaaaacag

SEQ ID NO: 566853 - RNA, 22 nt, Artificial Sequence
  Synthetic
ucauaucaaaaaagaaaaacag

SEQ ID NO: 566854 - RNA, 23 nt, Artificial Sequence
  Synthetic
aucauaucaaaaaagaaaaacag

SEQ ID NO: 566855 - RNA, 24 nt, Artificial Sequence
  Synthetic
uaucauaucaaaaaagaaaaacag

SEQ ID NO: 566856 - RNA, 18 nt, Artificial Sequence
  Synthetic
uugaguggggaaaaacag

SEQ ID NO: 566857 - RNA, 19 nt, Artificial Sequence
  Synthetic
guugaguggggaaaaacag

SEQ ID NO: 566858 - RNA, 20 nt, Artificial Sequence
  Synthetic
aguugaguggggaaaaacag

SEQ ID NO: 566859 - RNA, 21 nt, Artificial Sequence
  Synthetic
aaguugaguggggaaaaacag

SEQ ID NO: 566860 - RNA, 22 nt, Artificial Sequence
  Synthetic
caaguugaguggggaaaaacag

SEQ ID NO: 566861 - RNA, 23 nt, Artificial Sequence
  Synthetic
ccaaguugaguggggaaaaacag

SEQ ID NO: 566862 - RNA, 24 nt, Artificial Sequence
  Synthetic
gccaaguugaguggggaaaaacag

SEQ ID NO: 566863 - RNA, 18 nt, Artificial Sequence
  Synthetic
cugccauccuaaaaacag

SEQ ID NO: 566864 - RNA, 19 nt, Artificial Sequence
  Synthetic
ucugccauccuaaaaacag

SEQ ID NO: 566865 - RNA, 20 nt, Artificial Sequence
  Synthetic
cucugccauccuaaaaacag

SEQ ID NO: 566866 - RNA, 21 nt, Artificial Sequence
  Synthetic
ucucugccauccuaaaaacag

SEQ ID NO: 566867 - RNA, 22 nt, Artificial Sequence
  Synthetic
cucucugccauccuaaaaacag

SEQ ID NO: 566868 - RNA, 23 nt, Artificial Sequence
  Synthetic
ucucucugccauccuaaaaacag

SEQ ID NO: 566869 - RNA, 24 nt, Artificial Sequence
  Synthetic
uucucucugccauccuaaaaacag

SEQ ID NO: 566870 - RNA, 18 nt, Artificial Sequence
  Synthetic
ucaaaaagcuaaaaacag

SEQ ID NO: 566871 - RNA, 19 nt, Artificial Sequence
  Synthetic
aucaaaaagcuaaaaacag

SEQ ID NO: 566872 - RNA, 20 nt, Artificial Sequence
  Synthetic
gaucaaaaagcuaaaaacag

SEQ ID NO: 566873 - RNA, 21 nt, Artificial Sequence
  Synthetic
agaucaaaaagcuaaaaacag

SEQ ID NO: 566874 - RNA, 22 nt, Artificial Sequence
  Synthetic
cagaucaaaaagcuaaaaacag

SEQ ID NO: 566875 - RNA, 23 nt, Artificial Sequence
  Synthetic
acagaucaaaaagcuaaaaacag

SEQ ID NO: 566876 - RNA, 24 nt, Artificial Sequence
  Synthetic
aacagaucaaaaagcuaaaaacag

SEQ ID NO: 566877 - RNA, 18 nt, Artificial Sequence
  Synthetic
agagaaaguuaaaaacag

SEQ ID NO: 566878 - RNA, 19 nt, Artificial Sequence
  Synthetic
aagagaaaguuaaaaacag

SEQ ID NO: 566879 - RNA, 20 nt, Artificial Sequence
  Synthetic
aaagagaaaguuaaaaacag

SEQ ID NO: 566880 - RNA, 21 nt, Artificial Sequence
  Synthetic
caaagagaaaguuaaaaacag

SEQ ID NO: 566881 - RNA, 22 nt, Artificial Sequence
  Synthetic
ccaaagagaaaguuaaaaacag

SEQ ID NO: 566882 - RNA, 23 nt, Artificial Sequence
  Synthetic
uccaaagagaaaguuaaaaacag

SEQ ID NO: 566883 - RNA, 24 nt, Artificial Sequence
  Synthetic
uuccaaagagaaaguuaaaaacag

SEQ ID NO: 566884 - RNA, 18 nt, Artificial Sequence
  Synthetic
uaauuaacaacaaaacag

SEQ ID NO: 566885 - RNA, 19 nt, Artificial Sequence
  Synthetic
uuaauuaacaacaaaacag

SEQ ID NO: 566886 - RNA, 20 nt, Artificial Sequence
  Synthetic
guuaauuaacaacaaaacag

SEQ ID NO: 566887 - RNA, 21 nt, Artificial Sequence
  Synthetic
aguuaauuaacaacaaaacag

SEQ ID NO: 566888 - RNA, 22 nt, Artificial Sequence
  Synthetic
uaguuaauuaacaacaaaacag

SEQ ID NO: 566889 - RNA, 23 nt, Artificial Sequence
  Synthetic
cuaguuaauuaacaacaaaacag

SEQ ID NO: 566890 - RNA, 24 nt, Artificial Sequence
  Synthetic
ucuaguuaauuaacaacaaaacag

SEQ ID NO: 566891 - RNA, 18 nt, Artificial Sequence
  Synthetic
uuuaacggcacaaaacag

SEQ ID NO: 566892 - RNA, 19 nt, Artificial Sequence
  Synthetic
uuuuaacggcacaaaacag

SEQ ID NO: 566893 - RNA, 20 nt, Artificial Sequence
  Synthetic
auuuuaacggcacaaaacag

SEQ ID NO: 566894 - RNA, 21 nt, Artificial Sequence
  Synthetic
cauuuuaacggcacaaaacag

SEQ ID NO: 566895 - RNA, 22 nt, Artificial Sequence
  Synthetic
ccauuuuaacggcacaaaacag

SEQ ID NO: 566896 - RNA, 23 nt, Artificial Sequence
  Synthetic
uccauuuuaacggcacaaaacag

SEQ ID NO: 566897 - RNA, 24 nt, Artificial Sequence
  Synthetic
uuccauuuuaacggcacaaaacag

SEQ ID NO: 566898 - RNA, 18 nt, Artificial Sequence
  Synthetic
uuuguaucuucaaaacag

SEQ ID NO: 566899 - RNA, 19 nt, Artificial Sequence
  Synthetic
uuuuguaucuucaaaacag

SEQ ID NO: 566900 - RNA, 20 nt, Artificial Sequence
  Synthetic
cuuuuguaucuucaaaacag

SEQ ID NO: 566901 - RNA, 21 nt, Artificial Sequence
  Synthetic
ccuuuuguaucuucaaaacag

SEQ ID NO: 566902 - RNA, 22 nt, Artificial Sequence
  Synthetic
uccuuuuguaucuucaaaacag

SEQ ID NO: 566903 - RNA, 23 nt, Artificial Sequence
  Synthetic
uuccuuuuguaucuucaaaacag

SEQ ID NO: 566904 - RNA, 24 nt, Artificial Sequence
  Synthetic
uuuccuuuuguaucuucaaaacag

SEQ ID NO: 566905 - RNA, 18 nt, Artificial Sequence
  Synthetic
ggggaggugagaaaacag

SEQ ID NO: 566906 - RNA, 19 nt, Artificial Sequence
  Synthetic
uggggaggugagaaaacag

SEQ ID NO: 566907 - RNA, 20 nt, Artificial Sequence
  Synthetic
cuggggaggugagaaaacag

SEQ ID NO: 566908 - RNA, 21 nt, Artificial Sequence
  Synthetic
acuggggaggugagaaaacag

SEQ ID NO: 566909 - RNA, 22 nt, Artificial Sequence
  Synthetic
aacuggggaggugagaaaacag

SEQ ID NO: 566910 - RNA, 23 nt, Artificial Sequence
  Synthetic
aaacuggggaggugagaaaacag

SEQ ID NO: 566911 - RNA, 24 nt, Artificial Sequence
  Synthetic
uaaacuggggaggugagaaaacag

SEQ ID NO: 566912 - RNA, 18 nt, Artificial Sequence
  Synthetic
uagggaaauggaaaacag

SEQ ID NO: 566913 - RNA, 19 nt, Artificial Sequence
  Synthetic
guagggaaauggaaaacag

SEQ ID NO: 566914 - RNA, 20 nt, Artificial Sequence
  Synthetic
aguagggaaauggaaaacag

SEQ ID NO: 566915 - RNA, 21 nt, Artificial Sequence
  Synthetic
aaguagggaaauggaaaacag

SEQ ID NO: 566916 - RNA, 22 nt, Artificial Sequence
  Synthetic
gaaguagggaaauggaaaacag

SEQ ID NO: 566917 - RNA, 23 nt, Artificial Sequence
  Synthetic
agaaguagggaaauggaaaacag

SEQ ID NO: 566918 - RNA, 24 nt, Artificial Sequence
  Synthetic
cagaaguagggaaauggaaaacag

SEQ ID NO: 566919 - RNA, 18 nt, Artificial Sequence
  Synthetic
aaaaggaaaagcaaacag

SEQ ID NO: 566920 - RNA, 19 nt, Artificial Sequence
  Synthetic
caaaaggaaaagcaaacag

SEQ ID NO: 566921 - RNA, 20 nt, Artificial Sequence
  Synthetic
ccaaaaggaaaagcaaacag

SEQ ID NO: 566922 - RNA, 21 nt, Artificial Sequence
  Synthetic
gccaaaaggaaaagcaaacag

SEQ ID NO: 566923 - RNA, 22 nt, Artificial Sequence
  Synthetic
ugccaaaaggaaaagcaaacag

SEQ ID NO: 566924 - RNA, 23 nt, Artificial Sequence
  Synthetic
augccaaaaggaaaagcaaacag

SEQ ID NO: 566925 - RNA, 24 nt, Artificial Sequence
  Synthetic
uaugccaaaaggaaaagcaaacag

SEQ ID NO: 566926 - RNA, 18 nt, Artificial Sequence
  Synthetic
guaaauggaagcaaacag

SEQ ID NO: 566927 - RNA, 19 nt, Artificial Sequence
  Synthetic
aguaaauggaagcaaacag

SEQ ID NO: 566928 - RNA, 20 nt, Artificial Sequence
  Synthetic
aaguaaauggaagcaaacag

SEQ ID NO: 566929 - RNA, 21 nt, Artificial Sequence
  Synthetic
aaaguaaauggaagcaaacag

SEQ ID NO: 566930 - RNA, 22 nt, Artificial Sequence
  Synthetic
gaaaguaaauggaagcaaacag

SEQ ID NO: 566931 - RNA, 23 nt, Artificial Sequence
  Synthetic
ggaaaguaaauggaagcaaacag

SEQ ID NO: 566932 - RNA, 24 nt, Artificial Sequence
  Synthetic
aggaaaguaaauggaagcaaacag

SEQ ID NO: 566933 - RNA, 18 nt, Artificial Sequence
  Synthetic
aguuuaaugggcaaacag

SEQ ID NO: 566934 - RNA, 19 nt, Artificial Sequence
  Synthetic
aaguuuaaugggcaaacag

SEQ ID NO: 566935 - RNA, 20 nt, Artificial Sequence
  Synthetic
aaaguuuaaugggcaaacag

SEQ ID NO: 566936 - RNA, 21 nt, Artificial Sequence
  Synthetic
caaaguuuaaugggcaaacag

SEQ ID NO: 566937 - RNA, 22 nt, Artificial Sequence
  Synthetic
ucaaaguuuaaugggcaaacag

SEQ ID NO: 566938 - RNA, 23 nt, Artificial Sequence
  Synthetic
aucaaaguuuaaugggcaaacag

SEQ ID NO: 566939 - RNA, 24 nt, Artificial Sequence
  Synthetic
uaucaaaguuuaaugggcaaacag

SEQ ID NO: 566940 - RNA, 18 nt, Artificial Sequence
  Synthetic
uuuuuuuuuuucaaacag

SEQ ID NO: 566941 - RNA, 19 nt, Artificial Sequence
  Synthetic
uuuuuuuuuuuucaaacag

SEQ ID NO: 566942 - RNA, 20 nt, Artificial Sequence
  Synthetic
uuuuuuuuuuuuucaaacag

SEQ ID NO: 566943 - RNA, 21 nt, Artificial Sequence
  Synthetic
uuuuuuuuuuuuuucaaacag

SEQ ID NO: 566944 - RNA, 22 nt, Artificial Sequence
  Synthetic
uuuuuuuuuuuuuuucaaacag

SEQ ID NO: 566945 - RNA, 23 nt, Artificial Sequence
  Synthetic
uuuuuuuuuuuuuuuucaaacag

SEQ ID NO: 566946 - RNA, 24 nt, Artificial Sequence
  Synthetic
uuuuuuuuuuuuuuuuucaaacag

SEQ ID NO: 566947 - RNA, 18 nt, Artificial Sequence
  Synthetic
aggagcuagcagaaacag

SEQ ID NO: 566948 - RNA, 19 nt, Artificial Sequence
  Synthetic
gaggagcuagcagaaacag

SEQ ID NO: 566949 - RNA, 20 nt, Artificial Sequence
  Synthetic
ggaggagcuagcagaaacag

SEQ ID NO: 566950 - RNA, 21 nt, Artificial Sequence
  Synthetic
aggaggagcuagcagaaacag

SEQ ID NO: 566951 - RNA, 22 nt, Artificial Sequence
  Synthetic
gaggaggagcuagcagaaacag

SEQ ID NO: 566952 - RNA, 23 nt, Artificial Sequence
  Synthetic
ggaggaggagcuagcagaaacag

SEQ ID NO: 566953 - RNA, 24 nt, Artificial Sequence
  Synthetic
cggaggaggagcuagcagaaacag

SEQ ID NO: 566954 - RNA, 18 nt, Artificial Sequence
  Synthetic
agaaacaaauagaaacag

SEQ ID NO: 566955 - RNA, 19 nt, Artificial Sequence
  Synthetic
uagaaacaaauagaaacag

SEQ ID NO: 566956 - RNA, 20 nt, Artificial Sequence
  Synthetic
uuagaaacaaauagaaacag

SEQ ID NO: 566957 - RNA, 21 nt, Artificial Sequence
  Synthetic
uuuagaaacaaauagaaacag

SEQ ID NO: 566958 - RNA, 22 nt, Artificial Sequence
  Synthetic
uuuuagaaacaaauagaaacag

SEQ ID NO: 566959 - RNA, 23 nt, Artificial Sequence
  Synthetic
uuuuuagaaacaaauagaaacag

SEQ ID NO: 566960 - RNA, 24 nt, Artificial Sequence
  Synthetic
auuuuuagaaacaaauagaaacag

SEQ ID NO: 566961 - RNA, 18 nt, Artificial Sequence
  Synthetic
gccucuggauagaaacag

SEQ ID NO: 566962 - RNA, 19 nt, Artificial Sequence
  Synthetic
ggccucuggauagaaacag

SEQ ID NO: 566963 - RNA, 20 nt, Artificial Sequence
  Synthetic
aggccucuggauagaaacag

SEQ ID NO: 566964 - RNA, 21 nt, Artificial Sequence
  Synthetic
uaggccucuggauagaaacag

SEQ ID NO: 566965 - RNA, 22 nt, Artificial Sequence
  Synthetic
cuaggccucuggauagaaacag

SEQ ID NO: 566966 - RNA, 23 nt, Artificial Sequence
  Synthetic
ucuaggccucuggauagaaacag

SEQ ID NO: 566967 - RNA, 24 nt, Artificial Sequence
  Synthetic
cucuaggccucuggauagaaacag

SEQ ID NO: 566968 - RNA, 18 nt, Artificial Sequence
  Synthetic
ggggagagcaggaaacag

SEQ ID NO: 566969 - RNA, 19 nt, Artificial Sequence
  Synthetic
aggggagagcaggaaacag

SEQ ID NO: 566970 - RNA, 20 nt, Artificial Sequence
  Synthetic
aaggggagagcaggaaacag

SEQ ID NO: 566971 - RNA, 21 nt, Artificial Sequence
  Synthetic
aaaggggagagcaggaaacag

SEQ ID NO: 566972 - RNA, 22 nt, Artificial Sequence
  Synthetic
caaaggggagagcaggaaacag

SEQ ID NO: 566973 - RNA, 23 nt, Artificial Sequence
  Synthetic
gcaaaggggagagcaggaaacag

SEQ ID NO: 566974 - RNA, 24 nt, Artificial Sequence
  Synthetic
ggcaaaggggagagcaggaaacag

SEQ ID NO: 566975 - RNA, 18 nt, Artificial Sequence
  Synthetic
ucaucuacauggaaacag

SEQ ID NO: 566976 - RNA, 19 nt, Artificial Sequence
  Synthetic
gucaucuacauggaaacag

SEQ ID NO: 566977 - RNA, 20 nt, Artificial Sequence
  Synthetic
agucaucuacauggaaacag

SEQ ID NO: 566978 - RNA, 21 nt, Artificial Sequence
  Synthetic
cagucaucuacauggaaacag

SEQ ID NO: 566979 - RNA, 22 nt, Artificial Sequence
  Synthetic
ucagucaucuacauggaaacag

SEQ ID NO: 566980 - RNA, 23 nt, Artificial Sequence
  Synthetic
uucagucaucuacauggaaacag

SEQ ID NO: 566981 - RNA, 24 nt, Artificial Sequence
  Synthetic
auucagucaucuacauggaaacag

SEQ ID NO: 566982 - RNA, 18 nt, Artificial Sequence
  Synthetic
aagagagaagugaaacag

SEQ ID NO: 566983 - RNA, 19 nt, Artificial Sequence
  Synthetic
aaagagagaagugaaacag

SEQ ID NO: 566984 - RNA, 20 nt, Artificial Sequence
  Synthetic
uaaagagagaagugaaacag

SEQ ID NO: 566985 - RNA, 21 nt, Artificial Sequence
  Synthetic
guaaagagagaagugaaacag

SEQ ID NO: 566986 - RNA, 22 nt, Artificial Sequence
  Synthetic
uguaaagagagaagugaaacag

SEQ ID NO: 566987 - RNA, 23 nt, Artificial Sequence
  Synthetic
guguaaagagagaagugaaacag

SEQ ID NO: 566988 - RNA, 24 nt, Artificial Sequence
  Synthetic
uguguaaagagagaagugaaacag

SEQ ID NO: 566989 - RNA, 18 nt, Artificial Sequence
  Synthetic
aggcagagguugaaacag

SEQ ID NO: 566990 - RNA, 19 nt, Artificial Sequence
  Synthetic
caggcagagguugaaacag

SEQ ID NO: 566991 - RNA, 20 nt, Artificial Sequence
  Synthetic
acaggcagagguugaaacag

SEQ ID NO: 566992 - RNA, 21 nt, Artificial Sequence
  Synthetic
aacaggcagagguugaaacag

SEQ ID NO: 566993 - RNA, 22 nt, Artificial Sequence
  Synthetic
uaacaggcagagguugaaacag

SEQ ID NO: 566994 - RNA, 23 nt, Artificial Sequence
  Synthetic
guaacaggcagagguugaaacag

SEQ ID NO: 566995 - RNA, 24 nt, Artificial Sequence
  Synthetic
gguaacaggcagagguugaaacag

SEQ ID NO: 566996 - RNA, 18 nt, Artificial Sequence
  Synthetic
auccuuuaucauaaacag

SEQ ID NO: 566997 - RNA, 19 nt, Artificial Sequence
  Synthetic
uauccuuuaucauaaacag

SEQ ID NO: 566998 - RNA, 20 nt, Artificial Sequence
  Synthetic
auauccuuuaucauaaacag

SEQ ID NO: 566999 - RNA, 21 nt, Artificial Sequence
  Synthetic
aauauccuuuaucauaaacag

SEQ ID NO: 567000 - RNA, 22 nt, Artificial Sequence
  Synthetic
caauauccuuuaucauaaacag

SEQ ID NO: 567001 - RNA, 23 nt, Artificial Sequence
  Synthetic
gcaauauccuuuaucauaaacag

SEQ ID NO: 567002 - RNA, 24 nt, Artificial Sequence
  Synthetic
ugcaauauccuuuaucauaaacag

SEQ ID NO: 567003 - RNA, 18 nt, Artificial Sequence
  Synthetic
auacuaaauacuaaacag

SEQ ID NO: 567004 - RNA, 19 nt, Artificial Sequence
  Synthetic
aauacuaaauacuaaacag

SEQ ID NO: 567005 - RNA, 20 nt, Artificial Sequence
  Synthetic
gaauacuaaauacuaaacag

SEQ ID NO: 567006 - RNA, 21 nt, Artificial Sequence
  Synthetic
ugaauacuaaauacuaaacag

SEQ ID NO: 567007 - RNA, 22 nt, Artificial Sequence
  Synthetic
cugaauacuaaauacuaaacag

SEQ ID NO: 567008 - RNA, 23 nt, Artificial Sequence
  Synthetic
gcugaauacuaaauacuaaacag

SEQ ID NO: 567009 - RNA, 24 nt, Artificial Sequence
  Synthetic
ugcugaauacuaaauacuaaacag

SEQ ID NO: 567010 - RNA, 18 nt, Artificial Sequence
  Synthetic
uauuugauagcacaacag

SEQ ID NO: 567011 - RNA, 19 nt, Artificial Sequence
  Synthetic
cuauuugauagcacaacag

SEQ ID NO: 567012 - RNA, 20 nt, Artificial Sequence
  Synthetic
acuauuugauagcacaacag

SEQ ID NO: 567013 - RNA, 21 nt, Artificial Sequence
  Synthetic
uacuauuugauagcacaacag

SEQ ID NO: 567014 - RNA, 22 nt, Artificial Sequence
  Synthetic
cuacuauuugauagcacaacag

SEQ ID NO: 567015 - RNA, 23 nt, Artificial Sequence
  Synthetic
ccuacuauuugauagcacaacag

SEQ ID NO: 567016 - RNA, 24 nt, Artificial Sequence
  Synthetic
accuacuauuugauagcacaacag

SEQ ID NO: 567017 - RNA, 18 nt, Artificial Sequence
  Synthetic
auggcaaauguacaacag

SEQ ID NO: 567018 - RNA, 19 nt, Artificial Sequence
  Synthetic
aauggcaaauguacaacag

SEQ ID NO: 567019 - RNA, 20 nt, Artificial Sequence
  Synthetic
caauggcaaauguacaacag

SEQ ID NO: 567020 - RNA, 21 nt, Artificial Sequence
  Synthetic
ucaauggcaaauguacaacag

SEQ ID NO: 567021 - RNA, 22 nt, Artificial Sequence
  Synthetic
gucaauggcaaauguacaacag

SEQ ID NO: 567022 - RNA, 23 nt, Artificial Sequence
  Synthetic
cgucaauggcaaauguacaacag

SEQ ID NO: 567023 - RNA, 24 nt, Artificial Sequence
  Synthetic
acgucaauggcaaauguacaacag

SEQ ID NO: 567024 - RNA, 18 nt, Artificial Sequence
  Synthetic
auuagagcuuuccaacag

SEQ ID NO: 567025 - RNA, 19 nt, Artificial Sequence
  Synthetic
gauuagagcuuuccaacag

SEQ ID NO: 567026 - RNA, 20 nt, Artificial Sequence
  Synthetic
agauuagagcuuuccaacag

SEQ ID NO: 567027 - RNA, 21 nt, Artificial Sequence
  Synthetic
gagauuagagcuuuccaacag

SEQ ID NO: 567028 - RNA, 22 nt, Artificial Sequence
  Synthetic
ugagauuagagcuuuccaacag

SEQ ID NO: 567029 - RNA, 23 nt, Artificial Sequence
  Synthetic
uugagauuagagcuuuccaacag

SEQ ID NO: 567030 - RNA, 24 nt, Artificial Sequence
  Synthetic
uuugagauuagagcuuuccaacag

SEQ ID NO: 567031 - RNA, 18 nt, Artificial Sequence
  Synthetic
cuggauucaaggcaacag

SEQ ID NO: 567032 - RNA, 19 nt, Artificial Sequence
  Synthetic
ccuggauucaaggcaacag

SEQ ID NO: 567033 - RNA, 20 nt, Artificial Sequence
  Synthetic
uccuggauucaaggcaacag

SEQ ID NO: 567034 - RNA, 21 nt, Artificial Sequence
  Synthetic
guccuggauucaaggcaacag

SEQ ID NO: 567035 - RNA, 22 nt, Artificial Sequence
  Synthetic
gguccuggauucaaggcaacag

SEQ ID NO: 567036 - RNA, 23 nt, Artificial Sequence
  Synthetic
ugguccuggauucaaggcaacag

SEQ ID NO: 567037 - RNA, 24 nt, Artificial Sequence
  Synthetic
gugguccuggauucaaggcaacag

SEQ ID NO: 567038 - RNA, 18 nt, Artificial Sequence
  Synthetic
acuuaagcacugcaacag

SEQ ID NO: 567039 - RNA, 19 nt, Artificial Sequence
  Synthetic
cacuuaagcacugcaacag

SEQ ID NO: 567040 - RNA, 20 nt, Artificial Sequence
  Synthetic
acacuuaagcacugcaacag

SEQ ID NO: 567041 - RNA, 21 nt, Artificial Sequence
  Synthetic
cacacuuaagcacugcaacag

SEQ ID NO: 567042 - RNA, 22 nt, Artificial Sequence
  Synthetic
ucacacuuaagcacugcaacag

SEQ ID NO: 567043 - RNA, 23 nt, Artificial Sequence
  Synthetic
cucacacuuaagcacugcaacag

SEQ ID NO: 567044 - RNA, 24 nt, Artificial Sequence
  Synthetic
ucucacacuuaagcacugcaacag

SEQ ID NO: 567045 - RNA, 18 nt, Artificial Sequence
  Synthetic
uauuugauagugcaacag

SEQ ID NO: 567046 - RNA, 19 nt, Artificial Sequence
  Synthetic
guauuugauagugcaacag

SEQ ID NO: 567047 - RNA, 20 nt, Artificial Sequence
  Synthetic
aguauuugauagugcaacag

SEQ ID NO: 567048 - RNA, 21 nt, Artificial Sequence
  Synthetic
uaguauuugauagugcaacag

SEQ ID NO: 567049 - RNA, 22 nt, Artificial Sequence
  Synthetic
cuaguauuugauagugcaacag

SEQ ID NO: 567050 - RNA, 23 nt, Artificial Sequence
  Synthetic
ccuaguauuugauagugcaacag

SEQ ID NO: 567051 - RNA, 24 nt, Artificial Sequence
  Synthetic
accuaguauuugauagugcaacag

SEQ ID NO: 567052 - RNA, 18 nt, Artificial Sequence
  Synthetic
acaagaaccuugcaacag

SEQ ID NO: 567053 - RNA, 19 nt, Artificial Sequence
  Synthetic
uacaagaaccuugcaacag

SEQ ID NO: 567054 - RNA, 20 nt, Artificial Sequence
  Synthetic
auacaagaaccuugcaacag

SEQ ID NO: 567055 - RNA, 21 nt, Artificial Sequence
  Synthetic
aauacaagaaccuugcaacag

SEQ ID NO: 567056 - RNA, 22 nt, Artificial Sequence
  Synthetic
uaauacaagaaccuugcaacag

SEQ ID NO: 567057 - RNA, 23 nt, Artificial Sequence
  Synthetic
auaauacaagaaccuugcaacag

SEQ ID NO: 567058 - RNA, 24 nt, Artificial Sequence
  Synthetic
gauaauacaagaaccuugcaacag

SEQ ID NO: 567059 - RNA, 18 nt, Artificial Sequence
  Synthetic
cugaagcagaaucaacag

SEQ ID NO: 567060 - RNA, 19 nt, Artificial Sequence
  Synthetic
ccugaagcagaaucaacag

SEQ ID NO: 567061 - RNA, 20 nt, Artificial Sequence
  Synthetic
accugaagcagaaucaacag

SEQ ID NO: 567062 - RNA, 21 nt, Artificial Sequence
  Synthetic
caccugaagcagaaucaacag

SEQ ID NO: 567063 - RNA, 22 nt, Artificial Sequence
  Synthetic
ucaccugaagcagaaucaacag

SEQ ID NO: 567064 - RNA, 23 nt, Artificial Sequence
  Synthetic
uucaccugaagcagaaucaacag

SEQ ID NO: 567065 - RNA, 24 nt, Artificial Sequence
  Synthetic
guucaccugaagcagaaucaacag

SEQ ID NO: 567066 - RNA, 18 nt, Artificial Sequence
  Synthetic
cuaaaaacauaucaacag

SEQ ID NO: 567067 - RNA, 19 nt, Artificial Sequence
  Synthetic
gcuaaaaacauaucaacag

SEQ ID NO: 567068 - RNA, 20 nt, Artificial Sequence
  Synthetic
ggcuaaaaacauaucaacag

SEQ ID NO: 567069 - RNA, 21 nt, Artificial Sequence
  Synthetic
uggcuaaaaacauaucaacag

SEQ ID NO: 567070 - RNA, 22 nt, Artificial Sequence
  Synthetic
guggcuaaaaacauaucaacag

SEQ ID NO: 567071 - RNA, 23 nt, Artificial Sequence
  Synthetic
aguggcuaaaaacauaucaacag

SEQ ID NO: 567072 - RNA, 24 nt, Artificial Sequence
  Synthetic
aaguggcuaaaaacauaucaacag

SEQ ID NO: 567073 - RNA, 18 nt, Artificial Sequence
  Synthetic
aucauuccaugucaacag

SEQ ID NO: 567074 - RNA, 19 nt, Artificial Sequence
  Synthetic
uaucauuccaugucaacag

SEQ ID NO: 567075 - RNA, 20 nt, Artificial Sequence
  Synthetic
uuaucauuccaugucaacag

SEQ ID NO: 567076 - RNA, 21 nt, Artificial Sequence
  Synthetic
cuuaucauuccaugucaacag

SEQ ID NO: 567077 - RNA, 22 nt, Artificial Sequence
  Synthetic
ccuuaucauuccaugucaacag

SEQ ID NO: 567078 - RNA, 23 nt, Artificial Sequence
  Synthetic
uccuuaucauuccaugucaacag

SEQ ID NO: 567079 - RNA, 24 nt, Artificial Sequence
  Synthetic
cuccuuaucauuccaugucaacag

SEQ ID NO: 567080 - RNA, 18 nt, Artificial Sequence
  Synthetic
uuuuaacucauucaacag

SEQ ID NO: 567081 - RNA, 19 nt, Artificial Sequence
  Synthetic
auuuuaacucauucaacag

SEQ ID NO: 567082 - RNA, 20 nt, Artificial Sequence
  Synthetic
uauuuuaacucauucaacag

SEQ ID NO: 567083 - RNA, 21 nt, Artificial Sequence
  Synthetic
auauuuuaacucauucaacag

SEQ ID NO: 567084 - RNA, 22 nt, Artificial Sequence
  Synthetic
uauauuuuaacucauucaacag

SEQ ID NO: 567085 - RNA, 23 nt, Artificial Sequence
  Synthetic
auauauuuuaacucauucaacag

SEQ ID NO: 567086 - RNA, 24 nt, Artificial Sequence
  Synthetic
aauauauuuuaacucauucaacag

SEQ ID NO: 567087 - RNA, 18 nt, Artificial Sequence
  Synthetic
auaacgauuaaagaacag

SEQ ID NO: 567088 - RNA, 19 nt, Artificial Sequence
  Synthetic
aauaacgauuaaagaacag

SEQ ID NO: 567089 - RNA, 20 nt, Artificial Sequence
  Synthetic
uaauaacgauuaaagaacag

SEQ ID NO: 567090 - RNA, 21 nt, Artificial Sequence
  Synthetic
uuaauaacgauuaaagaacag

SEQ ID NO: 567091 - RNA, 22 nt, Artificial Sequence
  Synthetic
uuuaauaacgauuaaagaacag

SEQ ID NO: 567092 - RNA, 23 nt, Artificial Sequence
  Synthetic
uuuuaauaacgauuaaagaacag

SEQ ID NO: 567093 - RNA, 24 nt, Artificial Sequence
  Synthetic
auuuuaauaacgauuaaagaacag

SEQ ID NO: 567094 - RNA, 18 nt, Artificial Sequence
  Synthetic
agagucaucagagaacag

SEQ ID NO: 567095 - RNA, 19 nt, Artificial Sequence
  Synthetic
aagagucaucagagaacag

SEQ ID NO: 567096 - RNA, 20 nt, Artificial Sequence
  Synthetic
caagagucaucagagaacag

SEQ ID NO: 567097 - RNA, 21 nt, Artificial Sequence
  Synthetic
ucaagagucaucagagaacag

SEQ ID NO: 567098 - RNA, 22 nt, Artificial Sequence
  Synthetic
uucaagagucaucagagaacag

SEQ ID NO: 567099 - RNA, 23 nt, Artificial Sequence
  Synthetic
uuucaagagucaucagagaacag

SEQ ID NO: 567100 - RNA, 24 nt, Artificial Sequence
  Synthetic
uuuucaagagucaucagagaacag

SEQ ID NO: 567101 - RNA, 18 nt, Artificial Sequence
  Synthetic
aguggagagugagaacag

SEQ ID NO: 567102 - RNA, 19 nt, Artificial Sequence
  Synthetic
aaguggagagugagaacag

SEQ ID NO: 567103 - RNA, 20 nt, Artificial Sequence
  Synthetic
gaaguggagagugagaacag

SEQ ID NO: 567104 - RNA, 21 nt, Artificial Sequence
  Synthetic
ggaaguggagagugagaacag

SEQ ID NO: 567105 - RNA, 22 nt, Artificial Sequence
  Synthetic
aggaaguggagagugagaacag

SEQ ID NO: 567106 - RNA, 23 nt, Artificial Sequence
  Synthetic
aaggaaguggagagugagaacag

SEQ ID NO: 567107 - RNA, 24 nt, Artificial Sequence
  Synthetic
uaaggaaguggagagugagaacag

SEQ ID NO: 567108 - RNA, 18 nt, Artificial Sequence
  Synthetic
agugacagaauagaacag

SEQ ID NO: 567109 - RNA, 19 nt, Artificial Sequence
  Synthetic
uagugacagaauagaacag

SEQ ID NO: 567110 - RNA, 20 nt, Artificial Sequence
  Synthetic
uuagugacagaauagaacag

SEQ ID NO: 567111 - RNA, 21 nt, Artificial Sequence
  Synthetic
guuagugacagaauagaacag

SEQ ID NO: 567112 - RNA, 22 nt, Artificial Sequence
  Synthetic
aguuagugacagaauagaacag

SEQ ID NO: 567113 - RNA, 23 nt, Artificial Sequence
  Synthetic
caguuagugacagaauagaacag

SEQ ID NO: 567114 - RNA, 24 nt, Artificial Sequence
  Synthetic
acaguuagugacagaauagaacag

SEQ ID NO: 567115 - RNA, 18 nt, Artificial Sequence
  Synthetic
gagucagaagacgaacag

SEQ ID NO: 567116 - RNA, 19 nt, Artificial Sequence
  Synthetic
agagucagaagacgaacag

SEQ ID NO: 567117 - RNA, 20 nt, Artificial Sequence
  Synthetic
cagagucagaagacgaacag

SEQ ID NO: 567118 - RNA, 21 nt, Artificial Sequence
  Synthetic
acagagucagaagacgaacag

SEQ ID NO: 567119 - RNA, 22 nt, Artificial Sequence
  Synthetic
uacagagucagaagacgaacag

SEQ ID NO: 567120 - RNA, 23 nt, Artificial Sequence
  Synthetic
auacagagucagaagacgaacag

SEQ ID NO: 567121 - RNA, 24 nt, Artificial Sequence
  Synthetic
gauacagagucagaagacgaacag

SEQ ID NO: 567122 - RNA, 18 nt, Artificial Sequence
  Synthetic
aggguaaauggcgaacag

SEQ ID NO: 567123 - RNA, 19 nt, Artificial Sequence
  Synthetic
gaggguaaauggcgaacag

SEQ ID NO: 567124 - RNA, 20 nt, Artificial Sequence
  Synthetic
ugaggguaaauggcgaacag

SEQ ID NO: 567125 - RNA, 21 nt, Artificial Sequence
  Synthetic
augaggguaaauggcgaacag

SEQ ID NO: 567126 - RNA, 22 nt, Artificial Sequence
  Synthetic
caugaggguaaauggcgaacag

SEQ ID NO: 567127 - RNA, 23 nt, Artificial Sequence
  Synthetic
gcaugaggguaaauggcgaacag

SEQ ID NO: 567128 - RNA, 24 nt, Artificial Sequence
  Synthetic
ugcaugaggguaaauggcgaacag

SEQ ID NO: 567129 - RNA, 18 nt, Artificial Sequence
  Synthetic
gaaaaggaaaaggaacag

SEQ ID NO: 567130 - RNA, 19 nt, Artificial Sequence
  Synthetic
ggaaaaggaaaaggaacag

SEQ ID NO: 567131 - RNA, 20 nt, Artificial Sequence
  Synthetic
aggaaaaggaaaaggaacag

SEQ ID NO: 567132 - RNA, 21 nt, Artificial Sequence
  Synthetic
aaggaaaaggaaaaggaacag

SEQ ID NO: 567133 - RNA, 22 nt, Artificial Sequence
  Synthetic
aaaggaaaaggaaaaggaacag

SEQ ID NO: 567134 - RNA, 23 nt, Artificial Sequence
  Synthetic
aaaaggaaaaggaaaaggaacag

SEQ ID NO: 567135 - RNA, 24 nt, Artificial Sequence
  Synthetic
gaaaaggaaaaggaaaaggaacag

SEQ ID NO: 567136 - RNA, 18 nt, Artificial Sequence
  Synthetic
aagauaaugcaugaacag

SEQ ID NO: 567137 - RNA, 19 nt, Artificial Sequence
  Synthetic
caagauaaugcaugaacag

SEQ ID NO: 567138 - RNA, 20 nt, Artificial Sequence
  Synthetic
acaagauaaugcaugaacag

SEQ ID NO: 567139 - RNA, 21 nt, Artificial Sequence
  Synthetic
uacaagauaaugcaugaacag

SEQ ID NO: 567140 - RNA, 22 nt, Artificial Sequence
  Synthetic
guacaagauaaugcaugaacag

SEQ ID NO: 567141 - RNA, 23 nt, Artificial Sequence
  Synthetic
uguacaagauaaugcaugaacag

SEQ ID NO: 567142 - RNA, 24 nt, Artificial Sequence
  Synthetic
cuguacaagauaaugcaugaacag

SEQ ID NO: 567143 - RNA, 18 nt, Artificial Sequence
  Synthetic
acauugugcccugaacag

SEQ ID NO: 567144 - RNA, 19 nt, Artificial Sequence
  Synthetic
aacauugugcccugaacag

SEQ ID NO: 567145 - RNA, 20 nt, Artificial Sequence
  Synthetic
gaacauugugcccugaacag

SEQ ID NO: 567146 - RNA, 21 nt, Artificial Sequence
  Synthetic
agaacauugugcccugaacag

SEQ ID NO: 567147 - RNA, 22 nt, Artificial Sequence
  Synthetic
cagaacauugugcccugaacag

SEQ ID NO: 567148 - RNA, 23 nt, Artificial Sequence
  Synthetic
acagaacauugugcccugaacag

SEQ ID NO: 567149 - RNA, 24 nt, Artificial Sequence
  Synthetic
uacagaacauugugcccugaacag

SEQ ID NO: 567150 - RNA, 18 nt, Artificial Sequence
  Synthetic
uuccggguagcugaacag

SEQ ID NO: 567151 - RNA, 19 nt, Artificial Sequence
  Synthetic
cuuccggguagcugaacag

SEQ ID NO: 567152 - RNA, 20 nt, Artificial Sequence
  Synthetic
gcuuccggguagcugaacag

SEQ ID NO: 567153 - RNA, 21 nt, Artificial Sequence
  Synthetic
agcuuccggguagcugaacag

SEQ ID NO: 567154 - RNA, 22 nt, Artificial Sequence
  Synthetic
gagcuuccggguagcugaacag

SEQ ID NO: 567155 - RNA, 23 nt, Artificial Sequence
  Synthetic
ugagcuuccggguagcugaacag

SEQ ID NO: 567156 - RNA, 24 nt, Artificial Sequence
  Synthetic
gugagcuuccggguagcugaacag

SEQ ID NO: 567157 - RNA, 18 nt, Artificial Sequence
  Synthetic
gggcaggaaaaauaacag

SEQ ID NO: 567158 - RNA, 19 nt, Artificial Sequence
  Synthetic
ggggcaggaaaaauaacag

SEQ ID NO: 567159 - RNA, 20 nt, Artificial Sequence
  Synthetic
gggggcaggaaaaauaacag

SEQ ID NO: 567160 - RNA, 21 nt, Artificial Sequence
  Synthetic
agggggcaggaaaaauaacag

SEQ ID NO: 567161 - RNA, 22 nt, Artificial Sequence
  Synthetic
uagggggcaggaaaaauaacag

SEQ ID NO: 567162 - RNA, 23 nt, Artificial Sequence
  Synthetic
uuagggggcaggaaaaauaacag

SEQ ID NO: 567163 - RNA, 24 nt, Artificial Sequence
  Synthetic
auuagggggcaggaaaaauaacag

SEQ ID NO: 567164 - RNA, 18 nt, Artificial Sequence
  Synthetic
accucaauacaauaacag

SEQ ID NO: 567165 - RNA, 19 nt, Artificial Sequence
  Synthetic
gaccucaauacaauaacag

SEQ ID NO: 567166 - RNA, 20 nt, Artificial Sequence
  Synthetic
agaccucaauacaauaacag

SEQ ID NO: 567167 - RNA, 21 nt, Artificial Sequence
  Synthetic
aagaccucaauacaauaacag

SEQ ID NO: 567168 - RNA, 22 nt, Artificial Sequence
  Synthetic
aaagaccucaauacaauaacag

SEQ ID NO: 567169 - RNA, 23 nt, Artificial Sequence
  Synthetic
gaaagaccucaauacaauaacag

SEQ ID NO: 567170 - RNA, 24 nt, Artificial Sequence
  Synthetic
agaaagaccucaauacaauaacag

SEQ ID NO: 567171 - RNA, 18 nt, Artificial Sequence
  Synthetic
auucgauggcaauaacag

SEQ ID NO: 567172 - RNA, 19 nt, Artificial Sequence
  Synthetic
aauucgauggcaauaacag

SEQ ID NO: 567173 - RNA, 20 nt, Artificial Sequence
  Synthetic
aaauucgauggcaauaacag

SEQ ID NO: 567174 - RNA, 21 nt, Artificial Sequence
  Synthetic
aaaauucgauggcaauaacag

SEQ ID NO: 567175 - RNA, 22 nt, Artificial Sequence
  Synthetic
aaaaauucgauggcaauaacag

SEQ ID NO: 567176 - RNA, 23 nt, Artificial Sequence
  Synthetic
uaaaaauucgauggcaauaacag

SEQ ID NO: 567177 - RNA, 24 nt, Artificial Sequence
  Synthetic
uuaaaaauucgauggcaauaacag

SEQ ID NO: 567178 - RNA, 18 nt, Artificial Sequence
  Synthetic
guaaugguucaauaacag

SEQ ID NO: 567179 - RNA, 19 nt, Artificial Sequence
  Synthetic
aguaaugguucaauaacag

SEQ ID NO: 567180 - RNA, 20 nt, Artificial Sequence
  Synthetic
gaguaaugguucaauaacag

SEQ ID NO: 567181 - RNA, 21 nt, Artificial Sequence
  Synthetic
ggaguaaugguucaauaacag

SEQ ID NO: 567182 - RNA, 22 nt, Artificial Sequence
  Synthetic
gggaguaaugguucaauaacag

SEQ ID NO: 567183 - RNA, 23 nt, Artificial Sequence
  Synthetic
agggaguaaugguucaauaacag

SEQ ID NO: 567184 - RNA, 24 nt, Artificial Sequence
  Synthetic
uagggaguaaugguucaauaacag

SEQ ID NO: 567185 - RNA, 18 nt, Artificial Sequence
  Synthetic
aaugaaaucagauaacag

SEQ ID NO: 567186 - RNA, 19 nt, Artificial Sequence
  Synthetic
aaaugaaaucagauaacag

SEQ ID NO: 567187 - RNA, 20 nt, Artificial Sequence
  Synthetic
aaaaugaaaucagauaacag

SEQ ID NO: 567188 - RNA, 21 nt, Artificial Sequence
  Synthetic
aaaaaugaaaucagauaacag

SEQ ID NO: 567189 - RNA, 22 nt, Artificial Sequence
  Synthetic
uaaaaaugaaaucagauaacag

SEQ ID NO: 567190 - RNA, 23 nt, Artificial Sequence
  Synthetic
uuaaaaaugaaaucagauaacag

SEQ ID NO: 567191 - RNA, 24 nt, Artificial Sequence
  Synthetic
uuuaaaaaugaaaucagauaacag

SEQ ID NO: 567192 - RNA, 18 nt, Artificial Sequence
  Synthetic
gagacacugugauaacag

SEQ ID NO: 567193 - RNA, 19 nt, Artificial Sequence
  Synthetic
ggagacacugugauaacag

SEQ ID NO: 567194 - RNA, 20 nt, Artificial Sequence
  Synthetic
aggagacacugugauaacag

SEQ ID NO: 567195 - RNA, 21 nt, Artificial Sequence
  Synthetic
uaggagacacugugauaacag

SEQ ID NO: 567196 - RNA, 22 nt, Artificial Sequence
  Synthetic
uuaggagacacugugauaacag

SEQ ID NO: 567197 - RNA, 23 nt, Artificial Sequence
  Synthetic
cuuaggagacacugugauaacag

SEQ ID NO: 567198 - RNA, 24 nt, Artificial Sequence
  Synthetic
gcuuaggagacacugugauaacag

SEQ ID NO: 567199 - RNA, 18 nt, Artificial Sequence
  Synthetic
uucucagcaaacuaacag

SEQ ID NO: 567200 - RNA, 19 nt, Artificial Sequence
  Synthetic
auucucagcaaacuaacag

SEQ ID NO: 567201 - RNA, 20 nt, Artificial Sequence
  Synthetic
cauucucagcaaacuaacag

SEQ ID NO: 567202 - RNA, 21 nt, Artificial Sequence
  Synthetic
ucauucucagcaaacuaacag

SEQ ID NO: 567203 - RNA, 22 nt, Artificial Sequence
  Synthetic
aucauucucagcaaacuaacag

SEQ ID NO: 567204 - RNA, 23 nt, Artificial Sequence
  Synthetic
caucauucucagcaaacuaacag

SEQ ID NO: 567205 - RNA, 24 nt, Artificial Sequence
  Synthetic
ccaucauucucagcaaacuaacag

SEQ ID NO: 567206 - RNA, 18 nt, Artificial Sequence
  Synthetic
auucacugccaguaacag

SEQ ID NO: 567207 - RNA, 19 nt, Artificial Sequence
  Synthetic
gauucacugccaguaacag

SEQ ID NO: 567208 - RNA, 20 nt, Artificial Sequence
  Synthetic
ggauucacugccaguaacag

SEQ ID NO: 567209 - RNA, 21 nt, Artificial Sequence
  Synthetic
uggauucacugccaguaacag

SEQ ID NO: 567210 - RNA, 22 nt, Artificial Sequence
  Synthetic
auggauucacugccaguaacag

SEQ ID NO: 567211 - RNA, 23 nt, Artificial Sequence
  Synthetic
uauggauucacugccaguaacag

SEQ ID NO: 567212 - RNA, 24 nt, Artificial Sequence
  Synthetic
guauggauucacugccaguaacag

SEQ ID NO: 567213 - RNA, 18 nt, Artificial Sequence
  Synthetic
uaauaauaauuguaacag

SEQ ID NO: 567214 - RNA, 19 nt, Artificial Sequence
  Synthetic
auaauaauaauuguaacag

SEQ ID NO: 567215 - RNA, 20 nt, Artificial Sequence
  Synthetic
aauaauaauaauuguaacag

SEQ ID NO: 567216 - RNA, 21 nt, Artificial Sequence
  Synthetic
caauaauaauaauuguaacag

SEQ ID NO: 567217 - RNA, 22 nt, Artificial Sequence
  Synthetic
acaauaauaauaauuguaacag

SEQ ID NO: 567218 - RNA, 23 nt, Artificial Sequence
  Synthetic
uacaauaauaauaauuguaacag

SEQ ID NO: 567219 - RNA, 24 nt, Artificial Sequence
  Synthetic
auacaauaauaauaauuguaacag

SEQ ID NO: 567220 - RNA, 18 nt, Artificial Sequence
  Synthetic
uuuagucuauuguaacag

SEQ ID NO: 567221 - RNA, 19 nt, Artificial Sequence
  Synthetic
guuuagucuauuguaacag

SEQ ID NO: 567222 - RNA, 20 nt, Artificial Sequence
  Synthetic
uguuuagucuauuguaacag

SEQ ID NO: 567223 - RNA, 21 nt, Artificial Sequence
  Synthetic
cuguuuagucuauuguaacag

SEQ ID NO: 567224 - RNA, 22 nt, Artificial Sequence
  Synthetic
ucuguuuagucuauuguaacag

SEQ ID NO: 567225 - RNA, 23 nt, Artificial Sequence
  Synthetic
uucuguuuagucuauuguaacag

SEQ ID NO: 567226 - RNA, 24 nt, Artificial Sequence
  Synthetic
cuucuguuuagucuauuguaacag

SEQ ID NO: 567227 - RNA, 18 nt, Artificial Sequence
  Synthetic
uaacucaauacuuaacag

SEQ ID NO: 567228 - RNA, 19 nt, Artificial Sequence
  Synthetic
auaacucaauacuuaacag

SEQ ID NO: 567229 - RNA, 20 nt, Artificial Sequence
  Synthetic
uauaacucaauacuuaacag

SEQ ID NO: 567230 - RNA, 21 nt, Artificial Sequence
  Synthetic
cuauaacucaauacuuaacag

SEQ ID NO: 567231 - RNA, 22 nt, Artificial Sequence
  Synthetic
ucuauaacucaauacuuaacag

SEQ ID NO: 567232 - RNA, 23 nt, Artificial Sequence
  Synthetic
aucuauaacucaauacuuaacag

SEQ ID NO: 567233 - RNA, 24 nt, Artificial Sequence
  Synthetic
aaucuauaacucaauacuuaacag

SEQ ID NO: 567234 - RNA, 18 nt, Artificial Sequence
  Synthetic
uuguaacuugguuaacag

SEQ ID NO: 567235 - RNA, 19 nt, Artificial Sequence
  Synthetic
uuuguaacuugguuaacag

SEQ ID NO: 567236 - RNA, 20 nt, Artificial Sequence
  Synthetic
cuuuguaacuugguuaacag

SEQ ID NO: 567237 - RNA, 21 nt, Artificial Sequence
  Synthetic
acuuuguaacuugguuaacag

SEQ ID NO: 567238 - RNA, 22 nt, Artificial Sequence
  Synthetic
cacuuuguaacuugguuaacag

SEQ ID NO: 567239 - RNA, 23 nt, Artificial Sequence
  Synthetic
acacuuuguaacuugguuaacag

SEQ ID NO: 567240 - RNA, 24 nt, Artificial Sequence
  Synthetic
gacacuuuguaacuugguuaacag

SEQ ID NO: 567241 - RNA, 18 nt, Artificial Sequence
  Synthetic
agaggaaacaaaacacag

SEQ ID NO: 567242 - RNA, 19 nt, Artificial Sequence
  Synthetic
uagaggaaacaaaacacag

SEQ ID NO: 567243 - RNA, 20 nt, Artificial Sequence
  Synthetic
cuagaggaaacaaaacacag

SEQ ID NO: 567244 - RNA, 21 nt, Artificial Sequence
  Synthetic
ucuagaggaaacaaaacacag

SEQ ID NO: 567245 - RNA, 22 nt, Artificial Sequence
  Synthetic
uucuagaggaaacaaaacacag

SEQ ID NO: 567246 - RNA, 23 nt, Artificial Sequence
  Synthetic
auucuagaggaaacaaaacacag

SEQ ID NO: 567247 - RNA, 24 nt, Artificial Sequence
  Synthetic
cauucuagaggaaacaaaacacag

SEQ ID NO: 567248 - RNA, 18 nt, Artificial Sequence
  Synthetic
gauauucagcaaacacag

SEQ ID NO: 567249 - RNA, 19 nt, Artificial Sequence
  Synthetic
agauauucagcaaacacag

SEQ ID NO: 567250 - RNA, 20 nt, Artificial Sequence
  Synthetic
cagauauucagcaaacacag

SEQ ID NO: 567251 - RNA, 21 nt, Artificial Sequence
  Synthetic
ucagauauucagcaaacacag

SEQ ID NO: 567252 - RNA, 22 nt, Artificial Sequence
  Synthetic
gucagauauucagcaaacacag

SEQ ID NO: 567253 - RNA, 23 nt, Artificial Sequence
  Synthetic
agucagauauucagcaaacacag

SEQ ID NO: 567254 - RNA, 24 nt, Artificial Sequence
  Synthetic
uagucagauauucagcaaacacag

SEQ ID NO: 567255 - RNA, 18 nt, Artificial Sequence
  Synthetic
uaaaagugagaaacacag

SEQ ID NO: 567256 - RNA, 19 nt, Artificial Sequence
  Synthetic
cuaaaagugagaaacacag

SEQ ID NO: 567257 - RNA, 20 nt, Artificial Sequence
  Synthetic
ccuaaaagugagaaacacag

SEQ ID NO: 567258 - RNA, 21 nt, Artificial Sequence
  Synthetic
gccuaaaagugagaaacacag

SEQ ID NO: 567259 - RNA, 22 nt, Artificial Sequence
  Synthetic
agccuaaaagugagaaacacag

SEQ ID NO: 567260 - RNA, 23 nt, Artificial Sequence
  Synthetic
uagccuaaaagugagaaacacag

SEQ ID NO: 567261 - RNA, 24 nt, Artificial Sequence
  Synthetic
uuagccuaaaagugagaaacacag

SEQ ID NO: 567262 - RNA, 18 nt, Artificial Sequence
  Synthetic
caaagguaauaaacacag

SEQ ID NO: 567263 - RNA, 19 nt, Artificial Sequence
  Synthetic
ccaaagguaauaaacacag

SEQ ID NO: 567264 - RNA, 20 nt, Artificial Sequence
  Synthetic
uccaaagguaauaaacacag

SEQ ID NO: 567265 - RNA, 21 nt, Artificial Sequence
  Synthetic
uuccaaagguaauaaacacag

SEQ ID NO: 567266 - RNA, 22 nt, Artificial Sequence
  Synthetic
cuuccaaagguaauaaacacag

SEQ ID NO: 567267 - RNA, 23 nt, Artificial Sequence
  Synthetic
acuuccaaagguaauaaacacag

SEQ ID NO: 567268 - RNA, 24 nt, Artificial Sequence
  Synthetic
uacuuccaaagguaauaaacacag

SEQ ID NO: 567269 - RNA, 18 nt, Artificial Sequence
  Synthetic
augggcuguuaaacacag

SEQ ID NO: 567270 - RNA, 19 nt, Artificial Sequence
  Synthetic
aaugggcuguuaaacacag

SEQ ID NO: 567271 - RNA, 20 nt, Artificial Sequence
  Synthetic
aaaugggcuguuaaacacag

SEQ ID NO: 567272 - RNA, 21 nt, Artificial Sequence
  Synthetic
aaaaugggcuguuaaacacag

SEQ ID NO: 567273 - RNA, 22 nt, Artificial Sequence
  Synthetic
uaaaaugggcuguuaaacacag

SEQ ID NO: 567274 - RNA, 23 nt, Artificial Sequence
  Synthetic
guaaaaugggcuguuaaacacag

SEQ ID NO: 567275 - RNA, 24 nt, Artificial Sequence
  Synthetic
uguaaaaugggcuguuaaacacag

SEQ ID NO: 567276 - RNA, 18 nt, Artificial Sequence
  Synthetic
ccagcagagagaacacag

SEQ ID NO: 567277 - RNA, 19 nt, Artificial Sequence
  Synthetic
uccagcagagagaacacag

SEQ ID NO: 567278 - RNA, 20 nt, Artificial Sequence
  Synthetic
auccagcagagagaacacag

SEQ ID NO: 567279 - RNA, 21 nt, Artificial Sequence
  Synthetic
uauccagcagagagaacacag

SEQ ID NO: 567280 - RNA, 22 nt, Artificial Sequence
  Synthetic
uuauccagcagagagaacacag

SEQ ID NO: 567281 - RNA, 23 nt, Artificial Sequence
  Synthetic
cuuauccagcagagagaacacag

SEQ ID NO: 567282 - RNA, 24 nt, Artificial Sequence
  Synthetic
gcuuauccagcagagagaacacag

SEQ ID NO: 567283 - RNA, 18 nt, Artificial Sequence
  Synthetic
cuagaaucuaacacacag

SEQ ID NO: 567284 - RNA, 19 nt, Artificial Sequence
  Synthetic
ccuagaaucuaacacacag

SEQ ID NO: 567285 - RNA, 20 nt, Artificial Sequence
  Synthetic
cccuagaaucuaacacacag

SEQ ID NO: 567286 - RNA, 21 nt, Artificial Sequence
  Synthetic
ucccuagaaucuaacacacag

SEQ ID NO: 567287 - RNA, 22 nt, Artificial Sequence
  Synthetic
aucccuagaaucuaacacacag

SEQ ID NO: 567288 - RNA, 23 nt, Artificial Sequence
  Synthetic
uaucccuagaaucuaacacacag

SEQ ID NO: 567289 - RNA, 24 nt, Artificial Sequence
  Synthetic
guaucccuagaaucuaacacacag

SEQ ID NO: 567290 - RNA, 18 nt, Artificial Sequence
  Synthetic
aucauucauggcacacag

SEQ ID NO: 567291 - RNA, 19 nt, Artificial Sequence
  Synthetic
gaucauucauggcacacag

SEQ ID NO: 567292 - RNA, 20 nt, Artificial Sequence
  Synthetic
ugaucauucauggcacacag

SEQ ID NO: 567293 - RNA, 21 nt, Artificial Sequence
  Synthetic
uugaucauucauggcacacag

SEQ ID NO: 567294 - RNA, 22 nt, Artificial Sequence
  Synthetic
uuugaucauucauggcacacag

SEQ ID NO: 567295 - RNA, 23 nt, Artificial Sequence
  Synthetic
auuugaucauucauggcacacag

SEQ ID NO: 567296 - RNA, 24 nt, Artificial Sequence
  Synthetic
gauuugaucauucauggcacacag

SEQ ID NO: 567297 - RNA, 18 nt, Artificial Sequence
  Synthetic
acuccuugcugcacacag

SEQ ID NO: 567298 - RNA, 19 nt, Artificial Sequence
  Synthetic
cacuccuugcugcacacag

SEQ ID NO: 567299 - RNA, 20 nt, Artificial Sequence
  Synthetic
ccacuccuugcugcacacag

SEQ ID NO: 567300 - RNA, 21 nt, Artificial Sequence
  Synthetic
cccacuccuugcugcacacag

SEQ ID NO: 567301 - RNA, 22 nt, Artificial Sequence
  Synthetic
ucccacuccuugcugcacacag

SEQ ID NO: 567302 - RNA, 23 nt, Artificial Sequence
  Synthetic
aucccacuccuugcugcacacag

SEQ ID NO: 567303 - RNA, 24 nt, Artificial Sequence
  Synthetic
aaucccacuccuugcugcacacag

SEQ ID NO: 567304 - RNA, 18 nt, Artificial Sequence
  Synthetic
cuuuuucucuagacacag

SEQ ID NO: 567305 - RNA, 19 nt, Artificial Sequence
  Synthetic
acuuuuucucuagacacag

SEQ ID NO: 567306 - RNA, 20 nt, Artificial Sequence
  Synthetic
cacuuuuucucuagacacag

SEQ ID NO: 567307 - RNA, 21 nt, Artificial Sequence
  Synthetic
ucacuuuuucucuagacacag

SEQ ID NO: 567308 - RNA, 22 nt, Artificial Sequence
  Synthetic
aucacuuuuucucuagacacag

SEQ ID NO: 567309 - RNA, 23 nt, Artificial Sequence
  Synthetic
uaucacuuuuucucuagacacag

SEQ ID NO: 567310 - RNA, 24 nt, Artificial Sequence
  Synthetic
uuaucacuuuuucucuagacacag

SEQ ID NO: 567311 - RNA, 18 nt, Artificial Sequence
  Synthetic
aaacaggagcugacacag

SEQ ID NO: 567312 - RNA, 19 nt, Artificial Sequence
  Synthetic
caaacaggagcugacacag

SEQ ID NO: 567313 - RNA, 20 nt, Artificial Sequence
  Synthetic
acaaacaggagcugacacag

SEQ ID NO: 567314 - RNA, 21 nt, Artificial Sequence
  Synthetic
uacaaacaggagcugacacag

SEQ ID NO: 567315 - RNA, 22 nt, Artificial Sequence
  Synthetic
uuacaaacaggagcugacacag

SEQ ID NO: 567316 - RNA, 23 nt, Artificial Sequence
  Synthetic
cuuacaaacaggagcugacacag

SEQ ID NO: 567317 - RNA, 24 nt, Artificial Sequence
  Synthetic
ccuuacaaacaggagcugacacag

SEQ ID NO: 567318 - RNA, 18 nt, Artificial Sequence
  Synthetic
gagucacaggugacacag

SEQ ID NO: 567319 - RNA, 19 nt, Artificial Sequence
  Synthetic
ggagucacaggugacacag

SEQ ID NO: 567320 - RNA, 20 nt, Artificial Sequence
  Synthetic
uggagucacaggugacacag

SEQ ID NO: 567321 - RNA, 21 nt, Artificial Sequence
  Synthetic
uuggagucacaggugacacag

SEQ ID NO: 567322 - RNA, 22 nt, Artificial Sequence
  Synthetic
guuggagucacaggugacacag

SEQ ID NO: 567323 - RNA, 23 nt, Artificial Sequence
  Synthetic
aguuggagucacaggugacacag

SEQ ID NO: 567324 - RNA, 24 nt, Artificial Sequence
  Synthetic
aaguuggagucacaggugacacag

SEQ ID NO: 567325 - RNA, 18 nt, Artificial Sequence
  Synthetic
gauaaaaauaauacacag

SEQ ID NO: 567326 - RNA, 19 nt, Artificial Sequence
  Synthetic
ugauaaaaauaauacacag

SEQ ID NO: 567327 - RNA, 20 nt, Artificial Sequence
  Synthetic
gugauaaaaauaauacacag

SEQ ID NO: 567328 - RNA, 21 nt, Artificial Sequence
  Synthetic
agugauaaaaauaauacacag

SEQ ID NO: 567329 - RNA, 22 nt, Artificial Sequence
  Synthetic
cagugauaaaaauaauacacag

SEQ ID NO: 567330 - RNA, 23 nt, Artificial Sequence
  Synthetic
gcagugauaaaaauaauacacag

SEQ ID NO: 567331 - RNA, 24 nt, Artificial Sequence
  Synthetic
agcagugauaaaaauaauacacag

SEQ ID NO: 567332 - RNA, 18 nt, Artificial Sequence
  Synthetic
agggaugcacauacacag

SEQ ID NO: 567333 - RNA, 19 nt, Artificial Sequence
  Synthetic
aagggaugcacauacacag

SEQ ID NO: 567334 - RNA, 20 nt, Artificial Sequence
  Synthetic
caagggaugcacauacacag

SEQ ID NO: 567335 - RNA, 21 nt, Artificial Sequence
  Synthetic
acaagggaugcacauacacag

SEQ ID NO: 567336 - RNA, 22 nt, Artificial Sequence
  Synthetic
uacaagggaugcacauacacag

SEQ ID NO: 567337 - RNA, 23 nt, Artificial Sequence
  Synthetic
cuacaagggaugcacauacacag

SEQ ID NO: 567338 - RNA, 24 nt, Artificial Sequence
  Synthetic
gcuacaagggaugcacauacacag

SEQ ID NO: 567339 - RNA, 18 nt, Artificial Sequence
  Synthetic
gaggugauauauacacag

SEQ ID NO: 567340 - RNA, 19 nt, Artificial Sequence
  Synthetic
agaggugauauauacacag

SEQ ID NO: 567341 - RNA, 20 nt, Artificial Sequence
  Synthetic
gagaggugauauauacacag

SEQ ID NO: 567342 - RNA, 21 nt, Artificial Sequence
  Synthetic
agagaggugauauauacacag

SEQ ID NO: 567343 - RNA, 22 nt, Artificial Sequence
  Synthetic
cagagaggugauauauacacag

SEQ ID NO: 567344 - RNA, 23 nt, Artificial Sequence
  Synthetic
ccagagaggugauauauacacag

SEQ ID NO: 567345 - RNA, 24 nt, Artificial Sequence
  Synthetic
accagagaggugauauauacacag

SEQ ID NO: 567346 - RNA, 18 nt, Artificial Sequence
  Synthetic
guuggggaaccuacacag

SEQ ID NO: 567347 - RNA, 19 nt, Artificial Sequence
  Synthetic
aguuggggaaccuacacag

SEQ ID NO: 567348 - RNA, 20 nt, Artificial Sequence
  Synthetic
uaguuggggaaccuacacag

SEQ ID NO: 567349 - RNA, 21 nt, Artificial Sequence
  Synthetic
guaguuggggaaccuacacag

SEQ ID NO: 567350 - RNA, 22 nt, Artificial Sequence
  Synthetic
aguaguuggggaaccuacacag

SEQ ID NO: 567351 - RNA, 23 nt, Artificial Sequence
  Synthetic
gaguaguuggggaaccuacacag

SEQ ID NO: 567352 - RNA, 24 nt, Artificial Sequence
  Synthetic
agaguaguuggggaaccuacacag

SEQ ID NO: 567353 - RNA, 18 nt, Artificial Sequence
  Synthetic
aacauuaugaguacacag

SEQ ID NO: 567354 - RNA, 19 nt, Artificial Sequence
  Synthetic
aaacauuaugaguacacag

SEQ ID NO: 567355 - RNA, 20 nt, Artificial Sequence
  Synthetic
aaaacauuaugaguacacag

SEQ ID NO: 567356 - RNA, 21 nt, Artificial Sequence
  Synthetic
uaaaacauuaugaguacacag

SEQ ID NO: 567357 - RNA, 22 nt, Artificial Sequence
  Synthetic
auaaaacauuaugaguacacag

SEQ ID NO: 567358 - RNA, 23 nt, Artificial Sequence
  Synthetic
uauaaaacauuaugaguacacag

SEQ ID NO: 567359 - RNA, 24 nt, Artificial Sequence
  Synthetic
uuauaaaacauuaugaguacacag

SEQ ID NO: 567360 - RNA, 18 nt, Artificial Sequence
  Synthetic
uaagugcucuguacacag

SEQ ID NO: 567361 - RNA, 19 nt, Artificial Sequence
  Synthetic
uuaagugcucuguacacag

SEQ ID NO: 567362 - RNA, 20 nt, Artificial Sequence
  Synthetic
uuuaagugcucuguacacag

SEQ ID NO: 567363 - RNA, 21 nt, Artificial Sequence
  Synthetic
uuuuaagugcucuguacacag

SEQ ID NO: 567364 - RNA, 22 nt, Artificial Sequence
  Synthetic
auuuuaagugcucuguacacag

SEQ ID NO: 567365 - RNA, 23 nt, Artificial Sequence
  Synthetic
aauuuuaagugcucuguacacag

SEQ ID NO: 567366 - RNA, 24 nt, Artificial Sequence
  Synthetic
aaauuuuaagugcucuguacacag

SEQ ID NO: 567367 - RNA, 18 nt, Artificial Sequence
  Synthetic
uuuauuuauaaaccacag

SEQ ID NO: 567368 - RNA, 19 nt, Artificial Sequence
  Synthetic
guuuauuuauaaaccacag

SEQ ID NO: 567369 - RNA, 20 nt, Artificial Sequence
  Synthetic
uguuuauuuauaaaccacag

SEQ ID NO: 567370 - RNA, 21 nt, Artificial Sequence
  Synthetic
auguuuauuuauaaaccacag

SEQ ID NO: 567371 - RNA, 22 nt, Artificial Sequence
  Synthetic
cauguuuauuuauaaaccacag

SEQ ID NO: 567372 - RNA, 23 nt, Artificial Sequence
  Synthetic
ucauguuuauuuauaaaccacag

SEQ ID NO: 567373 - RNA, 24 nt, Artificial Sequence
  Synthetic
gucauguuuauuuauaaaccacag

SEQ ID NO: 567374 - RNA, 18 nt, Artificial Sequence
  Synthetic
ugauucugccuaccacag

SEQ ID NO: 567375 - RNA, 19 nt, Artificial Sequence
  Synthetic
augauucugccuaccacag

SEQ ID NO: 567376 - RNA, 20 nt, Artificial Sequence
  Synthetic
caugauucugccuaccacag

SEQ ID NO: 567377 - RNA, 21 nt, Artificial Sequence
  Synthetic
ccaugauucugccuaccacag

SEQ ID NO: 567378 - RNA, 22 nt, Artificial Sequence
  Synthetic
cccaugauucugccuaccacag

SEQ ID NO: 567379 - RNA, 23 nt, Artificial Sequence
  Synthetic
gcccaugauucugccuaccacag

SEQ ID NO: 567380 - RNA, 24 nt, Artificial Sequence
  Synthetic
ggcccaugauucugccuaccacag

SEQ ID NO: 567381 - RNA, 18 nt, Artificial Sequence
  Synthetic
ccuucgagccacccacag

SEQ ID NO: 567382 - RNA, 19 nt, Artificial Sequence
  Synthetic
uccuucgagccacccacag

SEQ ID NO: 567383 - RNA, 20 nt, Artificial Sequence
  Synthetic
uuccuucgagccacccacag

SEQ ID NO: 567384 - RNA, 21 nt, Artificial Sequence
  Synthetic
auuccuucgagccacccacag

SEQ ID NO: 567385 - RNA, 22 nt, Artificial Sequence
  Synthetic
uauuccuucgagccacccacag

SEQ ID NO: 567386 - RNA, 23 nt, Artificial Sequence
  Synthetic
cuauuccuucgagccacccacag

SEQ ID NO: 567387 - RNA, 24 nt, Artificial Sequence
  Synthetic
ucuauuccuucgagccacccacag

SEQ ID NO: 567388 - RNA, 18 nt, Artificial Sequence
  Synthetic
aagcugccagacccacag

SEQ ID NO: 567389 - RNA, 19 nt, Artificial Sequence
  Synthetic
aaagcugccagacccacag

SEQ ID NO: 567390 - RNA, 20 nt, Artificial Sequence
  Synthetic
aaaagcugccagacccacag

SEQ ID NO: 567391 - RNA, 21 nt, Artificial Sequence
  Synthetic
gaaaagcugccagacccacag

SEQ ID NO: 567392 - RNA, 22 nt, Artificial Sequence
  Synthetic
agaaaagcugccagacccacag

SEQ ID NO: 567393 - RNA, 23 nt, Artificial Sequence
  Synthetic
cagaaaagcugccagacccacag

SEQ ID NO: 567394 - RNA, 24 nt, Artificial Sequence
  Synthetic
acagaaaagcugccagacccacag

SEQ ID NO: 567395 - RNA, 18 nt, Artificial Sequence
  Synthetic
cacuccuuguccccacag

SEQ ID NO: 567396 - RNA, 19 nt, Artificial Sequence
  Synthetic
ccacuccuuguccccacag

SEQ ID NO: 567397 - RNA, 20 nt, Artificial Sequence
  Synthetic
accacuccuuguccccacag

SEQ ID NO: 567398 - RNA, 21 nt, Artificial Sequence
  Synthetic
caccacuccuuguccccacag

SEQ ID NO: 567399 - RNA, 22 nt, Artificial Sequence
  Synthetic
ccaccacuccuuguccccacag

SEQ ID NO: 567400 - RNA, 23 nt, Artificial Sequence
  Synthetic
accaccacuccuuguccccacag

SEQ ID NO: 567401 - RNA, 24 nt, Artificial Sequence
  Synthetic
caccaccacuccuuguccccacag

SEQ ID NO: 567402 - RNA, 18 nt, Artificial Sequence
  Synthetic
ugacauguguucccacag

SEQ ID NO: 567403 - RNA, 19 nt, Artificial Sequence
  Synthetic
augacauguguucccacag

SEQ ID NO: 567404 - RNA, 20 nt, Artificial Sequence
  Synthetic
caugacauguguucccacag

SEQ ID NO: 567405 - RNA, 21 nt, Artificial Sequence
  Synthetic
ucaugacauguguucccacag

SEQ ID NO: 567406 - RNA, 22 nt, Artificial Sequence
  Synthetic
cucaugacauguguucccacag

SEQ ID NO: 567407 - RNA, 23 nt, Artificial Sequence
  Synthetic
gcucaugacauguguucccacag

SEQ ID NO: 567408 - RNA, 24 nt, Artificial Sequence
  Synthetic
ugcucaugacauguguucccacag

SEQ ID NO: 567409 - RNA, 18 nt, Artificial Sequence
  Synthetic
uugaaaaaaaagccacag

SEQ ID NO: 567410 - RNA, 19 nt, Artificial Sequence
  Synthetic
guugaaaaaaaagccacag

SEQ ID NO: 567411 - RNA, 20 nt, Artificial Sequence
  Synthetic
aguugaaaaaaaagccacag

SEQ ID NO: 567412 - RNA, 21 nt, Artificial Sequence
  Synthetic
caguugaaaaaaaagccacag

SEQ ID NO: 567413 - RNA, 22 nt, Artificial Sequence
  Synthetic
acaguugaaaaaaaagccacag

SEQ ID NO: 567414 - RNA, 23 nt, Artificial Sequence
  Synthetic
gacaguugaaaaaaaagccacag

SEQ ID NO: 567415 - RNA, 24 nt, Artificial Sequence
  Synthetic
agacaguugaaaaaaaagccacag

SEQ ID NO: 567416 - RNA, 18 nt, Artificial Sequence
  Synthetic
auccauaaaaggccacag

SEQ ID NO: 567417 - RNA, 19 nt, Artificial Sequence
  Synthetic
aauccauaaaaggccacag

SEQ ID NO: 567418 - RNA, 20 nt, Artificial Sequence
  Synthetic
uaauccauaaaaggccacag

SEQ ID NO: 567419 - RNA, 21 nt, Artificial Sequence
  Synthetic
auaauccauaaaaggccacag

SEQ ID NO: 567420 - RNA, 22 nt, Artificial Sequence
  Synthetic
gauaauccauaaaaggccacag

SEQ ID NO: 567421 - RNA, 23 nt, Artificial Sequence
  Synthetic
ggauaauccauaaaaggccacag

SEQ ID NO: 567422 - RNA, 24 nt, Artificial Sequence
  Synthetic
aggauaauccauaaaaggccacag

SEQ ID NO: 567423 - RNA, 18 nt, Artificial Sequence
  Synthetic
uucccgaagccuccacag

SEQ ID NO: 567424 - RNA, 19 nt, Artificial Sequence
  Synthetic
cuucccgaagccuccacag

SEQ ID NO: 567425 - RNA, 20 nt, Artificial Sequence
  Synthetic
gcuucccgaagccuccacag

SEQ ID NO: 567426 - RNA, 21 nt, Artificial Sequence
  Synthetic
agcuucccgaagccuccacag

SEQ ID NO: 567427 - RNA, 22 nt, Artificial Sequence
  Synthetic
aagcuucccgaagccuccacag

SEQ ID NO: 567428 - RNA, 23 nt, Artificial Sequence
  Synthetic
gaagcuucccgaagccuccacag

SEQ ID NO: 567429 - RNA, 24 nt, Artificial Sequence
  Synthetic
ggaagcuucccgaagccuccacag

SEQ ID NO: 567430 - RNA, 18 nt, Artificial Sequence
  Synthetic
auaaaccccucuccacag

SEQ ID NO: 567431 - RNA, 19 nt, Artificial Sequence
  Synthetic
uauaaaccccucuccacag

SEQ ID NO: 567432 - RNA, 20 nt, Artificial Sequence
  Synthetic
cuauaaaccccucuccacag

SEQ ID NO: 567433 - RNA, 21 nt, Artificial Sequence
  Synthetic
ucuauaaaccccucuccacag

SEQ ID NO: 567434 - RNA, 22 nt, Artificial Sequence
  Synthetic
uucuauaaaccccucuccacag

SEQ ID NO: 567435 - RNA, 23 nt, Artificial Sequence
  Synthetic
uuucuauaaaccccucuccacag

SEQ ID NO: 567436 - RNA, 24 nt, Artificial Sequence
  Synthetic
auuucuauaaaccccucuccacag

SEQ ID NO: 567437 - RNA, 18 nt, Artificial Sequence
  Synthetic
cuaccuacaauuccacag

SEQ ID NO: 567438 - RNA, 19 nt, Artificial Sequence
  Synthetic
ccuaccuacaauuccacag

SEQ ID NO: 567439 - RNA, 20 nt, Artificial Sequence
  Synthetic
uccuaccuacaauuccacag

SEQ ID NO: 567440 - RNA, 21 nt, Artificial Sequence
  Synthetic
auccuaccuacaauuccacag

SEQ ID NO: 567441 - RNA, 22 nt, Artificial Sequence
  Synthetic
gauccuaccuacaauuccacag

SEQ ID NO: 567442 - RNA, 23 nt, Artificial Sequence
  Synthetic
ugauccuaccuacaauuccacag

SEQ ID NO: 567443 - RNA, 24 nt, Artificial Sequence
  Synthetic
augauccuaccuacaauuccacag

SEQ ID NO: 567444 - RNA, 18 nt, Artificial Sequence
  Synthetic
acuguaaauguuccacag

SEQ ID NO: 567445 - RNA, 19 nt, Artificial Sequence
  Synthetic
aacuguaaauguuccacag

SEQ ID NO: 567446 - RNA, 20 nt, Artificial Sequence
  Synthetic
caacuguaaauguuccacag

SEQ ID NO: 567447 - RNA, 21 nt, Artificial Sequence
  Synthetic
acaacuguaaauguuccacag

SEQ ID NO: 567448 - RNA, 22 nt, Artificial Sequence
  Synthetic
cacaacuguaaauguuccacag

SEQ ID NO: 567449 - RNA, 23 nt, Artificial Sequence
  Synthetic
acacaacuguaaauguuccacag

SEQ ID NO: 567450 - RNA, 24 nt, Artificial Sequence
  Synthetic
uacacaacuguaaauguuccacag

SEQ ID NO: 567451 - RNA, 18 nt, Artificial Sequence
  Synthetic
uugggaguaaaagcacag

SEQ ID NO: 567452 - RNA, 19 nt, Artificial Sequence
  Synthetic
guugggaguaaaagcacag

SEQ ID NO: 567453 - RNA, 20 nt, Artificial Sequence
  Synthetic
uguugggaguaaaagcacag

SEQ ID NO: 567454 - RNA, 21 nt, Artificial Sequence
  Synthetic
uuguugggaguaaaagcacag

SEQ ID NO: 567455 - RNA, 22 nt, Artificial Sequence
  Synthetic
guuguugggaguaaaagcacag

SEQ ID NO: 567456 - RNA, 23 nt, Artificial Sequence
  Synthetic
aguuguugggaguaaaagcacag

SEQ ID NO: 567457 - RNA, 24 nt, Artificial Sequence
  Synthetic
uaguuguugggaguaaaagcacag

SEQ ID NO: 567458 - RNA, 18 nt, Artificial Sequence
  Synthetic
ucugagacuacagcacag

SEQ ID NO: 567459 - RNA, 19 nt, Artificial Sequence
  Synthetic
aucugagacuacagcacag

SEQ ID NO: 567460 - RNA, 20 nt, Artificial Sequence
  Synthetic
uaucugagacuacagcacag

SEQ ID NO: 567461 - RNA, 21 nt, Artificial Sequence
  Synthetic
uuaucugagacuacagcacag

SEQ ID NO: 567462 - RNA, 22 nt, Artificial Sequence
  Synthetic
auuaucugagacuacagcacag

SEQ ID NO: 567463 - RNA, 23 nt, Artificial Sequence
  Synthetic
uauuaucugagacuacagcacag

SEQ ID NO: 567464 - RNA, 24 nt, Artificial Sequence
  Synthetic
guauuaucugagacuacagcacag

SEQ ID NO: 567465 - RNA, 18 nt, Artificial Sequence
  Synthetic
acaucuucucaggcacag

SEQ ID NO: 567466 - RNA, 19 nt, Artificial Sequence
  Synthetic
cacaucuucucaggcacag

SEQ ID NO: 567467 - RNA, 20 nt, Artificial Sequence
  Synthetic
acacaucuucucaggcacag

SEQ ID NO: 567468 - RNA, 21 nt, Artificial Sequence
  Synthetic
cacacaucuucucaggcacag

SEQ ID NO: 567469 - RNA, 22 nt, Artificial Sequence
  Synthetic
ccacacaucuucucaggcacag

SEQ ID NO: 567470 - RNA, 23 nt, Artificial Sequence
  Synthetic
gccacacaucuucucaggcacag

SEQ ID NO: 567471 - RNA, 24 nt, Artificial Sequence
  Synthetic
ugccacacaucuucucaggcacag

SEQ ID NO: 567472 - RNA, 18 nt, Artificial Sequence
  Synthetic
cugagaaguguggcacag

SEQ ID NO: 567473 - RNA, 19 nt, Artificial Sequence
  Synthetic
ccugagaaguguggcacag

SEQ ID NO: 567474 - RNA, 20 nt, Artificial Sequence
  Synthetic
accugagaaguguggcacag

SEQ ID NO: 567475 - RNA, 21 nt, Artificial Sequence
  Synthetic
uaccugagaaguguggcacag

SEQ ID NO: 567476 - RNA, 22 nt, Artificial Sequence
  Synthetic
uuaccugagaaguguggcacag

SEQ ID NO: 567477 - RNA, 23 nt, Artificial Sequence
  Synthetic
uuuaccugagaaguguggcacag

SEQ ID NO: 567478 - RNA, 24 nt, Artificial Sequence
  Synthetic
uuuuaccugagaaguguggcacag

SEQ ID NO: 567479 - RNA, 18 nt, Artificial Sequence
  Synthetic
aacuuuaauacugcacag

SEQ ID NO: 567480 - RNA, 19 nt, Artificial Sequence
  Synthetic
aaacuuuaauacugcacag

SEQ ID NO: 567481 - RNA, 20 nt, Artificial Sequence
  Synthetic
uaaacuuuaauacugcacag

SEQ ID NO: 567482 - RNA, 21 nt, Artificial Sequence
  Synthetic
auaaacuuuaauacugcacag

SEQ ID NO: 567483 - RNA, 22 nt, Artificial Sequence
  Synthetic
aauaaacuuuaauacugcacag

SEQ ID NO: 567484 - RNA, 23 nt, Artificial Sequence
  Synthetic
aaauaaacuuuaauacugcacag

SEQ ID NO: 567485 - RNA, 24 nt, Artificial Sequence
  Synthetic
uaaauaaacuuuaauacugcacag

SEQ ID NO: 567486 - RNA, 18 nt, Artificial Sequence
  Synthetic
gccauaccuauugcacag

SEQ ID NO: 567487 - RNA, 19 nt, Artificial Sequence
  Synthetic
ggccauaccuauugcacag

SEQ ID NO: 567488 - RNA, 20 nt, Artificial Sequence
  Synthetic
uggccauaccuauugcacag

SEQ ID NO: 567489 - RNA, 21 nt, Artificial Sequence
  Synthetic
cuggccauaccuauugcacag

SEQ ID NO: 567490 - RNA, 22 nt, Artificial Sequence
  Synthetic
acuggccauaccuauugcacag

SEQ ID NO: 567491 - RNA, 23 nt, Artificial Sequence
  Synthetic
cacuggccauaccuauugcacag

SEQ ID NO: 567492 - RNA, 24 nt, Artificial Sequence
  Synthetic
ccacuggccauaccuauugcacag

SEQ ID NO: 567493 - RNA, 18 nt, Artificial Sequence
  Synthetic
augcauaacacaucacag

SEQ ID NO: 567494 - RNA, 19 nt, Artificial Sequence
  Synthetic
uaugcauaacacaucacag

SEQ ID NO: 567495 - RNA, 20 nt, Artificial Sequence
  Synthetic
guaugcauaacacaucacag

SEQ ID NO: 567496 - RNA, 21 nt, Artificial Sequence
  Synthetic
uguaugcauaacacaucacag

SEQ ID NO: 567497 - RNA, 22 nt, Artificial Sequence
  Synthetic
uuguaugcauaacacaucacag

SEQ ID NO: 567498 - RNA, 23 nt, Artificial Sequence
  Synthetic
auuguaugcauaacacaucacag

SEQ ID NO: 567499 - RNA, 24 nt, Artificial Sequence
  Synthetic
aauuguaugcauaacacaucacag

SEQ ID NO: 567500 - RNA, 18 nt, Artificial Sequence
  Synthetic
aauaagcagacaucacag

SEQ ID NO: 567501 - RNA, 19 nt, Artificial Sequence
  Synthetic
uaauaagcagacaucacag

SEQ ID NO: 567502 - RNA, 20 nt, Artificial Sequence
  Synthetic
guaauaagcagacaucacag

SEQ ID NO: 567503 - RNA, 21 nt, Artificial Sequence
  Synthetic
aguaauaagcagacaucacag

SEQ ID NO: 567504 - RNA, 22 nt, Artificial Sequence
  Synthetic
caguaauaagcagacaucacag

SEQ ID NO: 567505 - RNA, 23 nt, Artificial Sequence
  Synthetic
ucaguaauaagcagacaucacag

SEQ ID NO: 567506 - RNA, 24 nt, Artificial Sequence
  Synthetic
aucaguaauaagcagacaucacag

SEQ ID NO: 567507 - RNA, 18 nt, Artificial Sequence
  Synthetic
caguggauugcaucacag

SEQ ID NO: 567508 - RNA, 19 nt, Artificial Sequence
  Synthetic
acaguggauugcaucacag

SEQ ID NO: 567509 - RNA, 20 nt, Artificial Sequence
  Synthetic
cacaguggauugcaucacag

SEQ ID NO: 567510 - RNA, 21 nt, Artificial Sequence
  Synthetic
acacaguggauugcaucacag

SEQ ID NO: 567511 - RNA, 22 nt, Artificial Sequence
  Synthetic
cacacaguggauugcaucacag

SEQ ID NO: 567512 - RNA, 23 nt, Artificial Sequence
  Synthetic
acacacaguggauugcaucacag

SEQ ID NO: 567513 - RNA, 24 nt, Artificial Sequence
  Synthetic
uacacacaguggauugcaucacag

SEQ ID NO: 567514 - RNA, 18 nt, Artificial Sequence
  Synthetic
acaugacccagaucacag

SEQ ID NO: 567515 - RNA, 19 nt, Artificial Sequence
  Synthetic
gacaugacccagaucacag

SEQ ID NO: 567516 - RNA, 20 nt, Artificial Sequence
  Synthetic
agacaugacccagaucacag

SEQ ID NO: 567517 - RNA, 21 nt, Artificial Sequence
  Synthetic
gagacaugacccagaucacag

SEQ ID NO: 567518 - RNA, 22 nt, Artificial Sequence
  Synthetic
ugagacaugacccagaucacag

SEQ ID NO: 567519 - RNA, 23 nt, Artificial Sequence
  Synthetic
cugagacaugacccagaucacag

SEQ ID NO: 567520 - RNA, 24 nt, Artificial Sequence
  Synthetic
ccugagacaugacccagaucacag

SEQ ID NO: 567521 - RNA, 18 nt, Artificial Sequence
  Synthetic
augaagaugagaucacag

SEQ ID NO: 567522 - RNA, 19 nt, Artificial Sequence
  Synthetic
gaugaagaugagaucacag

SEQ ID NO: 567523 - RNA, 20 nt, Artificial Sequence
  Synthetic
ggaugaagaugagaucacag

SEQ ID NO: 567524 - RNA, 21 nt, Artificial Sequence
  Synthetic
uggaugaagaugagaucacag

SEQ ID NO: 567525 - RNA, 22 nt, Artificial Sequence
  Synthetic
guggaugaagaugagaucacag

SEQ ID NO: 567526 - RNA, 23 nt, Artificial Sequence
  Synthetic
cguggaugaagaugagaucacag

SEQ ID NO: 567527 - RNA, 24 nt, Artificial Sequence
  Synthetic
ccguggaugaagaugagaucacag

SEQ ID NO: 567528 - RNA, 18 nt, Artificial Sequence
  Synthetic
ugaaaaugaggaucacag

SEQ ID NO: 567529 - RNA, 19 nt, Artificial Sequence
  Synthetic
cugaaaaugaggaucacag

SEQ ID NO: 567530 - RNA, 20 nt, Artificial Sequence
  Synthetic
ucugaaaaugaggaucacag

SEQ ID NO: 567531 - RNA, 21 nt, Artificial Sequence
  Synthetic
cucugaaaaugaggaucacag

SEQ ID NO: 567532 - RNA, 22 nt, Artificial Sequence
  Synthetic
ccucugaaaaugaggaucacag

SEQ ID NO: 567533 - RNA, 23 nt, Artificial Sequence
  Synthetic
accucugaaaaugaggaucacag

SEQ ID NO: 567534 - RNA, 24 nt, Artificial Sequence
  Synthetic
aaccucugaaaaugaggaucacag

SEQ ID NO: 567535 - RNA, 18 nt, Artificial Sequence
  Synthetic
gaacugacacuaucacag

SEQ ID NO: 567536 - RNA, 19 nt, Artificial Sequence
  Synthetic
ggaacugacacuaucacag

SEQ ID NO: 567537 - RNA, 20 nt, Artificial Sequence
  Synthetic
uggaacugacacuaucacag

SEQ ID NO: 567538 - RNA, 21 nt, Artificial Sequence
  Synthetic
auggaacugacacuaucacag

SEQ ID NO: 567539 - RNA, 22 nt, Artificial Sequence
  Synthetic
aauggaacugacacuaucacag

SEQ ID NO: 567540 - RNA, 23 nt, Artificial Sequence
  Synthetic
aaauggaacugacacuaucacag

SEQ ID NO: 567541 - RNA, 24 nt, Artificial Sequence
  Synthetic
uaaauggaacugacacuaucacag

SEQ ID NO: 567542 - RNA, 18 nt, Artificial Sequence
  Synthetic
ugaagagucaacucacag

SEQ ID NO: 567543 - RNA, 19 nt, Artificial Sequence
  Synthetic
augaagagucaacucacag

SEQ ID NO: 567544 - RNA, 20 nt, Artificial Sequence
  Synthetic
uaugaagagucaacucacag

SEQ ID NO: 567545 - RNA, 21 nt, Artificial Sequence
  Synthetic
auaugaagagucaacucacag

SEQ ID NO: 567546 - RNA, 22 nt, Artificial Sequence
  Synthetic
uauaugaagagucaacucacag

SEQ ID NO: 567547 - RNA, 23 nt, Artificial Sequence
  Synthetic
auauaugaagagucaacucacag

SEQ ID NO: 567548 - RNA, 24 nt, Artificial Sequence
  Synthetic
aauauaugaagagucaacucacag

SEQ ID NO: 567549 - RNA, 18 nt, Artificial Sequence
  Synthetic
gcauacucucacucacag

SEQ ID NO: 567550 - RNA, 19 nt, Artificial Sequence
  Synthetic
ugcauacucucacucacag

SEQ ID NO: 567551 - RNA, 20 nt, Artificial Sequence
  Synthetic
cugcauacucucacucacag

SEQ ID NO: 567552 - RNA, 21 nt, Artificial Sequence
  Synthetic
acugcauacucucacucacag

SEQ ID NO: 567553 - RNA, 22 nt, Artificial Sequence
  Synthetic
cacugcauacucucacucacag

SEQ ID NO: 567554 - RNA, 23 nt, Artificial Sequence
  Synthetic
acacugcauacucucacucacag

SEQ ID NO: 567555 - RNA, 24 nt, Artificial Sequence
  Synthetic
aacacugcauacucucacucacag

SEQ ID NO: 567556 - RNA, 18 nt, Artificial Sequence
  Synthetic
gcauauucucacucacag

SEQ ID NO: 567557 - RNA, 19 nt, Artificial Sequence
  Synthetic
cgcauauucucacucacag

SEQ ID NO: 567558 - RNA, 20 nt, Artificial Sequence
  Synthetic
ccgcauauucucacucacag

SEQ ID NO: 567559 - RNA, 21 nt, Artificial Sequence
  Synthetic
accgcauauucucacucacag

SEQ ID NO: 567560 - RNA, 22 nt, Artificial Sequence
  Synthetic
caccgcauauucucacucacag

SEQ ID NO: 567561 - RNA, 23 nt, Artificial Sequence
  Synthetic
acaccgcauauucucacucacag

SEQ ID NO: 567562 - RNA, 24 nt, Artificial Sequence
  Synthetic
aacaccgcauauucucacucacag

SEQ ID NO: 567563 - RNA, 18 nt, Artificial Sequence
  Synthetic
gcuuuauacgggucacag

SEQ ID NO: 567564 - RNA, 19 nt, Artificial Sequence
  Synthetic
agcuuuauacgggucacag

SEQ ID NO: 567565 - RNA, 20 nt, Artificial Sequence
  Synthetic
gagcuuuauacgggucacag

SEQ ID NO: 567566 - RNA, 21 nt, Artificial Sequence
  Synthetic
ugagcuuuauacgggucacag

SEQ ID NO: 567567 - RNA, 22 nt, Artificial Sequence
  Synthetic
uugagcuuuauacgggucacag

SEQ ID NO: 567568 - RNA, 23 nt, Artificial Sequence
  Synthetic
uuugagcuuuauacgggucacag

SEQ ID NO: 567569 - RNA, 24 nt, Artificial Sequence
  Synthetic
uuuugagcuuuauacgggucacag

SEQ ID NO: 567570 - RNA, 18 nt, Artificial Sequence
  Synthetic
caugagaaugggucacag

SEQ ID NO: 567571 - RNA, 19 nt, Artificial Sequence
  Synthetic
ccaugagaaugggucacag

SEQ ID NO: 567572 - RNA, 20 nt, Artificial Sequence
  Synthetic
cccaugagaaugggucacag

SEQ ID NO: 567573 - RNA, 21 nt, Artificial Sequence
  Synthetic
ccccaugagaaugggucacag

SEQ ID NO: 567574 - RNA, 22 nt, Artificial Sequence
  Synthetic
uccccaugagaaugggucacag

SEQ ID NO: 567575 - RNA, 23 nt, Artificial Sequence
  Synthetic
uuccccaugagaaugggucacag

SEQ ID NO: 567576 - RNA, 24 nt, Artificial Sequence
  Synthetic
uuuccccaugagaaugggucacag

SEQ ID NO: 567577 - RNA, 18 nt, Artificial Sequence
  Synthetic
acugcugugcugucacag

SEQ ID NO: 567578 - RNA, 19 nt, Artificial Sequence
  Synthetic
aacugcugugcugucacag

SEQ ID NO: 567579 - RNA, 20 nt, Artificial Sequence
  Synthetic
uaacugcugugcugucacag

SEQ ID NO: 567580 - RNA, 21 nt, Artificial Sequence
  Synthetic
cuaacugcugugcugucacag

SEQ ID NO: 567581 - RNA, 22 nt, Artificial Sequence
  Synthetic
acuaacugcugugcugucacag

SEQ ID NO: 567582 - RNA, 23 nt, Artificial Sequence
  Synthetic
aacuaacugcugugcugucacag

SEQ ID NO: 567583 - RNA, 24 nt, Artificial Sequence
  Synthetic
gaacuaacugcugugcugucacag

SEQ ID NO: 567584 - RNA, 18 nt, Artificial Sequence
  Synthetic
caugguucuuugucacag

SEQ ID NO: 567585 - RNA, 19 nt, Artificial Sequence
  Synthetic
acaugguucuuugucacag

SEQ ID NO: 567586 - RNA, 20 nt, Artificial Sequence
  Synthetic
aacaugguucuuugucacag

SEQ ID NO: 567587 - RNA, 21 nt, Artificial Sequence
  Synthetic
uaacaugguucuuugucacag

SEQ ID NO: 567588 - RNA, 22 nt, Artificial Sequence
  Synthetic
uuaacaugguucuuugucacag

SEQ ID NO: 567589 - RNA, 23 nt, Artificial Sequence
  Synthetic
cuuaacaugguucuuugucacag

SEQ ID NO: 567590 - RNA, 24 nt, Artificial Sequence
  Synthetic
ucuuaacaugguucuuugucacag

SEQ ID NO: 567591 - RNA, 18 nt, Artificial Sequence
  Synthetic
gacugaaaucauucacag

SEQ ID NO: 567592 - RNA, 19 nt, Artificial Sequence
  Synthetic
ugacugaaaucauucacag

SEQ ID NO: 567593 - RNA, 20 nt, Artificial Sequence
  Synthetic
gugacugaaaucauucacag

SEQ ID NO: 567594 - RNA, 21 nt, Artificial Sequence
  Synthetic
ggugacugaaaucauucacag

SEQ ID NO: 567595 - RNA, 22 nt, Artificial Sequence
  Synthetic
aggugacugaaaucauucacag

SEQ ID NO: 567596 - RNA, 23 nt, Artificial Sequence
  Synthetic
aaggugacugaaaucauucacag

SEQ ID NO: 567597 - RNA, 24 nt, Artificial Sequence
  Synthetic
uaaggugacugaaaucauucacag

SEQ ID NO: 567598 - RNA, 18 nt, Artificial Sequence
  Synthetic
uuacauuccauuucacag

SEQ ID NO: 567599 - RNA, 19 nt, Artificial Sequence
  Synthetic
guuacauuccauuucacag

SEQ ID NO: 567600 - RNA, 20 nt, Artificial Sequence
  Synthetic
uguuacauuccauuucacag

SEQ ID NO: 567601 - RNA, 21 nt, Artificial Sequence
  Synthetic
guguuacauuccauuucacag

SEQ ID NO: 567602 - RNA, 22 nt, Artificial Sequence
  Synthetic
gguguuacauuccauuucacag

SEQ ID NO: 567603 - RNA, 23 nt, Artificial Sequence
  Synthetic
agguguuacauuccauuucacag

SEQ ID NO: 567604 - RNA, 24 nt, Artificial Sequence
  Synthetic
cagguguuacauuccauuucacag

SEQ ID NO: 567605 - RNA, 18 nt, Artificial Sequence
  Synthetic
ucgucccuacuuucacag

SEQ ID NO: 567606 - RNA, 19 nt, Artificial Sequence
  Synthetic
cucgucccuacuuucacag

SEQ ID NO: 567607 - RNA, 20 nt, Artificial Sequence
  Synthetic
ucucgucccuacuuucacag

SEQ ID NO: 567608 - RNA, 21 nt, Artificial Sequence
  Synthetic
aucucgucccuacuuucacag

SEQ ID NO: 567609 - RNA, 22 nt, Artificial Sequence
  Synthetic
caucucgucccuacuuucacag

SEQ ID NO: 567610 - RNA, 23 nt, Artificial Sequence
  Synthetic
ucaucucgucccuacuuucacag

SEQ ID NO: 567611 - RNA, 24 nt, Artificial Sequence
  Synthetic
cucaucucgucccuacuuucacag

SEQ ID NO: 567612 - RNA, 18 nt, Artificial Sequence
  Synthetic
uuucugaaaaaaagacag

SEQ ID NO: 567613 - RNA, 19 nt, Artificial Sequence
  Synthetic
auuucugaaaaaaagacag

SEQ ID NO: 567614 - RNA, 20 nt, Artificial Sequence
  Synthetic
cauuucugaaaaaaagacag

SEQ ID NO: 567615 - RNA, 21 nt, Artificial Sequence
  Synthetic
gcauuucugaaaaaaagacag

SEQ ID NO: 567616 - RNA, 22 nt, Artificial Sequence
  Synthetic
ggcauuucugaaaaaaagacag

SEQ ID NO: 567617 - RNA, 23 nt, Artificial Sequence
  Synthetic
aggcauuucugaaaaaaagacag

SEQ ID NO: 567618 - RNA, 24 nt, Artificial Sequence
  Synthetic
aaggcauuucugaaaaaaagacag

SEQ ID NO: 567619 - RNA, 18 nt, Artificial Sequence
  Synthetic
gcuuaagccagaagacag

SEQ ID NO: 567620 - RNA, 19 nt, Artificial Sequence
  Synthetic
agcuuaagccagaagacag

SEQ ID NO: 567621 - RNA, 20 nt, Artificial Sequence
  Synthetic
cagcuuaagccagaagacag

SEQ ID NO: 567622 - RNA, 21 nt, Artificial Sequence
  Synthetic
ucagcuuaagccagaagacag

SEQ ID NO: 567623 - RNA, 22 nt, Artificial Sequence
  Synthetic
cucagcuuaagccagaagacag

SEQ ID NO: 567624 - RNA, 23 nt, Artificial Sequence
  Synthetic
ucucagcuuaagccagaagacag

SEQ ID NO: 567625 - RNA, 24 nt, Artificial Sequence
  Synthetic
aucucagcuuaagccagaagacag

SEQ ID NO: 567626 - RNA, 18 nt, Artificial Sequence
  Synthetic
ugguauuugagaagacag

SEQ ID NO: 567627 - RNA, 19 nt, Artificial Sequence
  Synthetic
uugguauuugagaagacag

SEQ ID NO: 567628 - RNA, 20 nt, Artificial Sequence
  Synthetic
cuugguauuugagaagacag

SEQ ID NO: 567629 - RNA, 21 nt, Artificial Sequence
  Synthetic
gcuugguauuugagaagacag

SEQ ID NO: 567630 - RNA, 22 nt, Artificial Sequence
  Synthetic
agcuugguauuugagaagacag

SEQ ID NO: 567631 - RNA, 23 nt, Artificial Sequence
  Synthetic
cagcuugguauuugagaagacag

SEQ ID NO: 567632 - RNA, 24 nt, Artificial Sequence
  Synthetic
gcagcuugguauuugagaagacag

SEQ ID NO: 567633 - RNA, 18 nt, Artificial Sequence
  Synthetic
gggguacagggaagacag

SEQ ID NO: 567634 - RNA, 19 nt, Artificial Sequence
  Synthetic
agggguacagggaagacag

SEQ ID NO: 567635 - RNA, 20 nt, Artificial Sequence
  Synthetic
uagggguacagggaagacag

SEQ ID NO: 567636 - RNA, 21 nt, Artificial Sequence
  Synthetic
cuagggguacagggaagacag

SEQ ID NO: 567637 - RNA, 22 nt, Artificial Sequence
  Synthetic
ucuagggguacagggaagacag

SEQ ID NO: 567638 - RNA, 23 nt, Artificial Sequence
  Synthetic
gucuagggguacagggaagacag

SEQ ID NO: 567639 - RNA, 24 nt, Artificial Sequence
  Synthetic
ugucuagggguacagggaagacag

SEQ ID NO: 567640 - RNA, 18 nt, Artificial Sequence
  Synthetic
agacuucggugaagacag

SEQ ID NO: 567641 - RNA, 19 nt, Artificial Sequence
  Synthetic
uagacuucggugaagacag

SEQ ID NO: 567642 - RNA, 20 nt, Artificial Sequence
  Synthetic
auagacuucggugaagacag

SEQ ID NO: 567643 - RNA, 21 nt, Artificial Sequence
  Synthetic
uauagacuucggugaagacag

SEQ ID NO: 567644 - RNA, 22 nt, Artificial Sequence
  Synthetic
uuauagacuucggugaagacag

SEQ ID NO: 567645 - RNA, 23 nt, Artificial Sequence
  Synthetic
auuauagacuucggugaagacag

SEQ ID NO: 567646 - RNA, 24 nt, Artificial Sequence
  Synthetic
gauuauagacuucggugaagacag

SEQ ID NO: 567647 - RNA, 18 nt, Artificial Sequence
  Synthetic
uauucgauuguaagacag

SEQ ID NO: 567648 - RNA, 19 nt, Artificial Sequence
  Synthetic
auauucgauuguaagacag

SEQ ID NO: 567649 - RNA, 20 nt, Artificial Sequence
  Synthetic
cauauucgauuguaagacag

SEQ ID NO: 567650 - RNA, 21 nt, Artificial Sequence
  Synthetic
acauauucgauuguaagacag

SEQ ID NO: 567651 - RNA, 22 nt, Artificial Sequence
  Synthetic
uacauauucgauuguaagacag

SEQ ID NO: 567652 - RNA, 23 nt, Artificial Sequence
  Synthetic
uuacauauucgauuguaagacag

SEQ ID NO: 567653 - RNA, 24 nt, Artificial Sequence
  Synthetic
cuuacauauucgauuguaagacag

SEQ ID NO: 567654 - RNA, 18 nt, Artificial Sequence
  Synthetic
uagaccauggacagacag

SEQ ID NO: 567655 - RNA, 19 nt, Artificial Sequence
  Synthetic
auagaccauggacagacag

SEQ ID NO: 567656 - RNA, 20 nt, Artificial Sequence
  Synthetic
aauagaccauggacagacag

SEQ ID NO: 567657 - RNA, 21 nt, Artificial Sequence
  Synthetic
caauagaccauggacagacag

SEQ ID NO: 567658 - RNA, 22 nt, Artificial Sequence
  Synthetic
ccaauagaccauggacagacag

SEQ ID NO: 567659 - RNA, 23 nt, Artificial Sequence
  Synthetic
accaauagaccauggacagacag

SEQ ID NO: 567660 - RNA, 24 nt, Artificial Sequence
  Synthetic
gaccaauagaccauggacagacag

SEQ ID NO: 567661 - RNA, 18 nt, Artificial Sequence
  Synthetic
uuuauauguuccagacag

SEQ ID NO: 567662 - RNA, 19 nt, Artificial Sequence
  Synthetic
auuuauauguuccagacag

SEQ ID NO: 567663 - RNA, 20 nt, Artificial Sequence
  Synthetic
aauuuauauguuccagacag

SEQ ID NO: 567664 - RNA, 21 nt, Artificial Sequence
  Synthetic
aaauuuauauguuccagacag

SEQ ID NO: 567665 - RNA, 22 nt, Artificial Sequence
  Synthetic
caaauuuauauguuccagacag

SEQ ID NO: 567666 - RNA, 23 nt, Artificial Sequence
  Synthetic
ucaaauuuauauguuccagacag

SEQ ID NO: 567667 - RNA, 24 nt, Artificial Sequence
  Synthetic
uucaaauuuauauguuccagacag

SEQ ID NO: 567668 - RNA, 18 nt, Artificial Sequence
  Synthetic
acuaacauuagcagacag

SEQ ID NO: 567669 - RNA, 19 nt, Artificial Sequence
  Synthetic
gacuaacauuagcagacag

SEQ ID NO: 567670 - RNA, 20 nt, Artificial Sequence
  Synthetic
ggacuaacauuagcagacag

SEQ ID NO: 567671 - RNA, 21 nt, Artificial Sequence
  Synthetic
aggacuaacauuagcagacag

SEQ ID NO: 567672 - RNA, 22 nt, Artificial Sequence
  Synthetic
aaggacuaacauuagcagacag

SEQ ID NO: 567673 - RNA, 23 nt, Artificial Sequence
  Synthetic
gaaggacuaacauuagcagacag

SEQ ID NO: 567674 - RNA, 24 nt, Artificial Sequence
  Synthetic
ugaaggacuaacauuagcagacag

SEQ ID NO: 567675 - RNA, 18 nt, Artificial Sequence
  Synthetic
auuuguucacgcagacag

SEQ ID NO: 567676 - RNA, 19 nt, Artificial Sequence
  Synthetic
cauuuguucacgcagacag

SEQ ID NO: 567677 - RNA, 20 nt, Artificial Sequence
  Synthetic
acauuuguucacgcagacag

SEQ ID NO: 567678 - RNA, 21 nt, Artificial Sequence
  Synthetic
gacauuuguucacgcagacag

SEQ ID NO: 567679 - RNA, 22 nt, Artificial Sequence
  Synthetic
agacauuuguucacgcagacag

SEQ ID NO: 567680 - RNA, 23 nt, Artificial Sequence
  Synthetic
gagacauuuguucacgcagacag

SEQ ID NO: 567681 - RNA, 24 nt, Artificial Sequence
  Synthetic
agagacauuuguucacgcagacag

SEQ ID NO: 567682 - RNA, 18 nt, Artificial Sequence
  Synthetic
agaguaucaaucagacag

SEQ ID NO: 567683 - RNA, 19 nt, Artificial Sequence
  Synthetic
gagaguaucaaucagacag

SEQ ID NO: 567684 - RNA, 20 nt, Artificial Sequence
  Synthetic
agagaguaucaaucagacag

SEQ ID NO: 567685 - RNA, 21 nt, Artificial Sequence
  Synthetic
gagagaguaucaaucagacag

SEQ ID NO: 567686 - RNA, 22 nt, Artificial Sequence
  Synthetic
ggagagaguaucaaucagacag

SEQ ID NO: 567687 - RNA, 23 nt, Artificial Sequence
  Synthetic
aggagagaguaucaaucagacag

SEQ ID NO: 567688 - RNA, 24 nt, Artificial Sequence
  Synthetic
aaggagagaguaucaaucagacag

SEQ ID NO: 567689 - RNA, 18 nt, Artificial Sequence
  Synthetic
agaaguuacuucagacag

SEQ ID NO: 567690 - RNA, 19 nt, Artificial Sequence
  Synthetic
cagaaguuacuucagacag

SEQ ID NO: 567691 - RNA, 20 nt, Artificial Sequence
  Synthetic
ucagaaguuacuucagacag

SEQ ID NO: 567692 - RNA, 21 nt, Artificial Sequence
  Synthetic
uucagaaguuacuucagacag

SEQ ID NO: 567693 - RNA, 22 nt, Artificial Sequence
  Synthetic
auucagaaguuacuucagacag

SEQ ID NO: 567694 - RNA, 23 nt, Artificial Sequence
  Synthetic
aauucagaaguuacuucagacag

SEQ ID NO: 567695 - RNA, 24 nt, Artificial Sequence
  Synthetic
aaauucagaaguuacuucagacag

SEQ ID NO: 567696 - RNA, 18 nt, Artificial Sequence
  Synthetic
aaagggcauuucagacag

SEQ ID NO: 567697 - RNA, 19 nt, Artificial Sequence
  Synthetic
aaaagggcauuucagacag

SEQ ID NO: 567698 - RNA, 20 nt, Artificial Sequence
  Synthetic
aaaaagggcauuucagacag

SEQ ID NO: 567699 - RNA, 21 nt, Artificial Sequence
  Synthetic
gaaaaagggcauuucagacag

SEQ ID NO: 567700 - RNA, 22 nt, Artificial Sequence
  Synthetic
ggaaaaagggcauuucagacag

SEQ ID NO: 567701 - RNA, 23 nt, Artificial Sequence
  Synthetic
uggaaaaagggcauuucagacag

SEQ ID NO: 567702 - RNA, 24 nt, Artificial Sequence
  Synthetic
guggaaaaagggcauuucagacag

SEQ ID NO: 567703 - RNA, 18 nt, Artificial Sequence
  Synthetic
uaacaggauuucagacag

SEQ ID NO: 567704 - RNA, 19 nt, Artificial Sequence
  Synthetic
guaacaggauuucagacag

SEQ ID NO: 567705 - RNA, 20 nt, Artificial Sequence
  Synthetic
gguaacaggauuucagacag

SEQ ID NO: 567706 - RNA, 21 nt, Artificial Sequence
  Synthetic
ggguaacaggauuucagacag

SEQ ID NO: 567707 - RNA, 22 nt, Artificial Sequence
  Synthetic
uggguaacaggauuucagacag

SEQ ID NO: 567708 - RNA, 23 nt, Artificial Sequence
  Synthetic
uuggguaacaggauuucagacag

SEQ ID NO: 567709 - RNA, 24 nt, Artificial Sequence
  Synthetic
auuggguaacaggauuucagacag

SEQ ID NO: 567710 - RNA, 18 nt, Artificial Sequence
  Synthetic
aaucagaagcagagacag

SEQ ID NO: 567711 - RNA, 19 nt, Artificial Sequence
  Synthetic
uaaucagaagcagagacag

SEQ ID NO: 567712 - RNA, 20 nt, Artificial Sequence
  Synthetic
auaaucagaagcagagacag

SEQ ID NO: 567713 - RNA, 21 nt, Artificial Sequence
  Synthetic
uauaaucagaagcagagacag

SEQ ID NO: 567714 - RNA, 22 nt, Artificial Sequence
  Synthetic
uuauaaucagaagcagagacag

SEQ ID NO: 567715 - RNA, 23 nt, Artificial Sequence
  Synthetic
auuauaaucagaagcagagacag

SEQ ID NO: 567716 - RNA, 24 nt, Artificial Sequence
  Synthetic
gauuauaaucagaagcagagacag

SEQ ID NO: 567717 - RNA, 18 nt, Artificial Sequence
  Synthetic
aggaaauaagagagacag

SEQ ID NO: 567718 - RNA, 19 nt, Artificial Sequence
  Synthetic
uaggaaauaagagagacag

SEQ ID NO: 567719 - RNA, 20 nt, Artificial Sequence
  Synthetic
auaggaaauaagagagacag

SEQ ID NO: 567720 - RNA, 21 nt, Artificial Sequence
  Synthetic
aauaggaaauaagagagacag

SEQ ID NO: 567721 - RNA, 22 nt, Artificial Sequence
  Synthetic
aaauaggaaauaagagagacag

SEQ ID NO: 567722 - RNA, 23 nt, Artificial Sequence
  Synthetic
gaaauaggaaauaagagagacag

SEQ ID NO: 567723 - RNA, 24 nt, Artificial Sequence
  Synthetic
agaaauaggaaauaagagagacag

SEQ ID NO: 567724 - RNA, 18 nt, Artificial Sequence
  Synthetic
ugaauuuauuagagacag

SEQ ID NO: 567725 - RNA, 19 nt, Artificial Sequence
  Synthetic
augaauuuauuagagacag

SEQ ID NO: 567726 - RNA, 20 nt, Artificial Sequence
  Synthetic
aaugaauuuauuagagacag

SEQ ID NO: 567727 - RNA, 21 nt, Artificial Sequence
  Synthetic
caaugaauuuauuagagacag

SEQ ID NO: 567728 - RNA, 22 nt, Artificial Sequence
  Synthetic
ccaaugaauuuauuagagacag

SEQ ID NO: 567729 - RNA, 23 nt, Artificial Sequence
  Synthetic
gccaaugaauuuauuagagacag

SEQ ID NO: 567730 - RNA, 24 nt, Artificial Sequence
  Synthetic
ugccaaugaauuuauuagagacag

SEQ ID NO: 567731 - RNA, 18 nt, Artificial Sequence
  Synthetic
aagcaaacaacgagacag

SEQ ID NO: 567732 - RNA, 19 nt, Artificial Sequence
  Synthetic
aaagcaaacaacgagacag

SEQ ID NO: 567733 - RNA, 20 nt, Artificial Sequence
  Synthetic
caaagcaaacaacgagacag

SEQ ID NO: 567734 - RNA, 21 nt, Artificial Sequence
  Synthetic
ucaaagcaaacaacgagacag

SEQ ID NO: 567735 - RNA, 22 nt, Artificial Sequence
  Synthetic
uucaaagcaaacaacgagacag

SEQ ID NO: 567736 - RNA, 23 nt, Artificial Sequence
  Synthetic
uuucaaagcaaacaacgagacag

SEQ ID NO: 567737 - RNA, 24 nt, Artificial Sequence
  Synthetic
uuuucaaagcaaacaacgagacag

SEQ ID NO: 567738 - RNA, 18 nt, Artificial Sequence
  Synthetic
cacacuagugggagacag

SEQ ID NO: 567739 - RNA, 19 nt, Artificial Sequence
  Synthetic
acacacuagugggagacag

SEQ ID NO: 567740 - RNA, 20 nt, Artificial Sequence
  Synthetic
gacacacuagugggagacag

SEQ ID NO: 567741 - RNA, 21 nt, Artificial Sequence
  Synthetic
agacacacuagugggagacag

SEQ ID NO: 567742 - RNA, 22 nt, Artificial Sequence
  Synthetic
gagacacacuagugggagacag

SEQ ID NO: 567743 - RNA, 23 nt, Artificial Sequence
  Synthetic
ugagacacacuagugggagacag

SEQ ID NO: 567744 - RNA, 24 nt, Artificial Sequence
  Synthetic
augagacacacuagugggagacag

SEQ ID NO: 567745 - RNA, 18 nt, Artificial Sequence
  Synthetic
agauuuguugggagacag

SEQ ID NO: 567746 - RNA, 19 nt, Artificial Sequence
  Synthetic
gagauuuguugggagacag

SEQ ID NO: 567747 - RNA, 20 nt, Artificial Sequence
  Synthetic
ggagauuuguugggagacag

SEQ ID NO: 567748 - RNA, 21 nt, Artificial Sequence
  Synthetic
uggagauuuguugggagacag

SEQ ID NO: 567749 - RNA, 22 nt, Artificial Sequence
  Synthetic
cuggagauuuguugggagacag

SEQ ID NO: 567750 - RNA, 23 nt, Artificial Sequence
  Synthetic
gcuggagauuuguugggagacag

SEQ ID NO: 567751 - RNA, 24 nt, Artificial Sequence
  Synthetic
ugcuggagauuuguugggagacag

SEQ ID NO: 567752 - RNA, 18 nt, Artificial Sequence
  Synthetic
accaaaagagugagacag

SEQ ID NO: 567753 - RNA, 19 nt, Artificial Sequence
  Synthetic
aaccaaaagagugagacag

SEQ ID NO: 567754 - RNA, 20 nt, Artificial Sequence
  Synthetic
aaaccaaaagagugagacag

SEQ ID NO: 567755 - RNA, 21 nt, Artificial Sequence
  Synthetic
aaaaccaaaagagugagacag

SEQ ID NO: 567756 - RNA, 22 nt, Artificial Sequence
  Synthetic
aaaaaccaaaagagugagacag

SEQ ID NO: 567757 - RNA, 23 nt, Artificial Sequence
  Synthetic
gaaaaaccaaaagagugagacag

SEQ ID NO: 567758 - RNA, 24 nt, Artificial Sequence
  Synthetic
ugaaaaaccaaaagagugagacag

SEQ ID NO: 567759 - RNA, 18 nt, Artificial Sequence
  Synthetic
ggcagaucugugagacag

SEQ ID NO: 567760 - RNA, 19 nt, Artificial Sequence
  Synthetic
uggcagaucugugagacag

SEQ ID NO: 567761 - RNA, 20 nt, Artificial Sequence
  Synthetic
auggcagaucugugagacag

SEQ ID NO: 567762 - RNA, 21 nt, Artificial Sequence
  Synthetic
gauggcagaucugugagacag

SEQ ID NO: 567763 - RNA, 22 nt, Artificial Sequence
  Synthetic
ggauggcagaucugugagacag

SEQ ID NO: 567764 - RNA, 23 nt, Artificial Sequence
  Synthetic
aggauggcagaucugugagacag

SEQ ID NO: 567765 - RNA, 24 nt, Artificial Sequence
  Synthetic
aaggauggcagaucugugagacag

SEQ ID NO: 567766 - RNA, 18 nt, Artificial Sequence
  Synthetic
uaugaacuauugagacag

SEQ ID NO: 567767 - RNA, 19 nt, Artificial Sequence
  Synthetic
cuaugaacuauugagacag

SEQ ID NO: 567768 - RNA, 20 nt, Artificial Sequence
  Synthetic
ucuaugaacuauugagacag

SEQ ID NO: 567769 - RNA, 21 nt, Artificial Sequence
  Synthetic
aucuaugaacuauugagacag

SEQ ID NO: 567770 - RNA, 22 nt, Artificial Sequence
  Synthetic
uaucuaugaacuauugagacag

SEQ ID NO: 567771 - RNA, 23 nt, Artificial Sequence
  Synthetic
auaucuaugaacuauugagacag

SEQ ID NO: 567772 - RNA, 24 nt, Artificial Sequence
  Synthetic
cauaucuaugaacuauugagacag

SEQ ID NO: 567773 - RNA, 18 nt, Artificial Sequence
  Synthetic
gguccaccaaauagacag

SEQ ID NO: 567774 - RNA, 19 nt, Artificial Sequence
  Synthetic
ugguccaccaaauagacag

SEQ ID NO: 567775 - RNA, 20 nt, Artificial Sequence
  Synthetic
cugguccaccaaauagacag

SEQ ID NO: 567776 - RNA, 21 nt, Artificial Sequence
  Synthetic
gcugguccaccaaauagacag

SEQ ID NO: 567777 - RNA, 22 nt, Artificial Sequence
  Synthetic
ggcugguccaccaaauagacag

SEQ ID NO: 567778 - RNA, 23 nt, Artificial Sequence
  Synthetic
uggcugguccaccaaauagacag

SEQ ID NO: 567779 - RNA, 24 nt, Artificial Sequence
  Synthetic
cuggcugguccaccaaauagacag

SEQ ID NO: 567780 - RNA, 18 nt, Artificial Sequence
  Synthetic
uuuaaaagagcuagacag

SEQ ID NO: 567781 - RNA, 19 nt, Artificial Sequence
  Synthetic
cuuuaaaagagcuagacag

SEQ ID NO: 567782 - RNA, 20 nt, Artificial Sequence
  Synthetic
gcuuuaaaagagcuagacag

SEQ ID NO: 567783 - RNA, 21 nt, Artificial Sequence
  Synthetic
ugcuuuaaaagagcuagacag

SEQ ID NO: 567784 - RNA, 22 nt, Artificial Sequence
  Synthetic
augcuuuaaaagagcuagacag

SEQ ID NO: 567785 - RNA, 23 nt, Artificial Sequence
  Synthetic
aaugcuuuaaaagagcuagacag

SEQ ID NO: 567786 - RNA, 24 nt, Artificial Sequence
  Synthetic
uaaugcuuuaaaagagcuagacag

SEQ ID NO: 567787 - RNA, 18 nt, Artificial Sequence
  Synthetic
acaauuucaauuagacag

SEQ ID NO: 567788 - RNA, 19 nt, Artificial Sequence
  Synthetic
cacaauuucaauuagacag

SEQ ID NO: 567789 - RNA, 20 nt, Artificial Sequence
  Synthetic
acacaauuucaauuagacag

SEQ ID NO: 567790 - RNA, 21 nt, Artificial Sequence
  Synthetic
aacacaauuucaauuagacag

SEQ ID NO: 567791 - RNA, 22 nt, Artificial Sequence
  Synthetic
aaacacaauuucaauuagacag

SEQ ID NO: 567792 - RNA, 23 nt, Artificial Sequence
  Synthetic
gaaacacaauuucaauuagacag

SEQ ID NO: 567793 - RNA, 24 nt, Artificial Sequence
  Synthetic
ggaaacacaauuucaauuagacag

SEQ ID NO: 567794 - RNA, 18 nt, Artificial Sequence
  Synthetic
aaaguuccaguuagacag

SEQ ID NO: 567795 - RNA, 19 nt, Artificial Sequence
  Synthetic
caaaguuccaguuagacag

SEQ ID NO: 567796 - RNA, 20 nt, Artificial Sequence
  Synthetic
acaaaguuccaguuagacag

SEQ ID NO: 567797 - RNA, 21 nt, Artificial Sequence
  Synthetic
uacaaaguuccaguuagacag

SEQ ID NO: 567798 - RNA, 22 nt, Artificial Sequence
  Synthetic
guacaaaguuccaguuagacag

SEQ ID NO: 567799 - RNA, 23 nt, Artificial Sequence
  Synthetic
gguacaaaguuccaguuagacag

SEQ ID NO: 567800 - RNA, 24 nt, Artificial Sequence
  Synthetic
ggguacaaaguuccaguuagacag

SEQ ID NO: 567801 - RNA, 18 nt, Artificial Sequence
  Synthetic
aagaggaagacacgacag

SEQ ID NO: 567802 - RNA, 19 nt, Artificial Sequence
  Synthetic
aaagaggaagacacgacag

SEQ ID NO: 567803 - RNA, 20 nt, Artificial Sequence
  Synthetic
aaaagaggaagacacgacag

SEQ ID NO: 567804 - RNA, 21 nt, Artificial Sequence
  Synthetic
gaaaagaggaagacacgacag

SEQ ID NO: 567805 - RNA, 22 nt, Artificial Sequence
  Synthetic
ggaaaagaggaagacacgacag

SEQ ID NO: 567806 - RNA, 23 nt, Artificial Sequence
  Synthetic
aggaaaagaggaagacacgacag

SEQ ID NO: 567807 - RNA, 24 nt, Artificial Sequence
  Synthetic
aaggaaaagaggaagacacgacag

SEQ ID NO: 567808 - RNA, 18 nt, Artificial Sequence
  Synthetic
gucuuuuacuugcgacag

SEQ ID NO: 567809 - RNA, 19 nt, Artificial Sequence
  Synthetic
ugucuuuuacuugcgacag

SEQ ID NO: 567810 - RNA, 20 nt, Artificial Sequence
  Synthetic
uugucuuuuacuugcgacag

SEQ ID NO: 567811 - RNA, 21 nt, Artificial Sequence
  Synthetic
uuugucuuuuacuugcgacag

SEQ ID NO: 567812 - RNA, 22 nt, Artificial Sequence
  Synthetic
uuuugucuuuuacuugcgacag

SEQ ID NO: 567813 - RNA, 23 nt, Artificial Sequence
  Synthetic
auuuugucuuuuacuugcgacag

SEQ ID NO: 567814 - RNA, 24 nt, Artificial Sequence
  Synthetic
aauuuugucuuuuacuugcgacag

SEQ ID NO: 567815 - RNA, 18 nt, Artificial Sequence
  Synthetic
ggagguccuacaggacag

SEQ ID NO: 567816 - RNA, 19 nt, Artificial Sequence
  Synthetic
uggagguccuacaggacag

SEQ ID NO: 567817 - RNA, 20 nt, Artificial Sequence
  Synthetic
uuggagguccuacaggacag

SEQ ID NO: 567818 - RNA, 21 nt, Artificial Sequence
  Synthetic
cuuggagguccuacaggacag

SEQ ID NO: 567819 - RNA, 22 nt, Artificial Sequence
  Synthetic
ccuuggagguccuacaggacag

SEQ ID NO: 567820 - RNA, 23 nt, Artificial Sequence
  Synthetic
accuuggagguccuacaggacag

SEQ ID NO: 567821 - RNA, 24 nt, Artificial Sequence
  Synthetic
caccuuggagguccuacaggacag

SEQ ID NO: 567822 - RNA, 18 nt, Artificial Sequence
  Synthetic
cauaaguugguaggacag

SEQ ID NO: 567823 - RNA, 19 nt, Artificial Sequence
  Synthetic
acauaaguugguaggacag

SEQ ID NO: 567824 - RNA, 20 nt, Artificial Sequence
  Synthetic
aacauaaguugguaggacag

SEQ ID NO: 567825 - RNA, 21 nt, Artificial Sequence
  Synthetic
aaacauaaguugguaggacag

SEQ ID NO: 567826 - RNA, 22 nt, Artificial Sequence
  Synthetic
uaaacauaaguugguaggacag

SEQ ID NO: 567827 - RNA, 23 nt, Artificial Sequence
  Synthetic
auaaacauaaguugguaggacag

SEQ ID NO: 567828 - RNA, 24 nt, Artificial Sequence
  Synthetic
aauaaacauaaguugguaggacag

SEQ ID NO: 567829 - RNA, 18 nt, Artificial Sequence
  Synthetic
acacuaacaaacggacag

SEQ ID NO: 567830 - RNA, 19 nt, Artificial Sequence
  Synthetic
aacacuaacaaacggacag

SEQ ID NO: 567831 - RNA, 20 nt, Artificial Sequence
  Synthetic
gaacacuaacaaacggacag

SEQ ID NO: 567832 - RNA, 21 nt, Artificial Sequence
  Synthetic
ugaacacuaacaaacggacag

SEQ ID NO: 567833 - RNA, 22 nt, Artificial Sequence
  Synthetic
gugaacacuaacaaacggacag

SEQ ID NO: 567834 - RNA, 23 nt, Artificial Sequence
  Synthetic
agugaacacuaacaaacggacag

SEQ ID NO: 567835 - RNA, 24 nt, Artificial Sequence
  Synthetic
aagugaacacuaacaaacggacag

SEQ ID NO: 567836 - RNA, 18 nt, Artificial Sequence
  Synthetic
gugugccuaucgggacag

SEQ ID NO: 567837 - RNA, 19 nt, Artificial Sequence
  Synthetic
ugugugccuaucgggacag

SEQ ID NO: 567838 - RNA, 20 nt, Artificial Sequence
  Synthetic
gugugugccuaucgggacag

SEQ ID NO: 567839 - RNA, 21 nt, Artificial Sequence
  Synthetic
ggugugugccuaucgggacag

SEQ ID NO: 567840 - RNA, 22 nt, Artificial Sequence
  Synthetic
aggugugugccuaucgggacag

SEQ ID NO: 567841 - RNA, 23 nt, Artificial Sequence
  Synthetic
caggugugugccuaucgggacag

SEQ ID NO: 567842 - RNA, 24 nt, Artificial Sequence
  Synthetic
acaggugugugccuaucgggacag

SEQ ID NO: 567843 - RNA, 18 nt, Artificial Sequence
  Synthetic
agggauaaacugggacag

SEQ ID NO: 567844 - RNA, 19 nt, Artificial Sequence
  Synthetic
cagggauaaacugggacag

SEQ ID NO: 567845 - RNA, 20 nt, Artificial Sequence
  Synthetic
acagggauaaacugggacag

SEQ ID NO: 567846 - RNA, 21 nt, Artificial Sequence
  Synthetic
aacagggauaaacugggacag

SEQ ID NO: 567847 - RNA, 22 nt, Artificial Sequence
  Synthetic
uaacagggauaaacugggacag

SEQ ID NO: 567848 - RNA, 23 nt, Artificial Sequence
  Synthetic
auaacagggauaaacugggacag

SEQ ID NO: 567849 - RNA, 24 nt, Artificial Sequence
  Synthetic
aauaacagggauaaacugggacag

SEQ ID NO: 567850 - RNA, 18 nt, Artificial Sequence
  Synthetic
auuagccccacaugacag

SEQ ID NO: 567851 - RNA, 19 nt, Artificial Sequence
  Synthetic
uauuagccccacaugacag

SEQ ID NO: 567852 - RNA, 20 nt, Artificial Sequence
  Synthetic
uuauuagccccacaugacag

SEQ ID NO: 567853 - RNA, 21 nt, Artificial Sequence
  Synthetic
auuauuagccccacaugacag

SEQ ID NO: 567854 - RNA, 22 nt, Artificial Sequence
  Synthetic
uauuauuagccccacaugacag

SEQ ID NO: 567855 - RNA, 23 nt, Artificial Sequence
  Synthetic
cuauuauuagccccacaugacag

SEQ ID NO: 567856 - RNA, 24 nt, Artificial Sequence
  Synthetic
acuauuauuagccccacaugacag

SEQ ID NO: 567857 - RNA, 18 nt, Artificial Sequence
  Synthetic
uaauuccccagaugacag

SEQ ID NO: 567858 - RNA, 19 nt, Artificial Sequence
  Synthetic
guaauuccccagaugacag

SEQ ID NO: 567859 - RNA, 20 nt, Artificial Sequence
  Synthetic
aguaauuccccagaugacag

SEQ ID NO: 567860 - RNA, 21 nt, Artificial Sequence
  Synthetic
aaguaauuccccagaugacag

SEQ ID NO: 567861 - RNA, 22 nt, Artificial Sequence
  Synthetic
uaaguaauuccccagaugacag

SEQ ID NO: 567862 - RNA, 23 nt, Artificial Sequence
  Synthetic
uuaaguaauuccccagaugacag

SEQ ID NO: 567863 - RNA, 24 nt, Artificial Sequence
  Synthetic
uuuaaguaauuccccagaugacag

SEQ ID NO: 567864 - RNA, 18 nt, Artificial Sequence
  Synthetic
uaugaauacugaugacag

SEQ ID NO: 567865 - RNA, 19 nt, Artificial Sequence
  Synthetic
cuaugaauacugaugacag

SEQ ID NO: 567866 - RNA, 20 nt, Artificial Sequence
  Synthetic
ucuaugaauacugaugacag

SEQ ID NO: 567867 - RNA, 21 nt, Artificial Sequence
  Synthetic
uucuaugaauacugaugacag

SEQ ID NO: 567868 - RNA, 22 nt, Artificial Sequence
  Synthetic
uuucuaugaauacugaugacag

SEQ ID NO: 567869 - RNA, 23 nt, Artificial Sequence
  Synthetic
cuuucuaugaauacugaugacag

SEQ ID NO: 567870 - RNA, 24 nt, Artificial Sequence
  Synthetic
ucuuucuaugaauacugaugacag

SEQ ID NO: 567871 - RNA, 18 nt, Artificial Sequence
  Synthetic
ucuuucaaaaacugacag

SEQ ID NO: 567872 - RNA, 19 nt, Artificial Sequence
  Synthetic
cucuuucaaaaacugacag

SEQ ID NO: 567873 - RNA, 20 nt, Artificial Sequence
  Synthetic
ucucuuucaaaaacugacag

SEQ ID NO: 567874 - RNA, 21 nt, Artificial Sequence
  Synthetic
uucucuuucaaaaacugacag

SEQ ID NO: 567875 - RNA, 22 nt, Artificial Sequence
  Synthetic
uuucucuuucaaaaacugacag

SEQ ID NO: 567876 - RNA, 23 nt, Artificial Sequence
  Synthetic
auuucucuuucaaaaacugacag

SEQ ID NO: 567877 - RNA, 24 nt, Artificial Sequence
  Synthetic
gauuucucuuucaaaaacugacag

SEQ ID NO: 567878 - RNA, 18 nt, Artificial Sequence
  Synthetic
cuauuuauucacugacag

SEQ ID NO: 567879 - RNA, 19 nt, Artificial Sequence
  Synthetic
ucuauuuauucacugacag

SEQ ID NO: 567880 - RNA, 20 nt, Artificial Sequence
  Synthetic
uucuauuuauucacugacag

SEQ ID NO: 567881 - RNA, 21 nt, Artificial Sequence
  Synthetic
uuucuauuuauucacugacag

SEQ ID NO: 567882 - RNA, 22 nt, Artificial Sequence
  Synthetic
uuuucuauuuauucacugacag

SEQ ID NO: 567883 - RNA, 23 nt, Artificial Sequence
  Synthetic
auuuucuauuuauucacugacag

SEQ ID NO: 567884 - RNA, 24 nt, Artificial Sequence
  Synthetic
uauuuucuauuuauucacugacag

SEQ ID NO: 567885 - RNA, 18 nt, Artificial Sequence
  Synthetic
gcccagacggccugacag

SEQ ID NO: 567886 - RNA, 19 nt, Artificial Sequence
  Synthetic
agcccagacggccugacag

SEQ ID NO: 567887 - RNA, 20 nt, Artificial Sequence
  Synthetic
uagcccagacggccugacag

SEQ ID NO: 567888 - RNA, 21 nt, Artificial Sequence
  Synthetic
uuagcccagacggccugacag

SEQ ID NO: 567889 - RNA, 22 nt, Artificial Sequence
  Synthetic
uuuagcccagacggccugacag

SEQ ID NO: 567890 - RNA, 23 nt, Artificial Sequence
  Synthetic
uuuuagcccagacggccugacag

SEQ ID NO: 567891 - RNA, 24 nt, Artificial Sequence
  Synthetic
cuuuuagcccagacggccugacag

SEQ ID NO: 567892 - RNA, 18 nt, Artificial Sequence
  Synthetic
auuuaagguaucugacag

SEQ ID NO: 567893 - RNA, 19 nt, Artificial Sequence
  Synthetic
gauuuaagguaucugacag

SEQ ID NO: 567894 - RNA, 20 nt, Artificial Sequence
  Synthetic
ugauuuaagguaucugacag

SEQ ID NO: 567895 - RNA, 21 nt, Artificial Sequence
  Synthetic
augauuuaagguaucugacag

SEQ ID NO: 567896 - RNA, 22 nt, Artificial Sequence
  Synthetic
gaugauuuaagguaucugacag

SEQ ID NO: 567897 - RNA, 23 nt, Artificial Sequence
  Synthetic
agaugauuuaagguaucugacag

SEQ ID NO: 567898 - RNA, 24 nt, Artificial Sequence
  Synthetic
gagaugauuuaagguaucugacag

SEQ ID NO: 567899 - RNA, 18 nt, Artificial Sequence
  Synthetic
cauuuuuaggcuugacag

SEQ ID NO: 567900 - RNA, 19 nt, Artificial Sequence
  Synthetic
acauuuuuaggcuugacag

SEQ ID NO: 567901 - RNA, 20 nt, Artificial Sequence
  Synthetic
cacauuuuuaggcuugacag

SEQ ID NO: 567902 - RNA, 21 nt, Artificial Sequence
  Synthetic
acacauuuuuaggcuugacag

SEQ ID NO: 567903 - RNA, 22 nt, Artificial Sequence
  Synthetic
uacacauuuuuaggcuugacag

SEQ ID NO: 567904 - RNA, 23 nt, Artificial Sequence
  Synthetic
auacacauuuuuaggcuugacag

SEQ ID NO: 567905 - RNA, 24 nt, Artificial Sequence
  Synthetic
aauacacauuuuuaggcuugacag

SEQ ID NO: 567906 - RNA, 18 nt, Artificial Sequence
  Synthetic
acaauuucaguuugacag

SEQ ID NO: 567907 - RNA, 19 nt, Artificial Sequence
  Synthetic
cacaauuucaguuugacag

SEQ ID NO: 567908 - RNA, 20 nt, Artificial Sequence
  Synthetic
acacaauuucaguuugacag

SEQ ID NO: 567909 - RNA, 21 nt, Artificial Sequence
  Synthetic
uacacaauuucaguuugacag

SEQ ID NO: 567910 - RNA, 22 nt, Artificial Sequence
  Synthetic
auacacaauuucaguuugacag

SEQ ID NO: 567911 - RNA, 23 nt, Artificial Sequence
  Synthetic
gauacacaauuucaguuugacag

SEQ ID NO: 567912 - RNA, 24 nt, Artificial Sequence
  Synthetic
agauacacaauuucaguuugacag

SEQ ID NO: 567913 - RNA, 18 nt, Artificial Sequence
  Synthetic
gaugccaugaaaauacag

SEQ ID NO: 567914 - RNA, 19 nt, Artificial Sequence
  Synthetic
agaugccaugaaaauacag

SEQ ID NO: 567915 - RNA, 20 nt, Artificial Sequence
  Synthetic
aagaugccaugaaaauacag

SEQ ID NO: 567916 - RNA, 21 nt, Artificial Sequence
  Synthetic
aaagaugccaugaaaauacag

SEQ ID NO: 567917 - RNA, 22 nt, Artificial Sequence
  Synthetic
caaagaugccaugaaaauacag

SEQ ID NO: 567918 - RNA, 23 nt, Artificial Sequence
  Synthetic
acaaagaugccaugaaaauacag

SEQ ID NO: 567919 - RNA, 24 nt, Artificial Sequence
  Synthetic
gacaaagaugccaugaaaauacag

SEQ ID NO: 567920 - RNA, 18 nt, Artificial Sequence
  Synthetic
gagcagcuguaaauacag

SEQ ID NO: 567921 - RNA, 19 nt, Artificial Sequence
  Synthetic
ggagcagcuguaaauacag

SEQ ID NO: 567922 - RNA, 20 nt, Artificial Sequence
  Synthetic
aggagcagcuguaaauacag

SEQ ID NO: 567923 - RNA, 21 nt, Artificial Sequence
  Synthetic
gaggagcagcuguaaauacag

SEQ ID NO: 567924 - RNA, 22 nt, Artificial Sequence
  Synthetic
ugaggagcagcuguaaauacag

SEQ ID NO: 567925 - RNA, 23 nt, Artificial Sequence
  Synthetic
augaggagcagcuguaaauacag

SEQ ID NO: 567926 - RNA, 24 nt, Artificial Sequence
  Synthetic
gaugaggagcagcuguaaauacag

SEQ ID NO: 567927 - RNA, 18 nt, Artificial Sequence
  Synthetic
augcaguauggaauacag

SEQ ID NO: 567928 - RNA, 19 nt, Artificial Sequence
  Synthetic
uaugcaguauggaauacag

SEQ ID NO: 567929 - RNA, 20 nt, Artificial Sequence
  Synthetic
auaugcaguauggaauacag

SEQ ID NO: 567930 - RNA, 21 nt, Artificial Sequence
  Synthetic
aauaugcaguauggaauacag

SEQ ID NO: 567931 - RNA, 22 nt, Artificial Sequence
  Synthetic
aaauaugcaguauggaauacag

SEQ ID NO: 567932 - RNA, 23 nt, Artificial Sequence
  Synthetic
uaaauaugcaguauggaauacag

SEQ ID NO: 567933 - RNA, 24 nt, Artificial Sequence
  Synthetic
uuaaauaugcaguauggaauacag

SEQ ID NO: 567934 - RNA, 18 nt, Artificial Sequence
  Synthetic
ggugaauugauaauacag

SEQ ID NO: 567935 - RNA, 19 nt, Artificial Sequence
  Synthetic
uggugaauugauaauacag

SEQ ID NO: 567936 - RNA, 20 nt, Artificial Sequence
  Synthetic
auggugaauugauaauacag

SEQ ID NO: 567937 - RNA, 21 nt, Artificial Sequence
  Synthetic
aauggugaauugauaauacag

SEQ ID NO: 567938 - RNA, 22 nt, Artificial Sequence
  Synthetic
uaauggugaauugauaauacag

SEQ ID NO: 567939 - RNA, 23 nt, Artificial Sequence
  Synthetic
auaauggugaauugauaauacag

SEQ ID NO: 567940 - RNA, 24 nt, Artificial Sequence
  Synthetic
gauaauggugaauugauaauacag

SEQ ID NO: 567941 - RNA, 18 nt, Artificial Sequence
  Synthetic
ggugccaagaacauacag

SEQ ID NO: 567942 - RNA, 19 nt, Artificial Sequence
  Synthetic
aggugccaagaacauacag

SEQ ID NO: 567943 - RNA, 20 nt, Artificial Sequence
  Synthetic
aaggugccaagaacauacag

SEQ ID NO: 567944 - RNA, 21 nt, Artificial Sequence
  Synthetic
aaaggugccaagaacauacag

SEQ ID NO: 567945 - RNA, 22 nt, Artificial Sequence
  Synthetic
caaaggugccaagaacauacag

SEQ ID NO: 567946 - RNA, 23 nt, Artificial Sequence
  Synthetic
acaaaggugccaagaacauacag

SEQ ID NO: 567947 - RNA, 24 nt, Artificial Sequence
  Synthetic
gacaaaggugccaagaacauacag

SEQ ID NO: 567948 - RNA, 18 nt, Artificial Sequence
  Synthetic
uuuuuuauucucauacag

SEQ ID NO: 567949 - RNA, 19 nt, Artificial Sequence
  Synthetic
uuuuuuuauucucauacag

SEQ ID NO: 567950 - RNA, 20 nt, Artificial Sequence
  Synthetic
uuuuuuuuauucucauacag

SEQ ID NO: 567951 - RNA, 21 nt, Artificial Sequence
  Synthetic
uuuuuuuuuauucucauacag

SEQ ID NO: 567952 - RNA, 22 nt, Artificial Sequence
  Synthetic
guuuuuuuuuauucucauacag

SEQ ID NO: 567953 - RNA, 23 nt, Artificial Sequence
  Synthetic
uguuuuuuuuuauucucauacag

SEQ ID NO: 567954 - RNA, 24 nt, Artificial Sequence
  Synthetic
auguuuuuuuuuauucucauacag

SEQ ID NO: 567955 - RNA, 18 nt, Artificial Sequence
  Synthetic
uuacuuauuaagauacag

SEQ ID NO: 567956 - RNA, 19 nt, Artificial Sequence
  Synthetic
auuacuuauuaagauacag

SEQ ID NO: 567957 - RNA, 20 nt, Artificial Sequence
  Synthetic
uauuacuuauuaagauacag

SEQ ID NO: 567958 - RNA, 21 nt, Artificial Sequence
  Synthetic
uuauuacuuauuaagauacag

SEQ ID NO: 567959 - RNA, 22 nt, Artificial Sequence
  Synthetic
guuauuacuuauuaagauacag

SEQ ID NO: 567960 - RNA, 23 nt, Artificial Sequence
  Synthetic
aguuauuacuuauuaagauacag

SEQ ID NO: 567961 - RNA, 24 nt, Artificial Sequence
  Synthetic
gaguuauuacuuauuaagauacag

SEQ ID NO: 567962 - RNA, 18 nt, Artificial Sequence
  Synthetic
ugcagguuugcuauacag

SEQ ID NO: 567963 - RNA, 19 nt, Artificial Sequence
  Synthetic
gugcagguuugcuauacag

SEQ ID NO: 567964 - RNA, 20 nt, Artificial Sequence
  Synthetic
cgugcagguuugcuauacag

SEQ ID NO: 567965 - RNA, 21 nt, Artificial Sequence
  Synthetic
acgugcagguuugcuauacag

SEQ ID NO: 567966 - RNA, 22 nt, Artificial Sequence
  Synthetic
cacgugcagguuugcuauacag

SEQ ID NO: 567967 - RNA, 23 nt, Artificial Sequence
  Synthetic
acacgugcagguuugcuauacag

SEQ ID NO: 567968 - RNA, 24 nt, Artificial Sequence
  Synthetic
uacacgugcagguuugcuauacag

SEQ ID NO: 567969 - RNA, 18 nt, Artificial Sequence
  Synthetic
ucaaguauggcacuacag

SEQ ID NO: 567970 - RNA, 19 nt, Artificial Sequence
  Synthetic
aucaaguauggcacuacag

SEQ ID NO: 567971 - RNA, 20 nt, Artificial Sequence
  Synthetic
uaucaaguauggcacuacag

SEQ ID NO: 567972 - RNA, 21 nt, Artificial Sequence
  Synthetic
auaucaaguauggcacuacag

SEQ ID NO: 567973 - RNA, 22 nt, Artificial Sequence
  Synthetic
cauaucaaguauggcacuacag

SEQ ID NO: 567974 - RNA, 23 nt, Artificial Sequence
  Synthetic
ucauaucaaguauggcacuacag

SEQ ID NO: 567975 - RNA, 24 nt, Artificial Sequence
  Synthetic
uucauaucaaguauggcacuacag

SEQ ID NO: 567976 - RNA, 18 nt, Artificial Sequence
  Synthetic
agacacuggggacuacag

SEQ ID NO: 567977 - RNA, 19 nt, Artificial Sequence
  Synthetic
uagacacuggggacuacag

SEQ ID NO: 567978 - RNA, 20 nt, Artificial Sequence
  Synthetic
auagacacuggggacuacag

SEQ ID NO: 567979 - RNA, 21 nt, Artificial Sequence
  Synthetic
aauagacacuggggacuacag

SEQ ID NO: 567980 - RNA, 22 nt, Artificial Sequence
  Synthetic
caauagacacuggggacuacag

SEQ ID NO: 567981 - RNA, 23 nt, Artificial Sequence
  Synthetic
acaauagacacuggggacuacag

SEQ ID NO: 567982 - RNA, 24 nt, Artificial Sequence
  Synthetic
aacaauagacacuggggacuacag

SEQ ID NO: 567983 - RNA, 18 nt, Artificial Sequence
  Synthetic
gccaaucuaugacuacag

SEQ ID NO: 567984 - RNA, 19 nt, Artificial Sequence
  Synthetic
agccaaucuaugacuacag

SEQ ID NO: 567985 - RNA, 20 nt, Artificial Sequence
  Synthetic
aagccaaucuaugacuacag

SEQ ID NO: 567986 - RNA, 21 nt, Artificial Sequence
  Synthetic
aaagccaaucuaugacuacag

SEQ ID NO: 567987 - RNA, 22 nt, Artificial Sequence
  Synthetic
aaaagccaaucuaugacuacag

SEQ ID NO: 567988 - RNA, 23 nt, Artificial Sequence
  Synthetic
uaaaagccaaucuaugacuacag

SEQ ID NO: 567989 - RNA, 24 nt, Artificial Sequence
  Synthetic
uuaaaagccaaucuaugacuacag

SEQ ID NO: 567990 - RNA, 18 nt, Artificial Sequence
  Synthetic
uuggaauuuuaccuacag

SEQ ID NO: 567991 - RNA, 19 nt, Artificial Sequence
  Synthetic
cuuggaauuuuaccuacag

SEQ ID NO: 567992 - RNA, 20 nt, Artificial Sequence
  Synthetic
ucuuggaauuuuaccuacag

SEQ ID NO: 567993 - RNA, 21 nt, Artificial Sequence
  Synthetic
aucuuggaauuuuaccuacag

SEQ ID NO: 567994 - RNA, 22 nt, Artificial Sequence
  Synthetic
uaucuuggaauuuuaccuacag

SEQ ID NO: 567995 - RNA, 23 nt, Artificial Sequence
  Synthetic
guaucuuggaauuuuaccuacag

SEQ ID NO: 567996 - RNA, 24 nt, Artificial Sequence
  Synthetic
aguaucuuggaauuuuaccuacag

SEQ ID NO: 567997 - RNA, 18 nt, Artificial Sequence
  Synthetic
acuuacauuagccuacag

SEQ ID NO: 567998 - RNA, 19 nt, Artificial Sequence
  Synthetic
cacuuacauuagccuacag

SEQ ID NO: 567999 - RNA, 20 nt, Artificial Sequence
  Synthetic
acacuuacauuagccuacag

SEQ ID NO: 568000 - RNA, 21 nt, Artificial Sequence
  Synthetic
aacacuuacauuagccuacag

SEQ ID NO: 568001 - RNA, 22 nt, Artificial Sequence
  Synthetic
gaacacuuacauuagccuacag

SEQ ID NO: 568002 - RNA, 23 nt, Artificial Sequence
  Synthetic
agaacacuuacauuagccuacag

SEQ ID NO: 568003 - RNA, 24 nt, Artificial Sequence
  Synthetic
cagaacacuuacauuagccuacag

SEQ ID NO: 568004 - RNA, 18 nt, Artificial Sequence
  Synthetic
cugguugauguccuacag

SEQ ID NO: 568005 - RNA, 19 nt, Artificial Sequence
  Synthetic
ucugguugauguccuacag

SEQ ID NO: 568006 - RNA, 20 nt, Artificial Sequence
  Synthetic
cucugguugauguccuacag

SEQ ID NO: 568007 - RNA, 21 nt, Artificial Sequence
  Synthetic
acucugguugauguccuacag

SEQ ID NO: 568008 - RNA, 22 nt, Artificial Sequence
  Synthetic
uacucugguugauguccuacag

SEQ ID NO: 568009 - RNA, 23 nt, Artificial Sequence
  Synthetic
guacucugguugauguccuacag

SEQ ID NO: 568010 - RNA, 24 nt, Artificial Sequence
  Synthetic
gguacucugguugauguccuacag

SEQ ID NO: 568011 - RNA, 18 nt, Artificial Sequence
  Synthetic
uucugcuggaagcuacag

SEQ ID NO: 568012 - RNA, 19 nt, Artificial Sequence
  Synthetic
guucugcuggaagcuacag

SEQ ID NO: 568013 - RNA, 20 nt, Artificial Sequence
  Synthetic
aguucugcuggaagcuacag

SEQ ID NO: 568014 - RNA, 21 nt, Artificial Sequence
  Synthetic
aaguucugcuggaagcuacag

SEQ ID NO: 568015 - RNA, 22 nt, Artificial Sequence
  Synthetic
gaaguucugcuggaagcuacag

SEQ ID NO: 568016 - RNA, 23 nt, Artificial Sequence
  Synthetic
agaaguucugcuggaagcuacag

SEQ ID NO: 568017 - RNA, 24 nt, Artificial Sequence
  Synthetic
cagaaguucugcuggaagcuacag

SEQ ID NO: 568018 - RNA, 18 nt, Artificial Sequence
  Synthetic
gucaaagaauggcuacag

SEQ ID NO: 568019 - RNA, 19 nt, Artificial Sequence
  Synthetic
ggucaaagaauggcuacag

SEQ ID NO: 568020 - RNA, 20 nt, Artificial Sequence
  Synthetic
aggucaaagaauggcuacag

SEQ ID NO: 568021 - RNA, 21 nt, Artificial Sequence
  Synthetic
aaggucaaagaauggcuacag

SEQ ID NO: 568022 - RNA, 22 nt, Artificial Sequence
  Synthetic
gaaggucaaagaauggcuacag

SEQ ID NO: 568023 - RNA, 23 nt, Artificial Sequence
  Synthetic
agaaggucaaagaauggcuacag

SEQ ID NO: 568024 - RNA, 24 nt, Artificial Sequence
  Synthetic
gagaaggucaaagaauggcuacag

SEQ ID NO: 568025 - RNA, 18 nt, Artificial Sequence
  Synthetic
ugacaguagagucuacag

SEQ ID NO: 568026 - RNA, 19 nt, Artificial Sequence
  Synthetic
uugacaguagagucuacag

SEQ ID NO: 568027 - RNA, 20 nt, Artificial Sequence
  Synthetic
auugacaguagagucuacag

SEQ ID NO: 568028 - RNA, 21 nt, Artificial Sequence
  Synthetic
uauugacaguagagucuacag

SEQ ID NO: 568029 - RNA, 22 nt, Artificial Sequence
  Synthetic
auauugacaguagagucuacag

SEQ ID NO: 568030 - RNA, 23 nt, Artificial Sequence
  Synthetic
uauauugacaguagagucuacag

SEQ ID NO: 568031 - RNA, 24 nt, Artificial Sequence
  Synthetic
guauauugacaguagagucuacag

SEQ ID NO: 568032 - RNA, 18 nt, Artificial Sequence
  Synthetic
caagaauauccaguacag

SEQ ID NO: 568033 - RNA, 19 nt, Artificial Sequence
  Synthetic
ucaagaauauccaguacag

SEQ ID NO: 568034 - RNA, 20 nt, Artificial Sequence
  Synthetic
aucaagaauauccaguacag

SEQ ID NO: 568035 - RNA, 21 nt, Artificial Sequence
  Synthetic
uaucaagaauauccaguacag

SEQ ID NO: 568036 - RNA, 22 nt, Artificial Sequence
  Synthetic
cuaucaagaauauccaguacag

SEQ ID NO: 568037 - RNA, 23 nt, Artificial Sequence
  Synthetic
ucuaucaagaauauccaguacag

SEQ ID NO: 568038 - RNA, 24 nt, Artificial Sequence
  Synthetic
uucuaucaagaauauccaguacag

SEQ ID NO: 568039 - RNA, 18 nt, Artificial Sequence
  Synthetic
aagaaagaaagaguacag

SEQ ID NO: 568040 - RNA, 19 nt, Artificial Sequence
  Synthetic
gaagaaagaaagaguacag

SEQ ID NO: 568041 - RNA, 20 nt, Artificial Sequence
  Synthetic
ggaagaaagaaagaguacag

SEQ ID NO: 568042 - RNA, 21 nt, Artificial Sequence
  Synthetic
uggaagaaagaaagaguacag

SEQ ID NO: 568043 - RNA, 22 nt, Artificial Sequence
  Synthetic
cuggaagaaagaaagaguacag

SEQ ID NO: 568044 - RNA, 23 nt, Artificial Sequence
  Synthetic
acuggaagaaagaaagaguacag

SEQ ID NO: 568045 - RNA, 24 nt, Artificial Sequence
  Synthetic
uacuggaagaaagaaagaguacag

SEQ ID NO: 568046 - RNA, 18 nt, Artificial Sequence
  Synthetic
cugggacacggaguacag

SEQ ID NO: 568047 - RNA, 19 nt, Artificial Sequence
  Synthetic
ccugggacacggaguacag

SEQ ID NO: 568048 - RNA, 20 nt, Artificial Sequence
  Synthetic
gccugggacacggaguacag

SEQ ID NO: 568049 - RNA, 21 nt, Artificial Sequence
  Synthetic
ugccugggacacggaguacag

SEQ ID NO: 568050 - RNA, 22 nt, Artificial Sequence
  Synthetic
uugccugggacacggaguacag

SEQ ID NO: 568051 - RNA, 23 nt, Artificial Sequence
  Synthetic
cuugccugggacacggaguacag

SEQ ID NO: 568052 - RNA, 24 nt, Artificial Sequence
  Synthetic
ucuugccugggacacggaguacag

SEQ ID NO: 568053 - RNA, 18 nt, Artificial Sequence
  Synthetic
uuuguguuuuuaguacag

SEQ ID NO: 568054 - RNA, 19 nt, Artificial Sequence
  Synthetic
uuuuguguuuuuaguacag

SEQ ID NO: 568055 - RNA, 20 nt, Artificial Sequence
  Synthetic
uuuuuguguuuuuaguacag

SEQ ID NO: 568056 - RNA, 21 nt, Artificial Sequence
  Synthetic
auuuuuguguuuuuaguacag

SEQ ID NO: 568057 - RNA, 22 nt, Artificial Sequence
  Synthetic
aauuuuuguguuuuuaguacag

SEQ ID NO: 568058 - RNA, 23 nt, Artificial Sequence
  Synthetic
uaauuuuuguguuuuuaguacag

SEQ ID NO: 568059 - RNA, 24 nt, Artificial Sequence
  Synthetic
cuaauuuuuguguuuuuaguacag

SEQ ID NO: 568060 - RNA, 18 nt, Artificial Sequence
  Synthetic
ccuguacccaacguacag

SEQ ID NO: 568061 - RNA, 19 nt, Artificial Sequence
  Synthetic
accuguacccaacguacag

SEQ ID NO: 568062 - RNA, 20 nt, Artificial Sequence
  Synthetic
uaccuguacccaacguacag

SEQ ID NO: 568063 - RNA, 21 nt, Artificial Sequence
  Synthetic
uuaccuguacccaacguacag

SEQ ID NO: 568064 - RNA, 22 nt, Artificial Sequence
  Synthetic
cuuaccuguacccaacguacag

SEQ ID NO: 568065 - RNA, 23 nt, Artificial Sequence
  Synthetic
ccuuaccuguacccaacguacag

SEQ ID NO: 568066 - RNA, 24 nt, Artificial Sequence
  Synthetic
uccuuaccuguacccaacguacag

SEQ ID NO: 568067 - RNA, 18 nt, Artificial Sequence
  Synthetic
auuugguacaagguacag

SEQ ID NO: 568068 - RNA, 19 nt, Artificial Sequence
  Synthetic
aauuugguacaagguacag

SEQ ID NO: 568069 - RNA, 20 nt, Artificial Sequence
  Synthetic
aaauuugguacaagguacag

SEQ ID NO: 568070 - RNA, 21 nt, Artificial Sequence
  Synthetic
aaaauuugguacaagguacag

SEQ ID NO: 568071 - RNA, 22 nt, Artificial Sequence
  Synthetic
aaaaauuugguacaagguacag

SEQ ID NO: 568072 - RNA, 23 nt, Artificial Sequence
  Synthetic
uaaaaauuugguacaagguacag

SEQ ID NO: 568073 - RNA, 24 nt, Artificial Sequence
  Synthetic
uuaaaaauuugguacaagguacag

SEQ ID NO: 568074 - RNA, 18 nt, Artificial Sequence
  Synthetic
aauugacacuagguacag

SEQ ID NO: 568075 - RNA, 19 nt, Artificial Sequence
  Synthetic
gaauugacacuagguacag

SEQ ID NO: 568076 - RNA, 20 nt, Artificial Sequence
  Synthetic
agaauugacacuagguacag

SEQ ID NO: 568077 - RNA, 21 nt, Artificial Sequence
  Synthetic
gagaauugacacuagguacag

SEQ ID NO: 568078 - RNA, 22 nt, Artificial Sequence
  Synthetic
agagaauugacacuagguacag

SEQ ID NO: 568079 - RNA, 23 nt, Artificial Sequence
  Synthetic
gagagaauugacacuagguacag

SEQ ID NO: 568080 - RNA, 24 nt, Artificial Sequence
  Synthetic
ggagagaauugacacuagguacag

SEQ ID NO: 568081 - RNA, 18 nt, Artificial Sequence
  Synthetic
cauuggcuugggguacag

SEQ ID NO: 568082 - RNA, 19 nt, Artificial Sequence
  Synthetic
ucauuggcuugggguacag

SEQ ID NO: 568083 - RNA, 20 nt, Artificial Sequence
  Synthetic
aucauuggcuugggguacag

SEQ ID NO: 568084 - RNA, 21 nt, Artificial Sequence
  Synthetic
uaucauuggcuugggguacag

SEQ ID NO: 568085 - RNA, 22 nt, Artificial Sequence
  Synthetic
auaucauuggcuugggguacag

SEQ ID NO: 568086 - RNA, 23 nt, Artificial Sequence
  Synthetic
gauaucauuggcuugggguacag

SEQ ID NO: 568087 - RNA, 24 nt, Artificial Sequence
  Synthetic
ugauaucauuggcuugggguacag

SEQ ID NO: 568088 - RNA, 18 nt, Artificial Sequence
  Synthetic
agaauauuucguguacag

SEQ ID NO: 568089 - RNA, 19 nt, Artificial Sequence
  Synthetic
gagaauauuucguguacag

SEQ ID NO: 568090 - RNA, 20 nt, Artificial Sequence
  Synthetic
agagaauauuucguguacag

SEQ ID NO: 568091 - RNA, 21 nt, Artificial Sequence
  Synthetic
uagagaauauuucguguacag

SEQ ID NO: 568092 - RNA, 22 nt, Artificial Sequence
  Synthetic
cuagagaauauuucguguacag

SEQ ID NO: 568093 - RNA, 23 nt, Artificial Sequence
  Synthetic
ccuagagaauauuucguguacag

SEQ ID NO: 568094 - RNA, 24 nt, Artificial Sequence
  Synthetic
cccuagagaauauuucguguacag

SEQ ID NO: 568095 - RNA, 18 nt, Artificial Sequence
  Synthetic
cuuaucucuauuguacag

SEQ ID NO: 568096 - RNA, 19 nt, Artificial Sequence
  Synthetic
ccuuaucucuauuguacag

SEQ ID NO: 568097 - RNA, 20 nt, Artificial Sequence
  Synthetic
uccuuaucucuauuguacag

SEQ ID NO: 568098 - RNA, 21 nt, Artificial Sequence
  Synthetic
auccuuaucucuauuguacag

SEQ ID NO: 568099 - RNA, 22 nt, Artificial Sequence
  Synthetic
cauccuuaucucuauuguacag

SEQ ID NO: 568100 - RNA, 23 nt, Artificial Sequence
  Synthetic
acauccuuaucucuauuguacag

SEQ ID NO: 568101 - RNA, 24 nt, Artificial Sequence
  Synthetic
aacauccuuaucucuauuguacag

SEQ ID NO: 568102 - RNA, 18 nt, Artificial Sequence
  Synthetic
cuuaaaauuacauuacag

SEQ ID NO: 568103 - RNA, 19 nt, Artificial Sequence
  Synthetic
acuuaaaauuacauuacag

SEQ ID NO: 568104 - RNA, 20 nt, Artificial Sequence
  Synthetic
uacuuaaaauuacauuacag

SEQ ID NO: 568105 - RNA, 21 nt, Artificial Sequence
  Synthetic
auacuuaaaauuacauuacag

SEQ ID NO: 568106 - RNA, 22 nt, Artificial Sequence
  Synthetic
uauacuuaaaauuacauuacag

SEQ ID NO: 568107 - RNA, 23 nt, Artificial Sequence
  Synthetic
guauacuuaaaauuacauuacag

SEQ ID NO: 568108 - RNA, 24 nt, Artificial Sequence
  Synthetic
uguauacuuaaaauuacauuacag

SEQ ID NO: 568109 - RNA, 18 nt, Artificial Sequence
  Synthetic
cuaucugccccauuacag

SEQ ID NO: 568110 - RNA, 19 nt, Artificial Sequence
  Synthetic
acuaucugccccauuacag

SEQ ID NO: 568111 - RNA, 20 nt, Artificial Sequence
  Synthetic
uacuaucugccccauuacag

SEQ ID NO: 568112 - RNA, 21 nt, Artificial Sequence
  Synthetic
uuacuaucugccccauuacag

SEQ ID NO: 568113 - RNA, 22 nt, Artificial Sequence
  Synthetic
uuuacuaucugccccauuacag

SEQ ID NO: 568114 - RNA, 23 nt, Artificial Sequence
  Synthetic
auuuacuaucugccccauuacag

SEQ ID NO: 568115 - RNA, 24 nt, Artificial Sequence
  Synthetic
uauuuacuaucugccccauuacag

SEQ ID NO: 568116 - RNA, 18 nt, Artificial Sequence
  Synthetic
aaauugcugggauuacag

SEQ ID NO: 568117 - RNA, 19 nt, Artificial Sequence
  Synthetic
caaauugcugggauuacag

SEQ ID NO: 568118 - RNA, 20 nt, Artificial Sequence
  Synthetic
ucaaauugcugggauuacag

SEQ ID NO: 568119 - RNA, 21 nt, Artificial Sequence
  Synthetic
cucaaauugcugggauuacag

SEQ ID NO: 568120 - RNA, 22 nt, Artificial Sequence
  Synthetic
ucucaaauugcugggauuacag

SEQ ID NO: 568121 - RNA, 23 nt, Artificial Sequence
  Synthetic
cucucaaauugcugggauuacag

SEQ ID NO: 568122 - RNA, 24 nt, Artificial Sequence
  Synthetic
ccucucaaauugcugggauuacag

SEQ ID NO: 568123 - RNA, 18 nt, Artificial Sequence
  Synthetic
ucuccuagaauauuacag

SEQ ID NO: 568124 - RNA, 19 nt, Artificial Sequence
  Synthetic
aucuccuagaauauuacag

SEQ ID NO: 568125 - RNA, 20 nt, Artificial Sequence
  Synthetic
caucuccuagaauauuacag

SEQ ID NO: 568126 - RNA, 21 nt, Artificial Sequence
  Synthetic
gcaucuccuagaauauuacag

SEQ ID NO: 568127 - RNA, 22 nt, Artificial Sequence
  Synthetic
agcaucuccuagaauauuacag

SEQ ID NO: 568128 - RNA, 23 nt, Artificial Sequence
  Synthetic
gagcaucuccuagaauauuacag

SEQ ID NO: 568129 - RNA, 24 nt, Artificial Sequence
  Synthetic
ugagcaucuccuagaauauuacag

SEQ ID NO: 568130 - RNA, 18 nt, Artificial Sequence
  Synthetic
aauuuccucauauuacag

SEQ ID NO: 568131 - RNA, 19 nt, Artificial Sequence
  Synthetic
caauuuccucauauuacag

SEQ ID NO: 568132 - RNA, 20 nt, Artificial Sequence
  Synthetic
ccaauuuccucauauuacag

SEQ ID NO: 568133 - RNA, 21 nt, Artificial Sequence
  Synthetic
accaauuuccucauauuacag

SEQ ID NO: 568134 - RNA, 22 nt, Artificial Sequence
  Synthetic
gaccaauuuccucauauuacag

SEQ ID NO: 568135 - RNA, 23 nt, Artificial Sequence
  Synthetic
ggaccaauuuccucauauuacag

SEQ ID NO: 568136 - RNA, 24 nt, Artificial Sequence
  Synthetic
uggaccaauuuccucauauuacag

SEQ ID NO: 568137 - RNA, 18 nt, Artificial Sequence
  Synthetic
auugccuccguauuacag

SEQ ID NO: 568138 - RNA, 19 nt, Artificial Sequence
  Synthetic
uauugccuccguauuacag

SEQ ID NO: 568139 - RNA, 20 nt, Artificial Sequence
  Synthetic
uuauugccuccguauuacag

SEQ ID NO: 568140 - RNA, 21 nt, Artificial Sequence
  Synthetic
uuuauugccuccguauuacag

SEQ ID NO: 568141 - RNA, 22 nt, Artificial Sequence
  Synthetic
uuuuauugccuccguauuacag

SEQ ID NO: 568142 - RNA, 23 nt, Artificial Sequence
  Synthetic
uuuuuauugccuccguauuacag

SEQ ID NO: 568143 - RNA, 24 nt, Artificial Sequence
  Synthetic
auuuuuauugccuccguauuacag

SEQ ID NO: 568144 - RNA, 18 nt, Artificial Sequence
  Synthetic
uucagggaugacuuacag

SEQ ID NO: 568145 - RNA, 19 nt, Artificial Sequence
  Synthetic
uuucagggaugacuuacag

SEQ ID NO: 568146 - RNA, 20 nt, Artificial Sequence
  Synthetic
auuucagggaugacuuacag

SEQ ID NO: 568147 - RNA, 21 nt, Artificial Sequence
  Synthetic
cauuucagggaugacuuacag

SEQ ID NO: 568148 - RNA, 22 nt, Artificial Sequence
  Synthetic
ccauuucagggaugacuuacag

SEQ ID NO: 568149 - RNA, 23 nt, Artificial Sequence
  Synthetic
cccauuucagggaugacuuacag

SEQ ID NO: 568150 - RNA, 24 nt, Artificial Sequence
  Synthetic
ucccauuucagggaugacuuacag

SEQ ID NO: 568151 - RNA, 18 nt, Artificial Sequence
  Synthetic
ugucuacguuacuuacag

SEQ ID NO: 568152 - RNA, 19 nt, Artificial Sequence
  Synthetic
augucuacguuacuuacag

SEQ ID NO: 568153 - RNA, 20 nt, Artificial Sequence
  Synthetic
aaugucuacguuacuuacag

SEQ ID NO: 568154 - RNA, 21 nt, Artificial Sequence
  Synthetic
uaaugucuacguuacuuacag

SEQ ID NO: 568155 - RNA, 22 nt, Artificial Sequence
  Synthetic
guaaugucuacguuacuuacag

SEQ ID NO: 568156 - RNA, 23 nt, Artificial Sequence
  Synthetic
uguaaugucuacguuacuuacag

SEQ ID NO: 568157 - RNA, 24 nt, Artificial Sequence
  Synthetic
auguaaugucuacguuacuuacag

SEQ ID NO: 568158 - RNA, 18 nt, Artificial Sequence
  Synthetic
aaugcauagcucuuacag

SEQ ID NO: 568159 - RNA, 19 nt, Artificial Sequence
  Synthetic
caaugcauagcucuuacag

SEQ ID NO: 568160 - RNA, 20 nt, Artificial Sequence
  Synthetic
ccaaugcauagcucuuacag

SEQ ID NO: 568161 - RNA, 21 nt, Artificial Sequence
  Synthetic
accaaugcauagcucuuacag

SEQ ID NO: 568162 - RNA, 22 nt, Artificial Sequence
  Synthetic
caccaaugcauagcucuuacag

SEQ ID NO: 568163 - RNA, 23 nt, Artificial Sequence
  Synthetic
acaccaaugcauagcucuuacag

SEQ ID NO: 568164 - RNA, 24 nt, Artificial Sequence
  Synthetic
gacaccaaugcauagcucuuacag

SEQ ID NO: 568165 - RNA, 18 nt, Artificial Sequence
  Synthetic
ugaggucaggaguuacag

SEQ ID NO: 568166 - RNA, 19 nt, Artificial Sequence
  Synthetic
cugaggucaggaguuacag

SEQ ID NO: 568167 - RNA, 20 nt, Artificial Sequence
  Synthetic
ccugaggucaggaguuacag

SEQ ID NO: 568168 - RNA, 21 nt, Artificial Sequence
  Synthetic
accugaggucaggaguuacag

SEQ ID NO: 568169 - RNA, 22 nt, Artificial Sequence
  Synthetic
caccugaggucaggaguuacag

SEQ ID NO: 568170 - RNA, 23 nt, Artificial Sequence
  Synthetic
ucaccugaggucaggaguuacag

SEQ ID NO: 568171 - RNA, 24 nt, Artificial Sequence
  Synthetic
aucaccugaggucaggaguuacag

SEQ ID NO: 568172 - RNA, 18 nt, Artificial Sequence
  Synthetic
auacaguaaguguuacag

SEQ ID NO: 568173 - RNA, 19 nt, Artificial Sequence
  Synthetic
gauacaguaaguguuacag

SEQ ID NO: 568174 - RNA, 20 nt, Artificial Sequence
  Synthetic
ugauacaguaaguguuacag

SEQ ID NO: 568175 - RNA, 21 nt, Artificial Sequence
  Synthetic
gugauacaguaaguguuacag

SEQ ID NO: 568176 - RNA, 22 nt, Artificial Sequence
  Synthetic
ugugauacaguaaguguuacag

SEQ ID NO: 568177 - RNA, 23 nt, Artificial Sequence
  Synthetic
uugugauacaguaaguguuacag

SEQ ID NO: 568178 - RNA, 24 nt, Artificial Sequence
  Synthetic
auugugauacaguaaguguuacag

SEQ ID NO: 568179 - RNA, 18 nt, Artificial Sequence
  Synthetic
cuuuaaaauaauuuacag

SEQ ID NO: 568180 - RNA, 19 nt, Artificial Sequence
  Synthetic
ucuuuaaaauaauuuacag

SEQ ID NO: 568181 - RNA, 20 nt, Artificial Sequence
  Synthetic
aucuuuaaaauaauuuacag

SEQ ID NO: 568182 - RNA, 21 nt, Artificial Sequence
  Synthetic
aaucuuuaaaauaauuuacag

SEQ ID NO: 568183 - RNA, 22 nt, Artificial Sequence
  Synthetic
aaaucuuuaaaauaauuuacag

SEQ ID NO: 568184 - RNA, 23 nt, Artificial Sequence
  Synthetic
caaaucuuuaaaauaauuuacag

SEQ ID NO: 568185 - RNA, 24 nt, Artificial Sequence
  Synthetic
acaaaucuuuaaaauaauuuacag

SEQ ID NO: 568186 - RNA, 18 nt, Artificial Sequence
  Synthetic
auuuauuccccuuuacag

SEQ ID NO: 568187 - RNA, 19 nt, Artificial Sequence
  Synthetic
uauuuauuccccuuuacag

SEQ ID NO: 568188 - RNA, 20 nt, Artificial Sequence
  Synthetic
uuauuuauuccccuuuacag

SEQ ID NO: 568189 - RNA, 21 nt, Artificial Sequence
  Synthetic
uuuauuuauuccccuuuacag

SEQ ID NO: 568190 - RNA, 22 nt, Artificial Sequence
  Synthetic
auuuauuuauuccccuuuacag

SEQ ID NO: 568191 - RNA, 23 nt, Artificial Sequence
  Synthetic
gauuuauuuauuccccuuuacag

SEQ ID NO: 568192 - RNA, 24 nt, Artificial Sequence
  Synthetic
ggauuuauuuauuccccuuuacag

SEQ ID NO: 568193 - RNA, 18 nt, Artificial Sequence
  Synthetic
gcucuccccauuuuacag

SEQ ID NO: 568194 - RNA, 19 nt, Artificial Sequence
  Synthetic
ugcucuccccauuuuacag

SEQ ID NO: 568195 - RNA, 20 nt, Artificial Sequence
  Synthetic
cugcucuccccauuuuacag

SEQ ID NO: 568196 - RNA, 21 nt, Artificial Sequence
  Synthetic
acugcucuccccauuuuacag

SEQ ID NO: 568197 - RNA, 22 nt, Artificial Sequence
  Synthetic
uacugcucuccccauuuuacag

SEQ ID NO: 568198 - RNA, 23 nt, Artificial Sequence
  Synthetic
uuacugcucuccccauuuuacag

SEQ ID NO: 568199 - RNA, 24 nt, Artificial Sequence
  Synthetic
cuuacugcucuccccauuuuacag

SEQ ID NO: 568200 - RNA, 18 nt, Artificial Sequence
  Synthetic
auuucucccauuuuacag

SEQ ID NO: 568201 - RNA, 19 nt, Artificial Sequence
  Synthetic
cauuucucccauuuuacag

SEQ ID NO: 568202 - RNA, 20 nt, Artificial Sequence
  Synthetic
acauuucucccauuuuacag

SEQ ID NO: 568203 - RNA, 21 nt, Artificial Sequence
  Synthetic
uacauuucucccauuuuacag

SEQ ID NO: 568204 - RNA, 22 nt, Artificial Sequence
  Synthetic
auacauuucucccauuuuacag

SEQ ID NO: 568205 - RNA, 23 nt, Artificial Sequence
  Synthetic
aauacauuucucccauuuuacag

SEQ ID NO: 568206 - RNA, 24 nt, Artificial Sequence
  Synthetic
gaauacauuucucccauuuuacag

SEQ ID NO: 568207 - RNA, 18 nt, Artificial Sequence
  Synthetic
guaguaccuauuuuacag

SEQ ID NO: 568208 - RNA, 19 nt, Artificial Sequence
  Synthetic
aguaguaccuauuuuacag

SEQ ID NO: 568209 - RNA, 20 nt, Artificial Sequence
  Synthetic
gaguaguaccuauuuuacag

SEQ ID NO: 568210 - RNA, 21 nt, Artificial Sequence
  Synthetic
ugaguaguaccuauuuuacag

SEQ ID NO: 568211 - RNA, 22 nt, Artificial Sequence
  Synthetic
augaguaguaccuauuuuacag

SEQ ID NO: 568212 - RNA, 23 nt, Artificial Sequence
  Synthetic
uaugaguaguaccuauuuuacag

SEQ ID NO: 568213 - RNA, 24 nt, Artificial Sequence
  Synthetic
guaugaguaguaccuauuuuacag

SEQ ID NO: 568214 - RNA, 18 nt, Artificial Sequence
  Synthetic
aauguuaaacuuuuacag

SEQ ID NO: 568215 - RNA, 19 nt, Artificial Sequence
  Synthetic
uaauguuaaacuuuuacag

SEQ ID NO: 568216 - RNA, 20 nt, Artificial Sequence
  Synthetic
uuaauguuaaacuuuuacag

SEQ ID NO: 568217 - RNA, 21 nt, Artificial Sequence
  Synthetic
uuuaauguuaaacuuuuacag

SEQ ID NO: 568218 - RNA, 22 nt, Artificial Sequence
  Synthetic
uuuuaauguuaaacuuuuacag

SEQ ID NO: 568219 - RNA, 23 nt, Artificial Sequence
  Synthetic
cuuuuaauguuaaacuuuuacag

SEQ ID NO: 568220 - RNA, 24 nt, Artificial Sequence
  Synthetic
ucuuuuaauguuaaacuuuuacag

SEQ ID NO: 568221 - RNA, 18 nt, Artificial Sequence
  Synthetic
auugagcaucuuuuacag

SEQ ID NO: 568222 - RNA, 19 nt, Artificial Sequence
  Synthetic
gauugagcaucuuuuacag

SEQ ID NO: 568223 - RNA, 20 nt, Artificial Sequence
  Synthetic
ugauugagcaucuuuuacag

SEQ ID NO: 568224 - RNA, 21 nt, Artificial Sequence
  Synthetic
cugauugagcaucuuuuacag

SEQ ID NO: 568225 - RNA, 22 nt, Artificial Sequence
  Synthetic
ucugauugagcaucuuuuacag

SEQ ID NO: 568226 - RNA, 23 nt, Artificial Sequence
  Synthetic
uucugauugagcaucuuuuacag

SEQ ID NO: 568227 - RNA, 24 nt, Artificial Sequence
  Synthetic
uuucugauugagcaucuuuuacag

SEQ ID NO: 568228 - RNA, 18 nt, Artificial Sequence
  Synthetic
aggaucccaguuuuacag

SEQ ID NO: 568229 - RNA, 19 nt, Artificial Sequence
  Synthetic
caggaucccaguuuuacag

SEQ ID NO: 568230 - RNA, 20 nt, Artificial Sequence
  Synthetic
ucaggaucccaguuuuacag

SEQ ID NO: 568231 - RNA, 21 nt, Artificial Sequence
  Synthetic
aucaggaucccaguuuuacag

SEQ ID NO: 568232 - RNA, 22 nt, Artificial Sequence
  Synthetic
uaucaggaucccaguuuuacag

SEQ ID NO: 568233 - RNA, 23 nt, Artificial Sequence
  Synthetic
uuaucaggaucccaguuuuacag

SEQ ID NO: 568234 - RNA, 24 nt, Artificial Sequence
  Synthetic
guuaucaggaucccaguuuuacag

SEQ ID NO: 568235 - RNA, 18 nt, Artificial Sequence
  Synthetic
gcuauccuaguuuuacag

SEQ ID NO: 568236 - RNA, 19 nt, Artificial Sequence
  Synthetic
ugcuauccuaguuuuacag

SEQ ID NO: 568237 - RNA, 20 nt, Artificial Sequence
  Synthetic
uugcuauccuaguuuuacag

SEQ ID NO: 568238 - RNA, 21 nt, Artificial Sequence
  Synthetic
uuugcuauccuaguuuuacag

SEQ ID NO: 568239 - RNA, 22 nt, Artificial Sequence
  Synthetic
guuugcuauccuaguuuuacag

SEQ ID NO: 568240 - RNA, 23 nt, Artificial Sequence
  Synthetic
aguuugcuauccuaguuuuacag

SEQ ID NO: 568241 - RNA, 24 nt, Artificial Sequence
  Synthetic
gaguuugcuauccuaguuuuacag

SEQ ID NO: 568242 - RNA, 18 nt, Artificial Sequence
  Synthetic
aucuauauauuuuuacag

SEQ ID NO: 568243 - RNA, 19 nt, Artificial Sequence
  Synthetic
caucuauauauuuuuacag

SEQ ID NO: 568244 - RNA, 20 nt, Artificial Sequence
  Synthetic
ucaucuauauauuuuuacag

SEQ ID NO: 568245 - RNA, 21 nt, Artificial Sequence
  Synthetic
uucaucuauauauuuuuacag

SEQ ID NO: 568246 - RNA, 22 nt, Artificial Sequence
  Synthetic
auucaucuauauauuuuuacag

SEQ ID NO: 568247 - RNA, 23 nt, Artificial Sequence
  Synthetic
aauucaucuauauauuuuuacag

SEQ ID NO: 568248 - RNA, 24 nt, Artificial Sequence
  Synthetic
caauucaucuauauauuuuuacag

SEQ ID NO: 568249 - RNA, 18 nt, Artificial Sequence
  Synthetic
aagauuaauaaaaaccag

SEQ ID NO: 568250 - RNA, 19 nt, Artificial Sequence
  Synthetic
aaagauuaauaaaaaccag

SEQ ID NO: 568251 - RNA, 20 nt, Artificial Sequence
  Synthetic
gaaagauuaauaaaaaccag

SEQ ID NO: 568252 - RNA, 21 nt, Artificial Sequence
  Synthetic
agaaagauuaauaaaaaccag

SEQ ID NO: 568253 - RNA, 22 nt, Artificial Sequence
  Synthetic
uagaaagauuaauaaaaaccag

SEQ ID NO: 568254 - RNA, 23 nt, Artificial Sequence
  Synthetic
uuagaaagauuaauaaaaaccag

SEQ ID NO: 568255 - RNA, 24 nt, Artificial Sequence
  Synthetic
uuuagaaagauuaauaaaaaccag

SEQ ID NO: 568256 - RNA, 18 nt, Artificial Sequence
  Synthetic
uacuuguuuaaaaaccag

SEQ ID NO: 568257 - RNA, 19 nt, Artificial Sequence
  Synthetic
auacuuguuuaaaaaccag

SEQ ID NO: 568258 - RNA, 20 nt, Artificial Sequence
  Synthetic
uauacuuguuuaaaaaccag

SEQ ID NO: 568259 - RNA, 21 nt, Artificial Sequence
  Synthetic
auauacuuguuuaaaaaccag

SEQ ID NO: 568260 - RNA, 22 nt, Artificial Sequence
  Synthetic
uauauacuuguuuaaaaaccag

SEQ ID NO: 568261 - RNA, 23 nt, Artificial Sequence
  Synthetic
uuauauacuuguuuaaaaaccag

SEQ ID NO: 568262 - RNA, 24 nt, Artificial Sequence
  Synthetic
guuauauacuuguuuaaaaaccag

SEQ ID NO: 568263 - RNA, 18 nt, Artificial Sequence
  Synthetic
gcuucuuuuaaaaaccag

SEQ ID NO: 568264 - RNA, 19 nt, Artificial Sequence
  Synthetic
agcuucuuuuaaaaaccag

SEQ ID NO: 568265 - RNA, 20 nt, Artificial Sequence
  Synthetic
uagcuucuuuuaaaaaccag

SEQ ID NO: 568266 - RNA, 21 nt, Artificial Sequence
  Synthetic
guagcuucuuuuaaaaaccag

SEQ ID NO: 568267 - RNA, 22 nt, Artificial Sequence
  Synthetic
aguagcuucuuuuaaaaaccag

SEQ ID NO: 568268 - RNA, 23 nt, Artificial Sequence
  Synthetic
aaguagcuucuuuuaaaaaccag

SEQ ID NO: 568269 - RNA, 24 nt, Artificial Sequence
  Synthetic
uaaguagcuucuuuuaaaaaccag

SEQ ID NO: 568270 - RNA, 18 nt, Artificial Sequence
  Synthetic
uauaagaagacaaaccag

SEQ ID NO: 568271 - RNA, 19 nt, Artificial Sequence
  Synthetic
cuauaagaagacaaaccag

SEQ ID NO: 568272 - RNA, 20 nt, Artificial Sequence
  Synthetic
acuauaagaagacaaaccag

SEQ ID NO: 568273 - RNA, 21 nt, Artificial Sequence
  Synthetic
gacuauaagaagacaaaccag

SEQ ID NO: 568274 - RNA, 22 nt, Artificial Sequence
  Synthetic
ugacuauaagaagacaaaccag

SEQ ID NO: 568275 - RNA, 23 nt, Artificial Sequence
  Synthetic
cugacuauaagaagacaaaccag

SEQ ID NO: 568276 - RNA, 24 nt, Artificial Sequence
  Synthetic
acugacuauaagaagacaaaccag

SEQ ID NO: 568277 - RNA, 18 nt, Artificial Sequence
  Synthetic
guaaagcaaagcaaccag

SEQ ID NO: 568278 - RNA, 19 nt, Artificial Sequence
  Synthetic
uguaaagcaaagcaaccag

SEQ ID NO: 568279 - RNA, 20 nt, Artificial Sequence
  Synthetic
auguaaagcaaagcaaccag

SEQ ID NO: 568280 - RNA, 21 nt, Artificial Sequence
  Synthetic
aauguaaagcaaagcaaccag

SEQ ID NO: 568281 - RNA, 22 nt, Artificial Sequence
  Synthetic
aaauguaaagcaaagcaaccag

SEQ ID NO: 568282 - RNA, 23 nt, Artificial Sequence
  Synthetic
gaaauguaaagcaaagcaaccag

SEQ ID NO: 568283 - RNA, 24 nt, Artificial Sequence
  Synthetic
ugaaauguaaagcaaagcaaccag

SEQ ID NO: 568284 - RNA, 18 nt, Artificial Sequence
  Synthetic
agaagguuuugcaaccag

SEQ ID NO: 568285 - RNA, 19 nt, Artificial Sequence
  Synthetic
gagaagguuuugcaaccag

SEQ ID NO: 568286 - RNA, 20 nt, Artificial Sequence
  Synthetic
ugagaagguuuugcaaccag

SEQ ID NO: 568287 - RNA, 21 nt, Artificial Sequence
  Synthetic
augagaagguuuugcaaccag

SEQ ID NO: 568288 - RNA, 22 nt, Artificial Sequence
  Synthetic
uaugagaagguuuugcaaccag

SEQ ID NO: 568289 - RNA, 23 nt, Artificial Sequence
  Synthetic
guaugagaagguuuugcaaccag

SEQ ID NO: 568290 - RNA, 24 nt, Artificial Sequence
  Synthetic
uguaugagaagguuuugcaaccag

SEQ ID NO: 568291 - RNA, 18 nt, Artificial Sequence
  Synthetic
uucuuuacagucaaccag

SEQ ID NO: 568292 - RNA, 19 nt, Artificial Sequence
  Synthetic
guucuuuacagucaaccag

SEQ ID NO: 568293 - RNA, 20 nt, Artificial Sequence
  Synthetic
gguucuuuacagucaaccag

SEQ ID NO: 568294 - RNA, 21 nt, Artificial Sequence
  Synthetic
ggguucuuuacagucaaccag

SEQ ID NO: 568295 - RNA, 22 nt, Artificial Sequence
  Synthetic
uggguucuuuacagucaaccag

SEQ ID NO: 568296 - RNA, 23 nt, Artificial Sequence
  Synthetic
auggguucuuuacagucaaccag

SEQ ID NO: 568297 - RNA, 24 nt, Artificial Sequence
  Synthetic
uauggguucuuuacagucaaccag

SEQ ID NO: 568298 - RNA, 18 nt, Artificial Sequence
  Synthetic
acccaggaagagaaccag

SEQ ID NO: 568299 - RNA, 19 nt, Artificial Sequence
  Synthetic
gacccaggaagagaaccag

SEQ ID NO: 568300 - RNA, 20 nt, Artificial Sequence
  Synthetic
agacccaggaagagaaccag

SEQ ID NO: 568301 - RNA, 21 nt, Artificial Sequence
  Synthetic
cagacccaggaagagaaccag

SEQ ID NO: 568302 - RNA, 22 nt, Artificial Sequence
  Synthetic
ucagacccaggaagagaaccag

SEQ ID NO: 568303 - RNA, 23 nt, Artificial Sequence
  Synthetic
aucagacccaggaagagaaccag

SEQ ID NO: 568304 - RNA, 24 nt, Artificial Sequence
  Synthetic
caucagacccaggaagagaaccag

SEQ ID NO: 568305 - RNA, 18 nt, Artificial Sequence
  Synthetic
gguuacaaauuuaaccag

SEQ ID NO: 568306 - RNA, 19 nt, Artificial Sequence
  Synthetic
ugguuacaaauuuaaccag

SEQ ID NO: 568307 - RNA, 20 nt, Artificial Sequence
  Synthetic
augguuacaaauuuaaccag

SEQ ID NO: 568308 - RNA, 21 nt, Artificial Sequence
  Synthetic
caugguuacaaauuuaaccag

SEQ ID NO: 568309 - RNA, 22 nt, Artificial Sequence
  Synthetic
ucaugguuacaaauuuaaccag

SEQ ID NO: 568310 - RNA, 23 nt, Artificial Sequence
  Synthetic
uucaugguuacaaauuuaaccag

SEQ ID NO: 568311 - RNA, 24 nt, Artificial Sequence
  Synthetic
guucaugguuacaaauuuaaccag

SEQ ID NO: 568312 - RNA, 18 nt, Artificial Sequence
  Synthetic
gcuuuaagugaacaccag

SEQ ID NO: 568313 - RNA, 19 nt, Artificial Sequence
  Synthetic
ggcuuuaagugaacaccag

SEQ ID NO: 568314 - RNA, 20 nt, Artificial Sequence
  Synthetic
gggcuuuaagugaacaccag

SEQ ID NO: 568315 - RNA, 21 nt, Artificial Sequence
  Synthetic
ugggcuuuaagugaacaccag

SEQ ID NO: 568316 - RNA, 22 nt, Artificial Sequence
  Synthetic
uugggcuuuaagugaacaccag

SEQ ID NO: 568317 - RNA, 23 nt, Artificial Sequence
  Synthetic
cuugggcuuuaagugaacaccag

SEQ ID NO: 568318 - RNA, 24 nt, Artificial Sequence
  Synthetic
ccuugggcuuuaagugaacaccag

SEQ ID NO: 568319 - RNA, 18 nt, Artificial Sequence
  Synthetic
uuuuaaaguucacaccag

SEQ ID NO: 568320 - RNA, 19 nt, Artificial Sequence
  Synthetic
auuuuaaaguucacaccag

SEQ ID NO: 568321 - RNA, 20 nt, Artificial Sequence
  Synthetic
uauuuuaaaguucacaccag

SEQ ID NO: 568322 - RNA, 21 nt, Artificial Sequence
  Synthetic
guauuuuaaaguucacaccag

SEQ ID NO: 568323 - RNA, 22 nt, Artificial Sequence
  Synthetic
aguauuuuaaaguucacaccag

SEQ ID NO: 568324 - RNA, 23 nt, Artificial Sequence
  Synthetic
caguauuuuaaaguucacaccag

SEQ ID NO: 568325 - RNA, 24 nt, Artificial Sequence
  Synthetic
gcaguauuuuaaaguucacaccag

SEQ ID NO: 568326 - RNA, 18 nt, Artificial Sequence
  Synthetic
acugccuggggacaccag

SEQ ID NO: 568327 - RNA, 19 nt, Artificial Sequence
  Synthetic
cacugccuggggacaccag

SEQ ID NO: 568328 - RNA, 20 nt, Artificial Sequence
  Synthetic
ucacugccuggggacaccag

SEQ ID NO: 568329 - RNA, 21 nt, Artificial Sequence
  Synthetic
uucacugccuggggacaccag

SEQ ID NO: 568330 - RNA, 22 nt, Artificial Sequence
  Synthetic
guucacugccuggggacaccag

SEQ ID NO: 568331 - RNA, 23 nt, Artificial Sequence
  Synthetic
aguucacugccuggggacaccag

SEQ ID NO: 568332 - RNA, 24 nt, Artificial Sequence
  Synthetic
uaguucacugccuggggacaccag

SEQ ID NO: 568333 - RNA, 18 nt, Artificial Sequence
  Synthetic
gaguaaaugugccaccag

SEQ ID NO: 568334 - RNA, 19 nt, Artificial Sequence
  Synthetic
ugaguaaaugugccaccag

SEQ ID NO: 568335 - RNA, 20 nt, Artificial Sequence
  Synthetic
augaguaaaugugccaccag

SEQ ID NO: 568336 - RNA, 21 nt, Artificial Sequence
  Synthetic
uaugaguaaaugugccaccag

SEQ ID NO: 568337 - RNA, 22 nt, Artificial Sequence
  Synthetic
cuaugaguaaaugugccaccag

SEQ ID NO: 568338 - RNA, 23 nt, Artificial Sequence
  Synthetic
ucuaugaguaaaugugccaccag

SEQ ID NO: 568339 - RNA, 24 nt, Artificial Sequence
  Synthetic
aucuaugaguaaaugugccaccag

SEQ ID NO: 568340 - RNA, 18 nt, Artificial Sequence
  Synthetic
acaagccucauccaccag

SEQ ID NO: 568341 - RNA, 19 nt, Artificial Sequence
  Synthetic
cacaagccucauccaccag

SEQ ID NO: 568342 - RNA, 20 nt, Artificial Sequence
  Synthetic
ucacaagccucauccaccag

SEQ ID NO: 568343 - RNA, 21 nt, Artificial Sequence
  Synthetic
cucacaagccucauccaccag

SEQ ID NO: 568344 - RNA, 22 nt, Artificial Sequence
  Synthetic
ccucacaagccucauccaccag

SEQ ID NO: 568345 - RNA, 23 nt, Artificial Sequence
  Synthetic
cccucacaagccucauccaccag

SEQ ID NO: 568346 - RNA, 24 nt, Artificial Sequence
  Synthetic
gcccucacaagccucauccaccag

SEQ ID NO: 568347 - RNA, 18 nt, Artificial Sequence
  Synthetic
uugccugaguaucaccag

SEQ ID NO: 568348 - RNA, 19 nt, Artificial Sequence
  Synthetic
uuugccugaguaucaccag

SEQ ID NO: 568349 - RNA, 20 nt, Artificial Sequence
  Synthetic
guuugccugaguaucaccag

SEQ ID NO: 568350 - RNA, 21 nt, Artificial Sequence
  Synthetic
uguuugccugaguaucaccag

SEQ ID NO: 568351 - RNA, 22 nt, Artificial Sequence
  Synthetic
cuguuugccugaguaucaccag

SEQ ID NO: 568352 - RNA, 23 nt, Artificial Sequence
  Synthetic
ccuguuugccugaguaucaccag

SEQ ID NO: 568353 - RNA, 24 nt, Artificial Sequence
  Synthetic
cccuguuugccugaguaucaccag

SEQ ID NO: 568354 - RNA, 18 nt, Artificial Sequence
  Synthetic
gcucucugccuucaccag

SEQ ID NO: 568355 - RNA, 19 nt, Artificial Sequence
  Synthetic
agcucucugccuucaccag

SEQ ID NO: 568356 - RNA, 20 nt, Artificial Sequence
  Synthetic
gagcucucugccuucaccag

SEQ ID NO: 568357 - RNA, 21 nt, Artificial Sequence
  Synthetic
ggagcucucugccuucaccag

SEQ ID NO: 568358 - RNA, 22 nt, Artificial Sequence
  Synthetic
aggagcucucugccuucaccag

SEQ ID NO: 568359 - RNA, 23 nt, Artificial Sequence
  Synthetic
aaggagcucucugccuucaccag

SEQ ID NO: 568360 - RNA, 24 nt, Artificial Sequence
  Synthetic
gaaggagcucucugccuucaccag

SEQ ID NO: 568361 - RNA, 18 nt, Artificial Sequence
  Synthetic
gaaaacaacccagaccag

SEQ ID NO: 568362 - RNA, 19 nt, Artificial Sequence
  Synthetic
agaaaacaacccagaccag

SEQ ID NO: 568363 - RNA, 20 nt, Artificial Sequence
  Synthetic
aagaaaacaacccagaccag

SEQ ID NO: 568364 - RNA, 21 nt, Artificial Sequence
  Synthetic
gaagaaaacaacccagaccag

SEQ ID NO: 568365 - RNA, 22 nt, Artificial Sequence
  Synthetic
ugaagaaaacaacccagaccag

SEQ ID NO: 568366 - RNA, 23 nt, Artificial Sequence
  Synthetic
augaagaaaacaacccagaccag

SEQ ID NO: 568367 - RNA, 24 nt, Artificial Sequence
  Synthetic
gaugaagaaaacaacccagaccag

SEQ ID NO: 568368 - RNA, 20 nt, Artificial Sequence
  Synthetic
cgugucaagggagagaccag

SEQ ID NO: 568369 - RNA, 21 nt, Artificial Sequence
  Synthetic
acgugucaagggagagaccag

SEQ ID NO: 568370 - RNA, 22 nt, Artificial Sequence
  Synthetic
cacgugucaagggagagaccag

SEQ ID NO: 568371 - RNA, 23 nt, Artificial Sequence
  Synthetic
ccacgugucaagggagagaccag

SEQ ID NO: 568372 - RNA, 24 nt, Artificial Sequence
  Synthetic
cccacgugucaagggagagaccag

SEQ ID NO: 568373 - RNA, 18 nt, Artificial Sequence
  Synthetic
ucaggaguuugagaccag

SEQ ID NO: 568374 - RNA, 19 nt, Artificial Sequence
  Synthetic
cucaggaguuugagaccag

SEQ ID NO: 568375 - RNA, 20 nt, Artificial Sequence
  Synthetic
ccucaggaguuugagaccag

SEQ ID NO: 568376 - RNA, 21 nt, Artificial Sequence
  Synthetic
accucaggaguuugagaccag

SEQ ID NO: 568377 - RNA, 22 nt, Artificial Sequence
  Synthetic
gaccucaggaguuugagaccag

SEQ ID NO: 568378 - RNA, 23 nt, Artificial Sequence
  Synthetic
ugaccucaggaguuugagaccag

SEQ ID NO: 568379 - RNA, 24 nt, Artificial Sequence
  Synthetic
uugaccucaggaguuugagaccag

SEQ ID NO: 568380 - RNA, 18 nt, Artificial Sequence
  Synthetic
agaugcagccaggaccag

SEQ ID NO: 568381 - RNA, 19 nt, Artificial Sequence
  Synthetic
cagaugcagccaggaccag

SEQ ID NO: 568382 - RNA, 20 nt, Artificial Sequence
  Synthetic
ucagaugcagccaggaccag

SEQ ID NO: 568383 - RNA, 21 nt, Artificial Sequence
  Synthetic
gucagaugcagccaggaccag

SEQ ID NO: 568384 - RNA, 22 nt, Artificial Sequence
  Synthetic
agucagaugcagccaggaccag

SEQ ID NO: 568385 - RNA, 23 nt, Artificial Sequence
  Synthetic
aagucagaugcagccaggaccag

SEQ ID NO: 568386 - RNA, 24 nt, Artificial Sequence
  Synthetic
caagucagaugcagccaggaccag

SEQ ID NO: 568387 - RNA, 18 nt, Artificial Sequence
  Synthetic
cugagugaaaaugaccag

SEQ ID NO: 568388 - RNA, 19 nt, Artificial Sequence
  Synthetic
ccugagugaaaaugaccag

SEQ ID NO: 568389 - RNA, 20 nt, Artificial Sequence
  Synthetic
gccugagugaaaaugaccag

SEQ ID NO: 568390 - RNA, 21 nt, Artificial Sequence
  Synthetic
agccugagugaaaaugaccag

SEQ ID NO: 568391 - RNA, 22 nt, Artificial Sequence
  Synthetic
cagccugagugaaaaugaccag

SEQ ID NO: 568392 - RNA, 23 nt, Artificial Sequence
  Synthetic
gcagccugagugaaaaugaccag

SEQ ID NO: 568393 - RNA, 24 nt, Artificial Sequence
  Synthetic
ggcagccugagugaaaaugaccag

SEQ ID NO: 568394 - RNA, 18 nt, Artificial Sequence
  Synthetic
aacaauuuaccauaccag

SEQ ID NO: 568395 - RNA, 19 nt, Artificial Sequence
  Synthetic
caacaauuuaccauaccag

SEQ ID NO: 568396 - RNA, 20 nt, Artificial Sequence
  Synthetic
ucaacaauuuaccauaccag

SEQ ID NO: 568397 - RNA, 21 nt, Artificial Sequence
  Synthetic
aucaacaauuuaccauaccag

SEQ ID NO: 568398 - RNA, 22 nt, Artificial Sequence
  Synthetic
aaucaacaauuuaccauaccag

SEQ ID NO: 568399 - RNA, 23 nt, Artificial Sequence
  Synthetic
gaaucaacaauuuaccauaccag

SEQ ID NO: 568400 - RNA, 24 nt, Artificial Sequence
  Synthetic
agaaucaacaauuuaccauaccag

SEQ ID NO: 568401 - RNA, 18 nt, Artificial Sequence
  Synthetic
agagguuccaaaacccag

SEQ ID NO: 568402 - RNA, 19 nt, Artificial Sequence
  Synthetic
aagagguuccaaaacccag

SEQ ID NO: 568403 - RNA, 20 nt, Artificial Sequence
  Synthetic
aaagagguuccaaaacccag

SEQ ID NO: 568404 - RNA, 21 nt, Artificial Sequence
  Synthetic
aaaagagguuccaaaacccag

SEQ ID NO: 568405 - RNA, 22 nt, Artificial Sequence
  Synthetic
caaaagagguuccaaaacccag

SEQ ID NO: 568406 - RNA, 23 nt, Artificial Sequence
  Synthetic
acaaaagagguuccaaaacccag

SEQ ID NO: 568407 - RNA, 24 nt, Artificial Sequence
  Synthetic
uacaaaagagguuccaaaacccag

SEQ ID NO: 568408 - RNA, 18 nt, Artificial Sequence
  Synthetic
agaauugcuugaacccag

SEQ ID NO: 568409 - RNA, 19 nt, Artificial Sequence
  Synthetic
gagaauugcuugaacccag

SEQ ID NO: 568410 - RNA, 20 nt, Artificial Sequence
  Synthetic
agagaauugcuugaacccag

SEQ ID NO: 568411 - RNA, 21 nt, Artificial Sequence
  Synthetic
cagagaauugcuugaacccag

SEQ ID NO: 568412 - RNA, 22 nt, Artificial Sequence
  Synthetic
acagagaauugcuugaacccag

SEQ ID NO: 568413 - RNA, 23 nt, Artificial Sequence
  Synthetic
gacagagaauugcuugaacccag

SEQ ID NO: 568414 - RNA, 24 nt, Artificial Sequence
  Synthetic
agacagagaauugcuugaacccag

SEQ ID NO: 568415 - RNA, 18 nt, Artificial Sequence
  Synthetic
guaagcuaccacacccag

SEQ ID NO: 568416 - RNA, 19 nt, Artificial Sequence
  Synthetic
cguaagcuaccacacccag

SEQ ID NO: 568417 - RNA, 20 nt, Artificial Sequence
  Synthetic
gcguaagcuaccacacccag

SEQ ID NO: 568418 - RNA, 21 nt, Artificial Sequence
  Synthetic
ggcguaagcuaccacacccag

SEQ ID NO: 568419 - RNA, 22 nt, Artificial Sequence
  Synthetic
aggcguaagcuaccacacccag

SEQ ID NO: 568420 - RNA, 23 nt, Artificial Sequence
  Synthetic
gaggcguaagcuaccacacccag

SEQ ID NO: 568421 - RNA, 24 nt, Artificial Sequence
  Synthetic
agaggcguaagcuaccacacccag

SEQ ID NO: 568422 - RNA, 18 nt, Artificial Sequence
  Synthetic
aacagagaaggcacccag

SEQ ID NO: 568423 - RNA, 19 nt, Artificial Sequence
  Synthetic
caacagagaaggcacccag

SEQ ID NO: 568424 - RNA, 20 nt, Artificial Sequence
  Synthetic
ccaacagagaaggcacccag

SEQ ID NO: 568425 - RNA, 21 nt, Artificial Sequence
  Synthetic
cccaacagagaaggcacccag

SEQ ID NO: 568426 - RNA, 22 nt, Artificial Sequence
  Synthetic
gcccaacagagaaggcacccag

SEQ ID NO: 568427 - RNA, 23 nt, Artificial Sequence
  Synthetic
ggcccaacagagaaggcacccag

SEQ ID NO: 568428 - RNA, 24 nt, Artificial Sequence
  Synthetic
gggcccaacagagaaggcacccag

SEQ ID NO: 568429 - RNA, 18 nt, Artificial Sequence
  Synthetic
ucucacucugucacccag

SEQ ID NO: 568430 - RNA, 19 nt, Artificial Sequence
  Synthetic
gucucacucugucacccag

SEQ ID NO: 568431 - RNA, 20 nt, Artificial Sequence
  Synthetic
ggucucacucugucacccag

SEQ ID NO: 568432 - RNA, 21 nt, Artificial Sequence
  Synthetic
gggucucacucugucacccag

SEQ ID NO: 568433 - RNA, 22 nt, Artificial Sequence
  Synthetic
agggucucacucugucacccag

SEQ ID NO: 568434 - RNA, 23 nt, Artificial Sequence
  Synthetic
cagggucucacucugucacccag

SEQ ID NO: 568435 - RNA, 24 nt, Artificial Sequence
  Synthetic
acagggucucacucugucacccag

SEQ ID NO: 568436 - RNA, 18 nt, Artificial Sequence
  Synthetic
guuaugggagggacccag

SEQ ID NO: 568437 - RNA, 19 nt, Artificial Sequence
  Synthetic
uguuaugggagggacccag

SEQ ID NO: 568438 - RNA, 20 nt, Artificial Sequence
  Synthetic
guguuaugggagggacccag

SEQ ID NO: 568439 - RNA, 21 nt, Artificial Sequence
  Synthetic
uguguuaugggagggacccag

SEQ ID NO: 568440 - RNA, 22 nt, Artificial Sequence
  Synthetic
auguguuaugggagggacccag

SEQ ID NO: 568441 - RNA, 23 nt, Artificial Sequence
  Synthetic
cauguguuaugggagggacccag

SEQ ID NO: 568442 - RNA, 24 nt, Artificial Sequence
  Synthetic
ccauguguuaugggagggacccag

SEQ ID NO: 568443 - RNA, 18 nt, Artificial Sequence
  Synthetic
gucaugugagggacccag

SEQ ID NO: 568444 - RNA, 19 nt, Artificial Sequence
  Synthetic
ugucaugugagggacccag

SEQ ID NO: 568445 - RNA, 20 nt, Artificial Sequence
  Synthetic
gugucaugugagggacccag

SEQ ID NO: 568446 - RNA, 21 nt, Artificial Sequence
  Synthetic
ugugucaugugagggacccag

SEQ ID NO: 568447 - RNA, 22 nt, Artificial Sequence
  Synthetic
augugucaugugagggacccag

SEQ ID NO: 568448 - RNA, 23 nt, Artificial Sequence
  Synthetic
caugugucaugugagggacccag

SEQ ID NO: 568449 - RNA, 24 nt, Artificial Sequence
  Synthetic
ccaugugucaugugagggacccag

SEQ ID NO: 568450 - RNA, 18 nt, Artificial Sequence
  Synthetic
aagaagccguggacccag

SEQ ID NO: 568451 - RNA, 19 nt, Artificial Sequence
  Synthetic
aaagaagccguggacccag

SEQ ID NO: 568452 - RNA, 20 nt, Artificial Sequence
  Synthetic
aaaagaagccguggacccag

SEQ ID NO: 568453 - RNA, 21 nt, Artificial Sequence
  Synthetic
aaaaagaagccguggacccag

SEQ ID NO: 568454 - RNA, 22 nt, Artificial Sequence
  Synthetic
uaaaaagaagccguggacccag

SEQ ID NO: 568455 - RNA, 23 nt, Artificial Sequence
  Synthetic
uuaaaaagaagccguggacccag

SEQ ID NO: 568456 - RNA, 24 nt, Artificial Sequence
  Synthetic
uuuaaaaagaagccguggacccag

SEQ ID NO: 568457 - RNA, 18 nt, Artificial Sequence
  Synthetic
aguuauguaaauacccag

SEQ ID NO: 568458 - RNA, 19 nt, Artificial Sequence
  Synthetic
aaguuauguaaauacccag

SEQ ID NO: 568459 - RNA, 20 nt, Artificial Sequence
  Synthetic
aaaguuauguaaauacccag

SEQ ID NO: 568460 - RNA, 21 nt, Artificial Sequence
  Synthetic
uaaaguuauguaaauacccag

SEQ ID NO: 568461 - RNA, 22 nt, Artificial Sequence
  Synthetic
auaaaguuauguaaauacccag

SEQ ID NO: 568462 - RNA, 23 nt, Artificial Sequence
  Synthetic
aauaaaguuauguaaauacccag

SEQ ID NO: 568463 - RNA, 24 nt, Artificial Sequence
  Synthetic
aaauaaaguuauguaaauacccag

SEQ ID NO: 568464 - RNA, 18 nt, Artificial Sequence
  Synthetic
aaaugacuuuuuacccag

SEQ ID NO: 568465 - RNA, 19 nt, Artificial Sequence
  Synthetic
uaaaugacuuuuuacccag

SEQ ID NO: 568466 - RNA, 20 nt, Artificial Sequence
  Synthetic
guaaaugacuuuuuacccag

SEQ ID NO: 568467 - RNA, 21 nt, Artificial Sequence
  Synthetic
uguaaaugacuuuuuacccag

SEQ ID NO: 568468 - RNA, 22 nt, Artificial Sequence
  Synthetic
auguaaaugacuuuuuacccag

SEQ ID NO: 568469 - RNA, 23 nt, Artificial Sequence
  Synthetic
gauguaaaugacuuuuuacccag

SEQ ID NO: 568470 - RNA, 24 nt, Artificial Sequence
  Synthetic
ugauguaaaugacuuuuuacccag

SEQ ID NO: 568471 - RNA, 18 nt, Artificial Sequence
  Synthetic
cacuaggcagugccccag

SEQ ID NO: 568472 - RNA, 19 nt, Artificial Sequence
  Synthetic
ccacuaggcagugccccag

SEQ ID NO: 568473 - RNA, 20 nt, Artificial Sequence
  Synthetic
uccacuaggcagugccccag

SEQ ID NO: 568474 - RNA, 21 nt, Artificial Sequence
  Synthetic
cuccacuaggcagugccccag

SEQ ID NO: 568475 - RNA, 22 nt, Artificial Sequence
  Synthetic
gcuccacuaggcagugccccag

SEQ ID NO: 568476 - RNA, 23 nt, Artificial Sequence
  Synthetic
agcuccacuaggcagugccccag

SEQ ID NO: 568477 - RNA, 24 nt, Artificial Sequence
  Synthetic
cagcuccacuaggcagugccccag

SEQ ID NO: 568478 - RNA, 18 nt, Artificial Sequence
  Synthetic
ucgcucuuguugccccag

SEQ ID NO: 568479 - RNA, 19 nt, Artificial Sequence
  Synthetic
uucgcucuuguugccccag

SEQ ID NO: 568480 - RNA, 20 nt, Artificial Sequence
  Synthetic
cuucgcucuuguugccccag

SEQ ID NO: 568481 - RNA, 21 nt, Artificial Sequence
  Synthetic
gcuucgcucuuguugccccag

SEQ ID NO: 568482 - RNA, 22 nt, Artificial Sequence
  Synthetic
agcuucgcucuuguugccccag

SEQ ID NO: 568483 - RNA, 23 nt, Artificial Sequence
  Synthetic
gagcuucgcucuuguugccccag

SEQ ID NO: 568484 - RNA, 24 nt, Artificial Sequence
  Synthetic
ggagcuucgcucuuguugccccag

SEQ ID NO: 568485 - RNA, 18 nt, Artificial Sequence
  Synthetic
gaacuaccccauccccag

SEQ ID NO: 568486 - RNA, 19 nt, Artificial Sequence
  Synthetic
ugaacuaccccauccccag

SEQ ID NO: 568487 - RNA, 20 nt, Artificial Sequence
  Synthetic
uugaacuaccccauccccag

SEQ ID NO: 568488 - RNA, 21 nt, Artificial Sequence
  Synthetic
uuugaacuaccccauccccag

SEQ ID NO: 568489 - RNA, 22 nt, Artificial Sequence
  Synthetic
cuuugaacuaccccauccccag

SEQ ID NO: 568490 - RNA, 23 nt, Artificial Sequence
  Synthetic
acuuugaacuaccccauccccag

SEQ ID NO: 568491 - RNA, 24 nt, Artificial Sequence
  Synthetic
aacuuugaacuaccccauccccag

SEQ ID NO: 568492 - RNA, 18 nt, Artificial Sequence
  Synthetic
gagccaacucguccccag

SEQ ID NO: 568493 - RNA, 19 nt, Artificial Sequence
  Synthetic
cgagccaacucguccccag

SEQ ID NO: 568494 - RNA, 20 nt, Artificial Sequence
  Synthetic
ccgagccaacucguccccag

SEQ ID NO: 568495 - RNA, 21 nt, Artificial Sequence
  Synthetic
cccgagccaacucguccccag

SEQ ID NO: 568496 - RNA, 22 nt, Artificial Sequence
  Synthetic
ucccgagccaacucguccccag

SEQ ID NO: 568497 - RNA, 23 nt, Artificial Sequence
  Synthetic
aucccgagccaacucguccccag

SEQ ID NO: 568498 - RNA, 24 nt, Artificial Sequence
  Synthetic
aaucccgagccaacucguccccag

SEQ ID NO: 568499 - RNA, 18 nt, Artificial Sequence
  Synthetic
ugauauauuaaggcccag

SEQ ID NO: 568500 - RNA, 19 nt, Artificial Sequence
  Synthetic
cugauauauuaaggcccag

SEQ ID NO: 568501 - RNA, 20 nt, Artificial Sequence
  Synthetic
ucugauauauuaaggcccag

SEQ ID NO: 568502 - RNA, 21 nt, Artificial Sequence
  Synthetic
uucugauauauuaaggcccag

SEQ ID NO: 568503 - RNA, 22 nt, Artificial Sequence
  Synthetic
guucugauauauuaaggcccag

SEQ ID NO: 568504 - RNA, 23 nt, Artificial Sequence
  Synthetic
gguucugauauauuaaggcccag

SEQ ID NO: 568505 - RNA, 24 nt, Artificial Sequence
  Synthetic
ugguucugauauauuaaggcccag

SEQ ID NO: 568506 - RNA, 18 nt, Artificial Sequence
  Synthetic
cgguaaagaagggcccag

SEQ ID NO: 568507 - RNA, 19 nt, Artificial Sequence
  Synthetic
gcgguaaagaagggcccag

SEQ ID NO: 568508 - RNA, 20 nt, Artificial Sequence
  Synthetic
ggcgguaaagaagggcccag

SEQ ID NO: 568509 - RNA, 21 nt, Artificial Sequence
  Synthetic
gggcgguaaagaagggcccag

SEQ ID NO: 568510 - RNA, 22 nt, Artificial Sequence
  Synthetic
ggggcgguaaagaagggcccag

SEQ ID NO: 568511 - RNA, 23 nt, Artificial Sequence
  Synthetic
aggggcgguaaagaagggcccag

SEQ ID NO: 568512 - RNA, 24 nt, Artificial Sequence
  Synthetic
uaggggcgguaaagaagggcccag

SEQ ID NO: 568513 - RNA, 18 nt, Artificial Sequence
  Synthetic
acuuugucaaaugcccag

SEQ ID NO: 568514 - RNA, 19 nt, Artificial Sequence
  Synthetic
gacuuugucaaaugcccag

SEQ ID NO: 568515 - RNA, 20 nt, Artificial Sequence
  Synthetic
agacuuugucaaaugcccag

SEQ ID NO: 568516 - RNA, 21 nt, Artificial Sequence
  Synthetic
aagacuuugucaaaugcccag

SEQ ID NO: 568517 - RNA, 22 nt, Artificial Sequence
  Synthetic
aaagacuuugucaaaugcccag

SEQ ID NO: 568518 - RNA, 23 nt, Artificial Sequence
  Synthetic
gaaagacuuugucaaaugcccag

SEQ ID NO: 568519 - RNA, 24 nt, Artificial Sequence
  Synthetic
cgaaagacuuugucaaaugcccag

SEQ ID NO: 568520 - RNA, 18 nt, Artificial Sequence
  Synthetic
cuggaagcuucaucccag

SEQ ID NO: 568521 - RNA, 19 nt, Artificial Sequence
  Synthetic
ucuggaagcuucaucccag

SEQ ID NO: 568522 - RNA, 20 nt, Artificial Sequence
  Synthetic
cucuggaagcuucaucccag

SEQ ID NO: 568523 - RNA, 21 nt, Artificial Sequence
  Synthetic
ccucuggaagcuucaucccag

SEQ ID NO: 568524 - RNA, 22 nt, Artificial Sequence
  Synthetic
uccucuggaagcuucaucccag

SEQ ID NO: 568525 - RNA, 23 nt, Artificial Sequence
  Synthetic
uuccucuggaagcuucaucccag

SEQ ID NO: 568526 - RNA, 24 nt, Artificial Sequence
  Synthetic
cuuccucuggaagcuucaucccag

SEQ ID NO: 568527 - RNA, 18 nt, Artificial Sequence
  Synthetic
uucuacucagccucccag

SEQ ID NO: 568528 - RNA, 19 nt, Artificial Sequence
  Synthetic
cuucuacucagccucccag

SEQ ID NO: 568529 - RNA, 20 nt, Artificial Sequence
  Synthetic
gcuucuacucagccucccag

SEQ ID NO: 568530 - RNA, 21 nt, Artificial Sequence
  Synthetic
agcuucuacucagccucccag

SEQ ID NO: 568531 - RNA, 22 nt, Artificial Sequence
  Synthetic
aagcuucuacucagccucccag

SEQ ID NO: 568532 - RNA, 23 nt, Artificial Sequence
  Synthetic
caagcuucuacucagccucccag

SEQ ID NO: 568533 - RNA, 24 nt, Artificial Sequence
  Synthetic
acaagcuucuacucagccucccag

SEQ ID NO: 568534 - RNA, 18 nt, Artificial Sequence
  Synthetic
gggugccuguagucccag

SEQ ID NO: 568535 - RNA, 19 nt, Artificial Sequence
  Synthetic
ugggugccuguagucccag

SEQ ID NO: 568536 - RNA, 20 nt, Artificial Sequence
  Synthetic
gugggugccuguagucccag

SEQ ID NO: 568537 - RNA, 21 nt, Artificial Sequence
  Synthetic
ggugggugccuguagucccag

SEQ ID NO: 568538 - RNA, 22 nt, Artificial Sequence
  Synthetic
uggugggugccuguagucccag

SEQ ID NO: 568539 - RNA, 23 nt, Artificial Sequence
  Synthetic
guggugggugccuguagucccag

SEQ ID NO: 568540 - RNA, 24 nt, Artificial Sequence
  Synthetic
gguggugggugccuguagucccag

SEQ ID NO: 568541 - RNA, 18 nt, Artificial Sequence
  Synthetic
ccuucugcacugucccag

SEQ ID NO: 568542 - RNA, 19 nt, Artificial Sequence
  Synthetic
uccuucugcacugucccag

SEQ ID NO: 568543 - RNA, 20 nt, Artificial Sequence
  Synthetic
uuccuucugcacugucccag

SEQ ID NO: 568544 - RNA, 21 nt, Artificial Sequence
  Synthetic
uuuccuucugcacugucccag

SEQ ID NO: 568545 - RNA, 22 nt, Artificial Sequence
  Synthetic
uuuuccuucugcacugucccag

SEQ ID NO: 568546 - RNA, 23 nt, Artificial Sequence
  Synthetic
auuuuccuucugcacugucccag

SEQ ID NO: 568547 - RNA, 24 nt, Artificial Sequence
  Synthetic
cauuuuccuucugcacugucccag

SEQ ID NO: 568548 - RNA, 18 nt, Artificial Sequence
  Synthetic
aagggaagaaaaagccag

SEQ ID NO: 568549 - RNA, 19 nt, Artificial Sequence
  Synthetic
caagggaagaaaaagccag

SEQ ID NO: 568550 - RNA, 20 nt, Artificial Sequence
  Synthetic
acaagggaagaaaaagccag

SEQ ID NO: 568551 - RNA, 21 nt, Artificial Sequence
  Synthetic
gacaagggaagaaaaagccag

SEQ ID NO: 568552 - RNA, 22 nt, Artificial Sequence
  Synthetic
agacaagggaagaaaaagccag

SEQ ID NO: 568553 - RNA, 23 nt, Artificial Sequence
  Synthetic
aagacaagggaagaaaaagccag

SEQ ID NO: 568554 - RNA, 24 nt, Artificial Sequence
  Synthetic
gaagacaagggaagaaaaagccag

SEQ ID NO: 568555 - RNA, 18 nt, Artificial Sequence
  Synthetic
cucuaucuucaaagccag

SEQ ID NO: 568556 - RNA, 19 nt, Artificial Sequence
  Synthetic
ucucuaucuucaaagccag

SEQ ID NO: 568557 - RNA, 20 nt, Artificial Sequence
  Synthetic
uucucuaucuucaaagccag

SEQ ID NO: 568558 - RNA, 21 nt, Artificial Sequence
  Synthetic
uuucucuaucuucaaagccag

SEQ ID NO: 568559 - RNA, 22 nt, Artificial Sequence
  Synthetic
cuuucucuaucuucaaagccag

SEQ ID NO: 568560 - RNA, 23 nt, Artificial Sequence
  Synthetic
ccuuucucuaucuucaaagccag

SEQ ID NO: 568561 - RNA, 24 nt, Artificial Sequence
  Synthetic
cccuuucucuaucuucaaagccag

SEQ ID NO: 568562 - RNA, 22 nt, Artificial Sequence
  Synthetic
cggcagaaacccuacaagccag

SEQ ID NO: 568563 - RNA, 23 nt, Artificial Sequence
  Synthetic
ucggcagaaacccuacaagccag

SEQ ID NO: 568564 - RNA, 24 nt, Artificial Sequence
  Synthetic
cucggcagaaacccuacaagccag

SEQ ID NO: 568565 - RNA, 18 nt, Artificial Sequence
  Synthetic
agaaaaguuggaagccag

SEQ ID NO: 568566 - RNA, 19 nt, Artificial Sequence
  Synthetic
aagaaaaguuggaagccag

SEQ ID NO: 568567 - RNA, 20 nt, Artificial Sequence
  Synthetic
gaagaaaaguuggaagccag

SEQ ID NO: 568568 - RNA, 21 nt, Artificial Sequence
  Synthetic
agaagaaaaguuggaagccag

SEQ ID NO: 568569 - RNA, 22 nt, Artificial Sequence
  Synthetic
uagaagaaaaguuggaagccag

SEQ ID NO: 568570 - RNA, 23 nt, Artificial Sequence
  Synthetic
guagaagaaaaguuggaagccag

SEQ ID NO: 568571 - RNA, 24 nt, Artificial Sequence
  Synthetic
uguagaagaaaaguuggaagccag

SEQ ID NO: 568572 - RNA, 18 nt, Artificial Sequence
  Synthetic
gaacaauauauaagccag

SEQ ID NO: 568573 - RNA, 19 nt, Artificial Sequence
  Synthetic
ugaacaauauauaagccag

SEQ ID NO: 568574 - RNA, 20 nt, Artificial Sequence
  Synthetic
uugaacaauauauaagccag

SEQ ID NO: 568575 - RNA, 21 nt, Artificial Sequence
  Synthetic
auugaacaauauauaagccag

SEQ ID NO: 568576 - RNA, 22 nt, Artificial Sequence
  Synthetic
uauugaacaauauauaagccag

SEQ ID NO: 568577 - RNA, 23 nt, Artificial Sequence
  Synthetic
uuauugaacaauauauaagccag

SEQ ID NO: 568578 - RNA, 24 nt, Artificial Sequence
  Synthetic
uuuauugaacaauauauaagccag

SEQ ID NO: 568579 - RNA, 18 nt, Artificial Sequence
  Synthetic
ugaacuagccccagccag

SEQ ID NO: 568580 - RNA, 19 nt, Artificial Sequence
  Synthetic
uugaacuagccccagccag

SEQ ID NO: 568581 - RNA, 20 nt, Artificial Sequence
  Synthetic
uuugaacuagccccagccag

SEQ ID NO: 568582 - RNA, 21 nt, Artificial Sequence
  Synthetic
auuugaacuagccccagccag

SEQ ID NO: 568583 - RNA, 22 nt, Artificial Sequence
  Synthetic
uauuugaacuagccccagccag

SEQ ID NO: 568584 - RNA, 23 nt, Artificial Sequence
  Synthetic
auauuugaacuagccccagccag

SEQ ID NO: 568585 - RNA, 24 nt, Artificial Sequence
  Synthetic
aauauuugaacuagccccagccag

SEQ ID NO: 568586 - RNA, 18 nt, Artificial Sequence
  Synthetic
gccuguaaaagcagccag

SEQ ID NO: 568587 - RNA, 19 nt, Artificial Sequence
  Synthetic
agccuguaaaagcagccag

SEQ ID NO: 568588 - RNA, 20 nt, Artificial Sequence
  Synthetic
cagccuguaaaagcagccag

SEQ ID NO: 568589 - RNA, 21 nt, Artificial Sequence
  Synthetic
ccagccuguaaaagcagccag

SEQ ID NO: 568590 - RNA, 22 nt, Artificial Sequence
  Synthetic
gccagccuguaaaagcagccag

SEQ ID NO: 568591 - RNA, 23 nt, Artificial Sequence
  Synthetic
ugccagccuguaaaagcagccag

SEQ ID NO: 568592 - RNA, 24 nt, Artificial Sequence
  Synthetic
augccagccuguaaaagcagccag

SEQ ID NO: 568593 - RNA, 18 nt, Artificial Sequence
  Synthetic
uuagaaucaugcagccag

SEQ ID NO: 568594 - RNA, 19 nt, Artificial Sequence
  Synthetic
cuuagaaucaugcagccag

SEQ ID NO: 568595 - RNA, 20 nt, Artificial Sequence
  Synthetic
ccuuagaaucaugcagccag

SEQ ID NO: 568596 - RNA, 21 nt, Artificial Sequence
  Synthetic
uccuuagaaucaugcagccag

SEQ ID NO: 568597 - RNA, 22 nt, Artificial Sequence
  Synthetic
cuccuuagaaucaugcagccag

SEQ ID NO: 568598 - RNA, 23 nt, Artificial Sequence
  Synthetic
ccuccuuagaaucaugcagccag

SEQ ID NO: 568599 - RNA, 24 nt, Artificial Sequence
  Synthetic
uccuccuuagaaucaugcagccag

SEQ ID NO: 568600 - RNA, 18 nt, Artificial Sequence
  Synthetic
gcugaaacauucagccag

SEQ ID NO: 568601 - RNA, 19 nt, Artificial Sequence
  Synthetic
ggcugaaacauucagccag

SEQ ID NO: 568602 - RNA, 20 nt, Artificial Sequence
  Synthetic
aggcugaaacauucagccag

SEQ ID NO: 568603 - RNA, 21 nt, Artificial Sequence
  Synthetic
uaggcugaaacauucagccag

SEQ ID NO: 568604 - RNA, 22 nt, Artificial Sequence
  Synthetic
auaggcugaaacauucagccag

SEQ ID NO: 568605 - RNA, 23 nt, Artificial Sequence
  Synthetic
aauaggcugaaacauucagccag

SEQ ID NO: 568606 - RNA, 24 nt, Artificial Sequence
  Synthetic
uaauaggcugaaacauucagccag

SEQ ID NO: 568607 - RNA, 18 nt, Artificial Sequence
  Synthetic
acugcaaggaagagccag

SEQ ID NO: 568608 - RNA, 19 nt, Artificial Sequence
  Synthetic
uacugcaaggaagagccag

SEQ ID NO: 568609 - RNA, 20 nt, Artificial Sequence
  Synthetic
auacugcaaggaagagccag

SEQ ID NO: 568610 - RNA, 21 nt, Artificial Sequence
  Synthetic
uauacugcaaggaagagccag

SEQ ID NO: 568611 - RNA, 22 nt, Artificial Sequence
  Synthetic
uuauacugcaaggaagagccag

SEQ ID NO: 568612 - RNA, 23 nt, Artificial Sequence
  Synthetic
cuuauacugcaaggaagagccag

SEQ ID NO: 568613 - RNA, 24 nt, Artificial Sequence
  Synthetic
ccuuauacugcaaggaagagccag

SEQ ID NO: 568614 - RNA, 18 nt, Artificial Sequence
  Synthetic
gcaauuguggagagccag

SEQ ID NO: 568615 - RNA, 19 nt, Artificial Sequence
  Synthetic
ggcaauuguggagagccag

SEQ ID NO: 568616 - RNA, 20 nt, Artificial Sequence
  Synthetic
gggcaauuguggagagccag

SEQ ID NO: 568617 - RNA, 21 nt, Artificial Sequence
  Synthetic
ggggcaauuguggagagccag

SEQ ID NO: 568618 - RNA, 22 nt, Artificial Sequence
  Synthetic
aggggcaauuguggagagccag

SEQ ID NO: 568619 - RNA, 23 nt, Artificial Sequence
  Synthetic
caggggcaauuguggagagccag

SEQ ID NO: 568620 - RNA, 24 nt, Artificial Sequence
  Synthetic
ucaggggcaauuguggagagccag

SEQ ID NO: 568621 - RNA, 18 nt, Artificial Sequence
  Synthetic
ugcuccugcucuagccag

SEQ ID NO: 568622 - RNA, 19 nt, Artificial Sequence
  Synthetic
uugcuccugcucuagccag

SEQ ID NO: 568623 - RNA, 20 nt, Artificial Sequence
  Synthetic
cuugcuccugcucuagccag

SEQ ID NO: 568624 - RNA, 21 nt, Artificial Sequence
  Synthetic
ucuugcuccugcucuagccag

SEQ ID NO: 568625 - RNA, 22 nt, Artificial Sequence
  Synthetic
cucuugcuccugcucuagccag

SEQ ID NO: 568626 - RNA, 23 nt, Artificial Sequence
  Synthetic
ucucuugcuccugcucuagccag

SEQ ID NO: 568627 - RNA, 24 nt, Artificial Sequence
  Synthetic
cucucuugcuccugcucuagccag

SEQ ID NO: 568628 - RNA, 18 nt, Artificial Sequence
  Synthetic
gggcagaguucuagccag

SEQ ID NO: 568629 - RNA, 19 nt, Artificial Sequence
  Synthetic
agggcagaguucuagccag

SEQ ID NO: 568630 - RNA, 20 nt, Artificial Sequence
  Synthetic
cagggcagaguucuagccag

SEQ ID NO: 568631 - RNA, 21 nt, Artificial Sequence
  Synthetic
acagggcagaguucuagccag

SEQ ID NO: 568632 - RNA, 22 nt, Artificial Sequence
  Synthetic
cacagggcagaguucuagccag

SEQ ID NO: 568633 - RNA, 23 nt, Artificial Sequence
  Synthetic
ccacagggcagaguucuagccag

SEQ ID NO: 568634 - RNA, 24 nt, Artificial Sequence
  Synthetic
gccacagggcagaguucuagccag

SEQ ID NO: 568635 - RNA, 18 nt, Artificial Sequence
  Synthetic
gggccauucaagcgccag

SEQ ID NO: 568636 - RNA, 19 nt, Artificial Sequence
  Synthetic
ggggccauucaagcgccag

SEQ ID NO: 568637 - RNA, 20 nt, Artificial Sequence
  Synthetic
aggggccauucaagcgccag

SEQ ID NO: 568638 - RNA, 21 nt, Artificial Sequence
  Synthetic
aaggggccauucaagcgccag

SEQ ID NO: 568639 - RNA, 22 nt, Artificial Sequence
  Synthetic
gaaggggccauucaagcgccag

SEQ ID NO: 568640 - RNA, 23 nt, Artificial Sequence
  Synthetic
agaaggggccauucaagcgccag

SEQ ID NO: 568641 - RNA, 24 nt, Artificial Sequence
  Synthetic
cagaaggggccauucaagcgccag

SEQ ID NO: 568642 - RNA, 18 nt, Artificial Sequence
  Synthetic
auugagaggugaggccag

SEQ ID NO: 568643 - RNA, 19 nt, Artificial Sequence
  Synthetic
uauugagaggugaggccag

SEQ ID NO: 568644 - RNA, 20 nt, Artificial Sequence
  Synthetic
cuauugagaggugaggccag

SEQ ID NO: 568645 - RNA, 21 nt, Artificial Sequence
  Synthetic
gcuauugagaggugaggccag

SEQ ID NO: 568646 - RNA, 22 nt, Artificial Sequence
  Synthetic
ugcuauugagaggugaggccag

SEQ ID NO: 568647 - RNA, 23 nt, Artificial Sequence
  Synthetic
augcuauugagaggugaggccag

SEQ ID NO: 568648 - RNA, 24 nt, Artificial Sequence
  Synthetic
aaugcuauugagaggugaggccag

SEQ ID NO: 568649 - RNA, 18 nt, Artificial Sequence
  Synthetic
cacagaucucuaggccag

SEQ ID NO: 568650 - RNA, 19 nt, Artificial Sequence
  Synthetic
ccacagaucucuaggccag

SEQ ID NO: 568651 - RNA, 20 nt, Artificial Sequence
  Synthetic
uccacagaucucuaggccag

SEQ ID NO: 568652 - RNA, 21 nt, Artificial Sequence
  Synthetic
uuccacagaucucuaggccag

SEQ ID NO: 568653 - RNA, 22 nt, Artificial Sequence
  Synthetic
uuuccacagaucucuaggccag

SEQ ID NO: 568654 - RNA, 23 nt, Artificial Sequence
  Synthetic
auuuccacagaucucuaggccag

SEQ ID NO: 568655 - RNA, 24 nt, Artificial Sequence
  Synthetic
aauuuccacagaucucuaggccag

SEQ ID NO: 568656 - RNA, 18 nt, Artificial Sequence
  Synthetic
caacaaaugguaggccag

SEQ ID NO: 568657 - RNA, 19 nt, Artificial Sequence
  Synthetic
ucaacaaaugguaggccag

SEQ ID NO: 568658 - RNA, 20 nt, Artificial Sequence
  Synthetic
aucaacaaaugguaggccag

SEQ ID NO: 568659 - RNA, 21 nt, Artificial Sequence
  Synthetic
gaucaacaaaugguaggccag

SEQ ID NO: 568660 - RNA, 22 nt, Artificial Sequence
  Synthetic
ugaucaacaaaugguaggccag

SEQ ID NO: 568661 - RNA, 23 nt, Artificial Sequence
  Synthetic
gugaucaacaaaugguaggccag

SEQ ID NO: 568662 - RNA, 24 nt, Artificial Sequence
  Synthetic
ggugaucaacaaaugguaggccag

SEQ ID NO: 568663 - RNA, 18 nt, Artificial Sequence
  Synthetic
gguccugccuugggccag

SEQ ID NO: 568664 - RNA, 19 nt, Artificial Sequence
  Synthetic
ugguccugccuugggccag

SEQ ID NO: 568665 - RNA, 20 nt, Artificial Sequence
  Synthetic
uugguccugccuugggccag

SEQ ID NO: 568666 - RNA, 21 nt, Artificial Sequence
  Synthetic
uuugguccugccuugggccag

SEQ ID NO: 568667 - RNA, 22 nt, Artificial Sequence
  Synthetic
uuuugguccugccuugggccag

SEQ ID NO: 568668 - RNA, 23 nt, Artificial Sequence
  Synthetic
uuuuugguccugccuugggccag

SEQ ID NO: 568669 - RNA, 24 nt, Artificial Sequence
  Synthetic
auuuuugguccugccuugggccag

SEQ ID NO: 568670 - RNA, 18 nt, Artificial Sequence
  Synthetic
ugaguagcagcuggccag

SEQ ID NO: 568671 - RNA, 19 nt, Artificial Sequence
  Synthetic
augaguagcagcuggccag

SEQ ID NO: 568672 - RNA, 20 nt, Artificial Sequence
  Synthetic
gaugaguagcagcuggccag

SEQ ID NO: 568673 - RNA, 21 nt, Artificial Sequence
  Synthetic
ggaugaguagcagcuggccag

SEQ ID NO: 568674 - RNA, 22 nt, Artificial Sequence
  Synthetic
gggaugaguagcagcuggccag

SEQ ID NO: 568675 - RNA, 23 nt, Artificial Sequence
  Synthetic
agggaugaguagcagcuggccag

SEQ ID NO: 568676 - RNA, 24 nt, Artificial Sequence
  Synthetic
gagggaugaguagcagcuggccag

SEQ ID NO: 568677 - RNA, 18 nt, Artificial Sequence
  Synthetic
ucucuuccugcuggccag

SEQ ID NO: 568678 - RNA, 19 nt, Artificial Sequence
  Synthetic
gucucuuccugcuggccag

SEQ ID NO: 568679 - RNA, 20 nt, Artificial Sequence
  Synthetic
ggucucuuccugcuggccag

SEQ ID NO: 568680 - RNA, 21 nt, Artificial Sequence
  Synthetic
uggucucuuccugcuggccag

SEQ ID NO: 568681 - RNA, 22 nt, Artificial Sequence
  Synthetic
uuggucucuuccugcuggccag

SEQ ID NO: 568682 - RNA, 23 nt, Artificial Sequence
  Synthetic
guuggucucuuccugcuggccag

SEQ ID NO: 568683 - RNA, 24 nt, Artificial Sequence
  Synthetic
gguuggucucuuccugcuggccag

SEQ ID NO: 568684 - RNA, 18 nt, Artificial Sequence
  Synthetic
gacuauuaggguggccag

SEQ ID NO: 568685 - RNA, 19 nt, Artificial Sequence
  Synthetic
agacuauuaggguggccag

SEQ ID NO: 568686 - RNA, 20 nt, Artificial Sequence
  Synthetic
cagacuauuaggguggccag

SEQ ID NO: 568687 - RNA, 21 nt, Artificial Sequence
  Synthetic
ucagacuauuaggguggccag

SEQ ID NO: 568688 - RNA, 22 nt, Artificial Sequence
  Synthetic
aucagacuauuaggguggccag

SEQ ID NO: 568689 - RNA, 23 nt, Artificial Sequence
  Synthetic
uaucagacuauuaggguggccag

SEQ ID NO: 568690 - RNA, 24 nt, Artificial Sequence
  Synthetic
cuaucagacuauuaggguggccag

SEQ ID NO: 568691 - RNA, 18 nt, Artificial Sequence
  Synthetic
gcucuaacuagaugccag

SEQ ID NO: 568692 - RNA, 19 nt, Artificial Sequence
  Synthetic
ggcucuaacuagaugccag

SEQ ID NO: 568693 - RNA, 20 nt, Artificial Sequence
  Synthetic
uggcucuaacuagaugccag

SEQ ID NO: 568694 - RNA, 21 nt, Artificial Sequence
  Synthetic
auggcucuaacuagaugccag

SEQ ID NO: 568695 - RNA, 22 nt, Artificial Sequence
  Synthetic
cauggcucuaacuagaugccag

SEQ ID NO: 568696 - RNA, 23 nt, Artificial Sequence
  Synthetic
acauggcucuaacuagaugccag

SEQ ID NO: 568697 - RNA, 24 nt, Artificial Sequence
  Synthetic
cacauggcucuaacuagaugccag

SEQ ID NO: 568698 - RNA, 18 nt, Artificial Sequence
  Synthetic
agacaaagaugaugccag

SEQ ID NO: 568699 - RNA, 19 nt, Artificial Sequence
  Synthetic
aagacaaagaugaugccag

SEQ ID NO: 568700 - RNA, 20 nt, Artificial Sequence
  Synthetic
aaagacaaagaugaugccag

SEQ ID NO: 568701 - RNA, 21 nt, Artificial Sequence
  Synthetic
aaaagacaaagaugaugccag

SEQ ID NO: 568702 - RNA, 22 nt, Artificial Sequence
  Synthetic
caaaagacaaagaugaugccag

SEQ ID NO: 568703 - RNA, 23 nt, Artificial Sequence
  Synthetic
ucaaaagacaaagaugaugccag

SEQ ID NO: 568704 - RNA, 24 nt, Artificial Sequence
  Synthetic
gucaaaagacaaagaugaugccag

SEQ ID NO: 568705 - RNA, 18 nt, Artificial Sequence
  Synthetic
agggagaaugagugccag

SEQ ID NO: 568706 - RNA, 19 nt, Artificial Sequence
  Synthetic
gagggagaaugagugccag

SEQ ID NO: 568707 - RNA, 20 nt, Artificial Sequence
  Synthetic
ggagggagaaugagugccag

SEQ ID NO: 568708 - RNA, 21 nt, Artificial Sequence
  Synthetic
aggagggagaaugagugccag

SEQ ID NO: 568709 - RNA, 22 nt, Artificial Sequence
  Synthetic
caggagggagaaugagugccag

SEQ ID NO: 568710 - RNA, 23 nt, Artificial Sequence
  Synthetic
gcaggagggagaaugagugccag

SEQ ID NO: 568711 - RNA, 24 nt, Artificial Sequence
  Synthetic
ggcaggagggagaaugagugccag

SEQ ID NO: 568712 - RNA, 18 nt, Artificial Sequence
  Synthetic
gacagauaguggugccag

SEQ ID NO: 568713 - RNA, 19 nt, Artificial Sequence
  Synthetic
agacagauaguggugccag

SEQ ID NO: 568714 - RNA, 20 nt, Artificial Sequence
  Synthetic
gagacagauaguggugccag

SEQ ID NO: 568715 - RNA, 21 nt, Artificial Sequence
  Synthetic
agagacagauaguggugccag

SEQ ID NO: 568716 - RNA, 22 nt, Artificial Sequence
  Synthetic
aagagacagauaguggugccag

SEQ ID NO: 568717 - RNA, 23 nt, Artificial Sequence
  Synthetic
aaagagacagauaguggugccag

SEQ ID NO: 568718 - RNA, 24 nt, Artificial Sequence
  Synthetic
aaaagagacagauaguggugccag

SEQ ID NO: 568719 - RNA, 18 nt, Artificial Sequence
  Synthetic
uucuugacucugugccag

SEQ ID NO: 568720 - RNA, 19 nt, Artificial Sequence
  Synthetic
guucuugacucugugccag

SEQ ID NO: 568721 - RNA, 20 nt, Artificial Sequence
  Synthetic
uguucuugacucugugccag

SEQ ID NO: 568722 - RNA, 21 nt, Artificial Sequence
  Synthetic
cuguucuugacucugugccag

SEQ ID NO: 568723 - RNA, 22 nt, Artificial Sequence
  Synthetic
gcuguucuugacucugugccag

SEQ ID NO: 568724 - RNA, 23 nt, Artificial Sequence
  Synthetic
agcuguucuugacucugugccag

SEQ ID NO: 568725 - RNA, 24 nt, Artificial Sequence
  Synthetic
aagcuguucuugacucugugccag

SEQ ID NO: 568726 - RNA, 18 nt, Artificial Sequence
  Synthetic
uuccuagugcuuugccag

SEQ ID NO: 568727 - RNA, 19 nt, Artificial Sequence
  Synthetic
uuuccuagugcuuugccag

SEQ ID NO: 568728 - RNA, 20 nt, Artificial Sequence
  Synthetic
auuuccuagugcuuugccag

SEQ ID NO: 568729 - RNA, 21 nt, Artificial Sequence
  Synthetic
gauuuccuagugcuuugccag

SEQ ID NO: 568730 - RNA, 22 nt, Artificial Sequence
  Synthetic
ugauuuccuagugcuuugccag

SEQ ID NO: 568731 - RNA, 23 nt, Artificial Sequence
  Synthetic
uugauuuccuagugcuuugccag

SEQ ID NO: 568732 - RNA, 24 nt, Artificial Sequence
  Synthetic
cuugauuuccuagugcuuugccag

SEQ ID NO: 568733 - RNA, 18 nt, Artificial Sequence
  Synthetic
aacuaaacucaaauccag

SEQ ID NO: 568734 - RNA, 19 nt, Artificial Sequence
  Synthetic
aaacuaaacucaaauccag

SEQ ID NO: 568735 - RNA, 20 nt, Artificial Sequence
  Synthetic
caaacuaaacucaaauccag

SEQ ID NO: 568736 - RNA, 21 nt, Artificial Sequence
  Synthetic
acaaacuaaacucaaauccag

SEQ ID NO: 568737 - RNA, 22 nt, Artificial Sequence
  Synthetic
aacaaacuaaacucaaauccag

SEQ ID NO: 568738 - RNA, 23 nt, Artificial Sequence
  Synthetic
gaacaaacuaaacucaaauccag

SEQ ID NO: 568739 - RNA, 24 nt, Artificial Sequence
  Synthetic
agaacaaacuaaacucaaauccag

SEQ ID NO: 568740 - RNA, 18 nt, Artificial Sequence
  Synthetic
aggcuuggggaaauccag

SEQ ID NO: 568741 - RNA, 19 nt, Artificial Sequence
  Synthetic
aaggcuuggggaaauccag

SEQ ID NO: 568742 - RNA, 20 nt, Artificial Sequence
  Synthetic
aaaggcuuggggaaauccag

SEQ ID NO: 568743 - RNA, 21 nt, Artificial Sequence
  Synthetic
aaaaggcuuggggaaauccag

SEQ ID NO: 568744 - RNA, 22 nt, Artificial Sequence
  Synthetic
aaaaaggcuuggggaaauccag

SEQ ID NO: 568745 - RNA, 23 nt, Artificial Sequence
  Synthetic
gaaaaaggcuuggggaaauccag

SEQ ID NO: 568746 - RNA, 24 nt, Artificial Sequence
  Synthetic
ugaaaaaggcuuggggaaauccag

SEQ ID NO: 568747 - RNA, 18 nt, Artificial Sequence
  Synthetic
guuguugaaguaauccag

SEQ ID NO: 568748 - RNA, 19 nt, Artificial Sequence
  Synthetic
gguuguugaaguaauccag

SEQ ID NO: 568749 - RNA, 20 nt, Artificial Sequence
  Synthetic
agguuguugaaguaauccag

SEQ ID NO: 568750 - RNA, 21 nt, Artificial Sequence
  Synthetic
gagguuguugaaguaauccag

SEQ ID NO: 568751 - RNA, 22 nt, Artificial Sequence
  Synthetic
agagguuguugaaguaauccag

SEQ ID NO: 568752 - RNA, 23 nt, Artificial Sequence
  Synthetic
uagagguuguugaaguaauccag

SEQ ID NO: 568753 - RNA, 24 nt, Artificial Sequence
  Synthetic
uuagagguuguugaaguaauccag

SEQ ID NO: 568754 - RNA, 18 nt, Artificial Sequence
  Synthetic
agaucacauagcauccag

SEQ ID NO: 568755 - RNA, 19 nt, Artificial Sequence
  Synthetic
uagaucacauagcauccag

SEQ ID NO: 568756 - RNA, 20 nt, Artificial Sequence
  Synthetic
cuagaucacauagcauccag

SEQ ID NO: 568757 - RNA, 21 nt, Artificial Sequence
  Synthetic
ucuagaucacauagcauccag

SEQ ID NO: 568758 - RNA, 22 nt, Artificial Sequence
  Synthetic
uucuagaucacauagcauccag

SEQ ID NO: 568759 - RNA, 23 nt, Artificial Sequence
  Synthetic
guucuagaucacauagcauccag

SEQ ID NO: 568760 - RNA, 24 nt, Artificial Sequence
  Synthetic
gguucuagaucacauagcauccag

SEQ ID NO: 568761 - RNA, 18 nt, Artificial Sequence
  Synthetic
acauugccacagauccag

SEQ ID NO: 568762 - RNA, 19 nt, Artificial Sequence
  Synthetic
cacauugccacagauccag

SEQ ID NO: 568763 - RNA, 20 nt, Artificial Sequence
  Synthetic
ucacauugccacagauccag

SEQ ID NO: 568764 - RNA, 21 nt, Artificial Sequence
  Synthetic
cucacauugccacagauccag

SEQ ID NO: 568765 - RNA, 22 nt, Artificial Sequence
  Synthetic
ccucacauugccacagauccag

SEQ ID NO: 568766 - RNA, 23 nt, Artificial Sequence
  Synthetic
cccucacauugccacagauccag

SEQ ID NO: 568767 - RNA, 24 nt, Artificial Sequence
  Synthetic
ucccucacauugccacagauccag

SEQ ID NO: 568768 - RNA, 18 nt, Artificial Sequence
  Synthetic
cuucauuuugagauccag

SEQ ID NO: 568769 - RNA, 19 nt, Artificial Sequence
  Synthetic
ccuucauuuugagauccag

SEQ ID NO: 568770 - RNA, 20 nt, Artificial Sequence
  Synthetic
cccuucauuuugagauccag

SEQ ID NO: 568771 - RNA, 21 nt, Artificial Sequence
  Synthetic
ucccuucauuuugagauccag

SEQ ID NO: 568772 - RNA, 22 nt, Artificial Sequence
  Synthetic
aucccuucauuuugagauccag

SEQ ID NO: 568773 - RNA, 23 nt, Artificial Sequence
  Synthetic
uaucccuucauuuugagauccag

SEQ ID NO: 568774 - RNA, 24 nt, Artificial Sequence
  Synthetic
guaucccuucauuuugagauccag

SEQ ID NO: 568775 - RNA, 18 nt, Artificial Sequence
  Synthetic
gucaugggagggauccag

SEQ ID NO: 568776 - RNA, 19 nt, Artificial Sequence
  Synthetic
ugucaugggagggauccag

SEQ ID NO: 568777 - RNA, 20 nt, Artificial Sequence
  Synthetic
augucaugggagggauccag

SEQ ID NO: 568778 - RNA, 21 nt, Artificial Sequence
  Synthetic
gaugucaugggagggauccag

SEQ ID NO: 568779 - RNA, 22 nt, Artificial Sequence
  Synthetic
agaugucaugggagggauccag

SEQ ID NO: 568780 - RNA, 23 nt, Artificial Sequence
  Synthetic
cagaugucaugggagggauccag

SEQ ID NO: 568781 - RNA, 24 nt, Artificial Sequence
  Synthetic
ccagaugucaugggagggauccag

SEQ ID NO: 568782 - RNA, 18 nt, Artificial Sequence
  Synthetic
cugcaggauauuauccag

SEQ ID NO: 568783 - RNA, 19 nt, Artificial Sequence
  Synthetic
ucugcaggauauuauccag

SEQ ID NO: 568784 - RNA, 20 nt, Artificial Sequence
  Synthetic
cucugcaggauauuauccag

SEQ ID NO: 568785 - RNA, 21 nt, Artificial Sequence
  Synthetic
acucugcaggauauuauccag

SEQ ID NO: 568786 - RNA, 22 nt, Artificial Sequence
  Synthetic
cacucugcaggauauuauccag

SEQ ID NO: 568787 - RNA, 23 nt, Artificial Sequence
  Synthetic
acacucugcaggauauuauccag

SEQ ID NO: 568788 - RNA, 24 nt, Artificial Sequence
  Synthetic
aacacucugcaggauauuauccag

SEQ ID NO: 568789 - RNA, 18 nt, Artificial Sequence
  Synthetic
aauuaacuacuuauccag

SEQ ID NO: 568790 - RNA, 19 nt, Artificial Sequence
  Synthetic
gaauuaacuacuuauccag

SEQ ID NO: 568791 - RNA, 20 nt, Artificial Sequence
  Synthetic
agaauuaacuacuuauccag

SEQ ID NO: 568792 - RNA, 21 nt, Artificial Sequence
  Synthetic
cagaauuaacuacuuauccag

SEQ ID NO: 568793 - RNA, 22 nt, Artificial Sequence
  Synthetic
acagaauuaacuacuuauccag

SEQ ID NO: 568794 - RNA, 23 nt, Artificial Sequence
  Synthetic
aacagaauuaacuacuuauccag

SEQ ID NO: 568795 - RNA, 24 nt, Artificial Sequence
  Synthetic
gaacagaauuaacuacuuauccag

SEQ ID NO: 568796 - RNA, 18 nt, Artificial Sequence
  Synthetic
agaaaaaugcuuauccag

SEQ ID NO: 568797 - RNA, 19 nt, Artificial Sequence
  Synthetic
aagaaaaaugcuuauccag

SEQ ID NO: 568798 - RNA, 20 nt, Artificial Sequence
  Synthetic
aaagaaaaaugcuuauccag

SEQ ID NO: 568799 - RNA, 21 nt, Artificial Sequence
  Synthetic
aaaagaaaaaugcuuauccag

SEQ ID NO: 568800 - RNA, 22 nt, Artificial Sequence
  Synthetic
uaaaagaaaaaugcuuauccag

SEQ ID NO: 568801 - RNA, 23 nt, Artificial Sequence
  Synthetic
uuaaaagaaaaaugcuuauccag

SEQ ID NO: 568802 - RNA, 24 nt, Artificial Sequence
  Synthetic
auuaaaagaaaaaugcuuauccag

SEQ ID NO: 568803 - RNA, 18 nt, Artificial Sequence
  Synthetic
ugcuucagauuuauccag

SEQ ID NO: 568804 - RNA, 19 nt, Artificial Sequence
  Synthetic
augcuucagauuuauccag

SEQ ID NO: 568805 - RNA, 20 nt, Artificial Sequence
  Synthetic
aaugcuucagauuuauccag

SEQ ID NO: 568806 - RNA, 21 nt, Artificial Sequence
  Synthetic
uaaugcuucagauuuauccag

SEQ ID NO: 568807 - RNA, 22 nt, Artificial Sequence
  Synthetic
auaaugcuucagauuuauccag

SEQ ID NO: 568808 - RNA, 23 nt, Artificial Sequence
  Synthetic
uauaaugcuucagauuuauccag

SEQ ID NO: 568809 - RNA, 24 nt, Artificial Sequence
  Synthetic
cuauaaugcuucagauuuauccag

SEQ ID NO: 568810 - RNA, 18 nt, Artificial Sequence
  Synthetic
aacuuuguaggacuccag

SEQ ID NO: 568811 - RNA, 19 nt, Artificial Sequence
  Synthetic
uaacuuuguaggacuccag

SEQ ID NO: 568812 - RNA, 20 nt, Artificial Sequence
  Synthetic
cuaacuuuguaggacuccag

SEQ ID NO: 568813 - RNA, 21 nt, Artificial Sequence
  Synthetic
ucuaacuuuguaggacuccag

SEQ ID NO: 568814 - RNA, 22 nt, Artificial Sequence
  Synthetic
cucuaacuuuguaggacuccag

SEQ ID NO: 568815 - RNA, 23 nt, Artificial Sequence
  Synthetic
acucuaacuuuguaggacuccag

SEQ ID NO: 568816 - RNA, 24 nt, Artificial Sequence
  Synthetic
cacucuaacuuuguaggacuccag

SEQ ID NO: 568817 - RNA, 18 nt, Artificial Sequence
  Synthetic
ucuccuagaauacuccag

SEQ ID NO: 568818 - RNA, 19 nt, Artificial Sequence
  Synthetic
uucuccuagaauacuccag

SEQ ID NO: 568819 - RNA, 20 nt, Artificial Sequence
  Synthetic
cuucuccuagaauacuccag

SEQ ID NO: 568820 - RNA, 21 nt, Artificial Sequence
  Synthetic
ucuucuccuagaauacuccag

SEQ ID NO: 568821 - RNA, 22 nt, Artificial Sequence
  Synthetic
gucuucuccuagaauacuccag

SEQ ID NO: 568822 - RNA, 23 nt, Artificial Sequence
  Synthetic
ugucuucuccuagaauacuccag

SEQ ID NO: 568823 - RNA, 24 nt, Artificial Sequence
  Synthetic
augucuucuccuagaauacuccag

SEQ ID NO: 568824 - RNA, 18 nt, Artificial Sequence
  Synthetic
augaauugcccccuccag

SEQ ID NO: 568825 - RNA, 19 nt, Artificial Sequence
  Synthetic
uaugaauugcccccuccag

SEQ ID NO: 568826 - RNA, 20 nt, Artificial Sequence
  Synthetic
auaugaauugcccccuccag

SEQ ID NO: 568827 - RNA, 21 nt, Artificial Sequence
  Synthetic
gauaugaauugcccccuccag

SEQ ID NO: 568828 - RNA, 22 nt, Artificial Sequence
  Synthetic
ggauaugaauugcccccuccag

SEQ ID NO: 568829 - RNA, 23 nt, Artificial Sequence
  Synthetic
uggauaugaauugcccccuccag

SEQ ID NO: 568830 - RNA, 24 nt, Artificial Sequence
  Synthetic
guggauaugaauugcccccuccag

SEQ ID NO: 568831 - RNA, 18 nt, Artificial Sequence
  Synthetic
agcacauaaaagcuccag

SEQ ID NO: 568832 - RNA, 19 nt, Artificial Sequence
  Synthetic
gagcacauaaaagcuccag

SEQ ID NO: 568833 - RNA, 20 nt, Artificial Sequence
  Synthetic
ugagcacauaaaagcuccag

SEQ ID NO: 568834 - RNA, 21 nt, Artificial Sequence
  Synthetic
augagcacauaaaagcuccag

SEQ ID NO: 568835 - RNA, 22 nt, Artificial Sequence
  Synthetic
caugagcacauaaaagcuccag

SEQ ID NO: 568836 - RNA, 23 nt, Artificial Sequence
  Synthetic
ucaugagcacauaaaagcuccag

SEQ ID NO: 568837 - RNA, 24 nt, Artificial Sequence
  Synthetic
aucaugagcacauaaaagcuccag

SEQ ID NO: 568838 - RNA, 18 nt, Artificial Sequence
  Synthetic
gccaacacaaagcuccag

SEQ ID NO: 568839 - RNA, 19 nt, Artificial Sequence
  Synthetic
agccaacacaaagcuccag

SEQ ID NO: 568840 - RNA, 20 nt, Artificial Sequence
  Synthetic
aagccaacacaaagcuccag

SEQ ID NO: 568841 - RNA, 21 nt, Artificial Sequence
  Synthetic
aaagccaacacaaagcuccag

SEQ ID NO: 568842 - RNA, 22 nt, Artificial Sequence
  Synthetic
caaagccaacacaaagcuccag

SEQ ID NO: 568843 - RNA, 23 nt, Artificial Sequence
  Synthetic
acaaagccaacacaaagcuccag

SEQ ID NO: 568844 - RNA, 24 nt, Artificial Sequence
  Synthetic
aacaaagccaacacaaagcuccag

SEQ ID NO: 568845 - RNA, 18 nt, Artificial Sequence
  Synthetic
auaccauuugcgcuccag

SEQ ID NO: 568846 - RNA, 19 nt, Artificial Sequence
  Synthetic
aauaccauuugcgcuccag

SEQ ID NO: 568847 - RNA, 20 nt, Artificial Sequence
  Synthetic
caauaccauuugcgcuccag

SEQ ID NO: 568848 - RNA, 21 nt, Artificial Sequence
  Synthetic
gcaauaccauuugcgcuccag

SEQ ID NO: 568849 - RNA, 22 nt, Artificial Sequence
  Synthetic
agcaauaccauuugcgcuccag

SEQ ID NO: 568850 - RNA, 23 nt, Artificial Sequence
  Synthetic
gagcaauaccauuugcgcuccag

SEQ ID NO: 568851 - RNA, 24 nt, Artificial Sequence
  Synthetic
agagcaauaccauuugcgcuccag

SEQ ID NO: 568852 - RNA, 18 nt, Artificial Sequence
  Synthetic
aagaaagaaaugcuccag

SEQ ID NO: 568853 - RNA, 19 nt, Artificial Sequence
  Synthetic
gaagaaagaaaugcuccag

SEQ ID NO: 568854 - RNA, 20 nt, Artificial Sequence
  Synthetic
agaagaaagaaaugcuccag

SEQ ID NO: 568855 - RNA, 21 nt, Artificial Sequence
  Synthetic
uagaagaaagaaaugcuccag

SEQ ID NO: 568856 - RNA, 22 nt, Artificial Sequence
  Synthetic
auagaagaaagaaaugcuccag

SEQ ID NO: 568857 - RNA, 23 nt, Artificial Sequence
  Synthetic
uauagaagaaagaaaugcuccag

SEQ ID NO: 568858 - RNA, 24 nt, Artificial Sequence
  Synthetic
guauagaagaaagaaaugcuccag

SEQ ID NO: 568859 - RNA, 18 nt, Artificial Sequence
  Synthetic
gacuaauaugaucuccag

SEQ ID NO: 568860 - RNA, 19 nt, Artificial Sequence
  Synthetic
agacuaauaugaucuccag

SEQ ID NO: 568861 - RNA, 20 nt, Artificial Sequence
  Synthetic
uagacuaauaugaucuccag

SEQ ID NO: 568862 - RNA, 21 nt, Artificial Sequence
  Synthetic
cuagacuaauaugaucuccag

SEQ ID NO: 568863 - RNA, 22 nt, Artificial Sequence
  Synthetic
ucuagacuaauaugaucuccag

SEQ ID NO: 568864 - RNA, 23 nt, Artificial Sequence
  Synthetic
aucuagacuaauaugaucuccag

SEQ ID NO: 568865 - RNA, 24 nt, Artificial Sequence
  Synthetic
caucuagacuaauaugaucuccag

SEQ ID NO: 568866 - RNA, 18 nt, Artificial Sequence
  Synthetic
uuuugugucacaguccag

SEQ ID NO: 568867 - RNA, 19 nt, Artificial Sequence
  Synthetic
auuuugugucacaguccag

SEQ ID NO: 568868 - RNA, 20 nt, Artificial Sequence
  Synthetic
cauuuugugucacaguccag

SEQ ID NO: 568869 - RNA, 21 nt, Artificial Sequence
  Synthetic
gcauuuugugucacaguccag

SEQ ID NO: 568870 - RNA, 22 nt, Artificial Sequence
  Synthetic
agcauuuugugucacaguccag

SEQ ID NO: 568871 - RNA, 23 nt, Artificial Sequence
  Synthetic
uagcauuuugugucacaguccag

SEQ ID NO: 568872 - RNA, 24 nt, Artificial Sequence
  Synthetic
auagcauuuugugucacaguccag

SEQ ID NO: 568873 - RNA, 18 nt, Artificial Sequence
  Synthetic
uugaucugcugaguccag

SEQ ID NO: 568874 - RNA, 19 nt, Artificial Sequence
  Synthetic
auugaucugcugaguccag

SEQ ID NO: 568875 - RNA, 20 nt, Artificial Sequence
  Synthetic
aauugaucugcugaguccag

SEQ ID NO: 568876 - RNA, 21 nt, Artificial Sequence
  Synthetic
aaauugaucugcugaguccag

SEQ ID NO: 568877 - RNA, 22 nt, Artificial Sequence
  Synthetic
uaaauugaucugcugaguccag

SEQ ID NO: 568878 - RNA, 23 nt, Artificial Sequence
  Synthetic
uuaaauugaucugcugaguccag

SEQ ID NO: 568879 - RNA, 24 nt, Artificial Sequence
  Synthetic
cuuaaauugaucugcugaguccag

SEQ ID NO: 568880 - RNA, 18 nt, Artificial Sequence
  Synthetic
uuagugguggauguccag

SEQ ID NO: 568881 - RNA, 19 nt, Artificial Sequence
  Synthetic
cuuagugguggauguccag

SEQ ID NO: 568882 - RNA, 20 nt, Artificial Sequence
  Synthetic
acuuagugguggauguccag

SEQ ID NO: 568883 - RNA, 21 nt, Artificial Sequence
  Synthetic
aacuuagugguggauguccag

SEQ ID NO: 568884 - RNA, 22 nt, Artificial Sequence
  Synthetic
gaacuuagugguggauguccag

SEQ ID NO: 568885 - RNA, 23 nt, Artificial Sequence
  Synthetic
ugaacuuagugguggauguccag

SEQ ID NO: 568886 - RNA, 24 nt, Artificial Sequence
  Synthetic
cugaacuuagugguggauguccag

SEQ ID NO: 568887 - RNA, 18 nt, Artificial Sequence
  Synthetic
uuugauuuguaauuccag

SEQ ID NO: 568888 - RNA, 19 nt, Artificial Sequence
  Synthetic
uuuugauuuguaauuccag

SEQ ID NO: 568889 - RNA, 20 nt, Artificial Sequence
  Synthetic
guuuugauuuguaauuccag

SEQ ID NO: 568890 - RNA, 21 nt, Artificial Sequence
  Synthetic
aguuuugauuuguaauuccag

SEQ ID NO: 568891 - RNA, 22 nt, Artificial Sequence
  Synthetic
uaguuuugauuuguaauuccag

SEQ ID NO: 568892 - RNA, 23 nt, Artificial Sequence
  Synthetic
uuaguuuugauuuguaauuccag

SEQ ID NO: 568893 - RNA, 24 nt, Artificial Sequence
  Synthetic
auuaguuuugauuuguaauuccag

SEQ ID NO: 568894 - RNA, 18 nt, Artificial Sequence
  Synthetic
ccaccacaaacauuccag

SEQ ID NO: 568895 - RNA, 19 nt, Artificial Sequence
  Synthetic
uccaccacaaacauuccag

SEQ ID NO: 568896 - RNA, 20 nt, Artificial Sequence
  Synthetic
auccaccacaaacauuccag

SEQ ID NO: 568897 - RNA, 21 nt, Artificial Sequence
  Synthetic
aauccaccacaaacauuccag

SEQ ID NO: 568898 - RNA, 22 nt, Artificial Sequence
  Synthetic
aaauccaccacaaacauuccag

SEQ ID NO: 568899 - RNA, 23 nt, Artificial Sequence
  Synthetic
gaaauccaccacaaacauuccag

SEQ ID NO: 568900 - RNA, 24 nt, Artificial Sequence
  Synthetic
agaaauccaccacaaacauuccag

SEQ ID NO: 568901 - RNA, 18 nt, Artificial Sequence
  Synthetic
ggucagcauccauuccag

SEQ ID NO: 568902 - RNA, 19 nt, Artificial Sequence
  Synthetic
aggucagcauccauuccag

SEQ ID NO: 568903 - RNA, 20 nt, Artificial Sequence
  Synthetic
aaggucagcauccauuccag

SEQ ID NO: 568904 - RNA, 21 nt, Artificial Sequence
  Synthetic
caaggucagcauccauuccag

SEQ ID NO: 568905 - RNA, 22 nt, Artificial Sequence
  Synthetic
acaaggucagcauccauuccag

SEQ ID NO: 568906 - RNA, 23 nt, Artificial Sequence
  Synthetic
gacaaggucagcauccauuccag

SEQ ID NO: 568907 - RNA, 24 nt, Artificial Sequence
  Synthetic
ugacaaggucagcauccauuccag

SEQ ID NO: 568908 - RNA, 18 nt, Artificial Sequence
  Synthetic
cugugaaacagauuccag

SEQ ID NO: 568909 - RNA, 19 nt, Artificial Sequence
  Synthetic
gcugugaaacagauuccag

SEQ ID NO: 568910 - RNA, 20 nt, Artificial Sequence
  Synthetic
agcugugaaacagauuccag

SEQ ID NO: 568911 - RNA, 21 nt, Artificial Sequence
  Synthetic
gagcugugaaacagauuccag

SEQ ID NO: 568912 - RNA, 22 nt, Artificial Sequence
  Synthetic
agagcugugaaacagauuccag

SEQ ID NO: 568913 - RNA, 23 nt, Artificial Sequence
  Synthetic
aagagcugugaaacagauuccag

SEQ ID NO: 568914 - RNA, 24 nt, Artificial Sequence
  Synthetic
uaagagcugugaaacagauuccag

SEQ ID NO: 568915 - RNA, 18 nt, Artificial Sequence
  Synthetic
auugcaaucagauuccag

SEQ ID NO: 568916 - RNA, 19 nt, Artificial Sequence
  Synthetic
aauugcaaucagauuccag

SEQ ID NO: 568917 - RNA, 20 nt, Artificial Sequence
  Synthetic
uaauugcaaucagauuccag

SEQ ID NO: 568918 - RNA, 21 nt, Artificial Sequence
  Synthetic
uuaauugcaaucagauuccag

SEQ ID NO: 568919 - RNA, 22 nt, Artificial Sequence
  Synthetic
uuuaauugcaaucagauuccag

SEQ ID NO: 568920 - RNA, 23 nt, Artificial Sequence
  Synthetic
uuuuaauugcaaucagauuccag

SEQ ID NO: 568921 - RNA, 24 nt, Artificial Sequence
  Synthetic
uuuuuaauugcaaucagauuccag

SEQ ID NO: 568922 - RNA, 18 nt, Artificial Sequence
  Synthetic
uuuuccaggagauuccag

SEQ ID NO: 568923 - RNA, 19 nt, Artificial Sequence
  Synthetic
guuuuccaggagauuccag

SEQ ID NO: 568924 - RNA, 20 nt, Artificial Sequence
  Synthetic
aguuuuccaggagauuccag

SEQ ID NO: 568925 - RNA, 21 nt, Artificial Sequence
  Synthetic
aaguuuuccaggagauuccag

SEQ ID NO: 568926 - RNA, 22 nt, Artificial Sequence
  Synthetic
caaguuuuccaggagauuccag

SEQ ID NO: 568927 - RNA, 23 nt, Artificial Sequence
  Synthetic
acaaguuuuccaggagauuccag

SEQ ID NO: 568928 - RNA, 24 nt, Artificial Sequence
  Synthetic
aacaaguuuuccaggagauuccag

SEQ ID NO: 568929 - RNA, 18 nt, Artificial Sequence
  Synthetic
agagagaccauauuccag

SEQ ID NO: 568930 - RNA, 19 nt, Artificial Sequence
  Synthetic
cagagagaccauauuccag

SEQ ID NO: 568931 - RNA, 20 nt, Artificial Sequence
  Synthetic
ucagagagaccauauuccag

SEQ ID NO: 568932 - RNA, 21 nt, Artificial Sequence
  Synthetic
uucagagagaccauauuccag

SEQ ID NO: 568933 - RNA, 22 nt, Artificial Sequence
  Synthetic
auucagagagaccauauuccag

SEQ ID NO: 568934 - RNA, 23 nt, Artificial Sequence
  Synthetic
aauucagagagaccauauuccag

SEQ ID NO: 568935 - RNA, 24 nt, Artificial Sequence
  Synthetic
caauucagagagaccauauuccag

SEQ ID NO: 568936 - RNA, 18 nt, Artificial Sequence
  Synthetic
uaaugaucucuauuccag

SEQ ID NO: 568937 - RNA, 19 nt, Artificial Sequence
  Synthetic
cuaaugaucucuauuccag

SEQ ID NO: 568938 - RNA, 20 nt, Artificial Sequence
  Synthetic
gcuaaugaucucuauuccag

SEQ ID NO: 568939 - RNA, 21 nt, Artificial Sequence
  Synthetic
ugcuaaugaucucuauuccag

SEQ ID NO: 568940 - RNA, 22 nt, Artificial Sequence
  Synthetic
augcuaaugaucucuauuccag

SEQ ID NO: 568941 - RNA, 23 nt, Artificial Sequence
  Synthetic
uaugcuaaugaucucuauuccag

SEQ ID NO: 568942 - RNA, 24 nt, Artificial Sequence
  Synthetic
uuaugcuaaugaucucuauuccag

SEQ ID NO: 568943 - RNA, 18 nt, Artificial Sequence
  Synthetic
cccaugaagaccuuccag

SEQ ID NO: 568944 - RNA, 19 nt, Artificial Sequence
  Synthetic
gcccaugaagaccuuccag

SEQ ID NO: 568945 - RNA, 20 nt, Artificial Sequence
  Synthetic
ugcccaugaagaccuuccag

SEQ ID NO: 568946 - RNA, 21 nt, Artificial Sequence
  Synthetic
uugcccaugaagaccuuccag

SEQ ID NO: 568947 - RNA, 22 nt, Artificial Sequence
  Synthetic
auugcccaugaagaccuuccag

SEQ ID NO: 568948 - RNA, 23 nt, Artificial Sequence
  Synthetic
cauugcccaugaagaccuuccag

SEQ ID NO: 568949 - RNA, 24 nt, Artificial Sequence
  Synthetic
ucauugcccaugaagaccuuccag

SEQ ID NO: 568950 - RNA, 18 nt, Artificial Sequence
  Synthetic
uacuuaccauccuuccag

SEQ ID NO: 568951 - RNA, 19 nt, Artificial Sequence
  Synthetic
cuacuuaccauccuuccag

SEQ ID NO: 568952 - RNA, 20 nt, Artificial Sequence
  Synthetic
ucuacuuaccauccuuccag

SEQ ID NO: 568953 - RNA, 21 nt, Artificial Sequence
  Synthetic
aucuacuuaccauccuuccag

SEQ ID NO: 568954 - RNA, 22 nt, Artificial Sequence
  Synthetic
aaucuacuuaccauccuuccag

SEQ ID NO: 568955 - RNA, 23 nt, Artificial Sequence
  Synthetic
aaaucuacuuaccauccuuccag

SEQ ID NO: 568956 - RNA, 24 nt, Artificial Sequence
  Synthetic
uaaaucuacuuaccauccuuccag

SEQ ID NO: 568957 - RNA, 18 nt, Artificial Sequence
  Synthetic
aucgggaaaagcuuccag

SEQ ID NO: 568958 - RNA, 19 nt, Artificial Sequence
  Synthetic
aaucgggaaaagcuuccag

SEQ ID NO: 568959 - RNA, 20 nt, Artificial Sequence
  Synthetic
aaaucgggaaaagcuuccag

SEQ ID NO: 568960 - RNA, 21 nt, Artificial Sequence
  Synthetic
aaaaucgggaaaagcuuccag

SEQ ID NO: 568961 - RNA, 22 nt, Artificial Sequence
  Synthetic
gaaaaucgggaaaagcuuccag

SEQ ID NO: 568962 - RNA, 23 nt, Artificial Sequence
  Synthetic
agaaaaucgggaaaagcuuccag

SEQ ID NO: 568963 - RNA, 24 nt, Artificial Sequence
  Synthetic
aagaaaaucgggaaaagcuuccag

SEQ ID NO: 568964 - RNA, 18 nt, Artificial Sequence
  Synthetic
auaggcaagggcuuccag

SEQ ID NO: 568965 - RNA, 19 nt, Artificial Sequence
  Synthetic
aauaggcaagggcuuccag

SEQ ID NO: 568966 - RNA, 20 nt, Artificial Sequence
  Synthetic
gaauaggcaagggcuuccag

SEQ ID NO: 568967 - RNA, 21 nt, Artificial Sequence
  Synthetic
ugaauaggcaagggcuuccag

SEQ ID NO: 568968 - RNA, 22 nt, Artificial Sequence
  Synthetic
uugaauaggcaagggcuuccag

SEQ ID NO: 568969 - RNA, 23 nt, Artificial Sequence
  Synthetic
guugaauaggcaagggcuuccag

SEQ ID NO: 568970 - RNA, 24 nt, Artificial Sequence
  Synthetic
uguugaauaggcaagggcuuccag

SEQ ID NO: 568971 - RNA, 18 nt, Artificial Sequence
  Synthetic
ccauuuucauucuuccag

SEQ ID NO: 568972 - RNA, 19 nt, Artificial Sequence
  Synthetic
uccauuuucauucuuccag

SEQ ID NO: 568973 - RNA, 20 nt, Artificial Sequence
  Synthetic
uuccauuuucauucuuccag

SEQ ID NO: 568974 - RNA, 21 nt, Artificial Sequence
  Synthetic
auuccauuuucauucuuccag

SEQ ID NO: 568975 - RNA, 22 nt, Artificial Sequence
  Synthetic
uauuccauuuucauucuuccag

SEQ ID NO: 568976 - RNA, 23 nt, Artificial Sequence
  Synthetic
auauuccauuuucauucuuccag

SEQ ID NO: 568977 - RNA, 24 nt, Artificial Sequence
  Synthetic
aauauuccauuuucauucuuccag

SEQ ID NO: 568978 - RNA, 18 nt, Artificial Sequence
  Synthetic
ucaaacauuauguuccag

SEQ ID NO: 568979 - RNA, 19 nt, Artificial Sequence
  Synthetic
uucaaacauuauguuccag

SEQ ID NO: 568980 - RNA, 20 nt, Artificial Sequence
  Synthetic
guucaaacauuauguuccag

SEQ ID NO: 568981 - RNA, 21 nt, Artificial Sequence
  Synthetic
aguucaaacauuauguuccag

SEQ ID NO: 568982 - RNA, 22 nt, Artificial Sequence
  Synthetic
caguucaaacauuauguuccag

SEQ ID NO: 568983 - RNA, 23 nt, Artificial Sequence
  Synthetic
acaguucaaacauuauguuccag

SEQ ID NO: 568984 - RNA, 24 nt, Artificial Sequence
  Synthetic
aacaguucaaacauuauguuccag

SEQ ID NO: 568985 - RNA, 18 nt, Artificial Sequence
  Synthetic
cucuaacuucauuuccag

SEQ ID NO: 568986 - RNA, 19 nt, Artificial Sequence
  Synthetic
ucucuaacuucauuuccag

SEQ ID NO: 568987 - RNA, 20 nt, Artificial Sequence
  Synthetic
uucucuaacuucauuuccag

SEQ ID NO: 568988 - RNA, 21 nt, Artificial Sequence
  Synthetic
uuucucuaacuucauuuccag

SEQ ID NO: 568989 - RNA, 22 nt, Artificial Sequence
  Synthetic
cuuucucuaacuucauuuccag

SEQ ID NO: 568990 - RNA, 23 nt, Artificial Sequence
  Synthetic
ucuuucucuaacuucauuuccag

SEQ ID NO: 568991 - RNA, 24 nt, Artificial Sequence
  Synthetic
aucuuucucuaacuucauuuccag

SEQ ID NO: 568992 - RNA, 18 nt, Artificial Sequence
  Synthetic
gaaggggacgcuuuccag

SEQ ID NO: 568993 - RNA, 19 nt, Artificial Sequence
  Synthetic
cgaaggggacgcuuuccag

SEQ ID NO: 568994 - RNA, 20 nt, Artificial Sequence
  Synthetic
ccgaaggggacgcuuuccag

SEQ ID NO: 568995 - RNA, 21 nt, Artificial Sequence
  Synthetic
gccgaaggggacgcuuuccag

SEQ ID NO: 568996 - RNA, 22 nt, Artificial Sequence
  Synthetic
ggccgaaggggacgcuuuccag

SEQ ID NO: 568997 - RNA, 23 nt, Artificial Sequence
  Synthetic
cggccgaaggggacgcuuuccag

SEQ ID NO: 568998 - RNA, 24 nt, Artificial Sequence
  Synthetic
acggccgaaggggacgcuuuccag

SEQ ID NO: 568999 - RNA, 18 nt, Artificial Sequence
  Synthetic
uuaggcucugguuuccag

SEQ ID NO: 569000 - RNA, 19 nt, Artificial Sequence
  Synthetic
uuuaggcucugguuuccag

SEQ ID NO: 569001 - RNA, 20 nt, Artificial Sequence
  Synthetic
uuuuaggcucugguuuccag

SEQ ID NO: 569002 - RNA, 21 nt, Artificial Sequence
  Synthetic
auuuuaggcucugguuuccag

SEQ ID NO: 569003 - RNA, 22 nt, Artificial Sequence
  Synthetic
cauuuuaggcucugguuuccag

SEQ ID NO: 569004 - RNA, 23 nt, Artificial Sequence
  Synthetic
acauuuuaggcucugguuuccag

SEQ ID NO: 569005 - RNA, 24 nt, Artificial Sequence
  Synthetic
aacauuuuaggcucugguuuccag

SEQ ID NO: 569006 - RNA, 18 nt, Artificial Sequence
  Synthetic
uuuuguuccuguuuccag

SEQ ID NO: 569007 - RNA, 19 nt, Artificial Sequence
  Synthetic
uuuuuguuccuguuuccag

SEQ ID NO: 569008 - RNA, 20 nt, Artificial Sequence
  Synthetic
auuuuuguuccuguuuccag

SEQ ID NO: 569009 - RNA, 21 nt, Artificial Sequence
  Synthetic
cauuuuuguuccuguuuccag

SEQ ID NO: 569010 - RNA, 22 nt, Artificial Sequence
  Synthetic
ccauuuuuguuccuguuuccag

SEQ ID NO: 569011 - RNA, 23 nt, Artificial Sequence
  Synthetic
gccauuuuuguuccuguuuccag

SEQ ID NO: 569012 - RNA, 24 nt, Artificial Sequence
  Synthetic
ggccauuuuuguuccuguuuccag

SEQ ID NO: 569013 - RNA, 18 nt, Artificial Sequence
  Synthetic
aaucuauucauuuuccag

SEQ ID NO: 569014 - RNA, 19 nt, Artificial Sequence
  Synthetic
uaaucuauucauuuuccag

SEQ ID NO: 569015 - RNA, 20 nt, Artificial Sequence
  Synthetic
uuaaucuauucauuuuccag

SEQ ID NO: 569016 - RNA, 21 nt, Artificial Sequence
  Synthetic
guuaaucuauucauuuuccag

SEQ ID NO: 569017 - RNA, 22 nt, Artificial Sequence
  Synthetic
aguuaaucuauucauuuuccag

SEQ ID NO: 569018 - RNA, 23 nt, Artificial Sequence
  Synthetic
caguuaaucuauucauuuuccag

SEQ ID NO: 569019 - RNA, 24 nt, Artificial Sequence
  Synthetic
ccaguuaaucuauucauuuuccag

SEQ ID NO: 569020 - RNA, 18 nt, Artificial Sequence
  Synthetic
caugauuuuaaaaagcag

SEQ ID NO: 569021 - RNA, 19 nt, Artificial Sequence
  Synthetic
ucaugauuuuaaaaagcag

SEQ ID NO: 569022 - RNA, 20 nt, Artificial Sequence
  Synthetic
aucaugauuuuaaaaagcag

SEQ ID NO: 569023 - RNA, 21 nt, Artificial Sequence
  Synthetic
aaucaugauuuuaaaaagcag

SEQ ID NO: 569024 - RNA, 22 nt, Artificial Sequence
  Synthetic
aaaucaugauuuuaaaaagcag

SEQ ID NO: 569025 - RNA, 23 nt, Artificial Sequence
  Synthetic
caaaucaugauuuuaaaaagcag

SEQ ID NO: 569026 - RNA, 24 nt, Artificial Sequence
  Synthetic
acaaaucaugauuuuaaaaagcag

SEQ ID NO: 569027 - RNA, 18 nt, Artificial Sequence
  Synthetic
uggccuuaacaaaagcag

SEQ ID NO: 569028 - RNA, 19 nt, Artificial Sequence
  Synthetic
guggccuuaacaaaagcag

SEQ ID NO: 569029 - RNA, 20 nt, Artificial Sequence
  Synthetic
gguggccuuaacaaaagcag

SEQ ID NO: 569030 - RNA, 21 nt, Artificial Sequence
  Synthetic
ggguggccuuaacaaaagcag

SEQ ID NO: 569031 - RNA, 22 nt, Artificial Sequence
  Synthetic
uggguggccuuaacaaaagcag

SEQ ID NO: 569032 - RNA, 23 nt, Artificial Sequence
  Synthetic
cuggguggccuuaacaaaagcag

SEQ ID NO: 569033 - RNA, 24 nt, Artificial Sequence
  Synthetic
ucuggguggccuuaacaaaagcag

SEQ ID NO: 569034 - RNA, 18 nt, Artificial Sequence
  Synthetic
uacaagugaauaaagcag

SEQ ID NO: 569035 - RNA, 19 nt, Artificial Sequence
  Synthetic
auacaagugaauaaagcag

SEQ ID NO: 569036 - RNA, 20 nt, Artificial Sequence
  Synthetic
uauacaagugaauaaagcag

SEQ ID NO: 569037 - RNA, 21 nt, Artificial Sequence
  Synthetic
auauacaagugaauaaagcag

SEQ ID NO: 569038 - RNA, 22 nt, Artificial Sequence
  Synthetic
uauauacaagugaauaaagcag

SEQ ID NO: 569039 - RNA, 23 nt, Artificial Sequence
  Synthetic
auauauacaagugaauaaagcag

SEQ ID NO: 569040 - RNA, 24 nt, Artificial Sequence
  Synthetic
gauauauacaagugaauaaagcag

SEQ ID NO: 569041 - RNA, 18 nt, Artificial Sequence
  Synthetic
gaacacagccacaagcag

SEQ ID NO: 569042 - RNA, 19 nt, Artificial Sequence
  Synthetic
ugaacacagccacaagcag

SEQ ID NO: 569043 - RNA, 20 nt, Artificial Sequence
  Synthetic
uugaacacagccacaagcag

SEQ ID NO: 569044 - RNA, 21 nt, Artificial Sequence
  Synthetic
cuugaacacagccacaagcag

SEQ ID NO: 569045 - RNA, 22 nt, Artificial Sequence
  Synthetic
ccuugaacacagccacaagcag

SEQ ID NO: 569046 - RNA, 23 nt, Artificial Sequence
  Synthetic
accuugaacacagccacaagcag

SEQ ID NO: 569047 - RNA, 24 nt, Artificial Sequence
  Synthetic
caccuugaacacagccacaagcag

SEQ ID NO: 569048 - RNA, 18 nt, Artificial Sequence
  Synthetic
augccagagaucaagcag

SEQ ID NO: 569049 - RNA, 19 nt, Artificial Sequence
  Synthetic
uaugccagagaucaagcag

SEQ ID NO: 569050 - RNA, 20 nt, Artificial Sequence
  Synthetic
auaugccagagaucaagcag

SEQ ID NO: 569051 - RNA, 21 nt, Artificial Sequence
  Synthetic
uauaugccagagaucaagcag

SEQ ID NO: 569052 - RNA, 22 nt, Artificial Sequence
  Synthetic
uuauaugccagagaucaagcag

SEQ ID NO: 569053 - RNA, 23 nt, Artificial Sequence
  Synthetic
auuauaugccagagaucaagcag

SEQ ID NO: 569054 - RNA, 24 nt, Artificial Sequence
  Synthetic
aauuauaugccagagaucaagcag

SEQ ID NO: 569055 - RNA, 18 nt, Artificial Sequence
  Synthetic
guaacuuucucgaagcag

SEQ ID NO: 569056 - RNA, 19 nt, Artificial Sequence
  Synthetic
uguaacuuucucgaagcag

SEQ ID NO: 569057 - RNA, 20 nt, Artificial Sequence
  Synthetic
cuguaacuuucucgaagcag

SEQ ID NO: 569058 - RNA, 21 nt, Artificial Sequence
  Synthetic
acuguaacuuucucgaagcag

SEQ ID NO: 569059 - RNA, 22 nt, Artificial Sequence
  Synthetic
cacuguaacuuucucgaagcag

SEQ ID NO: 569060 - RNA, 23 nt, Artificial Sequence
  Synthetic
gcacuguaacuuucucgaagcag

SEQ ID NO: 569061 - RNA, 24 nt, Artificial Sequence
  Synthetic
ggcacuguaacuuucucgaagcag

SEQ ID NO: 569062 - RNA, 18 nt, Artificial Sequence
  Synthetic
ugcaaagacaggaagcag

SEQ ID NO: 569063 - RNA, 19 nt, Artificial Sequence
  Synthetic
augcaaagacaggaagcag

SEQ ID NO: 569064 - RNA, 20 nt, Artificial Sequence
  Synthetic
caugcaaagacaggaagcag

SEQ ID NO: 569065 - RNA, 21 nt, Artificial Sequence
  Synthetic
acaugcaaagacaggaagcag

SEQ ID NO: 569066 - RNA, 22 nt, Artificial Sequence
  Synthetic
aacaugcaaagacaggaagcag

SEQ ID NO: 569067 - RNA, 23 nt, Artificial Sequence
  Synthetic
gaacaugcaaagacaggaagcag

SEQ ID NO: 569068 - RNA, 24 nt, Artificial Sequence
  Synthetic
ggaacaugcaaagacaggaagcag

SEQ ID NO: 569069 - RNA, 18 nt, Artificial Sequence
  Synthetic
cuucuuacauggaagcag

SEQ ID NO: 569070 - RNA, 19 nt, Artificial Sequence
  Synthetic
acuucuuacauggaagcag

SEQ ID NO: 569071 - RNA, 20 nt, Artificial Sequence
  Synthetic
cacuucuuacauggaagcag

SEQ ID NO: 569072 - RNA, 21 nt, Artificial Sequence
  Synthetic
gcacuucuuacauggaagcag

SEQ ID NO: 569073 - RNA, 22 nt, Artificial Sequence
  Synthetic
ggcacuucuuacauggaagcag

SEQ ID NO: 569074 - RNA, 23 nt, Artificial Sequence
  Synthetic
aggcacuucuuacauggaagcag

SEQ ID NO: 569075 - RNA, 24 nt, Artificial Sequence
  Synthetic
aaggcacuucuuacauggaagcag

SEQ ID NO: 569076 - RNA, 18 nt, Artificial Sequence
  Synthetic
gucugcuaggugaagcag

SEQ ID NO: 569077 - RNA, 19 nt, Artificial Sequence
  Synthetic
ugucugcuaggugaagcag

SEQ ID NO: 569078 - RNA, 20 nt, Artificial Sequence
  Synthetic
uugucugcuaggugaagcag

SEQ ID NO: 569079 - RNA, 21 nt, Artificial Sequence
  Synthetic
uuugucugcuaggugaagcag

SEQ ID NO: 569080 - RNA, 22 nt, Artificial Sequence
  Synthetic
cuuugucugcuaggugaagcag

SEQ ID NO: 569081 - RNA, 23 nt, Artificial Sequence
  Synthetic
ucuuugucugcuaggugaagcag

SEQ ID NO: 569082 - RNA, 24 nt, Artificial Sequence
  Synthetic
gucuuugucugcuaggugaagcag

SEQ ID NO: 569083 - RNA, 18 nt, Artificial Sequence
  Synthetic
aguugugcugugaagcag

SEQ ID NO: 569084 - RNA, 19 nt, Artificial Sequence
  Synthetic
gaguugugcugugaagcag

SEQ ID NO: 569085 - RNA, 20 nt, Artificial Sequence
  Synthetic
agaguugugcugugaagcag

SEQ ID NO: 569086 - RNA, 21 nt, Artificial Sequence
  Synthetic
aagaguugugcugugaagcag

SEQ ID NO: 569087 - RNA, 22 nt, Artificial Sequence
  Synthetic
aaagaguugugcugugaagcag

SEQ ID NO: 569088 - RNA, 23 nt, Artificial Sequence
  Synthetic
gaaagaguugugcugugaagcag

SEQ ID NO: 569089 - RNA, 24 nt, Artificial Sequence
  Synthetic
agaaagaguugugcugugaagcag

SEQ ID NO: 569090 - RNA, 18 nt, Artificial Sequence
  Synthetic
gagugaaauuugaagcag

SEQ ID NO: 569091 - RNA, 19 nt, Artificial Sequence
  Synthetic
agagugaaauuugaagcag

SEQ ID NO: 569092 - RNA, 20 nt, Artificial Sequence
  Synthetic
gagagugaaauuugaagcag

SEQ ID NO: 569093 - RNA, 21 nt, Artificial Sequence
  Synthetic
ggagagugaaauuugaagcag

SEQ ID NO: 569094 - RNA, 22 nt, Artificial Sequence
  Synthetic
gggagagugaaauuugaagcag

SEQ ID NO: 569095 - RNA, 23 nt, Artificial Sequence
  Synthetic
ugggagagugaaauuugaagcag

SEQ ID NO: 569096 - RNA, 24 nt, Artificial Sequence
  Synthetic
gugggagagugaaauuugaagcag

SEQ ID NO: 569097 - RNA, 18 nt, Artificial Sequence
  Synthetic
ccuugcugcacacagcag

SEQ ID NO: 569098 - RNA, 19 nt, Artificial Sequence
  Synthetic
uccuugcugcacacagcag

SEQ ID NO: 569099 - RNA, 20 nt, Artificial Sequence
  Synthetic
cuccuugcugcacacagcag

SEQ ID NO: 569100 - RNA, 21 nt, Artificial Sequence
  Synthetic
acuccuugcugcacacagcag

SEQ ID NO: 569101 - RNA, 22 nt, Artificial Sequence
  Synthetic
cacuccuugcugcacacagcag

SEQ ID NO: 569102 - RNA, 23 nt, Artificial Sequence
  Synthetic
ccacuccuugcugcacacagcag

SEQ ID NO: 569103 - RNA, 24 nt, Artificial Sequence
  Synthetic
cccacuccuugcugcacacagcag

SEQ ID NO: 569104 - RNA, 18 nt, Artificial Sequence
  Synthetic
guguugaggacacagcag

SEQ ID NO: 569105 - RNA, 19 nt, Artificial Sequence
  Synthetic
gguguugaggacacagcag

SEQ ID NO: 569106 - RNA, 20 nt, Artificial Sequence
  Synthetic
ggguguugaggacacagcag

SEQ ID NO: 569107 - RNA, 21 nt, Artificial Sequence
  Synthetic
uggguguugaggacacagcag

SEQ ID NO: 569108 - RNA, 22 nt, Artificial Sequence
  Synthetic
uuggguguugaggacacagcag

SEQ ID NO: 569109 - RNA, 23 nt, Artificial Sequence
  Synthetic
uuuggguguugaggacacagcag

SEQ ID NO: 569110 - RNA, 24 nt, Artificial Sequence
  Synthetic
uuuuggguguugaggacacagcag

SEQ ID NO: 569111 - RNA, 18 nt, Artificial Sequence
  Synthetic
ugcauuaggagacagcag

SEQ ID NO: 569112 - RNA, 19 nt, Artificial Sequence
  Synthetic
cugcauuaggagacagcag

SEQ ID NO: 569113 - RNA, 20 nt, Artificial Sequence
  Synthetic
ccugcauuaggagacagcag

SEQ ID NO: 569114 - RNA, 21 nt, Artificial Sequence
  Synthetic
accugcauuaggagacagcag

SEQ ID NO: 569115 - RNA, 22 nt, Artificial Sequence
  Synthetic
gaccugcauuaggagacagcag

SEQ ID NO: 569116 - RNA, 23 nt, Artificial Sequence
  Synthetic
agaccugcauuaggagacagcag

SEQ ID NO: 569117 - RNA, 24 nt, Artificial Sequence
  Synthetic
aagaccugcauuaggagacagcag

SEQ ID NO: 569118 - RNA, 18 nt, Artificial Sequence
  Synthetic
agagagcuaauacagcag

SEQ ID NO: 569119 - RNA, 19 nt, Artificial Sequence
  Synthetic
aagagagcuaauacagcag

SEQ ID NO: 569120 - RNA, 20 nt, Artificial Sequence
  Synthetic
caagagagcuaauacagcag

SEQ ID NO: 569121 - RNA, 21 nt, Artificial Sequence
  Synthetic
ucaagagagcuaauacagcag

SEQ ID NO: 569122 - RNA, 22 nt, Artificial Sequence
  Synthetic
gucaagagagcuaauacagcag

SEQ ID NO: 569123 - RNA, 23 nt, Artificial Sequence
  Synthetic
agucaagagagcuaauacagcag

SEQ ID NO: 569124 - RNA, 24 nt, Artificial Sequence
  Synthetic
cagucaagagagcuaauacagcag

SEQ ID NO: 569125 - RNA, 18 nt, Artificial Sequence
  Synthetic
ugaaugguuguacagcag

SEQ ID NO: 569126 - RNA, 19 nt, Artificial Sequence
  Synthetic
uugaaugguuguacagcag

SEQ ID NO: 569127 - RNA, 20 nt, Artificial Sequence
  Synthetic
cuugaaugguuguacagcag

SEQ ID NO: 569128 - RNA, 21 nt, Artificial Sequence
  Synthetic
acuugaaugguuguacagcag

SEQ ID NO: 569129 - RNA, 22 nt, Artificial Sequence
  Synthetic
uacuugaaugguuguacagcag

SEQ ID NO: 569130 - RNA, 23 nt, Artificial Sequence
  Synthetic
uuacuugaaugguuguacagcag

SEQ ID NO: 569131 - RNA, 24 nt, Artificial Sequence
  Synthetic
guuacuugaaugguuguacagcag

SEQ ID NO: 569132 - RNA, 18 nt, Artificial Sequence
  Synthetic
agagaaggcacccagcag

SEQ ID NO: 569133 - RNA, 19 nt, Artificial Sequence
  Synthetic
cagagaaggcacccagcag

SEQ ID NO: 569134 - RNA, 20 nt, Artificial Sequence
  Synthetic
acagagaaggcacccagcag

SEQ ID NO: 569135 - RNA, 21 nt, Artificial Sequence
  Synthetic
aacagagaaggcacccagcag

SEQ ID NO: 569136 - RNA, 22 nt, Artificial Sequence
  Synthetic
caacagagaaggcacccagcag

SEQ ID NO: 569137 - RNA, 23 nt, Artificial Sequence
  Synthetic
ccaacagagaaggcacccagcag

SEQ ID NO: 569138 - RNA, 24 nt, Artificial Sequence
  Synthetic
cccaacagagaaggcacccagcag

SEQ ID NO: 569139 - RNA, 18 nt, Artificial Sequence
  Synthetic
aagaacuugucccagcag

SEQ ID NO: 569140 - RNA, 19 nt, Artificial Sequence
  Synthetic
aaagaacuugucccagcag

SEQ ID NO: 569141 - RNA, 20 nt, Artificial Sequence
  Synthetic
uaaagaacuugucccagcag

SEQ ID NO: 569142 - RNA, 21 nt, Artificial Sequence
  Synthetic
auaaagaacuugucccagcag

SEQ ID NO: 569143 - RNA, 22 nt, Artificial Sequence
  Synthetic
aauaaagaacuugucccagcag

SEQ ID NO: 569144 - RNA, 23 nt, Artificial Sequence
  Synthetic
caauaaagaacuugucccagcag

SEQ ID NO: 569145 - RNA, 24 nt, Artificial Sequence
  Synthetic
ucaauaaagaacuugucccagcag

SEQ ID NO: 569146 - RNA, 18 nt, Artificial Sequence
  Synthetic
auuuucaaaugccagcag

SEQ ID NO: 569147 - RNA, 19 nt, Artificial Sequence
  Synthetic
cauuuucaaaugccagcag

SEQ ID NO: 569148 - RNA, 20 nt, Artificial Sequence
  Synthetic
gcauuuucaaaugccagcag

SEQ ID NO: 569149 - RNA, 21 nt, Artificial Sequence
  Synthetic
ugcauuuucaaaugccagcag

SEQ ID NO: 569150 - RNA, 22 nt, Artificial Sequence
  Synthetic
cugcauuuucaaaugccagcag

SEQ ID NO: 569151 - RNA, 23 nt, Artificial Sequence
  Synthetic
gcugcauuuucaaaugccagcag

SEQ ID NO: 569152 - RNA, 24 nt, Artificial Sequence
  Synthetic
agcugcauuuucaaaugccagcag

SEQ ID NO: 569153 - RNA, 18 nt, Artificial Sequence
  Synthetic
gagaaugagugccagcag

SEQ ID NO: 569154 - RNA, 19 nt, Artificial Sequence
  Synthetic
ggagaaugagugccagcag

SEQ ID NO: 569155 - RNA, 20 nt, Artificial Sequence
  Synthetic
gggagaaugagugccagcag

SEQ ID NO: 569156 - RNA, 21 nt, Artificial Sequence
  Synthetic
agggagaaugagugccagcag

SEQ ID NO: 569157 - RNA, 22 nt, Artificial Sequence
  Synthetic
gagggagaaugagugccagcag

SEQ ID NO: 569158 - RNA, 23 nt, Artificial Sequence
  Synthetic
ggagggagaaugagugccagcag

SEQ ID NO: 569159 - RNA, 24 nt, Artificial Sequence
  Synthetic
aggagggagaaugagugccagcag

SEQ ID NO: 569160 - RNA, 18 nt, Artificial Sequence
  Synthetic
uaaacucaaauccagcag

SEQ ID NO: 569161 - RNA, 19 nt, Artificial Sequence
  Synthetic
cuaaacucaaauccagcag

SEQ ID NO: 569162 - RNA, 20 nt, Artificial Sequence
  Synthetic
acuaaacucaaauccagcag

SEQ ID NO: 569163 - RNA, 21 nt, Artificial Sequence
  Synthetic
aacuaaacucaaauccagcag

SEQ ID NO: 569164 - RNA, 22 nt, Artificial Sequence
  Synthetic
aaacuaaacucaaauccagcag

SEQ ID NO: 569165 - RNA, 23 nt, Artificial Sequence
  Synthetic
caaacuaaacucaaauccagcag

SEQ ID NO: 569166 - RNA, 24 nt, Artificial Sequence
  Synthetic
acaaacuaaacucaaauccagcag

SEQ ID NO: 569167 - RNA, 18 nt, Artificial Sequence
  Synthetic
aucaacauuaagcagcag

SEQ ID NO: 569168 - RNA, 19 nt, Artificial Sequence
  Synthetic
uaucaacauuaagcagcag

SEQ ID NO: 569169 - RNA, 20 nt, Artificial Sequence
  Synthetic
auaucaacauuaagcagcag

SEQ ID NO: 569170 - RNA, 21 nt, Artificial Sequence
  Synthetic
gauaucaacauuaagcagcag

SEQ ID NO: 569171 - RNA, 22 nt, Artificial Sequence
  Synthetic
ugauaucaacauuaagcagcag

SEQ ID NO: 569172 - RNA, 23 nt, Artificial Sequence
  Synthetic
uugauaucaacauuaagcagcag

SEQ ID NO: 569173 - RNA, 24 nt, Artificial Sequence
  Synthetic
cuugauaucaacauuaagcagcag

SEQ ID NO: 569174 - RNA, 18 nt, Artificial Sequence
  Synthetic
uccauuguagggcagcag

SEQ ID NO: 569175 - RNA, 19 nt, Artificial Sequence
  Synthetic
uuccauuguagggcagcag

SEQ ID NO: 569176 - RNA, 20 nt, Artificial Sequence
  Synthetic
auuccauuguagggcagcag

SEQ ID NO: 569177 - RNA, 21 nt, Artificial Sequence
  Synthetic
uauuccauuguagggcagcag

SEQ ID NO: 569178 - RNA, 22 nt, Artificial Sequence
  Synthetic
uuauuccauuguagggcagcag

SEQ ID NO: 569179 - RNA, 23 nt, Artificial Sequence
  Synthetic
uuuauuccauuguagggcagcag

SEQ ID NO: 569180 - RNA, 24 nt, Artificial Sequence
  Synthetic
uuuuauuccauuguagggcagcag

SEQ ID NO: 569181 - RNA, 18 nt, Artificial Sequence
  Synthetic
auacauucuuaucagcag

SEQ ID NO: 569182 - RNA, 19 nt, Artificial Sequence
  Synthetic
uauacauucuuaucagcag

SEQ ID NO: 569183 - RNA, 20 nt, Artificial Sequence
  Synthetic
auauacauucuuaucagcag

SEQ ID NO: 569184 - RNA, 21 nt, Artificial Sequence
  Synthetic
aauauacauucuuaucagcag

SEQ ID NO: 569185 - RNA, 22 nt, Artificial Sequence
  Synthetic
gaauauacauucuuaucagcag

SEQ ID NO: 569186 - RNA, 23 nt, Artificial Sequence
  Synthetic
agaauauacauucuuaucagcag

SEQ ID NO: 569187 - RNA, 24 nt, Artificial Sequence
  Synthetic
uagaauauacauucuuaucagcag

SEQ ID NO: 569188 - RNA, 18 nt, Artificial Sequence
  Synthetic
uguugugugacucagcag

SEQ ID NO: 569189 - RNA, 19 nt, Artificial Sequence
  Synthetic
guguugugugacucagcag

SEQ ID NO: 569190 - RNA, 20 nt, Artificial Sequence
  Synthetic
aguguugugugacucagcag

SEQ ID NO: 569191 - RNA, 21 nt, Artificial Sequence
  Synthetic
uaguguugugugacucagcag

SEQ ID NO: 569192 - RNA, 22 nt, Artificial Sequence
  Synthetic
uuaguguugugugacucagcag

SEQ ID NO: 569193 - RNA, 23 nt, Artificial Sequence
  Synthetic
uuuaguguugugugacucagcag

SEQ ID NO: 569194 - RNA, 24 nt, Artificial Sequence
  Synthetic
cuuuaguguugugugacucagcag

SEQ ID NO: 569195 - RNA, 18 nt, Artificial Sequence
  Synthetic
uagauuaucugucagcag

SEQ ID NO: 569196 - RNA, 19 nt, Artificial Sequence
  Synthetic
uuagauuaucugucagcag

SEQ ID NO: 569197 - RNA, 20 nt, Artificial Sequence
  Synthetic
uuuagauuaucugucagcag

SEQ ID NO: 569198 - RNA, 21 nt, Artificial Sequence
  Synthetic
guuuagauuaucugucagcag

SEQ ID NO: 569199 - RNA, 22 nt, Artificial Sequence
  Synthetic
gguuuagauuaucugucagcag

SEQ ID NO: 569200 - RNA, 23 nt, Artificial Sequence
  Synthetic
ugguuuagauuaucugucagcag

SEQ ID NO: 569201 - RNA, 24 nt, Artificial Sequence
  Synthetic
uugguuuagauuaucugucagcag

SEQ ID NO: 569202 - RNA, 18 nt, Artificial Sequence
  Synthetic
gugguagcuugucagcag

SEQ ID NO: 569203 - RNA, 19 nt, Artificial Sequence
  Synthetic
cgugguagcuugucagcag

SEQ ID NO: 569204 - RNA, 20 nt, Artificial Sequence
  Synthetic
acgugguagcuugucagcag

SEQ ID NO: 569205 - RNA, 21 nt, Artificial Sequence
  Synthetic
uacgugguagcuugucagcag

SEQ ID NO: 569206 - RNA, 22 nt, Artificial Sequence
  Synthetic
cuacgugguagcuugucagcag

SEQ ID NO: 569207 - RNA, 23 nt, Artificial Sequence
  Synthetic
ucuacgugguagcuugucagcag

SEQ ID NO: 569208 - RNA, 24 nt, Artificial Sequence
  Synthetic
aucuacgugguagcuugucagcag

SEQ ID NO: 569209 - RNA, 18 nt, Artificial Sequence
  Synthetic
aagguugaauuucagcag

SEQ ID NO: 569210 - RNA, 19 nt, Artificial Sequence
  Synthetic
gaagguugaauuucagcag

SEQ ID NO: 569211 - RNA, 20 nt, Artificial Sequence
  Synthetic
agaagguugaauuucagcag

SEQ ID NO: 569212 - RNA, 21 nt, Artificial Sequence
  Synthetic
aagaagguugaauuucagcag

SEQ ID NO: 569213 - RNA, 22 nt, Artificial Sequence
  Synthetic
aaagaagguugaauuucagcag

SEQ ID NO: 569214 - RNA, 23 nt, Artificial Sequence
  Synthetic
gaaagaagguugaauuucagcag

SEQ ID NO: 569215 - RNA, 24 nt, Artificial Sequence
  Synthetic
agaaagaagguugaauuucagcag

SEQ ID NO: 569216 - RNA, 18 nt, Artificial Sequence
  Synthetic
aaaagauagaaagagcag

SEQ ID NO: 569217 - RNA, 19 nt, Artificial Sequence
  Synthetic
gaaaagauagaaagagcag

SEQ ID NO: 569218 - RNA, 20 nt, Artificial Sequence
  Synthetic
agaaaagauagaaagagcag

SEQ ID NO: 569219 - RNA, 21 nt, Artificial Sequence
  Synthetic
aagaaaagauagaaagagcag

SEQ ID NO: 569220 - RNA, 22 nt, Artificial Sequence
  Synthetic
caagaaaagauagaaagagcag

SEQ ID NO: 569221 - RNA, 23 nt, Artificial Sequence
  Synthetic
ccaagaaaagauagaaagagcag

SEQ ID NO: 569222 - RNA, 24 nt, Artificial Sequence
  Synthetic
accaagaaaagauagaaagagcag

SEQ ID NO: 569223 - RNA, 18 nt, Artificial Sequence
  Synthetic
ccucagccuccagagcag

SEQ ID NO: 569224 - RNA, 19 nt, Artificial Sequence
  Synthetic
gccucagccuccagagcag

SEQ ID NO: 569225 - RNA, 20 nt, Artificial Sequence
  Synthetic
ugccucagccuccagagcag

SEQ ID NO: 569226 - RNA, 21 nt, Artificial Sequence
  Synthetic
cugccucagccuccagagcag

SEQ ID NO: 569227 - RNA, 22 nt, Artificial Sequence
  Synthetic
ucugccucagccuccagagcag

SEQ ID NO: 569228 - RNA, 23 nt, Artificial Sequence
  Synthetic
uucugccucagccuccagagcag

SEQ ID NO: 569229 - RNA, 24 nt, Artificial Sequence
  Synthetic
cuucugccucagccuccagagcag

SEQ ID NO: 569230 - RNA, 18 nt, Artificial Sequence
  Synthetic
gucagggaaggagagcag

SEQ ID NO: 569231 - RNA, 19 nt, Artificial Sequence
  Synthetic
ggucagggaaggagagcag

SEQ ID NO: 569232 - RNA, 20 nt, Artificial Sequence
  Synthetic
gggucagggaaggagagcag

SEQ ID NO: 569233 - RNA, 21 nt, Artificial Sequence
  Synthetic
ggggucagggaaggagagcag

SEQ ID NO: 569234 - RNA, 22 nt, Artificial Sequence
  Synthetic
cggggucagggaaggagagcag

SEQ ID NO: 569235 - RNA, 23 nt, Artificial Sequence
  Synthetic
acggggucagggaaggagagcag

SEQ ID NO: 569236 - RNA, 24 nt, Artificial Sequence
  Synthetic
aacggggucagggaaggagagcag

SEQ ID NO: 569237 - RNA, 18 nt, Artificial Sequence
  Synthetic
uguaucugcggagagcag

SEQ ID NO: 569238 - RNA, 19 nt, Artificial Sequence
  Synthetic
guguaucugcggagagcag

SEQ ID NO: 569239 - RNA, 20 nt, Artificial Sequence
  Synthetic
aguguaucugcggagagcag

SEQ ID NO: 569240 - RNA, 21 nt, Artificial Sequence
  Synthetic
aaguguaucugcggagagcag

SEQ ID NO: 569241 - RNA, 22 nt, Artificial Sequence
  Synthetic
gaaguguaucugcggagagcag

SEQ ID NO: 569242 - RNA, 23 nt, Artificial Sequence
  Synthetic
agaaguguaucugcggagagcag

SEQ ID NO: 569243 - RNA, 24 nt, Artificial Sequence
  Synthetic
cagaaguguaucugcggagagcag

SEQ ID NO: 569244 - RNA, 18 nt, Artificial Sequence
  Synthetic
cauuuuggagaggagcag

SEQ ID NO: 569245 - RNA, 19 nt, Artificial Sequence
  Synthetic
ccauuuuggagaggagcag

SEQ ID NO: 569246 - RNA, 20 nt, Artificial Sequence
  Synthetic
gccauuuuggagaggagcag

SEQ ID NO: 569247 - RNA, 21 nt, Artificial Sequence
  Synthetic
ugccauuuuggagaggagcag

SEQ ID NO: 569248 - RNA, 22 nt, Artificial Sequence
  Synthetic
cugccauuuuggagaggagcag

SEQ ID NO: 569249 - RNA, 23 nt, Artificial Sequence
  Synthetic
gcugccauuuuggagaggagcag

SEQ ID NO: 569250 - RNA, 24 nt, Artificial Sequence
  Synthetic
agcugccauuuuggagaggagcag

SEQ ID NO: 569251 - RNA, 18 nt, Artificial Sequence
  Synthetic
gcuguauuuugggagcag

SEQ ID NO: 569252 - RNA, 19 nt, Artificial Sequence
  Synthetic
ugcuguauuuugggagcag

SEQ ID NO: 569253 - RNA, 20 nt, Artificial Sequence
  Synthetic
uugcuguauuuugggagcag

SEQ ID NO: 569254 - RNA, 21 nt, Artificial Sequence
  Synthetic
auugcuguauuuugggagcag

SEQ ID NO: 569255 - RNA, 22 nt, Artificial Sequence
  Synthetic
cauugcuguauuuugggagcag

SEQ ID NO: 569256 - RNA, 23 nt, Artificial Sequence
  Synthetic
ucauugcuguauuuugggagcag

SEQ ID NO: 569257 - RNA, 24 nt, Artificial Sequence
  Synthetic
uucauugcuguauuuugggagcag

SEQ ID NO: 569258 - RNA, 18 nt, Artificial Sequence
  Synthetic
ucaacauagguggagcag

SEQ ID NO: 569259 - RNA, 19 nt, Artificial Sequence
  Synthetic
gucaacauagguggagcag

SEQ ID NO: 569260 - RNA, 20 nt, Artificial Sequence
  Synthetic
ggucaacauagguggagcag

SEQ ID NO: 569261 - RNA, 21 nt, Artificial Sequence
  Synthetic
gggucaacauagguggagcag

SEQ ID NO: 569262 - RNA, 22 nt, Artificial Sequence
  Synthetic
ggggucaacauagguggagcag

SEQ ID NO: 569263 - RNA, 23 nt, Artificial Sequence
  Synthetic
aggggucaacauagguggagcag

SEQ ID NO: 569264 - RNA, 24 nt, Artificial Sequence
  Synthetic
aaggggucaacauagguggagcag

SEQ ID NO: 569265 - RNA, 18 nt, Artificial Sequence
  Synthetic
aguacagagaaugagcag

SEQ ID NO: 569266 - RNA, 19 nt, Artificial Sequence
  Synthetic
gaguacagagaaugagcag

SEQ ID NO: 569267 - RNA, 20 nt, Artificial Sequence
  Synthetic
ggaguacagagaaugagcag

SEQ ID NO: 569268 - RNA, 21 nt, Artificial Sequence
  Synthetic
uggaguacagagaaugagcag

SEQ ID NO: 569269 - RNA, 22 nt, Artificial Sequence
  Synthetic
uuggaguacagagaaugagcag

SEQ ID NO: 569270 - RNA, 23 nt, Artificial Sequence
  Synthetic
guuggaguacagagaaugagcag

SEQ ID NO: 569271 - RNA, 24 nt, Artificial Sequence
  Synthetic
aguuggaguacagagaaugagcag

SEQ ID NO: 569272 - RNA, 18 nt, Artificial Sequence
  Synthetic
acacaguguuaugagcag

SEQ ID NO: 569273 - RNA, 19 nt, Artificial Sequence
  Synthetic
uacacaguguuaugagcag

SEQ ID NO: 569274 - RNA, 20 nt, Artificial Sequence
  Synthetic
guacacaguguuaugagcag

SEQ ID NO: 569275 - RNA, 21 nt, Artificial Sequence
  Synthetic
uguacacaguguuaugagcag

SEQ ID NO: 569276 - RNA, 22 nt, Artificial Sequence
  Synthetic
auguacacaguguuaugagcag

SEQ ID NO: 569277 - RNA, 23 nt, Artificial Sequence
  Synthetic
aauguacacaguguuaugagcag

SEQ ID NO: 569278 - RNA, 24 nt, Artificial Sequence
  Synthetic
aaauguacacaguguuaugagcag

SEQ ID NO: 569279 - RNA, 18 nt, Artificial Sequence
  Synthetic
cugcaguaccuugagcag

SEQ ID NO: 569280 - RNA, 19 nt, Artificial Sequence
  Synthetic
ucugcaguaccuugagcag

SEQ ID NO: 569281 - RNA, 20 nt, Artificial Sequence
  Synthetic
aucugcaguaccuugagcag

SEQ ID NO: 569282 - RNA, 21 nt, Artificial Sequence
  Synthetic
uaucugcaguaccuugagcag

SEQ ID NO: 569283 - RNA, 22 nt, Artificial Sequence
  Synthetic
auaucugcaguaccuugagcag

SEQ ID NO: 569284 - RNA, 23 nt, Artificial Sequence
  Synthetic
aauaucugcaguaccuugagcag

SEQ ID NO: 569285 - RNA, 24 nt, Artificial Sequence
  Synthetic
aaauaucugcaguaccuugagcag

SEQ ID NO: 569286 - RNA, 18 nt, Artificial Sequence
  Synthetic
uagcaauccguugagcag

SEQ ID NO: 569287 - RNA, 19 nt, Artificial Sequence
  Synthetic
auagcaauccguugagcag

SEQ ID NO: 569288 - RNA, 20 nt, Artificial Sequence
  Synthetic
cauagcaauccguugagcag

SEQ ID NO: 569289 - RNA, 21 nt, Artificial Sequence
  Synthetic
ucauagcaauccguugagcag

SEQ ID NO: 569290 - RNA, 22 nt, Artificial Sequence
  Synthetic
aucauagcaauccguugagcag

SEQ ID NO: 569291 - RNA, 23 nt, Artificial Sequence
  Synthetic
caucauagcaauccguugagcag

SEQ ID NO: 569292 - RNA, 24 nt, Artificial Sequence
  Synthetic
acaucauagcaauccguugagcag

SEQ ID NO: 569293 - RNA, 18 nt, Artificial Sequence
  Synthetic
uauuauuuaaaauagcag

SEQ ID NO: 569294 - RNA, 19 nt, Artificial Sequence
  Synthetic
cuauuauuuaaaauagcag

SEQ ID NO: 569295 - RNA, 20 nt, Artificial Sequence
  Synthetic
ucuauuauuuaaaauagcag

SEQ ID NO: 569296 - RNA, 21 nt, Artificial Sequence
  Synthetic
uucuauuauuuaaaauagcag

SEQ ID NO: 569297 - RNA, 22 nt, Artificial Sequence
  Synthetic
guucuauuauuuaaaauagcag

SEQ ID NO: 569298 - RNA, 23 nt, Artificial Sequence
  Synthetic
aguucuauuauuuaaaauagcag

SEQ ID NO: 569299 - RNA, 24 nt, Artificial Sequence
  Synthetic
aaguucuauuauuuaaaauagcag

SEQ ID NO: 569300 - RNA, 18 nt, Artificial Sequence
  Synthetic
gguauuucuucauagcag

SEQ ID NO: 569301 - RNA, 19 nt, Artificial Sequence
  Synthetic
ggguauuucuucauagcag

SEQ ID NO: 569302 - RNA, 20 nt, Artificial Sequence
  Synthetic
uggguauuucuucauagcag

SEQ ID NO: 569303 - RNA, 21 nt, Artificial Sequence
  Synthetic
uuggguauuucuucauagcag

SEQ ID NO: 569304 - RNA, 22 nt, Artificial Sequence
  Synthetic
cuuggguauuucuucauagcag

SEQ ID NO: 569305 - RNA, 23 nt, Artificial Sequence
  Synthetic
ucuuggguauuucuucauagcag

SEQ ID NO: 569306 - RNA, 24 nt, Artificial Sequence
  Synthetic
gucuuggguauuucuucauagcag

SEQ ID NO: 569307 - RNA, 18 nt, Artificial Sequence
  Synthetic
cucaggcuauuauagcag

SEQ ID NO: 569308 - RNA, 19 nt, Artificial Sequence
  Synthetic
ucucaggcuauuauagcag

SEQ ID NO: 569309 - RNA, 20 nt, Artificial Sequence
  Synthetic
uucucaggcuauuauagcag

SEQ ID NO: 569310 - RNA, 21 nt, Artificial Sequence
  Synthetic
uuucucaggcuauuauagcag

SEQ ID NO: 569311 - RNA, 22 nt, Artificial Sequence
  Synthetic
auuucucaggcuauuauagcag

SEQ ID NO: 569312 - RNA, 23 nt, Artificial Sequence
  Synthetic
gauuucucaggcuauuauagcag

SEQ ID NO: 569313 - RNA, 24 nt, Artificial Sequence
  Synthetic
cgauuucucaggcuauuauagcag

SEQ ID NO: 569314 - RNA, 18 nt, Artificial Sequence
  Synthetic
gcauuucuauuauagcag

SEQ ID NO: 569315 - RNA, 19 nt, Artificial Sequence
  Synthetic
ggcauuucuauuauagcag

SEQ ID NO: 569316 - RNA, 20 nt, Artificial Sequence
  Synthetic
uggcauuucuauuauagcag

SEQ ID NO: 569317 - RNA, 21 nt, Artificial Sequence
  Synthetic
auggcauuucuauuauagcag

SEQ ID NO: 569318 - RNA, 22 nt, Artificial Sequence
  Synthetic
uauggcauuucuauuauagcag

SEQ ID NO: 569319 - RNA, 23 nt, Artificial Sequence
  Synthetic
uuauggcauuucuauuauagcag

SEQ ID NO: 569320 - RNA, 24 nt, Artificial Sequence
  Synthetic
uuuauggcauuucuauuauagcag

SEQ ID NO: 569321 - RNA, 18 nt, Artificial Sequence
  Synthetic
acuguauucaaguagcag

SEQ ID NO: 569322 - RNA, 19 nt, Artificial Sequence
  Synthetic
aacuguauucaaguagcag

SEQ ID NO: 569323 - RNA, 20 nt, Artificial Sequence
  Synthetic
caacuguauucaaguagcag

SEQ ID NO: 569324 - RNA, 21 nt, Artificial Sequence
  Synthetic
ccaacuguauucaaguagcag

SEQ ID NO: 569325 - RNA, 22 nt, Artificial Sequence
  Synthetic
gccaacuguauucaaguagcag

SEQ ID NO: 569326 - RNA, 23 nt, Artificial Sequence
  Synthetic
ggccaacuguauucaaguagcag

SEQ ID NO: 569327 - RNA, 24 nt, Artificial Sequence
  Synthetic
gggccaacuguauucaaguagcag

SEQ ID NO: 569328 - RNA, 18 nt, Artificial Sequence
  Synthetic
aaagggucucaguagcag

SEQ ID NO: 569329 - RNA, 19 nt, Artificial Sequence
  Synthetic
aaaagggucucaguagcag

SEQ ID NO: 569330 - RNA, 20 nt, Artificial Sequence
  Synthetic
caaaagggucucaguagcag

SEQ ID NO: 569331 - RNA, 21 nt, Artificial Sequence
  Synthetic
gcaaaagggucucaguagcag

SEQ ID NO: 569332 - RNA, 22 nt, Artificial Sequence
  Synthetic
ggcaaaagggucucaguagcag

SEQ ID NO: 569333 - RNA, 23 nt, Artificial Sequence
  Synthetic
gggcaaaagggucucaguagcag

SEQ ID NO: 569334 - RNA, 24 nt, Artificial Sequence
  Synthetic
ugggcaaaagggucucaguagcag

SEQ ID NO: 569335 - RNA, 18 nt, Artificial Sequence
  Synthetic
cggguagagagguagcag

SEQ ID NO: 569336 - RNA, 19 nt, Artificial Sequence
  Synthetic
acggguagagagguagcag

SEQ ID NO: 569337 - RNA, 20 nt, Artificial Sequence
  Synthetic
uacggguagagagguagcag

SEQ ID NO: 569338 - RNA, 21 nt, Artificial Sequence
  Synthetic
uuacggguagagagguagcag

SEQ ID NO: 569339 - RNA, 22 nt, Artificial Sequence
  Synthetic
cuuacggguagagagguagcag

SEQ ID NO: 569340 - RNA, 23 nt, Artificial Sequence
  Synthetic
acuuacggguagagagguagcag

SEQ ID NO: 569341 - RNA, 24 nt, Artificial Sequence
  Synthetic
cacuuacggguagagagguagcag

SEQ ID NO: 569342 - RNA, 18 nt, Artificial Sequence
  Synthetic
uaagcccaaaguuagcag

SEQ ID NO: 569343 - RNA, 19 nt, Artificial Sequence
  Synthetic
cuaagcccaaaguuagcag

SEQ ID NO: 569344 - RNA, 20 nt, Artificial Sequence
  Synthetic
acuaagcccaaaguuagcag

SEQ ID NO: 569345 - RNA, 21 nt, Artificial Sequence
  Synthetic
aacuaagcccaaaguuagcag

SEQ ID NO: 569346 - RNA, 22 nt, Artificial Sequence
  Synthetic
aaacuaagcccaaaguuagcag

SEQ ID NO: 569347 - RNA, 23 nt, Artificial Sequence
  Synthetic
caaacuaagcccaaaguuagcag

SEQ ID NO: 569348 - RNA, 24 nt, Artificial Sequence
  Synthetic
acaaacuaagcccaaaguuagcag

SEQ ID NO: 569349 - RNA, 18 nt, Artificial Sequence
  Synthetic
aggccucuauguuagcag

SEQ ID NO: 569350 - RNA, 19 nt, Artificial Sequence
  Synthetic
uaggccucuauguuagcag

SEQ ID NO: 569351 - RNA, 20 nt, Artificial Sequence
  Synthetic
uuaggccucuauguuagcag

SEQ ID NO: 569352 - RNA, 21 nt, Artificial Sequence
  Synthetic
uuuaggccucuauguuagcag

SEQ ID NO: 569353 - RNA, 22 nt, Artificial Sequence
  Synthetic
cuuuaggccucuauguuagcag

SEQ ID NO: 569354 - RNA, 23 nt, Artificial Sequence
  Synthetic
ccuuuaggccucuauguuagcag

SEQ ID NO: 569355 - RNA, 24 nt, Artificial Sequence
  Synthetic
accuuuaggccucuauguuagcag

SEQ ID NO: 569356 - RNA, 18 nt, Artificial Sequence
  Synthetic
aaacaccuuuaaacgcag

SEQ ID NO: 569357 - RNA, 19 nt, Artificial Sequence
  Synthetic
aaaacaccuuuaaacgcag

SEQ ID NO: 569358 - RNA, 20 nt, Artificial Sequence
  Synthetic
aaaaacaccuuuaaacgcag

SEQ ID NO: 569359 - RNA, 21 nt, Artificial Sequence
  Synthetic
aaaaaacaccuuuaaacgcag

SEQ ID NO: 569360 - RNA, 22 nt, Artificial Sequence
  Synthetic
uaaaaaacaccuuuaaacgcag

SEQ ID NO: 569361 - RNA, 23 nt, Artificial Sequence
  Synthetic
uuaaaaaacaccuuuaaacgcag

SEQ ID NO: 569362 - RNA, 24 nt, Artificial Sequence
  Synthetic
cuuaaaaaacaccuuuaaacgcag

SEQ ID NO: 569363 - RNA, 18 nt, Artificial Sequence
  Synthetic
gucccaguuugaaggcag

SEQ ID NO: 569364 - RNA, 19 nt, Artificial Sequence
  Synthetic
ugucccaguuugaaggcag

SEQ ID NO: 569365 - RNA, 20 nt, Artificial Sequence
  Synthetic
augucccaguuugaaggcag

SEQ ID NO: 569366 - RNA, 21 nt, Artificial Sequence
  Synthetic
caugucccaguuugaaggcag

SEQ ID NO: 569367 - RNA, 22 nt, Artificial Sequence
  Synthetic
ccaugucccaguuugaaggcag

SEQ ID NO: 569368 - RNA, 23 nt, Artificial Sequence
  Synthetic
cccaugucccaguuugaaggcag

SEQ ID NO: 569369 - RNA, 24 nt, Artificial Sequence
  Synthetic
gcccaugucccaguuugaaggcag

SEQ ID NO: 569370 - RNA, 18 nt, Artificial Sequence
  Synthetic
guugcacccauaaggcag

SEQ ID NO: 569371 - RNA, 19 nt, Artificial Sequence
  Synthetic
aguugcacccauaaggcag

SEQ ID NO: 569372 - RNA, 20 nt, Artificial Sequence
  Synthetic
gaguugcacccauaaggcag

SEQ ID NO: 569373 - RNA, 21 nt, Artificial Sequence
  Synthetic
ggaguugcacccauaaggcag

SEQ ID NO: 569374 - RNA, 22 nt, Artificial Sequence
  Synthetic
gggaguugcacccauaaggcag

SEQ ID NO: 569375 - RNA, 23 nt, Artificial Sequence
  Synthetic
cgggaguugcacccauaaggcag

SEQ ID NO: 569376 - RNA, 24 nt, Artificial Sequence
  Synthetic
ccgggaguugcacccauaaggcag

SEQ ID NO: 569377 - RNA, 18 nt, Artificial Sequence
  Synthetic
ugaagaucucuaaggcag

SEQ ID NO: 569378 - RNA, 19 nt, Artificial Sequence
  Synthetic
uugaagaucucuaaggcag

SEQ ID NO: 569379 - RNA, 20 nt, Artificial Sequence
  Synthetic
cuugaagaucucuaaggcag

SEQ ID NO: 569380 - RNA, 21 nt, Artificial Sequence
  Synthetic
ccuugaagaucucuaaggcag

SEQ ID NO: 569381 - RNA, 22 nt, Artificial Sequence
  Synthetic
gccuugaagaucucuaaggcag

SEQ ID NO: 569382 - RNA, 23 nt, Artificial Sequence
  Synthetic
ggccuugaagaucucuaaggcag

SEQ ID NO: 569383 - RNA, 24 nt, Artificial Sequence
  Synthetic
uggccuugaagaucucuaaggcag

SEQ ID NO: 569384 - RNA, 18 nt, Artificial Sequence
  Synthetic
cacagggaguacaggcag

SEQ ID NO: 569385 - RNA, 19 nt, Artificial Sequence
  Synthetic
ccacagggaguacaggcag

SEQ ID NO: 569386 - RNA, 20 nt, Artificial Sequence
  Synthetic
gccacagggaguacaggcag

SEQ ID NO: 569387 - RNA, 21 nt, Artificial Sequence
  Synthetic
agccacagggaguacaggcag

SEQ ID NO: 569388 - RNA, 22 nt, Artificial Sequence
  Synthetic
uagccacagggaguacaggcag

SEQ ID NO: 569389 - RNA, 23 nt, Artificial Sequence
  Synthetic
guagccacagggaguacaggcag

SEQ ID NO: 569390 - RNA, 24 nt, Artificial Sequence
  Synthetic
gguagccacagggaguacaggcag

SEQ ID NO: 569391 - RNA, 18 nt, Artificial Sequence
  Synthetic
gacaaacaaagcaggcag

SEQ ID NO: 569392 - RNA, 19 nt, Artificial Sequence
  Synthetic
agacaaacaaagcaggcag

SEQ ID NO: 569393 - RNA, 20 nt, Artificial Sequence
  Synthetic
uagacaaacaaagcaggcag

SEQ ID NO: 569394 - RNA, 21 nt, Artificial Sequence
  Synthetic
guagacaaacaaagcaggcag

SEQ ID NO: 569395 - RNA, 22 nt, Artificial Sequence
  Synthetic
uguagacaaacaaagcaggcag

SEQ ID NO: 569396 - RNA, 23 nt, Artificial Sequence
  Synthetic
auguagacaaacaaagcaggcag

SEQ ID NO: 569397 - RNA, 24 nt, Artificial Sequence
  Synthetic
cauguagacaaacaaagcaggcag

SEQ ID NO: 569398 - RNA, 18 nt, Artificial Sequence
  Synthetic
caagggaauggcaggcag

SEQ ID NO: 569399 - RNA, 19 nt, Artificial Sequence
  Synthetic
ccaagggaauggcaggcag

SEQ ID NO: 569400 - RNA, 20 nt, Artificial Sequence
  Synthetic
accaagggaauggcaggcag

SEQ ID NO: 569401 - RNA, 21 nt, Artificial Sequence
  Synthetic
uaccaagggaauggcaggcag

SEQ ID NO: 569402 - RNA, 22 nt, Artificial Sequence
  Synthetic
cuaccaagggaauggcaggcag

SEQ ID NO: 569403 - RNA, 23 nt, Artificial Sequence
  Synthetic
gcuaccaagggaauggcaggcag

SEQ ID NO: 569404 - RNA, 24 nt, Artificial Sequence
  Synthetic
agcuaccaagggaauggcaggcag

SEQ ID NO: 569405 - RNA, 18 nt, Artificial Sequence
  Synthetic
cgauuuaaacucaggcag

SEQ ID NO: 569406 - RNA, 19 nt, Artificial Sequence
  Synthetic
acgauuuaaacucaggcag

SEQ ID NO: 569407 - RNA, 20 nt, Artificial Sequence
  Synthetic
cacgauuuaaacucaggcag

SEQ ID NO: 569408 - RNA, 21 nt, Artificial Sequence
  Synthetic
ucacgauuuaaacucaggcag

SEQ ID NO: 569409 - RNA, 22 nt, Artificial Sequence
  Synthetic
aucacgauuuaaacucaggcag

SEQ ID NO: 569410 - RNA, 23 nt, Artificial Sequence
  Synthetic
aaucacgauuuaaacucaggcag

SEQ ID NO: 569411 - RNA, 24 nt, Artificial Sequence
  Synthetic
gaaucacgauuuaaacucaggcag

SEQ ID NO: 569412 - RNA, 18 nt, Artificial Sequence
  Synthetic
gaagacuauuucaggcag

SEQ ID NO: 569413 - RNA, 19 nt, Artificial Sequence
  Synthetic
ugaagacuauuucaggcag

SEQ ID NO: 569414 - RNA, 20 nt, Artificial Sequence
  Synthetic
cugaagacuauuucaggcag

SEQ ID NO: 569415 - RNA, 21 nt, Artificial Sequence
  Synthetic
acugaagacuauuucaggcag

SEQ ID NO: 569416 - RNA, 22 nt, Artificial Sequence
  Synthetic
uacugaagacuauuucaggcag

SEQ ID NO: 569417 - RNA, 23 nt, Artificial Sequence
  Synthetic
auacugaagacuauuucaggcag

SEQ ID NO: 569418 - RNA, 24 nt, Artificial Sequence
  Synthetic
cauacugaagacuauuucaggcag

SEQ ID NO: 569419 - RNA, 18 nt, Artificial Sequence
  Synthetic
acauagaggaagaggcag

SEQ ID NO: 569420 - RNA, 19 nt, Artificial Sequence
  Synthetic
uacauagaggaagaggcag

SEQ ID NO: 569421 - RNA, 20 nt, Artificial Sequence
  Synthetic
cuacauagaggaagaggcag

SEQ ID NO: 569422 - RNA, 21 nt, Artificial Sequence
  Synthetic
ucuacauagaggaagaggcag

SEQ ID NO: 569423 - RNA, 22 nt, Artificial Sequence
  Synthetic
gucuacauagaggaagaggcag

SEQ ID NO: 569424 - RNA, 23 nt, Artificial Sequence
  Synthetic
agucuacauagaggaagaggcag

SEQ ID NO: 569425 - RNA, 24 nt, Artificial Sequence
  Synthetic
gagucuacauagaggaagaggcag

SEQ ID NO: 569426 - RNA, 18 nt, Artificial Sequence
  Synthetic
acuaagcugaagaggcag

SEQ ID NO: 569427 - RNA, 19 nt, Artificial Sequence
  Synthetic
aacuaagcugaagaggcag

SEQ ID NO: 569428 - RNA, 20 nt, Artificial Sequence
  Synthetic
gaacuaagcugaagaggcag

SEQ ID NO: 569429 - RNA, 21 nt, Artificial Sequence
  Synthetic
agaacuaagcugaagaggcag

SEQ ID NO: 569430 - RNA, 22 nt, Artificial Sequence
  Synthetic
aagaacuaagcugaagaggcag

SEQ ID NO: 569431 - RNA, 23 nt, Artificial Sequence
  Synthetic
caagaacuaagcugaagaggcag

SEQ ID NO: 569432 - RNA, 24 nt, Artificial Sequence
  Synthetic
gcaagaacuaagcugaagaggcag

SEQ ID NO: 569433 - RNA, 18 nt, Artificial Sequence
  Synthetic
uagauguuccagaggcag

SEQ ID NO: 569434 - RNA, 19 nt, Artificial Sequence
  Synthetic
guagauguuccagaggcag

SEQ ID NO: 569435 - RNA, 20 nt, Artificial Sequence
  Synthetic
uguagauguuccagaggcag

SEQ ID NO: 569436 - RNA, 21 nt, Artificial Sequence
  Synthetic
cuguagauguuccagaggcag

SEQ ID NO: 569437 - RNA, 22 nt, Artificial Sequence
  Synthetic
acuguagauguuccagaggcag

SEQ ID NO: 569438 - RNA, 23 nt, Artificial Sequence
  Synthetic
aacuguagauguuccagaggcag

SEQ ID NO: 569439 - RNA, 24 nt, Artificial Sequence
  Synthetic
aaacuguagauguuccagaggcag

SEQ ID NO: 569440 - RNA, 18 nt, Artificial Sequence
  Synthetic
gagcaagaagagaggcag

SEQ ID NO: 569441 - RNA, 19 nt, Artificial Sequence
  Synthetic
ggagcaagaagagaggcag

SEQ ID NO: 569442 - RNA, 20 nt, Artificial Sequence
  Synthetic
aggagcaagaagagaggcag

SEQ ID NO: 569443 - RNA, 21 nt, Artificial Sequence
  Synthetic
aaggagcaagaagagaggcag

SEQ ID NO: 569444 - RNA, 22 nt, Artificial Sequence
  Synthetic
gaaggagcaagaagagaggcag

SEQ ID NO: 569445 - RNA, 23 nt, Artificial Sequence
  Synthetic
ugaaggagcaagaagagaggcag

SEQ ID NO: 569446 - RNA, 24 nt, Artificial Sequence
  Synthetic
uugaaggagcaagaagagaggcag

SEQ ID NO: 569447 - RNA, 18 nt, Artificial Sequence
  Synthetic
aauagagaauagaggcag

SEQ ID NO: 569448 - RNA, 19 nt, Artificial Sequence
  Synthetic
aaauagagaauagaggcag

SEQ ID NO: 569449 - RNA, 20 nt, Artificial Sequence
  Synthetic
gaaauagagaauagaggcag

SEQ ID NO: 569450 - RNA, 21 nt, Artificial Sequence
  Synthetic
ugaaauagagaauagaggcag

SEQ ID NO: 569451 - RNA, 22 nt, Artificial Sequence
  Synthetic
cugaaauagagaauagaggcag

SEQ ID NO: 569452 - RNA, 23 nt, Artificial Sequence
  Synthetic
ucugaaauagagaauagaggcag

SEQ ID NO: 569453 - RNA, 24 nt, Artificial Sequence
  Synthetic
uucugaaauagagaauagaggcag

SEQ ID NO: 569454 - RNA, 18 nt, Artificial Sequence
  Synthetic
uggagagacaggaggcag

SEQ ID NO: 569455 - RNA, 19 nt, Artificial Sequence
  Synthetic
auggagagacaggaggcag

SEQ ID NO: 569456 - RNA, 20 nt, Artificial Sequence
  Synthetic
aauggagagacaggaggcag

SEQ ID NO: 569457 - RNA, 21 nt, Artificial Sequence
  Synthetic
gaauggagagacaggaggcag

SEQ ID NO: 569458 - RNA, 22 nt, Artificial Sequence
  Synthetic
agaauggagagacaggaggcag

SEQ ID NO: 569459 - RNA, 23 nt, Artificial Sequence
  Synthetic
aagaauggagagacaggaggcag

SEQ ID NO: 569460 - RNA, 24 nt, Artificial Sequence
  Synthetic
aaagaauggagagacaggaggcag

SEQ ID NO: 569461 - RNA, 18 nt, Artificial Sequence
  Synthetic
acaauuaccaugaggcag

SEQ ID NO: 569462 - RNA, 19 nt, Artificial Sequence
  Synthetic
uacaauuaccaugaggcag

SEQ ID NO: 569463 - RNA, 20 nt, Artificial Sequence
  Synthetic
guacaauuaccaugaggcag

SEQ ID NO: 569464 - RNA, 21 nt, Artificial Sequence
  Synthetic
gguacaauuaccaugaggcag

SEQ ID NO: 569465 - RNA, 22 nt, Artificial Sequence
  Synthetic
agguacaauuaccaugaggcag

SEQ ID NO: 569466 - RNA, 23 nt, Artificial Sequence
  Synthetic
cagguacaauuaccaugaggcag

SEQ ID NO: 569467 - RNA, 24 nt, Artificial Sequence
  Synthetic
gcagguacaauuaccaugaggcag

SEQ ID NO: 569468 - RNA, 18 nt, Artificial Sequence
  Synthetic
uagucccagcugaggcag

SEQ ID NO: 569469 - RNA, 19 nt, Artificial Sequence
  Synthetic
guagucccagcugaggcag

SEQ ID NO: 569470 - RNA, 20 nt, Artificial Sequence
  Synthetic
uguagucccagcugaggcag

SEQ ID NO: 569471 - RNA, 21 nt, Artificial Sequence
  Synthetic
cuguagucccagcugaggcag

SEQ ID NO: 569472 - RNA, 22 nt, Artificial Sequence
  Synthetic
ccuguagucccagcugaggcag

SEQ ID NO: 569473 - RNA, 23 nt, Artificial Sequence
  Synthetic
gccuguagucccagcugaggcag

SEQ ID NO: 569474 - RNA, 24 nt, Artificial Sequence
  Synthetic
ugccuguagucccagcugaggcag

SEQ ID NO: 569475 - RNA, 21 nt, Artificial Sequence
  Synthetic
cuacucaggaggcugaggcag

SEQ ID NO: 569476 - RNA, 22 nt, Artificial Sequence
  Synthetic
gcuacucaggaggcugaggcag

SEQ ID NO: 569477 - RNA, 23 nt, Artificial Sequence
  Synthetic
agcuacucaggaggcugaggcag

SEQ ID NO: 569478 - RNA, 24 nt, Artificial Sequence
  Synthetic
uagcuacucaggaggcugaggcag

SEQ ID NO: 569479 - RNA, 18 nt, Artificial Sequence
  Synthetic
ucagggauagugaggcag

SEQ ID NO: 569480 - RNA, 19 nt, Artificial Sequence
  Synthetic
aucagggauagugaggcag

SEQ ID NO: 569481 - RNA, 20 nt, Artificial Sequence
  Synthetic
gaucagggauagugaggcag

SEQ ID NO: 569482 - RNA, 21 nt, Artificial Sequence
  Synthetic
ugaucagggauagugaggcag

SEQ ID NO: 569483 - RNA, 22 nt, Artificial Sequence
  Synthetic
cugaucagggauagugaggcag

SEQ ID NO: 569484 - RNA, 23 nt, Artificial Sequence
  Synthetic
ccugaucagggauagugaggcag

SEQ ID NO: 569485 - RNA, 24 nt, Artificial Sequence
  Synthetic
accugaucagggauagugaggcag

SEQ ID NO: 569486 - RNA, 18 nt, Artificial Sequence
  Synthetic
ggguugguguugaggcag

SEQ ID NO: 569487 - RNA, 19 nt, Artificial Sequence
  Synthetic
aggguugguguugaggcag

SEQ ID NO: 569488 - RNA, 20 nt, Artificial Sequence
  Synthetic
aaggguugguguugaggcag

SEQ ID NO: 569489 - RNA, 21 nt, Artificial Sequence
  Synthetic
gaaggguugguguugaggcag

SEQ ID NO: 569490 - RNA, 22 nt, Artificial Sequence
  Synthetic
agaaggguugguguugaggcag

SEQ ID NO: 569491 - RNA, 23 nt, Artificial Sequence
  Synthetic
uagaaggguugguguugaggcag

SEQ ID NO: 569492 - RNA, 24 nt, Artificial Sequence
  Synthetic
auagaaggguugguguugaggcag

SEQ ID NO: 569493 - RNA, 18 nt, Artificial Sequence
  Synthetic
gccagagcaauuaggcag

SEQ ID NO: 569494 - RNA, 19 nt, Artificial Sequence
  Synthetic
agccagagcaauuaggcag

SEQ ID NO: 569495 - RNA, 20 nt, Artificial Sequence
  Synthetic
uagccagagcaauuaggcag

SEQ ID NO: 569496 - RNA, 21 nt, Artificial Sequence
  Synthetic
cuagccagagcaauuaggcag

SEQ ID NO: 569497 - RNA, 22 nt, Artificial Sequence
  Synthetic
ccuagccagagcaauuaggcag

SEQ ID NO: 569498 - RNA, 23 nt, Artificial Sequence
  Synthetic
uccuagccagagcaauuaggcag

SEQ ID NO: 569499 - RNA, 24 nt, Artificial Sequence
  Synthetic
guccuagccagagcaauuaggcag

SEQ ID NO: 569500 - RNA, 18 nt, Artificial Sequence
  Synthetic
aacuuuuacaaccggcag

SEQ ID NO: 569501 - RNA, 19 nt, Artificial Sequence
  Synthetic
uaacuuuuacaaccggcag

SEQ ID NO: 569502 - RNA, 20 nt, Artificial Sequence
  Synthetic
guaacuuuuacaaccggcag

SEQ ID NO: 569503 - RNA, 21 nt, Artificial Sequence
  Synthetic
aguaacuuuuacaaccggcag

SEQ ID NO: 569504 - RNA, 22 nt, Artificial Sequence
  Synthetic
caguaacuuuuacaaccggcag

SEQ ID NO: 569505 - RNA, 23 nt, Artificial Sequence
  Synthetic
acaguaacuuuuacaaccggcag

SEQ ID NO: 569506 - RNA, 24 nt, Artificial Sequence
  Synthetic
cacaguaacuuuuacaaccggcag

SEQ ID NO: 569507 - RNA, 18 nt, Artificial Sequence
  Synthetic
agaaggucuuugcggcag

SEQ ID NO: 569508 - RNA, 19 nt, Artificial Sequence
  Synthetic
uagaaggucuuugcggcag

SEQ ID NO: 569509 - RNA, 20 nt, Artificial Sequence
  Synthetic
guagaaggucuuugcggcag

SEQ ID NO: 569510 - RNA, 21 nt, Artificial Sequence
  Synthetic
gguagaaggucuuugcggcag

SEQ ID NO: 569511 - RNA, 22 nt, Artificial Sequence
  Synthetic
ggguagaaggucuuugcggcag

SEQ ID NO: 569512 - RNA, 23 nt, Artificial Sequence
  Synthetic
uggguagaaggucuuugcggcag

SEQ ID NO: 569513 - RNA, 24 nt, Artificial Sequence
  Synthetic
uuggguagaaggucuuugcggcag

SEQ ID NO: 569514 - RNA, 18 nt, Artificial Sequence
  Synthetic
uacuuaauggaagggcag

SEQ ID NO: 569515 - RNA, 19 nt, Artificial Sequence
  Synthetic
auacuuaauggaagggcag

SEQ ID NO: 569516 - RNA, 20 nt, Artificial Sequence
  Synthetic
aauacuuaauggaagggcag

SEQ ID NO: 569517 - RNA, 21 nt, Artificial Sequence
  Synthetic
caauacuuaauggaagggcag

SEQ ID NO: 569518 - RNA, 22 nt, Artificial Sequence
  Synthetic
ucaauacuuaauggaagggcag

SEQ ID NO: 569519 - RNA, 23 nt, Artificial Sequence
  Synthetic
gucaauacuuaauggaagggcag

SEQ ID NO: 569520 - RNA, 24 nt, Artificial Sequence
  Synthetic
cgucaauacuuaauggaagggcag

SEQ ID NO: 569521 - RNA, 18 nt, Artificial Sequence
  Synthetic
guaaauauggaagggcag

SEQ ID NO: 569522 - RNA, 19 nt, Artificial Sequence
  Synthetic
gguaaauauggaagggcag

SEQ ID NO: 569523 - RNA, 20 nt, Artificial Sequence
  Synthetic
agguaaauauggaagggcag

SEQ ID NO: 569524 - RNA, 21 nt, Artificial Sequence
  Synthetic
gagguaaauauggaagggcag

SEQ ID NO: 569525 - RNA, 22 nt, Artificial Sequence
  Synthetic
ggagguaaauauggaagggcag

SEQ ID NO: 569526 - RNA, 23 nt, Artificial Sequence
  Synthetic
aggagguaaauauggaagggcag

SEQ ID NO: 569527 - RNA, 24 nt, Artificial Sequence
  Synthetic
aaggagguaaauauggaagggcag

SEQ ID NO: 569528 - RNA, 18 nt, Artificial Sequence
  Synthetic
uggcgugaacccgggcag

SEQ ID NO: 569529 - RNA, 19 nt, Artificial Sequence
  Synthetic
auggcgugaacccgggcag

SEQ ID NO: 569530 - RNA, 20 nt, Artificial Sequence
  Synthetic
aauggcgugaacccgggcag

SEQ ID NO: 569531 - RNA, 21 nt, Artificial Sequence
  Synthetic
gaauggcgugaacccgggcag

SEQ ID NO: 569532 - RNA, 22 nt, Artificial Sequence
  Synthetic
agaauggcgugaacccgggcag

SEQ ID NO: 569533 - RNA, 23 nt, Artificial Sequence
  Synthetic
gagaauggcgugaacccgggcag

SEQ ID NO: 569534 - RNA, 24 nt, Artificial Sequence
  Synthetic
ggagaauggcgugaacccgggcag

SEQ ID NO: 569535 - RNA, 18 nt, Artificial Sequence
  Synthetic
augauguggugcgggcag

SEQ ID NO: 569536 - RNA, 19 nt, Artificial Sequence
  Synthetic
caugauguggugcgggcag

SEQ ID NO: 569537 - RNA, 20 nt, Artificial Sequence
  Synthetic
ucaugauguggugcgggcag

SEQ ID NO: 569538 - RNA, 21 nt, Artificial Sequence
  Synthetic
cucaugauguggugcgggcag

SEQ ID NO: 569539 - RNA, 22 nt, Artificial Sequence
  Synthetic
acucaugauguggugcgggcag

SEQ ID NO: 569540 - RNA, 23 nt, Artificial Sequence
  Synthetic
cacucaugauguggugcgggcag

SEQ ID NO: 569541 - RNA, 24 nt, Artificial Sequence
  Synthetic
acacucaugauguggugcgggcag

SEQ ID NO: 569542 - RNA, 18 nt, Artificial Sequence
  Synthetic
gagacugaaaaggggcag

SEQ ID NO: 569543 - RNA, 19 nt, Artificial Sequence
  Synthetic
agagacugaaaaggggcag

SEQ ID NO: 569544 - RNA, 20 nt, Artificial Sequence
  Synthetic
gagagacugaaaaggggcag

SEQ ID NO: 569545 - RNA, 21 nt, Artificial Sequence
  Synthetic
ggagagacugaaaaggggcag

SEQ ID NO: 569546 - RNA, 22 nt, Artificial Sequence
  Synthetic
cggagagacugaaaaggggcag

SEQ ID NO: 569547 - RNA, 23 nt, Artificial Sequence
  Synthetic
acggagagacugaaaaggggcag

SEQ ID NO: 569548 - RNA, 24 nt, Artificial Sequence
  Synthetic
cacggagagacugaaaaggggcag

SEQ ID NO: 569549 - RNA, 18 nt, Artificial Sequence
  Synthetic
gaaucaagggaggggcag

SEQ ID NO: 569550 - RNA, 19 nt, Artificial Sequence
  Synthetic
ggaaucaagggaggggcag

SEQ ID NO: 569551 - RNA, 20 nt, Artificial Sequence
  Synthetic
gggaaucaagggaggggcag

SEQ ID NO: 569552 - RNA, 21 nt, Artificial Sequence
  Synthetic
ugggaaucaagggaggggcag

SEQ ID NO: 569553 - RNA, 22 nt, Artificial Sequence
  Synthetic
cugggaaucaagggaggggcag

SEQ ID NO: 569554 - RNA, 23 nt, Artificial Sequence
  Synthetic
ccugggaaucaagggaggggcag

SEQ ID NO: 569555 - RNA, 24 nt, Artificial Sequence
  Synthetic
accugggaaucaagggaggggcag

SEQ ID NO: 569556 - RNA, 18 nt, Artificial Sequence
  Synthetic
guucacugauuggggcag

SEQ ID NO: 569557 - RNA, 19 nt, Artificial Sequence
  Synthetic
gguucacugauuggggcag

SEQ ID NO: 569558 - RNA, 20 nt, Artificial Sequence
  Synthetic
agguucacugauuggggcag

SEQ ID NO: 569559 - RNA, 21 nt, Artificial Sequence
  Synthetic
aagguucacugauuggggcag

SEQ ID NO: 569560 - RNA, 22 nt, Artificial Sequence
  Synthetic
gaagguucacugauuggggcag

SEQ ID NO: 569561 - RNA, 23 nt, Artificial Sequence
  Synthetic
cgaagguucacugauuggggcag

SEQ ID NO: 569562 - RNA, 24 nt, Artificial Sequence
  Synthetic
acgaagguucacugauuggggcag

SEQ ID NO: 569563 - RNA, 18 nt, Artificial Sequence
  Synthetic
uuaaagaguaaugggcag

SEQ ID NO: 569564 - RNA, 19 nt, Artificial Sequence
  Synthetic
uuuaaagaguaaugggcag

SEQ ID NO: 569565 - RNA, 20 nt, Artificial Sequence
  Synthetic
auuuaaagaguaaugggcag

SEQ ID NO: 569566 - RNA, 21 nt, Artificial Sequence
  Synthetic
cauuuaaagaguaaugggcag

SEQ ID NO: 569567 - RNA, 22 nt, Artificial Sequence
  Synthetic
ucauuuaaagaguaaugggcag

SEQ ID NO: 569568 - RNA, 23 nt, Artificial Sequence
  Synthetic
uucauuuaaagaguaaugggcag

SEQ ID NO: 569569 - RNA, 24 nt, Artificial Sequence
  Synthetic
uuucauuuaaagaguaaugggcag

SEQ ID NO: 569570 - RNA, 18 nt, Artificial Sequence
  Synthetic
uguggaaagcaugggcag

SEQ ID NO: 569571 - RNA, 19 nt, Artificial Sequence
  Synthetic
auguggaaagcaugggcag

SEQ ID NO: 569572 - RNA, 20 nt, Artificial Sequence
  Synthetic
uauguggaaagcaugggcag

SEQ ID NO: 569573 - RNA, 21 nt, Artificial Sequence
  Synthetic
cuauguggaaagcaugggcag

SEQ ID NO: 569574 - RNA, 22 nt, Artificial Sequence
  Synthetic
ccuauguggaaagcaugggcag

SEQ ID NO: 569575 - RNA, 23 nt, Artificial Sequence
  Synthetic
accuauguggaaagcaugggcag

SEQ ID NO: 569576 - RNA, 24 nt, Artificial Sequence
  Synthetic
aaccuauguggaaagcaugggcag

SEQ ID NO: 569577 - RNA, 18 nt, Artificial Sequence
  Synthetic
gcacucaagccugggcag

SEQ ID NO: 569578 - RNA, 19 nt, Artificial Sequence
  Synthetic
ugcacucaagccugggcag

SEQ ID NO: 569579 - RNA, 20 nt, Artificial Sequence
  Synthetic
cugcacucaagccugggcag

SEQ ID NO: 569580 - RNA, 21 nt, Artificial Sequence
  Synthetic
acugcacucaagccugggcag

SEQ ID NO: 569581 - RNA, 22 nt, Artificial Sequence
  Synthetic
cacugcacucaagccugggcag

SEQ ID NO: 569582 - RNA, 23 nt, Artificial Sequence
  Synthetic
ccacugcacucaagccugggcag

SEQ ID NO: 569583 - RNA, 24 nt, Artificial Sequence
  Synthetic
accacugcacucaagccugggcag

SEQ ID NO: 569584 - RNA, 18 nt, Artificial Sequence
  Synthetic
uauuaaggagaauggcag

SEQ ID NO: 569585 - RNA, 19 nt, Artificial Sequence
  Synthetic
guauuaaggagaauggcag

SEQ ID NO: 569586 - RNA, 20 nt, Artificial Sequence
  Synthetic
aguauuaaggagaauggcag

SEQ ID NO: 569587 - RNA, 21 nt, Artificial Sequence
  Synthetic
caguauuaaggagaauggcag

SEQ ID NO: 569588 - RNA, 22 nt, Artificial Sequence
  Synthetic
acaguauuaaggagaauggcag

SEQ ID NO: 569589 - RNA, 23 nt, Artificial Sequence
  Synthetic
aacaguauuaaggagaauggcag

SEQ ID NO: 569590 - RNA, 24 nt, Artificial Sequence
  Synthetic
uaacaguauuaaggagaauggcag

SEQ ID NO: 569591 - RNA, 18 nt, Artificial Sequence
  Synthetic
acacauucuacauggcag

SEQ ID NO: 569592 - RNA, 19 nt, Artificial Sequence
  Synthetic
aacacauucuacauggcag

SEQ ID NO: 569593 - RNA, 20 nt, Artificial Sequence
  Synthetic
aaacacauucuacauggcag

SEQ ID NO: 569594 - RNA, 21 nt, Artificial Sequence
  Synthetic
aaaacacauucuacauggcag

SEQ ID NO: 569595 - RNA, 22 nt, Artificial Sequence
  Synthetic
aaaaacacauucuacauggcag

SEQ ID NO: 569596 - RNA, 23 nt, Artificial Sequence
  Synthetic
caaaaacacauucuacauggcag

SEQ ID NO: 569597 - RNA, 24 nt, Artificial Sequence
  Synthetic
gcaaaaacacauucuacauggcag

SEQ ID NO: 569598 - RNA, 18 nt, Artificial Sequence
  Synthetic
ggaugguggugauggcag

SEQ ID NO: 569599 - RNA, 19 nt, Artificial Sequence
  Synthetic
uggaugguggugauggcag

SEQ ID NO: 569600 - RNA, 20 nt, Artificial Sequence
  Synthetic
auggaugguggugauggcag

SEQ ID NO: 569601 - RNA, 21 nt, Artificial Sequence
  Synthetic
gauggaugguggugauggcag

SEQ ID NO: 569602 - RNA, 22 nt, Artificial Sequence
  Synthetic
agauggaugguggugauggcag

SEQ ID NO: 569603 - RNA, 23 nt, Artificial Sequence
  Synthetic
gagauggaugguggugauggcag

SEQ ID NO: 569604 - RNA, 24 nt, Artificial Sequence
  Synthetic
ggagauggaugguggugauggcag

SEQ ID NO: 569605 - RNA, 18 nt, Artificial Sequence
  Synthetic
agaaaagauguauggcag

SEQ ID NO: 569606 - RNA, 19 nt, Artificial Sequence
  Synthetic
gagaaaagauguauggcag

SEQ ID NO: 569607 - RNA, 20 nt, Artificial Sequence
  Synthetic
agagaaaagauguauggcag

SEQ ID NO: 569608 - RNA, 21 nt, Artificial Sequence
  Synthetic
aagagaaaagauguauggcag

SEQ ID NO: 569609 - RNA, 22 nt, Artificial Sequence
  Synthetic
gaagagaaaagauguauggcag

SEQ ID NO: 569610 - RNA, 23 nt, Artificial Sequence
  Synthetic
ggaagagaaaagauguauggcag

SEQ ID NO: 569611 - RNA, 24 nt, Artificial Sequence
  Synthetic
aggaagagaaaagauguauggcag

SEQ ID NO: 569612 - RNA, 18 nt, Artificial Sequence
  Synthetic
acauuccauuccuggcag

SEQ ID NO: 569613 - RNA, 19 nt, Artificial Sequence
  Synthetic
aacauuccauuccuggcag

SEQ ID NO: 569614 - RNA, 20 nt, Artificial Sequence
  Synthetic
aaacauuccauuccuggcag

SEQ ID NO: 569615 - RNA, 21 nt, Artificial Sequence
  Synthetic
aaaacauuccauuccuggcag

SEQ ID NO: 569616 - RNA, 22 nt, Artificial Sequence
  Synthetic
aaaaacauuccauuccuggcag

SEQ ID NO: 569617 - RNA, 23 nt, Artificial Sequence
  Synthetic
gaaaaacauuccauuccuggcag

SEQ ID NO: 569618 - RNA, 24 nt, Artificial Sequence
  Synthetic
ugaaaaacauuccauuccuggcag

SEQ ID NO: 569619 - RNA, 18 nt, Artificial Sequence
  Synthetic
auucaagaucucuggcag

SEQ ID NO: 569620 - RNA, 19 nt, Artificial Sequence
  Synthetic
uauucaagaucucuggcag

SEQ ID NO: 569621 - RNA, 20 nt, Artificial Sequence
  Synthetic
cuauucaagaucucuggcag

SEQ ID NO: 569622 - RNA, 21 nt, Artificial Sequence
  Synthetic
gcuauucaagaucucuggcag

SEQ ID NO: 569623 - RNA, 22 nt, Artificial Sequence
  Synthetic
ggcuauucaagaucucuggcag

SEQ ID NO: 569624 - RNA, 23 nt, Artificial Sequence
  Synthetic
aggcuauucaagaucucuggcag

SEQ ID NO: 569625 - RNA, 24 nt, Artificial Sequence
  Synthetic
gaggcuauucaagaucucuggcag

SEQ ID NO: 569626 - RNA, 18 nt, Artificial Sequence
  Synthetic
uggggcaauuucuggcag

SEQ ID NO: 569627 - RNA, 19 nt, Artificial Sequence
  Synthetic
guggggcaauuucuggcag

SEQ ID NO: 569628 - RNA, 20 nt, Artificial Sequence
  Synthetic
aguggggcaauuucuggcag

SEQ ID NO: 569629 - RNA, 21 nt, Artificial Sequence
  Synthetic
gaguggggcaauuucuggcag

SEQ ID NO: 569630 - RNA, 22 nt, Artificial Sequence
  Synthetic
ugaguggggcaauuucuggcag

SEQ ID NO: 569631 - RNA, 23 nt, Artificial Sequence
  Synthetic
uugaguggggcaauuucuggcag

SEQ ID NO: 569632 - RNA, 24 nt, Artificial Sequence
  Synthetic
guugaguggggcaauuucuggcag

SEQ ID NO: 569633 - RNA, 18 nt, Artificial Sequence
  Synthetic
gcuggagugcaguggcag

SEQ ID NO: 569634 - RNA, 19 nt, Artificial Sequence
  Synthetic
ggcuggagugcaguggcag

SEQ ID NO: 569635 - RNA, 20 nt, Artificial Sequence
  Synthetic
aggcuggagugcaguggcag

SEQ ID NO: 569636 - RNA, 21 nt, Artificial Sequence
  Synthetic
caggcuggagugcaguggcag

SEQ ID NO: 569637 - RNA, 22 nt, Artificial Sequence
  Synthetic
ccaggcuggagugcaguggcag

SEQ ID NO: 569638 - RNA, 23 nt, Artificial Sequence
  Synthetic
cccaggcuggagugcaguggcag

SEQ ID NO: 569639 - RNA, 24 nt, Artificial Sequence
  Synthetic
acccaggcuggagugcaguggcag

SEQ ID NO: 569640 - RNA, 18 nt, Artificial Sequence
  Synthetic
cucuucacaggguggcag

SEQ ID NO: 569641 - RNA, 19 nt, Artificial Sequence
  Synthetic
ccucuucacaggguggcag

SEQ ID NO: 569642 - RNA, 20 nt, Artificial Sequence
  Synthetic
accucuucacaggguggcag

SEQ ID NO: 569643 - RNA, 21 nt, Artificial Sequence
  Synthetic
caccucuucacaggguggcag

SEQ ID NO: 569644 - RNA, 22 nt, Artificial Sequence
  Synthetic
gcaccucuucacaggguggcag

SEQ ID NO: 569645 - RNA, 23 nt, Artificial Sequence
  Synthetic
ggcaccucuucacaggguggcag

SEQ ID NO: 569646 - RNA, 24 nt, Artificial Sequence
  Synthetic
aggcaccucuucacaggguggcag

SEQ ID NO: 569647 - RNA, 18 nt, Artificial Sequence
  Synthetic
gggagagggugguggcag

SEQ ID NO: 569648 - RNA, 19 nt, Artificial Sequence
  Synthetic
ugggagagggugguggcag

SEQ ID NO: 569649 - RNA, 20 nt, Artificial Sequence
  Synthetic
uugggagagggugguggcag

SEQ ID NO: 569650 - RNA, 21 nt, Artificial Sequence
  Synthetic
uuugggagagggugguggcag

SEQ ID NO: 569651 - RNA, 22 nt, Artificial Sequence
  Synthetic
cuuugggagagggugguggcag

SEQ ID NO: 569652 - RNA, 23 nt, Artificial Sequence
  Synthetic
ucuuugggagagggugguggcag

SEQ ID NO: 569653 - RNA, 24 nt, Artificial Sequence
  Synthetic
aucuuugggagagggugguggcag

SEQ ID NO: 569654 - RNA, 18 nt, Artificial Sequence
  Synthetic
accaauacauauuggcag

SEQ ID NO: 569655 - RNA, 19 nt, Artificial Sequence
  Synthetic
gaccaauacauauuggcag

SEQ ID NO: 569656 - RNA, 20 nt, Artificial Sequence
  Synthetic
agaccaauacauauuggcag

SEQ ID NO: 569657 - RNA, 21 nt, Artificial Sequence
  Synthetic
aagaccaauacauauuggcag

SEQ ID NO: 569658 - RNA, 22 nt, Artificial Sequence
  Synthetic
aaagaccaauacauauuggcag

SEQ ID NO: 569659 - RNA, 23 nt, Artificial Sequence
  Synthetic
aaaagaccaauacauauuggcag

SEQ ID NO: 569660 - RNA, 24 nt, Artificial Sequence
  Synthetic
aaaaagaccaauacauauuggcag

SEQ ID NO: 569661 - RNA, 18 nt, Artificial Sequence
  Synthetic
agauguugauguuggcag

SEQ ID NO: 569662 - RNA, 19 nt, Artificial Sequence
  Synthetic
aagauguugauguuggcag

SEQ ID NO: 569663 - RNA, 20 nt, Artificial Sequence
  Synthetic
uaagauguugauguuggcag

SEQ ID NO: 569664 - RNA, 21 nt, Artificial Sequence
  Synthetic
uuaagauguugauguuggcag

SEQ ID NO: 569665 - RNA, 22 nt, Artificial Sequence
  Synthetic
guuaagauguugauguuggcag

SEQ ID NO: 569666 - RNA, 23 nt, Artificial Sequence
  Synthetic
uguuaagauguugauguuggcag

SEQ ID NO: 569667 - RNA, 24 nt, Artificial Sequence
  Synthetic
auguuaagauguugauguuggcag

SEQ ID NO: 569668 - RNA, 18 nt, Artificial Sequence
  Synthetic
gauuaggccaaaaugcag

SEQ ID NO: 569669 - RNA, 19 nt, Artificial Sequence
  Synthetic
ugauuaggccaaaaugcag

SEQ ID NO: 569670 - RNA, 20 nt, Artificial Sequence
  Synthetic
uugauuaggccaaaaugcag

SEQ ID NO: 569671 - RNA, 21 nt, Artificial Sequence
  Synthetic
uuugauuaggccaaaaugcag

SEQ ID NO: 569672 - RNA, 22 nt, Artificial Sequence
  Synthetic
auuugauuaggccaaaaugcag

SEQ ID NO: 569673 - RNA, 23 nt, Artificial Sequence
  Synthetic
aauuugauuaggccaaaaugcag

SEQ ID NO: 569674 - RNA, 24 nt, Artificial Sequence
  Synthetic
aaauuugauuaggccaaaaugcag

SEQ ID NO: 569675 - RNA, 18 nt, Artificial Sequence
  Synthetic
ugcaaccugacaaugcag

SEQ ID NO: 569676 - RNA, 19 nt, Artificial Sequence
  Synthetic
uugcaaccugacaaugcag

SEQ ID NO: 569677 - RNA, 20 nt, Artificial Sequence
  Synthetic
uuugcaaccugacaaugcag

SEQ ID NO: 569678 - RNA, 21 nt, Artificial Sequence
  Synthetic
auuugcaaccugacaaugcag

SEQ ID NO: 569679 - RNA, 22 nt, Artificial Sequence
  Synthetic
aauuugcaaccugacaaugcag

SEQ ID NO: 569680 - RNA, 23 nt, Artificial Sequence
  Synthetic
aaauuugcaaccugacaaugcag

SEQ ID NO: 569681 - RNA, 24 nt, Artificial Sequence
  Synthetic
aaaauuugcaaccugacaaugcag

SEQ ID NO: 569682 - RNA, 18 nt, Artificial Sequence
  Synthetic
ucaaguuaagcaaugcag

SEQ ID NO: 569683 - RNA, 19 nt, Artificial Sequence
  Synthetic
aucaaguuaagcaaugcag

SEQ ID NO: 569684 - RNA, 20 nt, Artificial Sequence
  Synthetic
aaucaaguuaagcaaugcag

SEQ ID NO: 569685 - RNA, 21 nt, Artificial Sequence
  Synthetic
caaucaaguuaagcaaugcag

SEQ ID NO: 569686 - RNA, 22 nt, Artificial Sequence
  Synthetic
ucaaucaaguuaagcaaugcag

SEQ ID NO: 569687 - RNA, 23 nt, Artificial Sequence
  Synthetic
gucaaucaaguuaagcaaugcag

SEQ ID NO: 569688 - RNA, 24 nt, Artificial Sequence
  Synthetic
ugucaaucaaguuaagcaaugcag

SEQ ID NO: 569689 - RNA, 18 nt, Artificial Sequence
  Synthetic
gaugaacuuucaaugcag

SEQ ID NO: 569690 - RNA, 19 nt, Artificial Sequence
  Synthetic
ugaugaacuuucaaugcag

SEQ ID NO: 569691 - RNA, 20 nt, Artificial Sequence
  Synthetic
gugaugaacuuucaaugcag

SEQ ID NO: 569692 - RNA, 21 nt, Artificial Sequence
  Synthetic
ugugaugaacuuucaaugcag

SEQ ID NO: 569693 - RNA, 22 nt, Artificial Sequence
  Synthetic
uugugaugaacuuucaaugcag

SEQ ID NO: 569694 - RNA, 23 nt, Artificial Sequence
  Synthetic
cuugugaugaacuuucaaugcag

SEQ ID NO: 569695 - RNA, 24 nt, Artificial Sequence
  Synthetic
acuugugaugaacuuucaaugcag

SEQ ID NO: 569696 - RNA, 18 nt, Artificial Sequence
  Synthetic
cacuagugcugcaugcag

SEQ ID NO: 569697 - RNA, 19 nt, Artificial Sequence
  Synthetic
acacuagugcugcaugcag

SEQ ID NO: 569698 - RNA, 20 nt, Artificial Sequence
  Synthetic
uacacuagugcugcaugcag

SEQ ID NO: 569699 - RNA, 21 nt, Artificial Sequence
  Synthetic
uuacacuagugcugcaugcag

SEQ ID NO: 569700 - RNA, 22 nt, Artificial Sequence
  Synthetic
auuacacuagugcugcaugcag

SEQ ID NO: 569701 - RNA, 23 nt, Artificial Sequence
  Synthetic
gauuacacuagugcugcaugcag

SEQ ID NO: 569702 - RNA, 24 nt, Artificial Sequence
  Synthetic
ggauuacacuagugcugcaugcag

SEQ ID NO: 569703 - RNA, 18 nt, Artificial Sequence
  Synthetic
agugucaauaagaugcag

SEQ ID NO: 569704 - RNA, 19 nt, Artificial Sequence
  Synthetic
cagugucaauaagaugcag

SEQ ID NO: 569705 - RNA, 20 nt, Artificial Sequence
  Synthetic
ccagugucaauaagaugcag

SEQ ID NO: 569706 - RNA, 21 nt, Artificial Sequence
  Synthetic
cccagugucaauaagaugcag

SEQ ID NO: 569707 - RNA, 22 nt, Artificial Sequence
  Synthetic
acccagugucaauaagaugcag

SEQ ID NO: 569708 - RNA, 23 nt, Artificial Sequence
  Synthetic
aacccagugucaauaagaugcag

SEQ ID NO: 569709 - RNA, 24 nt, Artificial Sequence
  Synthetic
aaacccagugucaauaagaugcag

SEQ ID NO: 569710 - RNA, 18 nt, Artificial Sequence
  Synthetic
aagaugggggagaugcag

SEQ ID NO: 569711 - RNA, 19 nt, Artificial Sequence
  Synthetic
uaagaugggggagaugcag

SEQ ID NO: 569712 - RNA, 20 nt, Artificial Sequence
  Synthetic
cuaagaugggggagaugcag

SEQ ID NO: 569713 - RNA, 21 nt, Artificial Sequence
  Synthetic
ccuaagaugggggagaugcag

SEQ ID NO: 569714 - RNA, 22 nt, Artificial Sequence
  Synthetic
gccuaagaugggggagaugcag

SEQ ID NO: 569715 - RNA, 23 nt, Artificial Sequence
  Synthetic
ggccuaagaugggggagaugcag

SEQ ID NO: 569716 - RNA, 24 nt, Artificial Sequence
  Synthetic
uggccuaagaugggggagaugcag

SEQ ID NO: 569717 - RNA, 18 nt, Artificial Sequence
  Synthetic
gcggaagcacggaugcag

SEQ ID NO: 569718 - RNA, 19 nt, Artificial Sequence
  Synthetic
ugcggaagcacggaugcag

SEQ ID NO: 569719 - RNA, 20 nt, Artificial Sequence
  Synthetic
uugcggaagcacggaugcag

SEQ ID NO: 569720 - RNA, 21 nt, Artificial Sequence
  Synthetic
uuugcggaagcacggaugcag

SEQ ID NO: 569721 - RNA, 22 nt, Artificial Sequence
  Synthetic
cuuugcggaagcacggaugcag

SEQ ID NO: 569722 - RNA, 23 nt, Artificial Sequence
  Synthetic
ccuuugcggaagcacggaugcag

SEQ ID NO: 569723 - RNA, 24 nt, Artificial Sequence
  Synthetic
uccuuugcggaagcacggaugcag

SEQ ID NO: 569724 - RNA, 18 nt, Artificial Sequence
  Synthetic
gcagcaacauggaugcag

SEQ ID NO: 569725 - RNA, 19 nt, Artificial Sequence
  Synthetic
ugcagcaacauggaugcag

SEQ ID NO: 569726 - RNA, 20 nt, Artificial Sequence
  Synthetic
uugcagcaacauggaugcag

SEQ ID NO: 569727 - RNA, 21 nt, Artificial Sequence
  Synthetic
uuugcagcaacauggaugcag

SEQ ID NO: 569728 - RNA, 22 nt, Artificial Sequence
  Synthetic
cuuugcagcaacauggaugcag

SEQ ID NO: 569729 - RNA, 23 nt, Artificial Sequence
  Synthetic
ccuuugcagcaacauggaugcag

SEQ ID NO: 569730 - RNA, 24 nt, Artificial Sequence
  Synthetic
uccuuugcagcaacauggaugcag

SEQ ID NO: 569731 - RNA, 18 nt, Artificial Sequence
  Synthetic
caaaacaacaugaugcag

SEQ ID NO: 569732 - RNA, 19 nt, Artificial Sequence
  Synthetic
acaaaacaacaugaugcag

SEQ ID NO: 569733 - RNA, 20 nt, Artificial Sequence
  Synthetic
aacaaaacaacaugaugcag

SEQ ID NO: 569734 - RNA, 21 nt, Artificial Sequence
  Synthetic
aaacaaaacaacaugaugcag

SEQ ID NO: 569735 - RNA, 22 nt, Artificial Sequence
  Synthetic
aaaacaaaacaacaugaugcag

SEQ ID NO: 569736 - RNA, 23 nt, Artificial Sequence
  Synthetic
aaaaacaaaacaacaugaugcag

SEQ ID NO: 569737 - RNA, 24 nt, Artificial Sequence
  Synthetic
uaaaaacaaaacaacaugaugcag

SEQ ID NO: 569738 - RNA, 18 nt, Artificial Sequence
  Synthetic
uggaagagaaauaugcag

SEQ ID NO: 569739 - RNA, 19 nt, Artificial Sequence
  Synthetic
auggaagagaaauaugcag

SEQ ID NO: 569740 - RNA, 20 nt, Artificial Sequence
  Synthetic
cauggaagagaaauaugcag

SEQ ID NO: 569741 - RNA, 21 nt, Artificial Sequence
  Synthetic
acauggaagagaaauaugcag

SEQ ID NO: 569742 - RNA, 22 nt, Artificial Sequence
  Synthetic
gacauggaagagaaauaugcag

SEQ ID NO: 569743 - RNA, 23 nt, Artificial Sequence
  Synthetic
agacauggaagagaaauaugcag

SEQ ID NO: 569744 - RNA, 24 nt, Artificial Sequence
  Synthetic
cagacauggaagagaaauaugcag

SEQ ID NO: 569745 - RNA, 18 nt, Artificial Sequence
  Synthetic
cucucaaaguuuaugcag

SEQ ID NO: 569746 - RNA, 19 nt, Artificial Sequence
  Synthetic
ccucucaaaguuuaugcag

SEQ ID NO: 569747 - RNA, 20 nt, Artificial Sequence
  Synthetic
cccucucaaaguuuaugcag

SEQ ID NO: 569748 - RNA, 21 nt, Artificial Sequence
  Synthetic
acccucucaaaguuuaugcag

SEQ ID NO: 569749 - RNA, 22 nt, Artificial Sequence
  Synthetic
aacccucucaaaguuuaugcag

SEQ ID NO: 569750 - RNA, 23 nt, Artificial Sequence
  Synthetic
caacccucucaaaguuuaugcag

SEQ ID NO: 569751 - RNA, 24 nt, Artificial Sequence
  Synthetic
ucaacccucucaaaguuuaugcag

SEQ ID NO: 569752 - RNA, 18 nt, Artificial Sequence
  Synthetic
cgucauugaaaacugcag

SEQ ID NO: 569753 - RNA, 19 nt, Artificial Sequence
  Synthetic
acgucauugaaaacugcag

SEQ ID NO: 569754 - RNA, 20 nt, Artificial Sequence
  Synthetic
cacgucauugaaaacugcag

SEQ ID NO: 569755 - RNA, 21 nt, Artificial Sequence
  Synthetic
ucacgucauugaaaacugcag

SEQ ID NO: 569756 - RNA, 22 nt, Artificial Sequence
  Synthetic
uucacgucauugaaaacugcag

SEQ ID NO: 569757 - RNA, 23 nt, Artificial Sequence
  Synthetic
guucacgucauugaaaacugcag

SEQ ID NO: 569758 - RNA, 24 nt, Artificial Sequence
  Synthetic
gguucacgucauugaaaacugcag

SEQ ID NO: 569759 - RNA, 18 nt, Artificial Sequence
  Synthetic
acuauguuaacacugcag

SEQ ID NO: 569760 - RNA, 19 nt, Artificial Sequence
  Synthetic
aacuauguuaacacugcag

SEQ ID NO: 569761 - RNA, 20 nt, Artificial Sequence
  Synthetic
gaacuauguuaacacugcag

SEQ ID NO: 569762 - RNA, 21 nt, Artificial Sequence
  Synthetic
ggaacuauguuaacacugcag

SEQ ID NO: 569763 - RNA, 22 nt, Artificial Sequence
  Synthetic
aggaacuauguuaacacugcag

SEQ ID NO: 569764 - RNA, 23 nt, Artificial Sequence
  Synthetic
gaggaacuauguuaacacugcag

SEQ ID NO: 569765 - RNA, 24 nt, Artificial Sequence
  Synthetic
ugaggaacuauguuaacacugcag

SEQ ID NO: 569766 - RNA, 18 nt, Artificial Sequence
  Synthetic
augagccggguacugcag

SEQ ID NO: 569767 - RNA, 19 nt, Artificial Sequence
  Synthetic
gaugagccggguacugcag

SEQ ID NO: 569768 - RNA, 20 nt, Artificial Sequence
  Synthetic
agaugagccggguacugcag

SEQ ID NO: 569769 - RNA, 21 nt, Artificial Sequence
  Synthetic
gagaugagccggguacugcag

SEQ ID NO: 569770 - RNA, 22 nt, Artificial Sequence
  Synthetic
ugagaugagccggguacugcag

SEQ ID NO: 569771 - RNA, 23 nt, Artificial Sequence
  Synthetic
gugagaugagccggguacugcag

SEQ ID NO: 569772 - RNA, 24 nt, Artificial Sequence
  Synthetic
agugagaugagccggguacugcag

SEQ ID NO: 569773 - RNA, 18 nt, Artificial Sequence
  Synthetic
cuauaggccaagcugcag

SEQ ID NO: 569774 - RNA, 19 nt, Artificial Sequence
  Synthetic
ucuauaggccaagcugcag

SEQ ID NO: 569775 - RNA, 20 nt, Artificial Sequence
  Synthetic
aucuauaggccaagcugcag

SEQ ID NO: 569776 - RNA, 21 nt, Artificial Sequence
  Synthetic
aaucuauaggccaagcugcag

SEQ ID NO: 569777 - RNA, 22 nt, Artificial Sequence
  Synthetic
gaaucuauaggccaagcugcag

SEQ ID NO: 569778 - RNA, 23 nt, Artificial Sequence
  Synthetic
cgaaucuauaggccaagcugcag

SEQ ID NO: 569779 - RNA, 24 nt, Artificial Sequence
  Synthetic
ucgaaucuauaggccaagcugcag

SEQ ID NO: 569780 - RNA, 18 nt, Artificial Sequence
  Synthetic
cuccagccugggcugcag

SEQ ID NO: 569781 - RNA, 19 nt, Artificial Sequence
  Synthetic
acuccagccugggcugcag

SEQ ID NO: 569782 - RNA, 20 nt, Artificial Sequence
  Synthetic
cacuccagccugggcugcag

SEQ ID NO: 569783 - RNA, 21 nt, Artificial Sequence
  Synthetic
gcacuccagccugggcugcag

SEQ ID NO: 569784 - RNA, 22 nt, Artificial Sequence
  Synthetic
ugcacuccagccugggcugcag

SEQ ID NO: 569785 - RNA, 23 nt, Artificial Sequence
  Synthetic
cugcacuccagccugggcugcag

SEQ ID NO: 569786 - RNA, 24 nt, Artificial Sequence
  Synthetic
gcugcacuccagccugggcugcag

SEQ ID NO: 569787 - RNA, 18 nt, Artificial Sequence
  Synthetic
gccaguggugugcugcag

SEQ ID NO: 569788 - RNA, 19 nt, Artificial Sequence
  Synthetic
agccaguggugugcugcag

SEQ ID NO: 569789 - RNA, 20 nt, Artificial Sequence
  Synthetic
cagccaguggugugcugcag

SEQ ID NO: 569790 - RNA, 21 nt, Artificial Sequence
  Synthetic
acagccaguggugugcugcag

SEQ ID NO: 569791 - RNA, 22 nt, Artificial Sequence
  Synthetic
cacagccaguggugugcugcag

SEQ ID NO: 569792 - RNA, 23 nt, Artificial Sequence
  Synthetic
ccacagccaguggugugcugcag

SEQ ID NO: 569793 - RNA, 24 nt, Artificial Sequence
  Synthetic
accacagccaguggugugcugcag

SEQ ID NO: 569794 - RNA, 18 nt, Artificial Sequence
  Synthetic
aaaucagaauuucugcag

SEQ ID NO: 569795 - RNA, 19 nt, Artificial Sequence
  Synthetic
caaaucagaauuucugcag

SEQ ID NO: 569796 - RNA, 20 nt, Artificial Sequence
  Synthetic
ucaaaucagaauuucugcag

SEQ ID NO: 569797 - RNA, 21 nt, Artificial Sequence
  Synthetic
aucaaaucagaauuucugcag

SEQ ID NO: 569798 - RNA, 22 nt, Artificial Sequence
  Synthetic
aaucaaaucagaauuucugcag

SEQ ID NO: 569799 - RNA, 23 nt, Artificial Sequence
  Synthetic
aaaucaaaucagaauuucugcag

SEQ ID NO: 569800 - RNA, 24 nt, Artificial Sequence
  Synthetic
aaaaucaaaucagaauuucugcag

SEQ ID NO: 569801 - RNA, 18 nt, Artificial Sequence
  Synthetic
ucuacuaggucagugcag

SEQ ID NO: 569802 - RNA, 19 nt, Artificial Sequence
  Synthetic
cucuacuaggucagugcag

SEQ ID NO: 569803 - RNA, 20 nt, Artificial Sequence
  Synthetic
ccucuacuaggucagugcag

SEQ ID NO: 569804 - RNA, 21 nt, Artificial Sequence
  Synthetic
accucuacuaggucagugcag

SEQ ID NO: 569805 - RNA, 22 nt, Artificial Sequence
  Synthetic
aaccucuacuaggucagugcag

SEQ ID NO: 569806 - RNA, 23 nt, Artificial Sequence
  Synthetic
gaaccucuacuaggucagugcag

SEQ ID NO: 569807 - RNA, 24 nt, Artificial Sequence
  Synthetic
agaaccucuacuaggucagugcag

SEQ ID NO: 569808 - RNA, 18 nt, Artificial Sequence
  Synthetic
gccacaggcaaggugcag

SEQ ID NO: 569809 - RNA, 19 nt, Artificial Sequence
  Synthetic
agccacaggcaaggugcag

SEQ ID NO: 569810 - RNA, 20 nt, Artificial Sequence
  Synthetic
uagccacaggcaaggugcag

SEQ ID NO: 569811 - RNA, 21 nt, Artificial Sequence
  Synthetic
cuagccacaggcaaggugcag

SEQ ID NO: 569812 - RNA, 22 nt, Artificial Sequence
  Synthetic
ccuagccacaggcaaggugcag

SEQ ID NO: 569813 - RNA, 23 nt, Artificial Sequence
  Synthetic
gccuagccacaggcaaggugcag

SEQ ID NO: 569814 - RNA, 24 nt, Artificial Sequence
  Synthetic
agccuagccacaggcaaggugcag

SEQ ID NO: 569815 - RNA, 18 nt, Artificial Sequence
  Synthetic
ugcgcuaggggggugcag

SEQ ID NO: 569816 - RNA, 19 nt, Artificial Sequence
  Synthetic
gugcgcuaggggggugcag

SEQ ID NO: 569817 - RNA, 20 nt, Artificial Sequence
  Synthetic
cgugcgcuaggggggugcag

SEQ ID NO: 569818 - RNA, 21 nt, Artificial Sequence
  Synthetic
gcgugcgcuaggggggugcag

SEQ ID NO: 569819 - RNA, 22 nt, Artificial Sequence
  Synthetic
cgcgugcgcuaggggggugcag

SEQ ID NO: 569820 - RNA, 23 nt, Artificial Sequence
  Synthetic
gcgcgugcgcuaggggggugcag

SEQ ID NO: 569821 - RNA, 24 nt, Artificial Sequence
  Synthetic
cgcgcgugcgcuaggggggugcag

SEQ ID NO: 569822 - RNA, 18 nt, Artificial Sequence
  Synthetic
guuccuuucugggugcag

SEQ ID NO: 569823 - RNA, 19 nt, Artificial Sequence
  Synthetic
cguuccuuucugggugcag

SEQ ID NO: 569824 - RNA, 20 nt, Artificial Sequence
  Synthetic
ccguuccuuucugggugcag

SEQ ID NO: 569825 - RNA, 21 nt, Artificial Sequence
  Synthetic
gccguuccuuucugggugcag

SEQ ID NO: 569826 - RNA, 22 nt, Artificial Sequence
  Synthetic
agccguuccuuucugggugcag

SEQ ID NO: 569827 - RNA, 23 nt, Artificial Sequence
  Synthetic
aagccguuccuuucugggugcag

SEQ ID NO: 569828 - RNA, 24 nt, Artificial Sequence
  Synthetic
uaagccguuccuuucugggugcag

SEQ ID NO: 569829 - RNA, 18 nt, Artificial Sequence
  Synthetic
guaaaggagguggugcag

SEQ ID NO: 569830 - RNA, 19 nt, Artificial Sequence
  Synthetic
aguaaaggagguggugcag

SEQ ID NO: 569831 - RNA, 20 nt, Artificial Sequence
  Synthetic
aaguaaaggagguggugcag

SEQ ID NO: 569832 - RNA, 21 nt, Artificial Sequence
  Synthetic
caaguaaaggagguggugcag

SEQ ID NO: 569833 - RNA, 22 nt, Artificial Sequence
  Synthetic
acaaguaaaggagguggugcag

SEQ ID NO: 569834 - RNA, 23 nt, Artificial Sequence
  Synthetic
aacaaguaaaggagguggugcag

SEQ ID NO: 569835 - RNA, 24 nt, Artificial Sequence
  Synthetic
caacaaguaaaggagguggugcag

SEQ ID NO: 569836 - RNA, 18 nt, Artificial Sequence
  Synthetic
gaguucauaacugugcag

SEQ ID NO: 569837 - RNA, 19 nt, Artificial Sequence
  Synthetic
ugaguucauaacugugcag

SEQ ID NO: 569838 - RNA, 20 nt, Artificial Sequence
  Synthetic
augaguucauaacugugcag

SEQ ID NO: 569839 - RNA, 21 nt, Artificial Sequence
  Synthetic
uaugaguucauaacugugcag

SEQ ID NO: 569840 - RNA, 22 nt, Artificial Sequence
  Synthetic
cuaugaguucauaacugugcag

SEQ ID NO: 569841 - RNA, 23 nt, Artificial Sequence
  Synthetic
acuaugaguucauaacugugcag

SEQ ID NO: 569842 - RNA, 24 nt, Artificial Sequence
  Synthetic
aacuaugaguucauaacugugcag

SEQ ID NO: 569843 - RNA, 18 nt, Artificial Sequence
  Synthetic
uaaaagcauucugugcag

SEQ ID NO: 569844 - RNA, 19 nt, Artificial Sequence
  Synthetic
uuaaaagcauucugugcag

SEQ ID NO: 569845 - RNA, 20 nt, Artificial Sequence
  Synthetic
auuaaaagcauucugugcag

SEQ ID NO: 569846 - RNA, 21 nt, Artificial Sequence
  Synthetic
gauuaaaagcauucugugcag

SEQ ID NO: 569847 - RNA, 22 nt, Artificial Sequence
  Synthetic
ggauuaaaagcauucugugcag

SEQ ID NO: 569848 - RNA, 23 nt, Artificial Sequence
  Synthetic
uggauuaaaagcauucugugcag

SEQ ID NO: 569849 - RNA, 24 nt, Artificial Sequence
  Synthetic
auggauuaaaagcauucugugcag

SEQ ID NO: 569850 - RNA, 18 nt, Artificial Sequence
  Synthetic
auaaacauacgugugcag

SEQ ID NO: 569851 - RNA, 19 nt, Artificial Sequence
  Synthetic
aauaaacauacgugugcag

SEQ ID NO: 569852 - RNA, 20 nt, Artificial Sequence
  Synthetic
caauaaacauacgugugcag

SEQ ID NO: 569853 - RNA, 21 nt, Artificial Sequence
  Synthetic
gcaauaaacauacgugugcag

SEQ ID NO: 569854 - RNA, 22 nt, Artificial Sequence
  Synthetic
cgcaauaaacauacgugugcag

SEQ ID NO: 569855 - RNA, 23 nt, Artificial Sequence
  Synthetic
ccgcaauaaacauacgugugcag

SEQ ID NO: 569856 - RNA, 24 nt, Artificial Sequence
  Synthetic
gccgcaauaaacauacgugugcag

SEQ ID NO: 569857 - RNA, 18 nt, Artificial Sequence
  Synthetic
uggaaaaaaaaauugcag

SEQ ID NO: 569858 - RNA, 19 nt, Artificial Sequence
  Synthetic
auggaaaaaaaaauugcag

SEQ ID NO: 569859 - RNA, 20 nt, Artificial Sequence
  Synthetic
uauggaaaaaaaaauugcag

SEQ ID NO: 569860 - RNA, 21 nt, Artificial Sequence
  Synthetic
uuauggaaaaaaaaauugcag

SEQ ID NO: 569861 - RNA, 22 nt, Artificial Sequence
  Synthetic
auuauggaaaaaaaaauugcag

SEQ ID NO: 569862 - RNA, 23 nt, Artificial Sequence
  Synthetic
aauuauggaaaaaaaaauugcag

SEQ ID NO: 569863 - RNA, 24 nt, Artificial Sequence
  Synthetic
aaauuauggaaaaaaaaauugcag

SEQ ID NO: 569864 - RNA, 18 nt, Artificial Sequence
  Synthetic
gacugguugaaauugcag

SEQ ID NO: 569865 - RNA, 19 nt, Artificial Sequence
  Synthetic
agacugguugaaauugcag

SEQ ID NO: 569866 - RNA, 20 nt, Artificial Sequence
  Synthetic
cagacugguugaaauugcag

SEQ ID NO: 569867 - RNA, 21 nt, Artificial Sequence
  Synthetic
acagacugguugaaauugcag

SEQ ID NO: 569868 - RNA, 22 nt, Artificial Sequence
  Synthetic
aacagacugguugaaauugcag

SEQ ID NO: 569869 - RNA, 23 nt, Artificial Sequence
  Synthetic
caacagacugguugaaauugcag

SEQ ID NO: 569870 - RNA, 24 nt, Artificial Sequence
  Synthetic
gcaacagacugguugaaauugcag

SEQ ID NO: 569871 - RNA, 18 nt, Artificial Sequence
  Synthetic
uagaagacacgauugcag

SEQ ID NO: 569872 - RNA, 19 nt, Artificial Sequence
  Synthetic
auagaagacacgauugcag

SEQ ID NO: 569873 - RNA, 20 nt, Artificial Sequence
  Synthetic
uauagaagacacgauugcag

SEQ ID NO: 569874 - RNA, 21 nt, Artificial Sequence
  Synthetic
auauagaagacacgauugcag

SEQ ID NO: 569875 - RNA, 22 nt, Artificial Sequence
  Synthetic
uauauagaagacacgauugcag

SEQ ID NO: 569876 - RNA, 23 nt, Artificial Sequence
  Synthetic
cuauauagaagacacgauugcag

SEQ ID NO: 569877 - RNA, 24 nt, Artificial Sequence
  Synthetic
gcuauauagaagacacgauugcag

SEQ ID NO: 569878 - RNA, 18 nt, Artificial Sequence
  Synthetic
aaugaggggauauugcag

SEQ ID NO: 569879 - RNA, 19 nt, Artificial Sequence
  Synthetic
aaaugaggggauauugcag

SEQ ID NO: 569880 - RNA, 20 nt, Artificial Sequence
  Synthetic
aaaaugaggggauauugcag

SEQ ID NO: 569881 - RNA, 21 nt, Artificial Sequence
  Synthetic
gaaaaugaggggauauugcag

SEQ ID NO: 569882 - RNA, 22 nt, Artificial Sequence
  Synthetic
ggaaaaugaggggauauugcag

SEQ ID NO: 569883 - RNA, 23 nt, Artificial Sequence
  Synthetic
aggaaaaugaggggauauugcag

SEQ ID NO: 569884 - RNA, 24 nt, Artificial Sequence
  Synthetic
aaggaaaaugaggggauauugcag

SEQ ID NO: 569885 - RNA, 18 nt, Artificial Sequence
  Synthetic
ggcaauuggcuauugcag

SEQ ID NO: 569886 - RNA, 19 nt, Artificial Sequence
  Synthetic
cggcaauuggcuauugcag

SEQ ID NO: 569887 - RNA, 20 nt, Artificial Sequence
  Synthetic
ucggcaauuggcuauugcag

SEQ ID NO: 569888 - RNA, 21 nt, Artificial Sequence
  Synthetic
cucggcaauuggcuauugcag

SEQ ID NO: 569889 - RNA, 22 nt, Artificial Sequence
  Synthetic
ccucggcaauuggcuauugcag

SEQ ID NO: 569890 - RNA, 23 nt, Artificial Sequence
  Synthetic
accucggcaauuggcuauugcag

SEQ ID NO: 569891 - RNA, 24 nt, Artificial Sequence
  Synthetic
aaccucggcaauuggcuauugcag

SEQ ID NO: 569892 - RNA, 18 nt, Artificial Sequence
  Synthetic
ugcaaaacaggcuugcag

SEQ ID NO: 569893 - RNA, 19 nt, Artificial Sequence
  Synthetic
augcaaaacaggcuugcag

SEQ ID NO: 569894 - RNA, 20 nt, Artificial Sequence
  Synthetic
gaugcaaaacaggcuugcag

SEQ ID NO: 569895 - RNA, 21 nt, Artificial Sequence
  Synthetic
agaugcaaaacaggcuugcag

SEQ ID NO: 569896 - RNA, 22 nt, Artificial Sequence
  Synthetic
uagaugcaaaacaggcuugcag

SEQ ID NO: 569897 - RNA, 23 nt, Artificial Sequence
  Synthetic
uuagaugcaaaacaggcuugcag

SEQ ID NO: 569898 - RNA, 24 nt, Artificial Sequence
  Synthetic
uuuagaugcaaaacaggcuugcag

SEQ ID NO: 569899 - RNA, 18 nt, Artificial Sequence
  Synthetic
auuauauuuuauuugcag

SEQ ID NO: 569900 - RNA, 19 nt, Artificial Sequence
  Synthetic
aauuauauuuuauuugcag

SEQ ID NO: 569901 - RNA, 20 nt, Artificial Sequence
  Synthetic
uaauuauauuuuauuugcag

SEQ ID NO: 569902 - RNA, 21 nt, Artificial Sequence
  Synthetic
guaauuauauuuuauuugcag

SEQ ID NO: 569903 - RNA, 22 nt, Artificial Sequence
  Synthetic
uguaauuauauuuuauuugcag

SEQ ID NO: 569904 - RNA, 23 nt, Artificial Sequence
  Synthetic
auguaauuauauuuuauuugcag

SEQ ID NO: 569905 - RNA, 24 nt, Artificial Sequence
  Synthetic
aauguaauuauauuuuauuugcag

SEQ ID NO: 569906 - RNA, 18 nt, Artificial Sequence
  Synthetic
aaacuauccauuuugcag

SEQ ID NO: 569907 - RNA, 19 nt, Artificial Sequence
  Synthetic
aaaacuauccauuuugcag

SEQ ID NO: 569908 - RNA, 20 nt, Artificial Sequence
  Synthetic
uaaaacuauccauuuugcag

SEQ ID NO: 569909 - RNA, 21 nt, Artificial Sequence
  Synthetic
auaaaacuauccauuuugcag

SEQ ID NO: 569910 - RNA, 22 nt, Artificial Sequence
  Synthetic
cauaaaacuauccauuuugcag

SEQ ID NO: 569911 - RNA, 23 nt, Artificial Sequence
  Synthetic
ucauaaaacuauccauuuugcag

SEQ ID NO: 569912 - RNA, 24 nt, Artificial Sequence
  Synthetic
aucauaaaacuauccauuuugcag

SEQ ID NO: 569913 - RNA, 18 nt, Artificial Sequence
  Synthetic
uuuccaguuauuuugcag

SEQ ID NO: 569914 - RNA, 19 nt, Artificial Sequence
  Synthetic
uuuuccaguuauuuugcag

SEQ ID NO: 569915 - RNA, 20 nt, Artificial Sequence
  Synthetic
uuuuuccaguuauuuugcag

SEQ ID NO: 569916 - RNA, 21 nt, Artificial Sequence
  Synthetic
auuuuuccaguuauuuugcag

SEQ ID NO: 569917 - RNA, 22 nt, Artificial Sequence
  Synthetic
gauuuuuccaguuauuuugcag

SEQ ID NO: 569918 - RNA, 23 nt, Artificial Sequence
  Synthetic
agauuuuuccaguuauuuugcag

SEQ ID NO: 569919 - RNA, 24 nt, Artificial Sequence
  Synthetic
aagauuuuuccaguuauuuugcag

SEQ ID NO: 569920 - RNA, 18 nt, Artificial Sequence
  Synthetic
uauaggugacuuuugcag

SEQ ID NO: 569921 - RNA, 19 nt, Artificial Sequence
  Synthetic
uuauaggugacuuuugcag

SEQ ID NO: 569922 - RNA, 20 nt, Artificial Sequence
  Synthetic
auuauaggugacuuuugcag

SEQ ID NO: 569923 - RNA, 21 nt, Artificial Sequence
  Synthetic
uauuauaggugacuuuugcag

SEQ ID NO: 569924 - RNA, 22 nt, Artificial Sequence
  Synthetic
uuauuauaggugacuuuugcag

SEQ ID NO: 569925 - RNA, 23 nt, Artificial Sequence
  Synthetic
uuuauuauaggugacuuuugcag

SEQ ID NO: 569926 - RNA, 24 nt, Artificial Sequence
  Synthetic
auuuauuauaggugacuuuugcag

SEQ ID NO: 569927 - RNA, 18 nt, Artificial Sequence
  Synthetic
gacccagcccuuuugcag

SEQ ID NO: 569928 - RNA, 19 nt, Artificial Sequence
  Synthetic
ugacccagcccuuuugcag

SEQ ID NO: 569929 - RNA, 20 nt, Artificial Sequence
  Synthetic
cugacccagcccuuuugcag

SEQ ID NO: 569930 - RNA, 21 nt, Artificial Sequence
  Synthetic
ccugacccagcccuuuugcag

SEQ ID NO: 569931 - RNA, 22 nt, Artificial Sequence
  Synthetic
cccugacccagcccuuuugcag

SEQ ID NO: 569932 - RNA, 23 nt, Artificial Sequence
  Synthetic
ccccugacccagcccuuuugcag

SEQ ID NO: 569933 - RNA, 24 nt, Artificial Sequence
  Synthetic
uccccugacccagcccuuuugcag

SEQ ID NO: 569934 - RNA, 18 nt, Artificial Sequence
  Synthetic
acauuuucuguuuugcag

SEQ ID NO: 569935 - RNA, 19 nt, Artificial Sequence
  Synthetic
cacauuuucuguuuugcag

SEQ ID NO: 569936 - RNA, 20 nt, Artificial Sequence
  Synthetic
ucacauuuucuguuuugcag

SEQ ID NO: 569937 - RNA, 21 nt, Artificial Sequence
  Synthetic
aucacauuuucuguuuugcag

SEQ ID NO: 569938 - RNA, 22 nt, Artificial Sequence
  Synthetic
caucacauuuucuguuuugcag

SEQ ID NO: 569939 - RNA, 23 nt, Artificial Sequence
  Synthetic
acaucacauuuucuguuuugcag

SEQ ID NO: 569940 - RNA, 24 nt, Artificial Sequence
  Synthetic
uacaucacauuuucuguuuugcag

SEQ ID NO: 569941 - RNA, 18 nt, Artificial Sequence
  Synthetic
gacuggaacaaaaaucag

SEQ ID NO: 569942 - RNA, 19 nt, Artificial Sequence
  Synthetic
agacuggaacaaaaaucag

SEQ ID NO: 569943 - RNA, 20 nt, Artificial Sequence
  Synthetic
aagacuggaacaaaaaucag

SEQ ID NO: 569944 - RNA, 21 nt, Artificial Sequence
  Synthetic
aaagacuggaacaaaaaucag

SEQ ID NO: 569945 - RNA, 22 nt, Artificial Sequence
  Synthetic
gaaagacuggaacaaaaaucag

SEQ ID NO: 569946 - RNA, 23 nt, Artificial Sequence
  Synthetic
ugaaagacuggaacaaaaaucag

SEQ ID NO: 569947 - RNA, 24 nt, Artificial Sequence
  Synthetic
augaaagacuggaacaaaaaucag

SEQ ID NO: 569948 - RNA, 18 nt, Artificial Sequence
  Synthetic
uaaaaauacaaaaaucag

SEQ ID NO: 569949 - RNA, 19 nt, Artificial Sequence
  Synthetic
cuaaaaauacaaaaaucag

SEQ ID NO: 569950 - RNA, 20 nt, Artificial Sequence
  Synthetic
acuaaaaauacaaaaaucag

SEQ ID NO: 569951 - RNA, 21 nt, Artificial Sequence
  Synthetic
uacuaaaaauacaaaaaucag

SEQ ID NO: 569952 - RNA, 22 nt, Artificial Sequence
  Synthetic
cuacuaaaaauacaaaaaucag

SEQ ID NO: 569953 - RNA, 23 nt, Artificial Sequence
  Synthetic
ucuacuaaaaauacaaaaaucag

SEQ ID NO: 569954 - RNA, 24 nt, Artificial Sequence
  Synthetic
cucuacuaaaaauacaaaaaucag

SEQ ID NO: 569955 - RNA, 18 nt, Artificial Sequence
  Synthetic
uaaaauuacaaaaaucag

SEQ ID NO: 569956 - RNA, 19 nt, Artificial Sequence
  Synthetic
cuaaaauuacaaaaaucag

SEQ ID NO: 569957 - RNA, 20 nt, Artificial Sequence
  Synthetic
acuaaaauuacaaaaaucag

SEQ ID NO: 569958 - RNA, 21 nt, Artificial Sequence
  Synthetic
uacuaaaauuacaaaaaucag

SEQ ID NO: 569959 - RNA, 22 nt, Artificial Sequence
  Synthetic
cuacuaaaauuacaaaaaucag

SEQ ID NO: 569960 - RNA, 23 nt, Artificial Sequence
  Synthetic
ucuacuaaaauuacaaaaaucag

SEQ ID NO: 569961 - RNA, 24 nt, Artificial Sequence
  Synthetic
cucuacuaaaauuacaaaaaucag

SEQ ID NO: 569962 - RNA, 18 nt, Artificial Sequence
  Synthetic
guuuguuuacaaaaucag

SEQ ID NO: 569963 - RNA, 19 nt, Artificial Sequence
  Synthetic
uguuuguuuacaaaaucag

SEQ ID NO: 569964 - RNA, 20 nt, Artificial Sequence
  Synthetic
auguuuguuuacaaaaucag

SEQ ID NO: 569965 - RNA, 21 nt, Artificial Sequence
  Synthetic
cauguuuguuuacaaaaucag

SEQ ID NO: 569966 - RNA, 22 nt, Artificial Sequence
  Synthetic
acauguuuguuuacaaaaucag

SEQ ID NO: 569967 - RNA, 23 nt, Artificial Sequence
  Synthetic
aacauguuuguuuacaaaaucag

SEQ ID NO: 569968 - RNA, 24 nt, Artificial Sequence
  Synthetic
aaacauguuuguuuacaaaaucag

SEQ ID NO: 569969 - RNA, 18 nt, Artificial Sequence
  Synthetic
aacauucucacaaaucag

SEQ ID NO: 569970 - RNA, 19 nt, Artificial Sequence
  Synthetic
aaacauucucacaaaucag

SEQ ID NO: 569971 - RNA, 20 nt, Artificial Sequence
  Synthetic
aaaacauucucacaaaucag

SEQ ID NO: 569972 - RNA, 21 nt, Artificial Sequence
  Synthetic
aaaaacauucucacaaaucag

SEQ ID NO: 569973 - RNA, 22 nt, Artificial Sequence
  Synthetic
uaaaaacauucucacaaaucag

SEQ ID NO: 569974 - RNA, 23 nt, Artificial Sequence
  Synthetic
auaaaaacauucucacaaaucag

SEQ ID NO: 569975 - RNA, 24 nt, Artificial Sequence
  Synthetic
gauaaaaacauucucacaaaucag

SEQ ID NO: 569976 - RNA, 18 nt, Artificial Sequence
  Synthetic
gcaaugcacauaaaucag

SEQ ID NO: 569977 - RNA, 19 nt, Artificial Sequence
  Synthetic
ugcaaugcacauaaaucag

SEQ ID NO: 569978 - RNA, 20 nt, Artificial Sequence
  Synthetic
augcaaugcacauaaaucag

SEQ ID NO: 569979 - RNA, 21 nt, Artificial Sequence
  Synthetic
aaugcaaugcacauaaaucag

SEQ ID NO: 569980 - RNA, 22 nt, Artificial Sequence
  Synthetic
aaaugcaaugcacauaaaucag

SEQ ID NO: 569981 - RNA, 23 nt, Artificial Sequence
  Synthetic
aaaaugcaaugcacauaaaucag

SEQ ID NO: 569982 - RNA, 24 nt, Artificial Sequence
  Synthetic
caaaaugcaaugcacauaaaucag

SEQ ID NO: 569983 - RNA, 18 nt, Artificial Sequence
  Synthetic
caccgacaaguaaaucag

SEQ ID NO: 569984 - RNA, 19 nt, Artificial Sequence
  Synthetic
acaccgacaaguaaaucag

SEQ ID NO: 569985 - RNA, 20 nt, Artificial Sequence
  Synthetic
cacaccgacaaguaaaucag

SEQ ID NO: 569986 - RNA, 21 nt, Artificial Sequence
  Synthetic
ucacaccgacaaguaaaucag

SEQ ID NO: 569987 - RNA, 22 nt, Artificial Sequence
  Synthetic
aucacaccgacaaguaaaucag

SEQ ID NO: 569988 - RNA, 23 nt, Artificial Sequence
  Synthetic
aaucacaccgacaaguaaaucag

SEQ ID NO: 569989 - RNA, 24 nt, Artificial Sequence
  Synthetic
aaaucacaccgacaaguaaaucag

SEQ ID NO: 569990 - RNA, 18 nt, Artificial Sequence
  Synthetic
uugagaagguuaaaucag

SEQ ID NO: 569991 - RNA, 19 nt, Artificial Sequence
  Synthetic
auugagaagguuaaaucag

SEQ ID NO: 569992 - RNA, 20 nt, Artificial Sequence
  Synthetic
uauugagaagguuaaaucag

SEQ ID NO: 569993 - RNA, 21 nt, Artificial Sequence
  Synthetic
auauugagaagguuaaaucag

SEQ ID NO: 569994 - RNA, 22 nt, Artificial Sequence
  Synthetic
gauauugagaagguuaaaucag

SEQ ID NO: 569995 - RNA, 23 nt, Artificial Sequence
  Synthetic
agauauugagaagguuaaaucag

SEQ ID NO: 569996 - RNA, 24 nt, Artificial Sequence
  Synthetic
gagauauugagaagguuaaaucag

SEQ ID NO: 569997 - RNA, 18 nt, Artificial Sequence
  Synthetic
auauaaugauccaaucag

SEQ ID NO: 569998 - RNA, 19 nt, Artificial Sequence
  Synthetic
cauauaaugauccaaucag

SEQ ID NO: 569999 - RNA, 20 nt, Artificial Sequence
  Synthetic
ccauauaaugauccaaucag

SEQ ID NO: 570000 - RNA, 21 nt, Artificial Sequence
  Synthetic
cccauauaaugauccaaucag

SEQ ID NO: 570001 - RNA, 22 nt, Artificial Sequence
  Synthetic
gcccauauaaugauccaaucag

SEQ ID NO: 570002 - RNA, 23 nt, Artificial Sequence
  Synthetic
ugcccauauaaugauccaaucag

SEQ ID NO: 570003 - RNA, 24 nt, Artificial Sequence
  Synthetic
uugcccauauaaugauccaaucag

SEQ ID NO: 570004 - RNA, 18 nt, Artificial Sequence
  Synthetic
uugacucaauucaaucag

SEQ ID NO: 570005 - RNA, 19 nt, Artificial Sequence
  Synthetic
cuugacucaauucaaucag

SEQ ID NO: 570006 - RNA, 20 nt, Artificial Sequence
  Synthetic
ucuugacucaauucaaucag

SEQ ID NO: 570007 - RNA, 21 nt, Artificial Sequence
  Synthetic
uucuugacucaauucaaucag

SEQ ID NO: 570008 - RNA, 22 nt, Artificial Sequence
  Synthetic
uuucuugacucaauucaaucag

SEQ ID NO: 570009 - RNA, 23 nt, Artificial Sequence
  Synthetic
guuucuugacucaauucaaucag

SEQ ID NO: 570010 - RNA, 24 nt, Artificial Sequence
  Synthetic
aguuucuugacucaauucaaucag

SEQ ID NO: 570011 - RNA, 18 nt, Artificial Sequence
  Synthetic
cuucuugaguagaaucag

SEQ ID NO: 570012 - RNA, 19 nt, Artificial Sequence
  Synthetic
acuucuugaguagaaucag

SEQ ID NO: 570013 - RNA, 20 nt, Artificial Sequence
  Synthetic
cacuucuugaguagaaucag

SEQ ID NO: 570014 - RNA, 21 nt, Artificial Sequence
  Synthetic
acacuucuugaguagaaucag

SEQ ID NO: 570015 - RNA, 22 nt, Artificial Sequence
  Synthetic
aacacuucuugaguagaaucag

SEQ ID NO: 570016 - RNA, 23 nt, Artificial Sequence
  Synthetic
aaacacuucuugaguagaaucag

SEQ ID NO: 570017 - RNA, 24 nt, Artificial Sequence
  Synthetic
uaaacacuucuugaguagaaucag

SEQ ID NO: 570018 - RNA, 18 nt, Artificial Sequence
  Synthetic
uuggaucacaauaaucag

SEQ ID NO: 570019 - RNA, 19 nt, Artificial Sequence
  Synthetic
uuuggaucacaauaaucag

SEQ ID NO: 570020 - RNA, 20 nt, Artificial Sequence
  Synthetic
cuuuggaucacaauaaucag

SEQ ID NO: 570021 - RNA, 21 nt, Artificial Sequence
  Synthetic
acuuuggaucacaauaaucag

SEQ ID NO: 570022 - RNA, 22 nt, Artificial Sequence
  Synthetic
aacuuuggaucacaauaaucag

SEQ ID NO: 570023 - RNA, 23 nt, Artificial Sequence
  Synthetic
gaacuuuggaucacaauaaucag

SEQ ID NO: 570024 - RNA, 24 nt, Artificial Sequence
  Synthetic
ggaacuuuggaucacaauaaucag

SEQ ID NO: 570025 - RNA, 18 nt, Artificial Sequence
  Synthetic
cuuaugcuucauaaucag

SEQ ID NO: 570026 - RNA, 19 nt, Artificial Sequence
  Synthetic
ucuuaugcuucauaaucag

SEQ ID NO: 570027 - RNA, 20 nt, Artificial Sequence
  Synthetic
uucuuaugcuucauaaucag

SEQ ID NO: 570028 - RNA, 21 nt, Artificial Sequence
  Synthetic
guucuuaugcuucauaaucag

SEQ ID NO: 570029 - RNA, 22 nt, Artificial Sequence
  Synthetic
aguucuuaugcuucauaaucag

SEQ ID NO: 570030 - RNA, 23 nt, Artificial Sequence
  Synthetic
gaguucuuaugcuucauaaucag

SEQ ID NO: 570031 - RNA, 24 nt, Artificial Sequence
  Synthetic
agaguucuuaugcuucauaaucag

SEQ ID NO: 570032 - RNA, 18 nt, Artificial Sequence
  Synthetic
ggaggaguuuauaaucag

SEQ ID NO: 570033 - RNA, 19 nt, Artificial Sequence
  Synthetic
uggaggaguuuauaaucag

SEQ ID NO: 570034 - RNA, 20 nt, Artificial Sequence
  Synthetic
cuggaggaguuuauaaucag

SEQ ID NO: 570035 - RNA, 21 nt, Artificial Sequence
  Synthetic
ccuggaggaguuuauaaucag

SEQ ID NO: 570036 - RNA, 22 nt, Artificial Sequence
  Synthetic
cccuggaggaguuuauaaucag

SEQ ID NO: 570037 - RNA, 23 nt, Artificial Sequence
  Synthetic
gcccuggaggaguuuauaaucag

SEQ ID NO: 570038 - RNA, 24 nt, Artificial Sequence
  Synthetic
ugcccuggaggaguuuauaaucag

SEQ ID NO: 570039 - RNA, 18 nt, Artificial Sequence
  Synthetic
aucaaccucacuaaucag

SEQ ID NO: 570040 - RNA, 19 nt, Artificial Sequence
  Synthetic
gaucaaccucacuaaucag

SEQ ID NO: 570041 - RNA, 20 nt, Artificial Sequence
  Synthetic
ugaucaaccucacuaaucag

SEQ ID NO: 570042 - RNA, 21 nt, Artificial Sequence
  Synthetic
augaucaaccucacuaaucag

SEQ ID NO: 570043 - RNA, 22 nt, Artificial Sequence
  Synthetic
aaugaucaaccucacuaaucag

SEQ ID NO: 570044 - RNA, 23 nt, Artificial Sequence
  Synthetic
aaaugaucaaccucacuaaucag

SEQ ID NO: 570045 - RNA, 24 nt, Artificial Sequence
  Synthetic
aaaaugaucaaccucacuaaucag

SEQ ID NO: 570046 - RNA, 18 nt, Artificial Sequence
  Synthetic
guuaaaucaucccaucag

SEQ ID NO: 570047 - RNA, 19 nt, Artificial Sequence
  Synthetic
aguuaaaucaucccaucag

SEQ ID NO: 570048 - RNA, 20 nt, Artificial Sequence
  Synthetic
aaguuaaaucaucccaucag

SEQ ID NO: 570049 - RNA, 21 nt, Artificial Sequence
  Synthetic
caaguuaaaucaucccaucag

SEQ ID NO: 570050 - RNA, 22 nt, Artificial Sequence
  Synthetic
acaaguuaaaucaucccaucag

SEQ ID NO: 570051 - RNA, 23 nt, Artificial Sequence
  Synthetic
aacaaguuaaaucaucccaucag

SEQ ID NO: 570052 - RNA, 24 nt, Artificial Sequence
  Synthetic
gaacaaguuaaaucaucccaucag

SEQ ID NO: 570053 - RNA, 18 nt, Artificial Sequence
  Synthetic
acaaaguuuggccaucag

SEQ ID NO: 570054 - RNA, 19 nt, Artificial Sequence
  Synthetic
cacaaaguuuggccaucag

SEQ ID NO: 570055 - RNA, 20 nt, Artificial Sequence
  Synthetic
ucacaaaguuuggccaucag

SEQ ID NO: 570056 - RNA, 21 nt, Artificial Sequence
  Synthetic
uucacaaaguuuggccaucag

SEQ ID NO: 570057 - RNA, 22 nt, Artificial Sequence
  Synthetic
uuucacaaaguuuggccaucag

SEQ ID NO: 570058 - RNA, 23 nt, Artificial Sequence
  Synthetic
guuucacaaaguuuggccaucag

SEQ ID NO: 570059 - RNA, 24 nt, Artificial Sequence
  Synthetic
aguuucacaaaguuuggccaucag

SEQ ID NO: 570060 - RNA, 18 nt, Artificial Sequence
  Synthetic
acaucacuaaugcaucag

SEQ ID NO: 570061 - RNA, 19 nt, Artificial Sequence
  Synthetic
uacaucacuaaugcaucag

SEQ ID NO: 570062 - RNA, 20 nt, Artificial Sequence
  Synthetic
uuacaucacuaaugcaucag

SEQ ID NO: 570063 - RNA, 21 nt, Artificial Sequence
  Synthetic
uuuacaucacuaaugcaucag

SEQ ID NO: 570064 - RNA, 22 nt, Artificial Sequence
  Synthetic
uuuuacaucacuaaugcaucag

SEQ ID NO: 570065 - RNA, 23 nt, Artificial Sequence
  Synthetic
cuuuuacaucacuaaugcaucag

SEQ ID NO: 570066 - RNA, 24 nt, Artificial Sequence
  Synthetic
ccuuuuacaucacuaaugcaucag

SEQ ID NO: 570067 - RNA, 18 nt, Artificial Sequence
  Synthetic
cauggauucagagaucag

SEQ ID NO: 570068 - RNA, 19 nt, Artificial Sequence
  Synthetic
acauggauucagagaucag

SEQ ID NO: 570069 - RNA, 20 nt, Artificial Sequence
  Synthetic
cacauggauucagagaucag

SEQ ID NO: 570070 - RNA, 21 nt, Artificial Sequence
  Synthetic
ccacauggauucagagaucag

SEQ ID NO: 570071 - RNA, 22 nt, Artificial Sequence
  Synthetic
gccacauggauucagagaucag

SEQ ID NO: 570072 - RNA, 23 nt, Artificial Sequence
  Synthetic
ugccacauggauucagagaucag

SEQ ID NO: 570073 - RNA, 24 nt, Artificial Sequence
  Synthetic
augccacauggauucagagaucag

SEQ ID NO: 570074 - RNA, 18 nt, Artificial Sequence
  Synthetic
uacaguucuggagaucag

SEQ ID NO: 570075 - RNA, 19 nt, Artificial Sequence
  Synthetic
guacaguucuggagaucag

SEQ ID NO: 570076 - RNA, 20 nt, Artificial Sequence
  Synthetic
aguacaguucuggagaucag

SEQ ID NO: 570077 - RNA, 21 nt, Artificial Sequence
  Synthetic
aaguacaguucuggagaucag

SEQ ID NO: 570078 - RNA, 22 nt, Artificial Sequence
  Synthetic
aaaguacaguucuggagaucag

SEQ ID NO: 570079 - RNA, 23 nt, Artificial Sequence
  Synthetic
gaaaguacaguucuggagaucag

SEQ ID NO: 570080 - RNA, 24 nt, Artificial Sequence
  Synthetic
agaaaguacaguucuggagaucag

SEQ ID NO: 570081 - RNA, 18 nt, Artificial Sequence
  Synthetic
cugacagcaaaggaucag

SEQ ID NO: 570082 - RNA, 19 nt, Artificial Sequence
  Synthetic
gcugacagcaaaggaucag

SEQ ID NO: 570083 - RNA, 20 nt, Artificial Sequence
  Synthetic
agcugacagcaaaggaucag

SEQ ID NO: 570084 - RNA, 21 nt, Artificial Sequence
  Synthetic
aagcugacagcaaaggaucag

SEQ ID NO: 570085 - RNA, 22 nt, Artificial Sequence
  Synthetic
uaagcugacagcaaaggaucag

SEQ ID NO: 570086 - RNA, 23 nt, Artificial Sequence
  Synthetic
guaagcugacagcaaaggaucag

SEQ ID NO: 570087 - RNA, 24 nt, Artificial Sequence
  Synthetic
gguaagcugacagcaaaggaucag

SEQ ID NO: 570088 - RNA, 18 nt, Artificial Sequence
  Synthetic
cguccugggagggaucag

SEQ ID NO: 570089 - RNA, 19 nt, Artificial Sequence
  Synthetic
acguccugggagggaucag

SEQ ID NO: 570090 - RNA, 20 nt, Artificial Sequence
  Synthetic
cacguccugggagggaucag

SEQ ID NO: 570091 - RNA, 21 nt, Artificial Sequence
  Synthetic
acacguccugggagggaucag

SEQ ID NO: 570092 - RNA, 22 nt, Artificial Sequence
  Synthetic
cacacguccugggagggaucag

SEQ ID NO: 570093 - RNA, 23 nt, Artificial Sequence
  Synthetic
ccacacguccugggagggaucag

SEQ ID NO: 570094 - RNA, 24 nt, Artificial Sequence
  Synthetic
cccacacguccugggagggaucag

SEQ ID NO: 570095 - RNA, 18 nt, Artificial Sequence
  Synthetic
guguguagcaaauaucag

SEQ ID NO: 570096 - RNA, 19 nt, Artificial Sequence
  Synthetic
uguguguagcaaauaucag

SEQ ID NO: 570097 - RNA, 20 nt, Artificial Sequence
  Synthetic
cuguguguagcaaauaucag

SEQ ID NO: 570098 - RNA, 21 nt, Artificial Sequence
  Synthetic
acuguguguagcaaauaucag

SEQ ID NO: 570099 - RNA, 22 nt, Artificial Sequence
  Synthetic
cacuguguguagcaaauaucag

SEQ ID NO: 570100 - RNA, 23 nt, Artificial Sequence
  Synthetic
ccacuguguguagcaaauaucag

SEQ ID NO: 570101 - RNA, 24 nt, Artificial Sequence
  Synthetic
cccacuguguguagcaaauaucag

SEQ ID NO: 570102 - RNA, 18 nt, Artificial Sequence
  Synthetic
aaacuaugucaauaucag

SEQ ID NO: 570103 - RNA, 19 nt, Artificial Sequence
  Synthetic
aaaacuaugucaauaucag

SEQ ID NO: 570104 - RNA, 20 nt, Artificial Sequence
  Synthetic
gaaaacuaugucaauaucag

SEQ ID NO: 570105 - RNA, 21 nt, Artificial Sequence
  Synthetic
ugaaaacuaugucaauaucag

SEQ ID NO: 570106 - RNA, 22 nt, Artificial Sequence
  Synthetic
cugaaaacuaugucaauaucag

SEQ ID NO: 570107 - RNA, 23 nt, Artificial Sequence
  Synthetic
ccugaaaacuaugucaauaucag

SEQ ID NO: 570108 - RNA, 24 nt, Artificial Sequence
  Synthetic
cccugaaaacuaugucaauaucag

SEQ ID NO: 570109 - RNA, 18 nt, Artificial Sequence
  Synthetic
ugucuugguugauaucag

SEQ ID NO: 570110 - RNA, 19 nt, Artificial Sequence
  Synthetic
gugucuugguugauaucag

SEQ ID NO: 570111 - RNA, 20 nt, Artificial Sequence
  Synthetic
agugucuugguugauaucag

SEQ ID NO: 570112 - RNA, 21 nt, Artificial Sequence
  Synthetic
cagugucuugguugauaucag

SEQ ID NO: 570113 - RNA, 22 nt, Artificial Sequence
  Synthetic
ccagugucuugguugauaucag

SEQ ID NO: 570114 - RNA, 23 nt, Artificial Sequence
  Synthetic
cccagugucuugguugauaucag

SEQ ID NO: 570115 - RNA, 24 nt, Artificial Sequence
  Synthetic
ucccagugucuugguugauaucag

SEQ ID NO: 570116 - RNA, 18 nt, Artificial Sequence
  Synthetic
aagaaaggaauauaucag

SEQ ID NO: 570117 - RNA, 19 nt, Artificial Sequence
  Synthetic
gaagaaaggaauauaucag

SEQ ID NO: 570118 - RNA, 20 nt, Artificial Sequence
  Synthetic
ugaagaaaggaauauaucag

SEQ ID NO: 570119 - RNA, 21 nt, Artificial Sequence
  Synthetic
cugaagaaaggaauauaucag

SEQ ID NO: 570120 - RNA, 22 nt, Artificial Sequence
  Synthetic
ccugaagaaaggaauauaucag

SEQ ID NO: 570121 - RNA, 23 nt, Artificial Sequence
  Synthetic
accugaagaaaggaauauaucag

SEQ ID NO: 570122 - RNA, 24 nt, Artificial Sequence
  Synthetic
aaccugaagaaaggaauauaucag

SEQ ID NO: 570123 - RNA, 18 nt, Artificial Sequence
  Synthetic
gaacucacucacuaucag

SEQ ID NO: 570124 - RNA, 19 nt, Artificial Sequence
  Synthetic
agaacucacucacuaucag

SEQ ID NO: 570125 - RNA, 20 nt, Artificial Sequence
  Synthetic
gagaacucacucacuaucag

SEQ ID NO: 570126 - RNA, 21 nt, Artificial Sequence
  Synthetic
ugagaacucacucacuaucag

SEQ ID NO: 570127 - RNA, 22 nt, Artificial Sequence
  Synthetic
gugagaacucacucacuaucag

SEQ ID NO: 570128 - RNA, 23 nt, Artificial Sequence
  Synthetic
ugugagaacucacucacuaucag

SEQ ID NO: 570129 - RNA, 24 nt, Artificial Sequence
  Synthetic
uugugagaacucacucacuaucag

SEQ ID NO: 570130 - RNA, 18 nt, Artificial Sequence
  Synthetic
cucaugauucacuaucag

SEQ ID NO: 570131 - RNA, 19 nt, Artificial Sequence
  Synthetic
ucucaugauucacuaucag

SEQ ID NO: 570132 - RNA, 20 nt, Artificial Sequence
  Synthetic
aucucaugauucacuaucag

SEQ ID NO: 570133 - RNA, 21 nt, Artificial Sequence
  Synthetic
gaucucaugauucacuaucag

SEQ ID NO: 570134 - RNA, 22 nt, Artificial Sequence
  Synthetic
ugaucucaugauucacuaucag

SEQ ID NO: 570135 - RNA, 23 nt, Artificial Sequence
  Synthetic
cugaucucaugauucacuaucag

SEQ ID NO: 570136 - RNA, 24 nt, Artificial Sequence
  Synthetic
ucugaucucaugauucacuaucag

SEQ ID NO: 570137 - RNA, 18 nt, Artificial Sequence
  Synthetic
caucauucccauuaucag

SEQ ID NO: 570138 - RNA, 19 nt, Artificial Sequence
  Synthetic
acaucauucccauuaucag

SEQ ID NO: 570139 - RNA, 20 nt, Artificial Sequence
  Synthetic
cacaucauucccauuaucag

SEQ ID NO: 570140 - RNA, 21 nt, Artificial Sequence
  Synthetic
ccacaucauucccauuaucag

SEQ ID NO: 570141 - RNA, 22 nt, Artificial Sequence
  Synthetic
accacaucauucccauuaucag

SEQ ID NO: 570142 - RNA, 23 nt, Artificial Sequence
  Synthetic
uaccacaucauucccauuaucag

SEQ ID NO: 570143 - RNA, 24 nt, Artificial Sequence
  Synthetic
uuaccacaucauucccauuaucag

SEQ ID NO: 570144 - RNA, 18 nt, Artificial Sequence
  Synthetic
aaacuuacugauuaucag

SEQ ID NO: 570145 - RNA, 19 nt, Artificial Sequence
  Synthetic
gaaacuuacugauuaucag

SEQ ID NO: 570146 - RNA, 20 nt, Artificial Sequence
  Synthetic
ugaaacuuacugauuaucag

SEQ ID NO: 570147 - RNA, 21 nt, Artificial Sequence
  Synthetic
gugaaacuuacugauuaucag

SEQ ID NO: 570148 - RNA, 22 nt, Artificial Sequence
  Synthetic
ugugaaacuuacugauuaucag

SEQ ID NO: 570149 - RNA, 23 nt, Artificial Sequence
  Synthetic
uugugaaacuuacugauuaucag

SEQ ID NO: 570150 - RNA, 24 nt, Artificial Sequence
  Synthetic
cuugugaaacuuacugauuaucag

SEQ ID NO: 570151 - RNA, 18 nt, Artificial Sequence
  Synthetic
gugaauuagaguuaucag

SEQ ID NO: 570152 - RNA, 19 nt, Artificial Sequence
  Synthetic
ggugaauuagaguuaucag

SEQ ID NO: 570153 - RNA, 20 nt, Artificial Sequence
  Synthetic
aggugaauuagaguuaucag

SEQ ID NO: 570154 - RNA, 21 nt, Artificial Sequence
  Synthetic
caggugaauuagaguuaucag

SEQ ID NO: 570155 - RNA, 22 nt, Artificial Sequence
  Synthetic
ucaggugaauuagaguuaucag

SEQ ID NO: 570156 - RNA, 23 nt, Artificial Sequence
  Synthetic
uucaggugaauuagaguuaucag

SEQ ID NO: 570157 - RNA, 24 nt, Artificial Sequence
  Synthetic
auucaggugaauuagaguuaucag

SEQ ID NO: 570158 - RNA, 18 nt, Artificial Sequence
  Synthetic
gaggugucacuuuaucag

SEQ ID NO: 570159 - RNA, 19 nt, Artificial Sequence
  Synthetic
ugaggugucacuuuaucag

SEQ ID NO: 570160 - RNA, 20 nt, Artificial Sequence
  Synthetic
uugaggugucacuuuaucag

SEQ ID NO: 570161 - RNA, 21 nt, Artificial Sequence
  Synthetic
auugaggugucacuuuaucag

SEQ ID NO: 570162 - RNA, 22 nt, Artificial Sequence
  Synthetic
uauugaggugucacuuuaucag

SEQ ID NO: 570163 - RNA, 23 nt, Artificial Sequence
  Synthetic
uuauugaggugucacuuuaucag

SEQ ID NO: 570164 - RNA, 24 nt, Artificial Sequence
  Synthetic
uuuauugaggugucacuuuaucag

SEQ ID NO: 570165 - RNA, 18 nt, Artificial Sequence
  Synthetic
gaggcaaccuaaacucag

SEQ ID NO: 570166 - RNA, 19 nt, Artificial Sequence
  Synthetic
agaggcaaccuaaacucag

SEQ ID NO: 570167 - RNA, 20 nt, Artificial Sequence
  Synthetic
cagaggcaaccuaaacucag

SEQ ID NO: 570168 - RNA, 21 nt, Artificial Sequence
  Synthetic
ccagaggcaaccuaaacucag

SEQ ID NO: 570169 - RNA, 22 nt, Artificial Sequence
  Synthetic
cccagaggcaaccuaaacucag

SEQ ID NO: 570170 - RNA, 23 nt, Artificial Sequence
  Synthetic
gcccagaggcaaccuaaacucag

SEQ ID NO: 570171 - RNA, 24 nt, Artificial Sequence
  Synthetic
ugcccagaggcaaccuaaacucag

SEQ ID NO: 570172 - RNA, 18 nt, Artificial Sequence
  Synthetic
auugaaugaagaacucag

SEQ ID NO: 570173 - RNA, 19 nt, Artificial Sequence
  Synthetic
cauugaaugaagaacucag

SEQ ID NO: 570174 - RNA, 20 nt, Artificial Sequence
  Synthetic
ucauugaaugaagaacucag

SEQ ID NO: 570175 - RNA, 21 nt, Artificial Sequence
  Synthetic
gucauugaaugaagaacucag

SEQ ID NO: 570176 - RNA, 22 nt, Artificial Sequence
  Synthetic
ugucauugaaugaagaacucag

SEQ ID NO: 570177 - RNA, 23 nt, Artificial Sequence
  Synthetic
augucauugaaugaagaacucag

SEQ ID NO: 570178 - RNA, 24 nt, Artificial Sequence
  Synthetic
gaugucauugaaugaagaacucag

SEQ ID NO: 570179 - RNA, 18 nt, Artificial Sequence
  Synthetic
uacuggucuggaacucag

SEQ ID NO: 570180 - RNA, 19 nt, Artificial Sequence
  Synthetic
auacuggucuggaacucag

SEQ ID NO: 570181 - RNA, 20 nt, Artificial Sequence
  Synthetic
gauacuggucuggaacucag

SEQ ID NO: 570182 - RNA, 21 nt, Artificial Sequence
  Synthetic
agauacuggucuggaacucag

SEQ ID NO: 570183 - RNA, 22 nt, Artificial Sequence
  Synthetic
aagauacuggucuggaacucag

SEQ ID NO: 570184 - RNA, 23 nt, Artificial Sequence
  Synthetic
gaagauacuggucuggaacucag

SEQ ID NO: 570185 - RNA, 24 nt, Artificial Sequence
  Synthetic
ugaagauacuggucuggaacucag

SEQ ID NO: 570186 - RNA, 18 nt, Artificial Sequence
  Synthetic
caguggccuuuaacucag

SEQ ID NO: 570187 - RNA, 19 nt, Artificial Sequence
  Synthetic
acaguggccuuuaacucag

SEQ ID NO: 570188 - RNA, 20 nt, Artificial Sequence
  Synthetic
cacaguggccuuuaacucag

SEQ ID NO: 570189 - RNA, 21 nt, Artificial Sequence
  Synthetic
gcacaguggccuuuaacucag

SEQ ID NO: 570190 - RNA, 22 nt, Artificial Sequence
  Synthetic
agcacaguggccuuuaacucag

SEQ ID NO: 570191 - RNA, 23 nt, Artificial Sequence
  Synthetic
gagcacaguggccuuuaacucag

SEQ ID NO: 570192 - RNA, 24 nt, Artificial Sequence
  Synthetic
ggagcacaguggccuuuaacucag

SEQ ID NO: 570193 - RNA, 18 nt, Artificial Sequence
  Synthetic
uaaagauaacucacucag

SEQ ID NO: 570194 - RNA, 19 nt, Artificial Sequence
  Synthetic
guaaagauaacucacucag

SEQ ID NO: 570195 - RNA, 20 nt, Artificial Sequence
  Synthetic
aguaaagauaacucacucag

SEQ ID NO: 570196 - RNA, 21 nt, Artificial Sequence
  Synthetic
aaguaaagauaacucacucag

SEQ ID NO: 570197 - RNA, 22 nt, Artificial Sequence
  Synthetic
caaguaaagauaacucacucag

SEQ ID NO: 570198 - RNA, 23 nt, Artificial Sequence
  Synthetic
ccaaguaaagauaacucacucag

SEQ ID NO: 570199 - RNA, 24 nt, Artificial Sequence
  Synthetic
accaaguaaagauaacucacucag

SEQ ID NO: 570200 - RNA, 18 nt, Artificial Sequence
  Synthetic
ugcuaaggauucacucag

SEQ ID NO: 570201 - RNA, 19 nt, Artificial Sequence
  Synthetic
gugcuaaggauucacucag

SEQ ID NO: 570202 - RNA, 20 nt, Artificial Sequence
  Synthetic
agugcuaaggauucacucag

SEQ ID NO: 570203 - RNA, 21 nt, Artificial Sequence
  Synthetic
cagugcuaaggauucacucag

SEQ ID NO: 570204 - RNA, 22 nt, Artificial Sequence
  Synthetic
ccagugcuaaggauucacucag

SEQ ID NO: 570205 - RNA, 23 nt, Artificial Sequence
  Synthetic
cccagugcuaaggauucacucag

SEQ ID NO: 570206 - RNA, 24 nt, Artificial Sequence
  Synthetic
gcccagugcuaaggauucacucag

SEQ ID NO: 570207 - RNA, 18 nt, Artificial Sequence
  Synthetic
guggaagcaaagacucag

SEQ ID NO: 570208 - RNA, 19 nt, Artificial Sequence
  Synthetic
uguggaagcaaagacucag

SEQ ID NO: 570209 - RNA, 20 nt, Artificial Sequence
  Synthetic
uuguggaagcaaagacucag

SEQ ID NO: 570210 - RNA, 21 nt, Artificial Sequence
  Synthetic
auuguggaagcaaagacucag

SEQ ID NO: 570211 - RNA, 22 nt, Artificial Sequence
  Synthetic
cauuguggaagcaaagacucag

SEQ ID NO: 570212 - RNA, 23 nt, Artificial Sequence
  Synthetic
ucauuguggaagcaaagacucag

SEQ ID NO: 570213 - RNA, 24 nt, Artificial Sequence
  Synthetic
cucauuguggaagcaaagacucag

SEQ ID NO: 570214 - RNA, 18 nt, Artificial Sequence
  Synthetic
uagacacuggagacucag

SEQ ID NO: 570215 - RNA, 19 nt, Artificial Sequence
  Synthetic
auagacacuggagacucag

SEQ ID NO: 570216 - RNA, 20 nt, Artificial Sequence
  Synthetic
aauagacacuggagacucag

SEQ ID NO: 570217 - RNA, 21 nt, Artificial Sequence
  Synthetic
uaauagacacuggagacucag

SEQ ID NO: 570218 - RNA, 22 nt, Artificial Sequence
  Synthetic
auaauagacacuggagacucag

SEQ ID NO: 570219 - RNA, 23 nt, Artificial Sequence
  Synthetic
aauaauagacacuggagacucag

SEQ ID NO: 570220 - RNA, 24 nt, Artificial Sequence
  Synthetic
gaauaauagacacuggagacucag

SEQ ID NO: 570221 - RNA, 18 nt, Artificial Sequence
  Synthetic
acaguugggaggacucag

SEQ ID NO: 570222 - RNA, 19 nt, Artificial Sequence
  Synthetic
aacaguugggaggacucag

SEQ ID NO: 570223 - RNA, 20 nt, Artificial Sequence
  Synthetic
aaacaguugggaggacucag

SEQ ID NO: 570224 - RNA, 21 nt, Artificial Sequence
  Synthetic
gaaacaguugggaggacucag

SEQ ID NO: 570225 - RNA, 22 nt, Artificial Sequence
  Synthetic
ugaaacaguugggaggacucag

SEQ ID NO: 570226 - RNA, 23 nt, Artificial Sequence
  Synthetic
uugaaacaguugggaggacucag

SEQ ID NO: 570227 - RNA, 24 nt, Artificial Sequence
  Synthetic
guugaaacaguugggaggacucag

SEQ ID NO: 570228 - RNA, 18 nt, Artificial Sequence
  Synthetic
agaaaucaagugacucag

SEQ ID NO: 570229 - RNA, 19 nt, Artificial Sequence
  Synthetic
gagaaaucaagugacucag

SEQ ID NO: 570230 - RNA, 20 nt, Artificial Sequence
  Synthetic
agagaaaucaagugacucag

SEQ ID NO: 570231 - RNA, 21 nt, Artificial Sequence
  Synthetic
uagagaaaucaagugacucag

SEQ ID NO: 570232 - RNA, 22 nt, Artificial Sequence
  Synthetic
guagagaaaucaagugacucag

SEQ ID NO: 570233 - RNA, 23 nt, Artificial Sequence
  Synthetic
uguagagaaaucaagugacucag

SEQ ID NO: 570234 - RNA, 24 nt, Artificial Sequence
  Synthetic
auguagagaaaucaagugacucag

SEQ ID NO: 570235 - RNA, 18 nt, Artificial Sequence
  Synthetic
uaguguugugugacucag

SEQ ID NO: 570236 - RNA, 19 nt, Artificial Sequence
  Synthetic
uuaguguugugugacucag

SEQ ID NO: 570237 - RNA, 20 nt, Artificial Sequence
  Synthetic
uuuaguguugugugacucag

SEQ ID NO: 570238 - RNA, 21 nt, Artificial Sequence
  Synthetic
cuuuaguguugugugacucag

SEQ ID NO: 570239 - RNA, 22 nt, Artificial Sequence
  Synthetic
gcuuuaguguugugugacucag

SEQ ID NO: 570240 - RNA, 23 nt, Artificial Sequence
  Synthetic
cgcuuuaguguugugugacucag

SEQ ID NO: 570241 - RNA, 24 nt, Artificial Sequence
  Synthetic
acgcuuuaguguugugugacucag

SEQ ID NO: 570242 - RNA, 18 nt, Artificial Sequence
  Synthetic
aaucaaauauauacucag

SEQ ID NO: 570243 - RNA, 19 nt, Artificial Sequence
  Synthetic
aaaucaaauauauacucag

SEQ ID NO: 570244 - RNA, 20 nt, Artificial Sequence
  Synthetic
gaaaucaaauauauacucag

SEQ ID NO: 570245 - RNA, 21 nt, Artificial Sequence
  Synthetic
agaaaucaaauauauacucag

SEQ ID NO: 570246 - RNA, 22 nt, Artificial Sequence
  Synthetic
aagaaaucaaauauauacucag

SEQ ID NO: 570247 - RNA, 23 nt, Artificial Sequence
  Synthetic
gaagaaaucaaauauauacucag

SEQ ID NO: 570248 - RNA, 24 nt, Artificial Sequence
  Synthetic
agaagaaaucaaauauauacucag

SEQ ID NO: 570249 - RNA, 18 nt, Artificial Sequence
  Synthetic
ugauagcauuuuacucag

SEQ ID NO: 570250 - RNA, 19 nt, Artificial Sequence
  Synthetic
uugauagcauuuuacucag

SEQ ID NO: 570251 - RNA, 20 nt, Artificial Sequence
  Synthetic
uuugauagcauuuuacucag

SEQ ID NO: 570252 - RNA, 21 nt, Artificial Sequence
  Synthetic
guuugauagcauuuuacucag

SEQ ID NO: 570253 - RNA, 22 nt, Artificial Sequence
  Synthetic
uguuugauagcauuuuacucag

SEQ ID NO: 570254 - RNA, 23 nt, Artificial Sequence
  Synthetic
cuguuugauagcauuuuacucag

SEQ ID NO: 570255 - RNA, 24 nt, Artificial Sequence
  Synthetic
gcuguuugauagcauuuuacucag

SEQ ID NO: 570256 - RNA, 18 nt, Artificial Sequence
  Synthetic
cuuacccagaaaccucag

SEQ ID NO: 570257 - RNA, 19 nt, Artificial Sequence
  Synthetic
acuuacccagaaaccucag

SEQ ID NO: 570258 - RNA, 20 nt, Artificial Sequence
  Synthetic
gacuuacccagaaaccucag

SEQ ID NO: 570259 - RNA, 21 nt, Artificial Sequence
  Synthetic
ggacuuacccagaaaccucag

SEQ ID NO: 570260 - RNA, 22 nt, Artificial Sequence
  Synthetic
cggacuuacccagaaaccucag

SEQ ID NO: 570261 - RNA, 23 nt, Artificial Sequence
  Synthetic
acggacuuacccagaaaccucag

SEQ ID NO: 570262 - RNA, 24 nt, Artificial Sequence
  Synthetic
aacggacuuacccagaaaccucag

SEQ ID NO: 570263 - RNA, 18 nt, Artificial Sequence
  Synthetic
agaggauuauaaccucag

SEQ ID NO: 570264 - RNA, 19 nt, Artificial Sequence
  Synthetic
cagaggauuauaaccucag

SEQ ID NO: 570265 - RNA, 20 nt, Artificial Sequence
  Synthetic
ccagaggauuauaaccucag

SEQ ID NO: 570266 - RNA, 21 nt, Artificial Sequence
  Synthetic
uccagaggauuauaaccucag

SEQ ID NO: 570267 - RNA, 22 nt, Artificial Sequence
  Synthetic
cuccagaggauuauaaccucag

SEQ ID NO: 570268 - RNA, 23 nt, Artificial Sequence
  Synthetic
ccuccagaggauuauaaccucag

SEQ ID NO: 570269 - RNA, 24 nt, Artificial Sequence
  Synthetic
cccuccagaggauuauaaccucag

SEQ ID NO: 570270 - RNA, 18 nt, Artificial Sequence
  Synthetic
ucucugacugcaccucag

SEQ ID NO: 570271 - RNA, 19 nt, Artificial Sequence
  Synthetic
aucucugacugcaccucag

SEQ ID NO: 570272 - RNA, 20 nt, Artificial Sequence
  Synthetic
gaucucugacugcaccucag

SEQ ID NO: 570273 - RNA, 21 nt, Artificial Sequence
  Synthetic
ugaucucugacugcaccucag

SEQ ID NO: 570274 - RNA, 22 nt, Artificial Sequence
  Synthetic
gugaucucugacugcaccucag

SEQ ID NO: 570275 - RNA, 23 nt, Artificial Sequence
  Synthetic
agugaucucugacugcaccucag

SEQ ID NO: 570276 - RNA, 24 nt, Artificial Sequence
  Synthetic
cagugaucucugacugcaccucag

SEQ ID NO: 570277 - RNA, 18 nt, Artificial Sequence
  Synthetic
gauaacuccagaccucag

SEQ ID NO: 570278 - RNA, 19 nt, Artificial Sequence
  Synthetic
ggauaacuccagaccucag

SEQ ID NO: 570279 - RNA, 20 nt, Artificial Sequence
  Synthetic
gggauaacuccagaccucag

SEQ ID NO: 570280 - RNA, 21 nt, Artificial Sequence
  Synthetic
ugggauaacuccagaccucag

SEQ ID NO: 570281 - RNA, 22 nt, Artificial Sequence
  Synthetic
cugggauaacuccagaccucag

SEQ ID NO: 570282 - RNA, 23 nt, Artificial Sequence
  Synthetic
acugggauaacuccagaccucag

SEQ ID NO: 570283 - RNA, 24 nt, Artificial Sequence
  Synthetic
uacugggauaacuccagaccucag

SEQ ID NO: 570284 - RNA, 18 nt, Artificial Sequence
  Synthetic
uaauucuuuagaccucag

SEQ ID NO: 570285 - RNA, 19 nt, Artificial Sequence
  Synthetic
cuaauucuuuagaccucag

SEQ ID NO: 570286 - RNA, 20 nt, Artificial Sequence
  Synthetic
acuaauucuuuagaccucag

SEQ ID NO: 570287 - RNA, 21 nt, Artificial Sequence
  Synthetic
cacuaauucuuuagaccucag

SEQ ID NO: 570288 - RNA, 22 nt, Artificial Sequence
  Synthetic
ccacuaauucuuuagaccucag

SEQ ID NO: 570289 - RNA, 23 nt, Artificial Sequence
  Synthetic
uccacuaauucuuuagaccucag

SEQ ID NO: 570290 - RNA, 24 nt, Artificial Sequence
  Synthetic
guccacuaauucuuuagaccucag

SEQ ID NO: 570291 - RNA, 18 nt, Artificial Sequence
  Synthetic
aaaaggacgcccccucag

SEQ ID NO: 570292 - RNA, 19 nt, Artificial Sequence
  Synthetic
aaaaaggacgcccccucag

SEQ ID NO: 570293 - RNA, 20 nt, Artificial Sequence
  Synthetic
uaaaaaggacgcccccucag

SEQ ID NO: 570294 - RNA, 21 nt, Artificial Sequence
  Synthetic
guaaaaaggacgcccccucag

SEQ ID NO: 570295 - RNA, 22 nt, Artificial Sequence
  Synthetic
gguaaaaaggacgcccccucag

SEQ ID NO: 570296 - RNA, 23 nt, Artificial Sequence
  Synthetic
ugguaaaaaggacgcccccucag

SEQ ID NO: 570297 - RNA, 24 nt, Artificial Sequence
  Synthetic
augguaaaaaggacgcccccucag

SEQ ID NO: 570298 - RNA, 18 nt, Artificial Sequence
  Synthetic
cuccuuccgagcccucag

SEQ ID NO: 570299 - RNA, 19 nt, Artificial Sequence
  Synthetic
ucuccuuccgagcccucag

SEQ ID NO: 570300 - RNA, 20 nt, Artificial Sequence
  Synthetic
uucuccuuccgagcccucag

SEQ ID NO: 570301 - RNA, 21 nt, Artificial Sequence
  Synthetic
auucuccuuccgagcccucag

SEQ ID NO: 570302 - RNA, 22 nt, Artificial Sequence
  Synthetic
gauucuccuuccgagcccucag

SEQ ID NO: 570303 - RNA, 23 nt, Artificial Sequence
  Synthetic
agauucuccuuccgagcccucag

SEQ ID NO: 570304 - RNA, 24 nt, Artificial Sequence
  Synthetic
cagauucuccuuccgagcccucag

SEQ ID NO: 570305 - RNA, 18 nt, Artificial Sequence
  Synthetic
aauauuauucgagcucag

SEQ ID NO: 570306 - RNA, 19 nt, Artificial Sequence
  Synthetic
aaauauuauucgagcucag

SEQ ID NO: 570307 - RNA, 20 nt, Artificial Sequence
  Synthetic
caaauauuauucgagcucag

SEQ ID NO: 570308 - RNA, 21 nt, Artificial Sequence
  Synthetic
gcaaauauuauucgagcucag

SEQ ID NO: 570309 - RNA, 22 nt, Artificial Sequence
  Synthetic
agcaaauauuauucgagcucag

SEQ ID NO: 570310 - RNA, 23 nt, Artificial Sequence
  Synthetic
aagcaaauauuauucgagcucag

SEQ ID NO: 570311 - RNA, 24 nt, Artificial Sequence
  Synthetic
aaagcaaauauuauucgagcucag

SEQ ID NO: 570312 - RNA, 18 nt, Artificial Sequence
  Synthetic
ugacagaacaaggcucag

SEQ ID NO: 570313 - RNA, 19 nt, Artificial Sequence
  Synthetic
uugacagaacaaggcucag

SEQ ID NO: 570314 - RNA, 20 nt, Artificial Sequence
  Synthetic
cuugacagaacaaggcucag

SEQ ID NO: 570315 - RNA, 21 nt, Artificial Sequence
  Synthetic
ucuugacagaacaaggcucag

SEQ ID NO: 570316 - RNA, 22 nt, Artificial Sequence
  Synthetic
uucuugacagaacaaggcucag

SEQ ID NO: 570317 - RNA, 23 nt, Artificial Sequence
  Synthetic
auucuugacagaacaaggcucag

SEQ ID NO: 570318 - RNA, 24 nt, Artificial Sequence
  Synthetic
gauucuugacagaacaaggcucag

SEQ ID NO: 570319 - RNA, 18 nt, Artificial Sequence
  Synthetic
aacaguuaggaggcucag

SEQ ID NO: 570320 - RNA, 19 nt, Artificial Sequence
  Synthetic
gaacaguuaggaggcucag

SEQ ID NO: 570321 - RNA, 20 nt, Artificial Sequence
  Synthetic
ggaacaguuaggaggcucag

SEQ ID NO: 570322 - RNA, 21 nt, Artificial Sequence
  Synthetic
uggaacaguuaggaggcucag

SEQ ID NO: 570323 - RNA, 22 nt, Artificial Sequence
  Synthetic
uuggaacaguuaggaggcucag

SEQ ID NO: 570324 - RNA, 23 nt, Artificial Sequence
  Synthetic
guuggaacaguuaggaggcucag

SEQ ID NO: 570325 - RNA, 24 nt, Artificial Sequence
  Synthetic
gguuggaacaguuaggaggcucag

SEQ ID NO: 570326 - RNA, 18 nt, Artificial Sequence
  Synthetic
acaguuuggagggcucag

SEQ ID NO: 570327 - RNA, 19 nt, Artificial Sequence
  Synthetic
uacaguuuggagggcucag

SEQ ID NO: 570328 - RNA, 20 nt, Artificial Sequence
  Synthetic
guacaguuuggagggcucag

SEQ ID NO: 570329 - RNA, 21 nt, Artificial Sequence
  Synthetic
gguacaguuuggagggcucag

SEQ ID NO: 570330 - RNA, 22 nt, Artificial Sequence
  Synthetic
ugguacaguuuggagggcucag

SEQ ID NO: 570331 - RNA, 23 nt, Artificial Sequence
  Synthetic
cugguacaguuuggagggcucag

SEQ ID NO: 570332 - RNA, 24 nt, Artificial Sequence
  Synthetic
ucugguacaguuuggagggcucag

SEQ ID NO: 570333 - RNA, 18 nt, Artificial Sequence
  Synthetic
gauuuggauagggcucag

SEQ ID NO: 570334 - RNA, 19 nt, Artificial Sequence
  Synthetic
ggauuuggauagggcucag

SEQ ID NO: 570335 - RNA, 20 nt, Artificial Sequence
  Synthetic
aggauuuggauagggcucag

SEQ ID NO: 570336 - RNA, 21 nt, Artificial Sequence
  Synthetic
aaggauuuggauagggcucag

SEQ ID NO: 570337 - RNA, 22 nt, Artificial Sequence
  Synthetic
caaggauuuggauagggcucag

SEQ ID NO: 570338 - RNA, 23 nt, Artificial Sequence
  Synthetic
ucaaggauuuggauagggcucag

SEQ ID NO: 570339 - RNA, 24 nt, Artificial Sequence
  Synthetic
gucaaggauuuggauagggcucag

SEQ ID NO: 570340 - RNA, 18 nt, Artificial Sequence
  Synthetic
gacuaacgucuggcucag

SEQ ID NO: 570341 - RNA, 19 nt, Artificial Sequence
  Synthetic
ugacuaacgucuggcucag

SEQ ID NO: 570342 - RNA, 20 nt, Artificial Sequence
  Synthetic
uugacuaacgucuggcucag

SEQ ID NO: 570343 - RNA, 21 nt, Artificial Sequence
  Synthetic
uuugacuaacgucuggcucag

SEQ ID NO: 570344 - RNA, 22 nt, Artificial Sequence
  Synthetic
auuugacuaacgucuggcucag

SEQ ID NO: 570345 - RNA, 23 nt, Artificial Sequence
  Synthetic
aauuugacuaacgucuggcucag

SEQ ID NO: 570346 - RNA, 24 nt, Artificial Sequence
  Synthetic
uaauuugacuaacgucuggcucag

SEQ ID NO: 570347 - RNA, 18 nt, Artificial Sequence
  Synthetic
auugugucauaugcucag

SEQ ID NO: 570348 - RNA, 19 nt, Artificial Sequence
  Synthetic
aauugugucauaugcucag

SEQ ID NO: 570349 - RNA, 20 nt, Artificial Sequence
  Synthetic
gaauugugucauaugcucag

SEQ ID NO: 570350 - RNA, 21 nt, Artificial Sequence
  Synthetic
ugaauugugucauaugcucag

SEQ ID NO: 570351 - RNA, 22 nt, Artificial Sequence
  Synthetic
augaauugugucauaugcucag

SEQ ID NO: 570352 - RNA, 23 nt, Artificial Sequence
  Synthetic
aaugaauugugucauaugcucag

SEQ ID NO: 570353 - RNA, 24 nt, Artificial Sequence
  Synthetic
caaugaauugugucauaugcucag

SEQ ID NO: 570354 - RNA, 18 nt, Artificial Sequence
  Synthetic
ggaagagagcuugcucag

SEQ ID NO: 570355 - RNA, 19 nt, Artificial Sequence
  Synthetic
gggaagagagcuugcucag

SEQ ID NO: 570356 - RNA, 20 nt, Artificial Sequence
  Synthetic
agggaagagagcuugcucag

SEQ ID NO: 570357 - RNA, 21 nt, Artificial Sequence
  Synthetic
cagggaagagagcuugcucag

SEQ ID NO: 570358 - RNA, 22 nt, Artificial Sequence
  Synthetic
gcagggaagagagcuugcucag

SEQ ID NO: 570359 - RNA, 23 nt, Artificial Sequence
  Synthetic
agcagggaagagagcuugcucag

SEQ ID NO: 570360 - RNA, 24 nt, Artificial Sequence
  Synthetic
cagcagggaagagagcuugcucag

SEQ ID NO: 570361 - RNA, 18 nt, Artificial Sequence
  Synthetic
cgauucccuuuugcucag

SEQ ID NO: 570362 - RNA, 19 nt, Artificial Sequence
  Synthetic
acgauucccuuuugcucag

SEQ ID NO: 570363 - RNA, 20 nt, Artificial Sequence
  Synthetic
aacgauucccuuuugcucag

SEQ ID NO: 570364 - RNA, 21 nt, Artificial Sequence
  Synthetic
gaacgauucccuuuugcucag

SEQ ID NO: 570365 - RNA, 22 nt, Artificial Sequence
  Synthetic
agaacgauucccuuuugcucag

SEQ ID NO: 570366 - RNA, 23 nt, Artificial Sequence
  Synthetic
cagaacgauucccuuuugcucag

SEQ ID NO: 570367 - RNA, 24 nt, Artificial Sequence
  Synthetic
gcagaacgauucccuuuugcucag

SEQ ID NO: 570368 - RNA, 18 nt, Artificial Sequence
  Synthetic
cauauuuuuacaucucag

SEQ ID NO: 570369 - RNA, 19 nt, Artificial Sequence
  Synthetic
acauauuuuuacaucucag

SEQ ID NO: 570370 - RNA, 20 nt, Artificial Sequence
  Synthetic
aacauauuuuuacaucucag

SEQ ID NO: 570371 - RNA, 21 nt, Artificial Sequence
  Synthetic
aaacauauuuuuacaucucag

SEQ ID NO: 570372 - RNA, 22 nt, Artificial Sequence
  Synthetic
uaaacauauuuuuacaucucag

SEQ ID NO: 570373 - RNA, 23 nt, Artificial Sequence
  Synthetic
uuaaacauauuuuuacaucucag

SEQ ID NO: 570374 - RNA, 24 nt, Artificial Sequence
  Synthetic
uuuaaacauauuuuuacaucucag

SEQ ID NO: 570375 - RNA, 18 nt, Artificial Sequence
  Synthetic
cuagccuacucaucucag

SEQ ID NO: 570376 - RNA, 19 nt, Artificial Sequence
  Synthetic
acuagccuacucaucucag

SEQ ID NO: 570377 - RNA, 20 nt, Artificial Sequence
  Synthetic
gacuagccuacucaucucag

SEQ ID NO: 570378 - RNA, 21 nt, Artificial Sequence
  Synthetic
ggacuagccuacucaucucag

SEQ ID NO: 570379 - RNA, 22 nt, Artificial Sequence
  Synthetic
uggacuagccuacucaucucag

SEQ ID NO: 570380 - RNA, 23 nt, Artificial Sequence
  Synthetic
cuggacuagccuacucaucucag

SEQ ID NO: 570381 - RNA, 24 nt, Artificial Sequence
  Synthetic
ucuggacuagccuacucaucucag

SEQ ID NO: 570382 - RNA, 18 nt, Artificial Sequence
  Synthetic
aaauagcucugaucucag

SEQ ID NO: 570383 - RNA, 19 nt, Artificial Sequence
  Synthetic
gaaauagcucugaucucag

SEQ ID NO: 570384 - RNA, 20 nt, Artificial Sequence
  Synthetic
agaaauagcucugaucucag

SEQ ID NO: 570385 - RNA, 21 nt, Artificial Sequence
  Synthetic
uagaaauagcucugaucucag

SEQ ID NO: 570386 - RNA, 22 nt, Artificial Sequence
  Synthetic
guagaaauagcucugaucucag

SEQ ID NO: 570387 - RNA, 23 nt, Artificial Sequence
  Synthetic
gguagaaauagcucugaucucag

SEQ ID NO: 570388 - RNA, 24 nt, Artificial Sequence
  Synthetic
agguagaaauagcucugaucucag

SEQ ID NO: 570389 - RNA, 18 nt, Artificial Sequence
  Synthetic
uuauugcauauaucucag

SEQ ID NO: 570390 - RNA, 19 nt, Artificial Sequence
  Synthetic
uuuauugcauauaucucag

SEQ ID NO: 570391 - RNA, 20 nt, Artificial Sequence
  Synthetic
uuuuauugcauauaucucag

SEQ ID NO: 570392 - RNA, 21 nt, Artificial Sequence
  Synthetic
uuuuuauugcauauaucucag

SEQ ID NO: 570393 - RNA, 22 nt, Artificial Sequence
  Synthetic
guuuuuauugcauauaucucag

SEQ ID NO: 570394 - RNA, 23 nt, Artificial Sequence
  Synthetic
uguuuuuauugcauauaucucag

SEQ ID NO: 570395 - RNA, 24 nt, Artificial Sequence
  Synthetic
guguuuuuauugcauauaucucag

SEQ ID NO: 570396 - RNA, 18 nt, Artificial Sequence
  Synthetic
cugucaguuguaucucag

SEQ ID NO: 570397 - RNA, 19 nt, Artificial Sequence
  Synthetic
ucugucaguuguaucucag

SEQ ID NO: 570398 - RNA, 20 nt, Artificial Sequence
  Synthetic
aucugucaguuguaucucag

SEQ ID NO: 570399 - RNA, 21 nt, Artificial Sequence
  Synthetic
uaucugucaguuguaucucag

SEQ ID NO: 570400 - RNA, 22 nt, Artificial Sequence
  Synthetic
auaucugucaguuguaucucag

SEQ ID NO: 570401 - RNA, 23 nt, Artificial Sequence
  Synthetic
uauaucugucaguuguaucucag

SEQ ID NO: 570402 - RNA, 24 nt, Artificial Sequence
  Synthetic
auauaucugucaguuguaucucag

SEQ ID NO: 570403 - RNA, 18 nt, Artificial Sequence
  Synthetic
cagccagccagcucucag

SEQ ID NO: 570404 - RNA, 19 nt, Artificial Sequence
  Synthetic
acagccagccagcucucag

SEQ ID NO: 570405 - RNA, 20 nt, Artificial Sequence
  Synthetic
cacagccagccagcucucag

SEQ ID NO: 570406 - RNA, 21 nt, Artificial Sequence
  Synthetic
ucacagccagccagcucucag

SEQ ID NO: 570407 - RNA, 22 nt, Artificial Sequence
  Synthetic
cucacagccagccagcucucag

SEQ ID NO: 570408 - RNA, 23 nt, Artificial Sequence
  Synthetic
gcucacagccagccagcucucag

SEQ ID NO: 570409 - RNA, 24 nt, Artificial Sequence
  Synthetic
agcucacagccagccagcucucag

SEQ ID NO: 570410 - RNA, 18 nt, Artificial Sequence
  Synthetic
gaugaaaguggcucucag

SEQ ID NO: 570411 - RNA, 19 nt, Artificial Sequence
  Synthetic
cgaugaaaguggcucucag

SEQ ID NO: 570412 - RNA, 20 nt, Artificial Sequence
  Synthetic
ccgaugaaaguggcucucag

SEQ ID NO: 570413 - RNA, 21 nt, Artificial Sequence
  Synthetic
gccgaugaaaguggcucucag

SEQ ID NO: 570414 - RNA, 22 nt, Artificial Sequence
  Synthetic
ugccgaugaaaguggcucucag

SEQ ID NO: 570415 - RNA, 23 nt, Artificial Sequence
  Synthetic
cugccgaugaaaguggcucucag

SEQ ID NO: 570416 - RNA, 24 nt, Artificial Sequence
  Synthetic
acugccgaugaaaguggcucucag

SEQ ID NO: 570417 - RNA, 18 nt, Artificial Sequence
  Synthetic
agggauaugcucucucag

SEQ ID NO: 570418 - RNA, 19 nt, Artificial Sequence
  Synthetic
aagggauaugcucucucag

SEQ ID NO: 570419 - RNA, 20 nt, Artificial Sequence
  Synthetic
gaagggauaugcucucucag

SEQ ID NO: 570420 - RNA, 21 nt, Artificial Sequence
  Synthetic
agaagggauaugcucucucag

SEQ ID NO: 570421 - RNA, 22 nt, Artificial Sequence
  Synthetic
gagaagggauaugcucucucag

SEQ ID NO: 570422 - RNA, 23 nt, Artificial Sequence
  Synthetic
agagaagggauaugcucucucag

SEQ ID NO: 570423 - RNA, 24 nt, Artificial Sequence
  Synthetic
gagagaagggauaugcucucucag

SEQ ID NO: 570424 - RNA, 18 nt, Artificial Sequence
  Synthetic
cuucagcuugagucucag

SEQ ID NO: 570425 - RNA, 19 nt, Artificial Sequence
  Synthetic
ccuucagcuugagucucag

SEQ ID NO: 570426 - RNA, 20 nt, Artificial Sequence
  Synthetic
cccuucagcuugagucucag

SEQ ID NO: 570427 - RNA, 21 nt, Artificial Sequence
  Synthetic
ucccuucagcuugagucucag

SEQ ID NO: 570428 - RNA, 22 nt, Artificial Sequence
  Synthetic
gucccuucagcuugagucucag

SEQ ID NO: 570429 - RNA, 23 nt, Artificial Sequence
  Synthetic
ugucccuucagcuugagucucag

SEQ ID NO: 570430 - RNA, 24 nt, Artificial Sequence
  Synthetic
augucccuucagcuugagucucag

SEQ ID NO: 570431 - RNA, 18 nt, Artificial Sequence
  Synthetic
ccuucucucuagucucag

SEQ ID NO: 570432 - RNA, 19 nt, Artificial Sequence
  Synthetic
uccuucucucuagucucag

SEQ ID NO: 570433 - RNA, 20 nt, Artificial Sequence
  Synthetic
auccuucucucuagucucag

SEQ ID NO: 570434 - RNA, 21 nt, Artificial Sequence
  Synthetic
cauccuucucucuagucucag

SEQ ID NO: 570435 - RNA, 22 nt, Artificial Sequence
  Synthetic
gcauccuucucucuagucucag

SEQ ID NO: 570436 - RNA, 23 nt, Artificial Sequence
  Synthetic
ugcauccuucucucuagucucag

SEQ ID NO: 570437 - RNA, 24 nt, Artificial Sequence
  Synthetic
uugcauccuucucucuagucucag

SEQ ID NO: 570438 - RNA, 18 nt, Artificial Sequence
  Synthetic
cuucucuucaggucucag

SEQ ID NO: 570439 - RNA, 19 nt, Artificial Sequence
  Synthetic
gcuucucuucaggucucag

SEQ ID NO: 570440 - RNA, 20 nt, Artificial Sequence
  Synthetic
ugcuucucuucaggucucag

SEQ ID NO: 570441 - RNA, 21 nt, Artificial Sequence
  Synthetic
cugcuucucuucaggucucag

SEQ ID NO: 570442 - RNA, 22 nt, Artificial Sequence
  Synthetic
ccugcuucucuucaggucucag

SEQ ID NO: 570443 - RNA, 23 nt, Artificial Sequence
  Synthetic
uccugcuucucuucaggucucag

SEQ ID NO: 570444 - RNA, 24 nt, Artificial Sequence
  Synthetic
cuccugcuucucuucaggucucag

SEQ ID NO: 570445 - RNA, 18 nt, Artificial Sequence
  Synthetic
uccauucccgggucucag

SEQ ID NO: 570446 - RNA, 19 nt, Artificial Sequence
  Synthetic
cuccauucccgggucucag

SEQ ID NO: 570447 - RNA, 20 nt, Artificial Sequence
  Synthetic
ccuccauucccgggucucag

SEQ ID NO: 570448 - RNA, 21 nt, Artificial Sequence
  Synthetic
gccuccauucccgggucucag

SEQ ID NO: 570449 - RNA, 22 nt, Artificial Sequence
  Synthetic
ggccuccauucccgggucucag

SEQ ID NO: 570450 - RNA, 23 nt, Artificial Sequence
  Synthetic
uggccuccauucccgggucucag

SEQ ID NO: 570451 - RNA, 24 nt, Artificial Sequence
  Synthetic
cuggccuccauucccgggucucag

SEQ ID NO: 570452 - RNA, 18 nt, Artificial Sequence
  Synthetic
ccacaaaaguggucucag

SEQ ID NO: 570453 - RNA, 19 nt, Artificial Sequence
  Synthetic
gccacaaaaguggucucag

SEQ ID NO: 570454 - RNA, 20 nt, Artificial Sequence
  Synthetic
ugccacaaaaguggucucag

SEQ ID NO: 570455 - RNA, 21 nt, Artificial Sequence
  Synthetic
augccacaaaaguggucucag

SEQ ID NO: 570456 - RNA, 22 nt, Artificial Sequence
  Synthetic
uaugccacaaaaguggucucag

SEQ ID NO: 570457 - RNA, 23 nt, Artificial Sequence
  Synthetic
guaugccacaaaaguggucucag

SEQ ID NO: 570458 - RNA, 24 nt, Artificial Sequence
  Synthetic
aguaugccacaaaaguggucucag

SEQ ID NO: 570459 - RNA, 18 nt, Artificial Sequence
  Synthetic
aggcagagguggucucag

SEQ ID NO: 570460 - RNA, 19 nt, Artificial Sequence
  Synthetic
caggcagagguggucucag

SEQ ID NO: 570461 - RNA, 20 nt, Artificial Sequence
  Synthetic
ccaggcagagguggucucag

SEQ ID NO: 570462 - RNA, 21 nt, Artificial Sequence
  Synthetic
uccaggcagagguggucucag

SEQ ID NO: 570463 - RNA, 22 nt, Artificial Sequence
  Synthetic
guccaggcagagguggucucag

SEQ ID NO: 570464 - RNA, 23 nt, Artificial Sequence
  Synthetic
aguccaggcagagguggucucag

SEQ ID NO: 570465 - RNA, 24 nt, Artificial Sequence
  Synthetic
aaguccaggcagagguggucucag

SEQ ID NO: 570466 - RNA, 18 nt, Artificial Sequence
  Synthetic
agacugagguggucucag

SEQ ID NO: 570467 - RNA, 19 nt, Artificial Sequence
  Synthetic
cagacugagguggucucag

SEQ ID NO: 570468 - RNA, 20 nt, Artificial Sequence
  Synthetic
ccagacugagguggucucag

SEQ ID NO: 570469 - RNA, 21 nt, Artificial Sequence
  Synthetic
uccagacugagguggucucag

SEQ ID NO: 570470 - RNA, 22 nt, Artificial Sequence
  Synthetic
guccagacugagguggucucag

SEQ ID NO: 570471 - RNA, 23 nt, Artificial Sequence
  Synthetic
aguccagacugagguggucucag

SEQ ID NO: 570472 - RNA, 24 nt, Artificial Sequence
  Synthetic
aaguccagacugagguggucucag

SEQ ID NO: 570473 - RNA, 18 nt, Artificial Sequence
  Synthetic
auuuauugaaugucucag

SEQ ID NO: 570474 - RNA, 19 nt, Artificial Sequence
  Synthetic
uauuuauugaaugucucag

SEQ ID NO: 570475 - RNA, 20 nt, Artificial Sequence
  Synthetic
uuauuuauugaaugucucag

SEQ ID NO: 570476 - RNA, 21 nt, Artificial Sequence
  Synthetic
auuauuuauugaaugucucag

SEQ ID NO: 570477 - RNA, 22 nt, Artificial Sequence
  Synthetic
aauuauuuauugaaugucucag

SEQ ID NO: 570478 - RNA, 23 nt, Artificial Sequence
  Synthetic
aaauuauuuauugaaugucucag

SEQ ID NO: 570479 - RNA, 24 nt, Artificial Sequence
  Synthetic
aaaauuauuuauugaaugucucag

SEQ ID NO: 570480 - RNA, 18 nt, Artificial Sequence
  Synthetic
cugucagcugugucucag

SEQ ID NO: 570481 - RNA, 19 nt, Artificial Sequence
  Synthetic
ucugucagcugugucucag

SEQ ID NO: 570482 - RNA, 20 nt, Artificial Sequence
  Synthetic
aucugucagcugugucucag

SEQ ID NO: 570483 - RNA, 21 nt, Artificial Sequence
  Synthetic
uaucugucagcugugucucag

SEQ ID NO: 570484 - RNA, 22 nt, Artificial Sequence
  Synthetic
auaucugucagcugugucucag

SEQ ID NO: 570485 - RNA, 23 nt, Artificial Sequence
  Synthetic
uauaucugucagcugugucucag

SEQ ID NO: 570486 - RNA, 24 nt, Artificial Sequence
  Synthetic
auauaucugucagcugugucucag

SEQ ID NO: 570487 - RNA, 18 nt, Artificial Sequence
  Synthetic
agacuugccuugucucag

SEQ ID NO: 570488 - RNA, 19 nt, Artificial Sequence
  Synthetic
cagacuugccuugucucag

SEQ ID NO: 570489 - RNA, 20 nt, Artificial Sequence
  Synthetic
acagacuugccuugucucag

SEQ ID NO: 570490 - RNA, 21 nt, Artificial Sequence
  Synthetic
aacagacuugccuugucucag

SEQ ID NO: 570491 - RNA, 22 nt, Artificial Sequence
  Synthetic
gaacagacuugccuugucucag

SEQ ID NO: 570492 - RNA, 23 nt, Artificial Sequence
  Synthetic
agaacagacuugccuugucucag

SEQ ID NO: 570493 - RNA, 24 nt, Artificial Sequence
  Synthetic
cagaacagacuugccuugucucag

SEQ ID NO: 570494 - RNA, 18 nt, Artificial Sequence
  Synthetic
ugacuugccuugucucag

SEQ ID NO: 570495 - RNA, 19 nt, Artificial Sequence
  Synthetic
gugacuugccuugucucag

SEQ ID NO: 570496 - RNA, 20 nt, Artificial Sequence
  Synthetic
agugacuugccuugucucag

SEQ ID NO: 570497 - RNA, 21 nt, Artificial Sequence
  Synthetic
aagugacuugccuugucucag

SEQ ID NO: 570498 - RNA, 22 nt, Artificial Sequence
  Synthetic
gaagugacuugccuugucucag

SEQ ID NO: 570499 - RNA, 23 nt, Artificial Sequence
  Synthetic
agaagugacuugccuugucucag

SEQ ID NO: 570500 - RNA, 24 nt, Artificial Sequence
  Synthetic
cagaagugacuugccuugucucag

SEQ ID NO: 570501 - RNA, 18 nt, Artificial Sequence
  Synthetic
auaggccgaaauucucag

SEQ ID NO: 570502 - RNA, 19 nt, Artificial Sequence
  Synthetic
gauaggccgaaauucucag

SEQ ID NO: 570503 - RNA, 20 nt, Artificial Sequence
  Synthetic
ggauaggccgaaauucucag

SEQ ID NO: 570504 - RNA, 21 nt, Artificial Sequence
  Synthetic
uggauaggccgaaauucucag

SEQ ID NO: 570505 - RNA, 22 nt, Artificial Sequence
  Synthetic
uuggauaggccgaaauucucag

SEQ ID NO: 570506 - RNA, 23 nt, Artificial Sequence
  Synthetic
cuuggauaggccgaaauucucag

SEQ ID NO: 570507 - RNA, 24 nt, Artificial Sequence
  Synthetic
ucuuggauaggccgaaauucucag

SEQ ID NO: 570508 - RNA, 18 nt, Artificial Sequence
  Synthetic
agacaacaccauucucag

SEQ ID NO: 570509 - RNA, 19 nt, Artificial Sequence
  Synthetic
aagacaacaccauucucag

SEQ ID NO: 570510 - RNA, 20 nt, Artificial Sequence
  Synthetic
aaagacaacaccauucucag

SEQ ID NO: 570511 - RNA, 21 nt, Artificial Sequence
  Synthetic
aaaagacaacaccauucucag

SEQ ID NO: 570512 - RNA, 22 nt, Artificial Sequence
  Synthetic
gaaaagacaacaccauucucag

SEQ ID NO: 570513 - RNA, 23 nt, Artificial Sequence
  Synthetic
ugaaaagacaacaccauucucag

SEQ ID NO: 570514 - RNA, 24 nt, Artificial Sequence
  Synthetic
uugaaaagacaacaccauucucag

SEQ ID NO: 570515 - RNA, 18 nt, Artificial Sequence
  Synthetic
ucaaaagaucauucucag

SEQ ID NO: 570516 - RNA, 19 nt, Artificial Sequence
  Synthetic
cucaaaagaucauucucag

SEQ ID NO: 570517 - RNA, 20 nt, Artificial Sequence
  Synthetic
acucaaaagaucauucucag

SEQ ID NO: 570518 - RNA, 21 nt, Artificial Sequence
  Synthetic
aacucaaaagaucauucucag

SEQ ID NO: 570519 - RNA, 22 nt, Artificial Sequence
  Synthetic
aaacucaaaagaucauucucag

SEQ ID NO: 570520 - RNA, 23 nt, Artificial Sequence
  Synthetic
aaaacucaaaagaucauucucag

SEQ ID NO: 570521 - RNA, 24 nt, Artificial Sequence
  Synthetic
uaaaacucaaaagaucauucucag

SEQ ID NO: 570522 - RNA, 18 nt, Artificial Sequence
  Synthetic
ccagaacacuguucucag

SEQ ID NO: 570523 - RNA, 19 nt, Artificial Sequence
  Synthetic
uccagaacacuguucucag

SEQ ID NO: 570524 - RNA, 20 nt, Artificial Sequence
  Synthetic
uuccagaacacuguucucag

SEQ ID NO: 570525 - RNA, 21 nt, Artificial Sequence
  Synthetic
auuccagaacacuguucucag

SEQ ID NO: 570526 - RNA, 22 nt, Artificial Sequence
  Synthetic
uauuccagaacacuguucucag

SEQ ID NO: 570527 - RNA, 23 nt, Artificial Sequence
  Synthetic
uuauuccagaacacuguucucag

SEQ ID NO: 570528 - RNA, 24 nt, Artificial Sequence
  Synthetic
auuauuccagaacacuguucucag

SEQ ID NO: 570529 - RNA, 18 nt, Artificial Sequence
  Synthetic
uuauguagaauuucucag

SEQ ID NO: 570530 - RNA, 19 nt, Artificial Sequence
  Synthetic
uuuauguagaauuucucag

SEQ ID NO: 570531 - RNA, 20 nt, Artificial Sequence
  Synthetic
uuuuauguagaauuucucag

SEQ ID NO: 570532 - RNA, 21 nt, Artificial Sequence
  Synthetic
uuuuuauguagaauuucucag

SEQ ID NO: 570533 - RNA, 22 nt, Artificial Sequence
  Synthetic
auuuuuauguagaauuucucag

SEQ ID NO: 570534 - RNA, 23 nt, Artificial Sequence
  Synthetic
aauuuuuauguagaauuucucag

SEQ ID NO: 570535 - RNA, 24 nt, Artificial Sequence
  Synthetic
uaauuuuuauguagaauuucucag

SEQ ID NO: 570536 - RNA, 18 nt, Artificial Sequence
  Synthetic
cacuucugaauuucucag

SEQ ID NO: 570537 - RNA, 19 nt, Artificial Sequence
  Synthetic
acacuucugaauuucucag

SEQ ID NO: 570538 - RNA, 20 nt, Artificial Sequence
  Synthetic
cacacuucugaauuucucag

SEQ ID NO: 570539 - RNA, 21 nt, Artificial Sequence
  Synthetic
ucacacuucugaauuucucag

SEQ ID NO: 570540 - RNA, 22 nt, Artificial Sequence
  Synthetic
uucacacuucugaauuucucag

SEQ ID NO: 570541 - RNA, 23 nt, Artificial Sequence
  Synthetic
auucacacuucugaauuucucag

SEQ ID NO: 570542 - RNA, 24 nt, Artificial Sequence
  Synthetic
cauucacacuucugaauuucucag

SEQ ID NO: 570543 - RNA, 18 nt, Artificial Sequence
  Synthetic
gagccuaaguuuucucag

SEQ ID NO: 570544 - RNA, 19 nt, Artificial Sequence
  Synthetic
ugagccuaaguuuucucag

SEQ ID NO: 570545 - RNA, 20 nt, Artificial Sequence
  Synthetic
cugagccuaaguuuucucag

SEQ ID NO: 570546 - RNA, 21 nt, Artificial Sequence
  Synthetic
ucugagccuaaguuuucucag

SEQ ID NO: 570547 - RNA, 22 nt, Artificial Sequence
  Synthetic
cucugagccuaaguuuucucag

SEQ ID NO: 570548 - RNA, 23 nt, Artificial Sequence
  Synthetic
ucucugagccuaaguuuucucag

SEQ ID NO: 570549 - RNA, 24 nt, Artificial Sequence
  Synthetic
uucucugagccuaaguuuucucag

SEQ ID NO: 570550 - RNA, 18 nt, Artificial Sequence
  Synthetic
gcaucugagaaaagucag

SEQ ID NO: 570551 - RNA, 19 nt, Artificial Sequence
  Synthetic
ggcaucugagaaaagucag

SEQ ID NO: 570552 - RNA, 20 nt, Artificial Sequence
  Synthetic
aggcaucugagaaaagucag

SEQ ID NO: 570553 - RNA, 21 nt, Artificial Sequence
  Synthetic
caggcaucugagaaaagucag

SEQ ID NO: 570554 - RNA, 22 nt, Artificial Sequence
  Synthetic
ccaggcaucugagaaaagucag

SEQ ID NO: 570555 - RNA, 23 nt, Artificial Sequence
  Synthetic
cccaggcaucugagaaaagucag

SEQ ID NO: 570556 - RNA, 24 nt, Artificial Sequence
  Synthetic
ccccaggcaucugagaaaagucag

SEQ ID NO: 570557 - RNA, 18 nt, Artificial Sequence
  Synthetic
gagaaauacucaagucag

SEQ ID NO: 570558 - RNA, 19 nt, Artificial Sequence
  Synthetic
ggagaaauacucaagucag

SEQ ID NO: 570559 - RNA, 20 nt, Artificial Sequence
  Synthetic
uggagaaauacucaagucag

SEQ ID NO: 570560 - RNA, 21 nt, Artificial Sequence
  Synthetic
cuggagaaauacucaagucag

SEQ ID NO: 570561 - RNA, 22 nt, Artificial Sequence
  Synthetic
ucuggagaaauacucaagucag

SEQ ID NO: 570562 - RNA, 23 nt, Artificial Sequence
  Synthetic
aucuggagaaauacucaagucag

SEQ ID NO: 570563 - RNA, 24 nt, Artificial Sequence
  Synthetic
uaucuggagaaauacucaagucag

SEQ ID NO: 570564 - RNA, 18 nt, Artificial Sequence
  Synthetic
uuauaagaaggaagucag

SEQ ID NO: 570565 - RNA, 19 nt, Artificial Sequence
  Synthetic
auuauaagaaggaagucag

SEQ ID NO: 570566 - RNA, 20 nt, Artificial Sequence
  Synthetic
cauuauaagaaggaagucag

SEQ ID NO: 570567 - RNA, 21 nt, Artificial Sequence
  Synthetic
ucauuauaagaaggaagucag

SEQ ID NO: 570568 - RNA, 22 nt, Artificial Sequence
  Synthetic
aucauuauaagaaggaagucag

SEQ ID NO: 570569 - RNA, 23 nt, Artificial Sequence
  Synthetic
gaucauuauaagaaggaagucag

SEQ ID NO: 570570 - RNA, 24 nt, Artificial Sequence
  Synthetic
agaucauuauaagaaggaagucag

SEQ ID NO: 570571 - RNA, 18 nt, Artificial Sequence
  Synthetic
caccaagagggaagucag

SEQ ID NO: 570572 - RNA, 19 nt, Artificial Sequence
  Synthetic
ucaccaagagggaagucag

SEQ ID NO: 570573 - RNA, 20 nt, Artificial Sequence
  Synthetic
gucaccaagagggaagucag

SEQ ID NO: 570574 - RNA, 21 nt, Artificial Sequence
  Synthetic
ugucaccaagagggaagucag

SEQ ID NO: 570575 - RNA, 22 nt, Artificial Sequence
  Synthetic
uugucaccaagagggaagucag

SEQ ID NO: 570576 - RNA, 23 nt, Artificial Sequence
  Synthetic
uuugucaccaagagggaagucag

SEQ ID NO: 570577 - RNA, 24 nt, Artificial Sequence
  Synthetic
uuuugucaccaagagggaagucag

SEQ ID NO: 570578 - RNA, 18 nt, Artificial Sequence
  Synthetic
aaacaccaaauaagucag

SEQ ID NO: 570579 - RNA, 19 nt, Artificial Sequence
  Synthetic
aaaacaccaaauaagucag

SEQ ID NO: 570580 - RNA, 20 nt, Artificial Sequence
  Synthetic
gaaaacaccaaauaagucag

SEQ ID NO: 570581 - RNA, 21 nt, Artificial Sequence
  Synthetic
agaaaacaccaaauaagucag

SEQ ID NO: 570582 - RNA, 22 nt, Artificial Sequence
  Synthetic
aagaaaacaccaaauaagucag

SEQ ID NO: 570583 - RNA, 23 nt, Artificial Sequence
  Synthetic
caagaaaacaccaaauaagucag

SEQ ID NO: 570584 - RNA, 24 nt, Artificial Sequence
  Synthetic
gcaagaaaacaccaaauaagucag

SEQ ID NO: 570585 - RNA, 18 nt, Artificial Sequence
  Synthetic
guaaguggcauaagucag

SEQ ID NO: 570586 - RNA, 19 nt, Artificial Sequence
  Synthetic
aguaaguggcauaagucag

SEQ ID NO: 570587 - RNA, 20 nt, Artificial Sequence
  Synthetic
aaguaaguggcauaagucag

SEQ ID NO: 570588 - RNA, 21 nt, Artificial Sequence
  Synthetic
gaaguaaguggcauaagucag

SEQ ID NO: 570589 - RNA, 22 nt, Artificial Sequence
  Synthetic
ugaaguaaguggcauaagucag

SEQ ID NO: 570590 - RNA, 23 nt, Artificial Sequence
  Synthetic
uugaaguaaguggcauaagucag

SEQ ID NO: 570591 - RNA, 24 nt, Artificial Sequence
  Synthetic
auugaaguaaguggcauaagucag

SEQ ID NO: 570592 - RNA, 18 nt, Artificial Sequence
  Synthetic
uugcagcuuuuaagucag

SEQ ID NO: 570593 - RNA, 19 nt, Artificial Sequence
  Synthetic
uuugcagcuuuuaagucag

SEQ ID NO: 570594 - RNA, 20 nt, Artificial Sequence
  Synthetic
uuuugcagcuuuuaagucag

SEQ ID NO: 570595 - RNA, 21 nt, Artificial Sequence
  Synthetic
auuuugcagcuuuuaagucag

SEQ ID NO: 570596 - RNA, 22 nt, Artificial Sequence
  Synthetic
cauuuugcagcuuuuaagucag

SEQ ID NO: 570597 - RNA, 23 nt, Artificial Sequence
  Synthetic
gcauuuugcagcuuuuaagucag

SEQ ID NO: 570598 - RNA, 24 nt, Artificial Sequence
  Synthetic
agcauuuugcagcuuuuaagucag

SEQ ID NO: 570599 - RNA, 18 nt, Artificial Sequence
  Synthetic
ggcagagguuacagucag

SEQ ID NO: 570600 - RNA, 19 nt, Artificial Sequence
  Synthetic
gggcagagguuacagucag

SEQ ID NO: 570601 - RNA, 20 nt, Artificial Sequence
  Synthetic
ggggcagagguuacagucag

SEQ ID NO: 570602 - RNA, 21 nt, Artificial Sequence
  Synthetic
gggggcagagguuacagucag

SEQ ID NO: 570603 - RNA, 22 nt, Artificial Sequence
  Synthetic
ugggggcagagguuacagucag

SEQ ID NO: 570604 - RNA, 23 nt, Artificial Sequence
  Synthetic
gugggggcagagguuacagucag

SEQ ID NO: 570605 - RNA, 24 nt, Artificial Sequence
  Synthetic
ggugggggcagagguuacagucag

SEQ ID NO: 570606 - RNA, 18 nt, Artificial Sequence
  Synthetic
augaucucgaagagucag

SEQ ID NO: 570607 - RNA, 19 nt, Artificial Sequence
  Synthetic
uaugaucucgaagagucag

SEQ ID NO: 570608 - RNA, 20 nt, Artificial Sequence
  Synthetic
uuaugaucucgaagagucag

SEQ ID NO: 570609 - RNA, 21 nt, Artificial Sequence
  Synthetic
cuuaugaucucgaagagucag

SEQ ID NO: 570610 - RNA, 22 nt, Artificial Sequence
  Synthetic
gcuuaugaucucgaagagucag

SEQ ID NO: 570611 - RNA, 23 nt, Artificial Sequence
  Synthetic
ugcuuaugaucucgaagagucag

SEQ ID NO: 570612 - RNA, 24 nt, Artificial Sequence
  Synthetic
uugcuuaugaucucgaagagucag

SEQ ID NO: 570613 - RNA, 18 nt, Artificial Sequence
  Synthetic
gccaacaugaagagucag

SEQ ID NO: 570614 - RNA, 19 nt, Artificial Sequence
  Synthetic
agccaacaugaagagucag

SEQ ID NO: 570615 - RNA, 20 nt, Artificial Sequence
  Synthetic
aagccaacaugaagagucag

SEQ ID NO: 570616 - RNA, 21 nt, Artificial Sequence
  Synthetic
aaagccaacaugaagagucag

SEQ ID NO: 570617 - RNA, 22 nt, Artificial Sequence
  Synthetic
aaaagccaacaugaagagucag

SEQ ID NO: 570618 - RNA, 23 nt, Artificial Sequence
  Synthetic
caaaagccaacaugaagagucag

SEQ ID NO: 570619 - RNA, 24 nt, Artificial Sequence
  Synthetic
ucaaaagccaacaugaagagucag

SEQ ID NO: 570620 - RNA, 18 nt, Artificial Sequence
  Synthetic
uauuuaaaugauagucag

SEQ ID NO: 570621 - RNA, 19 nt, Artificial Sequence
  Synthetic
uuauuuaaaugauagucag

SEQ ID NO: 570622 - RNA, 20 nt, Artificial Sequence
  Synthetic
auuauuuaaaugauagucag

SEQ ID NO: 570623 - RNA, 21 nt, Artificial Sequence
  Synthetic
cauuauuuaaaugauagucag

SEQ ID NO: 570624 - RNA, 22 nt, Artificial Sequence
  Synthetic
ucauuauuuaaaugauagucag

SEQ ID NO: 570625 - RNA, 23 nt, Artificial Sequence
  Synthetic
uucauuauuuaaaugauagucag

SEQ ID NO: 570626 - RNA, 24 nt, Artificial Sequence
  Synthetic
auucauuauuuaaaugauagucag

SEQ ID NO: 570627 - RNA, 18 nt, Artificial Sequence
  Synthetic
aguaacugauauagucag

SEQ ID NO: 570628 - RNA, 19 nt, Artificial Sequence
  Synthetic
uaguaacugauauagucag

SEQ ID NO: 570629 - RNA, 20 nt, Artificial Sequence
  Synthetic
uuaguaacugauauagucag

SEQ ID NO: 570630 - RNA, 21 nt, Artificial Sequence
  Synthetic
uuuaguaacugauauagucag

SEQ ID NO: 570631 - RNA, 22 nt, Artificial Sequence
  Synthetic
cuuuaguaacugauauagucag

SEQ ID NO: 570632 - RNA, 23 nt, Artificial Sequence
  Synthetic
ccuuuaguaacugauauagucag

SEQ ID NO: 570633 - RNA, 24 nt, Artificial Sequence
  Synthetic
cccuuuaguaacugauauagucag

SEQ ID NO: 570634 - RNA, 18 nt, Artificial Sequence
  Synthetic
ucaagggaguuuagucag

SEQ ID NO: 570635 - RNA, 19 nt, Artificial Sequence
  Synthetic
aucaagggaguuuagucag

SEQ ID NO: 570636 - RNA, 20 nt, Artificial Sequence
  Synthetic
caucaagggaguuuagucag

SEQ ID NO: 570637 - RNA, 21 nt, Artificial Sequence
  Synthetic
ucaucaagggaguuuagucag

SEQ ID NO: 570638 - RNA, 22 nt, Artificial Sequence
  Synthetic
aucaucaagggaguuuagucag

SEQ ID NO: 570639 - RNA, 23 nt, Artificial Sequence
  Synthetic
aaucaucaagggaguuuagucag

SEQ ID NO: 570640 - RNA, 24 nt, Artificial Sequence
  Synthetic
caaucaucaagggaguuuagucag

SEQ ID NO: 570641 - RNA, 18 nt, Artificial Sequence
  Synthetic
aacuaacauuuuagucag

SEQ ID NO: 570642 - RNA, 19 nt, Artificial Sequence
  Synthetic
aaacuaacauuuuagucag

SEQ ID NO: 570643 - RNA, 20 nt, Artificial Sequence
  Synthetic
aaaacuaacauuuuagucag

SEQ ID NO: 570644 - RNA, 21 nt, Artificial Sequence
  Synthetic
uaaaacuaacauuuuagucag

SEQ ID NO: 570645 - RNA, 22 nt, Artificial Sequence
  Synthetic
auaaaacuaacauuuuagucag

SEQ ID NO: 570646 - RNA, 23 nt, Artificial Sequence
  Synthetic
cauaaaacuaacauuuuagucag

SEQ ID NO: 570647 - RNA, 24 nt, Artificial Sequence
  Synthetic
acauaaaacuaacauuuuagucag

SEQ ID NO: 570648 - RNA, 18 nt, Artificial Sequence
  Synthetic
guauccagugggcgucag

SEQ ID NO: 570649 - RNA, 19 nt, Artificial Sequence
  Synthetic
aguauccagugggcgucag

SEQ ID NO: 570650 - RNA, 20 nt, Artificial Sequence
  Synthetic
caguauccagugggcgucag

SEQ ID NO: 570651 - RNA, 21 nt, Artificial Sequence
  Synthetic
ccaguauccagugggcgucag

SEQ ID NO: 570652 - RNA, 22 nt, Artificial Sequence
  Synthetic
cccaguauccagugggcgucag

SEQ ID NO: 570653 - RNA, 23 nt, Artificial Sequence
  Synthetic
ucccaguauccagugggcgucag

SEQ ID NO: 570654 - RNA, 24 nt, Artificial Sequence
  Synthetic
aucccaguauccagugggcgucag

SEQ ID NO: 570655 - RNA, 18 nt, Artificial Sequence
  Synthetic
aaaaacagccaaggucag

SEQ ID NO: 570656 - RNA, 19 nt, Artificial Sequence
  Synthetic
caaaaacagccaaggucag

SEQ ID NO: 570657 - RNA, 20 nt, Artificial Sequence
  Synthetic
acaaaaacagccaaggucag

SEQ ID NO: 570658 - RNA, 21 nt, Artificial Sequence
  Synthetic
aacaaaaacagccaaggucag

SEQ ID NO: 570659 - RNA, 22 nt, Artificial Sequence
  Synthetic
gaacaaaaacagccaaggucag

SEQ ID NO: 570660 - RNA, 23 nt, Artificial Sequence
  Synthetic
ggaacaaaaacagccaaggucag

SEQ ID NO: 570661 - RNA, 24 nt, Artificial Sequence
  Synthetic
gggaacaaaaacagccaaggucag

SEQ ID NO: 570662 - RNA, 18 nt, Artificial Sequence
  Synthetic
caaagcacagaaggucag

SEQ ID NO: 570663 - RNA, 19 nt, Artificial Sequence
  Synthetic
gcaaagcacagaaggucag

SEQ ID NO: 570664 - RNA, 20 nt, Artificial Sequence
  Synthetic
ugcaaagcacagaaggucag

SEQ ID NO: 570665 - RNA, 21 nt, Artificial Sequence
  Synthetic
cugcaaagcacagaaggucag

SEQ ID NO: 570666 - RNA, 22 nt, Artificial Sequence
  Synthetic
acugcaaagcacagaaggucag

SEQ ID NO: 570667 - RNA, 23 nt, Artificial Sequence
  Synthetic
uacugcaaagcacagaaggucag

SEQ ID NO: 570668 - RNA, 24 nt, Artificial Sequence
  Synthetic
cuacugcaaagcacagaaggucag

SEQ ID NO: 570669 - RNA, 18 nt, Artificial Sequence
  Synthetic
ccuauggagacaggucag

SEQ ID NO: 570670 - RNA, 19 nt, Artificial Sequence
  Synthetic
uccuauggagacaggucag

SEQ ID NO: 570671 - RNA, 20 nt, Artificial Sequence
  Synthetic
guccuauggagacaggucag

SEQ ID NO: 570672 - RNA, 21 nt, Artificial Sequence
  Synthetic
uguccuauggagacaggucag

SEQ ID NO: 570673 - RNA, 22 nt, Artificial Sequence
  Synthetic
auguccuauggagacaggucag

SEQ ID NO: 570674 - RNA, 23 nt, Artificial Sequence
  Synthetic
aauguccuauggagacaggucag

SEQ ID NO: 570675 - RNA, 24 nt, Artificial Sequence
  Synthetic
aaauguccuauggagacaggucag

SEQ ID NO: 570676 - RNA, 18 nt, Artificial Sequence
  Synthetic
gaagaacaggcaggucag

SEQ ID NO: 570677 - RNA, 19 nt, Artificial Sequence
  Synthetic
ugaagaacaggcaggucag

SEQ ID NO: 570678 - RNA, 20 nt, Artificial Sequence
  Synthetic
cugaagaacaggcaggucag

SEQ ID NO: 570679 - RNA, 21 nt, Artificial Sequence
  Synthetic
ccugaagaacaggcaggucag

SEQ ID NO: 570680 - RNA, 22 nt, Artificial Sequence
  Synthetic
accugaagaacaggcaggucag

SEQ ID NO: 570681 - RNA, 23 nt, Artificial Sequence
  Synthetic
gaccugaagaacaggcaggucag

SEQ ID NO: 570682 - RNA, 24 nt, Artificial Sequence
  Synthetic
agaccugaagaacaggcaggucag

SEQ ID NO: 570683 - RNA, 18 nt, Artificial Sequence
  Synthetic
aacucccugaacggucag

SEQ ID NO: 570684 - RNA, 19 nt, Artificial Sequence
  Synthetic
gaacucccugaacggucag

SEQ ID NO: 570685 - RNA, 20 nt, Artificial Sequence
  Synthetic
agaacucccugaacggucag

SEQ ID NO: 570686 - RNA, 21 nt, Artificial Sequence
  Synthetic
aagaacucccugaacggucag

SEQ ID NO: 570687 - RNA, 22 nt, Artificial Sequence
  Synthetic
uaagaacucccugaacggucag

SEQ ID NO: 570688 - RNA, 23 nt, Artificial Sequence
  Synthetic
uuaagaacucccugaacggucag

SEQ ID NO: 570689 - RNA, 24 nt, Artificial Sequence
  Synthetic
cuuaagaacucccugaacggucag

SEQ ID NO: 570690 - RNA, 18 nt, Artificial Sequence
  Synthetic
cagagagcagagggucag

SEQ ID NO: 570691 - RNA, 19 nt, Artificial Sequence
  Synthetic
ccagagagcagagggucag

SEQ ID NO: 570692 - RNA, 20 nt, Artificial Sequence
  Synthetic
uccagagagcagagggucag

SEQ ID NO: 570693 - RNA, 21 nt, Artificial Sequence
  Synthetic
uuccagagagcagagggucag

SEQ ID NO: 570694 - RNA, 22 nt, Artificial Sequence
  Synthetic
guuccagagagcagagggucag

SEQ ID NO: 570695 - RNA, 23 nt, Artificial Sequence
  Synthetic
uguuccagagagcagagggucag

SEQ ID NO: 570696 - RNA, 24 nt, Artificial Sequence
  Synthetic
cuguuccagagagcagagggucag

SEQ ID NO: 570697 - RNA, 18 nt, Artificial Sequence
  Synthetic
agaaucacuaugggucag

SEQ ID NO: 570698 - RNA, 19 nt, Artificial Sequence
  Synthetic
gagaaucacuaugggucag

SEQ ID NO: 570699 - RNA, 20 nt, Artificial Sequence
  Synthetic
agagaaucacuaugggucag

SEQ ID NO: 570700 - RNA, 21 nt, Artificial Sequence
  Synthetic
uagagaaucacuaugggucag

SEQ ID NO: 570701 - RNA, 22 nt, Artificial Sequence
  Synthetic
auagagaaucacuaugggucag

SEQ ID NO: 570702 - RNA, 23 nt, Artificial Sequence
  Synthetic
aauagagaaucacuaugggucag

SEQ ID NO: 570703 - RNA, 24 nt, Artificial Sequence
  Synthetic
uaauagagaaucacuaugggucag

SEQ ID NO: 570704 - RNA, 18 nt, Artificial Sequence
  Synthetic
ggagugggaaguggucag

SEQ ID NO: 570705 - RNA, 19 nt, Artificial Sequence
  Synthetic
uggagugggaaguggucag

SEQ ID NO: 570706 - RNA, 20 nt, Artificial Sequence
  Synthetic
cuggagugggaaguggucag

SEQ ID NO: 570707 - RNA, 21 nt, Artificial Sequence
  Synthetic
acuggagugggaaguggucag

SEQ ID NO: 570708 - RNA, 22 nt, Artificial Sequence
  Synthetic
aacuggagugggaaguggucag

SEQ ID NO: 570709 - RNA, 23 nt, Artificial Sequence
  Synthetic
uaacuggagugggaaguggucag

SEQ ID NO: 570710 - RNA, 24 nt, Artificial Sequence
  Synthetic
guaacuggagugggaaguggucag

SEQ ID NO: 570711 - RNA, 18 nt, Artificial Sequence
  Synthetic
uuaauacgcuaaugucag

SEQ ID NO: 570712 - RNA, 19 nt, Artificial Sequence
  Synthetic
uuuaauacgcuaaugucag

SEQ ID NO: 570713 - RNA, 20 nt, Artificial Sequence
  Synthetic
uuuuaauacgcuaaugucag

SEQ ID NO: 570714 - RNA, 21 nt, Artificial Sequence
  Synthetic
uuuuuaauacgcuaaugucag

SEQ ID NO: 570715 - RNA, 22 nt, Artificial Sequence
  Synthetic
cuuuuuaauacgcuaaugucag

SEQ ID NO: 570716 - RNA, 23 nt, Artificial Sequence
  Synthetic
ucuuuuuaauacgcuaaugucag

SEQ ID NO: 570717 - RNA, 24 nt, Artificial Sequence
  Synthetic
aucuuuuuaauacgcuaaugucag

SEQ ID NO: 570718 - RNA, 18 nt, Artificial Sequence
  Synthetic
ugaauucaaacaugucag

SEQ ID NO: 570719 - RNA, 19 nt, Artificial Sequence
  Synthetic
augaauucaaacaugucag

SEQ ID NO: 570720 - RNA, 20 nt, Artificial Sequence
  Synthetic
aaugaauucaaacaugucag

SEQ ID NO: 570721 - RNA, 21 nt, Artificial Sequence
  Synthetic
aaaugaauucaaacaugucag

SEQ ID NO: 570722 - RNA, 22 nt, Artificial Sequence
  Synthetic
aaaaugaauucaaacaugucag

SEQ ID NO: 570723 - RNA, 23 nt, Artificial Sequence
  Synthetic
uaaaaugaauucaaacaugucag

SEQ ID NO: 570724 - RNA, 24 nt, Artificial Sequence
  Synthetic
uuaaaaugaauucaaacaugucag

SEQ ID NO: 570725 - RNA, 18 nt, Artificial Sequence
  Synthetic
ucuccauuuagaugucag

SEQ ID NO: 570726 - RNA, 19 nt, Artificial Sequence
  Synthetic
gucuccauuuagaugucag

SEQ ID NO: 570727 - RNA, 20 nt, Artificial Sequence
  Synthetic
ggucuccauuuagaugucag

SEQ ID NO: 570728 - RNA, 21 nt, Artificial Sequence
  Synthetic
aggucuccauuuagaugucag

SEQ ID NO: 570729 - RNA, 22 nt, Artificial Sequence
  Synthetic
uaggucuccauuuagaugucag

SEQ ID NO: 570730 - RNA, 23 nt, Artificial Sequence
  Synthetic
uuaggucuccauuuagaugucag

SEQ ID NO: 570731 - RNA, 24 nt, Artificial Sequence
  Synthetic
cuuaggucuccauuuagaugucag

SEQ ID NO: 570732 - RNA, 18 nt, Artificial Sequence
  Synthetic
gauaggaguguaugucag

SEQ ID NO: 570733 - RNA, 19 nt, Artificial Sequence
  Synthetic
ggauaggaguguaugucag

SEQ ID NO: 570734 - RNA, 20 nt, Artificial Sequence
  Synthetic
uggauaggaguguaugucag

SEQ ID NO: 570735 - RNA, 21 nt, Artificial Sequence
  Synthetic
auggauaggaguguaugucag

SEQ ID NO: 570736 - RNA, 22 nt, Artificial Sequence
  Synthetic
aauggauaggaguguaugucag

SEQ ID NO: 570737 - RNA, 23 nt, Artificial Sequence
  Synthetic
aaauggauaggaguguaugucag

SEQ ID NO: 570738 - RNA, 24 nt, Artificial Sequence
  Synthetic
uaaauggauaggaguguaugucag

SEQ ID NO: 570739 - RNA, 18 nt, Artificial Sequence
  Synthetic
caucgcaggagcugucag

SEQ ID NO: 570740 - RNA, 19 nt, Artificial Sequence
  Synthetic
ucaucgcaggagcugucag

SEQ ID NO: 570741 - RNA, 20 nt, Artificial Sequence
  Synthetic
cucaucgcaggagcugucag

SEQ ID NO: 570742 - RNA, 21 nt, Artificial Sequence
  Synthetic
ccucaucgcaggagcugucag

SEQ ID NO: 570743 - RNA, 22 nt, Artificial Sequence
  Synthetic
accucaucgcaggagcugucag

SEQ ID NO: 570744 - RNA, 23 nt, Artificial Sequence
  Synthetic
caccucaucgcaggagcugucag

SEQ ID NO: 570745 - RNA, 24 nt, Artificial Sequence
  Synthetic
gcaccucaucgcaggagcugucag

SEQ ID NO: 570746 - RNA, 18 nt, Artificial Sequence
  Synthetic
gguagacauaagugucag

SEQ ID NO: 570747 - RNA, 19 nt, Artificial Sequence
  Synthetic
ugguagacauaagugucag

SEQ ID NO: 570748 - RNA, 20 nt, Artificial Sequence
  Synthetic
augguagacauaagugucag

SEQ ID NO: 570749 - RNA, 21 nt, Artificial Sequence
  Synthetic
aaugguagacauaagugucag

SEQ ID NO: 570750 - RNA, 22 nt, Artificial Sequence
  Synthetic
gaaugguagacauaagugucag

SEQ ID NO: 570751 - RNA, 23 nt, Artificial Sequence
  Synthetic
agaaugguagacauaagugucag

SEQ ID NO: 570752 - RNA, 24 nt, Artificial Sequence
  Synthetic
cagaaugguagacauaagugucag

SEQ ID NO: 570753 - RNA, 18 nt, Artificial Sequence
  Synthetic
ggggaaagaaauugucag

SEQ ID NO: 570754 - RNA, 19 nt, Artificial Sequence
  Synthetic
gggggaaagaaauugucag

SEQ ID NO: 570755 - RNA, 20 nt, Artificial Sequence
  Synthetic
ggggggaaagaaauugucag

SEQ ID NO: 570756 - RNA, 21 nt, Artificial Sequence
  Synthetic
aggggggaaagaaauugucag

SEQ ID NO: 570757 - RNA, 22 nt, Artificial Sequence
  Synthetic
caggggggaaagaaauugucag

SEQ ID NO: 570758 - RNA, 23 nt, Artificial Sequence
  Synthetic
gcaggggggaaagaaauugucag

SEQ ID NO: 570759 - RNA, 24 nt, Artificial Sequence
  Synthetic
ugcaggggggaaagaaauugucag

SEQ ID NO: 570760 - RNA, 18 nt, Artificial Sequence
  Synthetic
gacuaagacaaaauucag

SEQ ID NO: 570761 - RNA, 19 nt, Artificial Sequence
  Synthetic
agacuaagacaaaauucag

SEQ ID NO: 570762 - RNA, 20 nt, Artificial Sequence
  Synthetic
uagacuaagacaaaauucag

SEQ ID NO: 570763 - RNA, 21 nt, Artificial Sequence
  Synthetic
auagacuaagacaaaauucag

SEQ ID NO: 570764 - RNA, 22 nt, Artificial Sequence
  Synthetic
cauagacuaagacaaaauucag

SEQ ID NO: 570765 - RNA, 23 nt, Artificial Sequence
  Synthetic
gcauagacuaagacaaaauucag

SEQ ID NO: 570766 - RNA, 24 nt, Artificial Sequence
  Synthetic
agcauagacuaagacaaaauucag

SEQ ID NO: 570767 - RNA, 18 nt, Artificial Sequence
  Synthetic
aaacucauacaaauucag

SEQ ID NO: 570768 - RNA, 19 nt, Artificial Sequence
  Synthetic
caaacucauacaaauucag

SEQ ID NO: 570769 - RNA, 20 nt, Artificial Sequence
  Synthetic
ccaaacucauacaaauucag

SEQ ID NO: 570770 - RNA, 21 nt, Artificial Sequence
  Synthetic
accaaacucauacaaauucag

SEQ ID NO: 570771 - RNA, 22 nt, Artificial Sequence
  Synthetic
uaccaaacucauacaaauucag

SEQ ID NO: 570772 - RNA, 23 nt, Artificial Sequence
  Synthetic
uuaccaaacucauacaaauucag

SEQ ID NO: 570773 - RNA, 24 nt, Artificial Sequence
  Synthetic
cuuaccaaacucauacaaauucag

SEQ ID NO: 570774 - RNA, 18 nt, Artificial Sequence
  Synthetic
accagccaggcaauucag

SEQ ID NO: 570775 - RNA, 19 nt, Artificial Sequence
  Synthetic
caccagccaggcaauucag

SEQ ID NO: 570776 - RNA, 20 nt, Artificial Sequence
  Synthetic
ucaccagccaggcaauucag

SEQ ID NO: 570777 - RNA, 21 nt, Artificial Sequence
  Synthetic
cucaccagccaggcaauucag

SEQ ID NO: 570778 - RNA, 22 nt, Artificial Sequence
  Synthetic
ccucaccagccaggcaauucag

SEQ ID NO: 570779 - RNA, 23 nt, Artificial Sequence
  Synthetic
uccucaccagccaggcaauucag

SEQ ID NO: 570780 - RNA, 24 nt, Artificial Sequence
  Synthetic
auccucaccagccaggcaauucag

SEQ ID NO: 570781 - RNA, 18 nt, Artificial Sequence
  Synthetic
guaucuuccucaauucag

SEQ ID NO: 570782 - RNA, 19 nt, Artificial Sequence
  Synthetic
gguaucuuccucaauucag

SEQ ID NO: 570783 - RNA, 20 nt, Artificial Sequence
  Synthetic
agguaucuuccucaauucag

SEQ ID NO: 570784 - RNA, 21 nt, Artificial Sequence
  Synthetic
cagguaucuuccucaauucag

SEQ ID NO: 570785 - RNA, 22 nt, Artificial Sequence
  Synthetic
ucagguaucuuccucaauucag

SEQ ID NO: 570786 - RNA, 23 nt, Artificial Sequence
  Synthetic
aucagguaucuuccucaauucag

SEQ ID NO: 570787 - RNA, 24 nt, Artificial Sequence
  Synthetic
aaucagguaucuuccucaauucag

SEQ ID NO: 570788 - RNA, 18 nt, Artificial Sequence
  Synthetic
uaacaacuaagaauucag

SEQ ID NO: 570789 - RNA, 19 nt, Artificial Sequence
  Synthetic
uuaacaacuaagaauucag

SEQ ID NO: 570790 - RNA, 20 nt, Artificial Sequence
  Synthetic
cuuaacaacuaagaauucag

SEQ ID NO: 570791 - RNA, 21 nt, Artificial Sequence
  Synthetic
ucuuaacaacuaagaauucag

SEQ ID NO: 570792 - RNA, 22 nt, Artificial Sequence
  Synthetic
cucuuaacaacuaagaauucag

SEQ ID NO: 570793 - RNA, 23 nt, Artificial Sequence
  Synthetic
gcucuuaacaacuaagaauucag

SEQ ID NO: 570794 - RNA, 24 nt, Artificial Sequence
  Synthetic
ugcucuuaacaacuaagaauucag

SEQ ID NO: 570795 - RNA, 18 nt, Artificial Sequence
  Synthetic
uuauaaaauugaauucag

SEQ ID NO: 570796 - RNA, 19 nt, Artificial Sequence
  Synthetic
uuuauaaaauugaauucag

SEQ ID NO: 570797 - RNA, 20 nt, Artificial Sequence
  Synthetic
guuuauaaaauugaauucag

SEQ ID NO: 570798 - RNA, 21 nt, Artificial Sequence
  Synthetic
uguuuauaaaauugaauucag

SEQ ID NO: 570799 - RNA, 22 nt, Artificial Sequence
  Synthetic
auguuuauaaaauugaauucag

SEQ ID NO: 570800 - RNA, 23 nt, Artificial Sequence
  Synthetic
cauguuuauaaaauugaauucag

SEQ ID NO: 570801 - RNA, 24 nt, Artificial Sequence
  Synthetic
acauguuuauaaaauugaauucag

SEQ ID NO: 570802 - RNA, 18 nt, Artificial Sequence
  Synthetic
gagagaagcauaauucag

SEQ ID NO: 570803 - RNA, 19 nt, Artificial Sequence
  Synthetic
agagagaagcauaauucag

SEQ ID NO: 570804 - RNA, 20 nt, Artificial Sequence
  Synthetic
gagagagaagcauaauucag

SEQ ID NO: 570805 - RNA, 21 nt, Artificial Sequence
  Synthetic
ugagagagaagcauaauucag

SEQ ID NO: 570806 - RNA, 22 nt, Artificial Sequence
  Synthetic
uugagagagaagcauaauucag

SEQ ID NO: 570807 - RNA, 23 nt, Artificial Sequence
  Synthetic
guugagagagaagcauaauucag

SEQ ID NO: 570808 - RNA, 24 nt, Artificial Sequence
  Synthetic
uguugagagagaagcauaauucag

SEQ ID NO: 570809 - RNA, 18 nt, Artificial Sequence
  Synthetic
accauaauguagauucag

SEQ ID NO: 570810 - RNA, 19 nt, Artificial Sequence
  Synthetic
caccauaauguagauucag

SEQ ID NO: 570811 - RNA, 20 nt, Artificial Sequence
  Synthetic
ucaccauaauguagauucag

SEQ ID NO: 570812 - RNA, 21 nt, Artificial Sequence
  Synthetic
cucaccauaauguagauucag

SEQ ID NO: 570813 - RNA, 22 nt, Artificial Sequence
  Synthetic
acucaccauaauguagauucag

SEQ ID NO: 570814 - RNA, 23 nt, Artificial Sequence
  Synthetic
aacucaccauaauguagauucag

SEQ ID NO: 570815 - RNA, 24 nt, Artificial Sequence
  Synthetic
caacucaccauaauguagauucag

SEQ ID NO: 570816 - RNA, 18 nt, Artificial Sequence
  Synthetic
auauaugucaugauucag

SEQ ID NO: 570817 - RNA, 19 nt, Artificial Sequence
  Synthetic
uauauaugucaugauucag

SEQ ID NO: 570818 - RNA, 20 nt, Artificial Sequence
  Synthetic
auauauaugucaugauucag

SEQ ID NO: 570819 - RNA, 21 nt, Artificial Sequence
  Synthetic
uauauauaugucaugauucag

SEQ ID NO: 570820 - RNA, 22 nt, Artificial Sequence
  Synthetic
auauauauaugucaugauucag

SEQ ID NO: 570821 - RNA, 23 nt, Artificial Sequence
  Synthetic
uauauauauaugucaugauucag

SEQ ID NO: 570822 - RNA, 24 nt, Artificial Sequence
  Synthetic
auauauauauaugucaugauucag

SEQ ID NO: 570823 - RNA, 18 nt, Artificial Sequence
  Synthetic
uucacauuaucuauucag

SEQ ID NO: 570824 - RNA, 19 nt, Artificial Sequence
  Synthetic
uuucacauuaucuauucag

SEQ ID NO: 570825 - RNA, 20 nt, Artificial Sequence
  Synthetic
auuucacauuaucuauucag

SEQ ID NO: 570826 - RNA, 21 nt, Artificial Sequence
  Synthetic
cauuucacauuaucuauucag

SEQ ID NO: 570827 - RNA, 22 nt, Artificial Sequence
  Synthetic
acauuucacauuaucuauucag

SEQ ID NO: 570828 - RNA, 23 nt, Artificial Sequence
  Synthetic
cacauuucacauuaucuauucag

SEQ ID NO: 570829 - RNA, 24 nt, Artificial Sequence
  Synthetic
ucacauuucacauuaucuauucag

SEQ ID NO: 570830 - RNA, 18 nt, Artificial Sequence
  Synthetic
ucaccuugcucuauucag

SEQ ID NO: 570831 - RNA, 19 nt, Artificial Sequence
  Synthetic
aucaccuugcucuauucag

SEQ ID NO: 570832 - RNA, 20 nt, Artificial Sequence
  Synthetic
aaucaccuugcucuauucag

SEQ ID NO: 570833 - RNA, 21 nt, Artificial Sequence
  Synthetic
caaucaccuugcucuauucag

SEQ ID NO: 570834 - RNA, 22 nt, Artificial Sequence
  Synthetic
acaaucaccuugcucuauucag

SEQ ID NO: 570835 - RNA, 23 nt, Artificial Sequence
  Synthetic
cacaaucaccuugcucuauucag

SEQ ID NO: 570836 - RNA, 24 nt, Artificial Sequence
  Synthetic
acacaaucaccuugcucuauucag

SEQ ID NO: 570837 - RNA, 18 nt, Artificial Sequence
  Synthetic
uagguauuacguauucag

SEQ ID NO: 570838 - RNA, 19 nt, Artificial Sequence
  Synthetic
cuagguauuacguauucag

SEQ ID NO: 570839 - RNA, 20 nt, Artificial Sequence
  Synthetic
ucuagguauuacguauucag

SEQ ID NO: 570840 - RNA, 21 nt, Artificial Sequence
  Synthetic
cucuagguauuacguauucag

SEQ ID NO: 570841 - RNA, 22 nt, Artificial Sequence
  Synthetic
ccucuagguauuacguauucag

SEQ ID NO: 570842 - RNA, 23 nt, Artificial Sequence
  Synthetic
uccucuagguauuacguauucag

SEQ ID NO: 570843 - RNA, 24 nt, Artificial Sequence
  Synthetic
cuccucuagguauuacguauucag

SEQ ID NO: 570844 - RNA, 18 nt, Artificial Sequence
  Synthetic
auuuuuugauaacuucag

SEQ ID NO: 570845 - RNA, 19 nt, Artificial Sequence
  Synthetic
uauuuuuugauaacuucag

SEQ ID NO: 570846 - RNA, 20 nt, Artificial Sequence
  Synthetic
uuauuuuuugauaacuucag

SEQ ID NO: 570847 - RNA, 21 nt, Artificial Sequence
  Synthetic
auuauuuuuugauaacuucag

SEQ ID NO: 570848 - RNA, 22 nt, Artificial Sequence
  Synthetic
cauuauuuuuugauaacuucag

SEQ ID NO: 570849 - RNA, 23 nt, Artificial Sequence
  Synthetic
ucauuauuuuuugauaacuucag

SEQ ID NO: 570850 - RNA, 24 nt, Artificial Sequence
  Synthetic
cucauuauuuuuugauaacuucag

SEQ ID NO: 570851 - RNA, 18 nt, Artificial Sequence
  Synthetic
uuuaucuaaguacuucag

SEQ ID NO: 570852 - RNA, 19 nt, Artificial Sequence
  Synthetic
auuuaucuaaguacuucag

SEQ ID NO: 570853 - RNA, 20 nt, Artificial Sequence
  Synthetic
aauuuaucuaaguacuucag

SEQ ID NO: 570854 - RNA, 21 nt, Artificial Sequence
  Synthetic
uaauuuaucuaaguacuucag

SEQ ID NO: 570855 - RNA, 22 nt, Artificial Sequence
  Synthetic
uuaauuuaucuaaguacuucag

SEQ ID NO: 570856 - RNA, 23 nt, Artificial Sequence
  Synthetic
guuaauuuaucuaaguacuucag

SEQ ID NO: 570857 - RNA, 24 nt, Artificial Sequence
  Synthetic
aguuaauuuaucuaaguacuucag

SEQ ID NO: 570858 - RNA, 18 nt, Artificial Sequence
  Synthetic
gaaugcuauuuacuucag

SEQ ID NO: 570859 - RNA, 19 nt, Artificial Sequence
  Synthetic
ugaaugcuauuuacuucag

SEQ ID NO: 570860 - RNA, 20 nt, Artificial Sequence
  Synthetic
augaaugcuauuuacuucag

SEQ ID NO: 570861 - RNA, 21 nt, Artificial Sequence
  Synthetic
gaugaaugcuauuuacuucag

SEQ ID NO: 570862 - RNA, 22 nt, Artificial Sequence
  Synthetic
agaugaaugcuauuuacuucag

SEQ ID NO: 570863 - RNA, 23 nt, Artificial Sequence
  Synthetic
aagaugaaugcuauuuacuucag

SEQ ID NO: 570864 - RNA, 24 nt, Artificial Sequence
  Synthetic
gaagaugaaugcuauuuacuucag

SEQ ID NO: 570865 - RNA, 18 nt, Artificial Sequence
  Synthetic
gauguuggugaccuucag

SEQ ID NO: 570866 - RNA, 19 nt, Artificial Sequence
  Synthetic
ugauguuggugaccuucag

SEQ ID NO: 570867 - RNA, 20 nt, Artificial Sequence
  Synthetic
uugauguuggugaccuucag

SEQ ID NO: 570868 - RNA, 21 nt, Artificial Sequence
  Synthetic
uuugauguuggugaccuucag

SEQ ID NO: 570869 - RNA, 22 nt, Artificial Sequence
  Synthetic
cuuugauguuggugaccuucag

SEQ ID NO: 570870 - RNA, 23 nt, Artificial Sequence
  Synthetic
ucuuugauguuggugaccuucag

SEQ ID NO: 570871 - RNA, 24 nt, Artificial Sequence
  Synthetic
gucuuugauguuggugaccuucag

SEQ ID NO: 570872 - RNA, 18 nt, Artificial Sequence
  Synthetic
agauuauacagccuucag

SEQ ID NO: 570873 - RNA, 19 nt, Artificial Sequence
  Synthetic
uagauuauacagccuucag

SEQ ID NO: 570874 - RNA, 20 nt, Artificial Sequence
  Synthetic
uuagauuauacagccuucag

SEQ ID NO: 570875 - RNA, 21 nt, Artificial Sequence
  Synthetic
cuuagauuauacagccuucag

SEQ ID NO: 570876 - RNA, 22 nt, Artificial Sequence
  Synthetic
ucuuagauuauacagccuucag

SEQ ID NO: 570877 - RNA, 23 nt, Artificial Sequence
  Synthetic
aucuuagauuauacagccuucag

SEQ ID NO: 570878 - RNA, 24 nt, Artificial Sequence
  Synthetic
uaucuuagauuauacagccuucag

SEQ ID NO: 570879 - RNA, 18 nt, Artificial Sequence
  Synthetic
gugugaugaaagcuucag

SEQ ID NO: 570880 - RNA, 19 nt, Artificial Sequence
  Synthetic
ugugugaugaaagcuucag

SEQ ID NO: 570881 - RNA, 20 nt, Artificial Sequence
  Synthetic
augugugaugaaagcuucag

SEQ ID NO: 570882 - RNA, 21 nt, Artificial Sequence
  Synthetic
caugugugaugaaagcuucag

SEQ ID NO: 570883 - RNA, 22 nt, Artificial Sequence
  Synthetic
acaugugugaugaaagcuucag

SEQ ID NO: 570884 - RNA, 23 nt, Artificial Sequence
  Synthetic
uacaugugugaugaaagcuucag

SEQ ID NO: 570885 - RNA, 24 nt, Artificial Sequence
  Synthetic
cuacaugugugaugaaagcuucag

SEQ ID NO: 570886 - RNA, 18 nt, Artificial Sequence
  Synthetic
uucggaccauugcuucag

SEQ ID NO: 570887 - RNA, 19 nt, Artificial Sequence
  Synthetic
guucggaccauugcuucag

SEQ ID NO: 570888 - RNA, 20 nt, Artificial Sequence
  Synthetic
aguucggaccauugcuucag

SEQ ID NO: 570889 - RNA, 21 nt, Artificial Sequence
  Synthetic
caguucggaccauugcuucag

SEQ ID NO: 570890 - RNA, 22 nt, Artificial Sequence
  Synthetic
acaguucggaccauugcuucag

SEQ ID NO: 570891 - RNA, 23 nt, Artificial Sequence
  Synthetic
uacaguucggaccauugcuucag

SEQ ID NO: 570892 - RNA, 24 nt, Artificial Sequence
  Synthetic
guacaguucggaccauugcuucag

SEQ ID NO: 570893 - RNA, 18 nt, Artificial Sequence
  Synthetic
cuggcugaauaucuucag

SEQ ID NO: 570894 - RNA, 19 nt, Artificial Sequence
  Synthetic
gcuggcugaauaucuucag

SEQ ID NO: 570895 - RNA, 20 nt, Artificial Sequence
  Synthetic
ggcuggcugaauaucuucag

SEQ ID NO: 570896 - RNA, 21 nt, Artificial Sequence
  Synthetic
gggcuggcugaauaucuucag

SEQ ID NO: 570897 - RNA, 22 nt, Artificial Sequence
  Synthetic
ugggcuggcugaauaucuucag

SEQ ID NO: 570898 - RNA, 23 nt, Artificial Sequence
  Synthetic
uugggcuggcugaauaucuucag

SEQ ID NO: 570899 - RNA, 24 nt, Artificial Sequence
  Synthetic
uuugggcuggcugaauaucuucag

SEQ ID NO: 570900 - RNA, 18 nt, Artificial Sequence
  Synthetic
cuuguucauguucuucag

SEQ ID NO: 570901 - RNA, 19 nt, Artificial Sequence
  Synthetic
ucuuguucauguucuucag

SEQ ID NO: 570902 - RNA, 20 nt, Artificial Sequence
  Synthetic
gucuuguucauguucuucag

SEQ ID NO: 570903 - RNA, 21 nt, Artificial Sequence
  Synthetic
ugucuuguucauguucuucag

SEQ ID NO: 570904 - RNA, 22 nt, Artificial Sequence
  Synthetic
uugucuuguucauguucuucag

SEQ ID NO: 570905 - RNA, 23 nt, Artificial Sequence
  Synthetic
cuugucuuguucauguucuucag

SEQ ID NO: 570906 - RNA, 24 nt, Artificial Sequence
  Synthetic
ccuugucuuguucauguucuucag

SEQ ID NO: 570907 - RNA, 18 nt, Artificial Sequence
  Synthetic
auggucucucuaguucag

SEQ ID NO: 570908 - RNA, 19 nt, Artificial Sequence
  Synthetic
gauggucucucuaguucag

SEQ ID NO: 570909 - RNA, 20 nt, Artificial Sequence
  Synthetic
ugauggucucucuaguucag

SEQ ID NO: 570910 - RNA, 21 nt, Artificial Sequence
  Synthetic
cugauggucucucuaguucag

SEQ ID NO: 570911 - RNA, 22 nt, Artificial Sequence
  Synthetic
ccugauggucucucuaguucag

SEQ ID NO: 570912 - RNA, 23 nt, Artificial Sequence
  Synthetic
uccugauggucucucuaguucag

SEQ ID NO: 570913 - RNA, 24 nt, Artificial Sequence
  Synthetic
cuccugauggucucucuaguucag

SEQ ID NO: 570914 - RNA, 18 nt, Artificial Sequence
  Synthetic
gauaccguguacguucag

SEQ ID NO: 570915 - RNA, 19 nt, Artificial Sequence
  Synthetic
ggauaccguguacguucag

SEQ ID NO: 570916 - RNA, 20 nt, Artificial Sequence
  Synthetic
uggauaccguguacguucag

SEQ ID NO: 570917 - RNA, 21 nt, Artificial Sequence
  Synthetic
cuggauaccguguacguucag

SEQ ID NO: 570918 - RNA, 22 nt, Artificial Sequence
  Synthetic
acuggauaccguguacguucag

SEQ ID NO: 570919 - RNA, 23 nt, Artificial Sequence
  Synthetic
gacuggauaccguguacguucag

SEQ ID NO: 570920 - RNA, 24 nt, Artificial Sequence
  Synthetic
agacuggauaccguguacguucag

SEQ ID NO: 570921 - RNA, 18 nt, Artificial Sequence
  Synthetic
ucuucucuucggguucag

SEQ ID NO: 570922 - RNA, 19 nt, Artificial Sequence
  Synthetic
gucuucucuucggguucag

SEQ ID NO: 570923 - RNA, 20 nt, Artificial Sequence
  Synthetic
ggucuucucuucggguucag

SEQ ID NO: 570924 - RNA, 21 nt, Artificial Sequence
  Synthetic
aggucuucucuucggguucag

SEQ ID NO: 570925 - RNA, 22 nt, Artificial Sequence
  Synthetic
caggucuucucuucggguucag

SEQ ID NO: 570926 - RNA, 23 nt, Artificial Sequence
  Synthetic
ucaggucuucucuucggguucag

SEQ ID NO: 570927 - RNA, 24 nt, Artificial Sequence
  Synthetic
aucaggucuucucuucggguucag

SEQ ID NO: 570928 - RNA, 18 nt, Artificial Sequence
  Synthetic
uucuuaguuuuuguucag

SEQ ID NO: 570929 - RNA, 19 nt, Artificial Sequence
  Synthetic
auucuuaguuuuuguucag

SEQ ID NO: 570930 - RNA, 20 nt, Artificial Sequence
  Synthetic
aauucuuaguuuuuguucag

SEQ ID NO: 570931 - RNA, 21 nt, Artificial Sequence
  Synthetic
aaauucuuaguuuuuguucag

SEQ ID NO: 570932 - RNA, 22 nt, Artificial Sequence
  Synthetic
gaaauucuuaguuuuuguucag

SEQ ID NO: 570933 - RNA, 23 nt, Artificial Sequence
  Synthetic
agaaauucuuaguuuuuguucag

SEQ ID NO: 570934 - RNA, 24 nt, Artificial Sequence
  Synthetic
aagaaauucuuaguuuuuguucag

SEQ ID NO: 570935 - RNA, 18 nt, Artificial Sequence
  Synthetic
uuauagagcaaauuucag

SEQ ID NO: 570936 - RNA, 19 nt, Artificial Sequence
  Synthetic
auuauagagcaaauuucag

SEQ ID NO: 570937 - RNA, 20 nt, Artificial Sequence
  Synthetic
aauuauagagcaaauuucag

SEQ ID NO: 570938 - RNA, 21 nt, Artificial Sequence
  Synthetic
caauuauagagcaaauuucag

SEQ ID NO: 570939 - RNA, 22 nt, Artificial Sequence
  Synthetic
acaauuauagagcaaauuucag

SEQ ID NO: 570940 - RNA, 23 nt, Artificial Sequence
  Synthetic
uacaauuauagagcaaauuucag

SEQ ID NO: 570941 - RNA, 24 nt, Artificial Sequence
  Synthetic
guacaauuauagagcaaauuucag

SEQ ID NO: 570942 - RNA, 18 nt, Artificial Sequence
  Synthetic
uauuugaggaaauuucag

SEQ ID NO: 570943 - RNA, 19 nt, Artificial Sequence
  Synthetic
auauuugaggaaauuucag

SEQ ID NO: 570944 - RNA, 20 nt, Artificial Sequence
  Synthetic
gauauuugaggaaauuucag

SEQ ID NO: 570945 - RNA, 21 nt, Artificial Sequence
  Synthetic
agauauuugaggaaauuucag

SEQ ID NO: 570946 - RNA, 22 nt, Artificial Sequence
  Synthetic
cagauauuugaggaaauuucag

SEQ ID NO: 570947 - RNA, 23 nt, Artificial Sequence
  Synthetic
acagauauuugaggaaauuucag

SEQ ID NO: 570948 - RNA, 24 nt, Artificial Sequence
  Synthetic
gacagauauuugaggaaauuucag

SEQ ID NO: 570949 - RNA, 18 nt, Artificial Sequence
  Synthetic
aggagaauacaauuucag

SEQ ID NO: 570950 - RNA, 19 nt, Artificial Sequence
  Synthetic
aaggagaauacaauuucag

SEQ ID NO: 570951 - RNA, 20 nt, Artificial Sequence
  Synthetic
aaaggagaauacaauuucag

SEQ ID NO: 570952 - RNA, 21 nt, Artificial Sequence
  Synthetic
uaaaggagaauacaauuucag

SEQ ID NO: 570953 - RNA, 22 nt, Artificial Sequence
  Synthetic
cuaaaggagaauacaauuucag

SEQ ID NO: 570954 - RNA, 23 nt, Artificial Sequence
  Synthetic
ucuaaaggagaauacaauuucag

SEQ ID NO: 570955 - RNA, 24 nt, Artificial Sequence
  Synthetic
aucuaaaggagaauacaauuucag

SEQ ID NO: 570956 - RNA, 18 nt, Artificial Sequence
  Synthetic
ugcugagagcaauuucag

SEQ ID NO: 570957 - RNA, 19 nt, Artificial Sequence
  Synthetic
gugcugagagcaauuucag

SEQ ID NO: 570958 - RNA, 20 nt, Artificial Sequence
  Synthetic
ugugcugagagcaauuucag

SEQ ID NO: 570959 - RNA, 21 nt, Artificial Sequence
  Synthetic
augugcugagagcaauuucag

SEQ ID NO: 570960 - RNA, 22 nt, Artificial Sequence
  Synthetic
gaugugcugagagcaauuucag

SEQ ID NO: 570961 - RNA, 23 nt, Artificial Sequence
  Synthetic
agaugugcugagagcaauuucag

SEQ ID NO: 570962 - RNA, 24 nt, Artificial Sequence
  Synthetic
uagaugugcugagagcaauuucag

SEQ ID NO: 570963 - RNA, 18 nt, Artificial Sequence
  Synthetic
aagaagguugaauuucag

SEQ ID NO: 570964 - RNA, 19 nt, Artificial Sequence
  Synthetic
aaagaagguugaauuucag

SEQ ID NO: 570965 - RNA, 20 nt, Artificial Sequence
  Synthetic
gaaagaagguugaauuucag

SEQ ID NO: 570966 - RNA, 21 nt, Artificial Sequence
  Synthetic
agaaagaagguugaauuucag

SEQ ID NO: 570967 - RNA, 22 nt, Artificial Sequence
  Synthetic
aagaaagaagguugaauuucag

SEQ ID NO: 570968 - RNA, 23 nt, Artificial Sequence
  Synthetic
gaagaaagaagguugaauuucag

SEQ ID NO: 570969 - RNA, 24 nt, Artificial Sequence
  Synthetic
ugaagaaagaagguugaauuucag

SEQ ID NO: 570970 - RNA, 18 nt, Artificial Sequence
  Synthetic
acuuacagcacauuucag

SEQ ID NO: 570971 - RNA, 19 nt, Artificial Sequence
  Synthetic
uacuuacagcacauuucag

SEQ ID NO: 570972 - RNA, 20 nt, Artificial Sequence
  Synthetic
auacuuacagcacauuucag

SEQ ID NO: 570973 - RNA, 21 nt, Artificial Sequence
  Synthetic
uauacuuacagcacauuucag

SEQ ID NO: 570974 - RNA, 22 nt, Artificial Sequence
  Synthetic
uuauacuuacagcacauuucag

SEQ ID NO: 570975 - RNA, 23 nt, Artificial Sequence
  Synthetic
uuuauacuuacagcacauuucag

SEQ ID NO: 570976 - RNA, 24 nt, Artificial Sequence
  Synthetic
uuuuauacuuacagcacauuucag

SEQ ID NO: 570977 - RNA, 18 nt, Artificial Sequence
  Synthetic
aauuacuuuacauuucag

SEQ ID NO: 570978 - RNA, 19 nt, Artificial Sequence
  Synthetic
aaauuacuuuacauuucag

SEQ ID NO: 570979 - RNA, 20 nt, Artificial Sequence
  Synthetic
aaaauuacuuuacauuucag

SEQ ID NO: 570980 - RNA, 21 nt, Artificial Sequence
  Synthetic
aaaaauuacuuuacauuucag

SEQ ID NO: 570981 - RNA, 22 nt, Artificial Sequence
  Synthetic
gaaaaauuacuuuacauuucag

SEQ ID NO: 570982 - RNA, 23 nt, Artificial Sequence
  Synthetic
ggaaaaauuacuuuacauuucag

SEQ ID NO: 570983 - RNA, 24 nt, Artificial Sequence
  Synthetic
aggaaaaauuacuuuacauuucag

SEQ ID NO: 570984 - RNA, 18 nt, Artificial Sequence
  Synthetic
ucagaauauggauuucag

SEQ ID NO: 570985 - RNA, 19 nt, Artificial Sequence
  Synthetic
uucagaauauggauuucag

SEQ ID NO: 570986 - RNA, 20 nt, Artificial Sequence
  Synthetic
cuucagaauauggauuucag

SEQ ID NO: 570987 - RNA, 21 nt, Artificial Sequence
  Synthetic
acuucagaauauggauuucag

SEQ ID NO: 570988 - RNA, 22 nt, Artificial Sequence
  Synthetic
uacuucagaauauggauuucag

SEQ ID NO: 570989 - RNA, 23 nt, Artificial Sequence
  Synthetic
guacuucagaauauggauuucag

SEQ ID NO: 570990 - RNA, 24 nt, Artificial Sequence
  Synthetic
uguacuucagaauauggauuucag

SEQ ID NO: 570991 - RNA, 18 nt, Artificial Sequence
  Synthetic
agcuucucuauauuucag

SEQ ID NO: 570992 - RNA, 19 nt, Artificial Sequence
  Synthetic
aagcuucucuauauuucag

SEQ ID NO: 570993 - RNA, 20 nt, Artificial Sequence
  Synthetic
aaagcuucucuauauuucag

SEQ ID NO: 570994 - RNA, 21 nt, Artificial Sequence
  Synthetic
uaaagcuucucuauauuucag

SEQ ID NO: 570995 - RNA, 22 nt, Artificial Sequence
  Synthetic
uuaaagcuucucuauauuucag

SEQ ID NO: 570996 - RNA, 23 nt, Artificial Sequence
  Synthetic
cuuaaagcuucucuauauuucag

SEQ ID NO: 570997 - RNA, 24 nt, Artificial Sequence
  Synthetic
ucuuaaagcuucucuauauuucag

SEQ ID NO: 570998 - RNA, 18 nt, Artificial Sequence
  Synthetic
ucacauaaauuauuucag

SEQ ID NO: 570999 - RNA, 19 nt, Artificial Sequence
  Synthetic
uucacauaaauuauuucag

SEQ ID NO: 571000 - RNA, 20 nt, Artificial Sequence
  Synthetic
uuucacauaaauuauuucag

SEQ ID NO: 571001 - RNA, 21 nt, Artificial Sequence
  Synthetic
cuuucacauaaauuauuucag

SEQ ID NO: 571002 - RNA, 22 nt, Artificial Sequence
  Synthetic
gcuuucacauaaauuauuucag

SEQ ID NO: 571003 - RNA, 23 nt, Artificial Sequence
  Synthetic
ugcuuucacauaaauuauuucag

SEQ ID NO: 571004 - RNA, 24 nt, Artificial Sequence
  Synthetic
uugcuuucacauaaauuauuucag

SEQ ID NO: 571005 - RNA, 18 nt, Artificial Sequence
  Synthetic
uuagcuuaguuauuucag

SEQ ID NO: 571006 - RNA, 19 nt, Artificial Sequence
  Synthetic
auuagcuuaguuauuucag

SEQ ID NO: 571007 - RNA, 20 nt, Artificial Sequence
  Synthetic
uauuagcuuaguuauuucag

SEQ ID NO: 571008 - RNA, 21 nt, Artificial Sequence
  Synthetic
cuauuagcuuaguuauuucag

SEQ ID NO: 571009 - RNA, 22 nt, Artificial Sequence
  Synthetic
ucuauuagcuuaguuauuucag

SEQ ID NO: 571010 - RNA, 23 nt, Artificial Sequence
  Synthetic
cucuauuagcuuaguuauuucag

SEQ ID NO: 571011 - RNA, 24 nt, Artificial Sequence
  Synthetic
ucucuauuagcuuaguuauuucag

SEQ ID NO: 571012 - RNA, 18 nt, Artificial Sequence
  Synthetic
ucaaaugaaagcuuucag

SEQ ID NO: 571013 - RNA, 19 nt, Artificial Sequence
  Synthetic
gucaaaugaaagcuuucag

SEQ ID NO: 571014 - RNA, 20 nt, Artificial Sequence
  Synthetic
ugucaaaugaaagcuuucag

SEQ ID NO: 571015 - RNA, 21 nt, Artificial Sequence
  Synthetic
uugucaaaugaaagcuuucag

SEQ ID NO: 571016 - RNA, 22 nt, Artificial Sequence
  Synthetic
cuugucaaaugaaagcuuucag

SEQ ID NO: 571017 - RNA, 23 nt, Artificial Sequence
  Synthetic
acuugucaaaugaaagcuuucag

SEQ ID NO: 571018 - RNA, 24 nt, Artificial Sequence
  Synthetic
uacuugucaaaugaaagcuuucag

SEQ ID NO: 571019 - RNA, 18 nt, Artificial Sequence
  Synthetic
ccacuaaauagcuuucag

SEQ ID NO: 571020 - RNA, 19 nt, Artificial Sequence
  Synthetic
accacuaaauagcuuucag

SEQ ID NO: 571021 - RNA, 20 nt, Artificial Sequence
  Synthetic
caccacuaaauagcuuucag

SEQ ID NO: 571022 - RNA, 21 nt, Artificial Sequence
  Synthetic
ccaccacuaaauagcuuucag

SEQ ID NO: 571023 - RNA, 22 nt, Artificial Sequence
  Synthetic
accaccacuaaauagcuuucag

SEQ ID NO: 571024 - RNA, 23 nt, Artificial Sequence
  Synthetic
caccaccacuaaauagcuuucag

SEQ ID NO: 571025 - RNA, 24 nt, Artificial Sequence
  Synthetic
acaccaccacuaaauagcuuucag

SEQ ID NO: 571026 - RNA, 18 nt, Artificial Sequence
  Synthetic
ugaucuagauucuuucag

SEQ ID NO: 571027 - RNA, 19 nt, Artificial Sequence
  Synthetic
cugaucuagauucuuucag

SEQ ID NO: 571028 - RNA, 20 nt, Artificial Sequence
  Synthetic
acugaucuagauucuuucag

SEQ ID NO: 571029 - RNA, 21 nt, Artificial Sequence
  Synthetic
cacugaucuagauucuuucag

SEQ ID NO: 571030 - RNA, 22 nt, Artificial Sequence
  Synthetic
gcacugaucuagauucuuucag

SEQ ID NO: 571031 - RNA, 23 nt, Artificial Sequence
  Synthetic
agcacugaucuagauucuuucag

SEQ ID NO: 571032 - RNA, 24 nt, Artificial Sequence
  Synthetic
aagcacugaucuagauucuuucag

SEQ ID NO: 571033 - RNA, 18 nt, Artificial Sequence
  Synthetic
uguuuagaauaguuucag

SEQ ID NO: 571034 - RNA, 19 nt, Artificial Sequence
  Synthetic
uuguuuagaauaguuucag

SEQ ID NO: 571035 - RNA, 20 nt, Artificial Sequence
  Synthetic
auuguuuagaauaguuucag

SEQ ID NO: 571036 - RNA, 21 nt, Artificial Sequence
  Synthetic
uauuguuuagaauaguuucag

SEQ ID NO: 571037 - RNA, 22 nt, Artificial Sequence
  Synthetic
cuauuguuuagaauaguuucag

SEQ ID NO: 571038 - RNA, 23 nt, Artificial Sequence
  Synthetic
ccuauuguuuagaauaguuucag

SEQ ID NO: 571039 - RNA, 24 nt, Artificial Sequence
  Synthetic
uccuauuguuuagaauaguuucag

SEQ ID NO: 571040 - RNA, 18 nt, Artificial Sequence
  Synthetic
cauagagaaguguuucag

SEQ ID NO: 571041 - RNA, 19 nt, Artificial Sequence
  Synthetic
ucauagagaaguguuucag

SEQ ID NO: 571042 - RNA, 20 nt, Artificial Sequence
  Synthetic
uucauagagaaguguuucag

SEQ ID NO: 571043 - RNA, 21 nt, Artificial Sequence
  Synthetic
uuucauagagaaguguuucag

SEQ ID NO: 571044 - RNA, 22 nt, Artificial Sequence
  Synthetic
auuucauagagaaguguuucag

SEQ ID NO: 571045 - RNA, 23 nt, Artificial Sequence
  Synthetic
gauuucauagagaaguguuucag

SEQ ID NO: 571046 - RNA, 24 nt, Artificial Sequence
  Synthetic
ugauuucauagagaaguguuucag

SEQ ID NO: 571047 - RNA, 18 nt, Artificial Sequence
  Synthetic
cagacauuaaauuuucag

SEQ ID NO: 571048 - RNA, 19 nt, Artificial Sequence
  Synthetic
ucagacauuaaauuuucag

SEQ ID NO: 571049 - RNA, 20 nt, Artificial Sequence
  Synthetic
aucagacauuaaauuuucag

SEQ ID NO: 571050 - RNA, 21 nt, Artificial Sequence
  Synthetic
aaucagacauuaaauuuucag

SEQ ID NO: 571051 - RNA, 22 nt, Artificial Sequence
  Synthetic
gaaucagacauuaaauuuucag

SEQ ID NO: 571052 - RNA, 23 nt, Artificial Sequence
  Synthetic
agaaucagacauuaaauuuucag

SEQ ID NO: 571053 - RNA, 24 nt, Artificial Sequence
  Synthetic
gagaaucagacauuaaauuuucag

SEQ ID NO: 571054 - RNA, 18 nt, Artificial Sequence
  Synthetic
gauuuuuuguauuuucag

SEQ ID NO: 571055 - RNA, 19 nt, Artificial Sequence
  Synthetic
ugauuuuuuguauuuucag

SEQ ID NO: 571056 - RNA, 20 nt, Artificial Sequence
  Synthetic
cugauuuuuuguauuuucag

SEQ ID NO: 571057 - RNA, 21 nt, Artificial Sequence
  Synthetic
gcugauuuuuuguauuuucag

SEQ ID NO: 571058 - RNA, 22 nt, Artificial Sequence
  Synthetic
ggcugauuuuuuguauuuucag

SEQ ID NO: 571059 - RNA, 23 nt, Artificial Sequence
  Synthetic
cggcugauuuuuuguauuuucag

SEQ ID NO: 571060 - RNA, 24 nt, Artificial Sequence
  Synthetic
ccggcugauuuuuuguauuuucag

SEQ ID NO: 571061 - RNA, 18 nt, Artificial Sequence
  Synthetic
uaauuuuuuuauuuucag

SEQ ID NO: 571062 - RNA, 19 nt, Artificial Sequence
  Synthetic
cuaauuuuuuuauuuucag

SEQ ID NO: 571063 - RNA, 20 nt, Artificial Sequence
  Synthetic
gcuaauuuuuuuauuuucag

SEQ ID NO: 571064 - RNA, 21 nt, Artificial Sequence
  Synthetic
agcuaauuuuuuuauuuucag

SEQ ID NO: 571065 - RNA, 22 nt, Artificial Sequence
  Synthetic
cagcuaauuuuuuuauuuucag

SEQ ID NO: 571066 - RNA, 23 nt, Artificial Sequence
  Synthetic
ccagcuaauuuuuuuauuuucag

SEQ ID NO: 571067 - RNA, 24 nt, Artificial Sequence
  Synthetic
accagcuaauuuuuuuauuuucag

SEQ ID NO: 571068 - RNA, 18 nt, Artificial Sequence
  Synthetic
aacacucauacuuuucag

SEQ ID NO: 571069 - RNA, 19 nt, Artificial Sequence
  Synthetic
caacacucauacuuuucag

SEQ ID NO: 571070 - RNA, 20 nt, Artificial Sequence
  Synthetic
gcaacacucauacuuuucag

SEQ ID NO: 571071 - RNA, 21 nt, Artificial Sequence
  Synthetic
agcaacacucauacuuuucag

SEQ ID NO: 571072 - RNA, 22 nt, Artificial Sequence
  Synthetic
gagcaacacucauacuuuucag

SEQ ID NO: 571073 - RNA, 23 nt, Artificial Sequence
  Synthetic
ggagcaacacucauacuuuucag

SEQ ID NO: 571074 - RNA, 24 nt, Artificial Sequence
  Synthetic
uggagcaacacucauacuuuucag

SEQ ID NO: 571075 - RNA, 18 nt, Artificial Sequence
  Synthetic
auuauguaaccuuuucag

SEQ ID NO: 571076 - RNA, 19 nt, Artificial Sequence
  Synthetic
cauuauguaaccuuuucag

SEQ ID NO: 571077 - RNA, 20 nt, Artificial Sequence
  Synthetic
ucauuauguaaccuuuucag

SEQ ID NO: 571078 - RNA, 21 nt, Artificial Sequence
  Synthetic
uucauuauguaaccuuuucag

SEQ ID NO: 571079 - RNA, 22 nt, Artificial Sequence
  Synthetic
auucauuauguaaccuuuucag

SEQ ID NO: 571080 - RNA, 23 nt, Artificial Sequence
  Synthetic
cauucauuauguaaccuuuucag

SEQ ID NO: 571081 - RNA, 24 nt, Artificial Sequence
  Synthetic
ucauucauuauguaaccuuuucag

SEQ ID NO: 571082 - RNA, 18 nt, Artificial Sequence
  Synthetic
cgacuaggaaguuuucag

SEQ ID NO: 571083 - RNA, 19 nt, Artificial Sequence
  Synthetic
acgacuaggaaguuuucag

SEQ ID NO: 571084 - RNA, 20 nt, Artificial Sequence
  Synthetic
gacgacuaggaaguuuucag

SEQ ID NO: 571085 - RNA, 21 nt, Artificial Sequence
  Synthetic
agacgacuaggaaguuuucag

SEQ ID NO: 571086 - RNA, 22 nt, Artificial Sequence
  Synthetic
aagacgacuaggaaguuuucag

SEQ ID NO: 571087 - RNA, 23 nt, Artificial Sequence
  Synthetic
aaagacgacuaggaaguuuucag

SEQ ID NO: 571088 - RNA, 24 nt, Artificial Sequence
  Synthetic
gaaagacgacuaggaaguuuucag

SEQ ID NO: 571089 - RNA, 18 nt, Artificial Sequence
  Synthetic
gcauaggagaguuuucag

SEQ ID NO: 571090 - RNA, 19 nt, Artificial Sequence
  Synthetic
agcauaggagaguuuucag

SEQ ID NO: 571091 - RNA, 20 nt, Artificial Sequence
  Synthetic
aagcauaggagaguuuucag

SEQ ID NO: 571092 - RNA, 21 nt, Artificial Sequence
  Synthetic
gaagcauaggagaguuuucag

SEQ ID NO: 571093 - RNA, 22 nt, Artificial Sequence
  Synthetic
ggaagcauaggagaguuuucag

SEQ ID NO: 571094 - RNA, 23 nt, Artificial Sequence
  Synthetic
aggaagcauaggagaguuuucag

SEQ ID NO: 571095 - RNA, 24 nt, Artificial Sequence
  Synthetic
uaggaagcauaggagaguuuucag

SEQ ID NO: 571096 - RNA, 18 nt, Artificial Sequence
  Synthetic
auuaauagaauuuuucag

SEQ ID NO: 571097 - RNA, 19 nt, Artificial Sequence
  Synthetic
aauuaauagaauuuuucag

SEQ ID NO: 571098 - RNA, 20 nt, Artificial Sequence
  Synthetic
aaauuaauagaauuuuucag

SEQ ID NO: 571099 - RNA, 21 nt, Artificial Sequence
  Synthetic
aaaauuaauagaauuuuucag

SEQ ID NO: 571100 - RNA, 22 nt, Artificial Sequence
  Synthetic
gaaaauuaauagaauuuuucag

SEQ ID NO: 571101 - RNA, 23 nt, Artificial Sequence
  Synthetic
ugaaaauuaauagaauuuuucag

SEQ ID NO: 571102 - RNA, 24 nt, Artificial Sequence
  Synthetic
cugaaaauuaauagaauuuuucag

SEQ ID NO: 571103 - RNA, 18 nt, Artificial Sequence
  Synthetic
acuuccaggguuuuucag

SEQ ID NO: 571104 - RNA, 19 nt, Artificial Sequence
  Synthetic
aacuuccaggguuuuucag

SEQ ID NO: 571105 - RNA, 20 nt, Artificial Sequence
  Synthetic
aaacuuccaggguuuuucag

SEQ ID NO: 571106 - RNA, 21 nt, Artificial Sequence
  Synthetic
caaacuuccaggguuuuucag

SEQ ID NO: 571107 - RNA, 22 nt, Artificial Sequence
  Synthetic
gcaaacuuccaggguuuuucag

SEQ ID NO: 571108 - RNA, 23 nt, Artificial Sequence
  Synthetic
ugcaaacuuccaggguuuuucag

SEQ ID NO: 571109 - RNA, 24 nt, Artificial Sequence
  Synthetic
cugcaaacuuccaggguuuuucag

SEQ ID NO: 571110 - RNA, 18 nt, Artificial Sequence
  Synthetic
aaaacaaacuuuuuucag

SEQ ID NO: 571111 - RNA, 19 nt, Artificial Sequence
  Synthetic
gaaaacaaacuuuuuucag

SEQ ID NO: 571112 - RNA, 20 nt, Artificial Sequence
  Synthetic
ugaaaacaaacuuuuuucag

SEQ ID NO: 571113 - RNA, 21 nt, Artificial Sequence
  Synthetic
uugaaaacaaacuuuuuucag

SEQ ID NO: 571114 - RNA, 22 nt, Artificial Sequence
  Synthetic
uuugaaaacaaacuuuuuucag

SEQ ID NO: 571115 - RNA, 23 nt, Artificial Sequence
  Synthetic
uuuugaaaacaaacuuuuuucag

SEQ ID NO: 571116 - RNA, 24 nt, Artificial Sequence
  Synthetic
auuuugaaaacaaacuuuuuucag

SEQ ID NO: 571117 - RNA, 18 nt, Artificial Sequence
  Synthetic
auguaggauuuuuuucag

SEQ ID NO: 571118 - RNA, 19 nt, Artificial Sequence
  Synthetic
uauguaggauuuuuuucag

SEQ ID NO: 571119 - RNA, 20 nt, Artificial Sequence
  Synthetic
auauguaggauuuuuuucag

SEQ ID NO: 571120 - RNA, 21 nt, Artificial Sequence
  Synthetic
cauauguaggauuuuuuucag

SEQ ID NO: 571121 - RNA, 22 nt, Artificial Sequence
  Synthetic
ccauauguaggauuuuuuucag

SEQ ID NO: 571122 - RNA, 23 nt, Artificial Sequence
  Synthetic
uccauauguaggauuuuuuucag

SEQ ID NO: 571123 - RNA, 24 nt, Artificial Sequence
  Synthetic
auccauauguaggauuuuuuucag

SEQ ID NO: 571124 - RNA, 18 nt, Artificial Sequence
  Synthetic
uauagaaaaaaaaaagag

SEQ ID NO: 571125 - RNA, 19 nt, Artificial Sequence
  Synthetic
guauagaaaaaaaaaagag

SEQ ID NO: 571126 - RNA, 20 nt, Artificial Sequence
  Synthetic
aguauagaaaaaaaaaagag

SEQ ID NO: 571127 - RNA, 21 nt, Artificial Sequence
  Synthetic
uaguauagaaaaaaaaaagag

SEQ ID NO: 571128 - RNA, 22 nt, Artificial Sequence
  Synthetic
auaguauagaaaaaaaaaagag

SEQ ID NO: 571129 - RNA, 23 nt, Artificial Sequence
  Synthetic
aauaguauagaaaaaaaaaagag

SEQ ID NO: 571130 - RNA, 24 nt, Artificial Sequence
  Synthetic
aaauaguauagaaaaaaaaaagag

SEQ ID NO: 571131 - RNA, 18 nt, Artificial Sequence
  Synthetic
agacuacuaaaaaaagag

SEQ ID NO: 571132 - RNA, 19 nt, Artificial Sequence
  Synthetic
gagacuacuaaaaaaagag

SEQ ID NO: 571133 - RNA, 20 nt, Artificial Sequence
  Synthetic
agagacuacuaaaaaaagag

SEQ ID NO: 571134 - RNA, 21 nt, Artificial Sequence
  Synthetic
cagagacuacuaaaaaaagag

SEQ ID NO: 571135 - RNA, 22 nt, Artificial Sequence
  Synthetic
acagagacuacuaaaaaaagag

SEQ ID NO: 571136 - RNA, 23 nt, Artificial Sequence
  Synthetic
uacagagacuacuaaaaaaagag

SEQ ID NO: 571137 - RNA, 24 nt, Artificial Sequence
  Synthetic
cuacagagacuacuaaaaaaagag

SEQ ID NO: 571138 - RNA, 18 nt, Artificial Sequence
  Synthetic
uuuauauagccaaaagag

SEQ ID NO: 571139 - RNA, 19 nt, Artificial Sequence
  Synthetic
uuuuauauagccaaaagag

SEQ ID NO: 571140 - RNA, 20 nt, Artificial Sequence
  Synthetic
uuuuuauauagccaaaagag

SEQ ID NO: 571141 - RNA, 21 nt, Artificial Sequence
  Synthetic
uuuuuuauauagccaaaagag

SEQ ID NO: 571142 - RNA, 22 nt, Artificial Sequence
  Synthetic
uuuuuuuauauagccaaaagag

SEQ ID NO: 571143 - RNA, 23 nt, Artificial Sequence
  Synthetic
uuuuuuuuauauagccaaaagag

SEQ ID NO: 571144 - RNA, 24 nt, Artificial Sequence
  Synthetic
cuuuuuuuuauauagccaaaagag

SEQ ID NO: 571145 - RNA, 18 nt, Artificial Sequence
  Synthetic
aagcaaacagcaaaagag

SEQ ID NO: 571146 - RNA, 19 nt, Artificial Sequence
  Synthetic
aaagcaaacagcaaaagag

SEQ ID NO: 571147 - RNA, 20 nt, Artificial Sequence
  Synthetic
aaaagcaaacagcaaaagag

SEQ ID NO: 571148 - RNA, 21 nt, Artificial Sequence
  Synthetic
caaaagcaaacagcaaaagag

SEQ ID NO: 571149 - RNA, 22 nt, Artificial Sequence
  Synthetic
ucaaaagcaaacagcaaaagag

SEQ ID NO: 571150 - RNA, 23 nt, Artificial Sequence
  Synthetic
aucaaaagcaaacagcaaaagag

SEQ ID NO: 571151 - RNA, 24 nt, Artificial Sequence
  Synthetic
gaucaaaagcaaacagcaaaagag

SEQ ID NO: 571152 - RNA, 18 nt, Artificial Sequence
  Synthetic
cucuuuccaucaaaagag

SEQ ID NO: 571153 - RNA, 19 nt, Artificial Sequence
  Synthetic
acucuuuccaucaaaagag

SEQ ID NO: 571154 - RNA, 20 nt, Artificial Sequence
  Synthetic
uacucuuuccaucaaaagag

SEQ ID NO: 571155 - RNA, 21 nt, Artificial Sequence
  Synthetic
uuacucuuuccaucaaaagag

SEQ ID NO: 571156 - RNA, 22 nt, Artificial Sequence
  Synthetic
uuuacucuuuccaucaaaagag

SEQ ID NO: 571157 - RNA, 23 nt, Artificial Sequence
  Synthetic
uuuuacucuuuccaucaaaagag

SEQ ID NO: 571158 - RNA, 24 nt, Artificial Sequence
  Synthetic
guuuuacucuuuccaucaaaagag

SEQ ID NO: 571159 - RNA, 18 nt, Artificial Sequence
  Synthetic
ggcagaaaaagaaaagag

SEQ ID NO: 571160 - RNA, 19 nt, Artificial Sequence
  Synthetic
aggcagaaaaagaaaagag

SEQ ID NO: 571161 - RNA, 20 nt, Artificial Sequence
  Synthetic
gaggcagaaaaagaaaagag

SEQ ID NO: 571162 - RNA, 21 nt, Artificial Sequence
  Synthetic
ggaggcagaaaaagaaaagag

SEQ ID NO: 571163 - RNA, 22 nt, Artificial Sequence
  Synthetic
uggaggcagaaaaagaaaagag

SEQ ID NO: 571164 - RNA, 23 nt, Artificial Sequence
  Synthetic
cuggaggcagaaaaagaaaagag

SEQ ID NO: 571165 - RNA, 24 nt, Artificial Sequence
  Synthetic
acuggaggcagaaaaagaaaagag

SEQ ID NO: 571166 - RNA, 18 nt, Artificial Sequence
  Synthetic
cuacaugguagaaaagag

SEQ ID NO: 571167 - RNA, 19 nt, Artificial Sequence
  Synthetic
ccuacaugguagaaaagag

SEQ ID NO: 571168 - RNA, 20 nt, Artificial Sequence
  Synthetic
cccuacaugguagaaaagag

SEQ ID NO: 571169 - RNA, 21 nt, Artificial Sequence
  Synthetic
acccuacaugguagaaaagag

SEQ ID NO: 571170 - RNA, 22 nt, Artificial Sequence
  Synthetic
gacccuacaugguagaaaagag

SEQ ID NO: 571171 - RNA, 23 nt, Artificial Sequence
  Synthetic
ugacccuacaugguagaaaagag

SEQ ID NO: 571172 - RNA, 24 nt, Artificial Sequence
  Synthetic
uugacccuacaugguagaaaagag

SEQ ID NO: 571173 - RNA, 18 nt, Artificial Sequence
  Synthetic
ggacauugguuaaaagag

SEQ ID NO: 571174 - RNA, 19 nt, Artificial Sequence
  Synthetic
aggacauugguuaaaagag

SEQ ID NO: 571175 - RNA, 20 nt, Artificial Sequence
  Synthetic
aaggacauugguuaaaagag

SEQ ID NO: 571176 - RNA, 21 nt, Artificial Sequence
  Synthetic
aaaggacauugguuaaaagag

SEQ ID NO: 571177 - RNA, 22 nt, Artificial Sequence
  Synthetic
aaaaggacauugguuaaaagag

SEQ ID NO: 571178 - RNA, 23 nt, Artificial Sequence
  Synthetic
aaaaaggacauugguuaaaagag

SEQ ID NO: 571179 - RNA, 24 nt, Artificial Sequence
  Synthetic
uaaaaaggacauugguuaaaagag

SEQ ID NO: 571180 - RNA, 18 nt, Artificial Sequence
  Synthetic
ccucggccucacaaagag

SEQ ID NO: 571181 - RNA, 19 nt, Artificial Sequence
  Synthetic
accucggccucacaaagag

SEQ ID NO: 571182 - RNA, 20 nt, Artificial Sequence
  Synthetic
caccucggccucacaaagag

SEQ ID NO: 571183 - RNA, 21 nt, Artificial Sequence
  Synthetic
ccaccucggccucacaaagag

SEQ ID NO: 571184 - RNA, 22 nt, Artificial Sequence
  Synthetic
cccaccucggccucacaaagag

SEQ ID NO: 571185 - RNA, 23 nt, Artificial Sequence
  Synthetic
gcccaccucggccucacaaagag

SEQ ID NO: 571186 - RNA, 24 nt, Artificial Sequence
  Synthetic
cgcccaccucggccucacaaagag

SEQ ID NO: 571187 - RNA, 18 nt, Artificial Sequence
  Synthetic
gggaggaaccucaaagag

SEQ ID NO: 571188 - RNA, 19 nt, Artificial Sequence
  Synthetic
ugggaggaaccucaaagag

SEQ ID NO: 571189 - RNA, 20 nt, Artificial Sequence
  Synthetic
gugggaggaaccucaaagag

SEQ ID NO: 571190 - RNA, 21 nt, Artificial Sequence
  Synthetic
ugugggaggaaccucaaagag

SEQ ID NO: 571191 - RNA, 22 nt, Artificial Sequence
  Synthetic
augugggaggaaccucaaagag

SEQ ID NO: 571192 - RNA, 23 nt, Artificial Sequence
  Synthetic
gaugugggaggaaccucaaagag

SEQ ID NO: 571193 - RNA, 24 nt, Artificial Sequence
  Synthetic
ggaugugggaggaaccucaaagag

SEQ ID NO: 571194 - RNA, 18 nt, Artificial Sequence
  Synthetic
cccuuguaaaagaaagag

SEQ ID NO: 571195 - RNA, 19 nt, Artificial Sequence
  Synthetic
ucccuuguaaaagaaagag

SEQ ID NO: 571196 - RNA, 20 nt, Artificial Sequence
  Synthetic
uucccuuguaaaagaaagag

SEQ ID NO: 571197 - RNA, 21 nt, Artificial Sequence
  Synthetic
guucccuuguaaaagaaagag

SEQ ID NO: 571198 - RNA, 22 nt, Artificial Sequence
  Synthetic
gguucccuuguaaaagaaagag

SEQ ID NO: 571199 - RNA, 23 nt, Artificial Sequence
  Synthetic
ggguucccuuguaaaagaaagag

SEQ ID NO: 571200 - RNA, 24 nt, Artificial Sequence
  Synthetic
aggguucccuuguaaaagaaagag

SEQ ID NO: 571201 - RNA, 18 nt, Artificial Sequence
  Synthetic
agagacuggaagaaagag

SEQ ID NO: 571202 - RNA, 19 nt, Artificial Sequence
  Synthetic
cagagacuggaagaaagag

SEQ ID NO: 571203 - RNA, 20 nt, Artificial Sequence
  Synthetic
ucagagacuggaagaaagag

SEQ ID NO: 571204 - RNA, 21 nt, Artificial Sequence
  Synthetic
uucagagacuggaagaaagag

SEQ ID NO: 571205 - RNA, 22 nt, Artificial Sequence
  Synthetic
guucagagacuggaagaaagag

SEQ ID NO: 571206 - RNA, 23 nt, Artificial Sequence
  Synthetic
uguucagagacuggaagaaagag

SEQ ID NO: 571207 - RNA, 24 nt, Artificial Sequence
  Synthetic
auguucagagacuggaagaaagag

SEQ ID NO: 571208 - RNA, 18 nt, Artificial Sequence
  Synthetic
uggccaggggagaaagag

SEQ ID NO: 571209 - RNA, 19 nt, Artificial Sequence
  Synthetic
guggccaggggagaaagag

SEQ ID NO: 571210 - RNA, 20 nt, Artificial Sequence
  Synthetic
gguggccaggggagaaagag

SEQ ID NO: 571211 - RNA, 21 nt, Artificial Sequence
  Synthetic
ggguggccaggggagaaagag

SEQ ID NO: 571212 - RNA, 22 nt, Artificial Sequence
  Synthetic
aggguggccaggggagaaagag

SEQ ID NO: 571213 - RNA, 23 nt, Artificial Sequence
  Synthetic
uaggguggccaggggagaaagag

SEQ ID NO: 571214 - RNA, 24 nt, Artificial Sequence
  Synthetic
uuaggguggccaggggagaaagag

SEQ ID NO: 571215 - RNA, 18 nt, Artificial Sequence
  Synthetic
agagugguugagaaagag

SEQ ID NO: 571216 - RNA, 19 nt, Artificial Sequence
  Synthetic
cagagugguugagaaagag

SEQ ID NO: 571217 - RNA, 20 nt, Artificial Sequence
  Synthetic
gcagagugguugagaaagag

SEQ ID NO: 571218 - RNA, 21 nt, Artificial Sequence
  Synthetic
agcagagugguugagaaagag

SEQ ID NO: 571219 - RNA, 22 nt, Artificial Sequence
  Synthetic
cagcagagugguugagaaagag

SEQ ID NO: 571220 - RNA, 23 nt, Artificial Sequence
  Synthetic
acagcagagugguugagaaagag

SEQ ID NO: 571221 - RNA, 24 nt, Artificial Sequence
  Synthetic
uacagcagagugguugagaaagag

SEQ ID NO: 571222 - RNA, 18 nt, Artificial Sequence
  Synthetic
aagaaaagauagaaagag

SEQ ID NO: 571223 - RNA, 19 nt, Artificial Sequence
  Synthetic
caagaaaagauagaaagag

SEQ ID NO: 571224 - RNA, 20 nt, Artificial Sequence
  Synthetic
ccaagaaaagauagaaagag

SEQ ID NO: 571225 - RNA, 21 nt, Artificial Sequence
  Synthetic
accaagaaaagauagaaagag

SEQ ID NO: 571226 - RNA, 22 nt, Artificial Sequence
  Synthetic
aaccaagaaaagauagaaagag

SEQ ID NO: 571227 - RNA, 23 nt, Artificial Sequence
  Synthetic
gaaccaagaaaagauagaaagag

SEQ ID NO: 571228 - RNA, 24 nt, Artificial Sequence
  Synthetic
ugaaccaagaaaagauagaaagag

SEQ ID NO: 571229 - RNA, 18 nt, Artificial Sequence
  Synthetic
gaggcuagguggaaagag

SEQ ID NO: 571230 - RNA, 19 nt, Artificial Sequence
  Synthetic
ugaggcuagguggaaagag

SEQ ID NO: 571231 - RNA, 20 nt, Artificial Sequence
  Synthetic
uugaggcuagguggaaagag

SEQ ID NO: 571232 - RNA, 21 nt, Artificial Sequence
  Synthetic
guugaggcuagguggaaagag

SEQ ID NO: 571233 - RNA, 22 nt, Artificial Sequence
  Synthetic
uguugaggcuagguggaaagag

SEQ ID NO: 571234 - RNA, 23 nt, Artificial Sequence
  Synthetic
auguugaggcuagguggaaagag

SEQ ID NO: 571235 - RNA, 24 nt, Artificial Sequence
  Synthetic
aauguugaggcuagguggaaagag

SEQ ID NO: 571236 - RNA, 18 nt, Artificial Sequence
  Synthetic
uaaaaagacaugaaagag

SEQ ID NO: 571237 - RNA, 19 nt, Artificial Sequence
  Synthetic
auaaaaagacaugaaagag

SEQ ID NO: 571238 - RNA, 20 nt, Artificial Sequence
  Synthetic
aauaaaaagacaugaaagag

SEQ ID NO: 571239 - RNA, 21 nt, Artificial Sequence
  Synthetic
aaauaaaaagacaugaaagag

SEQ ID NO: 571240 - RNA, 22 nt, Artificial Sequence
  Synthetic
aaaauaaaaagacaugaaagag

SEQ ID NO: 571241 - RNA, 23 nt, Artificial Sequence
  Synthetic
caaaauaaaaagacaugaaagag

SEQ ID NO: 571242 - RNA, 24 nt, Artificial Sequence
  Synthetic
acaaaauaaaaagacaugaaagag

SEQ ID NO: 571243 - RNA, 18 nt, Artificial Sequence
  Synthetic
cucagagagaugaaagag

SEQ ID NO: 571244 - RNA, 19 nt, Artificial Sequence
  Synthetic
acucagagagaugaaagag

SEQ ID NO: 571245 - RNA, 20 nt, Artificial Sequence
  Synthetic
gacucagagagaugaaagag

SEQ ID NO: 571246 - RNA, 21 nt, Artificial Sequence
  Synthetic
ugacucagagagaugaaagag

SEQ ID NO: 571247 - RNA, 22 nt, Artificial Sequence
  Synthetic
cugacucagagagaugaaagag

SEQ ID NO: 571248 - RNA, 23 nt, Artificial Sequence
  Synthetic
ucugacucagagagaugaaagag

SEQ ID NO: 571249 - RNA, 24 nt, Artificial Sequence
  Synthetic
uucugacucagagagaugaaagag

SEQ ID NO: 571250 - RNA, 18 nt, Artificial Sequence
  Synthetic
gggagauuggugaaagag

SEQ ID NO: 571251 - RNA, 19 nt, Artificial Sequence
  Synthetic
ggggagauuggugaaagag

SEQ ID NO: 571252 - RNA, 20 nt, Artificial Sequence
  Synthetic
gggggagauuggugaaagag

SEQ ID NO: 571253 - RNA, 21 nt, Artificial Sequence
  Synthetic
ugggggagauuggugaaagag

SEQ ID NO: 571254 - RNA, 22 nt, Artificial Sequence
  Synthetic
augggggagauuggugaaagag

SEQ ID NO: 571255 - RNA, 23 nt, Artificial Sequence
  Synthetic
gaugggggagauuggugaaagag

SEQ ID NO: 571256 - RNA, 24 nt, Artificial Sequence
  Synthetic
agaugggggagauuggugaaagag

SEQ ID NO: 571257 - RNA, 18 nt, Artificial Sequence
  Synthetic
uuaaggguugugaaagag

SEQ ID NO: 571258 - RNA, 19 nt, Artificial Sequence
  Synthetic
uuuaaggguugugaaagag

SEQ ID NO: 571259 - RNA, 20 nt, Artificial Sequence
  Synthetic
uuuuaaggguugugaaagag

SEQ ID NO: 571260 - RNA, 21 nt, Artificial Sequence
  Synthetic
guuuuaaggguugugaaagag

SEQ ID NO: 571261 - RNA, 22 nt, Artificial Sequence
  Synthetic
gguuuuaaggguugugaaagag

SEQ ID NO: 571262 - RNA, 23 nt, Artificial Sequence
  Synthetic
ugguuuuaaggguugugaaagag

SEQ ID NO: 571263 - RNA, 24 nt, Artificial Sequence
  Synthetic
augguuuuaaggguugugaaagag

SEQ ID NO: 571264 - RNA, 18 nt, Artificial Sequence
  Synthetic
ggugucugauugaaagag

SEQ ID NO: 571265 - RNA, 19 nt, Artificial Sequence
  Synthetic
uggugucugauugaaagag

SEQ ID NO: 571266 - RNA, 20 nt, Artificial Sequence
  Synthetic
uuggugucugauugaaagag

SEQ ID NO: 571267 - RNA, 21 nt, Artificial Sequence
  Synthetic
uuuggugucugauugaaagag

SEQ ID NO: 571268 - RNA, 22 nt, Artificial Sequence
  Synthetic
cuuuggugucugauugaaagag

SEQ ID NO: 571269 - RNA, 23 nt, Artificial Sequence
  Synthetic
acuuuggugucugauugaaagag

SEQ ID NO: 571270 - RNA, 24 nt, Artificial Sequence
  Synthetic
aacuuuggugucugauugaaagag

SEQ ID NO: 571271 - RNA, 18 nt, Artificial Sequence
  Synthetic
ggaaaugggcauaaagag

SEQ ID NO: 571272 - RNA, 19 nt, Artificial Sequence
  Synthetic
aggaaaugggcauaaagag

SEQ ID NO: 571273 - RNA, 20 nt, Artificial Sequence
  Synthetic
aaggaaaugggcauaaagag

SEQ ID NO: 571274 - RNA, 21 nt, Artificial Sequence
  Synthetic
caaggaaaugggcauaaagag

SEQ ID NO: 571275 - RNA, 22 nt, Artificial Sequence
  Synthetic
acaaggaaaugggcauaaagag

SEQ ID NO: 571276 - RNA, 23 nt, Artificial Sequence
  Synthetic
uacaaggaaaugggcauaaagag

SEQ ID NO: 571277 - RNA, 24 nt, Artificial Sequence
  Synthetic
cuacaaggaaaugggcauaaagag

SEQ ID NO: 571278 - RNA, 18 nt, Artificial Sequence
  Synthetic
gacaauagggauaaagag

SEQ ID NO: 571279 - RNA, 19 nt, Artificial Sequence
  Synthetic
ugacaauagggauaaagag

SEQ ID NO: 571280 - RNA, 20 nt, Artificial Sequence
  Synthetic
gugacaauagggauaaagag

SEQ ID NO: 571281 - RNA, 21 nt, Artificial Sequence
  Synthetic
ggugacaauagggauaaagag

SEQ ID NO: 571282 - RNA, 22 nt, Artificial Sequence
  Synthetic
aggugacaauagggauaaagag

SEQ ID NO: 571283 - RNA, 23 nt, Artificial Sequence
  Synthetic
gaggugacaauagggauaaagag

SEQ ID NO: 571284 - RNA, 24 nt, Artificial Sequence
  Synthetic
ugaggugacaauagggauaaagag

SEQ ID NO: 571285 - RNA, 18 nt, Artificial Sequence
  Synthetic
uucagaaaaauuaaagag

SEQ ID NO: 571286 - RNA, 19 nt, Artificial Sequence
  Synthetic
cuucagaaaaauuaaagag

SEQ ID NO: 571287 - RNA, 20 nt, Artificial Sequence
  Synthetic
ucuucagaaaaauuaaagag

SEQ ID NO: 571288 - RNA, 21 nt, Artificial Sequence
  Synthetic
uucuucagaaaaauuaaagag

SEQ ID NO: 571289 - RNA, 22 nt, Artificial Sequence
  Synthetic
auucuucagaaaaauuaaagag

SEQ ID NO: 571290 - RNA, 23 nt, Artificial Sequence
  Synthetic
aauucuucagaaaaauuaaagag

SEQ ID NO: 571291 - RNA, 24 nt, Artificial Sequence
  Synthetic
aaauucuucagaaaaauuaaagag

SEQ ID NO: 571292 - RNA, 18 nt, Artificial Sequence
  Synthetic
agguauauccaacaagag

SEQ ID NO: 571293 - RNA, 19 nt, Artificial Sequence
  Synthetic
cagguauauccaacaagag

SEQ ID NO: 571294 - RNA, 20 nt, Artificial Sequence
  Synthetic
gcagguauauccaacaagag

SEQ ID NO: 571295 - RNA, 21 nt, Artificial Sequence
  Synthetic
ugcagguauauccaacaagag

SEQ ID NO: 571296 - RNA, 22 nt, Artificial Sequence
  Synthetic
uugcagguauauccaacaagag

SEQ ID NO: 571297 - RNA, 23 nt, Artificial Sequence
  Synthetic
uuugcagguauauccaacaagag

SEQ ID NO: 571298 - RNA, 24 nt, Artificial Sequence
  Synthetic
uuuugcagguauauccaacaagag

SEQ ID NO: 571299 - RNA, 18 nt, Artificial Sequence
  Synthetic
ucaugagaggaacaagag

SEQ ID NO: 571300 - RNA, 19 nt, Artificial Sequence
  Synthetic
uucaugagaggaacaagag

SEQ ID NO: 571301 - RNA, 20 nt, Artificial Sequence
  Synthetic
cuucaugagaggaacaagag

SEQ ID NO: 571302 - RNA, 21 nt, Artificial Sequence
  Synthetic
gcuucaugagaggaacaagag

SEQ ID NO: 571303 - RNA, 22 nt, Artificial Sequence
  Synthetic
ugcuucaugagaggaacaagag

SEQ ID NO: 571304 - RNA, 23 nt, Artificial Sequence
  Synthetic
uugcuucaugagaggaacaagag

SEQ ID NO: 571305 - RNA, 24 nt, Artificial Sequence
  Synthetic
uuugcuucaugagaggaacaagag

SEQ ID NO: 571306 - RNA, 18 nt, Artificial Sequence
  Synthetic
aaaagugacuaacaagag

SEQ ID NO: 571307 - RNA, 19 nt, Artificial Sequence
  Synthetic
uaaaagugacuaacaagag

SEQ ID NO: 571308 - RNA, 20 nt, Artificial Sequence
  Synthetic
uuaaaagugacuaacaagag

SEQ ID NO: 571309 - RNA, 21 nt, Artificial Sequence
  Synthetic
uuuaaaagugacuaacaagag

SEQ ID NO: 571310 - RNA, 22 nt, Artificial Sequence
  Synthetic
cuuuaaaagugacuaacaagag

SEQ ID NO: 571311 - RNA, 23 nt, Artificial Sequence
  Synthetic
ccuuuaaaagugacuaacaagag

SEQ ID NO: 571312 - RNA, 24 nt, Artificial Sequence
  Synthetic
cccuuuaaaagugacuaacaagag

SEQ ID NO: 571313 - RNA, 18 nt, Artificial Sequence
  Synthetic
uaauucuccacacaagag

SEQ ID NO: 571314 - RNA, 19 nt, Artificial Sequence
  Synthetic
auaauucuccacacaagag

SEQ ID NO: 571315 - RNA, 20 nt, Artificial Sequence
  Synthetic
gauaauucuccacacaagag

SEQ ID NO: 571316 - RNA, 21 nt, Artificial Sequence
  Synthetic
ggauaauucuccacacaagag

SEQ ID NO: 571317 - RNA, 22 nt, Artificial Sequence
  Synthetic
uggauaauucuccacacaagag

SEQ ID NO: 571318 - RNA, 23 nt, Artificial Sequence
  Synthetic
cuggauaauucuccacacaagag

SEQ ID NO: 571319 - RNA, 24 nt, Artificial Sequence
  Synthetic
acuggauaauucuccacacaagag

SEQ ID NO: 571320 - RNA, 18 nt, Artificial Sequence
  Synthetic
cccaguuggagacaagag

SEQ ID NO: 571321 - RNA, 19 nt, Artificial Sequence
  Synthetic
ccccaguuggagacaagag

SEQ ID NO: 571322 - RNA, 20 nt, Artificial Sequence
  Synthetic
uccccaguuggagacaagag

SEQ ID NO: 571323 - RNA, 21 nt, Artificial Sequence
  Synthetic
guccccaguuggagacaagag

SEQ ID NO: 571324 - RNA, 22 nt, Artificial Sequence
  Synthetic
cguccccaguuggagacaagag

SEQ ID NO: 571325 - RNA, 23 nt, Artificial Sequence
  Synthetic
ucguccccaguuggagacaagag

SEQ ID NO: 571326 - RNA, 24 nt, Artificial Sequence
  Synthetic
cucguccccaguuggagacaagag

SEQ ID NO: 571327 - RNA, 18 nt, Artificial Sequence
  Synthetic
auuuuaagaggacaagag

SEQ ID NO: 571328 - RNA, 19 nt, Artificial Sequence
  Synthetic
uauuuuaagaggacaagag

SEQ ID NO: 571329 - RNA, 20 nt, Artificial Sequence
  Synthetic
uuauuuuaagaggacaagag

SEQ ID NO: 571330 - RNA, 21 nt, Artificial Sequence
  Synthetic
uuuauuuuaagaggacaagag

SEQ ID NO: 571331 - RNA, 22 nt, Artificial Sequence
  Synthetic
cuuuauuuuaagaggacaagag

SEQ ID NO: 571332 - RNA, 23 nt, Artificial Sequence
  Synthetic
gcuuuauuuuaagaggacaagag

SEQ ID NO: 571333 - RNA, 24 nt, Artificial Sequence
  Synthetic
ggcuuuauuuuaagaggacaagag

SEQ ID NO: 571334 - RNA, 18 nt, Artificial Sequence
  Synthetic
uacaacugaggacaagag

SEQ ID NO: 571335 - RNA, 19 nt, Artificial Sequence
  Synthetic
auacaacugaggacaagag

SEQ ID NO: 571336 - RNA, 20 nt, Artificial Sequence
  Synthetic
aauacaacugaggacaagag

SEQ ID NO: 571337 - RNA, 21 nt, Artificial Sequence
  Synthetic
uaauacaacugaggacaagag

SEQ ID NO: 571338 - RNA, 22 nt, Artificial Sequence
  Synthetic
cuaauacaacugaggacaagag

SEQ ID NO: 571339 - RNA, 23 nt, Artificial Sequence
  Synthetic
acuaauacaacugaggacaagag

SEQ ID NO: 571340 - RNA, 24 nt, Artificial Sequence
  Synthetic
aacuaauacaacugaggacaagag

SEQ ID NO: 571341 - RNA, 18 nt, Artificial Sequence
  Synthetic
aaaaugaagggacaagag

SEQ ID NO: 571342 - RNA, 19 nt, Artificial Sequence
  Synthetic
aaaaaugaagggacaagag

SEQ ID NO: 571343 - RNA, 20 nt, Artificial Sequence
  Synthetic
gaaaaaugaagggacaagag

SEQ ID NO: 571344 - RNA, 21 nt, Artificial Sequence
  Synthetic
ggaaaaaugaagggacaagag

SEQ ID NO: 571345 - RNA, 22 nt, Artificial Sequence
  Synthetic
gggaaaaaugaagggacaagag

SEQ ID NO: 571346 - RNA, 23 nt, Artificial Sequence
  Synthetic
ugggaaaaaugaagggacaagag

SEQ ID NO: 571347 - RNA, 24 nt, Artificial Sequence
  Synthetic
gugggaaaaaugaagggacaagag

SEQ ID NO: 571348 - RNA, 18 nt, Artificial Sequence
  Synthetic
aaacaaaugugacaagag

SEQ ID NO: 571349 - RNA, 19 nt, Artificial Sequence
  Synthetic
uaaacaaaugugacaagag

SEQ ID NO: 571350 - RNA, 20 nt, Artificial Sequence
  Synthetic
auaaacaaaugugacaagag

SEQ ID NO: 571351 - RNA, 21 nt, Artificial Sequence
  Synthetic
uauaaacaaaugugacaagag

SEQ ID NO: 571352 - RNA, 22 nt, Artificial Sequence
  Synthetic
cuauaaacaaaugugacaagag

SEQ ID NO: 571353 - RNA, 23 nt, Artificial Sequence
  Synthetic
gcuauaaacaaaugugacaagag

SEQ ID NO: 571354 - RNA, 24 nt, Artificial Sequence
  Synthetic
ggcuauaaacaaaugugacaagag

SEQ ID NO: 571355 - RNA, 18 nt, Artificial Sequence
  Synthetic
uuuacauucucccaagag

SEQ ID NO: 571356 - RNA, 19 nt, Artificial Sequence
  Synthetic
cuuuacauucucccaagag

SEQ ID NO: 571357 - RNA, 20 nt, Artificial Sequence
  Synthetic
ccuuuacauucucccaagag

SEQ ID NO: 571358 - RNA, 21 nt, Artificial Sequence
  Synthetic
uccuuuacauucucccaagag

SEQ ID NO: 571359 - RNA, 22 nt, Artificial Sequence
  Synthetic
uuccuuuacauucucccaagag

SEQ ID NO: 571360 - RNA, 23 nt, Artificial Sequence
  Synthetic
uuuccuuuacauucucccaagag

SEQ ID NO: 571361 - RNA, 24 nt, Artificial Sequence
  Synthetic
cuuuccuuuacauucucccaagag

SEQ ID NO: 571362 - RNA, 18 nt, Artificial Sequence
  Synthetic
cuauucagcaagcaagag

SEQ ID NO: 571363 - RNA, 19 nt, Artificial Sequence
  Synthetic
ccuauucagcaagcaagag

SEQ ID NO: 571364 - RNA, 20 nt, Artificial Sequence
  Synthetic
cccuauucagcaagcaagag

SEQ ID NO: 571365 - RNA, 21 nt, Artificial Sequence
  Synthetic
ccccuauucagcaagcaagag

SEQ ID NO: 571366 - RNA, 22 nt, Artificial Sequence
  Synthetic
cccccuauucagcaagcaagag

SEQ ID NO: 571367 - RNA, 23 nt, Artificial Sequence
  Synthetic
ucccccuauucagcaagcaagag

SEQ ID NO: 571368 - RNA, 24 nt, Artificial Sequence
  Synthetic
aucccccuauucagcaagcaagag

SEQ ID NO: 571369 - RNA, 18 nt, Artificial Sequence
  Synthetic
uagguagucuagcaagag

SEQ ID NO: 571370 - RNA, 19 nt, Artificial Sequence
  Synthetic
auagguagucuagcaagag

SEQ ID NO: 571371 - RNA, 20 nt, Artificial Sequence
  Synthetic
gauagguagucuagcaagag

SEQ ID NO: 571372 - RNA, 21 nt, Artificial Sequence
  Synthetic
ugauagguagucuagcaagag

SEQ ID NO: 571373 - RNA, 22 nt, Artificial Sequence
  Synthetic
gugauagguagucuagcaagag

SEQ ID NO: 571374 - RNA, 23 nt, Artificial Sequence
  Synthetic
agugauagguagucuagcaagag

SEQ ID NO: 571375 - RNA, 24 nt, Artificial Sequence
  Synthetic
aagugauagguagucuagcaagag

SEQ ID NO: 571376 - RNA, 18 nt, Artificial Sequence
  Synthetic
aauguggagacgcaagag

SEQ ID NO: 571377 - RNA, 19 nt, Artificial Sequence
  Synthetic
aaauguggagacgcaagag

SEQ ID NO: 571378 - RNA, 20 nt, Artificial Sequence
  Synthetic
aaaauguggagacgcaagag

SEQ ID NO: 571379 - RNA, 21 nt, Artificial Sequence
  Synthetic
gaaaauguggagacgcaagag

SEQ ID NO: 571380 - RNA, 22 nt, Artificial Sequence
  Synthetic
agaaaauguggagacgcaagag

SEQ ID NO: 571381 - RNA, 23 nt, Artificial Sequence
  Synthetic
gagaaaauguggagacgcaagag

SEQ ID NO: 571382 - RNA, 24 nt, Artificial Sequence
  Synthetic
agagaaaauguggagacgcaagag

SEQ ID NO: 571383 - RNA, 18 nt, Artificial Sequence
  Synthetic
gucaugcugaugcaagag

SEQ ID NO: 571384 - RNA, 19 nt, Artificial Sequence
  Synthetic
ggucaugcugaugcaagag

SEQ ID NO: 571385 - RNA, 20 nt, Artificial Sequence
  Synthetic
aggucaugcugaugcaagag

SEQ ID NO: 571386 - RNA, 21 nt, Artificial Sequence
  Synthetic
caggucaugcugaugcaagag

SEQ ID NO: 571387 - RNA, 22 nt, Artificial Sequence
  Synthetic
ccaggucaugcugaugcaagag

SEQ ID NO: 571388 - RNA, 23 nt, Artificial Sequence
  Synthetic
uccaggucaugcugaugcaagag

SEQ ID NO: 571389 - RNA, 24 nt, Artificial Sequence
  Synthetic
auccaggucaugcugaugcaagag

SEQ ID NO: 571390 - RNA, 18 nt, Artificial Sequence
  Synthetic
ugccuuagaggucaagag

SEQ ID NO: 571391 - RNA, 19 nt, Artificial Sequence
  Synthetic
uugccuuagaggucaagag

SEQ ID NO: 571392 - RNA, 20 nt, Artificial Sequence
  Synthetic
auugccuuagaggucaagag

SEQ ID NO: 571393 - RNA, 21 nt, Artificial Sequence
  Synthetic
cauugccuuagaggucaagag

SEQ ID NO: 571394 - RNA, 22 nt, Artificial Sequence
  Synthetic
gcauugccuuagaggucaagag

SEQ ID NO: 571395 - RNA, 23 nt, Artificial Sequence
  Synthetic
agcauugccuuagaggucaagag

SEQ ID NO: 571396 - RNA, 24 nt, Artificial Sequence
  Synthetic
gagcauugccuuagaggucaagag

SEQ ID NO: 571397 - RNA, 18 nt, Artificial Sequence
  Synthetic
aguuccaaccuucaagag

SEQ ID NO: 571398 - RNA, 19 nt, Artificial Sequence
  Synthetic
uaguuccaaccuucaagag

SEQ ID NO: 571399 - RNA, 20 nt, Artificial Sequence
  Synthetic
guaguuccaaccuucaagag

SEQ ID NO: 571400 - RNA, 21 nt, Artificial Sequence
  Synthetic
uguaguuccaaccuucaagag

SEQ ID NO: 571401 - RNA, 22 nt, Artificial Sequence
  Synthetic
cuguaguuccaaccuucaagag

SEQ ID NO: 571402 - RNA, 23 nt, Artificial Sequence
  Synthetic
acuguaguuccaaccuucaagag

SEQ ID NO: 571403 - RNA, 24 nt, Artificial Sequence
  Synthetic
uacuguaguuccaaccuucaagag

SEQ ID NO: 571404 - RNA, 18 nt, Artificial Sequence
  Synthetic
aaugagaaaaaagaagag

SEQ ID NO: 571405 - RNA, 19 nt, Artificial Sequence
  Synthetic
gaaugagaaaaaagaagag

SEQ ID NO: 571406 - RNA, 20 nt, Artificial Sequence
  Synthetic
agaaugagaaaaaagaagag

SEQ ID NO: 571407 - RNA, 21 nt, Artificial Sequence
  Synthetic
cagaaugagaaaaaagaagag

SEQ ID NO: 571408 - RNA, 22 nt, Artificial Sequence
  Synthetic
ccagaaugagaaaaaagaagag

SEQ ID NO: 571409 - RNA, 23 nt, Artificial Sequence
  Synthetic
accagaaugagaaaaaagaagag

SEQ ID NO: 571410 - RNA, 24 nt, Artificial Sequence
  Synthetic
uaccagaaugagaaaaaagaagag

SEQ ID NO: 571411 - RNA, 18 nt, Artificial Sequence
  Synthetic
auuuuuuucaaagaagag

SEQ ID NO: 571412 - RNA, 19 nt, Artificial Sequence
  Synthetic
gauuuuuuucaaagaagag

SEQ ID NO: 571413 - RNA, 20 nt, Artificial Sequence
  Synthetic
ugauuuuuuucaaagaagag

SEQ ID NO: 571414 - RNA, 21 nt, Artificial Sequence
  Synthetic
augauuuuuuucaaagaagag

SEQ ID NO: 571415 - RNA, 22 nt, Artificial Sequence
  Synthetic
gaugauuuuuuucaaagaagag

SEQ ID NO: 571416 - RNA, 23 nt, Artificial Sequence
  Synthetic
agaugauuuuuuucaaagaagag

SEQ ID NO: 571417 - RNA, 24 nt, Artificial Sequence
  Synthetic
cagaugauuuuuuucaaagaagag

SEQ ID NO: 571418 - RNA, 18 nt, Artificial Sequence
  Synthetic
ggcaaguuuaaagaagag

SEQ ID NO: 571419 - RNA, 19 nt, Artificial Sequence
  Synthetic
uggcaaguuuaaagaagag

SEQ ID NO: 571420 - RNA, 20 nt, Artificial Sequence
  Synthetic
uuggcaaguuuaaagaagag

SEQ ID NO: 571421 - RNA, 21 nt, Artificial Sequence
  Synthetic
cuuggcaaguuuaaagaagag

SEQ ID NO: 571422 - RNA, 22 nt, Artificial Sequence
  Synthetic
ucuuggcaaguuuaaagaagag

SEQ ID NO: 571423 - RNA, 23 nt, Artificial Sequence
  Synthetic
aucuuggcaaguuuaaagaagag

SEQ ID NO: 571424 - RNA, 24 nt, Artificial Sequence
  Synthetic
caucuuggcaaguuuaaagaagag

SEQ ID NO: 571425 - RNA, 18 nt, Artificial Sequence
  Synthetic
gcucuguacacagaagag

SEQ ID NO: 571426 - RNA, 19 nt, Artificial Sequence
  Synthetic
ugcucuguacacagaagag

SEQ ID NO: 571427 - RNA, 20 nt, Artificial Sequence
  Synthetic
gugcucuguacacagaagag

SEQ ID NO: 571428 - RNA, 21 nt, Artificial Sequence
  Synthetic
agugcucuguacacagaagag

SEQ ID NO: 571429 - RNA, 22 nt, Artificial Sequence
  Synthetic
aagugcucuguacacagaagag

SEQ ID NO: 571430 - RNA, 23 nt, Artificial Sequence
  Synthetic
uaagugcucuguacacagaagag

SEQ ID NO: 571431 - RNA, 24 nt, Artificial Sequence
  Synthetic
uuaagugcucuguacacagaagag

SEQ ID NO: 571432 - RNA, 18 nt, Artificial Sequence
  Synthetic
uccugcuggccagaagag

SEQ ID NO: 571433 - RNA, 19 nt, Artificial Sequence
  Synthetic
uuccugcuggccagaagag

SEQ ID NO: 571434 - RNA, 20 nt, Artificial Sequence
  Synthetic
cuuccugcuggccagaagag

SEQ ID NO: 571435 - RNA, 21 nt, Artificial Sequence
  Synthetic
ucuuccugcuggccagaagag

SEQ ID NO: 571436 - RNA, 22 nt, Artificial Sequence
  Synthetic
cucuuccugcuggccagaagag

SEQ ID NO: 571437 - RNA, 23 nt, Artificial Sequence
  Synthetic
ucucuuccugcuggccagaagag

SEQ ID NO: 571438 - RNA, 24 nt, Artificial Sequence
  Synthetic
gucucuuccugcuggccagaagag

SEQ ID NO: 571439 - RNA, 18 nt, Artificial Sequence
  Synthetic
aggggagaaagagaagag

SEQ ID NO: 571440 - RNA, 19 nt, Artificial Sequence
  Synthetic
caggggagaaagagaagag

SEQ ID NO: 571441 - RNA, 20 nt, Artificial Sequence
  Synthetic
ccaggggagaaagagaagag

SEQ ID NO: 571442 - RNA, 21 nt, Artificial Sequence
  Synthetic
gccaggggagaaagagaagag

SEQ ID NO: 571443 - RNA, 22 nt, Artificial Sequence
  Synthetic
ggccaggggagaaagagaagag

SEQ ID NO: 571444 - RNA, 23 nt, Artificial Sequence
  Synthetic
uggccaggggagaaagagaagag

SEQ ID NO: 571445 - RNA, 24 nt, Artificial Sequence
  Synthetic
guggccaggggagaaagagaagag

SEQ ID NO: 571446 - RNA, 18 nt, Artificial Sequence
  Synthetic
gagacaggaggagaagag

SEQ ID NO: 571447 - RNA, 19 nt, Artificial Sequence
  Synthetic
agagacaggaggagaagag

SEQ ID NO: 571448 - RNA, 20 nt, Artificial Sequence
  Synthetic
gagagacaggaggagaagag

SEQ ID NO: 571449 - RNA, 21 nt, Artificial Sequence
  Synthetic
agagagacaggaggagaagag

SEQ ID NO: 571450 - RNA, 22 nt, Artificial Sequence
  Synthetic
aagagagacaggaggagaagag

SEQ ID NO: 571451 - RNA, 23 nt, Artificial Sequence
  Synthetic
uaagagagacaggaggagaagag

SEQ ID NO: 571452 - RNA, 24 nt, Artificial Sequence
  Synthetic
auaagagagacaggaggagaagag

SEQ ID NO: 571453 - RNA, 18 nt, Artificial Sequence
  Synthetic
cuauacacuggagaagag

SEQ ID NO: 571454 - RNA, 19 nt, Artificial Sequence
  Synthetic
gcuauacacuggagaagag

SEQ ID NO: 571455 - RNA, 20 nt, Artificial Sequence
  Synthetic
agcuauacacuggagaagag

SEQ ID NO: 571456 - RNA, 21 nt, Artificial Sequence
  Synthetic
aagcuauacacuggagaagag

SEQ ID NO: 571457 - RNA, 22 nt, Artificial Sequence
  Synthetic
caagcuauacacuggagaagag

SEQ ID NO: 571458 - RNA, 23 nt, Artificial Sequence
  Synthetic
gcaagcuauacacuggagaagag

SEQ ID NO: 571459 - RNA, 24 nt, Artificial Sequence
  Synthetic
ugcaagcuauacacuggagaagag

SEQ ID NO: 571460 - RNA, 18 nt, Artificial Sequence
  Synthetic
uagaguguaguagaagag

SEQ ID NO: 571461 - RNA, 19 nt, Artificial Sequence
  Synthetic
guagaguguaguagaagag

SEQ ID NO: 571462 - RNA, 20 nt, Artificial Sequence
  Synthetic
gguagaguguaguagaagag

SEQ ID NO: 571463 - RNA, 21 nt, Artificial Sequence
  Synthetic
ggguagaguguaguagaagag

SEQ ID NO: 571464 - RNA, 22 nt, Artificial Sequence
  Synthetic
aggguagaguguaguagaagag

SEQ ID NO: 571465 - RNA, 23 nt, Artificial Sequence
  Synthetic
aaggguagaguguaguagaagag

SEQ ID NO: 571466 - RNA, 24 nt, Artificial Sequence
  Synthetic
aaaggguagaguguaguagaagag

SEQ ID NO: 571467 - RNA, 18 nt, Artificial Sequence
  Synthetic
uuuguauuuuuagaagag

SEQ ID NO: 571468 - RNA, 19 nt, Artificial Sequence
  Synthetic
uuuuguauuuuuagaagag

SEQ ID NO: 571469 - RNA, 20 nt, Artificial Sequence
  Synthetic
auuuuguauuuuuagaagag

SEQ ID NO: 571470 - RNA, 21 nt, Artificial Sequence
  Synthetic
aauuuuguauuuuuagaagag

SEQ ID NO: 571471 - RNA, 22 nt, Artificial Sequence
  Synthetic
uaauuuuguauuuuuagaagag

SEQ ID NO: 571472 - RNA, 23 nt, Artificial Sequence
  Synthetic
cuaauuuuguauuuuuagaagag

SEQ ID NO: 571473 - RNA, 24 nt, Artificial Sequence
  Synthetic
gcuaauuuuguauuuuuagaagag

SEQ ID NO: 571474 - RNA, 18 nt, Artificial Sequence
  Synthetic
uaaaagggcaaggaagag

SEQ ID NO: 571475 - RNA, 19 nt, Artificial Sequence
  Synthetic
uuaaaagggcaaggaagag

SEQ ID NO: 571476 - RNA, 20 nt, Artificial Sequence
  Synthetic
uuuaaaagggcaaggaagag

SEQ ID NO: 571477 - RNA, 21 nt, Artificial Sequence
  Synthetic
uuuuaaaagggcaaggaagag

SEQ ID NO: 571478 - RNA, 22 nt, Artificial Sequence
  Synthetic
cuuuuaaaagggcaaggaagag

SEQ ID NO: 571479 - RNA, 23 nt, Artificial Sequence
  Synthetic
ccuuuuaaaagggcaaggaagag

SEQ ID NO: 571480 - RNA, 24 nt, Artificial Sequence
  Synthetic
gccuuuuaaaagggcaaggaagag

SEQ ID NO: 571481 - RNA, 18 nt, Artificial Sequence
  Synthetic
aagcggagggaggaagag

SEQ ID NO: 571482 - RNA, 19 nt, Artificial Sequence
  Synthetic
gaagcggagggaggaagag

SEQ ID NO: 571483 - RNA, 20 nt, Artificial Sequence
  Synthetic
agaagcggagggaggaagag

SEQ ID NO: 571484 - RNA, 21 nt, Artificial Sequence
  Synthetic
aagaagcggagggaggaagag

SEQ ID NO: 571485 - RNA, 22 nt, Artificial Sequence
  Synthetic
gaagaagcggagggaggaagag

SEQ ID NO: 571486 - RNA, 23 nt, Artificial Sequence
  Synthetic
ggaagaagcggagggaggaagag

SEQ ID NO: 571487 - RNA, 24 nt, Artificial Sequence
  Synthetic
gggaagaagcggagggaggaagag

SEQ ID NO: 571488 - RNA, 18 nt, Artificial Sequence
  Synthetic
auauucaaauaggaagag

SEQ ID NO: 571489 - RNA, 19 nt, Artificial Sequence
  Synthetic
gauauucaaauaggaagag

SEQ ID NO: 571490 - RNA, 20 nt, Artificial Sequence
  Synthetic
agauauucaaauaggaagag

SEQ ID NO: 571491 - RNA, 21 nt, Artificial Sequence
  Synthetic
aagauauucaaauaggaagag

SEQ ID NO: 571492 - RNA, 22 nt, Artificial Sequence
  Synthetic
aaagauauucaaauaggaagag

SEQ ID NO: 571493 - RNA, 23 nt, Artificial Sequence
  Synthetic
gaaagauauucaaauaggaagag

SEQ ID NO: 571494 - RNA, 24 nt, Artificial Sequence
  Synthetic
agaaagauauucaaauaggaagag

SEQ ID NO: 571495 - RNA, 18 nt, Artificial Sequence
  Synthetic
agcuggagguaggaagag

SEQ ID NO: 571496 - RNA, 19 nt, Artificial Sequence
  Synthetic
gagcuggagguaggaagag

SEQ ID NO: 571497 - RNA, 20 nt, Artificial Sequence
  Synthetic
agagcuggagguaggaagag

SEQ ID NO: 571498 - RNA, 21 nt, Artificial Sequence
  Synthetic
cagagcuggagguaggaagag

SEQ ID NO: 571499 - RNA, 22 nt, Artificial Sequence
  Synthetic
acagagcuggagguaggaagag

SEQ ID NO: 571500 - RNA, 23 nt, Artificial Sequence
  Synthetic
gacagagcuggagguaggaagag

SEQ ID NO: 571501 - RNA, 24 nt, Artificial Sequence
  Synthetic
agacagagcuggagguaggaagag

SEQ ID NO: 571502 - RNA, 18 nt, Artificial Sequence
  Synthetic
uaacuccggagggaagag

SEQ ID NO: 571503 - RNA, 19 nt, Artificial Sequence
  Synthetic
guaacuccggagggaagag

SEQ ID NO: 571504 - RNA, 20 nt, Artificial Sequence
  Synthetic
aguaacuccggagggaagag

SEQ ID NO: 571505 - RNA, 21 nt, Artificial Sequence
  Synthetic
aaguaacuccggagggaagag

SEQ ID NO: 571506 - RNA, 22 nt, Artificial Sequence
  Synthetic
uaaguaacuccggagggaagag

SEQ ID NO: 571507 - RNA, 23 nt, Artificial Sequence
  Synthetic
cuaaguaacuccggagggaagag

SEQ ID NO: 571508 - RNA, 24 nt, Artificial Sequence
  Synthetic
gcuaaguaacuccggagggaagag

SEQ ID NO: 571509 - RNA, 18 nt, Artificial Sequence
  Synthetic
aaauagaguagggaagag

SEQ ID NO: 571510 - RNA, 19 nt, Artificial Sequence
  Synthetic
gaaauagaguagggaagag

SEQ ID NO: 571511 - RNA, 20 nt, Artificial Sequence
  Synthetic
agaaauagaguagggaagag

SEQ ID NO: 571512 - RNA, 21 nt, Artificial Sequence
  Synthetic
aagaaauagaguagggaagag

SEQ ID NO: 571513 - RNA, 22 nt, Artificial Sequence
  Synthetic
caagaaauagaguagggaagag

SEQ ID NO: 571514 - RNA, 23 nt, Artificial Sequence
  Synthetic
ccaagaaauagaguagggaagag

SEQ ID NO: 571515 - RNA, 24 nt, Artificial Sequence
  Synthetic
accaagaaauagaguagggaagag

SEQ ID NO: 571516 - RNA, 18 nt, Artificial Sequence
  Synthetic
gccaaugaagaugaagag

SEQ ID NO: 571517 - RNA, 19 nt, Artificial Sequence
  Synthetic
ggccaaugaagaugaagag

SEQ ID NO: 571518 - RNA, 20 nt, Artificial Sequence
  Synthetic
aggccaaugaagaugaagag

SEQ ID NO: 571519 - RNA, 21 nt, Artificial Sequence
  Synthetic
gaggccaaugaagaugaagag

SEQ ID NO: 571520 - RNA, 22 nt, Artificial Sequence
  Synthetic
ugaggccaaugaagaugaagag

SEQ ID NO: 571521 - RNA, 23 nt, Artificial Sequence
  Synthetic
augaggccaaugaagaugaagag

SEQ ID NO: 571522 - RNA, 24 nt, Artificial Sequence
  Synthetic
caugaggccaaugaagaugaagag

SEQ ID NO: 571523 - RNA, 18 nt, Artificial Sequence
  Synthetic
aaaagucacuaugaagag

SEQ ID NO: 571524 - RNA, 19 nt, Artificial Sequence
  Synthetic
uaaaagucacuaugaagag

SEQ ID NO: 571525 - RNA, 20 nt, Artificial Sequence
  Synthetic
auaaaagucacuaugaagag

SEQ ID NO: 571526 - RNA, 21 nt, Artificial Sequence
  Synthetic
aauaaaagucacuaugaagag

SEQ ID NO: 571527 - RNA, 22 nt, Artificial Sequence
  Synthetic
uaauaaaagucacuaugaagag

SEQ ID NO: 571528 - RNA, 23 nt, Artificial Sequence
  Synthetic
uuaauaaaagucacuaugaagag

SEQ ID NO: 571529 - RNA, 24 nt, Artificial Sequence
  Synthetic
auuaauaaaagucacuaugaagag

SEQ ID NO: 571530 - RNA, 18 nt, Artificial Sequence
  Synthetic
ugaguaagaacugaagag

SEQ ID NO: 571531 - RNA, 19 nt, Artificial Sequence
  Synthetic
cugaguaagaacugaagag

SEQ ID NO: 571532 - RNA, 20 nt, Artificial Sequence
  Synthetic
acugaguaagaacugaagag

SEQ ID NO: 571533 - RNA, 21 nt, Artificial Sequence
  Synthetic
cacugaguaagaacugaagag

SEQ ID NO: 571534 - RNA, 22 nt, Artificial Sequence
  Synthetic
acacugaguaagaacugaagag

SEQ ID NO: 571535 - RNA, 23 nt, Artificial Sequence
  Synthetic
aacacugaguaagaacugaagag

SEQ ID NO: 571536 - RNA, 24 nt, Artificial Sequence
  Synthetic
gaacacugaguaagaacugaagag

SEQ ID NO: 571537 - RNA, 18 nt, Artificial Sequence
  Synthetic
ugacucucuccugaagag

SEQ ID NO: 571538 - RNA, 19 nt, Artificial Sequence
  Synthetic
augacucucuccugaagag

SEQ ID NO: 571539 - RNA, 20 nt, Artificial Sequence
  Synthetic
uaugacucucuccugaagag

SEQ ID NO: 571540 - RNA, 21 nt, Artificial Sequence
  Synthetic
auaugacucucuccugaagag

SEQ ID NO: 571541 - RNA, 22 nt, Artificial Sequence
  Synthetic
cauaugacucucuccugaagag

SEQ ID NO: 571542 - RNA, 23 nt, Artificial Sequence
  Synthetic
acauaugacucucuccugaagag

SEQ ID NO: 571543 - RNA, 24 nt, Artificial Sequence
  Synthetic
uacauaugacucucuccugaagag

SEQ ID NO: 571544 - RNA, 18 nt, Artificial Sequence
  Synthetic
uuguucauuagugaagag

SEQ ID NO: 571545 - RNA, 19 nt, Artificial Sequence
  Synthetic
auuguucauuagugaagag

SEQ ID NO: 571546 - RNA, 20 nt, Artificial Sequence
  Synthetic
cauuguucauuagugaagag

SEQ ID NO: 571547 - RNA, 21 nt, Artificial Sequence
  Synthetic
gcauuguucauuagugaagag

SEQ ID NO: 571548 - RNA, 22 nt, Artificial Sequence
  Synthetic
agcauuguucauuagugaagag

SEQ ID NO: 571549 - RNA, 23 nt, Artificial Sequence
  Synthetic
cagcauuguucauuagugaagag

SEQ ID NO: 571550 - RNA, 24 nt, Artificial Sequence
  Synthetic
ucagcauuguucauuagugaagag

SEQ ID NO: 571551 - RNA, 18 nt, Artificial Sequence
  Synthetic
gacuagcucugugaagag

SEQ ID NO: 571552 - RNA, 19 nt, Artificial Sequence
  Synthetic
agacuagcucugugaagag

SEQ ID NO: 571553 - RNA, 20 nt, Artificial Sequence
  Synthetic
gagacuagcucugugaagag

SEQ ID NO: 571554 - RNA, 21 nt, Artificial Sequence
  Synthetic
agagacuagcucugugaagag

SEQ ID NO: 571555 - RNA, 22 nt, Artificial Sequence
  Synthetic
aagagacuagcucugugaagag

SEQ ID NO: 571556 - RNA, 23 nt, Artificial Sequence
  Synthetic
uaagagacuagcucugugaagag

SEQ ID NO: 571557 - RNA, 24 nt, Artificial Sequence
  Synthetic
uuaagagacuagcucugugaagag

SEQ ID NO: 571558 - RNA, 18 nt, Artificial Sequence
  Synthetic
uugacccucaaauaagag

SEQ ID NO: 571559 - RNA, 19 nt, Artificial Sequence
  Synthetic
uuugacccucaaauaagag

SEQ ID NO: 571560 - RNA, 20 nt, Artificial Sequence
  Synthetic
auuugacccucaaauaagag

SEQ ID NO: 571561 - RNA, 21 nt, Artificial Sequence
  Synthetic
aauuugacccucaaauaagag

SEQ ID NO: 571562 - RNA, 22 nt, Artificial Sequence
  Synthetic
aaauuugacccucaaauaagag

SEQ ID NO: 571563 - RNA, 23 nt, Artificial Sequence
  Synthetic
aaaauuugacccucaaauaagag

SEQ ID NO: 571564 - RNA, 24 nt, Artificial Sequence
  Synthetic
gaaaauuugacccucaaauaagag

SEQ ID NO: 571565 - RNA, 18 nt, Artificial Sequence
  Synthetic
acuacaaaaacauaagag

SEQ ID NO: 571566 - RNA, 19 nt, Artificial Sequence
  Synthetic
aacuacaaaaacauaagag

SEQ ID NO: 571567 - RNA, 20 nt, Artificial Sequence
  Synthetic
aaacuacaaaaacauaagag

SEQ ID NO: 571568 - RNA, 21 nt, Artificial Sequence
  Synthetic
aaaacuacaaaaacauaagag

SEQ ID NO: 571569 - RNA, 22 nt, Artificial Sequence
  Synthetic
aaaaacuacaaaaacauaagag

SEQ ID NO: 571570 - RNA, 23 nt, Artificial Sequence
  Synthetic
uaaaaacuacaaaaacauaagag

SEQ ID NO: 571571 - RNA, 24 nt, Artificial Sequence
  Synthetic
cuaaaaacuacaaaaacauaagag

SEQ ID NO: 571572 - RNA, 18 nt, Artificial Sequence
  Synthetic
gccuccacaggauaagag

SEQ ID NO: 571573 - RNA, 19 nt, Artificial Sequence
  Synthetic
cgccuccacaggauaagag

SEQ ID NO: 571574 - RNA, 20 nt, Artificial Sequence
  Synthetic
ucgccuccacaggauaagag

SEQ ID NO: 571575 - RNA, 21 nt, Artificial Sequence
  Synthetic
uucgccuccacaggauaagag

SEQ ID NO: 571576 - RNA, 22 nt, Artificial Sequence
  Synthetic
auucgccuccacaggauaagag

SEQ ID NO: 571577 - RNA, 23 nt, Artificial Sequence
  Synthetic
uauucgccuccacaggauaagag

SEQ ID NO: 571578 - RNA, 24 nt, Artificial Sequence
  Synthetic
guauucgccuccacaggauaagag

SEQ ID NO: 571579 - RNA, 18 nt, Artificial Sequence
  Synthetic
gccaaugauggauaagag

SEQ ID NO: 571580 - RNA, 19 nt, Artificial Sequence
  Synthetic
agccaaugauggauaagag

SEQ ID NO: 571581 - RNA, 20 nt, Artificial Sequence
  Synthetic
uagccaaugauggauaagag

SEQ ID NO: 571582 - RNA, 21 nt, Artificial Sequence
  Synthetic
uuagccaaugauggauaagag

SEQ ID NO: 571583 - RNA, 22 nt, Artificial Sequence
  Synthetic
uuuagccaaugauggauaagag

SEQ ID NO: 571584 - RNA, 23 nt, Artificial Sequence
  Synthetic
auuuagccaaugauggauaagag

SEQ ID NO: 571585 - RNA, 24 nt, Artificial Sequence
  Synthetic
cauuuagccaaugauggauaagag

SEQ ID NO: 571586 - RNA, 18 nt, Artificial Sequence
  Synthetic
aucacuugaaacuaagag

SEQ ID NO: 571587 - RNA, 19 nt, Artificial Sequence
  Synthetic
aaucacuugaaacuaagag

SEQ ID NO: 571588 - RNA, 20 nt, Artificial Sequence
  Synthetic
gaaucacuugaaacuaagag

SEQ ID NO: 571589 - RNA, 21 nt, Artificial Sequence
  Synthetic
agaaucacuugaaacuaagag

SEQ ID NO: 571590 - RNA, 22 nt, Artificial Sequence
  Synthetic
gagaaucacuugaaacuaagag

SEQ ID NO: 571591 - RNA, 23 nt, Artificial Sequence
  Synthetic
ggagaaucacuugaaacuaagag

SEQ ID NO: 571592 - RNA, 24 nt, Artificial Sequence
  Synthetic
aggagaaucacuugaaacuaagag

SEQ ID NO: 571593 - RNA, 18 nt, Artificial Sequence
  Synthetic
cccaauuucaucuaagag

SEQ ID NO: 571594 - RNA, 19 nt, Artificial Sequence
  Synthetic
acccaauuucaucuaagag

SEQ ID NO: 571595 - RNA, 20 nt, Artificial Sequence
  Synthetic
uacccaauuucaucuaagag

SEQ ID NO: 571596 - RNA, 21 nt, Artificial Sequence
  Synthetic
auacccaauuucaucuaagag

SEQ ID NO: 571597 - RNA, 22 nt, Artificial Sequence
  Synthetic
aauacccaauuucaucuaagag

SEQ ID NO: 571598 - RNA, 23 nt, Artificial Sequence
  Synthetic
caauacccaauuucaucuaagag

SEQ ID NO: 571599 - RNA, 24 nt, Artificial Sequence
  Synthetic
acaauacccaauuucaucuaagag

SEQ ID NO: 571600 - RNA, 18 nt, Artificial Sequence
  Synthetic
aacuuuuacuucuaagag

SEQ ID NO: 571601 - RNA, 19 nt, Artificial Sequence
  Synthetic
caacuuuuacuucuaagag

SEQ ID NO: 571602 - RNA, 20 nt, Artificial Sequence
  Synthetic
ccaacuuuuacuucuaagag

SEQ ID NO: 571603 - RNA, 21 nt, Artificial Sequence
  Synthetic
cccaacuuuuacuucuaagag

SEQ ID NO: 571604 - RNA, 22 nt, Artificial Sequence
  Synthetic
acccaacuuuuacuucuaagag

SEQ ID NO: 571605 - RNA, 23 nt, Artificial Sequence
  Synthetic
gacccaacuuuuacuucuaagag

SEQ ID NO: 571606 - RNA, 24 nt, Artificial Sequence
  Synthetic
agacccaacuuuuacuucuaagag

SEQ ID NO: 571607 - RNA, 18 nt, Artificial Sequence
  Synthetic
ugcuauaggagguaagag

SEQ ID NO: 571608 - RNA, 19 nt, Artificial Sequence
  Synthetic
gugcuauaggagguaagag

SEQ ID NO: 571609 - RNA, 20 nt, Artificial Sequence
  Synthetic
agugcuauaggagguaagag

SEQ ID NO: 571610 - RNA, 21 nt, Artificial Sequence
  Synthetic
aagugcuauaggagguaagag

SEQ ID NO: 571611 - RNA, 22 nt, Artificial Sequence
  Synthetic
uaagugcuauaggagguaagag

SEQ ID NO: 571612 - RNA, 23 nt, Artificial Sequence
  Synthetic
auaagugcuauaggagguaagag

SEQ ID NO: 571613 - RNA, 24 nt, Artificial Sequence
  Synthetic
aauaagugcuauaggagguaagag

SEQ ID NO: 571614 - RNA, 18 nt, Artificial Sequence
  Synthetic
ggguauuuccauuaagag

SEQ ID NO: 571615 - RNA, 19 nt, Artificial Sequence
  Synthetic
uggguauuuccauuaagag

SEQ ID NO: 571616 - RNA, 20 nt, Artificial Sequence
  Synthetic
cuggguauuuccauuaagag

SEQ ID NO: 571617 - RNA, 21 nt, Artificial Sequence
  Synthetic
ccuggguauuuccauuaagag

SEQ ID NO: 571618 - RNA, 22 nt, Artificial Sequence
  Synthetic
accuggguauuuccauuaagag

SEQ ID NO: 571619 - RNA, 23 nt, Artificial Sequence
  Synthetic
aaccuggguauuuccauuaagag

SEQ ID NO: 571620 - RNA, 24 nt, Artificial Sequence
  Synthetic
aaaccuggguauuuccauuaagag

SEQ ID NO: 571621 - RNA, 18 nt, Artificial Sequence
  Synthetic
ugaucaggagcuuaagag

SEQ ID NO: 571622 - RNA, 19 nt, Artificial Sequence
  Synthetic
uugaucaggagcuuaagag

SEQ ID NO: 571623 - RNA, 20 nt, Artificial Sequence
  Synthetic
auugaucaggagcuuaagag

SEQ ID NO: 571624 - RNA, 21 nt, Artificial Sequence
  Synthetic
cauugaucaggagcuuaagag

SEQ ID NO: 571625 - RNA, 22 nt, Artificial Sequence
  Synthetic
acauugaucaggagcuuaagag

SEQ ID NO: 571626 - RNA, 23 nt, Artificial Sequence
  Synthetic
gacauugaucaggagcuuaagag

SEQ ID NO: 571627 - RNA, 24 nt, Artificial Sequence
  Synthetic
agacauugaucaggagcuuaagag

SEQ ID NO: 571628 - RNA, 18 nt, Artificial Sequence
  Synthetic
uagcguagugcuuaagag

SEQ ID NO: 571629 - RNA, 19 nt, Artificial Sequence
  Synthetic
auagcguagugcuuaagag

SEQ ID NO: 571630 - RNA, 20 nt, Artificial Sequence
  Synthetic
uauagcguagugcuuaagag

SEQ ID NO: 571631 - RNA, 21 nt, Artificial Sequence
  Synthetic
guauagcguagugcuuaagag

SEQ ID NO: 571632 - RNA, 22 nt, Artificial Sequence
  Synthetic
uguauagcguagugcuuaagag

SEQ ID NO: 571633 - RNA, 23 nt, Artificial Sequence
  Synthetic
cuguauagcguagugcuuaagag

SEQ ID NO: 571634 - RNA, 24 nt, Artificial Sequence
  Synthetic
acuguauagcguagugcuuaagag

SEQ ID NO: 571635 - RNA, 18 nt, Artificial Sequence
  Synthetic
aaacaaguaaguuaagag

SEQ ID NO: 571636 - RNA, 19 nt, Artificial Sequence
  Synthetic
aaaacaaguaaguuaagag

SEQ ID NO: 571637 - RNA, 20 nt, Artificial Sequence
  Synthetic
uaaaacaaguaaguuaagag

SEQ ID NO: 571638 - RNA, 21 nt, Artificial Sequence
  Synthetic
guaaaacaaguaaguuaagag

SEQ ID NO: 571639 - RNA, 22 nt, Artificial Sequence
  Synthetic
aguaaaacaaguaaguuaagag

SEQ ID NO: 571640 - RNA, 23 nt, Artificial Sequence
  Synthetic
caguaaaacaaguaaguuaagag

SEQ ID NO: 571641 - RNA, 24 nt, Artificial Sequence
  Synthetic
gcaguaaaacaaguaaguuaagag

SEQ ID NO: 571642 - RNA, 18 nt, Artificial Sequence
  Synthetic
cuaccaaaagguuaagag

SEQ ID NO: 571643 - RNA, 19 nt, Artificial Sequence
  Synthetic
acuaccaaaagguuaagag

SEQ ID NO: 571644 - RNA, 20 nt, Artificial Sequence
  Synthetic
aacuaccaaaagguuaagag

SEQ ID NO: 571645 - RNA, 21 nt, Artificial Sequence
  Synthetic
aaacuaccaaaagguuaagag

SEQ ID NO: 571646 - RNA, 22 nt, Artificial Sequence
  Synthetic
aaaacuaccaaaagguuaagag

SEQ ID NO: 571647 - RNA, 23 nt, Artificial Sequence
  Synthetic
uaaaacuaccaaaagguuaagag

SEQ ID NO: 571648 - RNA, 24 nt, Artificial Sequence
  Synthetic
auaaaacuaccaaaagguuaagag

SEQ ID NO: 571649 - RNA, 18 nt, Artificial Sequence
  Synthetic
uuaauuuaauuuuaagag

SEQ ID NO: 571650 - RNA, 19 nt, Artificial Sequence
  Synthetic
uuuaauuuaauuuuaagag

SEQ ID NO: 571651 - RNA, 20 nt, Artificial Sequence
  Synthetic
auuuaauuuaauuuuaagag

SEQ ID NO: 571652 - RNA, 21 nt, Artificial Sequence
  Synthetic
aauuuaauuuaauuuuaagag

SEQ ID NO: 571653 - RNA, 22 nt, Artificial Sequence
  Synthetic
aaauuuaauuuaauuuuaagag

SEQ ID NO: 571654 - RNA, 23 nt, Artificial Sequence
  Synthetic
uaaauuuaauuuaauuuuaagag

SEQ ID NO: 571655 - RNA, 24 nt, Artificial Sequence
  Synthetic
uuaaauuuaauuuaauuuuaagag

SEQ ID NO: 571656 - RNA, 18 nt, Artificial Sequence
  Synthetic
guuacaauguuuuaagag

SEQ ID NO: 571657 - RNA, 19 nt, Artificial Sequence
  Synthetic
gguuacaauguuuuaagag

SEQ ID NO: 571658 - RNA, 20 nt, Artificial Sequence
  Synthetic
ggguuacaauguuuuaagag

SEQ ID NO: 571659 - RNA, 21 nt, Artificial Sequence
  Synthetic
uggguuacaauguuuuaagag

SEQ ID NO: 571660 - RNA, 22 nt, Artificial Sequence
  Synthetic
auggguuacaauguuuuaagag

SEQ ID NO: 571661 - RNA, 23 nt, Artificial Sequence
  Synthetic
aauggguuacaauguuuuaagag

SEQ ID NO: 571662 - RNA, 24 nt, Artificial Sequence
  Synthetic
aaauggguuacaauguuuuaagag

SEQ ID NO: 571663 - RNA, 18 nt, Artificial Sequence
  Synthetic
gggagaaaggcaacagag

SEQ ID NO: 571664 - RNA, 19 nt, Artificial Sequence
  Synthetic
ggggagaaaggcaacagag

SEQ ID NO: 571665 - RNA, 20 nt, Artificial Sequence
  Synthetic
gggggagaaaggcaacagag

SEQ ID NO: 571666 - RNA, 21 nt, Artificial Sequence
  Synthetic
ggggggagaaaggcaacagag

SEQ ID NO: 571667 - RNA, 22 nt, Artificial Sequence
  Synthetic
aggggggagaaaggcaacagag

SEQ ID NO: 571668 - RNA, 23 nt, Artificial Sequence
  Synthetic
aaggggggagaaaggcaacagag

SEQ ID NO: 571669 - RNA, 24 nt, Artificial Sequence
  Synthetic
gaaggggggagaaaggcaacagag

SEQ ID NO: 571670 - RNA, 18 nt, Artificial Sequence
  Synthetic
uauacauucagaacagag

SEQ ID NO: 571671 - RNA, 19 nt, Artificial Sequence
  Synthetic
auauacauucagaacagag

SEQ ID NO: 571672 - RNA, 20 nt, Artificial Sequence
  Synthetic
uauauacauucagaacagag

SEQ ID NO: 571673 - RNA, 21 nt, Artificial Sequence
  Synthetic
auauauacauucagaacagag

SEQ ID NO: 571674 - RNA, 22 nt, Artificial Sequence
  Synthetic
aauauauacauucagaacagag

SEQ ID NO: 571675 - RNA, 23 nt, Artificial Sequence
  Synthetic
caauauauacauucagaacagag

SEQ ID NO: 571676 - RNA, 24 nt, Artificial Sequence
  Synthetic
acaauauauacauucagaacagag

SEQ ID NO: 571677 - RNA, 18 nt, Artificial Sequence
  Synthetic
aguucuuggaacacagag

SEQ ID NO: 571678 - RNA, 19 nt, Artificial Sequence
  Synthetic
caguucuuggaacacagag

SEQ ID NO: 571679 - RNA, 20 nt, Artificial Sequence
  Synthetic
ucaguucuuggaacacagag

SEQ ID NO: 571680 - RNA, 21 nt, Artificial Sequence
  Synthetic
gucaguucuuggaacacagag

SEQ ID NO: 571681 - RNA, 22 nt, Artificial Sequence
  Synthetic
ugucaguucuuggaacacagag

SEQ ID NO: 571682 - RNA, 23 nt, Artificial Sequence
  Synthetic
cugucaguucuuggaacacagag

SEQ ID NO: 571683 - RNA, 24 nt, Artificial Sequence
  Synthetic
acugucaguucuuggaacacagag

SEQ ID NO: 571684 - RNA, 18 nt, Artificial Sequence
  Synthetic
gaacacauggacacagag

SEQ ID NO: 571685 - RNA, 19 nt, Artificial Sequence
  Synthetic
agaacacauggacacagag

SEQ ID NO: 571686 - RNA, 20 nt, Artificial Sequence
  Synthetic
gagaacacauggacacagag

SEQ ID NO: 571687 - RNA, 21 nt, Artificial Sequence
  Synthetic
ugagaacacauggacacagag

SEQ ID NO: 571688 - RNA, 22 nt, Artificial Sequence
  Synthetic
augagaacacauggacacagag

SEQ ID NO: 571689 - RNA, 23 nt, Artificial Sequence
  Synthetic
gaugagaacacauggacacagag

SEQ ID NO: 571690 - RNA, 24 nt, Artificial Sequence
  Synthetic
ugaugagaacacauggacacagag

SEQ ID NO: 571691 - RNA, 18 nt, Artificial Sequence
  Synthetic
guauaauggagcacagag

SEQ ID NO: 571692 - RNA, 19 nt, Artificial Sequence
  Synthetic
uguauaauggagcacagag

SEQ ID NO: 571693 - RNA, 20 nt, Artificial Sequence
  Synthetic
auguauaauggagcacagag

SEQ ID NO: 571694 - RNA, 21 nt, Artificial Sequence
  Synthetic
aauguauaauggagcacagag

SEQ ID NO: 571695 - RNA, 22 nt, Artificial Sequence
  Synthetic
caauguauaauggagcacagag

SEQ ID NO: 571696 - RNA, 23 nt, Artificial Sequence
  Synthetic
gcaauguauaauggagcacagag

SEQ ID NO: 571697 - RNA, 24 nt, Artificial Sequence
  Synthetic
ugcaauguauaauggagcacagag

SEQ ID NO: 571698 - RNA, 18 nt, Artificial Sequence
  Synthetic
acugcguuuggcacagag

SEQ ID NO: 571699 - RNA, 19 nt, Artificial Sequence
  Synthetic
aacugcguuuggcacagag

SEQ ID NO: 571700 - RNA, 20 nt, Artificial Sequence
  Synthetic
gaacugcguuuggcacagag

SEQ ID NO: 571701 - RNA, 21 nt, Artificial Sequence
  Synthetic
agaacugcguuuggcacagag

SEQ ID NO: 571702 - RNA, 22 nt, Artificial Sequence
  Synthetic
uagaacugcguuuggcacagag

SEQ ID NO: 571703 - RNA, 23 nt, Artificial Sequence
  Synthetic
cuagaacugcguuuggcacagag

SEQ ID NO: 571704 - RNA, 24 nt, Artificial Sequence
  Synthetic
gcuagaacugcguuuggcacagag

SEQ ID NO: 571705 - RNA, 18 nt, Artificial Sequence
  Synthetic
aaaaugaggaucacagag

SEQ ID NO: 571706 - RNA, 19 nt, Artificial Sequence
  Synthetic
gaaaaugaggaucacagag

SEQ ID NO: 571707 - RNA, 20 nt, Artificial Sequence
  Synthetic
ugaaaaugaggaucacagag

SEQ ID NO: 571708 - RNA, 21 nt, Artificial Sequence
  Synthetic
cugaaaaugaggaucacagag

SEQ ID NO: 571709 - RNA, 22 nt, Artificial Sequence
  Synthetic
ucugaaaaugaggaucacagag

SEQ ID NO: 571710 - RNA, 23 nt, Artificial Sequence
  Synthetic
cucugaaaaugaggaucacagag

SEQ ID NO: 571711 - RNA, 24 nt, Artificial Sequence
  Synthetic
ccucugaaaaugaggaucacagag

SEQ ID NO: 571712 - RNA, 18 nt, Artificial Sequence
  Synthetic
cugaaaucauucacagag

SEQ ID NO: 571713 - RNA, 19 nt, Artificial Sequence
  Synthetic
acugaaaucauucacagag

SEQ ID NO: 571714 - RNA, 20 nt, Artificial Sequence
  Synthetic
gacugaaaucauucacagag

SEQ ID NO: 571715 - RNA, 21 nt, Artificial Sequence
  Synthetic
ugacugaaaucauucacagag

SEQ ID NO: 571716 - RNA, 22 nt, Artificial Sequence
  Synthetic
gugacugaaaucauucacagag

SEQ ID NO: 571717 - RNA, 23 nt, Artificial Sequence
  Synthetic
ggugacugaaaucauucacagag

SEQ ID NO: 571718 - RNA, 24 nt, Artificial Sequence
  Synthetic
aggugacugaaaucauucacagag

SEQ ID NO: 571719 - RNA, 18 nt, Artificial Sequence
  Synthetic
auaguaagaaagacagag

SEQ ID NO: 571720 - RNA, 19 nt, Artificial Sequence
  Synthetic
uauaguaagaaagacagag

SEQ ID NO: 571721 - RNA, 20 nt, Artificial Sequence
  Synthetic
cuauaguaagaaagacagag

SEQ ID NO: 571722 - RNA, 21 nt, Artificial Sequence
  Synthetic
acuauaguaagaaagacagag

SEQ ID NO: 571723 - RNA, 22 nt, Artificial Sequence
  Synthetic
aacuauaguaagaaagacagag

SEQ ID NO: 571724 - RNA, 23 nt, Artificial Sequence
  Synthetic
aaacuauaguaagaaagacagag

SEQ ID NO: 571725 - RNA, 24 nt, Artificial Sequence
  Synthetic
caaacuauaguaagaaagacagag

SEQ ID NO: 571726 - RNA, 18 nt, Artificial Sequence
  Synthetic
uagcucuguaagacagag

SEQ ID NO: 571727 - RNA, 19 nt, Artificial Sequence
  Synthetic
guagcucuguaagacagag

SEQ ID NO: 571728 - RNA, 20 nt, Artificial Sequence
  Synthetic
cguagcucuguaagacagag

SEQ ID NO: 571729 - RNA, 21 nt, Artificial Sequence
  Synthetic
ccguagcucuguaagacagag

SEQ ID NO: 571730 - RNA, 22 nt, Artificial Sequence
  Synthetic
uccguagcucuguaagacagag

SEQ ID NO: 571731 - RNA, 23 nt, Artificial Sequence
  Synthetic
auccguagcucuguaagacagag

SEQ ID NO: 571732 - RNA, 24 nt, Artificial Sequence
  Synthetic
uauccguagcucuguaagacagag

SEQ ID NO: 571733 - RNA, 18 nt, Artificial Sequence
  Synthetic
caaaagagugagacagag

SEQ ID NO: 571734 - RNA, 19 nt, Artificial Sequence
  Synthetic
ccaaaagagugagacagag

SEQ ID NO: 571735 - RNA, 20 nt, Artificial Sequence
  Synthetic
accaaaagagugagacagag

SEQ ID NO: 571736 - RNA, 21 nt, Artificial Sequence
  Synthetic
aaccaaaagagugagacagag

SEQ ID NO: 571737 - RNA, 22 nt, Artificial Sequence
  Synthetic
aaaccaaaagagugagacagag

SEQ ID NO: 571738 - RNA, 23 nt, Artificial Sequence
  Synthetic
aaaaccaaaagagugagacagag

SEQ ID NO: 571739 - RNA, 24 nt, Artificial Sequence
  Synthetic
aaaaaccaaaagagugagacagag

SEQ ID NO: 571740 - RNA, 18 nt, Artificial Sequence
  Synthetic
cacaaacaagcgacagag

SEQ ID NO: 571741 - RNA, 19 nt, Artificial Sequence
  Synthetic
gcacaaacaagcgacagag

SEQ ID NO: 571742 - RNA, 20 nt, Artificial Sequence
  Synthetic
ugcacaaacaagcgacagag

SEQ ID NO: 571743 - RNA, 21 nt, Artificial Sequence
  Synthetic
cugcacaaacaagcgacagag

SEQ ID NO: 571744 - RNA, 22 nt, Artificial Sequence
  Synthetic
gcugcacaaacaagcgacagag

SEQ ID NO: 571745 - RNA, 23 nt, Artificial Sequence
  Synthetic
agcugcacaaacaagcgacagag

SEQ ID NO: 571746 - RNA, 24 nt, Artificial Sequence
  Synthetic
uagcugcacaaacaagcgacagag

SEQ ID NO: 571747 - RNA, 18 nt, Artificial Sequence
  Synthetic
auauugaaaaggacagag

SEQ ID NO: 571748 - RNA, 19 nt, Artificial Sequence
  Synthetic
aauauugaaaaggacagag

SEQ ID NO: 571749 - RNA, 20 nt, Artificial Sequence
  Synthetic
aaauauugaaaaggacagag

SEQ ID NO: 571750 - RNA, 21 nt, Artificial Sequence
  Synthetic
aaaauauugaaaaggacagag

SEQ ID NO: 571751 - RNA, 22 nt, Artificial Sequence
  Synthetic
gaaaauauugaaaaggacagag

SEQ ID NO: 571752 - RNA, 23 nt, Artificial Sequence
  Synthetic
ugaaaauauugaaaaggacagag

SEQ ID NO: 571753 - RNA, 24 nt, Artificial Sequence
  Synthetic
augaaaauauugaaaaggacagag

SEQ ID NO: 571754 - RNA, 18 nt, Artificial Sequence
  Synthetic
aaaaaaaaaaauacagag

SEQ ID NO: 571755 - RNA, 19 nt, Artificial Sequence
  Synthetic
aaaaaaaaaaaauacagag

SEQ ID NO: 571756 - RNA, 20 nt, Artificial Sequence
  Synthetic
gaaaaaaaaaaaauacagag

SEQ ID NO: 571757 - RNA, 21 nt, Artificial Sequence
  Synthetic
ugaaaaaaaaaaaauacagag

SEQ ID NO: 571758 - RNA, 22 nt, Artificial Sequence
  Synthetic
uugaaaaaaaaaaaauacagag

SEQ ID NO: 571759 - RNA, 23 nt, Artificial Sequence
  Synthetic
uuugaaaaaaaaaaaauacagag

SEQ ID NO: 571760 - RNA, 24 nt, Artificial Sequence
  Synthetic
auuugaaaaaaaaaaaauacagag

SEQ ID NO: 571761 - RNA, 18 nt, Artificial Sequence
  Synthetic
gaugugaggaauacagag

SEQ ID NO: 571762 - RNA, 19 nt, Artificial Sequence
  Synthetic
ugaugugaggaauacagag

SEQ ID NO: 571763 - RNA, 20 nt, Artificial Sequence
  Synthetic
uugaugugaggaauacagag

SEQ ID NO: 571764 - RNA, 21 nt, Artificial Sequence
  Synthetic
uuugaugugaggaauacagag

SEQ ID NO: 571765 - RNA, 22 nt, Artificial Sequence
  Synthetic
auuugaugugaggaauacagag

SEQ ID NO: 571766 - RNA, 23 nt, Artificial Sequence
  Synthetic
aauuugaugugaggaauacagag

SEQ ID NO: 571767 - RNA, 24 nt, Artificial Sequence
  Synthetic
aaauuugaugugaggaauacagag

SEQ ID NO: 571768 - RNA, 18 nt, Artificial Sequence
  Synthetic
acaaauucaacuacagag

SEQ ID NO: 571769 - RNA, 19 nt, Artificial Sequence
  Synthetic
aacaaauucaacuacagag

SEQ ID NO: 571770 - RNA, 20 nt, Artificial Sequence
  Synthetic
gaacaaauucaacuacagag

SEQ ID NO: 571771 - RNA, 21 nt, Artificial Sequence
  Synthetic
agaacaaauucaacuacagag

SEQ ID NO: 571772 - RNA, 22 nt, Artificial Sequence
  Synthetic
uagaacaaauucaacuacagag

SEQ ID NO: 571773 - RNA, 23 nt, Artificial Sequence
  Synthetic
auagaacaaauucaacuacagag

SEQ ID NO: 571774 - RNA, 24 nt, Artificial Sequence
  Synthetic
uauagaacaaauucaacuacagag

SEQ ID NO: 571775 - RNA, 18 nt, Artificial Sequence
  Synthetic
cagaggagaacuacagag

SEQ ID NO: 571776 - RNA, 19 nt, Artificial Sequence
  Synthetic
ccagaggagaacuacagag

SEQ ID NO: 571777 - RNA, 20 nt, Artificial Sequence
  Synthetic
accagaggagaacuacagag

SEQ ID NO: 571778 - RNA, 21 nt, Artificial Sequence
  Synthetic
caccagaggagaacuacagag

SEQ ID NO: 571779 - RNA, 22 nt, Artificial Sequence
  Synthetic
acaccagaggagaacuacagag

SEQ ID NO: 571780 - RNA, 23 nt, Artificial Sequence
  Synthetic
gacaccagaggagaacuacagag

SEQ ID NO: 571781 - RNA, 24 nt, Artificial Sequence
  Synthetic
ggacaccagaggagaacuacagag

SEQ ID NO: 571782 - RNA, 18 nt, Artificial Sequence
  Synthetic
agaauauccaguacagag

SEQ ID NO: 571783 - RNA, 19 nt, Artificial Sequence
  Synthetic
aagaauauccaguacagag

SEQ ID NO: 571784 - RNA, 20 nt, Artificial Sequence
  Synthetic
caagaauauccaguacagag

SEQ ID NO: 571785 - RNA, 21 nt, Artificial Sequence
  Synthetic
ucaagaauauccaguacagag

SEQ ID NO: 571786 - RNA, 22 nt, Artificial Sequence
  Synthetic
aucaagaauauccaguacagag

SEQ ID NO: 571787 - RNA, 23 nt, Artificial Sequence
  Synthetic
uaucaagaauauccaguacagag

SEQ ID NO: 571788 - RNA, 24 nt, Artificial Sequence
  Synthetic
cuaucaagaauauccaguacagag

SEQ ID NO: 571789 - RNA, 18 nt, Artificial Sequence
  Synthetic
ugccuccguauuacagag

SEQ ID NO: 571790 - RNA, 19 nt, Artificial Sequence
  Synthetic
uugccuccguauuacagag

SEQ ID NO: 571791 - RNA, 20 nt, Artificial Sequence
  Synthetic
auugccuccguauuacagag

SEQ ID NO: 571792 - RNA, 21 nt, Artificial Sequence
  Synthetic
uauugccuccguauuacagag

SEQ ID NO: 571793 - RNA, 22 nt, Artificial Sequence
  Synthetic
uuauugccuccguauuacagag

SEQ ID NO: 571794 - RNA, 23 nt, Artificial Sequence
  Synthetic
uuuauugccuccguauuacagag

SEQ ID NO: 571795 - RNA, 24 nt, Artificial Sequence
  Synthetic
uuuuauugccuccguauuacagag

SEQ ID NO: 571796 - RNA, 18 nt, Artificial Sequence
  Synthetic
ugagccuauuuuacagag

SEQ ID NO: 571797 - RNA, 19 nt, Artificial Sequence
  Synthetic
gugagccuauuuuacagag

SEQ ID NO: 571798 - RNA, 20 nt, Artificial Sequence
  Synthetic
agugagccuauuuuacagag

SEQ ID NO: 571799 - RNA, 21 nt, Artificial Sequence
  Synthetic
aagugagccuauuuuacagag

SEQ ID NO: 571800 - RNA, 22 nt, Artificial Sequence
  Synthetic
uaagugagccuauuuuacagag

SEQ ID NO: 571801 - RNA, 23 nt, Artificial Sequence
  Synthetic
auaagugagccuauuuuacagag

SEQ ID NO: 571802 - RNA, 24 nt, Artificial Sequence
  Synthetic
uauaagugagccuauuuuacagag

SEQ ID NO: 571803 - RNA, 18 nt, Artificial Sequence
  Synthetic
uaagaagacaaaccagag

SEQ ID NO: 571804 - RNA, 19 nt, Artificial Sequence
  Synthetic
auaagaagacaaaccagag

SEQ ID NO: 571805 - RNA, 20 nt, Artificial Sequence
  Synthetic
uauaagaagacaaaccagag

SEQ ID NO: 571806 - RNA, 21 nt, Artificial Sequence
  Synthetic
cuauaagaagacaaaccagag

SEQ ID NO: 571807 - RNA, 22 nt, Artificial Sequence
  Synthetic
acuauaagaagacaaaccagag

SEQ ID NO: 571808 - RNA, 23 nt, Artificial Sequence
  Synthetic
gacuauaagaagacaaaccagag

SEQ ID NO: 571809 - RNA, 24 nt, Artificial Sequence
  Synthetic
ugacuauaagaagacaaaccagag

SEQ ID NO: 571810 - RNA, 18 nt, Artificial Sequence
  Synthetic
ucucucucgaaaccagag

SEQ ID NO: 571811 - RNA, 19 nt, Artificial Sequence
  Synthetic
cucucucucgaaaccagag

SEQ ID NO: 571812 - RNA, 20 nt, Artificial Sequence
  Synthetic
ucucucucucgaaaccagag

SEQ ID NO: 571813 - RNA, 21 nt, Artificial Sequence
  Synthetic
cucucucucucgaaaccagag

SEQ ID NO: 571814 - RNA, 22 nt, Artificial Sequence
  Synthetic
ucucucucucucgaaaccagag

SEQ ID NO: 571815 - RNA, 23 nt, Artificial Sequence
  Synthetic
cucucucucucucgaaaccagag

SEQ ID NO: 571816 - RNA, 24 nt, Artificial Sequence
  Synthetic
ucucucucucucucgaaaccagag

SEQ ID NO: 571817 - RNA, 18 nt, Artificial Sequence
  Synthetic
cacacuguacaaccagag

SEQ ID NO: 571818 - RNA, 19 nt, Artificial Sequence
  Synthetic
acacacuguacaaccagag

SEQ ID NO: 571819 - RNA, 20 nt, Artificial Sequence
  Synthetic
aacacacuguacaaccagag

SEQ ID NO: 571820 - RNA, 21 nt, Artificial Sequence
  Synthetic
gaacacacuguacaaccagag

SEQ ID NO: 571821 - RNA, 22 nt, Artificial Sequence
  Synthetic
ugaacacacuguacaaccagag

SEQ ID NO: 571822 - RNA, 23 nt, Artificial Sequence
  Synthetic
uugaacacacuguacaaccagag

SEQ ID NO: 571823 - RNA, 24 nt, Artificial Sequence
  Synthetic
auugaacacacuguacaaccagag

SEQ ID NO: 571824 - RNA, 18 nt, Artificial Sequence
  Synthetic
ugccuggggacaccagag

SEQ ID NO: 571825 - RNA, 19 nt, Artificial Sequence
  Synthetic
cugccuggggacaccagag

SEQ ID NO: 571826 - RNA, 20 nt, Artificial Sequence
  Synthetic
acugccuggggacaccagag

SEQ ID NO: 571827 - RNA, 21 nt, Artificial Sequence
  Synthetic
cacugccuggggacaccagag

SEQ ID NO: 571828 - RNA, 22 nt, Artificial Sequence
  Synthetic
ucacugccuggggacaccagag

SEQ ID NO: 571829 - RNA, 23 nt, Artificial Sequence
  Synthetic
uucacugccuggggacaccagag

SEQ ID NO: 571830 - RNA, 24 nt, Artificial Sequence
  Synthetic
guucacugccuggggacaccagag

SEQ ID NO: 571831 - RNA, 18 nt, Artificial Sequence
  Synthetic
ugacuccugucaccagag

SEQ ID NO: 571832 - RNA, 19 nt, Artificial Sequence
  Synthetic
gugacuccugucaccagag

SEQ ID NO: 571833 - RNA, 20 nt, Artificial Sequence
  Synthetic
agugacuccugucaccagag

SEQ ID NO: 571834 - RNA, 21 nt, Artificial Sequence
  Synthetic
gagugacuccugucaccagag

SEQ ID NO: 571835 - RNA, 22 nt, Artificial Sequence
  Synthetic
agagugacuccugucaccagag

SEQ ID NO: 571836 - RNA, 23 nt, Artificial Sequence
  Synthetic
aagagugacuccugucaccagag

SEQ ID NO: 571837 - RNA, 24 nt, Artificial Sequence
  Synthetic
aaagagugacuccugucaccagag

SEQ ID NO: 571838 - RNA, 18 nt, Artificial Sequence
  Synthetic
uccugccuugggccagag

SEQ ID NO: 571839 - RNA, 19 nt, Artificial Sequence
  Synthetic
guccugccuugggccagag

SEQ ID NO: 571840 - RNA, 20 nt, Artificial Sequence
  Synthetic
gguccugccuugggccagag

SEQ ID NO: 571841 - RNA, 21 nt, Artificial Sequence
  Synthetic
ugguccugccuugggccagag

SEQ ID NO: 571842 - RNA, 22 nt, Artificial Sequence
  Synthetic
uugguccugccuugggccagag

SEQ ID NO: 571843 - RNA, 23 nt, Artificial Sequence
  Synthetic
uuugguccugccuugggccagag

SEQ ID NO: 571844 - RNA, 24 nt, Artificial Sequence
  Synthetic
uuuugguccugccuugggccagag

SEQ ID NO: 571845 - RNA, 18 nt, Artificial Sequence
  Synthetic
gcgggcggacugccagag

SEQ ID NO: 571846 - RNA, 19 nt, Artificial Sequence
  Synthetic
ggcgggcggacugccagag

SEQ ID NO: 571847 - RNA, 20 nt, Artificial Sequence
  Synthetic
aggcgggcggacugccagag

SEQ ID NO: 571848 - RNA, 21 nt, Artificial Sequence
  Synthetic
aaggcgggcggacugccagag

SEQ ID NO: 571849 - RNA, 22 nt, Artificial Sequence
  Synthetic
caaggcgggcggacugccagag

SEQ ID NO: 571850 - RNA, 23 nt, Artificial Sequence
  Synthetic
ccaaggcgggcggacugccagag

SEQ ID NO: 571851 - RNA, 24 nt, Artificial Sequence
  Synthetic
gccaaggcgggcggacugccagag

SEQ ID NO: 571852 - RNA, 18 nt, Artificial Sequence
  Synthetic
gagcuugaacauccagag

SEQ ID NO: 571853 - RNA, 19 nt, Artificial Sequence
  Synthetic
ggagcuugaacauccagag

SEQ ID NO: 571854 - RNA, 20 nt, Artificial Sequence
  Synthetic
uggagcuugaacauccagag

SEQ ID NO: 571855 - RNA, 21 nt, Artificial Sequence
  Synthetic
cuggagcuugaacauccagag

SEQ ID NO: 571856 - RNA, 22 nt, Artificial Sequence
  Synthetic
ucuggagcuugaacauccagag

SEQ ID NO: 571857 - RNA, 23 nt, Artificial Sequence
  Synthetic
cucuggagcuugaacauccagag

SEQ ID NO: 571858 - RNA, 24 nt, Artificial Sequence
  Synthetic
acucuggagcuugaacauccagag

SEQ ID NO: 571859 - RNA, 18 nt, Artificial Sequence
  Synthetic
auaacuauacauccagag

SEQ ID NO: 571860 - RNA, 19 nt, Artificial Sequence
  Synthetic
cauaacuauacauccagag

SEQ ID NO: 571861 - RNA, 20 nt, Artificial Sequence
  Synthetic
ucauaacuauacauccagag

SEQ ID NO: 571862 - RNA, 21 nt, Artificial Sequence
  Synthetic
aucauaacuauacauccagag

SEQ ID NO: 571863 - RNA, 22 nt, Artificial Sequence
  Synthetic
aaucauaacuauacauccagag

SEQ ID NO: 571864 - RNA, 23 nt, Artificial Sequence
  Synthetic
aaaucauaacuauacauccagag

SEQ ID NO: 571865 - RNA, 24 nt, Artificial Sequence
  Synthetic
aaaaucauaacuauacauccagag

SEQ ID NO: 571866 - RNA, 18 nt, Artificial Sequence
  Synthetic
auuuuuaaauauccagag

SEQ ID NO: 571867 - RNA, 19 nt, Artificial Sequence
  Synthetic
aauuuuuaaauauccagag

SEQ ID NO: 571868 - RNA, 20 nt, Artificial Sequence
  Synthetic
uaauuuuuaaauauccagag

SEQ ID NO: 571869 - RNA, 21 nt, Artificial Sequence
  Synthetic
auaauuuuuaaauauccagag

SEQ ID NO: 571870 - RNA, 22 nt, Artificial Sequence
  Synthetic
uauaauuuuuaaauauccagag

SEQ ID NO: 571871 - RNA, 23 nt, Artificial Sequence
  Synthetic
auauaauuuuuaaauauccagag

SEQ ID NO: 571872 - RNA, 24 nt, Artificial Sequence
  Synthetic
uauauaauuuuuaaauauccagag

SEQ ID NO: 571873 - RNA, 18 nt, Artificial Sequence
  Synthetic
gugaaacagauuccagag

SEQ ID NO: 571874 - RNA, 19 nt, Artificial Sequence
  Synthetic
ugugaaacagauuccagag

SEQ ID NO: 571875 - RNA, 20 nt, Artificial Sequence
  Synthetic
cugugaaacagauuccagag

SEQ ID NO: 571876 - RNA, 21 nt, Artificial Sequence
  Synthetic
gcugugaaacagauuccagag

SEQ ID NO: 571877 - RNA, 22 nt, Artificial Sequence
  Synthetic
agcugugaaacagauuccagag

SEQ ID NO: 571878 - RNA, 23 nt, Artificial Sequence
  Synthetic
gagcugugaaacagauuccagag

SEQ ID NO: 571879 - RNA, 24 nt, Artificial Sequence
  Synthetic
agagcugugaaacagauuccagag

SEQ ID NO: 571880 - RNA, 18 nt, Artificial Sequence
  Synthetic
uuauuccuccuuccagag

SEQ ID NO: 571881 - RNA, 19 nt, Artificial Sequence
  Synthetic
auuauuccuccuuccagag

SEQ ID NO: 571882 - RNA, 20 nt, Artificial Sequence
  Synthetic
gauuauuccuccuuccagag

SEQ ID NO: 571883 - RNA, 21 nt, Artificial Sequence
  Synthetic
agauuauuccuccuuccagag

SEQ ID NO: 571884 - RNA, 22 nt, Artificial Sequence
  Synthetic
gagauuauuccuccuuccagag

SEQ ID NO: 571885 - RNA, 23 nt, Artificial Sequence
  Synthetic
ggagauuauuccuccuuccagag

SEQ ID NO: 571886 - RNA, 24 nt, Artificial Sequence
  Synthetic
uggagauuauuccuccuuccagag

SEQ ID NO: 571887 - RNA, 18 nt, Artificial Sequence
  Synthetic
aagauauuccuuccagag

SEQ ID NO: 571888 - RNA, 19 nt, Artificial Sequence
  Synthetic
aaagauauuccuuccagag

SEQ ID NO: 571889 - RNA, 20 nt, Artificial Sequence
  Synthetic
aaaagauauuccuuccagag

SEQ ID NO: 571890 - RNA, 21 nt, Artificial Sequence
  Synthetic
uaaaagauauuccuuccagag

SEQ ID NO: 571891 - RNA, 22 nt, Artificial Sequence
  Synthetic
guaaaagauauuccuuccagag

SEQ ID NO: 571892 - RNA, 23 nt, Artificial Sequence
  Synthetic
aguaaaagauauuccuuccagag

SEQ ID NO: 571893 - RNA, 24 nt, Artificial Sequence
  Synthetic
gaguaaaagauauuccuuccagag

SEQ ID NO: 571894 - RNA, 18 nt, Artificial Sequence
  Synthetic
uugugugacucagcagag

SEQ ID NO: 571895 - RNA, 19 nt, Artificial Sequence
  Synthetic
guugugugacucagcagag

SEQ ID NO: 571896 - RNA, 20 nt, Artificial Sequence
  Synthetic
uguugugugacucagcagag

SEQ ID NO: 571897 - RNA, 21 nt, Artificial Sequence
  Synthetic
guguugugugacucagcagag

SEQ ID NO: 571898 - RNA, 22 nt, Artificial Sequence
  Synthetic
aguguugugugacucagcagag

SEQ ID NO: 571899 - RNA, 23 nt, Artificial Sequence
  Synthetic
uaguguugugugacucagcagag

SEQ ID NO: 571900 - RNA, 24 nt, Artificial Sequence
  Synthetic
uuaguguugugugacucagcagag

SEQ ID NO: 571901 - RNA, 18 nt, Artificial Sequence
  Synthetic
guauaauuuguagcagag

SEQ ID NO: 571902 - RNA, 19 nt, Artificial Sequence
  Synthetic
aguauaauuuguagcagag

SEQ ID NO: 571903 - RNA, 20 nt, Artificial Sequence
  Synthetic
aaguauaauuuguagcagag

SEQ ID NO: 571904 - RNA, 21 nt, Artificial Sequence
  Synthetic
uaaguauaauuuguagcagag

SEQ ID NO: 571905 - RNA, 22 nt, Artificial Sequence
  Synthetic
cuaaguauaauuuguagcagag

SEQ ID NO: 571906 - RNA, 23 nt, Artificial Sequence
  Synthetic
gcuaaguauaauuuguagcagag

SEQ ID NO: 571907 - RNA, 24 nt, Artificial Sequence
  Synthetic
ugcuaaguauaauuuguagcagag

SEQ ID NO: 571908 - RNA, 18 nt, Artificial Sequence
  Synthetic
aaguacauuuuagcagag

SEQ ID NO: 571909 - RNA, 19 nt, Artificial Sequence
  Synthetic
aaaguacauuuuagcagag

SEQ ID NO: 571910 - RNA, 20 nt, Artificial Sequence
  Synthetic
uaaaguacauuuuagcagag

SEQ ID NO: 571911 - RNA, 21 nt, Artificial Sequence
  Synthetic
uuaaaguacauuuuagcagag

SEQ ID NO: 571912 - RNA, 22 nt, Artificial Sequence
  Synthetic
cuuaaaguacauuuuagcagag

SEQ ID NO: 571913 - RNA, 23 nt, Artificial Sequence
  Synthetic
ucuuaaaguacauuuuagcagag

SEQ ID NO: 571914 - RNA, 24 nt, Artificial Sequence
  Synthetic
uucuuaaaguacauuuuagcagag

SEQ ID NO: 571915 - RNA, 21 nt, Artificial Sequence
  Synthetic
auuuuuguauuuuuagcagag

SEQ ID NO: 571916 - RNA, 22 nt, Artificial Sequence
  Synthetic
aauuuuuguauuuuuagcagag

SEQ ID NO: 571917 - RNA, 23 nt, Artificial Sequence
  Synthetic
caauuuuuguauuuuuagcagag

SEQ ID NO: 571918 - RNA, 24 nt, Artificial Sequence
  Synthetic
ccaauuuuuguauuuuuagcagag

SEQ ID NO: 571919 - RNA, 21 nt, Artificial Sequence
  Synthetic
uuuuuuguauuuuuagcagag

SEQ ID NO: 571920 - RNA, 22 nt, Artificial Sequence
  Synthetic
auuuuuuguauuuuuagcagag

SEQ ID NO: 571921 - RNA, 23 nt, Artificial Sequence
  Synthetic
aauuuuuuguauuuuuagcagag

SEQ ID NO: 571922 - RNA, 24 nt, Artificial Sequence
  Synthetic
uaauuuuuuguauuuuuagcagag

SEQ ID NO: 571923 - RNA, 18 nt, Artificial Sequence
  Synthetic
aaauauugagaggcagag

SEQ ID NO: 571924 - RNA, 19 nt, Artificial Sequence
  Synthetic
caaauauugagaggcagag

SEQ ID NO: 571925 - RNA, 20 nt, Artificial Sequence
  Synthetic
ucaaauauugagaggcagag

SEQ ID NO: 571926 - RNA, 21 nt, Artificial Sequence
  Synthetic
cucaaauauugagaggcagag

SEQ ID NO: 571927 - RNA, 22 nt, Artificial Sequence
  Synthetic
acucaaauauugagaggcagag

SEQ ID NO: 571928 - RNA, 23 nt, Artificial Sequence
  Synthetic
gacucaaauauugagaggcagag

SEQ ID NO: 571929 - RNA, 24 nt, Artificial Sequence
  Synthetic
ggacucaaauauugagaggcagag

SEQ ID NO: 571930 - RNA, 18 nt, Artificial Sequence
  Synthetic
ggcuugcaaauggcagag

SEQ ID NO: 571931 - RNA, 19 nt, Artificial Sequence
  Synthetic
uggcuugcaaauggcagag

SEQ ID NO: 571932 - RNA, 20 nt, Artificial Sequence
  Synthetic
guggcuugcaaauggcagag

SEQ ID NO: 571933 - RNA, 21 nt, Artificial Sequence
  Synthetic
uguggcuugcaaauggcagag

SEQ ID NO: 571934 - RNA, 22 nt, Artificial Sequence
  Synthetic
auguggcuugcaaauggcagag

SEQ ID NO: 571935 - RNA, 23 nt, Artificial Sequence
  Synthetic
cauguggcuugcaaauggcagag

SEQ ID NO: 571936 - RNA, 24 nt, Artificial Sequence
  Synthetic
ccauguggcuugcaaauggcagag

SEQ ID NO: 571937 - RNA, 18 nt, Artificial Sequence
  Synthetic
acaaguuaaguggcagag

SEQ ID NO: 571938 - RNA, 19 nt, Artificial Sequence
  Synthetic
uacaaguuaaguggcagag

SEQ ID NO: 571939 - RNA, 20 nt, Artificial Sequence
  Synthetic
auacaaguuaaguggcagag

SEQ ID NO: 571940 - RNA, 21 nt, Artificial Sequence
  Synthetic
uauacaaguuaaguggcagag

SEQ ID NO: 571941 - RNA, 22 nt, Artificial Sequence
  Synthetic
guauacaaguuaaguggcagag

SEQ ID NO: 571942 - RNA, 23 nt, Artificial Sequence
  Synthetic
uguauacaaguuaaguggcagag

SEQ ID NO: 571943 - RNA, 24 nt, Artificial Sequence
  Synthetic
uuguauacaaguuaaguggcagag

SEQ ID NO: 571944 - RNA, 18 nt, Artificial Sequence
  Synthetic
uagcaaaccacugcagag

SEQ ID NO: 571945 - RNA, 19 nt, Artificial Sequence
  Synthetic
cuagcaaaccacugcagag

SEQ ID NO: 571946 - RNA, 20 nt, Artificial Sequence
  Synthetic
acuagcaaaccacugcagag

SEQ ID NO: 571947 - RNA, 21 nt, Artificial Sequence
  Synthetic
gacuagcaaaccacugcagag

SEQ ID NO: 571948 - RNA, 22 nt, Artificial Sequence
  Synthetic
ggacuagcaaaccacugcagag

SEQ ID NO: 571949 - RNA, 23 nt, Artificial Sequence
  Synthetic
aggacuagcaaaccacugcagag

SEQ ID NO: 571950 - RNA, 24 nt, Artificial Sequence
  Synthetic
gaggacuagcaaaccacugcagag

SEQ ID NO: 571951 - RNA, 18 nt, Artificial Sequence
  Synthetic
gaagauagagcugcagag

SEQ ID NO: 571952 - RNA, 19 nt, Artificial Sequence
  Synthetic
agaagauagagcugcagag

SEQ ID NO: 571953 - RNA, 20 nt, Artificial Sequence
  Synthetic
gagaagauagagcugcagag

SEQ ID NO: 571954 - RNA, 21 nt, Artificial Sequence
  Synthetic
agagaagauagagcugcagag

SEQ ID NO: 571955 - RNA, 22 nt, Artificial Sequence
  Synthetic
aagagaagauagagcugcagag

SEQ ID NO: 571956 - RNA, 23 nt, Artificial Sequence
  Synthetic
gaagagaagauagagcugcagag

SEQ ID NO: 571957 - RNA, 24 nt, Artificial Sequence
  Synthetic
agaagagaagauagagcugcagag

SEQ ID NO: 571958 - RNA, 18 nt, Artificial Sequence
  Synthetic
cagaaguuugcugcagag

SEQ ID NO: 571959 - RNA, 19 nt, Artificial Sequence
  Synthetic
gcagaaguuugcugcagag

SEQ ID NO: 571960 - RNA, 20 nt, Artificial Sequence
  Synthetic
ggcagaaguuugcugcagag

SEQ ID NO: 571961 - RNA, 21 nt, Artificial Sequence
  Synthetic
aggcagaaguuugcugcagag

SEQ ID NO: 571962 - RNA, 22 nt, Artificial Sequence
  Synthetic
caggcagaaguuugcugcagag

SEQ ID NO: 571963 - RNA, 23 nt, Artificial Sequence
  Synthetic
ccaggcagaaguuugcugcagag

SEQ ID NO: 571964 - RNA, 24 nt, Artificial Sequence
  Synthetic
uccaggcagaaguuugcugcagag

SEQ ID NO: 571965 - RNA, 18 nt, Artificial Sequence
  Synthetic
auuucugcaagugcagag

SEQ ID NO: 571966 - RNA, 19 nt, Artificial Sequence
  Synthetic
cauuucugcaagugcagag

SEQ ID NO: 571967 - RNA, 20 nt, Artificial Sequence
  Synthetic
acauuucugcaagugcagag

SEQ ID NO: 571968 - RNA, 21 nt, Artificial Sequence
  Synthetic
aacauuucugcaagugcagag

SEQ ID NO: 571969 - RNA, 22 nt, Artificial Sequence
  Synthetic
aaacauuucugcaagugcagag

SEQ ID NO: 571970 - RNA, 23 nt, Artificial Sequence
  Synthetic
uaaacauuucugcaagugcagag

SEQ ID NO: 571971 - RNA, 24 nt, Artificial Sequence
  Synthetic
uuaaacauuucugcaagugcagag

SEQ ID NO: 571972 - RNA, 18 nt, Artificial Sequence
  Synthetic
uggacgugcagugcagag

SEQ ID NO: 571973 - RNA, 19 nt, Artificial Sequence
  Synthetic
cuggacgugcagugcagag

SEQ ID NO: 571974 - RNA, 20 nt, Artificial Sequence
  Synthetic
acuggacgugcagugcagag

SEQ ID NO: 571975 - RNA, 21 nt, Artificial Sequence
  Synthetic
cacuggacgugcagugcagag

SEQ ID NO: 571976 - RNA, 22 nt, Artificial Sequence
  Synthetic
gcacuggacgugcagugcagag

SEQ ID NO: 571977 - RNA, 23 nt, Artificial Sequence
  Synthetic
agcacuggacgugcagugcagag

SEQ ID NO: 571978 - RNA, 24 nt, Artificial Sequence
  Synthetic
cagcacuggacgugcagugcagag

SEQ ID NO: 571979 - RNA, 18 nt, Artificial Sequence
  Synthetic
aaauaacuaaaaucagag

SEQ ID NO: 571980 - RNA, 19 nt, Artificial Sequence
  Synthetic
gaaauaacuaaaaucagag

SEQ ID NO: 571981 - RNA, 20 nt, Artificial Sequence
  Synthetic
agaaauaacuaaaaucagag

SEQ ID NO: 571982 - RNA, 21 nt, Artificial Sequence
  Synthetic
aagaaauaacuaaaaucagag

SEQ ID NO: 571983 - RNA, 22 nt, Artificial Sequence
  Synthetic
caagaaauaacuaaaaucagag

SEQ ID NO: 571984 - RNA, 23 nt, Artificial Sequence
  Synthetic
gcaagaaauaacuaaaaucagag

SEQ ID NO: 571985 - RNA, 24 nt, Artificial Sequence
  Synthetic
ggcaagaaauaacuaaaaucagag

SEQ ID NO: 571986 - RNA, 18 nt, Artificial Sequence
  Synthetic
uacucucccaaaucagag

SEQ ID NO: 571987 - RNA, 19 nt, Artificial Sequence
  Synthetic
guacucucccaaaucagag

SEQ ID NO: 571988 - RNA, 20 nt, Artificial Sequence
  Synthetic
uguacucucccaaaucagag

SEQ ID NO: 571989 - RNA, 21 nt, Artificial Sequence
  Synthetic
uuguacucucccaaaucagag

SEQ ID NO: 571990 - RNA, 22 nt, Artificial Sequence
  Synthetic
uuuguacucucccaaaucagag

SEQ ID NO: 571991 - RNA, 23 nt, Artificial Sequence
  Synthetic
auuuguacucucccaaaucagag

SEQ ID NO: 571992 - RNA, 24 nt, Artificial Sequence
  Synthetic
aauuuguacucucccaaaucagag

SEQ ID NO: 571993 - RNA, 18 nt, Artificial Sequence
  Synthetic
aaaacuucacaaucagag

SEQ ID NO: 571994 - RNA, 19 nt, Artificial Sequence
  Synthetic
gaaaacuucacaaucagag

SEQ ID NO: 571995 - RNA, 20 nt, Artificial Sequence
  Synthetic
agaaaacuucacaaucagag

SEQ ID NO: 571996 - RNA, 21 nt, Artificial Sequence
  Synthetic
aagaaaacuucacaaucagag

SEQ ID NO: 571997 - RNA, 22 nt, Artificial Sequence
  Synthetic
gaagaaaacuucacaaucagag

SEQ ID NO: 571998 - RNA, 23 nt, Artificial Sequence
  Synthetic
ugaagaaaacuucacaaucagag

SEQ ID NO: 571999 - RNA, 24 nt, Artificial Sequence
  Synthetic
cugaagaaaacuucacaaucagag

SEQ ID NO: 572000 - RNA, 18 nt, Artificial Sequence
  Synthetic
uagucugaagaaucagag

SEQ ID NO: 572001 - RNA, 19 nt, Artificial Sequence
  Synthetic
cuagucugaagaaucagag

SEQ ID NO: 572002 - RNA, 20 nt, Artificial Sequence
  Synthetic
ucuagucugaagaaucagag

SEQ ID NO: 572003 - RNA, 21 nt, Artificial Sequence
  Synthetic
uucuagucugaagaaucagag

SEQ ID NO: 572004 - RNA, 22 nt, Artificial Sequence
  Synthetic
uuucuagucugaagaaucagag

SEQ ID NO: 572005 - RNA, 23 nt, Artificial Sequence
  Synthetic
auuucuagucugaagaaucagag

SEQ ID NO: 572006 - RNA, 24 nt, Artificial Sequence
  Synthetic
cauuucuagucugaagaaucagag

SEQ ID NO: 572007 - RNA, 18 nt, Artificial Sequence
  Synthetic
ccaggcagggaaucagag

SEQ ID NO: 572008 - RNA, 19 nt, Artificial Sequence
  Synthetic
accaggcagggaaucagag

SEQ ID NO: 572009 - RNA, 20 nt, Artificial Sequence
  Synthetic
gaccaggcagggaaucagag

SEQ ID NO: 572010 - RNA, 21 nt, Artificial Sequence
  Synthetic
ggaccaggcagggaaucagag

SEQ ID NO: 572011 - RNA, 22 nt, Artificial Sequence
  Synthetic
uggaccaggcagggaaucagag

SEQ ID NO: 572012 - RNA, 23 nt, Artificial Sequence
  Synthetic
guggaccaggcagggaaucagag

SEQ ID NO: 572013 - RNA, 24 nt, Artificial Sequence
  Synthetic
aguggaccaggcagggaaucagag

SEQ ID NO: 572014 - RNA, 18 nt, Artificial Sequence
  Synthetic
aaauaacaaagaucagag

SEQ ID NO: 572015 - RNA, 19 nt, Artificial Sequence
  Synthetic
aaaauaacaaagaucagag

SEQ ID NO: 572016 - RNA, 20 nt, Artificial Sequence
  Synthetic
gaaaauaacaaagaucagag

SEQ ID NO: 572017 - RNA, 21 nt, Artificial Sequence
  Synthetic
agaaaauaacaaagaucagag

SEQ ID NO: 572018 - RNA, 22 nt, Artificial Sequence
  Synthetic
aagaaaauaacaaagaucagag

SEQ ID NO: 572019 - RNA, 23 nt, Artificial Sequence
  Synthetic
gaagaaaauaacaaagaucagag

SEQ ID NO: 572020 - RNA, 24 nt, Artificial Sequence
  Synthetic
agaagaaaauaacaaagaucagag

SEQ ID NO: 572021 - RNA, 19 nt, Artificial Sequence
  Synthetic
gaaauaacaaagaucagag

SEQ ID NO: 572022 - RNA, 20 nt, Artificial Sequence
  Synthetic
agaaauaacaaagaucagag

SEQ ID NO: 572023 - RNA, 21 nt, Artificial Sequence
  Synthetic
aagaaauaacaaagaucagag

SEQ ID NO: 572024 - RNA, 22 nt, Artificial Sequence
  Synthetic
aaagaaauaacaaagaucagag

SEQ ID NO: 572025 - RNA, 23 nt, Artificial Sequence
  Synthetic
aaaagaaauaacaaagaucagag

SEQ ID NO: 572026 - RNA, 24 nt, Artificial Sequence
  Synthetic
gaaaagaaauaacaaagaucagag

SEQ ID NO: 572027 - RNA, 18 nt, Artificial Sequence
  Synthetic
aaauaauaaagaucagag

SEQ ID NO: 572028 - RNA, 19 nt, Artificial Sequence
  Synthetic
gaaauaauaaagaucagag

SEQ ID NO: 572029 - RNA, 20 nt, Artificial Sequence
  Synthetic
agaaauaauaaagaucagag

SEQ ID NO: 572030 - RNA, 21 nt, Artificial Sequence
  Synthetic
aagaaauaauaaagaucagag

SEQ ID NO: 572031 - RNA, 22 nt, Artificial Sequence
  Synthetic
aaagaaauaauaaagaucagag

SEQ ID NO: 572032 - RNA, 23 nt, Artificial Sequence
  Synthetic
gaaagaaauaauaaagaucagag

SEQ ID NO: 572033 - RNA, 24 nt, Artificial Sequence
  Synthetic
agaaagaaauaauaaagaucagag

SEQ ID NO: 572034 - RNA, 18 nt, Artificial Sequence
  Synthetic
uggugcuuuggaucagag

SEQ ID NO: 572035 - RNA, 19 nt, Artificial Sequence
  Synthetic
auggugcuuuggaucagag

SEQ ID NO: 572036 - RNA, 20 nt, Artificial Sequence
  Synthetic
gauggugcuuuggaucagag

SEQ ID NO: 572037 - RNA, 21 nt, Artificial Sequence
  Synthetic
ugauggugcuuuggaucagag

SEQ ID NO: 572038 - RNA, 22 nt, Artificial Sequence
  Synthetic
augauggugcuuuggaucagag

SEQ ID NO: 572039 - RNA, 23 nt, Artificial Sequence
  Synthetic
gaugauggugcuuuggaucagag

SEQ ID NO: 572040 - RNA, 24 nt, Artificial Sequence
  Synthetic
agaugauggugcuuuggaucagag

SEQ ID NO: 572041 - RNA, 18 nt, Artificial Sequence
  Synthetic
gaaaccaaggacucagag

SEQ ID NO: 572042 - RNA, 19 nt, Artificial Sequence
  Synthetic
agaaaccaaggacucagag

SEQ ID NO: 572043 - RNA, 20 nt, Artificial Sequence
  Synthetic
uagaaaccaaggacucagag

SEQ ID NO: 572044 - RNA, 21 nt, Artificial Sequence
  Synthetic
auagaaaccaaggacucagag

SEQ ID NO: 572045 - RNA, 22 nt, Artificial Sequence
  Synthetic
cauagaaaccaaggacucagag

SEQ ID NO: 572046 - RNA, 23 nt, Artificial Sequence
  Synthetic
acauagaaaccaaggacucagag

SEQ ID NO: 572047 - RNA, 24 nt, Artificial Sequence
  Synthetic
aacauagaaaccaaggacucagag

SEQ ID NO: 572048 - RNA, 18 nt, Artificial Sequence
  Synthetic
gaauguagguacucagag

SEQ ID NO: 572049 - RNA, 19 nt, Artificial Sequence
  Synthetic
agaauguagguacucagag

SEQ ID NO: 572050 - RNA, 20 nt, Artificial Sequence
  Synthetic
uagaauguagguacucagag

SEQ ID NO: 572051 - RNA, 21 nt, Artificial Sequence
  Synthetic
uuagaauguagguacucagag

SEQ ID NO: 572052 - RNA, 22 nt, Artificial Sequence
  Synthetic
cuuagaauguagguacucagag

SEQ ID NO: 572053 - RNA, 23 nt, Artificial Sequence
  Synthetic
ccuuagaauguagguacucagag

SEQ ID NO: 572054 - RNA, 24 nt, Artificial Sequence
  Synthetic
uccuuagaauguagguacucagag

SEQ ID NO: 572055 - RNA, 18 nt, Artificial Sequence
  Synthetic
gaaaaaguauccucagag

SEQ ID NO: 572056 - RNA, 19 nt, Artificial Sequence
  Synthetic
ugaaaaaguauccucagag

SEQ ID NO: 572057 - RNA, 20 nt, Artificial Sequence
  Synthetic
augaaaaaguauccucagag

SEQ ID NO: 572058 - RNA, 21 nt, Artificial Sequence
  Synthetic
gaugaaaaaguauccucagag

SEQ ID NO: 572059 - RNA, 22 nt, Artificial Sequence
  Synthetic
agaugaaaaaguauccucagag

SEQ ID NO: 572060 - RNA, 23 nt, Artificial Sequence
  Synthetic
gagaugaaaaaguauccucagag

SEQ ID NO: 572061 - RNA, 24 nt, Artificial Sequence
  Synthetic
ugagaugaaaaaguauccucagag

SEQ ID NO: 572062 - RNA, 18 nt, Artificial Sequence
  Synthetic
ccagaaaaguccucagag

SEQ ID NO: 572063 - RNA, 19 nt, Artificial Sequence
  Synthetic
accagaaaaguccucagag

SEQ ID NO: 572064 - RNA, 20 nt, Artificial Sequence
  Synthetic
aaccagaaaaguccucagag

SEQ ID NO: 572065 - RNA, 21 nt, Artificial Sequence
  Synthetic
aaaccagaaaaguccucagag

SEQ ID NO: 572066 - RNA, 22 nt, Artificial Sequence
  Synthetic
aaaaccagaaaaguccucagag

SEQ ID NO: 572067 - RNA, 23 nt, Artificial Sequence
  Synthetic
caaaaccagaaaaguccucagag

SEQ ID NO: 572068 - RNA, 24 nt, Artificial Sequence
  Synthetic
ucaaaaccagaaaaguccucagag

SEQ ID NO: 572069 - RNA, 18 nt, Artificial Sequence
  Synthetic
gauuuugcaggcucagag

SEQ ID NO: 572070 - RNA, 19 nt, Artificial Sequence
  Synthetic
cgauuuugcaggcucagag

SEQ ID NO: 572071 - RNA, 20 nt, Artificial Sequence
  Synthetic
ucgauuuugcaggcucagag

SEQ ID NO: 572072 - RNA, 21 nt, Artificial Sequence
  Synthetic
uucgauuuugcaggcucagag

SEQ ID NO: 572073 - RNA, 22 nt, Artificial Sequence
  Synthetic
auucgauuuugcaggcucagag

SEQ ID NO: 572074 - RNA, 23 nt, Artificial Sequence
  Synthetic
gauucgauuuugcaggcucagag

SEQ ID NO: 572075 - RNA, 24 nt, Artificial Sequence
  Synthetic
ugauucgauuuugcaggcucagag

SEQ ID NO: 572076 - RNA, 18 nt, Artificial Sequence
  Synthetic
cauaguuuaaagucagag

SEQ ID NO: 572077 - RNA, 19 nt, Artificial Sequence
  Synthetic
ccauaguuuaaagucagag

SEQ ID NO: 572078 - RNA, 20 nt, Artificial Sequence
  Synthetic
uccauaguuuaaagucagag

SEQ ID NO: 572079 - RNA, 21 nt, Artificial Sequence
  Synthetic
uuccauaguuuaaagucagag

SEQ ID NO: 572080 - RNA, 22 nt, Artificial Sequence
  Synthetic
uuuccauaguuuaaagucagag

SEQ ID NO: 572081 - RNA, 23 nt, Artificial Sequence
  Synthetic
cuuuccauaguuuaaagucagag

SEQ ID NO: 572082 - RNA, 24 nt, Artificial Sequence
  Synthetic
acuuuccauaguuuaaagucagag

SEQ ID NO: 572083 - RNA, 18 nt, Artificial Sequence
  Synthetic
uugaugccucugucagag

SEQ ID NO: 572084 - RNA, 19 nt, Artificial Sequence
  Synthetic
cuugaugccucugucagag

SEQ ID NO: 572085 - RNA, 20 nt, Artificial Sequence
  Synthetic
ucuugaugccucugucagag

SEQ ID NO: 572086 - RNA, 21 nt, Artificial Sequence
  Synthetic
uucuugaugccucugucagag

SEQ ID NO: 572087 - RNA, 22 nt, Artificial Sequence
  Synthetic
uuucuugaugccucugucagag

SEQ ID NO: 572088 - RNA, 23 nt, Artificial Sequence
  Synthetic
guuucuugaugccucugucagag

SEQ ID NO: 572089 - RNA, 24 nt, Artificial Sequence
  Synthetic
cguuucuugaugccucugucagag

SEQ ID NO: 572090 - RNA, 18 nt, Artificial Sequence
  Synthetic
ucacaaguuuauucagag

SEQ ID NO: 572091 - RNA, 19 nt, Artificial Sequence
  Synthetic
aucacaaguuuauucagag

SEQ ID NO: 572092 - RNA, 20 nt, Artificial Sequence
  Synthetic
uaucacaaguuuauucagag

SEQ ID NO: 572093 - RNA, 21 nt, Artificial Sequence
  Synthetic
auaucacaaguuuauucagag

SEQ ID NO: 572094 - RNA, 22 nt, Artificial Sequence
  Synthetic
gauaucacaaguuuauucagag

SEQ ID NO: 572095 - RNA, 23 nt, Artificial Sequence
  Synthetic
agauaucacaaguuuauucagag

SEQ ID NO: 572096 - RNA, 24 nt, Artificial Sequence
  Synthetic
aagauaucacaaguuuauucagag

SEQ ID NO: 572097 - RNA, 18 nt, Artificial Sequence
  Synthetic
cuuucccuuucuucagag

SEQ ID NO: 572098 - RNA, 19 nt, Artificial Sequence
  Synthetic
gcuuucccuuucuucagag

SEQ ID NO: 572099 - RNA, 20 nt, Artificial Sequence
  Synthetic
agcuuucccuuucuucagag

SEQ ID NO: 572100 - RNA, 21 nt, Artificial Sequence
  Synthetic
gagcuuucccuuucuucagag

SEQ ID NO: 572101 - RNA, 22 nt, Artificial Sequence
  Synthetic
agagcuuucccuuucuucagag

SEQ ID NO: 572102 - RNA, 23 nt, Artificial Sequence
  Synthetic
gagagcuuucccuuucuucagag

SEQ ID NO: 572103 - RNA, 24 nt, Artificial Sequence
  Synthetic
agagagcuuucccuuucuucagag

SEQ ID NO: 572104 - RNA, 18 nt, Artificial Sequence
  Synthetic
uuuuuucaaauuucagag

SEQ ID NO: 572105 - RNA, 19 nt, Artificial Sequence
  Synthetic
uuuuuuucaaauuucagag

SEQ ID NO: 572106 - RNA, 20 nt, Artificial Sequence
  Synthetic
uuuuuuuucaaauuucagag

SEQ ID NO: 572107 - RNA, 21 nt, Artificial Sequence
  Synthetic
uuuuuuuuucaaauuucagag

SEQ ID NO: 572108 - RNA, 22 nt, Artificial Sequence
  Synthetic
uuuuuuuuuucaaauuucagag

SEQ ID NO: 572109 - RNA, 23 nt, Artificial Sequence
  Synthetic
uuuuuuuuuuucaaauuucagag

SEQ ID NO: 572110 - RNA, 24 nt, Artificial Sequence
  Synthetic
uuuuuuuuuuuucaaauuucagag

SEQ ID NO: 572111 - RNA, 18 nt, Artificial Sequence
  Synthetic
gcaaacagcaaaagagag

SEQ ID NO: 572112 - RNA, 19 nt, Artificial Sequence
  Synthetic
agcaaacagcaaaagagag

SEQ ID NO: 572113 - RNA, 20 nt, Artificial Sequence
  Synthetic
aagcaaacagcaaaagagag

SEQ ID NO: 572114 - RNA, 21 nt, Artificial Sequence
  Synthetic
aaagcaaacagcaaaagagag

SEQ ID NO: 572115 - RNA, 22 nt, Artificial Sequence
  Synthetic
aaaagcaaacagcaaaagagag

SEQ ID NO: 572116 - RNA, 23 nt, Artificial Sequence
  Synthetic
caaaagcaaacagcaaaagagag

SEQ ID NO: 572117 - RNA, 24 nt, Artificial Sequence
  Synthetic
ucaaaagcaaacagcaaaagagag

SEQ ID NO: 572118 - RNA, 18 nt, Artificial Sequence
  Synthetic
acaugguagaaaagagag

SEQ ID NO: 572119 - RNA, 19 nt, Artificial Sequence
  Synthetic
uacaugguagaaaagagag

SEQ ID NO: 572120 - RNA, 20 nt, Artificial Sequence
  Synthetic
cuacaugguagaaaagagag

SEQ ID NO: 572121 - RNA, 21 nt, Artificial Sequence
  Synthetic
ccuacaugguagaaaagagag

SEQ ID NO: 572122 - RNA, 22 nt, Artificial Sequence
  Synthetic
cccuacaugguagaaaagagag

SEQ ID NO: 572123 - RNA, 23 nt, Artificial Sequence
  Synthetic
acccuacaugguagaaaagagag

SEQ ID NO: 572124 - RNA, 24 nt, Artificial Sequence
  Synthetic
gacccuacaugguagaaaagagag

SEQ ID NO: 572125 - RNA, 18 nt, Artificial Sequence
  Synthetic
agagagagagaaagagag

SEQ ID NO: 572126 - RNA, 19 nt, Artificial Sequence
  Synthetic
cagagagagagaaagagag

SEQ ID NO: 572127 - RNA, 20 nt, Artificial Sequence
  Synthetic
acagagagagagaaagagag

SEQ ID NO: 572128 - RNA, 21 nt, Artificial Sequence
  Synthetic
gacagagagagagaaagagag

SEQ ID NO: 572129 - RNA, 22 nt, Artificial Sequence
  Synthetic
agacagagagagagaaagagag

SEQ ID NO: 572130 - RNA, 23 nt, Artificial Sequence
  Synthetic
gagacagagagagagaaagagag

SEQ ID NO: 572131 - RNA, 24 nt, Artificial Sequence
  Synthetic
agagacagagagagagaaagagag

SEQ ID NO: 572132 - RNA, 18 nt, Artificial Sequence
  Synthetic
caaggcaggacaagagag

SEQ ID NO: 572133 - RNA, 19 nt, Artificial Sequence
  Synthetic
acaaggcaggacaagagag

SEQ ID NO: 572134 - RNA, 20 nt, Artificial Sequence
  Synthetic
aacaaggcaggacaagagag

SEQ ID NO: 572135 - RNA, 21 nt, Artificial Sequence
  Synthetic
uaacaaggcaggacaagagag

SEQ ID NO: 572136 - RNA, 22 nt, Artificial Sequence
  Synthetic
auaacaaggcaggacaagagag

SEQ ID NO: 572137 - RNA, 23 nt, Artificial Sequence
  Synthetic
gauaacaaggcaggacaagagag

SEQ ID NO: 572138 - RNA, 24 nt, Artificial Sequence
  Synthetic
agauaacaaggcaggacaagagag

SEQ ID NO: 572139 - RNA, 18 nt, Artificial Sequence
  Synthetic
cuugauuuuucaagagag

SEQ ID NO: 572140 - RNA, 19 nt, Artificial Sequence
  Synthetic
acuugauuuuucaagagag

SEQ ID NO: 572141 - RNA, 20 nt, Artificial Sequence
  Synthetic
uacuugauuuuucaagagag

SEQ ID NO: 572142 - RNA, 21 nt, Artificial Sequence
  Synthetic
uuacuugauuuuucaagagag

SEQ ID NO: 572143 - RNA, 22 nt, Artificial Sequence
  Synthetic
auuacuugauuuuucaagagag

SEQ ID NO: 572144 - RNA, 23 nt, Artificial Sequence
  Synthetic
uauuacuugauuuuucaagagag

SEQ ID NO: 572145 - RNA, 24 nt, Artificial Sequence
  Synthetic
guauuacuugauuuuucaagagag

SEQ ID NO: 572146 - RNA, 21 nt, Artificial Sequence
  Synthetic
acccuacaagccagaagagag

SEQ ID NO: 572147 - RNA, 22 nt, Artificial Sequence
  Synthetic
aacccuacaagccagaagagag

SEQ ID NO: 572148 - RNA, 23 nt, Artificial Sequence
  Synthetic
aaacccuacaagccagaagagag

SEQ ID NO: 572149 - RNA, 24 nt, Artificial Sequence
  Synthetic
gaaacccuacaagccagaagagag

SEQ ID NO: 572150 - RNA, 18 nt, Artificial Sequence
  Synthetic
gaggagaagagaagagag

SEQ ID NO: 572151 - RNA, 19 nt, Artificial Sequence
  Synthetic
ggaggagaagagaagagag

SEQ ID NO: 572152 - RNA, 20 nt, Artificial Sequence
  Synthetic
aggaggagaagagaagagag

SEQ ID NO: 572153 - RNA, 21 nt, Artificial Sequence
  Synthetic
caggaggagaagagaagagag

SEQ ID NO: 572154 - RNA, 22 nt, Artificial Sequence
  Synthetic
acaggaggagaagagaagagag

SEQ ID NO: 572155 - RNA, 23 nt, Artificial Sequence
  Synthetic
gacaggaggagaagagaagagag

SEQ ID NO: 572156 - RNA, 24 nt, Artificial Sequence
  Synthetic
agacaggaggagaagagaagagag

SEQ ID NO: 572157 - RNA, 18 nt, Artificial Sequence
  Synthetic
agugugaggagaagagag

SEQ ID NO: 572158 - RNA, 19 nt, Artificial Sequence
  Synthetic
aagugugaggagaagagag

SEQ ID NO: 572159 - RNA, 20 nt, Artificial Sequence
  Synthetic
aaagugugaggagaagagag

SEQ ID NO: 572160 - RNA, 21 nt, Artificial Sequence
  Synthetic
caaagugugaggagaagagag

SEQ ID NO: 572161 - RNA, 22 nt, Artificial Sequence
  Synthetic
gcaaagugugaggagaagagag

SEQ ID NO: 572162 - RNA, 23 nt, Artificial Sequence
  Synthetic
ggcaaagugugaggagaagagag

SEQ ID NO: 572163 - RNA, 24 nt, Artificial Sequence
  Synthetic
aggcaaagugugaggagaagagag

SEQ ID NO: 572164 - RNA, 21 nt, Artificial Sequence
  Synthetic
ggcccaaggagaggaagagag

SEQ ID NO: 572165 - RNA, 22 nt, Artificial Sequence
  Synthetic
aggcccaaggagaggaagagag

SEQ ID NO: 572166 - RNA, 23 nt, Artificial Sequence
  Synthetic
gaggcccaaggagaggaagagag

SEQ ID NO: 572167 - RNA, 24 nt, Artificial Sequence
  Synthetic
ggaggcccaaggagaggaagagag

SEQ ID NO: 572168 - RNA, 18 nt, Artificial Sequence
  Synthetic
acaaagcauugaagagag

SEQ ID NO: 572169 - RNA, 19 nt, Artificial Sequence
  Synthetic
aacaaagcauugaagagag

SEQ ID NO: 572170 - RNA, 20 nt, Artificial Sequence
  Synthetic
gaacaaagcauugaagagag

SEQ ID NO: 572171 - RNA, 21 nt, Artificial Sequence
  Synthetic
ggaacaaagcauugaagagag

SEQ ID NO: 572172 - RNA, 22 nt, Artificial Sequence
  Synthetic
aggaacaaagcauugaagagag

SEQ ID NO: 572173 - RNA, 23 nt, Artificial Sequence
  Synthetic
gaggaacaaagcauugaagagag

SEQ ID NO: 572174 - RNA, 24 nt, Artificial Sequence
  Synthetic
agaggaacaaagcauugaagagag

SEQ ID NO: 572175 - RNA, 18 nt, Artificial Sequence
  Synthetic
uuggugguauuaagagag

SEQ ID NO: 572176 - RNA, 19 nt, Artificial Sequence
  Synthetic
auuggugguauuaagagag

SEQ ID NO: 572177 - RNA, 20 nt, Artificial Sequence
  Synthetic
gauuggugguauuaagagag

SEQ ID NO: 572178 - RNA, 21 nt, Artificial Sequence
  Synthetic
agauuggugguauuaagagag

SEQ ID NO: 572179 - RNA, 22 nt, Artificial Sequence
  Synthetic
gagauuggugguauuaagagag

SEQ ID NO: 572180 - RNA, 23 nt, Artificial Sequence
  Synthetic
agagauuggugguauuaagagag

SEQ ID NO: 572181 - RNA, 24 nt, Artificial Sequence
  Synthetic
uagagauuggugguauuaagagag

SEQ ID NO: 572182 - RNA, 18 nt, Artificial Sequence
  Synthetic
auguuaggacacagagag

SEQ ID NO: 572183 - RNA, 19 nt, Artificial Sequence
  Synthetic
uauguuaggacacagagag

SEQ ID NO: 572184 - RNA, 20 nt, Artificial Sequence
  Synthetic
cuauguuaggacacagagag

SEQ ID NO: 572185 - RNA, 21 nt, Artificial Sequence
  Synthetic
gcuauguuaggacacagagag

SEQ ID NO: 572186 - RNA, 22 nt, Artificial Sequence
  Synthetic
ugcuauguuaggacacagagag

SEQ ID NO: 572187 - RNA, 23 nt, Artificial Sequence
  Synthetic
uugcuauguuaggacacagagag

SEQ ID NO: 572188 - RNA, 24 nt, Artificial Sequence
  Synthetic
uuugcuauguuaggacacagagag

SEQ ID NO: 572189 - RNA, 18 nt, Artificial Sequence
  Synthetic
caaacaagcgacagagag

SEQ ID NO: 572190 - RNA, 19 nt, Artificial Sequence
  Synthetic
acaaacaagcgacagagag

SEQ ID NO: 572191 - RNA, 20 nt, Artificial Sequence
  Synthetic
cacaaacaagcgacagagag

SEQ ID NO: 572192 - RNA, 21 nt, Artificial Sequence
  Synthetic
gcacaaacaagcgacagagag

SEQ ID NO: 572193 - RNA, 22 nt, Artificial Sequence
  Synthetic
ugcacaaacaagcgacagagag

SEQ ID NO: 572194 - RNA, 23 nt, Artificial Sequence
  Synthetic
cugcacaaacaagcgacagagag

SEQ ID NO: 572195 - RNA, 24 nt, Artificial Sequence
  Synthetic
gcugcacaaacaagcgacagagag

SEQ ID NO: 572196 - RNA, 18 nt, Artificial Sequence
  Synthetic
gaugcccugcccagagag

SEQ ID NO: 572197 - RNA, 19 nt, Artificial Sequence
  Synthetic
agaugcccugcccagagag

SEQ ID NO: 572198 - RNA, 20 nt, Artificial Sequence
  Synthetic
gagaugcccugcccagagag

SEQ ID NO: 572199 - RNA, 21 nt, Artificial Sequence
  Synthetic
agagaugcccugcccagagag

SEQ ID NO: 572200 - RNA, 22 nt, Artificial Sequence
  Synthetic
cagagaugcccugcccagagag

SEQ ID NO: 572201 - RNA, 23 nt, Artificial Sequence
  Synthetic
ucagagaugcccugcccagagag

SEQ ID NO: 572202 - RNA, 24 nt, Artificial Sequence
  Synthetic
uucagagaugcccugcccagagag

SEQ ID NO: 572203 - RNA, 18 nt, Artificial Sequence
  Synthetic
aggcacuguuccagagag

SEQ ID NO: 572204 - RNA, 19 nt, Artificial Sequence
  Synthetic
gaggcacuguuccagagag

SEQ ID NO: 572205 - RNA, 20 nt, Artificial Sequence
  Synthetic
agaggcacuguuccagagag

SEQ ID NO: 572206 - RNA, 21 nt, Artificial Sequence
  Synthetic
aagaggcacuguuccagagag

SEQ ID NO: 572207 - RNA, 22 nt, Artificial Sequence
  Synthetic
caagaggcacuguuccagagag

SEQ ID NO: 572208 - RNA, 23 nt, Artificial Sequence
  Synthetic
acaagaggcacuguuccagagag

SEQ ID NO: 572209 - RNA, 24 nt, Artificial Sequence
  Synthetic
gacaagaggcacuguuccagagag

SEQ ID NO: 572210 - RNA, 18 nt, Artificial Sequence
  Synthetic
cacugcaacagcagagag

SEQ ID NO: 572211 - RNA, 19 nt, Artificial Sequence
  Synthetic
gcacugcaacagcagagag

SEQ ID NO: 572212 - RNA, 20 nt, Artificial Sequence
  Synthetic
agcacugcaacagcagagag

SEQ ID NO: 572213 - RNA, 21 nt, Artificial Sequence
  Synthetic
aagcacugcaacagcagagag

SEQ ID NO: 572214 - RNA, 22 nt, Artificial Sequence
  Synthetic
uaagcacugcaacagcagagag

SEQ ID NO: 572215 - RNA, 23 nt, Artificial Sequence
  Synthetic
uuaagcacugcaacagcagagag

SEQ ID NO: 572216 - RNA, 24 nt, Artificial Sequence
  Synthetic
cuuaagcacugcaacagcagagag

SEQ ID NO: 572217 - RNA, 18 nt, Artificial Sequence
  Synthetic
acaaacaugugcagagag

SEQ ID NO: 572218 - RNA, 19 nt, Artificial Sequence
  Synthetic
uacaaacaugugcagagag

SEQ ID NO: 572219 - RNA, 20 nt, Artificial Sequence
  Synthetic
uuacaaacaugugcagagag

SEQ ID NO: 572220 - RNA, 21 nt, Artificial Sequence
  Synthetic
guuacaaacaugugcagagag

SEQ ID NO: 572221 - RNA, 22 nt, Artificial Sequence
  Synthetic
gguuacaaacaugugcagagag

SEQ ID NO: 572222 - RNA, 23 nt, Artificial Sequence
  Synthetic
agguuacaaacaugugcagagag

SEQ ID NO: 572223 - RNA, 24 nt, Artificial Sequence
  Synthetic
gagguuacaaacaugugcagagag

SEQ ID NO: 572224 - RNA, 18 nt, Artificial Sequence
  Synthetic
aaugagaugaucagagag

SEQ ID NO: 572225 - RNA, 19 nt, Artificial Sequence
  Synthetic
gaaugagaugaucagagag

SEQ ID NO: 572226 - RNA, 20 nt, Artificial Sequence
  Synthetic
agaaugagaugaucagagag

SEQ ID NO: 572227 - RNA, 21 nt, Artificial Sequence
  Synthetic
uagaaugagaugaucagagag

SEQ ID NO: 572228 - RNA, 22 nt, Artificial Sequence
  Synthetic
auagaaugagaugaucagagag

SEQ ID NO: 572229 - RNA, 23 nt, Artificial Sequence
  Synthetic
cauagaaugagaugaucagagag

SEQ ID NO: 572230 - RNA, 24 nt, Artificial Sequence
  Synthetic
ucauagaaugagaugaucagagag

SEQ ID NO: 572231 - RNA, 18 nt, Artificial Sequence
  Synthetic
uacuucugacucagagag

SEQ ID NO: 572232 - RNA, 19 nt, Artificial Sequence
  Synthetic
cuacuucugacucagagag

SEQ ID NO: 572233 - RNA, 20 nt, Artificial Sequence
  Synthetic
ucuacuucugacucagagag

SEQ ID NO: 572234 - RNA, 21 nt, Artificial Sequence
  Synthetic
cucuacuucugacucagagag

SEQ ID NO: 572235 - RNA, 22 nt, Artificial Sequence
  Synthetic
ucucuacuucugacucagagag

SEQ ID NO: 572236 - RNA, 23 nt, Artificial Sequence
  Synthetic
gucucuacuucugacucagagag

SEQ ID NO: 572237 - RNA, 24 nt, Artificial Sequence
  Synthetic
agucucuacuucugacucagagag

SEQ ID NO: 572238 - RNA, 18 nt, Artificial Sequence
  Synthetic
ucuuccacugucagagag

SEQ ID NO: 572239 - RNA, 19 nt, Artificial Sequence
  Synthetic
uucuuccacugucagagag

SEQ ID NO: 572240 - RNA, 20 nt, Artificial Sequence
  Synthetic
uuucuuccacugucagagag

SEQ ID NO: 572241 - RNA, 21 nt, Artificial Sequence
  Synthetic
uuuucuuccacugucagagag

SEQ ID NO: 572242 - RNA, 22 nt, Artificial Sequence
  Synthetic
cuuuucuuccacugucagagag

SEQ ID NO: 572243 - RNA, 23 nt, Artificial Sequence
  Synthetic
gcuuuucuuccacugucagagag

SEQ ID NO: 572244 - RNA, 24 nt, Artificial Sequence
  Synthetic
agcuuuucuuccacugucagagag

SEQ ID NO: 572245 - RNA, 18 nt, Artificial Sequence
  Synthetic
uagaaaaaaaagagagag

SEQ ID NO: 572246 - RNA, 19 nt, Artificial Sequence
  Synthetic
auagaaaaaaaagagagag

SEQ ID NO: 572247 - RNA, 20 nt, Artificial Sequence
  Synthetic
gauagaaaaaaaagagagag

SEQ ID NO: 572248 - RNA, 21 nt, Artificial Sequence
  Synthetic
agauagaaaaaaaagagagag

SEQ ID NO: 572249 - RNA, 22 nt, Artificial Sequence
  Synthetic
aagauagaaaaaaaagagagag

SEQ ID NO: 572250 - RNA, 23 nt, Artificial Sequence
  Synthetic
aaagauagaaaaaaaagagagag

SEQ ID NO: 572251 - RNA, 24 nt, Artificial Sequence
  Synthetic
gaaagauagaaaaaaaagagagag

SEQ ID NO: 572252 - RNA, 18 nt, Artificial Sequence
  Synthetic
ugauuuuucaagagagag

SEQ ID NO: 572253 - RNA, 19 nt, Artificial Sequence
  Synthetic
uugauuuuucaagagagag

SEQ ID NO: 572254 - RNA, 20 nt, Artificial Sequence
  Synthetic
cuugauuuuucaagagagag

SEQ ID NO: 572255 - RNA, 21 nt, Artificial Sequence
  Synthetic
acuugauuuuucaagagagag

SEQ ID NO: 572256 - RNA, 22 nt, Artificial Sequence
  Synthetic
uacuugauuuuucaagagagag

SEQ ID NO: 572257 - RNA, 23 nt, Artificial Sequence
  Synthetic
uuacuugauuuuucaagagagag

SEQ ID NO: 572258 - RNA, 24 nt, Artificial Sequence
  Synthetic
auuacuugauuuuucaagagagag

SEQ ID NO: 572259 - RNA, 18 nt, Artificial Sequence
  Synthetic
ucccauuuacagagagag

SEQ ID NO: 572260 - RNA, 19 nt, Artificial Sequence
  Synthetic
uucccauuuacagagagag

SEQ ID NO: 572261 - RNA, 20 nt, Artificial Sequence
  Synthetic
uuucccauuuacagagagag

SEQ ID NO: 572262 - RNA, 21 nt, Artificial Sequence
  Synthetic
cuuucccauuuacagagagag

SEQ ID NO: 572263 - RNA, 22 nt, Artificial Sequence
  Synthetic
ccuuucccauuuacagagagag

SEQ ID NO: 572264 - RNA, 23 nt, Artificial Sequence
  Synthetic
accuuucccauuuacagagagag

SEQ ID NO: 572265 - RNA, 24 nt, Artificial Sequence
  Synthetic
aaccuuucccauuuacagagagag

SEQ ID NO: 572266 - RNA, 21 nt, Artificial Sequence
  Synthetic
gagagagagagagagagagag

SEQ ID NO: 572267 - RNA, 22 nt, Artificial Sequence
  Synthetic
agagagagagagagagagagag

SEQ ID NO: 572268 - RNA, 23 nt, Artificial Sequence
  Synthetic
gagagagagagagagagagagag

SEQ ID NO: 572269 - RNA, 24 nt, Artificial Sequence
  Synthetic
agagagagagagagagagagagag

SEQ ID NO: 572270 - RNA, 18 nt, Artificial Sequence
  Synthetic
ggagagagagagagagag

SEQ ID NO: 572271 - RNA, 19 nt, Artificial Sequence
  Synthetic
gggagagagagagagagag

SEQ ID NO: 572272 - RNA, 20 nt, Artificial Sequence
  Synthetic
ggggagagagagagagagag

SEQ ID NO: 572273 - RNA, 21 nt, Artificial Sequence
  Synthetic
gggggagagagagagagagag

SEQ ID NO: 572274 - RNA, 22 nt, Artificial Sequence
  Synthetic
agggggagagagagagagagag

SEQ ID NO: 572275 - RNA, 23 nt, Artificial Sequence
  Synthetic
aagggggagagagagagagagag

SEQ ID NO: 572276 - RNA, 24 nt, Artificial Sequence
  Synthetic
gaagggggagagagagagagagag

SEQ ID NO: 572277 - RNA, 18 nt, Artificial Sequence
  Synthetic
auggagagagagagagag

SEQ ID NO: 572278 - RNA, 19 nt, Artificial Sequence
  Synthetic
uauggagagagagagagag

SEQ ID NO: 572279 - RNA, 20 nt, Artificial Sequence
  Synthetic
auauggagagagagagagag

SEQ ID NO: 572280 - RNA, 21 nt, Artificial Sequence
  Synthetic
gauauggagagagagagagag

SEQ ID NO: 572281 - RNA, 22 nt, Artificial Sequence
  Synthetic
agauauggagagagagagagag

SEQ ID NO: 572282 - RNA, 23 nt, Artificial Sequence
  Synthetic
uagauauggagagagagagagag

SEQ ID NO: 572283 - RNA, 24 nt, Artificial Sequence
  Synthetic
auagauauggagagagagagagag

SEQ ID NO: 572284 - RNA, 18 nt, Artificial Sequence
  Synthetic
cugguuuccaggagagag

SEQ ID NO: 572285 - RNA, 19 nt, Artificial Sequence
  Synthetic
ucugguuuccaggagagag

SEQ ID NO: 572286 - RNA, 20 nt, Artificial Sequence
  Synthetic
cucugguuuccaggagagag

SEQ ID NO: 572287 - RNA, 21 nt, Artificial Sequence
  Synthetic
gcucugguuuccaggagagag

SEQ ID NO: 572288 - RNA, 22 nt, Artificial Sequence
  Synthetic
ggcucugguuuccaggagagag

SEQ ID NO: 572289 - RNA, 23 nt, Artificial Sequence
  Synthetic
aggcucugguuuccaggagagag

SEQ ID NO: 572290 - RNA, 24 nt, Artificial Sequence
  Synthetic
uaggcucugguuuccaggagagag

SEQ ID NO: 572291 - RNA, 18 nt, Artificial Sequence
  Synthetic
gaugccgggaggagagag

SEQ ID NO: 572292 - RNA, 19 nt, Artificial Sequence
  Synthetic
agaugccgggaggagagag

SEQ ID NO: 572293 - RNA, 20 nt, Artificial Sequence
  Synthetic
gagaugccgggaggagagag

SEQ ID NO: 572294 - RNA, 21 nt, Artificial Sequence
  Synthetic
agagaugccgggaggagagag

SEQ ID NO: 572295 - RNA, 22 nt, Artificial Sequence
  Synthetic
aagagaugccgggaggagagag

SEQ ID NO: 572296 - RNA, 23 nt, Artificial Sequence
  Synthetic
aaagagaugccgggaggagagag

SEQ ID NO: 572297 - RNA, 24 nt, Artificial Sequence
  Synthetic
aaaagagaugccgggaggagagag

SEQ ID NO: 572298 - RNA, 18 nt, Artificial Sequence
  Synthetic
gaaugaucuaggagagag

SEQ ID NO: 572299 - RNA, 19 nt, Artificial Sequence
  Synthetic
agaaugaucuaggagagag

SEQ ID NO: 572300 - RNA, 20 nt, Artificial Sequence
  Synthetic
gagaaugaucuaggagagag

SEQ ID NO: 572301 - RNA, 21 nt, Artificial Sequence
  Synthetic
agagaaugaucuaggagagag

SEQ ID NO: 572302 - RNA, 22 nt, Artificial Sequence
  Synthetic
aagagaaugaucuaggagagag

SEQ ID NO: 572303 - RNA, 23 nt, Artificial Sequence
  Synthetic
caagagaaugaucuaggagagag

SEQ ID NO: 572304 - RNA, 24 nt, Artificial Sequence
  Synthetic
gcaagagaaugaucuaggagagag

SEQ ID NO: 572305 - RNA, 18 nt, Artificial Sequence
  Synthetic
agggagagagggagagag

SEQ ID NO: 572306 - RNA, 19 nt, Artificial Sequence
  Synthetic
gagggagagagggagagag

SEQ ID NO: 572307 - RNA, 20 nt, Artificial Sequence
  Synthetic
agagggagagagggagagag

SEQ ID NO: 572308 - RNA, 21 nt, Artificial Sequence
  Synthetic
gagagggagagagggagagag

SEQ ID NO: 572309 - RNA, 22 nt, Artificial Sequence
  Synthetic
agagagggagagagggagagag

SEQ ID NO: 572310 - RNA, 23 nt, Artificial Sequence
  Synthetic
gagagagggagagagggagagag

SEQ ID NO: 572311 - RNA, 24 nt, Artificial Sequence
  Synthetic
ggagagagggagagagggagagag

SEQ ID NO: 572312 - RNA, 18 nt, Artificial Sequence
  Synthetic
guaugaaugcugagagag

SEQ ID NO: 572313 - RNA, 19 nt, Artificial Sequence
  Synthetic
uguaugaaugcugagagag

SEQ ID NO: 572314 - RNA, 20 nt, Artificial Sequence
  Synthetic
uuguaugaaugcugagagag

SEQ ID NO: 572315 - RNA, 21 nt, Artificial Sequence
  Synthetic
guuguaugaaugcugagagag

SEQ ID NO: 572316 - RNA, 22 nt, Artificial Sequence
  Synthetic
aguuguaugaaugcugagagag

SEQ ID NO: 572317 - RNA, 23 nt, Artificial Sequence
  Synthetic
caguuguaugaaugcugagagag

SEQ ID NO: 572318 - RNA, 24 nt, Artificial Sequence
  Synthetic
ucaguuguaugaaugcugagagag

SEQ ID NO: 572319 - RNA, 18 nt, Artificial Sequence
  Synthetic
gucauagaggugagagag

SEQ ID NO: 572320 - RNA, 19 nt, Artificial Sequence
  Synthetic
agucauagaggugagagag

SEQ ID NO: 572321 - RNA, 20 nt, Artificial Sequence
  Synthetic
gagucauagaggugagagag

SEQ ID NO: 572322 - RNA, 21 nt, Artificial Sequence
  Synthetic
agagucauagaggugagagag

SEQ ID NO: 572323 - RNA, 22 nt, Artificial Sequence
  Synthetic
cagagucauagaggugagagag

SEQ ID NO: 572324 - RNA, 23 nt, Artificial Sequence
  Synthetic
acagagucauagaggugagagag

SEQ ID NO: 572325 - RNA, 24 nt, Artificial Sequence
  Synthetic
uacagagucauagaggugagagag

SEQ ID NO: 572326 - RNA, 18 nt, Artificial Sequence
  Synthetic
cucuaaugugugagagag

SEQ ID NO: 572327 - RNA, 19 nt, Artificial Sequence
  Synthetic
ucucuaaugugugagagag

SEQ ID NO: 572328 - RNA, 20 nt, Artificial Sequence
  Synthetic
uucucuaaugugugagagag

SEQ ID NO: 572329 - RNA, 21 nt, Artificial Sequence
  Synthetic
uuucucuaaugugugagagag

SEQ ID NO: 572330 - RNA, 22 nt, Artificial Sequence
  Synthetic
cuuucucuaaugugugagagag

SEQ ID NO: 572331 - RNA, 23 nt, Artificial Sequence
  Synthetic
ucuuucucuaaugugugagagag

SEQ ID NO: 572332 - RNA, 24 nt, Artificial Sequence
  Synthetic
cucuuucucuaaugugugagagag

SEQ ID NO: 572333 - RNA, 18 nt, Artificial Sequence
  Synthetic
uaucugauuuugagagag

SEQ ID NO: 572334 - RNA, 19 nt, Artificial Sequence
  Synthetic
auaucugauuuugagagag

SEQ ID NO: 572335 - RNA, 20 nt, Artificial Sequence
  Synthetic
aauaucugauuuugagagag

SEQ ID NO: 572336 - RNA, 21 nt, Artificial Sequence
  Synthetic
uaauaucugauuuugagagag

SEQ ID NO: 572337 - RNA, 22 nt, Artificial Sequence
  Synthetic
uuaauaucugauuuugagagag

SEQ ID NO: 572338 - RNA, 23 nt, Artificial Sequence
  Synthetic
cuuaauaucugauuuugagagag

SEQ ID NO: 572339 - RNA, 24 nt, Artificial Sequence
  Synthetic
gcuuaauaucugauuuugagagag

SEQ ID NO: 572340 - RNA, 18 nt, Artificial Sequence
  Synthetic
acucauggacauagagag

SEQ ID NO: 572341 - RNA, 19 nt, Artificial Sequence
  Synthetic
aacucauggacauagagag

SEQ ID NO: 572342 - RNA, 20 nt, Artificial Sequence
  Synthetic
gaacucauggacauagagag

SEQ ID NO: 572343 - RNA, 21 nt, Artificial Sequence
  Synthetic
ggaacucauggacauagagag

SEQ ID NO: 572344 - RNA, 22 nt, Artificial Sequence
  Synthetic
uggaacucauggacauagagag

SEQ ID NO: 572345 - RNA, 23 nt, Artificial Sequence
  Synthetic
auggaacucauggacauagagag

SEQ ID NO: 572346 - RNA, 24 nt, Artificial Sequence
  Synthetic
aauggaacucauggacauagagag

SEQ ID NO: 572347 - RNA, 21 nt, Artificial Sequence
  Synthetic
ugaacucauggacauagagag

SEQ ID NO: 572348 - RNA, 22 nt, Artificial Sequence
  Synthetic
uugaacucauggacauagagag

SEQ ID NO: 572349 - RNA, 23 nt, Artificial Sequence
  Synthetic
auugaacucauggacauagagag

SEQ ID NO: 572350 - RNA, 24 nt, Artificial Sequence
  Synthetic
aauugaacucauggacauagagag

SEQ ID NO: 572351 - RNA, 18 nt, Artificial Sequence
  Synthetic
cuagccauauguagagag

SEQ ID NO: 572352 - RNA, 19 nt, Artificial Sequence
  Synthetic
gcuagccauauguagagag

SEQ ID NO: 572353 - RNA, 20 nt, Artificial Sequence
  Synthetic
ggcuagccauauguagagag

SEQ ID NO: 572354 - RNA, 21 nt, Artificial Sequence
  Synthetic
uggcuagccauauguagagag

SEQ ID NO: 572355 - RNA, 22 nt, Artificial Sequence
  Synthetic
cuggcuagccauauguagagag

SEQ ID NO: 572356 - RNA, 23 nt, Artificial Sequence
  Synthetic
acuggcuagccauauguagagag

SEQ ID NO: 572357 - RNA, 24 nt, Artificial Sequence
  Synthetic
aacuggcuagccauauguagagag

SEQ ID NO: 572358 - RNA, 18 nt, Artificial Sequence
  Synthetic
uuuaaccucuguagagag

SEQ ID NO: 572359 - RNA, 19 nt, Artificial Sequence
  Synthetic
uuuuaaccucuguagagag

SEQ ID NO: 572360 - RNA, 20 nt, Artificial Sequence
  Synthetic
auuuuaaccucuguagagag

SEQ ID NO: 572361 - RNA, 21 nt, Artificial Sequence
  Synthetic
cauuuuaaccucuguagagag

SEQ ID NO: 572362 - RNA, 22 nt, Artificial Sequence
  Synthetic
acauuuuaaccucuguagagag

SEQ ID NO: 572363 - RNA, 23 nt, Artificial Sequence
  Synthetic
aacauuuuaaccucuguagagag

SEQ ID NO: 572364 - RNA, 24 nt, Artificial Sequence
  Synthetic
aaacauuuuaaccucuguagagag

SEQ ID NO: 572365 - RNA, 18 nt, Artificial Sequence
  Synthetic
auaggcaguuuuagagag

SEQ ID NO: 572366 - RNA, 19 nt, Artificial Sequence
  Synthetic
gauaggcaguuuuagagag

SEQ ID NO: 572367 - RNA, 20 nt, Artificial Sequence
  Synthetic
agauaggcaguuuuagagag

SEQ ID NO: 572368 - RNA, 21 nt, Artificial Sequence
  Synthetic
cagauaggcaguuuuagagag

SEQ ID NO: 572369 - RNA, 22 nt, Artificial Sequence
  Synthetic
ucagauaggcaguuuuagagag

SEQ ID NO: 572370 - RNA, 23 nt, Artificial Sequence
  Synthetic
gucagauaggcaguuuuagagag

SEQ ID NO: 572371 - RNA, 24 nt, Artificial Sequence
  Synthetic
agucagauaggcaguuuuagagag

SEQ ID NO: 572372 - RNA, 18 nt, Artificial Sequence
  Synthetic
ugaucguggauacgagag

SEQ ID NO: 572373 - RNA, 19 nt, Artificial Sequence
  Synthetic
gugaucguggauacgagag

SEQ ID NO: 572374 - RNA, 20 nt, Artificial Sequence
  Synthetic
agugaucguggauacgagag

SEQ ID NO: 572375 - RNA, 21 nt, Artificial Sequence
  Synthetic
uagugaucguggauacgagag

SEQ ID NO: 572376 - RNA, 22 nt, Artificial Sequence
  Synthetic
uuagugaucguggauacgagag

SEQ ID NO: 572377 - RNA, 23 nt, Artificial Sequence
  Synthetic
cuuagugaucguggauacgagag

SEQ ID NO: 572378 - RNA, 24 nt, Artificial Sequence
  Synthetic
ucuuagugaucguggauacgagag

SEQ ID NO: 572379 - RNA, 18 nt, Artificial Sequence
  Synthetic
uauaucacucaaggagag

SEQ ID NO: 572380 - RNA, 19 nt, Artificial Sequence
  Synthetic
auauaucacucaaggagag

SEQ ID NO: 572381 - RNA, 20 nt, Artificial Sequence
  Synthetic
cauauaucacucaaggagag

SEQ ID NO: 572382 - RNA, 21 nt, Artificial Sequence
  Synthetic
acauauaucacucaaggagag

SEQ ID NO: 572383 - RNA, 22 nt, Artificial Sequence
  Synthetic
cacauauaucacucaaggagag

SEQ ID NO: 572384 - RNA, 23 nt, Artificial Sequence
  Synthetic
ccacauauaucacucaaggagag

SEQ ID NO: 572385 - RNA, 24 nt, Artificial Sequence
  Synthetic
gccacauauaucacucaaggagag

SEQ ID NO: 572386 - RNA, 18 nt, Artificial Sequence
  Synthetic
gaaggcuaggaaggagag

SEQ ID NO: 572387 - RNA, 19 nt, Artificial Sequence
  Synthetic
ggaaggcuaggaaggagag

SEQ ID NO: 572388 - RNA, 20 nt, Artificial Sequence
  Synthetic
gggaaggcuaggaaggagag

SEQ ID NO: 572389 - RNA, 21 nt, Artificial Sequence
  Synthetic
ggggaaggcuaggaaggagag

SEQ ID NO: 572390 - RNA, 22 nt, Artificial Sequence
  Synthetic
uggggaaggcuaggaaggagag

SEQ ID NO: 572391 - RNA, 23 nt, Artificial Sequence
  Synthetic
cuggggaaggcuaggaaggagag

SEQ ID NO: 572392 - RNA, 24 nt, Artificial Sequence
  Synthetic
ccuggggaaggcuaggaaggagag

SEQ ID NO: 572393 - RNA, 18 nt, Artificial Sequence
  Synthetic
aagggaagggaaggagag

SEQ ID NO: 572394 - RNA, 19 nt, Artificial Sequence
  Synthetic
gaagggaagggaaggagag

SEQ ID NO: 572395 - RNA, 20 nt, Artificial Sequence
  Synthetic
ggaagggaagggaaggagag

SEQ ID NO: 572396 - RNA, 21 nt, Artificial Sequence
  Synthetic
gggaagggaagggaaggagag

SEQ ID NO: 572397 - RNA, 22 nt, Artificial Sequence
  Synthetic
agggaagggaagggaaggagag

SEQ ID NO: 572398 - RNA, 23 nt, Artificial Sequence
  Synthetic
aagggaagggaagggaaggagag

SEQ ID NO: 572399 - RNA, 24 nt, Artificial Sequence
  Synthetic
gaagggaagggaagggaaggagag

SEQ ID NO: 572400 - RNA, 18 nt, Artificial Sequence
  Synthetic
ggggucagggaaggagag

SEQ ID NO: 572401 - RNA, 19 nt, Artificial Sequence
  Synthetic
cggggucagggaaggagag

SEQ ID NO: 572402 - RNA, 20 nt, Artificial Sequence
  Synthetic
acggggucagggaaggagag

SEQ ID NO: 572403 - RNA, 21 nt, Artificial Sequence
  Synthetic
aacggggucagggaaggagag

SEQ ID NO: 572404 - RNA, 22 nt, Artificial Sequence
  Synthetic
uaacggggucagggaaggagag

SEQ ID NO: 572405 - RNA, 23 nt, Artificial Sequence
  Synthetic
uuaacggggucagggaaggagag

SEQ ID NO: 572406 - RNA, 24 nt, Artificial Sequence
  Synthetic
auuaacggggucagggaaggagag

SEQ ID NO: 572407 - RNA, 18 nt, Artificial Sequence
  Synthetic
cuaagaugcauaggagag

SEQ ID NO: 572408 - RNA, 19 nt, Artificial Sequence
  Synthetic
gcuaagaugcauaggagag

SEQ ID NO: 572409 - RNA, 20 nt, Artificial Sequence
  Synthetic
agcuaagaugcauaggagag

SEQ ID NO: 572410 - RNA, 21 nt, Artificial Sequence
  Synthetic
cagcuaagaugcauaggagag

SEQ ID NO: 572411 - RNA, 22 nt, Artificial Sequence
  Synthetic
acagcuaagaugcauaggagag

SEQ ID NO: 572412 - RNA, 23 nt, Artificial Sequence
  Synthetic
cacagcuaagaugcauaggagag

SEQ ID NO: 572413 - RNA, 24 nt, Artificial Sequence
  Synthetic
acacagcuaagaugcauaggagag

SEQ ID NO: 572414 - RNA, 18 nt, Artificial Sequence
  Synthetic
aaguguaucugcggagag

SEQ ID NO: 572415 - RNA, 19 nt, Artificial Sequence
  Synthetic
gaaguguaucugcggagag

SEQ ID NO: 572416 - RNA, 20 nt, Artificial Sequence
  Synthetic
agaaguguaucugcggagag

SEQ ID NO: 572417 - RNA, 21 nt, Artificial Sequence
  Synthetic
cagaaguguaucugcggagag

SEQ ID NO: 572418 - RNA, 22 nt, Artificial Sequence
  Synthetic
gcagaaguguaucugcggagag

SEQ ID NO: 572419 - RNA, 23 nt, Artificial Sequence
  Synthetic
ugcagaaguguaucugcggagag

SEQ ID NO: 572420 - RNA, 24 nt, Artificial Sequence
  Synthetic
augcagaaguguaucugcggagag

SEQ ID NO: 572421 - RNA, 18 nt, Artificial Sequence
  Synthetic
gagcagcuaaagggagag

SEQ ID NO: 572422 - RNA, 19 nt, Artificial Sequence
  Synthetic
agagcagcuaaagggagag

SEQ ID NO: 572423 - RNA, 20 nt, Artificial Sequence
  Synthetic
aagagcagcuaaagggagag

SEQ ID NO: 572424 - RNA, 21 nt, Artificial Sequence
  Synthetic
gaagagcagcuaaagggagag

SEQ ID NO: 572425 - RNA, 22 nt, Artificial Sequence
  Synthetic
ugaagagcagcuaaagggagag

SEQ ID NO: 572426 - RNA, 23 nt, Artificial Sequence
  Synthetic
cugaagagcagcuaaagggagag

SEQ ID NO: 572427 - RNA, 24 nt, Artificial Sequence
  Synthetic
gcugaagagcagcuaaagggagag

SEQ ID NO: 572428 - RNA, 18 nt, Artificial Sequence
  Synthetic
agagagagagagggagag

SEQ ID NO: 572429 - RNA, 19 nt, Artificial Sequence
  Synthetic
gagagagagagagggagag

SEQ ID NO: 572430 - RNA, 20 nt, Artificial Sequence
  Synthetic
agagagagagagagggagag

SEQ ID NO: 572431 - RNA, 21 nt, Artificial Sequence
  Synthetic
gagagagagagagagggagag

SEQ ID NO: 572432 - RNA, 22 nt, Artificial Sequence
  Synthetic
agagagagagagagagggagag

SEQ ID NO: 572433 - RNA, 23 nt, Artificial Sequence
  Synthetic
gagagagagagagagagggagag

SEQ ID NO: 572434 - RNA, 24 nt, Artificial Sequence
  Synthetic
agagagagagagagagagggagag

SEQ ID NO: 572435 - RNA, 18 nt, Artificial Sequence
  Synthetic
agagggagagagggagag

SEQ ID NO: 572436 - RNA, 19 nt, Artificial Sequence
  Synthetic
gagagggagagagggagag

SEQ ID NO: 572437 - RNA, 20 nt, Artificial Sequence
  Synthetic
agagagggagagagggagag

SEQ ID NO: 572438 - RNA, 21 nt, Artificial Sequence
  Synthetic
gagagagggagagagggagag

SEQ ID NO: 572439 - RNA, 22 nt, Artificial Sequence
  Synthetic
agagagagggagagagggagag

SEQ ID NO: 572440 - RNA, 23 nt, Artificial Sequence
  Synthetic
gagagagagggagagagggagag

SEQ ID NO: 572441 - RNA, 24 nt, Artificial Sequence
  Synthetic
agagagagagggagagagggagag

SEQ ID NO: 572442 - RNA, 22 nt, Artificial Sequence
  Synthetic
ggagagagggagagagggagag

SEQ ID NO: 572443 - RNA, 23 nt, Artificial Sequence
  Synthetic
gggagagagggagagagggagag

SEQ ID NO: 572444 - RNA, 24 nt, Artificial Sequence
  Synthetic
agggagagagggagagagggagag

SEQ ID NO: 572445 - RNA, 18 nt, Artificial Sequence
  Synthetic
gaacgauaggagggagag

SEQ ID NO: 572446 - RNA, 19 nt, Artificial Sequence
  Synthetic
agaacgauaggagggagag

SEQ ID NO: 572447 - RNA, 20 nt, Artificial Sequence
  Synthetic
gagaacgauaggagggagag

SEQ ID NO: 572448 - RNA, 21 nt, Artificial Sequence
  Synthetic
ggagaacgauaggagggagag

SEQ ID NO: 572449 - RNA, 22 nt, Artificial Sequence
  Synthetic
aggagaacgauaggagggagag

SEQ ID NO: 572450 - RNA, 23 nt, Artificial Sequence
  Synthetic
aaggagaacgauaggagggagag

SEQ ID NO: 572451 - RNA, 24 nt, Artificial Sequence
  Synthetic
gaaggagaacgauaggagggagag

SEQ ID NO: 572452 - RNA, 18 nt, Artificial Sequence
  Synthetic
auuggggaguagggagag

SEQ ID NO: 572453 - RNA, 19 nt, Artificial Sequence
  Synthetic
cauuggggaguagggagag

SEQ ID NO: 572454 - RNA, 20 nt, Artificial Sequence
  Synthetic
acauuggggaguagggagag

SEQ ID NO: 572455 - RNA, 21 nt, Artificial Sequence
  Synthetic
uacauuggggaguagggagag

SEQ ID NO: 572456 - RNA, 22 nt, Artificial Sequence
  Synthetic
auacauuggggaguagggagag

SEQ ID NO: 572457 - RNA, 23 nt, Artificial Sequence
  Synthetic
gauacauuggggaguagggagag

SEQ ID NO: 572458 - RNA, 24 nt, Artificial Sequence
  Synthetic
ggauacauuggggaguagggagag

SEQ ID NO: 572459 - RNA, 18 nt, Artificial Sequence
  Synthetic
ggaaggcaaaggggagag

SEQ ID NO: 572460 - RNA, 19 nt, Artificial Sequence
  Synthetic
uggaaggcaaaggggagag

SEQ ID NO: 572461 - RNA, 20 nt, Artificial Sequence
  Synthetic
guggaaggcaaaggggagag

SEQ ID NO: 572462 - RNA, 21 nt, Artificial Sequence
  Synthetic
gguggaaggcaaaggggagag

SEQ ID NO: 572463 - RNA, 22 nt, Artificial Sequence
  Synthetic
ugguggaaggcaaaggggagag

SEQ ID NO: 572464 - RNA, 23 nt, Artificial Sequence
  Synthetic
augguggaaggcaaaggggagag

SEQ ID NO: 572465 - RNA, 24 nt, Artificial Sequence
  Synthetic
caugguggaaggcaaaggggagag

SEQ ID NO: 572466 - RNA, 18 nt, Artificial Sequence
  Synthetic
ugacuuuggaggggagag

SEQ ID NO: 572467 - RNA, 19 nt, Artificial Sequence
  Synthetic
augacuuuggaggggagag

SEQ ID NO: 572468 - RNA, 20 nt, Artificial Sequence
  Synthetic
gaugacuuuggaggggagag

SEQ ID NO: 572469 - RNA, 21 nt, Artificial Sequence
  Synthetic
ggaugacuuuggaggggagag

SEQ ID NO: 572470 - RNA, 22 nt, Artificial Sequence
  Synthetic
gggaugacuuuggaggggagag

SEQ ID NO: 572471 - RNA, 23 nt, Artificial Sequence
  Synthetic
ggggaugacuuuggaggggagag

SEQ ID NO: 572472 - RNA, 24 nt, Artificial Sequence
  Synthetic
uggggaugacuuuggaggggagag

SEQ ID NO: 572473 - RNA, 18 nt, Artificial Sequence
  Synthetic
ucuggagcucggggagag

SEQ ID NO: 572474 - RNA, 19 nt, Artificial Sequence
  Synthetic
aucuggagcucggggagag

SEQ ID NO: 572475 - RNA, 20 nt, Artificial Sequence
  Synthetic
gaucuggagcucggggagag

SEQ ID NO: 572476 - RNA, 21 nt, Artificial Sequence
  Synthetic
agaucuggagcucggggagag

SEQ ID NO: 572477 - RNA, 22 nt, Artificial Sequence
  Synthetic
gagaucuggagcucggggagag

SEQ ID NO: 572478 - RNA, 23 nt, Artificial Sequence
  Synthetic
agagaucuggagcucggggagag

SEQ ID NO: 572479 - RNA, 24 nt, Artificial Sequence
  Synthetic
aagagaucuggagcucggggagag

SEQ ID NO: 572480 - RNA, 18 nt, Artificial Sequence
  Synthetic
aguuaggaaaauggagag

SEQ ID NO: 572481 - RNA, 19 nt, Artificial Sequence
  Synthetic
caguuaggaaaauggagag

SEQ ID NO: 572482 - RNA, 20 nt, Artificial Sequence
  Synthetic
gcaguuaggaaaauggagag

SEQ ID NO: 572483 - RNA, 21 nt, Artificial Sequence
  Synthetic
agcaguuaggaaaauggagag

SEQ ID NO: 572484 - RNA, 22 nt, Artificial Sequence
  Synthetic
uagcaguuaggaaaauggagag

SEQ ID NO: 572485 - RNA, 23 nt, Artificial Sequence
  Synthetic
cuagcaguuaggaaaauggagag

SEQ ID NO: 572486 - RNA, 24 nt, Artificial Sequence
  Synthetic
ucuagcaguuaggaaaauggagag

SEQ ID NO: 572487 - RNA, 18 nt, Artificial Sequence
  Synthetic
acauuuuaguauggagag

SEQ ID NO: 572488 - RNA, 19 nt, Artificial Sequence
  Synthetic
gacauuuuaguauggagag

SEQ ID NO: 572489 - RNA, 20 nt, Artificial Sequence
  Synthetic
agacauuuuaguauggagag

SEQ ID NO: 572490 - RNA, 21 nt, Artificial Sequence
  Synthetic
gagacauuuuaguauggagag

SEQ ID NO: 572491 - RNA, 22 nt, Artificial Sequence
  Synthetic
ggagacauuuuaguauggagag

SEQ ID NO: 572492 - RNA, 23 nt, Artificial Sequence
  Synthetic
uggagacauuuuaguauggagag

SEQ ID NO: 572493 - RNA, 24 nt, Artificial Sequence
  Synthetic
cuggagacauuuuaguauggagag

SEQ ID NO: 572494 - RNA, 18 nt, Artificial Sequence
  Synthetic
agagauuucacuggagag

SEQ ID NO: 572495 - RNA, 19 nt, Artificial Sequence
  Synthetic
uagagauuucacuggagag

SEQ ID NO: 572496 - RNA, 20 nt, Artificial Sequence
  Synthetic
guagagauuucacuggagag

SEQ ID NO: 572497 - RNA, 21 nt, Artificial Sequence
  Synthetic
aguagagauuucacuggagag

SEQ ID NO: 572498 - RNA, 22 nt, Artificial Sequence
  Synthetic
aaguagagauuucacuggagag

SEQ ID NO: 572499 - RNA, 23 nt, Artificial Sequence
  Synthetic
aaaguagagauuucacuggagag

SEQ ID NO: 572500 - RNA, 24 nt, Artificial Sequence
  Synthetic
uaaaguagagauuucacuggagag

SEQ ID NO: 572501 - RNA, 18 nt, Artificial Sequence
  Synthetic
gcccgcugagcuggagag

SEQ ID NO: 572502 - RNA, 19 nt, Artificial Sequence
  Synthetic
ggcccgcugagcuggagag

SEQ ID NO: 572503 - RNA, 20 nt, Artificial Sequence
  Synthetic
aggcccgcugagcuggagag

SEQ ID NO: 572504 - RNA, 21 nt, Artificial Sequence
  Synthetic
aaggcccgcugagcuggagag

SEQ ID NO: 572505 - RNA, 22 nt, Artificial Sequence
  Synthetic
aaaggcccgcugagcuggagag

SEQ ID NO: 572506 - RNA, 23 nt, Artificial Sequence
  Synthetic
aaaaggcccgcugagcuggagag

SEQ ID NO: 572507 - RNA, 24 nt, Artificial Sequence
  Synthetic
aaaaaggcccgcugagcuggagag

SEQ ID NO: 572508 - RNA, 18 nt, Artificial Sequence
  Synthetic
ugaauagaugcuggagag

SEQ ID NO: 572509 - RNA, 19 nt, Artificial Sequence
  Synthetic
cugaauagaugcuggagag

SEQ ID NO: 572510 - RNA, 20 nt, Artificial Sequence
  Synthetic
acugaauagaugcuggagag

SEQ ID NO: 572511 - RNA, 21 nt, Artificial Sequence
  Synthetic
gacugaauagaugcuggagag

SEQ ID NO: 572512 - RNA, 22 nt, Artificial Sequence
  Synthetic
ugacugaauagaugcuggagag

SEQ ID NO: 572513 - RNA, 23 nt, Artificial Sequence
  Synthetic
gugacugaauagaugcuggagag

SEQ ID NO: 572514 - RNA, 24 nt, Artificial Sequence
  Synthetic
ggugacugaauagaugcuggagag

SEQ ID NO: 572515 - RNA, 18 nt, Artificial Sequence
  Synthetic
gaggaaauuguuggagag

SEQ ID NO: 572516 - RNA, 19 nt, Artificial Sequence
  Synthetic
ugaggaaauuguuggagag

SEQ ID NO: 572517 - RNA, 20 nt, Artificial Sequence
  Synthetic
gugaggaaauuguuggagag

SEQ ID NO: 572518 - RNA, 21 nt, Artificial Sequence
  Synthetic
agugaggaaauuguuggagag

SEQ ID NO: 572519 - RNA, 22 nt, Artificial Sequence
  Synthetic
gagugaggaaauuguuggagag

SEQ ID NO: 572520 - RNA, 23 nt, Artificial Sequence
  Synthetic
agagugaggaaauuguuggagag

SEQ ID NO: 572521 - RNA, 24 nt, Artificial Sequence
  Synthetic
gagagugaggaaauuguuggagag

SEQ ID NO: 572522 - RNA, 18 nt, Artificial Sequence
  Synthetic
uggaauggacaaugagag

SEQ ID NO: 572523 - RNA, 19 nt, Artificial Sequence
  Synthetic
uuggaauggacaaugagag

SEQ ID NO: 572524 - RNA, 20 nt, Artificial Sequence
  Synthetic
auuggaauggacaaugagag

SEQ ID NO: 572525 - RNA, 21 nt, Artificial Sequence
  Synthetic
gauuggaauggacaaugagag

SEQ ID NO: 572526 - RNA, 22 nt, Artificial Sequence
  Synthetic
ugauuggaauggacaaugagag

SEQ ID NO: 572527 - RNA, 23 nt, Artificial Sequence
  Synthetic
cugauuggaauggacaaugagag

SEQ ID NO: 572528 - RNA, 24 nt, Artificial Sequence
  Synthetic
ccugauuggaauggacaaugagag

SEQ ID NO: 572529 - RNA, 18 nt, Artificial Sequence
  Synthetic
uaagagugugaaugagag

SEQ ID NO: 572530 - RNA, 19 nt, Artificial Sequence
  Synthetic
guaagagugugaaugagag

SEQ ID NO: 572531 - RNA, 20 nt, Artificial Sequence
  Synthetic
aguaagagugugaaugagag

SEQ ID NO: 572532 - RNA, 21 nt, Artificial Sequence
  Synthetic
uaguaagagugugaaugagag

SEQ ID NO: 572533 - RNA, 22 nt, Artificial Sequence
  Synthetic
auaguaagagugugaaugagag

SEQ ID NO: 572534 - RNA, 23 nt, Artificial Sequence
  Synthetic
aauaguaagagugugaaugagag

SEQ ID NO: 572535 - RNA, 24 nt, Artificial Sequence
  Synthetic
aaauaguaagagugugaaugagag

SEQ ID NO: 572536 - RNA, 18 nt, Artificial Sequence
  Synthetic
ccaugagauccaugagag

SEQ ID NO: 572537 - RNA, 19 nt, Artificial Sequence
  Synthetic
accaugagauccaugagag

SEQ ID NO: 572538 - RNA, 20 nt, Artificial Sequence
  Synthetic
gaccaugagauccaugagag

SEQ ID NO: 572539 - RNA, 21 nt, Artificial Sequence
  Synthetic
agaccaugagauccaugagag

SEQ ID NO: 572540 - RNA, 22 nt, Artificial Sequence
  Synthetic
uagaccaugagauccaugagag

SEQ ID NO: 572541 - RNA, 23 nt, Artificial Sequence
  Synthetic
cuagaccaugagauccaugagag

SEQ ID NO: 572542 - RNA, 24 nt, Artificial Sequence
  Synthetic
acuagaccaugagauccaugagag

SEQ ID NO: 572543 - RNA, 18 nt, Artificial Sequence
  Synthetic
aaauacugaagaugagag

SEQ ID NO: 572544 - RNA, 19 nt, Artificial Sequence
  Synthetic
aaaauacugaagaugagag

SEQ ID NO: 572545 - RNA, 20 nt, Artificial Sequence
  Synthetic
aaaaauacugaagaugagag

SEQ ID NO: 572546 - RNA, 21 nt, Artificial Sequence
  Synthetic
uaaaaauacugaagaugagag

SEQ ID NO: 572547 - RNA, 22 nt, Artificial Sequence
  Synthetic
auaaaaauacugaagaugagag

SEQ ID NO: 572548 - RNA, 23 nt, Artificial Sequence
  Synthetic
cauaaaaauacugaagaugagag

SEQ ID NO: 572549 - RNA, 24 nt, Artificial Sequence
  Synthetic
ucauaaaaauacugaagaugagag

SEQ ID NO: 572550 - RNA, 18 nt, Artificial Sequence
  Synthetic
uauaaaaauggaugagag

SEQ ID NO: 572551 - RNA, 19 nt, Artificial Sequence
  Synthetic
auauaaaaauggaugagag

SEQ ID NO: 572552 - RNA, 20 nt, Artificial Sequence
  Synthetic
aauauaaaaauggaugagag

SEQ ID NO: 572553 - RNA, 21 nt, Artificial Sequence
  Synthetic
uaauauaaaaauggaugagag

SEQ ID NO: 572554 - RNA, 22 nt, Artificial Sequence
  Synthetic
uuaauauaaaaauggaugagag

SEQ ID NO: 572555 - RNA, 23 nt, Artificial Sequence
  Synthetic
uuuaauauaaaaauggaugagag

SEQ ID NO: 572556 - RNA, 24 nt, Artificial Sequence
  Synthetic
uuuuaauauaaaaauggaugagag

SEQ ID NO: 572557 - RNA, 18 nt, Artificial Sequence
  Synthetic
acaaaauugagcugagag

SEQ ID NO: 572558 - RNA, 19 nt, Artificial Sequence
  Synthetic
uacaaaauugagcugagag

SEQ ID NO: 572559 - RNA, 20 nt, Artificial Sequence
  Synthetic
uuacaaaauugagcugagag

SEQ ID NO: 572560 - RNA, 21 nt, Artificial Sequence
  Synthetic
auuacaaaauugagcugagag

SEQ ID NO: 572561 - RNA, 22 nt, Artificial Sequence
  Synthetic
aauuacaaaauugagcugagag

SEQ ID NO: 572562 - RNA, 23 nt, Artificial Sequence
  Synthetic
uaauuacaaaauugagcugagag

SEQ ID NO: 572563 - RNA, 24 nt, Artificial Sequence
  Synthetic
uuaauuacaaaauugagcugagag

SEQ ID NO: 572564 - RNA, 18 nt, Artificial Sequence
  Synthetic
guuauuccugucugagag

SEQ ID NO: 572565 - RNA, 19 nt, Artificial Sequence
  Synthetic
uguuauuccugucugagag

SEQ ID NO: 572566 - RNA, 20 nt, Artificial Sequence
  Synthetic
cuguuauuccugucugagag

SEQ ID NO: 572567 - RNA, 21 nt, Artificial Sequence
  Synthetic
gcuguuauuccugucugagag

SEQ ID NO: 572568 - RNA, 22 nt, Artificial Sequence
  Synthetic
agcuguuauuccugucugagag

SEQ ID NO: 572569 - RNA, 23 nt, Artificial Sequence
  Synthetic
cagcuguuauuccugucugagag

SEQ ID NO: 572570 - RNA, 24 nt, Artificial Sequence
  Synthetic
ucagcuguuauuccugucugagag

SEQ ID NO: 572571 - RNA, 18 nt, Artificial Sequence
  Synthetic
cuaaugggauucugagag

SEQ ID NO: 572572 - RNA, 19 nt, Artificial Sequence
  Synthetic
ccuaaugggauucugagag

SEQ ID NO: 572573 - RNA, 20 nt, Artificial Sequence
  Synthetic
cccuaaugggauucugagag

SEQ ID NO: 572574 - RNA, 21 nt, Artificial Sequence
  Synthetic
acccuaaugggauucugagag

SEQ ID NO: 572575 - RNA, 22 nt, Artificial Sequence
  Synthetic
uacccuaaugggauucugagag

SEQ ID NO: 572576 - RNA, 23 nt, Artificial Sequence
  Synthetic
cuacccuaaugggauucugagag

SEQ ID NO: 572577 - RNA, 24 nt, Artificial Sequence
  Synthetic
ccuacccuaaugggauucugagag

SEQ ID NO: 572578 - RNA, 18 nt, Artificial Sequence
  Synthetic
gaaaaagggaagugagag

SEQ ID NO: 572579 - RNA, 19 nt, Artificial Sequence
  Synthetic
cgaaaaagggaagugagag

SEQ ID NO: 572580 - RNA, 20 nt, Artificial Sequence
  Synthetic
gcgaaaaagggaagugagag

SEQ ID NO: 572581 - RNA, 21 nt, Artificial Sequence
  Synthetic
ggcgaaaaagggaagugagag

SEQ ID NO: 572582 - RNA, 22 nt, Artificial Sequence
  Synthetic
uggcgaaaaagggaagugagag

SEQ ID NO: 572583 - RNA, 23 nt, Artificial Sequence
  Synthetic
guggcgaaaaagggaagugagag

SEQ ID NO: 572584 - RNA, 24 nt, Artificial Sequence
  Synthetic
uguggcgaaaaagggaagugagag

SEQ ID NO: 572585 - RNA, 18 nt, Artificial Sequence
  Synthetic
ucccugugugggugagag

SEQ ID NO: 572586 - RNA, 19 nt, Artificial Sequence
  Synthetic
uucccugugugggugagag

SEQ ID NO: 572587 - RNA, 20 nt, Artificial Sequence
  Synthetic
uuucccugugugggugagag

SEQ ID NO: 572588 - RNA, 21 nt, Artificial Sequence
  Synthetic
cuuucccugugugggugagag

SEQ ID NO: 572589 - RNA, 22 nt, Artificial Sequence
  Synthetic
ccuuucccugugugggugagag

SEQ ID NO: 572590 - RNA, 23 nt, Artificial Sequence
  Synthetic
gccuuucccugugugggugagag

SEQ ID NO: 572591 - RNA, 24 nt, Artificial Sequence
  Synthetic
agccuuucccugugugggugagag

SEQ ID NO: 572592 - RNA, 18 nt, Artificial Sequence
  Synthetic
aaguauggccugugagag

SEQ ID NO: 572593 - RNA, 19 nt, Artificial Sequence
  Synthetic
uaaguauggccugugagag

SEQ ID NO: 572594 - RNA, 20 nt, Artificial Sequence
  Synthetic
cuaaguauggccugugagag

SEQ ID NO: 572595 - RNA, 21 nt, Artificial Sequence
  Synthetic
acuaaguauggccugugagag

SEQ ID NO: 572596 - RNA, 22 nt, Artificial Sequence
  Synthetic
cacuaaguauggccugugagag

SEQ ID NO: 572597 - RNA, 23 nt, Artificial Sequence
  Synthetic
ucacuaaguauggccugugagag

SEQ ID NO: 572598 - RNA, 24 nt, Artificial Sequence
  Synthetic
gucacuaaguauggccugugagag

SEQ ID NO: 572599 - RNA, 18 nt, Artificial Sequence
  Synthetic
uucucuaaugugugagag

SEQ ID NO: 572600 - RNA, 19 nt, Artificial Sequence
  Synthetic
uuucucuaaugugugagag

SEQ ID NO: 572601 - RNA, 20 nt, Artificial Sequence
  Synthetic
cuuucucuaaugugugagag

SEQ ID NO: 572602 - RNA, 21 nt, Artificial Sequence
  Synthetic
ucuuucucuaaugugugagag

SEQ ID NO: 572603 - RNA, 22 nt, Artificial Sequence
  Synthetic
cucuuucucuaaugugugagag

SEQ ID NO: 572604 - RNA, 23 nt, Artificial Sequence
  Synthetic
acucuuucucuaaugugugagag

SEQ ID NO: 572605 - RNA, 24 nt, Artificial Sequence
  Synthetic
aacucuuucucuaaugugugagag

SEQ ID NO: 572606 - RNA, 18 nt, Artificial Sequence
  Synthetic
aaguggcuaaauugagag

SEQ ID NO: 572607 - RNA, 19 nt, Artificial Sequence
  Synthetic
uaaguggcuaaauugagag

SEQ ID NO: 572608 - RNA, 20 nt, Artificial Sequence
  Synthetic
cuaaguggcuaaauugagag

SEQ ID NO: 572609 - RNA, 21 nt, Artificial Sequence
  Synthetic
ccuaaguggcuaaauugagag

SEQ ID NO: 572610 - RNA, 22 nt, Artificial Sequence
  Synthetic
uccuaaguggcuaaauugagag

SEQ ID NO: 572611 - RNA, 23 nt, Artificial Sequence
  Synthetic
auccuaaguggcuaaauugagag

SEQ ID NO: 572612 - RNA, 24 nt, Artificial Sequence
  Synthetic
uauccuaaguggcuaaauugagag

SEQ ID NO: 572613 - RNA, 18 nt, Artificial Sequence
  Synthetic
ucuuaaugcuauugagag

SEQ ID NO: 572614 - RNA, 19 nt, Artificial Sequence
  Synthetic
uucuuaaugcuauugagag

SEQ ID NO: 572615 - RNA, 20 nt, Artificial Sequence
  Synthetic
auucuuaaugcuauugagag

SEQ ID NO: 572616 - RNA, 21 nt, Artificial Sequence
  Synthetic
uauucuuaaugcuauugagag

SEQ ID NO: 572617 - RNA, 22 nt, Artificial Sequence
  Synthetic
auauucuuaaugcuauugagag

SEQ ID NO: 572618 - RNA, 23 nt, Artificial Sequence
  Synthetic
uauauucuuaaugcuauugagag

SEQ ID NO: 572619 - RNA, 24 nt, Artificial Sequence
  Synthetic
cuauauucuuaaugcuauugagag

SEQ ID NO: 572620 - RNA, 18 nt, Artificial Sequence
  Synthetic
aagaaaacaacuugagag

SEQ ID NO: 572621 - RNA, 19 nt, Artificial Sequence
  Synthetic
aaagaaaacaacuugagag

SEQ ID NO: 572622 - RNA, 20 nt, Artificial Sequence
  Synthetic
aaaagaaaacaacuugagag

SEQ ID NO: 572623 - RNA, 21 nt, Artificial Sequence
  Synthetic
aaaaagaaaacaacuugagag

SEQ ID NO: 572624 - RNA, 22 nt, Artificial Sequence
  Synthetic
aaaaaagaaaacaacuugagag

SEQ ID NO: 572625 - RNA, 23 nt, Artificial Sequence
  Synthetic
gaaaaaagaaaacaacuugagag

SEQ ID NO: 572626 - RNA, 24 nt, Artificial Sequence
  Synthetic
agaaaaaagaaaacaacuugagag

SEQ ID NO: 572627 - RNA, 18 nt, Artificial Sequence
  Synthetic
uuuucuauaacuugagag

SEQ ID NO: 572628 - RNA, 19 nt, Artificial Sequence
  Synthetic
auuuucuauaacuugagag

SEQ ID NO: 572629 - RNA, 20 nt, Artificial Sequence
  Synthetic
aauuuucuauaacuugagag

SEQ ID NO: 572630 - RNA, 21 nt, Artificial Sequence
  Synthetic
caauuuucuauaacuugagag

SEQ ID NO: 572631 - RNA, 22 nt, Artificial Sequence
  Synthetic
acaauuuucuauaacuugagag

SEQ ID NO: 572632 - RNA, 23 nt, Artificial Sequence
  Synthetic
uacaauuuucuauaacuugagag

SEQ ID NO: 572633 - RNA, 24 nt, Artificial Sequence
  Synthetic
cuacaauuuucuauaacuugagag

SEQ ID NO: 572634 - RNA, 18 nt, Artificial Sequence
  Synthetic
gauaauaaggcuugagag

SEQ ID NO: 572635 - RNA, 19 nt, Artificial Sequence
  Synthetic
ggauaauaaggcuugagag

SEQ ID NO: 572636 - RNA, 20 nt, Artificial Sequence
  Synthetic
aggauaauaaggcuugagag

SEQ ID NO: 572637 - RNA, 21 nt, Artificial Sequence
  Synthetic
uaggauaauaaggcuugagag

SEQ ID NO: 572638 - RNA, 22 nt, Artificial Sequence
  Synthetic
uuaggauaauaaggcuugagag

SEQ ID NO: 572639 - RNA, 23 nt, Artificial Sequence
  Synthetic
auuaggauaauaaggcuugagag

SEQ ID NO: 572640 - RNA, 24 nt, Artificial Sequence
  Synthetic
uauuaggauaauaaggcuugagag

SEQ ID NO: 572641 - RNA, 18 nt, Artificial Sequence
  Synthetic
auuguuacgauuugagag

SEQ ID NO: 572642 - RNA, 19 nt, Artificial Sequence
  Synthetic
gauuguuacgauuugagag

SEQ ID NO: 572643 - RNA, 20 nt, Artificial Sequence
  Synthetic
cgauuguuacgauuugagag

SEQ ID NO: 572644 - RNA, 21 nt, Artificial Sequence
  Synthetic
acgauuguuacgauuugagag

SEQ ID NO: 572645 - RNA, 22 nt, Artificial Sequence
  Synthetic
gacgauuguuacgauuugagag

SEQ ID NO: 572646 - RNA, 23 nt, Artificial Sequence
  Synthetic
ugacgauuguuacgauuugagag

SEQ ID NO: 572647 - RNA, 24 nt, Artificial Sequence
  Synthetic
uugacgauuguuacgauuugagag

SEQ ID NO: 572648 - RNA, 18 nt, Artificial Sequence
  Synthetic
gaguuucggauuugagag

SEQ ID NO: 572649 - RNA, 19 nt, Artificial Sequence
  Synthetic
ggaguuucggauuugagag

SEQ ID NO: 572650 - RNA, 20 nt, Artificial Sequence
  Synthetic
uggaguuucggauuugagag

SEQ ID NO: 572651 - RNA, 21 nt, Artificial Sequence
  Synthetic
uuggaguuucggauuugagag

SEQ ID NO: 572652 - RNA, 22 nt, Artificial Sequence
  Synthetic
uuuggaguuucggauuugagag

SEQ ID NO: 572653 - RNA, 23 nt, Artificial Sequence
  Synthetic
guuuggaguuucggauuugagag

SEQ ID NO: 572654 - RNA, 24 nt, Artificial Sequence
  Synthetic
gguuuggaguuucggauuugagag

SEQ ID NO: 572655 - RNA, 18 nt, Artificial Sequence
  Synthetic
ucaucagagguuugagag

SEQ ID NO: 572656 - RNA, 19 nt, Artificial Sequence
  Synthetic
aucaucagagguuugagag

SEQ ID NO: 572657 - RNA, 20 nt, Artificial Sequence
  Synthetic
aaucaucagagguuugagag

SEQ ID NO: 572658 - RNA, 21 nt, Artificial Sequence
  Synthetic
aaaucaucagagguuugagag

SEQ ID NO: 572659 - RNA, 22 nt, Artificial Sequence
  Synthetic
gaaaucaucagagguuugagag

SEQ ID NO: 572660 - RNA, 23 nt, Artificial Sequence
  Synthetic
ggaaaucaucagagguuugagag

SEQ ID NO: 572661 - RNA, 24 nt, Artificial Sequence
  Synthetic
gggaaaucaucagagguuugagag

SEQ ID NO: 572662 - RNA, 18 nt, Artificial Sequence
  Synthetic
aucuaccaagaaauagag

SEQ ID NO: 572663 - RNA, 19 nt, Artificial Sequence
  Synthetic
uaucuaccaagaaauagag

SEQ ID NO: 572664 - RNA, 20 nt, Artificial Sequence
  Synthetic
auaucuaccaagaaauagag

SEQ ID NO: 572665 - RNA, 21 nt, Artificial Sequence
  Synthetic
aauaucuaccaagaaauagag

SEQ ID NO: 572666 - RNA, 22 nt, Artificial Sequence
  Synthetic
gaauaucuaccaagaaauagag

SEQ ID NO: 572667 - RNA, 23 nt, Artificial Sequence
  Synthetic
agaauaucuaccaagaaauagag

SEQ ID NO: 572668 - RNA, 24 nt, Artificial Sequence
  Synthetic
uagaauaucuaccaagaaauagag

SEQ ID NO: 572669 - RNA, 18 nt, Artificial Sequence
  Synthetic
uuccugaaaguaauagag

SEQ ID NO: 572670 - RNA, 19 nt, Artificial Sequence
  Synthetic
auuccugaaaguaauagag

SEQ ID NO: 572671 - RNA, 20 nt, Artificial Sequence
  Synthetic
aauuccugaaaguaauagag

SEQ ID NO: 572672 - RNA, 21 nt, Artificial Sequence
  Synthetic
aaauuccugaaaguaauagag

SEQ ID NO: 572673 - RNA, 22 nt, Artificial Sequence
  Synthetic
aaaauuccugaaaguaauagag

SEQ ID NO: 572674 - RNA, 23 nt, Artificial Sequence
  Synthetic
aaaaauuccugaaaguaauagag

SEQ ID NO: 572675 - RNA, 24 nt, Artificial Sequence
  Synthetic
aaaaaauuccugaaaguaauagag

SEQ ID NO: 572676 - RNA, 18 nt, Artificial Sequence
  Synthetic
uuuguauuuuuaauagag

SEQ ID NO: 572677 - RNA, 19 nt, Artificial Sequence
  Synthetic
uuuuguauuuuuaauagag

SEQ ID NO: 572678 - RNA, 20 nt, Artificial Sequence
  Synthetic
uuuuuguauuuuuaauagag

SEQ ID NO: 572679 - RNA, 21 nt, Artificial Sequence
  Synthetic
auuuuuguauuuuuaauagag

SEQ ID NO: 572680 - RNA, 22 nt, Artificial Sequence
  Synthetic
aauuuuuguauuuuuaauagag

SEQ ID NO: 572681 - RNA, 23 nt, Artificial Sequence
  Synthetic
uaauuuuuguauuuuuaauagag

SEQ ID NO: 572682 - RNA, 24 nt, Artificial Sequence
  Synthetic
cuaauuuuuguauuuuuaauagag

SEQ ID NO: 572683 - RNA, 18 nt, Artificial Sequence
  Synthetic
accuuauuucacauagag

SEQ ID NO: 572684 - RNA, 19 nt, Artificial Sequence
  Synthetic
gaccuuauuucacauagag

SEQ ID NO: 572685 - RNA, 20 nt, Artificial Sequence
  Synthetic
ugaccuuauuucacauagag

SEQ ID NO: 572686 - RNA, 21 nt, Artificial Sequence
  Synthetic
augaccuuauuucacauagag

SEQ ID NO: 572687 - RNA, 22 nt, Artificial Sequence
  Synthetic
uaugaccuuauuucacauagag

SEQ ID NO: 572688 - RNA, 23 nt, Artificial Sequence
  Synthetic
auaugaccuuauuucacauagag

SEQ ID NO: 572689 - RNA, 24 nt, Artificial Sequence
  Synthetic
gauaugaccuuauuucacauagag

SEQ ID NO: 572690 - RNA, 18 nt, Artificial Sequence
  Synthetic
aucaaaaauuacauagag

SEQ ID NO: 572691 - RNA, 19 nt, Artificial Sequence
  Synthetic
caucaaaaauuacauagag

SEQ ID NO: 572692 - RNA, 20 nt, Artificial Sequence
  Synthetic
acaucaaaaauuacauagag

SEQ ID NO: 572693 - RNA, 21 nt, Artificial Sequence
  Synthetic
gacaucaaaaauuacauagag

SEQ ID NO: 572694 - RNA, 22 nt, Artificial Sequence
  Synthetic
ggacaucaaaaauuacauagag

SEQ ID NO: 572695 - RNA, 23 nt, Artificial Sequence
  Synthetic
gggacaucaaaaauuacauagag

SEQ ID NO: 572696 - RNA, 24 nt, Artificial Sequence
  Synthetic
ugggacaucaaaaauuacauagag

SEQ ID NO: 572697 - RNA, 18 nt, Artificial Sequence
  Synthetic
aaagacaaaaucauagag

SEQ ID NO: 572698 - RNA, 19 nt, Artificial Sequence
  Synthetic
aaaagacaaaaucauagag

SEQ ID NO: 572699 - RNA, 20 nt, Artificial Sequence
  Synthetic
gaaaagacaaaaucauagag

SEQ ID NO: 572700 - RNA, 21 nt, Artificial Sequence
  Synthetic
ugaaaagacaaaaucauagag

SEQ ID NO: 572701 - RNA, 22 nt, Artificial Sequence
  Synthetic
uugaaaagacaaaaucauagag

SEQ ID NO: 572702 - RNA, 23 nt, Artificial Sequence
  Synthetic
cuugaaaagacaaaaucauagag

SEQ ID NO: 572703 - RNA, 24 nt, Artificial Sequence
  Synthetic
ccuugaaaagacaaaaucauagag

SEQ ID NO: 572704 - RNA, 18 nt, Artificial Sequence
  Synthetic
aaacagcccaucauagag

SEQ ID NO: 572705 - RNA, 19 nt, Artificial Sequence
  Synthetic
aaaacagcccaucauagag

SEQ ID NO: 572706 - RNA, 20 nt, Artificial Sequence
  Synthetic
caaaacagcccaucauagag

SEQ ID NO: 572707 - RNA, 21 nt, Artificial Sequence
  Synthetic
acaaaacagcccaucauagag

SEQ ID NO: 572708 - RNA, 22 nt, Artificial Sequence
  Synthetic
aacaaaacagcccaucauagag

SEQ ID NO: 572709 - RNA, 23 nt, Artificial Sequence
  Synthetic
caacaaaacagcccaucauagag

SEQ ID NO: 572710 - RNA, 24 nt, Artificial Sequence
  Synthetic
acaacaaaacagcccaucauagag

SEQ ID NO: 572711 - RNA, 18 nt, Artificial Sequence
  Synthetic
auguacagagucauagag

SEQ ID NO: 572712 - RNA, 19 nt, Artificial Sequence
  Synthetic
cauguacagagucauagag

SEQ ID NO: 572713 - RNA, 20 nt, Artificial Sequence
  Synthetic
acauguacagagucauagag

SEQ ID NO: 572714 - RNA, 21 nt, Artificial Sequence
  Synthetic
uacauguacagagucauagag

SEQ ID NO: 572715 - RNA, 22 nt, Artificial Sequence
  Synthetic
guacauguacagagucauagag

SEQ ID NO: 572716 - RNA, 23 nt, Artificial Sequence
  Synthetic
uguacauguacagagucauagag

SEQ ID NO: 572717 - RNA, 24 nt, Artificial Sequence
  Synthetic
uuguacauguacagagucauagag

SEQ ID NO: 572718 - RNA, 18 nt, Artificial Sequence
  Synthetic
ggaaugauagucauagag

SEQ ID NO: 572719 - RNA, 19 nt, Artificial Sequence
  Synthetic
aggaaugauagucauagag

SEQ ID NO: 572720 - RNA, 20 nt, Artificial Sequence
  Synthetic
uaggaaugauagucauagag

SEQ ID NO: 572721 - RNA, 21 nt, Artificial Sequence
  Synthetic
guaggaaugauagucauagag

SEQ ID NO: 572722 - RNA, 22 nt, Artificial Sequence
  Synthetic
aguaggaaugauagucauagag

SEQ ID NO: 572723 - RNA, 23 nt, Artificial Sequence
  Synthetic
uaguaggaaugauagucauagag

SEQ ID NO: 572724 - RNA, 24 nt, Artificial Sequence
  Synthetic
guaguaggaaugauagucauagag

SEQ ID NO: 572725 - RNA, 18 nt, Artificial Sequence
  Synthetic
ggguucauguagauagag

SEQ ID NO: 572726 - RNA, 19 nt, Artificial Sequence
  Synthetic
uggguucauguagauagag

SEQ ID NO: 572727 - RNA, 20 nt, Artificial Sequence
  Synthetic
guggguucauguagauagag

SEQ ID NO: 572728 - RNA, 21 nt, Artificial Sequence
  Synthetic
aguggguucauguagauagag

SEQ ID NO: 572729 - RNA, 22 nt, Artificial Sequence
  Synthetic
aaguggguucauguagauagag

SEQ ID NO: 572730 - RNA, 23 nt, Artificial Sequence
  Synthetic
gaaguggguucauguagauagag

SEQ ID NO: 572731 - RNA, 24 nt, Artificial Sequence
  Synthetic
ggaaguggguucauguagauagag

SEQ ID NO: 572732 - RNA, 18 nt, Artificial Sequence
  Synthetic
uaaacaaaggugauagag

SEQ ID NO: 572733 - RNA, 19 nt, Artificial Sequence
  Synthetic
cuaaacaaaggugauagag

SEQ ID NO: 572734 - RNA, 20 nt, Artificial Sequence
  Synthetic
gcuaaacaaaggugauagag

SEQ ID NO: 572735 - RNA, 21 nt, Artificial Sequence
  Synthetic
agcuaaacaaaggugauagag

SEQ ID NO: 572736 - RNA, 22 nt, Artificial Sequence
  Synthetic
uagcuaaacaaaggugauagag

SEQ ID NO: 572737 - RNA, 23 nt, Artificial Sequence
  Synthetic
cuagcuaaacaaaggugauagag

SEQ ID NO: 572738 - RNA, 24 nt, Artificial Sequence
  Synthetic
acuagcuaaacaaaggugauagag

SEQ ID NO: 572739 - RNA, 18 nt, Artificial Sequence
  Synthetic
ugaauacauuauauagag

SEQ ID NO: 572740 - RNA, 19 nt, Artificial Sequence
  Synthetic
augaauacauuauauagag

SEQ ID NO: 572741 - RNA, 20 nt, Artificial Sequence
  Synthetic
uaugaauacauuauauagag

SEQ ID NO: 572742 - RNA, 21 nt, Artificial Sequence
  Synthetic
auaugaauacauuauauagag

SEQ ID NO: 572743 - RNA, 22 nt, Artificial Sequence
  Synthetic
aauaugaauacauuauauagag

SEQ ID NO: 572744 - RNA, 23 nt, Artificial Sequence
  Synthetic
gaauaugaauacauuauauagag

SEQ ID NO: 572745 - RNA, 24 nt, Artificial Sequence
  Synthetic
ggaauaugaauacauuauauagag

SEQ ID NO: 572746 - RNA, 18 nt, Artificial Sequence
  Synthetic
uauccgaaacuuauagag

SEQ ID NO: 572747 - RNA, 19 nt, Artificial Sequence
  Synthetic
guauccgaaacuuauagag

SEQ ID NO: 572748 - RNA, 20 nt, Artificial Sequence
  Synthetic
aguauccgaaacuuauagag

SEQ ID NO: 572749 - RNA, 21 nt, Artificial Sequence
  Synthetic
uaguauccgaaacuuauagag

SEQ ID NO: 572750 - RNA, 22 nt, Artificial Sequence
  Synthetic
auaguauccgaaacuuauagag

SEQ ID NO: 572751 - RNA, 23 nt, Artificial Sequence
  Synthetic
cauaguauccgaaacuuauagag

SEQ ID NO: 572752 - RNA, 24 nt, Artificial Sequence
  Synthetic
ucauaguauccgaaacuuauagag

SEQ ID NO: 572753 - RNA, 18 nt, Artificial Sequence
  Synthetic
accugaagagaacuagag

SEQ ID NO: 572754 - RNA, 19 nt, Artificial Sequence
  Synthetic
aaccugaagagaacuagag

SEQ ID NO: 572755 - RNA, 20 nt, Artificial Sequence
  Synthetic
gaaccugaagagaacuagag

SEQ ID NO: 572756 - RNA, 21 nt, Artificial Sequence
  Synthetic
agaaccugaagagaacuagag

SEQ ID NO: 572757 - RNA, 22 nt, Artificial Sequence
  Synthetic
cagaaccugaagagaacuagag

SEQ ID NO: 572758 - RNA, 23 nt, Artificial Sequence
  Synthetic
gcagaaccugaagagaacuagag

SEQ ID NO: 572759 - RNA, 24 nt, Artificial Sequence
  Synthetic
ugcagaaccugaagagaacuagag

SEQ ID NO: 572760 - RNA, 18 nt, Artificial Sequence
  Synthetic
gucuuugaagcacuagag

SEQ ID NO: 572761 - RNA, 19 nt, Artificial Sequence
  Synthetic
ugucuuugaagcacuagag

SEQ ID NO: 572762 - RNA, 20 nt, Artificial Sequence
  Synthetic
cugucuuugaagcacuagag

SEQ ID NO: 572763 - RNA, 21 nt, Artificial Sequence
  Synthetic
gcugucuuugaagcacuagag

SEQ ID NO: 572764 - RNA, 22 nt, Artificial Sequence
  Synthetic
agcugucuuugaagcacuagag

SEQ ID NO: 572765 - RNA, 23 nt, Artificial Sequence
  Synthetic
cagcugucuuugaagcacuagag

SEQ ID NO: 572766 - RNA, 24 nt, Artificial Sequence
  Synthetic
ucagcugucuuugaagcacuagag

SEQ ID NO: 572767 - RNA, 18 nt, Artificial Sequence
  Synthetic
augaaugaaagacuagag

SEQ ID NO: 572768 - RNA, 19 nt, Artificial Sequence
  Synthetic
gaugaaugaaagacuagag

SEQ ID NO: 572769 - RNA, 20 nt, Artificial Sequence
  Synthetic
agaugaaugaaagacuagag

SEQ ID NO: 572770 - RNA, 21 nt, Artificial Sequence
  Synthetic
aagaugaaugaaagacuagag

SEQ ID NO: 572771 - RNA, 22 nt, Artificial Sequence
  Synthetic
uaagaugaaugaaagacuagag

SEQ ID NO: 572772 - RNA, 23 nt, Artificial Sequence
  Synthetic
auaagaugaaugaaagacuagag

SEQ ID NO: 572773 - RNA, 24 nt, Artificial Sequence
  Synthetic
aauaagaugaaugaaagacuagag

SEQ ID NO: 572774 - RNA, 18 nt, Artificial Sequence
  Synthetic
aacggaggacuacuagag

SEQ ID NO: 572775 - RNA, 19 nt, Artificial Sequence
  Synthetic
aaacggaggacuacuagag

SEQ ID NO: 572776 - RNA, 20 nt, Artificial Sequence
  Synthetic
gaaacggaggacuacuagag

SEQ ID NO: 572777 - RNA, 21 nt, Artificial Sequence
  Synthetic
agaaacggaggacuacuagag

SEQ ID NO: 572778 - RNA, 22 nt, Artificial Sequence
  Synthetic
uagaaacggaggacuacuagag

SEQ ID NO: 572779 - RNA, 23 nt, Artificial Sequence
  Synthetic
auagaaacggaggacuacuagag

SEQ ID NO: 572780 - RNA, 24 nt, Artificial Sequence
  Synthetic
aauagaaacggaggacuacuagag

SEQ ID NO: 572781 - RNA, 18 nt, Artificial Sequence
  Synthetic
caucaaauaaugcuagag

SEQ ID NO: 572782 - RNA, 19 nt, Artificial Sequence
  Synthetic
ucaucaaauaaugcuagag

SEQ ID NO: 572783 - RNA, 20 nt, Artificial Sequence
  Synthetic
aucaucaaauaaugcuagag

SEQ ID NO: 572784 - RNA, 21 nt, Artificial Sequence
  Synthetic
uaucaucaaauaaugcuagag

SEQ ID NO: 572785 - RNA, 22 nt, Artificial Sequence
  Synthetic
uuaucaucaaauaaugcuagag

SEQ ID NO: 572786 - RNA, 23 nt, Artificial Sequence
  Synthetic
uuuaucaucaaauaaugcuagag

SEQ ID NO: 572787 - RNA, 24 nt, Artificial Sequence
  Synthetic
guuuaucaucaaauaaugcuagag

SEQ ID NO: 572788 - RNA, 18 nt, Artificial Sequence
  Synthetic
gacaaagaugaucuagag

SEQ ID NO: 572789 - RNA, 19 nt, Artificial Sequence
  Synthetic
agacaaagaugaucuagag

SEQ ID NO: 572790 - RNA, 20 nt, Artificial Sequence
  Synthetic
uagacaaagaugaucuagag

SEQ ID NO: 572791 - RNA, 21 nt, Artificial Sequence
  Synthetic
auagacaaagaugaucuagag

SEQ ID NO: 572792 - RNA, 22 nt, Artificial Sequence
  Synthetic
cauagacaaagaugaucuagag

SEQ ID NO: 572793 - RNA, 23 nt, Artificial Sequence
  Synthetic
acauagacaaagaugaucuagag

SEQ ID NO: 572794 - RNA, 24 nt, Artificial Sequence
  Synthetic
aacauagacaaagaugaucuagag

SEQ ID NO: 572795 - RNA, 18 nt, Artificial Sequence
  Synthetic
cagacaguugcucuagag

SEQ ID NO: 572796 - RNA, 19 nt, Artificial Sequence
  Synthetic
ucagacaguugcucuagag

SEQ ID NO: 572797 - RNA, 20 nt, Artificial Sequence
  Synthetic
cucagacaguugcucuagag

SEQ ID NO: 572798 - RNA, 21 nt, Artificial Sequence
  Synthetic
ccucagacaguugcucuagag

SEQ ID NO: 572799 - RNA, 22 nt, Artificial Sequence
  Synthetic
cccucagacaguugcucuagag

SEQ ID NO: 572800 - RNA, 23 nt, Artificial Sequence
  Synthetic
ucccucagacaguugcucuagag

SEQ ID NO: 572801 - RNA, 24 nt, Artificial Sequence
  Synthetic
uucccucagacaguugcucuagag

SEQ ID NO: 572802 - RNA, 18 nt, Artificial Sequence
  Synthetic
aauuugguaccaguagag

SEQ ID NO: 572803 - RNA, 19 nt, Artificial Sequence
  Synthetic
uaauuugguaccaguagag

SEQ ID NO: 572804 - RNA, 20 nt, Artificial Sequence
  Synthetic
guaauuugguaccaguagag

SEQ ID NO: 572805 - RNA, 21 nt, Artificial Sequence
  Synthetic
aguaauuugguaccaguagag

SEQ ID NO: 572806 - RNA, 22 nt, Artificial Sequence
  Synthetic
caguaauuugguaccaguagag

SEQ ID NO: 572807 - RNA, 23 nt, Artificial Sequence
  Synthetic
acaguaauuugguaccaguagag

SEQ ID NO: 572808 - RNA, 24 nt, Artificial Sequence
  Synthetic
uacaguaauuugguaccaguagag

SEQ ID NO: 572809 - RNA, 18 nt, Artificial Sequence
  Synthetic
uuuguauuuucaguagag

SEQ ID NO: 572810 - RNA, 19 nt, Artificial Sequence
  Synthetic
uuuuguauuuucaguagag

SEQ ID NO: 572811 - RNA, 20 nt, Artificial Sequence
  Synthetic
uuuuuguauuuucaguagag

SEQ ID NO: 572812 - RNA, 21 nt, Artificial Sequence
  Synthetic
uuuuuuguauuuucaguagag

SEQ ID NO: 572813 - RNA, 22 nt, Artificial Sequence
  Synthetic
auuuuuuguauuuucaguagag

SEQ ID NO: 572814 - RNA, 23 nt, Artificial Sequence
  Synthetic
gauuuuuuguauuuucaguagag

SEQ ID NO: 572815 - RNA, 24 nt, Artificial Sequence
  Synthetic
ugauuuuuuguauuuucaguagag

SEQ ID NO: 572816 - RNA, 18 nt, Artificial Sequence
  Synthetic
uuuuuauuuucaguagag

SEQ ID NO: 572817 - RNA, 19 nt, Artificial Sequence
  Synthetic
uuuuuuauuuucaguagag

SEQ ID NO: 572818 - RNA, 20 nt, Artificial Sequence
  Synthetic
uuuuuuuauuuucaguagag

SEQ ID NO: 572819 - RNA, 21 nt, Artificial Sequence
  Synthetic
auuuuuuuauuuucaguagag

SEQ ID NO: 572820 - RNA, 22 nt, Artificial Sequence
  Synthetic
aauuuuuuuauuuucaguagag

SEQ ID NO: 572821 - RNA, 23 nt, Artificial Sequence
  Synthetic
uaauuuuuuuauuuucaguagag

SEQ ID NO: 572822 - RNA, 24 nt, Artificial Sequence
  Synthetic
cuaauuuuuuuauuuucaguagag

SEQ ID NO: 572823 - RNA, 24 nt, Artificial Sequence
  Synthetic
uaauuuuuuguaucuuuaguagag

SEQ ID NO: 572824 - RNA, 18 nt, Artificial Sequence
  Synthetic
uucauauuuuuaguagag

SEQ ID NO: 572825 - RNA, 19 nt, Artificial Sequence
  Synthetic
uuucauauuuuuaguagag

SEQ ID NO: 572826 - RNA, 20 nt, Artificial Sequence
  Synthetic
uuuucauauuuuuaguagag

SEQ ID NO: 572827 - RNA, 21 nt, Artificial Sequence
  Synthetic
auuuucauauuuuuaguagag

SEQ ID NO: 572828 - RNA, 22 nt, Artificial Sequence
  Synthetic
aauuuucauauuuuuaguagag

SEQ ID NO: 572829 - RNA, 23 nt, Artificial Sequence
  Synthetic
uaauuuucauauuuuuaguagag

SEQ ID NO: 572830 - RNA, 24 nt, Artificial Sequence
  Synthetic
cuaauuuucauauuuuuaguagag

SEQ ID NO: 572831 - RNA, 18 nt, Artificial Sequence
  Synthetic
uuucuauuuuuaguagag

SEQ ID NO: 572832 - RNA, 19 nt, Artificial Sequence
  Synthetic
uuuucuauuuuuaguagag

SEQ ID NO: 572833 - RNA, 20 nt, Artificial Sequence
  Synthetic
uuuuucuauuuuuaguagag

SEQ ID NO: 572834 - RNA, 21 nt, Artificial Sequence
  Synthetic
uuuuuucuauuuuuaguagag

SEQ ID NO: 572835 - RNA, 22 nt, Artificial Sequence
  Synthetic
auuuuuucuauuuuuaguagag

SEQ ID NO: 572836 - RNA, 23 nt, Artificial Sequence
  Synthetic
aauuuuuucuauuuuuaguagag

SEQ ID NO: 572837 - RNA, 24 nt, Artificial Sequence
  Synthetic
uaauuuuuucuauuuuuaguagag

SEQ ID NO: 572838 - RNA, 18 nt, Artificial Sequence
  Synthetic
uugguauuuuuaguagag

SEQ ID NO: 572839 - RNA, 19 nt, Artificial Sequence
  Synthetic
uuugguauuuuuaguagag

SEQ ID NO: 572840 - RNA, 20 nt, Artificial Sequence
  Synthetic
uuuugguauuuuuaguagag

SEQ ID NO: 572841 - RNA, 21 nt, Artificial Sequence
  Synthetic
uuuuugguauuuuuaguagag

SEQ ID NO: 572842 - RNA, 22 nt, Artificial Sequence
  Synthetic
auuuuugguauuuuuaguagag

SEQ ID NO: 572843 - RNA, 23 nt, Artificial Sequence
  Synthetic
aauuuuugguauuuuuaguagag

SEQ ID NO: 572844 - RNA, 24 nt, Artificial Sequence
  Synthetic
uaauuuuugguauuuuuaguagag

SEQ ID NO: 572845 - RNA, 18 nt, Artificial Sequence
  Synthetic
uguguauuuuuaguagag

SEQ ID NO: 572846 - RNA, 19 nt, Artificial Sequence
  Synthetic
guguguauuuuuaguagag

SEQ ID NO: 572847 - RNA, 20 nt, Artificial Sequence
  Synthetic
uguguguauuuuuaguagag

SEQ ID NO: 572848 - RNA, 21 nt, Artificial Sequence
  Synthetic
guguguguauuuuuaguagag

SEQ ID NO: 572849 - RNA, 22 nt, Artificial Sequence
  Synthetic
uguguguguauuuuuaguagag

SEQ ID NO: 572850 - RNA, 23 nt, Artificial Sequence
  Synthetic
guguguguguauuuuuaguagag

SEQ ID NO: 572851 - RNA, 24 nt, Artificial Sequence
  Synthetic
uguguguguguauuuuuaguagag

SEQ ID NO: 572852 - RNA, 22 nt, Artificial Sequence
  Synthetic
uguuuuuguauuuuuaguagag

SEQ ID NO: 572853 - RNA, 23 nt, Artificial Sequence
  Synthetic
uuguuuuuguauuuuuaguagag

SEQ ID NO: 572854 - RNA, 24 nt, Artificial Sequence
  Synthetic
uuuguuuuuguauuuuuaguagag

SEQ ID NO: 572855 - RNA, 21 nt, Artificial Sequence
  Synthetic
uuuuuuguauuuuuaguagag

SEQ ID NO: 572856 - RNA, 22 nt, Artificial Sequence
  Synthetic
auuuuuuguauuuuuaguagag

SEQ ID NO: 572857 - RNA, 23 nt, Artificial Sequence
  Synthetic
uauuuuuuguauuuuuaguagag

SEQ ID NO: 572858 - RNA, 24 nt, Artificial Sequence
  Synthetic
cuauuuuuuguauuuuuaguagag

SEQ ID NO: 572859 - RNA, 22 nt, Artificial Sequence
  Synthetic
uuuuuuuguauuuuuaguagag

SEQ ID NO: 572860 - RNA, 23 nt, Artificial Sequence
  Synthetic
auuuuuuuguauuuuuaguagag

SEQ ID NO: 572861 - RNA, 24 nt, Artificial Sequence
  Synthetic
uauuuuuuuguauuuuuaguagag

SEQ ID NO: 572862 - RNA, 23 nt, Artificial Sequence
  Synthetic
cuuuuuuuguauuuuuaguagag

SEQ ID NO: 572863 - RNA, 24 nt, Artificial Sequence
  Synthetic
ucuuuuuuuguauuuuuaguagag

SEQ ID NO: 572864 - RNA, 23 nt, Artificial Sequence
  Synthetic
auuuuuuguauuuuuuaguagag

SEQ ID NO: 572865 - RNA, 24 nt, Artificial Sequence
  Synthetic
aauuuuuuguauuuuuuaguagag

SEQ ID NO: 572866 - RNA, 24 nt, Artificial Sequence
  Synthetic
uuuuuuuuguauuuuuuaguagag

SEQ ID NO: 572867 - RNA, 18 nt, Artificial Sequence
  Synthetic
acacauggacacguagag

SEQ ID NO: 572868 - RNA, 19 nt, Artificial Sequence
  Synthetic
aacacauggacacguagag

SEQ ID NO: 572869 - RNA, 20 nt, Artificial Sequence
  Synthetic
gaacacauggacacguagag

SEQ ID NO: 572870 - RNA, 21 nt, Artificial Sequence
  Synthetic
agaacacauggacacguagag

SEQ ID NO: 572871 - RNA, 22 nt, Artificial Sequence
  Synthetic
gagaacacauggacacguagag

SEQ ID NO: 572872 - RNA, 23 nt, Artificial Sequence
  Synthetic
ugagaacacauggacacguagag

SEQ ID NO: 572873 - RNA, 24 nt, Artificial Sequence
  Synthetic
augagaacacauggacacguagag

SEQ ID NO: 572874 - RNA, 18 nt, Artificial Sequence
  Synthetic
uuuguauuuuugguagag

SEQ ID NO: 572875 - RNA, 19 nt, Artificial Sequence
  Synthetic
uuuuguauuuuugguagag

SEQ ID NO: 572876 - RNA, 20 nt, Artificial Sequence
  Synthetic
uuuuuguauuuuugguagag

SEQ ID NO: 572877 - RNA, 21 nt, Artificial Sequence
  Synthetic
auuuuuguauuuuugguagag

SEQ ID NO: 572878 - RNA, 22 nt, Artificial Sequence
  Synthetic
aauuuuuguauuuuugguagag

SEQ ID NO: 572879 - RNA, 23 nt, Artificial Sequence
  Synthetic
uaauuuuuguauuuuugguagag

SEQ ID NO: 572880 - RNA, 24 nt, Artificial Sequence
  Synthetic
cuaauuuuuguauuuuugguagag

SEQ ID NO: 572881 - RNA, 18 nt, Artificial Sequence
  Synthetic
aaaauuuuuuugguagag

SEQ ID NO: 572882 - RNA, 19 nt, Artificial Sequence
  Synthetic
aaaaauuuuuuugguagag

SEQ ID NO: 572883 - RNA, 20 nt, Artificial Sequence
  Synthetic
aaaaaauuuuuuugguagag

SEQ ID NO: 572884 - RNA, 21 nt, Artificial Sequence
  Synthetic
uaaaaaauuuuuuugguagag

SEQ ID NO: 572885 - RNA, 22 nt, Artificial Sequence
  Synthetic
uuaaaaaauuuuuuugguagag

SEQ ID NO: 572886 - RNA, 23 nt, Artificial Sequence
  Synthetic
uuuaaaaaauuuuuuugguagag

SEQ ID NO: 572887 - RNA, 24 nt, Artificial Sequence
  Synthetic
uuuuaaaaaauuuuuuugguagag

SEQ ID NO: 572888 - RNA, 18 nt, Artificial Sequence
  Synthetic
cagaaacugaauguagag

SEQ ID NO: 572889 - RNA, 19 nt, Artificial Sequence
  Synthetic
acagaaacugaauguagag

SEQ ID NO: 572890 - RNA, 20 nt, Artificial Sequence
  Synthetic
aacagaaacugaauguagag

SEQ ID NO: 572891 - RNA, 21 nt, Artificial Sequence
  Synthetic
aaacagaaacugaauguagag

SEQ ID NO: 572892 - RNA, 22 nt, Artificial Sequence
  Synthetic
aaaacagaaacugaauguagag

SEQ ID NO: 572893 - RNA, 23 nt, Artificial Sequence
  Synthetic
uaaaacagaaacugaauguagag

SEQ ID NO: 572894 - RNA, 24 nt, Artificial Sequence
  Synthetic
guaaaacagaaacugaauguagag

SEQ ID NO: 572895 - RNA, 18 nt, Artificial Sequence
  Synthetic
uuuuaauuuuauguagag

SEQ ID NO: 572896 - RNA, 19 nt, Artificial Sequence
  Synthetic
uuuuuaauuuuauguagag

SEQ ID NO: 572897 - RNA, 20 nt, Artificial Sequence
  Synthetic
auuuuuaauuuuauguagag

SEQ ID NO: 572898 - RNA, 21 nt, Artificial Sequence
  Synthetic
cauuuuuaauuuuauguagag

SEQ ID NO: 572899 - RNA, 22 nt, Artificial Sequence
  Synthetic
acauuuuuaauuuuauguagag

SEQ ID NO: 572900 - RNA, 23 nt, Artificial Sequence
  Synthetic
uacauuuuuaauuuuauguagag

SEQ ID NO: 572901 - RNA, 24 nt, Artificial Sequence
  Synthetic
cuacauuuuuaauuuuauguagag

SEQ ID NO: 572902 - RNA, 18 nt, Artificial Sequence
  Synthetic
auacauuuuuauguagag

SEQ ID NO: 572903 - RNA, 19 nt, Artificial Sequence
  Synthetic
cauacauuuuuauguagag

SEQ ID NO: 572904 - RNA, 20 nt, Artificial Sequence
  Synthetic
acauacauuuuuauguagag

SEQ ID NO: 572905 - RNA, 21 nt, Artificial Sequence
  Synthetic
uacauacauuuuuauguagag

SEQ ID NO: 572906 - RNA, 22 nt, Artificial Sequence
  Synthetic
guacauacauuuuuauguagag

SEQ ID NO: 572907 - RNA, 23 nt, Artificial Sequence
  Synthetic
aguacauacauuuuuauguagag

SEQ ID NO: 572908 - RNA, 24 nt, Artificial Sequence
  Synthetic
gaguacauacauuuuuauguagag

SEQ ID NO: 572909 - RNA, 18 nt, Artificial Sequence
  Synthetic
guuugguguacuguagag

SEQ ID NO: 572910 - RNA, 19 nt, Artificial Sequence
  Synthetic
aguuugguguacuguagag

SEQ ID NO: 572911 - RNA, 20 nt, Artificial Sequence
  Synthetic
gaguuugguguacuguagag

SEQ ID NO: 572912 - RNA, 21 nt, Artificial Sequence
  Synthetic
agaguuugguguacuguagag

SEQ ID NO: 572913 - RNA, 22 nt, Artificial Sequence
  Synthetic
aagaguuugguguacuguagag

SEQ ID NO: 572914 - RNA, 23 nt, Artificial Sequence
  Synthetic
caagaguuugguguacuguagag

SEQ ID NO: 572915 - RNA, 24 nt, Artificial Sequence
  Synthetic
ucaagaguuugguguacuguagag

SEQ ID NO: 572916 - RNA, 18 nt, Artificial Sequence
  Synthetic
gcugcugacgcuguagag

SEQ ID NO: 572917 - RNA, 19 nt, Artificial Sequence
  Synthetic
ugcugcugacgcuguagag

SEQ ID NO: 572918 - RNA, 20 nt, Artificial Sequence
  Synthetic
augcugcugacgcuguagag

SEQ ID NO: 572919 - RNA, 21 nt, Artificial Sequence
  Synthetic
gaugcugcugacgcuguagag

SEQ ID NO: 572920 - RNA, 22 nt, Artificial Sequence
  Synthetic
agaugcugcugacgcuguagag

SEQ ID NO: 572921 - RNA, 23 nt, Artificial Sequence
  Synthetic
cagaugcugcugacgcuguagag

SEQ ID NO: 572922 - RNA, 24 nt, Artificial Sequence
  Synthetic
acagaugcugcugacgcuguagag

SEQ ID NO: 572923 - RNA, 18 nt, Artificial Sequence
  Synthetic
gcguguguguguguagag

SEQ ID NO: 572924 - RNA, 19 nt, Artificial Sequence
  Synthetic
cgcguguguguguguagag

SEQ ID NO: 572925 - RNA, 20 nt, Artificial Sequence
  Synthetic
gcgcguguguguguguagag

SEQ ID NO: 572926 - RNA, 21 nt, Artificial Sequence
  Synthetic
cgcgcguguguguguguagag

SEQ ID NO: 572927 - RNA, 22 nt, Artificial Sequence
  Synthetic
gcgcgcguguguguguguagag

SEQ ID NO: 572928 - RNA, 23 nt, Artificial Sequence
  Synthetic
ugcgcgcguguguguguguagag

SEQ ID NO: 572929 - RNA, 24 nt, Artificial Sequence
  Synthetic
uugcgcgcguguguguguguagag

SEQ ID NO: 572930 - RNA, 18 nt, Artificial Sequence
  Synthetic
uuugaauucuuuguagag

SEQ ID NO: 572931 - RNA, 19 nt, Artificial Sequence
  Synthetic
uuuugaauucuuuguagag

SEQ ID NO: 572932 - RNA, 20 nt, Artificial Sequence
  Synthetic
uuuuugaauucuuuguagag

SEQ ID NO: 572933 - RNA, 21 nt, Artificial Sequence
  Synthetic
auuuuugaauucuuuguagag

SEQ ID NO: 572934 - RNA, 22 nt, Artificial Sequence
  Synthetic
aauuuuugaauucuuuguagag

SEQ ID NO: 572935 - RNA, 23 nt, Artificial Sequence
  Synthetic
uaauuuuugaauucuuuguagag

SEQ ID NO: 572936 - RNA, 24 nt, Artificial Sequence
  Synthetic
uuaauuuuugaauucuuuguagag

SEQ ID NO: 572937 - RNA, 18 nt, Artificial Sequence
  Synthetic
ucuaucuauuuuguagag

SEQ ID NO: 572938 - RNA, 19 nt, Artificial Sequence
  Synthetic
aucuaucuauuuuguagag

SEQ ID NO: 572939 - RNA, 20 nt, Artificial Sequence
  Synthetic
uaucuaucuauuuuguagag

SEQ ID NO: 572940 - RNA, 21 nt, Artificial Sequence
  Synthetic
cuaucuaucuauuuuguagag

SEQ ID NO: 572941 - RNA, 22 nt, Artificial Sequence
  Synthetic
ucuaucuaucuauuuuguagag

SEQ ID NO: 572942 - RNA, 23 nt, Artificial Sequence
  Synthetic
aucuaucuaucuauuuuguagag

SEQ ID NO: 572943 - RNA, 24 nt, Artificial Sequence
  Synthetic
uaucuaucuaucuauuuuguagag

SEQ ID NO: 572944 - RNA, 18 nt, Artificial Sequence
  Synthetic
auauauacuuuuguagag

SEQ ID NO: 572945 - RNA, 19 nt, Artificial Sequence
  Synthetic
cauauauacuuuuguagag

SEQ ID NO: 572946 - RNA, 20 nt, Artificial Sequence
  Synthetic
ucauauauacuuuuguagag

SEQ ID NO: 572947 - RNA, 21 nt, Artificial Sequence
  Synthetic
gucauauauacuuuuguagag

SEQ ID NO: 572948 - RNA, 22 nt, Artificial Sequence
  Synthetic
agucauauauacuuuuguagag

SEQ ID NO: 572949 - RNA, 23 nt, Artificial Sequence
  Synthetic
uagucauauauacuuuuguagag

SEQ ID NO: 572950 - RNA, 24 nt, Artificial Sequence
  Synthetic
auagucauauauacuuuuguagag

SEQ ID NO: 572951 - RNA, 18 nt, Artificial Sequence
  Synthetic
uuugcauuuuuuguagag

SEQ ID NO: 572952 - RNA, 19 nt, Artificial Sequence
  Synthetic
uuuugcauuuuuuguagag

SEQ ID NO: 572953 - RNA, 20 nt, Artificial Sequence
  Synthetic
uuuuugcauuuuuuguagag

SEQ ID NO: 572954 - RNA, 21 nt, Artificial Sequence
  Synthetic
cuuuuugcauuuuuuguagag

SEQ ID NO: 572955 - RNA, 22 nt, Artificial Sequence
  Synthetic
ucuuuuugcauuuuuuguagag

SEQ ID NO: 572956 - RNA, 23 nt, Artificial Sequence
  Synthetic
cucuuuuugcauuuuuuguagag

SEQ ID NO: 572957 - RNA, 24 nt, Artificial Sequence
  Synthetic
acucuuuuugcauuuuuuguagag

SEQ ID NO: 572958 - RNA, 18 nt, Artificial Sequence
  Synthetic
uuucauuuuuuuguagag

SEQ ID NO: 572959 - RNA, 19 nt, Artificial Sequence
  Synthetic
auuucauuuuuuuguagag

SEQ ID NO: 572960 - RNA, 20 nt, Artificial Sequence
  Synthetic
uauuucauuuuuuuguagag

SEQ ID NO: 572961 - RNA, 21 nt, Artificial Sequence
  Synthetic
uuauuucauuuuuuuguagag

SEQ ID NO: 572962 - RNA, 22 nt, Artificial Sequence
  Synthetic
uuuauuucauuuuuuuguagag

SEQ ID NO: 572963 - RNA, 23 nt, Artificial Sequence
  Synthetic
uuuuauuucauuuuuuuguagag

SEQ ID NO: 572964 - RNA, 24 nt, Artificial Sequence
  Synthetic
uuuuuauuucauuuuuuuguagag

SEQ ID NO: 572965 - RNA, 18 nt, Artificial Sequence
  Synthetic
aaaaucaaacaauuagag

SEQ ID NO: 572966 - RNA, 19 nt, Artificial Sequence
  Synthetic
aaaaaucaaacaauuagag

SEQ ID NO: 572967 - RNA, 20 nt, Artificial Sequence
  Synthetic
uaaaaaucaaacaauuagag

SEQ ID NO: 572968 - RNA, 21 nt, Artificial Sequence
  Synthetic
guaaaaaucaaacaauuagag

SEQ ID NO: 572969 - RNA, 22 nt, Artificial Sequence
  Synthetic
aguaaaaaucaaacaauuagag

SEQ ID NO: 572970 - RNA, 23 nt, Artificial Sequence
  Synthetic
aaguaaaaaucaaacaauuagag

SEQ ID NO: 572971 - RNA, 24 nt, Artificial Sequence
  Synthetic
aaaguaaaaaucaaacaauuagag

SEQ ID NO: 572972 - RNA, 18 nt, Artificial Sequence
  Synthetic
guugucuccucauuagag

SEQ ID NO: 572973 - RNA, 19 nt, Artificial Sequence
  Synthetic
gguugucuccucauuagag

SEQ ID NO: 572974 - RNA, 20 nt, Artificial Sequence
  Synthetic
agguugucuccucauuagag

SEQ ID NO: 572975 - RNA, 21 nt, Artificial Sequence
  Synthetic
aagguugucuccucauuagag

SEQ ID NO: 572976 - RNA, 22 nt, Artificial Sequence
  Synthetic
uaagguugucuccucauuagag

SEQ ID NO: 572977 - RNA, 23 nt, Artificial Sequence
  Synthetic
uuaagguugucuccucauuagag

SEQ ID NO: 572978 - RNA, 24 nt, Artificial Sequence
  Synthetic
uuuaagguugucuccucauuagag

SEQ ID NO: 572979 - RNA, 18 nt, Artificial Sequence
  Synthetic
ucacagagaagauuagag

SEQ ID NO: 572980 - RNA, 19 nt, Artificial Sequence
  Synthetic
uucacagagaagauuagag

SEQ ID NO: 572981 - RNA, 20 nt, Artificial Sequence
  Synthetic
auucacagagaagauuagag

SEQ ID NO: 572982 - RNA, 21 nt, Artificial Sequence
  Synthetic
aauucacagagaagauuagag

SEQ ID NO: 572983 - RNA, 22 nt, Artificial Sequence
  Synthetic
gaauucacagagaagauuagag

SEQ ID NO: 572984 - RNA, 23 nt, Artificial Sequence
  Synthetic
agaauucacagagaagauuagag

SEQ ID NO: 572985 - RNA, 24 nt, Artificial Sequence
  Synthetic
aagaauucacagagaagauuagag

SEQ ID NO: 572986 - RNA, 18 nt, Artificial Sequence
  Synthetic
aaucacagaauauuagag

SEQ ID NO: 572987 - RNA, 19 nt, Artificial Sequence
  Synthetic
aaaucacagaauauuagag

SEQ ID NO: 572988 - RNA, 20 nt, Artificial Sequence
  Synthetic
caaaucacagaauauuagag

SEQ ID NO: 572989 - RNA, 21 nt, Artificial Sequence
  Synthetic
ccaaaucacagaauauuagag

SEQ ID NO: 572990 - RNA, 22 nt, Artificial Sequence
  Synthetic
accaaaucacagaauauuagag

SEQ ID NO: 572991 - RNA, 23 nt, Artificial Sequence
  Synthetic
uaccaaaucacagaauauuagag

SEQ ID NO: 572992 - RNA, 24 nt, Artificial Sequence
  Synthetic
uuaccaaaucacagaauauuagag

SEQ ID NO: 572993 - RNA, 18 nt, Artificial Sequence
  Synthetic
ggugaauagauauuagag

SEQ ID NO: 572994 - RNA, 19 nt, Artificial Sequence
  Synthetic
aggugaauagauauuagag

SEQ ID NO: 572995 - RNA, 20 nt, Artificial Sequence
  Synthetic
gaggugaauagauauuagag

SEQ ID NO: 572996 - RNA, 21 nt, Artificial Sequence
  Synthetic
ggaggugaauagauauuagag

SEQ ID NO: 572997 - RNA, 22 nt, Artificial Sequence
  Synthetic
uggaggugaauagauauuagag

SEQ ID NO: 572998 - RNA, 23 nt, Artificial Sequence
  Synthetic
uuggaggugaauagauauuagag

SEQ ID NO: 572999 - RNA, 24 nt, Artificial Sequence
  Synthetic
guuggaggugaauagauauuagag

SEQ ID NO: 573000 - RNA, 18 nt, Artificial Sequence
  Synthetic
cacaucuuauuauuagag

SEQ ID NO: 573001 - RNA, 19 nt, Artificial Sequence
  Synthetic
ucacaucuuauuauuagag

SEQ ID NO: 573002 - RNA, 20 nt, Artificial Sequence
  Synthetic
uucacaucuuauuauuagag

SEQ ID NO: 573003 - RNA, 21 nt, Artificial Sequence
  Synthetic
guucacaucuuauuauuagag

SEQ ID NO: 573004 - RNA, 22 nt, Artificial Sequence
  Synthetic
aguucacaucuuauuauuagag

SEQ ID NO: 573005 - RNA, 23 nt, Artificial Sequence
  Synthetic
aaguucacaucuuauuauuagag

SEQ ID NO: 573006 - RNA, 24 nt, Artificial Sequence
  Synthetic
uaaguucacaucuuauuauuagag

SEQ ID NO: 573007 - RNA, 18 nt, Artificial Sequence
  Synthetic
uuuuuauuuuuauuagag

SEQ ID NO: 573008 - RNA, 19 nt, Artificial Sequence
  Synthetic
uuuuuuauuuuuauuagag

SEQ ID NO: 573009 - RNA, 20 nt, Artificial Sequence
  Synthetic
guuuuuuauuuuuauuagag

SEQ ID NO: 573010 - RNA, 21 nt, Artificial Sequence
  Synthetic
aguuuuuuauuuuuauuagag

SEQ ID NO: 573011 - RNA, 22 nt, Artificial Sequence
  Synthetic
aaguuuuuuauuuuuauuagag

SEQ ID NO: 573012 - RNA, 23 nt, Artificial Sequence
  Synthetic
uaaguuuuuuauuuuuauuagag

SEQ ID NO: 573013 - RNA, 24 nt, Artificial Sequence
  Synthetic
cuaaguuuuuuauuuuuauuagag

SEQ ID NO: 573014 - RNA, 18 nt, Artificial Sequence
  Synthetic
caagcauugaccuuagag

SEQ ID NO: 573015 - RNA, 19 nt, Artificial Sequence
  Synthetic
ccaagcauugaccuuagag

SEQ ID NO: 573016 - RNA, 20 nt, Artificial Sequence
  Synthetic
gccaagcauugaccuuagag

SEQ ID NO: 573017 - RNA, 21 nt, Artificial Sequence
  Synthetic
ugccaagcauugaccuuagag

SEQ ID NO: 573018 - RNA, 22 nt, Artificial Sequence
  Synthetic
augccaagcauugaccuuagag

SEQ ID NO: 573019 - RNA, 23 nt, Artificial Sequence
  Synthetic
uaugccaagcauugaccuuagag

SEQ ID NO: 573020 - RNA, 24 nt, Artificial Sequence
  Synthetic
auaugccaagcauugaccuuagag

SEQ ID NO: 573021 - RNA, 18 nt, Artificial Sequence
  Synthetic
uggguuucuggcuuagag

SEQ ID NO: 573022 - RNA, 19 nt, Artificial Sequence
  Synthetic
uuggguuucuggcuuagag

SEQ ID NO: 573023 - RNA, 20 nt, Artificial Sequence
  Synthetic
guuggguuucuggcuuagag

SEQ ID NO: 573024 - RNA, 21 nt, Artificial Sequence
  Synthetic
aguuggguuucuggcuuagag

SEQ ID NO: 573025 - RNA, 22 nt, Artificial Sequence
  Synthetic
aaguuggguuucuggcuuagag

SEQ ID NO: 573026 - RNA, 23 nt, Artificial Sequence
  Synthetic
caaguuggguuucuggcuuagag

SEQ ID NO: 573027 - RNA, 24 nt, Artificial Sequence
  Synthetic
gcaaguuggguuucuggcuuagag

SEQ ID NO: 573028 - RNA, 18 nt, Artificial Sequence
  Synthetic
aaaaaugcauauuuagag

SEQ ID NO: 573029 - RNA, 19 nt, Artificial Sequence
  Synthetic
aaaaaaugcauauuuagag

SEQ ID NO: 573030 - RNA, 20 nt, Artificial Sequence
  Synthetic
gaaaaaaugcauauuuagag

SEQ ID NO: 573031 - RNA, 21 nt, Artificial Sequence
  Synthetic
agaaaaaaugcauauuuagag

SEQ ID NO: 573032 - RNA, 22 nt, Artificial Sequence
  Synthetic
gagaaaaaaugcauauuuagag

SEQ ID NO: 573033 - RNA, 23 nt, Artificial Sequence
  Synthetic
agagaaaaaaugcauauuuagag

SEQ ID NO: 573034 - RNA, 24 nt, Artificial Sequence
  Synthetic
uagagaaaaaaugcauauuuagag

SEQ ID NO: 573035 - RNA, 18 nt, Artificial Sequence
  Synthetic
acugugcuguauuuagag

SEQ ID NO: 573036 - RNA, 19 nt, Artificial Sequence
  Synthetic
cacugugcuguauuuagag

SEQ ID NO: 573037 - RNA, 20 nt, Artificial Sequence
  Synthetic
ccacugugcuguauuuagag

SEQ ID NO: 573038 - RNA, 21 nt, Artificial Sequence
  Synthetic
uccacugugcuguauuuagag

SEQ ID NO: 573039 - RNA, 22 nt, Artificial Sequence
  Synthetic
uuccacugugcuguauuuagag

SEQ ID NO: 573040 - RNA, 23 nt, Artificial Sequence
  Synthetic
cuuccacugugcuguauuuagag

SEQ ID NO: 573041 - RNA, 24 nt, Artificial Sequence
  Synthetic
acuuccacugugcuguauuuagag

SEQ ID NO: 573042 - RNA, 18 nt, Artificial Sequence
  Synthetic
uguaauuauacuuuagag

SEQ ID NO: 573043 - RNA, 19 nt, Artificial Sequence
  Synthetic
uuguaauuauacuuuagag

SEQ ID NO: 573044 - RNA, 20 nt, Artificial Sequence
  Synthetic
uuuguaauuauacuuuagag

SEQ ID NO: 573045 - RNA, 21 nt, Artificial Sequence
  Synthetic
auuuguaauuauacuuuagag

SEQ ID NO: 573046 - RNA, 22 nt, Artificial Sequence
  Synthetic
aauuuguaauuauacuuuagag

SEQ ID NO: 573047 - RNA, 23 nt, Artificial Sequence
  Synthetic
caauuuguaauuauacuuuagag

SEQ ID NO: 573048 - RNA, 24 nt, Artificial Sequence
  Synthetic
ccaauuuguaauuauacuuuagag

SEQ ID NO: 573049 - RNA, 18 nt, Artificial Sequence
  Synthetic
agauggaaguguuuagag

SEQ ID NO: 573050 - RNA, 19 nt, Artificial Sequence
  Synthetic
uagauggaaguguuuagag

SEQ ID NO: 573051 - RNA, 20 nt, Artificial Sequence
  Synthetic
guagauggaaguguuuagag

SEQ ID NO: 573052 - RNA, 21 nt, Artificial Sequence
  Synthetic
aguagauggaaguguuuagag

SEQ ID NO: 573053 - RNA, 22 nt, Artificial Sequence
  Synthetic
gaguagauggaaguguuuagag

SEQ ID NO: 573054 - RNA, 23 nt, Artificial Sequence
  Synthetic
agaguagauggaaguguuuagag

SEQ ID NO: 573055 - RNA, 24 nt, Artificial Sequence
  Synthetic
cagaguagauggaaguguuuagag

SEQ ID NO: 573056 - RNA, 18 nt, Artificial Sequence
  Synthetic
uauauuuccauuuuagag

SEQ ID NO: 573057 - RNA, 19 nt, Artificial Sequence
  Synthetic
uuauauuuccauuuuagag

SEQ ID NO: 573058 - RNA, 20 nt, Artificial Sequence
  Synthetic
uuuauauuuccauuuuagag

SEQ ID NO: 573059 - RNA, 21 nt, Artificial Sequence
  Synthetic
auuuauauuuccauuuuagag

SEQ ID NO: 573060 - RNA, 22 nt, Artificial Sequence
  Synthetic
cauuuauauuuccauuuuagag

SEQ ID NO: 573061 - RNA, 23 nt, Artificial Sequence
  Synthetic
ucauuuauauuuccauuuuagag

SEQ ID NO: 573062 - RNA, 24 nt, Artificial Sequence
  Synthetic
cucauuuauauuuccauuuuagag

SEQ ID NO: 573063 - RNA, 18 nt, Artificial Sequence
  Synthetic
acuauuauuauuuuagag

SEQ ID NO: 573064 - RNA, 19 nt, Artificial Sequence
  Synthetic
uacuauuauuauuuuagag

SEQ ID NO: 573065 - RNA, 20 nt, Artificial Sequence
  Synthetic
uuacuauuauuauuuuagag

SEQ ID NO: 573066 - RNA, 21 nt, Artificial Sequence
  Synthetic
auuacuauuauuauuuuagag

SEQ ID NO: 573067 - RNA, 22 nt, Artificial Sequence
  Synthetic
cauuacuauuauuauuuuagag

SEQ ID NO: 573068 - RNA, 23 nt, Artificial Sequence
  Synthetic
ucauuacuauuauuauuuuagag

SEQ ID NO: 573069 - RNA, 24 nt, Artificial Sequence
  Synthetic
aucauuacuauuauuauuuuagag

SEQ ID NO: 573070 - RNA, 18 nt, Artificial Sequence
  Synthetic
agauaggcaguuuuagag

SEQ ID NO: 573071 - RNA, 19 nt, Artificial Sequence
  Synthetic
cagauaggcaguuuuagag

SEQ ID NO: 573072 - RNA, 20 nt, Artificial Sequence
  Synthetic
ucagauaggcaguuuuagag

SEQ ID NO: 573073 - RNA, 21 nt, Artificial Sequence
  Synthetic
gucagauaggcaguuuuagag

SEQ ID NO: 573074 - RNA, 22 nt, Artificial Sequence
  Synthetic
agucagauaggcaguuuuagag

SEQ ID NO: 573075 - RNA, 23 nt, Artificial Sequence
  Synthetic
cagucagauaggcaguuuuagag

SEQ ID NO: 573076 - RNA, 24 nt, Artificial Sequence
  Synthetic
acagucagauaggcaguuuuagag

SEQ ID NO: 573077 - RNA, 18 nt, Artificial Sequence
  Synthetic
cuguguuccuuuuuagag

SEQ ID NO: 573078 - RNA, 19 nt, Artificial Sequence
  Synthetic
ccuguguuccuuuuuagag

SEQ ID NO: 573079 - RNA, 20 nt, Artificial Sequence
  Synthetic
gccuguguuccuuuuuagag

SEQ ID NO: 573080 - RNA, 21 nt, Artificial Sequence
  Synthetic
agccuguguuccuuuuuagag

SEQ ID NO: 573081 - RNA, 22 nt, Artificial Sequence
  Synthetic
uagccuguguuccuuuuuagag

SEQ ID NO: 573082 - RNA, 23 nt, Artificial Sequence
  Synthetic
cuagccuguguuccuuuuuagag

SEQ ID NO: 573083 - RNA, 24 nt, Artificial Sequence
  Synthetic
gcuagccuguguuccuuuuuagag

SEQ ID NO: 573084 - RNA, 18 nt, Artificial Sequence
  Synthetic
agugugcaagcaaacgag

SEQ ID NO: 573085 - RNA, 19 nt, Artificial Sequence
  Synthetic
gagugugcaagcaaacgag

SEQ ID NO: 573086 - RNA, 20 nt, Artificial Sequence
  Synthetic
ggagugugcaagcaaacgag

SEQ ID NO: 573087 - RNA, 21 nt, Artificial Sequence
  Synthetic
gggagugugcaagcaaacgag

SEQ ID NO: 573088 - RNA, 22 nt, Artificial Sequence
  Synthetic
agggagugugcaagcaaacgag

SEQ ID NO: 573089 - RNA, 23 nt, Artificial Sequence
  Synthetic
gagggagugugcaagcaaacgag

SEQ ID NO: 573090 - RNA, 24 nt, Artificial Sequence
  Synthetic
ggagggagugugcaagcaaacgag

SEQ ID NO: 573091 - RNA, 18 nt, Artificial Sequence
  Synthetic
aguucacuuauaaacgag

SEQ ID NO: 573092 - RNA, 19 nt, Artificial Sequence
  Synthetic
uaguucacuuauaaacgag

SEQ ID NO: 573093 - RNA, 20 nt, Artificial Sequence
  Synthetic
auaguucacuuauaaacgag

SEQ ID NO: 573094 - RNA, 21 nt, Artificial Sequence
  Synthetic
aauaguucacuuauaaacgag

SEQ ID NO: 573095 - RNA, 22 nt, Artificial Sequence
  Synthetic
uaauaguucacuuauaaacgag

SEQ ID NO: 573096 - RNA, 23 nt, Artificial Sequence
  Synthetic
auaauaguucacuuauaaacgag

SEQ ID NO: 573097 - RNA, 24 nt, Artificial Sequence
  Synthetic
aauaauaguucacuuauaaacgag

SEQ ID NO: 573098 - RNA, 18 nt, Artificial Sequence
  Synthetic
gagacauauuccaacgag

SEQ ID NO: 573099 - RNA, 19 nt, Artificial Sequence
  Synthetic
agagacauauuccaacgag

SEQ ID NO: 573100 - RNA, 20 nt, Artificial Sequence
  Synthetic
aagagacauauuccaacgag

SEQ ID NO: 573101 - RNA, 21 nt, Artificial Sequence
  Synthetic
gaagagacauauuccaacgag

SEQ ID NO: 573102 - RNA, 22 nt, Artificial Sequence
  Synthetic
ugaagagacauauuccaacgag

SEQ ID NO: 573103 - RNA, 23 nt, Artificial Sequence
  Synthetic
uugaagagacauauuccaacgag

SEQ ID NO: 573104 - RNA, 24 nt, Artificial Sequence
  Synthetic
auugaagagacauauuccaacgag

SEQ ID NO: 573105 - RNA, 18 nt, Artificial Sequence
  Synthetic
gggauacuugagaacgag

SEQ ID NO: 573106 - RNA, 19 nt, Artificial Sequence
  Synthetic
cgggauacuugagaacgag

SEQ ID NO: 573107 - RNA, 20 nt, Artificial Sequence
  Synthetic
gcgggauacuugagaacgag

SEQ ID NO: 573108 - RNA, 21 nt, Artificial Sequence
  Synthetic
ugcgggauacuugagaacgag

SEQ ID NO: 573109 - RNA, 22 nt, Artificial Sequence
  Synthetic
cugcgggauacuugagaacgag

SEQ ID NO: 573110 - RNA, 23 nt, Artificial Sequence
  Synthetic
acugcgggauacuugagaacgag

SEQ ID NO: 573111 - RNA, 24 nt, Artificial Sequence
  Synthetic
gacugcgggauacuugagaacgag

SEQ ID NO: 573112 - RNA, 18 nt, Artificial Sequence
  Synthetic
aucuccuccuuucacgag

SEQ ID NO: 573113 - RNA, 19 nt, Artificial Sequence
  Synthetic
caucuccuccuuucacgag

SEQ ID NO: 573114 - RNA, 20 nt, Artificial Sequence
  Synthetic
gcaucuccuccuuucacgag

SEQ ID NO: 573115 - RNA, 21 nt, Artificial Sequence
  Synthetic
ggcaucuccuccuuucacgag

SEQ ID NO: 573116 - RNA, 22 nt, Artificial Sequence
  Synthetic
uggcaucuccuccuuucacgag

SEQ ID NO: 573117 - RNA, 23 nt, Artificial Sequence
  Synthetic
guggcaucuccuccuuucacgag

SEQ ID NO: 573118 - RNA, 24 nt, Artificial Sequence
  Synthetic
uguggcaucuccuccuuucacgag

SEQ ID NO: 573119 - RNA, 18 nt, Artificial Sequence
  Synthetic
aaaggcaacagagacgag

SEQ ID NO: 573120 - RNA, 19 nt, Artificial Sequence
  Synthetic
gaaaggcaacagagacgag

SEQ ID NO: 573121 - RNA, 20 nt, Artificial Sequence
  Synthetic
agaaaggcaacagagacgag

SEQ ID NO: 573122 - RNA, 21 nt, Artificial Sequence
  Synthetic
gagaaaggcaacagagacgag

SEQ ID NO: 573123 - RNA, 22 nt, Artificial Sequence
  Synthetic
ggagaaaggcaacagagacgag

SEQ ID NO: 573124 - RNA, 23 nt, Artificial Sequence
  Synthetic
gggagaaaggcaacagagacgag

SEQ ID NO: 573125 - RNA, 24 nt, Artificial Sequence
  Synthetic
ggggagaaaggcaacagagacgag

SEQ ID NO: 573126 - RNA, 18 nt, Artificial Sequence
  Synthetic
aaacagaacuuauacgag

SEQ ID NO: 573127 - RNA, 19 nt, Artificial Sequence
  Synthetic
uaaacagaacuuauacgag

SEQ ID NO: 573128 - RNA, 20 nt, Artificial Sequence
  Synthetic
cuaaacagaacuuauacgag

SEQ ID NO: 573129 - RNA, 21 nt, Artificial Sequence
  Synthetic
acuaaacagaacuuauacgag

SEQ ID NO: 573130 - RNA, 22 nt, Artificial Sequence
  Synthetic
uacuaaacagaacuuauacgag

SEQ ID NO: 573131 - RNA, 23 nt, Artificial Sequence
  Synthetic
auacuaaacagaacuuauacgag

SEQ ID NO: 573132 - RNA, 24 nt, Artificial Sequence
  Synthetic
gauacuaaacagaacuuauacgag

SEQ ID NO: 573133 - RNA, 18 nt, Artificial Sequence
  Synthetic
uaucagaacuccuacgag

SEQ ID NO: 573134 - RNA, 19 nt, Artificial Sequence
  Synthetic
uuaucagaacuccuacgag

SEQ ID NO: 573135 - RNA, 20 nt, Artificial Sequence
  Synthetic
cuuaucagaacuccuacgag

SEQ ID NO: 573136 - RNA, 21 nt, Artificial Sequence
  Synthetic
ccuuaucagaacuccuacgag

SEQ ID NO: 573137 - RNA, 22 nt, Artificial Sequence
  Synthetic
accuuaucagaacuccuacgag

SEQ ID NO: 573138 - RNA, 23 nt, Artificial Sequence
  Synthetic
uaccuuaucagaacuccuacgag

SEQ ID NO: 573139 - RNA, 24 nt, Artificial Sequence
  Synthetic
cuaccuuaucagaacuccuacgag

SEQ ID NO: 573140 - RNA, 18 nt, Artificial Sequence
  Synthetic
ccucuugcgaaacccgag

SEQ ID NO: 573141 - RNA, 19 nt, Artificial Sequence
  Synthetic
uccucuugcgaaacccgag

SEQ ID NO: 573142 - RNA, 20 nt, Artificial Sequence
  Synthetic
auccucuugcgaaacccgag

SEQ ID NO: 573143 - RNA, 21 nt, Artificial Sequence
  Synthetic
cauccucuugcgaaacccgag

SEQ ID NO: 573144 - RNA, 22 nt, Artificial Sequence
  Synthetic
ucauccucuugcgaaacccgag

SEQ ID NO: 573145 - RNA, 23 nt, Artificial Sequence
  Synthetic
uucauccucuugcgaaacccgag

SEQ ID NO: 573146 - RNA, 24 nt, Artificial Sequence
  Synthetic
uuucauccucuugcgaaacccgag

SEQ ID NO: 573147 - RNA, 18 nt, Artificial Sequence
  Synthetic
acccacuauguccccgag

SEQ ID NO: 573148 - RNA, 19 nt, Artificial Sequence
  Synthetic
uacccacuauguccccgag

SEQ ID NO: 573149 - RNA, 20 nt, Artificial Sequence
  Synthetic
uuacccacuauguccccgag

SEQ ID NO: 573150 - RNA, 21 nt, Artificial Sequence
  Synthetic
guuacccacuauguccccgag

SEQ ID NO: 573151 - RNA, 22 nt, Artificial Sequence
  Synthetic
aguuacccacuauguccccgag

SEQ ID NO: 573152 - RNA, 23 nt, Artificial Sequence
  Synthetic
aaguuacccacuauguccccgag

SEQ ID NO: 573153 - RNA, 24 nt, Artificial Sequence
  Synthetic
aaaguuacccacuauguccccgag

SEQ ID NO: 573154 - RNA, 18 nt, Artificial Sequence
  Synthetic
gcacuuuggaaggccgag

SEQ ID NO: 573155 - RNA, 19 nt, Artificial Sequence
  Synthetic
agcacuuuggaaggccgag

SEQ ID NO: 573156 - RNA, 20 nt, Artificial Sequence
  Synthetic
cagcacuuuggaaggccgag

SEQ ID NO: 573157 - RNA, 21 nt, Artificial Sequence
  Synthetic
ccagcacuuuggaaggccgag

SEQ ID NO: 573158 - RNA, 22 nt, Artificial Sequence
  Synthetic
cccagcacuuuggaaggccgag

SEQ ID NO: 573159 - RNA, 23 nt, Artificial Sequence
  Synthetic
ucccagcacuuuggaaggccgag

SEQ ID NO: 573160 - RNA, 24 nt, Artificial Sequence
  Synthetic
aucccagcacuuuggaaggccgag

SEQ ID NO: 573161 - RNA, 18 nt, Artificial Sequence
  Synthetic
cacuuuggggaggccgag

SEQ ID NO: 573162 - RNA, 19 nt, Artificial Sequence
  Synthetic
gcacuuuggggaggccgag

SEQ ID NO: 573163 - RNA, 20 nt, Artificial Sequence
  Synthetic
agcacuuuggggaggccgag

SEQ ID NO: 573164 - RNA, 21 nt, Artificial Sequence
  Synthetic
cagcacuuuggggaggccgag

SEQ ID NO: 573165 - RNA, 22 nt, Artificial Sequence
  Synthetic
ccagcacuuuggggaggccgag

SEQ ID NO: 573166 - RNA, 23 nt, Artificial Sequence
  Synthetic
cccagcacuuuggggaggccgag

SEQ ID NO: 573167 - RNA, 24 nt, Artificial Sequence
  Synthetic
ucccagcacuuuggggaggccgag

SEQ ID NO: 573168 - RNA, 21 nt, Artificial Sequence
  Synthetic
ccagcacucugggaggccgag

SEQ ID NO: 573169 - RNA, 22 nt, Artificial Sequence
  Synthetic
cccagcacucugggaggccgag

SEQ ID NO: 573170 - RNA, 23 nt, Artificial Sequence
  Synthetic
ucccagcacucugggaggccgag

SEQ ID NO: 573171 - RNA, 24 nt, Artificial Sequence
  Synthetic
aucccagcacucugggaggccgag

SEQ ID NO: 573172 - RNA, 18 nt, Artificial Sequence
  Synthetic
gcaauuugggaggccgag

SEQ ID NO: 573173 - RNA, 19 nt, Artificial Sequence
  Synthetic
agcaauuugggaggccgag

SEQ ID NO: 573174 - RNA, 20 nt, Artificial Sequence
  Synthetic
cagcaauuugggaggccgag

SEQ ID NO: 573175 - RNA, 21 nt, Artificial Sequence
  Synthetic
ucagcaauuugggaggccgag

SEQ ID NO: 573176 - RNA, 22 nt, Artificial Sequence
  Synthetic
aucagcaauuugggaggccgag

SEQ ID NO: 573177 - RNA, 23 nt, Artificial Sequence
  Synthetic
uaucagcaauuugggaggccgag

SEQ ID NO: 573178 - RNA, 24 nt, Artificial Sequence
  Synthetic
auaucagcaauuugggaggccgag

SEQ ID NO: 573179 - RNA, 21 nt, Artificial Sequence
  Synthetic
ucagcacuuugggaggccgag

SEQ ID NO: 573180 - RNA, 22 nt, Artificial Sequence
  Synthetic
cucagcacuuugggaggccgag

SEQ ID NO: 573181 - RNA, 23 nt, Artificial Sequence
  Synthetic
ucucagcacuuugggaggccgag

SEQ ID NO: 573182 - RNA, 24 nt, Artificial Sequence
  Synthetic
aucucagcacuuugggaggccgag

SEQ ID NO: 573183 - RNA, 18 nt, Artificial Sequence
  Synthetic
ugaaugaaaugaagcgag

SEQ ID NO: 573184 - RNA, 19 nt, Artificial Sequence
  Synthetic
augaaugaaaugaagcgag

SEQ ID NO: 573185 - RNA, 20 nt, Artificial Sequence
  Synthetic
aaugaaugaaaugaagcgag

SEQ ID NO: 573186 - RNA, 21 nt, Artificial Sequence
  Synthetic
aaaugaaugaaaugaagcgag

SEQ ID NO: 573187 - RNA, 22 nt, Artificial Sequence
  Synthetic
gaaaugaaugaaaugaagcgag

SEQ ID NO: 573188 - RNA, 23 nt, Artificial Sequence
  Synthetic
ugaaaugaaugaaaugaagcgag

SEQ ID NO: 573189 - RNA, 24 nt, Artificial Sequence
  Synthetic
augaaaugaaugaaaugaagcgag

SEQ ID NO: 573190 - RNA, 18 nt, Artificial Sequence
  Synthetic
cccaggagguucagcgag

SEQ ID NO: 573191 - RNA, 19 nt, Artificial Sequence
  Synthetic
acccaggagguucagcgag

SEQ ID NO: 573192 - RNA, 20 nt, Artificial Sequence
  Synthetic
aacccaggagguucagcgag

SEQ ID NO: 573193 - RNA, 21 nt, Artificial Sequence
  Synthetic
gaacccaggagguucagcgag

SEQ ID NO: 573194 - RNA, 22 nt, Artificial Sequence
  Synthetic
ugaacccaggagguucagcgag

SEQ ID NO: 573195 - RNA, 23 nt, Artificial Sequence
  Synthetic
uugaacccaggagguucagcgag

SEQ ID NO: 573196 - RNA, 24 nt, Artificial Sequence
  Synthetic
cuugaacccaggagguucagcgag

SEQ ID NO: 573197 - RNA, 18 nt, Artificial Sequence
  Synthetic
aauucuuaucuaugcgag

SEQ ID NO: 573198 - RNA, 19 nt, Artificial Sequence
  Synthetic
uaauucuuaucuaugcgag

SEQ ID NO: 573199 - RNA, 20 nt, Artificial Sequence
  Synthetic
uuaauucuuaucuaugcgag

SEQ ID NO: 573200 - RNA, 21 nt, Artificial Sequence
  Synthetic
guuaauucuuaucuaugcgag

SEQ ID NO: 573201 - RNA, 22 nt, Artificial Sequence
  Synthetic
uguuaauucuuaucuaugcgag

SEQ ID NO: 573202 - RNA, 23 nt, Artificial Sequence
  Synthetic
cuguuaauucuuaucuaugcgag

SEQ ID NO: 573203 - RNA, 24 nt, Artificial Sequence
  Synthetic
gcuguuaauucuuaucuaugcgag

SEQ ID NO: 573204 - RNA, 18 nt, Artificial Sequence
  Synthetic
gcccaugggcuuugcgag

SEQ ID NO: 573205 - RNA, 19 nt, Artificial Sequence
  Synthetic
agcccaugggcuuugcgag

SEQ ID NO: 573206 - RNA, 20 nt, Artificial Sequence
  Synthetic
cagcccaugggcuuugcgag

SEQ ID NO: 573207 - RNA, 21 nt, Artificial Sequence
  Synthetic
ccagcccaugggcuuugcgag

SEQ ID NO: 573208 - RNA, 22 nt, Artificial Sequence
  Synthetic
uccagcccaugggcuuugcgag

SEQ ID NO: 573209 - RNA, 23 nt, Artificial Sequence
  Synthetic
guccagcccaugggcuuugcgag

SEQ ID NO: 573210 - RNA, 24 nt, Artificial Sequence
  Synthetic
uguccagcccaugggcuuugcgag

SEQ ID NO: 573211 - RNA, 18 nt, Artificial Sequence
  Synthetic
uuuuuuuuuuuuugcgag

SEQ ID NO: 573212 - RNA, 19 nt, Artificial Sequence
  Synthetic
uuuuuuuuuuuuuugcgag

SEQ ID NO: 573213 - RNA, 20 nt, Artificial Sequence
  Synthetic
uuuuuuuuuuuuuuugcgag

SEQ ID NO: 573214 - RNA, 21 nt, Artificial Sequence
  Synthetic
uuuuuuuuuuuuuuuugcgag

SEQ ID NO: 573215 - RNA, 22 nt, Artificial Sequence
  Synthetic
uuuuuuuuuuuuuuuuugcgag

SEQ ID NO: 573216 - RNA, 23 nt, Artificial Sequence
  Synthetic
uuuuuuuuuuuuuuuuuugcgag

SEQ ID NO: 573217 - RNA, 24 nt, Artificial Sequence
  Synthetic
cuuuuuuuuuuuuuuuuuugcgag

SEQ ID NO: 573218 - RNA, 18 nt, Artificial Sequence
  Synthetic
auuuauagcaaaaucgag

SEQ ID NO: 573219 - RNA, 19 nt, Artificial Sequence
  Synthetic
cauuuauagcaaaaucgag

SEQ ID NO: 573220 - RNA, 20 nt, Artificial Sequence
  Synthetic
acauuuauagcaaaaucgag

SEQ ID NO: 573221 - RNA, 21 nt, Artificial Sequence
  Synthetic
uacauuuauagcaaaaucgag

SEQ ID NO: 573222 - RNA, 22 nt, Artificial Sequence
  Synthetic
uuacauuuauagcaaaaucgag

SEQ ID NO: 573223 - RNA, 23 nt, Artificial Sequence
  Synthetic
uuuacauuuauagcaaaaucgag

SEQ ID NO: 573224 - RNA, 24 nt, Artificial Sequence
  Synthetic
uuuuacauuuauagcaaaaucgag

SEQ ID NO: 573225 - RNA, 18 nt, Artificial Sequence
  Synthetic
aucacuuucauacucgag

SEQ ID NO: 573226 - RNA, 19 nt, Artificial Sequence
  Synthetic
caucacuuucauacucgag

SEQ ID NO: 573227 - RNA, 20 nt, Artificial Sequence
  Synthetic
ucaucacuuucauacucgag

SEQ ID NO: 573228 - RNA, 21 nt, Artificial Sequence
  Synthetic
aucaucacuuucauacucgag

SEQ ID NO: 573229 - RNA, 22 nt, Artificial Sequence
  Synthetic
gaucaucacuuucauacucgag

SEQ ID NO: 573230 - RNA, 23 nt, Artificial Sequence
  Synthetic
ugaucaucacuuucauacucgag

SEQ ID NO: 573231 - RNA, 24 nt, Artificial Sequence
  Synthetic
uugaucaucacuuucauacucgag

SEQ ID NO: 573232 - RNA, 18 nt, Artificial Sequence
  Synthetic
acaaagauacuccucgag

SEQ ID NO: 573233 - RNA, 19 nt, Artificial Sequence
  Synthetic
cacaaagauacuccucgag

SEQ ID NO: 573234 - RNA, 20 nt, Artificial Sequence
  Synthetic
ccacaaagauacuccucgag

SEQ ID NO: 573235 - RNA, 21 nt, Artificial Sequence
  Synthetic
gccacaaagauacuccucgag

SEQ ID NO: 573236 - RNA, 22 nt, Artificial Sequence
  Synthetic
cgccacaaagauacuccucgag

SEQ ID NO: 573237 - RNA, 23 nt, Artificial Sequence
  Synthetic
acgccacaaagauacuccucgag

SEQ ID NO: 573238 - RNA, 24 nt, Artificial Sequence
  Synthetic
aacgccacaaagauacuccucgag

SEQ ID NO: 573239 - RNA, 18 nt, Artificial Sequence
  Synthetic
uggacuuucugggucgag

SEQ ID NO: 573240 - RNA, 19 nt, Artificial Sequence
  Synthetic
cuggacuuucugggucgag

SEQ ID NO: 573241 - RNA, 20 nt, Artificial Sequence
  Synthetic
gcuggacuuucugggucgag

SEQ ID NO: 573242 - RNA, 21 nt, Artificial Sequence
  Synthetic
agcuggacuuucugggucgag

SEQ ID NO: 573243 - RNA, 22 nt, Artificial Sequence
  Synthetic
cagcuggacuuucugggucgag

SEQ ID NO: 573244 - RNA, 23 nt, Artificial Sequence
  Synthetic
ccagcuggacuuucugggucgag

SEQ ID NO: 573245 - RNA, 24 nt, Artificial Sequence
  Synthetic
gccagcuggacuuucugggucgag

SEQ ID NO: 573246 - RNA, 18 nt, Artificial Sequence
  Synthetic
aaaaaggcaacauucgag

SEQ ID NO: 573247 - RNA, 19 nt, Artificial Sequence
  Synthetic
gaaaaaggcaacauucgag

SEQ ID NO: 573248 - RNA, 20 nt, Artificial Sequence
  Synthetic
agaaaaaggcaacauucgag

SEQ ID NO: 573249 - RNA, 21 nt, Artificial Sequence
  Synthetic
uagaaaaaggcaacauucgag

SEQ ID NO: 573250 - RNA, 22 nt, Artificial Sequence
  Synthetic
uuagaaaaaggcaacauucgag

SEQ ID NO: 573251 - RNA, 23 nt, Artificial Sequence
  Synthetic
uuuagaaaaaggcaacauucgag

SEQ ID NO: 573252 - RNA, 24 nt, Artificial Sequence
  Synthetic
guuuagaaaaaggcaacauucgag

SEQ ID NO: 573253 - RNA, 18 nt, Artificial Sequence
  Synthetic
ccugguaaugcuuucgag

SEQ ID NO: 573254 - RNA, 19 nt, Artificial Sequence
  Synthetic
gccugguaaugcuuucgag

SEQ ID NO: 573255 - RNA, 20 nt, Artificial Sequence
  Synthetic
ggccugguaaugcuuucgag

SEQ ID NO: 573256 - RNA, 21 nt, Artificial Sequence
  Synthetic
aggccugguaaugcuuucgag

SEQ ID NO: 573257 - RNA, 22 nt, Artificial Sequence
  Synthetic
aaggccugguaaugcuuucgag

SEQ ID NO: 573258 - RNA, 23 nt, Artificial Sequence
  Synthetic
caaggccugguaaugcuuucgag

SEQ ID NO: 573259 - RNA, 24 nt, Artificial Sequence
  Synthetic
gcaaggccugguaaugcuuucgag

SEQ ID NO: 573260 - RNA, 18 nt, Artificial Sequence
  Synthetic
cuucucugcacaaaggag

SEQ ID NO: 573261 - RNA, 19 nt, Artificial Sequence
  Synthetic
ccuucucugcacaaaggag

SEQ ID NO: 573262 - RNA, 20 nt, Artificial Sequence
  Synthetic
uccuucucugcacaaaggag

SEQ ID NO: 573263 - RNA, 21 nt, Artificial Sequence
  Synthetic
auccuucucugcacaaaggag

SEQ ID NO: 573264 - RNA, 22 nt, Artificial Sequence
  Synthetic
uauccuucucugcacaaaggag

SEQ ID NO: 573265 - RNA, 23 nt, Artificial Sequence
  Synthetic
cuauccuucucugcacaaaggag

SEQ ID NO: 573266 - RNA, 24 nt, Artificial Sequence
  Synthetic
ccuauccuucucugcacaaaggag

SEQ ID NO: 573267 - RNA, 18 nt, Artificial Sequence
  Synthetic
ccugcaacgccaaaggag

SEQ ID NO: 573268 - RNA, 19 nt, Artificial Sequence
  Synthetic
cccugcaacgccaaaggag

SEQ ID NO: 573269 - RNA, 20 nt, Artificial Sequence
  Synthetic
acccugcaacgccaaaggag

SEQ ID NO: 573270 - RNA, 21 nt, Artificial Sequence
  Synthetic
uacccugcaacgccaaaggag

SEQ ID NO: 573271 - RNA, 22 nt, Artificial Sequence
  Synthetic
guacccugcaacgccaaaggag

SEQ ID NO: 573272 - RNA, 23 nt, Artificial Sequence
  Synthetic
uguacccugcaacgccaaaggag

SEQ ID NO: 573273 - RNA, 24 nt, Artificial Sequence
  Synthetic
cuguacccugcaacgccaaaggag

SEQ ID NO: 573274 - RNA, 18 nt, Artificial Sequence
  Synthetic
ucuugguugccaaaggag

SEQ ID NO: 573275 - RNA, 19 nt, Artificial Sequence
  Synthetic
gucuugguugccaaaggag

SEQ ID NO: 573276 - RNA, 20 nt, Artificial Sequence
  Synthetic
ugucuugguugccaaaggag

SEQ ID NO: 573277 - RNA, 21 nt, Artificial Sequence
  Synthetic
gugucuugguugccaaaggag

SEQ ID NO: 573278 - RNA, 22 nt, Artificial Sequence
  Synthetic
agugucuugguugccaaaggag

SEQ ID NO: 573279 - RNA, 23 nt, Artificial Sequence
  Synthetic
cagugucuugguugccaaaggag

SEQ ID NO: 573280 - RNA, 24 nt, Artificial Sequence
  Synthetic
ucagugucuugguugccaaaggag

SEQ ID NO: 573281 - RNA, 18 nt, Artificial Sequence
  Synthetic
uauauauacagaaaggag

SEQ ID NO: 573282 - RNA, 19 nt, Artificial Sequence
  Synthetic
auauauauacagaaaggag

SEQ ID NO: 573283 - RNA, 20 nt, Artificial Sequence
  Synthetic
aauauauauacagaaaggag

SEQ ID NO: 573284 - RNA, 21 nt, Artificial Sequence
  Synthetic
uaauauauauacagaaaggag

SEQ ID NO: 573285 - RNA, 22 nt, Artificial Sequence
  Synthetic
uuaauauauauacagaaaggag

SEQ ID NO: 573286 - RNA, 23 nt, Artificial Sequence
  Synthetic
guuaauauauauacagaaaggag

SEQ ID NO: 573287 - RNA, 24 nt, Artificial Sequence
  Synthetic
uguuaauauauauacagaaaggag

SEQ ID NO: 573288 - RNA, 18 nt, Artificial Sequence
  Synthetic
uagggaacaggaaaggag

SEQ ID NO: 573289 - RNA, 19 nt, Artificial Sequence
  Synthetic
guagggaacaggaaaggag

SEQ ID NO: 573290 - RNA, 20 nt, Artificial Sequence
  Synthetic
uguagggaacaggaaaggag

SEQ ID NO: 573291 - RNA, 21 nt, Artificial Sequence
  Synthetic
cuguagggaacaggaaaggag

SEQ ID NO: 573292 - RNA, 22 nt, Artificial Sequence
  Synthetic
acuguagggaacaggaaaggag

SEQ ID NO: 573293 - RNA, 23 nt, Artificial Sequence
  Synthetic
cacuguagggaacaggaaaggag

SEQ ID NO: 573294 - RNA, 24 nt, Artificial Sequence
  Synthetic
acacuguagggaacaggaaaggag

SEQ ID NO: 573295 - RNA, 18 nt, Artificial Sequence
  Synthetic
ggucauuguggaaaggag

SEQ ID NO: 573296 - RNA, 19 nt, Artificial Sequence
  Synthetic
uggucauuguggaaaggag

SEQ ID NO: 573297 - RNA, 20 nt, Artificial Sequence
  Synthetic
guggucauuguggaaaggag

SEQ ID NO: 573298 - RNA, 21 nt, Artificial Sequence
  Synthetic
uguggucauuguggaaaggag

SEQ ID NO: 573299 - RNA, 22 nt, Artificial Sequence
  Synthetic
uuguggucauuguggaaaggag

SEQ ID NO: 573300 - RNA, 23 nt, Artificial Sequence
  Synthetic
cuuguggucauuguggaaaggag

SEQ ID NO: 573301 - RNA, 24 nt, Artificial Sequence
  Synthetic
acuuguggucauuguggaaaggag

SEQ ID NO: 573302 - RNA, 18 nt, Artificial Sequence
  Synthetic
caauccaauguaaaggag

SEQ ID NO: 573303 - RNA, 19 nt, Artificial Sequence
  Synthetic
gcaauccaauguaaaggag

SEQ ID NO: 573304 - RNA, 20 nt, Artificial Sequence
  Synthetic
ggcaauccaauguaaaggag

SEQ ID NO: 573305 - RNA, 21 nt, Artificial Sequence
  Synthetic
uggcaauccaauguaaaggag

SEQ ID NO: 573306 - RNA, 22 nt, Artificial Sequence
  Synthetic
auggcaauccaauguaaaggag

SEQ ID NO: 573307 - RNA, 23 nt, Artificial Sequence
  Synthetic
aauggcaauccaauguaaaggag

SEQ ID NO: 573308 - RNA, 24 nt, Artificial Sequence
  Synthetic
uaauggcaauccaauguaaaggag

SEQ ID NO: 573309 - RNA, 18 nt, Artificial Sequence
  Synthetic
aucauuggauuaaaggag

SEQ ID NO: 573310 - RNA, 19 nt, Artificial Sequence
  Synthetic
aaucauuggauuaaaggag

SEQ ID NO: 573311 - RNA, 20 nt, Artificial Sequence
  Synthetic
aaaucauuggauuaaaggag

SEQ ID NO: 573312 - RNA, 21 nt, Artificial Sequence
  Synthetic
caaaucauuggauuaaaggag

SEQ ID NO: 573313 - RNA, 22 nt, Artificial Sequence
  Synthetic
ucaaaucauuggauuaaaggag

SEQ ID NO: 573314 - RNA, 23 nt, Artificial Sequence
  Synthetic
uucaaaucauuggauuaaaggag

SEQ ID NO: 573315 - RNA, 24 nt, Artificial Sequence
  Synthetic
guucaaaucauuggauuaaaggag

SEQ ID NO: 573316 - RNA, 18 nt, Artificial Sequence
  Synthetic
ggaaacagaaacaaggag

SEQ ID NO: 573317 - RNA, 19 nt, Artificial Sequence
  Synthetic
aggaaacagaaacaaggag

SEQ ID NO: 573318 - RNA, 20 nt, Artificial Sequence
  Synthetic
caggaaacagaaacaaggag

SEQ ID NO: 573319 - RNA, 21 nt, Artificial Sequence
  Synthetic
gcaggaaacagaaacaaggag

SEQ ID NO: 573320 - RNA, 22 nt, Artificial Sequence
  Synthetic
ggcaggaaacagaaacaaggag

SEQ ID NO: 573321 - RNA, 23 nt, Artificial Sequence
  Synthetic
aggcaggaaacagaaacaaggag

SEQ ID NO: 573322 - RNA, 24 nt, Artificial Sequence
  Synthetic
aaggcaggaaacagaaacaaggag

SEQ ID NO: 573323 - RNA, 18 nt, Artificial Sequence
  Synthetic
gcaugcuacaccaaggag

SEQ ID NO: 573324 - RNA, 19 nt, Artificial Sequence
  Synthetic
ugcaugcuacaccaaggag

SEQ ID NO: 573325 - RNA, 20 nt, Artificial Sequence
  Synthetic
uugcaugcuacaccaaggag

SEQ ID NO: 573326 - RNA, 21 nt, Artificial Sequence
  Synthetic
cuugcaugcuacaccaaggag

SEQ ID NO: 573327 - RNA, 22 nt, Artificial Sequence
  Synthetic
ccuugcaugcuacaccaaggag

SEQ ID NO: 573328 - RNA, 23 nt, Artificial Sequence
  Synthetic
accuugcaugcuacaccaaggag

SEQ ID NO: 573329 - RNA, 24 nt, Artificial Sequence
  Synthetic
gaccuugcaugcuacaccaaggag

SEQ ID NO: 573330 - RNA, 21 nt, Artificial Sequence
  Synthetic
ggaauagggaggcccaaggag

SEQ ID NO: 573331 - RNA, 22 nt, Artificial Sequence
  Synthetic
gggaauagggaggcccaaggag

SEQ ID NO: 573332 - RNA, 23 nt, Artificial Sequence
  Synthetic
agggaauagggaggcccaaggag

SEQ ID NO: 573333 - RNA, 24 nt, Artificial Sequence
  Synthetic
cagggaauagggaggcccaaggag

SEQ ID NO: 573334 - RNA, 18 nt, Artificial Sequence
  Synthetic
uuuaacucucccaaggag

SEQ ID NO: 573335 - RNA, 19 nt, Artificial Sequence
  Synthetic
cuuuaacucucccaaggag

SEQ ID NO: 573336 - RNA, 20 nt, Artificial Sequence
  Synthetic
ucuuuaacucucccaaggag

SEQ ID NO: 573337 - RNA, 21 nt, Artificial Sequence
  Synthetic
aucuuuaacucucccaaggag

SEQ ID NO: 573338 - RNA, 22 nt, Artificial Sequence
  Synthetic
aaucuuuaacucucccaaggag

SEQ ID NO: 573339 - RNA, 23 nt, Artificial Sequence
  Synthetic
gaaucuuuaacucucccaaggag

SEQ ID NO: 573340 - RNA, 24 nt, Artificial Sequence
  Synthetic
ggaaucuuuaacucucccaaggag

SEQ ID NO: 573341 - RNA, 18 nt, Artificial Sequence
  Synthetic
ccauuuuugagcaaggag

SEQ ID NO: 573342 - RNA, 19 nt, Artificial Sequence
  Synthetic
uccauuuuugagcaaggag

SEQ ID NO: 573343 - RNA, 20 nt, Artificial Sequence
  Synthetic
guccauuuuugagcaaggag

SEQ ID NO: 573344 - RNA, 21 nt, Artificial Sequence
  Synthetic
uguccauuuuugagcaaggag

SEQ ID NO: 573345 - RNA, 22 nt, Artificial Sequence
  Synthetic
guguccauuuuugagcaaggag

SEQ ID NO: 573346 - RNA, 23 nt, Artificial Sequence
  Synthetic
aguguccauuuuugagcaaggag

SEQ ID NO: 573347 - RNA, 24 nt, Artificial Sequence
  Synthetic
aaguguccauuuuugagcaaggag

SEQ ID NO: 573348 - RNA, 18 nt, Artificial Sequence
  Synthetic
uccuaaaaacagaaggag

SEQ ID NO: 573349 - RNA, 19 nt, Artificial Sequence
  Synthetic
auccuaaaaacagaaggag

SEQ ID NO: 573350 - RNA, 20 nt, Artificial Sequence
  Synthetic
cauccuaaaaacagaaggag

SEQ ID NO: 573351 - RNA, 21 nt, Artificial Sequence
  Synthetic
ccauccuaaaaacagaaggag

SEQ ID NO: 573352 - RNA, 22 nt, Artificial Sequence
  Synthetic
gccauccuaaaaacagaaggag

SEQ ID NO: 573353 - RNA, 23 nt, Artificial Sequence
  Synthetic
ugccauccuaaaaacagaaggag

SEQ ID NO: 573354 - RNA, 24 nt, Artificial Sequence
  Synthetic
cugccauccuaaaaacagaaggag

SEQ ID NO: 573355 - RNA, 18 nt, Artificial Sequence
  Synthetic
gaaagacuagagaaggag

SEQ ID NO: 573356 - RNA, 19 nt, Artificial Sequence
  Synthetic
ugaaagacuagagaaggag

SEQ ID NO: 573357 - RNA, 20 nt, Artificial Sequence
  Synthetic
augaaagacuagagaaggag

SEQ ID NO: 573358 - RNA, 21 nt, Artificial Sequence
  Synthetic
aaugaaagacuagagaaggag

SEQ ID NO: 573359 - RNA, 22 nt, Artificial Sequence
  Synthetic
gaaugaaagacuagagaaggag

SEQ ID NO: 573360 - RNA, 23 nt, Artificial Sequence
  Synthetic
ugaaugaaagacuagagaaggag

SEQ ID NO: 573361 - RNA, 24 nt, Artificial Sequence
  Synthetic
augaaugaaagacuagagaaggag

SEQ ID NO: 573362 - RNA, 18 nt, Artificial Sequence
  Synthetic
ggaagggaagggaaggag

SEQ ID NO: 573363 - RNA, 19 nt, Artificial Sequence
  Synthetic
gggaagggaagggaaggag

SEQ ID NO: 573364 - RNA, 20 nt, Artificial Sequence
  Synthetic
agggaagggaagggaaggag

SEQ ID NO: 573365 - RNA, 21 nt, Artificial Sequence
  Synthetic
aagggaagggaagggaaggag

SEQ ID NO: 573366 - RNA, 22 nt, Artificial Sequence
  Synthetic
gaagggaagggaagggaaggag

SEQ ID NO: 573367 - RNA, 23 nt, Artificial Sequence
  Synthetic
ggaagggaagggaagggaaggag

SEQ ID NO: 573368 - RNA, 24 nt, Artificial Sequence
  Synthetic
gggaagggaagggaagggaaggag

SEQ ID NO: 573369 - RNA, 18 nt, Artificial Sequence
  Synthetic
agguagugagggaaggag

SEQ ID NO: 573370 - RNA, 19 nt, Artificial Sequence
  Synthetic
gagguagugagggaaggag

SEQ ID NO: 573371 - RNA, 20 nt, Artificial Sequence
  Synthetic
ugagguagugagggaaggag

SEQ ID NO: 573372 - RNA, 21 nt, Artificial Sequence
  Synthetic
gugagguagugagggaaggag

SEQ ID NO: 573373 - RNA, 22 nt, Artificial Sequence
  Synthetic
ugugagguagugagggaaggag

SEQ ID NO: 573374 - RNA, 23 nt, Artificial Sequence
  Synthetic
uugugagguagugagggaaggag

SEQ ID NO: 573375 - RNA, 24 nt, Artificial Sequence
  Synthetic
uuugugagguagugagggaaggag

SEQ ID NO: 573376 - RNA, 18 nt, Artificial Sequence
  Synthetic
cugggagaauggaaggag

SEQ ID NO: 573377 - RNA, 19 nt, Artificial Sequence
  Synthetic
gcugggagaauggaaggag

SEQ ID NO: 573378 - RNA, 20 nt, Artificial Sequence
  Synthetic
ugcugggagaauggaaggag

SEQ ID NO: 573379 - RNA, 21 nt, Artificial Sequence
  Synthetic
cugcugggagaauggaaggag

SEQ ID NO: 573380 - RNA, 22 nt, Artificial Sequence
  Synthetic
gcugcugggagaauggaaggag

SEQ ID NO: 573381 - RNA, 23 nt, Artificial Sequence
  Synthetic
ugcugcugggagaauggaaggag

SEQ ID NO: 573382 - RNA, 24 nt, Artificial Sequence
  Synthetic
gugcugcugggagaauggaaggag

SEQ ID NO: 573383 - RNA, 18 nt, Artificial Sequence
  Synthetic
gggaggggugugaaggag

SEQ ID NO: 573384 - RNA, 19 nt, Artificial Sequence
  Synthetic
ggggaggggugugaaggag

SEQ ID NO: 573385 - RNA, 20 nt, Artificial Sequence
  Synthetic
gggggaggggugugaaggag

SEQ ID NO: 573386 - RNA, 21 nt, Artificial Sequence
  Synthetic
agggggaggggugugaaggag

SEQ ID NO: 573387 - RNA, 22 nt, Artificial Sequence
  Synthetic
aagggggaggggugugaaggag

SEQ ID NO: 573388 - RNA, 23 nt, Artificial Sequence
  Synthetic
gaagggggaggggugugaaggag

SEQ ID NO: 573389 - RNA, 24 nt, Artificial Sequence
  Synthetic
ugaagggggaggggugugaaggag

SEQ ID NO: 573390 - RNA, 18 nt, Artificial Sequence
  Synthetic
agggaauacauuaaggag

SEQ ID NO: 573391 - RNA, 19 nt, Artificial Sequence
  Synthetic
aagggaauacauuaaggag

SEQ ID NO: 573392 - RNA, 20 nt, Artificial Sequence
  Synthetic
uaagggaauacauuaaggag

SEQ ID NO: 573393 - RNA, 21 nt, Artificial Sequence
  Synthetic
auaagggaauacauuaaggag

SEQ ID NO: 573394 - RNA, 22 nt, Artificial Sequence
  Synthetic
aauaagggaauacauuaaggag

SEQ ID NO: 573395 - RNA, 23 nt, Artificial Sequence
  Synthetic
aaauaagggaauacauuaaggag

SEQ ID NO: 573396 - RNA, 24 nt, Artificial Sequence
  Synthetic
caaauaagggaauacauuaaggag

SEQ ID NO: 573397 - RNA, 18 nt, Artificial Sequence
  Synthetic
uuacuuuugcuuaaggag

SEQ ID NO: 573398 - RNA, 19 nt, Artificial Sequence
  Synthetic
cuuacuuuugcuuaaggag

SEQ ID NO: 573399 - RNA, 20 nt, Artificial Sequence
  Synthetic
ccuuacuuuugcuuaaggag

SEQ ID NO: 573400 - RNA, 21 nt, Artificial Sequence
  Synthetic
uccuuacuuuugcuuaaggag

SEQ ID NO: 573401 - RNA, 22 nt, Artificial Sequence
  Synthetic
cuccuuacuuuugcuuaaggag

SEQ ID NO: 573402 - RNA, 23 nt, Artificial Sequence
  Synthetic
acuccuuacuuuugcuuaaggag

SEQ ID NO: 573403 - RNA, 24 nt, Artificial Sequence
  Synthetic
gacuccuuacuuuugcuuaaggag

SEQ ID NO: 573404 - RNA, 18 nt, Artificial Sequence
  Synthetic
uuacuucucguuaaggag

SEQ ID NO: 573405 - RNA, 19 nt, Artificial Sequence
  Synthetic
cuuacuucucguuaaggag

SEQ ID NO: 573406 - RNA, 20 nt, Artificial Sequence
  Synthetic
ccuuacuucucguuaaggag

SEQ ID NO: 573407 - RNA, 21 nt, Artificial Sequence
  Synthetic
uccuuacuucucguuaaggag

SEQ ID NO: 573408 - RNA, 22 nt, Artificial Sequence
  Synthetic
cuccuuacuucucguuaaggag

SEQ ID NO: 573409 - RNA, 23 nt, Artificial Sequence
  Synthetic
acuccuuacuucucguuaaggag

SEQ ID NO: 573410 - RNA, 24 nt, Artificial Sequence
  Synthetic
gacuccuuacuucucguuaaggag

SEQ ID NO: 573411 - RNA, 18 nt, Artificial Sequence
  Synthetic
aaacaaaaauuuaaggag

SEQ ID NO: 573412 - RNA, 19 nt, Artificial Sequence
  Synthetic
caaacaaaaauuuaaggag

SEQ ID NO: 573413 - RNA, 20 nt, Artificial Sequence
  Synthetic
acaaacaaaaauuuaaggag

SEQ ID NO: 573414 - RNA, 21 nt, Artificial Sequence
  Synthetic
aacaaacaaaaauuuaaggag

SEQ ID NO: 573415 - RNA, 22 nt, Artificial Sequence
  Synthetic
aaacaaacaaaaauuuaaggag

SEQ ID NO: 573416 - RNA, 23 nt, Artificial Sequence
  Synthetic
caaacaaacaaaaauuuaaggag

SEQ ID NO: 573417 - RNA, 24 nt, Artificial Sequence
  Synthetic
ccaaacaaacaaaaauuuaaggag

SEQ ID NO: 573418 - RNA, 18 nt, Artificial Sequence
  Synthetic
aaaaaagaaaaacaggag

SEQ ID NO: 573419 - RNA, 19 nt, Artificial Sequence
  Synthetic
caaaaaagaaaaacaggag

SEQ ID NO: 573420 - RNA, 20 nt, Artificial Sequence
  Synthetic
ucaaaaaagaaaaacaggag

SEQ ID NO: 573421 - RNA, 21 nt, Artificial Sequence
  Synthetic
aucaaaaaagaaaaacaggag

SEQ ID NO: 573422 - RNA, 22 nt, Artificial Sequence
  Synthetic
uaucaaaaaagaaaaacaggag

SEQ ID NO: 573423 - RNA, 23 nt, Artificial Sequence
  Synthetic
auaucaaaaaagaaaaacaggag

SEQ ID NO: 573424 - RNA, 24 nt, Artificial Sequence
  Synthetic
cauaucaaaaaagaaaaacaggag

SEQ ID NO: 573425 - RNA, 18 nt, Artificial Sequence
  Synthetic
aaucacucgaaacaggag

SEQ ID NO: 573426 - RNA, 19 nt, Artificial Sequence
  Synthetic
gaaucacucgaaacaggag

SEQ ID NO: 573427 - RNA, 20 nt, Artificial Sequence
  Synthetic
agaaucacucgaaacaggag

SEQ ID NO: 573428 - RNA, 21 nt, Artificial Sequence
  Synthetic
gagaaucacucgaaacaggag

SEQ ID NO: 573429 - RNA, 22 nt, Artificial Sequence
  Synthetic
ggagaaucacucgaaacaggag

SEQ ID NO: 573430 - RNA, 23 nt, Artificial Sequence
  Synthetic
aggagaaucacucgaaacaggag

SEQ ID NO: 573431 - RNA, 24 nt, Artificial Sequence
  Synthetic
caggagaaucacucgaaacaggag

SEQ ID NO: 573432 - RNA, 18 nt, Artificial Sequence
  Synthetic
cacugccaguaacaggag

SEQ ID NO: 573433 - RNA, 19 nt, Artificial Sequence
  Synthetic
ucacugccaguaacaggag

SEQ ID NO: 573434 - RNA, 20 nt, Artificial Sequence
  Synthetic
uucacugccaguaacaggag

SEQ ID NO: 573435 - RNA, 21 nt, Artificial Sequence
  Synthetic
auucacugccaguaacaggag

SEQ ID NO: 573436 - RNA, 22 nt, Artificial Sequence
  Synthetic
gauucacugccaguaacaggag

SEQ ID NO: 573437 - RNA, 23 nt, Artificial Sequence
  Synthetic
ggauucacugccaguaacaggag

SEQ ID NO: 573438 - RNA, 24 nt, Artificial Sequence
  Synthetic
uggauucacugccaguaacaggag

SEQ ID NO: 573439 - RNA, 18 nt, Artificial Sequence
  Synthetic
ggaaacaaaacacaggag

SEQ ID NO: 573440 - RNA, 19 nt, Artificial Sequence
  Synthetic
aggaaacaaaacacaggag

SEQ ID NO: 573441 - RNA, 20 nt, Artificial Sequence
  Synthetic
gaggaaacaaaacacaggag

SEQ ID NO: 573442 - RNA, 21 nt, Artificial Sequence
  Synthetic
agaggaaacaaaacacaggag

SEQ ID NO: 573443 - RNA, 22 nt, Artificial Sequence
  Synthetic
uagaggaaacaaaacacaggag

SEQ ID NO: 573444 - RNA, 23 nt, Artificial Sequence
  Synthetic
cuagaggaaacaaaacacaggag

SEQ ID NO: 573445 - RNA, 24 nt, Artificial Sequence
  Synthetic
ucuagaggaaacaaaacacaggag

SEQ ID NO: 573446 - RNA, 18 nt, Artificial Sequence
  Synthetic
cucacuugaucacaggag

SEQ ID NO: 573447 - RNA, 19 nt, Artificial Sequence
  Synthetic
acucacuugaucacaggag

SEQ ID NO: 573448 - RNA, 20 nt, Artificial Sequence
  Synthetic
gacucacuugaucacaggag

SEQ ID NO: 573449 - RNA, 21 nt, Artificial Sequence
  Synthetic
agacucacuugaucacaggag

SEQ ID NO: 573450 - RNA, 22 nt, Artificial Sequence
  Synthetic
gagacucacuugaucacaggag

SEQ ID NO: 573451 - RNA, 23 nt, Artificial Sequence
  Synthetic
agagacucacuugaucacaggag

SEQ ID NO: 573452 - RNA, 24 nt, Artificial Sequence
  Synthetic
gagagacucacuugaucacaggag

SEQ ID NO: 573453 - RNA, 18 nt, Artificial Sequence
  Synthetic
cagugaacuucacaggag

SEQ ID NO: 573454 - RNA, 19 nt, Artificial Sequence
  Synthetic
ucagugaacuucacaggag

SEQ ID NO: 573455 - RNA, 20 nt, Artificial Sequence
  Synthetic
gucagugaacuucacaggag

SEQ ID NO: 573456 - RNA, 21 nt, Artificial Sequence
  Synthetic
ugucagugaacuucacaggag

SEQ ID NO: 573457 - RNA, 22 nt, Artificial Sequence
  Synthetic
augucagugaacuucacaggag

SEQ ID NO: 573458 - RNA, 23 nt, Artificial Sequence
  Synthetic
aaugucagugaacuucacaggag

SEQ ID NO: 573459 - RNA, 24 nt, Artificial Sequence
  Synthetic
aaaugucagugaacuucacaggag

SEQ ID NO: 573460 - RNA, 18 nt, Artificial Sequence
  Synthetic
aaauaagagagacaggag

SEQ ID NO: 573461 - RNA, 19 nt, Artificial Sequence
  Synthetic
gaaauaagagagacaggag

SEQ ID NO: 573462 - RNA, 20 nt, Artificial Sequence
  Synthetic
ggaaauaagagagacaggag

SEQ ID NO: 573463 - RNA, 21 nt, Artificial Sequence
  Synthetic
aggaaauaagagagacaggag

SEQ ID NO: 573464 - RNA, 22 nt, Artificial Sequence
  Synthetic
uaggaaauaagagagacaggag

SEQ ID NO: 573465 - RNA, 23 nt, Artificial Sequence
  Synthetic
auaggaaauaagagagacaggag

SEQ ID NO: 573466 - RNA, 24 nt, Artificial Sequence
  Synthetic
aauaggaaauaagagagacaggag

SEQ ID NO: 573467 - RNA, 18 nt, Artificial Sequence
  Synthetic
cugcugaucugacaggag

SEQ ID NO: 573468 - RNA, 19 nt, Artificial Sequence
  Synthetic
gcugcugaucugacaggag

SEQ ID NO: 573469 - RNA, 20 nt, Artificial Sequence
  Synthetic
ggcugcugaucugacaggag

SEQ ID NO: 573470 - RNA, 21 nt, Artificial Sequence
  Synthetic
uggcugcugaucugacaggag

SEQ ID NO: 573471 - RNA, 22 nt, Artificial Sequence
  Synthetic
guggcugcugaucugacaggag

SEQ ID NO: 573472 - RNA, 23 nt, Artificial Sequence
  Synthetic
uguggcugcugaucugacaggag

SEQ ID NO: 573473 - RNA, 24 nt, Artificial Sequence
  Synthetic
auguggcugcugaucugacaggag

SEQ ID NO: 573474 - RNA, 18 nt, Artificial Sequence
  Synthetic
aagaccucuugacaggag

SEQ ID NO: 573475 - RNA, 19 nt, Artificial Sequence
  Synthetic
caagaccucuugacaggag

SEQ ID NO: 573476 - RNA, 20 nt, Artificial Sequence
  Synthetic
acaagaccucuugacaggag

SEQ ID NO: 573477 - RNA, 21 nt, Artificial Sequence
  Synthetic
gacaagaccucuugacaggag

SEQ ID NO: 573478 - RNA, 22 nt, Artificial Sequence
  Synthetic
ggacaagaccucuugacaggag

SEQ ID NO: 573479 - RNA, 23 nt, Artificial Sequence
  Synthetic
gggacaagaccucuugacaggag

SEQ ID NO: 573480 - RNA, 24 nt, Artificial Sequence
  Synthetic
agggacaagaccucuugacaggag

SEQ ID NO: 573481 - RNA, 18 nt, Artificial Sequence
  Synthetic
aauugcuugaaccaggag

SEQ ID NO: 573482 - RNA, 19 nt, Artificial Sequence
  Synthetic
gaauugcuugaaccaggag

SEQ ID NO: 573483 - RNA, 20 nt, Artificial Sequence
  Synthetic
agaauugcuugaaccaggag

SEQ ID NO: 573484 - RNA, 21 nt, Artificial Sequence
  Synthetic
gagaauugcuugaaccaggag

SEQ ID NO: 573485 - RNA, 22 nt, Artificial Sequence
  Synthetic
ggagaauugcuugaaccaggag

SEQ ID NO: 573486 - RNA, 23 nt, Artificial Sequence
  Synthetic
gggagaauugcuugaaccaggag

SEQ ID NO: 573487 - RNA, 24 nt, Artificial Sequence
  Synthetic
cgggagaauugcuugaaccaggag

SEQ ID NO: 573488 - RNA, 21 nt, Artificial Sequence
  Synthetic
agaaucccuugaacccaggag

SEQ ID NO: 573489 - RNA, 22 nt, Artificial Sequence
  Synthetic
gagaaucccuugaacccaggag

SEQ ID NO: 573490 - RNA, 23 nt, Artificial Sequence
  Synthetic
ggagaaucccuugaacccaggag

SEQ ID NO: 573491 - RNA, 24 nt, Artificial Sequence
  Synthetic
aggagaaucccuugaacccaggag

SEQ ID NO: 573492 - RNA, 21 nt, Artificial Sequence
  Synthetic
agaaucgcuugaacccaggag

SEQ ID NO: 573493 - RNA, 22 nt, Artificial Sequence
  Synthetic
gagaaucgcuugaacccaggag

SEQ ID NO: 573494 - RNA, 23 nt, Artificial Sequence
  Synthetic
ggagaaucgcuugaacccaggag

SEQ ID NO: 573495 - RNA, 24 nt, Artificial Sequence
  Synthetic
aggagaaucgcuugaacccaggag

SEQ ID NO: 573496 - RNA, 18 nt, Artificial Sequence
  Synthetic
aucucuugaacccaggag

SEQ ID NO: 573497 - RNA, 19 nt, Artificial Sequence
  Synthetic
aaucucuugaacccaggag

SEQ ID NO: 573498 - RNA, 20 nt, Artificial Sequence
  Synthetic
gaaucucuugaacccaggag

SEQ ID NO: 573499 - RNA, 21 nt, Artificial Sequence
  Synthetic
agaaucucuugaacccaggag

SEQ ID NO: 573500 - RNA, 22 nt, Artificial Sequence
  Synthetic
aagaaucucuugaacccaggag

SEQ ID NO: 573501 - RNA, 23 nt, Artificial Sequence
  Synthetic
caagaaucucuugaacccaggag

SEQ ID NO: 573502 - RNA, 24 nt, Artificial Sequence
  Synthetic
acaagaaucucuugaacccaggag

SEQ ID NO: 573503 - RNA, 18 nt, Artificial Sequence
  Synthetic
aucacccgagcccaggag

SEQ ID NO: 573504 - RNA, 19 nt, Artificial Sequence
  Synthetic
gaucacccgagcccaggag

SEQ ID NO: 573505 - RNA, 20 nt, Artificial Sequence
  Synthetic
ggaucacccgagcccaggag

SEQ ID NO: 573506 - RNA, 21 nt, Artificial Sequence
  Synthetic
gggaucacccgagcccaggag

SEQ ID NO: 573507 - RNA, 22 nt, Artificial Sequence
  Synthetic
ggggaucacccgagcccaggag

SEQ ID NO: 573508 - RNA, 23 nt, Artificial Sequence
  Synthetic
gggggaucacccgagcccaggag

SEQ ID NO: 573509 - RNA, 24 nt, Artificial Sequence
  Synthetic
ggggggaucacccgagcccaggag

SEQ ID NO: 573510 - RNA, 18 nt, Artificial Sequence
  Synthetic
acugcuugagcccaggag

SEQ ID NO: 573511 - RNA, 19 nt, Artificial Sequence
  Synthetic
aacugcuugagcccaggag

SEQ ID NO: 573512 - RNA, 20 nt, Artificial Sequence
  Synthetic
gaacugcuugagcccaggag

SEQ ID NO: 573513 - RNA, 21 nt, Artificial Sequence
  Synthetic
agaacugcuugagcccaggag

SEQ ID NO: 573514 - RNA, 22 nt, Artificial Sequence
  Synthetic
gagaacugcuugagcccaggag

SEQ ID NO: 573515 - RNA, 23 nt, Artificial Sequence
  Synthetic
ggagaacugcuugagcccaggag

SEQ ID NO: 573516 - RNA, 24 nt, Artificial Sequence
  Synthetic
cggagaacugcuugagcccaggag

SEQ ID NO: 573517 - RNA, 18 nt, Artificial Sequence
  Synthetic
uguaaaagcagccaggag

SEQ ID NO: 573518 - RNA, 19 nt, Artificial Sequence
  Synthetic
cuguaaaagcagccaggag

SEQ ID NO: 573519 - RNA, 20 nt, Artificial Sequence
  Synthetic
ccuguaaaagcagccaggag

SEQ ID NO: 573520 - RNA, 21 nt, Artificial Sequence
  Synthetic
gccuguaaaagcagccaggag

SEQ ID NO: 573521 - RNA, 22 nt, Artificial Sequence
  Synthetic
agccuguaaaagcagccaggag

SEQ ID NO: 573522 - RNA, 23 nt, Artificial Sequence
  Synthetic
cagccuguaaaagcagccaggag

SEQ ID NO: 573523 - RNA, 24 nt, Artificial Sequence
  Synthetic
ccagccuguaaaagcagccaggag

SEQ ID NO: 573524 - RNA, 18 nt, Artificial Sequence
  Synthetic
aaagaaaugcuccaggag

SEQ ID NO: 573525 - RNA, 19 nt, Artificial Sequence
  Synthetic
gaaagaaaugcuccaggag

SEQ ID NO: 573526 - RNA, 20 nt, Artificial Sequence
  Synthetic
agaaagaaaugcuccaggag

SEQ ID NO: 573527 - RNA, 21 nt, Artificial Sequence
  Synthetic
aagaaagaaaugcuccaggag

SEQ ID NO: 573528 - RNA, 22 nt, Artificial Sequence
  Synthetic
gaagaaagaaaugcuccaggag

SEQ ID NO: 573529 - RNA, 23 nt, Artificial Sequence
  Synthetic
agaagaaagaaaugcuccaggag

SEQ ID NO: 573530 - RNA, 24 nt, Artificial Sequence
  Synthetic
uagaagaaagaaaugcuccaggag

SEQ ID NO: 573531 - RNA, 18 nt, Artificial Sequence
  Synthetic
ugugucacaguccaggag

SEQ ID NO: 573532 - RNA, 19 nt, Artificial Sequence
  Synthetic
uugugucacaguccaggag

SEQ ID NO: 573533 - RNA, 20 nt, Artificial Sequence
  Synthetic
uuugugucacaguccaggag

SEQ ID NO: 573534 - RNA, 21 nt, Artificial Sequence
  Synthetic
uuuugugucacaguccaggag

SEQ ID NO: 573535 - RNA, 22 nt, Artificial Sequence
  Synthetic
auuuugugucacaguccaggag

SEQ ID NO: 573536 - RNA, 23 nt, Artificial Sequence
  Synthetic
cauuuugugucacaguccaggag

SEQ ID NO: 573537 - RNA, 24 nt, Artificial Sequence
  Synthetic
gcauuuugugucacaguccaggag

SEQ ID NO: 573538 - RNA, 18 nt, Artificial Sequence
  Synthetic
uuauaaacaaagcaggag

SEQ ID NO: 573539 - RNA, 19 nt, Artificial Sequence
  Synthetic
uuuauaaacaaagcaggag

SEQ ID NO: 573540 - RNA, 20 nt, Artificial Sequence
  Synthetic
cuuuauaaacaaagcaggag

SEQ ID NO: 573541 - RNA, 21 nt, Artificial Sequence
  Synthetic
gcuuuauaaacaaagcaggag

SEQ ID NO: 573542 - RNA, 22 nt, Artificial Sequence
  Synthetic
agcuuuauaaacaaagcaggag

SEQ ID NO: 573543 - RNA, 23 nt, Artificial Sequence
  Synthetic
uagcuuuauaaacaaagcaggag

SEQ ID NO: 573544 - RNA, 24 nt, Artificial Sequence
  Synthetic
uuagcuuuauaaacaaagcaggag

SEQ ID NO: 573545 - RNA, 18 nt, Artificial Sequence
  Synthetic
gaaggcacccagcaggag

SEQ ID NO: 573546 - RNA, 19 nt, Artificial Sequence
  Synthetic
agaaggcacccagcaggag

SEQ ID NO: 573547 - RNA, 20 nt, Artificial Sequence
  Synthetic
gagaaggcacccagcaggag

SEQ ID NO: 573548 - RNA, 21 nt, Artificial Sequence
  Synthetic
agagaaggcacccagcaggag

SEQ ID NO: 573549 - RNA, 22 nt, Artificial Sequence
  Synthetic
cagagaaggcacccagcaggag

SEQ ID NO: 573550 - RNA, 23 nt, Artificial Sequence
  Synthetic
acagagaaggcacccagcaggag

SEQ ID NO: 573551 - RNA, 24 nt, Artificial Sequence
  Synthetic
aacagagaaggcacccagcaggag

SEQ ID NO: 573552 - RNA, 18 nt, Artificial Sequence
  Synthetic
uaccuugagcagcaggag

SEQ ID NO: 573553 - RNA, 19 nt, Artificial Sequence
  Synthetic
guaccuugagcagcaggag

SEQ ID NO: 573554 - RNA, 20 nt, Artificial Sequence
  Synthetic
aguaccuugagcagcaggag

SEQ ID NO: 573555 - RNA, 21 nt, Artificial Sequence
  Synthetic
caguaccuugagcagcaggag

SEQ ID NO: 573556 - RNA, 22 nt, Artificial Sequence
  Synthetic
gcaguaccuugagcagcaggag

SEQ ID NO: 573557 - RNA, 23 nt, Artificial Sequence
  Synthetic
ugcaguaccuugagcagcaggag

SEQ ID NO: 573558 - RNA, 24 nt, Artificial Sequence
  Synthetic
cugcaguaccuugagcagcaggag

SEQ ID NO: 573559 - RNA, 18 nt, Artificial Sequence
  Synthetic
uuuggagaggagcaggag

SEQ ID NO: 573560 - RNA, 19 nt, Artificial Sequence
  Synthetic
uuuuggagaggagcaggag

SEQ ID NO: 573561 - RNA, 20 nt, Artificial Sequence
  Synthetic
auuuuggagaggagcaggag

SEQ ID NO: 573562 - RNA, 21 nt, Artificial Sequence
  Synthetic
cauuuuggagaggagcaggag

SEQ ID NO: 573563 - RNA, 22 nt, Artificial Sequence
  Synthetic
ccauuuuggagaggagcaggag

SEQ ID NO: 573564 - RNA, 23 nt, Artificial Sequence
  Synthetic
gccauuuuggagaggagcaggag

SEQ ID NO: 573565 - RNA, 24 nt, Artificial Sequence
  Synthetic
ugccauuuuggagaggagcaggag

SEQ ID NO: 573566 - RNA, 18 nt, Artificial Sequence
  Synthetic
ccgauaagaucgcaggag

SEQ ID NO: 573567 - RNA, 19 nt, Artificial Sequence
  Synthetic
cccgauaagaucgcaggag

SEQ ID NO: 573568 - RNA, 20 nt, Artificial Sequence
  Synthetic
ucccgauaagaucgcaggag

SEQ ID NO: 573569 - RNA, 21 nt, Artificial Sequence
  Synthetic
uucccgauaagaucgcaggag

SEQ ID NO: 573570 - RNA, 22 nt, Artificial Sequence
  Synthetic
cuucccgauaagaucgcaggag

SEQ ID NO: 573571 - RNA, 23 nt, Artificial Sequence
  Synthetic
gcuucccgauaagaucgcaggag

SEQ ID NO: 573572 - RNA, 24 nt, Artificial Sequence
  Synthetic
agcuucccgauaagaucgcaggag

SEQ ID NO: 573573 - RNA, 21 nt, Artificial Sequence
  Synthetic
gccagggcaaucaggcaggag

SEQ ID NO: 573574 - RNA, 22 nt, Artificial Sequence
  Synthetic
ggccagggcaaucaggcaggag

SEQ ID NO: 573575 - RNA, 23 nt, Artificial Sequence
  Synthetic
uggccagggcaaucaggcaggag

SEQ ID NO: 573576 - RNA, 24 nt, Artificial Sequence
  Synthetic
cuggccagggcaaucaggcaggag

SEQ ID NO: 573577 - RNA, 18 nt, Artificial Sequence
  Synthetic
caagaagagaggcaggag

SEQ ID NO: 573578 - RNA, 19 nt, Artificial Sequence
  Synthetic
gcaagaagagaggcaggag

SEQ ID NO: 573579 - RNA, 20 nt, Artificial Sequence
  Synthetic
agcaagaagagaggcaggag

SEQ ID NO: 573580 - RNA, 21 nt, Artificial Sequence
  Synthetic
gagcaagaagagaggcaggag

SEQ ID NO: 573581 - RNA, 22 nt, Artificial Sequence
  Synthetic
ggagcaagaagagaggcaggag

SEQ ID NO: 573582 - RNA, 23 nt, Artificial Sequence
  Synthetic
aggagcaagaagagaggcaggag

SEQ ID NO: 573583 - RNA, 24 nt, Artificial Sequence
  Synthetic
aaggagcaagaagagaggcaggag

SEQ ID NO: 573584 - RNA, 18 nt, Artificial Sequence
  Synthetic
ucccagcugaggcaggag

SEQ ID NO: 573585 - RNA, 19 nt, Artificial Sequence
  Synthetic
gucccagcugaggcaggag

SEQ ID NO: 573586 - RNA, 20 nt, Artificial Sequence
  Synthetic
agucccagcugaggcaggag

SEQ ID NO: 573587 - RNA, 21 nt, Artificial Sequence
  Synthetic
uagucccagcugaggcaggag

SEQ ID NO: 573588 - RNA, 22 nt, Artificial Sequence
  Synthetic
guagucccagcugaggcaggag

SEQ ID NO: 573589 - RNA, 23 nt, Artificial Sequence
  Synthetic
uguagucccagcugaggcaggag

SEQ ID NO: 573590 - RNA, 24 nt, Artificial Sequence
  Synthetic
cuguagucccagcugaggcaggag

SEQ ID NO: 573591 - RNA, 18 nt, Artificial Sequence
  Synthetic
ccccaaauguaucaggag

SEQ ID NO: 573592 - RNA, 19 nt, Artificial Sequence
  Synthetic
cccccaaauguaucaggag

SEQ ID NO: 573593 - RNA, 20 nt, Artificial Sequence
  Synthetic
gcccccaaauguaucaggag

SEQ ID NO: 573594 - RNA, 21 nt, Artificial Sequence
  Synthetic
ugcccccaaauguaucaggag

SEQ ID NO: 573595 - RNA, 22 nt, Artificial Sequence
  Synthetic
cugcccccaaauguaucaggag

SEQ ID NO: 573596 - RNA, 23 nt, Artificial Sequence
  Synthetic
ccugcccccaaauguaucaggag

SEQ ID NO: 573597 - RNA, 24 nt, Artificial Sequence
  Synthetic
accugcccccaaauguaucaggag

SEQ ID NO: 573598 - RNA, 18 nt, Artificial Sequence
  Synthetic
uaaagagggaaagaggag

SEQ ID NO: 573599 - RNA, 19 nt, Artificial Sequence
  Synthetic
auaaagagggaaagaggag

SEQ ID NO: 573600 - RNA, 20 nt, Artificial Sequence
  Synthetic
aauaaagagggaaagaggag

SEQ ID NO: 573601 - RNA, 21 nt, Artificial Sequence
  Synthetic
gaauaaagagggaaagaggag

SEQ ID NO: 573602 - RNA, 22 nt, Artificial Sequence
  Synthetic
ugaauaaagagggaaagaggag

SEQ ID NO: 573603 - RNA, 23 nt, Artificial Sequence
  Synthetic
augaauaaagagggaaagaggag

SEQ ID NO: 573604 - RNA, 24 nt, Artificial Sequence
  Synthetic
caugaauaaagagggaaagaggag

SEQ ID NO: 573605 - RNA, 18 nt, Artificial Sequence
  Synthetic
gaacaaggcucagaggag

SEQ ID NO: 573606 - RNA, 19 nt, Artificial Sequence
  Synthetic
agaacaaggcucagaggag

SEQ ID NO: 573607 - RNA, 20 nt, Artificial Sequence
  Synthetic
cagaacaaggcucagaggag

SEQ ID NO: 573608 - RNA, 21 nt, Artificial Sequence
  Synthetic
acagaacaaggcucagaggag

SEQ ID NO: 573609 - RNA, 22 nt, Artificial Sequence
  Synthetic
gacagaacaaggcucagaggag

SEQ ID NO: 573610 - RNA, 23 nt, Artificial Sequence
  Synthetic
ugacagaacaaggcucagaggag

SEQ ID NO: 573611 - RNA, 24 nt, Artificial Sequence
  Synthetic
uugacagaacaaggcucagaggag

SEQ ID NO: 573612 - RNA, 18 nt, Artificial Sequence
  Synthetic
uccagauguucagaggag

SEQ ID NO: 573613 - RNA, 19 nt, Artificial Sequence
  Synthetic
uuccagauguucagaggag

SEQ ID NO: 573614 - RNA, 20 nt, Artificial Sequence
  Synthetic
guuccagauguucagaggag

SEQ ID NO: 573615 - RNA, 21 nt, Artificial Sequence
  Synthetic
uguuccagauguucagaggag

SEQ ID NO: 573616 - RNA, 22 nt, Artificial Sequence
  Synthetic
auguuccagauguucagaggag

SEQ ID NO: 573617 - RNA, 23 nt, Artificial Sequence
  Synthetic
aauguuccagauguucagaggag

SEQ ID NO: 573618 - RNA, 24 nt, Artificial Sequence
  Synthetic
caauguuccagauguucagaggag

SEQ ID NO: 573619 - RNA, 18 nt, Artificial Sequence
  Synthetic
aacagcaaaagagaggag

SEQ ID NO: 573620 - RNA, 19 nt, Artificial Sequence
  Synthetic
aaacagcaaaagagaggag

SEQ ID NO: 573621 - RNA, 20 nt, Artificial Sequence
  Synthetic
caaacagcaaaagagaggag

SEQ ID NO: 573622 - RNA, 21 nt, Artificial Sequence
  Synthetic
gcaaacagcaaaagagaggag

SEQ ID NO: 573623 - RNA, 22 nt, Artificial Sequence
  Synthetic
agcaaacagcaaaagagaggag

SEQ ID NO: 573624 - RNA, 23 nt, Artificial Sequence
  Synthetic
aagcaaacagcaaaagagaggag

SEQ ID NO: 573625 - RNA, 24 nt, Artificial Sequence
  Synthetic
aaagcaaacagcaaaagagaggag

SEQ ID NO: 573626 - RNA, 18 nt, Artificial Sequence
  Synthetic
auaccuagaagagaggag

SEQ ID NO: 573627 - RNA, 19 nt, Artificial Sequence
  Synthetic
aauaccuagaagagaggag

SEQ ID NO: 573628 - RNA, 20 nt, Artificial Sequence
  Synthetic
aaauaccuagaagagaggag

SEQ ID NO: 573629 - RNA, 21 nt, Artificial Sequence
  Synthetic
aaaauaccuagaagagaggag

SEQ ID NO: 573630 - RNA, 22 nt, Artificial Sequence
  Synthetic
caaaauaccuagaagagaggag

SEQ ID NO: 573631 - RNA, 23 nt, Artificial Sequence
  Synthetic
ucaaaauaccuagaagagaggag

SEQ ID NO: 573632 - RNA, 24 nt, Artificial Sequence
  Synthetic
cucaaaauaccuagaagagaggag

SEQ ID NO: 573633 - RNA, 18 nt, Artificial Sequence
  Synthetic
cgggaggagagagaggag

SEQ ID NO: 573634 - RNA, 19 nt, Artificial Sequence
  Synthetic
ccgggaggagagagaggag

SEQ ID NO: 573635 - RNA, 20 nt, Artificial Sequence
  Synthetic
gccgggaggagagagaggag

SEQ ID NO: 573636 - RNA, 21 nt, Artificial Sequence
  Synthetic
ugccgggaggagagagaggag

SEQ ID NO: 573637 - RNA, 22 nt, Artificial Sequence
  Synthetic
augccgggaggagagagaggag

SEQ ID NO: 573638 - RNA, 23 nt, Artificial Sequence
  Synthetic
gaugccgggaggagagagaggag

SEQ ID NO: 573639 - RNA, 24 nt, Artificial Sequence
  Synthetic
agaugccgggaggagagagaggag

SEQ ID NO: 573640 - RNA, 18 nt, Artificial Sequence
  Synthetic
cgauaggagggagaggag

SEQ ID NO: 573641 - RNA, 19 nt, Artificial Sequence
  Synthetic
acgauaggagggagaggag

SEQ ID NO: 573642 - RNA, 20 nt, Artificial Sequence
  Synthetic
aacgauaggagggagaggag

SEQ ID NO: 573643 - RNA, 21 nt, Artificial Sequence
  Synthetic
gaacgauaggagggagaggag

SEQ ID NO: 573644 - RNA, 22 nt, Artificial Sequence
  Synthetic
agaacgauaggagggagaggag

SEQ ID NO: 573645 - RNA, 23 nt, Artificial Sequence
  Synthetic
gagaacgauaggagggagaggag

SEQ ID NO: 573646 - RNA, 24 nt, Artificial Sequence
  Synthetic
ggagaacgauaggagggagaggag

SEQ ID NO: 573647 - RNA, 18 nt, Artificial Sequence
  Synthetic
aaaagguugggagaggag

SEQ ID NO: 573648 - RNA, 19 nt, Artificial Sequence
  Synthetic
aaaaagguugggagaggag

SEQ ID NO: 573649 - RNA, 20 nt, Artificial Sequence
  Synthetic
aaaaaagguugggagaggag

SEQ ID NO: 573650 - RNA, 21 nt, Artificial Sequence
  Synthetic
gaaaaaagguugggagaggag

SEQ ID NO: 573651 - RNA, 22 nt, Artificial Sequence
  Synthetic
agaaaaaagguugggagaggag

SEQ ID NO: 573652 - RNA, 23 nt, Artificial Sequence
  Synthetic
aagaaaaaagguugggagaggag

SEQ ID NO: 573653 - RNA, 24 nt, Artificial Sequence
  Synthetic
aaagaaaaaagguugggagaggag

SEQ ID NO: 573654 - RNA, 18 nt, Artificial Sequence
  Synthetic
aauguguauggagaggag

SEQ ID NO: 573655 - RNA, 19 nt, Artificial Sequence
  Synthetic
caauguguauggagaggag

SEQ ID NO: 573656 - RNA, 20 nt, Artificial Sequence
  Synthetic
acaauguguauggagaggag

SEQ ID NO: 573657 - RNA, 21 nt, Artificial Sequence
  Synthetic
cacaauguguauggagaggag

SEQ ID NO: 573658 - RNA, 22 nt, Artificial Sequence
  Synthetic
ucacaauguguauggagaggag

SEQ ID NO: 573659 - RNA, 23 nt, Artificial Sequence
  Synthetic
gucacaauguguauggagaggag

SEQ ID NO: 573660 - RNA, 24 nt, Artificial Sequence
  Synthetic
agucacaauguguauggagaggag

SEQ ID NO: 573661 - RNA, 18 nt, Artificial Sequence
  Synthetic
ugccauuuuggagaggag

SEQ ID NO: 573662 - RNA, 19 nt, Artificial Sequence
  Synthetic
cugccauuuuggagaggag

SEQ ID NO: 573663 - RNA, 20 nt, Artificial Sequence
  Synthetic
gcugccauuuuggagaggag

SEQ ID NO: 573664 - RNA, 21 nt, Artificial Sequence
  Synthetic
agcugccauuuuggagaggag

SEQ ID NO: 573665 - RNA, 22 nt, Artificial Sequence
  Synthetic
cagcugccauuuuggagaggag

SEQ ID NO: 573666 - RNA, 23 nt, Artificial Sequence
  Synthetic
ccagcugccauuuuggagaggag

SEQ ID NO: 573667 - RNA, 24 nt, Artificial Sequence
  Synthetic
cccagcugccauuuuggagaggag

SEQ ID NO: 573668 - RNA, 18 nt, Artificial Sequence
  Synthetic
aaucuucagugagaggag

SEQ ID NO: 573669 - RNA, 19 nt, Artificial Sequence
  Synthetic
gaaucuucagugagaggag

SEQ ID NO: 573670 - RNA, 20 nt, Artificial Sequence
  Synthetic
agaaucuucagugagaggag

SEQ ID NO: 573671 - RNA, 21 nt, Artificial Sequence
  Synthetic
aagaaucuucagugagaggag

SEQ ID NO: 573672 - RNA, 22 nt, Artificial Sequence
  Synthetic
aaagaaucuucagugagaggag

SEQ ID NO: 573673 - RNA, 23 nt, Artificial Sequence
  Synthetic
caaagaaucuucagugagaggag

SEQ ID NO: 573674 - RNA, 24 nt, Artificial Sequence
  Synthetic
acaaagaaucuucagugagaggag

SEQ ID NO: 573675 - RNA, 18 nt, Artificial Sequence
  Synthetic
ggaacaggaaaggaggag

SEQ ID NO: 573676 - RNA, 19 nt, Artificial Sequence
  Synthetic
gggaacaggaaaggaggag

SEQ ID NO: 573677 - RNA, 20 nt, Artificial Sequence
  Synthetic
agggaacaggaaaggaggag

SEQ ID NO: 573678 - RNA, 21 nt, Artificial Sequence
  Synthetic
uagggaacaggaaaggaggag

SEQ ID NO: 573679 - RNA, 22 nt, Artificial Sequence
  Synthetic
guagggaacaggaaaggaggag

SEQ ID NO: 573680 - RNA, 23 nt, Artificial Sequence
  Synthetic
uguagggaacaggaaaggaggag

SEQ ID NO: 573681 - RNA, 24 nt, Artificial Sequence
  Synthetic
cuguagggaacaggaaaggaggag

SEQ ID NO: 573682 - RNA, 18 nt, Artificial Sequence
  Synthetic
uaagagagacaggaggag

SEQ ID NO: 573683 - RNA, 19 nt, Artificial Sequence
  Synthetic
auaagagagacaggaggag

SEQ ID NO: 573684 - RNA, 20 nt, Artificial Sequence
  Synthetic
aauaagagagacaggaggag

SEQ ID NO: 573685 - RNA, 21 nt, Artificial Sequence
  Synthetic
aaauaagagagacaggaggag

SEQ ID NO: 573686 - RNA, 22 nt, Artificial Sequence
  Synthetic
gaaauaagagagacaggaggag

SEQ ID NO: 573687 - RNA, 23 nt, Artificial Sequence
  Synthetic
ggaaauaagagagacaggaggag

SEQ ID NO: 573688 - RNA, 24 nt, Artificial Sequence
  Synthetic
aggaaauaagagagacaggaggag

SEQ ID NO: 573689 - RNA, 18 nt, Artificial Sequence
  Synthetic
guuagaggaagggaggag

SEQ ID NO: 573690 - RNA, 19 nt, Artificial Sequence
  Synthetic
gguuagaggaagggaggag

SEQ ID NO: 573691 - RNA, 20 nt, Artificial Sequence
  Synthetic
agguuagaggaagggaggag

SEQ ID NO: 573692 - RNA, 21 nt, Artificial Sequence
  Synthetic
aagguuagaggaagggaggag

SEQ ID NO: 573693 - RNA, 22 nt, Artificial Sequence
  Synthetic
caagguuagaggaagggaggag

SEQ ID NO: 573694 - RNA, 23 nt, Artificial Sequence
  Synthetic
ucaagguuagaggaagggaggag

SEQ ID NO: 573695 - RNA, 24 nt, Artificial Sequence
  Synthetic
uucaagguuagaggaagggaggag

SEQ ID NO: 573696 - RNA, 18 nt, Artificial Sequence
  Synthetic
ggaaggauaguggaggag

SEQ ID NO: 573697 - RNA, 19 nt, Artificial Sequence
  Synthetic
gggaaggauaguggaggag

SEQ ID NO: 573698 - RNA, 20 nt, Artificial Sequence
  Synthetic
ugggaaggauaguggaggag

SEQ ID NO: 573699 - RNA, 21 nt, Artificial Sequence
  Synthetic
cugggaaggauaguggaggag

SEQ ID NO: 573700 - RNA, 22 nt, Artificial Sequence
  Synthetic
gcugggaaggauaguggaggag

SEQ ID NO: 573701 - RNA, 23 nt, Artificial Sequence
  Synthetic
ggcugggaaggauaguggaggag

SEQ ID NO: 573702 - RNA, 24 nt, Artificial Sequence
  Synthetic
aggcugggaaggauaguggaggag

SEQ ID NO: 573703 - RNA, 18 nt, Artificial Sequence
  Synthetic
ugugaucauuuggaggag

SEQ ID NO: 573704 - RNA, 19 nt, Artificial Sequence
  Synthetic
uugugaucauuuggaggag

SEQ ID NO: 573705 - RNA, 20 nt, Artificial Sequence
  Synthetic
guugugaucauuuggaggag

SEQ ID NO: 573706 - RNA, 21 nt, Artificial Sequence
  Synthetic
aguugugaucauuuggaggag

SEQ ID NO: 573707 - RNA, 22 nt, Artificial Sequence
  Synthetic
gaguugugaucauuuggaggag

SEQ ID NO: 573708 - RNA, 23 nt, Artificial Sequence
  Synthetic
ggaguugugaucauuuggaggag

SEQ ID NO: 573709 - RNA, 24 nt, Artificial Sequence
  Synthetic
aggaguugugaucauuuggaggag

SEQ ID NO: 573710 - RNA, 18 nt, Artificial Sequence
  Synthetic
ugaauuaaggaugaggag

SEQ ID NO: 573711 - RNA, 19 nt, Artificial Sequence
  Synthetic
cugaauuaaggaugaggag

SEQ ID NO: 573712 - RNA, 20 nt, Artificial Sequence
  Synthetic
acugaauuaaggaugaggag

SEQ ID NO: 573713 - RNA, 21 nt, Artificial Sequence
  Synthetic
aacugaauuaaggaugaggag

SEQ ID NO: 573714 - RNA, 22 nt, Artificial Sequence
  Synthetic
aaacugaauuaaggaugaggag

SEQ ID NO: 573715 - RNA, 23 nt, Artificial Sequence
  Synthetic
caaacugaauuaaggaugaggag

SEQ ID NO: 573716 - RNA, 24 nt, Artificial Sequence
  Synthetic
acaaacugaauuaaggaugaggag

SEQ ID NO: 573717 - RNA, 18 nt, Artificial Sequence
  Synthetic
gggaaaaauacugaggag

SEQ ID NO: 573718 - RNA, 19 nt, Artificial Sequence
  Synthetic
ugggaaaaauacugaggag

SEQ ID NO: 573719 - RNA, 20 nt, Artificial Sequence
  Synthetic
gugggaaaaauacugaggag

SEQ ID NO: 573720 - RNA, 21 nt, Artificial Sequence
  Synthetic
agugggaaaaauacugaggag

SEQ ID NO: 573721 - RNA, 22 nt, Artificial Sequence
  Synthetic
aagugggaaaaauacugaggag

SEQ ID NO: 573722 - RNA, 23 nt, Artificial Sequence
  Synthetic
aaagugggaaaaauacugaggag

SEQ ID NO: 573723 - RNA, 24 nt, Artificial Sequence
  Synthetic
aaaagugggaaaaauacugaggag

SEQ ID NO: 573724 - RNA, 18 nt, Artificial Sequence
  Synthetic
cuuugauuaggugaggag

SEQ ID NO: 573725 - RNA, 19 nt, Artificial Sequence
  Synthetic
ucuuugauuaggugaggag

SEQ ID NO: 573726 - RNA, 20 nt, Artificial Sequence
  Synthetic
aucuuugauuaggugaggag

SEQ ID NO: 573727 - RNA, 21 nt, Artificial Sequence
  Synthetic
caucuuugauuaggugaggag

SEQ ID NO: 573728 - RNA, 22 nt, Artificial Sequence
  Synthetic
ucaucuuugauuaggugaggag

SEQ ID NO: 573729 - RNA, 23 nt, Artificial Sequence
  Synthetic
uucaucuuugauuaggugaggag

SEQ ID NO: 573730 - RNA, 24 nt, Artificial Sequence
  Synthetic
uuucaucuuugauuaggugaggag

SEQ ID NO: 573731 - RNA, 18 nt, Artificial Sequence
  Synthetic
gaggcaaagugugaggag

SEQ ID NO: 573732 - RNA, 19 nt, Artificial Sequence
  Synthetic
ggaggcaaagugugaggag

SEQ ID NO: 573733 - RNA, 20 nt, Artificial Sequence
  Synthetic
uggaggcaaagugugaggag

SEQ ID NO: 573734 - RNA, 21 nt, Artificial Sequence
  Synthetic
uuggaggcaaagugugaggag

SEQ ID NO: 573735 - RNA, 22 nt, Artificial Sequence
  Synthetic
guuggaggcaaagugugaggag

SEQ ID NO: 573736 - RNA, 23 nt, Artificial Sequence
  Synthetic
aguuggaggcaaagugugaggag

SEQ ID NO: 573737 - RNA, 24 nt, Artificial Sequence
  Synthetic
aaguuggaggcaaagugugaggag

SEQ ID NO: 573738 - RNA, 18 nt, Artificial Sequence
  Synthetic
agagaucagaaauaggag

SEQ ID NO: 573739 - RNA, 19 nt, Artificial Sequence
  Synthetic
cagagaucagaaauaggag

SEQ ID NO: 573740 - RNA, 20 nt, Artificial Sequence
  Synthetic
ccagagaucagaaauaggag

SEQ ID NO: 573741 - RNA, 21 nt, Artificial Sequence
  Synthetic
accagagaucagaaauaggag

SEQ ID NO: 573742 - RNA, 22 nt, Artificial Sequence
  Synthetic
uaccagagaucagaaauaggag

SEQ ID NO: 573743 - RNA, 23 nt, Artificial Sequence
  Synthetic
uuaccagagaucagaaauaggag

SEQ ID NO: 573744 - RNA, 24 nt, Artificial Sequence
  Synthetic
guuaccagagaucagaaauaggag

SEQ ID NO: 573745 - RNA, 18 nt, Artificial Sequence
  Synthetic
aauaggaauaaauaggag

SEQ ID NO: 573746 - RNA, 19 nt, Artificial Sequence
  Synthetic
aaauaggaauaaauaggag

SEQ ID NO: 573747 - RNA, 20 nt, Artificial Sequence
  Synthetic
uaaauaggaauaaauaggag

SEQ ID NO: 573748 - RNA, 21 nt, Artificial Sequence
  Synthetic
auaaauaggaauaaauaggag

SEQ ID NO: 573749 - RNA, 22 nt, Artificial Sequence
  Synthetic
aauaaauaggaauaaauaggag

SEQ ID NO: 573750 - RNA, 23 nt, Artificial Sequence
  Synthetic
aaauaaauaggaauaaauaggag

SEQ ID NO: 573751 - RNA, 24 nt, Artificial Sequence
  Synthetic
gaaauaaauaggaauaaauaggag

SEQ ID NO: 573752 - RNA, 18 nt, Artificial Sequence
  Synthetic
agugaaaagcaauaggag

SEQ ID NO: 573753 - RNA, 19 nt, Artificial Sequence
  Synthetic
cagugaaaagcaauaggag

SEQ ID NO: 573754 - RNA, 20 nt, Artificial Sequence
  Synthetic
acagugaaaagcaauaggag

SEQ ID NO: 573755 - RNA, 21 nt, Artificial Sequence
  Synthetic
aacagugaaaagcaauaggag

SEQ ID NO: 573756 - RNA, 22 nt, Artificial Sequence
  Synthetic
aaacagugaaaagcaauaggag

SEQ ID NO: 573757 - RNA, 23 nt, Artificial Sequence
  Synthetic
gaaacagugaaaagcaauaggag

SEQ ID NO: 573758 - RNA, 24 nt, Artificial Sequence
  Synthetic
ggaaacagugaaaagcaauaggag

SEQ ID NO: 573759 - RNA, 18 nt, Artificial Sequence
  Synthetic
cuucuuaggcaauaggag

SEQ ID NO: 573760 - RNA, 19 nt, Artificial Sequence
  Synthetic
gcuucuuaggcaauaggag

SEQ ID NO: 573761 - RNA, 20 nt, Artificial Sequence
  Synthetic
ggcuucuuaggcaauaggag

SEQ ID NO: 573762 - RNA, 21 nt, Artificial Sequence
  Synthetic
gggcuucuuaggcaauaggag

SEQ ID NO: 573763 - RNA, 22 nt, Artificial Sequence
  Synthetic
ugggcuucuuaggcaauaggag

SEQ ID NO: 573764 - RNA, 23 nt, Artificial Sequence
  Synthetic
uugggcuucuuaggcaauaggag

SEQ ID NO: 573765 - RNA, 24 nt, Artificial Sequence
  Synthetic
guugggcuucuuaggcaauaggag

SEQ ID NO: 573766 - RNA, 18 nt, Artificial Sequence
  Synthetic
gauuaaguauuauaggag

SEQ ID NO: 573767 - RNA, 19 nt, Artificial Sequence
  Synthetic
ugauuaaguauuauaggag

SEQ ID NO: 573768 - RNA, 20 nt, Artificial Sequence
  Synthetic
augauuaaguauuauaggag

SEQ ID NO: 573769 - RNA, 21 nt, Artificial Sequence
  Synthetic
uaugauuaaguauuauaggag

SEQ ID NO: 573770 - RNA, 22 nt, Artificial Sequence
  Synthetic
uuaugauuaaguauuauaggag

SEQ ID NO: 573771 - RNA, 23 nt, Artificial Sequence
  Synthetic
auuaugauuaaguauuauaggag

SEQ ID NO: 573772 - RNA, 24 nt, Artificial Sequence
  Synthetic
gauuaugauuaaguauuauaggag

SEQ ID NO: 573773 - RNA, 18 nt, Artificial Sequence
  Synthetic
gaugcuaucaccuaggag

SEQ ID NO: 573774 - RNA, 19 nt, Artificial Sequence
  Synthetic
ggaugcuaucaccuaggag

SEQ ID NO: 573775 - RNA, 20 nt, Artificial Sequence
  Synthetic
uggaugcuaucaccuaggag

SEQ ID NO: 573776 - RNA, 21 nt, Artificial Sequence
  Synthetic
auggaugcuaucaccuaggag

SEQ ID NO: 573777 - RNA, 22 nt, Artificial Sequence
  Synthetic
aauggaugcuaucaccuaggag

SEQ ID NO: 573778 - RNA, 23 nt, Artificial Sequence
  Synthetic
aaauggaugcuaucaccuaggag

SEQ ID NO: 573779 - RNA, 24 nt, Artificial Sequence
  Synthetic
gaaauggaugcuaucaccuaggag

SEQ ID NO: 573780 - RNA, 18 nt, Artificial Sequence
  Synthetic
acagauuguuccuaggag

SEQ ID NO: 573781 - RNA, 19 nt, Artificial Sequence
  Synthetic
gacagauuguuccuaggag

SEQ ID NO: 573782 - RNA, 20 nt, Artificial Sequence
  Synthetic
agacagauuguuccuaggag

SEQ ID NO: 573783 - RNA, 21 nt, Artificial Sequence
  Synthetic
gagacagauuguuccuaggag

SEQ ID NO: 573784 - RNA, 22 nt, Artificial Sequence
  Synthetic
agagacagauuguuccuaggag

SEQ ID NO: 573785 - RNA, 23 nt, Artificial Sequence
  Synthetic
gagagacagauuguuccuaggag

SEQ ID NO: 573786 - RNA, 24 nt, Artificial Sequence
  Synthetic
ggagagacagauuguuccuaggag

SEQ ID NO: 573787 - RNA, 18 nt, Artificial Sequence
  Synthetic
auuuguugucucuaggag

SEQ ID NO: 573788 - RNA, 19 nt, Artificial Sequence
  Synthetic
gauuuguugucucuaggag

SEQ ID NO: 573789 - RNA, 20 nt, Artificial Sequence
  Synthetic
ggauuuguugucucuaggag

SEQ ID NO: 573790 - RNA, 21 nt, Artificial Sequence
  Synthetic
uggauuuguugucucuaggag

SEQ ID NO: 573791 - RNA, 22 nt, Artificial Sequence
  Synthetic
cuggauuuguugucucuaggag

SEQ ID NO: 573792 - RNA, 23 nt, Artificial Sequence
  Synthetic
ucuggauuuguugucucuaggag

SEQ ID NO: 573793 - RNA, 24 nt, Artificial Sequence
  Synthetic
aucuggauuuguugucucuaggag

SEQ ID NO: 573794 - RNA, 18 nt, Artificial Sequence
  Synthetic
uguucauuuuaguaggag

SEQ ID NO: 573795 - RNA, 19 nt, Artificial Sequence
  Synthetic
cuguucauuuuaguaggag

SEQ ID NO: 573796 - RNA, 20 nt, Artificial Sequence
  Synthetic
gcuguucauuuuaguaggag

SEQ ID NO: 573797 - RNA, 21 nt, Artificial Sequence
  Synthetic
agcuguucauuuuaguaggag

SEQ ID NO: 573798 - RNA, 22 nt, Artificial Sequence
  Synthetic
uagcuguucauuuuaguaggag

SEQ ID NO: 573799 - RNA, 23 nt, Artificial Sequence
  Synthetic
cuagcuguucauuuuaguaggag

SEQ ID NO: 573800 - RNA, 24 nt, Artificial Sequence
  Synthetic
gcuagcuguucauuuuaguaggag

SEQ ID NO: 573801 - RNA, 18 nt, Artificial Sequence
  Synthetic
gggaggugagcguaggag

SEQ ID NO: 573802 - RNA, 19 nt, Artificial Sequence
  Synthetic
ugggaggugagcguaggag

SEQ ID NO: 573803 - RNA, 20 nt, Artificial Sequence
  Synthetic
uugggaggugagcguaggag

SEQ ID NO: 573804 - RNA, 21 nt, Artificial Sequence
  Synthetic
cuugggaggugagcguaggag

SEQ ID NO: 573805 - RNA, 22 nt, Artificial Sequence
  Synthetic
gcuugggaggugagcguaggag

SEQ ID NO: 573806 - RNA, 23 nt, Artificial Sequence
  Synthetic
agcuugggaggugagcguaggag

SEQ ID NO: 573807 - RNA, 24 nt, Artificial Sequence
  Synthetic
cagcuugggaggugagcguaggag

SEQ ID NO: 573808 - RNA, 18 nt, Artificial Sequence
  Synthetic
ugcaggauuagguaggag

SEQ ID NO: 573809 - RNA, 19 nt, Artificial Sequence
  Synthetic
cugcaggauuagguaggag

SEQ ID NO: 573810 - RNA, 20 nt, Artificial Sequence
  Synthetic
ucugcaggauuagguaggag

SEQ ID NO: 573811 - RNA, 21 nt, Artificial Sequence
  Synthetic
gucugcaggauuagguaggag

SEQ ID NO: 573812 - RNA, 22 nt, Artificial Sequence
  Synthetic
agucugcaggauuagguaggag

SEQ ID NO: 573813 - RNA, 23 nt, Artificial Sequence
  Synthetic
uagucugcaggauuagguaggag

SEQ ID NO: 573814 - RNA, 24 nt, Artificial Sequence
  Synthetic
guagucugcaggauuagguaggag

SEQ ID NO: 573815 - RNA, 18 nt, Artificial Sequence
  Synthetic
cacuuggaaggguaggag

SEQ ID NO: 573816 - RNA, 19 nt, Artificial Sequence
  Synthetic
acacuuggaaggguaggag

SEQ ID NO: 573817 - RNA, 20 nt, Artificial Sequence
  Synthetic
aacacuuggaaggguaggag

SEQ ID NO: 573818 - RNA, 21 nt, Artificial Sequence
  Synthetic
aaacacuuggaaggguaggag

SEQ ID NO: 573819 - RNA, 22 nt, Artificial Sequence
  Synthetic
aaaacacuuggaaggguaggag

SEQ ID NO: 573820 - RNA, 23 nt, Artificial Sequence
  Synthetic
gaaaacacuuggaaggguaggag

SEQ ID NO: 573821 - RNA, 24 nt, Artificial Sequence
  Synthetic
ggaaaacacuuggaaggguaggag

SEQ ID NO: 573822 - RNA, 18 nt, Artificial Sequence
  Synthetic
aggguauucaauuaggag

SEQ ID NO: 573823 - RNA, 19 nt, Artificial Sequence
  Synthetic
aaggguauucaauuaggag

SEQ ID NO: 573824 - RNA, 20 nt, Artificial Sequence
  Synthetic
aaaggguauucaauuaggag

SEQ ID NO: 573825 - RNA, 21 nt, Artificial Sequence
  Synthetic
uaaaggguauucaauuaggag

SEQ ID NO: 573826 - RNA, 22 nt, Artificial Sequence
  Synthetic
auaaaggguauucaauuaggag

SEQ ID NO: 573827 - RNA, 23 nt, Artificial Sequence
  Synthetic
aauaaaggguauucaauuaggag

SEQ ID NO: 573828 - RNA, 24 nt, Artificial Sequence
  Synthetic
aaauaaaggguauucaauuaggag

SEQ ID NO: 573829 - RNA, 18 nt, Artificial Sequence
  Synthetic
aggcaaugguauuaggag

SEQ ID NO: 573830 - RNA, 19 nt, Artificial Sequence
  Synthetic
aaggcaaugguauuaggag

SEQ ID NO: 573831 - RNA, 20 nt, Artificial Sequence
  Synthetic
uaaggcaaugguauuaggag

SEQ ID NO: 573832 - RNA, 21 nt, Artificial Sequence
  Synthetic
cuaaggcaaugguauuaggag

SEQ ID NO: 573833 - RNA, 22 nt, Artificial Sequence
  Synthetic
ccuaaggcaaugguauuaggag

SEQ ID NO: 573834 - RNA, 23 nt, Artificial Sequence
  Synthetic
accuaaggcaaugguauuaggag

SEQ ID NO: 573835 - RNA, 24 nt, Artificial Sequence
  Synthetic
caccuaaggcaaugguauuaggag

SEQ ID NO: 573836 - RNA, 18 nt, Artificial Sequence
  Synthetic
auggugugaacuuaggag

SEQ ID NO: 573837 - RNA, 19 nt, Artificial Sequence
  Synthetic
aauggugugaacuuaggag

SEQ ID NO: 573838 - RNA, 20 nt, Artificial Sequence
  Synthetic
gaauggugugaacuuaggag

SEQ ID NO: 573839 - RNA, 21 nt, Artificial Sequence
  Synthetic
agaauggugugaacuuaggag

SEQ ID NO: 573840 - RNA, 22 nt, Artificial Sequence
  Synthetic
gagaauggugugaacuuaggag

SEQ ID NO: 573841 - RNA, 23 nt, Artificial Sequence
  Synthetic
ggagaauggugugaacuuaggag

SEQ ID NO: 573842 - RNA, 24 nt, Artificial Sequence
  Synthetic
aggagaauggugugaacuuaggag

SEQ ID NO: 573843 - RNA, 18 nt, Artificial Sequence
  Synthetic
ggaugcaagaguuaggag

SEQ ID NO: 573844 - RNA, 19 nt, Artificial Sequence
  Synthetic
uggaugcaagaguuaggag

SEQ ID NO: 573845 - RNA, 20 nt, Artificial Sequence
  Synthetic
uuggaugcaagaguuaggag

SEQ ID NO: 573846 - RNA, 21 nt, Artificial Sequence
  Synthetic
auuggaugcaagaguuaggag

SEQ ID NO: 573847 - RNA, 22 nt, Artificial Sequence
  Synthetic
aauuggaugcaagaguuaggag

SEQ ID NO: 573848 - RNA, 23 nt, Artificial Sequence
  Synthetic
uaauuggaugcaagaguuaggag

SEQ ID NO: 573849 - RNA, 24 nt, Artificial Sequence
  Synthetic
uuaauuggaugcaagaguuaggag

SEQ ID NO: 573850 - RNA, 18 nt, Artificial Sequence
  Synthetic
guauagcaguuuuaggag

SEQ ID NO: 573851 - RNA, 19 nt, Artificial Sequence
  Synthetic
aguauagcaguuuuaggag

SEQ ID NO: 573852 - RNA, 20 nt, Artificial Sequence
  Synthetic
caguauagcaguuuuaggag

SEQ ID NO: 573853 - RNA, 21 nt, Artificial Sequence
  Synthetic
acaguauagcaguuuuaggag

SEQ ID NO: 573854 - RNA, 22 nt, Artificial Sequence
  Synthetic
cacaguauagcaguuuuaggag

SEQ ID NO: 573855 - RNA, 23 nt, Artificial Sequence
  Synthetic
ucacaguauagcaguuuuaggag

SEQ ID NO: 573856 - RNA, 24 nt, Artificial Sequence
  Synthetic
uucacaguauagcaguuuuaggag

SEQ ID NO: 573857 - RNA, 18 nt, Artificial Sequence
  Synthetic
uucugggguuucacggag

SEQ ID NO: 573858 - RNA, 19 nt, Artificial Sequence
  Synthetic
cuucugggguuucacggag

SEQ ID NO: 573859 - RNA, 20 nt, Artificial Sequence
  Synthetic
acuucugggguuucacggag

SEQ ID NO: 573860 - RNA, 21 nt, Artificial Sequence
  Synthetic
cacuucugggguuucacggag

SEQ ID NO: 573861 - RNA, 22 nt, Artificial Sequence
  Synthetic
ucacuucugggguuucacggag

SEQ ID NO: 573862 - RNA, 23 nt, Artificial Sequence
  Synthetic
aucacuucugggguuucacggag

SEQ ID NO: 573863 - RNA, 24 nt, Artificial Sequence
  Synthetic
uaucacuucugggguuucacggag

SEQ ID NO: 573864 - RNA, 18 nt, Artificial Sequence
  Synthetic
cucaugaguaaagcggag

SEQ ID NO: 573865 - RNA, 19 nt, Artificial Sequence
  Synthetic
acucaugaguaaagcggag

SEQ ID NO: 573866 - RNA, 20 nt, Artificial Sequence
  Synthetic
uacucaugaguaaagcggag

SEQ ID NO: 573867 - RNA, 21 nt, Artificial Sequence
  Synthetic
uuacucaugaguaaagcggag

SEQ ID NO: 573868 - RNA, 22 nt, Artificial Sequence
  Synthetic
auuacucaugaguaaagcggag

SEQ ID NO: 573869 - RNA, 23 nt, Artificial Sequence
  Synthetic
aauuacucaugaguaaagcggag

SEQ ID NO: 573870 - RNA, 24 nt, Artificial Sequence
  Synthetic
aaauuacucaugaguaaagcggag

SEQ ID NO: 573871 - RNA, 18 nt, Artificial Sequence
  Synthetic
guugggagaggagcggag

SEQ ID NO: 573872 - RNA, 19 nt, Artificial Sequence
  Synthetic
gguugggagaggagcggag

SEQ ID NO: 573873 - RNA, 20 nt, Artificial Sequence
  Synthetic
agguugggagaggagcggag

SEQ ID NO: 573874 - RNA, 21 nt, Artificial Sequence
  Synthetic
aagguugggagaggagcggag

SEQ ID NO: 573875 - RNA, 22 nt, Artificial Sequence
  Synthetic
aaagguugggagaggagcggag

SEQ ID NO: 573876 - RNA, 23 nt, Artificial Sequence
  Synthetic
aaaagguugggagaggagcggag

SEQ ID NO: 573877 - RNA, 24 nt, Artificial Sequence
  Synthetic
aaaaagguugggagaggagcggag

SEQ ID NO: 573878 - RNA, 18 nt, Artificial Sequence
  Synthetic
agaggucaagaggcggag

SEQ ID NO: 573879 - RNA, 19 nt, Artificial Sequence
  Synthetic
uagaggucaagaggcggag

SEQ ID NO: 573880 - RNA, 20 nt, Artificial Sequence
  Synthetic
uuagaggucaagaggcggag

SEQ ID NO: 573881 - RNA, 21 nt, Artificial Sequence
  Synthetic
cuuagaggucaagaggcggag

SEQ ID NO: 573882 - RNA, 22 nt, Artificial Sequence
  Synthetic
ccuuagaggucaagaggcggag

SEQ ID NO: 573883 - RNA, 23 nt, Artificial Sequence
  Synthetic
gccuuagaggucaagaggcggag

SEQ ID NO: 573884 - RNA, 24 nt, Artificial Sequence
  Synthetic
ugccuuagaggucaagaggcggag

SEQ ID NO: 573885 - RNA, 18 nt, Artificial Sequence
  Synthetic
uauucucagguuucggag

SEQ ID NO: 573886 - RNA, 19 nt, Artificial Sequence
  Synthetic
auauucucagguuucggag

SEQ ID NO: 573887 - RNA, 20 nt, Artificial Sequence
  Synthetic
aauauucucagguuucggag

SEQ ID NO: 573888 - RNA, 21 nt, Artificial Sequence
  Synthetic
aaauauucucagguuucggag

SEQ ID NO: 573889 - RNA, 22 nt, Artificial Sequence
  Synthetic
gaaauauucucagguuucggag

SEQ ID NO: 573890 - RNA, 23 nt, Artificial Sequence
  Synthetic
ggaaauauucucagguuucggag

SEQ ID NO: 573891 - RNA, 24 nt, Artificial Sequence
  Synthetic
gggaaauauucucagguuucggag

SEQ ID NO: 573892 - RNA, 18 nt, Artificial Sequence
  Synthetic
cacugcugggaaagggag

SEQ ID NO: 573893 - RNA, 19 nt, Artificial Sequence
  Synthetic
acacugcugggaaagggag

SEQ ID NO: 573894 - RNA, 20 nt, Artificial Sequence
  Synthetic
uacacugcugggaaagggag

SEQ ID NO: 573895 - RNA, 21 nt, Artificial Sequence
  Synthetic
guacacugcugggaaagggag

SEQ ID NO: 573896 - RNA, 22 nt, Artificial Sequence
  Synthetic
uguacacugcugggaaagggag

SEQ ID NO: 573897 - RNA, 23 nt, Artificial Sequence
  Synthetic
cuguacacugcugggaaagggag

SEQ ID NO: 573898 - RNA, 24 nt, Artificial Sequence
  Synthetic
ucuguacacugcugggaaagggag

SEQ ID NO: 573899 - RNA, 18 nt, Artificial Sequence
  Synthetic
uguugaauggaaagggag

SEQ ID NO: 573900 - RNA, 19 nt, Artificial Sequence
  Synthetic
uuguugaauggaaagggag

SEQ ID NO: 573901 - RNA, 20 nt, Artificial Sequence
  Synthetic
uuuguugaauggaaagggag

SEQ ID NO: 573902 - RNA, 21 nt, Artificial Sequence
  Synthetic
cuuuguugaauggaaagggag

SEQ ID NO: 573903 - RNA, 22 nt, Artificial Sequence
  Synthetic
ucuuuguugaauggaaagggag

SEQ ID NO: 573904 - RNA, 23 nt, Artificial Sequence
  Synthetic
uucuuuguugaauggaaagggag

SEQ ID NO: 573905 - RNA, 24 nt, Artificial Sequence
  Synthetic
uuucuuuguugaauggaaagggag

SEQ ID NO: 573906 - RNA, 18 nt, Artificial Sequence
  Synthetic
cauacaaaaagaagggag

SEQ ID NO: 573907 - RNA, 19 nt, Artificial Sequence
  Synthetic
ucauacaaaaagaagggag

SEQ ID NO: 573908 - RNA, 20 nt, Artificial Sequence
  Synthetic
uucauacaaaaagaagggag

SEQ ID NO: 573909 - RNA, 21 nt, Artificial Sequence
  Synthetic
uuucauacaaaaagaagggag

SEQ ID NO: 573910 - RNA, 22 nt, Artificial Sequence
  Synthetic
guuucauacaaaaagaagggag

SEQ ID NO: 573911 - RNA, 23 nt, Artificial Sequence
  Synthetic
aguuucauacaaaaagaagggag

SEQ ID NO: 573912 - RNA, 24 nt, Artificial Sequence
  Synthetic
aaguuucauacaaaaagaagggag

SEQ ID NO: 573913 - RNA, 18 nt, Artificial Sequence
  Synthetic
aagguuagaggaagggag

SEQ ID NO: 573914 - RNA, 19 nt, Artificial Sequence
  Synthetic
caagguuagaggaagggag

SEQ ID NO: 573915 - RNA, 20 nt, Artificial Sequence
  Synthetic
ucaagguuagaggaagggag

SEQ ID NO: 573916 - RNA, 21 nt, Artificial Sequence
  Synthetic
uucaagguuagaggaagggag

SEQ ID NO: 573917 - RNA, 22 nt, Artificial Sequence
  Synthetic
auucaagguuagaggaagggag

SEQ ID NO: 573918 - RNA, 23 nt, Artificial Sequence
  Synthetic
uauucaagguuagaggaagggag

SEQ ID NO: 573919 - RNA, 24 nt, Artificial Sequence
  Synthetic
uuauucaagguuagaggaagggag

SEQ ID NO: 573920 - RNA, 18 nt, Artificial Sequence
  Synthetic
uaaccaagauuaagggag

SEQ ID NO: 573921 - RNA, 19 nt, Artificial Sequence
  Synthetic
uuaaccaagauuaagggag

SEQ ID NO: 573922 - RNA, 20 nt, Artificial Sequence
  Synthetic
auuaaccaagauuaagggag

SEQ ID NO: 573923 - RNA, 21 nt, Artificial Sequence
  Synthetic
cauuaaccaagauuaagggag

SEQ ID NO: 573924 - RNA, 22 nt, Artificial Sequence
  Synthetic
acauuaaccaagauuaagggag

SEQ ID NO: 573925 - RNA, 23 nt, Artificial Sequence
  Synthetic
gacauuaaccaagauuaagggag

SEQ ID NO: 573926 - RNA, 24 nt, Artificial Sequence
  Synthetic
ugacauuaaccaagauuaagggag

SEQ ID NO: 573927 - RNA, 18 nt, Artificial Sequence
  Synthetic
acacauggacacagggag

SEQ ID NO: 573928 - RNA, 19 nt, Artificial Sequence
  Synthetic
aacacauggacacagggag

SEQ ID NO: 573929 - RNA, 20 nt, Artificial Sequence
  Synthetic
gaacacauggacacagggag

SEQ ID NO: 573930 - RNA, 21 nt, Artificial Sequence
  Synthetic
agaacacauggacacagggag

SEQ ID NO: 573931 - RNA, 22 nt, Artificial Sequence
  Synthetic
gagaacacauggacacagggag

SEQ ID NO: 573932 - RNA, 23 nt, Artificial Sequence
  Synthetic
ugagaacacauggacacagggag

SEQ ID NO: 573933 - RNA, 24 nt, Artificial Sequence
  Synthetic
augagaacacauggacacagggag

SEQ ID NO: 573934 - RNA, 24 nt, Artificial Sequence
  Synthetic
gugagaacacauggacacagggag

SEQ ID NO: 573935 - RNA, 18 nt, Artificial Sequence
  Synthetic
acauauggacacagggag

SEQ ID NO: 573936 - RNA, 19 nt, Artificial Sequence
  Synthetic
aacauauggacacagggag

SEQ ID NO: 573937 - RNA, 20 nt, Artificial Sequence
  Synthetic
aaacauauggacacagggag

SEQ ID NO: 573938 - RNA, 21 nt, Artificial Sequence
  Synthetic
aaaacauauggacacagggag

SEQ ID NO: 573939 - RNA, 22 nt, Artificial Sequence
  Synthetic
gaaaacauauggacacagggag

SEQ ID NO: 573940 - RNA, 23 nt, Artificial Sequence
  Synthetic
ugaaaacauauggacacagggag

SEQ ID NO: 573941 - RNA, 24 nt, Artificial Sequence
  Synthetic
augaaaacauauggacacagggag

SEQ ID NO: 573942 - RNA, 18 nt, Artificial Sequence
  Synthetic
agugacagagacagggag

SEQ ID NO: 573943 - RNA, 19 nt, Artificial Sequence
  Synthetic
gagugacagagacagggag

SEQ ID NO: 573944 - RNA, 20 nt, Artificial Sequence
  Synthetic
agagugacagagacagggag

SEQ ID NO: 573945 - RNA, 21 nt, Artificial Sequence
  Synthetic
gagagugacagagacagggag

SEQ ID NO: 573946 - RNA, 22 nt, Artificial Sequence
  Synthetic
ggagagugacagagacagggag

SEQ ID NO: 573947 - RNA, 23 nt, Artificial Sequence
  Synthetic
aggagagugacagagacagggag

SEQ ID NO: 573948 - RNA, 24 nt, Artificial Sequence
  Synthetic
aaggagagugacagagacagggag

SEQ ID NO: 573949 - RNA, 18 nt, Artificial Sequence
  Synthetic
agugcauaucccagggag

SEQ ID NO: 573950 - RNA, 19 nt, Artificial Sequence
  Synthetic
cagugcauaucccagggag

SEQ ID NO: 573951 - RNA, 20 nt, Artificial Sequence
  Synthetic
acagugcauaucccagggag

SEQ ID NO: 573952 - RNA, 21 nt, Artificial Sequence
  Synthetic
aacagugcauaucccagggag

SEQ ID NO: 573953 - RNA, 22 nt, Artificial Sequence
  Synthetic
aaacagugcauaucccagggag

SEQ ID NO: 573954 - RNA, 23 nt, Artificial Sequence
  Synthetic
caaacagugcauaucccagggag

SEQ ID NO: 573955 - RNA, 24 nt, Artificial Sequence
  Synthetic
gcaaacagugcauaucccagggag

SEQ ID NO: 573956 - RNA, 18 nt, Artificial Sequence
  Synthetic
gugcucugucccagggag

SEQ ID NO: 573957 - RNA, 19 nt, Artificial Sequence
  Synthetic
ggugcucugucccagggag

SEQ ID NO: 573958 - RNA, 20 nt, Artificial Sequence
  Synthetic
uggugcucugucccagggag

SEQ ID NO: 573959 - RNA, 21 nt, Artificial Sequence
  Synthetic
guggugcucugucccagggag

SEQ ID NO: 573960 - RNA, 22 nt, Artificial Sequence
  Synthetic
cguggugcucugucccagggag

SEQ ID NO: 573961 - RNA, 23 nt, Artificial Sequence
  Synthetic
ccguggugcucugucccagggag

SEQ ID NO: 573962 - RNA, 24 nt, Artificial Sequence
  Synthetic
cccguggugcucugucccagggag

SEQ ID NO: 573963 - RNA, 18 nt, Artificial Sequence
  Synthetic
aaucagggagccagggag

SEQ ID NO: 573964 - RNA, 19 nt, Artificial Sequence
  Synthetic
aaaucagggagccagggag

SEQ ID NO: 573965 - RNA, 20 nt, Artificial Sequence
  Synthetic
uaaaucagggagccagggag

SEQ ID NO: 573966 - RNA, 21 nt, Artificial Sequence
  Synthetic
auaaaucagggagccagggag

SEQ ID NO: 573967 - RNA, 22 nt, Artificial Sequence
  Synthetic
aauaaaucagggagccagggag

SEQ ID NO: 573968 - RNA, 23 nt, Artificial Sequence
  Synthetic
aaauaaaucagggagccagggag

SEQ ID NO: 573969 - RNA, 24 nt, Artificial Sequence
  Synthetic
uaaauaaaucagggagccagggag

SEQ ID NO: 573970 - RNA, 18 nt, Artificial Sequence
  Synthetic
ugcucucucagcagggag

SEQ ID NO: 573971 - RNA, 19 nt, Artificial Sequence
  Synthetic
augcucucucagcagggag

SEQ ID NO: 573972 - RNA, 20 nt, Artificial Sequence
  Synthetic
uaugcucucucagcagggag

SEQ ID NO: 573973 - RNA, 21 nt, Artificial Sequence
  Synthetic
auaugcucucucagcagggag

SEQ ID NO: 573974 - RNA, 22 nt, Artificial Sequence
  Synthetic
gauaugcucucucagcagggag

SEQ ID NO: 573975 - RNA, 23 nt, Artificial Sequence
  Synthetic
ggauaugcucucucagcagggag

SEQ ID NO: 573976 - RNA, 24 nt, Artificial Sequence
  Synthetic
gggauaugcucucucagcagggag

SEQ ID NO: 573977 - RNA, 18 nt, Artificial Sequence
  Synthetic
uuacuguccaucagggag

SEQ ID NO: 573978 - RNA, 19 nt, Artificial Sequence
  Synthetic
cuuacuguccaucagggag

SEQ ID NO: 573979 - RNA, 20 nt, Artificial Sequence
  Synthetic
gcuuacuguccaucagggag

SEQ ID NO: 573980 - RNA, 21 nt, Artificial Sequence
  Synthetic
ugcuuacuguccaucagggag

SEQ ID NO: 573981 - RNA, 22 nt, Artificial Sequence
  Synthetic
augcuuacuguccaucagggag

SEQ ID NO: 573982 - RNA, 23 nt, Artificial Sequence
  Synthetic
gaugcuuacuguccaucagggag

SEQ ID NO: 573983 - RNA, 24 nt, Artificial Sequence
  Synthetic
ugaugcuuacuguccaucagggag

SEQ ID NO: 573984 - RNA, 18 nt, Artificial Sequence
  Synthetic
gagguggugcagagggag

SEQ ID NO: 573985 - RNA, 19 nt, Artificial Sequence
  Synthetic
ggagguggugcagagggag

SEQ ID NO: 573986 - RNA, 20 nt, Artificial Sequence
  Synthetic
aggagguggugcagagggag

SEQ ID NO: 573987 - RNA, 21 nt, Artificial Sequence
  Synthetic
aaggagguggugcagagggag

SEQ ID NO: 573988 - RNA, 22 nt, Artificial Sequence
  Synthetic
aaaggagguggugcagagggag

SEQ ID NO: 573989 - RNA, 23 nt, Artificial Sequence
  Synthetic
uaaaggagguggugcagagggag

SEQ ID NO: 573990 - RNA, 24 nt, Artificial Sequence
  Synthetic
guaaaggagguggugcagagggag

SEQ ID NO: 573991 - RNA, 18 nt, Artificial Sequence
  Synthetic
agguggucucagagggag

SEQ ID NO: 573992 - RNA, 19 nt, Artificial Sequence
  Synthetic
gagguggucucagagggag

SEQ ID NO: 573993 - RNA, 20 nt, Artificial Sequence
  Synthetic
ugagguggucucagagggag

SEQ ID NO: 573994 - RNA, 21 nt, Artificial Sequence
  Synthetic
cugagguggucucagagggag

SEQ ID NO: 573995 - RNA, 22 nt, Artificial Sequence
  Synthetic
acugagguggucucagagggag

SEQ ID NO: 573996 - RNA, 23 nt, Artificial Sequence
  Synthetic
gacugagguggucucagagggag

SEQ ID NO: 573997 - RNA, 24 nt, Artificial Sequence
  Synthetic
agacugagguggucucagagggag

SEQ ID NO: 573998 - RNA, 18 nt, Artificial Sequence
  Synthetic
aaagguuaagagagggag

SEQ ID NO: 573999 - RNA, 19 nt, Artificial Sequence
  Synthetic
aaaagguuaagagagggag

SEQ ID NO: 574000 - RNA, 20 nt, Artificial Sequence
  Synthetic
caaaagguuaagagagggag

SEQ ID NO: 574001 - RNA, 21 nt, Artificial Sequence
  Synthetic
ccaaaagguuaagagagggag

SEQ ID NO: 574002 - RNA, 22 nt, Artificial Sequence
  Synthetic
accaaaagguuaagagagggag

SEQ ID NO: 574003 - RNA, 23 nt, Artificial Sequence
  Synthetic
uaccaaaagguuaagagagggag

SEQ ID NO: 574004 - RNA, 24 nt, Artificial Sequence
  Synthetic
cuaccaaaagguuaagagagggag

SEQ ID NO: 574005 - RNA, 18 nt, Artificial Sequence
  Synthetic
agagacagggagagggag

SEQ ID NO: 574006 - RNA, 19 nt, Artificial Sequence
  Synthetic
cagagacagggagagggag

SEQ ID NO: 574007 - RNA, 20 nt, Artificial Sequence
  Synthetic
acagagacagggagagggag

SEQ ID NO: 574008 - RNA, 21 nt, Artificial Sequence
  Synthetic
gacagagacagggagagggag

SEQ ID NO: 574009 - RNA, 22 nt, Artificial Sequence
  Synthetic
ugacagagacagggagagggag

SEQ ID NO: 574010 - RNA, 23 nt, Artificial Sequence
  Synthetic
gugacagagacagggagagggag

SEQ ID NO: 574011 - RNA, 24 nt, Artificial Sequence
  Synthetic
agugacagagacagggagagggag

SEQ ID NO: 574012 - RNA, 18 nt, Artificial Sequence
  Synthetic
ggggacuacuagagggag

SEQ ID NO: 574013 - RNA, 19 nt, Artificial Sequence
  Synthetic
uggggacuacuagagggag

SEQ ID NO: 574014 - RNA, 20 nt, Artificial Sequence
  Synthetic
cuggggacuacuagagggag

SEQ ID NO: 574015 - RNA, 21 nt, Artificial Sequence
  Synthetic
ccuggggacuacuagagggag

SEQ ID NO: 574016 - RNA, 22 nt, Artificial Sequence
  Synthetic
cccuggggacuacuagagggag

SEQ ID NO: 574017 - RNA, 23 nt, Artificial Sequence
  Synthetic
acccuggggacuacuagagggag

SEQ ID NO: 574018 - RNA, 24 nt, Artificial Sequence
  Synthetic
gacccuggggacuacuagagggag

SEQ ID NO: 574019 - RNA, 18 nt, Artificial Sequence
  Synthetic
gagaacgauaggagggag

SEQ ID NO: 574020 - RNA, 19 nt, Artificial Sequence
  Synthetic
ggagaacgauaggagggag

SEQ ID NO: 574021 - RNA, 20 nt, Artificial Sequence
  Synthetic
aggagaacgauaggagggag

SEQ ID NO: 574022 - RNA, 21 nt, Artificial Sequence
  Synthetic
aaggagaacgauaggagggag

SEQ ID NO: 574023 - RNA, 22 nt, Artificial Sequence
  Synthetic
gaaggagaacgauaggagggag

SEQ ID NO: 574024 - RNA, 23 nt, Artificial Sequence
  Synthetic
agaaggagaacgauaggagggag

SEQ ID NO: 574025 - RNA, 24 nt, Artificial Sequence
  Synthetic
gagaaggagaacgauaggagggag

SEQ ID NO: 574026 - RNA, 18 nt, Artificial Sequence
  Synthetic
gcauuacuacggagggag

SEQ ID NO: 574027 - RNA, 19 nt, Artificial Sequence
  Synthetic
ggcauuacuacggagggag

SEQ ID NO: 574028 - RNA, 20 nt, Artificial Sequence
  Synthetic
aggcauuacuacggagggag

SEQ ID NO: 574029 - RNA, 21 nt, Artificial Sequence
  Synthetic
caggcauuacuacggagggag

SEQ ID NO: 574030 - RNA, 22 nt, Artificial Sequence
  Synthetic
ucaggcauuacuacggagggag

SEQ ID NO: 574031 - RNA, 23 nt, Artificial Sequence
  Synthetic
cucaggcauuacuacggagggag

SEQ ID NO: 574032 - RNA, 24 nt, Artificial Sequence
  Synthetic
acucaggcauuacuacggagggag

SEQ ID NO: 574033 - RNA, 18 nt, Artificial Sequence
  Synthetic
aaagaaagagggagggag

SEQ ID NO: 574034 - RNA, 19 nt, Artificial Sequence
  Synthetic
aaaagaaagagggagggag

SEQ ID NO: 574035 - RNA, 20 nt, Artificial Sequence
  Synthetic
aaaaagaaagagggagggag

SEQ ID NO: 574036 - RNA, 21 nt, Artificial Sequence
  Synthetic
aaaaaagaaagagggagggag

SEQ ID NO: 574037 - RNA, 22 nt, Artificial Sequence
  Synthetic
aaaaaaagaaagagggagggag

SEQ ID NO: 574038 - RNA, 23 nt, Artificial Sequence
  Synthetic
aaaaaaaagaaagagggagggag

SEQ ID NO: 574039 - RNA, 24 nt, Artificial Sequence
  Synthetic
gaaaaaaaagaaagagggagggag

SEQ ID NO: 574040 - RNA, 18 nt, Artificial Sequence
  Synthetic
aagggaggagggagggag

SEQ ID NO: 574041 - RNA, 19 nt, Artificial Sequence
  Synthetic
aaagggaggagggagggag

SEQ ID NO: 574042 - RNA, 20 nt, Artificial Sequence
  Synthetic
gaaagggaggagggagggag

SEQ ID NO: 574043 - RNA, 21 nt, Artificial Sequence
  Synthetic
ggaaagggaggagggagggag

SEQ ID NO: 574044 - RNA, 22 nt, Artificial Sequence
  Synthetic
uggaaagggaggagggagggag

SEQ ID NO: 574045 - RNA, 23 nt, Artificial Sequence
  Synthetic
auggaaagggaggagggagggag

SEQ ID NO: 574046 - RNA, 24 nt, Artificial Sequence
  Synthetic
aauggaaagggaggagggagggag

SEQ ID NO: 574047 - RNA, 18 nt, Artificial Sequence
  Synthetic
aaugucuagucuagggag

SEQ ID NO: 574048 - RNA, 19 nt, Artificial Sequence
  Synthetic
caaugucuagucuagggag

SEQ ID NO: 574049 - RNA, 20 nt, Artificial Sequence
  Synthetic
gcaaugucuagucuagggag

SEQ ID NO: 574050 - RNA, 21 nt, Artificial Sequence
  Synthetic
ugcaaugucuagucuagggag

SEQ ID NO: 574051 - RNA, 22 nt, Artificial Sequence
  Synthetic
augcaaugucuagucuagggag

SEQ ID NO: 574052 - RNA, 23 nt, Artificial Sequence
  Synthetic
gaugcaaugucuagucuagggag

SEQ ID NO: 574053 - RNA, 24 nt, Artificial Sequence
  Synthetic
ugaugcaaugucuagucuagggag

SEQ ID NO: 574054 - RNA, 18 nt, Artificial Sequence
  Synthetic
agaaauaggaguagggag

SEQ ID NO: 574055 - RNA, 19 nt, Artificial Sequence
  Synthetic
cagaaauaggaguagggag

SEQ ID NO: 574056 - RNA, 20 nt, Artificial Sequence
  Synthetic
ucagaaauaggaguagggag

SEQ ID NO: 574057 - RNA, 21 nt, Artificial Sequence
  Synthetic
aucagaaauaggaguagggag

SEQ ID NO: 574058 - RNA, 22 nt, Artificial Sequence
  Synthetic
gaucagaaauaggaguagggag

SEQ ID NO: 574059 - RNA, 23 nt, Artificial Sequence
  Synthetic
agaucagaaauaggaguagggag

SEQ ID NO: 574060 - RNA, 24 nt, Artificial Sequence
  Synthetic
gagaucagaaauaggaguagggag

SEQ ID NO: 574061 - RNA, 18 nt, Artificial Sequence
  Synthetic
uuggugauguuuagggag

SEQ ID NO: 574062 - RNA, 19 nt, Artificial Sequence
  Synthetic
auuggugauguuuagggag

SEQ ID NO: 574063 - RNA, 20 nt, Artificial Sequence
  Synthetic
uauuggugauguuuagggag

SEQ ID NO: 574064 - RNA, 21 nt, Artificial Sequence
  Synthetic
guauuggugauguuuagggag

SEQ ID NO: 574065 - RNA, 22 nt, Artificial Sequence
  Synthetic
uguauuggugauguuuagggag

SEQ ID NO: 574066 - RNA, 23 nt, Artificial Sequence
  Synthetic
uuguauuggugauguuuagggag

SEQ ID NO: 574067 - RNA, 24 nt, Artificial Sequence
  Synthetic
guuguauuggugauguuuagggag

SEQ ID NO: 574068 - RNA, 21 nt, Artificial Sequence
  Synthetic
agaauggcgugaacccgggag

SEQ ID NO: 574069 - RNA, 22 nt, Artificial Sequence
  Synthetic
gagaauggcgugaacccgggag

SEQ ID NO: 574070 - RNA, 23 nt, Artificial Sequence
  Synthetic
ggagaauggcgugaacccgggag

SEQ ID NO: 574071 - RNA, 24 nt, Artificial Sequence
  Synthetic
aggagaauggcgugaacccgggag

SEQ ID NO: 574072 - RNA, 22 nt, Artificial Sequence
  Synthetic
aagaaucacuugaacccgggag

SEQ ID NO: 574073 - RNA, 23 nt, Artificial Sequence
  Synthetic
caagaaucacuugaacccgggag

SEQ ID NO: 574074 - RNA, 24 nt, Artificial Sequence
  Synthetic
acaagaaucacuugaacccgggag

SEQ ID NO: 574075 - RNA, 23 nt, Artificial Sequence
  Synthetic
gaagaaucacuugaacccgggag

SEQ ID NO: 574076 - RNA, 24 nt, Artificial Sequence
  Synthetic
agaagaaucacuugaacccgggag

SEQ ID NO: 574077 - RNA, 24 nt, Artificial Sequence
  Synthetic
aggagaaucacuugaacccgggag

SEQ ID NO: 574078 - RNA, 21 nt, Artificial Sequence
  Synthetic
agaauugcuugaacccgggag

SEQ ID NO: 574079 - RNA, 22 nt, Artificial Sequence
  Synthetic
gagaauugcuugaacccgggag

SEQ ID NO: 574080 - RNA, 23 nt, Artificial Sequence
  Synthetic
ggagaauugcuugaacccgggag

SEQ ID NO: 574081 - RNA, 24 nt, Artificial Sequence
  Synthetic
aggagaauugcuugaacccgggag

SEQ ID NO: 574082 - RNA, 18 nt, Artificial Sequence
  Synthetic
uaaaagagaugccgggag

SEQ ID NO: 574083 - RNA, 19 nt, Artificial Sequence
  Synthetic
uuaaaagagaugccgggag

SEQ ID NO: 574084 - RNA, 20 nt, Artificial Sequence
  Synthetic
uuuaaaagagaugccgggag

SEQ ID NO: 574085 - RNA, 21 nt, Artificial Sequence
  Synthetic
uuuuaaaagagaugccgggag

SEQ ID NO: 574086 - RNA, 22 nt, Artificial Sequence
  Synthetic
cuuuuaaaagagaugccgggag

SEQ ID NO: 574087 - RNA, 23 nt, Artificial Sequence
  Synthetic
ucuuuuaaaagagaugccgggag

SEQ ID NO: 574088 - RNA, 24 nt, Artificial Sequence
  Synthetic
uucuuuuaaaagagaugccgggag

SEQ ID NO: 574089 - RNA, 21 nt, Artificial Sequence
  Synthetic
agaaucacuugaacucgggag

SEQ ID NO: 574090 - RNA, 22 nt, Artificial Sequence
  Synthetic
gagaaucacuugaacucgggag

SEQ ID NO: 574091 - RNA, 23 nt, Artificial Sequence
  Synthetic
ggagaaucacuugaacucgggag

SEQ ID NO: 574092 - RNA, 24 nt, Artificial Sequence
  Synthetic
aggagaaucacuugaacucgggag

SEQ ID NO: 574093 - RNA, 18 nt, Artificial Sequence
  Synthetic
uguccuacccaaggggag

SEQ ID NO: 574094 - RNA, 19 nt, Artificial Sequence
  Synthetic
guguccuacccaaggggag

SEQ ID NO: 574095 - RNA, 20 nt, Artificial Sequence
  Synthetic
gguguccuacccaaggggag

SEQ ID NO: 574096 - RNA, 21 nt, Artificial Sequence
  Synthetic
agguguccuacccaaggggag

SEQ ID NO: 574097 - RNA, 22 nt, Artificial Sequence
  Synthetic
gagguguccuacccaaggggag

SEQ ID NO: 574098 - RNA, 23 nt, Artificial Sequence
  Synthetic
ggagguguccuacccaaggggag

SEQ ID NO: 574099 - RNA, 24 nt, Artificial Sequence
  Synthetic
uggagguguccuacccaaggggag

SEQ ID NO: 574100 - RNA, 18 nt, Artificial Sequence
  Synthetic
gagggaagggaaggggag

SEQ ID NO: 574101 - RNA, 19 nt, Artificial Sequence
  Synthetic
ggagggaagggaaggggag

SEQ ID NO: 574102 - RNA, 20 nt, Artificial Sequence
  Synthetic
gggagggaagggaaggggag

SEQ ID NO: 574103 - RNA, 21 nt, Artificial Sequence
  Synthetic
ggggagggaagggaaggggag

SEQ ID NO: 574104 - RNA, 22 nt, Artificial Sequence
  Synthetic
aggggagggaagggaaggggag

SEQ ID NO: 574105 - RNA, 23 nt, Artificial Sequence
  Synthetic
gaggggagggaagggaaggggag

SEQ ID NO: 574106 - RNA, 24 nt, Artificial Sequence
  Synthetic
agaggggagggaagggaaggggag

SEQ ID NO: 574107 - RNA, 18 nt, Artificial Sequence
  Synthetic
ucucagugggaaggggag

SEQ ID NO: 574108 - RNA, 19 nt, Artificial Sequence
  Synthetic
cucucagugggaaggggag

SEQ ID NO: 574109 - RNA, 20 nt, Artificial Sequence
  Synthetic
gcucucagugggaaggggag

SEQ ID NO: 574110 - RNA, 21 nt, Artificial Sequence
  Synthetic
ggcucucagugggaaggggag

SEQ ID NO: 574111 - RNA, 22 nt, Artificial Sequence
  Synthetic
uggcucucagugggaaggggag

SEQ ID NO: 574112 - RNA, 23 nt, Artificial Sequence
  Synthetic
guggcucucagugggaaggggag

SEQ ID NO: 574113 - RNA, 24 nt, Artificial Sequence
  Synthetic
aguggcucucagugggaaggggag

SEQ ID NO: 574114 - RNA, 18 nt, Artificial Sequence
  Synthetic
aagggaaggggaggggag

SEQ ID NO: 574115 - RNA, 19 nt, Artificial Sequence
  Synthetic
gaagggaaggggaggggag

SEQ ID NO: 574116 - RNA, 20 nt, Artificial Sequence
  Synthetic
ggaagggaaggggaggggag

SEQ ID NO: 574117 - RNA, 21 nt, Artificial Sequence
  Synthetic
gggaagggaaggggaggggag

SEQ ID NO: 574118 - RNA, 22 nt, Artificial Sequence
  Synthetic
agggaagggaaggggaggggag

SEQ ID NO: 574119 - RNA, 23 nt, Artificial Sequence
  Synthetic
gagggaagggaaggggaggggag

SEQ ID NO: 574120 - RNA, 24 nt, Artificial Sequence
  Synthetic
ggagggaagggaaggggaggggag

SEQ ID NO: 574121 - RNA, 18 nt, Artificial Sequence
  Synthetic
aaggggaggggaggggag

SEQ ID NO: 574122 - RNA, 19 nt, Artificial Sequence
  Synthetic
gaaggggaggggaggggag

SEQ ID NO: 574123 - RNA, 20 nt, Artificial Sequence
  Synthetic
ggaaggggaggggaggggag

SEQ ID NO: 574124 - RNA, 21 nt, Artificial Sequence
  Synthetic
gggaaggggaggggaggggag

SEQ ID NO: 574125 - RNA, 22 nt, Artificial Sequence
  Synthetic
agggaaggggaggggaggggag

SEQ ID NO: 574126 - RNA, 23 nt, Artificial Sequence
  Synthetic
aagggaaggggaggggaggggag

SEQ ID NO: 574127 - RNA, 24 nt, Artificial Sequence
  Synthetic
gaagggaaggggaggggaggggag

SEQ ID NO: 574128 - RNA, 21 nt, Artificial Sequence
  Synthetic
ggggaggggaggggaggggag

SEQ ID NO: 574129 - RNA, 22 nt, Artificial Sequence
  Synthetic
aggggaggggaggggaggggag

SEQ ID NO: 574130 - RNA, 23 nt, Artificial Sequence
  Synthetic
aaggggaggggaggggaggggag

SEQ ID NO: 574131 - RNA, 24 nt, Artificial Sequence
  Synthetic
gaaggggaggggaggggaggggag

SEQ ID NO: 574132 - RNA, 23 nt, Artificial Sequence
  Synthetic
gaggggaggggaggggaggggag

SEQ ID NO: 574133 - RNA, 24 nt, Artificial Sequence
  Synthetic
ggaggggaggggaggggaggggag

SEQ ID NO: 574134 - RNA, 18 nt, Artificial Sequence
  Synthetic
gaauuuuauuuaggggag

SEQ ID NO: 574135 - RNA, 19 nt, Artificial Sequence
  Synthetic
ggaauuuuauuuaggggag

SEQ ID NO: 574136 - RNA, 20 nt, Artificial Sequence
  Synthetic
aggaauuuuauuuaggggag

SEQ ID NO: 574137 - RNA, 21 nt, Artificial Sequence
  Synthetic
aaggaauuuuauuuaggggag

SEQ ID NO: 574138 - RNA, 22 nt, Artificial Sequence
  Synthetic
aaaggaauuuuauuuaggggag

SEQ ID NO: 574139 - RNA, 23 nt, Artificial Sequence
  Synthetic
caaaggaauuuuauuuaggggag

SEQ ID NO: 574140 - RNA, 24 nt, Artificial Sequence
  Synthetic
acaaaggaauuuuauuuaggggag

SEQ ID NO: 574141 - RNA, 18 nt, Artificial Sequence
  Synthetic
uccaucaugaacggggag

SEQ ID NO: 574142 - RNA, 19 nt, Artificial Sequence
  Synthetic
auccaucaugaacggggag

SEQ ID NO: 574143 - RNA, 20 nt, Artificial Sequence
  Synthetic
aauccaucaugaacggggag

SEQ ID NO: 574144 - RNA, 21 nt, Artificial Sequence
  Synthetic
aaauccaucaugaacggggag

SEQ ID NO: 574145 - RNA, 22 nt, Artificial Sequence
  Synthetic
uaaauccaucaugaacggggag

SEQ ID NO: 574146 - RNA, 23 nt, Artificial Sequence
  Synthetic
uuaaauccaucaugaacggggag

SEQ ID NO: 574147 - RNA, 24 nt, Artificial Sequence
  Synthetic
uuuaaauccaucaugaacggggag

SEQ ID NO: 574148 - RNA, 18 nt, Artificial Sequence
  Synthetic
gcugugggguggggggag

SEQ ID NO: 574149 - RNA, 19 nt, Artificial Sequence
  Synthetic
ugcugugggguggggggag

SEQ ID NO: 574150 - RNA, 20 nt, Artificial Sequence
  Synthetic
cugcugugggguggggggag

SEQ ID NO: 574151 - RNA, 21 nt, Artificial Sequence
  Synthetic
ccugcugugggguggggggag

SEQ ID NO: 574152 - RNA, 22 nt, Artificial Sequence
  Synthetic
gccugcugugggguggggggag

SEQ ID NO: 574153 - RNA, 23 nt, Artificial Sequence
  Synthetic
ggccugcugugggguggggggag

SEQ ID NO: 574154 - RNA, 24 nt, Artificial Sequence
  Synthetic
gggccugcugugggguggggggag

SEQ ID NO: 574155 - RNA, 22 nt, Artificial Sequence
  Synthetic
aacuguugugggguggggggag

SEQ ID NO: 574156 - RNA, 23 nt, Artificial Sequence
  Synthetic
gaacuguugugggguggggggag

SEQ ID NO: 574157 - RNA, 24 nt, Artificial Sequence
  Synthetic
ggaacuguugugggguggggggag

SEQ ID NO: 574158 - RNA, 24 nt, Artificial Sequence
  Synthetic
gggacuguugugggguggggggag

SEQ ID NO: 574159 - RNA, 21 nt, Artificial Sequence
  Synthetic
ccuguugugggguggggggag

SEQ ID NO: 574160 - RNA, 22 nt, Artificial Sequence
  Synthetic
gccuguugugggguggggggag

SEQ ID NO: 574161 - RNA, 23 nt, Artificial Sequence
  Synthetic
ggccuguugugggguggggggag

SEQ ID NO: 574162 - RNA, 24 nt, Artificial Sequence
  Synthetic
gggccuguugugggguggggggag

SEQ ID NO: 574163 - RNA, 18 nt, Artificial Sequence
  Synthetic
ucuuuuugugugggggag

SEQ ID NO: 574164 - RNA, 19 nt, Artificial Sequence
  Synthetic
uucuuuuugugugggggag

SEQ ID NO: 574165 - RNA, 20 nt, Artificial Sequence
  Synthetic
auucuuuuugugugggggag

SEQ ID NO: 574166 - RNA, 21 nt, Artificial Sequence
  Synthetic
cauucuuuuugugugggggag

SEQ ID NO: 574167 - RNA, 22 nt, Artificial Sequence
  Synthetic
ccauucuuuuugugugggggag

SEQ ID NO: 574168 - RNA, 23 nt, Artificial Sequence
  Synthetic
accauucuuuuugugugggggag

SEQ ID NO: 574169 - RNA, 24 nt, Artificial Sequence
  Synthetic
caccauucuuuuugugugggggag

SEQ ID NO: 574170 - RNA, 18 nt, Artificial Sequence
  Synthetic
gagauugguaauggggag

SEQ ID NO: 574171 - RNA, 19 nt, Artificial Sequence
  Synthetic
agagauugguaauggggag

SEQ ID NO: 574172 - RNA, 20 nt, Artificial Sequence
  Synthetic
gagagauugguaauggggag

SEQ ID NO: 574173 - RNA, 21 nt, Artificial Sequence
  Synthetic
ugagagauugguaauggggag

SEQ ID NO: 574174 - RNA, 22 nt, Artificial Sequence
  Synthetic
gugagagauugguaauggggag

SEQ ID NO: 574175 - RNA, 23 nt, Artificial Sequence
  Synthetic
agugagagauugguaauggggag

SEQ ID NO: 574176 - RNA, 24 nt, Artificial Sequence
  Synthetic
uagugagagauugguaauggggag

SEQ ID NO: 574177 - RNA, 18 nt, Artificial Sequence
  Synthetic
ggguggggagauggggag

SEQ ID NO: 574178 - RNA, 19 nt, Artificial Sequence
  Synthetic
gggguggggagauggggag

SEQ ID NO: 574179 - RNA, 20 nt, Artificial Sequence
  Synthetic
cgggguggggagauggggag

SEQ ID NO: 574180 - RNA, 21 nt, Artificial Sequence
  Synthetic
ucgggguggggagauggggag

SEQ ID NO: 574181 - RNA, 22 nt, Artificial Sequence
  Synthetic
cucgggguggggagauggggag

SEQ ID NO: 574182 - RNA, 23 nt, Artificial Sequence
  Synthetic
ccucgggguggggagauggggag

SEQ ID NO: 574183 - RNA, 24 nt, Artificial Sequence
  Synthetic
uccucgggguggggagauggggag

SEQ ID NO: 574184 - RNA, 18 nt, Artificial Sequence
  Synthetic
acuguuuaaacuggggag

SEQ ID NO: 574185 - RNA, 19 nt, Artificial Sequence
  Synthetic
gacuguuuaaacuggggag

SEQ ID NO: 574186 - RNA, 20 nt, Artificial Sequence
  Synthetic
ggacuguuuaaacuggggag

SEQ ID NO: 574187 - RNA, 21 nt, Artificial Sequence
  Synthetic
gggacuguuuaaacuggggag

SEQ ID NO: 574188 - RNA, 22 nt, Artificial Sequence
  Synthetic
cgggacuguuuaaacuggggag

SEQ ID NO: 574189 - RNA, 23 nt, Artificial Sequence
  Synthetic
ucgggacuguuuaaacuggggag

SEQ ID NO: 574190 - RNA, 24 nt, Artificial Sequence
  Synthetic
uucgggacuguuuaaacuggggag

SEQ ID NO: 574191 - RNA, 18 nt, Artificial Sequence
  Synthetic
ggaacaaauacuggggag

SEQ ID NO: 574192 - RNA, 19 nt, Artificial Sequence
  Synthetic
cggaacaaauacuggggag

SEQ ID NO: 574193 - RNA, 20 nt, Artificial Sequence
  Synthetic
acggaacaaauacuggggag

SEQ ID NO: 574194 - RNA, 21 nt, Artificial Sequence
  Synthetic
aacggaacaaauacuggggag

SEQ ID NO: 574195 - RNA, 22 nt, Artificial Sequence
  Synthetic
aaacggaacaaauacuggggag

SEQ ID NO: 574196 - RNA, 23 nt, Artificial Sequence
  Synthetic
uaaacggaacaaauacuggggag

SEQ ID NO: 574197 - RNA, 24 nt, Artificial Sequence
  Synthetic
uuaaacggaacaaauacuggggag

SEQ ID NO: 574198 - RNA, 18 nt, Artificial Sequence
  Synthetic
uaaagcuauucuggggag

SEQ ID NO: 574199 - RNA, 19 nt, Artificial Sequence
  Synthetic
guaaagcuauucuggggag

SEQ ID NO: 574200 - RNA, 20 nt, Artificial Sequence
  Synthetic
uguaaagcuauucuggggag

SEQ ID NO: 574201 - RNA, 21 nt, Artificial Sequence
  Synthetic
uuguaaagcuauucuggggag

SEQ ID NO: 574202 - RNA, 22 nt, Artificial Sequence
  Synthetic
uuuguaaagcuauucuggggag

SEQ ID NO: 574203 - RNA, 23 nt, Artificial Sequence
  Synthetic
guuuguaaagcuauucuggggag

SEQ ID NO: 574204 - RNA, 24 nt, Artificial Sequence
  Synthetic
uguuuguaaagcuauucuggggag

SEQ ID NO: 574205 - RNA, 18 nt, Artificial Sequence
  Synthetic
gggaagggucguggggag

SEQ ID NO: 574206 - RNA, 19 nt, Artificial Sequence
  Synthetic
ugggaagggucguggggag

SEQ ID NO: 574207 - RNA, 20 nt, Artificial Sequence
  Synthetic
augggaagggucguggggag

SEQ ID NO: 574208 - RNA, 21 nt, Artificial Sequence
  Synthetic
gaugggaagggucguggggag

SEQ ID NO: 574209 - RNA, 22 nt, Artificial Sequence
  Synthetic
ggaugggaagggucguggggag

SEQ ID NO: 574210 - RNA, 23 nt, Artificial Sequence
  Synthetic
aggaugggaagggucguggggag

SEQ ID NO: 574211 - RNA, 24 nt, Artificial Sequence
  Synthetic
gaggaugggaagggucguggggag

SEQ ID NO: 574212 - RNA, 18 nt, Artificial Sequence
  Synthetic
cauccucgggguggggag

SEQ ID NO: 574213 - RNA, 19 nt, Artificial Sequence
  Synthetic
acauccucgggguggggag

SEQ ID NO: 574214 - RNA, 20 nt, Artificial Sequence
  Synthetic
aacauccucgggguggggag

SEQ ID NO: 574215 - RNA, 21 nt, Artificial Sequence
  Synthetic
uaacauccucgggguggggag

SEQ ID NO: 574216 - RNA, 22 nt, Artificial Sequence
  Synthetic
auaacauccucgggguggggag

SEQ ID NO: 574217 - RNA, 23 nt, Artificial Sequence
  Synthetic
uauaacauccucgggguggggag

SEQ ID NO: 574218 - RNA, 24 nt, Artificial Sequence
  Synthetic
cuauaacauccucgggguggggag

SEQ ID NO: 574219 - RNA, 18 nt, Artificial Sequence
  Synthetic
cuaggauacauuggggag

SEQ ID NO: 574220 - RNA, 19 nt, Artificial Sequence
  Synthetic
ucuaggauacauuggggag

SEQ ID NO: 574221 - RNA, 20 nt, Artificial Sequence
  Synthetic
cucuaggauacauuggggag

SEQ ID NO: 574222 - RNA, 21 nt, Artificial Sequence
  Synthetic
ucucuaggauacauuggggag

SEQ ID NO: 574223 - RNA, 22 nt, Artificial Sequence
  Synthetic
gucucuaggauacauuggggag

SEQ ID NO: 574224 - RNA, 23 nt, Artificial Sequence
  Synthetic
agucucuaggauacauuggggag

SEQ ID NO: 574225 - RNA, 24 nt, Artificial Sequence
  Synthetic
aagucucuaggauacauuggggag

SEQ ID NO: 574226 - RNA, 18 nt, Artificial Sequence
  Synthetic
gacccucauguuggggag

SEQ ID NO: 574227 - RNA, 19 nt, Artificial Sequence
  Synthetic
agacccucauguuggggag

SEQ ID NO: 574228 - RNA, 20 nt, Artificial Sequence
  Synthetic
gagacccucauguuggggag

SEQ ID NO: 574229 - RNA, 21 nt, Artificial Sequence
  Synthetic
ugagacccucauguuggggag

SEQ ID NO: 574230 - RNA, 22 nt, Artificial Sequence
  Synthetic
augagacccucauguuggggag

SEQ ID NO: 574231 - RNA, 23 nt, Artificial Sequence
  Synthetic
gaugagacccucauguuggggag

SEQ ID NO: 574232 - RNA, 24 nt, Artificial Sequence
  Synthetic
ugaugagacccucauguuggggag

SEQ ID NO: 574233 - RNA, 18 nt, Artificial Sequence
  Synthetic
ucucacugauaaugggag

SEQ ID NO: 574234 - RNA, 19 nt, Artificial Sequence
  Synthetic
uucucacugauaaugggag

SEQ ID NO: 574235 - RNA, 20 nt, Artificial Sequence
  Synthetic
guucucacugauaaugggag

SEQ ID NO: 574236 - RNA, 21 nt, Artificial Sequence
  Synthetic
uguucucacugauaaugggag

SEQ ID NO: 574237 - RNA, 22 nt, Artificial Sequence
  Synthetic
auguucucacugauaaugggag

SEQ ID NO: 574238 - RNA, 23 nt, Artificial Sequence
  Synthetic
cauguucucacugauaaugggag

SEQ ID NO: 574239 - RNA, 24 nt, Artificial Sequence
  Synthetic
gcauguucucacugauaaugggag

SEQ ID NO: 574240 - RNA, 18 nt, Artificial Sequence
  Synthetic
auaaugaccuaaugggag

SEQ ID NO: 574241 - RNA, 19 nt, Artificial Sequence
  Synthetic
aauaaugaccuaaugggag

SEQ ID NO: 574242 - RNA, 20 nt, Artificial Sequence
  Synthetic
uaauaaugaccuaaugggag

SEQ ID NO: 574243 - RNA, 21 nt, Artificial Sequence
  Synthetic
uuaauaaugaccuaaugggag

SEQ ID NO: 574244 - RNA, 22 nt, Artificial Sequence
  Synthetic
auuaauaaugaccuaaugggag

SEQ ID NO: 574245 - RNA, 23 nt, Artificial Sequence
  Synthetic
aauuaauaaugaccuaaugggag

SEQ ID NO: 574246 - RNA, 24 nt, Artificial Sequence
  Synthetic
caauuaauaaugaccuaaugggag

SEQ ID NO: 574247 - RNA, 18 nt, Artificial Sequence
  Synthetic
aacaaggguuaaugggag

SEQ ID NO: 574248 - RNA, 19 nt, Artificial Sequence
  Synthetic
uaacaaggguuaaugggag

SEQ ID NO: 574249 - RNA, 20 nt, Artificial Sequence
  Synthetic
cuaacaaggguuaaugggag

SEQ ID NO: 574250 - RNA, 21 nt, Artificial Sequence
  Synthetic
ccuaacaaggguuaaugggag

SEQ ID NO: 574251 - RNA, 22 nt, Artificial Sequence
  Synthetic
cccuaacaaggguuaaugggag

SEQ ID NO: 574252 - RNA, 23 nt, Artificial Sequence
  Synthetic
acccuaacaaggguuaaugggag

SEQ ID NO: 574253 - RNA, 24 nt, Artificial Sequence
  Synthetic
cacccuaacaaggguuaaugggag

SEQ ID NO: 574254 - RNA, 18 nt, Artificial Sequence
  Synthetic
aaaggcaugauaugggag

SEQ ID NO: 574255 - RNA, 19 nt, Artificial Sequence
  Synthetic
aaaaggcaugauaugggag

SEQ ID NO: 574256 - RNA, 20 nt, Artificial Sequence
  Synthetic
caaaaggcaugauaugggag

SEQ ID NO: 574257 - RNA, 21 nt, Artificial Sequence
  Synthetic
acaaaaggcaugauaugggag

SEQ ID NO: 574258 - RNA, 22 nt, Artificial Sequence
  Synthetic
aacaaaaggcaugauaugggag

SEQ ID NO: 574259 - RNA, 23 nt, Artificial Sequence
  Synthetic
aaacaaaaggcaugauaugggag

SEQ ID NO: 574260 - RNA, 24 nt, Artificial Sequence
  Synthetic
uaaacaaaaggcaugauaugggag

SEQ ID NO: 574261 - RNA, 18 nt, Artificial Sequence
  Synthetic
accacuugaaccugggag

SEQ ID NO: 574262 - RNA, 19 nt, Artificial Sequence
  Synthetic
aaccacuugaaccugggag

SEQ ID NO: 574263 - RNA, 20 nt, Artificial Sequence
  Synthetic
gaaccacuugaaccugggag

SEQ ID NO: 574264 - RNA, 21 nt, Artificial Sequence
  Synthetic
agaaccacuugaaccugggag

SEQ ID NO: 574265 - RNA, 22 nt, Artificial Sequence
  Synthetic
gagaaccacuugaaccugggag

SEQ ID NO: 574266 - RNA, 23 nt, Artificial Sequence
  Synthetic
ggagaaccacuugaaccugggag

SEQ ID NO: 574267 - RNA, 24 nt, Artificial Sequence
  Synthetic
aggagaaccacuugaaccugggag

SEQ ID NO: 574268 - RNA, 21 nt, Artificial Sequence
  Synthetic
agaaucacuugaaccugggag

SEQ ID NO: 574269 - RNA, 22 nt, Artificial Sequence
  Synthetic
gagaaucacuugaaccugggag

SEQ ID NO: 574270 - RNA, 23 nt, Artificial Sequence
  Synthetic
ggagaaucacuugaaccugggag

SEQ ID NO: 574271 - RNA, 24 nt, Artificial Sequence
  Synthetic
aggagaaucacuugaaccugggag

SEQ ID NO: 574272 - RNA, 18 nt, Artificial Sequence
  Synthetic
agcgcuugaaccugggag

SEQ ID NO: 574273 - RNA, 19 nt, Artificial Sequence
  Synthetic
aagcgcuugaaccugggag

SEQ ID NO: 574274 - RNA, 20 nt, Artificial Sequence
  Synthetic
gaagcgcuugaaccugggag

SEQ ID NO: 574275 - RNA, 21 nt, Artificial Sequence
  Synthetic
agaagcgcuugaaccugggag

SEQ ID NO: 574276 - RNA, 22 nt, Artificial Sequence
  Synthetic
gagaagcgcuugaaccugggag

SEQ ID NO: 574277 - RNA, 23 nt, Artificial Sequence
  Synthetic
ugagaagcgcuugaaccugggag

SEQ ID NO: 574278 - RNA, 24 nt, Artificial Sequence
  Synthetic
augagaagcgcuugaaccugggag

SEQ ID NO: 574279 - RNA, 18 nt, Artificial Sequence
  Synthetic
gcuugaccaagcugggag

SEQ ID NO: 574280 - RNA, 19 nt, Artificial Sequence
  Synthetic
ugcuugaccaagcugggag

SEQ ID NO: 574281 - RNA, 20 nt, Artificial Sequence
  Synthetic
augcuugaccaagcugggag

SEQ ID NO: 574282 - RNA, 21 nt, Artificial Sequence
  Synthetic
uaugcuugaccaagcugggag

SEQ ID NO: 574283 - RNA, 22 nt, Artificial Sequence
  Synthetic
uuaugcuugaccaagcugggag

SEQ ID NO: 574284 - RNA, 23 nt, Artificial Sequence
  Synthetic
auuaugcuugaccaagcugggag

SEQ ID NO: 574285 - RNA, 24 nt, Artificial Sequence
  Synthetic
uauuaugcuugaccaagcugggag

SEQ ID NO: 574286 - RNA, 18 nt, Artificial Sequence
  Synthetic
cucacuagacgcugggag

SEQ ID NO: 574287 - RNA, 19 nt, Artificial Sequence
  Synthetic
ccucacuagacgcugggag

SEQ ID NO: 574288 - RNA, 20 nt, Artificial Sequence
  Synthetic
uccucacuagacgcugggag

SEQ ID NO: 574289 - RNA, 21 nt, Artificial Sequence
  Synthetic
uuccucacuagacgcugggag

SEQ ID NO: 574290 - RNA, 22 nt, Artificial Sequence
  Synthetic
guuccucacuagacgcugggag

SEQ ID NO: 574291 - RNA, 23 nt, Artificial Sequence
  Synthetic
aguuccucacuagacgcugggag

SEQ ID NO: 574292 - RNA, 24 nt, Artificial Sequence
  Synthetic
uaguuccucacuagacgcugggag

SEQ ID NO: 574293 - RNA, 18 nt, Artificial Sequence
  Synthetic
ggacagaaaggcugggag

SEQ ID NO: 574294 - RNA, 19 nt, Artificial Sequence
  Synthetic
aggacagaaaggcugggag

SEQ ID NO: 574295 - RNA, 20 nt, Artificial Sequence
  Synthetic
caggacagaaaggcugggag

SEQ ID NO: 574296 - RNA, 21 nt, Artificial Sequence
  Synthetic
ucaggacagaaaggcugggag

SEQ ID NO: 574297 - RNA, 22 nt, Artificial Sequence
  Synthetic
gucaggacagaaaggcugggag

SEQ ID NO: 574298 - RNA, 23 nt, Artificial Sequence
  Synthetic
ggucaggacagaaaggcugggag

SEQ ID NO: 574299 - RNA, 24 nt, Artificial Sequence
  Synthetic
aggucaggacagaaaggcugggag

SEQ ID NO: 574300 - RNA, 18 nt, Artificial Sequence
  Synthetic
auagcuugaaucugggag

SEQ ID NO: 574301 - RNA, 19 nt, Artificial Sequence
  Synthetic
aauagcuugaaucugggag

SEQ ID NO: 574302 - RNA, 20 nt, Artificial Sequence
  Synthetic
gaauagcuugaaucugggag

SEQ ID NO: 574303 - RNA, 21 nt, Artificial Sequence
  Synthetic
agaauagcuugaaucugggag

SEQ ID NO: 574304 - RNA, 22 nt, Artificial Sequence
  Synthetic
gagaauagcuugaaucugggag

SEQ ID NO: 574305 - RNA, 23 nt, Artificial Sequence
  Synthetic
agagaauagcuugaaucugggag

SEQ ID NO: 574306 - RNA, 24 nt, Artificial Sequence
  Synthetic
aagagaauagcuugaaucugggag

SEQ ID NO: 574307 - RNA, 18 nt, Artificial Sequence
  Synthetic
cucacccauaagugggag

SEQ ID NO: 574308 - RNA, 19 nt, Artificial Sequence
  Synthetic
ucucacccauaagugggag

SEQ ID NO: 574309 - RNA, 20 nt, Artificial Sequence
  Synthetic
uucucacccauaagugggag

SEQ ID NO: 574310 - RNA, 21 nt, Artificial Sequence
  Synthetic
auucucacccauaagugggag

SEQ ID NO: 574311 - RNA, 22 nt, Artificial Sequence
  Synthetic
uauucucacccauaagugggag

SEQ ID NO: 574312 - RNA, 23 nt, Artificial Sequence
  Synthetic
auauucucacccauaagugggag

SEQ ID NO: 574313 - RNA, 24 nt, Artificial Sequence
  Synthetic
cauauucucacccauaagugggag

SEQ ID NO: 574314 - RNA, 18 nt, Artificial Sequence
  Synthetic
cucacucguaagugggag

SEQ ID NO: 574315 - RNA, 19 nt, Artificial Sequence
  Synthetic
acucacucguaagugggag

SEQ ID NO: 574316 - RNA, 20 nt, Artificial Sequence
  Synthetic
gacucacucguaagugggag

SEQ ID NO: 574317 - RNA, 21 nt, Artificial Sequence
  Synthetic
ggacucacucguaagugggag

SEQ ID NO: 574318 - RNA, 22 nt, Artificial Sequence
  Synthetic
uggacucacucguaagugggag

SEQ ID NO: 574319 - RNA, 23 nt, Artificial Sequence
  Synthetic
auggacucacucguaagugggag

SEQ ID NO: 574320 - RNA, 24 nt, Artificial Sequence
  Synthetic
cauggacucacucguaagugggag

SEQ ID NO: 574321 - RNA, 18 nt, Artificial Sequence
  Synthetic
gaguggggagggugggag

SEQ ID NO: 574322 - RNA, 19 nt, Artificial Sequence
  Synthetic
ggaguggggagggugggag

SEQ ID NO: 574323 - RNA, 20 nt, Artificial Sequence
  Synthetic
uggaguggggagggugggag

SEQ ID NO: 574324 - RNA, 21 nt, Artificial Sequence
  Synthetic
cuggaguggggagggugggag

SEQ ID NO: 574325 - RNA, 22 nt, Artificial Sequence
  Synthetic
acuggaguggggagggugggag

SEQ ID NO: 574326 - RNA, 23 nt, Artificial Sequence
  Synthetic
uacuggaguggggagggugggag

SEQ ID NO: 574327 - RNA, 24 nt, Artificial Sequence
  Synthetic
cuacuggaguggggagggugggag

SEQ ID NO: 574328 - RNA, 18 nt, Artificial Sequence
  Synthetic
ucagaaucauggugggag

SEQ ID NO: 574329 - RNA, 19 nt, Artificial Sequence
  Synthetic
cucagaaucauggugggag

SEQ ID NO: 574330 - RNA, 20 nt, Artificial Sequence
  Synthetic
ccucagaaucauggugggag

SEQ ID NO: 574331 - RNA, 21 nt, Artificial Sequence
  Synthetic
gccucagaaucauggugggag

SEQ ID NO: 574332 - RNA, 22 nt, Artificial Sequence
  Synthetic
ggccucagaaucauggugggag

SEQ ID NO: 574333 - RNA, 23 nt, Artificial Sequence
  Synthetic
aggccucagaaucauggugggag

SEQ ID NO: 574334 - RNA, 24 nt, Artificial Sequence
  Synthetic
gaggccucagaaucauggugggag

SEQ ID NO: 574335 - RNA, 18 nt, Artificial Sequence
  Synthetic
ucuucugcuuggugggag

SEQ ID NO: 574336 - RNA, 19 nt, Artificial Sequence
  Synthetic
uucuucugcuuggugggag

SEQ ID NO: 574337 - RNA, 20 nt, Artificial Sequence
  Synthetic
uuucuucugcuuggugggag

SEQ ID NO: 574338 - RNA, 21 nt, Artificial Sequence
  Synthetic
guuucuucugcuuggugggag

SEQ ID NO: 574339 - RNA, 22 nt, Artificial Sequence
  Synthetic
aguuucuucugcuuggugggag

SEQ ID NO: 574340 - RNA, 23 nt, Artificial Sequence
  Synthetic
caguuucuucugcuuggugggag

SEQ ID NO: 574341 - RNA, 24 nt, Artificial Sequence
  Synthetic
gcaguuucuucugcuuggugggag

SEQ ID NO: 574342 - RNA, 18 nt, Artificial Sequence
  Synthetic
aaacauaaaaugugggag

SEQ ID NO: 574343 - RNA, 19 nt, Artificial Sequence
  Synthetic
gaaacauaaaaugugggag

SEQ ID NO: 574344 - RNA, 20 nt, Artificial Sequence
  Synthetic
agaaacauaaaaugugggag

SEQ ID NO: 574345 - RNA, 21 nt, Artificial Sequence
  Synthetic
uagaaacauaaaaugugggag

SEQ ID NO: 574346 - RNA, 22 nt, Artificial Sequence
  Synthetic
uuagaaacauaaaaugugggag

SEQ ID NO: 574347 - RNA, 23 nt, Artificial Sequence
  Synthetic
guuagaaacauaaaaugugggag

SEQ ID NO: 574348 - RNA, 24 nt, Artificial Sequence
  Synthetic
uguuagaaacauaaaaugugggag

SEQ ID NO: 574349 - RNA, 18 nt, Artificial Sequence
  Synthetic
uguauguaacugugggag

SEQ ID NO: 574350 - RNA, 19 nt, Artificial Sequence
  Synthetic
cuguauguaacugugggag

SEQ ID NO: 574351 - RNA, 20 nt, Artificial Sequence
  Synthetic
ccuguauguaacugugggag

SEQ ID NO: 574352 - RNA, 21 nt, Artificial Sequence
  Synthetic
gccuguauguaacugugggag

SEQ ID NO: 574353 - RNA, 22 nt, Artificial Sequence
  Synthetic
agccuguauguaacugugggag

SEQ ID NO: 574354 - RNA, 23 nt, Artificial Sequence
  Synthetic
uagccuguauguaacugugggag

SEQ ID NO: 574355 - RNA, 24 nt, Artificial Sequence
  Synthetic
cuagccuguauguaacugugggag

SEQ ID NO: 574356 - RNA, 18 nt, Artificial Sequence
  Synthetic
aucacuugaacuugggag

SEQ ID NO: 574357 - RNA, 19 nt, Artificial Sequence
  Synthetic
aaucacuugaacuugggag

SEQ ID NO: 574358 - RNA, 20 nt, Artificial Sequence
  Synthetic
gaaucacuugaacuugggag

SEQ ID NO: 574359 - RNA, 21 nt, Artificial Sequence
  Synthetic
agaaucacuugaacuugggag

SEQ ID NO: 574360 - RNA, 22 nt, Artificial Sequence
  Synthetic
gagaaucacuugaacuugggag

SEQ ID NO: 574361 - RNA, 23 nt, Artificial Sequence
  Synthetic
ggagaaucacuugaacuugggag

SEQ ID NO: 574362 - RNA, 24 nt, Artificial Sequence
  Synthetic
aggagaaucacuugaacuugggag

SEQ ID NO: 574363 - RNA, 18 nt, Artificial Sequence
  Synthetic
cagaacucagcuugggag

SEQ ID NO: 574364 - RNA, 19 nt, Artificial Sequence
  Synthetic
ucagaacucagcuugggag

SEQ ID NO: 574365 - RNA, 20 nt, Artificial Sequence
  Synthetic
aucagaacucagcuugggag

SEQ ID NO: 574366 - RNA, 21 nt, Artificial Sequence
  Synthetic
aaucagaacucagcuugggag

SEQ ID NO: 574367 - RNA, 22 nt, Artificial Sequence
  Synthetic
caaucagaacucagcuugggag

SEQ ID NO: 574368 - RNA, 23 nt, Artificial Sequence
  Synthetic
ccaaucagaacucagcuugggag

SEQ ID NO: 574369 - RNA, 24 nt, Artificial Sequence
  Synthetic
uccaaucagaacucagcuugggag

SEQ ID NO: 574370 - RNA, 18 nt, Artificial Sequence
  Synthetic
gaguucagggcuugggag

SEQ ID NO: 574371 - RNA, 19 nt, Artificial Sequence
  Synthetic
agaguucagggcuugggag

SEQ ID NO: 574372 - RNA, 20 nt, Artificial Sequence
  Synthetic
cagaguucagggcuugggag

SEQ ID NO: 574373 - RNA, 21 nt, Artificial Sequence
  Synthetic
ucagaguucagggcuugggag

SEQ ID NO: 574374 - RNA, 22 nt, Artificial Sequence
  Synthetic
cucagaguucagggcuugggag

SEQ ID NO: 574375 - RNA, 23 nt, Artificial Sequence
  Synthetic
ccucagaguucagggcuugggag

SEQ ID NO: 574376 - RNA, 24 nt, Artificial Sequence
  Synthetic
cccucagaguucagggcuugggag

SEQ ID NO: 574377 - RNA, 18 nt, Artificial Sequence
  Synthetic
aagaaaaaagguugggag

SEQ ID NO: 574378 - RNA, 19 nt, Artificial Sequence
  Synthetic
aaagaaaaaagguugggag

SEQ ID NO: 574379 - RNA, 20 nt, Artificial Sequence
  Synthetic
gaaagaaaaaagguugggag

SEQ ID NO: 574380 - RNA, 21 nt, Artificial Sequence
  Synthetic
ggaaagaaaaaagguugggag

SEQ ID NO: 574381 - RNA, 22 nt, Artificial Sequence
  Synthetic
uggaaagaaaaaagguugggag

SEQ ID NO: 574382 - RNA, 23 nt, Artificial Sequence
  Synthetic
auggaaagaaaaaagguugggag

SEQ ID NO: 574383 - RNA, 24 nt, Artificial Sequence
  Synthetic
aauggaaagaaaaaagguugggag

SEQ ID NO: 574384 - RNA, 18 nt, Artificial Sequence
  Synthetic
cucccaaaguguugggag

SEQ ID NO: 574385 - RNA, 19 nt, Artificial Sequence
  Synthetic
ccucccaaaguguugggag

SEQ ID NO: 574386 - RNA, 20 nt, Artificial Sequence
  Synthetic
gccucccaaaguguugggag

SEQ ID NO: 574387 - RNA, 21 nt, Artificial Sequence
  Synthetic
agccucccaaaguguugggag

SEQ ID NO: 574388 - RNA, 22 nt, Artificial Sequence
  Synthetic
cagccucccaaaguguugggag

SEQ ID NO: 574389 - RNA, 23 nt, Artificial Sequence
  Synthetic
ucagccucccaaaguguugggag

SEQ ID NO: 574390 - RNA, 24 nt, Artificial Sequence
  Synthetic
cucagccucccaaaguguugggag

SEQ ID NO: 574391 - RNA, 18 nt, Artificial Sequence
  Synthetic
gucccaguuauuugggag

SEQ ID NO: 574392 - RNA, 19 nt, Artificial Sequence
  Synthetic
agucccaguuauuugggag

SEQ ID NO: 574393 - RNA, 20 nt, Artificial Sequence
  Synthetic
uagucccaguuauuugggag

SEQ ID NO: 574394 - RNA, 21 nt, Artificial Sequence
  Synthetic
cuagucccaguuauuugggag

SEQ ID NO: 574395 - RNA, 22 nt, Artificial Sequence
  Synthetic
ucuagucccaguuauuugggag

SEQ ID NO: 574396 - RNA, 23 nt, Artificial Sequence
  Synthetic
cucuagucccaguuauuugggag

SEQ ID NO: 574397 - RNA, 24 nt, Artificial Sequence
  Synthetic
ccucuagucccaguuauuugggag

SEQ ID NO: 574398 - RNA, 18 nt, Artificial Sequence
  Synthetic
auuuugagacuuugggag

SEQ ID NO: 574399 - RNA, 19 nt, Artificial Sequence
  Synthetic
aauuuugagacuuugggag

SEQ ID NO: 574400 - RNA, 20 nt, Artificial Sequence
  Synthetic
uaauuuugagacuuugggag

SEQ ID NO: 574401 - RNA, 21 nt, Artificial Sequence
  Synthetic
cuaauuuugagacuuugggag

SEQ ID NO: 574402 - RNA, 22 nt, Artificial Sequence
  Synthetic
ccuaauuuugagacuuugggag

SEQ ID NO: 574403 - RNA, 23 nt, Artificial Sequence
  Synthetic
cccuaauuuugagacuuugggag

SEQ ID NO: 574404 - RNA, 24 nt, Artificial Sequence
  Synthetic
ucccuaauuuugagacuuugggag

SEQ ID NO: 574405 - RNA, 18 nt, Artificial Sequence
  Synthetic
gauuggaugguuugggag

SEQ ID NO: 574406 - RNA, 19 nt, Artificial Sequence
  Synthetic
agauuggaugguuugggag

SEQ ID NO: 574407 - RNA, 20 nt, Artificial Sequence
  Synthetic
gagauuggaugguuugggag

SEQ ID NO: 574408 - RNA, 21 nt, Artificial Sequence
  Synthetic
ugagauuggaugguuugggag

SEQ ID NO: 574409 - RNA, 22 nt, Artificial Sequence
  Synthetic
gugagauuggaugguuugggag

SEQ ID NO: 574410 - RNA, 23 nt, Artificial Sequence
  Synthetic
ggugagauuggaugguuugggag

SEQ ID NO: 574411 - RNA, 24 nt, Artificial Sequence
  Synthetic
aggugagauuggaugguuugggag

SEQ ID NO: 574412 - RNA, 18 nt, Artificial Sequence
  Synthetic
uaguaugucuuuugggag

SEQ ID NO: 574413 - RNA, 19 nt, Artificial Sequence
  Synthetic
uuaguaugucuuuugggag

SEQ ID NO: 574414 - RNA, 20 nt, Artificial Sequence
  Synthetic
uuuaguaugucuuuugggag

SEQ ID NO: 574415 - RNA, 21 nt, Artificial Sequence
  Synthetic
uuuuaguaugucuuuugggag

SEQ ID NO: 574416 - RNA, 22 nt, Artificial Sequence
  Synthetic
cuuuuaguaugucuuuugggag

SEQ ID NO: 574417 - RNA, 23 nt, Artificial Sequence
  Synthetic
gcuuuuaguaugucuuuugggag

SEQ ID NO: 574418 - RNA, 24 nt, Artificial Sequence
  Synthetic
ggcuuuuaguaugucuuuugggag

SEQ ID NO: 574419 - RNA, 18 nt, Artificial Sequence
  Synthetic
uaugagauuacaauggag

SEQ ID NO: 574420 - RNA, 19 nt, Artificial Sequence
  Synthetic
cuaugagauuacaauggag

SEQ ID NO: 574421 - RNA, 20 nt, Artificial Sequence
  Synthetic
ccuaugagauuacaauggag

SEQ ID NO: 574422 - RNA, 21 nt, Artificial Sequence
  Synthetic
uccuaugagauuacaauggag

SEQ ID NO: 574423 - RNA, 22 nt, Artificial Sequence
  Synthetic
auccuaugagauuacaauggag

SEQ ID NO: 574424 - RNA, 23 nt, Artificial Sequence
  Synthetic
gauccuaugagauuacaauggag

SEQ ID NO: 574425 - RNA, 24 nt, Artificial Sequence
  Synthetic
ugauccuaugagauuacaauggag

SEQ ID NO: 574426 - RNA, 18 nt, Artificial Sequence
  Synthetic
ccagccugggcaauggag

SEQ ID NO: 574427 - RNA, 19 nt, Artificial Sequence
  Synthetic
uccagccugggcaauggag

SEQ ID NO: 574428 - RNA, 20 nt, Artificial Sequence
  Synthetic
cuccagccugggcaauggag

SEQ ID NO: 574429 - RNA, 21 nt, Artificial Sequence
  Synthetic
acuccagccugggcaauggag

SEQ ID NO: 574430 - RNA, 22 nt, Artificial Sequence
  Synthetic
cacuccagccugggcaauggag

SEQ ID NO: 574431 - RNA, 23 nt, Artificial Sequence
  Synthetic
gcacuccagccugggcaauggag

SEQ ID NO: 574432 - RNA, 24 nt, Artificial Sequence
  Synthetic
ugcacuccagccugggcaauggag

SEQ ID NO: 574433 - RNA, 18 nt, Artificial Sequence
  Synthetic
cagagccaugcaauggag

SEQ ID NO: 574434 - RNA, 19 nt, Artificial Sequence
  Synthetic
gcagagccaugcaauggag

SEQ ID NO: 574435 - RNA, 20 nt, Artificial Sequence
  Synthetic
agcagagccaugcaauggag

SEQ ID NO: 574436 - RNA, 21 nt, Artificial Sequence
  Synthetic
gagcagagccaugcaauggag

SEQ ID NO: 574437 - RNA, 22 nt, Artificial Sequence
  Synthetic
ggagcagagccaugcaauggag

SEQ ID NO: 574438 - RNA, 23 nt, Artificial Sequence
  Synthetic
gggagcagagccaugcaauggag

SEQ ID NO: 574439 - RNA, 24 nt, Artificial Sequence
  Synthetic
ggggagcagagccaugcaauggag

SEQ ID NO: 574440 - RNA, 18 nt, Artificial Sequence
  Synthetic
cauaagaucagaauggag

SEQ ID NO: 574441 - RNA, 19 nt, Artificial Sequence
  Synthetic
acauaagaucagaauggag

SEQ ID NO: 574442 - RNA, 20 nt, Artificial Sequence
  Synthetic
cacauaagaucagaauggag

SEQ ID NO: 574443 - RNA, 21 nt, Artificial Sequence
  Synthetic
acacauaagaucagaauggag

SEQ ID NO: 574444 - RNA, 22 nt, Artificial Sequence
  Synthetic
aacacauaagaucagaauggag

SEQ ID NO: 574445 - RNA, 23 nt, Artificial Sequence
  Synthetic
uaacacauaagaucagaauggag

SEQ ID NO: 574446 - RNA, 24 nt, Artificial Sequence
  Synthetic
uuaacacauaagaucagaauggag

SEQ ID NO: 574447 - RNA, 18 nt, Artificial Sequence
  Synthetic
gacaacauccgaauggag

SEQ ID NO: 574448 - RNA, 19 nt, Artificial Sequence
  Synthetic
agacaacauccgaauggag

SEQ ID NO: 574449 - RNA, 20 nt, Artificial Sequence
  Synthetic
cagacaacauccgaauggag

SEQ ID NO: 574450 - RNA, 21 nt, Artificial Sequence
  Synthetic
acagacaacauccgaauggag

SEQ ID NO: 574451 - RNA, 22 nt, Artificial Sequence
  Synthetic
cacagacaacauccgaauggag

SEQ ID NO: 574452 - RNA, 23 nt, Artificial Sequence
  Synthetic
acacagacaacauccgaauggag

SEQ ID NO: 574453 - RNA, 24 nt, Artificial Sequence
  Synthetic
cacacagacaacauccgaauggag

SEQ ID NO: 574454 - RNA, 18 nt, Artificial Sequence
  Synthetic
gaaugggaaguaauggag

SEQ ID NO: 574455 - RNA, 19 nt, Artificial Sequence
  Synthetic
ggaaugggaaguaauggag

SEQ ID NO: 574456 - RNA, 20 nt, Artificial Sequence
  Synthetic
gggaaugggaaguaauggag

SEQ ID NO: 574457 - RNA, 21 nt, Artificial Sequence
  Synthetic
ggggaaugggaaguaauggag

SEQ ID NO: 574458 - RNA, 22 nt, Artificial Sequence
  Synthetic
aggggaaugggaaguaauggag

SEQ ID NO: 574459 - RNA, 23 nt, Artificial Sequence
  Synthetic
uaggggaaugggaaguaauggag

SEQ ID NO: 574460 - RNA, 24 nt, Artificial Sequence
  Synthetic
guaggggaaugggaaguaauggag

SEQ ID NO: 574461 - RNA, 18 nt, Artificial Sequence
  Synthetic
auagaagguuccauggag

SEQ ID NO: 574462 - RNA, 19 nt, Artificial Sequence
  Synthetic
cauagaagguuccauggag

SEQ ID NO: 574463 - RNA, 20 nt, Artificial Sequence
  Synthetic
ucauagaagguuccauggag

SEQ ID NO: 574464 - RNA, 21 nt, Artificial Sequence
  Synthetic
aucauagaagguuccauggag

SEQ ID NO: 574465 - RNA, 22 nt, Artificial Sequence
  Synthetic
gaucauagaagguuccauggag

SEQ ID NO: 574466 - RNA, 23 nt, Artificial Sequence
  Synthetic
ugaucauagaagguuccauggag

SEQ ID NO: 574467 - RNA, 24 nt, Artificial Sequence
  Synthetic
gugaucauagaagguuccauggag

SEQ ID NO: 574468 - RNA, 18 nt, Artificial Sequence
  Synthetic
agguggucucagauggag

SEQ ID NO: 574469 - RNA, 19 nt, Artificial Sequence
  Synthetic
gagguggucucagauggag

SEQ ID NO: 574470 - RNA, 20 nt, Artificial Sequence
  Synthetic
agagguggucucagauggag

SEQ ID NO: 574471 - RNA, 21 nt, Artificial Sequence
  Synthetic
cagagguggucucagauggag

SEQ ID NO: 574472 - RNA, 22 nt, Artificial Sequence
  Synthetic
gcagagguggucucagauggag

SEQ ID NO: 574473 - RNA, 23 nt, Artificial Sequence
  Synthetic
ggcagagguggucucagauggag

SEQ ID NO: 574474 - RNA, 24 nt, Artificial Sequence
  Synthetic
aggcagagguggucucagauggag

SEQ ID NO: 574475 - RNA, 18 nt, Artificial Sequence
  Synthetic
gcagcaacauggauggag

SEQ ID NO: 574476 - RNA, 19 nt, Artificial Sequence
  Synthetic
ugcagcaacauggauggag

SEQ ID NO: 574477 - RNA, 20 nt, Artificial Sequence
  Synthetic
uugcagcaacauggauggag

SEQ ID NO: 574478 - RNA, 21 nt, Artificial Sequence
  Synthetic
uuugcagcaacauggauggag

SEQ ID NO: 574479 - RNA, 22 nt, Artificial Sequence
  Synthetic
cuuugcagcaacauggauggag

SEQ ID NO: 574480 - RNA, 23 nt, Artificial Sequence
  Synthetic
ucuuugcagcaacauggauggag

SEQ ID NO: 574481 - RNA, 24 nt, Artificial Sequence
  Synthetic
uucuuugcagcaacauggauggag

SEQ ID NO: 574482 - RNA, 18 nt, Artificial Sequence
  Synthetic
uuaaaggagcugauggag

SEQ ID NO: 574483 - RNA, 19 nt, Artificial Sequence
  Synthetic
cuuaaaggagcugauggag

SEQ ID NO: 574484 - RNA, 20 nt, Artificial Sequence
  Synthetic
gcuuaaaggagcugauggag

SEQ ID NO: 574485 - RNA, 21 nt, Artificial Sequence
  Synthetic
ugcuuaaaggagcugauggag

SEQ ID NO: 574486 - RNA, 22 nt, Artificial Sequence
  Synthetic
gugcuuaaaggagcugauggag

SEQ ID NO: 574487 - RNA, 23 nt, Artificial Sequence
  Synthetic
agugcuuaaaggagcugauggag

SEQ ID NO: 574488 - RNA, 24 nt, Artificial Sequence
  Synthetic
aagugcuuaaaggagcugauggag

SEQ ID NO: 574489 - RNA, 18 nt, Artificial Sequence
  Synthetic
agaaagaugcugauggag

SEQ ID NO: 574490 - RNA, 19 nt, Artificial Sequence
  Synthetic
gagaaagaugcugauggag

SEQ ID NO: 574491 - RNA, 20 nt, Artificial Sequence
  Synthetic
agagaaagaugcugauggag

SEQ ID NO: 574492 - RNA, 21 nt, Artificial Sequence
  Synthetic
cagagaaagaugcugauggag

SEQ ID NO: 574493 - RNA, 22 nt, Artificial Sequence
  Synthetic
gcagagaaagaugcugauggag

SEQ ID NO: 574494 - RNA, 23 nt, Artificial Sequence
  Synthetic
ugcagagaaagaugcugauggag

SEQ ID NO: 574495 - RNA, 24 nt, Artificial Sequence
  Synthetic
gugcagagaaagaugcugauggag

SEQ ID NO: 574496 - RNA, 18 nt, Artificial Sequence
  Synthetic
aaugagugacauauggag

SEQ ID NO: 574497 - RNA, 19 nt, Artificial Sequence
  Synthetic
gaaugagugacauauggag

SEQ ID NO: 574498 - RNA, 20 nt, Artificial Sequence
  Synthetic
agaaugagugacauauggag

SEQ ID NO: 574499 - RNA, 21 nt, Artificial Sequence
  Synthetic
gagaaugagugacauauggag

SEQ ID NO: 574500 - RNA, 22 nt, Artificial Sequence
  Synthetic
ggagaaugagugacauauggag

SEQ ID NO: 574501 - RNA, 23 nt, Artificial Sequence
  Synthetic
aggagaaugagugacauauggag

SEQ ID NO: 574502 - RNA, 24 nt, Artificial Sequence
  Synthetic
gaggagaaugagugacauauggag

SEQ ID NO: 574503 - RNA, 18 nt, Artificial Sequence
  Synthetic
augagagaccauauggag

SEQ ID NO: 574504 - RNA, 19 nt, Artificial Sequence
  Synthetic
gaugagagaccauauggag

SEQ ID NO: 574505 - RNA, 20 nt, Artificial Sequence
  Synthetic
ggaugagagaccauauggag

SEQ ID NO: 574506 - RNA, 21 nt, Artificial Sequence
  Synthetic
aggaugagagaccauauggag

SEQ ID NO: 574507 - RNA, 22 nt, Artificial Sequence
  Synthetic
aaggaugagagaccauauggag

SEQ ID NO: 574508 - RNA, 23 nt, Artificial Sequence
  Synthetic
gaaggaugagagaccauauggag

SEQ ID NO: 574509 - RNA, 24 nt, Artificial Sequence
  Synthetic
cgaaggaugagagaccauauggag

SEQ ID NO: 574510 - RNA, 18 nt, Artificial Sequence
  Synthetic
uucaacauggauauggag

SEQ ID NO: 574511 - RNA, 19 nt, Artificial Sequence
  Synthetic
cuucaacauggauauggag

SEQ ID NO: 574512 - RNA, 20 nt, Artificial Sequence
  Synthetic
acuucaacauggauauggag

SEQ ID NO: 574513 - RNA, 21 nt, Artificial Sequence
  Synthetic
gacuucaacauggauauggag

SEQ ID NO: 574514 - RNA, 22 nt, Artificial Sequence
  Synthetic
agacuucaacauggauauggag

SEQ ID NO: 574515 - RNA, 23 nt, Artificial Sequence
  Synthetic
uagacuucaacauggauauggag

SEQ ID NO: 574516 - RNA, 24 nt, Artificial Sequence
  Synthetic
cuagacuucaacauggauauggag

SEQ ID NO: 574517 - RNA, 18 nt, Artificial Sequence
  Synthetic
caucagaaauguauggag

SEQ ID NO: 574518 - RNA, 19 nt, Artificial Sequence
  Synthetic
acaucagaaauguauggag

SEQ ID NO: 574519 - RNA, 20 nt, Artificial Sequence
  Synthetic
uacaucagaaauguauggag

SEQ ID NO: 574520 - RNA, 21 nt, Artificial Sequence
  Synthetic
auacaucagaaauguauggag

SEQ ID NO: 574521 - RNA, 22 nt, Artificial Sequence
  Synthetic
uauacaucagaaauguauggag

SEQ ID NO: 574522 - RNA, 23 nt, Artificial Sequence
  Synthetic
uuauacaucagaaauguauggag

SEQ ID NO: 574523 - RNA, 24 nt, Artificial Sequence
  Synthetic
uuuauacaucagaaauguauggag

SEQ ID NO: 574524 - RNA, 18 nt, Artificial Sequence
  Synthetic
guugguccucaacuggag

SEQ ID NO: 574525 - RNA, 19 nt, Artificial Sequence
  Synthetic
uguugguccucaacuggag

SEQ ID NO: 574526 - RNA, 20 nt, Artificial Sequence
  Synthetic
auguugguccucaacuggag

SEQ ID NO: 574527 - RNA, 21 nt, Artificial Sequence
  Synthetic
uauguugguccucaacuggag

SEQ ID NO: 574528 - RNA, 22 nt, Artificial Sequence
  Synthetic
auauguugguccucaacuggag

SEQ ID NO: 574529 - RNA, 23 nt, Artificial Sequence
  Synthetic
gauauguugguccucaacuggag

SEQ ID NO: 574530 - RNA, 24 nt, Artificial Sequence
  Synthetic
ugauauguugguccucaacuggag

SEQ ID NO: 574531 - RNA, 18 nt, Artificial Sequence
  Synthetic
uuuagacucuaacuggag

SEQ ID NO: 574532 - RNA, 19 nt, Artificial Sequence
  Synthetic
cuuuagacucuaacuggag

SEQ ID NO: 574533 - RNA, 20 nt, Artificial Sequence
  Synthetic
ccuuuagacucuaacuggag

SEQ ID NO: 574534 - RNA, 21 nt, Artificial Sequence
  Synthetic
uccuuuagacucuaacuggag

SEQ ID NO: 574535 - RNA, 22 nt, Artificial Sequence
  Synthetic
uuccuuuagacucuaacuggag

SEQ ID NO: 574536 - RNA, 23 nt, Artificial Sequence
  Synthetic
cuuccuuuagacucuaacuggag

SEQ ID NO: 574537 - RNA, 24 nt, Artificial Sequence
  Synthetic
ucuuccuuuagacucuaacuggag

SEQ ID NO: 574538 - RNA, 18 nt, Artificial Sequence
  Synthetic
cuaacaugguaacuggag

SEQ ID NO: 574539 - RNA, 19 nt, Artificial Sequence
  Synthetic
gcuaacaugguaacuggag

SEQ ID NO: 574540 - RNA, 20 nt, Artificial Sequence
  Synthetic
ggcuaacaugguaacuggag

SEQ ID NO: 574541 - RNA, 21 nt, Artificial Sequence
  Synthetic
aggcuaacaugguaacuggag

SEQ ID NO: 574542 - RNA, 22 nt, Artificial Sequence
  Synthetic
gaggcuaacaugguaacuggag

SEQ ID NO: 574543 - RNA, 23 nt, Artificial Sequence
  Synthetic
ggaggcuaacaugguaacuggag

SEQ ID NO: 574544 - RNA, 24 nt, Artificial Sequence
  Synthetic
gggaggcuaacaugguaacuggag

SEQ ID NO: 574545 - RNA, 18 nt, Artificial Sequence
  Synthetic
aaaagcacuuaacuggag

SEQ ID NO: 574546 - RNA, 19 nt, Artificial Sequence
  Synthetic
gaaaagcacuuaacuggag

SEQ ID NO: 574547 - RNA, 20 nt, Artificial Sequence
  Synthetic
ggaaaagcacuuaacuggag

SEQ ID NO: 574548 - RNA, 21 nt, Artificial Sequence
  Synthetic
aggaaaagcacuuaacuggag

SEQ ID NO: 574549 - RNA, 22 nt, Artificial Sequence
  Synthetic
aaggaaaagcacuuaacuggag

SEQ ID NO: 574550 - RNA, 23 nt, Artificial Sequence
  Synthetic
uaaggaaaagcacuuaacuggag

SEQ ID NO: 574551 - RNA, 24 nt, Artificial Sequence
  Synthetic
guaaggaaaagcacuuaacuggag

SEQ ID NO: 574552 - RNA, 18 nt, Artificial Sequence
  Synthetic
gcaagcuauacacuggag

SEQ ID NO: 574553 - RNA, 19 nt, Artificial Sequence
  Synthetic
ugcaagcuauacacuggag

SEQ ID NO: 574554 - RNA, 20 nt, Artificial Sequence
  Synthetic
uugcaagcuauacacuggag

SEQ ID NO: 574555 - RNA, 21 nt, Artificial Sequence
  Synthetic
cuugcaagcuauacacuggag

SEQ ID NO: 574556 - RNA, 22 nt, Artificial Sequence
  Synthetic
gcuugcaagcuauacacuggag

SEQ ID NO: 574557 - RNA, 23 nt, Artificial Sequence
  Synthetic
ugcuugcaagcuauacacuggag

SEQ ID NO: 574558 - RNA, 24 nt, Artificial Sequence
  Synthetic
uugcuugcaagcuauacacuggag

SEQ ID NO: 574559 - RNA, 18 nt, Artificial Sequence
  Synthetic
auuggcuagccacuggag

SEQ ID NO: 574560 - RNA, 19 nt, Artificial Sequence
  Synthetic
gauuggcuagccacuggag

SEQ ID NO: 574561 - RNA, 20 nt, Artificial Sequence
  Synthetic
ugauuggcuagccacuggag

SEQ ID NO: 574562 - RNA, 21 nt, Artificial Sequence
  Synthetic
uugauuggcuagccacuggag

SEQ ID NO: 574563 - RNA, 22 nt, Artificial Sequence
  Synthetic
cuugauuggcuagccacuggag

SEQ ID NO: 574564 - RNA, 23 nt, Artificial Sequence
  Synthetic
ucuugauuggcuagccacuggag

SEQ ID NO: 574565 - RNA, 24 nt, Artificial Sequence
  Synthetic
uucuugauuggcuagccacuggag

SEQ ID NO: 574566 - RNA, 18 nt, Artificial Sequence
  Synthetic
acgaaugggccacuggag

SEQ ID NO: 574567 - RNA, 19 nt, Artificial Sequence
  Synthetic
uacgaaugggccacuggag

SEQ ID NO: 574568 - RNA, 20 nt, Artificial Sequence
  Synthetic
uuacgaaugggccacuggag

SEQ ID NO: 574569 - RNA, 21 nt, Artificial Sequence
  Synthetic
uuuacgaaugggccacuggag

SEQ ID NO: 574570 - RNA, 22 nt, Artificial Sequence
  Synthetic
cuuuacgaaugggccacuggag

SEQ ID NO: 574571 - RNA, 23 nt, Artificial Sequence
  Synthetic
gcuuuacgaaugggccacuggag

SEQ ID NO: 574572 - RNA, 24 nt, Artificial Sequence
  Synthetic
agcuuuacgaaugggccacuggag

SEQ ID NO: 574573 - RNA, 18 nt, Artificial Sequence
  Synthetic
cauuugaaucgacuggag

SEQ ID NO: 574574 - RNA, 19 nt, Artificial Sequence
  Synthetic
acauuugaaucgacuggag

SEQ ID NO: 574575 - RNA, 20 nt, Artificial Sequence
  Synthetic
gacauuugaaucgacuggag

SEQ ID NO: 574576 - RNA, 21 nt, Artificial Sequence
  Synthetic
ggacauuugaaucgacuggag

SEQ ID NO: 574577 - RNA, 22 nt, Artificial Sequence
  Synthetic
aggacauuugaaucgacuggag

SEQ ID NO: 574578 - RNA, 23 nt, Artificial Sequence
  Synthetic
gaggacauuugaaucgacuggag

SEQ ID NO: 574579 - RNA, 24 nt, Artificial Sequence
  Synthetic
agaggacauuugaaucgacuggag

SEQ ID NO: 574580 - RNA, 18 nt, Artificial Sequence
  Synthetic
cguggaagccuacuggag

SEQ ID NO: 574581 - RNA, 19 nt, Artificial Sequence
  Synthetic
acguggaagccuacuggag

SEQ ID NO: 574582 - RNA, 20 nt, Artificial Sequence
  Synthetic
gacguggaagccuacuggag

SEQ ID NO: 574583 - RNA, 21 nt, Artificial Sequence
  Synthetic
agacguggaagccuacuggag

SEQ ID NO: 574584 - RNA, 22 nt, Artificial Sequence
  Synthetic
cagacguggaagccuacuggag

SEQ ID NO: 574585 - RNA, 23 nt, Artificial Sequence
  Synthetic
acagacguggaagccuacuggag

SEQ ID NO: 574586 - RNA, 24 nt, Artificial Sequence
  Synthetic
aacagacguggaagccuacuggag

SEQ ID NO: 574587 - RNA, 18 nt, Artificial Sequence
  Synthetic
gcagguucauaccuggag

SEQ ID NO: 574588 - RNA, 19 nt, Artificial Sequence
  Synthetic
ugcagguucauaccuggag

SEQ ID NO: 574589 - RNA, 20 nt, Artificial Sequence
  Synthetic
cugcagguucauaccuggag

SEQ ID NO: 574590 - RNA, 21 nt, Artificial Sequence
  Synthetic
ccugcagguucauaccuggag

SEQ ID NO: 574591 - RNA, 22 nt, Artificial Sequence
  Synthetic
uccugcagguucauaccuggag

SEQ ID NO: 574592 - RNA, 23 nt, Artificial Sequence
  Synthetic
auccugcagguucauaccuggag

SEQ ID NO: 574593 - RNA, 24 nt, Artificial Sequence
  Synthetic
aauccugcagguucauaccuggag

SEQ ID NO: 574594 - RNA, 18 nt, Artificial Sequence
  Synthetic
ugccugagauuccuggag

SEQ ID NO: 574595 - RNA, 19 nt, Artificial Sequence
  Synthetic
gugccugagauuccuggag

SEQ ID NO: 574596 - RNA, 20 nt, Artificial Sequence
  Synthetic
ggugccugagauuccuggag

SEQ ID NO: 574597 - RNA, 21 nt, Artificial Sequence
  Synthetic
aggugccugagauuccuggag

SEQ ID NO: 574598 - RNA, 22 nt, Artificial Sequence
  Synthetic
uaggugccugagauuccuggag

SEQ ID NO: 574599 - RNA, 23 nt, Artificial Sequence
  Synthetic
uuaggugccugagauuccuggag

SEQ ID NO: 574600 - RNA, 24 nt, Artificial Sequence
  Synthetic
uuuaggugccugagauuccuggag

SEQ ID NO: 574601 - RNA, 18 nt, Artificial Sequence
  Synthetic
gguugcuaagggcuggag

SEQ ID NO: 574602 - RNA, 19 nt, Artificial Sequence
  Synthetic
ugguugcuaagggcuggag

SEQ ID NO: 574603 - RNA, 20 nt, Artificial Sequence
  Synthetic
gugguugcuaagggcuggag

SEQ ID NO: 574604 - RNA, 21 nt, Artificial Sequence
  Synthetic
ggugguugcuaagggcuggag

SEQ ID NO: 574605 - RNA, 22 nt, Artificial Sequence
  Synthetic
uggugguugcuaagggcuggag

SEQ ID NO: 574606 - RNA, 23 nt, Artificial Sequence
  Synthetic
auggugguugcuaagggcuggag

SEQ ID NO: 574607 - RNA, 24 nt, Artificial Sequence
  Synthetic
aauggugguugcuaagggcuggag

SEQ ID NO: 574608 - RNA, 18 nt, Artificial Sequence
  Synthetic
ccagcuuccuggcuggag

SEQ ID NO: 574609 - RNA, 19 nt, Artificial Sequence
  Synthetic
uccagcuuccuggcuggag

SEQ ID NO: 574610 - RNA, 20 nt, Artificial Sequence
  Synthetic
cuccagcuuccuggcuggag

SEQ ID NO: 574611 - RNA, 21 nt, Artificial Sequence
  Synthetic
ucuccagcuuccuggcuggag

SEQ ID NO: 574612 - RNA, 22 nt, Artificial Sequence
  Synthetic
uucuccagcuuccuggcuggag

SEQ ID NO: 574613 - RNA, 23 nt, Artificial Sequence
  Synthetic
uuucuccagcuuccuggcuggag

SEQ ID NO: 574614 - RNA, 24 nt, Artificial Sequence
  Synthetic
cuuucuccagcuuccuggcuggag

SEQ ID NO: 574615 - RNA, 18 nt, Artificial Sequence
  Synthetic
uuaacaucagugcuggag

SEQ ID NO: 574616 - RNA, 19 nt, Artificial Sequence
  Synthetic
cuuaacaucagugcuggag

SEQ ID NO: 574617 - RNA, 20 nt, Artificial Sequence
  Synthetic
ucuuaacaucagugcuggag

SEQ ID NO: 574618 - RNA, 21 nt, Artificial Sequence
  Synthetic
cucuuaacaucagugcuggag

SEQ ID NO: 574619 - RNA, 22 nt, Artificial Sequence
  Synthetic
gcucuuaacaucagugcuggag

SEQ ID NO: 574620 - RNA, 23 nt, Artificial Sequence
  Synthetic
ugcucuuaacaucagugcuggag

SEQ ID NO: 574621 - RNA, 24 nt, Artificial Sequence
  Synthetic
uugcucuuaacaucagugcuggag

SEQ ID NO: 574622 - RNA, 18 nt, Artificial Sequence
  Synthetic
ucaaaaauaauucuggag

SEQ ID NO: 574623 - RNA, 19 nt, Artificial Sequence
  Synthetic
uucaaaaauaauucuggag

SEQ ID NO: 574624 - RNA, 20 nt, Artificial Sequence
  Synthetic
guucaaaaauaauucuggag

SEQ ID NO: 574625 - RNA, 21 nt, Artificial Sequence
  Synthetic
uguucaaaaauaauucuggag

SEQ ID NO: 574626 - RNA, 22 nt, Artificial Sequence
  Synthetic
guguucaaaaauaauucuggag

SEQ ID NO: 574627 - RNA, 23 nt, Artificial Sequence
  Synthetic
aguguucaaaaauaauucuggag

SEQ ID NO: 574628 - RNA, 24 nt, Artificial Sequence
  Synthetic
gaguguucaaaaauaauucuggag

SEQ ID NO: 574629 - RNA, 18 nt, Artificial Sequence
  Synthetic
gagagggagagaguggag

SEQ ID NO: 574630 - RNA, 19 nt, Artificial Sequence
  Synthetic
agagagggagagaguggag

SEQ ID NO: 574631 - RNA, 20 nt, Artificial Sequence
  Synthetic
gagagagggagagaguggag

SEQ ID NO: 574632 - RNA, 21 nt, Artificial Sequence
  Synthetic
ggagagagggagagaguggag

SEQ ID NO: 574633 - RNA, 22 nt, Artificial Sequence
  Synthetic
gggagagagggagagaguggag

SEQ ID NO: 574634 - RNA, 23 nt, Artificial Sequence
  Synthetic
agggagagagggagagaguggag

SEQ ID NO: 574635 - RNA, 24 nt, Artificial Sequence
  Synthetic
gagggagagagggagagaguggag

SEQ ID NO: 574636 - RNA, 18 nt, Artificial Sequence
  Synthetic
ggaauaaggugaguggag

SEQ ID NO: 574637 - RNA, 19 nt, Artificial Sequence
  Synthetic
aggaauaaggugaguggag

SEQ ID NO: 574638 - RNA, 20 nt, Artificial Sequence
  Synthetic
gaggaauaaggugaguggag

SEQ ID NO: 574639 - RNA, 21 nt, Artificial Sequence
  Synthetic
ugaggaauaaggugaguggag

SEQ ID NO: 574640 - RNA, 22 nt, Artificial Sequence
  Synthetic
cugaggaauaaggugaguggag

SEQ ID NO: 574641 - RNA, 23 nt, Artificial Sequence
  Synthetic
ccugaggaauaaggugaguggag

SEQ ID NO: 574642 - RNA, 24 nt, Artificial Sequence
  Synthetic
gccugaggaauaaggugaguggag

SEQ ID NO: 574643 - RNA, 18 nt, Artificial Sequence
  Synthetic
uuuuguacuuuaguggag

SEQ ID NO: 574644 - RNA, 19 nt, Artificial Sequence
  Synthetic
uuuuuguacuuuaguggag

SEQ ID NO: 574645 - RNA, 20 nt, Artificial Sequence
  Synthetic
uuuuuuguacuuuaguggag

SEQ ID NO: 574646 - RNA, 21 nt, Artificial Sequence
  Synthetic
auuuuuuguacuuuaguggag

SEQ ID NO: 574647 - RNA, 22 nt, Artificial Sequence
  Synthetic
aauuuuuuguacuuuaguggag

SEQ ID NO: 574648 - RNA, 23 nt, Artificial Sequence
  Synthetic
uaauuuuuuguacuuuaguggag

SEQ ID NO: 574649 - RNA, 24 nt, Artificial Sequence
  Synthetic
cuaauuuuuuguacuuuaguggag

SEQ ID NO: 574650 - RNA, 18 nt, Artificial Sequence
  Synthetic
uuuguauuuuuaguggag

SEQ ID NO: 574651 - RNA, 19 nt, Artificial Sequence
  Synthetic
uuuuguauuuuuaguggag

SEQ ID NO: 574652 - RNA, 20 nt, Artificial Sequence
  Synthetic
uuuuuguauuuuuaguggag

SEQ ID NO: 574653 - RNA, 21 nt, Artificial Sequence
  Synthetic
auuuuuguauuuuuaguggag

SEQ ID NO: 574654 - RNA, 22 nt, Artificial Sequence
  Synthetic
aauuuuuguauuuuuaguggag

SEQ ID NO: 574655 - RNA, 23 nt, Artificial Sequence
  Synthetic
uaauuuuuguauuuuuaguggag

SEQ ID NO: 574656 - RNA, 24 nt, Artificial Sequence
  Synthetic
cuaauuuuuguauuuuuaguggag

SEQ ID NO: 574657 - RNA, 18 nt, Artificial Sequence
  Synthetic
ugauugcagaagguggag

SEQ ID NO: 574658 - RNA, 19 nt, Artificial Sequence
  Synthetic
gugauugcagaagguggag

SEQ ID NO: 574659 - RNA, 20 nt, Artificial Sequence
  Synthetic
ugugauugcagaagguggag

SEQ ID NO: 574660 - RNA, 21 nt, Artificial Sequence
  Synthetic
uugugauugcagaagguggag

SEQ ID NO: 574661 - RNA, 22 nt, Artificial Sequence
  Synthetic
guugugauugcagaagguggag

SEQ ID NO: 574662 - RNA, 23 nt, Artificial Sequence
  Synthetic
gguugugauugcagaagguggag

SEQ ID NO: 574663 - RNA, 24 nt, Artificial Sequence
  Synthetic
agguugugauugcagaagguggag

SEQ ID NO: 574664 - RNA, 18 nt, Artificial Sequence
  Synthetic
gggucaacauagguggag

SEQ ID NO: 574665 - RNA, 19 nt, Artificial Sequence
  Synthetic
ggggucaacauagguggag

SEQ ID NO: 574666 - RNA, 20 nt, Artificial Sequence
  Synthetic
aggggucaacauagguggag

SEQ ID NO: 574667 - RNA, 21 nt, Artificial Sequence
  Synthetic
aaggggucaacauagguggag

SEQ ID NO: 574668 - RNA, 22 nt, Artificial Sequence
  Synthetic
aaaggggucaacauagguggag

SEQ ID NO: 574669 - RNA, 23 nt, Artificial Sequence
  Synthetic
caaaggggucaacauagguggag

SEQ ID NO: 574670 - RNA, 24 nt, Artificial Sequence
  Synthetic
gcaaaggggucaacauagguggag

SEQ ID NO: 574671 - RNA, 18 nt, Artificial Sequence
  Synthetic
uucaaggcuacuguggag

SEQ ID NO: 574672 - RNA, 19 nt, Artificial Sequence
  Synthetic
uuucaaggcuacuguggag

SEQ ID NO: 574673 - RNA, 20 nt, Artificial Sequence
  Synthetic
uuuucaaggcuacuguggag

SEQ ID NO: 574674 - RNA, 21 nt, Artificial Sequence
  Synthetic
auuuucaaggcuacuguggag

SEQ ID NO: 574675 - RNA, 22 nt, Artificial Sequence
  Synthetic
gauuuucaaggcuacuguggag

SEQ ID NO: 574676 - RNA, 23 nt, Artificial Sequence
  Synthetic
ugauuuucaaggcuacuguggag

SEQ ID NO: 574677 - RNA, 24 nt, Artificial Sequence
  Synthetic
cugauuuucaaggcuacuguggag

SEQ ID NO: 574678 - RNA, 18 nt, Artificial Sequence
  Synthetic
acaggcagaucuguggag

SEQ ID NO: 574679 - RNA, 19 nt, Artificial Sequence
  Synthetic
gacaggcagaucuguggag

SEQ ID NO: 574680 - RNA, 20 nt, Artificial Sequence
  Synthetic
agacaggcagaucuguggag

SEQ ID NO: 574681 - RNA, 21 nt, Artificial Sequence
  Synthetic
uagacaggcagaucuguggag

SEQ ID NO: 574682 - RNA, 22 nt, Artificial Sequence
  Synthetic
cuagacaggcagaucuguggag

SEQ ID NO: 574683 - RNA, 23 nt, Artificial Sequence
  Synthetic
ucuagacaggcagaucuguggag

SEQ ID NO: 574684 - RNA, 24 nt, Artificial Sequence
  Synthetic
cucuagacaggcagaucuguggag

SEQ ID NO: 574685 - RNA, 18 nt, Artificial Sequence
  Synthetic
cugccaccgucuguggag

SEQ ID NO: 574686 - RNA, 19 nt, Artificial Sequence
  Synthetic
ccugccaccgucuguggag

SEQ ID NO: 574687 - RNA, 20 nt, Artificial Sequence
  Synthetic
accugccaccgucuguggag

SEQ ID NO: 574688 - RNA, 21 nt, Artificial Sequence
  Synthetic
uaccugccaccgucuguggag

SEQ ID NO: 574689 - RNA, 22 nt, Artificial Sequence
  Synthetic
auaccugccaccgucuguggag

SEQ ID NO: 574690 - RNA, 23 nt, Artificial Sequence
  Synthetic
aauaccugccaccgucuguggag

SEQ ID NO: 574691 - RNA, 24 nt, Artificial Sequence
  Synthetic
gaauaccugccaccgucuguggag

SEQ ID NO: 574692 - RNA, 18 nt, Artificial Sequence
  Synthetic
uaauagcauucuguggag

SEQ ID NO: 574693 - RNA, 19 nt, Artificial Sequence
  Synthetic
auaauagcauucuguggag

SEQ ID NO: 574694 - RNA, 20 nt, Artificial Sequence
  Synthetic
uauaauagcauucuguggag

SEQ ID NO: 574695 - RNA, 21 nt, Artificial Sequence
  Synthetic
cuauaauagcauucuguggag

SEQ ID NO: 574696 - RNA, 22 nt, Artificial Sequence
  Synthetic
acuauaauagcauucuguggag

SEQ ID NO: 574697 - RNA, 23 nt, Artificial Sequence
  Synthetic
uacuauaauagcauucuguggag

SEQ ID NO: 574698 - RNA, 24 nt, Artificial Sequence
  Synthetic
uuacuauaauagcauucuguggag

SEQ ID NO: 574699 - RNA, 18 nt, Artificial Sequence
  Synthetic
ggguauggggguguggag

SEQ ID NO: 574700 - RNA, 19 nt, Artificial Sequence
  Synthetic
uggguauggggguguggag

SEQ ID NO: 574701 - RNA, 20 nt, Artificial Sequence
  Synthetic
guggguauggggguguggag

SEQ ID NO: 574702 - RNA, 21 nt, Artificial Sequence
  Synthetic
gguggguauggggguguggag

SEQ ID NO: 574703 - RNA, 22 nt, Artificial Sequence
  Synthetic
ugguggguauggggguguggag

SEQ ID NO: 574704 - RNA, 23 nt, Artificial Sequence
  Synthetic
gugguggguauggggguguggag

SEQ ID NO: 574705 - RNA, 24 nt, Artificial Sequence
  Synthetic
agugguggguauggggguguggag

SEQ ID NO: 574706 - RNA, 18 nt, Artificial Sequence
  Synthetic
uguagaaauagauuggag

SEQ ID NO: 574707 - RNA, 19 nt, Artificial Sequence
  Synthetic
guguagaaauagauuggag

SEQ ID NO: 574708 - RNA, 20 nt, Artificial Sequence
  Synthetic
gguguagaaauagauuggag

SEQ ID NO: 574709 - RNA, 21 nt, Artificial Sequence
  Synthetic
ggguguagaaauagauuggag

SEQ ID NO: 574710 - RNA, 22 nt, Artificial Sequence
  Synthetic
aggguguagaaauagauuggag

SEQ ID NO: 574711 - RNA, 23 nt, Artificial Sequence
  Synthetic
uaggguguagaaauagauuggag

SEQ ID NO: 574712 - RNA, 24 nt, Artificial Sequence
  Synthetic
cuaggguguagaaauagauuggag

SEQ ID NO: 574713 - RNA, 20 nt, Artificial Sequence
  Synthetic
uguguagaaauagauuggag

SEQ ID NO: 574714 - RNA, 21 nt, Artificial Sequence
  Synthetic
uuguguagaaauagauuggag

SEQ ID NO: 574715 - RNA, 22 nt, Artificial Sequence
  Synthetic
uuuguguagaaauagauuggag

SEQ ID NO: 574716 - RNA, 23 nt, Artificial Sequence
  Synthetic
uuuuguguagaaauagauuggag

SEQ ID NO: 574717 - RNA, 24 nt, Artificial Sequence
  Synthetic
cuuuuguguagaaauagauuggag

SEQ ID NO: 574718 - RNA, 18 nt, Artificial Sequence
  Synthetic
uuggagaguagauuggag

SEQ ID NO: 574719 - RNA, 19 nt, Artificial Sequence
  Synthetic
auuggagaguagauuggag

SEQ ID NO: 574720 - RNA, 20 nt, Artificial Sequence
  Synthetic
aauuggagaguagauuggag

SEQ ID NO: 574721 - RNA, 21 nt, Artificial Sequence
  Synthetic
uaauuggagaguagauuggag

SEQ ID NO: 574722 - RNA, 22 nt, Artificial Sequence
  Synthetic
cuaauuggagaguagauuggag

SEQ ID NO: 574723 - RNA, 23 nt, Artificial Sequence
  Synthetic
gcuaauuggagaguagauuggag

SEQ ID NO: 574724 - RNA, 24 nt, Artificial Sequence
  Synthetic
ugcuaauuggagaguagauuggag

SEQ ID NO: 574725 - RNA, 18 nt, Artificial Sequence
  Synthetic
ugauccucaauauuggag

SEQ ID NO: 574726 - RNA, 19 nt, Artificial Sequence
  Synthetic
uugauccucaauauuggag

SEQ ID NO: 574727 - RNA, 20 nt, Artificial Sequence
  Synthetic
uuugauccucaauauuggag

SEQ ID NO: 574728 - RNA, 21 nt, Artificial Sequence
  Synthetic
auuugauccucaauauuggag

SEQ ID NO: 574729 - RNA, 22 nt, Artificial Sequence
  Synthetic
aauuugauccucaauauuggag

SEQ ID NO: 574730 - RNA, 23 nt, Artificial Sequence
  Synthetic
aaauuugauccucaauauuggag

SEQ ID NO: 574731 - RNA, 24 nt, Artificial Sequence
  Synthetic
gaaauuugauccucaauauuggag

SEQ ID NO: 574732 - RNA, 18 nt, Artificial Sequence
  Synthetic
ggcagcacgaccuuggag

SEQ ID NO: 574733 - RNA, 19 nt, Artificial Sequence
  Synthetic
aggcagcacgaccuuggag

SEQ ID NO: 574734 - RNA, 20 nt, Artificial Sequence
  Synthetic
gaggcagcacgaccuuggag

SEQ ID NO: 574735 - RNA, 21 nt, Artificial Sequence
  Synthetic
ggaggcagcacgaccuuggag

SEQ ID NO: 574736 - RNA, 22 nt, Artificial Sequence
  Synthetic
gggaggcagcacgaccuuggag

SEQ ID NO: 574737 - RNA, 23 nt, Artificial Sequence
  Synthetic
ugggaggcagcacgaccuuggag

SEQ ID NO: 574738 - RNA, 24 nt, Artificial Sequence
  Synthetic
augggaggcagcacgaccuuggag

SEQ ID NO: 574739 - RNA, 18 nt, Artificial Sequence
  Synthetic
acugcuuaccccuuggag

SEQ ID NO: 574740 - RNA, 19 nt, Artificial Sequence
  Synthetic
aacugcuuaccccuuggag

SEQ ID NO: 574741 - RNA, 20 nt, Artificial Sequence
  Synthetic
aaacugcuuaccccuuggag

SEQ ID NO: 574742 - RNA, 21 nt, Artificial Sequence
  Synthetic
aaaacugcuuaccccuuggag

SEQ ID NO: 574743 - RNA, 22 nt, Artificial Sequence
  Synthetic
aaaaacugcuuaccccuuggag

SEQ ID NO: 574744 - RNA, 23 nt, Artificial Sequence
  Synthetic
uaaaaacugcuuaccccuuggag

SEQ ID NO: 574745 - RNA, 24 nt, Artificial Sequence
  Synthetic
cuaaaaacugcuuaccccuuggag

SEQ ID NO: 574746 - RNA, 18 nt, Artificial Sequence
  Synthetic
gacucuagggucuuggag

SEQ ID NO: 574747 - RNA, 19 nt, Artificial Sequence
  Synthetic
agacucuagggucuuggag

SEQ ID NO: 574748 - RNA, 20 nt, Artificial Sequence
  Synthetic
uagacucuagggucuuggag

SEQ ID NO: 574749 - RNA, 21 nt, Artificial Sequence
  Synthetic
cuagacucuagggucuuggag

SEQ ID NO: 574750 - RNA, 22 nt, Artificial Sequence
  Synthetic
acuagacucuagggucuuggag

SEQ ID NO: 574751 - RNA, 23 nt, Artificial Sequence
  Synthetic
uacuagacucuagggucuuggag

SEQ ID NO: 574752 - RNA, 24 nt, Artificial Sequence
  Synthetic
uuacuagacucuagggucuuggag

SEQ ID NO: 574753 - RNA, 18 nt, Artificial Sequence
  Synthetic
uaaaaaaacuucuuggag

SEQ ID NO: 574754 - RNA, 19 nt, Artificial Sequence
  Synthetic
uuaaaaaaacuucuuggag

SEQ ID NO: 574755 - RNA, 20 nt, Artificial Sequence
  Synthetic
auuaaaaaaacuucuuggag

SEQ ID NO: 574756 - RNA, 21 nt, Artificial Sequence
  Synthetic
aauuaaaaaaacuucuuggag

SEQ ID NO: 574757 - RNA, 22 nt, Artificial Sequence
  Synthetic
aaauuaaaaaaacuucuuggag

SEQ ID NO: 574758 - RNA, 23 nt, Artificial Sequence
  Synthetic
uaaauuaaaaaaacuucuuggag

SEQ ID NO: 574759 - RNA, 24 nt, Artificial Sequence
  Synthetic
auaaauuaaaaaaacuucuuggag

SEQ ID NO: 574760 - RNA, 18 nt, Artificial Sequence
  Synthetic
ggacuauaguucuuggag

SEQ ID NO: 574761 - RNA, 19 nt, Artificial Sequence
  Synthetic
uggacuauaguucuuggag

SEQ ID NO: 574762 - RNA, 20 nt, Artificial Sequence
  Synthetic
uuggacuauaguucuuggag

SEQ ID NO: 574763 - RNA, 21 nt, Artificial Sequence
  Synthetic
uuuggacuauaguucuuggag

SEQ ID NO: 574764 - RNA, 22 nt, Artificial Sequence
  Synthetic
auuuggacuauaguucuuggag

SEQ ID NO: 574765 - RNA, 23 nt, Artificial Sequence
  Synthetic
gauuuggacuauaguucuuggag

SEQ ID NO: 574766 - RNA, 24 nt, Artificial Sequence
  Synthetic
ugauuuggacuauaguucuuggag

SEQ ID NO: 574767 - RNA, 18 nt, Artificial Sequence
  Synthetic
guguggcaauaguuggag

SEQ ID NO: 574768 - RNA, 19 nt, Artificial Sequence
  Synthetic
aguguggcaauaguuggag

SEQ ID NO: 574769 - RNA, 20 nt, Artificial Sequence
  Synthetic
caguguggcaauaguuggag

SEQ ID NO: 574770 - RNA, 21 nt, Artificial Sequence
  Synthetic
acaguguggcaauaguuggag

SEQ ID NO: 574771 - RNA, 22 nt, Artificial Sequence
  Synthetic
aacaguguggcaauaguuggag

SEQ ID NO: 574772 - RNA, 23 nt, Artificial Sequence
  Synthetic
uaacaguguggcaauaguuggag

SEQ ID NO: 574773 - RNA, 24 nt, Artificial Sequence
  Synthetic
cuaacaguguggcaauaguuggag

SEQ ID NO: 574774 - RNA, 18 nt, Artificial Sequence
  Synthetic
uaauccccaauguuggag

SEQ ID NO: 574775 - RNA, 19 nt, Artificial Sequence
  Synthetic
guaauccccaauguuggag

SEQ ID NO: 574776 - RNA, 20 nt, Artificial Sequence
  Synthetic
uguaauccccaauguuggag

SEQ ID NO: 574777 - RNA, 21 nt, Artificial Sequence
  Synthetic
uuguaauccccaauguuggag

SEQ ID NO: 574778 - RNA, 22 nt, Artificial Sequence
  Synthetic
auuguaauccccaauguuggag

SEQ ID NO: 574779 - RNA, 23 nt, Artificial Sequence
  Synthetic
aauuguaauccccaauguuggag

SEQ ID NO: 574780 - RNA, 24 nt, Artificial Sequence
  Synthetic
aaauuguaauccccaauguuggag

SEQ ID NO: 574781 - RNA, 18 nt, Artificial Sequence
  Synthetic
ucuuacgcucuguuggag

SEQ ID NO: 574782 - RNA, 19 nt, Artificial Sequence
  Synthetic
gucuuacgcucuguuggag

SEQ ID NO: 574783 - RNA, 20 nt, Artificial Sequence
  Synthetic
ggucuuacgcucuguuggag

SEQ ID NO: 574784 - RNA, 21 nt, Artificial Sequence
  Synthetic
gggucuuacgcucuguuggag

SEQ ID NO: 574785 - RNA, 22 nt, Artificial Sequence
  Synthetic
ugggucuuacgcucuguuggag

SEQ ID NO: 574786 - RNA, 23 nt, Artificial Sequence
  Synthetic
cugggucuuacgcucuguuggag

SEQ ID NO: 574787 - RNA, 24 nt, Artificial Sequence
  Synthetic
gcugggucuuacgcucuguuggag

SEQ ID NO: 574788 - RNA, 18 nt, Artificial Sequence
  Synthetic
uaauucccaguguuggag

SEQ ID NO: 574789 - RNA, 19 nt, Artificial Sequence
  Synthetic
guaauucccaguguuggag

SEQ ID NO: 574790 - RNA, 20 nt, Artificial Sequence
  Synthetic
uguaauucccaguguuggag

SEQ ID NO: 574791 - RNA, 21 nt, Artificial Sequence
  Synthetic
auguaauucccaguguuggag

SEQ ID NO: 574792 - RNA, 22 nt, Artificial Sequence
  Synthetic
aauguaauucccaguguuggag

SEQ ID NO: 574793 - RNA, 23 nt, Artificial Sequence
  Synthetic
aaauguaauucccaguguuggag

SEQ ID NO: 574794 - RNA, 24 nt, Artificial Sequence
  Synthetic
gaaauguaauucccaguguuggag

SEQ ID NO: 574795 - RNA, 18 nt, Artificial Sequence
  Synthetic
cuuuuggagaauuuggag

SEQ ID NO: 574796 - RNA, 19 nt, Artificial Sequence
  Synthetic
acuuuuggagaauuuggag

SEQ ID NO: 574797 - RNA, 20 nt, Artificial Sequence
  Synthetic
gacuuuuggagaauuuggag

SEQ ID NO: 574798 - RNA, 21 nt, Artificial Sequence
  Synthetic
agacuuuuggagaauuuggag

SEQ ID NO: 574799 - RNA, 22 nt, Artificial Sequence
  Synthetic
gagacuuuuggagaauuuggag

SEQ ID NO: 574800 - RNA, 23 nt, Artificial Sequence
  Synthetic
ugagacuuuuggagaauuuggag

SEQ ID NO: 574801 - RNA, 24 nt, Artificial Sequence
  Synthetic
gugagacuuuuggagaauuuggag

SEQ ID NO: 574802 - RNA, 18 nt, Artificial Sequence
  Synthetic
auuauauuuaauuuggag

SEQ ID NO: 574803 - RNA, 19 nt, Artificial Sequence
  Synthetic
uauuauauuuaauuuggag

SEQ ID NO: 574804 - RNA, 20 nt, Artificial Sequence
  Synthetic
guauuauauuuaauuuggag

SEQ ID NO: 574805 - RNA, 21 nt, Artificial Sequence
  Synthetic
aguauuauauuuaauuuggag

SEQ ID NO: 574806 - RNA, 22 nt, Artificial Sequence
  Synthetic
caguauuauauuuaauuuggag

SEQ ID NO: 574807 - RNA, 23 nt, Artificial Sequence
  Synthetic
gcaguauuauauuuaauuuggag

SEQ ID NO: 574808 - RNA, 24 nt, Artificial Sequence
  Synthetic
ugcaguauuauauuuaauuuggag

SEQ ID NO: 574809 - RNA, 18 nt, Artificial Sequence
  Synthetic
aguugugaucauuuggag

SEQ ID NO: 574810 - RNA, 19 nt, Artificial Sequence
  Synthetic
gaguugugaucauuuggag

SEQ ID NO: 574811 - RNA, 20 nt, Artificial Sequence
  Synthetic
ggaguugugaucauuuggag

SEQ ID NO: 574812 - RNA, 21 nt, Artificial Sequence
  Synthetic
aggaguugugaucauuuggag

SEQ ID NO: 574813 - RNA, 22 nt, Artificial Sequence
  Synthetic
gaggaguugugaucauuuggag

SEQ ID NO: 574814 - RNA, 23 nt, Artificial Sequence
  Synthetic
agaggaguugugaucauuuggag

SEQ ID NO: 574815 - RNA, 24 nt, Artificial Sequence
  Synthetic
gagaggaguugugaucauuuggag

SEQ ID NO: 574816 - RNA, 18 nt, Artificial Sequence
  Synthetic
cccaauggauauuuggag

SEQ ID NO: 574817 - RNA, 19 nt, Artificial Sequence
  Synthetic
ccccaauggauauuuggag

SEQ ID NO: 574818 - RNA, 20 nt, Artificial Sequence
  Synthetic
cccccaauggauauuuggag

SEQ ID NO: 574819 - RNA, 21 nt, Artificial Sequence
  Synthetic
acccccaauggauauuuggag

SEQ ID NO: 574820 - RNA, 22 nt, Artificial Sequence
  Synthetic
aacccccaauggauauuuggag

SEQ ID NO: 574821 - RNA, 23 nt, Artificial Sequence
  Synthetic
uaacccccaauggauauuuggag

SEQ ID NO: 574822 - RNA, 24 nt, Artificial Sequence
  Synthetic
cuaacccccaauggauauuuggag

SEQ ID NO: 574823 - RNA, 18 nt, Artificial Sequence
  Synthetic
guggggaugacuuuggag

SEQ ID NO: 574824 - RNA, 19 nt, Artificial Sequence
  Synthetic
uguggggaugacuuuggag

SEQ ID NO: 574825 - RNA, 20 nt, Artificial Sequence
  Synthetic
uuguggggaugacuuuggag

SEQ ID NO: 574826 - RNA, 21 nt, Artificial Sequence
  Synthetic
auuguggggaugacuuuggag

SEQ ID NO: 574827 - RNA, 22 nt, Artificial Sequence
  Synthetic
aauuguggggaugacuuuggag

SEQ ID NO: 574828 - RNA, 23 nt, Artificial Sequence
  Synthetic
caauuguggggaugacuuuggag

SEQ ID NO: 574829 - RNA, 24 nt, Artificial Sequence
  Synthetic
ucaauuguggggaugacuuuggag

SEQ ID NO: 574830 - RNA, 18 nt, Artificial Sequence
  Synthetic
ccuggaaaggcuuuggag

SEQ ID NO: 574831 - RNA, 19 nt, Artificial Sequence
  Synthetic
accuggaaaggcuuuggag

SEQ ID NO: 574832 - RNA, 20 nt, Artificial Sequence
  Synthetic
gaccuggaaaggcuuuggag

SEQ ID NO: 574833 - RNA, 21 nt, Artificial Sequence
  Synthetic
ugaccuggaaaggcuuuggag

SEQ ID NO: 574834 - RNA, 22 nt, Artificial Sequence
  Synthetic
gugaccuggaaaggcuuuggag

SEQ ID NO: 574835 - RNA, 23 nt, Artificial Sequence
  Synthetic
agugaccuggaaaggcuuuggag

SEQ ID NO: 574836 - RNA, 24 nt, Artificial Sequence
  Synthetic
aagugaccuggaaaggcuuuggag

SEQ ID NO: 574837 - RNA, 18 nt, Artificial Sequence
  Synthetic
aaaguuucagguuuggag

SEQ ID NO: 574838 - RNA, 19 nt, Artificial Sequence
  Synthetic
uaaaguuucagguuuggag

SEQ ID NO: 574839 - RNA, 20 nt, Artificial Sequence
  Synthetic
uuaaaguuucagguuuggag

SEQ ID NO: 574840 - RNA, 21 nt, Artificial Sequence
  Synthetic
uuuaaaguuucagguuuggag

SEQ ID NO: 574841 - RNA, 22 nt, Artificial Sequence
  Synthetic
cuuuaaaguuucagguuuggag

SEQ ID NO: 574842 - RNA, 23 nt, Artificial Sequence
  Synthetic
ucuuuaaaguuucagguuuggag

SEQ ID NO: 574843 - RNA, 24 nt, Artificial Sequence
  Synthetic
uucuuuaaaguuucagguuuggag

SEQ ID NO: 574844 - RNA, 18 nt, Artificial Sequence
  Synthetic
ccaucaauagguuuggag

SEQ ID NO: 574845 - RNA, 19 nt, Artificial Sequence
  Synthetic
uccaucaauagguuuggag

SEQ ID NO: 574846 - RNA, 20 nt, Artificial Sequence
  Synthetic
auccaucaauagguuuggag

SEQ ID NO: 574847 - RNA, 21 nt, Artificial Sequence
  Synthetic
uauccaucaauagguuuggag

SEQ ID NO: 574848 - RNA, 22 nt, Artificial Sequence
  Synthetic
auauccaucaauagguuuggag

SEQ ID NO: 574849 - RNA, 23 nt, Artificial Sequence
  Synthetic
aauauccaucaauagguuuggag

SEQ ID NO: 574850 - RNA, 24 nt, Artificial Sequence
  Synthetic
uaauauccaucaauagguuuggag

SEQ ID NO: 574851 - RNA, 18 nt, Artificial Sequence
  Synthetic
uucaauucuuguuuggag

SEQ ID NO: 574852 - RNA, 19 nt, Artificial Sequence
  Synthetic
uuucaauucuuguuuggag

SEQ ID NO: 574853 - RNA, 20 nt, Artificial Sequence
  Synthetic
uuuucaauucuuguuuggag

SEQ ID NO: 574854 - RNA, 21 nt, Artificial Sequence
  Synthetic
cuuuucaauucuuguuuggag

SEQ ID NO: 574855 - RNA, 22 nt, Artificial Sequence
  Synthetic
ccuuuucaauucuuguuuggag

SEQ ID NO: 574856 - RNA, 23 nt, Artificial Sequence
  Synthetic
accuuuucaauucuuguuuggag

SEQ ID NO: 574857 - RNA, 24 nt, Artificial Sequence
  Synthetic
gaccuuuucaauucuuguuuggag

SEQ ID NO: 574858 - RNA, 18 nt, Artificial Sequence
  Synthetic
ccagcugccauuuuggag

SEQ ID NO: 574859 - RNA, 19 nt, Artificial Sequence
  Synthetic
cccagcugccauuuuggag

SEQ ID NO: 574860 - RNA, 20 nt, Artificial Sequence
  Synthetic
acccagcugccauuuuggag

SEQ ID NO: 574861 - RNA, 21 nt, Artificial Sequence
  Synthetic
aacccagcugccauuuuggag

SEQ ID NO: 574862 - RNA, 22 nt, Artificial Sequence
  Synthetic
caacccagcugccauuuuggag

SEQ ID NO: 574863 - RNA, 23 nt, Artificial Sequence
  Synthetic
ucaacccagcugccauuuuggag

SEQ ID NO: 574864 - RNA, 24 nt, Artificial Sequence
  Synthetic
gucaacccagcugccauuuuggag

SEQ ID NO: 574865 - RNA, 18 nt, Artificial Sequence
  Synthetic
ucaacacgcauuuuggag

SEQ ID NO: 574866 - RNA, 19 nt, Artificial Sequence
  Synthetic
cucaacacgcauuuuggag

SEQ ID NO: 574867 - RNA, 20 nt, Artificial Sequence
  Synthetic
acucaacacgcauuuuggag

SEQ ID NO: 574868 - RNA, 21 nt, Artificial Sequence
  Synthetic
aacucaacacgcauuuuggag

SEQ ID NO: 574869 - RNA, 22 nt, Artificial Sequence
  Synthetic
uaacucaacacgcauuuuggag

SEQ ID NO: 574870 - RNA, 23 nt, Artificial Sequence
  Synthetic
cuaacucaacacgcauuuuggag

SEQ ID NO: 574871 - RNA, 24 nt, Artificial Sequence
  Synthetic
acuaacucaacacgcauuuuggag

SEQ ID NO: 574872 - RNA, 18 nt, Artificial Sequence
  Synthetic
uacuuacaaaaaaaugag

SEQ ID NO: 574873 - RNA, 19 nt, Artificial Sequence
  Synthetic
uuacuuacaaaaaaaugag

SEQ ID NO: 574874 - RNA, 20 nt, Artificial Sequence
  Synthetic
guuacuuacaaaaaaaugag

SEQ ID NO: 574875 - RNA, 21 nt, Artificial Sequence
  Synthetic
uguuacuuacaaaaaaaugag

SEQ ID NO: 574876 - RNA, 22 nt, Artificial Sequence
  Synthetic
auguuacuuacaaaaaaaugag

SEQ ID NO: 574877 - RNA, 23 nt, Artificial Sequence
  Synthetic
cauguuacuuacaaaaaaaugag

SEQ ID NO: 574878 - RNA, 24 nt, Artificial Sequence
  Synthetic
acauguuacuuacaaaaaaaugag

SEQ ID NO: 574879 - RNA, 18 nt, Artificial Sequence
  Synthetic
acauuguaacaaaaugag

SEQ ID NO: 574880 - RNA, 19 nt, Artificial Sequence
  Synthetic
gacauuguaacaaaaugag

SEQ ID NO: 574881 - RNA, 20 nt, Artificial Sequence
  Synthetic
ggacauuguaacaaaaugag

SEQ ID NO: 574882 - RNA, 21 nt, Artificial Sequence
  Synthetic
aggacauuguaacaaaaugag

SEQ ID NO: 574883 - RNA, 22 nt, Artificial Sequence
  Synthetic
aaggacauuguaacaaaaugag

SEQ ID NO: 574884 - RNA, 23 nt, Artificial Sequence
  Synthetic
aaaggacauuguaacaaaaugag

SEQ ID NO: 574885 - RNA, 24 nt, Artificial Sequence
  Synthetic
uaaaggacauuguaacaaaaugag

SEQ ID NO: 574886 - RNA, 18 nt, Artificial Sequence
  Synthetic
cugcuaaaggaaaaugag

SEQ ID NO: 574887 - RNA, 19 nt, Artificial Sequence
  Synthetic
ucugcuaaaggaaaaugag

SEQ ID NO: 574888 - RNA, 20 nt, Artificial Sequence
  Synthetic
uucugcuaaaggaaaaugag

SEQ ID NO: 574889 - RNA, 21 nt, Artificial Sequence
  Synthetic
uuucugcuaaaggaaaaugag

SEQ ID NO: 574890 - RNA, 22 nt, Artificial Sequence
  Synthetic
uuuucugcuaaaggaaaaugag

SEQ ID NO: 574891 - RNA, 23 nt, Artificial Sequence
  Synthetic
uuuuucugcuaaaggaaaaugag

SEQ ID NO: 574892 - RNA, 24 nt, Artificial Sequence
  Synthetic
uuuuuucugcuaaaggaaaaugag

SEQ ID NO: 574893 - RNA, 18 nt, Artificial Sequence
  Synthetic
uuuuaaauauaaaaugag

SEQ ID NO: 574894 - RNA, 19 nt, Artificial Sequence
  Synthetic
cuuuuaaauauaaaaugag

SEQ ID NO: 574895 - RNA, 20 nt, Artificial Sequence
  Synthetic
ucuuuuaaauauaaaaugag

SEQ ID NO: 574896 - RNA, 21 nt, Artificial Sequence
  Synthetic
uucuuuuaaauauaaaaugag

SEQ ID NO: 574897 - RNA, 22 nt, Artificial Sequence
  Synthetic
auucuuuuaaauauaaaaugag

SEQ ID NO: 574898 - RNA, 23 nt, Artificial Sequence
  Synthetic
cauucuuuuaaauauaaaaugag

SEQ ID NO: 574899 - RNA, 24 nt, Artificial Sequence
  Synthetic
acauucuuuuaaauauaaaaugag

SEQ ID NO: 574900 - RNA, 18 nt, Artificial Sequence
  Synthetic
guagaaaacagaaaugag

SEQ ID NO: 574901 - RNA, 19 nt, Artificial Sequence
  Synthetic
aguagaaaacagaaaugag

SEQ ID NO: 574902 - RNA, 20 nt, Artificial Sequence
  Synthetic
caguagaaaacagaaaugag

SEQ ID NO: 574903 - RNA, 21 nt, Artificial Sequence
  Synthetic
ucaguagaaaacagaaaugag

SEQ ID NO: 574904 - RNA, 22 nt, Artificial Sequence
  Synthetic
cucaguagaaaacagaaaugag

SEQ ID NO: 574905 - RNA, 23 nt, Artificial Sequence
  Synthetic
acucaguagaaaacagaaaugag

SEQ ID NO: 574906 - RNA, 24 nt, Artificial Sequence
  Synthetic
cacucaguagaaaacagaaaugag

SEQ ID NO: 574907 - RNA, 18 nt, Artificial Sequence
  Synthetic
gaaggccugugaaaugag

SEQ ID NO: 574908 - RNA, 19 nt, Artificial Sequence
  Synthetic
ugaaggccugugaaaugag

SEQ ID NO: 574909 - RNA, 20 nt, Artificial Sequence
  Synthetic
uugaaggccugugaaaugag

SEQ ID NO: 574910 - RNA, 21 nt, Artificial Sequence
  Synthetic
cuugaaggccugugaaaugag

SEQ ID NO: 574911 - RNA, 22 nt, Artificial Sequence
  Synthetic
ucuugaaggccugugaaaugag

SEQ ID NO: 574912 - RNA, 23 nt, Artificial Sequence
  Synthetic
cucuugaaggccugugaaaugag

SEQ ID NO: 574913 - RNA, 24 nt, Artificial Sequence
  Synthetic
ccucuugaaggccugugaaaugag

SEQ ID NO: 574914 - RNA, 18 nt, Artificial Sequence
  Synthetic
cagcccuugauaaaugag

SEQ ID NO: 574915 - RNA, 19 nt, Artificial Sequence
  Synthetic
acagcccuugauaaaugag

SEQ ID NO: 574916 - RNA, 20 nt, Artificial Sequence
  Synthetic
cacagcccuugauaaaugag

SEQ ID NO: 574917 - RNA, 21 nt, Artificial Sequence
  Synthetic
acacagcccuugauaaaugag

SEQ ID NO: 574918 - RNA, 22 nt, Artificial Sequence
  Synthetic
gacacagcccuugauaaaugag

SEQ ID NO: 574919 - RNA, 23 nt, Artificial Sequence
  Synthetic
ugacacagcccuugauaaaugag

SEQ ID NO: 574920 - RNA, 24 nt, Artificial Sequence
  Synthetic
augacacagcccuugauaaaugag

SEQ ID NO: 574921 - RNA, 18 nt, Artificial Sequence
  Synthetic
aggggagaaggcaaugag

SEQ ID NO: 574922 - RNA, 19 nt, Artificial Sequence
  Synthetic
caggggagaaggcaaugag

SEQ ID NO: 574923 - RNA, 20 nt, Artificial Sequence
  Synthetic
acaggggagaaggcaaugag

SEQ ID NO: 574924 - RNA, 21 nt, Artificial Sequence
  Synthetic
uacaggggagaaggcaaugag

SEQ ID NO: 574925 - RNA, 22 nt, Artificial Sequence
  Synthetic
cuacaggggagaaggcaaugag

SEQ ID NO: 574926 - RNA, 23 nt, Artificial Sequence
  Synthetic
ucuacaggggagaaggcaaugag

SEQ ID NO: 574927 - RNA, 24 nt, Artificial Sequence
  Synthetic
gucuacaggggagaaggcaaugag

SEQ ID NO: 574928 - RNA, 18 nt, Artificial Sequence
  Synthetic
gauuucauagucaaugag

SEQ ID NO: 574929 - RNA, 19 nt, Artificial Sequence
  Synthetic
ggauuucauagucaaugag

SEQ ID NO: 574930 - RNA, 20 nt, Artificial Sequence
  Synthetic
aggauuucauagucaaugag

SEQ ID NO: 574931 - RNA, 21 nt, Artificial Sequence
  Synthetic
gaggauuucauagucaaugag

SEQ ID NO: 574932 - RNA, 22 nt, Artificial Sequence
  Synthetic
ugaggauuucauagucaaugag

SEQ ID NO: 574933 - RNA, 23 nt, Artificial Sequence
  Synthetic
uugaggauuucauagucaaugag

SEQ ID NO: 574934 - RNA, 24 nt, Artificial Sequence
  Synthetic
cuugaggauuucauagucaaugag

SEQ ID NO: 574935 - RNA, 18 nt, Artificial Sequence
  Synthetic
cucucucccaagaaugag

SEQ ID NO: 574936 - RNA, 19 nt, Artificial Sequence
  Synthetic
gcucucucccaagaaugag

SEQ ID NO: 574937 - RNA, 20 nt, Artificial Sequence
  Synthetic
ugcucucucccaagaaugag

SEQ ID NO: 574938 - RNA, 21 nt, Artificial Sequence
  Synthetic
cugcucucucccaagaaugag

SEQ ID NO: 574939 - RNA, 22 nt, Artificial Sequence
  Synthetic
ucugcucucucccaagaaugag

SEQ ID NO: 574940 - RNA, 23 nt, Artificial Sequence
  Synthetic
uucugcucucucccaagaaugag

SEQ ID NO: 574941 - RNA, 24 nt, Artificial Sequence
  Synthetic
uuucugcucucucccaagaaugag

SEQ ID NO: 574942 - RNA, 18 nt, Artificial Sequence
  Synthetic
aaagaagagaagaaugag

SEQ ID NO: 574943 - RNA, 19 nt, Artificial Sequence
  Synthetic
gaaagaagagaagaaugag

SEQ ID NO: 574944 - RNA, 20 nt, Artificial Sequence
  Synthetic
agaaagaagagaagaaugag

SEQ ID NO: 574945 - RNA, 21 nt, Artificial Sequence
  Synthetic
gagaaagaagagaagaaugag

SEQ ID NO: 574946 - RNA, 22 nt, Artificial Sequence
  Synthetic
agagaaagaagagaagaaugag

SEQ ID NO: 574947 - RNA, 23 nt, Artificial Sequence
  Synthetic
aagagaaagaagagaagaaugag

SEQ ID NO: 574948 - RNA, 24 nt, Artificial Sequence
  Synthetic
aaagagaaagaagagaagaaugag

SEQ ID NO: 574949 - RNA, 18 nt, Artificial Sequence
  Synthetic
aggagagcucagaaugag

SEQ ID NO: 574950 - RNA, 19 nt, Artificial Sequence
  Synthetic
aaggagagcucagaaugag

SEQ ID NO: 574951 - RNA, 20 nt, Artificial Sequence
  Synthetic
caaggagagcucagaaugag

SEQ ID NO: 574952 - RNA, 21 nt, Artificial Sequence
  Synthetic
ucaaggagagcucagaaugag

SEQ ID NO: 574953 - RNA, 22 nt, Artificial Sequence
  Synthetic
gucaaggagagcucagaaugag

SEQ ID NO: 574954 - RNA, 23 nt, Artificial Sequence
  Synthetic
ggucaaggagagcucagaaugag

SEQ ID NO: 574955 - RNA, 24 nt, Artificial Sequence
  Synthetic
aggucaaggagagcucagaaugag

SEQ ID NO: 574956 - RNA, 18 nt, Artificial Sequence
  Synthetic
gagacccuucagaaugag

SEQ ID NO: 574957 - RNA, 19 nt, Artificial Sequence
  Synthetic
agagacccuucagaaugag

SEQ ID NO: 574958 - RNA, 20 nt, Artificial Sequence
  Synthetic
gagagacccuucagaaugag

SEQ ID NO: 574959 - RNA, 21 nt, Artificial Sequence
  Synthetic
ggagagacccuucagaaugag

SEQ ID NO: 574960 - RNA, 22 nt, Artificial Sequence
  Synthetic
uggagagacccuucagaaugag

SEQ ID NO: 574961 - RNA, 23 nt, Artificial Sequence
  Synthetic
uuggagagacccuucagaaugag

SEQ ID NO: 574962 - RNA, 24 nt, Artificial Sequence
  Synthetic
cuuggagagacccuucagaaugag

SEQ ID NO: 574963 - RNA, 18 nt, Artificial Sequence
  Synthetic
auuuggcuagagaaugag

SEQ ID NO: 574964 - RNA, 19 nt, Artificial Sequence
  Synthetic
gauuuggcuagagaaugag

SEQ ID NO: 574965 - RNA, 20 nt, Artificial Sequence
  Synthetic
agauuuggcuagagaaugag

SEQ ID NO: 574966 - RNA, 21 nt, Artificial Sequence
  Synthetic
cagauuuggcuagagaaugag

SEQ ID NO: 574967 - RNA, 22 nt, Artificial Sequence
  Synthetic
gcagauuuggcuagagaaugag

SEQ ID NO: 574968 - RNA, 23 nt, Artificial Sequence
  Synthetic
ggcagauuuggcuagagaaugag

SEQ ID NO: 574969 - RNA, 24 nt, Artificial Sequence
  Synthetic
uggcagauuuggcuagagaaugag

SEQ ID NO: 574970 - RNA, 18 nt, Artificial Sequence
  Synthetic
gaaaccguauagaaugag

SEQ ID NO: 574971 - RNA, 19 nt, Artificial Sequence
  Synthetic
ggaaaccguauagaaugag

SEQ ID NO: 574972 - RNA, 20 nt, Artificial Sequence
  Synthetic
gggaaaccguauagaaugag

SEQ ID NO: 574973 - RNA, 21 nt, Artificial Sequence
  Synthetic
agggaaaccguauagaaugag

SEQ ID NO: 574974 - RNA, 22 nt, Artificial Sequence
  Synthetic
cagggaaaccguauagaaugag

SEQ ID NO: 574975 - RNA, 23 nt, Artificial Sequence
  Synthetic
ucagggaaaccguauagaaugag

SEQ ID NO: 574976 - RNA, 24 nt, Artificial Sequence
  Synthetic
aucagggaaaccguauagaaugag

SEQ ID NO: 574977 - RNA, 18 nt, Artificial Sequence
  Synthetic
cuggugggcaggaaugag

SEQ ID NO: 574978 - RNA, 19 nt, Artificial Sequence
  Synthetic
acuggugggcaggaaugag

SEQ ID NO: 574979 - RNA, 20 nt, Artificial Sequence
  Synthetic
cacuggugggcaggaaugag

SEQ ID NO: 574980 - RNA, 21 nt, Artificial Sequence
  Synthetic
ccacuggugggcaggaaugag

SEQ ID NO: 574981 - RNA, 22 nt, Artificial Sequence
  Synthetic
gccacuggugggcaggaaugag

SEQ ID NO: 574982 - RNA, 23 nt, Artificial Sequence
  Synthetic
agccacuggugggcaggaaugag

SEQ ID NO: 574983 - RNA, 24 nt, Artificial Sequence
  Synthetic
gagccacuggugggcaggaaugag

SEQ ID NO: 574984 - RNA, 18 nt, Artificial Sequence
  Synthetic
agagaagaaaugaaugag

SEQ ID NO: 574985 - RNA, 19 nt, Artificial Sequence
  Synthetic
gagagaagaaaugaaugag

SEQ ID NO: 574986 - RNA, 20 nt, Artificial Sequence
  Synthetic
ggagagaagaaaugaaugag

SEQ ID NO: 574987 - RNA, 21 nt, Artificial Sequence
  Synthetic
aggagagaagaaaugaaugag

SEQ ID NO: 574988 - RNA, 22 nt, Artificial Sequence
  Synthetic
uaggagagaagaaaugaaugag

SEQ ID NO: 574989 - RNA, 23 nt, Artificial Sequence
  Synthetic
auaggagagaagaaaugaaugag

SEQ ID NO: 574990 - RNA, 24 nt, Artificial Sequence
  Synthetic
cauaggagagaagaaaugaaugag

SEQ ID NO: 574991 - RNA, 18 nt, Artificial Sequence
  Synthetic
aaagaaguaccuaaugag

SEQ ID NO: 574992 - RNA, 19 nt, Artificial Sequence
  Synthetic
gaaagaaguaccuaaugag

SEQ ID NO: 574993 - RNA, 20 nt, Artificial Sequence
  Synthetic
ugaaagaaguaccuaaugag

SEQ ID NO: 574994 - RNA, 21 nt, Artificial Sequence
  Synthetic
augaaagaaguaccuaaugag

SEQ ID NO: 574995 - RNA, 22 nt, Artificial Sequence
  Synthetic
caugaaagaaguaccuaaugag

SEQ ID NO: 574996 - RNA, 23 nt, Artificial Sequence
  Synthetic
ccaugaaagaaguaccuaaugag

SEQ ID NO: 574997 - RNA, 24 nt, Artificial Sequence
  Synthetic
accaugaaagaaguaccuaaugag

SEQ ID NO: 574998 - RNA, 18 nt, Artificial Sequence
  Synthetic
aacaacacacuuaaugag

SEQ ID NO: 574999 - RNA, 19 nt, Artificial Sequence
  Synthetic
aaacaacacacuuaaugag

SEQ ID NO: 575000 - RNA, 20 nt, Artificial Sequence
  Synthetic
uaaacaacacacuuaaugag

SEQ ID NO: 575001 - RNA, 21 nt, Artificial Sequence
  Synthetic
uuaaacaacacacuuaaugag

SEQ ID NO: 575002 - RNA, 22 nt, Artificial Sequence
  Synthetic
guuaaacaacacacuuaaugag

SEQ ID NO: 575003 - RNA, 23 nt, Artificial Sequence
  Synthetic
aguuaaacaacacacuuaaugag

SEQ ID NO: 575004 - RNA, 24 nt, Artificial Sequence
  Synthetic
caguuaaacaacacacuuaaugag

SEQ ID NO: 575005 - RNA, 18 nt, Artificial Sequence
  Synthetic
acugggagggaacaugag

SEQ ID NO: 575006 - RNA, 19 nt, Artificial Sequence
  Synthetic
aacugggagggaacaugag

SEQ ID NO: 575007 - RNA, 20 nt, Artificial Sequence
  Synthetic
uaacugggagggaacaugag

SEQ ID NO: 575008 - RNA, 21 nt, Artificial Sequence
  Synthetic
auaacugggagggaacaugag

SEQ ID NO: 575009 - RNA, 22 nt, Artificial Sequence
  Synthetic
cauaacugggagggaacaugag

SEQ ID NO: 575010 - RNA, 23 nt, Artificial Sequence
  Synthetic
ucauaacugggagggaacaugag

SEQ ID NO: 575011 - RNA, 24 nt, Artificial Sequence
  Synthetic
cucauaacugggagggaacaugag

SEQ ID NO: 575012 - RNA, 18 nt, Artificial Sequence
  Synthetic
ccaaagaaaccacaugag

SEQ ID NO: 575013 - RNA, 19 nt, Artificial Sequence
  Synthetic
uccaaagaaaccacaugag

SEQ ID NO: 575014 - RNA, 20 nt, Artificial Sequence
  Synthetic
cuccaaagaaaccacaugag

SEQ ID NO: 575015 - RNA, 21 nt, Artificial Sequence
  Synthetic
acuccaaagaaaccacaugag

SEQ ID NO: 575016 - RNA, 22 nt, Artificial Sequence
  Synthetic
aacuccaaagaaaccacaugag

SEQ ID NO: 575017 - RNA, 23 nt, Artificial Sequence
  Synthetic
caacuccaaagaaaccacaugag

SEQ ID NO: 575018 - RNA, 24 nt, Artificial Sequence
  Synthetic
acaacuccaaagaaaccacaugag

SEQ ID NO: 575019 - RNA, 18 nt, Artificial Sequence
  Synthetic
ggcuuauuagcccaugag

SEQ ID NO: 575020 - RNA, 19 nt, Artificial Sequence
  Synthetic
aggcuuauuagcccaugag

SEQ ID NO: 575021 - RNA, 20 nt, Artificial Sequence
  Synthetic
uaggcuuauuagcccaugag

SEQ ID NO: 575022 - RNA, 21 nt, Artificial Sequence
  Synthetic
cuaggcuuauuagcccaugag

SEQ ID NO: 575023 - RNA, 22 nt, Artificial Sequence
  Synthetic
ucuaggcuuauuagcccaugag

SEQ ID NO: 575024 - RNA, 23 nt, Artificial Sequence
  Synthetic
uucuaggcuuauuagcccaugag

SEQ ID NO: 575025 - RNA, 24 nt, Artificial Sequence
  Synthetic
guucuaggcuuauuagcccaugag

SEQ ID NO: 575026 - RNA, 18 nt, Artificial Sequence
  Synthetic
uggcucacaggccaugag

SEQ ID NO: 575027 - RNA, 19 nt, Artificial Sequence
  Synthetic
guggcucacaggccaugag

SEQ ID NO: 575028 - RNA, 20 nt, Artificial Sequence
  Synthetic
uguggcucacaggccaugag

SEQ ID NO: 575029 - RNA, 21 nt, Artificial Sequence
  Synthetic
auguggcucacaggccaugag

SEQ ID NO: 575030 - RNA, 22 nt, Artificial Sequence
  Synthetic
cauguggcucacaggccaugag

SEQ ID NO: 575031 - RNA, 23 nt, Artificial Sequence
  Synthetic
gcauguggcucacaggccaugag

SEQ ID NO: 575032 - RNA, 24 nt, Artificial Sequence
  Synthetic
cgcauguggcucacaggccaugag

SEQ ID NO: 575033 - RNA, 18 nt, Artificial Sequence
  Synthetic
agaauacauaaucaugag

SEQ ID NO: 575034 - RNA, 19 nt, Artificial Sequence
  Synthetic
aagaauacauaaucaugag

SEQ ID NO: 575035 - RNA, 20 nt, Artificial Sequence
  Synthetic
uaagaauacauaaucaugag

SEQ ID NO: 575036 - RNA, 21 nt, Artificial Sequence
  Synthetic
cuaagaauacauaaucaugag

SEQ ID NO: 575037 - RNA, 22 nt, Artificial Sequence
  Synthetic
ucuaagaauacauaaucaugag

SEQ ID NO: 575038 - RNA, 23 nt, Artificial Sequence
  Synthetic
cucuaagaauacauaaucaugag

SEQ ID NO: 575039 - RNA, 24 nt, Artificial Sequence
  Synthetic
ucucuaagaauacauaaucaugag

SEQ ID NO: 575040 - RNA, 18 nt, Artificial Sequence
  Synthetic
aggaaaacacaucaugag

SEQ ID NO: 575041 - RNA, 19 nt, Artificial Sequence
  Synthetic
caggaaaacacaucaugag

SEQ ID NO: 575042 - RNA, 20 nt, Artificial Sequence
  Synthetic
ucaggaaaacacaucaugag

SEQ ID NO: 575043 - RNA, 21 nt, Artificial Sequence
  Synthetic
uucaggaaaacacaucaugag

SEQ ID NO: 575044 - RNA, 22 nt, Artificial Sequence
  Synthetic
cuucaggaaaacacaucaugag

SEQ ID NO: 575045 - RNA, 23 nt, Artificial Sequence
  Synthetic
ucuucaggaaaacacaucaugag

SEQ ID NO: 575046 - RNA, 24 nt, Artificial Sequence
  Synthetic
uucuucaggaaaacacaucaugag

SEQ ID NO: 575047 - RNA, 18 nt, Artificial Sequence
  Synthetic
augauagcuuaucaugag

SEQ ID NO: 575048 - RNA, 19 nt, Artificial Sequence
  Synthetic
aaugauagcuuaucaugag

SEQ ID NO: 575049 - RNA, 20 nt, Artificial Sequence
  Synthetic
aaaugauagcuuaucaugag

SEQ ID NO: 575050 - RNA, 21 nt, Artificial Sequence
  Synthetic
gaaaugauagcuuaucaugag

SEQ ID NO: 575051 - RNA, 22 nt, Artificial Sequence
  Synthetic
ugaaaugauagcuuaucaugag

SEQ ID NO: 575052 - RNA, 23 nt, Artificial Sequence
  Synthetic
augaaaugauagcuuaucaugag

SEQ ID NO: 575053 - RNA, 24 nt, Artificial Sequence
  Synthetic
aaugaaaugauagcuuaucaugag

SEQ ID NO: 575054 - RNA, 18 nt, Artificial Sequence
  Synthetic
auugauuugcuucaugag

SEQ ID NO: 575055 - RNA, 19 nt, Artificial Sequence
  Synthetic
uauugauuugcuucaugag

SEQ ID NO: 575056 - RNA, 20 nt, Artificial Sequence
  Synthetic
auauugauuugcuucaugag

SEQ ID NO: 575057 - RNA, 21 nt, Artificial Sequence
  Synthetic
gauauugauuugcuucaugag

SEQ ID NO: 575058 - RNA, 22 nt, Artificial Sequence
  Synthetic
agauauugauuugcuucaugag

SEQ ID NO: 575059 - RNA, 23 nt, Artificial Sequence
  Synthetic
gagauauugauuugcuucaugag

SEQ ID NO: 575060 - RNA, 24 nt, Artificial Sequence
  Synthetic
ugagauauugauuugcuucaugag

SEQ ID NO: 575061 - RNA, 18 nt, Artificial Sequence
  Synthetic
ugcaguguacaagaugag

SEQ ID NO: 575062 - RNA, 19 nt, Artificial Sequence
  Synthetic
uugcaguguacaagaugag

SEQ ID NO: 575063 - RNA, 20 nt, Artificial Sequence
  Synthetic
uuugcaguguacaagaugag

SEQ ID NO: 575064 - RNA, 21 nt, Artificial Sequence
  Synthetic
auuugcaguguacaagaugag

SEQ ID NO: 575065 - RNA, 22 nt, Artificial Sequence
  Synthetic
gauuugcaguguacaagaugag

SEQ ID NO: 575066 - RNA, 23 nt, Artificial Sequence
  Synthetic
ggauuugcaguguacaagaugag

SEQ ID NO: 575067 - RNA, 24 nt, Artificial Sequence
  Synthetic
uggauuugcaguguacaagaugag

SEQ ID NO: 575068 - RNA, 18 nt, Artificial Sequence
  Synthetic
aacaaagcaggagaugag

SEQ ID NO: 575069 - RNA, 19 nt, Artificial Sequence
  Synthetic
aaacaaagcaggagaugag

SEQ ID NO: 575070 - RNA, 20 nt, Artificial Sequence
  Synthetic
uaaacaaagcaggagaugag

SEQ ID NO: 575071 - RNA, 21 nt, Artificial Sequence
  Synthetic
auaaacaaagcaggagaugag

SEQ ID NO: 575072 - RNA, 22 nt, Artificial Sequence
  Synthetic
uauaaacaaagcaggagaugag

SEQ ID NO: 575073 - RNA, 23 nt, Artificial Sequence
  Synthetic
uuauaaacaaagcaggagaugag

SEQ ID NO: 575074 - RNA, 24 nt, Artificial Sequence
  Synthetic
uuuauaaacaaagcaggagaugag

SEQ ID NO: 575075 - RNA, 18 nt, Artificial Sequence
  Synthetic
augaaaugaugagaugag

SEQ ID NO: 575076 - RNA, 19 nt, Artificial Sequence
  Synthetic
aaugaaaugaugagaugag

SEQ ID NO: 575077 - RNA, 20 nt, Artificial Sequence
  Synthetic
aaaugaaaugaugagaugag

SEQ ID NO: 575078 - RNA, 21 nt, Artificial Sequence
  Synthetic
gaaaugaaaugaugagaugag

SEQ ID NO: 575079 - RNA, 22 nt, Artificial Sequence
  Synthetic
agaaaugaaaugaugagaugag

SEQ ID NO: 575080 - RNA, 23 nt, Artificial Sequence
  Synthetic
cagaaaugaaaugaugagaugag

SEQ ID NO: 575081 - RNA, 24 nt, Artificial Sequence
  Synthetic
gcagaaaugaaaugaugagaugag

SEQ ID NO: 575082 - RNA, 18 nt, Artificial Sequence
  Synthetic
uucauggaauuagaugag

SEQ ID NO: 575083 - RNA, 19 nt, Artificial Sequence
  Synthetic
cuucauggaauuagaugag

SEQ ID NO: 575084 - RNA, 20 nt, Artificial Sequence
  Synthetic
ccuucauggaauuagaugag

SEQ ID NO: 575085 - RNA, 21 nt, Artificial Sequence
  Synthetic
uccuucauggaauuagaugag

SEQ ID NO: 575086 - RNA, 22 nt, Artificial Sequence
  Synthetic
cuccuucauggaauuagaugag

SEQ ID NO: 575087 - RNA, 23 nt, Artificial Sequence
  Synthetic
ucuccuucauggaauuagaugag

SEQ ID NO: 575088 - RNA, 24 nt, Artificial Sequence
  Synthetic
cucuccuucauggaauuagaugag

SEQ ID NO: 575089 - RNA, 18 nt, Artificial Sequence
  Synthetic
cucagugaaaaggaugag

SEQ ID NO: 575090 - RNA, 19 nt, Artificial Sequence
  Synthetic
ucucagugaaaaggaugag

SEQ ID NO: 575091 - RNA, 20 nt, Artificial Sequence
  Synthetic
aucucagugaaaaggaugag

SEQ ID NO: 575092 - RNA, 21 nt, Artificial Sequence
  Synthetic
gaucucagugaaaaggaugag

SEQ ID NO: 575093 - RNA, 22 nt, Artificial Sequence
  Synthetic
ugaucucagugaaaaggaugag

SEQ ID NO: 575094 - RNA, 23 nt, Artificial Sequence
  Synthetic
augaucucagugaaaaggaugag

SEQ ID NO: 575095 - RNA, 24 nt, Artificial Sequence
  Synthetic
gaugaucucagugaaaaggaugag

SEQ ID NO: 575096 - RNA, 18 nt, Artificial Sequence
  Synthetic
aacugaauuaaggaugag

SEQ ID NO: 575097 - RNA, 19 nt, Artificial Sequence
  Synthetic
aaacugaauuaaggaugag

SEQ ID NO: 575098 - RNA, 20 nt, Artificial Sequence
  Synthetic
caaacugaauuaaggaugag

SEQ ID NO: 575099 - RNA, 21 nt, Artificial Sequence
  Synthetic
acaaacugaauuaaggaugag

SEQ ID NO: 575100 - RNA, 22 nt, Artificial Sequence
  Synthetic
uacaaacugaauuaaggaugag

SEQ ID NO: 575101 - RNA, 23 nt, Artificial Sequence
  Synthetic
uuacaaacugaauuaaggaugag

SEQ ID NO: 575102 - RNA, 24 nt, Artificial Sequence
  Synthetic
auuacaaacugaauuaaggaugag

SEQ ID NO: 575103 - RNA, 18 nt, Artificial Sequence
  Synthetic
ccauuuuaagaggaugag

SEQ ID NO: 575104 - RNA, 19 nt, Artificial Sequence
  Synthetic
accauuuuaagaggaugag

SEQ ID NO: 575105 - RNA, 20 nt, Artificial Sequence
  Synthetic
caccauuuuaagaggaugag

SEQ ID NO: 575106 - RNA, 21 nt, Artificial Sequence
  Synthetic
ccaccauuuuaagaggaugag

SEQ ID NO: 575107 - RNA, 22 nt, Artificial Sequence
  Synthetic
cccaccauuuuaagaggaugag

SEQ ID NO: 575108 - RNA, 23 nt, Artificial Sequence
  Synthetic
ucccaccauuuuaagaggaugag

SEQ ID NO: 575109 - RNA, 24 nt, Artificial Sequence
  Synthetic
aucccaccauuuuaagaggaugag

SEQ ID NO: 575110 - RNA, 18 nt, Artificial Sequence
  Synthetic
cuaggcccaagggaugag

SEQ ID NO: 575111 - RNA, 19 nt, Artificial Sequence
  Synthetic
ucuaggcccaagggaugag

SEQ ID NO: 575112 - RNA, 20 nt, Artificial Sequence
  Synthetic
aucuaggcccaagggaugag

SEQ ID NO: 575113 - RNA, 21 nt, Artificial Sequence
  Synthetic
caucuaggcccaagggaugag

SEQ ID NO: 575114 - RNA, 22 nt, Artificial Sequence
  Synthetic
acaucuaggcccaagggaugag

SEQ ID NO: 575115 - RNA, 23 nt, Artificial Sequence
  Synthetic
uacaucuaggcccaagggaugag

SEQ ID NO: 575116 - RNA, 24 nt, Artificial Sequence
  Synthetic
cuacaucuaggcccaagggaugag

SEQ ID NO: 575117 - RNA, 18 nt, Artificial Sequence
  Synthetic
caagguuuccuggaugag

SEQ ID NO: 575118 - RNA, 19 nt, Artificial Sequence
  Synthetic
acaagguuuccuggaugag

SEQ ID NO: 575119 - RNA, 20 nt, Artificial Sequence
  Synthetic
gacaagguuuccuggaugag

SEQ ID NO: 575120 - RNA, 21 nt, Artificial Sequence
  Synthetic
agacaagguuuccuggaugag

SEQ ID NO: 575121 - RNA, 22 nt, Artificial Sequence
  Synthetic
aagacaagguuuccuggaugag

SEQ ID NO: 575122 - RNA, 23 nt, Artificial Sequence
  Synthetic
caagacaagguuuccuggaugag

SEQ ID NO: 575123 - RNA, 24 nt, Artificial Sequence
  Synthetic
gcaagacaagguuuccuggaugag

SEQ ID NO: 575124 - RNA, 18 nt, Artificial Sequence
  Synthetic
aagccuuagcuggaugag

SEQ ID NO: 575125 - RNA, 19 nt, Artificial Sequence
  Synthetic
gaagccuuagcuggaugag

SEQ ID NO: 575126 - RNA, 20 nt, Artificial Sequence
  Synthetic
agaagccuuagcuggaugag

SEQ ID NO: 575127 - RNA, 21 nt, Artificial Sequence
  Synthetic
uagaagccuuagcuggaugag

SEQ ID NO: 575128 - RNA, 22 nt, Artificial Sequence
  Synthetic
auagaagccuuagcuggaugag

SEQ ID NO: 575129 - RNA, 23 nt, Artificial Sequence
  Synthetic
uauagaagccuuagcuggaugag

SEQ ID NO: 575130 - RNA, 24 nt, Artificial Sequence
  Synthetic
guauagaagccuuagcuggaugag

SEQ ID NO: 575131 - RNA, 18 nt, Artificial Sequence
  Synthetic
cagaaaugaaaugaugag

SEQ ID NO: 575132 - RNA, 19 nt, Artificial Sequence
  Synthetic
gcagaaaugaaaugaugag

SEQ ID NO: 575133 - RNA, 20 nt, Artificial Sequence
  Synthetic
ugcagaaaugaaaugaugag

SEQ ID NO: 575134 - RNA, 21 nt, Artificial Sequence
  Synthetic
gugcagaaaugaaaugaugag

SEQ ID NO: 575135 - RNA, 22 nt, Artificial Sequence
  Synthetic
ugugcagaaaugaaaugaugag

SEQ ID NO: 575136 - RNA, 23 nt, Artificial Sequence
  Synthetic
uugugcagaaaugaaaugaugag

SEQ ID NO: 575137 - RNA, 24 nt, Artificial Sequence
  Synthetic
uuugugcagaaaugaaaugaugag

SEQ ID NO: 575138 - RNA, 18 nt, Artificial Sequence
  Synthetic
cgaagacuaaaauaugag

SEQ ID NO: 575139 - RNA, 19 nt, Artificial Sequence
  Synthetic
ucgaagacuaaaauaugag

SEQ ID NO: 575140 - RNA, 20 nt, Artificial Sequence
  Synthetic
aucgaagacuaaaauaugag

SEQ ID NO: 575141 - RNA, 21 nt, Artificial Sequence
  Synthetic
aaucgaagacuaaaauaugag

SEQ ID NO: 575142 - RNA, 22 nt, Artificial Sequence
  Synthetic
gaaucgaagacuaaaauaugag

SEQ ID NO: 575143 - RNA, 23 nt, Artificial Sequence
  Synthetic
agaaucgaagacuaaaauaugag

SEQ ID NO: 575144 - RNA, 24 nt, Artificial Sequence
  Synthetic
aagaaucgaagacuaaaauaugag

SEQ ID NO: 575145 - RNA, 18 nt, Artificial Sequence
  Synthetic
ucaacucucaaauaugag

SEQ ID NO: 575146 - RNA, 19 nt, Artificial Sequence
  Synthetic
cucaacucucaaauaugag

SEQ ID NO: 575147 - RNA, 20 nt, Artificial Sequence
  Synthetic
ucucaacucucaaauaugag

SEQ ID NO: 575148 - RNA, 21 nt, Artificial Sequence
  Synthetic
uucucaacucucaaauaugag

SEQ ID NO: 575149 - RNA, 22 nt, Artificial Sequence
  Synthetic
uuucucaacucucaaauaugag

SEQ ID NO: 575150 - RNA, 23 nt, Artificial Sequence
  Synthetic
uuuucucaacucucaaauaugag

SEQ ID NO: 575151 - RNA, 24 nt, Artificial Sequence
  Synthetic
uuuuucucaacucucaaauaugag

SEQ ID NO: 575152 - RNA, 18 nt, Artificial Sequence
  Synthetic
agcacauauaaauaugag

SEQ ID NO: 575153 - RNA, 19 nt, Artificial Sequence
  Synthetic
aagcacauauaaauaugag

SEQ ID NO: 575154 - RNA, 20 nt, Artificial Sequence
  Synthetic
gaagcacauauaaauaugag

SEQ ID NO: 575155 - RNA, 21 nt, Artificial Sequence
  Synthetic
cgaagcacauauaaauaugag

SEQ ID NO: 575156 - RNA, 22 nt, Artificial Sequence
  Synthetic
ccgaagcacauauaaauaugag

SEQ ID NO: 575157 - RNA, 23 nt, Artificial Sequence
  Synthetic
accgaagcacauauaaauaugag

SEQ ID NO: 575158 - RNA, 24 nt, Artificial Sequence
  Synthetic
uaccgaagcacauauaaauaugag

SEQ ID NO: 575159 - RNA, 18 nt, Artificial Sequence
  Synthetic
gaguguguaugauaugag

SEQ ID NO: 575160 - RNA, 19 nt, Artificial Sequence
  Synthetic
ugaguguguaugauaugag

SEQ ID NO: 575161 - RNA, 20 nt, Artificial Sequence
  Synthetic
cugaguguguaugauaugag

SEQ ID NO: 575162 - RNA, 21 nt, Artificial Sequence
  Synthetic
gcugaguguguaugauaugag

SEQ ID NO: 575163 - RNA, 22 nt, Artificial Sequence
  Synthetic
ggcugaguguguaugauaugag

SEQ ID NO: 575164 - RNA, 23 nt, Artificial Sequence
  Synthetic
aggcugaguguguaugauaugag

SEQ ID NO: 575165 - RNA, 24 nt, Artificial Sequence
  Synthetic
uaggcugaguguguaugauaugag

SEQ ID NO: 575166 - RNA, 18 nt, Artificial Sequence
  Synthetic
augaagcugcuauaugag

SEQ ID NO: 575167 - RNA, 19 nt, Artificial Sequence
  Synthetic
aaugaagcugcuauaugag

SEQ ID NO: 575168 - RNA, 20 nt, Artificial Sequence
  Synthetic
uaaugaagcugcuauaugag

SEQ ID NO: 575169 - RNA, 21 nt, Artificial Sequence
  Synthetic
cuaaugaagcugcuauaugag

SEQ ID NO: 575170 - RNA, 22 nt, Artificial Sequence
  Synthetic
gcuaaugaagcugcuauaugag

SEQ ID NO: 575171 - RNA, 23 nt, Artificial Sequence
  Synthetic
ugcuaaugaagcugcuauaugag

SEQ ID NO: 575172 - RNA, 24 nt, Artificial Sequence
  Synthetic
cugcuaaugaagcugcuauaugag

SEQ ID NO: 575173 - RNA, 18 nt, Artificial Sequence
  Synthetic
gccuagcggagcuaugag

SEQ ID NO: 575174 - RNA, 19 nt, Artificial Sequence
  Synthetic
ugccuagcggagcuaugag

SEQ ID NO: 575175 - RNA, 20 nt, Artificial Sequence
  Synthetic
cugccuagcggagcuaugag

SEQ ID NO: 575176 - RNA, 21 nt, Artificial Sequence
  Synthetic
acugccuagcggagcuaugag

SEQ ID NO: 575177 - RNA, 22 nt, Artificial Sequence
  Synthetic
cacugccuagcggagcuaugag

SEQ ID NO: 575178 - RNA, 23 nt, Artificial Sequence
  Synthetic
gcacugccuagcggagcuaugag

SEQ ID NO: 575179 - RNA, 24 nt, Artificial Sequence
  Synthetic
ggcacugccuagcggagcuaugag

SEQ ID NO: 575180 - RNA, 18 nt, Artificial Sequence
  Synthetic
auuccuugccauuaugag

SEQ ID NO: 575181 - RNA, 19 nt, Artificial Sequence
  Synthetic
uauuccuugccauuaugag

SEQ ID NO: 575182 - RNA, 20 nt, Artificial Sequence
  Synthetic
uuauuccuugccauuaugag

SEQ ID NO: 575183 - RNA, 21 nt, Artificial Sequence
  Synthetic
uuuauuccuugccauuaugag

SEQ ID NO: 575184 - RNA, 22 nt, Artificial Sequence
  Synthetic
auuuauuccuugccauuaugag

SEQ ID NO: 575185 - RNA, 23 nt, Artificial Sequence
  Synthetic
gauuuauuccuugccauuaugag

SEQ ID NO: 575186 - RNA, 24 nt, Artificial Sequence
  Synthetic
agauuuauuccuugccauuaugag

SEQ ID NO: 575187 - RNA, 18 nt, Artificial Sequence
  Synthetic
uauuuauuuauuuaugag

SEQ ID NO: 575188 - RNA, 19 nt, Artificial Sequence
  Synthetic
uuauuuauuuauuuaugag

SEQ ID NO: 575189 - RNA, 20 nt, Artificial Sequence
  Synthetic
uuuauuuauuuauuuaugag

SEQ ID NO: 575190 - RNA, 21 nt, Artificial Sequence
  Synthetic
auuuauuuauuuauuuaugag

SEQ ID NO: 575191 - RNA, 22 nt, Artificial Sequence
  Synthetic
uauuuauuuauuuauuuaugag

SEQ ID NO: 575192 - RNA, 23 nt, Artificial Sequence
  Synthetic
guauuuauuuauuuauuuaugag

SEQ ID NO: 575193 - RNA, 24 nt, Artificial Sequence
  Synthetic
uguauuuauuuauuuauuuaugag

SEQ ID NO: 575194 - RNA, 18 nt, Artificial Sequence
  Synthetic
augaauuugguuuaugag

SEQ ID NO: 575195 - RNA, 19 nt, Artificial Sequence
  Synthetic
aaugaauuugguuuaugag

SEQ ID NO: 575196 - RNA, 20 nt, Artificial Sequence
  Synthetic
aaaugaauuugguuuaugag

SEQ ID NO: 575197 - RNA, 21 nt, Artificial Sequence
  Synthetic
gaaaugaauuugguuuaugag

SEQ ID NO: 575198 - RNA, 22 nt, Artificial Sequence
  Synthetic
ugaaaugaauuugguuuaugag

SEQ ID NO: 575199 - RNA, 23 nt, Artificial Sequence
  Synthetic
gugaaaugaauuugguuuaugag

SEQ ID NO: 575200 - RNA, 24 nt, Artificial Sequence
  Synthetic
ggugaaaugaauuugguuuaugag

SEQ ID NO: 575201 - RNA, 18 nt, Artificial Sequence
  Synthetic
aagaggaaagaaacugag

SEQ ID NO: 575202 - RNA, 19 nt, Artificial Sequence
  Synthetic
aaagaggaaagaaacugag

SEQ ID NO: 575203 - RNA, 20 nt, Artificial Sequence
  Synthetic
gaaagaggaaagaaacugag

SEQ ID NO: 575204 - RNA, 21 nt, Artificial Sequence
  Synthetic
agaaagaggaaagaaacugag

SEQ ID NO: 575205 - RNA, 22 nt, Artificial Sequence
  Synthetic
aagaaagaggaaagaaacugag

SEQ ID NO: 575206 - RNA, 23 nt, Artificial Sequence
  Synthetic
gaagaaagaggaaagaaacugag

SEQ ID NO: 575207 - RNA, 24 nt, Artificial Sequence
  Synthetic
agaagaaagaggaaagaaacugag

SEQ ID NO: 575208 - RNA, 18 nt, Artificial Sequence
  Synthetic
guaauaaaugccacugag

SEQ ID NO: 575209 - RNA, 19 nt, Artificial Sequence
  Synthetic
uguaauaaaugccacugag

SEQ ID NO: 575210 - RNA, 20 nt, Artificial Sequence
  Synthetic
uuguaauaaaugccacugag

SEQ ID NO: 575211 - RNA, 21 nt, Artificial Sequence
  Synthetic
guuguaauaaaugccacugag

SEQ ID NO: 575212 - RNA, 22 nt, Artificial Sequence
  Synthetic
gguuguaauaaaugccacugag

SEQ ID NO: 575213 - RNA, 23 nt, Artificial Sequence
  Synthetic
ugguuguaauaaaugccacugag

SEQ ID NO: 575214 - RNA, 24 nt, Artificial Sequence
  Synthetic
augguuguaauaaaugccacugag

SEQ ID NO: 575215 - RNA, 18 nt, Artificial Sequence
  Synthetic
gcuuccagaggcacugag

SEQ ID NO: 575216 - RNA, 19 nt, Artificial Sequence
  Synthetic
ugcuuccagaggcacugag

SEQ ID NO: 575217 - RNA, 20 nt, Artificial Sequence
  Synthetic
uugcuuccagaggcacugag

SEQ ID NO: 575218 - RNA, 21 nt, Artificial Sequence
  Synthetic
auugcuuccagaggcacugag

SEQ ID NO: 575219 - RNA, 22 nt, Artificial Sequence
  Synthetic
aauugcuuccagaggcacugag

SEQ ID NO: 575220 - RNA, 23 nt, Artificial Sequence
  Synthetic
aaauugcuuccagaggcacugag

SEQ ID NO: 575221 - RNA, 24 nt, Artificial Sequence
  Synthetic
uaaauugcuuccagaggcacugag

SEQ ID NO: 575222 - RNA, 18 nt, Artificial Sequence
  Synthetic
gaucuuuccaggacugag

SEQ ID NO: 575223 - RNA, 19 nt, Artificial Sequence
  Synthetic
ugaucuuuccaggacugag

SEQ ID NO: 575224 - RNA, 20 nt, Artificial Sequence
  Synthetic
gugaucuuuccaggacugag

SEQ ID NO: 575225 - RNA, 21 nt, Artificial Sequence
  Synthetic
agugaucuuuccaggacugag

SEQ ID NO: 575226 - RNA, 22 nt, Artificial Sequence
  Synthetic
uagugaucuuuccaggacugag

SEQ ID NO: 575227 - RNA, 23 nt, Artificial Sequence
  Synthetic
uuagugaucuuuccaggacugag

SEQ ID NO: 575228 - RNA, 24 nt, Artificial Sequence
  Synthetic
uuuagugaucuuuccaggacugag

SEQ ID NO: 575229 - RNA, 18 nt, Artificial Sequence
  Synthetic
uucaguggcuggacugag

SEQ ID NO: 575230 - RNA, 19 nt, Artificial Sequence
  Synthetic
guucaguggcuggacugag

SEQ ID NO: 575231 - RNA, 20 nt, Artificial Sequence
  Synthetic
aguucaguggcuggacugag

SEQ ID NO: 575232 - RNA, 21 nt, Artificial Sequence
  Synthetic
caguucaguggcuggacugag

SEQ ID NO: 575233 - RNA, 22 nt, Artificial Sequence
  Synthetic
ccaguucaguggcuggacugag

SEQ ID NO: 575234 - RNA, 23 nt, Artificial Sequence
  Synthetic
cccaguucaguggcuggacugag

SEQ ID NO: 575235 - RNA, 24 nt, Artificial Sequence
  Synthetic
gcccaguucaguggcuggacugag

SEQ ID NO: 575236 - RNA, 18 nt, Artificial Sequence
  Synthetic
aaaaaaagagguacugag

SEQ ID NO: 575237 - RNA, 19 nt, Artificial Sequence
  Synthetic
aaaaaaaagagguacugag

SEQ ID NO: 575238 - RNA, 20 nt, Artificial Sequence
  Synthetic
gaaaaaaaagagguacugag

SEQ ID NO: 575239 - RNA, 21 nt, Artificial Sequence
  Synthetic
ggaaaaaaaagagguacugag

SEQ ID NO: 575240 - RNA, 22 nt, Artificial Sequence
  Synthetic
uggaaaaaaaagagguacugag

SEQ ID NO: 575241 - RNA, 23 nt, Artificial Sequence
  Synthetic
uuggaaaaaaaagagguacugag

SEQ ID NO: 575242 - RNA, 24 nt, Artificial Sequence
  Synthetic
cuuggaaaaaaaagagguacugag

SEQ ID NO: 575243 - RNA, 18 nt, Artificial Sequence
  Synthetic
ucuuuacaacuuacugag

SEQ ID NO: 575244 - RNA, 19 nt, Artificial Sequence
  Synthetic
aucuuuacaacuuacugag

SEQ ID NO: 575245 - RNA, 20 nt, Artificial Sequence
  Synthetic
aaucuuuacaacuuacugag

SEQ ID NO: 575246 - RNA, 21 nt, Artificial Sequence
  Synthetic
aaaucuuuacaacuuacugag

SEQ ID NO: 575247 - RNA, 22 nt, Artificial Sequence
  Synthetic
caaaucuuuacaacuuacugag

SEQ ID NO: 575248 - RNA, 23 nt, Artificial Sequence
  Synthetic
gcaaaucuuuacaacuuacugag

SEQ ID NO: 575249 - RNA, 24 nt, Artificial Sequence
  Synthetic
ggcaaaucuuuacaacuuacugag

SEQ ID NO: 575250 - RNA, 18 nt, Artificial Sequence
  Synthetic
agaauagguguuacugag

SEQ ID NO: 575251 - RNA, 19 nt, Artificial Sequence
  Synthetic
cagaauagguguuacugag

SEQ ID NO: 575252 - RNA, 20 nt, Artificial Sequence
  Synthetic
acagaauagguguuacugag

SEQ ID NO: 575253 - RNA, 21 nt, Artificial Sequence
  Synthetic
gacagaauagguguuacugag

SEQ ID NO: 575254 - RNA, 22 nt, Artificial Sequence
  Synthetic
agacagaauagguguuacugag

SEQ ID NO: 575255 - RNA, 23 nt, Artificial Sequence
  Synthetic
uagacagaauagguguuacugag

SEQ ID NO: 575256 - RNA, 24 nt, Artificial Sequence
  Synthetic
guagacagaauagguguuacugag

SEQ ID NO: 575257 - RNA, 18 nt, Artificial Sequence
  Synthetic
uaauagacaauaccugag

SEQ ID NO: 575258 - RNA, 19 nt, Artificial Sequence
  Synthetic
cuaauagacaauaccugag

SEQ ID NO: 575259 - RNA, 20 nt, Artificial Sequence
  Synthetic
ucuaauagacaauaccugag

SEQ ID NO: 575260 - RNA, 21 nt, Artificial Sequence
  Synthetic
aucuaauagacaauaccugag

SEQ ID NO: 575261 - RNA, 22 nt, Artificial Sequence
  Synthetic
caucuaauagacaauaccugag

SEQ ID NO: 575262 - RNA, 23 nt, Artificial Sequence
  Synthetic
ccaucuaauagacaauaccugag

SEQ ID NO: 575263 - RNA, 24 nt, Artificial Sequence
  Synthetic
accaucuaauagacaauaccugag

SEQ ID NO: 575264 - RNA, 18 nt, Artificial Sequence
  Synthetic
augagaaaccacccugag

SEQ ID NO: 575265 - RNA, 19 nt, Artificial Sequence
  Synthetic
aaugagaaaccacccugag

SEQ ID NO: 575266 - RNA, 20 nt, Artificial Sequence
  Synthetic
gaaugagaaaccacccugag

SEQ ID NO: 575267 - RNA, 21 nt, Artificial Sequence
  Synthetic
ggaaugagaaaccacccugag

SEQ ID NO: 575268 - RNA, 22 nt, Artificial Sequence
  Synthetic
uggaaugagaaaccacccugag

SEQ ID NO: 575269 - RNA, 23 nt, Artificial Sequence
  Synthetic
uuggaaugagaaaccacccugag

SEQ ID NO: 575270 - RNA, 24 nt, Artificial Sequence
  Synthetic
auuggaaugagaaaccacccugag

SEQ ID NO: 575271 - RNA, 18 nt, Artificial Sequence
  Synthetic
cuaauuaacuacccugag

SEQ ID NO: 575272 - RNA, 19 nt, Artificial Sequence
  Synthetic
ucuaauuaacuacccugag

SEQ ID NO: 575273 - RNA, 20 nt, Artificial Sequence
  Synthetic
gucuaauuaacuacccugag

SEQ ID NO: 575274 - RNA, 21 nt, Artificial Sequence
  Synthetic
ugucuaauuaacuacccugag

SEQ ID NO: 575275 - RNA, 22 nt, Artificial Sequence
  Synthetic
gugucuaauuaacuacccugag

SEQ ID NO: 575276 - RNA, 23 nt, Artificial Sequence
  Synthetic
agugucuaauuaacuacccugag

SEQ ID NO: 575277 - RNA, 24 nt, Artificial Sequence
  Synthetic
uagugucuaauuaacuacccugag

SEQ ID NO: 575278 - RNA, 18 nt, Artificial Sequence
  Synthetic
acaaucagauccccugag

SEQ ID NO: 575279 - RNA, 19 nt, Artificial Sequence
  Synthetic
aacaaucagauccccugag

SEQ ID NO: 575280 - RNA, 20 nt, Artificial Sequence
  Synthetic
uaacaaucagauccccugag

SEQ ID NO: 575281 - RNA, 21 nt, Artificial Sequence
  Synthetic
cuaacaaucagauccccugag

SEQ ID NO: 575282 - RNA, 22 nt, Artificial Sequence
  Synthetic
ucuaacaaucagauccccugag

SEQ ID NO: 575283 - RNA, 23 nt, Artificial Sequence
  Synthetic
gucuaacaaucagauccccugag

SEQ ID NO: 575284 - RNA, 24 nt, Artificial Sequence
  Synthetic
ugucuaacaaucagauccccugag

SEQ ID NO: 575285 - RNA, 18 nt, Artificial Sequence
  Synthetic
acauuuuaaggcccugag

SEQ ID NO: 575286 - RNA, 19 nt, Artificial Sequence
  Synthetic
cacauuuuaaggcccugag

SEQ ID NO: 575287 - RNA, 20 nt, Artificial Sequence
  Synthetic
acacauuuuaaggcccugag

SEQ ID NO: 575288 - RNA, 21 nt, Artificial Sequence
  Synthetic
gacacauuuuaaggcccugag

SEQ ID NO: 575289 - RNA, 22 nt, Artificial Sequence
  Synthetic
ugacacauuuuaaggcccugag

SEQ ID NO: 575290 - RNA, 23 nt, Artificial Sequence
  Synthetic
augacacauuuuaaggcccugag

SEQ ID NO: 575291 - RNA, 24 nt, Artificial Sequence
  Synthetic
aaugacacauuuuaaggcccugag

SEQ ID NO: 575292 - RNA, 18 nt, Artificial Sequence
  Synthetic
auuugcucuaagccugag

SEQ ID NO: 575293 - RNA, 19 nt, Artificial Sequence
  Synthetic
aauuugcucuaagccugag

SEQ ID NO: 575294 - RNA, 20 nt, Artificial Sequence
  Synthetic
gaauuugcucuaagccugag

SEQ ID NO: 575295 - RNA, 21 nt, Artificial Sequence
  Synthetic
agaauuugcucuaagccugag

SEQ ID NO: 575296 - RNA, 22 nt, Artificial Sequence
  Synthetic
cagaauuugcucuaagccugag

SEQ ID NO: 575297 - RNA, 23 nt, Artificial Sequence
  Synthetic
ucagaauuugcucuaagccugag

SEQ ID NO: 575298 - RNA, 24 nt, Artificial Sequence
  Synthetic
cucagaauuugcucuaagccugag

SEQ ID NO: 575299 - RNA, 18 nt, Artificial Sequence
  Synthetic
cccagggccuugccugag

SEQ ID NO: 575300 - RNA, 19 nt, Artificial Sequence
  Synthetic
ccccagggccuugccugag

SEQ ID NO: 575301 - RNA, 20 nt, Artificial Sequence
  Synthetic
accccagggccuugccugag

SEQ ID NO: 575302 - RNA, 21 nt, Artificial Sequence
  Synthetic
uaccccagggccuugccugag

SEQ ID NO: 575303 - RNA, 22 nt, Artificial Sequence
  Synthetic
auaccccagggccuugccugag

SEQ ID NO: 575304 - RNA, 23 nt, Artificial Sequence
  Synthetic
cauaccccagggccuugccugag

SEQ ID NO: 575305 - RNA, 24 nt, Artificial Sequence
  Synthetic
ucauaccccagggccuugccugag

SEQ ID NO: 575306 - RNA, 18 nt, Artificial Sequence
  Synthetic
uacucaguaacuccugag

SEQ ID NO: 575307 - RNA, 19 nt, Artificial Sequence
  Synthetic
uuacucaguaacuccugag

SEQ ID NO: 575308 - RNA, 20 nt, Artificial Sequence
  Synthetic
auuacucaguaacuccugag

SEQ ID NO: 575309 - RNA, 21 nt, Artificial Sequence
  Synthetic
cauuacucaguaacuccugag

SEQ ID NO: 575310 - RNA, 22 nt, Artificial Sequence
  Synthetic
ccauuacucaguaacuccugag

SEQ ID NO: 575311 - RNA, 23 nt, Artificial Sequence
  Synthetic
cccauuacucaguaacuccugag

SEQ ID NO: 575312 - RNA, 24 nt, Artificial Sequence
  Synthetic
ucccauuacucaguaacuccugag

SEQ ID NO: 575313 - RNA, 18 nt, Artificial Sequence
  Synthetic
gaggaaaagagagcugag

SEQ ID NO: 575314 - RNA, 19 nt, Artificial Sequence
  Synthetic
agaggaaaagagagcugag

SEQ ID NO: 575315 - RNA, 20 nt, Artificial Sequence
  Synthetic
aagaggaaaagagagcugag

SEQ ID NO: 575316 - RNA, 21 nt, Artificial Sequence
  Synthetic
gaagaggaaaagagagcugag

SEQ ID NO: 575317 - RNA, 22 nt, Artificial Sequence
  Synthetic
cgaagaggaaaagagagcugag

SEQ ID NO: 575318 - RNA, 23 nt, Artificial Sequence
  Synthetic
ccgaagaggaaaagagagcugag

SEQ ID NO: 575319 - RNA, 24 nt, Artificial Sequence
  Synthetic
accgaagaggaaaagagagcugag

SEQ ID NO: 575320 - RNA, 18 nt, Artificial Sequence
  Synthetic
uuacaaaauugagcugag

SEQ ID NO: 575321 - RNA, 19 nt, Artificial Sequence
  Synthetic
auuacaaaauugagcugag

SEQ ID NO: 575322 - RNA, 20 nt, Artificial Sequence
  Synthetic
aauuacaaaauugagcugag

SEQ ID NO: 575323 - RNA, 21 nt, Artificial Sequence
  Synthetic
uaauuacaaaauugagcugag

SEQ ID NO: 575324 - RNA, 22 nt, Artificial Sequence
  Synthetic
uuaauuacaaaauugagcugag

SEQ ID NO: 575325 - RNA, 23 nt, Artificial Sequence
  Synthetic
guuaauuacaaaauugagcugag

SEQ ID NO: 575326 - RNA, 24 nt, Artificial Sequence
  Synthetic
uguuaauuacaaaauugagcugag

SEQ ID NO: 575327 - RNA, 18 nt, Artificial Sequence
  Synthetic
agaaaaaggcccgcugag

SEQ ID NO: 575328 - RNA, 19 nt, Artificial Sequence
  Synthetic
gagaaaaaggcccgcugag

SEQ ID NO: 575329 - RNA, 20 nt, Artificial Sequence
  Synthetic
ggagaaaaaggcccgcugag

SEQ ID NO: 575330 - RNA, 21 nt, Artificial Sequence
  Synthetic
gggagaaaaaggcccgcugag

SEQ ID NO: 575331 - RNA, 22 nt, Artificial Sequence
  Synthetic
ggggagaaaaaggcccgcugag

SEQ ID NO: 575332 - RNA, 23 nt, Artificial Sequence
  Synthetic
uggggagaaaaaggcccgcugag

SEQ ID NO: 575333 - RNA, 24 nt, Artificial Sequence
  Synthetic
uuggggagaaaaaggcccgcugag

SEQ ID NO: 575334 - RNA, 18 nt, Artificial Sequence
  Synthetic
ucuucucagaaggcugag

SEQ ID NO: 575335 - RNA, 19 nt, Artificial Sequence
  Synthetic
aucuucucagaaggcugag

SEQ ID NO: 575336 - RNA, 20 nt, Artificial Sequence
  Synthetic
caucuucucagaaggcugag

SEQ ID NO: 575337 - RNA, 21 nt, Artificial Sequence
  Synthetic
ccaucuucucagaaggcugag

SEQ ID NO: 575338 - RNA, 22 nt, Artificial Sequence
  Synthetic
cccaucuucucagaaggcugag

SEQ ID NO: 575339 - RNA, 23 nt, Artificial Sequence
  Synthetic
ucccaucuucucagaaggcugag

SEQ ID NO: 575340 - RNA, 24 nt, Artificial Sequence
  Synthetic
aucccaucuucucagaaggcugag

SEQ ID NO: 575341 - RNA, 18 nt, Artificial Sequence
  Synthetic
gcuacuuaggaggcugag

SEQ ID NO: 575342 - RNA, 19 nt, Artificial Sequence
  Synthetic
agcuacuuaggaggcugag

SEQ ID NO: 575343 - RNA, 20 nt, Artificial Sequence
  Synthetic
cagcuacuuaggaggcugag

SEQ ID NO: 575344 - RNA, 21 nt, Artificial Sequence
  Synthetic
ccagcuacuuaggaggcugag

SEQ ID NO: 575345 - RNA, 22 nt, Artificial Sequence
  Synthetic
cccagcuacuuaggaggcugag

SEQ ID NO: 575346 - RNA, 23 nt, Artificial Sequence
  Synthetic
ucccagcuacuuaggaggcugag

SEQ ID NO: 575347 - RNA, 24 nt, Artificial Sequence
  Synthetic
aucccagcuacuuaggaggcugag

SEQ ID NO: 575348 - RNA, 18 nt, Artificial Sequence
  Synthetic
gcacuuuaggaggcugag

SEQ ID NO: 575349 - RNA, 19 nt, Artificial Sequence
  Synthetic
agcacuuuaggaggcugag

SEQ ID NO: 575350 - RNA, 20 nt, Artificial Sequence
  Synthetic
cagcacuuuaggaggcugag

SEQ ID NO: 575351 - RNA, 21 nt, Artificial Sequence
  Synthetic
ccagcacuuuaggaggcugag

SEQ ID NO: 575352 - RNA, 22 nt, Artificial Sequence
  Synthetic
cccagcacuuuaggaggcugag

SEQ ID NO: 575353 - RNA, 23 nt, Artificial Sequence
  Synthetic
ucccagcacuuuaggaggcugag

SEQ ID NO: 575354 - RNA, 24 nt, Artificial Sequence
  Synthetic
aucccagcacuuuaggaggcugag

SEQ ID NO: 575355 - RNA, 18 nt, Artificial Sequence
  Synthetic
gcacuuucggaggcugag

SEQ ID NO: 575356 - RNA, 19 nt, Artificial Sequence
  Synthetic
cgcacuuucggaggcugag

SEQ ID NO: 575357 - RNA, 20 nt, Artificial Sequence
  Synthetic
ccgcacuuucggaggcugag

SEQ ID NO: 575358 - RNA, 21 nt, Artificial Sequence
  Synthetic
cccgcacuuucggaggcugag

SEQ ID NO: 575359 - RNA, 22 nt, Artificial Sequence
  Synthetic
ccccgcacuuucggaggcugag

SEQ ID NO: 575360 - RNA, 23 nt, Artificial Sequence
  Synthetic
uccccgcacuuucggaggcugag

SEQ ID NO: 575361 - RNA, 24 nt, Artificial Sequence
  Synthetic
auccccgcacuuucggaggcugag

SEQ ID NO: 575362 - RNA, 18 nt, Artificial Sequence
  Synthetic
gcuacccgggaggcugag

SEQ ID NO: 575363 - RNA, 19 nt, Artificial Sequence
  Synthetic
agcuacccgggaggcugag

SEQ ID NO: 575364 - RNA, 20 nt, Artificial Sequence
  Synthetic
cagcuacccgggaggcugag

SEQ ID NO: 575365 - RNA, 21 nt, Artificial Sequence
  Synthetic
ucagcuacccgggaggcugag

SEQ ID NO: 575366 - RNA, 22 nt, Artificial Sequence
  Synthetic
cucagcuacccgggaggcugag

SEQ ID NO: 575367 - RNA, 23 nt, Artificial Sequence
  Synthetic
ccucagcuacccgggaggcugag

SEQ ID NO: 575368 - RNA, 24 nt, Artificial Sequence
  Synthetic
gccucagcuacccgggaggcugag

SEQ ID NO: 575369 - RNA, 18 nt, Artificial Sequence
  Synthetic
gcuacucgggaggcugag

SEQ ID NO: 575370 - RNA, 19 nt, Artificial Sequence
  Synthetic
agcuacucgggaggcugag

SEQ ID NO: 575371 - RNA, 20 nt, Artificial Sequence
  Synthetic
cagcuacucgggaggcugag

SEQ ID NO: 575372 - RNA, 21 nt, Artificial Sequence
  Synthetic
ccagcuacucgggaggcugag

SEQ ID NO: 575373 - RNA, 22 nt, Artificial Sequence
  Synthetic
cccagcuacucgggaggcugag

SEQ ID NO: 575374 - RNA, 23 nt, Artificial Sequence
  Synthetic
ucccagcuacucgggaggcugag

SEQ ID NO: 575375 - RNA, 24 nt, Artificial Sequence
  Synthetic
gucccagcuacucgggaggcugag

SEQ ID NO: 575376 - RNA, 18 nt, Artificial Sequence
  Synthetic
gccacuugggaggcugag

SEQ ID NO: 575377 - RNA, 19 nt, Artificial Sequence
  Synthetic
agccacuugggaggcugag

SEQ ID NO: 575378 - RNA, 20 nt, Artificial Sequence
  Synthetic
cagccacuugggaggcugag

SEQ ID NO: 575379 - RNA, 21 nt, Artificial Sequence
  Synthetic
ccagccacuugggaggcugag

SEQ ID NO: 575380 - RNA, 22 nt, Artificial Sequence
  Synthetic
cccagccacuugggaggcugag

SEQ ID NO: 575381 - RNA, 23 nt, Artificial Sequence
  Synthetic
ucccagccacuugggaggcugag

SEQ ID NO: 575382 - RNA, 24 nt, Artificial Sequence
  Synthetic
gucccagccacuugggaggcugag

SEQ ID NO: 575383 - RNA, 18 nt, Artificial Sequence
  Synthetic
gcuauuugggaggcugag

SEQ ID NO: 575384 - RNA, 19 nt, Artificial Sequence
  Synthetic
agcuauuugggaggcugag

SEQ ID NO: 575385 - RNA, 20 nt, Artificial Sequence
  Synthetic
cagcuauuugggaggcugag

SEQ ID NO: 575386 - RNA, 21 nt, Artificial Sequence
  Synthetic
ccagcuauuugggaggcugag

SEQ ID NO: 575387 - RNA, 22 nt, Artificial Sequence
  Synthetic
cccagcuauuugggaggcugag

SEQ ID NO: 575388 - RNA, 23 nt, Artificial Sequence
  Synthetic
ucccagcuauuugggaggcugag

SEQ ID NO: 575389 - RNA, 24 nt, Artificial Sequence
  Synthetic
gucccagcuauuugggaggcugag

SEQ ID NO: 575390 - RNA, 18 nt, Artificial Sequence
  Synthetic
auucugauguaugcugag

SEQ ID NO: 575391 - RNA, 19 nt, Artificial Sequence
  Synthetic
gauucugauguaugcugag

SEQ ID NO: 575392 - RNA, 20 nt, Artificial Sequence
  Synthetic
ugauucugauguaugcugag

SEQ ID NO: 575393 - RNA, 21 nt, Artificial Sequence
  Synthetic
gugauucugauguaugcugag

SEQ ID NO: 575394 - RNA, 22 nt, Artificial Sequence
  Synthetic
ggugauucugauguaugcugag

SEQ ID NO: 575395 - RNA, 23 nt, Artificial Sequence
  Synthetic
aggugauucugauguaugcugag

SEQ ID NO: 575396 - RNA, 24 nt, Artificial Sequence
  Synthetic
caggugauucugauguaugcugag

SEQ ID NO: 575397 - RNA, 18 nt, Artificial Sequence
  Synthetic
acuuuggaaugugcugag

SEQ ID NO: 575398 - RNA, 19 nt, Artificial Sequence
  Synthetic
cacuuuggaaugugcugag

SEQ ID NO: 575399 - RNA, 20 nt, Artificial Sequence
  Synthetic
gcacuuuggaaugugcugag

SEQ ID NO: 575400 - RNA, 21 nt, Artificial Sequence
  Synthetic
ggcacuuuggaaugugcugag

SEQ ID NO: 575401 - RNA, 22 nt, Artificial Sequence
  Synthetic
aggcacuuuggaaugugcugag

SEQ ID NO: 575402 - RNA, 23 nt, Artificial Sequence
  Synthetic
uaggcacuuuggaaugugcugag

SEQ ID NO: 575403 - RNA, 24 nt, Artificial Sequence
  Synthetic
cuaggcacuuuggaaugugcugag

SEQ ID NO: 575404 - RNA, 18 nt, Artificial Sequence
  Synthetic
agggcuuaaauugcugag

SEQ ID NO: 575405 - RNA, 19 nt, Artificial Sequence
  Synthetic
gagggcuuaaauugcugag

SEQ ID NO: 575406 - RNA, 20 nt, Artificial Sequence
  Synthetic
ugagggcuuaaauugcugag

SEQ ID NO: 575407 - RNA, 21 nt, Artificial Sequence
  Synthetic
cugagggcuuaaauugcugag

SEQ ID NO: 575408 - RNA, 22 nt, Artificial Sequence
  Synthetic
ucugagggcuuaaauugcugag

SEQ ID NO: 575409 - RNA, 23 nt, Artificial Sequence
  Synthetic
cucugagggcuuaaauugcugag

SEQ ID NO: 575410 - RNA, 24 nt, Artificial Sequence
  Synthetic
ccucugagggcuuaaauugcugag

SEQ ID NO: 575411 - RNA, 18 nt, Artificial Sequence
  Synthetic
guuuuaacaaaaucugag

SEQ ID NO: 575412 - RNA, 19 nt, Artificial Sequence
  Synthetic
uguuuuaacaaaaucugag

SEQ ID NO: 575413 - RNA, 20 nt, Artificial Sequence
  Synthetic
guguuuuaacaaaaucugag

SEQ ID NO: 575414 - RNA, 21 nt, Artificial Sequence
  Synthetic
uguguuuuaacaaaaucugag

SEQ ID NO: 575415 - RNA, 22 nt, Artificial Sequence
  Synthetic
auguguuuuaacaaaaucugag

SEQ ID NO: 575416 - RNA, 23 nt, Artificial Sequence
  Synthetic
gauguguuuuaacaaaaucugag

SEQ ID NO: 575417 - RNA, 24 nt, Artificial Sequence
  Synthetic
ggauguguuuuaacaaaaucugag

SEQ ID NO: 575418 - RNA, 18 nt, Artificial Sequence
  Synthetic
gaaaauguagcaucugag

SEQ ID NO: 575419 - RNA, 19 nt, Artificial Sequence
  Synthetic
ggaaaauguagcaucugag

SEQ ID NO: 575420 - RNA, 20 nt, Artificial Sequence
  Synthetic
uggaaaauguagcaucugag

SEQ ID NO: 575421 - RNA, 21 nt, Artificial Sequence
  Synthetic
auggaaaauguagcaucugag

SEQ ID NO: 575422 - RNA, 22 nt, Artificial Sequence
  Synthetic
aauggaaaauguagcaucugag

SEQ ID NO: 575423 - RNA, 23 nt, Artificial Sequence
  Synthetic
uaauggaaaauguagcaucugag

SEQ ID NO: 575424 - RNA, 24 nt, Artificial Sequence
  Synthetic
uuaauggaaaauguagcaucugag

SEQ ID NO: 575425 - RNA, 18 nt, Artificial Sequence
  Synthetic
ccagaguaacagucugag

SEQ ID NO: 575426 - RNA, 19 nt, Artificial Sequence
  Synthetic
accagaguaacagucugag

SEQ ID NO: 575427 - RNA, 20 nt, Artificial Sequence
  Synthetic
caccagaguaacagucugag

SEQ ID NO: 575428 - RNA, 21 nt, Artificial Sequence
  Synthetic
ucaccagaguaacagucugag

SEQ ID NO: 575429 - RNA, 22 nt, Artificial Sequence
  Synthetic
gucaccagaguaacagucugag

SEQ ID NO: 575430 - RNA, 23 nt, Artificial Sequence
  Synthetic
ugucaccagaguaacagucugag

SEQ ID NO: 575431 - RNA, 24 nt, Artificial Sequence
  Synthetic
gugucaccagaguaacagucugag

SEQ ID NO: 575432 - RNA, 18 nt, Artificial Sequence
  Synthetic
ugaucaagcaggucugag

SEQ ID NO: 575433 - RNA, 19 nt, Artificial Sequence
  Synthetic
cugaucaagcaggucugag

SEQ ID NO: 575434 - RNA, 20 nt, Artificial Sequence
  Synthetic
ucugaucaagcaggucugag

SEQ ID NO: 575435 - RNA, 21 nt, Artificial Sequence
  Synthetic
uucugaucaagcaggucugag

SEQ ID NO: 575436 - RNA, 22 nt, Artificial Sequence
  Synthetic
uuucugaucaagcaggucugag

SEQ ID NO: 575437 - RNA, 23 nt, Artificial Sequence
  Synthetic
guuucugaucaagcaggucugag

SEQ ID NO: 575438 - RNA, 24 nt, Artificial Sequence
  Synthetic
uguuucugaucaagcaggucugag

SEQ ID NO: 575439 - RNA, 18 nt, Artificial Sequence
  Synthetic
auuaacuucuggucugag

SEQ ID NO: 575440 - RNA, 19 nt, Artificial Sequence
  Synthetic
cauuaacuucuggucugag

SEQ ID NO: 575441 - RNA, 20 nt, Artificial Sequence
  Synthetic
ucauuaacuucuggucugag

SEQ ID NO: 575442 - RNA, 21 nt, Artificial Sequence
  Synthetic
uucauuaacuucuggucugag

SEQ ID NO: 575443 - RNA, 22 nt, Artificial Sequence
  Synthetic
uuucauuaacuucuggucugag

SEQ ID NO: 575444 - RNA, 23 nt, Artificial Sequence
  Synthetic
uuuucauuaacuucuggucugag

SEQ ID NO: 575445 - RNA, 24 nt, Artificial Sequence
  Synthetic
uuuuucauuaacuucuggucugag

SEQ ID NO: 575446 - RNA, 18 nt, Artificial Sequence
  Synthetic
ucaugugguaugucugag

SEQ ID NO: 575447 - RNA, 19 nt, Artificial Sequence
  Synthetic
gucaugugguaugucugag

SEQ ID NO: 575448 - RNA, 20 nt, Artificial Sequence
  Synthetic
ugucaugugguaugucugag

SEQ ID NO: 575449 - RNA, 21 nt, Artificial Sequence
  Synthetic
uugucaugugguaugucugag

SEQ ID NO: 575450 - RNA, 22 nt, Artificial Sequence
  Synthetic
auugucaugugguaugucugag

SEQ ID NO: 575451 - RNA, 23 nt, Artificial Sequence
  Synthetic
gauugucaugugguaugucugag

SEQ ID NO: 575452 - RNA, 24 nt, Artificial Sequence
  Synthetic
ugauugucaugugguaugucugag

SEQ ID NO: 575453 - RNA, 18 nt, Artificial Sequence
  Synthetic
aaggagaggcugucugag

SEQ ID NO: 575454 - RNA, 19 nt, Artificial Sequence
  Synthetic
gaaggagaggcugucugag

SEQ ID NO: 575455 - RNA, 20 nt, Artificial Sequence
  Synthetic
ugaaggagaggcugucugag

SEQ ID NO: 575456 - RNA, 21 nt, Artificial Sequence
  Synthetic
cugaaggagaggcugucugag

SEQ ID NO: 575457 - RNA, 22 nt, Artificial Sequence
  Synthetic
ucugaaggagaggcugucugag

SEQ ID NO: 575458 - RNA, 23 nt, Artificial Sequence
  Synthetic
aucugaaggagaggcugucugag

SEQ ID NO: 575459 - RNA, 24 nt, Artificial Sequence
  Synthetic
caucugaaggagaggcugucugag

SEQ ID NO: 575460 - RNA, 18 nt, Artificial Sequence
  Synthetic
guguacaaaaauucugag

SEQ ID NO: 575461 - RNA, 19 nt, Artificial Sequence
  Synthetic
aguguacaaaaauucugag

SEQ ID NO: 575462 - RNA, 20 nt, Artificial Sequence
  Synthetic
aaguguacaaaaauucugag

SEQ ID NO: 575463 - RNA, 21 nt, Artificial Sequence
  Synthetic
gaaguguacaaaaauucugag

SEQ ID NO: 575464 - RNA, 22 nt, Artificial Sequence
  Synthetic
ggaaguguacaaaaauucugag

SEQ ID NO: 575465 - RNA, 23 nt, Artificial Sequence
  Synthetic
gggaaguguacaaaaauucugag

SEQ ID NO: 575466 - RNA, 24 nt, Artificial Sequence
  Synthetic
agggaaguguacaaaaauucugag

SEQ ID NO: 575467 - RNA, 18 nt, Artificial Sequence
  Synthetic
gaaaauaaugcuucugag

SEQ ID NO: 575468 - RNA, 19 nt, Artificial Sequence
  Synthetic
ugaaaauaaugcuucugag

SEQ ID NO: 575469 - RNA, 20 nt, Artificial Sequence
  Synthetic
uugaaaauaaugcuucugag

SEQ ID NO: 575470 - RNA, 21 nt, Artificial Sequence
  Synthetic
auugaaaauaaugcuucugag

SEQ ID NO: 575471 - RNA, 22 nt, Artificial Sequence
  Synthetic
aauugaaaauaaugcuucugag

SEQ ID NO: 575472 - RNA, 23 nt, Artificial Sequence
  Synthetic
aaauugaaaauaaugcuucugag

SEQ ID NO: 575473 - RNA, 24 nt, Artificial Sequence
  Synthetic
gaaauugaaaauaaugcuucugag

SEQ ID NO: 575474 - RNA, 18 nt, Artificial Sequence
  Synthetic
uuuuuuuuuucuucugag

SEQ ID NO: 575475 - RNA, 19 nt, Artificial Sequence
  Synthetic
uuuuuuuuuuucuucugag

SEQ ID NO: 575476 - RNA, 20 nt, Artificial Sequence
  Synthetic
uuuuuuuuuuuucuucugag

SEQ ID NO: 575477 - RNA, 21 nt, Artificial Sequence
  Synthetic
uuuuuuuuuuuuucuucugag

SEQ ID NO: 575478 - RNA, 22 nt, Artificial Sequence
  Synthetic
uuuuuuuuuuuuuucuucugag

SEQ ID NO: 575479 - RNA, 23 nt, Artificial Sequence
  Synthetic
uuuuuuuuuuuuuuucuucugag

SEQ ID NO: 575480 - RNA, 24 nt, Artificial Sequence
  Synthetic
uuuuuuuuuuuuuuuucuucugag

SEQ ID NO: 575481 - RNA, 18 nt, Artificial Sequence
  Synthetic
cuaaauggagguucugag

SEQ ID NO: 575482 - RNA, 19 nt, Artificial Sequence
  Synthetic
ccuaaauggagguucugag

SEQ ID NO: 575483 - RNA, 20 nt, Artificial Sequence
  Synthetic
cccuaaauggagguucugag

SEQ ID NO: 575484 - RNA, 21 nt, Artificial Sequence
  Synthetic
ucccuaaauggagguucugag

SEQ ID NO: 575485 - RNA, 22 nt, Artificial Sequence
  Synthetic
uucccuaaauggagguucugag

SEQ ID NO: 575486 - RNA, 23 nt, Artificial Sequence
  Synthetic
guucccuaaauggagguucugag

SEQ ID NO: 575487 - RNA, 24 nt, Artificial Sequence
  Synthetic
gguucccuaaauggagguucugag

SEQ ID NO: 575488 - RNA, 18 nt, Artificial Sequence
  Synthetic
aaaaacucauuuucugag

SEQ ID NO: 575489 - RNA, 19 nt, Artificial Sequence
  Synthetic
gaaaaacucauuuucugag

SEQ ID NO: 575490 - RNA, 20 nt, Artificial Sequence
  Synthetic
agaaaaacucauuuucugag

SEQ ID NO: 575491 - RNA, 21 nt, Artificial Sequence
  Synthetic
aagaaaaacucauuuucugag

SEQ ID NO: 575492 - RNA, 22 nt, Artificial Sequence
  Synthetic
aaagaaaaacucauuuucugag

SEQ ID NO: 575493 - RNA, 23 nt, Artificial Sequence
  Synthetic
aaaagaaaaacucauuuucugag

SEQ ID NO: 575494 - RNA, 24 nt, Artificial Sequence
  Synthetic
gaaaagaaaaacucauuuucugag

SEQ ID NO: 575495 - RNA, 18 nt, Artificial Sequence
  Synthetic
uaugugguguuuucugag

SEQ ID NO: 575496 - RNA, 19 nt, Artificial Sequence
  Synthetic
guaugugguguuuucugag

SEQ ID NO: 575497 - RNA, 20 nt, Artificial Sequence
  Synthetic
uguaugugguguuuucugag

SEQ ID NO: 575498 - RNA, 21 nt, Artificial Sequence
  Synthetic
uuguaugugguguuuucugag

SEQ ID NO: 575499 - RNA, 22 nt, Artificial Sequence
  Synthetic
cuuguaugugguguuuucugag

SEQ ID NO: 575500 - RNA, 23 nt, Artificial Sequence
  Synthetic
gcuuguaugugguguuuucugag

SEQ ID NO: 575501 - RNA, 24 nt, Artificial Sequence
  Synthetic
agcuuguaugugguguuuucugag

SEQ ID NO: 575502 - RNA, 18 nt, Artificial Sequence
  Synthetic
caauuuucuuuuucugag

SEQ ID NO: 575503 - RNA, 19 nt, Artificial Sequence
  Synthetic
ucaauuuucuuuuucugag

SEQ ID NO: 575504 - RNA, 20 nt, Artificial Sequence
  Synthetic
uucaauuuucuuuuucugag

SEQ ID NO: 575505 - RNA, 21 nt, Artificial Sequence
  Synthetic
guucaauuuucuuuuucugag

SEQ ID NO: 575506 - RNA, 22 nt, Artificial Sequence
  Synthetic
uguucaauuuucuuuuucugag

SEQ ID NO: 575507 - RNA, 23 nt, Artificial Sequence
  Synthetic
auguucaauuuucuuuuucugag

SEQ ID NO: 575508 - RNA, 24 nt, Artificial Sequence
  Synthetic
aauguucaauuuucuuuuucugag

SEQ ID NO: 575509 - RNA, 18 nt, Artificial Sequence
  Synthetic
aauuuuuuuuuuucugag

SEQ ID NO: 575510 - RNA, 19 nt, Artificial Sequence
  Synthetic
aaauuuuuuuuuuucugag

SEQ ID NO: 575511 - RNA, 20 nt, Artificial Sequence
  Synthetic
uaaauuuuuuuuuuucugag

SEQ ID NO: 575512 - RNA, 21 nt, Artificial Sequence
  Synthetic
cuaaauuuuuuuuuuucugag

SEQ ID NO: 575513 - RNA, 22 nt, Artificial Sequence
  Synthetic
ccuaaauuuuuuuuuuucugag

SEQ ID NO: 575514 - RNA, 23 nt, Artificial Sequence
  Synthetic
cccuaaauuuuuuuuuuucugag

SEQ ID NO: 575515 - RNA, 24 nt, Artificial Sequence
  Synthetic
ccccuaaauuuuuuuuuuucugag

SEQ ID NO: 575516 - RNA, 18 nt, Artificial Sequence
  Synthetic
acaauucaaaaaagugag

SEQ ID NO: 575517 - RNA, 19 nt, Artificial Sequence
  Synthetic
aacaauucaaaaaagugag

SEQ ID NO: 575518 - RNA, 20 nt, Artificial Sequence
  Synthetic
caacaauucaaaaaagugag

SEQ ID NO: 575519 - RNA, 21 nt, Artificial Sequence
  Synthetic
ucaacaauucaaaaaagugag

SEQ ID NO: 575520 - RNA, 22 nt, Artificial Sequence
  Synthetic
uucaacaauucaaaaaagugag

SEQ ID NO: 575521 - RNA, 23 nt, Artificial Sequence
  Synthetic
uuucaacaauucaaaaaagugag

SEQ ID NO: 575522 - RNA, 24 nt, Artificial Sequence
  Synthetic
guuucaacaauucaaaaaagugag

SEQ ID NO: 575523 - RNA, 18 nt, Artificial Sequence
  Synthetic
acccaaaauagaagugag

SEQ ID NO: 575524 - RNA, 19 nt, Artificial Sequence
  Synthetic
aacccaaaauagaagugag

SEQ ID NO: 575525 - RNA, 20 nt, Artificial Sequence
  Synthetic
aaacccaaaauagaagugag

SEQ ID NO: 575526 - RNA, 21 nt, Artificial Sequence
  Synthetic
aaaacccaaaauagaagugag

SEQ ID NO: 575527 - RNA, 22 nt, Artificial Sequence
  Synthetic
aaaaacccaaaauagaagugag

SEQ ID NO: 575528 - RNA, 23 nt, Artificial Sequence
  Synthetic
uaaaaacccaaaauagaagugag

SEQ ID NO: 575529 - RNA, 24 nt, Artificial Sequence
  Synthetic
guaaaaacccaaaauagaagugag

SEQ ID NO: 575530 - RNA, 18 nt, Artificial Sequence
  Synthetic
ggcagagguugaagugag

SEQ ID NO: 575531 - RNA, 19 nt, Artificial Sequence
  Synthetic
aggcagagguugaagugag

SEQ ID NO: 575532 - RNA, 20 nt, Artificial Sequence
  Synthetic
gaggcagagguugaagugag

SEQ ID NO: 575533 - RNA, 21 nt, Artificial Sequence
  Synthetic
ggaggcagagguugaagugag

SEQ ID NO: 575534 - RNA, 22 nt, Artificial Sequence
  Synthetic
gggaggcagagguugaagugag

SEQ ID NO: 575535 - RNA, 23 nt, Artificial Sequence
  Synthetic
ugggaggcagagguugaagugag

SEQ ID NO: 575536 - RNA, 24 nt, Artificial Sequence
  Synthetic
cugggaggcagagguugaagugag

SEQ ID NO: 575537 - RNA, 18 nt, Artificial Sequence
  Synthetic
ggcggaaauuacagugag

SEQ ID NO: 575538 - RNA, 19 nt, Artificial Sequence
  Synthetic
aggcggaaauuacagugag

SEQ ID NO: 575539 - RNA, 20 nt, Artificial Sequence
  Synthetic
aaggcggaaauuacagugag

SEQ ID NO: 575540 - RNA, 21 nt, Artificial Sequence
  Synthetic
uaaggcggaaauuacagugag

SEQ ID NO: 575541 - RNA, 22 nt, Artificial Sequence
  Synthetic
auaaggcggaaauuacagugag

SEQ ID NO: 575542 - RNA, 23 nt, Artificial Sequence
  Synthetic
cauaaggcggaaauuacagugag

SEQ ID NO: 575543 - RNA, 24 nt, Artificial Sequence
  Synthetic
ccauaaggcggaaauuacagugag

SEQ ID NO: 575544 - RNA, 18 nt, Artificial Sequence
  Synthetic
gcugauugaaccagugag

SEQ ID NO: 575545 - RNA, 19 nt, Artificial Sequence
  Synthetic
agcugauugaaccagugag

SEQ ID NO: 575546 - RNA, 20 nt, Artificial Sequence
  Synthetic
uagcugauugaaccagugag

SEQ ID NO: 575547 - RNA, 21 nt, Artificial Sequence
  Synthetic
uuagcugauugaaccagugag

SEQ ID NO: 575548 - RNA, 22 nt, Artificial Sequence
  Synthetic
auuagcugauugaaccagugag

SEQ ID NO: 575549 - RNA, 23 nt, Artificial Sequence
  Synthetic
aauuagcugauugaaccagugag

SEQ ID NO: 575550 - RNA, 24 nt, Artificial Sequence
  Synthetic
aaauuagcugauugaaccagugag

SEQ ID NO: 575551 - RNA, 18 nt, Artificial Sequence
  Synthetic
uccauaugacccagugag

SEQ ID NO: 575552 - RNA, 19 nt, Artificial Sequence
  Synthetic
guccauaugacccagugag

SEQ ID NO: 575553 - RNA, 20 nt, Artificial Sequence
  Synthetic
uguccauaugacccagugag

SEQ ID NO: 575554 - RNA, 21 nt, Artificial Sequence
  Synthetic
auguccauaugacccagugag

SEQ ID NO: 575555 - RNA, 22 nt, Artificial Sequence
  Synthetic
aauguccauaugacccagugag

SEQ ID NO: 575556 - RNA, 23 nt, Artificial Sequence
  Synthetic
aaauguccauaugacccagugag

SEQ ID NO: 575557 - RNA, 24 nt, Artificial Sequence
  Synthetic
gaaauguccauaugacccagugag

SEQ ID NO: 575558 - RNA, 18 nt, Artificial Sequence
  Synthetic
caaaauuaucccagugag

SEQ ID NO: 575559 - RNA, 19 nt, Artificial Sequence
  Synthetic
ucaaaauuaucccagugag

SEQ ID NO: 575560 - RNA, 20 nt, Artificial Sequence
  Synthetic
cucaaaauuaucccagugag

SEQ ID NO: 575561 - RNA, 21 nt, Artificial Sequence
  Synthetic
ucucaaaauuaucccagugag

SEQ ID NO: 575562 - RNA, 22 nt, Artificial Sequence
  Synthetic
aucucaaaauuaucccagugag

SEQ ID NO: 575563 - RNA, 23 nt, Artificial Sequence
  Synthetic
uaucucaaaauuaucccagugag

SEQ ID NO: 575564 - RNA, 24 nt, Artificial Sequence
  Synthetic
auaucucaaaauuaucccagugag

SEQ ID NO: 575565 - RNA, 18 nt, Artificial Sequence
  Synthetic
cuaaccagucccagugag

SEQ ID NO: 575566 - RNA, 19 nt, Artificial Sequence
  Synthetic
ucuaaccagucccagugag

SEQ ID NO: 575567 - RNA, 20 nt, Artificial Sequence
  Synthetic
gucuaaccagucccagugag

SEQ ID NO: 575568 - RNA, 21 nt, Artificial Sequence
  Synthetic
ugucuaaccagucccagugag

SEQ ID NO: 575569 - RNA, 22 nt, Artificial Sequence
  Synthetic
cugucuaaccagucccagugag

SEQ ID NO: 575570 - RNA, 23 nt, Artificial Sequence
  Synthetic
acugucuaaccagucccagugag

SEQ ID NO: 575571 - RNA, 24 nt, Artificial Sequence
  Synthetic
cacugucuaaccagucccagugag

SEQ ID NO: 575572 - RNA, 18 nt, Artificial Sequence
  Synthetic
aaaacaaauagcagugag

SEQ ID NO: 575573 - RNA, 19 nt, Artificial Sequence
  Synthetic
uaaaacaaauagcagugag

SEQ ID NO: 575574 - RNA, 20 nt, Artificial Sequence
  Synthetic
auaaaacaaauagcagugag

SEQ ID NO: 575575 - RNA, 21 nt, Artificial Sequence
  Synthetic
aauaaaacaaauagcagugag

SEQ ID NO: 575576 - RNA, 22 nt, Artificial Sequence
  Synthetic
gaauaaaacaaauagcagugag

SEQ ID NO: 575577 - RNA, 23 nt, Artificial Sequence
  Synthetic
agaauaaaacaaauagcagugag

SEQ ID NO: 575578 - RNA, 24 nt, Artificial Sequence
  Synthetic
aagaauaaaacaaauagcagugag

SEQ ID NO: 575579 - RNA, 18 nt, Artificial Sequence
  Synthetic
ggcggaggcugcagugag

SEQ ID NO: 575580 - RNA, 19 nt, Artificial Sequence
  Synthetic
aggcggaggcugcagugag

SEQ ID NO: 575581 - RNA, 20 nt, Artificial Sequence
  Synthetic
gaggcggaggcugcagugag

SEQ ID NO: 575582 - RNA, 21 nt, Artificial Sequence
  Synthetic
ggaggcggaggcugcagugag

SEQ ID NO: 575583 - RNA, 22 nt, Artificial Sequence
  Synthetic
aggaggcggaggcugcagugag

SEQ ID NO: 575584 - RNA, 23 nt, Artificial Sequence
  Synthetic
caggaggcggaggcugcagugag

SEQ ID NO: 575585 - RNA, 24 nt, Artificial Sequence
  Synthetic
ccaggaggcggaggcugcagugag

SEQ ID NO: 575586 - RNA, 18 nt, Artificial Sequence
  Synthetic
gacagagggugcagugag

SEQ ID NO: 575587 - RNA, 19 nt, Artificial Sequence
  Synthetic
agacagagggugcagugag

SEQ ID NO: 575588 - RNA, 20 nt, Artificial Sequence
  Synthetic
gagacagagggugcagugag

SEQ ID NO: 575589 - RNA, 21 nt, Artificial Sequence
  Synthetic
ggagacagagggugcagugag

SEQ ID NO: 575590 - RNA, 22 nt, Artificial Sequence
  Synthetic
gggagacagagggugcagugag

SEQ ID NO: 575591 - RNA, 23 nt, Artificial Sequence
  Synthetic
ugggagacagagggugcagugag

SEQ ID NO: 575592 - RNA, 24 nt, Artificial Sequence
  Synthetic
cugggagacagagggugcagugag

SEQ ID NO: 575593 - RNA, 21 nt, Artificial Sequence
  Synthetic
ggaggcggagcuugcagugag

SEQ ID NO: 575594 - RNA, 22 nt, Artificial Sequence
  Synthetic
aggaggcggagcuugcagugag

SEQ ID NO: 575595 - RNA, 23 nt, Artificial Sequence
  Synthetic
caggaggcggagcuugcagugag

SEQ ID NO: 575596 - RNA, 24 nt, Artificial Sequence
  Synthetic
ccaggaggcggagcuugcagugag

SEQ ID NO: 575597 - RNA, 18 nt, Artificial Sequence
  Synthetic
aguggagcuugcagugag

SEQ ID NO: 575598 - RNA, 19 nt, Artificial Sequence
  Synthetic
caguggagcuugcagugag

SEQ ID NO: 575599 - RNA, 20 nt, Artificial Sequence
  Synthetic
gcaguggagcuugcagugag

SEQ ID NO: 575600 - RNA, 21 nt, Artificial Sequence
  Synthetic
ggcaguggagcuugcagugag

SEQ ID NO: 575601 - RNA, 22 nt, Artificial Sequence
  Synthetic
gggcaguggagcuugcagugag

SEQ ID NO: 575602 - RNA, 23 nt, Artificial Sequence
  Synthetic
cgggcaguggagcuugcagugag

SEQ ID NO: 575603 - RNA, 24 nt, Artificial Sequence
  Synthetic
ccgggcaguggagcuugcagugag

SEQ ID NO: 575604 - RNA, 21 nt, Artificial Sequence
  Synthetic
ggagguggagcuugcagugag

SEQ ID NO: 575605 - RNA, 22 nt, Artificial Sequence
  Synthetic
aggagguggagcuugcagugag

SEQ ID NO: 575606 - RNA, 23 nt, Artificial Sequence
  Synthetic
caggagguggagcuugcagugag

SEQ ID NO: 575607 - RNA, 24 nt, Artificial Sequence
  Synthetic
ccaggagguggagcuugcagugag

SEQ ID NO: 575608 - RNA, 18 nt, Artificial Sequence
  Synthetic
ggcggaaguugcagugag

SEQ ID NO: 575609 - RNA, 19 nt, Artificial Sequence
  Synthetic
aggcggaaguugcagugag

SEQ ID NO: 575610 - RNA, 20 nt, Artificial Sequence
  Synthetic
gaggcggaaguugcagugag

SEQ ID NO: 575611 - RNA, 21 nt, Artificial Sequence
  Synthetic
ggaggcggaaguugcagugag

SEQ ID NO: 575612 - RNA, 22 nt, Artificial Sequence
  Synthetic
gggaggcggaaguugcagugag

SEQ ID NO: 575613 - RNA, 23 nt, Artificial Sequence
  Synthetic
ugggaggcggaaguugcagugag

SEQ ID NO: 575614 - RNA, 24 nt, Artificial Sequence
  Synthetic
cugggaggcggaaguugcagugag

SEQ ID NO: 575615 - RNA, 22 nt, Artificial Sequence
  Synthetic
aggagacagagguugcagugag

SEQ ID NO: 575616 - RNA, 23 nt, Artificial Sequence
  Synthetic
caggagacagagguugcagugag

SEQ ID NO: 575617 - RNA, 24 nt, Artificial Sequence
  Synthetic
ccaggagacagagguugcagugag

SEQ ID NO: 575618 - RNA, 18 nt, Artificial Sequence
  Synthetic
ggcagagguugcagugag

SEQ ID NO: 575619 - RNA, 23 nt, Artificial Sequence
  Synthetic
ugggaggcagagguugcagugag

SEQ ID NO: 575620 - RNA, 24 nt, Artificial Sequence
  Synthetic
augggaggcagagguugcagugag

SEQ ID NO: 575621 - RNA, 22 nt, Artificial Sequence
  Synthetic
uggaggcagagguugcagugag

SEQ ID NO: 575622 - RNA, 23 nt, Artificial Sequence
  Synthetic
cuggaggcagagguugcagugag

SEQ ID NO: 575623 - RNA, 24 nt, Artificial Sequence
  Synthetic
ccuggaggcagagguugcagugag

SEQ ID NO: 575624 - RNA, 19 nt, Artificial Sequence
  Synthetic
cggcagagguugcagugag

SEQ ID NO: 575625 - RNA, 20 nt, Artificial Sequence
  Synthetic
gcggcagagguugcagugag

SEQ ID NO: 575626 - RNA, 21 nt, Artificial Sequence
  Synthetic
ggcggcagagguugcagugag

SEQ ID NO: 575627 - RNA, 22 nt, Artificial Sequence
  Synthetic
gggcggcagagguugcagugag

SEQ ID NO: 575628 - RNA, 23 nt, Artificial Sequence
  Synthetic
cgggcggcagagguugcagugag

SEQ ID NO: 575629 - RNA, 24 nt, Artificial Sequence
  Synthetic
ccgggcggcagagguugcagugag

SEQ ID NO: 575630 - RNA, 18 nt, Artificial Sequence
  Synthetic
gucagagguugcagugag

SEQ ID NO: 575631 - RNA, 19 nt, Artificial Sequence
  Synthetic
agucagagguugcagugag

SEQ ID NO: 575632 - RNA, 20 nt, Artificial Sequence
  Synthetic
gagucagagguugcagugag

SEQ ID NO: 575633 - RNA, 21 nt, Artificial Sequence
  Synthetic
ggagucagagguugcagugag

SEQ ID NO: 575634 - RNA, 22 nt, Artificial Sequence
  Synthetic
gggagucagagguugcagugag

SEQ ID NO: 575635 - RNA, 23 nt, Artificial Sequence
  Synthetic
agggagucagagguugcagugag

SEQ ID NO: 575636 - RNA, 24 nt, Artificial Sequence
  Synthetic
cagggagucagagguugcagugag

SEQ ID NO: 575637 - RNA, 18 nt, Artificial Sequence
  Synthetic
agcggagguugcagugag

SEQ ID NO: 575638 - RNA, 19 nt, Artificial Sequence
  Synthetic
aagcggagguugcagugag

SEQ ID NO: 575639 - RNA, 20 nt, Artificial Sequence
  Synthetic
gaagcggagguugcagugag

SEQ ID NO: 575640 - RNA, 21 nt, Artificial Sequence
  Synthetic
ggaagcggagguugcagugag

SEQ ID NO: 575641 - RNA, 22 nt, Artificial Sequence
  Synthetic
aggaagcggagguugcagugag

SEQ ID NO: 575642 - RNA, 23 nt, Artificial Sequence
  Synthetic
caggaagcggagguugcagugag

SEQ ID NO: 575643 - RNA, 24 nt, Artificial Sequence
  Synthetic
ccaggaagcggagguugcagugag

SEQ ID NO: 575644 - RNA, 18 nt, Artificial Sequence
  Synthetic
ggcggagguugcagugag

SEQ ID NO: 575645 - RNA, 21 nt, Artificial Sequence
  Synthetic
ggaggcggagguugcagugag

SEQ ID NO: 575646 - RNA, 22 nt, Artificial Sequence
  Synthetic
aggaggcggagguugcagugag

SEQ ID NO: 575647 - RNA, 23 nt, Artificial Sequence
  Synthetic
caggaggcggagguugcagugag

SEQ ID NO: 575648 - RNA, 24 nt, Artificial Sequence
  Synthetic
ccaggaggcggagguugcagugag

SEQ ID NO: 575649 - RNA, 22 nt, Artificial Sequence
  Synthetic
gggaggcggagguugcagugag

SEQ ID NO: 575650 - RNA, 23 nt, Artificial Sequence
  Synthetic
ugggaggcggagguugcagugag

SEQ ID NO: 575651 - RNA, 24 nt, Artificial Sequence
  Synthetic
cugggaggcggagguugcagugag

SEQ ID NO: 575652 - RNA, 19 nt, Artificial Sequence
  Synthetic
uggcggagguugcagugag

SEQ ID NO: 575653 - RNA, 20 nt, Artificial Sequence
  Synthetic
guggcggagguugcagugag

SEQ ID NO: 575654 - RNA, 21 nt, Artificial Sequence
  Synthetic
gguggcggagguugcagugag

SEQ ID NO: 575655 - RNA, 22 nt, Artificial Sequence
  Synthetic
agguggcggagguugcagugag

SEQ ID NO: 575656 - RNA, 23 nt, Artificial Sequence
  Synthetic
uagguggcggagguugcagugag

SEQ ID NO: 575657 - RNA, 24 nt, Artificial Sequence
  Synthetic
cuagguggcggagguugcagugag

SEQ ID NO: 575658 - RNA, 21 nt, Artificial Sequence
  Synthetic
agagguggagguugcagugag

SEQ ID NO: 575659 - RNA, 22 nt, Artificial Sequence
  Synthetic
aagagguggagguugcagugag

SEQ ID NO: 575660 - RNA, 23 nt, Artificial Sequence
  Synthetic
uaagagguggagguugcagugag

SEQ ID NO: 575661 - RNA, 24 nt, Artificial Sequence
  Synthetic
cuaagagguggagguugcagugag

SEQ ID NO: 575662 - RNA, 21 nt, Artificial Sequence
  Synthetic
ggagguggagguugcagugag

SEQ ID NO: 575663 - RNA, 22 nt, Artificial Sequence
  Synthetic
aggagguggagguugcagugag

SEQ ID NO: 575664 - RNA, 23 nt, Artificial Sequence
  Synthetic
caggagguggagguugcagugag

SEQ ID NO: 575665 - RNA, 24 nt, Artificial Sequence
  Synthetic
acaggagguggagguugcagugag

SEQ ID NO: 575666 - RNA, 24 nt, Artificial Sequence
  Synthetic
ccaggagguggagguugcagugag

SEQ ID NO: 575667 - RNA, 22 nt, Artificial Sequence
  Synthetic
gggagguggagguugcagugag

SEQ ID NO: 575668 - RNA, 23 nt, Artificial Sequence
  Synthetic
cgggagguggagguugcagugag

SEQ ID NO: 575669 - RNA, 24 nt, Artificial Sequence
  Synthetic
ucgggagguggagguugcagugag

SEQ ID NO: 575670 - RNA, 18 nt, Artificial Sequence
  Synthetic
ggcagugguugcagugag

SEQ ID NO: 575671 - RNA, 19 nt, Artificial Sequence
  Synthetic
aggcagugguugcagugag

SEQ ID NO: 575672 - RNA, 20 nt, Artificial Sequence
  Synthetic
gaggcagugguugcagugag

SEQ ID NO: 575673 - RNA, 21 nt, Artificial Sequence
  Synthetic
ggaggcagugguugcagugag

SEQ ID NO: 575674 - RNA, 22 nt, Artificial Sequence
  Synthetic
gggaggcagugguugcagugag

SEQ ID NO: 575675 - RNA, 23 nt, Artificial Sequence
  Synthetic
cgggaggcagugguugcagugag

SEQ ID NO: 575676 - RNA, 24 nt, Artificial Sequence
  Synthetic
ccgggaggcagugguugcagugag

SEQ ID NO: 575677 - RNA, 18 nt, Artificial Sequence
  Synthetic
gguggaguuugcagugag

SEQ ID NO: 575678 - RNA, 19 nt, Artificial Sequence
  Synthetic
agguggaguuugcagugag

SEQ ID NO: 575679 - RNA, 20 nt, Artificial Sequence
  Synthetic
gagguggaguuugcagugag

SEQ ID NO: 575680 - RNA, 21 nt, Artificial Sequence
  Synthetic
ggagguggaguuugcagugag

SEQ ID NO: 575681 - RNA, 22 nt, Artificial Sequence
  Synthetic
aggagguggaguuugcagugag

SEQ ID NO: 575682 - RNA, 23 nt, Artificial Sequence
  Synthetic
uaggagguggaguuugcagugag

SEQ ID NO: 575683 - RNA, 24 nt, Artificial Sequence
  Synthetic
uuaggagguggaguuugcagugag

SEQ ID NO: 575684 - RNA, 18 nt, Artificial Sequence
  Synthetic
caaagaaucuucagugag

SEQ ID NO: 575685 - RNA, 19 nt, Artificial Sequence
  Synthetic
acaaagaaucuucagugag

SEQ ID NO: 575686 - RNA, 20 nt, Artificial Sequence
  Synthetic
aacaaagaaucuucagugag

SEQ ID NO: 575687 - RNA, 21 nt, Artificial Sequence
  Synthetic
aaacaaagaaucuucagugag

SEQ ID NO: 575688 - RNA, 22 nt, Artificial Sequence
  Synthetic
aaaacaaagaaucuucagugag

SEQ ID NO: 575689 - RNA, 23 nt, Artificial Sequence
  Synthetic
gaaaacaaagaaucuucagugag

SEQ ID NO: 575690 - RNA, 24 nt, Artificial Sequence
  Synthetic
agaaaacaaagaaucuucagugag

SEQ ID NO: 575691 - RNA, 18 nt, Artificial Sequence
  Synthetic
acagggaaaaagagugag

SEQ ID NO: 575692 - RNA, 19 nt, Artificial Sequence
  Synthetic
uacagggaaaaagagugag

SEQ ID NO: 575693 - RNA, 20 nt, Artificial Sequence
  Synthetic
auacagggaaaaagagugag

SEQ ID NO: 575694 - RNA, 21 nt, Artificial Sequence
  Synthetic
cauacagggaaaaagagugag

SEQ ID NO: 575695 - RNA, 22 nt, Artificial Sequence
  Synthetic
ccauacagggaaaaagagugag

SEQ ID NO: 575696 - RNA, 23 nt, Artificial Sequence
  Synthetic
accauacagggaaaaagagugag

SEQ ID NO: 575697 - RNA, 24 nt, Artificial Sequence
  Synthetic
aaccauacagggaaaaagagugag

SEQ ID NO: 575698 - RNA, 18 nt, Artificial Sequence
  Synthetic
uagggugaaaagagugag

SEQ ID NO: 575699 - RNA, 19 nt, Artificial Sequence
  Synthetic
uuagggugaaaagagugag

SEQ ID NO: 575700 - RNA, 20 nt, Artificial Sequence
  Synthetic
uuuagggugaaaagagugag

SEQ ID NO: 575701 - RNA, 21 nt, Artificial Sequence
  Synthetic
guuuagggugaaaagagugag

SEQ ID NO: 575702 - RNA, 22 nt, Artificial Sequence
  Synthetic
uguuuagggugaaaagagugag

SEQ ID NO: 575703 - RNA, 23 nt, Artificial Sequence
  Synthetic
guguuuagggugaaaagagugag

SEQ ID NO: 575704 - RNA, 24 nt, Artificial Sequence
  Synthetic
gguguuuagggugaaaagagugag

SEQ ID NO: 575705 - RNA, 18 nt, Artificial Sequence
  Synthetic
gcauagcugaggagugag

SEQ ID NO: 575706 - RNA, 19 nt, Artificial Sequence
  Synthetic
ggcauagcugaggagugag

SEQ ID NO: 575707 - RNA, 20 nt, Artificial Sequence
  Synthetic
aggcauagcugaggagugag

SEQ ID NO: 575708 - RNA, 21 nt, Artificial Sequence
  Synthetic
uaggcauagcugaggagugag

SEQ ID NO: 575709 - RNA, 22 nt, Artificial Sequence
  Synthetic
guaggcauagcugaggagugag

SEQ ID NO: 575710 - RNA, 23 nt, Artificial Sequence
  Synthetic
aguaggcauagcugaggagugag

SEQ ID NO: 575711 - RNA, 24 nt, Artificial Sequence
  Synthetic
aaguaggcauagcugaggagugag

SEQ ID NO: 575712 - RNA, 18 nt, Artificial Sequence
  Synthetic
aaauaaaaauggagugag

SEQ ID NO: 575713 - RNA, 19 nt, Artificial Sequence
  Synthetic
aaaauaaaaauggagugag

SEQ ID NO: 575714 - RNA, 20 nt, Artificial Sequence
  Synthetic
uaaaauaaaaauggagugag

SEQ ID NO: 575715 - RNA, 21 nt, Artificial Sequence
  Synthetic
uuaaaauaaaaauggagugag

SEQ ID NO: 575716 - RNA, 22 nt, Artificial Sequence
  Synthetic
uuuaaaauaaaaauggagugag

SEQ ID NO: 575717 - RNA, 23 nt, Artificial Sequence
  Synthetic
uuuuaaaauaaaaauggagugag

SEQ ID NO: 575718 - RNA, 24 nt, Artificial Sequence
  Synthetic
uuuuuaaaauaaaaauggagugag

SEQ ID NO: 575719 - RNA, 18 nt, Artificial Sequence
  Synthetic
agaaggagaaugagugag

SEQ ID NO: 575720 - RNA, 19 nt, Artificial Sequence
  Synthetic
aagaaggagaaugagugag

SEQ ID NO: 575721 - RNA, 20 nt, Artificial Sequence
  Synthetic
caagaaggagaaugagugag

SEQ ID NO: 575722 - RNA, 21 nt, Artificial Sequence
  Synthetic
gcaagaaggagaaugagugag

SEQ ID NO: 575723 - RNA, 22 nt, Artificial Sequence
  Synthetic
ggcaagaaggagaaugagugag

SEQ ID NO: 575724 - RNA, 23 nt, Artificial Sequence
  Synthetic
uggcaagaaggagaaugagugag

SEQ ID NO: 575725 - RNA, 24 nt, Artificial Sequence
  Synthetic
guggcaagaaggagaaugagugag

SEQ ID NO: 575726 - RNA, 18 nt, Artificial Sequence
  Synthetic
ugaaaucaggcuagugag

SEQ ID NO: 575727 - RNA, 19 nt, Artificial Sequence
  Synthetic
uugaaaucaggcuagugag

SEQ ID NO: 575728 - RNA, 20 nt, Artificial Sequence
  Synthetic
auugaaaucaggcuagugag

SEQ ID NO: 575729 - RNA, 21 nt, Artificial Sequence
  Synthetic
aauugaaaucaggcuagugag

SEQ ID NO: 575730 - RNA, 22 nt, Artificial Sequence
  Synthetic
caauugaaaucaggcuagugag

SEQ ID NO: 575731 - RNA, 23 nt, Artificial Sequence
  Synthetic
gcaauugaaaucaggcuagugag

SEQ ID NO: 575732 - RNA, 24 nt, Artificial Sequence
  Synthetic
agcaauugaaaucaggcuagugag

SEQ ID NO: 575733 - RNA, 18 nt, Artificial Sequence
  Synthetic
gguggagguuguagugag

SEQ ID NO: 575734 - RNA, 19 nt, Artificial Sequence
  Synthetic
agguggagguuguagugag

SEQ ID NO: 575735 - RNA, 20 nt, Artificial Sequence
  Synthetic
gagguggagguuguagugag

SEQ ID NO: 575736 - RNA, 21 nt, Artificial Sequence
  Synthetic
ggagguggagguuguagugag

SEQ ID NO: 575737 - RNA, 22 nt, Artificial Sequence
  Synthetic
gggagguggagguuguagugag

SEQ ID NO: 575738 - RNA, 23 nt, Artificial Sequence
  Synthetic
ugggagguggagguuguagugag

SEQ ID NO: 575739 - RNA, 24 nt, Artificial Sequence
  Synthetic
uugggagguggagguuguagugag

SEQ ID NO: 575740 - RNA, 18 nt, Artificial Sequence
  Synthetic
ccugaggaauaaggugag

SEQ ID NO: 575741 - RNA, 19 nt, Artificial Sequence
  Synthetic
gccugaggaauaaggugag

SEQ ID NO: 575742 - RNA, 20 nt, Artificial Sequence
  Synthetic
agccugaggaauaaggugag

SEQ ID NO: 575743 - RNA, 21 nt, Artificial Sequence
  Synthetic
aagccugaggaauaaggugag

SEQ ID NO: 575744 - RNA, 22 nt, Artificial Sequence
  Synthetic
aaagccugaggaauaaggugag

SEQ ID NO: 575745 - RNA, 23 nt, Artificial Sequence
  Synthetic
gaaagccugaggaauaaggugag

SEQ ID NO: 575746 - RNA, 24 nt, Artificial Sequence
  Synthetic
agaaagccugaggaauaaggugag

SEQ ID NO: 575747 - RNA, 18 nt, Artificial Sequence
  Synthetic
aucguggcauaaggugag

SEQ ID NO: 575748 - RNA, 19 nt, Artificial Sequence
  Synthetic
caucguggcauaaggugag

SEQ ID NO: 575749 - RNA, 20 nt, Artificial Sequence
  Synthetic
ccaucguggcauaaggugag

SEQ ID NO: 575750 - RNA, 21 nt, Artificial Sequence
  Synthetic
accaucguggcauaaggugag

SEQ ID NO: 575751 - RNA, 22 nt, Artificial Sequence
  Synthetic
uaccaucguggcauaaggugag

SEQ ID NO: 575752 - RNA, 23 nt, Artificial Sequence
  Synthetic
uuaccaucguggcauaaggugag

SEQ ID NO: 575753 - RNA, 24 nt, Artificial Sequence
  Synthetic
cuuaccaucguggcauaaggugag

SEQ ID NO: 575754 - RNA, 18 nt, Artificial Sequence
  Synthetic
aucuuugcaugaggugag

SEQ ID NO: 575755 - RNA, 19 nt, Artificial Sequence
  Synthetic
aaucuuugcaugaggugag

SEQ ID NO: 575756 - RNA, 20 nt, Artificial Sequence
  Synthetic
aaaucuuugcaugaggugag

SEQ ID NO: 575757 - RNA, 21 nt, Artificial Sequence
  Synthetic
uaaaucuuugcaugaggugag

SEQ ID NO: 575758 - RNA, 22 nt, Artificial Sequence
  Synthetic
guaaaucuuugcaugaggugag

SEQ ID NO: 575759 - RNA, 23 nt, Artificial Sequence
  Synthetic
gguaaaucuuugcaugaggugag

SEQ ID NO: 575760 - RNA, 24 nt, Artificial Sequence
  Synthetic
ggguaaaucuuugcaugaggugag

SEQ ID NO: 575761 - RNA, 18 nt, Artificial Sequence
  Synthetic
cuuauucaaauaggugag

SEQ ID NO: 575762 - RNA, 19 nt, Artificial Sequence
  Synthetic
ucuuauucaaauaggugag

SEQ ID NO: 575763 - RNA, 20 nt, Artificial Sequence
  Synthetic
aucuuauucaaauaggugag

SEQ ID NO: 575764 - RNA, 21 nt, Artificial Sequence
  Synthetic
aaucuuauucaaauaggugag

SEQ ID NO: 575765 - RNA, 22 nt, Artificial Sequence
  Synthetic
aaaucuuauucaaauaggugag

SEQ ID NO: 575766 - RNA, 23 nt, Artificial Sequence
  Synthetic
aaaaucuuauucaaauaggugag

SEQ ID NO: 575767 - RNA, 24 nt, Artificial Sequence
  Synthetic
aaaaaucuuauucaaauaggugag

SEQ ID NO: 575768 - RNA, 18 nt, Artificial Sequence
  Synthetic
caucuuugauuaggugag

SEQ ID NO: 575769 - RNA, 19 nt, Artificial Sequence
  Synthetic
ucaucuuugauuaggugag

SEQ ID NO: 575770 - RNA, 20 nt, Artificial Sequence
  Synthetic
uucaucuuugauuaggugag

SEQ ID NO: 575771 - RNA, 21 nt, Artificial Sequence
  Synthetic
uuucaucuuugauuaggugag

SEQ ID NO: 575772 - RNA, 22 nt, Artificial Sequence
  Synthetic
auuucaucuuugauuaggugag

SEQ ID NO: 575773 - RNA, 23 nt, Artificial Sequence
  Synthetic
uauuucaucuuugauuaggugag

SEQ ID NO: 575774 - RNA, 24 nt, Artificial Sequence
  Synthetic
auauuucaucuuugauuaggugag

SEQ ID NO: 575775 - RNA, 21 nt, Artificial Sequence
  Synthetic
ggagguggagcuugcggugag

SEQ ID NO: 575776 - RNA, 22 nt, Artificial Sequence
  Synthetic
aggagguggagcuugcggugag

SEQ ID NO: 575777 - RNA, 23 nt, Artificial Sequence
  Synthetic
caggagguggagcuugcggugag

SEQ ID NO: 575778 - RNA, 24 nt, Artificial Sequence
  Synthetic
ccaggagguggagcuugcggugag

SEQ ID NO: 575779 - RNA, 18 nt, Artificial Sequence
  Synthetic
gguguagguugcggugag

SEQ ID NO: 575780 - RNA, 19 nt, Artificial Sequence
  Synthetic
agguguagguugcggugag

SEQ ID NO: 575781 - RNA, 20 nt, Artificial Sequence
  Synthetic
gagguguagguugcggugag

SEQ ID NO: 575782 - RNA, 21 nt, Artificial Sequence
  Synthetic
ggagguguagguugcggugag

SEQ ID NO: 575783 - RNA, 22 nt, Artificial Sequence
  Synthetic
gggagguguagguugcggugag

SEQ ID NO: 575784 - RNA, 23 nt, Artificial Sequence
  Synthetic
ugggagguguagguugcggugag

SEQ ID NO: 575785 - RNA, 24 nt, Artificial Sequence
  Synthetic
cugggagguguagguugcggugag

SEQ ID NO: 575786 - RNA, 18 nt, Artificial Sequence
  Synthetic
acacaucaacagggugag

SEQ ID NO: 575787 - RNA, 19 nt, Artificial Sequence
  Synthetic
gacacaucaacagggugag

SEQ ID NO: 575788 - RNA, 20 nt, Artificial Sequence
  Synthetic
ggacacaucaacagggugag

SEQ ID NO: 575789 - RNA, 21 nt, Artificial Sequence
  Synthetic
aggacacaucaacagggugag

SEQ ID NO: 575790 - RNA, 22 nt, Artificial Sequence
  Synthetic
caggacacaucaacagggugag

SEQ ID NO: 575791 - RNA, 23 nt, Artificial Sequence
  Synthetic
ccaggacacaucaacagggugag

SEQ ID NO: 575792 - RNA, 24 nt, Artificial Sequence
  Synthetic
uccaggacacaucaacagggugag

SEQ ID NO: 575793 - RNA, 18 nt, Artificial Sequence
  Synthetic
uguagagcagagggugag

SEQ ID NO: 575794 - RNA, 19 nt, Artificial Sequence
  Synthetic
uuguagagcagagggugag

SEQ ID NO: 575795 - RNA, 20 nt, Artificial Sequence
  Synthetic
uuuguagagcagagggugag

SEQ ID NO: 575796 - RNA, 21 nt, Artificial Sequence
  Synthetic
uuuuguagagcagagggugag

SEQ ID NO: 575797 - RNA, 22 nt, Artificial Sequence
  Synthetic
cuuuuguagagcagagggugag

SEQ ID NO: 575798 - RNA, 23 nt, Artificial Sequence
  Synthetic
acuuuuguagagcagagggugag

SEQ ID NO: 575799 - RNA, 24 nt, Artificial Sequence
  Synthetic
uacuuuuguagagcagagggugag

SEQ ID NO: 575800 - RNA, 18 nt, Artificial Sequence
  Synthetic
acaucuugagagggugag

SEQ ID NO: 575801 - RNA, 19 nt, Artificial Sequence
  Synthetic
cacaucuugagagggugag

SEQ ID NO: 575802 - RNA, 20 nt, Artificial Sequence
  Synthetic
acacaucuugagagggugag

SEQ ID NO: 575803 - RNA, 21 nt, Artificial Sequence
  Synthetic
aacacaucuugagagggugag

SEQ ID NO: 575804 - RNA, 22 nt, Artificial Sequence
  Synthetic
uaacacaucuugagagggugag

SEQ ID NO: 575805 - RNA, 23 nt, Artificial Sequence
  Synthetic
uuaacacaucuugagagggugag

SEQ ID NO: 575806 - RNA, 24 nt, Artificial Sequence
  Synthetic
auuaacacaucuugagagggugag

SEQ ID NO: 575807 - RNA, 18 nt, Artificial Sequence
  Synthetic
auguccagcaggggugag

SEQ ID NO: 575808 - RNA, 19 nt, Artificial Sequence
  Synthetic
gauguccagcaggggugag

SEQ ID NO: 575809 - RNA, 20 nt, Artificial Sequence
  Synthetic
ggauguccagcaggggugag

SEQ ID NO: 575810 - RNA, 21 nt, Artificial Sequence
  Synthetic
uggauguccagcaggggugag

SEQ ID NO: 575811 - RNA, 22 nt, Artificial Sequence
  Synthetic
guggauguccagcaggggugag

SEQ ID NO: 575812 - RNA, 23 nt, Artificial Sequence
  Synthetic
gguggauguccagcaggggugag

SEQ ID NO: 575813 - RNA, 24 nt, Artificial Sequence
  Synthetic
ugguggauguccagcaggggugag

SEQ ID NO: 575814 - RNA, 18 nt, Artificial Sequence
  Synthetic
gaaggaacugggggugag

SEQ ID NO: 575815 - RNA, 19 nt, Artificial Sequence
  Synthetic
agaaggaacugggggugag

SEQ ID NO: 575816 - RNA, 20 nt, Artificial Sequence
  Synthetic
aagaaggaacugggggugag

SEQ ID NO: 575817 - RNA, 21 nt, Artificial Sequence
  Synthetic
gaagaaggaacugggggugag

SEQ ID NO: 575818 - RNA, 22 nt, Artificial Sequence
  Synthetic
ggaagaaggaacugggggugag

SEQ ID NO: 575819 - RNA, 23 nt, Artificial Sequence
  Synthetic
gggaagaaggaacugggggugag

SEQ ID NO: 575820 - RNA, 24 nt, Artificial Sequence
  Synthetic
ggggaagaaggaacugggggugag

SEQ ID NO: 575821 - RNA, 18 nt, Artificial Sequence
  Synthetic
aaagaugagcugggugag

SEQ ID NO: 575822 - RNA, 19 nt, Artificial Sequence
  Synthetic
gaaagaugagcugggugag

SEQ ID NO: 575823 - RNA, 20 nt, Artificial Sequence
  Synthetic
ggaaagaugagcugggugag

SEQ ID NO: 575824 - RNA, 21 nt, Artificial Sequence
  Synthetic
cggaaagaugagcugggugag

SEQ ID NO: 575825 - RNA, 22 nt, Artificial Sequence
  Synthetic
acggaaagaugagcugggugag

SEQ ID NO: 575826 - RNA, 23 nt, Artificial Sequence
  Synthetic
uacggaaagaugagcugggugag

SEQ ID NO: 575827 - RNA, 24 nt, Artificial Sequence
  Synthetic
auacggaaagaugagcugggugag

SEQ ID NO: 575828 - RNA, 18 nt, Artificial Sequence
  Synthetic
gauaugggauugggugag

SEQ ID NO: 575829 - RNA, 19 nt, Artificial Sequence
  Synthetic
agauaugggauugggugag

SEQ ID NO: 575830 - RNA, 20 nt, Artificial Sequence
  Synthetic
uagauaugggauugggugag

SEQ ID NO: 575831 - RNA, 21 nt, Artificial Sequence
  Synthetic
cuagauaugggauugggugag

SEQ ID NO: 575832 - RNA, 22 nt, Artificial Sequence
  Synthetic
ucuagauaugggauugggugag

SEQ ID NO: 575833 - RNA, 23 nt, Artificial Sequence
  Synthetic
aucuagauaugggauugggugag

SEQ ID NO: 575834 - RNA, 24 nt, Artificial Sequence
  Synthetic
aaucuagauaugggauugggugag

SEQ ID NO: 575835 - RNA, 18 nt, Artificial Sequence
  Synthetic
uaguuuaucccuggugag

SEQ ID NO: 575836 - RNA, 19 nt, Artificial Sequence
  Synthetic
cuaguuuaucccuggugag

SEQ ID NO: 575837 - RNA, 20 nt, Artificial Sequence
  Synthetic
acuaguuuaucccuggugag

SEQ ID NO: 575838 - RNA, 21 nt, Artificial Sequence
  Synthetic
cacuaguuuaucccuggugag

SEQ ID NO: 575839 - RNA, 22 nt, Artificial Sequence
  Synthetic
ccacuaguuuaucccuggugag

SEQ ID NO: 575840 - RNA, 23 nt, Artificial Sequence
  Synthetic
gccacuaguuuaucccuggugag

SEQ ID NO: 575841 - RNA, 24 nt, Artificial Sequence
  Synthetic
ugccacuaguuuaucccuggugag

SEQ ID NO: 575842 - RNA, 18 nt, Artificial Sequence
  Synthetic
ucagaggugaguggugag

SEQ ID NO: 575843 - RNA, 19 nt, Artificial Sequence
  Synthetic
aucagaggugaguggugag

SEQ ID NO: 575844 - RNA, 20 nt, Artificial Sequence
  Synthetic
uaucagaggugaguggugag

SEQ ID NO: 575845 - RNA, 21 nt, Artificial Sequence
  Synthetic
uuaucagaggugaguggugag

SEQ ID NO: 575846 - RNA, 22 nt, Artificial Sequence
  Synthetic
guuaucagaggugaguggugag

SEQ ID NO: 575847 - RNA, 23 nt, Artificial Sequence
  Synthetic
gguuaucagaggugaguggugag

SEQ ID NO: 575848 - RNA, 24 nt, Artificial Sequence
  Synthetic
ggguuaucagaggugaguggugag

SEQ ID NO: 575849 - RNA, 18 nt, Artificial Sequence
  Synthetic
gguagagguuguggugag

SEQ ID NO: 575850 - RNA, 19 nt, Artificial Sequence
  Synthetic
ugguagagguuguggugag

SEQ ID NO: 575851 - RNA, 20 nt, Artificial Sequence
  Synthetic
gugguagagguuguggugag

SEQ ID NO: 575852 - RNA, 21 nt, Artificial Sequence
  Synthetic
ggugguagagguuguggugag

SEQ ID NO: 575853 - RNA, 22 nt, Artificial Sequence
  Synthetic
gggugguagagguuguggugag

SEQ ID NO: 575854 - RNA, 23 nt, Artificial Sequence
  Synthetic
ugggugguagagguuguggugag

SEQ ID NO: 575855 - RNA, 24 nt, Artificial Sequence
  Synthetic
cugggugguagagguuguggugag

SEQ ID NO: 575856 - RNA, 18 nt, Artificial Sequence
  Synthetic
uagccagcagaaugugag

SEQ ID NO: 575857 - RNA, 19 nt, Artificial Sequence
  Synthetic
auagccagcagaaugugag

SEQ ID NO: 575858 - RNA, 20 nt, Artificial Sequence
  Synthetic
uauagccagcagaaugugag

SEQ ID NO: 575859 - RNA, 21 nt, Artificial Sequence
  Synthetic
uuauagccagcagaaugugag

SEQ ID NO: 575860 - RNA, 22 nt, Artificial Sequence
  Synthetic
uuuauagccagcagaaugugag

SEQ ID NO: 575861 - RNA, 23 nt, Artificial Sequence
  Synthetic
auuuauagccagcagaaugugag

SEQ ID NO: 575862 - RNA, 24 nt, Artificial Sequence
  Synthetic
aauuuauagccagcagaaugugag

SEQ ID NO: 575863 - RNA, 18 nt, Artificial Sequence
  Synthetic
aaauaaauaucaugugag

SEQ ID NO: 575864 - RNA, 19 nt, Artificial Sequence
  Synthetic
caaauaaauaucaugugag

SEQ ID NO: 575865 - RNA, 20 nt, Artificial Sequence
  Synthetic
acaaauaaauaucaugugag

SEQ ID NO: 575866 - RNA, 21 nt, Artificial Sequence
  Synthetic
cacaaauaaauaucaugugag

SEQ ID NO: 575867 - RNA, 22 nt, Artificial Sequence
  Synthetic
ccacaaauaaauaucaugugag

SEQ ID NO: 575868 - RNA, 23 nt, Artificial Sequence
  Synthetic
gccacaaauaaauaucaugugag

SEQ ID NO: 575869 - RNA, 24 nt, Artificial Sequence
  Synthetic
agccacaaauaaauaucaugugag

SEQ ID NO: 575870 - RNA, 18 nt, Artificial Sequence
  Synthetic
aaauaggguauaugugag

SEQ ID NO: 575871 - RNA, 19 nt, Artificial Sequence
  Synthetic
aaaauaggguauaugugag

SEQ ID NO: 575872 - RNA, 20 nt, Artificial Sequence
  Synthetic
gaaaauaggguauaugugag

SEQ ID NO: 575873 - RNA, 21 nt, Artificial Sequence
  Synthetic
agaaaauaggguauaugugag

SEQ ID NO: 575874 - RNA, 22 nt, Artificial Sequence
  Synthetic
cagaaaauaggguauaugugag

SEQ ID NO: 575875 - RNA, 23 nt, Artificial Sequence
  Synthetic
ucagaaaauaggguauaugugag

SEQ ID NO: 575876 - RNA, 24 nt, Artificial Sequence
  Synthetic
uucagaaaauaggguauaugugag

SEQ ID NO: 575877 - RNA, 18 nt, Artificial Sequence
  Synthetic
uugauauagcuaugugag

SEQ ID NO: 575878 - RNA, 19 nt, Artificial Sequence
  Synthetic
auugauauagcuaugugag

SEQ ID NO: 575879 - RNA, 20 nt, Artificial Sequence
  Synthetic
gauugauauagcuaugugag

SEQ ID NO: 575880 - RNA, 21 nt, Artificial Sequence
  Synthetic
cgauugauauagcuaugugag

SEQ ID NO: 575881 - RNA, 22 nt, Artificial Sequence
  Synthetic
gcgauugauauagcuaugugag

SEQ ID NO: 575882 - RNA, 23 nt, Artificial Sequence
  Synthetic
ggcgauugauauagcuaugugag

SEQ ID NO: 575883 - RNA, 24 nt, Artificial Sequence
  Synthetic
gggcgauugauauagcuaugugag

SEQ ID NO: 575884 - RNA, 18 nt, Artificial Sequence
  Synthetic
cuuuguuuacacugugag

SEQ ID NO: 575885 - RNA, 19 nt, Artificial Sequence
  Synthetic
gcuuuguuuacacugugag

SEQ ID NO: 575886 - RNA, 20 nt, Artificial Sequence
  Synthetic
ggcuuuguuuacacugugag

SEQ ID NO: 575887 - RNA, 21 nt, Artificial Sequence
  Synthetic
cggcuuuguuuacacugugag

SEQ ID NO: 575888 - RNA, 22 nt, Artificial Sequence
  Synthetic
acggcuuuguuuacacugugag

SEQ ID NO: 575889 - RNA, 23 nt, Artificial Sequence
  Synthetic
gacggcuuuguuuacacugugag

SEQ ID NO: 575890 - RNA, 24 nt, Artificial Sequence
  Synthetic
ugacggcuuuguuuacacugugag

SEQ ID NO: 575891 - RNA, 18 nt, Artificial Sequence
  Synthetic
cguaauagagacugugag

SEQ ID NO: 575892 - RNA, 19 nt, Artificial Sequence
  Synthetic
ucguaauagagacugugag

SEQ ID NO: 575893 - RNA, 20 nt, Artificial Sequence
  Synthetic
aucguaauagagacugugag

SEQ ID NO: 575894 - RNA, 21 nt, Artificial Sequence
  Synthetic
aaucguaauagagacugugag

SEQ ID NO: 575895 - RNA, 22 nt, Artificial Sequence
  Synthetic
uaaucguaauagagacugugag

SEQ ID NO: 575896 - RNA, 23 nt, Artificial Sequence
  Synthetic
uuaaucguaauagagacugugag

SEQ ID NO: 575897 - RNA, 24 nt, Artificial Sequence
  Synthetic
auuaaucguaauagagacugugag

SEQ ID NO: 575898 - RNA, 18 nt, Artificial Sequence
  Synthetic
auuuuauuggccugugag

SEQ ID NO: 575899 - RNA, 19 nt, Artificial Sequence
  Synthetic
uauuuuauuggccugugag

SEQ ID NO: 575900 - RNA, 20 nt, Artificial Sequence
  Synthetic
uuauuuuauuggccugugag

SEQ ID NO: 575901 - RNA, 21 nt, Artificial Sequence
  Synthetic
auuauuuuauuggccugugag

SEQ ID NO: 575902 - RNA, 22 nt, Artificial Sequence
  Synthetic
uauuauuuuauuggccugugag

SEQ ID NO: 575903 - RNA, 23 nt, Artificial Sequence
  Synthetic
auauuauuuuauuggccugugag

SEQ ID NO: 575904 - RNA, 24 nt, Artificial Sequence
  Synthetic
uauauuauuuuauuggccugugag

SEQ ID NO: 575905 - RNA, 18 nt, Artificial Sequence
  Synthetic
gccuaguagagcugugag

SEQ ID NO: 575906 - RNA, 19 nt, Artificial Sequence
  Synthetic
ugccuaguagagcugugag

SEQ ID NO: 575907 - RNA, 20 nt, Artificial Sequence
  Synthetic
cugccuaguagagcugugag

SEQ ID NO: 575908 - RNA, 21 nt, Artificial Sequence
  Synthetic
acugccuaguagagcugugag

SEQ ID NO: 575909 - RNA, 22 nt, Artificial Sequence
  Synthetic
cacugccuaguagagcugugag

SEQ ID NO: 575910 - RNA, 23 nt, Artificial Sequence
  Synthetic
gcacugccuaguagagcugugag

SEQ ID NO: 575911 - RNA, 24 nt, Artificial Sequence
  Synthetic
ggcacugccuaguagagcugugag

SEQ ID NO: 575912 - RNA, 18 nt, Artificial Sequence
  Synthetic
gaggaguguggcugugag

SEQ ID NO: 575913 - RNA, 19 nt, Artificial Sequence
  Synthetic
agaggaguguggcugugag

SEQ ID NO: 575914 - RNA, 20 nt, Artificial Sequence
  Synthetic
cagaggaguguggcugugag

SEQ ID NO: 575915 - RNA, 21 nt, Artificial Sequence
  Synthetic
acagaggaguguggcugugag

SEQ ID NO: 575916 - RNA, 22 nt, Artificial Sequence
  Synthetic
cacagaggaguguggcugugag

SEQ ID NO: 575917 - RNA, 23 nt, Artificial Sequence
  Synthetic
ucacagaggaguguggcugugag

SEQ ID NO: 575918 - RNA, 24 nt, Artificial Sequence
  Synthetic
uucacagaggaguguggcugugag

SEQ ID NO: 575919 - RNA, 18 nt, Artificial Sequence
  Synthetic
ggcagagguugcugugag

SEQ ID NO: 575920 - RNA, 19 nt, Artificial Sequence
  Synthetic
aggcagagguugcugugag

SEQ ID NO: 575921 - RNA, 20 nt, Artificial Sequence
  Synthetic
gaggcagagguugcugugag

SEQ ID NO: 575922 - RNA, 21 nt, Artificial Sequence
  Synthetic
ggaggcagagguugcugugag

SEQ ID NO: 575923 - RNA, 22 nt, Artificial Sequence
  Synthetic
aggaggcagagguugcugugag

SEQ ID NO: 575924 - RNA, 23 nt, Artificial Sequence
  Synthetic
caggaggcagagguugcugugag

SEQ ID NO: 575925 - RNA, 24 nt, Artificial Sequence
  Synthetic
ccaggaggcagagguugcugugag

SEQ ID NO: 575926 - RNA, 18 nt, Artificial Sequence
  Synthetic
uuggaggcaaagugugag

SEQ ID NO: 575927 - RNA, 19 nt, Artificial Sequence
  Synthetic
guuggaggcaaagugugag

SEQ ID NO: 575928 - RNA, 20 nt, Artificial Sequence
  Synthetic
aguuggaggcaaagugugag

SEQ ID NO: 575929 - RNA, 21 nt, Artificial Sequence
  Synthetic
aaguuggaggcaaagugugag

SEQ ID NO: 575930 - RNA, 22 nt, Artificial Sequence
  Synthetic
gaaguuggaggcaaagugugag

SEQ ID NO: 575931 - RNA, 23 nt, Artificial Sequence
  Synthetic
ggaaguuggaggcaaagugugag

SEQ ID NO: 575932 - RNA, 24 nt, Artificial Sequence
  Synthetic
aggaaguuggaggcaaagugugag

SEQ ID NO: 575933 - RNA, 18 nt, Artificial Sequence
  Synthetic
agacuuucagagugugag

SEQ ID NO: 575934 - RNA, 19 nt, Artificial Sequence
  Synthetic
gagacuuucagagugugag

SEQ ID NO: 575935 - RNA, 20 nt, Artificial Sequence
  Synthetic
agagacuuucagagugugag

SEQ ID NO: 575936 - RNA, 21 nt, Artificial Sequence
  Synthetic
cagagacuuucagagugugag

SEQ ID NO: 575937 - RNA, 22 nt, Artificial Sequence
  Synthetic
acagagacuuucagagugugag

SEQ ID NO: 575938 - RNA, 23 nt, Artificial Sequence
  Synthetic
aacagagacuuucagagugugag

SEQ ID NO: 575939 - RNA, 24 nt, Artificial Sequence
  Synthetic
aaacagagacuuucagagugugag

SEQ ID NO: 575940 - RNA, 18 nt, Artificial Sequence
  Synthetic
cuggcuugcacgugugag

SEQ ID NO: 575941 - RNA, 19 nt, Artificial Sequence
  Synthetic
ccuggcuugcacgugugag

SEQ ID NO: 575942 - RNA, 20 nt, Artificial Sequence
  Synthetic
accuggcuugcacgugugag

SEQ ID NO: 575943 - RNA, 21 nt, Artificial Sequence
  Synthetic
aaccuggcuugcacgugugag

SEQ ID NO: 575944 - RNA, 22 nt, Artificial Sequence
  Synthetic
aaaccuggcuugcacgugugag

SEQ ID NO: 575945 - RNA, 23 nt, Artificial Sequence
  Synthetic
caaaccuggcuugcacgugugag

SEQ ID NO: 575946 - RNA, 24 nt, Artificial Sequence
  Synthetic
ucaaaccuggcuugcacgugugag

SEQ ID NO: 575947 - RNA, 18 nt, Artificial Sequence
  Synthetic
uuuuguguauggugugag

SEQ ID NO: 575948 - RNA, 19 nt, Artificial Sequence
  Synthetic
uuuuuguguauggugugag

SEQ ID NO: 575949 - RNA, 20 nt, Artificial Sequence
  Synthetic
auuuuuguguauggugugag

SEQ ID NO: 575950 - RNA, 21 nt, Artificial Sequence
  Synthetic
aauuuuuguguauggugugag

SEQ ID NO: 575951 - RNA, 22 nt, Artificial Sequence
  Synthetic
uaauuuuuguguauggugugag

SEQ ID NO: 575952 - RNA, 23 nt, Artificial Sequence
  Synthetic
cuaauuuuuguguauggugugag

SEQ ID NO: 575953 - RNA, 24 nt, Artificial Sequence
  Synthetic
gcuaauuuuuguguauggugugag

SEQ ID NO: 575954 - RNA, 18 nt, Artificial Sequence
  Synthetic
uauuaaacuuggugugag

SEQ ID NO: 575955 - RNA, 19 nt, Artificial Sequence
  Synthetic
uuauuaaacuuggugugag

SEQ ID NO: 575956 - RNA, 20 nt, Artificial Sequence
  Synthetic
uuuauuaaacuuggugugag

SEQ ID NO: 575957 - RNA, 21 nt, Artificial Sequence
  Synthetic
cuuuauuaaacuuggugugag

SEQ ID NO: 575958 - RNA, 22 nt, Artificial Sequence
  Synthetic
ccuuuauuaaacuuggugugag

SEQ ID NO: 575959 - RNA, 23 nt, Artificial Sequence
  Synthetic
cccuuuauuaaacuuggugugag

SEQ ID NO: 575960 - RNA, 24 nt, Artificial Sequence
  Synthetic
acccuuuauuaaacuuggugugag

SEQ ID NO: 575961 - RNA, 18 nt, Artificial Sequence
  Synthetic
uuauauuguacuugugag

SEQ ID NO: 575962 - RNA, 19 nt, Artificial Sequence
  Synthetic
uuuauauuguacuugugag

SEQ ID NO: 575963 - RNA, 20 nt, Artificial Sequence
  Synthetic
cuuuauauuguacuugugag

SEQ ID NO: 575964 - RNA, 21 nt, Artificial Sequence
  Synthetic
acuuuauauuguacuugugag

SEQ ID NO: 575965 - RNA, 22 nt, Artificial Sequence
  Synthetic
aacuuuauauuguacuugugag

SEQ ID NO: 575966 - RNA, 23 nt, Artificial Sequence
  Synthetic
uaacuuuauauuguacuugugag

SEQ ID NO: 575967 - RNA, 24 nt, Artificial Sequence
  Synthetic
auaacuuuauauuguacuugugag

SEQ ID NO: 575968 - RNA, 18 nt, Artificial Sequence
  Synthetic
guuaauuacaaaauugag

SEQ ID NO: 575969 - RNA, 19 nt, Artificial Sequence
  Synthetic
uguuaauuacaaaauugag

SEQ ID NO: 575970 - RNA, 20 nt, Artificial Sequence
  Synthetic
auguuaauuacaaaauugag

SEQ ID NO: 575971 - RNA, 21 nt, Artificial Sequence
  Synthetic
uauguuaauuacaaaauugag

SEQ ID NO: 575972 - RNA, 22 nt, Artificial Sequence
  Synthetic
auauguuaauuacaaaauugag

SEQ ID NO: 575973 - RNA, 23 nt, Artificial Sequence
  Synthetic
aauauguuaauuacaaaauugag

SEQ ID NO: 575974 - RNA, 24 nt, Artificial Sequence
  Synthetic
uaauauguuaauuacaaaauugag

SEQ ID NO: 575975 - RNA, 18 nt, Artificial Sequence
  Synthetic
uacgguguccaaauugag

SEQ ID NO: 575976 - RNA, 19 nt, Artificial Sequence
  Synthetic
auacgguguccaaauugag

SEQ ID NO: 575977 - RNA, 20 nt, Artificial Sequence
  Synthetic
aauacgguguccaaauugag

SEQ ID NO: 575978 - RNA, 21 nt, Artificial Sequence
  Synthetic
aaauacgguguccaaauugag

SEQ ID NO: 575979 - RNA, 22 nt, Artificial Sequence
  Synthetic
aaaauacgguguccaaauugag

SEQ ID NO: 575980 - RNA, 23 nt, Artificial Sequence
  Synthetic
gaaaauacgguguccaaauugag

SEQ ID NO: 575981 - RNA, 24 nt, Artificial Sequence
  Synthetic
ugaaaauacgguguccaaauugag

SEQ ID NO: 575982 - RNA, 18 nt, Artificial Sequence
  Synthetic
guuaacaaugaaauugag

SEQ ID NO: 575983 - RNA, 19 nt, Artificial Sequence
  Synthetic
gguuaacaaugaaauugag

SEQ ID NO: 575984 - RNA, 20 nt, Artificial Sequence
  Synthetic
ggguuaacaaugaaauugag

SEQ ID NO: 575985 - RNA, 21 nt, Artificial Sequence
  Synthetic
gggguuaacaaugaaauugag

SEQ ID NO: 575986 - RNA, 22 nt, Artificial Sequence
  Synthetic
ugggguuaacaaugaaauugag

SEQ ID NO: 575987 - RNA, 23 nt, Artificial Sequence
  Synthetic
uugggguuaacaaugaaauugag

SEQ ID NO: 575988 - RNA, 24 nt, Artificial Sequence
  Synthetic
uuugggguuaacaaugaaauugag

SEQ ID NO: 575989 - RNA, 18 nt, Artificial Sequence
  Synthetic
auuuguugauaaauugag

SEQ ID NO: 575990 - RNA, 19 nt, Artificial Sequence
  Synthetic
uauuuguugauaaauugag

SEQ ID NO: 575991 - RNA, 20 nt, Artificial Sequence
  Synthetic
auauuuguugauaaauugag

SEQ ID NO: 575992 - RNA, 21 nt, Artificial Sequence
  Synthetic
aauauuuguugauaaauugag

SEQ ID NO: 575993 - RNA, 22 nt, Artificial Sequence
  Synthetic
aaauauuuguugauaaauugag

SEQ ID NO: 575994 - RNA, 23 nt, Artificial Sequence
  Synthetic
gaaauauuuguugauaaauugag

SEQ ID NO: 575995 - RNA, 24 nt, Artificial Sequence
  Synthetic
agaaauauuuguugauaaauugag

SEQ ID NO: 575996 - RNA, 18 nt, Artificial Sequence
  Synthetic
augaucuauuaaauugag

SEQ ID NO: 575997 - RNA, 19 nt, Artificial Sequence
  Synthetic
aaugaucuauuaaauugag

SEQ ID NO: 575998 - RNA, 20 nt, Artificial Sequence
  Synthetic
gaaugaucuauuaaauugag

SEQ ID NO: 575999 - RNA, 21 nt, Artificial Sequence
  Synthetic
ugaaugaucuauuaaauugag

SEQ ID NO: 576000 - RNA, 22 nt, Artificial Sequence
  Synthetic
uugaaugaucuauuaaauugag

SEQ ID NO: 576001 - RNA, 23 nt, Artificial Sequence
  Synthetic
cuugaaugaucuauuaaauugag

SEQ ID NO: 576002 - RNA, 24 nt, Artificial Sequence
  Synthetic
ccuugaaugaucuauuaaauugag

SEQ ID NO: 576003 - RNA, 18 nt, Artificial Sequence
  Synthetic
aagaagcucacaauugag

SEQ ID NO: 576004 - RNA, 19 nt, Artificial Sequence
  Synthetic
caagaagcucacaauugag

SEQ ID NO: 576005 - RNA, 20 nt, Artificial Sequence
  Synthetic
ucaagaagcucacaauugag

SEQ ID NO: 576006 - RNA, 21 nt, Artificial Sequence
  Synthetic
cucaagaagcucacaauugag

SEQ ID NO: 576007 - RNA, 22 nt, Artificial Sequence
  Synthetic
ccucaagaagcucacaauugag

SEQ ID NO: 576008 - RNA, 23 nt, Artificial Sequence
  Synthetic
uccucaagaagcucacaauugag

SEQ ID NO: 576009 - RNA, 24 nt, Artificial Sequence
  Synthetic
guccucaagaagcucacaauugag

SEQ ID NO: 576010 - RNA, 18 nt, Artificial Sequence
  Synthetic
gagccugggacaauugag

SEQ ID NO: 576011 - RNA, 19 nt, Artificial Sequence
  Synthetic
ugagccugggacaauugag

SEQ ID NO: 576012 - RNA, 20 nt, Artificial Sequence
  Synthetic
gugagccugggacaauugag

SEQ ID NO: 576013 - RNA, 21 nt, Artificial Sequence
  Synthetic
ggugagccugggacaauugag

SEQ ID NO: 576014 - RNA, 22 nt, Artificial Sequence
  Synthetic
aggugagccugggacaauugag

SEQ ID NO: 576015 - RNA, 23 nt, Artificial Sequence
  Synthetic
aaggugagccugggacaauugag

SEQ ID NO: 576016 - RNA, 24 nt, Artificial Sequence
  Synthetic
caaggugagccugggacaauugag

SEQ ID NO: 576017 - RNA, 18 nt, Artificial Sequence
  Synthetic
aaaaaguauccaauugag

SEQ ID NO: 576018 - RNA, 19 nt, Artificial Sequence
  Synthetic
aaaaaaguauccaauugag

SEQ ID NO: 576019 - RNA, 20 nt, Artificial Sequence
  Synthetic
aaaaaaaguauccaauugag

SEQ ID NO: 576020 - RNA, 21 nt, Artificial Sequence
  Synthetic
aaaaaaaaguauccaauugag

SEQ ID NO: 576021 - RNA, 22 nt, Artificial Sequence
  Synthetic
aaaaaaaaaguauccaauugag

SEQ ID NO: 576022 - RNA, 23 nt, Artificial Sequence
  Synthetic
aaaaaaaaaaguauccaauugag

SEQ ID NO: 576023 - RNA, 24 nt, Artificial Sequence
  Synthetic
aaaaaaaaaaaguauccaauugag

SEQ ID NO: 576024 - RNA, 18 nt, Artificial Sequence
  Synthetic
ugggagcaaagaauugag

SEQ ID NO: 576025 - RNA, 19 nt, Artificial Sequence
  Synthetic
uugggagcaaagaauugag

SEQ ID NO: 576026 - RNA, 20 nt, Artificial Sequence
  Synthetic
auugggagcaaagaauugag

SEQ ID NO: 576027 - RNA, 21 nt, Artificial Sequence
  Synthetic
aauugggagcaaagaauugag

SEQ ID NO: 576028 - RNA, 22 nt, Artificial Sequence
  Synthetic
gaauugggagcaaagaauugag

SEQ ID NO: 576029 - RNA, 23 nt, Artificial Sequence
  Synthetic
ugaauugggagcaaagaauugag

SEQ ID NO: 576030 - RNA, 24 nt, Artificial Sequence
  Synthetic
uugaauugggagcaaagaauugag

SEQ ID NO: 576031 - RNA, 18 nt, Artificial Sequence
  Synthetic
augccuauaggaauugag

SEQ ID NO: 576032 - RNA, 19 nt, Artificial Sequence
  Synthetic
aaugccuauaggaauugag

SEQ ID NO: 576033 - RNA, 20 nt, Artificial Sequence
  Synthetic
aaaugccuauaggaauugag

SEQ ID NO: 576034 - RNA, 21 nt, Artificial Sequence
  Synthetic
gaaaugccuauaggaauugag

SEQ ID NO: 576035 - RNA, 22 nt, Artificial Sequence
  Synthetic
agaaaugccuauaggaauugag

SEQ ID NO: 576036 - RNA, 23 nt, Artificial Sequence
  Synthetic
gagaaaugccuauaggaauugag

SEQ ID NO: 576037 - RNA, 24 nt, Artificial Sequence
  Synthetic
agagaaaugccuauaggaauugag

SEQ ID NO: 576038 - RNA, 18 nt, Artificial Sequence
  Synthetic
aagaccauuugaauugag

SEQ ID NO: 576039 - RNA, 19 nt, Artificial Sequence
  Synthetic
aaagaccauuugaauugag

SEQ ID NO: 576040 - RNA, 20 nt, Artificial Sequence
  Synthetic
aaaagaccauuugaauugag

SEQ ID NO: 576041 - RNA, 21 nt, Artificial Sequence
  Synthetic
caaaagaccauuugaauugag

SEQ ID NO: 576042 - RNA, 22 nt, Artificial Sequence
  Synthetic
ccaaaagaccauuugaauugag

SEQ ID NO: 576043 - RNA, 23 nt, Artificial Sequence
  Synthetic
accaaaagaccauuugaauugag

SEQ ID NO: 576044 - RNA, 24 nt, Artificial Sequence
  Synthetic
aaccaaaagaccauuugaauugag

SEQ ID NO: 576045 - RNA, 18 nt, Artificial Sequence
  Synthetic
ccguuuuugcccauugag

SEQ ID NO: 576046 - RNA, 19 nt, Artificial Sequence
  Synthetic
cccguuuuugcccauugag

SEQ ID NO: 576047 - RNA, 20 nt, Artificial Sequence
  Synthetic
ucccguuuuugcccauugag

SEQ ID NO: 576048 - RNA, 21 nt, Artificial Sequence
  Synthetic
gucccguuuuugcccauugag

SEQ ID NO: 576049 - RNA, 22 nt, Artificial Sequence
  Synthetic
agucccguuuuugcccauugag

SEQ ID NO: 576050 - RNA, 23 nt, Artificial Sequence
  Synthetic
cagucccguuuuugcccauugag

SEQ ID NO: 576051 - RNA, 24 nt, Artificial Sequence
  Synthetic
ccagucccguuuuugcccauugag

SEQ ID NO: 576052 - RNA, 18 nt, Artificial Sequence
  Synthetic
ugcacacauuccauugag

SEQ ID NO: 576053 - RNA, 19 nt, Artificial Sequence
  Synthetic
gugcacacauuccauugag

SEQ ID NO: 576054 - RNA, 20 nt, Artificial Sequence
  Synthetic
ggugcacacauuccauugag

SEQ ID NO: 576055 - RNA, 21 nt, Artificial Sequence
  Synthetic
aggugcacacauuccauugag

SEQ ID NO: 576056 - RNA, 22 nt, Artificial Sequence
  Synthetic
aaggugcacacauuccauugag

SEQ ID NO: 576057 - RNA, 23 nt, Artificial Sequence
  Synthetic
aaaggugcacacauuccauugag

SEQ ID NO: 576058 - RNA, 24 nt, Artificial Sequence
  Synthetic
gaaaggugcacacauuccauugag

SEQ ID NO: 576059 - RNA, 18 nt, Artificial Sequence
  Synthetic
acacaagaagucauugag

SEQ ID NO: 576060 - RNA, 19 nt, Artificial Sequence
  Synthetic
aacacaagaagucauugag

SEQ ID NO: 576061 - RNA, 20 nt, Artificial Sequence
  Synthetic
caacacaagaagucauugag

SEQ ID NO: 576062 - RNA, 21 nt, Artificial Sequence
  Synthetic
ucaacacaagaagucauugag

SEQ ID NO: 576063 - RNA, 22 nt, Artificial Sequence
  Synthetic
gucaacacaagaagucauugag

SEQ ID NO: 576064 - RNA, 23 nt, Artificial Sequence
  Synthetic
ugucaacacaagaagucauugag

SEQ ID NO: 576065 - RNA, 24 nt, Artificial Sequence
  Synthetic
augucaacacaagaagucauugag

SEQ ID NO: 576066 - RNA, 18 nt, Artificial Sequence
  Synthetic
uauaauggggggauugag

SEQ ID NO: 576067 - RNA, 19 nt, Artificial Sequence
  Synthetic
uuauaauggggggauugag

SEQ ID NO: 576068 - RNA, 20 nt, Artificial Sequence
  Synthetic
uuuauaauggggggauugag

SEQ ID NO: 576069 - RNA, 21 nt, Artificial Sequence
  Synthetic
uuuuauaauggggggauugag

SEQ ID NO: 576070 - RNA, 22 nt, Artificial Sequence
  Synthetic
uuuuuauaauggggggauugag

SEQ ID NO: 576071 - RNA, 23 nt, Artificial Sequence
  Synthetic
auuuuuauaauggggggauugag

SEQ ID NO: 576072 - RNA, 24 nt, Artificial Sequence
  Synthetic
aauuuuuauaauggggggauugag

SEQ ID NO: 576073 - RNA, 18 nt, Artificial Sequence
  Synthetic
auggucgcuuggauugag

SEQ ID NO: 576074 - RNA, 19 nt, Artificial Sequence
  Synthetic
gauggucgcuuggauugag

SEQ ID NO: 576075 - RNA, 20 nt, Artificial Sequence
  Synthetic
agauggucgcuuggauugag

SEQ ID NO: 576076 - RNA, 21 nt, Artificial Sequence
  Synthetic
aagauggucgcuuggauugag

SEQ ID NO: 576077 - RNA, 22 nt, Artificial Sequence
  Synthetic
aaagauggucgcuuggauugag

SEQ ID NO: 576078 - RNA, 23 nt, Artificial Sequence
  Synthetic
gaaagauggucgcuuggauugag

SEQ ID NO: 576079 - RNA, 24 nt, Artificial Sequence
  Synthetic
ggaaagauggucgcuuggauugag

SEQ ID NO: 576080 - RNA, 18 nt, Artificial Sequence
  Synthetic
gugaucgggaugauugag

SEQ ID NO: 576081 - RNA, 19 nt, Artificial Sequence
  Synthetic
ugugaucgggaugauugag

SEQ ID NO: 576082 - RNA, 20 nt, Artificial Sequence
  Synthetic
cugugaucgggaugauugag

SEQ ID NO: 576083 - RNA, 21 nt, Artificial Sequence
  Synthetic
gcugugaucgggaugauugag

SEQ ID NO: 576084 - RNA, 22 nt, Artificial Sequence
  Synthetic
ggcugugaucgggaugauugag

SEQ ID NO: 576085 - RNA, 23 nt, Artificial Sequence
  Synthetic
gggcugugaucgggaugauugag

SEQ ID NO: 576086 - RNA, 24 nt, Artificial Sequence
  Synthetic
ggggcugugaucgggaugauugag

SEQ ID NO: 576087 - RNA, 18 nt, Artificial Sequence
  Synthetic
agggauggaaauauugag

SEQ ID NO: 576088 - RNA, 19 nt, Artificial Sequence
  Synthetic
aagggauggaaauauugag

SEQ ID NO: 576089 - RNA, 20 nt, Artificial Sequence
  Synthetic
aaagggauggaaauauugag

SEQ ID NO: 576090 - RNA, 21 nt, Artificial Sequence
  Synthetic
aaaagggauggaaauauugag

SEQ ID NO: 576091 - RNA, 22 nt, Artificial Sequence
  Synthetic
gaaaagggauggaaauauugag

SEQ ID NO: 576092 - RNA, 23 nt, Artificial Sequence
  Synthetic
ggaaaagggauggaaauauugag

SEQ ID NO: 576093 - RNA, 24 nt, Artificial Sequence
  Synthetic
uggaaaagggauggaaauauugag

SEQ ID NO: 576094 - RNA, 18 nt, Artificial Sequence
  Synthetic
uucacuuaagcuauugag

SEQ ID NO: 576095 - RNA, 19 nt, Artificial Sequence
  Synthetic
auucacuuaagcuauugag

SEQ ID NO: 576096 - RNA, 20 nt, Artificial Sequence
  Synthetic
gauucacuuaagcuauugag

SEQ ID NO: 576097 - RNA, 21 nt, Artificial Sequence
  Synthetic
agauucacuuaagcuauugag

SEQ ID NO: 576098 - RNA, 22 nt, Artificial Sequence
  Synthetic
aagauucacuuaagcuauugag

SEQ ID NO: 576099 - RNA, 23 nt, Artificial Sequence
  Synthetic
uaagauucacuuaagcuauugag

SEQ ID NO: 576100 - RNA, 24 nt, Artificial Sequence
  Synthetic
uuaagauucacuuaagcuauugag

SEQ ID NO: 576101 - RNA, 18 nt, Artificial Sequence
  Synthetic
auuaugauuauuauugag

SEQ ID NO: 576102 - RNA, 19 nt, Artificial Sequence
  Synthetic
gauuaugauuauuauugag

SEQ ID NO: 576103 - RNA, 20 nt, Artificial Sequence
  Synthetic
ugauuaugauuauuauugag

SEQ ID NO: 576104 - RNA, 21 nt, Artificial Sequence
  Synthetic
augauuaugauuauuauugag

SEQ ID NO: 576105 - RNA, 22 nt, Artificial Sequence
  Synthetic
uaugauuaugauuauuauugag

SEQ ID NO: 576106 - RNA, 23 nt, Artificial Sequence
  Synthetic
uuaugauuaugauuauuauugag

SEQ ID NO: 576107 - RNA, 24 nt, Artificial Sequence
  Synthetic
auuaugauuaugauuauuauugag

SEQ ID NO: 576108 - RNA, 18 nt, Artificial Sequence
  Synthetic
auuuauuuauuuauugag

SEQ ID NO: 576109 - RNA, 19 nt, Artificial Sequence
  Synthetic
uauuuauuuauuuauugag

SEQ ID NO: 576110 - RNA, 20 nt, Artificial Sequence
  Synthetic
uuauuuauuuauuuauugag

SEQ ID NO: 576111 - RNA, 21 nt, Artificial Sequence
  Synthetic
uuuauuuauuuauuuauugag

SEQ ID NO: 576112 - RNA, 22 nt, Artificial Sequence
  Synthetic
auuuauuuauuuauuuauugag

SEQ ID NO: 576113 - RNA, 23 nt, Artificial Sequence
  Synthetic
uauuuauuuauuuauuuauugag

SEQ ID NO: 576114 - RNA, 24 nt, Artificial Sequence
  Synthetic
uuauuuauuuauuuauuuauugag

SEQ ID NO: 576115 - RNA, 18 nt, Artificial Sequence
  Synthetic
ccagcaccguuuauugag

SEQ ID NO: 576116 - RNA, 19 nt, Artificial Sequence
  Synthetic
cccagcaccguuuauugag

SEQ ID NO: 576117 - RNA, 20 nt, Artificial Sequence
  Synthetic
ucccagcaccguuuauugag

SEQ ID NO: 576118 - RNA, 21 nt, Artificial Sequence
  Synthetic
aucccagcaccguuuauugag

SEQ ID NO: 576119 - RNA, 22 nt, Artificial Sequence
  Synthetic
uaucccagcaccguuuauugag

SEQ ID NO: 576120 - RNA, 23 nt, Artificial Sequence
  Synthetic
cuaucccagcaccguuuauugag

SEQ ID NO: 576121 - RNA, 24 nt, Artificial Sequence
  Synthetic
gcuaucccagcaccguuuauugag

SEQ ID NO: 576122 - RNA, 18 nt, Artificial Sequence
  Synthetic
gagaaagaaauacuugag

SEQ ID NO: 576123 - RNA, 19 nt, Artificial Sequence
  Synthetic
ugagaaagaaauacuugag

SEQ ID NO: 576124 - RNA, 20 nt, Artificial Sequence
  Synthetic
uugagaaagaaauacuugag

SEQ ID NO: 576125 - RNA, 21 nt, Artificial Sequence
  Synthetic
auugagaaagaaauacuugag

SEQ ID NO: 576126 - RNA, 22 nt, Artificial Sequence
  Synthetic
aauugagaaagaaauacuugag

SEQ ID NO: 576127 - RNA, 23 nt, Artificial Sequence
  Synthetic
uaauugagaaagaaauacuugag

SEQ ID NO: 576128 - RNA, 24 nt, Artificial Sequence
  Synthetic
auaauugagaaagaaauacuugag

SEQ ID NO: 576129 - RNA, 18 nt, Artificial Sequence
  Synthetic
aauguguguucccuugag

SEQ ID NO: 576130 - RNA, 19 nt, Artificial Sequence
  Synthetic
caauguguguucccuugag

SEQ ID NO: 576131 - RNA, 20 nt, Artificial Sequence
  Synthetic
ccaauguguguucccuugag

SEQ ID NO: 576132 - RNA, 21 nt, Artificial Sequence
  Synthetic
gccaauguguguucccuugag

SEQ ID NO: 576133 - RNA, 22 nt, Artificial Sequence
  Synthetic
agccaauguguguucccuugag

SEQ ID NO: 576134 - RNA, 23 nt, Artificial Sequence
  Synthetic
gagccaauguguguucccuugag

SEQ ID NO: 576135 - RNA, 24 nt, Artificial Sequence
  Synthetic
ugagccaauguguguucccuugag

SEQ ID NO: 576136 - RNA, 18 nt, Artificial Sequence
  Synthetic
agaaauugaggccuugag

SEQ ID NO: 576137 - RNA, 19 nt, Artificial Sequence
  Synthetic
aagaaauugaggccuugag

SEQ ID NO: 576138 - RNA, 20 nt, Artificial Sequence
  Synthetic
caagaaauugaggccuugag

SEQ ID NO: 576139 - RNA, 21 nt, Artificial Sequence
  Synthetic
ucaagaaauugaggccuugag

SEQ ID NO: 576140 - RNA, 22 nt, Artificial Sequence
  Synthetic
cucaagaaauugaggccuugag

SEQ ID NO: 576141 - RNA, 23 nt, Artificial Sequence
  Synthetic
acucaagaaauugaggccuugag

SEQ ID NO: 576142 - RNA, 24 nt, Artificial Sequence
  Synthetic
aacucaagaaauugaggccuugag

SEQ ID NO: 576143 - RNA, 18 nt, Artificial Sequence
  Synthetic
aaaggagcccagcuugag

SEQ ID NO: 576144 - RNA, 19 nt, Artificial Sequence
  Synthetic
gaaaggagcccagcuugag

SEQ ID NO: 576145 - RNA, 20 nt, Artificial Sequence
  Synthetic
ugaaaggagcccagcuugag

SEQ ID NO: 576146 - RNA, 21 nt, Artificial Sequence
  Synthetic
augaaaggagcccagcuugag

SEQ ID NO: 576147 - RNA, 22 nt, Artificial Sequence
  Synthetic
caugaaaggagcccagcuugag

SEQ ID NO: 576148 - RNA, 23 nt, Artificial Sequence
  Synthetic
gcaugaaaggagcccagcuugag

SEQ ID NO: 576149 - RNA, 24 nt, Artificial Sequence
  Synthetic
ggcaugaaaggagcccagcuugag

SEQ ID NO: 576150 - RNA, 18 nt, Artificial Sequence
  Synthetic
aaaagauaauugcuugag

SEQ ID NO: 576151 - RNA, 19 nt, Artificial Sequence
  Synthetic
gaaaagauaauugcuugag

SEQ ID NO: 576152 - RNA, 20 nt, Artificial Sequence
  Synthetic
agaaaagauaauugcuugag

SEQ ID NO: 576153 - RNA, 21 nt, Artificial Sequence
  Synthetic
cagaaaagauaauugcuugag

SEQ ID NO: 576154 - RNA, 22 nt, Artificial Sequence
  Synthetic
acagaaaagauaauugcuugag

SEQ ID NO: 576155 - RNA, 23 nt, Artificial Sequence
  Synthetic
aacagaaaagauaauugcuugag

SEQ ID NO: 576156 - RNA, 24 nt, Artificial Sequence
  Synthetic
uaacagaaaagauaauugcuugag

SEQ ID NO: 576157 - RNA, 18 nt, Artificial Sequence
  Synthetic
aagauaggcagucuugag

SEQ ID NO: 576158 - RNA, 19 nt, Artificial Sequence
  Synthetic
gaagauaggcagucuugag

SEQ ID NO: 576159 - RNA, 20 nt, Artificial Sequence
  Synthetic
ggaagauaggcagucuugag

SEQ ID NO: 576160 - RNA, 21 nt, Artificial Sequence
  Synthetic
gggaagauaggcagucuugag

SEQ ID NO: 576161 - RNA, 22 nt, Artificial Sequence
  Synthetic
ugggaagauaggcagucuugag

SEQ ID NO: 576162 - RNA, 23 nt, Artificial Sequence
  Synthetic
augggaagauaggcagucuugag

SEQ ID NO: 576163 - RNA, 24 nt, Artificial Sequence
  Synthetic
caugggaagauaggcagucuugag

SEQ ID NO: 576164 - RNA, 18 nt, Artificial Sequence
  Synthetic
aggaaagugauucuugag

SEQ ID NO: 576165 - RNA, 19 nt, Artificial Sequence
  Synthetic
aaggaaagugauucuugag

SEQ ID NO: 576166 - RNA, 20 nt, Artificial Sequence
  Synthetic
gaaggaaagugauucuugag

SEQ ID NO: 576167 - RNA, 21 nt, Artificial Sequence
  Synthetic
agaaggaaagugauucuugag

SEQ ID NO: 576168 - RNA, 22 nt, Artificial Sequence
  Synthetic
cagaaggaaagugauucuugag

SEQ ID NO: 576169 - RNA, 23 nt, Artificial Sequence
  Synthetic
acagaaggaaagugauucuugag

SEQ ID NO: 576170 - RNA, 24 nt, Artificial Sequence
  Synthetic
cacagaaggaaagugauucuugag

SEQ ID NO: 576171 - RNA, 18 nt, Artificial Sequence
  Synthetic
uugguaugaguucuugag

SEQ ID NO: 576172 - RNA, 19 nt, Artificial Sequence
  Synthetic
auugguaugaguucuugag

SEQ ID NO: 576173 - RNA, 20 nt, Artificial Sequence
  Synthetic
aauugguaugaguucuugag

SEQ ID NO: 576174 - RNA, 21 nt, Artificial Sequence
  Synthetic
aaauugguaugaguucuugag

SEQ ID NO: 576175 - RNA, 22 nt, Artificial Sequence
  Synthetic
uaaauugguaugaguucuugag

SEQ ID NO: 576176 - RNA, 23 nt, Artificial Sequence
  Synthetic
uuaaauugguaugaguucuugag

SEQ ID NO: 576177 - RNA, 24 nt, Artificial Sequence
  Synthetic
uuuaaauugguaugaguucuugag

SEQ ID NO: 576178 - RNA, 18 nt, Artificial Sequence
  Synthetic
cuacuuuuuuuucuugag

SEQ ID NO: 576179 - RNA, 19 nt, Artificial Sequence
  Synthetic
acuacuuuuuuuucuugag

SEQ ID NO: 576180 - RNA, 20 nt, Artificial Sequence
  Synthetic
gacuacuuuuuuuucuugag

SEQ ID NO: 576181 - RNA, 21 nt, Artificial Sequence
  Synthetic
ggacuacuuuuuuuucuugag

SEQ ID NO: 576182 - RNA, 22 nt, Artificial Sequence
  Synthetic
aggacuacuuuuuuuucuugag

SEQ ID NO: 576183 - RNA, 23 nt, Artificial Sequence
  Synthetic
aaggacuacuuuuuuuucuugag

SEQ ID NO: 576184 - RNA, 24 nt, Artificial Sequence
  Synthetic
uaaggacuacuuuuuuuucuugag

SEQ ID NO: 576185 - RNA, 18 nt, Artificial Sequence
  Synthetic
uugaaguaaaaaguugag

SEQ ID NO: 576186 - RNA, 19 nt, Artificial Sequence
  Synthetic
cuugaaguaaaaaguugag

SEQ ID NO: 576187 - RNA, 20 nt, Artificial Sequence
  Synthetic
acuugaaguaaaaaguugag

SEQ ID NO: 576188 - RNA, 21 nt, Artificial Sequence
  Synthetic
gacuugaaguaaaaaguugag

SEQ ID NO: 576189 - RNA, 22 nt, Artificial Sequence
  Synthetic
ugacuugaaguaaaaaguugag

SEQ ID NO: 576190 - RNA, 23 nt, Artificial Sequence
  Synthetic
uugacuugaaguaaaaaguugag

SEQ ID NO: 576191 - RNA, 24 nt, Artificial Sequence
  Synthetic
guugacuugaaguaaaaaguugag

SEQ ID NO: 576192 - RNA, 18 nt, Artificial Sequence
  Synthetic
uguggcagccaaguugag

SEQ ID NO: 576193 - RNA, 19 nt, Artificial Sequence
  Synthetic
uuguggcagccaaguugag

SEQ ID NO: 576194 - RNA, 20 nt, Artificial Sequence
  Synthetic
auuguggcagccaaguugag

SEQ ID NO: 576195 - RNA, 21 nt, Artificial Sequence
  Synthetic
gauuguggcagccaaguugag

SEQ ID NO: 576196 - RNA, 22 nt, Artificial Sequence
  Synthetic
ugauuguggcagccaaguugag

SEQ ID NO: 576197 - RNA, 23 nt, Artificial Sequence
  Synthetic
cugauuguggcagccaaguugag

SEQ ID NO: 576198 - RNA, 24 nt, Artificial Sequence
  Synthetic
ucugauuguggcagccaaguugag

SEQ ID NO: 576199 - RNA, 18 nt, Artificial Sequence
  Synthetic
ggcugugaucaaguugag

SEQ ID NO: 576200 - RNA, 19 nt, Artificial Sequence
  Synthetic
uggcugugaucaaguugag

SEQ ID NO: 576201 - RNA, 20 nt, Artificial Sequence
  Synthetic
auggcugugaucaaguugag

SEQ ID NO: 576202 - RNA, 21 nt, Artificial Sequence
  Synthetic
gauggcugugaucaaguugag

SEQ ID NO: 576203 - RNA, 22 nt, Artificial Sequence
  Synthetic
cgauggcugugaucaaguugag

SEQ ID NO: 576204 - RNA, 23 nt, Artificial Sequence
  Synthetic
acgauggcugugaucaaguugag

SEQ ID NO: 576205 - RNA, 24 nt, Artificial Sequence
  Synthetic
uacgauggcugugaucaaguugag

SEQ ID NO: 576206 - RNA, 18 nt, Artificial Sequence
  Synthetic
acaaguaaaucaguugag

SEQ ID NO: 576207 - RNA, 19 nt, Artificial Sequence
  Synthetic
gacaaguaaaucaguugag

SEQ ID NO: 576208 - RNA, 20 nt, Artificial Sequence
  Synthetic
cgacaaguaaaucaguugag

SEQ ID NO: 576209 - RNA, 21 nt, Artificial Sequence
  Synthetic
ccgacaaguaaaucaguugag

SEQ ID NO: 576210 - RNA, 22 nt, Artificial Sequence
  Synthetic
accgacaaguaaaucaguugag

SEQ ID NO: 576211 - RNA, 23 nt, Artificial Sequence
  Synthetic
caccgacaaguaaaucaguugag

SEQ ID NO: 576212 - RNA, 24 nt, Artificial Sequence
  Synthetic
acaccgacaaguaaaucaguugag

SEQ ID NO: 576213 - RNA, 18 nt, Artificial Sequence
  Synthetic
augguuuuuggaguugag

SEQ ID NO: 576214 - RNA, 19 nt, Artificial Sequence
  Synthetic
aaugguuuuuggaguugag

SEQ ID NO: 576215 - RNA, 20 nt, Artificial Sequence
  Synthetic
caaugguuuuuggaguugag

SEQ ID NO: 576216 - RNA, 21 nt, Artificial Sequence
  Synthetic
gcaaugguuuuuggaguugag

SEQ ID NO: 576217 - RNA, 22 nt, Artificial Sequence
  Synthetic
agcaaugguuuuuggaguugag

SEQ ID NO: 576218 - RNA, 23 nt, Artificial Sequence
  Synthetic
cagcaaugguuuuuggaguugag

SEQ ID NO: 576219 - RNA, 24 nt, Artificial Sequence
  Synthetic
ucagcaaugguuuuuggaguugag

SEQ ID NO: 576220 - RNA, 18 nt, Artificial Sequence
  Synthetic
auacagaagauaguugag

SEQ ID NO: 576221 - RNA, 19 nt, Artificial Sequence
  Synthetic
uauacagaagauaguugag

SEQ ID NO: 576222 - RNA, 20 nt, Artificial Sequence
  Synthetic
cuauacagaagauaguugag

SEQ ID NO: 576223 - RNA, 21 nt, Artificial Sequence
  Synthetic
ucuauacagaagauaguugag

SEQ ID NO: 576224 - RNA, 22 nt, Artificial Sequence
  Synthetic
aucuauacagaagauaguugag

SEQ ID NO: 576225 - RNA, 23 nt, Artificial Sequence
  Synthetic
aaucuauacagaagauaguugag

SEQ ID NO: 576226 - RNA, 24 nt, Artificial Sequence
  Synthetic
aaaucuauacagaagauaguugag

SEQ ID NO: 576227 - RNA, 18 nt, Artificial Sequence
  Synthetic
ccuuuuaugaacguugag

SEQ ID NO: 576228 - RNA, 19 nt, Artificial Sequence
  Synthetic
accuuuuaugaacguugag

SEQ ID NO: 576229 - RNA, 20 nt, Artificial Sequence
  Synthetic
gaccuuuuaugaacguugag

SEQ ID NO: 576230 - RNA, 21 nt, Artificial Sequence
  Synthetic
ggaccuuuuaugaacguugag

SEQ ID NO: 576231 - RNA, 22 nt, Artificial Sequence
  Synthetic
uggaccuuuuaugaacguugag

SEQ ID NO: 576232 - RNA, 23 nt, Artificial Sequence
  Synthetic
auggaccuuuuaugaacguugag

SEQ ID NO: 576233 - RNA, 24 nt, Artificial Sequence
  Synthetic
aauggaccuuuuaugaacguugag

SEQ ID NO: 576234 - RNA, 18 nt, Artificial Sequence
  Synthetic
ucauagcaauccguugag

SEQ ID NO: 576235 - RNA, 19 nt, Artificial Sequence
  Synthetic
aucauagcaauccguugag

SEQ ID NO: 576236 - RNA, 20 nt, Artificial Sequence
  Synthetic
caucauagcaauccguugag

SEQ ID NO: 576237 - RNA, 21 nt, Artificial Sequence
  Synthetic
acaucauagcaauccguugag

SEQ ID NO: 576238 - RNA, 22 nt, Artificial Sequence
  Synthetic
uacaucauagcaauccguugag

SEQ ID NO: 576239 - RNA, 23 nt, Artificial Sequence
  Synthetic
auacaucauagcaauccguugag

SEQ ID NO: 576240 - RNA, 24 nt, Artificial Sequence
  Synthetic
aauacaucauagcaauccguugag

SEQ ID NO: 576241 - RNA, 18 nt, Artificial Sequence
  Synthetic
gguaguggggggguugag

SEQ ID NO: 576242 - RNA, 19 nt, Artificial Sequence
  Synthetic
ggguaguggggggguugag

SEQ ID NO: 576243 - RNA, 20 nt, Artificial Sequence
  Synthetic
aggguaguggggggguugag

SEQ ID NO: 576244 - RNA, 21 nt, Artificial Sequence
  Synthetic
aaggguaguggggggguugag

SEQ ID NO: 576245 - RNA, 22 nt, Artificial Sequence
  Synthetic
gaaggguaguggggggguugag

SEQ ID NO: 576246 - RNA, 23 nt, Artificial Sequence
  Synthetic
ugaaggguaguggggggguugag

SEQ ID NO: 576247 - RNA, 24 nt, Artificial Sequence
  Synthetic
gugaaggguaguggggggguugag

SEQ ID NO: 576248 - RNA, 18 nt, Artificial Sequence
  Synthetic
cagaagcaggugguugag

SEQ ID NO: 576249 - RNA, 19 nt, Artificial Sequence
  Synthetic
acagaagcaggugguugag

SEQ ID NO: 576250 - RNA, 20 nt, Artificial Sequence
  Synthetic
aacagaagcaggugguugag

SEQ ID NO: 576251 - RNA, 21 nt, Artificial Sequence
  Synthetic
aaacagaagcaggugguugag

SEQ ID NO: 576252 - RNA, 22 nt, Artificial Sequence
  Synthetic
uaaacagaagcaggugguugag

SEQ ID NO: 576253 - RNA, 23 nt, Artificial Sequence
  Synthetic
guaaacagaagcaggugguugag

SEQ ID NO: 576254 - RNA, 24 nt, Artificial Sequence
  Synthetic
aguaaacagaagcaggugguugag

SEQ ID NO: 576255 - RNA, 18 nt, Artificial Sequence
  Synthetic
cacaaaaauaauguugag

SEQ ID NO: 576256 - RNA, 19 nt, Artificial Sequence
  Synthetic
ucacaaaaauaauguugag

SEQ ID NO: 576257 - RNA, 20 nt, Artificial Sequence
  Synthetic
aucacaaaaauaauguugag

SEQ ID NO: 576258 - RNA, 21 nt, Artificial Sequence
  Synthetic
uaucacaaaaauaauguugag

SEQ ID NO: 576259 - RNA, 22 nt, Artificial Sequence
  Synthetic
auaucacaaaaauaauguugag

SEQ ID NO: 576260 - RNA, 23 nt, Artificial Sequence
  Synthetic
aauaucacaaaaauaauguugag

SEQ ID NO: 576261 - RNA, 24 nt, Artificial Sequence
  Synthetic
uaauaucacaaaaauaauguugag

SEQ ID NO: 576262 - RNA, 18 nt, Artificial Sequence
  Synthetic
cugaguauaacauuugag

SEQ ID NO: 576263 - RNA, 19 nt, Artificial Sequence
  Synthetic
ccugaguauaacauuugag

SEQ ID NO: 576264 - RNA, 20 nt, Artificial Sequence
  Synthetic
uccugaguauaacauuugag

SEQ ID NO: 576265 - RNA, 21 nt, Artificial Sequence
  Synthetic
uuccugaguauaacauuugag

SEQ ID NO: 576266 - RNA, 22 nt, Artificial Sequence
  Synthetic
uuuccugaguauaacauuugag

SEQ ID NO: 576267 - RNA, 23 nt, Artificial Sequence
  Synthetic
cuuuccugaguauaacauuugag

SEQ ID NO: 576268 - RNA, 24 nt, Artificial Sequence
  Synthetic
ucuuuccugaguauaacauuugag

SEQ ID NO: 576269 - RNA, 18 nt, Artificial Sequence
  Synthetic
uugcuauucacauuugag

SEQ ID NO: 576270 - RNA, 19 nt, Artificial Sequence
  Synthetic
guugcuauucacauuugag

SEQ ID NO: 576271 - RNA, 20 nt, Artificial Sequence
  Synthetic
aguugcuauucacauuugag

SEQ ID NO: 576272 - RNA, 21 nt, Artificial Sequence
  Synthetic
uaguugcuauucacauuugag

SEQ ID NO: 576273 - RNA, 22 nt, Artificial Sequence
  Synthetic
cuaguugcuauucacauuugag

SEQ ID NO: 576274 - RNA, 23 nt, Artificial Sequence
  Synthetic
ucuaguugcuauucacauuugag

SEQ ID NO: 576275 - RNA, 24 nt, Artificial Sequence
  Synthetic
aucuaguugcuauucacauuugag

SEQ ID NO: 576276 - RNA, 18 nt, Artificial Sequence
  Synthetic
gcuuccacugcauuugag

SEQ ID NO: 576277 - RNA, 19 nt, Artificial Sequence
  Synthetic
ugcuuccacugcauuugag

SEQ ID NO: 576278 - RNA, 20 nt, Artificial Sequence
  Synthetic
gugcuuccacugcauuugag

SEQ ID NO: 576279 - RNA, 21 nt, Artificial Sequence
  Synthetic
ggugcuuccacugcauuugag

SEQ ID NO: 576280 - RNA, 22 nt, Artificial Sequence
  Synthetic
cggugcuuccacugcauuugag

SEQ ID NO: 576281 - RNA, 23 nt, Artificial Sequence
  Synthetic
acggugcuuccacugcauuugag

SEQ ID NO: 576282 - RNA, 24 nt, Artificial Sequence
  Synthetic
aacggugcuuccacugcauuugag

SEQ ID NO: 576283 - RNA, 18 nt, Artificial Sequence
  Synthetic
uucaaaaugagauuugag

SEQ ID NO: 576284 - RNA, 19 nt, Artificial Sequence
  Synthetic
auucaaaaugagauuugag

SEQ ID NO: 576285 - RNA, 20 nt, Artificial Sequence
  Synthetic
aauucaaaaugagauuugag

SEQ ID NO: 576286 - RNA, 21 nt, Artificial Sequence
  Synthetic
uaauucaaaaugagauuugag

SEQ ID NO: 576287 - RNA, 22 nt, Artificial Sequence
  Synthetic
auaauucaaaaugagauuugag

SEQ ID NO: 576288 - RNA, 23 nt, Artificial Sequence
  Synthetic
uauaauucaaaaugagauuugag

SEQ ID NO: 576289 - RNA, 24 nt, Artificial Sequence
  Synthetic
uuauaauucaaaaugagauuugag

SEQ ID NO: 576290 - RNA, 18 nt, Artificial Sequence
  Synthetic
ccuuuagauugauuugag

SEQ ID NO: 576291 - RNA, 19 nt, Artificial Sequence
  Synthetic
accuuuagauugauuugag

SEQ ID NO: 576292 - RNA, 20 nt, Artificial Sequence
  Synthetic
aaccuuuagauugauuugag

SEQ ID NO: 576293 - RNA, 21 nt, Artificial Sequence
  Synthetic
aaaccuuuagauugauuugag

SEQ ID NO: 576294 - RNA, 22 nt, Artificial Sequence
  Synthetic
uaaaccuuuagauugauuugag

SEQ ID NO: 576295 - RNA, 23 nt, Artificial Sequence
  Synthetic
uuaaaccuuuagauugauuugag

SEQ ID NO: 576296 - RNA, 24 nt, Artificial Sequence
  Synthetic
auuaaaccuuuagauugauuugag

SEQ ID NO: 576297 - RNA, 18 nt, Artificial Sequence
  Synthetic
acagaguauguauuugag

SEQ ID NO: 576298 - RNA, 19 nt, Artificial Sequence
  Synthetic
uacagaguauguauuugag

SEQ ID NO: 576299 - RNA, 20 nt, Artificial Sequence
  Synthetic
auacagaguauguauuugag

SEQ ID NO: 576300 - RNA, 21 nt, Artificial Sequence
  Synthetic
aauacagaguauguauuugag

SEQ ID NO: 576301 - RNA, 22 nt, Artificial Sequence
  Synthetic
aaauacagaguauguauuugag

SEQ ID NO: 576302 - RNA, 23 nt, Artificial Sequence
  Synthetic
uaaauacagaguauguauuugag

SEQ ID NO: 576303 - RNA, 24 nt, Artificial Sequence
  Synthetic
auaaauacagaguauguauuugag

SEQ ID NO: 576304 - RNA, 18 nt, Artificial Sequence
  Synthetic
auuauuuauuuauuugag

SEQ ID NO: 576305 - RNA, 19 nt, Artificial Sequence
  Synthetic
aauuauuuauuuauuugag

SEQ ID NO: 576306 - RNA, 20 nt, Artificial Sequence
  Synthetic
uaauuauuuauuuauuugag

SEQ ID NO: 576307 - RNA, 21 nt, Artificial Sequence
  Synthetic
cuaauuauuuauuuauuugag

SEQ ID NO: 576308 - RNA, 22 nt, Artificial Sequence
  Synthetic
ucuaauuauuuauuuauuugag

SEQ ID NO: 576309 - RNA, 23 nt, Artificial Sequence
  Synthetic
cucuaauuauuuauuuauuugag

SEQ ID NO: 576310 - RNA, 24 nt, Artificial Sequence
  Synthetic
ucucuaauuauuuauuuauuugag

SEQ ID NO: 576311 - RNA, 18 nt, Artificial Sequence
  Synthetic
ucaccaaacagcuuugag

SEQ ID NO: 576312 - RNA, 19 nt, Artificial Sequence
  Synthetic
aucaccaaacagcuuugag

SEQ ID NO: 576313 - RNA, 20 nt, Artificial Sequence
  Synthetic
uaucaccaaacagcuuugag

SEQ ID NO: 576314 - RNA, 21 nt, Artificial Sequence
  Synthetic
cuaucaccaaacagcuuugag

SEQ ID NO: 576315 - RNA, 22 nt, Artificial Sequence
  Synthetic
gcuaucaccaaacagcuuugag

SEQ ID NO: 576316 - RNA, 23 nt, Artificial Sequence
  Synthetic
agcuaucaccaaacagcuuugag

SEQ ID NO: 576317 - RNA, 24 nt, Artificial Sequence
  Synthetic
cagcuaucaccaaacagcuuugag

SEQ ID NO: 576318 - RNA, 18 nt, Artificial Sequence
  Synthetic
gagcccuuaugcuuugag

SEQ ID NO: 576319 - RNA, 19 nt, Artificial Sequence
  Synthetic
agagcccuuaugcuuugag

SEQ ID NO: 576320 - RNA, 20 nt, Artificial Sequence
  Synthetic
aagagcccuuaugcuuugag

SEQ ID NO: 576321 - RNA, 21 nt, Artificial Sequence
  Synthetic
caagagcccuuaugcuuugag

SEQ ID NO: 576322 - RNA, 22 nt, Artificial Sequence
  Synthetic
ccaagagcccuuaugcuuugag

SEQ ID NO: 576323 - RNA, 23 nt, Artificial Sequence
  Synthetic
uccaagagcccuuaugcuuugag

SEQ ID NO: 576324 - RNA, 24 nt, Artificial Sequence
  Synthetic
auccaagagcccuuaugcuuugag

SEQ ID NO: 576325 - RNA, 18 nt, Artificial Sequence
  Synthetic
auguauuuugucuuugag

SEQ ID NO: 576326 - RNA, 19 nt, Artificial Sequence
  Synthetic
aauguauuuugucuuugag

SEQ ID NO: 576327 - RNA, 20 nt, Artificial Sequence
  Synthetic
gaauguauuuugucuuugag

SEQ ID NO: 576328 - RNA, 21 nt, Artificial Sequence
  Synthetic
ugaauguauuuugucuuugag

SEQ ID NO: 576329 - RNA, 22 nt, Artificial Sequence
  Synthetic
augaauguauuuugucuuugag

SEQ ID NO: 576330 - RNA, 23 nt, Artificial Sequence
  Synthetic
aaugaauguauuuugucuuugag

SEQ ID NO: 576331 - RNA, 24 nt, Artificial Sequence
  Synthetic
aaaugaauguauuuugucuuugag

SEQ ID NO: 576332 - RNA, 18 nt, Artificial Sequence
  Synthetic
ugauccuuaaaguuugag

SEQ ID NO: 576333 - RNA, 19 nt, Artificial Sequence
  Synthetic
uugauccuuaaaguuugag

SEQ ID NO: 576334 - RNA, 20 nt, Artificial Sequence
  Synthetic
auugauccuuaaaguuugag

SEQ ID NO: 576335 - RNA, 21 nt, Artificial Sequence
  Synthetic
aauugauccuuaaaguuugag

SEQ ID NO: 576336 - RNA, 22 nt, Artificial Sequence
  Synthetic
aaauugauccuuaaaguuugag

SEQ ID NO: 576337 - RNA, 23 nt, Artificial Sequence
  Synthetic
uaaauugauccuuaaaguuugag

SEQ ID NO: 576338 - RNA, 24 nt, Artificial Sequence
  Synthetic
uuaaauugauccuuaaaguuugag

SEQ ID NO: 576339 - RNA, 18 nt, Artificial Sequence
  Synthetic
auuauuguaagguuugag

SEQ ID NO: 576340 - RNA, 19 nt, Artificial Sequence
  Synthetic
gauuauuguaagguuugag

SEQ ID NO: 576341 - RNA, 20 nt, Artificial Sequence
  Synthetic
ggauuauuguaagguuugag

SEQ ID NO: 576342 - RNA, 21 nt, Artificial Sequence
  Synthetic
gggauuauuguaagguuugag

SEQ ID NO: 576343 - RNA, 22 nt, Artificial Sequence
  Synthetic
agggauuauuguaagguuugag

SEQ ID NO: 576344 - RNA, 23 nt, Artificial Sequence
  Synthetic
aagggauuauuguaagguuugag

SEQ ID NO: 576345 - RNA, 24 nt, Artificial Sequence
  Synthetic
gaagggauuauuguaagguuugag

SEQ ID NO: 576346 - RNA, 18 nt, Artificial Sequence
  Synthetic
uaaauucugagguuugag

SEQ ID NO: 576347 - RNA, 19 nt, Artificial Sequence
  Synthetic
auaaauucugagguuugag

SEQ ID NO: 576348 - RNA, 20 nt, Artificial Sequence
  Synthetic
aauaaauucugagguuugag

SEQ ID NO: 576349 - RNA, 21 nt, Artificial Sequence
  Synthetic
uaauaaauucugagguuugag

SEQ ID NO: 576350 - RNA, 22 nt, Artificial Sequence
  Synthetic
auaauaaauucugagguuugag

SEQ ID NO: 576351 - RNA, 23 nt, Artificial Sequence
  Synthetic
aauaauaaauucugagguuugag

SEQ ID NO: 576352 - RNA, 24 nt, Artificial Sequence
  Synthetic
aaauaauaaauucugagguuugag

SEQ ID NO: 576353 - RNA, 18 nt, Artificial Sequence
  Synthetic
aaacugcuuauguuugag

SEQ ID NO: 576354 - RNA, 19 nt, Artificial Sequence
  Synthetic
uaaacugcuuauguuugag

SEQ ID NO: 576355 - RNA, 20 nt, Artificial Sequence
  Synthetic
auaaacugcuuauguuugag

SEQ ID NO: 576356 - RNA, 21 nt, Artificial Sequence
  Synthetic
aauaaacugcuuauguuugag

SEQ ID NO: 576357 - RNA, 22 nt, Artificial Sequence
  Synthetic
gaauaaacugcuuauguuugag

SEQ ID NO: 576358 - RNA, 23 nt, Artificial Sequence
  Synthetic
agaauaaacugcuuauguuugag

SEQ ID NO: 576359 - RNA, 24 nt, Artificial Sequence
  Synthetic
gagaauaaacugcuuauguuugag

SEQ ID NO: 576360 - RNA, 18 nt, Artificial Sequence
  Synthetic
uguuuuguuuuguuugag

SEQ ID NO: 576361 - RNA, 19 nt, Artificial Sequence
  Synthetic
uuguuuuguuuuguuugag

SEQ ID NO: 576362 - RNA, 20 nt, Artificial Sequence
  Synthetic
uuuguuuuguuuuguuugag

SEQ ID NO: 576363 - RNA, 21 nt, Artificial Sequence
  Synthetic
uuuuguuuuguuuuguuugag

SEQ ID NO: 576364 - RNA, 22 nt, Artificial Sequence
  Synthetic
guuuuguuuuguuuuguuugag

SEQ ID NO: 576365 - RNA, 23 nt, Artificial Sequence
  Synthetic
uguuuuguuuuguuuuguuugag

SEQ ID NO: 576366 - RNA, 24 nt, Artificial Sequence
  Synthetic
uuguuuuguuuuguuuuguuugag

SEQ ID NO: 576367 - RNA, 18 nt, Artificial Sequence
  Synthetic
gagagugagaauuuugag

SEQ ID NO: 576368 - RNA, 19 nt, Artificial Sequence
  Synthetic
agagagugagaauuuugag

SEQ ID NO: 576369 - RNA, 20 nt, Artificial Sequence
  Synthetic
gagagagugagaauuuugag

SEQ ID NO: 576370 - RNA, 21 nt, Artificial Sequence
  Synthetic
ggagagagugagaauuuugag

SEQ ID NO: 576371 - RNA, 22 nt, Artificial Sequence
  Synthetic
aggagagagugagaauuuugag

SEQ ID NO: 576372 - RNA, 23 nt, Artificial Sequence
  Synthetic
aaggagagagugagaauuuugag

SEQ ID NO: 576373 - RNA, 24 nt, Artificial Sequence
  Synthetic
caaggagagagugagaauuuugag

SEQ ID NO: 576374 - RNA, 18 nt, Artificial Sequence
  Synthetic
uugaaaucagauuuugag

SEQ ID NO: 576375 - RNA, 19 nt, Artificial Sequence
  Synthetic
guugaaaucagauuuugag

SEQ ID NO: 576376 - RNA, 20 nt, Artificial Sequence
  Synthetic
aguugaaaucagauuuugag

SEQ ID NO: 576377 - RNA, 21 nt, Artificial Sequence
  Synthetic
caguugaaaucagauuuugag

SEQ ID NO: 576378 - RNA, 22 nt, Artificial Sequence
  Synthetic
gcaguugaaaucagauuuugag

SEQ ID NO: 576379 - RNA, 23 nt, Artificial Sequence
  Synthetic
ggcaguugaaaucagauuuugag

SEQ ID NO: 576380 - RNA, 24 nt, Artificial Sequence
  Synthetic
aggcaguugaaaucagauuuugag

SEQ ID NO: 576381 - RNA, 18 nt, Artificial Sequence
  Synthetic
auauauauauauuuugag

SEQ ID NO: 576382 - RNA, 19 nt, Artificial Sequence
  Synthetic
gauauauauauauuuugag

SEQ ID NO: 576383 - RNA, 20 nt, Artificial Sequence
  Synthetic
ugauauauauauauuuugag

SEQ ID NO: 576384 - RNA, 21 nt, Artificial Sequence
  Synthetic
uugauauauauauauuuugag

SEQ ID NO: 576385 - RNA, 22 nt, Artificial Sequence
  Synthetic
cuugauauauauauauuuugag

SEQ ID NO: 576386 - RNA, 23 nt, Artificial Sequence
  Synthetic
acuugauauauauauauuuugag

SEQ ID NO: 576387 - RNA, 24 nt, Artificial Sequence
  Synthetic
aacuugauauauauauauuuugag

SEQ ID NO: 576388 - RNA, 18 nt, Artificial Sequence
  Synthetic
uaagaucuguauuuugag

SEQ ID NO: 576389 - RNA, 19 nt, Artificial Sequence
  Synthetic
auaagaucuguauuuugag

SEQ ID NO: 576390 - RNA, 20 nt, Artificial Sequence
  Synthetic
uauaagaucuguauuuugag

SEQ ID NO: 576391 - RNA, 21 nt, Artificial Sequence
  Synthetic
auauaagaucuguauuuugag

SEQ ID NO: 576392 - RNA, 22 nt, Artificial Sequence
  Synthetic
cauauaagaucuguauuuugag

SEQ ID NO: 576393 - RNA, 23 nt, Artificial Sequence
  Synthetic
acauauaagaucuguauuuugag

SEQ ID NO: 576394 - RNA, 24 nt, Artificial Sequence
  Synthetic
cacauauaagaucuguauuuugag

SEQ ID NO: 576395 - RNA, 18 nt, Artificial Sequence
  Synthetic
uugucucaaacuuuugag

SEQ ID NO: 576396 - RNA, 19 nt, Artificial Sequence
  Synthetic
cuugucucaaacuuuugag

SEQ ID NO: 576397 - RNA, 20 nt, Artificial Sequence
  Synthetic
gcuugucucaaacuuuugag

SEQ ID NO: 576398 - RNA, 21 nt, Artificial Sequence
  Synthetic
cgcuugucucaaacuuuugag

SEQ ID NO: 576399 - RNA, 22 nt, Artificial Sequence
  Synthetic
ucgcuugucucaaacuuuugag

SEQ ID NO: 576400 - RNA, 23 nt, Artificial Sequence
  Synthetic
cucgcuugucucaaacuuuugag

SEQ ID NO: 576401 - RNA, 24 nt, Artificial Sequence
  Synthetic
acucgcuugucucaaacuuuugag

SEQ ID NO: 576402 - RNA, 18 nt, Artificial Sequence
  Synthetic
uuuuuuguuccuuuugag

SEQ ID NO: 576403 - RNA, 19 nt, Artificial Sequence
  Synthetic
cuuuuuuguuccuuuugag

SEQ ID NO: 576404 - RNA, 20 nt, Artificial Sequence
  Synthetic
ucuuuuuuguuccuuuugag

SEQ ID NO: 576405 - RNA, 21 nt, Artificial Sequence
  Synthetic
uucuuuuuuguuccuuuugag

SEQ ID NO: 576406 - RNA, 22 nt, Artificial Sequence
  Synthetic
uuucuuuuuuguuccuuuugag

SEQ ID NO: 576407 - RNA, 23 nt, Artificial Sequence
  Synthetic
uuuucuuuuuuguuccuuuugag

SEQ ID NO: 576408 - RNA, 24 nt, Artificial Sequence
  Synthetic
uuuuucuuuuuuguuccuuuugag

SEQ ID NO: 576409 - RNA, 18 nt, Artificial Sequence
  Synthetic
uuauuuauuuguuuugag

SEQ ID NO: 576410 - RNA, 19 nt, Artificial Sequence
  Synthetic
uuuauuuauuuguuuugag

SEQ ID NO: 576411 - RNA, 20 nt, Artificial Sequence
  Synthetic
auuuauuuauuuguuuugag

SEQ ID NO: 576412 - RNA, 21 nt, Artificial Sequence
  Synthetic
uauuuauuuauuuguuuugag

SEQ ID NO: 576413 - RNA, 22 nt, Artificial Sequence
  Synthetic
uuauuuauuuauuuguuuugag

SEQ ID NO: 576414 - RNA, 23 nt, Artificial Sequence
  Synthetic
uuuauuuauuuauuuguuuugag

SEQ ID NO: 576415 - RNA, 24 nt, Artificial Sequence
  Synthetic
auuuauuuauuuauuuguuuugag

SEQ ID NO: 576416 - RNA, 18 nt, Artificial Sequence
  Synthetic
uguuuuguuauuuuugag

SEQ ID NO: 576417 - RNA, 19 nt, Artificial Sequence
  Synthetic
uuguuuuguuauuuuugag

SEQ ID NO: 576418 - RNA, 20 nt, Artificial Sequence
  Synthetic
uuuguuuuguuauuuuugag

SEQ ID NO: 576419 - RNA, 21 nt, Artificial Sequence
  Synthetic
uuuuguuuuguuauuuuugag

SEQ ID NO: 576420 - RNA, 22 nt, Artificial Sequence
  Synthetic
guuuuguuuuguuauuuuugag

SEQ ID NO: 576421 - RNA, 23 nt, Artificial Sequence
  Synthetic
uguuuuguuuuguuauuuuugag

SEQ ID NO: 576422 - RNA, 24 nt, Artificial Sequence
  Synthetic
uuguuuuguuuuguuauuuuugag

SEQ ID NO: 576423 - RNA, 18 nt, Artificial Sequence
  Synthetic
uauuuauuuauuuuugag

SEQ ID NO: 576424 - RNA, 19 nt, Artificial Sequence
  Synthetic
uuauuuauuuauuuuugag

SEQ ID NO: 576425 - RNA, 20 nt, Artificial Sequence
  Synthetic
uuuauuuauuuauuuuugag

SEQ ID NO: 576426 - RNA, 21 nt, Artificial Sequence
  Synthetic
auuuauuuauuuauuuuugag

SEQ ID NO: 576427 - RNA, 22 nt, Artificial Sequence
  Synthetic
uauuuauuuauuuauuuuugag

SEQ ID NO: 576428 - RNA, 23 nt, Artificial Sequence
  Synthetic
uuauuuauuuauuuauuuuugag

SEQ ID NO: 576429 - RNA, 24 nt, Artificial Sequence
  Synthetic
uuuauuuauuuauuuauuuuugag

SEQ ID NO: 576430 - RNA, 18 nt, Artificial Sequence
  Synthetic
gcugaaacacuuuuugag

SEQ ID NO: 576431 - RNA, 19 nt, Artificial Sequence
  Synthetic
agcugaaacacuuuuugag

SEQ ID NO: 576432 - RNA, 20 nt, Artificial Sequence
  Synthetic
gagcugaaacacuuuuugag

SEQ ID NO: 576433 - RNA, 21 nt, Artificial Sequence
  Synthetic
ggagcugaaacacuuuuugag

SEQ ID NO: 576434 - RNA, 22 nt, Artificial Sequence
  Synthetic
uggagcugaaacacuuuuugag

SEQ ID NO: 576435 - RNA, 23 nt, Artificial Sequence
  Synthetic
uuggagcugaaacacuuuuugag

SEQ ID NO: 576436 - RNA, 24 nt, Artificial Sequence
  Synthetic
uuuggagcugaaacacuuuuugag

SEQ ID NO: 576437 - RNA, 18 nt, Artificial Sequence
  Synthetic
uuuuuuuuucuuuuugag

SEQ ID NO: 576438 - RNA, 19 nt, Artificial Sequence
  Synthetic
uuuuuuuuuucuuuuugag

SEQ ID NO: 576439 - RNA, 20 nt, Artificial Sequence
  Synthetic
uuuuuuuuuuucuuuuugag

SEQ ID NO: 576440 - RNA, 21 nt, Artificial Sequence
  Synthetic
uuuuuuuuuuuucuuuuugag

SEQ ID NO: 576441 - RNA, 22 nt, Artificial Sequence
  Synthetic
uuuuuuuuuuuuucuuuuugag

SEQ ID NO: 576442 - RNA, 23 nt, Artificial Sequence
  Synthetic
uuuuuuuuuuuuuucuuuuugag

SEQ ID NO: 576443 - RNA, 24 nt, Artificial Sequence
  Synthetic
auuuuuuuuuuuuuucuuuuugag

SEQ ID NO: 576444 - RNA, 18 nt, Artificial Sequence
  Synthetic
auuuauuuauuuuuugag

SEQ ID NO: 576445 - RNA, 19 nt, Artificial Sequence
  Synthetic
uauuuauuuauuuuuugag

SEQ ID NO: 576446 - RNA, 20 nt, Artificial Sequence
  Synthetic
uuauuuauuuauuuuuugag

SEQ ID NO: 576447 - RNA, 21 nt, Artificial Sequence
  Synthetic
uuuauuuauuuauuuuuugag

SEQ ID NO: 576448 - RNA, 22 nt, Artificial Sequence
  Synthetic
auuuauuuauuuauuuuuugag

SEQ ID NO: 576449 - RNA, 23 nt, Artificial Sequence
  Synthetic
uauuuauuuauuuauuuuuugag

SEQ ID NO: 576450 - RNA, 24 nt, Artificial Sequence
  Synthetic
uuauuuauuuauuuauuuuuugag

SEQ ID NO: 576451 - RNA, 18 nt, Artificial Sequence
  Synthetic
uucuuuuuauuuuuugag

SEQ ID NO: 576452 - RNA, 19 nt, Artificial Sequence
  Synthetic
uuucuuuuuauuuuuugag

SEQ ID NO: 576453 - RNA, 20 nt, Artificial Sequence
  Synthetic
cuuucuuuuuauuuuuugag

SEQ ID NO: 576454 - RNA, 21 nt, Artificial Sequence
  Synthetic
ucuuucuuuuuauuuuuugag

SEQ ID NO: 576455 - RNA, 22 nt, Artificial Sequence
  Synthetic
cucuuucuuuuuauuuuuugag

SEQ ID NO: 576456 - RNA, 23 nt, Artificial Sequence
  Synthetic
ucucuuucuuuuuauuuuuugag

SEQ ID NO: 576457 - RNA, 24 nt, Artificial Sequence
  Synthetic
cucucuuucuuuuuauuuuuugag

SEQ ID NO: 576458 - RNA, 18 nt, Artificial Sequence
  Synthetic
uuguuuuuauuuuuugag

SEQ ID NO: 576459 - RNA, 19 nt, Artificial Sequence
  Synthetic
auuguuuuuauuuuuugag

SEQ ID NO: 576460 - RNA, 20 nt, Artificial Sequence
  Synthetic
uauuguuuuuauuuuuugag

SEQ ID NO: 576461 - RNA, 21 nt, Artificial Sequence
  Synthetic
uuauuguuuuuauuuuuugag

SEQ ID NO: 576462 - RNA, 22 nt, Artificial Sequence
  Synthetic
uuuauuguuuuuauuuuuugag

SEQ ID NO: 576463 - RNA, 23 nt, Artificial Sequence
  Synthetic
uuuuauuguuuuuauuuuuugag

SEQ ID NO: 576464 - RNA, 24 nt, Artificial Sequence
  Synthetic
uuuuuauuguuuuuauuuuuugag

SEQ ID NO: 576465 - RNA, 18 nt, Artificial Sequence
  Synthetic
uuuuuuucuuuuuuugag

SEQ ID NO: 576466 - RNA, 19 nt, Artificial Sequence
  Synthetic
uuuuuuuucuuuuuuugag

SEQ ID NO: 576467 - RNA, 20 nt, Artificial Sequence
  Synthetic
uuuuuuuuucuuuuuuugag

SEQ ID NO: 576468 - RNA, 21 nt, Artificial Sequence
  Synthetic
uuuuuuuuuucuuuuuuugag

SEQ ID NO: 576469 - RNA, 22 nt, Artificial Sequence
  Synthetic
uuuuuuuuuuucuuuuuuugag

SEQ ID NO: 576470 - RNA, 23 nt, Artificial Sequence
  Synthetic
uuuuuuuuuuuucuuuuuuugag

SEQ ID NO: 576471 - RNA, 24 nt, Artificial Sequence
  Synthetic
cuuuuuuuuuuuucuuuuuuugag

SEQ ID NO: 576472 - RNA, 18 nt, Artificial Sequence
  Synthetic
uucuucuuuuuuuuugag

SEQ ID NO: 576473 - RNA, 19 nt, Artificial Sequence
  Synthetic
cuucuucuuuuuuuuugag

SEQ ID NO: 576474 - RNA, 20 nt, Artificial Sequence
  Synthetic
ucuucuucuuuuuuuuugag

SEQ ID NO: 576475 - RNA, 21 nt, Artificial Sequence
  Synthetic
uucuucuucuuuuuuuuugag

SEQ ID NO: 576476 - RNA, 22 nt, Artificial Sequence
  Synthetic
uuucuucuucuuuuuuuuugag

SEQ ID NO: 576477 - RNA, 23 nt, Artificial Sequence
  Synthetic
uuuucuucuucuuuuuuuuugag

SEQ ID NO: 576478 - RNA, 24 nt, Artificial Sequence
  Synthetic
cuuuucuucuucuuuuuuuuugag

SEQ ID NO: 576479 - RNA, 18 nt, Artificial Sequence
  Synthetic
uuuaauuuuuuuuuugag

SEQ ID NO: 576480 - RNA, 19 nt, Artificial Sequence
  Synthetic
auuuaauuuuuuuuuugag

SEQ ID NO: 576481 - RNA, 20 nt, Artificial Sequence
  Synthetic
uauuuaauuuuuuuuuugag

SEQ ID NO: 576482 - RNA, 21 nt, Artificial Sequence
  Synthetic
uuauuuaauuuuuuuuuugag

SEQ ID NO: 576483 - RNA, 22 nt, Artificial Sequence
  Synthetic
uuuauuuaauuuuuuuuuugag

SEQ ID NO: 576484 - RNA, 23 nt, Artificial Sequence
  Synthetic
auuuauuuaauuuuuuuuuugag

SEQ ID NO: 576485 - RNA, 24 nt, Artificial Sequence
  Synthetic
uauuuauuuaauuuuuuuuuugag

SEQ ID NO: 576486 - RNA, 18 nt, Artificial Sequence
  Synthetic
ccuuuuuuuuuuuuugag

SEQ ID NO: 576487 - RNA, 19 nt, Artificial Sequence
  Synthetic
uccuuuuuuuuuuuuugag

SEQ ID NO: 576488 - RNA, 20 nt, Artificial Sequence
  Synthetic
uuccuuuuuuuuuuuuugag

SEQ ID NO: 576489 - RNA, 21 nt, Artificial Sequence
  Synthetic
uuuccuuuuuuuuuuuuugag

SEQ ID NO: 576490 - RNA, 22 nt, Artificial Sequence
  Synthetic
cuuuccuuuuuuuuuuuuugag

SEQ ID NO: 576491 - RNA, 23 nt, Artificial Sequence
  Synthetic
ucuuuccuuuuuuuuuuuuugag

SEQ ID NO: 576492 - RNA, 24 nt, Artificial Sequence
  Synthetic
uucuuuccuuuuuuuuuuuuugag

SEQ ID NO: 576493 - RNA, 18 nt, Artificial Sequence
  Synthetic
uuuuuuuuuuuuuuugag

SEQ ID NO: 576494 - RNA, 19 nt, Artificial Sequence
  Synthetic
auuuuuuuuuuuuuuugag

SEQ ID NO: 576495 - RNA, 20 nt, Artificial Sequence
  Synthetic
cauuuuuuuuuuuuuuugag

SEQ ID NO: 576496 - RNA, 21 nt, Artificial Sequence
  Synthetic
acauuuuuuuuuuuuuuugag

SEQ ID NO: 576497 - RNA, 22 nt, Artificial Sequence
  Synthetic
cacauuuuuuuuuuuuuuugag

SEQ ID NO: 576498 - RNA, 23 nt, Artificial Sequence
  Synthetic
acacauuuuuuuuuuuuuuugag

SEQ ID NO: 576499 - RNA, 24 nt, Artificial Sequence
  Synthetic
aacacauuuuuuuuuuuuuuugag

SEQ ID NO: 576500 - RNA, 21 nt, Artificial Sequence
  Synthetic
acuuuuuuuuuuuuuuuugag

SEQ ID NO: 576501 - RNA, 22 nt, Artificial Sequence
  Synthetic
cacuuuuuuuuuuuuuuuugag

SEQ ID NO: 576502 - RNA, 23 nt, Artificial Sequence
  Synthetic
ccacuuuuuuuuuuuuuuuugag

SEQ ID NO: 576503 - RNA, 24 nt, Artificial Sequence
  Synthetic
accacuuuuuuuuuuuuuuuugag

SEQ ID NO: 576504 - RNA, 21 nt, Artificial Sequence
  Synthetic
ucuuuuuuuuuuuuuuuugag

SEQ ID NO: 576505 - RNA, 22 nt, Artificial Sequence
  Synthetic
uucuuuuuuuuuuuuuuuugag

SEQ ID NO: 576506 - RNA, 23 nt, Artificial Sequence
  Synthetic
auucuuuuuuuuuuuuuuuugag

SEQ ID NO: 576507 - RNA, 24 nt, Artificial Sequence
  Synthetic
uauucuuuuuuuuuuuuuuuugag

SEQ ID NO: 576508 - RNA, 22 nt, Artificial Sequence
  Synthetic
auuuuuuuuuuuuuuuuuugag

SEQ ID NO: 576509 - RNA, 23 nt, Artificial Sequence
  Synthetic
aauuuuuuuuuuuuuuuuuugag

SEQ ID NO: 576510 - RNA, 24 nt, Artificial Sequence
  Synthetic
uaauuuuuuuuuuuuuuuuuugag

SEQ ID NO: 576511 - RNA, 18 nt, Artificial Sequence
  Synthetic
acaaaaaaaaaaaaauag

SEQ ID NO: 576512 - RNA, 19 nt, Artificial Sequence
  Synthetic
uacaaaaaaaaaaaaauag

SEQ ID NO: 576513 - RNA, 20 nt, Artificial Sequence
  Synthetic
auacaaaaaaaaaaaaauag

SEQ ID NO: 576514 - RNA, 21 nt, Artificial Sequence
  Synthetic
aauacaaaaaaaaaaaaauag

SEQ ID NO: 576515 - RNA, 22 nt, Artificial Sequence
  Synthetic
aaauacaaaaaaaaaaaaauag

SEQ ID NO: 576516 - RNA, 23 nt, Artificial Sequence
  Synthetic
aaaauacaaaaaaaaaaaaauag

SEQ ID NO: 576517 - RNA, 24 nt, Artificial Sequence
  Synthetic
aaaaauacaaaaaaaaaaaaauag

SEQ ID NO: 576518 - RNA, 18 nt, Artificial Sequence
  Synthetic
ugugacucuaaaaaauag

SEQ ID NO: 576519 - RNA, 19 nt, Artificial Sequence
  Synthetic
gugugacucuaaaaaauag

SEQ ID NO: 576520 - RNA, 20 nt, Artificial Sequence
  Synthetic
ugugugacucuaaaaaauag

SEQ ID NO: 576521 - RNA, 21 nt, Artificial Sequence
  Synthetic
augugugacucuaaaaaauag

SEQ ID NO: 576522 - RNA, 22 nt, Artificial Sequence
  Synthetic
uaugugugacucuaaaaaauag

SEQ ID NO: 576523 - RNA, 23 nt, Artificial Sequence
  Synthetic
uuaugugugacucuaaaaaauag

SEQ ID NO: 576524 - RNA, 24 nt, Artificial Sequence
  Synthetic
uuuaugugugacucuaaaaaauag

SEQ ID NO: 576525 - RNA, 18 nt, Artificial Sequence
  Synthetic
uauggugcacaaaaauag

SEQ ID NO: 576526 - RNA, 19 nt, Artificial Sequence
  Synthetic
uuauggugcacaaaaauag

SEQ ID NO: 576527 - RNA, 20 nt, Artificial Sequence
  Synthetic
uuuauggugcacaaaaauag

SEQ ID NO: 576528 - RNA, 21 nt, Artificial Sequence
  Synthetic
cuuuauggugcacaaaaauag

SEQ ID NO: 576529 - RNA, 22 nt, Artificial Sequence
  Synthetic
gcuuuauggugcacaaaaauag

SEQ ID NO: 576530 - RNA, 23 nt, Artificial Sequence
  Synthetic
agcuuuauggugcacaaaaauag

SEQ ID NO: 576531 - RNA, 24 nt, Artificial Sequence
  Synthetic
cagcuuuauggugcacaaaaauag

SEQ ID NO: 576532 - RNA, 18 nt, Artificial Sequence
  Synthetic
gauuucacuuaaaaauag

SEQ ID NO: 576533 - RNA, 19 nt, Artificial Sequence
  Synthetic
ggauuucacuuaaaaauag

SEQ ID NO: 576534 - RNA, 20 nt, Artificial Sequence
  Synthetic
uggauuucacuuaaaaauag

SEQ ID NO: 576535 - RNA, 21 nt, Artificial Sequence
  Synthetic
uuggauuucacuuaaaaauag

SEQ ID NO: 576536 - RNA, 22 nt, Artificial Sequence
  Synthetic
uuuggauuucacuuaaaaauag

SEQ ID NO: 576537 - RNA, 23 nt, Artificial Sequence
  Synthetic
uuuuggauuucacuuaaaaauag

SEQ ID NO: 576538 - RNA, 24 nt, Artificial Sequence
  Synthetic
guuuuggauuucacuuaaaaauag

SEQ ID NO: 576539 - RNA, 18 nt, Artificial Sequence
  Synthetic
aaaugaagcccaaaauag

SEQ ID NO: 576540 - RNA, 19 nt, Artificial Sequence
  Synthetic
gaaaugaagcccaaaauag

SEQ ID NO: 576541 - RNA, 20 nt, Artificial Sequence
  Synthetic
ggaaaugaagcccaaaauag

SEQ ID NO: 576542 - RNA, 21 nt, Artificial Sequence
  Synthetic
gggaaaugaagcccaaaauag

SEQ ID NO: 576543 - RNA, 22 nt, Artificial Sequence
  Synthetic
agggaaaugaagcccaaaauag

SEQ ID NO: 576544 - RNA, 23 nt, Artificial Sequence
  Synthetic
aagggaaaugaagcccaaaauag

SEQ ID NO: 576545 - RNA, 24 nt, Artificial Sequence
  Synthetic
uaagggaaaugaagcccaaaauag

SEQ ID NO: 576546 - RNA, 18 nt, Artificial Sequence
  Synthetic
aaaucaagcucaaaauag

SEQ ID NO: 576547 - RNA, 19 nt, Artificial Sequence
  Synthetic
aaaaucaagcucaaaauag

SEQ ID NO: 576548 - RNA, 20 nt, Artificial Sequence
  Synthetic
gaaaaucaagcucaaaauag

SEQ ID NO: 576549 - RNA, 21 nt, Artificial Sequence
  Synthetic
agaaaaucaagcucaaaauag

SEQ ID NO: 576550 - RNA, 22 nt, Artificial Sequence
  Synthetic
cagaaaaucaagcucaaaauag

SEQ ID NO: 576551 - RNA, 23 nt, Artificial Sequence
  Synthetic
acagaaaaucaagcucaaaauag

SEQ ID NO: 576552 - RNA, 24 nt, Artificial Sequence
  Synthetic
gacagaaaaucaagcucaaaauag

SEQ ID NO: 576553 - RNA, 18 nt, Artificial Sequence
  Synthetic
cuuuauuucugaaaauag

SEQ ID NO: 576554 - RNA, 19 nt, Artificial Sequence
  Synthetic
ucuuuauuucugaaaauag

SEQ ID NO: 576555 - RNA, 20 nt, Artificial Sequence
  Synthetic
cucuuuauuucugaaaauag

SEQ ID NO: 576556 - RNA, 21 nt, Artificial Sequence
  Synthetic
acucuuuauuucugaaaauag

SEQ ID NO: 576557 - RNA, 22 nt, Artificial Sequence
  Synthetic
aacucuuuauuucugaaaauag

SEQ ID NO: 576558 - RNA, 23 nt, Artificial Sequence
  Synthetic
uaacucuuuauuucugaaaauag

SEQ ID NO: 576559 - RNA, 24 nt, Artificial Sequence
  Synthetic
auaacucuuuauuucugaaaauag

SEQ ID NO: 576560 - RNA, 18 nt, Artificial Sequence
  Synthetic
acuucaaguuuaaaauag

SEQ ID NO: 576561 - RNA, 19 nt, Artificial Sequence
  Synthetic
aacuucaaguuuaaaauag

SEQ ID NO: 576562 - RNA, 20 nt, Artificial Sequence
  Synthetic
aaacuucaaguuuaaaauag

SEQ ID NO: 576563 - RNA, 21 nt, Artificial Sequence
  Synthetic
caaacuucaaguuuaaaauag

SEQ ID NO: 576564 - RNA, 22 nt, Artificial Sequence
  Synthetic
gcaaacuucaaguuuaaaauag

SEQ ID NO: 576565 - RNA, 23 nt, Artificial Sequence
  Synthetic
agcaaacuucaaguuuaaaauag

SEQ ID NO: 576566 - RNA, 24 nt, Artificial Sequence
  Synthetic
aagcaaacuucaaguuuaaaauag

SEQ ID NO: 576567 - RNA, 18 nt, Artificial Sequence
  Synthetic
uagaaaaggaacaaauag

SEQ ID NO: 576568 - RNA, 19 nt, Artificial Sequence
  Synthetic
auagaaaaggaacaaauag

SEQ ID NO: 576569 - RNA, 20 nt, Artificial Sequence
  Synthetic
gauagaaaaggaacaaauag

SEQ ID NO: 576570 - RNA, 21 nt, Artificial Sequence
  Synthetic
agauagaaaaggaacaaauag

SEQ ID NO: 576571 - RNA, 22 nt, Artificial Sequence
  Synthetic
gagauagaaaaggaacaaauag

SEQ ID NO: 576572 - RNA, 23 nt, Artificial Sequence
  Synthetic
agagauagaaaaggaacaaauag

SEQ ID NO: 576573 - RNA, 24 nt, Artificial Sequence
  Synthetic
gagagauagaaaaggaacaaauag

SEQ ID NO: 576574 - RNA, 18 nt, Artificial Sequence
  Synthetic
cauucuuguaacaaauag

SEQ ID NO: 576575 - RNA, 19 nt, Artificial Sequence
  Synthetic
acauucuuguaacaaauag

SEQ ID NO: 576576 - RNA, 20 nt, Artificial Sequence
  Synthetic
uacauucuuguaacaaauag

SEQ ID NO: 576577 - RNA, 21 nt, Artificial Sequence
  Synthetic
guacauucuuguaacaaauag

SEQ ID NO: 576578 - RNA, 22 nt, Artificial Sequence
  Synthetic
aguacauucuuguaacaaauag

SEQ ID NO: 576579 - RNA, 23 nt, Artificial Sequence
  Synthetic
gaguacauucuuguaacaaauag

SEQ ID NO: 576580 - RNA, 24 nt, Artificial Sequence
  Synthetic
agaguacauucuuguaacaaauag

SEQ ID NO: 576581 - RNA, 18 nt, Artificial Sequence
  Synthetic
auaggauuagacaaauag

SEQ ID NO: 576582 - RNA, 19 nt, Artificial Sequence
  Synthetic
gauaggauuagacaaauag

SEQ ID NO: 576583 - RNA, 20 nt, Artificial Sequence
  Synthetic
agauaggauuagacaaauag

SEQ ID NO: 576584 - RNA, 21 nt, Artificial Sequence
  Synthetic
uagauaggauuagacaaauag

SEQ ID NO: 576585 - RNA, 22 nt, Artificial Sequence
  Synthetic
auagauaggauuagacaaauag

SEQ ID NO: 576586 - RNA, 23 nt, Artificial Sequence
  Synthetic
uauagauaggauuagacaaauag

SEQ ID NO: 576587 - RNA, 24 nt, Artificial Sequence
  Synthetic
auauagauaggauuagacaaauag

SEQ ID NO: 576588 - RNA, 18 nt, Artificial Sequence
  Synthetic
uggcauugugacaaauag

SEQ ID NO: 576589 - RNA, 19 nt, Artificial Sequence
  Synthetic
auggcauugugacaaauag

SEQ ID NO: 576590 - RNA, 20 nt, Artificial Sequence
  Synthetic
uauggcauugugacaaauag

SEQ ID NO: 576591 - RNA, 21 nt, Artificial Sequence
  Synthetic
auauggcauugugacaaauag

SEQ ID NO: 576592 - RNA, 22 nt, Artificial Sequence
  Synthetic
cauauggcauugugacaaauag

SEQ ID NO: 576593 - RNA, 23 nt, Artificial Sequence
  Synthetic
acauauggcauugugacaaauag

SEQ ID NO: 576594 - RNA, 24 nt, Artificial Sequence
  Synthetic
uacauauggcauugugacaaauag

SEQ ID NO: 576595 - RNA, 18 nt, Artificial Sequence
  Synthetic
ccucagccucccaaauag

SEQ ID NO: 576596 - RNA, 19 nt, Artificial Sequence
  Synthetic
gccucagccucccaaauag

SEQ ID NO: 576597 - RNA, 20 nt, Artificial Sequence
  Synthetic
ugccucagccucccaaauag

SEQ ID NO: 576598 - RNA, 21 nt, Artificial Sequence
  Synthetic
cugccucagccucccaaauag

SEQ ID NO: 576599 - RNA, 22 nt, Artificial Sequence
  Synthetic
ccugccucagccucccaaauag

SEQ ID NO: 576600 - RNA, 23 nt, Artificial Sequence
  Synthetic
uccugccucagccucccaaauag

SEQ ID NO: 576601 - RNA, 24 nt, Artificial Sequence
  Synthetic
cuccugccucagccucccaaauag

SEQ ID NO: 576602 - RNA, 18 nt, Artificial Sequence
  Synthetic
augguuguuuucaaauag

SEQ ID NO: 576603 - RNA, 19 nt, Artificial Sequence
  Synthetic
uaugguuguuuucaaauag

SEQ ID NO: 576604 - RNA, 20 nt, Artificial Sequence
  Synthetic
auaugguuguuuucaaauag

SEQ ID NO: 576605 - RNA, 21 nt, Artificial Sequence
  Synthetic
gauaugguuguuuucaaauag

SEQ ID NO: 576606 - RNA, 22 nt, Artificial Sequence
  Synthetic
ugauaugguuguuuucaaauag

SEQ ID NO: 576607 - RNA, 23 nt, Artificial Sequence
  Synthetic
uugauaugguuguuuucaaauag

SEQ ID NO: 576608 - RNA, 24 nt, Artificial Sequence
  Synthetic
guugauaugguuguuuucaaauag

SEQ ID NO: 576609 - RNA, 18 nt, Artificial Sequence
  Synthetic
agacauaaacagaaauag

SEQ ID NO: 576610 - RNA, 19 nt, Artificial Sequence
  Synthetic
cagacauaaacagaaauag

SEQ ID NO: 576611 - RNA, 20 nt, Artificial Sequence
  Synthetic
ucagacauaaacagaaauag

SEQ ID NO: 576612 - RNA, 21 nt, Artificial Sequence
  Synthetic
uucagacauaaacagaaauag

SEQ ID NO: 576613 - RNA, 22 nt, Artificial Sequence
  Synthetic
cuucagacauaaacagaaauag

SEQ ID NO: 576614 - RNA, 23 nt, Artificial Sequence
  Synthetic
gcuucagacauaaacagaaauag

SEQ ID NO: 576615 - RNA, 24 nt, Artificial Sequence
  Synthetic
agcuucagacauaaacagaaauag

SEQ ID NO: 576616 - RNA, 18 nt, Artificial Sequence
  Synthetic
uaaaaacacgagaaauag

SEQ ID NO: 576617 - RNA, 19 nt, Artificial Sequence
  Synthetic
cuaaaaacacgagaaauag

SEQ ID NO: 576618 - RNA, 20 nt, Artificial Sequence
  Synthetic
acuaaaaacacgagaaauag

SEQ ID NO: 576619 - RNA, 21 nt, Artificial Sequence
  Synthetic
uacuaaaaacacgagaaauag

SEQ ID NO: 576620 - RNA, 22 nt, Artificial Sequence
  Synthetic
cuacuaaaaacacgagaaauag

SEQ ID NO: 576621 - RNA, 23 nt, Artificial Sequence
  Synthetic
ucuacuaaaaacacgagaaauag

SEQ ID NO: 576622 - RNA, 24 nt, Artificial Sequence
  Synthetic
cucuacuaaaaacacgagaaauag

SEQ ID NO: 576623 - RNA, 18 nt, Artificial Sequence
  Synthetic
uuacaguugacgaaauag

SEQ ID NO: 576624 - RNA, 19 nt, Artificial Sequence
  Synthetic
uuuacaguugacgaaauag

SEQ ID NO: 576625 - RNA, 20 nt, Artificial Sequence
  Synthetic
uuuuacaguugacgaaauag

SEQ ID NO: 576626 - RNA, 21 nt, Artificial Sequence
  Synthetic
auuuuacaguugacgaaauag

SEQ ID NO: 576627 - RNA, 22 nt, Artificial Sequence
  Synthetic
cauuuuacaguugacgaaauag

SEQ ID NO: 576628 - RNA, 23 nt, Artificial Sequence
  Synthetic
ccauuuuacaguugacgaaauag

SEQ ID NO: 576629 - RNA, 24 nt, Artificial Sequence
  Synthetic
cccauuuuacaguugacgaaauag

SEQ ID NO: 576630 - RNA, 18 nt, Artificial Sequence
  Synthetic
caugcaccggcgaaauag

SEQ ID NO: 576631 - RNA, 19 nt, Artificial Sequence
  Synthetic
gcaugcaccggcgaaauag

SEQ ID NO: 576632 - RNA, 20 nt, Artificial Sequence
  Synthetic
agcaugcaccggcgaaauag

SEQ ID NO: 576633 - RNA, 21 nt, Artificial Sequence
  Synthetic
cagcaugcaccggcgaaauag

SEQ ID NO: 576634 - RNA, 22 nt, Artificial Sequence
  Synthetic
gcagcaugcaccggcgaaauag

SEQ ID NO: 576635 - RNA, 23 nt, Artificial Sequence
  Synthetic
agcagcaugcaccggcgaaauag

SEQ ID NO: 576636 - RNA, 24 nt, Artificial Sequence
  Synthetic
gagcagcaugcaccggcgaaauag

SEQ ID NO: 576637 - RNA, 18 nt, Artificial Sequence
  Synthetic
auaaauacagggaaauag

SEQ ID NO: 576638 - RNA, 19 nt, Artificial Sequence
  Synthetic
gauaaauacagggaaauag

SEQ ID NO: 576639 - RNA, 20 nt, Artificial Sequence
  Synthetic
agauaaauacagggaaauag

SEQ ID NO: 576640 - RNA, 21 nt, Artificial Sequence
  Synthetic
aagauaaauacagggaaauag

SEQ ID NO: 576641 - RNA, 22 nt, Artificial Sequence
  Synthetic
aaagauaaauacagggaaauag

SEQ ID NO: 576642 - RNA, 23 nt, Artificial Sequence
  Synthetic
aaaagauaaauacagggaaauag

SEQ ID NO: 576643 - RNA, 24 nt, Artificial Sequence
  Synthetic
gaaaagauaaauacagggaaauag

SEQ ID NO: 576644 - RNA, 18 nt, Artificial Sequence
  Synthetic
auggaauagaugaaauag

SEQ ID NO: 576645 - RNA, 19 nt, Artificial Sequence
  Synthetic
uauggaauagaugaaauag

SEQ ID NO: 576646 - RNA, 20 nt, Artificial Sequence
  Synthetic
auauggaauagaugaaauag

SEQ ID NO: 576647 - RNA, 21 nt, Artificial Sequence
  Synthetic
cauauggaauagaugaaauag

SEQ ID NO: 576648 - RNA, 22 nt, Artificial Sequence
  Synthetic
ccauauggaauagaugaaauag

SEQ ID NO: 576649 - RNA, 23 nt, Artificial Sequence
  Synthetic
gccauauggaauagaugaaauag

SEQ ID NO: 576650 - RNA, 24 nt, Artificial Sequence
  Synthetic
ugccauauggaauagaugaaauag

SEQ ID NO: 576651 - RNA, 18 nt, Artificial Sequence
  Synthetic
acacacuaacugaaauag

SEQ ID NO: 576652 - RNA, 19 nt, Artificial Sequence
  Synthetic
aacacacuaacugaaauag

SEQ ID NO: 576653 - RNA, 20 nt, Artificial Sequence
  Synthetic
aaacacacuaacugaaauag

SEQ ID NO: 576654 - RNA, 21 nt, Artificial Sequence
  Synthetic
aaaacacacuaacugaaauag

SEQ ID NO: 576655 - RNA, 22 nt, Artificial Sequence
  Synthetic
gaaaacacacuaacugaaauag

SEQ ID NO: 576656 - RNA, 23 nt, Artificial Sequence
  Synthetic
ggaaaacacacuaacugaaauag

SEQ ID NO: 576657 - RNA, 24 nt, Artificial Sequence
  Synthetic
uggaaaacacacuaacugaaauag

SEQ ID NO: 576658 - RNA, 18 nt, Artificial Sequence
  Synthetic
gauacuacugugaaauag

SEQ ID NO: 576659 - RNA, 19 nt, Artificial Sequence
  Synthetic
agauacuacugugaaauag

SEQ ID NO: 576660 - RNA, 20 nt, Artificial Sequence
  Synthetic
aagauacuacugugaaauag

SEQ ID NO: 576661 - RNA, 21 nt, Artificial Sequence
  Synthetic
gaagauacuacugugaaauag

SEQ ID NO: 576662 - RNA, 22 nt, Artificial Sequence
  Synthetic
agaagauacuacugugaaauag

SEQ ID NO: 576663 - RNA, 23 nt, Artificial Sequence
  Synthetic
aagaagauacuacugugaaauag

SEQ ID NO: 576664 - RNA, 24 nt, Artificial Sequence
  Synthetic
gaagaagauacuacugugaaauag

SEQ ID NO: 576665 - RNA, 18 nt, Artificial Sequence
  Synthetic
uauaugcccaauaaauag

SEQ ID NO: 576666 - RNA, 19 nt, Artificial Sequence
  Synthetic
cuauaugcccaauaaauag

SEQ ID NO: 576667 - RNA, 20 nt, Artificial Sequence
  Synthetic
acuauaugcccaauaaauag

SEQ ID NO: 576668 - RNA, 21 nt, Artificial Sequence
  Synthetic
gacuauaugcccaauaaauag

SEQ ID NO: 576669 - RNA, 22 nt, Artificial Sequence
  Synthetic
agacuauaugcccaauaaauag

SEQ ID NO: 576670 - RNA, 23 nt, Artificial Sequence
  Synthetic
cagacuauaugcccaauaaauag

SEQ ID NO: 576671 - RNA, 24 nt, Artificial Sequence
  Synthetic
ucagacuauaugcccaauaaauag

SEQ ID NO: 576672 - RNA, 18 nt, Artificial Sequence
  Synthetic
auuuugccuuauaaauag

SEQ ID NO: 576673 - RNA, 19 nt, Artificial Sequence
  Synthetic
aauuuugccuuauaaauag

SEQ ID NO: 576674 - RNA, 20 nt, Artificial Sequence
  Synthetic
aaauuuugccuuauaaauag

SEQ ID NO: 576675 - RNA, 21 nt, Artificial Sequence
  Synthetic
gaaauuuugccuuauaaauag

SEQ ID NO: 576676 - RNA, 22 nt, Artificial Sequence
  Synthetic
agaaauuuugccuuauaaauag

SEQ ID NO: 576677 - RNA, 23 nt, Artificial Sequence
  Synthetic
uagaaauuuugccuuauaaauag

SEQ ID NO: 576678 - RNA, 24 nt, Artificial Sequence
  Synthetic
auagaaauuuugccuuauaaauag

SEQ ID NO: 576679 - RNA, 18 nt, Artificial Sequence
  Synthetic
aacaugagcucuaaauag

SEQ ID NO: 576680 - RNA, 19 nt, Artificial Sequence
  Synthetic
aaacaugagcucuaaauag

SEQ ID NO: 576681 - RNA, 20 nt, Artificial Sequence
  Synthetic
uaaacaugagcucuaaauag

SEQ ID NO: 576682 - RNA, 21 nt, Artificial Sequence
  Synthetic
uuaaacaugagcucuaaauag

SEQ ID NO: 576683 - RNA, 22 nt, Artificial Sequence
  Synthetic
auuaaacaugagcucuaaauag

SEQ ID NO: 576684 - RNA, 23 nt, Artificial Sequence
  Synthetic
cauuaaacaugagcucuaaauag

SEQ ID NO: 576685 - RNA, 24 nt, Artificial Sequence
  Synthetic
ucauuaaacaugagcucuaaauag

SEQ ID NO: 576686 - RNA, 18 nt, Artificial Sequence
  Synthetic
accagaucuuguaaauag

SEQ ID NO: 576687 - RNA, 19 nt, Artificial Sequence
  Synthetic
uaccagaucuuguaaauag

SEQ ID NO: 576688 - RNA, 20 nt, Artificial Sequence
  Synthetic
auaccagaucuuguaaauag

SEQ ID NO: 576689 - RNA, 21 nt, Artificial Sequence
  Synthetic
uauaccagaucuuguaaauag

SEQ ID NO: 576690 - RNA, 22 nt, Artificial Sequence
  Synthetic
uuauaccagaucuuguaaauag

SEQ ID NO: 576691 - RNA, 23 nt, Artificial Sequence
  Synthetic
uuuauaccagaucuuguaaauag

SEQ ID NO: 576692 - RNA, 24 nt, Artificial Sequence
  Synthetic
uuuuauaccagaucuuguaaauag

SEQ ID NO: 576693 - RNA, 18 nt, Artificial Sequence
  Synthetic
gaaaaugguauuaaauag

SEQ ID NO: 576694 - RNA, 19 nt, Artificial Sequence
  Synthetic
ugaaaaugguauuaaauag

SEQ ID NO: 576695 - RNA, 20 nt, Artificial Sequence
  Synthetic
gugaaaaugguauuaaauag

SEQ ID NO: 576696 - RNA, 21 nt, Artificial Sequence
  Synthetic
ggugaaaaugguauuaaauag

SEQ ID NO: 576697 - RNA, 22 nt, Artificial Sequence
  Synthetic
aggugaaaaugguauuaaauag

SEQ ID NO: 576698 - RNA, 23 nt, Artificial Sequence
  Synthetic
aaggugaaaaugguauuaaauag

SEQ ID NO: 576699 - RNA, 24 nt, Artificial Sequence
  Synthetic
aaaggugaaaaugguauuaaauag

SEQ ID NO: 576700 - RNA, 18 nt, Artificial Sequence
  Synthetic
agcuguagcuuuaaauag

SEQ ID NO: 576701 - RNA, 19 nt, Artificial Sequence
  Synthetic
cagcuguagcuuuaaauag

SEQ ID NO: 576702 - RNA, 20 nt, Artificial Sequence
  Synthetic
ccagcuguagcuuuaaauag

SEQ ID NO: 576703 - RNA, 21 nt, Artificial Sequence
  Synthetic
accagcuguagcuuuaaauag

SEQ ID NO: 576704 - RNA, 22 nt, Artificial Sequence
  Synthetic
caccagcuguagcuuuaaauag

SEQ ID NO: 576705 - RNA, 23 nt, Artificial Sequence
  Synthetic
ucaccagcuguagcuuuaaauag

SEQ ID NO: 576706 - RNA, 24 nt, Artificial Sequence
  Synthetic
uucaccagcuguagcuuuaaauag

SEQ ID NO: 576707 - RNA, 18 nt, Artificial Sequence
  Synthetic
aacucauuguuuaaauag

SEQ ID NO: 576708 - RNA, 19 nt, Artificial Sequence
  Synthetic
aaacucauuguuuaaauag

SEQ ID NO: 576709 - RNA, 20 nt, Artificial Sequence
  Synthetic
uaaacucauuguuuaaauag

SEQ ID NO: 576710 - RNA, 21 nt, Artificial Sequence
  Synthetic
guaaacucauuguuuaaauag

SEQ ID NO: 576711 - RNA, 22 nt, Artificial Sequence
  Synthetic
uguaaacucauuguuuaaauag

SEQ ID NO: 576712 - RNA, 23 nt, Artificial Sequence
  Synthetic
auguaaacucauuguuuaaauag

SEQ ID NO: 576713 - RNA, 24 nt, Artificial Sequence
  Synthetic
uauguaaacucauuguuuaaauag

SEQ ID NO: 576714 - RNA, 18 nt, Artificial Sequence
  Synthetic
uuuuuucauuuuaaauag

SEQ ID NO: 576715 - RNA, 19 nt, Artificial Sequence
  Synthetic
uuuuuuucauuuuaaauag

SEQ ID NO: 576716 - RNA, 20 nt, Artificial Sequence
  Synthetic
auuuuuuucauuuuaaauag

SEQ ID NO: 576717 - RNA, 21 nt, Artificial Sequence
  Synthetic
uauuuuuuucauuuuaaauag

SEQ ID NO: 576718 - RNA, 22 nt, Artificial Sequence
  Synthetic
cuauuuuuuucauuuuaaauag

SEQ ID NO: 576719 - RNA, 23 nt, Artificial Sequence
  Synthetic
ucuauuuuuuucauuuuaaauag

SEQ ID NO: 576720 - RNA, 24 nt, Artificial Sequence
  Synthetic
uucuauuuuuuucauuuuaaauag

SEQ ID NO: 576721 - RNA, 18 nt, Artificial Sequence
  Synthetic
ugcaugaaaacacaauag

SEQ ID NO: 576722 - RNA, 19 nt, Artificial Sequence
  Synthetic
cugcaugaaaacacaauag

SEQ ID NO: 576723 - RNA, 20 nt, Artificial Sequence
  Synthetic
acugcaugaaaacacaauag

SEQ ID NO: 576724 - RNA, 21 nt, Artificial Sequence
  Synthetic
aacugcaugaaaacacaauag

SEQ ID NO: 576725 - RNA, 22 nt, Artificial Sequence
  Synthetic
aaacugcaugaaaacacaauag

SEQ ID NO: 576726 - RNA, 23 nt, Artificial Sequence
  Synthetic
aaaacugcaugaaaacacaauag

SEQ ID NO: 576727 - RNA, 24 nt, Artificial Sequence
  Synthetic
caaaacugcaugaaaacacaauag

SEQ ID NO: 576728 - RNA, 18 nt, Artificial Sequence
  Synthetic
aaggcauauacccaauag

SEQ ID NO: 576729 - RNA, 19 nt, Artificial Sequence
  Synthetic
uaaggcauauacccaauag

SEQ ID NO: 576730 - RNA, 20 nt, Artificial Sequence
  Synthetic
auaaggcauauacccaauag

SEQ ID NO: 576731 - RNA, 21 nt, Artificial Sequence
  Synthetic
cauaaggcauauacccaauag

SEQ ID NO: 576732 - RNA, 22 nt, Artificial Sequence
  Synthetic
ccauaaggcauauacccaauag

SEQ ID NO: 576733 - RNA, 23 nt, Artificial Sequence
  Synthetic
uccauaaggcauauacccaauag

SEQ ID NO: 576734 - RNA, 24 nt, Artificial Sequence
  Synthetic
uuccauaaggcauauacccaauag

SEQ ID NO: 576735 - RNA, 18 nt, Artificial Sequence
  Synthetic
aaaggaagacagcaauag

SEQ ID NO: 576736 - RNA, 19 nt, Artificial Sequence
  Synthetic
caaaggaagacagcaauag

SEQ ID NO: 576737 - RNA, 20 nt, Artificial Sequence
  Synthetic
acaaaggaagacagcaauag

SEQ ID NO: 576738 - RNA, 21 nt, Artificial Sequence
  Synthetic
cacaaaggaagacagcaauag

SEQ ID NO: 576739 - RNA, 22 nt, Artificial Sequence
  Synthetic
acacaaaggaagacagcaauag

SEQ ID NO: 576740 - RNA, 23 nt, Artificial Sequence
  Synthetic
aacacaaaggaagacagcaauag

SEQ ID NO: 576741 - RNA, 24 nt, Artificial Sequence
  Synthetic
aaacacaaaggaagacagcaauag

SEQ ID NO: 576742 - RNA, 18 nt, Artificial Sequence
  Synthetic
gggcuucuuaggcaauag

SEQ ID NO: 576743 - RNA, 19 nt, Artificial Sequence
  Synthetic
ugggcuucuuaggcaauag

SEQ ID NO: 576744 - RNA, 20 nt, Artificial Sequence
  Synthetic
uugggcuucuuaggcaauag

SEQ ID NO: 576745 - RNA, 21 nt, Artificial Sequence
  Synthetic
guugggcuucuuaggcaauag

SEQ ID NO: 576746 - RNA, 22 nt, Artificial Sequence
  Synthetic
uguugggcuucuuaggcaauag

SEQ ID NO: 576747 - RNA, 23 nt, Artificial Sequence
  Synthetic
uuguugggcuucuuaggcaauag

SEQ ID NO: 576748 - RNA, 24 nt, Artificial Sequence
  Synthetic
uuuguugggcuucuuaggcaauag

SEQ ID NO: 576749 - RNA, 18 nt, Artificial Sequence
  Synthetic
cuaacaguguggcaauag

SEQ ID NO: 576750 - RNA, 19 nt, Artificial Sequence
  Synthetic
acuaacaguguggcaauag

SEQ ID NO: 576751 - RNA, 20 nt, Artificial Sequence
  Synthetic
aacuaacaguguggcaauag

SEQ ID NO: 576752 - RNA, 21 nt, Artificial Sequence
  Synthetic
aaacuaacaguguggcaauag

SEQ ID NO: 576753 - RNA, 22 nt, Artificial Sequence
  Synthetic
caaacuaacaguguggcaauag

SEQ ID NO: 576754 - RNA, 23 nt, Artificial Sequence
  Synthetic
acaaacuaacaguguggcaauag

SEQ ID NO: 576755 - RNA, 24 nt, Artificial Sequence
  Synthetic
gacaaacuaacaguguggcaauag

SEQ ID NO: 576756 - RNA, 18 nt, Artificial Sequence
  Synthetic
gucaauguguggcaauag

SEQ ID NO: 576757 - RNA, 19 nt, Artificial Sequence
  Synthetic
cgucaauguguggcaauag

SEQ ID NO: 576758 - RNA, 20 nt, Artificial Sequence
  Synthetic
acgucaauguguggcaauag

SEQ ID NO: 576759 - RNA, 21 nt, Artificial Sequence
  Synthetic
uacgucaauguguggcaauag

SEQ ID NO: 576760 - RNA, 22 nt, Artificial Sequence
  Synthetic
auacgucaauguguggcaauag

SEQ ID NO: 576761 - RNA, 23 nt, Artificial Sequence
  Synthetic
aauacgucaauguguggcaauag

SEQ ID NO: 576762 - RNA, 24 nt, Artificial Sequence
  Synthetic
gaauacgucaauguguggcaauag

SEQ ID NO: 576763 - RNA, 18 nt, Artificial Sequence
  Synthetic
acuaauaaugcucaauag

SEQ ID NO: 576764 - RNA, 19 nt, Artificial Sequence
  Synthetic
gacuaauaaugcucaauag

SEQ ID NO: 576765 - RNA, 20 nt, Artificial Sequence
  Synthetic
agacuaauaaugcucaauag

SEQ ID NO: 576766 - RNA, 21 nt, Artificial Sequence
  Synthetic
gagacuaauaaugcucaauag

SEQ ID NO: 576767 - RNA, 22 nt, Artificial Sequence
  Synthetic
ggagacuaauaaugcucaauag

SEQ ID NO: 576768 - RNA, 23 nt, Artificial Sequence
  Synthetic
cggagacuaauaaugcucaauag

SEQ ID NO: 576769 - RNA, 24 nt, Artificial Sequence
  Synthetic
acggagacuaauaaugcucaauag

SEQ ID NO: 576770 - RNA, 18 nt, Artificial Sequence
  Synthetic
auuucuguacuucaauag

SEQ ID NO: 576771 - RNA, 19 nt, Artificial Sequence
  Synthetic
aauuucuguacuucaauag

SEQ ID NO: 576772 - RNA, 20 nt, Artificial Sequence
  Synthetic
aaauuucuguacuucaauag

SEQ ID NO: 576773 - RNA, 21 nt, Artificial Sequence
  Synthetic
gaaauuucuguacuucaauag

SEQ ID NO: 576774 - RNA, 22 nt, Artificial Sequence
  Synthetic
ugaaauuucuguacuucaauag

SEQ ID NO: 576775 - RNA, 23 nt, Artificial Sequence
  Synthetic
augaaauuucuguacuucaauag

SEQ ID NO: 576776 - RNA, 24 nt, Artificial Sequence
  Synthetic
aaugaaauuucuguacuucaauag

SEQ ID NO: 576777 - RNA, 18 nt, Artificial Sequence
  Synthetic
gagggucaggaagaauag

SEQ ID NO: 576778 - RNA, 19 nt, Artificial Sequence
  Synthetic
ggagggucaggaagaauag

SEQ ID NO: 576779 - RNA, 20 nt, Artificial Sequence
  Synthetic
aggagggucaggaagaauag

SEQ ID NO: 576780 - RNA, 21 nt, Artificial Sequence
  Synthetic
aaggagggucaggaagaauag

SEQ ID NO: 576781 - RNA, 22 nt, Artificial Sequence
  Synthetic
aaaggagggucaggaagaauag

SEQ ID NO: 576782 - RNA, 23 nt, Artificial Sequence
  Synthetic
caaaggagggucaggaagaauag

SEQ ID NO: 576783 - RNA, 24 nt, Artificial Sequence
  Synthetic
ucaaaggagggucaggaagaauag

SEQ ID NO: 576784 - RNA, 18 nt, Artificial Sequence
  Synthetic
ucuauuuucacagaauag

SEQ ID NO: 576785 - RNA, 19 nt, Artificial Sequence
  Synthetic
aucuauuuucacagaauag

SEQ ID NO: 576786 - RNA, 20 nt, Artificial Sequence
  Synthetic
uaucuauuuucacagaauag

SEQ ID NO: 576787 - RNA, 21 nt, Artificial Sequence
  Synthetic
guaucuauuuucacagaauag

SEQ ID NO: 576788 - RNA, 22 nt, Artificial Sequence
  Synthetic
gguaucuauuuucacagaauag

SEQ ID NO: 576789 - RNA, 23 nt, Artificial Sequence
  Synthetic
ggguaucuauuuucacagaauag

SEQ ID NO: 576790 - RNA, 24 nt, Artificial Sequence
  Synthetic
uggguaucuauuuucacagaauag

SEQ ID NO: 576791 - RNA, 18 nt, Artificial Sequence
  Synthetic
ugaccucuuugagaauag

SEQ ID NO: 576792 - RNA, 19 nt, Artificial Sequence
  Synthetic
gugaccucuuugagaauag

SEQ ID NO: 576793 - RNA, 20 nt, Artificial Sequence
  Synthetic
ugugaccucuuugagaauag

SEQ ID NO: 576794 - RNA, 21 nt, Artificial Sequence
  Synthetic
uugugaccucuuugagaauag

SEQ ID NO: 576795 - RNA, 22 nt, Artificial Sequence
  Synthetic
auugugaccucuuugagaauag

SEQ ID NO: 576796 - RNA, 23 nt, Artificial Sequence
  Synthetic
cauugugaccucuuugagaauag

SEQ ID NO: 576797 - RNA, 24 nt, Artificial Sequence
  Synthetic
ccauugugaccucuuugagaauag

SEQ ID NO: 576798 - RNA, 18 nt, Artificial Sequence
  Synthetic
auucuauaguaggaauag

SEQ ID NO: 576799 - RNA, 19 nt, Artificial Sequence
  Synthetic
uauucuauaguaggaauag

SEQ ID NO: 576800 - RNA, 20 nt, Artificial Sequence
  Synthetic
uuauucuauaguaggaauag

SEQ ID NO: 576801 - RNA, 21 nt, Artificial Sequence
  Synthetic
uuuauucuauaguaggaauag

SEQ ID NO: 576802 - RNA, 22 nt, Artificial Sequence
  Synthetic
uuuuauucuauaguaggaauag

SEQ ID NO: 576803 - RNA, 23 nt, Artificial Sequence
  Synthetic
cuuuuauucuauaguaggaauag

SEQ ID NO: 576804 - RNA, 24 nt, Artificial Sequence
  Synthetic
gcuuuuauucuauaguaggaauag

SEQ ID NO: 576805 - RNA, 18 nt, Artificial Sequence
  Synthetic
guaauaucagcggaauag

SEQ ID NO: 576806 - RNA, 19 nt, Artificial Sequence
  Synthetic
aguaauaucagcggaauag

SEQ ID NO: 576807 - RNA, 20 nt, Artificial Sequence
  Synthetic
aaguaauaucagcggaauag

SEQ ID NO: 576808 - RNA, 21 nt, Artificial Sequence
  Synthetic
aaaguaauaucagcggaauag

SEQ ID NO: 576809 - RNA, 22 nt, Artificial Sequence
  Synthetic
gaaaguaauaucagcggaauag

SEQ ID NO: 576810 - RNA, 23 nt, Artificial Sequence
  Synthetic
ugaaaguaauaucagcggaauag

SEQ ID NO: 576811 - RNA, 24 nt, Artificial Sequence
  Synthetic
augaaaguaauaucagcggaauag

SEQ ID NO: 576812 - RNA, 18 nt, Artificial Sequence
  Synthetic
acugcucuagcggaauag

SEQ ID NO: 576813 - RNA, 19 nt, Artificial Sequence
  Synthetic
cacugcucuagcggaauag

SEQ ID NO: 576814 - RNA, 20 nt, Artificial Sequence
  Synthetic
gcacugcucuagcggaauag

SEQ ID NO: 576815 - RNA, 21 nt, Artificial Sequence
  Synthetic
agcacugcucuagcggaauag

SEQ ID NO: 576816 - RNA, 22 nt, Artificial Sequence
  Synthetic
aagcacugcucuagcggaauag

SEQ ID NO: 576817 - RNA, 23 nt, Artificial Sequence
  Synthetic
gaagcacugcucuagcggaauag

SEQ ID NO: 576818 - RNA, 24 nt, Artificial Sequence
  Synthetic
agaagcacugcucuagcggaauag

SEQ ID NO: 576819 - RNA, 18 nt, Artificial Sequence
  Synthetic
guuugccauauggaauag

SEQ ID NO: 576820 - RNA, 19 nt, Artificial Sequence
  Synthetic
aguuugccauauggaauag

SEQ ID NO: 576821 - RNA, 20 nt, Artificial Sequence
  Synthetic
caguuugccauauggaauag

SEQ ID NO: 576822 - RNA, 21 nt, Artificial Sequence
  Synthetic
acaguuugccauauggaauag

SEQ ID NO: 576823 - RNA, 22 nt, Artificial Sequence
  Synthetic
gacaguuugccauauggaauag

SEQ ID NO: 576824 - RNA, 23 nt, Artificial Sequence
  Synthetic
agacaguuugccauauggaauag

SEQ ID NO: 576825 - RNA, 24 nt, Artificial Sequence
  Synthetic
uagacaguuugccauauggaauag

SEQ ID NO: 576826 - RNA, 18 nt, Artificial Sequence
  Synthetic
gcuguaacucuugaauag

SEQ ID NO: 576827 - RNA, 19 nt, Artificial Sequence
  Synthetic
agcuguaacucuugaauag

SEQ ID NO: 576828 - RNA, 20 nt, Artificial Sequence
  Synthetic
uagcuguaacucuugaauag

SEQ ID NO: 576829 - RNA, 21 nt, Artificial Sequence
  Synthetic
uuagcuguaacucuugaauag

SEQ ID NO: 576830 - RNA, 22 nt, Artificial Sequence
  Synthetic
uuuagcuguaacucuugaauag

SEQ ID NO: 576831 - RNA, 23 nt, Artificial Sequence
  Synthetic
auuuagcuguaacucuugaauag

SEQ ID NO: 576832 - RNA, 24 nt, Artificial Sequence
  Synthetic
cauuuagcuguaacucuugaauag

SEQ ID NO: 576833 - RNA, 18 nt, Artificial Sequence
  Synthetic
acagcaaugcaauaauag

SEQ ID NO: 576834 - RNA, 19 nt, Artificial Sequence
  Synthetic
gacagcaaugcaauaauag

SEQ ID NO: 576835 - RNA, 20 nt, Artificial Sequence
  Synthetic
agacagcaaugcaauaauag

SEQ ID NO: 576836 - RNA, 21 nt, Artificial Sequence
  Synthetic
uagacagcaaugcaauaauag

SEQ ID NO: 576837 - RNA, 22 nt, Artificial Sequence
  Synthetic
auagacagcaaugcaauaauag

SEQ ID NO: 576838 - RNA, 23 nt, Artificial Sequence
  Synthetic
gauagacagcaaugcaauaauag

SEQ ID NO: 576839 - RNA, 24 nt, Artificial Sequence
  Synthetic
agauagacagcaaugcaauaauag

SEQ ID NO: 576840 - RNA, 18 nt, Artificial Sequence
  Synthetic
auccucauauaauaauag

SEQ ID NO: 576841 - RNA, 19 nt, Artificial Sequence
  Synthetic
aauccucauauaauaauag

SEQ ID NO: 576842 - RNA, 20 nt, Artificial Sequence
  Synthetic
aaauccucauauaauaauag

SEQ ID NO: 576843 - RNA, 21 nt, Artificial Sequence
  Synthetic
uaaauccucauauaauaauag

SEQ ID NO: 576844 - RNA, 22 nt, Artificial Sequence
  Synthetic
auaaauccucauauaauaauag

SEQ ID NO: 576845 - RNA, 23 nt, Artificial Sequence
  Synthetic
aauaaauccucauauaauaauag

SEQ ID NO: 576846 - RNA, 24 nt, Artificial Sequence
  Synthetic
aaauaaauccucauauaauaauag

SEQ ID NO: 576847 - RNA, 18 nt, Artificial Sequence
  Synthetic
ccuuaagagcuauaauag

SEQ ID NO: 576848 - RNA, 19 nt, Artificial Sequence
  Synthetic
uccuuaagagcuauaauag

SEQ ID NO: 576849 - RNA, 20 nt, Artificial Sequence
  Synthetic
uuccuuaagagcuauaauag

SEQ ID NO: 576850 - RNA, 21 nt, Artificial Sequence
  Synthetic
guuccuuaagagcuauaauag

SEQ ID NO: 576851 - RNA, 22 nt, Artificial Sequence
  Synthetic
aguuccuuaagagcuauaauag

SEQ ID NO: 576852 - RNA, 23 nt, Artificial Sequence
  Synthetic
gaguuccuuaagagcuauaauag

SEQ ID NO: 576853 - RNA, 24 nt, Artificial Sequence
  Synthetic
agaguuccuuaagagcuauaauag

SEQ ID NO: 576854 - RNA, 18 nt, Artificial Sequence
  Synthetic
gccuaauuccacuaauag

SEQ ID NO: 576855 - RNA, 19 nt, Artificial Sequence
  Synthetic
ugccuaauuccacuaauag

SEQ ID NO: 576856 - RNA, 20 nt, Artificial Sequence
  Synthetic
augccuaauuccacuaauag

SEQ ID NO: 576857 - RNA, 21 nt, Artificial Sequence
  Synthetic
gaugccuaauuccacuaauag

SEQ ID NO: 576858 - RNA, 22 nt, Artificial Sequence
  Synthetic
agaugccuaauuccacuaauag

SEQ ID NO: 576859 - RNA, 23 nt, Artificial Sequence
  Synthetic
cagaugccuaauuccacuaauag

SEQ ID NO: 576860 - RNA, 24 nt, Artificial Sequence
  Synthetic
gcagaugccuaauuccacuaauag

SEQ ID NO: 576861 - RNA, 18 nt, Artificial Sequence
  Synthetic
uggaaaaaacucuaauag

SEQ ID NO: 576862 - RNA, 19 nt, Artificial Sequence
  Synthetic
auggaaaaaacucuaauag

SEQ ID NO: 576863 - RNA, 20 nt, Artificial Sequence
  Synthetic
gauggaaaaaacucuaauag

SEQ ID NO: 576864 - RNA, 21 nt, Artificial Sequence
  Synthetic
ggauggaaaaaacucuaauag

SEQ ID NO: 576865 - RNA, 22 nt, Artificial Sequence
  Synthetic
gggauggaaaaaacucuaauag

SEQ ID NO: 576866 - RNA, 23 nt, Artificial Sequence
  Synthetic
agggauggaaaaaacucuaauag

SEQ ID NO: 576867 - RNA, 24 nt, Artificial Sequence
  Synthetic
uagggauggaaaaaacucuaauag

SEQ ID NO: 576868 - RNA, 18 nt, Artificial Sequence
  Synthetic
uaaguaguuucguaauag

SEQ ID NO: 576869 - RNA, 19 nt, Artificial Sequence
  Synthetic
cuaaguaguuucguaauag

SEQ ID NO: 576870 - RNA, 20 nt, Artificial Sequence
  Synthetic
ccuaaguaguuucguaauag

SEQ ID NO: 576871 - RNA, 21 nt, Artificial Sequence
  Synthetic
uccuaaguaguuucguaauag

SEQ ID NO: 576872 - RNA, 22 nt, Artificial Sequence
  Synthetic
uuccuaaguaguuucguaauag

SEQ ID NO: 576873 - RNA, 23 nt, Artificial Sequence
  Synthetic
uuuccuaaguaguuucguaauag

SEQ ID NO: 576874 - RNA, 24 nt, Artificial Sequence
  Synthetic
cuuuccuaaguaguuucguaauag

SEQ ID NO: 576875 - RNA, 18 nt, Artificial Sequence
  Synthetic
acucuucuuccuuaauag

SEQ ID NO: 576876 - RNA, 19 nt, Artificial Sequence
  Synthetic
aacucuucuuccuuaauag

SEQ ID NO: 576877 - RNA, 20 nt, Artificial Sequence
  Synthetic
aaacucuucuuccuuaauag

SEQ ID NO: 576878 - RNA, 21 nt, Artificial Sequence
  Synthetic
gaaacucuucuuccuuaauag

SEQ ID NO: 576879 - RNA, 22 nt, Artificial Sequence
  Synthetic
agaaacucuucuuccuuaauag

SEQ ID NO: 576880 - RNA, 23 nt, Artificial Sequence
  Synthetic
aagaaacucuucuuccuuaauag

SEQ ID NO: 576881 - RNA, 24 nt, Artificial Sequence
  Synthetic
uaagaaacucuucuuccuuaauag

SEQ ID NO: 576882 - RNA, 18 nt, Artificial Sequence
  Synthetic
auuaaaauguguuaauag

SEQ ID NO: 576883 - RNA, 19 nt, Artificial Sequence
  Synthetic
uauuaaaauguguuaauag

SEQ ID NO: 576884 - RNA, 20 nt, Artificial Sequence
  Synthetic
auauuaaaauguguuaauag

SEQ ID NO: 576885 - RNA, 21 nt, Artificial Sequence
  Synthetic
uauauuaaaauguguuaauag

SEQ ID NO: 576886 - RNA, 22 nt, Artificial Sequence
  Synthetic
cuauauuaaaauguguuaauag

SEQ ID NO: 576887 - RNA, 23 nt, Artificial Sequence
  Synthetic
acuauauuaaaauguguuaauag

SEQ ID NO: 576888 - RNA, 24 nt, Artificial Sequence
  Synthetic
aacuauauuaaaauguguuaauag

SEQ ID NO: 576889 - RNA, 18 nt, Artificial Sequence
  Synthetic
cuucuacauauuuaauag

SEQ ID NO: 576890 - RNA, 19 nt, Artificial Sequence
  Synthetic
gcuucuacauauuuaauag

SEQ ID NO: 576891 - RNA, 20 nt, Artificial Sequence
  Synthetic
agcuucuacauauuuaauag

SEQ ID NO: 576892 - RNA, 21 nt, Artificial Sequence
  Synthetic
uagcuucuacauauuuaauag

SEQ ID NO: 576893 - RNA, 22 nt, Artificial Sequence
  Synthetic
guagcuucuacauauuuaauag

SEQ ID NO: 576894 - RNA, 23 nt, Artificial Sequence
  Synthetic
uguagcuucuacauauuuaauag

SEQ ID NO: 576895 - RNA, 24 nt, Artificial Sequence
  Synthetic
guguagcuucuacauauuuaauag

SEQ ID NO: 576896 - RNA, 18 nt, Artificial Sequence
  Synthetic
auggaaacccaaacauag

SEQ ID NO: 576897 - RNA, 19 nt, Artificial Sequence
  Synthetic
aauggaaacccaaacauag

SEQ ID NO: 576898 - RNA, 20 nt, Artificial Sequence
  Synthetic
caauggaaacccaaacauag

SEQ ID NO: 576899 - RNA, 21 nt, Artificial Sequence
  Synthetic
ccaauggaaacccaaacauag

SEQ ID NO: 576900 - RNA, 22 nt, Artificial Sequence
  Synthetic
gccaauggaaacccaaacauag

SEQ ID NO: 576901 - RNA, 23 nt, Artificial Sequence
  Synthetic
ugccaauggaaacccaaacauag

SEQ ID NO: 576902 - RNA, 24 nt, Artificial Sequence
  Synthetic
augccaauggaaacccaaacauag

SEQ ID NO: 576903 - RNA, 18 nt, Artificial Sequence
  Synthetic
gaaguaagguaaacauag

SEQ ID NO: 576904 - RNA, 19 nt, Artificial Sequence
  Synthetic
ggaaguaagguaaacauag

SEQ ID NO: 576905 - RNA, 20 nt, Artificial Sequence
  Synthetic
aggaaguaagguaaacauag

SEQ ID NO: 576906 - RNA, 21 nt, Artificial Sequence
  Synthetic
gaggaaguaagguaaacauag

SEQ ID NO: 576907 - RNA, 22 nt, Artificial Sequence
  Synthetic
ggaggaaguaagguaaacauag

SEQ ID NO: 576908 - RNA, 23 nt, Artificial Sequence
  Synthetic
aggaggaaguaagguaaacauag

SEQ ID NO: 576909 - RNA, 24 nt, Artificial Sequence
  Synthetic
caggaggaaguaagguaaacauag

SEQ ID NO: 576910 - RNA, 18 nt, Artificial Sequence
  Synthetic
acacaugcuacaacauag

SEQ ID NO: 576911 - RNA, 19 nt, Artificial Sequence
  Synthetic
gacacaugcuacaacauag

SEQ ID NO: 576912 - RNA, 20 nt, Artificial Sequence
  Synthetic
ugacacaugcuacaacauag

SEQ ID NO: 576913 - RNA, 21 nt, Artificial Sequence
  Synthetic
cugacacaugcuacaacauag

SEQ ID NO: 576914 - RNA, 22 nt, Artificial Sequence
  Synthetic
ucugacacaugcuacaacauag

SEQ ID NO: 576915 - RNA, 23 nt, Artificial Sequence
  Synthetic
uucugacacaugcuacaacauag

SEQ ID NO: 576916 - RNA, 24 nt, Artificial Sequence
  Synthetic
guucugacacaugcuacaacauag

SEQ ID NO: 576917 - RNA, 18 nt, Artificial Sequence
  Synthetic
gcaaaggggucaacauag

SEQ ID NO: 576918 - RNA, 19 nt, Artificial Sequence
  Synthetic
agcaaaggggucaacauag

SEQ ID NO: 576919 - RNA, 20 nt, Artificial Sequence
  Synthetic
cagcaaaggggucaacauag

SEQ ID NO: 576920 - RNA, 21 nt, Artificial Sequence
  Synthetic
gcagcaaaggggucaacauag

SEQ ID NO: 576921 - RNA, 22 nt, Artificial Sequence
  Synthetic
agcagcaaaggggucaacauag

SEQ ID NO: 576922 - RNA, 23 nt, Artificial Sequence
  Synthetic
cagcagcaaaggggucaacauag

SEQ ID NO: 576923 - RNA, 24 nt, Artificial Sequence
  Synthetic
gcagcagcaaaggggucaacauag

SEQ ID NO: 576924 - RNA, 18 nt, Artificial Sequence
  Synthetic
ccacuggcuucaacauag

SEQ ID NO: 576925 - RNA, 19 nt, Artificial Sequence
  Synthetic
accacuggcuucaacauag

SEQ ID NO: 576926 - RNA, 20 nt, Artificial Sequence
  Synthetic
gaccacuggcuucaacauag

SEQ ID NO: 576927 - RNA, 21 nt, Artificial Sequence
  Synthetic
ugaccacuggcuucaacauag

SEQ ID NO: 576928 - RNA, 22 nt, Artificial Sequence
  Synthetic
augaccacuggcuucaacauag

SEQ ID NO: 576929 - RNA, 23 nt, Artificial Sequence
  Synthetic
gaugaccacuggcuucaacauag

SEQ ID NO: 576930 - RNA, 24 nt, Artificial Sequence
  Synthetic
ggaugaccacuggcuucaacauag

SEQ ID NO: 576931 - RNA, 18 nt, Artificial Sequence
  Synthetic
agaacaaguugaacauag

SEQ ID NO: 576932 - RNA, 19 nt, Artificial Sequence
  Synthetic
aagaacaaguugaacauag

SEQ ID NO: 576933 - RNA, 20 nt, Artificial Sequence
  Synthetic
uaagaacaaguugaacauag

SEQ ID NO: 576934 - RNA, 21 nt, Artificial Sequence
  Synthetic
uuaagaacaaguugaacauag

SEQ ID NO: 576935 - RNA, 22 nt, Artificial Sequence
  Synthetic
uuuaagaacaaguugaacauag

SEQ ID NO: 576936 - RNA, 23 nt, Artificial Sequence
  Synthetic
uuuuaagaacaaguugaacauag

SEQ ID NO: 576937 - RNA, 24 nt, Artificial Sequence
  Synthetic
uuuuuaagaacaaguugaacauag

SEQ ID NO: 576938 - RNA, 18 nt, Artificial Sequence
  Synthetic
aagaaagcuggcacauag

SEQ ID NO: 576939 - RNA, 19 nt, Artificial Sequence
  Synthetic
aaagaaagcuggcacauag

SEQ ID NO: 576940 - RNA, 20 nt, Artificial Sequence
  Synthetic
caaagaaagcuggcacauag

SEQ ID NO: 576941 - RNA, 21 nt, Artificial Sequence
  Synthetic
ccaaagaaagcuggcacauag

SEQ ID NO: 576942 - RNA, 22 nt, Artificial Sequence
  Synthetic
uccaaagaaagcuggcacauag

SEQ ID NO: 576943 - RNA, 23 nt, Artificial Sequence
  Synthetic
cuccaaagaaagcuggcacauag

SEQ ID NO: 576944 - RNA, 24 nt, Artificial Sequence
  Synthetic
ucuccaaagaaagcuggcacauag

SEQ ID NO: 576945 - RNA, 18 nt, Artificial Sequence
  Synthetic
agccauggccucacauag

SEQ ID NO: 576946 - RNA, 19 nt, Artificial Sequence
  Synthetic
cagccauggccucacauag

SEQ ID NO: 576947 - RNA, 20 nt, Artificial Sequence
  Synthetic
ccagccauggccucacauag

SEQ ID NO: 576948 - RNA, 21 nt, Artificial Sequence
  Synthetic
uccagccauggccucacauag

SEQ ID NO: 576949 - RNA, 22 nt, Artificial Sequence
  Synthetic
cuccagccauggccucacauag

SEQ ID NO: 576950 - RNA, 23 nt, Artificial Sequence
  Synthetic
gcuccagccauggccucacauag

SEQ ID NO: 576951 - RNA, 24 nt, Artificial Sequence
  Synthetic
cgcuccagccauggccucacauag

SEQ ID NO: 576952 - RNA, 18 nt, Artificial Sequence
  Synthetic
gauggcuuugagacauag

SEQ ID NO: 576953 - RNA, 19 nt, Artificial Sequence
  Synthetic
agauggcuuugagacauag

SEQ ID NO: 576954 - RNA, 20 nt, Artificial Sequence
  Synthetic
gagauggcuuugagacauag

SEQ ID NO: 576955 - RNA, 21 nt, Artificial Sequence
  Synthetic
ugagauggcuuugagacauag

SEQ ID NO: 576956 - RNA, 22 nt, Artificial Sequence
  Synthetic
uugagauggcuuugagacauag

SEQ ID NO: 576957 - RNA, 23 nt, Artificial Sequence
  Synthetic
uuugagauggcuuugagacauag

SEQ ID NO: 576958 - RNA, 24 nt, Artificial Sequence
  Synthetic
cuuugagauggcuuugagacauag

SEQ ID NO: 576959 - RNA, 18 nt, Artificial Sequence
  Synthetic
aaguuuagguagacauag

SEQ ID NO: 576960 - RNA, 19 nt, Artificial Sequence
  Synthetic
uaaguuuagguagacauag

SEQ ID NO: 576961 - RNA, 20 nt, Artificial Sequence
  Synthetic
auaaguuuagguagacauag

SEQ ID NO: 576962 - RNA, 21 nt, Artificial Sequence
  Synthetic
aauaaguuuagguagacauag

SEQ ID NO: 576963 - RNA, 22 nt, Artificial Sequence
  Synthetic
aaauaaguuuagguagacauag

SEQ ID NO: 576964 - RNA, 23 nt, Artificial Sequence
  Synthetic
caaauaaguuuagguagacauag

SEQ ID NO: 576965 - RNA, 24 nt, Artificial Sequence
  Synthetic
gcaaauaaguuuagguagacauag

SEQ ID NO: 576966 - RNA, 18 nt, Artificial Sequence
  Synthetic
gcaauguggaggacauag

SEQ ID NO: 576967 - RNA, 19 nt, Artificial Sequence
  Synthetic
agcaauguggaggacauag

SEQ ID NO: 576968 - RNA, 20 nt, Artificial Sequence
  Synthetic
cagcaauguggaggacauag

SEQ ID NO: 576969 - RNA, 21 nt, Artificial Sequence
  Synthetic
gcagcaauguggaggacauag

SEQ ID NO: 576970 - RNA, 22 nt, Artificial Sequence
  Synthetic
ggcagcaauguggaggacauag

SEQ ID NO: 576971 - RNA, 23 nt, Artificial Sequence
  Synthetic
uggcagcaauguggaggacauag

SEQ ID NO: 576972 - RNA, 24 nt, Artificial Sequence
  Synthetic
cuggcagcaauguggaggacauag

SEQ ID NO: 576973 - RNA, 18 nt, Artificial Sequence
  Synthetic
uauguaacacugacauag

SEQ ID NO: 576974 - RNA, 19 nt, Artificial Sequence
  Synthetic
cuauguaacacugacauag

SEQ ID NO: 576975 - RNA, 20 nt, Artificial Sequence
  Synthetic
ucuauguaacacugacauag

SEQ ID NO: 576976 - RNA, 21 nt, Artificial Sequence
  Synthetic
aucuauguaacacugacauag

SEQ ID NO: 576977 - RNA, 22 nt, Artificial Sequence
  Synthetic
caucuauguaacacugacauag

SEQ ID NO: 576978 - RNA, 23 nt, Artificial Sequence
  Synthetic
ucaucuauguaacacugacauag

SEQ ID NO: 576979 - RNA, 24 nt, Artificial Sequence
  Synthetic
cucaucuauguaacacugacauag

SEQ ID NO: 576980 - RNA, 18 nt, Artificial Sequence
  Synthetic
uauguggagucuacauag

SEQ ID NO: 576981 - RNA, 19 nt, Artificial Sequence
  Synthetic
cuauguggagucuacauag

SEQ ID NO: 576982 - RNA, 20 nt, Artificial Sequence
  Synthetic
ucuauguggagucuacauag

SEQ ID NO: 576983 - RNA, 21 nt, Artificial Sequence
  Synthetic
gucuauguggagucuacauag

SEQ ID NO: 576984 - RNA, 22 nt, Artificial Sequence
  Synthetic
agucuauguggagucuacauag

SEQ ID NO: 576985 - RNA, 23 nt, Artificial Sequence
  Synthetic
uagucuauguggagucuacauag

SEQ ID NO: 576986 - RNA, 24 nt, Artificial Sequence
  Synthetic
auagucuauguggagucuacauag

SEQ ID NO: 576987 - RNA, 18 nt, Artificial Sequence
  Synthetic
uuauuagaacaaccauag

SEQ ID NO: 576988 - RNA, 19 nt, Artificial Sequence
  Synthetic
cuuauuagaacaaccauag

SEQ ID NO: 576989 - RNA, 20 nt, Artificial Sequence
  Synthetic
ucuuauuagaacaaccauag

SEQ ID NO: 576990 - RNA, 21 nt, Artificial Sequence
  Synthetic
uucuuauuagaacaaccauag

SEQ ID NO: 576991 - RNA, 22 nt, Artificial Sequence
  Synthetic
auucuuauuagaacaaccauag

SEQ ID NO: 576992 - RNA, 23 nt, Artificial Sequence
  Synthetic
uauucuuauuagaacaaccauag

SEQ ID NO: 576993 - RNA, 24 nt, Artificial Sequence
  Synthetic
uuauucuuauuagaacaaccauag

SEQ ID NO: 576994 - RNA, 18 nt, Artificial Sequence
  Synthetic
aggaccugaacaccauag

SEQ ID NO: 576995 - RNA, 19 nt, Artificial Sequence
  Synthetic
caggaccugaacaccauag

SEQ ID NO: 576996 - RNA, 20 nt, Artificial Sequence
  Synthetic
ucaggaccugaacaccauag

SEQ ID NO: 576997 - RNA, 21 nt, Artificial Sequence
  Synthetic
uucaggaccugaacaccauag

SEQ ID NO: 576998 - RNA, 22 nt, Artificial Sequence
  Synthetic
guucaggaccugaacaccauag

SEQ ID NO: 576999 - RNA, 23 nt, Artificial Sequence
  Synthetic
cguucaggaccugaacaccauag

SEQ ID NO: 577000 - RNA, 24 nt, Artificial Sequence
  Synthetic
ucguucaggaccugaacaccauag

SEQ ID NO: 577001 - RNA, 18 nt, Artificial Sequence
  Synthetic
cauuuacuuuacccauag

SEQ ID NO: 577002 - RNA, 19 nt, Artificial Sequence
  Synthetic
ucauuuacuuuacccauag

SEQ ID NO: 577003 - RNA, 20 nt, Artificial Sequence
  Synthetic
cucauuuacuuuacccauag

SEQ ID NO: 577004 - RNA, 21 nt, Artificial Sequence
  Synthetic
ucucauuuacuuuacccauag

SEQ ID NO: 577005 - RNA, 22 nt, Artificial Sequence
  Synthetic
uucucauuuacuuuacccauag

SEQ ID NO: 577006 - RNA, 23 nt, Artificial Sequence
  Synthetic
auucucauuuacuuuacccauag

SEQ ID NO: 577007 - RNA, 24 nt, Artificial Sequence
  Synthetic
aauucucauuuacuuuacccauag

SEQ ID NO: 577008 - RNA, 18 nt, Artificial Sequence
  Synthetic
ucagggaaggugccauag

SEQ ID NO: 577009 - RNA, 19 nt, Artificial Sequence
  Synthetic
uucagggaaggugccauag

SEQ ID NO: 577010 - RNA, 20 nt, Artificial Sequence
  Synthetic
guucagggaaggugccauag

SEQ ID NO: 577011 - RNA, 21 nt, Artificial Sequence
  Synthetic
gguucagggaaggugccauag

SEQ ID NO: 577012 - RNA, 22 nt, Artificial Sequence
  Synthetic
agguucagggaaggugccauag

SEQ ID NO: 577013 - RNA, 23 nt, Artificial Sequence
  Synthetic
cagguucagggaaggugccauag

SEQ ID NO: 577014 - RNA, 24 nt, Artificial Sequence
  Synthetic
ccagguucagggaaggugccauag

SEQ ID NO: 577015 - RNA, 18 nt, Artificial Sequence
  Synthetic
aacugcucuacuccauag

SEQ ID NO: 577016 - RNA, 19 nt, Artificial Sequence
  Synthetic
caacugcucuacuccauag

SEQ ID NO: 577017 - RNA, 20 nt, Artificial Sequence
  Synthetic
acaacugcucuacuccauag

SEQ ID NO: 577018 - RNA, 21 nt, Artificial Sequence
  Synthetic
aacaacugcucuacuccauag

SEQ ID NO: 577019 - RNA, 22 nt, Artificial Sequence
  Synthetic
aaacaacugcucuacuccauag

SEQ ID NO: 577020 - RNA, 23 nt, Artificial Sequence
  Synthetic
aaaacaacugcucuacuccauag

SEQ ID NO: 577021 - RNA, 24 nt, Artificial Sequence
  Synthetic
gaaaacaacugcucuacuccauag

SEQ ID NO: 577022 - RNA, 18 nt, Artificial Sequence
  Synthetic
ugcaagaugagagcauag

SEQ ID NO: 577023 - RNA, 19 nt, Artificial Sequence
  Synthetic
augcaagaugagagcauag

SEQ ID NO: 577024 - RNA, 20 nt, Artificial Sequence
  Synthetic
uaugcaagaugagagcauag

SEQ ID NO: 577025 - RNA, 21 nt, Artificial Sequence
  Synthetic
uuaugcaagaugagagcauag

SEQ ID NO: 577026 - RNA, 22 nt, Artificial Sequence
  Synthetic
guuaugcaagaugagagcauag

SEQ ID NO: 577027 - RNA, 23 nt, Artificial Sequence
  Synthetic
cguuaugcaagaugagagcauag

SEQ ID NO: 577028 - RNA, 24 nt, Artificial Sequence
  Synthetic
acguuaugcaagaugagagcauag

SEQ ID NO: 577029 - RNA, 18 nt, Artificial Sequence
  Synthetic
ccucagaaguaggcauag

SEQ ID NO: 577030 - RNA, 19 nt, Artificial Sequence
  Synthetic
gccucagaaguaggcauag

SEQ ID NO: 577031 - RNA, 20 nt, Artificial Sequence
  Synthetic
agccucagaaguaggcauag

SEQ ID NO: 577032 - RNA, 21 nt, Artificial Sequence
  Synthetic
aagccucagaaguaggcauag

SEQ ID NO: 577033 - RNA, 22 nt, Artificial Sequence
  Synthetic
gaagccucagaaguaggcauag

SEQ ID NO: 577034 - RNA, 23 nt, Artificial Sequence
  Synthetic
agaagccucagaaguaggcauag

SEQ ID NO: 577035 - RNA, 24 nt, Artificial Sequence
  Synthetic
cagaagccucagaaguaggcauag

SEQ ID NO: 577036 - RNA, 18 nt, Artificial Sequence
  Synthetic
auaguagaaagggcauag

SEQ ID NO: 577037 - RNA, 19 nt, Artificial Sequence
  Synthetic
cauaguagaaagggcauag

SEQ ID NO: 577038 - RNA, 20 nt, Artificial Sequence
  Synthetic
gcauaguagaaagggcauag

SEQ ID NO: 577039 - RNA, 21 nt, Artificial Sequence
  Synthetic
ggcauaguagaaagggcauag

SEQ ID NO: 577040 - RNA, 22 nt, Artificial Sequence
  Synthetic
gggcauaguagaaagggcauag

SEQ ID NO: 577041 - RNA, 23 nt, Artificial Sequence
  Synthetic
agggcauaguagaaagggcauag

SEQ ID NO: 577042 - RNA, 24 nt, Artificial Sequence
  Synthetic
aagggcauaguagaaagggcauag

SEQ ID NO: 577043 - RNA, 18 nt, Artificial Sequence
  Synthetic
agaaggugaagggcauag

SEQ ID NO: 577044 - RNA, 19 nt, Artificial Sequence
  Synthetic
uagaaggugaagggcauag

SEQ ID NO: 577045 - RNA, 20 nt, Artificial Sequence
  Synthetic
guagaaggugaagggcauag

SEQ ID NO: 577046 - RNA, 21 nt, Artificial Sequence
  Synthetic
aguagaaggugaagggcauag

SEQ ID NO: 577047 - RNA, 22 nt, Artificial Sequence
  Synthetic
uaguagaaggugaagggcauag

SEQ ID NO: 577048 - RNA, 23 nt, Artificial Sequence
  Synthetic
auaguagaaggugaagggcauag

SEQ ID NO: 577049 - RNA, 24 nt, Artificial Sequence
  Synthetic
cauaguagaaggugaagggcauag

SEQ ID NO: 577050 - RNA, 18 nt, Artificial Sequence
  Synthetic
cacagcuaagaugcauag

SEQ ID NO: 577051 - RNA, 19 nt, Artificial Sequence
  Synthetic
acacagcuaagaugcauag

SEQ ID NO: 577052 - RNA, 20 nt, Artificial Sequence
  Synthetic
cacacagcuaagaugcauag

SEQ ID NO: 577053 - RNA, 21 nt, Artificial Sequence
  Synthetic
ucacacagcuaagaugcauag

SEQ ID NO: 577054 - RNA, 22 nt, Artificial Sequence
  Synthetic
uucacacagcuaagaugcauag

SEQ ID NO: 577055 - RNA, 23 nt, Artificial Sequence
  Synthetic
uuucacacagcuaagaugcauag

SEQ ID NO: 577056 - RNA, 24 nt, Artificial Sequence
  Synthetic
uuuucacacagcuaagaugcauag

SEQ ID NO: 577057 - RNA, 18 nt, Artificial Sequence
  Synthetic
ggaaacuuacaaucauag

SEQ ID NO: 577058 - RNA, 19 nt, Artificial Sequence
  Synthetic
aggaaacuuacaaucauag

SEQ ID NO: 577059 - RNA, 20 nt, Artificial Sequence
  Synthetic
caggaaacuuacaaucauag

SEQ ID NO: 577060 - RNA, 21 nt, Artificial Sequence
  Synthetic
ucaggaaacuuacaaucauag

SEQ ID NO: 577061 - RNA, 22 nt, Artificial Sequence
  Synthetic
cucaggaaacuuacaaucauag

SEQ ID NO: 577062 - RNA, 23 nt, Artificial Sequence
  Synthetic
ccucaggaaacuuacaaucauag

SEQ ID NO: 577063 - RNA, 24 nt, Artificial Sequence
  Synthetic
accucaggaaacuuacaaucauag

SEQ ID NO: 577064 - RNA, 18 nt, Artificial Sequence
  Synthetic
ugugcuuauucaucauag

SEQ ID NO: 577065 - RNA, 19 nt, Artificial Sequence
  Synthetic
uugugcuuauucaucauag

SEQ ID NO: 577066 - RNA, 20 nt, Artificial Sequence
  Synthetic
guugugcuuauucaucauag

SEQ ID NO: 577067 - RNA, 21 nt, Artificial Sequence
  Synthetic
uguugugcuuauucaucauag

SEQ ID NO: 577068 - RNA, 22 nt, Artificial Sequence
  Synthetic
auguugugcuuauucaucauag

SEQ ID NO: 577069 - RNA, 23 nt, Artificial Sequence
  Synthetic
gauguugugcuuauucaucauag

SEQ ID NO: 577070 - RNA, 24 nt, Artificial Sequence
  Synthetic
agauguugugcuuauucaucauag

SEQ ID NO: 577071 - RNA, 18 nt, Artificial Sequence
  Synthetic
uaaaaacauuuaucauag

SEQ ID NO: 577072 - RNA, 19 nt, Artificial Sequence
  Synthetic
uuaaaaacauuuaucauag

SEQ ID NO: 577073 - RNA, 20 nt, Artificial Sequence
  Synthetic
uuuaaaaacauuuaucauag

SEQ ID NO: 577074 - RNA, 21 nt, Artificial Sequence
  Synthetic
uuuuaaaaacauuuaucauag

SEQ ID NO: 577075 - RNA, 22 nt, Artificial Sequence
  Synthetic
uuuuuaaaaacauuuaucauag

SEQ ID NO: 577076 - RNA, 23 nt, Artificial Sequence
  Synthetic
auuuuuaaaaacauuuaucauag

SEQ ID NO: 577077 - RNA, 24 nt, Artificial Sequence
  Synthetic
gauuuuuaaaaacauuuaucauag

SEQ ID NO: 577078 - RNA, 18 nt, Artificial Sequence
  Synthetic
agaggaaguuuaucauag

SEQ ID NO: 577079 - RNA, 19 nt, Artificial Sequence
  Synthetic
cagaggaaguuuaucauag

SEQ ID NO: 577080 - RNA, 20 nt, Artificial Sequence
  Synthetic
acagaggaaguuuaucauag

SEQ ID NO: 577081 - RNA, 21 nt, Artificial Sequence
  Synthetic
gacagaggaaguuuaucauag

SEQ ID NO: 577082 - RNA, 22 nt, Artificial Sequence
  Synthetic
ugacagaggaaguuuaucauag

SEQ ID NO: 577083 - RNA, 23 nt, Artificial Sequence
  Synthetic
augacagaggaaguuuaucauag

SEQ ID NO: 577084 - RNA, 24 nt, Artificial Sequence
  Synthetic
gaugacagaggaaguuuaucauag

SEQ ID NO: 577085 - RNA, 18 nt, Artificial Sequence
  Synthetic
aaacuaugaaacucauag

SEQ ID NO: 577086 - RNA, 19 nt, Artificial Sequence
  Synthetic
gaaacuaugaaacucauag

SEQ ID NO: 577087 - RNA, 20 nt, Artificial Sequence
  Synthetic
ugaaacuaugaaacucauag

SEQ ID NO: 577088 - RNA, 21 nt, Artificial Sequence
  Synthetic
cugaaacuaugaaacucauag

SEQ ID NO: 577089 - RNA, 22 nt, Artificial Sequence
  Synthetic
ucugaaacuaugaaacucauag

SEQ ID NO: 577090 - RNA, 23 nt, Artificial Sequence
  Synthetic
aucugaaacuaugaaacucauag

SEQ ID NO: 577091 - RNA, 24 nt, Artificial Sequence
  Synthetic
gaucugaaacuaugaaacucauag

SEQ ID NO: 577092 - RNA, 18 nt, Artificial Sequence
  Synthetic
gcauguccucacucauag

SEQ ID NO: 577093 - RNA, 19 nt, Artificial Sequence
  Synthetic
cgcauguccucacucauag

SEQ ID NO: 577094 - RNA, 20 nt, Artificial Sequence
  Synthetic
ccgcauguccucacucauag

SEQ ID NO: 577095 - RNA, 21 nt, Artificial Sequence
  Synthetic
accgcauguccucacucauag

SEQ ID NO: 577096 - RNA, 22 nt, Artificial Sequence
  Synthetic
caccgcauguccucacucauag

SEQ ID NO: 577097 - RNA, 23 nt, Artificial Sequence
  Synthetic
acaccgcauguccucacucauag

SEQ ID NO: 577098 - RNA, 24 nt, Artificial Sequence
  Synthetic
aacaccgcauguccucacucauag

SEQ ID NO: 577099 - RNA, 18 nt, Artificial Sequence
  Synthetic
gcauguucucgcucauag

SEQ ID NO: 577100 - RNA, 19 nt, Artificial Sequence
  Synthetic
cgcauguucucgcucauag

SEQ ID NO: 577101 - RNA, 20 nt, Artificial Sequence
  Synthetic
ccgcauguucucgcucauag

SEQ ID NO: 577102 - RNA, 21 nt, Artificial Sequence
  Synthetic
accgcauguucucgcucauag

SEQ ID NO: 577103 - RNA, 22 nt, Artificial Sequence
  Synthetic
caccgcauguucucgcucauag

SEQ ID NO: 577104 - RNA, 23 nt, Artificial Sequence
  Synthetic
acaccgcauguucucgcucauag

SEQ ID NO: 577105 - RNA, 24 nt, Artificial Sequence
  Synthetic
aacaccgcauguucucgcucauag

SEQ ID NO: 577106 - RNA, 18 nt, Artificial Sequence
  Synthetic
caaaauaaaaauucauag

SEQ ID NO: 577107 - RNA, 19 nt, Artificial Sequence
  Synthetic
ucaaaauaaaaauucauag

SEQ ID NO: 577108 - RNA, 20 nt, Artificial Sequence
  Synthetic
uucaaaauaaaaauucauag

SEQ ID NO: 577109 - RNA, 21 nt, Artificial Sequence
  Synthetic
guucaaaauaaaaauucauag

SEQ ID NO: 577110 - RNA, 22 nt, Artificial Sequence
  Synthetic
uguucaaaauaaaaauucauag

SEQ ID NO: 577111 - RNA, 23 nt, Artificial Sequence
  Synthetic
uuguucaaaauaaaaauucauag

SEQ ID NO: 577112 - RNA, 24 nt, Artificial Sequence
  Synthetic
uuuguucaaaauaaaaauucauag

SEQ ID NO: 577113 - RNA, 18 nt, Artificial Sequence
  Synthetic
uguugcuaaaauucauag

SEQ ID NO: 577114 - RNA, 19 nt, Artificial Sequence
  Synthetic
guguugcuaaaauucauag

SEQ ID NO: 577115 - RNA, 20 nt, Artificial Sequence
  Synthetic
aguguugcuaaaauucauag

SEQ ID NO: 577116 - RNA, 21 nt, Artificial Sequence
  Synthetic
aaguguugcuaaaauucauag

SEQ ID NO: 577117 - RNA, 22 nt, Artificial Sequence
  Synthetic
uaaguguugcuaaaauucauag

SEQ ID NO: 577118 - RNA, 23 nt, Artificial Sequence
  Synthetic
auaaguguugcuaaaauucauag

SEQ ID NO: 577119 - RNA, 24 nt, Artificial Sequence
  Synthetic
uauaaguguugcuaaaauucauag

SEQ ID NO: 577120 - RNA, 18 nt, Artificial Sequence
  Synthetic
auacgugucaauucauag

SEQ ID NO: 577121 - RNA, 19 nt, Artificial Sequence
  Synthetic
uauacgugucaauucauag

SEQ ID NO: 577122 - RNA, 20 nt, Artificial Sequence
  Synthetic
auauacgugucaauucauag

SEQ ID NO: 577123 - RNA, 21 nt, Artificial Sequence
  Synthetic
aauauacgugucaauucauag

SEQ ID NO: 577124 - RNA, 22 nt, Artificial Sequence
  Synthetic
uaauauacgugucaauucauag

SEQ ID NO: 577125 - RNA, 23 nt, Artificial Sequence
  Synthetic
auaauauacgugucaauucauag

SEQ ID NO: 577126 - RNA, 24 nt, Artificial Sequence
  Synthetic
uauaauauacgugucaauucauag

SEQ ID NO: 577127 - RNA, 18 nt, Artificial Sequence
  Synthetic
aucucaucacuuucauag

SEQ ID NO: 577128 - RNA, 19 nt, Artificial Sequence
  Synthetic
caucucaucacuuucauag

SEQ ID NO: 577129 - RNA, 20 nt, Artificial Sequence
  Synthetic
ucaucucaucacuuucauag

SEQ ID NO: 577130 - RNA, 21 nt, Artificial Sequence
  Synthetic
uucaucucaucacuuucauag

SEQ ID NO: 577131 - RNA, 22 nt, Artificial Sequence
  Synthetic
auucaucucaucacuuucauag

SEQ ID NO: 577132 - RNA, 23 nt, Artificial Sequence
  Synthetic
aauucaucucaucacuuucauag

SEQ ID NO: 577133 - RNA, 24 nt, Artificial Sequence
  Synthetic
caauucaucucaucacuuucauag

SEQ ID NO: 577134 - RNA, 18 nt, Artificial Sequence
  Synthetic
guuaacuacuuuucauag

SEQ ID NO: 577135 - RNA, 19 nt, Artificial Sequence
  Synthetic
uguuaacuacuuuucauag

SEQ ID NO: 577136 - RNA, 20 nt, Artificial Sequence
  Synthetic
auguuaacuacuuuucauag

SEQ ID NO: 577137 - RNA, 21 nt, Artificial Sequence
  Synthetic
gauguuaacuacuuuucauag

SEQ ID NO: 577138 - RNA, 22 nt, Artificial Sequence
  Synthetic
ggauguuaacuacuuuucauag

SEQ ID NO: 577139 - RNA, 23 nt, Artificial Sequence
  Synthetic
uggauguuaacuacuuuucauag

SEQ ID NO: 577140 - RNA, 24 nt, Artificial Sequence
  Synthetic
uuggauguuaacuacuuuucauag

SEQ ID NO: 577141 - RNA, 18 nt, Artificial Sequence
  Synthetic
ggauggauagaaagauag

SEQ ID NO: 577142 - RNA, 19 nt, Artificial Sequence
  Synthetic
uggauggauagaaagauag

SEQ ID NO: 577143 - RNA, 20 nt, Artificial Sequence
  Synthetic
uuggauggauagaaagauag

SEQ ID NO: 577144 - RNA, 21 nt, Artificial Sequence
  Synthetic
cuuggauggauagaaagauag

SEQ ID NO: 577145 - RNA, 22 nt, Artificial Sequence
  Synthetic
gcuuggauggauagaaagauag

SEQ ID NO: 577146 - RNA, 23 nt, Artificial Sequence
  Synthetic
agcuuggauggauagaaagauag

SEQ ID NO: 577147 - RNA, 24 nt, Artificial Sequence
  Synthetic
cagcuuggauggauagaaagauag

SEQ ID NO: 577148 - RNA, 18 nt, Artificial Sequence
  Synthetic
caacaaaggccaagauag

SEQ ID NO: 577149 - RNA, 19 nt, Artificial Sequence
  Synthetic
ucaacaaaggccaagauag

SEQ ID NO: 577150 - RNA, 20 nt, Artificial Sequence
  Synthetic
aucaacaaaggccaagauag

SEQ ID NO: 577151 - RNA, 21 nt, Artificial Sequence
  Synthetic
aaucaacaaaggccaagauag

SEQ ID NO: 577152 - RNA, 22 nt, Artificial Sequence
  Synthetic
caaucaacaaaggccaagauag

SEQ ID NO: 577153 - RNA, 23 nt, Artificial Sequence
  Synthetic
ucaaucaacaaaggccaagauag

SEQ ID NO: 577154 - RNA, 24 nt, Artificial Sequence
  Synthetic
gucaaucaacaaaggccaagauag

SEQ ID NO: 577155 - RNA, 18 nt, Artificial Sequence
  Synthetic
uaauuuauuccaagauag

SEQ ID NO: 577156 - RNA, 19 nt, Artificial Sequence
  Synthetic
uuaauuuauuccaagauag

SEQ ID NO: 577157 - RNA, 20 nt, Artificial Sequence
  Synthetic
auuaauuuauuccaagauag

SEQ ID NO: 577158 - RNA, 21 nt, Artificial Sequence
  Synthetic
aauuaauuuauuccaagauag

SEQ ID NO: 577159 - RNA, 22 nt, Artificial Sequence
  Synthetic
gaauuaauuuauuccaagauag

SEQ ID NO: 577160 - RNA, 23 nt, Artificial Sequence
  Synthetic
ggaauuaauuuauuccaagauag

SEQ ID NO: 577161 - RNA, 24 nt, Artificial Sequence
  Synthetic
uggaauuaauuuauuccaagauag

SEQ ID NO: 577162 - RNA, 18 nt, Artificial Sequence
  Synthetic
agauacaacagaagauag

SEQ ID NO: 577163 - RNA, 19 nt, Artificial Sequence
  Synthetic
uagauacaacagaagauag

SEQ ID NO: 577164 - RNA, 20 nt, Artificial Sequence
  Synthetic
uuagauacaacagaagauag

SEQ ID NO: 577165 - RNA, 21 nt, Artificial Sequence
  Synthetic
auuagauacaacagaagauag

SEQ ID NO: 577166 - RNA, 22 nt, Artificial Sequence
  Synthetic
uauuagauacaacagaagauag

SEQ ID NO: 577167 - RNA, 23 nt, Artificial Sequence
  Synthetic
uuauuagauacaacagaagauag

SEQ ID NO: 577168 - RNA, 24 nt, Artificial Sequence
  Synthetic
auuauuagauacaacagaagauag

SEQ ID NO: 577169 - RNA, 18 nt, Artificial Sequence
  Synthetic
aaucuauacagaagauag

SEQ ID NO: 577170 - RNA, 19 nt, Artificial Sequence
  Synthetic
aaaucuauacagaagauag

SEQ ID NO: 577171 - RNA, 20 nt, Artificial Sequence
  Synthetic
uaaaucuauacagaagauag

SEQ ID NO: 577172 - RNA, 21 nt, Artificial Sequence
  Synthetic
uuaaaucuauacagaagauag

SEQ ID NO: 577173 - RNA, 22 nt, Artificial Sequence
  Synthetic
guuaaaucuauacagaagauag

SEQ ID NO: 577174 - RNA, 23 nt, Artificial Sequence
  Synthetic
gguuaaaucuauacagaagauag

SEQ ID NO: 577175 - RNA, 24 nt, Artificial Sequence
  Synthetic
ugguuaaaucuauacagaagauag

SEQ ID NO: 577176 - RNA, 18 nt, Artificial Sequence
  Synthetic
auaguagcuugaagauag

SEQ ID NO: 577177 - RNA, 19 nt, Artificial Sequence
  Synthetic
aauaguagcuugaagauag

SEQ ID NO: 577178 - RNA, 20 nt, Artificial Sequence
  Synthetic
caauaguagcuugaagauag

SEQ ID NO: 577179 - RNA, 21 nt, Artificial Sequence
  Synthetic
acaauaguagcuugaagauag

SEQ ID NO: 577180 - RNA, 22 nt, Artificial Sequence
  Synthetic
aacaauaguagcuugaagauag

SEQ ID NO: 577181 - RNA, 23 nt, Artificial Sequence
  Synthetic
aaacaauaguagcuugaagauag

SEQ ID NO: 577182 - RNA, 24 nt, Artificial Sequence
  Synthetic
gaaacaauaguagcuugaagauag

SEQ ID NO: 577183 - RNA, 18 nt, Artificial Sequence
  Synthetic
auacagcaacuaagauag

SEQ ID NO: 577184 - RNA, 19 nt, Artificial Sequence
  Synthetic
aauacagcaacuaagauag

SEQ ID NO: 577185 - RNA, 20 nt, Artificial Sequence
  Synthetic
aaauacagcaacuaagauag

SEQ ID NO: 577186 - RNA, 21 nt, Artificial Sequence
  Synthetic
aaaauacagcaacuaagauag

SEQ ID NO: 577187 - RNA, 22 nt, Artificial Sequence
  Synthetic
aaaaauacagcaacuaagauag

SEQ ID NO: 577188 - RNA, 23 nt, Artificial Sequence
  Synthetic
uaaaaauacagcaacuaagauag

SEQ ID NO: 577189 - RNA, 24 nt, Artificial Sequence
  Synthetic
auaaaaauacagcaacuaagauag

SEQ ID NO: 577190 - RNA, 18 nt, Artificial Sequence
  Synthetic
uacauuacugagagauag

SEQ ID NO: 577191 - RNA, 19 nt, Artificial Sequence
  Synthetic
cuacauuacugagagauag

SEQ ID NO: 577192 - RNA, 20 nt, Artificial Sequence
  Synthetic
ccuacauuacugagagauag

SEQ ID NO: 577193 - RNA, 21 nt, Artificial Sequence
  Synthetic
uccuacauuacugagagauag

SEQ ID NO: 577194 - RNA, 22 nt, Artificial Sequence
  Synthetic
cuccuacauuacugagagauag

SEQ ID NO: 577195 - RNA, 23 nt, Artificial Sequence
  Synthetic
acuccuacauuacugagagauag

SEQ ID NO: 577196 - RNA, 24 nt, Artificial Sequence
  Synthetic
cacuccuacauuacugagagauag

SEQ ID NO: 577197 - RNA, 18 nt, Artificial Sequence
  Synthetic
gagccuuuccugagauag

SEQ ID NO: 577198 - RNA, 19 nt, Artificial Sequence
  Synthetic
agagccuuuccugagauag

SEQ ID NO: 577199 - RNA, 20 nt, Artificial Sequence
  Synthetic
gagagccuuuccugagauag

SEQ ID NO: 577200 - RNA, 21 nt, Artificial Sequence
  Synthetic
ugagagccuuuccugagauag

SEQ ID NO: 577201 - RNA, 22 nt, Artificial Sequence
  Synthetic
augagagccuuuccugagauag

SEQ ID NO: 577202 - RNA, 23 nt, Artificial Sequence
  Synthetic
aaugagagccuuuccugagauag

SEQ ID NO: 577203 - RNA, 24 nt, Artificial Sequence
  Synthetic
gaaugagagccuuuccugagauag

SEQ ID NO: 577204 - RNA, 18 nt, Artificial Sequence
  Synthetic
ucaagggcacauagauag

SEQ ID NO: 577205 - RNA, 19 nt, Artificial Sequence
  Synthetic
cucaagggcacauagauag

SEQ ID NO: 577206 - RNA, 20 nt, Artificial Sequence
  Synthetic
gcucaagggcacauagauag

SEQ ID NO: 577207 - RNA, 21 nt, Artificial Sequence
  Synthetic
ugcucaagggcacauagauag

SEQ ID NO: 577208 - RNA, 22 nt, Artificial Sequence
  Synthetic
uugcucaagggcacauagauag

SEQ ID NO: 577209 - RNA, 23 nt, Artificial Sequence
  Synthetic
cuugcucaagggcacauagauag

SEQ ID NO: 577210 - RNA, 24 nt, Artificial Sequence
  Synthetic
acuugcucaagggcacauagauag

SEQ ID NO: 577211 - RNA, 18 nt, Artificial Sequence
  Synthetic
uaaauuauagcuagauag

SEQ ID NO: 577212 - RNA, 19 nt, Artificial Sequence
  Synthetic
auaaauuauagcuagauag

SEQ ID NO: 577213 - RNA, 20 nt, Artificial Sequence
  Synthetic
aauaaauuauagcuagauag

SEQ ID NO: 577214 - RNA, 21 nt, Artificial Sequence
  Synthetic
aaauaaauuauagcuagauag

SEQ ID NO: 577215 - RNA, 22 nt, Artificial Sequence
  Synthetic
aaaauaaauuauagcuagauag

SEQ ID NO: 577216 - RNA, 23 nt, Artificial Sequence
  Synthetic
aaaaauaaauuauagcuagauag

SEQ ID NO: 577217 - RNA, 24 nt, Artificial Sequence
  Synthetic
uaaaaauaaauuauagcuagauag

SEQ ID NO: 577218 - RNA, 18 nt, Artificial Sequence
  Synthetic
ggagaaggagaacgauag

SEQ ID NO: 577219 - RNA, 19 nt, Artificial Sequence
  Synthetic
aggagaaggagaacgauag

SEQ ID NO: 577220 - RNA, 20 nt, Artificial Sequence
  Synthetic
caggagaaggagaacgauag

SEQ ID NO: 577221 - RNA, 21 nt, Artificial Sequence
  Synthetic
acaggagaaggagaacgauag

SEQ ID NO: 577222 - RNA, 22 nt, Artificial Sequence
  Synthetic
aacaggagaaggagaacgauag

SEQ ID NO: 577223 - RNA, 23 nt, Artificial Sequence
  Synthetic
aaacaggagaaggagaacgauag

SEQ ID NO: 577224 - RNA, 24 nt, Artificial Sequence
  Synthetic
aaaacaggagaaggagaacgauag

SEQ ID NO: 577225 - RNA, 18 nt, Artificial Sequence
  Synthetic
agaggcugggaaggauag

SEQ ID NO: 577226 - RNA, 19 nt, Artificial Sequence
  Synthetic
cagaggcugggaaggauag

SEQ ID NO: 577227 - RNA, 20 nt, Artificial Sequence
  Synthetic
ccagaggcugggaaggauag

SEQ ID NO: 577228 - RNA, 21 nt, Artificial Sequence
  Synthetic
gccagaggcugggaaggauag

SEQ ID NO: 577229 - RNA, 22 nt, Artificial Sequence
  Synthetic
ugccagaggcugggaaggauag

SEQ ID NO: 577230 - RNA, 23 nt, Artificial Sequence
  Synthetic
uugccagaggcugggaaggauag

SEQ ID NO: 577231 - RNA, 24 nt, Artificial Sequence
  Synthetic
guugccagaggcugggaaggauag

SEQ ID NO: 577232 - RNA, 18 nt, Artificial Sequence
  Synthetic
ggagacaaauuaggauag

SEQ ID NO: 577233 - RNA, 19 nt, Artificial Sequence
  Synthetic
cggagacaaauuaggauag

SEQ ID NO: 577234 - RNA, 20 nt, Artificial Sequence
  Synthetic
ccggagacaaauuaggauag

SEQ ID NO: 577235 - RNA, 21 nt, Artificial Sequence
  Synthetic
gccggagacaaauuaggauag

SEQ ID NO: 577236 - RNA, 22 nt, Artificial Sequence
  Synthetic
agccggagacaaauuaggauag

SEQ ID NO: 577237 - RNA, 23 nt, Artificial Sequence
  Synthetic
cagccggagacaaauuaggauag

SEQ ID NO: 577238 - RNA, 24 nt, Artificial Sequence
  Synthetic
acagccggagacaaauuaggauag

SEQ ID NO: 577239 - RNA, 18 nt, Artificial Sequence
  Synthetic
auagauagugagggauag

SEQ ID NO: 577240 - RNA, 19 nt, Artificial Sequence
  Synthetic
cauagauagugagggauag

SEQ ID NO: 577241 - RNA, 20 nt, Artificial Sequence
  Synthetic
acauagauagugagggauag

SEQ ID NO: 577242 - RNA, 21 nt, Artificial Sequence
  Synthetic
aacauagauagugagggauag

SEQ ID NO: 577243 - RNA, 22 nt, Artificial Sequence
  Synthetic
aaacauagauagugagggauag

SEQ ID NO: 577244 - RNA, 23 nt, Artificial Sequence
  Synthetic
uaaacauagauagugagggauag

SEQ ID NO: 577245 - RNA, 24 nt, Artificial Sequence
  Synthetic
cuaaacauagauagugagggauag

SEQ ID NO: 577246 - RNA, 18 nt, Artificial Sequence
  Synthetic
uguggagguaggggauag

SEQ ID NO: 577247 - RNA, 19 nt, Artificial Sequence
  Synthetic
guguggagguaggggauag

SEQ ID NO: 577248 - RNA, 20 nt, Artificial Sequence
  Synthetic
aguguggagguaggggauag

SEQ ID NO: 577249 - RNA, 21 nt, Artificial Sequence
  Synthetic
uaguguggagguaggggauag

SEQ ID NO: 577250 - RNA, 22 nt, Artificial Sequence
  Synthetic
guaguguggagguaggggauag

SEQ ID NO: 577251 - RNA, 23 nt, Artificial Sequence
  Synthetic
gguaguguggagguaggggauag

SEQ ID NO: 577252 - RNA, 24 nt, Artificial Sequence
  Synthetic
ggguaguguggagguaggggauag

SEQ ID NO: 577253 - RNA, 18 nt, Artificial Sequence
  Synthetic
gguaagacguguggauag

SEQ ID NO: 577254 - RNA, 19 nt, Artificial Sequence
  Synthetic
ggguaagacguguggauag

SEQ ID NO: 577255 - RNA, 20 nt, Artificial Sequence
  Synthetic
aggguaagacguguggauag

SEQ ID NO: 577256 - RNA, 21 nt, Artificial Sequence
  Synthetic
gaggguaagacguguggauag

SEQ ID NO: 577257 - RNA, 22 nt, Artificial Sequence
  Synthetic
agaggguaagacguguggauag

SEQ ID NO: 577258 - RNA, 23 nt, Artificial Sequence
  Synthetic
uagaggguaagacguguggauag

SEQ ID NO: 577259 - RNA, 24 nt, Artificial Sequence
  Synthetic
uuagaggguaagacguguggauag

SEQ ID NO: 577260 - RNA, 18 nt, Artificial Sequence
  Synthetic
cauuuuuucaaaugauag

SEQ ID NO: 577261 - RNA, 19 nt, Artificial Sequence
  Synthetic
ucauuuuuucaaaugauag

SEQ ID NO: 577262 - RNA, 20 nt, Artificial Sequence
  Synthetic
aucauuuuuucaaaugauag

SEQ ID NO: 577263 - RNA, 21 nt, Artificial Sequence
  Synthetic
caucauuuuuucaaaugauag

SEQ ID NO: 577264 - RNA, 22 nt, Artificial Sequence
  Synthetic
ucaucauuuuuucaaaugauag

SEQ ID NO: 577265 - RNA, 23 nt, Artificial Sequence
  Synthetic
cucaucauuuuuucaaaugauag

SEQ ID NO: 577266 - RNA, 24 nt, Artificial Sequence
  Synthetic
acucaucauuuuuucaaaugauag

SEQ ID NO: 577267 - RNA, 18 nt, Artificial Sequence
  Synthetic
ucuuucaagcaaugauag

SEQ ID NO: 577268 - RNA, 19 nt, Artificial Sequence
  Synthetic
uucuuucaagcaaugauag

SEQ ID NO: 577269 - RNA, 20 nt, Artificial Sequence
  Synthetic
cuucuuucaagcaaugauag

SEQ ID NO: 577270 - RNA, 21 nt, Artificial Sequence
  Synthetic
gcuucuuucaagcaaugauag

SEQ ID NO: 577271 - RNA, 22 nt, Artificial Sequence
  Synthetic
ugcuucuuucaagcaaugauag

SEQ ID NO: 577272 - RNA, 23 nt, Artificial Sequence
  Synthetic
uugcuucuuucaagcaaugauag

SEQ ID NO: 577273 - RNA, 24 nt, Artificial Sequence
  Synthetic
uuugcuucuuucaagcaaugauag

SEQ ID NO: 577274 - RNA, 18 nt, Artificial Sequence
  Synthetic
guguucucagaaugauag

SEQ ID NO: 577275 - RNA, 19 nt, Artificial Sequence
  Synthetic
cguguucucagaaugauag

SEQ ID NO: 577276 - RNA, 20 nt, Artificial Sequence
  Synthetic
acguguucucagaaugauag

SEQ ID NO: 577277 - RNA, 21 nt, Artificial Sequence
  Synthetic
gacguguucucagaaugauag

SEQ ID NO: 577278 - RNA, 22 nt, Artificial Sequence
  Synthetic
ggacguguucucagaaugauag

SEQ ID NO: 577279 - RNA, 23 nt, Artificial Sequence
  Synthetic
uggacguguucucagaaugauag

SEQ ID NO: 577280 - RNA, 24 nt, Artificial Sequence
  Synthetic
auggacguguucucagaaugauag

SEQ ID NO: 577281 - RNA, 18 nt, Artificial Sequence
  Synthetic
uuugcaaaaauaugauag

SEQ ID NO: 577282 - RNA, 19 nt, Artificial Sequence
  Synthetic
auuugcaaaaauaugauag

SEQ ID NO: 577283 - RNA, 20 nt, Artificial Sequence
  Synthetic
uauuugcaaaaauaugauag

SEQ ID NO: 577284 - RNA, 21 nt, Artificial Sequence
  Synthetic
auauuugcaaaaauaugauag

SEQ ID NO: 577285 - RNA, 22 nt, Artificial Sequence
  Synthetic
uauauuugcaaaaauaugauag

SEQ ID NO: 577286 - RNA, 23 nt, Artificial Sequence
  Synthetic
auauauuugcaaaaauaugauag

SEQ ID NO: 577287 - RNA, 24 nt, Artificial Sequence
  Synthetic
aauauauuugcaaaaauaugauag

SEQ ID NO: 577288 - RNA, 18 nt, Artificial Sequence
  Synthetic
uuaaaagauuuaugauag

SEQ ID NO: 577289 - RNA, 19 nt, Artificial Sequence
  Synthetic
uuuaaaagauuuaugauag

SEQ ID NO: 577290 - RNA, 20 nt, Artificial Sequence
  Synthetic
uuuuaaaagauuuaugauag

SEQ ID NO: 577291 - RNA, 21 nt, Artificial Sequence
  Synthetic
auuuuaaaagauuuaugauag

SEQ ID NO: 577292 - RNA, 22 nt, Artificial Sequence
  Synthetic
aauuuuaaaagauuuaugauag

SEQ ID NO: 577293 - RNA, 23 nt, Artificial Sequence
  Synthetic
aaauuuuaaaagauuuaugauag

SEQ ID NO: 577294 - RNA, 24 nt, Artificial Sequence
  Synthetic
gaaauuuuaaaagauuuaugauag

SEQ ID NO: 577295 - RNA, 18 nt, Artificial Sequence
  Synthetic
uuacgaaguggcugauag

SEQ ID NO: 577296 - RNA, 19 nt, Artificial Sequence
  Synthetic
cuuacgaaguggcugauag

SEQ ID NO: 577297 - RNA, 20 nt, Artificial Sequence
  Synthetic
ucuuacgaaguggcugauag

SEQ ID NO: 577298 - RNA, 21 nt, Artificial Sequence
  Synthetic
aucuuacgaaguggcugauag

SEQ ID NO: 577299 - RNA, 22 nt, Artificial Sequence
  Synthetic
uaucuuacgaaguggcugauag

SEQ ID NO: 577300 - RNA, 23 nt, Artificial Sequence
  Synthetic
auaucuuacgaaguggcugauag

SEQ ID NO: 577301 - RNA, 24 nt, Artificial Sequence
  Synthetic
aauaucuuacgaaguggcugauag

SEQ ID NO: 577302 - RNA, 18 nt, Artificial Sequence
  Synthetic
guguuuauuuucugauag

SEQ ID NO: 577303 - RNA, 19 nt, Artificial Sequence
  Synthetic
uguguuuauuuucugauag

SEQ ID NO: 577304 - RNA, 20 nt, Artificial Sequence
  Synthetic
auguguuuauuuucugauag

SEQ ID NO: 577305 - RNA, 21 nt, Artificial Sequence
  Synthetic
uauguguuuauuuucugauag

SEQ ID NO: 577306 - RNA, 22 nt, Artificial Sequence
  Synthetic
guauguguuuauuuucugauag

SEQ ID NO: 577307 - RNA, 23 nt, Artificial Sequence
  Synthetic
aguauguguuuauuuucugauag

SEQ ID NO: 577308 - RNA, 24 nt, Artificial Sequence
  Synthetic
aaguauguguuuauuuucugauag

SEQ ID NO: 577309 - RNA, 18 nt, Artificial Sequence
  Synthetic
gcuaaacaaaggugauag

SEQ ID NO: 577310 - RNA, 19 nt, Artificial Sequence
  Synthetic
agcuaaacaaaggugauag

SEQ ID NO: 577311 - RNA, 20 nt, Artificial Sequence
  Synthetic
uagcuaaacaaaggugauag

SEQ ID NO: 577312 - RNA, 21 nt, Artificial Sequence
  Synthetic
cuagcuaaacaaaggugauag

SEQ ID NO: 577313 - RNA, 22 nt, Artificial Sequence
  Synthetic
acuagcuaaacaaaggugauag

SEQ ID NO: 577314 - RNA, 23 nt, Artificial Sequence
  Synthetic
aacuagcuaaacaaaggugauag

SEQ ID NO: 577315 - RNA, 24 nt, Artificial Sequence
  Synthetic
uaacuagcuaaacaaaggugauag

SEQ ID NO: 577316 - RNA, 18 nt, Artificial Sequence
  Synthetic
cuuuucacagggugauag

SEQ ID NO: 577317 - RNA, 19 nt, Artificial Sequence
  Synthetic
ccuuuucacagggugauag

SEQ ID NO: 577318 - RNA, 20 nt, Artificial Sequence
  Synthetic
accuuuucacagggugauag

SEQ ID NO: 577319 - RNA, 21 nt, Artificial Sequence
  Synthetic
caccuuuucacagggugauag

SEQ ID NO: 577320 - RNA, 22 nt, Artificial Sequence
  Synthetic
gcaccuuuucacagggugauag

SEQ ID NO: 577321 - RNA, 23 nt, Artificial Sequence
  Synthetic
ggcaccuuuucacagggugauag

SEQ ID NO: 577322 - RNA, 24 nt, Artificial Sequence
  Synthetic
aggcaccuuuucacagggugauag

SEQ ID NO: 577323 - RNA, 18 nt, Artificial Sequence
  Synthetic
aaaggaaaaaugugauag

SEQ ID NO: 577324 - RNA, 19 nt, Artificial Sequence
  Synthetic
gaaaggaaaaaugugauag

SEQ ID NO: 577325 - RNA, 20 nt, Artificial Sequence
  Synthetic
ugaaaggaaaaaugugauag

SEQ ID NO: 577326 - RNA, 21 nt, Artificial Sequence
  Synthetic
gugaaaggaaaaaugugauag

SEQ ID NO: 577327 - RNA, 22 nt, Artificial Sequence
  Synthetic
agugaaaggaaaaaugugauag

SEQ ID NO: 577328 - RNA, 23 nt, Artificial Sequence
  Synthetic
gagugaaaggaaaaaugugauag

SEQ ID NO: 577329 - RNA, 24 nt, Artificial Sequence
  Synthetic
agagugaaaggaaaaaugugauag

SEQ ID NO: 577330 - RNA, 18 nt, Artificial Sequence
  Synthetic
uauauccuacauugauag

SEQ ID NO: 577331 - RNA, 19 nt, Artificial Sequence
  Synthetic
uuauauccuacauugauag

SEQ ID NO: 577332 - RNA, 20 nt, Artificial Sequence
  Synthetic
uuuauauccuacauugauag

SEQ ID NO: 577333 - RNA, 21 nt, Artificial Sequence
  Synthetic
auuuauauccuacauugauag

SEQ ID NO: 577334 - RNA, 22 nt, Artificial Sequence
  Synthetic
aauuuauauccuacauugauag

SEQ ID NO: 577335 - RNA, 23 nt, Artificial Sequence
  Synthetic
aaauuuauauccuacauugauag

SEQ ID NO: 577336 - RNA, 24 nt, Artificial Sequence
  Synthetic
gaaauuuauauccuacauugauag

SEQ ID NO: 577337 - RNA, 18 nt, Artificial Sequence
  Synthetic
uuuucuugccuuugauag

SEQ ID NO: 577338 - RNA, 19 nt, Artificial Sequence
  Synthetic
uuuuucuugccuuugauag

SEQ ID NO: 577339 - RNA, 20 nt, Artificial Sequence
  Synthetic
auuuuucuugccuuugauag

SEQ ID NO: 577340 - RNA, 21 nt, Artificial Sequence
  Synthetic
uauuuuucuugccuuugauag

SEQ ID NO: 577341 - RNA, 22 nt, Artificial Sequence
  Synthetic
guauuuuucuugccuuugauag

SEQ ID NO: 577342 - RNA, 23 nt, Artificial Sequence
  Synthetic
uguauuuuucuugccuuugauag

SEQ ID NO: 577343 - RNA, 24 nt, Artificial Sequence
  Synthetic
guguauuuuucuugccuuugauag

SEQ ID NO: 577344 - RNA, 18 nt, Artificial Sequence
  Synthetic
aauucagcaaaaauauag

SEQ ID NO: 577345 - RNA, 19 nt, Artificial Sequence
  Synthetic
uaauucagcaaaaauauag

SEQ ID NO: 577346 - RNA, 20 nt, Artificial Sequence
  Synthetic
auaauucagcaaaaauauag

SEQ ID NO: 577347 - RNA, 21 nt, Artificial Sequence
  Synthetic
uauaauucagcaaaaauauag

SEQ ID NO: 577348 - RNA, 22 nt, Artificial Sequence
  Synthetic
guauaauucagcaaaaauauag

SEQ ID NO: 577349 - RNA, 23 nt, Artificial Sequence
  Synthetic
uguauaauucagcaaaaauauag

SEQ ID NO: 577350 - RNA, 24 nt, Artificial Sequence
  Synthetic
uuguauaauucagcaaaaauauag

SEQ ID NO: 577351 - RNA, 18 nt, Artificial Sequence
  Synthetic
aguuauuucaaaauauag

SEQ ID NO: 577352 - RNA, 19 nt, Artificial Sequence
  Synthetic
aaguuauuucaaaauauag

SEQ ID NO: 577353 - RNA, 20 nt, Artificial Sequence
  Synthetic
gaaguuauuucaaaauauag

SEQ ID NO: 577354 - RNA, 21 nt, Artificial Sequence
  Synthetic
agaaguuauuucaaaauauag

SEQ ID NO: 577355 - RNA, 22 nt, Artificial Sequence
  Synthetic
aagaaguuauuucaaaauauag

SEQ ID NO: 577356 - RNA, 23 nt, Artificial Sequence
  Synthetic
aaagaaguuauuucaaaauauag

SEQ ID NO: 577357 - RNA, 24 nt, Artificial Sequence
  Synthetic
gaaagaaguuauuucaaaauauag

SEQ ID NO: 577358 - RNA, 18 nt, Artificial Sequence
  Synthetic
auuuugacauaaauauag

SEQ ID NO: 577359 - RNA, 19 nt, Artificial Sequence
  Synthetic
cauuuugacauaaauauag

SEQ ID NO: 577360 - RNA, 20 nt, Artificial Sequence
  Synthetic
ccauuuugacauaaauauag

SEQ ID NO: 577361 - RNA, 21 nt, Artificial Sequence
  Synthetic
uccauuuugacauaaauauag

SEQ ID NO: 577362 - RNA, 22 nt, Artificial Sequence
  Synthetic
guccauuuugacauaaauauag

SEQ ID NO: 577363 - RNA, 23 nt, Artificial Sequence
  Synthetic
aguccauuuugacauaaauauag

SEQ ID NO: 577364 - RNA, 24 nt, Artificial Sequence
  Synthetic
gaguccauuuugacauaaauauag

SEQ ID NO: 577365 - RNA, 18 nt, Artificial Sequence
  Synthetic
guguaaggagcaauauag

SEQ ID NO: 577366 - RNA, 19 nt, Artificial Sequence
  Synthetic
uguguaaggagcaauauag

SEQ ID NO: 577367 - RNA, 20 nt, Artificial Sequence
  Synthetic
auguguaaggagcaauauag

SEQ ID NO: 577368 - RNA, 21 nt, Artificial Sequence
  Synthetic
cauguguaaggagcaauauag

SEQ ID NO: 577369 - RNA, 22 nt, Artificial Sequence
  Synthetic
ccauguguaaggagcaauauag

SEQ ID NO: 577370 - RNA, 23 nt, Artificial Sequence
  Synthetic
cccauguguaaggagcaauauag

SEQ ID NO: 577371 - RNA, 24 nt, Artificial Sequence
  Synthetic
ucccauguguaaggagcaauauag

SEQ ID NO: 577372 - RNA, 18 nt, Artificial Sequence
  Synthetic
uagagaaggagaauauag

SEQ ID NO: 577373 - RNA, 19 nt, Artificial Sequence
  Synthetic
uuagagaaggagaauauag

SEQ ID NO: 577374 - RNA, 20 nt, Artificial Sequence
  Synthetic
auuagagaaggagaauauag

SEQ ID NO: 577375 - RNA, 21 nt, Artificial Sequence
  Synthetic
aauuagagaaggagaauauag

SEQ ID NO: 577376 - RNA, 22 nt, Artificial Sequence
  Synthetic
caauuagagaaggagaauauag

SEQ ID NO: 577377 - RNA, 23 nt, Artificial Sequence
  Synthetic
acaauuagagaaggagaauauag

SEQ ID NO: 577378 - RNA, 24 nt, Artificial Sequence
  Synthetic
aacaauuagagaaggagaauauag

SEQ ID NO: 577379 - RNA, 18 nt, Artificial Sequence
  Synthetic
uuccccauuuuaauauag

SEQ ID NO: 577380 - RNA, 19 nt, Artificial Sequence
  Synthetic
cuuccccauuuuaauauag

SEQ ID NO: 577381 - RNA, 20 nt, Artificial Sequence
  Synthetic
acuuccccauuuuaauauag

SEQ ID NO: 577382 - RNA, 21 nt, Artificial Sequence
  Synthetic
aacuuccccauuuuaauauag

SEQ ID NO: 577383 - RNA, 22 nt, Artificial Sequence
  Synthetic
aaacuuccccauuuuaauauag

SEQ ID NO: 577384 - RNA, 23 nt, Artificial Sequence
  Synthetic
aaaacuuccccauuuuaauauag

SEQ ID NO: 577385 - RNA, 24 nt, Artificial Sequence
  Synthetic
gaaaacuuccccauuuuaauauag

SEQ ID NO: 577386 - RNA, 18 nt, Artificial Sequence
  Synthetic
agcacugcaaacauauag

SEQ ID NO: 577387 - RNA, 19 nt, Artificial Sequence
  Synthetic
aagcacugcaaacauauag

SEQ ID NO: 577388 - RNA, 20 nt, Artificial Sequence
  Synthetic
caagcacugcaaacauauag

SEQ ID NO: 577389 - RNA, 21 nt, Artificial Sequence
  Synthetic
ccaagcacugcaaacauauag

SEQ ID NO: 577390 - RNA, 22 nt, Artificial Sequence
  Synthetic
accaagcacugcaaacauauag

SEQ ID NO: 577391 - RNA, 23 nt, Artificial Sequence
  Synthetic
uaccaagcacugcaaacauauag

SEQ ID NO: 577392 - RNA, 24 nt, Artificial Sequence
  Synthetic
auaccaagcacugcaaacauauag

SEQ ID NO: 577393 - RNA, 18 nt, Artificial Sequence
  Synthetic
aaagauacaaagauauag

SEQ ID NO: 577394 - RNA, 19 nt, Artificial Sequence
  Synthetic
aaaagauacaaagauauag

SEQ ID NO: 577395 - RNA, 20 nt, Artificial Sequence
  Synthetic
aaaaagauacaaagauauag

SEQ ID NO: 577396 - RNA, 21 nt, Artificial Sequence
  Synthetic
gaaaaagauacaaagauauag

SEQ ID NO: 577397 - RNA, 22 nt, Artificial Sequence
  Synthetic
ggaaaaagauacaaagauauag

SEQ ID NO: 577398 - RNA, 23 nt, Artificial Sequence
  Synthetic
uggaaaaagauacaaagauauag

SEQ ID NO: 577399 - RNA, 24 nt, Artificial Sequence
  Synthetic
uuggaaaaagauacaaagauauag

SEQ ID NO: 577400 - RNA, 18 nt, Artificial Sequence
  Synthetic
uagacacacuagauauag

SEQ ID NO: 577401 - RNA, 19 nt, Artificial Sequence
  Synthetic
guagacacacuagauauag

SEQ ID NO: 577402 - RNA, 20 nt, Artificial Sequence
  Synthetic
aguagacacacuagauauag

SEQ ID NO: 577403 - RNA, 21 nt, Artificial Sequence
  Synthetic
uaguagacacacuagauauag

SEQ ID NO: 577404 - RNA, 22 nt, Artificial Sequence
  Synthetic
auaguagacacacuagauauag

SEQ ID NO: 577405 - RNA, 23 nt, Artificial Sequence
  Synthetic
aauaguagacacacuagauauag

SEQ ID NO: 577406 - RNA, 24 nt, Artificial Sequence
  Synthetic
aaauaguagacacacuagauauag

SEQ ID NO: 577407 - RNA, 18 nt, Artificial Sequence
  Synthetic
uacuuaacugauauauag

SEQ ID NO: 577408 - RNA, 19 nt, Artificial Sequence
  Synthetic
uuacuuaacugauauauag

SEQ ID NO: 577409 - RNA, 20 nt, Artificial Sequence
  Synthetic
auuacuuaacugauauauag

SEQ ID NO: 577410 - RNA, 21 nt, Artificial Sequence
  Synthetic
uauuacuuaacugauauauag

SEQ ID NO: 577411 - RNA, 22 nt, Artificial Sequence
  Synthetic
uuauuacuuaacugauauauag

SEQ ID NO: 577412 - RNA, 23 nt, Artificial Sequence
  Synthetic
guuauuacuuaacugauauauag

SEQ ID NO: 577413 - RNA, 24 nt, Artificial Sequence
  Synthetic
aguuauuacuuaacugauauauag

SEQ ID NO: 577414 - RNA, 18 nt, Artificial Sequence
  Synthetic
cauacaaaucaccuauag

SEQ ID NO: 577415 - RNA, 19 nt, Artificial Sequence
  Synthetic
ucauacaaaucaccuauag

SEQ ID NO: 577416 - RNA, 20 nt, Artificial Sequence
  Synthetic
uucauacaaaucaccuauag

SEQ ID NO: 577417 - RNA, 21 nt, Artificial Sequence
  Synthetic
auucauacaaaucaccuauag

SEQ ID NO: 577418 - RNA, 22 nt, Artificial Sequence
  Synthetic
aauucauacaaaucaccuauag

SEQ ID NO: 577419 - RNA, 23 nt, Artificial Sequence
  Synthetic
aaauucauacaaaucaccuauag

SEQ ID NO: 577420 - RNA, 24 nt, Artificial Sequence
  Synthetic
uaaauucauacaaaucaccuauag

SEQ ID NO: 577421 - RNA, 18 nt, Artificial Sequence
  Synthetic
auugguguugaccuauag

SEQ ID NO: 577422 - RNA, 19 nt, Artificial Sequence
  Synthetic
aauugguguugaccuauag

SEQ ID NO: 577423 - RNA, 20 nt, Artificial Sequence
  Synthetic
aaauugguguugaccuauag

SEQ ID NO: 577424 - RNA, 21 nt, Artificial Sequence
  Synthetic
aaaauugguguugaccuauag

SEQ ID NO: 577425 - RNA, 22 nt, Artificial Sequence
  Synthetic
uaaaauugguguugaccuauag

SEQ ID NO: 577426 - RNA, 23 nt, Artificial Sequence
  Synthetic
uuaaaauugguguugaccuauag

SEQ ID NO: 577427 - RNA, 24 nt, Artificial Sequence
  Synthetic
cuuaaaauugguguugaccuauag

SEQ ID NO: 577428 - RNA, 18 nt, Artificial Sequence
  Synthetic
guacauuuacugcuauag

SEQ ID NO: 577429 - RNA, 19 nt, Artificial Sequence
  Synthetic
gguacauuuacugcuauag

SEQ ID NO: 577430 - RNA, 20 nt, Artificial Sequence
  Synthetic
ugguacauuuacugcuauag

SEQ ID NO: 577431 - RNA, 21 nt, Artificial Sequence
  Synthetic
gugguacauuuacugcuauag

SEQ ID NO: 577432 - RNA, 22 nt, Artificial Sequence
  Synthetic
ggugguacauuuacugcuauag

SEQ ID NO: 577433 - RNA, 23 nt, Artificial Sequence
  Synthetic
uggugguacauuuacugcuauag

SEQ ID NO: 577434 - RNA, 24 nt, Artificial Sequence
  Synthetic
auggugguacauuuacugcuauag

SEQ ID NO: 577435 - RNA, 18 nt, Artificial Sequence
  Synthetic
gcagcuuuuauucuauag

SEQ ID NO: 577436 - RNA, 19 nt, Artificial Sequence
  Synthetic
agcagcuuuuauucuauag

SEQ ID NO: 577437 - RNA, 20 nt, Artificial Sequence
  Synthetic
uagcagcuuuuauucuauag

SEQ ID NO: 577438 - RNA, 21 nt, Artificial Sequence
  Synthetic
auagcagcuuuuauucuauag

SEQ ID NO: 577439 - RNA, 22 nt, Artificial Sequence
  Synthetic
aauagcagcuuuuauucuauag

SEQ ID NO: 577440 - RNA, 23 nt, Artificial Sequence
  Synthetic
caauagcagcuuuuauucuauag

SEQ ID NO: 577441 - RNA, 24 nt, Artificial Sequence
  Synthetic
gcaauagcagcuuuuauucuauag

SEQ ID NO: 577442 - RNA, 18 nt, Artificial Sequence
  Synthetic
agaagacauguucuauag

SEQ ID NO: 577443 - RNA, 19 nt, Artificial Sequence
  Synthetic
gagaagacauguucuauag

SEQ ID NO: 577444 - RNA, 20 nt, Artificial Sequence
  Synthetic
ugagaagacauguucuauag

SEQ ID NO: 577445 - RNA, 21 nt, Artificial Sequence
  Synthetic
augagaagacauguucuauag

SEQ ID NO: 577446 - RNA, 22 nt, Artificial Sequence
  Synthetic
aaugagaagacauguucuauag

SEQ ID NO: 577447 - RNA, 23 nt, Artificial Sequence
  Synthetic
caaugagaagacauguucuauag

SEQ ID NO: 577448 - RNA, 24 nt, Artificial Sequence
  Synthetic
ccaaugagaagacauguucuauag

SEQ ID NO: 577449 - RNA, 18 nt, Artificial Sequence
  Synthetic
gugacuuaaaaaguauag

SEQ ID NO: 577450 - RNA, 19 nt, Artificial Sequence
  Synthetic
ggugacuuaaaaaguauag

SEQ ID NO: 577451 - RNA, 20 nt, Artificial Sequence
  Synthetic
aggugacuuaaaaaguauag

SEQ ID NO: 577452 - RNA, 21 nt, Artificial Sequence
  Synthetic
aaggugacuuaaaaaguauag

SEQ ID NO: 577453 - RNA, 22 nt, Artificial Sequence
  Synthetic
gaaggugacuuaaaaaguauag

SEQ ID NO: 577454 - RNA, 23 nt, Artificial Sequence
  Synthetic
ggaaggugacuuaaaaaguauag

SEQ ID NO: 577455 - RNA, 24 nt, Artificial Sequence
  Synthetic
aggaaggugacuuaaaaaguauag

SEQ ID NO: 577456 - RNA, 18 nt, Artificial Sequence
  Synthetic
aauuacuucaaaguauag

SEQ ID NO: 577457 - RNA, 19 nt, Artificial Sequence
  Synthetic
caauuacuucaaaguauag

SEQ ID NO: 577458 - RNA, 20 nt, Artificial Sequence
  Synthetic
acaauuacuucaaaguauag

SEQ ID NO: 577459 - RNA, 21 nt, Artificial Sequence
  Synthetic
cacaauuacuucaaaguauag

SEQ ID NO: 577460 - RNA, 22 nt, Artificial Sequence
  Synthetic
ucacaauuacuucaaaguauag

SEQ ID NO: 577461 - RNA, 23 nt, Artificial Sequence
  Synthetic
aucacaauuacuucaaaguauag

SEQ ID NO: 577462 - RNA, 24 nt, Artificial Sequence
  Synthetic
gaucacaauuacuucaaaguauag

SEQ ID NO: 577463 - RNA, 18 nt, Artificial Sequence
  Synthetic
ucuagcaacacaguauag

SEQ ID NO: 577464 - RNA, 19 nt, Artificial Sequence
  Synthetic
cucuagcaacacaguauag

SEQ ID NO: 577465 - RNA, 20 nt, Artificial Sequence
  Synthetic
acucuagcaacacaguauag

SEQ ID NO: 577466 - RNA, 21 nt, Artificial Sequence
  Synthetic
aacucuagcaacacaguauag

SEQ ID NO: 577467 - RNA, 22 nt, Artificial Sequence
  Synthetic
aaacucuagcaacacaguauag

SEQ ID NO: 577468 - RNA, 23 nt, Artificial Sequence
  Synthetic
gaaacucuagcaacacaguauag

SEQ ID NO: 577469 - RNA, 24 nt, Artificial Sequence
  Synthetic
agaaacucuagcaacacaguauag

SEQ ID NO: 577470 - RNA, 18 nt, Artificial Sequence
  Synthetic
uucccugauggaguauag

SEQ ID NO: 577471 - RNA, 19 nt, Artificial Sequence
  Synthetic
guucccugauggaguauag

SEQ ID NO: 577472 - RNA, 20 nt, Artificial Sequence
  Synthetic
uguucccugauggaguauag

SEQ ID NO: 577473 - RNA, 21 nt, Artificial Sequence
  Synthetic
uuguucccugauggaguauag

SEQ ID NO: 577474 - RNA, 22 nt, Artificial Sequence
  Synthetic
auuguucccugauggaguauag

SEQ ID NO: 577475 - RNA, 23 nt, Artificial Sequence
  Synthetic
uauuguucccugauggaguauag

SEQ ID NO: 577476 - RNA, 24 nt, Artificial Sequence
  Synthetic
cuauuguucccugauggaguauag

SEQ ID NO: 577477 - RNA, 18 nt, Artificial Sequence
  Synthetic
uuagcaaauuagguauag

SEQ ID NO: 577478 - RNA, 19 nt, Artificial Sequence
  Synthetic
cuuagcaaauuagguauag

SEQ ID NO: 577479 - RNA, 20 nt, Artificial Sequence
  Synthetic
ucuuagcaaauuagguauag

SEQ ID NO: 577480 - RNA, 21 nt, Artificial Sequence
  Synthetic
cucuuagcaaauuagguauag

SEQ ID NO: 577481 - RNA, 22 nt, Artificial Sequence
  Synthetic
acucuuagcaaauuagguauag

SEQ ID NO: 577482 - RNA, 23 nt, Artificial Sequence
  Synthetic
aacucuuagcaaauuagguauag

SEQ ID NO: 577483 - RNA, 24 nt, Artificial Sequence
  Synthetic
aaacucuuagcaaauuagguauag

SEQ ID NO: 577484 - RNA, 18 nt, Artificial Sequence
  Synthetic
guagguaguaugguauag

SEQ ID NO: 577485 - RNA, 19 nt, Artificial Sequence
  Synthetic
gguagguaguaugguauag

SEQ ID NO: 577486 - RNA, 20 nt, Artificial Sequence
  Synthetic
agguagguaguaugguauag

SEQ ID NO: 577487 - RNA, 21 nt, Artificial Sequence
  Synthetic
uagguagguaguaugguauag

SEQ ID NO: 577488 - RNA, 22 nt, Artificial Sequence
  Synthetic
cuagguagguaguaugguauag

SEQ ID NO: 577489 - RNA, 23 nt, Artificial Sequence
  Synthetic
acuagguagguaguaugguauag

SEQ ID NO: 577490 - RNA, 24 nt, Artificial Sequence
  Synthetic
aacuagguagguaguaugguauag

SEQ ID NO: 577491 - RNA, 18 nt, Artificial Sequence
  Synthetic
uaaauacaaauuguauag

SEQ ID NO: 577492 - RNA, 19 nt, Artificial Sequence
  Synthetic
auaaauacaaauuguauag

SEQ ID NO: 577493 - RNA, 20 nt, Artificial Sequence
  Synthetic
uauaaauacaaauuguauag

SEQ ID NO: 577494 - RNA, 21 nt, Artificial Sequence
  Synthetic
auauaaauacaaauuguauag

SEQ ID NO: 577495 - RNA, 22 nt, Artificial Sequence
  Synthetic
gauauaaauacaaauuguauag

SEQ ID NO: 577496 - RNA, 23 nt, Artificial Sequence
  Synthetic
agauauaaauacaaauuguauag

SEQ ID NO: 577497 - RNA, 24 nt, Artificial Sequence
  Synthetic
cagauauaaauacaaauuguauag

SEQ ID NO: 577498 - RNA, 18 nt, Artificial Sequence
  Synthetic
uuucucaggcuauuauag

SEQ ID NO: 577499 - RNA, 19 nt, Artificial Sequence
  Synthetic
auuucucaggcuauuauag

SEQ ID NO: 577500 - RNA, 20 nt, Artificial Sequence
  Synthetic
gauuucucaggcuauuauag

SEQ ID NO: 577501 - RNA, 21 nt, Artificial Sequence
  Synthetic
cgauuucucaggcuauuauag

SEQ ID NO: 577502 - RNA, 22 nt, Artificial Sequence
  Synthetic
ccgauuucucaggcuauuauag

SEQ ID NO: 577503 - RNA, 23 nt, Artificial Sequence
  Synthetic
accgauuucucaggcuauuauag

SEQ ID NO: 577504 - RNA, 24 nt, Artificial Sequence
  Synthetic
caccgauuucucaggcuauuauag

SEQ ID NO: 577505 - RNA, 18 nt, Artificial Sequence
  Synthetic
uaugauuaaguauuauag

SEQ ID NO: 577506 - RNA, 19 nt, Artificial Sequence
  Synthetic
uuaugauuaaguauuauag

SEQ ID NO: 577507 - RNA, 20 nt, Artificial Sequence
  Synthetic
auuaugauuaaguauuauag

SEQ ID NO: 577508 - RNA, 21 nt, Artificial Sequence
  Synthetic
gauuaugauuaaguauuauag

SEQ ID NO: 577509 - RNA, 22 nt, Artificial Sequence
  Synthetic
ggauuaugauuaaguauuauag

SEQ ID NO: 577510 - RNA, 23 nt, Artificial Sequence
  Synthetic
aggauuaugauuaaguauuauag

SEQ ID NO: 577511 - RNA, 24 nt, Artificial Sequence
  Synthetic
aaggauuaugauuaaguauuauag

SEQ ID NO: 577512 - RNA, 18 nt, Artificial Sequence
  Synthetic
ucaagaaaauuauuauag

SEQ ID NO: 577513 - RNA, 19 nt, Artificial Sequence
  Synthetic
aucaagaaaauuauuauag

SEQ ID NO: 577514 - RNA, 20 nt, Artificial Sequence
  Synthetic
gaucaagaaaauuauuauag

SEQ ID NO: 577515 - RNA, 21 nt, Artificial Sequence
  Synthetic
agaucaagaaaauuauuauag

SEQ ID NO: 577516 - RNA, 22 nt, Artificial Sequence
  Synthetic
cagaucaagaaaauuauuauag

SEQ ID NO: 577517 - RNA, 23 nt, Artificial Sequence
  Synthetic
acagaucaagaaaauuauuauag

SEQ ID NO: 577518 - RNA, 24 nt, Artificial Sequence
  Synthetic
cacagaucaagaaaauuauuauag

SEQ ID NO: 577519 - RNA, 18 nt, Artificial Sequence
  Synthetic
aagaguugcuacuuauag

SEQ ID NO: 577520 - RNA, 19 nt, Artificial Sequence
  Synthetic
gaagaguugcuacuuauag

SEQ ID NO: 577521 - RNA, 20 nt, Artificial Sequence
  Synthetic
ugaagaguugcuacuuauag

SEQ ID NO: 577522 - RNA, 21 nt, Artificial Sequence
  Synthetic
augaagaguugcuacuuauag

SEQ ID NO: 577523 - RNA, 22 nt, Artificial Sequence
  Synthetic
gaugaagaguugcuacuuauag

SEQ ID NO: 577524 - RNA, 23 nt, Artificial Sequence
  Synthetic
ggaugaagaguugcuacuuauag

SEQ ID NO: 577525 - RNA, 24 nt, Artificial Sequence
  Synthetic
uggaugaagaguugcuacuuauag

SEQ ID NO: 577526 - RNA, 18 nt, Artificial Sequence
  Synthetic
gagaagcagaauuuauag

SEQ ID NO: 577527 - RNA, 19 nt, Artificial Sequence
  Synthetic
ggagaagcagaauuuauag

SEQ ID NO: 577528 - RNA, 20 nt, Artificial Sequence
  Synthetic
aggagaagcagaauuuauag

SEQ ID NO: 577529 - RNA, 21 nt, Artificial Sequence
  Synthetic
gaggagaagcagaauuuauag

SEQ ID NO: 577530 - RNA, 22 nt, Artificial Sequence
  Synthetic
ggaggagaagcagaauuuauag

SEQ ID NO: 577531 - RNA, 23 nt, Artificial Sequence
  Synthetic
gggaggagaagcagaauuuauag

SEQ ID NO: 577532 - RNA, 24 nt, Artificial Sequence
  Synthetic
agggaggagaagcagaauuuauag

SEQ ID NO: 577533 - RNA, 18 nt, Artificial Sequence
  Synthetic
guuugaagguauuuauag

SEQ ID NO: 577534 - RNA, 19 nt, Artificial Sequence
  Synthetic
uguuugaagguauuuauag

SEQ ID NO: 577535 - RNA, 20 nt, Artificial Sequence
  Synthetic
uuguuugaagguauuuauag

SEQ ID NO: 577536 - RNA, 21 nt, Artificial Sequence
  Synthetic
guuguuugaagguauuuauag

SEQ ID NO: 577537 - RNA, 22 nt, Artificial Sequence
  Synthetic
aguuguuugaagguauuuauag

SEQ ID NO: 577538 - RNA, 23 nt, Artificial Sequence
  Synthetic
caguuguuugaagguauuuauag

SEQ ID NO: 577539 - RNA, 24 nt, Artificial Sequence
  Synthetic
ucaguuguuugaagguauuuauag

SEQ ID NO: 577540 - RNA, 18 nt, Artificial Sequence
  Synthetic
aucaugaacaguuuauag

SEQ ID NO: 577541 - RNA, 19 nt, Artificial Sequence
  Synthetic
uaucaugaacaguuuauag

SEQ ID NO: 577542 - RNA, 20 nt, Artificial Sequence
  Synthetic
uuaucaugaacaguuuauag

SEQ ID NO: 577543 - RNA, 21 nt, Artificial Sequence
  Synthetic
auuaucaugaacaguuuauag

SEQ ID NO: 577544 - RNA, 22 nt, Artificial Sequence
  Synthetic
aauuaucaugaacaguuuauag

SEQ ID NO: 577545 - RNA, 23 nt, Artificial Sequence
  Synthetic
uaauuaucaugaacaguuuauag

SEQ ID NO: 577546 - RNA, 24 nt, Artificial Sequence
  Synthetic
guaauuaucaugaacaguuuauag

SEQ ID NO: 577547 - RNA, 18 nt, Artificial Sequence
  Synthetic
uuugcuuuucuuuuauag

SEQ ID NO: 577548 - RNA, 19 nt, Artificial Sequence
  Synthetic
uuuugcuuuucuuuuauag

SEQ ID NO: 577549 - RNA, 20 nt, Artificial Sequence
  Synthetic
uuuuugcuuuucuuuuauag

SEQ ID NO: 577550 - RNA, 21 nt, Artificial Sequence
  Synthetic
auuuuugcuuuucuuuuauag

SEQ ID NO: 577551 - RNA, 22 nt, Artificial Sequence
  Synthetic
uauuuuugcuuuucuuuuauag

SEQ ID NO: 577552 - RNA, 23 nt, Artificial Sequence
  Synthetic
auauuuuugcuuuucuuuuauag

SEQ ID NO: 577553 - RNA, 24 nt, Artificial Sequence
  Synthetic
aauauuuuugcuuuucuuuuauag

SEQ ID NO: 577554 - RNA, 18 nt, Artificial Sequence
  Synthetic
cccuaggcaguuuuauag

SEQ ID NO: 577555 - RNA, 19 nt, Artificial Sequence
  Synthetic
acccuaggcaguuuuauag

SEQ ID NO: 577556 - RNA, 20 nt, Artificial Sequence
  Synthetic
aacccuaggcaguuuuauag

SEQ ID NO: 577557 - RNA, 21 nt, Artificial Sequence
  Synthetic
aaacccuaggcaguuuuauag

SEQ ID NO: 577558 - RNA, 22 nt, Artificial Sequence
  Synthetic
caaacccuaggcaguuuuauag

SEQ ID NO: 577559 - RNA, 23 nt, Artificial Sequence
  Synthetic
ccaaacccuaggcaguuuuauag

SEQ ID NO: 577560 - RNA, 24 nt, Artificial Sequence
  Synthetic
cccaaacccuaggcaguuuuauag

SEQ ID NO: 577561 - RNA, 18 nt, Artificial Sequence
  Synthetic
uaagcaaaacaaaacuag

SEQ ID NO: 577562 - RNA, 19 nt, Artificial Sequence
  Synthetic
auaagcaaaacaaaacuag

SEQ ID NO: 577563 - RNA, 20 nt, Artificial Sequence
  Synthetic
cauaagcaaaacaaaacuag

SEQ ID NO: 577564 - RNA, 21 nt, Artificial Sequence
  Synthetic
ucauaagcaaaacaaaacuag

SEQ ID NO: 577565 - RNA, 22 nt, Artificial Sequence
  Synthetic
uucauaagcaaaacaaaacuag

SEQ ID NO: 577566 - RNA, 23 nt, Artificial Sequence
  Synthetic
uuucauaagcaaaacaaaacuag

SEQ ID NO: 577567 - RNA, 24 nt, Artificial Sequence
  Synthetic
cuuucauaagcaaaacaaaacuag

SEQ ID NO: 577568 - RNA, 18 nt, Artificial Sequence
  Synthetic
aaaagaacugcaaacuag

SEQ ID NO: 577569 - RNA, 19 nt, Artificial Sequence
  Synthetic
gaaaagaacugcaaacuag

SEQ ID NO: 577570 - RNA, 20 nt, Artificial Sequence
  Synthetic
ggaaaagaacugcaaacuag

SEQ ID NO: 577571 - RNA, 21 nt, Artificial Sequence
  Synthetic
aggaaaagaacugcaaacuag

SEQ ID NO: 577572 - RNA, 22 nt, Artificial Sequence
  Synthetic
aaggaaaagaacugcaaacuag

SEQ ID NO: 577573 - RNA, 23 nt, Artificial Sequence
  Synthetic
aaaggaaaagaacugcaaacuag

SEQ ID NO: 577574 - RNA, 24 nt, Artificial Sequence
  Synthetic
caaaggaaaagaacugcaaacuag

SEQ ID NO: 577575 - RNA, 18 nt, Artificial Sequence
  Synthetic
ucaauacccaccaacuag

SEQ ID NO: 577576 - RNA, 19 nt, Artificial Sequence
  Synthetic
uucaauacccaccaacuag

SEQ ID NO: 577577 - RNA, 20 nt, Artificial Sequence
  Synthetic
cuucaauacccaccaacuag

SEQ ID NO: 577578 - RNA, 21 nt, Artificial Sequence
  Synthetic
ccuucaauacccaccaacuag

SEQ ID NO: 577579 - RNA, 22 nt, Artificial Sequence
  Synthetic
cccuucaauacccaccaacuag

SEQ ID NO: 577580 - RNA, 23 nt, Artificial Sequence
  Synthetic
ucccuucaauacccaccaacuag

SEQ ID NO: 577581 - RNA, 24 nt, Artificial Sequence
  Synthetic
cucccuucaauacccaccaacuag

SEQ ID NO: 577582 - RNA, 18 nt, Artificial Sequence
  Synthetic
uauguagauaagaacuag

SEQ ID NO: 577583 - RNA, 19 nt, Artificial Sequence
  Synthetic
auauguagauaagaacuag

SEQ ID NO: 577584 - RNA, 20 nt, Artificial Sequence
  Synthetic
uauauguagauaagaacuag

SEQ ID NO: 577585 - RNA, 21 nt, Artificial Sequence
  Synthetic
auauauguagauaagaacuag

SEQ ID NO: 577586 - RNA, 22 nt, Artificial Sequence
  Synthetic
aauauauguagauaagaacuag

SEQ ID NO: 577587 - RNA, 23 nt, Artificial Sequence
  Synthetic
aaauauauguagauaagaacuag

SEQ ID NO: 577588 - RNA, 24 nt, Artificial Sequence
  Synthetic
aaaauauauguagauaagaacuag

SEQ ID NO: 577589 - RNA, 18 nt, Artificial Sequence
  Synthetic
ccugcugaaaugaacuag

SEQ ID NO: 577590 - RNA, 19 nt, Artificial Sequence
  Synthetic
accugcugaaaugaacuag

SEQ ID NO: 577591 - RNA, 20 nt, Artificial Sequence
  Synthetic
aaccugcugaaaugaacuag

SEQ ID NO: 577592 - RNA, 21 nt, Artificial Sequence
  Synthetic
aaaccugcugaaaugaacuag

SEQ ID NO: 577593 - RNA, 22 nt, Artificial Sequence
  Synthetic
gaaaccugcugaaaugaacuag

SEQ ID NO: 577594 - RNA, 23 nt, Artificial Sequence
  Synthetic
agaaaccugcugaaaugaacuag

SEQ ID NO: 577595 - RNA, 24 nt, Artificial Sequence
  Synthetic
cagaaaccugcugaaaugaacuag

SEQ ID NO: 577596 - RNA, 18 nt, Artificial Sequence
  Synthetic
cacagaggggaacacuag

SEQ ID NO: 577597 - RNA, 19 nt, Artificial Sequence
  Synthetic
ucacagaggggaacacuag

SEQ ID NO: 577598 - RNA, 20 nt, Artificial Sequence
  Synthetic
uucacagaggggaacacuag

SEQ ID NO: 577599 - RNA, 21 nt, Artificial Sequence
  Synthetic
auucacagaggggaacacuag

SEQ ID NO: 577600 - RNA, 22 nt, Artificial Sequence
  Synthetic
cauucacagaggggaacacuag

SEQ ID NO: 577601 - RNA, 23 nt, Artificial Sequence
  Synthetic
ucauucacagaggggaacacuag

SEQ ID NO: 577602 - RNA, 24 nt, Artificial Sequence
  Synthetic
aucauucacagaggggaacacuag

SEQ ID NO: 577603 - RNA, 18 nt, Artificial Sequence
  Synthetic
agucaugagacacacuag

SEQ ID NO: 577604 - RNA, 19 nt, Artificial Sequence
  Synthetic
aagucaugagacacacuag

SEQ ID NO: 577605 - RNA, 20 nt, Artificial Sequence
  Synthetic
uaagucaugagacacacuag

SEQ ID NO: 577606 - RNA, 21 nt, Artificial Sequence
  Synthetic
uuaagucaugagacacacuag

SEQ ID NO: 577607 - RNA, 22 nt, Artificial Sequence
  Synthetic
guuaagucaugagacacacuag

SEQ ID NO: 577608 - RNA, 23 nt, Artificial Sequence
  Synthetic
gguuaagucaugagacacacuag

SEQ ID NO: 577609 - RNA, 24 nt, Artificial Sequence
  Synthetic
agguuaagucaugagacacacuag

SEQ ID NO: 577610 - RNA, 18 nt, Artificial Sequence
  Synthetic
gucaauaaaagacacuag

SEQ ID NO: 577611 - RNA, 19 nt, Artificial Sequence
  Synthetic
agucaauaaaagacacuag

SEQ ID NO: 577612 - RNA, 20 nt, Artificial Sequence
  Synthetic
aagucaauaaaagacacuag

SEQ ID NO: 577613 - RNA, 21 nt, Artificial Sequence
  Synthetic
aaagucaauaaaagacacuag

SEQ ID NO: 577614 - RNA, 22 nt, Artificial Sequence
  Synthetic
caaagucaauaaaagacacuag

SEQ ID NO: 577615 - RNA, 23 nt, Artificial Sequence
  Synthetic
ucaaagucaauaaaagacacuag

SEQ ID NO: 577616 - RNA, 24 nt, Artificial Sequence
  Synthetic
aucaaagucaauaaaagacacuag

SEQ ID NO: 577617 - RNA, 18 nt, Artificial Sequence
  Synthetic
cauuuacaaggacacuag

SEQ ID NO: 577618 - RNA, 19 nt, Artificial Sequence
  Synthetic
gcauuuacaaggacacuag

SEQ ID NO: 577619 - RNA, 20 nt, Artificial Sequence
  Synthetic
agcauuuacaaggacacuag

SEQ ID NO: 577620 - RNA, 21 nt, Artificial Sequence
  Synthetic
cagcauuuacaaggacacuag

SEQ ID NO: 577621 - RNA, 22 nt, Artificial Sequence
  Synthetic
ucagcauuuacaaggacacuag

SEQ ID NO: 577622 - RNA, 23 nt, Artificial Sequence
  Synthetic
aucagcauuuacaaggacacuag

SEQ ID NO: 577623 - RNA, 24 nt, Artificial Sequence
  Synthetic
aaucagcauuuacaaggacacuag

SEQ ID NO: 577624 - RNA, 18 nt, Artificial Sequence
  Synthetic
acugaaaacauacacuag

SEQ ID NO: 577625 - RNA, 19 nt, Artificial Sequence
  Synthetic
uacugaaaacauacacuag

SEQ ID NO: 577626 - RNA, 20 nt, Artificial Sequence
  Synthetic
uuacugaaaacauacacuag

SEQ ID NO: 577627 - RNA, 21 nt, Artificial Sequence
  Synthetic
guuacugaaaacauacacuag

SEQ ID NO: 577628 - RNA, 22 nt, Artificial Sequence
  Synthetic
uguuacugaaaacauacacuag

SEQ ID NO: 577629 - RNA, 23 nt, Artificial Sequence
  Synthetic
auguuacugaaaacauacacuag

SEQ ID NO: 577630 - RNA, 24 nt, Artificial Sequence
  Synthetic
cauguuacugaaaacauacacuag

SEQ ID NO: 577631 - RNA, 18 nt, Artificial Sequence
  Synthetic
cauggcuagcuacacuag

SEQ ID NO: 577632 - RNA, 19 nt, Artificial Sequence
  Synthetic
acauggcuagcuacacuag

SEQ ID NO: 577633 - RNA, 20 nt, Artificial Sequence
  Synthetic
cacauggcuagcuacacuag

SEQ ID NO: 577634 - RNA, 21 nt, Artificial Sequence
  Synthetic
ccacauggcuagcuacacuag

SEQ ID NO: 577635 - RNA, 22 nt, Artificial Sequence
  Synthetic
uccacauggcuagcuacacuag

SEQ ID NO: 577636 - RNA, 23 nt, Artificial Sequence
  Synthetic
uuccacauggcuagcuacacuag

SEQ ID NO: 577637 - RNA, 24 nt, Artificial Sequence
  Synthetic
guuccacauggcuagcuacacuag

SEQ ID NO: 577638 - RNA, 18 nt, Artificial Sequence
  Synthetic
uggguacugagccacuag

SEQ ID NO: 577639 - RNA, 19 nt, Artificial Sequence
  Synthetic
uuggguacugagccacuag

SEQ ID NO: 577640 - RNA, 20 nt, Artificial Sequence
  Synthetic
guuggguacugagccacuag

SEQ ID NO: 577641 - RNA, 21 nt, Artificial Sequence
  Synthetic
uguuggguacugagccacuag

SEQ ID NO: 577642 - RNA, 22 nt, Artificial Sequence
  Synthetic
cuguuggguacugagccacuag

SEQ ID NO: 577643 - RNA, 23 nt, Artificial Sequence
  Synthetic
gcuguuggguacugagccacuag

SEQ ID NO: 577644 - RNA, 24 nt, Artificial Sequence
  Synthetic
ugcuguuggguacugagccacuag

SEQ ID NO: 577645 - RNA, 18 nt, Artificial Sequence
  Synthetic
caucauggauuccacuag

SEQ ID NO: 577646 - RNA, 19 nt, Artificial Sequence
  Synthetic
ucaucauggauuccacuag

SEQ ID NO: 577647 - RNA, 20 nt, Artificial Sequence
  Synthetic
uucaucauggauuccacuag

SEQ ID NO: 577648 - RNA, 21 nt, Artificial Sequence
  Synthetic
auucaucauggauuccacuag

SEQ ID NO: 577649 - RNA, 22 nt, Artificial Sequence
  Synthetic
aauucaucauggauuccacuag

SEQ ID NO: 577650 - RNA, 23 nt, Artificial Sequence
  Synthetic
gaauucaucauggauuccacuag

SEQ ID NO: 577651 - RNA, 24 nt, Artificial Sequence
  Synthetic
agaauucaucauggauuccacuag

SEQ ID NO: 577652 - RNA, 18 nt, Artificial Sequence
  Synthetic
caauaauggaagcacuag

SEQ ID NO: 577653 - RNA, 19 nt, Artificial Sequence
  Synthetic
ucaauaauggaagcacuag

SEQ ID NO: 577654 - RNA, 20 nt, Artificial Sequence
  Synthetic
uucaauaauggaagcacuag

SEQ ID NO: 577655 - RNA, 21 nt, Artificial Sequence
  Synthetic
uuucaauaauggaagcacuag

SEQ ID NO: 577656 - RNA, 22 nt, Artificial Sequence
  Synthetic
uuuucaauaauggaagcacuag

SEQ ID NO: 577657 - RNA, 23 nt, Artificial Sequence
  Synthetic
uuuuucaauaauggaagcacuag

SEQ ID NO: 577658 - RNA, 24 nt, Artificial Sequence
  Synthetic
uuuuuucaauaauggaagcacuag

SEQ ID NO: 577659 - RNA, 18 nt, Artificial Sequence
  Synthetic
ucaaaaggaaaagacuag

SEQ ID NO: 577660 - RNA, 19 nt, Artificial Sequence
  Synthetic
aucaaaaggaaaagacuag

SEQ ID NO: 577661 - RNA, 20 nt, Artificial Sequence
  Synthetic
aaucaaaaggaaaagacuag

SEQ ID NO: 577662 - RNA, 21 nt, Artificial Sequence
  Synthetic
gaaucaaaaggaaaagacuag

SEQ ID NO: 577663 - RNA, 22 nt, Artificial Sequence
  Synthetic
agaaucaaaaggaaaagacuag

SEQ ID NO: 577664 - RNA, 23 nt, Artificial Sequence
  Synthetic
uagaaucaaaaggaaaagacuag

SEQ ID NO: 577665 - RNA, 24 nt, Artificial Sequence
  Synthetic
cuagaaucaaaaggaaaagacuag

SEQ ID NO: 577666 - RNA, 18 nt, Artificial Sequence
  Synthetic
ccauuuuuuuaagacuag

SEQ ID NO: 577667 - RNA, 19 nt, Artificial Sequence
  Synthetic
uccauuuuuuuaagacuag

SEQ ID NO: 577668 - RNA, 20 nt, Artificial Sequence
  Synthetic
uuccauuuuuuuaagacuag

SEQ ID NO: 577669 - RNA, 21 nt, Artificial Sequence
  Synthetic
cuuccauuuuuuuaagacuag

SEQ ID NO: 577670 - RNA, 22 nt, Artificial Sequence
  Synthetic
ccuuccauuuuuuuaagacuag

SEQ ID NO: 577671 - RNA, 23 nt, Artificial Sequence
  Synthetic
uccuuccauuuuuuuaagacuag

SEQ ID NO: 577672 - RNA, 24 nt, Artificial Sequence
  Synthetic
cuccuuccauuuuuuuaagacuag

SEQ ID NO: 577673 - RNA, 18 nt, Artificial Sequence
  Synthetic
uaauuuuauggggacuag

SEQ ID NO: 577674 - RNA, 19 nt, Artificial Sequence
  Synthetic
uuaauuuuauggggacuag

SEQ ID NO: 577675 - RNA, 20 nt, Artificial Sequence
  Synthetic
guuaauuuuauggggacuag

SEQ ID NO: 577676 - RNA, 21 nt, Artificial Sequence
  Synthetic
uguuaauuuuauggggacuag

SEQ ID NO: 577677 - RNA, 22 nt, Artificial Sequence
  Synthetic
uuguuaauuuuauggggacuag

SEQ ID NO: 577678 - RNA, 23 nt, Artificial Sequence
  Synthetic
uuuguuaauuuuauggggacuag

SEQ ID NO: 577679 - RNA, 24 nt, Artificial Sequence
  Synthetic
auuuguuaauuuuauggggacuag

SEQ ID NO: 577680 - RNA, 18 nt, Artificial Sequence
  Synthetic
aacuagaguuuggacuag

SEQ ID NO: 577681 - RNA, 19 nt, Artificial Sequence
  Synthetic
uaacuagaguuuggacuag

SEQ ID NO: 577682 - RNA, 20 nt, Artificial Sequence
  Synthetic
auaacuagaguuuggacuag

SEQ ID NO: 577683 - RNA, 21 nt, Artificial Sequence
  Synthetic
gauaacuagaguuuggacuag

SEQ ID NO: 577684 - RNA, 22 nt, Artificial Sequence
  Synthetic
agauaacuagaguuuggacuag

SEQ ID NO: 577685 - RNA, 23 nt, Artificial Sequence
  Synthetic
aagauaacuagaguuuggacuag

SEQ ID NO: 577686 - RNA, 24 nt, Artificial Sequence
  Synthetic
uaagauaacuagaguuuggacuag

SEQ ID NO: 577687 - RNA, 18 nt, Artificial Sequence
  Synthetic
gacccuggggacuacuag

SEQ ID NO: 577688 - RNA, 19 nt, Artificial Sequence
  Synthetic
agacccuggggacuacuag

SEQ ID NO: 577689 - RNA, 20 nt, Artificial Sequence
  Synthetic
uagacccuggggacuacuag

SEQ ID NO: 577690 - RNA, 21 nt, Artificial Sequence
  Synthetic
auagacccuggggacuacuag

SEQ ID NO: 577691 - RNA, 22 nt, Artificial Sequence
  Synthetic
aauagacccuggggacuacuag

SEQ ID NO: 577692 - RNA, 23 nt, Artificial Sequence
  Synthetic
caauagacccuggggacuacuag

SEQ ID NO: 577693 - RNA, 24 nt, Artificial Sequence
  Synthetic
acaauagacccuggggacuacuag

SEQ ID NO: 577694 - RNA, 18 nt, Artificial Sequence
  Synthetic
aggaaaccagaguacuag

SEQ ID NO: 577695 - RNA, 19 nt, Artificial Sequence
  Synthetic
gaggaaaccagaguacuag

SEQ ID NO: 577696 - RNA, 20 nt, Artificial Sequence
  Synthetic
ugaggaaaccagaguacuag

SEQ ID NO: 577697 - RNA, 21 nt, Artificial Sequence
  Synthetic
gugaggaaaccagaguacuag

SEQ ID NO: 577698 - RNA, 22 nt, Artificial Sequence
  Synthetic
ugugaggaaaccagaguacuag

SEQ ID NO: 577699 - RNA, 23 nt, Artificial Sequence
  Synthetic
augugaggaaaccagaguacuag

SEQ ID NO: 577700 - RNA, 24 nt, Artificial Sequence
  Synthetic
caugugaggaaaccagaguacuag

SEQ ID NO: 577701 - RNA, 18 nt, Artificial Sequence
  Synthetic
guguguaguuauuacuag

SEQ ID NO: 577702 - RNA, 19 nt, Artificial Sequence
  Synthetic
uguguguaguuauuacuag

SEQ ID NO: 577703 - RNA, 20 nt, Artificial Sequence
  Synthetic
auguguguaguuauuacuag

SEQ ID NO: 577704 - RNA, 21 nt, Artificial Sequence
  Synthetic
gauguguguaguuauuacuag

SEQ ID NO: 577705 - RNA, 22 nt, Artificial Sequence
  Synthetic
agauguguguaguuauuacuag

SEQ ID NO: 577706 - RNA, 23 nt, Artificial Sequence
  Synthetic
uagauguguguaguuauuacuag

SEQ ID NO: 577707 - RNA, 24 nt, Artificial Sequence
  Synthetic
guagauguguguaguuauuacuag

SEQ ID NO: 577708 - RNA, 18 nt, Artificial Sequence
  Synthetic
uuauggauguuuuacuag

SEQ ID NO: 577709 - RNA, 19 nt, Artificial Sequence
  Synthetic
guuauggauguuuuacuag

SEQ ID NO: 577710 - RNA, 20 nt, Artificial Sequence
  Synthetic
aguuauggauguuuuacuag

SEQ ID NO: 577711 - RNA, 21 nt, Artificial Sequence
  Synthetic
aaguuauggauguuuuacuag

SEQ ID NO: 577712 - RNA, 22 nt, Artificial Sequence
  Synthetic
aaaguuauggauguuuuacuag

SEQ ID NO: 577713 - RNA, 23 nt, Artificial Sequence
  Synthetic
aaaaguuauggauguuuuacuag

SEQ ID NO: 577714 - RNA, 24 nt, Artificial Sequence
  Synthetic
gaaaaguuauggauguuuuacuag

SEQ ID NO: 577715 - RNA, 18 nt, Artificial Sequence
  Synthetic
aucaaaaugaucaccuag

SEQ ID NO: 577716 - RNA, 19 nt, Artificial Sequence
  Synthetic
caucaaaaugaucaccuag

SEQ ID NO: 577717 - RNA, 20 nt, Artificial Sequence
  Synthetic
ucaucaaaaugaucaccuag

SEQ ID NO: 577718 - RNA, 21 nt, Artificial Sequence
  Synthetic
aucaucaaaaugaucaccuag

SEQ ID NO: 577719 - RNA, 22 nt, Artificial Sequence
  Synthetic
aaucaucaaaaugaucaccuag

SEQ ID NO: 577720 - RNA, 23 nt, Artificial Sequence
  Synthetic
gaaucaucaaaaugaucaccuag

SEQ ID NO: 577721 - RNA, 24 nt, Artificial Sequence
  Synthetic
ugaaucaucaaaaugaucaccuag

SEQ ID NO: 577722 - RNA, 18 nt, Artificial Sequence
  Synthetic
auggaugcuaucaccuag

SEQ ID NO: 577723 - RNA, 19 nt, Artificial Sequence
  Synthetic
aauggaugcuaucaccuag

SEQ ID NO: 577724 - RNA, 20 nt, Artificial Sequence
  Synthetic
aaauggaugcuaucaccuag

SEQ ID NO: 577725 - RNA, 21 nt, Artificial Sequence
  Synthetic
gaaauggaugcuaucaccuag

SEQ ID NO: 577726 - RNA, 22 nt, Artificial Sequence
  Synthetic
agaaauggaugcuaucaccuag

SEQ ID NO: 577727 - RNA, 23 nt, Artificial Sequence
  Synthetic
uagaaauggaugcuaucaccuag

SEQ ID NO: 577728 - RNA, 24 nt, Artificial Sequence
  Synthetic
guagaaauggaugcuaucaccuag

SEQ ID NO: 577729 - RNA, 18 nt, Artificial Sequence
  Synthetic
aucucucaaaauaccuag

SEQ ID NO: 577730 - RNA, 19 nt, Artificial Sequence
  Synthetic
uaucucucaaaauaccuag

SEQ ID NO: 577731 - RNA, 20 nt, Artificial Sequence
  Synthetic
guaucucucaaaauaccuag

SEQ ID NO: 577732 - RNA, 21 nt, Artificial Sequence
  Synthetic
uguaucucucaaaauaccuag

SEQ ID NO: 577733 - RNA, 22 nt, Artificial Sequence
  Synthetic
uuguaucucucaaaauaccuag

SEQ ID NO: 577734 - RNA, 23 nt, Artificial Sequence
  Synthetic
auuguaucucucaaaauaccuag

SEQ ID NO: 577735 - RNA, 24 nt, Artificial Sequence
  Synthetic
uauuguaucucucaaaauaccuag

SEQ ID NO: 577736 - RNA, 18 nt, Artificial Sequence
  Synthetic
uuugcucuagauaccuag

SEQ ID NO: 577737 - RNA, 19 nt, Artificial Sequence
  Synthetic
guuugcucuagauaccuag

SEQ ID NO: 577738 - RNA, 20 nt, Artificial Sequence
  Synthetic
aguuugcucuagauaccuag

SEQ ID NO: 577739 - RNA, 21 nt, Artificial Sequence
  Synthetic
caguuugcucuagauaccuag

SEQ ID NO: 577740 - RNA, 22 nt, Artificial Sequence
  Synthetic
acaguuugcucuagauaccuag

SEQ ID NO: 577741 - RNA, 23 nt, Artificial Sequence
  Synthetic
uacaguuugcucuagauaccuag

SEQ ID NO: 577742 - RNA, 24 nt, Artificial Sequence
  Synthetic
uuacaguuugcucuagauaccuag

SEQ ID NO: 577743 - RNA, 24 nt, Artificial Sequence
  Synthetic
gaccuaaaaccauaaaaacccuag

SEQ ID NO: 577744 - RNA, 18 nt, Artificial Sequence
  Synthetic
aaaccaucaaaacccuag

SEQ ID NO: 577745 - RNA, 19 nt, Artificial Sequence
  Synthetic
aaaaccaucaaaacccuag

SEQ ID NO: 577746 - RNA, 20 nt, Artificial Sequence
  Synthetic
gaaaaccaucaaaacccuag

SEQ ID NO: 577747 - RNA, 21 nt, Artificial Sequence
  Synthetic
cgaaaaccaucaaaacccuag

SEQ ID NO: 577748 - RNA, 22 nt, Artificial Sequence
  Synthetic
ccgaaaaccaucaaaacccuag

SEQ ID NO: 577749 - RNA, 23 nt, Artificial Sequence
  Synthetic
accgaaaaccaucaaaacccuag

SEQ ID NO: 577750 - RNA, 24 nt, Artificial Sequence
  Synthetic
aaccgaaaaccaucaaaacccuag

SEQ ID NO: 577751 - RNA, 18 nt, Artificial Sequence
  Synthetic
aaaaccauaaaacccuag

SEQ ID NO: 577752 - RNA, 19 nt, Artificial Sequence
  Synthetic
uaaaaccauaaaacccuag

SEQ ID NO: 577753 - RNA, 20 nt, Artificial Sequence
  Synthetic
cuaaaaccauaaaacccuag

SEQ ID NO: 577754 - RNA, 21 nt, Artificial Sequence
  Synthetic
ccuaaaaccauaaaacccuag

SEQ ID NO: 577755 - RNA, 22 nt, Artificial Sequence
  Synthetic
accuaaaaccauaaaacccuag

SEQ ID NO: 577756 - RNA, 23 nt, Artificial Sequence
  Synthetic
gaccuaaaaccauaaaacccuag

SEQ ID NO: 577757 - RNA, 24 nt, Artificial Sequence
  Synthetic
agaccuaaaaccauaaaacccuag

SEQ ID NO: 577758 - RNA, 18 nt, Artificial Sequence
  Synthetic
agaucauaacaacccuag

SEQ ID NO: 577759 - RNA, 19 nt, Artificial Sequence
  Synthetic
aagaucauaacaacccuag

SEQ ID NO: 577760 - RNA, 20 nt, Artificial Sequence
  Synthetic
gaagaucauaacaacccuag

SEQ ID NO: 577761 - RNA, 21 nt, Artificial Sequence
  Synthetic
ugaagaucauaacaacccuag

SEQ ID NO: 577762 - RNA, 22 nt, Artificial Sequence
  Synthetic
uugaagaucauaacaacccuag

SEQ ID NO: 577763 - RNA, 23 nt, Artificial Sequence
  Synthetic
cuugaagaucauaacaacccuag

SEQ ID NO: 577764 - RNA, 24 nt, Artificial Sequence
  Synthetic
ucuugaagaucauaacaacccuag

SEQ ID NO: 577765 - RNA, 18 nt, Artificial Sequence
  Synthetic
uagacagugccccccuag

SEQ ID NO: 577766 - RNA, 19 nt, Artificial Sequence
  Synthetic
auagacagugccccccuag

SEQ ID NO: 577767 - RNA, 20 nt, Artificial Sequence
  Synthetic
cauagacagugccccccuag

SEQ ID NO: 577768 - RNA, 21 nt, Artificial Sequence
  Synthetic
acauagacagugccccccuag

SEQ ID NO: 577769 - RNA, 22 nt, Artificial Sequence
  Synthetic
cacauagacagugccccccuag

SEQ ID NO: 577770 - RNA, 23 nt, Artificial Sequence
  Synthetic
ccacauagacagugccccccuag

SEQ ID NO: 577771 - RNA, 24 nt, Artificial Sequence
  Synthetic
cccacauagacagugccccccuag

SEQ ID NO: 577772 - RNA, 18 nt, Artificial Sequence
  Synthetic
gcgccaagauuccccuag

SEQ ID NO: 577773 - RNA, 19 nt, Artificial Sequence
  Synthetic
ggcgccaagauuccccuag

SEQ ID NO: 577774 - RNA, 20 nt, Artificial Sequence
  Synthetic
aggcgccaagauuccccuag

SEQ ID NO: 577775 - RNA, 21 nt, Artificial Sequence
  Synthetic
caggcgccaagauuccccuag

SEQ ID NO: 577776 - RNA, 22 nt, Artificial Sequence
  Synthetic
acaggcgccaagauuccccuag

SEQ ID NO: 577777 - RNA, 23 nt, Artificial Sequence
  Synthetic
cacaggcgccaagauuccccuag

SEQ ID NO: 577778 - RNA, 24 nt, Artificial Sequence
  Synthetic
acacaggcgccaagauuccccuag

SEQ ID NO: 577779 - RNA, 18 nt, Artificial Sequence
  Synthetic
aauguggagcuucccuag

SEQ ID NO: 577780 - RNA, 19 nt, Artificial Sequence
  Synthetic
aaauguggagcuucccuag

SEQ ID NO: 577781 - RNA, 20 nt, Artificial Sequence
  Synthetic
aaaauguggagcuucccuag

SEQ ID NO: 577782 - RNA, 21 nt, Artificial Sequence
  Synthetic
uaaaauguggagcuucccuag

SEQ ID NO: 577783 - RNA, 22 nt, Artificial Sequence
  Synthetic
uuaaaauguggagcuucccuag

SEQ ID NO: 577784 - RNA, 23 nt, Artificial Sequence
  Synthetic
auuaaaauguggagcuucccuag

SEQ ID NO: 577785 - RNA, 24 nt, Artificial Sequence
  Synthetic
gauuaaaauguggagcuucccuag

SEQ ID NO: 577786 - RNA, 18 nt, Artificial Sequence
  Synthetic
cacagcacuaaagccuag

SEQ ID NO: 577787 - RNA, 19 nt, Artificial Sequence
  Synthetic
ccacagcacuaaagccuag

SEQ ID NO: 577788 - RNA, 20 nt, Artificial Sequence
  Synthetic
gccacagcacuaaagccuag

SEQ ID NO: 577789 - RNA, 21 nt, Artificial Sequence
  Synthetic
ugccacagcacuaaagccuag

SEQ ID NO: 577790 - RNA, 22 nt, Artificial Sequence
  Synthetic
augccacagcacuaaagccuag

SEQ ID NO: 577791 - RNA, 23 nt, Artificial Sequence
  Synthetic
caugccacagcacuaaagccuag

SEQ ID NO: 577792 - RNA, 24 nt, Artificial Sequence
  Synthetic
ucaugccacagcacuaaagccuag

SEQ ID NO: 577793 - RNA, 18 nt, Artificial Sequence
  Synthetic
cugagaccagcagccuag

SEQ ID NO: 577794 - RNA, 19 nt, Artificial Sequence
  Synthetic
ccugagaccagcagccuag

SEQ ID NO: 577795 - RNA, 20 nt, Artificial Sequence
  Synthetic
uccugagaccagcagccuag

SEQ ID NO: 577796 - RNA, 21 nt, Artificial Sequence
  Synthetic
uuccugagaccagcagccuag

SEQ ID NO: 577797 - RNA, 22 nt, Artificial Sequence
  Synthetic
uuuccugagaccagcagccuag

SEQ ID NO: 577798 - RNA, 23 nt, Artificial Sequence
  Synthetic
uuuuccugagaccagcagccuag

SEQ ID NO: 577799 - RNA, 24 nt, Artificial Sequence
  Synthetic
guuuuccugagaccagcagccuag

SEQ ID NO: 577800 - RNA, 18 nt, Artificial Sequence
  Synthetic
acccuugagaaggccuag

SEQ ID NO: 577801 - RNA, 19 nt, Artificial Sequence
  Synthetic
aacccuugagaaggccuag

SEQ ID NO: 577802 - RNA, 20 nt, Artificial Sequence
  Synthetic
caacccuugagaaggccuag

SEQ ID NO: 577803 - RNA, 21 nt, Artificial Sequence
  Synthetic
ucaacccuugagaaggccuag

SEQ ID NO: 577804 - RNA, 22 nt, Artificial Sequence
  Synthetic
gucaacccuugagaaggccuag

SEQ ID NO: 577805 - RNA, 23 nt, Artificial Sequence
  Synthetic
ugucaacccuugagaaggccuag

SEQ ID NO: 577806 - RNA, 24 nt, Artificial Sequence
  Synthetic
uugucaacccuugagaaggccuag

SEQ ID NO: 577807 - RNA, 18 nt, Artificial Sequence
  Synthetic
gacuuuuaagaggccuag

SEQ ID NO: 577808 - RNA, 19 nt, Artificial Sequence
  Synthetic
ggacuuuuaagaggccuag

SEQ ID NO: 577809 - RNA, 20 nt, Artificial Sequence
  Synthetic
aggacuuuuaagaggccuag

SEQ ID NO: 577810 - RNA, 21 nt, Artificial Sequence
  Synthetic
gaggacuuuuaagaggccuag

SEQ ID NO: 577811 - RNA, 22 nt, Artificial Sequence
  Synthetic
agaggacuuuuaagaggccuag

SEQ ID NO: 577812 - RNA, 23 nt, Artificial Sequence
  Synthetic
uagaggacuuuuaagaggccuag

SEQ ID NO: 577813 - RNA, 24 nt, Artificial Sequence
  Synthetic
cuagaggacuuuuaagaggccuag

SEQ ID NO: 577814 - RNA, 18 nt, Artificial Sequence
  Synthetic
aucaauaaaagugccuag

SEQ ID NO: 577815 - RNA, 19 nt, Artificial Sequence
  Synthetic
aaucaauaaaagugccuag

SEQ ID NO: 577816 - RNA, 20 nt, Artificial Sequence
  Synthetic
aaaucaauaaaagugccuag

SEQ ID NO: 577817 - RNA, 21 nt, Artificial Sequence
  Synthetic
aaaaucaauaaaagugccuag

SEQ ID NO: 577818 - RNA, 22 nt, Artificial Sequence
  Synthetic
aaaaaucaauaaaagugccuag

SEQ ID NO: 577819 - RNA, 23 nt, Artificial Sequence
  Synthetic
caaaaaucaauaaaagugccuag

SEQ ID NO: 577820 - RNA, 24 nt, Artificial Sequence
  Synthetic
ccaaaaaucaauaaaagugccuag

SEQ ID NO: 577821 - RNA, 18 nt, Artificial Sequence
  Synthetic
acccagcccagugccuag

SEQ ID NO: 577822 - RNA, 19 nt, Artificial Sequence
  Synthetic
cacccagcccagugccuag

SEQ ID NO: 577823 - RNA, 20 nt, Artificial Sequence
  Synthetic
ucacccagcccagugccuag

SEQ ID NO: 577824 - RNA, 21 nt, Artificial Sequence
  Synthetic
cucacccagcccagugccuag

SEQ ID NO: 577825 - RNA, 22 nt, Artificial Sequence
  Synthetic
acucacccagcccagugccuag

SEQ ID NO: 577826 - RNA, 23 nt, Artificial Sequence
  Synthetic
aacucacccagcccagugccuag

SEQ ID NO: 577827 - RNA, 24 nt, Artificial Sequence
  Synthetic
gaacucacccagcccagugccuag

SEQ ID NO: 577828 - RNA, 18 nt, Artificial Sequence
  Synthetic
uuuuaauaacuugccuag

SEQ ID NO: 577829 - RNA, 19 nt, Artificial Sequence
  Synthetic
guuuuaauaacuugccuag

SEQ ID NO: 577830 - RNA, 20 nt, Artificial Sequence
  Synthetic
aguuuuaauaacuugccuag

SEQ ID NO: 577831 - RNA, 21 nt, Artificial Sequence
  Synthetic
aaguuuuaauaacuugccuag

SEQ ID NO: 577832 - RNA, 22 nt, Artificial Sequence
  Synthetic
gaaguuuuaauaacuugccuag

SEQ ID NO: 577833 - RNA, 23 nt, Artificial Sequence
  Synthetic
ugaaguuuuaauaacuugccuag

SEQ ID NO: 577834 - RNA, 24 nt, Artificial Sequence
  Synthetic
uugaaguuuuaauaacuugccuag

SEQ ID NO: 577835 - RNA, 18 nt, Artificial Sequence
  Synthetic
uggaggccauuauccuag

SEQ ID NO: 577836 - RNA, 19 nt, Artificial Sequence
  Synthetic
cuggaggccauuauccuag

SEQ ID NO: 577837 - RNA, 20 nt, Artificial Sequence
  Synthetic
gcuggaggccauuauccuag

SEQ ID NO: 577838 - RNA, 21 nt, Artificial Sequence
  Synthetic
agcuggaggccauuauccuag

SEQ ID NO: 577839 - RNA, 22 nt, Artificial Sequence
  Synthetic
gagcuggaggccauuauccuag

SEQ ID NO: 577840 - RNA, 23 nt, Artificial Sequence
  Synthetic
ggagcuggaggccauuauccuag

SEQ ID NO: 577841 - RNA, 24 nt, Artificial Sequence
  Synthetic
uggagcuggaggccauuauccuag

SEQ ID NO: 577842 - RNA, 18 nt, Artificial Sequence
  Synthetic
auuuagcuuuuauccuag

SEQ ID NO: 577843 - RNA, 19 nt, Artificial Sequence
  Synthetic
aauuuagcuuuuauccuag

SEQ ID NO: 577844 - RNA, 20 nt, Artificial Sequence
  Synthetic
aaauuuagcuuuuauccuag

SEQ ID NO: 577845 - RNA, 21 nt, Artificial Sequence
  Synthetic
aaaauuuagcuuuuauccuag

SEQ ID NO: 577846 - RNA, 22 nt, Artificial Sequence
  Synthetic
aaaaauuuagcuuuuauccuag

SEQ ID NO: 577847 - RNA, 23 nt, Artificial Sequence
  Synthetic
gaaaaauuuagcuuuuauccuag

SEQ ID NO: 577848 - RNA, 24 nt, Artificial Sequence
  Synthetic
ugaaaaauuuagcuuuuauccuag

SEQ ID NO: 577849 - RNA, 18 nt, Artificial Sequence
  Synthetic
auuugaucucacuccuag

SEQ ID NO: 577850 - RNA, 19 nt, Artificial Sequence
  Synthetic
cauuugaucucacuccuag

SEQ ID NO: 577851 - RNA, 20 nt, Artificial Sequence
  Synthetic
ucauuugaucucacuccuag

SEQ ID NO: 577852 - RNA, 21 nt, Artificial Sequence
  Synthetic
uucauuugaucucacuccuag

SEQ ID NO: 577853 - RNA, 22 nt, Artificial Sequence
  Synthetic
cuucauuugaucucacuccuag

SEQ ID NO: 577854 - RNA, 23 nt, Artificial Sequence
  Synthetic
ucuucauuugaucucacuccuag

SEQ ID NO: 577855 - RNA, 24 nt, Artificial Sequence
  Synthetic
aucuucauuugaucucacuccuag

SEQ ID NO: 577856 - RNA, 18 nt, Artificial Sequence
  Synthetic
gagacagauuguuccuag

SEQ ID NO: 577857 - RNA, 19 nt, Artificial Sequence
  Synthetic
agagacagauuguuccuag

SEQ ID NO: 577858 - RNA, 20 nt, Artificial Sequence
  Synthetic
gagagacagauuguuccuag

SEQ ID NO: 577859 - RNA, 21 nt, Artificial Sequence
  Synthetic
ggagagacagauuguuccuag

SEQ ID NO: 577860 - RNA, 22 nt, Artificial Sequence
  Synthetic
aggagagacagauuguuccuag

SEQ ID NO: 577861 - RNA, 23 nt, Artificial Sequence
  Synthetic
gaggagagacagauuguuccuag

SEQ ID NO: 577862 - RNA, 24 nt, Artificial Sequence
  Synthetic
agaggagagacagauuguuccuag

SEQ ID NO: 577863 - RNA, 18 nt, Artificial Sequence
  Synthetic
ggucaaugcaaaagcuag

SEQ ID NO: 577864 - RNA, 19 nt, Artificial Sequence
  Synthetic
gggucaaugcaaaagcuag

SEQ ID NO: 577865 - RNA, 20 nt, Artificial Sequence
  Synthetic
cgggucaaugcaaaagcuag

SEQ ID NO: 577866 - RNA, 21 nt, Artificial Sequence
  Synthetic
ucgggucaaugcaaaagcuag

SEQ ID NO: 577867 - RNA, 22 nt, Artificial Sequence
  Synthetic
uucgggucaaugcaaaagcuag

SEQ ID NO: 577868 - RNA, 23 nt, Artificial Sequence
  Synthetic
guucgggucaaugcaaaagcuag

SEQ ID NO: 577869 - RNA, 24 nt, Artificial Sequence
  Synthetic
uguucgggucaaugcaaaagcuag

SEQ ID NO: 577870 - RNA, 18 nt, Artificial Sequence
  Synthetic
aacacauucaaaagcuag

SEQ ID NO: 577871 - RNA, 19 nt, Artificial Sequence
  Synthetic
aaacacauucaaaagcuag

SEQ ID NO: 577872 - RNA, 20 nt, Artificial Sequence
  Synthetic
caaacacauucaaaagcuag

SEQ ID NO: 577873 - RNA, 21 nt, Artificial Sequence
  Synthetic
gcaaacacauucaaaagcuag

SEQ ID NO: 577874 - RNA, 22 nt, Artificial Sequence
  Synthetic
agcaaacacauucaaaagcuag

SEQ ID NO: 577875 - RNA, 23 nt, Artificial Sequence
  Synthetic
gagcaaacacauucaaaagcuag

SEQ ID NO: 577876 - RNA, 24 nt, Artificial Sequence
  Synthetic
agagcaaacacauucaaaagcuag

SEQ ID NO: 577877 - RNA, 18 nt, Artificial Sequence
  Synthetic
gugaacagguaaagcuag

SEQ ID NO: 577878 - RNA, 19 nt, Artificial Sequence
  Synthetic
agugaacagguaaagcuag

SEQ ID NO: 577879 - RNA, 20 nt, Artificial Sequence
  Synthetic
gagugaacagguaaagcuag

SEQ ID NO: 577880 - RNA, 21 nt, Artificial Sequence
  Synthetic
ugagugaacagguaaagcuag

SEQ ID NO: 577881 - RNA, 22 nt, Artificial Sequence
  Synthetic
augagugaacagguaaagcuag

SEQ ID NO: 577882 - RNA, 23 nt, Artificial Sequence
  Synthetic
aaugagugaacagguaaagcuag

SEQ ID NO: 577883 - RNA, 24 nt, Artificial Sequence
  Synthetic
aaaugagugaacagguaaagcuag

SEQ ID NO: 577884 - RNA, 18 nt, Artificial Sequence
  Synthetic
gccaaugcagcaagcuag

SEQ ID NO: 577885 - RNA, 19 nt, Artificial Sequence
  Synthetic
ggccaaugcagcaagcuag

SEQ ID NO: 577886 - RNA, 20 nt, Artificial Sequence
  Synthetic
aggccaaugcagcaagcuag

SEQ ID NO: 577887 - RNA, 21 nt, Artificial Sequence
  Synthetic
gaggccaaugcagcaagcuag

SEQ ID NO: 577888 - RNA, 22 nt, Artificial Sequence
  Synthetic
agaggccaaugcagcaagcuag

SEQ ID NO: 577889 - RNA, 23 nt, Artificial Sequence
  Synthetic
aagaggccaaugcagcaagcuag

SEQ ID NO: 577890 - RNA, 24 nt, Artificial Sequence
  Synthetic
uaagaggccaaugcagcaagcuag

SEQ ID NO: 577891 - RNA, 18 nt, Artificial Sequence
  Synthetic
agaaaucgaagaagcuag

SEQ ID NO: 577892 - RNA, 19 nt, Artificial Sequence
  Synthetic
cagaaaucgaagaagcuag

SEQ ID NO: 577893 - RNA, 20 nt, Artificial Sequence
  Synthetic
acagaaaucgaagaagcuag

SEQ ID NO: 577894 - RNA, 21 nt, Artificial Sequence
  Synthetic
aacagaaaucgaagaagcuag

SEQ ID NO: 577895 - RNA, 22 nt, Artificial Sequence
  Synthetic
uaacagaaaucgaagaagcuag

SEQ ID NO: 577896 - RNA, 23 nt, Artificial Sequence
  Synthetic
auaacagaaaucgaagaagcuag

SEQ ID NO: 577897 - RNA, 24 nt, Artificial Sequence
  Synthetic
gauaacagaaaucgaagaagcuag

SEQ ID NO: 577898 - RNA, 18 nt, Artificial Sequence
  Synthetic
guuaauuccugaagcuag

SEQ ID NO: 577899 - RNA, 19 nt, Artificial Sequence
  Synthetic
gguuaauuccugaagcuag

SEQ ID NO: 577900 - RNA, 20 nt, Artificial Sequence
  Synthetic
agguuaauuccugaagcuag

SEQ ID NO: 577901 - RNA, 21 nt, Artificial Sequence
  Synthetic
gagguuaauuccugaagcuag

SEQ ID NO: 577902 - RNA, 22 nt, Artificial Sequence
  Synthetic
agagguuaauuccugaagcuag

SEQ ID NO: 577903 - RNA, 23 nt, Artificial Sequence
  Synthetic
cagagguuaauuccugaagcuag

SEQ ID NO: 577904 - RNA, 24 nt, Artificial Sequence
  Synthetic
ccagagguuaauuccugaagcuag

SEQ ID NO: 577905 - RNA, 18 nt, Artificial Sequence
  Synthetic
ccaucugggaccagcuag

SEQ ID NO: 577906 - RNA, 19 nt, Artificial Sequence
  Synthetic
uccaucugggaccagcuag

SEQ ID NO: 577907 - RNA, 20 nt, Artificial Sequence
  Synthetic
auccaucugggaccagcuag

SEQ ID NO: 577908 - RNA, 21 nt, Artificial Sequence
  Synthetic
cauccaucugggaccagcuag

SEQ ID NO: 577909 - RNA, 22 nt, Artificial Sequence
  Synthetic
ccauccaucugggaccagcuag

SEQ ID NO: 577910 - RNA, 23 nt, Artificial Sequence
  Synthetic
gccauccaucugggaccagcuag

SEQ ID NO: 577911 - RNA, 24 nt, Artificial Sequence
  Synthetic
ggccauccaucugggaccagcuag

SEQ ID NO: 577912 - RNA, 18 nt, Artificial Sequence
  Synthetic
gggaaauaaugcagcuag

SEQ ID NO: 577913 - RNA, 19 nt, Artificial Sequence
  Synthetic
ugggaaauaaugcagcuag

SEQ ID NO: 577914 - RNA, 20 nt, Artificial Sequence
  Synthetic
gugggaaauaaugcagcuag

SEQ ID NO: 577915 - RNA, 21 nt, Artificial Sequence
  Synthetic
agugggaaauaaugcagcuag

SEQ ID NO: 577916 - RNA, 22 nt, Artificial Sequence
  Synthetic
uagugggaaauaaugcagcuag

SEQ ID NO: 577917 - RNA, 23 nt, Artificial Sequence
  Synthetic
auagugggaaauaaugcagcuag

SEQ ID NO: 577918 - RNA, 24 nt, Artificial Sequence
  Synthetic
aauagugggaaauaaugcagcuag

SEQ ID NO: 577919 - RNA, 18 nt, Artificial Sequence
  Synthetic
aggcggaggaggagcuag

SEQ ID NO: 577920 - RNA, 19 nt, Artificial Sequence
  Synthetic
gaggcggaggaggagcuag

SEQ ID NO: 577921 - RNA, 20 nt, Artificial Sequence
  Synthetic
agaggcggaggaggagcuag

SEQ ID NO: 577922 - RNA, 21 nt, Artificial Sequence
  Synthetic
aagaggcggaggaggagcuag

SEQ ID NO: 577923 - RNA, 22 nt, Artificial Sequence
  Synthetic
caagaggcggaggaggagcuag

SEQ ID NO: 577924 - RNA, 23 nt, Artificial Sequence
  Synthetic
ucaagaggcggaggaggagcuag

SEQ ID NO: 577925 - RNA, 24 nt, Artificial Sequence
  Synthetic
gucaagaggcggaggaggagcuag

SEQ ID NO: 577926 - RNA, 18 nt, Artificial Sequence
  Synthetic
uuuuacucuuauagcuag

SEQ ID NO: 577927 - RNA, 19 nt, Artificial Sequence
  Synthetic
uuuuuacucuuauagcuag

SEQ ID NO: 577928 - RNA, 20 nt, Artificial Sequence
  Synthetic
uuuuuuacucuuauagcuag

SEQ ID NO: 577929 - RNA, 21 nt, Artificial Sequence
  Synthetic
uuuuuuuacucuuauagcuag

SEQ ID NO: 577930 - RNA, 22 nt, Artificial Sequence
  Synthetic
auuuuuuuacucuuauagcuag

SEQ ID NO: 577931 - RNA, 23 nt, Artificial Sequence
  Synthetic
aauuuuuuuacucuuauagcuag

SEQ ID NO: 577932 - RNA, 24 nt, Artificial Sequence
  Synthetic
aaauuuuuuuacucuuauagcuag

SEQ ID NO: 577933 - RNA, 18 nt, Artificial Sequence
  Synthetic
uagucacaaguuagcuag

SEQ ID NO: 577934 - RNA, 19 nt, Artificial Sequence
  Synthetic
auagucacaaguuagcuag

SEQ ID NO: 577935 - RNA, 20 nt, Artificial Sequence
  Synthetic
gauagucacaaguuagcuag

SEQ ID NO: 577936 - RNA, 21 nt, Artificial Sequence
  Synthetic
agauagucacaaguuagcuag

SEQ ID NO: 577937 - RNA, 22 nt, Artificial Sequence
  Synthetic
uagauagucacaaguuagcuag

SEQ ID NO: 577938 - RNA, 23 nt, Artificial Sequence
  Synthetic
uuagauagucacaaguuagcuag

SEQ ID NO: 577939 - RNA, 24 nt, Artificial Sequence
  Synthetic
cuuagauagucacaaguuagcuag

SEQ ID NO: 577940 - RNA, 18 nt, Artificial Sequence
  Synthetic
uaauuuaaauuuagcuag

SEQ ID NO: 577941 - RNA, 19 nt, Artificial Sequence
  Synthetic
auaauuuaaauuuagcuag

SEQ ID NO: 577942 - RNA, 20 nt, Artificial Sequence
  Synthetic
gauaauuuaaauuuagcuag

SEQ ID NO: 577943 - RNA, 21 nt, Artificial Sequence
  Synthetic
ugauaauuuaaauuuagcuag

SEQ ID NO: 577944 - RNA, 22 nt, Artificial Sequence
  Synthetic
gugauaauuuaaauuuagcuag

SEQ ID NO: 577945 - RNA, 23 nt, Artificial Sequence
  Synthetic
ugugauaauuuaaauuuagcuag

SEQ ID NO: 577946 - RNA, 24 nt, Artificial Sequence
  Synthetic
uugugauaauuuaaauuuagcuag

SEQ ID NO: 577947 - RNA, 18 nt, Artificial Sequence
  Synthetic
ugaggaaacugaggcuag

SEQ ID NO: 577948 - RNA, 19 nt, Artificial Sequence
  Synthetic
augaggaaacugaggcuag

SEQ ID NO: 577949 - RNA, 20 nt, Artificial Sequence
  Synthetic
uaugaggaaacugaggcuag

SEQ ID NO: 577950 - RNA, 21 nt, Artificial Sequence
  Synthetic
uuaugaggaaacugaggcuag

SEQ ID NO: 577951 - RNA, 22 nt, Artificial Sequence
  Synthetic
uuuaugaggaaacugaggcuag

SEQ ID NO: 577952 - RNA, 23 nt, Artificial Sequence
  Synthetic
cuuuaugaggaaacugaggcuag

SEQ ID NO: 577953 - RNA, 24 nt, Artificial Sequence
  Synthetic
acuuuaugaggaaacugaggcuag

SEQ ID NO: 577954 - RNA, 18 nt, Artificial Sequence
  Synthetic
uguaaauguugaggcuag

SEQ ID NO: 577955 - RNA, 19 nt, Artificial Sequence
  Synthetic
uuguaaauguugaggcuag

SEQ ID NO: 577956 - RNA, 20 nt, Artificial Sequence
  Synthetic
uuuguaaauguugaggcuag

SEQ ID NO: 577957 - RNA, 21 nt, Artificial Sequence
  Synthetic
guuuguaaauguugaggcuag

SEQ ID NO: 577958 - RNA, 22 nt, Artificial Sequence
  Synthetic
uguuuguaaauguugaggcuag

SEQ ID NO: 577959 - RNA, 23 nt, Artificial Sequence
  Synthetic
guguuuguaaauguugaggcuag

SEQ ID NO: 577960 - RNA, 24 nt, Artificial Sequence
  Synthetic
aguguuuguaaauguugaggcuag

SEQ ID NO: 577961 - RNA, 18 nt, Artificial Sequence
  Synthetic
gaauggcccaagggcuag

SEQ ID NO: 577962 - RNA, 19 nt, Artificial Sequence
  Synthetic
ggaauggcccaagggcuag

SEQ ID NO: 577963 - RNA, 20 nt, Artificial Sequence
  Synthetic
aggaauggcccaagggcuag

SEQ ID NO: 577964 - RNA, 21 nt, Artificial Sequence
  Synthetic
aaggaauggcccaagggcuag

SEQ ID NO: 577965 - RNA, 22 nt, Artificial Sequence
  Synthetic
gaaggaauggcccaagggcuag

SEQ ID NO: 577966 - RNA, 23 nt, Artificial Sequence
  Synthetic
ggaaggaauggcccaagggcuag

SEQ ID NO: 577967 - RNA, 24 nt, Artificial Sequence
  Synthetic
uggaaggaauggcccaagggcuag

SEQ ID NO: 577968 - RNA, 18 nt, Artificial Sequence
  Synthetic
caggggguggggggcuag

SEQ ID NO: 577969 - RNA, 19 nt, Artificial Sequence
  Synthetic
ucaggggguggggggcuag

SEQ ID NO: 577970 - RNA, 20 nt, Artificial Sequence
  Synthetic
gucaggggguggggggcuag

SEQ ID NO: 577971 - RNA, 21 nt, Artificial Sequence
  Synthetic
ugucaggggguggggggcuag

SEQ ID NO: 577972 - RNA, 22 nt, Artificial Sequence
  Synthetic
cugucaggggguggggggcuag

SEQ ID NO: 577973 - RNA, 23 nt, Artificial Sequence
  Synthetic
ccugucaggggguggggggcuag

SEQ ID NO: 577974 - RNA, 24 nt, Artificial Sequence
  Synthetic
gccugucaggggguggggggcuag

SEQ ID NO: 577975 - RNA, 18 nt, Artificial Sequence
  Synthetic
gaaguuucaaauggcuag

SEQ ID NO: 577976 - RNA, 19 nt, Artificial Sequence
  Synthetic
agaaguuucaaauggcuag

SEQ ID NO: 577977 - RNA, 20 nt, Artificial Sequence
  Synthetic
uagaaguuucaaauggcuag

SEQ ID NO: 577978 - RNA, 21 nt, Artificial Sequence
  Synthetic
auagaaguuucaaauggcuag

SEQ ID NO: 577979 - RNA, 22 nt, Artificial Sequence
  Synthetic
uauagaaguuucaaauggcuag

SEQ ID NO: 577980 - RNA, 23 nt, Artificial Sequence
  Synthetic
auauagaaguuucaaauggcuag

SEQ ID NO: 577981 - RNA, 24 nt, Artificial Sequence
  Synthetic
aauauagaaguuucaaauggcuag

SEQ ID NO: 577982 - RNA, 18 nt, Artificial Sequence
  Synthetic
uuuuucuaauauggcuag

SEQ ID NO: 577983 - RNA, 19 nt, Artificial Sequence
  Synthetic
cuuuuucuaauauggcuag

SEQ ID NO: 577984 - RNA, 20 nt, Artificial Sequence
  Synthetic
ucuuuuucuaauauggcuag

SEQ ID NO: 577985 - RNA, 21 nt, Artificial Sequence
  Synthetic
uucuuuuucuaauauggcuag

SEQ ID NO: 577986 - RNA, 22 nt, Artificial Sequence
  Synthetic
uuucuuuuucuaauauggcuag

SEQ ID NO: 577987 - RNA, 23 nt, Artificial Sequence
  Synthetic
guuucuuuuucuaauauggcuag

SEQ ID NO: 577988 - RNA, 24 nt, Artificial Sequence
  Synthetic
uguuucuuuuucuaauauggcuag

SEQ ID NO: 577989 - RNA, 18 nt, Artificial Sequence
  Synthetic
aagugggacacuggcuag

SEQ ID NO: 577990 - RNA, 19 nt, Artificial Sequence
  Synthetic
uaagugggacacuggcuag

SEQ ID NO: 577991 - RNA, 20 nt, Artificial Sequence
  Synthetic
uuaagugggacacuggcuag

SEQ ID NO: 577992 - RNA, 21 nt, Artificial Sequence
  Synthetic
cuuaagugggacacuggcuag

SEQ ID NO: 577993 - RNA, 22 nt, Artificial Sequence
  Synthetic
gcuuaagugggacacuggcuag

SEQ ID NO: 577994 - RNA, 23 nt, Artificial Sequence
  Synthetic
ugcuuaagugggacacuggcuag

SEQ ID NO: 577995 - RNA, 24 nt, Artificial Sequence
  Synthetic
augcuuaagugggacacuggcuag

SEQ ID NO: 577996 - RNA, 18 nt, Artificial Sequence
  Synthetic
uauuugagggguggcuag

SEQ ID NO: 577997 - RNA, 19 nt, Artificial Sequence
  Synthetic
guauuugagggguggcuag

SEQ ID NO: 577998 - RNA, 20 nt, Artificial Sequence
  Synthetic
aguauuugagggguggcuag

SEQ ID NO: 577999 - RNA, 21 nt, Artificial Sequence
  Synthetic
caguauuugagggguggcuag

SEQ ID NO: 578000 - RNA, 22 nt, Artificial Sequence
  Synthetic
acaguauuugagggguggcuag

SEQ ID NO: 578001 - RNA, 23 nt, Artificial Sequence
  Synthetic
aacaguauuugagggguggcuag

SEQ ID NO: 578002 - RNA, 24 nt, Artificial Sequence
  Synthetic
caacaguauuugagggguggcuag

SEQ ID NO: 578003 - RNA, 18 nt, Artificial Sequence
  Synthetic
acggcuucuguuggcuag

SEQ ID NO: 578004 - RNA, 19 nt, Artificial Sequence
  Synthetic
cacggcuucuguuggcuag

SEQ ID NO: 578005 - RNA, 20 nt, Artificial Sequence
  Synthetic
ucacggcuucuguuggcuag

SEQ ID NO: 578006 - RNA, 21 nt, Artificial Sequence
  Synthetic
cucacggcuucuguuggcuag

SEQ ID NO: 578007 - RNA, 22 nt, Artificial Sequence
  Synthetic
ccucacggcuucuguuggcuag

SEQ ID NO: 578008 - RNA, 23 nt, Artificial Sequence
  Synthetic
cccucacggcuucuguuggcuag

SEQ ID NO: 578009 - RNA, 24 nt, Artificial Sequence
  Synthetic
ucccucacggcuucuguuggcuag

SEQ ID NO: 578010 - RNA, 18 nt, Artificial Sequence
  Synthetic
cuuucauuuguuggcuag

SEQ ID NO: 578011 - RNA, 19 nt, Artificial Sequence
  Synthetic
gcuuucauuuguuggcuag

SEQ ID NO: 578012 - RNA, 20 nt, Artificial Sequence
  Synthetic
agcuuucauuuguuggcuag

SEQ ID NO: 578013 - RNA, 21 nt, Artificial Sequence
  Synthetic
uagcuuucauuuguuggcuag

SEQ ID NO: 578014 - RNA, 22 nt, Artificial Sequence
  Synthetic
uuagcuuucauuuguuggcuag

SEQ ID NO: 578015 - RNA, 23 nt, Artificial Sequence
  Synthetic
cuuagcuuucauuuguuggcuag

SEQ ID NO: 578016 - RNA, 24 nt, Artificial Sequence
  Synthetic
ucuuagcuuucauuuguuggcuag

SEQ ID NO: 578017 - RNA, 18 nt, Artificial Sequence
  Synthetic
uagcucccuugaugcuag

SEQ ID NO: 578018 - RNA, 19 nt, Artificial Sequence
  Synthetic
cuagcucccuugaugcuag

SEQ ID NO: 578019 - RNA, 20 nt, Artificial Sequence
  Synthetic
acuagcucccuugaugcuag

SEQ ID NO: 578020 - RNA, 21 nt, Artificial Sequence
  Synthetic
cacuagcucccuugaugcuag

SEQ ID NO: 578021 - RNA, 22 nt, Artificial Sequence
  Synthetic
acacuagcucccuugaugcuag

SEQ ID NO: 578022 - RNA, 23 nt, Artificial Sequence
  Synthetic
uacacuagcucccuugaugcuag

SEQ ID NO: 578023 - RNA, 24 nt, Artificial Sequence
  Synthetic
uuacacuagcucccuugaugcuag

SEQ ID NO: 578024 - RNA, 18 nt, Artificial Sequence
  Synthetic
uggaggucaguaugcuag

SEQ ID NO: 578025 - RNA, 19 nt, Artificial Sequence
  Synthetic
auggaggucaguaugcuag

SEQ ID NO: 578026 - RNA, 20 nt, Artificial Sequence
  Synthetic
aauggaggucaguaugcuag

SEQ ID NO: 578027 - RNA, 21 nt, Artificial Sequence
  Synthetic
aaauggaggucaguaugcuag

SEQ ID NO: 578028 - RNA, 22 nt, Artificial Sequence
  Synthetic
gaaauggaggucaguaugcuag

SEQ ID NO: 578029 - RNA, 23 nt, Artificial Sequence
  Synthetic
ggaaauggaggucaguaugcuag

SEQ ID NO: 578030 - RNA, 24 nt, Artificial Sequence
  Synthetic
uggaaauggaggucaguaugcuag

SEQ ID NO: 578031 - RNA, 18 nt, Artificial Sequence
  Synthetic
ugacuccaauccugcuag

SEQ ID NO: 578032 - RNA, 19 nt, Artificial Sequence
  Synthetic
augacuccaauccugcuag

SEQ ID NO: 578033 - RNA, 20 nt, Artificial Sequence
  Synthetic
caugacuccaauccugcuag

SEQ ID NO: 578034 - RNA, 21 nt, Artificial Sequence
  Synthetic
ccaugacuccaauccugcuag

SEQ ID NO: 578035 - RNA, 22 nt, Artificial Sequence
  Synthetic
gccaugacuccaauccugcuag

SEQ ID NO: 578036 - RNA, 23 nt, Artificial Sequence
  Synthetic
ugccaugacuccaauccugcuag

SEQ ID NO: 578037 - RNA, 24 nt, Artificial Sequence
  Synthetic
cugccaugacuccaauccugcuag

SEQ ID NO: 578038 - RNA, 18 nt, Artificial Sequence
  Synthetic
aacacagaagucugcuag

SEQ ID NO: 578039 - RNA, 19 nt, Artificial Sequence
  Synthetic
aaacacagaagucugcuag

SEQ ID NO: 578040 - RNA, 20 nt, Artificial Sequence
  Synthetic
uaaacacagaagucugcuag

SEQ ID NO: 578041 - RNA, 21 nt, Artificial Sequence
  Synthetic
auaaacacagaagucugcuag

SEQ ID NO: 578042 - RNA, 22 nt, Artificial Sequence
  Synthetic
aauaaacacagaagucugcuag

SEQ ID NO: 578043 - RNA, 23 nt, Artificial Sequence
  Synthetic
caauaaacacagaagucugcuag

SEQ ID NO: 578044 - RNA, 24 nt, Artificial Sequence
  Synthetic
acaauaaacacagaagucugcuag

SEQ ID NO: 578045 - RNA, 18 nt, Artificial Sequence
  Synthetic
aaugucuuugucugcuag

SEQ ID NO: 578046 - RNA, 19 nt, Artificial Sequence
  Synthetic
uaaugucuuugucugcuag

SEQ ID NO: 578047 - RNA, 20 nt, Artificial Sequence
  Synthetic
uuaaugucuuugucugcuag

SEQ ID NO: 578048 - RNA, 21 nt, Artificial Sequence
  Synthetic
cuuaaugucuuugucugcuag

SEQ ID NO: 578049 - RNA, 22 nt, Artificial Sequence
  Synthetic
acuuaaugucuuugucugcuag

SEQ ID NO: 578050 - RNA, 23 nt, Artificial Sequence
  Synthetic
aacuuaaugucuuugucugcuag

SEQ ID NO: 578051 - RNA, 24 nt, Artificial Sequence
  Synthetic
gaacuuaaugucuuugucugcuag

SEQ ID NO: 578052 - RNA, 18 nt, Artificial Sequence
  Synthetic
gacagggagaggugcuag

SEQ ID NO: 578053 - RNA, 19 nt, Artificial Sequence
  Synthetic
ggacagggagaggugcuag

SEQ ID NO: 578054 - RNA, 20 nt, Artificial Sequence
  Synthetic
gggacagggagaggugcuag

SEQ ID NO: 578055 - RNA, 21 nt, Artificial Sequence
  Synthetic
ugggacagggagaggugcuag

SEQ ID NO: 578056 - RNA, 22 nt, Artificial Sequence
  Synthetic
augggacagggagaggugcuag

SEQ ID NO: 578057 - RNA, 23 nt, Artificial Sequence
  Synthetic
aaugggacagggagaggugcuag

SEQ ID NO: 578058 - RNA, 24 nt, Artificial Sequence
  Synthetic
aaaugggacagggagaggugcuag

SEQ ID NO: 578059 - RNA, 18 nt, Artificial Sequence
  Synthetic
acaaacuagaaaaucuag

SEQ ID NO: 578060 - RNA, 19 nt, Artificial Sequence
  Synthetic
cacaaacuagaaaaucuag

SEQ ID NO: 578061 - RNA, 20 nt, Artificial Sequence
  Synthetic
acacaaacuagaaaaucuag

SEQ ID NO: 578062 - RNA, 21 nt, Artificial Sequence
  Synthetic
cacacaaacuagaaaaucuag

SEQ ID NO: 578063 - RNA, 22 nt, Artificial Sequence
  Synthetic
gcacacaaacuagaaaaucuag

SEQ ID NO: 578064 - RNA, 23 nt, Artificial Sequence
  Synthetic
ugcacacaaacuagaaaaucuag

SEQ ID NO: 578065 - RNA, 24 nt, Artificial Sequence
  Synthetic
augcacacaaacuagaaaaucuag

SEQ ID NO: 578066 - RNA, 22 nt, Artificial Sequence
  Synthetic
gcaaauaaacuagaaaaucuag

SEQ ID NO: 578067 - RNA, 23 nt, Artificial Sequence
  Synthetic
cgcaaauaaacuagaaaaucuag

SEQ ID NO: 578068 - RNA, 24 nt, Artificial Sequence
  Synthetic
acgcaaauaaacuagaaaaucuag

SEQ ID NO: 578069 - RNA, 23 nt, Artificial Sequence
  Synthetic
ugcaaauaaacuagaaaaucuag

SEQ ID NO: 578070 - RNA, 24 nt, Artificial Sequence
  Synthetic
augcaaauaaacuagaaaaucuag

SEQ ID NO: 578071 - RNA, 18 nt, Artificial Sequence
  Synthetic
ugggacaauccaaucuag

SEQ ID NO: 578072 - RNA, 19 nt, Artificial Sequence
  Synthetic
cugggacaauccaaucuag

SEQ ID NO: 578073 - RNA, 20 nt, Artificial Sequence
  Synthetic
gcugggacaauccaaucuag

SEQ ID NO: 578074 - RNA, 21 nt, Artificial Sequence
  Synthetic
ugcugggacaauccaaucuag

SEQ ID NO: 578075 - RNA, 22 nt, Artificial Sequence
  Synthetic
cugcugggacaauccaaucuag

SEQ ID NO: 578076 - RNA, 23 nt, Artificial Sequence
  Synthetic
ucugcugggacaauccaaucuag

SEQ ID NO: 578077 - RNA, 24 nt, Artificial Sequence
  Synthetic
uucugcugggacaauccaaucuag

SEQ ID NO: 578078 - RNA, 18 nt, Artificial Sequence
  Synthetic
uaaugugccucaaucuag

SEQ ID NO: 578079 - RNA, 19 nt, Artificial Sequence
  Synthetic
auaaugugccucaaucuag

SEQ ID NO: 578080 - RNA, 20 nt, Artificial Sequence
  Synthetic
gauaaugugccucaaucuag

SEQ ID NO: 578081 - RNA, 21 nt, Artificial Sequence
  Synthetic
ugauaaugugccucaaucuag

SEQ ID NO: 578082 - RNA, 22 nt, Artificial Sequence
  Synthetic
augauaaugugccucaaucuag

SEQ ID NO: 578083 - RNA, 23 nt, Artificial Sequence
  Synthetic
caugauaaugugccucaaucuag

SEQ ID NO: 578084 - RNA, 24 nt, Artificial Sequence
  Synthetic
gcaugauaaugugccucaaucuag

SEQ ID NO: 578085 - RNA, 18 nt, Artificial Sequence
  Synthetic
aggcaguacauaaucuag

SEQ ID NO: 578086 - RNA, 19 nt, Artificial Sequence
  Synthetic
uaggcaguacauaaucuag

SEQ ID NO: 578087 - RNA, 20 nt, Artificial Sequence
  Synthetic
uuaggcaguacauaaucuag

SEQ ID NO: 578088 - RNA, 21 nt, Artificial Sequence
  Synthetic
cuuaggcaguacauaaucuag

SEQ ID NO: 578089 - RNA, 22 nt, Artificial Sequence
  Synthetic
ucuuaggcaguacauaaucuag

SEQ ID NO: 578090 - RNA, 23 nt, Artificial Sequence
  Synthetic
gucuuaggcaguacauaaucuag

SEQ ID NO: 578091 - RNA, 24 nt, Artificial Sequence
  Synthetic
ggucuuaggcaguacauaaucuag

SEQ ID NO: 578092 - RNA, 18 nt, Artificial Sequence
  Synthetic
guuagcuccuuaaucuag

SEQ ID NO: 578093 - RNA, 19 nt, Artificial Sequence
  Synthetic
aguuagcuccuuaaucuag

SEQ ID NO: 578094 - RNA, 20 nt, Artificial Sequence
  Synthetic
uaguuagcuccuuaaucuag

SEQ ID NO: 578095 - RNA, 21 nt, Artificial Sequence
  Synthetic
cuaguuagcuccuuaaucuag

SEQ ID NO: 578096 - RNA, 22 nt, Artificial Sequence
  Synthetic
ucuaguuagcuccuuaaucuag

SEQ ID NO: 578097 - RNA, 23 nt, Artificial Sequence
  Synthetic
uucuaguuagcuccuuaaucuag

SEQ ID NO: 578098 - RNA, 24 nt, Artificial Sequence
  Synthetic
uuucuaguuagcuccuuaaucuag

SEQ ID NO: 578099 - RNA, 18 nt, Artificial Sequence
  Synthetic
cacuggagcagcaucuag

SEQ ID NO: 578100 - RNA, 19 nt, Artificial Sequence
  Synthetic
gcacuggagcagcaucuag

SEQ ID NO: 578101 - RNA, 20 nt, Artificial Sequence
  Synthetic
agcacuggagcagcaucuag

SEQ ID NO: 578102 - RNA, 21 nt, Artificial Sequence
  Synthetic
gagcacuggagcagcaucuag

SEQ ID NO: 578103 - RNA, 22 nt, Artificial Sequence
  Synthetic
ugagcacuggagcagcaucuag

SEQ ID NO: 578104 - RNA, 23 nt, Artificial Sequence
  Synthetic
augagcacuggagcagcaucuag

SEQ ID NO: 578105 - RNA, 24 nt, Artificial Sequence
  Synthetic
caugagcacuggagcagcaucuag

SEQ ID NO: 578106 - RNA, 18 nt, Artificial Sequence
  Synthetic
gcaguuagaggcaucuag

SEQ ID NO: 578107 - RNA, 19 nt, Artificial Sequence
  Synthetic
agcaguuagaggcaucuag

SEQ ID NO: 578108 - RNA, 20 nt, Artificial Sequence
  Synthetic
cagcaguuagaggcaucuag

SEQ ID NO: 578109 - RNA, 21 nt, Artificial Sequence
  Synthetic
ccagcaguuagaggcaucuag

SEQ ID NO: 578110 - RNA, 22 nt, Artificial Sequence
  Synthetic
gccagcaguuagaggcaucuag

SEQ ID NO: 578111 - RNA, 23 nt, Artificial Sequence
  Synthetic
agccagcaguuagaggcaucuag

SEQ ID NO: 578112 - RNA, 24 nt, Artificial Sequence
  Synthetic
gagccagcaguuagaggcaucuag

SEQ ID NO: 578113 - RNA, 18 nt, Artificial Sequence
  Synthetic
agcaagagaaugaucuag

SEQ ID NO: 578114 - RNA, 19 nt, Artificial Sequence
  Synthetic
aagcaagagaaugaucuag

SEQ ID NO: 578115 - RNA, 20 nt, Artificial Sequence
  Synthetic
aaagcaagagaaugaucuag

SEQ ID NO: 578116 - RNA, 21 nt, Artificial Sequence
  Synthetic
aaaagcaagagaaugaucuag

SEQ ID NO: 578117 - RNA, 22 nt, Artificial Sequence
  Synthetic
caaaagcaagagaaugaucuag

SEQ ID NO: 578118 - RNA, 23 nt, Artificial Sequence
  Synthetic
ucaaaagcaagagaaugaucuag

SEQ ID NO: 578119 - RNA, 24 nt, Artificial Sequence
  Synthetic
uucaaaagcaagagaaugaucuag

SEQ ID NO: 578120 - RNA, 18 nt, Artificial Sequence
  Synthetic
aaaccauaaaaacucuag

SEQ ID NO: 578121 - RNA, 19 nt, Artificial Sequence
  Synthetic
gaaaccauaaaaacucuag

SEQ ID NO: 578122 - RNA, 20 nt, Artificial Sequence
  Synthetic
ugaaaccauaaaaacucuag

SEQ ID NO: 578123 - RNA, 21 nt, Artificial Sequence
  Synthetic
cugaaaccauaaaaacucuag

SEQ ID NO: 578124 - RNA, 22 nt, Artificial Sequence
  Synthetic
ccugaaaccauaaaaacucuag

SEQ ID NO: 578125 - RNA, 23 nt, Artificial Sequence
  Synthetic
accugaaaccauaaaaacucuag

SEQ ID NO: 578126 - RNA, 24 nt, Artificial Sequence
  Synthetic
gaccugaaaccauaaaaacucuag

SEQ ID NO: 578127 - RNA, 18 nt, Artificial Sequence
  Synthetic
agaauuuaacuacucuag

SEQ ID NO: 578128 - RNA, 19 nt, Artificial Sequence
  Synthetic
aagaauuuaacuacucuag

SEQ ID NO: 578129 - RNA, 20 nt, Artificial Sequence
  Synthetic
uaagaauuuaacuacucuag

SEQ ID NO: 578130 - RNA, 21 nt, Artificial Sequence
  Synthetic
cuaagaauuuaacuacucuag

SEQ ID NO: 578131 - RNA, 22 nt, Artificial Sequence
  Synthetic
ucuaagaauuuaacuacucuag

SEQ ID NO: 578132 - RNA, 23 nt, Artificial Sequence
  Synthetic
gucuaagaauuuaacuacucuag

SEQ ID NO: 578133 - RNA, 24 nt, Artificial Sequence
  Synthetic
ugucuaagaauuuaacuacucuag

SEQ ID NO: 578134 - RNA, 18 nt, Artificial Sequence
  Synthetic
aggagauguuaccucuag

SEQ ID NO: 578135 - RNA, 19 nt, Artificial Sequence
  Synthetic
aaggagauguuaccucuag

SEQ ID NO: 578136 - RNA, 20 nt, Artificial Sequence
  Synthetic
gaaggagauguuaccucuag

SEQ ID NO: 578137 - RNA, 21 nt, Artificial Sequence
  Synthetic
ggaaggagauguuaccucuag

SEQ ID NO: 578138 - RNA, 22 nt, Artificial Sequence
  Synthetic
gggaaggagauguuaccucuag

SEQ ID NO: 578139 - RNA, 23 nt, Artificial Sequence
  Synthetic
ggggaaggagauguuaccucuag

SEQ ID NO: 578140 - RNA, 24 nt, Artificial Sequence
  Synthetic
aggggaaggagauguuaccucuag

SEQ ID NO: 578141 - RNA, 18 nt, Artificial Sequence
  Synthetic
ucaaauaacuggcucuag

SEQ ID NO: 578142 - RNA, 19 nt, Artificial Sequence
  Synthetic
gucaaauaacuggcucuag

SEQ ID NO: 578143 - RNA, 20 nt, Artificial Sequence
  Synthetic
ugucaaauaacuggcucuag

SEQ ID NO: 578144 - RNA, 21 nt, Artificial Sequence
  Synthetic
augucaaauaacuggcucuag

SEQ ID NO: 578145 - RNA, 22 nt, Artificial Sequence
  Synthetic
aaugucaaauaacuggcucuag

SEQ ID NO: 578146 - RNA, 23 nt, Artificial Sequence
  Synthetic
aaaugucaaauaacuggcucuag

SEQ ID NO: 578147 - RNA, 24 nt, Artificial Sequence
  Synthetic
uaaaugucaaauaacuggcucuag

SEQ ID NO: 578148 - RNA, 18 nt, Artificial Sequence
  Synthetic
uuuuuaugaaaucucuag

SEQ ID NO: 578149 - RNA, 19 nt, Artificial Sequence
  Synthetic
uuuuuuaugaaaucucuag

SEQ ID NO: 578150 - RNA, 20 nt, Artificial Sequence
  Synthetic
uuuuuuuaugaaaucucuag

SEQ ID NO: 578151 - RNA, 21 nt, Artificial Sequence
  Synthetic
uuuuuuuuaugaaaucucuag

SEQ ID NO: 578152 - RNA, 22 nt, Artificial Sequence
  Synthetic
guuuuuuuuaugaaaucucuag

SEQ ID NO: 578153 - RNA, 23 nt, Artificial Sequence
  Synthetic
aguuuuuuuuaugaaaucucuag

SEQ ID NO: 578154 - RNA, 24 nt, Artificial Sequence
  Synthetic
caguuuuuuuuaugaaaucucuag

SEQ ID NO: 578155 - RNA, 18 nt, Artificial Sequence
  Synthetic
ccaucuccguaucucuag

SEQ ID NO: 578156 - RNA, 19 nt, Artificial Sequence
  Synthetic
cccaucuccguaucucuag

SEQ ID NO: 578157 - RNA, 20 nt, Artificial Sequence
  Synthetic
ucccaucuccguaucucuag

SEQ ID NO: 578158 - RNA, 21 nt, Artificial Sequence
  Synthetic
cucccaucuccguaucucuag

SEQ ID NO: 578159 - RNA, 22 nt, Artificial Sequence
  Synthetic
ccucccaucuccguaucucuag

SEQ ID NO: 578160 - RNA, 23 nt, Artificial Sequence
  Synthetic
cccucccaucuccguaucucuag

SEQ ID NO: 578161 - RNA, 24 nt, Artificial Sequence
  Synthetic
gcccucccaucuccguaucucuag

SEQ ID NO: 578162 - RNA, 18 nt, Artificial Sequence
  Synthetic
gauugugaaagucucuag

SEQ ID NO: 578163 - RNA, 19 nt, Artificial Sequence
  Synthetic
ugauugugaaagucucuag

SEQ ID NO: 578164 - RNA, 20 nt, Artificial Sequence
  Synthetic
augauugugaaagucucuag

SEQ ID NO: 578165 - RNA, 21 nt, Artificial Sequence
  Synthetic
aaugauugugaaagucucuag

SEQ ID NO: 578166 - RNA, 22 nt, Artificial Sequence
  Synthetic
aaaugauugugaaagucucuag

SEQ ID NO: 578167 - RNA, 23 nt, Artificial Sequence
  Synthetic
uaaaugauugugaaagucucuag

SEQ ID NO: 578168 - RNA, 24 nt, Artificial Sequence
  Synthetic
cuaaaugauugugaaagucucuag

SEQ ID NO: 578169 - RNA, 18 nt, Artificial Sequence
  Synthetic
cuuuggggaagucucuag

SEQ ID NO: 578170 - RNA, 19 nt, Artificial Sequence
  Synthetic
acuuuggggaagucucuag

SEQ ID NO: 578171 - RNA, 20 nt, Artificial Sequence
  Synthetic
cacuuuggggaagucucuag

SEQ ID NO: 578172 - RNA, 21 nt, Artificial Sequence
  Synthetic
ucacuuuggggaagucucuag

SEQ ID NO: 578173 - RNA, 22 nt, Artificial Sequence
  Synthetic
uucacuuuggggaagucucuag

SEQ ID NO: 578174 - RNA, 23 nt, Artificial Sequence
  Synthetic
guucacuuuggggaagucucuag

SEQ ID NO: 578175 - RNA, 24 nt, Artificial Sequence
  Synthetic
gguucacuuuggggaagucucuag

SEQ ID NO: 578176 - RNA, 18 nt, Artificial Sequence
  Synthetic
caacggcuucaggucuag

SEQ ID NO: 578177 - RNA, 19 nt, Artificial Sequence
  Synthetic
acaacggcuucaggucuag

SEQ ID NO: 578178 - RNA, 20 nt, Artificial Sequence
  Synthetic
aacaacggcuucaggucuag

SEQ ID NO: 578179 - RNA, 21 nt, Artificial Sequence
  Synthetic
caacaacggcuucaggucuag

SEQ ID NO: 578180 - RNA, 22 nt, Artificial Sequence
  Synthetic
ccaacaacggcuucaggucuag

SEQ ID NO: 578181 - RNA, 23 nt, Artificial Sequence
  Synthetic
cccaacaacggcuucaggucuag

SEQ ID NO: 578182 - RNA, 24 nt, Artificial Sequence
  Synthetic
ccccaacaacggcuucaggucuag

SEQ ID NO: 578183 - RNA, 18 nt, Artificial Sequence
  Synthetic
uguggcagagaggucuag

SEQ ID NO: 578184 - RNA, 19 nt, Artificial Sequence
  Synthetic
uuguggcagagaggucuag

SEQ ID NO: 578185 - RNA, 20 nt, Artificial Sequence
  Synthetic
cuuguggcagagaggucuag

SEQ ID NO: 578186 - RNA, 21 nt, Artificial Sequence
  Synthetic
ccuuguggcagagaggucuag

SEQ ID NO: 578187 - RNA, 22 nt, Artificial Sequence
  Synthetic
uccuuguggcagagaggucuag

SEQ ID NO: 578188 - RNA, 23 nt, Artificial Sequence
  Synthetic
auccuuguggcagagaggucuag

SEQ ID NO: 578189 - RNA, 24 nt, Artificial Sequence
  Synthetic
uauccuuguggcagagaggucuag

SEQ ID NO: 578190 - RNA, 18 nt, Artificial Sequence
  Synthetic
uguauucccucugucuag

SEQ ID NO: 578191 - RNA, 19 nt, Artificial Sequence
  Synthetic
auguauucccucugucuag

SEQ ID NO: 578192 - RNA, 20 nt, Artificial Sequence
  Synthetic
aauguauucccucugucuag

SEQ ID NO: 578193 - RNA, 21 nt, Artificial Sequence
  Synthetic
aaauguauucccucugucuag

SEQ ID NO: 578194 - RNA, 22 nt, Artificial Sequence
  Synthetic
aaaauguauucccucugucuag

SEQ ID NO: 578195 - RNA, 23 nt, Artificial Sequence
  Synthetic
caaaauguauucccucugucuag

SEQ ID NO: 578196 - RNA, 24 nt, Artificial Sequence
  Synthetic
ucaaaauguauucccucugucuag

SEQ ID NO: 578197 - RNA, 18 nt, Artificial Sequence
  Synthetic
accuaugcaaaauucuag

SEQ ID NO: 578198 - RNA, 19 nt, Artificial Sequence
  Synthetic
caccuaugcaaaauucuag

SEQ ID NO: 578199 - RNA, 20 nt, Artificial Sequence
  Synthetic
gcaccuaugcaaaauucuag

SEQ ID NO: 578200 - RNA, 21 nt, Artificial Sequence
  Synthetic
agcaccuaugcaaaauucuag

SEQ ID NO: 578201 - RNA, 22 nt, Artificial Sequence
  Synthetic
uagcaccuaugcaaaauucuag

SEQ ID NO: 578202 - RNA, 23 nt, Artificial Sequence
  Synthetic
auagcaccuaugcaaaauucuag

SEQ ID NO: 578203 - RNA, 24 nt, Artificial Sequence
  Synthetic
uauagcaccuaugcaaaauucuag

SEQ ID NO: 578204 - RNA, 18 nt, Artificial Sequence
  Synthetic
ugucauaguacauucuag

SEQ ID NO: 578205 - RNA, 19 nt, Artificial Sequence
  Synthetic
gugucauaguacauucuag

SEQ ID NO: 578206 - RNA, 20 nt, Artificial Sequence
  Synthetic
ugugucauaguacauucuag

SEQ ID NO: 578207 - RNA, 21 nt, Artificial Sequence
  Synthetic
augugucauaguacauucuag

SEQ ID NO: 578208 - RNA, 22 nt, Artificial Sequence
  Synthetic
gaugugucauaguacauucuag

SEQ ID NO: 578209 - RNA, 23 nt, Artificial Sequence
  Synthetic
ggaugugucauaguacauucuag

SEQ ID NO: 578210 - RNA, 24 nt, Artificial Sequence
  Synthetic
uggaugugucauaguacauucuag

SEQ ID NO: 578211 - RNA, 18 nt, Artificial Sequence
  Synthetic
aauggauuuacauucuag

SEQ ID NO: 578212 - RNA, 19 nt, Artificial Sequence
  Synthetic
aaauggauuuacauucuag

SEQ ID NO: 578213 - RNA, 20 nt, Artificial Sequence
  Synthetic
uaaauggauuuacauucuag

SEQ ID NO: 578214 - RNA, 21 nt, Artificial Sequence
  Synthetic
uuaaauggauuuacauucuag

SEQ ID NO: 578215 - RNA, 22 nt, Artificial Sequence
  Synthetic
guuaaauggauuuacauucuag

SEQ ID NO: 578216 - RNA, 23 nt, Artificial Sequence
  Synthetic
uguuaaauggauuuacauucuag

SEQ ID NO: 578217 - RNA, 24 nt, Artificial Sequence
  Synthetic
auguuaaauggauuuacauucuag

SEQ ID NO: 578218 - RNA, 18 nt, Artificial Sequence
  Synthetic
uggauucuaucauucuag

SEQ ID NO: 578219 - RNA, 19 nt, Artificial Sequence
  Synthetic
auggauucuaucauucuag

SEQ ID NO: 578220 - RNA, 20 nt, Artificial Sequence
  Synthetic
cauggauucuaucauucuag

SEQ ID NO: 578221 - RNA, 21 nt, Artificial Sequence
  Synthetic
acauggauucuaucauucuag

SEQ ID NO: 578222 - RNA, 22 nt, Artificial Sequence
  Synthetic
uacauggauucuaucauucuag

SEQ ID NO: 578223 - RNA, 23 nt, Artificial Sequence
  Synthetic
cuacauggauucuaucauucuag

SEQ ID NO: 578224 - RNA, 24 nt, Artificial Sequence
  Synthetic
ucuacauggauucuaucauucuag

SEQ ID NO: 578225 - RNA, 18 nt, Artificial Sequence
  Synthetic
gauugccuucuauucuag

SEQ ID NO: 578226 - RNA, 19 nt, Artificial Sequence
  Synthetic
ugauugccuucuauucuag

SEQ ID NO: 578227 - RNA, 20 nt, Artificial Sequence
  Synthetic
cugauugccuucuauucuag

SEQ ID NO: 578228 - RNA, 21 nt, Artificial Sequence
  Synthetic
ccugauugccuucuauucuag

SEQ ID NO: 578229 - RNA, 22 nt, Artificial Sequence
  Synthetic
uccugauugccuucuauucuag

SEQ ID NO: 578230 - RNA, 23 nt, Artificial Sequence
  Synthetic
cuccugauugccuucuauucuag

SEQ ID NO: 578231 - RNA, 24 nt, Artificial Sequence
  Synthetic
ucuccugauugccuucuauucuag

SEQ ID NO: 578232 - RNA, 18 nt, Artificial Sequence
  Synthetic
agaugagacuacuucuag

SEQ ID NO: 578233 - RNA, 19 nt, Artificial Sequence
  Synthetic
cagaugagacuacuucuag

SEQ ID NO: 578234 - RNA, 20 nt, Artificial Sequence
  Synthetic
ccagaugagacuacuucuag

SEQ ID NO: 578235 - RNA, 21 nt, Artificial Sequence
  Synthetic
accagaugagacuacuucuag

SEQ ID NO: 578236 - RNA, 22 nt, Artificial Sequence
  Synthetic
caccagaugagacuacuucuag

SEQ ID NO: 578237 - RNA, 23 nt, Artificial Sequence
  Synthetic
ccaccagaugagacuacuucuag

SEQ ID NO: 578238 - RNA, 24 nt, Artificial Sequence
  Synthetic
gccaccagaugagacuacuucuag

SEQ ID NO: 578239 - RNA, 18 nt, Artificial Sequence
  Synthetic
auuuaguuuugguucuag

SEQ ID NO: 578240 - RNA, 19 nt, Artificial Sequence
  Synthetic
uauuuaguuuugguucuag

SEQ ID NO: 578241 - RNA, 20 nt, Artificial Sequence
  Synthetic
uuauuuaguuuugguucuag

SEQ ID NO: 578242 - RNA, 21 nt, Artificial Sequence
  Synthetic
uuuauuuaguuuugguucuag

SEQ ID NO: 578243 - RNA, 22 nt, Artificial Sequence
  Synthetic
auuuauuuaguuuugguucuag

SEQ ID NO: 578244 - RNA, 23 nt, Artificial Sequence
  Synthetic
cauuuauuuaguuuugguucuag

SEQ ID NO: 578245 - RNA, 24 nt, Artificial Sequence
  Synthetic
acauuuauuuaguuuugguucuag

SEQ ID NO: 578246 - RNA, 18 nt, Artificial Sequence
  Synthetic
uauuuuauuauuuucuag

SEQ ID NO: 578247 - RNA, 19 nt, Artificial Sequence
  Synthetic
cuauuuuauuauuuucuag

SEQ ID NO: 578248 - RNA, 20 nt, Artificial Sequence
  Synthetic
acuauuuuauuauuuucuag

SEQ ID NO: 578249 - RNA, 21 nt, Artificial Sequence
  Synthetic
aacuauuuuauuauuuucuag

SEQ ID NO: 578250 - RNA, 22 nt, Artificial Sequence
  Synthetic
gaacuauuuuauuauuuucuag

SEQ ID NO: 578251 - RNA, 23 nt, Artificial Sequence
  Synthetic
agaacuauuuuauuauuuucuag

SEQ ID NO: 578252 - RNA, 24 nt, Artificial Sequence
  Synthetic
cagaacuauuuuauuauuuucuag

SEQ ID NO: 578253 - RNA, 18 nt, Artificial Sequence
  Synthetic
uuccauucugaaaaguag

SEQ ID NO: 578254 - RNA, 19 nt, Artificial Sequence
  Synthetic
uuuccauucugaaaaguag

SEQ ID NO: 578255 - RNA, 20 nt, Artificial Sequence
  Synthetic
uuuuccauucugaaaaguag

SEQ ID NO: 578256 - RNA, 21 nt, Artificial Sequence
  Synthetic
auuuuccauucugaaaaguag

SEQ ID NO: 578257 - RNA, 22 nt, Artificial Sequence
  Synthetic
gauuuuccauucugaaaaguag

SEQ ID NO: 578258 - RNA, 23 nt, Artificial Sequence
  Synthetic
ggauuuuccauucugaaaaguag

SEQ ID NO: 578259 - RNA, 24 nt, Artificial Sequence
  Synthetic
aggauuuuccauucugaaaaguag

SEQ ID NO: 578260 - RNA, 18 nt, Artificial Sequence
  Synthetic
ggacauauugaaaaguag

SEQ ID NO: 578261 - RNA, 19 nt, Artificial Sequence
  Synthetic
aggacauauugaaaaguag

SEQ ID NO: 578262 - RNA, 20 nt, Artificial Sequence
  Synthetic
caggacauauugaaaaguag

SEQ ID NO: 578263 - RNA, 21 nt, Artificial Sequence
  Synthetic
gcaggacauauugaaaaguag

SEQ ID NO: 578264 - RNA, 22 nt, Artificial Sequence
  Synthetic
agcaggacauauugaaaaguag

SEQ ID NO: 578265 - RNA, 23 nt, Artificial Sequence
  Synthetic
aagcaggacauauugaaaaguag

SEQ ID NO: 578266 - RNA, 24 nt, Artificial Sequence
  Synthetic
caagcaggacauauugaaaaguag

SEQ ID NO: 578267 - RNA, 18 nt, Artificial Sequence
  Synthetic
uaaaaauacccaaaguag

SEQ ID NO: 578268 - RNA, 19 nt, Artificial Sequence
  Synthetic
guaaaaauacccaaaguag

SEQ ID NO: 578269 - RNA, 20 nt, Artificial Sequence
  Synthetic
uguaaaaauacccaaaguag

SEQ ID NO: 578270 - RNA, 21 nt, Artificial Sequence
  Synthetic
cuguaaaaauacccaaaguag

SEQ ID NO: 578271 - RNA, 22 nt, Artificial Sequence
  Synthetic
ccuguaaaaauacccaaaguag

SEQ ID NO: 578272 - RNA, 23 nt, Artificial Sequence
  Synthetic
cccuguaaaaauacccaaaguag

SEQ ID NO: 578273 - RNA, 24 nt, Artificial Sequence
  Synthetic
acccuguaaaaauacccaaaguag

SEQ ID NO: 578274 - RNA, 18 nt, Artificial Sequence
  Synthetic
augggggcaucaaaguag

SEQ ID NO: 578275 - RNA, 19 nt, Artificial Sequence
  Synthetic
aaugggggcaucaaaguag

SEQ ID NO: 578276 - RNA, 20 nt, Artificial Sequence
  Synthetic
aaaugggggcaucaaaguag

SEQ ID NO: 578277 - RNA, 21 nt, Artificial Sequence
  Synthetic
aaaaugggggcaucaaaguag

SEQ ID NO: 578278 - RNA, 22 nt, Artificial Sequence
  Synthetic
caaaaugggggcaucaaaguag

SEQ ID NO: 578279 - RNA, 23 nt, Artificial Sequence
  Synthetic
acaaaaugggggcaucaaaguag

SEQ ID NO: 578280 - RNA, 24 nt, Artificial Sequence
  Synthetic
uacaaaaugggggcaucaaaguag

SEQ ID NO: 578281 - RNA, 18 nt, Artificial Sequence
  Synthetic
auggaagaaaacaaguag

SEQ ID NO: 578282 - RNA, 19 nt, Artificial Sequence
  Synthetic
aauggaagaaaacaaguag

SEQ ID NO: 578283 - RNA, 20 nt, Artificial Sequence
  Synthetic
gaauggaagaaaacaaguag

SEQ ID NO: 578284 - RNA, 21 nt, Artificial Sequence
  Synthetic
agaauggaagaaaacaaguag

SEQ ID NO: 578285 - RNA, 22 nt, Artificial Sequence
  Synthetic
uagaauggaagaaaacaaguag

SEQ ID NO: 578286 - RNA, 23 nt, Artificial Sequence
  Synthetic
uuagaauggaagaaaacaaguag

SEQ ID NO: 578287 - RNA, 24 nt, Artificial Sequence
  Synthetic
auuagaauggaagaaaacaaguag

SEQ ID NO: 578288 - RNA, 18 nt, Artificial Sequence
  Synthetic
cuucaaccucccaaguag

SEQ ID NO: 578289 - RNA, 19 nt, Artificial Sequence
  Synthetic
gcuucaaccucccaaguag

SEQ ID NO: 578290 - RNA, 20 nt, Artificial Sequence
  Synthetic
ugcuucaaccucccaaguag

SEQ ID NO: 578291 - RNA, 21 nt, Artificial Sequence
  Synthetic
cugcuucaaccucccaaguag

SEQ ID NO: 578292 - RNA, 22 nt, Artificial Sequence
  Synthetic
ccugcuucaaccucccaaguag

SEQ ID NO: 578293 - RNA, 23 nt, Artificial Sequence
  Synthetic
uccugcuucaaccucccaaguag

SEQ ID NO: 578294 - RNA, 24 nt, Artificial Sequence
  Synthetic
cuccugcuucaaccucccaaguag

SEQ ID NO: 578295 - RNA, 21 nt, Artificial Sequence
  Synthetic
cugccucagccucccaaguag

SEQ ID NO: 578296 - RNA, 22 nt, Artificial Sequence
  Synthetic
ccugccucagccucccaaguag

SEQ ID NO: 578297 - RNA, 23 nt, Artificial Sequence
  Synthetic
cccugccucagccucccaaguag

SEQ ID NO: 578298 - RNA, 24 nt, Artificial Sequence
  Synthetic
ccccugccucagccucccaaguag

SEQ ID NO: 578299 - RNA, 22 nt, Artificial Sequence
  Synthetic
gcugccucagccucccaaguag

SEQ ID NO: 578300 - RNA, 23 nt, Artificial Sequence
  Synthetic
ugcugccucagccucccaaguag

SEQ ID NO: 578301 - RNA, 24 nt, Artificial Sequence
  Synthetic
cugcugccucagccucccaaguag

SEQ ID NO: 578302 - RNA, 22 nt, Artificial Sequence
  Synthetic
ucugccucagccucccaaguag

SEQ ID NO: 578303 - RNA, 23 nt, Artificial Sequence
  Synthetic
uucugccucagccucccaaguag

SEQ ID NO: 578304 - RNA, 24 nt, Artificial Sequence
  Synthetic
cuucugccucagccucccaaguag

SEQ ID NO: 578305 - RNA, 18 nt, Artificial Sequence
  Synthetic
cuucagccucccaaguag

SEQ ID NO: 578306 - RNA, 19 nt, Artificial Sequence
  Synthetic
gcuucagccucccaaguag

SEQ ID NO: 578307 - RNA, 20 nt, Artificial Sequence
  Synthetic
ugcuucagccucccaaguag

SEQ ID NO: 578308 - RNA, 21 nt, Artificial Sequence
  Synthetic
cugcuucagccucccaaguag

SEQ ID NO: 578309 - RNA, 22 nt, Artificial Sequence
  Synthetic
ccugcuucagccucccaaguag

SEQ ID NO: 578310 - RNA, 23 nt, Artificial Sequence
  Synthetic
uccugcuucagccucccaaguag

SEQ ID NO: 578311 - RNA, 24 nt, Artificial Sequence
  Synthetic
cuccugcuucagccucccaaguag

SEQ ID NO: 578312 - RNA, 18 nt, Artificial Sequence
  Synthetic
ccucagcuucccaaguag

SEQ ID NO: 578313 - RNA, 19 nt, Artificial Sequence
  Synthetic
gccucagcuucccaaguag

SEQ ID NO: 578314 - RNA, 20 nt, Artificial Sequence
  Synthetic
ugccucagcuucccaaguag

SEQ ID NO: 578315 - RNA, 21 nt, Artificial Sequence
  Synthetic
uugccucagcuucccaaguag

SEQ ID NO: 578316 - RNA, 22 nt, Artificial Sequence
  Synthetic
cuugccucagcuucccaaguag

SEQ ID NO: 578317 - RNA, 23 nt, Artificial Sequence
  Synthetic
ucuugccucagcuucccaaguag

SEQ ID NO: 578318 - RNA, 24 nt, Artificial Sequence
  Synthetic
cucuugccucagcuucccaaguag

SEQ ID NO: 578319 - RNA, 18 nt, Artificial Sequence
  Synthetic
uaauuucuguagaaguag

SEQ ID NO: 578320 - RNA, 19 nt, Artificial Sequence
  Synthetic
auaauuucuguagaaguag

SEQ ID NO: 578321 - RNA, 20 nt, Artificial Sequence
  Synthetic
uauaauuucuguagaaguag

SEQ ID NO: 578322 - RNA, 21 nt, Artificial Sequence
  Synthetic
guauaauuucuguagaaguag

SEQ ID NO: 578323 - RNA, 22 nt, Artificial Sequence
  Synthetic
uguauaauuucuguagaaguag

SEQ ID NO: 578324 - RNA, 23 nt, Artificial Sequence
  Synthetic
guguauaauuucuguagaaguag

SEQ ID NO: 578325 - RNA, 24 nt, Artificial Sequence
  Synthetic
aguguauaauuucuguagaaguag

SEQ ID NO: 578326 - RNA, 18 nt, Artificial Sequence
  Synthetic
aaugaaaaggugaaguag

SEQ ID NO: 578327 - RNA, 19 nt, Artificial Sequence
  Synthetic
aaaugaaaaggugaaguag

SEQ ID NO: 578328 - RNA, 20 nt, Artificial Sequence
  Synthetic
caaaugaaaaggugaaguag

SEQ ID NO: 578329 - RNA, 21 nt, Artificial Sequence
  Synthetic
ucaaaugaaaaggugaaguag

SEQ ID NO: 578330 - RNA, 22 nt, Artificial Sequence
  Synthetic
gucaaaugaaaaggugaaguag

SEQ ID NO: 578331 - RNA, 23 nt, Artificial Sequence
  Synthetic
ugucaaaugaaaaggugaaguag

SEQ ID NO: 578332 - RNA, 24 nt, Artificial Sequence
  Synthetic
cugucaaaugaaaaggugaaguag

SEQ ID NO: 578333 - RNA, 18 nt, Artificial Sequence
  Synthetic
uacacagguuugaaguag

SEQ ID NO: 578334 - RNA, 19 nt, Artificial Sequence
  Synthetic
guacacagguuugaaguag

SEQ ID NO: 578335 - RNA, 20 nt, Artificial Sequence
  Synthetic
gguacacagguuugaaguag

SEQ ID NO: 578336 - RNA, 21 nt, Artificial Sequence
  Synthetic
ggguacacagguuugaaguag

SEQ ID NO: 578337 - RNA, 22 nt, Artificial Sequence
  Synthetic
gggguacacagguuugaaguag

SEQ ID NO: 578338 - RNA, 23 nt, Artificial Sequence
  Synthetic
agggguacacagguuugaaguag

SEQ ID NO: 578339 - RNA, 24 nt, Artificial Sequence
  Synthetic
cagggguacacagguuugaaguag

SEQ ID NO: 578340 - RNA, 18 nt, Artificial Sequence
  Synthetic
uuuuucucacauaaguag

SEQ ID NO: 578341 - RNA, 19 nt, Artificial Sequence
  Synthetic
uuuuuucucacauaaguag

SEQ ID NO: 578342 - RNA, 20 nt, Artificial Sequence
  Synthetic
cuuuuuucucacauaaguag

SEQ ID NO: 578343 - RNA, 21 nt, Artificial Sequence
  Synthetic
acuuuuuucucacauaaguag

SEQ ID NO: 578344 - RNA, 22 nt, Artificial Sequence
  Synthetic
uacuuuuuucucacauaaguag

SEQ ID NO: 578345 - RNA, 23 nt, Artificial Sequence
  Synthetic
cuacuuuuuucucacauaaguag

SEQ ID NO: 578346 - RNA, 24 nt, Artificial Sequence
  Synthetic
ccuacuuuuuucucacauaaguag

SEQ ID NO: 578347 - RNA, 18 nt, Artificial Sequence
  Synthetic
ggcacauguuauaaguag

SEQ ID NO: 578348 - RNA, 19 nt, Artificial Sequence
  Synthetic
aggcacauguuauaaguag

SEQ ID NO: 578349 - RNA, 20 nt, Artificial Sequence
  Synthetic
aaggcacauguuauaaguag

SEQ ID NO: 578350 - RNA, 21 nt, Artificial Sequence
  Synthetic
aaaggcacauguuauaaguag

SEQ ID NO: 578351 - RNA, 22 nt, Artificial Sequence
  Synthetic
aaaaggcacauguuauaaguag

SEQ ID NO: 578352 - RNA, 23 nt, Artificial Sequence
  Synthetic
uaaaaggcacauguuauaaguag

SEQ ID NO: 578353 - RNA, 24 nt, Artificial Sequence
  Synthetic
cuaaaaggcacauguuauaaguag

SEQ ID NO: 578354 - RNA, 18 nt, Artificial Sequence
  Synthetic
ccucagccugcuaaguag

SEQ ID NO: 578355 - RNA, 19 nt, Artificial Sequence
  Synthetic
gccucagccugcuaaguag

SEQ ID NO: 578356 - RNA, 20 nt, Artificial Sequence
  Synthetic
ugccucagccugcuaaguag

SEQ ID NO: 578357 - RNA, 21 nt, Artificial Sequence
  Synthetic
cugccucagccugcuaaguag

SEQ ID NO: 578358 - RNA, 22 nt, Artificial Sequence
  Synthetic
ccugccucagccugcuaaguag

SEQ ID NO: 578359 - RNA, 23 nt, Artificial Sequence
  Synthetic
uccugccucagccugcuaaguag

SEQ ID NO: 578360 - RNA, 24 nt, Artificial Sequence
  Synthetic
cuccugccucagccugcuaaguag

SEQ ID NO: 578361 - RNA, 18 nt, Artificial Sequence
  Synthetic
ugcuucuucacacaguag

SEQ ID NO: 578362 - RNA, 19 nt, Artificial Sequence
  Synthetic
cugcuucuucacacaguag

SEQ ID NO: 578363 - RNA, 20 nt, Artificial Sequence
  Synthetic
ccugcuucuucacacaguag

SEQ ID NO: 578364 - RNA, 21 nt, Artificial Sequence
  Synthetic
cccugcuucuucacacaguag

SEQ ID NO: 578365 - RNA, 22 nt, Artificial Sequence
  Synthetic
acccugcuucuucacacaguag

SEQ ID NO: 578366 - RNA, 23 nt, Artificial Sequence
  Synthetic
gacccugcuucuucacacaguag

SEQ ID NO: 578367 - RNA, 24 nt, Artificial Sequence
  Synthetic
agacccugcuucuucacacaguag

SEQ ID NO: 578368 - RNA, 18 nt, Artificial Sequence
  Synthetic
auccuaugaggccaguag

SEQ ID NO: 578369 - RNA, 19 nt, Artificial Sequence
  Synthetic
aauccuaugaggccaguag

SEQ ID NO: 578370 - RNA, 20 nt, Artificial Sequence
  Synthetic
caauccuaugaggccaguag

SEQ ID NO: 578371 - RNA, 21 nt, Artificial Sequence
  Synthetic
acaauccuaugaggccaguag

SEQ ID NO: 578372 - RNA, 22 nt, Artificial Sequence
  Synthetic
aacaauccuaugaggccaguag

SEQ ID NO: 578373 - RNA, 23 nt, Artificial Sequence
  Synthetic
caacaauccuaugaggccaguag

SEQ ID NO: 578374 - RNA, 24 nt, Artificial Sequence
  Synthetic
ccaacaauccuaugaggccaguag

SEQ ID NO: 578375 - RNA, 18 nt, Artificial Sequence
  Synthetic
uggaagcaacagcaguag

SEQ ID NO: 578376 - RNA, 19 nt, Artificial Sequence
  Synthetic
auggaagcaacagcaguag

SEQ ID NO: 578377 - RNA, 20 nt, Artificial Sequence
  Synthetic
aauggaagcaacagcaguag

SEQ ID NO: 578378 - RNA, 21 nt, Artificial Sequence
  Synthetic
caauggaagcaacagcaguag

SEQ ID NO: 578379 - RNA, 22 nt, Artificial Sequence
  Synthetic
acaauggaagcaacagcaguag

SEQ ID NO: 578380 - RNA, 23 nt, Artificial Sequence
  Synthetic
uacaauggaagcaacagcaguag

SEQ ID NO: 578381 - RNA, 24 nt, Artificial Sequence
  Synthetic
auacaauggaagcaacagcaguag

SEQ ID NO: 578382 - RNA, 18 nt, Artificial Sequence
  Synthetic
aggguuuugccucaguag

SEQ ID NO: 578383 - RNA, 19 nt, Artificial Sequence
  Synthetic
aaggguuuugccucaguag

SEQ ID NO: 578384 - RNA, 20 nt, Artificial Sequence
  Synthetic
gaaggguuuugccucaguag

SEQ ID NO: 578385 - RNA, 21 nt, Artificial Sequence
  Synthetic
agaaggguuuugccucaguag

SEQ ID NO: 578386 - RNA, 22 nt, Artificial Sequence
  Synthetic
cagaaggguuuugccucaguag

SEQ ID NO: 578387 - RNA, 23 nt, Artificial Sequence
  Synthetic
ucagaaggguuuugccucaguag

SEQ ID NO: 578388 - RNA, 24 nt, Artificial Sequence
  Synthetic
cucagaaggguuuugccucaguag

SEQ ID NO: 578389 - RNA, 18 nt, Artificial Sequence
  Synthetic
caccaaauaagucaguag

SEQ ID NO: 578390 - RNA, 19 nt, Artificial Sequence
  Synthetic
acaccaaauaagucaguag

SEQ ID NO: 578391 - RNA, 20 nt, Artificial Sequence
  Synthetic
aacaccaaauaagucaguag

SEQ ID NO: 578392 - RNA, 21 nt, Artificial Sequence
  Synthetic
aaacaccaaauaagucaguag

SEQ ID NO: 578393 - RNA, 22 nt, Artificial Sequence
  Synthetic
aaaacaccaaauaagucaguag

SEQ ID NO: 578394 - RNA, 23 nt, Artificial Sequence
  Synthetic
gaaaacaccaaauaagucaguag

SEQ ID NO: 578395 - RNA, 24 nt, Artificial Sequence
  Synthetic
agaaaacaccaaauaagucaguag

SEQ ID NO: 578396 - RNA, 18 nt, Artificial Sequence
  Synthetic
uuccaggcauaagaguag

SEQ ID NO: 578397 - RNA, 19 nt, Artificial Sequence
  Synthetic
auuccaggcauaagaguag

SEQ ID NO: 578398 - RNA, 20 nt, Artificial Sequence
  Synthetic
uauuccaggcauaagaguag

SEQ ID NO: 578399 - RNA, 21 nt, Artificial Sequence
  Synthetic
auauuccaggcauaagaguag

SEQ ID NO: 578400 - RNA, 22 nt, Artificial Sequence
  Synthetic
cauauuccaggcauaagaguag

SEQ ID NO: 578401 - RNA, 23 nt, Artificial Sequence
  Synthetic
acauauuccaggcauaagaguag

SEQ ID NO: 578402 - RNA, 24 nt, Artificial Sequence
  Synthetic
aacauauuccaggcauaagaguag

SEQ ID NO: 578403 - RNA, 18 nt, Artificial Sequence
  Synthetic
uuuaaaaacacagaguag

SEQ ID NO: 578404 - RNA, 19 nt, Artificial Sequence
  Synthetic
cuuuaaaaacacagaguag

SEQ ID NO: 578405 - RNA, 20 nt, Artificial Sequence
  Synthetic
ucuuuaaaaacacagaguag

SEQ ID NO: 578406 - RNA, 21 nt, Artificial Sequence
  Synthetic
aucuuuaaaaacacagaguag

SEQ ID NO: 578407 - RNA, 22 nt, Artificial Sequence
  Synthetic
aaucuuuaaaaacacagaguag

SEQ ID NO: 578408 - RNA, 23 nt, Artificial Sequence
  Synthetic
gaaucuuuaaaaacacagaguag

SEQ ID NO: 578409 - RNA, 24 nt, Artificial Sequence
  Synthetic
ugaaucuuuaaaaacacagaguag

SEQ ID NO: 578410 - RNA, 18 nt, Artificial Sequence
  Synthetic
ucuaaaaccacagaguag

SEQ ID NO: 578411 - RNA, 19 nt, Artificial Sequence
  Synthetic
uucuaaaaccacagaguag

SEQ ID NO: 578412 - RNA, 20 nt, Artificial Sequence
  Synthetic
cuucuaaaaccacagaguag

SEQ ID NO: 578413 - RNA, 21 nt, Artificial Sequence
  Synthetic
ucuucuaaaaccacagaguag

SEQ ID NO: 578414 - RNA, 22 nt, Artificial Sequence
  Synthetic
cucuucuaaaaccacagaguag

SEQ ID NO: 578415 - RNA, 23 nt, Artificial Sequence
  Synthetic
ucucuucuaaaaccacagaguag

SEQ ID NO: 578416 - RNA, 24 nt, Artificial Sequence
  Synthetic
uucucuucuaaaaccacagaguag

SEQ ID NO: 578417 - RNA, 18 nt, Artificial Sequence
  Synthetic
gugaggaauacagaguag

SEQ ID NO: 578418 - RNA, 19 nt, Artificial Sequence
  Synthetic
ugugaggaauacagaguag

SEQ ID NO: 578419 - RNA, 20 nt, Artificial Sequence
  Synthetic
augugaggaauacagaguag

SEQ ID NO: 578420 - RNA, 21 nt, Artificial Sequence
  Synthetic
gaugugaggaauacagaguag

SEQ ID NO: 578421 - RNA, 22 nt, Artificial Sequence
  Synthetic
ugaugugaggaauacagaguag

SEQ ID NO: 578422 - RNA, 23 nt, Artificial Sequence
  Synthetic
uugaugugaggaauacagaguag

SEQ ID NO: 578423 - RNA, 24 nt, Artificial Sequence
  Synthetic
uuugaugugaggaauacagaguag

SEQ ID NO: 578424 - RNA, 21 nt, Artificial Sequence
  Synthetic
gugccucagccuccagaguag

SEQ ID NO: 578425 - RNA, 22 nt, Artificial Sequence
  Synthetic
ugugccucagccuccagaguag

SEQ ID NO: 578426 - RNA, 23 nt, Artificial Sequence
  Synthetic
uugugccucagccuccagaguag

SEQ ID NO: 578427 - RNA, 24 nt, Artificial Sequence
  Synthetic
cuugugccucagccuccagaguag

SEQ ID NO: 578428 - RNA, 18 nt, Artificial Sequence
  Synthetic
aauaagauugcagaguag

SEQ ID NO: 578429 - RNA, 19 nt, Artificial Sequence
  Synthetic
aaauaagauugcagaguag

SEQ ID NO: 578430 - RNA, 20 nt, Artificial Sequence
  Synthetic
gaaauaagauugcagaguag

SEQ ID NO: 578431 - RNA, 21 nt, Artificial Sequence
  Synthetic
ggaaauaagauugcagaguag

SEQ ID NO: 578432 - RNA, 22 nt, Artificial Sequence
  Synthetic
aggaaauaagauugcagaguag

SEQ ID NO: 578433 - RNA, 23 nt, Artificial Sequence
  Synthetic
gaggaaauaagauugcagaguag

SEQ ID NO: 578434 - RNA, 24 nt, Artificial Sequence
  Synthetic
agaggaaauaagauugcagaguag

SEQ ID NO: 578435 - RNA, 18 nt, Artificial Sequence
  Synthetic
ugagcaaggggagaguag

SEQ ID NO: 578436 - RNA, 19 nt, Artificial Sequence
  Synthetic
gugagcaaggggagaguag

SEQ ID NO: 578437 - RNA, 20 nt, Artificial Sequence
  Synthetic
agugagcaaggggagaguag

SEQ ID NO: 578438 - RNA, 21 nt, Artificial Sequence
  Synthetic
uagugagcaaggggagaguag

SEQ ID NO: 578439 - RNA, 22 nt, Artificial Sequence
  Synthetic
cuagugagcaaggggagaguag

SEQ ID NO: 578440 - RNA, 23 nt, Artificial Sequence
  Synthetic
ucuagugagcaaggggagaguag

SEQ ID NO: 578441 - RNA, 24 nt, Artificial Sequence
  Synthetic
aucuagugagcaaggggagaguag

SEQ ID NO: 578442 - RNA, 18 nt, Artificial Sequence
  Synthetic
cagcccaucauagaguag

SEQ ID NO: 578443 - RNA, 19 nt, Artificial Sequence
  Synthetic
acagcccaucauagaguag

SEQ ID NO: 578444 - RNA, 20 nt, Artificial Sequence
  Synthetic
aacagcccaucauagaguag

SEQ ID NO: 578445 - RNA, 21 nt, Artificial Sequence
  Synthetic
aaacagcccaucauagaguag

SEQ ID NO: 578446 - RNA, 22 nt, Artificial Sequence
  Synthetic
aaaacagcccaucauagaguag

SEQ ID NO: 578447 - RNA, 23 nt, Artificial Sequence
  Synthetic
caaaacagcccaucauagaguag

SEQ ID NO: 578448 - RNA, 24 nt, Artificial Sequence
  Synthetic
acaaaacagcccaucauagaguag

SEQ ID NO: 578449 - RNA, 18 nt, Artificial Sequence
  Synthetic
ugaagagaacuagaguag

SEQ ID NO: 578450 - RNA, 19 nt, Artificial Sequence
  Synthetic
cugaagagaacuagaguag

SEQ ID NO: 578451 - RNA, 20 nt, Artificial Sequence
  Synthetic
ccugaagagaacuagaguag

SEQ ID NO: 578452 - RNA, 21 nt, Artificial Sequence
  Synthetic
accugaagagaacuagaguag

SEQ ID NO: 578453 - RNA, 22 nt, Artificial Sequence
  Synthetic
aaccugaagagaacuagaguag

SEQ ID NO: 578454 - RNA, 23 nt, Artificial Sequence
  Synthetic
gaaccugaagagaacuagaguag

SEQ ID NO: 578455 - RNA, 24 nt, Artificial Sequence
  Synthetic
agaaccugaagagaacuagaguag

SEQ ID NO: 578456 - RNA, 18 nt, Artificial Sequence
  Synthetic
uccacaacaguagaguag

SEQ ID NO: 578457 - RNA, 19 nt, Artificial Sequence
  Synthetic
auccacaacaguagaguag

SEQ ID NO: 578458 - RNA, 20 nt, Artificial Sequence
  Synthetic
uauccacaacaguagaguag

SEQ ID NO: 578459 - RNA, 21 nt, Artificial Sequence
  Synthetic
uuauccacaacaguagaguag

SEQ ID NO: 578460 - RNA, 22 nt, Artificial Sequence
  Synthetic
uuuauccacaacaguagaguag

SEQ ID NO: 578461 - RNA, 23 nt, Artificial Sequence
  Synthetic
uuuuauccacaacaguagaguag

SEQ ID NO: 578462 - RNA, 24 nt, Artificial Sequence
  Synthetic
uuuuuauccacaacaguagaguag

SEQ ID NO: 578463 - RNA, 18 nt, Artificial Sequence
  Synthetic
ccuuaaccucccgaguag

SEQ ID NO: 578464 - RNA, 19 nt, Artificial Sequence
  Synthetic
gccuuaaccucccgaguag

SEQ ID NO: 578465 - RNA, 20 nt, Artificial Sequence
  Synthetic
ugccuuaaccucccgaguag

SEQ ID NO: 578466 - RNA, 21 nt, Artificial Sequence
  Synthetic
cugccuuaaccucccgaguag

SEQ ID NO: 578467 - RNA, 22 nt, Artificial Sequence
  Synthetic
ccugccuuaaccucccgaguag

SEQ ID NO: 578468 - RNA, 23 nt, Artificial Sequence
  Synthetic
uccugccuuaaccucccgaguag

SEQ ID NO: 578469 - RNA, 24 nt, Artificial Sequence
  Synthetic
cuccugccuuaaccucccgaguag

SEQ ID NO: 578470 - RNA, 21 nt, Artificial Sequence
  Synthetic
cuaccucagccucccgaguag

SEQ ID NO: 578471 - RNA, 22 nt, Artificial Sequence
  Synthetic
ccuaccucagccucccgaguag

SEQ ID NO: 578472 - RNA, 23 nt, Artificial Sequence
  Synthetic
uccuaccucagccucccgaguag

SEQ ID NO: 578473 - RNA, 24 nt, Artificial Sequence
  Synthetic
cuccuaccucagccucccgaguag

SEQ ID NO: 578474 - RNA, 21 nt, Artificial Sequence
  Synthetic
cugccucagccucccgaguag

SEQ ID NO: 578475 - RNA, 22 nt, Artificial Sequence
  Synthetic
ccugccucagccucccgaguag

SEQ ID NO: 578476 - RNA, 23 nt, Artificial Sequence
  Synthetic
uccugccucagccucccgaguag

SEQ ID NO: 578477 - RNA, 24 nt, Artificial Sequence
  Synthetic
cuccugccucagccucccgaguag

SEQ ID NO: 578478 - RNA, 24 nt, Artificial Sequence
  Synthetic
uuccugccucagccucccgaguag

SEQ ID NO: 578479 - RNA, 18 nt, Artificial Sequence
  Synthetic
ucucagccucccgaguag

SEQ ID NO: 578480 - RNA, 19 nt, Artificial Sequence
  Synthetic
gucucagccucccgaguag

SEQ ID NO: 578481 - RNA, 20 nt, Artificial Sequence
  Synthetic
ugucucagccucccgaguag

SEQ ID NO: 578482 - RNA, 21 nt, Artificial Sequence
  Synthetic
cugucucagccucccgaguag

SEQ ID NO: 578483 - RNA, 22 nt, Artificial Sequence
  Synthetic
ccugucucagccucccgaguag

SEQ ID NO: 578484 - RNA, 23 nt, Artificial Sequence
  Synthetic
uccugucucagccucccgaguag

SEQ ID NO: 578485 - RNA, 24 nt, Artificial Sequence
  Synthetic
cuccugucucagccucccgaguag

SEQ ID NO: 578486 - RNA, 18 nt, Artificial Sequence
  Synthetic
cuucagccucccgaguag

SEQ ID NO: 578487 - RNA, 19 nt, Artificial Sequence
  Synthetic
gcuucagccucccgaguag

SEQ ID NO: 578488 - RNA, 20 nt, Artificial Sequence
  Synthetic
ugcuucagccucccgaguag

SEQ ID NO: 578489 - RNA, 21 nt, Artificial Sequence
  Synthetic
cugcuucagccucccgaguag

SEQ ID NO: 578490 - RNA, 22 nt, Artificial Sequence
  Synthetic
ucugcuucagccucccgaguag

SEQ ID NO: 578491 - RNA, 23 nt, Artificial Sequence
  Synthetic
uucugcuucagccucccgaguag

SEQ ID NO: 578492 - RNA, 24 nt, Artificial Sequence
  Synthetic
cuucugcuucagccucccgaguag

SEQ ID NO: 578493 - RNA, 18 nt, Artificial Sequence
  Synthetic
caguagccucccgaguag

SEQ ID NO: 578494 - RNA, 19 nt, Artificial Sequence
  Synthetic
gcaguagccucccgaguag

SEQ ID NO: 578495 - RNA, 20 nt, Artificial Sequence
  Synthetic
ugcaguagccucccgaguag

SEQ ID NO: 578496 - RNA, 21 nt, Artificial Sequence
  Synthetic
gugcaguagccucccgaguag

SEQ ID NO: 578497 - RNA, 22 nt, Artificial Sequence
  Synthetic
agugcaguagccucccgaguag

SEQ ID NO: 578498 - RNA, 23 nt, Artificial Sequence
  Synthetic
gagugcaguagccucccgaguag

SEQ ID NO: 578499 - RNA, 24 nt, Artificial Sequence
  Synthetic
ggagugcaguagccucccgaguag

SEQ ID NO: 578500 - RNA, 18 nt, Artificial Sequence
  Synthetic
ccucugccucccgaguag

SEQ ID NO: 578501 - RNA, 19 nt, Artificial Sequence
  Synthetic
gccucugccucccgaguag

SEQ ID NO: 578502 - RNA, 20 nt, Artificial Sequence
  Synthetic
ugccucugccucccgaguag

SEQ ID NO: 578503 - RNA, 21 nt, Artificial Sequence
  Synthetic
cugccucugccucccgaguag

SEQ ID NO: 578504 - RNA, 22 nt, Artificial Sequence
  Synthetic
ccugccucugccucccgaguag

SEQ ID NO: 578505 - RNA, 23 nt, Artificial Sequence
  Synthetic
uccugccucugccucccgaguag

SEQ ID NO: 578506 - RNA, 24 nt, Artificial Sequence
  Synthetic
cuccugccucugccucccgaguag

SEQ ID NO: 578507 - RNA, 18 nt, Artificial Sequence
  Synthetic
cagccuccucccgaguag

SEQ ID NO: 578508 - RNA, 19 nt, Artificial Sequence
  Synthetic
ucagccuccucccgaguag

SEQ ID NO: 578509 - RNA, 20 nt, Artificial Sequence
  Synthetic
cucagccuccucccgaguag

SEQ ID NO: 578510 - RNA, 21 nt, Artificial Sequence
  Synthetic
ccucagccuccucccgaguag

SEQ ID NO: 578511 - RNA, 22 nt, Artificial Sequence
  Synthetic
gccucagccuccucccgaguag

SEQ ID NO: 578512 - RNA, 23 nt, Artificial Sequence
  Synthetic
ugccucagccuccucccgaguag

SEQ ID NO: 578513 - RNA, 24 nt, Artificial Sequence
  Synthetic
uugccucagccuccucccgaguag

SEQ ID NO: 578514 - RNA, 18 nt, Artificial Sequence
  Synthetic
ccucaggcucccgaguag

SEQ ID NO: 578515 - RNA, 19 nt, Artificial Sequence
  Synthetic
accucaggcucccgaguag

SEQ ID NO: 578516 - RNA, 20 nt, Artificial Sequence
  Synthetic
uaccucaggcucccgaguag

SEQ ID NO: 578517 - RNA, 21 nt, Artificial Sequence
  Synthetic
cuaccucaggcucccgaguag

SEQ ID NO: 578518 - RNA, 22 nt, Artificial Sequence
  Synthetic
ucuaccucaggcucccgaguag

SEQ ID NO: 578519 - RNA, 23 nt, Artificial Sequence
  Synthetic
uucuaccucaggcucccgaguag

SEQ ID NO: 578520 - RNA, 24 nt, Artificial Sequence
  Synthetic
cuucuaccucaggcucccgaguag

SEQ ID NO: 578521 - RNA, 18 nt, Artificial Sequence
  Synthetic
ccucagcuucccgaguag

SEQ ID NO: 578522 - RNA, 19 nt, Artificial Sequence
  Synthetic
gccucagcuucccgaguag

SEQ ID NO: 578523 - RNA, 20 nt, Artificial Sequence
  Synthetic
cgccucagcuucccgaguag

SEQ ID NO: 578524 - RNA, 21 nt, Artificial Sequence
  Synthetic
ccgccucagcuucccgaguag

SEQ ID NO: 578525 - RNA, 22 nt, Artificial Sequence
  Synthetic
cccgccucagcuucccgaguag

SEQ ID NO: 578526 - RNA, 23 nt, Artificial Sequence
  Synthetic
ucccgccucagcuucccgaguag

SEQ ID NO: 578527 - RNA, 24 nt, Artificial Sequence
  Synthetic
cucccgccucagcuucccgaguag

SEQ ID NO: 578528 - RNA, 18 nt, Artificial Sequence
  Synthetic
gccucagccuccgaguag

SEQ ID NO: 578529 - RNA, 19 nt, Artificial Sequence
  Synthetic
ugccucagccuccgaguag

SEQ ID NO: 578530 - RNA, 20 nt, Artificial Sequence
  Synthetic
cugccucagccuccgaguag

SEQ ID NO: 578531 - RNA, 21 nt, Artificial Sequence
  Synthetic
ccugccucagccuccgaguag

SEQ ID NO: 578532 - RNA, 22 nt, Artificial Sequence
  Synthetic
uccugccucagccuccgaguag

SEQ ID NO: 578533 - RNA, 23 nt, Artificial Sequence
  Synthetic
cuccugccucagccuccgaguag

SEQ ID NO: 578534 - RNA, 24 nt, Artificial Sequence
  Synthetic
ucuccugccucagccuccgaguag

SEQ ID NO: 578535 - RNA, 18 nt, Artificial Sequence
  Synthetic
ccucagccucaggaguag

SEQ ID NO: 578536 - RNA, 19 nt, Artificial Sequence
  Synthetic
gccucagccucaggaguag

SEQ ID NO: 578537 - RNA, 20 nt, Artificial Sequence
  Synthetic
ugccucagccucaggaguag

SEQ ID NO: 578538 - RNA, 21 nt, Artificial Sequence
  Synthetic
cugccucagccucaggaguag

SEQ ID NO: 578539 - RNA, 22 nt, Artificial Sequence
  Synthetic
ccugccucagccucaggaguag

SEQ ID NO: 578540 - RNA, 23 nt, Artificial Sequence
  Synthetic
uccugccucagccucaggaguag

SEQ ID NO: 578541 - RNA, 24 nt, Artificial Sequence
  Synthetic
cuccugccucagccucaggaguag

SEQ ID NO: 578542 - RNA, 18 nt, Artificial Sequence
  Synthetic
uagcaguuuuaggaguag

SEQ ID NO: 578543 - RNA, 19 nt, Artificial Sequence
  Synthetic
auagcaguuuuaggaguag

SEQ ID NO: 578544 - RNA, 20 nt, Artificial Sequence
  Synthetic
uauagcaguuuuaggaguag

SEQ ID NO: 578545 - RNA, 21 nt, Artificial Sequence
  Synthetic
guauagcaguuuuaggaguag

SEQ ID NO: 578546 - RNA, 22 nt, Artificial Sequence
  Synthetic
aguauagcaguuuuaggaguag

SEQ ID NO: 578547 - RNA, 23 nt, Artificial Sequence
  Synthetic
caguauagcaguuuuaggaguag

SEQ ID NO: 578548 - RNA, 24 nt, Artificial Sequence
  Synthetic
acaguauagcaguuuuaggaguag

SEQ ID NO: 578549 - RNA, 18 nt, Artificial Sequence
  Synthetic
ccucagccuccugaguag

SEQ ID NO: 578550 - RNA, 20 nt, Artificial Sequence
  Synthetic
caccucagccuccugaguag

SEQ ID NO: 578551 - RNA, 21 nt, Artificial Sequence
  Synthetic
ccaccucagccuccugaguag

SEQ ID NO: 578552 - RNA, 22 nt, Artificial Sequence
  Synthetic
cccaccucagccuccugaguag

SEQ ID NO: 578553 - RNA, 23 nt, Artificial Sequence
  Synthetic
ucccaccucagccuccugaguag

SEQ ID NO: 578554 - RNA, 24 nt, Artificial Sequence
  Synthetic
cucccaccucagccuccugaguag

SEQ ID NO: 578555 - RNA, 19 nt, Artificial Sequence
  Synthetic
gccucagccuccugaguag

SEQ ID NO: 578556 - RNA, 20 nt, Artificial Sequence
  Synthetic
cgccucagccuccugaguag

SEQ ID NO: 578557 - RNA, 21 nt, Artificial Sequence
  Synthetic
ccgccucagccuccugaguag

SEQ ID NO: 578558 - RNA, 22 nt, Artificial Sequence
  Synthetic
cccgccucagccuccugaguag

SEQ ID NO: 578559 - RNA, 23 nt, Artificial Sequence
  Synthetic
ucccgccucagccuccugaguag

SEQ ID NO: 578560 - RNA, 24 nt, Artificial Sequence
  Synthetic
uucccgccucagccuccugaguag

SEQ ID NO: 578561 - RNA, 18 nt, Artificial Sequence
  Synthetic
ucucagccuccugaguag

SEQ ID NO: 578562 - RNA, 19 nt, Artificial Sequence
  Synthetic
aucucagccuccugaguag

SEQ ID NO: 578563 - RNA, 20 nt, Artificial Sequence
  Synthetic
caucucagccuccugaguag

SEQ ID NO: 578564 - RNA, 21 nt, Artificial Sequence
  Synthetic
ccaucucagccuccugaguag

SEQ ID NO: 578565 - RNA, 22 nt, Artificial Sequence
  Synthetic
cccaucucagccuccugaguag

SEQ ID NO: 578566 - RNA, 23 nt, Artificial Sequence
  Synthetic
ucccaucucagccuccugaguag

SEQ ID NO: 578567 - RNA, 24 nt, Artificial Sequence
  Synthetic
cucccaucucagccuccugaguag

SEQ ID NO: 578568 - RNA, 18 nt, Artificial Sequence
  Synthetic
ccuuagccuccugaguag

SEQ ID NO: 578569 - RNA, 19 nt, Artificial Sequence
  Synthetic
gccuuagccuccugaguag

SEQ ID NO: 578570 - RNA, 20 nt, Artificial Sequence
  Synthetic
ugccuuagccuccugaguag

SEQ ID NO: 578571 - RNA, 21 nt, Artificial Sequence
  Synthetic
uugccuuagccuccugaguag

SEQ ID NO: 578572 - RNA, 22 nt, Artificial Sequence
  Synthetic
cuugccuuagccuccugaguag

SEQ ID NO: 578573 - RNA, 23 nt, Artificial Sequence
  Synthetic
ucuugccuuagccuccugaguag

SEQ ID NO: 578574 - RNA, 24 nt, Artificial Sequence
  Synthetic
cucuugccuuagccuccugaguag

SEQ ID NO: 578575 - RNA, 18 nt, Artificial Sequence
  Synthetic
gcucugccuccugaguag

SEQ ID NO: 578576 - RNA, 19 nt, Artificial Sequence
  Synthetic
agcucugccuccugaguag

SEQ ID NO: 578577 - RNA, 20 nt, Artificial Sequence
  Synthetic
aagcucugccuccugaguag

SEQ ID NO: 578578 - RNA, 21 nt, Artificial Sequence
  Synthetic
caagcucugccuccugaguag

SEQ ID NO: 578579 - RNA, 22 nt, Artificial Sequence
  Synthetic
gcaagcucugccuccugaguag

SEQ ID NO: 578580 - RNA, 23 nt, Artificial Sequence
  Synthetic
ugcaagcucugccuccugaguag

SEQ ID NO: 578581 - RNA, 24 nt, Artificial Sequence
  Synthetic
cugcaagcucugccuccugaguag

SEQ ID NO: 578582 - RNA, 18 nt, Artificial Sequence
  Synthetic
ccucaggcuccugaguag

SEQ ID NO: 578583 - RNA, 19 nt, Artificial Sequence
  Synthetic
gccucaggcuccugaguag

SEQ ID NO: 578584 - RNA, 20 nt, Artificial Sequence
  Synthetic
ugccucaggcuccugaguag

SEQ ID NO: 578585 - RNA, 21 nt, Artificial Sequence
  Synthetic
gugccucaggcuccugaguag

SEQ ID NO: 578586 - RNA, 22 nt, Artificial Sequence
  Synthetic
cgugccucaggcuccugaguag

SEQ ID NO: 578587 - RNA, 23 nt, Artificial Sequence
  Synthetic
ucgugccucaggcuccugaguag

SEQ ID NO: 578588 - RNA, 24 nt, Artificial Sequence
  Synthetic
cucgugccucaggcuccugaguag

SEQ ID NO: 578589 - RNA, 18 nt, Artificial Sequence
  Synthetic
ccucagcguccugaguag

SEQ ID NO: 578590 - RNA, 19 nt, Artificial Sequence
  Synthetic
gccucagcguccugaguag

SEQ ID NO: 578591 - RNA, 20 nt, Artificial Sequence
  Synthetic
ugccucagcguccugaguag

SEQ ID NO: 578592 - RNA, 21 nt, Artificial Sequence
  Synthetic
cugccucagcguccugaguag

SEQ ID NO: 578593 - RNA, 22 nt, Artificial Sequence
  Synthetic
ccugccucagcguccugaguag

SEQ ID NO: 578594 - RNA, 23 nt, Artificial Sequence
  Synthetic
uccugccucagcguccugaguag

SEQ ID NO: 578595 - RNA, 24 nt, Artificial Sequence
  Synthetic
cuccugccucagcguccugaguag

SEQ ID NO: 578596 - RNA, 18 nt, Artificial Sequence
  Synthetic
guagacauaucugaguag

SEQ ID NO: 578597 - RNA, 19 nt, Artificial Sequence
  Synthetic
aguagacauaucugaguag

SEQ ID NO: 578598 - RNA, 20 nt, Artificial Sequence
  Synthetic
caguagacauaucugaguag

SEQ ID NO: 578599 - RNA, 21 nt, Artificial Sequence
  Synthetic
gcaguagacauaucugaguag

SEQ ID NO: 578600 - RNA, 22 nt, Artificial Sequence
  Synthetic
ugcaguagacauaucugaguag

SEQ ID NO: 578601 - RNA, 23 nt, Artificial Sequence
  Synthetic
uugcaguagacauaucugaguag

SEQ ID NO: 578602 - RNA, 24 nt, Artificial Sequence
  Synthetic
auugcaguagacauaucugaguag

SEQ ID NO: 578603 - RNA, 18 nt, Artificial Sequence
  Synthetic
cauaacaucagugaguag

SEQ ID NO: 578604 - RNA, 19 nt, Artificial Sequence
  Synthetic
acauaacaucagugaguag

SEQ ID NO: 578605 - RNA, 20 nt, Artificial Sequence
  Synthetic
aacauaacaucagugaguag

SEQ ID NO: 578606 - RNA, 21 nt, Artificial Sequence
  Synthetic
gaacauaacaucagugaguag

SEQ ID NO: 578607 - RNA, 22 nt, Artificial Sequence
  Synthetic
ugaacauaacaucagugaguag

SEQ ID NO: 578608 - RNA, 23 nt, Artificial Sequence
  Synthetic
augaacauaacaucagugaguag

SEQ ID NO: 578609 - RNA, 24 nt, Artificial Sequence
  Synthetic
aaugaacauaacaucagugaguag

SEQ ID NO: 578610 - RNA, 18 nt, Artificial Sequence
  Synthetic
aagcucacaauugaguag

SEQ ID NO: 578611 - RNA, 19 nt, Artificial Sequence
  Synthetic
gaagcucacaauugaguag

SEQ ID NO: 578612 - RNA, 20 nt, Artificial Sequence
  Synthetic
agaagcucacaauugaguag

SEQ ID NO: 578613 - RNA, 21 nt, Artificial Sequence
  Synthetic
aagaagcucacaauugaguag

SEQ ID NO: 578614 - RNA, 22 nt, Artificial Sequence
  Synthetic
caagaagcucacaauugaguag

SEQ ID NO: 578615 - RNA, 23 nt, Artificial Sequence
  Synthetic
ucaagaagcucacaauugaguag

SEQ ID NO: 578616 - RNA, 24 nt, Artificial Sequence
  Synthetic
cucaagaagcucacaauugaguag

SEQ ID NO: 578617 - RNA, 18 nt, Artificial Sequence
  Synthetic
ccucagccucuugaguag

SEQ ID NO: 578618 - RNA, 19 nt, Artificial Sequence
  Synthetic
accucagccucuugaguag

SEQ ID NO: 578619 - RNA, 20 nt, Artificial Sequence
  Synthetic
caccucagccucuugaguag

SEQ ID NO: 578620 - RNA, 21 nt, Artificial Sequence
  Synthetic
ccaccucagccucuugaguag

SEQ ID NO: 578621 - RNA, 22 nt, Artificial Sequence
  Synthetic
uccaccucagccucuugaguag

SEQ ID NO: 578622 - RNA, 23 nt, Artificial Sequence
  Synthetic
cuccaccucagccucuugaguag

SEQ ID NO: 578623 - RNA, 24 nt, Artificial Sequence
  Synthetic
ccuccaccucagccucuugaguag

SEQ ID NO: 578624 - RNA, 18 nt, Artificial Sequence
  Synthetic
cguugugaaguugaguag

SEQ ID NO: 578625 - RNA, 19 nt, Artificial Sequence
  Synthetic
acguugugaaguugaguag

SEQ ID NO: 578626 - RNA, 20 nt, Artificial Sequence
  Synthetic
cacguugugaaguugaguag

SEQ ID NO: 578627 - RNA, 21 nt, Artificial Sequence
  Synthetic
acacguugugaaguugaguag

SEQ ID NO: 578628 - RNA, 22 nt, Artificial Sequence
  Synthetic
uacacguugugaaguugaguag

SEQ ID NO: 578629 - RNA, 23 nt, Artificial Sequence
  Synthetic
cuacacguugugaaguugaguag

SEQ ID NO: 578630 - RNA, 24 nt, Artificial Sequence
  Synthetic
ucuacacguugugaaguugaguag

SEQ ID NO: 578631 - RNA, 18 nt, Artificial Sequence
  Synthetic
agugucuagguugaguag

SEQ ID NO: 578632 - RNA, 19 nt, Artificial Sequence
  Synthetic
uagugucuagguugaguag

SEQ ID NO: 578633 - RNA, 20 nt, Artificial Sequence
  Synthetic
uuagugucuagguugaguag

SEQ ID NO: 578634 - RNA, 21 nt, Artificial Sequence
  Synthetic
cuuagugucuagguugaguag

SEQ ID NO: 578635 - RNA, 22 nt, Artificial Sequence
  Synthetic
acuuagugucuagguugaguag

SEQ ID NO: 578636 - RNA, 23 nt, Artificial Sequence
  Synthetic
cacuuagugucuagguugaguag

SEQ ID NO: 578637 - RNA, 24 nt, Artificial Sequence
  Synthetic
acacuuagugucuagguugaguag

SEQ ID NO: 578638 - RNA, 18 nt, Artificial Sequence
  Synthetic
acuaaauucuuugaguag

SEQ ID NO: 578639 - RNA, 19 nt, Artificial Sequence
  Synthetic
cacuaaauucuuugaguag

SEQ ID NO: 578640 - RNA, 20 nt, Artificial Sequence
  Synthetic
ucacuaaauucuuugaguag

SEQ ID NO: 578641 - RNA, 21 nt, Artificial Sequence
  Synthetic
gucacuaaauucuuugaguag

SEQ ID NO: 578642 - RNA, 22 nt, Artificial Sequence
  Synthetic
ugucacuaaauucuuugaguag

SEQ ID NO: 578643 - RNA, 23 nt, Artificial Sequence
  Synthetic
uugucacuaaauucuuugaguag

SEQ ID NO: 578644 - RNA, 24 nt, Artificial Sequence
  Synthetic
guugucacuaaauucuuugaguag

SEQ ID NO: 578645 - RNA, 18 nt, Artificial Sequence
  Synthetic
uggagguaaaaauaguag

SEQ ID NO: 578646 - RNA, 19 nt, Artificial Sequence
  Synthetic
uuggagguaaaaauaguag

SEQ ID NO: 578647 - RNA, 20 nt, Artificial Sequence
  Synthetic
uuuggagguaaaaauaguag

SEQ ID NO: 578648 - RNA, 21 nt, Artificial Sequence
  Synthetic
guuuggagguaaaaauaguag

SEQ ID NO: 578649 - RNA, 22 nt, Artificial Sequence
  Synthetic
gguuuggagguaaaaauaguag

SEQ ID NO: 578650 - RNA, 23 nt, Artificial Sequence
  Synthetic
agguuuggagguaaaaauaguag

SEQ ID NO: 578651 - RNA, 24 nt, Artificial Sequence
  Synthetic
cagguuuggagguaaaaauaguag

SEQ ID NO: 578652 - RNA, 18 nt, Artificial Sequence
  Synthetic
gaggauagcugauaguag

SEQ ID NO: 578653 - RNA, 19 nt, Artificial Sequence
  Synthetic
agaggauagcugauaguag

SEQ ID NO: 578654 - RNA, 20 nt, Artificial Sequence
  Synthetic
uagaggauagcugauaguag

SEQ ID NO: 578655 - RNA, 21 nt, Artificial Sequence
  Synthetic
cuagaggauagcugauaguag

SEQ ID NO: 578656 - RNA, 22 nt, Artificial Sequence
  Synthetic
ucuagaggauagcugauaguag

SEQ ID NO: 578657 - RNA, 23 nt, Artificial Sequence
  Synthetic
gucuagaggauagcugauaguag

SEQ ID NO: 578658 - RNA, 24 nt, Artificial Sequence
  Synthetic
ugucuagaggauagcugauaguag

SEQ ID NO: 578659 - RNA, 18 nt, Artificial Sequence
  Synthetic
aacagguaaagcuaguag

SEQ ID NO: 578660 - RNA, 19 nt, Artificial Sequence
  Synthetic
gaacagguaaagcuaguag

SEQ ID NO: 578661 - RNA, 20 nt, Artificial Sequence
  Synthetic
ugaacagguaaagcuaguag

SEQ ID NO: 578662 - RNA, 21 nt, Artificial Sequence
  Synthetic
gugaacagguaaagcuaguag

SEQ ID NO: 578663 - RNA, 22 nt, Artificial Sequence
  Synthetic
agugaacagguaaagcuaguag

SEQ ID NO: 578664 - RNA, 23 nt, Artificial Sequence
  Synthetic
gagugaacagguaaagcuaguag

SEQ ID NO: 578665 - RNA, 24 nt, Artificial Sequence
  Synthetic
ugagugaacagguaaagcuaguag

SEQ ID NO: 578666 - RNA, 18 nt, Artificial Sequence
  Synthetic
aaggguagaguguaguag

SEQ ID NO: 578667 - RNA, 19 nt, Artificial Sequence
  Synthetic
aaaggguagaguguaguag

SEQ ID NO: 578668 - RNA, 20 nt, Artificial Sequence
  Synthetic
gaaaggguagaguguaguag

SEQ ID NO: 578669 - RNA, 21 nt, Artificial Sequence
  Synthetic
agaaaggguagaguguaguag

SEQ ID NO: 578670 - RNA, 22 nt, Artificial Sequence
  Synthetic
gagaaaggguagaguguaguag

SEQ ID NO: 578671 - RNA, 23 nt, Artificial Sequence
  Synthetic
agagaaaggguagaguguaguag

SEQ ID NO: 578672 - RNA, 24 nt, Artificial Sequence
  Synthetic
aagagaaaggguagaguguaguag

SEQ ID NO: 578673 - RNA, 18 nt, Artificial Sequence
  Synthetic
guggacagcauuuaguag

SEQ ID NO: 578674 - RNA, 19 nt, Artificial Sequence
  Synthetic
aguggacagcauuuaguag

SEQ ID NO: 578675 - RNA, 20 nt, Artificial Sequence
  Synthetic
gaguggacagcauuuaguag

SEQ ID NO: 578676 - RNA, 21 nt, Artificial Sequence
  Synthetic
ugaguggacagcauuuaguag

SEQ ID NO: 578677 - RNA, 22 nt, Artificial Sequence
  Synthetic
gugaguggacagcauuuaguag

SEQ ID NO: 578678 - RNA, 23 nt, Artificial Sequence
  Synthetic
ugugaguggacagcauuuaguag

SEQ ID NO: 578679 - RNA, 24 nt, Artificial Sequence
  Synthetic
augugaguggacagcauuuaguag

SEQ ID NO: 578680 - RNA, 18 nt, Artificial Sequence
  Synthetic
gguccaagacuuuaguag

SEQ ID NO: 578681 - RNA, 19 nt, Artificial Sequence
  Synthetic
ggguccaagacuuuaguag

SEQ ID NO: 578682 - RNA, 20 nt, Artificial Sequence
  Synthetic
aggguccaagacuuuaguag

SEQ ID NO: 578683 - RNA, 21 nt, Artificial Sequence
  Synthetic
gaggguccaagacuuuaguag

SEQ ID NO: 578684 - RNA, 22 nt, Artificial Sequence
  Synthetic
ugaggguccaagacuuuaguag

SEQ ID NO: 578685 - RNA, 23 nt, Artificial Sequence
  Synthetic
augaggguccaagacuuuaguag

SEQ ID NO: 578686 - RNA, 24 nt, Artificial Sequence
  Synthetic
uaugaggguccaagacuuuaguag

SEQ ID NO: 578687 - RNA, 18 nt, Artificial Sequence
  Synthetic
aaugcuacauaaacguag

SEQ ID NO: 578688 - RNA, 19 nt, Artificial Sequence
  Synthetic
aaaugcuacauaaacguag

SEQ ID NO: 578689 - RNA, 20 nt, Artificial Sequence
  Synthetic
aaaaugcuacauaaacguag

SEQ ID NO: 578690 - RNA, 21 nt, Artificial Sequence
  Synthetic
gaaaaugcuacauaaacguag

SEQ ID NO: 578691 - RNA, 22 nt, Artificial Sequence
  Synthetic
ggaaaaugcuacauaaacguag

SEQ ID NO: 578692 - RNA, 23 nt, Artificial Sequence
  Synthetic
gggaaaaugcuacauaaacguag

SEQ ID NO: 578693 - RNA, 24 nt, Artificial Sequence
  Synthetic
ugggaaaaugcuacauaaacguag

SEQ ID NO: 578694 - RNA, 18 nt, Artificial Sequence
  Synthetic
agaugccaauuaacguag

SEQ ID NO: 578695 - RNA, 19 nt, Artificial Sequence
  Synthetic
uagaugccaauuaacguag

SEQ ID NO: 578696 - RNA, 20 nt, Artificial Sequence
  Synthetic
guagaugccaauuaacguag

SEQ ID NO: 578697 - RNA, 21 nt, Artificial Sequence
  Synthetic
gguagaugccaauuaacguag

SEQ ID NO: 578698 - RNA, 22 nt, Artificial Sequence
  Synthetic
ugguagaugccaauuaacguag

SEQ ID NO: 578699 - RNA, 23 nt, Artificial Sequence
  Synthetic
uugguagaugccaauuaacguag

SEQ ID NO: 578700 - RNA, 24 nt, Artificial Sequence
  Synthetic
guugguagaugccaauuaacguag

SEQ ID NO: 578701 - RNA, 18 nt, Artificial Sequence
  Synthetic
gaacacauggacacguag

SEQ ID NO: 578702 - RNA, 19 nt, Artificial Sequence
  Synthetic
agaacacauggacacguag

SEQ ID NO: 578703 - RNA, 20 nt, Artificial Sequence
  Synthetic
gagaacacauggacacguag

SEQ ID NO: 578704 - RNA, 21 nt, Artificial Sequence
  Synthetic
ugagaacacauggacacguag

SEQ ID NO: 578705 - RNA, 22 nt, Artificial Sequence
  Synthetic
augagaacacauggacacguag

SEQ ID NO: 578706 - RNA, 23 nt, Artificial Sequence
  Synthetic
gaugagaacacauggacacguag

SEQ ID NO: 578707 - RNA, 24 nt, Artificial Sequence
  Synthetic
ugaugagaacacauggacacguag

SEQ ID NO: 578708 - RNA, 18 nt, Artificial Sequence
  Synthetic
guggaacagcuuucguag

SEQ ID NO: 578709 - RNA, 19 nt, Artificial Sequence
  Synthetic
aguggaacagcuuucguag

SEQ ID NO: 578710 - RNA, 20 nt, Artificial Sequence
  Synthetic
uaguggaacagcuuucguag

SEQ ID NO: 578711 - RNA, 21 nt, Artificial Sequence
  Synthetic
guaguggaacagcuuucguag

SEQ ID NO: 578712 - RNA, 22 nt, Artificial Sequence
  Synthetic
gguaguggaacagcuuucguag

SEQ ID NO: 578713 - RNA, 23 nt, Artificial Sequence
  Synthetic
agguaguggaacagcuuucguag

SEQ ID NO: 578714 - RNA, 24 nt, Artificial Sequence
  Synthetic
uagguaguggaacagcuuucguag

SEQ ID NO: 578715 - RNA, 18 nt, Artificial Sequence
  Synthetic
ugucaaaaauaaagguag

SEQ ID NO: 578716 - RNA, 19 nt, Artificial Sequence
  Synthetic
augucaaaaauaaagguag

SEQ ID NO: 578717 - RNA, 20 nt, Artificial Sequence
  Synthetic
gaugucaaaaauaaagguag

SEQ ID NO: 578718 - RNA, 21 nt, Artificial Sequence
  Synthetic
ugaugucaaaaauaaagguag

SEQ ID NO: 578719 - RNA, 22 nt, Artificial Sequence
  Synthetic
cugaugucaaaaauaaagguag

SEQ ID NO: 578720 - RNA, 23 nt, Artificial Sequence
  Synthetic
acugaugucaaaaauaaagguag

SEQ ID NO: 578721 - RNA, 24 nt, Artificial Sequence
  Synthetic
aacugaugucaaaaauaaagguag

SEQ ID NO: 578722 - RNA, 18 nt, Artificial Sequence
  Synthetic
uagcuuuuaucaagguag

SEQ ID NO: 578723 - RNA, 19 nt, Artificial Sequence
  Synthetic
uuagcuuuuaucaagguag

SEQ ID NO: 578724 - RNA, 20 nt, Artificial Sequence
  Synthetic
auuagcuuuuaucaagguag

SEQ ID NO: 578725 - RNA, 21 nt, Artificial Sequence
  Synthetic
aauuagcuuuuaucaagguag

SEQ ID NO: 578726 - RNA, 22 nt, Artificial Sequence
  Synthetic
gaauuagcuuuuaucaagguag

SEQ ID NO: 578727 - RNA, 23 nt, Artificial Sequence
  Synthetic
ggaauuagcuuuuaucaagguag

SEQ ID NO: 578728 - RNA, 24 nt, Artificial Sequence
  Synthetic
aggaauuagcuuuuaucaagguag

SEQ ID NO: 578729 - RNA, 18 nt, Artificial Sequence
  Synthetic
ucacaaggcagaagguag

SEQ ID NO: 578730 - RNA, 19 nt, Artificial Sequence
  Synthetic
uucacaaggcagaagguag

SEQ ID NO: 578731 - RNA, 20 nt, Artificial Sequence
  Synthetic
cuucacaaggcagaagguag

SEQ ID NO: 578732 - RNA, 21 nt, Artificial Sequence
  Synthetic
ucuucacaaggcagaagguag

SEQ ID NO: 578733 - RNA, 22 nt, Artificial Sequence
  Synthetic
aucuucacaaggcagaagguag

SEQ ID NO: 578734 - RNA, 23 nt, Artificial Sequence
  Synthetic
uaucuucacaaggcagaagguag

SEQ ID NO: 578735 - RNA, 24 nt, Artificial Sequence
  Synthetic
guaucuucacaaggcagaagguag

SEQ ID NO: 578736 - RNA, 18 nt, Artificial Sequence
  Synthetic
aaaggcaaccgaagguag

SEQ ID NO: 578737 - RNA, 19 nt, Artificial Sequence
  Synthetic
aaaaggcaaccgaagguag

SEQ ID NO: 578738 - RNA, 20 nt, Artificial Sequence
  Synthetic
aaaaaggcaaccgaagguag

SEQ ID NO: 578739 - RNA, 21 nt, Artificial Sequence
  Synthetic
aaaaaaggcaaccgaagguag

SEQ ID NO: 578740 - RNA, 22 nt, Artificial Sequence
  Synthetic
uaaaaaaggcaaccgaagguag

SEQ ID NO: 578741 - RNA, 23 nt, Artificial Sequence
  Synthetic
auaaaaaaggcaaccgaagguag

SEQ ID NO: 578742 - RNA, 24 nt, Artificial Sequence
  Synthetic
cauaaaaaaggcaaccgaagguag

SEQ ID NO: 578743 - RNA, 18 nt, Artificial Sequence
  Synthetic
agcugaggacccagguag

SEQ ID NO: 578744 - RNA, 19 nt, Artificial Sequence
  Synthetic
gagcugaggacccagguag

SEQ ID NO: 578745 - RNA, 20 nt, Artificial Sequence
  Synthetic
agagcugaggacccagguag

SEQ ID NO: 578746 - RNA, 21 nt, Artificial Sequence
  Synthetic
gagagcugaggacccagguag

SEQ ID NO: 578747 - RNA, 22 nt, Artificial Sequence
  Synthetic
ggagagcugaggacccagguag

SEQ ID NO: 578748 - RNA, 23 nt, Artificial Sequence
  Synthetic
uggagagcugaggacccagguag

SEQ ID NO: 578749 - RNA, 24 nt, Artificial Sequence
  Synthetic
cuggagagcugaggacccagguag

SEQ ID NO: 578750 - RNA, 18 nt, Artificial Sequence
  Synthetic
ccucagccucccagguag

SEQ ID NO: 578751 - RNA, 19 nt, Artificial Sequence
  Synthetic
gccucagccucccagguag

SEQ ID NO: 578752 - RNA, 20 nt, Artificial Sequence
  Synthetic
ugccucagccucccagguag

SEQ ID NO: 578753 - RNA, 21 nt, Artificial Sequence
  Synthetic
augccucagccucccagguag

SEQ ID NO: 578754 - RNA, 22 nt, Artificial Sequence
  Synthetic
caugccucagccucccagguag

SEQ ID NO: 578755 - RNA, 23 nt, Artificial Sequence
  Synthetic
ucaugccucagccucccagguag

SEQ ID NO: 578756 - RNA, 24 nt, Artificial Sequence
  Synthetic
cucaugccucagccucccagguag

SEQ ID NO: 578757 - RNA, 18 nt, Artificial Sequence
  Synthetic
caugucauguccagguag

SEQ ID NO: 578758 - RNA, 19 nt, Artificial Sequence
  Synthetic
acaugucauguccagguag

SEQ ID NO: 578759 - RNA, 20 nt, Artificial Sequence
  Synthetic
cacaugucauguccagguag

SEQ ID NO: 578760 - RNA, 21 nt, Artificial Sequence
  Synthetic
ccacaugucauguccagguag

SEQ ID NO: 578761 - RNA, 22 nt, Artificial Sequence
  Synthetic
uccacaugucauguccagguag

SEQ ID NO: 578762 - RNA, 23 nt, Artificial Sequence
  Synthetic
auccacaugucauguccagguag

SEQ ID NO: 578763 - RNA, 24 nt, Artificial Sequence
  Synthetic
uauccacaugucauguccagguag

SEQ ID NO: 578764 - RNA, 18 nt, Artificial Sequence
  Synthetic
uuacggguagagagguag

SEQ ID NO: 578765 - RNA, 19 nt, Artificial Sequence
  Synthetic
cuuacggguagagagguag

SEQ ID NO: 578766 - RNA, 20 nt, Artificial Sequence
  Synthetic
acuuacggguagagagguag

SEQ ID NO: 578767 - RNA, 21 nt, Artificial Sequence
  Synthetic
cacuuacggguagagagguag

SEQ ID NO: 578768 - RNA, 22 nt, Artificial Sequence
  Synthetic
acacuuacggguagagagguag

SEQ ID NO: 578769 - RNA, 23 nt, Artificial Sequence
  Synthetic
cacacuuacggguagagagguag

SEQ ID NO: 578770 - RNA, 24 nt, Artificial Sequence
  Synthetic
ucacacuuacggguagagagguag

SEQ ID NO: 578771 - RNA, 18 nt, Artificial Sequence
  Synthetic
gacagugcauagagguag

SEQ ID NO: 578772 - RNA, 19 nt, Artificial Sequence
  Synthetic
cgacagugcauagagguag

SEQ ID NO: 578773 - RNA, 20 nt, Artificial Sequence
  Synthetic
ucgacagugcauagagguag

SEQ ID NO: 578774 - RNA, 21 nt, Artificial Sequence
  Synthetic
uucgacagugcauagagguag

SEQ ID NO: 578775 - RNA, 22 nt, Artificial Sequence
  Synthetic
auucgacagugcauagagguag

SEQ ID NO: 578776 - RNA, 23 nt, Artificial Sequence
  Synthetic
gauucgacagugcauagagguag

SEQ ID NO: 578777 - RNA, 24 nt, Artificial Sequence
  Synthetic
ugauucgacagugcauagagguag

SEQ ID NO: 578778 - RNA, 18 nt, Artificial Sequence
  Synthetic
aauauggaagugagguag

SEQ ID NO: 578779 - RNA, 19 nt, Artificial Sequence
  Synthetic
uaauauggaagugagguag

SEQ ID NO: 578780 - RNA, 20 nt, Artificial Sequence
  Synthetic
auaauauggaagugagguag

SEQ ID NO: 578781 - RNA, 21 nt, Artificial Sequence
  Synthetic
cauaauauggaagugagguag

SEQ ID NO: 578782 - RNA, 22 nt, Artificial Sequence
  Synthetic
ccauaauauggaagugagguag

SEQ ID NO: 578783 - RNA, 23 nt, Artificial Sequence
  Synthetic
accauaauauggaagugagguag

SEQ ID NO: 578784 - RNA, 24 nt, Artificial Sequence
  Synthetic
caccauaauauggaagugagguag

SEQ ID NO: 578785 - RNA, 18 nt, Artificial Sequence
  Synthetic
uguuguuccacuagguag

SEQ ID NO: 578786 - RNA, 19 nt, Artificial Sequence
  Synthetic
uuguuguuccacuagguag

SEQ ID NO: 578787 - RNA, 20 nt, Artificial Sequence
  Synthetic
guuguuguuccacuagguag

SEQ ID NO: 578788 - RNA, 21 nt, Artificial Sequence
  Synthetic
uguuguuguuccacuagguag

SEQ ID NO: 578789 - RNA, 22 nt, Artificial Sequence
  Synthetic
uuguuguuguuccacuagguag

SEQ ID NO: 578790 - RNA, 23 nt, Artificial Sequence
  Synthetic
auuguuguuguuccacuagguag

SEQ ID NO: 578791 - RNA, 24 nt, Artificial Sequence
  Synthetic
cauuguuguuguuccacuagguag

SEQ ID NO: 578792 - RNA, 18 nt, Artificial Sequence
  Synthetic
ggaacuuagguuagguag

SEQ ID NO: 578793 - RNA, 19 nt, Artificial Sequence
  Synthetic
uggaacuuagguuagguag

SEQ ID NO: 578794 - RNA, 20 nt, Artificial Sequence
  Synthetic
cuggaacuuagguuagguag

SEQ ID NO: 578795 - RNA, 21 nt, Artificial Sequence
  Synthetic
acuggaacuuagguuagguag

SEQ ID NO: 578796 - RNA, 22 nt, Artificial Sequence
  Synthetic
aacuggaacuuagguuagguag

SEQ ID NO: 578797 - RNA, 23 nt, Artificial Sequence
  Synthetic
uaacuggaacuuagguuagguag

SEQ ID NO: 578798 - RNA, 24 nt, Artificial Sequence
  Synthetic
guaacuggaacuuagguuagguag

SEQ ID NO: 578799 - RNA, 18 nt, Artificial Sequence
  Synthetic
gccucagccucccgguag

SEQ ID NO: 578800 - RNA, 19 nt, Artificial Sequence
  Synthetic
ugccucagccucccgguag

SEQ ID NO: 578801 - RNA, 20 nt, Artificial Sequence
  Synthetic
cugccucagccucccgguag

SEQ ID NO: 578802 - RNA, 21 nt, Artificial Sequence
  Synthetic
ccugccucagccucccgguag

SEQ ID NO: 578803 - RNA, 22 nt, Artificial Sequence
  Synthetic
uccugccucagccucccgguag

SEQ ID NO: 578804 - RNA, 23 nt, Artificial Sequence
  Synthetic
cuccugccucagccucccgguag

SEQ ID NO: 578805 - RNA, 24 nt, Artificial Sequence
  Synthetic
ucuccugccucagccucccgguag

SEQ ID NO: 578806 - RNA, 18 nt, Artificial Sequence
  Synthetic
guggcauuaugucgguag

SEQ ID NO: 578807 - RNA, 19 nt, Artificial Sequence
  Synthetic
aguggcauuaugucgguag

SEQ ID NO: 578808 - RNA, 20 nt, Artificial Sequence
  Synthetic
caguggcauuaugucgguag

SEQ ID NO: 578809 - RNA, 21 nt, Artificial Sequence
  Synthetic
ucaguggcauuaugucgguag

SEQ ID NO: 578810 - RNA, 22 nt, Artificial Sequence
  Synthetic
cucaguggcauuaugucgguag

SEQ ID NO: 578811 - RNA, 23 nt, Artificial Sequence
  Synthetic
acucaguggcauuaugucgguag

SEQ ID NO: 578812 - RNA, 24 nt, Artificial Sequence
  Synthetic
uacucaguggcauuaugucgguag

SEQ ID NO: 578813 - RNA, 18 nt, Artificial Sequence
  Synthetic
ggcagccuagaaggguag

SEQ ID NO: 578814 - RNA, 19 nt, Artificial Sequence
  Synthetic
gggcagccuagaaggguag

SEQ ID NO: 578815 - RNA, 20 nt, Artificial Sequence
  Synthetic
ugggcagccuagaaggguag

SEQ ID NO: 578816 - RNA, 21 nt, Artificial Sequence
  Synthetic
cugggcagccuagaaggguag

SEQ ID NO: 578817 - RNA, 22 nt, Artificial Sequence
  Synthetic
gcugggcagccuagaaggguag

SEQ ID NO: 578818 - RNA, 23 nt, Artificial Sequence
  Synthetic
agcugggcagccuagaaggguag

SEQ ID NO: 578819 - RNA, 24 nt, Artificial Sequence
  Synthetic
cagcugggcagccuagaaggguag

SEQ ID NO: 578820 - RNA, 18 nt, Artificial Sequence
  Synthetic
aaacacuuggaaggguag

SEQ ID NO: 578821 - RNA, 19 nt, Artificial Sequence
  Synthetic
aaaacacuuggaaggguag

SEQ ID NO: 578822 - RNA, 20 nt, Artificial Sequence
  Synthetic
gaaaacacuuggaaggguag

SEQ ID NO: 578823 - RNA, 21 nt, Artificial Sequence
  Synthetic
ggaaaacacuuggaaggguag

SEQ ID NO: 578824 - RNA, 22 nt, Artificial Sequence
  Synthetic
uggaaaacacuuggaaggguag

SEQ ID NO: 578825 - RNA, 23 nt, Artificial Sequence
  Synthetic
auggaaaacacuuggaaggguag

SEQ ID NO: 578826 - RNA, 24 nt, Artificial Sequence
  Synthetic
uauggaaaacacuuggaaggguag

SEQ ID NO: 578827 - RNA, 18 nt, Artificial Sequence
  Synthetic
agaggcugugaaggguag

SEQ ID NO: 578828 - RNA, 19 nt, Artificial Sequence
  Synthetic
cagaggcugugaaggguag

SEQ ID NO: 578829 - RNA, 20 nt, Artificial Sequence
  Synthetic
ccagaggcugugaaggguag

SEQ ID NO: 578830 - RNA, 21 nt, Artificial Sequence
  Synthetic
accagaggcugugaaggguag

SEQ ID NO: 578831 - RNA, 22 nt, Artificial Sequence
  Synthetic
uaccagaggcugugaaggguag

SEQ ID NO: 578832 - RNA, 23 nt, Artificial Sequence
  Synthetic
uuaccagaggcugugaaggguag

SEQ ID NO: 578833 - RNA, 24 nt, Artificial Sequence
  Synthetic
guuaccagaggcugugaaggguag

SEQ ID NO: 578834 - RNA, 18 nt, Artificial Sequence
  Synthetic
cagugagcuuccggguag

SEQ ID NO: 578835 - RNA, 19 nt, Artificial Sequence
  Synthetic
ccagugagcuuccggguag

SEQ ID NO: 578836 - RNA, 20 nt, Artificial Sequence
  Synthetic
uccagugagcuuccggguag

SEQ ID NO: 578837 - RNA, 21 nt, Artificial Sequence
  Synthetic
guccagugagcuuccggguag

SEQ ID NO: 578838 - RNA, 22 nt, Artificial Sequence
  Synthetic
aguccagugagcuuccggguag

SEQ ID NO: 578839 - RNA, 23 nt, Artificial Sequence
  Synthetic
gaguccagugagcuuccggguag

SEQ ID NO: 578840 - RNA, 24 nt, Artificial Sequence
  Synthetic
agaguccagugagcuuccggguag

SEQ ID NO: 578841 - RNA, 18 nt, Artificial Sequence
  Synthetic
ccccagccuuucggguag

SEQ ID NO: 578842 - RNA, 19 nt, Artificial Sequence
  Synthetic
gccccagccuuucggguag

SEQ ID NO: 578843 - RNA, 20 nt, Artificial Sequence
  Synthetic
ugccccagccuuucggguag

SEQ ID NO: 578844 - RNA, 21 nt, Artificial Sequence
  Synthetic
cugccccagccuuucggguag

SEQ ID NO: 578845 - RNA, 22 nt, Artificial Sequence
  Synthetic
ccugccccagccuuucggguag

SEQ ID NO: 578846 - RNA, 23 nt, Artificial Sequence
  Synthetic
uccugccccagccuuucggguag

SEQ ID NO: 578847 - RNA, 24 nt, Artificial Sequence
  Synthetic
cuccugccccagccuuucggguag

SEQ ID NO: 578848 - RNA, 18 nt, Artificial Sequence
  Synthetic
cauaaaacauugggguag

SEQ ID NO: 578849 - RNA, 19 nt, Artificial Sequence
  Synthetic
ucauaaaacauugggguag

SEQ ID NO: 578850 - RNA, 20 nt, Artificial Sequence
  Synthetic
gucauaaaacauugggguag

SEQ ID NO: 578851 - RNA, 21 nt, Artificial Sequence
  Synthetic
ggucauaaaacauugggguag

SEQ ID NO: 578852 - RNA, 22 nt, Artificial Sequence
  Synthetic
gggucauaaaacauugggguag

SEQ ID NO: 578853 - RNA, 23 nt, Artificial Sequence
  Synthetic
ggggucauaaaacauugggguag

SEQ ID NO: 578854 - RNA, 24 nt, Artificial Sequence
  Synthetic
uggggucauaaaacauugggguag

SEQ ID NO: 578855 - RNA, 18 nt, Artificial Sequence
  Synthetic
cauuuggauuugggguag

SEQ ID NO: 578856 - RNA, 19 nt, Artificial Sequence
  Synthetic
ccauuuggauuugggguag

SEQ ID NO: 578857 - RNA, 20 nt, Artificial Sequence
  Synthetic
uccauuuggauuugggguag

SEQ ID NO: 578858 - RNA, 21 nt, Artificial Sequence
  Synthetic
cuccauuuggauuugggguag

SEQ ID NO: 578859 - RNA, 22 nt, Artificial Sequence
  Synthetic
ucuccauuuggauuugggguag

SEQ ID NO: 578860 - RNA, 23 nt, Artificial Sequence
  Synthetic
aucuccauuuggauuugggguag

SEQ ID NO: 578861 - RNA, 24 nt, Artificial Sequence
  Synthetic
aaucuccauuuggauuugggguag

SEQ ID NO: 578862 - RNA, 18 nt, Artificial Sequence
  Synthetic
ccucagccuccuggguag

SEQ ID NO: 578863 - RNA, 19 nt, Artificial Sequence
  Synthetic
accucagccuccuggguag

SEQ ID NO: 578864 - RNA, 20 nt, Artificial Sequence
  Synthetic
uaccucagccuccuggguag

SEQ ID NO: 578865 - RNA, 21 nt, Artificial Sequence
  Synthetic
guaccucagccuccuggguag

SEQ ID NO: 578866 - RNA, 22 nt, Artificial Sequence
  Synthetic
gguaccucagccuccuggguag

SEQ ID NO: 578867 - RNA, 23 nt, Artificial Sequence
  Synthetic
ugguaccucagccuccuggguag

SEQ ID NO: 578868 - RNA, 24 nt, Artificial Sequence
  Synthetic
cugguaccucagccuccuggguag

SEQ ID NO: 578869 - RNA, 18 nt, Artificial Sequence
  Synthetic
cccagaaagccaugguag

SEQ ID NO: 578870 - RNA, 19 nt, Artificial Sequence
  Synthetic
ucccagaaagccaugguag

SEQ ID NO: 578871 - RNA, 20 nt, Artificial Sequence
  Synthetic
aucccagaaagccaugguag

SEQ ID NO: 578872 - RNA, 21 nt, Artificial Sequence
  Synthetic
gaucccagaaagccaugguag

SEQ ID NO: 578873 - RNA, 22 nt, Artificial Sequence
  Synthetic
ugaucccagaaagccaugguag

SEQ ID NO: 578874 - RNA, 23 nt, Artificial Sequence
  Synthetic
cugaucccagaaagccaugguag

SEQ ID NO: 578875 - RNA, 24 nt, Artificial Sequence
  Synthetic
gcugaucccagaaagccaugguag

SEQ ID NO: 578876 - RNA, 18 nt, Artificial Sequence
  Synthetic
aaccccgcucgaugguag

SEQ ID NO: 578877 - RNA, 19 nt, Artificial Sequence
  Synthetic
gaaccccgcucgaugguag

SEQ ID NO: 578878 - RNA, 20 nt, Artificial Sequence
  Synthetic
agaaccccgcucgaugguag

SEQ ID NO: 578879 - RNA, 21 nt, Artificial Sequence
  Synthetic
aagaaccccgcucgaugguag

SEQ ID NO: 578880 - RNA, 22 nt, Artificial Sequence
  Synthetic
gaagaaccccgcucgaugguag

SEQ ID NO: 578881 - RNA, 23 nt, Artificial Sequence
  Synthetic
agaagaaccccgcucgaugguag

SEQ ID NO: 578882 - RNA, 24 nt, Artificial Sequence
  Synthetic
aagaagaaccccgcucgaugguag

SEQ ID NO: 578883 - RNA, 18 nt, Artificial Sequence
  Synthetic
ccugagguauuaugguag

SEQ ID NO: 578884 - RNA, 19 nt, Artificial Sequence
  Synthetic
accugagguauuaugguag

SEQ ID NO: 578885 - RNA, 20 nt, Artificial Sequence
  Synthetic
aaccugagguauuaugguag

SEQ ID NO: 578886 - RNA, 21 nt, Artificial Sequence
  Synthetic
caaccugagguauuaugguag

SEQ ID NO: 578887 - RNA, 22 nt, Artificial Sequence
  Synthetic
acaaccugagguauuaugguag

SEQ ID NO: 578888 - RNA, 23 nt, Artificial Sequence
  Synthetic
aacaaccugagguauuaugguag

SEQ ID NO: 578889 - RNA, 24 nt, Artificial Sequence
  Synthetic
caacaaccugagguauuaugguag

SEQ ID NO: 578890 - RNA, 18 nt, Artificial Sequence
  Synthetic
ccucugucugccugguag

SEQ ID NO: 578891 - RNA, 19 nt, Artificial Sequence
  Synthetic
gccucugucugccugguag

SEQ ID NO: 578892 - RNA, 20 nt, Artificial Sequence
  Synthetic
ggccucugucugccugguag

SEQ ID NO: 578893 - RNA, 21 nt, Artificial Sequence
  Synthetic
uggccucugucugccugguag

SEQ ID NO: 578894 - RNA, 22 nt, Artificial Sequence
  Synthetic
uuggccucugucugccugguag

SEQ ID NO: 578895 - RNA, 23 nt, Artificial Sequence
  Synthetic
uuuggccucugucugccugguag

SEQ ID NO: 578896 - RNA, 24 nt, Artificial Sequence
  Synthetic
guuuggccucugucugccugguag

SEQ ID NO: 578897 - RNA, 18 nt, Artificial Sequence
  Synthetic
uugcccggaagcugguag

SEQ ID NO: 578898 - RNA, 19 nt, Artificial Sequence
  Synthetic
auugcccggaagcugguag

SEQ ID NO: 578899 - RNA, 20 nt, Artificial Sequence
  Synthetic
uauugcccggaagcugguag

SEQ ID NO: 578900 - RNA, 21 nt, Artificial Sequence
  Synthetic
auauugcccggaagcugguag

SEQ ID NO: 578901 - RNA, 22 nt, Artificial Sequence
  Synthetic
gauauugcccggaagcugguag

SEQ ID NO: 578902 - RNA, 23 nt, Artificial Sequence
  Synthetic
ugauauugcccggaagcugguag

SEQ ID NO: 578903 - RNA, 24 nt, Artificial Sequence
  Synthetic
augauauugcccggaagcugguag

SEQ ID NO: 578904 - RNA, 18 nt, Artificial Sequence
  Synthetic
auaauuuauuucugguag

SEQ ID NO: 578905 - RNA, 19 nt, Artificial Sequence
  Synthetic
uauaauuuauuucugguag

SEQ ID NO: 578906 - RNA, 20 nt, Artificial Sequence
  Synthetic
guauaauuuauuucugguag

SEQ ID NO: 578907 - RNA, 21 nt, Artificial Sequence
  Synthetic
uguauaauuuauuucugguag

SEQ ID NO: 578908 - RNA, 22 nt, Artificial Sequence
  Synthetic
guguauaauuuauuucugguag

SEQ ID NO: 578909 - RNA, 23 nt, Artificial Sequence
  Synthetic
uguguauaauuuauuucugguag

SEQ ID NO: 578910 - RNA, 24 nt, Artificial Sequence
  Synthetic
guguguauaauuuauuucugguag

SEQ ID NO: 578911 - RNA, 18 nt, Artificial Sequence
  Synthetic
gcuggagaucagugguag

SEQ ID NO: 578912 - RNA, 19 nt, Artificial Sequence
  Synthetic
agcuggagaucagugguag

SEQ ID NO: 578913 - RNA, 20 nt, Artificial Sequence
  Synthetic
uagcuggagaucagugguag

SEQ ID NO: 578914 - RNA, 21 nt, Artificial Sequence
  Synthetic
guagcuggagaucagugguag

SEQ ID NO: 578915 - RNA, 22 nt, Artificial Sequence
  Synthetic
gguagcuggagaucagugguag

SEQ ID NO: 578916 - RNA, 23 nt, Artificial Sequence
  Synthetic
cgguagcuggagaucagugguag

SEQ ID NO: 578917 - RNA, 24 nt, Artificial Sequence
  Synthetic
ucgguagcuggagaucagugguag

SEQ ID NO: 578918 - RNA, 18 nt, Artificial Sequence
  Synthetic
ugggaaggguagugguag

SEQ ID NO: 578919 - RNA, 19 nt, Artificial Sequence
  Synthetic
cugggaaggguagugguag

SEQ ID NO: 578920 - RNA, 20 nt, Artificial Sequence
  Synthetic
acugggaaggguagugguag

SEQ ID NO: 578921 - RNA, 21 nt, Artificial Sequence
  Synthetic
gacugggaaggguagugguag

SEQ ID NO: 578922 - RNA, 22 nt, Artificial Sequence
  Synthetic
agacugggaaggguagugguag

SEQ ID NO: 578923 - RNA, 23 nt, Artificial Sequence
  Synthetic
gagacugggaaggguagugguag

SEQ ID NO: 578924 - RNA, 24 nt, Artificial Sequence
  Synthetic
ggagacugggaaggguagugguag

SEQ ID NO: 578925 - RNA, 18 nt, Artificial Sequence
  Synthetic
ccugauggugggugguag

SEQ ID NO: 578926 - RNA, 19 nt, Artificial Sequence
  Synthetic
gccugauggugggugguag

SEQ ID NO: 578927 - RNA, 20 nt, Artificial Sequence
  Synthetic
agccugauggugggugguag

SEQ ID NO: 578928 - RNA, 21 nt, Artificial Sequence
  Synthetic
cagccugauggugggugguag

SEQ ID NO: 578929 - RNA, 22 nt, Artificial Sequence
  Synthetic
acagccugauggugggugguag

SEQ ID NO: 578930 - RNA, 23 nt, Artificial Sequence
  Synthetic
cacagccugauggugggugguag

SEQ ID NO: 578931 - RNA, 24 nt, Artificial Sequence
  Synthetic
gcacagccugauggugggugguag

SEQ ID NO: 578932 - RNA, 18 nt, Artificial Sequence
  Synthetic
aucucauauuugugguag

SEQ ID NO: 578933 - RNA, 19 nt, Artificial Sequence
  Synthetic
uaucucauauuugugguag

SEQ ID NO: 578934 - RNA, 20 nt, Artificial Sequence
  Synthetic
uuaucucauauuugugguag

SEQ ID NO: 578935 - RNA, 21 nt, Artificial Sequence
  Synthetic
uuuaucucauauuugugguag

SEQ ID NO: 578936 - RNA, 22 nt, Artificial Sequence
  Synthetic
auuuaucucauauuugugguag

SEQ ID NO: 578937 - RNA, 23 nt, Artificial Sequence
  Synthetic
aauuuaucucauauuugugguag

SEQ ID NO: 578938 - RNA, 24 nt, Artificial Sequence
  Synthetic
aaauuuaucucauauuugugguag

SEQ ID NO: 578939 - RNA, 18 nt, Artificial Sequence
  Synthetic
ccagugaugucuugguag

SEQ ID NO: 578940 - RNA, 19 nt, Artificial Sequence
  Synthetic
cccagugaugucuugguag

SEQ ID NO: 578941 - RNA, 20 nt, Artificial Sequence
  Synthetic
acccagugaugucuugguag

SEQ ID NO: 578942 - RNA, 21 nt, Artificial Sequence
  Synthetic
gacccagugaugucuugguag

SEQ ID NO: 578943 - RNA, 22 nt, Artificial Sequence
  Synthetic
ugacccagugaugucuugguag

SEQ ID NO: 578944 - RNA, 23 nt, Artificial Sequence
  Synthetic
uugacccagugaugucuugguag

SEQ ID NO: 578945 - RNA, 24 nt, Artificial Sequence
  Synthetic
auugacccagugaugucuugguag

SEQ ID NO: 578946 - RNA, 18 nt, Artificial Sequence
  Synthetic
gauggagggaaaauguag

SEQ ID NO: 578947 - RNA, 19 nt, Artificial Sequence
  Synthetic
ggauggagggaaaauguag

SEQ ID NO: 578948 - RNA, 20 nt, Artificial Sequence
  Synthetic
aggauggagggaaaauguag

SEQ ID NO: 578949 - RNA, 21 nt, Artificial Sequence
  Synthetic
caggauggagggaaaauguag

SEQ ID NO: 578950 - RNA, 22 nt, Artificial Sequence
  Synthetic
ccaggauggagggaaaauguag

SEQ ID NO: 578951 - RNA, 23 nt, Artificial Sequence
  Synthetic
gccaggauggagggaaaauguag

SEQ ID NO: 578952 - RNA, 24 nt, Artificial Sequence
  Synthetic
ugccaggauggagggaaaauguag

SEQ ID NO: 578953 - RNA, 18 nt, Artificial Sequence
  Synthetic
aaauaaucauaaauguag

SEQ ID NO: 578954 - RNA, 19 nt, Artificial Sequence
  Synthetic
caaauaaucauaaauguag

SEQ ID NO: 578955 - RNA, 20 nt, Artificial Sequence
  Synthetic
gcaaauaaucauaaauguag

SEQ ID NO: 578956 - RNA, 21 nt, Artificial Sequence
  Synthetic
ggcaaauaaucauaaauguag

SEQ ID NO: 578957 - RNA, 22 nt, Artificial Sequence
  Synthetic
uggcaaauaaucauaaauguag

SEQ ID NO: 578958 - RNA, 23 nt, Artificial Sequence
  Synthetic
cuggcaaauaaucauaaauguag

SEQ ID NO: 578959 - RNA, 24 nt, Artificial Sequence
  Synthetic
acuggcaaauaaucauaaauguag

SEQ ID NO: 578960 - RNA, 18 nt, Artificial Sequence
  Synthetic
uaagcagcuauaauguag

SEQ ID NO: 578961 - RNA, 19 nt, Artificial Sequence
  Synthetic
guaagcagcuauaauguag

SEQ ID NO: 578962 - RNA, 20 nt, Artificial Sequence
  Synthetic
cguaagcagcuauaauguag

SEQ ID NO: 578963 - RNA, 21 nt, Artificial Sequence
  Synthetic
ucguaagcagcuauaauguag

SEQ ID NO: 578964 - RNA, 22 nt, Artificial Sequence
  Synthetic
uucguaagcagcuauaauguag

SEQ ID NO: 578965 - RNA, 23 nt, Artificial Sequence
  Synthetic
uuucguaagcagcuauaauguag

SEQ ID NO: 578966 - RNA, 24 nt, Artificial Sequence
  Synthetic
auuucguaagcagcuauaauguag

SEQ ID NO: 578967 - RNA, 18 nt, Artificial Sequence
  Synthetic
ugucuaagaaacauguag

SEQ ID NO: 578968 - RNA, 19 nt, Artificial Sequence
  Synthetic
gugucuaagaaacauguag

SEQ ID NO: 578969 - RNA, 20 nt, Artificial Sequence
  Synthetic
ugugucuaagaaacauguag

SEQ ID NO: 578970 - RNA, 21 nt, Artificial Sequence
  Synthetic
augugucuaagaaacauguag

SEQ ID NO: 578971 - RNA, 22 nt, Artificial Sequence
  Synthetic
uaugugucuaagaaacauguag

SEQ ID NO: 578972 - RNA, 23 nt, Artificial Sequence
  Synthetic
auaugugucuaagaaacauguag

SEQ ID NO: 578973 - RNA, 24 nt, Artificial Sequence
  Synthetic
uauaugugucuaagaaacauguag

SEQ ID NO: 578974 - RNA, 18 nt, Artificial Sequence
  Synthetic
uuucaaucaaccauguag

SEQ ID NO: 578975 - RNA, 19 nt, Artificial Sequence
  Synthetic
guuucaaucaaccauguag

SEQ ID NO: 578976 - RNA, 20 nt, Artificial Sequence
  Synthetic
gguuucaaucaaccauguag

SEQ ID NO: 578977 - RNA, 21 nt, Artificial Sequence
  Synthetic
ugguuucaaucaaccauguag

SEQ ID NO: 578978 - RNA, 22 nt, Artificial Sequence
  Synthetic
cugguuucaaucaaccauguag

SEQ ID NO: 578979 - RNA, 23 nt, Artificial Sequence
  Synthetic
ucugguuucaaucaaccauguag

SEQ ID NO: 578980 - RNA, 24 nt, Artificial Sequence
  Synthetic
cucugguuucaaucaaccauguag

SEQ ID NO: 578981 - RNA, 18 nt, Artificial Sequence
  Synthetic
ccucagacucccauguag

SEQ ID NO: 578982 - RNA, 19 nt, Artificial Sequence
  Synthetic
accucagacucccauguag

SEQ ID NO: 578983 - RNA, 20 nt, Artificial Sequence
  Synthetic
caccucagacucccauguag

SEQ ID NO: 578984 - RNA, 21 nt, Artificial Sequence
  Synthetic
ccaccucagacucccauguag

SEQ ID NO: 578985 - RNA, 22 nt, Artificial Sequence
  Synthetic
cccaccucagacucccauguag

SEQ ID NO: 578986 - RNA, 23 nt, Artificial Sequence
  Synthetic
ucccaccucagacucccauguag

SEQ ID NO: 578987 - RNA, 24 nt, Artificial Sequence
  Synthetic
cucccaccucagacucccauguag

SEQ ID NO: 578988 - RNA, 18 nt, Artificial Sequence
  Synthetic
auuauuauucccauguag

SEQ ID NO: 578989 - RNA, 19 nt, Artificial Sequence
  Synthetic
uauuauuauucccauguag

SEQ ID NO: 578990 - RNA, 20 nt, Artificial Sequence
  Synthetic
uuauuauuauucccauguag

SEQ ID NO: 578991 - RNA, 21 nt, Artificial Sequence
  Synthetic
uuuauuauuauucccauguag

SEQ ID NO: 578992 - RNA, 22 nt, Artificial Sequence
  Synthetic
auuuauuauuauucccauguag

SEQ ID NO: 578993 - RNA, 23 nt, Artificial Sequence
  Synthetic
cauuuauuauuauucccauguag

SEQ ID NO: 578994 - RNA, 24 nt, Artificial Sequence
  Synthetic
gcauuuauuauuauucccauguag

SEQ ID NO: 578995 - RNA, 18 nt, Artificial Sequence
  Synthetic
ucccucuaagggauguag

SEQ ID NO: 578996 - RNA, 19 nt, Artificial Sequence
  Synthetic
uucccucuaagggauguag

SEQ ID NO: 578997 - RNA, 20 nt, Artificial Sequence
  Synthetic
auucccucuaagggauguag

SEQ ID NO: 578998 - RNA, 21 nt, Artificial Sequence
  Synthetic
cauucccucuaagggauguag

SEQ ID NO: 578999 - RNA, 22 nt, Artificial Sequence
  Synthetic
gcauucccucuaagggauguag

SEQ ID NO: 579000 - RNA, 23 nt, Artificial Sequence
  Synthetic
ugcauucccucuaagggauguag

SEQ ID NO: 579001 - RNA, 24 nt, Artificial Sequence
  Synthetic
uugcauucccucuaagggauguag

SEQ ID NO: 579002 - RNA, 18 nt, Artificial Sequence
  Synthetic
gaacuaaugaauauguag

SEQ ID NO: 579003 - RNA, 19 nt, Artificial Sequence
  Synthetic
agaacuaaugaauauguag

SEQ ID NO: 579004 - RNA, 20 nt, Artificial Sequence
  Synthetic
cagaacuaaugaauauguag

SEQ ID NO: 579005 - RNA, 21 nt, Artificial Sequence
  Synthetic
ccagaacuaaugaauauguag

SEQ ID NO: 579006 - RNA, 22 nt, Artificial Sequence
  Synthetic
uccagaacuaaugaauauguag

SEQ ID NO: 579007 - RNA, 23 nt, Artificial Sequence
  Synthetic
cuccagaacuaaugaauauguag

SEQ ID NO: 579008 - RNA, 24 nt, Artificial Sequence
  Synthetic
ccuccagaacuaaugaauauguag

SEQ ID NO: 579009 - RNA, 18 nt, Artificial Sequence
  Synthetic
gauuguagacauauguag

SEQ ID NO: 579010 - RNA, 19 nt, Artificial Sequence
  Synthetic
agauuguagacauauguag

SEQ ID NO: 579011 - RNA, 20 nt, Artificial Sequence
  Synthetic
aagauuguagacauauguag

SEQ ID NO: 579012 - RNA, 21 nt, Artificial Sequence
  Synthetic
aaagauuguagacauauguag

SEQ ID NO: 579013 - RNA, 22 nt, Artificial Sequence
  Synthetic
caaagauuguagacauauguag

SEQ ID NO: 579014 - RNA, 23 nt, Artificial Sequence
  Synthetic
ccaaagauuguagacauauguag

SEQ ID NO: 579015 - RNA, 24 nt, Artificial Sequence
  Synthetic
accaaagauuguagacauauguag

SEQ ID NO: 579016 - RNA, 18 nt, Artificial Sequence
  Synthetic
uggaggcaggcuauguag

SEQ ID NO: 579017 - RNA, 19 nt, Artificial Sequence
  Synthetic
auggaggcaggcuauguag

SEQ ID NO: 579018 - RNA, 20 nt, Artificial Sequence
  Synthetic
cauggaggcaggcuauguag

SEQ ID NO: 579019 - RNA, 21 nt, Artificial Sequence
  Synthetic
ccauggaggcaggcuauguag

SEQ ID NO: 579020 - RNA, 22 nt, Artificial Sequence
  Synthetic
gccauggaggcaggcuauguag

SEQ ID NO: 579021 - RNA, 23 nt, Artificial Sequence
  Synthetic
ugccauggaggcaggcuauguag

SEQ ID NO: 579022 - RNA, 24 nt, Artificial Sequence
  Synthetic
augccauggaggcaggcuauguag

SEQ ID NO: 579023 - RNA, 18 nt, Artificial Sequence
  Synthetic
aacuuuuugaaacuguag

SEQ ID NO: 579024 - RNA, 19 nt, Artificial Sequence
  Synthetic
gaacuuuuugaaacuguag

SEQ ID NO: 579025 - RNA, 20 nt, Artificial Sequence
  Synthetic
agaacuuuuugaaacuguag

SEQ ID NO: 579026 - RNA, 21 nt, Artificial Sequence
  Synthetic
gagaacuuuuugaaacuguag

SEQ ID NO: 579027 - RNA, 22 nt, Artificial Sequence
  Synthetic
ugagaacuuuuugaaacuguag

SEQ ID NO: 579028 - RNA, 23 nt, Artificial Sequence
  Synthetic
augagaacuuuuugaaacuguag

SEQ ID NO: 579029 - RNA, 24 nt, Artificial Sequence
  Synthetic
gaugagaacuuuuugaaacuguag

SEQ ID NO: 579030 - RNA, 18 nt, Artificial Sequence
  Synthetic
ccacccucagaacuguag

SEQ ID NO: 579031 - RNA, 19 nt, Artificial Sequence
  Synthetic
accacccucagaacuguag

SEQ ID NO: 579032 - RNA, 20 nt, Artificial Sequence
  Synthetic
uaccacccucagaacuguag

SEQ ID NO: 579033 - RNA, 21 nt, Artificial Sequence
  Synthetic
auaccacccucagaacuguag

SEQ ID NO: 579034 - RNA, 22 nt, Artificial Sequence
  Synthetic
uauaccacccucagaacuguag

SEQ ID NO: 579035 - RNA, 23 nt, Artificial Sequence
  Synthetic
guauaccacccucagaacuguag

SEQ ID NO: 579036 - RNA, 24 nt, Artificial Sequence
  Synthetic
uguauaccacccucagaacuguag

SEQ ID NO: 579037 - RNA, 18 nt, Artificial Sequence
  Synthetic
uccugcugaaaccuguag

SEQ ID NO: 579038 - RNA, 19 nt, Artificial Sequence
  Synthetic
cuccugcugaaaccuguag

SEQ ID NO: 579039 - RNA, 20 nt, Artificial Sequence
  Synthetic
acuccugcugaaaccuguag

SEQ ID NO: 579040 - RNA, 21 nt, Artificial Sequence
  Synthetic
uacuccugcugaaaccuguag

SEQ ID NO: 579041 - RNA, 22 nt, Artificial Sequence
  Synthetic
auacuccugcugaaaccuguag

SEQ ID NO: 579042 - RNA, 23 nt, Artificial Sequence
  Synthetic
cauacuccugcugaaaccuguag

SEQ ID NO: 579043 - RNA, 24 nt, Artificial Sequence
  Synthetic
ccauacuccugcugaaaccuguag

SEQ ID NO: 579044 - RNA, 18 nt, Artificial Sequence
  Synthetic
cgcugauacuaccuguag

SEQ ID NO: 579045 - RNA, 19 nt, Artificial Sequence
  Synthetic
ucgcugauacuaccuguag

SEQ ID NO: 579046 - RNA, 20 nt, Artificial Sequence
  Synthetic
uucgcugauacuaccuguag

SEQ ID NO: 579047 - RNA, 21 nt, Artificial Sequence
  Synthetic
auucgcugauacuaccuguag

SEQ ID NO: 579048 - RNA, 22 nt, Artificial Sequence
  Synthetic
cauucgcugauacuaccuguag

SEQ ID NO: 579049 - RNA, 23 nt, Artificial Sequence
  Synthetic
ccauucgcugauacuaccuguag

SEQ ID NO: 579050 - RNA, 24 nt, Artificial Sequence
  Synthetic
accauucgcugauacuaccuguag

SEQ ID NO: 579051 - RNA, 18 nt, Artificial Sequence
  Synthetic
aaagcuggcaugcuguag

SEQ ID NO: 579052 - RNA, 19 nt, Artificial Sequence
  Synthetic
aaaagcuggcaugcuguag

SEQ ID NO: 579053 - RNA, 20 nt, Artificial Sequence
  Synthetic
caaaagcuggcaugcuguag

SEQ ID NO: 579054 - RNA, 21 nt, Artificial Sequence
  Synthetic
ucaaaagcuggcaugcuguag

SEQ ID NO: 579055 - RNA, 22 nt, Artificial Sequence
  Synthetic
uucaaaagcuggcaugcuguag

SEQ ID NO: 579056 - RNA, 23 nt, Artificial Sequence
  Synthetic
uuucaaaagcuggcaugcuguag

SEQ ID NO: 579057 - RNA, 24 nt, Artificial Sequence
  Synthetic
cuuucaaaagcuggcaugcuguag

SEQ ID NO: 579058 - RNA, 18 nt, Artificial Sequence
  Synthetic
agauaaacugaaguguag

SEQ ID NO: 579059 - RNA, 19 nt, Artificial Sequence
  Synthetic
gagauaaacugaaguguag

SEQ ID NO: 579060 - RNA, 20 nt, Artificial Sequence
  Synthetic
agagauaaacugaaguguag

SEQ ID NO: 579061 - RNA, 21 nt, Artificial Sequence
  Synthetic
gagagauaaacugaaguguag

SEQ ID NO: 579062 - RNA, 22 nt, Artificial Sequence
  Synthetic
ggagagauaaacugaaguguag

SEQ ID NO: 579063 - RNA, 23 nt, Artificial Sequence
  Synthetic
gggagagauaaacugaaguguag

SEQ ID NO: 579064 - RNA, 24 nt, Artificial Sequence
  Synthetic
agggagagauaaacugaaguguag

SEQ ID NO: 579065 - RNA, 18 nt, Artificial Sequence
  Synthetic
aacagauuuucaguguag

SEQ ID NO: 579066 - RNA, 19 nt, Artificial Sequence
  Synthetic
caacagauuuucaguguag

SEQ ID NO: 579067 - RNA, 20 nt, Artificial Sequence
  Synthetic
acaacagauuuucaguguag

SEQ ID NO: 579068 - RNA, 21 nt, Artificial Sequence
  Synthetic
aacaacagauuuucaguguag

SEQ ID NO: 579069 - RNA, 22 nt, Artificial Sequence
  Synthetic
aaacaacagauuuucaguguag

SEQ ID NO: 579070 - RNA, 23 nt, Artificial Sequence
  Synthetic
uaaacaacagauuuucaguguag

SEQ ID NO: 579071 - RNA, 24 nt, Artificial Sequence
  Synthetic
cuaaacaacagauuuucaguguag

SEQ ID NO: 579072 - RNA, 18 nt, Artificial Sequence
  Synthetic
aggcugggaagaguguag

SEQ ID NO: 579073 - RNA, 19 nt, Artificial Sequence
  Synthetic
gaggcugggaagaguguag

SEQ ID NO: 579074 - RNA, 20 nt, Artificial Sequence
  Synthetic
agaggcugggaagaguguag

SEQ ID NO: 579075 - RNA, 21 nt, Artificial Sequence
  Synthetic
cagaggcugggaagaguguag

SEQ ID NO: 579076 - RNA, 22 nt, Artificial Sequence
  Synthetic
ccagaggcugggaagaguguag

SEQ ID NO: 579077 - RNA, 23 nt, Artificial Sequence
  Synthetic
accagaggcugggaagaguguag

SEQ ID NO: 579078 - RNA, 24 nt, Artificial Sequence
  Synthetic
uaccagaggcugggaagaguguag

SEQ ID NO: 579079 - RNA, 18 nt, Artificial Sequence
  Synthetic
agaaaggguagaguguag

SEQ ID NO: 579080 - RNA, 19 nt, Artificial Sequence
  Synthetic
gagaaaggguagaguguag

SEQ ID NO: 579081 - RNA, 20 nt, Artificial Sequence
  Synthetic
agagaaaggguagaguguag

SEQ ID NO: 579082 - RNA, 21 nt, Artificial Sequence
  Synthetic
aagagaaaggguagaguguag

SEQ ID NO: 579083 - RNA, 22 nt, Artificial Sequence
  Synthetic
aaagagaaaggguagaguguag

SEQ ID NO: 579084 - RNA, 23 nt, Artificial Sequence
  Synthetic
gaaagagaaaggguagaguguag

SEQ ID NO: 579085 - RNA, 24 nt, Artificial Sequence
  Synthetic
ggaaagagaaaggguagaguguag

SEQ ID NO: 579086 - RNA, 18 nt, Artificial Sequence
  Synthetic
aaaacaaaguuaguguag

SEQ ID NO: 579087 - RNA, 19 nt, Artificial Sequence
  Synthetic
aaaaacaaaguuaguguag

SEQ ID NO: 579088 - RNA, 20 nt, Artificial Sequence
  Synthetic
aaaaaacaaaguuaguguag

SEQ ID NO: 579089 - RNA, 21 nt, Artificial Sequence
  Synthetic
aaaaaaacaaaguuaguguag

SEQ ID NO: 579090 - RNA, 22 nt, Artificial Sequence
  Synthetic
aaaaaaaacaaaguuaguguag

SEQ ID NO: 579091 - RNA, 23 nt, Artificial Sequence
  Synthetic
aaaaaaaaacaaaguuaguguag

SEQ ID NO: 579092 - RNA, 24 nt, Artificial Sequence
  Synthetic
aaaaaaaaaacaaaguuaguguag

SEQ ID NO: 579093 - RNA, 18 nt, Artificial Sequence
  Synthetic
acuucaggugacguguag

SEQ ID NO: 579094 - RNA, 19 nt, Artificial Sequence
  Synthetic
gacuucaggugacguguag

SEQ ID NO: 579095 - RNA, 20 nt, Artificial Sequence
  Synthetic
ugacuucaggugacguguag

SEQ ID NO: 579096 - RNA, 21 nt, Artificial Sequence
  Synthetic
uugacuucaggugacguguag

SEQ ID NO: 579097 - RNA, 22 nt, Artificial Sequence
  Synthetic
auugacuucaggugacguguag

SEQ ID NO: 579098 - RNA, 23 nt, Artificial Sequence
  Synthetic
aauugacuucaggugacguguag

SEQ ID NO: 579099 - RNA, 24 nt, Artificial Sequence
  Synthetic
gaauugacuucaggugacguguag

SEQ ID NO: 579100 - RNA, 18 nt, Artificial Sequence
  Synthetic
uaaccacucacuguguag

SEQ ID NO: 579101 - RNA, 19 nt, Artificial Sequence
  Synthetic
cuaaccacucacuguguag

SEQ ID NO: 579102 - RNA, 20 nt, Artificial Sequence
  Synthetic
ucuaaccacucacuguguag

SEQ ID NO: 579103 - RNA, 21 nt, Artificial Sequence
  Synthetic
aucuaaccacucacuguguag

SEQ ID NO: 579104 - RNA, 22 nt, Artificial Sequence
  Synthetic
aaucuaaccacucacuguguag

SEQ ID NO: 579105 - RNA, 23 nt, Artificial Sequence
  Synthetic
caaucuaaccacucacuguguag

SEQ ID NO: 579106 - RNA, 24 nt, Artificial Sequence
  Synthetic
ccaaucuaaccacucacuguguag

SEQ ID NO: 579107 - RNA, 18 nt, Artificial Sequence
  Synthetic
gaauaaauagcuguguag

SEQ ID NO: 579108 - RNA, 19 nt, Artificial Sequence
  Synthetic
agaauaaauagcuguguag

SEQ ID NO: 579109 - RNA, 20 nt, Artificial Sequence
  Synthetic
cagaauaaauagcuguguag

SEQ ID NO: 579110 - RNA, 21 nt, Artificial Sequence
  Synthetic
ccagaauaaauagcuguguag

SEQ ID NO: 579111 - RNA, 22 nt, Artificial Sequence
  Synthetic
uccagaauaaauagcuguguag

SEQ ID NO: 579112 - RNA, 23 nt, Artificial Sequence
  Synthetic
cuccagaauaaauagcuguguag

SEQ ID NO: 579113 - RNA, 24 nt, Artificial Sequence
  Synthetic
ucuccagaauaaauagcuguguag

SEQ ID NO: 579114 - RNA, 18 nt, Artificial Sequence
  Synthetic
auucaaagcaguguguag

SEQ ID NO: 579115 - RNA, 19 nt, Artificial Sequence
  Synthetic
cauucaaagcaguguguag

SEQ ID NO: 579116 - RNA, 20 nt, Artificial Sequence
  Synthetic
gcauucaaagcaguguguag

SEQ ID NO: 579117 - RNA, 21 nt, Artificial Sequence
  Synthetic
cgcauucaaagcaguguguag

SEQ ID NO: 579118 - RNA, 22 nt, Artificial Sequence
  Synthetic
acgcauucaaagcaguguguag

SEQ ID NO: 579119 - RNA, 23 nt, Artificial Sequence
  Synthetic
gacgcauucaaagcaguguguag

SEQ ID NO: 579120 - RNA, 24 nt, Artificial Sequence
  Synthetic
ggacgcauucaaagcaguguguag

SEQ ID NO: 579121 - RNA, 18 nt, Artificial Sequence
  Synthetic
auaaaaguauguguguag

SEQ ID NO: 579122 - RNA, 19 nt, Artificial Sequence
  Synthetic
aauaaaaguauguguguag

SEQ ID NO: 579123 - RNA, 20 nt, Artificial Sequence
  Synthetic
aaauaaaaguauguguguag

SEQ ID NO: 579124 - RNA, 21 nt, Artificial Sequence
  Synthetic
uaaauaaaaguauguguguag

SEQ ID NO: 579125 - RNA, 22 nt, Artificial Sequence
  Synthetic
auaaauaaaaguauguguguag

SEQ ID NO: 579126 - RNA, 23 nt, Artificial Sequence
  Synthetic
aauaaauaaaaguauguguguag

SEQ ID NO: 579127 - RNA, 24 nt, Artificial Sequence
  Synthetic
aaauaaauaaaaguauguguguag

SEQ ID NO: 579128 - RNA, 18 nt, Artificial Sequence
  Synthetic
gaggugaggaaauuguag

SEQ ID NO: 579129 - RNA, 19 nt, Artificial Sequence
  Synthetic
agaggugaggaaauuguag

SEQ ID NO: 579130 - RNA, 20 nt, Artificial Sequence
  Synthetic
gagaggugaggaaauuguag

SEQ ID NO: 579131 - RNA, 21 nt, Artificial Sequence
  Synthetic
agagaggugaggaaauuguag

SEQ ID NO: 579132 - RNA, 22 nt, Artificial Sequence
  Synthetic
gagagaggugaggaaauuguag

SEQ ID NO: 579133 - RNA, 23 nt, Artificial Sequence
  Synthetic
ugagagaggugaggaaauuguag

SEQ ID NO: 579134 - RNA, 24 nt, Artificial Sequence
  Synthetic
cugagagaggugaggaaauuguag

SEQ ID NO: 579135 - RNA, 18 nt, Artificial Sequence
  Synthetic
ugaaauauauuauuguag

SEQ ID NO: 579136 - RNA, 19 nt, Artificial Sequence
  Synthetic
augaaauauauuauuguag

SEQ ID NO: 579137 - RNA, 20 nt, Artificial Sequence
  Synthetic
uaugaaauauauuauuguag

SEQ ID NO: 579138 - RNA, 21 nt, Artificial Sequence
  Synthetic
cuaugaaauauauuauuguag

SEQ ID NO: 579139 - RNA, 22 nt, Artificial Sequence
  Synthetic
ucuaugaaauauauuauuguag

SEQ ID NO: 579140 - RNA, 23 nt, Artificial Sequence
  Synthetic
aucuaugaaauauauuauuguag

SEQ ID NO: 579141 - RNA, 24 nt, Artificial Sequence
  Synthetic
uaucuaugaaauauauuauuguag

SEQ ID NO: 579142 - RNA, 18 nt, Artificial Sequence
  Synthetic
ugguaguuucccuuguag

SEQ ID NO: 579143 - RNA, 19 nt, Artificial Sequence
  Synthetic
gugguaguuucccuuguag

SEQ ID NO: 579144 - RNA, 20 nt, Artificial Sequence
  Synthetic
ggugguaguuucccuuguag

SEQ ID NO: 579145 - RNA, 21 nt, Artificial Sequence
  Synthetic
uggugguaguuucccuuguag

SEQ ID NO: 579146 - RNA, 22 nt, Artificial Sequence
  Synthetic
cuggugguaguuucccuuguag

SEQ ID NO: 579147 - RNA, 23 nt, Artificial Sequence
  Synthetic
ccuggugguaguuucccuuguag

SEQ ID NO: 579148 - RNA, 24 nt, Artificial Sequence
  Synthetic
gccuggugguaguuucccuuguag

SEQ ID NO: 579149 - RNA, 18 nt, Artificial Sequence
  Synthetic
gcaaaaugaagcuuguag

SEQ ID NO: 579150 - RNA, 19 nt, Artificial Sequence
  Synthetic
agcaaaaugaagcuuguag

SEQ ID NO: 579151 - RNA, 20 nt, Artificial Sequence
  Synthetic
aagcaaaaugaagcuuguag

SEQ ID NO: 579152 - RNA, 21 nt, Artificial Sequence
  Synthetic
aaagcaaaaugaagcuuguag

SEQ ID NO: 579153 - RNA, 22 nt, Artificial Sequence
  Synthetic
caaagcaaaaugaagcuuguag

SEQ ID NO: 579154 - RNA, 23 nt, Artificial Sequence
  Synthetic
gcaaagcaaaaugaagcuuguag

SEQ ID NO: 579155 - RNA, 24 nt, Artificial Sequence
  Synthetic
agcaaagcaaaaugaagcuuguag

SEQ ID NO: 579156 - RNA, 18 nt, Artificial Sequence
  Synthetic
auauuguuucuguuguag

SEQ ID NO: 579157 - RNA, 19 nt, Artificial Sequence
  Synthetic
uauauuguuucuguuguag

SEQ ID NO: 579158 - RNA, 20 nt, Artificial Sequence
  Synthetic
cuauauuguuucuguuguag

SEQ ID NO: 579159 - RNA, 21 nt, Artificial Sequence
  Synthetic
acuauauuguuucuguuguag

SEQ ID NO: 579160 - RNA, 22 nt, Artificial Sequence
  Synthetic
cacuauauuguuucuguuguag

SEQ ID NO: 579161 - RNA, 23 nt, Artificial Sequence
  Synthetic
ucacuauauuguuucuguuguag

SEQ ID NO: 579162 - RNA, 24 nt, Artificial Sequence
  Synthetic
cucacuauauuguuucuguuguag

SEQ ID NO: 579163 - RNA, 18 nt, Artificial Sequence
  Synthetic
uaauuaacaaauuuguag

SEQ ID NO: 579164 - RNA, 19 nt, Artificial Sequence
  Synthetic
uuaauuaacaaauuuguag

SEQ ID NO: 579165 - RNA, 20 nt, Artificial Sequence
  Synthetic
uuuaauuaacaaauuuguag

SEQ ID NO: 579166 - RNA, 21 nt, Artificial Sequence
  Synthetic
auuuaauuaacaaauuuguag

SEQ ID NO: 579167 - RNA, 22 nt, Artificial Sequence
  Synthetic
aauuuaauuaacaaauuuguag

SEQ ID NO: 579168 - RNA, 23 nt, Artificial Sequence
  Synthetic
uaauuuaauuaacaaauuuguag

SEQ ID NO: 579169 - RNA, 24 nt, Artificial Sequence
  Synthetic
uuaauuuaauuaacaaauuuguag

SEQ ID NO: 579170 - RNA, 18 nt, Artificial Sequence
  Synthetic
gcuaaguauaauuuguag

SEQ ID NO: 579171 - RNA, 19 nt, Artificial Sequence
  Synthetic
ugcuaaguauaauuuguag

SEQ ID NO: 579172 - RNA, 20 nt, Artificial Sequence
  Synthetic
gugcuaaguauaauuuguag

SEQ ID NO: 579173 - RNA, 21 nt, Artificial Sequence
  Synthetic
ugugcuaaguauaauuuguag

SEQ ID NO: 579174 - RNA, 22 nt, Artificial Sequence
  Synthetic
uugugcuaaguauaauuuguag

SEQ ID NO: 579175 - RNA, 23 nt, Artificial Sequence
  Synthetic
cuugugcuaaguauaauuuguag

SEQ ID NO: 579176 - RNA, 24 nt, Artificial Sequence
  Synthetic
ucuugugcuaaguauaauuuguag

SEQ ID NO: 579177 - RNA, 18 nt, Artificial Sequence
  Synthetic
gauuuuuuguauuuguag

SEQ ID NO: 579178 - RNA, 19 nt, Artificial Sequence
  Synthetic
ugauuuuuuguauuuguag

SEQ ID NO: 579179 - RNA, 20 nt, Artificial Sequence
  Synthetic
cugauuuuuuguauuuguag

SEQ ID NO: 579180 - RNA, 21 nt, Artificial Sequence
  Synthetic
gcugauuuuuuguauuuguag

SEQ ID NO: 579181 - RNA, 22 nt, Artificial Sequence
  Synthetic
ggcugauuuuuuguauuuguag

SEQ ID NO: 579182 - RNA, 23 nt, Artificial Sequence
  Synthetic
cggcugauuuuuuguauuuguag

SEQ ID NO: 579183 - RNA, 24 nt, Artificial Sequence
  Synthetic
ccggcugauuuuuuguauuuguag

SEQ ID NO: 579184 - RNA, 18 nt, Artificial Sequence
  Synthetic
aaaaaaaaaaaaaauuag

SEQ ID NO: 579185 - RNA, 19 nt, Artificial Sequence
  Synthetic
caaaaaaaaaaaaaauuag

SEQ ID NO: 579186 - RNA, 20 nt, Artificial Sequence
  Synthetic
ucaaaaaaaaaaaaaauuag

SEQ ID NO: 579187 - RNA, 21 nt, Artificial Sequence
  Synthetic
uucaaaaaaaaaaaaaauuag

SEQ ID NO: 579188 - RNA, 22 nt, Artificial Sequence
  Synthetic
uuucaaaaaaaaaaaaaauuag

SEQ ID NO: 579189 - RNA, 23 nt, Artificial Sequence
  Synthetic
auuucaaaaaaaaaaaaaauuag

SEQ ID NO: 579190 - RNA, 24 nt, Artificial Sequence
  Synthetic
cauuucaaaaaaaaaaaaaauuag

SEQ ID NO: 579191 - RNA, 18 nt, Artificial Sequence
  Synthetic
aaauacaaaaaaaauuag

SEQ ID NO: 579192 - RNA, 19 nt, Artificial Sequence
  Synthetic
aaaauacaaaaaaaauuag

SEQ ID NO: 579193 - RNA, 20 nt, Artificial Sequence
  Synthetic
aaaaauacaaaaaaaauuag

SEQ ID NO: 579194 - RNA, 21 nt, Artificial Sequence
  Synthetic
uaaaaauacaaaaaaaauuag

SEQ ID NO: 579195 - RNA, 22 nt, Artificial Sequence
  Synthetic
cuaaaaauacaaaaaaaauuag

SEQ ID NO: 579196 - RNA, 23 nt, Artificial Sequence
  Synthetic
acuaaaaauacaaaaaaaauuag

SEQ ID NO: 579197 - RNA, 24 nt, Artificial Sequence
  Synthetic
uacuaaaaauacaaaaaaaauuag

SEQ ID NO: 579198 - RNA, 18 nt, Artificial Sequence
  Synthetic
gaacagaaaaaaaauuag

SEQ ID NO: 579199 - RNA, 19 nt, Artificial Sequence
  Synthetic
ggaacagaaaaaaaauuag

SEQ ID NO: 579200 - RNA, 20 nt, Artificial Sequence
  Synthetic
aggaacagaaaaaaaauuag

SEQ ID NO: 579201 - RNA, 21 nt, Artificial Sequence
  Synthetic
aaggaacagaaaaaaaauuag

SEQ ID NO: 579202 - RNA, 22 nt, Artificial Sequence
  Synthetic
aaaggaacagaaaaaaaauuag

SEQ ID NO: 579203 - RNA, 23 nt, Artificial Sequence
  Synthetic
uaaaggaacagaaaaaaaauuag

SEQ ID NO: 579204 - RNA, 24 nt, Artificial Sequence
  Synthetic
auaaaggaacagaaaaaaaauuag

SEQ ID NO: 579205 - RNA, 18 nt, Artificial Sequence
  Synthetic
aaaacacaaaaaaauuag

SEQ ID NO: 579206 - RNA, 19 nt, Artificial Sequence
  Synthetic
aaaaacacaaaaaaauuag

SEQ ID NO: 579207 - RNA, 20 nt, Artificial Sequence
  Synthetic
aaaaaacacaaaaaaauuag

SEQ ID NO: 579208 - RNA, 21 nt, Artificial Sequence
  Synthetic
uaaaaaacacaaaaaaauuag

SEQ ID NO: 579209 - RNA, 22 nt, Artificial Sequence
  Synthetic
cuaaaaaacacaaaaaaauuag

SEQ ID NO: 579210 - RNA, 23 nt, Artificial Sequence
  Synthetic
acuaaaaaacacaaaaaaauuag

SEQ ID NO: 579211 - RNA, 24 nt, Artificial Sequence
  Synthetic
uacuaaaaaacacaaaaaaauuag

SEQ ID NO: 579212 - RNA, 21 nt, Artificial Sequence
  Synthetic
aaaaaaaauacaaaaaauuag

SEQ ID NO: 579213 - RNA, 22 nt, Artificial Sequence
  Synthetic
aaaaaaaaauacaaaaaauuag

SEQ ID NO: 579214 - RNA, 23 nt, Artificial Sequence
  Synthetic
uaaaaaaaaauacaaaaaauuag

SEQ ID NO: 579215 - RNA, 24 nt, Artificial Sequence
  Synthetic
cuaaaaaaaaauacaaaaaauuag

SEQ ID NO: 579216 - RNA, 21 nt, Artificial Sequence
  Synthetic
caaaaaaauacaaaaaauuag

SEQ ID NO: 579217 - RNA, 22 nt, Artificial Sequence
  Synthetic
gcaaaaaaauacaaaaaauuag

SEQ ID NO: 579218 - RNA, 23 nt, Artificial Sequence
  Synthetic
ugcaaaaaaauacaaaaaauuag

SEQ ID NO: 579219 - RNA, 24 nt, Artificial Sequence
  Synthetic
cugcaaaaaaauacaaaaaauuag

SEQ ID NO: 579220 - RNA, 21 nt, Artificial Sequence
  Synthetic
acuaaaaauacaaaaaauuag

SEQ ID NO: 579221 - RNA, 22 nt, Artificial Sequence
  Synthetic
uacuaaaaauacaaaaaauuag

SEQ ID NO: 579222 - RNA, 23 nt, Artificial Sequence
  Synthetic
cuacuaaaaauacaaaaaauuag

SEQ ID NO: 579223 - RNA, 24 nt, Artificial Sequence
  Synthetic
ucuacuaaaaauacaaaaaauuag

SEQ ID NO: 579224 - RNA, 18 nt, Artificial Sequence
  Synthetic
uaaaacuacaaaaauuag

SEQ ID NO: 579225 - RNA, 19 nt, Artificial Sequence
  Synthetic
cuaaaacuacaaaaauuag

SEQ ID NO: 579226 - RNA, 20 nt, Artificial Sequence
  Synthetic
acuaaaacuacaaaaauuag

SEQ ID NO: 579227 - RNA, 21 nt, Artificial Sequence
  Synthetic
uacuaaaacuacaaaaauuag

SEQ ID NO: 579228 - RNA, 22 nt, Artificial Sequence
  Synthetic
uuacuaaaacuacaaaaauuag

SEQ ID NO: 579229 - RNA, 23 nt, Artificial Sequence
  Synthetic
uuuacuaaaacuacaaaaauuag

SEQ ID NO: 579230 - RNA, 24 nt, Artificial Sequence
  Synthetic
cuuuacuaaaacuacaaaaauuag

SEQ ID NO: 579231 - RNA, 18 nt, Artificial Sequence
  Synthetic
uaaaaacagaaaaauuag

SEQ ID NO: 579232 - RNA, 19 nt, Artificial Sequence
  Synthetic
cuaaaaacagaaaaauuag

SEQ ID NO: 579233 - RNA, 20 nt, Artificial Sequence
  Synthetic
acuaaaaacagaaaaauuag

SEQ ID NO: 579234 - RNA, 21 nt, Artificial Sequence
  Synthetic
uacuaaaaacagaaaaauuag

SEQ ID NO: 579235 - RNA, 22 nt, Artificial Sequence
  Synthetic
cuacuaaaaacagaaaaauuag

SEQ ID NO: 579236 - RNA, 23 nt, Artificial Sequence
  Synthetic
ucuacuaaaaacagaaaaauuag

SEQ ID NO: 579237 - RNA, 24 nt, Artificial Sequence
  Synthetic
cucuacuaaaaacagaaaaauuag

SEQ ID NO: 579238 - RNA, 18 nt, Artificial Sequence
  Synthetic
aaaaauacacaaaauuag

SEQ ID NO: 579239 - RNA, 19 nt, Artificial Sequence
  Synthetic
uaaaaauacacaaaauuag

SEQ ID NO: 579240 - RNA, 20 nt, Artificial Sequence
  Synthetic
cuaaaaauacacaaaauuag

SEQ ID NO: 579241 - RNA, 21 nt, Artificial Sequence
  Synthetic
acuaaaaauacacaaaauuag

SEQ ID NO: 579242 - RNA, 22 nt, Artificial Sequence
  Synthetic
uacuaaaaauacacaaaauuag

SEQ ID NO: 579243 - RNA, 23 nt, Artificial Sequence
  Synthetic
cuacuaaaaauacacaaaauuag

SEQ ID NO: 579244 - RNA, 24 nt, Artificial Sequence
  Synthetic
ucuacuaaaaauacacaaaauuag

SEQ ID NO: 579245 - RNA, 18 nt, Artificial Sequence
  Synthetic
aaucgaacccaaaauuag

SEQ ID NO: 579246 - RNA, 19 nt, Artificial Sequence
  Synthetic
aaaucgaacccaaaauuag

SEQ ID NO: 579247 - RNA, 20 nt, Artificial Sequence
  Synthetic
caaaucgaacccaaaauuag

SEQ ID NO: 579248 - RNA, 21 nt, Artificial Sequence
  Synthetic
gcaaaucgaacccaaaauuag

SEQ ID NO: 579249 - RNA, 22 nt, Artificial Sequence
  Synthetic
agcaaaucgaacccaaaauuag

SEQ ID NO: 579250 - RNA, 23 nt, Artificial Sequence
  Synthetic
gagcaaaucgaacccaaaauuag

SEQ ID NO: 579251 - RNA, 24 nt, Artificial Sequence
  Synthetic
ggagcaaaucgaacccaaaauuag

SEQ ID NO: 579252 - RNA, 18 nt, Artificial Sequence
  Synthetic
cacagaugauaaaauuag

SEQ ID NO: 579253 - RNA, 19 nt, Artificial Sequence
  Synthetic
acacagaugauaaaauuag

SEQ ID NO: 579254 - RNA, 20 nt, Artificial Sequence
  Synthetic
gacacagaugauaaaauuag

SEQ ID NO: 579255 - RNA, 21 nt, Artificial Sequence
  Synthetic
agacacagaugauaaaauuag

SEQ ID NO: 579256 - RNA, 22 nt, Artificial Sequence
  Synthetic
uagacacagaugauaaaauuag

SEQ ID NO: 579257 - RNA, 23 nt, Artificial Sequence
  Synthetic
auagacacagaugauaaaauuag

SEQ ID NO: 579258 - RNA, 24 nt, Artificial Sequence
  Synthetic
aauagacacagaugauaaaauuag

SEQ ID NO: 579259 - RNA, 18 nt, Artificial Sequence
  Synthetic
ccagcaucuugaaauuag

SEQ ID NO: 579260 - RNA, 19 nt, Artificial Sequence
  Synthetic
accagcaucuugaaauuag

SEQ ID NO: 579261 - RNA, 20 nt, Artificial Sequence
  Synthetic
aaccagcaucuugaaauuag

SEQ ID NO: 579262 - RNA, 21 nt, Artificial Sequence
  Synthetic
gaaccagcaucuugaaauuag

SEQ ID NO: 579263 - RNA, 22 nt, Artificial Sequence
  Synthetic
ggaaccagcaucuugaaauuag

SEQ ID NO: 579264 - RNA, 23 nt, Artificial Sequence
  Synthetic
gggaaccagcaucuugaaauuag

SEQ ID NO: 579265 - RNA, 24 nt, Artificial Sequence
  Synthetic
agggaaccagcaucuugaaauuag

SEQ ID NO: 579266 - RNA, 18 nt, Artificial Sequence
  Synthetic
auugggaugauaaauuag

SEQ ID NO: 579267 - RNA, 19 nt, Artificial Sequence
  Synthetic
cauugggaugauaaauuag

SEQ ID NO: 579268 - RNA, 20 nt, Artificial Sequence
  Synthetic
ccauugggaugauaaauuag

SEQ ID NO: 579269 - RNA, 21 nt, Artificial Sequence
  Synthetic
gccauugggaugauaaauuag

SEQ ID NO: 579270 - RNA, 22 nt, Artificial Sequence
  Synthetic
ugccauugggaugauaaauuag

SEQ ID NO: 579271 - RNA, 23 nt, Artificial Sequence
  Synthetic
augccauugggaugauaaauuag

SEQ ID NO: 579272 - RNA, 24 nt, Artificial Sequence
  Synthetic
uaugccauugggaugauaaauuag

SEQ ID NO: 579273 - RNA, 18 nt, Artificial Sequence
  Synthetic
caacauuuaguaaauuag

SEQ ID NO: 579274 - RNA, 19 nt, Artificial Sequence
  Synthetic
ucaacauuuaguaaauuag

SEQ ID NO: 579275 - RNA, 20 nt, Artificial Sequence
  Synthetic
aucaacauuuaguaaauuag

SEQ ID NO: 579276 - RNA, 21 nt, Artificial Sequence
  Synthetic
gaucaacauuuaguaaauuag

SEQ ID NO: 579277 - RNA, 22 nt, Artificial Sequence
  Synthetic
agaucaacauuuaguaaauuag

SEQ ID NO: 579278 - RNA, 23 nt, Artificial Sequence
  Synthetic
aagaucaacauuuaguaaauuag

SEQ ID NO: 579279 - RNA, 24 nt, Artificial Sequence
  Synthetic
caagaucaacauuuaguaaauuag

SEQ ID NO: 579280 - RNA, 18 nt, Artificial Sequence
  Synthetic
gaagacaaaaacaauuag

SEQ ID NO: 579281 - RNA, 19 nt, Artificial Sequence
  Synthetic
ugaagacaaaaacaauuag

SEQ ID NO: 579282 - RNA, 20 nt, Artificial Sequence
  Synthetic
augaagacaaaaacaauuag

SEQ ID NO: 579283 - RNA, 21 nt, Artificial Sequence
  Synthetic
aaugaagacaaaaacaauuag

SEQ ID NO: 579284 - RNA, 22 nt, Artificial Sequence
  Synthetic
uaaugaagacaaaaacaauuag

SEQ ID NO: 579285 - RNA, 23 nt, Artificial Sequence
  Synthetic
auaaugaagacaaaaacaauuag

SEQ ID NO: 579286 - RNA, 24 nt, Artificial Sequence
  Synthetic
cauaaugaagacaaaaacaauuag

SEQ ID NO: 579287 - RNA, 18 nt, Artificial Sequence
  Synthetic
uuauauauuuacaauuag

SEQ ID NO: 579288 - RNA, 19 nt, Artificial Sequence
  Synthetic
guuauauauuuacaauuag

SEQ ID NO: 579289 - RNA, 20 nt, Artificial Sequence
  Synthetic
uguuauauauuuacaauuag

SEQ ID NO: 579290 - RNA, 21 nt, Artificial Sequence
  Synthetic
auguuauauauuuacaauuag

SEQ ID NO: 579291 - RNA, 22 nt, Artificial Sequence
  Synthetic
aauguuauauauuuacaauuag

SEQ ID NO: 579292 - RNA, 23 nt, Artificial Sequence
  Synthetic
caauguuauauauuuacaauuag

SEQ ID NO: 579293 - RNA, 24 nt, Artificial Sequence
  Synthetic
acaauguuauauauuuacaauuag

SEQ ID NO: 579294 - RNA, 18 nt, Artificial Sequence
  Synthetic
gcugcuucucccaauuag

SEQ ID NO: 579295 - RNA, 19 nt, Artificial Sequence
  Synthetic
ggcugcuucucccaauuag

SEQ ID NO: 579296 - RNA, 20 nt, Artificial Sequence
  Synthetic
gggcugcuucucccaauuag

SEQ ID NO: 579297 - RNA, 21 nt, Artificial Sequence
  Synthetic
agggcugcuucucccaauuag

SEQ ID NO: 579298 - RNA, 22 nt, Artificial Sequence
  Synthetic
cagggcugcuucucccaauuag

SEQ ID NO: 579299 - RNA, 23 nt, Artificial Sequence
  Synthetic
ucagggcugcuucucccaauuag

SEQ ID NO: 579300 - RNA, 24 nt, Artificial Sequence
  Synthetic
cucagggcugcuucucccaauuag

SEQ ID NO: 579301 - RNA, 18 nt, Artificial Sequence
  Synthetic
guccuacaaaucaauuag

SEQ ID NO: 579302 - RNA, 19 nt, Artificial Sequence
  Synthetic
uguccuacaaaucaauuag

SEQ ID NO: 579303 - RNA, 20 nt, Artificial Sequence
  Synthetic
auguccuacaaaucaauuag

SEQ ID NO: 579304 - RNA, 21 nt, Artificial Sequence
  Synthetic
aauguccuacaaaucaauuag

SEQ ID NO: 579305 - RNA, 22 nt, Artificial Sequence
  Synthetic
uaauguccuacaaaucaauuag

SEQ ID NO: 579306 - RNA, 23 nt, Artificial Sequence
  Synthetic
auaauguccuacaaaucaauuag

SEQ ID NO: 579307 - RNA, 24 nt, Artificial Sequence
  Synthetic
uauaauguccuacaaaucaauuag

SEQ ID NO: 579308 - RNA, 18 nt, Artificial Sequence
  Synthetic
gauuucuuccucaauuag

SEQ ID NO: 579309 - RNA, 19 nt, Artificial Sequence
  Synthetic
ugauuucuuccucaauuag

SEQ ID NO: 579310 - RNA, 20 nt, Artificial Sequence
  Synthetic
augauuucuuccucaauuag

SEQ ID NO: 579311 - RNA, 21 nt, Artificial Sequence
  Synthetic
uaugauuucuuccucaauuag

SEQ ID NO: 579312 - RNA, 22 nt, Artificial Sequence
  Synthetic
auaugauuucuuccucaauuag

SEQ ID NO: 579313 - RNA, 23 nt, Artificial Sequence
  Synthetic
uauaugauuucuuccucaauuag

SEQ ID NO: 579314 - RNA, 24 nt, Artificial Sequence
  Synthetic
auauaugauuucuuccucaauuag

SEQ ID NO: 579315 - RNA, 18 nt, Artificial Sequence
  Synthetic
uaaaggguauucaauuag

SEQ ID NO: 579316 - RNA, 19 nt, Artificial Sequence
  Synthetic
auaaaggguauucaauuag

SEQ ID NO: 579317 - RNA, 20 nt, Artificial Sequence
  Synthetic
aauaaaggguauucaauuag

SEQ ID NO: 579318 - RNA, 21 nt, Artificial Sequence
  Synthetic
aaauaaaggguauucaauuag

SEQ ID NO: 579319 - RNA, 22 nt, Artificial Sequence
  Synthetic
gaaauaaaggguauucaauuag

SEQ ID NO: 579320 - RNA, 23 nt, Artificial Sequence
  Synthetic
ggaaauaaaggguauucaauuag

SEQ ID NO: 579321 - RNA, 24 nt, Artificial Sequence
  Synthetic
aggaaauaaaggguauucaauuag

SEQ ID NO: 579322 - RNA, 18 nt, Artificial Sequence
  Synthetic
ucuccuucauggaauuag

SEQ ID NO: 579323 - RNA, 19 nt, Artificial Sequence
  Synthetic
cucuccuucauggaauuag

SEQ ID NO: 579324 - RNA, 20 nt, Artificial Sequence
  Synthetic
acucuccuucauggaauuag

SEQ ID NO: 579325 - RNA, 21 nt, Artificial Sequence
  Synthetic
uacucuccuucauggaauuag

SEQ ID NO: 579326 - RNA, 22 nt, Artificial Sequence
  Synthetic
cuacucuccuucauggaauuag

SEQ ID NO: 579327 - RNA, 23 nt, Artificial Sequence
  Synthetic
acuacucuccuucauggaauuag

SEQ ID NO: 579328 - RNA, 24 nt, Artificial Sequence
  Synthetic
uacuacucuccuucauggaauuag

SEQ ID NO: 579329 - RNA, 18 nt, Artificial Sequence
  Synthetic
agcugacaagugaauuag

SEQ ID NO: 579330 - RNA, 19 nt, Artificial Sequence
  Synthetic
gagcugacaagugaauuag

SEQ ID NO: 579331 - RNA, 20 nt, Artificial Sequence
  Synthetic
agagcugacaagugaauuag

SEQ ID NO: 579332 - RNA, 21 nt, Artificial Sequence
  Synthetic
gagagcugacaagugaauuag

SEQ ID NO: 579333 - RNA, 22 nt, Artificial Sequence
  Synthetic
ggagagcugacaagugaauuag

SEQ ID NO: 579334 - RNA, 23 nt, Artificial Sequence
  Synthetic
uggagagcugacaagugaauuag

SEQ ID NO: 579335 - RNA, 24 nt, Artificial Sequence
  Synthetic
uuggagagcugacaagugaauuag

SEQ ID NO: 579336 - RNA, 18 nt, Artificial Sequence
  Synthetic
gaauuaaacuauaauuag

SEQ ID NO: 579337 - RNA, 19 nt, Artificial Sequence
  Synthetic
ggaauuaaacuauaauuag

SEQ ID NO: 579338 - RNA, 20 nt, Artificial Sequence
  Synthetic
cggaauuaaacuauaauuag

SEQ ID NO: 579339 - RNA, 21 nt, Artificial Sequence
  Synthetic
acggaauuaaacuauaauuag

SEQ ID NO: 579340 - RNA, 22 nt, Artificial Sequence
  Synthetic
uacggaauuaaacuauaauuag

SEQ ID NO: 579341 - RNA, 23 nt, Artificial Sequence
  Synthetic
guacggaauuaaacuauaauuag

SEQ ID NO: 579342 - RNA, 24 nt, Artificial Sequence
  Synthetic
uguacggaauuaaacuauaauuag

SEQ ID NO: 579343 - RNA, 18 nt, Artificial Sequence
  Synthetic
auauuuuuggguaauuag

SEQ ID NO: 579344 - RNA, 19 nt, Artificial Sequence
  Synthetic
aauauuuuuggguaauuag

SEQ ID NO: 579345 - RNA, 20 nt, Artificial Sequence
  Synthetic
aaauauuuuuggguaauuag

SEQ ID NO: 579346 - RNA, 21 nt, Artificial Sequence
  Synthetic
caaauauuuuuggguaauuag

SEQ ID NO: 579347 - RNA, 22 nt, Artificial Sequence
  Synthetic
ucaaauauuuuuggguaauuag

SEQ ID NO: 579348 - RNA, 23 nt, Artificial Sequence
  Synthetic
aucaaauauuuuuggguaauuag

SEQ ID NO: 579349 - RNA, 24 nt, Artificial Sequence
  Synthetic
aaucaaauauuuuuggguaauuag

SEQ ID NO: 579350 - RNA, 18 nt, Artificial Sequence
  Synthetic
uaaaaauacaaacauuag

SEQ ID NO: 579351 - RNA, 19 nt, Artificial Sequence
  Synthetic
cuaaaaauacaaacauuag

SEQ ID NO: 579352 - RNA, 20 nt, Artificial Sequence
  Synthetic
acuaaaaauacaaacauuag

SEQ ID NO: 579353 - RNA, 21 nt, Artificial Sequence
  Synthetic
uacuaaaaauacaaacauuag

SEQ ID NO: 579354 - RNA, 22 nt, Artificial Sequence
  Synthetic
cuacuaaaaauacaaacauuag

SEQ ID NO: 579355 - RNA, 23 nt, Artificial Sequence
  Synthetic
ucuacuaaaaauacaaacauuag

SEQ ID NO: 579356 - RNA, 24 nt, Artificial Sequence
  Synthetic
cucuacuaaaaauacaaacauuag

SEQ ID NO: 579357 - RNA, 18 nt, Artificial Sequence
  Synthetic
uuaaaauaaauacauuag

SEQ ID NO: 579358 - RNA, 19 nt, Artificial Sequence
  Synthetic
guuaaaauaaauacauuag

SEQ ID NO: 579359 - RNA, 20 nt, Artificial Sequence
  Synthetic
gguuaaaauaaauacauuag

SEQ ID NO: 579360 - RNA, 21 nt, Artificial Sequence
  Synthetic
ugguuaaaauaaauacauuag

SEQ ID NO: 579361 - RNA, 22 nt, Artificial Sequence
  Synthetic
uugguuaaaauaaauacauuag

SEQ ID NO: 579362 - RNA, 23 nt, Artificial Sequence
  Synthetic
uuugguuaaaauaaauacauuag

SEQ ID NO: 579363 - RNA, 24 nt, Artificial Sequence
  Synthetic
guuugguuaaaauaaauacauuag

SEQ ID NO: 579364 - RNA, 18 nt, Artificial Sequence
  Synthetic
guaagauguaaccauuag

SEQ ID NO: 579365 - RNA, 19 nt, Artificial Sequence
  Synthetic
uguaagauguaaccauuag

SEQ ID NO: 579366 - RNA, 20 nt, Artificial Sequence
  Synthetic
auguaagauguaaccauuag

SEQ ID NO: 579367 - RNA, 21 nt, Artificial Sequence
  Synthetic
uauguaagauguaaccauuag

SEQ ID NO: 579368 - RNA, 22 nt, Artificial Sequence
  Synthetic
uuauguaagauguaaccauuag

SEQ ID NO: 579369 - RNA, 23 nt, Artificial Sequence
  Synthetic
auuauguaagauguaaccauuag

SEQ ID NO: 579370 - RNA, 24 nt, Artificial Sequence
  Synthetic
aauuauguaagauguaaccauuag

SEQ ID NO: 579371 - RNA, 18 nt, Artificial Sequence
  Synthetic
gcucuagaaguccauuag

SEQ ID NO: 579372 - RNA, 19 nt, Artificial Sequence
  Synthetic
agcucuagaaguccauuag

SEQ ID NO: 579373 - RNA, 20 nt, Artificial Sequence
  Synthetic
aagcucuagaaguccauuag

SEQ ID NO: 579374 - RNA, 21 nt, Artificial Sequence
  Synthetic
aaagcucuagaaguccauuag

SEQ ID NO: 579375 - RNA, 22 nt, Artificial Sequence
  Synthetic
gaaagcucuagaaguccauuag

SEQ ID NO: 579376 - RNA, 23 nt, Artificial Sequence
  Synthetic
agaaagcucuagaaguccauuag

SEQ ID NO: 579377 - RNA, 24 nt, Artificial Sequence
  Synthetic
uagaaagcucuagaaguccauuag

SEQ ID NO: 579378 - RNA, 18 nt, Artificial Sequence
  Synthetic
ggggagggauagcauuag

SEQ ID NO: 579379 - RNA, 19 nt, Artificial Sequence
  Synthetic
aggggagggauagcauuag

SEQ ID NO: 579380 - RNA, 20 nt, Artificial Sequence
  Synthetic
aaggggagggauagcauuag

SEQ ID NO: 579381 - RNA, 21 nt, Artificial Sequence
  Synthetic
caaggggagggauagcauuag

SEQ ID NO: 579382 - RNA, 22 nt, Artificial Sequence
  Synthetic
gcaaggggagggauagcauuag

SEQ ID NO: 579383 - RNA, 23 nt, Artificial Sequence
  Synthetic
ggcaaggggagggauagcauuag

SEQ ID NO: 579384 - RNA, 24 nt, Artificial Sequence
  Synthetic
gggcaaggggagggauagcauuag

SEQ ID NO: 579385 - RNA, 20 nt, Artificial Sequence
  Synthetic
uaggggagggauagcauuag

SEQ ID NO: 579386 - RNA, 21 nt, Artificial Sequence
  Synthetic
cuaggggagggauagcauuag

SEQ ID NO: 579387 - RNA, 22 nt, Artificial Sequence
  Synthetic
gcuaggggagggauagcauuag

SEQ ID NO: 579388 - RNA, 23 nt, Artificial Sequence
  Synthetic
ggcuaggggagggauagcauuag

SEQ ID NO: 579389 - RNA, 24 nt, Artificial Sequence
  Synthetic
gggcuaggggagggauagcauuag

SEQ ID NO: 579390 - RNA, 21 nt, Artificial Sequence
  Synthetic
uuaggggagggauagcauuag

SEQ ID NO: 579391 - RNA, 22 nt, Artificial Sequence
  Synthetic
guuaggggagggauagcauuag

SEQ ID NO: 579392 - RNA, 23 nt, Artificial Sequence
  Synthetic
gguuaggggagggauagcauuag

SEQ ID NO: 579393 - RNA, 24 nt, Artificial Sequence
  Synthetic
ggguuaggggagggauagcauuag

SEQ ID NO: 579394 - RNA, 19 nt, Artificial Sequence
  Synthetic
uggggagggauagcauuag

SEQ ID NO: 579395 - RNA, 20 nt, Artificial Sequence
  Synthetic
cuggggagggauagcauuag

SEQ ID NO: 579396 - RNA, 21 nt, Artificial Sequence
  Synthetic
gcuggggagggauagcauuag

SEQ ID NO: 579397 - RNA, 22 nt, Artificial Sequence
  Synthetic
ggcuggggagggauagcauuag

SEQ ID NO: 579398 - RNA, 23 nt, Artificial Sequence
  Synthetic
gggcuggggagggauagcauuag

SEQ ID NO: 579399 - RNA, 24 nt, Artificial Sequence
  Synthetic
ggggcuggggagggauagcauuag

SEQ ID NO: 579400 - RNA, 18 nt, Artificial Sequence
  Synthetic
ggguagggauagcauuag

SEQ ID NO: 579401 - RNA, 19 nt, Artificial Sequence
  Synthetic
aggguagggauagcauuag

SEQ ID NO: 579402 - RNA, 20 nt, Artificial Sequence
  Synthetic
uaggguagggauagcauuag

SEQ ID NO: 579403 - RNA, 21 nt, Artificial Sequence
  Synthetic
cuaggguagggauagcauuag

SEQ ID NO: 579404 - RNA, 22 nt, Artificial Sequence
  Synthetic
gcuaggguagggauagcauuag

SEQ ID NO: 579405 - RNA, 23 nt, Artificial Sequence
  Synthetic
ggcuaggguagggauagcauuag

SEQ ID NO: 579406 - RNA, 24 nt, Artificial Sequence
  Synthetic
gggcuaggguagggauagcauuag

SEQ ID NO: 579407 - RNA, 18 nt, Artificial Sequence
  Synthetic
cacaaggaucugcauuag

SEQ ID NO: 579408 - RNA, 19 nt, Artificial Sequence
  Synthetic
acacaaggaucugcauuag

SEQ ID NO: 579409 - RNA, 20 nt, Artificial Sequence
  Synthetic
uacacaaggaucugcauuag

SEQ ID NO: 579410 - RNA, 21 nt, Artificial Sequence
  Synthetic
uuacacaaggaucugcauuag

SEQ ID NO: 579411 - RNA, 22 nt, Artificial Sequence
  Synthetic
guuacacaaggaucugcauuag

SEQ ID NO: 579412 - RNA, 23 nt, Artificial Sequence
  Synthetic
aguuacacaaggaucugcauuag

SEQ ID NO: 579413 - RNA, 24 nt, Artificial Sequence
  Synthetic
uaguuacacaaggaucugcauuag

SEQ ID NO: 579414 - RNA, 18 nt, Artificial Sequence
  Synthetic
cacacucacaaucauuag

SEQ ID NO: 579415 - RNA, 19 nt, Artificial Sequence
  Synthetic
acacacucacaaucauuag

SEQ ID NO: 579416 - RNA, 20 nt, Artificial Sequence
  Synthetic
aacacacucacaaucauuag

SEQ ID NO: 579417 - RNA, 21 nt, Artificial Sequence
  Synthetic
caacacacucacaaucauuag

SEQ ID NO: 579418 - RNA, 22 nt, Artificial Sequence
  Synthetic
ucaacacacucacaaucauuag

SEQ ID NO: 579419 - RNA, 23 nt, Artificial Sequence
  Synthetic
cucaacacacucacaaucauuag

SEQ ID NO: 579420 - RNA, 24 nt, Artificial Sequence
  Synthetic
ucucaacacacucacaaucauuag

SEQ ID NO: 579421 - RNA, 18 nt, Artificial Sequence
  Synthetic
aucagaugaacucauuag

SEQ ID NO: 579422 - RNA, 19 nt, Artificial Sequence
  Synthetic
aaucagaugaacucauuag

SEQ ID NO: 579423 - RNA, 20 nt, Artificial Sequence
  Synthetic
gaaucagaugaacucauuag

SEQ ID NO: 579424 - RNA, 21 nt, Artificial Sequence
  Synthetic
agaaucagaugaacucauuag

SEQ ID NO: 579425 - RNA, 22 nt, Artificial Sequence
  Synthetic
uagaaucagaugaacucauuag

SEQ ID NO: 579426 - RNA, 23 nt, Artificial Sequence
  Synthetic
guagaaucagaugaacucauuag

SEQ ID NO: 579427 - RNA, 24 nt, Artificial Sequence
  Synthetic
aguagaaucagaugaacucauuag

SEQ ID NO: 579428 - RNA, 18 nt, Artificial Sequence
  Synthetic
ucccucucaguucauuag

SEQ ID NO: 579429 - RNA, 19 nt, Artificial Sequence
  Synthetic
uucccucucaguucauuag

SEQ ID NO: 579430 - RNA, 20 nt, Artificial Sequence
  Synthetic
guucccucucaguucauuag

SEQ ID NO: 579431 - RNA, 21 nt, Artificial Sequence
  Synthetic
uguucccucucaguucauuag

SEQ ID NO: 579432 - RNA, 22 nt, Artificial Sequence
  Synthetic
cuguucccucucaguucauuag

SEQ ID NO: 579433 - RNA, 23 nt, Artificial Sequence
  Synthetic
ccuguucccucucaguucauuag

SEQ ID NO: 579434 - RNA, 24 nt, Artificial Sequence
  Synthetic
accuguucccucucaguucauuag

SEQ ID NO: 579435 - RNA, 18 nt, Artificial Sequence
  Synthetic
ugcuauuuuuuucauuag

SEQ ID NO: 579436 - RNA, 19 nt, Artificial Sequence
  Synthetic
augcuauuuuuuucauuag

SEQ ID NO: 579437 - RNA, 20 nt, Artificial Sequence
  Synthetic
caugcuauuuuuuucauuag

SEQ ID NO: 579438 - RNA, 21 nt, Artificial Sequence
  Synthetic
ucaugcuauuuuuuucauuag

SEQ ID NO: 579439 - RNA, 22 nt, Artificial Sequence
  Synthetic
aucaugcuauuuuuuucauuag

SEQ ID NO: 579440 - RNA, 23 nt, Artificial Sequence
  Synthetic
aaucaugcuauuuuuuucauuag

SEQ ID NO: 579441 - RNA, 24 nt, Artificial Sequence
  Synthetic
aaaucaugcuauuuuuuucauuag

SEQ ID NO: 579442 - RNA, 18 nt, Artificial Sequence
  Synthetic
gguuuuggcaaagauuag

SEQ ID NO: 579443 - RNA, 19 nt, Artificial Sequence
  Synthetic
agguuuuggcaaagauuag

SEQ ID NO: 579444 - RNA, 20 nt, Artificial Sequence
  Synthetic
aagguuuuggcaaagauuag

SEQ ID NO: 579445 - RNA, 21 nt, Artificial Sequence
  Synthetic
uaagguuuuggcaaagauuag

SEQ ID NO: 579446 - RNA, 22 nt, Artificial Sequence
  Synthetic
uuaagguuuuggcaaagauuag

SEQ ID NO: 579447 - RNA, 23 nt, Artificial Sequence
  Synthetic
uuuaagguuuuggcaaagauuag

SEQ ID NO: 579448 - RNA, 24 nt, Artificial Sequence
  Synthetic
uuuuaagguuuuggcaaagauuag

SEQ ID NO: 579449 - RNA, 18 nt, Artificial Sequence
  Synthetic
gcgcugugcucagauuag

SEQ ID NO: 579450 - RNA, 19 nt, Artificial Sequence
  Synthetic
ugcgcugugcucagauuag

SEQ ID NO: 579451 - RNA, 20 nt, Artificial Sequence
  Synthetic
cugcgcugugcucagauuag

SEQ ID NO: 579452 - RNA, 21 nt, Artificial Sequence
  Synthetic
gcugcgcugugcucagauuag

SEQ ID NO: 579453 - RNA, 22 nt, Artificial Sequence
  Synthetic
ggcugcgcugugcucagauuag

SEQ ID NO: 579454 - RNA, 23 nt, Artificial Sequence
  Synthetic
aggcugcgcugugcucagauuag

SEQ ID NO: 579455 - RNA, 24 nt, Artificial Sequence
  Synthetic
aaggcugcgcugugcucagauuag

SEQ ID NO: 579456 - RNA, 18 nt, Artificial Sequence
  Synthetic
aauagguggagagauuag

SEQ ID NO: 579457 - RNA, 19 nt, Artificial Sequence
  Synthetic
aaauagguggagagauuag

SEQ ID NO: 579458 - RNA, 20 nt, Artificial Sequence
  Synthetic
caaauagguggagagauuag

SEQ ID NO: 579459 - RNA, 21 nt, Artificial Sequence
  Synthetic
acaaauagguggagagauuag

SEQ ID NO: 579460 - RNA, 22 nt, Artificial Sequence
  Synthetic
aacaaauagguggagagauuag

SEQ ID NO: 579461 - RNA, 23 nt, Artificial Sequence
  Synthetic
gaacaaauagguggagagauuag

SEQ ID NO: 579462 - RNA, 24 nt, Artificial Sequence
  Synthetic
ggaacaaauagguggagagauuag

SEQ ID NO: 579463 - RNA, 18 nt, Artificial Sequence
  Synthetic
gaaucuaaacuggauuag

SEQ ID NO: 579464 - RNA, 19 nt, Artificial Sequence
  Synthetic
ggaaucuaaacuggauuag

SEQ ID NO: 579465 - RNA, 20 nt, Artificial Sequence
  Synthetic
uggaaucuaaacuggauuag

SEQ ID NO: 579466 - RNA, 21 nt, Artificial Sequence
  Synthetic
guggaaucuaaacuggauuag

SEQ ID NO: 579467 - RNA, 22 nt, Artificial Sequence
  Synthetic
uguggaaucuaaacuggauuag

SEQ ID NO: 579468 - RNA, 23 nt, Artificial Sequence
  Synthetic
cuguggaaucuaaacuggauuag

SEQ ID NO: 579469 - RNA, 24 nt, Artificial Sequence
  Synthetic
acuguggaaucuaaacuggauuag

SEQ ID NO: 579470 - RNA, 18 nt, Artificial Sequence
  Synthetic
cuauuuugaguggauuag

SEQ ID NO: 579471 - RNA, 19 nt, Artificial Sequence
  Synthetic
acuauuuugaguggauuag

SEQ ID NO: 579472 - RNA, 20 nt, Artificial Sequence
  Synthetic
cacuauuuugaguggauuag

SEQ ID NO: 579473 - RNA, 21 nt, Artificial Sequence
  Synthetic
gcacuauuuugaguggauuag

SEQ ID NO: 579474 - RNA, 22 nt, Artificial Sequence
  Synthetic
agcacuauuuugaguggauuag

SEQ ID NO: 579475 - RNA, 23 nt, Artificial Sequence
  Synthetic
cagcacuauuuugaguggauuag

SEQ ID NO: 579476 - RNA, 24 nt, Artificial Sequence
  Synthetic
ucagcacuauuuugaguggauuag

SEQ ID NO: 579477 - RNA, 18 nt, Artificial Sequence
  Synthetic
uauuucaucuuugauuag

SEQ ID NO: 579478 - RNA, 19 nt, Artificial Sequence
  Synthetic
auauuucaucuuugauuag

SEQ ID NO: 579479 - RNA, 20 nt, Artificial Sequence
  Synthetic
cauauuucaucuuugauuag

SEQ ID NO: 579480 - RNA, 21 nt, Artificial Sequence
  Synthetic
acauauuucaucuuugauuag

SEQ ID NO: 579481 - RNA, 22 nt, Artificial Sequence
  Synthetic
cacauauuucaucuuugauuag

SEQ ID NO: 579482 - RNA, 23 nt, Artificial Sequence
  Synthetic
ccacauauuucaucuuugauuag

SEQ ID NO: 579483 - RNA, 24 nt, Artificial Sequence
  Synthetic
cccacauauuucaucuuugauuag

SEQ ID NO: 579484 - RNA, 18 nt, Artificial Sequence
  Synthetic
acugagggcaaauauuag

SEQ ID NO: 579485 - RNA, 19 nt, Artificial Sequence
  Synthetic
aacugagggcaaauauuag

SEQ ID NO: 579486 - RNA, 20 nt, Artificial Sequence
  Synthetic
gaacugagggcaaauauuag

SEQ ID NO: 579487 - RNA, 21 nt, Artificial Sequence
  Synthetic
agaacugagggcaaauauuag

SEQ ID NO: 579488 - RNA, 22 nt, Artificial Sequence
  Synthetic
gagaacugagggcaaauauuag

SEQ ID NO: 579489 - RNA, 23 nt, Artificial Sequence
  Synthetic
agagaacugagggcaaauauuag

SEQ ID NO: 579490 - RNA, 24 nt, Artificial Sequence
  Synthetic
cagagaacugagggcaaauauuag

SEQ ID NO: 579491 - RNA, 18 nt, Artificial Sequence
  Synthetic
gauugcaguaaauauuag

SEQ ID NO: 579492 - RNA, 19 nt, Artificial Sequence
  Synthetic
agauugcaguaaauauuag

SEQ ID NO: 579493 - RNA, 20 nt, Artificial Sequence
  Synthetic
cagauugcaguaaauauuag

SEQ ID NO: 579494 - RNA, 21 nt, Artificial Sequence
  Synthetic
gcagauugcaguaaauauuag

SEQ ID NO: 579495 - RNA, 22 nt, Artificial Sequence
  Synthetic
ugcagauugcaguaaauauuag

SEQ ID NO: 579496 - RNA, 23 nt, Artificial Sequence
  Synthetic
uugcagauugcaguaaauauuag

SEQ ID NO: 579497 - RNA, 24 nt, Artificial Sequence
  Synthetic
uuugcagauugcaguaaauauuag

SEQ ID NO: 579498 - RNA, 18 nt, Artificial Sequence
  Synthetic
aauagagcagaauauuag

SEQ ID NO: 579499 - RNA, 19 nt, Artificial Sequence
  Synthetic
aaauagagcagaauauuag

SEQ ID NO: 579500 - RNA, 20 nt, Artificial Sequence
  Synthetic
uaaauagagcagaauauuag

SEQ ID NO: 579501 - RNA, 21 nt, Artificial Sequence
  Synthetic
auaaauagagcagaauauuag

SEQ ID NO: 579502 - RNA, 22 nt, Artificial Sequence
  Synthetic
aauaaauagagcagaauauuag

SEQ ID NO: 579503 - RNA, 23 nt, Artificial Sequence
  Synthetic
uaauaaauagagcagaauauuag

SEQ ID NO: 579504 - RNA, 24 nt, Artificial Sequence
  Synthetic
guaauaaauagagcagaauauuag

SEQ ID NO: 579505 - RNA, 18 nt, Artificial Sequence
  Synthetic
uuaccaauguaauauuag

SEQ ID NO: 579506 - RNA, 19 nt, Artificial Sequence
  Synthetic
uuuaccaauguaauauuag

SEQ ID NO: 579507 - RNA, 20 nt, Artificial Sequence
  Synthetic
cuuuaccaauguaauauuag

SEQ ID NO: 579508 - RNA, 21 nt, Artificial Sequence
  Synthetic
ucuuuaccaauguaauauuag

SEQ ID NO: 579509 - RNA, 22 nt, Artificial Sequence
  Synthetic
gucuuuaccaauguaauauuag

SEQ ID NO: 579510 - RNA, 23 nt, Artificial Sequence
  Synthetic
cgucuuuaccaauguaauauuag

SEQ ID NO: 579511 - RNA, 24 nt, Artificial Sequence
  Synthetic
acgucuuuaccaauguaauauuag

SEQ ID NO: 579512 - RNA, 18 nt, Artificial Sequence
  Synthetic
aauuaauugcuauauuag

SEQ ID NO: 579513 - RNA, 19 nt, Artificial Sequence
  Synthetic
aaauuaauugcuauauuag

SEQ ID NO: 579514 - RNA, 20 nt, Artificial Sequence
  Synthetic
aaaauuaauugcuauauuag

SEQ ID NO: 579515 - RNA, 21 nt, Artificial Sequence
  Synthetic
uaaaauuaauugcuauauuag

SEQ ID NO: 579516 - RNA, 22 nt, Artificial Sequence
  Synthetic
auaaaauuaauugcuauauuag

SEQ ID NO: 579517 - RNA, 23 nt, Artificial Sequence
  Synthetic
aauaaaauuaauugcuauauuag

SEQ ID NO: 579518 - RNA, 24 nt, Artificial Sequence
  Synthetic
aaauaaaauuaauugcuauauuag

SEQ ID NO: 579519 - RNA, 18 nt, Artificial Sequence
  Synthetic
aaguauuuucccuauuag

SEQ ID NO: 579520 - RNA, 19 nt, Artificial Sequence
  Synthetic
gaaguauuuucccuauuag

SEQ ID NO: 579521 - RNA, 20 nt, Artificial Sequence
  Synthetic
ugaaguauuuucccuauuag

SEQ ID NO: 579522 - RNA, 21 nt, Artificial Sequence
  Synthetic
cugaaguauuuucccuauuag

SEQ ID NO: 579523 - RNA, 22 nt, Artificial Sequence
  Synthetic
acugaaguauuuucccuauuag

SEQ ID NO: 579524 - RNA, 23 nt, Artificial Sequence
  Synthetic
gacugaaguauuuucccuauuag

SEQ ID NO: 579525 - RNA, 24 nt, Artificial Sequence
  Synthetic
ugacugaaguauuuucccuauuag

SEQ ID NO: 579526 - RNA, 18 nt, Artificial Sequence
  Synthetic
ucacuuaaaagguauuag

SEQ ID NO: 579527 - RNA, 19 nt, Artificial Sequence
  Synthetic
uucacuuaaaagguauuag

SEQ ID NO: 579528 - RNA, 20 nt, Artificial Sequence
  Synthetic
auucacuuaaaagguauuag

SEQ ID NO: 579529 - RNA, 21 nt, Artificial Sequence
  Synthetic
aauucacuuaaaagguauuag

SEQ ID NO: 579530 - RNA, 22 nt, Artificial Sequence
  Synthetic
uaauucacuuaaaagguauuag

SEQ ID NO: 579531 - RNA, 23 nt, Artificial Sequence
  Synthetic
uuaauucacuuaaaagguauuag

SEQ ID NO: 579532 - RNA, 24 nt, Artificial Sequence
  Synthetic
cuuaauucacuuaaaagguauuag

SEQ ID NO: 579533 - RNA, 18 nt, Artificial Sequence
  Synthetic
aauuauguaaauuauuag

SEQ ID NO: 579534 - RNA, 19 nt, Artificial Sequence
  Synthetic
caauuauguaaauuauuag

SEQ ID NO: 579535 - RNA, 20 nt, Artificial Sequence
  Synthetic
acaauuauguaaauuauuag

SEQ ID NO: 579536 - RNA, 21 nt, Artificial Sequence
  Synthetic
aacaauuauguaaauuauuag

SEQ ID NO: 579537 - RNA, 22 nt, Artificial Sequence
  Synthetic
aaacaauuauguaaauuauuag

SEQ ID NO: 579538 - RNA, 23 nt, Artificial Sequence
  Synthetic
aaaacaauuauguaaauuauuag

SEQ ID NO: 579539 - RNA, 24 nt, Artificial Sequence
  Synthetic
aaaaacaauuauguaaauuauuag

SEQ ID NO: 579540 - RNA, 18 nt, Artificial Sequence
  Synthetic
cauguucucacuuauuag

SEQ ID NO: 579541 - RNA, 19 nt, Artificial Sequence
  Synthetic
gcauguucucacuuauuag

SEQ ID NO: 579542 - RNA, 20 nt, Artificial Sequence
  Synthetic
ugcauguucucacuuauuag

SEQ ID NO: 579543 - RNA, 21 nt, Artificial Sequence
  Synthetic
cugcauguucucacuuauuag

SEQ ID NO: 579544 - RNA, 22 nt, Artificial Sequence
  Synthetic
acugcauguucucacuuauuag

SEQ ID NO: 579545 - RNA, 23 nt, Artificial Sequence
  Synthetic
uacugcauguucucacuuauuag

SEQ ID NO: 579546 - RNA, 24 nt, Artificial Sequence
  Synthetic
auacugcauguucucacuuauuag

SEQ ID NO: 579547 - RNA, 18 nt, Artificial Sequence
  Synthetic
uaauaagagacuuauuag

SEQ ID NO: 579548 - RNA, 19 nt, Artificial Sequence
  Synthetic
uuaauaagagacuuauuag

SEQ ID NO: 579549 - RNA, 20 nt, Artificial Sequence
  Synthetic
cuuaauaagagacuuauuag

SEQ ID NO: 579550 - RNA, 21 nt, Artificial Sequence
  Synthetic
acuuaauaagagacuuauuag

SEQ ID NO: 579551 - RNA, 22 nt, Artificial Sequence
  Synthetic
aacuuaauaagagacuuauuag

SEQ ID NO: 579552 - RNA, 23 nt, Artificial Sequence
  Synthetic
gaacuuaauaagagacuuauuag

SEQ ID NO: 579553 - RNA, 24 nt, Artificial Sequence
  Synthetic
agaacuuaauaagagacuuauuag

SEQ ID NO: 579554 - RNA, 18 nt, Artificial Sequence
  Synthetic
aaaaauacaaaaacuuag

SEQ ID NO: 579555 - RNA, 19 nt, Artificial Sequence
  Synthetic
uaaaaauacaaaaacuuag

SEQ ID NO: 579556 - RNA, 20 nt, Artificial Sequence
  Synthetic
cuaaaaauacaaaaacuuag

SEQ ID NO: 579557 - RNA, 21 nt, Artificial Sequence
  Synthetic
acuaaaaauacaaaaacuuag

SEQ ID NO: 579558 - RNA, 22 nt, Artificial Sequence
  Synthetic
uacuaaaaauacaaaaacuuag

SEQ ID NO: 579559 - RNA, 23 nt, Artificial Sequence
  Synthetic
cuacuaaaaauacaaaaacuuag

SEQ ID NO: 579560 - RNA, 24 nt, Artificial Sequence
  Synthetic
ucuacuaaaaauacaaaaacuuag

SEQ ID NO: 579561 - RNA, 18 nt, Artificial Sequence
  Synthetic
uaaaaaugcaaaacuuag

SEQ ID NO: 579562 - RNA, 19 nt, Artificial Sequence
  Synthetic
cuaaaaaugcaaaacuuag

SEQ ID NO: 579563 - RNA, 20 nt, Artificial Sequence
  Synthetic
acuaaaaaugcaaaacuuag

SEQ ID NO: 579564 - RNA, 21 nt, Artificial Sequence
  Synthetic
uacuaaaaaugcaaaacuuag

SEQ ID NO: 579565 - RNA, 22 nt, Artificial Sequence
  Synthetic
cuacuaaaaaugcaaaacuuag

SEQ ID NO: 579566 - RNA, 23 nt, Artificial Sequence
  Synthetic
ucuacuaaaaaugcaaaacuuag

SEQ ID NO: 579567 - RNA, 24 nt, Artificial Sequence
  Synthetic
cucuacuaaaaaugcaaaacuuag

SEQ ID NO: 579568 - RNA, 18 nt, Artificial Sequence
  Synthetic
accaauauagaaacuuag

SEQ ID NO: 579569 - RNA, 19 nt, Artificial Sequence
  Synthetic
aaccaauauagaaacuuag

SEQ ID NO: 579570 - RNA, 20 nt, Artificial Sequence
  Synthetic
caaccaauauagaaacuuag

SEQ ID NO: 579571 - RNA, 21 nt, Artificial Sequence
  Synthetic
gcaaccaauauagaaacuuag

SEQ ID NO: 579572 - RNA, 22 nt, Artificial Sequence
  Synthetic
agcaaccaauauagaaacuuag

SEQ ID NO: 579573 - RNA, 23 nt, Artificial Sequence
  Synthetic
aagcaaccaauauagaaacuuag

SEQ ID NO: 579574 - RNA, 24 nt, Artificial Sequence
  Synthetic
caagcaaccaauauagaaacuuag

SEQ ID NO: 579575 - RNA, 18 nt, Artificial Sequence
  Synthetic
uugaccaauauaacuuag

SEQ ID NO: 579576 - RNA, 19 nt, Artificial Sequence
  Synthetic
uuugaccaauauaacuuag

SEQ ID NO: 579577 - RNA, 20 nt, Artificial Sequence
  Synthetic
cuuugaccaauauaacuuag

SEQ ID NO: 579578 - RNA, 21 nt, Artificial Sequence
  Synthetic
gcuuugaccaauauaacuuag

SEQ ID NO: 579579 - RNA, 22 nt, Artificial Sequence
  Synthetic
ugcuuugaccaauauaacuuag

SEQ ID NO: 579580 - RNA, 23 nt, Artificial Sequence
  Synthetic
gugcuuugaccaauauaacuuag

SEQ ID NO: 579581 - RNA, 24 nt, Artificial Sequence
  Synthetic
ggugcuuugaccaauauaacuuag

SEQ ID NO: 579582 - RNA, 18 nt, Artificial Sequence
  Synthetic
gaugacucuauaacuuag

SEQ ID NO: 579583 - RNA, 19 nt, Artificial Sequence
  Synthetic
ugaugacucuauaacuuag

SEQ ID NO: 579584 - RNA, 20 nt, Artificial Sequence
  Synthetic
augaugacucuauaacuuag

SEQ ID NO: 579585 - RNA, 21 nt, Artificial Sequence
  Synthetic
caugaugacucuauaacuuag

SEQ ID NO: 579586 - RNA, 22 nt, Artificial Sequence
  Synthetic
acaugaugacucuauaacuuag

SEQ ID NO: 579587 - RNA, 23 nt, Artificial Sequence
  Synthetic
cacaugaugacucuauaacuuag

SEQ ID NO: 579588 - RNA, 24 nt, Artificial Sequence
  Synthetic
ucacaugaugacucuauaacuuag

SEQ ID NO: 579589 - RNA, 18 nt, Artificial Sequence
  Synthetic
gacugacauagcacuuag

SEQ ID NO: 579590 - RNA, 19 nt, Artificial Sequence
  Synthetic
agacugacauagcacuuag

SEQ ID NO: 579591 - RNA, 20 nt, Artificial Sequence
  Synthetic
cagacugacauagcacuuag

SEQ ID NO: 579592 - RNA, 21 nt, Artificial Sequence
  Synthetic
gcagacugacauagcacuuag

SEQ ID NO: 579593 - RNA, 22 nt, Artificial Sequence
  Synthetic
agcagacugacauagcacuuag

SEQ ID NO: 579594 - RNA, 23 nt, Artificial Sequence
  Synthetic
cagcagacugacauagcacuuag

SEQ ID NO: 579595 - RNA, 24 nt, Artificial Sequence
  Synthetic
acagcagacugacauagcacuuag

SEQ ID NO: 579596 - RNA, 18 nt, Artificial Sequence
  Synthetic
acaaauucccucacuuag

SEQ ID NO: 579597 - RNA, 19 nt, Artificial Sequence
  Synthetic
gacaaauucccucacuuag

SEQ ID NO: 579598 - RNA, 20 nt, Artificial Sequence
  Synthetic
ggacaaauucccucacuuag

SEQ ID NO: 579599 - RNA, 21 nt, Artificial Sequence
  Synthetic
gggacaaauucccucacuuag

SEQ ID NO: 579600 - RNA, 22 nt, Artificial Sequence
  Synthetic
agggacaaauucccucacuuag

SEQ ID NO: 579601 - RNA, 23 nt, Artificial Sequence
  Synthetic
aagggacaaauucccucacuuag

SEQ ID NO: 579602 - RNA, 24 nt, Artificial Sequence
  Synthetic
uaagggacaaauucccucacuuag

SEQ ID NO: 579603 - RNA, 18 nt, Artificial Sequence
  Synthetic
aaagaaaaaaagacuuag

SEQ ID NO: 579604 - RNA, 19 nt, Artificial Sequence
  Synthetic
aaaagaaaaaaagacuuag

SEQ ID NO: 579605 - RNA, 20 nt, Artificial Sequence
  Synthetic
gaaaagaaaaaaagacuuag

SEQ ID NO: 579606 - RNA, 21 nt, Artificial Sequence
  Synthetic
agaaaagaaaaaaagacuuag

SEQ ID NO: 579607 - RNA, 22 nt, Artificial Sequence
  Synthetic
gagaaaagaaaaaaagacuuag

SEQ ID NO: 579608 - RNA, 23 nt, Artificial Sequence
  Synthetic
ggagaaaagaaaaaaagacuuag

SEQ ID NO: 579609 - RNA, 24 nt, Artificial Sequence
  Synthetic
uggagaaaagaaaaaaagacuuag

SEQ ID NO: 579610 - RNA, 18 nt, Artificial Sequence
  Synthetic
ccauuguaugggacuuag

SEQ ID NO: 579611 - RNA, 19 nt, Artificial Sequence
  Synthetic
accauuguaugggacuuag

SEQ ID NO: 579612 - RNA, 20 nt, Artificial Sequence
  Synthetic
uaccauuguaugggacuuag

SEQ ID NO: 579613 - RNA, 21 nt, Artificial Sequence
  Synthetic
cuaccauuguaugggacuuag

SEQ ID NO: 579614 - RNA, 22 nt, Artificial Sequence
  Synthetic
ucuaccauuguaugggacuuag

SEQ ID NO: 579615 - RNA, 23 nt, Artificial Sequence
  Synthetic
aucuaccauuguaugggacuuag

SEQ ID NO: 579616 - RNA, 24 nt, Artificial Sequence
  Synthetic
aaucuaccauuguaugggacuuag

SEQ ID NO: 579617 - RNA, 18 nt, Artificial Sequence
  Synthetic
aaugcauuuucuacuuag

SEQ ID NO: 579618 - RNA, 19 nt, Artificial Sequence
  Synthetic
aaaugcauuuucuacuuag

SEQ ID NO: 579619 - RNA, 20 nt, Artificial Sequence
  Synthetic
gaaaugcauuuucuacuuag

SEQ ID NO: 579620 - RNA, 21 nt, Artificial Sequence
  Synthetic
ugaaaugcauuuucuacuuag

SEQ ID NO: 579621 - RNA, 22 nt, Artificial Sequence
  Synthetic
gugaaaugcauuuucuacuuag

SEQ ID NO: 579622 - RNA, 23 nt, Artificial Sequence
  Synthetic
ugugaaaugcauuuucuacuuag

SEQ ID NO: 579623 - RNA, 24 nt, Artificial Sequence
  Synthetic
augugaaaugcauuuucuacuuag

SEQ ID NO: 579624 - RNA, 18 nt, Artificial Sequence
  Synthetic
aagguaguuauuacuuag

SEQ ID NO: 579625 - RNA, 19 nt, Artificial Sequence
  Synthetic
caagguaguuauuacuuag

SEQ ID NO: 579626 - RNA, 20 nt, Artificial Sequence
  Synthetic
gcaagguaguuauuacuuag

SEQ ID NO: 579627 - RNA, 21 nt, Artificial Sequence
  Synthetic
ugcaagguaguuauuacuuag

SEQ ID NO: 579628 - RNA, 22 nt, Artificial Sequence
  Synthetic
cugcaagguaguuauuacuuag

SEQ ID NO: 579629 - RNA, 23 nt, Artificial Sequence
  Synthetic
ucugcaagguaguuauuacuuag

SEQ ID NO: 579630 - RNA, 24 nt, Artificial Sequence
  Synthetic
cucugcaagguaguuauuacuuag

SEQ ID NO: 579631 - RNA, 18 nt, Artificial Sequence
  Synthetic
acuuguguguuaccuuag

SEQ ID NO: 579632 - RNA, 19 nt, Artificial Sequence
  Synthetic
uacuuguguguuaccuuag

SEQ ID NO: 579633 - RNA, 20 nt, Artificial Sequence
  Synthetic
guacuuguguguuaccuuag

SEQ ID NO: 579634 - RNA, 21 nt, Artificial Sequence
  Synthetic
aguacuuguguguuaccuuag

SEQ ID NO: 579635 - RNA, 22 nt, Artificial Sequence
  Synthetic
caguacuuguguguuaccuuag

SEQ ID NO: 579636 - RNA, 23 nt, Artificial Sequence
  Synthetic
ccaguacuuguguguuaccuuag

SEQ ID NO: 579637 - RNA, 24 nt, Artificial Sequence
  Synthetic
accaguacuuguguguuaccuuag

SEQ ID NO: 579638 - RNA, 18 nt, Artificial Sequence
  Synthetic
aggcagucugucccuuag

SEQ ID NO: 579639 - RNA, 19 nt, Artificial Sequence
  Synthetic
aaggcagucugucccuuag

SEQ ID NO: 579640 - RNA, 20 nt, Artificial Sequence
  Synthetic
gaaggcagucugucccuuag

SEQ ID NO: 579641 - RNA, 21 nt, Artificial Sequence
  Synthetic
agaaggcagucugucccuuag

SEQ ID NO: 579642 - RNA, 22 nt, Artificial Sequence
  Synthetic
gagaaggcagucugucccuuag

SEQ ID NO: 579643 - RNA, 23 nt, Artificial Sequence
  Synthetic
ugagaaggcagucugucccuuag

SEQ ID NO: 579644 - RNA, 24 nt, Artificial Sequence
  Synthetic
uugagaaggcagucugucccuuag

SEQ ID NO: 579645 - RNA, 18 nt, Artificial Sequence
  Synthetic
uggcuucuguugccuuag

SEQ ID NO: 579646 - RNA, 19 nt, Artificial Sequence
  Synthetic
auggcuucuguugccuuag

SEQ ID NO: 579647 - RNA, 20 nt, Artificial Sequence
  Synthetic
aauggcuucuguugccuuag

SEQ ID NO: 579648 - RNA, 21 nt, Artificial Sequence
  Synthetic
aaauggcuucuguugccuuag

SEQ ID NO: 579649 - RNA, 22 nt, Artificial Sequence
  Synthetic
gaaauggcuucuguugccuuag

SEQ ID NO: 579650 - RNA, 23 nt, Artificial Sequence
  Synthetic
agaaauggcuucuguugccuuag

SEQ ID NO: 579651 - RNA, 24 nt, Artificial Sequence
  Synthetic
uagaaauggcuucuguugccuuag

SEQ ID NO: 579652 - RNA, 18 nt, Artificial Sequence
  Synthetic
ggguugaaaaauccuuag

SEQ ID NO: 579653 - RNA, 19 nt, Artificial Sequence
  Synthetic
uggguugaaaaauccuuag

SEQ ID NO: 579654 - RNA, 20 nt, Artificial Sequence
  Synthetic
cuggguugaaaaauccuuag

SEQ ID NO: 579655 - RNA, 21 nt, Artificial Sequence
  Synthetic
acuggguugaaaaauccuuag

SEQ ID NO: 579656 - RNA, 22 nt, Artificial Sequence
  Synthetic
gacuggguugaaaaauccuuag

SEQ ID NO: 579657 - RNA, 23 nt, Artificial Sequence
  Synthetic
ggacuggguugaaaaauccuuag

SEQ ID NO: 579658 - RNA, 24 nt, Artificial Sequence
  Synthetic
uggacuggguugaaaaauccuuag

SEQ ID NO: 579659 - RNA, 18 nt, Artificial Sequence
  Synthetic
aucucauuaacuccuuag

SEQ ID NO: 579660 - RNA, 19 nt, Artificial Sequence
  Synthetic
gaucucauuaacuccuuag

SEQ ID NO: 579661 - RNA, 20 nt, Artificial Sequence
  Synthetic
ugaucucauuaacuccuuag

SEQ ID NO: 579662 - RNA, 21 nt, Artificial Sequence
  Synthetic
augaucucauuaacuccuuag

SEQ ID NO: 579663 - RNA, 22 nt, Artificial Sequence
  Synthetic
uaugaucucauuaacuccuuag

SEQ ID NO: 579664 - RNA, 23 nt, Artificial Sequence
  Synthetic
auaugaucucauuaacuccuuag

SEQ ID NO: 579665 - RNA, 24 nt, Artificial Sequence
  Synthetic
gauaugaucucauuaacuccuuag

SEQ ID NO: 579666 - RNA, 18 nt, Artificial Sequence
  Synthetic
aauuaauuuacuccuuag

SEQ ID NO: 579667 - RNA, 19 nt, Artificial Sequence
  Synthetic
aaauuaauuuacuccuuag

SEQ ID NO: 579668 - RNA, 20 nt, Artificial Sequence
  Synthetic
uaaauuaauuuacuccuuag

SEQ ID NO: 579669 - RNA, 21 nt, Artificial Sequence
  Synthetic
auaaauuaauuuacuccuuag

SEQ ID NO: 579670 - RNA, 22 nt, Artificial Sequence
  Synthetic
uauaaauuaauuuacuccuuag

SEQ ID NO: 579671 - RNA, 23 nt, Artificial Sequence
  Synthetic
auauaaauuaauuuacuccuuag

SEQ ID NO: 579672 - RNA, 24 nt, Artificial Sequence
  Synthetic
uauauaaauuaauuuacuccuuag

SEQ ID NO: 579673 - RNA, 18 nt, Artificial Sequence
  Synthetic
uugucucuucaagcuuag

SEQ ID NO: 579674 - RNA, 19 nt, Artificial Sequence
  Synthetic
uuugucucuucaagcuuag

SEQ ID NO: 579675 - RNA, 20 nt, Artificial Sequence
  Synthetic
cuuugucucuucaagcuuag

SEQ ID NO: 579676 - RNA, 21 nt, Artificial Sequence
  Synthetic
ccuuugucucuucaagcuuag

SEQ ID NO: 579677 - RNA, 22 nt, Artificial Sequence
  Synthetic
uccuuugucucuucaagcuuag

SEQ ID NO: 579678 - RNA, 23 nt, Artificial Sequence
  Synthetic
cuccuuugucucuucaagcuuag

SEQ ID NO: 579679 - RNA, 24 nt, Artificial Sequence
  Synthetic
ucuccuuugucucuucaagcuuag

SEQ ID NO: 579680 - RNA, 18 nt, Artificial Sequence
  Synthetic
aguaacauagaagcuuag

SEQ ID NO: 579681 - RNA, 19 nt, Artificial Sequence
  Synthetic
caguaacauagaagcuuag

SEQ ID NO: 579682 - RNA, 20 nt, Artificial Sequence
  Synthetic
ucaguaacauagaagcuuag

SEQ ID NO: 579683 - RNA, 21 nt, Artificial Sequence
  Synthetic
uucaguaacauagaagcuuag

SEQ ID NO: 579684 - RNA, 22 nt, Artificial Sequence
  Synthetic
uuucaguaacauagaagcuuag

SEQ ID NO: 579685 - RNA, 23 nt, Artificial Sequence
  Synthetic
uuuucaguaacauagaagcuuag

SEQ ID NO: 579686 - RNA, 24 nt, Artificial Sequence
  Synthetic
cuuuucaguaacauagaagcuuag

SEQ ID NO: 579687 - RNA, 18 nt, Artificial Sequence
  Synthetic
auguuuggguaagcuuag

SEQ ID NO: 579688 - RNA, 19 nt, Artificial Sequence
  Synthetic
aauguuuggguaagcuuag

SEQ ID NO: 579689 - RNA, 20 nt, Artificial Sequence
  Synthetic
uaauguuuggguaagcuuag

SEQ ID NO: 579690 - RNA, 21 nt, Artificial Sequence
  Synthetic
guaauguuuggguaagcuuag

SEQ ID NO: 579691 - RNA, 22 nt, Artificial Sequence
  Synthetic
gguaauguuuggguaagcuuag

SEQ ID NO: 579692 - RNA, 23 nt, Artificial Sequence
  Synthetic
agguaauguuuggguaagcuuag

SEQ ID NO: 579693 - RNA, 24 nt, Artificial Sequence
  Synthetic
uagguaauguuuggguaagcuuag

SEQ ID NO: 579694 - RNA, 18 nt, Artificial Sequence
  Synthetic
uuuucacucagagcuuag

SEQ ID NO: 579695 - RNA, 19 nt, Artificial Sequence
  Synthetic
uuuuucacucagagcuuag

SEQ ID NO: 579696 - RNA, 20 nt, Artificial Sequence
  Synthetic
cuuuuucacucagagcuuag

SEQ ID NO: 579697 - RNA, 21 nt, Artificial Sequence
  Synthetic
ccuuuuucacucagagcuuag

SEQ ID NO: 579698 - RNA, 22 nt, Artificial Sequence
  Synthetic
gccuuuuucacucagagcuuag

SEQ ID NO: 579699 - RNA, 23 nt, Artificial Sequence
  Synthetic
ugccuuuuucacucagagcuuag

SEQ ID NO: 579700 - RNA, 24 nt, Artificial Sequence
  Synthetic
cugccuuuuucacucagagcuuag

SEQ ID NO: 579701 - RNA, 18 nt, Artificial Sequence
  Synthetic
acugacuguauagcuuag

SEQ ID NO: 579702 - RNA, 19 nt, Artificial Sequence
  Synthetic
gacugacuguauagcuuag

SEQ ID NO: 579703 - RNA, 20 nt, Artificial Sequence
  Synthetic
agacugacuguauagcuuag

SEQ ID NO: 579704 - RNA, 21 nt, Artificial Sequence
  Synthetic
cagacugacuguauagcuuag

SEQ ID NO: 579705 - RNA, 22 nt, Artificial Sequence
  Synthetic
acagacugacuguauagcuuag

SEQ ID NO: 579706 - RNA, 23 nt, Artificial Sequence
  Synthetic
aacagacugacuguauagcuuag

SEQ ID NO: 579707 - RNA, 24 nt, Artificial Sequence
  Synthetic
gaacagacugacuguauagcuuag

SEQ ID NO: 579708 - RNA, 18 nt, Artificial Sequence
  Synthetic
guucauggaggggcuuag

SEQ ID NO: 579709 - RNA, 19 nt, Artificial Sequence
  Synthetic
aguucauggaggggcuuag

SEQ ID NO: 579710 - RNA, 20 nt, Artificial Sequence
  Synthetic
aaguucauggaggggcuuag

SEQ ID NO: 579711 - RNA, 21 nt, Artificial Sequence
  Synthetic
caaguucauggaggggcuuag

SEQ ID NO: 579712 - RNA, 22 nt, Artificial Sequence
  Synthetic
ccaaguucauggaggggcuuag

SEQ ID NO: 579713 - RNA, 23 nt, Artificial Sequence
  Synthetic
accaaguucauggaggggcuuag

SEQ ID NO: 579714 - RNA, 24 nt, Artificial Sequence
  Synthetic
uaccaaguucauggaggggcuuag

SEQ ID NO: 579715 - RNA, 18 nt, Artificial Sequence
  Synthetic
cacucuauuuuggcuuag

SEQ ID NO: 579716 - RNA, 19 nt, Artificial Sequence
  Synthetic
gcacucuauuuuggcuuag

SEQ ID NO: 579717 - RNA, 20 nt, Artificial Sequence
  Synthetic
agcacucuauuuuggcuuag

SEQ ID NO: 579718 - RNA, 21 nt, Artificial Sequence
  Synthetic
aagcacucuauuuuggcuuag

SEQ ID NO: 579719 - RNA, 22 nt, Artificial Sequence
  Synthetic
uaagcacucuauuuuggcuuag

SEQ ID NO: 579720 - RNA, 23 nt, Artificial Sequence
  Synthetic
uuaagcacucuauuuuggcuuag

SEQ ID NO: 579721 - RNA, 24 nt, Artificial Sequence
  Synthetic
auuaagcacucuauuuuggcuuag

SEQ ID NO: 579722 - RNA, 18 nt, Artificial Sequence
  Synthetic
agugcagaauaugcuuag

SEQ ID NO: 579723 - RNA, 19 nt, Artificial Sequence
  Synthetic
aagugcagaauaugcuuag

SEQ ID NO: 579724 - RNA, 20 nt, Artificial Sequence
  Synthetic
aaagugcagaauaugcuuag

SEQ ID NO: 579725 - RNA, 21 nt, Artificial Sequence
  Synthetic
uaaagugcagaauaugcuuag

SEQ ID NO: 579726 - RNA, 22 nt, Artificial Sequence
  Synthetic
guaaagugcagaauaugcuuag

SEQ ID NO: 579727 - RNA, 23 nt, Artificial Sequence
  Synthetic
uguaaagugcagaauaugcuuag

SEQ ID NO: 579728 - RNA, 24 nt, Artificial Sequence
  Synthetic
auguaaagugcagaauaugcuuag

SEQ ID NO: 579729 - RNA, 18 nt, Artificial Sequence
  Synthetic
gcacaggacacugcuuag

SEQ ID NO: 579730 - RNA, 19 nt, Artificial Sequence
  Synthetic
agcacaggacacugcuuag

SEQ ID NO: 579731 - RNA, 20 nt, Artificial Sequence
  Synthetic
cagcacaggacacugcuuag

SEQ ID NO: 579732 - RNA, 21 nt, Artificial Sequence
  Synthetic
gcagcacaggacacugcuuag

SEQ ID NO: 579733 - RNA, 22 nt, Artificial Sequence
  Synthetic
agcagcacaggacacugcuuag

SEQ ID NO: 579734 - RNA, 23 nt, Artificial Sequence
  Synthetic
uagcagcacaggacacugcuuag

SEQ ID NO: 579735 - RNA, 24 nt, Artificial Sequence
  Synthetic
auagcagcacaggacacugcuuag

SEQ ID NO: 579736 - RNA, 18 nt, Artificial Sequence
  Synthetic
gcuguauaacgugcuuag

SEQ ID NO: 579737 - RNA, 19 nt, Artificial Sequence
  Synthetic
agcuguauaacgugcuuag

SEQ ID NO: 579738 - RNA, 20 nt, Artificial Sequence
  Synthetic
aagcuguauaacgugcuuag

SEQ ID NO: 579739 - RNA, 21 nt, Artificial Sequence
  Synthetic
gaagcuguauaacgugcuuag

SEQ ID NO: 579740 - RNA, 22 nt, Artificial Sequence
  Synthetic
ugaagcuguauaacgugcuuag

SEQ ID NO: 579741 - RNA, 23 nt, Artificial Sequence
  Synthetic
augaagcuguauaacgugcuuag

SEQ ID NO: 579742 - RNA, 24 nt, Artificial Sequence
  Synthetic
caugaagcuguauaacgugcuuag

SEQ ID NO: 579743 - RNA, 18 nt, Artificial Sequence
  Synthetic
aaauucuucaaaucuuag

SEQ ID NO: 579744 - RNA, 19 nt, Artificial Sequence
  Synthetic
gaaauucuucaaaucuuag

SEQ ID NO: 579745 - RNA, 20 nt, Artificial Sequence
  Synthetic
ggaaauucuucaaaucuuag

SEQ ID NO: 579746 - RNA, 21 nt, Artificial Sequence
  Synthetic
gggaaauucuucaaaucuuag

SEQ ID NO: 579747 - RNA, 22 nt, Artificial Sequence
  Synthetic
ugggaaauucuucaaaucuuag

SEQ ID NO: 579748 - RNA, 23 nt, Artificial Sequence
  Synthetic
gugggaaauucuucaaaucuuag

SEQ ID NO: 579749 - RNA, 24 nt, Artificial Sequence
  Synthetic
agugggaaauucuucaaaucuuag

SEQ ID NO: 579750 - RNA, 18 nt, Artificial Sequence
  Synthetic
aauuugcuuuaaucuuag

SEQ ID NO: 579751 - RNA, 19 nt, Artificial Sequence
  Synthetic
aaauuugcuuuaaucuuag

SEQ ID NO: 579752 - RNA, 20 nt, Artificial Sequence
  Synthetic
gaaauuugcuuuaaucuuag

SEQ ID NO: 579753 - RNA, 21 nt, Artificial Sequence
  Synthetic
ggaaauuugcuuuaaucuuag

SEQ ID NO: 579754 - RNA, 22 nt, Artificial Sequence
  Synthetic
uggaaauuugcuuuaaucuuag

SEQ ID NO: 579755 - RNA, 23 nt, Artificial Sequence
  Synthetic
uuggaaauuugcuuuaaucuuag

SEQ ID NO: 579756 - RNA, 24 nt, Artificial Sequence
  Synthetic
guuggaaauuugcuuuaaucuuag

SEQ ID NO: 579757 - RNA, 18 nt, Artificial Sequence
  Synthetic
uuggugucuggaucuuag

SEQ ID NO: 579758 - RNA, 19 nt, Artificial Sequence
  Synthetic
uuuggugucuggaucuuag

SEQ ID NO: 579759 - RNA, 20 nt, Artificial Sequence
  Synthetic
uuuuggugucuggaucuuag

SEQ ID NO: 579760 - RNA, 21 nt, Artificial Sequence
  Synthetic
auuuuggugucuggaucuuag

SEQ ID NO: 579761 - RNA, 22 nt, Artificial Sequence
  Synthetic
cauuuuggugucuggaucuuag

SEQ ID NO: 579762 - RNA, 23 nt, Artificial Sequence
  Synthetic
ccauuuuggugucuggaucuuag

SEQ ID NO: 579763 - RNA, 24 nt, Artificial Sequence
  Synthetic
gccauuuuggugucuggaucuuag

SEQ ID NO: 579764 - RNA, 18 nt, Artificial Sequence
  Synthetic
cauucugcaugaucuuag

SEQ ID NO: 579765 - RNA, 19 nt, Artificial Sequence
  Synthetic
ucauucugcaugaucuuag

SEQ ID NO: 579766 - RNA, 20 nt, Artificial Sequence
  Synthetic
cucauucugcaugaucuuag

SEQ ID NO: 579767 - RNA, 21 nt, Artificial Sequence
  Synthetic
ccucauucugcaugaucuuag

SEQ ID NO: 579768 - RNA, 22 nt, Artificial Sequence
  Synthetic
cccucauucugcaugaucuuag

SEQ ID NO: 579769 - RNA, 23 nt, Artificial Sequence
  Synthetic
ucccucauucugcaugaucuuag

SEQ ID NO: 579770 - RNA, 24 nt, Artificial Sequence
  Synthetic
uucccucauucugcaugaucuuag

SEQ ID NO: 579771 - RNA, 18 nt, Artificial Sequence
  Synthetic
acuauuuccugaucuuag

SEQ ID NO: 579772 - RNA, 19 nt, Artificial Sequence
  Synthetic
cacuauuuccugaucuuag

SEQ ID NO: 579773 - RNA, 20 nt, Artificial Sequence
  Synthetic
ucacuauuuccugaucuuag

SEQ ID NO: 579774 - RNA, 21 nt, Artificial Sequence
  Synthetic
uucacuauuuccugaucuuag

SEQ ID NO: 579775 - RNA, 22 nt, Artificial Sequence
  Synthetic
cuucacuauuuccugaucuuag

SEQ ID NO: 579776 - RNA, 23 nt, Artificial Sequence
  Synthetic
ccuucacuauuuccugaucuuag

SEQ ID NO: 579777 - RNA, 24 nt, Artificial Sequence
  Synthetic
uccuucacuauuuccugaucuuag

SEQ ID NO: 579778 - RNA, 18 nt, Artificial Sequence
  Synthetic
ucuucuggaauaucuuag

SEQ ID NO: 579779 - RNA, 19 nt, Artificial Sequence
  Synthetic
gucuucuggaauaucuuag

SEQ ID NO: 579780 - RNA, 20 nt, Artificial Sequence
  Synthetic
ugucuucuggaauaucuuag

SEQ ID NO: 579781 - RNA, 21 nt, Artificial Sequence
  Synthetic
cugucuucuggaauaucuuag

SEQ ID NO: 579782 - RNA, 22 nt, Artificial Sequence
  Synthetic
acugucuucuggaauaucuuag

SEQ ID NO: 579783 - RNA, 23 nt, Artificial Sequence
  Synthetic
uacugucuucuggaauaucuuag

SEQ ID NO: 579784 - RNA, 24 nt, Artificial Sequence
  Synthetic
cuacugucuucuggaauaucuuag

SEQ ID NO: 579785 - RNA, 18 nt, Artificial Sequence
  Synthetic
gcauguucucacucuuag

SEQ ID NO: 579786 - RNA, 19 nt, Artificial Sequence
  Synthetic
cgcauguucucacucuuag

SEQ ID NO: 579787 - RNA, 20 nt, Artificial Sequence
  Synthetic
gcgcauguucucacucuuag

SEQ ID NO: 579788 - RNA, 21 nt, Artificial Sequence
  Synthetic
agcgcauguucucacucuuag

SEQ ID NO: 579789 - RNA, 22 nt, Artificial Sequence
  Synthetic
cagcgcauguucucacucuuag

SEQ ID NO: 579790 - RNA, 23 nt, Artificial Sequence
  Synthetic
acagcgcauguucucacucuuag

SEQ ID NO: 579791 - RNA, 24 nt, Artificial Sequence
  Synthetic
aacagcgcauguucucacucuuag

SEQ ID NO: 579792 - RNA, 18 nt, Artificial Sequence
  Synthetic
agcagugcccccucuuag

SEQ ID NO: 579793 - RNA, 19 nt, Artificial Sequence
  Synthetic
cagcagugcccccucuuag

SEQ ID NO: 579794 - RNA, 20 nt, Artificial Sequence
  Synthetic
ccagcagugcccccucuuag

SEQ ID NO: 579795 - RNA, 21 nt, Artificial Sequence
  Synthetic
cccagcagugcccccucuuag

SEQ ID NO: 579796 - RNA, 22 nt, Artificial Sequence
  Synthetic
ucccagcagugcccccucuuag

SEQ ID NO: 579797 - RNA, 23 nt, Artificial Sequence
  Synthetic
gucccagcagugcccccucuuag

SEQ ID NO: 579798 - RNA, 24 nt, Artificial Sequence
  Synthetic
ggucccagcagugcccccucuuag

SEQ ID NO: 579799 - RNA, 18 nt, Artificial Sequence
  Synthetic
cuguguggcagcucuuag

SEQ ID NO: 579800 - RNA, 19 nt, Artificial Sequence
  Synthetic
acuguguggcagcucuuag

SEQ ID NO: 579801 - RNA, 20 nt, Artificial Sequence
  Synthetic
gacuguguggcagcucuuag

SEQ ID NO: 579802 - RNA, 21 nt, Artificial Sequence
  Synthetic
ggacuguguggcagcucuuag

SEQ ID NO: 579803 - RNA, 22 nt, Artificial Sequence
  Synthetic
gggacuguguggcagcucuuag

SEQ ID NO: 579804 - RNA, 23 nt, Artificial Sequence
  Synthetic
agggacuguguggcagcucuuag

SEQ ID NO: 579805 - RNA, 24 nt, Artificial Sequence
  Synthetic
aagggacuguguggcagcucuuag

SEQ ID NO: 579806 - RNA, 18 nt, Artificial Sequence
  Synthetic
caccuccuucucucuuag

SEQ ID NO: 579807 - RNA, 19 nt, Artificial Sequence
  Synthetic
ucaccuccuucucucuuag

SEQ ID NO: 579808 - RNA, 20 nt, Artificial Sequence
  Synthetic
aucaccuccuucucucuuag

SEQ ID NO: 579809 - RNA, 21 nt, Artificial Sequence
  Synthetic
caucaccuccuucucucuuag

SEQ ID NO: 579810 - RNA, 22 nt, Artificial Sequence
  Synthetic
ucaucaccuccuucucucuuag

SEQ ID NO: 579811 - RNA, 23 nt, Artificial Sequence
  Synthetic
aucaucaccuccuucucucuuag

SEQ ID NO: 579812 - RNA, 24 nt, Artificial Sequence
  Synthetic
uaucaucaccuccuucucucuuag

SEQ ID NO: 579813 - RNA, 18 nt, Artificial Sequence
  Synthetic
agcuguuggcauucuuag

SEQ ID NO: 579814 - RNA, 19 nt, Artificial Sequence
  Synthetic
gagcuguuggcauucuuag

SEQ ID NO: 579815 - RNA, 20 nt, Artificial Sequence
  Synthetic
ugagcuguuggcauucuuag

SEQ ID NO: 579816 - RNA, 21 nt, Artificial Sequence
  Synthetic
augagcuguuggcauucuuag

SEQ ID NO: 579817 - RNA, 22 nt, Artificial Sequence
  Synthetic
aaugagcuguuggcauucuuag

SEQ ID NO: 579818 - RNA, 23 nt, Artificial Sequence
  Synthetic
gaaugagcuguuggcauucuuag

SEQ ID NO: 579819 - RNA, 24 nt, Artificial Sequence
  Synthetic
ggaaugagcuguuggcauucuuag

SEQ ID NO: 579820 - RNA, 18 nt, Artificial Sequence
  Synthetic
gcagcaaccauuucuuag

SEQ ID NO: 579821 - RNA, 19 nt, Artificial Sequence
  Synthetic
ugcagcaaccauuucuuag

SEQ ID NO: 579822 - RNA, 20 nt, Artificial Sequence
  Synthetic
uugcagcaaccauuucuuag

SEQ ID NO: 579823 - RNA, 21 nt, Artificial Sequence
  Synthetic
auugcagcaaccauuucuuag

SEQ ID NO: 579824 - RNA, 22 nt, Artificial Sequence
  Synthetic
aauugcagcaaccauuucuuag

SEQ ID NO: 579825 - RNA, 23 nt, Artificial Sequence
  Synthetic
aaauugcagcaaccauuucuuag

SEQ ID NO: 579826 - RNA, 24 nt, Artificial Sequence
  Synthetic
aaaauugcagcaaccauuucuuag

SEQ ID NO: 579827 - RNA, 18 nt, Artificial Sequence
  Synthetic
gaaaauaaguuuucuuag

SEQ ID NO: 579828 - RNA, 19 nt, Artificial Sequence
  Synthetic
ggaaaauaaguuuucuuag

SEQ ID NO: 579829 - RNA, 20 nt, Artificial Sequence
  Synthetic
aggaaaauaaguuuucuuag

SEQ ID NO: 579830 - RNA, 21 nt, Artificial Sequence
  Synthetic
caggaaaauaaguuuucuuag

SEQ ID NO: 579831 - RNA, 22 nt, Artificial Sequence
  Synthetic
acaggaaaauaaguuuucuuag

SEQ ID NO: 579832 - RNA, 23 nt, Artificial Sequence
  Synthetic
aacaggaaaauaaguuuucuuag

SEQ ID NO: 579833 - RNA, 24 nt, Artificial Sequence
  Synthetic
uaacaggaaaauaaguuuucuuag

SEQ ID NO: 579834 - RNA, 18 nt, Artificial Sequence
  Synthetic
acaacuuaaaaaaguuag

SEQ ID NO: 579835 - RNA, 19 nt, Artificial Sequence
  Synthetic
aacaacuuaaaaaaguuag

SEQ ID NO: 579836 - RNA, 20 nt, Artificial Sequence
  Synthetic
aaacaacuuaaaaaaguuag

SEQ ID NO: 579837 - RNA, 21 nt, Artificial Sequence
  Synthetic
caaacaacuuaaaaaaguuag

SEQ ID NO: 579838 - RNA, 22 nt, Artificial Sequence
  Synthetic
ucaaacaacuuaaaaaaguuag

SEQ ID NO: 579839 - RNA, 23 nt, Artificial Sequence
  Synthetic
uucaaacaacuuaaaaaaguuag

SEQ ID NO: 579840 - RNA, 24 nt, Artificial Sequence
  Synthetic
auucaaacaacuuaaaaaaguuag

SEQ ID NO: 579841 - RNA, 18 nt, Artificial Sequence
  Synthetic
aacuaagcccaaaguuag

SEQ ID NO: 579842 - RNA, 19 nt, Artificial Sequence
  Synthetic
aaacuaagcccaaaguuag

SEQ ID NO: 579843 - RNA, 20 nt, Artificial Sequence
  Synthetic
caaacuaagcccaaaguuag

SEQ ID NO: 579844 - RNA, 21 nt, Artificial Sequence
  Synthetic
acaaacuaagcccaaaguuag

SEQ ID NO: 579845 - RNA, 22 nt, Artificial Sequence
  Synthetic
gacaaacuaagcccaaaguuag

SEQ ID NO: 579846 - RNA, 23 nt, Artificial Sequence
  Synthetic
ggacaaacuaagcccaaaguuag

SEQ ID NO: 579847 - RNA, 24 nt, Artificial Sequence
  Synthetic
aggacaaacuaagcccaaaguuag

SEQ ID NO: 579848 - RNA, 18 nt, Artificial Sequence
  Synthetic
aauuaagcccaaaguuag

SEQ ID NO: 579849 - RNA, 19 nt, Artificial Sequence
  Synthetic
gaauuaagcccaaaguuag

SEQ ID NO: 579850 - RNA, 20 nt, Artificial Sequence
  Synthetic
ugaauuaagcccaaaguuag

SEQ ID NO: 579851 - RNA, 21 nt, Artificial Sequence
  Synthetic
augaauuaagcccaaaguuag

SEQ ID NO: 579852 - RNA, 22 nt, Artificial Sequence
  Synthetic
aaugaauuaagcccaaaguuag

SEQ ID NO: 579853 - RNA, 23 nt, Artificial Sequence
  Synthetic
gaaugaauuaagcccaaaguuag

SEQ ID NO: 579854 - RNA, 24 nt, Artificial Sequence
  Synthetic
agaaugaauuaagcccaaaguuag

SEQ ID NO: 579855 - RNA, 18 nt, Artificial Sequence
  Synthetic
aaauuuuggacaaguuag

SEQ ID NO: 579856 - RNA, 19 nt, Artificial Sequence
  Synthetic
aaaauuuuggacaaguuag

SEQ ID NO: 579857 - RNA, 20 nt, Artificial Sequence
  Synthetic
uaaaauuuuggacaaguuag

SEQ ID NO: 579858 - RNA, 21 nt, Artificial Sequence
  Synthetic
uuaaaauuuuggacaaguuag

SEQ ID NO: 579859 - RNA, 22 nt, Artificial Sequence
  Synthetic
guuaaaauuuuggacaaguuag

SEQ ID NO: 579860 - RNA, 23 nt, Artificial Sequence
  Synthetic
uguuaaaauuuuggacaaguuag

SEQ ID NO: 579861 - RNA, 24 nt, Artificial Sequence
  Synthetic
auguuaaaauuuuggacaaguuag

SEQ ID NO: 579862 - RNA, 18 nt, Artificial Sequence
  Synthetic
gcugcuccagcaaguuag

SEQ ID NO: 579863 - RNA, 19 nt, Artificial Sequence
  Synthetic
agcugcuccagcaaguuag

SEQ ID NO: 579864 - RNA, 20 nt, Artificial Sequence
  Synthetic
gagcugcuccagcaaguuag

SEQ ID NO: 579865 - RNA, 21 nt, Artificial Sequence
  Synthetic
ugagcugcuccagcaaguuag

SEQ ID NO: 579866 - RNA, 22 nt, Artificial Sequence
  Synthetic
gugagcugcuccagcaaguuag

SEQ ID NO: 579867 - RNA, 23 nt, Artificial Sequence
  Synthetic
ugugagcugcuccagcaaguuag

SEQ ID NO: 579868 - RNA, 24 nt, Artificial Sequence
  Synthetic
cugugagcugcuccagcaaguuag

SEQ ID NO: 579869 - RNA, 18 nt, Artificial Sequence
  Synthetic
aguuugaguggaaguuag

SEQ ID NO: 579870 - RNA, 19 nt, Artificial Sequence
  Synthetic
aaguuugaguggaaguuag

SEQ ID NO: 579871 - RNA, 20 nt, Artificial Sequence
  Synthetic
aaaguuugaguggaaguuag

SEQ ID NO: 579872 - RNA, 21 nt, Artificial Sequence
  Synthetic
uaaaguuugaguggaaguuag

SEQ ID NO: 579873 - RNA, 22 nt, Artificial Sequence
  Synthetic
uuaaaguuugaguggaaguuag

SEQ ID NO: 579874 - RNA, 23 nt, Artificial Sequence
  Synthetic
cuuaaaguuugaguggaaguuag

SEQ ID NO: 579875 - RNA, 24 nt, Artificial Sequence
  Synthetic
ccuuaaaguuugaguggaaguuag

SEQ ID NO: 579876 - RNA, 18 nt, Artificial Sequence
  Synthetic
augaaagccugaaguuag

SEQ ID NO: 579877 - RNA, 19 nt, Artificial Sequence
  Synthetic
gaugaaagccugaaguuag

SEQ ID NO: 579878 - RNA, 20 nt, Artificial Sequence
  Synthetic
agaugaaagccugaaguuag

SEQ ID NO: 579879 - RNA, 21 nt, Artificial Sequence
  Synthetic
aagaugaaagccugaaguuag

SEQ ID NO: 579880 - RNA, 22 nt, Artificial Sequence
  Synthetic
uaagaugaaagccugaaguuag

SEQ ID NO: 579881 - RNA, 23 nt, Artificial Sequence
  Synthetic
uuaagaugaaagccugaaguuag

SEQ ID NO: 579882 - RNA, 24 nt, Artificial Sequence
  Synthetic
cuuaagaugaaagccugaaguuag

SEQ ID NO: 579883 - RNA, 18 nt, Artificial Sequence
  Synthetic
uguauucauauaaguuag

SEQ ID NO: 579884 - RNA, 19 nt, Artificial Sequence
  Synthetic
uuguauucauauaaguuag

SEQ ID NO: 579885 - RNA, 20 nt, Artificial Sequence
  Synthetic
uuuguauucauauaaguuag

SEQ ID NO: 579886 - RNA, 21 nt, Artificial Sequence
  Synthetic
uuuuguauucauauaaguuag

SEQ ID NO: 579887 - RNA, 22 nt, Artificial Sequence
  Synthetic
uuuuuguauucauauaaguuag

SEQ ID NO: 579888 - RNA, 23 nt, Artificial Sequence
  Synthetic
auuuuuguauucauauaaguuag

SEQ ID NO: 579889 - RNA, 24 nt, Artificial Sequence
  Synthetic
aauuuuuguauucauauaaguuag

SEQ ID NO: 579890 - RNA, 18 nt, Artificial Sequence
  Synthetic
gcuugcaaucgcaguuag

SEQ ID NO: 579891 - RNA, 19 nt, Artificial Sequence
  Synthetic
agcuugcaaucgcaguuag

SEQ ID NO: 579892 - RNA, 20 nt, Artificial Sequence
  Synthetic
aagcuugcaaucgcaguuag

SEQ ID NO: 579893 - RNA, 21 nt, Artificial Sequence
  Synthetic
gaagcuugcaaucgcaguuag

SEQ ID NO: 579894 - RNA, 22 nt, Artificial Sequence
  Synthetic
ugaagcuugcaaucgcaguuag

SEQ ID NO: 579895 - RNA, 23 nt, Artificial Sequence
  Synthetic
cugaagcuugcaaucgcaguuag

SEQ ID NO: 579896 - RNA, 24 nt, Artificial Sequence
  Synthetic
gcugaagcuugcaaucgcaguuag

SEQ ID NO: 579897 - RNA, 18 nt, Artificial Sequence
  Synthetic
ucucacuacuguaguuag

SEQ ID NO: 579898 - RNA, 19 nt, Artificial Sequence
  Synthetic
uucucacuacuguaguuag

SEQ ID NO: 579899 - RNA, 20 nt, Artificial Sequence
  Synthetic
guucucacuacuguaguuag

SEQ ID NO: 579900 - RNA, 21 nt, Artificial Sequence
  Synthetic
uguucucacuacuguaguuag

SEQ ID NO: 579901 - RNA, 22 nt, Artificial Sequence
  Synthetic
uuguucucacuacuguaguuag

SEQ ID NO: 579902 - RNA, 23 nt, Artificial Sequence
  Synthetic
cuuguucucacuacuguaguuag

SEQ ID NO: 579903 - RNA, 24 nt, Artificial Sequence
  Synthetic
ucuuguucucacuacuguaguuag

SEQ ID NO: 579904 - RNA, 18 nt, Artificial Sequence
  Synthetic
uaugagagcaggcguuag

SEQ ID NO: 579905 - RNA, 19 nt, Artificial Sequence
  Synthetic
guaugagagcaggcguuag

SEQ ID NO: 579906 - RNA, 20 nt, Artificial Sequence
  Synthetic
uguaugagagcaggcguuag

SEQ ID NO: 579907 - RNA, 21 nt, Artificial Sequence
  Synthetic
cuguaugagagcaggcguuag

SEQ ID NO: 579908 - RNA, 22 nt, Artificial Sequence
  Synthetic
acuguaugagagcaggcguuag

SEQ ID NO: 579909 - RNA, 23 nt, Artificial Sequence
  Synthetic
cacuguaugagagcaggcguuag

SEQ ID NO: 579910 - RNA, 24 nt, Artificial Sequence
  Synthetic
ccacuguaugagagcaggcguuag

SEQ ID NO: 579911 - RNA, 18 nt, Artificial Sequence
  Synthetic
uagaugcagaaagguuag

SEQ ID NO: 579912 - RNA, 19 nt, Artificial Sequence
  Synthetic
guagaugcagaaagguuag

SEQ ID NO: 579913 - RNA, 20 nt, Artificial Sequence
  Synthetic
aguagaugcagaaagguuag

SEQ ID NO: 579914 - RNA, 21 nt, Artificial Sequence
  Synthetic
gaguagaugcagaaagguuag

SEQ ID NO: 579915 - RNA, 22 nt, Artificial Sequence
  Synthetic
agaguagaugcagaaagguuag

SEQ ID NO: 579916 - RNA, 23 nt, Artificial Sequence
  Synthetic
aagaguagaugcagaaagguuag

SEQ ID NO: 579917 - RNA, 24 nt, Artificial Sequence
  Synthetic
caagaguagaugcagaaagguuag

SEQ ID NO: 579918 - RNA, 18 nt, Artificial Sequence
  Synthetic
guugauguuaaagguuag

SEQ ID NO: 579919 - RNA, 19 nt, Artificial Sequence
  Synthetic
uguugauguuaaagguuag

SEQ ID NO: 579920 - RNA, 20 nt, Artificial Sequence
  Synthetic
guguugauguuaaagguuag

SEQ ID NO: 579921 - RNA, 21 nt, Artificial Sequence
  Synthetic
uguguugauguuaaagguuag

SEQ ID NO: 579922 - RNA, 22 nt, Artificial Sequence
  Synthetic
auguguugauguuaaagguuag

SEQ ID NO: 579923 - RNA, 23 nt, Artificial Sequence
  Synthetic
aauguguugauguuaaagguuag

SEQ ID NO: 579924 - RNA, 24 nt, Artificial Sequence
  Synthetic
aaauguguugauguuaaagguuag

SEQ ID NO: 579925 - RNA, 18 nt, Artificial Sequence
  Synthetic
aaaauuauucaagguuag

SEQ ID NO: 579926 - RNA, 19 nt, Artificial Sequence
  Synthetic
aaaaauuauucaagguuag

SEQ ID NO: 579927 - RNA, 20 nt, Artificial Sequence
  Synthetic
aaaaaauuauucaagguuag

SEQ ID NO: 579928 - RNA, 21 nt, Artificial Sequence
  Synthetic
uaaaaaauuauucaagguuag

SEQ ID NO: 579929 - RNA, 22 nt, Artificial Sequence
  Synthetic
cuaaaaaauuauucaagguuag

SEQ ID NO: 579930 - RNA, 23 nt, Artificial Sequence
  Synthetic
ccuaaaaaauuauucaagguuag

SEQ ID NO: 579931 - RNA, 24 nt, Artificial Sequence
  Synthetic
cccuaaaaaauuauucaagguuag

SEQ ID NO: 579932 - RNA, 18 nt, Artificial Sequence
  Synthetic
ccucaacccuaagguuag

SEQ ID NO: 579933 - RNA, 19 nt, Artificial Sequence
  Synthetic
accucaacccuaagguuag

SEQ ID NO: 579934 - RNA, 20 nt, Artificial Sequence
  Synthetic
gaccucaacccuaagguuag

SEQ ID NO: 579935 - RNA, 21 nt, Artificial Sequence
  Synthetic
ugaccucaacccuaagguuag

SEQ ID NO: 579936 - RNA, 22 nt, Artificial Sequence
  Synthetic
gugaccucaacccuaagguuag

SEQ ID NO: 579937 - RNA, 23 nt, Artificial Sequence
  Synthetic
ugugaccucaacccuaagguuag

SEQ ID NO: 579938 - RNA, 24 nt, Artificial Sequence
  Synthetic
uugugaccucaacccuaagguuag

SEQ ID NO: 579939 - RNA, 18 nt, Artificial Sequence
  Synthetic
agaaauaauaaggguuag

SEQ ID NO: 579940 - RNA, 19 nt, Artificial Sequence
  Synthetic
gagaaauaauaaggguuag

SEQ ID NO: 579941 - RNA, 20 nt, Artificial Sequence
  Synthetic
ugagaaauaauaaggguuag

SEQ ID NO: 579942 - RNA, 21 nt, Artificial Sequence
  Synthetic
uugagaaauaauaaggguuag

SEQ ID NO: 579943 - RNA, 22 nt, Artificial Sequence
  Synthetic
uuugagaaauaauaaggguuag

SEQ ID NO: 579944 - RNA, 23 nt, Artificial Sequence
  Synthetic
cuuugagaaauaauaaggguuag

SEQ ID NO: 579945 - RNA, 24 nt, Artificial Sequence
  Synthetic
ccuuugagaaauaauaaggguuag

SEQ ID NO: 579946 - RNA, 18 nt, Artificial Sequence
  Synthetic
aaagcggguagggguuag

SEQ ID NO: 579947 - RNA, 19 nt, Artificial Sequence
  Synthetic
gaaagcggguagggguuag

SEQ ID NO: 579948 - RNA, 20 nt, Artificial Sequence
  Synthetic
ggaaagcggguagggguuag

SEQ ID NO: 579949 - RNA, 21 nt, Artificial Sequence
  Synthetic
aggaaagcggguagggguuag

SEQ ID NO: 579950 - RNA, 22 nt, Artificial Sequence
  Synthetic
aaggaaagcggguagggguuag

SEQ ID NO: 579951 - RNA, 23 nt, Artificial Sequence
  Synthetic
aaaggaaagcggguagggguuag

SEQ ID NO: 579952 - RNA, 24 nt, Artificial Sequence
  Synthetic
caaaggaaagcggguagggguuag

SEQ ID NO: 579953 - RNA, 18 nt, Artificial Sequence
  Synthetic
caggggaugggggguuag

SEQ ID NO: 579954 - RNA, 19 nt, Artificial Sequence
  Synthetic
ucaggggaugggggguuag

SEQ ID NO: 579955 - RNA, 20 nt, Artificial Sequence
  Synthetic
cucaggggaugggggguuag

SEQ ID NO: 579956 - RNA, 21 nt, Artificial Sequence
  Synthetic
ucucaggggaugggggguuag

SEQ ID NO: 579957 - RNA, 22 nt, Artificial Sequence
  Synthetic
cucucaggggaugggggguuag

SEQ ID NO: 579958 - RNA, 23 nt, Artificial Sequence
  Synthetic
ccucucaggggaugggggguuag

SEQ ID NO: 579959 - RNA, 24 nt, Artificial Sequence
  Synthetic
gccucucaggggaugggggguuag

SEQ ID NO: 579960 - RNA, 18 nt, Artificial Sequence
  Synthetic
uuacuucugaaauguuag

SEQ ID NO: 579961 - RNA, 19 nt, Artificial Sequence
  Synthetic
auuacuucugaaauguuag

SEQ ID NO: 579962 - RNA, 20 nt, Artificial Sequence
  Synthetic
aauuacuucugaaauguuag

SEQ ID NO: 579963 - RNA, 21 nt, Artificial Sequence
  Synthetic
aaauuacuucugaaauguuag

SEQ ID NO: 579964 - RNA, 22 nt, Artificial Sequence
  Synthetic
gaaauuacuucugaaauguuag

SEQ ID NO: 579965 - RNA, 23 nt, Artificial Sequence
  Synthetic
ggaaauuacuucugaaauguuag

SEQ ID NO: 579966 - RNA, 24 nt, Artificial Sequence
  Synthetic
uggaaauuacuucugaaauguuag

SEQ ID NO: 579967 - RNA, 18 nt, Artificial Sequence
  Synthetic
ugauuuccugaauguuag

SEQ ID NO: 579968 - RNA, 19 nt, Artificial Sequence
  Synthetic
augauuuccugaauguuag

SEQ ID NO: 579969 - RNA, 20 nt, Artificial Sequence
  Synthetic
caugauuuccugaauguuag

SEQ ID NO: 579970 - RNA, 21 nt, Artificial Sequence
  Synthetic
acaugauuuccugaauguuag

SEQ ID NO: 579971 - RNA, 22 nt, Artificial Sequence
  Synthetic
gacaugauuuccugaauguuag

SEQ ID NO: 579972 - RNA, 23 nt, Artificial Sequence
  Synthetic
ugacaugauuuccugaauguuag

SEQ ID NO: 579973 - RNA, 24 nt, Artificial Sequence
  Synthetic
uugacaugauuuccugaauguuag

SEQ ID NO: 579974 - RNA, 18 nt, Artificial Sequence
  Synthetic
ccaacugcagcauguuag

SEQ ID NO: 579975 - RNA, 19 nt, Artificial Sequence
  Synthetic
cccaacugcagcauguuag

SEQ ID NO: 579976 - RNA, 20 nt, Artificial Sequence
  Synthetic
ucccaacugcagcauguuag

SEQ ID NO: 579977 - RNA, 21 nt, Artificial Sequence
  Synthetic
aucccaacugcagcauguuag

SEQ ID NO: 579978 - RNA, 22 nt, Artificial Sequence
  Synthetic
aaucccaacugcagcauguuag

SEQ ID NO: 579979 - RNA, 23 nt, Artificial Sequence
  Synthetic
aaaucccaacugcagcauguuag

SEQ ID NO: 579980 - RNA, 24 nt, Artificial Sequence
  Synthetic
caaaucccaacugcagcauguuag

SEQ ID NO: 579981 - RNA, 18 nt, Artificial Sequence
  Synthetic
uuuaggccucuauguuag

SEQ ID NO: 579982 - RNA, 19 nt, Artificial Sequence
  Synthetic
cuuuaggccucuauguuag

SEQ ID NO: 579983 - RNA, 20 nt, Artificial Sequence
  Synthetic
ccuuuaggccucuauguuag

SEQ ID NO: 579984 - RNA, 21 nt, Artificial Sequence
  Synthetic
accuuuaggccucuauguuag

SEQ ID NO: 579985 - RNA, 22 nt, Artificial Sequence
  Synthetic
aaccuuuaggccucuauguuag

SEQ ID NO: 579986 - RNA, 23 nt, Artificial Sequence
  Synthetic
aaaccuuuaggccucuauguuag

SEQ ID NO: 579987 - RNA, 24 nt, Artificial Sequence
  Synthetic
gaaaccuuuaggccucuauguuag

SEQ ID NO: 579988 - RNA, 18 nt, Artificial Sequence
  Synthetic
aguuauuuugccuguuag

SEQ ID NO: 579989 - RNA, 19 nt, Artificial Sequence
  Synthetic
uaguuauuuugccuguuag

SEQ ID NO: 579990 - RNA, 20 nt, Artificial Sequence
  Synthetic
uuaguuauuuugccuguuag

SEQ ID NO: 579991 - RNA, 21 nt, Artificial Sequence
  Synthetic
guuaguuauuuugccuguuag

SEQ ID NO: 579992 - RNA, 22 nt, Artificial Sequence
  Synthetic
gguuaguuauuuugccuguuag

SEQ ID NO: 579993 - RNA, 23 nt, Artificial Sequence
  Synthetic
ugguuaguuauuuugccuguuag

SEQ ID NO: 579994 - RNA, 24 nt, Artificial Sequence
  Synthetic
uugguuaguuauuuugccuguuag

SEQ ID NO: 579995 - RNA, 18 nt, Artificial Sequence
  Synthetic
auauucuccugcuguuag

SEQ ID NO: 579996 - RNA, 19 nt, Artificial Sequence
  Synthetic
uauauucuccugcuguuag

SEQ ID NO: 579997 - RNA, 20 nt, Artificial Sequence
  Synthetic
guauauucuccugcuguuag

SEQ ID NO: 579998 - RNA, 21 nt, Artificial Sequence
  Synthetic
uguauauucuccugcuguuag

SEQ ID NO: 579999 - RNA, 22 nt, Artificial Sequence
  Synthetic
auguauauucuccugcuguuag

SEQ ID NO: 580000 - RNA, 23 nt, Artificial Sequence
  Synthetic
aauguauauucuccugcuguuag

SEQ ID NO: 580001 - RNA, 24 nt, Artificial Sequence
  Synthetic
gaauguauauucuccugcuguuag

SEQ ID NO: 580002 - RNA, 18 nt, Artificial Sequence
  Synthetic
aguuuuagagucuguuag

SEQ ID NO: 580003 - RNA, 19 nt, Artificial Sequence
  Synthetic
aaguuuuagagucuguuag

SEQ ID NO: 580004 - RNA, 20 nt, Artificial Sequence
  Synthetic
aaaguuuuagagucuguuag

SEQ ID NO: 580005 - RNA, 21 nt, Artificial Sequence
  Synthetic
aaaaguuuuagagucuguuag

SEQ ID NO: 580006 - RNA, 22 nt, Artificial Sequence
  Synthetic
aaaaaguuuuagagucuguuag

SEQ ID NO: 580007 - RNA, 23 nt, Artificial Sequence
  Synthetic
aaaaaaguuuuagagucuguuag

SEQ ID NO: 580008 - RNA, 24 nt, Artificial Sequence
  Synthetic
aaaaaaaguuuuagagucuguuag

SEQ ID NO: 580009 - RNA, 18 nt, Artificial Sequence
  Synthetic
uagggcgaaguguguuag

SEQ ID NO: 580010 - RNA, 19 nt, Artificial Sequence
  Synthetic
uuagggcgaaguguguuag

SEQ ID NO: 580011 - RNA, 20 nt, Artificial Sequence
  Synthetic
guuagggcgaaguguguuag

SEQ ID NO: 580012 - RNA, 21 nt, Artificial Sequence
  Synthetic
gguuagggcgaaguguguuag

SEQ ID NO: 580013 - RNA, 22 nt, Artificial Sequence
  Synthetic
agguuagggcgaaguguguuag

SEQ ID NO: 580014 - RNA, 23 nt, Artificial Sequence
  Synthetic
aagguuagggcgaaguguguuag

SEQ ID NO: 580015 - RNA, 24 nt, Artificial Sequence
  Synthetic
aaagguuagggcgaaguguguuag

SEQ ID NO: 580016 - RNA, 18 nt, Artificial Sequence
  Synthetic
auuacaaaccuuuguuag

SEQ ID NO: 580017 - RNA, 19 nt, Artificial Sequence
  Synthetic
aauuacaaaccuuuguuag

SEQ ID NO: 580018 - RNA, 20 nt, Artificial Sequence
  Synthetic
aaauuacaaaccuuuguuag

SEQ ID NO: 580019 - RNA, 21 nt, Artificial Sequence
  Synthetic
gaaauuacaaaccuuuguuag

SEQ ID NO: 580020 - RNA, 22 nt, Artificial Sequence
  Synthetic
agaaauuacaaaccuuuguuag

SEQ ID NO: 580021 - RNA, 23 nt, Artificial Sequence
  Synthetic
uagaaauuacaaaccuuuguuag

SEQ ID NO: 580022 - RNA, 24 nt, Artificial Sequence
  Synthetic
auagaaauuacaaaccuuuguuag

SEQ ID NO: 580023 - RNA, 18 nt, Artificial Sequence
  Synthetic
auacgguuuuaaauuuag

SEQ ID NO: 580024 - RNA, 19 nt, Artificial Sequence
  Synthetic
gauacgguuuuaaauuuag

SEQ ID NO: 580025 - RNA, 20 nt, Artificial Sequence
  Synthetic
ugauacgguuuuaaauuuag

SEQ ID NO: 580026 - RNA, 21 nt, Artificial Sequence
  Synthetic
gugauacgguuuuaaauuuag

SEQ ID NO: 580027 - RNA, 22 nt, Artificial Sequence
  Synthetic
ugugauacgguuuuaaauuuag

SEQ ID NO: 580028 - RNA, 23 nt, Artificial Sequence
  Synthetic
uugugauacgguuuuaaauuuag

SEQ ID NO: 580029 - RNA, 24 nt, Artificial Sequence
  Synthetic
uuugugauacgguuuuaaauuuag

SEQ ID NO: 580030 - RNA, 18 nt, Artificial Sequence
  Synthetic
auuuaagaaacaauuuag

SEQ ID NO: 580031 - RNA, 19 nt, Artificial Sequence
  Synthetic
cauuuaagaaacaauuuag

SEQ ID NO: 580032 - RNA, 20 nt, Artificial Sequence
  Synthetic
ucauuuaagaaacaauuuag

SEQ ID NO: 580033 - RNA, 21 nt, Artificial Sequence
  Synthetic
uucauuuaagaaacaauuuag

SEQ ID NO: 580034 - RNA, 22 nt, Artificial Sequence
  Synthetic
uuucauuuaagaaacaauuuag

SEQ ID NO: 580035 - RNA, 23 nt, Artificial Sequence
  Synthetic
guuucauuuaagaaacaauuuag

SEQ ID NO: 580036 - RNA, 24 nt, Artificial Sequence
  Synthetic
aguuucauuuaagaaacaauuuag

SEQ ID NO: 580037 - RNA, 18 nt, Artificial Sequence
  Synthetic
cuaaacuguacaauuuag

SEQ ID NO: 580038 - RNA, 19 nt, Artificial Sequence
  Synthetic
ucuaaacuguacaauuuag

SEQ ID NO: 580039 - RNA, 20 nt, Artificial Sequence
  Synthetic
uucuaaacuguacaauuuag

SEQ ID NO: 580040 - RNA, 21 nt, Artificial Sequence
  Synthetic
uuucuaaacuguacaauuuag

SEQ ID NO: 580041 - RNA, 22 nt, Artificial Sequence
  Synthetic
guuucuaaacuguacaauuuag

SEQ ID NO: 580042 - RNA, 23 nt, Artificial Sequence
  Synthetic
gguuucuaaacuguacaauuuag

SEQ ID NO: 580043 - RNA, 24 nt, Artificial Sequence
  Synthetic
ggguuucuaaacuguacaauuuag

SEQ ID NO: 580044 - RNA, 18 nt, Artificial Sequence
  Synthetic
uugacucuaagaauuuag

SEQ ID NO: 580045 - RNA, 19 nt, Artificial Sequence
  Synthetic
guugacucuaagaauuuag

SEQ ID NO: 580046 - RNA, 20 nt, Artificial Sequence
  Synthetic
uguugacucuaagaauuuag

SEQ ID NO: 580047 - RNA, 21 nt, Artificial Sequence
  Synthetic
uuguugacucuaagaauuuag

SEQ ID NO: 580048 - RNA, 22 nt, Artificial Sequence
  Synthetic
auuguugacucuaagaauuuag

SEQ ID NO: 580049 - RNA, 23 nt, Artificial Sequence
  Synthetic
aauuguugacucuaagaauuuag

SEQ ID NO: 580050 - RNA, 24 nt, Artificial Sequence
  Synthetic
caauuguugacucuaagaauuuag

SEQ ID NO: 580051 - RNA, 18 nt, Artificial Sequence
  Synthetic
gcaaacacuuccauuuag

SEQ ID NO: 580052 - RNA, 19 nt, Artificial Sequence
  Synthetic
agcaaacacuuccauuuag

SEQ ID NO: 580053 - RNA, 20 nt, Artificial Sequence
  Synthetic
aagcaaacacuuccauuuag

SEQ ID NO: 580054 - RNA, 21 nt, Artificial Sequence
  Synthetic
aaagcaaacacuuccauuuag

SEQ ID NO: 580055 - RNA, 22 nt, Artificial Sequence
  Synthetic
aaaagcaaacacuuccauuuag

SEQ ID NO: 580056 - RNA, 23 nt, Artificial Sequence
  Synthetic
aaaaagcaaacacuuccauuuag

SEQ ID NO: 580057 - RNA, 24 nt, Artificial Sequence
  Synthetic
aaaaaagcaaacacuuccauuuag

SEQ ID NO: 580058 - RNA, 18 nt, Artificial Sequence
  Synthetic
aaaucagagugcauuuag

SEQ ID NO: 580059 - RNA, 19 nt, Artificial Sequence
  Synthetic
uaaaucagagugcauuuag

SEQ ID NO: 580060 - RNA, 20 nt, Artificial Sequence
  Synthetic
uuaaaucagagugcauuuag

SEQ ID NO: 580061 - RNA, 21 nt, Artificial Sequence
  Synthetic
auuaaaucagagugcauuuag

SEQ ID NO: 580062 - RNA, 22 nt, Artificial Sequence
  Synthetic
aauuaaaucagagugcauuuag

SEQ ID NO: 580063 - RNA, 23 nt, Artificial Sequence
  Synthetic
caauuaaaucagagugcauuuag

SEQ ID NO: 580064 - RNA, 24 nt, Artificial Sequence
  Synthetic
acaauuaaaucagagugcauuuag

SEQ ID NO: 580065 - RNA, 18 nt, Artificial Sequence
  Synthetic
ggauugagugucauuuag

SEQ ID NO: 580066 - RNA, 19 nt, Artificial Sequence
  Synthetic
aggauugagugucauuuag

SEQ ID NO: 580067 - RNA, 20 nt, Artificial Sequence
  Synthetic
uaggauugagugucauuuag

SEQ ID NO: 580068 - RNA, 21 nt, Artificial Sequence
  Synthetic
auaggauugagugucauuuag

SEQ ID NO: 580069 - RNA, 22 nt, Artificial Sequence
  Synthetic
aauaggauugagugucauuuag

SEQ ID NO: 580070 - RNA, 23 nt, Artificial Sequence
  Synthetic
gaauaggauugagugucauuuag

SEQ ID NO: 580071 - RNA, 24 nt, Artificial Sequence
  Synthetic
agaauaggauugagugucauuuag

SEQ ID NO: 580072 - RNA, 18 nt, Artificial Sequence
  Synthetic
uacaaaugucugauuuag

SEQ ID NO: 580073 - RNA, 19 nt, Artificial Sequence
  Synthetic
guacaaaugucugauuuag

SEQ ID NO: 580074 - RNA, 20 nt, Artificial Sequence
  Synthetic
uguacaaaugucugauuuag

SEQ ID NO: 580075 - RNA, 21 nt, Artificial Sequence
  Synthetic
auguacaaaugucugauuuag

SEQ ID NO: 580076 - RNA, 22 nt, Artificial Sequence
  Synthetic
uauguacaaaugucugauuuag

SEQ ID NO: 580077 - RNA, 23 nt, Artificial Sequence
  Synthetic
guauguacaaaugucugauuuag

SEQ ID NO: 580078 - RNA, 24 nt, Artificial Sequence
  Synthetic
aguauguacaaaugucugauuuag

SEQ ID NO: 580079 - RNA, 18 nt, Artificial Sequence
  Synthetic
uaauuuuuguauauuuag

SEQ ID NO: 580080 - RNA, 19 nt, Artificial Sequence
  Synthetic
cuaauuuuuguauauuuag

SEQ ID NO: 580081 - RNA, 20 nt, Artificial Sequence
  Synthetic
gcuaauuuuuguauauuuag

SEQ ID NO: 580082 - RNA, 21 nt, Artificial Sequence
  Synthetic
ggcuaauuuuuguauauuuag

SEQ ID NO: 580083 - RNA, 22 nt, Artificial Sequence
  Synthetic
cggcuaauuuuuguauauuuag

SEQ ID NO: 580084 - RNA, 23 nt, Artificial Sequence
  Synthetic
ccggcuaauuuuuguauauuuag

SEQ ID NO: 580085 - RNA, 24 nt, Artificial Sequence
  Synthetic
cccggcuaauuuuuguauauuuag

SEQ ID NO: 580086 - RNA, 18 nt, Artificial Sequence
  Synthetic
ggcuuuggaguuauuuag

SEQ ID NO: 580087 - RNA, 19 nt, Artificial Sequence
  Synthetic
uggcuuuggaguuauuuag

SEQ ID NO: 580088 - RNA, 20 nt, Artificial Sequence
  Synthetic
cuggcuuuggaguuauuuag

SEQ ID NO: 580089 - RNA, 21 nt, Artificial Sequence
  Synthetic
acuggcuuuggaguuauuuag

SEQ ID NO: 580090 - RNA, 22 nt, Artificial Sequence
  Synthetic
gacuggcuuuggaguuauuuag

SEQ ID NO: 580091 - RNA, 23 nt, Artificial Sequence
  Synthetic
ggacuggcuuuggaguuauuuag

SEQ ID NO: 580092 - RNA, 24 nt, Artificial Sequence
  Synthetic
aggacuggcuuuggaguuauuuag

SEQ ID NO: 580093 - RNA, 18 nt, Artificial Sequence
  Synthetic
caaaggaauuuuauuuag

SEQ ID NO: 580094 - RNA, 19 nt, Artificial Sequence
  Synthetic
acaaaggaauuuuauuuag

SEQ ID NO: 580095 - RNA, 20 nt, Artificial Sequence
  Synthetic
cacaaaggaauuuuauuuag

SEQ ID NO: 580096 - RNA, 21 nt, Artificial Sequence
  Synthetic
acacaaaggaauuuuauuuag

SEQ ID NO: 580097 - RNA, 22 nt, Artificial Sequence
  Synthetic
gacacaaaggaauuuuauuuag

SEQ ID NO: 580098 - RNA, 23 nt, Artificial Sequence
  Synthetic
ugacacaaaggaauuuuauuuag

SEQ ID NO: 580099 - RNA, 24 nt, Artificial Sequence
  Synthetic
uugacacaaaggaauuuuauuuag

SEQ ID NO: 580100 - RNA, 18 nt, Artificial Sequence
  Synthetic
gaggguccaagacuuuag

SEQ ID NO: 580101 - RNA, 19 nt, Artificial Sequence
  Synthetic
ugaggguccaagacuuuag

SEQ ID NO: 580102 - RNA, 20 nt, Artificial Sequence
  Synthetic
augaggguccaagacuuuag

SEQ ID NO: 580103 - RNA, 21 nt, Artificial Sequence
  Synthetic
uaugaggguccaagacuuuag

SEQ ID NO: 580104 - RNA, 22 nt, Artificial Sequence
  Synthetic
cuaugaggguccaagacuuuag

SEQ ID NO: 580105 - RNA, 23 nt, Artificial Sequence
  Synthetic
ccuaugaggguccaagacuuuag

SEQ ID NO: 580106 - RNA, 24 nt, Artificial Sequence
  Synthetic
gccuaugaggguccaagacuuuag

SEQ ID NO: 580107 - RNA, 18 nt, Artificial Sequence
  Synthetic
guuucaugcauacuuuag

SEQ ID NO: 580108 - RNA, 19 nt, Artificial Sequence
  Synthetic
aguuucaugcauacuuuag

SEQ ID NO: 580109 - RNA, 20 nt, Artificial Sequence
  Synthetic
gaguuucaugcauacuuuag

SEQ ID NO: 580110 - RNA, 21 nt, Artificial Sequence
  Synthetic
agaguuucaugcauacuuuag

SEQ ID NO: 580111 - RNA, 22 nt, Artificial Sequence
  Synthetic
aagaguuucaugcauacuuuag

SEQ ID NO: 580112 - RNA, 23 nt, Artificial Sequence
  Synthetic
uaagaguuucaugcauacuuuag

SEQ ID NO: 580113 - RNA, 24 nt, Artificial Sequence
  Synthetic
uuaagaguuucaugcauacuuuag

SEQ ID NO: 580114 - RNA, 18 nt, Artificial Sequence
  Synthetic
guaaauauaguacuuuag

SEQ ID NO: 580115 - RNA, 19 nt, Artificial Sequence
  Synthetic
uguaaauauaguacuuuag

SEQ ID NO: 580116 - RNA, 20 nt, Artificial Sequence
  Synthetic
guguaaauauaguacuuuag

SEQ ID NO: 580117 - RNA, 21 nt, Artificial Sequence
  Synthetic
uguguaaauauaguacuuuag

SEQ ID NO: 580118 - RNA, 22 nt, Artificial Sequence
  Synthetic
uuguguaaauauaguacuuuag

SEQ ID NO: 580119 - RNA, 23 nt, Artificial Sequence
  Synthetic
auuguguaaauauaguacuuuag

SEQ ID NO: 580120 - RNA, 24 nt, Artificial Sequence
  Synthetic
aauuguguaaauauaguacuuuag

SEQ ID NO: 580121 - RNA, 18 nt, Artificial Sequence
  Synthetic
uaauuuuuuguacuuuag

SEQ ID NO: 580122 - RNA, 19 nt, Artificial Sequence
  Synthetic
cuaauuuuuuguacuuuag

SEQ ID NO: 580123 - RNA, 20 nt, Artificial Sequence
  Synthetic
acuaauuuuuuguacuuuag

SEQ ID NO: 580124 - RNA, 21 nt, Artificial Sequence
  Synthetic
aacuaauuuuuuguacuuuag

SEQ ID NO: 580125 - RNA, 22 nt, Artificial Sequence
  Synthetic
caacuaauuuuuuguacuuuag

SEQ ID NO: 580126 - RNA, 23 nt, Artificial Sequence
  Synthetic
ccaacuaauuuuuuguacuuuag

SEQ ID NO: 580127 - RNA, 24 nt, Artificial Sequence
  Synthetic
cccaacuaauuuuuuguacuuuag

SEQ ID NO: 580128 - RNA, 18 nt, Artificial Sequence
  Synthetic
ugauuugaaugccuuuag

SEQ ID NO: 580129 - RNA, 19 nt, Artificial Sequence
  Synthetic
augauuugaaugccuuuag

SEQ ID NO: 580130 - RNA, 20 nt, Artificial Sequence
  Synthetic
aaugauuugaaugccuuuag

SEQ ID NO: 580131 - RNA, 21 nt, Artificial Sequence
  Synthetic
uaaugauuugaaugccuuuag

SEQ ID NO: 580132 - RNA, 22 nt, Artificial Sequence
  Synthetic
uuaaugauuugaaugccuuuag

SEQ ID NO: 580133 - RNA, 23 nt, Artificial Sequence
  Synthetic
auuaaugauuugaaugccuuuag

SEQ ID NO: 580134 - RNA, 24 nt, Artificial Sequence
  Synthetic
gauuaaugauuugaaugccuuuag

SEQ ID NO: 580135 - RNA, 18 nt, Artificial Sequence
  Synthetic
aucacauagaagcuuuag

SEQ ID NO: 580136 - RNA, 19 nt, Artificial Sequence
  Synthetic
aaucacauagaagcuuuag

SEQ ID NO: 580137 - RNA, 20 nt, Artificial Sequence
  Synthetic
uaaucacauagaagcuuuag

SEQ ID NO: 580138 - RNA, 21 nt, Artificial Sequence
  Synthetic
uuaaucacauagaagcuuuag

SEQ ID NO: 580139 - RNA, 22 nt, Artificial Sequence
  Synthetic
uuuaaucacauagaagcuuuag

SEQ ID NO: 580140 - RNA, 23 nt, Artificial Sequence
  Synthetic
cuuuaaucacauagaagcuuuag

SEQ ID NO: 580141 - RNA, 24 nt, Artificial Sequence
  Synthetic
ucuuuaaucacauagaagcuuuag

SEQ ID NO: 580142 - RNA, 18 nt, Artificial Sequence
  Synthetic
agaguagaacugcuuuag

SEQ ID NO: 580143 - RNA, 19 nt, Artificial Sequence
  Synthetic
gagaguagaacugcuuuag

SEQ ID NO: 580144 - RNA, 20 nt, Artificial Sequence
  Synthetic
agagaguagaacugcuuuag

SEQ ID NO: 580145 - RNA, 21 nt, Artificial Sequence
  Synthetic
gagagaguagaacugcuuuag

SEQ ID NO: 580146 - RNA, 22 nt, Artificial Sequence
  Synthetic
ggagagaguagaacugcuuuag

SEQ ID NO: 580147 - RNA, 23 nt, Artificial Sequence
  Synthetic
aggagagaguagaacugcuuuag

SEQ ID NO: 580148 - RNA, 24 nt, Artificial Sequence
  Synthetic
uaggagagaguagaacugcuuuag

SEQ ID NO: 580149 - RNA, 18 nt, Artificial Sequence
  Synthetic
uucugacuccugcuuuag

SEQ ID NO: 580150 - RNA, 19 nt, Artificial Sequence
  Synthetic
cuucugacuccugcuuuag

SEQ ID NO: 580151 - RNA, 20 nt, Artificial Sequence
  Synthetic
gcuucugacuccugcuuuag

SEQ ID NO: 580152 - RNA, 21 nt, Artificial Sequence
  Synthetic
ggcuucugacuccugcuuuag

SEQ ID NO: 580153 - RNA, 22 nt, Artificial Sequence
  Synthetic
aggcuucugacuccugcuuuag

SEQ ID NO: 580154 - RNA, 23 nt, Artificial Sequence
  Synthetic
aaggcuucugacuccugcuuuag

SEQ ID NO: 580155 - RNA, 24 nt, Artificial Sequence
  Synthetic
aaaggcuucugacuccugcuuuag

SEQ ID NO: 580156 - RNA, 18 nt, Artificial Sequence
  Synthetic
aauuuuuuguaucuuuag

SEQ ID NO: 580157 - RNA, 19 nt, Artificial Sequence
  Synthetic
uaauuuuuuguaucuuuag

SEQ ID NO: 580158 - RNA, 20 nt, Artificial Sequence
  Synthetic
cuaauuuuuuguaucuuuag

SEQ ID NO: 580159 - RNA, 21 nt, Artificial Sequence
  Synthetic
gcuaauuuuuuguaucuuuag

SEQ ID NO: 580160 - RNA, 22 nt, Artificial Sequence
  Synthetic
ggcuaauuuuuuguaucuuuag

SEQ ID NO: 580161 - RNA, 23 nt, Artificial Sequence
  Synthetic
uggcuaauuuuuuguaucuuuag

SEQ ID NO: 580162 - RNA, 24 nt, Artificial Sequence
  Synthetic
cuggcuaauuuuuuguaucuuuag

SEQ ID NO: 580163 - RNA, 18 nt, Artificial Sequence
  Synthetic
aaaauuccugaaguuuag

SEQ ID NO: 580164 - RNA, 19 nt, Artificial Sequence
  Synthetic
aaaaauuccugaaguuuag

SEQ ID NO: 580165 - RNA, 20 nt, Artificial Sequence
  Synthetic
aaaaaauuccugaaguuuag

SEQ ID NO: 580166 - RNA, 21 nt, Artificial Sequence
  Synthetic
uaaaaaauuccugaaguuuag

SEQ ID NO: 580167 - RNA, 22 nt, Artificial Sequence
  Synthetic
auaaaaaauuccugaaguuuag

SEQ ID NO: 580168 - RNA, 23 nt, Artificial Sequence
  Synthetic
gauaaaaaauuccugaaguuuag

SEQ ID NO: 580169 - RNA, 24 nt, Artificial Sequence
  Synthetic
ggauaaaaaauuccugaaguuuag

SEQ ID NO: 580170 - RNA, 18 nt, Artificial Sequence
  Synthetic
auggaggaacucguuuag

SEQ ID NO: 580171 - RNA, 19 nt, Artificial Sequence
  Synthetic
cauggaggaacucguuuag

SEQ ID NO: 580172 - RNA, 20 nt, Artificial Sequence
  Synthetic
ccauggaggaacucguuuag

SEQ ID NO: 580173 - RNA, 21 nt, Artificial Sequence
  Synthetic
cccauggaggaacucguuuag

SEQ ID NO: 580174 - RNA, 22 nt, Artificial Sequence
  Synthetic
ucccauggaggaacucguuuag

SEQ ID NO: 580175 - RNA, 23 nt, Artificial Sequence
  Synthetic
gucccauggaggaacucguuuag

SEQ ID NO: 580176 - RNA, 24 nt, Artificial Sequence
  Synthetic
agucccauggaggaacucguuuag

SEQ ID NO: 580177 - RNA, 18 nt, Artificial Sequence
  Synthetic
gaaagaaaaaggguuuag

SEQ ID NO: 580178 - RNA, 19 nt, Artificial Sequence
  Synthetic
ugaaagaaaaaggguuuag

SEQ ID NO: 580179 - RNA, 20 nt, Artificial Sequence
  Synthetic
uugaaagaaaaaggguuuag

SEQ ID NO: 580180 - RNA, 21 nt, Artificial Sequence
  Synthetic
guugaaagaaaaaggguuuag

SEQ ID NO: 580181 - RNA, 22 nt, Artificial Sequence
  Synthetic
uguugaaagaaaaaggguuuag

SEQ ID NO: 580182 - RNA, 23 nt, Artificial Sequence
  Synthetic
auguugaaagaaaaaggguuuag

SEQ ID NO: 580183 - RNA, 24 nt, Artificial Sequence
  Synthetic
cauguugaaagaaaaaggguuuag

SEQ ID NO: 580184 - RNA, 18 nt, Artificial Sequence
  Synthetic
caccagagacugguuuag

SEQ ID NO: 580185 - RNA, 19 nt, Artificial Sequence
  Synthetic
gcaccagagacugguuuag

SEQ ID NO: 580186 - RNA, 20 nt, Artificial Sequence
  Synthetic
ggcaccagagacugguuuag

SEQ ID NO: 580187 - RNA, 21 nt, Artificial Sequence
  Synthetic
cggcaccagagacugguuuag

SEQ ID NO: 580188 - RNA, 22 nt, Artificial Sequence
  Synthetic
ucggcaccagagacugguuuag

SEQ ID NO: 580189 - RNA, 23 nt, Artificial Sequence
  Synthetic
uucggcaccagagacugguuuag

SEQ ID NO: 580190 - RNA, 24 nt, Artificial Sequence
  Synthetic
uuucggcaccagagacugguuuag

SEQ ID NO: 580191 - RNA, 18 nt, Artificial Sequence
  Synthetic
ggaagaaagucuguuuag

SEQ ID NO: 580192 - RNA, 19 nt, Artificial Sequence
  Synthetic
uggaagaaagucuguuuag

SEQ ID NO: 580193 - RNA, 20 nt, Artificial Sequence
  Synthetic
auggaagaaagucuguuuag

SEQ ID NO: 580194 - RNA, 21 nt, Artificial Sequence
  Synthetic
uauggaagaaagucuguuuag

SEQ ID NO: 580195 - RNA, 22 nt, Artificial Sequence
  Synthetic
auauggaagaaagucuguuuag

SEQ ID NO: 580196 - RNA, 23 nt, Artificial Sequence
  Synthetic
cauauggaagaaagucuguuuag

SEQ ID NO: 580197 - RNA, 24 nt, Artificial Sequence
  Synthetic
ccauauggaagaaagucuguuuag

SEQ ID NO: 580198 - RNA, 18 nt, Artificial Sequence
  Synthetic
aauacuuucaguguuuag

SEQ ID NO: 580199 - RNA, 19 nt, Artificial Sequence
  Synthetic
aaauacuuucaguguuuag

SEQ ID NO: 580200 - RNA, 20 nt, Artificial Sequence
  Synthetic
uaaauacuuucaguguuuag

SEQ ID NO: 580201 - RNA, 21 nt, Artificial Sequence
  Synthetic
uuaaauacuuucaguguuuag

SEQ ID NO: 580202 - RNA, 22 nt, Artificial Sequence
  Synthetic
uuuaaauacuuucaguguuuag

SEQ ID NO: 580203 - RNA, 23 nt, Artificial Sequence
  Synthetic
uuuuaaauacuuucaguguuuag

SEQ ID NO: 580204 - RNA, 24 nt, Artificial Sequence
  Synthetic
uuuuuaaauacuuucaguguuuag

SEQ ID NO: 580205 - RNA, 18 nt, Artificial Sequence
  Synthetic
uuuuccaacacauuuuag

SEQ ID NO: 580206 - RNA, 19 nt, Artificial Sequence
  Synthetic
auuuuccaacacauuuuag

SEQ ID NO: 580207 - RNA, 20 nt, Artificial Sequence
  Synthetic
cauuuuccaacacauuuuag

SEQ ID NO: 580208 - RNA, 21 nt, Artificial Sequence
  Synthetic
ucauuuuccaacacauuuuag

SEQ ID NO: 580209 - RNA, 22 nt, Artificial Sequence
  Synthetic
aucauuuuccaacacauuuuag

SEQ ID NO: 580210 - RNA, 23 nt, Artificial Sequence
  Synthetic
uaucauuuuccaacacauuuuag

SEQ ID NO: 580211 - RNA, 24 nt, Artificial Sequence
  Synthetic
cuaucauuuuccaacacauuuuag

SEQ ID NO: 580212 - RNA, 18 nt, Artificial Sequence
  Synthetic
cuccuacacacauuuuag

SEQ ID NO: 580213 - RNA, 19 nt, Artificial Sequence
  Synthetic
ucuccuacacacauuuuag

SEQ ID NO: 580214 - RNA, 20 nt, Artificial Sequence
  Synthetic
uucuccuacacacauuuuag

SEQ ID NO: 580215 - RNA, 21 nt, Artificial Sequence
  Synthetic
uuucuccuacacacauuuuag

SEQ ID NO: 580216 - RNA, 22 nt, Artificial Sequence
  Synthetic
uuuucuccuacacacauuuuag

SEQ ID NO: 580217 - RNA, 23 nt, Artificial Sequence
  Synthetic
uuuuucuccuacacacauuuuag

SEQ ID NO: 580218 - RNA, 24 nt, Artificial Sequence
  Synthetic
uuuuuucuccuacacacauuuuag

SEQ ID NO: 580219 - RNA, 18 nt, Artificial Sequence
  Synthetic
aaggguaagacauuuuag

SEQ ID NO: 580220 - RNA, 19 nt, Artificial Sequence
  Synthetic
gaaggguaagacauuuuag

SEQ ID NO: 580221 - RNA, 20 nt, Artificial Sequence
  Synthetic
ugaaggguaagacauuuuag

SEQ ID NO: 580222 - RNA, 21 nt, Artificial Sequence
  Synthetic
gugaaggguaagacauuuuag

SEQ ID NO: 580223 - RNA, 22 nt, Artificial Sequence
  Synthetic
ugugaaggguaagacauuuuag

SEQ ID NO: 580224 - RNA, 23 nt, Artificial Sequence
  Synthetic
augugaaggguaagacauuuuag

SEQ ID NO: 580225 - RNA, 24 nt, Artificial Sequence
  Synthetic
uaugugaaggguaagacauuuuag

SEQ ID NO: 580226 - RNA, 18 nt, Artificial Sequence
  Synthetic
ugguugguuacauuuuag

SEQ ID NO: 580227 - RNA, 19 nt, Artificial Sequence
  Synthetic
gugguugguuacauuuuag

SEQ ID NO: 580228 - RNA, 20 nt, Artificial Sequence
  Synthetic
ugugguugguuacauuuuag

SEQ ID NO: 580229 - RNA, 21 nt, Artificial Sequence
  Synthetic
uugugguugguuacauuuuag

SEQ ID NO: 580230 - RNA, 22 nt, Artificial Sequence
  Synthetic
uuugugguugguuacauuuuag

SEQ ID NO: 580231 - RNA, 23 nt, Artificial Sequence
  Synthetic
cuuugugguugguuacauuuuag

SEQ ID NO: 580232 - RNA, 24 nt, Artificial Sequence
  Synthetic
ucuuugugguugguuacauuuuag

SEQ ID NO: 580233 - RNA, 18 nt, Artificial Sequence
  Synthetic
aguucauuagcauuuuag

SEQ ID NO: 580234 - RNA, 19 nt, Artificial Sequence
  Synthetic
uaguucauuagcauuuuag

SEQ ID NO: 580235 - RNA, 20 nt, Artificial Sequence
  Synthetic
auaguucauuagcauuuuag

SEQ ID NO: 580236 - RNA, 21 nt, Artificial Sequence
  Synthetic
gauaguucauuagcauuuuag

SEQ ID NO: 580237 - RNA, 22 nt, Artificial Sequence
  Synthetic
ugauaguucauuagcauuuuag

SEQ ID NO: 580238 - RNA, 23 nt, Artificial Sequence
  Synthetic
uugauaguucauuagcauuuuag

SEQ ID NO: 580239 - RNA, 24 nt, Artificial Sequence
  Synthetic
auugauaguucauuagcauuuuag

SEQ ID NO: 580240 - RNA, 18 nt, Artificial Sequence
  Synthetic
gcuagcuguucauuuuag

SEQ ID NO: 580241 - RNA, 19 nt, Artificial Sequence
  Synthetic
ggcuagcuguucauuuuag

SEQ ID NO: 580242 - RNA, 20 nt, Artificial Sequence
  Synthetic
uggcuagcuguucauuuuag

SEQ ID NO: 580243 - RNA, 21 nt, Artificial Sequence
  Synthetic
cuggcuagcuguucauuuuag

SEQ ID NO: 580244 - RNA, 22 nt, Artificial Sequence
  Synthetic
gcuggcuagcuguucauuuuag

SEQ ID NO: 580245 - RNA, 23 nt, Artificial Sequence
  Synthetic
agcuggcuagcuguucauuuuag

SEQ ID NO: 580246 - RNA, 24 nt, Artificial Sequence
  Synthetic
aagcuggcuagcuguucauuuuag

SEQ ID NO: 580247 - RNA, 18 nt, Artificial Sequence
  Synthetic
uuuccuaugauauuuuag

SEQ ID NO: 580248 - RNA, 19 nt, Artificial Sequence
  Synthetic
auuuccuaugauauuuuag

SEQ ID NO: 580249 - RNA, 20 nt, Artificial Sequence
  Synthetic
cauuuccuaugauauuuuag

SEQ ID NO: 580250 - RNA, 21 nt, Artificial Sequence
  Synthetic
ucauuuccuaugauauuuuag

SEQ ID NO: 580251 - RNA, 22 nt, Artificial Sequence
  Synthetic
aucauuuccuaugauauuuuag

SEQ ID NO: 580252 - RNA, 23 nt, Artificial Sequence
  Synthetic
uaucauuuccuaugauauuuuag

SEQ ID NO: 580253 - RNA, 24 nt, Artificial Sequence
  Synthetic
cuaucauuuccuaugauauuuuag

SEQ ID NO: 580254 - RNA, 18 nt, Artificial Sequence
  Synthetic
auuauuuuacuauuuuag

SEQ ID NO: 580255 - RNA, 19 nt, Artificial Sequence
  Synthetic
uauuauuuuacuauuuuag

SEQ ID NO: 580256 - RNA, 20 nt, Artificial Sequence
  Synthetic
auauuauuuuacuauuuuag

SEQ ID NO: 580257 - RNA, 21 nt, Artificial Sequence
  Synthetic
uauauuauuuuacuauuuuag

SEQ ID NO: 580258 - RNA, 22 nt, Artificial Sequence
  Synthetic
auauauuauuuuacuauuuuag

SEQ ID NO: 580259 - RNA, 23 nt, Artificial Sequence
  Synthetic
aauauauuauuuuacuauuuuag

SEQ ID NO: 580260 - RNA, 24 nt, Artificial Sequence
  Synthetic
gaauauauuauuuuacuauuuuag

SEQ ID NO: 580261 - RNA, 18 nt, Artificial Sequence
  Synthetic
ucauggucaaacuuuuag

SEQ ID NO: 580262 - RNA, 19 nt, Artificial Sequence
  Synthetic
uucauggucaaacuuuuag

SEQ ID NO: 580263 - RNA, 20 nt, Artificial Sequence
  Synthetic
uuucauggucaaacuuuuag

SEQ ID NO: 580264 - RNA, 21 nt, Artificial Sequence
  Synthetic
uuuucauggucaaacuuuuag

SEQ ID NO: 580265 - RNA, 22 nt, Artificial Sequence
  Synthetic
guuuucauggucaaacuuuuag

SEQ ID NO: 580266 - RNA, 23 nt, Artificial Sequence
  Synthetic
uguuuucauggucaaacuuuuag

SEQ ID NO: 580267 - RNA, 24 nt, Artificial Sequence
  Synthetic
uuguuuucauggucaaacuuuuag

SEQ ID NO: 580268 - RNA, 18 nt, Artificial Sequence
  Synthetic
agaaaguaacacuuuuag

SEQ ID NO: 580269 - RNA, 19 nt, Artificial Sequence
  Synthetic
aagaaaguaacacuuuuag

SEQ ID NO: 580270 - RNA, 20 nt, Artificial Sequence
  Synthetic
gaagaaaguaacacuuuuag

SEQ ID NO: 580271 - RNA, 21 nt, Artificial Sequence
  Synthetic
ugaagaaaguaacacuuuuag

SEQ ID NO: 580272 - RNA, 22 nt, Artificial Sequence
  Synthetic
uugaagaaaguaacacuuuuag

SEQ ID NO: 580273 - RNA, 23 nt, Artificial Sequence
  Synthetic
uuugaagaaaguaacacuuuuag

SEQ ID NO: 580274 - RNA, 24 nt, Artificial Sequence
  Synthetic
auuugaagaaaguaacacuuuuag

SEQ ID NO: 580275 - RNA, 18 nt, Artificial Sequence
  Synthetic
uaaaugcagcacuuuuag

SEQ ID NO: 580276 - RNA, 19 nt, Artificial Sequence
  Synthetic
cuaaaugcagcacuuuuag

SEQ ID NO: 580277 - RNA, 20 nt, Artificial Sequence
  Synthetic
ccuaaaugcagcacuuuuag

SEQ ID NO: 580278 - RNA, 21 nt, Artificial Sequence
  Synthetic
accuaaaugcagcacuuuuag

SEQ ID NO: 580279 - RNA, 22 nt, Artificial Sequence
  Synthetic
aaccuaaaugcagcacuuuuag

SEQ ID NO: 580280 - RNA, 23 nt, Artificial Sequence
  Synthetic
caaccuaaaugcagcacuuuuag

SEQ ID NO: 580281 - RNA, 24 nt, Artificial Sequence
  Synthetic
acaaccuaaaugcagcacuuuuag

SEQ ID NO: 580282 - RNA, 18 nt, Artificial Sequence
  Synthetic
gcuucuacuggcuuuuag

SEQ ID NO: 580283 - RNA, 19 nt, Artificial Sequence
  Synthetic
ggcuucuacuggcuuuuag

SEQ ID NO: 580284 - RNA, 20 nt, Artificial Sequence
  Synthetic
aggcuucuacuggcuuuuag

SEQ ID NO: 580285 - RNA, 21 nt, Artificial Sequence
  Synthetic
gaggcuucuacuggcuuuuag

SEQ ID NO: 580286 - RNA, 22 nt, Artificial Sequence
  Synthetic
agaggcuucuacuggcuuuuag

SEQ ID NO: 580287 - RNA, 23 nt, Artificial Sequence
  Synthetic
cagaggcuucuacuggcuuuuag

SEQ ID NO: 580288 - RNA, 24 nt, Artificial Sequence
  Synthetic
ccagaggcuucuacuggcuuuuag

SEQ ID NO: 580289 - RNA, 18 nt, Artificial Sequence
  Synthetic
auaguguguaucuuuuag

SEQ ID NO: 580290 - RNA, 19 nt, Artificial Sequence
  Synthetic
uauaguguguaucuuuuag

SEQ ID NO: 580291 - RNA, 20 nt, Artificial Sequence
  Synthetic
auauaguguguaucuuuuag

SEQ ID NO: 580292 - RNA, 21 nt, Artificial Sequence
  Synthetic
uauauaguguguaucuuuuag

SEQ ID NO: 580293 - RNA, 22 nt, Artificial Sequence
  Synthetic
uuauauaguguguaucuuuuag

SEQ ID NO: 580294 - RNA, 23 nt, Artificial Sequence
  Synthetic
uuuauauaguguguaucuuuuag

SEQ ID NO: 580295 - RNA, 24 nt, Artificial Sequence
  Synthetic
uuuuauauaguguguaucuuuuag

SEQ ID NO: 580296 - RNA, 18 nt, Artificial Sequence
  Synthetic
uucucacauggguuuuag

SEQ ID NO: 580297 - RNA, 19 nt, Artificial Sequence
  Synthetic
auucucacauggguuuuag

SEQ ID NO: 580298 - RNA, 20 nt, Artificial Sequence
  Synthetic
gauucucacauggguuuuag

SEQ ID NO: 580299 - RNA, 21 nt, Artificial Sequence
  Synthetic
ggauucucacauggguuuuag

SEQ ID NO: 580300 - RNA, 22 nt, Artificial Sequence
  Synthetic
uggauucucacauggguuuuag

SEQ ID NO: 580301 - RNA, 23 nt, Artificial Sequence
  Synthetic
auggauucucacauggguuuuag

SEQ ID NO: 580302 - RNA, 24 nt, Artificial Sequence
  Synthetic
uauggauucucacauggguuuuag

SEQ ID NO: 580303 - RNA, 18 nt, Artificial Sequence
  Synthetic
cauucuaauaauuuuuag

SEQ ID NO: 580304 - RNA, 19 nt, Artificial Sequence
  Synthetic
ucauucuaauaauuuuuag

SEQ ID NO: 580305 - RNA, 20 nt, Artificial Sequence
  Synthetic
uucauucuaauaauuuuuag

SEQ ID NO: 580306 - RNA, 21 nt, Artificial Sequence
  Synthetic
auucauucuaauaauuuuuag

SEQ ID NO: 580307 - RNA, 22 nt, Artificial Sequence
  Synthetic
aauucauucuaauaauuuuuag

SEQ ID NO: 580308 - RNA, 23 nt, Artificial Sequence
  Synthetic
gaauucauucuaauaauuuuuag

SEQ ID NO: 580309 - RNA, 24 nt, Artificial Sequence
  Synthetic
cgaauucauucuaauaauuuuuag

SEQ ID NO: 580310 - RNA, 18 nt, Artificial Sequence
  Synthetic
uaauuuucauauuuuuag

SEQ ID NO: 580311 - RNA, 19 nt, Artificial Sequence
  Synthetic
cuaauuuucauauuuuuag

SEQ ID NO: 580312 - RNA, 20 nt, Artificial Sequence
  Synthetic
gcuaauuuucauauuuuuag

SEQ ID NO: 580313 - RNA, 21 nt, Artificial Sequence
  Synthetic
ggcuaauuuucauauuuuuag

SEQ ID NO: 580314 - RNA, 22 nt, Artificial Sequence
  Synthetic
uggcuaauuuucauauuuuuag

SEQ ID NO: 580315 - RNA, 23 nt, Artificial Sequence
  Synthetic
cuggcuaauuuucauauuuuuag

SEQ ID NO: 580316 - RNA, 24 nt, Artificial Sequence
  Synthetic
ccuggcuaauuuucauauuuuuag

SEQ ID NO: 580317 - RNA, 18 nt, Artificial Sequence
  Synthetic
ucauuuucauauuuuuag

SEQ ID NO: 580318 - RNA, 19 nt, Artificial Sequence
  Synthetic
cucauuuucauauuuuuag

SEQ ID NO: 580319 - RNA, 20 nt, Artificial Sequence
  Synthetic
gcucauuuucauauuuuuag

SEQ ID NO: 580320 - RNA, 21 nt, Artificial Sequence
  Synthetic
ggcucauuuucauauuuuuag

SEQ ID NO: 580321 - RNA, 22 nt, Artificial Sequence
  Synthetic
uggcucauuuucauauuuuuag

SEQ ID NO: 580322 - RNA, 23 nt, Artificial Sequence
  Synthetic
cuggcucauuuucauauuuuuag

SEQ ID NO: 580323 - RNA, 24 nt, Artificial Sequence
  Synthetic
gcuggcucauuuucauauuuuuag

SEQ ID NO: 580324 - RNA, 18 nt, Artificial Sequence
  Synthetic
aauuuuuuauauuuuuag

SEQ ID NO: 580325 - RNA, 19 nt, Artificial Sequence
  Synthetic
uaauuuuuuauauuuuuag

SEQ ID NO: 580326 - RNA, 20 nt, Artificial Sequence
  Synthetic
cuaauuuuuuauauuuuuag

SEQ ID NO: 580327 - RNA, 21 nt, Artificial Sequence
  Synthetic
gcuaauuuuuuauauuuuuag

SEQ ID NO: 580328 - RNA, 22 nt, Artificial Sequence
  Synthetic
ggcuaauuuuuuauauuuuuag

SEQ ID NO: 580329 - RNA, 23 nt, Artificial Sequence
  Synthetic
aggcuaauuuuuuauauuuuuag

SEQ ID NO: 580330 - RNA, 24 nt, Artificial Sequence
  Synthetic
caggcuaauuuuuuauauuuuuag

SEQ ID NO: 580331 - RNA, 23 nt, Artificial Sequence
  Synthetic
cggcuaauuuuuuauauuuuuag

SEQ ID NO: 580332 - RNA, 24 nt, Artificial Sequence
  Synthetic
ccggcuaauuuuuuauauuuuuag

SEQ ID NO: 580333 - RNA, 18 nt, Artificial Sequence
  Synthetic
aauuuuuucuauuuuuag

SEQ ID NO: 580334 - RNA, 19 nt, Artificial Sequence
  Synthetic
uaauuuuuucuauuuuuag

SEQ ID NO: 580335 - RNA, 20 nt, Artificial Sequence
  Synthetic
cuaauuuuuucuauuuuuag

SEQ ID NO: 580336 - RNA, 21 nt, Artificial Sequence
  Synthetic
gcuaauuuuuucuauuuuuag

SEQ ID NO: 580337 - RNA, 22 nt, Artificial Sequence
  Synthetic
ggcuaauuuuuucuauuuuuag

SEQ ID NO: 580338 - RNA, 23 nt, Artificial Sequence
  Synthetic
uggcuaauuuuuucuauuuuuag

SEQ ID NO: 580339 - RNA, 24 nt, Artificial Sequence
  Synthetic
cuggcuaauuuuuucuauuuuuag

SEQ ID NO: 580340 - RNA, 18 nt, Artificial Sequence
  Synthetic
aauuuuugguauuuuuag

SEQ ID NO: 580341 - RNA, 19 nt, Artificial Sequence
  Synthetic
uaauuuuugguauuuuuag

SEQ ID NO: 580342 - RNA, 20 nt, Artificial Sequence
  Synthetic
cuaauuuuugguauuuuuag

SEQ ID NO: 580343 - RNA, 21 nt, Artificial Sequence
  Synthetic
gcuaauuuuugguauuuuuag

SEQ ID NO: 580344 - RNA, 22 nt, Artificial Sequence
  Synthetic
agcuaauuuuugguauuuuuag

SEQ ID NO: 580345 - RNA, 23 nt, Artificial Sequence
  Synthetic
cagcuaauuuuugguauuuuuag

SEQ ID NO: 580346 - RNA, 24 nt, Artificial Sequence
  Synthetic
ccagcuaauuuuugguauuuuuag

SEQ ID NO: 580347 - RNA, 18 nt, Artificial Sequence
  Synthetic
guguguguguauuuuuag

SEQ ID NO: 580348 - RNA, 19 nt, Artificial Sequence
  Synthetic
uguguguguguauuuuuag

SEQ ID NO: 580349 - RNA, 20 nt, Artificial Sequence
  Synthetic
guguguguguguauuuuuag

SEQ ID NO: 580350 - RNA, 21 nt, Artificial Sequence
  Synthetic
uguguguguguguauuuuuag

SEQ ID NO: 580351 - RNA, 22 nt, Artificial Sequence
  Synthetic
guguguguguguguauuuuuag

SEQ ID NO: 580352 - RNA, 23 nt, Artificial Sequence
  Synthetic
uguguguguguguguauuuuuag

SEQ ID NO: 580353 - RNA, 24 nt, Artificial Sequence
  Synthetic
guguguguguguguguauuuuuag

SEQ ID NO: 580354 - RNA, 21 nt, Artificial Sequence
  Synthetic
cagcuaauuuuguauuuuuag

SEQ ID NO: 580355 - RNA, 22 nt, Artificial Sequence
  Synthetic
ccagcuaauuuuguauuuuuag

SEQ ID NO: 580356 - RNA, 23 nt, Artificial Sequence
  Synthetic
cccagcuaauuuuguauuuuuag

SEQ ID NO: 580357 - RNA, 24 nt, Artificial Sequence
  Synthetic
acccagcuaauuuuguauuuuuag

SEQ ID NO: 580358 - RNA, 21 nt, Artificial Sequence
  Synthetic
cggcuaauuuuguauuuuuag

SEQ ID NO: 580359 - RNA, 22 nt, Artificial Sequence
  Synthetic
ccggcuaauuuuguauuuuuag

SEQ ID NO: 580360 - RNA, 23 nt, Artificial Sequence
  Synthetic
cccggcuaauuuuguauuuuuag

SEQ ID NO: 580361 - RNA, 24 nt, Artificial Sequence
  Synthetic
gcccggcuaauuuuguauuuuuag

SEQ ID NO: 580362 - RNA, 21 nt, Artificial Sequence
  Synthetic
uggcuaauuuuguauuuuuag

SEQ ID NO: 580363 - RNA, 22 nt, Artificial Sequence
  Synthetic
cuggcuaauuuuguauuuuuag

SEQ ID NO: 580364 - RNA, 23 nt, Artificial Sequence
  Synthetic
ccuggcuaauuuuguauuuuuag

SEQ ID NO: 580365 - RNA, 24 nt, Artificial Sequence
  Synthetic
gccuggcuaauuuuguauuuuuag

SEQ ID NO: 580366 - RNA, 18 nt, Artificial Sequence
  Synthetic
cugauuuuguauuuuuag

SEQ ID NO: 580367 - RNA, 19 nt, Artificial Sequence
  Synthetic
gcugauuuuguauuuuuag

SEQ ID NO: 580368 - RNA, 20 nt, Artificial Sequence
  Synthetic
ggcugauuuuguauuuuuag

SEQ ID NO: 580369 - RNA, 21 nt, Artificial Sequence
  Synthetic
uggcugauuuuguauuuuuag

SEQ ID NO: 580370 - RNA, 22 nt, Artificial Sequence
  Synthetic
cuggcugauuuuguauuuuuag

SEQ ID NO: 580371 - RNA, 23 nt, Artificial Sequence
  Synthetic
ccuggcugauuuuguauuuuuag

SEQ ID NO: 580372 - RNA, 24 nt, Artificial Sequence
  Synthetic
gccuggcugauuuuguauuuuuag

SEQ ID NO: 580373 - RNA, 18 nt, Artificial Sequence
  Synthetic
caauuuuuguauuuuuag

SEQ ID NO: 580374 - RNA, 19 nt, Artificial Sequence
  Synthetic
ccaauuuuuguauuuuuag

SEQ ID NO: 580375 - RNA, 20 nt, Artificial Sequence
  Synthetic
gccaauuuuuguauuuuuag

SEQ ID NO: 580376 - RNA, 21 nt, Artificial Sequence
  Synthetic
ggccaauuuuuguauuuuuag

SEQ ID NO: 580377 - RNA, 22 nt, Artificial Sequence
  Synthetic
uggccaauuuuuguauuuuuag

SEQ ID NO: 580378 - RNA, 23 nt, Artificial Sequence
  Synthetic
cuggccaauuuuuguauuuuuag

SEQ ID NO: 580379 - RNA, 24 nt, Artificial Sequence
  Synthetic
ccuggccaauuuuuguauuuuuag

SEQ ID NO: 580380 - RNA, 21 nt, Artificial Sequence
  Synthetic
agcuaauuuuuguauuuuuag

SEQ ID NO: 580381 - RNA, 22 nt, Artificial Sequence
  Synthetic
cagcuaauuuuuguauuuuuag

SEQ ID NO: 580382 - RNA, 23 nt, Artificial Sequence
  Synthetic
ccagcuaauuuuuguauuuuuag

SEQ ID NO: 580383 - RNA, 24 nt, Artificial Sequence
  Synthetic
gccagcuaauuuuuguauuuuuag

SEQ ID NO: 580384 - RNA, 23 nt, Artificial Sequence
  Synthetic
ucagcuaauuuuuguauuuuuag

SEQ ID NO: 580385 - RNA, 24 nt, Artificial Sequence
  Synthetic
cucagcuaauuuuuguauuuuuag

SEQ ID NO: 580386 - RNA, 21 nt, Artificial Sequence
  Synthetic
ggcuaauuuuuguauuuuuag

SEQ ID NO: 580387 - RNA, 22 nt, Artificial Sequence
  Synthetic
cggcuaauuuuuguauuuuuag

SEQ ID NO: 580388 - RNA, 23 nt, Artificial Sequence
  Synthetic
acggcuaauuuuuguauuuuuag

SEQ ID NO: 580389 - RNA, 24 nt, Artificial Sequence
  Synthetic
cacggcuaauuuuuguauuuuuag

SEQ ID NO: 580390 - RNA, 23 nt, Artificial Sequence
  Synthetic
ccggcuaauuuuuguauuuuuag

SEQ ID NO: 580391 - RNA, 24 nt, Artificial Sequence
  Synthetic
cccggcuaauuuuuguauuuuuag

SEQ ID NO: 580392 - RNA, 22 nt, Artificial Sequence
  Synthetic
uggcuaauuuuuguauuuuuag

SEQ ID NO: 580393 - RNA, 23 nt, Artificial Sequence
  Synthetic
cuggcuaauuuuuguauuuuuag

SEQ ID NO: 580394 - RNA, 24 nt, Artificial Sequence
  Synthetic
ccuggcuaauuuuuguauuuuuag

SEQ ID NO: 580395 - RNA, 18 nt, Artificial Sequence
  Synthetic
uaguuuuuguauuuuuag

SEQ ID NO: 580396 - RNA, 19 nt, Artificial Sequence
  Synthetic
cuaguuuuuguauuuuuag

SEQ ID NO: 580397 - RNA, 20 nt, Artificial Sequence
  Synthetic
gcuaguuuuuguauuuuuag

SEQ ID NO: 580398 - RNA, 21 nt, Artificial Sequence
  Synthetic
ggcuaguuuuuguauuuuuag

SEQ ID NO: 580399 - RNA, 22 nt, Artificial Sequence
  Synthetic
aggcuaguuuuuguauuuuuag

SEQ ID NO: 580400 - RNA, 23 nt, Artificial Sequence
  Synthetic
caggcuaguuuuuguauuuuuag

SEQ ID NO: 580401 - RNA, 24 nt, Artificial Sequence
  Synthetic
ccaggcuaguuuuuguauuuuuag

SEQ ID NO: 580402 - RNA, 18 nt, Artificial Sequence
  Synthetic
uuguuuuuguauuuuuag

SEQ ID NO: 580403 - RNA, 19 nt, Artificial Sequence
  Synthetic
uuuguuuuuguauuuuuag

SEQ ID NO: 580404 - RNA, 20 nt, Artificial Sequence
  Synthetic
uuuuguuuuuguauuuuuag

SEQ ID NO: 580405 - RNA, 21 nt, Artificial Sequence
  Synthetic
auuuuguuuuuguauuuuuag

SEQ ID NO: 580406 - RNA, 22 nt, Artificial Sequence
  Synthetic
aauuuuguuuuuguauuuuuag

SEQ ID NO: 580407 - RNA, 23 nt, Artificial Sequence
  Synthetic
uaauuuuguuuuuguauuuuuag

SEQ ID NO: 580408 - RNA, 24 nt, Artificial Sequence
  Synthetic
cuaauuuuguuuuuguauuuuuag

SEQ ID NO: 580409 - RNA, 22 nt, Artificial Sequence
  Synthetic
ugcuaauuuuuuguauuuuuag

SEQ ID NO: 580410 - RNA, 23 nt, Artificial Sequence
  Synthetic
cugcuaauuuuuuguauuuuuag

SEQ ID NO: 580411 - RNA, 24 nt, Artificial Sequence
  Synthetic
ccugcuaauuuuuuguauuuuuag

SEQ ID NO: 580412 - RNA, 18 nt, Artificial Sequence
  Synthetic
uauuuuuuguauuuuuag

SEQ ID NO: 580413 - RNA, 19 nt, Artificial Sequence
  Synthetic
cuauuuuuuguauuuuuag

SEQ ID NO: 580414 - RNA, 20 nt, Artificial Sequence
  Synthetic
gcuauuuuuuguauuuuuag

SEQ ID NO: 580415 - RNA, 21 nt, Artificial Sequence
  Synthetic
agcuauuuuuuguauuuuuag

SEQ ID NO: 580416 - RNA, 22 nt, Artificial Sequence
  Synthetic
uagcuauuuuuuguauuuuuag

SEQ ID NO: 580417 - RNA, 23 nt, Artificial Sequence
  Synthetic
cuagcuauuuuuuguauuuuuag

SEQ ID NO: 580418 - RNA, 24 nt, Artificial Sequence
  Synthetic
ccuagcuauuuuuuguauuuuuag

SEQ ID NO: 580419 - RNA, 18 nt, Artificial Sequence
  Synthetic
auuuuuuuguauuuuuag

SEQ ID NO: 580420 - RNA, 24 nt, Artificial Sequence
  Synthetic
cagcuaauuuuuuuguauuuuuag

SEQ ID NO: 580421 - RNA, 23 nt, Artificial Sequence
  Synthetic
ggcuaauuuuuuuguauuuuuag

SEQ ID NO: 580422 - RNA, 24 nt, Artificial Sequence
  Synthetic
uggcuaauuuuuuuguauuuuuag

SEQ ID NO: 580423 - RNA, 19 nt, Artificial Sequence
  Synthetic
uauuuuuuuguauuuuuag

SEQ ID NO: 580424 - RNA, 20 nt, Artificial Sequence
  Synthetic
cuauuuuuuuguauuuuuag

SEQ ID NO: 580425 - RNA, 21 nt, Artificial Sequence
  Synthetic
gcuauuuuuuuguauuuuuag

SEQ ID NO: 580426 - RNA, 22 nt, Artificial Sequence
  Synthetic
agcuauuuuuuuguauuuuuag

SEQ ID NO: 580427 - RNA, 23 nt, Artificial Sequence
  Synthetic
cagcuauuuuuuuguauuuuuag

SEQ ID NO: 580428 - RNA, 24 nt, Artificial Sequence
  Synthetic
ccagcuauuuuuuuguauuuuuag

SEQ ID NO: 580429 - RNA, 18 nt, Artificial Sequence
  Synthetic
cuuuuuuuguauuuuuag

SEQ ID NO: 580430 - RNA, 19 nt, Artificial Sequence
  Synthetic
ucuuuuuuuguauuuuuag

SEQ ID NO: 580431 - RNA, 20 nt, Artificial Sequence
  Synthetic
uucuuuuuuuguauuuuuag

SEQ ID NO: 580432 - RNA, 21 nt, Artificial Sequence
  Synthetic
uuucuuuuuuuguauuuuuag

SEQ ID NO: 580433 - RNA, 22 nt, Artificial Sequence
  Synthetic
uuuucuuuuuuuguauuuuuag

SEQ ID NO: 580434 - RNA, 23 nt, Artificial Sequence
  Synthetic
uuuuucuuuuuuuguauuuuuag

SEQ ID NO: 580435 - RNA, 24 nt, Artificial Sequence
  Synthetic
uuuuuucuuuuuuuguauuuuuag

SEQ ID NO: 580436 - RNA, 24 nt, Artificial Sequence
  Synthetic
ggcuaauuuuuuuuguauuuuuag

SEQ ID NO: 580437 - RNA, 20 nt, Artificial Sequence
  Synthetic
auuuuuuuuuguauuuuuag

SEQ ID NO: 580438 - RNA, 21 nt, Artificial Sequence
  Synthetic
aauuuuuuuuuguauuuuuag

SEQ ID NO: 580439 - RNA, 22 nt, Artificial Sequence
  Synthetic
uaauuuuuuuuuguauuuuuag

SEQ ID NO: 580440 - RNA, 23 nt, Artificial Sequence
  Synthetic
cuaauuuuuuuuuguauuuuuag

SEQ ID NO: 580441 - RNA, 24 nt, Artificial Sequence
  Synthetic
gcuaauuuuuuuuuguauuuuuag

SEQ ID NO: 580442 - RNA, 24 nt, Artificial Sequence
  Synthetic
cuuuuuuuuuuuuuguauuuuuag

SEQ ID NO: 580443 - RNA, 18 nt, Artificial Sequence
  Synthetic
ugaacaaauuauuuuuag

SEQ ID NO: 580444 - RNA, 19 nt, Artificial Sequence
  Synthetic
augaacaaauuauuuuuag

SEQ ID NO: 580445 - RNA, 20 nt, Artificial Sequence
  Synthetic
caugaacaaauuauuuuuag

SEQ ID NO: 580446 - RNA, 21 nt, Artificial Sequence
  Synthetic
ucaugaacaaauuauuuuuag

SEQ ID NO: 580447 - RNA, 22 nt, Artificial Sequence
  Synthetic
uucaugaacaaauuauuuuuag

SEQ ID NO: 580448 - RNA, 23 nt, Artificial Sequence
  Synthetic
cuucaugaacaaauuauuuuuag

SEQ ID NO: 580449 - RNA, 24 nt, Artificial Sequence
  Synthetic
gcuucaugaacaaauuauuuuuag

SEQ ID NO: 580450 - RNA, 18 nt, Artificial Sequence
  Synthetic
caguuuuuuuauuuuuag

SEQ ID NO: 580451 - RNA, 19 nt, Artificial Sequence
  Synthetic
ccaguuuuuuuauuuuuag

SEQ ID NO: 580452 - RNA, 20 nt, Artificial Sequence
  Synthetic
gccaguuuuuuuauuuuuag

SEQ ID NO: 580453 - RNA, 21 nt, Artificial Sequence
  Synthetic
ggccaguuuuuuuauuuuuag

SEQ ID NO: 580454 - RNA, 22 nt, Artificial Sequence
  Synthetic
cggccaguuuuuuuauuuuuag

SEQ ID NO: 580455 - RNA, 23 nt, Artificial Sequence
  Synthetic
ccggccaguuuuuuuauuuuuag

SEQ ID NO: 580456 - RNA, 24 nt, Artificial Sequence
  Synthetic
cccggccaguuuuuuuauuuuuag

SEQ ID NO: 580457 - RNA, 18 nt, Artificial Sequence
  Synthetic
aaugacaucccuuuuuag

SEQ ID NO: 580458 - RNA, 19 nt, Artificial Sequence
  Synthetic
aaaugacaucccuuuuuag

SEQ ID NO: 580459 - RNA, 20 nt, Artificial Sequence
  Synthetic
uaaaugacaucccuuuuuag

SEQ ID NO: 580460 - RNA, 21 nt, Artificial Sequence
  Synthetic
uuaaaugacaucccuuuuuag

SEQ ID NO: 580461 - RNA, 22 nt, Artificial Sequence
  Synthetic
auuaaaugacaucccuuuuuag

SEQ ID NO: 580462 - RNA, 23 nt, Artificial Sequence
  Synthetic
gauuaaaugacaucccuuuuuag

SEQ ID NO: 580463 - RNA, 24 nt, Artificial Sequence
  Synthetic
ugauuaaaugacaucccuuuuuag

SEQ ID NO: 580464 - RNA, 18 nt, Artificial Sequence
  Synthetic
ugugagaguucuuuuuag

SEQ ID NO: 580465 - RNA, 19 nt, Artificial Sequence
  Synthetic
augugagaguucuuuuuag

SEQ ID NO: 580466 - RNA, 20 nt, Artificial Sequence
  Synthetic
gaugugagaguucuuuuuag

SEQ ID NO: 580467 - RNA, 21 nt, Artificial Sequence
  Synthetic
ggaugugagaguucuuuuuag

SEQ ID NO: 580468 - RNA, 22 nt, Artificial Sequence
  Synthetic
gggaugugagaguucuuuuuag

SEQ ID NO: 580469 - RNA, 23 nt, Artificial Sequence
  Synthetic
ugggaugugagaguucuuuuuag

SEQ ID NO: 580470 - RNA, 24 nt, Artificial Sequence
  Synthetic
uugggaugugagaguucuuuuuag

SEQ ID NO: 580471 - RNA, 18 nt, Artificial Sequence
  Synthetic
ugacugaacaguuuuuag

SEQ ID NO: 580472 - RNA, 19 nt, Artificial Sequence
  Synthetic
augacugaacaguuuuuag

SEQ ID NO: 580473 - RNA, 20 nt, Artificial Sequence
  Synthetic
caugacugaacaguuuuuag

SEQ ID NO: 580474 - RNA, 21 nt, Artificial Sequence
  Synthetic
ucaugacugaacaguuuuuag

SEQ ID NO: 580475 - RNA, 22 nt, Artificial Sequence
  Synthetic
uucaugacugaacaguuuuuag

SEQ ID NO: 580476 - RNA, 23 nt, Artificial Sequence
  Synthetic
uuucaugacugaacaguuuuuag

SEQ ID NO: 580477 - RNA, 24 nt, Artificial Sequence
  Synthetic
uuuucaugacugaacaguuuuuag

SEQ ID NO: 580478 - RNA, 18 nt, Artificial Sequence
  Synthetic
ugucguaaguguuuuuag

SEQ ID NO: 580479 - RNA, 19 nt, Artificial Sequence
  Synthetic
augucguaaguguuuuuag

SEQ ID NO: 580480 - RNA, 20 nt, Artificial Sequence
  Synthetic
caugucguaaguguuuuuag

SEQ ID NO: 580481 - RNA, 21 nt, Artificial Sequence
  Synthetic
ccaugucguaaguguuuuuag

SEQ ID NO: 580482 - RNA, 22 nt, Artificial Sequence
  Synthetic
gccaugucguaaguguuuuuag

SEQ ID NO: 580483 - RNA, 23 nt, Artificial Sequence
  Synthetic
agccaugucguaaguguuuuuag

SEQ ID NO: 580484 - RNA, 24 nt, Artificial Sequence
  Synthetic
uagccaugucguaaguguuuuuag

SEQ ID NO: 580485 - RNA, 18 nt, Artificial Sequence
  Synthetic
aauuuuuuguguuuuuag

SEQ ID NO: 580486 - RNA, 19 nt, Artificial Sequence
  Synthetic
uaauuuuuuguguuuuuag

SEQ ID NO: 580487 - RNA, 20 nt, Artificial Sequence
  Synthetic
cuaauuuuuuguguuuuuag

SEQ ID NO: 580488 - RNA, 21 nt, Artificial Sequence
  Synthetic
gcuaauuuuuuguguuuuuag

SEQ ID NO: 580489 - RNA, 22 nt, Artificial Sequence
  Synthetic
ggcuaauuuuuuguguuuuuag

SEQ ID NO: 580490 - RNA, 23 nt, Artificial Sequence
  Synthetic
cggcuaauuuuuuguguuuuuag

SEQ ID NO: 580491 - RNA, 24 nt, Artificial Sequence
  Synthetic
ccggcuaauuuuuuguguuuuuag

SEQ ID NO: 580492 - RNA, 18 nt, Artificial Sequence
  Synthetic
agucgaauuuguuuuuag

SEQ ID NO: 580493 - RNA, 19 nt, Artificial Sequence
  Synthetic
uagucgaauuuguuuuuag

SEQ ID NO: 580494 - RNA, 20 nt, Artificial Sequence
  Synthetic
auagucgaauuuguuuuuag

SEQ ID NO: 580495 - RNA, 21 nt, Artificial Sequence
  Synthetic
aauagucgaauuuguuuuuag

SEQ ID NO: 580496 - RNA, 22 nt, Artificial Sequence
  Synthetic
gaauagucgaauuuguuuuuag

SEQ ID NO: 580497 - RNA, 23 nt, Artificial Sequence
  Synthetic
agaauagucgaauuuguuuuuag

SEQ ID NO: 580498 - RNA, 24 nt, Artificial Sequence
  Synthetic
aagaauagucgaauuuguuuuuag

SEQ ID NO: 580499 - RNA, 18 nt, Artificial Sequence
  Synthetic
agguucaacauuuuuuag

SEQ ID NO: 580500 - RNA, 19 nt, Artificial Sequence
  Synthetic
gagguucaacauuuuuuag

SEQ ID NO: 580501 - RNA, 20 nt, Artificial Sequence
  Synthetic
ugagguucaacauuuuuuag

SEQ ID NO: 580502 - RNA, 21 nt, Artificial Sequence
  Synthetic
augagguucaacauuuuuuag

SEQ ID NO: 580503 - RNA, 22 nt, Artificial Sequence
  Synthetic
gaugagguucaacauuuuuuag

SEQ ID NO: 580504 - RNA, 23 nt, Artificial Sequence
  Synthetic
ggaugagguucaacauuuuuuag

SEQ ID NO: 580505 - RNA, 24 nt, Artificial Sequence
  Synthetic
aggaugagguucaacauuuuuuag

SEQ ID NO: 580506 - RNA, 18 nt, Artificial Sequence
  Synthetic
auuuuuuguauuuuuuag

SEQ ID NO: 580507 - RNA, 19 nt, Artificial Sequence
  Synthetic
aauuuuuuguauuuuuuag

SEQ ID NO: 580508 - RNA, 20 nt, Artificial Sequence
  Synthetic
uaauuuuuuguauuuuuuag

SEQ ID NO: 580509 - RNA, 21 nt, Artificial Sequence
  Synthetic
cuaauuuuuuguauuuuuuag

SEQ ID NO: 580510 - RNA, 22 nt, Artificial Sequence
  Synthetic
gcuaauuuuuuguauuuuuuag

SEQ ID NO: 580511 - RNA, 23 nt, Artificial Sequence
  Synthetic
ggcuaauuuuuuguauuuuuuag

SEQ ID NO: 580512 - RNA, 24 nt, Artificial Sequence
  Synthetic
cggcuaauuuuuuguauuuuuuag

SEQ ID NO: 580513 - RNA, 21 nt, Artificial Sequence
  Synthetic
uuuuuuuuuuguauuuuuuag

SEQ ID NO: 580514 - RNA, 22 nt, Artificial Sequence
  Synthetic
uuuuuuuuuuuguauuuuuuag

SEQ ID NO: 580515 - RNA, 23 nt, Artificial Sequence
  Synthetic
uuuuuuuuuuuuguauuuuuuag

SEQ ID NO: 580516 - RNA, 24 nt, Artificial Sequence
  Synthetic
uuuuuuuuuuuuuguauuuuuuag

SEQ ID NO: 580517 - RNA, 18 nt, Artificial Sequence
  Synthetic
uuucuuuuuuuuuuuuag

SEQ ID NO: 580518 - RNA, 19 nt, Artificial Sequence
  Synthetic
uuuucuuuuuuuuuuuuag

SEQ ID NO: 580519 - RNA, 20 nt, Artificial Sequence
  Synthetic
uuuuucuuuuuuuuuuuuag

SEQ ID NO: 580520 - RNA, 21 nt, Artificial Sequence
  Synthetic
uuuuuucuuuuuuuuuuuuag

SEQ ID NO: 580521 - RNA, 22 nt, Artificial Sequence
  Synthetic
uuuuuuucuuuuuuuuuuuuag

SEQ ID NO: 580522 - RNA, 23 nt, Artificial Sequence
  Synthetic
auuuuuuucuuuuuuuuuuuuag

SEQ ID NO: 580523 - RNA, 24 nt, Artificial Sequence
  Synthetic
gauuuuuuucuuuuuuuuuuuuag

SEQ ID NO: 580524 - RNA, 18 nt, Artificial Sequence
  Synthetic
uuuuuuuuuuuuuuuuag

SEQ ID NO: 580525 - RNA, 19 nt, Artificial Sequence
  Synthetic
uuuuuuuuuuuuuuuuuag

SEQ ID NO: 580526 - RNA, 20 nt, Artificial Sequence
  Synthetic
cuuuuuuuuuuuuuuuuuag

SEQ ID NO: 580527 - RNA, 21 nt, Artificial Sequence
  Synthetic
ucuuuuuuuuuuuuuuuuuag

SEQ ID NO: 580528 - RNA, 22 nt, Artificial Sequence
  Synthetic
uucuuuuuuuuuuuuuuuuuag

SEQ ID NO: 580529 - RNA, 23 nt, Artificial Sequence
  Synthetic
cuucuuuuuuuuuuuuuuuuuag

SEQ ID NO: 580530 - RNA, 24 nt, Artificial Sequence
  Synthetic
ccuucuuuuuuuuuuuuuuuuuag

SEQ ID NO: 580531 - RNA, 20 nt, Artificial Sequence
  Synthetic
uuuuuuuuuuuuuuuuuuag

SEQ ID NO: 580532 - RNA, 21 nt, Artificial Sequence
  Synthetic
uuuuuuuuuuuuuuuuuuuag

SEQ ID NO: 580533 - RNA, 22 nt, Artificial Sequence
  Synthetic
uuuuuuuuuuuuuuuuuuuuag

SEQ ID NO: 580534 - RNA, 23 nt, Artificial Sequence
  Synthetic
uuuuuuuuuuuuuuuuuuuuuag

SEQ ID NO: 580535 - RNA, 24 nt, Artificial Sequence
  Synthetic
uuuuuuuuuuuuuuuuuuuuuuag

SEQ ID NO: 580536 - RNA, 18 nt, Artificial Sequence
  Synthetic
uuaaucagagcaaaaacg

SEQ ID NO: 580537 - RNA, 19 nt, Artificial Sequence
  Synthetic
guuaaucagagcaaaaacg

SEQ ID NO: 580538 - RNA, 20 nt, Artificial Sequence
  Synthetic
aguuaaucagagcaaaaacg

SEQ ID NO: 580539 - RNA, 21 nt, Artificial Sequence
  Synthetic
caguuaaucagagcaaaaacg

SEQ ID NO: 580540 - RNA, 22 nt, Artificial Sequence
  Synthetic
ccaguuaaucagagcaaaaacg

SEQ ID NO: 580541 - RNA, 23 nt, Artificial Sequence
  Synthetic
uccaguuaaucagagcaaaaacg

SEQ ID NO: 580542 - RNA, 24 nt, Artificial Sequence
  Synthetic
uuccaguuaaucagagcaaaaacg

SEQ ID NO: 580543 - RNA, 18 nt, Artificial Sequence
  Synthetic
gacagucucaggaaaacg

SEQ ID NO: 580544 - RNA, 19 nt, Artificial Sequence
  Synthetic
ggacagucucaggaaaacg

SEQ ID NO: 580545 - RNA, 20 nt, Artificial Sequence
  Synthetic
uggacagucucaggaaaacg

SEQ ID NO: 580546 - RNA, 21 nt, Artificial Sequence
  Synthetic
uuggacagucucaggaaaacg

SEQ ID NO: 580547 - RNA, 22 nt, Artificial Sequence
  Synthetic
auuggacagucucaggaaaacg

SEQ ID NO: 580548 - RNA, 23 nt, Artificial Sequence
  Synthetic
aauuggacagucucaggaaaacg

SEQ ID NO: 580549 - RNA, 24 nt, Artificial Sequence
  Synthetic
aaauuggacagucucaggaaaacg

SEQ ID NO: 580550 - RNA, 18 nt, Artificial Sequence
  Synthetic
gaguagauguggaaaacg

SEQ ID NO: 580551 - RNA, 19 nt, Artificial Sequence
  Synthetic
ugaguagauguggaaaacg

SEQ ID NO: 580552 - RNA, 20 nt, Artificial Sequence
  Synthetic
uugaguagauguggaaaacg

SEQ ID NO: 580553 - RNA, 21 nt, Artificial Sequence
  Synthetic
uuugaguagauguggaaaacg

SEQ ID NO: 580554 - RNA, 22 nt, Artificial Sequence
  Synthetic
uuuugaguagauguggaaaacg

SEQ ID NO: 580555 - RNA, 23 nt, Artificial Sequence
  Synthetic
cuuuugaguagauguggaaaacg

SEQ ID NO: 580556 - RNA, 24 nt, Artificial Sequence
  Synthetic
acuuuugaguagauguggaaaacg

SEQ ID NO: 580557 - RNA, 18 nt, Artificial Sequence
  Synthetic
augcacaacaguaaaacg

SEQ ID NO: 580558 - RNA, 19 nt, Artificial Sequence
  Synthetic
caugcacaacaguaaaacg

SEQ ID NO: 580559 - RNA, 20 nt, Artificial Sequence
  Synthetic
ucaugcacaacaguaaaacg

SEQ ID NO: 580560 - RNA, 21 nt, Artificial Sequence
  Synthetic
aucaugcacaacaguaaaacg

SEQ ID NO: 580561 - RNA, 22 nt, Artificial Sequence
  Synthetic
caucaugcacaacaguaaaacg

SEQ ID NO: 580562 - RNA, 23 nt, Artificial Sequence
  Synthetic
acaucaugcacaacaguaaaacg

SEQ ID NO: 580563 - RNA, 24 nt, Artificial Sequence
  Synthetic
aacaucaugcacaacaguaaaacg

SEQ ID NO: 580564 - RNA, 18 nt, Artificial Sequence
  Synthetic
uaagguuuagguaaaacg

SEQ ID NO: 580565 - RNA, 19 nt, Artificial Sequence
  Synthetic
guaagguuuagguaaaacg

SEQ ID NO: 580566 - RNA, 20 nt, Artificial Sequence
  Synthetic
uguaagguuuagguaaaacg

SEQ ID NO: 580567 - RNA, 21 nt, Artificial Sequence
  Synthetic
uuguaagguuuagguaaaacg

SEQ ID NO: 580568 - RNA, 22 nt, Artificial Sequence
  Synthetic
uuuguaagguuuagguaaaacg

SEQ ID NO: 580569 - RNA, 23 nt, Artificial Sequence
  Synthetic
auuuguaagguuuagguaaaacg

SEQ ID NO: 580570 - RNA, 24 nt, Artificial Sequence
  Synthetic
aauuuguaagguuuagguaaaacg

SEQ ID NO: 580571 - RNA, 18 nt, Artificial Sequence
  Synthetic
ugaacaugggaagaaacg

SEQ ID NO: 580572 - RNA, 19 nt, Artificial Sequence
  Synthetic
augaacaugggaagaaacg

SEQ ID NO: 580573 - RNA, 20 nt, Artificial Sequence
  Synthetic
uaugaacaugggaagaaacg

SEQ ID NO: 580574 - RNA, 21 nt, Artificial Sequence
  Synthetic
guaugaacaugggaagaaacg

SEQ ID NO: 580575 - RNA, 22 nt, Artificial Sequence
  Synthetic
aguaugaacaugggaagaaacg

SEQ ID NO: 580576 - RNA, 23 nt, Artificial Sequence
  Synthetic
gaguaugaacaugggaagaaacg

SEQ ID NO: 580577 - RNA, 24 nt, Artificial Sequence
  Synthetic
agaguaugaacaugggaagaaacg

SEQ ID NO: 580578 - RNA, 18 nt, Artificial Sequence
  Synthetic
gagccacauggagaaacg

SEQ ID NO: 580579 - RNA, 19 nt, Artificial Sequence
  Synthetic
agagccacauggagaaacg

SEQ ID NO: 580580 - RNA, 20 nt, Artificial Sequence
  Synthetic
aagagccacauggagaaacg

SEQ ID NO: 580581 - RNA, 21 nt, Artificial Sequence
  Synthetic
aaagagccacauggagaaacg

SEQ ID NO: 580582 - RNA, 22 nt, Artificial Sequence
  Synthetic
aaaagagccacauggagaaacg

SEQ ID NO: 580583 - RNA, 23 nt, Artificial Sequence
  Synthetic
gaaaagagccacauggagaaacg

SEQ ID NO: 580584 - RNA, 24 nt, Artificial Sequence
  Synthetic
cgaaaagagccacauggagaaacg

SEQ ID NO: 580585 - RNA, 18 nt, Artificial Sequence
  Synthetic
auggcaacaauagaaacg

SEQ ID NO: 580586 - RNA, 19 nt, Artificial Sequence
  Synthetic
gauggcaacaauagaaacg

SEQ ID NO: 580587 - RNA, 20 nt, Artificial Sequence
  Synthetic
ugauggcaacaauagaaacg

SEQ ID NO: 580588 - RNA, 21 nt, Artificial Sequence
  Synthetic
augauggcaacaauagaaacg

SEQ ID NO: 580589 - RNA, 22 nt, Artificial Sequence
  Synthetic
aaugauggcaacaauagaaacg

SEQ ID NO: 580590 - RNA, 23 nt, Artificial Sequence
  Synthetic
uaaugauggcaacaauagaaacg

SEQ ID NO: 580591 - RNA, 24 nt, Artificial Sequence
  Synthetic
auaaugauggcaacaauagaaacg

SEQ ID NO: 580592 - RNA, 18 nt, Artificial Sequence
  Synthetic
ugacccugaguauaaacg

SEQ ID NO: 580593 - RNA, 19 nt, Artificial Sequence
  Synthetic
cugacccugaguauaaacg

SEQ ID NO: 580594 - RNA, 20 nt, Artificial Sequence
  Synthetic
gcugacccugaguauaaacg

SEQ ID NO: 580595 - RNA, 21 nt, Artificial Sequence
  Synthetic
cgcugacccugaguauaaacg

SEQ ID NO: 580596 - RNA, 22 nt, Artificial Sequence
  Synthetic
ucgcugacccugaguauaaacg

SEQ ID NO: 580597 - RNA, 23 nt, Artificial Sequence
  Synthetic
gucgcugacccugaguauaaacg

SEQ ID NO: 580598 - RNA, 24 nt, Artificial Sequence
  Synthetic
ugucgcugacccugaguauaaacg

SEQ ID NO: 580599 - RNA, 18 nt, Artificial Sequence
  Synthetic
gugcacagcuucuaaacg

SEQ ID NO: 580600 - RNA, 19 nt, Artificial Sequence
  Synthetic
ugugcacagcuucuaaacg

SEQ ID NO: 580601 - RNA, 20 nt, Artificial Sequence
  Synthetic
augugcacagcuucuaaacg

SEQ ID NO: 580602 - RNA, 21 nt, Artificial Sequence
  Synthetic
aaugugcacagcuucuaaacg

SEQ ID NO: 580603 - RNA, 22 nt, Artificial Sequence
  Synthetic
aaaugugcacagcuucuaaacg

SEQ ID NO: 580604 - RNA, 23 nt, Artificial Sequence
  Synthetic
gaaaugugcacagcuucuaaacg

SEQ ID NO: 580605 - RNA, 24 nt, Artificial Sequence
  Synthetic
ggaaaugugcacagcuucuaaacg

SEQ ID NO: 580606 - RNA, 18 nt, Artificial Sequence
  Synthetic
auuuugagcugguaaacg

SEQ ID NO: 580607 - RNA, 19 nt, Artificial Sequence
  Synthetic
gauuuugagcugguaaacg

SEQ ID NO: 580608 - RNA, 20 nt, Artificial Sequence
  Synthetic
agauuuugagcugguaaacg

SEQ ID NO: 580609 - RNA, 21 nt, Artificial Sequence
  Synthetic
gagauuuugagcugguaaacg

SEQ ID NO: 580610 - RNA, 22 nt, Artificial Sequence
  Synthetic
ugagauuuugagcugguaaacg

SEQ ID NO: 580611 - RNA, 23 nt, Artificial Sequence
  Synthetic
uugagauuuugagcugguaaacg

SEQ ID NO: 580612 - RNA, 24 nt, Artificial Sequence
  Synthetic
guugagauuuugagcugguaaacg

SEQ ID NO: 580613 - RNA, 18 nt, Artificial Sequence
  Synthetic
guauuuggcauguaaacg

SEQ ID NO: 580614 - RNA, 19 nt, Artificial Sequence
  Synthetic
gguauuuggcauguaaacg

SEQ ID NO: 580615 - RNA, 20 nt, Artificial Sequence
  Synthetic
ugguauuuggcauguaaacg

SEQ ID NO: 580616 - RNA, 21 nt, Artificial Sequence
  Synthetic
cugguauuuggcauguaaacg

SEQ ID NO: 580617 - RNA, 22 nt, Artificial Sequence
  Synthetic
ccugguauuuggcauguaaacg

SEQ ID NO: 580618 - RNA, 23 nt, Artificial Sequence
  Synthetic
accugguauuuggcauguaaacg

SEQ ID NO: 580619 - RNA, 24 nt, Artificial Sequence
  Synthetic
caccugguauuuggcauguaaacg

SEQ ID NO: 580620 - RNA, 18 nt, Artificial Sequence
  Synthetic
aaaaaacaccuuuaaacg

SEQ ID NO: 580621 - RNA, 19 nt, Artificial Sequence
  Synthetic
uaaaaaacaccuuuaaacg

SEQ ID NO: 580622 - RNA, 20 nt, Artificial Sequence
  Synthetic
uuaaaaaacaccuuuaaacg

SEQ ID NO: 580623 - RNA, 21 nt, Artificial Sequence
  Synthetic
cuuaaaaaacaccuuuaaacg

SEQ ID NO: 580624 - RNA, 22 nt, Artificial Sequence
  Synthetic
ucuuaaaaaacaccuuuaaacg

SEQ ID NO: 580625 - RNA, 23 nt, Artificial Sequence
  Synthetic
cucuuaaaaaacaccuuuaaacg

SEQ ID NO: 580626 - RNA, 24 nt, Artificial Sequence
  Synthetic
ucucuuaaaaaacaccuuuaaacg

SEQ ID NO: 580627 - RNA, 18 nt, Artificial Sequence
  Synthetic
agaauaguaacaacaacg

SEQ ID NO: 580628 - RNA, 19 nt, Artificial Sequence
  Synthetic
cagaauaguaacaacaacg

SEQ ID NO: 580629 - RNA, 20 nt, Artificial Sequence
  Synthetic
acagaauaguaacaacaacg

SEQ ID NO: 580630 - RNA, 21 nt, Artificial Sequence
  Synthetic
cacagaauaguaacaacaacg

SEQ ID NO: 580631 - RNA, 22 nt, Artificial Sequence
  Synthetic
acacagaauaguaacaacaacg

SEQ ID NO: 580632 - RNA, 23 nt, Artificial Sequence
  Synthetic
gacacagaauaguaacaacaacg

SEQ ID NO: 580633 - RNA, 24 nt, Artificial Sequence
  Synthetic
agacacagaauaguaacaacaacg

SEQ ID NO: 580634 - RNA, 18 nt, Artificial Sequence
  Synthetic
cagagagacacaacaacg

SEQ ID NO: 580635 - RNA, 19 nt, Artificial Sequence
  Synthetic
ucagagagacacaacaacg

SEQ ID NO: 580636 - RNA, 20 nt, Artificial Sequence
  Synthetic
cucagagagacacaacaacg

SEQ ID NO: 580637 - RNA, 21 nt, Artificial Sequence
  Synthetic
ccucagagagacacaacaacg

SEQ ID NO: 580638 - RNA, 22 nt, Artificial Sequence
  Synthetic
uccucagagagacacaacaacg

SEQ ID NO: 580639 - RNA, 23 nt, Artificial Sequence
  Synthetic
guccucagagagacacaacaacg

SEQ ID NO: 580640 - RNA, 24 nt, Artificial Sequence
  Synthetic
uguccucagagagacacaacaacg

SEQ ID NO: 580641 - RNA, 18 nt, Artificial Sequence
  Synthetic
auugucagaggaacaacg

SEQ ID NO: 580642 - RNA, 19 nt, Artificial Sequence
  Synthetic
aauugucagaggaacaacg

SEQ ID NO: 580643 - RNA, 20 nt, Artificial Sequence
  Synthetic
aaauugucagaggaacaacg

SEQ ID NO: 580644 - RNA, 21 nt, Artificial Sequence
  Synthetic
gaaauugucagaggaacaacg

SEQ ID NO: 580645 - RNA, 22 nt, Artificial Sequence
  Synthetic
agaaauugucagaggaacaacg

SEQ ID NO: 580646 - RNA, 23 nt, Artificial Sequence
  Synthetic
aagaaauugucagaggaacaacg

SEQ ID NO: 580647 - RNA, 24 nt, Artificial Sequence
  Synthetic
aaagaaauugucagaggaacaacg

SEQ ID NO: 580648 - RNA, 18 nt, Artificial Sequence
  Synthetic
uuguuaacaaagacaacg

SEQ ID NO: 580649 - RNA, 19 nt, Artificial Sequence
  Synthetic
cuuguuaacaaagacaacg

SEQ ID NO: 580650 - RNA, 20 nt, Artificial Sequence
  Synthetic
acuuguuaacaaagacaacg

SEQ ID NO: 580651 - RNA, 21 nt, Artificial Sequence
  Synthetic
cacuuguuaacaaagacaacg

SEQ ID NO: 580652 - RNA, 22 nt, Artificial Sequence
  Synthetic
acacuuguuaacaaagacaacg

SEQ ID NO: 580653 - RNA, 23 nt, Artificial Sequence
  Synthetic
aacacuuguuaacaaagacaacg

SEQ ID NO: 580654 - RNA, 24 nt, Artificial Sequence
  Synthetic
aaacacuuguuaacaaagacaacg

SEQ ID NO: 580655 - RNA, 18 nt, Artificial Sequence
  Synthetic
uucgccaaguagacaacg

SEQ ID NO: 580656 - RNA, 19 nt, Artificial Sequence
  Synthetic
auucgccaaguagacaacg

SEQ ID NO: 580657 - RNA, 20 nt, Artificial Sequence
  Synthetic
aauucgccaaguagacaacg

SEQ ID NO: 580658 - RNA, 21 nt, Artificial Sequence
  Synthetic
gaauucgccaaguagacaacg

SEQ ID NO: 580659 - RNA, 22 nt, Artificial Sequence
  Synthetic
agaauucgccaaguagacaacg

SEQ ID NO: 580660 - RNA, 23 nt, Artificial Sequence
  Synthetic
gagaauucgccaaguagacaacg

SEQ ID NO: 580661 - RNA, 24 nt, Artificial Sequence
  Synthetic
ggagaauucgccaaguagacaacg

SEQ ID NO: 580662 - RNA, 18 nt, Artificial Sequence
  Synthetic
uugacaagaaugacaacg

SEQ ID NO: 580663 - RNA, 19 nt, Artificial Sequence
  Synthetic
uuugacaagaaugacaacg

SEQ ID NO: 580664 - RNA, 20 nt, Artificial Sequence
  Synthetic
uuuugacaagaaugacaacg

SEQ ID NO: 580665 - RNA, 21 nt, Artificial Sequence
  Synthetic
guuuugacaagaaugacaacg

SEQ ID NO: 580666 - RNA, 22 nt, Artificial Sequence
  Synthetic
uguuuugacaagaaugacaacg

SEQ ID NO: 580667 - RNA, 23 nt, Artificial Sequence
  Synthetic
cuguuuugacaagaaugacaacg

SEQ ID NO: 580668 - RNA, 24 nt, Artificial Sequence
  Synthetic
ccuguuuugacaagaaugacaacg

SEQ ID NO: 580669 - RNA, 18 nt, Artificial Sequence
  Synthetic
agaccagcuugaccaacg

SEQ ID NO: 580670 - RNA, 19 nt, Artificial Sequence
  Synthetic
gagaccagcuugaccaacg

SEQ ID NO: 580671 - RNA, 20 nt, Artificial Sequence
  Synthetic
cgagaccagcuugaccaacg

SEQ ID NO: 580672 - RNA, 21 nt, Artificial Sequence
  Synthetic
ucgagaccagcuugaccaacg

SEQ ID NO: 580673 - RNA, 22 nt, Artificial Sequence
  Synthetic
uucgagaccagcuugaccaacg

SEQ ID NO: 580674 - RNA, 23 nt, Artificial Sequence
  Synthetic
guucgagaccagcuugaccaacg

SEQ ID NO: 580675 - RNA, 24 nt, Artificial Sequence
  Synthetic
aguucgagaccagcuugaccaacg

SEQ ID NO: 580676 - RNA, 18 nt, Artificial Sequence
  Synthetic
ugacaaaaacaagcaacg

SEQ ID NO: 580677 - RNA, 19 nt, Artificial Sequence
  Synthetic
cugacaaaaacaagcaacg

SEQ ID NO: 580678 - RNA, 20 nt, Artificial Sequence
  Synthetic
ccugacaaaaacaagcaacg

SEQ ID NO: 580679 - RNA, 21 nt, Artificial Sequence
  Synthetic
accugacaaaaacaagcaacg

SEQ ID NO: 580680 - RNA, 22 nt, Artificial Sequence
  Synthetic
aaccugacaaaaacaagcaacg

SEQ ID NO: 580681 - RNA, 23 nt, Artificial Sequence
  Synthetic
aaaccugacaaaaacaagcaacg

SEQ ID NO: 580682 - RNA, 24 nt, Artificial Sequence
  Synthetic
caaaccugacaaaaacaagcaacg

SEQ ID NO: 580683 - RNA, 18 nt, Artificial Sequence
  Synthetic
uuuguuucguucucaacg

SEQ ID NO: 580684 - RNA, 19 nt, Artificial Sequence
  Synthetic
cuuuguuucguucucaacg

SEQ ID NO: 580685 - RNA, 20 nt, Artificial Sequence
  Synthetic
ucuuuguuucguucucaacg

SEQ ID NO: 580686 - RNA, 21 nt, Artificial Sequence
  Synthetic
gucuuuguuucguucucaacg

SEQ ID NO: 580687 - RNA, 22 nt, Artificial Sequence
  Synthetic
ugucuuuguuucguucucaacg

SEQ ID NO: 580688 - RNA, 23 nt, Artificial Sequence
  Synthetic
augucuuuguuucguucucaacg

SEQ ID NO: 580689 - RNA, 24 nt, Artificial Sequence
  Synthetic
uaugucuuuguuucguucucaacg

SEQ ID NO: 580690 - RNA, 18 nt, Artificial Sequence
  Synthetic
aggcaacuuugaagaacg

SEQ ID NO: 580691 - RNA, 19 nt, Artificial Sequence
  Synthetic
aaggcaacuuugaagaacg

SEQ ID NO: 580692 - RNA, 20 nt, Artificial Sequence
  Synthetic
caaggcaacuuugaagaacg

SEQ ID NO: 580693 - RNA, 21 nt, Artificial Sequence
  Synthetic
ccaaggcaacuuugaagaacg

SEQ ID NO: 580694 - RNA, 22 nt, Artificial Sequence
  Synthetic
uccaaggcaacuuugaagaacg

SEQ ID NO: 580695 - RNA, 23 nt, Artificial Sequence
  Synthetic
auccaaggcaacuuugaagaacg

SEQ ID NO: 580696 - RNA, 24 nt, Artificial Sequence
  Synthetic
uauccaaggcaacuuugaagaacg

SEQ ID NO: 580697 - RNA, 18 nt, Artificial Sequence
  Synthetic
uucccagccuccagaacg

SEQ ID NO: 580698 - RNA, 19 nt, Artificial Sequence
  Synthetic
cuucccagccuccagaacg

SEQ ID NO: 580699 - RNA, 20 nt, Artificial Sequence
  Synthetic
acuucccagccuccagaacg

SEQ ID NO: 580700 - RNA, 21 nt, Artificial Sequence
  Synthetic
aacuucccagccuccagaacg

SEQ ID NO: 580701 - RNA, 22 nt, Artificial Sequence
  Synthetic
gaacuucccagccuccagaacg

SEQ ID NO: 580702 - RNA, 23 nt, Artificial Sequence
  Synthetic
ugaacuucccagccuccagaacg

SEQ ID NO: 580703 - RNA, 24 nt, Artificial Sequence
  Synthetic
uugaacuucccagccuccagaacg

SEQ ID NO: 580704 - RNA, 18 nt, Artificial Sequence
  Synthetic
uuaaauccaucaugaacg

SEQ ID NO: 580705 - RNA, 19 nt, Artificial Sequence
  Synthetic
uuuaaauccaucaugaacg

SEQ ID NO: 580706 - RNA, 20 nt, Artificial Sequence
  Synthetic
uuuuaaauccaucaugaacg

SEQ ID NO: 580707 - RNA, 21 nt, Artificial Sequence
  Synthetic
auuuuaaauccaucaugaacg

SEQ ID NO: 580708 - RNA, 22 nt, Artificial Sequence
  Synthetic
cauuuuaaauccaucaugaacg

SEQ ID NO: 580709 - RNA, 23 nt, Artificial Sequence
  Synthetic
ucauuuuaaauccaucaugaacg

SEQ ID NO: 580710 - RNA, 24 nt, Artificial Sequence
  Synthetic
aucauuuuaaauccaucaugaacg

SEQ ID NO: 580711 - RNA, 18 nt, Artificial Sequence
  Synthetic
aaguuagguuggugaacg

SEQ ID NO: 580712 - RNA, 19 nt, Artificial Sequence
  Synthetic
caaguuagguuggugaacg

SEQ ID NO: 580713 - RNA, 20 nt, Artificial Sequence
  Synthetic
gcaaguuagguuggugaacg

SEQ ID NO: 580714 - RNA, 21 nt, Artificial Sequence
  Synthetic
ggcaaguuagguuggugaacg

SEQ ID NO: 580715 - RNA, 22 nt, Artificial Sequence
  Synthetic
gggcaaguuagguuggugaacg

SEQ ID NO: 580716 - RNA, 23 nt, Artificial Sequence
  Synthetic
ugggcaaguuagguuggugaacg

SEQ ID NO: 580717 - RNA, 24 nt, Artificial Sequence
  Synthetic
augggcaaguuagguuggugaacg

SEQ ID NO: 580718 - RNA, 18 nt, Artificial Sequence
  Synthetic
aggagaaucacuugaacg

SEQ ID NO: 580719 - RNA, 19 nt, Artificial Sequence
  Synthetic
caggagaaucacuugaacg

SEQ ID NO: 580720 - RNA, 20 nt, Artificial Sequence
  Synthetic
gcaggagaaucacuugaacg

SEQ ID NO: 580721 - RNA, 21 nt, Artificial Sequence
  Synthetic
ggcaggagaaucacuugaacg

SEQ ID NO: 580722 - RNA, 22 nt, Artificial Sequence
  Synthetic
aggcaggagaaucacuugaacg

SEQ ID NO: 580723 - RNA, 23 nt, Artificial Sequence
  Synthetic
gaggcaggagaaucacuugaacg

SEQ ID NO: 580724 - RNA, 24 nt, Artificial Sequence
  Synthetic
ugaggcaggagaaucacuugaacg

SEQ ID NO: 580725 - RNA, 20 nt, Artificial Sequence
  Synthetic
ccauaagugggaguugaacg

SEQ ID NO: 580726 - RNA, 21 nt, Artificial Sequence
  Synthetic
cccauaagugggaguugaacg

SEQ ID NO: 580727 - RNA, 22 nt, Artificial Sequence
  Synthetic
acccauaagugggaguugaacg

SEQ ID NO: 580728 - RNA, 23 nt, Artificial Sequence
  Synthetic
cacccauaagugggaguugaacg

SEQ ID NO: 580729 - RNA, 24 nt, Artificial Sequence
  Synthetic
ucacccauaagugggaguugaacg

SEQ ID NO: 580730 - RNA, 18 nt, Artificial Sequence
  Synthetic
aagacaauuuguugaacg

SEQ ID NO: 580731 - RNA, 19 nt, Artificial Sequence
  Synthetic
aaagacaauuuguugaacg

SEQ ID NO: 580732 - RNA, 20 nt, Artificial Sequence
  Synthetic
caaagacaauuuguugaacg

SEQ ID NO: 580733 - RNA, 21 nt, Artificial Sequence
  Synthetic
ucaaagacaauuuguugaacg

SEQ ID NO: 580734 - RNA, 22 nt, Artificial Sequence
  Synthetic
uucaaagacaauuuguugaacg

SEQ ID NO: 580735 - RNA, 23 nt, Artificial Sequence
  Synthetic
uuucaaagacaauuuguugaacg

SEQ ID NO: 580736 - RNA, 24 nt, Artificial Sequence
  Synthetic
guuucaaagacaauuuguugaacg

SEQ ID NO: 580737 - RNA, 18 nt, Artificial Sequence
  Synthetic
ucaggaauaaaaauaacg

SEQ ID NO: 580738 - RNA, 19 nt, Artificial Sequence
  Synthetic
uucaggaauaaaaauaacg

SEQ ID NO: 580739 - RNA, 20 nt, Artificial Sequence
  Synthetic
auucaggaauaaaaauaacg

SEQ ID NO: 580740 - RNA, 21 nt, Artificial Sequence
  Synthetic
cauucaggaauaaaaauaacg

SEQ ID NO: 580741 - RNA, 22 nt, Artificial Sequence
  Synthetic
ucauucaggaauaaaaauaacg

SEQ ID NO: 580742 - RNA, 23 nt, Artificial Sequence
  Synthetic
uucauucaggaauaaaaauaacg

SEQ ID NO: 580743 - RNA, 24 nt, Artificial Sequence
  Synthetic
cuucauucaggaauaaaaauaacg

SEQ ID NO: 580744 - RNA, 18 nt, Artificial Sequence
  Synthetic
agaaauuuguaaauaacg

SEQ ID NO: 580745 - RNA, 19 nt, Artificial Sequence
  Synthetic
cagaaauuuguaaauaacg

SEQ ID NO: 580746 - RNA, 20 nt, Artificial Sequence
  Synthetic
ucagaaauuuguaaauaacg

SEQ ID NO: 580747 - RNA, 21 nt, Artificial Sequence
  Synthetic
aucagaaauuuguaaauaacg

SEQ ID NO: 580748 - RNA, 22 nt, Artificial Sequence
  Synthetic
caucagaaauuuguaaauaacg

SEQ ID NO: 580749 - RNA, 23 nt, Artificial Sequence
  Synthetic
ucaucagaaauuuguaaauaacg

SEQ ID NO: 580750 - RNA, 24 nt, Artificial Sequence
  Synthetic
aucaucagaaauuuguaaauaacg

SEQ ID NO: 580751 - RNA, 18 nt, Artificial Sequence
  Synthetic
uugaagaaaauaauaacg

SEQ ID NO: 580752 - RNA, 19 nt, Artificial Sequence
  Synthetic
auugaagaaaauaauaacg

SEQ ID NO: 580753 - RNA, 20 nt, Artificial Sequence
  Synthetic
aauugaagaaaauaauaacg

SEQ ID NO: 580754 - RNA, 21 nt, Artificial Sequence
  Synthetic
aaauugaagaaaauaauaacg

SEQ ID NO: 580755 - RNA, 22 nt, Artificial Sequence
  Synthetic
aaaauugaagaaaauaauaacg

SEQ ID NO: 580756 - RNA, 23 nt, Artificial Sequence
  Synthetic
gaaaauugaagaaaauaauaacg

SEQ ID NO: 580757 - RNA, 24 nt, Artificial Sequence
  Synthetic
ugaaaauugaagaaaauaauaacg

SEQ ID NO: 580758 - RNA, 18 nt, Artificial Sequence
  Synthetic
ugugaguaauguauaacg

SEQ ID NO: 580759 - RNA, 19 nt, Artificial Sequence
  Synthetic
gugugaguaauguauaacg

SEQ ID NO: 580760 - RNA, 20 nt, Artificial Sequence
  Synthetic
ggugugaguaauguauaacg

SEQ ID NO: 580761 - RNA, 21 nt, Artificial Sequence
  Synthetic
aggugugaguaauguauaacg

SEQ ID NO: 580762 - RNA, 22 nt, Artificial Sequence
  Synthetic
caggugugaguaauguauaacg

SEQ ID NO: 580763 - RNA, 23 nt, Artificial Sequence
  Synthetic
acaggugugaguaauguauaacg

SEQ ID NO: 580764 - RNA, 24 nt, Artificial Sequence
  Synthetic
aacaggugugaguaauguauaacg

SEQ ID NO: 580765 - RNA, 18 nt, Artificial Sequence
  Synthetic
uacagcauguuacuaacg

SEQ ID NO: 580766 - RNA, 19 nt, Artificial Sequence
  Synthetic
guacagcauguuacuaacg

SEQ ID NO: 580767 - RNA, 20 nt, Artificial Sequence
  Synthetic
uguacagcauguuacuaacg

SEQ ID NO: 580768 - RNA, 21 nt, Artificial Sequence
  Synthetic
cuguacagcauguuacuaacg

SEQ ID NO: 580769 - RNA, 22 nt, Artificial Sequence
  Synthetic
gcuguacagcauguuacuaacg

SEQ ID NO: 580770 - RNA, 23 nt, Artificial Sequence
  Synthetic
ugcuguacagcauguuacuaacg

SEQ ID NO: 580771 - RNA, 24 nt, Artificial Sequence
  Synthetic
augcuguacagcauguuacuaacg

SEQ ID NO: 580772 - RNA, 18 nt, Artificial Sequence
  Synthetic
uaaaugacauauguaacg

SEQ ID NO: 580773 - RNA, 19 nt, Artificial Sequence
  Synthetic
guaaaugacauauguaacg

SEQ ID NO: 580774 - RNA, 20 nt, Artificial Sequence
  Synthetic
aguaaaugacauauguaacg

SEQ ID NO: 580775 - RNA, 21 nt, Artificial Sequence
  Synthetic
aaguaaaugacauauguaacg

SEQ ID NO: 580776 - RNA, 22 nt, Artificial Sequence
  Synthetic
gaaguaaaugacauauguaacg

SEQ ID NO: 580777 - RNA, 23 nt, Artificial Sequence
  Synthetic
ggaaguaaaugacauauguaacg

SEQ ID NO: 580778 - RNA, 24 nt, Artificial Sequence
  Synthetic
gggaaguaaaugacauauguaacg

SEQ ID NO: 580779 - RNA, 18 nt, Artificial Sequence
  Synthetic
aaauuugcauauguaacg

SEQ ID NO: 580780 - RNA, 19 nt, Artificial Sequence
  Synthetic
gaaauuugcauauguaacg

SEQ ID NO: 580781 - RNA, 20 nt, Artificial Sequence
  Synthetic
agaaauuugcauauguaacg

SEQ ID NO: 580782 - RNA, 21 nt, Artificial Sequence
  Synthetic
cagaaauuugcauauguaacg

SEQ ID NO: 580783 - RNA, 22 nt, Artificial Sequence
  Synthetic
acagaaauuugcauauguaacg

SEQ ID NO: 580784 - RNA, 23 nt, Artificial Sequence
  Synthetic
uacagaaauuugcauauguaacg

SEQ ID NO: 580785 - RNA, 24 nt, Artificial Sequence
  Synthetic
cuacagaaauuugcauauguaacg

SEQ ID NO: 580786 - RNA, 18 nt, Artificial Sequence
  Synthetic
aucauaagcaaauuaacg

SEQ ID NO: 580787 - RNA, 19 nt, Artificial Sequence
  Synthetic
aaucauaagcaaauuaacg

SEQ ID NO: 580788 - RNA, 20 nt, Artificial Sequence
  Synthetic
uaaucauaagcaaauuaacg

SEQ ID NO: 580789 - RNA, 21 nt, Artificial Sequence
  Synthetic
auaaucauaagcaaauuaacg

SEQ ID NO: 580790 - RNA, 22 nt, Artificial Sequence
  Synthetic
cauaaucauaagcaaauuaacg

SEQ ID NO: 580791 - RNA, 23 nt, Artificial Sequence
  Synthetic
ccauaaucauaagcaaauuaacg

SEQ ID NO: 580792 - RNA, 24 nt, Artificial Sequence
  Synthetic
gccauaaucauaagcaaauuaacg

SEQ ID NO: 580793 - RNA, 18 nt, Artificial Sequence
  Synthetic
caaaaagcacaguuaacg

SEQ ID NO: 580794 - RNA, 19 nt, Artificial Sequence
  Synthetic
ucaaaaagcacaguuaacg

SEQ ID NO: 580795 - RNA, 20 nt, Artificial Sequence
  Synthetic
gucaaaaagcacaguuaacg

SEQ ID NO: 580796 - RNA, 21 nt, Artificial Sequence
  Synthetic
ugucaaaaagcacaguuaacg

SEQ ID NO: 580797 - RNA, 22 nt, Artificial Sequence
  Synthetic
augucaaaaagcacaguuaacg

SEQ ID NO: 580798 - RNA, 23 nt, Artificial Sequence
  Synthetic
aaugucaaaaagcacaguuaacg

SEQ ID NO: 580799 - RNA, 24 nt, Artificial Sequence
  Synthetic
aaaugucaaaaagcacaguuaacg

SEQ ID NO: 580800 - RNA, 18 nt, Artificial Sequence
  Synthetic
auccuaagcacguuaacg

SEQ ID NO: 580801 - RNA, 19 nt, Artificial Sequence
  Synthetic
uauccuaagcacguuaacg

SEQ ID NO: 580802 - RNA, 20 nt, Artificial Sequence
  Synthetic
cuauccuaagcacguuaacg

SEQ ID NO: 580803 - RNA, 21 nt, Artificial Sequence
  Synthetic
acuauccuaagcacguuaacg

SEQ ID NO: 580804 - RNA, 22 nt, Artificial Sequence
  Synthetic
cacuauccuaagcacguuaacg

SEQ ID NO: 580805 - RNA, 23 nt, Artificial Sequence
  Synthetic
ccacuauccuaagcacguuaacg

SEQ ID NO: 580806 - RNA, 24 nt, Artificial Sequence
  Synthetic
gccacuauccuaagcacguuaacg

SEQ ID NO: 580807 - RNA, 18 nt, Artificial Sequence
  Synthetic
uauuuguaaguguuaacg

SEQ ID NO: 580808 - RNA, 19 nt, Artificial Sequence
  Synthetic
uuauuuguaaguguuaacg

SEQ ID NO: 580809 - RNA, 20 nt, Artificial Sequence
  Synthetic
auuauuuguaaguguuaacg

SEQ ID NO: 580810 - RNA, 21 nt, Artificial Sequence
  Synthetic
uauuauuuguaaguguuaacg

SEQ ID NO: 580811 - RNA, 22 nt, Artificial Sequence
  Synthetic
uuauuauuuguaaguguuaacg

SEQ ID NO: 580812 - RNA, 23 nt, Artificial Sequence
  Synthetic
uuuauuauuuguaaguguuaacg

SEQ ID NO: 580813 - RNA, 24 nt, Artificial Sequence
  Synthetic
cuuuauuauuuguaaguguuaacg

SEQ ID NO: 580814 - RNA, 18 nt, Artificial Sequence
  Synthetic
aaaaaggcaacaaacacg

SEQ ID NO: 580815 - RNA, 19 nt, Artificial Sequence
  Synthetic
caaaaaggcaacaaacacg

SEQ ID NO: 580816 - RNA, 20 nt, Artificial Sequence
  Synthetic
gcaaaaaggcaacaaacacg

SEQ ID NO: 580817 - RNA, 21 nt, Artificial Sequence
  Synthetic
ggcaaaaaggcaacaaacacg

SEQ ID NO: 580818 - RNA, 22 nt, Artificial Sequence
  Synthetic
uggcaaaaaggcaacaaacacg

SEQ ID NO: 580819 - RNA, 23 nt, Artificial Sequence
  Synthetic
guggcaaaaaggcaacaaacacg

SEQ ID NO: 580820 - RNA, 24 nt, Artificial Sequence
  Synthetic
uguggcaaaaaggcaacaaacacg

SEQ ID NO: 580821 - RNA, 18 nt, Artificial Sequence
  Synthetic
gaccaucuggccaacacg

SEQ ID NO: 580822 - RNA, 19 nt, Artificial Sequence
  Synthetic
agaccaucuggccaacacg

SEQ ID NO: 580823 - RNA, 20 nt, Artificial Sequence
  Synthetic
gagaccaucuggccaacacg

SEQ ID NO: 580824 - RNA, 21 nt, Artificial Sequence
  Synthetic
cgagaccaucuggccaacacg

SEQ ID NO: 580825 - RNA, 22 nt, Artificial Sequence
  Synthetic
ucgagaccaucuggccaacacg

SEQ ID NO: 580826 - RNA, 23 nt, Artificial Sequence
  Synthetic
aucgagaccaucuggccaacacg

SEQ ID NO: 580827 - RNA, 24 nt, Artificial Sequence
  Synthetic
gaucgagaccaucuggccaacacg

SEQ ID NO: 580828 - RNA, 18 nt, Artificial Sequence
  Synthetic
aacaaccuggcuaacacg

SEQ ID NO: 580829 - RNA, 19 nt, Artificial Sequence
  Synthetic
gaacaaccuggcuaacacg

SEQ ID NO: 580830 - RNA, 20 nt, Artificial Sequence
  Synthetic
agaacaaccuggcuaacacg

SEQ ID NO: 580831 - RNA, 21 nt, Artificial Sequence
  Synthetic
gagaacaaccuggcuaacacg

SEQ ID NO: 580832 - RNA, 22 nt, Artificial Sequence
  Synthetic
cgagaacaaccuggcuaacacg

SEQ ID NO: 580833 - RNA, 23 nt, Artificial Sequence
  Synthetic
ucgagaacaaccuggcuaacacg

SEQ ID NO: 580834 - RNA, 24 nt, Artificial Sequence
  Synthetic
aucgagaacaaccuggcuaacacg

SEQ ID NO: 580835 - RNA, 23 nt, Artificial Sequence
  Synthetic
ucgagaccauccuggcuaacacg

SEQ ID NO: 580836 - RNA, 24 nt, Artificial Sequence
  Synthetic
aucgagaccauccuggcuaacacg

SEQ ID NO: 580837 - RNA, 20 nt, Artificial Sequence
  Synthetic
ggaccauccuggcuaacacg

SEQ ID NO: 580838 - RNA, 21 nt, Artificial Sequence
  Synthetic
gggaccauccuggcuaacacg

SEQ ID NO: 580839 - RNA, 22 nt, Artificial Sequence
  Synthetic
cgggaccauccuggcuaacacg

SEQ ID NO: 580840 - RNA, 23 nt, Artificial Sequence
  Synthetic
ucgggaccauccuggcuaacacg

SEQ ID NO: 580841 - RNA, 24 nt, Artificial Sequence
  Synthetic
aucgggaccauccuggcuaacacg

SEQ ID NO: 580842 - RNA, 18 nt, Artificial Sequence
  Synthetic
uauuacuaguaacacacg

SEQ ID NO: 580843 - RNA, 19 nt, Artificial Sequence
  Synthetic
cuauuacuaguaacacacg

SEQ ID NO: 580844 - RNA, 20 nt, Artificial Sequence
  Synthetic
acuauuacuaguaacacacg

SEQ ID NO: 580845 - RNA, 21 nt, Artificial Sequence
  Synthetic
uacuauuacuaguaacacacg

SEQ ID NO: 580846 - RNA, 22 nt, Artificial Sequence
  Synthetic
uuacuauuacuaguaacacacg

SEQ ID NO: 580847 - RNA, 23 nt, Artificial Sequence
  Synthetic
auuacuauuacuaguaacacacg

SEQ ID NO: 580848 - RNA, 24 nt, Artificial Sequence
  Synthetic
cauuacuauuacuaguaacacacg

SEQ ID NO: 580849 - RNA, 18 nt, Artificial Sequence
  Synthetic
augccuucaggggacacg

SEQ ID NO: 580850 - RNA, 19 nt, Artificial Sequence
  Synthetic
aaugccuucaggggacacg

SEQ ID NO: 580851 - RNA, 20 nt, Artificial Sequence
  Synthetic
aaaugccuucaggggacacg

SEQ ID NO: 580852 - RNA, 21 nt, Artificial Sequence
  Synthetic
caaaugccuucaggggacacg

SEQ ID NO: 580853 - RNA, 22 nt, Artificial Sequence
  Synthetic
ucaaaugccuucaggggacacg

SEQ ID NO: 580854 - RNA, 23 nt, Artificial Sequence
  Synthetic
aucaaaugccuucaggggacacg

SEQ ID NO: 580855 - RNA, 24 nt, Artificial Sequence
  Synthetic
aaucaaaugccuucaggggacacg

SEQ ID NO: 580856 - RNA, 18 nt, Artificial Sequence
  Synthetic
ugagaacacauggacacg

SEQ ID NO: 580857 - RNA, 19 nt, Artificial Sequence
  Synthetic
augagaacacauggacacg

SEQ ID NO: 580858 - RNA, 20 nt, Artificial Sequence
  Synthetic
gaugagaacacauggacacg

SEQ ID NO: 580859 - RNA, 21 nt, Artificial Sequence
  Synthetic
ugaugagaacacauggacacg

SEQ ID NO: 580860 - RNA, 22 nt, Artificial Sequence
  Synthetic
augaugagaacacauggacacg

SEQ ID NO: 580861 - RNA, 23 nt, Artificial Sequence
  Synthetic
aaugaugagaacacauggacacg

SEQ ID NO: 580862 - RNA, 24 nt, Artificial Sequence
  Synthetic
aaaugaugagaacacauggacacg

SEQ ID NO: 580863 - RNA, 18 nt, Artificial Sequence
  Synthetic
cuuucuacacuuuacacg

SEQ ID NO: 580864 - RNA, 19 nt, Artificial Sequence
  Synthetic
gcuuucuacacuuuacacg

SEQ ID NO: 580865 - RNA, 20 nt, Artificial Sequence
  Synthetic
ugcuuucuacacuuuacacg

SEQ ID NO: 580866 - RNA, 21 nt, Artificial Sequence
  Synthetic
cugcuuucuacacuuuacacg

SEQ ID NO: 580867 - RNA, 22 nt, Artificial Sequence
  Synthetic
ucugcuuucuacacuuuacacg

SEQ ID NO: 580868 - RNA, 23 nt, Artificial Sequence
  Synthetic
uucugcuuucuacacuuuacacg

SEQ ID NO: 580869 - RNA, 24 nt, Artificial Sequence
  Synthetic
uuucugcuuucuacacuuuacacg

SEQ ID NO: 580870 - RNA, 18 nt, Artificial Sequence
  Synthetic
ggaggacauuauaccacg

SEQ ID NO: 580871 - RNA, 19 nt, Artificial Sequence
  Synthetic
aggaggacauuauaccacg

SEQ ID NO: 580872 - RNA, 20 nt, Artificial Sequence
  Synthetic
aaggaggacauuauaccacg

SEQ ID NO: 580873 - RNA, 21 nt, Artificial Sequence
  Synthetic
caaggaggacauuauaccacg

SEQ ID NO: 580874 - RNA, 22 nt, Artificial Sequence
  Synthetic
acaaggaggacauuauaccacg

SEQ ID NO: 580875 - RNA, 23 nt, Artificial Sequence
  Synthetic
gacaaggaggacauuauaccacg

SEQ ID NO: 580876 - RNA, 24 nt, Artificial Sequence
  Synthetic
ugacaaggaggacauuauaccacg

SEQ ID NO: 580877 - RNA, 18 nt, Artificial Sequence
  Synthetic
gaaucauuugagcccacg

SEQ ID NO: 580878 - RNA, 19 nt, Artificial Sequence
  Synthetic
agaaucauuugagcccacg

SEQ ID NO: 580879 - RNA, 20 nt, Artificial Sequence
  Synthetic
gagaaucauuugagcccacg

SEQ ID NO: 580880 - RNA, 21 nt, Artificial Sequence
  Synthetic
ggagaaucauuugagcccacg

SEQ ID NO: 580881 - RNA, 22 nt, Artificial Sequence
  Synthetic
aggagaaucauuugagcccacg

SEQ ID NO: 580882 - RNA, 23 nt, Artificial Sequence
  Synthetic
caggagaaucauuugagcccacg

SEQ ID NO: 580883 - RNA, 24 nt, Artificial Sequence
  Synthetic
gcaggagaaucauuugagcccacg

SEQ ID NO: 580884 - RNA, 18 nt, Artificial Sequence
  Synthetic
agaauauuugaggccacg

SEQ ID NO: 580885 - RNA, 19 nt, Artificial Sequence
  Synthetic
uagaauauuugaggccacg

SEQ ID NO: 580886 - RNA, 20 nt, Artificial Sequence
  Synthetic
uuagaauauuugaggccacg

SEQ ID NO: 580887 - RNA, 21 nt, Artificial Sequence
  Synthetic
auuagaauauuugaggccacg

SEQ ID NO: 580888 - RNA, 22 nt, Artificial Sequence
  Synthetic
cauuagaauauuugaggccacg

SEQ ID NO: 580889 - RNA, 23 nt, Artificial Sequence
  Synthetic
ccauuagaauauuugaggccacg

SEQ ID NO: 580890 - RNA, 24 nt, Artificial Sequence
  Synthetic
accauuagaauauuugaggccacg

SEQ ID NO: 580891 - RNA, 18 nt, Artificial Sequence
  Synthetic
ggucagacagguuccacg

SEQ ID NO: 580892 - RNA, 19 nt, Artificial Sequence
  Synthetic
aggucagacagguuccacg

SEQ ID NO: 580893 - RNA, 20 nt, Artificial Sequence
  Synthetic
aaggucagacagguuccacg

SEQ ID NO: 580894 - RNA, 21 nt, Artificial Sequence
  Synthetic
caaggucagacagguuccacg

SEQ ID NO: 580895 - RNA, 22 nt, Artificial Sequence
  Synthetic
ucaaggucagacagguuccacg

SEQ ID NO: 580896 - RNA, 23 nt, Artificial Sequence
  Synthetic
uucaaggucagacagguuccacg

SEQ ID NO: 580897 - RNA, 24 nt, Artificial Sequence
  Synthetic
guucaaggucagacagguuccacg

SEQ ID NO: 580898 - RNA, 18 nt, Artificial Sequence
  Synthetic
auccauggggguagcacg

SEQ ID NO: 580899 - RNA, 19 nt, Artificial Sequence
  Synthetic
uauccauggggguagcacg

SEQ ID NO: 580900 - RNA, 20 nt, Artificial Sequence
  Synthetic
uuauccauggggguagcacg

SEQ ID NO: 580901 - RNA, 21 nt, Artificial Sequence
  Synthetic
cuuauccauggggguagcacg

SEQ ID NO: 580902 - RNA, 22 nt, Artificial Sequence
  Synthetic
gcuuauccauggggguagcacg

SEQ ID NO: 580903 - RNA, 23 nt, Artificial Sequence
  Synthetic
ugcuuauccauggggguagcacg

SEQ ID NO: 580904 - RNA, 24 nt, Artificial Sequence
  Synthetic
augcuuauccauggggguagcacg

SEQ ID NO: 580905 - RNA, 18 nt, Artificial Sequence
  Synthetic
ugcuauagggcaggcacg

SEQ ID NO: 580906 - RNA, 19 nt, Artificial Sequence
  Synthetic
uugcuauagggcaggcacg

SEQ ID NO: 580907 - RNA, 20 nt, Artificial Sequence
  Synthetic
cuugcuauagggcaggcacg

SEQ ID NO: 580908 - RNA, 21 nt, Artificial Sequence
  Synthetic
gcuugcuauagggcaggcacg

SEQ ID NO: 580909 - RNA, 22 nt, Artificial Sequence
  Synthetic
ggcuugcuauagggcaggcacg

SEQ ID NO: 580910 - RNA, 23 nt, Artificial Sequence
  Synthetic
gggcuugcuauagggcaggcacg

SEQ ID NO: 580911 - RNA, 24 nt, Artificial Sequence
  Synthetic
ggggcuugcuauagggcaggcacg

SEQ ID NO: 580912 - RNA, 18 nt, Artificial Sequence
  Synthetic
gcagaauuuuuaugcacg

SEQ ID NO: 580913 - RNA, 19 nt, Artificial Sequence
  Synthetic
ugcagaauuuuuaugcacg

SEQ ID NO: 580914 - RNA, 20 nt, Artificial Sequence
  Synthetic
cugcagaauuuuuaugcacg

SEQ ID NO: 580915 - RNA, 21 nt, Artificial Sequence
  Synthetic
acugcagaauuuuuaugcacg

SEQ ID NO: 580916 - RNA, 22 nt, Artificial Sequence
  Synthetic
aacugcagaauuuuuaugcacg

SEQ ID NO: 580917 - RNA, 23 nt, Artificial Sequence
  Synthetic
aaacugcagaauuuuuaugcacg

SEQ ID NO: 580918 - RNA, 24 nt, Artificial Sequence
  Synthetic
gaaacugcagaauuuuuaugcacg

SEQ ID NO: 580919 - RNA, 18 nt, Artificial Sequence
  Synthetic
uuaaaacacaggugcacg

SEQ ID NO: 580920 - RNA, 19 nt, Artificial Sequence
  Synthetic
auuaaaacacaggugcacg

SEQ ID NO: 580921 - RNA, 20 nt, Artificial Sequence
  Synthetic
uauuaaaacacaggugcacg

SEQ ID NO: 580922 - RNA, 21 nt, Artificial Sequence
  Synthetic
uuauuaaaacacaggugcacg

SEQ ID NO: 580923 - RNA, 22 nt, Artificial Sequence
  Synthetic
cuuauuaaaacacaggugcacg

SEQ ID NO: 580924 - RNA, 23 nt, Artificial Sequence
  Synthetic
ucuuauuaaaacacaggugcacg

SEQ ID NO: 580925 - RNA, 24 nt, Artificial Sequence
  Synthetic
aucuuauuaaaacacaggugcacg

SEQ ID NO: 580926 - RNA, 18 nt, Artificial Sequence
  Synthetic
agucagugccugugcacg

SEQ ID NO: 580927 - RNA, 19 nt, Artificial Sequence
  Synthetic
cagucagugccugugcacg

SEQ ID NO: 580928 - RNA, 20 nt, Artificial Sequence
  Synthetic
ucagucagugccugugcacg

SEQ ID NO: 580929 - RNA, 21 nt, Artificial Sequence
  Synthetic
cucagucagugccugugcacg

SEQ ID NO: 580930 - RNA, 22 nt, Artificial Sequence
  Synthetic
ccucagucagugccugugcacg

SEQ ID NO: 580931 - RNA, 23 nt, Artificial Sequence
  Synthetic
gccucagucagugccugugcacg

SEQ ID NO: 580932 - RNA, 24 nt, Artificial Sequence
  Synthetic
ggccucagucagugccugugcacg

SEQ ID NO: 580933 - RNA, 18 nt, Artificial Sequence
  Synthetic
uuuagucauuuuugcacg

SEQ ID NO: 580934 - RNA, 19 nt, Artificial Sequence
  Synthetic
auuuagucauuuuugcacg

SEQ ID NO: 580935 - RNA, 20 nt, Artificial Sequence
  Synthetic
uauuuagucauuuuugcacg

SEQ ID NO: 580936 - RNA, 21 nt, Artificial Sequence
  Synthetic
uuauuuagucauuuuugcacg

SEQ ID NO: 580937 - RNA, 22 nt, Artificial Sequence
  Synthetic
uuuauuuagucauuuuugcacg

SEQ ID NO: 580938 - RNA, 23 nt, Artificial Sequence
  Synthetic
auuuauuuagucauuuuugcacg

SEQ ID NO: 580939 - RNA, 24 nt, Artificial Sequence
  Synthetic
aauuuauuuagucauuuuugcacg

SEQ ID NO: 580940 - RNA, 18 nt, Artificial Sequence
  Synthetic
ggagauaauugaaucacg

SEQ ID NO: 580941 - RNA, 19 nt, Artificial Sequence
  Synthetic
uggagauaauugaaucacg

SEQ ID NO: 580942 - RNA, 20 nt, Artificial Sequence
  Synthetic
guggagauaauugaaucacg

SEQ ID NO: 580943 - RNA, 21 nt, Artificial Sequence
  Synthetic
gguggagauaauugaaucacg

SEQ ID NO: 580944 - RNA, 22 nt, Artificial Sequence
  Synthetic
agguggagauaauugaaucacg

SEQ ID NO: 580945 - RNA, 23 nt, Artificial Sequence
  Synthetic
cagguggagauaauugaaucacg

SEQ ID NO: 580946 - RNA, 24 nt, Artificial Sequence
  Synthetic
ucagguggagauaauugaaucacg

SEQ ID NO: 580947 - RNA, 18 nt, Artificial Sequence
  Synthetic
aaguacggagcuaucacg

SEQ ID NO: 580948 - RNA, 19 nt, Artificial Sequence
  Synthetic
gaaguacggagcuaucacg

SEQ ID NO: 580949 - RNA, 20 nt, Artificial Sequence
  Synthetic
agaaguacggagcuaucacg

SEQ ID NO: 580950 - RNA, 21 nt, Artificial Sequence
  Synthetic
aagaaguacggagcuaucacg

SEQ ID NO: 580951 - RNA, 22 nt, Artificial Sequence
  Synthetic
gaagaaguacggagcuaucacg

SEQ ID NO: 580952 - RNA, 23 nt, Artificial Sequence
  Synthetic
agaagaaguacggagcuaucacg

SEQ ID NO: 580953 - RNA, 24 nt, Artificial Sequence
  Synthetic
cagaagaaguacggagcuaucacg

SEQ ID NO: 580954 - RNA, 18 nt, Artificial Sequence
  Synthetic
cuauucagguaacucacg

SEQ ID NO: 580955 - RNA, 19 nt, Artificial Sequence
  Synthetic
acuauucagguaacucacg

SEQ ID NO: 580956 - RNA, 20 nt, Artificial Sequence
  Synthetic
uacuauucagguaacucacg

SEQ ID NO: 580957 - RNA, 21 nt, Artificial Sequence
  Synthetic
auacuauucagguaacucacg

SEQ ID NO: 580958 - RNA, 22 nt, Artificial Sequence
  Synthetic
aauacuauucagguaacucacg

SEQ ID NO: 580959 - RNA, 23 nt, Artificial Sequence
  Synthetic
gaauacuauucagguaacucacg

SEQ ID NO: 580960 - RNA, 24 nt, Artificial Sequence
  Synthetic
agaauacuauucagguaacucacg

SEQ ID NO: 580961 - RNA, 18 nt, Artificial Sequence
  Synthetic
cucaggaaagaauucacg

SEQ ID NO: 580962 - RNA, 19 nt, Artificial Sequence
  Synthetic
gcucaggaaagaauucacg

SEQ ID NO: 580963 - RNA, 20 nt, Artificial Sequence
  Synthetic
ggcucaggaaagaauucacg

SEQ ID NO: 580964 - RNA, 21 nt, Artificial Sequence
  Synthetic
aggcucaggaaagaauucacg

SEQ ID NO: 580965 - RNA, 22 nt, Artificial Sequence
  Synthetic
uaggcucaggaaagaauucacg

SEQ ID NO: 580966 - RNA, 23 nt, Artificial Sequence
  Synthetic
auaggcucaggaaagaauucacg

SEQ ID NO: 580967 - RNA, 24 nt, Artificial Sequence
  Synthetic
cauaggcucaggaaagaauucacg

SEQ ID NO: 580968 - RNA, 18 nt, Artificial Sequence
  Synthetic
uuaagucaggaauucacg

SEQ ID NO: 580969 - RNA, 19 nt, Artificial Sequence
  Synthetic
cuuaagucaggaauucacg

SEQ ID NO: 580970 - RNA, 20 nt, Artificial Sequence
  Synthetic
acuuaagucaggaauucacg

SEQ ID NO: 580971 - RNA, 21 nt, Artificial Sequence
  Synthetic
uacuuaagucaggaauucacg

SEQ ID NO: 580972 - RNA, 22 nt, Artificial Sequence
  Synthetic
uuacuuaagucaggaauucacg

SEQ ID NO: 580973 - RNA, 23 nt, Artificial Sequence
  Synthetic
guuacuuaagucaggaauucacg

SEQ ID NO: 580974 - RNA, 24 nt, Artificial Sequence
  Synthetic
aguuacuuaagucaggaauucacg

SEQ ID NO: 580975 - RNA, 18 nt, Artificial Sequence
  Synthetic
ucaagguugucaaagacg

SEQ ID NO: 580976 - RNA, 19 nt, Artificial Sequence
  Synthetic
uucaagguugucaaagacg

SEQ ID NO: 580977 - RNA, 20 nt, Artificial Sequence
  Synthetic
cuucaagguugucaaagacg

SEQ ID NO: 580978 - RNA, 21 nt, Artificial Sequence
  Synthetic
ccuucaagguugucaaagacg

SEQ ID NO: 580979 - RNA, 22 nt, Artificial Sequence
  Synthetic
gccuucaagguugucaaagacg

SEQ ID NO: 580980 - RNA, 23 nt, Artificial Sequence
  Synthetic
ugccuucaagguugucaaagacg

SEQ ID NO: 580981 - RNA, 24 nt, Artificial Sequence
  Synthetic
gugccuucaagguugucaaagacg

SEQ ID NO: 580982 - RNA, 18 nt, Artificial Sequence
  Synthetic
gaagcaauacuaaagacg

SEQ ID NO: 580983 - RNA, 19 nt, Artificial Sequence
  Synthetic
agaagcaauacuaaagacg

SEQ ID NO: 580984 - RNA, 20 nt, Artificial Sequence
  Synthetic
uagaagcaauacuaaagacg

SEQ ID NO: 580985 - RNA, 21 nt, Artificial Sequence
  Synthetic
uuagaagcaauacuaaagacg

SEQ ID NO: 580986 - RNA, 22 nt, Artificial Sequence
  Synthetic
auuagaagcaauacuaaagacg

SEQ ID NO: 580987 - RNA, 23 nt, Artificial Sequence
  Synthetic
aauuagaagcaauacuaaagacg

SEQ ID NO: 580988 - RNA, 24 nt, Artificial Sequence
  Synthetic
gaauuagaagcaauacuaaagacg

SEQ ID NO: 580989 - RNA, 18 nt, Artificial Sequence
  Synthetic
acguugugccuuaagacg

SEQ ID NO: 580990 - RNA, 19 nt, Artificial Sequence
  Synthetic
gacguugugccuuaagacg

SEQ ID NO: 580991 - RNA, 20 nt, Artificial Sequence
  Synthetic
agacguugugccuuaagacg

SEQ ID NO: 580992 - RNA, 21 nt, Artificial Sequence
  Synthetic
uagacguugugccuuaagacg

SEQ ID NO: 580993 - RNA, 22 nt, Artificial Sequence
  Synthetic
uuagacguugugccuuaagacg

SEQ ID NO: 580994 - RNA, 23 nt, Artificial Sequence
  Synthetic
uuuagacguugugccuuaagacg

SEQ ID NO: 580995 - RNA, 24 nt, Artificial Sequence
  Synthetic
cuuuagacguugugccuuaagacg

SEQ ID NO: 580996 - RNA, 18 nt, Artificial Sequence
  Synthetic
agagaggaacaacagacg

SEQ ID NO: 580997 - RNA, 19 nt, Artificial Sequence
  Synthetic
cagagaggaacaacagacg

SEQ ID NO: 580998 - RNA, 20 nt, Artificial Sequence
  Synthetic
acagagaggaacaacagacg

SEQ ID NO: 580999 - RNA, 21 nt, Artificial Sequence
  Synthetic
cacagagaggaacaacagacg

SEQ ID NO: 581000 - RNA, 22 nt, Artificial Sequence
  Synthetic
acacagagaggaacaacagacg

SEQ ID NO: 581001 - RNA, 23 nt, Artificial Sequence
  Synthetic
gacacagagaggaacaacagacg

SEQ ID NO: 581002 - RNA, 24 nt, Artificial Sequence
  Synthetic
ggacacagagaggaacaacagacg

SEQ ID NO: 581003 - RNA, 18 nt, Artificial Sequence
  Synthetic
auauacagaaaggagacg

SEQ ID NO: 581004 - RNA, 19 nt, Artificial Sequence
  Synthetic
uauauacagaaaggagacg

SEQ ID NO: 581005 - RNA, 20 nt, Artificial Sequence
  Synthetic
auauauacagaaaggagacg

SEQ ID NO: 581006 - RNA, 21 nt, Artificial Sequence
  Synthetic
uauauauacagaaaggagacg

SEQ ID NO: 581007 - RNA, 22 nt, Artificial Sequence
  Synthetic
auauauauacagaaaggagacg

SEQ ID NO: 581008 - RNA, 23 nt, Artificial Sequence
  Synthetic
aauauauauacagaaaggagacg

SEQ ID NO: 581009 - RNA, 24 nt, Artificial Sequence
  Synthetic
uaauauauauacagaaaggagacg

SEQ ID NO: 581010 - RNA, 18 nt, Artificial Sequence
  Synthetic
aaucaggcuagugagacg

SEQ ID NO: 581011 - RNA, 19 nt, Artificial Sequence
  Synthetic
aaaucaggcuagugagacg

SEQ ID NO: 581012 - RNA, 20 nt, Artificial Sequence
  Synthetic
gaaaucaggcuagugagacg

SEQ ID NO: 581013 - RNA, 21 nt, Artificial Sequence
  Synthetic
ugaaaucaggcuagugagacg

SEQ ID NO: 581014 - RNA, 22 nt, Artificial Sequence
  Synthetic
uugaaaucaggcuagugagacg

SEQ ID NO: 581015 - RNA, 23 nt, Artificial Sequence
  Synthetic
auugaaaucaggcuagugagacg

SEQ ID NO: 581016 - RNA, 24 nt, Artificial Sequence
  Synthetic
aauugaaaucaggcuagugagacg

SEQ ID NO: 581017 - RNA, 18 nt, Artificial Sequence
  Synthetic
agauuuuggguugagacg

SEQ ID NO: 581018 - RNA, 19 nt, Artificial Sequence
  Synthetic
aagauuuuggguugagacg

SEQ ID NO: 581019 - RNA, 20 nt, Artificial Sequence
  Synthetic
gaagauuuuggguugagacg

SEQ ID NO: 581020 - RNA, 21 nt, Artificial Sequence
  Synthetic
agaagauuuuggguugagacg

SEQ ID NO: 581021 - RNA, 22 nt, Artificial Sequence
  Synthetic
aagaagauuuuggguugagacg

SEQ ID NO: 581022 - RNA, 23 nt, Artificial Sequence
  Synthetic
uaagaagauuuuggguugagacg

SEQ ID NO: 581023 - RNA, 24 nt, Artificial Sequence
  Synthetic
uuaagaagauuuuggguugagacg

SEQ ID NO: 581024 - RNA, 18 nt, Artificial Sequence
  Synthetic
uuaguuccucacuagacg

SEQ ID NO: 581025 - RNA, 19 nt, Artificial Sequence
  Synthetic
uuuaguuccucacuagacg

SEQ ID NO: 581026 - RNA, 20 nt, Artificial Sequence
  Synthetic
uuuuaguuccucacuagacg

SEQ ID NO: 581027 - RNA, 21 nt, Artificial Sequence
  Synthetic
uuuuuaguuccucacuagacg

SEQ ID NO: 581028 - RNA, 22 nt, Artificial Sequence
  Synthetic
guuuuuaguuccucacuagacg

SEQ ID NO: 581029 - RNA, 23 nt, Artificial Sequence
  Synthetic
uguuuuuaguuccucacuagacg

SEQ ID NO: 581030 - RNA, 24 nt, Artificial Sequence
  Synthetic
guguuuuuaguuccucacuagacg

SEQ ID NO: 581031 - RNA, 18 nt, Artificial Sequence
  Synthetic
uuauccaagauguagacg

SEQ ID NO: 581032 - RNA, 19 nt, Artificial Sequence
  Synthetic
uuuauccaagauguagacg

SEQ ID NO: 581033 - RNA, 20 nt, Artificial Sequence
  Synthetic
auuuauccaagauguagacg

SEQ ID NO: 581034 - RNA, 21 nt, Artificial Sequence
  Synthetic
aauuuauccaagauguagacg

SEQ ID NO: 581035 - RNA, 22 nt, Artificial Sequence
  Synthetic
gaauuuauccaagauguagacg

SEQ ID NO: 581036 - RNA, 23 nt, Artificial Sequence
  Synthetic
ggaauuuauccaagauguagacg

SEQ ID NO: 581037 - RNA, 24 nt, Artificial Sequence
  Synthetic
gggaauuuauccaagauguagacg

SEQ ID NO: 581038 - RNA, 18 nt, Artificial Sequence
  Synthetic
uugagcugguaaacgacg

SEQ ID NO: 581039 - RNA, 19 nt, Artificial Sequence
  Synthetic
uuugagcugguaaacgacg

SEQ ID NO: 581040 - RNA, 20 nt, Artificial Sequence
  Synthetic
uuuugagcugguaaacgacg

SEQ ID NO: 581041 - RNA, 21 nt, Artificial Sequence
  Synthetic
auuuugagcugguaaacgacg

SEQ ID NO: 581042 - RNA, 22 nt, Artificial Sequence
  Synthetic
gauuuugagcugguaaacgacg

SEQ ID NO: 581043 - RNA, 23 nt, Artificial Sequence
  Synthetic
agauuuugagcugguaaacgacg

SEQ ID NO: 581044 - RNA, 24 nt, Artificial Sequence
  Synthetic
gagauuuugagcugguaaacgacg

SEQ ID NO: 581045 - RNA, 18 nt, Artificial Sequence
  Synthetic
aauuaaaccuagaggacg

SEQ ID NO: 581046 - RNA, 19 nt, Artificial Sequence
  Synthetic
aaauuaaaccuagaggacg

SEQ ID NO: 581047 - RNA, 20 nt, Artificial Sequence
  Synthetic
aaaauuaaaccuagaggacg

SEQ ID NO: 581048 - RNA, 21 nt, Artificial Sequence
  Synthetic
uaaaauuaaaccuagaggacg

SEQ ID NO: 581049 - RNA, 22 nt, Artificial Sequence
  Synthetic
uuaaaauuaaaccuagaggacg

SEQ ID NO: 581050 - RNA, 23 nt, Artificial Sequence
  Synthetic
uuuaaaauuaaaccuagaggacg

SEQ ID NO: 581051 - RNA, 24 nt, Artificial Sequence
  Synthetic
uuuuaaaauuaaaccuagaggacg

SEQ ID NO: 581052 - RNA, 18 nt, Artificial Sequence
  Synthetic
ucguggggugaggggacg

SEQ ID NO: 581053 - RNA, 19 nt, Artificial Sequence
  Synthetic
gucguggggugaggggacg

SEQ ID NO: 581054 - RNA, 20 nt, Artificial Sequence
  Synthetic
ugucguggggugaggggacg

SEQ ID NO: 581055 - RNA, 21 nt, Artificial Sequence
  Synthetic
cugucguggggugaggggacg

SEQ ID NO: 581056 - RNA, 22 nt, Artificial Sequence
  Synthetic
ccugucguggggugaggggacg

SEQ ID NO: 581057 - RNA, 23 nt, Artificial Sequence
  Synthetic
gccugucguggggugaggggacg

SEQ ID NO: 581058 - RNA, 24 nt, Artificial Sequence
  Synthetic
ggccugucguggggugaggggacg

SEQ ID NO: 581059 - RNA, 18 nt, Artificial Sequence
  Synthetic
aucaguaaaguggggacg

SEQ ID NO: 581060 - RNA, 19 nt, Artificial Sequence
  Synthetic
uaucaguaaaguggggacg

SEQ ID NO: 581061 - RNA, 20 nt, Artificial Sequence
  Synthetic
auaucaguaaaguggggacg

SEQ ID NO: 581062 - RNA, 21 nt, Artificial Sequence
  Synthetic
cauaucaguaaaguggggacg

SEQ ID NO: 581063 - RNA, 22 nt, Artificial Sequence
  Synthetic
ucauaucaguaaaguggggacg

SEQ ID NO: 581064 - RNA, 23 nt, Artificial Sequence
  Synthetic
uucauaucaguaaaguggggacg

SEQ ID NO: 581065 - RNA, 24 nt, Artificial Sequence
  Synthetic
auucauaucaguaaaguggggacg

SEQ ID NO: 581066 - RNA, 18 nt, Artificial Sequence
  Synthetic
ucaccugaaccugggacg

SEQ ID NO: 581067 - RNA, 19 nt, Artificial Sequence
  Synthetic
aucaccugaaccugggacg

SEQ ID NO: 581068 - RNA, 20 nt, Artificial Sequence
  Synthetic
aaucaccugaaccugggacg

SEQ ID NO: 581069 - RNA, 21 nt, Artificial Sequence
  Synthetic
gaaucaccugaaccugggacg

SEQ ID NO: 581070 - RNA, 22 nt, Artificial Sequence
  Synthetic
agaaucaccugaaccugggacg

SEQ ID NO: 581071 - RNA, 23 nt, Artificial Sequence
  Synthetic
gagaaucaccugaaccugggacg

SEQ ID NO: 581072 - RNA, 24 nt, Artificial Sequence
  Synthetic
ugagaaucaccugaaccugggacg

SEQ ID NO: 581073 - RNA, 18 nt, Artificial Sequence
  Synthetic
aaugagaacaccuggacg

SEQ ID NO: 581074 - RNA, 19 nt, Artificial Sequence
  Synthetic
caaugagaacaccuggacg

SEQ ID NO: 581075 - RNA, 20 nt, Artificial Sequence
  Synthetic
acaaugagaacaccuggacg

SEQ ID NO: 581076 - RNA, 21 nt, Artificial Sequence
  Synthetic
aacaaugagaacaccuggacg

SEQ ID NO: 581077 - RNA, 22 nt, Artificial Sequence
  Synthetic
gaacaaugagaacaccuggacg

SEQ ID NO: 581078 - RNA, 23 nt, Artificial Sequence
  Synthetic
ugaacaaugagaacaccuggacg

SEQ ID NO: 581079 - RNA, 24 nt, Artificial Sequence
  Synthetic
uugaacaaugagaacaccuggacg

SEQ ID NO: 581080 - RNA, 18 nt, Artificial Sequence
  Synthetic
cugcucgggaggaugacg

SEQ ID NO: 581081 - RNA, 19 nt, Artificial Sequence
  Synthetic
gcugcucgggaggaugacg

SEQ ID NO: 581082 - RNA, 20 nt, Artificial Sequence
  Synthetic
agcugcucgggaggaugacg

SEQ ID NO: 581083 - RNA, 21 nt, Artificial Sequence
  Synthetic
cagcugcucgggaggaugacg

SEQ ID NO: 581084 - RNA, 22 nt, Artificial Sequence
  Synthetic
ccagcugcucgggaggaugacg

SEQ ID NO: 581085 - RNA, 23 nt, Artificial Sequence
  Synthetic
cccagcugcucgggaggaugacg

SEQ ID NO: 581086 - RNA, 24 nt, Artificial Sequence
  Synthetic
ucccagcugcucgggaggaugacg

SEQ ID NO: 581087 - RNA, 18 nt, Artificial Sequence
  Synthetic
cacacaugggugaugacg

SEQ ID NO: 581088 - RNA, 19 nt, Artificial Sequence
  Synthetic
ucacacaugggugaugacg

SEQ ID NO: 581089 - RNA, 20 nt, Artificial Sequence
  Synthetic
aucacacaugggugaugacg

SEQ ID NO: 581090 - RNA, 21 nt, Artificial Sequence
  Synthetic
uaucacacaugggugaugacg

SEQ ID NO: 581091 - RNA, 22 nt, Artificial Sequence
  Synthetic
cuaucacacaugggugaugacg

SEQ ID NO: 581092 - RNA, 23 nt, Artificial Sequence
  Synthetic
acuaucacacaugggugaugacg

SEQ ID NO: 581093 - RNA, 24 nt, Artificial Sequence
  Synthetic
cacuaucacacaugggugaugacg

SEQ ID NO: 581094 - RNA, 18 nt, Artificial Sequence
  Synthetic
aggaggucaaagcugacg

SEQ ID NO: 581095 - RNA, 19 nt, Artificial Sequence
  Synthetic
gaggaggucaaagcugacg

SEQ ID NO: 581096 - RNA, 20 nt, Artificial Sequence
  Synthetic
ugaggaggucaaagcugacg

SEQ ID NO: 581097 - RNA, 21 nt, Artificial Sequence
  Synthetic
gugaggaggucaaagcugacg

SEQ ID NO: 581098 - RNA, 22 nt, Artificial Sequence
  Synthetic
agugaggaggucaaagcugacg

SEQ ID NO: 581099 - RNA, 23 nt, Artificial Sequence
  Synthetic
uagugaggaggucaaagcugacg

SEQ ID NO: 581100 - RNA, 24 nt, Artificial Sequence
  Synthetic
cuagugaggaggucaaagcugacg

SEQ ID NO: 581101 - RNA, 18 nt, Artificial Sequence
  Synthetic
caauacugcuaucugacg

SEQ ID NO: 581102 - RNA, 19 nt, Artificial Sequence
  Synthetic
gcaauacugcuaucugacg

SEQ ID NO: 581103 - RNA, 20 nt, Artificial Sequence
  Synthetic
agcaauacugcuaucugacg

SEQ ID NO: 581104 - RNA, 21 nt, Artificial Sequence
  Synthetic
aagcaauacugcuaucugacg

SEQ ID NO: 581105 - RNA, 22 nt, Artificial Sequence
  Synthetic
caagcaauacugcuaucugacg

SEQ ID NO: 581106 - RNA, 23 nt, Artificial Sequence
  Synthetic
ccaagcaauacugcuaucugacg

SEQ ID NO: 581107 - RNA, 24 nt, Artificial Sequence
  Synthetic
gccaagcaauacugcuaucugacg

SEQ ID NO: 581108 - RNA, 18 nt, Artificial Sequence
  Synthetic
cugguguuccaggugacg

SEQ ID NO: 581109 - RNA, 19 nt, Artificial Sequence
  Synthetic
gcugguguuccaggugacg

SEQ ID NO: 581110 - RNA, 20 nt, Artificial Sequence
  Synthetic
cgcugguguuccaggugacg

SEQ ID NO: 581111 - RNA, 21 nt, Artificial Sequence
  Synthetic
ucgcugguguuccaggugacg

SEQ ID NO: 581112 - RNA, 22 nt, Artificial Sequence
  Synthetic
cucgcugguguuccaggugacg

SEQ ID NO: 581113 - RNA, 23 nt, Artificial Sequence
  Synthetic
ucucgcugguguuccaggugacg

SEQ ID NO: 581114 - RNA, 24 nt, Artificial Sequence
  Synthetic
aucucgcugguguuccaggugacg

SEQ ID NO: 581115 - RNA, 18 nt, Artificial Sequence
  Synthetic
gauaguuccuuugugacg

SEQ ID NO: 581116 - RNA, 19 nt, Artificial Sequence
  Synthetic
agauaguuccuuugugacg

SEQ ID NO: 581117 - RNA, 20 nt, Artificial Sequence
  Synthetic
gagauaguuccuuugugacg

SEQ ID NO: 581118 - RNA, 21 nt, Artificial Sequence
  Synthetic
ugagauaguuccuuugugacg

SEQ ID NO: 581119 - RNA, 22 nt, Artificial Sequence
  Synthetic
uugagauaguuccuuugugacg

SEQ ID NO: 581120 - RNA, 23 nt, Artificial Sequence
  Synthetic
cuugagauaguuccuuugugacg

SEQ ID NO: 581121 - RNA, 24 nt, Artificial Sequence
  Synthetic
gcuugagauaguuccuuugugacg

SEQ ID NO: 581122 - RNA, 18 nt, Artificial Sequence
  Synthetic
ucacuuuacucguugacg

SEQ ID NO: 581123 - RNA, 19 nt, Artificial Sequence
  Synthetic
uucacuuuacucguugacg

SEQ ID NO: 581124 - RNA, 20 nt, Artificial Sequence
  Synthetic
uuucacuuuacucguugacg

SEQ ID NO: 581125 - RNA, 21 nt, Artificial Sequence
  Synthetic
auuucacuuuacucguugacg

SEQ ID NO: 581126 - RNA, 22 nt, Artificial Sequence
  Synthetic
aauuucacuuuacucguugacg

SEQ ID NO: 581127 - RNA, 23 nt, Artificial Sequence
  Synthetic
aaauuucacuuuacucguugacg

SEQ ID NO: 581128 - RNA, 24 nt, Artificial Sequence
  Synthetic
uaaauuucacuuuacucguugacg

SEQ ID NO: 581129 - RNA, 18 nt, Artificial Sequence
  Synthetic
uaaagucuaucuuugacg

SEQ ID NO: 581130 - RNA, 19 nt, Artificial Sequence
  Synthetic
cuaaagucuaucuuugacg

SEQ ID NO: 581131 - RNA, 20 nt, Artificial Sequence
  Synthetic
ccuaaagucuaucuuugacg

SEQ ID NO: 581132 - RNA, 21 nt, Artificial Sequence
  Synthetic
gccuaaagucuaucuuugacg

SEQ ID NO: 581133 - RNA, 22 nt, Artificial Sequence
  Synthetic
agccuaaagucuaucuuugacg

SEQ ID NO: 581134 - RNA, 23 nt, Artificial Sequence
  Synthetic
uagccuaaagucuaucuuugacg

SEQ ID NO: 581135 - RNA, 24 nt, Artificial Sequence
  Synthetic
uuagccuaaagucuaucuuugacg

SEQ ID NO: 581136 - RNA, 18 nt, Artificial Sequence
  Synthetic
aaaaguaacacaaauacg

SEQ ID NO: 581137 - RNA, 19 nt, Artificial Sequence
  Synthetic
gaaaaguaacacaaauacg

SEQ ID NO: 581138 - RNA, 20 nt, Artificial Sequence
  Synthetic
agaaaaguaacacaaauacg

SEQ ID NO: 581139 - RNA, 21 nt, Artificial Sequence
  Synthetic
cagaaaaguaacacaaauacg

SEQ ID NO: 581140 - RNA, 22 nt, Artificial Sequence
  Synthetic
ucagaaaaguaacacaaauacg

SEQ ID NO: 581141 - RNA, 23 nt, Artificial Sequence
  Synthetic
gucagaaaaguaacacaaauacg

SEQ ID NO: 581142 - RNA, 24 nt, Artificial Sequence
  Synthetic
agucagaaaaguaacacaaauacg

SEQ ID NO: 581143 - RNA, 18 nt, Artificial Sequence
  Synthetic
aaauggacuaggaauacg

SEQ ID NO: 581144 - RNA, 19 nt, Artificial Sequence
  Synthetic
aaaauggacuaggaauacg

SEQ ID NO: 581145 - RNA, 20 nt, Artificial Sequence
  Synthetic
aaaaauggacuaggaauacg

SEQ ID NO: 581146 - RNA, 21 nt, Artificial Sequence
  Synthetic
gaaaaauggacuaggaauacg

SEQ ID NO: 581147 - RNA, 22 nt, Artificial Sequence
  Synthetic
agaaaaauggacuaggaauacg

SEQ ID NO: 581148 - RNA, 23 nt, Artificial Sequence
  Synthetic
aagaaaaauggacuaggaauacg

SEQ ID NO: 581149 - RNA, 24 nt, Artificial Sequence
  Synthetic
gaagaaaaauggacuaggaauacg

SEQ ID NO: 581150 - RNA, 18 nt, Artificial Sequence
  Synthetic
gaaaaacaugcuaauacg

SEQ ID NO: 581151 - RNA, 19 nt, Artificial Sequence
  Synthetic
agaaaaacaugcuaauacg

SEQ ID NO: 581152 - RNA, 20 nt, Artificial Sequence
  Synthetic
gagaaaaacaugcuaauacg

SEQ ID NO: 581153 - RNA, 21 nt, Artificial Sequence
  Synthetic
ggagaaaaacaugcuaauacg

SEQ ID NO: 581154 - RNA, 22 nt, Artificial Sequence
  Synthetic
aggagaaaaacaugcuaauacg

SEQ ID NO: 581155 - RNA, 23 nt, Artificial Sequence
  Synthetic
caggagaaaaacaugcuaauacg

SEQ ID NO: 581156 - RNA, 24 nt, Artificial Sequence
  Synthetic
acaggagaaaaacaugcuaauacg

SEQ ID NO: 581157 - RNA, 18 nt, Artificial Sequence
  Synthetic
aaauuggcuagccauacg

SEQ ID NO: 581158 - RNA, 19 nt, Artificial Sequence
  Synthetic
aaaauuggcuagccauacg

SEQ ID NO: 581159 - RNA, 20 nt, Artificial Sequence
  Synthetic
gaaaauuggcuagccauacg

SEQ ID NO: 581160 - RNA, 21 nt, Artificial Sequence
  Synthetic
ggaaaauuggcuagccauacg

SEQ ID NO: 581161 - RNA, 22 nt, Artificial Sequence
  Synthetic
gggaaaauuggcuagccauacg

SEQ ID NO: 581162 - RNA, 23 nt, Artificial Sequence
  Synthetic
ugggaaaauuggcuagccauacg

SEQ ID NO: 581163 - RNA, 24 nt, Artificial Sequence
  Synthetic
cugggaaaauuggcuagccauacg

SEQ ID NO: 581164 - RNA, 18 nt, Artificial Sequence
  Synthetic
ugauaaacccaucauacg

SEQ ID NO: 581165 - RNA, 19 nt, Artificial Sequence
  Synthetic
cugauaaacccaucauacg

SEQ ID NO: 581166 - RNA, 20 nt, Artificial Sequence
  Synthetic
ccugauaaacccaucauacg

SEQ ID NO: 581167 - RNA, 21 nt, Artificial Sequence
  Synthetic
uccugauaaacccaucauacg

SEQ ID NO: 581168 - RNA, 22 nt, Artificial Sequence
  Synthetic
uuccugauaaacccaucauacg

SEQ ID NO: 581169 - RNA, 23 nt, Artificial Sequence
  Synthetic
uuuccugauaaacccaucauacg

SEQ ID NO: 581170 - RNA, 24 nt, Artificial Sequence
  Synthetic
auuuccugauaaacccaucauacg

SEQ ID NO: 581171 - RNA, 18 nt, Artificial Sequence
  Synthetic
uuaaaacaaaaagauacg

SEQ ID NO: 581172 - RNA, 19 nt, Artificial Sequence
  Synthetic
uuuaaaacaaaaagauacg

SEQ ID NO: 581173 - RNA, 20 nt, Artificial Sequence
  Synthetic
uuuuaaaacaaaaagauacg

SEQ ID NO: 581174 - RNA, 21 nt, Artificial Sequence
  Synthetic
auuuuaaaacaaaaagauacg

SEQ ID NO: 581175 - RNA, 22 nt, Artificial Sequence
  Synthetic
uauuuuaaaacaaaaagauacg

SEQ ID NO: 581176 - RNA, 23 nt, Artificial Sequence
  Synthetic
uuauuuuaaaacaaaaagauacg

SEQ ID NO: 581177 - RNA, 24 nt, Artificial Sequence
  Synthetic
auuauuuuaaaacaaaaagauacg

SEQ ID NO: 581178 - RNA, 18 nt, Artificial Sequence
  Synthetic
acuuccauaacagauacg

SEQ ID NO: 581179 - RNA, 19 nt, Artificial Sequence
  Synthetic
cacuuccauaacagauacg

SEQ ID NO: 581180 - RNA, 20 nt, Artificial Sequence
  Synthetic
gcacuuccauaacagauacg

SEQ ID NO: 581181 - RNA, 21 nt, Artificial Sequence
  Synthetic
agcacuuccauaacagauacg

SEQ ID NO: 581182 - RNA, 22 nt, Artificial Sequence
  Synthetic
uagcacuuccauaacagauacg

SEQ ID NO: 581183 - RNA, 23 nt, Artificial Sequence
  Synthetic
uuagcacuuccauaacagauacg

SEQ ID NO: 581184 - RNA, 24 nt, Artificial Sequence
  Synthetic
auuagcacuuccauaacagauacg

SEQ ID NO: 581185 - RNA, 18 nt, Artificial Sequence
  Synthetic
uaagauccuuaugauacg

SEQ ID NO: 581186 - RNA, 19 nt, Artificial Sequence
  Synthetic
uuaagauccuuaugauacg

SEQ ID NO: 581187 - RNA, 20 nt, Artificial Sequence
  Synthetic
guuaagauccuuaugauacg

SEQ ID NO: 581188 - RNA, 21 nt, Artificial Sequence
  Synthetic
uguuaagauccuuaugauacg

SEQ ID NO: 581189 - RNA, 22 nt, Artificial Sequence
  Synthetic
guguuaagauccuuaugauacg

SEQ ID NO: 581190 - RNA, 23 nt, Artificial Sequence
  Synthetic
gguguuaagauccuuaugauacg

SEQ ID NO: 581191 - RNA, 24 nt, Artificial Sequence
  Synthetic
agguguuaagauccuuaugauacg

SEQ ID NO: 581192 - RNA, 18 nt, Artificial Sequence
  Synthetic
uauguucucacugauacg

SEQ ID NO: 581193 - RNA, 19 nt, Artificial Sequence
  Synthetic
auauguucucacugauacg

SEQ ID NO: 581194 - RNA, 20 nt, Artificial Sequence
  Synthetic
cauauguucucacugauacg

SEQ ID NO: 581195 - RNA, 21 nt, Artificial Sequence
  Synthetic
gcauauguucucacugauacg

SEQ ID NO: 581196 - RNA, 22 nt, Artificial Sequence
  Synthetic
agcauauguucucacugauacg

SEQ ID NO: 581197 - RNA, 23 nt, Artificial Sequence
  Synthetic
cagcauauguucucacugauacg

SEQ ID NO: 581198 - RNA, 24 nt, Artificial Sequence
  Synthetic
acagcauauguucucacugauacg

SEQ ID NO: 581199 - RNA, 18 nt, Artificial Sequence
  Synthetic
auuagaugaucugauacg

SEQ ID NO: 581200 - RNA, 19 nt, Artificial Sequence
  Synthetic
aauuagaugaucugauacg

SEQ ID NO: 581201 - RNA, 20 nt, Artificial Sequence
  Synthetic
aaauuagaugaucugauacg

SEQ ID NO: 581202 - RNA, 21 nt, Artificial Sequence
  Synthetic
caaauuagaugaucugauacg

SEQ ID NO: 581203 - RNA, 22 nt, Artificial Sequence
  Synthetic
gcaaauuagaugaucugauacg

SEQ ID NO: 581204 - RNA, 23 nt, Artificial Sequence
  Synthetic
ugcaaauuagaugaucugauacg

SEQ ID NO: 581205 - RNA, 24 nt, Artificial Sequence
  Synthetic
uugcaaauuagaugaucugauacg

SEQ ID NO: 581206 - RNA, 18 nt, Artificial Sequence
  Synthetic
auauaacauguauauacg

SEQ ID NO: 581207 - RNA, 19 nt, Artificial Sequence
  Synthetic
uauauaacauguauauacg

SEQ ID NO: 581208 - RNA, 20 nt, Artificial Sequence
  Synthetic
auauauaacauguauauacg

SEQ ID NO: 581209 - RNA, 21 nt, Artificial Sequence
  Synthetic
uauauauaacauguauauacg

SEQ ID NO: 581210 - RNA, 22 nt, Artificial Sequence
  Synthetic
guauauauaacauguauauacg

SEQ ID NO: 581211 - RNA, 23 nt, Artificial Sequence
  Synthetic
uguauauauaacauguauauacg

SEQ ID NO: 581212 - RNA, 24 nt, Artificial Sequence
  Synthetic
auguauauauaacauguauauacg

SEQ ID NO: 581213 - RNA, 18 nt, Artificial Sequence
  Synthetic
auguggccagacuauacg

SEQ ID NO: 581214 - RNA, 19 nt, Artificial Sequence
  Synthetic
gauguggccagacuauacg

SEQ ID NO: 581215 - RNA, 20 nt, Artificial Sequence
  Synthetic
ugauguggccagacuauacg

SEQ ID NO: 581216 - RNA, 21 nt, Artificial Sequence
  Synthetic
uugauguggccagacuauacg

SEQ ID NO: 581217 - RNA, 22 nt, Artificial Sequence
  Synthetic
uuugauguggccagacuauacg

SEQ ID NO: 581218 - RNA, 23 nt, Artificial Sequence
  Synthetic
auuugauguggccagacuauacg

SEQ ID NO: 581219 - RNA, 24 nt, Artificial Sequence
  Synthetic
aauuugauguggccagacuauacg

SEQ ID NO: 581220 - RNA, 18 nt, Artificial Sequence
  Synthetic
ucuugcaaaauuuauacg

SEQ ID NO: 581221 - RNA, 19 nt, Artificial Sequence
  Synthetic
uucuugcaaaauuuauacg

SEQ ID NO: 581222 - RNA, 20 nt, Artificial Sequence
  Synthetic
guucuugcaaaauuuauacg

SEQ ID NO: 581223 - RNA, 21 nt, Artificial Sequence
  Synthetic
uguucuugcaaaauuuauacg

SEQ ID NO: 581224 - RNA, 22 nt, Artificial Sequence
  Synthetic
guguucuugcaaaauuuauacg

SEQ ID NO: 581225 - RNA, 23 nt, Artificial Sequence
  Synthetic
uguguucuugcaaaauuuauacg

SEQ ID NO: 581226 - RNA, 24 nt, Artificial Sequence
  Synthetic
guguguucuugcaaaauuuauacg

SEQ ID NO: 581227 - RNA, 18 nt, Artificial Sequence
  Synthetic
ggauccuaagagacuacg

SEQ ID NO: 581228 - RNA, 19 nt, Artificial Sequence
  Synthetic
aggauccuaagagacuacg

SEQ ID NO: 581229 - RNA, 20 nt, Artificial Sequence
  Synthetic
aaggauccuaagagacuacg

SEQ ID NO: 581230 - RNA, 21 nt, Artificial Sequence
  Synthetic
aaaggauccuaagagacuacg

SEQ ID NO: 581231 - RNA, 22 nt, Artificial Sequence
  Synthetic
caaaggauccuaagagacuacg

SEQ ID NO: 581232 - RNA, 23 nt, Artificial Sequence
  Synthetic
acaaaggauccuaagagacuacg

SEQ ID NO: 581233 - RNA, 24 nt, Artificial Sequence
  Synthetic
uacaaaggauccuaagagacuacg

SEQ ID NO: 581234 - RNA, 18 nt, Artificial Sequence
  Synthetic
cacucaggcauuacuacg

SEQ ID NO: 581235 - RNA, 19 nt, Artificial Sequence
  Synthetic
acacucaggcauuacuacg

SEQ ID NO: 581236 - RNA, 20 nt, Artificial Sequence
  Synthetic
gacacucaggcauuacuacg

SEQ ID NO: 581237 - RNA, 21 nt, Artificial Sequence
  Synthetic
ugacacucaggcauuacuacg

SEQ ID NO: 581238 - RNA, 22 nt, Artificial Sequence
  Synthetic
gugacacucaggcauuacuacg

SEQ ID NO: 581239 - RNA, 23 nt, Artificial Sequence
  Synthetic
ugugacacucaggcauuacuacg

SEQ ID NO: 581240 - RNA, 24 nt, Artificial Sequence
  Synthetic
uugugacacucaggcauuacuacg

SEQ ID NO: 581241 - RNA, 18 nt, Artificial Sequence
  Synthetic
caauuuaggauuacuacg

SEQ ID NO: 581242 - RNA, 19 nt, Artificial Sequence
  Synthetic
ucaauuuaggauuacuacg

SEQ ID NO: 581243 - RNA, 20 nt, Artificial Sequence
  Synthetic
cucaauuuaggauuacuacg

SEQ ID NO: 581244 - RNA, 21 nt, Artificial Sequence
  Synthetic
gcucaauuuaggauuacuacg

SEQ ID NO: 581245 - RNA, 22 nt, Artificial Sequence
  Synthetic
agcucaauuuaggauuacuacg

SEQ ID NO: 581246 - RNA, 23 nt, Artificial Sequence
  Synthetic
cagcucaauuuaggauuacuacg

SEQ ID NO: 581247 - RNA, 24 nt, Artificial Sequence
  Synthetic
ccagcucaauuuaggauuacuacg

SEQ ID NO: 581248 - RNA, 18 nt, Artificial Sequence
  Synthetic
ccuguagucccagcuacg

SEQ ID NO: 581249 - RNA, 19 nt, Artificial Sequence
  Synthetic
gccuguagucccagcuacg

SEQ ID NO: 581250 - RNA, 20 nt, Artificial Sequence
  Synthetic
cgccuguagucccagcuacg

SEQ ID NO: 581251 - RNA, 21 nt, Artificial Sequence
  Synthetic
gcgccuguagucccagcuacg

SEQ ID NO: 581252 - RNA, 22 nt, Artificial Sequence
  Synthetic
ggcgccuguagucccagcuacg

SEQ ID NO: 581253 - RNA, 23 nt, Artificial Sequence
  Synthetic
gggcgccuguagucccagcuacg

SEQ ID NO: 581254 - RNA, 24 nt, Artificial Sequence
  Synthetic
cgggcgccuguagucccagcuacg

SEQ ID NO: 581255 - RNA, 18 nt, Artificial Sequence
  Synthetic
uuaaacaaugaugcuacg

SEQ ID NO: 581256 - RNA, 19 nt, Artificial Sequence
  Synthetic
auuaaacaaugaugcuacg

SEQ ID NO: 581257 - RNA, 20 nt, Artificial Sequence
  Synthetic
aauuaaacaaugaugcuacg

SEQ ID NO: 581258 - RNA, 21 nt, Artificial Sequence
  Synthetic
aaauuaaacaaugaugcuacg

SEQ ID NO: 581259 - RNA, 22 nt, Artificial Sequence
  Synthetic
aaaauuaaacaaugaugcuacg

SEQ ID NO: 581260 - RNA, 23 nt, Artificial Sequence
  Synthetic
caaaauuaaacaaugaugcuacg

SEQ ID NO: 581261 - RNA, 24 nt, Artificial Sequence
  Synthetic
ccaaaauuaaacaaugaugcuacg

SEQ ID NO: 581262 - RNA, 18 nt, Artificial Sequence
  Synthetic
auucaggacacaaguacg

SEQ ID NO: 581263 - RNA, 19 nt, Artificial Sequence
  Synthetic
cauucaggacacaaguacg

SEQ ID NO: 581264 - RNA, 20 nt, Artificial Sequence
  Synthetic
ccauucaggacacaaguacg

SEQ ID NO: 581265 - RNA, 21 nt, Artificial Sequence
  Synthetic
accauucaggacacaaguacg

SEQ ID NO: 581266 - RNA, 22 nt, Artificial Sequence
  Synthetic
uaccauucaggacacaaguacg

SEQ ID NO: 581267 - RNA, 23 nt, Artificial Sequence
  Synthetic
auaccauucaggacacaaguacg

SEQ ID NO: 581268 - RNA, 24 nt, Artificial Sequence
  Synthetic
aauaccauucaggacacaaguacg

SEQ ID NO: 581269 - RNA, 18 nt, Artificial Sequence
  Synthetic
aaacagguaacacuuacg

SEQ ID NO: 581270 - RNA, 19 nt, Artificial Sequence
  Synthetic
aaaacagguaacacuuacg

SEQ ID NO: 581271 - RNA, 20 nt, Artificial Sequence
  Synthetic
gaaaacagguaacacuuacg

SEQ ID NO: 581272 - RNA, 21 nt, Artificial Sequence
  Synthetic
agaaaacagguaacacuuacg

SEQ ID NO: 581273 - RNA, 22 nt, Artificial Sequence
  Synthetic
gagaaaacagguaacacuuacg

SEQ ID NO: 581274 - RNA, 23 nt, Artificial Sequence
  Synthetic
ggagaaaacagguaacacuuacg

SEQ ID NO: 581275 - RNA, 24 nt, Artificial Sequence
  Synthetic
gggagaaaacagguaacacuuacg

SEQ ID NO: 581276 - RNA, 18 nt, Artificial Sequence
  Synthetic
guaguggaggcaguuacg

SEQ ID NO: 581277 - RNA, 19 nt, Artificial Sequence
  Synthetic
uguaguggaggcaguuacg

SEQ ID NO: 581278 - RNA, 20 nt, Artificial Sequence
  Synthetic
auguaguggaggcaguuacg

SEQ ID NO: 581279 - RNA, 21 nt, Artificial Sequence
  Synthetic
cauguaguggaggcaguuacg

SEQ ID NO: 581280 - RNA, 22 nt, Artificial Sequence
  Synthetic
ccauguaguggaggcaguuacg

SEQ ID NO: 581281 - RNA, 23 nt, Artificial Sequence
  Synthetic
accauguaguggaggcaguuacg

SEQ ID NO: 581282 - RNA, 24 nt, Artificial Sequence
  Synthetic
aaccauguaguggaggcaguuacg

SEQ ID NO: 581283 - RNA, 18 nt, Artificial Sequence
  Synthetic
guagugguggggguuacg

SEQ ID NO: 581284 - RNA, 19 nt, Artificial Sequence
  Synthetic
gguagugguggggguuacg

SEQ ID NO: 581285 - RNA, 20 nt, Artificial Sequence
  Synthetic
ugguagugguggggguuacg

SEQ ID NO: 581286 - RNA, 21 nt, Artificial Sequence
  Synthetic
augguagugguggggguuacg

SEQ ID NO: 581287 - RNA, 22 nt, Artificial Sequence
  Synthetic
aaugguagugguggggguuacg

SEQ ID NO: 581288 - RNA, 23 nt, Artificial Sequence
  Synthetic
aaaugguagugguggggguuacg

SEQ ID NO: 581289 - RNA, 24 nt, Artificial Sequence
  Synthetic
gaaaugguagugguggggguuacg

SEQ ID NO: 581290 - RNA, 18 nt, Artificial Sequence
  Synthetic
uuuauuuauuuauuuacg

SEQ ID NO: 581291 - RNA, 19 nt, Artificial Sequence
  Synthetic
auuuauuuauuuauuuacg

SEQ ID NO: 581292 - RNA, 20 nt, Artificial Sequence
  Synthetic
uauuuauuuauuuauuuacg

SEQ ID NO: 581293 - RNA, 21 nt, Artificial Sequence
  Synthetic
uuauuuauuuauuuauuuacg

SEQ ID NO: 581294 - RNA, 22 nt, Artificial Sequence
  Synthetic
uuuauuuauuuauuuauuuacg

SEQ ID NO: 581295 - RNA, 23 nt, Artificial Sequence
  Synthetic
auuuauuuauuuauuuauuuacg

SEQ ID NO: 581296 - RNA, 24 nt, Artificial Sequence
  Synthetic
uauuuauuuauuuauuuauuuacg

SEQ ID NO: 581297 - RNA, 18 nt, Artificial Sequence
  Synthetic
uuuuuaggauacuuuacg

SEQ ID NO: 581298 - RNA, 19 nt, Artificial Sequence
  Synthetic
guuuuuaggauacuuuacg

SEQ ID NO: 581299 - RNA, 20 nt, Artificial Sequence
  Synthetic
uguuuuuaggauacuuuacg

SEQ ID NO: 581300 - RNA, 21 nt, Artificial Sequence
  Synthetic
uuguuuuuaggauacuuuacg

SEQ ID NO: 581301 - RNA, 22 nt, Artificial Sequence
  Synthetic
uuuguuuuuaggauacuuuacg

SEQ ID NO: 581302 - RNA, 23 nt, Artificial Sequence
  Synthetic
auuuguuuuuaggauacuuuacg

SEQ ID NO: 581303 - RNA, 24 nt, Artificial Sequence
  Synthetic
aauuuguuuuuaggauacuuuacg

SEQ ID NO: 581304 - RNA, 18 nt, Artificial Sequence
  Synthetic
uuuaaauuuuccuuuacg

SEQ ID NO: 581305 - RNA, 19 nt, Artificial Sequence
  Synthetic
cuuuaaauuuuccuuuacg

SEQ ID NO: 581306 - RNA, 20 nt, Artificial Sequence
  Synthetic
acuuuaaauuuuccuuuacg

SEQ ID NO: 581307 - RNA, 21 nt, Artificial Sequence
  Synthetic
uacuuuaaauuuuccuuuacg

SEQ ID NO: 581308 - RNA, 22 nt, Artificial Sequence
  Synthetic
uuacuuuaaauuuuccuuuacg

SEQ ID NO: 581309 - RNA, 23 nt, Artificial Sequence
  Synthetic
uuuacuuuaaauuuuccuuuacg

SEQ ID NO: 581310 - RNA, 24 nt, Artificial Sequence
  Synthetic
auuuacuuuaaauuuuccuuuacg

SEQ ID NO: 581311 - RNA, 18 nt, Artificial Sequence
  Synthetic
gcuaaaagcauuuuuacg

SEQ ID NO: 581312 - RNA, 19 nt, Artificial Sequence
  Synthetic
agcuaaaagcauuuuuacg

SEQ ID NO: 581313 - RNA, 20 nt, Artificial Sequence
  Synthetic
gagcuaaaagcauuuuuacg

SEQ ID NO: 581314 - RNA, 21 nt, Artificial Sequence
  Synthetic
agagcuaaaagcauuuuuacg

SEQ ID NO: 581315 - RNA, 22 nt, Artificial Sequence
  Synthetic
aagagcuaaaagcauuuuuacg

SEQ ID NO: 581316 - RNA, 23 nt, Artificial Sequence
  Synthetic
aaagagcuaaaagcauuuuuacg

SEQ ID NO: 581317 - RNA, 24 nt, Artificial Sequence
  Synthetic
uaaagagcuaaaagcauuuuuacg

SEQ ID NO: 581318 - RNA, 18 nt, Artificial Sequence
  Synthetic
gugcuaaacaaaaaaccg

SEQ ID NO: 581319 - RNA, 19 nt, Artificial Sequence
  Synthetic
agugcuaaacaaaaaaccg

SEQ ID NO: 581320 - RNA, 20 nt, Artificial Sequence
  Synthetic
aagugcuaaacaaaaaaccg

SEQ ID NO: 581321 - RNA, 21 nt, Artificial Sequence
  Synthetic
uaagugcuaaacaaaaaaccg

SEQ ID NO: 581322 - RNA, 22 nt, Artificial Sequence
  Synthetic
guaagugcuaaacaaaaaaccg

SEQ ID NO: 581323 - RNA, 23 nt, Artificial Sequence
  Synthetic
aguaagugcuaaacaaaaaaccg

SEQ ID NO: 581324 - RNA, 24 nt, Artificial Sequence
  Synthetic
uaguaagugcuaaacaaaaaaccg

SEQ ID NO: 581325 - RNA, 18 nt, Artificial Sequence
  Synthetic
aacgacaacaacaaaccg

SEQ ID NO: 581326 - RNA, 19 nt, Artificial Sequence
  Synthetic
caacgacaacaacaaaccg

SEQ ID NO: 581327 - RNA, 20 nt, Artificial Sequence
  Synthetic
acaacgacaacaacaaaccg

SEQ ID NO: 581328 - RNA, 21 nt, Artificial Sequence
  Synthetic
aacaacgacaacaacaaaccg

SEQ ID NO: 581329 - RNA, 22 nt, Artificial Sequence
  Synthetic
caacaacgacaacaacaaaccg

SEQ ID NO: 581330 - RNA, 23 nt, Artificial Sequence
  Synthetic
acaacaacgacaacaacaaaccg

SEQ ID NO: 581331 - RNA, 24 nt, Artificial Sequence
  Synthetic
aacaacaacgacaacaacaaaccg

SEQ ID NO: 581332 - RNA, 18 nt, Artificial Sequence
  Synthetic
gagaccacgaacccaccg

SEQ ID NO: 581333 - RNA, 19 nt, Artificial Sequence
  Synthetic
cgagaccacgaacccaccg

SEQ ID NO: 581334 - RNA, 20 nt, Artificial Sequence
  Synthetic
gcgagaccacgaacccaccg

SEQ ID NO: 581335 - RNA, 21 nt, Artificial Sequence
  Synthetic
agcgagaccacgaacccaccg

SEQ ID NO: 581336 - RNA, 22 nt, Artificial Sequence
  Synthetic
cagcgagaccacgaacccaccg

SEQ ID NO: 581337 - RNA, 23 nt, Artificial Sequence
  Synthetic
ucagcgagaccacgaacccaccg

SEQ ID NO: 581338 - RNA, 24 nt, Artificial Sequence
  Synthetic
gucagcgagaccacgaacccaccg

SEQ ID NO: 581339 - RNA, 18 nt, Artificial Sequence
  Synthetic
ccugagcagcaugcaccg

SEQ ID NO: 581340 - RNA, 19 nt, Artificial Sequence
  Synthetic
gccugagcagcaugcaccg

SEQ ID NO: 581341 - RNA, 20 nt, Artificial Sequence
  Synthetic
ugccugagcagcaugcaccg

SEQ ID NO: 581342 - RNA, 21 nt, Artificial Sequence
  Synthetic
uugccugagcagcaugcaccg

SEQ ID NO: 581343 - RNA, 22 nt, Artificial Sequence
  Synthetic
cuugccugagcagcaugcaccg

SEQ ID NO: 581344 - RNA, 23 nt, Artificial Sequence
  Synthetic
acuugccugagcagcaugcaccg

SEQ ID NO: 581345 - RNA, 24 nt, Artificial Sequence
  Synthetic
uacuugccugagcagcaugcaccg

SEQ ID NO: 581346 - RNA, 18 nt, Artificial Sequence
  Synthetic
ccaggugcccucucaccg

SEQ ID NO: 581347 - RNA, 19 nt, Artificial Sequence
  Synthetic
cccaggugcccucucaccg

SEQ ID NO: 581348 - RNA, 20 nt, Artificial Sequence
  Synthetic
acccaggugcccucucaccg

SEQ ID NO: 581349 - RNA, 21 nt, Artificial Sequence
  Synthetic
cacccaggugcccucucaccg

SEQ ID NO: 581350 - RNA, 22 nt, Artificial Sequence
  Synthetic
gcacccaggugcccucucaccg

SEQ ID NO: 581351 - RNA, 23 nt, Artificial Sequence
  Synthetic
ugcacccaggugcccucucaccg

SEQ ID NO: 581352 - RNA, 24 nt, Artificial Sequence
  Synthetic
gugcacccaggugcccucucaccg

SEQ ID NO: 581353 - RNA, 18 nt, Artificial Sequence
  Synthetic
gagcuguaacagucaccg

SEQ ID NO: 581354 - RNA, 19 nt, Artificial Sequence
  Synthetic
agagcuguaacagucaccg

SEQ ID NO: 581355 - RNA, 20 nt, Artificial Sequence
  Synthetic
aagagcuguaacagucaccg

SEQ ID NO: 581356 - RNA, 21 nt, Artificial Sequence
  Synthetic
uaagagcuguaacagucaccg

SEQ ID NO: 581357 - RNA, 22 nt, Artificial Sequence
  Synthetic
uuaagagcuguaacagucaccg

SEQ ID NO: 581358 - RNA, 23 nt, Artificial Sequence
  Synthetic
uuuaagagcuguaacagucaccg

SEQ ID NO: 581359 - RNA, 24 nt, Artificial Sequence
  Synthetic
cuuuaagagcuguaacagucaccg

SEQ ID NO: 581360 - RNA, 18 nt, Artificial Sequence
  Synthetic
auaaucauuuaaagaccg

SEQ ID NO: 581361 - RNA, 19 nt, Artificial Sequence
  Synthetic
cauaaucauuuaaagaccg

SEQ ID NO: 581362 - RNA, 20 nt, Artificial Sequence
  Synthetic
acauaaucauuuaaagaccg

SEQ ID NO: 581363 - RNA, 21 nt, Artificial Sequence
  Synthetic
uacauaaucauuuaaagaccg

SEQ ID NO: 581364 - RNA, 22 nt, Artificial Sequence
  Synthetic
uuacauaaucauuuaaagaccg

SEQ ID NO: 581365 - RNA, 23 nt, Artificial Sequence
  Synthetic
cuuacauaaucauuuaaagaccg

SEQ ID NO: 581366 - RNA, 24 nt, Artificial Sequence
  Synthetic
ucuuacauaaucauuuaaagaccg

SEQ ID NO: 581367 - RNA, 18 nt, Artificial Sequence
  Synthetic
uugccauguuagagaccg

SEQ ID NO: 581368 - RNA, 19 nt, Artificial Sequence
  Synthetic
auugccauguuagagaccg

SEQ ID NO: 581369 - RNA, 20 nt, Artificial Sequence
  Synthetic
aauugccauguuagagaccg

SEQ ID NO: 581370 - RNA, 21 nt, Artificial Sequence
  Synthetic
aaauugccauguuagagaccg

SEQ ID NO: 581371 - RNA, 22 nt, Artificial Sequence
  Synthetic
caaauugccauguuagagaccg

SEQ ID NO: 581372 - RNA, 23 nt, Artificial Sequence
  Synthetic
gcaaauugccauguuagagaccg

SEQ ID NO: 581373 - RNA, 24 nt, Artificial Sequence
  Synthetic
ggcaaauugccauguuagagaccg

SEQ ID NO: 581374 - RNA, 18 nt, Artificial Sequence
  Synthetic
augaaucagacaugaccg

SEQ ID NO: 581375 - RNA, 19 nt, Artificial Sequence
  Synthetic
aaugaaucagacaugaccg

SEQ ID NO: 581376 - RNA, 20 nt, Artificial Sequence
  Synthetic
uaaugaaucagacaugaccg

SEQ ID NO: 581377 - RNA, 21 nt, Artificial Sequence
  Synthetic
uuaaugaaucagacaugaccg

SEQ ID NO: 581378 - RNA, 22 nt, Artificial Sequence
  Synthetic
uuuaaugaaucagacaugaccg

SEQ ID NO: 581379 - RNA, 23 nt, Artificial Sequence
  Synthetic
uuuuaaugaaucagacaugaccg

SEQ ID NO: 581380 - RNA, 24 nt, Artificial Sequence
  Synthetic
uuuuuaaugaaucagacaugaccg

SEQ ID NO: 581381 - RNA, 18 nt, Artificial Sequence
  Synthetic
ccucaccaguguauaccg

SEQ ID NO: 581382 - RNA, 19 nt, Artificial Sequence
  Synthetic
cccucaccaguguauaccg

SEQ ID NO: 581383 - RNA, 20 nt, Artificial Sequence
  Synthetic
ucccucaccaguguauaccg

SEQ ID NO: 581384 - RNA, 21 nt, Artificial Sequence
  Synthetic
uucccucaccaguguauaccg

SEQ ID NO: 581385 - RNA, 22 nt, Artificial Sequence
  Synthetic
auucccucaccaguguauaccg

SEQ ID NO: 581386 - RNA, 23 nt, Artificial Sequence
  Synthetic
uauucccucaccaguguauaccg

SEQ ID NO: 581387 - RNA, 24 nt, Artificial Sequence
  Synthetic
auauucccucaccaguguauaccg

SEQ ID NO: 581388 - RNA, 18 nt, Artificial Sequence
  Synthetic
auuaaagaagagcuaccg

SEQ ID NO: 581389 - RNA, 19 nt, Artificial Sequence
  Synthetic
aauuaaagaagagcuaccg

SEQ ID NO: 581390 - RNA, 20 nt, Artificial Sequence
  Synthetic
aaauuaaagaagagcuaccg

SEQ ID NO: 581391 - RNA, 21 nt, Artificial Sequence
  Synthetic
aaaauuaaagaagagcuaccg

SEQ ID NO: 581392 - RNA, 22 nt, Artificial Sequence
  Synthetic
caaaauuaaagaagagcuaccg

SEQ ID NO: 581393 - RNA, 23 nt, Artificial Sequence
  Synthetic
gcaaaauuaaagaagagcuaccg

SEQ ID NO: 581394 - RNA, 24 nt, Artificial Sequence
  Synthetic
ugcaaaauuaaagaagagcuaccg

SEQ ID NO: 581395 - RNA, 18 nt, Artificial Sequence
  Synthetic
cuuucucuuucaguaccg

SEQ ID NO: 581396 - RNA, 19 nt, Artificial Sequence
  Synthetic
ucuuucucuuucaguaccg

SEQ ID NO: 581397 - RNA, 20 nt, Artificial Sequence
  Synthetic
cucuuucucuuucaguaccg

SEQ ID NO: 581398 - RNA, 21 nt, Artificial Sequence
  Synthetic
ucucuuucucuuucaguaccg

SEQ ID NO: 581399 - RNA, 22 nt, Artificial Sequence
  Synthetic
gucucuuucucuuucaguaccg

SEQ ID NO: 581400 - RNA, 23 nt, Artificial Sequence
  Synthetic
ggucucuuucucuuucaguaccg

SEQ ID NO: 581401 - RNA, 24 nt, Artificial Sequence
  Synthetic
gggucucuuucucuuucaguaccg

SEQ ID NO: 581402 - RNA, 18 nt, Artificial Sequence
  Synthetic
ugguggcguaggcacccg

SEQ ID NO: 581403 - RNA, 19 nt, Artificial Sequence
  Synthetic
cugguggcguaggcacccg

SEQ ID NO: 581404 - RNA, 20 nt, Artificial Sequence
  Synthetic
ccugguggcguaggcacccg

SEQ ID NO: 581405 - RNA, 21 nt, Artificial Sequence
  Synthetic
cccugguggcguaggcacccg

SEQ ID NO: 581406 - RNA, 22 nt, Artificial Sequence
  Synthetic
gcccugguggcguaggcacccg

SEQ ID NO: 581407 - RNA, 23 nt, Artificial Sequence
  Synthetic
ggcccugguggcguaggcacccg

SEQ ID NO: 581408 - RNA, 24 nt, Artificial Sequence
  Synthetic
gggcccugguggcguaggcacccg

SEQ ID NO: 581409 - RNA, 18 nt, Artificial Sequence
  Synthetic
aacucccaacaggacccg

SEQ ID NO: 581410 - RNA, 19 nt, Artificial Sequence
  Synthetic
aaacucccaacaggacccg

SEQ ID NO: 581411 - RNA, 20 nt, Artificial Sequence
  Synthetic
aaaacucccaacaggacccg

SEQ ID NO: 581412 - RNA, 21 nt, Artificial Sequence
  Synthetic
aaaaacucccaacaggacccg

SEQ ID NO: 581413 - RNA, 22 nt, Artificial Sequence
  Synthetic
aaaaaacucccaacaggacccg

SEQ ID NO: 581414 - RNA, 23 nt, Artificial Sequence
  Synthetic
gaaaaaacucccaacaggacccg

SEQ ID NO: 581415 - RNA, 24 nt, Artificial Sequence
  Synthetic
agaaaaaacucccaacaggacccg

SEQ ID NO: 581416 - RNA, 18 nt, Artificial Sequence
  Synthetic
uaggguggauuacccccg

SEQ ID NO: 581417 - RNA, 19 nt, Artificial Sequence
  Synthetic
cuaggguggauuacccccg

SEQ ID NO: 581418 - RNA, 20 nt, Artificial Sequence
  Synthetic
ccuaggguggauuacccccg

SEQ ID NO: 581419 - RNA, 21 nt, Artificial Sequence
  Synthetic
gccuaggguggauuacccccg

SEQ ID NO: 581420 - RNA, 22 nt, Artificial Sequence
  Synthetic
ggccuaggguggauuacccccg

SEQ ID NO: 581421 - RNA, 23 nt, Artificial Sequence
  Synthetic
uggccuaggguggauuacccccg

SEQ ID NO: 581422 - RNA, 24 nt, Artificial Sequence
  Synthetic
cuggccuaggguggauuacccccg

SEQ ID NO: 581423 - RNA, 18 nt, Artificial Sequence
  Synthetic
aggaaaauaauucccccg

SEQ ID NO: 581424 - RNA, 19 nt, Artificial Sequence
  Synthetic
uaggaaaauaauucccccg

SEQ ID NO: 581425 - RNA, 20 nt, Artificial Sequence
  Synthetic
cuaggaaaauaauucccccg

SEQ ID NO: 581426 - RNA, 21 nt, Artificial Sequence
  Synthetic
gcuaggaaaauaauucccccg

SEQ ID NO: 581427 - RNA, 22 nt, Artificial Sequence
  Synthetic
ugcuaggaaaauaauucccccg

SEQ ID NO: 581428 - RNA, 23 nt, Artificial Sequence
  Synthetic
augcuaggaaaauaauucccccg

SEQ ID NO: 581429 - RNA, 24 nt, Artificial Sequence
  Synthetic
aaugcuaggaaaauaauucccccg

SEQ ID NO: 581430 - RNA, 18 nt, Artificial Sequence
  Synthetic
uaaccuaucuuuuccccg

SEQ ID NO: 581431 - RNA, 19 nt, Artificial Sequence
  Synthetic
uuaaccuaucuuuuccccg

SEQ ID NO: 581432 - RNA, 20 nt, Artificial Sequence
  Synthetic
uuuaaccuaucuuuuccccg

SEQ ID NO: 581433 - RNA, 21 nt, Artificial Sequence
  Synthetic
auuuaaccuaucuuuuccccg

SEQ ID NO: 581434 - RNA, 22 nt, Artificial Sequence
  Synthetic
uauuuaaccuaucuuuuccccg

SEQ ID NO: 581435 - RNA, 23 nt, Artificial Sequence
  Synthetic
auauuuaaccuaucuuuuccccg

SEQ ID NO: 581436 - RNA, 24 nt, Artificial Sequence
  Synthetic
aauauuuaaccuaucuuuuccccg

SEQ ID NO: 581437 - RNA, 18 nt, Artificial Sequence
  Synthetic
caucauuggaguagcccg

SEQ ID NO: 581438 - RNA, 19 nt, Artificial Sequence
  Synthetic
acaucauuggaguagcccg

SEQ ID NO: 581439 - RNA, 20 nt, Artificial Sequence
  Synthetic
gacaucauuggaguagcccg

SEQ ID NO: 581440 - RNA, 21 nt, Artificial Sequence
  Synthetic
ugacaucauuggaguagcccg

SEQ ID NO: 581441 - RNA, 22 nt, Artificial Sequence
  Synthetic
cugacaucauuggaguagcccg

SEQ ID NO: 581442 - RNA, 23 nt, Artificial Sequence
  Synthetic
acugacaucauuggaguagcccg

SEQ ID NO: 581443 - RNA, 24 nt, Artificial Sequence
  Synthetic
aacugacaucauuggaguagcccg

SEQ ID NO: 581444 - RNA, 18 nt, Artificial Sequence
  Synthetic
uggggagaaaaaggcccg

SEQ ID NO: 581445 - RNA, 19 nt, Artificial Sequence
  Synthetic
uuggggagaaaaaggcccg

SEQ ID NO: 581446 - RNA, 20 nt, Artificial Sequence
  Synthetic
guuggggagaaaaaggcccg

SEQ ID NO: 581447 - RNA, 21 nt, Artificial Sequence
  Synthetic
gguuggggagaaaaaggcccg

SEQ ID NO: 581448 - RNA, 22 nt, Artificial Sequence
  Synthetic
agguuggggagaaaaaggcccg

SEQ ID NO: 581449 - RNA, 23 nt, Artificial Sequence
  Synthetic
gagguuggggagaaaaaggcccg

SEQ ID NO: 581450 - RNA, 24 nt, Artificial Sequence
  Synthetic
ugagguuggggagaaaaaggcccg

SEQ ID NO: 581451 - RNA, 18 nt, Artificial Sequence
  Synthetic
uuggaaaaauugugcccg

SEQ ID NO: 581452 - RNA, 19 nt, Artificial Sequence
  Synthetic
guuggaaaaauugugcccg

SEQ ID NO: 581453 - RNA, 20 nt, Artificial Sequence
  Synthetic
uguuggaaaaauugugcccg

SEQ ID NO: 581454 - RNA, 21 nt, Artificial Sequence
  Synthetic
cuguuggaaaaauugugcccg

SEQ ID NO: 581455 - RNA, 22 nt, Artificial Sequence
  Synthetic
gcuguuggaaaaauugugcccg

SEQ ID NO: 581456 - RNA, 23 nt, Artificial Sequence
  Synthetic
ugcuguuggaaaaauugugcccg

SEQ ID NO: 581457 - RNA, 24 nt, Artificial Sequence
  Synthetic
augcuguuggaaaaauugugcccg

SEQ ID NO: 581458 - RNA, 18 nt, Artificial Sequence
  Synthetic
gauggugacaaaaucccg

SEQ ID NO: 581459 - RNA, 19 nt, Artificial Sequence
  Synthetic
agauggugacaaaaucccg

SEQ ID NO: 581460 - RNA, 20 nt, Artificial Sequence
  Synthetic
aagauggugacaaaaucccg

SEQ ID NO: 581461 - RNA, 21 nt, Artificial Sequence
  Synthetic
aaagauggugacaaaaucccg

SEQ ID NO: 581462 - RNA, 22 nt, Artificial Sequence
  Synthetic
aaaagauggugacaaaaucccg

SEQ ID NO: 581463 - RNA, 23 nt, Artificial Sequence
  Synthetic
aaaaagauggugacaaaaucccg

SEQ ID NO: 581464 - RNA, 24 nt, Artificial Sequence
  Synthetic
aaaaaagauggugacaaaaucccg

SEQ ID NO: 581465 - RNA, 18 nt, Artificial Sequence
  Synthetic
accgcuuucugaaucccg

SEQ ID NO: 581466 - RNA, 19 nt, Artificial Sequence
  Synthetic
uaccgcuuucugaaucccg

SEQ ID NO: 581467 - RNA, 20 nt, Artificial Sequence
  Synthetic
cuaccgcuuucugaaucccg

SEQ ID NO: 581468 - RNA, 21 nt, Artificial Sequence
  Synthetic
acuaccgcuuucugaaucccg

SEQ ID NO: 581469 - RNA, 22 nt, Artificial Sequence
  Synthetic
cacuaccgcuuucugaaucccg

SEQ ID NO: 581470 - RNA, 23 nt, Artificial Sequence
  Synthetic
ccacuaccgcuuucugaaucccg

SEQ ID NO: 581471 - RNA, 24 nt, Artificial Sequence
  Synthetic
cccacuaccgcuuucugaaucccg

SEQ ID NO: 581472 - RNA, 18 nt, Artificial Sequence
  Synthetic
gugcauaucuaacucccg

SEQ ID NO: 581473 - RNA, 19 nt, Artificial Sequence
  Synthetic
agugcauaucuaacucccg

SEQ ID NO: 581474 - RNA, 20 nt, Artificial Sequence
  Synthetic
aagugcauaucuaacucccg

SEQ ID NO: 581475 - RNA, 21 nt, Artificial Sequence
  Synthetic
gaagugcauaucuaacucccg

SEQ ID NO: 581476 - RNA, 22 nt, Artificial Sequence
  Synthetic
agaagugcauaucuaacucccg

SEQ ID NO: 581477 - RNA, 23 nt, Artificial Sequence
  Synthetic
aagaagugcauaucuaacucccg

SEQ ID NO: 581478 - RNA, 24 nt, Artificial Sequence
  Synthetic
uaagaagugcauaucuaacucccg

SEQ ID NO: 581479 - RNA, 18 nt, Artificial Sequence
  Synthetic
acuaaccuauaccucccg

SEQ ID NO: 581480 - RNA, 19 nt, Artificial Sequence
  Synthetic
uacuaaccuauaccucccg

SEQ ID NO: 581481 - RNA, 20 nt, Artificial Sequence
  Synthetic
uuacuaaccuauaccucccg

SEQ ID NO: 581482 - RNA, 21 nt, Artificial Sequence
  Synthetic
auuacuaaccuauaccucccg

SEQ ID NO: 581483 - RNA, 22 nt, Artificial Sequence
  Synthetic
cauuacuaaccuauaccucccg

SEQ ID NO: 581484 - RNA, 23 nt, Artificial Sequence
  Synthetic
acauuacuaaccuauaccucccg

SEQ ID NO: 581485 - RNA, 24 nt, Artificial Sequence
  Synthetic
uacauuacuaaccuauaccucccg

SEQ ID NO: 581486 - RNA, 18 nt, Artificial Sequence
  Synthetic
gacuucagaaggcucccg

SEQ ID NO: 581487 - RNA, 19 nt, Artificial Sequence
  Synthetic
ugacuucagaaggcucccg

SEQ ID NO: 581488 - RNA, 20 nt, Artificial Sequence
  Synthetic
augacuucagaaggcucccg

SEQ ID NO: 581489 - RNA, 21 nt, Artificial Sequence
  Synthetic
aaugacuucagaaggcucccg

SEQ ID NO: 581490 - RNA, 22 nt, Artificial Sequence
  Synthetic
caaugacuucagaaggcucccg

SEQ ID NO: 581491 - RNA, 23 nt, Artificial Sequence
  Synthetic
gcaaugacuucagaaggcucccg

SEQ ID NO: 581492 - RNA, 24 nt, Artificial Sequence
  Synthetic
agcaaugacuucagaaggcucccg

SEQ ID NO: 581493 - RNA, 18 nt, Artificial Sequence
  Synthetic
agaggaccuuacgucccg

SEQ ID NO: 581494 - RNA, 19 nt, Artificial Sequence
  Synthetic
cagaggaccuuacgucccg

SEQ ID NO: 581495 - RNA, 20 nt, Artificial Sequence
  Synthetic
gcagaggaccuuacgucccg

SEQ ID NO: 581496 - RNA, 21 nt, Artificial Sequence
  Synthetic
ugcagaggaccuuacgucccg

SEQ ID NO: 581497 - RNA, 22 nt, Artificial Sequence
  Synthetic
augcagaggaccuuacgucccg

SEQ ID NO: 581498 - RNA, 23 nt, Artificial Sequence
  Synthetic
aaugcagaggaccuuacgucccg

SEQ ID NO: 581499 - RNA, 24 nt, Artificial Sequence
  Synthetic
aaaugcagaggaccuuacgucccg

SEQ ID NO: 581500 - RNA, 18 nt, Artificial Sequence
  Synthetic
auaaguugacccuucccg

SEQ ID NO: 581501 - RNA, 19 nt, Artificial Sequence
  Synthetic
uauaaguugacccuucccg

SEQ ID NO: 581502 - RNA, 20 nt, Artificial Sequence
  Synthetic
guauaaguugacccuucccg

SEQ ID NO: 581503 - RNA, 21 nt, Artificial Sequence
  Synthetic
aguauaaguugacccuucccg

SEQ ID NO: 581504 - RNA, 22 nt, Artificial Sequence
  Synthetic
aaguauaaguugacccuucccg

SEQ ID NO: 581505 - RNA, 23 nt, Artificial Sequence
  Synthetic
caaguauaaguugacccuucccg

SEQ ID NO: 581506 - RNA, 24 nt, Artificial Sequence
  Synthetic
ucaaguauaaguugacccuucccg

SEQ ID NO: 581507 - RNA, 18 nt, Artificial Sequence
  Synthetic
guagagcugguaaagccg

SEQ ID NO: 581508 - RNA, 19 nt, Artificial Sequence
  Synthetic
aguagagcugguaaagccg

SEQ ID NO: 581509 - RNA, 20 nt, Artificial Sequence
  Synthetic
gaguagagcugguaaagccg

SEQ ID NO: 581510 - RNA, 21 nt, Artificial Sequence
  Synthetic
agaguagagcugguaaagccg

SEQ ID NO: 581511 - RNA, 22 nt, Artificial Sequence
  Synthetic
cagaguagagcugguaaagccg

SEQ ID NO: 581512 - RNA, 23 nt, Artificial Sequence
  Synthetic
ccagaguagagcugguaaagccg

SEQ ID NO: 581513 - RNA, 24 nt, Artificial Sequence
  Synthetic
uccagaguagagcugguaaagccg

SEQ ID NO: 581514 - RNA, 18 nt, Artificial Sequence
  Synthetic
ggcaaccgaagguagccg

SEQ ID NO: 581515 - RNA, 19 nt, Artificial Sequence
  Synthetic
aggcaaccgaagguagccg

SEQ ID NO: 581516 - RNA, 20 nt, Artificial Sequence
  Synthetic
aaggcaaccgaagguagccg

SEQ ID NO: 581517 - RNA, 21 nt, Artificial Sequence
  Synthetic
aaaggcaaccgaagguagccg

SEQ ID NO: 581518 - RNA, 22 nt, Artificial Sequence
  Synthetic
aaaaggcaaccgaagguagccg

SEQ ID NO: 581519 - RNA, 23 nt, Artificial Sequence
  Synthetic
aaaaaggcaaccgaagguagccg

SEQ ID NO: 581520 - RNA, 24 nt, Artificial Sequence
  Synthetic
aaaaaaggcaaccgaagguagccg

SEQ ID NO: 581521 - RNA, 18 nt, Artificial Sequence
  Synthetic
cagcacuuugggaggccg

SEQ ID NO: 581522 - RNA, 19 nt, Artificial Sequence
  Synthetic
ccagcacuuugggaggccg

SEQ ID NO: 581523 - RNA, 20 nt, Artificial Sequence
  Synthetic
cccagcacuuugggaggccg

SEQ ID NO: 581524 - RNA, 21 nt, Artificial Sequence
  Synthetic
ucccagcacuuugggaggccg

SEQ ID NO: 581525 - RNA, 22 nt, Artificial Sequence
  Synthetic
aucccagcacuuugggaggccg

SEQ ID NO: 581526 - RNA, 23 nt, Artificial Sequence
  Synthetic
aaucccagcacuuugggaggccg

SEQ ID NO: 581527 - RNA, 24 nt, Artificial Sequence
  Synthetic
uaaucccagcacuuugggaggccg

SEQ ID NO: 581528 - RNA, 18 nt, Artificial Sequence
  Synthetic
uagcacuuugggaggccg

SEQ ID NO: 581529 - RNA, 19 nt, Artificial Sequence
  Synthetic
cuagcacuuugggaggccg

SEQ ID NO: 581530 - RNA, 20 nt, Artificial Sequence
  Synthetic
ccuagcacuuugggaggccg

SEQ ID NO: 581531 - RNA, 21 nt, Artificial Sequence
  Synthetic
uccuagcacuuugggaggccg

SEQ ID NO: 581532 - RNA, 22 nt, Artificial Sequence
  Synthetic
auccuagcacuuugggaggccg

SEQ ID NO: 581533 - RNA, 23 nt, Artificial Sequence
  Synthetic
aauccuagcacuuugggaggccg

SEQ ID NO: 581534 - RNA, 24 nt, Artificial Sequence
  Synthetic
uaauccuagcacuuugggaggccg

SEQ ID NO: 581535 - RNA, 18 nt, Artificial Sequence
  Synthetic
cuacccuuuugacggccg

SEQ ID NO: 581536 - RNA, 19 nt, Artificial Sequence
  Synthetic
ucuacccuuuugacggccg

SEQ ID NO: 581537 - RNA, 20 nt, Artificial Sequence
  Synthetic
cucuacccuuuugacggccg

SEQ ID NO: 581538 - RNA, 21 nt, Artificial Sequence
  Synthetic
acucuacccuuuugacggccg

SEQ ID NO: 581539 - RNA, 22 nt, Artificial Sequence
  Synthetic
aacucuacccuuuugacggccg

SEQ ID NO: 581540 - RNA, 23 nt, Artificial Sequence
  Synthetic
aaacucuacccuuuugacggccg

SEQ ID NO: 581541 - RNA, 24 nt, Artificial Sequence
  Synthetic
gaaacucuacccuuuugacggccg

SEQ ID NO: 581542 - RNA, 18 nt, Artificial Sequence
  Synthetic
cuguugugacagcggccg

SEQ ID NO: 581543 - RNA, 19 nt, Artificial Sequence
  Synthetic
acuguugugacagcggccg

SEQ ID NO: 581544 - RNA, 20 nt, Artificial Sequence
  Synthetic
aacuguugugacagcggccg

SEQ ID NO: 581545 - RNA, 21 nt, Artificial Sequence
  Synthetic
uaacuguugugacagcggccg

SEQ ID NO: 581546 - RNA, 22 nt, Artificial Sequence
  Synthetic
guaacuguugugacagcggccg

SEQ ID NO: 581547 - RNA, 23 nt, Artificial Sequence
  Synthetic
aguaacuguugugacagcggccg

SEQ ID NO: 581548 - RNA, 24 nt, Artificial Sequence
  Synthetic
uaguaacuguugugacagcggccg

SEQ ID NO: 581549 - RNA, 18 nt, Artificial Sequence
  Synthetic
aaugaaaacauauggccg

SEQ ID NO: 581550 - RNA, 19 nt, Artificial Sequence
  Synthetic
caaugaaaacauauggccg

SEQ ID NO: 581551 - RNA, 20 nt, Artificial Sequence
  Synthetic
acaaugaaaacauauggccg

SEQ ID NO: 581552 - RNA, 21 nt, Artificial Sequence
  Synthetic
aacaaugaaaacauauggccg

SEQ ID NO: 581553 - RNA, 22 nt, Artificial Sequence
  Synthetic
gaacaaugaaaacauauggccg

SEQ ID NO: 581554 - RNA, 23 nt, Artificial Sequence
  Synthetic
ugaacaaugaaaacauauggccg

SEQ ID NO: 581555 - RNA, 24 nt, Artificial Sequence
  Synthetic
uugaacaaugaaaacauauggccg

SEQ ID NO: 581556 - RNA, 18 nt, Artificial Sequence
  Synthetic
ugagggauuguacugccg

SEQ ID NO: 581557 - RNA, 19 nt, Artificial Sequence
  Synthetic
gugagggauuguacugccg

SEQ ID NO: 581558 - RNA, 20 nt, Artificial Sequence
  Synthetic
ugugagggauuguacugccg

SEQ ID NO: 581559 - RNA, 21 nt, Artificial Sequence
  Synthetic
augugagggauuguacugccg

SEQ ID NO: 581560 - RNA, 22 nt, Artificial Sequence
  Synthetic
aaugugagggauuguacugccg

SEQ ID NO: 581561 - RNA, 23 nt, Artificial Sequence
  Synthetic
aaaugugagggauuguacugccg

SEQ ID NO: 581562 - RNA, 24 nt, Artificial Sequence
  Synthetic
uaaaugugagggauuguacugccg

SEQ ID NO: 581563 - RNA, 18 nt, Artificial Sequence
  Synthetic
aaguaaauauagcugccg

SEQ ID NO: 581564 - RNA, 19 nt, Artificial Sequence
  Synthetic
caaguaaauauagcugccg

SEQ ID NO: 581565 - RNA, 20 nt, Artificial Sequence
  Synthetic
gcaaguaaauauagcugccg

SEQ ID NO: 581566 - RNA, 21 nt, Artificial Sequence
  Synthetic
ggcaaguaaauauagcugccg

SEQ ID NO: 581567 - RNA, 22 nt, Artificial Sequence
  Synthetic
aggcaaguaaauauagcugccg

SEQ ID NO: 581568 - RNA, 23 nt, Artificial Sequence
  Synthetic
caggcaaguaaauauagcugccg

SEQ ID NO: 581569 - RNA, 24 nt, Artificial Sequence
  Synthetic
ucaggcaaguaaauauagcugccg

SEQ ID NO: 581570 - RNA, 18 nt, Artificial Sequence
  Synthetic
gguagaaaaggggugccg

SEQ ID NO: 581571 - RNA, 19 nt, Artificial Sequence
  Synthetic
ggguagaaaaggggugccg

SEQ ID NO: 581572 - RNA, 20 nt, Artificial Sequence
  Synthetic
gggguagaaaaggggugccg

SEQ ID NO: 581573 - RNA, 21 nt, Artificial Sequence
  Synthetic
ggggguagaaaaggggugccg

SEQ ID NO: 581574 - RNA, 22 nt, Artificial Sequence
  Synthetic
gggggguagaaaaggggugccg

SEQ ID NO: 581575 - RNA, 23 nt, Artificial Sequence
  Synthetic
ugggggguagaaaaggggugccg

SEQ ID NO: 581576 - RNA, 24 nt, Artificial Sequence
  Synthetic
uugggggguagaaaaggggugccg

SEQ ID NO: 581577 - RNA, 18 nt, Artificial Sequence
  Synthetic
cuacacgagaaguugccg

SEQ ID NO: 581578 - RNA, 19 nt, Artificial Sequence
  Synthetic
acuacacgagaaguugccg

SEQ ID NO: 581579 - RNA, 20 nt, Artificial Sequence
  Synthetic
aacuacacgagaaguugccg

SEQ ID NO: 581580 - RNA, 21 nt, Artificial Sequence
  Synthetic
caacuacacgagaaguugccg

SEQ ID NO: 581581 - RNA, 22 nt, Artificial Sequence
  Synthetic
acaacuacacgagaaguugccg

SEQ ID NO: 581582 - RNA, 23 nt, Artificial Sequence
  Synthetic
uacaacuacacgagaaguugccg

SEQ ID NO: 581583 - RNA, 24 nt, Artificial Sequence
  Synthetic
uuacaacuacacgagaaguugccg

SEQ ID NO: 581584 - RNA, 18 nt, Artificial Sequence
  Synthetic
auacaucauagcaauccg

SEQ ID NO: 581585 - RNA, 19 nt, Artificial Sequence
  Synthetic
aauacaucauagcaauccg

SEQ ID NO: 581586 - RNA, 20 nt, Artificial Sequence
  Synthetic
caauacaucauagcaauccg

SEQ ID NO: 581587 - RNA, 21 nt, Artificial Sequence
  Synthetic
gcaauacaucauagcaauccg

SEQ ID NO: 581588 - RNA, 22 nt, Artificial Sequence
  Synthetic
ugcaauacaucauagcaauccg

SEQ ID NO: 581589 - RNA, 23 nt, Artificial Sequence
  Synthetic
augcaauacaucauagcaauccg

SEQ ID NO: 581590 - RNA, 24 nt, Artificial Sequence
  Synthetic
gaugcaauacaucauagcaauccg

SEQ ID NO: 581591 - RNA, 18 nt, Artificial Sequence
  Synthetic
aucuagaacuguaauccg

SEQ ID NO: 581592 - RNA, 19 nt, Artificial Sequence
  Synthetic
caucuagaacuguaauccg

SEQ ID NO: 581593 - RNA, 20 nt, Artificial Sequence
  Synthetic
ucaucuagaacuguaauccg

SEQ ID NO: 581594 - RNA, 21 nt, Artificial Sequence
  Synthetic
cucaucuagaacuguaauccg

SEQ ID NO: 581595 - RNA, 22 nt, Artificial Sequence
  Synthetic
ucucaucuagaacuguaauccg

SEQ ID NO: 581596 - RNA, 23 nt, Artificial Sequence
  Synthetic
aucucaucuagaacuguaauccg

SEQ ID NO: 581597 - RNA, 24 nt, Artificial Sequence
  Synthetic
aaucucaucuagaacuguaauccg

SEQ ID NO: 581598 - RNA, 18 nt, Artificial Sequence
  Synthetic
gcagcaacucuggauccg

SEQ ID NO: 581599 - RNA, 19 nt, Artificial Sequence
  Synthetic
agcagcaacucuggauccg

SEQ ID NO: 581600 - RNA, 20 nt, Artificial Sequence
  Synthetic
aagcagcaacucuggauccg

SEQ ID NO: 581601 - RNA, 21 nt, Artificial Sequence
  Synthetic
uaagcagcaacucuggauccg

SEQ ID NO: 581602 - RNA, 22 nt, Artificial Sequence
  Synthetic
auaagcagcaacucuggauccg

SEQ ID NO: 581603 - RNA, 23 nt, Artificial Sequence
  Synthetic
cauaagcagcaacucuggauccg

SEQ ID NO: 581604 - RNA, 24 nt, Artificial Sequence
  Synthetic
ccauaagcagcaacucuggauccg

SEQ ID NO: 581605 - RNA, 18 nt, Artificial Sequence
  Synthetic
cagagcuaaguaacuccg

SEQ ID NO: 581606 - RNA, 19 nt, Artificial Sequence
  Synthetic
ucagagcuaaguaacuccg

SEQ ID NO: 581607 - RNA, 20 nt, Artificial Sequence
  Synthetic
aucagagcuaaguaacuccg

SEQ ID NO: 581608 - RNA, 21 nt, Artificial Sequence
  Synthetic
caucagagcuaaguaacuccg

SEQ ID NO: 581609 - RNA, 22 nt, Artificial Sequence
  Synthetic
acaucagagcuaaguaacuccg

SEQ ID NO: 581610 - RNA, 23 nt, Artificial Sequence
  Synthetic
cacaucagagcuaaguaacuccg

SEQ ID NO: 581611 - RNA, 24 nt, Artificial Sequence
  Synthetic
acacaucagagcuaaguaacuccg

SEQ ID NO: 581612 - RNA, 18 nt, Artificial Sequence
  Synthetic
uuagcuggcugggcuccg

SEQ ID NO: 581613 - RNA, 19 nt, Artificial Sequence
  Synthetic
cuuagcuggcugggcuccg

SEQ ID NO: 581614 - RNA, 20 nt, Artificial Sequence
  Synthetic
ucuuagcuggcugggcuccg

SEQ ID NO: 581615 - RNA, 21 nt, Artificial Sequence
  Synthetic
aucuuagcuggcugggcuccg

SEQ ID NO: 581616 - RNA, 22 nt, Artificial Sequence
  Synthetic
gaucuuagcuggcugggcuccg

SEQ ID NO: 581617 - RNA, 23 nt, Artificial Sequence
  Synthetic
ggaucuuagcuggcugggcuccg

SEQ ID NO: 581618 - RNA, 24 nt, Artificial Sequence
  Synthetic
uggaucuuagcuggcugggcuccg

SEQ ID NO: 581619 - RNA, 18 nt, Artificial Sequence
  Synthetic
agauggcaguuaaguccg

SEQ ID NO: 581620 - RNA, 19 nt, Artificial Sequence
  Synthetic
aagauggcaguuaaguccg

SEQ ID NO: 581621 - RNA, 20 nt, Artificial Sequence
  Synthetic
aaagauggcaguuaaguccg

SEQ ID NO: 581622 - RNA, 21 nt, Artificial Sequence
  Synthetic
uaaagauggcaguuaaguccg

SEQ ID NO: 581623 - RNA, 22 nt, Artificial Sequence
  Synthetic
cuaaagauggcaguuaaguccg

SEQ ID NO: 581624 - RNA, 23 nt, Artificial Sequence
  Synthetic
acuaaagauggcaguuaaguccg

SEQ ID NO: 581625 - RNA, 24 nt, Artificial Sequence
  Synthetic
aacuaaagauggcaguuaaguccg

SEQ ID NO: 581626 - RNA, 18 nt, Artificial Sequence
  Synthetic
uuuacuuguuccaguccg

SEQ ID NO: 581627 - RNA, 19 nt, Artificial Sequence
  Synthetic
uuuuacuuguuccaguccg

SEQ ID NO: 581628 - RNA, 20 nt, Artificial Sequence
  Synthetic
uuuuuacuuguuccaguccg

SEQ ID NO: 581629 - RNA, 21 nt, Artificial Sequence
  Synthetic
uuuuuuacuuguuccaguccg

SEQ ID NO: 581630 - RNA, 22 nt, Artificial Sequence
  Synthetic
auuuuuuacuuguuccaguccg

SEQ ID NO: 581631 - RNA, 23 nt, Artificial Sequence
  Synthetic
uauuuuuuacuuguuccaguccg

SEQ ID NO: 581632 - RNA, 24 nt, Artificial Sequence
  Synthetic
uuauuuuuuacuuguuccaguccg

SEQ ID NO: 581633 - RNA, 18 nt, Artificial Sequence
  Synthetic
ucugcugcauuagguccg

SEQ ID NO: 581634 - RNA, 19 nt, Artificial Sequence
  Synthetic
uucugcugcauuagguccg

SEQ ID NO: 581635 - RNA, 20 nt, Artificial Sequence
  Synthetic
guucugcugcauuagguccg

SEQ ID NO: 581636 - RNA, 21 nt, Artificial Sequence
  Synthetic
aguucugcugcauuagguccg

SEQ ID NO: 581637 - RNA, 22 nt, Artificial Sequence
  Synthetic
aaguucugcugcauuagguccg

SEQ ID NO: 581638 - RNA, 23 nt, Artificial Sequence
  Synthetic
caaguucugcugcauuagguccg

SEQ ID NO: 581639 - RNA, 24 nt, Artificial Sequence
  Synthetic
gcaaguucugcugcauuagguccg

SEQ ID NO: 581640 - RNA, 18 nt, Artificial Sequence
  Synthetic
uauuugaaaaccauuccg

SEQ ID NO: 581641 - RNA, 19 nt, Artificial Sequence
  Synthetic
uuauuugaaaaccauuccg

SEQ ID NO: 581642 - RNA, 20 nt, Artificial Sequence
  Synthetic
auuauuugaaaaccauuccg

SEQ ID NO: 581643 - RNA, 21 nt, Artificial Sequence
  Synthetic
cauuauuugaaaaccauuccg

SEQ ID NO: 581644 - RNA, 22 nt, Artificial Sequence
  Synthetic
ucauuauuugaaaaccauuccg

SEQ ID NO: 581645 - RNA, 23 nt, Artificial Sequence
  Synthetic
uucauuauuugaaaaccauuccg

SEQ ID NO: 581646 - RNA, 24 nt, Artificial Sequence
  Synthetic
uuucauuauuugaaaaccauuccg

SEQ ID NO: 581647 - RNA, 18 nt, Artificial Sequence
  Synthetic
gaccacuucacuauuccg

SEQ ID NO: 581648 - RNA, 19 nt, Artificial Sequence
  Synthetic
ugaccacuucacuauuccg

SEQ ID NO: 581649 - RNA, 20 nt, Artificial Sequence
  Synthetic
uugaccacuucacuauuccg

SEQ ID NO: 581650 - RNA, 21 nt, Artificial Sequence
  Synthetic
auugaccacuucacuauuccg

SEQ ID NO: 581651 - RNA, 22 nt, Artificial Sequence
  Synthetic
aauugaccacuucacuauuccg

SEQ ID NO: 581652 - RNA, 23 nt, Artificial Sequence
  Synthetic
gaauugaccacuucacuauuccg

SEQ ID NO: 581653 - RNA, 24 nt, Artificial Sequence
  Synthetic
ugaauugaccacuucacuauuccg

SEQ ID NO: 581654 - RNA, 18 nt, Artificial Sequence
  Synthetic
aacaaaaaaagucuuccg

SEQ ID NO: 581655 - RNA, 19 nt, Artificial Sequence
  Synthetic
gaacaaaaaaagucuuccg

SEQ ID NO: 581656 - RNA, 20 nt, Artificial Sequence
  Synthetic
agaacaaaaaaagucuuccg

SEQ ID NO: 581657 - RNA, 21 nt, Artificial Sequence
  Synthetic
uagaacaaaaaaagucuuccg

SEQ ID NO: 581658 - RNA, 22 nt, Artificial Sequence
  Synthetic
auagaacaaaaaaagucuuccg

SEQ ID NO: 581659 - RNA, 23 nt, Artificial Sequence
  Synthetic
aauagaacaaaaaaagucuuccg

SEQ ID NO: 581660 - RNA, 24 nt, Artificial Sequence
  Synthetic
aaauagaacaaaaaaagucuuccg

SEQ ID NO: 581661 - RNA, 18 nt, Artificial Sequence
  Synthetic
gaugcuuguagguuuccg

SEQ ID NO: 581662 - RNA, 19 nt, Artificial Sequence
  Synthetic
agaugcuuguagguuuccg

SEQ ID NO: 581663 - RNA, 20 nt, Artificial Sequence
  Synthetic
uagaugcuuguagguuuccg

SEQ ID NO: 581664 - RNA, 21 nt, Artificial Sequence
  Synthetic
uuagaugcuuguagguuuccg

SEQ ID NO: 581665 - RNA, 22 nt, Artificial Sequence
  Synthetic
auuagaugcuuguagguuuccg

SEQ ID NO: 581666 - RNA, 23 nt, Artificial Sequence
  Synthetic
aauuagaugcuuguagguuuccg

SEQ ID NO: 581667 - RNA, 24 nt, Artificial Sequence
  Synthetic
aaauuagaugcuuguagguuuccg

SEQ ID NO: 581668 - RNA, 18 nt, Artificial Sequence
  Synthetic
aguguuuccauguuuccg

SEQ ID NO: 581669 - RNA, 19 nt, Artificial Sequence
  Synthetic
aaguguuuccauguuuccg

SEQ ID NO: 581670 - RNA, 20 nt, Artificial Sequence
  Synthetic
aaaguguuuccauguuuccg

SEQ ID NO: 581671 - RNA, 21 nt, Artificial Sequence
  Synthetic
aaaaguguuuccauguuuccg

SEQ ID NO: 581672 - RNA, 22 nt, Artificial Sequence
  Synthetic
aaaaaguguuuccauguuuccg

SEQ ID NO: 581673 - RNA, 23 nt, Artificial Sequence
  Synthetic
gaaaaaguguuuccauguuuccg

SEQ ID NO: 581674 - RNA, 24 nt, Artificial Sequence
  Synthetic
ggaaaaaguguuuccauguuuccg

SEQ ID NO: 581675 - RNA, 18 nt, Artificial Sequence
  Synthetic
auuaagaaggaaaaagcg

SEQ ID NO: 581676 - RNA, 19 nt, Artificial Sequence
  Synthetic
gauuaagaaggaaaaagcg

SEQ ID NO: 581677 - RNA, 20 nt, Artificial Sequence
  Synthetic
agauuaagaaggaaaaagcg

SEQ ID NO: 581678 - RNA, 21 nt, Artificial Sequence
  Synthetic
uagauuaagaaggaaaaagcg

SEQ ID NO: 581679 - RNA, 22 nt, Artificial Sequence
  Synthetic
uuagauuaagaaggaaaaagcg

SEQ ID NO: 581680 - RNA, 23 nt, Artificial Sequence
  Synthetic
auuagauuaagaaggaaaaagcg

SEQ ID NO: 581681 - RNA, 24 nt, Artificial Sequence
  Synthetic
uauuagauuaagaaggaaaaagcg

SEQ ID NO: 581682 - RNA, 18 nt, Artificial Sequence
  Synthetic
acucugaccauaaaagcg

SEQ ID NO: 581683 - RNA, 19 nt, Artificial Sequence
  Synthetic
aacucugaccauaaaagcg

SEQ ID NO: 581684 - RNA, 20 nt, Artificial Sequence
  Synthetic
uaacucugaccauaaaagcg

SEQ ID NO: 581685 - RNA, 21 nt, Artificial Sequence
  Synthetic
uuaacucugaccauaaaagcg

SEQ ID NO: 581686 - RNA, 22 nt, Artificial Sequence
  Synthetic
guuaacucugaccauaaaagcg

SEQ ID NO: 581687 - RNA, 23 nt, Artificial Sequence
  Synthetic
aguuaacucugaccauaaaagcg

SEQ ID NO: 581688 - RNA, 24 nt, Artificial Sequence
  Synthetic
gaguuaacucugaccauaaaagcg

SEQ ID NO: 581689 - RNA, 18 nt, Artificial Sequence
  Synthetic
ucccagccucccaaagcg

SEQ ID NO: 581690 - RNA, 19 nt, Artificial Sequence
  Synthetic
aucccagccucccaaagcg

SEQ ID NO: 581691 - RNA, 20 nt, Artificial Sequence
  Synthetic
caucccagccucccaaagcg

SEQ ID NO: 581692 - RNA, 21 nt, Artificial Sequence
  Synthetic
ccaucccagccucccaaagcg

SEQ ID NO: 581693 - RNA, 22 nt, Artificial Sequence
  Synthetic
cccaucccagccucccaaagcg

SEQ ID NO: 581694 - RNA, 23 nt, Artificial Sequence
  Synthetic
gcccaucccagccucccaaagcg

SEQ ID NO: 581695 - RNA, 24 nt, Artificial Sequence
  Synthetic
ugcccaucccagccucccaaagcg

SEQ ID NO: 581696 - RNA, 18 nt, Artificial Sequence
  Synthetic
ccucagccucccaaagcg

SEQ ID NO: 581697 - RNA, 19 nt, Artificial Sequence
  Synthetic
gccucagccucccaaagcg

SEQ ID NO: 581698 - RNA, 20 nt, Artificial Sequence
  Synthetic
ugccucagccucccaaagcg

SEQ ID NO: 581699 - RNA, 21 nt, Artificial Sequence
  Synthetic
cugccucagccucccaaagcg

SEQ ID NO: 581700 - RNA, 22 nt, Artificial Sequence
  Synthetic
ccugccucagccucccaaagcg

SEQ ID NO: 581701 - RNA, 23 nt, Artificial Sequence
  Synthetic
accugccucagccucccaaagcg

SEQ ID NO: 581702 - RNA, 24 nt, Artificial Sequence
  Synthetic
caccugccucagccucccaaagcg

SEQ ID NO: 581703 - RNA, 18 nt, Artificial Sequence
  Synthetic
acacccaguaagaaagcg

SEQ ID NO: 581704 - RNA, 19 nt, Artificial Sequence
  Synthetic
cacacccaguaagaaagcg

SEQ ID NO: 581705 - RNA, 20 nt, Artificial Sequence
  Synthetic
ucacacccaguaagaaagcg

SEQ ID NO: 581706 - RNA, 21 nt, Artificial Sequence
  Synthetic
gucacacccaguaagaaagcg

SEQ ID NO: 581707 - RNA, 22 nt, Artificial Sequence
  Synthetic
ugucacacccaguaagaaagcg

SEQ ID NO: 581708 - RNA, 23 nt, Artificial Sequence
  Synthetic
cugucacacccaguaagaaagcg

SEQ ID NO: 581709 - RNA, 24 nt, Artificial Sequence
  Synthetic
acugucacacccaguaagaaagcg

SEQ ID NO: 581710 - RNA, 18 nt, Artificial Sequence
  Synthetic
uccuuacccacgaaagcg

SEQ ID NO: 581711 - RNA, 19 nt, Artificial Sequence
  Synthetic
cuccuuacccacgaaagcg

SEQ ID NO: 581712 - RNA, 20 nt, Artificial Sequence
  Synthetic
acuccuuacccacgaaagcg

SEQ ID NO: 581713 - RNA, 21 nt, Artificial Sequence
  Synthetic
gacuccuuacccacgaaagcg

SEQ ID NO: 581714 - RNA, 22 nt, Artificial Sequence
  Synthetic
ugacuccuuacccacgaaagcg

SEQ ID NO: 581715 - RNA, 23 nt, Artificial Sequence
  Synthetic
cugacuccuuacccacgaaagcg

SEQ ID NO: 581716 - RNA, 24 nt, Artificial Sequence
  Synthetic
ucugacuccuuacccacgaaagcg

SEQ ID NO: 581717 - RNA, 18 nt, Artificial Sequence
  Synthetic
uuacucaugaguaaagcg

SEQ ID NO: 581718 - RNA, 19 nt, Artificial Sequence
  Synthetic
auuacucaugaguaaagcg

SEQ ID NO: 581719 - RNA, 20 nt, Artificial Sequence
  Synthetic
aauuacucaugaguaaagcg

SEQ ID NO: 581720 - RNA, 21 nt, Artificial Sequence
  Synthetic
aaauuacucaugaguaaagcg

SEQ ID NO: 581721 - RNA, 22 nt, Artificial Sequence
  Synthetic
aaaauuacucaugaguaaagcg

SEQ ID NO: 581722 - RNA, 23 nt, Artificial Sequence
  Synthetic
aaaaauuacucaugaguaaagcg

SEQ ID NO: 581723 - RNA, 24 nt, Artificial Sequence
  Synthetic
caaaaauuacucaugaguaaagcg

SEQ ID NO: 581724 - RNA, 18 nt, Artificial Sequence
  Synthetic
cugaaaagaaagcaagcg

SEQ ID NO: 581725 - RNA, 19 nt, Artificial Sequence
  Synthetic
acugaaaagaaagcaagcg

SEQ ID NO: 581726 - RNA, 20 nt, Artificial Sequence
  Synthetic
uacugaaaagaaagcaagcg

SEQ ID NO: 581727 - RNA, 21 nt, Artificial Sequence
  Synthetic
guacugaaaagaaagcaagcg

SEQ ID NO: 581728 - RNA, 22 nt, Artificial Sequence
  Synthetic
gguacugaaaagaaagcaagcg

SEQ ID NO: 581729 - RNA, 23 nt, Artificial Sequence
  Synthetic
ugguacugaaaagaaagcaagcg

SEQ ID NO: 581730 - RNA, 24 nt, Artificial Sequence
  Synthetic
gugguacugaaaagaaagcaagcg

SEQ ID NO: 581731 - RNA, 18 nt, Artificial Sequence
  Synthetic
uauagaaauaaagaagcg

SEQ ID NO: 581732 - RNA, 19 nt, Artificial Sequence
  Synthetic
auauagaaauaaagaagcg

SEQ ID NO: 581733 - RNA, 20 nt, Artificial Sequence
  Synthetic
aauauagaaauaaagaagcg

SEQ ID NO: 581734 - RNA, 21 nt, Artificial Sequence
  Synthetic
uaauauagaaauaaagaagcg

SEQ ID NO: 581735 - RNA, 22 nt, Artificial Sequence
  Synthetic
guaauauagaaauaaagaagcg

SEQ ID NO: 581736 - RNA, 23 nt, Artificial Sequence
  Synthetic
gguaauauagaaauaaagaagcg

SEQ ID NO: 581737 - RNA, 24 nt, Artificial Sequence
  Synthetic
agguaauauagaaauaaagaagcg

SEQ ID NO: 581738 - RNA, 18 nt, Artificial Sequence
  Synthetic
ggaaguggggaagaagcg

SEQ ID NO: 581739 - RNA, 19 nt, Artificial Sequence
  Synthetic
gggaaguggggaagaagcg

SEQ ID NO: 581740 - RNA, 20 nt, Artificial Sequence
  Synthetic
agggaaguggggaagaagcg

SEQ ID NO: 581741 - RNA, 21 nt, Artificial Sequence
  Synthetic
aagggaaguggggaagaagcg

SEQ ID NO: 581742 - RNA, 22 nt, Artificial Sequence
  Synthetic
uaagggaaguggggaagaagcg

SEQ ID NO: 581743 - RNA, 23 nt, Artificial Sequence
  Synthetic
auaagggaaguggggaagaagcg

SEQ ID NO: 581744 - RNA, 24 nt, Artificial Sequence
  Synthetic
aauaagggaaguggggaagaagcg

SEQ ID NO: 581745 - RNA, 18 nt, Artificial Sequence
  Synthetic
gagagagagagagaagcg

SEQ ID NO: 581746 - RNA, 19 nt, Artificial Sequence
  Synthetic
agagagagagagagaagcg

SEQ ID NO: 581747 - RNA, 20 nt, Artificial Sequence
  Synthetic
gagagagagagagagaagcg

SEQ ID NO: 581748 - RNA, 21 nt, Artificial Sequence
  Synthetic
agagagagagagagagaagcg

SEQ ID NO: 581749 - RNA, 22 nt, Artificial Sequence
  Synthetic
gagagagagagagagagaagcg

SEQ ID NO: 581750 - RNA, 23 nt, Artificial Sequence
  Synthetic
agagagagagagagagagaagcg

SEQ ID NO: 581751 - RNA, 24 nt, Artificial Sequence
  Synthetic
gagagagagagagagagagaagcg

SEQ ID NO: 581752 - RNA, 18 nt, Artificial Sequence
  Synthetic
cgccaacuguuagaagcg

SEQ ID NO: 581753 - RNA, 19 nt, Artificial Sequence
  Synthetic
acgccaacuguuagaagcg

SEQ ID NO: 581754 - RNA, 20 nt, Artificial Sequence
  Synthetic
aacgccaacuguuagaagcg

SEQ ID NO: 581755 - RNA, 21 nt, Artificial Sequence
  Synthetic
aaacgccaacuguuagaagcg

SEQ ID NO: 581756 - RNA, 22 nt, Artificial Sequence
  Synthetic
aaaacgccaacuguuagaagcg

SEQ ID NO: 581757 - RNA, 23 nt, Artificial Sequence
  Synthetic
caaaacgccaacuguuagaagcg

SEQ ID NO: 581758 - RNA, 24 nt, Artificial Sequence
  Synthetic
ccaaaacgccaacuguuagaagcg

SEQ ID NO: 581759 - RNA, 18 nt, Artificial Sequence
  Synthetic
auaacguaaguggaagcg

SEQ ID NO: 581760 - RNA, 19 nt, Artificial Sequence
  Synthetic
cauaacguaaguggaagcg

SEQ ID NO: 581761 - RNA, 20 nt, Artificial Sequence
  Synthetic
ucauaacguaaguggaagcg

SEQ ID NO: 581762 - RNA, 21 nt, Artificial Sequence
  Synthetic
uucauaacguaaguggaagcg

SEQ ID NO: 581763 - RNA, 22 nt, Artificial Sequence
  Synthetic
cuucauaacguaaguggaagcg

SEQ ID NO: 581764 - RNA, 23 nt, Artificial Sequence
  Synthetic
ucuucauaacguaaguggaagcg

SEQ ID NO: 581765 - RNA, 24 nt, Artificial Sequence
  Synthetic
gucuucauaacguaaguggaagcg

SEQ ID NO: 581766 - RNA, 18 nt, Artificial Sequence
  Synthetic
ccucggccuccugaagcg

SEQ ID NO: 581767 - RNA, 19 nt, Artificial Sequence
  Synthetic
gccucggccuccugaagcg

SEQ ID NO: 581768 - RNA, 20 nt, Artificial Sequence
  Synthetic
cgccucggccuccugaagcg

SEQ ID NO: 581769 - RNA, 21 nt, Artificial Sequence
  Synthetic
ccgccucggccuccugaagcg

SEQ ID NO: 581770 - RNA, 22 nt, Artificial Sequence
  Synthetic
cccgccucggccuccugaagcg

SEQ ID NO: 581771 - RNA, 23 nt, Artificial Sequence
  Synthetic
gcccgccucggccuccugaagcg

SEQ ID NO: 581772 - RNA, 24 nt, Artificial Sequence
  Synthetic
cgcccgccucggccuccugaagcg

SEQ ID NO: 581773 - RNA, 18 nt, Artificial Sequence
  Synthetic
uuagaauguuuguaagcg

SEQ ID NO: 581774 - RNA, 19 nt, Artificial Sequence
  Synthetic
auuagaauguuuguaagcg

SEQ ID NO: 581775 - RNA, 20 nt, Artificial Sequence
  Synthetic
aauuagaauguuuguaagcg

SEQ ID NO: 581776 - RNA, 21 nt, Artificial Sequence
  Synthetic
uaauuagaauguuuguaagcg

SEQ ID NO: 581777 - RNA, 22 nt, Artificial Sequence
  Synthetic
uuaauuagaauguuuguaagcg

SEQ ID NO: 581778 - RNA, 23 nt, Artificial Sequence
  Synthetic
uuuaauuagaauguuuguaagcg

SEQ ID NO: 581779 - RNA, 24 nt, Artificial Sequence
  Synthetic
cuuuaauuagaauguuuguaagcg

SEQ ID NO: 581780 - RNA, 18 nt, Artificial Sequence
  Synthetic
aacguccuaaaaacagcg

SEQ ID NO: 581781 - RNA, 19 nt, Artificial Sequence
  Synthetic
gaacguccuaaaaacagcg

SEQ ID NO: 581782 - RNA, 20 nt, Artificial Sequence
  Synthetic
agaacguccuaaaaacagcg

SEQ ID NO: 581783 - RNA, 21 nt, Artificial Sequence
  Synthetic
aagaacguccuaaaaacagcg

SEQ ID NO: 581784 - RNA, 22 nt, Artificial Sequence
  Synthetic
uaagaacguccuaaaaacagcg

SEQ ID NO: 581785 - RNA, 23 nt, Artificial Sequence
  Synthetic
guaagaacguccuaaaaacagcg

SEQ ID NO: 581786 - RNA, 24 nt, Artificial Sequence
  Synthetic
aguaagaacguccuaaaaacagcg

SEQ ID NO: 581787 - RNA, 18 nt, Artificial Sequence
  Synthetic
uaccuagaugacacagcg

SEQ ID NO: 581788 - RNA, 19 nt, Artificial Sequence
  Synthetic
uuaccuagaugacacagcg

SEQ ID NO: 581789 - RNA, 20 nt, Artificial Sequence
  Synthetic
auuaccuagaugacacagcg

SEQ ID NO: 581790 - RNA, 21 nt, Artificial Sequence
  Synthetic
cauuaccuagaugacacagcg

SEQ ID NO: 581791 - RNA, 22 nt, Artificial Sequence
  Synthetic
ucauuaccuagaugacacagcg

SEQ ID NO: 581792 - RNA, 23 nt, Artificial Sequence
  Synthetic
uucauuaccuagaugacacagcg

SEQ ID NO: 581793 - RNA, 24 nt, Artificial Sequence
  Synthetic
uuucauuaccuagaugacacagcg

SEQ ID NO: 581794 - RNA, 18 nt, Artificial Sequence
  Synthetic
auaucaccaaguacagcg

SEQ ID NO: 581795 - RNA, 19 nt, Artificial Sequence
  Synthetic
uauaucaccaaguacagcg

SEQ ID NO: 581796 - RNA, 20 nt, Artificial Sequence
  Synthetic
cuauaucaccaaguacagcg

SEQ ID NO: 581797 - RNA, 21 nt, Artificial Sequence
  Synthetic
ccuauaucaccaaguacagcg

SEQ ID NO: 581798 - RNA, 22 nt, Artificial Sequence
  Synthetic
uccuauaucaccaaguacagcg

SEQ ID NO: 581799 - RNA, 23 nt, Artificial Sequence
  Synthetic
uuccuauaucaccaaguacagcg

SEQ ID NO: 581800 - RNA, 24 nt, Artificial Sequence
  Synthetic
uuuccuauaucaccaaguacagcg

SEQ ID NO: 581801 - RNA, 18 nt, Artificial Sequence
  Synthetic
cuauguugaauaggagcg

SEQ ID NO: 581802 - RNA, 19 nt, Artificial Sequence
  Synthetic
acuauguugaauaggagcg

SEQ ID NO: 581803 - RNA, 20 nt, Artificial Sequence
  Synthetic
cacuauguugaauaggagcg

SEQ ID NO: 581804 - RNA, 21 nt, Artificial Sequence
  Synthetic
acacuauguugaauaggagcg

SEQ ID NO: 581805 - RNA, 22 nt, Artificial Sequence
  Synthetic
aacacuauguugaauaggagcg

SEQ ID NO: 581806 - RNA, 23 nt, Artificial Sequence
  Synthetic
caacacuauguugaauaggagcg

SEQ ID NO: 581807 - RNA, 24 nt, Artificial Sequence
  Synthetic
ccaacacuauguugaauaggagcg

SEQ ID NO: 581808 - RNA, 18 nt, Artificial Sequence
  Synthetic
guaugucuuuugggagcg

SEQ ID NO: 581809 - RNA, 19 nt, Artificial Sequence
  Synthetic
aguaugucuuuugggagcg

SEQ ID NO: 581810 - RNA, 20 nt, Artificial Sequence
  Synthetic
uaguaugucuuuugggagcg

SEQ ID NO: 581811 - RNA, 21 nt, Artificial Sequence
  Synthetic
uuaguaugucuuuugggagcg

SEQ ID NO: 581812 - RNA, 22 nt, Artificial Sequence
  Synthetic
uuuaguaugucuuuugggagcg

SEQ ID NO: 581813 - RNA, 23 nt, Artificial Sequence
  Synthetic
uuuuaguaugucuuuugggagcg

SEQ ID NO: 581814 - RNA, 24 nt, Artificial Sequence
  Synthetic
cuuuuaguaugucuuuugggagcg

SEQ ID NO: 581815 - RNA, 18 nt, Artificial Sequence
  Synthetic
cagugaaaaggaugagcg

SEQ ID NO: 581816 - RNA, 19 nt, Artificial Sequence
  Synthetic
ucagugaaaaggaugagcg

SEQ ID NO: 581817 - RNA, 20 nt, Artificial Sequence
  Synthetic
cucagugaaaaggaugagcg

SEQ ID NO: 581818 - RNA, 21 nt, Artificial Sequence
  Synthetic
ucucagugaaaaggaugagcg

SEQ ID NO: 581819 - RNA, 22 nt, Artificial Sequence
  Synthetic
aucucagugaaaaggaugagcg

SEQ ID NO: 581820 - RNA, 23 nt, Artificial Sequence
  Synthetic
gaucucagugaaaaggaugagcg

SEQ ID NO: 581821 - RNA, 24 nt, Artificial Sequence
  Synthetic
ugaucucagugaaaaggaugagcg

SEQ ID NO: 581822 - RNA, 18 nt, Artificial Sequence
  Synthetic
aaucucuaaaacugagcg

SEQ ID NO: 581823 - RNA, 19 nt, Artificial Sequence
  Synthetic
aaaucucuaaaacugagcg

SEQ ID NO: 581824 - RNA, 20 nt, Artificial Sequence
  Synthetic
aaaaucucuaaaacugagcg

SEQ ID NO: 581825 - RNA, 21 nt, Artificial Sequence
  Synthetic
uaaaaucucuaaaacugagcg

SEQ ID NO: 581826 - RNA, 22 nt, Artificial Sequence
  Synthetic
cuaaaaucucuaaaacugagcg

SEQ ID NO: 581827 - RNA, 23 nt, Artificial Sequence
  Synthetic
ccuaaaaucucuaaaacugagcg

SEQ ID NO: 581828 - RNA, 24 nt, Artificial Sequence
  Synthetic
uccuaaaaucucuaaaacugagcg

SEQ ID NO: 581829 - RNA, 18 nt, Artificial Sequence
  Synthetic
cagcuugggaggugagcg

SEQ ID NO: 581830 - RNA, 19 nt, Artificial Sequence
  Synthetic
ucagcuugggaggugagcg

SEQ ID NO: 581831 - RNA, 20 nt, Artificial Sequence
  Synthetic
cucagcuugggaggugagcg

SEQ ID NO: 581832 - RNA, 21 nt, Artificial Sequence
  Synthetic
acucagcuugggaggugagcg

SEQ ID NO: 581833 - RNA, 22 nt, Artificial Sequence
  Synthetic
aacucagcuugggaggugagcg

SEQ ID NO: 581834 - RNA, 23 nt, Artificial Sequence
  Synthetic
gaacucagcuugggaggugagcg

SEQ ID NO: 581835 - RNA, 24 nt, Artificial Sequence
  Synthetic
agaacucagcuugggaggugagcg

SEQ ID NO: 581836 - RNA, 18 nt, Artificial Sequence
  Synthetic
aagcagaucgcuugagcg

SEQ ID NO: 581837 - RNA, 19 nt, Artificial Sequence
  Synthetic
caagcagaucgcuugagcg

SEQ ID NO: 581838 - RNA, 20 nt, Artificial Sequence
  Synthetic
gcaagcagaucgcuugagcg

SEQ ID NO: 581839 - RNA, 21 nt, Artificial Sequence
  Synthetic
ggcaagcagaucgcuugagcg

SEQ ID NO: 581840 - RNA, 22 nt, Artificial Sequence
  Synthetic
aggcaagcagaucgcuugagcg

SEQ ID NO: 581841 - RNA, 23 nt, Artificial Sequence
  Synthetic
gaggcaagcagaucgcuugagcg

SEQ ID NO: 581842 - RNA, 24 nt, Artificial Sequence
  Synthetic
ggaggcaagcagaucgcuugagcg

SEQ ID NO: 581843 - RNA, 18 nt, Artificial Sequence
  Synthetic
gggggcaucaaaguagcg

SEQ ID NO: 581844 - RNA, 19 nt, Artificial Sequence
  Synthetic
ugggggcaucaaaguagcg

SEQ ID NO: 581845 - RNA, 20 nt, Artificial Sequence
  Synthetic
augggggcaucaaaguagcg

SEQ ID NO: 581846 - RNA, 21 nt, Artificial Sequence
  Synthetic
aaugggggcaucaaaguagcg

SEQ ID NO: 581847 - RNA, 22 nt, Artificial Sequence
  Synthetic
aaaugggggcaucaaaguagcg

SEQ ID NO: 581848 - RNA, 23 nt, Artificial Sequence
  Synthetic
aaaaugggggcaucaaaguagcg

SEQ ID NO: 581849 - RNA, 24 nt, Artificial Sequence
  Synthetic
caaaaugggggcaucaaaguagcg

SEQ ID NO: 581850 - RNA, 18 nt, Artificial Sequence
  Synthetic
uauaacccuggauuagcg

SEQ ID NO: 581851 - RNA, 19 nt, Artificial Sequence
  Synthetic
uuauaacccuggauuagcg

SEQ ID NO: 581852 - RNA, 20 nt, Artificial Sequence
  Synthetic
guuauaacccuggauuagcg

SEQ ID NO: 581853 - RNA, 21 nt, Artificial Sequence
  Synthetic
gguuauaacccuggauuagcg

SEQ ID NO: 581854 - RNA, 22 nt, Artificial Sequence
  Synthetic
ggguuauaacccuggauuagcg

SEQ ID NO: 581855 - RNA, 23 nt, Artificial Sequence
  Synthetic
uggguuauaacccuggauuagcg

SEQ ID NO: 581856 - RNA, 24 nt, Artificial Sequence
  Synthetic
uuggguuauaacccuggauuagcg

SEQ ID NO: 581857 - RNA, 18 nt, Artificial Sequence
  Synthetic
uuccauugccaaaaggcg

SEQ ID NO: 581858 - RNA, 19 nt, Artificial Sequence
  Synthetic
guuccauugccaaaaggcg

SEQ ID NO: 581859 - RNA, 20 nt, Artificial Sequence
  Synthetic
aguuccauugccaaaaggcg

SEQ ID NO: 581860 - RNA, 21 nt, Artificial Sequence
  Synthetic
aaguuccauugccaaaaggcg

SEQ ID NO: 581861 - RNA, 22 nt, Artificial Sequence
  Synthetic
caaguuccauugccaaaaggcg

SEQ ID NO: 581862 - RNA, 23 nt, Artificial Sequence
  Synthetic
gcaaguuccauugccaaaaggcg

SEQ ID NO: 581863 - RNA, 24 nt, Artificial Sequence
  Synthetic
agcaaguuccauugccaaaaggcg

SEQ ID NO: 581864 - RNA, 18 nt, Artificial Sequence
  Synthetic
uucacaauagcaaaggcg

SEQ ID NO: 581865 - RNA, 19 nt, Artificial Sequence
  Synthetic
auucacaauagcaaaggcg

SEQ ID NO: 581866 - RNA, 20 nt, Artificial Sequence
  Synthetic
cauucacaauagcaaaggcg

SEQ ID NO: 581867 - RNA, 21 nt, Artificial Sequence
  Synthetic
ccauucacaauagcaaaggcg

SEQ ID NO: 581868 - RNA, 22 nt, Artificial Sequence
  Synthetic
accauucacaauagcaaaggcg

SEQ ID NO: 581869 - RNA, 23 nt, Artificial Sequence
  Synthetic
caccauucacaauagcaaaggcg

SEQ ID NO: 581870 - RNA, 24 nt, Artificial Sequence
  Synthetic
gcaccauucacaauagcaaaggcg

SEQ ID NO: 581871 - RNA, 18 nt, Artificial Sequence
  Synthetic
gugcugggauuacaggcg

SEQ ID NO: 581872 - RNA, 19 nt, Artificial Sequence
  Synthetic
agugcugggauuacaggcg

SEQ ID NO: 581873 - RNA, 20 nt, Artificial Sequence
  Synthetic
aagugcugggauuacaggcg

SEQ ID NO: 581874 - RNA, 21 nt, Artificial Sequence
  Synthetic
aaagugcugggauuacaggcg

SEQ ID NO: 581875 - RNA, 22 nt, Artificial Sequence
  Synthetic
caaagugcugggauuacaggcg

SEQ ID NO: 581876 - RNA, 23 nt, Artificial Sequence
  Synthetic
ccaaagugcugggauuacaggcg

SEQ ID NO: 581877 - RNA, 24 nt, Artificial Sequence
  Synthetic
cccaaagugcugggauuacaggcg

SEQ ID NO: 581878 - RNA, 18 nt, Artificial Sequence
  Synthetic
cuuagaggucaagaggcg

SEQ ID NO: 581879 - RNA, 19 nt, Artificial Sequence
  Synthetic
ccuuagaggucaagaggcg

SEQ ID NO: 581880 - RNA, 20 nt, Artificial Sequence
  Synthetic
gccuuagaggucaagaggcg

SEQ ID NO: 581881 - RNA, 21 nt, Artificial Sequence
  Synthetic
ugccuuagaggucaagaggcg

SEQ ID NO: 581882 - RNA, 22 nt, Artificial Sequence
  Synthetic
uugccuuagaggucaagaggcg

SEQ ID NO: 581883 - RNA, 23 nt, Artificial Sequence
  Synthetic
auugccuuagaggucaagaggcg

SEQ ID NO: 581884 - RNA, 24 nt, Artificial Sequence
  Synthetic
cauugccuuagaggucaagaggcg

SEQ ID NO: 581885 - RNA, 18 nt, Artificial Sequence
  Synthetic
ggcagggaaucagaggcg

SEQ ID NO: 581886 - RNA, 19 nt, Artificial Sequence
  Synthetic
aggcagggaaucagaggcg

SEQ ID NO: 581887 - RNA, 20 nt, Artificial Sequence
  Synthetic
caggcagggaaucagaggcg

SEQ ID NO: 581888 - RNA, 21 nt, Artificial Sequence
  Synthetic
ccaggcagggaaucagaggcg

SEQ ID NO: 581889 - RNA, 22 nt, Artificial Sequence
  Synthetic
accaggcagggaaucagaggcg

SEQ ID NO: 581890 - RNA, 23 nt, Artificial Sequence
  Synthetic
gaccaggcagggaaucagaggcg

SEQ ID NO: 581891 - RNA, 24 nt, Artificial Sequence
  Synthetic
ggaccaggcagggaaucagaggcg

SEQ ID NO: 581892 - RNA, 18 nt, Artificial Sequence
  Synthetic
gcacugagcugagaggcg

SEQ ID NO: 581893 - RNA, 19 nt, Artificial Sequence
  Synthetic
ggcacugagcugagaggcg

SEQ ID NO: 581894 - RNA, 20 nt, Artificial Sequence
  Synthetic
aggcacugagcugagaggcg

SEQ ID NO: 581895 - RNA, 21 nt, Artificial Sequence
  Synthetic
gaggcacugagcugagaggcg

SEQ ID NO: 581896 - RNA, 22 nt, Artificial Sequence
  Synthetic
agaggcacugagcugagaggcg

SEQ ID NO: 581897 - RNA, 23 nt, Artificial Sequence
  Synthetic
cagaggcacugagcugagaggcg

SEQ ID NO: 581898 - RNA, 24 nt, Artificial Sequence
  Synthetic
ccagaggcacugagcugagaggcg

SEQ ID NO: 581899 - RNA, 18 nt, Artificial Sequence
  Synthetic
auuugggaggcugaggcg

SEQ ID NO: 581900 - RNA, 19 nt, Artificial Sequence
  Synthetic
uauuugggaggcugaggcg

SEQ ID NO: 581901 - RNA, 20 nt, Artificial Sequence
  Synthetic
cuauuugggaggcugaggcg

SEQ ID NO: 581902 - RNA, 21 nt, Artificial Sequence
  Synthetic
gcuauuugggaggcugaggcg

SEQ ID NO: 581903 - RNA, 22 nt, Artificial Sequence
  Synthetic
agcuauuugggaggcugaggcg

SEQ ID NO: 581904 - RNA, 23 nt, Artificial Sequence
  Synthetic
cagcuauuugggaggcugaggcg

SEQ ID NO: 581905 - RNA, 24 nt, Artificial Sequence
  Synthetic
ccagcuauuugggaggcugaggcg

SEQ ID NO: 581906 - RNA, 18 nt, Artificial Sequence
  Synthetic
uccaaagggauuuaggcg

SEQ ID NO: 581907 - RNA, 19 nt, Artificial Sequence
  Synthetic
cuccaaagggauuuaggcg

SEQ ID NO: 581908 - RNA, 20 nt, Artificial Sequence
  Synthetic
ucuccaaagggauuuaggcg

SEQ ID NO: 581909 - RNA, 21 nt, Artificial Sequence
  Synthetic
uucuccaaagggauuuaggcg

SEQ ID NO: 581910 - RNA, 22 nt, Artificial Sequence
  Synthetic
guucuccaaagggauuuaggcg

SEQ ID NO: 581911 - RNA, 23 nt, Artificial Sequence
  Synthetic
aguucuccaaagggauuuaggcg

SEQ ID NO: 581912 - RNA, 24 nt, Artificial Sequence
  Synthetic
gaguucuccaaagggauuuaggcg

SEQ ID NO: 581913 - RNA, 18 nt, Artificial Sequence
  Synthetic
acacauagacacagggcg

SEQ ID NO: 581914 - RNA, 19 nt, Artificial Sequence
  Synthetic
aacacauagacacagggcg

SEQ ID NO: 581915 - RNA, 20 nt, Artificial Sequence
  Synthetic
gaacacauagacacagggcg

SEQ ID NO: 581916 - RNA, 21 nt, Artificial Sequence
  Synthetic
agaacacauagacacagggcg

SEQ ID NO: 581917 - RNA, 22 nt, Artificial Sequence
  Synthetic
gagaacacauagacacagggcg

SEQ ID NO: 581918 - RNA, 23 nt, Artificial Sequence
  Synthetic
ugagaacacauagacacagggcg

SEQ ID NO: 581919 - RNA, 24 nt, Artificial Sequence
  Synthetic
augagaacacauagacacagggcg

SEQ ID NO: 581920 - RNA, 18 nt, Artificial Sequence
  Synthetic
ugccgauucaacugggcg

SEQ ID NO: 581921 - RNA, 19 nt, Artificial Sequence
  Synthetic
gugccgauucaacugggcg

SEQ ID NO: 581922 - RNA, 20 nt, Artificial Sequence
  Synthetic
ggugccgauucaacugggcg

SEQ ID NO: 581923 - RNA, 21 nt, Artificial Sequence
  Synthetic
uggugccgauucaacugggcg

SEQ ID NO: 581924 - RNA, 22 nt, Artificial Sequence
  Synthetic
guggugccgauucaacugggcg

SEQ ID NO: 581925 - RNA, 23 nt, Artificial Sequence
  Synthetic
gguggugccgauucaacugggcg

SEQ ID NO: 581926 - RNA, 24 nt, Artificial Sequence
  Synthetic
agguggugccgauucaacugggcg

SEQ ID NO: 581927 - RNA, 18 nt, Artificial Sequence
  Synthetic
augcucacuaacauggcg

SEQ ID NO: 581928 - RNA, 19 nt, Artificial Sequence
  Synthetic
uaugcucacuaacauggcg

SEQ ID NO: 581929 - RNA, 20 nt, Artificial Sequence
  Synthetic
cuaugcucacuaacauggcg

SEQ ID NO: 581930 - RNA, 21 nt, Artificial Sequence
  Synthetic
acuaugcucacuaacauggcg

SEQ ID NO: 581931 - RNA, 22 nt, Artificial Sequence
  Synthetic
uacuaugcucacuaacauggcg

SEQ ID NO: 581932 - RNA, 23 nt, Artificial Sequence
  Synthetic
uuacuaugcucacuaacauggcg

SEQ ID NO: 581933 - RNA, 24 nt, Artificial Sequence
  Synthetic
guuacuaugcucacuaacauggcg

SEQ ID NO: 581934 - RNA, 18 nt, Artificial Sequence
  Synthetic
ucaccauucuacauggcg

SEQ ID NO: 581935 - RNA, 19 nt, Artificial Sequence
  Synthetic
cucaccauucuacauggcg

SEQ ID NO: 581936 - RNA, 20 nt, Artificial Sequence
  Synthetic
acucaccauucuacauggcg

SEQ ID NO: 581937 - RNA, 21 nt, Artificial Sequence
  Synthetic
gacucaccauucuacauggcg

SEQ ID NO: 581938 - RNA, 22 nt, Artificial Sequence
  Synthetic
ggacucaccauucuacauggcg

SEQ ID NO: 581939 - RNA, 23 nt, Artificial Sequence
  Synthetic
uggacucaccauucuacauggcg

SEQ ID NO: 581940 - RNA, 24 nt, Artificial Sequence
  Synthetic
auggacucaccauucuacauggcg

SEQ ID NO: 581941 - RNA, 18 nt, Artificial Sequence
  Synthetic
uuugagaauucccuggcg

SEQ ID NO: 581942 - RNA, 19 nt, Artificial Sequence
  Synthetic
guuugagaauucccuggcg

SEQ ID NO: 581943 - RNA, 20 nt, Artificial Sequence
  Synthetic
uguuugagaauucccuggcg

SEQ ID NO: 581944 - RNA, 21 nt, Artificial Sequence
  Synthetic
uuguuugagaauucccuggcg

SEQ ID NO: 581945 - RNA, 22 nt, Artificial Sequence
  Synthetic
auuguuugagaauucccuggcg

SEQ ID NO: 581946 - RNA, 23 nt, Artificial Sequence
  Synthetic
aauuguuugagaauucccuggcg

SEQ ID NO: 581947 - RNA, 24 nt, Artificial Sequence
  Synthetic
uaauuguuugagaauucccuggcg

SEQ ID NO: 581948 - RNA, 18 nt, Artificial Sequence
  Synthetic
cauucaccagguguggcg

SEQ ID NO: 581949 - RNA, 19 nt, Artificial Sequence
  Synthetic
acauucaccagguguggcg

SEQ ID NO: 581950 - RNA, 20 nt, Artificial Sequence
  Synthetic
aacauucaccagguguggcg

SEQ ID NO: 581951 - RNA, 21 nt, Artificial Sequence
  Synthetic
aaacauucaccagguguggcg

SEQ ID NO: 581952 - RNA, 22 nt, Artificial Sequence
  Synthetic
caaacauucaccagguguggcg

SEQ ID NO: 581953 - RNA, 23 nt, Artificial Sequence
  Synthetic
acaaacauucaccagguguggcg

SEQ ID NO: 581954 - RNA, 24 nt, Artificial Sequence
  Synthetic
uacaaacauucaccagguguggcg

SEQ ID NO: 581955 - RNA, 18 nt, Artificial Sequence
  Synthetic
uggaauaaaauauuggcg

SEQ ID NO: 581956 - RNA, 19 nt, Artificial Sequence
  Synthetic
cuggaauaaaauauuggcg

SEQ ID NO: 581957 - RNA, 20 nt, Artificial Sequence
  Synthetic
acuggaauaaaauauuggcg

SEQ ID NO: 581958 - RNA, 21 nt, Artificial Sequence
  Synthetic
aacuggaauaaaauauuggcg

SEQ ID NO: 581959 - RNA, 22 nt, Artificial Sequence
  Synthetic
gaacuggaauaaaauauuggcg

SEQ ID NO: 581960 - RNA, 23 nt, Artificial Sequence
  Synthetic
agaacuggaauaaaauauuggcg

SEQ ID NO: 581961 - RNA, 24 nt, Artificial Sequence
  Synthetic
aagaacuggaauaaaauauuggcg

SEQ ID NO: 581962 - RNA, 18 nt, Artificial Sequence
  Synthetic
auauggacaucuuuggcg

SEQ ID NO: 581963 - RNA, 19 nt, Artificial Sequence
  Synthetic
gauauggacaucuuuggcg

SEQ ID NO: 581964 - RNA, 20 nt, Artificial Sequence
  Synthetic
ggauauggacaucuuuggcg

SEQ ID NO: 581965 - RNA, 21 nt, Artificial Sequence
  Synthetic
aggauauggacaucuuuggcg

SEQ ID NO: 581966 - RNA, 22 nt, Artificial Sequence
  Synthetic
uaggauauggacaucuuuggcg

SEQ ID NO: 581967 - RNA, 23 nt, Artificial Sequence
  Synthetic
uuaggauauggacaucuuuggcg

SEQ ID NO: 581968 - RNA, 24 nt, Artificial Sequence
  Synthetic
auuaggauauggacaucuuuggcg

SEQ ID NO: 581969 - RNA, 18 nt, Artificial Sequence
  Synthetic
guuuacauguaaaaugcg

SEQ ID NO: 581970 - RNA, 19 nt, Artificial Sequence
  Synthetic
uguuuacauguaaaaugcg

SEQ ID NO: 581971 - RNA, 20 nt, Artificial Sequence
  Synthetic
cuguuuacauguaaaaugcg

SEQ ID NO: 581972 - RNA, 21 nt, Artificial Sequence
  Synthetic
acuguuuacauguaaaaugcg

SEQ ID NO: 581973 - RNA, 22 nt, Artificial Sequence
  Synthetic
uacuguuuacauguaaaaugcg

SEQ ID NO: 581974 - RNA, 23 nt, Artificial Sequence
  Synthetic
uuacuguuuacauguaaaaugcg

SEQ ID NO: 581975 - RNA, 24 nt, Artificial Sequence
  Synthetic
auuacuguuuacauguaaaaugcg

SEQ ID NO: 581976 - RNA, 18 nt, Artificial Sequence
  Synthetic
gugcuuauugugaaugcg

SEQ ID NO: 581977 - RNA, 19 nt, Artificial Sequence
  Synthetic
cgugcuuauugugaaugcg

SEQ ID NO: 581978 - RNA, 20 nt, Artificial Sequence
  Synthetic
acgugcuuauugugaaugcg

SEQ ID NO: 581979 - RNA, 21 nt, Artificial Sequence
  Synthetic
gacgugcuuauugugaaugcg

SEQ ID NO: 581980 - RNA, 22 nt, Artificial Sequence
  Synthetic
ugacgugcuuauugugaaugcg

SEQ ID NO: 581981 - RNA, 23 nt, Artificial Sequence
  Synthetic
uugacgugcuuauugugaaugcg

SEQ ID NO: 581982 - RNA, 24 nt, Artificial Sequence
  Synthetic
auugacgugcuuauugugaaugcg

SEQ ID NO: 581983 - RNA, 18 nt, Artificial Sequence
  Synthetic
acaaacuaugcauaugcg

SEQ ID NO: 581984 - RNA, 19 nt, Artificial Sequence
  Synthetic
aacaaacuaugcauaugcg

SEQ ID NO: 581985 - RNA, 20 nt, Artificial Sequence
  Synthetic
gaacaaacuaugcauaugcg

SEQ ID NO: 581986 - RNA, 21 nt, Artificial Sequence
  Synthetic
ggaacaaacuaugcauaugcg

SEQ ID NO: 581987 - RNA, 22 nt, Artificial Sequence
  Synthetic
aggaacaaacuaugcauaugcg

SEQ ID NO: 581988 - RNA, 23 nt, Artificial Sequence
  Synthetic
uaggaacaaacuaugcauaugcg

SEQ ID NO: 581989 - RNA, 24 nt, Artificial Sequence
  Synthetic
auaggaacaaacuaugcauaugcg

SEQ ID NO: 581990 - RNA, 18 nt, Artificial Sequence
  Synthetic
ucauuauuccaaacugcg

SEQ ID NO: 581991 - RNA, 19 nt, Artificial Sequence
  Synthetic
gucauuauuccaaacugcg

SEQ ID NO: 581992 - RNA, 20 nt, Artificial Sequence
  Synthetic
ggucauuauuccaaacugcg

SEQ ID NO: 581993 - RNA, 21 nt, Artificial Sequence
  Synthetic
uggucauuauuccaaacugcg

SEQ ID NO: 581994 - RNA, 22 nt, Artificial Sequence
  Synthetic
guggucauuauuccaaacugcg

SEQ ID NO: 581995 - RNA, 23 nt, Artificial Sequence
  Synthetic
aguggucauuauuccaaacugcg

SEQ ID NO: 581996 - RNA, 24 nt, Artificial Sequence
  Synthetic
caguggucauuauuccaaacugcg

SEQ ID NO: 581997 - RNA, 18 nt, Artificial Sequence
  Synthetic
uucagauacgagacugcg

SEQ ID NO: 581998 - RNA, 19 nt, Artificial Sequence
  Synthetic
guucagauacgagacugcg

SEQ ID NO: 581999 - RNA, 20 nt, Artificial Sequence
  Synthetic
gguucagauacgagacugcg

SEQ ID NO: 582000 - RNA, 21 nt, Artificial Sequence
  Synthetic
ggguucagauacgagacugcg

SEQ ID NO: 582001 - RNA, 22 nt, Artificial Sequence
  Synthetic
gggguucagauacgagacugcg

SEQ ID NO: 582002 - RNA, 23 nt, Artificial Sequence
  Synthetic
ugggguucagauacgagacugcg

SEQ ID NO: 582003 - RNA, 24 nt, Artificial Sequence
  Synthetic
cugggguucagauacgagacugcg

SEQ ID NO: 582004 - RNA, 18 nt, Artificial Sequence
  Synthetic
auaauacguggaccugcg

SEQ ID NO: 582005 - RNA, 19 nt, Artificial Sequence
  Synthetic
aauaauacguggaccugcg

SEQ ID NO: 582006 - RNA, 20 nt, Artificial Sequence
  Synthetic
aaauaauacguggaccugcg

SEQ ID NO: 582007 - RNA, 21 nt, Artificial Sequence
  Synthetic
caaauaauacguggaccugcg

SEQ ID NO: 582008 - RNA, 22 nt, Artificial Sequence
  Synthetic
acaaauaauacguggaccugcg

SEQ ID NO: 582009 - RNA, 23 nt, Artificial Sequence
  Synthetic
gacaaauaauacguggaccugcg

SEQ ID NO: 582010 - RNA, 24 nt, Artificial Sequence
  Synthetic
agacaaauaauacguggaccugcg

SEQ ID NO: 582011 - RNA, 18 nt, Artificial Sequence
  Synthetic
uggcuuugccgagcugcg

SEQ ID NO: 582012 - RNA, 19 nt, Artificial Sequence
  Synthetic
guggcuuugccgagcugcg

SEQ ID NO: 582013 - RNA, 20 nt, Artificial Sequence
  Synthetic
aguggcuuugccgagcugcg

SEQ ID NO: 582014 - RNA, 21 nt, Artificial Sequence
  Synthetic
caguggcuuugccgagcugcg

SEQ ID NO: 582015 - RNA, 22 nt, Artificial Sequence
  Synthetic
acaguggcuuugccgagcugcg

SEQ ID NO: 582016 - RNA, 23 nt, Artificial Sequence
  Synthetic
uacaguggcuuugccgagcugcg

SEQ ID NO: 582017 - RNA, 24 nt, Artificial Sequence
  Synthetic
cuacaguggcuuugccgagcugcg

SEQ ID NO: 582018 - RNA, 18 nt, Artificial Sequence
  Synthetic
cauggcuuuauagcugcg

SEQ ID NO: 582019 - RNA, 19 nt, Artificial Sequence
  Synthetic
ccauggcuuuauagcugcg

SEQ ID NO: 582020 - RNA, 20 nt, Artificial Sequence
  Synthetic
gccauggcuuuauagcugcg

SEQ ID NO: 582021 - RNA, 21 nt, Artificial Sequence
  Synthetic
ggccauggcuuuauagcugcg

SEQ ID NO: 582022 - RNA, 22 nt, Artificial Sequence
  Synthetic
cggccauggcuuuauagcugcg

SEQ ID NO: 582023 - RNA, 23 nt, Artificial Sequence
  Synthetic
ucggccauggcuuuauagcugcg

SEQ ID NO: 582024 - RNA, 24 nt, Artificial Sequence
  Synthetic
aucggccauggcuuuauagcugcg

SEQ ID NO: 582025 - RNA, 18 nt, Artificial Sequence
  Synthetic
ggaccacuguuagcugcg

SEQ ID NO: 582026 - RNA, 19 nt, Artificial Sequence
  Synthetic
gggaccacuguuagcugcg

SEQ ID NO: 582027 - RNA, 20 nt, Artificial Sequence
  Synthetic
ugggaccacuguuagcugcg

SEQ ID NO: 582028 - RNA, 21 nt, Artificial Sequence
  Synthetic
gugggaccacuguuagcugcg

SEQ ID NO: 582029 - RNA, 22 nt, Artificial Sequence
  Synthetic
ggugggaccacuguuagcugcg

SEQ ID NO: 582030 - RNA, 23 nt, Artificial Sequence
  Synthetic
gggugggaccacuguuagcugcg

SEQ ID NO: 582031 - RNA, 24 nt, Artificial Sequence
  Synthetic
agggugggaccacuguuagcugcg

SEQ ID NO: 582032 - RNA, 18 nt, Artificial Sequence
  Synthetic
uugaauccagaugcugcg

SEQ ID NO: 582033 - RNA, 19 nt, Artificial Sequence
  Synthetic
cuugaauccagaugcugcg

SEQ ID NO: 582034 - RNA, 20 nt, Artificial Sequence
  Synthetic
ucuugaauccagaugcugcg

SEQ ID NO: 582035 - RNA, 21 nt, Artificial Sequence
  Synthetic
cucuugaauccagaugcugcg

SEQ ID NO: 582036 - RNA, 22 nt, Artificial Sequence
  Synthetic
ucucuugaauccagaugcugcg

SEQ ID NO: 582037 - RNA, 23 nt, Artificial Sequence
  Synthetic
uucucuugaauccagaugcugcg

SEQ ID NO: 582038 - RNA, 24 nt, Artificial Sequence
  Synthetic
guucucuugaauccagaugcugcg

SEQ ID NO: 582039 - RNA, 18 nt, Artificial Sequence
  Synthetic
uuacuguauagugcugcg

SEQ ID NO: 582040 - RNA, 19 nt, Artificial Sequence
  Synthetic
guuacuguauagugcugcg

SEQ ID NO: 582041 - RNA, 20 nt, Artificial Sequence
  Synthetic
uguuacuguauagugcugcg

SEQ ID NO: 582042 - RNA, 21 nt, Artificial Sequence
  Synthetic
uuguuacuguauagugcugcg

SEQ ID NO: 582043 - RNA, 22 nt, Artificial Sequence
  Synthetic
uuuguuacuguauagugcugcg

SEQ ID NO: 582044 - RNA, 23 nt, Artificial Sequence
  Synthetic
cuuuguuacuguauagugcugcg

SEQ ID NO: 582045 - RNA, 24 nt, Artificial Sequence
  Synthetic
ucuuuguuacuguauagugcugcg

SEQ ID NO: 582046 - RNA, 18 nt, Artificial Sequence
  Synthetic
ugcagaaguguaucugcg

SEQ ID NO: 582047 - RNA, 19 nt, Artificial Sequence
  Synthetic
augcagaaguguaucugcg

SEQ ID NO: 582048 - RNA, 20 nt, Artificial Sequence
  Synthetic
aaugcagaaguguaucugcg

SEQ ID NO: 582049 - RNA, 21 nt, Artificial Sequence
  Synthetic
gaaugcagaaguguaucugcg

SEQ ID NO: 582050 - RNA, 22 nt, Artificial Sequence
  Synthetic
agaaugcagaaguguaucugcg

SEQ ID NO: 582051 - RNA, 23 nt, Artificial Sequence
  Synthetic
cagaaugcagaaguguaucugcg

SEQ ID NO: 582052 - RNA, 24 nt, Artificial Sequence
  Synthetic
ucagaaugcagaaguguaucugcg

SEQ ID NO: 582053 - RNA, 18 nt, Artificial Sequence
  Synthetic
aauuauagacauagugcg

SEQ ID NO: 582054 - RNA, 19 nt, Artificial Sequence
  Synthetic
aaauuauagacauagugcg

SEQ ID NO: 582055 - RNA, 20 nt, Artificial Sequence
  Synthetic
caaauuauagacauagugcg

SEQ ID NO: 582056 - RNA, 21 nt, Artificial Sequence
  Synthetic
acaaauuauagacauagugcg

SEQ ID NO: 582057 - RNA, 22 nt, Artificial Sequence
  Synthetic
cacaaauuauagacauagugcg

SEQ ID NO: 582058 - RNA, 23 nt, Artificial Sequence
  Synthetic
ucacaaauuauagacauagugcg

SEQ ID NO: 582059 - RNA, 24 nt, Artificial Sequence
  Synthetic
uucacaaauuauagacauagugcg

SEQ ID NO: 582060 - RNA, 18 nt, Artificial Sequence
  Synthetic
guuguggggagaggugcg

SEQ ID NO: 582061 - RNA, 19 nt, Artificial Sequence
  Synthetic
gguuguggggagaggugcg

SEQ ID NO: 582062 - RNA, 20 nt, Artificial Sequence
  Synthetic
ggguuguggggagaggugcg

SEQ ID NO: 582063 - RNA, 21 nt, Artificial Sequence
  Synthetic
gggguuguggggagaggugcg

SEQ ID NO: 582064 - RNA, 22 nt, Artificial Sequence
  Synthetic
ugggguuguggggagaggugcg

SEQ ID NO: 582065 - RNA, 23 nt, Artificial Sequence
  Synthetic
gugggguuguggggagaggugcg

SEQ ID NO: 582066 - RNA, 24 nt, Artificial Sequence
  Synthetic
ggugggguuguggggagaggugcg

SEQ ID NO: 582067 - RNA, 18 nt, Artificial Sequence
  Synthetic
agguuuuuacugugugcg

SEQ ID NO: 582068 - RNA, 19 nt, Artificial Sequence
  Synthetic
cagguuuuuacugugugcg

SEQ ID NO: 582069 - RNA, 20 nt, Artificial Sequence
  Synthetic
gcagguuuuuacugugugcg

SEQ ID NO: 582070 - RNA, 21 nt, Artificial Sequence
  Synthetic
ggcagguuuuuacugugugcg

SEQ ID NO: 582071 - RNA, 22 nt, Artificial Sequence
  Synthetic
aggcagguuuuuacugugugcg

SEQ ID NO: 582072 - RNA, 23 nt, Artificial Sequence
  Synthetic
gaggcagguuuuuacugugugcg

SEQ ID NO: 582073 - RNA, 24 nt, Artificial Sequence
  Synthetic
ugaggcagguuuuuacugugugcg

SEQ ID NO: 582074 - RNA, 18 nt, Artificial Sequence
  Synthetic
gauacaucguguugugcg

SEQ ID NO: 582075 - RNA, 19 nt, Artificial Sequence
  Synthetic
ugauacaucguguugugcg

SEQ ID NO: 582076 - RNA, 20 nt, Artificial Sequence
  Synthetic
cugauacaucguguugugcg

SEQ ID NO: 582077 - RNA, 21 nt, Artificial Sequence
  Synthetic
acugauacaucguguugugcg

SEQ ID NO: 582078 - RNA, 22 nt, Artificial Sequence
  Synthetic
uacugauacaucguguugugcg

SEQ ID NO: 582079 - RNA, 23 nt, Artificial Sequence
  Synthetic
uuacugauacaucguguugugcg

SEQ ID NO: 582080 - RNA, 24 nt, Artificial Sequence
  Synthetic
cuuacugauacaucguguugugcg

SEQ ID NO: 582081 - RNA, 18 nt, Artificial Sequence
  Synthetic
gaugauuuauuaauugcg

SEQ ID NO: 582082 - RNA, 19 nt, Artificial Sequence
  Synthetic
agaugauuuauuaauugcg

SEQ ID NO: 582083 - RNA, 20 nt, Artificial Sequence
  Synthetic
uagaugauuuauuaauugcg

SEQ ID NO: 582084 - RNA, 21 nt, Artificial Sequence
  Synthetic
uuagaugauuuauuaauugcg

SEQ ID NO: 582085 - RNA, 22 nt, Artificial Sequence
  Synthetic
auuagaugauuuauuaauugcg

SEQ ID NO: 582086 - RNA, 23 nt, Artificial Sequence
  Synthetic
cauuagaugauuuauuaauugcg

SEQ ID NO: 582087 - RNA, 24 nt, Artificial Sequence
  Synthetic
ccauuagaugauuuauuaauugcg

SEQ ID NO: 582088 - RNA, 18 nt, Artificial Sequence
  Synthetic
caggagguggagcuugcg

SEQ ID NO: 582089 - RNA, 19 nt, Artificial Sequence
  Synthetic
ccaggagguggagcuugcg

SEQ ID NO: 582090 - RNA, 20 nt, Artificial Sequence
  Synthetic
cccaggagguggagcuugcg

SEQ ID NO: 582091 - RNA, 21 nt, Artificial Sequence
  Synthetic
acccaggagguggagcuugcg

SEQ ID NO: 582092 - RNA, 22 nt, Artificial Sequence
  Synthetic
aacccaggagguggagcuugcg

SEQ ID NO: 582093 - RNA, 23 nt, Artificial Sequence
  Synthetic
gaacccaggagguggagcuugcg

SEQ ID NO: 582094 - RNA, 24 nt, Artificial Sequence
  Synthetic
ugaacccaggagguggagcuugcg

SEQ ID NO: 582095 - RNA, 18 nt, Artificial Sequence
  Synthetic
ugggagguguagguugcg

SEQ ID NO: 582096 - RNA, 19 nt, Artificial Sequence
  Synthetic
cugggagguguagguugcg

SEQ ID NO: 582097 - RNA, 20 nt, Artificial Sequence
  Synthetic
ccugggagguguagguugcg

SEQ ID NO: 582098 - RNA, 21 nt, Artificial Sequence
  Synthetic
accugggagguguagguugcg

SEQ ID NO: 582099 - RNA, 22 nt, Artificial Sequence
  Synthetic
aaccugggagguguagguugcg

SEQ ID NO: 582100 - RNA, 23 nt, Artificial Sequence
  Synthetic
gaaccugggagguguagguugcg

SEQ ID NO: 582101 - RNA, 24 nt, Artificial Sequence
  Synthetic
ugaaccugggagguguagguugcg

SEQ ID NO: 582102 - RNA, 21 nt, Artificial Sequence
  Synthetic
agauuuucuaguuuauuugcg

SEQ ID NO: 582103 - RNA, 22 nt, Artificial Sequence
  Synthetic
uagauuuucuaguuuauuugcg

SEQ ID NO: 582104 - RNA, 23 nt, Artificial Sequence
  Synthetic
cuagauuuucuaguuuauuugcg

SEQ ID NO: 582105 - RNA, 24 nt, Artificial Sequence
  Synthetic
ucuagauuuucuaguuuauuugcg

SEQ ID NO: 582106 - RNA, 18 nt, Artificial Sequence
  Synthetic
aguaaucuauacuuugcg

SEQ ID NO: 582107 - RNA, 19 nt, Artificial Sequence
  Synthetic
caguaaucuauacuuugcg

SEQ ID NO: 582108 - RNA, 20 nt, Artificial Sequence
  Synthetic
ccaguaaucuauacuuugcg

SEQ ID NO: 582109 - RNA, 21 nt, Artificial Sequence
  Synthetic
cccaguaaucuauacuuugcg

SEQ ID NO: 582110 - RNA, 22 nt, Artificial Sequence
  Synthetic
gcccaguaaucuauacuuugcg

SEQ ID NO: 582111 - RNA, 23 nt, Artificial Sequence
  Synthetic
agcccaguaaucuauacuuugcg

SEQ ID NO: 582112 - RNA, 24 nt, Artificial Sequence
  Synthetic
aagcccaguaaucuauacuuugcg

SEQ ID NO: 582113 - RNA, 18 nt, Artificial Sequence
  Synthetic
ccacccguguucuuugcg

SEQ ID NO: 582114 - RNA, 19 nt, Artificial Sequence
  Synthetic
accacccguguucuuugcg

SEQ ID NO: 582115 - RNA, 20 nt, Artificial Sequence
  Synthetic
uaccacccguguucuuugcg

SEQ ID NO: 582116 - RNA, 21 nt, Artificial Sequence
  Synthetic
auaccacccguguucuuugcg

SEQ ID NO: 582117 - RNA, 22 nt, Artificial Sequence
  Synthetic
uauaccacccguguucuuugcg

SEQ ID NO: 582118 - RNA, 23 nt, Artificial Sequence
  Synthetic
auauaccacccguguucuuugcg

SEQ ID NO: 582119 - RNA, 24 nt, Artificial Sequence
  Synthetic
aauauaccacccguguucuuugcg

SEQ ID NO: 582120 - RNA, 18 nt, Artificial Sequence
  Synthetic
acauacuauuuuuuugcg

SEQ ID NO: 582121 - RNA, 19 nt, Artificial Sequence
  Synthetic
cacauacuauuuuuuugcg

SEQ ID NO: 582122 - RNA, 20 nt, Artificial Sequence
  Synthetic
ucacauacuauuuuuuugcg

SEQ ID NO: 582123 - RNA, 21 nt, Artificial Sequence
  Synthetic
cucacauacuauuuuuuugcg

SEQ ID NO: 582124 - RNA, 22 nt, Artificial Sequence
  Synthetic
ccucacauacuauuuuuuugcg

SEQ ID NO: 582125 - RNA, 23 nt, Artificial Sequence
  Synthetic
accucacauacuauuuuuuugcg

SEQ ID NO: 582126 - RNA, 24 nt, Artificial Sequence
  Synthetic
uaccucacauacuauuuuuuugcg

SEQ ID NO: 582127 - RNA, 18 nt, Artificial Sequence
  Synthetic
acauuuauagcaaaaucg

SEQ ID NO: 582128 - RNA, 19 nt, Artificial Sequence
  Synthetic
uacauuuauagcaaaaucg

SEQ ID NO: 582129 - RNA, 20 nt, Artificial Sequence
  Synthetic
uuacauuuauagcaaaaucg

SEQ ID NO: 582130 - RNA, 21 nt, Artificial Sequence
  Synthetic
uuuacauuuauagcaaaaucg

SEQ ID NO: 582131 - RNA, 22 nt, Artificial Sequence
  Synthetic
uuuuacauuuauagcaaaaucg

SEQ ID NO: 582132 - RNA, 23 nt, Artificial Sequence
  Synthetic
auuuuacauuuauagcaaaaucg

SEQ ID NO: 582133 - RNA, 24 nt, Artificial Sequence
  Synthetic
aauuuuacauuuauagcaaaaucg

SEQ ID NO: 582134 - RNA, 18 nt, Artificial Sequence
  Synthetic
uggggauaacagaaaucg

SEQ ID NO: 582135 - RNA, 19 nt, Artificial Sequence
  Synthetic
uuggggauaacagaaaucg

SEQ ID NO: 582136 - RNA, 20 nt, Artificial Sequence
  Synthetic
uuuggggauaacagaaaucg

SEQ ID NO: 582137 - RNA, 21 nt, Artificial Sequence
  Synthetic
uuuuggggauaacagaaaucg

SEQ ID NO: 582138 - RNA, 22 nt, Artificial Sequence
  Synthetic
guuuuggggauaacagaaaucg

SEQ ID NO: 582139 - RNA, 23 nt, Artificial Sequence
  Synthetic
uguuuuggggauaacagaaaucg

SEQ ID NO: 582140 - RNA, 24 nt, Artificial Sequence
  Synthetic
guguuuuggggauaacagaaaucg

SEQ ID NO: 582141 - RNA, 18 nt, Artificial Sequence
  Synthetic
ucuaaaaguagccaaucg

SEQ ID NO: 582142 - RNA, 19 nt, Artificial Sequence
  Synthetic
uucuaaaaguagccaaucg

SEQ ID NO: 582143 - RNA, 20 nt, Artificial Sequence
  Synthetic
auucuaaaaguagccaaucg

SEQ ID NO: 582144 - RNA, 21 nt, Artificial Sequence
  Synthetic
gauucuaaaaguagccaaucg

SEQ ID NO: 582145 - RNA, 22 nt, Artificial Sequence
  Synthetic
ggauucuaaaaguagccaaucg

SEQ ID NO: 582146 - RNA, 23 nt, Artificial Sequence
  Synthetic
aggauucuaaaaguagccaaucg

SEQ ID NO: 582147 - RNA, 24 nt, Artificial Sequence
  Synthetic
uaggauucuaaaaguagccaaucg

SEQ ID NO: 582148 - RNA, 18 nt, Artificial Sequence
  Synthetic
uuggaauuuaaagaaucg

SEQ ID NO: 582149 - RNA, 19 nt, Artificial Sequence
  Synthetic
uuuggaauuuaaagaaucg

SEQ ID NO: 582150 - RNA, 20 nt, Artificial Sequence
  Synthetic
auuuggaauuuaaagaaucg

SEQ ID NO: 582151 - RNA, 21 nt, Artificial Sequence
  Synthetic
aauuuggaauuuaaagaaucg

SEQ ID NO: 582152 - RNA, 22 nt, Artificial Sequence
  Synthetic
caauuuggaauuuaaagaaucg

SEQ ID NO: 582153 - RNA, 23 nt, Artificial Sequence
  Synthetic
ucaauuuggaauuuaaagaaucg

SEQ ID NO: 582154 - RNA, 24 nt, Artificial Sequence
  Synthetic
gucaauuuggaauuuaaagaaucg

SEQ ID NO: 582155 - RNA, 18 nt, Artificial Sequence
  Synthetic
aaaguaugcuaauaaucg

SEQ ID NO: 582156 - RNA, 19 nt, Artificial Sequence
  Synthetic
aaaaguaugcuaauaaucg

SEQ ID NO: 582157 - RNA, 20 nt, Artificial Sequence
  Synthetic
gaaaaguaugcuaauaaucg

SEQ ID NO: 582158 - RNA, 21 nt, Artificial Sequence
  Synthetic
ugaaaaguaugcuaauaaucg

SEQ ID NO: 582159 - RNA, 22 nt, Artificial Sequence
  Synthetic
augaaaaguaugcuaauaaucg

SEQ ID NO: 582160 - RNA, 23 nt, Artificial Sequence
  Synthetic
uaugaaaaguaugcuaauaaucg

SEQ ID NO: 582161 - RNA, 24 nt, Artificial Sequence
  Synthetic
uuaugaaaaguaugcuaauaaucg

SEQ ID NO: 582162 - RNA, 18 nt, Artificial Sequence
  Synthetic
cugcaggaaaguuaaucg

SEQ ID NO: 582163 - RNA, 19 nt, Artificial Sequence
  Synthetic
gcugcaggaaaguuaaucg

SEQ ID NO: 582164 - RNA, 20 nt, Artificial Sequence
  Synthetic
ugcugcaggaaaguuaaucg

SEQ ID NO: 582165 - RNA, 21 nt, Artificial Sequence
  Synthetic
augcugcaggaaaguuaaucg

SEQ ID NO: 582166 - RNA, 22 nt, Artificial Sequence
  Synthetic
caugcugcaggaaaguuaaucg

SEQ ID NO: 582167 - RNA, 23 nt, Artificial Sequence
  Synthetic
acaugcugcaggaaaguuaaucg

SEQ ID NO: 582168 - RNA, 24 nt, Artificial Sequence
  Synthetic
aacaugcugcaggaaaguuaaucg

SEQ ID NO: 582169 - RNA, 18 nt, Artificial Sequence
  Synthetic
auuuuuguggguacaucg

SEQ ID NO: 582170 - RNA, 19 nt, Artificial Sequence
  Synthetic
aauuuuuguggguacaucg

SEQ ID NO: 582171 - RNA, 20 nt, Artificial Sequence
  Synthetic
uaauuuuuguggguacaucg

SEQ ID NO: 582172 - RNA, 21 nt, Artificial Sequence
  Synthetic
uuaauuuuuguggguacaucg

SEQ ID NO: 582173 - RNA, 22 nt, Artificial Sequence
  Synthetic
uuuaauuuuuguggguacaucg

SEQ ID NO: 582174 - RNA, 23 nt, Artificial Sequence
  Synthetic
uuuuaauuuuuguggguacaucg

SEQ ID NO: 582175 - RNA, 24 nt, Artificial Sequence
  Synthetic
auuuuaauuuuuguggguacaucg

SEQ ID NO: 582176 - RNA, 18 nt, Artificial Sequence
  Synthetic
caacaucgucaaucaucg

SEQ ID NO: 582177 - RNA, 19 nt, Artificial Sequence
  Synthetic
ucaacaucgucaaucaucg

SEQ ID NO: 582178 - RNA, 20 nt, Artificial Sequence
  Synthetic
cucaacaucgucaaucaucg

SEQ ID NO: 582179 - RNA, 21 nt, Artificial Sequence
  Synthetic
acucaacaucgucaaucaucg

SEQ ID NO: 582180 - RNA, 22 nt, Artificial Sequence
  Synthetic
uacucaacaucgucaaucaucg

SEQ ID NO: 582181 - RNA, 23 nt, Artificial Sequence
  Synthetic
auacucaacaucgucaaucaucg

SEQ ID NO: 582182 - RNA, 24 nt, Artificial Sequence
  Synthetic
cauacucaacaucgucaaucaucg

SEQ ID NO: 582183 - RNA, 18 nt, Artificial Sequence
  Synthetic
aaaauaucuucaucaucg

SEQ ID NO: 582184 - RNA, 19 nt, Artificial Sequence
  Synthetic
uaaaauaucuucaucaucg

SEQ ID NO: 582185 - RNA, 20 nt, Artificial Sequence
  Synthetic
auaaaauaucuucaucaucg

SEQ ID NO: 582186 - RNA, 21 nt, Artificial Sequence
  Synthetic
uauaaaauaucuucaucaucg

SEQ ID NO: 582187 - RNA, 22 nt, Artificial Sequence
  Synthetic
auauaaaauaucuucaucaucg

SEQ ID NO: 582188 - RNA, 23 nt, Artificial Sequence
  Synthetic
gauauaaaauaucuucaucaucg

SEQ ID NO: 582189 - RNA, 24 nt, Artificial Sequence
  Synthetic
ggauauaaaauaucuucaucaucg

SEQ ID NO: 582190 - RNA, 18 nt, Artificial Sequence
  Synthetic
uggaacugcaccucaucg

SEQ ID NO: 582191 - RNA, 19 nt, Artificial Sequence
  Synthetic
guggaacugcaccucaucg

SEQ ID NO: 582192 - RNA, 20 nt, Artificial Sequence
  Synthetic
uguggaacugcaccucaucg

SEQ ID NO: 582193 - RNA, 21 nt, Artificial Sequence
  Synthetic
guguggaacugcaccucaucg

SEQ ID NO: 582194 - RNA, 22 nt, Artificial Sequence
  Synthetic
cguguggaacugcaccucaucg

SEQ ID NO: 582195 - RNA, 23 nt, Artificial Sequence
  Synthetic
ucguguggaacugcaccucaucg

SEQ ID NO: 582196 - RNA, 24 nt, Artificial Sequence
  Synthetic
gucguguggaacugcaccucaucg

SEQ ID NO: 582197 - RNA, 18 nt, Artificial Sequence
  Synthetic
agaaauaauuggucaucg

SEQ ID NO: 582198 - RNA, 19 nt, Artificial Sequence
  Synthetic
aagaaauaauuggucaucg

SEQ ID NO: 582199 - RNA, 20 nt, Artificial Sequence
  Synthetic
aaagaaauaauuggucaucg

SEQ ID NO: 582200 - RNA, 21 nt, Artificial Sequence
  Synthetic
caaagaaauaauuggucaucg

SEQ ID NO: 582201 - RNA, 22 nt, Artificial Sequence
  Synthetic
acaaagaaauaauuggucaucg

SEQ ID NO: 582202 - RNA, 23 nt, Artificial Sequence
  Synthetic
aacaaagaaauaauuggucaucg

SEQ ID NO: 582203 - RNA, 24 nt, Artificial Sequence
  Synthetic
aaacaaagaaauaauuggucaucg

SEQ ID NO: 582204 - RNA, 18 nt, Artificial Sequence
  Synthetic
guuugguagaauucaucg

SEQ ID NO: 582205 - RNA, 19 nt, Artificial Sequence
  Synthetic
uguuugguagaauucaucg

SEQ ID NO: 582206 - RNA, 20 nt, Artificial Sequence
  Synthetic
auguuugguagaauucaucg

SEQ ID NO: 582207 - RNA, 21 nt, Artificial Sequence
  Synthetic
uauguuugguagaauucaucg

SEQ ID NO: 582208 - RNA, 22 nt, Artificial Sequence
  Synthetic
auauguuugguagaauucaucg

SEQ ID NO: 582209 - RNA, 23 nt, Artificial Sequence
  Synthetic
uauauguuugguagaauucaucg

SEQ ID NO: 582210 - RNA, 24 nt, Artificial Sequence
  Synthetic
uuauauguuugguagaauucaucg

SEQ ID NO: 582211 - RNA, 18 nt, Artificial Sequence
  Synthetic
acauuaaauguuucaucg

SEQ ID NO: 582212 - RNA, 19 nt, Artificial Sequence
  Synthetic
cacauuaaauguuucaucg

SEQ ID NO: 582213 - RNA, 20 nt, Artificial Sequence
  Synthetic
acacauuaaauguuucaucg

SEQ ID NO: 582214 - RNA, 21 nt, Artificial Sequence
  Synthetic
aacacauuaaauguuucaucg

SEQ ID NO: 582215 - RNA, 22 nt, Artificial Sequence
  Synthetic
gaacacauuaaauguuucaucg

SEQ ID NO: 582216 - RNA, 23 nt, Artificial Sequence
  Synthetic
ugaacacauuaaauguuucaucg

SEQ ID NO: 582217 - RNA, 24 nt, Artificial Sequence
  Synthetic
cugaacacauuaaauguuucaucg

SEQ ID NO: 582218 - RNA, 18 nt, Artificial Sequence
  Synthetic
acggccacugaaagaucg

SEQ ID NO: 582219 - RNA, 19 nt, Artificial Sequence
  Synthetic
gacggccacugaaagaucg

SEQ ID NO: 582220 - RNA, 20 nt, Artificial Sequence
  Synthetic
ugacggccacugaaagaucg

SEQ ID NO: 582221 - RNA, 21 nt, Artificial Sequence
  Synthetic
augacggccacugaaagaucg

SEQ ID NO: 582222 - RNA, 22 nt, Artificial Sequence
  Synthetic
aaugacggccacugaaagaucg

SEQ ID NO: 582223 - RNA, 23 nt, Artificial Sequence
  Synthetic
aaaugacggccacugaaagaucg

SEQ ID NO: 582224 - RNA, 24 nt, Artificial Sequence
  Synthetic
aaaaugacggccacugaaagaucg

SEQ ID NO: 582225 - RNA, 18 nt, Artificial Sequence
  Synthetic
agcuucccgauaagaucg

SEQ ID NO: 582226 - RNA, 19 nt, Artificial Sequence
  Synthetic
cagcuucccgauaagaucg

SEQ ID NO: 582227 - RNA, 20 nt, Artificial Sequence
  Synthetic
gcagcuucccgauaagaucg

SEQ ID NO: 582228 - RNA, 21 nt, Artificial Sequence
  Synthetic
agcagcuucccgauaagaucg

SEQ ID NO: 582229 - RNA, 22 nt, Artificial Sequence
  Synthetic
cagcagcuucccgauaagaucg

SEQ ID NO: 582230 - RNA, 23 nt, Artificial Sequence
  Synthetic
ucagcagcuucccgauaagaucg

SEQ ID NO: 582231 - RNA, 24 nt, Artificial Sequence
  Synthetic
aucagcagcuucccgauaagaucg

SEQ ID NO: 582232 - RNA, 18 nt, Artificial Sequence
  Synthetic
agggaggucccaggaucg

SEQ ID NO: 582233 - RNA, 19 nt, Artificial Sequence
  Synthetic
aagggaggucccaggaucg

SEQ ID NO: 582234 - RNA, 20 nt, Artificial Sequence
  Synthetic
uaagggaggucccaggaucg

SEQ ID NO: 582235 - RNA, 21 nt, Artificial Sequence
  Synthetic
uuaagggaggucccaggaucg

SEQ ID NO: 582236 - RNA, 22 nt, Artificial Sequence
  Synthetic
auuaagggaggucccaggaucg

SEQ ID NO: 582237 - RNA, 23 nt, Artificial Sequence
  Synthetic
gauuaagggaggucccaggaucg

SEQ ID NO: 582238 - RNA, 24 nt, Artificial Sequence
  Synthetic
ggauuaagggaggucccaggaucg

SEQ ID NO: 582239 - RNA, 18 nt, Artificial Sequence
  Synthetic
augccaaauacaugaucg

SEQ ID NO: 582240 - RNA, 19 nt, Artificial Sequence
  Synthetic
aaugccaaauacaugaucg

SEQ ID NO: 582241 - RNA, 20 nt, Artificial Sequence
  Synthetic
caaugccaaauacaugaucg

SEQ ID NO: 582242 - RNA, 21 nt, Artificial Sequence
  Synthetic
acaaugccaaauacaugaucg

SEQ ID NO: 582243 - RNA, 22 nt, Artificial Sequence
  Synthetic
uacaaugccaaauacaugaucg

SEQ ID NO: 582244 - RNA, 23 nt, Artificial Sequence
  Synthetic
uuacaaugccaaauacaugaucg

SEQ ID NO: 582245 - RNA, 24 nt, Artificial Sequence
  Synthetic
auuacaaugccaaauacaugaucg

SEQ ID NO: 582246 - RNA, 18 nt, Artificial Sequence
  Synthetic
gggcuggauuguugaucg

SEQ ID NO: 582247 - RNA, 19 nt, Artificial Sequence
  Synthetic
agggcuggauuguugaucg

SEQ ID NO: 582248 - RNA, 20 nt, Artificial Sequence
  Synthetic
aagggcuggauuguugaucg

SEQ ID NO: 582249 - RNA, 21 nt, Artificial Sequence
  Synthetic
gaagggcuggauuguugaucg

SEQ ID NO: 582250 - RNA, 22 nt, Artificial Sequence
  Synthetic
agaagggcuggauuguugaucg

SEQ ID NO: 582251 - RNA, 23 nt, Artificial Sequence
  Synthetic
gagaagggcuggauuguugaucg

SEQ ID NO: 582252 - RNA, 24 nt, Artificial Sequence
  Synthetic
ugagaagggcuggauuguugaucg

SEQ ID NO: 582253 - RNA, 18 nt, Artificial Sequence
  Synthetic
uuucaaauuucaauaucg

SEQ ID NO: 582254 - RNA, 19 nt, Artificial Sequence
  Synthetic
uuuucaaauuucaauaucg

SEQ ID NO: 582255 - RNA, 20 nt, Artificial Sequence
  Synthetic
auuuucaaauuucaauaucg

SEQ ID NO: 582256 - RNA, 21 nt, Artificial Sequence
  Synthetic
cauuuucaaauuucaauaucg

SEQ ID NO: 582257 - RNA, 22 nt, Artificial Sequence
  Synthetic
acauuuucaaauuucaauaucg

SEQ ID NO: 582258 - RNA, 23 nt, Artificial Sequence
  Synthetic
gacauuuucaaauuucaauaucg

SEQ ID NO: 582259 - RNA, 24 nt, Artificial Sequence
  Synthetic
ggacauuuucaaauuucaauaucg

SEQ ID NO: 582260 - RNA, 18 nt, Artificial Sequence
  Synthetic
agugcuaaagggauaucg

SEQ ID NO: 582261 - RNA, 19 nt, Artificial Sequence
  Synthetic
aagugcuaaagggauaucg

SEQ ID NO: 582262 - RNA, 20 nt, Artificial Sequence
  Synthetic
uaagugcuaaagggauaucg

SEQ ID NO: 582263 - RNA, 21 nt, Artificial Sequence
  Synthetic
guaagugcuaaagggauaucg

SEQ ID NO: 582264 - RNA, 22 nt, Artificial Sequence
  Synthetic
gguaagugcuaaagggauaucg

SEQ ID NO: 582265 - RNA, 23 nt, Artificial Sequence
  Synthetic
ugguaagugcuaaagggauaucg

SEQ ID NO: 582266 - RNA, 24 nt, Artificial Sequence
  Synthetic
augguaagugcuaaagggauaucg

SEQ ID NO: 582267 - RNA, 18 nt, Artificial Sequence
  Synthetic
aaccagcugugacuaucg

SEQ ID NO: 582268 - RNA, 19 nt, Artificial Sequence
  Synthetic
caaccagcugugacuaucg

SEQ ID NO: 582269 - RNA, 20 nt, Artificial Sequence
  Synthetic
acaaccagcugugacuaucg

SEQ ID NO: 582270 - RNA, 21 nt, Artificial Sequence
  Synthetic
uacaaccagcugugacuaucg

SEQ ID NO: 582271 - RNA, 22 nt, Artificial Sequence
  Synthetic
cuacaaccagcugugacuaucg

SEQ ID NO: 582272 - RNA, 23 nt, Artificial Sequence
  Synthetic
ucuacaaccagcugugacuaucg

SEQ ID NO: 582273 - RNA, 24 nt, Artificial Sequence
  Synthetic
uucuacaaccagcugugacuaucg

SEQ ID NO: 582274 - RNA, 18 nt, Artificial Sequence
  Synthetic
cuucuuuauccccuaucg

SEQ ID NO: 582275 - RNA, 19 nt, Artificial Sequence
  Synthetic
ccuucuuuauccccuaucg

SEQ ID NO: 582276 - RNA, 20 nt, Artificial Sequence
  Synthetic
gccuucuuuauccccuaucg

SEQ ID NO: 582277 - RNA, 21 nt, Artificial Sequence
  Synthetic
ggccuucuuuauccccuaucg

SEQ ID NO: 582278 - RNA, 22 nt, Artificial Sequence
  Synthetic
aggccuucuuuauccccuaucg

SEQ ID NO: 582279 - RNA, 23 nt, Artificial Sequence
  Synthetic
uaggccuucuuuauccccuaucg

SEQ ID NO: 582280 - RNA, 24 nt, Artificial Sequence
  Synthetic
auaggccuucuuuauccccuaucg

SEQ ID NO: 582281 - RNA, 18 nt, Artificial Sequence
  Synthetic
acauuuuuuuuccuaucg

SEQ ID NO: 582282 - RNA, 19 nt, Artificial Sequence
  Synthetic
uacauuuuuuuuccuaucg

SEQ ID NO: 582283 - RNA, 20 nt, Artificial Sequence
  Synthetic
auacauuuuuuuuccuaucg

SEQ ID NO: 582284 - RNA, 21 nt, Artificial Sequence
  Synthetic
cauacauuuuuuuuccuaucg

SEQ ID NO: 582285 - RNA, 22 nt, Artificial Sequence
  Synthetic
acauacauuuuuuuuccuaucg

SEQ ID NO: 582286 - RNA, 23 nt, Artificial Sequence
  Synthetic
cacauacauuuuuuuuccuaucg

SEQ ID NO: 582287 - RNA, 24 nt, Artificial Sequence
  Synthetic
acacauacauuuuuuuuccuaucg

SEQ ID NO: 582288 - RNA, 18 nt, Artificial Sequence
  Synthetic
agggaugccauucuaucg

SEQ ID NO: 582289 - RNA, 19 nt, Artificial Sequence
  Synthetic
cagggaugccauucuaucg

SEQ ID NO: 582290 - RNA, 20 nt, Artificial Sequence
  Synthetic
gcagggaugccauucuaucg

SEQ ID NO: 582291 - RNA, 21 nt, Artificial Sequence
  Synthetic
ggcagggaugccauucuaucg

SEQ ID NO: 582292 - RNA, 22 nt, Artificial Sequence
  Synthetic
uggcagggaugccauucuaucg

SEQ ID NO: 582293 - RNA, 23 nt, Artificial Sequence
  Synthetic
cuggcagggaugccauucuaucg

SEQ ID NO: 582294 - RNA, 24 nt, Artificial Sequence
  Synthetic
acuggcagggaugccauucuaucg

SEQ ID NO: 582295 - RNA, 18 nt, Artificial Sequence
  Synthetic
auuauauuauuauuaucg

SEQ ID NO: 582296 - RNA, 19 nt, Artificial Sequence
  Synthetic
uauuauauuauuauuaucg

SEQ ID NO: 582297 - RNA, 20 nt, Artificial Sequence
  Synthetic
auauuauauuauuauuaucg

SEQ ID NO: 582298 - RNA, 21 nt, Artificial Sequence
  Synthetic
aauauuauauuauuauuaucg

SEQ ID NO: 582299 - RNA, 22 nt, Artificial Sequence
  Synthetic
uaauauuauauuauuauuaucg

SEQ ID NO: 582300 - RNA, 23 nt, Artificial Sequence
  Synthetic
uuaauauuauauuauuauuaucg

SEQ ID NO: 582301 - RNA, 24 nt, Artificial Sequence
  Synthetic
auuaauauuauauuauuauuaucg

SEQ ID NO: 582302 - RNA, 18 nt, Artificial Sequence
  Synthetic
cuuugauuugccuuaucg

SEQ ID NO: 582303 - RNA, 19 nt, Artificial Sequence
  Synthetic
gcuuugauuugccuuaucg

SEQ ID NO: 582304 - RNA, 20 nt, Artificial Sequence
  Synthetic
agcuuugauuugccuuaucg

SEQ ID NO: 582305 - RNA, 21 nt, Artificial Sequence
  Synthetic
aagcuuugauuugccuuaucg

SEQ ID NO: 582306 - RNA, 22 nt, Artificial Sequence
  Synthetic
aaagcuuugauuugccuuaucg

SEQ ID NO: 582307 - RNA, 23 nt, Artificial Sequence
  Synthetic
caaagcuuugauuugccuuaucg

SEQ ID NO: 582308 - RNA, 24 nt, Artificial Sequence
  Synthetic
ccaaagcuuugauuugccuuaucg

SEQ ID NO: 582309 - RNA, 18 nt, Artificial Sequence
  Synthetic
aggauugguaauuuaucg

SEQ ID NO: 582310 - RNA, 19 nt, Artificial Sequence
  Synthetic
aaggauugguaauuuaucg

SEQ ID NO: 582311 - RNA, 20 nt, Artificial Sequence
  Synthetic
aaaggauugguaauuuaucg

SEQ ID NO: 582312 - RNA, 21 nt, Artificial Sequence
  Synthetic
gaaaggauugguaauuuaucg

SEQ ID NO: 582313 - RNA, 22 nt, Artificial Sequence
  Synthetic
cgaaaggauugguaauuuaucg

SEQ ID NO: 582314 - RNA, 23 nt, Artificial Sequence
  Synthetic
ucgaaaggauugguaauuuaucg

SEQ ID NO: 582315 - RNA, 24 nt, Artificial Sequence
  Synthetic
aucgaaaggauugguaauuuaucg

SEQ ID NO: 582316 - RNA, 18 nt, Artificial Sequence
  Synthetic
uccauuuuaacuaacucg

SEQ ID NO: 582317 - RNA, 19 nt, Artificial Sequence
  Synthetic
uuccauuuuaacuaacucg

SEQ ID NO: 582318 - RNA, 20 nt, Artificial Sequence
  Synthetic
cuuccauuuuaacuaacucg

SEQ ID NO: 582319 - RNA, 21 nt, Artificial Sequence
  Synthetic
ccuuccauuuuaacuaacucg

SEQ ID NO: 582320 - RNA, 22 nt, Artificial Sequence
  Synthetic
gccuuccauuuuaacuaacucg

SEQ ID NO: 582321 - RNA, 23 nt, Artificial Sequence
  Synthetic
agccuuccauuuuaacuaacucg

SEQ ID NO: 582322 - RNA, 24 nt, Artificial Sequence
  Synthetic
uagccuuccauuuuaacuaacucg

SEQ ID NO: 582323 - RNA, 18 nt, Artificial Sequence
  Synthetic
ucuggaagcugauacucg

SEQ ID NO: 582324 - RNA, 19 nt, Artificial Sequence
  Synthetic
uucuggaagcugauacucg

SEQ ID NO: 582325 - RNA, 20 nt, Artificial Sequence
  Synthetic
uuucuggaagcugauacucg

SEQ ID NO: 582326 - RNA, 21 nt, Artificial Sequence
  Synthetic
cuuucuggaagcugauacucg

SEQ ID NO: 582327 - RNA, 22 nt, Artificial Sequence
  Synthetic
ucuuucuggaagcugauacucg

SEQ ID NO: 582328 - RNA, 23 nt, Artificial Sequence
  Synthetic
aucuuucuggaagcugauacucg

SEQ ID NO: 582329 - RNA, 24 nt, Artificial Sequence
  Synthetic
caucuuucuggaagcugauacucg

SEQ ID NO: 582330 - RNA, 18 nt, Artificial Sequence
  Synthetic
uaacauauguuguacucg

SEQ ID NO: 582331 - RNA, 19 nt, Artificial Sequence
  Synthetic
uuaacauauguuguacucg

SEQ ID NO: 582332 - RNA, 20 nt, Artificial Sequence
  Synthetic
cuuaacauauguuguacucg

SEQ ID NO: 582333 - RNA, 21 nt, Artificial Sequence
  Synthetic
acuuaacauauguuguacucg

SEQ ID NO: 582334 - RNA, 22 nt, Artificial Sequence
  Synthetic
uacuuaacauauguuguacucg

SEQ ID NO: 582335 - RNA, 23 nt, Artificial Sequence
  Synthetic
auacuuaacauauguuguacucg

SEQ ID NO: 582336 - RNA, 24 nt, Artificial Sequence
  Synthetic
aauacuuaacauauguuguacucg

SEQ ID NO: 582337 - RNA, 18 nt, Artificial Sequence
  Synthetic
caaggccaguuaaccucg

SEQ ID NO: 582338 - RNA, 19 nt, Artificial Sequence
  Synthetic
acaaggccaguuaaccucg

SEQ ID NO: 582339 - RNA, 20 nt, Artificial Sequence
  Synthetic
aacaaggccaguuaaccucg

SEQ ID NO: 582340 - RNA, 21 nt, Artificial Sequence
  Synthetic
aaacaaggccaguuaaccucg

SEQ ID NO: 582341 - RNA, 22 nt, Artificial Sequence
  Synthetic
uaaacaaggccaguuaaccucg

SEQ ID NO: 582342 - RNA, 23 nt, Artificial Sequence
  Synthetic
uuaaacaaggccaguuaaccucg

SEQ ID NO: 582343 - RNA, 24 nt, Artificial Sequence
  Synthetic
cuuaaacaaggccaguuaaccucg

SEQ ID NO: 582344 - RNA, 18 nt, Artificial Sequence
  Synthetic
uuucaacaagacaccucg

SEQ ID NO: 582345 - RNA, 19 nt, Artificial Sequence
  Synthetic
auuucaacaagacaccucg

SEQ ID NO: 582346 - RNA, 20 nt, Artificial Sequence
  Synthetic
gauuucaacaagacaccucg

SEQ ID NO: 582347 - RNA, 21 nt, Artificial Sequence
  Synthetic
ugauuucaacaagacaccucg

SEQ ID NO: 582348 - RNA, 22 nt, Artificial Sequence
  Synthetic
augauuucaacaagacaccucg

SEQ ID NO: 582349 - RNA, 23 nt, Artificial Sequence
  Synthetic
aaugauuucaacaagacaccucg

SEQ ID NO: 582350 - RNA, 24 nt, Artificial Sequence
  Synthetic
uaaugauuucaacaagacaccucg

SEQ ID NO: 582351 - RNA, 18 nt, Artificial Sequence
  Synthetic
ggagcaguuugcaccucg

SEQ ID NO: 582352 - RNA, 19 nt, Artificial Sequence
  Synthetic
cggagcaguuugcaccucg

SEQ ID NO: 582353 - RNA, 20 nt, Artificial Sequence
  Synthetic
acggagcaguuugcaccucg

SEQ ID NO: 582354 - RNA, 21 nt, Artificial Sequence
  Synthetic
gacggagcaguuugcaccucg

SEQ ID NO: 582355 - RNA, 22 nt, Artificial Sequence
  Synthetic
ggacggagcaguuugcaccucg

SEQ ID NO: 582356 - RNA, 23 nt, Artificial Sequence
  Synthetic
aggacggagcaguuugcaccucg

SEQ ID NO: 582357 - RNA, 24 nt, Artificial Sequence
  Synthetic
aaggacggagcaguuugcaccucg

SEQ ID NO: 582358 - RNA, 18 nt, Artificial Sequence
  Synthetic
guugugggaaggaccucg

SEQ ID NO: 582359 - RNA, 19 nt, Artificial Sequence
  Synthetic
uguugugggaaggaccucg

SEQ ID NO: 582360 - RNA, 20 nt, Artificial Sequence
  Synthetic
auguugugggaaggaccucg

SEQ ID NO: 582361 - RNA, 21 nt, Artificial Sequence
  Synthetic
cauguugugggaaggaccucg

SEQ ID NO: 582362 - RNA, 22 nt, Artificial Sequence
  Synthetic
acauguugugggaaggaccucg

SEQ ID NO: 582363 - RNA, 23 nt, Artificial Sequence
  Synthetic
uacauguugugggaaggaccucg

SEQ ID NO: 582364 - RNA, 24 nt, Artificial Sequence
  Synthetic
cuacauguugugggaaggaccucg

SEQ ID NO: 582365 - RNA, 18 nt, Artificial Sequence
  Synthetic
cagguuuucagucccucg

SEQ ID NO: 582366 - RNA, 19 nt, Artificial Sequence
  Synthetic
gcagguuuucagucccucg

SEQ ID NO: 582367 - RNA, 20 nt, Artificial Sequence
  Synthetic
ugcagguuuucagucccucg

SEQ ID NO: 582368 - RNA, 21 nt, Artificial Sequence
  Synthetic
cugcagguuuucagucccucg

SEQ ID NO: 582369 - RNA, 22 nt, Artificial Sequence
  Synthetic
gcugcagguuuucagucccucg

SEQ ID NO: 582370 - RNA, 23 nt, Artificial Sequence
  Synthetic
ugcugcagguuuucagucccucg

SEQ ID NO: 582371 - RNA, 24 nt, Artificial Sequence
  Synthetic
augcugcagguuuucagucccucg

SEQ ID NO: 582372 - RNA, 18 nt, Artificial Sequence
  Synthetic
agcaaaagaaucgccucg

SEQ ID NO: 582373 - RNA, 19 nt, Artificial Sequence
  Synthetic
uagcaaaagaaucgccucg

SEQ ID NO: 582374 - RNA, 20 nt, Artificial Sequence
  Synthetic
cuagcaaaagaaucgccucg

SEQ ID NO: 582375 - RNA, 21 nt, Artificial Sequence
  Synthetic
ucuagcaaaagaaucgccucg

SEQ ID NO: 582376 - RNA, 22 nt, Artificial Sequence
  Synthetic
gucuagcaaaagaaucgccucg

SEQ ID NO: 582377 - RNA, 23 nt, Artificial Sequence
  Synthetic
agucuagcaaaagaaucgccucg

SEQ ID NO: 582378 - RNA, 24 nt, Artificial Sequence
  Synthetic
gagucuagcaaaagaaucgccucg

SEQ ID NO: 582379 - RNA, 18 nt, Artificial Sequence
  Synthetic
cccagcccccaauccucg

SEQ ID NO: 582380 - RNA, 19 nt, Artificial Sequence
  Synthetic
ccccagcccccaauccucg

SEQ ID NO: 582381 - RNA, 20 nt, Artificial Sequence
  Synthetic
uccccagcccccaauccucg

SEQ ID NO: 582382 - RNA, 21 nt, Artificial Sequence
  Synthetic
uuccccagcccccaauccucg

SEQ ID NO: 582383 - RNA, 22 nt, Artificial Sequence
  Synthetic
uuuccccagcccccaauccucg

SEQ ID NO: 582384 - RNA, 23 nt, Artificial Sequence
  Synthetic
auuuccccagcccccaauccucg

SEQ ID NO: 582385 - RNA, 24 nt, Artificial Sequence
  Synthetic
cauuuccccagcccccaauccucg

SEQ ID NO: 582386 - RNA, 18 nt, Artificial Sequence
  Synthetic
caagagaucuggagcucg

SEQ ID NO: 582387 - RNA, 19 nt, Artificial Sequence
  Synthetic
ucaagagaucuggagcucg

SEQ ID NO: 582388 - RNA, 20 nt, Artificial Sequence
  Synthetic
aucaagagaucuggagcucg

SEQ ID NO: 582389 - RNA, 21 nt, Artificial Sequence
  Synthetic
aaucaagagaucuggagcucg

SEQ ID NO: 582390 - RNA, 22 nt, Artificial Sequence
  Synthetic
aaaucaagagaucuggagcucg

SEQ ID NO: 582391 - RNA, 23 nt, Artificial Sequence
  Synthetic
uaaaucaagagaucuggagcucg

SEQ ID NO: 582392 - RNA, 24 nt, Artificial Sequence
  Synthetic
auaaaucaagagaucuggagcucg

SEQ ID NO: 582393 - RNA, 18 nt, Artificial Sequence
  Synthetic
ccaauuuggcagaucucg

SEQ ID NO: 582394 - RNA, 19 nt, Artificial Sequence
  Synthetic
uccaauuuggcagaucucg

SEQ ID NO: 582395 - RNA, 20 nt, Artificial Sequence
  Synthetic
uuccaauuuggcagaucucg

SEQ ID NO: 582396 - RNA, 21 nt, Artificial Sequence
  Synthetic
auuccaauuuggcagaucucg

SEQ ID NO: 582397 - RNA, 22 nt, Artificial Sequence
  Synthetic
cauuccaauuuggcagaucucg

SEQ ID NO: 582398 - RNA, 23 nt, Artificial Sequence
  Synthetic
acauuccaauuuggcagaucucg

SEQ ID NO: 582399 - RNA, 24 nt, Artificial Sequence
  Synthetic
cacauuccaauuuggcagaucucg

SEQ ID NO: 582400 - RNA, 18 nt, Artificial Sequence
  Synthetic
auuauaaaacaauucucg

SEQ ID NO: 582401 - RNA, 19 nt, Artificial Sequence
  Synthetic
aauuauaaaacaauucucg

SEQ ID NO: 582402 - RNA, 20 nt, Artificial Sequence
  Synthetic
aaauuauaaaacaauucucg

SEQ ID NO: 582403 - RNA, 21 nt, Artificial Sequence
  Synthetic
caaauuauaaaacaauucucg

SEQ ID NO: 582404 - RNA, 22 nt, Artificial Sequence
  Synthetic
ucaaauuauaaaacaauucucg

SEQ ID NO: 582405 - RNA, 23 nt, Artificial Sequence
  Synthetic
gucaaauuauaaaacaauucucg

SEQ ID NO: 582406 - RNA, 24 nt, Artificial Sequence
  Synthetic
agucaaauuauaaaacaauucucg

SEQ ID NO: 582407 - RNA, 18 nt, Artificial Sequence
  Synthetic
aggauaguggaggagucg

SEQ ID NO: 582408 - RNA, 19 nt, Artificial Sequence
  Synthetic
aaggauaguggaggagucg

SEQ ID NO: 582409 - RNA, 20 nt, Artificial Sequence
  Synthetic
gaaggauaguggaggagucg

SEQ ID NO: 582410 - RNA, 21 nt, Artificial Sequence
  Synthetic
ggaaggauaguggaggagucg

SEQ ID NO: 582411 - RNA, 22 nt, Artificial Sequence
  Synthetic
gggaaggauaguggaggagucg

SEQ ID NO: 582412 - RNA, 23 nt, Artificial Sequence
  Synthetic
ugggaaggauaguggaggagucg

SEQ ID NO: 582413 - RNA, 24 nt, Artificial Sequence
  Synthetic
cugggaaggauaguggaggagucg

SEQ ID NO: 582414 - RNA, 18 nt, Artificial Sequence
  Synthetic
uaaucaaauucaaggucg

SEQ ID NO: 582415 - RNA, 19 nt, Artificial Sequence
  Synthetic
auaaucaaauucaaggucg

SEQ ID NO: 582416 - RNA, 20 nt, Artificial Sequence
  Synthetic
gauaaucaaauucaaggucg

SEQ ID NO: 582417 - RNA, 21 nt, Artificial Sequence
  Synthetic
agauaaucaaauucaaggucg

SEQ ID NO: 582418 - RNA, 22 nt, Artificial Sequence
  Synthetic
uagauaaucaaauucaaggucg

SEQ ID NO: 582419 - RNA, 23 nt, Artificial Sequence
  Synthetic
cuagauaaucaaauucaaggucg

SEQ ID NO: 582420 - RNA, 24 nt, Artificial Sequence
  Synthetic
ccuagauaaucaaauucaaggucg

SEQ ID NO: 582421 - RNA, 18 nt, Artificial Sequence
  Synthetic
gacgugacaaagaggucg

SEQ ID NO: 582422 - RNA, 19 nt, Artificial Sequence
  Synthetic
ugacgugacaaagaggucg

SEQ ID NO: 582423 - RNA, 20 nt, Artificial Sequence
  Synthetic
uugacgugacaaagaggucg

SEQ ID NO: 582424 - RNA, 21 nt, Artificial Sequence
  Synthetic
guugacgugacaaagaggucg

SEQ ID NO: 582425 - RNA, 22 nt, Artificial Sequence
  Synthetic
uguugacgugacaaagaggucg

SEQ ID NO: 582426 - RNA, 23 nt, Artificial Sequence
  Synthetic
cuguugacgugacaaagaggucg

SEQ ID NO: 582427 - RNA, 24 nt, Artificial Sequence
  Synthetic
ccuguugacgugacaaagaggucg

SEQ ID NO: 582428 - RNA, 18 nt, Artificial Sequence
  Synthetic
ugaggaugggaagggucg

SEQ ID NO: 582429 - RNA, 19 nt, Artificial Sequence
  Synthetic
cugaggaugggaagggucg

SEQ ID NO: 582430 - RNA, 20 nt, Artificial Sequence
  Synthetic
ccugaggaugggaagggucg

SEQ ID NO: 582431 - RNA, 21 nt, Artificial Sequence
  Synthetic
accugaggaugggaagggucg

SEQ ID NO: 582432 - RNA, 22 nt, Artificial Sequence
  Synthetic
uaccugaggaugggaagggucg

SEQ ID NO: 582433 - RNA, 23 nt, Artificial Sequence
  Synthetic
uuaccugaggaugggaagggucg

SEQ ID NO: 582434 - RNA, 24 nt, Artificial Sequence
  Synthetic
guuaccugaggaugggaagggucg

SEQ ID NO: 582435 - RNA, 18 nt, Artificial Sequence
  Synthetic
uugccauaugcagggucg

SEQ ID NO: 582436 - RNA, 19 nt, Artificial Sequence
  Synthetic
auugccauaugcagggucg

SEQ ID NO: 582437 - RNA, 20 nt, Artificial Sequence
  Synthetic
uauugccauaugcagggucg

SEQ ID NO: 582438 - RNA, 21 nt, Artificial Sequence
  Synthetic
uuauugccauaugcagggucg

SEQ ID NO: 582439 - RNA, 22 nt, Artificial Sequence
  Synthetic
guuauugccauaugcagggucg

SEQ ID NO: 582440 - RNA, 23 nt, Artificial Sequence
  Synthetic
uguuauugccauaugcagggucg

SEQ ID NO: 582441 - RNA, 24 nt, Artificial Sequence
  Synthetic
cuguuauugccauaugcagggucg

SEQ ID NO: 582442 - RNA, 18 nt, Artificial Sequence
  Synthetic
uuuagguaagaggggucg

SEQ ID NO: 582443 - RNA, 19 nt, Artificial Sequence
  Synthetic
uuuuagguaagaggggucg

SEQ ID NO: 582444 - RNA, 20 nt, Artificial Sequence
  Synthetic
auuuuagguaagaggggucg

SEQ ID NO: 582445 - RNA, 21 nt, Artificial Sequence
  Synthetic
aauuuuagguaagaggggucg

SEQ ID NO: 582446 - RNA, 22 nt, Artificial Sequence
  Synthetic
gaauuuuagguaagaggggucg

SEQ ID NO: 582447 - RNA, 23 nt, Artificial Sequence
  Synthetic
agaauuuuagguaagaggggucg

SEQ ID NO: 582448 - RNA, 24 nt, Artificial Sequence
  Synthetic
cagaauuuuagguaagaggggucg

SEQ ID NO: 582449 - RNA, 18 nt, Artificial Sequence
  Synthetic
acaucugcuaagaugucg

SEQ ID NO: 582450 - RNA, 19 nt, Artificial Sequence
  Synthetic
aacaucugcuaagaugucg

SEQ ID NO: 582451 - RNA, 20 nt, Artificial Sequence
  Synthetic
caacaucugcuaagaugucg

SEQ ID NO: 582452 - RNA, 21 nt, Artificial Sequence
  Synthetic
ccaacaucugcuaagaugucg

SEQ ID NO: 582453 - RNA, 22 nt, Artificial Sequence
  Synthetic
gccaacaucugcuaagaugucg

SEQ ID NO: 582454 - RNA, 23 nt, Artificial Sequence
  Synthetic
ugccaacaucugcuaagaugucg

SEQ ID NO: 582455 - RNA, 24 nt, Artificial Sequence
  Synthetic
gugccaacaucugcuaagaugucg

SEQ ID NO: 582456 - RNA, 18 nt, Artificial Sequence
  Synthetic
uagaaaacaacuaugucg

SEQ ID NO: 582457 - RNA, 19 nt, Artificial Sequence
  Synthetic
cuagaaaacaacuaugucg

SEQ ID NO: 582458 - RNA, 20 nt, Artificial Sequence
  Synthetic
ucuagaaaacaacuaugucg

SEQ ID NO: 582459 - RNA, 21 nt, Artificial Sequence
  Synthetic
uucuagaaaacaacuaugucg

SEQ ID NO: 582460 - RNA, 22 nt, Artificial Sequence
  Synthetic
uuucuagaaaacaacuaugucg

SEQ ID NO: 582461 - RNA, 23 nt, Artificial Sequence
  Synthetic
cuuucuagaaaacaacuaugucg

SEQ ID NO: 582462 - RNA, 24 nt, Artificial Sequence
  Synthetic
ucuuucuagaaaacaacuaugucg

SEQ ID NO: 582463 - RNA, 18 nt, Artificial Sequence
  Synthetic
gagugggguugggugucg

SEQ ID NO: 582464 - RNA, 19 nt, Artificial Sequence
  Synthetic
ggagugggguugggugucg

SEQ ID NO: 582465 - RNA, 20 nt, Artificial Sequence
  Synthetic
gggagugggguugggugucg

SEQ ID NO: 582466 - RNA, 21 nt, Artificial Sequence
  Synthetic
ugggagugggguugggugucg

SEQ ID NO: 582467 - RNA, 22 nt, Artificial Sequence
  Synthetic
cugggagugggguugggugucg

SEQ ID NO: 582468 - RNA, 23 nt, Artificial Sequence
  Synthetic
ucugggagugggguugggugucg

SEQ ID NO: 582469 - RNA, 24 nt, Artificial Sequence
  Synthetic
cucugggagugggguugggugucg

SEQ ID NO: 582470 - RNA, 18 nt, Artificial Sequence
  Synthetic
agguaauuaaaugugucg

SEQ ID NO: 582471 - RNA, 19 nt, Artificial Sequence
  Synthetic
uagguaauuaaaugugucg

SEQ ID NO: 582472 - RNA, 20 nt, Artificial Sequence
  Synthetic
auagguaauuaaaugugucg

SEQ ID NO: 582473 - RNA, 21 nt, Artificial Sequence
  Synthetic
uauagguaauuaaaugugucg

SEQ ID NO: 582474 - RNA, 22 nt, Artificial Sequence
  Synthetic
auauagguaauuaaaugugucg

SEQ ID NO: 582475 - RNA, 23 nt, Artificial Sequence
  Synthetic
aauauagguaauuaaaugugucg

SEQ ID NO: 582476 - RNA, 24 nt, Artificial Sequence
  Synthetic
gaauauagguaauuaaaugugucg

SEQ ID NO: 582477 - RNA, 18 nt, Artificial Sequence
  Synthetic
agagaugagaaguugucg

SEQ ID NO: 582478 - RNA, 19 nt, Artificial Sequence
  Synthetic
cagagaugagaaguugucg

SEQ ID NO: 582479 - RNA, 20 nt, Artificial Sequence
  Synthetic
ccagagaugagaaguugucg

SEQ ID NO: 582480 - RNA, 21 nt, Artificial Sequence
  Synthetic
accagagaugagaaguugucg

SEQ ID NO: 582481 - RNA, 22 nt, Artificial Sequence
  Synthetic
caccagagaugagaaguugucg

SEQ ID NO: 582482 - RNA, 23 nt, Artificial Sequence
  Synthetic
ucaccagagaugagaaguugucg

SEQ ID NO: 582483 - RNA, 24 nt, Artificial Sequence
  Synthetic
gucaccagagaugagaaguugucg

SEQ ID NO: 582484 - RNA, 18 nt, Artificial Sequence
  Synthetic
uuuuuguugacuuugucg

SEQ ID NO: 582485 - RNA, 19 nt, Artificial Sequence
  Synthetic
uuuuuuguugacuuugucg

SEQ ID NO: 582486 - RNA, 20 nt, Artificial Sequence
  Synthetic
uuuuuuuguugacuuugucg

SEQ ID NO: 582487 - RNA, 21 nt, Artificial Sequence
  Synthetic
auuuuuuuguugacuuugucg

SEQ ID NO: 582488 - RNA, 22 nt, Artificial Sequence
  Synthetic
uauuuuuuuguugacuuugucg

SEQ ID NO: 582489 - RNA, 23 nt, Artificial Sequence
  Synthetic
uuauuuuuuuguugacuuugucg

SEQ ID NO: 582490 - RNA, 24 nt, Artificial Sequence
  Synthetic
cuuauuuuuuuguugacuuugucg

SEQ ID NO: 582491 - RNA, 18 nt, Artificial Sequence
  Synthetic
agaaagaauaagaauucg

SEQ ID NO: 582492 - RNA, 19 nt, Artificial Sequence
  Synthetic
aagaaagaauaagaauucg

SEQ ID NO: 582493 - RNA, 20 nt, Artificial Sequence
  Synthetic
aaagaaagaauaagaauucg

SEQ ID NO: 582494 - RNA, 21 nt, Artificial Sequence
  Synthetic
uaaagaaagaauaagaauucg

SEQ ID NO: 582495 - RNA, 22 nt, Artificial Sequence
  Synthetic
uuaaagaaagaauaagaauucg

SEQ ID NO: 582496 - RNA, 23 nt, Artificial Sequence
  Synthetic
uuuaaagaaagaauaagaauucg

SEQ ID NO: 582497 - RNA, 24 nt, Artificial Sequence
  Synthetic
uuuuaaagaaagaauaagaauucg

SEQ ID NO: 582498 - RNA, 18 nt, Artificial Sequence
  Synthetic
aaaugucccuuggauucg

SEQ ID NO: 582499 - RNA, 19 nt, Artificial Sequence
  Synthetic
aaaaugucccuuggauucg

SEQ ID NO: 582500 - RNA, 20 nt, Artificial Sequence
  Synthetic
aaaaaugucccuuggauucg

SEQ ID NO: 582501 - RNA, 21 nt, Artificial Sequence
  Synthetic
gaaaaaugucccuuggauucg

SEQ ID NO: 582502 - RNA, 22 nt, Artificial Sequence
  Synthetic
agaaaaaugucccuuggauucg

SEQ ID NO: 582503 - RNA, 23 nt, Artificial Sequence
  Synthetic
cagaaaaaugucccuuggauucg

SEQ ID NO: 582504 - RNA, 24 nt, Artificial Sequence
  Synthetic
acagaaaaaugucccuuggauucg

SEQ ID NO: 582505 - RNA, 18 nt, Artificial Sequence
  Synthetic
gucuaaaaaucuuauucg

SEQ ID NO: 582506 - RNA, 19 nt, Artificial Sequence
  Synthetic
ugucuaaaaaucuuauucg

SEQ ID NO: 582507 - RNA, 20 nt, Artificial Sequence
  Synthetic
uugucuaaaaaucuuauucg

SEQ ID NO: 582508 - RNA, 21 nt, Artificial Sequence
  Synthetic
uuugucuaaaaaucuuauucg

SEQ ID NO: 582509 - RNA, 22 nt, Artificial Sequence
  Synthetic
uuuugucuaaaaaucuuauucg

SEQ ID NO: 582510 - RNA, 23 nt, Artificial Sequence
  Synthetic
guuuugucuaaaaaucuuauucg

SEQ ID NO: 582511 - RNA, 24 nt, Artificial Sequence
  Synthetic
uguuuugucuaaaaaucuuauucg

SEQ ID NO: 582512 - RNA, 18 nt, Artificial Sequence
  Synthetic
gauugauuauagacuucg

SEQ ID NO: 582513 - RNA, 19 nt, Artificial Sequence
  Synthetic
agauugauuauagacuucg

SEQ ID NO: 582514 - RNA, 20 nt, Artificial Sequence
  Synthetic
cagauugauuauagacuucg

SEQ ID NO: 582515 - RNA, 21 nt, Artificial Sequence
  Synthetic
ucagauugauuauagacuucg

SEQ ID NO: 582516 - RNA, 22 nt, Artificial Sequence
  Synthetic
uucagauugauuauagacuucg

SEQ ID NO: 582517 - RNA, 23 nt, Artificial Sequence
  Synthetic
auucagauugauuauagacuucg

SEQ ID NO: 582518 - RNA, 24 nt, Artificial Sequence
  Synthetic
aauucagauugauuauagacuucg

SEQ ID NO: 582519 - RNA, 18 nt, Artificial Sequence
  Synthetic
cuuggguucccuacuucg

SEQ ID NO: 582520 - RNA, 19 nt, Artificial Sequence
  Synthetic
ucuuggguucccuacuucg

SEQ ID NO: 582521 - RNA, 20 nt, Artificial Sequence
  Synthetic
gucuuggguucccuacuucg

SEQ ID NO: 582522 - RNA, 21 nt, Artificial Sequence
  Synthetic
agucuuggguucccuacuucg

SEQ ID NO: 582523 - RNA, 22 nt, Artificial Sequence
  Synthetic
aagucuuggguucccuacuucg

SEQ ID NO: 582524 - RNA, 23 nt, Artificial Sequence
  Synthetic
uaagucuuggguucccuacuucg

SEQ ID NO: 582525 - RNA, 24 nt, Artificial Sequence
  Synthetic
cuaagucuuggguucccuacuucg

SEQ ID NO: 582526 - RNA, 18 nt, Artificial Sequence
  Synthetic
ggggcucuuccuacuucg

SEQ ID NO: 582527 - RNA, 19 nt, Artificial Sequence
  Synthetic
aggggcucuuccuacuucg

SEQ ID NO: 582528 - RNA, 20 nt, Artificial Sequence
  Synthetic
aaggggcucuuccuacuucg

SEQ ID NO: 582529 - RNA, 21 nt, Artificial Sequence
  Synthetic
uaaggggcucuuccuacuucg

SEQ ID NO: 582530 - RNA, 22 nt, Artificial Sequence
  Synthetic
auaaggggcucuuccuacuucg

SEQ ID NO: 582531 - RNA, 23 nt, Artificial Sequence
  Synthetic
uauaaggggcucuuccuacuucg

SEQ ID NO: 582532 - RNA, 24 nt, Artificial Sequence
  Synthetic
uuauaaggggcucuuccuacuucg

SEQ ID NO: 582533 - RNA, 18 nt, Artificial Sequence
  Synthetic
ucuaagaaagugccuucg

SEQ ID NO: 582534 - RNA, 19 nt, Artificial Sequence
  Synthetic
aucuaagaaagugccuucg

SEQ ID NO: 582535 - RNA, 20 nt, Artificial Sequence
  Synthetic
aaucuaagaaagugccuucg

SEQ ID NO: 582536 - RNA, 21 nt, Artificial Sequence
  Synthetic
gaaucuaagaaagugccuucg

SEQ ID NO: 582537 - RNA, 22 nt, Artificial Sequence
  Synthetic
agaaucuaagaaagugccuucg

SEQ ID NO: 582538 - RNA, 23 nt, Artificial Sequence
  Synthetic
uagaaucuaagaaagugccuucg

SEQ ID NO: 582539 - RNA, 24 nt, Artificial Sequence
  Synthetic
uuagaaucuaagaaagugccuucg

SEQ ID NO: 582540 - RNA, 18 nt, Artificial Sequence
  Synthetic
auaucuuuacauccuucg

SEQ ID NO: 582541 - RNA, 19 nt, Artificial Sequence
  Synthetic
cauaucuuuacauccuucg

SEQ ID NO: 582542 - RNA, 20 nt, Artificial Sequence
  Synthetic
acauaucuuuacauccuucg

SEQ ID NO: 582543 - RNA, 21 nt, Artificial Sequence
  Synthetic
gacauaucuuuacauccuucg

SEQ ID NO: 582544 - RNA, 22 nt, Artificial Sequence
  Synthetic
ugacauaucuuuacauccuucg

SEQ ID NO: 582545 - RNA, 23 nt, Artificial Sequence
  Synthetic
cugacauaucuuuacauccuucg

SEQ ID NO: 582546 - RNA, 24 nt, Artificial Sequence
  Synthetic
acugacauaucuuuacauccuucg

SEQ ID NO: 582547 - RNA, 18 nt, Artificial Sequence
  Synthetic
aaacaaaacauugcuucg

SEQ ID NO: 582548 - RNA, 19 nt, Artificial Sequence
  Synthetic
aaaacaaaacauugcuucg

SEQ ID NO: 582549 - RNA, 20 nt, Artificial Sequence
  Synthetic
uaaaacaaaacauugcuucg

SEQ ID NO: 582550 - RNA, 21 nt, Artificial Sequence
  Synthetic
cuaaaacaaaacauugcuucg

SEQ ID NO: 582551 - RNA, 22 nt, Artificial Sequence
  Synthetic
gcuaaaacaaaacauugcuucg

SEQ ID NO: 582552 - RNA, 23 nt, Artificial Sequence
  Synthetic
agcuaaaacaaaacauugcuucg

SEQ ID NO: 582553 - RNA, 24 nt, Artificial Sequence
  Synthetic
cagcuaaaacaaaacauugcuucg

SEQ ID NO: 582554 - RNA, 18 nt, Artificial Sequence
  Synthetic
uuccagcauuuugcuucg

SEQ ID NO: 582555 - RNA, 19 nt, Artificial Sequence
  Synthetic
uuuccagcauuuugcuucg

SEQ ID NO: 582556 - RNA, 20 nt, Artificial Sequence
  Synthetic
auuuccagcauuuugcuucg

SEQ ID NO: 582557 - RNA, 21 nt, Artificial Sequence
  Synthetic
gauuuccagcauuuugcuucg

SEQ ID NO: 582558 - RNA, 22 nt, Artificial Sequence
  Synthetic
ggauuuccagcauuuugcuucg

SEQ ID NO: 582559 - RNA, 23 nt, Artificial Sequence
  Synthetic
gggauuuccagcauuuugcuucg

SEQ ID NO: 582560 - RNA, 24 nt, Artificial Sequence
  Synthetic
ggggauuuccagcauuuugcuucg

SEQ ID NO: 582561 - RNA, 18 nt, Artificial Sequence
  Synthetic
uggggauuaacaucuucg

SEQ ID NO: 582562 - RNA, 19 nt, Artificial Sequence
  Synthetic
cuggggauuaacaucuucg

SEQ ID NO: 582563 - RNA, 20 nt, Artificial Sequence
  Synthetic
ucuggggauuaacaucuucg

SEQ ID NO: 582564 - RNA, 21 nt, Artificial Sequence
  Synthetic
uucuggggauuaacaucuucg

SEQ ID NO: 582565 - RNA, 22 nt, Artificial Sequence
  Synthetic
guucuggggauuaacaucuucg

SEQ ID NO: 582566 - RNA, 23 nt, Artificial Sequence
  Synthetic
gguucuggggauuaacaucuucg

SEQ ID NO: 582567 - RNA, 24 nt, Artificial Sequence
  Synthetic
agguucuggggauuaacaucuucg

SEQ ID NO: 582568 - RNA, 18 nt, Artificial Sequence
  Synthetic
guaauuaauauaucuucg

SEQ ID NO: 582569 - RNA, 19 nt, Artificial Sequence
  Synthetic
gguaauuaauauaucuucg

SEQ ID NO: 582570 - RNA, 20 nt, Artificial Sequence
  Synthetic
agguaauuaauauaucuucg

SEQ ID NO: 582571 - RNA, 21 nt, Artificial Sequence
  Synthetic
aagguaauuaauauaucuucg

SEQ ID NO: 582572 - RNA, 22 nt, Artificial Sequence
  Synthetic
gaagguaauuaauauaucuucg

SEQ ID NO: 582573 - RNA, 23 nt, Artificial Sequence
  Synthetic
agaagguaauuaauauaucuucg

SEQ ID NO: 582574 - RNA, 24 nt, Artificial Sequence
  Synthetic
cagaagguaauuaauauaucuucg

SEQ ID NO: 582575 - RNA, 18 nt, Artificial Sequence
  Synthetic
uagcucugucugucuucg

SEQ ID NO: 582576 - RNA, 19 nt, Artificial Sequence
  Synthetic
auagcucugucugucuucg

SEQ ID NO: 582577 - RNA, 20 nt, Artificial Sequence
  Synthetic
gauagcucugucugucuucg

SEQ ID NO: 582578 - RNA, 21 nt, Artificial Sequence
  Synthetic
ugauagcucugucugucuucg

SEQ ID NO: 582579 - RNA, 22 nt, Artificial Sequence
  Synthetic
augauagcucugucugucuucg

SEQ ID NO: 582580 - RNA, 23 nt, Artificial Sequence
  Synthetic
gaugauagcucugucugucuucg

SEQ ID NO: 582581 - RNA, 24 nt, Artificial Sequence
  Synthetic
ggaugauagcucugucugucuucg

SEQ ID NO: 582582 - RNA, 18 nt, Artificial Sequence
  Synthetic
cauugaaaaguuucuucg

SEQ ID NO: 582583 - RNA, 19 nt, Artificial Sequence
  Synthetic
acauugaaaaguuucuucg

SEQ ID NO: 582584 - RNA, 20 nt, Artificial Sequence
  Synthetic
aacauugaaaaguuucuucg

SEQ ID NO: 582585 - RNA, 21 nt, Artificial Sequence
  Synthetic
aaacauugaaaaguuucuucg

SEQ ID NO: 582586 - RNA, 22 nt, Artificial Sequence
  Synthetic
caaacauugaaaaguuucuucg

SEQ ID NO: 582587 - RNA, 23 nt, Artificial Sequence
  Synthetic
gcaaacauugaaaaguuucuucg

SEQ ID NO: 582588 - RNA, 24 nt, Artificial Sequence
  Synthetic
ugcaaacauugaaaaguuucuucg

SEQ ID NO: 582589 - RNA, 18 nt, Artificial Sequence
  Synthetic
acacugaggcuaaguucg

SEQ ID NO: 582590 - RNA, 19 nt, Artificial Sequence
  Synthetic
gacacugaggcuaaguucg

SEQ ID NO: 582591 - RNA, 20 nt, Artificial Sequence
  Synthetic
ggacacugaggcuaaguucg

SEQ ID NO: 582592 - RNA, 21 nt, Artificial Sequence
  Synthetic
aggacacugaggcuaaguucg

SEQ ID NO: 582593 - RNA, 22 nt, Artificial Sequence
  Synthetic
gaggacacugaggcuaaguucg

SEQ ID NO: 582594 - RNA, 23 nt, Artificial Sequence
  Synthetic
ugaggacacugaggcuaaguucg

SEQ ID NO: 582595 - RNA, 24 nt, Artificial Sequence
  Synthetic
augaggacacugaggcuaaguucg

SEQ ID NO: 582596 - RNA, 18 nt, Artificial Sequence
  Synthetic
uaggcauucaaacguucg

SEQ ID NO: 582597 - RNA, 19 nt, Artificial Sequence
  Synthetic
guaggcauucaaacguucg

SEQ ID NO: 582598 - RNA, 20 nt, Artificial Sequence
  Synthetic
aguaggcauucaaacguucg

SEQ ID NO: 582599 - RNA, 21 nt, Artificial Sequence
  Synthetic
gaguaggcauucaaacguucg

SEQ ID NO: 582600 - RNA, 22 nt, Artificial Sequence
  Synthetic
agaguaggcauucaaacguucg

SEQ ID NO: 582601 - RNA, 23 nt, Artificial Sequence
  Synthetic
cagaguaggcauucaaacguucg

SEQ ID NO: 582602 - RNA, 24 nt, Artificial Sequence
  Synthetic
acagaguaggcauucaaacguucg

SEQ ID NO: 582603 - RNA, 18 nt, Artificial Sequence
  Synthetic
ugucuuccuauagguucg

SEQ ID NO: 582604 - RNA, 19 nt, Artificial Sequence
  Synthetic
uugucuuccuauagguucg

SEQ ID NO: 582605 - RNA, 20 nt, Artificial Sequence
  Synthetic
auugucuuccuauagguucg

SEQ ID NO: 582606 - RNA, 21 nt, Artificial Sequence
  Synthetic
uauugucuuccuauagguucg

SEQ ID NO: 582607 - RNA, 22 nt, Artificial Sequence
  Synthetic
auauugucuuccuauagguucg

SEQ ID NO: 582608 - RNA, 23 nt, Artificial Sequence
  Synthetic
aauauugucuuccuauagguucg

SEQ ID NO: 582609 - RNA, 24 nt, Artificial Sequence
  Synthetic
uaauauugucuuccuauagguucg

SEQ ID NO: 582610 - RNA, 18 nt, Artificial Sequence
  Synthetic
aaaaaaaucaguuguucg

SEQ ID NO: 582611 - RNA, 19 nt, Artificial Sequence
  Synthetic
uaaaaaaaucaguuguucg

SEQ ID NO: 582612 - RNA, 20 nt, Artificial Sequence
  Synthetic
uuaaaaaaaucaguuguucg

SEQ ID NO: 582613 - RNA, 21 nt, Artificial Sequence
  Synthetic
uuuaaaaaaaucaguuguucg

SEQ ID NO: 582614 - RNA, 22 nt, Artificial Sequence
  Synthetic
auuuaaaaaaaucaguuguucg

SEQ ID NO: 582615 - RNA, 23 nt, Artificial Sequence
  Synthetic
uauuuaaaaaaaucaguuguucg

SEQ ID NO: 582616 - RNA, 24 nt, Artificial Sequence
  Synthetic
uuauuuaaaaaaaucaguuguucg

SEQ ID NO: 582617 - RNA, 18 nt, Artificial Sequence
  Synthetic
aaauauucucagguuucg

SEQ ID NO: 582618 - RNA, 19 nt, Artificial Sequence
  Synthetic
gaaauauucucagguuucg

SEQ ID NO: 582619 - RNA, 20 nt, Artificial Sequence
  Synthetic
ggaaauauucucagguuucg

SEQ ID NO: 582620 - RNA, 21 nt, Artificial Sequence
  Synthetic
gggaaauauucucagguuucg

SEQ ID NO: 582621 - RNA, 22 nt, Artificial Sequence
  Synthetic
ggggaaauauucucagguuucg

SEQ ID NO: 582622 - RNA, 23 nt, Artificial Sequence
  Synthetic
aggggaaauauucucagguuucg

SEQ ID NO: 582623 - RNA, 24 nt, Artificial Sequence
  Synthetic
aaggggaaauauucucagguuucg

SEQ ID NO: 582624 - RNA, 18 nt, Artificial Sequence
  Synthetic
uugagggugggguuuucg

SEQ ID NO: 582625 - RNA, 19 nt, Artificial Sequence
  Synthetic
cuugagggugggguuuucg

SEQ ID NO: 582626 - RNA, 20 nt, Artificial Sequence
  Synthetic
gcuugagggugggguuuucg

SEQ ID NO: 582627 - RNA, 21 nt, Artificial Sequence
  Synthetic
ggcuugagggugggguuuucg

SEQ ID NO: 582628 - RNA, 22 nt, Artificial Sequence
  Synthetic
uggcuugagggugggguuuucg

SEQ ID NO: 582629 - RNA, 23 nt, Artificial Sequence
  Synthetic
uuggcuugagggugggguuuucg

SEQ ID NO: 582630 - RNA, 24 nt, Artificial Sequence
  Synthetic
uuuggcuugagggugggguuuucg

SEQ ID NO: 582631 - RNA, 18 nt, Artificial Sequence
  Synthetic
uaaaaaaaaaaaaaaagg

SEQ ID NO: 582632 - RNA, 19 nt, Artificial Sequence
  Synthetic
uuaaaaaaaaaaaaaaagg

SEQ ID NO: 582633 - RNA, 20 nt, Artificial Sequence
  Synthetic
uuuaaaaaaaaaaaaaaagg

SEQ ID NO: 582634 - RNA, 21 nt, Artificial Sequence
  Synthetic
cuuuaaaaaaaaaaaaaaagg

SEQ ID NO: 582635 - RNA, 22 nt, Artificial Sequence
  Synthetic
acuuuaaaaaaaaaaaaaaagg

SEQ ID NO: 582636 - RNA, 23 nt, Artificial Sequence
  Synthetic
gacuuuaaaaaaaaaaaaaaagg

SEQ ID NO: 582637 - RNA, 24 nt, Artificial Sequence
  Synthetic
agacuuuaaaaaaaaaaaaaaagg

SEQ ID NO: 582638 - RNA, 18 nt, Artificial Sequence
  Synthetic
aggagaaaaaaaaaaagg

SEQ ID NO: 582639 - RNA, 19 nt, Artificial Sequence
  Synthetic
aaggagaaaaaaaaaaagg

SEQ ID NO: 582640 - RNA, 20 nt, Artificial Sequence
  Synthetic
gaaggagaaaaaaaaaaagg

SEQ ID NO: 582641 - RNA, 21 nt, Artificial Sequence
  Synthetic
ggaaggagaaaaaaaaaaagg

SEQ ID NO: 582642 - RNA, 22 nt, Artificial Sequence
  Synthetic
gggaaggagaaaaaaaaaaagg

SEQ ID NO: 582643 - RNA, 23 nt, Artificial Sequence
  Synthetic
agggaaggagaaaaaaaaaaagg

SEQ ID NO: 582644 - RNA, 24 nt, Artificial Sequence
  Synthetic
cagggaaggagaaaaaaaaaaagg

SEQ ID NO: 582645 - RNA, 18 nt, Artificial Sequence
  Synthetic
agaaauuaaaaaaaaagg

SEQ ID NO: 582646 - RNA, 19 nt, Artificial Sequence
  Synthetic
cagaaauuaaaaaaaaagg

SEQ ID NO: 582647 - RNA, 20 nt, Artificial Sequence
  Synthetic
acagaaauuaaaaaaaaagg

SEQ ID NO: 582648 - RNA, 21 nt, Artificial Sequence
  Synthetic
aacagaaauuaaaaaaaaagg

SEQ ID NO: 582649 - RNA, 22 nt, Artificial Sequence
  Synthetic
gaacagaaauuaaaaaaaaagg

SEQ ID NO: 582650 - RNA, 23 nt, Artificial Sequence
  Synthetic
agaacagaaauuaaaaaaaaagg

SEQ ID NO: 582651 - RNA, 24 nt, Artificial Sequence
  Synthetic
gagaacagaaauuaaaaaaaaagg

SEQ ID NO: 582652 - RNA, 18 nt, Artificial Sequence
  Synthetic
auggaaaacaaaaaaagg

SEQ ID NO: 582653 - RNA, 19 nt, Artificial Sequence
  Synthetic
aauggaaaacaaaaaaagg

SEQ ID NO: 582654 - RNA, 20 nt, Artificial Sequence
  Synthetic
aaauggaaaacaaaaaaagg

SEQ ID NO: 582655 - RNA, 21 nt, Artificial Sequence
  Synthetic
caaauggaaaacaaaaaaagg

SEQ ID NO: 582656 - RNA, 22 nt, Artificial Sequence
  Synthetic
gcaaauggaaaacaaaaaaagg

SEQ ID NO: 582657 - RNA, 23 nt, Artificial Sequence
  Synthetic
agcaaauggaaaacaaaaaaagg

SEQ ID NO: 582658 - RNA, 24 nt, Artificial Sequence
  Synthetic
aagcaaauggaaaacaaaaaaagg

SEQ ID NO: 582659 - RNA, 18 nt, Artificial Sequence
  Synthetic
aaaaugaacaaaaaaagg

SEQ ID NO: 582660 - RNA, 19 nt, Artificial Sequence
  Synthetic
aaaaaugaacaaaaaaagg

SEQ ID NO: 582661 - RNA, 20 nt, Artificial Sequence
  Synthetic
uaaaaaugaacaaaaaaagg

SEQ ID NO: 582662 - RNA, 21 nt, Artificial Sequence
  Synthetic
uuaaaaaugaacaaaaaaagg

SEQ ID NO: 582663 - RNA, 22 nt, Artificial Sequence
  Synthetic
auuaaaaaugaacaaaaaaagg

SEQ ID NO: 582664 - RNA, 23 nt, Artificial Sequence
  Synthetic
cauuaaaaaugaacaaaaaaagg

SEQ ID NO: 582665 - RNA, 24 nt, Artificial Sequence
  Synthetic
ccauuaaaaaugaacaaaaaaagg

SEQ ID NO: 582666 - RNA, 18 nt, Artificial Sequence
  Synthetic
ucuuuaucacaaaaaagg

SEQ ID NO: 582667 - RNA, 19 nt, Artificial Sequence
  Synthetic
aucuuuaucacaaaaaagg

SEQ ID NO: 582668 - RNA, 20 nt, Artificial Sequence
  Synthetic
caucuuuaucacaaaaaagg

SEQ ID NO: 582669 - RNA, 21 nt, Artificial Sequence
  Synthetic
ucaucuuuaucacaaaaaagg

SEQ ID NO: 582670 - RNA, 22 nt, Artificial Sequence
  Synthetic
aucaucuuuaucacaaaaaagg

SEQ ID NO: 582671 - RNA, 23 nt, Artificial Sequence
  Synthetic
aaucaucuuuaucacaaaaaagg

SEQ ID NO: 582672 - RNA, 24 nt, Artificial Sequence
  Synthetic
uaaucaucuuuaucacaaaaaagg

SEQ ID NO: 582673 - RNA, 18 nt, Artificial Sequence
  Synthetic
gaauggaaagaaaaaagg

SEQ ID NO: 582674 - RNA, 19 nt, Artificial Sequence
  Synthetic
agaauggaaagaaaaaagg

SEQ ID NO: 582675 - RNA, 20 nt, Artificial Sequence
  Synthetic
gagaauggaaagaaaaaagg

SEQ ID NO: 582676 - RNA, 21 nt, Artificial Sequence
  Synthetic
agagaauggaaagaaaaaagg

SEQ ID NO: 582677 - RNA, 22 nt, Artificial Sequence
  Synthetic
gagagaauggaaagaaaaaagg

SEQ ID NO: 582678 - RNA, 23 nt, Artificial Sequence
  Synthetic
ugagagaauggaaagaaaaaagg

SEQ ID NO: 582679 - RNA, 24 nt, Artificial Sequence
  Synthetic
augagagaauggaaagaaaaaagg

SEQ ID NO: 582680 - RNA, 18 nt, Artificial Sequence
  Synthetic
acuaaugaagaaaaaagg

SEQ ID NO: 582681 - RNA, 19 nt, Artificial Sequence
  Synthetic
gacuaaugaagaaaaaagg

SEQ ID NO: 582682 - RNA, 20 nt, Artificial Sequence
  Synthetic
agacuaaugaagaaaaaagg

SEQ ID NO: 582683 - RNA, 21 nt, Artificial Sequence
  Synthetic
cagacuaaugaagaaaaaagg

SEQ ID NO: 582684 - RNA, 22 nt, Artificial Sequence
  Synthetic
ccagacuaaugaagaaaaaagg

SEQ ID NO: 582685 - RNA, 23 nt, Artificial Sequence
  Synthetic
gccagacuaaugaagaaaaaagg

SEQ ID NO: 582686 - RNA, 24 nt, Artificial Sequence
  Synthetic
agccagacuaaugaagaaaaaagg

SEQ ID NO: 582687 - RNA, 18 nt, Artificial Sequence
  Synthetic
gaagguacugaaaaaagg

SEQ ID NO: 582688 - RNA, 19 nt, Artificial Sequence
  Synthetic
ggaagguacugaaaaaagg

SEQ ID NO: 582689 - RNA, 20 nt, Artificial Sequence
  Synthetic
gggaagguacugaaaaaagg

SEQ ID NO: 582690 - RNA, 21 nt, Artificial Sequence
  Synthetic
ggggaagguacugaaaaaagg

SEQ ID NO: 582691 - RNA, 22 nt, Artificial Sequence
  Synthetic
gggggaagguacugaaaaaagg

SEQ ID NO: 582692 - RNA, 23 nt, Artificial Sequence
  Synthetic
agggggaagguacugaaaaaagg

SEQ ID NO: 582693 - RNA, 24 nt, Artificial Sequence
  Synthetic
gagggggaagguacugaaaaaagg

SEQ ID NO: 582694 - RNA, 18 nt, Artificial Sequence
  Synthetic
gugaagccauaaaaaagg

SEQ ID NO: 582695 - RNA, 19 nt, Artificial Sequence
  Synthetic
ugugaagccauaaaaaagg

SEQ ID NO: 582696 - RNA, 20 nt, Artificial Sequence
  Synthetic
cugugaagccauaaaaaagg

SEQ ID NO: 582697 - RNA, 21 nt, Artificial Sequence
  Synthetic
acugugaagccauaaaaaagg

SEQ ID NO: 582698 - RNA, 22 nt, Artificial Sequence
  Synthetic
uacugugaagccauaaaaaagg

SEQ ID NO: 582699 - RNA, 23 nt, Artificial Sequence
  Synthetic
auacugugaagccauaaaaaagg

SEQ ID NO: 582700 - RNA, 24 nt, Artificial Sequence
  Synthetic
aauacugugaagccauaaaaaagg

SEQ ID NO: 582701 - RNA, 18 nt, Artificial Sequence
  Synthetic
guagaaaaaccaaaaagg

SEQ ID NO: 582702 - RNA, 19 nt, Artificial Sequence
  Synthetic
gguagaaaaaccaaaaagg

SEQ ID NO: 582703 - RNA, 20 nt, Artificial Sequence
  Synthetic
ugguagaaaaaccaaaaagg

SEQ ID NO: 582704 - RNA, 21 nt, Artificial Sequence
  Synthetic
cugguagaaaaaccaaaaagg

SEQ ID NO: 582705 - RNA, 22 nt, Artificial Sequence
  Synthetic
gcugguagaaaaaccaaaaagg

SEQ ID NO: 582706 - RNA, 23 nt, Artificial Sequence
  Synthetic
ugcugguagaaaaaccaaaaagg

SEQ ID NO: 582707 - RNA, 24 nt, Artificial Sequence
  Synthetic
augcugguagaaaaaccaaaaagg

SEQ ID NO: 582708 - RNA, 18 nt, Artificial Sequence
  Synthetic
auguuucccccaaaaagg

SEQ ID NO: 582709 - RNA, 19 nt, Artificial Sequence
  Synthetic
aauguuucccccaaaaagg

SEQ ID NO: 582710 - RNA, 20 nt, Artificial Sequence
  Synthetic
gaauguuucccccaaaaagg

SEQ ID NO: 582711 - RNA, 21 nt, Artificial Sequence
  Synthetic
agaauguuucccccaaaaagg

SEQ ID NO: 582712 - RNA, 22 nt, Artificial Sequence
  Synthetic
uagaauguuucccccaaaaagg

SEQ ID NO: 582713 - RNA, 23 nt, Artificial Sequence
  Synthetic
uuagaauguuucccccaaaaagg

SEQ ID NO: 582714 - RNA, 24 nt, Artificial Sequence
  Synthetic
uuuagaauguuucccccaaaaagg

SEQ ID NO: 582715 - RNA, 18 nt, Artificial Sequence
  Synthetic
uguuaaaugccaaaaagg

SEQ ID NO: 582716 - RNA, 19 nt, Artificial Sequence
  Synthetic
guguuaaaugccaaaaagg

SEQ ID NO: 582717 - RNA, 20 nt, Artificial Sequence
  Synthetic
uguguuaaaugccaaaaagg

SEQ ID NO: 582718 - RNA, 21 nt, Artificial Sequence
  Synthetic
uuguguuaaaugccaaaaagg

SEQ ID NO: 582719 - RNA, 22 nt, Artificial Sequence
  Synthetic
uuuguguuaaaugccaaaaagg

SEQ ID NO: 582720 - RNA, 23 nt, Artificial Sequence
  Synthetic
uuuuguguuaaaugccaaaaagg

SEQ ID NO: 582721 - RNA, 24 nt, Artificial Sequence
  Synthetic
guuuuguguuaaaugccaaaaagg

SEQ ID NO: 582722 - RNA, 18 nt, Artificial Sequence
  Synthetic
cauucagcuccaaaaagg

SEQ ID NO: 582723 - RNA, 19 nt, Artificial Sequence
  Synthetic
acauucagcuccaaaaagg

SEQ ID NO: 582724 - RNA, 20 nt, Artificial Sequence
  Synthetic
aacauucagcuccaaaaagg

SEQ ID NO: 582725 - RNA, 21 nt, Artificial Sequence
  Synthetic
aaacauucagcuccaaaaagg

SEQ ID NO: 582726 - RNA, 22 nt, Artificial Sequence
  Synthetic
uaaacauucagcuccaaaaagg

SEQ ID NO: 582727 - RNA, 23 nt, Artificial Sequence
  Synthetic
cuaaacauucagcuccaaaaagg

SEQ ID NO: 582728 - RNA, 24 nt, Artificial Sequence
  Synthetic
acuaaacauucagcuccaaaaagg

SEQ ID NO: 582729 - RNA, 18 nt, Artificial Sequence
  Synthetic
aacugcuuagcaaaaagg

SEQ ID NO: 582730 - RNA, 19 nt, Artificial Sequence
  Synthetic
gaacugcuuagcaaaaagg

SEQ ID NO: 582731 - RNA, 20 nt, Artificial Sequence
  Synthetic
agaacugcuuagcaaaaagg

SEQ ID NO: 582732 - RNA, 21 nt, Artificial Sequence
  Synthetic
gagaacugcuuagcaaaaagg

SEQ ID NO: 582733 - RNA, 22 nt, Artificial Sequence
  Synthetic
agagaacugcuuagcaaaaagg

SEQ ID NO: 582734 - RNA, 23 nt, Artificial Sequence
  Synthetic
cagagaacugcuuagcaaaaagg

SEQ ID NO: 582735 - RNA, 24 nt, Artificial Sequence
  Synthetic
acagagaacugcuuagcaaaaagg

SEQ ID NO: 582736 - RNA, 18 nt, Artificial Sequence
  Synthetic
uggccauacagaaaaagg

SEQ ID NO: 582737 - RNA, 19 nt, Artificial Sequence
  Synthetic
uuggccauacagaaaaagg

SEQ ID NO: 582738 - RNA, 20 nt, Artificial Sequence
  Synthetic
uuuggccauacagaaaaagg

SEQ ID NO: 582739 - RNA, 21 nt, Artificial Sequence
  Synthetic
cuuuggccauacagaaaaagg

SEQ ID NO: 582740 - RNA, 22 nt, Artificial Sequence
  Synthetic
gcuuuggccauacagaaaaagg

SEQ ID NO: 582741 - RNA, 23 nt, Artificial Sequence
  Synthetic
ggcuuuggccauacagaaaaagg

SEQ ID NO: 582742 - RNA, 24 nt, Artificial Sequence
  Synthetic
aggcuuuggccauacagaaaaagg

SEQ ID NO: 582743 - RNA, 18 nt, Artificial Sequence
  Synthetic
aagugagagagaaaaagg

SEQ ID NO: 582744 - RNA, 19 nt, Artificial Sequence
  Synthetic
aaagugagagagaaaaagg

SEQ ID NO: 582745 - RNA, 20 nt, Artificial Sequence
  Synthetic
aaaagugagagagaaaaagg

SEQ ID NO: 582746 - RNA, 21 nt, Artificial Sequence
  Synthetic
aaaaagugagagagaaaaagg

SEQ ID NO: 582747 - RNA, 22 nt, Artificial Sequence
  Synthetic
caaaaagugagagagaaaaagg

SEQ ID NO: 582748 - RNA, 23 nt, Artificial Sequence
  Synthetic
ucaaaaagugagagagaaaaagg

SEQ ID NO: 582749 - RNA, 24 nt, Artificial Sequence
  Synthetic
uucaaaaagugagagagaaaaagg

SEQ ID NO: 582750 - RNA, 18 nt, Artificial Sequence
  Synthetic
acauaaaaaggaaaaagg

SEQ ID NO: 582751 - RNA, 19 nt, Artificial Sequence
  Synthetic
uacauaaaaaggaaaaagg

SEQ ID NO: 582752 - RNA, 20 nt, Artificial Sequence
  Synthetic
auacauaaaaaggaaaaagg

SEQ ID NO: 582753 - RNA, 21 nt, Artificial Sequence
  Synthetic
aauacauaaaaaggaaaaagg

SEQ ID NO: 582754 - RNA, 22 nt, Artificial Sequence
  Synthetic
uaauacauaaaaaggaaaaagg

SEQ ID NO: 582755 - RNA, 23 nt, Artificial Sequence
  Synthetic
auaauacauaaaaaggaaaaagg

SEQ ID NO: 582756 - RNA, 24 nt, Artificial Sequence
  Synthetic
cauaauacauaaaaaggaaaaagg

SEQ ID NO: 582757 - RNA, 18 nt, Artificial Sequence
  Synthetic
uugggaucaggaaaaagg

SEQ ID NO: 582758 - RNA, 19 nt, Artificial Sequence
  Synthetic
guugggaucaggaaaaagg

SEQ ID NO: 582759 - RNA, 20 nt, Artificial Sequence
  Synthetic
uguugggaucaggaaaaagg

SEQ ID NO: 582760 - RNA, 21 nt, Artificial Sequence
  Synthetic
uuguugggaucaggaaaaagg

SEQ ID NO: 582761 - RNA, 22 nt, Artificial Sequence
  Synthetic
uuuguugggaucaggaaaaagg

SEQ ID NO: 582762 - RNA, 23 nt, Artificial Sequence
  Synthetic
auuuguugggaucaggaaaaagg

SEQ ID NO: 582763 - RNA, 24 nt, Artificial Sequence
  Synthetic
uauuuguugggaucaggaaaaagg

SEQ ID NO: 582764 - RNA, 18 nt, Artificial Sequence
  Synthetic
augugaagccuaaaaagg

SEQ ID NO: 582765 - RNA, 19 nt, Artificial Sequence
  Synthetic
uaugugaagccuaaaaagg

SEQ ID NO: 582766 - RNA, 20 nt, Artificial Sequence
  Synthetic
guaugugaagccuaaaaagg

SEQ ID NO: 582767 - RNA, 21 nt, Artificial Sequence
  Synthetic
gguaugugaagccuaaaaagg

SEQ ID NO: 582768 - RNA, 22 nt, Artificial Sequence
  Synthetic
cgguaugugaagccuaaaaagg

SEQ ID NO: 582769 - RNA, 23 nt, Artificial Sequence
  Synthetic
ccgguaugugaagccuaaaaagg

SEQ ID NO: 582770 - RNA, 24 nt, Artificial Sequence
  Synthetic
uccgguaugugaagccuaaaaagg

SEQ ID NO: 582771 - RNA, 18 nt, Artificial Sequence
  Synthetic
uuuuugggggacaaaagg

SEQ ID NO: 582772 - RNA, 19 nt, Artificial Sequence
  Synthetic
guuuuugggggacaaaagg

SEQ ID NO: 582773 - RNA, 20 nt, Artificial Sequence
  Synthetic
uguuuuugggggacaaaagg

SEQ ID NO: 582774 - RNA, 21 nt, Artificial Sequence
  Synthetic
auguuuuugggggacaaaagg

SEQ ID NO: 582775 - RNA, 22 nt, Artificial Sequence
  Synthetic
aauguuuuugggggacaaaagg

SEQ ID NO: 582776 - RNA, 23 nt, Artificial Sequence
  Synthetic
uaauguuuuugggggacaaaagg

SEQ ID NO: 582777 - RNA, 24 nt, Artificial Sequence
  Synthetic
auaauguuuuugggggacaaaagg

SEQ ID NO: 582778 - RNA, 18 nt, Artificial Sequence
  Synthetic
agcaagccaaucaaaagg

SEQ ID NO: 582779 - RNA, 19 nt, Artificial Sequence
  Synthetic
cagcaagccaaucaaaagg

SEQ ID NO: 582780 - RNA, 20 nt, Artificial Sequence
  Synthetic
ucagcaagccaaucaaaagg

SEQ ID NO: 582781 - RNA, 21 nt, Artificial Sequence
  Synthetic
aucagcaagccaaucaaaagg

SEQ ID NO: 582782 - RNA, 22 nt, Artificial Sequence
  Synthetic
uaucagcaagccaaucaaaagg

SEQ ID NO: 582783 - RNA, 23 nt, Artificial Sequence
  Synthetic
auaucagcaagccaaucaaaagg

SEQ ID NO: 582784 - RNA, 24 nt, Artificial Sequence
  Synthetic
aauaucagcaagccaaucaaaagg

SEQ ID NO: 582785 - RNA, 18 nt, Artificial Sequence
  Synthetic
cauacucaaaagaaaagg

SEQ ID NO: 582786 - RNA, 19 nt, Artificial Sequence
  Synthetic
acauacucaaaagaaaagg

SEQ ID NO: 582787 - RNA, 20 nt, Artificial Sequence
  Synthetic
uacauacucaaaagaaaagg

SEQ ID NO: 582788 - RNA, 21 nt, Artificial Sequence
  Synthetic
guacauacucaaaagaaaagg

SEQ ID NO: 582789 - RNA, 22 nt, Artificial Sequence
  Synthetic
gguacauacucaaaagaaaagg

SEQ ID NO: 582790 - RNA, 23 nt, Artificial Sequence
  Synthetic
ggguacauacucaaaagaaaagg

SEQ ID NO: 582791 - RNA, 24 nt, Artificial Sequence
  Synthetic
uggguacauacucaaaagaaaagg

SEQ ID NO: 582792 - RNA, 18 nt, Artificial Sequence
  Synthetic
acaugcagaaagaaaagg

SEQ ID NO: 582793 - RNA, 19 nt, Artificial Sequence
  Synthetic
aacaugcagaaagaaaagg

SEQ ID NO: 582794 - RNA, 20 nt, Artificial Sequence
  Synthetic
aaacaugcagaaagaaaagg

SEQ ID NO: 582795 - RNA, 21 nt, Artificial Sequence
  Synthetic
uaaacaugcagaaagaaaagg

SEQ ID NO: 582796 - RNA, 22 nt, Artificial Sequence
  Synthetic
uuaaacaugcagaaagaaaagg

SEQ ID NO: 582797 - RNA, 23 nt, Artificial Sequence
  Synthetic
cuuaaacaugcagaaagaaaagg

SEQ ID NO: 582798 - RNA, 24 nt, Artificial Sequence
  Synthetic
acuuaaacaugcagaaagaaaagg

SEQ ID NO: 582799 - RNA, 18 nt, Artificial Sequence
  Synthetic
caaccuuuacagaaaagg

SEQ ID NO: 582800 - RNA, 19 nt, Artificial Sequence
  Synthetic
acaaccuuuacagaaaagg

SEQ ID NO: 582801 - RNA, 20 nt, Artificial Sequence
  Synthetic
aacaaccuuuacagaaaagg

SEQ ID NO: 582802 - RNA, 21 nt, Artificial Sequence
  Synthetic
aaacaaccuuuacagaaaagg

SEQ ID NO: 582803 - RNA, 22 nt, Artificial Sequence
  Synthetic
aaaacaaccuuuacagaaaagg

SEQ ID NO: 582804 - RNA, 23 nt, Artificial Sequence
  Synthetic
caaaacaaccuuuacagaaaagg

SEQ ID NO: 582805 - RNA, 24 nt, Artificial Sequence
  Synthetic
acaaaacaaccuuuacagaaaagg

SEQ ID NO: 582806 - RNA, 18 nt, Artificial Sequence
  Synthetic
ugaaguccccagaaaagg

SEQ ID NO: 582807 - RNA, 19 nt, Artificial Sequence
  Synthetic
cugaaguccccagaaaagg

SEQ ID NO: 582808 - RNA, 20 nt, Artificial Sequence
  Synthetic
acugaaguccccagaaaagg

SEQ ID NO: 582809 - RNA, 21 nt, Artificial Sequence
  Synthetic
gacugaaguccccagaaaagg

SEQ ID NO: 582810 - RNA, 22 nt, Artificial Sequence
  Synthetic
agacugaaguccccagaaaagg

SEQ ID NO: 582811 - RNA, 23 nt, Artificial Sequence
  Synthetic
aagacugaaguccccagaaaagg

SEQ ID NO: 582812 - RNA, 24 nt, Artificial Sequence
  Synthetic
aaagacugaaguccccagaaaagg

SEQ ID NO: 582813 - RNA, 18 nt, Artificial Sequence
  Synthetic
cuacacaaagagaaaagg

SEQ ID NO: 582814 - RNA, 19 nt, Artificial Sequence
  Synthetic
gcuacacaaagagaaaagg

SEQ ID NO: 582815 - RNA, 20 nt, Artificial Sequence
  Synthetic
agcuacacaaagagaaaagg

SEQ ID NO: 582816 - RNA, 21 nt, Artificial Sequence
  Synthetic
uagcuacacaaagagaaaagg

SEQ ID NO: 582817 - RNA, 22 nt, Artificial Sequence
  Synthetic
cuagcuacacaaagagaaaagg

SEQ ID NO: 582818 - RNA, 23 nt, Artificial Sequence
  Synthetic
ccuagcuacacaaagagaaaagg

SEQ ID NO: 582819 - RNA, 24 nt, Artificial Sequence
  Synthetic
accuagcuacacaaagagaaaagg

SEQ ID NO: 582820 - RNA, 18 nt, Artificial Sequence
  Synthetic
aaggaggagaggaaaagg

SEQ ID NO: 582821 - RNA, 19 nt, Artificial Sequence
  Synthetic
aaaggaggagaggaaaagg

SEQ ID NO: 582822 - RNA, 20 nt, Artificial Sequence
  Synthetic
gaaaggaggagaggaaaagg

SEQ ID NO: 582823 - RNA, 21 nt, Artificial Sequence
  Synthetic
ggaaaggaggagaggaaaagg

SEQ ID NO: 582824 - RNA, 22 nt, Artificial Sequence
  Synthetic
aggaaaggaggagaggaaaagg

SEQ ID NO: 582825 - RNA, 23 nt, Artificial Sequence
  Synthetic
caggaaaggaggagaggaaaagg

SEQ ID NO: 582826 - RNA, 24 nt, Artificial Sequence
  Synthetic
acaggaaaggaggagaggaaaagg

SEQ ID NO: 582827 - RNA, 18 nt, Artificial Sequence
  Synthetic
uaauguaugaggaaaagg

SEQ ID NO: 582828 - RNA, 19 nt, Artificial Sequence
  Synthetic
uuaauguaugaggaaaagg

SEQ ID NO: 582829 - RNA, 20 nt, Artificial Sequence
  Synthetic
guuaauguaugaggaaaagg

SEQ ID NO: 582830 - RNA, 21 nt, Artificial Sequence
  Synthetic
uguuaauguaugaggaaaagg

SEQ ID NO: 582831 - RNA, 22 nt, Artificial Sequence
  Synthetic
uuguuaauguaugaggaaaagg

SEQ ID NO: 582832 - RNA, 23 nt, Artificial Sequence
  Synthetic
uuuguuaauguaugaggaaaagg

SEQ ID NO: 582833 - RNA, 24 nt, Artificial Sequence
  Synthetic
uuuuguuaauguaugaggaaaagg

SEQ ID NO: 582834 - RNA, 18 nt, Artificial Sequence
  Synthetic
uccaggagaaugaaaagg

SEQ ID NO: 582835 - RNA, 19 nt, Artificial Sequence
  Synthetic
guccaggagaaugaaaagg

SEQ ID NO: 582836 - RNA, 20 nt, Artificial Sequence
  Synthetic
uguccaggagaaugaaaagg

SEQ ID NO: 582837 - RNA, 21 nt, Artificial Sequence
  Synthetic
auguccaggagaaugaaaagg

SEQ ID NO: 582838 - RNA, 22 nt, Artificial Sequence
  Synthetic
gauguccaggagaaugaaaagg

SEQ ID NO: 582839 - RNA, 23 nt, Artificial Sequence
  Synthetic
ugauguccaggagaaugaaaagg

SEQ ID NO: 582840 - RNA, 24 nt, Artificial Sequence
  Synthetic
uugauguccaggagaaugaaaagg

SEQ ID NO: 582841 - RNA, 18 nt, Artificial Sequence
  Synthetic
gcaaccaaacugaaaagg

SEQ ID NO: 582842 - RNA, 19 nt, Artificial Sequence
  Synthetic
ggcaaccaaacugaaaagg

SEQ ID NO: 582843 - RNA, 20 nt, Artificial Sequence
  Synthetic
aggcaaccaaacugaaaagg

SEQ ID NO: 582844 - RNA, 21 nt, Artificial Sequence
  Synthetic
aaggcaaccaaacugaaaagg

SEQ ID NO: 582845 - RNA, 22 nt, Artificial Sequence
  Synthetic
aaaggcaaccaaacugaaaagg

SEQ ID NO: 582846 - RNA, 23 nt, Artificial Sequence
  Synthetic
aaaaggcaaccaaacugaaaagg

SEQ ID NO: 582847 - RNA, 24 nt, Artificial Sequence
  Synthetic
uaaaaggcaaccaaacugaaaagg

SEQ ID NO: 582848 - RNA, 18 nt, Artificial Sequence
  Synthetic
augaucucagugaaaagg

SEQ ID NO: 582849 - RNA, 19 nt, Artificial Sequence
  Synthetic
gaugaucucagugaaaagg

SEQ ID NO: 582850 - RNA, 20 nt, Artificial Sequence
  Synthetic
ggaugaucucagugaaaagg

SEQ ID NO: 582851 - RNA, 21 nt, Artificial Sequence
  Synthetic
gggaugaucucagugaaaagg

SEQ ID NO: 582852 - RNA, 22 nt, Artificial Sequence
  Synthetic
agggaugaucucagugaaaagg

SEQ ID NO: 582853 - RNA, 23 nt, Artificial Sequence
  Synthetic
gagggaugaucucagugaaaagg

SEQ ID NO: 582854 - RNA, 24 nt, Artificial Sequence
  Synthetic
agagggaugaucucagugaaaagg

SEQ ID NO: 582855 - RNA, 18 nt, Artificial Sequence
  Synthetic
uaggcucaaaauaaaagg

SEQ ID NO: 582856 - RNA, 19 nt, Artificial Sequence
  Synthetic
auaggcucaaaauaaaagg

SEQ ID NO: 582857 - RNA, 20 nt, Artificial Sequence
  Synthetic
cauaggcucaaaauaaaagg

SEQ ID NO: 582858 - RNA, 21 nt, Artificial Sequence
  Synthetic
acauaggcucaaaauaaaagg

SEQ ID NO: 582859 - RNA, 22 nt, Artificial Sequence
  Synthetic
cacauaggcucaaaauaaaagg

SEQ ID NO: 582860 - RNA, 23 nt, Artificial Sequence
  Synthetic
acacauaggcucaaaauaaaagg

SEQ ID NO: 582861 - RNA, 24 nt, Artificial Sequence
  Synthetic
cacacauaggcucaaaauaaaagg

SEQ ID NO: 582862 - RNA, 18 nt, Artificial Sequence
  Synthetic
uaauguccucauaaaagg

SEQ ID NO: 582863 - RNA, 19 nt, Artificial Sequence
  Synthetic
cuaauguccucauaaaagg

SEQ ID NO: 582864 - RNA, 20 nt, Artificial Sequence
  Synthetic
ucuaauguccucauaaaagg

SEQ ID NO: 582865 - RNA, 21 nt, Artificial Sequence
  Synthetic
gucuaauguccucauaaaagg

SEQ ID NO: 582866 - RNA, 22 nt, Artificial Sequence
  Synthetic
agucuaauguccucauaaaagg

SEQ ID NO: 582867 - RNA, 23 nt, Artificial Sequence
  Synthetic
aagucuaauguccucauaaaagg

SEQ ID NO: 582868 - RNA, 24 nt, Artificial Sequence
  Synthetic
uaagucuaauguccucauaaaagg

SEQ ID NO: 582869 - RNA, 18 nt, Artificial Sequence
  Synthetic
aucacuugugguaaaagg

SEQ ID NO: 582870 - RNA, 19 nt, Artificial Sequence
  Synthetic
uaucacuugugguaaaagg

SEQ ID NO: 582871 - RNA, 20 nt, Artificial Sequence
  Synthetic
auaucacuugugguaaaagg

SEQ ID NO: 582872 - RNA, 21 nt, Artificial Sequence
  Synthetic
aauaucacuugugguaaaagg

SEQ ID NO: 582873 - RNA, 22 nt, Artificial Sequence
  Synthetic
aaauaucacuugugguaaaagg

SEQ ID NO: 582874 - RNA, 23 nt, Artificial Sequence
  Synthetic
aaaauaucacuugugguaaaagg

SEQ ID NO: 582875 - RNA, 24 nt, Artificial Sequence
  Synthetic
caaaauaucacuugugguaaaagg

SEQ ID NO: 582876 - RNA, 18 nt, Artificial Sequence
  Synthetic
augggggcaaaacaaagg

SEQ ID NO: 582877 - RNA, 19 nt, Artificial Sequence
  Synthetic
gaugggggcaaaacaaagg

SEQ ID NO: 582878 - RNA, 20 nt, Artificial Sequence
  Synthetic
ggaugggggcaaaacaaagg

SEQ ID NO: 582879 - RNA, 21 nt, Artificial Sequence
  Synthetic
gggaugggggcaaaacaaagg

SEQ ID NO: 582880 - RNA, 22 nt, Artificial Sequence
  Synthetic
agggaugggggcaaaacaaagg

SEQ ID NO: 582881 - RNA, 23 nt, Artificial Sequence
  Synthetic
uagggaugggggcaaaacaaagg

SEQ ID NO: 582882 - RNA, 24 nt, Artificial Sequence
  Synthetic
auagggaugggggcaaaacaaagg

SEQ ID NO: 582883 - RNA, 18 nt, Artificial Sequence
  Synthetic
uucuuuuguaaacaaagg

SEQ ID NO: 582884 - RNA, 19 nt, Artificial Sequence
  Synthetic
uuucuuuuguaaacaaagg

SEQ ID NO: 582885 - RNA, 20 nt, Artificial Sequence
  Synthetic
uuuucuuuuguaaacaaagg

SEQ ID NO: 582886 - RNA, 21 nt, Artificial Sequence
  Synthetic
guuuucuuuuguaaacaaagg

SEQ ID NO: 582887 - RNA, 22 nt, Artificial Sequence
  Synthetic
gguuuucuuuuguaaacaaagg

SEQ ID NO: 582888 - RNA, 23 nt, Artificial Sequence
  Synthetic
ggguuuucuuuuguaaacaaagg

SEQ ID NO: 582889 - RNA, 24 nt, Artificial Sequence
  Synthetic
uggguuuucuuuuguaaacaaagg

SEQ ID NO: 582890 - RNA, 18 nt, Artificial Sequence
  Synthetic
uccuucucugcacaaagg

SEQ ID NO: 582891 - RNA, 19 nt, Artificial Sequence
  Synthetic
auccuucucugcacaaagg

SEQ ID NO: 582892 - RNA, 20 nt, Artificial Sequence
  Synthetic
uauccuucucugcacaaagg

SEQ ID NO: 582893 - RNA, 21 nt, Artificial Sequence
  Synthetic
cuauccuucucugcacaaagg

SEQ ID NO: 582894 - RNA, 22 nt, Artificial Sequence
  Synthetic
ccuauccuucucugcacaaagg

SEQ ID NO: 582895 - RNA, 23 nt, Artificial Sequence
  Synthetic
uccuauccuucucugcacaaagg

SEQ ID NO: 582896 - RNA, 24 nt, Artificial Sequence
  Synthetic
uuccuauccuucucugcacaaagg

SEQ ID NO: 582897 - RNA, 18 nt, Artificial Sequence
  Synthetic
uauucagccauacaaagg

SEQ ID NO: 582898 - RNA, 19 nt, Artificial Sequence
  Synthetic
uuauucagccauacaaagg

SEQ ID NO: 582899 - RNA, 20 nt, Artificial Sequence
  Synthetic
auuauucagccauacaaagg

SEQ ID NO: 582900 - RNA, 21 nt, Artificial Sequence
  Synthetic
uauuauucagccauacaaagg

SEQ ID NO: 582901 - RNA, 22 nt, Artificial Sequence
  Synthetic
auauuauucagccauacaaagg

SEQ ID NO: 582902 - RNA, 23 nt, Artificial Sequence
  Synthetic
gauauuauucagccauacaaagg

SEQ ID NO: 582903 - RNA, 24 nt, Artificial Sequence
  Synthetic
ggauauuauucagccauacaaagg

SEQ ID NO: 582904 - RNA, 18 nt, Artificial Sequence
  Synthetic
cccagaaaucuacaaagg

SEQ ID NO: 582905 - RNA, 19 nt, Artificial Sequence
  Synthetic
ucccagaaaucuacaaagg

SEQ ID NO: 582906 - RNA, 20 nt, Artificial Sequence
  Synthetic
cucccagaaaucuacaaagg

SEQ ID NO: 582907 - RNA, 21 nt, Artificial Sequence
  Synthetic
ucucccagaaaucuacaaagg

SEQ ID NO: 582908 - RNA, 22 nt, Artificial Sequence
  Synthetic
aucucccagaaaucuacaaagg

SEQ ID NO: 582909 - RNA, 23 nt, Artificial Sequence
  Synthetic
aaucucccagaaaucuacaaagg

SEQ ID NO: 582910 - RNA, 24 nt, Artificial Sequence
  Synthetic
caaucucccagaaaucuacaaagg

SEQ ID NO: 582911 - RNA, 18 nt, Artificial Sequence
  Synthetic
gaccgugcugcccaaagg

SEQ ID NO: 582912 - RNA, 19 nt, Artificial Sequence
  Synthetic
agaccgugcugcccaaagg

SEQ ID NO: 582913 - RNA, 20 nt, Artificial Sequence
  Synthetic
aagaccgugcugcccaaagg

SEQ ID NO: 582914 - RNA, 21 nt, Artificial Sequence
  Synthetic
gaagaccgugcugcccaaagg

SEQ ID NO: 582915 - RNA, 22 nt, Artificial Sequence
  Synthetic
ugaagaccgugcugcccaaagg

SEQ ID NO: 582916 - RNA, 23 nt, Artificial Sequence
  Synthetic
cugaagaccgugcugcccaaagg

SEQ ID NO: 582917 - RNA, 24 nt, Artificial Sequence
  Synthetic
ucugaagaccgugcugcccaaagg

SEQ ID NO: 582918 - RNA, 18 nt, Artificial Sequence
  Synthetic
ugucuugguugccaaagg

SEQ ID NO: 582919 - RNA, 19 nt, Artificial Sequence
  Synthetic
gugucuugguugccaaagg

SEQ ID NO: 582920 - RNA, 20 nt, Artificial Sequence
  Synthetic
agugucuugguugccaaagg

SEQ ID NO: 582921 - RNA, 21 nt, Artificial Sequence
  Synthetic
cagugucuugguugccaaagg

SEQ ID NO: 582922 - RNA, 22 nt, Artificial Sequence
  Synthetic
ucagugucuugguugccaaagg

SEQ ID NO: 582923 - RNA, 23 nt, Artificial Sequence
  Synthetic
cucagugucuugguugccaaagg

SEQ ID NO: 582924 - RNA, 24 nt, Artificial Sequence
  Synthetic
acucagugucuugguugccaaagg

SEQ ID NO: 582925 - RNA, 18 nt, Artificial Sequence
  Synthetic
ucauuucugaggcaaagg

SEQ ID NO: 582926 - RNA, 19 nt, Artificial Sequence
  Synthetic
uucauuucugaggcaaagg

SEQ ID NO: 582927 - RNA, 20 nt, Artificial Sequence
  Synthetic
cuucauuucugaggcaaagg

SEQ ID NO: 582928 - RNA, 21 nt, Artificial Sequence
  Synthetic
acuucauuucugaggcaaagg

SEQ ID NO: 582929 - RNA, 22 nt, Artificial Sequence
  Synthetic
aacuucauuucugaggcaaagg

SEQ ID NO: 582930 - RNA, 23 nt, Artificial Sequence
  Synthetic
aaacuucauuucugaggcaaagg

SEQ ID NO: 582931 - RNA, 24 nt, Artificial Sequence
  Synthetic
aaaacuucauuucugaggcaaagg

SEQ ID NO: 582932 - RNA, 18 nt, Artificial Sequence
  Synthetic
aaccugcuuaggcaaagg

SEQ ID NO: 582933 - RNA, 19 nt, Artificial Sequence
  Synthetic
uaaccugcuuaggcaaagg

SEQ ID NO: 582934 - RNA, 20 nt, Artificial Sequence
  Synthetic
uuaaccugcuuaggcaaagg

SEQ ID NO: 582935 - RNA, 21 nt, Artificial Sequence
  Synthetic
guuaaccugcuuaggcaaagg

SEQ ID NO: 582936 - RNA, 22 nt, Artificial Sequence
  Synthetic
aguuaaccugcuuaggcaaagg

SEQ ID NO: 582937 - RNA, 23 nt, Artificial Sequence
  Synthetic
aaguuaaccugcuuaggcaaagg

SEQ ID NO: 582938 - RNA, 24 nt, Artificial Sequence
  Synthetic
caaguuaaccugcuuaggcaaagg

SEQ ID NO: 582939 - RNA, 18 nt, Artificial Sequence
  Synthetic
gggauuggagggcaaagg

SEQ ID NO: 582940 - RNA, 19 nt, Artificial Sequence
  Synthetic
ggggauuggagggcaaagg

SEQ ID NO: 582941 - RNA, 20 nt, Artificial Sequence
  Synthetic
aggggauuggagggcaaagg

SEQ ID NO: 582942 - RNA, 21 nt, Artificial Sequence
  Synthetic
aaggggauuggagggcaaagg

SEQ ID NO: 582943 - RNA, 22 nt, Artificial Sequence
  Synthetic
gaaggggauuggagggcaaagg

SEQ ID NO: 582944 - RNA, 23 nt, Artificial Sequence
  Synthetic
agaaggggauuggagggcaaagg

SEQ ID NO: 582945 - RNA, 24 nt, Artificial Sequence
  Synthetic
aagaaggggauuggagggcaaagg

SEQ ID NO: 582946 - RNA, 18 nt, Artificial Sequence
  Synthetic
uaagucuuugggcaaagg

SEQ ID NO: 582947 - RNA, 19 nt, Artificial Sequence
  Synthetic
guaagucuuugggcaaagg

SEQ ID NO: 582948 - RNA, 20 nt, Artificial Sequence
  Synthetic
gguaagucuuugggcaaagg

SEQ ID NO: 582949 - RNA, 21 nt, Artificial Sequence
  Synthetic
ggguaagucuuugggcaaagg

SEQ ID NO: 582950 - RNA, 22 nt, Artificial Sequence
  Synthetic
gggguaagucuuugggcaaagg

SEQ ID NO: 582951 - RNA, 23 nt, Artificial Sequence
  Synthetic
agggguaagucuuugggcaaagg

SEQ ID NO: 582952 - RNA, 24 nt, Artificial Sequence
  Synthetic
uagggguaagucuuugggcaaagg

SEQ ID NO: 582953 - RNA, 18 nt, Artificial Sequence
  Synthetic
aaguguagccugcaaagg

SEQ ID NO: 582954 - RNA, 19 nt, Artificial Sequence
  Synthetic
aaaguguagccugcaaagg

SEQ ID NO: 582955 - RNA, 20 nt, Artificial Sequence
  Synthetic
aaaaguguagccugcaaagg

SEQ ID NO: 582956 - RNA, 21 nt, Artificial Sequence
  Synthetic
gaaaaguguagccugcaaagg

SEQ ID NO: 582957 - RNA, 22 nt, Artificial Sequence
  Synthetic
ggaaaaguguagccugcaaagg

SEQ ID NO: 582958 - RNA, 23 nt, Artificial Sequence
  Synthetic
aggaaaaguguagccugcaaagg

SEQ ID NO: 582959 - RNA, 24 nt, Artificial Sequence
  Synthetic
aaggaaaaguguagccugcaaagg

SEQ ID NO: 582960 - RNA, 18 nt, Artificial Sequence
  Synthetic
auauaccuaaaucaaagg

SEQ ID NO: 582961 - RNA, 19 nt, Artificial Sequence
  Synthetic
uauauaccuaaaucaaagg

SEQ ID NO: 582962 - RNA, 20 nt, Artificial Sequence
  Synthetic
cuauauaccuaaaucaaagg

SEQ ID NO: 582963 - RNA, 21 nt, Artificial Sequence
  Synthetic
acuauauaccuaaaucaaagg

SEQ ID NO: 582964 - RNA, 22 nt, Artificial Sequence
  Synthetic
gacuauauaccuaaaucaaagg

SEQ ID NO: 582965 - RNA, 23 nt, Artificial Sequence
  Synthetic
agacuauauaccuaaaucaaagg

SEQ ID NO: 582966 - RNA, 24 nt, Artificial Sequence
  Synthetic
aagacuauauaccuaaaucaaagg

SEQ ID NO: 582967 - RNA, 18 nt, Artificial Sequence
  Synthetic
cuguggcaaccucaaagg

SEQ ID NO: 582968 - RNA, 19 nt, Artificial Sequence
  Synthetic
ccuguggcaaccucaaagg

SEQ ID NO: 582969 - RNA, 20 nt, Artificial Sequence
  Synthetic
gccuguggcaaccucaaagg

SEQ ID NO: 582970 - RNA, 21 nt, Artificial Sequence
  Synthetic
agccuguggcaaccucaaagg

SEQ ID NO: 582971 - RNA, 22 nt, Artificial Sequence
  Synthetic
cagccuguggcaaccucaaagg

SEQ ID NO: 582972 - RNA, 23 nt, Artificial Sequence
  Synthetic
ucagccuguggcaaccucaaagg

SEQ ID NO: 582973 - RNA, 24 nt, Artificial Sequence
  Synthetic
gucagccuguggcaaccucaaagg

SEQ ID NO: 582974 - RNA, 18 nt, Artificial Sequence
  Synthetic
ucaauucaagcucaaagg

SEQ ID NO: 582975 - RNA, 19 nt, Artificial Sequence
  Synthetic
uucaauucaagcucaaagg

SEQ ID NO: 582976 - RNA, 20 nt, Artificial Sequence
  Synthetic
uuucaauucaagcucaaagg

SEQ ID NO: 582977 - RNA, 21 nt, Artificial Sequence
  Synthetic
guuucaauucaagcucaaagg

SEQ ID NO: 582978 - RNA, 22 nt, Artificial Sequence
  Synthetic
gguuucaauucaagcucaaagg

SEQ ID NO: 582979 - RNA, 23 nt, Artificial Sequence
  Synthetic
agguuucaauucaagcucaaagg

SEQ ID NO: 582980 - RNA, 24 nt, Artificial Sequence
  Synthetic
aagguuucaauucaagcucaaagg

SEQ ID NO: 582981 - RNA, 18 nt, Artificial Sequence
  Synthetic
augugaaccucucaaagg

SEQ ID NO: 582982 - RNA, 19 nt, Artificial Sequence
  Synthetic
aaugugaaccucucaaagg

SEQ ID NO: 582983 - RNA, 20 nt, Artificial Sequence
  Synthetic
gaaugugaaccucucaaagg

SEQ ID NO: 582984 - RNA, 21 nt, Artificial Sequence
  Synthetic
ggaaugugaaccucucaaagg

SEQ ID NO: 582985 - RNA, 22 nt, Artificial Sequence
  Synthetic
uggaaugugaaccucucaaagg

SEQ ID NO: 582986 - RNA, 23 nt, Artificial Sequence
  Synthetic
cuggaaugugaaccucucaaagg

SEQ ID NO: 582987 - RNA, 24 nt, Artificial Sequence
  Synthetic
ucuggaaugugaaccucucaaagg

SEQ ID NO: 582988 - RNA, 18 nt, Artificial Sequence
  Synthetic
uuuuauagauuucaaagg

SEQ ID NO: 582989 - RNA, 19 nt, Artificial Sequence
  Synthetic
auuuuauagauuucaaagg

SEQ ID NO: 582990 - RNA, 20 nt, Artificial Sequence
  Synthetic
cauuuuauagauuucaaagg

SEQ ID NO: 582991 - RNA, 21 nt, Artificial Sequence
  Synthetic
ccauuuuauagauuucaaagg

SEQ ID NO: 582992 - RNA, 22 nt, Artificial Sequence
  Synthetic
cccauuuuauagauuucaaagg

SEQ ID NO: 582993 - RNA, 23 nt, Artificial Sequence
  Synthetic
ucccauuuuauagauuucaaagg

SEQ ID NO: 582994 - RNA, 24 nt, Artificial Sequence
  Synthetic
aucccauuuuauagauuucaaagg

SEQ ID NO: 582995 - RNA, 18 nt, Artificial Sequence
  Synthetic
gaaagaaagaaagaaagg

SEQ ID NO: 582996 - RNA, 19 nt, Artificial Sequence
  Synthetic
agaaagaaagaaagaaagg

SEQ ID NO: 582997 - RNA, 20 nt, Artificial Sequence
  Synthetic
aagaaagaaagaaagaaagg

SEQ ID NO: 582998 - RNA, 21 nt, Artificial Sequence
  Synthetic
gaagaaagaaagaaagaaagg

SEQ ID NO: 582999 - RNA, 22 nt, Artificial Sequence
  Synthetic
agaagaaagaaagaaagaaagg

SEQ ID NO: 583000 - RNA, 23 nt, Artificial Sequence
  Synthetic
aagaagaaagaaagaaagaaagg

SEQ ID NO: 583001 - RNA, 24 nt, Artificial Sequence
  Synthetic
aaagaagaaagaaagaaagaaagg

SEQ ID NO: 583002 - RNA, 18 nt, Artificial Sequence
  Synthetic
gagagguagaaagaaagg

SEQ ID NO: 583003 - RNA, 19 nt, Artificial Sequence
  Synthetic
agagagguagaaagaaagg

SEQ ID NO: 583004 - RNA, 20 nt, Artificial Sequence
  Synthetic
gagagagguagaaagaaagg

SEQ ID NO: 583005 - RNA, 21 nt, Artificial Sequence
  Synthetic
ggagagagguagaaagaaagg

SEQ ID NO: 583006 - RNA, 22 nt, Artificial Sequence
  Synthetic
aggagagagguagaaagaaagg

SEQ ID NO: 583007 - RNA, 23 nt, Artificial Sequence
  Synthetic
aaggagagagguagaaagaaagg

SEQ ID NO: 583008 - RNA, 24 nt, Artificial Sequence
  Synthetic
aaaggagagagguagaaagaaagg

SEQ ID NO: 583009 - RNA, 18 nt, Artificial Sequence
  Synthetic
agacaaccaacagaaagg

SEQ ID NO: 583010 - RNA, 19 nt, Artificial Sequence
  Synthetic
gagacaaccaacagaaagg

SEQ ID NO: 583011 - RNA, 20 nt, Artificial Sequence
  Synthetic
agagacaaccaacagaaagg

SEQ ID NO: 583012 - RNA, 21 nt, Artificial Sequence
  Synthetic
aagagacaaccaacagaaagg

SEQ ID NO: 583013 - RNA, 22 nt, Artificial Sequence
  Synthetic
gaagagacaaccaacagaaagg

SEQ ID NO: 583014 - RNA, 23 nt, Artificial Sequence
  Synthetic
ugaagagacaaccaacagaaagg

SEQ ID NO: 583015 - RNA, 24 nt, Artificial Sequence
  Synthetic
gugaagagacaaccaacagaaagg

SEQ ID NO: 583016 - RNA, 18 nt, Artificial Sequence
  Synthetic
agcucagccacagaaagg

SEQ ID NO: 583017 - RNA, 19 nt, Artificial Sequence
  Synthetic
cagcucagccacagaaagg

SEQ ID NO: 583018 - RNA, 20 nt, Artificial Sequence
  Synthetic
ccagcucagccacagaaagg

SEQ ID NO: 583019 - RNA, 21 nt, Artificial Sequence
  Synthetic
accagcucagccacagaaagg

SEQ ID NO: 583020 - RNA, 22 nt, Artificial Sequence
  Synthetic
uaccagcucagccacagaaagg

SEQ ID NO: 583021 - RNA, 23 nt, Artificial Sequence
  Synthetic
guaccagcucagccacagaaagg

SEQ ID NO: 583022 - RNA, 24 nt, Artificial Sequence
  Synthetic
gguaccagcucagccacagaaagg

SEQ ID NO: 583023 - RNA, 18 nt, Artificial Sequence
  Synthetic
uggaaaaagacagaaagg

SEQ ID NO: 583024 - RNA, 19 nt, Artificial Sequence
  Synthetic
uuggaaaaagacagaaagg

SEQ ID NO: 583025 - RNA, 20 nt, Artificial Sequence
  Synthetic
uuuggaaaaagacagaaagg

SEQ ID NO: 583026 - RNA, 21 nt, Artificial Sequence
  Synthetic
guuuggaaaaagacagaaagg

SEQ ID NO: 583027 - RNA, 22 nt, Artificial Sequence
  Synthetic
cguuuggaaaaagacagaaagg

SEQ ID NO: 583028 - RNA, 23 nt, Artificial Sequence
  Synthetic
acguuuggaaaaagacagaaagg

SEQ ID NO: 583029 - RNA, 24 nt, Artificial Sequence
  Synthetic
cacguuuggaaaaagacagaaagg

SEQ ID NO: 583030 - RNA, 18 nt, Artificial Sequence
  Synthetic
aaggucaggacagaaagg

SEQ ID NO: 583031 - RNA, 19 nt, Artificial Sequence
  Synthetic
gaaggucaggacagaaagg

SEQ ID NO: 583032 - RNA, 20 nt, Artificial Sequence
  Synthetic
agaaggucaggacagaaagg

SEQ ID NO: 583033 - RNA, 21 nt, Artificial Sequence
  Synthetic
aagaaggucaggacagaaagg

SEQ ID NO: 583034 - RNA, 22 nt, Artificial Sequence
  Synthetic
caagaaggucaggacagaaagg

SEQ ID NO: 583035 - RNA, 23 nt, Artificial Sequence
  Synthetic
acaagaaggucaggacagaaagg

SEQ ID NO: 583036 - RNA, 24 nt, Artificial Sequence
  Synthetic
gacaagaaggucaggacagaaagg

SEQ ID NO: 583037 - RNA, 18 nt, Artificial Sequence
  Synthetic
gagagaucaagagaaagg

SEQ ID NO: 583038 - RNA, 19 nt, Artificial Sequence
  Synthetic
agagagaucaagagaaagg

SEQ ID NO: 583039 - RNA, 20 nt, Artificial Sequence
  Synthetic
aagagagaucaagagaaagg

SEQ ID NO: 583040 - RNA, 21 nt, Artificial Sequence
  Synthetic
aaagagagaucaagagaaagg

SEQ ID NO: 583041 - RNA, 22 nt, Artificial Sequence
  Synthetic
gaaagagagaucaagagaaagg

SEQ ID NO: 583042 - RNA, 23 nt, Artificial Sequence
  Synthetic
ggaaagagagaucaagagaaagg

SEQ ID NO: 583043 - RNA, 24 nt, Artificial Sequence
  Synthetic
gggaaagagagaucaagagaaagg

SEQ ID NO: 583044 - RNA, 18 nt, Artificial Sequence
  Synthetic
agaagagcaugagaaagg

SEQ ID NO: 583045 - RNA, 19 nt, Artificial Sequence
  Synthetic
cagaagagcaugagaaagg

SEQ ID NO: 583046 - RNA, 20 nt, Artificial Sequence
  Synthetic
acagaagagcaugagaaagg

SEQ ID NO: 583047 - RNA, 21 nt, Artificial Sequence
  Synthetic
gacagaagagcaugagaaagg

SEQ ID NO: 583048 - RNA, 22 nt, Artificial Sequence
  Synthetic
agacagaagagcaugagaaagg

SEQ ID NO: 583049 - RNA, 23 nt, Artificial Sequence
  Synthetic
gagacagaagagcaugagaaagg

SEQ ID NO: 583050 - RNA, 24 nt, Artificial Sequence
  Synthetic
ggagacagaagagcaugagaaagg

SEQ ID NO: 583051 - RNA, 18 nt, Artificial Sequence
  Synthetic
auuaaauuauuagaaagg

SEQ ID NO: 583052 - RNA, 19 nt, Artificial Sequence
  Synthetic
uauuaaauuauuagaaagg

SEQ ID NO: 583053 - RNA, 20 nt, Artificial Sequence
  Synthetic
uuauuaaauuauuagaaagg

SEQ ID NO: 583054 - RNA, 21 nt, Artificial Sequence
  Synthetic
auuauuaaauuauuagaaagg

SEQ ID NO: 583055 - RNA, 22 nt, Artificial Sequence
  Synthetic
gauuauuaaauuauuagaaagg

SEQ ID NO: 583056 - RNA, 23 nt, Artificial Sequence
  Synthetic
cgauuauuaaauuauuagaaagg

SEQ ID NO: 583057 - RNA, 24 nt, Artificial Sequence
  Synthetic
acgauuauuaaauuauuagaaagg

SEQ ID NO: 583058 - RNA, 18 nt, Artificial Sequence
  Synthetic
gagcaagacuccgaaagg

SEQ ID NO: 583059 - RNA, 19 nt, Artificial Sequence
  Synthetic
agagcaagacuccgaaagg

SEQ ID NO: 583060 - RNA, 20 nt, Artificial Sequence
  Synthetic
cagagcaagacuccgaaagg

SEQ ID NO: 583061 - RNA, 21 nt, Artificial Sequence
  Synthetic
acagagcaagacuccgaaagg

SEQ ID NO: 583062 - RNA, 22 nt, Artificial Sequence
  Synthetic
aacagagcaagacuccgaaagg

SEQ ID NO: 583063 - RNA, 23 nt, Artificial Sequence
  Synthetic
caacagagcaagacuccgaaagg

SEQ ID NO: 583064 - RNA, 24 nt, Artificial Sequence
  Synthetic
gcaacagagcaagacuccgaaagg

SEQ ID NO: 583065 - RNA, 18 nt, Artificial Sequence
  Synthetic
acagaaggaaaggaaagg

SEQ ID NO: 583066 - RNA, 19 nt, Artificial Sequence
  Synthetic
aacagaaggaaaggaaagg

SEQ ID NO: 583067 - RNA, 20 nt, Artificial Sequence
  Synthetic
gaacagaaggaaaggaaagg

SEQ ID NO: 583068 - RNA, 21 nt, Artificial Sequence
  Synthetic
ggaacagaaggaaaggaaagg

SEQ ID NO: 583069 - RNA, 22 nt, Artificial Sequence
  Synthetic
aggaacagaaggaaaggaaagg

SEQ ID NO: 583070 - RNA, 23 nt, Artificial Sequence
  Synthetic
aaggaacagaaggaaaggaaagg

SEQ ID NO: 583071 - RNA, 24 nt, Artificial Sequence
  Synthetic
aaaggaacagaaggaaaggaaagg

SEQ ID NO: 583072 - RNA, 18 nt, Artificial Sequence
  Synthetic
agugaacugaaggaaagg

SEQ ID NO: 583073 - RNA, 19 nt, Artificial Sequence
  Synthetic
aagugaacugaaggaaagg

SEQ ID NO: 583074 - RNA, 20 nt, Artificial Sequence
  Synthetic
gaagugaacugaaggaaagg

SEQ ID NO: 583075 - RNA, 21 nt, Artificial Sequence
  Synthetic
ugaagugaacugaaggaaagg

SEQ ID NO: 583076 - RNA, 22 nt, Artificial Sequence
  Synthetic
uugaagugaacugaaggaaagg

SEQ ID NO: 583077 - RNA, 23 nt, Artificial Sequence
  Synthetic
cuugaagugaacugaaggaaagg

SEQ ID NO: 583078 - RNA, 24 nt, Artificial Sequence
  Synthetic
ucuugaagugaacugaaggaaagg

SEQ ID NO: 583079 - RNA, 18 nt, Artificial Sequence
  Synthetic
uguagggaacaggaaagg

SEQ ID NO: 583080 - RNA, 19 nt, Artificial Sequence
  Synthetic
cuguagggaacaggaaagg

SEQ ID NO: 583081 - RNA, 20 nt, Artificial Sequence
  Synthetic
acuguagggaacaggaaagg

SEQ ID NO: 583082 - RNA, 21 nt, Artificial Sequence
  Synthetic
cacuguagggaacaggaaagg

SEQ ID NO: 583083 - RNA, 22 nt, Artificial Sequence
  Synthetic
acacuguagggaacaggaaagg

SEQ ID NO: 583084 - RNA, 23 nt, Artificial Sequence
  Synthetic
aacacuguagggaacaggaaagg

SEQ ID NO: 583085 - RNA, 24 nt, Artificial Sequence
  Synthetic
aaacacuguagggaacaggaaagg

SEQ ID NO: 583086 - RNA, 18 nt, Artificial Sequence
  Synthetic
agaggcauugaggaaagg

SEQ ID NO: 583087 - RNA, 19 nt, Artificial Sequence
  Synthetic
aagaggcauugaggaaagg

SEQ ID NO: 583088 - RNA, 20 nt, Artificial Sequence
  Synthetic
aaagaggcauugaggaaagg

SEQ ID NO: 583089 - RNA, 21 nt, Artificial Sequence
  Synthetic
aaaagaggcauugaggaaagg

SEQ ID NO: 583090 - RNA, 22 nt, Artificial Sequence
  Synthetic
uaaaagaggcauugaggaaagg

SEQ ID NO: 583091 - RNA, 23 nt, Artificial Sequence
  Synthetic
cuaaaagaggcauugaggaaagg

SEQ ID NO: 583092 - RNA, 24 nt, Artificial Sequence
  Synthetic
gcuaaaagaggcauugaggaaagg

SEQ ID NO: 583093 - RNA, 18 nt, Artificial Sequence
  Synthetic
ggaaggaaaagggaaagg

SEQ ID NO: 583094 - RNA, 19 nt, Artificial Sequence
  Synthetic
gggaaggaaaagggaaagg

SEQ ID NO: 583095 - RNA, 20 nt, Artificial Sequence
  Synthetic
ugggaaggaaaagggaaagg

SEQ ID NO: 583096 - RNA, 21 nt, Artificial Sequence
  Synthetic
cugggaaggaaaagggaaagg

SEQ ID NO: 583097 - RNA, 22 nt, Artificial Sequence
  Synthetic
ucugggaaggaaaagggaaagg

SEQ ID NO: 583098 - RNA, 23 nt, Artificial Sequence
  Synthetic
aucugggaaggaaaagggaaagg

SEQ ID NO: 583099 - RNA, 24 nt, Artificial Sequence
  Synthetic
caucugggaaggaaaagggaaagg

SEQ ID NO: 583100 - RNA, 18 nt, Artificial Sequence
  Synthetic
aaguauucuagggaaagg

SEQ ID NO: 583101 - RNA, 19 nt, Artificial Sequence
  Synthetic
aaaguauucuagggaaagg

SEQ ID NO: 583102 - RNA, 20 nt, Artificial Sequence
  Synthetic
gaaaguauucuagggaaagg

SEQ ID NO: 583103 - RNA, 21 nt, Artificial Sequence
  Synthetic
agaaaguauucuagggaaagg

SEQ ID NO: 583104 - RNA, 22 nt, Artificial Sequence
  Synthetic
aagaaaguauucuagggaaagg

SEQ ID NO: 583105 - RNA, 23 nt, Artificial Sequence
  Synthetic
aaagaaaguauucuagggaaagg

SEQ ID NO: 583106 - RNA, 24 nt, Artificial Sequence
  Synthetic
aaaagaaaguauucuagggaaagg

SEQ ID NO: 583107 - RNA, 18 nt, Artificial Sequence
  Synthetic
acaaaaaaaggggaaagg

SEQ ID NO: 583108 - RNA, 19 nt, Artificial Sequence
  Synthetic
cacaaaaaaaggggaaagg

SEQ ID NO: 583109 - RNA, 20 nt, Artificial Sequence
  Synthetic
acacaaaaaaaggggaaagg

SEQ ID NO: 583110 - RNA, 21 nt, Artificial Sequence
  Synthetic
cacacaaaaaaaggggaaagg

SEQ ID NO: 583111 - RNA, 22 nt, Artificial Sequence
  Synthetic
ucacacaaaaaaaggggaaagg

SEQ ID NO: 583112 - RNA, 23 nt, Artificial Sequence
  Synthetic
gucacacaaaaaaaggggaaagg

SEQ ID NO: 583113 - RNA, 24 nt, Artificial Sequence
  Synthetic
ugucacacaaaaaaaggggaaagg

SEQ ID NO: 583114 - RNA, 18 nt, Artificial Sequence
  Synthetic
uagugguagggggaaagg

SEQ ID NO: 583115 - RNA, 19 nt, Artificial Sequence
  Synthetic
guagugguagggggaaagg

SEQ ID NO: 583116 - RNA, 20 nt, Artificial Sequence
  Synthetic
gguagugguagggggaaagg

SEQ ID NO: 583117 - RNA, 21 nt, Artificial Sequence
  Synthetic
ggguagugguagggggaaagg

SEQ ID NO: 583118 - RNA, 22 nt, Artificial Sequence
  Synthetic
aggguagugguagggggaaagg

SEQ ID NO: 583119 - RNA, 23 nt, Artificial Sequence
  Synthetic
aaggguagugguagggggaaagg

SEQ ID NO: 583120 - RNA, 24 nt, Artificial Sequence
  Synthetic
gaaggguagugguagggggaaagg

SEQ ID NO: 583121 - RNA, 18 nt, Artificial Sequence
  Synthetic
guacacugcugggaaagg

SEQ ID NO: 583122 - RNA, 19 nt, Artificial Sequence
  Synthetic
uguacacugcugggaaagg

SEQ ID NO: 583123 - RNA, 20 nt, Artificial Sequence
  Synthetic
cuguacacugcugggaaagg

SEQ ID NO: 583124 - RNA, 21 nt, Artificial Sequence
  Synthetic
ucuguacacugcugggaaagg

SEQ ID NO: 583125 - RNA, 22 nt, Artificial Sequence
  Synthetic
aucuguacacugcugggaaagg

SEQ ID NO: 583126 - RNA, 23 nt, Artificial Sequence
  Synthetic
uaucuguacacugcugggaaagg

SEQ ID NO: 583127 - RNA, 24 nt, Artificial Sequence
  Synthetic
cuaucuguacacugcugggaaagg

SEQ ID NO: 583128 - RNA, 18 nt, Artificial Sequence
  Synthetic
cuuuguugaauggaaagg

SEQ ID NO: 583129 - RNA, 19 nt, Artificial Sequence
  Synthetic
ucuuuguugaauggaaagg

SEQ ID NO: 583130 - RNA, 20 nt, Artificial Sequence
  Synthetic
uucuuuguugaauggaaagg

SEQ ID NO: 583131 - RNA, 21 nt, Artificial Sequence
  Synthetic
uuucuuuguugaauggaaagg

SEQ ID NO: 583132 - RNA, 22 nt, Artificial Sequence
  Synthetic
uuuucuuuguugaauggaaagg

SEQ ID NO: 583133 - RNA, 23 nt, Artificial Sequence
  Synthetic
uuuuucuuuguugaauggaaagg

SEQ ID NO: 583134 - RNA, 24 nt, Artificial Sequence
  Synthetic
auuuuucuuuguugaauggaaagg

SEQ ID NO: 583135 - RNA, 18 nt, Artificial Sequence
  Synthetic
agaguaaacuuggaaagg

SEQ ID NO: 583136 - RNA, 19 nt, Artificial Sequence
  Synthetic
aagaguaaacuuggaaagg

SEQ ID NO: 583137 - RNA, 20 nt, Artificial Sequence
  Synthetic
gaagaguaaacuuggaaagg

SEQ ID NO: 583138 - RNA, 21 nt, Artificial Sequence
  Synthetic
agaagaguaaacuuggaaagg

SEQ ID NO: 583139 - RNA, 22 nt, Artificial Sequence
  Synthetic
uagaagaguaaacuuggaaagg

SEQ ID NO: 583140 - RNA, 23 nt, Artificial Sequence
  Synthetic
guagaagaguaaacuuggaaagg

SEQ ID NO: 583141 - RNA, 24 nt, Artificial Sequence
  Synthetic
aguagaagaguaaacuuggaaagg

SEQ ID NO: 583142 - RNA, 18 nt, Artificial Sequence
  Synthetic
ucgcuugaaccugaaagg

SEQ ID NO: 583143 - RNA, 19 nt, Artificial Sequence
  Synthetic
aucgcuugaaccugaaagg

SEQ ID NO: 583144 - RNA, 20 nt, Artificial Sequence
  Synthetic
aaucgcuugaaccugaaagg

SEQ ID NO: 583145 - RNA, 21 nt, Artificial Sequence
  Synthetic
gaaucgcuugaaccugaaagg

SEQ ID NO: 583146 - RNA, 22 nt, Artificial Sequence
  Synthetic
agaaucgcuugaaccugaaagg

SEQ ID NO: 583147 - RNA, 23 nt, Artificial Sequence
  Synthetic
gagaaucgcuugaaccugaaagg

SEQ ID NO: 583148 - RNA, 24 nt, Artificial Sequence
  Synthetic
ggagaaucgcuugaaccugaaagg

SEQ ID NO: 583149 - RNA, 18 nt, Artificial Sequence
  Synthetic
uaauuccauccugaaagg

SEQ ID NO: 583150 - RNA, 19 nt, Artificial Sequence
  Synthetic
uuaauuccauccugaaagg

SEQ ID NO: 583151 - RNA, 20 nt, Artificial Sequence
  Synthetic
guuaauuccauccugaaagg

SEQ ID NO: 583152 - RNA, 21 nt, Artificial Sequence
  Synthetic
uguuaauuccauccugaaagg

SEQ ID NO: 583153 - RNA, 22 nt, Artificial Sequence
  Synthetic
uuguuaauuccauccugaaagg

SEQ ID NO: 583154 - RNA, 23 nt, Artificial Sequence
  Synthetic
uuuguuaauuccauccugaaagg

SEQ ID NO: 583155 - RNA, 24 nt, Artificial Sequence
  Synthetic
auuuguuaauuccauccugaaagg

SEQ ID NO: 583156 - RNA, 18 nt, Artificial Sequence
  Synthetic
uaacauaaaagugaaagg

SEQ ID NO: 583157 - RNA, 19 nt, Artificial Sequence
  Synthetic
guaacauaaaagugaaagg

SEQ ID NO: 583158 - RNA, 20 nt, Artificial Sequence
  Synthetic
cguaacauaaaagugaaagg

SEQ ID NO: 583159 - RNA, 21 nt, Artificial Sequence
  Synthetic
ccguaacauaaaagugaaagg

SEQ ID NO: 583160 - RNA, 22 nt, Artificial Sequence
  Synthetic
uccguaacauaaaagugaaagg

SEQ ID NO: 583161 - RNA, 23 nt, Artificial Sequence
  Synthetic
cuccguaacauaaaagugaaagg

SEQ ID NO: 583162 - RNA, 24 nt, Artificial Sequence
  Synthetic
ucuccguaacauaaaagugaaagg

SEQ ID NO: 583163 - RNA, 18 nt, Artificial Sequence
  Synthetic
aguguuacaagugaaagg

SEQ ID NO: 583164 - RNA, 19 nt, Artificial Sequence
  Synthetic
uaguguuacaagugaaagg

SEQ ID NO: 583165 - RNA, 20 nt, Artificial Sequence
  Synthetic
auaguguuacaagugaaagg

SEQ ID NO: 583166 - RNA, 21 nt, Artificial Sequence
  Synthetic
cauaguguuacaagugaaagg

SEQ ID NO: 583167 - RNA, 22 nt, Artificial Sequence
  Synthetic
gcauaguguuacaagugaaagg

SEQ ID NO: 583168 - RNA, 23 nt, Artificial Sequence
  Synthetic
ugcauaguguuacaagugaaagg

SEQ ID NO: 583169 - RNA, 24 nt, Artificial Sequence
  Synthetic
cugcauaguguuacaagugaaagg

SEQ ID NO: 583170 - RNA, 18 nt, Artificial Sequence
  Synthetic
aucaaagugagugaaagg

SEQ ID NO: 583171 - RNA, 19 nt, Artificial Sequence
  Synthetic
uaucaaagugagugaaagg

SEQ ID NO: 583172 - RNA, 20 nt, Artificial Sequence
  Synthetic
uuaucaaagugagugaaagg

SEQ ID NO: 583173 - RNA, 21 nt, Artificial Sequence
  Synthetic
cuuaucaaagugagugaaagg

SEQ ID NO: 583174 - RNA, 22 nt, Artificial Sequence
  Synthetic
ccuuaucaaagugagugaaagg

SEQ ID NO: 583175 - RNA, 23 nt, Artificial Sequence
  Synthetic
gccuuaucaaagugagugaaagg

SEQ ID NO: 583176 - RNA, 24 nt, Artificial Sequence
  Synthetic
ugccuuaucaaagugagugaaagg

SEQ ID NO: 583177 - RNA, 18 nt, Artificial Sequence
  Synthetic
uuuguauauagugaaagg

SEQ ID NO: 583178 - RNA, 19 nt, Artificial Sequence
  Synthetic
uuuuguauauagugaaagg

SEQ ID NO: 583179 - RNA, 20 nt, Artificial Sequence
  Synthetic
uuuuuguauauagugaaagg

SEQ ID NO: 583180 - RNA, 21 nt, Artificial Sequence
  Synthetic
auuuuuguauauagugaaagg

SEQ ID NO: 583181 - RNA, 22 nt, Artificial Sequence
  Synthetic
aauuuuuguauauagugaaagg

SEQ ID NO: 583182 - RNA, 23 nt, Artificial Sequence
  Synthetic
uaauuuuuguauauagugaaagg

SEQ ID NO: 583183 - RNA, 24 nt, Artificial Sequence
  Synthetic
uuaauuuuuguauauagugaaagg

SEQ ID NO: 583184 - RNA, 18 nt, Artificial Sequence
  Synthetic
aauagauuccuugaaagg

SEQ ID NO: 583185 - RNA, 19 nt, Artificial Sequence
  Synthetic
gaauagauuccuugaaagg

SEQ ID NO: 583186 - RNA, 20 nt, Artificial Sequence
  Synthetic
ggaauagauuccuugaaagg

SEQ ID NO: 583187 - RNA, 21 nt, Artificial Sequence
  Synthetic
uggaauagauuccuugaaagg

SEQ ID NO: 583188 - RNA, 22 nt, Artificial Sequence
  Synthetic
uuggaauagauuccuugaaagg

SEQ ID NO: 583189 - RNA, 23 nt, Artificial Sequence
  Synthetic
uuuggaauagauuccuugaaagg

SEQ ID NO: 583190 - RNA, 24 nt, Artificial Sequence
  Synthetic
cuuuggaauagauuccuugaaagg

SEQ ID NO: 583191 - RNA, 18 nt, Artificial Sequence
  Synthetic
acuuuaaugcuugaaagg

SEQ ID NO: 583192 - RNA, 19 nt, Artificial Sequence
  Synthetic
uacuuuaaugcuugaaagg

SEQ ID NO: 583193 - RNA, 20 nt, Artificial Sequence
  Synthetic
guacuuuaaugcuugaaagg

SEQ ID NO: 583194 - RNA, 21 nt, Artificial Sequence
  Synthetic
uguacuuuaaugcuugaaagg

SEQ ID NO: 583195 - RNA, 22 nt, Artificial Sequence
  Synthetic
auguacuuuaaugcuugaaagg

SEQ ID NO: 583196 - RNA, 23 nt, Artificial Sequence
  Synthetic
gauguacuuuaaugcuugaaagg

SEQ ID NO: 583197 - RNA, 24 nt, Artificial Sequence
  Synthetic
ugauguacuuuaaugcuugaaagg

SEQ ID NO: 583198 - RNA, 18 nt, Artificial Sequence
  Synthetic
aagaguguuuuugaaagg

SEQ ID NO: 583199 - RNA, 19 nt, Artificial Sequence
  Synthetic
aaagaguguuuuugaaagg

SEQ ID NO: 583200 - RNA, 20 nt, Artificial Sequence
  Synthetic
caaagaguguuuuugaaagg

SEQ ID NO: 583201 - RNA, 21 nt, Artificial Sequence
  Synthetic
ucaaagaguguuuuugaaagg

SEQ ID NO: 583202 - RNA, 22 nt, Artificial Sequence
  Synthetic
uucaaagaguguuuuugaaagg

SEQ ID NO: 583203 - RNA, 23 nt, Artificial Sequence
  Synthetic
uuucaaagaguguuuuugaaagg

SEQ ID NO: 583204 - RNA, 24 nt, Artificial Sequence
  Synthetic
uuuucaaagaguguuuuugaaagg

SEQ ID NO: 583205 - RNA, 18 nt, Artificial Sequence
  Synthetic
ugaugucaaaaauaaagg

SEQ ID NO: 583206 - RNA, 19 nt, Artificial Sequence
  Synthetic
cugaugucaaaaauaaagg

SEQ ID NO: 583207 - RNA, 20 nt, Artificial Sequence
  Synthetic
acugaugucaaaaauaaagg

SEQ ID NO: 583208 - RNA, 21 nt, Artificial Sequence
  Synthetic
aacugaugucaaaaauaaagg

SEQ ID NO: 583209 - RNA, 22 nt, Artificial Sequence
  Synthetic
aaacugaugucaaaaauaaagg

SEQ ID NO: 583210 - RNA, 23 nt, Artificial Sequence
  Synthetic
gaaacugaugucaaaaauaaagg

SEQ ID NO: 583211 - RNA, 24 nt, Artificial Sequence
  Synthetic
ggaaacugaugucaaaaauaaagg

SEQ ID NO: 583212 - RNA, 18 nt, Artificial Sequence
  Synthetic
ugguuaaaaggauaaagg

SEQ ID NO: 583213 - RNA, 19 nt, Artificial Sequence
  Synthetic
augguuaaaaggauaaagg

SEQ ID NO: 583214 - RNA, 20 nt, Artificial Sequence
  Synthetic
aaugguuaaaaggauaaagg

SEQ ID NO: 583215 - RNA, 21 nt, Artificial Sequence
  Synthetic
aaaugguuaaaaggauaaagg

SEQ ID NO: 583216 - RNA, 22 nt, Artificial Sequence
  Synthetic
uaaaugguuaaaaggauaaagg

SEQ ID NO: 583217 - RNA, 23 nt, Artificial Sequence
  Synthetic
cuaaaugguuaaaaggauaaagg

SEQ ID NO: 583218 - RNA, 24 nt, Artificial Sequence
  Synthetic
ccuaaaugguuaaaaggauaaagg

SEQ ID NO: 583219 - RNA, 18 nt, Artificial Sequence
  Synthetic
gaaucuccaggauaaagg

SEQ ID NO: 583220 - RNA, 19 nt, Artificial Sequence
  Synthetic
agaaucuccaggauaaagg

SEQ ID NO: 583221 - RNA, 20 nt, Artificial Sequence
  Synthetic
aagaaucuccaggauaaagg

SEQ ID NO: 583222 - RNA, 21 nt, Artificial Sequence
  Synthetic
aaagaaucuccaggauaaagg

SEQ ID NO: 583223 - RNA, 22 nt, Artificial Sequence
  Synthetic
caaagaaucuccaggauaaagg

SEQ ID NO: 583224 - RNA, 23 nt, Artificial Sequence
  Synthetic
ccaaagaaucuccaggauaaagg

SEQ ID NO: 583225 - RNA, 24 nt, Artificial Sequence
  Synthetic
gccaaagaaucuccaggauaaagg

SEQ ID NO: 583226 - RNA, 18 nt, Artificial Sequence
  Synthetic
guguugacuuuauaaagg

SEQ ID NO: 583227 - RNA, 19 nt, Artificial Sequence
  Synthetic
aguguugacuuuauaaagg

SEQ ID NO: 583228 - RNA, 20 nt, Artificial Sequence
  Synthetic
aaguguugacuuuauaaagg

SEQ ID NO: 583229 - RNA, 21 nt, Artificial Sequence
  Synthetic
uaaguguugacuuuauaaagg

SEQ ID NO: 583230 - RNA, 22 nt, Artificial Sequence
  Synthetic
uuaaguguugacuuuauaaagg

SEQ ID NO: 583231 - RNA, 23 nt, Artificial Sequence
  Synthetic
auuaaguguugacuuuauaaagg

SEQ ID NO: 583232 - RNA, 24 nt, Artificial Sequence
  Synthetic
gauuaaguguugacuuuauaaagg

SEQ ID NO: 583233 - RNA, 18 nt, Artificial Sequence
  Synthetic
cugaagagcagcuaaagg

SEQ ID NO: 583234 - RNA, 19 nt, Artificial Sequence
  Synthetic
gcugaagagcagcuaaagg

SEQ ID NO: 583235 - RNA, 20 nt, Artificial Sequence
  Synthetic
agcugaagagcagcuaaagg

SEQ ID NO: 583236 - RNA, 21 nt, Artificial Sequence
  Synthetic
aagcugaagagcagcuaaagg

SEQ ID NO: 583237 - RNA, 22 nt, Artificial Sequence
  Synthetic
aaagcugaagagcagcuaaagg

SEQ ID NO: 583238 - RNA, 23 nt, Artificial Sequence
  Synthetic
uaaagcugaagagcagcuaaagg

SEQ ID NO: 583239 - RNA, 24 nt, Artificial Sequence
  Synthetic
guaaagcugaagagcagcuaaagg

SEQ ID NO: 583240 - RNA, 18 nt, Artificial Sequence
  Synthetic
uacggacugugcuaaagg

SEQ ID NO: 583241 - RNA, 19 nt, Artificial Sequence
  Synthetic
guacggacugugcuaaagg

SEQ ID NO: 583242 - RNA, 20 nt, Artificial Sequence
  Synthetic
aguacggacugugcuaaagg

SEQ ID NO: 583243 - RNA, 21 nt, Artificial Sequence
  Synthetic
aaguacggacugugcuaaagg

SEQ ID NO: 583244 - RNA, 22 nt, Artificial Sequence
  Synthetic
caaguacggacugugcuaaagg

SEQ ID NO: 583245 - RNA, 23 nt, Artificial Sequence
  Synthetic
acaaguacggacugugcuaaagg

SEQ ID NO: 583246 - RNA, 24 nt, Artificial Sequence
  Synthetic
gacaaguacggacugugcuaaagg

SEQ ID NO: 583247 - RNA, 18 nt, Artificial Sequence
  Synthetic
ggcaauccaauguaaagg

SEQ ID NO: 583248 - RNA, 19 nt, Artificial Sequence
  Synthetic
uggcaauccaauguaaagg

SEQ ID NO: 583249 - RNA, 20 nt, Artificial Sequence
  Synthetic
auggcaauccaauguaaagg

SEQ ID NO: 583250 - RNA, 21 nt, Artificial Sequence
  Synthetic
aauggcaauccaauguaaagg

SEQ ID NO: 583251 - RNA, 22 nt, Artificial Sequence
  Synthetic
uaauggcaauccaauguaaagg

SEQ ID NO: 583252 - RNA, 23 nt, Artificial Sequence
  Synthetic
auaauggcaauccaauguaaagg

SEQ ID NO: 583253 - RNA, 24 nt, Artificial Sequence
  Synthetic
aauaauggcaauccaauguaaagg

SEQ ID NO: 583254 - RNA, 18 nt, Artificial Sequence
  Synthetic
accuucacccuguaaagg

SEQ ID NO: 583255 - RNA, 19 nt, Artificial Sequence
  Synthetic
gaccuucacccuguaaagg

SEQ ID NO: 583256 - RNA, 20 nt, Artificial Sequence
  Synthetic
agaccuucacccuguaaagg

SEQ ID NO: 583257 - RNA, 21 nt, Artificial Sequence
  Synthetic
aagaccuucacccuguaaagg

SEQ ID NO: 583258 - RNA, 22 nt, Artificial Sequence
  Synthetic
caagaccuucacccuguaaagg

SEQ ID NO: 583259 - RNA, 23 nt, Artificial Sequence
  Synthetic
acaagaccuucacccuguaaagg

SEQ ID NO: 583260 - RNA, 24 nt, Artificial Sequence
  Synthetic
cacaagaccuucacccuguaaagg

SEQ ID NO: 583261 - RNA, 18 nt, Artificial Sequence
  Synthetic
uuuugcaaucauuaaagg

SEQ ID NO: 583262 - RNA, 19 nt, Artificial Sequence
  Synthetic
guuuugcaaucauuaaagg

SEQ ID NO: 583263 - RNA, 20 nt, Artificial Sequence
  Synthetic
uguuuugcaaucauuaaagg

SEQ ID NO: 583264 - RNA, 21 nt, Artificial Sequence
  Synthetic
auguuuugcaaucauuaaagg

SEQ ID NO: 583265 - RNA, 22 nt, Artificial Sequence
  Synthetic
gauguuuugcaaucauuaaagg

SEQ ID NO: 583266 - RNA, 23 nt, Artificial Sequence
  Synthetic
agauguuuugcaaucauuaaagg

SEQ ID NO: 583267 - RNA, 24 nt, Artificial Sequence
  Synthetic
cagauguuuugcaaucauuaaagg

SEQ ID NO: 583268 - RNA, 18 nt, Artificial Sequence
  Synthetic
uuugaggaauauuaaagg

SEQ ID NO: 583269 - RNA, 19 nt, Artificial Sequence
  Synthetic
uuuugaggaauauuaaagg

SEQ ID NO: 583270 - RNA, 20 nt, Artificial Sequence
  Synthetic
uuuuugaggaauauuaaagg

SEQ ID NO: 583271 - RNA, 21 nt, Artificial Sequence
  Synthetic
cuuuuugaggaauauuaaagg

SEQ ID NO: 583272 - RNA, 22 nt, Artificial Sequence
  Synthetic
acuuuuugaggaauauuaaagg

SEQ ID NO: 583273 - RNA, 23 nt, Artificial Sequence
  Synthetic
aacuuuuugaggaauauuaaagg

SEQ ID NO: 583274 - RNA, 24 nt, Artificial Sequence
  Synthetic
caacuuuuugaggaauauuaaagg

SEQ ID NO: 583275 - RNA, 18 nt, Artificial Sequence
  Synthetic
augcaauaaccuuaaagg

SEQ ID NO: 583276 - RNA, 19 nt, Artificial Sequence
  Synthetic
aaugcaauaaccuuaaagg

SEQ ID NO: 583277 - RNA, 20 nt, Artificial Sequence
  Synthetic
aaaugcaauaaccuuaaagg

SEQ ID NO: 583278 - RNA, 21 nt, Artificial Sequence
  Synthetic
uaaaugcaauaaccuuaaagg

SEQ ID NO: 583279 - RNA, 22 nt, Artificial Sequence
  Synthetic
uuaaaugcaauaaccuuaaagg

SEQ ID NO: 583280 - RNA, 23 nt, Artificial Sequence
  Synthetic
uuuaaaugcaauaaccuuaaagg

SEQ ID NO: 583281 - RNA, 24 nt, Artificial Sequence
  Synthetic
cuuuaaaugcaauaaccuuaaagg

SEQ ID NO: 583282 - RNA, 18 nt, Artificial Sequence
  Synthetic
aucagagucucuuaaagg

SEQ ID NO: 583283 - RNA, 19 nt, Artificial Sequence
  Synthetic
uaucagagucucuuaaagg

SEQ ID NO: 583284 - RNA, 20 nt, Artificial Sequence
  Synthetic
auaucagagucucuuaaagg

SEQ ID NO: 583285 - RNA, 21 nt, Artificial Sequence
  Synthetic
uauaucagagucucuuaaagg

SEQ ID NO: 583286 - RNA, 22 nt, Artificial Sequence
  Synthetic
uuauaucagagucucuuaaagg

SEQ ID NO: 583287 - RNA, 23 nt, Artificial Sequence
  Synthetic
auuauaucagagucucuuaaagg

SEQ ID NO: 583288 - RNA, 24 nt, Artificial Sequence
  Synthetic
aauuauaucagagucucuuaaagg

SEQ ID NO: 583289 - RNA, 18 nt, Artificial Sequence
  Synthetic
uauuuauaauguuaaagg

SEQ ID NO: 583290 - RNA, 19 nt, Artificial Sequence
  Synthetic
uuauuuauaauguuaaagg

SEQ ID NO: 583291 - RNA, 20 nt, Artificial Sequence
  Synthetic
uuuauuuauaauguuaaagg

SEQ ID NO: 583292 - RNA, 21 nt, Artificial Sequence
  Synthetic
uuuuauuuauaauguuaaagg

SEQ ID NO: 583293 - RNA, 22 nt, Artificial Sequence
  Synthetic
auuuuauuuauaauguuaaagg

SEQ ID NO: 583294 - RNA, 23 nt, Artificial Sequence
  Synthetic
uauuuuauuuauaauguuaaagg

SEQ ID NO: 583295 - RNA, 24 nt, Artificial Sequence
  Synthetic
auauuuuauuuauaauguuaaagg

SEQ ID NO: 583296 - RNA, 18 nt, Artificial Sequence
  Synthetic
auuauuuuguguuaaagg

SEQ ID NO: 583297 - RNA, 19 nt, Artificial Sequence
  Synthetic
aauuauuuuguguuaaagg

SEQ ID NO: 583298 - RNA, 20 nt, Artificial Sequence
  Synthetic
caauuauuuuguguuaaagg

SEQ ID NO: 583299 - RNA, 21 nt, Artificial Sequence
  Synthetic
gcaauuauuuuguguuaaagg

SEQ ID NO: 583300 - RNA, 22 nt, Artificial Sequence
  Synthetic
agcaauuauuuuguguuaaagg

SEQ ID NO: 583301 - RNA, 23 nt, Artificial Sequence
  Synthetic
cagcaauuauuuuguguuaaagg

SEQ ID NO: 583302 - RNA, 24 nt, Artificial Sequence
  Synthetic
acagcaauuauuuuguguuaaagg

SEQ ID NO: 583303 - RNA, 18 nt, Artificial Sequence
  Synthetic
gaaaagcaaauuuaaagg

SEQ ID NO: 583304 - RNA, 19 nt, Artificial Sequence
  Synthetic
agaaaagcaaauuuaaagg

SEQ ID NO: 583305 - RNA, 20 nt, Artificial Sequence
  Synthetic
gagaaaagcaaauuuaaagg

SEQ ID NO: 583306 - RNA, 21 nt, Artificial Sequence
  Synthetic
agagaaaagcaaauuuaaagg

SEQ ID NO: 583307 - RNA, 22 nt, Artificial Sequence
  Synthetic
gagagaaaagcaaauuuaaagg

SEQ ID NO: 583308 - RNA, 23 nt, Artificial Sequence
  Synthetic
agagagaaaagcaaauuuaaagg

SEQ ID NO: 583309 - RNA, 24 nt, Artificial Sequence
  Synthetic
uagagagaaaagcaaauuuaaagg

SEQ ID NO: 583310 - RNA, 18 nt, Artificial Sequence
  Synthetic
uaugacagcuuuuaaagg

SEQ ID NO: 583311 - RNA, 19 nt, Artificial Sequence
  Synthetic
guaugacagcuuuuaaagg

SEQ ID NO: 583312 - RNA, 20 nt, Artificial Sequence
  Synthetic
aguaugacagcuuuuaaagg

SEQ ID NO: 583313 - RNA, 21 nt, Artificial Sequence
  Synthetic
caguaugacagcuuuuaaagg

SEQ ID NO: 583314 - RNA, 22 nt, Artificial Sequence
  Synthetic
acaguaugacagcuuuuaaagg

SEQ ID NO: 583315 - RNA, 23 nt, Artificial Sequence
  Synthetic
uacaguaugacagcuuuuaaagg

SEQ ID NO: 583316 - RNA, 24 nt, Artificial Sequence
  Synthetic
uuacaguaugacagcuuuuaaagg

SEQ ID NO: 583317 - RNA, 18 nt, Artificial Sequence
  Synthetic
acucagacaaaaacaagg

SEQ ID NO: 583318 - RNA, 19 nt, Artificial Sequence
  Synthetic
gacucagacaaaaacaagg

SEQ ID NO: 583319 - RNA, 20 nt, Artificial Sequence
  Synthetic
agacucagacaaaaacaagg

SEQ ID NO: 583320 - RNA, 21 nt, Artificial Sequence
  Synthetic
cagacucagacaaaaacaagg

SEQ ID NO: 583321 - RNA, 22 nt, Artificial Sequence
  Synthetic
gcagacucagacaaaaacaagg

SEQ ID NO: 583322 - RNA, 23 nt, Artificial Sequence
  Synthetic
ugcagacucagacaaaaacaagg

SEQ ID NO: 583323 - RNA, 24 nt, Artificial Sequence
  Synthetic
uugcagacucagacaaaaacaagg

SEQ ID NO: 583324 - RNA, 18 nt, Artificial Sequence
  Synthetic
aauggcaagauaacaagg

SEQ ID NO: 583325 - RNA, 19 nt, Artificial Sequence
  Synthetic
aaauggcaagauaacaagg

SEQ ID NO: 583326 - RNA, 20 nt, Artificial Sequence
  Synthetic
aaaauggcaagauaacaagg

SEQ ID NO: 583327 - RNA, 21 nt, Artificial Sequence
  Synthetic
gaaaauggcaagauaacaagg

SEQ ID NO: 583328 - RNA, 22 nt, Artificial Sequence
  Synthetic
ugaaaauggcaagauaacaagg

SEQ ID NO: 583329 - RNA, 23 nt, Artificial Sequence
  Synthetic
gugaaaauggcaagauaacaagg

SEQ ID NO: 583330 - RNA, 24 nt, Artificial Sequence
  Synthetic
ugugaaaauggcaagauaacaagg

SEQ ID NO: 583331 - RNA, 18 nt, Artificial Sequence
  Synthetic
agacccacccacacaagg

SEQ ID NO: 583332 - RNA, 19 nt, Artificial Sequence
  Synthetic
cagacccacccacacaagg

SEQ ID NO: 583333 - RNA, 20 nt, Artificial Sequence
  Synthetic
ucagacccacccacacaagg

SEQ ID NO: 583334 - RNA, 21 nt, Artificial Sequence
  Synthetic
aucagacccacccacacaagg

SEQ ID NO: 583335 - RNA, 22 nt, Artificial Sequence
  Synthetic
gaucagacccacccacacaagg

SEQ ID NO: 583336 - RNA, 23 nt, Artificial Sequence
  Synthetic
ggaucagacccacccacacaagg

SEQ ID NO: 583337 - RNA, 24 nt, Artificial Sequence
  Synthetic
uggaucagacccacccacacaagg

SEQ ID NO: 583338 - RNA, 18 nt, Artificial Sequence
  Synthetic
ugcuguaucuucacaagg

SEQ ID NO: 583339 - RNA, 19 nt, Artificial Sequence
  Synthetic
cugcuguaucuucacaagg

SEQ ID NO: 583340 - RNA, 20 nt, Artificial Sequence
  Synthetic
ccugcuguaucuucacaagg

SEQ ID NO: 583341 - RNA, 21 nt, Artificial Sequence
  Synthetic
uccugcuguaucuucacaagg

SEQ ID NO: 583342 - RNA, 22 nt, Artificial Sequence
  Synthetic
uuccugcuguaucuucacaagg

SEQ ID NO: 583343 - RNA, 23 nt, Artificial Sequence
  Synthetic
cuuccugcuguaucuucacaagg

SEQ ID NO: 583344 - RNA, 24 nt, Artificial Sequence
  Synthetic
ccuuccugcuguaucuucacaagg

SEQ ID NO: 583345 - RNA, 18 nt, Artificial Sequence
  Synthetic
aagcaaggcaagacaagg

SEQ ID NO: 583346 - RNA, 19 nt, Artificial Sequence
  Synthetic
aaagcaaggcaagacaagg

SEQ ID NO: 583347 - RNA, 20 nt, Artificial Sequence
  Synthetic
aaaagcaaggcaagacaagg

SEQ ID NO: 583348 - RNA, 21 nt, Artificial Sequence
  Synthetic
gaaaagcaaggcaagacaagg

SEQ ID NO: 583349 - RNA, 22 nt, Artificial Sequence
  Synthetic
ugaaaagcaaggcaagacaagg

SEQ ID NO: 583350 - RNA, 23 nt, Artificial Sequence
  Synthetic
uugaaaagcaaggcaagacaagg

SEQ ID NO: 583351 - RNA, 24 nt, Artificial Sequence
  Synthetic
auugaaaagcaaggcaagacaagg

SEQ ID NO: 583352 - RNA, 18 nt, Artificial Sequence
  Synthetic
gaaggucagaagacaagg

SEQ ID NO: 583353 - RNA, 19 nt, Artificial Sequence
  Synthetic
ugaaggucagaagacaagg

SEQ ID NO: 583354 - RNA, 20 nt, Artificial Sequence
  Synthetic
gugaaggucagaagacaagg

SEQ ID NO: 583355 - RNA, 21 nt, Artificial Sequence
  Synthetic
agugaaggucagaagacaagg

SEQ ID NO: 583356 - RNA, 22 nt, Artificial Sequence
  Synthetic
aagugaaggucagaagacaagg

SEQ ID NO: 583357 - RNA, 23 nt, Artificial Sequence
  Synthetic
uaagugaaggucagaagacaagg

SEQ ID NO: 583358 - RNA, 24 nt, Artificial Sequence
  Synthetic
auaagugaaggucagaagacaagg

SEQ ID NO: 583359 - RNA, 18 nt, Artificial Sequence
  Synthetic
cggguuugaaggacaagg

SEQ ID NO: 583360 - RNA, 19 nt, Artificial Sequence
  Synthetic
ucggguuugaaggacaagg

SEQ ID NO: 583361 - RNA, 20 nt, Artificial Sequence
  Synthetic
aucggguuugaaggacaagg

SEQ ID NO: 583362 - RNA, 21 nt, Artificial Sequence
  Synthetic
uaucggguuugaaggacaagg

SEQ ID NO: 583363 - RNA, 22 nt, Artificial Sequence
  Synthetic
guaucggguuugaaggacaagg

SEQ ID NO: 583364 - RNA, 23 nt, Artificial Sequence
  Synthetic
uguaucggguuugaaggacaagg

SEQ ID NO: 583365 - RNA, 24 nt, Artificial Sequence
  Synthetic
guguaucggguuugaaggacaagg

SEQ ID NO: 583366 - RNA, 18 nt, Artificial Sequence
  Synthetic
ccauguagacauacaagg

SEQ ID NO: 583367 - RNA, 19 nt, Artificial Sequence
  Synthetic
cccauguagacauacaagg

SEQ ID NO: 583368 - RNA, 20 nt, Artificial Sequence
  Synthetic
ucccauguagacauacaagg

SEQ ID NO: 583369 - RNA, 21 nt, Artificial Sequence
  Synthetic
cucccauguagacauacaagg

SEQ ID NO: 583370 - RNA, 22 nt, Artificial Sequence
  Synthetic
ucucccauguagacauacaagg

SEQ ID NO: 583371 - RNA, 23 nt, Artificial Sequence
  Synthetic
uucucccauguagacauacaagg

SEQ ID NO: 583372 - RNA, 24 nt, Artificial Sequence
  Synthetic
auucucccauguagacauacaagg

SEQ ID NO: 583373 - RNA, 18 nt, Artificial Sequence
  Synthetic
uaauuaagaaaaccaagg

SEQ ID NO: 583374 - RNA, 19 nt, Artificial Sequence
  Synthetic
uuaauuaagaaaaccaagg

SEQ ID NO: 583375 - RNA, 20 nt, Artificial Sequence
  Synthetic
uuuaauuaagaaaaccaagg

SEQ ID NO: 583376 - RNA, 21 nt, Artificial Sequence
  Synthetic
uuuuaauuaagaaaaccaagg

SEQ ID NO: 583377 - RNA, 22 nt, Artificial Sequence
  Synthetic
auuuuaauuaagaaaaccaagg

SEQ ID NO: 583378 - RNA, 23 nt, Artificial Sequence
  Synthetic
uauuuuaauuaagaaaaccaagg

SEQ ID NO: 583379 - RNA, 24 nt, Artificial Sequence
  Synthetic
cuauuuuaauuaagaaaaccaagg

SEQ ID NO: 583380 - RNA, 18 nt, Artificial Sequence
  Synthetic
uuaucaauuaaaccaagg

SEQ ID NO: 583381 - RNA, 19 nt, Artificial Sequence
  Synthetic
uuuaucaauuaaaccaagg

SEQ ID NO: 583382 - RNA, 20 nt, Artificial Sequence
  Synthetic
auuuaucaauuaaaccaagg

SEQ ID NO: 583383 - RNA, 21 nt, Artificial Sequence
  Synthetic
cauuuaucaauuaaaccaagg

SEQ ID NO: 583384 - RNA, 22 nt, Artificial Sequence
  Synthetic
ucauuuaucaauuaaaccaagg

SEQ ID NO: 583385 - RNA, 23 nt, Artificial Sequence
  Synthetic
aucauuuaucaauuaaaccaagg

SEQ ID NO: 583386 - RNA, 24 nt, Artificial Sequence
  Synthetic
caucauuuaucaauuaaaccaagg

SEQ ID NO: 583387 - RNA, 18 nt, Artificial Sequence
  Synthetic
cagccuugcaucccaagg

SEQ ID NO: 583388 - RNA, 19 nt, Artificial Sequence
  Synthetic
ccagccuugcaucccaagg

SEQ ID NO: 583389 - RNA, 20 nt, Artificial Sequence
  Synthetic
accagccuugcaucccaagg

SEQ ID NO: 583390 - RNA, 21 nt, Artificial Sequence
  Synthetic
aaccagccuugcaucccaagg

SEQ ID NO: 583391 - RNA, 22 nt, Artificial Sequence
  Synthetic
gaaccagccuugcaucccaagg

SEQ ID NO: 583392 - RNA, 23 nt, Artificial Sequence
  Synthetic
ugaaccagccuugcaucccaagg

SEQ ID NO: 583393 - RNA, 24 nt, Artificial Sequence
  Synthetic
uugaaccagccuugcaucccaagg

SEQ ID NO: 583394 - RNA, 18 nt, Artificial Sequence
  Synthetic
guuccaugaaagccaagg

SEQ ID NO: 583395 - RNA, 19 nt, Artificial Sequence
  Synthetic
aguuccaugaaagccaagg

SEQ ID NO: 583396 - RNA, 20 nt, Artificial Sequence
  Synthetic
caguuccaugaaagccaagg

SEQ ID NO: 583397 - RNA, 21 nt, Artificial Sequence
  Synthetic
acaguuccaugaaagccaagg

SEQ ID NO: 583398 - RNA, 22 nt, Artificial Sequence
  Synthetic
aacaguuccaugaaagccaagg

SEQ ID NO: 583399 - RNA, 23 nt, Artificial Sequence
  Synthetic
gaacaguuccaugaaagccaagg

SEQ ID NO: 583400 - RNA, 24 nt, Artificial Sequence
  Synthetic
ggaacaguuccaugaaagccaagg

SEQ ID NO: 583401 - RNA, 18 nt, Artificial Sequence
  Synthetic
ugcuuugggaggccaagg

SEQ ID NO: 583402 - RNA, 19 nt, Artificial Sequence
  Synthetic
gugcuuugggaggccaagg

SEQ ID NO: 583403 - RNA, 20 nt, Artificial Sequence
  Synthetic
agugcuuugggaggccaagg

SEQ ID NO: 583404 - RNA, 21 nt, Artificial Sequence
  Synthetic
uagugcuuugggaggccaagg

SEQ ID NO: 583405 - RNA, 22 nt, Artificial Sequence
  Synthetic
cuagugcuuugggaggccaagg

SEQ ID NO: 583406 - RNA, 23 nt, Artificial Sequence
  Synthetic
ccuagugcuuugggaggccaagg

SEQ ID NO: 583407 - RNA, 24 nt, Artificial Sequence
  Synthetic
uccuagugcuuugggaggccaagg

SEQ ID NO: 583408 - RNA, 18 nt, Artificial Sequence
  Synthetic
uuuucuccaaauccaagg

SEQ ID NO: 583409 - RNA, 19 nt, Artificial Sequence
  Synthetic
uuuuucuccaaauccaagg

SEQ ID NO: 583410 - RNA, 20 nt, Artificial Sequence
  Synthetic
auuuuucuccaaauccaagg

SEQ ID NO: 583411 - RNA, 21 nt, Artificial Sequence
  Synthetic
gauuuuucuccaaauccaagg

SEQ ID NO: 583412 - RNA, 22 nt, Artificial Sequence
  Synthetic
ugauuuuucuccaaauccaagg

SEQ ID NO: 583413 - RNA, 23 nt, Artificial Sequence
  Synthetic
uugauuuuucuccaaauccaagg

SEQ ID NO: 583414 - RNA, 24 nt, Artificial Sequence
  Synthetic
guugauuuuucuccaaauccaagg

SEQ ID NO: 583415 - RNA, 18 nt, Artificial Sequence
  Synthetic
auucagacgccuccaagg

SEQ ID NO: 583416 - RNA, 19 nt, Artificial Sequence
  Synthetic
aauucagacgccuccaagg

SEQ ID NO: 583417 - RNA, 20 nt, Artificial Sequence
  Synthetic
uaauucagacgccuccaagg

SEQ ID NO: 583418 - RNA, 21 nt, Artificial Sequence
  Synthetic
guaauucagacgccuccaagg

SEQ ID NO: 583419 - RNA, 22 nt, Artificial Sequence
  Synthetic
uguaauucagacgccuccaagg

SEQ ID NO: 583420 - RNA, 23 nt, Artificial Sequence
  Synthetic
auguaauucagacgccuccaagg

SEQ ID NO: 583421 - RNA, 24 nt, Artificial Sequence
  Synthetic
cauguaauucagacgccuccaagg

SEQ ID NO: 583422 - RNA, 18 nt, Artificial Sequence
  Synthetic
uuagaagugguuccaagg

SEQ ID NO: 583423 - RNA, 19 nt, Artificial Sequence
  Synthetic
guuagaagugguuccaagg

SEQ ID NO: 583424 - RNA, 20 nt, Artificial Sequence
  Synthetic
aguuagaagugguuccaagg

SEQ ID NO: 583425 - RNA, 21 nt, Artificial Sequence
  Synthetic
caguuagaagugguuccaagg

SEQ ID NO: 583426 - RNA, 22 nt, Artificial Sequence
  Synthetic
acaguuagaagugguuccaagg

SEQ ID NO: 583427 - RNA, 23 nt, Artificial Sequence
  Synthetic
gacaguuagaagugguuccaagg

SEQ ID NO: 583428 - RNA, 24 nt, Artificial Sequence
  Synthetic
ggacaguuagaagugguuccaagg

SEQ ID NO: 583429 - RNA, 18 nt, Artificial Sequence
  Synthetic
agaggggaauaagcaagg

SEQ ID NO: 583430 - RNA, 19 nt, Artificial Sequence
  Synthetic
gagaggggaauaagcaagg

SEQ ID NO: 583431 - RNA, 20 nt, Artificial Sequence
  Synthetic
ggagaggggaauaagcaagg

SEQ ID NO: 583432 - RNA, 21 nt, Artificial Sequence
  Synthetic
gggagaggggaauaagcaagg

SEQ ID NO: 583433 - RNA, 22 nt, Artificial Sequence
  Synthetic
agggagaggggaauaagcaagg

SEQ ID NO: 583434 - RNA, 23 nt, Artificial Sequence
  Synthetic
gagggagaggggaauaagcaagg

SEQ ID NO: 583435 - RNA, 24 nt, Artificial Sequence
  Synthetic
ggagggagaggggaauaagcaagg

SEQ ID NO: 583436 - RNA, 18 nt, Artificial Sequence
  Synthetic
ccagaauaaagagcaagg

SEQ ID NO: 583437 - RNA, 19 nt, Artificial Sequence
  Synthetic
cccagaauaaagagcaagg

SEQ ID NO: 583438 - RNA, 20 nt, Artificial Sequence
  Synthetic
ucccagaauaaagagcaagg

SEQ ID NO: 583439 - RNA, 21 nt, Artificial Sequence
  Synthetic
cucccagaauaaagagcaagg

SEQ ID NO: 583440 - RNA, 22 nt, Artificial Sequence
  Synthetic
ccucccagaauaaagagcaagg

SEQ ID NO: 583441 - RNA, 23 nt, Artificial Sequence
  Synthetic
gccucccagaauaaagagcaagg

SEQ ID NO: 583442 - RNA, 24 nt, Artificial Sequence
  Synthetic
agccucccagaauaaagagcaagg

SEQ ID NO: 583443 - RNA, 18 nt, Artificial Sequence
  Synthetic
aacaauauuuacgcaagg

SEQ ID NO: 583444 - RNA, 19 nt, Artificial Sequence
  Synthetic
uaacaauauuuacgcaagg

SEQ ID NO: 583445 - RNA, 20 nt, Artificial Sequence
  Synthetic
guaacaauauuuacgcaagg

SEQ ID NO: 583446 - RNA, 21 nt, Artificial Sequence
  Synthetic
gguaacaauauuuacgcaagg

SEQ ID NO: 583447 - RNA, 22 nt, Artificial Sequence
  Synthetic
ggguaacaauauuuacgcaagg

SEQ ID NO: 583448 - RNA, 23 nt, Artificial Sequence
  Synthetic
aggguaacaauauuuacgcaagg

SEQ ID NO: 583449 - RNA, 24 nt, Artificial Sequence
  Synthetic
aaggguaacaauauuuacgcaagg

SEQ ID NO: 583450 - RNA, 18 nt, Artificial Sequence
  Synthetic
uaugugcccuucgcaagg

SEQ ID NO: 583451 - RNA, 19 nt, Artificial Sequence
  Synthetic
cuaugugcccuucgcaagg

SEQ ID NO: 583452 - RNA, 20 nt, Artificial Sequence
  Synthetic
acuaugugcccuucgcaagg

SEQ ID NO: 583453 - RNA, 21 nt, Artificial Sequence
  Synthetic
gacuaugugcccuucgcaagg

SEQ ID NO: 583454 - RNA, 22 nt, Artificial Sequence
  Synthetic
agacuaugugcccuucgcaagg

SEQ ID NO: 583455 - RNA, 23 nt, Artificial Sequence
  Synthetic
cagacuaugugcccuucgcaagg

SEQ ID NO: 583456 - RNA, 24 nt, Artificial Sequence
  Synthetic
ucagacuaugugcccuucgcaagg

SEQ ID NO: 583457 - RNA, 18 nt, Artificial Sequence
  Synthetic
agucaugagaaggcaagg

SEQ ID NO: 583458 - RNA, 19 nt, Artificial Sequence
  Synthetic
uagucaugagaaggcaagg

SEQ ID NO: 583459 - RNA, 20 nt, Artificial Sequence
  Synthetic
cuagucaugagaaggcaagg

SEQ ID NO: 583460 - RNA, 21 nt, Artificial Sequence
  Synthetic
gcuagucaugagaaggcaagg

SEQ ID NO: 583461 - RNA, 22 nt, Artificial Sequence
  Synthetic
agcuagucaugagaaggcaagg

SEQ ID NO: 583462 - RNA, 23 nt, Artificial Sequence
  Synthetic
gagcuagucaugagaaggcaagg

SEQ ID NO: 583463 - RNA, 24 nt, Artificial Sequence
  Synthetic
ugagcuagucaugagaaggcaagg

SEQ ID NO: 583464 - RNA, 18 nt, Artificial Sequence
  Synthetic
uacucuacauaggcaagg

SEQ ID NO: 583465 - RNA, 19 nt, Artificial Sequence
  Synthetic
guacucuacauaggcaagg

SEQ ID NO: 583466 - RNA, 20 nt, Artificial Sequence
  Synthetic
uguacucuacauaggcaagg

SEQ ID NO: 583467 - RNA, 21 nt, Artificial Sequence
  Synthetic
uuguacucuacauaggcaagg

SEQ ID NO: 583468 - RNA, 22 nt, Artificial Sequence
  Synthetic
cuuguacucuacauaggcaagg

SEQ ID NO: 583469 - RNA, 23 nt, Artificial Sequence
  Synthetic
gcuuguacucuacauaggcaagg

SEQ ID NO: 583470 - RNA, 24 nt, Artificial Sequence
  Synthetic
ugcuuguacucuacauaggcaagg

SEQ ID NO: 583471 - RNA, 18 nt, Artificial Sequence
  Synthetic
ccuuuuaaaagggcaagg

SEQ ID NO: 583472 - RNA, 19 nt, Artificial Sequence
  Synthetic
gccuuuuaaaagggcaagg

SEQ ID NO: 583473 - RNA, 20 nt, Artificial Sequence
  Synthetic
ugccuuuuaaaagggcaagg

SEQ ID NO: 583474 - RNA, 21 nt, Artificial Sequence
  Synthetic
cugccuuuuaaaagggcaagg

SEQ ID NO: 583475 - RNA, 22 nt, Artificial Sequence
  Synthetic
ucugccuuuuaaaagggcaagg

SEQ ID NO: 583476 - RNA, 23 nt, Artificial Sequence
  Synthetic
cucugccuuuuaaaagggcaagg

SEQ ID NO: 583477 - RNA, 24 nt, Artificial Sequence
  Synthetic
ccucugccuuuuaaaagggcaagg

SEQ ID NO: 583478 - RNA, 18 nt, Artificial Sequence
  Synthetic
aaguuaaauggggcaagg

SEQ ID NO: 583479 - RNA, 19 nt, Artificial Sequence
  Synthetic
aaaguuaaauggggcaagg

SEQ ID NO: 583480 - RNA, 20 nt, Artificial Sequence
  Synthetic
gaaaguuaaauggggcaagg

SEQ ID NO: 583481 - RNA, 21 nt, Artificial Sequence
  Synthetic
agaaaguuaaauggggcaagg

SEQ ID NO: 583482 - RNA, 22 nt, Artificial Sequence
  Synthetic
aagaaaguuaaauggggcaagg

SEQ ID NO: 583483 - RNA, 23 nt, Artificial Sequence
  Synthetic
uaagaaaguuaaauggggcaagg

SEQ ID NO: 583484 - RNA, 24 nt, Artificial Sequence
  Synthetic
uuaagaaaguuaaauggggcaagg

SEQ ID NO: 583485 - RNA, 18 nt, Artificial Sequence
  Synthetic
uuuauauaguaugcaagg

SEQ ID NO: 583486 - RNA, 19 nt, Artificial Sequence
  Synthetic
auuuauauaguaugcaagg

SEQ ID NO: 583487 - RNA, 20 nt, Artificial Sequence
  Synthetic
gauuuauauaguaugcaagg

SEQ ID NO: 583488 - RNA, 21 nt, Artificial Sequence
  Synthetic
agauuuauauaguaugcaagg

SEQ ID NO: 583489 - RNA, 22 nt, Artificial Sequence
  Synthetic
uagauuuauauaguaugcaagg

SEQ ID NO: 583490 - RNA, 23 nt, Artificial Sequence
  Synthetic
uuagauuuauauaguaugcaagg

SEQ ID NO: 583491 - RNA, 24 nt, Artificial Sequence
  Synthetic
guuagauuuauauaguaugcaagg

SEQ ID NO: 583492 - RNA, 18 nt, Artificial Sequence
  Synthetic
gcuccuuauacugcaagg

SEQ ID NO: 583493 - RNA, 19 nt, Artificial Sequence
  Synthetic
ugcuccuuauacugcaagg

SEQ ID NO: 583494 - RNA, 20 nt, Artificial Sequence
  Synthetic
augcuccuuauacugcaagg

SEQ ID NO: 583495 - RNA, 21 nt, Artificial Sequence
  Synthetic
uaugcuccuuauacugcaagg

SEQ ID NO: 583496 - RNA, 22 nt, Artificial Sequence
  Synthetic
uuaugcuccuuauacugcaagg

SEQ ID NO: 583497 - RNA, 23 nt, Artificial Sequence
  Synthetic
auuaugcuccuuauacugcaagg

SEQ ID NO: 583498 - RNA, 24 nt, Artificial Sequence
  Synthetic
aauuaugcuccuuauacugcaagg

SEQ ID NO: 583499 - RNA, 18 nt, Artificial Sequence
  Synthetic
auguuguauucugcaagg

SEQ ID NO: 583500 - RNA, 19 nt, Artificial Sequence
  Synthetic
uauguuguauucugcaagg

SEQ ID NO: 583501 - RNA, 20 nt, Artificial Sequence
  Synthetic
guauguuguauucugcaagg

SEQ ID NO: 583502 - RNA, 21 nt, Artificial Sequence
  Synthetic
aguauguuguauucugcaagg

SEQ ID NO: 583503 - RNA, 22 nt, Artificial Sequence
  Synthetic
uaguauguuguauucugcaagg

SEQ ID NO: 583504 - RNA, 23 nt, Artificial Sequence
  Synthetic
cuaguauguuguauucugcaagg

SEQ ID NO: 583505 - RNA, 24 nt, Artificial Sequence
  Synthetic
ccuaguauguuguauucugcaagg

SEQ ID NO: 583506 - RNA, 18 nt, Artificial Sequence
  Synthetic
guaaccugggaaucaagg

SEQ ID NO: 583507 - RNA, 19 nt, Artificial Sequence
  Synthetic
gguaaccugggaaucaagg

SEQ ID NO: 583508 - RNA, 20 nt, Artificial Sequence
  Synthetic
ugguaaccugggaaucaagg

SEQ ID NO: 583509 - RNA, 21 nt, Artificial Sequence
  Synthetic
gugguaaccugggaaucaagg

SEQ ID NO: 583510 - RNA, 22 nt, Artificial Sequence
  Synthetic
agugguaaccugggaaucaagg

SEQ ID NO: 583511 - RNA, 23 nt, Artificial Sequence
  Synthetic
cagugguaaccugggaaucaagg

SEQ ID NO: 583512 - RNA, 24 nt, Artificial Sequence
  Synthetic
ucagugguaaccugggaaucaagg

SEQ ID NO: 583513 - RNA, 18 nt, Artificial Sequence
  Synthetic
aauuagcuuuuaucaagg

SEQ ID NO: 583514 - RNA, 19 nt, Artificial Sequence
  Synthetic
gaauuagcuuuuaucaagg

SEQ ID NO: 583515 - RNA, 20 nt, Artificial Sequence
  Synthetic
ggaauuagcuuuuaucaagg

SEQ ID NO: 583516 - RNA, 21 nt, Artificial Sequence
  Synthetic
aggaauuagcuuuuaucaagg

SEQ ID NO: 583517 - RNA, 22 nt, Artificial Sequence
  Synthetic
aaggaauuagcuuuuaucaagg

SEQ ID NO: 583518 - RNA, 23 nt, Artificial Sequence
  Synthetic
aaaggaauuagcuuuuaucaagg

SEQ ID NO: 583519 - RNA, 24 nt, Artificial Sequence
  Synthetic
caaaggaauuagcuuuuaucaagg

SEQ ID NO: 583520 - RNA, 18 nt, Artificial Sequence
  Synthetic
gggacgguggagucaagg

SEQ ID NO: 583521 - RNA, 19 nt, Artificial Sequence
  Synthetic
ggggacgguggagucaagg

SEQ ID NO: 583522 - RNA, 20 nt, Artificial Sequence
  Synthetic
uggggacgguggagucaagg

SEQ ID NO: 583523 - RNA, 21 nt, Artificial Sequence
  Synthetic
guggggacgguggagucaagg

SEQ ID NO: 583524 - RNA, 22 nt, Artificial Sequence
  Synthetic
aguggggacgguggagucaagg

SEQ ID NO: 583525 - RNA, 23 nt, Artificial Sequence
  Synthetic
aaguggggacgguggagucaagg

SEQ ID NO: 583526 - RNA, 24 nt, Artificial Sequence
  Synthetic
aaaguggggacgguggagucaagg

SEQ ID NO: 583527 - RNA, 18 nt, Artificial Sequence
  Synthetic
gcagcauaauagucaagg

SEQ ID NO: 583528 - RNA, 19 nt, Artificial Sequence
  Synthetic
ugcagcauaauagucaagg

SEQ ID NO: 583529 - RNA, 20 nt, Artificial Sequence
  Synthetic
uugcagcauaauagucaagg

SEQ ID NO: 583530 - RNA, 21 nt, Artificial Sequence
  Synthetic
auugcagcauaauagucaagg

SEQ ID NO: 583531 - RNA, 22 nt, Artificial Sequence
  Synthetic
aauugcagcauaauagucaagg

SEQ ID NO: 583532 - RNA, 23 nt, Artificial Sequence
  Synthetic
aaauugcagcauaauagucaagg

SEQ ID NO: 583533 - RNA, 24 nt, Artificial Sequence
  Synthetic
uaaauugcagcauaauagucaagg

SEQ ID NO: 583534 - RNA, 18 nt, Artificial Sequence
  Synthetic
aauccccacgugucaagg

SEQ ID NO: 583535 - RNA, 19 nt, Artificial Sequence
  Synthetic
uaauccccacgugucaagg

SEQ ID NO: 583536 - RNA, 20 nt, Artificial Sequence
  Synthetic
auaauccccacgugucaagg

SEQ ID NO: 583537 - RNA, 21 nt, Artificial Sequence
  Synthetic
cauaauccccacgugucaagg

SEQ ID NO: 583538 - RNA, 22 nt, Artificial Sequence
  Synthetic
ccauaauccccacgugucaagg

SEQ ID NO: 583539 - RNA, 23 nt, Artificial Sequence
  Synthetic
uccauaauccccacgugucaagg

SEQ ID NO: 583540 - RNA, 24 nt, Artificial Sequence
  Synthetic
cuccauaauccccacgugucaagg

SEQ ID NO: 583541 - RNA, 18 nt, Artificial Sequence
  Synthetic
cucacuaaaacuucaagg

SEQ ID NO: 583542 - RNA, 19 nt, Artificial Sequence
  Synthetic
acucacuaaaacuucaagg

SEQ ID NO: 583543 - RNA, 20 nt, Artificial Sequence
  Synthetic
cacucacuaaaacuucaagg

SEQ ID NO: 583544 - RNA, 21 nt, Artificial Sequence
  Synthetic
ucacucacuaaaacuucaagg

SEQ ID NO: 583545 - RNA, 22 nt, Artificial Sequence
  Synthetic
cucacucacuaaaacuucaagg

SEQ ID NO: 583546 - RNA, 23 nt, Artificial Sequence
  Synthetic
gcucacucacuaaaacuucaagg

SEQ ID NO: 583547 - RNA, 24 nt, Artificial Sequence
  Synthetic
ugcucacucacuaaaacuucaagg

SEQ ID NO: 583548 - RNA, 18 nt, Artificial Sequence
  Synthetic
uacaaauacacuucaagg

SEQ ID NO: 583549 - RNA, 19 nt, Artificial Sequence
  Synthetic
uuacaaauacacuucaagg

SEQ ID NO: 583550 - RNA, 20 nt, Artificial Sequence
  Synthetic
guuacaaauacacuucaagg

SEQ ID NO: 583551 - RNA, 21 nt, Artificial Sequence
  Synthetic
uguuacaaauacacuucaagg

SEQ ID NO: 583552 - RNA, 22 nt, Artificial Sequence
  Synthetic
guguuacaaauacacuucaagg

SEQ ID NO: 583553 - RNA, 23 nt, Artificial Sequence
  Synthetic
uguguuacaaauacacuucaagg

SEQ ID NO: 583554 - RNA, 24 nt, Artificial Sequence
  Synthetic
cuguguuacaaauacacuucaagg

SEQ ID NO: 583555 - RNA, 18 nt, Artificial Sequence
  Synthetic
uuauucuuacuuucaagg

SEQ ID NO: 583556 - RNA, 19 nt, Artificial Sequence
  Synthetic
auuauucuuacuuucaagg

SEQ ID NO: 583557 - RNA, 20 nt, Artificial Sequence
  Synthetic
uauuauucuuacuuucaagg

SEQ ID NO: 583558 - RNA, 21 nt, Artificial Sequence
  Synthetic
auauuauucuuacuuucaagg

SEQ ID NO: 583559 - RNA, 22 nt, Artificial Sequence
  Synthetic
uauauuauucuuacuuucaagg

SEQ ID NO: 583560 - RNA, 23 nt, Artificial Sequence
  Synthetic
uuauauuauucuuacuuucaagg

SEQ ID NO: 583561 - RNA, 24 nt, Artificial Sequence
  Synthetic
guuauauuauucuuacuuucaagg

SEQ ID NO: 583562 - RNA, 18 nt, Artificial Sequence
  Synthetic
aacuuaaauuuuucaagg

SEQ ID NO: 583563 - RNA, 19 nt, Artificial Sequence
  Synthetic
uaacuuaaauuuuucaagg

SEQ ID NO: 583564 - RNA, 20 nt, Artificial Sequence
  Synthetic
guaacuuaaauuuuucaagg

SEQ ID NO: 583565 - RNA, 21 nt, Artificial Sequence
  Synthetic
aguaacuuaaauuuuucaagg

SEQ ID NO: 583566 - RNA, 22 nt, Artificial Sequence
  Synthetic
uaguaacuuaaauuuuucaagg

SEQ ID NO: 583567 - RNA, 23 nt, Artificial Sequence
  Synthetic
auaguaacuuaaauuuuucaagg

SEQ ID NO: 583568 - RNA, 24 nt, Artificial Sequence
  Synthetic
aauaguaacuuaaauuuuucaagg

SEQ ID NO: 583569 - RNA, 18 nt, Artificial Sequence
  Synthetic
uuucauacaaaaagaagg

SEQ ID NO: 583570 - RNA, 19 nt, Artificial Sequence
  Synthetic
guuucauacaaaaagaagg

SEQ ID NO: 583571 - RNA, 20 nt, Artificial Sequence
  Synthetic
aguuucauacaaaaagaagg

SEQ ID NO: 583572 - RNA, 21 nt, Artificial Sequence
  Synthetic
aaguuucauacaaaaagaagg

SEQ ID NO: 583573 - RNA, 22 nt, Artificial Sequence
  Synthetic
uaaguuucauacaaaaagaagg

SEQ ID NO: 583574 - RNA, 23 nt, Artificial Sequence
  Synthetic
auaaguuucauacaaaaagaagg

SEQ ID NO: 583575 - RNA, 24 nt, Artificial Sequence
  Synthetic
aauaaguuucauacaaaaagaagg

SEQ ID NO: 583576 - RNA, 18 nt, Artificial Sequence
  Synthetic
uggaggaagaaaagaagg

SEQ ID NO: 583577 - RNA, 19 nt, Artificial Sequence
  Synthetic
auggaggaagaaaagaagg

SEQ ID NO: 583578 - RNA, 20 nt, Artificial Sequence
  Synthetic
aauggaggaagaaaagaagg

SEQ ID NO: 583579 - RNA, 21 nt, Artificial Sequence
  Synthetic
gaauggaggaagaaaagaagg

SEQ ID NO: 583580 - RNA, 22 nt, Artificial Sequence
  Synthetic
ggaauggaggaagaaaagaagg

SEQ ID NO: 583581 - RNA, 23 nt, Artificial Sequence
  Synthetic
aggaauggaggaagaaaagaagg

SEQ ID NO: 583582 - RNA, 24 nt, Artificial Sequence
  Synthetic
aaggaauggaggaagaaaagaagg

SEQ ID NO: 583583 - RNA, 18 nt, Artificial Sequence
  Synthetic
gggugaugccaaagaagg

SEQ ID NO: 583584 - RNA, 19 nt, Artificial Sequence
  Synthetic
agggugaugccaaagaagg

SEQ ID NO: 583585 - RNA, 20 nt, Artificial Sequence
  Synthetic
uagggugaugccaaagaagg

SEQ ID NO: 583586 - RNA, 21 nt, Artificial Sequence
  Synthetic
auagggugaugccaaagaagg

SEQ ID NO: 583587 - RNA, 22 nt, Artificial Sequence
  Synthetic
cauagggugaugccaaagaagg

SEQ ID NO: 583588 - RNA, 23 nt, Artificial Sequence
  Synthetic
ccauagggugaugccaaagaagg

SEQ ID NO: 583589 - RNA, 24 nt, Artificial Sequence
  Synthetic
uccauagggugaugccaaagaagg

SEQ ID NO: 583590 - RNA, 18 nt, Artificial Sequence
  Synthetic
uucuagauccaaagaagg

SEQ ID NO: 583591 - RNA, 19 nt, Artificial Sequence
  Synthetic
uuucuagauccaaagaagg

SEQ ID NO: 583592 - RNA, 20 nt, Artificial Sequence
  Synthetic
guuucuagauccaaagaagg

SEQ ID NO: 583593 - RNA, 21 nt, Artificial Sequence
  Synthetic
aguuucuagauccaaagaagg

SEQ ID NO: 583594 - RNA, 22 nt, Artificial Sequence
  Synthetic
aaguuucuagauccaaagaagg

SEQ ID NO: 583595 - RNA, 23 nt, Artificial Sequence
  Synthetic
aaaguuucuagauccaaagaagg

SEQ ID NO: 583596 - RNA, 24 nt, Artificial Sequence
  Synthetic
aaaaguuucuagauccaaagaagg

SEQ ID NO: 583597 - RNA, 18 nt, Artificial Sequence
  Synthetic
agcuggaugagaagaagg

SEQ ID NO: 583598 - RNA, 19 nt, Artificial Sequence
  Synthetic
uagcuggaugagaagaagg

SEQ ID NO: 583599 - RNA, 20 nt, Artificial Sequence
  Synthetic
uuagcuggaugagaagaagg

SEQ ID NO: 583600 - RNA, 21 nt, Artificial Sequence
  Synthetic
cuuagcuggaugagaagaagg

SEQ ID NO: 583601 - RNA, 22 nt, Artificial Sequence
  Synthetic
ccuuagcuggaugagaagaagg

SEQ ID NO: 583602 - RNA, 23 nt, Artificial Sequence
  Synthetic
gccuuagcuggaugagaagaagg

SEQ ID NO: 583603 - RNA, 24 nt, Artificial Sequence
  Synthetic
agccuuagcuggaugagaagaagg

SEQ ID NO: 583604 - RNA, 18 nt, Artificial Sequence
  Synthetic
gaaaggaaaggaagaagg

SEQ ID NO: 583605 - RNA, 19 nt, Artificial Sequence
  Synthetic
ggaaaggaaaggaagaagg

SEQ ID NO: 583606 - RNA, 20 nt, Artificial Sequence
  Synthetic
aggaaaggaaaggaagaagg

SEQ ID NO: 583607 - RNA, 21 nt, Artificial Sequence
  Synthetic
aaggaaaggaaaggaagaagg

SEQ ID NO: 583608 - RNA, 22 nt, Artificial Sequence
  Synthetic
gaaggaaaggaaaggaagaagg

SEQ ID NO: 583609 - RNA, 23 nt, Artificial Sequence
  Synthetic
agaaggaaaggaaaggaagaagg

SEQ ID NO: 583610 - RNA, 24 nt, Artificial Sequence
  Synthetic
cagaaggaaaggaaaggaagaagg

SEQ ID NO: 583611 - RNA, 18 nt, Artificial Sequence
  Synthetic
gcauggagaauaagaagg

SEQ ID NO: 583612 - RNA, 19 nt, Artificial Sequence
  Synthetic
ggcauggagaauaagaagg

SEQ ID NO: 583613 - RNA, 20 nt, Artificial Sequence
  Synthetic
aggcauggagaauaagaagg

SEQ ID NO: 583614 - RNA, 21 nt, Artificial Sequence
  Synthetic
gaggcauggagaauaagaagg

SEQ ID NO: 583615 - RNA, 22 nt, Artificial Sequence
  Synthetic
ugaggcauggagaauaagaagg

SEQ ID NO: 583616 - RNA, 23 nt, Artificial Sequence
  Synthetic
augaggcauggagaauaagaagg

SEQ ID NO: 583617 - RNA, 24 nt, Artificial Sequence
  Synthetic
gaugaggcauggagaauaagaagg

SEQ ID NO: 583618 - RNA, 18 nt, Artificial Sequence
  Synthetic
uauuuuagacuaagaagg

SEQ ID NO: 583619 - RNA, 19 nt, Artificial Sequence
  Synthetic
cuauuuuagacuaagaagg

SEQ ID NO: 583620 - RNA, 20 nt, Artificial Sequence
  Synthetic
gcuauuuuagacuaagaagg

SEQ ID NO: 583621 - RNA, 21 nt, Artificial Sequence
  Synthetic
ggcuauuuuagacuaagaagg

SEQ ID NO: 583622 - RNA, 22 nt, Artificial Sequence
  Synthetic
gggcuauuuuagacuaagaagg

SEQ ID NO: 583623 - RNA, 23 nt, Artificial Sequence
  Synthetic
agggcuauuuuagacuaagaagg

SEQ ID NO: 583624 - RNA, 24 nt, Artificial Sequence
  Synthetic
aagggcuauuuuagacuaagaagg

SEQ ID NO: 583625 - RNA, 18 nt, Artificial Sequence
  Synthetic
cauccuaaaaacagaagg

SEQ ID NO: 583626 - RNA, 19 nt, Artificial Sequence
  Synthetic
ccauccuaaaaacagaagg

SEQ ID NO: 583627 - RNA, 20 nt, Artificial Sequence
  Synthetic
gccauccuaaaaacagaagg

SEQ ID NO: 583628 - RNA, 21 nt, Artificial Sequence
  Synthetic
ugccauccuaaaaacagaagg

SEQ ID NO: 583629 - RNA, 22 nt, Artificial Sequence
  Synthetic
cugccauccuaaaaacagaagg

SEQ ID NO: 583630 - RNA, 23 nt, Artificial Sequence
  Synthetic
ucugccauccuaaaaacagaagg

SEQ ID NO: 583631 - RNA, 24 nt, Artificial Sequence
  Synthetic
cucugccauccuaaaaacagaagg

SEQ ID NO: 583632 - RNA, 18 nt, Artificial Sequence
  Synthetic
uacgaccuugacagaagg

SEQ ID NO: 583633 - RNA, 19 nt, Artificial Sequence
  Synthetic
uuacgaccuugacagaagg

SEQ ID NO: 583634 - RNA, 20 nt, Artificial Sequence
  Synthetic
guuacgaccuugacagaagg

SEQ ID NO: 583635 - RNA, 21 nt, Artificial Sequence
  Synthetic
uguuacgaccuugacagaagg

SEQ ID NO: 583636 - RNA, 22 nt, Artificial Sequence
  Synthetic
auguuacgaccuugacagaagg

SEQ ID NO: 583637 - RNA, 23 nt, Artificial Sequence
  Synthetic
uauguuacgaccuugacagaagg

SEQ ID NO: 583638 - RNA, 24 nt, Artificial Sequence
  Synthetic
auauguuacgaccuugacagaagg

SEQ ID NO: 583639 - RNA, 18 nt, Artificial Sequence
  Synthetic
aggaagagaaccagaagg

SEQ ID NO: 583640 - RNA, 19 nt, Artificial Sequence
  Synthetic
caggaagagaaccagaagg

SEQ ID NO: 583641 - RNA, 20 nt, Artificial Sequence
  Synthetic
ccaggaagagaaccagaagg

SEQ ID NO: 583642 - RNA, 21 nt, Artificial Sequence
  Synthetic
cccaggaagagaaccagaagg

SEQ ID NO: 583643 - RNA, 22 nt, Artificial Sequence
  Synthetic
acccaggaagagaaccagaagg

SEQ ID NO: 583644 - RNA, 23 nt, Artificial Sequence
  Synthetic
gacccaggaagagaaccagaagg

SEQ ID NO: 583645 - RNA, 24 nt, Artificial Sequence
  Synthetic
agacccaggaagagaaccagaagg

SEQ ID NO: 583646 - RNA, 18 nt, Artificial Sequence
  Synthetic
ucuucacaaggcagaagg

SEQ ID NO: 583647 - RNA, 19 nt, Artificial Sequence
  Synthetic
aucuucacaaggcagaagg

SEQ ID NO: 583648 - RNA, 20 nt, Artificial Sequence
  Synthetic
uaucuucacaaggcagaagg

SEQ ID NO: 583649 - RNA, 21 nt, Artificial Sequence
  Synthetic
guaucuucacaaggcagaagg

SEQ ID NO: 583650 - RNA, 22 nt, Artificial Sequence
  Synthetic
uguaucuucacaaggcagaagg

SEQ ID NO: 583651 - RNA, 23 nt, Artificial Sequence
  Synthetic
cuguaucuucacaaggcagaagg

SEQ ID NO: 583652 - RNA, 24 nt, Artificial Sequence
  Synthetic
gcuguaucuucacaaggcagaagg

SEQ ID NO: 583653 - RNA, 18 nt, Artificial Sequence
  Synthetic
acugauuggggcagaagg

SEQ ID NO: 583654 - RNA, 19 nt, Artificial Sequence
  Synthetic
cacugauuggggcagaagg

SEQ ID NO: 583655 - RNA, 20 nt, Artificial Sequence
  Synthetic
ucacugauuggggcagaagg

SEQ ID NO: 583656 - RNA, 21 nt, Artificial Sequence
  Synthetic
uucacugauuggggcagaagg

SEQ ID NO: 583657 - RNA, 22 nt, Artificial Sequence
  Synthetic
guucacugauuggggcagaagg

SEQ ID NO: 583658 - RNA, 23 nt, Artificial Sequence
  Synthetic
gguucacugauuggggcagaagg

SEQ ID NO: 583659 - RNA, 24 nt, Artificial Sequence
  Synthetic
agguucacugauuggggcagaagg

SEQ ID NO: 583660 - RNA, 18 nt, Artificial Sequence
  Synthetic
gguugugauugcagaagg

SEQ ID NO: 583661 - RNA, 19 nt, Artificial Sequence
  Synthetic
agguugugauugcagaagg

SEQ ID NO: 583662 - RNA, 20 nt, Artificial Sequence
  Synthetic
aagguugugauugcagaagg

SEQ ID NO: 583663 - RNA, 21 nt, Artificial Sequence
  Synthetic
uaagguugugauugcagaagg

SEQ ID NO: 583664 - RNA, 22 nt, Artificial Sequence
  Synthetic
uuaagguugugauugcagaagg

SEQ ID NO: 583665 - RNA, 23 nt, Artificial Sequence
  Synthetic
guuaagguugugauugcagaagg

SEQ ID NO: 583666 - RNA, 24 nt, Artificial Sequence
  Synthetic
uguuaagguugugauugcagaagg

SEQ ID NO: 583667 - RNA, 18 nt, Artificial Sequence
  Synthetic
cacuggagacucagaagg

SEQ ID NO: 583668 - RNA, 19 nt, Artificial Sequence
  Synthetic
acacuggagacucagaagg

SEQ ID NO: 583669 - RNA, 20 nt, Artificial Sequence
  Synthetic
gacacuggagacucagaagg

SEQ ID NO: 583670 - RNA, 21 nt, Artificial Sequence
  Synthetic
agacacuggagacucagaagg

SEQ ID NO: 583671 - RNA, 22 nt, Artificial Sequence
  Synthetic
uagacacuggagacucagaagg

SEQ ID NO: 583672 - RNA, 23 nt, Artificial Sequence
  Synthetic
auagacacuggagacucagaagg

SEQ ID NO: 583673 - RNA, 24 nt, Artificial Sequence
  Synthetic
aauagacacuggagacucagaagg

SEQ ID NO: 583674 - RNA, 18 nt, Artificial Sequence
  Synthetic
ucccaucuucucagaagg

SEQ ID NO: 583675 - RNA, 19 nt, Artificial Sequence
  Synthetic
aucccaucuucucagaagg

SEQ ID NO: 583676 - RNA, 20 nt, Artificial Sequence
  Synthetic
aaucccaucuucucagaagg

SEQ ID NO: 583677 - RNA, 21 nt, Artificial Sequence
  Synthetic
uaaucccaucuucucagaagg

SEQ ID NO: 583678 - RNA, 22 nt, Artificial Sequence
  Synthetic
guaaucccaucuucucagaagg

SEQ ID NO: 583679 - RNA, 23 nt, Artificial Sequence
  Synthetic
uguaaucccaucuucucagaagg

SEQ ID NO: 583680 - RNA, 24 nt, Artificial Sequence
  Synthetic
cuguaaucccaucuucucagaagg

SEQ ID NO: 583681 - RNA, 18 nt, Artificial Sequence
  Synthetic
augaaagacuagagaagg

SEQ ID NO: 583682 - RNA, 19 nt, Artificial Sequence
  Synthetic
aaugaaagacuagagaagg

SEQ ID NO: 583683 - RNA, 20 nt, Artificial Sequence
  Synthetic
gaaugaaagacuagagaagg

SEQ ID NO: 583684 - RNA, 21 nt, Artificial Sequence
  Synthetic
ugaaugaaagacuagagaagg

SEQ ID NO: 583685 - RNA, 22 nt, Artificial Sequence
  Synthetic
augaaugaaagacuagagaagg

SEQ ID NO: 583686 - RNA, 23 nt, Artificial Sequence
  Synthetic
gaugaaugaaagacuagagaagg

SEQ ID NO: 583687 - RNA, 24 nt, Artificial Sequence
  Synthetic
agaugaaugaaagacuagagaagg

SEQ ID NO: 583688 - RNA, 18 nt, Artificial Sequence
  Synthetic
acaaaacacaggagaagg

SEQ ID NO: 583689 - RNA, 19 nt, Artificial Sequence
  Synthetic
aacaaaacacaggagaagg

SEQ ID NO: 583690 - RNA, 20 nt, Artificial Sequence
  Synthetic
aaacaaaacacaggagaagg

SEQ ID NO: 583691 - RNA, 21 nt, Artificial Sequence
  Synthetic
gaaacaaaacacaggagaagg

SEQ ID NO: 583692 - RNA, 22 nt, Artificial Sequence
  Synthetic
ggaaacaaaacacaggagaagg

SEQ ID NO: 583693 - RNA, 23 nt, Artificial Sequence
  Synthetic
aggaaacaaaacacaggagaagg

SEQ ID NO: 583694 - RNA, 24 nt, Artificial Sequence
  Synthetic
gaggaaacaaaacacaggagaagg

SEQ ID NO: 583695 - RNA, 18 nt, Artificial Sequence
  Synthetic
ucuucagucuggagaagg

SEQ ID NO: 583696 - RNA, 19 nt, Artificial Sequence
  Synthetic
uucuucagucuggagaagg

SEQ ID NO: 583697 - RNA, 20 nt, Artificial Sequence
  Synthetic
uuucuucagucuggagaagg

SEQ ID NO: 583698 - RNA, 21 nt, Artificial Sequence
  Synthetic
uuuucuucagucuggagaagg

SEQ ID NO: 583699 - RNA, 22 nt, Artificial Sequence
  Synthetic
cuuuucuucagucuggagaagg

SEQ ID NO: 583700 - RNA, 23 nt, Artificial Sequence
  Synthetic
gcuuuucuucagucuggagaagg

SEQ ID NO: 583701 - RNA, 24 nt, Artificial Sequence
  Synthetic
ugcuuuucuucagucuggagaagg

SEQ ID NO: 583702 - RNA, 18 nt, Artificial Sequence
  Synthetic
gcacgaccuuggagaagg

SEQ ID NO: 583703 - RNA, 19 nt, Artificial Sequence
  Synthetic
agcacgaccuuggagaagg

SEQ ID NO: 583704 - RNA, 20 nt, Artificial Sequence
  Synthetic
cagcacgaccuuggagaagg

SEQ ID NO: 583705 - RNA, 21 nt, Artificial Sequence
  Synthetic
gcagcacgaccuuggagaagg

SEQ ID NO: 583706 - RNA, 22 nt, Artificial Sequence
  Synthetic
ggcagcacgaccuuggagaagg

SEQ ID NO: 583707 - RNA, 23 nt, Artificial Sequence
  Synthetic
aggcagcacgaccuuggagaagg

SEQ ID NO: 583708 - RNA, 24 nt, Artificial Sequence
  Synthetic
gaggcagcacgaccuuggagaagg

SEQ ID NO: 583709 - RNA, 18 nt, Artificial Sequence
  Synthetic
aauggccucaugagaagg

SEQ ID NO: 583710 - RNA, 19 nt, Artificial Sequence
  Synthetic
caauggccucaugagaagg

SEQ ID NO: 583711 - RNA, 20 nt, Artificial Sequence
  Synthetic
ucaauggccucaugagaagg

SEQ ID NO: 583712 - RNA, 21 nt, Artificial Sequence
  Synthetic
cucaauggccucaugagaagg

SEQ ID NO: 583713 - RNA, 22 nt, Artificial Sequence
  Synthetic
ucucaauggccucaugagaagg

SEQ ID NO: 583714 - RNA, 23 nt, Artificial Sequence
  Synthetic
cucucaauggccucaugagaagg

SEQ ID NO: 583715 - RNA, 24 nt, Artificial Sequence
  Synthetic
acucucaauggccucaugagaagg

SEQ ID NO: 583716 - RNA, 18 nt, Artificial Sequence
  Synthetic
ggagaaaaagauagaagg

SEQ ID NO: 583717 - RNA, 19 nt, Artificial Sequence
  Synthetic
uggagaaaaagauagaagg

SEQ ID NO: 583718 - RNA, 20 nt, Artificial Sequence
  Synthetic
guggagaaaaagauagaagg

SEQ ID NO: 583719 - RNA, 21 nt, Artificial Sequence
  Synthetic
gguggagaaaaagauagaagg

SEQ ID NO: 583720 - RNA, 22 nt, Artificial Sequence
  Synthetic
ugguggagaaaaagauagaagg

SEQ ID NO: 583721 - RNA, 23 nt, Artificial Sequence
  Synthetic
cugguggagaaaaagauagaagg

SEQ ID NO: 583722 - RNA, 24 nt, Artificial Sequence
  Synthetic
ucugguggagaaaaagauagaagg

SEQ ID NO: 583723 - RNA, 18 nt, Artificial Sequence
  Synthetic
ugcugagcugauagaagg

SEQ ID NO: 583724 - RNA, 19 nt, Artificial Sequence
  Synthetic
cugcugagcugauagaagg

SEQ ID NO: 583725 - RNA, 20 nt, Artificial Sequence
  Synthetic
gcugcugagcugauagaagg

SEQ ID NO: 583726 - RNA, 21 nt, Artificial Sequence
  Synthetic
cgcugcugagcugauagaagg

SEQ ID NO: 583727 - RNA, 22 nt, Artificial Sequence
  Synthetic
ccgcugcugagcugauagaagg

SEQ ID NO: 583728 - RNA, 23 nt, Artificial Sequence
  Synthetic
accgcugcugagcugauagaagg

SEQ ID NO: 583729 - RNA, 24 nt, Artificial Sequence
  Synthetic
uaccgcugcugagcugauagaagg

SEQ ID NO: 583730 - RNA, 18 nt, Artificial Sequence
  Synthetic
cuuaaaaaguauagaagg

SEQ ID NO: 583731 - RNA, 19 nt, Artificial Sequence
  Synthetic
acuuaaaaaguauagaagg

SEQ ID NO: 583732 - RNA, 20 nt, Artificial Sequence
  Synthetic
gacuuaaaaaguauagaagg

SEQ ID NO: 583733 - RNA, 21 nt, Artificial Sequence
  Synthetic
ugacuuaaaaaguauagaagg

SEQ ID NO: 583734 - RNA, 22 nt, Artificial Sequence
  Synthetic
gugacuuaaaaaguauagaagg

SEQ ID NO: 583735 - RNA, 23 nt, Artificial Sequence
  Synthetic
ggugacuuaaaaaguauagaagg

SEQ ID NO: 583736 - RNA, 24 nt, Artificial Sequence
  Synthetic
aggugacuuaaaaaguauagaagg

SEQ ID NO: 583737 - RNA, 18 nt, Artificial Sequence
  Synthetic
aacaaaaagauacgaagg

SEQ ID NO: 583738 - RNA, 19 nt, Artificial Sequence
  Synthetic
aaacaaaaagauacgaagg

SEQ ID NO: 583739 - RNA, 20 nt, Artificial Sequence
  Synthetic
aaaacaaaaagauacgaagg

SEQ ID NO: 583740 - RNA, 21 nt, Artificial Sequence
  Synthetic
uaaaacaaaaagauacgaagg

SEQ ID NO: 583741 - RNA, 22 nt, Artificial Sequence
  Synthetic
uuaaaacaaaaagauacgaagg

SEQ ID NO: 583742 - RNA, 23 nt, Artificial Sequence
  Synthetic
uuuaaaacaaaaagauacgaagg

SEQ ID NO: 583743 - RNA, 24 nt, Artificial Sequence
  Synthetic
uuuuaaaacaaaaagauacgaagg

SEQ ID NO: 583744 - RNA, 18 nt, Artificial Sequence
  Synthetic
aggagcgcuugccgaagg

SEQ ID NO: 583745 - RNA, 19 nt, Artificial Sequence
  Synthetic
caggagcgcuugccgaagg

SEQ ID NO: 583746 - RNA, 20 nt, Artificial Sequence
  Synthetic
ccaggagcgcuugccgaagg

SEQ ID NO: 583747 - RNA, 21 nt, Artificial Sequence
  Synthetic
cccaggagcgcuugccgaagg

SEQ ID NO: 583748 - RNA, 22 nt, Artificial Sequence
  Synthetic
gcccaggagcgcuugccgaagg

SEQ ID NO: 583749 - RNA, 23 nt, Artificial Sequence
  Synthetic
agcccaggagcgcuugccgaagg

SEQ ID NO: 583750 - RNA, 24 nt, Artificial Sequence
  Synthetic
aagcccaggagcgcuugccgaagg

SEQ ID NO: 583751 - RNA, 18 nt, Artificial Sequence
  Synthetic
uuuuuuuccuaucgaagg

SEQ ID NO: 583752 - RNA, 19 nt, Artificial Sequence
  Synthetic
uuuuuuuuccuaucgaagg

SEQ ID NO: 583753 - RNA, 20 nt, Artificial Sequence
  Synthetic
auuuuuuuuccuaucgaagg

SEQ ID NO: 583754 - RNA, 21 nt, Artificial Sequence
  Synthetic
cauuuuuuuuccuaucgaagg

SEQ ID NO: 583755 - RNA, 22 nt, Artificial Sequence
  Synthetic
acauuuuuuuuccuaucgaagg

SEQ ID NO: 583756 - RNA, 23 nt, Artificial Sequence
  Synthetic
uacauuuuuuuuccuaucgaagg

SEQ ID NO: 583757 - RNA, 24 nt, Artificial Sequence
  Synthetic
auacauuuuuuuuccuaucgaagg

SEQ ID NO: 583758 - RNA, 18 nt, Artificial Sequence
  Synthetic
auuaaaaaaaaaggaagg

SEQ ID NO: 583759 - RNA, 19 nt, Artificial Sequence
  Synthetic
aauuaaaaaaaaaggaagg

SEQ ID NO: 583760 - RNA, 20 nt, Artificial Sequence
  Synthetic
aaauuaaaaaaaaaggaagg

SEQ ID NO: 583761 - RNA, 21 nt, Artificial Sequence
  Synthetic
gaaauuaaaaaaaaaggaagg

SEQ ID NO: 583762 - RNA, 22 nt, Artificial Sequence
  Synthetic
agaaauuaaaaaaaaaggaagg

SEQ ID NO: 583763 - RNA, 23 nt, Artificial Sequence
  Synthetic
cagaaauuaaaaaaaaaggaagg

SEQ ID NO: 583764 - RNA, 24 nt, Artificial Sequence
  Synthetic
acagaaauuaaaaaaaaaggaagg

SEQ ID NO: 583765 - RNA, 18 nt, Artificial Sequence
  Synthetic
gguagaaagaaaggaagg

SEQ ID NO: 583766 - RNA, 19 nt, Artificial Sequence
  Synthetic
agguagaaagaaaggaagg

SEQ ID NO: 583767 - RNA, 20 nt, Artificial Sequence
  Synthetic
gagguagaaagaaaggaagg

SEQ ID NO: 583768 - RNA, 21 nt, Artificial Sequence
  Synthetic
agagguagaaagaaaggaagg

SEQ ID NO: 583769 - RNA, 22 nt, Artificial Sequence
  Synthetic
gagagguagaaagaaaggaagg

SEQ ID NO: 583770 - RNA, 23 nt, Artificial Sequence
  Synthetic
agagagguagaaagaaaggaagg

SEQ ID NO: 583771 - RNA, 24 nt, Artificial Sequence
  Synthetic
gagagagguagaaagaaaggaagg

SEQ ID NO: 583772 - RNA, 18 nt, Artificial Sequence
  Synthetic
ggaaaggaagaaggaagg

SEQ ID NO: 583773 - RNA, 19 nt, Artificial Sequence
  Synthetic
aggaaaggaagaaggaagg

SEQ ID NO: 583774 - RNA, 20 nt, Artificial Sequence
  Synthetic
aaggaaaggaagaaggaagg

SEQ ID NO: 583775 - RNA, 21 nt, Artificial Sequence
  Synthetic
aaaggaaaggaagaaggaagg

SEQ ID NO: 583776 - RNA, 22 nt, Artificial Sequence
  Synthetic
gaaaggaaaggaagaaggaagg

SEQ ID NO: 583777 - RNA, 23 nt, Artificial Sequence
  Synthetic
ggaaaggaaaggaagaaggaagg

SEQ ID NO: 583778 - RNA, 24 nt, Artificial Sequence
  Synthetic
aggaaaggaaaggaagaaggaagg

SEQ ID NO: 583779 - RNA, 18 nt, Artificial Sequence
  Synthetic
aggaagaaggaaggaagg

SEQ ID NO: 583780 - RNA, 19 nt, Artificial Sequence
  Synthetic
aaggaagaaggaaggaagg

SEQ ID NO: 583781 - RNA, 20 nt, Artificial Sequence
  Synthetic
aaaggaagaaggaaggaagg

SEQ ID NO: 583782 - RNA, 21 nt, Artificial Sequence
  Synthetic
gaaaggaagaaggaaggaagg

SEQ ID NO: 583783 - RNA, 22 nt, Artificial Sequence
  Synthetic
ggaaaggaagaaggaaggaagg

SEQ ID NO: 583784 - RNA, 23 nt, Artificial Sequence
  Synthetic
aggaaaggaagaaggaaggaagg

SEQ ID NO: 583785 - RNA, 24 nt, Artificial Sequence
  Synthetic
aaggaaaggaagaaggaaggaagg

SEQ ID NO: 583786 - RNA, 18 nt, Artificial Sequence
  Synthetic
agaaggaaggaaggaagg

SEQ ID NO: 583787 - RNA, 19 nt, Artificial Sequence
  Synthetic
aagaaggaaggaaggaagg

SEQ ID NO: 583788 - RNA, 20 nt, Artificial Sequence
  Synthetic
gaagaaggaaggaaggaagg

SEQ ID NO: 583789 - RNA, 21 nt, Artificial Sequence
  Synthetic
ggaagaaggaaggaaggaagg

SEQ ID NO: 583790 - RNA, 22 nt, Artificial Sequence
  Synthetic
aggaagaaggaaggaaggaagg

SEQ ID NO: 583791 - RNA, 23 nt, Artificial Sequence
  Synthetic
aaggaagaaggaaggaaggaagg

SEQ ID NO: 583792 - RNA, 24 nt, Artificial Sequence
  Synthetic
aaaggaagaaggaaggaaggaagg

SEQ ID NO: 583793 - RNA, 18 nt, Artificial Sequence
  Synthetic
gcaguaagggaaggaagg

SEQ ID NO: 583794 - RNA, 19 nt, Artificial Sequence
  Synthetic
ggcaguaagggaaggaagg

SEQ ID NO: 583795 - RNA, 20 nt, Artificial Sequence
  Synthetic
aggcaguaagggaaggaagg

SEQ ID NO: 583796 - RNA, 21 nt, Artificial Sequence
  Synthetic
caggcaguaagggaaggaagg

SEQ ID NO: 583797 - RNA, 22 nt, Artificial Sequence
  Synthetic
ccaggcaguaagggaaggaagg

SEQ ID NO: 583798 - RNA, 23 nt, Artificial Sequence
  Synthetic
gccaggcaguaagggaaggaagg

SEQ ID NO: 583799 - RNA, 24 nt, Artificial Sequence
  Synthetic
agccaggcaguaagggaaggaagg

SEQ ID NO: 583800 - RNA, 18 nt, Artificial Sequence
  Synthetic
cccuggagggaaggaagg

SEQ ID NO: 583801 - RNA, 19 nt, Artificial Sequence
  Synthetic
ucccuggagggaaggaagg

SEQ ID NO: 583802 - RNA, 20 nt, Artificial Sequence
  Synthetic
gucccuggagggaaggaagg

SEQ ID NO: 583803 - RNA, 21 nt, Artificial Sequence
  Synthetic
ugucccuggagggaaggaagg

SEQ ID NO: 583804 - RNA, 22 nt, Artificial Sequence
  Synthetic
gugucccuggagggaaggaagg

SEQ ID NO: 583805 - RNA, 23 nt, Artificial Sequence
  Synthetic
ugugucccuggagggaaggaagg

SEQ ID NO: 583806 - RNA, 24 nt, Artificial Sequence
  Synthetic
gugugucccuggagggaaggaagg

SEQ ID NO: 583807 - RNA, 18 nt, Artificial Sequence
  Synthetic
caagacaaggcaggaagg

SEQ ID NO: 583808 - RNA, 19 nt, Artificial Sequence
  Synthetic
gcaagacaaggcaggaagg

SEQ ID NO: 583809 - RNA, 20 nt, Artificial Sequence
  Synthetic
ggcaagacaaggcaggaagg

SEQ ID NO: 583810 - RNA, 21 nt, Artificial Sequence
  Synthetic
aggcaagacaaggcaggaagg

SEQ ID NO: 583811 - RNA, 22 nt, Artificial Sequence
  Synthetic
aaggcaagacaaggcaggaagg

SEQ ID NO: 583812 - RNA, 23 nt, Artificial Sequence
  Synthetic
caaggcaagacaaggcaggaagg

SEQ ID NO: 583813 - RNA, 24 nt, Artificial Sequence
  Synthetic
gcaaggcaagacaaggcaggaagg

SEQ ID NO: 583814 - RNA, 18 nt, Artificial Sequence
  Synthetic
ggcaggaaggcaggaagg

SEQ ID NO: 583815 - RNA, 19 nt, Artificial Sequence
  Synthetic
aggcaggaaggcaggaagg

SEQ ID NO: 583816 - RNA, 20 nt, Artificial Sequence
  Synthetic
aaggcaggaaggcaggaagg

SEQ ID NO: 583817 - RNA, 21 nt, Artificial Sequence
  Synthetic
caaggcaggaaggcaggaagg

SEQ ID NO: 583818 - RNA, 22 nt, Artificial Sequence
  Synthetic
acaaggcaggaaggcaggaagg

SEQ ID NO: 583819 - RNA, 23 nt, Artificial Sequence
  Synthetic
gacaaggcaggaaggcaggaagg

SEQ ID NO: 583820 - RNA, 24 nt, Artificial Sequence
  Synthetic
agacaaggcaggaaggcaggaagg

SEQ ID NO: 583821 - RNA, 18 nt, Artificial Sequence
  Synthetic
gagaggaaaucaggaagg

SEQ ID NO: 583822 - RNA, 19 nt, Artificial Sequence
  Synthetic
agagaggaaaucaggaagg

SEQ ID NO: 583823 - RNA, 20 nt, Artificial Sequence
  Synthetic
aagagaggaaaucaggaagg

SEQ ID NO: 583824 - RNA, 21 nt, Artificial Sequence
  Synthetic
gaagagaggaaaucaggaagg

SEQ ID NO: 583825 - RNA, 22 nt, Artificial Sequence
  Synthetic
agaagagaggaaaucaggaagg

SEQ ID NO: 583826 - RNA, 23 nt, Artificial Sequence
  Synthetic
gagaagagaggaaaucaggaagg

SEQ ID NO: 583827 - RNA, 24 nt, Artificial Sequence
  Synthetic
agagaagagaggaaaucaggaagg

SEQ ID NO: 583828 - RNA, 18 nt, Artificial Sequence
  Synthetic
aaaauaacaagaggaagg

SEQ ID NO: 583829 - RNA, 19 nt, Artificial Sequence
  Synthetic
gaaaauaacaagaggaagg

SEQ ID NO: 583830 - RNA, 20 nt, Artificial Sequence
  Synthetic
agaaaauaacaagaggaagg

SEQ ID NO: 583831 - RNA, 21 nt, Artificial Sequence
  Synthetic
uagaaaauaacaagaggaagg

SEQ ID NO: 583832 - RNA, 22 nt, Artificial Sequence
  Synthetic
auagaaaauaacaagaggaagg

SEQ ID NO: 583833 - RNA, 23 nt, Artificial Sequence
  Synthetic
aauagaaaauaacaagaggaagg

SEQ ID NO: 583834 - RNA, 24 nt, Artificial Sequence
  Synthetic
aaauagaaaauaacaagaggaagg

SEQ ID NO: 583835 - RNA, 18 nt, Artificial Sequence
  Synthetic
ggggacuacagaggaagg

SEQ ID NO: 583836 - RNA, 19 nt, Artificial Sequence
  Synthetic
uggggacuacagaggaagg

SEQ ID NO: 583837 - RNA, 20 nt, Artificial Sequence
  Synthetic
cuggggacuacagaggaagg

SEQ ID NO: 583838 - RNA, 21 nt, Artificial Sequence
  Synthetic
acuggggacuacagaggaagg

SEQ ID NO: 583839 - RNA, 22 nt, Artificial Sequence
  Synthetic
cacuggggacuacagaggaagg

SEQ ID NO: 583840 - RNA, 23 nt, Artificial Sequence
  Synthetic
acacuggggacuacagaggaagg

SEQ ID NO: 583841 - RNA, 24 nt, Artificial Sequence
  Synthetic
gacacuggggacuacagaggaagg

SEQ ID NO: 583842 - RNA, 18 nt, Artificial Sequence
  Synthetic
uucaagguuagaggaagg

SEQ ID NO: 583843 - RNA, 19 nt, Artificial Sequence
  Synthetic
auucaagguuagaggaagg

SEQ ID NO: 583844 - RNA, 20 nt, Artificial Sequence
  Synthetic
uauucaagguuagaggaagg

SEQ ID NO: 583845 - RNA, 21 nt, Artificial Sequence
  Synthetic
uuauucaagguuagaggaagg

SEQ ID NO: 583846 - RNA, 22 nt, Artificial Sequence
  Synthetic
auuauucaagguuagaggaagg

SEQ ID NO: 583847 - RNA, 23 nt, Artificial Sequence
  Synthetic
aauuauucaagguuagaggaagg

SEQ ID NO: 583848 - RNA, 24 nt, Artificial Sequence
  Synthetic
aaauuauucaagguuagaggaagg

SEQ ID NO: 583849 - RNA, 18 nt, Artificial Sequence
  Synthetic
gggagggagggaggaagg

SEQ ID NO: 583850 - RNA, 19 nt, Artificial Sequence
  Synthetic
agggagggagggaggaagg

SEQ ID NO: 583851 - RNA, 20 nt, Artificial Sequence
  Synthetic
gagggagggagggaggaagg

SEQ ID NO: 583852 - RNA, 21 nt, Artificial Sequence
  Synthetic
ggagggagggagggaggaagg

SEQ ID NO: 583853 - RNA, 22 nt, Artificial Sequence
  Synthetic
gggagggagggagggaggaagg

SEQ ID NO: 583854 - RNA, 23 nt, Artificial Sequence
  Synthetic
agggagggagggagggaggaagg

SEQ ID NO: 583855 - RNA, 24 nt, Artificial Sequence
  Synthetic
cagggagggagggagggaggaagg

SEQ ID NO: 583856 - RNA, 18 nt, Artificial Sequence
  Synthetic
guagaugggggaggaagg

SEQ ID NO: 583857 - RNA, 19 nt, Artificial Sequence
  Synthetic
uguagaugggggaggaagg

SEQ ID NO: 583858 - RNA, 20 nt, Artificial Sequence
  Synthetic
guguagaugggggaggaagg

SEQ ID NO: 583859 - RNA, 21 nt, Artificial Sequence
  Synthetic
uguguagaugggggaggaagg

SEQ ID NO: 583860 - RNA, 22 nt, Artificial Sequence
  Synthetic
guguguagaugggggaggaagg

SEQ ID NO: 583861 - RNA, 23 nt, Artificial Sequence
  Synthetic
uguguguagaugggggaggaagg

SEQ ID NO: 583862 - RNA, 24 nt, Artificial Sequence
  Synthetic
auguguguagaugggggaggaagg

SEQ ID NO: 583863 - RNA, 18 nt, Artificial Sequence
  Synthetic
aaauggggucucggaagg

SEQ ID NO: 583864 - RNA, 19 nt, Artificial Sequence
  Synthetic
gaaauggggucucggaagg

SEQ ID NO: 583865 - RNA, 20 nt, Artificial Sequence
  Synthetic
ugaaauggggucucggaagg

SEQ ID NO: 583866 - RNA, 21 nt, Artificial Sequence
  Synthetic
cugaaauggggucucggaagg

SEQ ID NO: 583867 - RNA, 22 nt, Artificial Sequence
  Synthetic
ucugaaauggggucucggaagg

SEQ ID NO: 583868 - RNA, 23 nt, Artificial Sequence
  Synthetic
cucugaaauggggucucggaagg

SEQ ID NO: 583869 - RNA, 24 nt, Artificial Sequence
  Synthetic
ccucugaaauggggucucggaagg

SEQ ID NO: 583870 - RNA, 18 nt, Artificial Sequence
  Synthetic
ccuuuaaauaagggaagg

SEQ ID NO: 583871 - RNA, 19 nt, Artificial Sequence
  Synthetic
uccuuuaaauaagggaagg

SEQ ID NO: 583872 - RNA, 20 nt, Artificial Sequence
  Synthetic
guccuuuaaauaagggaagg

SEQ ID NO: 583873 - RNA, 21 nt, Artificial Sequence
  Synthetic
uguccuuuaaauaagggaagg

SEQ ID NO: 583874 - RNA, 22 nt, Artificial Sequence
  Synthetic
auguccuuuaaauaagggaagg

SEQ ID NO: 583875 - RNA, 23 nt, Artificial Sequence
  Synthetic
cauguccuuuaaauaagggaagg

SEQ ID NO: 583876 - RNA, 24 nt, Artificial Sequence
  Synthetic
gcauguccuuuaaauaagggaagg

SEQ ID NO: 583877 - RNA, 18 nt, Artificial Sequence
  Synthetic
ccaggcaguaagggaagg

SEQ ID NO: 583878 - RNA, 19 nt, Artificial Sequence
  Synthetic
gccaggcaguaagggaagg

SEQ ID NO: 583879 - RNA, 20 nt, Artificial Sequence
  Synthetic
agccaggcaguaagggaagg

SEQ ID NO: 583880 - RNA, 21 nt, Artificial Sequence
  Synthetic
aagccaggcaguaagggaagg

SEQ ID NO: 583881 - RNA, 22 nt, Artificial Sequence
  Synthetic
gaagccaggcaguaagggaagg

SEQ ID NO: 583882 - RNA, 23 nt, Artificial Sequence
  Synthetic
ggaagccaggcaguaagggaagg

SEQ ID NO: 583883 - RNA, 24 nt, Artificial Sequence
  Synthetic
aggaagccaggcaguaagggaagg

SEQ ID NO: 583884 - RNA, 18 nt, Artificial Sequence
  Synthetic
aaacuaaagcagggaagg

SEQ ID NO: 583885 - RNA, 19 nt, Artificial Sequence
  Synthetic
aaaacuaaagcagggaagg

SEQ ID NO: 583886 - RNA, 20 nt, Artificial Sequence
  Synthetic
caaaacuaaagcagggaagg

SEQ ID NO: 583887 - RNA, 21 nt, Artificial Sequence
  Synthetic
gcaaaacuaaagcagggaagg

SEQ ID NO: 583888 - RNA, 22 nt, Artificial Sequence
  Synthetic
agcaaaacuaaagcagggaagg

SEQ ID NO: 583889 - RNA, 23 nt, Artificial Sequence
  Synthetic
gagcaaaacuaaagcagggaagg

SEQ ID NO: 583890 - RNA, 24 nt, Artificial Sequence
  Synthetic
ggagcaaaacuaaagcagggaagg

SEQ ID NO: 583891 - RNA, 18 nt, Artificial Sequence
  Synthetic
augagugaggagggaagg

SEQ ID NO: 583892 - RNA, 19 nt, Artificial Sequence
  Synthetic
aaugagugaggagggaagg

SEQ ID NO: 583893 - RNA, 20 nt, Artificial Sequence
  Synthetic
gaaugagugaggagggaagg

SEQ ID NO: 583894 - RNA, 21 nt, Artificial Sequence
  Synthetic
agaaugagugaggagggaagg

SEQ ID NO: 583895 - RNA, 22 nt, Artificial Sequence
  Synthetic
gagaaugagugaggagggaagg

SEQ ID NO: 583896 - RNA, 23 nt, Artificial Sequence
  Synthetic
ggagaaugagugaggagggaagg

SEQ ID NO: 583897 - RNA, 24 nt, Artificial Sequence
  Synthetic
aggagaaugagugaggagggaagg

SEQ ID NO: 583898 - RNA, 18 nt, Artificial Sequence
  Synthetic
ugagguagugagggaagg

SEQ ID NO: 583899 - RNA, 19 nt, Artificial Sequence
  Synthetic
gugagguagugagggaagg

SEQ ID NO: 583900 - RNA, 20 nt, Artificial Sequence
  Synthetic
ugugagguagugagggaagg

SEQ ID NO: 583901 - RNA, 21 nt, Artificial Sequence
  Synthetic
uugugagguagugagggaagg

SEQ ID NO: 583902 - RNA, 22 nt, Artificial Sequence
  Synthetic
uuugugagguagugagggaagg

SEQ ID NO: 583903 - RNA, 23 nt, Artificial Sequence
  Synthetic
uuuugugagguagugagggaagg

SEQ ID NO: 583904 - RNA, 24 nt, Artificial Sequence
  Synthetic
uuuuugugagguagugagggaagg

SEQ ID NO: 583905 - RNA, 18 nt, Artificial Sequence
  Synthetic
aaagcaggauagggaagg

SEQ ID NO: 583906 - RNA, 19 nt, Artificial Sequence
  Synthetic
gaaagcaggauagggaagg

SEQ ID NO: 583907 - RNA, 20 nt, Artificial Sequence
  Synthetic
ugaaagcaggauagggaagg

SEQ ID NO: 583908 - RNA, 21 nt, Artificial Sequence
  Synthetic
augaaagcaggauagggaagg

SEQ ID NO: 583909 - RNA, 22 nt, Artificial Sequence
  Synthetic
aaugaaagcaggauagggaagg

SEQ ID NO: 583910 - RNA, 23 nt, Artificial Sequence
  Synthetic
gaaugaaagcaggauagggaagg

SEQ ID NO: 583911 - RNA, 24 nt, Artificial Sequence
  Synthetic
agaaugaaagcaggauagggaagg

SEQ ID NO: 583912 - RNA, 18 nt, Artificial Sequence
  Synthetic
gcccuguacuagggaagg

SEQ ID NO: 583913 - RNA, 19 nt, Artificial Sequence
  Synthetic
ggcccuguacuagggaagg

SEQ ID NO: 583914 - RNA, 20 nt, Artificial Sequence
  Synthetic
gggcccuguacuagggaagg

SEQ ID NO: 583915 - RNA, 21 nt, Artificial Sequence
  Synthetic
ggggcccuguacuagggaagg

SEQ ID NO: 583916 - RNA, 22 nt, Artificial Sequence
  Synthetic
gggggcccuguacuagggaagg

SEQ ID NO: 583917 - RNA, 23 nt, Artificial Sequence
  Synthetic
ugggggcccuguacuagggaagg

SEQ ID NO: 583918 - RNA, 24 nt, Artificial Sequence
  Synthetic
augggggcccuguacuagggaagg

SEQ ID NO: 583919 - RNA, 18 nt, Artificial Sequence
  Synthetic
gagagaagcgggggaagg

SEQ ID NO: 583920 - RNA, 19 nt, Artificial Sequence
  Synthetic
agagagaagcgggggaagg

SEQ ID NO: 583921 - RNA, 20 nt, Artificial Sequence
  Synthetic
gagagagaagcgggggaagg

SEQ ID NO: 583922 - RNA, 21 nt, Artificial Sequence
  Synthetic
agagagagaagcgggggaagg

SEQ ID NO: 583923 - RNA, 22 nt, Artificial Sequence
  Synthetic
gagagagagaagcgggggaagg

SEQ ID NO: 583924 - RNA, 23 nt, Artificial Sequence
  Synthetic
agagagagagaagcgggggaagg

SEQ ID NO: 583925 - RNA, 24 nt, Artificial Sequence
  Synthetic
gagagagagagaagcgggggaagg

SEQ ID NO: 583926 - RNA, 18 nt, Artificial Sequence
  Synthetic
ugugggguggggggaagg

SEQ ID NO: 583927 - RNA, 19 nt, Artificial Sequence
  Synthetic
cugugggguggggggaagg

SEQ ID NO: 583928 - RNA, 20 nt, Artificial Sequence
  Synthetic
gcugugggguggggggaagg

SEQ ID NO: 583929 - RNA, 21 nt, Artificial Sequence
  Synthetic
ugcugugggguggggggaagg

SEQ ID NO: 583930 - RNA, 22 nt, Artificial Sequence
  Synthetic
cugcugugggguggggggaagg

SEQ ID NO: 583931 - RNA, 23 nt, Artificial Sequence
  Synthetic
acugcugugggguggggggaagg

SEQ ID NO: 583932 - RNA, 24 nt, Artificial Sequence
  Synthetic
gacugcugugggguggggggaagg

SEQ ID NO: 583933 - RNA, 18 nt, Artificial Sequence
  Synthetic
ugcaaauuuuggggaagg

SEQ ID NO: 583934 - RNA, 19 nt, Artificial Sequence
  Synthetic
uugcaaauuuuggggaagg

SEQ ID NO: 583935 - RNA, 20 nt, Artificial Sequence
  Synthetic
cuugcaaauuuuggggaagg

SEQ ID NO: 583936 - RNA, 21 nt, Artificial Sequence
  Synthetic
ccuugcaaauuuuggggaagg

SEQ ID NO: 583937 - RNA, 22 nt, Artificial Sequence
  Synthetic
cccuugcaaauuuuggggaagg

SEQ ID NO: 583938 - RNA, 23 nt, Artificial Sequence
  Synthetic
ccccuugcaaauuuuggggaagg

SEQ ID NO: 583939 - RNA, 24 nt, Artificial Sequence
  Synthetic
uccccuugcaaauuuuggggaagg

SEQ ID NO: 583940 - RNA, 18 nt, Artificial Sequence
  Synthetic
cuaguagaugugggaagg

SEQ ID NO: 583941 - RNA, 19 nt, Artificial Sequence
  Synthetic
acuaguagaugugggaagg

SEQ ID NO: 583942 - RNA, 20 nt, Artificial Sequence
  Synthetic
gacuaguagaugugggaagg

SEQ ID NO: 583943 - RNA, 21 nt, Artificial Sequence
  Synthetic
ggacuaguagaugugggaagg

SEQ ID NO: 583944 - RNA, 22 nt, Artificial Sequence
  Synthetic
cggacuaguagaugugggaagg

SEQ ID NO: 583945 - RNA, 23 nt, Artificial Sequence
  Synthetic
gcggacuaguagaugugggaagg

SEQ ID NO: 583946 - RNA, 24 nt, Artificial Sequence
  Synthetic
cgcggacuaguagaugugggaagg

SEQ ID NO: 583947 - RNA, 18 nt, Artificial Sequence
  Synthetic
uuacuugaaacuggaagg

SEQ ID NO: 583948 - RNA, 19 nt, Artificial Sequence
  Synthetic
auuacuugaaacuggaagg

SEQ ID NO: 583949 - RNA, 20 nt, Artificial Sequence
  Synthetic
aauuacuugaaacuggaagg

SEQ ID NO: 583950 - RNA, 21 nt, Artificial Sequence
  Synthetic
gaauuacuugaaacuggaagg

SEQ ID NO: 583951 - RNA, 22 nt, Artificial Sequence
  Synthetic
agaauuacuugaaacuggaagg

SEQ ID NO: 583952 - RNA, 23 nt, Artificial Sequence
  Synthetic
gagaauuacuugaaacuggaagg

SEQ ID NO: 583953 - RNA, 24 nt, Artificial Sequence
  Synthetic
ggagaauuacuugaaacuggaagg

SEQ ID NO: 583954 - RNA, 18 nt, Artificial Sequence
  Synthetic
caugcugaaucuggaagg

SEQ ID NO: 583955 - RNA, 19 nt, Artificial Sequence
  Synthetic
acaugcugaaucuggaagg

SEQ ID NO: 583956 - RNA, 20 nt, Artificial Sequence
  Synthetic
cacaugcugaaucuggaagg

SEQ ID NO: 583957 - RNA, 21 nt, Artificial Sequence
  Synthetic
ucacaugcugaaucuggaagg

SEQ ID NO: 583958 - RNA, 22 nt, Artificial Sequence
  Synthetic
uucacaugcugaaucuggaagg

SEQ ID NO: 583959 - RNA, 23 nt, Artificial Sequence
  Synthetic
cuucacaugcugaaucuggaagg

SEQ ID NO: 583960 - RNA, 24 nt, Artificial Sequence
  Synthetic
acuucacaugcugaaucuggaagg

SEQ ID NO: 583961 - RNA, 18 nt, Artificial Sequence
  Synthetic
gucuauagaucuggaagg

SEQ ID NO: 583962 - RNA, 19 nt, Artificial Sequence
  Synthetic
ugucuauagaucuggaagg

SEQ ID NO: 583963 - RNA, 20 nt, Artificial Sequence
  Synthetic
augucuauagaucuggaagg

SEQ ID NO: 583964 - RNA, 21 nt, Artificial Sequence
  Synthetic
gaugucuauagaucuggaagg

SEQ ID NO: 583965 - RNA, 22 nt, Artificial Sequence
  Synthetic
ugaugucuauagaucuggaagg

SEQ ID NO: 583966 - RNA, 23 nt, Artificial Sequence
  Synthetic
cugaugucuauagaucuggaagg

SEQ ID NO: 583967 - RNA, 24 nt, Artificial Sequence
  Synthetic
acugaugucuauagaucuggaagg

SEQ ID NO: 583968 - RNA, 18 nt, Artificial Sequence
  Synthetic
ugucuugguaguggaagg

SEQ ID NO: 583969 - RNA, 19 nt, Artificial Sequence
  Synthetic
augucuugguaguggaagg

SEQ ID NO: 583970 - RNA, 20 nt, Artificial Sequence
  Synthetic
gaugucuugguaguggaagg

SEQ ID NO: 583971 - RNA, 21 nt, Artificial Sequence
  Synthetic
ugaugucuugguaguggaagg

SEQ ID NO: 583972 - RNA, 22 nt, Artificial Sequence
  Synthetic
gugaugucuugguaguggaagg

SEQ ID NO: 583973 - RNA, 23 nt, Artificial Sequence
  Synthetic
agugaugucuugguaguggaagg

SEQ ID NO: 583974 - RNA, 24 nt, Artificial Sequence
  Synthetic
cagugaugucuugguaguggaagg

SEQ ID NO: 583975 - RNA, 18 nt, Artificial Sequence
  Synthetic
ucacuugaacguggaagg

SEQ ID NO: 583976 - RNA, 19 nt, Artificial Sequence
  Synthetic
aucacuugaacguggaagg

SEQ ID NO: 583977 - RNA, 20 nt, Artificial Sequence
  Synthetic
aaucacuugaacguggaagg

SEQ ID NO: 583978 - RNA, 21 nt, Artificial Sequence
  Synthetic
gaaucacuugaacguggaagg

SEQ ID NO: 583979 - RNA, 22 nt, Artificial Sequence
  Synthetic
agaaucacuugaacguggaagg

SEQ ID NO: 583980 - RNA, 23 nt, Artificial Sequence
  Synthetic
gagaaucacuugaacguggaagg

SEQ ID NO: 583981 - RNA, 24 nt, Artificial Sequence
  Synthetic
ggagaaucacuugaacguggaagg

SEQ ID NO: 583982 - RNA, 18 nt, Artificial Sequence
  Synthetic
gggccugccuguggaagg

SEQ ID NO: 583983 - RNA, 19 nt, Artificial Sequence
  Synthetic
ggggccugccuguggaagg

SEQ ID NO: 583984 - RNA, 20 nt, Artificial Sequence
  Synthetic
aggggccugccuguggaagg

SEQ ID NO: 583985 - RNA, 21 nt, Artificial Sequence
  Synthetic
caggggccugccuguggaagg

SEQ ID NO: 583986 - RNA, 22 nt, Artificial Sequence
  Synthetic
ccaggggccugccuguggaagg

SEQ ID NO: 583987 - RNA, 23 nt, Artificial Sequence
  Synthetic
gccaggggccugccuguggaagg

SEQ ID NO: 583988 - RNA, 24 nt, Artificial Sequence
  Synthetic
agccaggggccugccuguggaagg

SEQ ID NO: 583989 - RNA, 18 nt, Artificial Sequence
  Synthetic
caauaacaaauuggaagg

SEQ ID NO: 583990 - RNA, 19 nt, Artificial Sequence
  Synthetic
acaauaacaaauuggaagg

SEQ ID NO: 583991 - RNA, 20 nt, Artificial Sequence
  Synthetic
gacaauaacaaauuggaagg

SEQ ID NO: 583992 - RNA, 21 nt, Artificial Sequence
  Synthetic
ugacaauaacaaauuggaagg

SEQ ID NO: 583993 - RNA, 22 nt, Artificial Sequence
  Synthetic
augacaauaacaaauuggaagg

SEQ ID NO: 583994 - RNA, 23 nt, Artificial Sequence
  Synthetic
uaugacaauaacaaauuggaagg

SEQ ID NO: 583995 - RNA, 24 nt, Artificial Sequence
  Synthetic
auaugacaauaacaaauuggaagg

SEQ ID NO: 583996 - RNA, 18 nt, Artificial Sequence
  Synthetic
ucccagcuacuuggaagg

SEQ ID NO: 583997 - RNA, 19 nt, Artificial Sequence
  Synthetic
aucccagcuacuuggaagg

SEQ ID NO: 583998 - RNA, 20 nt, Artificial Sequence
  Synthetic
aaucccagcuacuuggaagg

SEQ ID NO: 583999 - RNA, 21 nt, Artificial Sequence
  Synthetic
uaaucccagcuacuuggaagg

SEQ ID NO: 584000 - RNA, 22 nt, Artificial Sequence
  Synthetic
guaaucccagcuacuuggaagg

SEQ ID NO: 584001 - RNA, 23 nt, Artificial Sequence
  Synthetic
uguaaucccagcuacuuggaagg

SEQ ID NO: 584002 - RNA, 24 nt, Artificial Sequence
  Synthetic
cuguaaucccagcuacuuggaagg

SEQ ID NO: 584003 - RNA, 18 nt, Artificial Sequence
  Synthetic
ucucuaggaguuggaagg

SEQ ID NO: 584004 - RNA, 19 nt, Artificial Sequence
  Synthetic
gucucuaggaguuggaagg

SEQ ID NO: 584005 - RNA, 20 nt, Artificial Sequence
  Synthetic
ugucucuaggaguuggaagg

SEQ ID NO: 584006 - RNA, 21 nt, Artificial Sequence
  Synthetic
uugucucuaggaguuggaagg

SEQ ID NO: 584007 - RNA, 22 nt, Artificial Sequence
  Synthetic
guugucucuaggaguuggaagg

SEQ ID NO: 584008 - RNA, 23 nt, Artificial Sequence
  Synthetic
uguugucucuaggaguuggaagg

SEQ ID NO: 584009 - RNA, 24 nt, Artificial Sequence
  Synthetic
uuguugucucuaggaguuggaagg

SEQ ID NO: 584010 - RNA, 18 nt, Artificial Sequence
  Synthetic
ucccagcacuuuggaagg

SEQ ID NO: 584011 - RNA, 19 nt, Artificial Sequence
  Synthetic
aucccagcacuuuggaagg

SEQ ID NO: 584012 - RNA, 20 nt, Artificial Sequence
  Synthetic
aaucccagcacuuuggaagg

SEQ ID NO: 584013 - RNA, 21 nt, Artificial Sequence
  Synthetic
uaaucccagcacuuuggaagg

SEQ ID NO: 584014 - RNA, 22 nt, Artificial Sequence
  Synthetic
guaaucccagcacuuuggaagg

SEQ ID NO: 584015 - RNA, 23 nt, Artificial Sequence
  Synthetic
uguaaucccagcacuuuggaagg

SEQ ID NO: 584016 - RNA, 24 nt, Artificial Sequence
  Synthetic
cuguaaucccagcacuuuggaagg

SEQ ID NO: 584017 - RNA, 18 nt, Artificial Sequence
  Synthetic
gaagcuauguuuggaagg

SEQ ID NO: 584018 - RNA, 19 nt, Artificial Sequence
  Synthetic
ggaagcuauguuuggaagg

SEQ ID NO: 584019 - RNA, 20 nt, Artificial Sequence
  Synthetic
uggaagcuauguuuggaagg

SEQ ID NO: 584020 - RNA, 21 nt, Artificial Sequence
  Synthetic
auggaagcuauguuuggaagg

SEQ ID NO: 584021 - RNA, 22 nt, Artificial Sequence
  Synthetic
uauggaagcuauguuuggaagg

SEQ ID NO: 584022 - RNA, 23 nt, Artificial Sequence
  Synthetic
cuauggaagcuauguuuggaagg

SEQ ID NO: 584023 - RNA, 24 nt, Artificial Sequence
  Synthetic
ccuauggaagcuauguuuggaagg

SEQ ID NO: 584024 - RNA, 18 nt, Artificial Sequence
  Synthetic
uacauaacgaaaugaagg

SEQ ID NO: 584025 - RNA, 19 nt, Artificial Sequence
  Synthetic
guacauaacgaaaugaagg

SEQ ID NO: 584026 - RNA, 20 nt, Artificial Sequence
  Synthetic
gguacauaacgaaaugaagg

SEQ ID NO: 584027 - RNA, 21 nt, Artificial Sequence
  Synthetic
ggguacauaacgaaaugaagg

SEQ ID NO: 584028 - RNA, 22 nt, Artificial Sequence
  Synthetic
uggguacauaacgaaaugaagg

SEQ ID NO: 584029 - RNA, 23 nt, Artificial Sequence
  Synthetic
cuggguacauaacgaaaugaagg

SEQ ID NO: 584030 - RNA, 24 nt, Artificial Sequence
  Synthetic
acuggguacauaacgaaaugaagg

SEQ ID NO: 584031 - RNA, 18 nt, Artificial Sequence
  Synthetic
augcuuccuaaaugaagg

SEQ ID NO: 584032 - RNA, 19 nt, Artificial Sequence
  Synthetic
caugcuuccuaaaugaagg

SEQ ID NO: 584033 - RNA, 20 nt, Artificial Sequence
  Synthetic
acaugcuuccuaaaugaagg

SEQ ID NO: 584034 - RNA, 21 nt, Artificial Sequence
  Synthetic
uacaugcuuccuaaaugaagg

SEQ ID NO: 584035 - RNA, 22 nt, Artificial Sequence
  Synthetic
guacaugcuuccuaaaugaagg

SEQ ID NO: 584036 - RNA, 23 nt, Artificial Sequence
  Synthetic
aguacaugcuuccuaaaugaagg

SEQ ID NO: 584037 - RNA, 24 nt, Artificial Sequence
  Synthetic
caguacaugcuuccuaaaugaagg

SEQ ID NO: 584038 - RNA, 18 nt, Artificial Sequence
  Synthetic
caaaaaagucaaugaagg

SEQ ID NO: 584039 - RNA, 19 nt, Artificial Sequence
  Synthetic
ucaaaaaagucaaugaagg

SEQ ID NO: 584040 - RNA, 20 nt, Artificial Sequence
  Synthetic
uucaaaaaagucaaugaagg

SEQ ID NO: 584041 - RNA, 21 nt, Artificial Sequence
  Synthetic
cuucaaaaaagucaaugaagg

SEQ ID NO: 584042 - RNA, 22 nt, Artificial Sequence
  Synthetic
ccuucaaaaaagucaaugaagg

SEQ ID NO: 584043 - RNA, 23 nt, Artificial Sequence
  Synthetic
cccuucaaaaaagucaaugaagg

SEQ ID NO: 584044 - RNA, 24 nt, Artificial Sequence
  Synthetic
ccccuucaaaaaagucaaugaagg

SEQ ID NO: 584045 - RNA, 18 nt, Artificial Sequence
  Synthetic
gcacucaacgcaugaagg

SEQ ID NO: 584046 - RNA, 19 nt, Artificial Sequence
  Synthetic
ggcacucaacgcaugaagg

SEQ ID NO: 584047 - RNA, 20 nt, Artificial Sequence
  Synthetic
gggcacucaacgcaugaagg

SEQ ID NO: 584048 - RNA, 21 nt, Artificial Sequence
  Synthetic
agggcacucaacgcaugaagg

SEQ ID NO: 584049 - RNA, 22 nt, Artificial Sequence
  Synthetic
gagggcacucaacgcaugaagg

SEQ ID NO: 584050 - RNA, 23 nt, Artificial Sequence
  Synthetic
ugagggcacucaacgcaugaagg

SEQ ID NO: 584051 - RNA, 24 nt, Artificial Sequence
  Synthetic
augagggcacucaacgcaugaagg

SEQ ID NO: 584052 - RNA, 18 nt, Artificial Sequence
  Synthetic
uuuccuuucuuaugaagg

SEQ ID NO: 584053 - RNA, 19 nt, Artificial Sequence
  Synthetic
cuuuccuuucuuaugaagg

SEQ ID NO: 584054 - RNA, 20 nt, Artificial Sequence
  Synthetic
ucuuuccuuucuuaugaagg

SEQ ID NO: 584055 - RNA, 21 nt, Artificial Sequence
  Synthetic
gucuuuccuuucuuaugaagg

SEQ ID NO: 584056 - RNA, 22 nt, Artificial Sequence
  Synthetic
agucuuuccuuucuuaugaagg

SEQ ID NO: 584057 - RNA, 23 nt, Artificial Sequence
  Synthetic
uagucuuuccuuucuuaugaagg

SEQ ID NO: 584058 - RNA, 24 nt, Artificial Sequence
  Synthetic
uuagucuuuccuuucuuaugaagg

SEQ ID NO: 584059 - RNA, 18 nt, Artificial Sequence
  Synthetic
uacucaguaggcugaagg

SEQ ID NO: 584060 - RNA, 19 nt, Artificial Sequence
  Synthetic
cuacucaguaggcugaagg

SEQ ID NO: 584061 - RNA, 20 nt, Artificial Sequence
  Synthetic
gcuacucaguaggcugaagg

SEQ ID NO: 584062 - RNA, 21 nt, Artificial Sequence
  Synthetic
ggcuacucaguaggcugaagg

SEQ ID NO: 584063 - RNA, 22 nt, Artificial Sequence
  Synthetic
uggcuacucaguaggcugaagg

SEQ ID NO: 584064 - RNA, 23 nt, Artificial Sequence
  Synthetic
cuggcuacucaguaggcugaagg

SEQ ID NO: 584065 - RNA, 24 nt, Artificial Sequence
  Synthetic
ccuggcuacucaguaggcugaagg

SEQ ID NO: 584066 - RNA, 18 nt, Artificial Sequence
  Synthetic
gguggcgguugcugaagg

SEQ ID NO: 584067 - RNA, 19 nt, Artificial Sequence
  Synthetic
ggguggcgguugcugaagg

SEQ ID NO: 584068 - RNA, 20 nt, Artificial Sequence
  Synthetic
aggguggcgguugcugaagg

SEQ ID NO: 584069 - RNA, 21 nt, Artificial Sequence
  Synthetic
caggguggcgguugcugaagg

SEQ ID NO: 584070 - RNA, 22 nt, Artificial Sequence
  Synthetic
ucaggguggcgguugcugaagg

SEQ ID NO: 584071 - RNA, 23 nt, Artificial Sequence
  Synthetic
aucaggguggcgguugcugaagg

SEQ ID NO: 584072 - RNA, 24 nt, Artificial Sequence
  Synthetic
gaucaggguggcgguugcugaagg

SEQ ID NO: 584073 - RNA, 18 nt, Artificial Sequence
  Synthetic
gugguuaaagucugaagg

SEQ ID NO: 584074 - RNA, 19 nt, Artificial Sequence
  Synthetic
ugugguuaaagucugaagg

SEQ ID NO: 584075 - RNA, 20 nt, Artificial Sequence
  Synthetic
uugugguuaaagucugaagg

SEQ ID NO: 584076 - RNA, 21 nt, Artificial Sequence
  Synthetic
auugugguuaaagucugaagg

SEQ ID NO: 584077 - RNA, 22 nt, Artificial Sequence
  Synthetic
uauugugguuaaagucugaagg

SEQ ID NO: 584078 - RNA, 23 nt, Artificial Sequence
  Synthetic
auauugugguuaaagucugaagg

SEQ ID NO: 584079 - RNA, 24 nt, Artificial Sequence
  Synthetic
aauauugugguuaaagucugaagg

SEQ ID NO: 584080 - RNA, 18 nt, Artificial Sequence
  Synthetic
ugauccuguuucugaagg

SEQ ID NO: 584081 - RNA, 19 nt, Artificial Sequence
  Synthetic
cugauccuguuucugaagg

SEQ ID NO: 584082 - RNA, 20 nt, Artificial Sequence
  Synthetic
acugauccuguuucugaagg

SEQ ID NO: 584083 - RNA, 21 nt, Artificial Sequence
  Synthetic
cacugauccuguuucugaagg

SEQ ID NO: 584084 - RNA, 22 nt, Artificial Sequence
  Synthetic
gcacugauccuguuucugaagg

SEQ ID NO: 584085 - RNA, 23 nt, Artificial Sequence
  Synthetic
ggcacugauccuguuucugaagg

SEQ ID NO: 584086 - RNA, 24 nt, Artificial Sequence
  Synthetic
gggcacugauccuguuucugaagg

SEQ ID NO: 584087 - RNA, 18 nt, Artificial Sequence
  Synthetic
auuucaauaaagugaagg

SEQ ID NO: 584088 - RNA, 19 nt, Artificial Sequence
  Synthetic
aauuucaauaaagugaagg

SEQ ID NO: 584089 - RNA, 20 nt, Artificial Sequence
  Synthetic
aaauuucaauaaagugaagg

SEQ ID NO: 584090 - RNA, 21 nt, Artificial Sequence
  Synthetic
uaaauuucaauaaagugaagg

SEQ ID NO: 584091 - RNA, 22 nt, Artificial Sequence
  Synthetic
cuaaauuucaauaaagugaagg

SEQ ID NO: 584092 - RNA, 23 nt, Artificial Sequence
  Synthetic
acuaaauuucaauaaagugaagg

SEQ ID NO: 584093 - RNA, 24 nt, Artificial Sequence
  Synthetic
cacuaaauuucaauaaagugaagg

SEQ ID NO: 584094 - RNA, 18 nt, Artificial Sequence
  Synthetic
gcagggucagagugaagg

SEQ ID NO: 584095 - RNA, 19 nt, Artificial Sequence
  Synthetic
agcagggucagagugaagg

SEQ ID NO: 584096 - RNA, 20 nt, Artificial Sequence
  Synthetic
uagcagggucagagugaagg

SEQ ID NO: 584097 - RNA, 21 nt, Artificial Sequence
  Synthetic
guagcagggucagagugaagg

SEQ ID NO: 584098 - RNA, 22 nt, Artificial Sequence
  Synthetic
uguagcagggucagagugaagg

SEQ ID NO: 584099 - RNA, 23 nt, Artificial Sequence
  Synthetic
auguagcagggucagagugaagg

SEQ ID NO: 584100 - RNA, 24 nt, Artificial Sequence
  Synthetic
aauguagcagggucagagugaagg

SEQ ID NO: 584101 - RNA, 21 nt, Artificial Sequence
  Synthetic
gaagggggaggggugugaagg

SEQ ID NO: 584102 - RNA, 22 nt, Artificial Sequence
  Synthetic
ggaagggggaggggugugaagg

SEQ ID NO: 584103 - RNA, 23 nt, Artificial Sequence
  Synthetic
gggaagggggaggggugugaagg

SEQ ID NO: 584104 - RNA, 24 nt, Artificial Sequence
  Synthetic
ggggaagggggaggggugugaagg

SEQ ID NO: 584105 - RNA, 22 nt, Artificial Sequence
  Synthetic
ugaagggggaggggugugaagg

SEQ ID NO: 584106 - RNA, 23 nt, Artificial Sequence
  Synthetic
gugaagggggaggggugugaagg

SEQ ID NO: 584107 - RNA, 24 nt, Artificial Sequence
  Synthetic
ugugaagggggaggggugugaagg

SEQ ID NO: 584108 - RNA, 18 nt, Artificial Sequence
  Synthetic
aaaguaagcacuugaagg

SEQ ID NO: 584109 - RNA, 19 nt, Artificial Sequence
  Synthetic
aaaaguaagcacuugaagg

SEQ ID NO: 584110 - RNA, 20 nt, Artificial Sequence
  Synthetic
caaaaguaagcacuugaagg

SEQ ID NO: 584111 - RNA, 21 nt, Artificial Sequence
  Synthetic
ucaaaaguaagcacuugaagg

SEQ ID NO: 584112 - RNA, 22 nt, Artificial Sequence
  Synthetic
aucaaaaguaagcacuugaagg

SEQ ID NO: 584113 - RNA, 23 nt, Artificial Sequence
  Synthetic
uaucaaaaguaagcacuugaagg

SEQ ID NO: 584114 - RNA, 24 nt, Artificial Sequence
  Synthetic
guaucaaaaguaagcacuugaagg

SEQ ID NO: 584115 - RNA, 18 nt, Artificial Sequence
  Synthetic
uuuaaucuaccuugaagg

SEQ ID NO: 584116 - RNA, 19 nt, Artificial Sequence
  Synthetic
auuuaaucuaccuugaagg

SEQ ID NO: 584117 - RNA, 20 nt, Artificial Sequence
  Synthetic
aauuuaaucuaccuugaagg

SEQ ID NO: 584118 - RNA, 21 nt, Artificial Sequence
  Synthetic
gaauuuaaucuaccuugaagg

SEQ ID NO: 584119 - RNA, 22 nt, Artificial Sequence
  Synthetic
agaauuuaaucuaccuugaagg

SEQ ID NO: 584120 - RNA, 23 nt, Artificial Sequence
  Synthetic
aagaauuuaaucuaccuugaagg

SEQ ID NO: 584121 - RNA, 24 nt, Artificial Sequence
  Synthetic
aaagaauuuaaucuaccuugaagg

SEQ ID NO: 584122 - RNA, 18 nt, Artificial Sequence
  Synthetic
cuaggagcugguugaagg

SEQ ID NO: 584123 - RNA, 19 nt, Artificial Sequence
  Synthetic
acuaggagcugguugaagg

SEQ ID NO: 584124 - RNA, 20 nt, Artificial Sequence
  Synthetic
aacuaggagcugguugaagg

SEQ ID NO: 584125 - RNA, 21 nt, Artificial Sequence
  Synthetic
caacuaggagcugguugaagg

SEQ ID NO: 584126 - RNA, 22 nt, Artificial Sequence
  Synthetic
ucaacuaggagcugguugaagg

SEQ ID NO: 584127 - RNA, 23 nt, Artificial Sequence
  Synthetic
cucaacuaggagcugguugaagg

SEQ ID NO: 584128 - RNA, 24 nt, Artificial Sequence
  Synthetic
ccucaacuaggagcugguugaagg

SEQ ID NO: 584129 - RNA, 18 nt, Artificial Sequence
  Synthetic
gggcuggguaaaauaagg

SEQ ID NO: 584130 - RNA, 19 nt, Artificial Sequence
  Synthetic
ggggcuggguaaaauaagg

SEQ ID NO: 584131 - RNA, 20 nt, Artificial Sequence
  Synthetic
aggggcuggguaaaauaagg

SEQ ID NO: 584132 - RNA, 21 nt, Artificial Sequence
  Synthetic
uaggggcuggguaaaauaagg

SEQ ID NO: 584133 - RNA, 22 nt, Artificial Sequence
  Synthetic
auaggggcuggguaaaauaagg

SEQ ID NO: 584134 - RNA, 23 nt, Artificial Sequence
  Synthetic
aauaggggcuggguaaaauaagg

SEQ ID NO: 584135 - RNA, 24 nt, Artificial Sequence
  Synthetic
gaauaggggcuggguaaaauaagg

SEQ ID NO: 584136 - RNA, 18 nt, Artificial Sequence
  Synthetic
acaaguaagucaauaagg

SEQ ID NO: 584137 - RNA, 19 nt, Artificial Sequence
  Synthetic
aacaaguaagucaauaagg

SEQ ID NO: 584138 - RNA, 20 nt, Artificial Sequence
  Synthetic
aaacaaguaagucaauaagg

SEQ ID NO: 584139 - RNA, 21 nt, Artificial Sequence
  Synthetic
uaaacaaguaagucaauaagg

SEQ ID NO: 584140 - RNA, 22 nt, Artificial Sequence
  Synthetic
uuaaacaaguaagucaauaagg

SEQ ID NO: 584141 - RNA, 23 nt, Artificial Sequence
  Synthetic
auuaaacaaguaagucaauaagg

SEQ ID NO: 584142 - RNA, 24 nt, Artificial Sequence
  Synthetic
gauuaaacaaguaagucaauaagg

SEQ ID NO: 584143 - RNA, 18 nt, Artificial Sequence
  Synthetic
ucauuuggaauaauaagg

SEQ ID NO: 584144 - RNA, 19 nt, Artificial Sequence
  Synthetic
gucauuuggaauaauaagg

SEQ ID NO: 584145 - RNA, 20 nt, Artificial Sequence
  Synthetic
ugucauuuggaauaauaagg

SEQ ID NO: 584146 - RNA, 21 nt, Artificial Sequence
  Synthetic
cugucauuuggaauaauaagg

SEQ ID NO: 584147 - RNA, 22 nt, Artificial Sequence
  Synthetic
ucugucauuuggaauaauaagg

SEQ ID NO: 584148 - RNA, 23 nt, Artificial Sequence
  Synthetic
uucugucauuuggaauaauaagg

SEQ ID NO: 584149 - RNA, 24 nt, Artificial Sequence
  Synthetic
auucugucauuuggaauaauaagg

SEQ ID NO: 584150 - RNA, 18 nt, Artificial Sequence
  Synthetic
acucauuguguaauaagg

SEQ ID NO: 584151 - RNA, 19 nt, Artificial Sequence
  Synthetic
aacucauuguguaauaagg

SEQ ID NO: 584152 - RNA, 20 nt, Artificial Sequence
  Synthetic
caacucauuguguaauaagg

SEQ ID NO: 584153 - RNA, 21 nt, Artificial Sequence
  Synthetic
ucaacucauuguguaauaagg

SEQ ID NO: 584154 - RNA, 22 nt, Artificial Sequence
  Synthetic
cucaacucauuguguaauaagg

SEQ ID NO: 584155 - RNA, 23 nt, Artificial Sequence
  Synthetic
acucaacucauuguguaauaagg

SEQ ID NO: 584156 - RNA, 24 nt, Artificial Sequence
  Synthetic
uacucaacucauuguguaauaagg

SEQ ID NO: 584157 - RNA, 18 nt, Artificial Sequence
  Synthetic
ucacuugaacccauaagg

SEQ ID NO: 584158 - RNA, 19 nt, Artificial Sequence
  Synthetic
aucacuugaacccauaagg

SEQ ID NO: 584159 - RNA, 20 nt, Artificial Sequence
  Synthetic
aaucacuugaacccauaagg

SEQ ID NO: 584160 - RNA, 21 nt, Artificial Sequence
  Synthetic
gaaucacuugaacccauaagg

SEQ ID NO: 584161 - RNA, 22 nt, Artificial Sequence
  Synthetic
agaaucacuugaacccauaagg

SEQ ID NO: 584162 - RNA, 23 nt, Artificial Sequence
  Synthetic
aagaaucacuugaacccauaagg

SEQ ID NO: 584163 - RNA, 24 nt, Artificial Sequence
  Synthetic
gaagaaucacuugaacccauaagg

SEQ ID NO: 584164 - RNA, 18 nt, Artificial Sequence
  Synthetic
ggaguugcacccauaagg

SEQ ID NO: 584165 - RNA, 19 nt, Artificial Sequence
  Synthetic
gggaguugcacccauaagg

SEQ ID NO: 584166 - RNA, 20 nt, Artificial Sequence
  Synthetic
cgggaguugcacccauaagg

SEQ ID NO: 584167 - RNA, 21 nt, Artificial Sequence
  Synthetic
ccgggaguugcacccauaagg

SEQ ID NO: 584168 - RNA, 22 nt, Artificial Sequence
  Synthetic
gccgggaguugcacccauaagg

SEQ ID NO: 584169 - RNA, 23 nt, Artificial Sequence
  Synthetic
ugccgggaguugcacccauaagg

SEQ ID NO: 584170 - RNA, 24 nt, Artificial Sequence
  Synthetic
cugccgggaguugcacccauaagg

SEQ ID NO: 584171 - RNA, 18 nt, Artificial Sequence
  Synthetic
ccuucuguugggauaagg

SEQ ID NO: 584172 - RNA, 19 nt, Artificial Sequence
  Synthetic
uccuucuguugggauaagg

SEQ ID NO: 584173 - RNA, 20 nt, Artificial Sequence
  Synthetic
auccuucuguugggauaagg

SEQ ID NO: 584174 - RNA, 21 nt, Artificial Sequence
  Synthetic
aauccuucuguugggauaagg

SEQ ID NO: 584175 - RNA, 22 nt, Artificial Sequence
  Synthetic
aaauccuucuguugggauaagg

SEQ ID NO: 584176 - RNA, 23 nt, Artificial Sequence
  Synthetic
uaaauccuucuguugggauaagg

SEQ ID NO: 584177 - RNA, 24 nt, Artificial Sequence
  Synthetic
auaaauccuucuguugggauaagg

SEQ ID NO: 584178 - RNA, 18 nt, Artificial Sequence
  Synthetic
cuucccuuucuuauaagg

SEQ ID NO: 584179 - RNA, 19 nt, Artificial Sequence
  Synthetic
ucuucccuuucuuauaagg

SEQ ID NO: 584180 - RNA, 20 nt, Artificial Sequence
  Synthetic
cucuucccuuucuuauaagg

SEQ ID NO: 584181 - RNA, 21 nt, Artificial Sequence
  Synthetic
acucuucccuuucuuauaagg

SEQ ID NO: 584182 - RNA, 22 nt, Artificial Sequence
  Synthetic
uacucuucccuuucuuauaagg

SEQ ID NO: 584183 - RNA, 23 nt, Artificial Sequence
  Synthetic
uuacucuucccuuucuuauaagg

SEQ ID NO: 584184 - RNA, 24 nt, Artificial Sequence
  Synthetic
uuuacucuucccuuucuuauaagg

SEQ ID NO: 584185 - RNA, 18 nt, Artificial Sequence
  Synthetic
aguacuccacaacuaagg

SEQ ID NO: 584186 - RNA, 19 nt, Artificial Sequence
  Synthetic
aaguacuccacaacuaagg

SEQ ID NO: 584187 - RNA, 20 nt, Artificial Sequence
  Synthetic
aaaguacuccacaacuaagg

SEQ ID NO: 584188 - RNA, 21 nt, Artificial Sequence
  Synthetic
uaaaguacuccacaacuaagg

SEQ ID NO: 584189 - RNA, 22 nt, Artificial Sequence
  Synthetic
cuaaaguacuccacaacuaagg

SEQ ID NO: 584190 - RNA, 23 nt, Artificial Sequence
  Synthetic
gcuaaaguacuccacaacuaagg

SEQ ID NO: 584191 - RNA, 24 nt, Artificial Sequence
  Synthetic
ugcuaaaguacuccacaacuaagg

SEQ ID NO: 584192 - RNA, 18 nt, Artificial Sequence
  Synthetic
aacuuagaaauacuaagg

SEQ ID NO: 584193 - RNA, 19 nt, Artificial Sequence
  Synthetic
uaacuuagaaauacuaagg

SEQ ID NO: 584194 - RNA, 20 nt, Artificial Sequence
  Synthetic
uuaacuuagaaauacuaagg

SEQ ID NO: 584195 - RNA, 21 nt, Artificial Sequence
  Synthetic
auuaacuuagaaauacuaagg

SEQ ID NO: 584196 - RNA, 22 nt, Artificial Sequence
  Synthetic
uauuaacuuagaaauacuaagg

SEQ ID NO: 584197 - RNA, 23 nt, Artificial Sequence
  Synthetic
uuauuaacuuagaaauacuaagg

SEQ ID NO: 584198 - RNA, 24 nt, Artificial Sequence
  Synthetic
auuauuaacuuagaaauacuaagg

SEQ ID NO: 584199 - RNA, 18 nt, Artificial Sequence
  Synthetic
guggugggaauacuaagg

SEQ ID NO: 584200 - RNA, 19 nt, Artificial Sequence
  Synthetic
uguggugggaauacuaagg

SEQ ID NO: 584201 - RNA, 20 nt, Artificial Sequence
  Synthetic
guguggugggaauacuaagg

SEQ ID NO: 584202 - RNA, 21 nt, Artificial Sequence
  Synthetic
gguguggugggaauacuaagg

SEQ ID NO: 584203 - RNA, 22 nt, Artificial Sequence
  Synthetic
ggguguggugggaauacuaagg

SEQ ID NO: 584204 - RNA, 23 nt, Artificial Sequence
  Synthetic
uggguguggugggaauacuaagg

SEQ ID NO: 584205 - RNA, 24 nt, Artificial Sequence
  Synthetic
uuggguguggugggaauacuaagg

SEQ ID NO: 584206 - RNA, 18 nt, Artificial Sequence
  Synthetic
caguauucugagcuaagg

SEQ ID NO: 584207 - RNA, 19 nt, Artificial Sequence
  Synthetic
acaguauucugagcuaagg

SEQ ID NO: 584208 - RNA, 20 nt, Artificial Sequence
  Synthetic
uacaguauucugagcuaagg

SEQ ID NO: 584209 - RNA, 21 nt, Artificial Sequence
  Synthetic
uuacaguauucugagcuaagg

SEQ ID NO: 584210 - RNA, 22 nt, Artificial Sequence
  Synthetic
auuacaguauucugagcuaagg

SEQ ID NO: 584211 - RNA, 23 nt, Artificial Sequence
  Synthetic
cauuacaguauucugagcuaagg

SEQ ID NO: 584212 - RNA, 24 nt, Artificial Sequence
  Synthetic
acauuacaguauucugagcuaagg

SEQ ID NO: 584213 - RNA, 18 nt, Artificial Sequence
  Synthetic
cuacucgggaggcuaagg

SEQ ID NO: 584214 - RNA, 19 nt, Artificial Sequence
  Synthetic
gcuacucgggaggcuaagg

SEQ ID NO: 584215 - RNA, 20 nt, Artificial Sequence
  Synthetic
agcuacucgggaggcuaagg

SEQ ID NO: 584216 - RNA, 21 nt, Artificial Sequence
  Synthetic
cagcuacucgggaggcuaagg

SEQ ID NO: 584217 - RNA, 22 nt, Artificial Sequence
  Synthetic
ccagcuacucgggaggcuaagg

SEQ ID NO: 584218 - RNA, 23 nt, Artificial Sequence
  Synthetic
cccagcuacucgggaggcuaagg

SEQ ID NO: 584219 - RNA, 24 nt, Artificial Sequence
  Synthetic
ucccagcuacucgggaggcuaagg

SEQ ID NO: 584220 - RNA, 18 nt, Artificial Sequence
  Synthetic
cuacuugggaggcuaagg

SEQ ID NO: 584221 - RNA, 19 nt, Artificial Sequence
  Synthetic
gcuacuugggaggcuaagg

SEQ ID NO: 584222 - RNA, 20 nt, Artificial Sequence
  Synthetic
agcuacuugggaggcuaagg

SEQ ID NO: 584223 - RNA, 21 nt, Artificial Sequence
  Synthetic
cagcuacuugggaggcuaagg

SEQ ID NO: 584224 - RNA, 22 nt, Artificial Sequence
  Synthetic
ccagcuacuugggaggcuaagg

SEQ ID NO: 584225 - RNA, 23 nt, Artificial Sequence
  Synthetic
cccagcuacuugggaggcuaagg

SEQ ID NO: 584226 - RNA, 24 nt, Artificial Sequence
  Synthetic
ucccagcuacuugggaggcuaagg

SEQ ID NO: 584227 - RNA, 18 nt, Artificial Sequence
  Synthetic
ugacucuuaauucuaagg

SEQ ID NO: 584228 - RNA, 19 nt, Artificial Sequence
  Synthetic
uugacucuuaauucuaagg

SEQ ID NO: 584229 - RNA, 20 nt, Artificial Sequence
  Synthetic
uuugacucuuaauucuaagg

SEQ ID NO: 584230 - RNA, 21 nt, Artificial Sequence
  Synthetic
guuugacucuuaauucuaagg

SEQ ID NO: 584231 - RNA, 22 nt, Artificial Sequence
  Synthetic
uguuugacucuuaauucuaagg

SEQ ID NO: 584232 - RNA, 23 nt, Artificial Sequence
  Synthetic
cuguuugacucuuaauucuaagg

SEQ ID NO: 584233 - RNA, 24 nt, Artificial Sequence
  Synthetic
gcuguuugacucuuaauucuaagg

SEQ ID NO: 584234 - RNA, 18 nt, Artificial Sequence
  Synthetic
ugauccacccuucuaagg

SEQ ID NO: 584235 - RNA, 19 nt, Artificial Sequence
  Synthetic
uugauccacccuucuaagg

SEQ ID NO: 584236 - RNA, 20 nt, Artificial Sequence
  Synthetic
uuugauccacccuucuaagg

SEQ ID NO: 584237 - RNA, 21 nt, Artificial Sequence
  Synthetic
uuuugauccacccuucuaagg

SEQ ID NO: 584238 - RNA, 22 nt, Artificial Sequence
  Synthetic
uuuuugauccacccuucuaagg

SEQ ID NO: 584239 - RNA, 23 nt, Artificial Sequence
  Synthetic
guuuuugauccacccuucuaagg

SEQ ID NO: 584240 - RNA, 24 nt, Artificial Sequence
  Synthetic
uguuuuugauccacccuucuaagg

SEQ ID NO: 584241 - RNA, 18 nt, Artificial Sequence
  Synthetic
uacucugcuaaaguaagg

SEQ ID NO: 584242 - RNA, 19 nt, Artificial Sequence
  Synthetic
uuacucugcuaaaguaagg

SEQ ID NO: 584243 - RNA, 20 nt, Artificial Sequence
  Synthetic
auuacucugcuaaaguaagg

SEQ ID NO: 584244 - RNA, 21 nt, Artificial Sequence
  Synthetic
aauuacucugcuaaaguaagg

SEQ ID NO: 584245 - RNA, 22 nt, Artificial Sequence
  Synthetic
aaauuacucugcuaaaguaagg

SEQ ID NO: 584246 - RNA, 23 nt, Artificial Sequence
  Synthetic
uaaauuacucugcuaaaguaagg

SEQ ID NO: 584247 - RNA, 24 nt, Artificial Sequence
  Synthetic
uuaaauuacucugcuaaaguaagg

SEQ ID NO: 584248 - RNA, 18 nt, Artificial Sequence
  Synthetic
caauaaagcuagguaagg

SEQ ID NO: 584249 - RNA, 19 nt, Artificial Sequence
  Synthetic
ucaauaaagcuagguaagg

SEQ ID NO: 584250 - RNA, 20 nt, Artificial Sequence
  Synthetic
uucaauaaagcuagguaagg

SEQ ID NO: 584251 - RNA, 21 nt, Artificial Sequence
  Synthetic
cuucaauaaagcuagguaagg

SEQ ID NO: 584252 - RNA, 22 nt, Artificial Sequence
  Synthetic
acuucaauaaagcuagguaagg

SEQ ID NO: 584253 - RNA, 23 nt, Artificial Sequence
  Synthetic
uacuucaauaaagcuagguaagg

SEQ ID NO: 584254 - RNA, 24 nt, Artificial Sequence
  Synthetic
auacuucaauaaagcuagguaagg

SEQ ID NO: 584255 - RNA, 18 nt, Artificial Sequence
  Synthetic
aaggcaacauugguaagg

SEQ ID NO: 584256 - RNA, 19 nt, Artificial Sequence
  Synthetic
aaaggcaacauugguaagg

SEQ ID NO: 584257 - RNA, 20 nt, Artificial Sequence
  Synthetic
gaaaggcaacauugguaagg

SEQ ID NO: 584258 - RNA, 21 nt, Artificial Sequence
  Synthetic
agaaaggcaacauugguaagg

SEQ ID NO: 584259 - RNA, 22 nt, Artificial Sequence
  Synthetic
aagaaaggcaacauugguaagg

SEQ ID NO: 584260 - RNA, 23 nt, Artificial Sequence
  Synthetic
caagaaaggcaacauugguaagg

SEQ ID NO: 584261 - RNA, 24 nt, Artificial Sequence
  Synthetic
acaagaaaggcaacauugguaagg

SEQ ID NO: 584262 - RNA, 18 nt, Artificial Sequence
  Synthetic
gagacaaauaauguaagg

SEQ ID NO: 584263 - RNA, 19 nt, Artificial Sequence
  Synthetic
agagacaaauaauguaagg

SEQ ID NO: 584264 - RNA, 20 nt, Artificial Sequence
  Synthetic
aagagacaaauaauguaagg

SEQ ID NO: 584265 - RNA, 21 nt, Artificial Sequence
  Synthetic
aaagagacaaauaauguaagg

SEQ ID NO: 584266 - RNA, 22 nt, Artificial Sequence
  Synthetic
aaaagagacaaauaauguaagg

SEQ ID NO: 584267 - RNA, 23 nt, Artificial Sequence
  Synthetic
aaaaagagacaaauaauguaagg

SEQ ID NO: 584268 - RNA, 24 nt, Artificial Sequence
  Synthetic
gaaaaagagacaaauaauguaagg

SEQ ID NO: 584269 - RNA, 21 nt, Artificial Sequence
  Synthetic
auuuuuguauaagguguaagg

SEQ ID NO: 584270 - RNA, 22 nt, Artificial Sequence
  Synthetic
aauuuuuguauaagguguaagg

SEQ ID NO: 584271 - RNA, 23 nt, Artificial Sequence
  Synthetic
uaauuuuuguauaagguguaagg

SEQ ID NO: 584272 - RNA, 24 nt, Artificial Sequence
  Synthetic
uuaauuuuuguauaagguguaagg

SEQ ID NO: 584273 - RNA, 22 nt, Artificial Sequence
  Synthetic
gauuuuuguauaagguguaagg

SEQ ID NO: 584274 - RNA, 23 nt, Artificial Sequence
  Synthetic
ugauuuuuguauaagguguaagg

SEQ ID NO: 584275 - RNA, 24 nt, Artificial Sequence
  Synthetic
uugauuuuuguauaagguguaagg

SEQ ID NO: 584276 - RNA, 18 nt, Artificial Sequence
  Synthetic
aguaaaguguguguaagg

SEQ ID NO: 584277 - RNA, 19 nt, Artificial Sequence
  Synthetic
uaguaaaguguguguaagg

SEQ ID NO: 584278 - RNA, 20 nt, Artificial Sequence
  Synthetic
cuaguaaaguguguguaagg

SEQ ID NO: 584279 - RNA, 21 nt, Artificial Sequence
  Synthetic
gcuaguaaaguguguguaagg

SEQ ID NO: 584280 - RNA, 22 nt, Artificial Sequence
  Synthetic
ugcuaguaaaguguguguaagg

SEQ ID NO: 584281 - RNA, 23 nt, Artificial Sequence
  Synthetic
gugcuaguaaaguguguguaagg

SEQ ID NO: 584282 - RNA, 24 nt, Artificial Sequence
  Synthetic
ggugcuaguaaaguguguguaagg

SEQ ID NO: 584283 - RNA, 18 nt, Artificial Sequence
  Synthetic
uuuuagaaaaaauuaagg

SEQ ID NO: 584284 - RNA, 19 nt, Artificial Sequence
  Synthetic
guuuuagaaaaaauuaagg

SEQ ID NO: 584285 - RNA, 20 nt, Artificial Sequence
  Synthetic
uguuuuagaaaaaauuaagg

SEQ ID NO: 584286 - RNA, 21 nt, Artificial Sequence
  Synthetic
uuguuuuagaaaaaauuaagg

SEQ ID NO: 584287 - RNA, 22 nt, Artificial Sequence
  Synthetic
uuuguuuuagaaaaaauuaagg

SEQ ID NO: 584288 - RNA, 23 nt, Artificial Sequence
  Synthetic
uuuuguuuuagaaaaaauuaagg

SEQ ID NO: 584289 - RNA, 24 nt, Artificial Sequence
  Synthetic
uuuuuguuuuagaaaaaauuaagg

SEQ ID NO: 584290 - RNA, 18 nt, Artificial Sequence
  Synthetic
uuacaaacugaauuaagg

SEQ ID NO: 584291 - RNA, 19 nt, Artificial Sequence
  Synthetic
auuacaaacugaauuaagg

SEQ ID NO: 584292 - RNA, 20 nt, Artificial Sequence
  Synthetic
aauuacaaacugaauuaagg

SEQ ID NO: 584293 - RNA, 21 nt, Artificial Sequence
  Synthetic
uaauuacaaacugaauuaagg

SEQ ID NO: 584294 - RNA, 22 nt, Artificial Sequence
  Synthetic
guaauuacaaacugaauuaagg

SEQ ID NO: 584295 - RNA, 23 nt, Artificial Sequence
  Synthetic
uguaauuacaaacugaauuaagg

SEQ ID NO: 584296 - RNA, 24 nt, Artificial Sequence
  Synthetic
auguaauuacaaacugaauuaagg

SEQ ID NO: 584297 - RNA, 18 nt, Artificial Sequence
  Synthetic
uggaauuccuaauuaagg

SEQ ID NO: 584298 - RNA, 19 nt, Artificial Sequence
  Synthetic
uuggaauuccuaauuaagg

SEQ ID NO: 584299 - RNA, 20 nt, Artificial Sequence
  Synthetic
auuggaauuccuaauuaagg

SEQ ID NO: 584300 - RNA, 21 nt, Artificial Sequence
  Synthetic
gauuggaauuccuaauuaagg

SEQ ID NO: 584301 - RNA, 22 nt, Artificial Sequence
  Synthetic
ugauuggaauuccuaauuaagg

SEQ ID NO: 584302 - RNA, 23 nt, Artificial Sequence
  Synthetic
augauuggaauuccuaauuaagg

SEQ ID NO: 584303 - RNA, 24 nt, Artificial Sequence
  Synthetic
aaugauuggaauuccuaauuaagg

SEQ ID NO: 584304 - RNA, 18 nt, Artificial Sequence
  Synthetic
cauuaaccaagauuaagg

SEQ ID NO: 584305 - RNA, 19 nt, Artificial Sequence
  Synthetic
acauuaaccaagauuaagg

SEQ ID NO: 584306 - RNA, 20 nt, Artificial Sequence
  Synthetic
gacauuaaccaagauuaagg

SEQ ID NO: 584307 - RNA, 21 nt, Artificial Sequence
  Synthetic
ugacauuaaccaagauuaagg

SEQ ID NO: 584308 - RNA, 22 nt, Artificial Sequence
  Synthetic
gugacauuaaccaagauuaagg

SEQ ID NO: 584309 - RNA, 23 nt, Artificial Sequence
  Synthetic
agugacauuaaccaagauuaagg

SEQ ID NO: 584310 - RNA, 24 nt, Artificial Sequence
  Synthetic
gagugacauuaaccaagauuaagg

SEQ ID NO: 584311 - RNA, 18 nt, Artificial Sequence
  Synthetic
agcaucuccagauuaagg

SEQ ID NO: 584312 - RNA, 19 nt, Artificial Sequence
  Synthetic
uagcaucuccagauuaagg

SEQ ID NO: 584313 - RNA, 20 nt, Artificial Sequence
  Synthetic
uuagcaucuccagauuaagg

SEQ ID NO: 584314 - RNA, 21 nt, Artificial Sequence
  Synthetic
auuagcaucuccagauuaagg

SEQ ID NO: 584315 - RNA, 22 nt, Artificial Sequence
  Synthetic
uauuagcaucuccagauuaagg

SEQ ID NO: 584316 - RNA, 23 nt, Artificial Sequence
  Synthetic
uuauuagcaucuccagauuaagg

SEQ ID NO: 584317 - RNA, 24 nt, Artificial Sequence
  Synthetic
uuuauuagcaucuccagauuaagg

SEQ ID NO: 584318 - RNA, 18 nt, Artificial Sequence
  Synthetic
uaaauguuaauauuaagg

SEQ ID NO: 584319 - RNA, 19 nt, Artificial Sequence
  Synthetic
cuaaauguuaauauuaagg

SEQ ID NO: 584320 - RNA, 20 nt, Artificial Sequence
  Synthetic
ccuaaauguuaauauuaagg

SEQ ID NO: 584321 - RNA, 21 nt, Artificial Sequence
  Synthetic
accuaaauguuaauauuaagg

SEQ ID NO: 584322 - RNA, 22 nt, Artificial Sequence
  Synthetic
caccuaaauguuaauauuaagg

SEQ ID NO: 584323 - RNA, 23 nt, Artificial Sequence
  Synthetic
acaccuaaauguuaauauuaagg

SEQ ID NO: 584324 - RNA, 24 nt, Artificial Sequence
  Synthetic
gacaccuaaauguuaauauuaagg

SEQ ID NO: 584325 - RNA, 18 nt, Artificial Sequence
  Synthetic
uuuucuaguuucuuaagg

SEQ ID NO: 584326 - RNA, 19 nt, Artificial Sequence
  Synthetic
uuuuucuaguuucuuaagg

SEQ ID NO: 584327 - RNA, 20 nt, Artificial Sequence
  Synthetic
cuuuuucuaguuucuuaagg

SEQ ID NO: 584328 - RNA, 21 nt, Artificial Sequence
  Synthetic
ucuuuuucuaguuucuuaagg

SEQ ID NO: 584329 - RNA, 22 nt, Artificial Sequence
  Synthetic
uucuuuuucuaguuucuuaagg

SEQ ID NO: 584330 - RNA, 23 nt, Artificial Sequence
  Synthetic
cuucuuuuucuaguuucuuaagg

SEQ ID NO: 584331 - RNA, 24 nt, Artificial Sequence
  Synthetic
ucuucuuuuucuaguuucuuaagg

SEQ ID NO: 584332 - RNA, 18 nt, Artificial Sequence
  Synthetic
ugaguaaagaaguuaagg

SEQ ID NO: 584333 - RNA, 19 nt, Artificial Sequence
  Synthetic
uugaguaaagaaguuaagg

SEQ ID NO: 584334 - RNA, 20 nt, Artificial Sequence
  Synthetic
uuugaguaaagaaguuaagg

SEQ ID NO: 584335 - RNA, 21 nt, Artificial Sequence
  Synthetic
uuuugaguaaagaaguuaagg

SEQ ID NO: 584336 - RNA, 22 nt, Artificial Sequence
  Synthetic
cuuuugaguaaagaaguuaagg

SEQ ID NO: 584337 - RNA, 23 nt, Artificial Sequence
  Synthetic
acuuuugaguaaagaaguuaagg

SEQ ID NO: 584338 - RNA, 24 nt, Artificial Sequence
  Synthetic
cacuuuugaguaaagaaguuaagg

SEQ ID NO: 584339 - RNA, 18 nt, Artificial Sequence
  Synthetic
accaucauauuguuaagg

SEQ ID NO: 584340 - RNA, 19 nt, Artificial Sequence
  Synthetic
uaccaucauauuguuaagg

SEQ ID NO: 584341 - RNA, 20 nt, Artificial Sequence
  Synthetic
uuaccaucauauuguuaagg

SEQ ID NO: 584342 - RNA, 21 nt, Artificial Sequence
  Synthetic
guuaccaucauauuguuaagg

SEQ ID NO: 584343 - RNA, 22 nt, Artificial Sequence
  Synthetic
uguuaccaucauauuguuaagg

SEQ ID NO: 584344 - RNA, 23 nt, Artificial Sequence
  Synthetic
cuguuaccaucauauuguuaagg

SEQ ID NO: 584345 - RNA, 24 nt, Artificial Sequence
  Synthetic
acuguuaccaucauauuguuaagg

SEQ ID NO: 584346 - RNA, 18 nt, Artificial Sequence
  Synthetic
ugugguuuuccuuuaagg

SEQ ID NO: 584347 - RNA, 19 nt, Artificial Sequence
  Synthetic
cugugguuuuccuuuaagg

SEQ ID NO: 584348 - RNA, 20 nt, Artificial Sequence
  Synthetic
ucugugguuuuccuuuaagg

SEQ ID NO: 584349 - RNA, 21 nt, Artificial Sequence
  Synthetic
aucugugguuuuccuuuaagg

SEQ ID NO: 584350 - RNA, 22 nt, Artificial Sequence
  Synthetic
caucugugguuuuccuuuaagg

SEQ ID NO: 584351 - RNA, 23 nt, Artificial Sequence
  Synthetic
ccaucugugguuuuccuuuaagg

SEQ ID NO: 584352 - RNA, 24 nt, Artificial Sequence
  Synthetic
accaucugugguuuuccuuuaagg

SEQ ID NO: 584353 - RNA, 18 nt, Artificial Sequence
  Synthetic
aaacuaugagguuuaagg

SEQ ID NO: 584354 - RNA, 19 nt, Artificial Sequence
  Synthetic
aaaacuaugagguuuaagg

SEQ ID NO: 584355 - RNA, 20 nt, Artificial Sequence
  Synthetic
gaaaacuaugagguuuaagg

SEQ ID NO: 584356 - RNA, 21 nt, Artificial Sequence
  Synthetic
ugaaaacuaugagguuuaagg

SEQ ID NO: 584357 - RNA, 22 nt, Artificial Sequence
  Synthetic
uugaaaacuaugagguuuaagg

SEQ ID NO: 584358 - RNA, 23 nt, Artificial Sequence
  Synthetic
guugaaaacuaugagguuuaagg

SEQ ID NO: 584359 - RNA, 24 nt, Artificial Sequence
  Synthetic
aguugaaaacuaugagguuuaagg

SEQ ID NO: 584360 - RNA, 18 nt, Artificial Sequence
  Synthetic
augcagaaggguuuaagg

SEQ ID NO: 584361 - RNA, 19 nt, Artificial Sequence
  Synthetic
aaugcagaaggguuuaagg

SEQ ID NO: 584362 - RNA, 20 nt, Artificial Sequence
  Synthetic
aaaugcagaaggguuuaagg

SEQ ID NO: 584363 - RNA, 21 nt, Artificial Sequence
  Synthetic
aaaaugcagaaggguuuaagg

SEQ ID NO: 584364 - RNA, 22 nt, Artificial Sequence
  Synthetic
gaaaaugcagaaggguuuaagg

SEQ ID NO: 584365 - RNA, 23 nt, Artificial Sequence
  Synthetic
ugaaaaugcagaaggguuuaagg

SEQ ID NO: 584366 - RNA, 24 nt, Artificial Sequence
  Synthetic
gugaaaaugcagaaggguuuaagg

SEQ ID NO: 584367 - RNA, 18 nt, Artificial Sequence
  Synthetic
gucaacccacuuuuaagg

SEQ ID NO: 584368 - RNA, 19 nt, Artificial Sequence
  Synthetic
ggucaacccacuuuuaagg

SEQ ID NO: 584369 - RNA, 20 nt, Artificial Sequence
  Synthetic
uggucaacccacuuuuaagg

SEQ ID NO: 584370 - RNA, 21 nt, Artificial Sequence
  Synthetic
guggucaacccacuuuuaagg

SEQ ID NO: 584371 - RNA, 22 nt, Artificial Sequence
  Synthetic
aguggucaacccacuuuuaagg

SEQ ID NO: 584372 - RNA, 23 nt, Artificial Sequence
  Synthetic
gaguggucaacccacuuuuaagg

SEQ ID NO: 584373 - RNA, 24 nt, Artificial Sequence
  Synthetic
agaguggucaacccacuuuuaagg

SEQ ID NO: 584374 - RNA, 18 nt, Artificial Sequence
  Synthetic
aucuucuucuuuuuaagg

SEQ ID NO: 584375 - RNA, 19 nt, Artificial Sequence
  Synthetic
gaucuucuucuuuuuaagg

SEQ ID NO: 584376 - RNA, 20 nt, Artificial Sequence
  Synthetic
agaucuucuucuuuuuaagg

SEQ ID NO: 584377 - RNA, 21 nt, Artificial Sequence
  Synthetic
cagaucuucuucuuuuuaagg

SEQ ID NO: 584378 - RNA, 22 nt, Artificial Sequence
  Synthetic
acagaucuucuucuuuuuaagg

SEQ ID NO: 584379 - RNA, 23 nt, Artificial Sequence
  Synthetic
gacagaucuucuucuuuuuaagg

SEQ ID NO: 584380 - RNA, 24 nt, Artificial Sequence
  Synthetic
ugacagaucuucuucuuuuuaagg

SEQ ID NO: 584381 - RNA, 18 nt, Artificial Sequence
  Synthetic
accacaugcaaaaacagg

SEQ ID NO: 584382 - RNA, 19 nt, Artificial Sequence
  Synthetic
aaccacaugcaaaaacagg

SEQ ID NO: 584383 - RNA, 20 nt, Artificial Sequence
  Synthetic
caaccacaugcaaaaacagg

SEQ ID NO: 584384 - RNA, 21 nt, Artificial Sequence
  Synthetic
acaaccacaugcaaaaacagg

SEQ ID NO: 584385 - RNA, 22 nt, Artificial Sequence
  Synthetic
uacaaccacaugcaaaaacagg

SEQ ID NO: 584386 - RNA, 23 nt, Artificial Sequence
  Synthetic
cuacaaccacaugcaaaaacagg

SEQ ID NO: 584387 - RNA, 24 nt, Artificial Sequence
  Synthetic
gcuacaaccacaugcaaaaacagg

SEQ ID NO: 584388 - RNA, 18 nt, Artificial Sequence
  Synthetic
gcacagggauaaaacagg

SEQ ID NO: 584389 - RNA, 19 nt, Artificial Sequence
  Synthetic
ugcacagggauaaaacagg

SEQ ID NO: 584390 - RNA, 20 nt, Artificial Sequence
  Synthetic
augcacagggauaaaacagg

SEQ ID NO: 584391 - RNA, 21 nt, Artificial Sequence
  Synthetic
caugcacagggauaaaacagg

SEQ ID NO: 584392 - RNA, 22 nt, Artificial Sequence
  Synthetic
gcaugcacagggauaaaacagg

SEQ ID NO: 584393 - RNA, 23 nt, Artificial Sequence
  Synthetic
agcaugcacagggauaaaacagg

SEQ ID NO: 584394 - RNA, 24 nt, Artificial Sequence
  Synthetic
cagcaugcacagggauaaaacagg

SEQ ID NO: 584395 - RNA, 18 nt, Artificial Sequence
  Synthetic
augaugaaaagaaacagg

SEQ ID NO: 584396 - RNA, 19 nt, Artificial Sequence
  Synthetic
aaugaugaaaagaaacagg

SEQ ID NO: 584397 - RNA, 20 nt, Artificial Sequence
  Synthetic
uaaugaugaaaagaaacagg

SEQ ID NO: 584398 - RNA, 21 nt, Artificial Sequence
  Synthetic
auaaugaugaaaagaaacagg

SEQ ID NO: 584399 - RNA, 22 nt, Artificial Sequence
  Synthetic
uauaaugaugaaaagaaacagg

SEQ ID NO: 584400 - RNA, 23 nt, Artificial Sequence
  Synthetic
auauaaugaugaaaagaaacagg

SEQ ID NO: 584401 - RNA, 24 nt, Artificial Sequence
  Synthetic
cauauaaugaugaaaagaaacagg

SEQ ID NO: 584402 - RNA, 18 nt, Artificial Sequence
  Synthetic
gggagagcaggaaacagg

SEQ ID NO: 584403 - RNA, 19 nt, Artificial Sequence
  Synthetic
ggggagagcaggaaacagg

SEQ ID NO: 584404 - RNA, 20 nt, Artificial Sequence
  Synthetic
aggggagagcaggaaacagg

SEQ ID NO: 584405 - RNA, 21 nt, Artificial Sequence
  Synthetic
aaggggagagcaggaaacagg

SEQ ID NO: 584406 - RNA, 22 nt, Artificial Sequence
  Synthetic
aaaggggagagcaggaaacagg

SEQ ID NO: 584407 - RNA, 23 nt, Artificial Sequence
  Synthetic
caaaggggagagcaggaaacagg

SEQ ID NO: 584408 - RNA, 24 nt, Artificial Sequence
  Synthetic
gcaaaggggagagcaggaaacagg

SEQ ID NO: 584409 - RNA, 18 nt, Artificial Sequence
  Synthetic
ucaaacuaaagcaacagg

SEQ ID NO: 584410 - RNA, 19 nt, Artificial Sequence
  Synthetic
uucaaacuaaagcaacagg

SEQ ID NO: 584411 - RNA, 20 nt, Artificial Sequence
  Synthetic
auucaaacuaaagcaacagg

SEQ ID NO: 584412 - RNA, 21 nt, Artificial Sequence
  Synthetic
aauucaaacuaaagcaacagg

SEQ ID NO: 584413 - RNA, 22 nt, Artificial Sequence
  Synthetic
caauucaaacuaaagcaacagg

SEQ ID NO: 584414 - RNA, 23 nt, Artificial Sequence
  Synthetic
ucaauucaaacuaaagcaacagg

SEQ ID NO: 584415 - RNA, 24 nt, Artificial Sequence
  Synthetic
cucaauucaaacuaaagcaacagg

SEQ ID NO: 584416 - RNA, 18 nt, Artificial Sequence
  Synthetic
ccaggacacaucaacagg

SEQ ID NO: 584417 - RNA, 19 nt, Artificial Sequence
  Synthetic
uccaggacacaucaacagg

SEQ ID NO: 584418 - RNA, 20 nt, Artificial Sequence
  Synthetic
uuccaggacacaucaacagg

SEQ ID NO: 584419 - RNA, 21 nt, Artificial Sequence
  Synthetic
auuccaggacacaucaacagg

SEQ ID NO: 584420 - RNA, 22 nt, Artificial Sequence
  Synthetic
gauuccaggacacaucaacagg

SEQ ID NO: 584421 - RNA, 23 nt, Artificial Sequence
  Synthetic
ugauuccaggacacaucaacagg

SEQ ID NO: 584422 - RNA, 24 nt, Artificial Sequence
  Synthetic
gugauuccaggacacaucaacagg

SEQ ID NO: 584423 - RNA, 18 nt, Artificial Sequence
  Synthetic
acuuaauuauucaacagg

SEQ ID NO: 584424 - RNA, 19 nt, Artificial Sequence
  Synthetic
cacuuaauuauucaacagg

SEQ ID NO: 584425 - RNA, 20 nt, Artificial Sequence
  Synthetic
ccacuuaauuauucaacagg

SEQ ID NO: 584426 - RNA, 21 nt, Artificial Sequence
  Synthetic
uccacuuaauuauucaacagg

SEQ ID NO: 584427 - RNA, 22 nt, Artificial Sequence
  Synthetic
auccacuuaauuauucaacagg

SEQ ID NO: 584428 - RNA, 23 nt, Artificial Sequence
  Synthetic
aauccacuuaauuauucaacagg

SEQ ID NO: 584429 - RNA, 24 nt, Artificial Sequence
  Synthetic
uaauccacuuaauuauucaacagg

SEQ ID NO: 584430 - RNA, 18 nt, Artificial Sequence
  Synthetic
gaggguagaaagaacagg

SEQ ID NO: 584431 - RNA, 19 nt, Artificial Sequence
  Synthetic
ggaggguagaaagaacagg

SEQ ID NO: 584432 - RNA, 20 nt, Artificial Sequence
  Synthetic
gggaggguagaaagaacagg

SEQ ID NO: 584433 - RNA, 21 nt, Artificial Sequence
  Synthetic
ugggaggguagaaagaacagg

SEQ ID NO: 584434 - RNA, 22 nt, Artificial Sequence
  Synthetic
gugggaggguagaaagaacagg

SEQ ID NO: 584435 - RNA, 23 nt, Artificial Sequence
  Synthetic
ggugggaggguagaaagaacagg

SEQ ID NO: 584436 - RNA, 24 nt, Artificial Sequence
  Synthetic
gggugggaggguagaaagaacagg

SEQ ID NO: 584437 - RNA, 18 nt, Artificial Sequence
  Synthetic
ugauuuuauaagaacagg

SEQ ID NO: 584438 - RNA, 19 nt, Artificial Sequence
  Synthetic
augauuuuauaagaacagg

SEQ ID NO: 584439 - RNA, 20 nt, Artificial Sequence
  Synthetic
caugauuuuauaagaacagg

SEQ ID NO: 584440 - RNA, 21 nt, Artificial Sequence
  Synthetic
ucaugauuuuauaagaacagg

SEQ ID NO: 584441 - RNA, 22 nt, Artificial Sequence
  Synthetic
uucaugauuuuauaagaacagg

SEQ ID NO: 584442 - RNA, 23 nt, Artificial Sequence
  Synthetic
auucaugauuuuauaagaacagg

SEQ ID NO: 584443 - RNA, 24 nt, Artificial Sequence
  Synthetic
gauucaugauuuuauaagaacagg

SEQ ID NO: 584444 - RNA, 18 nt, Artificial Sequence
  Synthetic
agucagaagacgaacagg

SEQ ID NO: 584445 - RNA, 19 nt, Artificial Sequence
  Synthetic
gagucagaagacgaacagg

SEQ ID NO: 584446 - RNA, 20 nt, Artificial Sequence
  Synthetic
agagucagaagacgaacagg

SEQ ID NO: 584447 - RNA, 21 nt, Artificial Sequence
  Synthetic
cagagucagaagacgaacagg

SEQ ID NO: 584448 - RNA, 22 nt, Artificial Sequence
  Synthetic
acagagucagaagacgaacagg

SEQ ID NO: 584449 - RNA, 23 nt, Artificial Sequence
  Synthetic
uacagagucagaagacgaacagg

SEQ ID NO: 584450 - RNA, 24 nt, Artificial Sequence
  Synthetic
auacagagucagaagacgaacagg

SEQ ID NO: 584451 - RNA, 18 nt, Artificial Sequence
  Synthetic
uccggguagcugaacagg

SEQ ID NO: 584452 - RNA, 19 nt, Artificial Sequence
  Synthetic
uuccggguagcugaacagg

SEQ ID NO: 584453 - RNA, 20 nt, Artificial Sequence
  Synthetic
cuuccggguagcugaacagg

SEQ ID NO: 584454 - RNA, 21 nt, Artificial Sequence
  Synthetic
gcuuccggguagcugaacagg

SEQ ID NO: 584455 - RNA, 22 nt, Artificial Sequence
  Synthetic
agcuuccggguagcugaacagg

SEQ ID NO: 584456 - RNA, 23 nt, Artificial Sequence
  Synthetic
gagcuuccggguagcugaacagg

SEQ ID NO: 584457 - RNA, 24 nt, Artificial Sequence
  Synthetic
ugagcuuccggguagcugaacagg

SEQ ID NO: 584458 - RNA, 18 nt, Artificial Sequence
  Synthetic
uucacugccaguaacagg

SEQ ID NO: 584459 - RNA, 19 nt, Artificial Sequence
  Synthetic
auucacugccaguaacagg

SEQ ID NO: 584460 - RNA, 20 nt, Artificial Sequence
  Synthetic
gauucacugccaguaacagg

SEQ ID NO: 584461 - RNA, 21 nt, Artificial Sequence
  Synthetic
ggauucacugccaguaacagg

SEQ ID NO: 584462 - RNA, 22 nt, Artificial Sequence
  Synthetic
uggauucacugccaguaacagg

SEQ ID NO: 584463 - RNA, 23 nt, Artificial Sequence
  Synthetic
auggauucacugccaguaacagg

SEQ ID NO: 584464 - RNA, 24 nt, Artificial Sequence
  Synthetic
uauggauucacugccaguaacagg

SEQ ID NO: 584465 - RNA, 18 nt, Artificial Sequence
  Synthetic
uuggaacuggguaacagg

SEQ ID NO: 584466 - RNA, 19 nt, Artificial Sequence
  Synthetic
uuuggaacuggguaacagg

SEQ ID NO: 584467 - RNA, 20 nt, Artificial Sequence
  Synthetic
cuuuggaacuggguaacagg

SEQ ID NO: 584468 - RNA, 21 nt, Artificial Sequence
  Synthetic
acuuuggaacuggguaacagg

SEQ ID NO: 584469 - RNA, 22 nt, Artificial Sequence
  Synthetic
aacuuuggaacuggguaacagg

SEQ ID NO: 584470 - RNA, 23 nt, Artificial Sequence
  Synthetic
caacuuuggaacuggguaacagg

SEQ ID NO: 584471 - RNA, 24 nt, Artificial Sequence
  Synthetic
gcaacuuuggaacuggguaacagg

SEQ ID NO: 584472 - RNA, 18 nt, Artificial Sequence
  Synthetic
aaagguaauaaacacagg

SEQ ID NO: 584473 - RNA, 19 nt, Artificial Sequence
  Synthetic
caaagguaauaaacacagg

SEQ ID NO: 584474 - RNA, 20 nt, Artificial Sequence
  Synthetic
ccaaagguaauaaacacagg

SEQ ID NO: 584475 - RNA, 21 nt, Artificial Sequence
  Synthetic
uccaaagguaauaaacacagg

SEQ ID NO: 584476 - RNA, 22 nt, Artificial Sequence
  Synthetic
uuccaaagguaauaaacacagg

SEQ ID NO: 584477 - RNA, 23 nt, Artificial Sequence
  Synthetic
cuuccaaagguaauaaacacagg

SEQ ID NO: 584478 - RNA, 24 nt, Artificial Sequence
  Synthetic
acuuccaaagguaauaaacacagg

SEQ ID NO: 584479 - RNA, 18 nt, Artificial Sequence
  Synthetic
aacagaguuacacacagg

SEQ ID NO: 584480 - RNA, 19 nt, Artificial Sequence
  Synthetic
gaacagaguuacacacagg

SEQ ID NO: 584481 - RNA, 20 nt, Artificial Sequence
  Synthetic
ugaacagaguuacacacagg

SEQ ID NO: 584482 - RNA, 21 nt, Artificial Sequence
  Synthetic
uugaacagaguuacacacagg

SEQ ID NO: 584483 - RNA, 22 nt, Artificial Sequence
  Synthetic
uuugaacagaguuacacacagg

SEQ ID NO: 584484 - RNA, 23 nt, Artificial Sequence
  Synthetic
auuugaacagaguuacacacagg

SEQ ID NO: 584485 - RNA, 24 nt, Artificial Sequence
  Synthetic
aauuugaacagaguuacacacagg

SEQ ID NO: 584486 - RNA, 18 nt, Artificial Sequence
  Synthetic
cuauauccagcacacagg

SEQ ID NO: 584487 - RNA, 19 nt, Artificial Sequence
  Synthetic
gcuauauccagcacacagg

SEQ ID NO: 584488 - RNA, 20 nt, Artificial Sequence
  Synthetic
agcuauauccagcacacagg

SEQ ID NO: 584489 - RNA, 21 nt, Artificial Sequence
  Synthetic
uagcuauauccagcacacagg

SEQ ID NO: 584490 - RNA, 22 nt, Artificial Sequence
  Synthetic
uuagcuauauccagcacacagg

SEQ ID NO: 584491 - RNA, 23 nt, Artificial Sequence
  Synthetic
uuuagcuauauccagcacacagg

SEQ ID NO: 584492 - RNA, 24 nt, Artificial Sequence
  Synthetic
uuuuagcuauauccagcacacagg

SEQ ID NO: 584493 - RNA, 18 nt, Artificial Sequence
  Synthetic
gaguagagaagacacagg

SEQ ID NO: 584494 - RNA, 19 nt, Artificial Sequence
  Synthetic
ugaguagagaagacacagg

SEQ ID NO: 584495 - RNA, 20 nt, Artificial Sequence
  Synthetic
uugaguagagaagacacagg

SEQ ID NO: 584496 - RNA, 21 nt, Artificial Sequence
  Synthetic
uuugaguagagaagacacagg

SEQ ID NO: 584497 - RNA, 22 nt, Artificial Sequence
  Synthetic
uuuugaguagagaagacacagg

SEQ ID NO: 584498 - RNA, 23 nt, Artificial Sequence
  Synthetic
uuuuugaguagagaagacacagg

SEQ ID NO: 584499 - RNA, 24 nt, Artificial Sequence
  Synthetic
cuuuuugaguagagaagacacagg

SEQ ID NO: 584500 - RNA, 18 nt, Artificial Sequence
  Synthetic
ugagguaauagacacagg

SEQ ID NO: 584501 - RNA, 19 nt, Artificial Sequence
  Synthetic
cugagguaauagacacagg

SEQ ID NO: 584502 - RNA, 20 nt, Artificial Sequence
  Synthetic
acugagguaauagacacagg

SEQ ID NO: 584503 - RNA, 21 nt, Artificial Sequence
  Synthetic
aacugagguaauagacacagg

SEQ ID NO: 584504 - RNA, 22 nt, Artificial Sequence
  Synthetic
aaacugagguaauagacacagg

SEQ ID NO: 584505 - RNA, 23 nt, Artificial Sequence
  Synthetic
uaaacugagguaauagacacagg

SEQ ID NO: 584506 - RNA, 24 nt, Artificial Sequence
  Synthetic
cuaaacugagguaauagacacagg

SEQ ID NO: 584507 - RNA, 18 nt, Artificial Sequence
  Synthetic
agaacacauagacacagg

SEQ ID NO: 584508 - RNA, 19 nt, Artificial Sequence
  Synthetic
gagaacacauagacacagg

SEQ ID NO: 584509 - RNA, 20 nt, Artificial Sequence
  Synthetic
ugagaacacauagacacagg

SEQ ID NO: 584510 - RNA, 21 nt, Artificial Sequence
  Synthetic
augagaacacauagacacagg

SEQ ID NO: 584511 - RNA, 22 nt, Artificial Sequence
  Synthetic
gaugagaacacauagacacagg

SEQ ID NO: 584512 - RNA, 23 nt, Artificial Sequence
  Synthetic
cgaugagaacacauagacacagg

SEQ ID NO: 584513 - RNA, 24 nt, Artificial Sequence
  Synthetic
acgaugagaacacauagacacagg

SEQ ID NO: 584514 - RNA, 18 nt, Artificial Sequence
  Synthetic
agggcuggaggacacagg

SEQ ID NO: 584515 - RNA, 19 nt, Artificial Sequence
  Synthetic
uagggcuggaggacacagg

SEQ ID NO: 584516 - RNA, 20 nt, Artificial Sequence
  Synthetic
guagggcuggaggacacagg

SEQ ID NO: 584517 - RNA, 21 nt, Artificial Sequence
  Synthetic
gguagggcuggaggacacagg

SEQ ID NO: 584518 - RNA, 22 nt, Artificial Sequence
  Synthetic
ggguagggcuggaggacacagg

SEQ ID NO: 584519 - RNA, 23 nt, Artificial Sequence
  Synthetic
aggguagggcuggaggacacagg

SEQ ID NO: 584520 - RNA, 24 nt, Artificial Sequence
  Synthetic
aaggguagggcuggaggacacagg

SEQ ID NO: 584521 - RNA, 21 nt, Artificial Sequence
  Synthetic
gugagaacacauggacacagg

SEQ ID NO: 584522 - RNA, 22 nt, Artificial Sequence
  Synthetic
agugagaacacauggacacagg

SEQ ID NO: 584523 - RNA, 23 nt, Artificial Sequence
  Synthetic
cagugagaacacauggacacagg

SEQ ID NO: 584524 - RNA, 24 nt, Artificial Sequence
  Synthetic
acagugagaacacauggacacagg

SEQ ID NO: 584525 - RNA, 18 nt, Artificial Sequence
  Synthetic
aaaacauauggacacagg

SEQ ID NO: 584526 - RNA, 19 nt, Artificial Sequence
  Synthetic
gaaaacauauggacacagg

SEQ ID NO: 584527 - RNA, 20 nt, Artificial Sequence
  Synthetic
ugaaaacauauggacacagg

SEQ ID NO: 584528 - RNA, 21 nt, Artificial Sequence
  Synthetic
augaaaacauauggacacagg

SEQ ID NO: 584529 - RNA, 22 nt, Artificial Sequence
  Synthetic
aaugaaaacauauggacacagg

SEQ ID NO: 584530 - RNA, 23 nt, Artificial Sequence
  Synthetic
caaugaaaacauauggacacagg

SEQ ID NO: 584531 - RNA, 24 nt, Artificial Sequence
  Synthetic
acaaugaaaacauauggacacagg

SEQ ID NO: 584532 - RNA, 18 nt, Artificial Sequence
  Synthetic
aaguuuaauugacacagg

SEQ ID NO: 584533 - RNA, 19 nt, Artificial Sequence
  Synthetic
aaaguuuaauugacacagg

SEQ ID NO: 584534 - RNA, 20 nt, Artificial Sequence
  Synthetic
gaaaguuuaauugacacagg

SEQ ID NO: 584535 - RNA, 21 nt, Artificial Sequence
  Synthetic
ugaaaguuuaauugacacagg

SEQ ID NO: 584536 - RNA, 22 nt, Artificial Sequence
  Synthetic
cugaaaguuuaauugacacagg

SEQ ID NO: 584537 - RNA, 23 nt, Artificial Sequence
  Synthetic
ccugaaaguuuaauugacacagg

SEQ ID NO: 584538 - RNA, 24 nt, Artificial Sequence
  Synthetic
accugaaaguuuaauugacacagg

SEQ ID NO: 584539 - RNA, 18 nt, Artificial Sequence
  Synthetic
uuggggaaccuacacagg

SEQ ID NO: 584540 - RNA, 19 nt, Artificial Sequence
  Synthetic
guuggggaaccuacacagg

SEQ ID NO: 584541 - RNA, 20 nt, Artificial Sequence
  Synthetic
aguuggggaaccuacacagg

SEQ ID NO: 584542 - RNA, 21 nt, Artificial Sequence
  Synthetic
uaguuggggaaccuacacagg

SEQ ID NO: 584543 - RNA, 22 nt, Artificial Sequence
  Synthetic
guaguuggggaaccuacacagg

SEQ ID NO: 584544 - RNA, 23 nt, Artificial Sequence
  Synthetic
aguaguuggggaaccuacacagg

SEQ ID NO: 584545 - RNA, 24 nt, Artificial Sequence
  Synthetic
gaguaguuggggaaccuacacagg

SEQ ID NO: 584546 - RNA, 18 nt, Artificial Sequence
  Synthetic
gcuuuacagcuacacagg

SEQ ID NO: 584547 - RNA, 19 nt, Artificial Sequence
  Synthetic
agcuuuacagcuacacagg

SEQ ID NO: 584548 - RNA, 20 nt, Artificial Sequence
  Synthetic
cagcuuuacagcuacacagg

SEQ ID NO: 584549 - RNA, 21 nt, Artificial Sequence
  Synthetic
ccagcuuuacagcuacacagg

SEQ ID NO: 584550 - RNA, 22 nt, Artificial Sequence
  Synthetic
uccagcuuuacagcuacacagg

SEQ ID NO: 584551 - RNA, 23 nt, Artificial Sequence
  Synthetic
cuccagcuuuacagcuacacagg

SEQ ID NO: 584552 - RNA, 24 nt, Artificial Sequence
  Synthetic
acuccagcuuuacagcuacacagg

SEQ ID NO: 584553 - RNA, 18 nt, Artificial Sequence
  Synthetic
gauucugccuaccacagg

SEQ ID NO: 584554 - RNA, 19 nt, Artificial Sequence
  Synthetic
ugauucugccuaccacagg

SEQ ID NO: 584555 - RNA, 20 nt, Artificial Sequence
  Synthetic
augauucugccuaccacagg

SEQ ID NO: 584556 - RNA, 21 nt, Artificial Sequence
  Synthetic
caugauucugccuaccacagg

SEQ ID NO: 584557 - RNA, 22 nt, Artificial Sequence
  Synthetic
ccaugauucugccuaccacagg

SEQ ID NO: 584558 - RNA, 23 nt, Artificial Sequence
  Synthetic
cccaugauucugccuaccacagg

SEQ ID NO: 584559 - RNA, 24 nt, Artificial Sequence
  Synthetic
gcccaugauucugccuaccacagg

SEQ ID NO: 584560 - RNA, 18 nt, Artificial Sequence
  Synthetic
ggaguaaaagcccacagg

SEQ ID NO: 584561 - RNA, 19 nt, Artificial Sequence
  Synthetic
uggaguaaaagcccacagg

SEQ ID NO: 584562 - RNA, 20 nt, Artificial Sequence
  Synthetic
cuggaguaaaagcccacagg

SEQ ID NO: 584563 - RNA, 21 nt, Artificial Sequence
  Synthetic
ccuggaguaaaagcccacagg

SEQ ID NO: 584564 - RNA, 22 nt, Artificial Sequence
  Synthetic
uccuggaguaaaagcccacagg

SEQ ID NO: 584565 - RNA, 23 nt, Artificial Sequence
  Synthetic
uuccuggaguaaaagcccacagg

SEQ ID NO: 584566 - RNA, 24 nt, Artificial Sequence
  Synthetic
uuuccuggaguaaaagcccacagg

SEQ ID NO: 584567 - RNA, 18 nt, Artificial Sequence
  Synthetic
agaaaauacucccacagg

SEQ ID NO: 584568 - RNA, 19 nt, Artificial Sequence
  Synthetic
uagaaaauacucccacagg

SEQ ID NO: 584569 - RNA, 20 nt, Artificial Sequence
  Synthetic
uuagaaaauacucccacagg

SEQ ID NO: 584570 - RNA, 21 nt, Artificial Sequence
  Synthetic
auuagaaaauacucccacagg

SEQ ID NO: 584571 - RNA, 22 nt, Artificial Sequence
  Synthetic
aauuagaaaauacucccacagg

SEQ ID NO: 584572 - RNA, 23 nt, Artificial Sequence
  Synthetic
gaauuagaaaauacucccacagg

SEQ ID NO: 584573 - RNA, 24 nt, Artificial Sequence
  Synthetic
ugaauuagaaaauacucccacagg

SEQ ID NO: 584574 - RNA, 18 nt, Artificial Sequence
  Synthetic
gguggugagggccacagg

SEQ ID NO: 584575 - RNA, 19 nt, Artificial Sequence
  Synthetic
ugguggugagggccacagg

SEQ ID NO: 584576 - RNA, 20 nt, Artificial Sequence
  Synthetic
augguggugagggccacagg

SEQ ID NO: 584577 - RNA, 21 nt, Artificial Sequence
  Synthetic
caugguggugagggccacagg

SEQ ID NO: 584578 - RNA, 22 nt, Artificial Sequence
  Synthetic
ucaugguggugagggccacagg

SEQ ID NO: 584579 - RNA, 23 nt, Artificial Sequence
  Synthetic
cucaugguggugagggccacagg

SEQ ID NO: 584580 - RNA, 24 nt, Artificial Sequence
  Synthetic
ccucaugguggugagggccacagg

SEQ ID NO: 584581 - RNA, 18 nt, Artificial Sequence
  Synthetic
ucuuuaauaugccacagg

SEQ ID NO: 584582 - RNA, 19 nt, Artificial Sequence
  Synthetic
cucuuuaauaugccacagg

SEQ ID NO: 584583 - RNA, 20 nt, Artificial Sequence
  Synthetic
ucucuuuaauaugccacagg

SEQ ID NO: 584584 - RNA, 21 nt, Artificial Sequence
  Synthetic
uucucuuuaauaugccacagg

SEQ ID NO: 584585 - RNA, 22 nt, Artificial Sequence
  Synthetic
uuucucuuuaauaugccacagg

SEQ ID NO: 584586 - RNA, 23 nt, Artificial Sequence
  Synthetic
cuuucucuuuaauaugccacagg

SEQ ID NO: 584587 - RNA, 24 nt, Artificial Sequence
  Synthetic
ucuuucucuuuaauaugccacagg

SEQ ID NO: 584588 - RNA, 18 nt, Artificial Sequence
  Synthetic
uaccuacaauuccacagg

SEQ ID NO: 584589 - RNA, 19 nt, Artificial Sequence
  Synthetic
cuaccuacaauuccacagg

SEQ ID NO: 584590 - RNA, 20 nt, Artificial Sequence
  Synthetic
ccuaccuacaauuccacagg

SEQ ID NO: 584591 - RNA, 21 nt, Artificial Sequence
  Synthetic
uccuaccuacaauuccacagg

SEQ ID NO: 584592 - RNA, 22 nt, Artificial Sequence
  Synthetic
auccuaccuacaauuccacagg

SEQ ID NO: 584593 - RNA, 23 nt, Artificial Sequence
  Synthetic
gauccuaccuacaauuccacagg

SEQ ID NO: 584594 - RNA, 24 nt, Artificial Sequence
  Synthetic
ugauccuaccuacaauuccacagg

SEQ ID NO: 584595 - RNA, 18 nt, Artificial Sequence
  Synthetic
ugacuagaaaggcacagg

SEQ ID NO: 584596 - RNA, 19 nt, Artificial Sequence
  Synthetic
augacuagaaaggcacagg

SEQ ID NO: 584597 - RNA, 20 nt, Artificial Sequence
  Synthetic
caugacuagaaaggcacagg

SEQ ID NO: 584598 - RNA, 21 nt, Artificial Sequence
  Synthetic
acaugacuagaaaggcacagg

SEQ ID NO: 584599 - RNA, 22 nt, Artificial Sequence
  Synthetic
cacaugacuagaaaggcacagg

SEQ ID NO: 584600 - RNA, 23 nt, Artificial Sequence
  Synthetic
gcacaugacuagaaaggcacagg

SEQ ID NO: 584601 - RNA, 24 nt, Artificial Sequence
  Synthetic
ugcacaugacuagaaaggcacagg

SEQ ID NO: 584602 - RNA, 18 nt, Artificial Sequence
  Synthetic
gguuuuuauaggcacagg

SEQ ID NO: 584603 - RNA, 19 nt, Artificial Sequence
  Synthetic
ggguuuuuauaggcacagg

SEQ ID NO: 584604 - RNA, 20 nt, Artificial Sequence
  Synthetic
gggguuuuuauaggcacagg

SEQ ID NO: 584605 - RNA, 21 nt, Artificial Sequence
  Synthetic
ugggguuuuuauaggcacagg

SEQ ID NO: 584606 - RNA, 22 nt, Artificial Sequence
  Synthetic
cugggguuuuuauaggcacagg

SEQ ID NO: 584607 - RNA, 23 nt, Artificial Sequence
  Synthetic
ucugggguuuuuauaggcacagg

SEQ ID NO: 584608 - RNA, 24 nt, Artificial Sequence
  Synthetic
gucugggguuuuuauaggcacagg

SEQ ID NO: 584609 - RNA, 18 nt, Artificial Sequence
  Synthetic
uauauauagcugcacagg

SEQ ID NO: 584610 - RNA, 19 nt, Artificial Sequence
  Synthetic
auauauauagcugcacagg

SEQ ID NO: 584611 - RNA, 20 nt, Artificial Sequence
  Synthetic
uauauauauagcugcacagg

SEQ ID NO: 584612 - RNA, 21 nt, Artificial Sequence
  Synthetic
auauauauauagcugcacagg

SEQ ID NO: 584613 - RNA, 22 nt, Artificial Sequence
  Synthetic
uauauauauauagcugcacagg

SEQ ID NO: 584614 - RNA, 23 nt, Artificial Sequence
  Synthetic
auauauauauauagcugcacagg

SEQ ID NO: 584615 - RNA, 24 nt, Artificial Sequence
  Synthetic
uauauauauauauagcugcacagg

SEQ ID NO: 584616 - RNA, 18 nt, Artificial Sequence
  Synthetic
aagaaucuuaaucacagg

SEQ ID NO: 584617 - RNA, 19 nt, Artificial Sequence
  Synthetic
uaagaaucuuaaucacagg

SEQ ID NO: 584618 - RNA, 20 nt, Artificial Sequence
  Synthetic
auaagaaucuuaaucacagg

SEQ ID NO: 584619 - RNA, 21 nt, Artificial Sequence
  Synthetic
aauaagaaucuuaaucacagg

SEQ ID NO: 584620 - RNA, 22 nt, Artificial Sequence
  Synthetic
aaauaagaaucuuaaucacagg

SEQ ID NO: 584621 - RNA, 23 nt, Artificial Sequence
  Synthetic
uaaauaagaaucuuaaucacagg

SEQ ID NO: 584622 - RNA, 24 nt, Artificial Sequence
  Synthetic
uuaaauaagaaucuuaaucacagg

SEQ ID NO: 584623 - RNA, 18 nt, Artificial Sequence
  Synthetic
cauacucucacucacagg

SEQ ID NO: 584624 - RNA, 19 nt, Artificial Sequence
  Synthetic
gcauacucucacucacagg

SEQ ID NO: 584625 - RNA, 20 nt, Artificial Sequence
  Synthetic
ugcauacucucacucacagg

SEQ ID NO: 584626 - RNA, 21 nt, Artificial Sequence
  Synthetic
cugcauacucucacucacagg

SEQ ID NO: 584627 - RNA, 22 nt, Artificial Sequence
  Synthetic
acugcauacucucacucacagg

SEQ ID NO: 584628 - RNA, 23 nt, Artificial Sequence
  Synthetic
cacugcauacucucacucacagg

SEQ ID NO: 584629 - RNA, 24 nt, Artificial Sequence
  Synthetic
acacugcauacucucacucacagg

SEQ ID NO: 584630 - RNA, 18 nt, Artificial Sequence
  Synthetic
cauauucucacucacagg

SEQ ID NO: 584631 - RNA, 19 nt, Artificial Sequence
  Synthetic
gcauauucucacucacagg

SEQ ID NO: 584632 - RNA, 20 nt, Artificial Sequence
  Synthetic
cgcauauucucacucacagg

SEQ ID NO: 584633 - RNA, 21 nt, Artificial Sequence
  Synthetic
ccgcauauucucacucacagg

SEQ ID NO: 584634 - RNA, 22 nt, Artificial Sequence
  Synthetic
accgcauauucucacucacagg

SEQ ID NO: 584635 - RNA, 23 nt, Artificial Sequence
  Synthetic
caccgcauauucucacucacagg

SEQ ID NO: 584636 - RNA, 24 nt, Artificial Sequence
  Synthetic
acaccgcauauucucacucacagg

SEQ ID NO: 584637 - RNA, 18 nt, Artificial Sequence
  Synthetic
auuuuacaggcucacagg

SEQ ID NO: 584638 - RNA, 19 nt, Artificial Sequence
  Synthetic
gauuuuacaggcucacagg

SEQ ID NO: 584639 - RNA, 20 nt, Artificial Sequence
  Synthetic
ugauuuuacaggcucacagg

SEQ ID NO: 584640 - RNA, 21 nt, Artificial Sequence
  Synthetic
uugauuuuacaggcucacagg

SEQ ID NO: 584641 - RNA, 22 nt, Artificial Sequence
  Synthetic
uuugauuuuacaggcucacagg

SEQ ID NO: 584642 - RNA, 23 nt, Artificial Sequence
  Synthetic
uuuugauuuuacaggcucacagg

SEQ ID NO: 584643 - RNA, 24 nt, Artificial Sequence
  Synthetic
cuuuugauuuuacaggcucacagg

SEQ ID NO: 584644 - RNA, 18 nt, Artificial Sequence
  Synthetic
ggcauucuuagucacagg

SEQ ID NO: 584645 - RNA, 19 nt, Artificial Sequence
  Synthetic
gggcauucuuagucacagg

SEQ ID NO: 584646 - RNA, 20 nt, Artificial Sequence
  Synthetic
ugggcauucuuagucacagg

SEQ ID NO: 584647 - RNA, 21 nt, Artificial Sequence
  Synthetic
uugggcauucuuagucacagg

SEQ ID NO: 584648 - RNA, 22 nt, Artificial Sequence
  Synthetic
guugggcauucuuagucacagg

SEQ ID NO: 584649 - RNA, 23 nt, Artificial Sequence
  Synthetic
gguugggcauucuuagucacagg

SEQ ID NO: 584650 - RNA, 24 nt, Artificial Sequence
  Synthetic
agguugggcauucuuagucacagg

SEQ ID NO: 584651 - RNA, 18 nt, Artificial Sequence
  Synthetic
agaacacauggucacagg

SEQ ID NO: 584652 - RNA, 19 nt, Artificial Sequence
  Synthetic
gagaacacauggucacagg

SEQ ID NO: 584653 - RNA, 20 nt, Artificial Sequence
  Synthetic
ugagaacacauggucacagg

SEQ ID NO: 584654 - RNA, 21 nt, Artificial Sequence
  Synthetic
augagaacacauggucacagg

SEQ ID NO: 584655 - RNA, 22 nt, Artificial Sequence
  Synthetic
aaugagaacacauggucacagg

SEQ ID NO: 584656 - RNA, 23 nt, Artificial Sequence
  Synthetic
caaugagaacacauggucacagg

SEQ ID NO: 584657 - RNA, 24 nt, Artificial Sequence
  Synthetic
acaaugagaacacauggucacagg

SEQ ID NO: 584658 - RNA, 18 nt, Artificial Sequence
  Synthetic
ucgauuuuuaaagacagg

SEQ ID NO: 584659 - RNA, 19 nt, Artificial Sequence
  Synthetic
cucgauuuuuaaagacagg

SEQ ID NO: 584660 - RNA, 20 nt, Artificial Sequence
  Synthetic
ucucgauuuuuaaagacagg

SEQ ID NO: 584661 - RNA, 21 nt, Artificial Sequence
  Synthetic
aucucgauuuuuaaagacagg

SEQ ID NO: 584662 - RNA, 22 nt, Artificial Sequence
  Synthetic
caucucgauuuuuaaagacagg

SEQ ID NO: 584663 - RNA, 23 nt, Artificial Sequence
  Synthetic
ucaucucgauuuuuaaagacagg

SEQ ID NO: 584664 - RNA, 24 nt, Artificial Sequence
  Synthetic
gucaucucgauuuuuaaagacagg

SEQ ID NO: 584665 - RNA, 18 nt, Artificial Sequence
  Synthetic
aagggaaagcaagacagg

SEQ ID NO: 584666 - RNA, 19 nt, Artificial Sequence
  Synthetic
aaagggaaagcaagacagg

SEQ ID NO: 584667 - RNA, 20 nt, Artificial Sequence
  Synthetic
aaaagggaaagcaagacagg

SEQ ID NO: 584668 - RNA, 21 nt, Artificial Sequence
  Synthetic
gaaaagggaaagcaagacagg

SEQ ID NO: 584669 - RNA, 22 nt, Artificial Sequence
  Synthetic
ggaaaagggaaagcaagacagg

SEQ ID NO: 584670 - RNA, 23 nt, Artificial Sequence
  Synthetic
gggaaaagggaaagcaagacagg

SEQ ID NO: 584671 - RNA, 24 nt, Artificial Sequence
  Synthetic
ggggaaaagggaaagcaagacagg

SEQ ID NO: 584672 - RNA, 18 nt, Artificial Sequence
  Synthetic
gagagugacagagacagg

SEQ ID NO: 584673 - RNA, 19 nt, Artificial Sequence
  Synthetic
ggagagugacagagacagg

SEQ ID NO: 584674 - RNA, 20 nt, Artificial Sequence
  Synthetic
aggagagugacagagacagg

SEQ ID NO: 584675 - RNA, 21 nt, Artificial Sequence
  Synthetic
aaggagagugacagagacagg

SEQ ID NO: 584676 - RNA, 22 nt, Artificial Sequence
  Synthetic
aaaggagagugacagagacagg

SEQ ID NO: 584677 - RNA, 23 nt, Artificial Sequence
  Synthetic
uaaaggagagugacagagacagg

SEQ ID NO: 584678 - RNA, 24 nt, Artificial Sequence
  Synthetic
guaaaggagagugacagagacagg

SEQ ID NO: 584679 - RNA, 18 nt, Artificial Sequence
  Synthetic
ggaaauaagagagacagg

SEQ ID NO: 584680 - RNA, 19 nt, Artificial Sequence
  Synthetic
aggaaauaagagagacagg

SEQ ID NO: 584681 - RNA, 20 nt, Artificial Sequence
  Synthetic
uaggaaauaagagagacagg

SEQ ID NO: 584682 - RNA, 21 nt, Artificial Sequence
  Synthetic
auaggaaauaagagagacagg

SEQ ID NO: 584683 - RNA, 22 nt, Artificial Sequence
  Synthetic
aauaggaaauaagagagacagg

SEQ ID NO: 584684 - RNA, 23 nt, Artificial Sequence
  Synthetic
aaauaggaaauaagagagacagg

SEQ ID NO: 584685 - RNA, 24 nt, Artificial Sequence
  Synthetic
gaaauaggaaauaagagagacagg

SEQ ID NO: 584686 - RNA, 18 nt, Artificial Sequence
  Synthetic
cuuugacugggagacagg

SEQ ID NO: 584687 - RNA, 19 nt, Artificial Sequence
  Synthetic
ucuuugacugggagacagg

SEQ ID NO: 584688 - RNA, 20 nt, Artificial Sequence
  Synthetic
cucuuugacugggagacagg

SEQ ID NO: 584689 - RNA, 21 nt, Artificial Sequence
  Synthetic
ucucuuugacugggagacagg

SEQ ID NO: 584690 - RNA, 22 nt, Artificial Sequence
  Synthetic
uucucuuugacugggagacagg

SEQ ID NO: 584691 - RNA, 23 nt, Artificial Sequence
  Synthetic
auucucuuugacugggagacagg

SEQ ID NO: 584692 - RNA, 24 nt, Artificial Sequence
  Synthetic
cauucucuuugacugggagacagg

SEQ ID NO: 584693 - RNA, 18 nt, Artificial Sequence
  Synthetic
guuugcaaaugggacagg

SEQ ID NO: 584694 - RNA, 19 nt, Artificial Sequence
  Synthetic
uguuugcaaaugggacagg

SEQ ID NO: 584695 - RNA, 20 nt, Artificial Sequence
  Synthetic
uuguuugcaaaugggacagg

SEQ ID NO: 584696 - RNA, 21 nt, Artificial Sequence
  Synthetic
auuguuugcaaaugggacagg

SEQ ID NO: 584697 - RNA, 22 nt, Artificial Sequence
  Synthetic
aauuguuugcaaaugggacagg

SEQ ID NO: 584698 - RNA, 23 nt, Artificial Sequence
  Synthetic
aaauuguuugcaaaugggacagg

SEQ ID NO: 584699 - RNA, 24 nt, Artificial Sequence
  Synthetic
uaaauuguuugcaaaugggacagg

SEQ ID NO: 584700 - RNA, 18 nt, Artificial Sequence
  Synthetic
uccuuccaguuggacagg

SEQ ID NO: 584701 - RNA, 19 nt, Artificial Sequence
  Synthetic
auccuuccaguuggacagg

SEQ ID NO: 584702 - RNA, 20 nt, Artificial Sequence
  Synthetic
cauccuuccaguuggacagg

SEQ ID NO: 584703 - RNA, 21 nt, Artificial Sequence
  Synthetic
ccauccuuccaguuggacagg

SEQ ID NO: 584704 - RNA, 22 nt, Artificial Sequence
  Synthetic
accauccuuccaguuggacagg

SEQ ID NO: 584705 - RNA, 23 nt, Artificial Sequence
  Synthetic
uaccauccuuccaguuggacagg

SEQ ID NO: 584706 - RNA, 24 nt, Artificial Sequence
  Synthetic
uuaccauccuuccaguuggacagg

SEQ ID NO: 584707 - RNA, 18 nt, Artificial Sequence
  Synthetic
agguaaugacaugacagg

SEQ ID NO: 584708 - RNA, 19 nt, Artificial Sequence
  Synthetic
uagguaaugacaugacagg

SEQ ID NO: 584709 - RNA, 20 nt, Artificial Sequence
  Synthetic
auagguaaugacaugacagg

SEQ ID NO: 584710 - RNA, 21 nt, Artificial Sequence
  Synthetic
cauagguaaugacaugacagg

SEQ ID NO: 584711 - RNA, 22 nt, Artificial Sequence
  Synthetic
gcauagguaaugacaugacagg

SEQ ID NO: 584712 - RNA, 23 nt, Artificial Sequence
  Synthetic
ggcauagguaaugacaugacagg

SEQ ID NO: 584713 - RNA, 24 nt, Artificial Sequence
  Synthetic
gggcauagguaaugacaugacagg

SEQ ID NO: 584714 - RNA, 18 nt, Artificial Sequence
  Synthetic
auugucaagcaugacagg

SEQ ID NO: 584715 - RNA, 19 nt, Artificial Sequence
  Synthetic
aauugucaagcaugacagg

SEQ ID NO: 584716 - RNA, 20 nt, Artificial Sequence
  Synthetic
uaauugucaagcaugacagg

SEQ ID NO: 584717 - RNA, 21 nt, Artificial Sequence
  Synthetic
guaauugucaagcaugacagg

SEQ ID NO: 584718 - RNA, 22 nt, Artificial Sequence
  Synthetic
uguaauugucaagcaugacagg

SEQ ID NO: 584719 - RNA, 23 nt, Artificial Sequence
  Synthetic
uuguaauugucaagcaugacagg

SEQ ID NO: 584720 - RNA, 24 nt, Artificial Sequence
  Synthetic
auuguaauugucaagcaugacagg

SEQ ID NO: 584721 - RNA, 18 nt, Artificial Sequence
  Synthetic
ucaacuaaauaugacagg

SEQ ID NO: 584722 - RNA, 19 nt, Artificial Sequence
  Synthetic
cucaacuaaauaugacagg

SEQ ID NO: 584723 - RNA, 20 nt, Artificial Sequence
  Synthetic
ucucaacuaaauaugacagg

SEQ ID NO: 584724 - RNA, 21 nt, Artificial Sequence
  Synthetic
uucucaacuaaauaugacagg

SEQ ID NO: 584725 - RNA, 22 nt, Artificial Sequence
  Synthetic
guucucaacuaaauaugacagg

SEQ ID NO: 584726 - RNA, 23 nt, Artificial Sequence
  Synthetic
aguucucaacuaaauaugacagg

SEQ ID NO: 584727 - RNA, 24 nt, Artificial Sequence
  Synthetic
aaguucucaacuaaauaugacagg

SEQ ID NO: 584728 - RNA, 18 nt, Artificial Sequence
  Synthetic
uccagccugggugacagg

SEQ ID NO: 584729 - RNA, 19 nt, Artificial Sequence
  Synthetic
cuccagccugggugacagg

SEQ ID NO: 584730 - RNA, 20 nt, Artificial Sequence
  Synthetic
acuccagccugggugacagg

SEQ ID NO: 584731 - RNA, 21 nt, Artificial Sequence
  Synthetic
cacuccagccugggugacagg

SEQ ID NO: 584732 - RNA, 22 nt, Artificial Sequence
  Synthetic
gcacuccagccugggugacagg

SEQ ID NO: 584733 - RNA, 23 nt, Artificial Sequence
  Synthetic
ugcacuccagccugggugacagg

SEQ ID NO: 584734 - RNA, 24 nt, Artificial Sequence
  Synthetic
cugcacuccagccugggugacagg

SEQ ID NO: 584735 - RNA, 18 nt, Artificial Sequence
  Synthetic
auuuuuaggcuugacagg

SEQ ID NO: 584736 - RNA, 19 nt, Artificial Sequence
  Synthetic
cauuuuuaggcuugacagg

SEQ ID NO: 584737 - RNA, 20 nt, Artificial Sequence
  Synthetic
acauuuuuaggcuugacagg

SEQ ID NO: 584738 - RNA, 21 nt, Artificial Sequence
  Synthetic
cacauuuuuaggcuugacagg

SEQ ID NO: 584739 - RNA, 22 nt, Artificial Sequence
  Synthetic
acacauuuuuaggcuugacagg

SEQ ID NO: 584740 - RNA, 23 nt, Artificial Sequence
  Synthetic
uacacauuuuuaggcuugacagg

SEQ ID NO: 584741 - RNA, 24 nt, Artificial Sequence
  Synthetic
auacacauuuuuaggcuugacagg

SEQ ID NO: 584742 - RNA, 18 nt, Artificial Sequence
  Synthetic
uagggcuagaaauacagg

SEQ ID NO: 584743 - RNA, 19 nt, Artificial Sequence
  Synthetic
guagggcuagaaauacagg

SEQ ID NO: 584744 - RNA, 20 nt, Artificial Sequence
  Synthetic
aguagggcuagaaauacagg

SEQ ID NO: 584745 - RNA, 21 nt, Artificial Sequence
  Synthetic
uaguagggcuagaaauacagg

SEQ ID NO: 584746 - RNA, 22 nt, Artificial Sequence
  Synthetic
guaguagggcuagaaauacagg

SEQ ID NO: 584747 - RNA, 23 nt, Artificial Sequence
  Synthetic
gguaguagggcuagaaauacagg

SEQ ID NO: 584748 - RNA, 24 nt, Artificial Sequence
  Synthetic
agguaguagggcuagaaauacagg

SEQ ID NO: 584749 - RNA, 18 nt, Artificial Sequence
  Synthetic
auaccacaugaauacagg

SEQ ID NO: 584750 - RNA, 19 nt, Artificial Sequence
  Synthetic
cauaccacaugaauacagg

SEQ ID NO: 584751 - RNA, 20 nt, Artificial Sequence
  Synthetic
acauaccacaugaauacagg

SEQ ID NO: 584752 - RNA, 21 nt, Artificial Sequence
  Synthetic
uacauaccacaugaauacagg

SEQ ID NO: 584753 - RNA, 22 nt, Artificial Sequence
  Synthetic
auacauaccacaugaauacagg

SEQ ID NO: 584754 - RNA, 23 nt, Artificial Sequence
  Synthetic
cauacauaccacaugaauacagg

SEQ ID NO: 584755 - RNA, 24 nt, Artificial Sequence
  Synthetic
acauacauaccacaugaauacagg

SEQ ID NO: 584756 - RNA, 18 nt, Artificial Sequence
  Synthetic
acucccaagguauacagg

SEQ ID NO: 584757 - RNA, 19 nt, Artificial Sequence
  Synthetic
aacucccaagguauacagg

SEQ ID NO: 584758 - RNA, 20 nt, Artificial Sequence
  Synthetic
caacucccaagguauacagg

SEQ ID NO: 584759 - RNA, 21 nt, Artificial Sequence
  Synthetic
acaacucccaagguauacagg

SEQ ID NO: 584760 - RNA, 22 nt, Artificial Sequence
  Synthetic
gacaacucccaagguauacagg

SEQ ID NO: 584761 - RNA, 23 nt, Artificial Sequence
  Synthetic
ugacaacucccaagguauacagg

SEQ ID NO: 584762 - RNA, 24 nt, Artificial Sequence
  Synthetic
cugacaacucccaagguauacagg

SEQ ID NO: 584763 - RNA, 18 nt, Artificial Sequence
  Synthetic
gagagcuacuccuacagg

SEQ ID NO: 584764 - RNA, 19 nt, Artificial Sequence
  Synthetic
ggagagcuacuccuacagg

SEQ ID NO: 584765 - RNA, 20 nt, Artificial Sequence
  Synthetic
gggagagcuacuccuacagg

SEQ ID NO: 584766 - RNA, 21 nt, Artificial Sequence
  Synthetic
ugggagagcuacuccuacagg

SEQ ID NO: 584767 - RNA, 22 nt, Artificial Sequence
  Synthetic
gugggagagcuacuccuacagg

SEQ ID NO: 584768 - RNA, 23 nt, Artificial Sequence
  Synthetic
agugggagagcuacuccuacagg

SEQ ID NO: 584769 - RNA, 24 nt, Artificial Sequence
  Synthetic
aagugggagagcuacuccuacagg

SEQ ID NO: 584770 - RNA, 18 nt, Artificial Sequence
  Synthetic
gggagccagagcuacagg

SEQ ID NO: 584771 - RNA, 19 nt, Artificial Sequence
  Synthetic
ugggagccagagcuacagg

SEQ ID NO: 584772 - RNA, 20 nt, Artificial Sequence
  Synthetic
augggagccagagcuacagg

SEQ ID NO: 584773 - RNA, 21 nt, Artificial Sequence
  Synthetic
gaugggagccagagcuacagg

SEQ ID NO: 584774 - RNA, 22 nt, Artificial Sequence
  Synthetic
agaugggagccagagcuacagg

SEQ ID NO: 584775 - RNA, 23 nt, Artificial Sequence
  Synthetic
aagaugggagccagagcuacagg

SEQ ID NO: 584776 - RNA, 24 nt, Artificial Sequence
  Synthetic
gaagaugggagccagagcuacagg

SEQ ID NO: 584777 - RNA, 18 nt, Artificial Sequence
  Synthetic
aagugauagugcuacagg

SEQ ID NO: 584778 - RNA, 19 nt, Artificial Sequence
  Synthetic
gaagugauagugcuacagg

SEQ ID NO: 584779 - RNA, 20 nt, Artificial Sequence
  Synthetic
agaagugauagugcuacagg

SEQ ID NO: 584780 - RNA, 21 nt, Artificial Sequence
  Synthetic
aagaagugauagugcuacagg

SEQ ID NO: 584781 - RNA, 22 nt, Artificial Sequence
  Synthetic
aaagaagugauagugcuacagg

SEQ ID NO: 584782 - RNA, 23 nt, Artificial Sequence
  Synthetic
caaagaagugauagugcuacagg

SEQ ID NO: 584783 - RNA, 24 nt, Artificial Sequence
  Synthetic
ucaaagaagugauagugcuacagg

SEQ ID NO: 584784 - RNA, 18 nt, Artificial Sequence
  Synthetic
agccacagggaguacagg

SEQ ID NO: 584785 - RNA, 19 nt, Artificial Sequence
  Synthetic
uagccacagggaguacagg

SEQ ID NO: 584786 - RNA, 20 nt, Artificial Sequence
  Synthetic
guagccacagggaguacagg

SEQ ID NO: 584787 - RNA, 21 nt, Artificial Sequence
  Synthetic
gguagccacagggaguacagg

SEQ ID NO: 584788 - RNA, 22 nt, Artificial Sequence
  Synthetic
agguagccacagggaguacagg

SEQ ID NO: 584789 - RNA, 23 nt, Artificial Sequence
  Synthetic
uagguagccacagggaguacagg

SEQ ID NO: 584790 - RNA, 24 nt, Artificial Sequence
  Synthetic
guagguagccacagggaguacagg

SEQ ID NO: 584791 - RNA, 18 nt, Artificial Sequence
  Synthetic
auugacacuagguacagg

SEQ ID NO: 584792 - RNA, 19 nt, Artificial Sequence
  Synthetic
aauugacacuagguacagg

SEQ ID NO: 584793 - RNA, 20 nt, Artificial Sequence
  Synthetic
gaauugacacuagguacagg

SEQ ID NO: 584794 - RNA, 21 nt, Artificial Sequence
  Synthetic
agaauugacacuagguacagg

SEQ ID NO: 584795 - RNA, 22 nt, Artificial Sequence
  Synthetic
gagaauugacacuagguacagg

SEQ ID NO: 584796 - RNA, 23 nt, Artificial Sequence
  Synthetic
agagaauugacacuagguacagg

SEQ ID NO: 584797 - RNA, 24 nt, Artificial Sequence
  Synthetic
gagagaauugacacuagguacagg

SEQ ID NO: 584798 - RNA, 18 nt, Artificial Sequence
  Synthetic
aauuuaauaugguacagg

SEQ ID NO: 584799 - RNA, 19 nt, Artificial Sequence
  Synthetic
aaauuuaauaugguacagg

SEQ ID NO: 584800 - RNA, 20 nt, Artificial Sequence
  Synthetic
aaaauuuaauaugguacagg

SEQ ID NO: 584801 - RNA, 21 nt, Artificial Sequence
  Synthetic
caaaauuuaauaugguacagg

SEQ ID NO: 584802 - RNA, 22 nt, Artificial Sequence
  Synthetic
ucaaaauuuaauaugguacagg

SEQ ID NO: 584803 - RNA, 23 nt, Artificial Sequence
  Synthetic
uucaaaauuuaauaugguacagg

SEQ ID NO: 584804 - RNA, 24 nt, Artificial Sequence
  Synthetic
auucaaaauuuaauaugguacagg

SEQ ID NO: 584805 - RNA, 18 nt, Artificial Sequence
  Synthetic
gaaauauaaauguacagg

SEQ ID NO: 584806 - RNA, 19 nt, Artificial Sequence
  Synthetic
ugaaauauaaauguacagg

SEQ ID NO: 584807 - RNA, 20 nt, Artificial Sequence
  Synthetic
augaaauauaaauguacagg

SEQ ID NO: 584808 - RNA, 21 nt, Artificial Sequence
  Synthetic
aaugaaauauaaauguacagg

SEQ ID NO: 584809 - RNA, 22 nt, Artificial Sequence
  Synthetic
uaaugaaauauaaauguacagg

SEQ ID NO: 584810 - RNA, 23 nt, Artificial Sequence
  Synthetic
guaaugaaauauaaauguacagg

SEQ ID NO: 584811 - RNA, 24 nt, Artificial Sequence
  Synthetic
aguaaugaaauauaaauguacagg

SEQ ID NO: 584812 - RNA, 18 nt, Artificial Sequence
  Synthetic
uccaaacuuaauuacagg

SEQ ID NO: 584813 - RNA, 19 nt, Artificial Sequence
  Synthetic
cuccaaacuuaauuacagg

SEQ ID NO: 584814 - RNA, 20 nt, Artificial Sequence
  Synthetic
ucuccaaacuuaauuacagg

SEQ ID NO: 584815 - RNA, 21 nt, Artificial Sequence
  Synthetic
cucuccaaacuuaauuacagg

SEQ ID NO: 584816 - RNA, 22 nt, Artificial Sequence
  Synthetic
ucucuccaaacuuaauuacagg

SEQ ID NO: 584817 - RNA, 23 nt, Artificial Sequence
  Synthetic
cucucuccaaacuuaauuacagg

SEQ ID NO: 584818 - RNA, 24 nt, Artificial Sequence
  Synthetic
gcucucuccaaacuuaauuacagg

SEQ ID NO: 584819 - RNA, 18 nt, Artificial Sequence
  Synthetic
uccagccuggguuacagg

SEQ ID NO: 584820 - RNA, 19 nt, Artificial Sequence
  Synthetic
cuccagccuggguuacagg

SEQ ID NO: 584821 - RNA, 20 nt, Artificial Sequence
  Synthetic
acuccagccuggguuacagg

SEQ ID NO: 584822 - RNA, 21 nt, Artificial Sequence
  Synthetic
cacuccagccuggguuacagg

SEQ ID NO: 584823 - RNA, 22 nt, Artificial Sequence
  Synthetic
gcacuccagccuggguuacagg

SEQ ID NO: 584824 - RNA, 23 nt, Artificial Sequence
  Synthetic
ugcacuccagccuggguuacagg

SEQ ID NO: 584825 - RNA, 24 nt, Artificial Sequence
  Synthetic
uugcacuccagccuggguuacagg

SEQ ID NO: 584826 - RNA, 18 nt, Artificial Sequence
  Synthetic
aaucugucuuguuacagg

SEQ ID NO: 584827 - RNA, 19 nt, Artificial Sequence
  Synthetic
aaaucugucuuguuacagg

SEQ ID NO: 584828 - RNA, 20 nt, Artificial Sequence
  Synthetic
aaaaucugucuuguuacagg

SEQ ID NO: 584829 - RNA, 21 nt, Artificial Sequence
  Synthetic
aaaaaucugucuuguuacagg

SEQ ID NO: 584830 - RNA, 22 nt, Artificial Sequence
  Synthetic
aaaaaaucugucuuguuacagg

SEQ ID NO: 584831 - RNA, 23 nt, Artificial Sequence
  Synthetic
aaaaaaaucugucuuguuacagg

SEQ ID NO: 584832 - RNA, 24 nt, Artificial Sequence
  Synthetic
gaaaaaaaucugucuuguuacagg

SEQ ID NO: 584833 - RNA, 18 nt, Artificial Sequence
  Synthetic
agauuaauaaaaaccagg

SEQ ID NO: 584834 - RNA, 19 nt, Artificial Sequence
  Synthetic
aagauuaauaaaaaccagg

SEQ ID NO: 584835 - RNA, 20 nt, Artificial Sequence
  Synthetic
aaagauuaauaaaaaccagg

SEQ ID NO: 584836 - RNA, 21 nt, Artificial Sequence
  Synthetic
gaaagauuaauaaaaaccagg

SEQ ID NO: 584837 - RNA, 22 nt, Artificial Sequence
  Synthetic
agaaagauuaauaaaaaccagg

SEQ ID NO: 584838 - RNA, 23 nt, Artificial Sequence
  Synthetic
uagaaagauuaauaaaaaccagg

SEQ ID NO: 584839 - RNA, 24 nt, Artificial Sequence
  Synthetic
uuagaaagauuaauaaaaaccagg

SEQ ID NO: 584840 - RNA, 18 nt, Artificial Sequence
  Synthetic
agccaucugcaaaccagg

SEQ ID NO: 584841 - RNA, 19 nt, Artificial Sequence
  Synthetic
aagccaucugcaaaccagg

SEQ ID NO: 584842 - RNA, 20 nt, Artificial Sequence
  Synthetic
gaagccaucugcaaaccagg

SEQ ID NO: 584843 - RNA, 21 nt, Artificial Sequence
  Synthetic
ggaagccaucugcaaaccagg

SEQ ID NO: 584844 - RNA, 22 nt, Artificial Sequence
  Synthetic
aggaagccaucugcaaaccagg

SEQ ID NO: 584845 - RNA, 23 nt, Artificial Sequence
  Synthetic
aaggaagccaucugcaaaccagg

SEQ ID NO: 584846 - RNA, 24 nt, Artificial Sequence
  Synthetic
gaaggaagccaucugcaaaccagg

SEQ ID NO: 584847 - RNA, 18 nt, Artificial Sequence
  Synthetic
ucccaagacuaaaccagg

SEQ ID NO: 584848 - RNA, 21 nt, Artificial Sequence
  Synthetic
cccucccaagacuaaaccagg

SEQ ID NO: 584849 - RNA, 22 nt, Artificial Sequence
  Synthetic
acccucccaagacuaaaccagg

SEQ ID NO: 584850 - RNA, 23 nt, Artificial Sequence
  Synthetic
cacccucccaagacuaaaccagg

SEQ ID NO: 584851 - RNA, 24 nt, Artificial Sequence
  Synthetic
acacccucccaagacuaaaccagg

SEQ ID NO: 584852 - RNA, 21 nt, Artificial Sequence
  Synthetic
cucucccaagacuaaaccagg

SEQ ID NO: 584853 - RNA, 22 nt, Artificial Sequence
  Synthetic
acucucccaagacuaaaccagg

SEQ ID NO: 584854 - RNA, 23 nt, Artificial Sequence
  Synthetic
cacucucccaagacuaaaccagg

SEQ ID NO: 584855 - RNA, 24 nt, Artificial Sequence
  Synthetic
acacucucccaagacuaaaccagg

SEQ ID NO: 584856 - RNA, 19 nt, Artificial Sequence
  Synthetic
uucccaagacuaaaccagg

SEQ ID NO: 584857 - RNA, 20 nt, Artificial Sequence
  Synthetic
cuucccaagacuaaaccagg

SEQ ID NO: 584858 - RNA, 21 nt, Artificial Sequence
  Synthetic
ccuucccaagacuaaaccagg

SEQ ID NO: 584859 - RNA, 22 nt, Artificial Sequence
  Synthetic
accuucccaagacuaaaccagg

SEQ ID NO: 584860 - RNA, 23 nt, Artificial Sequence
  Synthetic
caccuucccaagacuaaaccagg

SEQ ID NO: 584861 - RNA, 24 nt, Artificial Sequence
  Synthetic
acaccuucccaagacuaaaccagg

SEQ ID NO: 584862 - RNA, 18 nt, Artificial Sequence
  Synthetic
uaaagcaaagcaaccagg

SEQ ID NO: 584863 - RNA, 19 nt, Artificial Sequence
  Synthetic
guaaagcaaagcaaccagg

SEQ ID NO: 584864 - RNA, 20 nt, Artificial Sequence
  Synthetic
uguaaagcaaagcaaccagg

SEQ ID NO: 584865 - RNA, 21 nt, Artificial Sequence
  Synthetic
auguaaagcaaagcaaccagg

SEQ ID NO: 584866 - RNA, 22 nt, Artificial Sequence
  Synthetic
aauguaaagcaaagcaaccagg

SEQ ID NO: 584867 - RNA, 23 nt, Artificial Sequence
  Synthetic
aaauguaaagcaaagcaaccagg

SEQ ID NO: 584868 - RNA, 24 nt, Artificial Sequence
  Synthetic
gaaauguaaagcaaagcaaccagg

SEQ ID NO: 584869 - RNA, 18 nt, Artificial Sequence
  Synthetic
cucgcucugucaaccagg

SEQ ID NO: 584870 - RNA, 19 nt, Artificial Sequence
  Synthetic
ucucgcucugucaaccagg

SEQ ID NO: 584871 - RNA, 20 nt, Artificial Sequence
  Synthetic
gucucgcucugucaaccagg

SEQ ID NO: 584872 - RNA, 21 nt, Artificial Sequence
  Synthetic
agucucgcucugucaaccagg

SEQ ID NO: 584873 - RNA, 22 nt, Artificial Sequence
  Synthetic
gagucucgcucugucaaccagg

SEQ ID NO: 584874 - RNA, 23 nt, Artificial Sequence
  Synthetic
ggagucucgcucugucaaccagg

SEQ ID NO: 584875 - RNA, 24 nt, Artificial Sequence
  Synthetic
cggagucucgcucugucaaccagg

SEQ ID NO: 584876 - RNA, 18 nt, Artificial Sequence
  Synthetic
guaucauuaagaaccagg

SEQ ID NO: 584877 - RNA, 19 nt, Artificial Sequence
  Synthetic
gguaucauuaagaaccagg

SEQ ID NO: 584878 - RNA, 20 nt, Artificial Sequence
  Synthetic
ugguaucauuaagaaccagg

SEQ ID NO: 584879 - RNA, 21 nt, Artificial Sequence
  Synthetic
augguaucauuaagaaccagg

SEQ ID NO: 584880 - RNA, 22 nt, Artificial Sequence
  Synthetic
caugguaucauuaagaaccagg

SEQ ID NO: 584881 - RNA, 23 nt, Artificial Sequence
  Synthetic
ucaugguaucauuaagaaccagg

SEQ ID NO: 584882 - RNA, 24 nt, Artificial Sequence
  Synthetic
uucaugguaucauuaagaaccagg

SEQ ID NO: 584883 - RNA, 18 nt, Artificial Sequence
  Synthetic
ucuagcucugucaccagg

SEQ ID NO: 584884 - RNA, 19 nt, Artificial Sequence
  Synthetic
gucuagcucugucaccagg

SEQ ID NO: 584885 - RNA, 20 nt, Artificial Sequence
  Synthetic
agucuagcucugucaccagg

SEQ ID NO: 584886 - RNA, 21 nt, Artificial Sequence
  Synthetic
gagucuagcucugucaccagg

SEQ ID NO: 584887 - RNA, 22 nt, Artificial Sequence
  Synthetic
ggagucuagcucugucaccagg

SEQ ID NO: 584888 - RNA, 23 nt, Artificial Sequence
  Synthetic
cggagucuagcucugucaccagg

SEQ ID NO: 584889 - RNA, 24 nt, Artificial Sequence
  Synthetic
acggagucuagcucugucaccagg

SEQ ID NO: 584890 - RNA, 18 nt, Artificial Sequence
  Synthetic
ucucgcucugucaccagg

SEQ ID NO: 584891 - RNA, 19 nt, Artificial Sequence
  Synthetic
gucucgcucugucaccagg

SEQ ID NO: 584892 - RNA, 20 nt, Artificial Sequence
  Synthetic
agucucgcucugucaccagg

SEQ ID NO: 584893 - RNA, 21 nt, Artificial Sequence
  Synthetic
gagucucgcucugucaccagg

SEQ ID NO: 584894 - RNA, 22 nt, Artificial Sequence
  Synthetic
agagucucgcucugucaccagg

SEQ ID NO: 584895 - RNA, 23 nt, Artificial Sequence
  Synthetic
cagagucucgcucugucaccagg

SEQ ID NO: 584896 - RNA, 24 nt, Artificial Sequence
  Synthetic
acagagucucgcucugucaccagg

SEQ ID NO: 584897 - RNA, 18 nt, Artificial Sequence
  Synthetic
gucugcucuuucaccagg

SEQ ID NO: 584898 - RNA, 19 nt, Artificial Sequence
  Synthetic
agucugcucuuucaccagg

SEQ ID NO: 584899 - RNA, 20 nt, Artificial Sequence
  Synthetic
gagucugcucuuucaccagg

SEQ ID NO: 584900 - RNA, 21 nt, Artificial Sequence
  Synthetic
agagucugcucuuucaccagg

SEQ ID NO: 584901 - RNA, 22 nt, Artificial Sequence
  Synthetic
cagagucugcucuuucaccagg

SEQ ID NO: 584902 - RNA, 23 nt, Artificial Sequence
  Synthetic
acagagucugcucuuucaccagg

SEQ ID NO: 584903 - RNA, 24 nt, Artificial Sequence
  Synthetic
gacagagucugcucuuucaccagg

SEQ ID NO: 584904 - RNA, 21 nt, Artificial Sequence
  Synthetic
cgugucaagggagagaccagg

SEQ ID NO: 584905 - RNA, 22 nt, Artificial Sequence
  Synthetic
acgugucaagggagagaccagg

SEQ ID NO: 584906 - RNA, 23 nt, Artificial Sequence
  Synthetic
cacgugucaagggagagaccagg

SEQ ID NO: 584907 - RNA, 24 nt, Artificial Sequence
  Synthetic
ccacgugucaagggagagaccagg

SEQ ID NO: 584908 - RNA, 18 nt, Artificial Sequence
  Synthetic
gaugcagccaggaccagg

SEQ ID NO: 584909 - RNA, 19 nt, Artificial Sequence
  Synthetic
agaugcagccaggaccagg

SEQ ID NO: 584910 - RNA, 20 nt, Artificial Sequence
  Synthetic
cagaugcagccaggaccagg

SEQ ID NO: 584911 - RNA, 21 nt, Artificial Sequence
  Synthetic
ucagaugcagccaggaccagg

SEQ ID NO: 584912 - RNA, 22 nt, Artificial Sequence
  Synthetic
gucagaugcagccaggaccagg

SEQ ID NO: 584913 - RNA, 23 nt, Artificial Sequence
  Synthetic
agucagaugcagccaggaccagg

SEQ ID NO: 584914 - RNA, 24 nt, Artificial Sequence
  Synthetic
aagucagaugcagccaggaccagg

SEQ ID NO: 584915 - RNA, 18 nt, Artificial Sequence
  Synthetic
cuuucuaaguggaccagg

SEQ ID NO: 584916 - RNA, 19 nt, Artificial Sequence
  Synthetic
acuuucuaaguggaccagg

SEQ ID NO: 584917 - RNA, 20 nt, Artificial Sequence
  Synthetic
gacuuucuaaguggaccagg

SEQ ID NO: 584918 - RNA, 21 nt, Artificial Sequence
  Synthetic
agacuuucuaaguggaccagg

SEQ ID NO: 584919 - RNA, 22 nt, Artificial Sequence
  Synthetic
uagacuuucuaaguggaccagg

SEQ ID NO: 584920 - RNA, 23 nt, Artificial Sequence
  Synthetic
guagacuuucuaaguggaccagg

SEQ ID NO: 584921 - RNA, 24 nt, Artificial Sequence
  Synthetic
gguagacuuucuaaguggaccagg

SEQ ID NO: 584922 - RNA, 18 nt, Artificial Sequence
  Synthetic
guacuuuuaauuaccagg

SEQ ID NO: 584923 - RNA, 19 nt, Artificial Sequence
  Synthetic
cguacuuuuaauuaccagg

SEQ ID NO: 584924 - RNA, 20 nt, Artificial Sequence
  Synthetic
ucguacuuuuaauuaccagg

SEQ ID NO: 584925 - RNA, 21 nt, Artificial Sequence
  Synthetic
uucguacuuuuaauuaccagg

SEQ ID NO: 584926 - RNA, 22 nt, Artificial Sequence
  Synthetic
uuucguacuuuuaauuaccagg

SEQ ID NO: 584927 - RNA, 23 nt, Artificial Sequence
  Synthetic
cuuucguacuuuuaauuaccagg

SEQ ID NO: 584928 - RNA, 24 nt, Artificial Sequence
  Synthetic
gcuuucguacuuuuaauuaccagg

SEQ ID NO: 584929 - RNA, 18 nt, Artificial Sequence
  Synthetic
gaauugcuugaacccagg

SEQ ID NO: 584930 - RNA, 19 nt, Artificial Sequence
  Synthetic
agaauugcuugaacccagg

SEQ ID NO: 584931 - RNA, 20 nt, Artificial Sequence
  Synthetic
gagaauugcuugaacccagg

SEQ ID NO: 584932 - RNA, 21 nt, Artificial Sequence
  Synthetic
agagaauugcuugaacccagg

SEQ ID NO: 584933 - RNA, 22 nt, Artificial Sequence
  Synthetic
cagagaauugcuugaacccagg

SEQ ID NO: 584934 - RNA, 23 nt, Artificial Sequence
  Synthetic
acagagaauugcuugaacccagg

SEQ ID NO: 584935 - RNA, 24 nt, Artificial Sequence
  Synthetic
gacagagaauugcuugaacccagg

SEQ ID NO: 584936 - RNA, 18 nt, Artificial Sequence
  Synthetic
uugcucuuguaacccagg

SEQ ID NO: 584937 - RNA, 19 nt, Artificial Sequence
  Synthetic
uuugcucuuguaacccagg

SEQ ID NO: 584938 - RNA, 20 nt, Artificial Sequence
  Synthetic
uuuugcucuuguaacccagg

SEQ ID NO: 584939 - RNA, 21 nt, Artificial Sequence
  Synthetic
guuuugcucuuguaacccagg

SEQ ID NO: 584940 - RNA, 22 nt, Artificial Sequence
  Synthetic
aguuuugcucuuguaacccagg

SEQ ID NO: 584941 - RNA, 23 nt, Artificial Sequence
  Synthetic
gaguuuugcucuuguaacccagg

SEQ ID NO: 584942 - RNA, 24 nt, Artificial Sequence
  Synthetic
ggaguuuugcucuuguaacccagg

SEQ ID NO: 584943 - RNA, 18 nt, Artificial Sequence
  Synthetic
cuugaucuaucacccagg

SEQ ID NO: 584944 - RNA, 19 nt, Artificial Sequence
  Synthetic
ucuugaucuaucacccagg

SEQ ID NO: 584945 - RNA, 20 nt, Artificial Sequence
  Synthetic
gucuugaucuaucacccagg

SEQ ID NO: 584946 - RNA, 21 nt, Artificial Sequence
  Synthetic
agucuugaucuaucacccagg

SEQ ID NO: 584947 - RNA, 22 nt, Artificial Sequence
  Synthetic
gagucuugaucuaucacccagg

SEQ ID NO: 584948 - RNA, 23 nt, Artificial Sequence
  Synthetic
agagucuugaucuaucacccagg

SEQ ID NO: 584949 - RNA, 24 nt, Artificial Sequence
  Synthetic
cagagucuugaucuaucacccagg

SEQ ID NO: 584950 - RNA, 18 nt, Artificial Sequence
  Synthetic
cucacuacgucacccagg

SEQ ID NO: 584951 - RNA, 19 nt, Artificial Sequence
  Synthetic
ucucacuacgucacccagg

SEQ ID NO: 584952 - RNA, 20 nt, Artificial Sequence
  Synthetic
gucucacuacgucacccagg

SEQ ID NO: 584953 - RNA, 21 nt, Artificial Sequence
  Synthetic
agucucacuacgucacccagg

SEQ ID NO: 584954 - RNA, 22 nt, Artificial Sequence
  Synthetic
gagucucacuacgucacccagg

SEQ ID NO: 584955 - RNA, 23 nt, Artificial Sequence
  Synthetic
ggagucucacuacgucacccagg

SEQ ID NO: 584956 - RNA, 24 nt, Artificial Sequence
  Synthetic
uggagucucacuacgucacccagg

SEQ ID NO: 584957 - RNA, 18 nt, Artificial Sequence
  Synthetic
cucacucugucacccagg

SEQ ID NO: 584958 - RNA, 19 nt, Artificial Sequence
  Synthetic
ccucacucugucacccagg

SEQ ID NO: 584959 - RNA, 20 nt, Artificial Sequence
  Synthetic
uccucacucugucacccagg

SEQ ID NO: 584960 - RNA, 21 nt, Artificial Sequence
  Synthetic
uuccucacucugucacccagg

SEQ ID NO: 584961 - RNA, 22 nt, Artificial Sequence
  Synthetic
uuuccucacucugucacccagg

SEQ ID NO: 584962 - RNA, 23 nt, Artificial Sequence
  Synthetic
uuuuccucacucugucacccagg

SEQ ID NO: 584963 - RNA, 24 nt, Artificial Sequence
  Synthetic
uuuuuccucacucugucacccagg

SEQ ID NO: 584964 - RNA, 19 nt, Artificial Sequence
  Synthetic
ucucacucugucacccagg

SEQ ID NO: 584965 - RNA, 20 nt, Artificial Sequence
  Synthetic
aucucacucugucacccagg

SEQ ID NO: 584966 - RNA, 21 nt, Artificial Sequence
  Synthetic
gaucucacucugucacccagg

SEQ ID NO: 584967 - RNA, 22 nt, Artificial Sequence
  Synthetic
ggaucucacucugucacccagg

SEQ ID NO: 584968 - RNA, 23 nt, Artificial Sequence
  Synthetic
aggaucucacucugucacccagg

SEQ ID NO: 584969 - RNA, 24 nt, Artificial Sequence
  Synthetic
caggaucucacucugucacccagg

SEQ ID NO: 584970 - RNA, 22 nt, Artificial Sequence
  Synthetic
gagucucacucugucacccagg

SEQ ID NO: 584971 - RNA, 23 nt, Artificial Sequence
  Synthetic
agagucucacucugucacccagg

SEQ ID NO: 584972 - RNA, 24 nt, Artificial Sequence
  Synthetic
cagagucucacucugucacccagg

SEQ ID NO: 584973 - RNA, 23 nt, Artificial Sequence
  Synthetic
ggagucucacucugucacccagg

SEQ ID NO: 584974 - RNA, 24 nt, Artificial Sequence
  Synthetic
uggagucucacucugucacccagg

SEQ ID NO: 584975 - RNA, 21 nt, Artificial Sequence
  Synthetic
ggucucacucugucacccagg

SEQ ID NO: 584976 - RNA, 22 nt, Artificial Sequence
  Synthetic
gggucucacucugucacccagg

SEQ ID NO: 584977 - RNA, 23 nt, Artificial Sequence
  Synthetic
agggucucacucugucacccagg

SEQ ID NO: 584978 - RNA, 24 nt, Artificial Sequence
  Synthetic
cagggucucacucugucacccagg

SEQ ID NO: 584979 - RNA, 18 nt, Artificial Sequence
  Synthetic
cuuacucugucacccagg

SEQ ID NO: 584980 - RNA, 19 nt, Artificial Sequence
  Synthetic
ucuuacucugucacccagg

SEQ ID NO: 584981 - RNA, 20 nt, Artificial Sequence
  Synthetic
gucuuacucugucacccagg

SEQ ID NO: 584982 - RNA, 21 nt, Artificial Sequence
  Synthetic
agucuuacucugucacccagg

SEQ ID NO: 584983 - RNA, 22 nt, Artificial Sequence
  Synthetic
cagucuuacucugucacccagg

SEQ ID NO: 584984 - RNA, 23 nt, Artificial Sequence
  Synthetic
acagucuuacucugucacccagg

SEQ ID NO: 584985 - RNA, 24 nt, Artificial Sequence
  Synthetic
gacagucuuacucugucacccagg

SEQ ID NO: 584986 - RNA, 18 nt, Artificial Sequence
  Synthetic
cuagcucugucacccagg

SEQ ID NO: 584987 - RNA, 19 nt, Artificial Sequence
  Synthetic
ucuagcucugucacccagg

SEQ ID NO: 584988 - RNA, 20 nt, Artificial Sequence
  Synthetic
gucuagcucugucacccagg

SEQ ID NO: 584989 - RNA, 21 nt, Artificial Sequence
  Synthetic
agucuagcucugucacccagg

SEQ ID NO: 584990 - RNA, 22 nt, Artificial Sequence
  Synthetic
gagucuagcucugucacccagg

SEQ ID NO: 584991 - RNA, 23 nt, Artificial Sequence
  Synthetic
ggagucuagcucugucacccagg

SEQ ID NO: 584992 - RNA, 24 nt, Artificial Sequence
  Synthetic
uggagucuagcucugucacccagg

SEQ ID NO: 584993 - RNA, 21 nt, Artificial Sequence
  Synthetic
agucucgcucugucacccagg

SEQ ID NO: 584994 - RNA, 22 nt, Artificial Sequence
  Synthetic
gagucucgcucugucacccagg

SEQ ID NO: 584995 - RNA, 23 nt, Artificial Sequence
  Synthetic
agagucucgcucugucacccagg

SEQ ID NO: 584996 - RNA, 24 nt, Artificial Sequence
  Synthetic
cagagucucgcucugucacccagg

SEQ ID NO: 584997 - RNA, 22 nt, Artificial Sequence
  Synthetic
uagucucgcucugucacccagg

SEQ ID NO: 584998 - RNA, 23 nt, Artificial Sequence
  Synthetic
guagucucgcucugucacccagg

SEQ ID NO: 584999 - RNA, 24 nt, Artificial Sequence
  Synthetic
uguagucucgcucugucacccagg

SEQ ID NO: 585000 - RNA, 18 nt, Artificial Sequence
  Synthetic
cuugcucugucacccagg

SEQ ID NO: 585001 - RNA, 19 nt, Artificial Sequence
  Synthetic
ccuugcucugucacccagg

SEQ ID NO: 585002 - RNA, 20 nt, Artificial Sequence
  Synthetic
gccuugcucugucacccagg

SEQ ID NO: 585003 - RNA, 21 nt, Artificial Sequence
  Synthetic
agccuugcucugucacccagg

SEQ ID NO: 585004 - RNA, 22 nt, Artificial Sequence
  Synthetic
gagccuugcucugucacccagg

SEQ ID NO: 585005 - RNA, 23 nt, Artificial Sequence
  Synthetic
ggagccuugcucugucacccagg

SEQ ID NO: 585006 - RNA, 24 nt, Artificial Sequence
  Synthetic
cggagccuugcucugucacccagg

SEQ ID NO: 585007 - RNA, 21 nt, Artificial Sequence
  Synthetic
agucuugcucugucacccagg

SEQ ID NO: 585008 - RNA, 22 nt, Artificial Sequence
  Synthetic
gagucuugcucugucacccagg

SEQ ID NO: 585009 - RNA, 23 nt, Artificial Sequence
  Synthetic
agagucuugcucugucacccagg

SEQ ID NO: 585010 - RNA, 24 nt, Artificial Sequence
  Synthetic
cagagucuugcucugucacccagg

SEQ ID NO: 585011 - RNA, 18 nt, Artificial Sequence
  Synthetic
cucacugugucacccagg

SEQ ID NO: 585012 - RNA, 19 nt, Artificial Sequence
  Synthetic
ucucacugugucacccagg

SEQ ID NO: 585013 - RNA, 20 nt, Artificial Sequence
  Synthetic
gucucacugugucacccagg

SEQ ID NO: 585014 - RNA, 21 nt, Artificial Sequence
  Synthetic
agucucacugugucacccagg

SEQ ID NO: 585015 - RNA, 22 nt, Artificial Sequence
  Synthetic
gagucucacugugucacccagg

SEQ ID NO: 585016 - RNA, 23 nt, Artificial Sequence
  Synthetic
ggagucucacugugucacccagg

SEQ ID NO: 585017 - RNA, 24 nt, Artificial Sequence
  Synthetic
uggagucucacugugucacccagg

SEQ ID NO: 585018 - RNA, 18 nt, Artificial Sequence
  Synthetic
cucacuuugucacccagg

SEQ ID NO: 585019 - RNA, 19 nt, Artificial Sequence
  Synthetic
ucucacuuugucacccagg

SEQ ID NO: 585020 - RNA, 20 nt, Artificial Sequence
  Synthetic
gucucacuuugucacccagg

SEQ ID NO: 585021 - RNA, 21 nt, Artificial Sequence
  Synthetic
agucucacuuugucacccagg

SEQ ID NO: 585022 - RNA, 22 nt, Artificial Sequence
  Synthetic
aagucucacuuugucacccagg

SEQ ID NO: 585023 - RNA, 23 nt, Artificial Sequence
  Synthetic
gaagucucacuuugucacccagg

SEQ ID NO: 585024 - RNA, 24 nt, Artificial Sequence
  Synthetic
ugaagucucacuuugucacccagg

SEQ ID NO: 585025 - RNA, 18 nt, Artificial Sequence
  Synthetic
auagucaucagacccagg

SEQ ID NO: 585026 - RNA, 19 nt, Artificial Sequence
  Synthetic
aauagucaucagacccagg

SEQ ID NO: 585027 - RNA, 20 nt, Artificial Sequence
  Synthetic
uaauagucaucagacccagg

SEQ ID NO: 585028 - RNA, 21 nt, Artificial Sequence
  Synthetic
auaauagucaucagacccagg

SEQ ID NO: 585029 - RNA, 22 nt, Artificial Sequence
  Synthetic
aauaauagucaucagacccagg

SEQ ID NO: 585030 - RNA, 23 nt, Artificial Sequence
  Synthetic
gaauaauagucaucagacccagg

SEQ ID NO: 585031 - RNA, 24 nt, Artificial Sequence
  Synthetic
agaauaauagucaucagacccagg

SEQ ID NO: 585032 - RNA, 18 nt, Artificial Sequence
  Synthetic
cucgcuccaucgcccagg

SEQ ID NO: 585033 - RNA, 19 nt, Artificial Sequence
  Synthetic
ucucgcuccaucgcccagg

SEQ ID NO: 585034 - RNA, 20 nt, Artificial Sequence
  Synthetic
gucucgcuccaucgcccagg

SEQ ID NO: 585035 - RNA, 21 nt, Artificial Sequence
  Synthetic
agucucgcuccaucgcccagg

SEQ ID NO: 585036 - RNA, 22 nt, Artificial Sequence
  Synthetic
aagucucgcuccaucgcccagg

SEQ ID NO: 585037 - RNA, 23 nt, Artificial Sequence
  Synthetic
gaagucucgcuccaucgcccagg

SEQ ID NO: 585038 - RNA, 24 nt, Artificial Sequence
  Synthetic
ugaagucucgcuccaucgcccagg

SEQ ID NO: 585039 - RNA, 18 nt, Artificial Sequence
  Synthetic
cucccucugucgcccagg

SEQ ID NO: 585040 - RNA, 19 nt, Artificial Sequence
  Synthetic
ucucccucugucgcccagg

SEQ ID NO: 585041 - RNA, 20 nt, Artificial Sequence
  Synthetic
gucucccucugucgcccagg

SEQ ID NO: 585042 - RNA, 21 nt, Artificial Sequence
  Synthetic
agucucccucugucgcccagg

SEQ ID NO: 585043 - RNA, 22 nt, Artificial Sequence
  Synthetic
gagucucccucugucgcccagg

SEQ ID NO: 585044 - RNA, 23 nt, Artificial Sequence
  Synthetic
ggagucucccucugucgcccagg

SEQ ID NO: 585045 - RNA, 24 nt, Artificial Sequence
  Synthetic
uggagucucccucugucgcccagg

SEQ ID NO: 585046 - RNA, 21 nt, Artificial Sequence
  Synthetic
agucucgcucugucgcccagg

SEQ ID NO: 585047 - RNA, 22 nt, Artificial Sequence
  Synthetic
aagucucgcucugucgcccagg

SEQ ID NO: 585048 - RNA, 23 nt, Artificial Sequence
  Synthetic
gaagucucgcucugucgcccagg

SEQ ID NO: 585049 - RNA, 24 nt, Artificial Sequence
  Synthetic
ugaagucucgcucugucgcccagg

SEQ ID NO: 585050 - RNA, 22 nt, Artificial Sequence
  Synthetic
cagucucgcucugucgcccagg

SEQ ID NO: 585051 - RNA, 23 nt, Artificial Sequence
  Synthetic
acagucucgcucugucgcccagg

SEQ ID NO: 585052 - RNA, 24 nt, Artificial Sequence
  Synthetic
cacagucucgcucugucgcccagg

SEQ ID NO: 585053 - RNA, 23 nt, Artificial Sequence
  Synthetic
gcagucucgcucugucgcccagg

SEQ ID NO: 585054 - RNA, 24 nt, Artificial Sequence
  Synthetic
cgcagucucgcucugucgcccagg

SEQ ID NO: 585055 - RNA, 22 nt, Artificial Sequence
  Synthetic
gagucucgcucugucgcccagg

SEQ ID NO: 585056 - RNA, 23 nt, Artificial Sequence
  Synthetic
ggagucucgcucugucgcccagg

SEQ ID NO: 585057 - RNA, 24 nt, Artificial Sequence
  Synthetic
uggagucucgcucugucgcccagg

SEQ ID NO: 585058 - RNA, 18 nt, Artificial Sequence
  Synthetic
cuggcucugucgcccagg

SEQ ID NO: 585059 - RNA, 19 nt, Artificial Sequence
  Synthetic
ucuggcucugucgcccagg

SEQ ID NO: 585060 - RNA, 20 nt, Artificial Sequence
  Synthetic
gucuggcucugucgcccagg

SEQ ID NO: 585061 - RNA, 21 nt, Artificial Sequence
  Synthetic
agucuggcucugucgcccagg

SEQ ID NO: 585062 - RNA, 22 nt, Artificial Sequence
  Synthetic
gagucuggcucugucgcccagg

SEQ ID NO: 585063 - RNA, 23 nt, Artificial Sequence
  Synthetic
ggagucuggcucugucgcccagg

SEQ ID NO: 585064 - RNA, 24 nt, Artificial Sequence
  Synthetic
uggagucuggcucugucgcccagg

SEQ ID NO: 585065 - RNA, 18 nt, Artificial Sequence
  Synthetic
cuugcucugucgcccagg

SEQ ID NO: 585066 - RNA, 19 nt, Artificial Sequence
  Synthetic
ucuugcucugucgcccagg

SEQ ID NO: 585067 - RNA, 20 nt, Artificial Sequence
  Synthetic
gucuugcucugucgcccagg

SEQ ID NO: 585068 - RNA, 21 nt, Artificial Sequence
  Synthetic
agucuugcucugucgcccagg

SEQ ID NO: 585069 - RNA, 22 nt, Artificial Sequence
  Synthetic
gagucuugcucugucgcccagg

SEQ ID NO: 585070 - RNA, 23 nt, Artificial Sequence
  Synthetic
ggagucuugcucugucgcccagg

SEQ ID NO: 585071 - RNA, 24 nt, Artificial Sequence
  Synthetic
uggagucuugcucugucgcccagg

SEQ ID NO: 585072 - RNA, 18 nt, Artificial Sequence
  Synthetic
cucuuucugucgcccagg

SEQ ID NO: 585073 - RNA, 19 nt, Artificial Sequence
  Synthetic
ccucuuucugucgcccagg

SEQ ID NO: 585074 - RNA, 20 nt, Artificial Sequence
  Synthetic
gccucuuucugucgcccagg

SEQ ID NO: 585075 - RNA, 21 nt, Artificial Sequence
  Synthetic
ggccucuuucugucgcccagg

SEQ ID NO: 585076 - RNA, 22 nt, Artificial Sequence
  Synthetic
gggccucuuucugucgcccagg

SEQ ID NO: 585077 - RNA, 23 nt, Artificial Sequence
  Synthetic
agggccucuuucugucgcccagg

SEQ ID NO: 585078 - RNA, 24 nt, Artificial Sequence
  Synthetic
cagggccucuuucugucgcccagg

SEQ ID NO: 585079 - RNA, 18 nt, Artificial Sequence
  Synthetic
ucgcucgugucgcccagg

SEQ ID NO: 585080 - RNA, 19 nt, Artificial Sequence
  Synthetic
uucgcucgugucgcccagg

SEQ ID NO: 585081 - RNA, 20 nt, Artificial Sequence
  Synthetic
uuucgcucgugucgcccagg

SEQ ID NO: 585082 - RNA, 21 nt, Artificial Sequence
  Synthetic
guuucgcucgugucgcccagg

SEQ ID NO: 585083 - RNA, 22 nt, Artificial Sequence
  Synthetic
aguuucgcucgugucgcccagg

SEQ ID NO: 585084 - RNA, 23 nt, Artificial Sequence
  Synthetic
gaguuucgcucgugucgcccagg

SEQ ID NO: 585085 - RNA, 24 nt, Artificial Sequence
  Synthetic
ggaguuucgcucgugucgcccagg

SEQ ID NO: 585086 - RNA, 18 nt, Artificial Sequence
  Synthetic
uugcucuugucgcccagg

SEQ ID NO: 585087 - RNA, 19 nt, Artificial Sequence
  Synthetic
uuugcucuugucgcccagg

SEQ ID NO: 585088 - RNA, 20 nt, Artificial Sequence
  Synthetic
uuuugcucuugucgcccagg

SEQ ID NO: 585089 - RNA, 21 nt, Artificial Sequence
  Synthetic
guuuugcucuugucgcccagg

SEQ ID NO: 585090 - RNA, 22 nt, Artificial Sequence
  Synthetic
aguuuugcucuugucgcccagg

SEQ ID NO: 585091 - RNA, 23 nt, Artificial Sequence
  Synthetic
gaguuuugcucuugucgcccagg

SEQ ID NO: 585092 - RNA, 24 nt, Artificial Sequence
  Synthetic
agaguuuugcucuugucgcccagg

SEQ ID NO: 585093 - RNA, 24 nt, Artificial Sequence
  Synthetic
ggaguuuugcucuugucgcccagg

SEQ ID NO: 585094 - RNA, 18 nt, Artificial Sequence
  Synthetic
cucgcucuuucgcccagg

SEQ ID NO: 585095 - RNA, 19 nt, Artificial Sequence
  Synthetic
ucucgcucuuucgcccagg

SEQ ID NO: 585096 - RNA, 20 nt, Artificial Sequence
  Synthetic
gucucgcucuuucgcccagg

SEQ ID NO: 585097 - RNA, 21 nt, Artificial Sequence
  Synthetic
agucucgcucuuucgcccagg

SEQ ID NO: 585098 - RNA, 22 nt, Artificial Sequence
  Synthetic
gagucucgcucuuucgcccagg

SEQ ID NO: 585099 - RNA, 23 nt, Artificial Sequence
  Synthetic
ggagucucgcucuuucgcccagg

SEQ ID NO: 585100 - RNA, 24 nt, Artificial Sequence
  Synthetic
cggagucucgcucuuucgcccagg

SEQ ID NO: 585101 - RNA, 18 nt, Artificial Sequence
  Synthetic
aaugaaagauggcccagg

SEQ ID NO: 585102 - RNA, 19 nt, Artificial Sequence
  Synthetic
gaaugaaagauggcccagg

SEQ ID NO: 585103 - RNA, 20 nt, Artificial Sequence
  Synthetic
ggaaugaaagauggcccagg

SEQ ID NO: 585104 - RNA, 21 nt, Artificial Sequence
  Synthetic
gggaaugaaagauggcccagg

SEQ ID NO: 585105 - RNA, 22 nt, Artificial Sequence
  Synthetic
ugggaaugaaagauggcccagg

SEQ ID NO: 585106 - RNA, 23 nt, Artificial Sequence
  Synthetic
augggaaugaaagauggcccagg

SEQ ID NO: 585107 - RNA, 24 nt, Artificial Sequence
  Synthetic
caugggaaugaaagauggcccagg

SEQ ID NO: 585108 - RNA, 18 nt, Artificial Sequence
  Synthetic
ucacucuugcugcccagg

SEQ ID NO: 585109 - RNA, 19 nt, Artificial Sequence
  Synthetic
uucacucuugcugcccagg

SEQ ID NO: 585110 - RNA, 20 nt, Artificial Sequence
  Synthetic
uuucacucuugcugcccagg

SEQ ID NO: 585111 - RNA, 21 nt, Artificial Sequence
  Synthetic
guuucacucuugcugcccagg

SEQ ID NO: 585112 - RNA, 22 nt, Artificial Sequence
  Synthetic
aguuucacucuugcugcccagg

SEQ ID NO: 585113 - RNA, 23 nt, Artificial Sequence
  Synthetic
gaguuucacucuugcugcccagg

SEQ ID NO: 585114 - RNA, 24 nt, Artificial Sequence
  Synthetic
ggaguuucacucuugcugcccagg

SEQ ID NO: 585115 - RNA, 18 nt, Artificial Sequence
  Synthetic
uuuguuccauugcccagg

SEQ ID NO: 585116 - RNA, 19 nt, Artificial Sequence
  Synthetic
uuuuguuccauugcccagg

SEQ ID NO: 585117 - RNA, 20 nt, Artificial Sequence
  Synthetic
guuuuguuccauugcccagg

SEQ ID NO: 585118 - RNA, 21 nt, Artificial Sequence
  Synthetic
aguuuuguuccauugcccagg

SEQ ID NO: 585119 - RNA, 22 nt, Artificial Sequence
  Synthetic
gaguuuuguuccauugcccagg

SEQ ID NO: 585120 - RNA, 23 nt, Artificial Sequence
  Synthetic
ggaguuuuguuccauugcccagg

SEQ ID NO: 585121 - RNA, 24 nt, Artificial Sequence
  Synthetic
uggaguuuuguuccauugcccagg

SEQ ID NO: 585122 - RNA, 18 nt, Artificial Sequence
  Synthetic
cucacucgguugcccagg

SEQ ID NO: 585123 - RNA, 19 nt, Artificial Sequence
  Synthetic
ucucacucgguugcccagg

SEQ ID NO: 585124 - RNA, 20 nt, Artificial Sequence
  Synthetic
gucucacucgguugcccagg

SEQ ID NO: 585125 - RNA, 21 nt, Artificial Sequence
  Synthetic
agucucacucgguugcccagg

SEQ ID NO: 585126 - RNA, 22 nt, Artificial Sequence
  Synthetic
gagucucacucgguugcccagg

SEQ ID NO: 585127 - RNA, 23 nt, Artificial Sequence
  Synthetic
agagucucacucgguugcccagg

SEQ ID NO: 585128 - RNA, 24 nt, Artificial Sequence
  Synthetic
cagagucucacucgguugcccagg

SEQ ID NO: 585129 - RNA, 18 nt, Artificial Sequence
  Synthetic
aucuugcuguugcccagg

SEQ ID NO: 585130 - RNA, 19 nt, Artificial Sequence
  Synthetic
aaucuugcuguugcccagg

SEQ ID NO: 585131 - RNA, 20 nt, Artificial Sequence
  Synthetic
gaaucuugcuguugcccagg

SEQ ID NO: 585132 - RNA, 21 nt, Artificial Sequence
  Synthetic
ggaaucuugcuguugcccagg

SEQ ID NO: 585133 - RNA, 22 nt, Artificial Sequence
  Synthetic
uggaaucuugcuguugcccagg

SEQ ID NO: 585134 - RNA, 23 nt, Artificial Sequence
  Synthetic
auggaaucuugcuguugcccagg

SEQ ID NO: 585135 - RNA, 24 nt, Artificial Sequence
  Synthetic
gauggaaucuugcuguugcccagg

SEQ ID NO: 585136 - RNA, 21 nt, Artificial Sequence
  Synthetic
ggucucacucuguugcccagg

SEQ ID NO: 585137 - RNA, 22 nt, Artificial Sequence
  Synthetic
gggucucacucuguugcccagg

SEQ ID NO: 585138 - RNA, 23 nt, Artificial Sequence
  Synthetic
agggucucacucuguugcccagg

SEQ ID NO: 585139 - RNA, 24 nt, Artificial Sequence
  Synthetic
cagggucucacucuguugcccagg

SEQ ID NO: 585140 - RNA, 18 nt, Artificial Sequence
  Synthetic
cucgcucuguugcccagg

SEQ ID NO: 585141 - RNA, 19 nt, Artificial Sequence
  Synthetic
ucucgcucuguugcccagg

SEQ ID NO: 585142 - RNA, 20 nt, Artificial Sequence
  Synthetic
gucucgcucuguugcccagg

SEQ ID NO: 585143 - RNA, 21 nt, Artificial Sequence
  Synthetic
agucucgcucuguugcccagg

SEQ ID NO: 585144 - RNA, 22 nt, Artificial Sequence
  Synthetic
gagucucgcucuguugcccagg

SEQ ID NO: 585145 - RNA, 23 nt, Artificial Sequence
  Synthetic
ggagucucgcucuguugcccagg

SEQ ID NO: 585146 - RNA, 24 nt, Artificial Sequence
  Synthetic
cggagucucgcucuguugcccagg

SEQ ID NO: 585147 - RNA, 24 nt, Artificial Sequence
  Synthetic
uggagucucgcucuguugcccagg

SEQ ID NO: 585148 - RNA, 21 nt, Artificial Sequence
  Synthetic
agucuugcucuguugcccagg

SEQ ID NO: 585149 - RNA, 22 nt, Artificial Sequence
  Synthetic
gagucuugcucuguugcccagg

SEQ ID NO: 585150 - RNA, 23 nt, Artificial Sequence
  Synthetic
agagucuugcucuguugcccagg

SEQ ID NO: 585151 - RNA, 24 nt, Artificial Sequence
  Synthetic
cagagucuugcucuguugcccagg

SEQ ID NO: 585152 - RNA, 23 nt, Artificial Sequence
  Synthetic
ggagucuugcucuguugcccagg

SEQ ID NO: 585153 - RNA, 24 nt, Artificial Sequence
  Synthetic
cggagucuugcucuguugcccagg

SEQ ID NO: 585154 - RNA, 21 nt, Artificial Sequence
  Synthetic
guuucacucuuguugcccagg

SEQ ID NO: 585155 - RNA, 22 nt, Artificial Sequence
  Synthetic
aguuucacucuuguugcccagg

SEQ ID NO: 585156 - RNA, 23 nt, Artificial Sequence
  Synthetic
gaguuucacucuuguugcccagg

SEQ ID NO: 585157 - RNA, 24 nt, Artificial Sequence
  Synthetic
ggaguuucacucuuguugcccagg

SEQ ID NO: 585158 - RNA, 24 nt, Artificial Sequence
  Synthetic
ggaguuuugcucuuguugcccagg

SEQ ID NO: 585159 - RNA, 18 nt, Artificial Sequence
  Synthetic
gagagaguaaaagccagg

SEQ ID NO: 585160 - RNA, 19 nt, Artificial Sequence
  Synthetic
agagagaguaaaagccagg

SEQ ID NO: 585161 - RNA, 20 nt, Artificial Sequence
  Synthetic
uagagagaguaaaagccagg

SEQ ID NO: 585162 - RNA, 21 nt, Artificial Sequence
  Synthetic
uuagagagaguaaaagccagg

SEQ ID NO: 585163 - RNA, 22 nt, Artificial Sequence
  Synthetic
uuuagagagaguaaaagccagg

SEQ ID NO: 585164 - RNA, 23 nt, Artificial Sequence
  Synthetic
uuuuagagagaguaaaagccagg

SEQ ID NO: 585165 - RNA, 24 nt, Artificial Sequence
  Synthetic
uuuuuagagagaguaaaagccagg

SEQ ID NO: 585166 - RNA, 18 nt, Artificial Sequence
  Synthetic
ccugugaaagcagccagg

SEQ ID NO: 585167 - RNA, 19 nt, Artificial Sequence
  Synthetic
gccugugaaagcagccagg

SEQ ID NO: 585168 - RNA, 20 nt, Artificial Sequence
  Synthetic
agccugugaaagcagccagg

SEQ ID NO: 585169 - RNA, 21 nt, Artificial Sequence
  Synthetic
uagccugugaaagcagccagg

SEQ ID NO: 585170 - RNA, 22 nt, Artificial Sequence
  Synthetic
cuagccugugaaagcagccagg

SEQ ID NO: 585171 - RNA, 23 nt, Artificial Sequence
  Synthetic
gcuagccugugaaagcagccagg

SEQ ID NO: 585172 - RNA, 24 nt, Artificial Sequence
  Synthetic
ugcuagccugugaaagcagccagg

SEQ ID NO: 585173 - RNA, 18 nt, Artificial Sequence
  Synthetic
uuaggaaaaagagccagg

SEQ ID NO: 585174 - RNA, 19 nt, Artificial Sequence
  Synthetic
auuaggaaaaagagccagg

SEQ ID NO: 585175 - RNA, 20 nt, Artificial Sequence
  Synthetic
gauuaggaaaaagagccagg

SEQ ID NO: 585176 - RNA, 21 nt, Artificial Sequence
  Synthetic
ugauuaggaaaaagagccagg

SEQ ID NO: 585177 - RNA, 22 nt, Artificial Sequence
  Synthetic
augauuaggaaaaagagccagg

SEQ ID NO: 585178 - RNA, 23 nt, Artificial Sequence
  Synthetic
aaugauuaggaaaaagagccagg

SEQ ID NO: 585179 - RNA, 24 nt, Artificial Sequence
  Synthetic
uaaugauuaggaaaaagagccagg

SEQ ID NO: 585180 - RNA, 18 nt, Artificial Sequence
  Synthetic
auaaaucagggagccagg

SEQ ID NO: 585181 - RNA, 19 nt, Artificial Sequence
  Synthetic
aauaaaucagggagccagg

SEQ ID NO: 585182 - RNA, 20 nt, Artificial Sequence
  Synthetic
aaauaaaucagggagccagg

SEQ ID NO: 585183 - RNA, 21 nt, Artificial Sequence
  Synthetic
uaaauaaaucagggagccagg

SEQ ID NO: 585184 - RNA, 22 nt, Artificial Sequence
  Synthetic
uuaaauaaaucagggagccagg

SEQ ID NO: 585185 - RNA, 23 nt, Artificial Sequence
  Synthetic
auuaaauaaaucagggagccagg

SEQ ID NO: 585186 - RNA, 24 nt, Artificial Sequence
  Synthetic
uauuaaauaaaucagggagccagg

SEQ ID NO: 585187 - RNA, 18 nt, Artificial Sequence
  Synthetic
uacagauagauagccagg

SEQ ID NO: 585188 - RNA, 19 nt, Artificial Sequence
  Synthetic
auacagauagauagccagg

SEQ ID NO: 585189 - RNA, 20 nt, Artificial Sequence
  Synthetic
aauacagauagauagccagg

SEQ ID NO: 585190 - RNA, 21 nt, Artificial Sequence
  Synthetic
aaauacagauagauagccagg

SEQ ID NO: 585191 - RNA, 22 nt, Artificial Sequence
  Synthetic
aaaauacagauagauagccagg

SEQ ID NO: 585192 - RNA, 23 nt, Artificial Sequence
  Synthetic
aaaaauacagauagauagccagg

SEQ ID NO: 585193 - RNA, 24 nt, Artificial Sequence
  Synthetic
gaaaaauacagauagauagccagg

SEQ ID NO: 585194 - RNA, 18 nt, Artificial Sequence
  Synthetic
ggccauucaagcgccagg

SEQ ID NO: 585195 - RNA, 19 nt, Artificial Sequence
  Synthetic
gggccauucaagcgccagg

SEQ ID NO: 585196 - RNA, 20 nt, Artificial Sequence
  Synthetic
ggggccauucaagcgccagg

SEQ ID NO: 585197 - RNA, 21 nt, Artificial Sequence
  Synthetic
aggggccauucaagcgccagg

SEQ ID NO: 585198 - RNA, 22 nt, Artificial Sequence
  Synthetic
aaggggccauucaagcgccagg

SEQ ID NO: 585199 - RNA, 23 nt, Artificial Sequence
  Synthetic
gaaggggccauucaagcgccagg

SEQ ID NO: 585200 - RNA, 24 nt, Artificial Sequence
  Synthetic
agaaggggccauucaagcgccagg

SEQ ID NO: 585201 - RNA, 18 nt, Artificial Sequence
  Synthetic
ucucacucugucgccagg

SEQ ID NO: 585202 - RNA, 19 nt, Artificial Sequence
  Synthetic
gucucacucugucgccagg

SEQ ID NO: 585203 - RNA, 20 nt, Artificial Sequence
  Synthetic
agucucacucugucgccagg

SEQ ID NO: 585204 - RNA, 21 nt, Artificial Sequence
  Synthetic
gagucucacucugucgccagg

SEQ ID NO: 585205 - RNA, 22 nt, Artificial Sequence
  Synthetic
agagucucacucugucgccagg

SEQ ID NO: 585206 - RNA, 23 nt, Artificial Sequence
  Synthetic
cagagucucacucugucgccagg

SEQ ID NO: 585207 - RNA, 24 nt, Artificial Sequence
  Synthetic
acagagucucacucugucgccagg

SEQ ID NO: 585208 - RNA, 18 nt, Artificial Sequence
  Synthetic
ucuugcucugucgccagg

SEQ ID NO: 585209 - RNA, 19 nt, Artificial Sequence
  Synthetic
gucuugcucugucgccagg

SEQ ID NO: 585210 - RNA, 20 nt, Artificial Sequence
  Synthetic
agucuugcucugucgccagg

SEQ ID NO: 585211 - RNA, 21 nt, Artificial Sequence
  Synthetic
gagucuugcucugucgccagg

SEQ ID NO: 585212 - RNA, 22 nt, Artificial Sequence
  Synthetic
agagucuugcucugucgccagg

SEQ ID NO: 585213 - RNA, 23 nt, Artificial Sequence
  Synthetic
uagagucuugcucugucgccagg

SEQ ID NO: 585214 - RNA, 24 nt, Artificial Sequence
  Synthetic
auagagucuugcucugucgccagg

SEQ ID NO: 585215 - RNA, 18 nt, Artificial Sequence
  Synthetic
gguccuuggaaggccagg

SEQ ID NO: 585216 - RNA, 19 nt, Artificial Sequence
  Synthetic
agguccuuggaaggccagg

SEQ ID NO: 585217 - RNA, 20 nt, Artificial Sequence
  Synthetic
gagguccuuggaaggccagg

SEQ ID NO: 585218 - RNA, 21 nt, Artificial Sequence
  Synthetic
ugagguccuuggaaggccagg

SEQ ID NO: 585219 - RNA, 22 nt, Artificial Sequence
  Synthetic
uugagguccuuggaaggccagg

SEQ ID NO: 585220 - RNA, 23 nt, Artificial Sequence
  Synthetic
cuugagguccuuggaaggccagg

SEQ ID NO: 585221 - RNA, 24 nt, Artificial Sequence
  Synthetic
ucuugagguccuuggaaggccagg

SEQ ID NO: 585222 - RNA, 18 nt, Artificial Sequence
  Synthetic
cagagauaaaaugccagg

SEQ ID NO: 585223 - RNA, 19 nt, Artificial Sequence
  Synthetic
ucagagauaaaaugccagg

SEQ ID NO: 585224 - RNA, 20 nt, Artificial Sequence
  Synthetic
cucagagauaaaaugccagg

SEQ ID NO: 585225 - RNA, 21 nt, Artificial Sequence
  Synthetic
ucucagagauaaaaugccagg

SEQ ID NO: 585226 - RNA, 22 nt, Artificial Sequence
  Synthetic
gucucagagauaaaaugccagg

SEQ ID NO: 585227 - RNA, 23 nt, Artificial Sequence
  Synthetic
ggucucagagauaaaaugccagg

SEQ ID NO: 585228 - RNA, 24 nt, Artificial Sequence
  Synthetic
uggucucagagauaaaaugccagg

SEQ ID NO: 585229 - RNA, 18 nt, Artificial Sequence
  Synthetic
aagaaagaagaugccagg

SEQ ID NO: 585230 - RNA, 19 nt, Artificial Sequence
  Synthetic
gaagaaagaagaugccagg

SEQ ID NO: 585231 - RNA, 20 nt, Artificial Sequence
  Synthetic
ggaagaaagaagaugccagg

SEQ ID NO: 585232 - RNA, 21 nt, Artificial Sequence
  Synthetic
uggaagaaagaagaugccagg

SEQ ID NO: 585233 - RNA, 22 nt, Artificial Sequence
  Synthetic
cuggaagaaagaagaugccagg

SEQ ID NO: 585234 - RNA, 23 nt, Artificial Sequence
  Synthetic
ucuggaagaaagaagaugccagg

SEQ ID NO: 585235 - RNA, 24 nt, Artificial Sequence
  Synthetic
gucuggaagaaagaagaugccagg

SEQ ID NO: 585236 - RNA, 18 nt, Artificial Sequence
  Synthetic
uguugcucuguugccagg

SEQ ID NO: 585237 - RNA, 19 nt, Artificial Sequence
  Synthetic
guguugcucuguugccagg

SEQ ID NO: 585238 - RNA, 20 nt, Artificial Sequence
  Synthetic
aguguugcucuguugccagg

SEQ ID NO: 585239 - RNA, 21 nt, Artificial Sequence
  Synthetic
gaguguugcucuguugccagg

SEQ ID NO: 585240 - RNA, 22 nt, Artificial Sequence
  Synthetic
agaguguugcucuguugccagg

SEQ ID NO: 585241 - RNA, 23 nt, Artificial Sequence
  Synthetic
cagaguguugcucuguugccagg

SEQ ID NO: 585242 - RNA, 24 nt, Artificial Sequence
  Synthetic
acagaguguugcucuguugccagg

SEQ ID NO: 585243 - RNA, 18 nt, Artificial Sequence
  Synthetic
cucacucugucauccagg

SEQ ID NO: 585244 - RNA, 19 nt, Artificial Sequence
  Synthetic
ucucacucugucauccagg

SEQ ID NO: 585245 - RNA, 20 nt, Artificial Sequence
  Synthetic
gucucacucugucauccagg

SEQ ID NO: 585246 - RNA, 21 nt, Artificial Sequence
  Synthetic
ggucucacucugucauccagg

SEQ ID NO: 585247 - RNA, 22 nt, Artificial Sequence
  Synthetic
gggucucacucugucauccagg

SEQ ID NO: 585248 - RNA, 23 nt, Artificial Sequence
  Synthetic
agggucucacucugucauccagg

SEQ ID NO: 585249 - RNA, 24 nt, Artificial Sequence
  Synthetic
uagggucucacucugucauccagg

SEQ ID NO: 585250 - RNA, 18 nt, Artificial Sequence
  Synthetic
cucccucugucauccagg

SEQ ID NO: 585251 - RNA, 19 nt, Artificial Sequence
  Synthetic
ucucccucugucauccagg

SEQ ID NO: 585252 - RNA, 20 nt, Artificial Sequence
  Synthetic
gucucccucugucauccagg

SEQ ID NO: 585253 - RNA, 21 nt, Artificial Sequence
  Synthetic
agucucccucugucauccagg

SEQ ID NO: 585254 - RNA, 22 nt, Artificial Sequence
  Synthetic
gagucucccucugucauccagg

SEQ ID NO: 585255 - RNA, 23 nt, Artificial Sequence
  Synthetic
ggagucucccucugucauccagg

SEQ ID NO: 585256 - RNA, 24 nt, Artificial Sequence
  Synthetic
gggagucucccucugucauccagg

SEQ ID NO: 585257 - RNA, 18 nt, Artificial Sequence
  Synthetic
cauugccacagauccagg

SEQ ID NO: 585258 - RNA, 19 nt, Artificial Sequence
  Synthetic
acauugccacagauccagg

SEQ ID NO: 585259 - RNA, 20 nt, Artificial Sequence
  Synthetic
cacauugccacagauccagg

SEQ ID NO: 585260 - RNA, 21 nt, Artificial Sequence
  Synthetic
ucacauugccacagauccagg

SEQ ID NO: 585261 - RNA, 22 nt, Artificial Sequence
  Synthetic
cucacauugccacagauccagg

SEQ ID NO: 585262 - RNA, 23 nt, Artificial Sequence
  Synthetic
ccucacauugccacagauccagg

SEQ ID NO: 585263 - RNA, 24 nt, Artificial Sequence
  Synthetic
cccucacauugccacagauccagg

SEQ ID NO: 585264 - RNA, 18 nt, Artificial Sequence
  Synthetic
aaugucuagauauccagg

SEQ ID NO: 585265 - RNA, 19 nt, Artificial Sequence
  Synthetic
aaaugucuagauauccagg

SEQ ID NO: 585266 - RNA, 20 nt, Artificial Sequence
  Synthetic
gaaaugucuagauauccagg

SEQ ID NO: 585267 - RNA, 21 nt, Artificial Sequence
  Synthetic
ggaaaugucuagauauccagg

SEQ ID NO: 585268 - RNA, 22 nt, Artificial Sequence
  Synthetic
uggaaaugucuagauauccagg

SEQ ID NO: 585269 - RNA, 23 nt, Artificial Sequence
  Synthetic
auggaaaugucuagauauccagg

SEQ ID NO: 585270 - RNA, 24 nt, Artificial Sequence
  Synthetic
uauggaaaugucuagauauccagg

SEQ ID NO: 585271 - RNA, 18 nt, Artificial Sequence
  Synthetic
acaaccuaugccuccagg

SEQ ID NO: 585272 - RNA, 19 nt, Artificial Sequence
  Synthetic
cacaaccuaugccuccagg

SEQ ID NO: 585273 - RNA, 20 nt, Artificial Sequence
  Synthetic
ccacaaccuaugccuccagg

SEQ ID NO: 585274 - RNA, 21 nt, Artificial Sequence
  Synthetic
accacaaccuaugccuccagg

SEQ ID NO: 585275 - RNA, 22 nt, Artificial Sequence
  Synthetic
caccacaaccuaugccuccagg

SEQ ID NO: 585276 - RNA, 23 nt, Artificial Sequence
  Synthetic
ucaccacaaccuaugccuccagg

SEQ ID NO: 585277 - RNA, 24 nt, Artificial Sequence
  Synthetic
cucaccacaaccuaugccuccagg

SEQ ID NO: 585278 - RNA, 18 nt, Artificial Sequence
  Synthetic
cgaacacugaaguccagg

SEQ ID NO: 585279 - RNA, 19 nt, Artificial Sequence
  Synthetic
acgaacacugaaguccagg

SEQ ID NO: 585280 - RNA, 20 nt, Artificial Sequence
  Synthetic
uacgaacacugaaguccagg

SEQ ID NO: 585281 - RNA, 21 nt, Artificial Sequence
  Synthetic
auacgaacacugaaguccagg

SEQ ID NO: 585282 - RNA, 22 nt, Artificial Sequence
  Synthetic
gauacgaacacugaaguccagg

SEQ ID NO: 585283 - RNA, 23 nt, Artificial Sequence
  Synthetic
ugauacgaacacugaaguccagg

SEQ ID NO: 585284 - RNA, 24 nt, Artificial Sequence
  Synthetic
gugauacgaacacugaaguccagg

SEQ ID NO: 585285 - RNA, 18 nt, Artificial Sequence
  Synthetic
aacuccuggauguccagg

SEQ ID NO: 585286 - RNA, 19 nt, Artificial Sequence
  Synthetic
aaacuccuggauguccagg

SEQ ID NO: 585287 - RNA, 20 nt, Artificial Sequence
  Synthetic
gaaacuccuggauguccagg

SEQ ID NO: 585288 - RNA, 21 nt, Artificial Sequence
  Synthetic
ggaaacuccuggauguccagg

SEQ ID NO: 585289 - RNA, 22 nt, Artificial Sequence
  Synthetic
uggaaacuccuggauguccagg

SEQ ID NO: 585290 - RNA, 23 nt, Artificial Sequence
  Synthetic
auggaaacuccuggauguccagg

SEQ ID NO: 585291 - RNA, 24 nt, Artificial Sequence
  Synthetic
uauggaaacuccuggauguccagg

SEQ ID NO: 585292 - RNA, 18 nt, Artificial Sequence
  Synthetic
aaacucaucuauuccagg

SEQ ID NO: 585293 - RNA, 19 nt, Artificial Sequence
  Synthetic
aaaacucaucuauuccagg

SEQ ID NO: 585294 - RNA, 20 nt, Artificial Sequence
  Synthetic
uaaaacucaucuauuccagg

SEQ ID NO: 585295 - RNA, 21 nt, Artificial Sequence
  Synthetic
uuaaaacucaucuauuccagg

SEQ ID NO: 585296 - RNA, 22 nt, Artificial Sequence
  Synthetic
uuuaaaacucaucuauuccagg

SEQ ID NO: 585297 - RNA, 23 nt, Artificial Sequence
  Synthetic
uuuuaaaacucaucuauuccagg

SEQ ID NO: 585298 - RNA, 24 nt, Artificial Sequence
  Synthetic
cuuuuaaaacucaucuauuccagg

SEQ ID NO: 585299 - RNA, 18 nt, Artificial Sequence
  Synthetic
cuacuggucacuuccagg

SEQ ID NO: 585300 - RNA, 19 nt, Artificial Sequence
  Synthetic
ucuacuggucacuuccagg

SEQ ID NO: 585301 - RNA, 20 nt, Artificial Sequence
  Synthetic
gucuacuggucacuuccagg

SEQ ID NO: 585302 - RNA, 21 nt, Artificial Sequence
  Synthetic
ugucuacuggucacuuccagg

SEQ ID NO: 585303 - RNA, 22 nt, Artificial Sequence
  Synthetic
uugucuacuggucacuuccagg

SEQ ID NO: 585304 - RNA, 23 nt, Artificial Sequence
  Synthetic
uuugucuacuggucacuuccagg

SEQ ID NO: 585305 - RNA, 24 nt, Artificial Sequence
  Synthetic
uuuugucuacuggucacuuccagg

SEQ ID NO: 585306 - RNA, 18 nt, Artificial Sequence
  Synthetic
guacgccagaguuccagg

SEQ ID NO: 585307 - RNA, 19 nt, Artificial Sequence
  Synthetic
aguacgccagaguuccagg

SEQ ID NO: 585308 - RNA, 20 nt, Artificial Sequence
  Synthetic
gaguacgccagaguuccagg

SEQ ID NO: 585309 - RNA, 21 nt, Artificial Sequence
  Synthetic
agaguacgccagaguuccagg

SEQ ID NO: 585310 - RNA, 22 nt, Artificial Sequence
  Synthetic
cagaguacgccagaguuccagg

SEQ ID NO: 585311 - RNA, 23 nt, Artificial Sequence
  Synthetic
acagaguacgccagaguuccagg

SEQ ID NO: 585312 - RNA, 24 nt, Artificial Sequence
  Synthetic
cacagaguacgccagaguuccagg

SEQ ID NO: 585313 - RNA, 18 nt, Artificial Sequence
  Synthetic
ucuuaaauguguuccagg

SEQ ID NO: 585314 - RNA, 19 nt, Artificial Sequence
  Synthetic
uucuuaaauguguuccagg

SEQ ID NO: 585315 - RNA, 20 nt, Artificial Sequence
  Synthetic
uuucuuaaauguguuccagg

SEQ ID NO: 585316 - RNA, 21 nt, Artificial Sequence
  Synthetic
uuuucuuaaauguguuccagg

SEQ ID NO: 585317 - RNA, 22 nt, Artificial Sequence
  Synthetic
cuuuucuuaaauguguuccagg

SEQ ID NO: 585318 - RNA, 23 nt, Artificial Sequence
  Synthetic
ucuuuucuuaaauguguuccagg

SEQ ID NO: 585319 - RNA, 24 nt, Artificial Sequence
  Synthetic
aucuuuucuuaaauguguuccagg

SEQ ID NO: 585320 - RNA, 18 nt, Artificial Sequence
  Synthetic
guagacaaacaaagcagg

SEQ ID NO: 585321 - RNA, 19 nt, Artificial Sequence
  Synthetic
uguagacaaacaaagcagg

SEQ ID NO: 585322 - RNA, 20 nt, Artificial Sequence
  Synthetic
auguagacaaacaaagcagg

SEQ ID NO: 585323 - RNA, 21 nt, Artificial Sequence
  Synthetic
cauguagacaaacaaagcagg

SEQ ID NO: 585324 - RNA, 22 nt, Artificial Sequence
  Synthetic
acauguagacaaacaaagcagg

SEQ ID NO: 585325 - RNA, 23 nt, Artificial Sequence
  Synthetic
aacauguagacaaacaaagcagg

SEQ ID NO: 585326 - RNA, 24 nt, Artificial Sequence
  Synthetic
aaacauguagacaaacaaagcagg

SEQ ID NO: 585327 - RNA, 18 nt, Artificial Sequence
  Synthetic
aauggaaaggaaagcagg

SEQ ID NO: 585328 - RNA, 19 nt, Artificial Sequence
  Synthetic
aaauggaaaggaaagcagg

SEQ ID NO: 585329 - RNA, 20 nt, Artificial Sequence
  Synthetic
caaauggaaaggaaagcagg

SEQ ID NO: 585330 - RNA, 21 nt, Artificial Sequence
  Synthetic
acaaauggaaaggaaagcagg

SEQ ID NO: 585331 - RNA, 22 nt, Artificial Sequence
  Synthetic
uacaaauggaaaggaaagcagg

SEQ ID NO: 585332 - RNA, 23 nt, Artificial Sequence
  Synthetic
uuacaaauggaaaggaaagcagg

SEQ ID NO: 585333 - RNA, 24 nt, Artificial Sequence
  Synthetic
auuacaaauggaaaggaaagcagg

SEQ ID NO: 585334 - RNA, 18 nt, Artificial Sequence
  Synthetic
ugccagagaucaagcagg

SEQ ID NO: 585335 - RNA, 19 nt, Artificial Sequence
  Synthetic
augccagagaucaagcagg

SEQ ID NO: 585336 - RNA, 20 nt, Artificial Sequence
  Synthetic
uaugccagagaucaagcagg

SEQ ID NO: 585337 - RNA, 21 nt, Artificial Sequence
  Synthetic
auaugccagagaucaagcagg

SEQ ID NO: 585338 - RNA, 22 nt, Artificial Sequence
  Synthetic
uauaugccagagaucaagcagg

SEQ ID NO: 585339 - RNA, 23 nt, Artificial Sequence
  Synthetic
uuauaugccagagaucaagcagg

SEQ ID NO: 585340 - RNA, 24 nt, Artificial Sequence
  Synthetic
auuauaugccagagaucaagcagg

SEQ ID NO: 585341 - RNA, 18 nt, Artificial Sequence
  Synthetic
cgaaauagcagaagcagg

SEQ ID NO: 585342 - RNA, 19 nt, Artificial Sequence
  Synthetic
gcgaaauagcagaagcagg

SEQ ID NO: 585343 - RNA, 20 nt, Artificial Sequence
  Synthetic
ggcgaaauagcagaagcagg

SEQ ID NO: 585344 - RNA, 21 nt, Artificial Sequence
  Synthetic
cggcgaaauagcagaagcagg

SEQ ID NO: 585345 - RNA, 22 nt, Artificial Sequence
  Synthetic
ccggcgaaauagcagaagcagg

SEQ ID NO: 585346 - RNA, 23 nt, Artificial Sequence
  Synthetic
accggcgaaauagcagaagcagg

SEQ ID NO: 585347 - RNA, 24 nt, Artificial Sequence
  Synthetic
caccggcgaaauagcagaagcagg

SEQ ID NO: 585348 - RNA, 18 nt, Artificial Sequence
  Synthetic
agagaguugggaagcagg

SEQ ID NO: 585349 - RNA, 19 nt, Artificial Sequence
  Synthetic
cagagaguugggaagcagg

SEQ ID NO: 585350 - RNA, 20 nt, Artificial Sequence
  Synthetic
gcagagaguugggaagcagg

SEQ ID NO: 585351 - RNA, 21 nt, Artificial Sequence
  Synthetic
ugcagagaguugggaagcagg

SEQ ID NO: 585352 - RNA, 22 nt, Artificial Sequence
  Synthetic
gugcagagaguugggaagcagg

SEQ ID NO: 585353 - RNA, 23 nt, Artificial Sequence
  Synthetic
ugugcagagaguugggaagcagg

SEQ ID NO: 585354 - RNA, 24 nt, Artificial Sequence
  Synthetic
augugcagagaguugggaagcagg

SEQ ID NO: 585355 - RNA, 18 nt, Artificial Sequence
  Synthetic
agugcccagugaagcagg

SEQ ID NO: 585356 - RNA, 19 nt, Artificial Sequence
  Synthetic
aagugcccagugaagcagg

SEQ ID NO: 585357 - RNA, 20 nt, Artificial Sequence
  Synthetic
gaagugcccagugaagcagg

SEQ ID NO: 585358 - RNA, 21 nt, Artificial Sequence
  Synthetic
agaagugcccagugaagcagg

SEQ ID NO: 585359 - RNA, 22 nt, Artificial Sequence
  Synthetic
aagaagugcccagugaagcagg

SEQ ID NO: 585360 - RNA, 23 nt, Artificial Sequence
  Synthetic
gaagaagugcccagugaagcagg

SEQ ID NO: 585361 - RNA, 24 nt, Artificial Sequence
  Synthetic
ggaagaagugcccagugaagcagg

SEQ ID NO: 585362 - RNA, 18 nt, Artificial Sequence
  Synthetic
guccuacaggacagcagg

SEQ ID NO: 585363 - RNA, 19 nt, Artificial Sequence
  Synthetic
gguccuacaggacagcagg

SEQ ID NO: 585364 - RNA, 20 nt, Artificial Sequence
  Synthetic
agguccuacaggacagcagg

SEQ ID NO: 585365 - RNA, 21 nt, Artificial Sequence
  Synthetic
gagguccuacaggacagcagg

SEQ ID NO: 585366 - RNA, 22 nt, Artificial Sequence
  Synthetic
ggagguccuacaggacagcagg

SEQ ID NO: 585367 - RNA, 23 nt, Artificial Sequence
  Synthetic
uggagguccuacaggacagcagg

SEQ ID NO: 585368 - RNA, 24 nt, Artificial Sequence
  Synthetic
uuggagguccuacaggacagcagg

SEQ ID NO: 585369 - RNA, 18 nt, Artificial Sequence
  Synthetic
gagaaggcacccagcagg

SEQ ID NO: 585370 - RNA, 19 nt, Artificial Sequence
  Synthetic
agagaaggcacccagcagg

SEQ ID NO: 585371 - RNA, 20 nt, Artificial Sequence
  Synthetic
cagagaaggcacccagcagg

SEQ ID NO: 585372 - RNA, 21 nt, Artificial Sequence
  Synthetic
acagagaaggcacccagcagg

SEQ ID NO: 585373 - RNA, 22 nt, Artificial Sequence
  Synthetic
aacagagaaggcacccagcagg

SEQ ID NO: 585374 - RNA, 23 nt, Artificial Sequence
  Synthetic
caacagagaaggcacccagcagg

SEQ ID NO: 585375 - RNA, 24 nt, Artificial Sequence
  Synthetic
ccaacagagaaggcacccagcagg

SEQ ID NO: 585376 - RNA, 18 nt, Artificial Sequence
  Synthetic
agaacuugucccagcagg

SEQ ID NO: 585377 - RNA, 19 nt, Artificial Sequence
  Synthetic
aagaacuugucccagcagg

SEQ ID NO: 585378 - RNA, 20 nt, Artificial Sequence
  Synthetic
aaagaacuugucccagcagg

SEQ ID NO: 585379 - RNA, 21 nt, Artificial Sequence
  Synthetic
uaaagaacuugucccagcagg

SEQ ID NO: 585380 - RNA, 22 nt, Artificial Sequence
  Synthetic
auaaagaacuugucccagcagg

SEQ ID NO: 585381 - RNA, 23 nt, Artificial Sequence
  Synthetic
aauaaagaacuugucccagcagg

SEQ ID NO: 585382 - RNA, 24 nt, Artificial Sequence
  Synthetic
caauaaagaacuugucccagcagg

SEQ ID NO: 585383 - RNA, 18 nt, Artificial Sequence
  Synthetic
cucuucagagccagcagg

SEQ ID NO: 585384 - RNA, 19 nt, Artificial Sequence
  Synthetic
ucucuucagagccagcagg

SEQ ID NO: 585385 - RNA, 20 nt, Artificial Sequence
  Synthetic
cucucuucagagccagcagg

SEQ ID NO: 585386 - RNA, 21 nt, Artificial Sequence
  Synthetic
gcucucuucagagccagcagg

SEQ ID NO: 585387 - RNA, 22 nt, Artificial Sequence
  Synthetic
ugcucucuucagagccagcagg

SEQ ID NO: 585388 - RNA, 23 nt, Artificial Sequence
  Synthetic
cugcucucuucagagccagcagg

SEQ ID NO: 585389 - RNA, 24 nt, Artificial Sequence
  Synthetic
gcugcucucuucagagccagcagg

SEQ ID NO: 585390 - RNA, 18 nt, Artificial Sequence
  Synthetic
auaugcucucucagcagg

SEQ ID NO: 585391 - RNA, 19 nt, Artificial Sequence
  Synthetic
gauaugcucucucagcagg

SEQ ID NO: 585392 - RNA, 20 nt, Artificial Sequence
  Synthetic
ggauaugcucucucagcagg

SEQ ID NO: 585393 - RNA, 21 nt, Artificial Sequence
  Synthetic
gggauaugcucucucagcagg

SEQ ID NO: 585394 - RNA, 22 nt, Artificial Sequence
  Synthetic
agggauaugcucucucagcagg

SEQ ID NO: 585395 - RNA, 23 nt, Artificial Sequence
  Synthetic
aagggauaugcucucucagcagg

SEQ ID NO: 585396 - RNA, 24 nt, Artificial Sequence
  Synthetic
gaagggauaugcucucucagcagg

SEQ ID NO: 585397 - RNA, 18 nt, Artificial Sequence
  Synthetic
auuuuggagaggagcagg

SEQ ID NO: 585398 - RNA, 19 nt, Artificial Sequence
  Synthetic
cauuuuggagaggagcagg

SEQ ID NO: 585399 - RNA, 20 nt, Artificial Sequence
  Synthetic
ccauuuuggagaggagcagg

SEQ ID NO: 585400 - RNA, 21 nt, Artificial Sequence
  Synthetic
gccauuuuggagaggagcagg

SEQ ID NO: 585401 - RNA, 22 nt, Artificial Sequence
  Synthetic
ugccauuuuggagaggagcagg

SEQ ID NO: 585402 - RNA, 23 nt, Artificial Sequence
  Synthetic
cugccauuuuggagaggagcagg

SEQ ID NO: 585403 - RNA, 24 nt, Artificial Sequence
  Synthetic
gcugccauuuuggagaggagcagg

SEQ ID NO: 585404 - RNA, 18 nt, Artificial Sequence
  Synthetic
gcuuccacaacuagcagg

SEQ ID NO: 585405 - RNA, 19 nt, Artificial Sequence
  Synthetic
ugcuuccacaacuagcagg

SEQ ID NO: 585406 - RNA, 20 nt, Artificial Sequence
  Synthetic
augcuuccacaacuagcagg

SEQ ID NO: 585407 - RNA, 21 nt, Artificial Sequence
  Synthetic
aaugcuuccacaacuagcagg

SEQ ID NO: 585408 - RNA, 22 nt, Artificial Sequence
  Synthetic
aaaugcuuccacaacuagcagg

SEQ ID NO: 585409 - RNA, 23 nt, Artificial Sequence
  Synthetic
aaaaugcuuccacaacuagcagg

SEQ ID NO: 585410 - RNA, 24 nt, Artificial Sequence
  Synthetic
gaaaaugcuuccacaacuagcagg

SEQ ID NO: 585411 - RNA, 18 nt, Artificial Sequence
  Synthetic
ggguagagagguagcagg

SEQ ID NO: 585412 - RNA, 19 nt, Artificial Sequence
  Synthetic
cggguagagagguagcagg

SEQ ID NO: 585413 - RNA, 20 nt, Artificial Sequence
  Synthetic
acggguagagagguagcagg

SEQ ID NO: 585414 - RNA, 21 nt, Artificial Sequence
  Synthetic
uacggguagagagguagcagg

SEQ ID NO: 585415 - RNA, 22 nt, Artificial Sequence
  Synthetic
uuacggguagagagguagcagg

SEQ ID NO: 585416 - RNA, 23 nt, Artificial Sequence
  Synthetic
cuuacggguagagagguagcagg

SEQ ID NO: 585417 - RNA, 24 nt, Artificial Sequence
  Synthetic
acuuacggguagagagguagcagg

SEQ ID NO: 585418 - RNA, 18 nt, Artificial Sequence
  Synthetic
aaguugagaauuagcagg

SEQ ID NO: 585419 - RNA, 19 nt, Artificial Sequence
  Synthetic
caaguugagaauuagcagg

SEQ ID NO: 585420 - RNA, 20 nt, Artificial Sequence
  Synthetic
acaaguugagaauuagcagg

SEQ ID NO: 585421 - RNA, 21 nt, Artificial Sequence
  Synthetic
uacaaguugagaauuagcagg

SEQ ID NO: 585422 - RNA, 22 nt, Artificial Sequence
  Synthetic
uuacaaguugagaauuagcagg

SEQ ID NO: 585423 - RNA, 23 nt, Artificial Sequence
  Synthetic
auuacaaguugagaauuagcagg

SEQ ID NO: 585424 - RNA, 24 nt, Artificial Sequence
  Synthetic
uauuacaaguugagaauuagcagg

SEQ ID NO: 585425 - RNA, 18 nt, Artificial Sequence
  Synthetic
ugagaguggcuuagcagg

SEQ ID NO: 585426 - RNA, 19 nt, Artificial Sequence
  Synthetic
cugagaguggcuuagcagg

SEQ ID NO: 585427 - RNA, 20 nt, Artificial Sequence
  Synthetic
ucugagaguggcuuagcagg

SEQ ID NO: 585428 - RNA, 21 nt, Artificial Sequence
  Synthetic
aucugagaguggcuuagcagg

SEQ ID NO: 585429 - RNA, 22 nt, Artificial Sequence
  Synthetic
aaucugagaguggcuuagcagg

SEQ ID NO: 585430 - RNA, 23 nt, Artificial Sequence
  Synthetic
gaaucugagaguggcuuagcagg

SEQ ID NO: 585431 - RNA, 24 nt, Artificial Sequence
  Synthetic
agaaucugagaguggcuuagcagg

SEQ ID NO: 585432 - RNA, 18 nt, Artificial Sequence
  Synthetic
agaacaccuggacgcagg

SEQ ID NO: 585433 - RNA, 19 nt, Artificial Sequence
  Synthetic
gagaacaccuggacgcagg

SEQ ID NO: 585434 - RNA, 20 nt, Artificial Sequence
  Synthetic
ugagaacaccuggacgcagg

SEQ ID NO: 585435 - RNA, 21 nt, Artificial Sequence
  Synthetic
augagaacaccuggacgcagg

SEQ ID NO: 585436 - RNA, 22 nt, Artificial Sequence
  Synthetic
aaugagaacaccuggacgcagg

SEQ ID NO: 585437 - RNA, 23 nt, Artificial Sequence
  Synthetic
caaugagaacaccuggacgcagg

SEQ ID NO: 585438 - RNA, 24 nt, Artificial Sequence
  Synthetic
acaaugagaacaccuggacgcagg

SEQ ID NO: 585439 - RNA, 18 nt, Artificial Sequence
  Synthetic
acaaggcaggaaggcagg

SEQ ID NO: 585440 - RNA, 19 nt, Artificial Sequence
  Synthetic
gacaaggcaggaaggcagg

SEQ ID NO: 585441 - RNA, 20 nt, Artificial Sequence
  Synthetic
agacaaggcaggaaggcagg

SEQ ID NO: 585442 - RNA, 21 nt, Artificial Sequence
  Synthetic
aagacaaggcaggaaggcagg

SEQ ID NO: 585443 - RNA, 22 nt, Artificial Sequence
  Synthetic
caagacaaggcaggaaggcagg

SEQ ID NO: 585444 - RNA, 23 nt, Artificial Sequence
  Synthetic
gcaagacaaggcaggaaggcagg

SEQ ID NO: 585445 - RNA, 24 nt, Artificial Sequence
  Synthetic
ggcaagacaaggcaggaaggcagg

SEQ ID NO: 585446 - RNA, 18 nt, Artificial Sequence
  Synthetic
ccacaagagggaggcagg

SEQ ID NO: 585447 - RNA, 19 nt, Artificial Sequence
  Synthetic
cccacaagagggaggcagg

SEQ ID NO: 585448 - RNA, 20 nt, Artificial Sequence
  Synthetic
gcccacaagagggaggcagg

SEQ ID NO: 585449 - RNA, 21 nt, Artificial Sequence
  Synthetic
ggcccacaagagggaggcagg

SEQ ID NO: 585450 - RNA, 22 nt, Artificial Sequence
  Synthetic
aggcccacaagagggaggcagg

SEQ ID NO: 585451 - RNA, 23 nt, Artificial Sequence
  Synthetic
caggcccacaagagggaggcagg

SEQ ID NO: 585452 - RNA, 24 nt, Artificial Sequence
  Synthetic
ccaggcccacaagagggaggcagg

SEQ ID NO: 585453 - RNA, 18 nt, Artificial Sequence
  Synthetic
aucauccugggaggcagg

SEQ ID NO: 585454 - RNA, 19 nt, Artificial Sequence
  Synthetic
aaucauccugggaggcagg

SEQ ID NO: 585455 - RNA, 20 nt, Artificial Sequence
  Synthetic
gaaucauccugggaggcagg

SEQ ID NO: 585456 - RNA, 21 nt, Artificial Sequence
  Synthetic
agaaucauccugggaggcagg

SEQ ID NO: 585457 - RNA, 22 nt, Artificial Sequence
  Synthetic
uagaaucauccugggaggcagg

SEQ ID NO: 585458 - RNA, 23 nt, Artificial Sequence
  Synthetic
cuagaaucauccugggaggcagg

SEQ ID NO: 585459 - RNA, 24 nt, Artificial Sequence
  Synthetic
ccuagaaucauccugggaggcagg

SEQ ID NO: 585460 - RNA, 18 nt, Artificial Sequence
  Synthetic
uaaagaguaaugggcagg

SEQ ID NO: 585461 - RNA, 19 nt, Artificial Sequence
  Synthetic
uuaaagaguaaugggcagg

SEQ ID NO: 585462 - RNA, 20 nt, Artificial Sequence
  Synthetic
uuuaaagaguaaugggcagg

SEQ ID NO: 585463 - RNA, 21 nt, Artificial Sequence
  Synthetic
auuuaaagaguaaugggcagg

SEQ ID NO: 585464 - RNA, 22 nt, Artificial Sequence
  Synthetic
cauuuaaagaguaaugggcagg

SEQ ID NO: 585465 - RNA, 23 nt, Artificial Sequence
  Synthetic
ucauuuaaagaguaaugggcagg

SEQ ID NO: 585466 - RNA, 24 nt, Artificial Sequence
  Synthetic
uucauuuaaagaguaaugggcagg

SEQ ID NO: 585467 - RNA, 18 nt, Artificial Sequence
  Synthetic
uaccaagggaauggcagg

SEQ ID NO: 585468 - RNA, 19 nt, Artificial Sequence
  Synthetic
cuaccaagggaauggcagg

SEQ ID NO: 585469 - RNA, 20 nt, Artificial Sequence
  Synthetic
gcuaccaagggaauggcagg

SEQ ID NO: 585470 - RNA, 21 nt, Artificial Sequence
  Synthetic
agcuaccaagggaauggcagg

SEQ ID NO: 585471 - RNA, 22 nt, Artificial Sequence
  Synthetic
aagcuaccaagggaauggcagg

SEQ ID NO: 585472 - RNA, 23 nt, Artificial Sequence
  Synthetic
aaagcuaccaagggaauggcagg

SEQ ID NO: 585473 - RNA, 24 nt, Artificial Sequence
  Synthetic
aaaagcuaccaagggaauggcagg

SEQ ID NO: 585474 - RNA, 18 nt, Artificial Sequence
  Synthetic
ggggcaauuucuggcagg

SEQ ID NO: 585475 - RNA, 19 nt, Artificial Sequence
  Synthetic
uggggcaauuucuggcagg

SEQ ID NO: 585476 - RNA, 20 nt, Artificial Sequence
  Synthetic
guggggcaauuucuggcagg

SEQ ID NO: 585477 - RNA, 21 nt, Artificial Sequence
  Synthetic
aguggggcaauuucuggcagg

SEQ ID NO: 585478 - RNA, 22 nt, Artificial Sequence
  Synthetic
gaguggggcaauuucuggcagg

SEQ ID NO: 585479 - RNA, 23 nt, Artificial Sequence
  Synthetic
ugaguggggcaauuucuggcagg

SEQ ID NO: 585480 - RNA, 24 nt, Artificial Sequence
  Synthetic
uugaguggggcaauuucuggcagg

SEQ ID NO: 585481 - RNA, 18 nt, Artificial Sequence
  Synthetic
cuggagugcaguggcagg

SEQ ID NO: 585482 - RNA, 19 nt, Artificial Sequence
  Synthetic
gcuggagugcaguggcagg

SEQ ID NO: 585483 - RNA, 20 nt, Artificial Sequence
  Synthetic
ggcuggagugcaguggcagg

SEQ ID NO: 585484 - RNA, 21 nt, Artificial Sequence
  Synthetic
aggcuggagugcaguggcagg

SEQ ID NO: 585485 - RNA, 22 nt, Artificial Sequence
  Synthetic
caggcuggagugcaguggcagg

SEQ ID NO: 585486 - RNA, 23 nt, Artificial Sequence
  Synthetic
ccaggcuggagugcaguggcagg

SEQ ID NO: 585487 - RNA, 24 nt, Artificial Sequence
  Synthetic
cccaggcuggagugcaguggcagg

SEQ ID NO: 585488 - RNA, 18 nt, Artificial Sequence
  Synthetic
uucuucacagguggcagg

SEQ ID NO: 585489 - RNA, 19 nt, Artificial Sequence
  Synthetic
cuucuucacagguggcagg

SEQ ID NO: 585490 - RNA, 20 nt, Artificial Sequence
  Synthetic
ccuucuucacagguggcagg

SEQ ID NO: 585491 - RNA, 21 nt, Artificial Sequence
  Synthetic
accuucuucacagguggcagg

SEQ ID NO: 585492 - RNA, 22 nt, Artificial Sequence
  Synthetic
caccuucuucacagguggcagg

SEQ ID NO: 585493 - RNA, 23 nt, Artificial Sequence
  Synthetic
ccaccuucuucacagguggcagg

SEQ ID NO: 585494 - RNA, 24 nt, Artificial Sequence
  Synthetic
gccaccuucuucacagguggcagg

SEQ ID NO: 585495 - RNA, 18 nt, Artificial Sequence
  Synthetic
ucuucacaggguggcagg

SEQ ID NO: 585496 - RNA, 19 nt, Artificial Sequence
  Synthetic
cucuucacaggguggcagg

SEQ ID NO: 585497 - RNA, 20 nt, Artificial Sequence
  Synthetic
ccucuucacaggguggcagg

SEQ ID NO: 585498 - RNA, 21 nt, Artificial Sequence
  Synthetic
accucuucacaggguggcagg

SEQ ID NO: 585499 - RNA, 22 nt, Artificial Sequence
  Synthetic
caccucuucacaggguggcagg

SEQ ID NO: 585500 - RNA, 23 nt, Artificial Sequence
  Synthetic
gcaccucuucacaggguggcagg

SEQ ID NO: 585501 - RNA, 24 nt, Artificial Sequence
  Synthetic
ggcaccucuucacaggguggcagg

SEQ ID NO: 585502 - RNA, 18 nt, Artificial Sequence
  Synthetic
caaguuaagcaaugcagg

SEQ ID NO: 585503 - RNA, 19 nt, Artificial Sequence
  Synthetic
ucaaguuaagcaaugcagg

SEQ ID NO: 585504 - RNA, 20 nt, Artificial Sequence
  Synthetic
aucaaguuaagcaaugcagg

SEQ ID NO: 585505 - RNA, 21 nt, Artificial Sequence
  Synthetic
aaucaaguuaagcaaugcagg

SEQ ID NO: 585506 - RNA, 22 nt, Artificial Sequence
  Synthetic
caaucaaguuaagcaaugcagg

SEQ ID NO: 585507 - RNA, 23 nt, Artificial Sequence
  Synthetic
ucaaucaaguuaagcaaugcagg

SEQ ID NO: 585508 - RNA, 24 nt, Artificial Sequence
  Synthetic
gucaaucaaguuaagcaaugcagg

SEQ ID NO: 585509 - RNA, 18 nt, Artificial Sequence
  Synthetic
cugcugaaucaaugcagg

SEQ ID NO: 585510 - RNA, 19 nt, Artificial Sequence
  Synthetic
acugcugaaucaaugcagg

SEQ ID NO: 585511 - RNA, 20 nt, Artificial Sequence
  Synthetic
gacugcugaaucaaugcagg

SEQ ID NO: 585512 - RNA, 21 nt, Artificial Sequence
  Synthetic
agacugcugaaucaaugcagg

SEQ ID NO: 585513 - RNA, 22 nt, Artificial Sequence
  Synthetic
gagacugcugaaucaaugcagg

SEQ ID NO: 585514 - RNA, 23 nt, Artificial Sequence
  Synthetic
agagacugcugaaucaaugcagg

SEQ ID NO: 585515 - RNA, 24 nt, Artificial Sequence
  Synthetic
aagagacugcugaaucaaugcagg

SEQ ID NO: 585516 - RNA, 18 nt, Artificial Sequence
  Synthetic
uugcugaagacaugcagg

SEQ ID NO: 585517 - RNA, 19 nt, Artificial Sequence
  Synthetic
guugcugaagacaugcagg

SEQ ID NO: 585518 - RNA, 20 nt, Artificial Sequence
  Synthetic
aguugcugaagacaugcagg

SEQ ID NO: 585519 - RNA, 21 nt, Artificial Sequence
  Synthetic
caguugcugaagacaugcagg

SEQ ID NO: 585520 - RNA, 22 nt, Artificial Sequence
  Synthetic
acaguugcugaagacaugcagg

SEQ ID NO: 585521 - RNA, 23 nt, Artificial Sequence
  Synthetic
cacaguugcugaagacaugcagg

SEQ ID NO: 585522 - RNA, 24 nt, Artificial Sequence
  Synthetic
ccacaguugcugaagacaugcagg

SEQ ID NO: 585523 - RNA, 18 nt, Artificial Sequence
  Synthetic
cauagccugcgaugcagg

SEQ ID NO: 585524 - RNA, 19 nt, Artificial Sequence
  Synthetic
acauagccugcgaugcagg

SEQ ID NO: 585525 - RNA, 20 nt, Artificial Sequence
  Synthetic
gacauagccugcgaugcagg

SEQ ID NO: 585526 - RNA, 21 nt, Artificial Sequence
  Synthetic
agacauagccugcgaugcagg

SEQ ID NO: 585527 - RNA, 22 nt, Artificial Sequence
  Synthetic
cagacauagccugcgaugcagg

SEQ ID NO: 585528 - RNA, 23 nt, Artificial Sequence
  Synthetic
acagacauagccugcgaugcagg

SEQ ID NO: 585529 - RNA, 24 nt, Artificial Sequence
  Synthetic
gacagacauagccugcgaugcagg

SEQ ID NO: 585530 - RNA, 18 nt, Artificial Sequence
  Synthetic
uagccauugaacugcagg

SEQ ID NO: 585531 - RNA, 19 nt, Artificial Sequence
  Synthetic
uuagccauugaacugcagg

SEQ ID NO: 585532 - RNA, 20 nt, Artificial Sequence
  Synthetic
auuagccauugaacugcagg

SEQ ID NO: 585533 - RNA, 21 nt, Artificial Sequence
  Synthetic
uauuagccauugaacugcagg

SEQ ID NO: 585534 - RNA, 22 nt, Artificial Sequence
  Synthetic
auauuagccauugaacugcagg

SEQ ID NO: 585535 - RNA, 23 nt, Artificial Sequence
  Synthetic
aauauuagccauugaacugcagg

SEQ ID NO: 585536 - RNA, 24 nt, Artificial Sequence
  Synthetic
aaauauuagccauugaacugcagg

SEQ ID NO: 585537 - RNA, 18 nt, Artificial Sequence
  Synthetic
auaggaaaugccugcagg

SEQ ID NO: 585538 - RNA, 19 nt, Artificial Sequence
  Synthetic
aauaggaaaugccugcagg

SEQ ID NO: 585539 - RNA, 20 nt, Artificial Sequence
  Synthetic
gaauaggaaaugccugcagg

SEQ ID NO: 585540 - RNA, 21 nt, Artificial Sequence
  Synthetic
agaauaggaaaugccugcagg

SEQ ID NO: 585541 - RNA, 22 nt, Artificial Sequence
  Synthetic
uagaauaggaaaugccugcagg

SEQ ID NO: 585542 - RNA, 23 nt, Artificial Sequence
  Synthetic
auagaauaggaaaugccugcagg

SEQ ID NO: 585543 - RNA, 24 nt, Artificial Sequence
  Synthetic
cauagaauaggaaaugccugcagg

SEQ ID NO: 585544 - RNA, 18 nt, Artificial Sequence
  Synthetic
aaucagaauuucugcagg

SEQ ID NO: 585545 - RNA, 19 nt, Artificial Sequence
  Synthetic
aaaucagaauuucugcagg

SEQ ID NO: 585546 - RNA, 20 nt, Artificial Sequence
  Synthetic
caaaucagaauuucugcagg

SEQ ID NO: 585547 - RNA, 21 nt, Artificial Sequence
  Synthetic
ucaaaucagaauuucugcagg

SEQ ID NO: 585548 - RNA, 22 nt, Artificial Sequence
  Synthetic
aucaaaucagaauuucugcagg

SEQ ID NO: 585549 - RNA, 23 nt, Artificial Sequence
  Synthetic
aaucaaaucagaauuucugcagg

SEQ ID NO: 585550 - RNA, 24 nt, Artificial Sequence
  Synthetic
aaaucaaaucagaauuucugcagg

SEQ ID NO: 585551 - RNA, 18 nt, Artificial Sequence
  Synthetic
aguuccucacagugcagg

SEQ ID NO: 585552 - RNA, 19 nt, Artificial Sequence
  Synthetic
gaguuccucacagugcagg

SEQ ID NO: 585553 - RNA, 20 nt, Artificial Sequence
  Synthetic
agaguuccucacagugcagg

SEQ ID NO: 585554 - RNA, 21 nt, Artificial Sequence
  Synthetic
cagaguuccucacagugcagg

SEQ ID NO: 585555 - RNA, 22 nt, Artificial Sequence
  Synthetic
acagaguuccucacagugcagg

SEQ ID NO: 585556 - RNA, 23 nt, Artificial Sequence
  Synthetic
cacagaguuccucacagugcagg

SEQ ID NO: 585557 - RNA, 24 nt, Artificial Sequence
  Synthetic
gcacagaguuccucacagugcagg

SEQ ID NO: 585558 - RNA, 18 nt, Artificial Sequence
  Synthetic
uaaauagaaaaaaucagg

SEQ ID NO: 585559 - RNA, 19 nt, Artificial Sequence
  Synthetic
auaaauagaaaaaaucagg

SEQ ID NO: 585560 - RNA, 20 nt, Artificial Sequence
  Synthetic
uauaaauagaaaaaaucagg

SEQ ID NO: 585561 - RNA, 21 nt, Artificial Sequence
  Synthetic
guauaaauagaaaaaaucagg

SEQ ID NO: 585562 - RNA, 22 nt, Artificial Sequence
  Synthetic
uguauaaauagaaaaaaucagg

SEQ ID NO: 585563 - RNA, 23 nt, Artificial Sequence
  Synthetic
auguauaaauagaaaaaaucagg

SEQ ID NO: 585564 - RNA, 24 nt, Artificial Sequence
  Synthetic
aauguauaaauagaaaaaaucagg

SEQ ID NO: 585565 - RNA, 21 nt, Artificial Sequence
  Synthetic
guucuggccagggcaaucagg

SEQ ID NO: 585566 - RNA, 22 nt, Artificial Sequence
  Synthetic
aguucuggccagggcaaucagg

SEQ ID NO: 585567 - RNA, 23 nt, Artificial Sequence
  Synthetic
aaguucuggccagggcaaucagg

SEQ ID NO: 585568 - RNA, 24 nt, Artificial Sequence
  Synthetic
gaaguucuggccagggcaaucagg

SEQ ID NO: 585569 - RNA, 18 nt, Artificial Sequence
  Synthetic
ccagguucuaacaucagg

SEQ ID NO: 585570 - RNA, 19 nt, Artificial Sequence
  Synthetic
accagguucuaacaucagg

SEQ ID NO: 585571 - RNA, 20 nt, Artificial Sequence
  Synthetic
uaccagguucuaacaucagg

SEQ ID NO: 585572 - RNA, 21 nt, Artificial Sequence
  Synthetic
guaccagguucuaacaucagg

SEQ ID NO: 585573 - RNA, 22 nt, Artificial Sequence
  Synthetic
aguaccagguucuaacaucagg

SEQ ID NO: 585574 - RNA, 23 nt, Artificial Sequence
  Synthetic
aaguaccagguucuaacaucagg

SEQ ID NO: 585575 - RNA, 24 nt, Artificial Sequence
  Synthetic
aaaguaccagguucuaacaucagg

SEQ ID NO: 585576 - RNA, 18 nt, Artificial Sequence
  Synthetic
gugguuggcuacaucagg

SEQ ID NO: 585577 - RNA, 19 nt, Artificial Sequence
  Synthetic
cgugguuggcuacaucagg

SEQ ID NO: 585578 - RNA, 20 nt, Artificial Sequence
  Synthetic
ucgugguuggcuacaucagg

SEQ ID NO: 585579 - RNA, 21 nt, Artificial Sequence
  Synthetic
aucgugguuggcuacaucagg

SEQ ID NO: 585580 - RNA, 22 nt, Artificial Sequence
  Synthetic
aaucgugguuggcuacaucagg

SEQ ID NO: 585581 - RNA, 23 nt, Artificial Sequence
  Synthetic
gaaucgugguuggcuacaucagg

SEQ ID NO: 585582 - RNA, 24 nt, Artificial Sequence
  Synthetic
ugaaucgugguuggcuacaucagg

SEQ ID NO: 585583 - RNA, 18 nt, Artificial Sequence
  Synthetic
aauauuaaauagaucagg

SEQ ID NO: 585584 - RNA, 19 nt, Artificial Sequence
  Synthetic
uaauauuaaauagaucagg

SEQ ID NO: 585585 - RNA, 20 nt, Artificial Sequence
  Synthetic
auaauauuaaauagaucagg

SEQ ID NO: 585586 - RNA, 21 nt, Artificial Sequence
  Synthetic
aauaauauuaaauagaucagg

SEQ ID NO: 585587 - RNA, 22 nt, Artificial Sequence
  Synthetic
uaauaauauuaaauagaucagg

SEQ ID NO: 585588 - RNA, 23 nt, Artificial Sequence
  Synthetic
auaauaauauuaaauagaucagg

SEQ ID NO: 585589 - RNA, 24 nt, Artificial Sequence
  Synthetic
uauaauaauauuaaauagaucagg

SEQ ID NO: 585590 - RNA, 18 nt, Artificial Sequence
  Synthetic
cuggccagggcgaucagg

SEQ ID NO: 585591 - RNA, 19 nt, Artificial Sequence
  Synthetic
ucuggccagggcgaucagg

SEQ ID NO: 585592 - RNA, 20 nt, Artificial Sequence
  Synthetic
uucuggccagggcgaucagg

SEQ ID NO: 585593 - RNA, 21 nt, Artificial Sequence
  Synthetic
guucuggccagggcgaucagg

SEQ ID NO: 585594 - RNA, 22 nt, Artificial Sequence
  Synthetic
aguucuggccagggcgaucagg

SEQ ID NO: 585595 - RNA, 23 nt, Artificial Sequence
  Synthetic
aaguucuggccagggcgaucagg

SEQ ID NO: 585596 - RNA, 24 nt, Artificial Sequence
  Synthetic
gaaguucuggccagggcgaucagg

SEQ ID NO: 585597 - RNA, 18 nt, Artificial Sequence
  Synthetic
guccugggagggaucagg

SEQ ID NO: 585598 - RNA, 19 nt, Artificial Sequence
  Synthetic
cguccugggagggaucagg

SEQ ID NO: 585599 - RNA, 20 nt, Artificial Sequence
  Synthetic
acguccugggagggaucagg

SEQ ID NO: 585600 - RNA, 21 nt, Artificial Sequence
  Synthetic
cacguccugggagggaucagg

SEQ ID NO: 585601 - RNA, 22 nt, Artificial Sequence
  Synthetic
acacguccugggagggaucagg

SEQ ID NO: 585602 - RNA, 23 nt, Artificial Sequence
  Synthetic
cacacguccugggagggaucagg

SEQ ID NO: 585603 - RNA, 24 nt, Artificial Sequence
  Synthetic
ccacacguccugggagggaucagg

SEQ ID NO: 585604 - RNA, 18 nt, Artificial Sequence
  Synthetic
uagauucuuuugaucagg

SEQ ID NO: 585605 - RNA, 19 nt, Artificial Sequence
  Synthetic
uuagauucuuuugaucagg

SEQ ID NO: 585606 - RNA, 20 nt, Artificial Sequence
  Synthetic
auuagauucuuuugaucagg

SEQ ID NO: 585607 - RNA, 21 nt, Artificial Sequence
  Synthetic
uauuagauucuuuugaucagg

SEQ ID NO: 585608 - RNA, 22 nt, Artificial Sequence
  Synthetic
uuauuagauucuuuugaucagg

SEQ ID NO: 585609 - RNA, 23 nt, Artificial Sequence
  Synthetic
guuauuagauucuuuugaucagg

SEQ ID NO: 585610 - RNA, 24 nt, Artificial Sequence
  Synthetic
aguuauuagauucuuuugaucagg

SEQ ID NO: 585611 - RNA, 18 nt, Artificial Sequence
  Synthetic
caucauaccaauaucagg

SEQ ID NO: 585612 - RNA, 19 nt, Artificial Sequence
  Synthetic
gcaucauaccaauaucagg

SEQ ID NO: 585613 - RNA, 20 nt, Artificial Sequence
  Synthetic
ugcaucauaccaauaucagg

SEQ ID NO: 585614 - RNA, 21 nt, Artificial Sequence
  Synthetic
uugcaucauaccaauaucagg

SEQ ID NO: 585615 - RNA, 22 nt, Artificial Sequence
  Synthetic
uuugcaucauaccaauaucagg

SEQ ID NO: 585616 - RNA, 23 nt, Artificial Sequence
  Synthetic
auuugcaucauaccaauaucagg

SEQ ID NO: 585617 - RNA, 24 nt, Artificial Sequence
  Synthetic
aauuugcaucauaccaauaucagg

SEQ ID NO: 585618 - RNA, 18 nt, Artificial Sequence
  Synthetic
cacauaacagcuaucagg

SEQ ID NO: 585619 - RNA, 19 nt, Artificial Sequence
  Synthetic
ucacauaacagcuaucagg

SEQ ID NO: 585620 - RNA, 20 nt, Artificial Sequence
  Synthetic
cucacauaacagcuaucagg

SEQ ID NO: 585621 - RNA, 21 nt, Artificial Sequence
  Synthetic
ccucacauaacagcuaucagg

SEQ ID NO: 585622 - RNA, 22 nt, Artificial Sequence
  Synthetic
cccucacauaacagcuaucagg

SEQ ID NO: 585623 - RNA, 23 nt, Artificial Sequence
  Synthetic
acccucacauaacagcuaucagg

SEQ ID NO: 585624 - RNA, 24 nt, Artificial Sequence
  Synthetic
cacccucacauaacagcuaucagg

SEQ ID NO: 585625 - RNA, 18 nt, Artificial Sequence
  Synthetic
ccagcuuuagcuaucagg

SEQ ID NO: 585626 - RNA, 19 nt, Artificial Sequence
  Synthetic
uccagcuuuagcuaucagg

SEQ ID NO: 585627 - RNA, 20 nt, Artificial Sequence
  Synthetic
uuccagcuuuagcuaucagg

SEQ ID NO: 585628 - RNA, 21 nt, Artificial Sequence
  Synthetic
guuccagcuuuagcuaucagg

SEQ ID NO: 585629 - RNA, 22 nt, Artificial Sequence
  Synthetic
uguuccagcuuuagcuaucagg

SEQ ID NO: 585630 - RNA, 23 nt, Artificial Sequence
  Synthetic
guguuccagcuuuagcuaucagg

SEQ ID NO: 585631 - RNA, 24 nt, Artificial Sequence
  Synthetic
gguguuccagcuuuagcuaucagg

SEQ ID NO: 585632 - RNA, 18 nt, Artificial Sequence
  Synthetic
uagcugccuuuuaucagg

SEQ ID NO: 585633 - RNA, 19 nt, Artificial Sequence
  Synthetic
guagcugccuuuuaucagg

SEQ ID NO: 585634 - RNA, 20 nt, Artificial Sequence
  Synthetic
uguagcugccuuuuaucagg

SEQ ID NO: 585635 - RNA, 21 nt, Artificial Sequence
  Synthetic
uuguagcugccuuuuaucagg

SEQ ID NO: 585636 - RNA, 22 nt, Artificial Sequence
  Synthetic
uuuguagcugccuuuuaucagg

SEQ ID NO: 585637 - RNA, 23 nt, Artificial Sequence
  Synthetic
uuuuguagcugccuuuuaucagg

SEQ ID NO: 585638 - RNA, 24 nt, Artificial Sequence
  Synthetic
uuuuuguagcugccuuuuaucagg

SEQ ID NO: 585639 - RNA, 18 nt, Artificial Sequence
  Synthetic
gaggguggugcacucagg

SEQ ID NO: 585640 - RNA, 19 nt, Artificial Sequence
  Synthetic
agaggguggugcacucagg

SEQ ID NO: 585641 - RNA, 20 nt, Artificial Sequence
  Synthetic
uagaggguggugcacucagg

SEQ ID NO: 585642 - RNA, 21 nt, Artificial Sequence
  Synthetic
cuagaggguggugcacucagg

SEQ ID NO: 585643 - RNA, 22 nt, Artificial Sequence
  Synthetic
ccuagaggguggugcacucagg

SEQ ID NO: 585644 - RNA, 23 nt, Artificial Sequence
  Synthetic
uccuagaggguggugcacucagg

SEQ ID NO: 585645 - RNA, 24 nt, Artificial Sequence
  Synthetic
uuccuagaggguggugcacucagg

SEQ ID NO: 585646 - RNA, 18 nt, Artificial Sequence
  Synthetic
cucgcucugucacucagg

SEQ ID NO: 585647 - RNA, 19 nt, Artificial Sequence
  Synthetic
ucucgcucugucacucagg

SEQ ID NO: 585648 - RNA, 20 nt, Artificial Sequence
  Synthetic
gucucgcucugucacucagg

SEQ ID NO: 585649 - RNA, 21 nt, Artificial Sequence
  Synthetic
agucucgcucugucacucagg

SEQ ID NO: 585650 - RNA, 22 nt, Artificial Sequence
  Synthetic
gagucucgcucugucacucagg

SEQ ID NO: 585651 - RNA, 23 nt, Artificial Sequence
  Synthetic
ggagucucgcucugucacucagg

SEQ ID NO: 585652 - RNA, 24 nt, Artificial Sequence
  Synthetic
cggagucucgcucugucacucagg

SEQ ID NO: 585653 - RNA, 18 nt, Artificial Sequence
  Synthetic
ggagcgcuacagcucagg

SEQ ID NO: 585654 - RNA, 19 nt, Artificial Sequence
  Synthetic
gggagcgcuacagcucagg

SEQ ID NO: 585655 - RNA, 20 nt, Artificial Sequence
  Synthetic
agggagcgcuacagcucagg

SEQ ID NO: 585656 - RNA, 21 nt, Artificial Sequence
  Synthetic
gagggagcgcuacagcucagg

SEQ ID NO: 585657 - RNA, 22 nt, Artificial Sequence
  Synthetic
ggagggagcgcuacagcucagg

SEQ ID NO: 585658 - RNA, 23 nt, Artificial Sequence
  Synthetic
aggagggagcgcuacagcucagg

SEQ ID NO: 585659 - RNA, 24 nt, Artificial Sequence
  Synthetic
aaggagggagcgcuacagcucagg

SEQ ID NO: 585660 - RNA, 18 nt, Artificial Sequence
  Synthetic
caggagguggagcucagg

SEQ ID NO: 585661 - RNA, 19 nt, Artificial Sequence
  Synthetic
acaggagguggagcucagg

SEQ ID NO: 585662 - RNA, 20 nt, Artificial Sequence
  Synthetic
gacaggagguggagcucagg

SEQ ID NO: 585663 - RNA, 21 nt, Artificial Sequence
  Synthetic
ugacaggagguggagcucagg

SEQ ID NO: 585664 - RNA, 22 nt, Artificial Sequence
  Synthetic
cugacaggagguggagcucagg

SEQ ID NO: 585665 - RNA, 23 nt, Artificial Sequence
  Synthetic
ucugacaggagguggagcucagg

SEQ ID NO: 585666 - RNA, 24 nt, Artificial Sequence
  Synthetic
aucugacaggagguggagcucagg

SEQ ID NO: 585667 - RNA, 18 nt, Artificial Sequence
  Synthetic
uagccuacucaucucagg

SEQ ID NO: 585668 - RNA, 19 nt, Artificial Sequence
  Synthetic
cuagccuacucaucucagg

SEQ ID NO: 585669 - RNA, 20 nt, Artificial Sequence
  Synthetic
acuagccuacucaucucagg

SEQ ID NO: 585670 - RNA, 21 nt, Artificial Sequence
  Synthetic
gacuagccuacucaucucagg

SEQ ID NO: 585671 - RNA, 22 nt, Artificial Sequence
  Synthetic
ggacuagccuacucaucucagg

SEQ ID NO: 585672 - RNA, 23 nt, Artificial Sequence
  Synthetic
uggacuagccuacucaucucagg

SEQ ID NO: 585673 - RNA, 24 nt, Artificial Sequence
  Synthetic
cuggacuagccuacucaucucagg

SEQ ID NO: 585674 - RNA, 18 nt, Artificial Sequence
  Synthetic
auguuucugccucucagg

SEQ ID NO: 585675 - RNA, 19 nt, Artificial Sequence
  Synthetic
uauguuucugccucucagg

SEQ ID NO: 585676 - RNA, 20 nt, Artificial Sequence
  Synthetic
auauguuucugccucucagg

SEQ ID NO: 585677 - RNA, 21 nt, Artificial Sequence
  Synthetic
aauauguuucugccucucagg

SEQ ID NO: 585678 - RNA, 22 nt, Artificial Sequence
  Synthetic
uaauauguuucugccucucagg

SEQ ID NO: 585679 - RNA, 23 nt, Artificial Sequence
  Synthetic
cuaauauguuucugccucucagg

SEQ ID NO: 585680 - RNA, 24 nt, Artificial Sequence
  Synthetic
ucuaauauguuucugccucucagg

SEQ ID NO: 585681 - RNA, 18 nt, Artificial Sequence
  Synthetic
ggaaagaagaaagucagg

SEQ ID NO: 585682 - RNA, 19 nt, Artificial Sequence
  Synthetic
aggaaagaagaaagucagg

SEQ ID NO: 585683 - RNA, 20 nt, Artificial Sequence
  Synthetic
aaggaaagaagaaagucagg

SEQ ID NO: 585684 - RNA, 21 nt, Artificial Sequence
  Synthetic
gaaggaaagaagaaagucagg

SEQ ID NO: 585685 - RNA, 22 nt, Artificial Sequence
  Synthetic
agaaggaaagaagaaagucagg

SEQ ID NO: 585686 - RNA, 23 nt, Artificial Sequence
  Synthetic
aagaaggaaagaagaaagucagg

SEQ ID NO: 585687 - RNA, 24 nt, Artificial Sequence
  Synthetic
gaagaaggaaagaagaaagucagg

SEQ ID NO: 585688 - RNA, 18 nt, Artificial Sequence
  Synthetic
ugacgcucccgagucagg

SEQ ID NO: 585689 - RNA, 19 nt, Artificial Sequence
  Synthetic
augacgcucccgagucagg

SEQ ID NO: 585690 - RNA, 20 nt, Artificial Sequence
  Synthetic
uaugacgcucccgagucagg

SEQ ID NO: 585691 - RNA, 21 nt, Artificial Sequence
  Synthetic
guaugacgcucccgagucagg

SEQ ID NO: 585692 - RNA, 22 nt, Artificial Sequence
  Synthetic
uguaugacgcucccgagucagg

SEQ ID NO: 585693 - RNA, 23 nt, Artificial Sequence
  Synthetic
auguaugacgcucccgagucagg

SEQ ID NO: 585694 - RNA, 24 nt, Artificial Sequence
  Synthetic
cauguaugacgcucccgagucagg

SEQ ID NO: 585695 - RNA, 18 nt, Artificial Sequence
  Synthetic
uuuucauaguaggucagg

SEQ ID NO: 585696 - RNA, 19 nt, Artificial Sequence
  Synthetic
cuuuucauaguaggucagg

SEQ ID NO: 585697 - RNA, 20 nt, Artificial Sequence
  Synthetic
gcuuuucauaguaggucagg

SEQ ID NO: 585698 - RNA, 21 nt, Artificial Sequence
  Synthetic
ggcuuuucauaguaggucagg

SEQ ID NO: 585699 - RNA, 22 nt, Artificial Sequence
  Synthetic
aggcuuuucauaguaggucagg

SEQ ID NO: 585700 - RNA, 23 nt, Artificial Sequence
  Synthetic
caggcuuuucauaguaggucagg

SEQ ID NO: 585701 - RNA, 24 nt, Artificial Sequence
  Synthetic
ucaggcuuuucauaguaggucagg

SEQ ID NO: 585702 - RNA, 18 nt, Artificial Sequence
  Synthetic
cuccauuuagaugucagg

SEQ ID NO: 585703 - RNA, 19 nt, Artificial Sequence
  Synthetic
ucuccauuuagaugucagg

SEQ ID NO: 585704 - RNA, 20 nt, Artificial Sequence
  Synthetic
gucuccauuuagaugucagg

SEQ ID NO: 585705 - RNA, 21 nt, Artificial Sequence
  Synthetic
ggucuccauuuagaugucagg

SEQ ID NO: 585706 - RNA, 22 nt, Artificial Sequence
  Synthetic
aggucuccauuuagaugucagg

SEQ ID NO: 585707 - RNA, 23 nt, Artificial Sequence
  Synthetic
uaggucuccauuuagaugucagg

SEQ ID NO: 585708 - RNA, 24 nt, Artificial Sequence
  Synthetic
uuaggucuccauuuagaugucagg

SEQ ID NO: 585709 - RNA, 18 nt, Artificial Sequence
  Synthetic
guagacauaagugucagg

SEQ ID NO: 585710 - RNA, 19 nt, Artificial Sequence
  Synthetic
gguagacauaagugucagg

SEQ ID NO: 585711 - RNA, 20 nt, Artificial Sequence
  Synthetic
ugguagacauaagugucagg

SEQ ID NO: 585712 - RNA, 21 nt, Artificial Sequence
  Synthetic
augguagacauaagugucagg

SEQ ID NO: 585713 - RNA, 22 nt, Artificial Sequence
  Synthetic
aaugguagacauaagugucagg

SEQ ID NO: 585714 - RNA, 23 nt, Artificial Sequence
  Synthetic
gaaugguagacauaagugucagg

SEQ ID NO: 585715 - RNA, 24 nt, Artificial Sequence
  Synthetic
agaaugguagacauaagugucagg

SEQ ID NO: 585716 - RNA, 18 nt, Artificial Sequence
  Synthetic
cuaugauucggugucagg

SEQ ID NO: 585717 - RNA, 19 nt, Artificial Sequence
  Synthetic
gcuaugauucggugucagg

SEQ ID NO: 585718 - RNA, 20 nt, Artificial Sequence
  Synthetic
ugcuaugauucggugucagg

SEQ ID NO: 585719 - RNA, 21 nt, Artificial Sequence
  Synthetic
augcuaugauucggugucagg

SEQ ID NO: 585720 - RNA, 22 nt, Artificial Sequence
  Synthetic
caugcuaugauucggugucagg

SEQ ID NO: 585721 - RNA, 23 nt, Artificial Sequence
  Synthetic
ucaugcuaugauucggugucagg

SEQ ID NO: 585722 - RNA, 24 nt, Artificial Sequence
  Synthetic
cucaugcuaugauucggugucagg

SEQ ID NO: 585723 - RNA, 18 nt, Artificial Sequence
  Synthetic
ucucgcucuguugucagg

SEQ ID NO: 585724 - RNA, 19 nt, Artificial Sequence
  Synthetic
gucucgcucuguugucagg

SEQ ID NO: 585725 - RNA, 20 nt, Artificial Sequence
  Synthetic
agucucgcucuguugucagg

SEQ ID NO: 585726 - RNA, 21 nt, Artificial Sequence
  Synthetic
gagucucgcucuguugucagg

SEQ ID NO: 585727 - RNA, 22 nt, Artificial Sequence
  Synthetic
ggagucucgcucuguugucagg

SEQ ID NO: 585728 - RNA, 23 nt, Artificial Sequence
  Synthetic
cggagucucgcucuguugucagg

SEQ ID NO: 585729 - RNA, 24 nt, Artificial Sequence
  Synthetic
acggagucucgcucuguugucagg

SEQ ID NO: 585730 - RNA, 18 nt, Artificial Sequence
  Synthetic
uaacuuagagaauucagg

SEQ ID NO: 585731 - RNA, 19 nt, Artificial Sequence
  Synthetic
uuaacuuagagaauucagg

SEQ ID NO: 585732 - RNA, 20 nt, Artificial Sequence
  Synthetic
guuaacuuagagaauucagg

SEQ ID NO: 585733 - RNA, 21 nt, Artificial Sequence
  Synthetic
gguuaacuuagagaauucagg

SEQ ID NO: 585734 - RNA, 22 nt, Artificial Sequence
  Synthetic
ggguuaacuuagagaauucagg

SEQ ID NO: 585735 - RNA, 23 nt, Artificial Sequence
  Synthetic
uggguuaacuuagagaauucagg

SEQ ID NO: 585736 - RNA, 24 nt, Artificial Sequence
  Synthetic
guggguuaacuuagagaauucagg

SEQ ID NO: 585737 - RNA, 18 nt, Artificial Sequence
  Synthetic
uuaucaucauccuucagg

SEQ ID NO: 585738 - RNA, 19 nt, Artificial Sequence
  Synthetic
cuuaucaucauccuucagg

SEQ ID NO: 585739 - RNA, 20 nt, Artificial Sequence
  Synthetic
ucuuaucaucauccuucagg

SEQ ID NO: 585740 - RNA, 21 nt, Artificial Sequence
  Synthetic
uucuuaucaucauccuucagg

SEQ ID NO: 585741 - RNA, 22 nt, Artificial Sequence
  Synthetic
uuucuuaucaucauccuucagg

SEQ ID NO: 585742 - RNA, 23 nt, Artificial Sequence
  Synthetic
uuuucuuaucaucauccuucagg

SEQ ID NO: 585743 - RNA, 24 nt, Artificial Sequence
  Synthetic
guuuucuuaucaucauccuucagg

SEQ ID NO: 585744 - RNA, 18 nt, Artificial Sequence
  Synthetic
ucucccuuaagcuucagg

SEQ ID NO: 585745 - RNA, 19 nt, Artificial Sequence
  Synthetic
uucucccuuaagcuucagg

SEQ ID NO: 585746 - RNA, 20 nt, Artificial Sequence
  Synthetic
auucucccuuaagcuucagg

SEQ ID NO: 585747 - RNA, 21 nt, Artificial Sequence
  Synthetic
uauucucccuuaagcuucagg

SEQ ID NO: 585748 - RNA, 22 nt, Artificial Sequence
  Synthetic
uuauucucccuuaagcuucagg

SEQ ID NO: 585749 - RNA, 23 nt, Artificial Sequence
  Synthetic
uuuauucucccuuaagcuucagg

SEQ ID NO: 585750 - RNA, 24 nt, Artificial Sequence
  Synthetic
auuuauucucccuuaagcuucagg

SEQ ID NO: 585751 - RNA, 18 nt, Artificial Sequence
  Synthetic
uuacccaguggguucagg

SEQ ID NO: 585752 - RNA, 19 nt, Artificial Sequence
  Synthetic
uuuacccaguggguucagg

SEQ ID NO: 585753 - RNA, 20 nt, Artificial Sequence
  Synthetic
auuuacccaguggguucagg

SEQ ID NO: 585754 - RNA, 21 nt, Artificial Sequence
  Synthetic
aauuuacccaguggguucagg

SEQ ID NO: 585755 - RNA, 22 nt, Artificial Sequence
  Synthetic
aaauuuacccaguggguucagg

SEQ ID NO: 585756 - RNA, 23 nt, Artificial Sequence
  Synthetic
uaaauuuacccaguggguucagg

SEQ ID NO: 585757 - RNA, 24 nt, Artificial Sequence
  Synthetic
auaaauuuacccaguggguucagg

SEQ ID NO: 585758 - RNA, 18 nt, Artificial Sequence
  Synthetic
ucauccucuugguucagg

SEQ ID NO: 585759 - RNA, 19 nt, Artificial Sequence
  Synthetic
cucauccucuugguucagg

SEQ ID NO: 585760 - RNA, 20 nt, Artificial Sequence
  Synthetic
ucucauccucuugguucagg

SEQ ID NO: 585761 - RNA, 21 nt, Artificial Sequence
  Synthetic
aucucauccucuugguucagg

SEQ ID NO: 585762 - RNA, 22 nt, Artificial Sequence
  Synthetic
aaucucauccucuugguucagg

SEQ ID NO: 585763 - RNA, 23 nt, Artificial Sequence
  Synthetic
uaaucucauccucuugguucagg

SEQ ID NO: 585764 - RNA, 24 nt, Artificial Sequence
  Synthetic
auaaucucauccucuugguucagg

SEQ ID NO: 585765 - RNA, 18 nt, Artificial Sequence
  Synthetic
cagaauauggauuucagg

SEQ ID NO: 585766 - RNA, 19 nt, Artificial Sequence
  Synthetic
ucagaauauggauuucagg

SEQ ID NO: 585767 - RNA, 20 nt, Artificial Sequence
  Synthetic
uucagaauauggauuucagg

SEQ ID NO: 585768 - RNA, 21 nt, Artificial Sequence
  Synthetic
cuucagaauauggauuucagg

SEQ ID NO: 585769 - RNA, 22 nt, Artificial Sequence
  Synthetic
acuucagaauauggauuucagg

SEQ ID NO: 585770 - RNA, 23 nt, Artificial Sequence
  Synthetic
uacuucagaauauggauuucagg

SEQ ID NO: 585771 - RNA, 24 nt, Artificial Sequence
  Synthetic
guacuucagaauauggauuucagg

SEQ ID NO: 585772 - RNA, 18 nt, Artificial Sequence
  Synthetic
gcuucucuauauuucagg

SEQ ID NO: 585773 - RNA, 19 nt, Artificial Sequence
  Synthetic
agcuucucuauauuucagg

SEQ ID NO: 585774 - RNA, 20 nt, Artificial Sequence
  Synthetic
aagcuucucuauauuucagg

SEQ ID NO: 585775 - RNA, 21 nt, Artificial Sequence
  Synthetic
aaagcuucucuauauuucagg

SEQ ID NO: 585776 - RNA, 22 nt, Artificial Sequence
  Synthetic
uaaagcuucucuauauuucagg

SEQ ID NO: 585777 - RNA, 23 nt, Artificial Sequence
  Synthetic
uuaaagcuucucuauauuucagg

SEQ ID NO: 585778 - RNA, 24 nt, Artificial Sequence
  Synthetic
cuuaaagcuucucuauauuucagg

SEQ ID NO: 585779 - RNA, 18 nt, Artificial Sequence
  Synthetic
acugaagacuauuucagg

SEQ ID NO: 585780 - RNA, 19 nt, Artificial Sequence
  Synthetic
uacugaagacuauuucagg

SEQ ID NO: 585781 - RNA, 20 nt, Artificial Sequence
  Synthetic
auacugaagacuauuucagg

SEQ ID NO: 585782 - RNA, 21 nt, Artificial Sequence
  Synthetic
cauacugaagacuauuucagg

SEQ ID NO: 585783 - RNA, 22 nt, Artificial Sequence
  Synthetic
acauacugaagacuauuucagg

SEQ ID NO: 585784 - RNA, 23 nt, Artificial Sequence
  Synthetic
aacauacugaagacuauuucagg

SEQ ID NO: 585785 - RNA, 24 nt, Artificial Sequence
  Synthetic
caacauacugaagacuauuucagg

SEQ ID NO: 585786 - RNA, 18 nt, Artificial Sequence
  Synthetic
uaaaacuuguauuucagg

SEQ ID NO: 585787 - RNA, 19 nt, Artificial Sequence
  Synthetic
uuaaaacuuguauuucagg

SEQ ID NO: 585788 - RNA, 20 nt, Artificial Sequence
  Synthetic
uuuaaaacuuguauuucagg

SEQ ID NO: 585789 - RNA, 21 nt, Artificial Sequence
  Synthetic
uuuuaaaacuuguauuucagg

SEQ ID NO: 585790 - RNA, 22 nt, Artificial Sequence
  Synthetic
auuuuaaaacuuguauuucagg

SEQ ID NO: 585791 - RNA, 23 nt, Artificial Sequence
  Synthetic
uauuuuaaaacuuguauuucagg

SEQ ID NO: 585792 - RNA, 24 nt, Artificial Sequence
  Synthetic
auauuuuaaaacuuguauuucagg

SEQ ID NO: 585793 - RNA, 18 nt, Artificial Sequence
  Synthetic
aggaauaauguuuucagg

SEQ ID NO: 585794 - RNA, 19 nt, Artificial Sequence
  Synthetic
aaggaauaauguuuucagg

SEQ ID NO: 585795 - RNA, 20 nt, Artificial Sequence
  Synthetic
gaaggaauaauguuuucagg

SEQ ID NO: 585796 - RNA, 21 nt, Artificial Sequence
  Synthetic
ggaaggaauaauguuuucagg

SEQ ID NO: 585797 - RNA, 22 nt, Artificial Sequence
  Synthetic
uggaaggaauaauguuuucagg

SEQ ID NO: 585798 - RNA, 23 nt, Artificial Sequence
  Synthetic
auggaaggaauaauguuuucagg

SEQ ID NO: 585799 - RNA, 24 nt, Artificial Sequence
  Synthetic
uauggaaggaauaauguuuucagg

SEQ ID NO: 585800 - RNA, 18 nt, Artificial Sequence
  Synthetic
agcauugaguuuuucagg

SEQ ID NO: 585801 - RNA, 19 nt, Artificial Sequence
  Synthetic
cagcauugaguuuuucagg

SEQ ID NO: 585802 - RNA, 20 nt, Artificial Sequence
  Synthetic
ccagcauugaguuuuucagg

SEQ ID NO: 585803 - RNA, 21 nt, Artificial Sequence
  Synthetic
uccagcauugaguuuuucagg

SEQ ID NO: 585804 - RNA, 22 nt, Artificial Sequence
  Synthetic
guccagcauugaguuuuucagg

SEQ ID NO: 585805 - RNA, 23 nt, Artificial Sequence
  Synthetic
uguccagcauugaguuuuucagg

SEQ ID NO: 585806 - RNA, 24 nt, Artificial Sequence
  Synthetic
uuguccagcauugaguuuuucagg

SEQ ID NO: 585807 - RNA, 18 nt, Artificial Sequence
  Synthetic
ggcacuugguuuuucagg

SEQ ID NO: 585808 - RNA, 19 nt, Artificial Sequence
  Synthetic
gggcacuugguuuuucagg

SEQ ID NO: 585809 - RNA, 20 nt, Artificial Sequence
  Synthetic
agggcacuugguuuuucagg

SEQ ID NO: 585810 - RNA, 21 nt, Artificial Sequence
  Synthetic
aagggcacuugguuuuucagg

SEQ ID NO: 585811 - RNA, 22 nt, Artificial Sequence
  Synthetic
gaagggcacuugguuuuucagg

SEQ ID NO: 585812 - RNA, 23 nt, Artificial Sequence
  Synthetic
ugaagggcacuugguuuuucagg

SEQ ID NO: 585813 - RNA, 24 nt, Artificial Sequence
  Synthetic
uugaagggcacuugguuuuucagg

SEQ ID NO: 585814 - RNA, 18 nt, Artificial Sequence
  Synthetic
ucuuuccaucaaaagagg

SEQ ID NO: 585815 - RNA, 19 nt, Artificial Sequence
  Synthetic
cucuuuccaucaaaagagg

SEQ ID NO: 585816 - RNA, 20 nt, Artificial Sequence
  Synthetic
acucuuuccaucaaaagagg

SEQ ID NO: 585817 - RNA, 21 nt, Artificial Sequence
  Synthetic
uacucuuuccaucaaaagagg

SEQ ID NO: 585818 - RNA, 22 nt, Artificial Sequence
  Synthetic
uuacucuuuccaucaaaagagg

SEQ ID NO: 585819 - RNA, 23 nt, Artificial Sequence
  Synthetic
uuuacucuuuccaucaaaagagg

SEQ ID NO: 585820 - RNA, 24 nt, Artificial Sequence
  Synthetic
uuuuacucuuuccaucaaaagagg

SEQ ID NO: 585821 - RNA, 18 nt, Artificial Sequence
  Synthetic
aaacagaaggaaaagagg

SEQ ID NO: 585822 - RNA, 19 nt, Artificial Sequence
  Synthetic
aaaacagaaggaaaagagg

SEQ ID NO: 585823 - RNA, 20 nt, Artificial Sequence
  Synthetic
gaaaacagaaggaaaagagg

SEQ ID NO: 585824 - RNA, 21 nt, Artificial Sequence
  Synthetic
agaaaacagaaggaaaagagg

SEQ ID NO: 585825 - RNA, 22 nt, Artificial Sequence
  Synthetic
gagaaaacagaaggaaaagagg

SEQ ID NO: 585826 - RNA, 23 nt, Artificial Sequence
  Synthetic
ugagaaaacagaaggaaaagagg

SEQ ID NO: 585827 - RNA, 24 nt, Artificial Sequence
  Synthetic
gugagaaaacagaaggaaaagagg

SEQ ID NO: 585828 - RNA, 18 nt, Artificial Sequence
  Synthetic
auuagugaugaaaagagg

SEQ ID NO: 585829 - RNA, 19 nt, Artificial Sequence
  Synthetic
gauuagugaugaaaagagg

SEQ ID NO: 585830 - RNA, 20 nt, Artificial Sequence
  Synthetic
agauuagugaugaaaagagg

SEQ ID NO: 585831 - RNA, 21 nt, Artificial Sequence
  Synthetic
aagauuagugaugaaaagagg

SEQ ID NO: 585832 - RNA, 22 nt, Artificial Sequence
  Synthetic
aaagauuagugaugaaaagagg

SEQ ID NO: 585833 - RNA, 23 nt, Artificial Sequence
  Synthetic
caaagauuagugaugaaaagagg

SEQ ID NO: 585834 - RNA, 24 nt, Artificial Sequence
  Synthetic
gcaaagauuagugaugaaaagagg

SEQ ID NO: 585835 - RNA, 18 nt, Artificial Sequence
  Synthetic
cucaaacccacaaagagg

SEQ ID NO: 585836 - RNA, 19 nt, Artificial Sequence
  Synthetic
acucaaacccacaaagagg

SEQ ID NO: 585837 - RNA, 20 nt, Artificial Sequence
  Synthetic
aacucaaacccacaaagagg

SEQ ID NO: 585838 - RNA, 21 nt, Artificial Sequence
  Synthetic
caacucaaacccacaaagagg

SEQ ID NO: 585839 - RNA, 22 nt, Artificial Sequence
  Synthetic
ucaacucaaacccacaaagagg

SEQ ID NO: 585840 - RNA, 23 nt, Artificial Sequence
  Synthetic
uucaacucaaacccacaaagagg

SEQ ID NO: 585841 - RNA, 24 nt, Artificial Sequence
  Synthetic
uuucaacucaaacccacaaagagg

SEQ ID NO: 585842 - RNA, 18 nt, Artificial Sequence
  Synthetic
uauucacauucaaagagg

SEQ ID NO: 585843 - RNA, 19 nt, Artificial Sequence
  Synthetic
auauucacauucaaagagg

SEQ ID NO: 585844 - RNA, 20 nt, Artificial Sequence
  Synthetic
uauauucacauucaaagagg

SEQ ID NO: 585845 - RNA, 21 nt, Artificial Sequence
  Synthetic
uuauauucacauucaaagagg

SEQ ID NO: 585846 - RNA, 22 nt, Artificial Sequence
  Synthetic
auuauauucacauucaaagagg

SEQ ID NO: 585847 - RNA, 23 nt, Artificial Sequence
  Synthetic
uauuauauucacauucaaagagg

SEQ ID NO: 585848 - RNA, 24 nt, Artificial Sequence
  Synthetic
uuauuauauucacauucaaagagg

SEQ ID NO: 585849 - RNA, 18 nt, Artificial Sequence
  Synthetic
agaaaaaaaagaaagagg

SEQ ID NO: 585850 - RNA, 19 nt, Artificial Sequence
  Synthetic
aagaaaaaaaagaaagagg

SEQ ID NO: 585851 - RNA, 20 nt, Artificial Sequence
  Synthetic
aaagaaaaaaaagaaagagg

SEQ ID NO: 585852 - RNA, 21 nt, Artificial Sequence
  Synthetic
aaaagaaaaaaaagaaagagg

SEQ ID NO: 585853 - RNA, 22 nt, Artificial Sequence
  Synthetic
aaaaagaaaaaaaagaaagagg

SEQ ID NO: 585854 - RNA, 23 nt, Artificial Sequence
  Synthetic
gaaaaagaaaaaaaagaaagagg

SEQ ID NO: 585855 - RNA, 24 nt, Artificial Sequence
  Synthetic
agaaaaagaaaaaaaagaaagagg

SEQ ID NO: 585856 - RNA, 18 nt, Artificial Sequence
  Synthetic
aaagaagaaagaaagagg

SEQ ID NO: 585857 - RNA, 19 nt, Artificial Sequence
  Synthetic
aaaagaagaaagaaagagg

SEQ ID NO: 585858 - RNA, 20 nt, Artificial Sequence
  Synthetic
aaaaagaagaaagaaagagg

SEQ ID NO: 585859 - RNA, 21 nt, Artificial Sequence
  Synthetic
aaaaaagaagaaagaaagagg

SEQ ID NO: 585860 - RNA, 22 nt, Artificial Sequence
  Synthetic
aaaaaaagaagaaagaaagagg

SEQ ID NO: 585861 - RNA, 23 nt, Artificial Sequence
  Synthetic
aaaaaaaagaagaaagaaagagg

SEQ ID NO: 585862 - RNA, 24 nt, Artificial Sequence
  Synthetic
aaaaaaaaagaagaaagaaagagg

SEQ ID NO: 585863 - RNA, 18 nt, Artificial Sequence
  Synthetic
auauugcacagaaagagg

SEQ ID NO: 585864 - RNA, 19 nt, Artificial Sequence
  Synthetic
uauauugcacagaaagagg

SEQ ID NO: 585865 - RNA, 20 nt, Artificial Sequence
  Synthetic
auauauugcacagaaagagg

SEQ ID NO: 585866 - RNA, 21 nt, Artificial Sequence
  Synthetic
aauauauugcacagaaagagg

SEQ ID NO: 585867 - RNA, 22 nt, Artificial Sequence
  Synthetic
caauauauugcacagaaagagg

SEQ ID NO: 585868 - RNA, 23 nt, Artificial Sequence
  Synthetic
acaauauauugcacagaaagagg

SEQ ID NO: 585869 - RNA, 24 nt, Artificial Sequence
  Synthetic
uacaauauauugcacagaaagagg

SEQ ID NO: 585870 - RNA, 18 nt, Artificial Sequence
  Synthetic
cacauuaaaauaaagagg

SEQ ID NO: 585871 - RNA, 19 nt, Artificial Sequence
  Synthetic
ucacauuaaaauaaagagg

SEQ ID NO: 585872 - RNA, 20 nt, Artificial Sequence
  Synthetic
aucacauuaaaauaaagagg

SEQ ID NO: 585873 - RNA, 21 nt, Artificial Sequence
  Synthetic
uaucacauuaaaauaaagagg

SEQ ID NO: 585874 - RNA, 22 nt, Artificial Sequence
  Synthetic
uuaucacauuaaaauaaagagg

SEQ ID NO: 585875 - RNA, 23 nt, Artificial Sequence
  Synthetic
uuuaucacauuaaaauaaagagg

SEQ ID NO: 585876 - RNA, 24 nt, Artificial Sequence
  Synthetic
uuuuaucacauuaaaauaaagagg

SEQ ID NO: 585877 - RNA, 18 nt, Artificial Sequence
  Synthetic
uuuggaaaacuaaagagg

SEQ ID NO: 585878 - RNA, 19 nt, Artificial Sequence
  Synthetic
uuuuggaaaacuaaagagg

SEQ ID NO: 585879 - RNA, 20 nt, Artificial Sequence
  Synthetic
cuuuuggaaaacuaaagagg

SEQ ID NO: 585880 - RNA, 21 nt, Artificial Sequence
  Synthetic
ucuuuuggaaaacuaaagagg

SEQ ID NO: 585881 - RNA, 22 nt, Artificial Sequence
  Synthetic
cucuuuuggaaaacuaaagagg

SEQ ID NO: 585882 - RNA, 23 nt, Artificial Sequence
  Synthetic
acucuuuuggaaaacuaaagagg

SEQ ID NO: 585883 - RNA, 24 nt, Artificial Sequence
  Synthetic
aacucuuuuggaaaacuaaagagg

SEQ ID NO: 585884 - RNA, 18 nt, Artificial Sequence
  Synthetic
ucccagccacuaaagagg

SEQ ID NO: 585885 - RNA, 19 nt, Artificial Sequence
  Synthetic
gucccagccacuaaagagg

SEQ ID NO: 585886 - RNA, 20 nt, Artificial Sequence
  Synthetic
agucccagccacuaaagagg

SEQ ID NO: 585887 - RNA, 21 nt, Artificial Sequence
  Synthetic
uagucccagccacuaaagagg

SEQ ID NO: 585888 - RNA, 22 nt, Artificial Sequence
  Synthetic
guagucccagccacuaaagagg

SEQ ID NO: 585889 - RNA, 23 nt, Artificial Sequence
  Synthetic
uguagucccagccacuaaagagg

SEQ ID NO: 585890 - RNA, 24 nt, Artificial Sequence
  Synthetic
cuguagucccagccacuaaagagg

SEQ ID NO: 585891 - RNA, 18 nt, Artificial Sequence
  Synthetic
uucgguuugcuaaagagg

SEQ ID NO: 585892 - RNA, 19 nt, Artificial Sequence
  Synthetic
uuucgguuugcuaaagagg

SEQ ID NO: 585893 - RNA, 20 nt, Artificial Sequence
  Synthetic
guuucgguuugcuaaagagg

SEQ ID NO: 585894 - RNA, 21 nt, Artificial Sequence
  Synthetic
uguuucgguuugcuaaagagg

SEQ ID NO: 585895 - RNA, 22 nt, Artificial Sequence
  Synthetic
cuguuucgguuugcuaaagagg

SEQ ID NO: 585896 - RNA, 23 nt, Artificial Sequence
  Synthetic
ucuguuucgguuugcuaaagagg

SEQ ID NO: 585897 - RNA, 24 nt, Artificial Sequence
  Synthetic
aucuguuucgguuugcuaaagagg

SEQ ID NO: 585898 - RNA, 18 nt, Artificial Sequence
  Synthetic
auagaaaauaacaagagg

SEQ ID NO: 585899 - RNA, 19 nt, Artificial Sequence
  Synthetic
aauagaaaauaacaagagg

SEQ ID NO: 585900 - RNA, 20 nt, Artificial Sequence
  Synthetic
aaauagaaaauaacaagagg

SEQ ID NO: 585901 - RNA, 21 nt, Artificial Sequence
  Synthetic
gaaauagaaaauaacaagagg

SEQ ID NO: 585902 - RNA, 22 nt, Artificial Sequence
  Synthetic
ggaaauagaaaauaacaagagg

SEQ ID NO: 585903 - RNA, 23 nt, Artificial Sequence
  Synthetic
aggaaauagaaaauaacaagagg

SEQ ID NO: 585904 - RNA, 24 nt, Artificial Sequence
  Synthetic
gaggaaauagaaaauaacaagagg

SEQ ID NO: 585905 - RNA, 18 nt, Artificial Sequence
  Synthetic
ucccagcuacucaagagg

SEQ ID NO: 585906 - RNA, 19 nt, Artificial Sequence
  Synthetic
gucccagcuacucaagagg

SEQ ID NO: 585907 - RNA, 20 nt, Artificial Sequence
  Synthetic
agucccagcuacucaagagg

SEQ ID NO: 585908 - RNA, 21 nt, Artificial Sequence
  Synthetic
uagucccagcuacucaagagg

SEQ ID NO: 585909 - RNA, 22 nt, Artificial Sequence
  Synthetic
guagucccagcuacucaagagg

SEQ ID NO: 585910 - RNA, 23 nt, Artificial Sequence
  Synthetic
uguagucccagcuacucaagagg

SEQ ID NO: 585911 - RNA, 24 nt, Artificial Sequence
  Synthetic
cuguagucccagcuacucaagagg

SEQ ID NO: 585912 - RNA, 18 nt, Artificial Sequence
  Synthetic
gccuuagaggucaagagg

SEQ ID NO: 585913 - RNA, 19 nt, Artificial Sequence
  Synthetic
ugccuuagaggucaagagg

SEQ ID NO: 585914 - RNA, 20 nt, Artificial Sequence
  Synthetic
uugccuuagaggucaagagg

SEQ ID NO: 585915 - RNA, 21 nt, Artificial Sequence
  Synthetic
auugccuuagaggucaagagg

SEQ ID NO: 585916 - RNA, 22 nt, Artificial Sequence
  Synthetic
cauugccuuagaggucaagagg

SEQ ID NO: 585917 - RNA, 23 nt, Artificial Sequence
  Synthetic
gcauugccuuagaggucaagagg

SEQ ID NO: 585918 - RNA, 24 nt, Artificial Sequence
  Synthetic
agcauugccuuagaggucaagagg

SEQ ID NO: 585919 - RNA, 18 nt, Artificial Sequence
  Synthetic
uguugggugaagaagagg

SEQ ID NO: 585920 - RNA, 19 nt, Artificial Sequence
  Synthetic
guguugggugaagaagagg

SEQ ID NO: 585921 - RNA, 20 nt, Artificial Sequence
  Synthetic
uguguugggugaagaagagg

SEQ ID NO: 585922 - RNA, 21 nt, Artificial Sequence
  Synthetic
guguguugggugaagaagagg

SEQ ID NO: 585923 - RNA, 22 nt, Artificial Sequence
  Synthetic
uguguguugggugaagaagagg

SEQ ID NO: 585924 - RNA, 23 nt, Artificial Sequence
  Synthetic
cuguguguugggugaagaagagg

SEQ ID NO: 585925 - RNA, 24 nt, Artificial Sequence
  Synthetic
acuguguguugggugaagaagagg

SEQ ID NO: 585926 - RNA, 18 nt, Artificial Sequence
  Synthetic
uuuggccaucagaagagg

SEQ ID NO: 585927 - RNA, 19 nt, Artificial Sequence
  Synthetic
guuuggccaucagaagagg

SEQ ID NO: 585928 - RNA, 20 nt, Artificial Sequence
  Synthetic
aguuuggccaucagaagagg

SEQ ID NO: 585929 - RNA, 21 nt, Artificial Sequence
  Synthetic
aaguuuggccaucagaagagg

SEQ ID NO: 585930 - RNA, 22 nt, Artificial Sequence
  Synthetic
aaaguuuggccaucagaagagg

SEQ ID NO: 585931 - RNA, 23 nt, Artificial Sequence
  Synthetic
caaaguuuggccaucagaagagg

SEQ ID NO: 585932 - RNA, 24 nt, Artificial Sequence
  Synthetic
acaaaguuuggccaucagaagagg

SEQ ID NO: 585933 - RNA, 18 nt, Artificial Sequence
  Synthetic
aaugcuuucgagaagagg

SEQ ID NO: 585934 - RNA, 19 nt, Artificial Sequence
  Synthetic
uaaugcuuucgagaagagg

SEQ ID NO: 585935 - RNA, 20 nt, Artificial Sequence
  Synthetic
guaaugcuuucgagaagagg

SEQ ID NO: 585936 - RNA, 21 nt, Artificial Sequence
  Synthetic
gguaaugcuuucgagaagagg

SEQ ID NO: 585937 - RNA, 22 nt, Artificial Sequence
  Synthetic
ugguaaugcuuucgagaagagg

SEQ ID NO: 585938 - RNA, 23 nt, Artificial Sequence
  Synthetic
cugguaaugcuuucgagaagagg

SEQ ID NO: 585939 - RNA, 24 nt, Artificial Sequence
  Synthetic
ccugguaaugcuuucgagaagagg

SEQ ID NO: 585940 - RNA, 18 nt, Artificial Sequence
  Synthetic
agaguguaguagaagagg

SEQ ID NO: 585941 - RNA, 19 nt, Artificial Sequence
  Synthetic
uagaguguaguagaagagg

SEQ ID NO: 585942 - RNA, 20 nt, Artificial Sequence
  Synthetic
guagaguguaguagaagagg

SEQ ID NO: 585943 - RNA, 21 nt, Artificial Sequence
  Synthetic
gguagaguguaguagaagagg

SEQ ID NO: 585944 - RNA, 22 nt, Artificial Sequence
  Synthetic
ggguagaguguaguagaagagg

SEQ ID NO: 585945 - RNA, 23 nt, Artificial Sequence
  Synthetic
aggguagaguguaguagaagagg

SEQ ID NO: 585946 - RNA, 24 nt, Artificial Sequence
  Synthetic
aaggguagaguguaguagaagagg

SEQ ID NO: 585947 - RNA, 18 nt, Artificial Sequence
  Synthetic
uuccucaauuagaagagg

SEQ ID NO: 585948 - RNA, 19 nt, Artificial Sequence
  Synthetic
cuuccucaauuagaagagg

SEQ ID NO: 585949 - RNA, 20 nt, Artificial Sequence
  Synthetic
ucuuccucaauuagaagagg

SEQ ID NO: 585950 - RNA, 21 nt, Artificial Sequence
  Synthetic
uucuuccucaauuagaagagg

SEQ ID NO: 585951 - RNA, 22 nt, Artificial Sequence
  Synthetic
uuucuuccucaauuagaagagg

SEQ ID NO: 585952 - RNA, 23 nt, Artificial Sequence
  Synthetic
auuucuuccucaauuagaagagg

SEQ ID NO: 585953 - RNA, 24 nt, Artificial Sequence
  Synthetic
gauuucuuccucaauuagaagagg

SEQ ID NO: 585954 - RNA, 18 nt, Artificial Sequence
  Synthetic
ucuacauagaggaagagg

SEQ ID NO: 585955 - RNA, 19 nt, Artificial Sequence
  Synthetic
gucuacauagaggaagagg

SEQ ID NO: 585956 - RNA, 20 nt, Artificial Sequence
  Synthetic
agucuacauagaggaagagg

SEQ ID NO: 585957 - RNA, 21 nt, Artificial Sequence
  Synthetic
gagucuacauagaggaagagg

SEQ ID NO: 585958 - RNA, 22 nt, Artificial Sequence
  Synthetic
ggagucuacauagaggaagagg

SEQ ID NO: 585959 - RNA, 23 nt, Artificial Sequence
  Synthetic
uggagucuacauagaggaagagg

SEQ ID NO: 585960 - RNA, 24 nt, Artificial Sequence
  Synthetic
guggagucuacauagaggaagagg

SEQ ID NO: 585961 - RNA, 18 nt, Artificial Sequence
  Synthetic
uacuuauuauggaagagg

SEQ ID NO: 585962 - RNA, 19 nt, Artificial Sequence
  Synthetic
auacuuauuauggaagagg

SEQ ID NO: 585963 - RNA, 20 nt, Artificial Sequence
  Synthetic
cauacuuauuauggaagagg

SEQ ID NO: 585964 - RNA, 21 nt, Artificial Sequence
  Synthetic
ccauacuuauuauggaagagg

SEQ ID NO: 585965 - RNA, 22 nt, Artificial Sequence
  Synthetic
gccauacuuauuauggaagagg

SEQ ID NO: 585966 - RNA, 23 nt, Artificial Sequence
  Synthetic
agccauacuuauuauggaagagg

SEQ ID NO: 585967 - RNA, 24 nt, Artificial Sequence
  Synthetic
cagccauacuuauuauggaagagg

SEQ ID NO: 585968 - RNA, 18 nt, Artificial Sequence
  Synthetic
guuucuucugugaagagg

SEQ ID NO: 585969 - RNA, 19 nt, Artificial Sequence
  Synthetic
uguuucuucugugaagagg

SEQ ID NO: 585970 - RNA, 20 nt, Artificial Sequence
  Synthetic
guguuucuucugugaagagg

SEQ ID NO: 585971 - RNA, 21 nt, Artificial Sequence
  Synthetic
aguguuucuucugugaagagg

SEQ ID NO: 585972 - RNA, 22 nt, Artificial Sequence
  Synthetic
uaguguuucuucugugaagagg

SEQ ID NO: 585973 - RNA, 23 nt, Artificial Sequence
  Synthetic
guaguguuucuucugugaagagg

SEQ ID NO: 585974 - RNA, 24 nt, Artificial Sequence
  Synthetic
uguaguguuucuucugugaagagg

SEQ ID NO: 585975 - RNA, 18 nt, Artificial Sequence
  Synthetic
auuuuuuaauauaagagg

SEQ ID NO: 585976 - RNA, 19 nt, Artificial Sequence
  Synthetic
uauuuuuuaauauaagagg

SEQ ID NO: 585977 - RNA, 20 nt, Artificial Sequence
  Synthetic
uuauuuuuuaauauaagagg

SEQ ID NO: 585978 - RNA, 21 nt, Artificial Sequence
  Synthetic
auuauuuuuuaauauaagagg

SEQ ID NO: 585979 - RNA, 22 nt, Artificial Sequence
  Synthetic
aauuauuuuuuaauauaagagg

SEQ ID NO: 585980 - RNA, 23 nt, Artificial Sequence
  Synthetic
gaauuauuuuuuaauauaagagg

SEQ ID NO: 585981 - RNA, 24 nt, Artificial Sequence
  Synthetic
agaauuauuuuuuaauauaagagg

SEQ ID NO: 585982 - RNA, 18 nt, Artificial Sequence
  Synthetic
ucacuugaaacuaagagg

SEQ ID NO: 585983 - RNA, 19 nt, Artificial Sequence
  Synthetic
aucacuugaaacuaagagg

SEQ ID NO: 585984 - RNA, 20 nt, Artificial Sequence
  Synthetic
aaucacuugaaacuaagagg

SEQ ID NO: 585985 - RNA, 21 nt, Artificial Sequence
  Synthetic
gaaucacuugaaacuaagagg

SEQ ID NO: 585986 - RNA, 22 nt, Artificial Sequence
  Synthetic
agaaucacuugaaacuaagagg

SEQ ID NO: 585987 - RNA, 23 nt, Artificial Sequence
  Synthetic
gagaaucacuugaaacuaagagg

SEQ ID NO: 585988 - RNA, 24 nt, Artificial Sequence
  Synthetic
ggagaaucacuugaaacuaagagg

SEQ ID NO: 585989 - RNA, 18 nt, Artificial Sequence
  Synthetic
gcuauaggagguaagagg

SEQ ID NO: 585990 - RNA, 19 nt, Artificial Sequence
  Synthetic
ugcuauaggagguaagagg

SEQ ID NO: 585991 - RNA, 20 nt, Artificial Sequence
  Synthetic
gugcuauaggagguaagagg

SEQ ID NO: 585992 - RNA, 21 nt, Artificial Sequence
  Synthetic
agugcuauaggagguaagagg

SEQ ID NO: 585993 - RNA, 22 nt, Artificial Sequence
  Synthetic
aagugcuauaggagguaagagg

SEQ ID NO: 585994 - RNA, 23 nt, Artificial Sequence
  Synthetic
uaagugcuauaggagguaagagg

SEQ ID NO: 585995 - RNA, 24 nt, Artificial Sequence
  Synthetic
auaagugcuauaggagguaagagg

SEQ ID NO: 585996 - RNA, 18 nt, Artificial Sequence
  Synthetic
ugaacaaaggguaagagg

SEQ ID NO: 585997 - RNA, 19 nt, Artificial Sequence
  Synthetic
uugaacaaaggguaagagg

SEQ ID NO: 585998 - RNA, 20 nt, Artificial Sequence
  Synthetic
cuugaacaaaggguaagagg

SEQ ID NO: 585999 - RNA, 21 nt, Artificial Sequence
  Synthetic
acuugaacaaaggguaagagg

SEQ ID NO: 586000 - RNA, 22 nt, Artificial Sequence
  Synthetic
aacuugaacaaaggguaagagg

SEQ ID NO: 586001 - RNA, 23 nt, Artificial Sequence
  Synthetic
gaacuugaacaaaggguaagagg

SEQ ID NO: 586002 - RNA, 24 nt, Artificial Sequence
  Synthetic
agaacuugaacaaaggguaagagg

SEQ ID NO: 586003 - RNA, 18 nt, Artificial Sequence
  Synthetic
ucccaccauuuuaagagg

SEQ ID NO: 586004 - RNA, 19 nt, Artificial Sequence
  Synthetic
aucccaccauuuuaagagg

SEQ ID NO: 586005 - RNA, 20 nt, Artificial Sequence
  Synthetic
aaucccaccauuuuaagagg

SEQ ID NO: 586006 - RNA, 21 nt, Artificial Sequence
  Synthetic
uaaucccaccauuuuaagagg

SEQ ID NO: 586007 - RNA, 22 nt, Artificial Sequence
  Synthetic
guaaucccaccauuuuaagagg

SEQ ID NO: 586008 - RNA, 23 nt, Artificial Sequence
  Synthetic
uguaaucccaccauuuuaagagg

SEQ ID NO: 586009 - RNA, 24 nt, Artificial Sequence
  Synthetic
cuguaaucccaccauuuuaagagg

SEQ ID NO: 586010 - RNA, 18 nt, Artificial Sequence
  Synthetic
uggggcaugaaacagagg

SEQ ID NO: 586011 - RNA, 19 nt, Artificial Sequence
  Synthetic
auggggcaugaaacagagg

SEQ ID NO: 586012 - RNA, 20 nt, Artificial Sequence
  Synthetic
gauggggcaugaaacagagg

SEQ ID NO: 586013 - RNA, 21 nt, Artificial Sequence
  Synthetic
agauggggcaugaaacagagg

SEQ ID NO: 586014 - RNA, 22 nt, Artificial Sequence
  Synthetic
aagauggggcaugaaacagagg

SEQ ID NO: 586015 - RNA, 23 nt, Artificial Sequence
  Synthetic
gaagauggggcaugaaacagagg

SEQ ID NO: 586016 - RNA, 24 nt, Artificial Sequence
  Synthetic
ggaagauggggcaugaaacagagg

SEQ ID NO: 586017 - RNA, 18 nt, Artificial Sequence
  Synthetic
aagugagaaacacagagg

SEQ ID NO: 586018 - RNA, 19 nt, Artificial Sequence
  Synthetic
aaagugagaaacacagagg

SEQ ID NO: 586019 - RNA, 20 nt, Artificial Sequence
  Synthetic
aaaagugagaaacacagagg

SEQ ID NO: 586020 - RNA, 21 nt, Artificial Sequence
  Synthetic
uaaaagugagaaacacagagg

SEQ ID NO: 586021 - RNA, 22 nt, Artificial Sequence
  Synthetic
cuaaaagugagaaacacagagg

SEQ ID NO: 586022 - RNA, 23 nt, Artificial Sequence
  Synthetic
ccuaaaagugagaaacacagagg

SEQ ID NO: 586023 - RNA, 24 nt, Artificial Sequence
  Synthetic
gccuaaaagugagaaacacagagg

SEQ ID NO: 586024 - RNA, 18 nt, Artificial Sequence
  Synthetic
gcuacuggaagacagagg

SEQ ID NO: 586025 - RNA, 19 nt, Artificial Sequence
  Synthetic
agcuacuggaagacagagg

SEQ ID NO: 586026 - RNA, 20 nt, Artificial Sequence
  Synthetic
cagcuacuggaagacagagg

SEQ ID NO: 586027 - RNA, 21 nt, Artificial Sequence
  Synthetic
ccagcuacuggaagacagagg

SEQ ID NO: 586028 - RNA, 22 nt, Artificial Sequence
  Synthetic
cccagcuacuggaagacagagg

SEQ ID NO: 586029 - RNA, 23 nt, Artificial Sequence
  Synthetic
ucccagcuacuggaagacagagg

SEQ ID NO: 586030 - RNA, 24 nt, Artificial Sequence
  Synthetic
aucccagcuacuggaagacagagg

SEQ ID NO: 586031 - RNA, 18 nt, Artificial Sequence
  Synthetic
aaaagagugagacagagg

SEQ ID NO: 586032 - RNA, 19 nt, Artificial Sequence
  Synthetic
caaaagagugagacagagg

SEQ ID NO: 586033 - RNA, 20 nt, Artificial Sequence
  Synthetic
ccaaaagagugagacagagg

SEQ ID NO: 586034 - RNA, 21 nt, Artificial Sequence
  Synthetic
accaaaagagugagacagagg

SEQ ID NO: 586035 - RNA, 22 nt, Artificial Sequence
  Synthetic
aaccaaaagagugagacagagg

SEQ ID NO: 586036 - RNA, 23 nt, Artificial Sequence
  Synthetic
aaaccaaaagagugagacagagg

SEQ ID NO: 586037 - RNA, 24 nt, Artificial Sequence
  Synthetic
aaaaccaaaagagugagacagagg

SEQ ID NO: 586038 - RNA, 18 nt, Artificial Sequence
  Synthetic
cacuggggacuacagagg

SEQ ID NO: 586039 - RNA, 19 nt, Artificial Sequence
  Synthetic
acacuggggacuacagagg

SEQ ID NO: 586040 - RNA, 20 nt, Artificial Sequence
  Synthetic
gacacuggggacuacagagg

SEQ ID NO: 586041 - RNA, 21 nt, Artificial Sequence
  Synthetic
agacacuggggacuacagagg

SEQ ID NO: 586042 - RNA, 22 nt, Artificial Sequence
  Synthetic
uagacacuggggacuacagagg

SEQ ID NO: 586043 - RNA, 23 nt, Artificial Sequence
  Synthetic
auagacacuggggacuacagagg

SEQ ID NO: 586044 - RNA, 24 nt, Artificial Sequence
  Synthetic
aauagacacuggggacuacagagg

SEQ ID NO: 586045 - RNA, 18 nt, Artificial Sequence
  Synthetic
aagaagacaaaccagagg

SEQ ID NO: 586046 - RNA, 19 nt, Artificial Sequence
  Synthetic
uaagaagacaaaccagagg

SEQ ID NO: 586047 - RNA, 20 nt, Artificial Sequence
  Synthetic
auaagaagacaaaccagagg

SEQ ID NO: 586048 - RNA, 21 nt, Artificial Sequence
  Synthetic
uauaagaagacaaaccagagg

SEQ ID NO: 586049 - RNA, 22 nt, Artificial Sequence
  Synthetic
cuauaagaagacaaaccagagg

SEQ ID NO: 586050 - RNA, 23 nt, Artificial Sequence
  Synthetic
acuauaagaagacaaaccagagg

SEQ ID NO: 586051 - RNA, 24 nt, Artificial Sequence
  Synthetic
gacuauaagaagacaaaccagagg

SEQ ID NO: 586052 - RNA, 18 nt, Artificial Sequence
  Synthetic
uuuuauagauaccagagg

SEQ ID NO: 586053 - RNA, 19 nt, Artificial Sequence
  Synthetic
uuuuuauagauaccagagg

SEQ ID NO: 586054 - RNA, 20 nt, Artificial Sequence
  Synthetic
uuuuuuauagauaccagagg

SEQ ID NO: 586055 - RNA, 21 nt, Artificial Sequence
  Synthetic
uuuuuuuauagauaccagagg

SEQ ID NO: 586056 - RNA, 22 nt, Artificial Sequence
  Synthetic
uuuuuuuuauagauaccagagg

SEQ ID NO: 586057 - RNA, 23 nt, Artificial Sequence
  Synthetic
uuuuuuuuuauagauaccagagg

SEQ ID NO: 586058 - RNA, 24 nt, Artificial Sequence
  Synthetic
auuuuuuuuuauagauaccagagg

SEQ ID NO: 586059 - RNA, 18 nt, Artificial Sequence
  Synthetic
aaagguaguugccagagg

SEQ ID NO: 586060 - RNA, 19 nt, Artificial Sequence
  Synthetic
gaaagguaguugccagagg

SEQ ID NO: 586061 - RNA, 20 nt, Artificial Sequence
  Synthetic
agaaagguaguugccagagg

SEQ ID NO: 586062 - RNA, 21 nt, Artificial Sequence
  Synthetic
uagaaagguaguugccagagg

SEQ ID NO: 586063 - RNA, 22 nt, Artificial Sequence
  Synthetic
guagaaagguaguugccagagg

SEQ ID NO: 586064 - RNA, 23 nt, Artificial Sequence
  Synthetic
aguagaaagguaguugccagagg

SEQ ID NO: 586065 - RNA, 24 nt, Artificial Sequence
  Synthetic
gaguagaaagguaguugccagagg

SEQ ID NO: 586066 - RNA, 18 nt, Artificial Sequence
  Synthetic
cagauucaaauccagagg

SEQ ID NO: 586067 - RNA, 19 nt, Artificial Sequence
  Synthetic
acagauucaaauccagagg

SEQ ID NO: 586068 - RNA, 20 nt, Artificial Sequence
  Synthetic
aacagauucaaauccagagg

SEQ ID NO: 586069 - RNA, 21 nt, Artificial Sequence
  Synthetic
aaacagauucaaauccagagg

SEQ ID NO: 586070 - RNA, 22 nt, Artificial Sequence
  Synthetic
aaaacagauucaaauccagagg

SEQ ID NO: 586071 - RNA, 23 nt, Artificial Sequence
  Synthetic
aaaaacagauucaaauccagagg

SEQ ID NO: 586072 - RNA, 24 nt, Artificial Sequence
  Synthetic
caaaaacagauucaaauccagagg

SEQ ID NO: 586073 - RNA, 18 nt, Artificial Sequence
  Synthetic
acauauaaacuccagagg

SEQ ID NO: 586074 - RNA, 19 nt, Artificial Sequence
  Synthetic
aacauauaaacuccagagg

SEQ ID NO: 586075 - RNA, 20 nt, Artificial Sequence
  Synthetic
aaacauauaaacuccagagg

SEQ ID NO: 586076 - RNA, 21 nt, Artificial Sequence
  Synthetic
uaaacauauaaacuccagagg

SEQ ID NO: 586077 - RNA, 22 nt, Artificial Sequence
  Synthetic
guaaacauauaaacuccagagg

SEQ ID NO: 586078 - RNA, 23 nt, Artificial Sequence
  Synthetic
uguaaacauauaaacuccagagg

SEQ ID NO: 586079 - RNA, 24 nt, Artificial Sequence
  Synthetic
auguaaacauauaaacuccagagg

SEQ ID NO: 586080 - RNA, 18 nt, Artificial Sequence
  Synthetic
acuuuuguagagcagagg

SEQ ID NO: 586081 - RNA, 19 nt, Artificial Sequence
  Synthetic
uacuuuuguagagcagagg

SEQ ID NO: 586082 - RNA, 20 nt, Artificial Sequence
  Synthetic
auacuuuuguagagcagagg

SEQ ID NO: 586083 - RNA, 21 nt, Artificial Sequence
  Synthetic
uauacuuuuguagagcagagg

SEQ ID NO: 586084 - RNA, 22 nt, Artificial Sequence
  Synthetic
auauacuuuuguagagcagagg

SEQ ID NO: 586085 - RNA, 23 nt, Artificial Sequence
  Synthetic
uauauacuuuuguagagcagagg

SEQ ID NO: 586086 - RNA, 24 nt, Artificial Sequence
  Synthetic
auauauacuuuuguagagcagagg

SEQ ID NO: 586087 - RNA, 18 nt, Artificial Sequence
  Synthetic
cuggguaacaggcagagg

SEQ ID NO: 586088 - RNA, 19 nt, Artificial Sequence
  Synthetic
acuggguaacaggcagagg

SEQ ID NO: 586089 - RNA, 20 nt, Artificial Sequence
  Synthetic
aacuggguaacaggcagagg

SEQ ID NO: 586090 - RNA, 21 nt, Artificial Sequence
  Synthetic
gaacuggguaacaggcagagg

SEQ ID NO: 586091 - RNA, 22 nt, Artificial Sequence
  Synthetic
ggaacuggguaacaggcagagg

SEQ ID NO: 586092 - RNA, 23 nt, Artificial Sequence
  Synthetic
uggaacuggguaacaggcagagg

SEQ ID NO: 586093 - RNA, 24 nt, Artificial Sequence
  Synthetic
uuggaacuggguaacaggcagagg

SEQ ID NO: 586094 - RNA, 18 nt, Artificial Sequence
  Synthetic
gggaauggcaggcagagg

SEQ ID NO: 586095 - RNA, 19 nt, Artificial Sequence
  Synthetic
agggaauggcaggcagagg

SEQ ID NO: 586096 - RNA, 20 nt, Artificial Sequence
  Synthetic
aagggaauggcaggcagagg

SEQ ID NO: 586097 - RNA, 21 nt, Artificial Sequence
  Synthetic
caagggaauggcaggcagagg

SEQ ID NO: 586098 - RNA, 22 nt, Artificial Sequence
  Synthetic
ccaagggaauggcaggcagagg

SEQ ID NO: 586099 - RNA, 23 nt, Artificial Sequence
  Synthetic
accaagggaauggcaggcagagg

SEQ ID NO: 586100 - RNA, 24 nt, Artificial Sequence
  Synthetic
uaccaagggaauggcaggcagagg

SEQ ID NO: 586101 - RNA, 18 nt, Artificial Sequence
  Synthetic
gaaucugggaggcagagg

SEQ ID NO: 586102 - RNA, 19 nt, Artificial Sequence
  Synthetic
ugaaucugggaggcagagg

SEQ ID NO: 586103 - RNA, 20 nt, Artificial Sequence
  Synthetic
uugaaucugggaggcagagg

SEQ ID NO: 586104 - RNA, 21 nt, Artificial Sequence
  Synthetic
cuugaaucugggaggcagagg

SEQ ID NO: 586105 - RNA, 22 nt, Artificial Sequence
  Synthetic
gcuugaaucugggaggcagagg

SEQ ID NO: 586106 - RNA, 23 nt, Artificial Sequence
  Synthetic
cgcuugaaucugggaggcagagg

SEQ ID NO: 586107 - RNA, 24 nt, Artificial Sequence
  Synthetic
ucgcuugaaucugggaggcagagg

SEQ ID NO: 586108 - RNA, 18 nt, Artificial Sequence
  Synthetic
auaccauugaggcagagg

SEQ ID NO: 586109 - RNA, 19 nt, Artificial Sequence
  Synthetic
aauaccauugaggcagagg

SEQ ID NO: 586110 - RNA, 20 nt, Artificial Sequence
  Synthetic
aaauaccauugaggcagagg

SEQ ID NO: 586111 - RNA, 21 nt, Artificial Sequence
  Synthetic
gaaauaccauugaggcagagg

SEQ ID NO: 586112 - RNA, 22 nt, Artificial Sequence
  Synthetic
agaaauaccauugaggcagagg

SEQ ID NO: 586113 - RNA, 23 nt, Artificial Sequence
  Synthetic
gagaaauaccauugaggcagagg

SEQ ID NO: 586114 - RNA, 24 nt, Artificial Sequence
  Synthetic
agagaaauaccauugaggcagagg

SEQ ID NO: 586115 - RNA, 18 nt, Artificial Sequence
  Synthetic
ggaaagcaugggcagagg

SEQ ID NO: 586116 - RNA, 19 nt, Artificial Sequence
  Synthetic
uggaaagcaugggcagagg

SEQ ID NO: 586117 - RNA, 20 nt, Artificial Sequence
  Synthetic
guggaaagcaugggcagagg

SEQ ID NO: 586118 - RNA, 21 nt, Artificial Sequence
  Synthetic
uguggaaagcaugggcagagg

SEQ ID NO: 586119 - RNA, 22 nt, Artificial Sequence
  Synthetic
auguggaaagcaugggcagagg

SEQ ID NO: 586120 - RNA, 23 nt, Artificial Sequence
  Synthetic
uauguggaaagcaugggcagagg

SEQ ID NO: 586121 - RNA, 24 nt, Artificial Sequence
  Synthetic
cuauguggaaagcaugggcagagg

SEQ ID NO: 586122 - RNA, 18 nt, Artificial Sequence
  Synthetic
augggggagaugcagagg

SEQ ID NO: 586123 - RNA, 19 nt, Artificial Sequence
  Synthetic
gaugggggagaugcagagg

SEQ ID NO: 586124 - RNA, 20 nt, Artificial Sequence
  Synthetic
agaugggggagaugcagagg

SEQ ID NO: 586125 - RNA, 21 nt, Artificial Sequence
  Synthetic
aagaugggggagaugcagagg

SEQ ID NO: 586126 - RNA, 22 nt, Artificial Sequence
  Synthetic
uaagaugggggagaugcagagg

SEQ ID NO: 586127 - RNA, 23 nt, Artificial Sequence
  Synthetic
cuaagaugggggagaugcagagg

SEQ ID NO: 586128 - RNA, 24 nt, Artificial Sequence
  Synthetic
ccuaagaugggggagaugcagagg

SEQ ID NO: 586129 - RNA, 18 nt, Artificial Sequence
  Synthetic
aaggagguggugcagagg

SEQ ID NO: 586130 - RNA, 19 nt, Artificial Sequence
  Synthetic
aaaggagguggugcagagg

SEQ ID NO: 586131 - RNA, 20 nt, Artificial Sequence
  Synthetic
uaaaggagguggugcagagg

SEQ ID NO: 586132 - RNA, 21 nt, Artificial Sequence
  Synthetic
guaaaggagguggugcagagg

SEQ ID NO: 586133 - RNA, 22 nt, Artificial Sequence
  Synthetic
aguaaaggagguggugcagagg

SEQ ID NO: 586134 - RNA, 23 nt, Artificial Sequence
  Synthetic
aaguaaaggagguggugcagagg

SEQ ID NO: 586135 - RNA, 24 nt, Artificial Sequence
  Synthetic
caaguaaaggagguggugcagagg

SEQ ID NO: 586136 - RNA, 18 nt, Artificial Sequence
  Synthetic
ucucucuagucucagagg

SEQ ID NO: 586137 - RNA, 19 nt, Artificial Sequence
  Synthetic
uucucucuagucucagagg

SEQ ID NO: 586138 - RNA, 20 nt, Artificial Sequence
  Synthetic
cuucucucuagucucagagg

SEQ ID NO: 586139 - RNA, 21 nt, Artificial Sequence
  Synthetic
ccuucucucuagucucagagg

SEQ ID NO: 586140 - RNA, 22 nt, Artificial Sequence
  Synthetic
uccuucucucuagucucagagg

SEQ ID NO: 586141 - RNA, 23 nt, Artificial Sequence
  Synthetic
auccuucucucuagucucagagg

SEQ ID NO: 586142 - RNA, 24 nt, Artificial Sequence
  Synthetic
cauccuucucucuagucucagagg

SEQ ID NO: 586143 - RNA, 18 nt, Artificial Sequence
  Synthetic
cauaaaaauauucagagg

SEQ ID NO: 586144 - RNA, 19 nt, Artificial Sequence
  Synthetic
acauaaaaauauucagagg

SEQ ID NO: 586145 - RNA, 20 nt, Artificial Sequence
  Synthetic
aacauaaaaauauucagagg

SEQ ID NO: 586146 - RNA, 21 nt, Artificial Sequence
  Synthetic
caacauaaaaauauucagagg

SEQ ID NO: 586147 - RNA, 22 nt, Artificial Sequence
  Synthetic
ccaacauaaaaauauucagagg

SEQ ID NO: 586148 - RNA, 23 nt, Artificial Sequence
  Synthetic
uccaacauaaaaauauucagagg

SEQ ID NO: 586149 - RNA, 24 nt, Artificial Sequence
  Synthetic
cuccaacauaaaaauauucagagg

SEQ ID NO: 586150 - RNA, 18 nt, Artificial Sequence
  Synthetic
caugguagaaaagagagg

SEQ ID NO: 586151 - RNA, 19 nt, Artificial Sequence
  Synthetic
acaugguagaaaagagagg

SEQ ID NO: 586152 - RNA, 20 nt, Artificial Sequence
  Synthetic
uacaugguagaaaagagagg

SEQ ID NO: 586153 - RNA, 21 nt, Artificial Sequence
  Synthetic
cuacaugguagaaaagagagg

SEQ ID NO: 586154 - RNA, 22 nt, Artificial Sequence
  Synthetic
ccuacaugguagaaaagagagg

SEQ ID NO: 586155 - RNA, 23 nt, Artificial Sequence
  Synthetic
cccuacaugguagaaaagagagg

SEQ ID NO: 586156 - RNA, 24 nt, Artificial Sequence
  Synthetic
acccuacaugguagaaaagagagg

SEQ ID NO: 586157 - RNA, 18 nt, Artificial Sequence
  Synthetic
gucgaaagccaagagagg

SEQ ID NO: 586158 - RNA, 19 nt, Artificial Sequence
  Synthetic
ugucgaaagccaagagagg

SEQ ID NO: 586159 - RNA, 20 nt, Artificial Sequence
  Synthetic
augucgaaagccaagagagg

SEQ ID NO: 586160 - RNA, 21 nt, Artificial Sequence
  Synthetic
caugucgaaagccaagagagg

SEQ ID NO: 586161 - RNA, 22 nt, Artificial Sequence
  Synthetic
gcaugucgaaagccaagagagg

SEQ ID NO: 586162 - RNA, 23 nt, Artificial Sequence
  Synthetic
ggcaugucgaaagccaagagagg

SEQ ID NO: 586163 - RNA, 24 nt, Artificial Sequence
  Synthetic
aggcaugucgaaagccaagagagg

SEQ ID NO: 586164 - RNA, 18 nt, Artificial Sequence
  Synthetic
aaggagcaagaagagagg

SEQ ID NO: 586165 - RNA, 19 nt, Artificial Sequence
  Synthetic
gaaggagcaagaagagagg

SEQ ID NO: 586166 - RNA, 20 nt, Artificial Sequence
  Synthetic
ugaaggagcaagaagagagg

SEQ ID NO: 586167 - RNA, 21 nt, Artificial Sequence
  Synthetic
uugaaggagcaagaagagagg

SEQ ID NO: 586168 - RNA, 22 nt, Artificial Sequence
  Synthetic
auugaaggagcaagaagagagg

SEQ ID NO: 586169 - RNA, 23 nt, Artificial Sequence
  Synthetic
aauugaaggagcaagaagagagg

SEQ ID NO: 586170 - RNA, 24 nt, Artificial Sequence
  Synthetic
aaauugaaggagcaagaagagagg

SEQ ID NO: 586171 - RNA, 18 nt, Artificial Sequence
  Synthetic
cggagggaggaagagagg

SEQ ID NO: 586172 - RNA, 19 nt, Artificial Sequence
  Synthetic
gcggagggaggaagagagg

SEQ ID NO: 586173 - RNA, 20 nt, Artificial Sequence
  Synthetic
agcggagggaggaagagagg

SEQ ID NO: 586174 - RNA, 21 nt, Artificial Sequence
  Synthetic
aagcggagggaggaagagagg

SEQ ID NO: 586175 - RNA, 22 nt, Artificial Sequence
  Synthetic
gaagcggagggaggaagagagg

SEQ ID NO: 586176 - RNA, 23 nt, Artificial Sequence
  Synthetic
agaagcggagggaggaagagagg

SEQ ID NO: 586177 - RNA, 24 nt, Artificial Sequence
  Synthetic
aagaagcggagggaggaagagagg

SEQ ID NO: 586178 - RNA, 18 nt, Artificial Sequence
  Synthetic
gagcauugauaagagagg

SEQ ID NO: 586179 - RNA, 19 nt, Artificial Sequence
  Synthetic
ggagcauugauaagagagg

SEQ ID NO: 586180 - RNA, 20 nt, Artificial Sequence
  Synthetic
gggagcauugauaagagagg

SEQ ID NO: 586181 - RNA, 21 nt, Artificial Sequence
  Synthetic
agggagcauugauaagagagg

SEQ ID NO: 586182 - RNA, 22 nt, Artificial Sequence
  Synthetic
aagggagcauugauaagagagg

SEQ ID NO: 586183 - RNA, 23 nt, Artificial Sequence
  Synthetic
gaagggagcauugauaagagagg

SEQ ID NO: 586184 - RNA, 24 nt, Artificial Sequence
  Synthetic
ggaagggagcauugauaagagagg

SEQ ID NO: 586185 - RNA, 18 nt, Artificial Sequence
  Synthetic
ccaaaagguuaagagagg

SEQ ID NO: 586186 - RNA, 19 nt, Artificial Sequence
  Synthetic
accaaaagguuaagagagg

SEQ ID NO: 586187 - RNA, 20 nt, Artificial Sequence
  Synthetic
uaccaaaagguuaagagagg

SEQ ID NO: 586188 - RNA, 21 nt, Artificial Sequence
  Synthetic
cuaccaaaagguuaagagagg

SEQ ID NO: 586189 - RNA, 22 nt, Artificial Sequence
  Synthetic
acuaccaaaagguuaagagagg

SEQ ID NO: 586190 - RNA, 23 nt, Artificial Sequence
  Synthetic
aacuaccaaaagguuaagagagg

SEQ ID NO: 586191 - RNA, 24 nt, Artificial Sequence
  Synthetic
aaacuaccaaaagguuaagagagg

SEQ ID NO: 586192 - RNA, 18 nt, Artificial Sequence
  Synthetic
cucucgaaaccagagagg

SEQ ID NO: 586193 - RNA, 19 nt, Artificial Sequence
  Synthetic
ucucucgaaaccagagagg

SEQ ID NO: 586194 - RNA, 20 nt, Artificial Sequence
  Synthetic
cucucucgaaaccagagagg

SEQ ID NO: 586195 - RNA, 21 nt, Artificial Sequence
  Synthetic
ucucucucgaaaccagagagg

SEQ ID NO: 586196 - RNA, 22 nt, Artificial Sequence
  Synthetic
cucucucucgaaaccagagagg

SEQ ID NO: 586197 - RNA, 23 nt, Artificial Sequence
  Synthetic
ucucucucucgaaaccagagagg

SEQ ID NO: 586198 - RNA, 24 nt, Artificial Sequence
  Synthetic
cucucucucucgaaaccagagagg

SEQ ID NO: 586199 - RNA, 18 nt, Artificial Sequence
  Synthetic
augugacaaccagagagg

SEQ ID NO: 586200 - RNA, 19 nt, Artificial Sequence
  Synthetic
gaugugacaaccagagagg

SEQ ID NO: 586201 - RNA, 20 nt, Artificial Sequence
  Synthetic
agaugugacaaccagagagg

SEQ ID NO: 586202 - RNA, 21 nt, Artificial Sequence
  Synthetic
gagaugugacaaccagagagg

SEQ ID NO: 586203 - RNA, 22 nt, Artificial Sequence
  Synthetic
agagaugugacaaccagagagg

SEQ ID NO: 586204 - RNA, 23 nt, Artificial Sequence
  Synthetic
cagagaugugacaaccagagagg

SEQ ID NO: 586205 - RNA, 24 nt, Artificial Sequence
  Synthetic
ccagagaugugacaaccagagagg

SEQ ID NO: 586206 - RNA, 18 nt, Artificial Sequence
  Synthetic
gauuuuucaagagagagg

SEQ ID NO: 586207 - RNA, 19 nt, Artificial Sequence
  Synthetic
ugauuuuucaagagagagg

SEQ ID NO: 586208 - RNA, 20 nt, Artificial Sequence
  Synthetic
uugauuuuucaagagagagg

SEQ ID NO: 586209 - RNA, 21 nt, Artificial Sequence
  Synthetic
cuugauuuuucaagagagagg

SEQ ID NO: 586210 - RNA, 22 nt, Artificial Sequence
  Synthetic
acuugauuuuucaagagagagg

SEQ ID NO: 586211 - RNA, 23 nt, Artificial Sequence
  Synthetic
uacuugauuuuucaagagagagg

SEQ ID NO: 586212 - RNA, 24 nt, Artificial Sequence
  Synthetic
uuacuugauuuuucaagagagagg

SEQ ID NO: 586213 - RNA, 18 nt, Artificial Sequence
  Synthetic
gagagagagagagagagg

SEQ ID NO: 586214 - RNA, 21 nt, Artificial Sequence
  Synthetic
ggagagagagagagagagagg

SEQ ID NO: 586215 - RNA, 22 nt, Artificial Sequence
  Synthetic
gggagagagagagagagagagg

SEQ ID NO: 586216 - RNA, 23 nt, Artificial Sequence
  Synthetic
ggggagagagagagagagagagg

SEQ ID NO: 586217 - RNA, 24 nt, Artificial Sequence
  Synthetic
gggggagagagagagagagagagg

SEQ ID NO: 586218 - RNA, 19 nt, Artificial Sequence
  Synthetic
ggagagagagagagagagg

SEQ ID NO: 586219 - RNA, 20 nt, Artificial Sequence
  Synthetic
uggagagagagagagagagg

SEQ ID NO: 586220 - RNA, 21 nt, Artificial Sequence
  Synthetic
auggagagagagagagagagg

SEQ ID NO: 586221 - RNA, 22 nt, Artificial Sequence
  Synthetic
uauggagagagagagagagagg

SEQ ID NO: 586222 - RNA, 23 nt, Artificial Sequence
  Synthetic
auauggagagagagagagagagg

SEQ ID NO: 586223 - RNA, 24 nt, Artificial Sequence
  Synthetic
gauauggagagagagagagagagg

SEQ ID NO: 586224 - RNA, 18 nt, Artificial Sequence
  Synthetic
gggaggaaaggagagagg

SEQ ID NO: 586225 - RNA, 19 nt, Artificial Sequence
  Synthetic
agggaggaaaggagagagg

SEQ ID NO: 586226 - RNA, 20 nt, Artificial Sequence
  Synthetic
aagggaggaaaggagagagg

SEQ ID NO: 586227 - RNA, 21 nt, Artificial Sequence
  Synthetic
gaagggaggaaaggagagagg

SEQ ID NO: 586228 - RNA, 22 nt, Artificial Sequence
  Synthetic
agaagggaggaaaggagagagg

SEQ ID NO: 586229 - RNA, 23 nt, Artificial Sequence
  Synthetic
aagaagggaggaaaggagagagg

SEQ ID NO: 586230 - RNA, 24 nt, Artificial Sequence
  Synthetic
aaagaagggaggaaaggagagagg

SEQ ID NO: 586231 - RNA, 18 nt, Artificial Sequence
  Synthetic
gagagagagggagagagg

SEQ ID NO: 586232 - RNA, 19 nt, Artificial Sequence
  Synthetic
agagagagagggagagagg

SEQ ID NO: 586233 - RNA, 20 nt, Artificial Sequence
  Synthetic
gagagagagagggagagagg

SEQ ID NO: 586234 - RNA, 21 nt, Artificial Sequence
  Synthetic
agagagagagagggagagagg

SEQ ID NO: 586235 - RNA, 22 nt, Artificial Sequence
  Synthetic
gagagagagagagggagagagg

SEQ ID NO: 586236 - RNA, 23 nt, Artificial Sequence
  Synthetic
agagagagagagagggagagagg

SEQ ID NO: 586237 - RNA, 24 nt, Artificial Sequence
  Synthetic
gagagagagagagagggagagagg

SEQ ID NO: 586238 - RNA, 18 nt, Artificial Sequence
  Synthetic
gggagagagggagagagg

SEQ ID NO: 586239 - RNA, 19 nt, Artificial Sequence
  Synthetic
agggagagagggagagagg

SEQ ID NO: 586240 - RNA, 20 nt, Artificial Sequence
  Synthetic
gagggagagagggagagagg

SEQ ID NO: 586241 - RNA, 21 nt, Artificial Sequence
  Synthetic
agagggagagagggagagagg

SEQ ID NO: 586242 - RNA, 22 nt, Artificial Sequence
  Synthetic
gagagggagagagggagagagg

SEQ ID NO: 586243 - RNA, 23 nt, Artificial Sequence
  Synthetic
agagagggagagagggagagagg

SEQ ID NO: 586244 - RNA, 24 nt, Artificial Sequence
  Synthetic
gagagagggagagagggagagagg

SEQ ID NO: 586245 - RNA, 18 nt, Artificial Sequence
  Synthetic
ggggaguagggagagagg

SEQ ID NO: 586246 - RNA, 19 nt, Artificial Sequence
  Synthetic
uggggaguagggagagagg

SEQ ID NO: 586247 - RNA, 20 nt, Artificial Sequence
  Synthetic
uuggggaguagggagagagg

SEQ ID NO: 586248 - RNA, 21 nt, Artificial Sequence
  Synthetic
auuggggaguagggagagagg

SEQ ID NO: 586249 - RNA, 22 nt, Artificial Sequence
  Synthetic
cauuggggaguagggagagagg

SEQ ID NO: 586250 - RNA, 23 nt, Artificial Sequence
  Synthetic
acauuggggaguagggagagagg

SEQ ID NO: 586251 - RNA, 24 nt, Artificial Sequence
  Synthetic
uacauuggggaguagggagagagg

SEQ ID NO: 586252 - RNA, 18 nt, Artificial Sequence
  Synthetic
aaaguagguggagagagg

SEQ ID NO: 586253 - RNA, 19 nt, Artificial Sequence
  Synthetic
aaaaguagguggagagagg

SEQ ID NO: 586254 - RNA, 20 nt, Artificial Sequence
  Synthetic
gaaaaguagguggagagagg

SEQ ID NO: 586255 - RNA, 21 nt, Artificial Sequence
  Synthetic
ugaaaaguagguggagagagg

SEQ ID NO: 586256 - RNA, 22 nt, Artificial Sequence
  Synthetic
uugaaaaguagguggagagagg

SEQ ID NO: 586257 - RNA, 23 nt, Artificial Sequence
  Synthetic
auugaaaaguagguggagagagg

SEQ ID NO: 586258 - RNA, 24 nt, Artificial Sequence
  Synthetic
uauugaaaaguagguggagagagg

SEQ ID NO: 586259 - RNA, 18 nt, Artificial Sequence
  Synthetic
acucagaagggcgagagg

SEQ ID NO: 586260 - RNA, 19 nt, Artificial Sequence
  Synthetic
gacucagaagggcgagagg

SEQ ID NO: 586261 - RNA, 20 nt, Artificial Sequence
  Synthetic
agacucagaagggcgagagg

SEQ ID NO: 586262 - RNA, 21 nt, Artificial Sequence
  Synthetic
gagacucagaagggcgagagg

SEQ ID NO: 586263 - RNA, 22 nt, Artificial Sequence
  Synthetic
ggagacucagaagggcgagagg

SEQ ID NO: 586264 - RNA, 23 nt, Artificial Sequence
  Synthetic
uggagacucagaagggcgagagg

SEQ ID NO: 586265 - RNA, 24 nt, Artificial Sequence
  Synthetic
cuggagacucagaagggcgagagg

SEQ ID NO: 586266 - RNA, 18 nt, Artificial Sequence
  Synthetic
ucccagcuacucgagagg

SEQ ID NO: 586267 - RNA, 19 nt, Artificial Sequence
  Synthetic
gucccagcuacucgagagg

SEQ ID NO: 586268 - RNA, 20 nt, Artificial Sequence
  Synthetic
agucccagcuacucgagagg

SEQ ID NO: 586269 - RNA, 21 nt, Artificial Sequence
  Synthetic
uagucccagcuacucgagagg

SEQ ID NO: 586270 - RNA, 22 nt, Artificial Sequence
  Synthetic
guagucccagcuacucgagagg

SEQ ID NO: 586271 - RNA, 23 nt, Artificial Sequence
  Synthetic
uguagucccagcuacucgagagg

SEQ ID NO: 586272 - RNA, 24 nt, Artificial Sequence
  Synthetic
cuguagucccagcuacucgagagg

SEQ ID NO: 586273 - RNA, 18 nt, Artificial Sequence
  Synthetic
gguuaaguaaaggagagg

SEQ ID NO: 586274 - RNA, 19 nt, Artificial Sequence
  Synthetic
ggguuaaguaaaggagagg

SEQ ID NO: 586275 - RNA, 20 nt, Artificial Sequence
  Synthetic
aggguuaaguaaaggagagg

SEQ ID NO: 586276 - RNA, 21 nt, Artificial Sequence
  Synthetic
aaggguuaaguaaaggagagg

SEQ ID NO: 586277 - RNA, 22 nt, Artificial Sequence
  Synthetic
caaggguuaaguaaaggagagg

SEQ ID NO: 586278 - RNA, 23 nt, Artificial Sequence
  Synthetic
ucaaggguuaaguaaaggagagg

SEQ ID NO: 586279 - RNA, 24 nt, Artificial Sequence
  Synthetic
gucaaggguuaaguaaaggagagg

SEQ ID NO: 586280 - RNA, 21 nt, Artificial Sequence
  Synthetic
auagggaggcccaaggagagg

SEQ ID NO: 586281 - RNA, 22 nt, Artificial Sequence
  Synthetic
aauagggaggcccaaggagagg

SEQ ID NO: 586282 - RNA, 23 nt, Artificial Sequence
  Synthetic
gaauagggaggcccaaggagagg

SEQ ID NO: 586283 - RNA, 24 nt, Artificial Sequence
  Synthetic
ggaauagggaggcccaaggagagg

SEQ ID NO: 586284 - RNA, 18 nt, Artificial Sequence
  Synthetic
aaggcuaggaaggagagg

SEQ ID NO: 586285 - RNA, 19 nt, Artificial Sequence
  Synthetic
gaaggcuaggaaggagagg

SEQ ID NO: 586286 - RNA, 20 nt, Artificial Sequence
  Synthetic
ggaaggcuaggaaggagagg

SEQ ID NO: 586287 - RNA, 21 nt, Artificial Sequence
  Synthetic
gggaaggcuaggaaggagagg

SEQ ID NO: 586288 - RNA, 22 nt, Artificial Sequence
  Synthetic
ggggaaggcuaggaaggagagg

SEQ ID NO: 586289 - RNA, 23 nt, Artificial Sequence
  Synthetic
uggggaaggcuaggaaggagagg

SEQ ID NO: 586290 - RNA, 24 nt, Artificial Sequence
  Synthetic
cuggggaaggcuaggaaggagagg

SEQ ID NO: 586291 - RNA, 18 nt, Artificial Sequence
  Synthetic
gaagagaggcaggagagg

SEQ ID NO: 586292 - RNA, 19 nt, Artificial Sequence
  Synthetic
agaagagaggcaggagagg

SEQ ID NO: 586293 - RNA, 20 nt, Artificial Sequence
  Synthetic
aagaagagaggcaggagagg

SEQ ID NO: 586294 - RNA, 21 nt, Artificial Sequence
  Synthetic
caagaagagaggcaggagagg

SEQ ID NO: 586295 - RNA, 22 nt, Artificial Sequence
  Synthetic
gcaagaagagaggcaggagagg

SEQ ID NO: 586296 - RNA, 23 nt, Artificial Sequence
  Synthetic
agcaagaagagaggcaggagagg

SEQ ID NO: 586297 - RNA, 24 nt, Artificial Sequence
  Synthetic
gagcaagaagagaggcaggagagg

SEQ ID NO: 586298 - RNA, 18 nt, Artificial Sequence
  Synthetic
gacagagacagggagagg

SEQ ID NO: 586299 - RNA, 19 nt, Artificial Sequence
  Synthetic
ugacagagacagggagagg

SEQ ID NO: 586300 - RNA, 20 nt, Artificial Sequence
  Synthetic
gugacagagacagggagagg

SEQ ID NO: 586301 - RNA, 21 nt, Artificial Sequence
  Synthetic
agugacagagacagggagagg

SEQ ID NO: 586302 - RNA, 22 nt, Artificial Sequence
  Synthetic
gagugacagagacagggagagg

SEQ ID NO: 586303 - RNA, 23 nt, Artificial Sequence
  Synthetic
agagugacagagacagggagagg

SEQ ID NO: 586304 - RNA, 24 nt, Artificial Sequence
  Synthetic
gagagugacagagacagggagagg

SEQ ID NO: 586305 - RNA, 18 nt, Artificial Sequence
  Synthetic
agggagagaguggagagg

SEQ ID NO: 586306 - RNA, 19 nt, Artificial Sequence
  Synthetic
gagggagagaguggagagg

SEQ ID NO: 586307 - RNA, 20 nt, Artificial Sequence
  Synthetic
agagggagagaguggagagg

SEQ ID NO: 586308 - RNA, 21 nt, Artificial Sequence
  Synthetic
gagagggagagaguggagagg

SEQ ID NO: 586309 - RNA, 22 nt, Artificial Sequence
  Synthetic
agagagggagagaguggagagg

SEQ ID NO: 586310 - RNA, 23 nt, Artificial Sequence
  Synthetic
gagagagggagagaguggagagg

SEQ ID NO: 586311 - RNA, 24 nt, Artificial Sequence
  Synthetic
ggagagagggagagaguggagagg

SEQ ID NO: 586312 - RNA, 18 nt, Artificial Sequence
  Synthetic
uauggggguguggagagg

SEQ ID NO: 586313 - RNA, 19 nt, Artificial Sequence
  Synthetic
guauggggguguggagagg

SEQ ID NO: 586314 - RNA, 20 nt, Artificial Sequence
  Synthetic
gguauggggguguggagagg

SEQ ID NO: 586315 - RNA, 21 nt, Artificial Sequence
  Synthetic
ggguauggggguguggagagg

SEQ ID NO: 586316 - RNA, 22 nt, Artificial Sequence
  Synthetic
uggguauggggguguggagagg

SEQ ID NO: 586317 - RNA, 23 nt, Artificial Sequence
  Synthetic
guggguauggggguguggagagg

SEQ ID NO: 586318 - RNA, 24 nt, Artificial Sequence
  Synthetic
gguggguauggggguguggagagg

SEQ ID NO: 586319 - RNA, 18 nt, Artificial Sequence
  Synthetic
agguacuauuuggagagg

SEQ ID NO: 586320 - RNA, 19 nt, Artificial Sequence
  Synthetic
aagguacuauuuggagagg

SEQ ID NO: 586321 - RNA, 20 nt, Artificial Sequence
  Synthetic
aaagguacuauuuggagagg

SEQ ID NO: 586322 - RNA, 21 nt, Artificial Sequence
  Synthetic
aaaagguacuauuuggagagg

SEQ ID NO: 586323 - RNA, 22 nt, Artificial Sequence
  Synthetic
gaaaagguacuauuuggagagg

SEQ ID NO: 586324 - RNA, 23 nt, Artificial Sequence
  Synthetic
cgaaaagguacuauuuggagagg

SEQ ID NO: 586325 - RNA, 24 nt, Artificial Sequence
  Synthetic
acgaaaagguacuauuuggagagg

SEQ ID NO: 586326 - RNA, 18 nt, Artificial Sequence
  Synthetic
aucagauccccugagagg

SEQ ID NO: 586327 - RNA, 19 nt, Artificial Sequence
  Synthetic
aaucagauccccugagagg

SEQ ID NO: 586328 - RNA, 20 nt, Artificial Sequence
  Synthetic
caaucagauccccugagagg

SEQ ID NO: 586329 - RNA, 21 nt, Artificial Sequence
  Synthetic
acaaucagauccccugagagg

SEQ ID NO: 586330 - RNA, 22 nt, Artificial Sequence
  Synthetic
aacaaucagauccccugagagg

SEQ ID NO: 586331 - RNA, 23 nt, Artificial Sequence
  Synthetic
uaacaaucagauccccugagagg

SEQ ID NO: 586332 - RNA, 24 nt, Artificial Sequence
  Synthetic
cuaacaaucagauccccugagagg

SEQ ID NO: 586333 - RNA, 18 nt, Artificial Sequence
  Synthetic
uuaacacaucuugagagg

SEQ ID NO: 586334 - RNA, 19 nt, Artificial Sequence
  Synthetic
auuaacacaucuugagagg

SEQ ID NO: 586335 - RNA, 20 nt, Artificial Sequence
  Synthetic
gauuaacacaucuugagagg

SEQ ID NO: 586336 - RNA, 21 nt, Artificial Sequence
  Synthetic
ggauuaacacaucuugagagg

SEQ ID NO: 586337 - RNA, 22 nt, Artificial Sequence
  Synthetic
gggauuaacacaucuugagagg

SEQ ID NO: 586338 - RNA, 23 nt, Artificial Sequence
  Synthetic
ggggauuaacacaucuugagagg

SEQ ID NO: 586339 - RNA, 24 nt, Artificial Sequence
  Synthetic
aggggauuaacacaucuugagagg

SEQ ID NO: 586340 - RNA, 21 nt, Artificial Sequence
  Synthetic
uaaucccagcacuuugagagg

SEQ ID NO: 586341 - RNA, 22 nt, Artificial Sequence
  Synthetic
guaaucccagcacuuugagagg

SEQ ID NO: 586342 - RNA, 23 nt, Artificial Sequence
  Synthetic
uguaaucccagcacuuugagagg

SEQ ID NO: 586343 - RNA, 24 nt, Artificial Sequence
  Synthetic
cuguaaucccagcacuuugagagg

SEQ ID NO: 586344 - RNA, 18 nt, Artificial Sequence
  Synthetic
agugagaauuuugagagg

SEQ ID NO: 586345 - RNA, 19 nt, Artificial Sequence
  Synthetic
gagugagaauuuugagagg

SEQ ID NO: 586346 - RNA, 20 nt, Artificial Sequence
  Synthetic
agagugagaauuuugagagg

SEQ ID NO: 586347 - RNA, 21 nt, Artificial Sequence
  Synthetic
gagagugagaauuuugagagg

SEQ ID NO: 586348 - RNA, 22 nt, Artificial Sequence
  Synthetic
agagagugagaauuuugagagg

SEQ ID NO: 586349 - RNA, 23 nt, Artificial Sequence
  Synthetic
gagagagugagaauuuugagagg

SEQ ID NO: 586350 - RNA, 24 nt, Artificial Sequence
  Synthetic
ggagagagugagaauuuugagagg

SEQ ID NO: 586351 - RNA, 18 nt, Artificial Sequence
  Synthetic
ggaagacagcaauagagg

SEQ ID NO: 586352 - RNA, 19 nt, Artificial Sequence
  Synthetic
aggaagacagcaauagagg

SEQ ID NO: 586353 - RNA, 20 nt, Artificial Sequence
  Synthetic
aaggaagacagcaauagagg

SEQ ID NO: 586354 - RNA, 21 nt, Artificial Sequence
  Synthetic
aaaggaagacagcaauagagg

SEQ ID NO: 586355 - RNA, 22 nt, Artificial Sequence
  Synthetic
caaaggaagacagcaauagagg

SEQ ID NO: 586356 - RNA, 23 nt, Artificial Sequence
  Synthetic
acaaaggaagacagcaauagagg

SEQ ID NO: 586357 - RNA, 24 nt, Artificial Sequence
  Synthetic
cacaaaggaagacagcaauagagg

SEQ ID NO: 586358 - RNA, 18 nt, Artificial Sequence
  Synthetic
guggagucuacauagagg

SEQ ID NO: 586359 - RNA, 19 nt, Artificial Sequence
  Synthetic
uguggagucuacauagagg

SEQ ID NO: 586360 - RNA, 20 nt, Artificial Sequence
  Synthetic
auguggagucuacauagagg

SEQ ID NO: 586361 - RNA, 21 nt, Artificial Sequence
  Synthetic
uauguggagucuacauagagg

SEQ ID NO: 586362 - RNA, 22 nt, Artificial Sequence
  Synthetic
cuauguggagucuacauagagg

SEQ ID NO: 586363 - RNA, 23 nt, Artificial Sequence
  Synthetic
ucuauguggagucuacauagagg

SEQ ID NO: 586364 - RNA, 24 nt, Artificial Sequence
  Synthetic
gucuauguggagucuacauagagg

SEQ ID NO: 586365 - RNA, 18 nt, Artificial Sequence
  Synthetic
uucgacagugcauagagg

SEQ ID NO: 586366 - RNA, 19 nt, Artificial Sequence
  Synthetic
auucgacagugcauagagg

SEQ ID NO: 586367 - RNA, 20 nt, Artificial Sequence
  Synthetic
gauucgacagugcauagagg

SEQ ID NO: 586368 - RNA, 21 nt, Artificial Sequence
  Synthetic
ugauucgacagugcauagagg

SEQ ID NO: 586369 - RNA, 22 nt, Artificial Sequence
  Synthetic
uugauucgacagugcauagagg

SEQ ID NO: 586370 - RNA, 23 nt, Artificial Sequence
  Synthetic
auugauucgacagugcauagagg

SEQ ID NO: 586371 - RNA, 24 nt, Artificial Sequence
  Synthetic
aauugauucgacagugcauagagg

SEQ ID NO: 586372 - RNA, 18 nt, Artificial Sequence
  Synthetic
aacacuuggagauagagg

SEQ ID NO: 586373 - RNA, 19 nt, Artificial Sequence
  Synthetic
gaacacuuggagauagagg

SEQ ID NO: 586374 - RNA, 20 nt, Artificial Sequence
  Synthetic
ugaacacuuggagauagagg

SEQ ID NO: 586375 - RNA, 21 nt, Artificial Sequence
  Synthetic
cugaacacuuggagauagagg

SEQ ID NO: 586376 - RNA, 22 nt, Artificial Sequence
  Synthetic
acugaacacuuggagauagagg

SEQ ID NO: 586377 - RNA, 23 nt, Artificial Sequence
  Synthetic
aacugaacacuuggagauagagg

SEQ ID NO: 586378 - RNA, 24 nt, Artificial Sequence
  Synthetic
caacugaacacuuggagauagagg

SEQ ID NO: 586379 - RNA, 18 nt, Artificial Sequence
  Synthetic
ccuggggacuacuagagg

SEQ ID NO: 586380 - RNA, 19 nt, Artificial Sequence
  Synthetic
cccuggggacuacuagagg

SEQ ID NO: 586381 - RNA, 20 nt, Artificial Sequence
  Synthetic
acccuggggacuacuagagg

SEQ ID NO: 586382 - RNA, 21 nt, Artificial Sequence
  Synthetic
gacccuggggacuacuagagg

SEQ ID NO: 586383 - RNA, 22 nt, Artificial Sequence
  Synthetic
agacccuggggacuacuagagg

SEQ ID NO: 586384 - RNA, 23 nt, Artificial Sequence
  Synthetic
uagacccuggggacuacuagagg

SEQ ID NO: 586385 - RNA, 24 nt, Artificial Sequence
  Synthetic
auagacccuggggacuacuagagg

SEQ ID NO: 586386 - RNA, 18 nt, Artificial Sequence
  Synthetic
guaugucuuugcuagagg

SEQ ID NO: 586387 - RNA, 19 nt, Artificial Sequence
  Synthetic
uguaugucuuugcuagagg

SEQ ID NO: 586388 - RNA, 20 nt, Artificial Sequence
  Synthetic
cuguaugucuuugcuagagg

SEQ ID NO: 586389 - RNA, 21 nt, Artificial Sequence
  Synthetic
acuguaugucuuugcuagagg

SEQ ID NO: 586390 - RNA, 22 nt, Artificial Sequence
  Synthetic
gacuguaugucuuugcuagagg

SEQ ID NO: 586391 - RNA, 23 nt, Artificial Sequence
  Synthetic
ugacuguaugucuuugcuagagg

SEQ ID NO: 586392 - RNA, 24 nt, Artificial Sequence
  Synthetic
augacuguaugucuuugcuagagg

SEQ ID NO: 586393 - RNA, 18 nt, Artificial Sequence
  Synthetic
aaugccuuuaaguagagg

SEQ ID NO: 586394 - RNA, 19 nt, Artificial Sequence
  Synthetic
uaaugccuuuaaguagagg

SEQ ID NO: 586395 - RNA, 20 nt, Artificial Sequence
  Synthetic
auaaugccuuuaaguagagg

SEQ ID NO: 586396 - RNA, 21 nt, Artificial Sequence
  Synthetic
uauaaugccuuuaaguagagg

SEQ ID NO: 586397 - RNA, 22 nt, Artificial Sequence
  Synthetic
auauaaugccuuuaaguagagg

SEQ ID NO: 586398 - RNA, 23 nt, Artificial Sequence
  Synthetic
aauauaaugccuuuaaguagagg

SEQ ID NO: 586399 - RNA, 24 nt, Artificial Sequence
  Synthetic
gaauauaaugccuuuaaguagagg

SEQ ID NO: 586400 - RNA, 18 nt, Artificial Sequence
  Synthetic
uuaaaugugucguagagg

SEQ ID NO: 586401 - RNA, 19 nt, Artificial Sequence
  Synthetic
auuaaaugugucguagagg

SEQ ID NO: 586402 - RNA, 20 nt, Artificial Sequence
  Synthetic
aauuaaaugugucguagagg

SEQ ID NO: 586403 - RNA, 21 nt, Artificial Sequence
  Synthetic
uaauuaaaugugucguagagg

SEQ ID NO: 586404 - RNA, 22 nt, Artificial Sequence
  Synthetic
guaauuaaaugugucguagagg

SEQ ID NO: 586405 - RNA, 23 nt, Artificial Sequence
  Synthetic
gguaauuaaaugugucguagagg

SEQ ID NO: 586406 - RNA, 24 nt, Artificial Sequence
  Synthetic
agguaauuaaaugugucguagagg

SEQ ID NO: 586407 - RNA, 18 nt, Artificial Sequence
  Synthetic
ugaacuguaacuuagagg

SEQ ID NO: 586408 - RNA, 19 nt, Artificial Sequence
  Synthetic
augaacuguaacuuagagg

SEQ ID NO: 586409 - RNA, 20 nt, Artificial Sequence
  Synthetic
caugaacuguaacuuagagg

SEQ ID NO: 586410 - RNA, 21 nt, Artificial Sequence
  Synthetic
acaugaacuguaacuuagagg

SEQ ID NO: 586411 - RNA, 22 nt, Artificial Sequence
  Synthetic
aacaugaacuguaacuuagagg

SEQ ID NO: 586412 - RNA, 23 nt, Artificial Sequence
  Synthetic
caacaugaacuguaacuuagagg

SEQ ID NO: 586413 - RNA, 24 nt, Artificial Sequence
  Synthetic
gcaacaugaacuguaacuuagagg

SEQ ID NO: 586414 - RNA, 18 nt, Artificial Sequence
  Synthetic
auuauucaagguuagagg

SEQ ID NO: 586415 - RNA, 19 nt, Artificial Sequence
  Synthetic
aauuauucaagguuagagg

SEQ ID NO: 586416 - RNA, 20 nt, Artificial Sequence
  Synthetic
aaauuauucaagguuagagg

SEQ ID NO: 586417 - RNA, 21 nt, Artificial Sequence
  Synthetic
aaaauuauucaagguuagagg

SEQ ID NO: 586418 - RNA, 22 nt, Artificial Sequence
  Synthetic
aaaaauuauucaagguuagagg

SEQ ID NO: 586419 - RNA, 23 nt, Artificial Sequence
  Synthetic
aaaaaauuauucaagguuagagg

SEQ ID NO: 586420 - RNA, 24 nt, Artificial Sequence
  Synthetic
uaaaaaauuauucaagguuagagg

SEQ ID NO: 586421 - RNA, 18 nt, Artificial Sequence
  Synthetic
ugccaaguauuuuagagg

SEQ ID NO: 586422 - RNA, 19 nt, Artificial Sequence
  Synthetic
augccaaguauuuuagagg

SEQ ID NO: 586423 - RNA, 20 nt, Artificial Sequence
  Synthetic
uaugccaaguauuuuagagg

SEQ ID NO: 586424 - RNA, 21 nt, Artificial Sequence
  Synthetic
auaugccaaguauuuuagagg

SEQ ID NO: 586425 - RNA, 22 nt, Artificial Sequence
  Synthetic
cauaugccaaguauuuuagagg

SEQ ID NO: 586426 - RNA, 23 nt, Artificial Sequence
  Synthetic
acauaugccaaguauuuuagagg

SEQ ID NO: 586427 - RNA, 24 nt, Artificial Sequence
  Synthetic
uacauaugccaaguauuuuagagg

SEQ ID NO: 586428 - RNA, 18 nt, Artificial Sequence
  Synthetic
cuauuauuauuuuagagg

SEQ ID NO: 586429 - RNA, 19 nt, Artificial Sequence
  Synthetic
acuauuauuauuuuagagg

SEQ ID NO: 586430 - RNA, 20 nt, Artificial Sequence
  Synthetic
uacuauuauuauuuuagagg

SEQ ID NO: 586431 - RNA, 21 nt, Artificial Sequence
  Synthetic
uuacuauuauuauuuuagagg

SEQ ID NO: 586432 - RNA, 22 nt, Artificial Sequence
  Synthetic
auuacuauuauuauuuuagagg

SEQ ID NO: 586433 - RNA, 23 nt, Artificial Sequence
  Synthetic
cauuacuauuauuauuuuagagg

SEQ ID NO: 586434 - RNA, 24 nt, Artificial Sequence
  Synthetic
ucauuacuauuauuauuuuagagg

SEQ ID NO: 586435 - RNA, 18 nt, Artificial Sequence
  Synthetic
gugugcaagcaaacgagg

SEQ ID NO: 586436 - RNA, 19 nt, Artificial Sequence
  Synthetic
agugugcaagcaaacgagg

SEQ ID NO: 586437 - RNA, 20 nt, Artificial Sequence
  Synthetic
gagugugcaagcaaacgagg

SEQ ID NO: 586438 - RNA, 21 nt, Artificial Sequence
  Synthetic
ggagugugcaagcaaacgagg

SEQ ID NO: 586439 - RNA, 22 nt, Artificial Sequence
  Synthetic
gggagugugcaagcaaacgagg

SEQ ID NO: 586440 - RNA, 23 nt, Artificial Sequence
  Synthetic
agggagugugcaagcaaacgagg

SEQ ID NO: 586441 - RNA, 24 nt, Artificial Sequence
  Synthetic
gagggagugugcaagcaaacgagg

SEQ ID NO: 586442 - RNA, 18 nt, Artificial Sequence
  Synthetic
ugcaaagacacaacgagg

SEQ ID NO: 586443 - RNA, 19 nt, Artificial Sequence
  Synthetic
augcaaagacacaacgagg

SEQ ID NO: 586444 - RNA, 20 nt, Artificial Sequence
  Synthetic
aaugcaaagacacaacgagg

SEQ ID NO: 586445 - RNA, 21 nt, Artificial Sequence
  Synthetic
caaugcaaagacacaacgagg

SEQ ID NO: 586446 - RNA, 22 nt, Artificial Sequence
  Synthetic
gcaaugcaaagacacaacgagg

SEQ ID NO: 586447 - RNA, 23 nt, Artificial Sequence
  Synthetic
ggcaaugcaaagacacaacgagg

SEQ ID NO: 586448 - RNA, 24 nt, Artificial Sequence
  Synthetic
aggcaaugcaaagacacaacgagg

SEQ ID NO: 586449 - RNA, 18 nt, Artificial Sequence
  Synthetic
agacauauuccaacgagg

SEQ ID NO: 586450 - RNA, 19 nt, Artificial Sequence
  Synthetic
gagacauauuccaacgagg

SEQ ID NO: 586451 - RNA, 20 nt, Artificial Sequence
  Synthetic
agagacauauuccaacgagg

SEQ ID NO: 586452 - RNA, 21 nt, Artificial Sequence
  Synthetic
aagagacauauuccaacgagg

SEQ ID NO: 586453 - RNA, 22 nt, Artificial Sequence
  Synthetic
gaagagacauauuccaacgagg

SEQ ID NO: 586454 - RNA, 23 nt, Artificial Sequence
  Synthetic
ugaagagacauauuccaacgagg

SEQ ID NO: 586455 - RNA, 24 nt, Artificial Sequence
  Synthetic
uugaagagacauauuccaacgagg

SEQ ID NO: 586456 - RNA, 18 nt, Artificial Sequence
  Synthetic
guuucguucucaacgagg

SEQ ID NO: 586457 - RNA, 19 nt, Artificial Sequence
  Synthetic
uguuucguucucaacgagg

SEQ ID NO: 586458 - RNA, 20 nt, Artificial Sequence
  Synthetic
uuguuucguucucaacgagg

SEQ ID NO: 586459 - RNA, 21 nt, Artificial Sequence
  Synthetic
uuuguuucguucucaacgagg

SEQ ID NO: 586460 - RNA, 22 nt, Artificial Sequence
  Synthetic
cuuuguuucguucucaacgagg

SEQ ID NO: 586461 - RNA, 23 nt, Artificial Sequence
  Synthetic
ucuuuguuucguucucaacgagg

SEQ ID NO: 586462 - RNA, 24 nt, Artificial Sequence
  Synthetic
gucuuuguuucguucucaacgagg

SEQ ID NO: 586463 - RNA, 21 nt, Artificial Sequence
  Synthetic
uagcacuuugggaggccgagg

SEQ ID NO: 586464 - RNA, 22 nt, Artificial Sequence
  Synthetic
cuagcacuuugggaggccgagg

SEQ ID NO: 586465 - RNA, 23 nt, Artificial Sequence
  Synthetic
ccuagcacuuugggaggccgagg

SEQ ID NO: 586466 - RNA, 24 nt, Artificial Sequence
  Synthetic
uccuagcacuuugggaggccgagg

SEQ ID NO: 586467 - RNA, 18 nt, Artificial Sequence
  Synthetic
ugcuuugggaggccgagg

SEQ ID NO: 586468 - RNA, 19 nt, Artificial Sequence
  Synthetic
gugcuuugggaggccgagg

SEQ ID NO: 586469 - RNA, 20 nt, Artificial Sequence
  Synthetic
ggugcuuugggaggccgagg

SEQ ID NO: 586470 - RNA, 21 nt, Artificial Sequence
  Synthetic
aggugcuuugggaggccgagg

SEQ ID NO: 586471 - RNA, 22 nt, Artificial Sequence
  Synthetic
caggugcuuugggaggccgagg

SEQ ID NO: 586472 - RNA, 23 nt, Artificial Sequence
  Synthetic
ccaggugcuuugggaggccgagg

SEQ ID NO: 586473 - RNA, 24 nt, Artificial Sequence
  Synthetic
uccaggugcuuugggaggccgagg

SEQ ID NO: 586474 - RNA, 18 nt, Artificial Sequence
  Synthetic
agaaauaaagaagcgagg

SEQ ID NO: 586475 - RNA, 19 nt, Artificial Sequence
  Synthetic
uagaaauaaagaagcgagg

SEQ ID NO: 586476 - RNA, 20 nt, Artificial Sequence
  Synthetic
auagaaauaaagaagcgagg

SEQ ID NO: 586477 - RNA, 21 nt, Artificial Sequence
  Synthetic
uauagaaauaaagaagcgagg

SEQ ID NO: 586478 - RNA, 22 nt, Artificial Sequence
  Synthetic
auauagaaauaaagaagcgagg

SEQ ID NO: 586479 - RNA, 23 nt, Artificial Sequence
  Synthetic
aauauagaaauaaagaagcgagg

SEQ ID NO: 586480 - RNA, 24 nt, Artificial Sequence
  Synthetic
uaauauagaaauaaagaagcgagg

SEQ ID NO: 586481 - RNA, 18 nt, Artificial Sequence
  Synthetic
agggaaucagaggcgagg

SEQ ID NO: 586482 - RNA, 19 nt, Artificial Sequence
  Synthetic
cagggaaucagaggcgagg

SEQ ID NO: 586483 - RNA, 20 nt, Artificial Sequence
  Synthetic
gcagggaaucagaggcgagg

SEQ ID NO: 586484 - RNA, 21 nt, Artificial Sequence
  Synthetic
ggcagggaaucagaggcgagg

SEQ ID NO: 586485 - RNA, 22 nt, Artificial Sequence
  Synthetic
aggcagggaaucagaggcgagg

SEQ ID NO: 586486 - RNA, 23 nt, Artificial Sequence
  Synthetic
caggcagggaaucagaggcgagg

SEQ ID NO: 586487 - RNA, 24 nt, Artificial Sequence
  Synthetic
ccaggcagggaaucagaggcgagg

SEQ ID NO: 586488 - RNA, 18 nt, Artificial Sequence
  Synthetic
uguuugccuaagucgagg

SEQ ID NO: 586489 - RNA, 19 nt, Artificial Sequence
  Synthetic
cuguuugccuaagucgagg

SEQ ID NO: 586490 - RNA, 20 nt, Artificial Sequence
  Synthetic
ucuguuugccuaagucgagg

SEQ ID NO: 586491 - RNA, 21 nt, Artificial Sequence
  Synthetic
uucuguuugccuaagucgagg

SEQ ID NO: 586492 - RNA, 22 nt, Artificial Sequence
  Synthetic
guucuguuugccuaagucgagg

SEQ ID NO: 586493 - RNA, 23 nt, Artificial Sequence
  Synthetic
gguucuguuugccuaagucgagg

SEQ ID NO: 586494 - RNA, 24 nt, Artificial Sequence
  Synthetic
agguucuguuugccuaagucgagg

SEQ ID NO: 586495 - RNA, 18 nt, Artificial Sequence
  Synthetic
auaaaaaggaaaaggagg

SEQ ID NO: 586496 - RNA, 19 nt, Artificial Sequence
  Synthetic
gauaaaaaggaaaaggagg

SEQ ID NO: 586497 - RNA, 20 nt, Artificial Sequence
  Synthetic
agauaaaaaggaaaaggagg

SEQ ID NO: 586498 - RNA, 21 nt, Artificial Sequence
  Synthetic
aagauaaaaaggaaaaggagg

SEQ ID NO: 586499 - RNA, 22 nt, Artificial Sequence
  Synthetic
aaagauaaaaaggaaaaggagg

SEQ ID NO: 586500 - RNA, 23 nt, Artificial Sequence
  Synthetic
gaaagauaaaaaggaaaaggagg

SEQ ID NO: 586501 - RNA, 24 nt, Artificial Sequence
  Synthetic
ggaaagauaaaaaggaaaaggagg

SEQ ID NO: 586502 - RNA, 18 nt, Artificial Sequence
  Synthetic
aggauggaguaaaggagg

SEQ ID NO: 586503 - RNA, 19 nt, Artificial Sequence
  Synthetic
caggauggaguaaaggagg

SEQ ID NO: 586504 - RNA, 20 nt, Artificial Sequence
  Synthetic
gcaggauggaguaaaggagg

SEQ ID NO: 586505 - RNA, 21 nt, Artificial Sequence
  Synthetic
ugcaggauggaguaaaggagg

SEQ ID NO: 586506 - RNA, 22 nt, Artificial Sequence
  Synthetic
gugcaggauggaguaaaggagg

SEQ ID NO: 586507 - RNA, 23 nt, Artificial Sequence
  Synthetic
agugcaggauggaguaaaggagg

SEQ ID NO: 586508 - RNA, 24 nt, Artificial Sequence
  Synthetic
cagugcaggauggaguaaaggagg

SEQ ID NO: 586509 - RNA, 18 nt, Artificial Sequence
  Synthetic
aaguuggaguaaaggagg

SEQ ID NO: 586510 - RNA, 19 nt, Artificial Sequence
  Synthetic
caaguuggaguaaaggagg

SEQ ID NO: 586511 - RNA, 20 nt, Artificial Sequence
  Synthetic
ucaaguuggaguaaaggagg

SEQ ID NO: 586512 - RNA, 21 nt, Artificial Sequence
  Synthetic
uucaaguuggaguaaaggagg

SEQ ID NO: 586513 - RNA, 22 nt, Artificial Sequence
  Synthetic
uuucaaguuggaguaaaggagg

SEQ ID NO: 586514 - RNA, 23 nt, Artificial Sequence
  Synthetic
uuuucaaguuggaguaaaggagg

SEQ ID NO: 586515 - RNA, 24 nt, Artificial Sequence
  Synthetic
guuuucaaguuggaguaaaggagg

SEQ ID NO: 586516 - RNA, 18 nt, Artificial Sequence
  Synthetic
aauccaauguaaaggagg

SEQ ID NO: 586517 - RNA, 19 nt, Artificial Sequence
  Synthetic
caauccaauguaaaggagg

SEQ ID NO: 586518 - RNA, 20 nt, Artificial Sequence
  Synthetic
gcaauccaauguaaaggagg

SEQ ID NO: 586519 - RNA, 21 nt, Artificial Sequence
  Synthetic
ggcaauccaauguaaaggagg

SEQ ID NO: 586520 - RNA, 22 nt, Artificial Sequence
  Synthetic
uggcaauccaauguaaaggagg

SEQ ID NO: 586521 - RNA, 23 nt, Artificial Sequence
  Synthetic
auggcaauccaauguaaaggagg

SEQ ID NO: 586522 - RNA, 24 nt, Artificial Sequence
  Synthetic
aauggcaauccaauguaaaggagg

SEQ ID NO: 586523 - RNA, 18 nt, Artificial Sequence
  Synthetic
caugcuacaccaaggagg

SEQ ID NO: 586524 - RNA, 19 nt, Artificial Sequence
  Synthetic
gcaugcuacaccaaggagg

SEQ ID NO: 586525 - RNA, 20 nt, Artificial Sequence
  Synthetic
ugcaugcuacaccaaggagg

SEQ ID NO: 586526 - RNA, 21 nt, Artificial Sequence
  Synthetic
uugcaugcuacaccaaggagg

SEQ ID NO: 586527 - RNA, 22 nt, Artificial Sequence
  Synthetic
cuugcaugcuacaccaaggagg

SEQ ID NO: 586528 - RNA, 23 nt, Artificial Sequence
  Synthetic
ccuugcaugcuacaccaaggagg

SEQ ID NO: 586529 - RNA, 24 nt, Artificial Sequence
  Synthetic
accuugcaugcuacaccaaggagg

SEQ ID NO: 586530 - RNA, 18 nt, Artificial Sequence
  Synthetic
aagagaaccagaaggagg

SEQ ID NO: 586531 - RNA, 19 nt, Artificial Sequence
  Synthetic
gaagagaaccagaaggagg

SEQ ID NO: 586532 - RNA, 20 nt, Artificial Sequence
  Synthetic
ggaagagaaccagaaggagg

SEQ ID NO: 586533 - RNA, 21 nt, Artificial Sequence
  Synthetic
aggaagagaaccagaaggagg

SEQ ID NO: 586534 - RNA, 22 nt, Artificial Sequence
  Synthetic
caggaagagaaccagaaggagg

SEQ ID NO: 586535 - RNA, 23 nt, Artificial Sequence
  Synthetic
ccaggaagagaaccagaaggagg

SEQ ID NO: 586536 - RNA, 24 nt, Artificial Sequence
  Synthetic
cccaggaagagaaccagaaggagg

SEQ ID NO: 586537 - RNA, 18 nt, Artificial Sequence
  Synthetic
guaagggaaggaaggagg

SEQ ID NO: 586538 - RNA, 19 nt, Artificial Sequence
  Synthetic
aguaagggaaggaaggagg

SEQ ID NO: 586539 - RNA, 20 nt, Artificial Sequence
  Synthetic
caguaagggaaggaaggagg

SEQ ID NO: 586540 - RNA, 21 nt, Artificial Sequence
  Synthetic
gcaguaagggaaggaaggagg

SEQ ID NO: 586541 - RNA, 22 nt, Artificial Sequence
  Synthetic
ggcaguaagggaaggaaggagg

SEQ ID NO: 586542 - RNA, 23 nt, Artificial Sequence
  Synthetic
aggcaguaagggaaggaaggagg

SEQ ID NO: 586543 - RNA, 24 nt, Artificial Sequence
  Synthetic
caggcaguaagggaaggaaggagg

SEQ ID NO: 586544 - RNA, 18 nt, Artificial Sequence
  Synthetic
gacuacagaggaaggagg

SEQ ID NO: 586545 - RNA, 19 nt, Artificial Sequence
  Synthetic
ggacuacagaggaaggagg

SEQ ID NO: 586546 - RNA, 20 nt, Artificial Sequence
  Synthetic
gggacuacagaggaaggagg

SEQ ID NO: 586547 - RNA, 21 nt, Artificial Sequence
  Synthetic
ggggacuacagaggaaggagg

SEQ ID NO: 586548 - RNA, 22 nt, Artificial Sequence
  Synthetic
uggggacuacagaggaaggagg

SEQ ID NO: 586549 - RNA, 23 nt, Artificial Sequence
  Synthetic
cuggggacuacagaggaaggagg

SEQ ID NO: 586550 - RNA, 24 nt, Artificial Sequence
  Synthetic
acuggggacuacagaggaaggagg

SEQ ID NO: 586551 - RNA, 18 nt, Artificial Sequence
  Synthetic
agggagggaggaaggagg

SEQ ID NO: 586552 - RNA, 19 nt, Artificial Sequence
  Synthetic
gagggagggaggaaggagg

SEQ ID NO: 586553 - RNA, 20 nt, Artificial Sequence
  Synthetic
ggagggagggaggaaggagg

SEQ ID NO: 586554 - RNA, 21 nt, Artificial Sequence
  Synthetic
gggagggagggaggaaggagg

SEQ ID NO: 586555 - RNA, 22 nt, Artificial Sequence
  Synthetic
agggagggagggaggaaggagg

SEQ ID NO: 586556 - RNA, 23 nt, Artificial Sequence
  Synthetic
gagggagggagggaggaaggagg

SEQ ID NO: 586557 - RNA, 24 nt, Artificial Sequence
  Synthetic
ggagggagggagggaggaaggagg

SEQ ID NO: 586558 - RNA, 18 nt, Artificial Sequence
  Synthetic
gguagugagggaaggagg

SEQ ID NO: 586559 - RNA, 19 nt, Artificial Sequence
  Synthetic
agguagugagggaaggagg

SEQ ID NO: 586560 - RNA, 20 nt, Artificial Sequence
  Synthetic
gagguagugagggaaggagg

SEQ ID NO: 586561 - RNA, 21 nt, Artificial Sequence
  Synthetic
ugagguagugagggaaggagg

SEQ ID NO: 586562 - RNA, 22 nt, Artificial Sequence
  Synthetic
gugagguagugagggaaggagg

SEQ ID NO: 586563 - RNA, 23 nt, Artificial Sequence
  Synthetic
ugugagguagugagggaaggagg

SEQ ID NO: 586564 - RNA, 24 nt, Artificial Sequence
  Synthetic
uugugagguagugagggaaggagg

SEQ ID NO: 586565 - RNA, 18 nt, Artificial Sequence
  Synthetic
ccuuucuuaugaaggagg

SEQ ID NO: 586566 - RNA, 19 nt, Artificial Sequence
  Synthetic
uccuuucuuaugaaggagg

SEQ ID NO: 586567 - RNA, 20 nt, Artificial Sequence
  Synthetic
uuccuuucuuaugaaggagg

SEQ ID NO: 586568 - RNA, 21 nt, Artificial Sequence
  Synthetic
uuuccuuucuuaugaaggagg

SEQ ID NO: 586569 - RNA, 22 nt, Artificial Sequence
  Synthetic
cuuuccuuucuuaugaaggagg

SEQ ID NO: 586570 - RNA, 23 nt, Artificial Sequence
  Synthetic
ucuuuccuuucuuaugaaggagg

SEQ ID NO: 586571 - RNA, 24 nt, Artificial Sequence
  Synthetic
gucuuuccuuucuuaugaaggagg

SEQ ID NO: 586572 - RNA, 18 nt, Artificial Sequence
  Synthetic
aucacucgaaacaggagg

SEQ ID NO: 586573 - RNA, 19 nt, Artificial Sequence
  Synthetic
aaucacucgaaacaggagg

SEQ ID NO: 586574 - RNA, 20 nt, Artificial Sequence
  Synthetic
gaaucacucgaaacaggagg

SEQ ID NO: 586575 - RNA, 21 nt, Artificial Sequence
  Synthetic
agaaucacucgaaacaggagg

SEQ ID NO: 586576 - RNA, 22 nt, Artificial Sequence
  Synthetic
gagaaucacucgaaacaggagg

SEQ ID NO: 586577 - RNA, 23 nt, Artificial Sequence
  Synthetic
ggagaaucacucgaaacaggagg

SEQ ID NO: 586578 - RNA, 24 nt, Artificial Sequence
  Synthetic
aggagaaucacucgaaacaggagg

SEQ ID NO: 586579 - RNA, 18 nt, Artificial Sequence
  Synthetic
ucacuugaucacaggagg

SEQ ID NO: 586580 - RNA, 19 nt, Artificial Sequence
  Synthetic
cucacuugaucacaggagg

SEQ ID NO: 586581 - RNA, 20 nt, Artificial Sequence
  Synthetic
acucacuugaucacaggagg

SEQ ID NO: 586582 - RNA, 21 nt, Artificial Sequence
  Synthetic
gacucacuugaucacaggagg

SEQ ID NO: 586583 - RNA, 22 nt, Artificial Sequence
  Synthetic
agacucacuugaucacaggagg

SEQ ID NO: 586584 - RNA, 23 nt, Artificial Sequence
  Synthetic
gagacucacuugaucacaggagg

SEQ ID NO: 586585 - RNA, 24 nt, Artificial Sequence
  Synthetic
agagacucacuugaucacaggagg

SEQ ID NO: 586586 - RNA, 18 nt, Artificial Sequence
  Synthetic
gaauggagagacaggagg

SEQ ID NO: 586587 - RNA, 19 nt, Artificial Sequence
  Synthetic
agaauggagagacaggagg

SEQ ID NO: 586588 - RNA, 20 nt, Artificial Sequence
  Synthetic
aagaauggagagacaggagg

SEQ ID NO: 586589 - RNA, 21 nt, Artificial Sequence
  Synthetic
aaagaauggagagacaggagg

SEQ ID NO: 586590 - RNA, 22 nt, Artificial Sequence
  Synthetic
gaaagaauggagagacaggagg

SEQ ID NO: 586591 - RNA, 23 nt, Artificial Sequence
  Synthetic
agaaagaauggagagacaggagg

SEQ ID NO: 586592 - RNA, 24 nt, Artificial Sequence
  Synthetic
gagaaagaauggagagacaggagg

SEQ ID NO: 586593 - RNA, 18 nt, Artificial Sequence
  Synthetic
ugcugaucugacaggagg

SEQ ID NO: 586594 - RNA, 19 nt, Artificial Sequence
  Synthetic
cugcugaucugacaggagg

SEQ ID NO: 586595 - RNA, 20 nt, Artificial Sequence
  Synthetic
gcugcugaucugacaggagg

SEQ ID NO: 586596 - RNA, 21 nt, Artificial Sequence
  Synthetic
ggcugcugaucugacaggagg

SEQ ID NO: 586597 - RNA, 22 nt, Artificial Sequence
  Synthetic
uggcugcugaucugacaggagg

SEQ ID NO: 586598 - RNA, 23 nt, Artificial Sequence
  Synthetic
guggcugcugaucugacaggagg

SEQ ID NO: 586599 - RNA, 24 nt, Artificial Sequence
  Synthetic
uguggcugcugaucugacaggagg

SEQ ID NO: 586600 - RNA, 18 nt, Artificial Sequence
  Synthetic
auugcuugaaccaggagg

SEQ ID NO: 586601 - RNA, 19 nt, Artificial Sequence
  Synthetic
aauugcuugaaccaggagg

SEQ ID NO: 586602 - RNA, 20 nt, Artificial Sequence
  Synthetic
gaauugcuugaaccaggagg

SEQ ID NO: 586603 - RNA, 21 nt, Artificial Sequence
  Synthetic
agaauugcuugaaccaggagg

SEQ ID NO: 586604 - RNA, 22 nt, Artificial Sequence
  Synthetic
gagaauugcuugaaccaggagg

SEQ ID NO: 586605 - RNA, 23 nt, Artificial Sequence
  Synthetic
ggagaauugcuugaaccaggagg

SEQ ID NO: 586606 - RNA, 24 nt, Artificial Sequence
  Synthetic
gggagaauugcuugaaccaggagg

SEQ ID NO: 586607 - RNA, 18 nt, Artificial Sequence
  Synthetic
ccgcuucaacccaggagg

SEQ ID NO: 586608 - RNA, 19 nt, Artificial Sequence
  Synthetic
accgcuucaacccaggagg

SEQ ID NO: 586609 - RNA, 20 nt, Artificial Sequence
  Synthetic
aaccgcuucaacccaggagg

SEQ ID NO: 586610 - RNA, 21 nt, Artificial Sequence
  Synthetic
gaaccgcuucaacccaggagg

SEQ ID NO: 586611 - RNA, 22 nt, Artificial Sequence
  Synthetic
agaaccgcuucaacccaggagg

SEQ ID NO: 586612 - RNA, 23 nt, Artificial Sequence
  Synthetic
gagaaccgcuucaacccaggagg

SEQ ID NO: 586613 - RNA, 24 nt, Artificial Sequence
  Synthetic
ggagaaccgcuucaacccaggagg

SEQ ID NO: 586614 - RNA, 21 nt, Artificial Sequence
  Synthetic
gaaucccuugaacccaggagg

SEQ ID NO: 586615 - RNA, 22 nt, Artificial Sequence
  Synthetic
agaaucccuugaacccaggagg

SEQ ID NO: 586616 - RNA, 23 nt, Artificial Sequence
  Synthetic
gagaaucccuugaacccaggagg

SEQ ID NO: 586617 - RNA, 24 nt, Artificial Sequence
  Synthetic
ggagaaucccuugaacccaggagg

SEQ ID NO: 586618 - RNA, 21 nt, Artificial Sequence
  Synthetic
gaaucgcuugaacccaggagg

SEQ ID NO: 586619 - RNA, 22 nt, Artificial Sequence
  Synthetic
agaaucgcuugaacccaggagg

SEQ ID NO: 586620 - RNA, 23 nt, Artificial Sequence
  Synthetic
gagaaucgcuugaacccaggagg

SEQ ID NO: 586621 - RNA, 24 nt, Artificial Sequence
  Synthetic
ggagaaucgcuugaacccaggagg

SEQ ID NO: 586622 - RNA, 18 nt, Artificial Sequence
  Synthetic
ucucuugaacccaggagg

SEQ ID NO: 586623 - RNA, 19 nt, Artificial Sequence
  Synthetic
aucucuugaacccaggagg

SEQ ID NO: 586624 - RNA, 20 nt, Artificial Sequence
  Synthetic
aaucucuugaacccaggagg

SEQ ID NO: 586625 - RNA, 21 nt, Artificial Sequence
  Synthetic
gaaucucuugaacccaggagg

SEQ ID NO: 586626 - RNA, 22 nt, Artificial Sequence
  Synthetic
agaaucucuugaacccaggagg

SEQ ID NO: 586627 - RNA, 23 nt, Artificial Sequence
  Synthetic
aagaaucucuugaacccaggagg

SEQ ID NO: 586628 - RNA, 24 nt, Artificial Sequence
  Synthetic
caagaaucucuugaacccaggagg

SEQ ID NO: 586629 - RNA, 18 nt, Artificial Sequence
  Synthetic
ucacccgagcccaggagg

SEQ ID NO: 586630 - RNA, 19 nt, Artificial Sequence
  Synthetic
aucacccgagcccaggagg

SEQ ID NO: 586631 - RNA, 20 nt, Artificial Sequence
  Synthetic
gaucacccgagcccaggagg

SEQ ID NO: 586632 - RNA, 21 nt, Artificial Sequence
  Synthetic
ggaucacccgagcccaggagg

SEQ ID NO: 586633 - RNA, 22 nt, Artificial Sequence
  Synthetic
gggaucacccgagcccaggagg

SEQ ID NO: 586634 - RNA, 23 nt, Artificial Sequence
  Synthetic
ggggaucacccgagcccaggagg

SEQ ID NO: 586635 - RNA, 24 nt, Artificial Sequence
  Synthetic
gggggaucacccgagcccaggagg

SEQ ID NO: 586636 - RNA, 18 nt, Artificial Sequence
  Synthetic
cugcuugagcccaggagg

SEQ ID NO: 586637 - RNA, 19 nt, Artificial Sequence
  Synthetic
acugcuugagcccaggagg

SEQ ID NO: 586638 - RNA, 20 nt, Artificial Sequence
  Synthetic
aacugcuugagcccaggagg

SEQ ID NO: 586639 - RNA, 21 nt, Artificial Sequence
  Synthetic
gaacugcuugagcccaggagg

SEQ ID NO: 586640 - RNA, 22 nt, Artificial Sequence
  Synthetic
agaacugcuugagcccaggagg

SEQ ID NO: 586641 - RNA, 23 nt, Artificial Sequence
  Synthetic
gagaacugcuugagcccaggagg

SEQ ID NO: 586642 - RNA, 24 nt, Artificial Sequence
  Synthetic
ggagaacugcuugagcccaggagg

SEQ ID NO: 586643 - RNA, 18 nt, Artificial Sequence
  Synthetic
ggcugcauucccaggagg

SEQ ID NO: 586644 - RNA, 19 nt, Artificial Sequence
  Synthetic
gggcugcauucccaggagg

SEQ ID NO: 586645 - RNA, 20 nt, Artificial Sequence
  Synthetic
ugggcugcauucccaggagg

SEQ ID NO: 586646 - RNA, 21 nt, Artificial Sequence
  Synthetic
cugggcugcauucccaggagg

SEQ ID NO: 586647 - RNA, 22 nt, Artificial Sequence
  Synthetic
acugggcugcauucccaggagg

SEQ ID NO: 586648 - RNA, 23 nt, Artificial Sequence
  Synthetic
uacugggcugcauucccaggagg

SEQ ID NO: 586649 - RNA, 24 nt, Artificial Sequence
  Synthetic
cuacugggcugcauucccaggagg

SEQ ID NO: 586650 - RNA, 18 nt, Artificial Sequence
  Synthetic
caacgagacagcaggagg

SEQ ID NO: 586651 - RNA, 19 nt, Artificial Sequence
  Synthetic
acaacgagacagcaggagg

SEQ ID NO: 586652 - RNA, 20 nt, Artificial Sequence
  Synthetic
aacaacgagacagcaggagg

SEQ ID NO: 586653 - RNA, 21 nt, Artificial Sequence
  Synthetic
aaacaacgagacagcaggagg

SEQ ID NO: 586654 - RNA, 22 nt, Artificial Sequence
  Synthetic
caaacaacgagacagcaggagg

SEQ ID NO: 586655 - RNA, 23 nt, Artificial Sequence
  Synthetic
gcaaacaacgagacagcaggagg

SEQ ID NO: 586656 - RNA, 24 nt, Artificial Sequence
  Synthetic
agcaaacaacgagacagcaggagg

SEQ ID NO: 586657 - RNA, 18 nt, Artificial Sequence
  Synthetic
aaggcacccagcaggagg

SEQ ID NO: 586658 - RNA, 19 nt, Artificial Sequence
  Synthetic
gaaggcacccagcaggagg

SEQ ID NO: 586659 - RNA, 20 nt, Artificial Sequence
  Synthetic
agaaggcacccagcaggagg

SEQ ID NO: 586660 - RNA, 21 nt, Artificial Sequence
  Synthetic
gagaaggcacccagcaggagg

SEQ ID NO: 586661 - RNA, 22 nt, Artificial Sequence
  Synthetic
agagaaggcacccagcaggagg

SEQ ID NO: 586662 - RNA, 23 nt, Artificial Sequence
  Synthetic
cagagaaggcacccagcaggagg

SEQ ID NO: 586663 - RNA, 24 nt, Artificial Sequence
  Synthetic
acagagaaggcacccagcaggagg

SEQ ID NO: 586664 - RNA, 18 nt, Artificial Sequence
  Synthetic
cucaacuggagcaggagg

SEQ ID NO: 586665 - RNA, 19 nt, Artificial Sequence
  Synthetic
ccucaacuggagcaggagg

SEQ ID NO: 586666 - RNA, 20 nt, Artificial Sequence
  Synthetic
uccucaacuggagcaggagg

SEQ ID NO: 586667 - RNA, 21 nt, Artificial Sequence
  Synthetic
guccucaacuggagcaggagg

SEQ ID NO: 586668 - RNA, 22 nt, Artificial Sequence
  Synthetic
gguccucaacuggagcaggagg

SEQ ID NO: 586669 - RNA, 23 nt, Artificial Sequence
  Synthetic
ugguccucaacuggagcaggagg

SEQ ID NO: 586670 - RNA, 24 nt, Artificial Sequence
  Synthetic
uugguccucaacuggagcaggagg

SEQ ID NO: 586671 - RNA, 21 nt, Artificial Sequence
  Synthetic
uaaucccagcuacucaggagg

SEQ ID NO: 586672 - RNA, 22 nt, Artificial Sequence
  Synthetic
guaaucccagcuacucaggagg

SEQ ID NO: 586673 - RNA, 23 nt, Artificial Sequence
  Synthetic
cguaaucccagcuacucaggagg

SEQ ID NO: 586674 - RNA, 24 nt, Artificial Sequence
  Synthetic
ccguaaucccagcuacucaggagg

SEQ ID NO: 586675 - RNA, 21 nt, Artificial Sequence
  Synthetic
uggucccagcuacucaggagg

SEQ ID NO: 586676 - RNA, 22 nt, Artificial Sequence
  Synthetic
guggucccagcuacucaggagg

SEQ ID NO: 586677 - RNA, 23 nt, Artificial Sequence
  Synthetic
uguggucccagcuacucaggagg

SEQ ID NO: 586678 - RNA, 24 nt, Artificial Sequence
  Synthetic
cuguggucccagcuacucaggagg

SEQ ID NO: 586679 - RNA, 18 nt, Artificial Sequence
  Synthetic
ucucagcuacucaggagg

SEQ ID NO: 586680 - RNA, 19 nt, Artificial Sequence
  Synthetic
gucucagcuacucaggagg

SEQ ID NO: 586681 - RNA, 20 nt, Artificial Sequence
  Synthetic
agucucagcuacucaggagg

SEQ ID NO: 586682 - RNA, 21 nt, Artificial Sequence
  Synthetic
uagucucagcuacucaggagg

SEQ ID NO: 586683 - RNA, 22 nt, Artificial Sequence
  Synthetic
guagucucagcuacucaggagg

SEQ ID NO: 586684 - RNA, 23 nt, Artificial Sequence
  Synthetic
uguagucucagcuacucaggagg

SEQ ID NO: 586685 - RNA, 24 nt, Artificial Sequence
  Synthetic
cuguagucucagcuacucaggagg

SEQ ID NO: 586686 - RNA, 18 nt, Artificial Sequence
  Synthetic
uccuagcuacucaggagg

SEQ ID NO: 586687 - RNA, 19 nt, Artificial Sequence
  Synthetic
auccuagcuacucaggagg

SEQ ID NO: 586688 - RNA, 20 nt, Artificial Sequence
  Synthetic
aauccuagcuacucaggagg

SEQ ID NO: 586689 - RNA, 21 nt, Artificial Sequence
  Synthetic
uaauccuagcuacucaggagg

SEQ ID NO: 586690 - RNA, 22 nt, Artificial Sequence
  Synthetic
auaauccuagcuacucaggagg

SEQ ID NO: 586691 - RNA, 23 nt, Artificial Sequence
  Synthetic
uauaauccuagcuacucaggagg

SEQ ID NO: 586692 - RNA, 24 nt, Artificial Sequence
  Synthetic
cuauaauccuagcuacucaggagg

SEQ ID NO: 586693 - RNA, 18 nt, Artificial Sequence
  Synthetic
ucccagcuauucaggagg

SEQ ID NO: 586694 - RNA, 19 nt, Artificial Sequence
  Synthetic
aucccagcuauucaggagg

SEQ ID NO: 586695 - RNA, 20 nt, Artificial Sequence
  Synthetic
aaucccagcuauucaggagg

SEQ ID NO: 586696 - RNA, 21 nt, Artificial Sequence
  Synthetic
uaaucccagcuauucaggagg

SEQ ID NO: 586697 - RNA, 22 nt, Artificial Sequence
  Synthetic
guaaucccagcuauucaggagg

SEQ ID NO: 586698 - RNA, 23 nt, Artificial Sequence
  Synthetic
uguaaucccagcuauucaggagg

SEQ ID NO: 586699 - RNA, 24 nt, Artificial Sequence
  Synthetic
cuguaaucccagcuauucaggagg

SEQ ID NO: 586700 - RNA, 18 nt, Artificial Sequence
  Synthetic
uucagcuuuuucaggagg

SEQ ID NO: 586701 - RNA, 19 nt, Artificial Sequence
  Synthetic
auucagcuuuuucaggagg

SEQ ID NO: 586702 - RNA, 20 nt, Artificial Sequence
  Synthetic
cauucagcuuuuucaggagg

SEQ ID NO: 586703 - RNA, 21 nt, Artificial Sequence
  Synthetic
ucauucagcuuuuucaggagg

SEQ ID NO: 586704 - RNA, 22 nt, Artificial Sequence
  Synthetic
cucauucagcuuuuucaggagg

SEQ ID NO: 586705 - RNA, 23 nt, Artificial Sequence
  Synthetic
ccucauucagcuuuuucaggagg

SEQ ID NO: 586706 - RNA, 24 nt, Artificial Sequence
  Synthetic
accucauucagcuuuuucaggagg

SEQ ID NO: 586707 - RNA, 18 nt, Artificial Sequence
  Synthetic
caucuaggaaagaggagg

SEQ ID NO: 586708 - RNA, 19 nt, Artificial Sequence
  Synthetic
gcaucuaggaaagaggagg

SEQ ID NO: 586709 - RNA, 20 nt, Artificial Sequence
  Synthetic
agcaucuaggaaagaggagg

SEQ ID NO: 586710 - RNA, 21 nt, Artificial Sequence
  Synthetic
gagcaucuaggaaagaggagg

SEQ ID NO: 586711 - RNA, 22 nt, Artificial Sequence
  Synthetic
agagcaucuaggaaagaggagg

SEQ ID NO: 586712 - RNA, 23 nt, Artificial Sequence
  Synthetic
aagagcaucuaggaaagaggagg

SEQ ID NO: 586713 - RNA, 24 nt, Artificial Sequence
  Synthetic
gaagagcaucuaggaaagaggagg

SEQ ID NO: 586714 - RNA, 18 nt, Artificial Sequence
  Synthetic
gguagaaaagagaggagg

SEQ ID NO: 586715 - RNA, 19 nt, Artificial Sequence
  Synthetic
ugguagaaaagagaggagg

SEQ ID NO: 586716 - RNA, 20 nt, Artificial Sequence
  Synthetic
augguagaaaagagaggagg

SEQ ID NO: 586717 - RNA, 21 nt, Artificial Sequence
  Synthetic
caugguagaaaagagaggagg

SEQ ID NO: 586718 - RNA, 22 nt, Artificial Sequence
  Synthetic
acaugguagaaaagagaggagg

SEQ ID NO: 586719 - RNA, 23 nt, Artificial Sequence
  Synthetic
uacaugguagaaaagagaggagg

SEQ ID NO: 586720 - RNA, 24 nt, Artificial Sequence
  Synthetic
cuacaugguagaaaagagaggagg

SEQ ID NO: 586721 - RNA, 18 nt, Artificial Sequence
  Synthetic
gaauggaaagggaggagg

SEQ ID NO: 586722 - RNA, 19 nt, Artificial Sequence
  Synthetic
ugaauggaaagggaggagg

SEQ ID NO: 586723 - RNA, 20 nt, Artificial Sequence
  Synthetic
uugaauggaaagggaggagg

SEQ ID NO: 586724 - RNA, 21 nt, Artificial Sequence
  Synthetic
guugaauggaaagggaggagg

SEQ ID NO: 586725 - RNA, 22 nt, Artificial Sequence
  Synthetic
uguugaauggaaagggaggagg

SEQ ID NO: 586726 - RNA, 23 nt, Artificial Sequence
  Synthetic
uuguugaauggaaagggaggagg

SEQ ID NO: 586727 - RNA, 24 nt, Artificial Sequence
  Synthetic
uuuguugaauggaaagggaggagg

SEQ ID NO: 586728 - RNA, 18 nt, Artificial Sequence
  Synthetic
acuacuagagggaggagg

SEQ ID NO: 586729 - RNA, 19 nt, Artificial Sequence
  Synthetic
gacuacuagagggaggagg

SEQ ID NO: 586730 - RNA, 20 nt, Artificial Sequence
  Synthetic
ggacuacuagagggaggagg

SEQ ID NO: 586731 - RNA, 21 nt, Artificial Sequence
  Synthetic
gggacuacuagagggaggagg

SEQ ID NO: 586732 - RNA, 22 nt, Artificial Sequence
  Synthetic
ggggacuacuagagggaggagg

SEQ ID NO: 586733 - RNA, 23 nt, Artificial Sequence
  Synthetic
uggggacuacuagagggaggagg

SEQ ID NO: 586734 - RNA, 24 nt, Artificial Sequence
  Synthetic
cuggggacuacuagagggaggagg

SEQ ID NO: 586735 - RNA, 18 nt, Artificial Sequence
  Synthetic
ggggagggugggaggagg

SEQ ID NO: 586736 - RNA, 19 nt, Artificial Sequence
  Synthetic
uggggagggugggaggagg

SEQ ID NO: 586737 - RNA, 20 nt, Artificial Sequence
  Synthetic
guggggagggugggaggagg

SEQ ID NO: 586738 - RNA, 21 nt, Artificial Sequence
  Synthetic
aguggggagggugggaggagg

SEQ ID NO: 586739 - RNA, 22 nt, Artificial Sequence
  Synthetic
gaguggggagggugggaggagg

SEQ ID NO: 586740 - RNA, 23 nt, Artificial Sequence
  Synthetic
ggaguggggagggugggaggagg

SEQ ID NO: 586741 - RNA, 24 nt, Artificial Sequence
  Synthetic
uggaguggggagggugggaggagg

SEQ ID NO: 586742 - RNA, 18 nt, Artificial Sequence
  Synthetic
ggacaacaacugaggagg

SEQ ID NO: 586743 - RNA, 19 nt, Artificial Sequence
  Synthetic
uggacaacaacugaggagg

SEQ ID NO: 586744 - RNA, 20 nt, Artificial Sequence
  Synthetic
auggacaacaacugaggagg

SEQ ID NO: 586745 - RNA, 21 nt, Artificial Sequence
  Synthetic
gauggacaacaacugaggagg

SEQ ID NO: 586746 - RNA, 22 nt, Artificial Sequence
  Synthetic
ggauggacaacaacugaggagg

SEQ ID NO: 586747 - RNA, 23 nt, Artificial Sequence
  Synthetic
gggauggacaacaacugaggagg

SEQ ID NO: 586748 - RNA, 24 nt, Artificial Sequence
  Synthetic
ugggauggacaacaacugaggagg

SEQ ID NO: 586749 - RNA, 18 nt, Artificial Sequence
  Synthetic
uuugauuaggugaggagg

SEQ ID NO: 586750 - RNA, 19 nt, Artificial Sequence
  Synthetic
cuuugauuaggugaggagg

SEQ ID NO: 586751 - RNA, 20 nt, Artificial Sequence
  Synthetic
ucuuugauuaggugaggagg

SEQ ID NO: 586752 - RNA, 21 nt, Artificial Sequence
  Synthetic
aucuuugauuaggugaggagg

SEQ ID NO: 586753 - RNA, 22 nt, Artificial Sequence
  Synthetic
caucuuugauuaggugaggagg

SEQ ID NO: 586754 - RNA, 23 nt, Artificial Sequence
  Synthetic
ucaucuuugauuaggugaggagg

SEQ ID NO: 586755 - RNA, 24 nt, Artificial Sequence
  Synthetic
uucaucuuugauuaggugaggagg

SEQ ID NO: 586756 - RNA, 18 nt, Artificial Sequence
  Synthetic
aaggagaacgauaggagg

SEQ ID NO: 586757 - RNA, 19 nt, Artificial Sequence
  Synthetic
gaaggagaacgauaggagg

SEQ ID NO: 586758 - RNA, 20 nt, Artificial Sequence
  Synthetic
agaaggagaacgauaggagg

SEQ ID NO: 586759 - RNA, 21 nt, Artificial Sequence
  Synthetic
gagaaggagaacgauaggagg

SEQ ID NO: 586760 - RNA, 22 nt, Artificial Sequence
  Synthetic
ggagaaggagaacgauaggagg

SEQ ID NO: 586761 - RNA, 23 nt, Artificial Sequence
  Synthetic
aggagaaggagaacgauaggagg

SEQ ID NO: 586762 - RNA, 24 nt, Artificial Sequence
  Synthetic
caggagaaggagaacgauaggagg

SEQ ID NO: 586763 - RNA, 18 nt, Artificial Sequence
  Synthetic
uggauuugggguaggagg

SEQ ID NO: 586764 - RNA, 19 nt, Artificial Sequence
  Synthetic
uuggauuugggguaggagg

SEQ ID NO: 586765 - RNA, 20 nt, Artificial Sequence
  Synthetic
uuuggauuugggguaggagg

SEQ ID NO: 586766 - RNA, 21 nt, Artificial Sequence
  Synthetic
auuuggauuugggguaggagg

SEQ ID NO: 586767 - RNA, 22 nt, Artificial Sequence
  Synthetic
cauuuggauuugggguaggagg

SEQ ID NO: 586768 - RNA, 23 nt, Artificial Sequence
  Synthetic
ccauuuggauuugggguaggagg

SEQ ID NO: 586769 - RNA, 24 nt, Artificial Sequence
  Synthetic
uccauuuggauuugggguaggagg

SEQ ID NO: 586770 - RNA, 18 nt, Artificial Sequence
  Synthetic
ucccagcuacuuaggagg

SEQ ID NO: 586771 - RNA, 19 nt, Artificial Sequence
  Synthetic
aucccagcuacuuaggagg

SEQ ID NO: 586772 - RNA, 20 nt, Artificial Sequence
  Synthetic
gaucccagcuacuuaggagg

SEQ ID NO: 586773 - RNA, 21 nt, Artificial Sequence
  Synthetic
ugaucccagcuacuuaggagg

SEQ ID NO: 586774 - RNA, 22 nt, Artificial Sequence
  Synthetic
gugaucccagcuacuuaggagg

SEQ ID NO: 586775 - RNA, 23 nt, Artificial Sequence
  Synthetic
ugugaucccagcuacuuaggagg

SEQ ID NO: 586776 - RNA, 24 nt, Artificial Sequence
  Synthetic
cugugaucccagcuacuuaggagg

SEQ ID NO: 586777 - RNA, 18 nt, Artificial Sequence
  Synthetic
ucccagcacuuuaggagg

SEQ ID NO: 586778 - RNA, 19 nt, Artificial Sequence
  Synthetic
aucccagcacuuuaggagg

SEQ ID NO: 586779 - RNA, 20 nt, Artificial Sequence
  Synthetic
aaucccagcacuuuaggagg

SEQ ID NO: 586780 - RNA, 21 nt, Artificial Sequence
  Synthetic
aaaucccagcacuuuaggagg

SEQ ID NO: 586781 - RNA, 22 nt, Artificial Sequence
  Synthetic
gaaaucccagcacuuuaggagg

SEQ ID NO: 586782 - RNA, 23 nt, Artificial Sequence
  Synthetic
ugaaaucccagcacuuuaggagg

SEQ ID NO: 586783 - RNA, 24 nt, Artificial Sequence
  Synthetic
cugaaaucccagcacuuuaggagg

SEQ ID NO: 586784 - RNA, 18 nt, Artificial Sequence
  Synthetic
ugguggggguuacggagg

SEQ ID NO: 586785 - RNA, 19 nt, Artificial Sequence
  Synthetic
gugguggggguuacggagg

SEQ ID NO: 586786 - RNA, 20 nt, Artificial Sequence
  Synthetic
agugguggggguuacggagg

SEQ ID NO: 586787 - RNA, 21 nt, Artificial Sequence
  Synthetic
uagugguggggguuacggagg

SEQ ID NO: 586788 - RNA, 22 nt, Artificial Sequence
  Synthetic
guagugguggggguuacggagg

SEQ ID NO: 586789 - RNA, 23 nt, Artificial Sequence
  Synthetic
gguagugguggggguuacggagg

SEQ ID NO: 586790 - RNA, 24 nt, Artificial Sequence
  Synthetic
ugguagugguggggguuacggagg

SEQ ID NO: 586791 - RNA, 18 nt, Artificial Sequence
  Synthetic
ccucggggaaagcggagg

SEQ ID NO: 586792 - RNA, 19 nt, Artificial Sequence
  Synthetic
accucggggaaagcggagg

SEQ ID NO: 586793 - RNA, 20 nt, Artificial Sequence
  Synthetic
caccucggggaaagcggagg

SEQ ID NO: 586794 - RNA, 21 nt, Artificial Sequence
  Synthetic
gcaccucggggaaagcggagg

SEQ ID NO: 586795 - RNA, 22 nt, Artificial Sequence
  Synthetic
ugcaccucggggaaagcggagg

SEQ ID NO: 586796 - RNA, 23 nt, Artificial Sequence
  Synthetic
uugcaccucggggaaagcggagg

SEQ ID NO: 586797 - RNA, 24 nt, Artificial Sequence
  Synthetic
uuugcaccucggggaaagcggagg

SEQ ID NO: 586798 - RNA, 18 nt, Artificial Sequence
  Synthetic
guggggaagaagcggagg

SEQ ID NO: 586799 - RNA, 19 nt, Artificial Sequence
  Synthetic
aguggggaagaagcggagg

SEQ ID NO: 586800 - RNA, 20 nt, Artificial Sequence
  Synthetic
aaguggggaagaagcggagg

SEQ ID NO: 586801 - RNA, 21 nt, Artificial Sequence
  Synthetic
gaaguggggaagaagcggagg

SEQ ID NO: 586802 - RNA, 22 nt, Artificial Sequence
  Synthetic
ggaaguggggaagaagcggagg

SEQ ID NO: 586803 - RNA, 23 nt, Artificial Sequence
  Synthetic
gggaaguggggaagaagcggagg

SEQ ID NO: 586804 - RNA, 24 nt, Artificial Sequence
  Synthetic
agggaaguggggaagaagcggagg

SEQ ID NO: 586805 - RNA, 18 nt, Artificial Sequence
  Synthetic
gaggucaagaggcggagg

SEQ ID NO: 586806 - RNA, 19 nt, Artificial Sequence
  Synthetic
agaggucaagaggcggagg

SEQ ID NO: 586807 - RNA, 20 nt, Artificial Sequence
  Synthetic
uagaggucaagaggcggagg

SEQ ID NO: 586808 - RNA, 21 nt, Artificial Sequence
  Synthetic
uuagaggucaagaggcggagg

SEQ ID NO: 586809 - RNA, 22 nt, Artificial Sequence
  Synthetic
cuuagaggucaagaggcggagg

SEQ ID NO: 586810 - RNA, 23 nt, Artificial Sequence
  Synthetic
ccuuagaggucaagaggcggagg

SEQ ID NO: 586811 - RNA, 24 nt, Artificial Sequence
  Synthetic
gccuuagaggucaagaggcggagg

SEQ ID NO: 586812 - RNA, 18 nt, Artificial Sequence
  Synthetic
ucccagguacuucggagg

SEQ ID NO: 586813 - RNA, 19 nt, Artificial Sequence
  Synthetic
aucccagguacuucggagg

SEQ ID NO: 586814 - RNA, 20 nt, Artificial Sequence
  Synthetic
uaucccagguacuucggagg

SEQ ID NO: 586815 - RNA, 21 nt, Artificial Sequence
  Synthetic
uuaucccagguacuucggagg

SEQ ID NO: 586816 - RNA, 22 nt, Artificial Sequence
  Synthetic
auuaucccagguacuucggagg

SEQ ID NO: 586817 - RNA, 23 nt, Artificial Sequence
  Synthetic
uauuaucccagguacuucggagg

SEQ ID NO: 586818 - RNA, 24 nt, Artificial Sequence
  Synthetic
cuauuaucccagguacuucggagg

SEQ ID NO: 586819 - RNA, 18 nt, Artificial Sequence
  Synthetic
uccccgcacuuucggagg

SEQ ID NO: 586820 - RNA, 19 nt, Artificial Sequence
  Synthetic
auccccgcacuuucggagg

SEQ ID NO: 586821 - RNA, 20 nt, Artificial Sequence
  Synthetic
aauccccgcacuuucggagg

SEQ ID NO: 586822 - RNA, 21 nt, Artificial Sequence
  Synthetic
uaauccccgcacuuucggagg

SEQ ID NO: 586823 - RNA, 22 nt, Artificial Sequence
  Synthetic
guaauccccgcacuuucggagg

SEQ ID NO: 586824 - RNA, 23 nt, Artificial Sequence
  Synthetic
uguaauccccgcacuuucggagg

SEQ ID NO: 586825 - RNA, 24 nt, Artificial Sequence
  Synthetic
cuguaauccccgcacuuucggagg

SEQ ID NO: 586826 - RNA, 18 nt, Artificial Sequence
  Synthetic
aaaaaggggaaagggagg

SEQ ID NO: 586827 - RNA, 19 nt, Artificial Sequence
  Synthetic
aaaaaaggggaaagggagg

SEQ ID NO: 586828 - RNA, 20 nt, Artificial Sequence
  Synthetic
aaaaaaaggggaaagggagg

SEQ ID NO: 586829 - RNA, 21 nt, Artificial Sequence
  Synthetic
caaaaaaaggggaaagggagg

SEQ ID NO: 586830 - RNA, 22 nt, Artificial Sequence
  Synthetic
acaaaaaaaggggaaagggagg

SEQ ID NO: 586831 - RNA, 23 nt, Artificial Sequence
  Synthetic
cacaaaaaaaggggaaagggagg

SEQ ID NO: 586832 - RNA, 24 nt, Artificial Sequence
  Synthetic
acacaaaaaaaggggaaagggagg

SEQ ID NO: 586833 - RNA, 18 nt, Artificial Sequence
  Synthetic
guugaauggaaagggagg

SEQ ID NO: 586834 - RNA, 19 nt, Artificial Sequence
  Synthetic
uguugaauggaaagggagg

SEQ ID NO: 586835 - RNA, 20 nt, Artificial Sequence
  Synthetic
uuguugaauggaaagggagg

SEQ ID NO: 586836 - RNA, 21 nt, Artificial Sequence
  Synthetic
uuuguugaauggaaagggagg

SEQ ID NO: 586837 - RNA, 22 nt, Artificial Sequence
  Synthetic
cuuuguugaauggaaagggagg

SEQ ID NO: 586838 - RNA, 23 nt, Artificial Sequence
  Synthetic
ucuuuguugaauggaaagggagg

SEQ ID NO: 586839 - RNA, 24 nt, Artificial Sequence
  Synthetic
uucuuuguugaauggaaagggagg

SEQ ID NO: 586840 - RNA, 18 nt, Artificial Sequence
  Synthetic
agguuagaggaagggagg

SEQ ID NO: 586841 - RNA, 19 nt, Artificial Sequence
  Synthetic
aagguuagaggaagggagg

SEQ ID NO: 586842 - RNA, 20 nt, Artificial Sequence
  Synthetic
caagguuagaggaagggagg

SEQ ID NO: 586843 - RNA, 21 nt, Artificial Sequence
  Synthetic
ucaagguuagaggaagggagg

SEQ ID NO: 586844 - RNA, 22 nt, Artificial Sequence
  Synthetic
uucaagguuagaggaagggagg

SEQ ID NO: 586845 - RNA, 23 nt, Artificial Sequence
  Synthetic
auucaagguuagaggaagggagg

SEQ ID NO: 586846 - RNA, 24 nt, Artificial Sequence
  Synthetic
uauucaagguuagaggaagggagg

SEQ ID NO: 586847 - RNA, 18 nt, Artificial Sequence
  Synthetic
ccuuucuuauaagggagg

SEQ ID NO: 586848 - RNA, 19 nt, Artificial Sequence
  Synthetic
cccuuucuuauaagggagg

SEQ ID NO: 586849 - RNA, 20 nt, Artificial Sequence
  Synthetic
ucccuuucuuauaagggagg

SEQ ID NO: 586850 - RNA, 21 nt, Artificial Sequence
  Synthetic
uucccuuucuuauaagggagg

SEQ ID NO: 586851 - RNA, 22 nt, Artificial Sequence
  Synthetic
cuucccuuucuuauaagggagg

SEQ ID NO: 586852 - RNA, 23 nt, Artificial Sequence
  Synthetic
ucuucccuuucuuauaagggagg

SEQ ID NO: 586853 - RNA, 24 nt, Artificial Sequence
  Synthetic
cucuucccuuucuuauaagggagg

SEQ ID NO: 586854 - RNA, 18 nt, Artificial Sequence
  Synthetic
agaagaaagucagggagg

SEQ ID NO: 586855 - RNA, 19 nt, Artificial Sequence
  Synthetic
aagaagaaagucagggagg

SEQ ID NO: 586856 - RNA, 20 nt, Artificial Sequence
  Synthetic
aaagaagaaagucagggagg

SEQ ID NO: 586857 - RNA, 21 nt, Artificial Sequence
  Synthetic
gaaagaagaaagucagggagg

SEQ ID NO: 586858 - RNA, 22 nt, Artificial Sequence
  Synthetic
ggaaagaagaaagucagggagg

SEQ ID NO: 586859 - RNA, 23 nt, Artificial Sequence
  Synthetic
aggaaagaagaaagucagggagg

SEQ ID NO: 586860 - RNA, 24 nt, Artificial Sequence
  Synthetic
aaggaaagaagaaagucagggagg

SEQ ID NO: 586861 - RNA, 18 nt, Artificial Sequence
  Synthetic
aaaaaagaaagagggagg

SEQ ID NO: 586862 - RNA, 19 nt, Artificial Sequence
  Synthetic
aaaaaaagaaagagggagg

SEQ ID NO: 586863 - RNA, 20 nt, Artificial Sequence
  Synthetic
aaaaaaaagaaagagggagg

SEQ ID NO: 586864 - RNA, 21 nt, Artificial Sequence
  Synthetic
gaaaaaaaagaaagagggagg

SEQ ID NO: 586865 - RNA, 22 nt, Artificial Sequence
  Synthetic
agaaaaaaaagaaagagggagg

SEQ ID NO: 586866 - RNA, 23 nt, Artificial Sequence
  Synthetic
aagaaaaaaaagaaagagggagg

SEQ ID NO: 586867 - RNA, 24 nt, Artificial Sequence
  Synthetic
aaagaaaaaaaagaaagagggagg

SEQ ID NO: 586868 - RNA, 23 nt, Artificial Sequence
  Synthetic
ggagagagagagagagagggagg

SEQ ID NO: 586869 - RNA, 24 nt, Artificial Sequence
  Synthetic
uggagagagagagagagagggagg

SEQ ID NO: 586870 - RNA, 18 nt, Artificial Sequence
  Synthetic
agaggcaggagagggagg

SEQ ID NO: 586871 - RNA, 19 nt, Artificial Sequence
  Synthetic
gagaggcaggagagggagg

SEQ ID NO: 586872 - RNA, 20 nt, Artificial Sequence
  Synthetic
agagaggcaggagagggagg

SEQ ID NO: 586873 - RNA, 21 nt, Artificial Sequence
  Synthetic
aagagaggcaggagagggagg

SEQ ID NO: 586874 - RNA, 22 nt, Artificial Sequence
  Synthetic
gaagagaggcaggagagggagg

SEQ ID NO: 586875 - RNA, 23 nt, Artificial Sequence
  Synthetic
agaagagaggcaggagagggagg

SEQ ID NO: 586876 - RNA, 24 nt, Artificial Sequence
  Synthetic
aagaagagaggcaggagagggagg

SEQ ID NO: 586877 - RNA, 18 nt, Artificial Sequence
  Synthetic
agagaguggagagggagg

SEQ ID NO: 586878 - RNA, 19 nt, Artificial Sequence
  Synthetic
gagagaguggagagggagg

SEQ ID NO: 586879 - RNA, 20 nt, Artificial Sequence
  Synthetic
ggagagaguggagagggagg

SEQ ID NO: 586880 - RNA, 21 nt, Artificial Sequence
  Synthetic
gggagagaguggagagggagg

SEQ ID NO: 586881 - RNA, 22 nt, Artificial Sequence
  Synthetic
agggagagaguggagagggagg

SEQ ID NO: 586882 - RNA, 23 nt, Artificial Sequence
  Synthetic
gagggagagaguggagagggagg

SEQ ID NO: 586883 - RNA, 24 nt, Artificial Sequence
  Synthetic
agagggagagaguggagagggagg

SEQ ID NO: 586884 - RNA, 18 nt, Artificial Sequence
  Synthetic
gggacuacuagagggagg

SEQ ID NO: 586885 - RNA, 19 nt, Artificial Sequence
  Synthetic
ggggacuacuagagggagg

SEQ ID NO: 586886 - RNA, 20 nt, Artificial Sequence
  Synthetic
uggggacuacuagagggagg

SEQ ID NO: 586887 - RNA, 21 nt, Artificial Sequence
  Synthetic
cuggggacuacuagagggagg

SEQ ID NO: 586888 - RNA, 22 nt, Artificial Sequence
  Synthetic
ccuggggacuacuagagggagg

SEQ ID NO: 586889 - RNA, 23 nt, Artificial Sequence
  Synthetic
cccuggggacuacuagagggagg

SEQ ID NO: 586890 - RNA, 24 nt, Artificial Sequence
  Synthetic
acccuggggacuacuagagggagg

SEQ ID NO: 586891 - RNA, 18 nt, Artificial Sequence
  Synthetic
acagaggaaggagggagg

SEQ ID NO: 586892 - RNA, 19 nt, Artificial Sequence
  Synthetic
uacagaggaaggagggagg

SEQ ID NO: 586893 - RNA, 20 nt, Artificial Sequence
  Synthetic
cuacagaggaaggagggagg

SEQ ID NO: 586894 - RNA, 21 nt, Artificial Sequence
  Synthetic
acuacagaggaaggagggagg

SEQ ID NO: 586895 - RNA, 22 nt, Artificial Sequence
  Synthetic
gacuacagaggaaggagggagg

SEQ ID NO: 586896 - RNA, 23 nt, Artificial Sequence
  Synthetic
ggacuacagaggaaggagggagg

SEQ ID NO: 586897 - RNA, 24 nt, Artificial Sequence
  Synthetic
gggacuacagaggaaggagggagg

SEQ ID NO: 586898 - RNA, 18 nt, Artificial Sequence
  Synthetic
agggaggaaggagggagg

SEQ ID NO: 586899 - RNA, 19 nt, Artificial Sequence
  Synthetic
gagggaggaaggagggagg

SEQ ID NO: 586900 - RNA, 20 nt, Artificial Sequence
  Synthetic
ggagggaggaaggagggagg

SEQ ID NO: 586901 - RNA, 21 nt, Artificial Sequence
  Synthetic
gggagggaggaaggagggagg

SEQ ID NO: 586902 - RNA, 22 nt, Artificial Sequence
  Synthetic
agggagggaggaaggagggagg

SEQ ID NO: 586903 - RNA, 23 nt, Artificial Sequence
  Synthetic
gagggagggaggaaggagggagg

SEQ ID NO: 586904 - RNA, 24 nt, Artificial Sequence
  Synthetic
ggagggagggaggaaggagggagg

SEQ ID NO: 586905 - RNA, 18 nt, Artificial Sequence
  Synthetic
ggaaagggaggagggagg

SEQ ID NO: 586906 - RNA, 19 nt, Artificial Sequence
  Synthetic
uggaaagggaggagggagg

SEQ ID NO: 586907 - RNA, 20 nt, Artificial Sequence
  Synthetic
auggaaagggaggagggagg

SEQ ID NO: 586908 - RNA, 21 nt, Artificial Sequence
  Synthetic
aauggaaagggaggagggagg

SEQ ID NO: 586909 - RNA, 22 nt, Artificial Sequence
  Synthetic
gaauggaaagggaggagggagg

SEQ ID NO: 586910 - RNA, 23 nt, Artificial Sequence
  Synthetic
ugaauggaaagggaggagggagg

SEQ ID NO: 586911 - RNA, 24 nt, Artificial Sequence
  Synthetic
uugaauggaaagggaggagggagg

SEQ ID NO: 586912 - RNA, 18 nt, Artificial Sequence
  Synthetic
ggaagaagcggagggagg

SEQ ID NO: 586913 - RNA, 19 nt, Artificial Sequence
  Synthetic
gggaagaagcggagggagg

SEQ ID NO: 586914 - RNA, 20 nt, Artificial Sequence
  Synthetic
ggggaagaagcggagggagg

SEQ ID NO: 586915 - RNA, 21 nt, Artificial Sequence
  Synthetic
uggggaagaagcggagggagg

SEQ ID NO: 586916 - RNA, 22 nt, Artificial Sequence
  Synthetic
guggggaagaagcggagggagg

SEQ ID NO: 586917 - RNA, 23 nt, Artificial Sequence
  Synthetic
aguggggaagaagcggagggagg

SEQ ID NO: 586918 - RNA, 24 nt, Artificial Sequence
  Synthetic
aaguggggaagaagcggagggagg

SEQ ID NO: 586919 - RNA, 18 nt, Artificial Sequence
  Synthetic
aggggaaagggagggagg

SEQ ID NO: 586920 - RNA, 19 nt, Artificial Sequence
  Synthetic
aaggggaaagggagggagg

SEQ ID NO: 586921 - RNA, 20 nt, Artificial Sequence
  Synthetic
aaaggggaaagggagggagg

SEQ ID NO: 586922 - RNA, 21 nt, Artificial Sequence
  Synthetic
aaaaggggaaagggagggagg

SEQ ID NO: 586923 - RNA, 22 nt, Artificial Sequence
  Synthetic
aaaaaggggaaagggagggagg

SEQ ID NO: 586924 - RNA, 23 nt, Artificial Sequence
  Synthetic
aaaaaaggggaaagggagggagg

SEQ ID NO: 586925 - RNA, 24 nt, Artificial Sequence
  Synthetic
aaaaaaaggggaaagggagggagg

SEQ ID NO: 586926 - RNA, 18 nt, Artificial Sequence
  Synthetic
gaaagucagggagggagg

SEQ ID NO: 586927 - RNA, 19 nt, Artificial Sequence
  Synthetic
agaaagucagggagggagg

SEQ ID NO: 586928 - RNA, 20 nt, Artificial Sequence
  Synthetic
aagaaagucagggagggagg

SEQ ID NO: 586929 - RNA, 21 nt, Artificial Sequence
  Synthetic
gaagaaagucagggagggagg

SEQ ID NO: 586930 - RNA, 22 nt, Artificial Sequence
  Synthetic
agaagaaagucagggagggagg

SEQ ID NO: 586931 - RNA, 23 nt, Artificial Sequence
  Synthetic
aagaagaaagucagggagggagg

SEQ ID NO: 586932 - RNA, 24 nt, Artificial Sequence
  Synthetic
aaagaagaaagucagggagggagg

SEQ ID NO: 586933 - RNA, 18 nt, Artificial Sequence
  Synthetic
aggaaggagggagggagg

SEQ ID NO: 586934 - RNA, 19 nt, Artificial Sequence
  Synthetic
gaggaaggagggagggagg

SEQ ID NO: 586935 - RNA, 20 nt, Artificial Sequence
  Synthetic
ggaggaaggagggagggagg

SEQ ID NO: 586936 - RNA, 21 nt, Artificial Sequence
  Synthetic
gggaggaaggagggagggagg

SEQ ID NO: 586937 - RNA, 22 nt, Artificial Sequence
  Synthetic
agggaggaaggagggagggagg

SEQ ID NO: 586938 - RNA, 23 nt, Artificial Sequence
  Synthetic
gagggaggaaggagggagggagg

SEQ ID NO: 586939 - RNA, 24 nt, Artificial Sequence
  Synthetic
ggagggaggaaggagggagggagg

SEQ ID NO: 586940 - RNA, 18 nt, Artificial Sequence
  Synthetic
gucagggagggagggagg

SEQ ID NO: 586941 - RNA, 19 nt, Artificial Sequence
  Synthetic
agucagggagggagggagg

SEQ ID NO: 586942 - RNA, 20 nt, Artificial Sequence
  Synthetic
aagucagggagggagggagg

SEQ ID NO: 586943 - RNA, 21 nt, Artificial Sequence
  Synthetic
aaagucagggagggagggagg

SEQ ID NO: 586944 - RNA, 22 nt, Artificial Sequence
  Synthetic
gaaagucagggagggagggagg

SEQ ID NO: 586945 - RNA, 23 nt, Artificial Sequence
  Synthetic
agaaagucagggagggagggagg

SEQ ID NO: 586946 - RNA, 24 nt, Artificial Sequence
  Synthetic
aagaaagucagggagggagggagg

SEQ ID NO: 586947 - RNA, 18 nt, Artificial Sequence
  Synthetic
aggagggagggagggagg

SEQ ID NO: 586948 - RNA, 19 nt, Artificial Sequence
  Synthetic
aaggagggagggagggagg

SEQ ID NO: 586949 - RNA, 20 nt, Artificial Sequence
  Synthetic
gaaggagggagggagggagg

SEQ ID NO: 586950 - RNA, 21 nt, Artificial Sequence
  Synthetic
ggaaggagggagggagggagg

SEQ ID NO: 586951 - RNA, 22 nt, Artificial Sequence
  Synthetic
aggaaggagggagggagggagg

SEQ ID NO: 586952 - RNA, 23 nt, Artificial Sequence
  Synthetic
gaggaaggagggagggagggagg

SEQ ID NO: 586953 - RNA, 24 nt, Artificial Sequence
  Synthetic
ggaggaaggagggagggagggagg

SEQ ID NO: 586954 - RNA, 20 nt, Artificial Sequence
  Synthetic
cagggagggagggagggagg

SEQ ID NO: 586955 - RNA, 21 nt, Artificial Sequence
  Synthetic
ucagggagggagggagggagg

SEQ ID NO: 586956 - RNA, 22 nt, Artificial Sequence
  Synthetic
gucagggagggagggagggagg

SEQ ID NO: 586957 - RNA, 23 nt, Artificial Sequence
  Synthetic
agucagggagggagggagggagg

SEQ ID NO: 586958 - RNA, 24 nt, Artificial Sequence
  Synthetic
aagucagggagggagggagggagg

SEQ ID NO: 586959 - RNA, 18 nt, Artificial Sequence
  Synthetic
ucccagcuacuagggagg

SEQ ID NO: 586960 - RNA, 21 nt, Artificial Sequence
  Synthetic
uaaucccagcuacuagggagg

SEQ ID NO: 586961 - RNA, 22 nt, Artificial Sequence
  Synthetic
guaaucccagcuacuagggagg

SEQ ID NO: 586962 - RNA, 23 nt, Artificial Sequence
  Synthetic
uguaaucccagcuacuagggagg

SEQ ID NO: 586963 - RNA, 24 nt, Artificial Sequence
  Synthetic
cuguaaucccagcuacuagggagg

SEQ ID NO: 586964 - RNA, 19 nt, Artificial Sequence
  Synthetic
gucccagcuacuagggagg

SEQ ID NO: 586965 - RNA, 20 nt, Artificial Sequence
  Synthetic
agucccagcuacuagggagg

SEQ ID NO: 586966 - RNA, 21 nt, Artificial Sequence
  Synthetic
uagucccagcuacuagggagg

SEQ ID NO: 586967 - RNA, 22 nt, Artificial Sequence
  Synthetic
guagucccagcuacuagggagg

SEQ ID NO: 586968 - RNA, 23 nt, Artificial Sequence
  Synthetic
aguagucccagcuacuagggagg

SEQ ID NO: 586969 - RNA, 24 nt, Artificial Sequence
  Synthetic
uaguagucccagcuacuagggagg

SEQ ID NO: 586970 - RNA, 18 nt, Artificial Sequence
  Synthetic
ucccagcuacacgggagg

SEQ ID NO: 586971 - RNA, 19 nt, Artificial Sequence
  Synthetic
gucccagcuacacgggagg

SEQ ID NO: 586972 - RNA, 20 nt, Artificial Sequence
  Synthetic
agucccagcuacacgggagg

SEQ ID NO: 586973 - RNA, 21 nt, Artificial Sequence
  Synthetic
uagucccagcuacacgggagg

SEQ ID NO: 586974 - RNA, 22 nt, Artificial Sequence
  Synthetic
guagucccagcuacacgggagg

SEQ ID NO: 586975 - RNA, 23 nt, Artificial Sequence
  Synthetic
uguagucccagcuacacgggagg

SEQ ID NO: 586976 - RNA, 24 nt, Artificial Sequence
  Synthetic
cuguagucccagcuacacgggagg

SEQ ID NO: 586977 - RNA, 18 nt, Artificial Sequence
  Synthetic
uggcguaaacccgggagg

SEQ ID NO: 586978 - RNA, 19 nt, Artificial Sequence
  Synthetic
auggcguaaacccgggagg

SEQ ID NO: 586979 - RNA, 20 nt, Artificial Sequence
  Synthetic
aauggcguaaacccgggagg

SEQ ID NO: 586980 - RNA, 21 nt, Artificial Sequence
  Synthetic
gaauggcguaaacccgggagg

SEQ ID NO: 586981 - RNA, 22 nt, Artificial Sequence
  Synthetic
agaauggcguaaacccgggagg

SEQ ID NO: 586982 - RNA, 23 nt, Artificial Sequence
  Synthetic
gagaauggcguaaacccgggagg

SEQ ID NO: 586983 - RNA, 24 nt, Artificial Sequence
  Synthetic
ggagaauggcguaaacccgggagg

SEQ ID NO: 586984 - RNA, 21 nt, Artificial Sequence
  Synthetic
gaauggcgugaacccgggagg

SEQ ID NO: 586985 - RNA, 22 nt, Artificial Sequence
  Synthetic
agaauggcgugaacccgggagg

SEQ ID NO: 586986 - RNA, 23 nt, Artificial Sequence
  Synthetic
gagaauggcgugaacccgggagg

SEQ ID NO: 586987 - RNA, 24 nt, Artificial Sequence
  Synthetic
ggagaauggcgugaacccgggagg

SEQ ID NO: 586988 - RNA, 21 nt, Artificial Sequence
  Synthetic
gaaucacuugaacccgggagg

SEQ ID NO: 586989 - RNA, 22 nt, Artificial Sequence
  Synthetic
agaaucacuugaacccgggagg

SEQ ID NO: 586990 - RNA, 23 nt, Artificial Sequence
  Synthetic
aagaaucacuugaacccgggagg

SEQ ID NO: 586991 - RNA, 24 nt, Artificial Sequence
  Synthetic
caagaaucacuugaacccgggagg

SEQ ID NO: 586992 - RNA, 24 nt, Artificial Sequence
  Synthetic
gaagaaucacuugaacccgggagg

SEQ ID NO: 586993 - RNA, 21 nt, Artificial Sequence
  Synthetic
gaaucgcuugaacccgggagg

SEQ ID NO: 586994 - RNA, 22 nt, Artificial Sequence
  Synthetic
agaaucgcuugaacccgggagg

SEQ ID NO: 586995 - RNA, 23 nt, Artificial Sequence
  Synthetic
gagaaucgcuugaacccgggagg

SEQ ID NO: 586996 - RNA, 24 nt, Artificial Sequence
  Synthetic
ggagaaucgcuugaacccgggagg

SEQ ID NO: 586997 - RNA, 21 nt, Artificial Sequence
  Synthetic
gaauugcuugaacccgggagg

SEQ ID NO: 586998 - RNA, 22 nt, Artificial Sequence
  Synthetic
agaauugcuugaacccgggagg

SEQ ID NO: 586999 - RNA, 23 nt, Artificial Sequence
  Synthetic
gagaauugcuugaacccgggagg

SEQ ID NO: 587000 - RNA, 24 nt, Artificial Sequence
  Synthetic
ggagaauugcuugaacccgggagg

SEQ ID NO: 587001 - RNA, 18 nt, Artificial Sequence
  Synthetic
ucauuugaacccgggagg

SEQ ID NO: 587002 - RNA, 19 nt, Artificial Sequence
  Synthetic
aucauuugaacccgggagg

SEQ ID NO: 587003 - RNA, 20 nt, Artificial Sequence
  Synthetic
aaucauuugaacccgggagg

SEQ ID NO: 587004 - RNA, 21 nt, Artificial Sequence
  Synthetic
gaaucauuugaacccgggagg

SEQ ID NO: 587005 - RNA, 22 nt, Artificial Sequence
  Synthetic
agaaucauuugaacccgggagg

SEQ ID NO: 587006 - RNA, 23 nt, Artificial Sequence
  Synthetic
gagaaucauuugaacccgggagg

SEQ ID NO: 587007 - RNA, 24 nt, Artificial Sequence
  Synthetic
ggagaaucauuugaacccgggagg

SEQ ID NO: 587008 - RNA, 18 nt, Artificial Sequence
  Synthetic
ccucagcuacccgggagg

SEQ ID NO: 587009 - RNA, 19 nt, Artificial Sequence
  Synthetic
gccucagcuacccgggagg

SEQ ID NO: 587010 - RNA, 20 nt, Artificial Sequence
  Synthetic
agccucagcuacccgggagg

SEQ ID NO: 587011 - RNA, 21 nt, Artificial Sequence
  Synthetic
uagccucagcuacccgggagg

SEQ ID NO: 587012 - RNA, 22 nt, Artificial Sequence
  Synthetic
guagccucagcuacccgggagg

SEQ ID NO: 587013 - RNA, 23 nt, Artificial Sequence
  Synthetic
aguagccucagcuacccgggagg

SEQ ID NO: 587014 - RNA, 24 nt, Artificial Sequence
  Synthetic
caguagccucagcuacccgggagg

SEQ ID NO: 587015 - RNA, 21 nt, Artificial Sequence
  Synthetic
gaaucacuugaacucgggagg

SEQ ID NO: 587016 - RNA, 22 nt, Artificial Sequence
  Synthetic
agaaucacuugaacucgggagg

SEQ ID NO: 587017 - RNA, 23 nt, Artificial Sequence
  Synthetic
gagaaucacuugaacucgggagg

SEQ ID NO: 587018 - RNA, 24 nt, Artificial Sequence
  Synthetic
ggagaaucacuugaacucgggagg

SEQ ID NO: 587019 - RNA, 18 nt, Artificial Sequence
  Synthetic
ucccagccacucgggagg

SEQ ID NO: 587020 - RNA, 19 nt, Artificial Sequence
  Synthetic
aucccagccacucgggagg

SEQ ID NO: 587021 - RNA, 20 nt, Artificial Sequence
  Synthetic
aaucccagccacucgggagg

SEQ ID NO: 587022 - RNA, 21 nt, Artificial Sequence
  Synthetic
uaaucccagccacucgggagg

SEQ ID NO: 587023 - RNA, 22 nt, Artificial Sequence
  Synthetic
guaaucccagccacucgggagg

SEQ ID NO: 587024 - RNA, 23 nt, Artificial Sequence
  Synthetic
uguaaucccagccacucgggagg

SEQ ID NO: 587025 - RNA, 24 nt, Artificial Sequence
  Synthetic
cuguaaucccagccacucgggagg

SEQ ID NO: 587026 - RNA, 18 nt, Artificial Sequence
  Synthetic
uaccagcuacucgggagg

SEQ ID NO: 587027 - RNA, 19 nt, Artificial Sequence
  Synthetic
guaccagcuacucgggagg

SEQ ID NO: 587028 - RNA, 20 nt, Artificial Sequence
  Synthetic
aguaccagcuacucgggagg

SEQ ID NO: 587029 - RNA, 21 nt, Artificial Sequence
  Synthetic
uaguaccagcuacucgggagg

SEQ ID NO: 587030 - RNA, 22 nt, Artificial Sequence
  Synthetic
guaguaccagcuacucgggagg

SEQ ID NO: 587031 - RNA, 23 nt, Artificial Sequence
  Synthetic
uguaguaccagcuacucgggagg

SEQ ID NO: 587032 - RNA, 24 nt, Artificial Sequence
  Synthetic
cuguaguaccagcuacucgggagg

SEQ ID NO: 587033 - RNA, 24 nt, Artificial Sequence
  Synthetic
cuguagucccagcuacucgggagg

SEQ ID NO: 587034 - RNA, 21 nt, Artificial Sequence
  Synthetic
uaaucucagcuacucgggagg

SEQ ID NO: 587035 - RNA, 22 nt, Artificial Sequence
  Synthetic
guaaucucagcuacucgggagg

SEQ ID NO: 587036 - RNA, 23 nt, Artificial Sequence
  Synthetic
uguaaucucagcuacucgggagg

SEQ ID NO: 587037 - RNA, 24 nt, Artificial Sequence
  Synthetic
cuguaaucucagcuacucgggagg

SEQ ID NO: 587038 - RNA, 18 nt, Artificial Sequence
  Synthetic
ucccaguuacucgggagg

SEQ ID NO: 587039 - RNA, 19 nt, Artificial Sequence
  Synthetic
aucccaguuacucgggagg

SEQ ID NO: 587040 - RNA, 20 nt, Artificial Sequence
  Synthetic
aaucccaguuacucgggagg

SEQ ID NO: 587041 - RNA, 21 nt, Artificial Sequence
  Synthetic
uaaucccaguuacucgggagg

SEQ ID NO: 587042 - RNA, 22 nt, Artificial Sequence
  Synthetic
guaaucccaguuacucgggagg

SEQ ID NO: 587043 - RNA, 23 nt, Artificial Sequence
  Synthetic
uguaaucccaguuacucgggagg

SEQ ID NO: 587044 - RNA, 24 nt, Artificial Sequence
  Synthetic
cuguaaucccaguuacucgggagg

SEQ ID NO: 587045 - RNA, 18 nt, Artificial Sequence
  Synthetic
uaccagcugcucgggagg

SEQ ID NO: 587046 - RNA, 19 nt, Artificial Sequence
  Synthetic
guaccagcugcucgggagg

SEQ ID NO: 587047 - RNA, 20 nt, Artificial Sequence
  Synthetic
gguaccagcugcucgggagg

SEQ ID NO: 587048 - RNA, 21 nt, Artificial Sequence
  Synthetic
ugguaccagcugcucgggagg

SEQ ID NO: 587049 - RNA, 22 nt, Artificial Sequence
  Synthetic
gugguaccagcugcucgggagg

SEQ ID NO: 587050 - RNA, 23 nt, Artificial Sequence
  Synthetic
ugugguaccagcugcucgggagg

SEQ ID NO: 587051 - RNA, 24 nt, Artificial Sequence
  Synthetic
cugugguaccagcugcucgggagg

SEQ ID NO: 587052 - RNA, 18 nt, Artificial Sequence
  Synthetic
aauuuuauuuaggggagg

SEQ ID NO: 587053 - RNA, 19 nt, Artificial Sequence
  Synthetic
gaauuuuauuuaggggagg

SEQ ID NO: 587054 - RNA, 20 nt, Artificial Sequence
  Synthetic
ggaauuuuauuuaggggagg

SEQ ID NO: 587055 - RNA, 21 nt, Artificial Sequence
  Synthetic
aggaauuuuauuuaggggagg

SEQ ID NO: 587056 - RNA, 22 nt, Artificial Sequence
  Synthetic
aaggaauuuuauuuaggggagg

SEQ ID NO: 587057 - RNA, 23 nt, Artificial Sequence
  Synthetic
aaaggaauuuuauuuaggggagg

SEQ ID NO: 587058 - RNA, 24 nt, Artificial Sequence
  Synthetic
caaaggaauuuuauuuaggggagg

SEQ ID NO: 587059 - RNA, 18 nt, Artificial Sequence
  Synthetic
gggggguugagggggagg

SEQ ID NO: 587060 - RNA, 19 nt, Artificial Sequence
  Synthetic
ggggggguugagggggagg

SEQ ID NO: 587061 - RNA, 20 nt, Artificial Sequence
  Synthetic
uggggggguugagggggagg

SEQ ID NO: 587062 - RNA, 21 nt, Artificial Sequence
  Synthetic
guggggggguugagggggagg

SEQ ID NO: 587063 - RNA, 22 nt, Artificial Sequence
  Synthetic
aguggggggguugagggggagg

SEQ ID NO: 587064 - RNA, 23 nt, Artificial Sequence
  Synthetic
uaguggggggguugagggggagg

SEQ ID NO: 587065 - RNA, 24 nt, Artificial Sequence
  Synthetic
guaguggggggguugagggggagg

SEQ ID NO: 587066 - RNA, 18 nt, Artificial Sequence
  Synthetic
ucccagcuacgggggagg

SEQ ID NO: 587067 - RNA, 19 nt, Artificial Sequence
  Synthetic
gucccagcuacgggggagg

SEQ ID NO: 587068 - RNA, 20 nt, Artificial Sequence
  Synthetic
agucccagcuacgggggagg

SEQ ID NO: 587069 - RNA, 21 nt, Artificial Sequence
  Synthetic
uagucccagcuacgggggagg

SEQ ID NO: 587070 - RNA, 22 nt, Artificial Sequence
  Synthetic
guagucccagcuacgggggagg

SEQ ID NO: 587071 - RNA, 23 nt, Artificial Sequence
  Synthetic
uguagucccagcuacgggggagg

SEQ ID NO: 587072 - RNA, 24 nt, Artificial Sequence
  Synthetic
cuguagucccagcuacgggggagg

SEQ ID NO: 587073 - RNA, 18 nt, Artificial Sequence
  Synthetic
cugugggguggggggagg

SEQ ID NO: 587074 - RNA, 19 nt, Artificial Sequence
  Synthetic
gcugugggguggggggagg

SEQ ID NO: 587075 - RNA, 20 nt, Artificial Sequence
  Synthetic
ugcugugggguggggggagg

SEQ ID NO: 587076 - RNA, 21 nt, Artificial Sequence
  Synthetic
cugcugugggguggggggagg

SEQ ID NO: 587077 - RNA, 22 nt, Artificial Sequence
  Synthetic
ccugcugugggguggggggagg

SEQ ID NO: 587078 - RNA, 23 nt, Artificial Sequence
  Synthetic
gccugcugugggguggggggagg

SEQ ID NO: 587079 - RNA, 24 nt, Artificial Sequence
  Synthetic
ggccugcugugggguggggggagg

SEQ ID NO: 587080 - RNA, 21 nt, Artificial Sequence
  Synthetic
cuguugugggguggggggagg

SEQ ID NO: 587081 - RNA, 22 nt, Artificial Sequence
  Synthetic
acuguugugggguggggggagg

SEQ ID NO: 587082 - RNA, 23 nt, Artificial Sequence
  Synthetic
aacuguugugggguggggggagg

SEQ ID NO: 587083 - RNA, 24 nt, Artificial Sequence
  Synthetic
gaacuguugugggguggggggagg

SEQ ID NO: 587084 - RNA, 23 nt, Artificial Sequence
  Synthetic
gacuguugugggguggggggagg

SEQ ID NO: 587085 - RNA, 24 nt, Artificial Sequence
  Synthetic
ggacuguugugggguggggggagg

SEQ ID NO: 587086 - RNA, 22 nt, Artificial Sequence
  Synthetic
ccuguugugggguggggggagg

SEQ ID NO: 587087 - RNA, 23 nt, Artificial Sequence
  Synthetic
gccuguugugggguggggggagg

SEQ ID NO: 587088 - RNA, 24 nt, Artificial Sequence
  Synthetic
ggccuguugugggguggggggagg

SEQ ID NO: 587089 - RNA, 18 nt, Artificial Sequence
  Synthetic
guguguagaugggggagg

SEQ ID NO: 587090 - RNA, 19 nt, Artificial Sequence
  Synthetic
uguguguagaugggggagg

SEQ ID NO: 587091 - RNA, 20 nt, Artificial Sequence
  Synthetic
auguguguagaugggggagg

SEQ ID NO: 587092 - RNA, 21 nt, Artificial Sequence
  Synthetic
uauguguguagaugggggagg

SEQ ID NO: 587093 - RNA, 22 nt, Artificial Sequence
  Synthetic
guauguguguagaugggggagg

SEQ ID NO: 587094 - RNA, 23 nt, Artificial Sequence
  Synthetic
aguauguguguagaugggggagg

SEQ ID NO: 587095 - RNA, 24 nt, Artificial Sequence
  Synthetic
aaguauguguguagaugggggagg

SEQ ID NO: 587096 - RNA, 18 nt, Artificial Sequence
  Synthetic
acuacuagaguggggagg

SEQ ID NO: 587097 - RNA, 19 nt, Artificial Sequence
  Synthetic
gacuacuagaguggggagg

SEQ ID NO: 587098 - RNA, 20 nt, Artificial Sequence
  Synthetic
ggacuacuagaguggggagg

SEQ ID NO: 587099 - RNA, 21 nt, Artificial Sequence
  Synthetic
aggacuacuagaguggggagg

SEQ ID NO: 587100 - RNA, 22 nt, Artificial Sequence
  Synthetic
gaggacuacuagaguggggagg

SEQ ID NO: 587101 - RNA, 23 nt, Artificial Sequence
  Synthetic
ggaggacuacuagaguggggagg

SEQ ID NO: 587102 - RNA, 24 nt, Artificial Sequence
  Synthetic
cggaggacuacuagaguggggagg

SEQ ID NO: 587103 - RNA, 18 nt, Artificial Sequence
  Synthetic
ccuacuggaguggggagg

SEQ ID NO: 587104 - RNA, 19 nt, Artificial Sequence
  Synthetic
gccuacuggaguggggagg

SEQ ID NO: 587105 - RNA, 20 nt, Artificial Sequence
  Synthetic
agccuacuggaguggggagg

SEQ ID NO: 587106 - RNA, 21 nt, Artificial Sequence
  Synthetic
aagccuacuggaguggggagg

SEQ ID NO: 587107 - RNA, 22 nt, Artificial Sequence
  Synthetic
gaagccuacuggaguggggagg

SEQ ID NO: 587108 - RNA, 23 nt, Artificial Sequence
  Synthetic
ggaagccuacuggaguggggagg

SEQ ID NO: 587109 - RNA, 24 nt, Artificial Sequence
  Synthetic
uggaagccuacuggaguggggagg

SEQ ID NO: 587110 - RNA, 18 nt, Artificial Sequence
  Synthetic
ggaagggucguggggagg

SEQ ID NO: 587111 - RNA, 19 nt, Artificial Sequence
  Synthetic
gggaagggucguggggagg

SEQ ID NO: 587112 - RNA, 20 nt, Artificial Sequence
  Synthetic
ugggaagggucguggggagg

SEQ ID NO: 587113 - RNA, 21 nt, Artificial Sequence
  Synthetic
augggaagggucguggggagg

SEQ ID NO: 587114 - RNA, 22 nt, Artificial Sequence
  Synthetic
gaugggaagggucguggggagg

SEQ ID NO: 587115 - RNA, 23 nt, Artificial Sequence
  Synthetic
ggaugggaagggucguggggagg

SEQ ID NO: 587116 - RNA, 24 nt, Artificial Sequence
  Synthetic
aggaugggaagggucguggggagg

SEQ ID NO: 587117 - RNA, 18 nt, Artificial Sequence
  Synthetic
cccagcacuuuggggagg

SEQ ID NO: 587118 - RNA, 19 nt, Artificial Sequence
  Synthetic
ucccagcacuuuggggagg

SEQ ID NO: 587119 - RNA, 20 nt, Artificial Sequence
  Synthetic
aucccagcacuuuggggagg

SEQ ID NO: 587120 - RNA, 21 nt, Artificial Sequence
  Synthetic
aaucccagcacuuuggggagg

SEQ ID NO: 587121 - RNA, 22 nt, Artificial Sequence
  Synthetic
uaaucccagcacuuuggggagg

SEQ ID NO: 587122 - RNA, 23 nt, Artificial Sequence
  Synthetic
guaaucccagcacuuuggggagg

SEQ ID NO: 587123 - RNA, 24 nt, Artificial Sequence
  Synthetic
uguaaucccagcacuuuggggagg

SEQ ID NO: 587124 - RNA, 18 nt, Artificial Sequence
  Synthetic
aagcuugaacaugggagg

SEQ ID NO: 587125 - RNA, 19 nt, Artificial Sequence
  Synthetic
aaagcuugaacaugggagg

SEQ ID NO: 587126 - RNA, 20 nt, Artificial Sequence
  Synthetic
aaaagcuugaacaugggagg

SEQ ID NO: 587127 - RNA, 21 nt, Artificial Sequence
  Synthetic
gaaaagcuugaacaugggagg

SEQ ID NO: 587128 - RNA, 22 nt, Artificial Sequence
  Synthetic
cgaaaagcuugaacaugggagg

SEQ ID NO: 587129 - RNA, 23 nt, Artificial Sequence
  Synthetic
acgaaaagcuugaacaugggagg

SEQ ID NO: 587130 - RNA, 24 nt, Artificial Sequence
  Synthetic
cacgaaaagcuugaacaugggagg

SEQ ID NO: 587131 - RNA, 18 nt, Artificial Sequence
  Synthetic
ucccagcacuaugggagg

SEQ ID NO: 587132 - RNA, 19 nt, Artificial Sequence
  Synthetic
aucccagcacuaugggagg

SEQ ID NO: 587133 - RNA, 20 nt, Artificial Sequence
  Synthetic
aaucccagcacuaugggagg

SEQ ID NO: 587134 - RNA, 21 nt, Artificial Sequence
  Synthetic
uaaucccagcacuaugggagg

SEQ ID NO: 587135 - RNA, 22 nt, Artificial Sequence
  Synthetic
guaaucccagcacuaugggagg

SEQ ID NO: 587136 - RNA, 23 nt, Artificial Sequence
  Synthetic
uguaaucccagcacuaugggagg

SEQ ID NO: 587137 - RNA, 24 nt, Artificial Sequence
  Synthetic
cuguaaucccagcacuaugggagg

SEQ ID NO: 587138 - RNA, 18 nt, Artificial Sequence
  Synthetic
ccacuugaaccugggagg

SEQ ID NO: 587139 - RNA, 19 nt, Artificial Sequence
  Synthetic
accacuugaaccugggagg

SEQ ID NO: 587140 - RNA, 20 nt, Artificial Sequence
  Synthetic
aaccacuugaaccugggagg

SEQ ID NO: 587141 - RNA, 21 nt, Artificial Sequence
  Synthetic
gaaccacuugaaccugggagg

SEQ ID NO: 587142 - RNA, 22 nt, Artificial Sequence
  Synthetic
agaaccacuugaaccugggagg

SEQ ID NO: 587143 - RNA, 23 nt, Artificial Sequence
  Synthetic
gagaaccacuugaaccugggagg

SEQ ID NO: 587144 - RNA, 24 nt, Artificial Sequence
  Synthetic
ggagaaccacuugaaccugggagg

SEQ ID NO: 587145 - RNA, 21 nt, Artificial Sequence
  Synthetic
gaaucacuugaaccugggagg

SEQ ID NO: 587146 - RNA, 22 nt, Artificial Sequence
  Synthetic
agaaucacuugaaccugggagg

SEQ ID NO: 587147 - RNA, 23 nt, Artificial Sequence
  Synthetic
gagaaucacuugaaccugggagg

SEQ ID NO: 587148 - RNA, 24 nt, Artificial Sequence
  Synthetic
ggagaaucacuugaaccugggagg

SEQ ID NO: 587149 - RNA, 18 nt, Artificial Sequence
  Synthetic
gcgcuugaaccugggagg

SEQ ID NO: 587150 - RNA, 19 nt, Artificial Sequence
  Synthetic
agcgcuugaaccugggagg

SEQ ID NO: 587151 - RNA, 20 nt, Artificial Sequence
  Synthetic
aagcgcuugaaccugggagg

SEQ ID NO: 587152 - RNA, 21 nt, Artificial Sequence
  Synthetic
gaagcgcuugaaccugggagg

SEQ ID NO: 587153 - RNA, 22 nt, Artificial Sequence
  Synthetic
agaagcgcuugaaccugggagg

SEQ ID NO: 587154 - RNA, 23 nt, Artificial Sequence
  Synthetic
gagaagcgcuugaaccugggagg

SEQ ID NO: 587155 - RNA, 24 nt, Artificial Sequence
  Synthetic
ugagaagcgcuugaaccugggagg

SEQ ID NO: 587156 - RNA, 18 nt, Artificial Sequence
  Synthetic
ucgcuugaaucugggagg

SEQ ID NO: 587157 - RNA, 19 nt, Artificial Sequence
  Synthetic
aucgcuugaaucugggagg

SEQ ID NO: 587158 - RNA, 20 nt, Artificial Sequence
  Synthetic
aaucgcuugaaucugggagg

SEQ ID NO: 587159 - RNA, 21 nt, Artificial Sequence
  Synthetic
gaaucgcuugaaucugggagg

SEQ ID NO: 587160 - RNA, 22 nt, Artificial Sequence
  Synthetic
agaaucgcuugaaucugggagg

SEQ ID NO: 587161 - RNA, 23 nt, Artificial Sequence
  Synthetic
gagaaucgcuugaaucugggagg

SEQ ID NO: 587162 - RNA, 24 nt, Artificial Sequence
  Synthetic
ggagaaucgcuugaaucugggagg

SEQ ID NO: 587163 - RNA, 21 nt, Artificial Sequence
  Synthetic
uaaucccagcacucugggagg

SEQ ID NO: 587164 - RNA, 22 nt, Artificial Sequence
  Synthetic
guaaucccagcacucugggagg

SEQ ID NO: 587165 - RNA, 23 nt, Artificial Sequence
  Synthetic
uguaaucccagcacucugggagg

SEQ ID NO: 587166 - RNA, 24 nt, Artificial Sequence
  Synthetic
cuguaaucccagcacucugggagg

SEQ ID NO: 587167 - RNA, 18 nt, Artificial Sequence
  Synthetic
aguggggagggugggagg

SEQ ID NO: 587168 - RNA, 19 nt, Artificial Sequence
  Synthetic
gaguggggagggugggagg

SEQ ID NO: 587169 - RNA, 20 nt, Artificial Sequence
  Synthetic
ggaguggggagggugggagg

SEQ ID NO: 587170 - RNA, 21 nt, Artificial Sequence
  Synthetic
uggaguggggagggugggagg

SEQ ID NO: 587171 - RNA, 22 nt, Artificial Sequence
  Synthetic
cuggaguggggagggugggagg

SEQ ID NO: 587172 - RNA, 23 nt, Artificial Sequence
  Synthetic
acuggaguggggagggugggagg

SEQ ID NO: 587173 - RNA, 24 nt, Artificial Sequence
  Synthetic
uacuggaguggggagggugggagg

SEQ ID NO: 587174 - RNA, 18 nt, Artificial Sequence
  Synthetic
aacauaaaaugugggagg

SEQ ID NO: 587175 - RNA, 19 nt, Artificial Sequence
  Synthetic
aaacauaaaaugugggagg

SEQ ID NO: 587176 - RNA, 20 nt, Artificial Sequence
  Synthetic
gaaacauaaaaugugggagg

SEQ ID NO: 587177 - RNA, 21 nt, Artificial Sequence
  Synthetic
agaaacauaaaaugugggagg

SEQ ID NO: 587178 - RNA, 22 nt, Artificial Sequence
  Synthetic
uagaaacauaaaaugugggagg

SEQ ID NO: 587179 - RNA, 23 nt, Artificial Sequence
  Synthetic
uuagaaacauaaaaugugggagg

SEQ ID NO: 587180 - RNA, 24 nt, Artificial Sequence
  Synthetic
guuagaaacauaaaaugugggagg

SEQ ID NO: 587181 - RNA, 18 nt, Artificial Sequence
  Synthetic
aggagcuugugugggagg

SEQ ID NO: 587182 - RNA, 19 nt, Artificial Sequence
  Synthetic
aaggagcuugugugggagg

SEQ ID NO: 587183 - RNA, 20 nt, Artificial Sequence
  Synthetic
uaaggagcuugugugggagg

SEQ ID NO: 587184 - RNA, 21 nt, Artificial Sequence
  Synthetic
auaaggagcuugugugggagg

SEQ ID NO: 587185 - RNA, 22 nt, Artificial Sequence
  Synthetic
uauaaggagcuugugugggagg

SEQ ID NO: 587186 - RNA, 23 nt, Artificial Sequence
  Synthetic
cuauaaggagcuugugugggagg

SEQ ID NO: 587187 - RNA, 24 nt, Artificial Sequence
  Synthetic
ucuauaaggagcuugugugggagg

SEQ ID NO: 587188 - RNA, 18 nt, Artificial Sequence
  Synthetic
uuacauccgauugggagg

SEQ ID NO: 587189 - RNA, 19 nt, Artificial Sequence
  Synthetic
cuuacauccgauugggagg

SEQ ID NO: 587190 - RNA, 20 nt, Artificial Sequence
  Synthetic
ccuuacauccgauugggagg

SEQ ID NO: 587191 - RNA, 21 nt, Artificial Sequence
  Synthetic
accuuacauccgauugggagg

SEQ ID NO: 587192 - RNA, 22 nt, Artificial Sequence
  Synthetic
gaccuuacauccgauugggagg

SEQ ID NO: 587193 - RNA, 23 nt, Artificial Sequence
  Synthetic
ggaccuuacauccgauugggagg

SEQ ID NO: 587194 - RNA, 24 nt, Artificial Sequence
  Synthetic
uggaccuuacauccgauugggagg

SEQ ID NO: 587195 - RNA, 18 nt, Artificial Sequence
  Synthetic
ucacuugaacuugggagg

SEQ ID NO: 587196 - RNA, 19 nt, Artificial Sequence
  Synthetic
aucacuugaacuugggagg

SEQ ID NO: 587197 - RNA, 20 nt, Artificial Sequence
  Synthetic
aaucacuugaacuugggagg

SEQ ID NO: 587198 - RNA, 21 nt, Artificial Sequence
  Synthetic
gaaucacuugaacuugggagg

SEQ ID NO: 587199 - RNA, 22 nt, Artificial Sequence
  Synthetic
agaaucacuugaacuugggagg

SEQ ID NO: 587200 - RNA, 23 nt, Artificial Sequence
  Synthetic
gagaaucacuugaacuugggagg

SEQ ID NO: 587201 - RNA, 24 nt, Artificial Sequence
  Synthetic
ggagaaucacuugaacuugggagg

SEQ ID NO: 587202 - RNA, 18 nt, Artificial Sequence
  Synthetic
ucccagccacuugggagg

SEQ ID NO: 587203 - RNA, 19 nt, Artificial Sequence
  Synthetic
gucccagccacuugggagg

SEQ ID NO: 587204 - RNA, 20 nt, Artificial Sequence
  Synthetic
agucccagccacuugggagg

SEQ ID NO: 587205 - RNA, 21 nt, Artificial Sequence
  Synthetic
uagucccagccacuugggagg

SEQ ID NO: 587206 - RNA, 22 nt, Artificial Sequence
  Synthetic
guagucccagccacuugggagg

SEQ ID NO: 587207 - RNA, 23 nt, Artificial Sequence
  Synthetic
uguagucccagccacuugggagg

SEQ ID NO: 587208 - RNA, 24 nt, Artificial Sequence
  Synthetic
cuguagucccagccacuugggagg

SEQ ID NO: 587209 - RNA, 18 nt, Artificial Sequence
  Synthetic
ucccagcuacuugggagg

SEQ ID NO: 587210 - RNA, 19 nt, Artificial Sequence
  Synthetic
aucccagcuacuugggagg

SEQ ID NO: 587211 - RNA, 22 nt, Artificial Sequence
  Synthetic
cuaaucccagcuacuugggagg

SEQ ID NO: 587212 - RNA, 23 nt, Artificial Sequence
  Synthetic
ucuaaucccagcuacuugggagg

SEQ ID NO: 587213 - RNA, 24 nt, Artificial Sequence
  Synthetic
cucuaaucccagcuacuugggagg

SEQ ID NO: 587214 - RNA, 24 nt, Artificial Sequence
  Synthetic
cuguaaucccagcuacuugggagg

SEQ ID NO: 587215 - RNA, 20 nt, Artificial Sequence
  Synthetic
uaucccagcuacuugggagg

SEQ ID NO: 587216 - RNA, 21 nt, Artificial Sequence
  Synthetic
guaucccagcuacuugggagg

SEQ ID NO: 587217 - RNA, 22 nt, Artificial Sequence
  Synthetic
uguaucccagcuacuugggagg

SEQ ID NO: 587218 - RNA, 23 nt, Artificial Sequence
  Synthetic
cuguaucccagcuacuugggagg

SEQ ID NO: 587219 - RNA, 24 nt, Artificial Sequence
  Synthetic
ccuguaucccagcuacuugggagg

SEQ ID NO: 587220 - RNA, 19 nt, Artificial Sequence
  Synthetic
aucucagcuacuugggagg

SEQ ID NO: 587221 - RNA, 20 nt, Artificial Sequence
  Synthetic
aaucucagcuacuugggagg

SEQ ID NO: 587222 - RNA, 21 nt, Artificial Sequence
  Synthetic
uaaucucagcuacuugggagg

SEQ ID NO: 587223 - RNA, 22 nt, Artificial Sequence
  Synthetic
guaaucucagcuacuugggagg

SEQ ID NO: 587224 - RNA, 23 nt, Artificial Sequence
  Synthetic
uguaaucucagcuacuugggagg

SEQ ID NO: 587225 - RNA, 24 nt, Artificial Sequence
  Synthetic
cuguaaucucagcuacuugggagg

SEQ ID NO: 587226 - RNA, 18 nt, Artificial Sequence
  Synthetic
ucucugcuacuugggagg

SEQ ID NO: 587227 - RNA, 19 nt, Artificial Sequence
  Synthetic
gucucugcuacuugggagg

SEQ ID NO: 587228 - RNA, 20 nt, Artificial Sequence
  Synthetic
agucucugcuacuugggagg

SEQ ID NO: 587229 - RNA, 21 nt, Artificial Sequence
  Synthetic
uagucucugcuacuugggagg

SEQ ID NO: 587230 - RNA, 22 nt, Artificial Sequence
  Synthetic
guagucucugcuacuugggagg

SEQ ID NO: 587231 - RNA, 23 nt, Artificial Sequence
  Synthetic
uguagucucugcuacuugggagg

SEQ ID NO: 587232 - RNA, 24 nt, Artificial Sequence
  Synthetic
cuguagucucugcuacuugggagg

SEQ ID NO: 587233 - RNA, 18 nt, Artificial Sequence
  Synthetic
ucccagcugcuugggagg

SEQ ID NO: 587234 - RNA, 19 nt, Artificial Sequence
  Synthetic
aucccagcugcuugggagg

SEQ ID NO: 587235 - RNA, 20 nt, Artificial Sequence
  Synthetic
aaucccagcugcuugggagg

SEQ ID NO: 587236 - RNA, 21 nt, Artificial Sequence
  Synthetic
uaaucccagcugcuugggagg

SEQ ID NO: 587237 - RNA, 22 nt, Artificial Sequence
  Synthetic
cuaaucccagcugcuugggagg

SEQ ID NO: 587238 - RNA, 23 nt, Artificial Sequence
  Synthetic
ucuaaucccagcugcuugggagg

SEQ ID NO: 587239 - RNA, 24 nt, Artificial Sequence
  Synthetic
cucuaaucccagcugcuugggagg

SEQ ID NO: 587240 - RNA, 18 nt, Artificial Sequence
  Synthetic
uaucagcaauuugggagg

SEQ ID NO: 587241 - RNA, 19 nt, Artificial Sequence
  Synthetic
auaucagcaauuugggagg

SEQ ID NO: 587242 - RNA, 20 nt, Artificial Sequence
  Synthetic
aauaucagcaauuugggagg

SEQ ID NO: 587243 - RNA, 21 nt, Artificial Sequence
  Synthetic
uaauaucagcaauuugggagg

SEQ ID NO: 587244 - RNA, 22 nt, Artificial Sequence
  Synthetic
guaauaucagcaauuugggagg

SEQ ID NO: 587245 - RNA, 23 nt, Artificial Sequence
  Synthetic
uguaauaucagcaauuugggagg

SEQ ID NO: 587246 - RNA, 24 nt, Artificial Sequence
  Synthetic
cuguaauaucagcaauuugggagg

SEQ ID NO: 587247 - RNA, 18 nt, Artificial Sequence
  Synthetic
ucccagcuauuugggagg

SEQ ID NO: 587248 - RNA, 19 nt, Artificial Sequence
  Synthetic
gucccagcuauuugggagg

SEQ ID NO: 587249 - RNA, 20 nt, Artificial Sequence
  Synthetic
agucccagcuauuugggagg

SEQ ID NO: 587250 - RNA, 21 nt, Artificial Sequence
  Synthetic
uagucccagcuauuugggagg

SEQ ID NO: 587251 - RNA, 22 nt, Artificial Sequence
  Synthetic
guagucccagcuauuugggagg

SEQ ID NO: 587252 - RNA, 23 nt, Artificial Sequence
  Synthetic
uguagucccagcuauuugggagg

SEQ ID NO: 587253 - RNA, 24 nt, Artificial Sequence
  Synthetic
cuguagucccagcuauuugggagg

SEQ ID NO: 587254 - RNA, 18 nt, Artificial Sequence
  Synthetic
ucccaguuauuugggagg

SEQ ID NO: 587255 - RNA, 19 nt, Artificial Sequence
  Synthetic
gucccaguuauuugggagg

SEQ ID NO: 587256 - RNA, 20 nt, Artificial Sequence
  Synthetic
agucccaguuauuugggagg

SEQ ID NO: 587257 - RNA, 21 nt, Artificial Sequence
  Synthetic
uagucccaguuauuugggagg

SEQ ID NO: 587258 - RNA, 22 nt, Artificial Sequence
  Synthetic
cuagucccaguuauuugggagg

SEQ ID NO: 587259 - RNA, 23 nt, Artificial Sequence
  Synthetic
ucuagucccaguuauuugggagg

SEQ ID NO: 587260 - RNA, 24 nt, Artificial Sequence
  Synthetic
cucuagucccaguuauuugggagg

SEQ ID NO: 587261 - RNA, 18 nt, Artificial Sequence
  Synthetic
ucccaccacuuugggagg

SEQ ID NO: 587262 - RNA, 19 nt, Artificial Sequence
  Synthetic
aucccaccacuuugggagg

SEQ ID NO: 587263 - RNA, 20 nt, Artificial Sequence
  Synthetic
aaucccaccacuuugggagg

SEQ ID NO: 587264 - RNA, 21 nt, Artificial Sequence
  Synthetic
uaaucccaccacuuugggagg

SEQ ID NO: 587265 - RNA, 22 nt, Artificial Sequence
  Synthetic
guaaucccaccacuuugggagg

SEQ ID NO: 587266 - RNA, 23 nt, Artificial Sequence
  Synthetic
uguaaucccaccacuuugggagg

SEQ ID NO: 587267 - RNA, 24 nt, Artificial Sequence
  Synthetic
cuguaaucccaccacuuugggagg

SEQ ID NO: 587268 - RNA, 18 nt, Artificial Sequence
  Synthetic
uaccagcacuuugggagg

SEQ ID NO: 587269 - RNA, 19 nt, Artificial Sequence
  Synthetic
auaccagcacuuugggagg

SEQ ID NO: 587270 - RNA, 20 nt, Artificial Sequence
  Synthetic
aauaccagcacuuugggagg

SEQ ID NO: 587271 - RNA, 21 nt, Artificial Sequence
  Synthetic
uaauaccagcacuuugggagg

SEQ ID NO: 587272 - RNA, 22 nt, Artificial Sequence
  Synthetic
guaauaccagcacuuugggagg

SEQ ID NO: 587273 - RNA, 23 nt, Artificial Sequence
  Synthetic
uguaauaccagcacuuugggagg

SEQ ID NO: 587274 - RNA, 24 nt, Artificial Sequence
  Synthetic
cuguaauaccagcacuuugggagg

SEQ ID NO: 587275 - RNA, 18 nt, Artificial Sequence
  Synthetic
acccagcacuuugggagg

SEQ ID NO: 587276 - RNA, 19 nt, Artificial Sequence
  Synthetic
aacccagcacuuugggagg

SEQ ID NO: 587277 - RNA, 20 nt, Artificial Sequence
  Synthetic
aaacccagcacuuugggagg

SEQ ID NO: 587278 - RNA, 21 nt, Artificial Sequence
  Synthetic
uaaacccagcacuuugggagg

SEQ ID NO: 587279 - RNA, 22 nt, Artificial Sequence
  Synthetic
guaaacccagcacuuugggagg

SEQ ID NO: 587280 - RNA, 23 nt, Artificial Sequence
  Synthetic
uguaaacccagcacuuugggagg

SEQ ID NO: 587281 - RNA, 24 nt, Artificial Sequence
  Synthetic
cuguaaacccagcacuuugggagg

SEQ ID NO: 587282 - RNA, 18 nt, Artificial Sequence
  Synthetic
ucccagcacuuugggagg

SEQ ID NO: 587283 - RNA, 19 nt, Artificial Sequence
  Synthetic
aucccagcacuuugggagg

SEQ ID NO: 587284 - RNA, 21 nt, Artificial Sequence
  Synthetic
aaaucccagcacuuugggagg

SEQ ID NO: 587285 - RNA, 22 nt, Artificial Sequence
  Synthetic
uaaaucccagcacuuugggagg

SEQ ID NO: 587286 - RNA, 23 nt, Artificial Sequence
  Synthetic
guaaaucccagcacuuugggagg

SEQ ID NO: 587287 - RNA, 24 nt, Artificial Sequence
  Synthetic
uguaaaucccagcacuuugggagg

SEQ ID NO: 587288 - RNA, 21 nt, Artificial Sequence
  Synthetic
caaucccagcacuuugggagg

SEQ ID NO: 587289 - RNA, 22 nt, Artificial Sequence
  Synthetic
gcaaucccagcacuuugggagg

SEQ ID NO: 587290 - RNA, 23 nt, Artificial Sequence
  Synthetic
ugcaaucccagcacuuugggagg

SEQ ID NO: 587291 - RNA, 24 nt, Artificial Sequence
  Synthetic
cugcaaucccagcacuuugggagg

SEQ ID NO: 587292 - RNA, 22 nt, Artificial Sequence
  Synthetic
guaaucccagcacuuugggagg

SEQ ID NO: 587293 - RNA, 23 nt, Artificial Sequence
  Synthetic
aguaaucccagcacuuugggagg

SEQ ID NO: 587294 - RNA, 24 nt, Artificial Sequence
  Synthetic
caguaaucccagcacuuugggagg

SEQ ID NO: 587295 - RNA, 20 nt, Artificial Sequence
  Synthetic
uaucccagcacuuugggagg

SEQ ID NO: 587296 - RNA, 21 nt, Artificial Sequence
  Synthetic
guaucccagcacuuugggagg

SEQ ID NO: 587297 - RNA, 22 nt, Artificial Sequence
  Synthetic
uguaucccagcacuuugggagg

SEQ ID NO: 587298 - RNA, 23 nt, Artificial Sequence
  Synthetic
cuguaucccagcacuuugggagg

SEQ ID NO: 587299 - RNA, 24 nt, Artificial Sequence
  Synthetic
ccuguaucccagcacuuugggagg

SEQ ID NO: 587300 - RNA, 18 nt, Artificial Sequence
  Synthetic
gcucagcacuuugggagg

SEQ ID NO: 587301 - RNA, 19 nt, Artificial Sequence
  Synthetic
ggcucagcacuuugggagg

SEQ ID NO: 587302 - RNA, 20 nt, Artificial Sequence
  Synthetic
uggcucagcacuuugggagg

SEQ ID NO: 587303 - RNA, 21 nt, Artificial Sequence
  Synthetic
guggcucagcacuuugggagg

SEQ ID NO: 587304 - RNA, 22 nt, Artificial Sequence
  Synthetic
gguggcucagcacuuugggagg

SEQ ID NO: 587305 - RNA, 23 nt, Artificial Sequence
  Synthetic
cgguggcucagcacuuugggagg

SEQ ID NO: 587306 - RNA, 24 nt, Artificial Sequence
  Synthetic
gcgguggcucagcacuuugggagg

SEQ ID NO: 587307 - RNA, 21 nt, Artificial Sequence
  Synthetic
uaauccuagcacuuugggagg

SEQ ID NO: 587308 - RNA, 22 nt, Artificial Sequence
  Synthetic
auaauccuagcacuuugggagg

SEQ ID NO: 587309 - RNA, 23 nt, Artificial Sequence
  Synthetic
uauaauccuagcacuuugggagg

SEQ ID NO: 587310 - RNA, 24 nt, Artificial Sequence
  Synthetic
cuauaauccuagcacuuugggagg

SEQ ID NO: 587311 - RNA, 18 nt, Artificial Sequence
  Synthetic
uuuuagcacuuugggagg

SEQ ID NO: 587312 - RNA, 19 nt, Artificial Sequence
  Synthetic
auuuuagcacuuugggagg

SEQ ID NO: 587313 - RNA, 20 nt, Artificial Sequence
  Synthetic
gauuuuagcacuuugggagg

SEQ ID NO: 587314 - RNA, 21 nt, Artificial Sequence
  Synthetic
ugauuuuagcacuuugggagg

SEQ ID NO: 587315 - RNA, 22 nt, Artificial Sequence
  Synthetic
gugauuuuagcacuuugggagg

SEQ ID NO: 587316 - RNA, 23 nt, Artificial Sequence
  Synthetic
ugugauuuuagcacuuugggagg

SEQ ID NO: 587317 - RNA, 24 nt, Artificial Sequence
  Synthetic
cugugauuuuagcacuuugggagg

SEQ ID NO: 587318 - RNA, 18 nt, Artificial Sequence
  Synthetic
uccccgcacuuugggagg

SEQ ID NO: 587319 - RNA, 19 nt, Artificial Sequence
  Synthetic
auccccgcacuuugggagg

SEQ ID NO: 587320 - RNA, 20 nt, Artificial Sequence
  Synthetic
aauccccgcacuuugggagg

SEQ ID NO: 587321 - RNA, 21 nt, Artificial Sequence
  Synthetic
uaauccccgcacuuugggagg

SEQ ID NO: 587322 - RNA, 22 nt, Artificial Sequence
  Synthetic
guaauccccgcacuuugggagg

SEQ ID NO: 587323 - RNA, 23 nt, Artificial Sequence
  Synthetic
uguaauccccgcacuuugggagg

SEQ ID NO: 587324 - RNA, 24 nt, Artificial Sequence
  Synthetic
cuguaauccccgcacuuugggagg

SEQ ID NO: 587325 - RNA, 18 nt, Artificial Sequence
  Synthetic
ucccaggacuuugggagg

SEQ ID NO: 587326 - RNA, 19 nt, Artificial Sequence
  Synthetic
aucccaggacuuugggagg

SEQ ID NO: 587327 - RNA, 20 nt, Artificial Sequence
  Synthetic
aaucccaggacuuugggagg

SEQ ID NO: 587328 - RNA, 21 nt, Artificial Sequence
  Synthetic
uaaucccaggacuuugggagg

SEQ ID NO: 587329 - RNA, 22 nt, Artificial Sequence
  Synthetic
guaaucccaggacuuugggagg

SEQ ID NO: 587330 - RNA, 23 nt, Artificial Sequence
  Synthetic
uguaaucccaggacuuugggagg

SEQ ID NO: 587331 - RNA, 24 nt, Artificial Sequence
  Synthetic
cuguaaucccaggacuuugggagg

SEQ ID NO: 587332 - RNA, 18 nt, Artificial Sequence
  Synthetic
uccaggugcuuugggagg

SEQ ID NO: 587333 - RNA, 19 nt, Artificial Sequence
  Synthetic
auccaggugcuuugggagg

SEQ ID NO: 587334 - RNA, 20 nt, Artificial Sequence
  Synthetic
aauccaggugcuuugggagg

SEQ ID NO: 587335 - RNA, 21 nt, Artificial Sequence
  Synthetic
uaauccaggugcuuugggagg

SEQ ID NO: 587336 - RNA, 22 nt, Artificial Sequence
  Synthetic
guaauccaggugcuuugggagg

SEQ ID NO: 587337 - RNA, 23 nt, Artificial Sequence
  Synthetic
uguaauccaggugcuuugggagg

SEQ ID NO: 587338 - RNA, 24 nt, Artificial Sequence
  Synthetic
cuguaauccaggugcuuugggagg

SEQ ID NO: 587339 - RNA, 18 nt, Artificial Sequence
  Synthetic
ucucagcguuuugggagg

SEQ ID NO: 587340 - RNA, 19 nt, Artificial Sequence
  Synthetic
aucucagcguuuugggagg

SEQ ID NO: 587341 - RNA, 20 nt, Artificial Sequence
  Synthetic
aaucucagcguuuugggagg

SEQ ID NO: 587342 - RNA, 21 nt, Artificial Sequence
  Synthetic
uaaucucagcguuuugggagg

SEQ ID NO: 587343 - RNA, 22 nt, Artificial Sequence
  Synthetic
guaaucucagcguuuugggagg

SEQ ID NO: 587344 - RNA, 23 nt, Artificial Sequence
  Synthetic
uguaaucucagcguuuugggagg

SEQ ID NO: 587345 - RNA, 24 nt, Artificial Sequence
  Synthetic
cuguaaucucagcguuuugggagg

SEQ ID NO: 587346 - RNA, 18 nt, Artificial Sequence
  Synthetic
gagaggaaggaauggagg

SEQ ID NO: 587347 - RNA, 19 nt, Artificial Sequence
  Synthetic
agagaggaaggaauggagg

SEQ ID NO: 587348 - RNA, 20 nt, Artificial Sequence
  Synthetic
aagagaggaaggaauggagg

SEQ ID NO: 587349 - RNA, 21 nt, Artificial Sequence
  Synthetic
gaagagaggaaggaauggagg

SEQ ID NO: 587350 - RNA, 22 nt, Artificial Sequence
  Synthetic
ggaagagaggaaggaauggagg

SEQ ID NO: 587351 - RNA, 23 nt, Artificial Sequence
  Synthetic
aggaagagaggaaggaauggagg

SEQ ID NO: 587352 - RNA, 24 nt, Artificial Sequence
  Synthetic
gaggaagagaggaaggaauggagg

SEQ ID NO: 587353 - RNA, 18 nt, Artificial Sequence
  Synthetic
ugagaaaggaacuggagg

SEQ ID NO: 587354 - RNA, 19 nt, Artificial Sequence
  Synthetic
gugagaaaggaacuggagg

SEQ ID NO: 587355 - RNA, 20 nt, Artificial Sequence
  Synthetic
ggugagaaaggaacuggagg

SEQ ID NO: 587356 - RNA, 21 nt, Artificial Sequence
  Synthetic
uggugagaaaggaacuggagg

SEQ ID NO: 587357 - RNA, 22 nt, Artificial Sequence
  Synthetic
uuggugagaaaggaacuggagg

SEQ ID NO: 587358 - RNA, 23 nt, Artificial Sequence
  Synthetic
cuuggugagaaaggaacuggagg

SEQ ID NO: 587359 - RNA, 24 nt, Artificial Sequence
  Synthetic
gcuuggugagaaaggaacuggagg

SEQ ID NO: 587360 - RNA, 18 nt, Artificial Sequence
  Synthetic
gauguaagagacuggagg

SEQ ID NO: 587361 - RNA, 19 nt, Artificial Sequence
  Synthetic
agauguaagagacuggagg

SEQ ID NO: 587362 - RNA, 20 nt, Artificial Sequence
  Synthetic
gagauguaagagacuggagg

SEQ ID NO: 587363 - RNA, 21 nt, Artificial Sequence
  Synthetic
agagauguaagagacuggagg

SEQ ID NO: 587364 - RNA, 22 nt, Artificial Sequence
  Synthetic
aagagauguaagagacuggagg

SEQ ID NO: 587365 - RNA, 23 nt, Artificial Sequence
  Synthetic
aaagagauguaagagacuggagg

SEQ ID NO: 587366 - RNA, 24 nt, Artificial Sequence
  Synthetic
aaaagagauguaagagacuggagg

SEQ ID NO: 587367 - RNA, 18 nt, Artificial Sequence
  Synthetic
uugcuugaagccuggagg

SEQ ID NO: 587368 - RNA, 19 nt, Artificial Sequence
  Synthetic
auugcuugaagccuggagg

SEQ ID NO: 587369 - RNA, 20 nt, Artificial Sequence
  Synthetic
aauugcuugaagccuggagg

SEQ ID NO: 587370 - RNA, 21 nt, Artificial Sequence
  Synthetic
gaauugcuugaagccuggagg

SEQ ID NO: 587371 - RNA, 22 nt, Artificial Sequence
  Synthetic
agaauugcuugaagccuggagg

SEQ ID NO: 587372 - RNA, 23 nt, Artificial Sequence
  Synthetic
gagaauugcuugaagccuggagg

SEQ ID NO: 587373 - RNA, 24 nt, Artificial Sequence
  Synthetic
ggagaauugcuugaagccuggagg

SEQ ID NO: 587374 - RNA, 18 nt, Artificial Sequence
  Synthetic
guaagacagagcuggagg

SEQ ID NO: 587375 - RNA, 19 nt, Artificial Sequence
  Synthetic
uguaagacagagcuggagg

SEQ ID NO: 587376 - RNA, 20 nt, Artificial Sequence
  Synthetic
cuguaagacagagcuggagg

SEQ ID NO: 587377 - RNA, 21 nt, Artificial Sequence
  Synthetic
ucuguaagacagagcuggagg

SEQ ID NO: 587378 - RNA, 22 nt, Artificial Sequence
  Synthetic
cucuguaagacagagcuggagg

SEQ ID NO: 587379 - RNA, 23 nt, Artificial Sequence
  Synthetic
gcucuguaagacagagcuggagg

SEQ ID NO: 587380 - RNA, 24 nt, Artificial Sequence
  Synthetic
agcucuguaagacagagcuggagg

SEQ ID NO: 587381 - RNA, 18 nt, Artificial Sequence
  Synthetic
guugcuaagggcuggagg

SEQ ID NO: 587382 - RNA, 19 nt, Artificial Sequence
  Synthetic
gguugcuaagggcuggagg

SEQ ID NO: 587383 - RNA, 20 nt, Artificial Sequence
  Synthetic
ugguugcuaagggcuggagg

SEQ ID NO: 587384 - RNA, 21 nt, Artificial Sequence
  Synthetic
gugguugcuaagggcuggagg

SEQ ID NO: 587385 - RNA, 22 nt, Artificial Sequence
  Synthetic
ggugguugcuaagggcuggagg

SEQ ID NO: 587386 - RNA, 23 nt, Artificial Sequence
  Synthetic
uggugguugcuaagggcuggagg

SEQ ID NO: 587387 - RNA, 24 nt, Artificial Sequence
  Synthetic
auggugguugcuaagggcuggagg

SEQ ID NO: 587388 - RNA, 18 nt, Artificial Sequence
  Synthetic
ucccagcaacucuggagg

SEQ ID NO: 587389 - RNA, 19 nt, Artificial Sequence
  Synthetic
aucccagcaacucuggagg

SEQ ID NO: 587390 - RNA, 20 nt, Artificial Sequence
  Synthetic
aaucccagcaacucuggagg

SEQ ID NO: 587391 - RNA, 21 nt, Artificial Sequence
  Synthetic
uaaucccagcaacucuggagg

SEQ ID NO: 587392 - RNA, 22 nt, Artificial Sequence
  Synthetic
guaaucccagcaacucuggagg

SEQ ID NO: 587393 - RNA, 23 nt, Artificial Sequence
  Synthetic
uguaaucccagcaacucuggagg

SEQ ID NO: 587394 - RNA, 24 nt, Artificial Sequence
  Synthetic
cuguaaucccagcaacucuggagg

SEQ ID NO: 587395 - RNA, 18 nt, Artificial Sequence
  Synthetic
ucccagccacucuggagg

SEQ ID NO: 587396 - RNA, 19 nt, Artificial Sequence
  Synthetic
aucccagccacucuggagg

SEQ ID NO: 587397 - RNA, 20 nt, Artificial Sequence
  Synthetic
aaucccagccacucuggagg

SEQ ID NO: 587398 - RNA, 21 nt, Artificial Sequence
  Synthetic
uaaucccagccacucuggagg

SEQ ID NO: 587399 - RNA, 22 nt, Artificial Sequence
  Synthetic
guaaucccagccacucuggagg

SEQ ID NO: 587400 - RNA, 23 nt, Artificial Sequence
  Synthetic
uguaaucccagccacucuggagg

SEQ ID NO: 587401 - RNA, 24 nt, Artificial Sequence
  Synthetic
cuguaaucccagccacucuggagg

SEQ ID NO: 587402 - RNA, 18 nt, Artificial Sequence
  Synthetic
ucccagcuacucuggagg

SEQ ID NO: 587403 - RNA, 19 nt, Artificial Sequence
  Synthetic
gucccagcuacucuggagg

SEQ ID NO: 587404 - RNA, 20 nt, Artificial Sequence
  Synthetic
agucccagcuacucuggagg

SEQ ID NO: 587405 - RNA, 21 nt, Artificial Sequence
  Synthetic
uagucccagcuacucuggagg

SEQ ID NO: 587406 - RNA, 22 nt, Artificial Sequence
  Synthetic
guagucccagcuacucuggagg

SEQ ID NO: 587407 - RNA, 23 nt, Artificial Sequence
  Synthetic
uguagucccagcuacucuggagg

SEQ ID NO: 587408 - RNA, 24 nt, Artificial Sequence
  Synthetic
cuguagucccagcuacucuggagg

SEQ ID NO: 587409 - RNA, 18 nt, Artificial Sequence
  Synthetic
cacucacaguucuggagg

SEQ ID NO: 587410 - RNA, 19 nt, Artificial Sequence
  Synthetic
ucacucacaguucuggagg

SEQ ID NO: 587411 - RNA, 20 nt, Artificial Sequence
  Synthetic
uucacucacaguucuggagg

SEQ ID NO: 587412 - RNA, 21 nt, Artificial Sequence
  Synthetic
auucacucacaguucuggagg

SEQ ID NO: 587413 - RNA, 22 nt, Artificial Sequence
  Synthetic
uauucacucacaguucuggagg

SEQ ID NO: 587414 - RNA, 23 nt, Artificial Sequence
  Synthetic
guauucacucacaguucuggagg

SEQ ID NO: 587415 - RNA, 24 nt, Artificial Sequence
  Synthetic
uguauucacucacaguucuggagg

SEQ ID NO: 587416 - RNA, 18 nt, Artificial Sequence
  Synthetic
ugcuuauaguucuggagg

SEQ ID NO: 587417 - RNA, 19 nt, Artificial Sequence
  Synthetic
uugcuuauaguucuggagg

SEQ ID NO: 587418 - RNA, 20 nt, Artificial Sequence
  Synthetic
auugcuuauaguucuggagg

SEQ ID NO: 587419 - RNA, 21 nt, Artificial Sequence
  Synthetic
uauugcuuauaguucuggagg

SEQ ID NO: 587420 - RNA, 22 nt, Artificial Sequence
  Synthetic
uuauugcuuauaguucuggagg

SEQ ID NO: 587421 - RNA, 23 nt, Artificial Sequence
  Synthetic
uuuauugcuuauaguucuggagg

SEQ ID NO: 587422 - RNA, 24 nt, Artificial Sequence
  Synthetic
auuuauugcuuauaguucuggagg

SEQ ID NO: 587423 - RNA, 18 nt, Artificial Sequence
  Synthetic
uauucaaauuucuggagg

SEQ ID NO: 587424 - RNA, 19 nt, Artificial Sequence
  Synthetic
cuauucaaauuucuggagg

SEQ ID NO: 587425 - RNA, 20 nt, Artificial Sequence
  Synthetic
gcuauucaaauuucuggagg

SEQ ID NO: 587426 - RNA, 21 nt, Artificial Sequence
  Synthetic
ugcuauucaaauuucuggagg

SEQ ID NO: 587427 - RNA, 22 nt, Artificial Sequence
  Synthetic
gugcuauucaaauuucuggagg

SEQ ID NO: 587428 - RNA, 23 nt, Artificial Sequence
  Synthetic
ugugcuauucaaauuucuggagg

SEQ ID NO: 587429 - RNA, 24 nt, Artificial Sequence
  Synthetic
gugugcuauucaaauuucuggagg

SEQ ID NO: 587430 - RNA, 18 nt, Artificial Sequence
  Synthetic
aaucaguauuucuggagg

SEQ ID NO: 587431 - RNA, 19 nt, Artificial Sequence
  Synthetic
uaaucaguauuucuggagg

SEQ ID NO: 587432 - RNA, 20 nt, Artificial Sequence
  Synthetic
uuaaucaguauuucuggagg

SEQ ID NO: 587433 - RNA, 21 nt, Artificial Sequence
  Synthetic
cuuaaucaguauuucuggagg

SEQ ID NO: 587434 - RNA, 22 nt, Artificial Sequence
  Synthetic
acuuaaucaguauuucuggagg

SEQ ID NO: 587435 - RNA, 23 nt, Artificial Sequence
  Synthetic
aacuuaaucaguauuucuggagg

SEQ ID NO: 587436 - RNA, 24 nt, Artificial Sequence
  Synthetic
caacuuaaucaguauuucuggagg

SEQ ID NO: 587437 - RNA, 18 nt, Artificial Sequence
  Synthetic
aaccccugcaaguggagg

SEQ ID NO: 587438 - RNA, 19 nt, Artificial Sequence
  Synthetic
uaaccccugcaaguggagg

SEQ ID NO: 587439 - RNA, 20 nt, Artificial Sequence
  Synthetic
uuaaccccugcaaguggagg

SEQ ID NO: 587440 - RNA, 21 nt, Artificial Sequence
  Synthetic
uuuaaccccugcaaguggagg

SEQ ID NO: 587441 - RNA, 22 nt, Artificial Sequence
  Synthetic
uuuuaaccccugcaaguggagg

SEQ ID NO: 587442 - RNA, 23 nt, Artificial Sequence
  Synthetic
guuuuaaccccugcaaguggagg

SEQ ID NO: 587443 - RNA, 24 nt, Artificial Sequence
  Synthetic
aguuuuaaccccugcaaguggagg

SEQ ID NO: 587444 - RNA, 18 nt, Artificial Sequence
  Synthetic
ucuacucuaggguggagg

SEQ ID NO: 587445 - RNA, 19 nt, Artificial Sequence
  Synthetic
aucuacucuaggguggagg

SEQ ID NO: 587446 - RNA, 20 nt, Artificial Sequence
  Synthetic
gaucuacucuaggguggagg

SEQ ID NO: 587447 - RNA, 21 nt, Artificial Sequence
  Synthetic
ggaucuacucuaggguggagg

SEQ ID NO: 587448 - RNA, 22 nt, Artificial Sequence
  Synthetic
aggaucuacucuaggguggagg

SEQ ID NO: 587449 - RNA, 23 nt, Artificial Sequence
  Synthetic
caggaucuacucuaggguggagg

SEQ ID NO: 587450 - RNA, 24 nt, Artificial Sequence
  Synthetic
ccaggaucuacucuaggguggagg

SEQ ID NO: 587451 - RNA, 18 nt, Artificial Sequence
  Synthetic
acuauuagaguguggagg

SEQ ID NO: 587452 - RNA, 19 nt, Artificial Sequence
  Synthetic
gacuauuagaguguggagg

SEQ ID NO: 587453 - RNA, 20 nt, Artificial Sequence
  Synthetic
ggacuauuagaguguggagg

SEQ ID NO: 587454 - RNA, 21 nt, Artificial Sequence
  Synthetic
gggacuauuagaguguggagg

SEQ ID NO: 587455 - RNA, 22 nt, Artificial Sequence
  Synthetic
agggacuauuagaguguggagg

SEQ ID NO: 587456 - RNA, 23 nt, Artificial Sequence
  Synthetic
uagggacuauuagaguguggagg

SEQ ID NO: 587457 - RNA, 24 nt, Artificial Sequence
  Synthetic
cuagggacuauuagaguguggagg

SEQ ID NO: 587458 - RNA, 18 nt, Artificial Sequence
  Synthetic
caaaggguaguguggagg

SEQ ID NO: 587459 - RNA, 19 nt, Artificial Sequence
  Synthetic
acaaaggguaguguggagg

SEQ ID NO: 587460 - RNA, 20 nt, Artificial Sequence
  Synthetic
uacaaaggguaguguggagg

SEQ ID NO: 587461 - RNA, 21 nt, Artificial Sequence
  Synthetic
cuacaaaggguaguguggagg

SEQ ID NO: 587462 - RNA, 22 nt, Artificial Sequence
  Synthetic
gcuacaaaggguaguguggagg

SEQ ID NO: 587463 - RNA, 23 nt, Artificial Sequence
  Synthetic
ggcuacaaaggguaguguggagg

SEQ ID NO: 587464 - RNA, 24 nt, Artificial Sequence
  Synthetic
aggcuacaaaggguaguguggagg

SEQ ID NO: 587465 - RNA, 18 nt, Artificial Sequence
  Synthetic
aacagggguuuguggagg

SEQ ID NO: 587466 - RNA, 19 nt, Artificial Sequence
  Synthetic
gaacagggguuuguggagg

SEQ ID NO: 587467 - RNA, 20 nt, Artificial Sequence
  Synthetic
ugaacagggguuuguggagg

SEQ ID NO: 587468 - RNA, 21 nt, Artificial Sequence
  Synthetic
cugaacagggguuuguggagg

SEQ ID NO: 587469 - RNA, 22 nt, Artificial Sequence
  Synthetic
gcugaacagggguuuguggagg

SEQ ID NO: 587470 - RNA, 23 nt, Artificial Sequence
  Synthetic
agcugaacagggguuuguggagg

SEQ ID NO: 587471 - RNA, 24 nt, Artificial Sequence
  Synthetic
cagcugaacagggguuuguggagg

SEQ ID NO: 587472 - RNA, 18 nt, Artificial Sequence
  Synthetic
gauccucaauauuggagg

SEQ ID NO: 587473 - RNA, 19 nt, Artificial Sequence
  Synthetic
ugauccucaauauuggagg

SEQ ID NO: 587474 - RNA, 20 nt, Artificial Sequence
  Synthetic
uugauccucaauauuggagg

SEQ ID NO: 587475 - RNA, 21 nt, Artificial Sequence
  Synthetic
uuugauccucaauauuggagg

SEQ ID NO: 587476 - RNA, 22 nt, Artificial Sequence
  Synthetic
auuugauccucaauauuggagg

SEQ ID NO: 587477 - RNA, 23 nt, Artificial Sequence
  Synthetic
aauuugauccucaauauuggagg

SEQ ID NO: 587478 - RNA, 24 nt, Artificial Sequence
  Synthetic
aaauuugauccucaauauuggagg

SEQ ID NO: 587479 - RNA, 18 nt, Artificial Sequence
  Synthetic
aaaaaaacuucuuggagg

SEQ ID NO: 587480 - RNA, 19 nt, Artificial Sequence
  Synthetic
uaaaaaaacuucuuggagg

SEQ ID NO: 587481 - RNA, 20 nt, Artificial Sequence
  Synthetic
uuaaaaaaacuucuuggagg

SEQ ID NO: 587482 - RNA, 21 nt, Artificial Sequence
  Synthetic
auuaaaaaaacuucuuggagg

SEQ ID NO: 587483 - RNA, 22 nt, Artificial Sequence
  Synthetic
aauuaaaaaaacuucuuggagg

SEQ ID NO: 587484 - RNA, 23 nt, Artificial Sequence
  Synthetic
aaauuaaaaaaacuucuuggagg

SEQ ID NO: 587485 - RNA, 24 nt, Artificial Sequence
  Synthetic
uaaauuaaaaaaacuucuuggagg

SEQ ID NO: 587486 - RNA, 18 nt, Artificial Sequence
  Synthetic
aauccccaauguuggagg

SEQ ID NO: 587487 - RNA, 19 nt, Artificial Sequence
  Synthetic
uaauccccaauguuggagg

SEQ ID NO: 587488 - RNA, 20 nt, Artificial Sequence
  Synthetic
guaauccccaauguuggagg

SEQ ID NO: 587489 - RNA, 21 nt, Artificial Sequence
  Synthetic
uguaauccccaauguuggagg

SEQ ID NO: 587490 - RNA, 22 nt, Artificial Sequence
  Synthetic
uuguaauccccaauguuggagg

SEQ ID NO: 587491 - RNA, 23 nt, Artificial Sequence
  Synthetic
auuguaauccccaauguuggagg

SEQ ID NO: 587492 - RNA, 24 nt, Artificial Sequence
  Synthetic
aauuguaauccccaauguuggagg

SEQ ID NO: 587493 - RNA, 18 nt, Artificial Sequence
  Synthetic
aauucccaguguuggagg

SEQ ID NO: 587494 - RNA, 19 nt, Artificial Sequence
  Synthetic
uaauucccaguguuggagg

SEQ ID NO: 587495 - RNA, 20 nt, Artificial Sequence
  Synthetic
guaauucccaguguuggagg

SEQ ID NO: 587496 - RNA, 21 nt, Artificial Sequence
  Synthetic
uguaauucccaguguuggagg

SEQ ID NO: 587497 - RNA, 22 nt, Artificial Sequence
  Synthetic
auguaauucccaguguuggagg

SEQ ID NO: 587498 - RNA, 23 nt, Artificial Sequence
  Synthetic
aauguaauucccaguguuggagg

SEQ ID NO: 587499 - RNA, 24 nt, Artificial Sequence
  Synthetic
aaauguaauucccaguguuggagg

SEQ ID NO: 587500 - RNA, 18 nt, Artificial Sequence
  Synthetic
uuuacuuccauuuggagg

SEQ ID NO: 587501 - RNA, 19 nt, Artificial Sequence
  Synthetic
uuuuacuuccauuuggagg

SEQ ID NO: 587502 - RNA, 20 nt, Artificial Sequence
  Synthetic
uuuuuacuuccauuuggagg

SEQ ID NO: 587503 - RNA, 21 nt, Artificial Sequence
  Synthetic
cuuuuuacuuccauuuggagg

SEQ ID NO: 587504 - RNA, 22 nt, Artificial Sequence
  Synthetic
ccuuuuuacuuccauuuggagg

SEQ ID NO: 587505 - RNA, 23 nt, Artificial Sequence
  Synthetic
gccuuuuuacuuccauuuggagg

SEQ ID NO: 587506 - RNA, 24 nt, Artificial Sequence
  Synthetic
ggccuuuuuacuuccauuuggagg

SEQ ID NO: 587507 - RNA, 18 nt, Artificial Sequence
  Synthetic
ccaauggauauuuggagg

SEQ ID NO: 587508 - RNA, 19 nt, Artificial Sequence
  Synthetic
cccaauggauauuuggagg

SEQ ID NO: 587509 - RNA, 20 nt, Artificial Sequence
  Synthetic
ccccaauggauauuuggagg

SEQ ID NO: 587510 - RNA, 21 nt, Artificial Sequence
  Synthetic
cccccaauggauauuuggagg

SEQ ID NO: 587511 - RNA, 22 nt, Artificial Sequence
  Synthetic
acccccaauggauauuuggagg

SEQ ID NO: 587512 - RNA, 23 nt, Artificial Sequence
  Synthetic
aacccccaauggauauuuggagg

SEQ ID NO: 587513 - RNA, 24 nt, Artificial Sequence
  Synthetic
uaacccccaauggauauuuggagg

SEQ ID NO: 587514 - RNA, 18 nt, Artificial Sequence
  Synthetic
aauaaaaaauuuuggagg

SEQ ID NO: 587515 - RNA, 19 nt, Artificial Sequence
  Synthetic
uaauaaaaaauuuuggagg

SEQ ID NO: 587516 - RNA, 20 nt, Artificial Sequence
  Synthetic
guaauaaaaaauuuuggagg

SEQ ID NO: 587517 - RNA, 21 nt, Artificial Sequence
  Synthetic
aguaauaaaaaauuuuggagg

SEQ ID NO: 587518 - RNA, 22 nt, Artificial Sequence
  Synthetic
gaguaauaaaaaauuuuggagg

SEQ ID NO: 587519 - RNA, 23 nt, Artificial Sequence
  Synthetic
ggaguaauaaaaaauuuuggagg

SEQ ID NO: 587520 - RNA, 24 nt, Artificial Sequence
  Synthetic
uggaguaauaaaaaauuuuggagg

SEQ ID NO: 587521 - RNA, 18 nt, Artificial Sequence
  Synthetic
gcuucaauguuuuggagg

SEQ ID NO: 587522 - RNA, 19 nt, Artificial Sequence
  Synthetic
ugcuucaauguuuuggagg

SEQ ID NO: 587523 - RNA, 20 nt, Artificial Sequence
  Synthetic
cugcuucaauguuuuggagg

SEQ ID NO: 587524 - RNA, 21 nt, Artificial Sequence
  Synthetic
ccugcuucaauguuuuggagg

SEQ ID NO: 587525 - RNA, 22 nt, Artificial Sequence
  Synthetic
uccugcuucaauguuuuggagg

SEQ ID NO: 587526 - RNA, 23 nt, Artificial Sequence
  Synthetic
auccugcuucaauguuuuggagg

SEQ ID NO: 587527 - RNA, 24 nt, Artificial Sequence
  Synthetic
aauccugcuucaauguuuuggagg

SEQ ID NO: 587528 - RNA, 18 nt, Artificial Sequence
  Synthetic
ccuauugauuuuuggagg

SEQ ID NO: 587529 - RNA, 19 nt, Artificial Sequence
  Synthetic
gccuauugauuuuuggagg

SEQ ID NO: 587530 - RNA, 20 nt, Artificial Sequence
  Synthetic
ugccuauugauuuuuggagg

SEQ ID NO: 587531 - RNA, 21 nt, Artificial Sequence
  Synthetic
gugccuauugauuuuuggagg

SEQ ID NO: 587532 - RNA, 22 nt, Artificial Sequence
  Synthetic
ggugccuauugauuuuuggagg

SEQ ID NO: 587533 - RNA, 23 nt, Artificial Sequence
  Synthetic
aggugccuauugauuuuuggagg

SEQ ID NO: 587534 - RNA, 24 nt, Artificial Sequence
  Synthetic
caggugccuauugauuuuuggagg

SEQ ID NO: 587535 - RNA, 18 nt, Artificial Sequence
  Synthetic
augacugugaaaaugagg

SEQ ID NO: 587536 - RNA, 19 nt, Artificial Sequence
  Synthetic
aaugacugugaaaaugagg

SEQ ID NO: 587537 - RNA, 20 nt, Artificial Sequence
  Synthetic
aaaugacugugaaaaugagg

SEQ ID NO: 587538 - RNA, 21 nt, Artificial Sequence
  Synthetic
aaaaugacugugaaaaugagg

SEQ ID NO: 587539 - RNA, 22 nt, Artificial Sequence
  Synthetic
uaaaaugacugugaaaaugagg

SEQ ID NO: 587540 - RNA, 23 nt, Artificial Sequence
  Synthetic
uuaaaaugacugugaaaaugagg

SEQ ID NO: 587541 - RNA, 24 nt, Artificial Sequence
  Synthetic
auuaaaaugacugugaaaaugagg

SEQ ID NO: 587542 - RNA, 18 nt, Artificial Sequence
  Synthetic
uaagaaucagaaaugagg

SEQ ID NO: 587543 - RNA, 19 nt, Artificial Sequence
  Synthetic
cuaagaaucagaaaugagg

SEQ ID NO: 587544 - RNA, 20 nt, Artificial Sequence
  Synthetic
ccuaagaaucagaaaugagg

SEQ ID NO: 587545 - RNA, 21 nt, Artificial Sequence
  Synthetic
accuaagaaucagaaaugagg

SEQ ID NO: 587546 - RNA, 22 nt, Artificial Sequence
  Synthetic
caccuaagaaucagaaaugagg

SEQ ID NO: 587547 - RNA, 23 nt, Artificial Sequence
  Synthetic
acaccuaagaaucagaaaugagg

SEQ ID NO: 587548 - RNA, 24 nt, Artificial Sequence
  Synthetic
aacaccuaagaaucagaaaugagg

SEQ ID NO: 587549 - RNA, 18 nt, Artificial Sequence
  Synthetic
ggggagaaggcaaugagg

SEQ ID NO: 587550 - RNA, 19 nt, Artificial Sequence
  Synthetic
aggggagaaggcaaugagg

SEQ ID NO: 587551 - RNA, 20 nt, Artificial Sequence
  Synthetic
caggggagaaggcaaugagg

SEQ ID NO: 587552 - RNA, 21 nt, Artificial Sequence
  Synthetic
acaggggagaaggcaaugagg

SEQ ID NO: 587553 - RNA, 22 nt, Artificial Sequence
  Synthetic
uacaggggagaaggcaaugagg

SEQ ID NO: 587554 - RNA, 23 nt, Artificial Sequence
  Synthetic
cuacaggggagaaggcaaugagg

SEQ ID NO: 587555 - RNA, 24 nt, Artificial Sequence
  Synthetic
ucuacaggggagaaggcaaugagg

SEQ ID NO: 587556 - RNA, 18 nt, Artificial Sequence
  Synthetic
guaguauugugaaugagg

SEQ ID NO: 587557 - RNA, 19 nt, Artificial Sequence
  Synthetic
aguaguauugugaaugagg

SEQ ID NO: 587558 - RNA, 20 nt, Artificial Sequence
  Synthetic
caguaguauugugaaugagg

SEQ ID NO: 587559 - RNA, 21 nt, Artificial Sequence
  Synthetic
acaguaguauugugaaugagg

SEQ ID NO: 587560 - RNA, 22 nt, Artificial Sequence
  Synthetic
gacaguaguauugugaaugagg

SEQ ID NO: 587561 - RNA, 23 nt, Artificial Sequence
  Synthetic
agacaguaguauugugaaugagg

SEQ ID NO: 587562 - RNA, 24 nt, Artificial Sequence
  Synthetic
gagacaguaguauugugaaugagg

SEQ ID NO: 587563 - RNA, 18 nt, Artificial Sequence
  Synthetic
aagaaguaccuaaugagg

SEQ ID NO: 587564 - RNA, 19 nt, Artificial Sequence
  Synthetic
aaagaaguaccuaaugagg

SEQ ID NO: 587565 - RNA, 20 nt, Artificial Sequence
  Synthetic
gaaagaaguaccuaaugagg

SEQ ID NO: 587566 - RNA, 21 nt, Artificial Sequence
  Synthetic
ugaaagaaguaccuaaugagg

SEQ ID NO: 587567 - RNA, 22 nt, Artificial Sequence
  Synthetic
augaaagaaguaccuaaugagg

SEQ ID NO: 587568 - RNA, 23 nt, Artificial Sequence
  Synthetic
caugaaagaaguaccuaaugagg

SEQ ID NO: 587569 - RNA, 24 nt, Artificial Sequence
  Synthetic
ccaugaaagaaguaccuaaugagg

SEQ ID NO: 587570 - RNA, 18 nt, Artificial Sequence
  Synthetic
aaucaucuguuaaugagg

SEQ ID NO: 587571 - RNA, 19 nt, Artificial Sequence
  Synthetic
aaaucaucuguuaaugagg

SEQ ID NO: 587572 - RNA, 20 nt, Artificial Sequence
  Synthetic
gaaaucaucuguuaaugagg

SEQ ID NO: 587573 - RNA, 21 nt, Artificial Sequence
  Synthetic
agaaaucaucuguuaaugagg

SEQ ID NO: 587574 - RNA, 22 nt, Artificial Sequence
  Synthetic
gagaaaucaucuguuaaugagg

SEQ ID NO: 587575 - RNA, 23 nt, Artificial Sequence
  Synthetic
agagaaaucaucuguuaaugagg

SEQ ID NO: 587576 - RNA, 24 nt, Artificial Sequence
  Synthetic
cagagaaaucaucuguuaaugagg

SEQ ID NO: 587577 - RNA, 18 nt, Artificial Sequence
  Synthetic
gcaguuuuaaacaugagg

SEQ ID NO: 587578 - RNA, 19 nt, Artificial Sequence
  Synthetic
agcaguuuuaaacaugagg

SEQ ID NO: 587579 - RNA, 20 nt, Artificial Sequence
  Synthetic
aagcaguuuuaaacaugagg

SEQ ID NO: 587580 - RNA, 21 nt, Artificial Sequence
  Synthetic
caagcaguuuuaaacaugagg

SEQ ID NO: 587581 - RNA, 22 nt, Artificial Sequence
  Synthetic
ucaagcaguuuuaaacaugagg

SEQ ID NO: 587582 - RNA, 23 nt, Artificial Sequence
  Synthetic
uucaagcaguuuuaaacaugagg

SEQ ID NO: 587583 - RNA, 24 nt, Artificial Sequence
  Synthetic
uuucaagcaguuuuaaacaugagg

SEQ ID NO: 587584 - RNA, 18 nt, Artificial Sequence
  Synthetic
uaucaaguucacaugagg

SEQ ID NO: 587585 - RNA, 19 nt, Artificial Sequence
  Synthetic
uuaucaaguucacaugagg

SEQ ID NO: 587586 - RNA, 20 nt, Artificial Sequence
  Synthetic
uuuaucaaguucacaugagg

SEQ ID NO: 587587 - RNA, 21 nt, Artificial Sequence
  Synthetic
uuuuaucaaguucacaugagg

SEQ ID NO: 587588 - RNA, 22 nt, Artificial Sequence
  Synthetic
auuuuaucaaguucacaugagg

SEQ ID NO: 587589 - RNA, 23 nt, Artificial Sequence
  Synthetic
uauuuuaucaaguucacaugagg

SEQ ID NO: 587590 - RNA, 24 nt, Artificial Sequence
  Synthetic
uuauuuuaucaaguucacaugagg

SEQ ID NO: 587591 - RNA, 18 nt, Artificial Sequence
  Synthetic
gguacaauuaccaugagg

SEQ ID NO: 587592 - RNA, 19 nt, Artificial Sequence
  Synthetic
agguacaauuaccaugagg

SEQ ID NO: 587593 - RNA, 20 nt, Artificial Sequence
  Synthetic
cagguacaauuaccaugagg

SEQ ID NO: 587594 - RNA, 21 nt, Artificial Sequence
  Synthetic
gcagguacaauuaccaugagg

SEQ ID NO: 587595 - RNA, 22 nt, Artificial Sequence
  Synthetic
ggcagguacaauuaccaugagg

SEQ ID NO: 587596 - RNA, 23 nt, Artificial Sequence
  Synthetic
uggcagguacaauuaccaugagg

SEQ ID NO: 587597 - RNA, 24 nt, Artificial Sequence
  Synthetic
cuggcagguacaauuaccaugagg

SEQ ID NO: 587598 - RNA, 18 nt, Artificial Sequence
  Synthetic
cauuuuaagaggaugagg

SEQ ID NO: 587599 - RNA, 19 nt, Artificial Sequence
  Synthetic
ccauuuuaagaggaugagg

SEQ ID NO: 587600 - RNA, 20 nt, Artificial Sequence
  Synthetic
accauuuuaagaggaugagg

SEQ ID NO: 587601 - RNA, 21 nt, Artificial Sequence
  Synthetic
caccauuuuaagaggaugagg

SEQ ID NO: 587602 - RNA, 22 nt, Artificial Sequence
  Synthetic
ccaccauuuuaagaggaugagg

SEQ ID NO: 587603 - RNA, 23 nt, Artificial Sequence
  Synthetic
cccaccauuuuaagaggaugagg

SEQ ID NO: 587604 - RNA, 24 nt, Artificial Sequence
  Synthetic
ucccaccauuuuaagaggaugagg

SEQ ID NO: 587605 - RNA, 18 nt, Artificial Sequence
  Synthetic
acagccaaggauaugagg

SEQ ID NO: 587606 - RNA, 19 nt, Artificial Sequence
  Synthetic
aacagccaaggauaugagg

SEQ ID NO: 587607 - RNA, 20 nt, Artificial Sequence
  Synthetic
caacagccaaggauaugagg

SEQ ID NO: 587608 - RNA, 21 nt, Artificial Sequence
  Synthetic
ccaacagccaaggauaugagg

SEQ ID NO: 587609 - RNA, 22 nt, Artificial Sequence
  Synthetic
accaacagccaaggauaugagg

SEQ ID NO: 587610 - RNA, 23 nt, Artificial Sequence
  Synthetic
gaccaacagccaaggauaugagg

SEQ ID NO: 587611 - RNA, 24 nt, Artificial Sequence
  Synthetic
ggaccaacagccaaggauaugagg

SEQ ID NO: 587612 - RNA, 18 nt, Artificial Sequence
  Synthetic
aaauggauuacacugagg

SEQ ID NO: 587613 - RNA, 19 nt, Artificial Sequence
  Synthetic
caaauggauuacacugagg

SEQ ID NO: 587614 - RNA, 20 nt, Artificial Sequence
  Synthetic
ccaaauggauuacacugagg

SEQ ID NO: 587615 - RNA, 21 nt, Artificial Sequence
  Synthetic
accaaauggauuacacugagg

SEQ ID NO: 587616 - RNA, 22 nt, Artificial Sequence
  Synthetic
uaccaaauggauuacacugagg

SEQ ID NO: 587617 - RNA, 23 nt, Artificial Sequence
  Synthetic
uuaccaaauggauuacacugagg

SEQ ID NO: 587618 - RNA, 24 nt, Artificial Sequence
  Synthetic
uuuaccaaauggauuacacugagg

SEQ ID NO: 587619 - RNA, 18 nt, Artificial Sequence
  Synthetic
uauuuaaaggcacugagg

SEQ ID NO: 587620 - RNA, 19 nt, Artificial Sequence
  Synthetic
cuauuuaaaggcacugagg

SEQ ID NO: 587621 - RNA, 20 nt, Artificial Sequence
  Synthetic
acuauuuaaaggcacugagg

SEQ ID NO: 587622 - RNA, 21 nt, Artificial Sequence
  Synthetic
gacuauuuaaaggcacugagg

SEQ ID NO: 587623 - RNA, 22 nt, Artificial Sequence
  Synthetic
agacuauuuaaaggcacugagg

SEQ ID NO: 587624 - RNA, 23 nt, Artificial Sequence
  Synthetic
aagacuauuuaaaggcacugagg

SEQ ID NO: 587625 - RNA, 24 nt, Artificial Sequence
  Synthetic
uaagacuauuuaaaggcacugagg

SEQ ID NO: 587626 - RNA, 18 nt, Artificial Sequence
  Synthetic
ucauaaaagagacugagg

SEQ ID NO: 587627 - RNA, 19 nt, Artificial Sequence
  Synthetic
gucauaaaagagacugagg

SEQ ID NO: 587628 - RNA, 20 nt, Artificial Sequence
  Synthetic
agucauaaaagagacugagg

SEQ ID NO: 587629 - RNA, 21 nt, Artificial Sequence
  Synthetic
cagucauaaaagagacugagg

SEQ ID NO: 587630 - RNA, 22 nt, Artificial Sequence
  Synthetic
ccagucauaaaagagacugagg

SEQ ID NO: 587631 - RNA, 23 nt, Artificial Sequence
  Synthetic
uccagucauaaaagagacugagg

SEQ ID NO: 587632 - RNA, 24 nt, Artificial Sequence
  Synthetic
uuccagucauaaaagagacugagg

SEQ ID NO: 587633 - RNA, 18 nt, Artificial Sequence
  Synthetic
uauaauccuggacugagg

SEQ ID NO: 587634 - RNA, 19 nt, Artificial Sequence
  Synthetic
guauaauccuggacugagg

SEQ ID NO: 587635 - RNA, 20 nt, Artificial Sequence
  Synthetic
aguauaauccuggacugagg

SEQ ID NO: 587636 - RNA, 21 nt, Artificial Sequence
  Synthetic
uaguauaauccuggacugagg

SEQ ID NO: 587637 - RNA, 22 nt, Artificial Sequence
  Synthetic
uuaguauaauccuggacugagg

SEQ ID NO: 587638 - RNA, 23 nt, Artificial Sequence
  Synthetic
uuuaguauaauccuggacugagg

SEQ ID NO: 587639 - RNA, 24 nt, Artificial Sequence
  Synthetic
auuuaguauaauccuggacugagg

SEQ ID NO: 587640 - RNA, 18 nt, Artificial Sequence
  Synthetic
agaagcaaccaccugagg

SEQ ID NO: 587641 - RNA, 19 nt, Artificial Sequence
  Synthetic
cagaagcaaccaccugagg

SEQ ID NO: 587642 - RNA, 20 nt, Artificial Sequence
  Synthetic
ccagaagcaaccaccugagg

SEQ ID NO: 587643 - RNA, 21 nt, Artificial Sequence
  Synthetic
cccagaagcaaccaccugagg

SEQ ID NO: 587644 - RNA, 22 nt, Artificial Sequence
  Synthetic
ccccagaagcaaccaccugagg

SEQ ID NO: 587645 - RNA, 23 nt, Artificial Sequence
  Synthetic
accccagaagcaaccaccugagg

SEQ ID NO: 587646 - RNA, 24 nt, Artificial Sequence
  Synthetic
aaccccagaagcaaccaccugagg

SEQ ID NO: 587647 - RNA, 18 nt, Artificial Sequence
  Synthetic
caggcagaccaccugagg

SEQ ID NO: 587648 - RNA, 19 nt, Artificial Sequence
  Synthetic
acaggcagaccaccugagg

SEQ ID NO: 587649 - RNA, 20 nt, Artificial Sequence
  Synthetic
gacaggcagaccaccugagg

SEQ ID NO: 587650 - RNA, 21 nt, Artificial Sequence
  Synthetic
agacaggcagaccaccugagg

SEQ ID NO: 587651 - RNA, 22 nt, Artificial Sequence
  Synthetic
gagacaggcagaccaccugagg

SEQ ID NO: 587652 - RNA, 23 nt, Artificial Sequence
  Synthetic
ugagacaggcagaccaccugagg

SEQ ID NO: 587653 - RNA, 24 nt, Artificial Sequence
  Synthetic
cugagacaggcagaccaccugagg

SEQ ID NO: 587654 - RNA, 21 nt, Artificial Sequence
  Synthetic
aggugggcagaucaccugagg

SEQ ID NO: 587655 - RNA, 22 nt, Artificial Sequence
  Synthetic
gaggugggcagaucaccugagg

SEQ ID NO: 587656 - RNA, 23 nt, Artificial Sequence
  Synthetic
cgaggugggcagaucaccugagg

SEQ ID NO: 587657 - RNA, 24 nt, Artificial Sequence
  Synthetic
ccgaggugggcagaucaccugagg

SEQ ID NO: 587658 - RNA, 18 nt, Artificial Sequence
  Synthetic
cggguggaucaccugagg

SEQ ID NO: 587659 - RNA, 19 nt, Artificial Sequence
  Synthetic
gcggguggaucaccugagg

SEQ ID NO: 587660 - RNA, 20 nt, Artificial Sequence
  Synthetic
ggcggguggaucaccugagg

SEQ ID NO: 587661 - RNA, 21 nt, Artificial Sequence
  Synthetic
aggcggguggaucaccugagg

SEQ ID NO: 587662 - RNA, 22 nt, Artificial Sequence
  Synthetic
gaggcggguggaucaccugagg

SEQ ID NO: 587663 - RNA, 23 nt, Artificial Sequence
  Synthetic
cgaggcggguggaucaccugagg

SEQ ID NO: 587664 - RNA, 24 nt, Artificial Sequence
  Synthetic
ccgaggcggguggaucaccugagg

SEQ ID NO: 587665 - RNA, 18 nt, Artificial Sequence
  Synthetic
cagccugaucaccugagg

SEQ ID NO: 587666 - RNA, 19 nt, Artificial Sequence
  Synthetic
gcagccugaucaccugagg

SEQ ID NO: 587667 - RNA, 20 nt, Artificial Sequence
  Synthetic
ggcagccugaucaccugagg

SEQ ID NO: 587668 - RNA, 21 nt, Artificial Sequence
  Synthetic
aggcagccugaucaccugagg

SEQ ID NO: 587669 - RNA, 22 nt, Artificial Sequence
  Synthetic
gaggcagccugaucaccugagg

SEQ ID NO: 587670 - RNA, 23 nt, Artificial Sequence
  Synthetic
cgaggcagccugaucaccugagg

SEQ ID NO: 587671 - RNA, 24 nt, Artificial Sequence
  Synthetic
ccgaggcagccugaucaccugagg

SEQ ID NO: 587672 - RNA, 18 nt, Artificial Sequence
  Synthetic
aauugcaaugaccugagg

SEQ ID NO: 587673 - RNA, 19 nt, Artificial Sequence
  Synthetic
uaauugcaaugaccugagg

SEQ ID NO: 587674 - RNA, 20 nt, Artificial Sequence
  Synthetic
auaauugcaaugaccugagg

SEQ ID NO: 587675 - RNA, 21 nt, Artificial Sequence
  Synthetic
cauaauugcaaugaccugagg

SEQ ID NO: 587676 - RNA, 22 nt, Artificial Sequence
  Synthetic
acauaauugcaaugaccugagg

SEQ ID NO: 587677 - RNA, 23 nt, Artificial Sequence
  Synthetic
aacauaauugcaaugaccugagg

SEQ ID NO: 587678 - RNA, 24 nt, Artificial Sequence
  Synthetic
aaacauaauugcaaugaccugagg

SEQ ID NO: 587679 - RNA, 18 nt, Artificial Sequence
  Synthetic
aaggaugguuaccugagg

SEQ ID NO: 587680 - RNA, 19 nt, Artificial Sequence
  Synthetic
gaaggaugguuaccugagg

SEQ ID NO: 587681 - RNA, 20 nt, Artificial Sequence
  Synthetic
agaaggaugguuaccugagg

SEQ ID NO: 587682 - RNA, 21 nt, Artificial Sequence
  Synthetic
uagaaggaugguuaccugagg

SEQ ID NO: 587683 - RNA, 22 nt, Artificial Sequence
  Synthetic
guagaaggaugguuaccugagg

SEQ ID NO: 587684 - RNA, 23 nt, Artificial Sequence
  Synthetic
aguagaaggaugguuaccugagg

SEQ ID NO: 587685 - RNA, 24 nt, Artificial Sequence
  Synthetic
gaguagaaggaugguuaccugagg

SEQ ID NO: 587686 - RNA, 18 nt, Artificial Sequence
  Synthetic
cuacccaggaagcugagg

SEQ ID NO: 587687 - RNA, 19 nt, Artificial Sequence
  Synthetic
gcuacccaggaagcugagg

SEQ ID NO: 587688 - RNA, 20 nt, Artificial Sequence
  Synthetic
agcuacccaggaagcugagg

SEQ ID NO: 587689 - RNA, 21 nt, Artificial Sequence
  Synthetic
cagcuacccaggaagcugagg

SEQ ID NO: 587690 - RNA, 22 nt, Artificial Sequence
  Synthetic
ccagcuacccaggaagcugagg

SEQ ID NO: 587691 - RNA, 23 nt, Artificial Sequence
  Synthetic
cccagcuacccaggaagcugagg

SEQ ID NO: 587692 - RNA, 24 nt, Artificial Sequence
  Synthetic
ucccagcuacccaggaagcugagg

SEQ ID NO: 587693 - RNA, 24 nt, Artificial Sequence
  Synthetic
ucccagcuacucgggaagcugagg

SEQ ID NO: 587694 - RNA, 18 nt, Artificial Sequence
  Synthetic
cuguagucccagcugagg

SEQ ID NO: 587695 - RNA, 19 nt, Artificial Sequence
  Synthetic
ccuguagucccagcugagg

SEQ ID NO: 587696 - RNA, 20 nt, Artificial Sequence
  Synthetic
gccuguagucccagcugagg

SEQ ID NO: 587697 - RNA, 21 nt, Artificial Sequence
  Synthetic
ugccuguagucccagcugagg

SEQ ID NO: 587698 - RNA, 22 nt, Artificial Sequence
  Synthetic
gugccuguagucccagcugagg

SEQ ID NO: 587699 - RNA, 23 nt, Artificial Sequence
  Synthetic
ggugccuguagucccagcugagg

SEQ ID NO: 587700 - RNA, 24 nt, Artificial Sequence
  Synthetic
gggugccuguagucccagcugagg

SEQ ID NO: 587701 - RNA, 18 nt, Artificial Sequence
  Synthetic
cuucucagaaggcugagg

SEQ ID NO: 587702 - RNA, 19 nt, Artificial Sequence
  Synthetic
ucuucucagaaggcugagg

SEQ ID NO: 587703 - RNA, 20 nt, Artificial Sequence
  Synthetic
aucuucucagaaggcugagg

SEQ ID NO: 587704 - RNA, 21 nt, Artificial Sequence
  Synthetic
caucuucucagaaggcugagg

SEQ ID NO: 587705 - RNA, 22 nt, Artificial Sequence
  Synthetic
ccaucuucucagaaggcugagg

SEQ ID NO: 587706 - RNA, 23 nt, Artificial Sequence
  Synthetic
cccaucuucucagaaggcugagg

SEQ ID NO: 587707 - RNA, 24 nt, Artificial Sequence
  Synthetic
ucccaucuucucagaaggcugagg

SEQ ID NO: 587708 - RNA, 18 nt, Artificial Sequence
  Synthetic
cuacuuggaaggcugagg

SEQ ID NO: 587709 - RNA, 19 nt, Artificial Sequence
  Synthetic
gcuacuuggaaggcugagg

SEQ ID NO: 587710 - RNA, 20 nt, Artificial Sequence
  Synthetic
agcuacuuggaaggcugagg

SEQ ID NO: 587711 - RNA, 21 nt, Artificial Sequence
  Synthetic
cagcuacuuggaaggcugagg

SEQ ID NO: 587712 - RNA, 22 nt, Artificial Sequence
  Synthetic
ccagcuacuuggaaggcugagg

SEQ ID NO: 587713 - RNA, 23 nt, Artificial Sequence
  Synthetic
cccagcuacuuggaaggcugagg

SEQ ID NO: 587714 - RNA, 24 nt, Artificial Sequence
  Synthetic
ucccagcuacuuggaaggcugagg

SEQ ID NO: 587715 - RNA, 22 nt, Artificial Sequence
  Synthetic
ccagcuacucaagaggcugagg

SEQ ID NO: 587716 - RNA, 23 nt, Artificial Sequence
  Synthetic
cccagcuacucaagaggcugagg

SEQ ID NO: 587717 - RNA, 24 nt, Artificial Sequence
  Synthetic
ucccagcuacucaagaggcugagg

SEQ ID NO: 587718 - RNA, 18 nt, Artificial Sequence
  Synthetic
cuacucgagaggcugagg

SEQ ID NO: 587719 - RNA, 19 nt, Artificial Sequence
  Synthetic
gcuacucgagaggcugagg

SEQ ID NO: 587720 - RNA, 20 nt, Artificial Sequence
  Synthetic
agcuacucgagaggcugagg

SEQ ID NO: 587721 - RNA, 21 nt, Artificial Sequence
  Synthetic
cagcuacucgagaggcugagg

SEQ ID NO: 587722 - RNA, 22 nt, Artificial Sequence
  Synthetic
ccagcuacucgagaggcugagg

SEQ ID NO: 587723 - RNA, 23 nt, Artificial Sequence
  Synthetic
cccagcuacucgagaggcugagg

SEQ ID NO: 587724 - RNA, 24 nt, Artificial Sequence
  Synthetic
ucccagcuacucgagaggcugagg

SEQ ID NO: 587725 - RNA, 21 nt, Artificial Sequence
  Synthetic
cagcuacucaggaggcugagg

SEQ ID NO: 587726 - RNA, 22 nt, Artificial Sequence
  Synthetic
ucagcuacucaggaggcugagg

SEQ ID NO: 587727 - RNA, 23 nt, Artificial Sequence
  Synthetic
cucagcuacucaggaggcugagg

SEQ ID NO: 587728 - RNA, 24 nt, Artificial Sequence
  Synthetic
ucucagcuacucaggaggcugagg

SEQ ID NO: 587729 - RNA, 22 nt, Artificial Sequence
  Synthetic
cuagcuacucaggaggcugagg

SEQ ID NO: 587730 - RNA, 23 nt, Artificial Sequence
  Synthetic
ccuagcuacucaggaggcugagg

SEQ ID NO: 587731 - RNA, 24 nt, Artificial Sequence
  Synthetic
uccuagcuacucaggaggcugagg

SEQ ID NO: 587732 - RNA, 18 nt, Artificial Sequence
  Synthetic
cuauucaggaggcugagg

SEQ ID NO: 587733 - RNA, 19 nt, Artificial Sequence
  Synthetic
gcuauucaggaggcugagg

SEQ ID NO: 587734 - RNA, 20 nt, Artificial Sequence
  Synthetic
agcuauucaggaggcugagg

SEQ ID NO: 587735 - RNA, 21 nt, Artificial Sequence
  Synthetic
cagcuauucaggaggcugagg

SEQ ID NO: 587736 - RNA, 22 nt, Artificial Sequence
  Synthetic
ccagcuauucaggaggcugagg

SEQ ID NO: 587737 - RNA, 23 nt, Artificial Sequence
  Synthetic
cccagcuauucaggaggcugagg

SEQ ID NO: 587738 - RNA, 24 nt, Artificial Sequence
  Synthetic
ucccagcuauucaggaggcugagg

SEQ ID NO: 587739 - RNA, 18 nt, Artificial Sequence
  Synthetic
cuacuuaggaggcugagg

SEQ ID NO: 587740 - RNA, 19 nt, Artificial Sequence
  Synthetic
gcuacuuaggaggcugagg

SEQ ID NO: 587741 - RNA, 20 nt, Artificial Sequence
  Synthetic
agcuacuuaggaggcugagg

SEQ ID NO: 587742 - RNA, 21 nt, Artificial Sequence
  Synthetic
cagcuacuuaggaggcugagg

SEQ ID NO: 587743 - RNA, 22 nt, Artificial Sequence
  Synthetic
ccagcuacuuaggaggcugagg

SEQ ID NO: 587744 - RNA, 23 nt, Artificial Sequence
  Synthetic
cccagcuacuuaggaggcugagg

SEQ ID NO: 587745 - RNA, 24 nt, Artificial Sequence
  Synthetic
ucccagcuacuuaggaggcugagg

SEQ ID NO: 587746 - RNA, 18 nt, Artificial Sequence
  Synthetic
guacuucggaggcugagg

SEQ ID NO: 587747 - RNA, 19 nt, Artificial Sequence
  Synthetic
gguacuucggaggcugagg

SEQ ID NO: 587748 - RNA, 20 nt, Artificial Sequence
  Synthetic
agguacuucggaggcugagg

SEQ ID NO: 587749 - RNA, 21 nt, Artificial Sequence
  Synthetic
cagguacuucggaggcugagg

SEQ ID NO: 587750 - RNA, 22 nt, Artificial Sequence
  Synthetic
ccagguacuucggaggcugagg

SEQ ID NO: 587751 - RNA, 23 nt, Artificial Sequence
  Synthetic
cccagguacuucggaggcugagg

SEQ ID NO: 587752 - RNA, 24 nt, Artificial Sequence
  Synthetic
ucccagguacuucggaggcugagg

SEQ ID NO: 587753 - RNA, 21 nt, Artificial Sequence
  Synthetic
cagcuacuagggaggcugagg

SEQ ID NO: 587754 - RNA, 22 nt, Artificial Sequence
  Synthetic
ccagcuacuagggaggcugagg

SEQ ID NO: 587755 - RNA, 23 nt, Artificial Sequence
  Synthetic
cccagcuacuagggaggcugagg

SEQ ID NO: 587756 - RNA, 24 nt, Artificial Sequence
  Synthetic
ucccagcuacuagggaggcugagg

SEQ ID NO: 587757 - RNA, 18 nt, Artificial Sequence
  Synthetic
cuacacgggaggcugagg

SEQ ID NO: 587758 - RNA, 19 nt, Artificial Sequence
  Synthetic
gcuacacgggaggcugagg

SEQ ID NO: 587759 - RNA, 20 nt, Artificial Sequence
  Synthetic
agcuacacgggaggcugagg

SEQ ID NO: 587760 - RNA, 21 nt, Artificial Sequence
  Synthetic
cagcuacacgggaggcugagg

SEQ ID NO: 587761 - RNA, 22 nt, Artificial Sequence
  Synthetic
ccagcuacacgggaggcugagg

SEQ ID NO: 587762 - RNA, 23 nt, Artificial Sequence
  Synthetic
cccagcuacacgggaggcugagg

SEQ ID NO: 587763 - RNA, 24 nt, Artificial Sequence
  Synthetic
ucccagcuacacgggaggcugagg

SEQ ID NO: 587764 - RNA, 18 nt, Artificial Sequence
  Synthetic
cuacccgggaggcugagg

SEQ ID NO: 587765 - RNA, 19 nt, Artificial Sequence
  Synthetic
gcuacccgggaggcugagg

SEQ ID NO: 587766 - RNA, 20 nt, Artificial Sequence
  Synthetic
agcuacccgggaggcugagg

SEQ ID NO: 587767 - RNA, 21 nt, Artificial Sequence
  Synthetic
cagcuacccgggaggcugagg

SEQ ID NO: 587768 - RNA, 22 nt, Artificial Sequence
  Synthetic
ucagcuacccgggaggcugagg

SEQ ID NO: 587769 - RNA, 23 nt, Artificial Sequence
  Synthetic
cucagcuacccgggaggcugagg

SEQ ID NO: 587770 - RNA, 24 nt, Artificial Sequence
  Synthetic
ccucagcuacccgggaggcugagg

SEQ ID NO: 587771 - RNA, 21 nt, Artificial Sequence
  Synthetic
cagcuacucgggaggcugagg

SEQ ID NO: 587772 - RNA, 22 nt, Artificial Sequence
  Synthetic
ccagcuacucgggaggcugagg

SEQ ID NO: 587773 - RNA, 23 nt, Artificial Sequence
  Synthetic
accagcuacucgggaggcugagg

SEQ ID NO: 587774 - RNA, 24 nt, Artificial Sequence
  Synthetic
uaccagcuacucgggaggcugagg

SEQ ID NO: 587775 - RNA, 22 nt, Artificial Sequence
  Synthetic
ucagcuacucgggaggcugagg

SEQ ID NO: 587776 - RNA, 23 nt, Artificial Sequence
  Synthetic
cucagcuacucgggaggcugagg

SEQ ID NO: 587777 - RNA, 24 nt, Artificial Sequence
  Synthetic
ucucagcuacucgggaggcugagg

SEQ ID NO: 587778 - RNA, 18 nt, Artificial Sequence
  Synthetic
uuacucgggaggcugagg

SEQ ID NO: 587779 - RNA, 19 nt, Artificial Sequence
  Synthetic
guuacucgggaggcugagg

SEQ ID NO: 587780 - RNA, 20 nt, Artificial Sequence
  Synthetic
aguuacucgggaggcugagg

SEQ ID NO: 587781 - RNA, 21 nt, Artificial Sequence
  Synthetic
caguuacucgggaggcugagg

SEQ ID NO: 587782 - RNA, 22 nt, Artificial Sequence
  Synthetic
ccaguuacucgggaggcugagg

SEQ ID NO: 587783 - RNA, 23 nt, Artificial Sequence
  Synthetic
cccaguuacucgggaggcugagg

SEQ ID NO: 587784 - RNA, 24 nt, Artificial Sequence
  Synthetic
ucccaguuacucgggaggcugagg

SEQ ID NO: 587785 - RNA, 18 nt, Artificial Sequence
  Synthetic
cugcucgggaggcugagg

SEQ ID NO: 587786 - RNA, 19 nt, Artificial Sequence
  Synthetic
gcugcucgggaggcugagg

SEQ ID NO: 587787 - RNA, 20 nt, Artificial Sequence
  Synthetic
agcugcucgggaggcugagg

SEQ ID NO: 587788 - RNA, 21 nt, Artificial Sequence
  Synthetic
cagcugcucgggaggcugagg

SEQ ID NO: 587789 - RNA, 22 nt, Artificial Sequence
  Synthetic
ccagcugcucgggaggcugagg

SEQ ID NO: 587790 - RNA, 23 nt, Artificial Sequence
  Synthetic
accagcugcucgggaggcugagg

SEQ ID NO: 587791 - RNA, 24 nt, Artificial Sequence
  Synthetic
uaccagcugcucgggaggcugagg

SEQ ID NO: 587792 - RNA, 18 nt, Artificial Sequence
  Synthetic
cuacgggggaggcugagg

SEQ ID NO: 587793 - RNA, 19 nt, Artificial Sequence
  Synthetic
gcuacgggggaggcugagg

SEQ ID NO: 587794 - RNA, 20 nt, Artificial Sequence
  Synthetic
agcuacgggggaggcugagg

SEQ ID NO: 587795 - RNA, 21 nt, Artificial Sequence
  Synthetic
cagcuacgggggaggcugagg

SEQ ID NO: 587796 - RNA, 22 nt, Artificial Sequence
  Synthetic
ccagcuacgggggaggcugagg

SEQ ID NO: 587797 - RNA, 23 nt, Artificial Sequence
  Synthetic
cccagcuacgggggaggcugagg

SEQ ID NO: 587798 - RNA, 24 nt, Artificial Sequence
  Synthetic
ucccagcuacgggggaggcugagg

SEQ ID NO: 587799 - RNA, 18 nt, Artificial Sequence
  Synthetic
ccacuugggaggcugagg

SEQ ID NO: 587800 - RNA, 19 nt, Artificial Sequence
  Synthetic
gccacuugggaggcugagg

SEQ ID NO: 587801 - RNA, 20 nt, Artificial Sequence
  Synthetic
agccacuugggaggcugagg

SEQ ID NO: 587802 - RNA, 21 nt, Artificial Sequence
  Synthetic
cagccacuugggaggcugagg

SEQ ID NO: 587803 - RNA, 22 nt, Artificial Sequence
  Synthetic
ccagccacuugggaggcugagg

SEQ ID NO: 587804 - RNA, 23 nt, Artificial Sequence
  Synthetic
cccagccacuugggaggcugagg

SEQ ID NO: 587805 - RNA, 24 nt, Artificial Sequence
  Synthetic
ucccagccacuugggaggcugagg

SEQ ID NO: 587806 - RNA, 18 nt, Artificial Sequence
  Synthetic
cuacuugggaggcugagg

SEQ ID NO: 587807 - RNA, 19 nt, Artificial Sequence
  Synthetic
gcuacuugggaggcugagg

SEQ ID NO: 587808 - RNA, 21 nt, Artificial Sequence
  Synthetic
cagcuacuugggaggcugagg

SEQ ID NO: 587809 - RNA, 22 nt, Artificial Sequence
  Synthetic
ccagcuacuugggaggcugagg

SEQ ID NO: 587810 - RNA, 23 nt, Artificial Sequence
  Synthetic
cccagcuacuugggaggcugagg

SEQ ID NO: 587811 - RNA, 24 nt, Artificial Sequence
  Synthetic
ucccagcuacuugggaggcugagg

SEQ ID NO: 587812 - RNA, 22 nt, Artificial Sequence
  Synthetic
ucagcuacuugggaggcugagg

SEQ ID NO: 587813 - RNA, 23 nt, Artificial Sequence
  Synthetic
cucagcuacuugggaggcugagg

SEQ ID NO: 587814 - RNA, 24 nt, Artificial Sequence
  Synthetic
ucucagcuacuugggaggcugagg

SEQ ID NO: 587815 - RNA, 20 nt, Artificial Sequence
  Synthetic
ugcuacuugggaggcugagg

SEQ ID NO: 587816 - RNA, 21 nt, Artificial Sequence
  Synthetic
cugcuacuugggaggcugagg

SEQ ID NO: 587817 - RNA, 22 nt, Artificial Sequence
  Synthetic
ucugcuacuugggaggcugagg

SEQ ID NO: 587818 - RNA, 23 nt, Artificial Sequence
  Synthetic
cucugcuacuugggaggcugagg

SEQ ID NO: 587819 - RNA, 24 nt, Artificial Sequence
  Synthetic
ucucugcuacuugggaggcugagg

SEQ ID NO: 587820 - RNA, 24 nt, Artificial Sequence
  Synthetic
ucccagcuauuugggaggcugagg

SEQ ID NO: 587821 - RNA, 18 nt, Artificial Sequence
  Synthetic
cacuuugggaggcugagg

SEQ ID NO: 587822 - RNA, 19 nt, Artificial Sequence
  Synthetic
gcacuuugggaggcugagg

SEQ ID NO: 587823 - RNA, 20 nt, Artificial Sequence
  Synthetic
agcacuuugggaggcugagg

SEQ ID NO: 587824 - RNA, 21 nt, Artificial Sequence
  Synthetic
cagcacuuugggaggcugagg

SEQ ID NO: 587825 - RNA, 22 nt, Artificial Sequence
  Synthetic
ccagcacuuugggaggcugagg

SEQ ID NO: 587826 - RNA, 23 nt, Artificial Sequence
  Synthetic
cccagcacuuugggaggcugagg

SEQ ID NO: 587827 - RNA, 24 nt, Artificial Sequence
  Synthetic
ucccagcacuuugggaggcugagg

SEQ ID NO: 587828 - RNA, 18 nt, Artificial Sequence
  Synthetic
ccacucuggaggcugagg

SEQ ID NO: 587829 - RNA, 19 nt, Artificial Sequence
  Synthetic
gccacucuggaggcugagg

SEQ ID NO: 587830 - RNA, 20 nt, Artificial Sequence
  Synthetic
agccacucuggaggcugagg

SEQ ID NO: 587831 - RNA, 21 nt, Artificial Sequence
  Synthetic
cagccacucuggaggcugagg

SEQ ID NO: 587832 - RNA, 22 nt, Artificial Sequence
  Synthetic
ccagccacucuggaggcugagg

SEQ ID NO: 587833 - RNA, 23 nt, Artificial Sequence
  Synthetic
cccagccacucuggaggcugagg

SEQ ID NO: 587834 - RNA, 24 nt, Artificial Sequence
  Synthetic
ucccagccacucuggaggcugagg

SEQ ID NO: 587835 - RNA, 18 nt, Artificial Sequence
  Synthetic
cuacucuggaggcugagg

SEQ ID NO: 587836 - RNA, 19 nt, Artificial Sequence
  Synthetic
gcuacucuggaggcugagg

SEQ ID NO: 587837 - RNA, 20 nt, Artificial Sequence
  Synthetic
agcuacucuggaggcugagg

SEQ ID NO: 587838 - RNA, 21 nt, Artificial Sequence
  Synthetic
cagcuacucuggaggcugagg

SEQ ID NO: 587839 - RNA, 22 nt, Artificial Sequence
  Synthetic
ccagcuacucuggaggcugagg

SEQ ID NO: 587840 - RNA, 23 nt, Artificial Sequence
  Synthetic
cccagcuacucuggaggcugagg

SEQ ID NO: 587841 - RNA, 24 nt, Artificial Sequence
  Synthetic
ucccagcuacucuggaggcugagg

SEQ ID NO: 587842 - RNA, 18 nt, Artificial Sequence
  Synthetic
cuacucgguaggcugagg

SEQ ID NO: 587843 - RNA, 19 nt, Artificial Sequence
  Synthetic
gcuacucgguaggcugagg

SEQ ID NO: 587844 - RNA, 20 nt, Artificial Sequence
  Synthetic
agcuacucgguaggcugagg

SEQ ID NO: 587845 - RNA, 21 nt, Artificial Sequence
  Synthetic
cagcuacucgguaggcugagg

SEQ ID NO: 587846 - RNA, 22 nt, Artificial Sequence
  Synthetic
ccagcuacucgguaggcugagg

SEQ ID NO: 587847 - RNA, 23 nt, Artificial Sequence
  Synthetic
cccagcuacucgguaggcugagg

SEQ ID NO: 587848 - RNA, 24 nt, Artificial Sequence
  Synthetic
ucccagcuacucgguaggcugagg

SEQ ID NO: 587849 - RNA, 18 nt, Artificial Sequence
  Synthetic
cuacucagauggcugagg

SEQ ID NO: 587850 - RNA, 19 nt, Artificial Sequence
  Synthetic
gcuacucagauggcugagg

SEQ ID NO: 587851 - RNA, 20 nt, Artificial Sequence
  Synthetic
agcuacucagauggcugagg

SEQ ID NO: 587852 - RNA, 21 nt, Artificial Sequence
  Synthetic
cagcuacucagauggcugagg

SEQ ID NO: 587853 - RNA, 22 nt, Artificial Sequence
  Synthetic
ccagcuacucagauggcugagg

SEQ ID NO: 587854 - RNA, 23 nt, Artificial Sequence
  Synthetic
cccagcuacucagauggcugagg

SEQ ID NO: 587855 - RNA, 24 nt, Artificial Sequence
  Synthetic
ucccagcuacucagauggcugagg

SEQ ID NO: 587856 - RNA, 18 nt, Artificial Sequence
  Synthetic
ugccugacacaucugagg

SEQ ID NO: 587857 - RNA, 19 nt, Artificial Sequence
  Synthetic
augccugacacaucugagg

SEQ ID NO: 587858 - RNA, 20 nt, Artificial Sequence
  Synthetic
aaugccugacacaucugagg

SEQ ID NO: 587859 - RNA, 21 nt, Artificial Sequence
  Synthetic
aaaugccugacacaucugagg

SEQ ID NO: 587860 - RNA, 22 nt, Artificial Sequence
  Synthetic
uaaaugccugacacaucugagg

SEQ ID NO: 587861 - RNA, 23 nt, Artificial Sequence
  Synthetic
cuaaaugccugacacaucugagg

SEQ ID NO: 587862 - RNA, 24 nt, Artificial Sequence
  Synthetic
acuaaaugccugacacaucugagg

SEQ ID NO: 587863 - RNA, 18 nt, Artificial Sequence
  Synthetic
guggugaaucaucugagg

SEQ ID NO: 587864 - RNA, 19 nt, Artificial Sequence
  Synthetic
aguggugaaucaucugagg

SEQ ID NO: 587865 - RNA, 20 nt, Artificial Sequence
  Synthetic
aaguggugaaucaucugagg

SEQ ID NO: 587866 - RNA, 21 nt, Artificial Sequence
  Synthetic
aaaguggugaaucaucugagg

SEQ ID NO: 587867 - RNA, 22 nt, Artificial Sequence
  Synthetic
gaaaguggugaaucaucugagg

SEQ ID NO: 587868 - RNA, 23 nt, Artificial Sequence
  Synthetic
agaaaguggugaaucaucugagg

SEQ ID NO: 587869 - RNA, 24 nt, Artificial Sequence
  Synthetic
aagaaaguggugaaucaucugagg

SEQ ID NO: 587870 - RNA, 18 nt, Artificial Sequence
  Synthetic
gauuguucuuaucugagg

SEQ ID NO: 587871 - RNA, 19 nt, Artificial Sequence
  Synthetic
ugauuguucuuaucugagg

SEQ ID NO: 587872 - RNA, 20 nt, Artificial Sequence
  Synthetic
uugauuguucuuaucugagg

SEQ ID NO: 587873 - RNA, 21 nt, Artificial Sequence
  Synthetic
uuugauuguucuuaucugagg

SEQ ID NO: 587874 - RNA, 22 nt, Artificial Sequence
  Synthetic
uuuugauuguucuuaucugagg

SEQ ID NO: 587875 - RNA, 23 nt, Artificial Sequence
  Synthetic
auuuugauuguucuuaucugagg

SEQ ID NO: 587876 - RNA, 24 nt, Artificial Sequence
  Synthetic
aauuuugauuguucuuaucugagg

SEQ ID NO: 587877 - RNA, 18 nt, Artificial Sequence
  Synthetic
caaaugauggcucugagg

SEQ ID NO: 587878 - RNA, 19 nt, Artificial Sequence
  Synthetic
ucaaaugauggcucugagg

SEQ ID NO: 587879 - RNA, 20 nt, Artificial Sequence
  Synthetic
uucaaaugauggcucugagg

SEQ ID NO: 587880 - RNA, 21 nt, Artificial Sequence
  Synthetic
auucaaaugauggcucugagg

SEQ ID NO: 587881 - RNA, 22 nt, Artificial Sequence
  Synthetic
aauucaaaugauggcucugagg

SEQ ID NO: 587882 - RNA, 23 nt, Artificial Sequence
  Synthetic
aaauucaaaugauggcucugagg

SEQ ID NO: 587883 - RNA, 24 nt, Artificial Sequence
  Synthetic
uaaauucaaaugauggcucugagg

SEQ ID NO: 587884 - RNA, 18 nt, Artificial Sequence
  Synthetic
uuugaugcugcucugagg

SEQ ID NO: 587885 - RNA, 19 nt, Artificial Sequence
  Synthetic
cuuugaugcugcucugagg

SEQ ID NO: 587886 - RNA, 20 nt, Artificial Sequence
  Synthetic
ucuuugaugcugcucugagg

SEQ ID NO: 587887 - RNA, 21 nt, Artificial Sequence
  Synthetic
gucuuugaugcugcucugagg

SEQ ID NO: 587888 - RNA, 22 nt, Artificial Sequence
  Synthetic
ugucuuugaugcugcucugagg

SEQ ID NO: 587889 - RNA, 23 nt, Artificial Sequence
  Synthetic
uugucuuugaugcugcucugagg

SEQ ID NO: 587890 - RNA, 24 nt, Artificial Sequence
  Synthetic
cuugucuuugaugcugcucugagg

SEQ ID NO: 587891 - RNA, 18 nt, Artificial Sequence
  Synthetic
cuacuuggcagucugagg

SEQ ID NO: 587892 - RNA, 19 nt, Artificial Sequence
  Synthetic
gcuacuuggcagucugagg

SEQ ID NO: 587893 - RNA, 20 nt, Artificial Sequence
  Synthetic
agcuacuuggcagucugagg

SEQ ID NO: 587894 - RNA, 21 nt, Artificial Sequence
  Synthetic
uagcuacuuggcagucugagg

SEQ ID NO: 587895 - RNA, 22 nt, Artificial Sequence
  Synthetic
cuagcuacuuggcagucugagg

SEQ ID NO: 587896 - RNA, 23 nt, Artificial Sequence
  Synthetic
ccuagcuacuuggcagucugagg

SEQ ID NO: 587897 - RNA, 24 nt, Artificial Sequence
  Synthetic
uccuagcuacuuggcagucugagg

SEQ ID NO: 587898 - RNA, 18 nt, Artificial Sequence
  Synthetic
gaguuacagagucugagg

SEQ ID NO: 587899 - RNA, 19 nt, Artificial Sequence
  Synthetic
ggaguuacagagucugagg

SEQ ID NO: 587900 - RNA, 20 nt, Artificial Sequence
  Synthetic
uggaguuacagagucugagg

SEQ ID NO: 587901 - RNA, 21 nt, Artificial Sequence
  Synthetic
auggaguuacagagucugagg

SEQ ID NO: 587902 - RNA, 22 nt, Artificial Sequence
  Synthetic
cauggaguuacagagucugagg

SEQ ID NO: 587903 - RNA, 23 nt, Artificial Sequence
  Synthetic
ucauggaguuacagagucugagg

SEQ ID NO: 587904 - RNA, 24 nt, Artificial Sequence
  Synthetic
uucauggaguuacagagucugagg

SEQ ID NO: 587905 - RNA, 18 nt, Artificial Sequence
  Synthetic
uuaacuucuggucugagg

SEQ ID NO: 587906 - RNA, 19 nt, Artificial Sequence
  Synthetic
auuaacuucuggucugagg

SEQ ID NO: 587907 - RNA, 20 nt, Artificial Sequence
  Synthetic
cauuaacuucuggucugagg

SEQ ID NO: 587908 - RNA, 21 nt, Artificial Sequence
  Synthetic
ucauuaacuucuggucugagg

SEQ ID NO: 587909 - RNA, 22 nt, Artificial Sequence
  Synthetic
uucauuaacuucuggucugagg

SEQ ID NO: 587910 - RNA, 23 nt, Artificial Sequence
  Synthetic
uuucauuaacuucuggucugagg

SEQ ID NO: 587911 - RNA, 24 nt, Artificial Sequence
  Synthetic
uuuucauuaacuucuggucugagg

SEQ ID NO: 587912 - RNA, 18 nt, Artificial Sequence
  Synthetic
uuucaucauauucugagg

SEQ ID NO: 587913 - RNA, 19 nt, Artificial Sequence
  Synthetic
uuuucaucauauucugagg

SEQ ID NO: 587914 - RNA, 20 nt, Artificial Sequence
  Synthetic
cuuuucaucauauucugagg

SEQ ID NO: 587915 - RNA, 21 nt, Artificial Sequence
  Synthetic
ucuuuucaucauauucugagg

SEQ ID NO: 587916 - RNA, 22 nt, Artificial Sequence
  Synthetic
uucuuuucaucauauucugagg

SEQ ID NO: 587917 - RNA, 23 nt, Artificial Sequence
  Synthetic
cuucuuuucaucauauucugagg

SEQ ID NO: 587918 - RNA, 24 nt, Artificial Sequence
  Synthetic
ucuucuuuucaucauauucugagg

SEQ ID NO: 587919 - RNA, 18 nt, Artificial Sequence
  Synthetic
uuuuuugcuucagugagg

SEQ ID NO: 587920 - RNA, 19 nt, Artificial Sequence
  Synthetic
uuuuuuugcuucagugagg

SEQ ID NO: 587921 - RNA, 20 nt, Artificial Sequence
  Synthetic
uuuuuuuugcuucagugagg

SEQ ID NO: 587922 - RNA, 21 nt, Artificial Sequence
  Synthetic
uuuuuuuuugcuucagugagg

SEQ ID NO: 587923 - RNA, 22 nt, Artificial Sequence
  Synthetic
cuuuuuuuuugcuucagugagg

SEQ ID NO: 587924 - RNA, 23 nt, Artificial Sequence
  Synthetic
acuuuuuuuuugcuucagugagg

SEQ ID NO: 587925 - RNA, 24 nt, Artificial Sequence
  Synthetic
gacuuuuuuuuugcuucagugagg

SEQ ID NO: 587926 - RNA, 18 nt, Artificial Sequence
  Synthetic
gaaggagaaugagugagg

SEQ ID NO: 587927 - RNA, 19 nt, Artificial Sequence
  Synthetic
agaaggagaaugagugagg

SEQ ID NO: 587928 - RNA, 20 nt, Artificial Sequence
  Synthetic
aagaaggagaaugagugagg

SEQ ID NO: 587929 - RNA, 21 nt, Artificial Sequence
  Synthetic
caagaaggagaaugagugagg

SEQ ID NO: 587930 - RNA, 22 nt, Artificial Sequence
  Synthetic
gcaagaaggagaaugagugagg

SEQ ID NO: 587931 - RNA, 23 nt, Artificial Sequence
  Synthetic
ggcaagaaggagaaugagugagg

SEQ ID NO: 587932 - RNA, 24 nt, Artificial Sequence
  Synthetic
uggcaagaaggagaaugagugagg

SEQ ID NO: 587933 - RNA, 18 nt, Artificial Sequence
  Synthetic
cacaacauccuagugagg

SEQ ID NO: 587934 - RNA, 19 nt, Artificial Sequence
  Synthetic
ccacaacauccuagugagg

SEQ ID NO: 587935 - RNA, 20 nt, Artificial Sequence
  Synthetic
uccacaacauccuagugagg

SEQ ID NO: 587936 - RNA, 21 nt, Artificial Sequence
  Synthetic
auccacaacauccuagugagg

SEQ ID NO: 587937 - RNA, 22 nt, Artificial Sequence
  Synthetic
aauccacaacauccuagugagg

SEQ ID NO: 587938 - RNA, 23 nt, Artificial Sequence
  Synthetic
aaauccacaacauccuagugagg

SEQ ID NO: 587939 - RNA, 24 nt, Artificial Sequence
  Synthetic
uaaauccacaacauccuagugagg

SEQ ID NO: 587940 - RNA, 18 nt, Artificial Sequence
  Synthetic
uugcaacuucucgugagg

SEQ ID NO: 587941 - RNA, 19 nt, Artificial Sequence
  Synthetic
uuugcaacuucucgugagg

SEQ ID NO: 587942 - RNA, 20 nt, Artificial Sequence
  Synthetic
auuugcaacuucucgugagg

SEQ ID NO: 587943 - RNA, 21 nt, Artificial Sequence
  Synthetic
uauuugcaacuucucgugagg

SEQ ID NO: 587944 - RNA, 22 nt, Artificial Sequence
  Synthetic
guauuugcaacuucucgugagg

SEQ ID NO: 587945 - RNA, 23 nt, Artificial Sequence
  Synthetic
gguauuugcaacuucucgugagg

SEQ ID NO: 587946 - RNA, 24 nt, Artificial Sequence
  Synthetic
ugguauuugcaacuucucgugagg

SEQ ID NO: 587947 - RNA, 18 nt, Artificial Sequence
  Synthetic
cacagggaaaaggugagg

SEQ ID NO: 587948 - RNA, 19 nt, Artificial Sequence
  Synthetic
acacagggaaaaggugagg

SEQ ID NO: 587949 - RNA, 20 nt, Artificial Sequence
  Synthetic
gacacagggaaaaggugagg

SEQ ID NO: 587950 - RNA, 21 nt, Artificial Sequence
  Synthetic
ggacacagggaaaaggugagg

SEQ ID NO: 587951 - RNA, 22 nt, Artificial Sequence
  Synthetic
uggacacagggaaaaggugagg

SEQ ID NO: 587952 - RNA, 23 nt, Artificial Sequence
  Synthetic
guggacacagggaaaaggugagg

SEQ ID NO: 587953 - RNA, 24 nt, Artificial Sequence
  Synthetic
uguggacacagggaaaaggugagg

SEQ ID NO: 587954 - RNA, 18 nt, Artificial Sequence
  Synthetic
aucuuugauuaggugagg

SEQ ID NO: 587955 - RNA, 19 nt, Artificial Sequence
  Synthetic
caucuuugauuaggugagg

SEQ ID NO: 587956 - RNA, 20 nt, Artificial Sequence
  Synthetic
ucaucuuugauuaggugagg

SEQ ID NO: 587957 - RNA, 21 nt, Artificial Sequence
  Synthetic
uucaucuuugauuaggugagg

SEQ ID NO: 587958 - RNA, 22 nt, Artificial Sequence
  Synthetic
uuucaucuuugauuaggugagg

SEQ ID NO: 587959 - RNA, 23 nt, Artificial Sequence
  Synthetic
auuucaucuuugauuaggugagg

SEQ ID NO: 587960 - RNA, 24 nt, Artificial Sequence
  Synthetic
uauuucaucuuugauuaggugagg

SEQ ID NO: 587961 - RNA, 18 nt, Artificial Sequence
  Synthetic
uguccagcaggggugagg

SEQ ID NO: 587962 - RNA, 19 nt, Artificial Sequence
  Synthetic
auguccagcaggggugagg

SEQ ID NO: 587963 - RNA, 20 nt, Artificial Sequence
  Synthetic
gauguccagcaggggugagg

SEQ ID NO: 587964 - RNA, 21 nt, Artificial Sequence
  Synthetic
ggauguccagcaggggugagg

SEQ ID NO: 587965 - RNA, 22 nt, Artificial Sequence
  Synthetic
uggauguccagcaggggugagg

SEQ ID NO: 587966 - RNA, 23 nt, Artificial Sequence
  Synthetic
guggauguccagcaggggugagg

SEQ ID NO: 587967 - RNA, 24 nt, Artificial Sequence
  Synthetic
gguggauguccagcaggggugagg

SEQ ID NO: 587968 - RNA, 18 nt, Artificial Sequence
  Synthetic
gaaucaucuauggugagg

SEQ ID NO: 587969 - RNA, 19 nt, Artificial Sequence
  Synthetic
agaaucaucuauggugagg

SEQ ID NO: 587970 - RNA, 20 nt, Artificial Sequence
  Synthetic
aagaaucaucuauggugagg

SEQ ID NO: 587971 - RNA, 21 nt, Artificial Sequence
  Synthetic
caagaaucaucuauggugagg

SEQ ID NO: 587972 - RNA, 22 nt, Artificial Sequence
  Synthetic
acaagaaucaucuauggugagg

SEQ ID NO: 587973 - RNA, 23 nt, Artificial Sequence
  Synthetic
aacaagaaucaucuauggugagg

SEQ ID NO: 587974 - RNA, 24 nt, Artificial Sequence
  Synthetic
gaacaagaaucaucuauggugagg

SEQ ID NO: 587975 - RNA, 18 nt, Artificial Sequence
  Synthetic
augugaauuaaugugagg

SEQ ID NO: 587976 - RNA, 19 nt, Artificial Sequence
  Synthetic
caugugaauuaaugugagg

SEQ ID NO: 587977 - RNA, 20 nt, Artificial Sequence
  Synthetic
acaugugaauuaaugugagg

SEQ ID NO: 587978 - RNA, 21 nt, Artificial Sequence
  Synthetic
uacaugugaauuaaugugagg

SEQ ID NO: 587979 - RNA, 22 nt, Artificial Sequence
  Synthetic
cuacaugugaauuaaugugagg

SEQ ID NO: 587980 - RNA, 23 nt, Artificial Sequence
  Synthetic
ccuacaugugaauuaaugugagg

SEQ ID NO: 587981 - RNA, 24 nt, Artificial Sequence
  Synthetic
uccuacaugugaauuaaugugagg

SEQ ID NO: 587982 - RNA, 18 nt, Artificial Sequence
  Synthetic
uuuuauuggccugugagg

SEQ ID NO: 587983 - RNA, 19 nt, Artificial Sequence
  Synthetic
auuuuauuggccugugagg

SEQ ID NO: 587984 - RNA, 20 nt, Artificial Sequence
  Synthetic
uauuuuauuggccugugagg

SEQ ID NO: 587985 - RNA, 21 nt, Artificial Sequence
  Synthetic
uuauuuuauuggccugugagg

SEQ ID NO: 587986 - RNA, 22 nt, Artificial Sequence
  Synthetic
auuauuuuauuggccugugagg

SEQ ID NO: 587987 - RNA, 23 nt, Artificial Sequence
  Synthetic
uauuauuuuauuggccugugagg

SEQ ID NO: 587988 - RNA, 24 nt, Artificial Sequence
  Synthetic
auauuauuuuauuggccugugagg

SEQ ID NO: 587989 - RNA, 18 nt, Artificial Sequence
  Synthetic
uuuguguauggugugagg

SEQ ID NO: 587990 - RNA, 19 nt, Artificial Sequence
  Synthetic
uuuuguguauggugugagg

SEQ ID NO: 587991 - RNA, 20 nt, Artificial Sequence
  Synthetic
uuuuuguguauggugugagg

SEQ ID NO: 587992 - RNA, 21 nt, Artificial Sequence
  Synthetic
auuuuuguguauggugugagg

SEQ ID NO: 587993 - RNA, 22 nt, Artificial Sequence
  Synthetic
aauuuuuguguauggugugagg

SEQ ID NO: 587994 - RNA, 23 nt, Artificial Sequence
  Synthetic
uaauuuuuguguauggugugagg

SEQ ID NO: 587995 - RNA, 24 nt, Artificial Sequence
  Synthetic
cuaauuuuuguguauggugugagg

SEQ ID NO: 587996 - RNA, 18 nt, Artificial Sequence
  Synthetic
gaggaugcaugugugagg

SEQ ID NO: 587997 - RNA, 19 nt, Artificial Sequence
  Synthetic
agaggaugcaugugugagg

SEQ ID NO: 587998 - RNA, 20 nt, Artificial Sequence
  Synthetic
gagaggaugcaugugugagg

SEQ ID NO: 587999 - RNA, 21 nt, Artificial Sequence
  Synthetic
agagaggaugcaugugugagg

SEQ ID NO: 588000 - RNA, 22 nt, Artificial Sequence
  Synthetic
cagagaggaugcaugugugagg

SEQ ID NO: 588001 - RNA, 23 nt, Artificial Sequence
  Synthetic
ccagagaggaugcaugugugagg

SEQ ID NO: 588002 - RNA, 24 nt, Artificial Sequence
  Synthetic
uccagagaggaugcaugugugagg

SEQ ID NO: 588003 - RNA, 18 nt, Artificial Sequence
  Synthetic
gcuugacagugugugagg

SEQ ID NO: 588004 - RNA, 19 nt, Artificial Sequence
  Synthetic
agcuugacagugugugagg

SEQ ID NO: 588005 - RNA, 20 nt, Artificial Sequence
  Synthetic
aagcuugacagugugugagg

SEQ ID NO: 588006 - RNA, 21 nt, Artificial Sequence
  Synthetic
caagcuugacagugugugagg

SEQ ID NO: 588007 - RNA, 22 nt, Artificial Sequence
  Synthetic
ucaagcuugacagugugugagg

SEQ ID NO: 588008 - RNA, 23 nt, Artificial Sequence
  Synthetic
cucaagcuugacagugugugagg

SEQ ID NO: 588009 - RNA, 24 nt, Artificial Sequence
  Synthetic
gcucaagcuugacagugugugagg

SEQ ID NO: 588010 - RNA, 18 nt, Artificial Sequence
  Synthetic
cacucucuuguugugagg

SEQ ID NO: 588011 - RNA, 19 nt, Artificial Sequence
  Synthetic
gcacucucuuguugugagg

SEQ ID NO: 588012 - RNA, 20 nt, Artificial Sequence
  Synthetic
ggcacucucuuguugugagg

SEQ ID NO: 588013 - RNA, 21 nt, Artificial Sequence
  Synthetic
uggcacucucuuguugugagg

SEQ ID NO: 588014 - RNA, 22 nt, Artificial Sequence
  Synthetic
cuggcacucucuuguugugagg

SEQ ID NO: 588015 - RNA, 23 nt, Artificial Sequence
  Synthetic
acuggcacucucuuguugugagg

SEQ ID NO: 588016 - RNA, 24 nt, Artificial Sequence
  Synthetic
cacuggcacucucuuguugugagg

SEQ ID NO: 588017 - RNA, 18 nt, Artificial Sequence
  Synthetic
gcauccuagaaauugagg

SEQ ID NO: 588018 - RNA, 19 nt, Artificial Sequence
  Synthetic
ggcauccuagaaauugagg

SEQ ID NO: 588019 - RNA, 20 nt, Artificial Sequence
  Synthetic
aggcauccuagaaauugagg

SEQ ID NO: 588020 - RNA, 21 nt, Artificial Sequence
  Synthetic
gaggcauccuagaaauugagg

SEQ ID NO: 588021 - RNA, 22 nt, Artificial Sequence
  Synthetic
agaggcauccuagaaauugagg

SEQ ID NO: 588022 - RNA, 23 nt, Artificial Sequence
  Synthetic
aagaggcauccuagaaauugagg

SEQ ID NO: 588023 - RNA, 24 nt, Artificial Sequence
  Synthetic
aaagaggcauccuagaaauugagg

SEQ ID NO: 588024 - RNA, 18 nt, Artificial Sequence
  Synthetic
agaccauuugaauugagg

SEQ ID NO: 588025 - RNA, 19 nt, Artificial Sequence
  Synthetic
aagaccauuugaauugagg

SEQ ID NO: 588026 - RNA, 20 nt, Artificial Sequence
  Synthetic
aaagaccauuugaauugagg

SEQ ID NO: 588027 - RNA, 21 nt, Artificial Sequence
  Synthetic
aaaagaccauuugaauugagg

SEQ ID NO: 588028 - RNA, 22 nt, Artificial Sequence
  Synthetic
caaaagaccauuugaauugagg

SEQ ID NO: 588029 - RNA, 23 nt, Artificial Sequence
  Synthetic
ccaaaagaccauuugaauugagg

SEQ ID NO: 588030 - RNA, 24 nt, Artificial Sequence
  Synthetic
accaaaagaccauuugaauugagg

SEQ ID NO: 588031 - RNA, 18 nt, Artificial Sequence
  Synthetic
agagaaauaccauugagg

SEQ ID NO: 588032 - RNA, 19 nt, Artificial Sequence
  Synthetic
uagagaaauaccauugagg

SEQ ID NO: 588033 - RNA, 20 nt, Artificial Sequence
  Synthetic
auagagaaauaccauugagg

SEQ ID NO: 588034 - RNA, 21 nt, Artificial Sequence
  Synthetic
aauagagaaauaccauugagg

SEQ ID NO: 588035 - RNA, 22 nt, Artificial Sequence
  Synthetic
uaauagagaaauaccauugagg

SEQ ID NO: 588036 - RNA, 23 nt, Artificial Sequence
  Synthetic
guaauagagaaauaccauugagg

SEQ ID NO: 588037 - RNA, 24 nt, Artificial Sequence
  Synthetic
aguaauagagaaauaccauugagg

SEQ ID NO: 588038 - RNA, 18 nt, Artificial Sequence
  Synthetic
uugagggcccacuugagg

SEQ ID NO: 588039 - RNA, 19 nt, Artificial Sequence
  Synthetic
guugagggcccacuugagg

SEQ ID NO: 588040 - RNA, 20 nt, Artificial Sequence
  Synthetic
uguugagggcccacuugagg

SEQ ID NO: 588041 - RNA, 21 nt, Artificial Sequence
  Synthetic
guguugagggcccacuugagg

SEQ ID NO: 588042 - RNA, 22 nt, Artificial Sequence
  Synthetic
aguguugagggcccacuugagg

SEQ ID NO: 588043 - RNA, 23 nt, Artificial Sequence
  Synthetic
caguguugagggcccacuugagg

SEQ ID NO: 588044 - RNA, 24 nt, Artificial Sequence
  Synthetic
acaguguugagggcccacuugagg

SEQ ID NO: 588045 - RNA, 18 nt, Artificial Sequence
  Synthetic
aguacaaaggccuugagg

SEQ ID NO: 588046 - RNA, 19 nt, Artificial Sequence
  Synthetic
aaguacaaaggccuugagg

SEQ ID NO: 588047 - RNA, 20 nt, Artificial Sequence
  Synthetic
caaguacaaaggccuugagg

SEQ ID NO: 588048 - RNA, 21 nt, Artificial Sequence
  Synthetic
acaaguacaaaggccuugagg

SEQ ID NO: 588049 - RNA, 22 nt, Artificial Sequence
  Synthetic
aacaaguacaaaggccuugagg

SEQ ID NO: 588050 - RNA, 23 nt, Artificial Sequence
  Synthetic
aaacaaguacaaaggccuugagg

SEQ ID NO: 588051 - RNA, 24 nt, Artificial Sequence
  Synthetic
aaaacaaguacaaaggccuugagg

SEQ ID NO: 588052 - RNA, 18 nt, Artificial Sequence
  Synthetic
aaggagcccagcuugagg

SEQ ID NO: 588053 - RNA, 19 nt, Artificial Sequence
  Synthetic
aaaggagcccagcuugagg

SEQ ID NO: 588054 - RNA, 20 nt, Artificial Sequence
  Synthetic
gaaaggagcccagcuugagg

SEQ ID NO: 588055 - RNA, 21 nt, Artificial Sequence
  Synthetic
ugaaaggagcccagcuugagg

SEQ ID NO: 588056 - RNA, 22 nt, Artificial Sequence
  Synthetic
augaaaggagcccagcuugagg

SEQ ID NO: 588057 - RNA, 23 nt, Artificial Sequence
  Synthetic
caugaaaggagcccagcuugagg

SEQ ID NO: 588058 - RNA, 24 nt, Artificial Sequence
  Synthetic
gcaugaaaggagcccagcuugagg

SEQ ID NO: 588059 - RNA, 18 nt, Artificial Sequence
  Synthetic
aggcuuuuuggcuugagg

SEQ ID NO: 588060 - RNA, 19 nt, Artificial Sequence
  Synthetic
caggcuuuuuggcuugagg

SEQ ID NO: 588061 - RNA, 20 nt, Artificial Sequence
  Synthetic
ucaggcuuuuuggcuugagg

SEQ ID NO: 588062 - RNA, 21 nt, Artificial Sequence
  Synthetic
uucaggcuuuuuggcuugagg

SEQ ID NO: 588063 - RNA, 22 nt, Artificial Sequence
  Synthetic
uuucaggcuuuuuggcuugagg

SEQ ID NO: 588064 - RNA, 23 nt, Artificial Sequence
  Synthetic
guuucaggcuuuuuggcuugagg

SEQ ID NO: 588065 - RNA, 24 nt, Artificial Sequence
  Synthetic
gguuucaggcuuuuuggcuugagg

SEQ ID NO: 588066 - RNA, 18 nt, Artificial Sequence
  Synthetic
guggaaaagugcuugagg

SEQ ID NO: 588067 - RNA, 19 nt, Artificial Sequence
  Synthetic
aguggaaaagugcuugagg

SEQ ID NO: 588068 - RNA, 20 nt, Artificial Sequence
  Synthetic
aaguggaaaagugcuugagg

SEQ ID NO: 588069 - RNA, 21 nt, Artificial Sequence
  Synthetic
aaaguggaaaagugcuugagg

SEQ ID NO: 588070 - RNA, 22 nt, Artificial Sequence
  Synthetic
caaaguggaaaagugcuugagg

SEQ ID NO: 588071 - RNA, 23 nt, Artificial Sequence
  Synthetic
acaaaguggaaaagugcuugagg

SEQ ID NO: 588072 - RNA, 24 nt, Artificial Sequence
  Synthetic
aacaaaguggaaaagugcuugagg

SEQ ID NO: 588073 - RNA, 18 nt, Artificial Sequence
  Synthetic
gccaaaacagucuugagg

SEQ ID NO: 588074 - RNA, 19 nt, Artificial Sequence
  Synthetic
agccaaaacagucuugagg

SEQ ID NO: 588075 - RNA, 20 nt, Artificial Sequence
  Synthetic
uagccaaaacagucuugagg

SEQ ID NO: 588076 - RNA, 21 nt, Artificial Sequence
  Synthetic
auagccaaaacagucuugagg

SEQ ID NO: 588077 - RNA, 22 nt, Artificial Sequence
  Synthetic
aauagccaaaacagucuugagg

SEQ ID NO: 588078 - RNA, 23 nt, Artificial Sequence
  Synthetic
aaauagccaaaacagucuugagg

SEQ ID NO: 588079 - RNA, 24 nt, Artificial Sequence
  Synthetic
caaauagccaaaacagucuugagg

SEQ ID NO: 588080 - RNA, 18 nt, Artificial Sequence
  Synthetic
aauaagaauucguugagg

SEQ ID NO: 588081 - RNA, 19 nt, Artificial Sequence
  Synthetic
gaauaagaauucguugagg

SEQ ID NO: 588082 - RNA, 20 nt, Artificial Sequence
  Synthetic
agaauaagaauucguugagg

SEQ ID NO: 588083 - RNA, 21 nt, Artificial Sequence
  Synthetic
aagaauaagaauucguugagg

SEQ ID NO: 588084 - RNA, 22 nt, Artificial Sequence
  Synthetic
aaagaauaagaauucguugagg

SEQ ID NO: 588085 - RNA, 23 nt, Artificial Sequence
  Synthetic
gaaagaauaagaauucguugagg

SEQ ID NO: 588086 - RNA, 24 nt, Artificial Sequence
  Synthetic
agaaagaauaagaauucguugagg

SEQ ID NO: 588087 - RNA, 18 nt, Artificial Sequence
  Synthetic
caacucuggagguugagg

SEQ ID NO: 588088 - RNA, 19 nt, Artificial Sequence
  Synthetic
gcaacucuggagguugagg

SEQ ID NO: 588089 - RNA, 20 nt, Artificial Sequence
  Synthetic
agcaacucuggagguugagg

SEQ ID NO: 588090 - RNA, 21 nt, Artificial Sequence
  Synthetic
cagcaacucuggagguugagg

SEQ ID NO: 588091 - RNA, 22 nt, Artificial Sequence
  Synthetic
ccagcaacucuggagguugagg

SEQ ID NO: 588092 - RNA, 23 nt, Artificial Sequence
  Synthetic
cccagcaacucuggagguugagg

SEQ ID NO: 588093 - RNA, 24 nt, Artificial Sequence
  Synthetic
ucccagcaacucuggagguugagg

SEQ ID NO: 588094 - RNA, 18 nt, Artificial Sequence
  Synthetic
guaguggggggguugagg

SEQ ID NO: 588095 - RNA, 19 nt, Artificial Sequence
  Synthetic
gguaguggggggguugagg

SEQ ID NO: 588096 - RNA, 20 nt, Artificial Sequence
  Synthetic
ggguaguggggggguugagg

SEQ ID NO: 588097 - RNA, 21 nt, Artificial Sequence
  Synthetic
aggguaguggggggguugagg

SEQ ID NO: 588098 - RNA, 22 nt, Artificial Sequence
  Synthetic
aaggguaguggggggguugagg

SEQ ID NO: 588099 - RNA, 23 nt, Artificial Sequence
  Synthetic
gaaggguaguggggggguugagg

SEQ ID NO: 588100 - RNA, 24 nt, Artificial Sequence
  Synthetic
ugaaggguaguggggggguugagg

SEQ ID NO: 588101 - RNA, 18 nt, Artificial Sequence
  Synthetic
gaaggguugguguugagg

SEQ ID NO: 588102 - RNA, 19 nt, Artificial Sequence
  Synthetic
agaaggguugguguugagg

SEQ ID NO: 588103 - RNA, 20 nt, Artificial Sequence
  Synthetic
uagaaggguugguguugagg

SEQ ID NO: 588104 - RNA, 21 nt, Artificial Sequence
  Synthetic
auagaaggguugguguugagg

SEQ ID NO: 588105 - RNA, 22 nt, Artificial Sequence
  Synthetic
gauagaaggguugguguugagg

SEQ ID NO: 588106 - RNA, 23 nt, Artificial Sequence
  Synthetic
agauagaaggguugguguugagg

SEQ ID NO: 588107 - RNA, 24 nt, Artificial Sequence
  Synthetic
gagauagaaggguugguguugagg

SEQ ID NO: 588108 - RNA, 18 nt, Artificial Sequence
  Synthetic
ucacucuuacauuugagg

SEQ ID NO: 588109 - RNA, 19 nt, Artificial Sequence
  Synthetic
uucacucuuacauuugagg

SEQ ID NO: 588110 - RNA, 20 nt, Artificial Sequence
  Synthetic
uuucacucuuacauuugagg

SEQ ID NO: 588111 - RNA, 21 nt, Artificial Sequence
  Synthetic
cuuucacucuuacauuugagg

SEQ ID NO: 588112 - RNA, 22 nt, Artificial Sequence
  Synthetic
ucuuucacucuuacauuugagg

SEQ ID NO: 588113 - RNA, 23 nt, Artificial Sequence
  Synthetic
uucuuucacucuuacauuugagg

SEQ ID NO: 588114 - RNA, 24 nt, Artificial Sequence
  Synthetic
auucuuucacucuuacauuugagg

SEQ ID NO: 588115 - RNA, 18 nt, Artificial Sequence
  Synthetic
auacuugggaguuugagg

SEQ ID NO: 588116 - RNA, 19 nt, Artificial Sequence
  Synthetic
gauacuugggaguuugagg

SEQ ID NO: 588117 - RNA, 20 nt, Artificial Sequence
  Synthetic
agauacuugggaguuugagg

SEQ ID NO: 588118 - RNA, 21 nt, Artificial Sequence
  Synthetic
cagauacuugggaguuugagg

SEQ ID NO: 588119 - RNA, 22 nt, Artificial Sequence
  Synthetic
ccagauacuugggaguuugagg

SEQ ID NO: 588120 - RNA, 23 nt, Artificial Sequence
  Synthetic
cccagauacuugggaguuugagg

SEQ ID NO: 588121 - RNA, 24 nt, Artificial Sequence
  Synthetic
ucccagauacuugggaguuugagg

SEQ ID NO: 588122 - RNA, 18 nt, Artificial Sequence
  Synthetic
cgaugauguuguuugagg

SEQ ID NO: 588123 - RNA, 19 nt, Artificial Sequence
  Synthetic
gcgaugauguuguuugagg

SEQ ID NO: 588124 - RNA, 20 nt, Artificial Sequence
  Synthetic
agcgaugauguuguuugagg

SEQ ID NO: 588125 - RNA, 21 nt, Artificial Sequence
  Synthetic
gagcgaugauguuguuugagg

SEQ ID NO: 588126 - RNA, 22 nt, Artificial Sequence
  Synthetic
ggagcgaugauguuguuugagg

SEQ ID NO: 588127 - RNA, 23 nt, Artificial Sequence
  Synthetic
aggagcgaugauguuguuugagg

SEQ ID NO: 588128 - RNA, 24 nt, Artificial Sequence
  Synthetic
caggagcgaugauguuguuugagg

SEQ ID NO: 588129 - RNA, 18 nt, Artificial Sequence
  Synthetic
ggaaucuuauuuuugagg

SEQ ID NO: 588130 - RNA, 19 nt, Artificial Sequence
  Synthetic
gggaaucuuauuuuugagg

SEQ ID NO: 588131 - RNA, 20 nt, Artificial Sequence
  Synthetic
agggaaucuuauuuuugagg

SEQ ID NO: 588132 - RNA, 21 nt, Artificial Sequence
  Synthetic
aagggaaucuuauuuuugagg

SEQ ID NO: 588133 - RNA, 22 nt, Artificial Sequence
  Synthetic
caagggaaucuuauuuuugagg

SEQ ID NO: 588134 - RNA, 23 nt, Artificial Sequence
  Synthetic
acaagggaaucuuauuuuugagg

SEQ ID NO: 588135 - RNA, 24 nt, Artificial Sequence
  Synthetic
aacaagggaaucuuauuuuugagg

SEQ ID NO: 588136 - RNA, 18 nt, Artificial Sequence
  Synthetic
aaaaguaugaaaaauagg

SEQ ID NO: 588137 - RNA, 19 nt, Artificial Sequence
  Synthetic
uaaaaguaugaaaaauagg

SEQ ID NO: 588138 - RNA, 20 nt, Artificial Sequence
  Synthetic
auaaaaguaugaaaaauagg

SEQ ID NO: 588139 - RNA, 21 nt, Artificial Sequence
  Synthetic
uauaaaaguaugaaaaauagg

SEQ ID NO: 588140 - RNA, 22 nt, Artificial Sequence
  Synthetic
guauaaaaguaugaaaaauagg

SEQ ID NO: 588141 - RNA, 23 nt, Artificial Sequence
  Synthetic
aguauaaaaguaugaaaaauagg

SEQ ID NO: 588142 - RNA, 24 nt, Artificial Sequence
  Synthetic
caguauaaaaguaugaaaaauagg

SEQ ID NO: 588143 - RNA, 18 nt, Artificial Sequence
  Synthetic
agaagcaaggaaaauagg

SEQ ID NO: 588144 - RNA, 19 nt, Artificial Sequence
  Synthetic
aagaagcaaggaaaauagg

SEQ ID NO: 588145 - RNA, 20 nt, Artificial Sequence
  Synthetic
uaagaagcaaggaaaauagg

SEQ ID NO: 588146 - RNA, 21 nt, Artificial Sequence
  Synthetic
uuaagaagcaaggaaaauagg

SEQ ID NO: 588147 - RNA, 22 nt, Artificial Sequence
  Synthetic
auuaagaagcaaggaaaauagg

SEQ ID NO: 588148 - RNA, 23 nt, Artificial Sequence
  Synthetic
uauuaagaagcaaggaaaauagg

SEQ ID NO: 588149 - RNA, 24 nt, Artificial Sequence
  Synthetic
uuauuaagaagcaaggaaaauagg

SEQ ID NO: 588150 - RNA, 18 nt, Artificial Sequence
  Synthetic
uuuauuucugaaaauagg

SEQ ID NO: 588151 - RNA, 19 nt, Artificial Sequence
  Synthetic
cuuuauuucugaaaauagg

SEQ ID NO: 588152 - RNA, 20 nt, Artificial Sequence
  Synthetic
ucuuuauuucugaaaauagg

SEQ ID NO: 588153 - RNA, 21 nt, Artificial Sequence
  Synthetic
cucuuuauuucugaaaauagg

SEQ ID NO: 588154 - RNA, 22 nt, Artificial Sequence
  Synthetic
acucuuuauuucugaaaauagg

SEQ ID NO: 588155 - RNA, 23 nt, Artificial Sequence
  Synthetic
aacucuuuauuucugaaaauagg

SEQ ID NO: 588156 - RNA, 24 nt, Artificial Sequence
  Synthetic
uaacucuuuauuucugaaaauagg

SEQ ID NO: 588157 - RNA, 18 nt, Artificial Sequence
  Synthetic
uuucucagaacaaauagg

SEQ ID NO: 588158 - RNA, 19 nt, Artificial Sequence
  Synthetic
cuuucucagaacaaauagg

SEQ ID NO: 588159 - RNA, 20 nt, Artificial Sequence
  Synthetic
ucuuucucagaacaaauagg

SEQ ID NO: 588160 - RNA, 21 nt, Artificial Sequence
  Synthetic
gucuuucucagaacaaauagg

SEQ ID NO: 588161 - RNA, 22 nt, Artificial Sequence
  Synthetic
ugucuuucucagaacaaauagg

SEQ ID NO: 588162 - RNA, 23 nt, Artificial Sequence
  Synthetic
uugucuuucucagaacaaauagg

SEQ ID NO: 588163 - RNA, 24 nt, Artificial Sequence
  Synthetic
guugucuuucucagaacaaauagg

SEQ ID NO: 588164 - RNA, 18 nt, Artificial Sequence
  Synthetic
agaaaaggaacaaauagg

SEQ ID NO: 588165 - RNA, 19 nt, Artificial Sequence
  Synthetic
uagaaaaggaacaaauagg

SEQ ID NO: 588166 - RNA, 20 nt, Artificial Sequence
  Synthetic
auagaaaaggaacaaauagg

SEQ ID NO: 588167 - RNA, 21 nt, Artificial Sequence
  Synthetic
gauagaaaaggaacaaauagg

SEQ ID NO: 588168 - RNA, 22 nt, Artificial Sequence
  Synthetic
agauagaaaaggaacaaauagg

SEQ ID NO: 588169 - RNA, 23 nt, Artificial Sequence
  Synthetic
gagauagaaaaggaacaaauagg

SEQ ID NO: 588170 - RNA, 24 nt, Artificial Sequence
  Synthetic
agagauagaaaaggaacaaauagg

SEQ ID NO: 588171 - RNA, 18 nt, Artificial Sequence
  Synthetic
gaaagauauucaaauagg

SEQ ID NO: 588172 - RNA, 19 nt, Artificial Sequence
  Synthetic
agaaagauauucaaauagg

SEQ ID NO: 588173 - RNA, 20 nt, Artificial Sequence
  Synthetic
aagaaagauauucaaauagg

SEQ ID NO: 588174 - RNA, 21 nt, Artificial Sequence
  Synthetic
aaagaaagauauucaaauagg

SEQ ID NO: 588175 - RNA, 22 nt, Artificial Sequence
  Synthetic
gaaagaaagauauucaaauagg

SEQ ID NO: 588176 - RNA, 23 nt, Artificial Sequence
  Synthetic
agaaagaaagauauucaaauagg

SEQ ID NO: 588177 - RNA, 24 nt, Artificial Sequence
  Synthetic
aagaaagaaagauauucaaauagg

SEQ ID NO: 588178 - RNA, 18 nt, Artificial Sequence
  Synthetic
ugcaucgacugaaauagg

SEQ ID NO: 588179 - RNA, 19 nt, Artificial Sequence
  Synthetic
augcaucgacugaaauagg

SEQ ID NO: 588180 - RNA, 20 nt, Artificial Sequence
  Synthetic
aaugcaucgacugaaauagg

SEQ ID NO: 588181 - RNA, 21 nt, Artificial Sequence
  Synthetic
aaaugcaucgacugaaauagg

SEQ ID NO: 588182 - RNA, 22 nt, Artificial Sequence
  Synthetic
caaaugcaucgacugaaauagg

SEQ ID NO: 588183 - RNA, 23 nt, Artificial Sequence
  Synthetic
acaaaugcaucgacugaaauagg

SEQ ID NO: 588184 - RNA, 24 nt, Artificial Sequence
  Synthetic
uacaaaugcaucgacugaaauagg

SEQ ID NO: 588185 - RNA, 18 nt, Artificial Sequence
  Synthetic
gcaagaacacacaauagg

SEQ ID NO: 588186 - RNA, 19 nt, Artificial Sequence
  Synthetic
agcaagaacacacaauagg

SEQ ID NO: 588187 - RNA, 20 nt, Artificial Sequence
  Synthetic
uagcaagaacacacaauagg

SEQ ID NO: 588188 - RNA, 21 nt, Artificial Sequence
  Synthetic
guagcaagaacacacaauagg

SEQ ID NO: 588189 - RNA, 22 nt, Artificial Sequence
  Synthetic
gguagcaagaacacacaauagg

SEQ ID NO: 588190 - RNA, 23 nt, Artificial Sequence
  Synthetic
agguagcaagaacacacaauagg

SEQ ID NO: 588191 - RNA, 24 nt, Artificial Sequence
  Synthetic
aagguagcaagaacacacaauagg

SEQ ID NO: 588192 - RNA, 18 nt, Artificial Sequence
  Synthetic
cuucucuuauacaauagg

SEQ ID NO: 588193 - RNA, 19 nt, Artificial Sequence
  Synthetic
ucuucucuuauacaauagg

SEQ ID NO: 588194 - RNA, 20 nt, Artificial Sequence
  Synthetic
uucuucucuuauacaauagg

SEQ ID NO: 588195 - RNA, 21 nt, Artificial Sequence
  Synthetic
uuucuucucuuauacaauagg

SEQ ID NO: 588196 - RNA, 22 nt, Artificial Sequence
  Synthetic
uuuucuucucuuauacaauagg

SEQ ID NO: 588197 - RNA, 23 nt, Artificial Sequence
  Synthetic
cuuuucuucucuuauacaauagg

SEQ ID NO: 588198 - RNA, 24 nt, Artificial Sequence
  Synthetic
gcuuuucuucucuuauacaauagg

SEQ ID NO: 588199 - RNA, 18 nt, Artificial Sequence
  Synthetic
ggcuucuuaggcaauagg

SEQ ID NO: 588200 - RNA, 19 nt, Artificial Sequence
  Synthetic
gggcuucuuaggcaauagg

SEQ ID NO: 588201 - RNA, 20 nt, Artificial Sequence
  Synthetic
ugggcuucuuaggcaauagg

SEQ ID NO: 588202 - RNA, 21 nt, Artificial Sequence
  Synthetic
uugggcuucuuaggcaauagg

SEQ ID NO: 588203 - RNA, 22 nt, Artificial Sequence
  Synthetic
guugggcuucuuaggcaauagg

SEQ ID NO: 588204 - RNA, 23 nt, Artificial Sequence
  Synthetic
uguugggcuucuuaggcaauagg

SEQ ID NO: 588205 - RNA, 24 nt, Artificial Sequence
  Synthetic
uuguugggcuucuuaggcaauagg

SEQ ID NO: 588206 - RNA, 18 nt, Artificial Sequence
  Synthetic
aggagucaccucaauagg

SEQ ID NO: 588207 - RNA, 19 nt, Artificial Sequence
  Synthetic
uaggagucaccucaauagg

SEQ ID NO: 588208 - RNA, 20 nt, Artificial Sequence
  Synthetic
cuaggagucaccucaauagg

SEQ ID NO: 588209 - RNA, 21 nt, Artificial Sequence
  Synthetic
ucuaggagucaccucaauagg

SEQ ID NO: 588210 - RNA, 22 nt, Artificial Sequence
  Synthetic
gucuaggagucaccucaauagg

SEQ ID NO: 588211 - RNA, 23 nt, Artificial Sequence
  Synthetic
ugucuaggagucaccucaauagg

SEQ ID NO: 588212 - RNA, 24 nt, Artificial Sequence
  Synthetic
uugucuaggagucaccucaauagg

SEQ ID NO: 588213 - RNA, 18 nt, Artificial Sequence
  Synthetic
agggucaggaagaauagg

SEQ ID NO: 588214 - RNA, 19 nt, Artificial Sequence
  Synthetic
gagggucaggaagaauagg

SEQ ID NO: 588215 - RNA, 20 nt, Artificial Sequence
  Synthetic
ggagggucaggaagaauagg

SEQ ID NO: 588216 - RNA, 21 nt, Artificial Sequence
  Synthetic
aggagggucaggaagaauagg

SEQ ID NO: 588217 - RNA, 22 nt, Artificial Sequence
  Synthetic
aaggagggucaggaagaauagg

SEQ ID NO: 588218 - RNA, 23 nt, Artificial Sequence
  Synthetic
aaaggagggucaggaagaauagg

SEQ ID NO: 588219 - RNA, 24 nt, Artificial Sequence
  Synthetic
caaaggagggucaggaagaauagg

SEQ ID NO: 588220 - RNA, 18 nt, Artificial Sequence
  Synthetic
gguguaggauugaauagg

SEQ ID NO: 588221 - RNA, 19 nt, Artificial Sequence
  Synthetic
cgguguaggauugaauagg

SEQ ID NO: 588222 - RNA, 20 nt, Artificial Sequence
  Synthetic
gcgguguaggauugaauagg

SEQ ID NO: 588223 - RNA, 21 nt, Artificial Sequence
  Synthetic
ugcgguguaggauugaauagg

SEQ ID NO: 588224 - RNA, 22 nt, Artificial Sequence
  Synthetic
cugcgguguaggauugaauagg

SEQ ID NO: 588225 - RNA, 23 nt, Artificial Sequence
  Synthetic
gcugcgguguaggauugaauagg

SEQ ID NO: 588226 - RNA, 24 nt, Artificial Sequence
  Synthetic
ugcugcgguguaggauugaauagg

SEQ ID NO: 588227 - RNA, 18 nt, Artificial Sequence
  Synthetic
aaggcaaucuugaauagg

SEQ ID NO: 588228 - RNA, 19 nt, Artificial Sequence
  Synthetic
caaggcaaucuugaauagg

SEQ ID NO: 588229 - RNA, 20 nt, Artificial Sequence
  Synthetic
ccaaggcaaucuugaauagg

SEQ ID NO: 588230 - RNA, 21 nt, Artificial Sequence
  Synthetic
gccaaggcaaucuugaauagg

SEQ ID NO: 588231 - RNA, 22 nt, Artificial Sequence
  Synthetic
agccaaggcaaucuugaauagg

SEQ ID NO: 588232 - RNA, 23 nt, Artificial Sequence
  Synthetic
uagccaaggcaaucuugaauagg

SEQ ID NO: 588233 - RNA, 24 nt, Artificial Sequence
  Synthetic
guagccaaggcaaucuugaauagg

SEQ ID NO: 588234 - RNA, 18 nt, Artificial Sequence
  Synthetic
aauaugaaggauaauagg

SEQ ID NO: 588235 - RNA, 19 nt, Artificial Sequence
  Synthetic
uaauaugaaggauaauagg

SEQ ID NO: 588236 - RNA, 20 nt, Artificial Sequence
  Synthetic
cuaauaugaaggauaauagg

SEQ ID NO: 588237 - RNA, 21 nt, Artificial Sequence
  Synthetic
ucuaauaugaaggauaauagg

SEQ ID NO: 588238 - RNA, 22 nt, Artificial Sequence
  Synthetic
aucuaauaugaaggauaauagg

SEQ ID NO: 588239 - RNA, 23 nt, Artificial Sequence
  Synthetic
caucuaauaugaaggauaauagg

SEQ ID NO: 588240 - RNA, 24 nt, Artificial Sequence
  Synthetic
acaucuaauaugaaggauaauagg

SEQ ID NO: 588241 - RNA, 18 nt, Artificial Sequence
  Synthetic
uuagaacuggguaauagg

SEQ ID NO: 588242 - RNA, 19 nt, Artificial Sequence
  Synthetic
uuuagaacuggguaauagg

SEQ ID NO: 588243 - RNA, 20 nt, Artificial Sequence
  Synthetic
cuuuagaacuggguaauagg

SEQ ID NO: 588244 - RNA, 21 nt, Artificial Sequence
  Synthetic
acuuuagaacuggguaauagg

SEQ ID NO: 588245 - RNA, 22 nt, Artificial Sequence
  Synthetic
aacuuuagaacuggguaauagg

SEQ ID NO: 588246 - RNA, 23 nt, Artificial Sequence
  Synthetic
caacuuuagaacuggguaauagg

SEQ ID NO: 588247 - RNA, 24 nt, Artificial Sequence
  Synthetic
gcaacuuuagaacuggguaauagg

SEQ ID NO: 588248 - RNA, 18 nt, Artificial Sequence
  Synthetic
gguuugaaccuuaauagg

SEQ ID NO: 588249 - RNA, 19 nt, Artificial Sequence
  Synthetic
ggguuugaaccuuaauagg

SEQ ID NO: 588250 - RNA, 20 nt, Artificial Sequence
  Synthetic
uggguuugaaccuuaauagg

SEQ ID NO: 588251 - RNA, 21 nt, Artificial Sequence
  Synthetic
guggguuugaaccuuaauagg

SEQ ID NO: 588252 - RNA, 22 nt, Artificial Sequence
  Synthetic
aguggguuugaaccuuaauagg

SEQ ID NO: 588253 - RNA, 23 nt, Artificial Sequence
  Synthetic
aaguggguuugaaccuuaauagg

SEQ ID NO: 588254 - RNA, 24 nt, Artificial Sequence
  Synthetic
aaaguggguuugaaccuuaauagg

SEQ ID NO: 588255 - RNA, 18 nt, Artificial Sequence
  Synthetic
caaaggggucaacauagg

SEQ ID NO: 588256 - RNA, 19 nt, Artificial Sequence
  Synthetic
gcaaaggggucaacauagg

SEQ ID NO: 588257 - RNA, 20 nt, Artificial Sequence
  Synthetic
agcaaaggggucaacauagg

SEQ ID NO: 588258 - RNA, 21 nt, Artificial Sequence
  Synthetic
cagcaaaggggucaacauagg

SEQ ID NO: 588259 - RNA, 22 nt, Artificial Sequence
  Synthetic
gcagcaaaggggucaacauagg

SEQ ID NO: 588260 - RNA, 23 nt, Artificial Sequence
  Synthetic
agcagcaaaggggucaacauagg

SEQ ID NO: 588261 - RNA, 24 nt, Artificial Sequence
  Synthetic
cagcagcaaaggggucaacauagg

SEQ ID NO: 588262 - RNA, 18 nt, Artificial Sequence
  Synthetic
gccauggccucacauagg

SEQ ID NO: 588263 - RNA, 19 nt, Artificial Sequence
  Synthetic
agccauggccucacauagg

SEQ ID NO: 588264 - RNA, 20 nt, Artificial Sequence
  Synthetic
cagccauggccucacauagg

SEQ ID NO: 588265 - RNA, 21 nt, Artificial Sequence
  Synthetic
ccagccauggccucacauagg

SEQ ID NO: 588266 - RNA, 22 nt, Artificial Sequence
  Synthetic
uccagccauggccucacauagg

SEQ ID NO: 588267 - RNA, 23 nt, Artificial Sequence
  Synthetic
cuccagccauggccucacauagg

SEQ ID NO: 588268 - RNA, 24 nt, Artificial Sequence
  Synthetic
gcuccagccauggccucacauagg

SEQ ID NO: 588269 - RNA, 18 nt, Artificial Sequence
  Synthetic
ucgagaagaauccauagg

SEQ ID NO: 588270 - RNA, 19 nt, Artificial Sequence
  Synthetic
uucgagaagaauccauagg

SEQ ID NO: 588271 - RNA, 20 nt, Artificial Sequence
  Synthetic
uuucgagaagaauccauagg

SEQ ID NO: 588272 - RNA, 21 nt, Artificial Sequence
  Synthetic
uuuucgagaagaauccauagg

SEQ ID NO: 588273 - RNA, 22 nt, Artificial Sequence
  Synthetic
uuuuucgagaagaauccauagg

SEQ ID NO: 588274 - RNA, 23 nt, Artificial Sequence
  Synthetic
guuuuucgagaagaauccauagg

SEQ ID NO: 588275 - RNA, 24 nt, Artificial Sequence
  Synthetic
aguuuuucgagaagaauccauagg

SEQ ID NO: 588276 - RNA, 18 nt, Artificial Sequence
  Synthetic
acugcucuacuccauagg

SEQ ID NO: 588277 - RNA, 19 nt, Artificial Sequence
  Synthetic
aacugcucuacuccauagg

SEQ ID NO: 588278 - RNA, 20 nt, Artificial Sequence
  Synthetic
caacugcucuacuccauagg

SEQ ID NO: 588279 - RNA, 21 nt, Artificial Sequence
  Synthetic
acaacugcucuacuccauagg

SEQ ID NO: 588280 - RNA, 22 nt, Artificial Sequence
  Synthetic
aacaacugcucuacuccauagg

SEQ ID NO: 588281 - RNA, 23 nt, Artificial Sequence
  Synthetic
aaacaacugcucuacuccauagg

SEQ ID NO: 588282 - RNA, 24 nt, Artificial Sequence
  Synthetic
aaaacaacugcucuacuccauagg

SEQ ID NO: 588283 - RNA, 18 nt, Artificial Sequence
  Synthetic
cauguccucacucauagg

SEQ ID NO: 588284 - RNA, 19 nt, Artificial Sequence
  Synthetic
gcauguccucacucauagg

SEQ ID NO: 588285 - RNA, 20 nt, Artificial Sequence
  Synthetic
cgcauguccucacucauagg

SEQ ID NO: 588286 - RNA, 21 nt, Artificial Sequence
  Synthetic
ccgcauguccucacucauagg

SEQ ID NO: 588287 - RNA, 22 nt, Artificial Sequence
  Synthetic
accgcauguccucacucauagg

SEQ ID NO: 588288 - RNA, 23 nt, Artificial Sequence
  Synthetic
caccgcauguccucacucauagg

SEQ ID NO: 588289 - RNA, 24 nt, Artificial Sequence
  Synthetic
acaccgcauguccucacucauagg

SEQ ID NO: 588290 - RNA, 21 nt, Artificial Sequence
  Synthetic
ccgcauguucucacucauagg

SEQ ID NO: 588291 - RNA, 22 nt, Artificial Sequence
  Synthetic
accgcauguucucacucauagg

SEQ ID NO: 588292 - RNA, 23 nt, Artificial Sequence
  Synthetic
caccgcauguucucacucauagg

SEQ ID NO: 588293 - RNA, 24 nt, Artificial Sequence
  Synthetic
acaccgcauguucucacucauagg

SEQ ID NO: 588294 - RNA, 18 nt, Artificial Sequence
  Synthetic
cauguucucgcucauagg

SEQ ID NO: 588295 - RNA, 19 nt, Artificial Sequence
  Synthetic
gcauguucucgcucauagg

SEQ ID NO: 588296 - RNA, 20 nt, Artificial Sequence
  Synthetic
cgcauguucucgcucauagg

SEQ ID NO: 588297 - RNA, 21 nt, Artificial Sequence
  Synthetic
ccgcauguucucgcucauagg

SEQ ID NO: 588298 - RNA, 22 nt, Artificial Sequence
  Synthetic
accgcauguucucgcucauagg

SEQ ID NO: 588299 - RNA, 23 nt, Artificial Sequence
  Synthetic
caccgcauguucucgcucauagg

SEQ ID NO: 588300 - RNA, 24 nt, Artificial Sequence
  Synthetic
acaccgcauguucucgcucauagg

SEQ ID NO: 588301 - RNA, 18 nt, Artificial Sequence
  Synthetic
guuagaugaggucauagg

SEQ ID NO: 588302 - RNA, 19 nt, Artificial Sequence
  Synthetic
gguuagaugaggucauagg

SEQ ID NO: 588303 - RNA, 20 nt, Artificial Sequence
  Synthetic
ggguuagaugaggucauagg

SEQ ID NO: 588304 - RNA, 21 nt, Artificial Sequence
  Synthetic
aggguuagaugaggucauagg

SEQ ID NO: 588305 - RNA, 22 nt, Artificial Sequence
  Synthetic
aaggguuagaugaggucauagg

SEQ ID NO: 588306 - RNA, 23 nt, Artificial Sequence
  Synthetic
uaaggguuagaugaggucauagg

SEQ ID NO: 588307 - RNA, 24 nt, Artificial Sequence
  Synthetic
auaaggguuagaugaggucauagg

SEQ ID NO: 588308 - RNA, 18 nt, Artificial Sequence
  Synthetic
aggaaugggagagauagg

SEQ ID NO: 588309 - RNA, 19 nt, Artificial Sequence
  Synthetic
uaggaaugggagagauagg

SEQ ID NO: 588310 - RNA, 20 nt, Artificial Sequence
  Synthetic
guaggaaugggagagauagg

SEQ ID NO: 588311 - RNA, 21 nt, Artificial Sequence
  Synthetic
aguaggaaugggagagauagg

SEQ ID NO: 588312 - RNA, 22 nt, Artificial Sequence
  Synthetic
aaguaggaaugggagagauagg

SEQ ID NO: 588313 - RNA, 23 nt, Artificial Sequence
  Synthetic
aaaguaggaaugggagagauagg

SEQ ID NO: 588314 - RNA, 24 nt, Artificial Sequence
  Synthetic
uaaaguaggaaugggagagauagg

SEQ ID NO: 588315 - RNA, 18 nt, Artificial Sequence
  Synthetic
gagaaggagaacgauagg

SEQ ID NO: 588316 - RNA, 19 nt, Artificial Sequence
  Synthetic
ggagaaggagaacgauagg

SEQ ID NO: 588317 - RNA, 20 nt, Artificial Sequence
  Synthetic
aggagaaggagaacgauagg

SEQ ID NO: 588318 - RNA, 21 nt, Artificial Sequence
  Synthetic
caggagaaggagaacgauagg

SEQ ID NO: 588319 - RNA, 22 nt, Artificial Sequence
  Synthetic
acaggagaaggagaacgauagg

SEQ ID NO: 588320 - RNA, 23 nt, Artificial Sequence
  Synthetic
aacaggagaaggagaacgauagg

SEQ ID NO: 588321 - RNA, 24 nt, Artificial Sequence
  Synthetic
aaacaggagaaggagaacgauagg

SEQ ID NO: 588322 - RNA, 18 nt, Artificial Sequence
  Synthetic
auaaagagccaggauagg

SEQ ID NO: 588323 - RNA, 19 nt, Artificial Sequence
  Synthetic
aauaaagagccaggauagg

SEQ ID NO: 588324 - RNA, 20 nt, Artificial Sequence
  Synthetic
aaauaaagagccaggauagg

SEQ ID NO: 588325 - RNA, 21 nt, Artificial Sequence
  Synthetic
uaaauaaagagccaggauagg

SEQ ID NO: 588326 - RNA, 22 nt, Artificial Sequence
  Synthetic
guaaauaaagagccaggauagg

SEQ ID NO: 588327 - RNA, 23 nt, Artificial Sequence
  Synthetic
uguaaauaaagagccaggauagg

SEQ ID NO: 588328 - RNA, 24 nt, Artificial Sequence
  Synthetic
auguaaauaaagagccaggauagg

SEQ ID NO: 588329 - RNA, 18 nt, Artificial Sequence
  Synthetic
guggagguaggggauagg

SEQ ID NO: 588330 - RNA, 19 nt, Artificial Sequence
  Synthetic
uguggagguaggggauagg

SEQ ID NO: 588331 - RNA, 20 nt, Artificial Sequence
  Synthetic
guguggagguaggggauagg

SEQ ID NO: 588332 - RNA, 21 nt, Artificial Sequence
  Synthetic
aguguggagguaggggauagg

SEQ ID NO: 588333 - RNA, 22 nt, Artificial Sequence
  Synthetic
uaguguggagguaggggauagg

SEQ ID NO: 588334 - RNA, 23 nt, Artificial Sequence
  Synthetic
guaguguggagguaggggauagg

SEQ ID NO: 588335 - RNA, 24 nt, Artificial Sequence
  Synthetic
gguaguguggagguaggggauagg

SEQ ID NO: 588336 - RNA, 18 nt, Artificial Sequence
  Synthetic
ccaggggcuggggauagg

SEQ ID NO: 588337 - RNA, 19 nt, Artificial Sequence
  Synthetic
gccaggggcuggggauagg

SEQ ID NO: 588338 - RNA, 20 nt, Artificial Sequence
  Synthetic
ugccaggggcuggggauagg

SEQ ID NO: 588339 - RNA, 21 nt, Artificial Sequence
  Synthetic
uugccaggggcuggggauagg

SEQ ID NO: 588340 - RNA, 22 nt, Artificial Sequence
  Synthetic
guugccaggggcuggggauagg

SEQ ID NO: 588341 - RNA, 23 nt, Artificial Sequence
  Synthetic
gguugccaggggcuggggauagg

SEQ ID NO: 588342 - RNA, 24 nt, Artificial Sequence
  Synthetic
ugguugccaggggcuggggauagg

SEQ ID NO: 588343 - RNA, 18 nt, Artificial Sequence
  Synthetic
ucagauuucuuggauagg

SEQ ID NO: 588344 - RNA, 19 nt, Artificial Sequence
  Synthetic
aucagauuucuuggauagg

SEQ ID NO: 588345 - RNA, 20 nt, Artificial Sequence
  Synthetic
aaucagauuucuuggauagg

SEQ ID NO: 588346 - RNA, 21 nt, Artificial Sequence
  Synthetic
caaucagauuucuuggauagg

SEQ ID NO: 588347 - RNA, 22 nt, Artificial Sequence
  Synthetic
gcaaucagauuucuuggauagg

SEQ ID NO: 588348 - RNA, 23 nt, Artificial Sequence
  Synthetic
ggcaaucagauuucuuggauagg

SEQ ID NO: 588349 - RNA, 24 nt, Artificial Sequence
  Synthetic
uggcaaucagauuucuuggauagg

SEQ ID NO: 588350 - RNA, 18 nt, Artificial Sequence
  Synthetic
aguaacagaagugauagg

SEQ ID NO: 588351 - RNA, 19 nt, Artificial Sequence
  Synthetic
gaguaacagaagugauagg

SEQ ID NO: 588352 - RNA, 20 nt, Artificial Sequence
  Synthetic
ugaguaacagaagugauagg

SEQ ID NO: 588353 - RNA, 21 nt, Artificial Sequence
  Synthetic
gugaguaacagaagugauagg

SEQ ID NO: 588354 - RNA, 22 nt, Artificial Sequence
  Synthetic
ugugaguaacagaagugauagg

SEQ ID NO: 588355 - RNA, 23 nt, Artificial Sequence
  Synthetic
gugugaguaacagaagugauagg

SEQ ID NO: 588356 - RNA, 24 nt, Artificial Sequence
  Synthetic
agugugaguaacagaagugauagg

SEQ ID NO: 588357 - RNA, 18 nt, Artificial Sequence
  Synthetic
aaaguaaauauugauagg

SEQ ID NO: 588358 - RNA, 19 nt, Artificial Sequence
  Synthetic
caaaguaaauauugauagg

SEQ ID NO: 588359 - RNA, 20 nt, Artificial Sequence
  Synthetic
ucaaaguaaauauugauagg

SEQ ID NO: 588360 - RNA, 21 nt, Artificial Sequence
  Synthetic
uucaaaguaaauauugauagg

SEQ ID NO: 588361 - RNA, 22 nt, Artificial Sequence
  Synthetic
auucaaaguaaauauugauagg

SEQ ID NO: 588362 - RNA, 23 nt, Artificial Sequence
  Synthetic
cauucaaaguaaauauugauagg

SEQ ID NO: 588363 - RNA, 24 nt, Artificial Sequence
  Synthetic
acauucaaaguaaauauugauagg

SEQ ID NO: 588364 - RNA, 18 nt, Artificial Sequence
  Synthetic
aaucuagaaaaauauagg

SEQ ID NO: 588365 - RNA, 19 nt, Artificial Sequence
  Synthetic
gaaucuagaaaaauauagg

SEQ ID NO: 588366 - RNA, 20 nt, Artificial Sequence
  Synthetic
agaaucuagaaaaauauagg

SEQ ID NO: 588367 - RNA, 21 nt, Artificial Sequence
  Synthetic
aagaaucuagaaaaauauagg

SEQ ID NO: 588368 - RNA, 22 nt, Artificial Sequence
  Synthetic
gaagaaucuagaaaaauauagg

SEQ ID NO: 588369 - RNA, 23 nt, Artificial Sequence
  Synthetic
agaagaaucuagaaaaauauagg

SEQ ID NO: 588370 - RNA, 24 nt, Artificial Sequence
  Synthetic
gagaagaaucuagaaaaauauagg

SEQ ID NO: 588371 - RNA, 18 nt, Artificial Sequence
  Synthetic
agagaaggagaauauagg

SEQ ID NO: 588372 - RNA, 19 nt, Artificial Sequence
  Synthetic
uagagaaggagaauauagg

SEQ ID NO: 588373 - RNA, 20 nt, Artificial Sequence
  Synthetic
uuagagaaggagaauauagg

SEQ ID NO: 588374 - RNA, 21 nt, Artificial Sequence
  Synthetic
auuagagaaggagaauauagg

SEQ ID NO: 588375 - RNA, 22 nt, Artificial Sequence
  Synthetic
aauuagagaaggagaauauagg

SEQ ID NO: 588376 - RNA, 23 nt, Artificial Sequence
  Synthetic
caauuagagaaggagaauauagg

SEQ ID NO: 588377 - RNA, 24 nt, Artificial Sequence
  Synthetic
acaauuagagaaggagaauauagg

SEQ ID NO: 588378 - RNA, 18 nt, Artificial Sequence
  Synthetic
aagauacaaagauauagg

SEQ ID NO: 588379 - RNA, 19 nt, Artificial Sequence
  Synthetic
aaagauacaaagauauagg

SEQ ID NO: 588380 - RNA, 20 nt, Artificial Sequence
  Synthetic
aaaagauacaaagauauagg

SEQ ID NO: 588381 - RNA, 21 nt, Artificial Sequence
  Synthetic
aaaaagauacaaagauauagg

SEQ ID NO: 588382 - RNA, 22 nt, Artificial Sequence
  Synthetic
gaaaaagauacaaagauauagg

SEQ ID NO: 588383 - RNA, 23 nt, Artificial Sequence
  Synthetic
ggaaaaagauacaaagauauagg

SEQ ID NO: 588384 - RNA, 24 nt, Artificial Sequence
  Synthetic
uggaaaaagauacaaagauauagg

SEQ ID NO: 588385 - RNA, 18 nt, Artificial Sequence
  Synthetic
uuuaacacaacguauagg

SEQ ID NO: 588386 - RNA, 19 nt, Artificial Sequence
  Synthetic
auuuaacacaacguauagg

SEQ ID NO: 588387 - RNA, 20 nt, Artificial Sequence
  Synthetic
aauuuaacacaacguauagg

SEQ ID NO: 588388 - RNA, 21 nt, Artificial Sequence
  Synthetic
uaauuuaacacaacguauagg

SEQ ID NO: 588389 - RNA, 22 nt, Artificial Sequence
  Synthetic
uuaauuuaacacaacguauagg

SEQ ID NO: 588390 - RNA, 23 nt, Artificial Sequence
  Synthetic
auuaauuuaacacaacguauagg

SEQ ID NO: 588391 - RNA, 24 nt, Artificial Sequence
  Synthetic
uauuaauuuaacacaacguauagg

SEQ ID NO: 588392 - RNA, 18 nt, Artificial Sequence
  Synthetic
augauuaaguauuauagg

SEQ ID NO: 588393 - RNA, 19 nt, Artificial Sequence
  Synthetic
uaugauuaaguauuauagg

SEQ ID NO: 588394 - RNA, 20 nt, Artificial Sequence
  Synthetic
uuaugauuaaguauuauagg

SEQ ID NO: 588395 - RNA, 21 nt, Artificial Sequence
  Synthetic
auuaugauuaaguauuauagg

SEQ ID NO: 588396 - RNA, 22 nt, Artificial Sequence
  Synthetic
gauuaugauuaaguauuauagg

SEQ ID NO: 588397 - RNA, 23 nt, Artificial Sequence
  Synthetic
ggauuaugauuaaguauuauagg

SEQ ID NO: 588398 - RNA, 24 nt, Artificial Sequence
  Synthetic
aggauuaugauuaaguauuauagg

SEQ ID NO: 588399 - RNA, 18 nt, Artificial Sequence
  Synthetic
gguaauagcauuuauagg

SEQ ID NO: 588400 - RNA, 19 nt, Artificial Sequence
  Synthetic
agguaauagcauuuauagg

SEQ ID NO: 588401 - RNA, 20 nt, Artificial Sequence
  Synthetic
cagguaauagcauuuauagg

SEQ ID NO: 588402 - RNA, 21 nt, Artificial Sequence
  Synthetic
ccagguaauagcauuuauagg

SEQ ID NO: 588403 - RNA, 22 nt, Artificial Sequence
  Synthetic
cccagguaauagcauuuauagg

SEQ ID NO: 588404 - RNA, 23 nt, Artificial Sequence
  Synthetic
ucccagguaauagcauuuauagg

SEQ ID NO: 588405 - RNA, 24 nt, Artificial Sequence
  Synthetic
uucccagguaauagcauuuauagg

SEQ ID NO: 588406 - RNA, 18 nt, Artificial Sequence
  Synthetic
uugcuuuucuuuuauagg

SEQ ID NO: 588407 - RNA, 19 nt, Artificial Sequence
  Synthetic
uuugcuuuucuuuuauagg

SEQ ID NO: 588408 - RNA, 20 nt, Artificial Sequence
  Synthetic
uuuugcuuuucuuuuauagg

SEQ ID NO: 588409 - RNA, 21 nt, Artificial Sequence
  Synthetic
uuuuugcuuuucuuuuauagg

SEQ ID NO: 588410 - RNA, 22 nt, Artificial Sequence
  Synthetic
auuuuugcuuuucuuuuauagg

SEQ ID NO: 588411 - RNA, 23 nt, Artificial Sequence
  Synthetic
uauuuuugcuuuucuuuuauagg

SEQ ID NO: 588412 - RNA, 24 nt, Artificial Sequence
  Synthetic
auauuuuugcuuuucuuuuauagg

SEQ ID NO: 588413 - RNA, 18 nt, Artificial Sequence
  Synthetic
aagcaaaacaaaacuagg

SEQ ID NO: 588414 - RNA, 19 nt, Artificial Sequence
  Synthetic
uaagcaaaacaaaacuagg

SEQ ID NO: 588415 - RNA, 20 nt, Artificial Sequence
  Synthetic
auaagcaaaacaaaacuagg

SEQ ID NO: 588416 - RNA, 21 nt, Artificial Sequence
  Synthetic
cauaagcaaaacaaaacuagg

SEQ ID NO: 588417 - RNA, 22 nt, Artificial Sequence
  Synthetic
ucauaagcaaaacaaaacuagg

SEQ ID NO: 588418 - RNA, 23 nt, Artificial Sequence
  Synthetic
uucauaagcaaaacaaaacuagg

SEQ ID NO: 588419 - RNA, 24 nt, Artificial Sequence
  Synthetic
uuucauaagcaaaacaaaacuagg

SEQ ID NO: 588420 - RNA, 18 nt, Artificial Sequence
  Synthetic
ugucaucuguaaacuagg

SEQ ID NO: 588421 - RNA, 19 nt, Artificial Sequence
  Synthetic
uugucaucuguaaacuagg

SEQ ID NO: 588422 - RNA, 20 nt, Artificial Sequence
  Synthetic
uuugucaucuguaaacuagg

SEQ ID NO: 588423 - RNA, 21 nt, Artificial Sequence
  Synthetic
uuuugucaucuguaaacuagg

SEQ ID NO: 588424 - RNA, 22 nt, Artificial Sequence
  Synthetic
guuuugucaucuguaaacuagg

SEQ ID NO: 588425 - RNA, 23 nt, Artificial Sequence
  Synthetic
aguuuugucaucuguaaacuagg

SEQ ID NO: 588426 - RNA, 24 nt, Artificial Sequence
  Synthetic
caguuuugucaucuguaaacuagg

SEQ ID NO: 588427 - RNA, 18 nt, Artificial Sequence
  Synthetic
ucaauaugaaacacuagg

SEQ ID NO: 588428 - RNA, 19 nt, Artificial Sequence
  Synthetic
uucaauaugaaacacuagg

SEQ ID NO: 588429 - RNA, 20 nt, Artificial Sequence
  Synthetic
uuucaauaugaaacacuagg

SEQ ID NO: 588430 - RNA, 21 nt, Artificial Sequence
  Synthetic
uuuucaauaugaaacacuagg

SEQ ID NO: 588431 - RNA, 22 nt, Artificial Sequence
  Synthetic
uuuuucaauaugaaacacuagg

SEQ ID NO: 588432 - RNA, 23 nt, Artificial Sequence
  Synthetic
guuuuucaauaugaaacacuagg

SEQ ID NO: 588433 - RNA, 24 nt, Artificial Sequence
  Synthetic
gguuuuucaauaugaaacacuagg

SEQ ID NO: 588434 - RNA, 18 nt, Artificial Sequence
  Synthetic
auggcuagcuacacuagg

SEQ ID NO: 588435 - RNA, 19 nt, Artificial Sequence
  Synthetic
cauggcuagcuacacuagg

SEQ ID NO: 588436 - RNA, 20 nt, Artificial Sequence
  Synthetic
acauggcuagcuacacuagg

SEQ ID NO: 588437 - RNA, 21 nt, Artificial Sequence
  Synthetic
cacauggcuagcuacacuagg

SEQ ID NO: 588438 - RNA, 22 nt, Artificial Sequence
  Synthetic
ccacauggcuagcuacacuagg

SEQ ID NO: 588439 - RNA, 23 nt, Artificial Sequence
  Synthetic
uccacauggcuagcuacacuagg

SEQ ID NO: 588440 - RNA, 24 nt, Artificial Sequence
  Synthetic
uuccacauggcuagcuacacuagg

SEQ ID NO: 588441 - RNA, 18 nt, Artificial Sequence
  Synthetic
aaucuaguuaucacuagg

SEQ ID NO: 588442 - RNA, 19 nt, Artificial Sequence
  Synthetic
aaaucuaguuaucacuagg

SEQ ID NO: 588443 - RNA, 20 nt, Artificial Sequence
  Synthetic
uaaaucuaguuaucacuagg

SEQ ID NO: 588444 - RNA, 21 nt, Artificial Sequence
  Synthetic
uuaaaucuaguuaucacuagg

SEQ ID NO: 588445 - RNA, 22 nt, Artificial Sequence
  Synthetic
cuuaaaucuaguuaucacuagg

SEQ ID NO: 588446 - RNA, 23 nt, Artificial Sequence
  Synthetic
acuuaaaucuaguuaucacuagg

SEQ ID NO: 588447 - RNA, 24 nt, Artificial Sequence
  Synthetic
uacuuaaaucuaguuaucacuagg

SEQ ID NO: 588448 - RNA, 18 nt, Artificial Sequence
  Synthetic
aagaccaucgagacuagg

SEQ ID NO: 588449 - RNA, 19 nt, Artificial Sequence
  Synthetic
aaagaccaucgagacuagg

SEQ ID NO: 588450 - RNA, 20 nt, Artificial Sequence
  Synthetic
uaaagaccaucgagacuagg

SEQ ID NO: 588451 - RNA, 21 nt, Artificial Sequence
  Synthetic
guaaagaccaucgagacuagg

SEQ ID NO: 588452 - RNA, 22 nt, Artificial Sequence
  Synthetic
uguaaagaccaucgagacuagg

SEQ ID NO: 588453 - RNA, 23 nt, Artificial Sequence
  Synthetic
auguaaagaccaucgagacuagg

SEQ ID NO: 588454 - RNA, 24 nt, Artificial Sequence
  Synthetic
aauguaaagaccaucgagacuagg

SEQ ID NO: 588455 - RNA, 18 nt, Artificial Sequence
  Synthetic
guggagugagauacuagg

SEQ ID NO: 588456 - RNA, 19 nt, Artificial Sequence
  Synthetic
uguggagugagauacuagg

SEQ ID NO: 588457 - RNA, 20 nt, Artificial Sequence
  Synthetic
guguggagugagauacuagg

SEQ ID NO: 588458 - RNA, 21 nt, Artificial Sequence
  Synthetic
uguguggagugagauacuagg

SEQ ID NO: 588459 - RNA, 22 nt, Artificial Sequence
  Synthetic
guguguggagugagauacuagg

SEQ ID NO: 588460 - RNA, 23 nt, Artificial Sequence
  Synthetic
gguguguggagugagauacuagg

SEQ ID NO: 588461 - RNA, 24 nt, Artificial Sequence
  Synthetic
ggguguguggagugagauacuagg

SEQ ID NO: 588462 - RNA, 18 nt, Artificial Sequence
  Synthetic
uggaugcuaucaccuagg

SEQ ID NO: 588463 - RNA, 19 nt, Artificial Sequence
  Synthetic
auggaugcuaucaccuagg

SEQ ID NO: 588464 - RNA, 20 nt, Artificial Sequence
  Synthetic
aauggaugcuaucaccuagg

SEQ ID NO: 588465 - RNA, 21 nt, Artificial Sequence
  Synthetic
aaauggaugcuaucaccuagg

SEQ ID NO: 588466 - RNA, 22 nt, Artificial Sequence
  Synthetic
gaaauggaugcuaucaccuagg

SEQ ID NO: 588467 - RNA, 23 nt, Artificial Sequence
  Synthetic
agaaauggaugcuaucaccuagg

SEQ ID NO: 588468 - RNA, 24 nt, Artificial Sequence
  Synthetic
uagaaauggaugcuaucaccuagg

SEQ ID NO: 588469 - RNA, 18 nt, Artificial Sequence
  Synthetic
agagacuacguaccuagg

SEQ ID NO: 588470 - RNA, 19 nt, Artificial Sequence
  Synthetic
cagagacuacguaccuagg

SEQ ID NO: 588471 - RNA, 20 nt, Artificial Sequence
  Synthetic
gcagagacuacguaccuagg

SEQ ID NO: 588472 - RNA, 21 nt, Artificial Sequence
  Synthetic
agcagagacuacguaccuagg

SEQ ID NO: 588473 - RNA, 22 nt, Artificial Sequence
  Synthetic
gagcagagacuacguaccuagg

SEQ ID NO: 588474 - RNA, 23 nt, Artificial Sequence
  Synthetic
agagcagagacuacguaccuagg

SEQ ID NO: 588475 - RNA, 24 nt, Artificial Sequence
  Synthetic
uagagcagagacuacguaccuagg

SEQ ID NO: 588476 - RNA, 18 nt, Artificial Sequence
  Synthetic
cucacucuguccccuagg

SEQ ID NO: 588477 - RNA, 19 nt, Artificial Sequence
  Synthetic
ucucacucuguccccuagg

SEQ ID NO: 588478 - RNA, 20 nt, Artificial Sequence
  Synthetic
gucucacucuguccccuagg

SEQ ID NO: 588479 - RNA, 21 nt, Artificial Sequence
  Synthetic
agucucacucuguccccuagg

SEQ ID NO: 588480 - RNA, 22 nt, Artificial Sequence
  Synthetic
gagucucacucuguccccuagg

SEQ ID NO: 588481 - RNA, 23 nt, Artificial Sequence
  Synthetic
agagucucacucuguccccuagg

SEQ ID NO: 588482 - RNA, 24 nt, Artificial Sequence
  Synthetic
cagagucucacucuguccccuagg

SEQ ID NO: 588483 - RNA, 18 nt, Artificial Sequence
  Synthetic
uaugcguuaagcccuagg

SEQ ID NO: 588484 - RNA, 19 nt, Artificial Sequence
  Synthetic
cuaugcguuaagcccuagg

SEQ ID NO: 588485 - RNA, 20 nt, Artificial Sequence
  Synthetic
gcuaugcguuaagcccuagg

SEQ ID NO: 588486 - RNA, 21 nt, Artificial Sequence
  Synthetic
ugcuaugcguuaagcccuagg

SEQ ID NO: 588487 - RNA, 22 nt, Artificial Sequence
  Synthetic
cugcuaugcguuaagcccuagg

SEQ ID NO: 588488 - RNA, 23 nt, Artificial Sequence
  Synthetic
ccugcuaugcguuaagcccuagg

SEQ ID NO: 588489 - RNA, 24 nt, Artificial Sequence
  Synthetic
accugcuaugcguuaagcccuagg

SEQ ID NO: 588490 - RNA, 18 nt, Artificial Sequence
  Synthetic
cucacuugcggcccuagg

SEQ ID NO: 588491 - RNA, 19 nt, Artificial Sequence
  Synthetic
acucacuugcggcccuagg

SEQ ID NO: 588492 - RNA, 20 nt, Artificial Sequence
  Synthetic
aacucacuugcggcccuagg

SEQ ID NO: 588493 - RNA, 21 nt, Artificial Sequence
  Synthetic
caacucacuugcggcccuagg

SEQ ID NO: 588494 - RNA, 22 nt, Artificial Sequence
  Synthetic
ucaacucacuugcggcccuagg

SEQ ID NO: 588495 - RNA, 23 nt, Artificial Sequence
  Synthetic
aucaacucacuugcggcccuagg

SEQ ID NO: 588496 - RNA, 24 nt, Artificial Sequence
  Synthetic
uaucaacucacuugcggcccuagg

SEQ ID NO: 588497 - RNA, 18 nt, Artificial Sequence
  Synthetic
gaucucuuaaggccuagg

SEQ ID NO: 588498 - RNA, 19 nt, Artificial Sequence
  Synthetic
agaucucuuaaggccuagg

SEQ ID NO: 588499 - RNA, 20 nt, Artificial Sequence
  Synthetic
uagaucucuuaaggccuagg

SEQ ID NO: 588500 - RNA, 21 nt, Artificial Sequence
  Synthetic
auagaucucuuaaggccuagg

SEQ ID NO: 588501 - RNA, 22 nt, Artificial Sequence
  Synthetic
uauagaucucuuaaggccuagg

SEQ ID NO: 588502 - RNA, 23 nt, Artificial Sequence
  Synthetic
guauagaucucuuaaggccuagg

SEQ ID NO: 588503 - RNA, 24 nt, Artificial Sequence
  Synthetic
uguauagaucucuuaaggccuagg

SEQ ID NO: 588504 - RNA, 18 nt, Artificial Sequence
  Synthetic
gaugagaugaggccuagg

SEQ ID NO: 588505 - RNA, 19 nt, Artificial Sequence
  Synthetic
ggaugagaugaggccuagg

SEQ ID NO: 588506 - RNA, 20 nt, Artificial Sequence
  Synthetic
uggaugagaugaggccuagg

SEQ ID NO: 588507 - RNA, 21 nt, Artificial Sequence
  Synthetic
cuggaugagaugaggccuagg

SEQ ID NO: 588508 - RNA, 22 nt, Artificial Sequence
  Synthetic
ccuggaugagaugaggccuagg

SEQ ID NO: 588509 - RNA, 23 nt, Artificial Sequence
  Synthetic
uccuggaugagaugaggccuagg

SEQ ID NO: 588510 - RNA, 24 nt, Artificial Sequence
  Synthetic
uuccuggaugagaugaggccuagg

SEQ ID NO: 588511 - RNA, 18 nt, Artificial Sequence
  Synthetic
auguaacaaaugccuagg

SEQ ID NO: 588512 - RNA, 19 nt, Artificial Sequence
  Synthetic
uauguaacaaaugccuagg

SEQ ID NO: 588513 - RNA, 20 nt, Artificial Sequence
  Synthetic
uuauguaacaaaugccuagg

SEQ ID NO: 588514 - RNA, 21 nt, Artificial Sequence
  Synthetic
uuuauguaacaaaugccuagg

SEQ ID NO: 588515 - RNA, 22 nt, Artificial Sequence
  Synthetic
uuuuauguaacaaaugccuagg

SEQ ID NO: 588516 - RNA, 23 nt, Artificial Sequence
  Synthetic
auuuuauguaacaaaugccuagg

SEQ ID NO: 588517 - RNA, 24 nt, Artificial Sequence
  Synthetic
uauuuuauguaacaaaugccuagg

SEQ ID NO: 588518 - RNA, 18 nt, Artificial Sequence
  Synthetic
gauuuuauggcuccuagg

SEQ ID NO: 588519 - RNA, 19 nt, Artificial Sequence
  Synthetic
ugauuuuauggcuccuagg

SEQ ID NO: 588520 - RNA, 20 nt, Artificial Sequence
  Synthetic
uugauuuuauggcuccuagg

SEQ ID NO: 588521 - RNA, 21 nt, Artificial Sequence
  Synthetic
uuugauuuuauggcuccuagg

SEQ ID NO: 588522 - RNA, 22 nt, Artificial Sequence
  Synthetic
uuuugauuuuauggcuccuagg

SEQ ID NO: 588523 - RNA, 23 nt, Artificial Sequence
  Synthetic
cuuuugauuuuauggcuccuagg

SEQ ID NO: 588524 - RNA, 24 nt, Artificial Sequence
  Synthetic
gcuuuugauuuuauggcuccuagg

SEQ ID NO: 588525 - RNA, 18 nt, Artificial Sequence
  Synthetic
cauuuaagaucuccuagg

SEQ ID NO: 588526 - RNA, 19 nt, Artificial Sequence
  Synthetic
ucauuuaagaucuccuagg

SEQ ID NO: 588527 - RNA, 20 nt, Artificial Sequence
  Synthetic
uucauuuaagaucuccuagg

SEQ ID NO: 588528 - RNA, 21 nt, Artificial Sequence
  Synthetic
guucauuuaagaucuccuagg

SEQ ID NO: 588529 - RNA, 22 nt, Artificial Sequence
  Synthetic
aguucauuuaagaucuccuagg

SEQ ID NO: 588530 - RNA, 23 nt, Artificial Sequence
  Synthetic
gaguucauuuaagaucuccuagg

SEQ ID NO: 588531 - RNA, 24 nt, Artificial Sequence
  Synthetic
ugaguucauuuaagaucuccuagg

SEQ ID NO: 588532 - RNA, 18 nt, Artificial Sequence
  Synthetic
auacuuuuauuuccuagg

SEQ ID NO: 588533 - RNA, 19 nt, Artificial Sequence
  Synthetic
gauacuuuuauuuccuagg

SEQ ID NO: 588534 - RNA, 20 nt, Artificial Sequence
  Synthetic
cgauacuuuuauuuccuagg

SEQ ID NO: 588535 - RNA, 21 nt, Artificial Sequence
  Synthetic
ccgauacuuuuauuuccuagg

SEQ ID NO: 588536 - RNA, 22 nt, Artificial Sequence
  Synthetic
cccgauacuuuuauuuccuagg

SEQ ID NO: 588537 - RNA, 23 nt, Artificial Sequence
  Synthetic
acccgauacuuuuauuuccuagg

SEQ ID NO: 588538 - RNA, 24 nt, Artificial Sequence
  Synthetic
cacccgauacuuuuauuuccuagg

SEQ ID NO: 588539 - RNA, 18 nt, Artificial Sequence
  Synthetic
cagaggcaaagagcuagg

SEQ ID NO: 588540 - RNA, 19 nt, Artificial Sequence
  Synthetic
acagaggcaaagagcuagg

SEQ ID NO: 588541 - RNA, 20 nt, Artificial Sequence
  Synthetic
aacagaggcaaagagcuagg

SEQ ID NO: 588542 - RNA, 21 nt, Artificial Sequence
  Synthetic
gaacagaggcaaagagcuagg

SEQ ID NO: 588543 - RNA, 22 nt, Artificial Sequence
  Synthetic
ugaacagaggcaaagagcuagg

SEQ ID NO: 588544 - RNA, 23 nt, Artificial Sequence
  Synthetic
gugaacagaggcaaagagcuagg

SEQ ID NO: 588545 - RNA, 24 nt, Artificial Sequence
  Synthetic
cgugaacagaggcaaagagcuagg

SEQ ID NO: 588546 - RNA, 18 nt, Artificial Sequence
  Synthetic
agguaagucaaggcuagg

SEQ ID NO: 588547 - RNA, 19 nt, Artificial Sequence
  Synthetic
aagguaagucaaggcuagg

SEQ ID NO: 588548 - RNA, 20 nt, Artificial Sequence
  Synthetic
gaagguaagucaaggcuagg

SEQ ID NO: 588549 - RNA, 21 nt, Artificial Sequence
  Synthetic
agaagguaagucaaggcuagg

SEQ ID NO: 588550 - RNA, 22 nt, Artificial Sequence
  Synthetic
gagaagguaagucaaggcuagg

SEQ ID NO: 588551 - RNA, 23 nt, Artificial Sequence
  Synthetic
ugagaagguaagucaaggcuagg

SEQ ID NO: 588552 - RNA, 24 nt, Artificial Sequence
  Synthetic
cugagaagguaagucaaggcuagg

SEQ ID NO: 588553 - RNA, 18 nt, Artificial Sequence
  Synthetic
cuccuggggaaggcuagg

SEQ ID NO: 588554 - RNA, 19 nt, Artificial Sequence
  Synthetic
ccuccuggggaaggcuagg

SEQ ID NO: 588555 - RNA, 20 nt, Artificial Sequence
  Synthetic
uccuccuggggaaggcuagg

SEQ ID NO: 588556 - RNA, 21 nt, Artificial Sequence
  Synthetic
auccuccuggggaaggcuagg

SEQ ID NO: 588557 - RNA, 22 nt, Artificial Sequence
  Synthetic
gauccuccuggggaaggcuagg

SEQ ID NO: 588558 - RNA, 23 nt, Artificial Sequence
  Synthetic
agauccuccuggggaaggcuagg

SEQ ID NO: 588559 - RNA, 24 nt, Artificial Sequence
  Synthetic
gagauccuccuggggaaggcuagg

SEQ ID NO: 588560 - RNA, 18 nt, Artificial Sequence
  Synthetic
uaguggcaugaggcuagg

SEQ ID NO: 588561 - RNA, 19 nt, Artificial Sequence
  Synthetic
uuaguggcaugaggcuagg

SEQ ID NO: 588562 - RNA, 20 nt, Artificial Sequence
  Synthetic
uuuaguggcaugaggcuagg

SEQ ID NO: 588563 - RNA, 21 nt, Artificial Sequence
  Synthetic
cuuuaguggcaugaggcuagg

SEQ ID NO: 588564 - RNA, 22 nt, Artificial Sequence
  Synthetic
acuuuaguggcaugaggcuagg

SEQ ID NO: 588565 - RNA, 23 nt, Artificial Sequence
  Synthetic
gacuuuaguggcaugaggcuagg

SEQ ID NO: 588566 - RNA, 24 nt, Artificial Sequence
  Synthetic
agacuuuaguggcaugaggcuagg

SEQ ID NO: 588567 - RNA, 18 nt, Artificial Sequence
  Synthetic
guaaauguugaggcuagg

SEQ ID NO: 588568 - RNA, 19 nt, Artificial Sequence
  Synthetic
uguaaauguugaggcuagg

SEQ ID NO: 588569 - RNA, 20 nt, Artificial Sequence
  Synthetic
uuguaaauguugaggcuagg

SEQ ID NO: 588570 - RNA, 21 nt, Artificial Sequence
  Synthetic
uuuguaaauguugaggcuagg

SEQ ID NO: 588571 - RNA, 22 nt, Artificial Sequence
  Synthetic
guuuguaaauguugaggcuagg

SEQ ID NO: 588572 - RNA, 23 nt, Artificial Sequence
  Synthetic
uguuuguaaauguugaggcuagg

SEQ ID NO: 588573 - RNA, 24 nt, Artificial Sequence
  Synthetic
guguuuguaaauguugaggcuagg

SEQ ID NO: 588574 - RNA, 18 nt, Artificial Sequence
  Synthetic
guacuuuuuugugcuagg

SEQ ID NO: 588575 - RNA, 19 nt, Artificial Sequence
  Synthetic
gguacuuuuuugugcuagg

SEQ ID NO: 588576 - RNA, 20 nt, Artificial Sequence
  Synthetic
agguacuuuuuugugcuagg

SEQ ID NO: 588577 - RNA, 21 nt, Artificial Sequence
  Synthetic
cagguacuuuuuugugcuagg

SEQ ID NO: 588578 - RNA, 22 nt, Artificial Sequence
  Synthetic
gcagguacuuuuuugugcuagg

SEQ ID NO: 588579 - RNA, 23 nt, Artificial Sequence
  Synthetic
agcagguacuuuuuugugcuagg

SEQ ID NO: 588580 - RNA, 24 nt, Artificial Sequence
  Synthetic
gagcagguacuuuuuugugcuagg

SEQ ID NO: 588581 - RNA, 18 nt, Artificial Sequence
  Synthetic
uuggccugucuugcuagg

SEQ ID NO: 588582 - RNA, 19 nt, Artificial Sequence
  Synthetic
guuggccugucuugcuagg

SEQ ID NO: 588583 - RNA, 20 nt, Artificial Sequence
  Synthetic
uguuggccugucuugcuagg

SEQ ID NO: 588584 - RNA, 21 nt, Artificial Sequence
  Synthetic
auguuggccugucuugcuagg

SEQ ID NO: 588585 - RNA, 22 nt, Artificial Sequence
  Synthetic
aauguuggccugucuugcuagg

SEQ ID NO: 588586 - RNA, 23 nt, Artificial Sequence
  Synthetic
gaauguuggccugucuugcuagg

SEQ ID NO: 588587 - RNA, 24 nt, Artificial Sequence
  Synthetic
ugaauguuggccugucuugcuagg

SEQ ID NO: 588588 - RNA, 18 nt, Artificial Sequence
  Synthetic
cucuagggcaaaucuagg

SEQ ID NO: 588589 - RNA, 19 nt, Artificial Sequence
  Synthetic
ucucuagggcaaaucuagg

SEQ ID NO: 588590 - RNA, 20 nt, Artificial Sequence
  Synthetic
cucucuagggcaaaucuagg

SEQ ID NO: 588591 - RNA, 21 nt, Artificial Sequence
  Synthetic
gcucucuagggcaaaucuagg

SEQ ID NO: 588592 - RNA, 22 nt, Artificial Sequence
  Synthetic
ugcucucuagggcaaaucuagg

SEQ ID NO: 588593 - RNA, 23 nt, Artificial Sequence
  Synthetic
uugcucucuagggcaaaucuagg

SEQ ID NO: 588594 - RNA, 24 nt, Artificial Sequence
  Synthetic
auugcucucuagggcaaaucuagg

SEQ ID NO: 588595 - RNA, 18 nt, Artificial Sequence
  Synthetic
acuggagcagcaucuagg

SEQ ID NO: 588596 - RNA, 19 nt, Artificial Sequence
  Synthetic
cacuggagcagcaucuagg

SEQ ID NO: 588597 - RNA, 20 nt, Artificial Sequence
  Synthetic
gcacuggagcagcaucuagg

SEQ ID NO: 588598 - RNA, 21 nt, Artificial Sequence
  Synthetic
agcacuggagcagcaucuagg

SEQ ID NO: 588599 - RNA, 22 nt, Artificial Sequence
  Synthetic
gagcacuggagcagcaucuagg

SEQ ID NO: 588600 - RNA, 23 nt, Artificial Sequence
  Synthetic
ugagcacuggagcagcaucuagg

SEQ ID NO: 588601 - RNA, 24 nt, Artificial Sequence
  Synthetic
augagcacuggagcagcaucuagg

SEQ ID NO: 588602 - RNA, 18 nt, Artificial Sequence
  Synthetic
uaccaugaacuaucuagg

SEQ ID NO: 588603 - RNA, 19 nt, Artificial Sequence
  Synthetic
cuaccaugaacuaucuagg

SEQ ID NO: 588604 - RNA, 20 nt, Artificial Sequence
  Synthetic
ucuaccaugaacuaucuagg

SEQ ID NO: 588605 - RNA, 21 nt, Artificial Sequence
  Synthetic
gucuaccaugaacuaucuagg

SEQ ID NO: 588606 - RNA, 22 nt, Artificial Sequence
  Synthetic
ugucuaccaugaacuaucuagg

SEQ ID NO: 588607 - RNA, 23 nt, Artificial Sequence
  Synthetic
augucuaccaugaacuaucuagg

SEQ ID NO: 588608 - RNA, 24 nt, Artificial Sequence
  Synthetic
caugucuaccaugaacuaucuagg

SEQ ID NO: 588609 - RNA, 18 nt, Artificial Sequence
  Synthetic
accaggaucuacucuagg

SEQ ID NO: 588610 - RNA, 19 nt, Artificial Sequence
  Synthetic
aaccaggaucuacucuagg

SEQ ID NO: 588611 - RNA, 20 nt, Artificial Sequence
  Synthetic
aaaccaggaucuacucuagg

SEQ ID NO: 588612 - RNA, 21 nt, Artificial Sequence
  Synthetic
gaaaccaggaucuacucuagg

SEQ ID NO: 588613 - RNA, 22 nt, Artificial Sequence
  Synthetic
agaaaccaggaucuacucuagg

SEQ ID NO: 588614 - RNA, 23 nt, Artificial Sequence
  Synthetic
cagaaaccaggaucuacucuagg

SEQ ID NO: 588615 - RNA, 24 nt, Artificial Sequence
  Synthetic
acagaaaccaggaucuacucuagg

SEQ ID NO: 588616 - RNA, 18 nt, Artificial Sequence
  Synthetic
cauccucugaauucuagg

SEQ ID NO: 588617 - RNA, 19 nt, Artificial Sequence
  Synthetic
acauccucugaauucuagg

SEQ ID NO: 588618 - RNA, 20 nt, Artificial Sequence
  Synthetic
uacauccucugaauucuagg

SEQ ID NO: 588619 - RNA, 21 nt, Artificial Sequence
  Synthetic
auacauccucugaauucuagg

SEQ ID NO: 588620 - RNA, 22 nt, Artificial Sequence
  Synthetic
cauacauccucugaauucuagg

SEQ ID NO: 588621 - RNA, 23 nt, Artificial Sequence
  Synthetic
ccauacauccucugaauucuagg

SEQ ID NO: 588622 - RNA, 24 nt, Artificial Sequence
  Synthetic
uccauacauccucugaauucuagg

SEQ ID NO: 588623 - RNA, 18 nt, Artificial Sequence
  Synthetic
uggagcucuacuucuagg

SEQ ID NO: 588624 - RNA, 19 nt, Artificial Sequence
  Synthetic
uuggagcucuacuucuagg

SEQ ID NO: 588625 - RNA, 20 nt, Artificial Sequence
  Synthetic
guuggagcucuacuucuagg

SEQ ID NO: 588626 - RNA, 21 nt, Artificial Sequence
  Synthetic
gguuggagcucuacuucuagg

SEQ ID NO: 588627 - RNA, 22 nt, Artificial Sequence
  Synthetic
ggguuggagcucuacuucuagg

SEQ ID NO: 588628 - RNA, 23 nt, Artificial Sequence
  Synthetic
uggguuggagcucuacuucuagg

SEQ ID NO: 588629 - RNA, 24 nt, Artificial Sequence
  Synthetic
uuggguuggagcucuacuucuagg

SEQ ID NO: 588630 - RNA, 18 nt, Artificial Sequence
  Synthetic
uuuaguuuugguucuagg

SEQ ID NO: 588631 - RNA, 19 nt, Artificial Sequence
  Synthetic
auuuaguuuugguucuagg

SEQ ID NO: 588632 - RNA, 20 nt, Artificial Sequence
  Synthetic
uauuuaguuuugguucuagg

SEQ ID NO: 588633 - RNA, 21 nt, Artificial Sequence
  Synthetic
uuauuuaguuuugguucuagg

SEQ ID NO: 588634 - RNA, 22 nt, Artificial Sequence
  Synthetic
uuuauuuaguuuugguucuagg

SEQ ID NO: 588635 - RNA, 23 nt, Artificial Sequence
  Synthetic
auuuauuuaguuuugguucuagg

SEQ ID NO: 588636 - RNA, 24 nt, Artificial Sequence
  Synthetic
cauuuauuuaguuuugguucuagg

SEQ ID NO: 588637 - RNA, 18 nt, Artificial Sequence
  Synthetic
ccuguuacuuuuucuagg

SEQ ID NO: 588638 - RNA, 19 nt, Artificial Sequence
  Synthetic
accuguuacuuuuucuagg

SEQ ID NO: 588639 - RNA, 20 nt, Artificial Sequence
  Synthetic
gaccuguuacuuuuucuagg

SEQ ID NO: 588640 - RNA, 21 nt, Artificial Sequence
  Synthetic
agaccuguuacuuuuucuagg

SEQ ID NO: 588641 - RNA, 22 nt, Artificial Sequence
  Synthetic
uagaccuguuacuuuuucuagg

SEQ ID NO: 588642 - RNA, 23 nt, Artificial Sequence
  Synthetic
guagaccuguuacuuuuucuagg

SEQ ID NO: 588643 - RNA, 24 nt, Artificial Sequence
  Synthetic
aguagaccuguuacuuuuucuagg

SEQ ID NO: 588644 - RNA, 18 nt, Artificial Sequence
  Synthetic
gacauauugaaaaguagg

SEQ ID NO: 588645 - RNA, 19 nt, Artificial Sequence
  Synthetic
ggacauauugaaaaguagg

SEQ ID NO: 588646 - RNA, 20 nt, Artificial Sequence
  Synthetic
aggacauauugaaaaguagg

SEQ ID NO: 588647 - RNA, 21 nt, Artificial Sequence
  Synthetic
caggacauauugaaaaguagg

SEQ ID NO: 588648 - RNA, 22 nt, Artificial Sequence
  Synthetic
gcaggacauauugaaaaguagg

SEQ ID NO: 588649 - RNA, 23 nt, Artificial Sequence
  Synthetic
agcaggacauauugaaaaguagg

SEQ ID NO: 588650 - RNA, 24 nt, Artificial Sequence
  Synthetic
aagcaggacauauugaaaaguagg

SEQ ID NO: 588651 - RNA, 18 nt, Artificial Sequence
  Synthetic
caacauucucuaaguagg

SEQ ID NO: 588652 - RNA, 19 nt, Artificial Sequence
  Synthetic
ucaacauucucuaaguagg

SEQ ID NO: 588653 - RNA, 20 nt, Artificial Sequence
  Synthetic
uucaacauucucuaaguagg

SEQ ID NO: 588654 - RNA, 21 nt, Artificial Sequence
  Synthetic
cuucaacauucucuaaguagg

SEQ ID NO: 588655 - RNA, 22 nt, Artificial Sequence
  Synthetic
ucuucaacauucucuaaguagg

SEQ ID NO: 588656 - RNA, 23 nt, Artificial Sequence
  Synthetic
cucuucaacauucucuaaguagg

SEQ ID NO: 588657 - RNA, 24 nt, Artificial Sequence
  Synthetic
gcucuucaacauucucuaaguagg

SEQ ID NO: 588658 - RNA, 18 nt, Artificial Sequence
  Synthetic
cagcucagccacaguagg

SEQ ID NO: 588659 - RNA, 19 nt, Artificial Sequence
  Synthetic
ccagcucagccacaguagg

SEQ ID NO: 588660 - RNA, 20 nt, Artificial Sequence
  Synthetic
accagcucagccacaguagg

SEQ ID NO: 588661 - RNA, 21 nt, Artificial Sequence
  Synthetic
uaccagcucagccacaguagg

SEQ ID NO: 588662 - RNA, 22 nt, Artificial Sequence
  Synthetic
auaccagcucagccacaguagg

SEQ ID NO: 588663 - RNA, 23 nt, Artificial Sequence
  Synthetic
gauaccagcucagccacaguagg

SEQ ID NO: 588664 - RNA, 24 nt, Artificial Sequence
  Synthetic
ggauaccagcucagccacaguagg

SEQ ID NO: 588665 - RNA, 18 nt, Artificial Sequence
  Synthetic
uccuggcuacucaguagg

SEQ ID NO: 588666 - RNA, 19 nt, Artificial Sequence
  Synthetic
auccuggcuacucaguagg

SEQ ID NO: 588667 - RNA, 20 nt, Artificial Sequence
  Synthetic
aauccuggcuacucaguagg

SEQ ID NO: 588668 - RNA, 21 nt, Artificial Sequence
  Synthetic
uaauccuggcuacucaguagg

SEQ ID NO: 588669 - RNA, 22 nt, Artificial Sequence
  Synthetic
auaauccuggcuacucaguagg

SEQ ID NO: 588670 - RNA, 23 nt, Artificial Sequence
  Synthetic
uauaauccuggcuacucaguagg

SEQ ID NO: 588671 - RNA, 24 nt, Artificial Sequence
  Synthetic
cuauaauccuggcuacucaguagg

SEQ ID NO: 588672 - RNA, 18 nt, Artificial Sequence
  Synthetic
uucaaacaugucaguagg

SEQ ID NO: 588673 - RNA, 19 nt, Artificial Sequence
  Synthetic
auucaaacaugucaguagg

SEQ ID NO: 588674 - RNA, 20 nt, Artificial Sequence
  Synthetic
aauucaaacaugucaguagg

SEQ ID NO: 588675 - RNA, 21 nt, Artificial Sequence
  Synthetic
gaauucaaacaugucaguagg

SEQ ID NO: 588676 - RNA, 22 nt, Artificial Sequence
  Synthetic
ugaauucaaacaugucaguagg

SEQ ID NO: 588677 - RNA, 23 nt, Artificial Sequence
  Synthetic
augaauucaaacaugucaguagg

SEQ ID NO: 588678 - RNA, 24 nt, Artificial Sequence
  Synthetic
aaugaauucaaacaugucaguagg

SEQ ID NO: 588679 - RNA, 18 nt, Artificial Sequence
  Synthetic
ggcuaaauugagaguagg

SEQ ID NO: 588680 - RNA, 19 nt, Artificial Sequence
  Synthetic
uggcuaaauugagaguagg

SEQ ID NO: 588681 - RNA, 20 nt, Artificial Sequence
  Synthetic
guggcuaaauugagaguagg

SEQ ID NO: 588682 - RNA, 21 nt, Artificial Sequence
  Synthetic
aguggcuaaauugagaguagg

SEQ ID NO: 588683 - RNA, 22 nt, Artificial Sequence
  Synthetic
aaguggcuaaauugagaguagg

SEQ ID NO: 588684 - RNA, 23 nt, Artificial Sequence
  Synthetic
uaaguggcuaaauugagaguagg

SEQ ID NO: 588685 - RNA, 24 nt, Artificial Sequence
  Synthetic
cuaaguggcuaaauugagaguagg

SEQ ID NO: 588686 - RNA, 18 nt, Artificial Sequence
  Synthetic
aucagaaauaggaguagg

SEQ ID NO: 588687 - RNA, 19 nt, Artificial Sequence
  Synthetic
gaucagaaauaggaguagg

SEQ ID NO: 588688 - RNA, 20 nt, Artificial Sequence
  Synthetic
agaucagaaauaggaguagg

SEQ ID NO: 588689 - RNA, 21 nt, Artificial Sequence
  Synthetic
gagaucagaaauaggaguagg

SEQ ID NO: 588690 - RNA, 22 nt, Artificial Sequence
  Synthetic
agagaucagaaauaggaguagg

SEQ ID NO: 588691 - RNA, 23 nt, Artificial Sequence
  Synthetic
cagagaucagaaauaggaguagg

SEQ ID NO: 588692 - RNA, 24 nt, Artificial Sequence
  Synthetic
ccagagaucagaaauaggaguagg

SEQ ID NO: 588693 - RNA, 18 nt, Artificial Sequence
  Synthetic
gauacauuggggaguagg

SEQ ID NO: 588694 - RNA, 19 nt, Artificial Sequence
  Synthetic
ggauacauuggggaguagg

SEQ ID NO: 588695 - RNA, 20 nt, Artificial Sequence
  Synthetic
aggauacauuggggaguagg

SEQ ID NO: 588696 - RNA, 21 nt, Artificial Sequence
  Synthetic
uaggauacauuggggaguagg

SEQ ID NO: 588697 - RNA, 22 nt, Artificial Sequence
  Synthetic
cuaggauacauuggggaguagg

SEQ ID NO: 588698 - RNA, 23 nt, Artificial Sequence
  Synthetic
ucuaggauacauuggggaguagg

SEQ ID NO: 588699 - RNA, 24 nt, Artificial Sequence
  Synthetic
cucuaggauacauuggggaguagg

SEQ ID NO: 588700 - RNA, 18 nt, Artificial Sequence
  Synthetic
agcuaggaaaugaguagg

SEQ ID NO: 588701 - RNA, 19 nt, Artificial Sequence
  Synthetic
uagcuaggaaaugaguagg

SEQ ID NO: 588702 - RNA, 20 nt, Artificial Sequence
  Synthetic
uuagcuaggaaaugaguagg

SEQ ID NO: 588703 - RNA, 21 nt, Artificial Sequence
  Synthetic
guuagcuaggaaaugaguagg

SEQ ID NO: 588704 - RNA, 22 nt, Artificial Sequence
  Synthetic
uguuagcuaggaaaugaguagg

SEQ ID NO: 588705 - RNA, 23 nt, Artificial Sequence
  Synthetic
uuguuagcuaggaaaugaguagg

SEQ ID NO: 588706 - RNA, 24 nt, Artificial Sequence
  Synthetic
cuuguuagcuaggaaaugaguagg

SEQ ID NO: 588707 - RNA, 18 nt, Artificial Sequence
  Synthetic
auagaaaaucugaguagg

SEQ ID NO: 588708 - RNA, 19 nt, Artificial Sequence
  Synthetic
aauagaaaaucugaguagg

SEQ ID NO: 588709 - RNA, 20 nt, Artificial Sequence
  Synthetic
aaauagaaaaucugaguagg

SEQ ID NO: 588710 - RNA, 21 nt, Artificial Sequence
  Synthetic
gaaauagaaaaucugaguagg

SEQ ID NO: 588711 - RNA, 22 nt, Artificial Sequence
  Synthetic
agaaauagaaaaucugaguagg

SEQ ID NO: 588712 - RNA, 23 nt, Artificial Sequence
  Synthetic
aagaaauagaaaaucugaguagg

SEQ ID NO: 588713 - RNA, 24 nt, Artificial Sequence
  Synthetic
gaagaaauagaaaaucugaguagg

SEQ ID NO: 588714 - RNA, 18 nt, Artificial Sequence
  Synthetic
agcucacaauugaguagg

SEQ ID NO: 588715 - RNA, 19 nt, Artificial Sequence
  Synthetic
aagcucacaauugaguagg

SEQ ID NO: 588716 - RNA, 20 nt, Artificial Sequence
  Synthetic
gaagcucacaauugaguagg

SEQ ID NO: 588717 - RNA, 21 nt, Artificial Sequence
  Synthetic
agaagcucacaauugaguagg

SEQ ID NO: 588718 - RNA, 22 nt, Artificial Sequence
  Synthetic
aagaagcucacaauugaguagg

SEQ ID NO: 588719 - RNA, 23 nt, Artificial Sequence
  Synthetic
caagaagcucacaauugaguagg

SEQ ID NO: 588720 - RNA, 24 nt, Artificial Sequence
  Synthetic
ucaagaagcucacaauugaguagg

SEQ ID NO: 588721 - RNA, 18 nt, Artificial Sequence
  Synthetic
agaguacaguugaguagg

SEQ ID NO: 588722 - RNA, 19 nt, Artificial Sequence
  Synthetic
aagaguacaguugaguagg

SEQ ID NO: 588723 - RNA, 20 nt, Artificial Sequence
  Synthetic
caagaguacaguugaguagg

SEQ ID NO: 588724 - RNA, 21 nt, Artificial Sequence
  Synthetic
acaagaguacaguugaguagg

SEQ ID NO: 588725 - RNA, 22 nt, Artificial Sequence
  Synthetic
cacaagaguacaguugaguagg

SEQ ID NO: 588726 - RNA, 23 nt, Artificial Sequence
  Synthetic
ucacaagaguacaguugaguagg

SEQ ID NO: 588727 - RNA, 24 nt, Artificial Sequence
  Synthetic
uucacaagaguacaguugaguagg

SEQ ID NO: 588728 - RNA, 18 nt, Artificial Sequence
  Synthetic
uuauuauuuucuaguagg

SEQ ID NO: 588729 - RNA, 19 nt, Artificial Sequence
  Synthetic
uuuauuauuuucuaguagg

SEQ ID NO: 588730 - RNA, 20 nt, Artificial Sequence
  Synthetic
uuuuauuauuuucuaguagg

SEQ ID NO: 588731 - RNA, 21 nt, Artificial Sequence
  Synthetic
auuuuauuauuuucuaguagg

SEQ ID NO: 588732 - RNA, 22 nt, Artificial Sequence
  Synthetic
uauuuuauuauuuucuaguagg

SEQ ID NO: 588733 - RNA, 23 nt, Artificial Sequence
  Synthetic
cuauuuuauuauuuucuaguagg

SEQ ID NO: 588734 - RNA, 24 nt, Artificial Sequence
  Synthetic
acuauuuuauuauuuucuaguagg

SEQ ID NO: 588735 - RNA, 18 nt, Artificial Sequence
  Synthetic
gucaaaaauaaagguagg

SEQ ID NO: 588736 - RNA, 19 nt, Artificial Sequence
  Synthetic
ugucaaaaauaaagguagg

SEQ ID NO: 588737 - RNA, 20 nt, Artificial Sequence
  Synthetic
augucaaaaauaaagguagg

SEQ ID NO: 588738 - RNA, 21 nt, Artificial Sequence
  Synthetic
gaugucaaaaauaaagguagg

SEQ ID NO: 588739 - RNA, 22 nt, Artificial Sequence
  Synthetic
ugaugucaaaaauaaagguagg

SEQ ID NO: 588740 - RNA, 23 nt, Artificial Sequence
  Synthetic
cugaugucaaaaauaaagguagg

SEQ ID NO: 588741 - RNA, 24 nt, Artificial Sequence
  Synthetic
acugaugucaaaaauaaagguagg

SEQ ID NO: 588742 - RNA, 18 nt, Artificial Sequence
  Synthetic
gacagagcuggagguagg

SEQ ID NO: 588743 - RNA, 19 nt, Artificial Sequence
  Synthetic
agacagagcuggagguagg

SEQ ID NO: 588744 - RNA, 20 nt, Artificial Sequence
  Synthetic
aagacagagcuggagguagg

SEQ ID NO: 588745 - RNA, 21 nt, Artificial Sequence
  Synthetic
uaagacagagcuggagguagg

SEQ ID NO: 588746 - RNA, 22 nt, Artificial Sequence
  Synthetic
guaagacagagcuggagguagg

SEQ ID NO: 588747 - RNA, 23 nt, Artificial Sequence
  Synthetic
uguaagacagagcuggagguagg

SEQ ID NO: 588748 - RNA, 24 nt, Artificial Sequence
  Synthetic
cuguaagacagagcuggagguagg

SEQ ID NO: 588749 - RNA, 18 nt, Artificial Sequence
  Synthetic
ucccagcuacucgguagg

SEQ ID NO: 588750 - RNA, 19 nt, Artificial Sequence
  Synthetic
aucccagcuacucgguagg

SEQ ID NO: 588751 - RNA, 20 nt, Artificial Sequence
  Synthetic
aaucccagcuacucgguagg

SEQ ID NO: 588752 - RNA, 21 nt, Artificial Sequence
  Synthetic
uaaucccagcuacucgguagg

SEQ ID NO: 588753 - RNA, 22 nt, Artificial Sequence
  Synthetic
guaaucccagcuacucgguagg

SEQ ID NO: 588754 - RNA, 23 nt, Artificial Sequence
  Synthetic
uguaaucccagcuacucgguagg

SEQ ID NO: 588755 - RNA, 24 nt, Artificial Sequence
  Synthetic
cuguaaucccagcuacucgguagg

SEQ ID NO: 588756 - RNA, 18 nt, Artificial Sequence
  Synthetic
ugccagcuacucgguagg

SEQ ID NO: 588757 - RNA, 19 nt, Artificial Sequence
  Synthetic
augccagcuacucgguagg

SEQ ID NO: 588758 - RNA, 20 nt, Artificial Sequence
  Synthetic
aaugccagcuacucgguagg

SEQ ID NO: 588759 - RNA, 21 nt, Artificial Sequence
  Synthetic
uaaugccagcuacucgguagg

SEQ ID NO: 588760 - RNA, 22 nt, Artificial Sequence
  Synthetic
guaaugccagcuacucgguagg

SEQ ID NO: 588761 - RNA, 23 nt, Artificial Sequence
  Synthetic
uguaaugccagcuacucgguagg

SEQ ID NO: 588762 - RNA, 24 nt, Artificial Sequence
  Synthetic
cuguaaugccagcuacucgguagg

SEQ ID NO: 588763 - RNA, 18 nt, Artificial Sequence
  Synthetic
aacacuuggaaggguagg

SEQ ID NO: 588764 - RNA, 19 nt, Artificial Sequence
  Synthetic
aaacacuuggaaggguagg

SEQ ID NO: 588765 - RNA, 20 nt, Artificial Sequence
  Synthetic
aaaacacuuggaaggguagg

SEQ ID NO: 588766 - RNA, 21 nt, Artificial Sequence
  Synthetic
gaaaacacuuggaaggguagg

SEQ ID NO: 588767 - RNA, 22 nt, Artificial Sequence
  Synthetic
ggaaaacacuuggaaggguagg

SEQ ID NO: 588768 - RNA, 23 nt, Artificial Sequence
  Synthetic
uggaaaacacuuggaaggguagg

SEQ ID NO: 588769 - RNA, 24 nt, Artificial Sequence
  Synthetic
auggaaaacacuuggaaggguagg

SEQ ID NO: 588770 - RNA, 18 nt, Artificial Sequence
  Synthetic
auuuggauuugggguagg

SEQ ID NO: 588771 - RNA, 19 nt, Artificial Sequence
  Synthetic
cauuuggauuugggguagg

SEQ ID NO: 588772 - RNA, 20 nt, Artificial Sequence
  Synthetic
ccauuuggauuugggguagg

SEQ ID NO: 588773 - RNA, 21 nt, Artificial Sequence
  Synthetic
uccauuuggauuugggguagg

SEQ ID NO: 588774 - RNA, 22 nt, Artificial Sequence
  Synthetic
cuccauuuggauuugggguagg

SEQ ID NO: 588775 - RNA, 23 nt, Artificial Sequence
  Synthetic
ucuccauuuggauuugggguagg

SEQ ID NO: 588776 - RNA, 24 nt, Artificial Sequence
  Synthetic
aucuccauuuggauuugggguagg

SEQ ID NO: 588777 - RNA, 18 nt, Artificial Sequence
  Synthetic
gagcagaugauggguagg

SEQ ID NO: 588778 - RNA, 19 nt, Artificial Sequence
  Synthetic
agagcagaugauggguagg

SEQ ID NO: 588779 - RNA, 20 nt, Artificial Sequence
  Synthetic
uagagcagaugauggguagg

SEQ ID NO: 588780 - RNA, 21 nt, Artificial Sequence
  Synthetic
guagagcagaugauggguagg

SEQ ID NO: 588781 - RNA, 22 nt, Artificial Sequence
  Synthetic
gguagagcagaugauggguagg

SEQ ID NO: 588782 - RNA, 23 nt, Artificial Sequence
  Synthetic
ggguagagcagaugauggguagg

SEQ ID NO: 588783 - RNA, 24 nt, Artificial Sequence
  Synthetic
aggguagagcagaugauggguagg

SEQ ID NO: 588784 - RNA, 18 nt, Artificial Sequence
  Synthetic
gugagccuuauggguagg

SEQ ID NO: 588785 - RNA, 19 nt, Artificial Sequence
  Synthetic
ugugagccuuauggguagg

SEQ ID NO: 588786 - RNA, 20 nt, Artificial Sequence
  Synthetic
cugugagccuuauggguagg

SEQ ID NO: 588787 - RNA, 21 nt, Artificial Sequence
  Synthetic
ucugugagccuuauggguagg

SEQ ID NO: 588788 - RNA, 22 nt, Artificial Sequence
  Synthetic
uucugugagccuuauggguagg

SEQ ID NO: 588789 - RNA, 23 nt, Artificial Sequence
  Synthetic
auucugugagccuuauggguagg

SEQ ID NO: 588790 - RNA, 24 nt, Artificial Sequence
  Synthetic
uauucugugagccuuauggguagg

SEQ ID NO: 588791 - RNA, 18 nt, Artificial Sequence
  Synthetic
caagcuauucaugguagg

SEQ ID NO: 588792 - RNA, 19 nt, Artificial Sequence
  Synthetic
ucaagcuauucaugguagg

SEQ ID NO: 588793 - RNA, 20 nt, Artificial Sequence
  Synthetic
aucaagcuauucaugguagg

SEQ ID NO: 588794 - RNA, 21 nt, Artificial Sequence
  Synthetic
uaucaagcuauucaugguagg

SEQ ID NO: 588795 - RNA, 22 nt, Artificial Sequence
  Synthetic
cuaucaagcuauucaugguagg

SEQ ID NO: 588796 - RNA, 23 nt, Artificial Sequence
  Synthetic
gcuaucaagcuauucaugguagg

SEQ ID NO: 588797 - RNA, 24 nt, Artificial Sequence
  Synthetic
agcuaucaagcuauucaugguagg

SEQ ID NO: 588798 - RNA, 18 nt, Artificial Sequence
  Synthetic
gggaaggguagugguagg

SEQ ID NO: 588799 - RNA, 19 nt, Artificial Sequence
  Synthetic
ugggaaggguagugguagg

SEQ ID NO: 588800 - RNA, 20 nt, Artificial Sequence
  Synthetic
cugggaaggguagugguagg

SEQ ID NO: 588801 - RNA, 21 nt, Artificial Sequence
  Synthetic
acugggaaggguagugguagg

SEQ ID NO: 588802 - RNA, 22 nt, Artificial Sequence
  Synthetic
gacugggaaggguagugguagg

SEQ ID NO: 588803 - RNA, 23 nt, Artificial Sequence
  Synthetic
agacugggaaggguagugguagg

SEQ ID NO: 588804 - RNA, 24 nt, Artificial Sequence
  Synthetic
gagacugggaaggguagugguagg

SEQ ID NO: 588805 - RNA, 18 nt, Artificial Sequence
  Synthetic
aaggagaagguugguagg

SEQ ID NO: 588806 - RNA, 19 nt, Artificial Sequence
  Synthetic
uaaggagaagguugguagg

SEQ ID NO: 588807 - RNA, 20 nt, Artificial Sequence
  Synthetic
guaaggagaagguugguagg

SEQ ID NO: 588808 - RNA, 21 nt, Artificial Sequence
  Synthetic
gguaaggagaagguugguagg

SEQ ID NO: 588809 - RNA, 22 nt, Artificial Sequence
  Synthetic
agguaaggagaagguugguagg

SEQ ID NO: 588810 - RNA, 23 nt, Artificial Sequence
  Synthetic
aagguaaggagaagguugguagg

SEQ ID NO: 588811 - RNA, 24 nt, Artificial Sequence
  Synthetic
aaagguaaggagaagguugguagg

SEQ ID NO: 588812 - RNA, 18 nt, Artificial Sequence
  Synthetic
cuuguggcuauauguagg

SEQ ID NO: 588813 - RNA, 19 nt, Artificial Sequence
  Synthetic
ucuuguggcuauauguagg

SEQ ID NO: 588814 - RNA, 20 nt, Artificial Sequence
  Synthetic
aucuuguggcuauauguagg

SEQ ID NO: 588815 - RNA, 21 nt, Artificial Sequence
  Synthetic
caucuuguggcuauauguagg

SEQ ID NO: 588816 - RNA, 22 nt, Artificial Sequence
  Synthetic
acaucuuguggcuauauguagg

SEQ ID NO: 588817 - RNA, 23 nt, Artificial Sequence
  Synthetic
aacaucuuguggcuauauguagg

SEQ ID NO: 588818 - RNA, 24 nt, Artificial Sequence
  Synthetic
aaacaucuuguggcuauauguagg

SEQ ID NO: 588819 - RNA, 18 nt, Artificial Sequence
  Synthetic
uauguuagucacuguagg

SEQ ID NO: 588820 - RNA, 19 nt, Artificial Sequence
  Synthetic
cuauguuagucacuguagg

SEQ ID NO: 588821 - RNA, 20 nt, Artificial Sequence
  Synthetic
ucuauguuagucacuguagg

SEQ ID NO: 588822 - RNA, 21 nt, Artificial Sequence
  Synthetic
aucuauguuagucacuguagg

SEQ ID NO: 588823 - RNA, 22 nt, Artificial Sequence
  Synthetic
caucuauguuagucacuguagg

SEQ ID NO: 588824 - RNA, 23 nt, Artificial Sequence
  Synthetic
gcaucuauguuagucacuguagg

SEQ ID NO: 588825 - RNA, 24 nt, Artificial Sequence
  Synthetic
cgcaucuauguuagucacuguagg

SEQ ID NO: 588826 - RNA, 18 nt, Artificial Sequence
  Synthetic
uuaucugcaaucuguagg

SEQ ID NO: 588827 - RNA, 19 nt, Artificial Sequence
  Synthetic
cuuaucugcaaucuguagg

SEQ ID NO: 588828 - RNA, 20 nt, Artificial Sequence
  Synthetic
ucuuaucugcaaucuguagg

SEQ ID NO: 588829 - RNA, 21 nt, Artificial Sequence
  Synthetic
uucuuaucugcaaucuguagg

SEQ ID NO: 588830 - RNA, 22 nt, Artificial Sequence
  Synthetic
uuucuuaucugcaaucuguagg

SEQ ID NO: 588831 - RNA, 23 nt, Artificial Sequence
  Synthetic
auuucuuaucugcaaucuguagg

SEQ ID NO: 588832 - RNA, 24 nt, Artificial Sequence
  Synthetic
cauuucuuaucugcaaucuguagg

SEQ ID NO: 588833 - RNA, 18 nt, Artificial Sequence
  Synthetic
uaucacacuaucuguagg

SEQ ID NO: 588834 - RNA, 19 nt, Artificial Sequence
  Synthetic
auaucacacuaucuguagg

SEQ ID NO: 588835 - RNA, 20 nt, Artificial Sequence
  Synthetic
aauaucacacuaucuguagg

SEQ ID NO: 588836 - RNA, 21 nt, Artificial Sequence
  Synthetic
aaauaucacacuaucuguagg

SEQ ID NO: 588837 - RNA, 22 nt, Artificial Sequence
  Synthetic
uaaauaucacacuaucuguagg

SEQ ID NO: 588838 - RNA, 23 nt, Artificial Sequence
  Synthetic
uuaaauaucacacuaucuguagg

SEQ ID NO: 588839 - RNA, 24 nt, Artificial Sequence
  Synthetic
auuaaauaucacacuaucuguagg

SEQ ID NO: 588840 - RNA, 18 nt, Artificial Sequence
  Synthetic
cagcaucuugaaauuagg

SEQ ID NO: 588841 - RNA, 19 nt, Artificial Sequence
  Synthetic
ccagcaucuugaaauuagg

SEQ ID NO: 588842 - RNA, 20 nt, Artificial Sequence
  Synthetic
accagcaucuugaaauuagg

SEQ ID NO: 588843 - RNA, 21 nt, Artificial Sequence
  Synthetic
aaccagcaucuugaaauuagg

SEQ ID NO: 588844 - RNA, 22 nt, Artificial Sequence
  Synthetic
gaaccagcaucuugaaauuagg

SEQ ID NO: 588845 - RNA, 23 nt, Artificial Sequence
  Synthetic
ggaaccagcaucuugaaauuagg

SEQ ID NO: 588846 - RNA, 24 nt, Artificial Sequence
  Synthetic
gggaaccagcaucuugaaauuagg

SEQ ID NO: 588847 - RNA, 18 nt, Artificial Sequence
  Synthetic
aaaccauaguaaauuagg

SEQ ID NO: 588848 - RNA, 19 nt, Artificial Sequence
  Synthetic
gaaaccauaguaaauuagg

SEQ ID NO: 588849 - RNA, 20 nt, Artificial Sequence
  Synthetic
ugaaaccauaguaaauuagg

SEQ ID NO: 588850 - RNA, 21 nt, Artificial Sequence
  Synthetic
cugaaaccauaguaaauuagg

SEQ ID NO: 588851 - RNA, 22 nt, Artificial Sequence
  Synthetic
acugaaaccauaguaaauuagg

SEQ ID NO: 588852 - RNA, 23 nt, Artificial Sequence
  Synthetic
gacugaaaccauaguaaauuagg

SEQ ID NO: 588853 - RNA, 24 nt, Artificial Sequence
  Synthetic
ugacugaaaccauaguaaauuagg

SEQ ID NO: 588854 - RNA, 18 nt, Artificial Sequence
  Synthetic
cuagccagagcaauuagg

SEQ ID NO: 588855 - RNA, 19 nt, Artificial Sequence
  Synthetic
ccuagccagagcaauuagg

SEQ ID NO: 588856 - RNA, 20 nt, Artificial Sequence
  Synthetic
uccuagccagagcaauuagg

SEQ ID NO: 588857 - RNA, 21 nt, Artificial Sequence
  Synthetic
guccuagccagagcaauuagg

SEQ ID NO: 588858 - RNA, 22 nt, Artificial Sequence
  Synthetic
aguccuagccagagcaauuagg

SEQ ID NO: 588859 - RNA, 23 nt, Artificial Sequence
  Synthetic
gaguccuagccagagcaauuagg

SEQ ID NO: 588860 - RNA, 24 nt, Artificial Sequence
  Synthetic
ggaguccuagccagagcaauuagg

SEQ ID NO: 588861 - RNA, 18 nt, Artificial Sequence
  Synthetic
guggagaugucaauuagg

SEQ ID NO: 588862 - RNA, 19 nt, Artificial Sequence
  Synthetic
aguggagaugucaauuagg

SEQ ID NO: 588863 - RNA, 20 nt, Artificial Sequence
  Synthetic
aaguggagaugucaauuagg

SEQ ID NO: 588864 - RNA, 21 nt, Artificial Sequence
  Synthetic
uaaguggagaugucaauuagg

SEQ ID NO: 588865 - RNA, 22 nt, Artificial Sequence
  Synthetic
uuaaguggagaugucaauuagg

SEQ ID NO: 588866 - RNA, 23 nt, Artificial Sequence
  Synthetic
uuuaaguggagaugucaauuagg

SEQ ID NO: 588867 - RNA, 24 nt, Artificial Sequence
  Synthetic
auuuaaguggagaugucaauuagg

SEQ ID NO: 588868 - RNA, 18 nt, Artificial Sequence
  Synthetic
aaauguaauuuaauuagg

SEQ ID NO: 588869 - RNA, 19 nt, Artificial Sequence
  Synthetic
aaaauguaauuuaauuagg

SEQ ID NO: 588870 - RNA, 20 nt, Artificial Sequence
  Synthetic
gaaaauguaauuuaauuagg

SEQ ID NO: 588871 - RNA, 21 nt, Artificial Sequence
  Synthetic
ugaaaauguaauuuaauuagg

SEQ ID NO: 588872 - RNA, 22 nt, Artificial Sequence
  Synthetic
uugaaaauguaauuuaauuagg

SEQ ID NO: 588873 - RNA, 23 nt, Artificial Sequence
  Synthetic
auugaaaauguaauuuaauuagg

SEQ ID NO: 588874 - RNA, 24 nt, Artificial Sequence
  Synthetic
aauugaaaauguaauuuaauuagg

SEQ ID NO: 588875 - RNA, 18 nt, Artificial Sequence
  Synthetic
aagaaagauaacauuagg

SEQ ID NO: 588876 - RNA, 19 nt, Artificial Sequence
  Synthetic
uaagaaagauaacauuagg

SEQ ID NO: 588877 - RNA, 20 nt, Artificial Sequence
  Synthetic
cuaagaaagauaacauuagg

SEQ ID NO: 588878 - RNA, 21 nt, Artificial Sequence
  Synthetic
ucuaagaaagauaacauuagg

SEQ ID NO: 588879 - RNA, 22 nt, Artificial Sequence
  Synthetic
aucuaagaaagauaacauuagg

SEQ ID NO: 588880 - RNA, 23 nt, Artificial Sequence
  Synthetic
uaucuaagaaagauaacauuagg

SEQ ID NO: 588881 - RNA, 24 nt, Artificial Sequence
  Synthetic
uuaucuaagaaagauaacauuagg

SEQ ID NO: 588882 - RNA, 18 nt, Artificial Sequence
  Synthetic
aagucugcucacauuagg

SEQ ID NO: 588883 - RNA, 19 nt, Artificial Sequence
  Synthetic
gaagucugcucacauuagg

SEQ ID NO: 588884 - RNA, 20 nt, Artificial Sequence
  Synthetic
ugaagucugcucacauuagg

SEQ ID NO: 588885 - RNA, 21 nt, Artificial Sequence
  Synthetic
augaagucugcucacauuagg

SEQ ID NO: 588886 - RNA, 22 nt, Artificial Sequence
  Synthetic
caugaagucugcucacauuagg

SEQ ID NO: 588887 - RNA, 23 nt, Artificial Sequence
  Synthetic
acaugaagucugcucacauuagg

SEQ ID NO: 588888 - RNA, 24 nt, Artificial Sequence
  Synthetic
uacaugaagucugcucacauuagg

SEQ ID NO: 588889 - RNA, 18 nt, Artificial Sequence
  Synthetic
cucuagaaguccauuagg

SEQ ID NO: 588890 - RNA, 19 nt, Artificial Sequence
  Synthetic
gcucuagaaguccauuagg

SEQ ID NO: 588891 - RNA, 20 nt, Artificial Sequence
  Synthetic
agcucuagaaguccauuagg

SEQ ID NO: 588892 - RNA, 21 nt, Artificial Sequence
  Synthetic
aagcucuagaaguccauuagg

SEQ ID NO: 588893 - RNA, 22 nt, Artificial Sequence
  Synthetic
aaagcucuagaaguccauuagg

SEQ ID NO: 588894 - RNA, 23 nt, Artificial Sequence
  Synthetic
gaaagcucuagaaguccauuagg

SEQ ID NO: 588895 - RNA, 24 nt, Artificial Sequence
  Synthetic
agaaagcucuagaaguccauuagg

SEQ ID NO: 588896 - RNA, 18 nt, Artificial Sequence
  Synthetic
guagucugcaggauuagg

SEQ ID NO: 588897 - RNA, 19 nt, Artificial Sequence
  Synthetic
uguagucugcaggauuagg

SEQ ID NO: 588898 - RNA, 20 nt, Artificial Sequence
  Synthetic
cuguagucugcaggauuagg

SEQ ID NO: 588899 - RNA, 21 nt, Artificial Sequence
  Synthetic
ucuguagucugcaggauuagg

SEQ ID NO: 588900 - RNA, 22 nt, Artificial Sequence
  Synthetic
uucuguagucugcaggauuagg

SEQ ID NO: 588901 - RNA, 23 nt, Artificial Sequence
  Synthetic
uuucuguagucugcaggauuagg

SEQ ID NO: 588902 - RNA, 24 nt, Artificial Sequence
  Synthetic
uuuucuguagucugcaggauuagg

SEQ ID NO: 588903 - RNA, 18 nt, Artificial Sequence
  Synthetic
aaucuaaacuggauuagg

SEQ ID NO: 588904 - RNA, 19 nt, Artificial Sequence
  Synthetic
gaaucuaaacuggauuagg

SEQ ID NO: 588905 - RNA, 20 nt, Artificial Sequence
  Synthetic
ggaaucuaaacuggauuagg

SEQ ID NO: 588906 - RNA, 21 nt, Artificial Sequence
  Synthetic
uggaaucuaaacuggauuagg

SEQ ID NO: 588907 - RNA, 22 nt, Artificial Sequence
  Synthetic
guggaaucuaaacuggauuagg

SEQ ID NO: 588908 - RNA, 23 nt, Artificial Sequence
  Synthetic
uguggaaucuaaacuggauuagg

SEQ ID NO: 588909 - RNA, 24 nt, Artificial Sequence
  Synthetic
cuguggaaucuaaacuggauuagg

SEQ ID NO: 588910 - RNA, 18 nt, Artificial Sequence
  Synthetic
uccucaagauuuauuagg

SEQ ID NO: 588911 - RNA, 19 nt, Artificial Sequence
  Synthetic
uuccucaagauuuauuagg

SEQ ID NO: 588912 - RNA, 20 nt, Artificial Sequence
  Synthetic
uuuccucaagauuuauuagg

SEQ ID NO: 588913 - RNA, 21 nt, Artificial Sequence
  Synthetic
guuuccucaagauuuauuagg

SEQ ID NO: 588914 - RNA, 22 nt, Artificial Sequence
  Synthetic
aguuuccucaagauuuauuagg

SEQ ID NO: 588915 - RNA, 23 nt, Artificial Sequence
  Synthetic
uaguuuccucaagauuuauuagg

SEQ ID NO: 588916 - RNA, 24 nt, Artificial Sequence
  Synthetic
uuaguuuccucaagauuuauuagg

SEQ ID NO: 588917 - RNA, 18 nt, Artificial Sequence
  Synthetic
cggugaaagugacuuagg

SEQ ID NO: 588918 - RNA, 19 nt, Artificial Sequence
  Synthetic
ucggugaaagugacuuagg

SEQ ID NO: 588919 - RNA, 20 nt, Artificial Sequence
  Synthetic
cucggugaaagugacuuagg

SEQ ID NO: 588920 - RNA, 21 nt, Artificial Sequence
  Synthetic
ccucggugaaagugacuuagg

SEQ ID NO: 588921 - RNA, 22 nt, Artificial Sequence
  Synthetic
cccucggugaaagugacuuagg

SEQ ID NO: 588922 - RNA, 23 nt, Artificial Sequence
  Synthetic
ucccucggugaaagugacuuagg

SEQ ID NO: 588923 - RNA, 24 nt, Artificial Sequence
  Synthetic
gucccucggugaaagugacuuagg

SEQ ID NO: 588924 - RNA, 18 nt, Artificial Sequence
  Synthetic
gaauucaaauaccuuagg

SEQ ID NO: 588925 - RNA, 19 nt, Artificial Sequence
  Synthetic
agaauucaaauaccuuagg

SEQ ID NO: 588926 - RNA, 20 nt, Artificial Sequence
  Synthetic
aagaauucaaauaccuuagg

SEQ ID NO: 588927 - RNA, 21 nt, Artificial Sequence
  Synthetic
uaagaauucaaauaccuuagg

SEQ ID NO: 588928 - RNA, 22 nt, Artificial Sequence
  Synthetic
auaagaauucaaauaccuuagg

SEQ ID NO: 588929 - RNA, 23 nt, Artificial Sequence
  Synthetic
uauaagaauucaaauaccuuagg

SEQ ID NO: 588930 - RNA, 24 nt, Artificial Sequence
  Synthetic
uuauaagaauucaaauaccuuagg

SEQ ID NO: 588931 - RNA, 18 nt, Artificial Sequence
  Synthetic
auuaauuuacuccuuagg

SEQ ID NO: 588932 - RNA, 19 nt, Artificial Sequence
  Synthetic
aauuaauuuacuccuuagg

SEQ ID NO: 588933 - RNA, 20 nt, Artificial Sequence
  Synthetic
aaauuaauuuacuccuuagg

SEQ ID NO: 588934 - RNA, 21 nt, Artificial Sequence
  Synthetic
uaaauuaauuuacuccuuagg

SEQ ID NO: 588935 - RNA, 22 nt, Artificial Sequence
  Synthetic
auaaauuaauuuacuccuuagg

SEQ ID NO: 588936 - RNA, 23 nt, Artificial Sequence
  Synthetic
uauaaauuaauuuacuccuuagg

SEQ ID NO: 588937 - RNA, 24 nt, Artificial Sequence
  Synthetic
auauaaauuaauuuacuccuuagg

SEQ ID NO: 588938 - RNA, 18 nt, Artificial Sequence
  Synthetic
uauucacaguaucuuagg

SEQ ID NO: 588939 - RNA, 19 nt, Artificial Sequence
  Synthetic
auauucacaguaucuuagg

SEQ ID NO: 588940 - RNA, 20 nt, Artificial Sequence
  Synthetic
uauauucacaguaucuuagg

SEQ ID NO: 588941 - RNA, 21 nt, Artificial Sequence
  Synthetic
auauauucacaguaucuuagg

SEQ ID NO: 588942 - RNA, 22 nt, Artificial Sequence
  Synthetic
uauauauucacaguaucuuagg

SEQ ID NO: 588943 - RNA, 23 nt, Artificial Sequence
  Synthetic
auauauauucacaguaucuuagg

SEQ ID NO: 588944 - RNA, 24 nt, Artificial Sequence
  Synthetic
gauauauauucacaguaucuuagg

SEQ ID NO: 588945 - RNA, 18 nt, Artificial Sequence
  Synthetic
cauguucucacucuuagg

SEQ ID NO: 588946 - RNA, 19 nt, Artificial Sequence
  Synthetic
gcauguucucacucuuagg

SEQ ID NO: 588947 - RNA, 20 nt, Artificial Sequence
  Synthetic
cgcauguucucacucuuagg

SEQ ID NO: 588948 - RNA, 21 nt, Artificial Sequence
  Synthetic
gcgcauguucucacucuuagg

SEQ ID NO: 588949 - RNA, 22 nt, Artificial Sequence
  Synthetic
agcgcauguucucacucuuagg

SEQ ID NO: 588950 - RNA, 23 nt, Artificial Sequence
  Synthetic
cagcgcauguucucacucuuagg

SEQ ID NO: 588951 - RNA, 24 nt, Artificial Sequence
  Synthetic
acagcgcauguucucacucuuagg

SEQ ID NO: 588952 - RNA, 18 nt, Artificial Sequence
  Synthetic
cacaacaucucucuuagg

SEQ ID NO: 588953 - RNA, 19 nt, Artificial Sequence
  Synthetic
ccacaacaucucucuuagg

SEQ ID NO: 588954 - RNA, 20 nt, Artificial Sequence
  Synthetic
cccacaacaucucucuuagg

SEQ ID NO: 588955 - RNA, 21 nt, Artificial Sequence
  Synthetic
ucccacaacaucucucuuagg

SEQ ID NO: 588956 - RNA, 22 nt, Artificial Sequence
  Synthetic
uucccacaacaucucucuuagg

SEQ ID NO: 588957 - RNA, 23 nt, Artificial Sequence
  Synthetic
auucccacaacaucucucuuagg

SEQ ID NO: 588958 - RNA, 24 nt, Artificial Sequence
  Synthetic
aauucccacaacaucucucuuagg

SEQ ID NO: 588959 - RNA, 18 nt, Artificial Sequence
  Synthetic
uaaaaaaguucucuuagg

SEQ ID NO: 588960 - RNA, 19 nt, Artificial Sequence
  Synthetic
cuaaaaaaguucucuuagg

SEQ ID NO: 588961 - RNA, 20 nt, Artificial Sequence
  Synthetic
acuaaaaaaguucucuuagg

SEQ ID NO: 588962 - RNA, 21 nt, Artificial Sequence
  Synthetic
uacuaaaaaaguucucuuagg

SEQ ID NO: 588963 - RNA, 22 nt, Artificial Sequence
  Synthetic
auacuaaaaaaguucucuuagg

SEQ ID NO: 588964 - RNA, 23 nt, Artificial Sequence
  Synthetic
uauacuaaaaaaguucucuuagg

SEQ ID NO: 588965 - RNA, 24 nt, Artificial Sequence
  Synthetic
auauacuaaaaaaguucucuuagg

SEQ ID NO: 588966 - RNA, 21 nt, Artificial Sequence
  Synthetic
ggccucauaaaaagaguuagg

SEQ ID NO: 588967 - RNA, 22 nt, Artificial Sequence
  Synthetic
uggccucauaaaaagaguuagg

SEQ ID NO: 588968 - RNA, 23 nt, Artificial Sequence
  Synthetic
cuggccucauaaaaagaguuagg

SEQ ID NO: 588969 - RNA, 24 nt, Artificial Sequence
  Synthetic
gcuggccucauaaaaagaguuagg

SEQ ID NO: 588970 - RNA, 18 nt, Artificial Sequence
  Synthetic
gagacccuaauaguuagg

SEQ ID NO: 588971 - RNA, 19 nt, Artificial Sequence
  Synthetic
agagacccuaauaguuagg

SEQ ID NO: 588972 - RNA, 20 nt, Artificial Sequence
  Synthetic
aagagacccuaauaguuagg

SEQ ID NO: 588973 - RNA, 21 nt, Artificial Sequence
  Synthetic
caagagacccuaauaguuagg

SEQ ID NO: 588974 - RNA, 22 nt, Artificial Sequence
  Synthetic
acaagagacccuaauaguuagg

SEQ ID NO: 588975 - RNA, 23 nt, Artificial Sequence
  Synthetic
uacaagagacccuaauaguuagg

SEQ ID NO: 588976 - RNA, 24 nt, Artificial Sequence
  Synthetic
auacaagagacccuaauaguuagg

SEQ ID NO: 588977 - RNA, 18 nt, Artificial Sequence
  Synthetic
aggauuauuauaguuagg

SEQ ID NO: 588978 - RNA, 19 nt, Artificial Sequence
  Synthetic
caggauuauuauaguuagg

SEQ ID NO: 588979 - RNA, 20 nt, Artificial Sequence
  Synthetic
ucaggauuauuauaguuagg

SEQ ID NO: 588980 - RNA, 21 nt, Artificial Sequence
  Synthetic
aucaggauuauuauaguuagg

SEQ ID NO: 588981 - RNA, 22 nt, Artificial Sequence
  Synthetic
caucaggauuauuauaguuagg

SEQ ID NO: 588982 - RNA, 23 nt, Artificial Sequence
  Synthetic
ucaucaggauuauuauaguuagg

SEQ ID NO: 588983 - RNA, 24 nt, Artificial Sequence
  Synthetic
uucaucaggauuauuauaguuagg

SEQ ID NO: 588984 - RNA, 18 nt, Artificial Sequence
  Synthetic
ggaauggcaaagguuagg

SEQ ID NO: 588985 - RNA, 19 nt, Artificial Sequence
  Synthetic
aggaauggcaaagguuagg

SEQ ID NO: 588986 - RNA, 20 nt, Artificial Sequence
  Synthetic
gaggaauggcaaagguuagg

SEQ ID NO: 588987 - RNA, 21 nt, Artificial Sequence
  Synthetic
ggaggaauggcaaagguuagg

SEQ ID NO: 588988 - RNA, 22 nt, Artificial Sequence
  Synthetic
gggaggaauggcaaagguuagg

SEQ ID NO: 588989 - RNA, 23 nt, Artificial Sequence
  Synthetic
agggaggaauggcaaagguuagg

SEQ ID NO: 588990 - RNA, 24 nt, Artificial Sequence
  Synthetic
aagggaggaauggcaaagguuagg

SEQ ID NO: 588991 - RNA, 18 nt, Artificial Sequence
  Synthetic
uucacagaucauguuagg

SEQ ID NO: 588992 - RNA, 19 nt, Artificial Sequence
  Synthetic
uuucacagaucauguuagg

SEQ ID NO: 588993 - RNA, 20 nt, Artificial Sequence
  Synthetic
uuuucacagaucauguuagg

SEQ ID NO: 588994 - RNA, 21 nt, Artificial Sequence
  Synthetic
auuuucacagaucauguuagg

SEQ ID NO: 588995 - RNA, 22 nt, Artificial Sequence
  Synthetic
uauuuucacagaucauguuagg

SEQ ID NO: 588996 - RNA, 23 nt, Artificial Sequence
  Synthetic
uuauuuucacagaucauguuagg

SEQ ID NO: 588997 - RNA, 24 nt, Artificial Sequence
  Synthetic
cuuauuuucacagaucauguuagg

SEQ ID NO: 588998 - RNA, 18 nt, Artificial Sequence
  Synthetic
ucagaaacgaaauuuagg

SEQ ID NO: 588999 - RNA, 19 nt, Artificial Sequence
  Synthetic
aucagaaacgaaauuuagg

SEQ ID NO: 589000 - RNA, 20 nt, Artificial Sequence
  Synthetic
gaucagaaacgaaauuuagg

SEQ ID NO: 589001 - RNA, 21 nt, Artificial Sequence
  Synthetic
ggaucagaaacgaaauuuagg

SEQ ID NO: 589002 - RNA, 22 nt, Artificial Sequence
  Synthetic
aggaucagaaacgaaauuuagg

SEQ ID NO: 589003 - RNA, 23 nt, Artificial Sequence
  Synthetic
aaggaucagaaacgaaauuuagg

SEQ ID NO: 589004 - RNA, 24 nt, Artificial Sequence
  Synthetic
uaaggaucagaaacgaaauuuagg

SEQ ID NO: 589005 - RNA, 18 nt, Artificial Sequence
  Synthetic
ugacucuaagaauuuagg

SEQ ID NO: 589006 - RNA, 19 nt, Artificial Sequence
  Synthetic
uugacucuaagaauuuagg

SEQ ID NO: 589007 - RNA, 20 nt, Artificial Sequence
  Synthetic
guugacucuaagaauuuagg

SEQ ID NO: 589008 - RNA, 21 nt, Artificial Sequence
  Synthetic
uguugacucuaagaauuuagg

SEQ ID NO: 589009 - RNA, 22 nt, Artificial Sequence
  Synthetic
uuguugacucuaagaauuuagg

SEQ ID NO: 589010 - RNA, 23 nt, Artificial Sequence
  Synthetic
auuguugacucuaagaauuuagg

SEQ ID NO: 589011 - RNA, 24 nt, Artificial Sequence
  Synthetic
aauuguugacucuaagaauuuagg

SEQ ID NO: 589012 - RNA, 18 nt, Artificial Sequence
  Synthetic
caucaccaugaauuuagg

SEQ ID NO: 589013 - RNA, 19 nt, Artificial Sequence
  Synthetic
acaucaccaugaauuuagg

SEQ ID NO: 589014 - RNA, 20 nt, Artificial Sequence
  Synthetic
gacaucaccaugaauuuagg

SEQ ID NO: 589015 - RNA, 21 nt, Artificial Sequence
  Synthetic
ugacaucaccaugaauuuagg

SEQ ID NO: 589016 - RNA, 22 nt, Artificial Sequence
  Synthetic
augacaucaccaugaauuuagg

SEQ ID NO: 589017 - RNA, 23 nt, Artificial Sequence
  Synthetic
aaugacaucaccaugaauuuagg

SEQ ID NO: 589018 - RNA, 24 nt, Artificial Sequence
  Synthetic
aaaugacaucaccaugaauuuagg

SEQ ID NO: 589019 - RNA, 18 nt, Artificial Sequence
  Synthetic
gaacaugaauaauuuagg

SEQ ID NO: 589020 - RNA, 19 nt, Artificial Sequence
  Synthetic
cgaacaugaauaauuuagg

SEQ ID NO: 589021 - RNA, 20 nt, Artificial Sequence
  Synthetic
ccgaacaugaauaauuuagg

SEQ ID NO: 589022 - RNA, 21 nt, Artificial Sequence
  Synthetic
cccgaacaugaauaauuuagg

SEQ ID NO: 589023 - RNA, 22 nt, Artificial Sequence
  Synthetic
ccccgaacaugaauaauuuagg

SEQ ID NO: 589024 - RNA, 23 nt, Artificial Sequence
  Synthetic
cccccgaacaugaauaauuuagg

SEQ ID NO: 589025 - RNA, 24 nt, Artificial Sequence
  Synthetic
ucccccgaacaugaauaauuuagg

SEQ ID NO: 589026 - RNA, 18 nt, Artificial Sequence
  Synthetic
caaggugugagauuuagg

SEQ ID NO: 589027 - RNA, 19 nt, Artificial Sequence
  Synthetic
acaaggugugagauuuagg

SEQ ID NO: 589028 - RNA, 20 nt, Artificial Sequence
  Synthetic
uacaaggugugagauuuagg

SEQ ID NO: 589029 - RNA, 21 nt, Artificial Sequence
  Synthetic
uuacaaggugugagauuuagg

SEQ ID NO: 589030 - RNA, 22 nt, Artificial Sequence
  Synthetic
uuuacaaggugugagauuuagg

SEQ ID NO: 589031 - RNA, 23 nt, Artificial Sequence
  Synthetic
uuuuacaaggugugagauuuagg

SEQ ID NO: 589032 - RNA, 24 nt, Artificial Sequence
  Synthetic
uuuuuacaaggugugagauuuagg

SEQ ID NO: 589033 - RNA, 18 nt, Artificial Sequence
  Synthetic
guacugaaaugauuuagg

SEQ ID NO: 589034 - RNA, 19 nt, Artificial Sequence
  Synthetic
uguacugaaaugauuuagg

SEQ ID NO: 589035 - RNA, 20 nt, Artificial Sequence
  Synthetic
guguacugaaaugauuuagg

SEQ ID NO: 589036 - RNA, 21 nt, Artificial Sequence
  Synthetic
uguguacugaaaugauuuagg

SEQ ID NO: 589037 - RNA, 22 nt, Artificial Sequence
  Synthetic
uuguguacugaaaugauuuagg

SEQ ID NO: 589038 - RNA, 23 nt, Artificial Sequence
  Synthetic
uuuguguacugaaaugauuuagg

SEQ ID NO: 589039 - RNA, 24 nt, Artificial Sequence
  Synthetic
uuuuguguacugaaaugauuuagg

SEQ ID NO: 589040 - RNA, 18 nt, Artificial Sequence
  Synthetic
auaaauucauuauuuagg

SEQ ID NO: 589041 - RNA, 19 nt, Artificial Sequence
  Synthetic
uauaaauucauuauuuagg

SEQ ID NO: 589042 - RNA, 20 nt, Artificial Sequence
  Synthetic
cuauaaauucauuauuuagg

SEQ ID NO: 589043 - RNA, 21 nt, Artificial Sequence
  Synthetic
ucuauaaauucauuauuuagg

SEQ ID NO: 589044 - RNA, 22 nt, Artificial Sequence
  Synthetic
aucuauaaauucauuauuuagg

SEQ ID NO: 589045 - RNA, 23 nt, Artificial Sequence
  Synthetic
caucuauaaauucauuauuuagg

SEQ ID NO: 589046 - RNA, 24 nt, Artificial Sequence
  Synthetic
gcaucuauaaauucauuauuuagg

SEQ ID NO: 589047 - RNA, 18 nt, Artificial Sequence
  Synthetic
gauuugaaugccuuuagg

SEQ ID NO: 589048 - RNA, 19 nt, Artificial Sequence
  Synthetic
ugauuugaaugccuuuagg

SEQ ID NO: 589049 - RNA, 20 nt, Artificial Sequence
  Synthetic
augauuugaaugccuuuagg

SEQ ID NO: 589050 - RNA, 21 nt, Artificial Sequence
  Synthetic
aaugauuugaaugccuuuagg

SEQ ID NO: 589051 - RNA, 22 nt, Artificial Sequence
  Synthetic
uaaugauuugaaugccuuuagg

SEQ ID NO: 589052 - RNA, 23 nt, Artificial Sequence
  Synthetic
uuaaugauuugaaugccuuuagg

SEQ ID NO: 589053 - RNA, 24 nt, Artificial Sequence
  Synthetic
auuaaugauuugaaugccuuuagg

SEQ ID NO: 589054 - RNA, 18 nt, Artificial Sequence
  Synthetic
ggaugaagaggcuuuagg

SEQ ID NO: 589055 - RNA, 19 nt, Artificial Sequence
  Synthetic
aggaugaagaggcuuuagg

SEQ ID NO: 589056 - RNA, 20 nt, Artificial Sequence
  Synthetic
aaggaugaagaggcuuuagg

SEQ ID NO: 589057 - RNA, 21 nt, Artificial Sequence
  Synthetic
aaaggaugaagaggcuuuagg

SEQ ID NO: 589058 - RNA, 22 nt, Artificial Sequence
  Synthetic
caaaggaugaagaggcuuuagg

SEQ ID NO: 589059 - RNA, 23 nt, Artificial Sequence
  Synthetic
acaaaggaugaagaggcuuuagg

SEQ ID NO: 589060 - RNA, 24 nt, Artificial Sequence
  Synthetic
uacaaaggaugaagaggcuuuagg

SEQ ID NO: 589061 - RNA, 18 nt, Artificial Sequence
  Synthetic
uguucaugaggcuuuagg

SEQ ID NO: 589062 - RNA, 19 nt, Artificial Sequence
  Synthetic
uuguucaugaggcuuuagg

SEQ ID NO: 589063 - RNA, 20 nt, Artificial Sequence
  Synthetic
uuuguucaugaggcuuuagg

SEQ ID NO: 589064 - RNA, 21 nt, Artificial Sequence
  Synthetic
guuuguucaugaggcuuuagg

SEQ ID NO: 589065 - RNA, 22 nt, Artificial Sequence
  Synthetic
gguuuguucaugaggcuuuagg

SEQ ID NO: 589066 - RNA, 23 nt, Artificial Sequence
  Synthetic
agguuuguucaugaggcuuuagg

SEQ ID NO: 589067 - RNA, 24 nt, Artificial Sequence
  Synthetic
gagguuuguucaugaggcuuuagg

SEQ ID NO: 589068 - RNA, 18 nt, Artificial Sequence
  Synthetic
aaagguguuggcuuuagg

SEQ ID NO: 589069 - RNA, 19 nt, Artificial Sequence
  Synthetic
aaaagguguuggcuuuagg

SEQ ID NO: 589070 - RNA, 20 nt, Artificial Sequence
  Synthetic
uaaaagguguuggcuuuagg

SEQ ID NO: 589071 - RNA, 21 nt, Artificial Sequence
  Synthetic
uuaaaagguguuggcuuuagg

SEQ ID NO: 589072 - RNA, 22 nt, Artificial Sequence
  Synthetic
auuaaaagguguuggcuuuagg

SEQ ID NO: 589073 - RNA, 23 nt, Artificial Sequence
  Synthetic
aauuaaaagguguuggcuuuagg

SEQ ID NO: 589074 - RNA, 24 nt, Artificial Sequence
  Synthetic
uaauuaaaagguguuggcuuuagg

SEQ ID NO: 589075 - RNA, 18 nt, Artificial Sequence
  Synthetic
gacaauucugucuuuagg

SEQ ID NO: 589076 - RNA, 19 nt, Artificial Sequence
  Synthetic
ugacaauucugucuuuagg

SEQ ID NO: 589077 - RNA, 20 nt, Artificial Sequence
  Synthetic
gugacaauucugucuuuagg

SEQ ID NO: 589078 - RNA, 21 nt, Artificial Sequence
  Synthetic
cgugacaauucugucuuuagg

SEQ ID NO: 589079 - RNA, 22 nt, Artificial Sequence
  Synthetic
ccgugacaauucugucuuuagg

SEQ ID NO: 589080 - RNA, 23 nt, Artificial Sequence
  Synthetic
gccgugacaauucugucuuuagg

SEQ ID NO: 589081 - RNA, 24 nt, Artificial Sequence
  Synthetic
agccgugacaauucugucuuuagg

SEQ ID NO: 589082 - RNA, 18 nt, Artificial Sequence
  Synthetic
aauaaagcaaaguuuagg

SEQ ID NO: 589083 - RNA, 19 nt, Artificial Sequence
  Synthetic
aaauaaagcaaaguuuagg

SEQ ID NO: 589084 - RNA, 20 nt, Artificial Sequence
  Synthetic
aaaauaaagcaaaguuuagg

SEQ ID NO: 589085 - RNA, 21 nt, Artificial Sequence
  Synthetic
aaaaauaaagcaaaguuuagg

SEQ ID NO: 589086 - RNA, 22 nt, Artificial Sequence
  Synthetic
aaaaaauaaagcaaaguuuagg

SEQ ID NO: 589087 - RNA, 23 nt, Artificial Sequence
  Synthetic
aaaaaaauaaagcaaaguuuagg

SEQ ID NO: 589088 - RNA, 24 nt, Artificial Sequence
  Synthetic
gaaaaaaauaaagcaaaguuuagg

SEQ ID NO: 589089 - RNA, 18 nt, Artificial Sequence
  Synthetic
ucaggaaagguguuuagg

SEQ ID NO: 589090 - RNA, 19 nt, Artificial Sequence
  Synthetic
cucaggaaagguguuuagg

SEQ ID NO: 589091 - RNA, 20 nt, Artificial Sequence
  Synthetic
gcucaggaaagguguuuagg

SEQ ID NO: 589092 - RNA, 21 nt, Artificial Sequence
  Synthetic
ugcucaggaaagguguuuagg

SEQ ID NO: 589093 - RNA, 22 nt, Artificial Sequence
  Synthetic
uugcucaggaaagguguuuagg

SEQ ID NO: 589094 - RNA, 23 nt, Artificial Sequence
  Synthetic
auugcucaggaaagguguuuagg

SEQ ID NO: 589095 - RNA, 24 nt, Artificial Sequence
  Synthetic
gauugcucaggaaagguguuuagg

SEQ ID NO: 589096 - RNA, 18 nt, Artificial Sequence
  Synthetic
ggggaggauuauuuuagg

SEQ ID NO: 589097 - RNA, 19 nt, Artificial Sequence
  Synthetic
gggggaggauuauuuuagg

SEQ ID NO: 589098 - RNA, 20 nt, Artificial Sequence
  Synthetic
cgggggaggauuauuuuagg

SEQ ID NO: 589099 - RNA, 21 nt, Artificial Sequence
  Synthetic
acgggggaggauuauuuuagg

SEQ ID NO: 589100 - RNA, 22 nt, Artificial Sequence
  Synthetic
aacgggggaggauuauuuuagg

SEQ ID NO: 589101 - RNA, 23 nt, Artificial Sequence
  Synthetic
aaacgggggaggauuauuuuagg

SEQ ID NO: 589102 - RNA, 24 nt, Artificial Sequence
  Synthetic
gaaacgggggaggauuauuuuagg

SEQ ID NO: 589103 - RNA, 18 nt, Artificial Sequence
  Synthetic
uuacugaaggcuuuuagg

SEQ ID NO: 589104 - RNA, 19 nt, Artificial Sequence
  Synthetic
auuacugaaggcuuuuagg

SEQ ID NO: 589105 - RNA, 20 nt, Artificial Sequence
  Synthetic
aauuacugaaggcuuuuagg

SEQ ID NO: 589106 - RNA, 21 nt, Artificial Sequence
  Synthetic
gaauuacugaaggcuuuuagg

SEQ ID NO: 589107 - RNA, 22 nt, Artificial Sequence
  Synthetic
agaauuacugaaggcuuuuagg

SEQ ID NO: 589108 - RNA, 23 nt, Artificial Sequence
  Synthetic
aagaauuacugaaggcuuuuagg

SEQ ID NO: 589109 - RNA, 24 nt, Artificial Sequence
  Synthetic
uaagaauuacugaaggcuuuuagg

SEQ ID NO: 589110 - RNA, 18 nt, Artificial Sequence
  Synthetic
augacaucccuuuuuagg

SEQ ID NO: 589111 - RNA, 19 nt, Artificial Sequence
  Synthetic
aaugacaucccuuuuuagg

SEQ ID NO: 589112 - RNA, 20 nt, Artificial Sequence
  Synthetic
aaaugacaucccuuuuuagg

SEQ ID NO: 589113 - RNA, 21 nt, Artificial Sequence
  Synthetic
uaaaugacaucccuuuuuagg

SEQ ID NO: 589114 - RNA, 22 nt, Artificial Sequence
  Synthetic
uuaaaugacaucccuuuuuagg

SEQ ID NO: 589115 - RNA, 23 nt, Artificial Sequence
  Synthetic
auuaaaugacaucccuuuuuagg

SEQ ID NO: 589116 - RNA, 24 nt, Artificial Sequence
  Synthetic
gauuaaaugacaucccuuuuuagg

SEQ ID NO: 589117 - RNA, 18 nt, Artificial Sequence
  Synthetic
gugaguagaaagaaacgg

SEQ ID NO: 589118 - RNA, 19 nt, Artificial Sequence
  Synthetic
ggugaguagaaagaaacgg

SEQ ID NO: 589119 - RNA, 20 nt, Artificial Sequence
  Synthetic
aggugaguagaaagaaacgg

SEQ ID NO: 589120 - RNA, 21 nt, Artificial Sequence
  Synthetic
uaggugaguagaaagaaacgg

SEQ ID NO: 589121 - RNA, 22 nt, Artificial Sequence
  Synthetic
auaggugaguagaaagaaacgg

SEQ ID NO: 589122 - RNA, 23 nt, Artificial Sequence
  Synthetic
aauaggugaguagaaagaaacgg

SEQ ID NO: 589123 - RNA, 24 nt, Artificial Sequence
  Synthetic
aaauaggugaguagaaagaaacgg

SEQ ID NO: 589124 - RNA, 18 nt, Artificial Sequence
  Synthetic
agccacauggagaaacgg

SEQ ID NO: 589125 - RNA, 19 nt, Artificial Sequence
  Synthetic
gagccacauggagaaacgg

SEQ ID NO: 589126 - RNA, 20 nt, Artificial Sequence
  Synthetic
agagccacauggagaaacgg

SEQ ID NO: 589127 - RNA, 21 nt, Artificial Sequence
  Synthetic
aagagccacauggagaaacgg

SEQ ID NO: 589128 - RNA, 22 nt, Artificial Sequence
  Synthetic
aaagagccacauggagaaacgg

SEQ ID NO: 589129 - RNA, 23 nt, Artificial Sequence
  Synthetic
aaaagagccacauggagaaacgg

SEQ ID NO: 589130 - RNA, 24 nt, Artificial Sequence
  Synthetic
gaaaagagccacauggagaaacgg

SEQ ID NO: 589131 - RNA, 18 nt, Artificial Sequence
  Synthetic
uccuguuuuacugaacgg

SEQ ID NO: 589132 - RNA, 19 nt, Artificial Sequence
  Synthetic
uuccuguuuuacugaacgg

SEQ ID NO: 589133 - RNA, 20 nt, Artificial Sequence
  Synthetic
uuuccuguuuuacugaacgg

SEQ ID NO: 589134 - RNA, 21 nt, Artificial Sequence
  Synthetic
auuuccuguuuuacugaacgg

SEQ ID NO: 589135 - RNA, 22 nt, Artificial Sequence
  Synthetic
cauuuccuguuuuacugaacgg

SEQ ID NO: 589136 - RNA, 23 nt, Artificial Sequence
  Synthetic
gcauuuccuguuuuacugaacgg

SEQ ID NO: 589137 - RNA, 24 nt, Artificial Sequence
  Synthetic
agcauuuccuguuuuacugaacgg

SEQ ID NO: 589138 - RNA, 18 nt, Artificial Sequence
  Synthetic
gucagacagguuccacgg

SEQ ID NO: 589139 - RNA, 19 nt, Artificial Sequence
  Synthetic
ggucagacagguuccacgg

SEQ ID NO: 589140 - RNA, 20 nt, Artificial Sequence
  Synthetic
aggucagacagguuccacgg

SEQ ID NO: 589141 - RNA, 21 nt, Artificial Sequence
  Synthetic
aaggucagacagguuccacgg

SEQ ID NO: 589142 - RNA, 22 nt, Artificial Sequence
  Synthetic
caaggucagacagguuccacgg

SEQ ID NO: 589143 - RNA, 23 nt, Artificial Sequence
  Synthetic
ucaaggucagacagguuccacgg

SEQ ID NO: 589144 - RNA, 24 nt, Artificial Sequence
  Synthetic
uucaaggucagacagguuccacgg

SEQ ID NO: 589145 - RNA, 18 nt, Artificial Sequence
  Synthetic
gcaguuugccuggcacgg

SEQ ID NO: 589146 - RNA, 19 nt, Artificial Sequence
  Synthetic
agcaguuugccuggcacgg

SEQ ID NO: 589147 - RNA, 20 nt, Artificial Sequence
  Synthetic
gagcaguuugccuggcacgg

SEQ ID NO: 589148 - RNA, 21 nt, Artificial Sequence
  Synthetic
agagcaguuugccuggcacgg

SEQ ID NO: 589149 - RNA, 22 nt, Artificial Sequence
  Synthetic
gagagcaguuugccuggcacgg

SEQ ID NO: 589150 - RNA, 23 nt, Artificial Sequence
  Synthetic
ugagagcaguuugccuggcacgg

SEQ ID NO: 589151 - RNA, 24 nt, Artificial Sequence
  Synthetic
gugagagcaguuugccuggcacgg

SEQ ID NO: 589152 - RNA, 18 nt, Artificial Sequence
  Synthetic
gucagugccugugcacgg

SEQ ID NO: 589153 - RNA, 19 nt, Artificial Sequence
  Synthetic
agucagugccugugcacgg

SEQ ID NO: 589154 - RNA, 20 nt, Artificial Sequence
  Synthetic
cagucagugccugugcacgg

SEQ ID NO: 589155 - RNA, 21 nt, Artificial Sequence
  Synthetic
ucagucagugccugugcacgg

SEQ ID NO: 589156 - RNA, 22 nt, Artificial Sequence
  Synthetic
cucagucagugccugugcacgg

SEQ ID NO: 589157 - RNA, 23 nt, Artificial Sequence
  Synthetic
ccucagucagugccugugcacgg

SEQ ID NO: 589158 - RNA, 24 nt, Artificial Sequence
  Synthetic
gccucagucagugccugugcacgg

SEQ ID NO: 589159 - RNA, 18 nt, Artificial Sequence
  Synthetic
uuagucauuuuugcacgg

SEQ ID NO: 589160 - RNA, 19 nt, Artificial Sequence
  Synthetic
uuuagucauuuuugcacgg

SEQ ID NO: 589161 - RNA, 20 nt, Artificial Sequence
  Synthetic
auuuagucauuuuugcacgg

SEQ ID NO: 589162 - RNA, 21 nt, Artificial Sequence
  Synthetic
uauuuagucauuuuugcacgg

SEQ ID NO: 589163 - RNA, 22 nt, Artificial Sequence
  Synthetic
uuauuuagucauuuuugcacgg

SEQ ID NO: 589164 - RNA, 23 nt, Artificial Sequence
  Synthetic
uuuauuuagucauuuuugcacgg

SEQ ID NO: 589165 - RNA, 24 nt, Artificial Sequence
  Synthetic
auuuauuuagucauuuuugcacgg

SEQ ID NO: 589166 - RNA, 18 nt, Artificial Sequence
  Synthetic
cguggggugaggggacgg

SEQ ID NO: 589167 - RNA, 19 nt, Artificial Sequence
  Synthetic
ucguggggugaggggacgg

SEQ ID NO: 589168 - RNA, 20 nt, Artificial Sequence
  Synthetic
gucguggggugaggggacgg

SEQ ID NO: 589169 - RNA, 21 nt, Artificial Sequence
  Synthetic
ugucguggggugaggggacgg

SEQ ID NO: 589170 - RNA, 22 nt, Artificial Sequence
  Synthetic
cugucguggggugaggggacgg

SEQ ID NO: 589171 - RNA, 23 nt, Artificial Sequence
  Synthetic
ccugucguggggugaggggacgg

SEQ ID NO: 589172 - RNA, 24 nt, Artificial Sequence
  Synthetic
gccugucguggggugaggggacgg

SEQ ID NO: 589173 - RNA, 18 nt, Artificial Sequence
  Synthetic
uuauaaggggauggacgg

SEQ ID NO: 589174 - RNA, 19 nt, Artificial Sequence
  Synthetic
auuauaaggggauggacgg

SEQ ID NO: 589175 - RNA, 20 nt, Artificial Sequence
  Synthetic
cauuauaaggggauggacgg

SEQ ID NO: 589176 - RNA, 21 nt, Artificial Sequence
  Synthetic
ucauuauaaggggauggacgg

SEQ ID NO: 589177 - RNA, 22 nt, Artificial Sequence
  Synthetic
cucauuauaaggggauggacgg

SEQ ID NO: 589178 - RNA, 23 nt, Artificial Sequence
  Synthetic
ccucauuauaaggggauggacgg

SEQ ID NO: 589179 - RNA, 24 nt, Artificial Sequence
  Synthetic
accucauuauaaggggauggacgg

SEQ ID NO: 589180 - RNA, 18 nt, Artificial Sequence
  Synthetic
auuuaacacaugugacgg

SEQ ID NO: 589181 - RNA, 19 nt, Artificial Sequence
  Synthetic
cauuuaacacaugugacgg

SEQ ID NO: 589182 - RNA, 20 nt, Artificial Sequence
  Synthetic
acauuuaacacaugugacgg

SEQ ID NO: 589183 - RNA, 21 nt, Artificial Sequence
  Synthetic
aacauuuaacacaugugacgg

SEQ ID NO: 589184 - RNA, 22 nt, Artificial Sequence
  Synthetic
caacauuuaacacaugugacgg

SEQ ID NO: 589185 - RNA, 23 nt, Artificial Sequence
  Synthetic
gcaacauuuaacacaugugacgg

SEQ ID NO: 589186 - RNA, 24 nt, Artificial Sequence
  Synthetic
ugcaacauuuaacacaugugacgg

SEQ ID NO: 589187 - RNA, 18 nt, Artificial Sequence
  Synthetic
acucuacccuuuugacgg

SEQ ID NO: 589188 - RNA, 19 nt, Artificial Sequence
  Synthetic
aacucuacccuuuugacgg

SEQ ID NO: 589189 - RNA, 20 nt, Artificial Sequence
  Synthetic
aaacucuacccuuuugacgg

SEQ ID NO: 589190 - RNA, 21 nt, Artificial Sequence
  Synthetic
gaaacucuacccuuuugacgg

SEQ ID NO: 589191 - RNA, 22 nt, Artificial Sequence
  Synthetic
ggaaacucuacccuuuugacgg

SEQ ID NO: 589192 - RNA, 23 nt, Artificial Sequence
  Synthetic
aggaaacucuacccuuuugacgg

SEQ ID NO: 589193 - RNA, 24 nt, Artificial Sequence
  Synthetic
gaggaaacucuacccuuuugacgg

SEQ ID NO: 589194 - RNA, 18 nt, Artificial Sequence
  Synthetic
caccuuuuuauaauacgg

SEQ ID NO: 589195 - RNA, 19 nt, Artificial Sequence
  Synthetic
acaccuuuuuauaauacgg

SEQ ID NO: 589196 - RNA, 20 nt, Artificial Sequence
  Synthetic
uacaccuuuuuauaauacgg

SEQ ID NO: 589197 - RNA, 21 nt, Artificial Sequence
  Synthetic
uuacaccuuuuuauaauacgg

SEQ ID NO: 589198 - RNA, 22 nt, Artificial Sequence
  Synthetic
guuacaccuuuuuauaauacgg

SEQ ID NO: 589199 - RNA, 23 nt, Artificial Sequence
  Synthetic
aguuacaccuuuuuauaauacgg

SEQ ID NO: 589200 - RNA, 24 nt, Artificial Sequence
  Synthetic
gaguuacaccuuuuuauaauacgg

SEQ ID NO: 589201 - RNA, 18 nt, Artificial Sequence
  Synthetic
acucaggcauuacuacgg

SEQ ID NO: 589202 - RNA, 19 nt, Artificial Sequence
  Synthetic
cacucaggcauuacuacgg

SEQ ID NO: 589203 - RNA, 20 nt, Artificial Sequence
  Synthetic
acacucaggcauuacuacgg

SEQ ID NO: 589204 - RNA, 21 nt, Artificial Sequence
  Synthetic
gacacucaggcauuacuacgg

SEQ ID NO: 589205 - RNA, 22 nt, Artificial Sequence
  Synthetic
ugacacucaggcauuacuacgg

SEQ ID NO: 589206 - RNA, 23 nt, Artificial Sequence
  Synthetic
gugacacucaggcauuacuacgg

SEQ ID NO: 589207 - RNA, 24 nt, Artificial Sequence
  Synthetic
ugugacacucaggcauuacuacgg

SEQ ID NO: 589208 - RNA, 18 nt, Artificial Sequence
  Synthetic
cuguagucccagcuacgg

SEQ ID NO: 589209 - RNA, 19 nt, Artificial Sequence
  Synthetic
ccuguagucccagcuacgg

SEQ ID NO: 589210 - RNA, 20 nt, Artificial Sequence
  Synthetic
gccuguagucccagcuacgg

SEQ ID NO: 589211 - RNA, 21 nt, Artificial Sequence
  Synthetic
cgccuguagucccagcuacgg

SEQ ID NO: 589212 - RNA, 22 nt, Artificial Sequence
  Synthetic
gcgccuguagucccagcuacgg

SEQ ID NO: 589213 - RNA, 23 nt, Artificial Sequence
  Synthetic
ggcgccuguagucccagcuacgg

SEQ ID NO: 589214 - RNA, 24 nt, Artificial Sequence
  Synthetic
gggcgccuguagucccagcuacgg

SEQ ID NO: 589215 - RNA, 18 nt, Artificial Sequence
  Synthetic
gaggcagugagaguacgg

SEQ ID NO: 589216 - RNA, 19 nt, Artificial Sequence
  Synthetic
agaggcagugagaguacgg

SEQ ID NO: 589217 - RNA, 20 nt, Artificial Sequence
  Synthetic
uagaggcagugagaguacgg

SEQ ID NO: 589218 - RNA, 21 nt, Artificial Sequence
  Synthetic
uuagaggcagugagaguacgg

SEQ ID NO: 589219 - RNA, 22 nt, Artificial Sequence
  Synthetic
guuagaggcagugagaguacgg

SEQ ID NO: 589220 - RNA, 23 nt, Artificial Sequence
  Synthetic
gguuagaggcagugagaguacgg

SEQ ID NO: 589221 - RNA, 24 nt, Artificial Sequence
  Synthetic
ggguuagaggcagugagaguacgg

SEQ ID NO: 589222 - RNA, 18 nt, Artificial Sequence
  Synthetic
acucuacuugggguacgg

SEQ ID NO: 589223 - RNA, 19 nt, Artificial Sequence
  Synthetic
aacucuacuugggguacgg

SEQ ID NO: 589224 - RNA, 20 nt, Artificial Sequence
  Synthetic
uaacucuacuugggguacgg

SEQ ID NO: 589225 - RNA, 21 nt, Artificial Sequence
  Synthetic
cuaacucuacuugggguacgg

SEQ ID NO: 589226 - RNA, 22 nt, Artificial Sequence
  Synthetic
ucuaacucuacuugggguacgg

SEQ ID NO: 589227 - RNA, 23 nt, Artificial Sequence
  Synthetic
uucuaacucuacuugggguacgg

SEQ ID NO: 589228 - RNA, 24 nt, Artificial Sequence
  Synthetic
auucuaacucuacuugggguacgg

SEQ ID NO: 589229 - RNA, 18 nt, Artificial Sequence
  Synthetic
ccaucaguggucuuacgg

SEQ ID NO: 589230 - RNA, 19 nt, Artificial Sequence
  Synthetic
accaucaguggucuuacgg

SEQ ID NO: 589231 - RNA, 20 nt, Artificial Sequence
  Synthetic
caccaucaguggucuuacgg

SEQ ID NO: 589232 - RNA, 21 nt, Artificial Sequence
  Synthetic
acaccaucaguggucuuacgg

SEQ ID NO: 589233 - RNA, 22 nt, Artificial Sequence
  Synthetic
aacaccaucaguggucuuacgg

SEQ ID NO: 589234 - RNA, 23 nt, Artificial Sequence
  Synthetic
uaacaccaucaguggucuuacgg

SEQ ID NO: 589235 - RNA, 24 nt, Artificial Sequence
  Synthetic
auaacaccaucaguggucuuacgg

SEQ ID NO: 589236 - RNA, 18 nt, Artificial Sequence
  Synthetic
uagugguggggguuacgg

SEQ ID NO: 589237 - RNA, 19 nt, Artificial Sequence
  Synthetic
guagugguggggguuacgg

SEQ ID NO: 589238 - RNA, 20 nt, Artificial Sequence
  Synthetic
gguagugguggggguuacgg

SEQ ID NO: 589239 - RNA, 21 nt, Artificial Sequence
  Synthetic
ugguagugguggggguuacgg

SEQ ID NO: 589240 - RNA, 22 nt, Artificial Sequence
  Synthetic
augguagugguggggguuacgg

SEQ ID NO: 589241 - RNA, 23 nt, Artificial Sequence
  Synthetic
aaugguagugguggggguuacgg

SEQ ID NO: 589242 - RNA, 24 nt, Artificial Sequence
  Synthetic
aaaugguagugguggggguuacgg

SEQ ID NO: 589243 - RNA, 18 nt, Artificial Sequence
  Synthetic
agaccacgaacccaccgg

SEQ ID NO: 589244 - RNA, 19 nt, Artificial Sequence
  Synthetic
gagaccacgaacccaccgg
